United States Patent Application Publication US 2007/0048756 A1 - sequence listing, part 15

SEQ ID NO: 508410 - DNA, 33 bp, Homo sapien
taacttagtttcacaaggacagagaccttgtct

SEQ ID NO: 508411 - DNA, 33 bp, Homo sapien
atagtgatcatttgtacagacagaagacaagaa

SEQ ID NO: 508412 - DNA, 33 bp, Homo sapien
atagtgatcatttgtagagacagaagacaagaa

SEQ ID NO: 508413 - DNA, 33 bp, Homo sapien
tctacttttatccaaacctaattctgttatctc

SEQ ID NO: 508414 - DNA, 33 bp, Homo sapien
tctacttttatccaaatctaattctgttatctc

SEQ ID NO: 508415 - DNA, 33 bp, Homo sapien
taaaacagtgcagatactacatgtagatgattt

SEQ ID NO: 508416 - DNA, 33 bp, Homo sapien
taaaacagtgcagatattacatgtagatgattt

SEQ ID NO: 508417 - DNA, 33 bp, Homo sapien
gctgaagaatttctgcgctgcctgtgtgtgcaa

SEQ ID NO: 508418 - DNA, 33 bp, Homo sapien
gctgaagaatttctgctctgcctgtgtgtgcaa

SEQ ID NO: 508419 - DNA, 33 bp, Homo sapien
aacagcatggtactcacggcaaaacagagacat

SEQ ID NO: 508420 - DNA, 33 bp, Homo sapien
aacagcatggtactcatggcaaaacagagacat

SEQ ID NO: 508421 - DNA, 33 bp, Homo sapien; identical to SEQ ID NO: 508419

SEQ ID NO: 508422 - DNA, 33 bp, Homo sapien; identical to SEQ ID NO: 508420

SEQ ID NO: 508423 - DNA, 33 bp, Homo sapien
ttcactcaatacgaagccataatccttatcact

SEQ ID NO: 508424 - DNA, 33 bp, Homo sapien
ttcactcaatacgaaggcataatccttatcact

SEQ ID NO: 508425 - DNA, 33 bp, Homo sapien
tttgattgttaaaatggaactcattctgtctta

SEQ ID NO: 508426 - DNA, 33 bp, Homo sapien
tttgattgttaaaatgtaactcattctgtctta

SEQ ID NO: 508427 - DNA, 33 bp, Homo sapien
atccaaagctaattaaatgcttgtttaacacag

SEQ ID NO: 508428 - DNA, 33 bp, Homo sapien
atccaaagctaattaagtgcttgtttaacacag

SEQ ID NO: 508429 - DNA, 33 bp, Homo sapien
tctctttgttgttaagaagagcatggtctcctc

SEQ ID NO: 508430 - DNA, 33 bp, Homo sapien
tctctttgttgttaagtagagcatggtctcctc

SEQ ID NO: 508431 - DNA, 33 bp, Homo sapien
ttgatgctttctttctaaattgttaattcaaat

SEQ ID NO: 508432 - DNA, 33 bp, Homo sapien
ttgatgctttctttctcaattgttaattcaaat

SEQ ID NO: 508433 - DNA, 33 bp, Homo sapien
tccaccctatccctaacttacatgctctaagat

SEQ ID NO: 508434 - DNA, 33 bp, Homo sapien
tccaccctatccctaagttacatgctctaagat

SEQ ID NO: 508435 - DNA, 33 bp, Homo sapien
gaggtgggaggaagagaaaaataattgctaaga

SEQ ID NO: 508436 - DNA, 33 bp, Homo sapien
gaggtgggaggaagagcaaaataattgctaaga

SEQ ID NO: 508437 - DNA, 33 bp, Homo sapien
gagattgtataagaaacagtgaagaacaataaa

SEQ ID NO: 508438 - DNA, 33 bp, Homo sapien
gagattgtataagaaatagtgaagaacaataaa

SEQ ID NO: 508439 - DNA, 33 bp, Homo sapien
tatgggcttgagagtacaagacatggttgaaga

SEQ ID NO: 508440 - DNA, 33 bp, Homo sapien
tatgggcttgagagtagaagacatggttgaaga

SEQ ID NO: 508441 - DNA, 33 bp, Homo sapien
ctgtaggagtttcttacctcattgttgctcaag

SEQ ID NO: 508442 - DNA, 33 bp, Homo sapien
ctgtaggagtttcttatctcattgttgctcaag

SEQ ID NO: 508443 - DNA, 33 bp, Homo sapien
gttatgttttgctgcaaattaaatcattcccca

SEQ ID NO: 508444 - DNA, 33 bp, Homo sapien
gttatgttttgctgcagattaaatcattcccca

SEQ ID NO: 508445 - DNA, 33 bp, Homo sapien
tctgtctgtacaagtaagaatttgtatactagg

SEQ ID NO: 508446 - DNA, 33 bp, Homo sapien
tctgtctgtacaagtacgaatttgtatactagg

SEQ ID NO: 508447 - DNA, 33 bp, Homo sapien
gtattccactttagacaattgctatctcttcca

SEQ ID NO: 508448 - DNA, 33 bp, Homo sapien
gtattccactttagacgattgctatctcttcca

SEQ ID NO: 508449 - DNA, 33 bp, Homo sapien
aagtgagaataccaggcaaattgttctgtttca

SEQ ID NO: 508450 - DNA, 33 bp, Homo sapien
aagtgagaataccagggaaattgttctgtttca

SEQ ID NO: 508451 - DNA, 33 bp, Homo sapien
tgaagtctgggtcaacaatctaccagagtttct

SEQ ID NO: 508452 - DNA, 33 bp, Homo sapien
tgaagtctgggtcaacgatctaccagagtttct

SEQ ID NO: 508453 - DNA, 33 bp, Homo sapien
tactagtctaattcggaaaactaagagaaaccg

SEQ ID NO: 508454 - DNA, 33 bp, Homo sapien
tactagtctaattcgggaaactaagagaaaccg

SEQ ID NO: 508455 - DNA, 33 bp, Homo sapien
gcaggagctaacaatccataaccttcctggcaa

SEQ ID NO: 508456 - DNA, 33 bp, Homo sapien
gcaggagctaacaatctataaccttcctggcaa

SEQ ID NO: 508457 - DNA, 33 bp, Homo sapien
ggagctgaggtggctccaaccctttctcctgat

SEQ ID NO: 508458 - DNA, 33 bp, Homo sapien
ggagctgaggtggctcgaaccctttctcctgat

SEQ ID NO: 508459 - DNA, 33 bp, Homo sapien
aaaatactgacaaagaaatccatctggattatt

SEQ ID NO: 508460 - DNA, 33 bp, Homo sapien
aaaatactgacaaagagatccatctggattatt

SEQ ID NO: 508461 - DNA, 33 bp, Homo sapien
acgggcttggtaactgaatgttgttgtttgctt

SEQ ID NO: 508462 - DNA, 33 bp, Homo sapien
acgggcttggtaactgtatgttgttgtttgctt

SEQ ID NO: 508463 - DNA, 33 bp, Homo sapien
cctcataagaacccaactgaatgcagaataact

SEQ ID NO: 508464 - DNA, 33 bp, Homo sapien
cctcataagaacccaattgaatgcagaataact

SEQ ID NO: 508465 - DNA, 33 bp, Homo sapien
actagcctacattcacacagcaaatttgttctt

SEQ ID NO: 508466 - DNA, 33 bp, Homo sapien
actagcctacattcacgcagcaaatttgttctt

SEQ ID NO: 508467 - DNA, 33 bp, Homo sapien
taaatattagctgttgcaatcctaagtaaatca

SEQ ID NO: 508468 - DNA, 33 bp, Homo sapien
taaatattagctgttggaatcctaagtaaatca

SEQ ID NO: 508469 - DNA, 33 bp, Homo sapien
taaatccatcttaacgaaaagaagctagccagt

SEQ ID NO: 508470 - DNA, 33 bp, Homo sapien
taaatccatcttaacgcaaagaagctagccagt

SEQ ID NO: 508471 - DNA, 33 bp, Homo sapien
ttctggagttttgcccaggaaacacttctcatc

SEQ ID NO: 508472 - DNA, 33 bp, Homo sapien
ttctggagttttgcccgggaaacacttctcatc

SEQ ID NO: 508473 - DNA, 33 bp, Homo sapien
ttattctttgtgtaaacgtgtgtatttattttg

SEQ ID NO: 508474 - DNA, 33 bp, Homo sapien
ttattctttgtgtaaatgtgtgtatttattttg

SEQ ID NO: 508475 - DNA, 33 bp, Homo sapien
cctaggttcaggtaagactcaactggtccataa

SEQ ID NO: 508476 - DNA, 33 bp, Homo sapien
cctaggttcaggtaaggctcaactggtccataa

SEQ ID NO: 508477 - DNA, 33 bp, Homo sapien
tcttcatcagatcagcacaatgcgtaacttact

SEQ ID NO: 508478 - DNA, 33 bp, Homo sapien
tcttcatcagatcagcgcaatgcgtaacttact

SEQ ID NO: 508479 - DNA, 33 bp, Homo sapien
tgtagagtcttctaaagctccctgtttctctct

SEQ ID NO: 508480 - DNA, 33 bp, Homo sapien
tgtagagtcttctaaatctccctgtttctctct

SEQ ID NO: 508481 - DNA, 33 bp, Homo sapien
acagataatcaaatgaaggctgtgagacaaaaa

SEQ ID NO: 508482 - DNA, 33 bp, Homo sapien
acagataatcaaatgacggctgtgagacaaaaa

SEQ ID NO: 508483 - DNA, 33 bp, Homo sapien
atttccagccaagatgaactggagtggaagact

SEQ ID NO: 508484 - DNA, 33 bp, Homo sapien
atttccagccaagatgtactggagtggaagact

SEQ ID NO: 508485 - DNA, 33 bp, Homo sapien
caggtctactgacagaaaagcaaaatgaattgg

SEQ ID NO: 508486 - DNA, 33 bp, Homo sapien
caggtctactgacagagaagcaaaatgaattgg

SEQ ID NO: 508487 - DNA, 33 bp, Homo sapien
aaagtgtggagtatcaagtatgcctcatctgac

SEQ ID NO: 508488 - DNA, 33 bp, Homo sapien
aaagtgtggagtatcaggtatgcctcatctgac

SEQ ID NO: 508489 - DNA, 33 bp, Homo sapien
gttttgcagcatgggaaggatattggataggcc

SEQ ID NO: 508490 - DNA, 33 bp, Homo sapien
gttttgcagcatgggatggatattggataggcc

SEQ ID NO: 508491 - DNA, 33 bp, Homo sapien
gccacaactattgacaacatgacctgtgctcct

SEQ ID NO: 508492 - DNA, 33 bp, Homo sapien
gccacaactattgacaccatgacctgtgctcct

SEQ ID NO: 508493 - DNA, 33 bp, Homo sapien
acttgaattcaacagcagagtgacagaaaaccc

SEQ ID NO: 508494 - DNA, 33 bp, Homo sapien
acttgaattcaacagcggagtgacagaaaaccc

SEQ ID NO: 508495 - DNA, 33 bp, Homo sapien
agcttcctctcttgacgaacactgttgtgcagt

SEQ ID NO: 508496 - DNA, 33 bp, Homo sapien
agcttcctctcttgactaacactgttgtgcagt

SEQ ID NO: 508497 - DNA, 33 bp, Homo sapien
tttagcaaatggaatgcaagagaagtggtgctg

SEQ ID NO: 508498 - DNA, 33 bp, Homo sapien
tttagcaaatggaatgtaagagaagtggtgctg

SEQ ID NO: 508499 - DNA, 33 bp, Homo sapien
ctgtaggtgcttagtcaaaggcaagcctaacat

SEQ ID NO: 508500 - DNA, 33 bp, Homo sapien
ctgtaggtgcttagtcgaaggcaagcctaacat

SEQ ID NO: 508501 - DNA, 33 bp, Homo sapien
tggttaaagcgaggatcaaagcatgcagcatca

SEQ ID NO: 508502 - DNA, 33 bp, Homo sapien
tggttaaagcgaggattaaagcatgcagcatca

SEQ ID NO: 508503 - DNA, 33 bp, Homo sapien
cttctccaagtgggacaaaaacagctaaatcca

SEQ ID NO: 508504 - DNA, 33 bp, Homo sapien
cttctccaagtgggacgaaaacagctaaatcca

SEQ ID NO: 508505 - DNA, 33 bp, Homo sapien
tgttgaatttgtgaaacgtacatcctgggatta

SEQ ID NO: 508506 - DNA, 33 bp, Homo sapien
tgttgaatttgtgaaaggtacatcctgggatta

SEQ ID NO: 508507 - DNA, 33 bp, Homo sapien
ttgcttggatgataaaatgtatgttgaatttgt

SEQ ID NO: 508508 - DNA, 33 bp, Homo sapien
ttgcttggatgataaactgtatgttgaatttgt

SEQ ID NO: 508509 - DNA, 33 bp, Homo sapien
taggttcggtgcattaaacgcatttttggcata

SEQ ID NO: 508510 - DNA, 33 bp, Homo sapien
taggttcggtgcattagacgcatttttggcata

SEQ ID NO: 508511 - DNA, 33 bp, Homo sapien
gctttttgtctttctgcaagatgactataatct

SEQ ID NO: 508512 - DNA, 33 bp, Homo sapien
gctttttgtctttctggaagatgactataatct

SEQ ID NO: 508513 - DNA, 33 bp, Homo sapien
gatcaccaagtttttgaagcaccccattgcctg

SEQ ID NO: 508514 - DNA, 33 bp, Homo sapien
gatcaccaagtttttggagcaccccattgcctg

SEQ ID NO: 508515 - DNA, 33 bp, Homo sapien
atgcagcagatcctcccatgctccacacccagg

SEQ ID NO: 508516 - DNA, 33 bp, Homo sapien
atgcagcagatcctcctatgctccacacccagg

SEQ ID NO: 508517 - DNA, 33 bp, Homo sapien
gtgatggcatccagccaataaaaataagtgaag

SEQ ID NO: 508518 - DNA, 33 bp, Homo sapien
gtgatggcatccagccgataaaaataagtgaag

SEQ ID NO: 508519 - DNA, 33 bp, Homo sapien
tccggattcacttagaccactcaacacttctaa

SEQ ID NO: 508520 - DNA, 33 bp, Homo sapien
tccggattcacttagatcactcaacacttctaa

SEQ ID NO: 508521 - DNA, 33 bp, Homo sapien
tccctgagtaaattgccagtgcttctctgagtt

SEQ ID NO: 508522 - DNA, 33 bp, Homo sapien
tccctgagtaaattgcgagtgcttctctgagtt

SEQ ID NO: 508523 - DNA, 33 bp, Homo sapien
agaatcagtcctgccaggtagagcttggaggtg

SEQ ID NO: 508524 - DNA, 33 bp, Homo sapien
agaatcagtcctgccatgtagagcttggaggtg

SEQ ID NO: 508525 - DNA, 33 bp, Homo sapien
aggctatgtagaggaacggactaagaaaatata

SEQ ID NO: 508526 - DNA, 33 bp, Homo sapien
aggctatgtagaggaatggactaagaaaatata

SEQ ID NO: 508527 - DNA, 33 bp, Homo sapien
ctactaaataatgcagaataatgttcccatctt

SEQ ID NO: 508528 - DNA, 33 bp, Homo sapien
ctactaaataatgcagcataatgttcccatctt

SEQ ID NO: 508529 - DNA, 33 bp, Homo sapien
acacattcagagtacacatacagagctgccatg

SEQ ID NO: 508530 - DNA, 33 bp, Homo sapien
acacattcagagtacagatacagagctgccatg

SEQ ID NO: 508531 - DNA, 33 bp, Homo sapien
ggaggacatctgagtgaaaagtctggatcataa

SEQ ID NO: 508532 - DNA, 33 bp, Homo sapien
ggaggacatctgagtgcaaagtctggatcataa

SEQ ID NO: 508533 - DNA, 33 bp, Homo sapien
agtcttaccaacaacaagattgtagcccactga

SEQ ID NO: 508534 - DNA, 33 bp, Homo sapien
agtcttaccaacaacacgattgtagcccactga

SEQ ID NO: 508535 - DNA, 33 bp, Homo sapien
atcccatgttaagtaacacagagataagagcct

SEQ ID NO: 508536 - DNA, 33 bp, Homo sapien
atcccatgttaagtaagacagagataagagcct

SEQ ID NO: 508537 - DNA, 33 bp, Homo sapien
atctcattcatttttgcagcagcatattattcc

SEQ ID NO: 508538 - DNA, 33 bp, Homo sapien
atctcattcatttttgtagcagcatattattcc

SEQ ID NO: 508539 - DNA, 33 bp, Homo sapien
tatcaggatcatacagaaaaacgtgatctcact

SEQ ID NO: 508540 - DNA, 33 bp, Homo sapien
tatcaggatcatacaggaaaacgtgatctcact

SEQ ID NO: 508541 - DNA, 33 bp, Homo sapien
ggcccttactggtagaatctaagtcactcatct

SEQ ID NO: 508542 - DNA, 33 bp, Homo sapien
ggcccttactggtagagtctaagtcactcatct

SEQ ID NO: 508543 - DNA, 33 bp, Homo sapien
aggtagattatgaaaaagtggcagatacagtat

SEQ ID NO: 508544 - DNA, 33 bp, Homo sapien
aggtagattatgaaaaggtggcagatacagtat

SEQ ID NO: 508545 - DNA, 33 bp, Homo sapien
tatgtctcctaactccacaagagattatgtctg

SEQ ID NO: 508546 - DNA, 33 bp, Homo sapien
tatgtctcctaactccgcaagagattatgtctg

SEQ ID NO: 508547 - DNA, 33 bp, Homo sapien
gtaagatagccaaaaacgttgatagctaatatt

SEQ ID NO: 508548 - DNA, 33 bp, Homo sapien
gtaagatagccaaaaatgttgatagctaatatt

SEQ ID NO: 508549 - DNA, 33 bp, Homo sapien
acattgattcacccaaaaaaaattattattggc

SEQ ID NO: 508550 - DNA, 33 bp, Homo sapien
acattgattcacccaacaaaaattattattggc

SEQ ID NO: 508551 - DNA, 33 bp, Homo sapien
tcaagtacctgcccaacgtaaaacctgatacat

SEQ ID NO: 508552 - DNA, 33 bp, Homo sapien
tcaagtacctgcccaatgtaaaacctgatacat

SEQ ID NO: 508553 - DNA, 33 bp, Homo sapien
atcctgcaatggaaaacagaaaagaatgaagga

SEQ ID NO: 508554 - DNA, 33 bp, Homo sapien
atcctgcaatggaaaatagaaaagaatgaagga

SEQ ID NO: 508555 - DNA, 33 bp, Homo sapien
gttcctgtgaaaggaaatcaagaaggttcctga

SEQ ID NO: 508556 - DNA, 33 bp, Homo sapien
gttcctgtgaaaggaagtcaagaaggttcctga

SEQ ID NO: 508557 - DNA, 33 bp, Homo sapien
gagagcttgaaaaatcagagtgaaattacgttc

SEQ ID NO: 508558 - DNA, 33 bp, Homo sapien
gagagcttgaaaaatcggagtgaaattacgttc

SEQ ID NO: 508559 - DNA, 33 bp, Homo sapien
taataaaacagaggctcactcttgtggatggtg

SEQ ID NO: 508560 - DNA, 33 bp, Homo sapien
taataaaacagaggcttactcttgtggatggtg

SEQ ID NO: 508561 - DNA, 33 bp, Homo sapien
ggtatttcagtcatcaaactacgctcagttagc

SEQ ID NO: 508562 - DNA, 33 bp, Homo sapien
ggtatttcagtcatcacactacgctcagttagc

SEQ ID NO: 508563 - DNA, 33 bp, Homo sapien
ctacttcccaccagacaaatgagcatatgttca

SEQ ID NO: 508564 - DNA, 33 bp, Homo sapien
ctacttcccaccagactaatgagcatatgttca

SEQ ID NO: 508565 - DNA, 33 bp, Homo sapien
gccagagccttttcagaatagactttctatgcc

SEQ ID NO: 508566 - DNA, 33 bp, Homo sapien
gccagagccttttcaggatagactttctatgcc

SEQ ID NO: 508567 - DNA, 33 bp, Homo sapien
aatctaattctagggacgttaaaccatttctag

SEQ ID NO: 508568 - DNA, 33 bp, Homo sapien
aatctaattctagggatgttaaaccatttctag

SEQ ID NO: 508569 - DNA, 33 bp, Homo sapien
aattacacattttctgaaacttctacctacact

SEQ ID NO: 508570 - DNA, 33 bp, Homo sapien
aattacacattttctggaacttctacctacact

SEQ ID NO: 508571 - DNA, 33 bp, Homo sapien
gtattgacaagtaaacaaattaagtcttctatt

SEQ ID NO: 508572 - DNA, 33 bp, Homo sapien
gtattgacaagtaaacgaattaagtcttctatt

SEQ ID NO: 508573 - DNA, 33 bp, Homo sapien
gttatgtgatgaaaaaaattgctgtcttagagg

SEQ ID NO: 508574 - DNA, 33 bp, Homo sapien
gttatgtgatgaaaaatattgctgtcttagagg

SEQ ID NO: 508575 - DNA, 33 bp, Homo sapien
gtggaacagtctcataatactaatgggctggga

SEQ ID NO: 508576 - DNA, 33 bp, Homo sapien
gtggaacagtctcatagtactaatgggctggga

SEQ ID NO: 508577 - DNA, 33 bp, Homo sapien
taggtgagcagattaacctattggaaataagaa

SEQ ID NO: 508578 - DNA, 33 bp, Homo sapien
taggtgagcagattaagctattggaaataagaa

SEQ ID NO: 508579 - DNA, 33 bp, Homo sapien
tatttaaatagaggtaacaattctttctgcagt

SEQ ID NO: 508580 - DNA, 33 bp, Homo sapien
tatttaaatagaggtatcaattctttctgcagt

SEQ ID NO: 508581 - DNA, 33 bp, Homo sapien
aggaaccaaaaggttaagacagccaagtaggat

SEQ ID NO: 508582 - DNA, 33 bp, Homo sapien
aggaaccaaaaggttacgacagccaagtaggat

SEQ ID NO: 508583 - DNA, 33 bp, Homo sapien
ggagagaaaggtcaccacaggaacagaaatagg

SEQ ID NO: 508584 - DNA, 33 bp, Homo sapien
ggagagaaaggtcaccgcaggaacagaaatagg

SEQ ID NO: 508585 - DNA, 33 bp, Homo sapien
ttaatgcctattgtgacgttcattttcaagaaa

SEQ ID NO: 508586 - DNA, 33 bp, Homo sapien
ttaatgcctattgtgatgttcattttcaagaaa

SEQ ID NO: 508587 - DNA, 33 bp, Homo sapien
atctgcaggactggaaagttttgaacattctca

SEQ ID NO: 508588 - DNA, 33 bp, Homo sapien
atctgcaggactggaaggttttgaacattctca

SEQ ID NO: 508589 - DNA, 33 bp, Homo sapien
ccaattgtgcaagtcccgatatatcttttagct

SEQ ID NO: 508590 - DNA, 33 bp, Homo sapien
ccaattgtgcaagtcctgatatatcttttagct

SEQ ID NO: 508591 - DNA, 33 bp, Homo sapien
gaattacaccaggctaactttcctttgtattat

SEQ ID NO: 508592 - DNA, 33 bp, Homo sapien
gaattacaccaggctacctttcctttgtattat

SEQ ID NO: 508593 - DNA, 33 bp, Homo sapien
aagtggggcaagactccgaaagtaggctactat

SEQ ID NO: 508594 - DNA, 33 bp, Homo sapien
aagtggggcaagactctgaaagtaggctactat

SEQ ID NO: 508595 - DNA, 33 bp, Homo sapien
tgaaaagcagctatagaaacaaatactctcatg

SEQ ID NO: 508596 - DNA, 33 bp, Homo sapien
tgaaaagcagctataggaacaaatactctcatg

SEQ ID NO: 508597 - DNA, 33 bp, Homo sapien
acaggaacacaacaaaattaaccaatggttcca

SEQ ID NO: 508598 - DNA, 33 bp, Homo sapien
acaggaacacaacaaagttaaccaatggttcca

SEQ ID NO: 508599 - DNA, 33 bp, Homo sapien
tgaagaaaaatccaacaaatccaattagaagtg

SEQ ID NO: 508600 - DNA, 33 bp, Homo sapien
tgaagaaaaatccaacgaatccaattagaagtg

SEQ ID NO: 508601 - DNA, 33 bp, Homo sapien
caaatgagaagaaaccagaaaaccaactctggt

SEQ ID NO: 508602 - DNA, 33 bp, Homo sapien
caaatgagaagaaaccggaaaaccaactctggt

SEQ ID NO: 508603 - DNA, 33 bp, Homo sapien
ctggacaatcctatataataaagatgctgtgta

SEQ ID NO: 508604 - DNA, 33 bp, Homo sapien
ctggacaatcctatatgataaagatgctgtgta

SEQ ID NO: 508605 - DNA, 33 bp, Homo sapien
tctcccacagaagaacagcagatttcggactct

SEQ ID NO: 508606 - DNA, 33 bp, Homo sapien
tctcccacagaagaacggcagatttcggactct

SEQ ID NO: 508607 - DNA, 33 bp, Homo sapien
aagtacacccaattaggaacagggatcagatat

SEQ ID NO: 508608 - DNA, 33 bp, Homo sapien
aagtacacccaattagtaacagggatcagatat

SEQ ID NO: 508609 - DNA, 33 bp, Homo sapien
taaagaacactagtaacctgacttaaaggactt

SEQ ID NO: 508610 - DNA, 33 bp, Homo sapien
taaagaacactagtaagctgacttaaaggactt

SEQ ID NO: 508611 - DNA, 33 bp, Homo sapien
tattattccatagtaacccacaaaactccagaa

SEQ ID NO: 508612 - DNA, 33 bp, Homo sapien
tattattccatagtaatccacaaaactccagaa

SEQ ID NO: 508613 - DNA, 33 bp, Homo sapien
acatgtaactagaagcggatgaaatagattgtt

SEQ ID NO: 508614 - DNA, 33 bp, Homo sapien
acatgtaactagaagctgatgaaatagattgtt

SEQ ID NO: 508615 - DNA, 33 bp, Homo sapien
aaccctaagaaaaaaacggatgcagaggatgta

SEQ ID NO: 508616 - DNA, 33 bp, Homo sapien
aaccctaagaaaaaaatggatgcagaggatgta

SEQ ID NO: 508617 - DNA, 33 bp, Homo sapien
aggacctcatacaatacatggcaaactataggt

SEQ ID NO: 508618 - DNA, 33 bp, Homo sapien
aggacctcatacaatatatggcaaactataggt

SEQ ID NO: 508619 - DNA, 33 bp, Homo sapien
taaaaccaatcctcaccaaatttttcagaaagc

SEQ ID NO: 508620 - DNA, 33 bp, Homo sapien
taaaaccaatcctcacgaaatttttcagaaagc

SEQ ID NO: 508621 - DNA, 33 bp, Homo sapien
aacacatggacaaaagaagagggacaagacaca

SEQ ID NO: 508622 - DNA, 33 bp, Homo sapien
aacacatggacaaaaggagagggacaagacaca

SEQ ID NO: 508623 - DNA, 33 bp, Homo sapien
cctaaggcttggtccaatctctctagcctttct

SEQ ID NO: 508624 - DNA, 33 bp, Homo sapien
cctaaggcttggtccagtctctctagcctttct

SEQ ID NO: 508625 - DNA, 33 bp, Homo sapien
cagagtatccatagcacacagctcatctccagg

SEQ ID NO: 508626 - DNA, 33 bp, Homo sapien
cagagtatccatagcatacagctcatctccagg

SEQ ID NO: 508627 - DNA, 33 bp, Homo sapien
accaccagacctgttacagagatggggtcatac

SEQ ID NO: 508628 - DNA, 33 bp, Homo sapien
accaccagacctgttatagagatggggtcatac

SEQ ID NO: 508629 - DNA, 33 bp, Homo sapien
gtaaagaaatcttgatcaccttgagaaagtgct

SEQ ID NO: 508630 - DNA, 33 bp, Homo sapien
gtaaagaaatcttgattaccttgagaaagtgct

SEQ ID NO: 508631 - DNA, 33 bp, Homo sapien
ggatccacatcctcaaccatctttcaataagtg

SEQ ID NO: 508632 - DNA, 33 bp, Homo sapien
ggatccacatcctcaatcatctttcaataagtg

SEQ ID NO: 508633 - DNA, 33 bp, Homo sapien
tcataaggcaaatgtccaccagttgatctgcat

SEQ ID NO: 508634 - DNA, 33 bp, Homo sapien
tcataaggcaaatgtctaccagttgatctgcat

SEQ ID NO: 508635 - DNA, 33 bp, Homo sapien
caggcagtttcctactcagatgatacatcttaa

SEQ ID NO: 508636 - DNA, 33 bp, Homo sapien
caggcagtttcctactgagatgatacatcttaa

SEQ ID NO: 508637 - DNA, 33 bp, Homo sapien
actcatatatctaaggacactaggagaattaaa

SEQ ID NO: 508638 - DNA, 33 bp, Homo sapien
actcatatatctaagggcactaggagaattaaa

SEQ ID NO: 508639 - DNA, 33 bp, Homo sapien
cttctaaaattattgggcatcccatctgcttac

SEQ ID NO: 508640 - DNA, 33 bp, Homo sapien
cttctaaaattattggtcatcccatctgcttac

SEQ ID NO: 508641 - DNA, 33 bp, Homo sapien
catcatctccagtttaacttaagtatcattggt

SEQ ID NO: 508642 - DNA, 33 bp, Homo sapien
catcatctccagtttatcttaagtatcattggt

SEQ ID NO: 508643 - DNA, 33 bp, Homo sapien
gtgtgaacacttggaaactgttgtgctgaacaa

SEQ ID NO: 508644 - DNA, 33 bp, Homo sapien
gtgtgaacacttggaagctgttgtgctgaacaa

SEQ ID NO: 508645 - DNA, 33 bp, Homo sapien
aagcttataggagtcaatagcttacgttggctt

SEQ ID NO: 508646 - DNA, 33 bp, Homo sapien
aagcttataggagtcagtagcttacgttggctt

SEQ ID NO: 508647 - DNA, 33 bp, Homo sapien
gaaaatattgatgccacgcttactccccagaga

SEQ ID NO: 508648 - DNA, 33 bp, Homo sapien
gaaaatattgatgccatgcttactccccagaga

SEQ ID NO: 508649 - DNA, 33 bp, Homo sapien
ctatgggtgatactcaataactgacaatgtagc

SEQ ID NO: 508650 - DNA, 33 bp, Homo sapien
ctatgggtgatactcagtaactgacaatgtagc

SEQ ID NO: 508651 - DNA, 33 bp, Homo sapien
agttaaactgacctgaaatgctttgcagcagaa

SEQ ID NO: 508652 - DNA, 33 bp, Homo sapien
agttaaactgacctgagatgctttgcagcagaa

SEQ ID NO: 508653 - DNA, 33 bp, Homo sapien
atgccctctgttctacacttcacaagtttgttc

SEQ ID NO: 508654 - DNA, 33 bp, Homo sapien
atgccctctgttctacgcttcacaagtttgttc

SEQ ID NO: 508655 - DNA, 33 bp, Homo sapien
tgtgcataactaaagcggatgctagaagacagt

SEQ ID NO: 508656 - DNA, 33 bp, Homo sapien
tgtgcataactaaagctgatgctagaagacagt

SEQ ID NO: 508657 - DNA, 33 bp, Homo sapien
ttctttggctttcccaaatattccataaaacca

SEQ ID NO: 508658 - DNA, 33 bp, Homo sapien
ttctttggctttcccagatattccataaaacca

SEQ ID NO: 508659 - DNA, 33 bp, Homo sapien
caagagttccataaaaggtgtatatatgcttat

SEQ ID NO: 508660 - DNA, 33 bp, Homo sapien
caagagttccataaaatgtgtatatatgcttat

SEQ ID NO: 508661 - DNA, 33 bp, Homo sapien
aagggcaattgtctcccatgaattttaccaatg

SEQ ID NO: 508662 - DNA, 33 bp, Homo sapien
aagggcaattgtctccgatgaattttaccaatg

SEQ ID NO: 508663 - DNA, 33 bp, Homo sapien
actactgggcactataacttttcagagcaggca

SEQ ID NO: 508664 - DNA, 33 bp, Homo sapien
actactgggcactatagcttttcagagcaggca

SEQ ID NO: 508665 - DNA, 33 bp, Homo sapien
tctcactctgggtaacaaatgaggaattttgag

SEQ ID NO: 508666 - DNA, 33 bp, Homo sapien
tctcactctgggtaacgaatgaggaattttgag

SEQ ID NO: 508667 - DNA, 33 bp, Homo sapien
agaaaggagaacaggaagattttgcacaccaat

SEQ ID NO: 508668 - DNA, 33 bp, Homo sapien
agaaaggagaacaggaggattttgcacaccaat

SEQ ID NO: 508669 - DNA, 33 bp, Homo sapien
gtaaacaatgattctcactcacatattgttttt

SEQ ID NO: 508670 - DNA, 33 bp, Homo sapien
gtaaacaatgattctcgctcacatattgttttt

SEQ ID NO: 508671 - DNA, 33 bp, Homo sapien
tggcctgacattctacccattggcctatgatgc

SEQ ID NO: 508672 - DNA, 33 bp, Homo sapien
tggcctgacattctactcattggcctatgatgc

SEQ ID NO: 508673 - DNA, 33 bp, Homo sapien
ttctctctagttaaaaagcccttcataatctat

SEQ ID NO: 508674 - DNA, 33 bp, Homo sapien
ttctctctagttaaaatgcccttcataatctat

SEQ ID NO: 508675 - DNA, 33 bp, Homo sapien
aagtgtaatgtgtttgaagcatagattatgaag

SEQ ID NO: 508676 - DNA, 33 bp, Homo sapien
aagtgtaatgtgtttgtagcatagattatgaag

SEQ ID NO: 508677 - DNA, 33 bp, Homo sapien
ctcctaaggtatcaaaaggtcaaatttgatatt

SEQ ID NO: 508678 - DNA, 33 bp, Homo sapien
ctcctaaggtatcaaacggtcaaatttgatatt

SEQ ID NO: 508679 - DNA, 33 bp, Homo sapien
acatgaaagaattcaacccaagcagctacctct

SEQ ID NO: 508680 - DNA, 33 bp, Homo sapien
acatgaaagaattcaatccaagcagctacctct

SEQ ID NO: 508681 - DNA, 33 bp, Homo sapien
gaaatcatagttgacacagacaaatgaaaaacc

SEQ ID NO: 508682 - DNA, 33 bp, Homo sapien
gaaatcatagttgacagagacaaatgaaaaacc

SEQ ID NO: 508683 - DNA, 33 bp, Homo sapien
gcctctaaagcttgtacggaaccaggaaaaaag

SEQ ID NO: 508684 - DNA, 33 bp, Homo sapien
gcctctaaagcttgtatggaaccaggaaaaaag

SEQ ID NO: 508685 - DNA, 33 bp, Homo sapien
cgaaataaacatgagcaagaggttatctgaaat

SEQ ID NO: 508686 - DNA, 33 bp, Homo sapien
cgaaataaacatgagcgagaggttatctgaaat

SEQ ID NO: 508687 - DNA, 33 bp, Homo sapien
aaacactatgttcataccctttacaaaataaac

SEQ ID NO: 508688 - DNA, 33 bp, Homo sapien
aaacactatgttcatatcctttacaaaataaac

SEQ ID NO: 508689 - DNA, 33 bp, Homo sapien
ttagccaatatgttcaaaagaaagactcatgca

SEQ ID NO: 508690 - DNA, 33 bp, Homo sapien
ttagccaatatgttcacaagaaagactcatgca

SEQ ID NO: 508691 - DNA, 33 bp, Homo sapien
tgaggtgggtgatttaagatacgtttcttcaaa

SEQ ID NO: 508692 - DNA, 33 bp, Homo sapien
tgaggtgggtgatttaggatacgtttcttcaaa

SEQ ID NO: 508693 - DNA, 33 bp, Homo sapien
gaaaatgaaagtctgacgcatatgtgaagagtt

SEQ ID NO: 508694 - DNA, 33 bp, Homo sapien
gaaaatgaaagtctgatgcatatgtgaagagtt

SEQ ID NO: 508695 - DNA, 33 bp, Homo sapien
ttaaattaaagggccaactgacttccataggcc

SEQ ID NO: 508696 - DNA, 33 bp, Homo sapien
ttaaattaaagggccagctgacttccataggcc

SEQ ID NO: 508697 - DNA, 33 bp, Homo sapien
aacttttaagcccccaagtcttcattgctaaca

SEQ ID NO: 508698 - DNA, 33 bp, Homo sapien
aacttttaagcccccatgtcttcattgctaaca

SEQ ID NO: 508699 - DNA, 33 bp, Homo sapien
ttaggaggtaagaagacgcagtacaaatgggtc

SEQ ID NO: 508700 - DNA, 33 bp, Homo sapien
ttaggaggtaagaagatgcagtacaaatgggtc

SEQ ID NO: 508701 - DNA, 33 bp, Homo sapien
ctccaatactcaaagtaaagactccttccacct

SEQ ID NO: 508702 - DNA, 33 bp, Homo sapien
ctccaatactcaaagtgaagactccttccacct

SEQ ID NO: 508703 - DNA, 33 bp, Homo sapien
ccataagagaataaaaagactgaggtaccccaa

SEQ ID NO: 508704 - DNA, 33 bp, Homo sapien
ccataagagaataaaatgactgaggtaccccaa

SEQ ID NO: 508705 - DNA, 33 bp, Homo sapien
ttctaaaaacagtgtacaagtgctccctttgct

SEQ ID NO: 508706 - DNA, 33 bp, Homo sapien
ttctaaaaacagtgtataagtgctccctttgct

SEQ ID NO: 508707 - DNA, 33 bp, Homo sapien
caagcaatgtggaaacaagtcgctattcaacaa

SEQ ID NO: 508708 - DNA, 33 bp, Homo sapien
caagcaatgtggaaacgagtcgctattcaacaa

SEQ ID NO: 508709 - DNA, 33 bp, Homo sapien
ctcagattcttttgcacctttgtaggctgatct

SEQ ID NO: 508710 - DNA, 33 bp, Homo sapien
ctcagattcttttgcatctttgtaggctgatct

SEQ ID NO: 508711 - DNA, 33 bp, Homo sapien
agagaggactgattacaagatgatattcttcat

SEQ ID NO: 508712 - DNA, 33 bp, Homo sapien
agagaggactgattacgagatgatattcttcat

SEQ ID NO: 508713 - DNA, 33 bp, Homo sapien
cttgaagctatgtttgcaaaattatggctgtaa

SEQ ID NO: 508714 - DNA, 33 bp, Homo sapien
cttgaagctatgtttgtaaaattatggctgtaa

SEQ ID NO: 508715 - DNA, 33 bp, Homo sapien
gttttgacatggtgaccagtagaagtctcaagg

SEQ ID NO: 508716 - DNA, 33 bp, Homo sapien
gttttgacatggtgactagtagaagtctcaagg

SEQ ID NO: 508717 - DNA, 33 bp, Homo sapien
tatttctctaagcgtaaaatttacaatttccag

SEQ ID NO: 508718 - DNA, 33 bp, Homo sapien
tatttctctaagcgtacaatttacaatttccag

SEQ ID NO: 508719 - DNA, 33 bp, Homo sapien
aacatctcaatatggcaagatattttcatacag

SEQ ID NO: 508720 - DNA, 33 bp, Homo sapien
aacatctcaatatggcgagatattttcatacag

SEQ ID NO: 508721 - DNA, 33 bp, Homo sapien
gccagataacaaataccgagaattctaatgtgc

SEQ ID NO: 508722 - DNA, 33 bp, Homo sapien
gccagataacaaatactgagaattctaatgtgc

SEQ ID NO: 508723 - DNA, 33 bp, Homo sapien
cagattacaacaaacacgctaaaatgttttaca

SEQ ID NO: 508724 - DNA, 33 bp, Homo sapien
cagattacaacaaacaggctaaaatgttttaca

SEQ ID NO: 508725 - DNA, 33 bp, Homo sapien
ttgctatatttttacaactctttggagaagaga

SEQ ID NO: 508726 - DNA, 33 bp, Homo sapien
ttgctatatttttacacctctttggagaagaga

SEQ ID NO: 508727 - DNA, 33 bp, Homo sapien
gttatgcaatattaaaatgagacaatgtcttaa

SEQ ID NO: 508728 - DNA, 33 bp, Homo sapien
gttatgcaatattaaactgagacaatgtcttaa

SEQ ID NO: 508729 - DNA, 33 bp, Homo sapien
ttgaactctagttggaaagagaatgaggaaaag

SEQ ID NO: 508730 - DNA, 33 bp, Homo sapien
ttgaactctagttggagagagaatgaggaaaag

SEQ ID NO: 508731 - DNA, 33 bp, Homo sapien
ggtgttcacaatatcaaagtgatcagcaagtaa

SEQ ID NO: 508732 - DNA, 33 bp, Homo sapien
ggtgttcacaatatcagagtgatcagcaagtaa

SEQ ID NO: 508733 - DNA, 33 bp, Homo sapien
aaaagaagcaaagtccgatcatataaaagtaag

SEQ ID NO: 508734 - DNA, 33 bp, Homo sapien
aaaagaagcaaagtcctatcatataaaagtaag

SEQ ID NO: 508735 - DNA, 33 bp, Homo sapien
catgttgtgccatcagaaatctcagaaaagctc

SEQ ID NO: 508736 - DNA, 33 bp, Homo sapien
catgttgtgccatcaggaatctcagaaaagctc

SEQ ID NO: 508737 - DNA, 33 bp, Homo sapien
atctggtttatatctacctctaaagttgctttt

SEQ ID NO: 508738 - DNA, 33 bp, Homo sapien
atctggtttatatctatctctaaagttgctttt

SEQ ID NO: 508739 - DNA, 33 bp, Homo sapien
gcaaaataaataagcggcagagtaaataggtaa

SEQ ID NO: 508740 - DNA, 33 bp, Homo sapien
gcaaaataaataagcgtcagagtaaataggtaa

SEQ ID NO: 508741 - DNA, 33 bp, Homo sapien
catctgaatagatgcacaaaagacattcaataa

SEQ ID NO: 508742 - DNA, 33 bp, Homo sapien
catctgaatagatgcagaaaagacattcaataa

SEQ ID NO: 508743 - DNA, 33 bp, Homo sapien
ttctaatttcacttcaatatttcccattggctg

SEQ ID NO: 508744 - DNA, 33 bp, Homo sapien
ttctaatttcacttcactatttcccattggctg

SEQ ID NO: 508745 - DNA, 33 bp, Homo sapien
gactgagatttgagacacaatgaaagatgaagt

SEQ ID NO: 508746 - DNA, 33 bp, Homo sapien
gactgagatttgagacgcaatgaaagatgaagt

SEQ ID NO: 508747 - DNA, 33 bp, Homo sapien
gtgattctctctctgcaaccggggtaagggctc

SEQ ID NO: 508748 - DNA, 33 bp, Homo sapien
gtgattctctctctgcgaccggggtaagggctc

SEQ ID NO: 508749 - DNA, 33 bp, Homo sapien
gaagtttacattcaaggagttgtcttaacagtt

SEQ ID NO: 508750 - DNA, 33 bp, Homo sapien
gaagtttacattcaagtagttgtcttaacagtt

SEQ ID NO: 508751 - DNA, 33 bp, Homo sapien
acacctattcatgtcaatattttcagagagaac

SEQ ID NO: 508752 - DNA, 33 bp, Homo sapien
acacctattcatgtcagtattttcagagagaac

SEQ ID NO: 508753 - DNA, 33 bp, Homo sapien
agctgcaaacagggaacaattaaacatgtaatc

SEQ ID NO: 508754 - DNA, 33 bp, Homo sapien
agctgcaaacagggaagaattaaacatgtaatc

SEQ ID NO: 508755 - DNA, 33 bp, Homo sapien
aggtatcccctttacaatatacatggtcatgct

SEQ ID NO: 508756 - DNA, 33 bp, Homo sapien
aggtatcccctttacagtatacatggtcatgct

SEQ ID NO: 508757 - DNA, 33 bp, Homo sapien
cccacgacttctttcaaagcatctgtggtttct

SEQ ID NO: 508758 - DNA, 33 bp, Homo sapien
cccacgacttctttcagagcatctgtggtttct

SEQ ID NO: 508759 - DNA, 33 bp, Homo sapien
ctttttttcccaaagaagatggattggaggcat

SEQ ID NO: 508760 - DNA, 33 bp, Homo sapien
ctttttttcccaaagatgatggattggaggcat

SEQ ID NO: 508761 - DNA, 33 bp, Homo sapien
cctgactccaggggaacatcaccttctcacttc

SEQ ID NO: 508762 - DNA, 33 bp, Homo sapien
cctgactccaggggaagatcaccttctcacttc

SEQ ID NO: 508763 - DNA, 33 bp, Homo sapien
tttaagcccaataagaaacattttacaaactac

SEQ ID NO: 508764 - DNA, 33 bp, Homo sapien
tttaagcccaataagagacattttacaaactac

SEQ ID NO: 508765 - DNA, 33 bp, Homo sapien
cactcagtcttcctaaagaattgctctggaccc

SEQ ID NO: 508766 - DNA, 33 bp, Homo sapien
cactcagtcttcctaaggaattgctctggaccc

SEQ ID NO: 508767 - DNA, 33 bp, Homo sapien
gagggaattctctgtcactcaagaatcaatgct

SEQ ID NO: 508768 - DNA, 33 bp, Homo sapien
gagggaattctctgtcgctcaagaatcaatgct

SEQ ID NO: 508769 - DNA, 33 bp, Homo sapien
ggaaaataggcaccaactcaaggatcaggtaaa

SEQ ID NO: 508770 - DNA, 33 bp, Homo sapien
ggaaaataggcaccaagtcaaggatcaggtaaa

SEQ ID NO: 508771 - DNA, 33 bp, Homo sapien
caggaaacactatgacgaagaaaaaattcccag

SEQ ID NO: 508772 - DNA, 33 bp, Homo sapien
caggaaacactatgactaagaaaaaattcccag

SEQ ID NO: 508773 - DNA, 33 bp, Homo sapien
ggtcttaaggtgcccacgtaaccactctcttat

SEQ ID NO: 508774 - DNA, 33 bp, Homo sapien
ggtcttaaggtgcccatgtaaccactctcttat

SEQ ID NO: 508775 - DNA, 33 bp, Homo sapien
acagactctctccatccacttcaccaagtgtgt

SEQ ID NO: 508776 - DNA, 33 bp, Homo sapien
acagactctctccatcgacttcaccaagtgtgt

SEQ ID NO: 508777 - DNA, 33 bp, Homo sapien
aatttttaaaggaaaacaaggctgaaggatgca

SEQ ID NO: 508778 - DNA, 33 bp, Homo sapien
aatttttaaaggaaaataaggctgaaggatgca

SEQ ID NO: 508779 - DNA, 33 bp, Homo sapien
aatgcaagaacggactaagacatatacgaaggc

SEQ ID NO: 508780 - DNA, 33 bp, Homo sapien
aatgcaagaacggactgagacatatacgaaggc

SEQ ID NO: 508781 - DNA, 33 bp, Homo sapien
ataaataaagaaacaaggagcattcatgtgcag

SEQ ID NO: 508782 - DNA, 33 bp, Homo sapien
ataaataaagaaacaatgagcattcatgtgcag

SEQ ID NO: 508783 - DNA, 33 bp, Homo sapien
cctgcaataacaaagccccctcctcaaatctgt

SEQ ID NO: 508784 - DNA, 33 bp, Homo sapien
cctgcaataacaaagctccctcctcaaatctgt

SEQ ID NO: 508785 - DNA, 33 bp, Homo sapien
ggcagacttgtatttaagacagtgtggctgtgt

SEQ ID NO: 508786 - DNA, 33 bp, Homo sapien
ggcagacttgtatttacgacagtgtggctgtgt

SEQ ID NO: 508787 - DNA, 33 bp, Homo sapien
acagcaaaatcagtgccaagaggaaagtttata

SEQ ID NO: 508788 - DNA, 33 bp, Homo sapien
acagcaaaatcagtgcgaagaggaaagtttata

SEQ ID NO: 508789 - DNA, 33 bp, Homo sapien
gccaccaccaccgggtaaaaatcaggataacac

SEQ ID NO: 508790 - DNA, 33 bp, Homo sapien
gccaccaccaccgggtgaaaatcaggataacac

SEQ ID NO: 508791 - DNA, 33 bp, Homo sapien
atgcttccagatttgacgaagtatctgcagaga

SEQ ID NO: 508792 - DNA, 33 bp, Homo sapien
atgcttccagatttgatgaagtatctgcagaga

SEQ ID NO: 508793 - DNA, 33 bp, Homo sapien
gccaagcttaatgaatcattcaaactaaatata

SEQ ID NO: 508794 - DNA, 33 bp, Homo sapien
gccaagcttaatgaatgattcaaactaaatata

SEQ ID NO: 508795 - DNA, 33 bp, Homo sapien
tgggttccagctacacaggtatatttagtttga

SEQ ID NO: 508796 - DNA, 33 bp, Homo sapien
tgggttccagctacacgggtatatttagtttga

SEQ ID NO: 508797 - DNA, 33 bp, Homo sapien
ctacctagctgcctcaaaagaaactcaccactg

SEQ ID NO: 508798 - DNA, 33 bp, Homo sapien
ctacctagctgcctcagaagaaactcaccactg

SEQ ID NO: 508799 - DNA, 33 bp, Homo sapien
ctccctctagctattcaaaattacatattactg

SEQ ID NO: 508800 - DNA, 33 bp, Homo sapien
ctccctctagctattcgaaattacatattactg

SEQ ID NO: 508801 - DNA, 33 bp, Homo sapien
taaaacaataaaatgccgatgagagaaactgaa

SEQ ID NO: 508802 - DNA, 33 bp, Homo sapien
taaaacaataaaatgctgatgagagaaactgaa

SEQ ID NO: 508803 - DNA, 33 bp, Homo sapien
taaaagcacttggtacaagctcatgtattattg

SEQ ID NO: 508804 - DNA, 33 bp, Homo sapien
taaaagcacttggtaccagctcatgtattattg

SEQ ID NO: 508805 - DNA, 33 bp, Homo sapien
gaagattatggcataaagtaagtatttcccatt

SEQ ID NO: 508806 - DNA, 33 bp, Homo sapien
gaagattatggcataaggtaagtatttcccatt

SEQ ID NO: 508807 - DNA, 33 bp, Homo sapien
tgccttagtcctcctactacgtacataatctag

SEQ ID NO: 508808 - DNA, 33 bp, Homo sapien
tgccttagtcctcctattacgtacataatctag

SEQ ID NO: 508809 - DNA, 33 bp, Homo sapien
agattttgcttttctccagaagttcctgtgctc

SEQ ID NO: 508810 - DNA, 33 bp, Homo sapien
agattttgcttttctctagaagttcctgtgctc

SEQ ID NO: 508811 - DNA, 33 bp, Homo sapien
tgagtttaatcttcatcatatccccacacattt

SEQ ID NO: 508812 - DNA, 33 bp, Homo sapien
tgagtttaatcttcatgatatccccacacattt

SEQ ID NO: 508813 - DNA, 33 bp, Homo sapien
ggaaatggactctatgcaccaaattagggtcag

SEQ ID NO: 508814 - DNA, 33 bp, Homo sapien
ggaaatggactctatggaccaaattagggtcag

SEQ ID NO: 508815 - DNA, 33 bp, Homo sapien
tgtcctccctctattcacattagcctgcatatc

SEQ ID NO: 508816 - DNA, 33 bp, Homo sapien
tgtcctccctctattcgcattagcctgcatatc

SEQ ID NO: 508817 - DNA, 33 bp, Homo sapien
tattacagaatcttccaaatacatccacaagct

SEQ ID NO: 508818 - DNA, 33 bp, Homo sapien
tattacagaatcttccgaatacatccacaagct

SEQ ID NO: 508819 - DNA, 33 bp, Homo sapien
caatgagcttgacaacaggttaatagaaaatcc

SEQ ID NO: 508820 - DNA, 33 bp, Homo sapien
caatgagcttgacaactggttaatagaaaatcc

SEQ ID NO: 508821 - DNA, 33 bp, Homo sapien
ccaggaatcctagagaatatcaagcagaattaa

SEQ ID NO: 508822 - DNA, 33 bp, Homo sapien
ccaggaatcctagagactatcaagcagaattaa

SEQ ID NO: 508823 - DNA, 33 bp, Homo sapien
tgctgtccttcattccacatatcctataatcac

SEQ ID NO: 508824 - DNA, 33 bp, Homo sapien
tgctgtccttcattcctcatatcctataatcac

SEQ ID NO: 508825 - DNA, 33 bp, Homo sapien
caagacaagttactgggaaggagtaagaagcac

SEQ ID NO: 508826 - DNA, 33 bp, Homo sapien
caagacaagttactggtaaggagtaagaagcac

SEQ ID NO: 508827 - DNA, 33 bp, Homo sapien
tatcttgtcctaaagcagaaagattgcacatta

SEQ ID NO: 508828 - DNA, 33 bp, Homo sapien
tatcttgtcctaaagcggaaagattgcacatta

SEQ ID NO: 508829 - DNA, 33 bp, Homo sapien
ttatctccactctacacgagctttcacttgctc

SEQ ID NO: 508830 - DNA, 33 bp, Homo sapien
ttatctccactctacatgagctttcacttgctc

SEQ ID NO: 508831 - DNA, 33 bp, Homo sapien
caagatcaaggtaccacctgggttgctttctgg

SEQ ID NO: 508832 - DNA, 33 bp, Homo sapien
caagatcaaggtaccatctgggttgctttctgg

SEQ ID NO: 508833 - DNA, 33 bp, Homo sapien
atgagttttgggggacagaattcattccacggc

SEQ ID NO: 508834 - DNA, 33 bp, Homo sapien
atgagttttgggggacggaattcattccacggc

SEQ ID NO: 508835 - DNA, 33 bp, Homo sapien
aatccaaacaaatgacacataaaaagtagaatt

SEQ ID NO: 508836 - DNA, 33 bp, Homo sapien
aatccaaacaaatgacgcataaaaagtagaatt

SEQ ID NO: 508837 - DNA, 33 bp, Homo sapien
tactttcttcaacctaagcactactgtcctacc

SEQ ID NO: 508838 - DNA, 33 bp, Homo sapien
tactttcttcaacctatgcactactgtcctacc

SEQ ID NO: 508839 - DNA, 33 bp, Homo sapien
atttctagtctagtgtaaaacggtctgaaaatt

SEQ ID NO: 508840 - DNA, 33 bp, Homo sapien
atttctagtctagtgtcaaacggtctgaaaatt

SEQ ID NO: 508841 - DNA, 33 bp, Homo sapien
tgatacagcagctgtgaagaatagtttggtggt

SEQ ID NO: 508842 - DNA, 33 bp, Homo sapien
tgatacagcagctgtggagaatagtttggtggt

SEQ ID NO: 508843 - DNA, 33 bp, Homo sapien
tataataggagttggacagctaactcaggttta

SEQ ID NO: 508844 - DNA, 33 bp, Homo sapien
tataataggagttggagagctaactcaggttta

SEQ ID NO: 508845 - DNA, 33 bp, Homo sapien
tagattgtgatttgagaaattctgactagtatc

SEQ ID NO: 508846 - DNA, 33 bp, Homo sapien
tagattgtgatttgaggaattctgactagtatc

SEQ ID NO: 508847 - DNA, 33 bp, Homo sapien
aactttgaaagtggaaaaagatgagtgatagga

SEQ ID NO: 508848 - DNA, 33 bp, Homo sapien
aactttgaaagtggaagaagatgagtgatagga

SEQ ID NO: 508849 - DNA, 33 bp, Homo sapien
atgcaagagtgaagaacgcttgggagcctctgc

SEQ ID NO: 508850 - DNA, 33 bp, Homo sapien
atgcaagagtgaagaatgcttgggagcctctgc

SEQ ID NO: 508851 - DNA, 33 bp, Homo sapien
aataagaaacgtgatacaggatacaaaaggaaa

SEQ ID NO: 508852 - DNA, 33 bp, Homo sapien
aataagaaacgtgatataggatacaaaaggaaa

SEQ ID NO: 508853 - DNA, 33 bp, Homo sapien
caagggctgctgctcacattattttgaaccatg

SEQ ID NO: 508854 - DNA, 33 bp, Homo sapien
caagggctgctgctcagattattttgaaccatg

SEQ ID NO: 508855 - DNA, 33 bp, Homo sapien
aagacctgtagatagaccacaacataggactct

SEQ ID NO: 508856 - DNA, 33 bp, Homo sapien
aagacctgtagatagatcacaacataggactct

SEQ ID NO: 508857 - DNA, 33 bp, Homo sapien
ctcccctgaaaatgtaactccatcgtactggga

SEQ ID NO: 508858 - DNA, 33 bp, Homo sapien
ctcccctgaaaatgtatctccatcgtactggga

SEQ ID NO: 508859 - DNA, 33 bp, Homo sapien
aggagcagaagcttaacaggcagaagagaagag

SEQ ID NO: 508860 - DNA, 33 bp, Homo sapien
aggagcagaagcttaataggcagaagagaagag

SEQ ID NO: 508861 - DNA, 33 bp, Homo sapien
tgtttctaggtgagagaaaacaatttgagctat

SEQ ID NO: 508862 - DNA, 33 bp, Homo sapien
tgtttctaggtgagaggaaacaatttgagctat

SEQ ID NO: 508863 - DNA, 33 bp, Homo sapien
ctggtctgcagattgcaaaaacagtgggaaaat

SEQ ID NO: 508864 - DNA, 33 bp, Homo sapien
ctggtctgcagattgcgaaaacagtgggaaaat

SEQ ID NO: 508865 - DNA, 33 bp, Homo sapien
tgcaattcctgggcaaatcctggtagtgtgctg

SEQ ID NO: 508866 - DNA, 33 bp, Homo sapien
tgcaattcctgggcaagtcctggtagtgtgctg

SEQ ID NO: 508867 - DNA, 33 bp, Homo sapien
ttttcatttatattgaaacctccgtactgtttt

SEQ ID NO: 508868 - DNA, 33 bp, Homo sapien
ttttcatttatattgagacctccgtactgtttt

SEQ ID NO: 508869 - DNA, 33 bp, Homo sapien
agggcaggctgctttcccagatttttgaggtgt

SEQ ID NO: 508870 - DNA, 33 bp, Homo sapien
agggcaggctgctttctcagatttttgaggtgt

SEQ ID NO: 508871 - DNA, 33 bp, Homo sapien
tcatctcttctttacacctttaatgatcttgga

SEQ ID NO: 508872 - DNA, 33 bp, Homo sapien
tcatctcttctttacatctttaatgatcttgga

SEQ ID NO: 508873 - DNA, 33 bp, Homo sapien
agaccagatgggctagaaaaccaaaagcaaagt

SEQ ID NO: 508874 - DNA, 33 bp, Homo sapien
agaccagatgggctagtaaaccaaaagcaaagt

SEQ ID NO: 508875 - DNA, 33 bp, Homo sapien
tttgttttgtaagaaaagctctctattcattct

SEQ ID NO: 508876 - DNA, 33 bp, Homo sapien
tttgttttgtaagaaaggctctctattcattct

SEQ ID NO: 508877 - DNA, 33 bp, Homo sapien
gacacaacttccctgacgagtaatggaaaaatt

SEQ ID NO: 508878 - DNA, 33 bp, Homo sapien
gacacaacttccctgatgagtaatggaaaaatt

SEQ ID NO: 508879 - DNA, 33 bp, Homo sapien
aaataaagcaatatagacgagtgaaaataatct

SEQ ID NO: 508880 - DNA, 33 bp, Homo sapien
aaataaagcaatatagtcgagtgaaaataatct

SEQ ID NO: 508881 - DNA, 33 bp, Homo sapien
tctgtacctatgaaaccgcagctgtatgtttct

SEQ ID NO: 508882 - DNA, 33 bp, Homo sapien
tctgtacctatgaaactgcagctgtatgtttct

SEQ ID NO: 508883 - DNA, 33 bp, Homo sapien
taagcagaaagttctacgggaacaactaagcaa

SEQ ID NO: 508884 - DNA, 33 bp, Homo sapien
taagcagaaagttctatgggaacaactaagcaa

SEQ ID NO: 508885 - DNA, 33 bp, Homo sapien
ggctctcactgatttacgaccctctggtgttca

SEQ ID NO: 508886 - DNA, 33 bp, Homo sapien
ggctctcactgatttatgaccctctggtgttca

SEQ ID NO: 508887 - DNA, 33 bp, Homo sapien
agtcagcaaacggctcaaaccacccactgcctg

SEQ ID NO: 508888 - DNA, 33 bp, Homo sapien
agtcagcaaacggctccaaccacccactgcctg

SEQ ID NO: 508889 - DNA, 33 bp, Homo sapien
atagtagaatgtcagagcagggaagaaacttat

SEQ ID NO: 508890 - DNA, 33 bp, Homo sapien
atagtagaatgtcagatcagggaagaaacttat

SEQ ID NO: 508891 - DNA, 33 bp, Homo sapien
gtagtttggttcatgacagtcattaaagttcct

SEQ ID NO: 508892 - DNA, 33 bp, Homo sapien
gtagtttggttcatgatagtcattaaagttcct

SEQ ID NO: 508893 - DNA, 33 bp, Homo sapien
gacctagagtcagtgccctaaaccacttggctg

SEQ ID NO: 508894 - DNA, 33 bp, Homo sapien
gacctagagtcagtgctctaaaccacttggctg

SEQ ID NO: 508895 - DNA, 33 bp, Homo sapien
ggaccctaagtactaactcatcttacaccccaa

SEQ ID NO: 508896 - DNA, 33 bp, Homo sapien
ggaccctaagtactaagtcatcttacaccccaa

SEQ ID NO: 508897 - DNA, 33 bp, Homo sapien
ttatagaagcaggcaaactctgagagtcagtgc

SEQ ID NO: 508898 - DNA, 33 bp, Homo sapien
ttatagaagcaggcaagctctgagagtcagtgc

SEQ ID NO: 508899 - DNA, 33 bp, Homo sapien
tggccaaatctctgtaccttggcaaactgcctg

SEQ ID NO: 508900 - DNA, 33 bp, Homo sapien
tggccaaatctctgtagcttggcaaactgcctg

SEQ ID NO: 508901 - DNA, 33 bp, Homo sapien
ttaactccttttaacaatgatggagatatgttc

SEQ ID NO: 508902 - DNA, 33 bp, Homo sapien
ttaactccttttaacagtgatggagatatgttc

SEQ ID NO: 508903 - DNA, 33 bp, Homo sapien
acagcattagttcaaacgtgcttttagtttgag

SEQ ID NO: 508904 - DNA, 33 bp, Homo sapien
acagcattagttcaaatgtgcttttagtttgag

SEQ ID NO: 508905 - DNA, 33 bp, Homo sapien
aattggattatttgggaataggccacaatctgg

SEQ ID NO: 508906 - DNA, 33 bp, Homo sapien
aattggattatttgggtataggccacaatctgg

SEQ ID NO: 508907 - DNA, 33 bp, Homo sapien
taaacttccggaaaagaacaatgcaatcatact

SEQ ID NO: 508908 - DNA, 33 bp, Homo sapien
taaacttccggaaaaggacaatgcaatcatact

SEQ ID NO: 508909 - DNA, 33 bp, Homo sapien
tgtgtatgagagcaaactgtcacaatcctcagc

SEQ ID NO: 508910 - DNA, 33 bp, Homo sapien
tgtgtatgagagcaaattgtcacaatcctcagc

SEQ ID NO: 508911 - DNA, 33 bp, Homo sapien
gaatataggcatacaaatatacttgcaaatttc

SEQ ID NO: 508912 - DNA, 33 bp, Homo sapien
gaatataggcatacaactatacttgcaaatttc

SEQ ID NO: 508913 - DNA, 33 bp, Homo sapien
tctaaagaactattgcactaaaacaactatatc

SEQ ID NO: 508914 - DNA, 33 bp, Homo sapien
tctaaagaactattgccctaaaacaactatatc

SEQ ID NO: 508915 - DNA, 33 bp, Homo sapien
cagatcatgagagaaggatttgaccttacctgg

SEQ ID NO: 508916 - DNA, 33 bp, Homo sapien
cagatcatgagagaagtatttgaccttacctgg

SEQ ID NO: 508917 - DNA, 33 bp, Homo sapien
tgtcttccaggtcctaaaggagcaatctgcttc

SEQ ID NO: 508918 - DNA, 33 bp, Homo sapien
tgtcttccaggtcctataggagcaatctgcttc

SEQ ID NO: 508919 - DNA, 33 bp, Homo sapien
ttgtgaagagtaggaaaatgcgttcaccagtgc

SEQ ID NO: 508920 - DNA, 33 bp, Homo sapien
ttgtgaagagtaggaatatgcgttcaccagtgc

SEQ ID NO: 508921 - DNA, 33 bp, Homo sapien
caacctagctccttctcaaagctacctttggct

SEQ ID NO: 508922 - DNA, 33 bp, Homo sapien
caacctagctccttcttaaagctacctttggct

SEQ ID NO: 508923 - DNA, 33 bp, Homo sapien
tcccgtgcaattgtaaagacgtacattcagtgg

SEQ ID NO: 508924 - DNA, 33 bp, Homo sapien
tcccgtgcaattgtaatgacgtacattcagtgg

SEQ ID NO: 508925 - DNA, 33 bp, Homo sapien
ctatttagtgaatccaagtcaaattggtattgc

SEQ ID NO: 508926 - DNA, 33 bp, Homo sapien
ctatttagtgaatccatgtcaaattggtattgc

SEQ ID NO: 508927 - DNA, 33 bp, Homo sapien
ggtaatggaaaagctcaatagatgggaccattc

SEQ ID NO: 508928 - DNA, 33 bp, Homo sapien
ggtaatggaaaagctcgatagatgggaccattc

SEQ ID NO: 508929 - DNA, 33 bp, Homo sapien
aatttagtgacctaaaaaataacaacatttatt

SEQ ID NO: 508930 - DNA, 33 bp, Homo sapien
aatttagtgacctaaacaataacaacatttatt

SEQ ID NO: 508931 - DNA, 33 bp, Homo sapien
tgttctcaatcaataacaccttctttccaattc

SEQ ID NO: 508932 - DNA, 33 bp, Homo sapien
tgttctcaatcaataataccttctttccaattc

SEQ ID NO: 508933 - DNA, 33 bp, Homo sapien
tattcaggaatgcaagaccataaataaaagcaa

SEQ ID NO: 508934 - DNA, 33 bp, Homo sapien
tattcaggaatgcaaggccataaataaaagcaa

SEQ ID NO: 508935 - DNA, 33 bp, Homo sapien
gatggaggttcctgtcacaagaagagaagtggg

SEQ ID NO: 508936 - DNA, 33 bp, Homo sapien
gatggaggttcctgtcgcaagaagagaagtggg

SEQ ID NO: 508937 - DNA, 33 bp, Homo sapien
taactaaattgttcaccatttgcagccatatga

SEQ ID NO: 508938 - DNA, 33 bp, Homo sapien
taactaaattgttcacgatttgcagccatatga

SEQ ID NO: 508939 - DNA, 33 bp, Homo sapien
gctccctttagccaagacatttcccaaaggtgg

SEQ ID NO: 508940 - DNA, 33 bp, Homo sapien
gctccctttagccaaggcatttcccaaaggtgg

SEQ ID NO: 508941 - DNA, 33 bp, Homo sapien
ttagaagagcaaccaacggagattcatggcgag

SEQ ID NO: 508942 - DNA, 33 bp, Homo sapien
ttagaagagcaaccaatggagattcatggcgag

SEQ ID NO: 508943 - DNA, 33 bp, Homo sapien
atataactggttaatcaaaaagcagctcttgga

SEQ ID NO: 508944 - DNA, 33 bp, Homo sapien
atataactggttaatccaaaagcagctcttgga

SEQ ID NO: 508945 - DNA, 33 bp, Homo sapien
tttttaccagggccccacagcatgccagacttg

SEQ ID NO: 508946 - DNA, 33 bp, Homo sapien
tttttaccagggccccgcagcatgccagacttg

SEQ ID NO: 508947 - DNA, 33 bp, Homo sapien
gttacttcctacatacaatgggggcataggcat

SEQ ID NO: 508948 - DNA, 33 bp, Homo sapien
gttacttcctacatacgatgggggcataggcat

SEQ ID NO: 508949 - DNA, 33 bp, Homo sapien
gactaggcaatttacacgagaaagaggttcaat

SEQ ID NO: 508950 - DNA, 33 bp, Homo sapien
gactaggcaatttacatgagaaagaggttcaat

SEQ ID NO: 508951 - DNA, 33 bp, Homo sapien
cctattaaggagactcagaaatagctctcattc

SEQ ID NO: 508952 - DNA, 33 bp, Homo sapien
cctattaaggagactcggaaatagctctcattc

SEQ ID NO: 508953 - DNA, 33 bp, Homo sapien
tgtggccggcctctacggaaaccagatgaatct

SEQ ID NO: 508954 - DNA, 33 bp, Homo sapien
tgtggccggcctctactgaaaccagatgaatct

SEQ ID NO: 508955 - DNA, 33 bp, Homo sapien
taggcccaatgtgagacaaactatgtcaggacc

SEQ ID NO: 508956 - DNA, 33 bp, Homo sapien
taggcccaatgtgagataaactatgtcaggacc

SEQ ID NO: 508957 - DNA, 33 bp, Homo sapien
tttgcctgggtcattgcatactaggaaaaggga

SEQ ID NO: 508958 - DNA, 33 bp, Homo sapien
tttgcctgggtcattgtatactaggaaaaggga

SEQ ID NO: 508959 - DNA, 33 bp, Homo sapien
atatacctgttattcaccaaagaaacctacagc

SEQ ID NO: 508960 - DNA, 33 bp, Homo sapien
atatacctgttattcagcaaagaaacctacagc

SEQ ID NO: 508961 - DNA, 33 bp, Homo sapien
acatttattggtctagcagccaagaggagcagt

SEQ ID NO: 508962 - DNA, 33 bp, Homo sapien
acatttattggtctagtagccaagaggagcagt

SEQ ID NO: 508963 - DNA, 33 bp, Homo sapien
ccagacttagaatataaccttctatgaagttct

SEQ ID NO: 508964 - DNA, 33 bp, Homo sapien
ccagacttagaatatacccttctatgaagttct

SEQ ID NO: 508965 - DNA, 33 bp, Homo sapien
taggatgcagtctctcaaatgaggttttggagc

SEQ ID NO: 508966 - DNA, 33 bp, Homo sapien
taggatgcagtctctccaatgaggttttggagc

SEQ ID NO: 508967 - DNA, 33 bp, Homo sapien
tcaatgactagtgaaacaggagtacaaaggcta

SEQ ID NO: 508968 - DNA, 33 bp, Homo sapien
tcaatgactagtgaaataggagtacaaaggcta

SEQ ID NO: 508969 - DNA, 33 bp, Homo sapien
caacactctaattttagagattcaggaactgag

SEQ ID NO: 508970 - DNA, 33 bp, Homo sapien
caacactctaattttatagattcaggaactgag

SEQ ID NO: 508971 - DNA, 33 bp, Homo sapien
ttacaatgaaaaaaagaaacaagattgtaaata

SEQ ID NO: 508972 - DNA, 33 bp, Homo sapien
ttacaatgaaaaaaagtaacaagattgtaaata

SEQ ID NO: 508973 - DNA, 33 bp, Homo sapien
ctcaagaaggagtaaaagtgggcatggctagtt

SEQ ID NO: 508974 - DNA, 33 bp, Homo sapien
ctcaagaaggagtaaaggtgggcatggctagtt

SEQ ID NO: 508975 - DNA, 33 bp, Homo sapien
ggttgctgagaaaatgaaataatacatatgcgg

SEQ ID NO: 508976 - DNA, 33 bp, Homo sapien
ggttgctgagaaaatgcaataatacatatgcgg

SEQ ID NO: 508977 - DNA, 33 bp, Homo sapien
gaggtgacatgataaaagctgaggaaatcactt

SEQ ID NO: 508978 - DNA, 33 bp, Homo sapien
gaggtgacatgataaaggctgaggaaatcactt

SEQ ID NO: 508979 - DNA, 33 bp, Homo sapien
ggccaggccctgggaacgtgataaaaatagttg

SEQ ID NO: 508980 - DNA, 33 bp, Homo sapien
ggccaggccctgggaatgtgataaaaatagttg

SEQ ID NO: 508981 - DNA, 33 bp, Homo sapien
tgtactttgcaaatcacaggacagtcataaatt

SEQ ID NO: 508982 - DNA, 33 bp, Homo sapien
tgtactttgcaaatcataggacagtcataaatt

SEQ ID NO: 508983 - DNA, 33 bp, Homo sapien
agagaagcaagggctaggttgattctgagggca

SEQ ID NO: 508984 - DNA, 33 bp, Homo sapien
agagaagcaagggctatgttgattctgagggca

SEQ ID NO: 508985 - DNA, 33 bp, Homo sapien
ccttctttaggtattacggtggaagaatgtgct

SEQ ID NO: 508986 - DNA, 33 bp, Homo sapien
ccttctttaggtattatggtggaagaatgtgct

SEQ ID NO: 508987 - DNA, 33 bp, Homo sapien
ttctttataaagagtaaaactgaaagctctggg

SEQ ID NO: 508988 - DNA, 33 bp, Homo sapien
ttctttataaagagtacaactgaaagctctggg

SEQ ID NO: 508989 - DNA, 33 bp, Homo sapien
caatgcccgatctgacagaagtgtgtttccagc

SEQ ID NO: 508990 - DNA, 33 bp, Homo sapien
caatgcccgatctgacggaagtgtgtttccagc

SEQ ID NO: 508991 - DNA, 33 bp, Homo sapien
agaatactagagttaacgcatccagcagcttga

SEQ ID NO: 508992 - DNA, 33 bp, Homo sapien
agaatactagagttaatgcatccagcagcttga

SEQ ID NO: 508993 - DNA, 33 bp, Homo sapien
aagaatgggatttgaaaagttggagctgactga

SEQ ID NO: 508994 - DNA, 33 bp, Homo sapien
aagaatgggatttgaagagttggagctgactga

SEQ ID NO: 508995 - DNA, 33 bp, Homo sapien
gataataaacgtaatcactaaatatgtgctctg

SEQ ID NO: 508996 - DNA, 33 bp, Homo sapien
gataataaacgtaatcgctaaatatgtgctctg

SEQ ID NO: 508997 - DNA, 33 bp, Homo sapien
ttccctgccgctatcactctgtcaggaaaaagg

SEQ ID NO: 508998 - DNA, 33 bp, Homo sapien
ttccctgccgctatcattctgtcaggaaaaagg

SEQ ID NO: 508999 - DNA, 33 bp, Homo sapien
cccactgtcacagtgcaagtggagaccatgtag

SEQ ID NO: 509000 - DNA, 33 bp, Homo sapien
cccactgtcacagtgcgagtggagaccatgtag

SEQ ID NO: 509001 - DNA, 33 bp, Homo sapien
tcagtgaagtcaagacagaattttaagcaagaa

SEQ ID NO: 509002 - DNA, 33 bp, Homo sapien
tcagtgaagtcaagaccgaattttaagcaagaa

SEQ ID NO: 509003 - DNA, 33 bp, Homo sapien
gatcagtttgcattggcagcccagggtccttct

SEQ ID NO: 509004 - DNA, 33 bp, Homo sapien
gatcagtttgcattggtagcccagggtccttct

SEQ ID NO: 509005 - DNA, 33 bp, Homo sapien
tgccagaggttgccaacgggtctctgttgtaga

SEQ ID NO: 509006 - DNA, 33 bp, Homo sapien
tgccagaggttgccaatgggtctctgttgtaga

SEQ ID NO: 509007 - DNA, 33 bp, Homo sapien
agacctcccggcaacacccccatctcagcctca

SEQ ID NO: 509008 - DNA, 33 bp, Homo sapien
agacctcccggcaacatccccatctcagcctca

SEQ ID NO: 509009 - DNA, 33 bp, Homo sapien
ttgccgggaggtctcaagatggacatattaaac

SEQ ID NO: 509010 - DNA, 33 bp, Homo sapien
ttgccgggaggtctcaggatggacatattaaac

SEQ ID NO: 509011 - DNA, 33 bp, Homo sapien
attgaaattatccaagactctgtttacccatct

SEQ ID NO: 509012 - DNA, 33 bp, Homo sapien
attgaaattatccaagcctctgtttacccatct

SEQ ID NO: 509013 - DNA, 33 bp, Homo sapien
cccagctactagcctgacacactgtaattatgg

SEQ ID NO: 509014 - DNA, 33 bp, Homo sapien
cccagctactagcctggcacactgtaattatgg

SEQ ID NO: 509015 - DNA, 33 bp, Homo sapien
ccaggcttggtcaggactaaggcagaagcatgg

SEQ ID NO: 509016 - DNA, 33 bp, Homo sapien
ccaggcttggtcaggagtaaggcagaagcatgg

SEQ ID NO: 509017 - DNA, 33 bp, Homo sapien
gccaatgccattggaaagagaatttttattact

SEQ ID NO: 509018 - DNA, 33 bp, Homo sapien
gccaatgccattggaaggagaatttttattact

SEQ ID NO: 509019 - DNA, 33 bp, Homo sapien
tctgagtgaaaatttacgctgaactccaagata

SEQ ID NO: 509020 - DNA, 33 bp, Homo sapien
tctgagtgaaaatttatgctgaactccaagata

SEQ ID NO: 509021 - DNA, 33 bp, Homo sapien
gctttcaagtcctgacactcccagaatgccttg

SEQ ID NO: 509022 - DNA, 33 bp, Homo sapien
gctttcaagtcctgacgctcccagaatgccttg

SEQ ID NO: 509023 - DNA, 33 bp, Homo sapien
tctgtgagaaattccacgcaaatctatgacact

SEQ ID NO: 509024 - DNA, 33 bp, Homo sapien
tctgtgagaaattccaggcaaatctatgacact

SEQ ID NO: 509025 - DNA, 33 bp, Homo sapien
tggggcaatttatgccacgatgcttgtcctaca

SEQ ID NO: 509026 - DNA, 33 bp, Homo sapien
tggggcaatttatgccgcgatgcttgtcctaca

SEQ ID NO: 509027 - DNA, 33 bp, Homo sapien
cttgagttgccttaggaacacccaaattgagat

SEQ ID NO: 509028 - DNA, 33 bp, Homo sapien
cttgagttgccttagggacacccaaattgagat

SEQ ID NO: 509029 - DNA, 33 bp, Homo sapien
aggtgttcacggttgccatttgttattttcttt

SEQ ID NO: 509030 - DNA, 33 bp, Homo sapien
aggtgttcacggttgctatttgttattttcttt

SEQ ID NO: 509031 - DNA, 33 bp, Homo sapien
ccttcctacctgcccacgttttccgtctcgctt

SEQ ID NO: 509032 - DNA, 33 bp, Homo sapien
ccttcctacctgcccatgttttccgtctcgctt

SEQ ID NO: 509033 - DNA, 33 bp, Homo sapien
aatttgcacttgttgacgtgtttttttgtactg

SEQ ID NO: 509034 - DNA, 33 bp, Homo sapien
aatttgcacttgttgatgtgtttttttgtactg

SEQ ID NO: 509035 - DNA, 33 bp, Homo sapien
atagccactattgctgaaaatgttctgggccac

SEQ ID NO: 509036 - DNA, 33 bp, Homo sapien
atagccactattgctgtaaatgttctgggccac

SEQ ID NO: 509037 - DNA, 33 bp, Homo sapien
acagttgcttgctacaatggcacagttgagtag

SEQ ID NO: 509038 - DNA, 33 bp, Homo sapien
acagttgcttgctacagtggcacagttgagtag

SEQ ID NO: 509039 - DNA, 33 bp, Homo sapien
tgcaaaataaaacacactctaagaggacatgga

SEQ ID NO: 509040 - DNA, 33 bp, Homo sapien
tgcaaaataaaacacagtctaagaggacatgga

SEQ ID NO: 509041 - DNA, 33 bp, Homo sapien
ccatggtgacgatctacaacaatagaaggtttt

SEQ ID NO: 509042 - DNA, 33 bp, Homo sapien
ccatggtgacgatctagaacaatagaaggtttt

SEQ ID NO: 509043 - DNA, 33 bp, Homo sapien
ttcctcaagacaataaaagactttacgtgagaa

SEQ ID NO: 509044 - DNA, 33 bp, Homo sapien
ttcctcaagacaataagagactttacgtgagaa

SEQ ID NO: 509045 - DNA, 33 bp, Homo sapien
tcaatgcgtatcttgcagaagagcgagcagtaa

SEQ ID NO: 509046 - DNA, 33 bp, Homo sapien
tcaatgcgtatcttgccgaagagcgagcagtaa

SEQ ID NO: 509047 - DNA, 33 bp, Homo sapien
taacctttacataaacagtgtcatgtattgctc

SEQ ID NO: 509048 - DNA, 33 bp, Homo sapien
taacctttacataaacggtgtcatgtattgctc

SEQ ID NO: 509049 - DNA, 33 bp, Homo sapien
tttgatttgtggctgccagggaaagcagaacca

SEQ ID NO: 509050 - DNA, 33 bp, Homo sapien
tttgatttgtggctgcgagggaaagcagaacca

SEQ ID NO: 509051 - DNA, 33 bp, Homo sapien
tctatccaaacttattgaacaccttgactgttg

SEQ ID NO: 509052 - DNA, 33 bp, Homo sapien
tctatccaaacttatttaacaccttgactgttg

SEQ ID NO: 509053 - DNA, 33 bp, Homo sapien
caataggtaaaattaactgatgggtggatagag

SEQ ID NO: 509054 - DNA, 33 bp, Homo sapien
caataggtaaaattaattgatgggtggatagag

SEQ ID NO: 509055 - DNA, 33 bp, Homo sapien
aaatattctttctcctcacctccaagcagaaat

SEQ ID NO: 509056 - DNA, 33 bp, Homo sapien
aaatattctttctccttacctccaagcagaaat

SEQ ID NO: 509057 - DNA, 33 bp, Homo sapien
gtcagaaatgtacaaaagcataatgtctcatta

SEQ ID NO: 509058 - DNA, 33 bp, Homo sapien
gtcagaaatgtacaaaggcataatgtctcatta

SEQ ID NO: 509059 - DNA, 33 bp, Homo sapien
gccttgtgaccacctcaagagattctggtttgg

SEQ ID NO: 509060 - DNA, 33 bp, Homo sapien
gccttgtgaccacctcgagagattctggtttgg

SEQ ID NO: 509061 - DNA, 33 bp, Homo sapien
gatggtttgttaggcaataaataactggaacat

SEQ ID NO: 509062 - DNA, 33 bp, Homo sapien
gatggtttgttaggcagtaaataactggaacat

SEQ ID NO: 509063 - DNA, 33 bp, Homo sapien
aactggaacatctgctcacccaaatggtgtcat

SEQ ID NO: 509064 - DNA, 33 bp, Homo sapien
aactggaacatctgcttacccaaatggtgtcat

SEQ ID NO: 509065 - DNA, 33 bp, Homo sapien
gcctcacaaaatataaacttccaccttcctttt

SEQ ID NO: 509066 - DNA, 33 bp, Homo sapien
gcctcacaaaatataaccttccaccttcctttt

SEQ ID NO: 509067 - DNA, 33 bp, Homo sapien
ctatcaacaataatgacaaaatggctacccctt

SEQ ID NO: 509068 - DNA, 33 bp, Homo sapien
ctatcaacaataatgataaaatggctacccctt

SEQ ID NO: 509069 - DNA, 33 bp, Homo sapien
tactgggaatgcttggaaattatccaaccgtat

SEQ ID NO: 509070 - DNA, 33 bp, Homo sapien
tactgggaatgcttgggaattatccaaccgtat

SEQ ID NO: 509071 - DNA, 33 bp, Homo sapien
gacatgtccttcctttcaaaatatctgttctgc

SEQ ID NO: 509072 - DNA, 33 bp, Homo sapien
gacatgtccttcctttgaaaatatctgttctgc

SEQ ID NO: 509073 - DNA, 33 bp, Homo sapien
tatgagcaacagtcaaatatggagtgcaccagt

SEQ ID NO: 509074 - DNA, 33 bp, Homo sapien
tatgagcaacagtcaattatggagtgcaccagt

SEQ ID NO: 509075 - DNA, 33 bp, Homo sapien
agagaatgaatcatcaactttcattccaaatac

SEQ ID NO: 509076 - DNA, 33 bp, Homo sapien
agagaatgaatcatcatctttcattccaaatac

SEQ ID NO: 509077 - DNA, 33 bp, Homo sapien
atttcccagtgccgagaagaagtaaatagatag

SEQ ID NO: 509078 - DNA, 33 bp, Homo sapien
atttcccagtgccgaggagaagtaaatagatag

SEQ ID NO: 509079 - DNA, 33 bp, Homo sapien
acagaatgctggaagaagaagacaaccaggctt

SEQ ID NO: 509080 - DNA, 33 bp, Homo sapien
acagaatgctggaagaggaagacaaccaggctt

SEQ ID NO: 509081 - DNA, 33 bp, Homo sapien
gttagagggcccaaaaagtgtagataatattga

SEQ ID NO: 509082 - DNA, 33 bp, Homo sapien
gttagagggcccaaaatgtgtagataatattga

SEQ ID NO: 509083 - DNA, 33 bp, Homo sapien
cattcgccataaaacaatcgcataatatagtca

SEQ ID NO: 509084 - DNA, 33 bp, Homo sapien
cattcgccataaaacagtcgcataatatagtca

SEQ ID NO: 509085 - DNA, 33 bp, Homo sapien
taggctccagctgtgaagaacaacaggcttttc

SEQ ID NO: 509086 - DNA, 33 bp, Homo sapien
taggctccagctgtgaggaacaacaggcttttc

SEQ ID NO: 509087 - DNA, 33 bp, Homo sapien
ttgaaatggactccccacttctgccaataaaat

SEQ ID NO: 509088 - DNA, 33 bp, Homo sapien
ttgaaatggactccccgcttctgccaataaaat

SEQ ID NO: 509089 - DNA, 33 bp, Homo sapien
ggagcagaaataataccacttcctggggcatac

SEQ ID NO: 509090 - DNA, 33 bp, Homo sapien
ggagcagaaataatactacttcctggggcatac

SEQ ID NO: 509091 - DNA, 33 bp, Homo sapien
tttccttaaaatagaaatccaaatgagatcaac

SEQ ID NO: 509092 - DNA, 33 bp, Homo sapien
tttccttaaaatagaattccaaatgagatcaac

SEQ ID NO: 509093 - DNA, 33 bp, Homo sapien
ttctgaatcccaagaacctcctctgtccctagc

SEQ ID NO: 509094 - DNA, 33 bp, Homo sapien
ttctgaatcccaagaatctcctctgtccctagc

SEQ ID NO: 509095 - DNA, 33 bp, Homo sapien
gtatttctctggtattaaaaagtacttaaggct

SEQ ID NO: 509096 - DNA, 33 bp, Homo sapien
gtatttctctggtattgaaaagtacttaaggct

SEQ ID NO: 509097 - DNA, 33 bp, Homo sapien
ccctgaaattgctctacagcttttgcacacttt

SEQ ID NO: 509098 - DNA, 33 bp, Homo sapien
ccctgaaattgctctatagcttttgcacacttt

SEQ ID NO: 509099 - DNA, 33 bp, Homo sapien
ggctgtccctatctcactatgtcttgtgctcag

SEQ ID NO: 509100 - DNA, 33 bp, Homo sapien
ggctgtccctatctcagtatgtcttgtgctcag

SEQ ID NO: 509101 - DNA, 33 bp, Homo sapien
tttatgacatctaacaagcttttaatttatgat

SEQ ID NO: 509102 - DNA, 33 bp, Homo sapien
tttatgacatctaacaggcttttaatttatgat

SEQ ID NO: 509103 - DNA, 33 bp, Homo sapien
caaatatacctgtgatcagaatggagtccaggg

SEQ ID NO: 509104 - DNA, 33 bp, Homo sapien
caaatatacctgtgatgagaatggagtccaggg

SEQ ID NO: 509105 - DNA, 33 bp, Homo sapien
catggctgcccaaaaaagacaaccctgtctggc

SEQ ID NO: 509106 - DNA, 33 bp, Homo sapien
catggctgcccaaaaaggacaaccctgtctggc

SEQ ID NO: 509107 - DNA, 33 bp, Homo sapien
ctgacataatatgcaacggtgaaagactgaaag

SEQ ID NO: 509108 - DNA, 33 bp, Homo sapien
ctgacataatatgcaatggtgaaagactgaaag

SEQ ID NO: 509109 - DNA, 33 bp, Homo sapien
ctccttatggactgccaggcaatatcctgttga

SEQ ID NO: 509110 - DNA, 33 bp, Homo sapien
ctccttatggactgccgggcaatatcctgttga

SEQ ID NO: 509111 - DNA, 33 bp, Homo sapien
gttaatctataggaccaggagcatgttacttga

SEQ ID NO: 509112 - DNA, 33 bp, Homo sapien
gttaatctataggaccgggagcatgttacttga

SEQ ID NO: 509113 - DNA, 33 bp, Homo sapien
acctgcatcattctacactccaggcgaaatgag

SEQ ID NO: 509114 - DNA, 33 bp, Homo sapien
acctgcatcattctactctccaggcgaaatgag

SEQ ID NO: 509115 - DNA, 33 bp, Homo sapien
tgctgtctggtcacagaagaaagcaatgccagg

SEQ ID NO: 509116 - DNA, 33 bp, Homo sapien
tgctgtctggtcacagcagaaagcaatgccagg

SEQ ID NO: 509117 - DNA, 33 bp, Homo sapien
actgactatagcaagacgctttacaaagttggt

SEQ ID NO: 509118 - DNA, 33 bp, Homo sapien
actgactatagcaagatgctttacaaagttggt

SEQ ID NO: 509119 - DNA, 33 bp, Homo sapien
ctggttgtgtggattcaacaattcatattctca

SEQ ID NO: 509120 - DNA, 33 bp, Homo sapien
ctggttgtgtggattccacaattcatattctca

SEQ ID NO: 509121 - DNA, 33 bp, Homo sapien
attgaactgaaagaaccagcctagtcatctcct

SEQ ID NO: 509122 - DNA, 33 bp, Homo sapien
attgaactgaaagaacgagcctagtcatctcct

SEQ ID NO: 509123 - DNA, 33 bp, Homo sapien
atgcatttataccataacccatcaaacaatgtt

SEQ ID NO: 509124 - DNA, 33 bp, Homo sapien
atgcatttataccatagcccatcaaacaatgtt

SEQ ID NO: 509125 - DNA, 33 bp, Homo sapien
tgctgcaaaatgcaagccaaagttgaaacatgg

SEQ ID NO: 509126 - DNA, 33 bp, Homo sapien
tgctgcaaaatgcaagtcaaagttgaaacatgg

SEQ ID NO: 509127 - DNA, 33 bp, Homo sapien
tagttcaaagagcttacgcatttgcacttttga

SEQ ID NO: 509128 - DNA, 33 bp, Homo sapien
tagttcaaagagcttatgcatttgcacttttga

SEQ ID NO: 509129 - DNA, 33 bp, Homo sapien
atctaaattttcctaagagagatgcaaagttgc

SEQ ID NO: 509130 - DNA, 33 bp, Homo sapien
atctaaattttcctaatagagatgcaaagttgc

SEQ ID NO: 509131 - DNA, 33 bp, Homo sapien
ggagcacaaacctacaaaacatgactgagttac

SEQ ID NO: 509132 - DNA, 33 bp, Homo sapien
ggagcacaaacctacagaacatgactgagttac

SEQ ID NO: 509133 - DNA, 33 bp, Homo sapien
tgttgggaaaggagggaataagctagtctctgc

SEQ ID NO: 509134 - DNA, 33 bp, Homo sapien
tgttgggaaaggaggggataagctagtctctgc

SEQ ID NO: 509135 - DNA, 33 bp, Homo sapien
tcctctgagtgaggtcaaaatgctgactgatat

SEQ ID NO: 509136 - DNA, 33 bp, Homo sapien
tcctctgagtgaggtcgaaatgctgactgatat

SEQ ID NO: 509137 - DNA, 33 bp, Homo sapien
tagaacctgtaactcaataagatgtcagtcaca

SEQ ID NO: 509138 - DNA, 33 bp, Homo sapien
tagaacctgtaactcagtaagatgtcagtcaca

SEQ ID NO: 509139 - DNA, 33 bp, Homo sapien
gtactaaggacaagaaatattctacattgctga

SEQ ID NO: 509140 - DNA, 33 bp, Homo sapien
gtactaaggacaagaagtattctacattgctga

SEQ ID NO: 509141 - DNA, 33 bp, Homo sapien
tgtcctgaagagaacacgggctttggcgtcagt

SEQ ID NO: 509142 - DNA, 33 bp, Homo sapien
tgtcctgaagagaacatgggctttggcgtcagt

SEQ ID NO: 509143 - DNA, 33 bp, Homo sapien
ctcccagtgaagatgcacctgagcagccagaag

SEQ ID NO: 509144 - DNA, 33 bp, Homo sapien
ctcccagtgaagatgcgcctgagcagccagaag

SEQ ID NO: 509145 - DNA, 33 bp, Homo sapien
ctcatttctcttttcaccacatcttgttagcga

SEQ ID NO: 509146 - DNA, 33 bp, Homo sapien
ctcatttctcttttcagcacatcttgttagcga

SEQ ID NO: 509147 - DNA, 33 bp, Homo sapien
gaataattgcgtctaactactccttgtctgaat

SEQ ID NO: 509148 - DNA, 33 bp, Homo sapien
gaataattgcgtctaattactccttgtctgaat

SEQ ID NO: 509149 - DNA, 33 bp, Homo sapien
actgttttatctgactaaaaataacttcccatt

SEQ ID NO: 509150 - DNA, 33 bp, Homo sapien
actgttttatctgactgaaaataacttcccatt

SEQ ID NO: 509151 - DNA, 33 bp, Homo sapien
aatatgtttctgtttaaaaacggctctaagatt

SEQ ID NO: 509152 - DNA, 33 bp, Homo sapien
aatatgtttctgtttacaaacggctctaagatt

SEQ ID NO: 509153 - DNA, 33 bp, Homo sapien
ggcagctctgtagaccactgagaggatcgaaga

SEQ ID NO: 509154 - DNA, 33 bp, Homo sapien
ggcagctctgtagaccgctgagaggatcgaaga

SEQ ID NO: 509155 - DNA, 33 bp, Homo sapien
gtgtgctgacaggaaacgaagacactttcttct

SEQ ID NO: 509156 - DNA, 33 bp, Homo sapien
gtgtgctgacaggaaatgaagacactttcttct

SEQ ID NO: 509157 - DNA, 33 bp, Homo sapien
tcctatgactaaggtaagaagaagtgaactgga

SEQ ID NO: 509158 - DNA, 33 bp, Homo sapien
tcctatgactaaggtatgaagaagtgaactgga

SEQ ID NO: 509159 - DNA, 33 bp, Homo sapien
ggggtgtttaagcagacgaggaaaagaaaaacc

SEQ ID NO: 509160 - DNA, 33 bp, Homo sapien
ggggtgtttaagcagatgaggaaaagaaaaacc

SEQ ID NO: 509161 - DNA, 33 bp, Homo sapien
ggttttcatagttgcacagtttcttgtattaat

SEQ ID NO: 509162 - DNA, 33 bp, Homo sapien
ggttttcatagttgcatagtttcttgtattaat

SEQ ID NO: 509163 - DNA, 33 bp, Homo sapien
ctcattgtgattaagacgtactgtgaatgggga

SEQ ID NO: 509164 - DNA, 33 bp, Homo sapien
ctcattgtgattaagatgtactgtgaatgggga

SEQ ID NO: 509165 - DNA, 33 bp, Homo sapien
tgggatttgtttaatcactctgttttgtcttgt

SEQ ID NO: 509166 - DNA, 33 bp, Homo sapien
tgggatttgtttaatcgctctgttttgtcttgt

SEQ ID NO: 509167 - DNA, 33 bp, Homo sapien
attctccatgggaaaaagctacaaaccctgcag

SEQ ID NO: 509168 - DNA, 33 bp, Homo sapien
attctccatgggaaaaggctacaaaccctgcag

SEQ ID NO: 509169 - DNA, 33 bp, Homo sapien
tctgtctctgcttctgcattttagtctttgcct

SEQ ID NO: 509170 - DNA, 33 bp, Homo sapien
tctgtctctgcttctggattttagtctttgcct

SEQ ID NO: 509171 - DNA, 33 bp, Homo sapien
ctcctgtgaaggtcaacatttttcttgagtgct

SEQ ID NO: 509172 - DNA, 33 bp, Homo sapien
ctcctgtgaaggtcaatatttttcttgagtgct

SEQ ID NO: 509173 - DNA, 33 bp, Homo sapien
cacacagctagaaagcaaccaacttgaacccag

SEQ ID NO: 509174 - DNA, 33 bp, Homo sapien
cacacagctagaaagcgaccaacttgaacccag

SEQ ID NO: 509175 - DNA, 33 bp, Homo sapien
catgctgtcacctgataagatctttgaatgttc

SEQ ID NO: 509176 - DNA, 33 bp, Homo sapien
catgctgtcacctgatgagatctttgaatgttc

SEQ ID NO: 509177 - DNA, 33 bp, Homo sapien
cggtggaatcaacttaggtgattaggtgactca

SEQ ID NO: 509178 - DNA, 33 bp, Homo sapien
cggtggaatcaacttatgtgattaggtgactca

SEQ ID NO: 509179 - DNA, 33 bp, Homo sapien
ggacaacatctagaccaagactcttctgcagaa

SEQ ID NO: 509180 - DNA, 33 bp, Homo sapien
ggacaacatctagaccgagactcttctgcagaa

SEQ ID NO: 509181 - DNA, 33 bp, Homo sapien
acaatgcagaatgacaataggaatcatcctgaa

SEQ ID NO: 509182 - DNA, 33 bp, Homo sapien
acaatgcagaatgacagtaggaatcatcctgaa

SEQ ID NO: 509183 - DNA, 33 bp, Homo sapien
tttctccaccgtagcaagactttacccctcagt

SEQ ID NO: 509184 - DNA, 33 bp, Homo sapien
tttctccaccgtagcaggactttacccctcagt

SEQ ID NO: 509185 - DNA, 33 bp, Homo sapien
actctggaacctgagcccttaaccacgctgttt

SEQ ID NO: 509186 - DNA, 33 bp, Homo sapien
actctggaacctgagctcttaaccacgctgttt

SEQ ID NO: 509187 - DNA, 33 bp, Homo sapien
actagaaatggcatcagggaagagaggcccttt

SEQ ID NO: 509188 - DNA, 33 bp, Homo sapien
actagaaatggcatcatggaagagaggcccttt

SEQ ID NO: 509189 - DNA, 33 bp, Homo sapien
taccctgattacaatacggaaggtgaatcagaa

SEQ ID NO: 509190 - DNA, 33 bp, Homo sapien
taccctgattacaatatggaaggtgaatcagaa

SEQ ID NO: 509191 - DNA, 33 bp, Homo sapien
acctaatctaatccaaataagaacagcacttaa

SEQ ID NO: 509192 - DNA, 33 bp, Homo sapien
acctaatctaatccaactaagaacagcacttaa

SEQ ID NO: 509193 - DNA, 33 bp, Homo sapien
ggcactgtatcttttaggtagtctgagaaaggg

SEQ ID NO: 509194 - DNA, 33 bp, Homo sapien
ggcactgtatcttttatgtagtctgagaaaggg

SEQ ID NO: 509195 - DNA, 33 bp, Homo sapien
agacctaaaggaccaccatcaaatatccattgt

SEQ ID NO: 509196 - DNA, 33 bp, Homo sapien
agacctaaaggaccacgatcaaatatccattgt

SEQ ID NO: 509197 - DNA, 33 bp, Homo sapien
gcattcatgactgcacactacaaacaataccag

SEQ ID NO: 509198 - DNA, 33 bp, Homo sapien
gcattcatgactgcacgctacaaacaataccag

SEQ ID NO: 509199 - DNA, 33 bp, Homo sapien
atcccagggttctgtaaagcaactttgggagag

SEQ ID NO: 509200 - DNA, 33 bp, Homo sapien
atcccagggttctgtagagcaactttgggagag

SEQ ID NO: 509201 - DNA, 33 bp, Homo sapien
ttttcaagttcctgtacgattctcaagtaattc

SEQ ID NO: 509202 - DNA, 33 bp, Homo sapien
ttttcaagttcctgtatgattctcaagtaattc

SEQ ID NO: 509203 - DNA, 33 bp, Homo sapien
agaaggtaacacaacaaagaaaagctaagggct

SEQ ID NO: 509204 - DNA, 33 bp, Homo sapien
agaaggtaacacaacagagaaaagctaagggct

SEQ ID NO: 509205 - DNA, 33 bp, Homo sapien
tttcttactgggcctcaataaaaattgggatgt

SEQ ID NO: 509206 - DNA, 33 bp, Homo sapien
tttcttactgggcctcgataaaaattgggatgt

SEQ ID NO: 509207 - DNA, 33 bp, Homo sapien
aggaagcatagtacacaaatcactgtgcttgct

SEQ ID NO: 509208 - DNA, 33 bp, Homo sapien
aggaagcatagtacacgaatcactgtgcttgct

SEQ ID NO: 509209 - DNA, 33 bp, Homo sapien
gaagttgaagggtgacaaatttaggttagatac

SEQ ID NO: 509210 - DNA, 33 bp, Homo sapien
gaagttgaagggtgacgaatttaggttagatac

SEQ ID NO: 509211 - DNA, 33 bp, Homo sapien
ctataaaatgttttcaaaaactgtatttcattt

SEQ ID NO: 509212 - DNA, 33 bp, Homo sapien
ctataaaatgttttcacaaactgtatttcattt

SEQ ID NO: 509213 - DNA, 33 bp, Homo sapien
ttcgaaggaagaagtaactaattgaatctgaag

SEQ ID NO: 509214 - DNA, 33 bp, Homo sapien
ttcgaaggaagaagtagctaattgaatctgaag

SEQ ID NO: 509215 - DNA, 33 bp, Homo sapien
agatccatcgtgtataagttaaacaagagaagc

SEQ ID NO: 509216 - DNA, 33 bp, Homo sapien
agatccatcgtgtatatgttaaacaagagaagc

SEQ ID NO: 509217 - DNA, 33 bp, Homo sapien
tgtgtcaggcaggtaacaggaacaactagtttt

SEQ ID NO: 509218 - DNA, 33 bp, Homo sapien
tgtgtcaggcaggtaataggaacaactagtttt

SEQ ID NO: 509219 - DNA, 33 bp, Homo sapien
tgactccaatatgtggaaacacacagaaataat

SEQ ID NO: 509220 - DNA, 33 bp, Homo sapien
tgactccaatatgtgggaacacacagaaataat

SEQ ID NO: 509221 - DNA, 33 bp, Homo sapien
gttggatctttctccccagcacagaagctgaat

SEQ ID NO: 509222 - DNA, 33 bp, Homo sapien
gttggatctttctccctagcacagaagctgaat

SEQ ID NO: 509223 - DNA, 33 bp, Homo sapien
ctgccacacacgcagacagataggcatcatctg

SEQ ID NO: 509224 - DNA, 33 bp, Homo sapien
ctgccacacacgcagagagataggcatcatctg

SEQ ID NO: 509225 - DNA, 33 bp, Homo sapien
acccagaaatatgtcacggcccacataacctag

SEQ ID NO: 509226 - DNA, 33 bp, Homo sapien
acccagaaatatgtcatggcccacataacctag

SEQ ID NO: 509227 - DNA, 33 bp, Homo sapien
tgggactgattcatgcacttacccactagactt

SEQ ID NO: 509228 - DNA, 33 bp, Homo sapien
tgggactgattcatgcgcttacccactagactt

SEQ ID NO: 509229 - DNA, 33 bp, Homo sapien
ggggtcatactccccaagagccaggattcaagc

SEQ ID NO: 509230 - DNA, 33 bp, Homo sapien
ggggtcatactccccatgagccaggattcaagc

SEQ ID NO: 509231 - DNA, 33 bp, Homo sapien
ttctctaattctctccaggaaaaaacagattac

SEQ ID NO: 509232 - DNA, 33 bp, Homo sapien
ttctctaattctctccgggaaaaaacagattac

SEQ ID NO: 509233 - DNA, 33 bp, Homo sapien
gaaaattgacatttccagagaattcattcattt

SEQ ID NO: 509234 - DNA, 33 bp, Homo sapien
gaaaattgacatttccggagaattcattcattt

SEQ ID NO: 509235 - DNA, 33 bp, Homo sapien
aggtacagatgaagtaagtcagtgggcttggga

SEQ ID NO: 509236 - DNA, 33 bp, Homo sapien
aggtacagatgaagtaggtcagtgggcttggga

SEQ ID NO: 509237 - DNA, 33 bp, Homo sapien
aagaatacagatcacaaagagacaattacaata

SEQ ID NO: 509238 - DNA, 33 bp, Homo sapien
aagaatacagatcacagagagacaattacaata

SEQ ID NO: 509239 - DNA, 33 bp, Homo sapien
ggctcaaagataaggacgtactctgtgggggca

SEQ ID NO: 509240 - DNA, 33 bp, Homo sapien
ggctcaaagataaggaggtactctgtgggggca

SEQ ID NO: 509241 - DNA, 33 bp, Homo sapien
gaggagctgggaggacaagacaccgctggaatt

SEQ ID NO: 509242 - DNA, 33 bp, Homo sapien
gaggagctgggaggacgagacaccgctggaatt

SEQ ID NO: 509243 - DNA, 33 bp, Homo sapien
cttcgtccatttgaaacttattgagcatctata

SEQ ID NO: 509244 - DNA, 33 bp, Homo sapien
cttcgtccatttgaaatttattgagcatctata

SEQ ID NO: 509245 - DNA, 33 bp, Homo sapien
ccacttgatatttgacactgtcctatctgtgcc

SEQ ID NO: 509246 - DNA, 33 bp, Homo sapien
ccacttgatatttgacgctgtcctatctgtgcc

SEQ ID NO: 509247 - DNA, 33 bp, Homo sapien
ccaaactgcactgtaaagctcttgaaaggttgg

SEQ ID NO: 509248 - DNA, 33 bp, Homo sapien
ccaaactgcactgtaaggctcttgaaaggttgg

SEQ ID NO: 509249 - DNA, 33 bp, Homo sapien
tcgtcaacagtgataccgaaaatgtcagacaaa

SEQ ID NO: 509250 - DNA, 33 bp, Homo sapien
tcgtcaacagtgatactgaaaatgtcagacaaa

SEQ ID NO: 509251 - DNA, 33 bp, Homo sapien
gctaaagactacacaacgataatgaaagtttac

SEQ ID NO: 509252 - DNA, 33 bp, Homo sapien
gctaaagactacacaatgataatgaaagtttac

SEQ ID NO: 509253 - DNA, 33 bp, Homo sapien
ataggcataatagtgaactgaatgtctataaat

SEQ ID NO: 509254 - DNA, 33 bp, Homo sapien
ataggcataatagtgacctgaatgtctataaat

SEQ ID NO: 509255 - DNA, 33 bp, Homo sapien
gagatgaagaaactaactgagcgagtacaacat

SEQ ID NO: 509256 - DNA, 33 bp, Homo sapien
gagatgaagaaactaattgagcgagtacaacat

SEQ ID NO: 509257 - DNA, 33 bp, Homo sapien
taaaggtatggggtcagtcattccttcactcac

SEQ ID NO: 509258 - DNA, 33 bp, Homo sapien
taaaggtatggggtcattcattccttcactcac

SEQ ID NO: 509259 - DNA, 33 bp, Homo sapien
agcagggctgcacagggcactgtgggctcacaa

SEQ ID NO: 509260 - DNA, 33 bp, Homo sapien
agcagggctgcacaggtcactgtgggctcacaa

SEQ ID NO: 509261 - DNA, 33 bp, Homo sapien
ctctctggagacaactaaaatttgaaagataga

SEQ ID NO: 509262 - DNA, 33 bp, Homo sapien
ctctctggagacaactgaaatttgaaagataga

SEQ ID NO: 509263 - DNA, 33 bp, Homo sapien
gtcccctgacccaaagactctctggagacaact

SEQ ID NO: 509264 - DNA, 33 bp, Homo sapien
gtcccctgacccaaaggctctctggagacaact

SEQ ID NO: 509265 - DNA, 33 bp, Homo sapien
gatattgagataatgacgtcaataaactataaa

SEQ ID NO: 509266 - DNA, 33 bp, Homo sapien
gatattgagataatgatgtcaataaactataaa

SEQ ID NO: 509267 - DNA, 33 bp, Homo sapien
tgagctctaaaaatgagatggttcaagccctca

SEQ ID NO: 509268 - DNA, 33 bp, Homo sapien
tgagctctaaaaatgatatggttcaagccctca

SEQ ID NO: 509269 - DNA, 33 bp, Homo sapien
agggctgcaagagcaaatcagagacggaacaga

SEQ ID NO: 509270 - DNA, 33 bp, Homo sapien
agggctgcaagagcaagtcagagacggaacaga

SEQ ID NO: 509271 - DNA, 33 bp, Homo sapien
gttgggaagctgagaaataatgtgtacaaagct

SEQ ID NO: 509272 - DNA, 33 bp, Homo sapien
gttgggaagctgagaagtaatgtgtacaaagct

SEQ ID NO: 509273 - DNA, 33 bp, Homo sapien
tcctacttgcctcaaaattaatacctccattta

SEQ ID NO: 509274 - DNA, 33 bp, Homo sapien
tcctacttgcctcaaagttaatacctccattta

SEQ ID NO: 509275 - DNA, 33 bp, Homo sapien
catgctccagaagaacaaatgccaaggaggctt

SEQ ID NO: 509276 - DNA, 33 bp, Homo sapien
catgctccagaagaaccaatgccaaggaggctt

SEQ ID NO: 509277 - DNA, 33 bp, Homo sapien
atggagacatggattccatcaaaaatttcagaa

SEQ ID NO: 509278 - DNA, 33 bp, Homo sapien
atggagacatggattctatcaaaaatttcagaa

SEQ ID NO: 509279 - DNA, 33 bp, Homo sapien
aaacaatagcataaccacagtgcaataggatgc

SEQ ID NO: 509280 - DNA, 33 bp, Homo sapien
aaacaatagcataaccgcagtgcaataggatgc

SEQ ID NO: 509281 - DNA, 33 bp, Homo sapien
accttgatgagagtcactagcatctgacagtga

SEQ ID NO: 509282 - DNA, 33 bp, Homo sapien
accttgatgagagtcattagcatctgacagtga

SEQ ID NO: 509283 - DNA, 33 bp, Homo sapien
tagtaaaattgtaaaccctagtgtaattgtaaa

SEQ ID NO: 509284 - DNA, 33 bp, Homo sapien
tagtaaaattgtaaactctagtgtaattgtaaa

SEQ ID NO: 509285 - DNA, 33 bp, Homo sapien
tctgccaatttctgaccctttggcactctttcc

SEQ ID NO: 509286 - DNA, 33 bp, Homo sapien
tctgccaatttctgacgctttggcactctttcc

SEQ ID NO: 509287 - DNA, 33 bp, Homo sapien
ggaattgtgggctacaaacagcagtaatggggt

SEQ ID NO: 509288 - DNA, 33 bp, Homo sapien
ggaattgtgggctacacacagcagtaatggggt

SEQ ID NO: 509289 - DNA, 33 bp, Homo sapien
acacttttggatctaaaacaatgggctcagtgg

SEQ ID NO: 509290 - DNA, 33 bp, Homo sapien
acacttttggatctaagacaatgggctcagtgg

SEQ ID NO: 509291 - DNA, 33 bp, Homo sapien
tctgaatgcctgtaaccgtctttaaaacatgat

SEQ ID NO: 509292 - DNA, 33 bp, Homo sapien
tctgaatgcctgtaactgtctttaaaacatgat

SEQ ID NO: 509293 - DNA, 33 bp, Homo sapien
cttcactatcaatgccaagtttcaacaaaagaa

SEQ ID NO: 509294 - DNA, 33 bp, Homo sapien
cttcactatcaatgccgagtttcaacaaaagaa

SEQ ID NO: 509295 - DNA, 33 bp, Homo sapien
gccagggaagagtcaacaggagtgagaacaagc

SEQ ID NO: 509296 - DNA, 33 bp, Homo sapien
gccagggaagagtcaataggagtgagaacaagc

SEQ ID NO: 509297 - DNA, 33 bp, Homo sapien
tctctcaagaaacacaactttgaagtgaagaaa

SEQ ID NO: 509298 - DNA, 33 bp, Homo sapien
tctctcaagaaacacagctttgaagtgaagaaa

SEQ ID NO: 509299 - DNA, 33 bp, Homo sapien
tttagctatatcttgaaggtacatgaggtttgc

SEQ ID NO: 509300 - DNA, 33 bp, Homo sapien
tttagctatatcttgagggtacatgaggtttgc

SEQ ID NO: 509301 - DNA, 33 bp, Homo sapien
ttcaaccagaagcgggcactagttctgccacat

SEQ ID NO: 509302 - DNA, 33 bp, Homo sapien
ttcaaccagaagcgggtactagttctgccacat

SEQ ID NO: 509303 - DNA, 33 bp, Homo sapien
aggctgtatcctaagaaaacttttggcctccat

SEQ ID NO: 509304 - DNA, 33 bp, Homo sapien
aggctgtatcctaagagaacttttggcctccat

SEQ ID NO: 509305 - DNA, 33 bp, Homo sapien
tcagcttcctttaccaagttctgcaatctcttc

SEQ ID NO: 509306 - DNA, 33 bp, Homo sapien
tcagcttcctttaccacgttctgcaatctcttc

SEQ ID NO: 509307 - DNA, 33 bp, Homo sapien
gattctacaggccttcactaggatttgactgtt

SEQ ID NO: 509308 - DNA, 33 bp, Homo sapien
gattctacaggccttcgctaggatttgactgtt

SEQ ID NO: 509309 - DNA, 33 bp, Homo sapien
cagggaacacactgtacgtgacaagcaacctag

SEQ ID NO: 509310 - DNA, 33 bp, Homo sapien
cagggaacacactgtatgtgacaagcaacctag

SEQ ID NO: 509311 - DNA, 33 bp, Homo sapien
catgcaactgtggatcaactccctgcagcctgc

SEQ ID NO: 509312 - DNA, 33 bp, Homo sapien
catgcaactgtggatcgactccctgcagcctgc

SEQ ID NO: 509313 - DNA, 33 bp, Homo sapien
gattactgtcctcagacaggtcaggtcagctct

SEQ ID NO: 509314 - DNA, 33 bp, Homo sapien
gattactgtcctcagagaggtcaggtcagctct

SEQ ID NO: 509315 - DNA, 33 bp, Homo sapien
gtgaaaaatatgaatgacatacgtgaacaaatg

SEQ ID NO: 509316 - DNA, 33 bp, Homo sapien
gtgaaaaatatgaatgccatacgtgaacaaatg

SEQ ID NO: 509317 - DNA, 33 bp, Homo sapien
attttaagacactggaatatgaatttcacaaaa

SEQ ID NO: 509318 - DNA, 33 bp, Homo sapien
attttaagacactggagtatgaatttcacaaaa

SEQ ID NO: 509319 - DNA, 33 bp, Homo sapien
ctctggacgtgagaggaatctaaggtttcccaa

SEQ ID NO: 509320 - DNA, 33 bp, Homo sapien
ctctggacgtgagaggtatctaaggtttcccaa

SEQ ID NO: 509321 - DNA, 33 bp, Homo sapien
caataatcctgtaaaactaatgtgtgggaaaag

SEQ ID NO: 509322 - DNA, 33 bp, Homo sapien
caataatcctgtaaaattaatgtgtgggaaaag

SEQ ID NO: 509323 - DNA, 33 bp, Homo sapien
ccaggccttcatgtcccatctcagtagcaaaaa

SEQ ID NO: 509324 - DNA, 33 bp, Homo sapien
ccaggccttcatgtcctatctcagtagcaaaaa

SEQ ID NO: 509325 - DNA, 33 bp, Homo sapien
tttaataggaacagaaagtgaggtcttaggtca

SEQ ID NO: 509326 - DNA, 33 bp, Homo sapien
tttaataggaacagaaggtgaggtcttaggtca

SEQ ID NO: 509327 - DNA, 33 bp, Homo sapien
ggatactgttatacgaagtctaattaaagggca

SEQ ID NO: 509328 - DNA, 33 bp, Homo sapien
ggatactgttatacgaggtctaattaaagggca

SEQ ID NO: 509329 - DNA, 33 bp, Homo sapien
tctagtatctttaaaaccacaacttttgcaatc

SEQ ID NO: 509330 - DNA, 33 bp, Homo sapien
tctagtatctttaaaagcacaacttttgcaatc

SEQ ID NO: 509331 - DNA, 33 bp, Homo sapien
atagattgggtaaaaaaaatgtggtgcatatac

SEQ ID NO: 509332 - DNA, 33 bp, Homo sapien
atagattgggtaaaaataatgtggtgcatatac

SEQ ID NO: 509333 - DNA, 33 bp, Homo sapien
agtgagttagtctacaatggtggacattttatt

SEQ ID NO: 509334 - DNA, 33 bp, Homo sapien
agtgagttagtctacagtggtggacattttatt

SEQ ID NO: 509335 - DNA, 33 bp, Homo sapien
ggtaagcaaactaagacatggttcccatcttta

SEQ ID NO: 509336 - DNA, 33 bp, Homo sapien
ggtaagcaaactaagatatggttcccatcttta

SEQ ID NO: 509337 - DNA, 33 bp, Homo sapien
tcctgttggctgggaacatttggagatgataaa

SEQ ID NO: 509338 - DNA, 33 bp, Homo sapien
tcctgttggctgggaatatttggagatgataaa

SEQ ID NO: 509339 - DNA, 33 bp, Homo sapien
ttcatccactgagcagccaaatgtgcccccttc

SEQ ID NO: 509340 - DNA, 33 bp, Homo sapien
ttcatccactgagcaggcaaatgtgcccccttc

SEQ ID NO: 509341 - DNA, 33 bp, Homo sapien
actgatacaaccaatcacattgatctctcagag

SEQ ID NO: 509342 - DNA, 33 bp, Homo sapien
actgatacaaccaatctcattgatctctcagag

SEQ ID NO: 509343 - DNA, 33 bp, Homo sapien
tcaagcatgaatcagacgcagtttttcatctta

SEQ ID NO: 509344 - DNA, 33 bp, Homo sapien
tcaagcatgaatcagatgcagtttttcatctta

SEQ ID NO: 509345 - DNA, 33 bp, Homo sapien
gatggtgtctttataaaattgaggctttctatg

SEQ ID NO: 509346 - DNA, 33 bp, Homo sapien
gatggtgtctttataagattgaggctttctatg

SEQ ID NO: 509347 - DNA, 33 bp, Homo sapien
ctagaaaggttatactaacttaaatgtccatca

SEQ ID NO: 509348 - DNA, 33 bp, Homo sapien
ctagaaaggttatactgacttaaatgtccatca

SEQ ID NO: 509349 - DNA, 33 bp, Homo sapien
ctttcatcatttctcaaattgggtctcaagtct

SEQ ID NO: 509350 - DNA, 33 bp, Homo sapien
ctttcatcatttctcagattgggtctcaagtct

SEQ ID NO: 509351 - DNA, 33 bp, Homo sapien
ttttccactcgcctcacgtagtatggtgttttg

SEQ ID NO: 509352 - DNA, 33 bp, Homo sapien
ttttccactcgcctcatgtagtatggtgttttg

SEQ ID NO: 509353 - DNA, 33 bp, Homo sapien
ttagaggatctatttaaatcctatattcatgag

SEQ ID NO: 509354 - DNA, 33 bp, Homo sapien
ttagaggatctatttatatcctatattcatgag

SEQ ID NO: 509355 - DNA, 33 bp, Homo sapien
aagcaaattagaaccaataaggtccaaaagata

SEQ ID NO: 509356 - DNA, 33 bp, Homo sapien
aagcaaattagaaccagtaaggtccaaaagata

SEQ ID NO: 509357 - DNA, 33 bp, Homo sapien
ctgcatcctcccgatactaacctgagagtccct

SEQ ID NO: 509358 - DNA, 33 bp, Homo sapien
ctgcatcctcccgatagtaacctgagagtccct

SEQ ID NO: 509359 - DNA, 33 bp, Homo sapien
catgttctcaactctcaaatgggagcaactctg

SEQ ID NO: 509360 - DNA, 33 bp, Homo sapien
catgttctcaactctcgaatgggagcaactctg

SEQ ID NO: 509361 - DNA, 33 bp, Homo sapien
gctcagaggacaaaaaagtcaaaagaagacaag

SEQ ID NO: 509362 - DNA, 33 bp, Homo sapien
gctcagaggacaaaaatgtcaaaagaagacaag

SEQ ID NO: 509363 - DNA, 33 bp, Homo sapien
cagatgcccaaagggaatcagcctgctgggtgt

SEQ ID NO: 509364 - DNA, 33 bp, Homo sapien
cagatgcccaaagggattcagcctgctgggtgt

SEQ ID NO: 509365 - DNA, 33 bp, Homo sapien
ctgagttagatgctgagcgcctgtggactgaac

SEQ ID NO: 509366 - DNA, 33 bp, Homo sapien
ctgagttagatgctgatcgcctgtggactgaac

SEQ ID NO: 509367 - DNA, 33 bp, Homo sapien
gcattcaccttcccaccgggacttacactcaac

SEQ ID NO: 509368 - DNA, 33 bp, Homo sapien
gcattcaccttcccactgggacttacactcaac

SEQ ID NO: 509369 - DNA, 33 bp, Homo sapien
gctgagtggaatggtcactggtacagaacgtgt

SEQ ID NO: 509370 - DNA, 33 bp, Homo sapien
gctgagtggaatggtcgctggtacagaacgtgt

SEQ ID NO: 509371 - DNA, 33 bp, Homo sapien
ttccagccccaaattccagtagccactttaaag

SEQ ID NO: 509372 - DNA, 33 bp, Homo sapien
ttccagccccaaattcgagtagccactttaaag

SEQ ID NO: 509373 - DNA, 33 bp, Homo sapien
tttgttgctatttctgcaaagctgcctgttaat

SEQ ID NO: 509374 - DNA, 33 bp, Homo sapien
tttgttgctatttctggaaagctgcctgttaat

SEQ ID NO: 509375 - DNA, 33 bp, Homo sapien
cgaaaactgattattaagggcactctttaagct

SEQ ID NO: 509376 - DNA, 33 bp, Homo sapien
cgaaaactgattattaggggcactctttaagct

SEQ ID NO: 509377 - DNA, 33 bp, Homo sapien
tcatagagaacaagacacctgaggagatctcag

SEQ ID NO: 509378 - DNA, 33 bp, Homo sapien
tcatagagaacaagacgcctgaggagatctcag

SEQ ID NO: 509379 - DNA, 33 bp, Homo sapien
agaggctgtaattagcacatcatcagggaaagg

SEQ ID NO: 509380 - DNA, 33 bp, Homo sapien
agaggctgtaattagcgcatcatcagggaaagg

SEQ ID NO: 509381 - DNA, 33 bp, Homo sapien
gagtgaaaacaagaaaatcactcaggccaaagg

SEQ ID NO: 509382 - DNA, 33 bp, Homo sapien
gagtgaaaacaagaaagtcactcaggccaaagg

SEQ ID NO: 509383 - DNA, 33 bp, Homo sapien
acacactcatacacatcaactactctggctttc

SEQ ID NO: 509384 - DNA, 33 bp, Homo sapien
acacactcatacacattaactactctggctttc

SEQ ID NO: 509385 - DNA, 33 bp, Homo sapien
ccagtattcctcaaaactgaagatcatcaaaaa

SEQ ID NO: 509386 - DNA, 33 bp, Homo sapien
ccagtattcctcaaaattgaagatcatcaaaaa

SEQ ID NO: 509387 - DNA, 33 bp, Homo sapien
ttatattcacttcacaaaggtaggaagtatcaa

SEQ ID NO: 509388 - DNA, 33 bp, Homo sapien
ttatattcacttcacagaggtaggaagtatcaa

SEQ ID NO: 509389 - DNA, 33 bp, Homo sapien
tatataaagagattcacagcttaagacaaaaat

SEQ ID NO: 509390 - DNA, 33 bp, Homo sapien
tatataaagagattcatagcttaagacaaaaat

SEQ ID NO: 509391 - DNA, 33 bp, Homo sapien
gcttaatttttgtttccatcttttgctctggct

SEQ ID NO: 509392 - DNA, 33 bp, Homo sapien
gcttaatttttgtttcgatcttttgctctggct

SEQ ID NO: 509393 - DNA, 33 bp, Homo sapien
ccactctgccattccaatattcctaagcctttg

SEQ ID NO: 509394 - DNA, 33 bp, Homo sapien
ccactctgccattccagtattcctaagcctttg

SEQ ID NO: 509395 - DNA, 33 bp, Homo sapien
ttccctccctcttttacgtccagagtcacagtg

SEQ ID NO: 509396 - DNA, 33 bp, Homo sapien
ttccctccctcttttatgtccagagtcacagtg

SEQ ID NO: 509397 - DNA, 33 bp, Homo sapien
ctcacagcacagagaaagatctgtcaatccaca

SEQ ID NO: 509398 - DNA, 33 bp, Homo sapien
ctcacagcacagagaaggatctgtcaatccaca

SEQ ID NO: 509399 - DNA, 33 bp, Homo sapien
ttccatctcgttccaacaatgatccgtggggct

SEQ ID NO: 509400 - DNA, 33 bp, Homo sapien
ttccatctcgttccaataatgatccgtggggct

SEQ ID NO: 509401 - DNA, 33 bp, Homo sapien
atgtttcagaacattcaaattgtaatttcagta

SEQ ID NO: 509402 - DNA, 33 bp, Homo sapien
atgtttcagaacattcgaattgtaatttcagta

SEQ ID NO: 509403 - DNA, 33 bp, Homo sapien
attctacctactcaccaccttgtctgtagcagg

SEQ ID NO: 509404 - DNA, 33 bp, Homo sapien
attctacctactcaccgccttgtctgtagcagg

SEQ ID NO: 509405 - DNA, 33 bp, Homo sapien
gataaaagaacacttacattggagcaaacagga

SEQ ID NO: 509406 - DNA, 33 bp, Homo sapien
gataaaagaacacttatattggagcaaacagga

SEQ ID NO: 509407 - DNA, 33 bp, Homo sapien
taaacagtcatttagaatcctgaacagccatgc

SEQ ID NO: 509408 - DNA, 33 bp, Homo sapien
taaacagtcatttagagtcctgaacagccatgc

SEQ ID NO: 509409 - DNA, 33 bp, Homo sapien
tccttctttcttaggacacactgcgtggaggtt

SEQ ID NO: 509410 - DNA, 33 bp, Homo sapien
tccttctttcttaggatacactgcgtggaggtt

SEQ ID NO: 509411 - DNA, 33 bp, Homo sapien
aatattgtctagtaacacttatcgtgcgaatga

SEQ ID NO: 509412 - DNA, 33 bp, Homo sapien
aatattgtctagtaacgcttatcgtgcgaatga

SEQ ID NO: 509413 - DNA, 33 bp, Homo sapien
gtgaaatgtccaaatgcatagaacatgcaggaa

SEQ ID NO: 509414 - DNA, 33 bp, Homo sapien
gtgaaatgtccaaatgtatagaacatgcaggaa

SEQ ID NO: 509415 - DNA, 33 bp, Homo sapien
tctcatttttcactccaaatcaggaagcagagg

SEQ ID NO: 509416 - DNA, 33 bp, Homo sapien
tctcatttttcactccgaatcaggaagcagagg

SEQ ID NO: 509417 - DNA, 33 bp, Homo sapien
tttcactttaagatggaattcaccttaatgaac

SEQ ID NO: 509418 - DNA, 33 bp, Homo sapien
tttcactttaagatgggattcaccttaatgaac

SEQ ID NO: 509419 - DNA, 33 bp, Homo sapien
atatgaatgcactttaactattaatacttattc

SEQ ID NO: 509420 - DNA, 33 bp, Homo sapien
atatgaatgcactttagctattaatacttattc

SEQ ID NO: 509421 - DNA, 33 bp, Homo sapien
ttcattttctcacctacgaaatgccactatgta

SEQ ID NO: 509422 - DNA, 33 bp, Homo sapien
ttcattttctcacctatgaaatgccactatgta

SEQ ID NO: 509423 - DNA, 33 bp, Homo sapien
acactttaaattttcacaattgccttggaccat

SEQ ID NO: 509424 - DNA, 33 bp, Homo sapien
acactttaaattttcataattgccttggaccat

SEQ ID NO: 509425 - DNA, 33 bp, Homo sapien
cagcctgtaaaattgcactgcagacatagatgc

SEQ ID NO: 509426 - DNA, 33 bp, Homo sapien
cagcctgtaaaattgcgctgcagacatagatgc

SEQ ID NO: 509427 - DNA, 33 bp, Homo sapien
caagatacaatggtgaagagattaatttggtga

SEQ ID NO: 509428 - DNA, 33 bp, Homo sapien
caagatacaatggtgaggagattaatttggtga

SEQ ID NO: 509429 - DNA, 33 bp, Homo sapien
gcggctctcgggtggcactttgctccttggtaa

SEQ ID NO: 509430 - DNA, 33 bp, Homo sapien
gcggctctcgggtggcgctttgctccttggtaa

SEQ ID NO: 509431 - DNA, 33 bp, Homo sapien
gtggccctgtaagtgaagtgcagcctgagtttc

SEQ ID NO: 509432 - DNA, 33 bp, Homo sapien
gtggccctgtaagtgaggtgcagcctgagtttc

SEQ ID NO: 509433 - DNA, 33 bp, Homo sapien
ccagtcccaggatagaacttttatagtagcaca

SEQ ID NO: 509434 - DNA, 33 bp, Homo sapien
ccagtcccaggatagaccttttatagtagcaca

SEQ ID NO: 509435 - DNA, 33 bp, Homo sapien
aagtgcctgacacaccaaaaacttcaaaggttt

SEQ ID NO: 509436 - DNA, 33 bp, Homo sapien
aagtgcctgacacaccgaaaacttcaaaggttt

SEQ ID NO: 509437 - DNA, 33 bp, Homo sapien
gcctgctccgggcctagatttcagttcctgtta

SEQ ID NO: 509438 - DNA, 33 bp, Homo sapien
gcctgctccgggcctatatttcagttcctgtta

SEQ ID NO: 509439 - DNA, 33 bp, Homo sapien
gcaggcctgttaaggaagtggaggtgagagaat

SEQ ID NO: 509440 - DNA, 33 bp, Homo sapien
gcaggcctgttaaggacgtggaggtgagagaat

SEQ ID NO: 509441 - DNA, 33 bp, Homo sapien
atgtgttcaatagacacaagagttttgcaaaaa

SEQ ID NO: 509442 - DNA, 33 bp, Homo sapien
atgtgttcaatagacagaagagttttgcaaaaa

SEQ ID NO: 509443 - DNA, 33 bp, Homo sapien
ataaatattaaacaaaatactgtaggtcaagaa

SEQ ID NO: 509444 - DNA, 33 bp, Homo sapien
ataaatattaaacaaactactgtaggtcaagaa

SEQ ID NO: 509445 - DNA, 33 bp, Homo sapien
gaacgaaagaccataaaccacttctctatgttt

SEQ ID NO: 509446 - DNA, 33 bp, Homo sapien
gaacgaaagaccataagccacttctctatgttt

SEQ ID NO: 509447 - DNA, 33 bp, Homo sapien
gtgagggtgacaaaggcagaggaagaacccagt

SEQ ID NO: 509448 - DNA, 33 bp, Homo sapien
gtgagggtgacaaaggtagaggaagaacccagt

SEQ ID NO: 509449 - DNA, 33 bp, Homo sapien
agaacaatgggggatcactggcccaaggcacca

SEQ ID NO: 509450 - DNA, 33 bp, Homo sapien
agaacaatgggggatcgctggcccaaggcacca

SEQ ID NO: 509451 - DNA, 33 bp, Homo sapien
cagagctgttagtcaacggggatttgtcttacc

SEQ ID NO: 509452 - DNA, 33 bp, Homo sapien
cagagctgttagtcaatggggatttgtcttacc

SEQ ID NO: 509453 - DNA, 33 bp, Homo sapien
ttcatgttcaatctcaagtaggacacagcctgt

SEQ ID NO: 509454 - DNA, 33 bp, Homo sapien
ttcatgttcaatctcaggtaggacacagcctgt

SEQ ID NO: 509455 - DNA, 33 bp, Homo sapien
actgaaactactactacacttcttattaaggga

SEQ ID NO: 509456 - DNA, 33 bp, Homo sapien
actgaaactactactagacttcttattaaggga

SEQ ID NO: 509457 - DNA, 33 bp, Homo sapien
gtactgctgctctcatcactatcttttcctcta

SEQ ID NO: 509458 - DNA, 33 bp, Homo sapien
gtactgctgctctcattactatcttttcctcta

SEQ ID NO: 509459 - DNA, 33 bp, Homo sapien
cattcctaataagaaaagtaccagccatatgtg

SEQ ID NO: 509460 - DNA, 33 bp, Homo sapien
cattcctaataagaaatgtaccagccatatgtg

SEQ ID NO: 509461 - DNA, 33 bp, Homo sapien
tttgtgaattttctaccatggaagaactcaaac

SEQ ID NO: 509462 - DNA, 33 bp, Homo sapien
tttgtgaattttctactatggaagaactcaaac

SEQ ID NO: 509463 - DNA, 33 bp, Homo sapien
tgatgcagggaataacaacataagagtaaggac

SEQ ID NO: 509464 - DNA, 33 bp, Homo sapien
tgatgcagggaataactacataagagtaaggac

SEQ ID NO: 509465 - DNA, 33 bp, Homo sapien
agctgattatcatcaaaactataattactcacg

SEQ ID NO: 509466 - DNA, 33 bp, Homo sapien
agctgattatcatcaacactataattactcacg

SEQ ID NO: 509467 - DNA, 33 bp, Homo sapien
ctcaagatgctttctccatcaaatgatttgctg

SEQ ID NO: 509468 - DNA, 33 bp, Homo sapien
ctcaagatgctttctctatcaaatgatttgctg

SEQ ID NO: 509469 - DNA, 33 bp, Homo sapien
aactaacaactgctcacgtttaaatgctccatc

SEQ ID NO: 509470 - DNA, 33 bp, Homo sapien
aactaacaactgctcatgtttaaatgctccatc

SEQ ID NO: 509471 - DNA, 33 bp, Homo sapien
tttatgtagtctataacgacagggacctccaga

SEQ ID NO: 509472 - DNA, 33 bp, Homo sapien
tttatgtagtctataatgacagggacctccaga

SEQ ID NO: 509473 - DNA, 33 bp, Homo sapien
tctcccctcatgtcaactgtatcttatctcaga

SEQ ID NO: 509474 - DNA, 33 bp, Homo sapien
tctcccctcatgtcaattgtatcttatctcaga

SEQ ID NO: 509475 - DNA, 33 bp, Homo sapien
tagagcaaatggagagaaaaattggataccaat

SEQ ID NO: 509476 - DNA, 33 bp, Homo sapien
tagagcaaatggagagcaaaattggataccaat

SEQ ID NO: 509477 - DNA, 33 bp, Homo sapien
taccaatggagggctcaatatcttgaaagcatt

SEQ ID NO: 509478 - DNA, 33 bp, Homo sapien
taccaatggagggctcgatatcttgaaagcatt

SEQ ID NO: 509479 - DNA, 33 bp, Homo sapien
atcaaatgtgttaaaaaggaactctcgaggcag

SEQ ID NO: 509480 - DNA, 33 bp, Homo sapien
atcaaatgtgttaaaacggaactctcgaggcag

SEQ ID NO: 509481 - DNA, 33 bp, Homo sapien
agtctgcaaattacaacgtgagaaaccccactg

SEQ ID NO: 509482 - DNA, 33 bp, Homo sapien
agtctgcaaattacaatgtgagaaaccccactg

SEQ ID NO: 509483 - DNA, 33 bp, Homo sapien
ttatccctttcaagcacacgtgccccttcaaat

SEQ ID NO: 509484 - DNA, 33 bp, Homo sapien
ttatccctttcaagcatacgtgccccttcaaat

SEQ ID NO: 509485 - DNA, 33 bp, Homo sapien
gccgagtgccaagaacagagagtgtgttaaagc

SEQ ID NO: 509486 - DNA, 33 bp, Homo sapien
gccgagtgccaagaacggagagtgtgttaaagc

SEQ ID NO: 509487 - DNA, 33 bp, Homo sapien
caccccagaatctgccaaaattatgcaaactgg

SEQ ID NO: 509488 - DNA, 33 bp, Homo sapien
caccccagaatctgccgaaattatgcaaactgg

SEQ ID NO: 509489 - DNA, 33 bp, Homo sapien
gcccactagaccgtagcaggtgtatccttcatg

SEQ ID NO: 509490 - DNA, 33 bp, Homo sapien
gcccactagaccgtagtaggtgtatccttcatg

SEQ ID NO: 509491 - DNA, 33 bp, Homo sapien
cagaaagtgtgggggacacgagctaccagagaa

SEQ ID NO: 509492 - DNA, 33 bp, Homo sapien
cagaaagtgtgggggatacgagctaccagagaa

SEQ ID NO: 509493 - DNA, 33 bp, Homo sapien
tgggaagagaagtgggacatagggcagatgttc

SEQ ID NO: 509494 - DNA, 33 bp, Homo sapien
tgggaagagaagtggggcatagggcagatgttc

SEQ ID NO: 509495 - DNA, 33 bp, Homo sapien
cagaaaccgagttaggaatgcttctcacagcaa

SEQ ID NO: 509496 - DNA, 33 bp, Homo sapien
cagaaaccgagttaggcatgcttctcacagcaa

SEQ ID NO: 509497 - DNA, 33 bp, Homo sapien
acacaaggctcagcgaccttttttctgtttctt

SEQ ID NO: 509498 - DNA, 33 bp, Homo sapien
acacaaggctcagcgatcttttttctgtttctt

SEQ ID NO: 509499 - DNA, 33 bp, Homo sapien
aactgagagatggggacgagaaagccaggttct

SEQ ID NO: 509500 - DNA, 33 bp, Homo sapien
aactgagagatggggatgagaaagccaggttct

SEQ ID NO: 509501 - DNA, 33 bp, Homo sapien
attcgtgccagccaagccattctgtgggaggaa

SEQ ID NO: 509502 - DNA, 33 bp, Homo sapien
attcgtgccagccaagtcattctgtgggaggaa

SEQ ID NO: 509503 - DNA, 33 bp, Homo sapien
ccaactgtccagatcacagctgaagagcagagg

SEQ ID NO: 509504 - DNA, 33 bp, Homo sapien
ccaactgtccagatcatagctgaagagcagagg

SEQ ID NO: 509505 - DNA, 33 bp, Homo sapien
cagggtgagaagatagaactttgatgagctgct

SEQ ID NO: 509506 - DNA, 33 bp, Homo sapien
cagggtgagaagatagcactttgatgagctgct

SEQ ID NO: 509507 - DNA, 33 bp, Homo sapien
ctcacaatgatcctgcaaggtctcacagtcttc

SEQ ID NO: 509508 - DNA, 33 bp, Homo sapien
ctcacaatgatcctgcgaggtctcacagtcttc

SEQ ID NO: 509509 - DNA, 33 bp, Homo sapien
ttttgtcttgtgacacaaaattgttggctttac

SEQ ID NO: 509510 - DNA, 33 bp, Homo sapien
ttttgtcttgtgacaccaaattgttggctttac

SEQ ID NO: 509511 - DNA, 33 bp, Homo sapien
cataaagcatatcttgaataagacaacagaggc

SEQ ID NO: 509512 - DNA, 33 bp, Homo sapien
cataaagcatatcttgcataagacaacagaggc

SEQ ID NO: 509513 - DNA, 33 bp, Homo sapien
ccacgtgtccttgatcaccctgcattctgacca

SEQ ID NO: 509514 - DNA, 33 bp, Homo sapien
ccacgtgtccttgatcgccctgcattctgacca

SEQ ID NO: 509515 - DNA, 33 bp, Homo sapien
ttcaggaagagtcccaagtagggcaaccagatc

SEQ ID NO: 509516 - DNA, 33 bp, Homo sapien
ttcaggaagagtcccaggtagggcaaccagatc

SEQ ID NO: 509517 - DNA, 33 bp, Homo sapien
ctccagagacttctgacgctacagacaatcttt

SEQ ID NO: 509518 - DNA, 33 bp, Homo sapien
ctccagagacttctgatgctacagacaatcttt

SEQ ID NO: 509519 - DNA, 33 bp, Homo sapien
aatcaagatgttgataaggtttgctccttctga

SEQ ID NO: 509520 - DNA, 33 bp, Homo sapien
aatcaagatgttgatagggtttgctccttctga

SEQ ID NO: 509521 - DNA, 33 bp, Homo sapien
gctagtgattcttctgaaatgatgaaagctgct

SEQ ID NO: 509522 - DNA, 33 bp, Homo sapien
gctagtgattcttctgcaatgatgaaagctgct

SEQ ID NO: 509523 - DNA, 33 bp, Homo sapien
tattcagagtttcttacatcagacaaaaacctt

SEQ ID NO: 509524 - DNA, 33 bp, Homo sapien
tattcagagtttcttatatcagacaaaaacctt

SEQ ID NO: 509525 - DNA, 33 bp, Homo sapien
ggtaggtctgaatgaaacttcttgtccagctct

SEQ ID NO: 509526 - DNA, 33 bp, Homo sapien
ggtaggtctgaatgaaccttcttgtccagctct

SEQ ID NO: 509527 - DNA, 33 bp, Homo sapien
actaaagcaaaagtcaataaacaaaggattgta

SEQ ID NO: 509528 - DNA, 33 bp, Homo sapien
actaaagcaaaagtcagtaaacaaaggattgta

SEQ ID NO: 509529 - DNA, 33 bp, Homo sapien
tcatcgagggaatacaaacagaggtgatgggct

SEQ ID NO: 509530 - DNA, 33 bp, Homo sapien
tcatcgagggaatacacacagaggtgatgggct

SEQ ID NO: 509531 - DNA, 33 bp, Homo sapien
gaagcagtcacgactaacaaagggagcctgtgc

SEQ ID NO: 509532 - DNA, 33 bp, Homo sapien
gaagcagtcacgactagcaaagggagcctgtgc

SEQ ID NO: 509533 - DNA, 33 bp, Homo sapien
cagctggaaggaaacccggagtggatgctggag

SEQ ID NO: 509534 - DNA, 33 bp, Homo sapien
cagctggaaggaaacctggagtggatgctggag

SEQ ID NO: 509535 - DNA, 33 bp, Homo sapien
gggtggctattttatcacaacgagcctctgttt

SEQ ID NO: 509536 - DNA, 33 bp, Homo sapien
gggtggctattttatcgcaacgagcctctgttt

SEQ ID NO: 509537 - DNA, 33 bp, Homo sapien
cgagcccttctcaacgccattctggcctccttt

SEQ ID NO: 509538 - DNA, 33 bp, Homo sapien
cgagcccttctcaacgtcattctggcctccttt

SEQ ID NO: 509539 - DNA, 33 bp, Homo sapien
caggagggggattcaaatgttgcggcaaagcat

SEQ ID NO: 509540 - DNA, 33 bp, Homo sapien
caggagggggattcaagtgttgcggcaaagcat

SEQ ID NO: 509541 - DNA, 33 bp, Homo sapien
tatttactttccaccacgtgcctggctccatgc

SEQ ID NO: 509542 - DNA, 33 bp, Homo sapien
tatttactttccaccatgtgcctggctccatgc

SEQ ID NO: 509543 - DNA, 33 bp, Homo sapien
atgagctcaaggagataagcaaggtcttcccag

SEQ ID NO: 509544 - DNA, 33 bp, Homo sapien
atgagctcaaggagatgagcaaggtcttcccag

SEQ ID NO: 509545 - DNA, 33 bp, Homo sapien
atctaggtcctctaacgagcctggtttattccc

SEQ ID NO: 509546 - DNA, 33 bp, Homo sapien
atctaggtcctctaactagcctggtttattccc

SEQ ID NO: 509547 - DNA, 33 bp, Homo sapien
gagacccaccaacaaacatccctgtgtcttttg

SEQ ID NO: 509548 - DNA, 33 bp, Homo sapien
gagacccaccaacaaatatccctgtgtcttttg

SEQ ID NO: 509549 - DNA, 33 bp, Homo sapien
ggtaagcaaagcacaacgctaactgacgtgtgg

SEQ ID NO: 509550 - DNA, 33 bp, Homo sapien
ggtaagcaaagcacaatgctaactgacgtgtgg

SEQ ID NO: 509551 - DNA, 33 bp, Homo sapien
agccctgcaaggtagacataatagtccccactg

SEQ ID NO: 509552 - DNA, 33 bp, Homo sapien
agccctgcaaggtagatataatagtccccactg

SEQ ID NO: 509553 - DNA, 33 bp, Homo sapien
tcctcaggcactaagaaccagaagaaaatgcct

SEQ ID NO: 509554 - DNA, 33 bp, Homo sapien
tcctcaggcactaagagccagaagaaaatgcct

SEQ ID NO: 509555 - DNA, 33 bp, Homo sapien
gaaaagtaagaaccaccgaatggaaatagagaa

SEQ ID NO: 509556 - DNA, 33 bp, Homo sapien
gaaaagtaagaaccactgaatggaaatagagaa

SEQ ID NO: 509557 - DNA, 33 bp, Homo sapien
ggtgtctgttccatgcaatgctggggttaccat

SEQ ID NO: 509558 - DNA, 33 bp, Homo sapien
ggtgtctgttccatgcgatgctggggttaccat

SEQ ID NO: 509559 - DNA, 33 bp, Homo sapien
actgaaaattaaatcacaacagcctgtgcccta

SEQ ID NO: 509560 - DNA, 33 bp, Homo sapien
actgaaaattaaatcataacagcctgtgcccta

SEQ ID NO: 509561 - DNA, 33 bp, Homo sapien
tataaaggaccaccccactaaacacacacatac

SEQ ID NO: 509562 - DNA, 33 bp, Homo sapien
tataaaggaccacccccctaaacacacacatac

SEQ ID NO: 509563 - DNA, 33 bp, Homo sapien
atcacaaaaccataaagagcggcctatatccca

SEQ ID NO: 509564 - DNA, 33 bp, Homo sapien
atcacaaaaccataaatagcggcctatatccca

SEQ ID NO: 509565 - DNA, 33 bp, Homo sapien
tggttttgtgatcccaaaggcaattcagaaaag

SEQ ID NO: 509566 - DNA, 33 bp, Homo sapien
tggttttgtgatcccataggcaattcagaaaag

SEQ ID NO: 509567 - DNA, 33 bp, Homo sapien
tgctggtgaactatgaacattttcaagtgaata

SEQ ID NO: 509568 - DNA, 33 bp, Homo sapien
tgctggtgaactatgaccattttcaagtgaata

SEQ ID NO: 509569 - DNA, 33 bp, Homo sapien
gtggggctccaggaaaccatctcacacctgggc

SEQ ID NO: 509570 - DNA, 33 bp, Homo sapien
gtggggctccaggaaatcatctcacacctgggc

SEQ ID NO: 509571 - DNA, 33 bp, Homo sapien
ctaagacaaaacaaaacgcagtaccactgacgt

SEQ ID NO: 509572 - DNA, 33 bp, Homo sapien
ctaagacaaaacaaaatgcagtaccactgacgt

SEQ ID NO: 509573 - DNA, 33 bp, Homo sapien
tcaggggaagaaaggaaaggttgctgggaacat

SEQ ID NO: 509574 - DNA, 33 bp, Homo sapien
tcaggggaagaaaggacaggttgctgggaacat

SEQ ID NO: 509575 - DNA, 33 bp, Homo sapien
catggcttttagccaccgtagagttgagtttgt

SEQ ID NO: 509576 - DNA, 33 bp, Homo sapien
catggcttttagccactgtagagttgagtttgt

SEQ ID NO: 509577 - DNA, 33 bp, Homo sapien
tcccaccattcagacacgtagtaatggaaggaa

SEQ ID NO: 509578 - DNA, 33 bp, Homo sapien
tcccaccattcagacatgtagtaatggaaggaa

SEQ ID NO: 509579 - DNA, 33 bp, Homo sapien
acattatggaagttaaaagatgggttctgacat

SEQ ID NO: 509580 - DNA, 33 bp, Homo sapien
acattatggaagttaagagatgggttctgacat

SEQ ID NO: 509581 - DNA, 33 bp, Homo sapien
attattgccacctagacctgcatatttaacatt

SEQ ID NO: 509582 - DNA, 33 bp, Homo sapien
attattgccacctagatctgcatatttaacatt

SEQ ID NO: 509583 - DNA, 33 bp, Homo sapien
taaaatgaattgtggcagatcatacaatgtgtc

SEQ ID NO: 509584 - DNA, 33 bp, Homo sapien
taaaatgaattgtggcggatcatacaatgtgtc

SEQ ID NO: 509585 - DNA, 33 bp, Homo sapien
cagtgattgaaatgcacctatgataccaactgc

SEQ ID NO: 509586 - DNA, 33 bp, Homo sapien
cagtgattgaaatgcatctatgataccaactgc

SEQ ID NO: 509587 - DNA, 33 bp, Homo sapien
ccccttattgccaccccaatttcctcagtgtga

SEQ ID NO: 509588 - DNA, 33 bp, Homo sapien
ccccttattgccaccctaatttcctcagtgtga

SEQ ID NO: 509589 - DNA, 33 bp, Homo sapien
gctataactgttactggacttatttctttacta

SEQ ID NO: 509590 - DNA, 33 bp, Homo sapien
gctataactgttactgtacttatttctttacta

SEQ ID NO: 509591 - DNA, 33 bp, Homo sapien
tttctttactacaatcccttatttatgatcatg

SEQ ID NO: 509592 - DNA, 33 bp, Homo sapien
tttctttactacaatctcttatttatgatcatg

SEQ ID NO: 509593 - DNA, 33 bp, Homo sapien
gagagcccaaaacaaaagaggagtatgctggca

SEQ ID NO: 509594 - DNA, 33 bp, Homo sapien
gagagcccaaaacaaacgaggagtatgctggca

SEQ ID NO: 509595 - DNA, 33 bp, Homo sapien
aaggcatcaaggtcccagaatgaggacaggaag

SEQ ID NO: 509596 - DNA, 33 bp, Homo sapien
aaggcatcaaggtccccgaatgaggacaggaag

SEQ ID NO: 509597 - DNA, 33 bp, Homo sapien
ccttgttctggaacggacccagaggcttgcctt

SEQ ID NO: 509598 - DNA, 33 bp, Homo sapien
ccttgttctggaacggccccagaggcttgcctt

SEQ ID NO: 509599 - DNA, 33 bp, Homo sapien
gctatggttccaaggaaaagaggccaaggaggt

SEQ ID NO: 509600 - DNA, 33 bp, Homo sapien
gctatggttccaaggagaagaggccaaggaggt

SEQ ID NO: 509601 - DNA, 33 bp, Homo sapien
gtccccttccacggaccgcagtgtctctcaaaa

SEQ ID NO: 509602 - DNA, 33 bp, Homo sapien
gtccccttccacggacggcagtgtctctcaaaa

SEQ ID NO: 509603 - DNA, 33 bp, Homo sapien
gaaatatccagccccaaatgttcagagtactga

SEQ ID NO: 509604 - DNA, 33 bp, Homo sapien
gaaatatccagccccagatgttcagagtactga

SEQ ID NO: 509605 - DNA, 33 bp, Homo sapien
ctcatctgtaaagtcacgggactggactcaggc

SEQ ID NO: 509606 - DNA, 33 bp, Homo sapien
ctcatctgtaaagtcatgggactggactcaggc

SEQ ID NO: 509607 - DNA, 33 bp, Homo sapien
cgggagcaagaaggaagcagagcacagagacac

SEQ ID NO: 509608 - DNA, 33 bp, Homo sapien
cgggagcaagaaggaatcagagcacagagacac

SEQ ID NO: 509609 - DNA, 33 bp, Homo sapien
agccccatgctctcccacaaagtctgattctca

SEQ ID NO: 509610 - DNA, 33 bp, Homo sapien
agccccatgctctcccgcaaagtctgattctca

SEQ ID NO: 509611 - DNA, 33 bp, Homo sapien
cctaagtgtcaaacaactggggaaggcatcatt

SEQ ID NO: 509612 - DNA, 33 bp, Homo sapien
cctaagtgtcaaacaattggggaaggcatcatt

SEQ ID NO: 509613 - DNA, 33 bp, Homo sapien
tgcatcagacttgtcccatgtttccaatgcttt

SEQ ID NO: 509614 - DNA, 33 bp, Homo sapien
tgcatcagacttgtccgatgtttccaatgcttt

SEQ ID NO: 509615 - DNA, 33 bp, Homo sapien
tttgatgaaacgataacatccttgtcttcaatt

SEQ ID NO: 509616 - DNA, 33 bp, Homo sapien
tttgatgaaacgataatatccttgtcttcaatt

SEQ ID NO: 509617 - DNA, 33 bp, Homo sapien
taaggttaactatactcaggctgctgatctatt

SEQ ID NO: 509618 - DNA, 33 bp, Homo sapien
taaggttaactatacttaggctgctgatctatt

SEQ ID NO: 509619 - DNA, 33 bp, Homo sapien
tagctcctactagtcacggactcattttctgga

SEQ ID NO: 509620 - DNA, 33 bp, Homo sapien
tagctcctactagtcatggactcattttctgga

SEQ ID NO: 509621 - DNA, 33 bp, Homo sapien
tgctggtttctgatccaaaactccttgaagaca

SEQ ID NO: 509622 - DNA, 33 bp, Homo sapien
tgctggtttctgatcctaaactccttgaagaca

SEQ ID NO: 509623 - DNA, 33 bp, Homo sapien
ttaactgtattggtcacgttaagttaggtcgtg

SEQ ID NO: 509624 - DNA, 33 bp, Homo sapien
ttaactgtattggtcaggttaagttaggtcgtg

SEQ ID NO: 509625 - DNA, 33 bp, Homo sapien
ggcaagaaaggggagcagcacagttgtgaagtc

SEQ ID NO: 509626 - DNA, 33 bp, Homo sapien
ggcaagaaaggggagcggcacagttgtgaagtc

SEQ ID NO: 509627 - DNA, 33 bp, Homo sapien
agagttagaagaggaaagtccatgctcacccct

SEQ ID NO: 509628 - DNA, 33 bp, Homo sapien
agagttagaagaggaaggtccatgctcacccct

SEQ ID NO: 509629 - DNA, 33 bp, Homo sapien
tctggttatctttctaatactgcaaagtccacc

SEQ ID NO: 509630 - DNA, 33 bp, Homo sapien
tctggttatctttctagtactgcaaagtccacc

SEQ ID NO: 509631 - DNA, 33 bp, Homo sapien
aggaggaattgaagagaatcacagagaaacaga

SEQ ID NO: 509632 - DNA, 33 bp, Homo sapien
aggaggaattgaagaggatcacagagaaacaga

SEQ ID NO: 509633 - DNA, 33 bp, Homo sapien
ttccttgcatttcactaacatttcactgggtca

SEQ ID NO: 509634 - DNA, 33 bp, Homo sapien
ttccttgcatttcactgacatttcactgggtca

SEQ ID NO: 509635 - DNA, 33 bp, Homo sapien
ataagggttatcgcacaattctccccactttga

SEQ ID NO: 509636 - DNA, 33 bp, Homo sapien
ataagggttatcgcaccattctccccactttga

SEQ ID NO: 509637 - DNA, 33 bp, Homo sapien
atcttcagctttatcaatacatggacccaaaca

SEQ ID NO: 509638 - DNA, 33 bp, Homo sapien
atcttcagctttatcagtacatggacccaaaca

SEQ ID NO: 509639 - DNA, 33 bp, Homo sapien
ctgaaatctcaactgccgaacacaaccaaagtt

SEQ ID NO: 509640 - DNA, 33 bp, Homo sapien
ctgaaatctcaactgctgaacacaaccaaagtt

SEQ ID NO: 509641 - DNA, 33 bp, Homo sapien
gtgtgtagcttcctgaatcactgtagcagagca

SEQ ID NO: 509642 - DNA, 33 bp, Homo sapien
gtgtgtagcttcctgagtcactgtagcagagca

SEQ ID NO: 509643 - DNA, 33 bp, Homo sapien
ccgccagaggcgccagaaactagggacggtcct

SEQ ID NO: 509644 - DNA, 33 bp, Homo sapien
ccgccagaggcgccaggaactagggacggtcct

SEQ ID NO: 509645 - DNA, 33 bp, Homo sapien
ccactctcagggaatagaagaatacgtgccctt

SEQ ID NO: 509646 - DNA, 33 bp, Homo sapien
ccactctcagggaatataagaatacgtgccctt

SEQ ID NO: 509647 - DNA, 33 bp, Homo sapien
tcccatcatgatgtgacgtgccattgaatatgg

SEQ ID NO: 509648 - DNA, 33 bp, Homo sapien
tcccatcatgatgtgatgtgccattgaatatgg

SEQ ID NO: 509649 - DNA, 33 bp, Homo sapien
attctgaaagcctttgcaatctctgaggtcaac

SEQ ID NO: 509650 - DNA, 33 bp, Homo sapien
attctgaaagcctttgtaatctctgaggtcaac

SEQ ID NO: 509651 - DNA, 33 bp, Homo sapien
ctaggagtgaatatcacatggtaggtttatggt

SEQ ID NO: 509652 - DNA, 33 bp, Homo sapien
ctaggagtgaatatcatatggtaggtttatggt

SEQ ID NO: 509653 - DNA, 33 bp, Homo sapien
taatgaaacattgaaaaacactgcataaagcta

SEQ ID NO: 509654 - DNA, 33 bp, Homo sapien
taatgaaacattgaaagacactgcataaagcta

SEQ ID NO: 509655 - DNA, 33 bp, Homo sapien
taaaaccagagcctcaagtttgggatgggaaac

SEQ ID NO: 509656 - DNA, 33 bp, Homo sapien
taaaaccagagcctcaggtttgggatgggaaac

SEQ ID NO: 509657 - DNA, 33 bp, Homo sapien
aatttaaggcaagttgaaagttatgagtgttga

SEQ ID NO: 509658 - DNA, 33 bp, Homo sapien
aatttaaggcaagttgcaagttatgagtgttga

SEQ ID NO: 509659 - DNA, 33 bp, Homo sapien
gcagggagctctgccaagctaagtgagcgggtt

SEQ ID NO: 509660 - DNA, 33 bp, Homo sapien
gcagggagctctgccaggctaagtgagcgggtt

SEQ ID NO: 509661 - DNA, 33 bp, Homo sapien
gtgtggttcagagcaaagcttctcaaactgtaa

SEQ ID NO: 509662 - DNA, 33 bp, Homo sapien
gtgtggttcagagcaaggcttctcaaactgtaa

SEQ ID NO: 509663 - DNA, 33 bp, Homo sapien
tcacatactgcagcgacgactttgtgcacagac

SEQ ID NO: 509664 - DNA, 33 bp, Homo sapien
tcacatactgcagcgatgactttgtgcacagac

SEQ ID NO: 509665 - DNA, 33 bp, Homo sapien
gaggtgtgacatggaactgcagccataggagag

SEQ ID NO: 509666 - DNA, 33 bp, Homo sapien
gaggtgtgacatggaattgcagccataggagag

SEQ ID NO: 509667 - DNA, 33 bp, Homo sapien
tcacaatagttaaaacccacctgcccctatcac

SEQ ID NO: 509668 - DNA, 33 bp, Homo sapien
tcacaatagttaaaactcacctgcccctatcac

SEQ ID NO: 509669 - DNA, 33 bp, Homo sapien
ctggaaggaatgcttacaggaaaccaggagaga

SEQ ID NO: 509670 - DNA, 33 bp, Homo sapien
ctggaaggaatgcttataggaaaccaggagaga

SEQ ID NO: 509671 - DNA, 33 bp, Homo sapien
tttttcttctgaccctcaatcattttcctcctc

SEQ ID NO: 509672 - DNA, 33 bp, Homo sapien
tttttcttctgacccttaatcattttcctcctc

SEQ ID NO: 509673 - DNA, 33 bp, Homo sapien
tacaagacagtaataagggttagagaccatgtt

SEQ ID NO: 509674 - DNA, 33 bp, Homo sapien
tacaagacagtaataatggttagagaccatgtt

SEQ ID NO: 509675 - DNA, 33 bp, Homo sapien
gagagacctgaccccaatagtgctgagatttta

SEQ ID NO: 509676 - DNA, 33 bp, Homo sapien
gagagacctgaccccagtagtgctgagatttta

SEQ ID NO: 509677 - DNA, 33 bp, Homo sapien
gggtggacactctgaacggccaagaacagcctc

SEQ ID NO: 509678 - DNA, 33 bp, Homo sapien
gggtggacactctgaatggccaagaacagcctc

SEQ ID NO: 509679 - DNA, 33 bp, Homo sapien
ggcatttattgctccaatctatgattttgataa

SEQ ID NO: 509680 - DNA, 33 bp, Homo sapien
ggcatttattgctccattctatgattttgataa

SEQ ID NO: 509681 - DNA, 33 bp, Homo sapien
ttttgaaagcctaaaaggttgtgttgaggtgag

SEQ ID NO: 509682 - DNA, 33 bp, Homo sapien
ttttgaaagcctaaaatgttgtgttgaggtgag

SEQ ID NO: 509683 - DNA, 33 bp, Homo sapien
tttctctccaagcctcgctggactctaagagaa

SEQ ID NO: 509684 - DNA, 33 bp, Homo sapien
tttctctccaagcctctctggactctaagagaa

SEQ ID NO: 509685 - DNA, 33 bp, Homo sapien
atatctagcttatgagaaagaaaacttgctcaa

SEQ ID NO: 509686 - DNA, 33 bp, Homo sapien
atatctagcttatgaggaagaaaacttgctcaa

SEQ ID NO: 509687 - DNA, 33 bp, Homo sapien
actcctgcccaccgaggacccctctgagaggcc

SEQ ID NO: 509688 - DNA, 33 bp, Homo sapien
actcctgcccaccgagtacccctctgagaggcc

SEQ ID NO: 509689 - DNA, 33 bp, Homo sapien
cccaccttacagatgacaaacagaaattcagag

SEQ ID NO: 509690 - DNA, 33 bp, Homo sapien
cccaccttacagatgagaaacagaaattcagag

SEQ ID NO: 509691 - DNA, 33 bp, Homo sapien
tatctaagctagactccactaagcagctctgcc

SEQ ID NO: 509692 - DNA, 33 bp, Homo sapien
tatctaagctagactcgactaagcagctctgcc

SEQ ID NO: 509693 - DNA, 33 bp, Homo sapien
agccatcaatgtattagagctcccaaatttgcc

SEQ ID NO: 509694 - DNA, 33 bp, Homo sapien
agccatcaatgtattatagctcccaaatttgcc

SEQ ID NO: 509695 - DNA, 33 bp, Homo sapien
aatgacagcaggagccacaatcagcatcacaga

SEQ ID NO: 509696 - DNA, 33 bp, Homo sapien
aatgacagcaggagccgcaatcagcatcacaga

SEQ ID NO: 509697 - DNA, 33 bp, Homo sapien
agacgcagtgacaaaacgacttcacaaaataga

SEQ ID NO: 509698 - DNA, 33 bp, Homo sapien
agacgcagtgacaaaatgacttcacaaaataga

SEQ ID NO: 509699 - DNA, 33 bp, Homo sapien
agtgtgtcaagccagaagtggttattagttcac

SEQ ID NO: 509700 - DNA, 33 bp, Homo sapien
agtgtgtcaagccagaggtggttattagttcac

SEQ ID NO: 509701 - DNA, 33 bp, Homo sapien
tattgtgaaaagtaagactcaccctgactgaaa

SEQ ID NO: 509702 - DNA, 33 bp, Homo sapien
tattgtgaaaagtaagtctcaccctgactgaaa

SEQ ID NO: 509703 - DNA, 33 bp, Homo sapien
agcgacagtggagataactaagagctggatggg

SEQ ID NO: 509704 - DNA, 33 bp, Homo sapien
agcgacagtggagatagctaagagctggatggg

SEQ ID NO: 509705 - DNA, 33 bp, Homo sapien
gtcaagagttgttatcaagaaacaatgttgaac

SEQ ID NO: 509706 - DNA, 33 bp, Homo sapien
gtcaagagttgttatcgagaaacaatgttgaac

SEQ ID NO: 509707 - DNA, 33 bp, Homo sapien
ctgccagctattgtcaaccctttcaccatagct

SEQ ID NO: 509708 - DNA, 33 bp, Homo sapien
ctgccagctattgtcagccctttcaccatagct

SEQ ID NO: 509709 - DNA, 33 bp, Homo sapien
ggcctcctggtgcacaaccccattcctccttgc

SEQ ID NO: 509710 - DNA, 33 bp, Homo sapien
ggcctcctggtgcacacccccattcctccttgc

SEQ ID NO: 509711 - DNA, 33 bp, Homo sapien
tgttaaaaaaaaatgcaagttgccatctcccac

SEQ ID NO: 509712 - DNA, 33 bp, Homo sapien
tgttaaaaaaaaatgccagttgccatctcccac

SEQ ID NO: 509713 - DNA, 33 bp, Homo sapien
cttctgggctaggtcaccctggcagactccccc

SEQ ID NO: 509714 - DNA, 33 bp, Homo sapien
cttctgggctaggtcatcctggcagactccccc

SEQ ID NO: 509715 - DNA, 33 bp, Homo sapien
tgtaacctaggactcaaagacgtgggctacaga

SEQ ID NO: 509716 - DNA, 33 bp, Homo sapien
tgtaacctaggactcagagacgtgggctacaga

SEQ ID NO: 509717 - DNA, 33 bp, Homo sapien
atgtgatactcatggactcatattcatgcagct

SEQ ID NO: 509718 - DNA, 33 bp, Homo sapien
atgtgatactcatggattcatattcatgcagct

SEQ ID NO: 509719 - DNA, 33 bp, Homo sapien
agggttggagagttcaagaaacagtctgaagtc

SEQ ID NO: 509720 - DNA, 33 bp, Homo sapien
agggttggagagttcacgaaacagtctgaagtc

SEQ ID NO: 509721 - DNA, 33 bp, Homo sapien
gtgtcctgccttgagcacattggatgttctaga

SEQ ID NO: 509722 - DNA, 33 bp, Homo sapien
gtgtcctgccttgagcgcattggatgttctaga

SEQ ID NO: 509723 - DNA, 33 bp, Homo sapien
gctaacagaattctcagacaggcaatggagcat

SEQ ID NO: 509724 - DNA, 33 bp, Homo sapien
gctaacagaattctcatacaggcaatggagcat

SEQ ID NO: 509725 - DNA, 33 bp, Homo sapien
gtggccatgtggacaactcctcctcgtgacagt

SEQ ID NO: 509726 - DNA, 33 bp, Homo sapien
gtggccatgtggacaagtcctcctcgtgacagt

SEQ ID NO: 509727 - DNA, 33 bp, Homo sapien
ctggaattgctgttcccctgtctttatttcttg

SEQ ID NO: 509728 - DNA, 33 bp, Homo sapien
ctggaattgctgttcctctgtctttatttcttg

SEQ ID NO: 509729 - DNA, 33 bp, Homo sapien
taccctactatccccaaactaagaacatccctt

SEQ ID NO: 509730 - DNA, 33 bp, Homo sapien
taccctactatccccagactaagaacatccctt

SEQ ID NO: 509731 - DNA, 33 bp, Homo sapien
taatttatatcgatgaacaagatgagaactaag

SEQ ID NO: 509732 - DNA, 33 bp, Homo sapien
taatttatatcgatgagcaagatgagaactaag

SEQ ID NO: 509733 - DNA, 33 bp, Homo sapien
atttgcctcattggtaagttaatgcattggtat

SEQ ID NO: 509734 - DNA, 33 bp, Homo sapien
atttgcctcattggtacgttaatgcattggtat

SEQ ID NO: 509735 - DNA, 33 bp, Homo sapien
caatacctattttccaagcagtgaagaaaagca

SEQ ID NO: 509736 - DNA, 33 bp, Homo sapien
caatacctattttccaggcagtgaagaaaagca

SEQ ID NO: 509737 - DNA, 33 bp, Homo sapien
atttcccacttcctaccaagtcaggtccaaact

SEQ ID NO: 509738 - DNA, 33 bp, Homo sapien
atttcccacttcctactaagtcaggtccaaact

SEQ ID NO: 509739 - DNA, 33 bp, Homo sapien
aggaagtgggaaattaccaaaatgctctgactt

SEQ ID NO: 509740 - DNA, 33 bp, Homo sapien
aggaagtgggaaattatcaaaatgctctgactt

SEQ ID NO: 509741 - DNA, 33 bp, Homo sapien
gaaccttcatttatcacaaccctcaggatgaca

SEQ ID NO: 509742 - DNA, 33 bp, Homo sapien
gaaccttcatttatcataaccctcaggatgaca

SEQ ID NO: 509743 - DNA, 33 bp, Homo sapien
gaaatattgctcaagtcaatgactctcctgggg

SEQ ID NO: 509744 - DNA, 33 bp, Homo sapien
gaaatattgctcaagttaatgactctcctgggg

SEQ ID NO: 509745 - DNA, 33 bp, Homo sapien
tgaggatagcgctcagacatagtgtttaaaaat

SEQ ID NO: 509746 - DNA, 33 bp, Homo sapien
tgaggatagcgctcaggcatagtgtttaaaaat

SEQ ID NO: 509747 - DNA, 33 bp, Homo sapien
gaatatcgggcaaacaagaatatgttgaagagc

SEQ ID NO: 509748 - DNA, 33 bp, Homo sapien
gaatatcgggcaaacacgaatatgttgaagagc

SEQ ID NO: 509749 - DNA, 33 bp, Homo sapien
aggattggaccacacaatccaagctaattctga

SEQ ID NO: 509750 - DNA, 33 bp, Homo sapien
aggattggaccacacattccaagctaattctga

SEQ ID NO: 509751 - DNA, 33 bp, Homo sapien
cacctgctctgtaaccacccttcctgccgaact

SEQ ID NO: 509752 - DNA, 33 bp, Homo sapien
cacctgctctgtaaccgcccttcctgccgaact

SEQ ID NO: 509753 - DNA, 33 bp, Homo sapien
caaatgcttctttggaaaggaacaagccacttg

SEQ ID NO: 509754 - DNA, 33 bp, Homo sapien
caaatgcttctttggagaggaacaagccacttg

SEQ ID NO: 509755 - DNA, 33 bp, Homo sapien
aaaaacttcttgataaacatttttgtacaaaaa

SEQ ID NO: 509756 - DNA, 33 bp, Homo sapien
aaaaacttcttgataagcatttttgtacaaaaa

SEQ ID NO: 509757 - DNA, 33 bp, Homo sapien
caccccacaatttgtacgtagcagacacccaat

SEQ ID NO: 509758 - DNA, 33 bp, Homo sapien
caccccacaatttgtatgtagcagacacccaat

SEQ ID NO: 509759 - DNA, 33 bp, Homo sapien
taaagcactaacacagacatggccatattattc

SEQ ID NO: 509760 - DNA, 33 bp, Homo sapien
taaagcactaacacaggcatggccatattattc

SEQ ID NO: 509761 - DNA, 33 bp, Homo sapien
aggttatgaagaagacaaaaaaggatgagagct

SEQ ID NO: 509762 - DNA, 33 bp, Homo sapien
aggttatgaagaagacgaaaaaggatgagagct

SEQ ID NO: 509763 - DNA, 33 bp, Homo sapien
tgggagaaagggcttcaactgtggtttcagaca

SEQ ID NO: 509764 - DNA, 33 bp, Homo sapien
tgggagaaagggcttcgactgtggtttcagaca

SEQ ID NO: 509765 - DNA, 33 bp, Homo sapien
atgcgggtttgtgtccactcagcctggctgcct

SEQ ID NO: 509766 - DNA, 33 bp, Homo sapien
atgcgggtttgtgtccgctcagcctggctgcct

SEQ ID NO: 509767 - DNA, 33 bp, Homo sapien
cgaaatgaccccattacgatctccatattacat

SEQ ID NO: 509768 - DNA, 33 bp, Homo sapien
cgaaatgaccccattatgatctccatattacat

SEQ ID NO: 509769 - DNA, 33 bp, Homo sapien
cgagcattgaatagtgaaatacatgtgagctct

SEQ ID NO: 509770 - DNA, 33 bp, Homo sapien
cgagcattgaatagtggaatacatgtgagctct

SEQ ID NO: 509771 - DNA, 33 bp, Homo sapien
tgatgccccttgatgcaactgtccctccaccag

SEQ ID NO: 509772 - DNA, 33 bp, Homo sapien
tgatgccccttgatgcgactgtccctccaccag

SEQ ID NO: 509773 - DNA, 33 bp, Homo sapien
cttaataaaactttcacggccatctacagtgtg

SEQ ID NO: 509774 - DNA, 33 bp, Homo sapien
cttaataaaactttcatggccatctacagtgtg

SEQ ID NO: 509775 - DNA, 33 bp, Homo sapien
gtcttgaaagagggccacagcttggactgcatg

SEQ ID NO: 509776 - DNA, 33 bp, Homo sapien
gtcttgaaagagggccgcagcttggactgcatg

SEQ ID NO: 509777 - DNA, 33 bp, Homo sapien
gcaagaagccagggacaaatggattgcaatgtt

SEQ ID NO: 509778 - DNA, 33 bp, Homo sapien
gcaagaagccagggaccaatggattgcaatgtt

SEQ ID NO: 509779 - DNA, 33 bp, Homo sapien
atgaccactaggatgcaacatgaaggcaatatg

SEQ ID NO: 509780 - DNA, 33 bp, Homo sapien
atgaccactaggatgcgacatgaaggcaatatg

SEQ ID NO: 509781 - DNA, 33 bp, Homo sapien
gtctctaaagagcttacactctaattgggacac

SEQ ID NO: 509782 - DNA, 33 bp, Homo sapien
gtctctaaagagcttatactctaattgggacac

SEQ ID NO: 509783 - DNA, 33 bp, Homo sapien
tctaagcaaaagataacgatggcttggtctgag

SEQ ID NO: 509784 - DNA, 33 bp, Homo sapien
tctaagcaaaagataatgatggcttggtctgag

SEQ ID NO: 509785 - DNA, 33 bp, Homo sapien
agagcttggaatattgcaacagagcttttaggg

SEQ ID NO: 509786 - DNA, 33 bp, Homo sapien
agagcttggaatattgtaacagagcttttaggg

SEQ ID NO: 509787 - DNA, 33 bp, Homo sapien
ttttaatgctcacagcactatgagatatgcatc

SEQ ID NO: 509788 - DNA, 33 bp, Homo sapien
ttttaatgctcacagcgctatgagatatgcatc

SEQ ID NO: 509789 - DNA, 33 bp, Homo sapien
tgaccctggatttgacaaaagctcgctcccact

SEQ ID NO: 509790 - DNA, 33 bp, Homo sapien
tgaccctggatttgacgaaagctcgctcccact

SEQ ID NO: 509791 - DNA, 33 bp, Homo sapien
gctgctgaagcccatgaactttttactctgacc

SEQ ID NO: 509792 - DNA, 33 bp, Homo sapien
gctgctgaagcccatgcactttttactctgacc

SEQ ID NO: 509793 - DNA, 33 bp, Homo sapien
aggccaggaatatacaactcctctgttttctga

SEQ ID NO: 509794 - DNA, 33 bp, Homo sapien
aggccaggaatatacatctcctctgttttctga

SEQ ID NO: 509795 - DNA, 33 bp, Homo sapien
agaaagtcacgtgggacatggagccatttcctc

SEQ ID NO: 509796 - DNA, 33 bp, Homo sapien
agaaagtcacgtgggatatggagccatttcctc

SEQ ID NO: 509797 - DNA, 33 bp, Homo sapien
aacagacggttgactacctatccaacctctaat

SEQ ID NO: 509798 - DNA, 33 bp, Homo sapien
aacagacggttgactatctatccaacctctaat

SEQ ID NO: 509799 - DNA, 33 bp, Homo sapien
tagagacaaatatgtgcaaatgcttctgtgatg

SEQ ID NO: 509800 - DNA, 33 bp, Homo sapien
tagagacaaatatgtgtaaatgcttctgtgatg

SEQ ID NO: 509801 - DNA, 33 bp, Homo sapien
ctagtggctagggaaagaattgactacaaaagg

SEQ ID NO: 509802 - DNA, 33 bp, Homo sapien
ctagtggctagggaaataattgactacaaaagg

SEQ ID NO: 509803 - DNA, 33 bp, Homo sapien
acagacagacatggagaaaatgcatcaggtcgg

SEQ ID NO: 509804 - DNA, 33 bp, Homo sapien
acagacagacatggaggaaatgcatcaggtcgg

SEQ ID NO: 509805 - DNA, 33 bp, Homo sapien
cctgtctcatccactaaaatgtgggctgctccc

SEQ ID NO: 509806 - DNA, 33 bp, Homo sapien
cctgtctcatccactagaatgtgggctgctccc

SEQ ID NO: 509807 - DNA, 33 bp, Homo sapien
gcttccagtgagaaataatgttgaaacaatgtt

SEQ ID NO: 509808 - DNA, 33 bp, Homo sapien
gcttccagtgagaaatgatgttgaaacaatgtt

SEQ ID NO: 509809 - DNA, 33 bp, Homo sapien
ggaggcagatgcttaactaataccaggtgataa

SEQ ID NO: 509810 - DNA, 33 bp, Homo sapien
ggaggcagatgcttaagtaataccaggtgataa

SEQ ID NO: 509811 - DNA, 33 bp, Homo sapien
ttccagctcaatcctcaccagcagatattcctg

SEQ ID NO: 509812 - DNA, 33 bp, Homo sapien
ttccagctcaatcctcgccagcagatattcctg

SEQ ID NO: 509813 - DNA, 33 bp, Homo sapien
tgaatcacaaggtctgcacaatgcccgtgcatg

SEQ ID NO: 509814 - DNA, 33 bp, Homo sapien
tgaatcacaaggtctgtacaatgcccgtgcatg

SEQ ID NO: 509815 - DNA, 33 bp, Homo sapien
aggctttgaaaccacacggacctggttcaaatt

SEQ ID NO: 509816 - DNA, 33 bp, Homo sapien
aggctttgaaaccacatggacctggttcaaatt

SEQ ID NO: 509817 - DNA, 33 bp, Homo sapien
caggtagtacaccacacagaaccagactctcag

SEQ ID NO: 509818 - DNA, 33 bp, Homo sapien
caggtagtacaccacatagaaccagactctcag

SEQ ID NO: 509819 - DNA, 33 bp, Homo sapien
accttccgagcagcaaagggttaaaacccaggc

SEQ ID NO: 509820 - DNA, 33 bp, Homo sapien
accttccgagcagcaaggggttaaaacccaggc

SEQ ID NO: 509821 - DNA, 33 bp, Homo sapien
cccgtctatgataacactgcattgcctttcagc

SEQ ID NO: 509822 - DNA, 33 bp, Homo sapien
cccgtctatgataacattgcattgcctttcagc

SEQ ID NO: 509823 - DNA, 33 bp, Homo sapien
acatgagtcagtagcaagctgaatgcagtggag

SEQ ID NO: 509824 - DNA, 33 bp, Homo sapien
acatgagtcagtagcacgctgaatgcagtggag

SEQ ID NO: 509825 - DNA, 33 bp, Homo sapien
gcattctttccatctcaaatcttgacaacctcc

SEQ ID NO: 509826 - DNA, 33 bp, Homo sapien
gcattctttccatctccaatcttgacaacctcc

SEQ ID NO: 509827 - DNA, 33 bp, Homo sapien
gataacatatcaaaaaaagcatgctggcagcac

SEQ ID NO: 509828 - DNA, 33 bp, Homo sapien
gataacatatcaaaaagagcatgctggcagcac

SEQ ID NO: 509829 - DNA, 33 bp, Homo sapien
atgggtttcagatccacaggaactgggttcaaa

SEQ ID NO: 509830 - DNA, 33 bp, Homo sapien
atgggtttcagatccataggaactgggttcaaa

SEQ ID NO: 509831 - DNA, 33 bp, Homo sapien
aacacacttatgtacccggccctgaggaaggca

SEQ ID NO: 509832 - DNA, 33 bp, Homo sapien
aacacacttatgtaccgggccctgaggaaggca

SEQ ID NO: 509833 - DNA, 33 bp, Homo sapien
cagctagagctgcatacgtttcttgccacgagg

SEQ ID NO: 509834 - DNA, 33 bp, Homo sapien
cagctagagctgcatatgtttcttgccacgagg

SEQ ID NO: 509835 - DNA, 33 bp, Homo sapien
aaatgggcagagctcactcctctcggcttggaa

SEQ ID NO: 509836 - DNA, 33 bp, Homo sapien
aaatgggcagagctcattcctctcggcttggaa

SEQ ID NO: 509837 - DNA, 33 bp, Homo sapien
agtaagtcatctcctcactggaagttgtttgtt

SEQ ID NO: 509838 - DNA, 33 bp, Homo sapien
agtaagtcatctcctcgctggaagttgtttgtt

SEQ ID NO: 509839 - DNA, 33 bp, Homo sapien
ctaaaatagaacagagccaatcatttttcacag

SEQ ID NO: 509840 - DNA, 33 bp, Homo sapien
ctaaaatagaacagaggcaatcatttttcacag

SEQ ID NO: 509841 - DNA, 33 bp, Homo sapien
cacaagaaagacaagacggcgggcgctcacact

SEQ ID NO: 509842 - DNA, 33 bp, Homo sapien
cacaagaaagacaagatggcgggcgctcacact

SEQ ID NO: 509843 - DNA, 33 bp, Homo sapien
tgttgttccccttaaccccttgattcatgcagc

SEQ ID NO: 509844 - DNA, 33 bp, Homo sapien
tgttgttccccttaactccttgattcatgcagc

SEQ ID NO: 509845 - DNA, 33 bp, Homo sapien
acttctaactcctggaagaatcgctcaagctca

SEQ ID NO: 509846 - DNA, 33 bp, Homo sapien
acttctaactcctggatgaatcgctcaagctca

SEQ ID NO: 509847 - DNA, 33 bp, Homo sapien
ccccatatggtcatcaagaggatttgagctgga

SEQ ID NO: 509848 - DNA, 33 bp, Homo sapien
ccccatatggtcatcatgaggatttgagctgga

SEQ ID NO: 509849 - DNA, 33 bp, Homo sapien
gatggtctcttctcccaacggtcactaatctcc

SEQ ID NO: 509850 - DNA, 33 bp, Homo sapien
gatggtctcttctccccacggtcactaatctcc

SEQ ID NO: 509851 - DNA, 33 bp, Homo sapien
ccatcttcagtttgaacgactcccaggaaggcc

SEQ ID NO: 509852 - DNA, 33 bp, Homo sapien
ccatcttcagtttgaatgactcccaggaaggcc

SEQ ID NO: 509853 - DNA, 33 bp, Homo sapien
ttttaacctggtagacagtataaaagcagtgca

SEQ ID NO: 509854 - DNA, 33 bp, Homo sapien
ttttaacctggtagacggtataaaagcagtgca

SEQ ID NO: 509855 - DNA, 33 bp, Homo sapien
tctgccatgtagatcacgtatccattcgtccac

SEQ ID NO: 509856 - DNA, 33 bp, Homo sapien
tctgccatgtagatcatgtatccattcgtccac

SEQ ID NO: 509857 - DNA, 33 bp, Homo sapien
tgctttagtggagccaactctctcttggttgag

SEQ ID NO: 509858 - DNA, 33 bp, Homo sapien
tgctttagtggagccagctctctcttggttgag

SEQ ID NO: 509859 - DNA, 33 bp, Homo sapien
cctgtctctacgaaatgagcaacttagcaagac

SEQ ID NO: 509860 - DNA, 33 bp, Homo sapien
cctgtctctacgaaattagcaacttagcaagac

SEQ ID NO: 509861 - DNA, 33 bp, Homo sapien
cacctttcctgccatactagcagagcctcgtta

SEQ ID NO: 509862 - DNA, 33 bp, Homo sapien
cacctttcctgccatattagcagagcctcgtta

SEQ ID NO: 509863 - DNA, 33 bp, Homo sapien
gaattcatgctcatcacgtgaatcaatcagaag

SEQ ID NO: 509864 - DNA, 33 bp, Homo sapien
gaattcatgctcatcatgtgaatcaatcagaag

SEQ ID NO: 509865 - DNA, 33 bp, Homo sapien
atatgcacttgttaagaaacacggttagtgagg

SEQ ID NO: 509866 - DNA, 33 bp, Homo sapien
atatgcacttgttaaggaacacggttagtgagg

SEQ ID NO: 509867 - DNA, 33 bp, Homo sapien
ttctgccatcctcacccggtcagcgacagagct

SEQ ID NO: 509868 - DNA, 33 bp, Homo sapien
ttctgccatcctcacctggtcagcgacagagct

SEQ ID NO: 509869 - DNA, 33 bp, Homo sapien
ataatttgaacatgataaactatgtctccacta

SEQ ID NO: 509870 - DNA, 33 bp, Homo sapien
ataatttgaacatgatgaactatgtctccacta

SEQ ID NO: 509871 - DNA, 33 bp, Homo sapien
acttactcctttttggaaacatgagcatatgaa

SEQ ID NO: 509872 - DNA, 33 bp, Homo sapien
acttactcctttttggcaacatgagcatatgaa

SEQ ID NO: 509873 - DNA, 33 bp, Homo sapien
agaaaggctttagctgcatccagattgttttac

SEQ ID NO: 509874 - DNA, 33 bp, Homo sapien
agaaaggctttagctgtatccagattgttttac

SEQ ID NO: 509875 - DNA, 33 bp, Homo sapien
actctcgttccaaagactaatagccagggatga

SEQ ID NO: 509876 - DNA, 33 bp, Homo sapien
actctcgttccaaagattaatagccagggatga

SEQ ID NO: 509877 - DNA, 33 bp, Homo sapien
cattctggaaaagatacagagataagaacaaaa

SEQ ID NO: 509878 - DNA, 33 bp, Homo sapien
cattctggaaaagatagagagataagaacaaaa

SEQ ID NO: 509879 - DNA, 33 bp, Homo sapien
actattatgcacagcaataacaacactttctat

SEQ ID NO: 509880 - DNA, 33 bp, Homo sapien
actattatgcacagcagtaacaacactttctat

SEQ ID NO: 509881 - DNA, 33 bp, Homo sapien
tttcccggctgtaaaactggactatactcaagc

SEQ ID NO: 509882 - DNA, 33 bp, Homo sapien
tttcccggctgtaaaattggactatactcaagc

SEQ ID NO: 509883 - DNA, 33 bp, Homo sapien
actggaaaaatgactcaatttcttcaacaaatg

SEQ ID NO: 509884 - DNA, 33 bp, Homo sapien
actggaaaaatgactcgatttcttcaacaaatg

SEQ ID NO: 509885 - DNA, 33 bp, Homo sapien
caattatacccagaagccttcatcacaagtgtc

SEQ ID NO: 509886 - DNA, 33 bp, Homo sapien
caattatacccagaaggcttcatcacaagtgtc

SEQ ID NO: 509887 - DNA, 33 bp, Homo sapien
cacacctgtcattggcaagaatttaaccaccta

SEQ ID NO: 509888 - DNA, 33 bp, Homo sapien
cacacctgtcattggccagaatttaaccaccta

SEQ ID NO: 509889 - DNA, 33 bp, Homo sapien
cactctctggggacaccgactttgggaactcgg

SEQ ID NO: 509890 - DNA, 33 bp, Homo sapien
cactctctggggacactgactttgggaactcgg

SEQ ID NO: 509891 - DNA, 33 bp, Homo sapien
gggacctgggatctgcagaagccacatgatgga

SEQ ID NO: 509892 - DNA, 33 bp, Homo sapien
gggacctgggatctgcggaagccacatgatgga

SEQ ID NO: 509893 - DNA, 33 bp, Homo sapien
gccaggtggtcttatcactccatcatgtggctt

SEQ ID NO: 509894 - DNA, 33 bp, Homo sapien
gccaggtggtcttatcgctccatcatgtggctt

SEQ ID NO: 509895 - DNA, 33 bp, Homo sapien
tggagagaaataacaaatggaaagtcctttaaa

SEQ ID NO: 509896 - DNA, 33 bp, Homo sapien
tggagagaaataacaactggaaagtcctttaaa

SEQ ID NO: 509897 - DNA, 33 bp, Homo sapien
tatttagattccacgccctttgttagtccactg

SEQ ID NO: 509898 - DNA, 33 bp, Homo sapien
tatttagattccacgcgctttgttagtccactg

SEQ ID NO: 509899 - DNA, 33 bp, Homo sapien
agatgaaattttgacacccatctgttcatccat

SEQ ID NO: 509900 - DNA, 33 bp, Homo sapien
agatgaaattttgacatccatctgttcatccat

SEQ ID NO: 509901 - DNA, 33 bp, Homo sapien
gctaagtcctacaagagcaaaatactcaggtgg

SEQ ID NO: 509902 - DNA, 33 bp, Homo sapien
gctaagtcctacaagatcaaaatactcaggtgg

SEQ ID NO: 509903 - DNA, 33 bp, Homo sapien
gagcaacaatattaagaaatgggcctttaggag

SEQ ID NO: 509904 - DNA, 33 bp, Homo sapien
gagcaacaatattaaggaatgggcctttaggag

SEQ ID NO: 509905 - DNA, 33 bp, Homo sapien
ggaaatgccgttgggaaatttctgagactcttc

SEQ ID NO: 509906 - DNA, 33 bp, Homo sapien
ggaaatgccgttgggagatttctgagactcttc

SEQ ID NO: 509907 - DNA, 33 bp, Homo sapien
ttggtgaacaataacacgtctctaattctcagg

SEQ ID NO: 509908 - DNA, 33 bp, Homo sapien
ttggtgaacaataacaggtctctaattctcagg

SEQ ID NO: 509909 - DNA, 33 bp, Homo sapien
ggagacagatggtgccccagggtaaacatacac

SEQ ID NO: 509910 - DNA, 33 bp, Homo sapien
ggagacagatggtgcctcagggtaaacatacac

SEQ ID NO: 509911 - DNA, 33 bp, Homo sapien
ggcatatgcataagtccaaataactcatgatct

SEQ ID NO: 509912 - DNA, 33 bp, Homo sapien
ggcatatgcataagtctaaataactcatgatct

SEQ ID NO: 509913 - DNA, 33 bp, Homo sapien
accacccggcatctccaccagctttcagtgatg

SEQ ID NO: 509914 - DNA, 33 bp, Homo sapien
accacccggcatctccgccagctttcagtgatg

SEQ ID NO: 509915 - DNA, 33 bp, Homo sapien
caagggccatgccagaactaggaccagcctggg

SEQ ID NO: 509916 - DNA, 33 bp, Homo sapien
caagggccatgccagagctaggaccagcctggg

SEQ ID NO: 509917 - DNA, 33 bp, Homo sapien
aaaacatcacaatagacgtaggtataggcactc

SEQ ID NO: 509918 - DNA, 33 bp, Homo sapien
aaaacatcacaatagaggtaggtataggcactc

SEQ ID NO: 509919 - DNA, 33 bp, Homo sapien
tctatgtctaacatcacacaagcaaagccggct

SEQ ID NO: 509920 - DNA, 33 bp, Homo sapien
tctatgtctaacatcatacaagcaaagccggct

SEQ ID NO: 509921 - DNA, 33 bp, Homo sapien
tctctgtgttctgaaacgtcacagggatgtgct

SEQ ID NO: 509922 - DNA, 33 bp, Homo sapien
tctctgtgttctgaaatgtcacagggatgtgct

SEQ ID NO: 509923 - DNA, 33 bp, Homo sapien
gtttcccagaagaaagcctgtttccggtaccag

SEQ ID NO: 509924 - DNA, 33 bp, Homo sapien
gtttcccagaagaaaggctgtttccggtaccag

SEQ ID NO: 509925 - DNA, 33 bp, Homo sapien
ggaggtagattttgacgcggggtgactgatcat

SEQ ID NO: 509926 - DNA, 33 bp, Homo sapien
ggaggtagattttgactcggggtgactgatcat

SEQ ID NO: 509927 - DNA, 33 bp, Homo sapien
caaggctgatgcgctacagagagaggggtcttc

SEQ ID NO: 509928 - DNA, 33 bp, Homo sapien
caaggctgatgcgctatagagagaggggtcttc

SEQ ID NO: 509929 - DNA, 33 bp, Homo sapien
ccccagggttcaaatcactttccccctatttac

SEQ ID NO: 509930 - DNA, 33 bp, Homo sapien
ccccagggttcaaatcgctttccccctatttac

SEQ ID NO: 509931 - DNA, 33 bp, Homo sapien
gggagcctgagaaaaaatcatgatgggagtggc

SEQ ID NO: 509932 - DNA, 33 bp, Homo sapien
gggagcctgagaaaaagtcatgatgggagtggc

SEQ ID NO: 509933 - DNA, 33 bp, Homo sapien
ggaagtcttggaaggccaccgtgaggagtttcc

SEQ ID NO: 509934 - DNA, 33 bp, Homo sapien
ggaagtcttggaaggcgaccgtgaggagtttcc

SEQ ID NO: 509935 - DNA, 33 bp, Homo sapien
cgggctgaatggcctcactgaattctgtactct

SEQ ID NO: 509936 - DNA, 33 bp, Homo sapien
cgggctgaatggcctcgctgaattctgtactct

SEQ ID NO: 509937 - DNA, 33 bp, Homo sapien
tctgacaacctaactcccttgattcagttccag

SEQ ID NO: 509938 - DNA, 33 bp, Homo sapien
tctgacaacctaactctcttgattcagttccag

SEQ ID NO: 509939 - DNA, 33 bp, Homo sapien
gagacagaaagtagatgagtaatagccagcggc

SEQ ID NO: 509940 - DNA, 33 bp, Homo sapien
gagacagaaagtagattagtaatagccagcggc

SEQ ID NO: 509941 - DNA, 33 bp, Homo sapien
gaactttcgtttacacggagaagtaagggatga

SEQ ID NO: 509942 - DNA, 33 bp, Homo sapien
gaactttcgtttacactgagaagtaagggatga

SEQ ID NO: 509943 - DNA, 33 bp, Homo sapien
cacagttggagtagcacaaagtaagtcccacag

SEQ ID NO: 509944 - DNA, 33 bp, Homo sapien
cacagttggagtagcataaagtaagtcccacag

SEQ ID NO: 509945 - DNA, 33 bp, Homo sapien
tgacaccaactgaccaaggtttatgttccccat

SEQ ID NO: 509946 - DNA, 33 bp, Homo sapien
tgacaccaactgaccagggtttatgttccccat

SEQ ID NO: 509947 - DNA, 33 bp, Homo sapien
ttcctgtttaacatcacggtattactgttgata

SEQ ID NO: 509948 - DNA, 33 bp, Homo sapien
ttcctgtttaacatcatggtattactgttgata

SEQ ID NO: 509949 - DNA, 33 bp, Homo sapien
ggaaaatcaagacaaaattatatgtacagtatg

SEQ ID NO: 509950 - DNA, 33 bp, Homo sapien
ggaaaatcaagacaaacttatatgtacagtatg

SEQ ID NO: 509951 - DNA, 33 bp, Homo sapien
attgttctgctggactaagaggactaaacttat

SEQ ID NO: 509952 - DNA, 33 bp, Homo sapien
attgttctgctggactcagaggactaaacttat

SEQ ID NO: 509953 - DNA, 33 bp, Homo sapien
ggaaaaataacccaaagaaagagatggtggaag

SEQ ID NO: 509954 - DNA, 33 bp, Homo sapien
ggaaaaataacccaaataaagagatggtggaag

SEQ ID NO: 509955 - DNA, 33 bp, Homo sapien
tgaaccaacaactgccccctgggaagaaccctt

SEQ ID NO: 509956 - DNA, 33 bp, Homo sapien
tgaaccaacaactgcctcctgggaagaaccctt

SEQ ID NO: 509957 - DNA, 33 bp, Homo sapien
gctgttaaggtaacaaagtgttgtccttagcag

SEQ ID NO: 509958 - DNA, 33 bp, Homo sapien
gctgttaaggtaacaatgtgttgtccttagcag

SEQ ID NO: 509959 - DNA, 33 bp, Homo sapien
aaactttggagttccactcaaggacagcaggtt

SEQ ID NO: 509960 - DNA, 33 bp, Homo sapien
aaactttggagttccattcaaggacagcaggtt

SEQ ID NO: 509961 - DNA, 33 bp, Homo sapien
tcccacgctttctaaaaggagccataagattca

SEQ ID NO: 509962 - DNA, 33 bp, Homo sapien
tcccacgctttctaaatggagccataagattca

SEQ ID NO: 509963 - DNA, 33 bp, Homo sapien
tactgagaagtaagaaactttaaactactatta

SEQ ID NO: 509964 - DNA, 33 bp, Homo sapien
tactgagaagtaagaacctttaaactactatta

SEQ ID NO: 509965 - DNA, 33 bp, Homo sapien
tcctgagactggtggaacaacgatgacctgaga

SEQ ID NO: 509966 - DNA, 33 bp, Homo sapien
tcctgagactggtggagcaacgatgacctgaga

SEQ ID NO: 509967 - DNA, 33 bp, Homo sapien
caggtggaattctggaacctcaaaagtataaca

SEQ ID NO: 509968 - DNA, 33 bp, Homo sapien
caggtggaattctggatcctcaaaagtataaca

SEQ ID NO: 509969 - DNA, 33 bp, Homo sapien
aattagtgagataaccagcagagggcctctgat

SEQ ID NO: 509970 - DNA, 33 bp, Homo sapien
aattagtgagataaccggcagagggcctctgat

SEQ ID NO: 509971 - DNA, 33 bp, Homo sapien
ggcagatggtaaatgcaataatttccgggagta

SEQ ID NO: 509972 - DNA, 33 bp, Homo sapien
ggcagatggtaaatgcgataatttccgggagta

SEQ ID NO: 509973 - DNA, 33 bp, Homo sapien
ctgcagaggcctcgcacagtccccccaaacatg

SEQ ID NO: 509974 - DNA, 33 bp, Homo sapien
ctgcagaggcctcgcatagtccccccaaacatg

SEQ ID NO: 509975 - DNA, 33 bp, Homo sapien
aaatgtggagagaaaaagcgaagaaagggagga

SEQ ID NO: 509976 - DNA, 33 bp, Homo sapien
aaatgtggagagaaaaggcgaagaaagggagga

SEQ ID NO: 509977 - DNA, 33 bp, Homo sapien
taattaaaatgctatacggaaaccttaaaaaca

SEQ ID NO: 509978 - DNA, 33 bp, Homo sapien
taattaaaatgctatatggaaaccttaaaaaca

SEQ ID NO: 509979 - DNA, 33 bp, Homo sapien
cctcaacgtcgatgacagaaatgaagaggtcta

SEQ ID NO: 509980 - DNA, 33 bp, Homo sapien
cctcaacgtcgatgacggaaatgaagaggtcta

SEQ ID NO: 509981 - DNA, 33 bp, Homo sapien
gggggccaaaagtggaagacaagattagggttt

SEQ ID NO: 509982 - DNA, 33 bp, Homo sapien
gggggccaaaagtggaggacaagattagggttt

SEQ ID NO: 509983 - DNA, 33 bp, Homo sapien
tacacagcattataagaaacacttcttgagttg

SEQ ID NO: 509984 - DNA, 33 bp, Homo sapien
tacacagcattataaggaacacttcttgagttg

SEQ ID NO: 509985 - DNA, 33 bp, Homo sapien
agaagggagatggcaactctgaaaggcatgcat

SEQ ID NO: 509986 - DNA, 33 bp, Homo sapien
agaagggagatggcaattctgaaaggcatgcat

SEQ ID NO: 509987 - DNA, 33 bp, Homo sapien
taacttagggaaagacaatacaagattaaaagg

SEQ ID NO: 509988 - DNA, 33 bp, Homo sapien
taacttagggaaagaccatacaagattaaaagg

SEQ ID NO: 509989 - DNA, 33 bp, Homo sapien
agttcagtccttgggcaagctacgtactaatga

SEQ ID NO: 509990 - DNA, 33 bp, Homo sapien
agttcagtccttgggcgagctacgtactaatga

SEQ ID NO: 509991 - DNA, 33 bp, Homo sapien
acccttgaaatctgcaaaagttgttctagcctc

SEQ ID NO: 509992 - DNA, 33 bp, Homo sapien
acccttgaaatctgcagaagttgttctagcctc

SEQ ID NO: 509993 - DNA, 33 bp, Homo sapien
ctcccagcattgtagcaaaggtgaaatgagatc

SEQ ID NO: 509994 - DNA, 33 bp, Homo sapien
ctcccagcattgtagcgaaggtgaaatgagatc

SEQ ID NO: 509995 - DNA, 33 bp, Homo sapien
ggcctttcttgtggcaaccaccaggtggcacca

SEQ ID NO: 509996 - DNA, 33 bp, Homo sapien
ggcctttcttgtggcatccaccaggtggcacca

SEQ ID NO: 509997 - DNA, 33 bp, Homo sapien
taactgcaatgactctcaagtctcttttctttt

SEQ ID NO: 509998 - DNA, 33 bp, Homo sapien
taactgcaatgactcttaagtctcttttctttt

SEQ ID NO: 509999 - DNA, 33 bp, Homo sapien
caccactgtgttcaaagactttcccagggaaaa

SEQ ID NO: 510000 - DNA, 33 bp, Homo sapien
caccactgtgttcaaatactttcccagggaaaa

SEQ ID NO: 510001 - DNA, 33 bp, Homo sapien
tgctgggttagaagtaactttttcaggctcact

SEQ ID NO: 510002 - DNA, 33 bp, Homo sapien
tgctgggttagaagtagctttttcaggctcact

SEQ ID NO: 510003 - DNA, 33 bp, Homo sapien
atcagaagacctaacacagtacctgtttggcgt

SEQ ID NO: 510004 - DNA, 33 bp, Homo sapien
atcagaagacctaacatagtacctgtttggcgt

SEQ ID NO: 510005 - DNA, 33 bp, Homo sapien
cataaagagaaactgacggaaaaaagaagagaa

SEQ ID NO: 510006 - DNA, 33 bp, Homo sapien
cataaagagaaactgatggaaaaaagaagagaa

SEQ ID NO: 510007 - DNA, 33 bp, Homo sapien
tttgtggctaagtgtacggtactggagaagcat

SEQ ID NO: 510008 - DNA, 33 bp, Homo sapien
tttgtggctaagtgtatggtactggagaagcat

SEQ ID NO: 510009 - DNA, 33 bp, Homo sapien
gattgaataattcaaacagatgacgcccttgta

SEQ ID NO: 510010 - DNA, 33 bp, Homo sapien
gattgaataattcaaagagatgacgcccttgta

SEQ ID NO: 510011 - DNA, 33 bp, Homo sapien
cgcatgtccagttcacaattctgcacggcttcc

SEQ ID NO: 510012 - DNA, 33 bp, Homo sapien
cgcatgtccagttcaccattctgcacggcttcc

SEQ ID NO: 510013 - DNA, 33 bp, Homo sapien
taccaattcaaaatcccaaagctatatgagtat

SEQ ID NO: 510014 - DNA, 33 bp, Homo sapien
taccaattcaaaatcctaaagctatatgagtat

SEQ ID NO: 510015 - DNA, 33 bp, Homo sapien
acaaatgtcacaacaaatgtaatatctagtaag

SEQ ID NO: 510016 - DNA, 33 bp, Homo sapien
acaaatgtcacaacaactgtaatatctagtaag

SEQ ID NO: 510017 - DNA, 33 bp, Homo sapien
gatcactggaacaaaacagaattaccacacaag

SEQ ID NO: 510018 - DNA, 33 bp, Homo sapien
gatcactggaacaaaatagaattaccacacaag

SEQ ID NO: 510019 - DNA, 33 bp, Homo sapien
gacatacaaagcactacgatggcaaaaatattt

SEQ ID NO: 510020 - DNA, 33 bp, Homo sapien
gacatacaaagcactatgatggcaaaaatattt

SEQ ID NO: 510021 - DNA, 33 bp, Homo sapien
tgggtacatatgatacagggtgcatgttacatg

SEQ ID NO: 510022 - DNA, 33 bp, Homo sapien
tgggtacatatgatacggggtgcatgttacatg

SEQ ID NO: 510023 - DNA, 33 bp, Homo sapien
ctggtaatgagttccagtgcaacaaagaaaatt

SEQ ID NO: 510024 - DNA, 33 bp, Homo sapien
ctggtaatgagttccattgcaacaaagaaaatt

SEQ ID NO: 510025 - DNA, 33 bp, Homo sapien
ttcctttacaaatgcaggaactattgttgccta

SEQ ID NO: 510026 - DNA, 33 bp, Homo sapien
ttcctttacaaatgcatgaactattgttgccta

SEQ ID NO: 510027 - DNA, 33 bp, Homo sapien
agttctaagtgggtcaatctctaggttcatgaa

SEQ ID NO: 510028 - DNA, 33 bp, Homo sapien
agttctaagtgggtcagtctctaggttcatgaa

SEQ ID NO: 510029 - DNA, 33 bp, Homo sapien
gcttctggtatcttaacgtctctacgtcttgca

SEQ ID NO: 510030 - DNA, 33 bp, Homo sapien
gcttctggtatcttaatgtctctacgtcttgca

SEQ ID NO: 510031 - DNA, 33 bp, Homo sapien
aggatcactgtgtggcagaaggaatcttttgga

SEQ ID NO: 510032 - DNA, 33 bp, Homo sapien
aggatcactgtgtggcggaaggaatcttttgga

SEQ ID NO: 510033 - DNA, 33 bp, Homo sapien
atcagtcttatttgtaggtctaggcacataata

SEQ ID NO: 510034 - DNA, 33 bp, Homo sapien
atcagtcttatttgtatgtctaggcacataata

SEQ ID NO: 510035 - DNA, 33 bp, Homo sapien
aactgatttttgacaacagccctgagacaattc

SEQ ID NO: 510036 - DNA, 33 bp, Homo sapien
aactgatttttgacaagagccctgagacaattc

SEQ ID NO: 510037 - DNA, 33 bp, Homo sapien
catataaagatttcccaaagttgttccttttat

SEQ ID NO: 510038 - DNA, 33 bp, Homo sapien
catataaagatttcccgaagttgttccttttat

SEQ ID NO: 510039 - DNA, 33 bp, Homo sapien
aatgtgaccagtgctacaaagatggtcaggaaa

SEQ ID NO: 510040 - DNA, 33 bp, Homo sapien
aatgtgaccagtgctataaagatggtcaggaaa

SEQ ID NO: 510041 - DNA, 33 bp, Homo sapien
gtcttactcggtagcccatactctttatttata

SEQ ID NO: 510042 - DNA, 33 bp, Homo sapien
gtcttactcggtagcctatactctttatttata

SEQ ID NO: 510043 - DNA, 33 bp, Homo sapien
tttgcattgtcttataggtagtattgcatgatt

SEQ ID NO: 510044 - DNA, 33 bp, Homo sapien
tttgcattgtcttatatgtagtattgcatgatt

SEQ ID NO: 510045 - DNA, 33 bp, Homo sapien
agccttacacaaagtaaatcatctaacatgttt

SEQ ID NO: 510046 - DNA, 33 bp, Homo sapien
agccttacacaaagtacatcatctaacatgttt

SEQ ID NO: 510047 - DNA, 33 bp, Homo sapien
tataagacattccaaaggaagacttgtatcacc

SEQ ID NO: 510048 - DNA, 33 bp, Homo sapien
tataagacattccaaatgaagacttgtatcacc

SEQ ID NO: 510049 - DNA, 33 bp, Homo sapien
gtatcccttcacataacaagtagatgtctcgct

SEQ ID NO: 510050 - DNA, 33 bp, Homo sapien
gtatcccttcacataagaagtagatgtctcgct

SEQ ID NO: 510051 - DNA, 33 bp, Homo sapien
ggcataacagaagtaaaggaaattttaggtcta

SEQ ID NO: 510052 - DNA, 33 bp, Homo sapien
ggcataacagaagtaagggaaattttaggtcta

SEQ ID NO: 510053 - DNA, 33 bp, Homo sapien
agtgatgttaattgaaccatagcttcctgtttt

SEQ ID NO: 510054 - DNA, 33 bp, Homo sapien
agtgatgttaattgaatcatagcttcctgtttt

SEQ ID NO: 510055 - DNA, 33 bp, Homo sapien
ttgctaattgggaacactgatgtaaaattacat

SEQ ID NO: 510056 - DNA, 33 bp, Homo sapien
ttgctaattgggaacattgatgtaaaattacat

SEQ ID NO: 510057 - DNA, 33 bp, Homo sapien
caacttgcatgacaaacagtcccaaagcctaag

SEQ ID NO: 510058 - DNA, 33 bp, Homo sapien
caacttgcatgacaaagagtcccaaagcctaag

SEQ ID NO: 510059 - DNA, 33 bp, Homo sapien
aaccattcaaaactaaacattcagatttctcta

SEQ ID NO: 510060 - DNA, 33 bp, Homo sapien
aaccattcaaaactaaccattcagatttctcta

SEQ ID NO: 510061 - DNA, 33 bp, Homo sapien
cccagacttattggaaacaacgattggtgatgt

SEQ ID NO: 510062 - DNA, 33 bp, Homo sapien
cccagacttattggaagcaacgattggtgatgt

SEQ ID NO: 510063 - DNA, 33 bp, Homo sapien
gattaggtcatatgaactaaactcccacactat

SEQ ID NO: 510064 - DNA, 33 bp, Homo sapien
gattaggtcatatgaattaaactcccacactat

SEQ ID NO: 510065 - DNA, 33 bp, Homo sapien
gctttccattccgacacacagaccaacaaacac

SEQ ID NO: 510066 - DNA, 33 bp, Homo sapien
gctttccattccgacagacagaccaacaaacac

SEQ ID NO: 510067 - DNA, 33 bp, Homo sapien
gtggtgaatccagccaaacttgtgcatttctct

SEQ ID NO: 510068 - DNA, 33 bp, Homo sapien
gtggtgaatccagccagacttgtgcatttctct

SEQ ID NO: 510069 - DNA, 33 bp, Homo sapien
taaaaggaaatgagtgaaagcatagccaacatt

SEQ ID NO: 510070 - DNA, 33 bp, Homo sapien
taaaaggaaatgagtggaagcatagccaacatt

SEQ ID NO: 510071 - DNA, 33 bp, Homo sapien
aaatgttttgtgcaaaagtgggttccaatcact

SEQ ID NO: 510072 - DNA, 33 bp, Homo sapien
aaatgttttgtgcaaacgtgggttccaatcact

SEQ ID NO: 510073 - DNA, 33 bp, Homo sapien
agataaggtcaagagaaggacaggaacttgccc

SEQ ID NO: 510074 - DNA, 33 bp, Homo sapien
agataaggtcaagagagggacaggaacttgccc

SEQ ID NO: 510075 - DNA, 33 bp, Homo sapien
aagatgtcctggatgcacagacttgaatttcca

SEQ ID NO: 510076 - DNA, 33 bp, Homo sapien
aagatgtcctggatgctcagacttgaatttcca

SEQ ID NO: 510077 - DNA, 33 bp, Homo sapien
catctgtatatcacataaaaccatctcaaacat

SEQ ID NO: 510078 - DNA, 33 bp, Homo sapien
catctgtatatcacatgaaaccatctcaaacat

SEQ ID NO: 510079 - DNA, 33 bp, Homo sapien
aaccttaagctcatggaagacagctgaggaagt

SEQ ID NO: 510080 - DNA, 33 bp, Homo sapien
aaccttaagctcatggcagacagctgaggaagt

SEQ ID NO: 510081 - DNA, 33 bp, Homo sapien
atttagctttcaagaaaggtctctaatgatgtt

SEQ ID NO: 510082 - DNA, 33 bp, Homo sapien
atttagctttcaagaatggtctctaatgatgtt

SEQ ID NO: 510083 - DNA, 33 bp, Homo sapien
cacaatttctctgaatcaatcctggttctatga

SEQ ID NO: 510084 - DNA, 33 bp, Homo sapien
cacaatttctctgaattaatcctggttctatga

SEQ ID NO: 510085 - DNA, 33 bp, Homo sapien
tagaaagaaagggtccacgtgaagtttgtctta

SEQ ID NO: 510086 - DNA, 33 bp, Homo sapien
tagaaagaaagggtccgcgtgaagtttgtctta

SEQ ID NO: 510087 - DNA, 33 bp, Homo sapien
gactcttgggcatctgaaactgagccatgcaga

SEQ ID NO: 510088 - DNA, 33 bp, Homo sapien
gactcttgggcatctgcaactgagccatgcaga

SEQ ID NO: 510089 - DNA, 33 bp, Homo sapien
aaatgtattttgtagacatctgtattgattttt

SEQ ID NO: 510090 - DNA, 33 bp, Homo sapien
aaatgtattttgtagagatctgtattgattttt

SEQ ID NO: 510091 - DNA, 33 bp, Homo sapien
agatcagaaatatccaagggaatctcaagtagg

SEQ ID NO: 510092 - DNA, 33 bp, Homo sapien
agatcagaaatatccaggggaatctcaagtagg

SEQ ID NO: 510093 - DNA, 33 bp, Homo sapien
ctttacaagtgaatacaatgctgccagtcataa

SEQ ID NO: 510094 - DNA, 33 bp, Homo sapien
ctttacaagtgaataccatgctgccagtcataa

SEQ ID NO: 510095 - DNA, 33 bp, Homo sapien
ggccgaatcctcagctcagccaggtttctgtgc

SEQ ID NO: 510096 - DNA, 33 bp, Homo sapien
ggccgaatcctcagcttagccaggtttctgtgc

SEQ ID NO: 510097 - DNA, 33 bp, Homo sapien
tccggaacttgaaaaccgtttaggtatctggtc

SEQ ID NO: 510098 - DNA, 33 bp, Homo sapien
tccggaacttgaaaactgtttaggtatctggtc

SEQ ID NO: 510099 - DNA, 33 bp, Homo sapien
gacccaaaagaagccaccctggcgttcggggtc

SEQ ID NO: 510100 - DNA, 33 bp, Homo sapien
gacccaaaagaagccatcctggcgttcggggtc

SEQ ID NO: 510101 - DNA, 33 bp, Homo sapien
tagtgttcttcaaaaaatatggcacgaaatact

SEQ ID NO: 510102 - DNA, 33 bp, Homo sapien
tagtgttcttcaaaaactatggcacgaaatact

SEQ ID NO: 510103 - DNA, 33 bp, Homo sapien
ggcagaagacctaaaaactgtgtggaatattcc

SEQ ID NO: 510104 - DNA, 33 bp, Homo sapien
ggcagaagacctaaaagctgtgtggaatattcc

SEQ ID NO: 510105 - DNA, 33 bp, Homo sapien
gatgtgccctttgacaactttccaaacaagaag

SEQ ID NO: 510106 - DNA, 33 bp, Homo sapien
gatgtgccctttgacacctttccaaacaagaag

SEQ ID NO: 510107 - DNA, 33 bp, Homo sapien
aagactggtcatctgtcaagttgtgagacagta

SEQ ID NO: 510108 - DNA, 33 bp, Homo sapien
aagactggtcatctgtgaagttgtgagacagta

SEQ ID NO: 510109 - DNA, 33 bp, Homo sapien
actctgagagcttagggccctgagcagctcaca

SEQ ID NO: 510110 - DNA, 33 bp, Homo sapien
actctgagagcttaggtccctgagcagctcaca

SEQ ID NO: 510111 - DNA, 33 bp, Homo sapien
agaatacactcagaaacggttaagatggtaaat

SEQ ID NO: 510112 - DNA, 33 bp, Homo sapien
agaatacactcagaaatggttaagatggtaaat

SEQ ID NO: 510113 - DNA, 33 bp, Homo sapien
cacagaagtcctgaccagcaagtctctccccag

SEQ ID NO: 510114 - DNA, 33 bp, Homo sapien
cacagaagtcctgaccggcaagtctctccccag

SEQ ID NO: 510115 - DNA, 33 bp, Homo sapien
tgcaggtgcacaggctaaacatcagagccagac

SEQ ID NO: 510116 - DNA, 33 bp, Homo sapien
tgcaggtgcacaggctgaacatcagagccagac

SEQ ID NO: 510117 - DNA, 33 bp, Homo sapien
tgcaaagcagaggtgcacgccagaggacagggc

SEQ ID NO: 510118 - DNA, 33 bp, Homo sapien
tgcaaagcagaggtgcgcgccagaggacagggc

SEQ ID NO: 510119 - DNA, 33 bp, Homo sapien
tgaagttcttggccacacagaaaattggggctg

SEQ ID NO: 510120 - DNA, 33 bp, Homo sapien
tgaagttcttggccacgcagaaaattggggctg

SEQ ID NO: 510121 - DNA, 33 bp, Homo sapien
gtgaagagcagggaaacggacggcagacatggg

SEQ ID NO: 510122 - DNA, 33 bp, Homo sapien
gtgaagagcagggaaatggacggcagacatggg

SEQ ID NO: 510123 - DNA, 33 bp, Homo sapien
caagcaccttctgaagacctcaggggagagtct

SEQ ID NO: 510124 - DNA, 33 bp, Homo sapien
caagcaccttctgaaggcctcaggggagagtct

SEQ ID NO: 510125 - DNA, 33 bp, Homo sapien
gaatccataaaactgacagccaactcgtgggga

SEQ ID NO: 510126 - DNA, 33 bp, Homo sapien
gaatccataaaactgatagccaactcgtgggga

SEQ ID NO: 510127 - DNA, 33 bp, Homo sapien
ttccttgccttccagaaagagaaggagaataat

SEQ ID NO: 510128 - DNA, 33 bp, Homo sapien
ttccttgccttccagagagagaaggagaataat

SEQ ID NO: 510129 - DNA, 33 bp, Homo sapien
atgtcttactcccccaaatctgtggatgtgacc

SEQ ID NO: 510130 - DNA, 33 bp, Homo sapien
atgtcttactcccccagatctgtggatgtgacc

SEQ ID NO: 510131 - DNA, 33 bp, Homo sapien
ctgctttcctctaacaaggaccattgtgcccgc

SEQ ID NO: 510132 - DNA, 33 bp, Homo sapien
ctgctttcctctaacagggaccattgtgcccgc

SEQ ID NO: 510133 - DNA, 33 bp, Homo sapien
tctggccaatgaaatagggcacaggtgacacct

SEQ ID NO: 510134 - DNA, 33 bp, Homo sapien
tctggccaatgaaatatggcacaggtgacacct

SEQ ID NO: 510135 - DNA, 33 bp, Homo sapien
ctggattccttagcctaacttaccagcacctgc

SEQ ID NO: 510136 - DNA, 33 bp, Homo sapien
ctggattccttagcctgacttaccagcacctgc

SEQ ID NO: 510137 - DNA, 33 bp, Homo sapien
ctagggcatctggctacagcttaataaatattt

SEQ ID NO: 510138 - DNA, 33 bp, Homo sapien
ctagggcatctggctagagcttaataaatattt

SEQ ID NO: 510139 - DNA, 33 bp, Homo sapien
cagagaaagagcatcaaatgtgctttgaacata

SEQ ID NO: 510140 - DNA, 33 bp, Homo sapien
cagagaaagagcatcagatgtgctttgaacata

SEQ ID NO: 510141 - DNA, 33 bp, Homo sapien
tgacttcctcctggccagattattttggccttc

SEQ ID NO: 510142 - DNA, 33 bp, Homo sapien
tgacttcctcctggccggattattttggccttc

SEQ ID NO: 510143 - DNA, 33 bp, Homo sapien
aggaagcccacagaaccgggaagtcactgaggc

SEQ ID NO: 510144 - DNA, 33 bp, Homo sapien
aggaagcccacagaactgggaagtcactgaggc

SEQ ID NO: 510145 - DNA, 33 bp, Homo sapien
gtcatcaggaactcccacattgccctcaggagc

SEQ ID NO: 510146 - DNA, 33 bp, Homo sapien
gtcatcaggaactcccgcattgccctcaggagc

SEQ ID NO: 510147 - DNA, 33 bp, Homo sapien
cagaacatctgggagcggaagctgtaggggtga

SEQ ID NO: 510148 - DNA, 33 bp, Homo sapien
cagaacatctgggagctgaagctgtaggggtga

SEQ ID NO: 510149 - DNA, 33 bp, Homo sapien
atgctgtgaccagagacgagaagtcgagtgtct

SEQ ID NO: 510150 - DNA, 33 bp, Homo sapien
atgctgtgaccagagatgagaagtcgagtgtct

SEQ ID NO: 510151 - DNA, 33 bp, Homo sapien
aggtctgtggtgtgacaatgtctgcagatgtac

SEQ ID NO: 510152 - DNA, 33 bp, Homo sapien
aggtctgtggtgtgacgatgtctgcagatgtac

SEQ ID NO: 510153 - DNA, 33 bp, Homo sapien
tgtgtgggagcgtccaccttaaaaacaattctt

SEQ ID NO: 510154 - DNA, 33 bp, Homo sapien
tgtgtgggagcgtccatcttaaaaacaattctt

SEQ ID NO: 510155 - DNA, 33 bp, Homo sapien
cccctcaagaggaaaaatggggggtctcactca

SEQ ID NO: 510156 - DNA, 33 bp, Homo sapien
cccctcaagaggaaaagtggggggtctcactca

SEQ ID NO: 510157 - DNA, 33 bp, Homo sapien
gccccagggaacatcaccccggcctttgctgag

SEQ ID NO: 510158 - DNA, 33 bp, Homo sapien
gccccagggaacatcatcccggcctttgctgag

SEQ ID NO: 510159 - DNA, 33 bp, Homo sapien
taggtaacatgtttaccgctcaatgaataggac

SEQ ID NO: 510160 - DNA, 33 bp, Homo sapien
taggtaacatgtttactgctcaatgaataggac

SEQ ID NO: 510161 - DNA, 33 bp, Homo sapien
gagggaatattaatggaataactcacagaagcc

SEQ ID NO: 510162 - DNA, 33 bp, Homo sapien
gagggaatattaatgggataactcacagaagcc

SEQ ID NO: 510163 - DNA, 33 bp, Homo sapien
ttcaggcttttgttcaatcctttattcaactga

SEQ ID NO: 510164 - DNA, 33 bp, Homo sapien
ttcaggcttttgttcattcctttattcaactga

SEQ ID NO: 510165 - DNA, 33 bp, Homo sapien
taagttcaaagtagataaggaaatgaaattaat

SEQ ID NO: 510166 - DNA, 33 bp, Homo sapien
taagttcaaagtagattaggaaatgaaattaat

SEQ ID NO: 510167 - DNA, 33 bp, Homo sapien
gactcagaattgcacccacaaagaattattaat

SEQ ID NO: 510168 - DNA, 33 bp, Homo sapien
gactcagaattgcacctacaaagaattattaat

SEQ ID NO: 510169 - DNA, 33 bp, Homo sapien
ggtcctgagccatttcccgtggagactcatcag

SEQ ID NO: 510170 - DNA, 33 bp, Homo sapien
ggtcctgagccatttctcgtggagactcatcag

SEQ ID NO: 510171 - DNA, 33 bp, Homo sapien
gcggcggcccaaccccaatggcagcacacaggc

SEQ ID NO: 510172 - DNA, 33 bp, Homo sapien
gcggcggcccaaccccgatggcagcacacaggc

SEQ ID NO: 510173 - DNA, 33 bp, Homo sapien
aaagaagtgtgatgggcagaaaaatttgcattg

SEQ ID NO: 510174 - DNA, 33 bp, Homo sapien
aaagaagtgtgatgggtagaaaaatttgcattg

SEQ ID NO: 510175 - DNA, 33 bp, Homo sapien
gagatggtgccagcaggccaaagcagcctgtag

SEQ ID NO: 510176 - DNA, 33 bp, Homo sapien
gagatggtgccagcagtccaaagcagcctgtag

SEQ ID NO: 510177 - DNA, 33 bp, Homo sapien
caggcagccaataagacgattctcaaaaaggac

SEQ ID NO: 510178 - DNA, 33 bp, Homo sapien
caggcagccaataagatgattctcaaaaaggac

SEQ ID NO: 510179 - DNA, 33 bp, Homo sapien
agtgactgcagatgcacgaaatgagtgggcctt

SEQ ID NO: 510180 - DNA, 33 bp, Homo sapien
agtgactgcagatgcatgaaatgagtgggcctt

SEQ ID NO: 510181 - DNA, 33 bp, Homo sapien
accttctccccattgacacagctgggcaaacat

SEQ ID NO: 510182 - DNA, 33 bp, Homo sapien
accttctccccattgatacagctgggcaaacat

SEQ ID NO: 510183 - DNA, 33 bp, Homo sapien
gagtgggcggagcttacgttctttccacaaggg

SEQ ID NO: 510184 - DNA, 33 bp, Homo sapien
gagtgggcggagcttaggttctttccacaaggg

SEQ ID NO: 510185 - DNA, 33 bp, Homo sapien
ctcaacagccagtgggaaaacacaccaataaag

SEQ ID NO: 510186 - DNA, 33 bp, Homo sapien
ctcaacagccagtggggaaacacaccaataaag

SEQ ID NO: 510187 - DNA, 33 bp, Homo sapien
ggactcttctgaggggccatccttgctctggat

SEQ ID NO: 510188 - DNA, 33 bp, Homo sapien
ggactcttctgagggggcatccttgctctggat

SEQ ID NO: 510189 - DNA, 33 bp, Homo sapien
gagcctgcctggttaccgacctcagctgaccct

SEQ ID NO: 510190 - DNA, 33 bp, Homo sapien
gagcctgcctggttactgacctcagctgaccct

SEQ ID NO: 510191 - DNA, 33 bp, Homo sapien
gcagaagagcatgcaaagtgggataggctgctg

SEQ ID NO: 510192 - DNA, 33 bp, Homo sapien
gcagaagagcatgcaaggtgggataggctgctg

SEQ ID NO: 510193 - DNA, 33 bp, Homo sapien
acctcctcctctccaagcggatacctctttcct

SEQ ID NO: 510194 - DNA, 33 bp, Homo sapien
acctcctcctctccaatcggatacctctttcct

SEQ ID NO: 510195 - DNA, 33 bp, Homo sapien
aagcggcattctcactcagaggaacaggtagag

SEQ ID NO: 510196 - DNA, 33 bp, Homo sapien
aagcggcattctcacttagaggaacaggtagag

SEQ ID NO: 510197 - DNA, 33 bp, Homo sapien
aacttatatttgaccaatggcatcacttgatgg

SEQ ID NO: 510198 - DNA, 33 bp, Homo sapien
aacttatatttgaccagtggcatcacttgatgg

SEQ ID NO: 510199 - DNA, 33 bp, Homo sapien
gtgttctaactggttcacgtggcttaccatttt

SEQ ID NO: 510200 - DNA, 33 bp, Homo sapien
gtgttctaactggttcgcgtggcttaccatttt

SEQ ID NO: 510201 - DNA, 33 bp, Homo sapien
ttatatacatcgttggcattcatcttcacgata

SEQ ID NO: 510202 - DNA, 33 bp, Homo sapien
ttatatacatcgttggtattcatcttcacgata

SEQ ID NO: 510203 - DNA, 33 bp, Homo sapien
gtgactggagaggttaagcatctattcagccat

SEQ ID NO: 510204 - DNA, 33 bp, Homo sapien
gtgactggagaggttatgcatctattcagccat

SEQ ID NO: 510205 - DNA, 33 bp, Homo sapien
catattagtgccaacaggaaatatttgaaaaaa

SEQ ID NO: 510206 - DNA, 33 bp, Homo sapien
catattagtgccaacatgaaatatttgaaaaaa

SEQ ID NO: 510207 - DNA, 33 bp, Homo sapien
attttccattttcacaggaatagttggaaatgc

SEQ ID NO: 510208 - DNA, 33 bp, Homo sapien
attttccattttcacatgaatagttggaaatgc

SEQ ID NO: 510209 - DNA, 33 bp, Homo sapien
accatggaggcacagcaactgcatctgggatag

SEQ ID NO: 510210 - DNA, 33 bp, Homo sapien
accatggaggcacagcgactgcatctgggatag

SEQ ID NO: 510211 - DNA, 33 bp, Homo sapien
tcagtgctgtcatcaggccttgggtaggagtac

SEQ ID NO: 510212 - DNA, 33 bp, Homo sapien
tcagtgctgtcatcagtccttgggtaggagtac

SEQ ID NO: 510213 - DNA, 33 bp, Homo sapien
caaaatgacttgtctacagcatgtcctgttgta

SEQ ID NO: 510214 - DNA, 33 bp, Homo sapien
caaaatgacttgtctatagcatgtcctgttgta

SEQ ID NO: 510215 - DNA, 33 bp, Homo sapien
gaatattacctaactaaggaggcaattggtaat

SEQ ID NO: 510216 - DNA, 33 bp, Homo sapien
gaatattacctaactagggaggcaattggtaat

SEQ ID NO: 510217 - DNA, 33 bp, Homo sapien
agttcagagagtaaacagggacaagtagcttga

SEQ ID NO: 510218 - DNA, 33 bp, Homo sapien
agttcagagagtaaacggggacaagtagcttga

SEQ ID NO: 510219 - DNA, 33 bp, Homo sapien
cccctcagtaggactccgacttctctggtttcc

SEQ ID NO: 510220 - DNA, 33 bp, Homo sapien
cccctcagtaggactctgacttctctggtttcc

SEQ ID NO: 510221 - DNA, 33 bp, Homo sapien
atctggaaagtctgaaagaacggcacgcccagt

SEQ ID NO: 510222 - DNA, 33 bp, Homo sapien
atctggaaagtctgaaggaacggcacgcccagt

SEQ ID NO: 510223 - DNA, 33 bp, Homo sapien
aattaaataatttccaactgactctgaacgaat

SEQ ID NO: 510224 - DNA, 33 bp, Homo sapien
aattaaataatttccacctgactctgaacgaat

SEQ ID NO: 510225 - DNA, 33 bp, Homo sapien
cctaggttggctgagaatagaggtctaccactt

SEQ ID NO: 510226 - DNA, 33 bp, Homo sapien
cctaggttggctgagattagaggtctaccactt

SEQ ID NO: 510227 - DNA, 33 bp, Homo sapien
cagaaaacaagacatgcagcaagttatgactgt

SEQ ID NO: 510228 - DNA, 33 bp, Homo sapien
cagaaaacaagacatggagcaagttatgactgt

SEQ ID NO: 510229 - DNA, 33 bp, Homo sapien
gcaatgaagaagatcacgtagatattaagagat

SEQ ID NO: 510230 - DNA, 33 bp, Homo sapien
gcaatgaagaagatcatgtagatattaagagat

SEQ ID NO: 510231 - DNA, 33 bp, Homo sapien
cagtggcgactcttgcactgactgagtcgccaa

SEQ ID NO: 510232 - DNA, 33 bp, Homo sapien
cagtggcgactcttgcgctgactgagtcgccaa

SEQ ID NO: 510233 - DNA, 33 bp, Homo sapien
ttagaaaccgctgctcaaaactattggcctgtt

SEQ ID NO: 510234 - DNA, 33 bp, Homo sapien
ttagaaaccgctgctcgaaactattggcctgtt

SEQ ID NO: 510235 - DNA, 33 bp, Homo sapien
cggctgaaggcagcacaatgagcaaaacagaat

SEQ ID NO: 510236 - DNA, 33 bp, Homo sapien
cggctgaaggcagcacgatgagcaaaacagaat

SEQ ID NO: 510237 - DNA, 33 bp, Homo sapien
ggggcatgcctgaggtcaagaattaggaagtca

SEQ ID NO: 510238 - DNA, 33 bp, Homo sapien
ggggcatgcctgaggttaagaattaggaagtca

SEQ ID NO: 510239 - DNA, 33 bp, Homo sapien
cgcagctcctagctcaaggtactcttggtcact

SEQ ID NO: 510240 - DNA, 33 bp, Homo sapien
cgcagctcctagctcagggtactcttggtcact

SEQ ID NO: 510241 - DNA, 33 bp, Homo sapien
cacaaggcagggaaagaaaccgaaacatagacc

SEQ ID NO: 510242 - DNA, 33 bp, Homo sapien
cacaaggcagggaaagcaaccgaaacatagacc

SEQ ID NO: 510243 - DNA, 33 bp, Homo sapien
cgggatgagtcagaccagaaatggctgcagttt

SEQ ID NO: 510244 - DNA, 33 bp, Homo sapien
cgggatgagtcagaccggaaatggctgcagttt

SEQ ID NO: 510245 - DNA, 33 bp, Homo sapien
caaatagttctaggaacgtcaaattttggagaa

SEQ ID NO: 510246 - DNA, 33 bp, Homo sapien
caaatagttctaggaatgtcaaattttggagaa

SEQ ID NO: 510247 - DNA, 33 bp, Homo sapien
cagccttccaaatcagacactcatgttgccaat

SEQ ID NO: 510248 - DNA, 33 bp, Homo sapien
cagccttccaaatcaggcactcatgttgccaat

SEQ ID NO: 510249 - DNA, 33 bp, Homo sapien
ctttccaggtgtccaaagacagaagggtccttc

SEQ ID NO: 510250 - DNA, 33 bp, Homo sapien
ctttccaggtgtccaacgacagaagggtccttc

SEQ ID NO: 510251 - DNA, 33 bp, Homo sapien
aacagcatggatggacgaagagcaagaaaaggt

SEQ ID NO: 510252 - DNA, 33 bp, Homo sapien
aacagcatggatggactaagagcaagaaaaggt

SEQ ID NO: 510253 - DNA, 33 bp, Homo sapien
gcatttctgttcaaagaagtgagtaggaagaaa

SEQ ID NO: 510254 - DNA, 33 bp, Homo sapien
gcatttctgttcaaaggagtgagtaggaagaaa

SEQ ID NO: 510255 - DNA, 33 bp, Homo sapien
tccagtccaatacaaaagtgagattataacact

SEQ ID NO: 510256 - DNA, 33 bp, Homo sapien
tccagtccaatacaaacgtgagattataacact

SEQ ID NO: 510257 - DNA, 33 bp, Homo sapien
gcccatttaatatcccccgaccaaccttctgcc

SEQ ID NO: 510258 - DNA, 33 bp, Homo sapien
gcccatttaatatccctcgaccaaccttctgcc

SEQ ID NO: 510259 - DNA, 33 bp, Homo sapien
gtttactaagtgcacacgtggtctgaagttacg

SEQ ID NO: 510260 - DNA, 33 bp, Homo sapien
gtttactaagtgcacaggtggtctgaagttacg

SEQ ID NO: 510261 - DNA, 33 bp, Homo sapien
caacttgtggtgttaccgatgaggacaccgagg

SEQ ID NO: 510262 - DNA, 33 bp, Homo sapien
caacttgtggtgttacggatgaggacaccgagg

SEQ ID NO: 510263 - DNA, 33 bp, Homo sapien
cactactgaaacacataaaagtagacttgaaca

SEQ ID NO: 510264 - DNA, 33 bp, Homo sapien
cactactgaaacacatcaaagtagacttgaaca

SEQ ID NO: 510265 - DNA, 33 bp, Homo sapien
taaaaagaagtccaaaacctatatgagaaaaac

SEQ ID NO: 510266 - DNA, 33 bp, Homo sapien
taaaaagaagtccaaatcctatatgagaaaaac

SEQ ID NO: 510267 - DNA, 33 bp, Homo sapien
tcctgacattcacttacatgatggagcaacaat

SEQ ID NO: 510268 - DNA, 33 bp, Homo sapien
tcctgacattcacttatatgatggagcaacaat

SEQ ID NO: 510269 - DNA, 33 bp, Homo sapien
gtgatggatggctgcaatataaagataattagc

SEQ ID NO: 510270 - DNA, 33 bp, Homo sapien
gtgatggatggctgcactataaagataattagc

SEQ ID NO: 510271 - DNA, 33 bp, Homo sapien
caggaagctggaggagaaaacaacgggccggca

SEQ ID NO: 510272 - DNA, 33 bp, Homo sapien
caggaagctggaggagcaaacaacgggccggca

SEQ ID NO: 510273 - DNA, 33 bp, Homo sapien
tgcccagagtacttacacgcatcagctcatgtg

SEQ ID NO: 510274 - DNA, 33 bp, Homo sapien
tgcccagagtacttacgcgcatcagctcatgtg

SEQ ID NO: 510275 - DNA, 33 bp, Homo sapien
agacagtacaagttgactagtgtgcctcctgca

SEQ ID NO: 510276 - DNA, 33 bp, Homo sapien
agacagtacaagttgattagtgtgcctcctgca

SEQ ID NO: 510277 - DNA, 33 bp, Homo sapien
ttgggtccgttcttcacggatggagccttctag

SEQ ID NO: 510278 - DNA, 33 bp, Homo sapien
ttgggtccgttcttcatggatggagccttctag

SEQ ID NO: 510279 - DNA, 33 bp, Homo sapien
gagtaagagttcatcaaacacagaaaggtgaag

SEQ ID NO: 510280 - DNA, 33 bp, Homo sapien
gagtaagagttcatcagacacagaaaggtgaag

SEQ ID NO: 510281 - DNA, 33 bp, Homo sapien
ctgctctccgcacacaacaatggagtgaccctt

SEQ ID NO: 510282 - DNA, 33 bp, Homo sapien
ctgctctccgcacacagcaatggagtgaccctt

SEQ ID NO: 510283 - DNA, 33 bp, Homo sapien
ggacggactgcgcccaatgacctgtgaagcgta

SEQ ID NO: 510284 - DNA, 33 bp, Homo sapien
ggacggactgcgcccagtgacctgtgaagcgta

SEQ ID NO: 510285 - DNA, 33 bp, Homo sapien
tagcagaatatttagacgactcattttcattgt

SEQ ID NO: 510286 - DNA, 33 bp, Homo sapien
tagcagaatatttagatgactcattttcattgt

SEQ ID NO: 510287 - DNA, 33 bp, Homo sapien
aggggtattggacagactcctaggtgtggtaag

SEQ ID NO: 510288 - DNA, 33 bp, Homo sapien
aggggtattggacagattcctaggtgtggtaag

SEQ ID NO: 510289 - DNA, 33 bp, Homo sapien
taagtgattttcaggaaggctgttgatgctgct

SEQ ID NO: 510290 - DNA, 33 bp, Homo sapien
taagtgattttcaggacggctgttgatgctgct

SEQ ID NO: 510291 - DNA, 33 bp, Homo sapien
gtctcgcttagttccacggtagccagaagtagt

SEQ ID NO: 510292 - DNA, 33 bp, Homo sapien
gtctcgcttagttccatggtagccagaagtagt

SEQ ID NO: 510293 - DNA, 33 bp, Homo sapien
actggaaaccaattccccaggaacattccatca

SEQ ID NO: 510294 - DNA, 33 bp, Homo sapien
actggaaaccaattccgcaggaacattccatca

SEQ ID NO: 510295 - DNA, 33 bp, Homo sapien
atgggccacccttctacgcacagctccagcaga

SEQ ID NO: 510296 - DNA, 33 bp, Homo sapien
atgggccacccttctatgcacagctccagcaga

SEQ ID NO: 510297 - DNA, 33 bp, Homo sapien
gcacggtcagtccttccaaaacccctgtgagga

SEQ ID NO: 510298 - DNA, 33 bp, Homo sapien
gcacggtcagtccttcgaaaacccctgtgagga

SEQ ID NO: 510299 - DNA, 33 bp, Homo sapien
tgagctttggctcttacgttcacgagcgctggg

SEQ ID NO: 510300 - DNA, 33 bp, Homo sapien
tgagctttggctcttatgttcacgagcgctggg

SEQ ID NO: 510301 - DNA, 33 bp, Homo sapien
aagtggaataaaacagcatatgtccttttgtga

SEQ ID NO: 510302 - DNA, 33 bp, Homo sapien
aagtggaataaaacagtatatgtccttttgtga

SEQ ID NO: 510303 - DNA, 33 bp, Homo sapien
gagtgtgagccctctgaagaatgtgcaggtggc

SEQ ID NO: 510304 - DNA, 33 bp, Homo sapien
gagtgtgagccctctggagaatgtgcaggtggc

SEQ ID NO: 510305 - DNA, 33 bp, Homo sapien
gcaaaggcgaggagaagaaaatgaaggaggcct

SEQ ID NO: 510306 - DNA, 33 bp, Homo sapien
gcaaaggcgaggagaataaaatgaaggaggcct

SEQ ID NO: 510307 - DNA, 33 bp, Homo sapien
gaggtcagctcctgccacgcttctggtcatcaa

SEQ ID NO: 510308 - DNA, 33 bp, Homo sapien
gaggtcagctcctgccgcgcttctggtcatcaa

SEQ ID NO: 510309 - DNA, 33 bp, Homo sapien
ttgcaagtttaagaacagcactaagatgacttt

SEQ ID NO: 510310 - DNA, 33 bp, Homo sapien
ttgcaagtttaagaactgcactaagatgacttt

SEQ ID NO: 510311 - DNA, 33 bp, Homo sapien
ctcaccatacctgaatcatgctaaaacctgcat

SEQ ID NO: 510312 - DNA, 33 bp, Homo sapien
ctcaccatacctgaatgatgctaaaacctgcat

SEQ ID NO: 510313 - DNA, 33 bp, Homo sapien
tatgcaaaattaaaggaagaaaatgaagttgat

SEQ ID NO: 510314 - DNA, 33 bp, Homo sapien
tatgcaaaattaaaggtagaaaatgaagttgat

SEQ ID NO: 510315 - DNA, 33 bp, Homo sapien
ggatctgggtctgtaactggacatcactggggg

SEQ ID NO: 510316 - DNA, 33 bp, Homo sapien
ggatctgggtctgtaattggacatcactggggg

SEQ ID NO: 510317 - DNA, 33 bp, Homo sapien
ccccgagaagcaaggaaagccatgacggtctaa

SEQ ID NO: 510318 - DNA, 33 bp, Homo sapien
ccccgagaagcaaggacagccatgacggtctaa

SEQ ID NO: 510319 - DNA, 33 bp, Homo sapien
gaggtttatttgggcaagaataataaaaagcac

SEQ ID NO: 510320 - DNA, 33 bp, Homo sapien
gaggtttatttgggcaggaataataaaaagcac

SEQ ID NO: 510321 - DNA, 33 bp, Homo sapien
accctaaatcagaacccgggtccagtctctgtg

SEQ ID NO: 510322 - DNA, 33 bp, Homo sapien
accctaaatcagaacctgggtccagtctctgtg

SEQ ID NO: 510323 - DNA, 33 bp, Homo sapien
gtcggtccatttcacaatgatagagaggagagc

SEQ ID NO: 510324 - DNA, 33 bp, Homo sapien
gtcggtccatttcacagtgatagagaggagagc

SEQ ID NO: 510325 - DNA, 33 bp, Homo sapien
ctgatttctccggtgactattttaaactgtatt

SEQ ID NO: 510326 - DNA, 33 bp, Homo sapien
ctgatttctccggtgagtattttaaactgtatt

SEQ ID NO: 510327 - DNA, 33 bp, Homo sapien
cggggtgtctggtggacaaagaagaaatcgggg

SEQ ID NO: 510328 - DNA, 33 bp, Homo sapien
cggggtgtctggtggataaagaagaaatcgggg

SEQ ID NO: 510329 - DNA, 33 bp, Homo sapien
gttcttctgggccacaagagaaacgtttgtttc

SEQ ID NO: 510330 - DNA, 33 bp, Homo sapien
gttcttctgggccacaggagaaacgtttgtttc

SEQ ID NO: 510331 - DNA, 33 bp, Homo sapien
ggatgttgttctcacccagaatgaaagagcaag

SEQ ID NO: 510332 - DNA, 33 bp, Homo sapien
ggatgttgttctcacctagaatgaaagagcaag

SEQ ID NO: 510333 - DNA, 33 bp, Homo sapien
ggcaggctgtttttctaactggtgtccaagcca

SEQ ID NO: 510334 - DNA, 33 bp, Homo sapien
ggcaggctgtttttcttactggtgtccaagcca

SEQ ID NO: 510335 - DNA, 33 bp, Homo sapien
tgctcttttcccttccagctctttcttgttcct

SEQ ID NO: 510336 - DNA, 33 bp, Homo sapien
tgctcttttcccttccggctctttcttgttcct

SEQ ID NO: 510337 - DNA, 33 bp, Homo sapien
ggctgtgctgcccctcgccgggtccctcctggg

SEQ ID NO: 510338 - DNA, 33 bp, Homo sapien
ggctgtgctgcccctctccgggtccctcctggg

SEQ ID NO: 510339 - DNA, 33 bp, Homo sapien
ttctgggtgctagtgaacctccccctgagagcc

SEQ ID NO: 510340 - DNA, 33 bp, Homo sapien
ttctgggtgctagtgaccctccccctgagagcc

SEQ ID NO: 510341 - DNA, 33 bp, Homo sapien
ttagccatttgactgaaccagggcaagttactg

SEQ ID NO: 510342 - DNA, 33 bp, Homo sapien
ttagccatttgactgacccagggcaagttactg

SEQ ID NO: 510343 - DNA, 33 bp, Homo sapien
gccagtagctaccgacggtcagtctaaattaat

SEQ ID NO: 510344 - DNA, 33 bp, Homo sapien
gccagtagctaccgactgtcagtctaaattaat

SEQ ID NO: 510345 - DNA, 33 bp, Homo sapien
acgcagcgggcagcaacccagggcagaacaagg

SEQ ID NO: 510346 - DNA, 33 bp, Homo sapien
acgcagcgggcagcaatccagggcagaacaagg

SEQ ID NO: 510347 - DNA, 33 bp, Homo sapien
aggaagctaagattcaaaggtgaggaaggactg

SEQ ID NO: 510348 - DNA, 33 bp, Homo sapien
aggaagctaagattcagaggtgaggaaggactg

SEQ ID NO: 510349 - DNA, 33 bp, Homo sapien
agctagactagaattccgaagcagtggaaagtc

SEQ ID NO: 510350 - DNA, 33 bp, Homo sapien
agctagactagaattctgaagcagtggaaagtc

SEQ ID NO: 510351 - DNA, 33 bp, Homo sapien
aggcacaaaatacaccaatatctttggcaaaag

SEQ ID NO: 510352 - DNA, 33 bp, Homo sapien
aggcacaaaatacaccgatatctttggcaaaag

SEQ ID NO: 510353 - DNA, 33 bp, Homo sapien
caagctaattccctcccgcagtcttgatggaag

SEQ ID NO: 510354 - DNA, 33 bp, Homo sapien
caagctaattccctcctgcagtcttgatggaag

SEQ ID NO: 510355 - DNA, 33 bp, Homo sapien
tccatgtgcataacaacagacaaccaaatatac

SEQ ID NO: 510356 - DNA, 33 bp, Homo sapien
tccatgtgcataacaatagacaaccaaatatac

SEQ ID NO: 510357 - DNA, 33 bp, Homo sapien
ggcttaaaacaatgtaaacttatcctcatatca

SEQ ID NO: 510358 - DNA, 33 bp, Homo sapien
ggcttaaaacaatgtagacttatcctcatatca

SEQ ID NO: 510359 - DNA, 33 bp, Homo sapien
aaagactgcaccgttcaccatgagattaatgaa

SEQ ID NO: 510360 - DNA, 33 bp, Homo sapien
aaagactgcaccgttcgccatgagattaatgaa

SEQ ID NO: 510361 - DNA, 33 bp, Homo sapien
acccacgtggaaaggaaggacaagttgcctggt

SEQ ID NO: 510362 - DNA, 33 bp, Homo sapien
acccacgtggaaaggagggacaagttgcctggt

SEQ ID NO: 510363 - DNA, 33 bp, Homo sapien
acttcccaagattgcccagcttgtgagatctca

SEQ ID NO: 510364 - DNA, 33 bp, Homo sapien
acttcccaagattgccgagcttgtgagatctca

SEQ ID NO: 510365 - DNA, 33 bp, Homo sapien
aaagtcctgacttcaccgctacaaaatctatgc

SEQ ID NO: 510366 - DNA, 33 bp, Homo sapien
aaagtcctgacttcactgctacaaaatctatgc

SEQ ID NO: 510367 - DNA, 33 bp, Homo sapien
tttgtcaactgaaaacagtgatttctttattac

SEQ ID NO: 510368 - DNA, 33 bp, Homo sapien
tttgtcaactgaaaacggtgatttctttattac

SEQ ID NO: 510369 - DNA, 33 bp, Homo sapien
agcagctccgcaacagcaaaaaggtcccagtgt

SEQ ID NO: 510370 - DNA, 33 bp, Homo sapien
agcagctccgcaacaggaaaaaggtcccagtgt

SEQ ID NO: 510371 - DNA, 33 bp, Homo sapien
ccgctgcagtggaggacgcctatgcttcttccc

SEQ ID NO: 510372 - DNA, 33 bp, Homo sapien
ccgctgcagtggaggatgcctatgcttcttccc

SEQ ID NO: 510373 - DNA, 33 bp, Homo sapien
agcaggggactctgggcaagtaggacaaccaac

SEQ ID NO: 510374 - DNA, 33 bp, Homo sapien
agcaggggactctgggtaagtaggacaaccaac

SEQ ID NO: 510375 - DNA, 33 bp, Homo sapien
aagctgtgtgggtcaacaaatgtcttagctcac

SEQ ID NO: 510376 - DNA, 33 bp, Homo sapien
aagctgtgtgggtcaagaaatgtcttagctcac

SEQ ID NO: 510377 - DNA, 33 bp, Homo sapien
ataggcatgtgcccaacacagcagctttggcta

SEQ ID NO: 510378 - DNA, 33 bp, Homo sapien
ataggcatgtgcccaagacagcagctttggcta

SEQ ID NO: 510379 - DNA, 33 bp, Homo sapien
ataggagttcacgaggcagtgcattaccaacaa

SEQ ID NO: 510380 - DNA, 33 bp, Homo sapien
ataggagttcacgaggtagtgcattaccaacaa

SEQ ID NO: 510381 - DNA, 33 bp, Homo sapien
aggccgctcagctcaggacactgcccctatgca

SEQ ID NO: 510382 - DNA, 33 bp, Homo sapien
aggccgctcagctcagtacactgcccctatgca

SEQ ID NO: 510383 - DNA, 33 bp, Homo sapien
caggcagtcatgaaagaagaactgctgttagag

SEQ ID NO: 510384 - DNA, 33 bp, Homo sapien
caggcagtcatgaaaggagaactgctgttagag

SEQ ID NO: 510385 - DNA, 33 bp, Homo sapien
tgaaagtccccaaaaccgtgccagagacatggc

SEQ ID NO: 510386 - DNA, 33 bp, Homo sapien
tgaaagtccccaaaactgtgccagagacatggc

SEQ ID NO: 510387 - DNA, 33 bp, Homo sapien
ccccttgcaggttaacacaggaggcctccaagt

SEQ ID NO: 510388 - DNA, 33 bp, Homo sapien
ccccttgcaggttaacgcaggaggcctccaagt

SEQ ID NO: 510389 - DNA, 33 bp, Homo sapien
atctgatctctgagccaggccaatcaatgttct

SEQ ID NO: 510390 - DNA, 33 bp, Homo sapien
atctgatctctgagccgggccaatcaatgttct

SEQ ID NO: 510391 - DNA, 33 bp, Homo sapien
tcatctctctcctacacggtgagctccatgagg

SEQ ID NO: 510392 - DNA, 33 bp, Homo sapien
tcatctctctcctacatggtgagctccatgagg

SEQ ID NO: 510393 - DNA, 33 bp, Homo sapien
gtacctgtgatcaggtcaaggaatgtctcaggg

SEQ ID NO: 510394 - DNA, 33 bp, Homo sapien
gtacctgtgatcaggtgaaggaatgtctcaggg

SEQ ID NO: 510395 - DNA, 33 bp, Homo sapien
agcttcatttgtttcccataaagggggttgatg

SEQ ID NO: 510396 - DNA, 33 bp, Homo sapien
agcttcatttgtttcctataaagggggttgatg

SEQ ID NO: 510397 - DNA, 33 bp, Homo sapien
atggcctttggggaggacactattatatttatt

SEQ ID NO: 510398 - DNA, 33 bp, Homo sapien
atggcctttggggagggcactattatatttatt

SEQ ID NO: 510399 - DNA, 33 bp, Homo sapien
tgttcattgagaggcaacattgtgattacacga

SEQ ID NO: 510400 - DNA, 33 bp, Homo sapien
tgttcattgagaggcagcattgtgattacacga

SEQ ID NO: 510401 - DNA, 33 bp, Homo sapien
cggtgctgaggtttcacggatgttgttatgcag

SEQ ID NO: 510402 - DNA, 33 bp, Homo sapien
cggtgctgaggtttcatggatgttgttatgcag

SEQ ID NO: 510403 - DNA, 33 bp, Homo sapien
tctgatgctggaactcaaagcccacaggcaggt

SEQ ID NO: 510404 - DNA, 33 bp, Homo sapien
tctgatgctggaactcgaagcccacaggcaggt

SEQ ID NO: 510405 - DNA, 33 bp, Homo sapien
cattaatggagttctgcaatcctcacgacaacc

SEQ ID NO: 510406 - DNA, 33 bp, Homo sapien
cattaatggagttctgtaatcctcacgacaacc

SEQ ID NO: 510407 - DNA, 33 bp, Homo sapien
cagcaagggttccacacgaggaataagagagaa

SEQ ID NO: 510408 - DNA, 33 bp, Homo sapien
cagcaagggttccacatgaggaataagagagaa

SEQ ID NO: 510409 - DNA, 33 bp, Homo sapien
acagtgtgtctcattaagtcttgacatctgggt

SEQ ID NO: 510410 - DNA, 33 bp, Homo sapien
acagtgtgtctcattacgtcttgacatctgggt

SEQ ID NO: 510411 - DNA, 33 bp, Homo sapien
aagacacagttaacaaggatacataataataaa

SEQ ID NO: 510412 - DNA, 33 bp, Homo sapien
aagacacagttaacaatgatacataataataaa

SEQ ID NO: 510413 - DNA, 33 bp, Homo sapien
caaaggctccgtatgcactaatttggtgtctct

SEQ ID NO: 510414 - DNA, 33 bp, Homo sapien
caaaggctccgtatgcgctaatttggtgtctct

SEQ ID NO: 510415 - DNA, 33 bp, Homo sapien
gacccttgctgtggagcaatatgttaatgtcta

SEQ ID NO: 510416 - DNA, 33 bp, Homo sapien
gacccttgctgtggagtaatatgttaatgtcta

SEQ ID NO: 510417 - DNA, 33 bp, Homo sapien
tgatcacagctaggaactacatatttattatac

SEQ ID NO: 510418 - DNA, 33 bp, Homo sapien
tgatcacagctaggaattacatatttattatac

SEQ ID NO: 510419 - DNA, 33 bp, Homo sapien
actccaggaaactggccattggagatgaagctg

SEQ ID NO: 510420 - DNA, 33 bp, Homo sapien
actccaggaaactggctattggagatgaagctg

SEQ ID NO: 510421 - DNA, 33 bp, Homo sapien
acactcagggctccacacgtttcaactctttct

SEQ ID NO: 510422 - DNA, 33 bp, Homo sapien
acactcagggctccacgcgtttcaactctttct

SEQ ID NO: 510423 - DNA, 33 bp, Homo sapien
catccttgcttcatcacgtaggctctgttgtgg

SEQ ID NO: 510424 - DNA, 33 bp, Homo sapien
catccttgcttcatcatgtaggctctgttgtgg

SEQ ID NO: 510425 - DNA, 33 bp, Homo sapien
agagaatgacaagaagaaagtatttccagtctc

SEQ ID NO: 510426 - DNA, 33 bp, Homo sapien
agagaatgacaagaaggaagtatttccagtctc

SEQ ID NO: 510427 - DNA, 33 bp, Homo sapien
ctgcactttctgcagacgattggcggtgctccc

SEQ ID NO: 510428 - DNA, 33 bp, Homo sapien
ctgcactttctgcagatgattggcggtgctccc

SEQ ID NO: 510429 - DNA, 33 bp, Homo sapien
gaggagcctagcatctcaccgtaaccacaagca

SEQ ID NO: 510430 - DNA, 33 bp, Homo sapien
gaggagcctagcatcttaccgtaaccacaagca

SEQ ID NO: 510431 - DNA, 33 bp, Homo sapien
ttagggcctctactccactgtggtcatttcagt

SEQ ID NO: 510432 - DNA, 33 bp, Homo sapien
ttagggcctctactcctctgtggtcatttcagt

SEQ ID NO: 510433 - DNA, 33 bp, Homo sapien
agcctgttgtccattcactcaagcctgggcttc

SEQ ID NO: 510434 - DNA, 33 bp, Homo sapien
agcctgttgtccattcgctcaagcctgggcttc

SEQ ID NO: 510435 - DNA, 33 bp, Homo sapien
ggctgtgtcctgctgacgaccctttctttgtta

SEQ ID NO: 510436 - DNA, 33 bp, Homo sapien
ggctgtgtcctgctgatgaccctttctttgtta

SEQ ID NO: 510437 - DNA, 33 bp, Homo sapien
agaggaaggaataaacaccgaggctcatggctg

SEQ ID NO: 510438 - DNA, 33 bp, Homo sapien
agaggaaggaataaacgccgaggctcatggctg

SEQ ID NO: 510439 - DNA, 33 bp, Homo sapien
tatgcgcatattaacccgagcgcttgactttga

SEQ ID NO: 510440 - DNA, 33 bp, Homo sapien
tatgcgcatattaacctgagcgcttgactttga

SEQ ID NO: 510441 - DNA, 33 bp, Homo sapien
ccccaaacaaactctcaatgttcccgactcctc

SEQ ID NO: 510442 - DNA, 33 bp, Homo sapien
ccccaaacaaactctcgatgttcccgactcctc

SEQ ID NO: 510443 - DNA, 33 bp, Homo sapien
aatgggccgactccacagtcaccaacaaagcgt

SEQ ID NO: 510444 - DNA, 33 bp, Homo sapien
aatgggccgactccacggtcaccaacaaagcgt

SEQ ID NO: 510445 - DNA, 33 bp, Homo sapien
acacgcgtggggagctaaaggatgctagtcaga

SEQ ID NO: 510446 - DNA, 33 bp, Homo sapien
acacgcgtggggagctgaaggatgctagtcaga

SEQ ID NO: 510447 - DNA, 33 bp, Homo sapien
ctggtgactgtcctgccaggtaggtatcattgc

SEQ ID NO: 510448 - DNA, 33 bp, Homo sapien
ctggtgactgtcctgcgaggtaggtatcattgc

SEQ ID NO: 510449 - DNA, 33 bp, Homo sapien
gagagatgtgctaccccctctattccacctcat

SEQ ID NO: 510450 - DNA, 33 bp, Homo sapien
gagagatgtgctacccgctctattccacctcat

SEQ ID NO: 510451 - DNA, 33 bp, Homo sapien
ctgaatgagagagaaacgtgctcccaaagctgc

SEQ ID NO: 510452 - DNA, 33 bp, Homo sapien
ctgaatgagagagaaatgtgctcccaaagctgc

SEQ ID NO: 510453 - DNA, 33 bp, Homo sapien
cctgtaagagaaaggaaggggaaatttgtgacc

SEQ ID NO: 510454 - DNA, 33 bp, Homo sapien
cctgtaagagaaaggagggggaaatttgtgacc

SEQ ID NO: 510455 - DNA, 33 bp, Homo sapien
cctgcacaactgcacacagcagccctggcttgg

SEQ ID NO: 510456 - DNA, 33 bp, Homo sapien
cctgcacaactgcacatagcagccctggcttgg

SEQ ID NO: 510457 - DNA, 33 bp, Homo sapien
agaagccctcatggtacaggtaggctccactcc

SEQ ID NO: 510458 - DNA, 33 bp, Homo sapien
agaagccctcatggtataggtaggctccactcc

SEQ ID NO: 510459 - DNA, 33 bp, Homo sapien
gagaattcaacacaaacctagtgaaggtctatt

SEQ ID NO: 510460 - DNA, 33 bp, Homo sapien
gagaattcaacacaaatctagtgaaggtctatt

SEQ ID NO: 510461 - DNA, 33 bp, Homo sapien
actagcaaaagagtacaaaagagaaattattat

SEQ ID NO: 510462 - DNA, 33 bp, Homo sapien
actagcaaaagagtacgaaagagaaattattat

SEQ ID NO: 510463 - DNA, 33 bp, Homo sapien
cgtgtgaatcctactccaatcaagtcctctgct

SEQ ID NO: 510464 - DNA, 33 bp, Homo sapien
cgtgtgaatcctactcgaatcaagtcctctgct

SEQ ID NO: 510465 - DNA, 33 bp, Homo sapien
ctaagtcttaccctcacgaaaagacaagaaatt

SEQ ID NO: 510466 - DNA, 33 bp, Homo sapien
ctaagtcttaccctcatgaaaagacaagaaatt

SEQ ID NO: 510467 - DNA, 33 bp, Homo sapien
tttcatcttccacaagcatgtgtgtatgcatgt

SEQ ID NO: 510468 - DNA, 33 bp, Homo sapien
tttcatcttccacaagtatgtgtgtatgcatgt

SEQ ID NO: 510469 - DNA, 33 bp, Homo sapien
ctgatagtaagcacccaatctatgtagctcatg

SEQ ID NO: 510470 - DNA, 33 bp, Homo sapien
ctgatagtaagcacccgatctatgtagctcatg

SEQ ID NO: 510471 - DNA, 33 bp, Homo sapien
tatggttattggattaaatgagacatggtatgg

SEQ ID NO: 510472 - DNA, 33 bp, Homo sapien
tatggttattggattatatgagacatggtatgg

SEQ ID NO: 510473 - DNA, 33 bp, Homo sapien
gggaacaatgatacaacgcattagagctacact

SEQ ID NO: 510474 - DNA, 33 bp, Homo sapien
gggaacaatgatacaatgcattagagctacact

SEQ ID NO: 510475 - DNA, 33 bp, Homo sapien
gtaatgtatcttctaaaaacaatatgatcttca

SEQ ID NO: 510476 - DNA, 33 bp, Homo sapien
gtaatgtatcttctaagaacaatatgatcttca

SEQ ID NO: 510477 - DNA, 33 bp, Homo sapien
atgtcagcagaacccacaattcacacatagaca

SEQ ID NO: 510478 - DNA, 33 bp, Homo sapien
atgtcagcagaacccagaattcacacatagaca

SEQ ID NO: 510479 - DNA, 33 bp, Homo sapien
ctgacaaatgggacaacaatgagtgacttggcc

SEQ ID NO: 510480 - DNA, 33 bp, Homo sapien
ctgacaaatgggacaataatgagtgacttggcc

SEQ ID NO: 510481 - DNA, 33 bp, Homo sapien
acctgacccttccaacggctggcaaagataaag

SEQ ID NO: 510482 - DNA, 33 bp, Homo sapien
acctgacccttccaactgctggcaaagataaag

SEQ ID NO: 510483 - DNA, 33 bp, Homo sapien
ctatgaccagtagtcacctttctgggcactgag

SEQ ID NO: 510484 - DNA, 33 bp, Homo sapien
ctatgaccagtagtcatctttctgggcactgag

SEQ ID NO: 510485 - DNA, 33 bp, Homo sapien
tgttacaaaggtgcacaaaaagagcatagaggg

SEQ ID NO: 510486 - DNA, 33 bp, Homo sapien
tgttacaaaggtgcacgaaaagagcatagaggg

SEQ ID NO: 510487 - DNA, 33 bp, Homo sapien
tgagtggacaataaccagacagtccaacgaccc

SEQ ID NO: 510488 - DNA, 33 bp, Homo sapien
tgagtggacaataaccggacagtccaacgaccc

SEQ ID NO: 510489 - DNA, 33 bp, Homo sapien
acctgtgtcaacaccgcccctttgccctcatgc

SEQ ID NO: 510490 - DNA, 33 bp, Homo sapien
acctgtgtcaacaccgtccctttgccctcatgc

SEQ ID NO: 510491 - DNA, 33 bp, Homo sapien
agggaatgtggccaaaattacattagctattga

SEQ ID NO: 510492 - DNA, 33 bp, Homo sapien
agggaatgtggccaaagttacattagctattga

SEQ ID NO: 510493 - DNA, 33 bp, Homo sapien
tgtcagcaataaacaaccagaaactgaaatgaa

SEQ ID NO: 510494 - DNA, 33 bp, Homo sapien
tgtcagcaataaacaatcagaaactgaaatgaa

SEQ ID NO: 510495 - DNA, 33 bp, Homo sapien
atcatatctattcaaccggaggttctaaccagt

SEQ ID NO: 510496 - DNA, 33 bp, Homo sapien
atcatatctattcaactggaggttctaaccagt

SEQ ID NO: 510497 - DNA, 33 bp, Homo sapien
aacaagcaggtaagaacaagaaaaccacagctc

SEQ ID NO: 510498 - DNA, 33 bp, Homo sapien
aacaagcaggtaagaataagaaaaccacagctc

SEQ ID NO: 510499 - DNA, 33 bp, Homo sapien
gttagcctgaaagatcagacaggacccagtcag

SEQ ID NO: 510500 - DNA, 33 bp, Homo sapien
gttagcctgaaagatcggacaggacccagtcag

SEQ ID NO: 510501 - DNA, 33 bp, Homo sapien
atgaccatcaccttcgaatatttgataatgaga

SEQ ID NO: 510502 - DNA, 33 bp, Homo sapien
atgaccatcaccttcgtatatttgataatgaga

SEQ ID NO: 510503 - DNA, 33 bp, Homo sapien
acagaaattgtcactacgccaggatacagccaa

SEQ ID NO: 510504 - DNA, 33 bp, Homo sapien
acagaaattgtcactatgccaggatacagccaa

SEQ ID NO: 510505 - DNA, 33 bp, Homo sapien
tcttagcacggtgccacggccgtgagaattata

SEQ ID NO: 510506 - DNA, 33 bp, Homo sapien
tcttagcacggtgccatggccgtgagaattata

SEQ ID NO: 510507 - DNA, 33 bp, Homo sapien
ggccactgtgttccaaaggatggctaggtgtgg

SEQ ID NO: 510508 - DNA, 33 bp, Homo sapien
ggccactgtgttccaagggatggctaggtgtgg

SEQ ID NO: 510509 - DNA, 33 bp, Homo sapien
catggacatggagcaaagagagctggatctcaa

SEQ ID NO: 510510 - DNA, 33 bp, Homo sapien
catggacatggagcaaggagagctggatctcaa

SEQ ID NO: 510511 - DNA, 33 bp, Homo sapien
atagaccacagtttggaaaactctaaaacaggt

SEQ ID NO: 510512 - DNA, 33 bp, Homo sapien
atagaccacagtttgggaaactctaaaacaggt

SEQ ID NO: 510513 - DNA, 33 bp, Homo sapien
ccggaagccactaggagagaaggcagattcctc

SEQ ID NO: 510514 - DNA, 33 bp, Homo sapien
ccggaagccactaggatagaaggcagattcctc

SEQ ID NO: 510515 - DNA, 33 bp, Homo sapien
ggagctcctgccacaacctacaagacaggaggc

SEQ ID NO: 510516 - DNA, 33 bp, Homo sapien
ggagctcctgccacaatctacaagacaggaggc

SEQ ID NO: 510517 - DNA, 33 bp, Homo sapien
ctaagaaggaacccataagatgtcaactggaag

SEQ ID NO: 510518 - DNA, 33 bp, Homo sapien
ctaagaaggaacccatcagatgtcaactggaag

SEQ ID NO: 510519 - DNA, 33 bp, Homo sapien
ttcctgtgtcctcttacgttcagtgactagggg

SEQ ID NO: 510520 - DNA, 33 bp, Homo sapien
ttcctgtgtcctcttatgttcagtgactagggg

SEQ ID NO: 510521 - DNA, 33 bp, Homo sapien
agcactggcaccaagacaagaaatcaccagaac

SEQ ID NO: 510522 - DNA, 33 bp, Homo sapien
agcactggcaccaagataagaaatcaccagaac

SEQ ID NO: 510523 - DNA, 33 bp, Homo sapien
gcagggggcaagctgccatatggtgacgtgtca

SEQ ID NO: 510524 - DNA, 33 bp, Homo sapien
gcagggggcaagctgctatatggtgacgtgtca

SEQ ID NO: 510525 - DNA, 33 bp, Homo sapien
agctcagaggaagagcccagaggaagagtaagg

SEQ ID NO: 510526 - DNA, 33 bp, Homo sapien
agctcagaggaagagctcagaggaagagtaagg

SEQ ID NO: 510527 - DNA, 33 bp, Homo sapien
aggagctggccccaaacactagtccagagagga

SEQ ID NO: 510528 - DNA, 33 bp, Homo sapien
aggagctggccccaaatactagtccagagagga

SEQ ID NO: 510529 - DNA, 33 bp, Homo sapien
cagtctctataacggacgcattacaggaatgtg

SEQ ID NO: 510530 - DNA, 33 bp, Homo sapien
cagtctctataacggatgcattacaggaatgtg

SEQ ID NO: 510531 - DNA, 33 bp, Homo sapien
ggcactctgccccagaccatgaagctcaacata

SEQ ID NO: 510532 - DNA, 33 bp, Homo sapien
ggcactctgccccagatcatgaagctcaacata

SEQ ID NO: 510533 - DNA, 33 bp, Homo sapien
tcatttcatcctcacaaaacttgcaagggagct

SEQ ID NO: 510534 - DNA, 33 bp, Homo sapien
tcatttcatcctcacacaacttgcaagggagct

SEQ ID NO: 510535 - DNA, 33 bp, Homo sapien
ggggatgcctgttacacggaacccagagaaagg

SEQ ID NO: 510536 - DNA, 33 bp, Homo sapien
ggggatgcctgttacatggaacccagagaaagg

SEQ ID NO: 510537 - DNA, 33 bp, Homo sapien
ctatttgaaaaaagaacctgctgacaggggcgg

SEQ ID NO: 510538 - DNA, 33 bp, Homo sapien
ctatttgaaaaaagaatctgctgacaggggcgg

SEQ ID NO: 510539 - DNA, 33 bp, Homo sapien
atccacaaacatgaaagatgtgatccttgccct

SEQ ID NO: 510540 - DNA, 33 bp, Homo sapien
atccacaaacatgaaatatgtgatccttgccct

SEQ ID NO: 510541 - DNA, 33 bp, Homo sapien
ttgtgtttggcttccacagtagaatgttttcga

SEQ ID NO: 510542 - DNA, 33 bp, Homo sapien
ttgtgtttggcttccatagtagaatgttttcga

SEQ ID NO: 510543 - DNA, 33 bp, Homo sapien
agactttctccagcagacaaaacctgtaaaccc

SEQ ID NO: 510544 - DNA, 33 bp, Homo sapien
agactttctccagcaggcaaaacctgtaaaccc

SEQ ID NO: 510545 - DNA, 33 bp, Homo sapien
cttccccacctgaggaactcggaacctgccacg

SEQ ID NO: 510546 - DNA, 33 bp, Homo sapien
cttccccacctgaggagctcggaacctgccacg

SEQ ID NO: 510547 - DNA, 33 bp, Homo sapien
ttgctatgtagtctcccgagcatgtgcatctta

SEQ ID NO: 510548 - DNA, 33 bp, Homo sapien
ttgctatgtagtctcctgagcatgtgcatctta

SEQ ID NO: 510549 - DNA, 33 bp, Homo sapien
gaattaagattgctacacaactgatgcaatagg

SEQ ID NO: 510550 - DNA, 33 bp, Homo sapien
gaattaagattgctacgcaactgatgcaatagg

SEQ ID NO: 510551 - DNA, 33 bp, Homo sapien
aacaggtatcgtatgcaccctcctacggagccc

SEQ ID NO: 510552 - DNA, 33 bp, Homo sapien
aacaggtatcgtatgcgccctcctacggagccc

SEQ ID NO: 510553 - DNA, 33 bp, Homo sapien
tcctgagcctgatggaatatcacctgcatgacc

SEQ ID NO: 510554 - DNA, 33 bp, Homo sapien
tcctgagcctgatggactatcacctgcatgacc

SEQ ID NO: 510555 - DNA, 33 bp, Homo sapien
cagtaatgctgcactaaatatctttttcagtgt

SEQ ID NO: 510556 - DNA, 33 bp, Homo sapien
cagtaatgctgcactagatatctttttcagtgt

SEQ ID NO: 510557 - DNA, 33 bp, Homo sapien
ttctttttagccgttcccaataatttattctta

SEQ ID NO: 510558 - DNA, 33 bp, Homo sapien
ttctttttagccgttctcaataatttattctta

SEQ ID NO: 510559 - DNA, 33 bp, Homo sapien
gcttaacaccccgttaactgcactgcctagaac

SEQ ID NO: 510560 - DNA, 33 bp, Homo sapien
gcttaacaccccgttacctgcactgcctagaac

SEQ ID NO: 510561 - DNA, 33 bp, Homo sapien
tcttgggatcagcagcgctgaacgagggaagca

SEQ ID NO: 510562 - DNA, 33 bp, Homo sapien
tcttgggatcagcagctctgaacgagggaagca

SEQ ID NO: 510563 - DNA, 33 bp, Homo sapien
ggacactttggctggaaatgacagcacccacca

SEQ ID NO: 510564 - DNA, 33 bp, Homo sapien
ggacactttggctggacatgacagcacccacca

SEQ ID NO: 510565 - DNA, 33 bp, Homo sapien
cacctccttctgcaaaacgccctgttacaggtg

SEQ ID NO: 510566 - DNA, 33 bp, Homo sapien
cacctccttctgcaaaccgccctgttacaggtg

SEQ ID NO: 510567 - DNA, 33 bp, Homo sapien
ccagaattccaaataaatatttcagggtgtgat

SEQ ID NO: 510568 - DNA, 33 bp, Homo sapien
ccagaattccaaataagtatttcagggtgtgat

SEQ ID NO: 510569 - DNA, 33 bp, Homo sapien
agcatgtttgtacacaatccccattcagcatga

SEQ ID NO: 510570 - DNA, 33 bp, Homo sapien
agcatgtttgtacacattccccattcagcatga

SEQ ID NO: 510571 - DNA, 33 bp, Homo sapien
gatgggagagagagccaaatcagttgaccagcc

SEQ ID NO: 510572 - DNA, 33 bp, Homo sapien
gatgggagagagagccgaatcagttgaccagcc

SEQ ID NO: 510573 - DNA, 33 bp, Homo sapien
tatgaacatggcctacagctgctttcaaactcc

SEQ ID NO: 510574 - DNA, 33 bp, Homo sapien
tatgaacatggcctactgctgctttcaaactcc

SEQ ID NO: 510575 - DNA, 33 bp, Homo sapien
tggtctaccatcttaccgatgtctgtcttgcat

SEQ ID NO: 510576 - DNA, 33 bp, Homo sapien
tggtctaccatcttactgatgtctgtcttgcat

SEQ ID NO: 510577 - DNA, 33 bp, Homo sapien
agacggctcaagagtacgggatcctttgtgtcc

SEQ ID NO: 510578 - DNA, 33 bp, Homo sapien
agacggctcaagagtatgggatcctttgtgtcc

SEQ ID NO: 510579 - DNA, 33 bp, Homo sapien
cttattttgcttaatacgtcaaggttcatccat

SEQ ID NO: 510580 - DNA, 33 bp, Homo sapien
cttattttgcttaatatgtcaaggttcatccat

SEQ ID NO: 510581 - DNA, 33 bp, Homo sapien
atggtgaaggggtgagaccttggttcccagaga

SEQ ID NO: 510582 - DNA, 33 bp, Homo sapien
atggtgaaggggtgaggccttggttcccagaga

SEQ ID NO: 510583 - DNA, 33 bp, Homo sapien
catgagaaactttgtgaaaatatccattcctat

SEQ ID NO: 510584 - DNA, 33 bp, Homo sapien
catgagaaactttgtggaaatatccattcctat

SEQ ID NO: 510585 - DNA, 33 bp, Homo sapien
ctcccagcccatgtgaaggggtcactaaagcca

SEQ ID NO: 510586 - DNA, 33 bp, Homo sapien
ctcccagcccatgtgagggggtcactaaagcca

SEQ ID NO: 510587 - DNA, 33 bp, Homo sapien
ctgctgctgttatttacggaataaactgagtac

SEQ ID NO: 510588 - DNA, 33 bp, Homo sapien
ctgctgctgttatttatggaataaactgagtac

SEQ ID NO: 510589 - DNA, 33 bp, Homo sapien
aacaacagagtgtctacgctctgccctatatca

SEQ ID NO: 510590 - DNA, 33 bp, Homo sapien
aacaacagagtgtctaggctctgccctatatca

SEQ ID NO: 510591 - DNA, 33 bp, Homo sapien
tccaacagaggaaaaaacatgaaatggctgatg

SEQ ID NO: 510592 - DNA, 33 bp, Homo sapien
tccaacagaggaaaaagcatgaaatggctgatg

SEQ ID NO: 510593 - DNA, 33 bp, Homo sapien
gtacggtagaaggtacaatgttttatcttttaa

SEQ ID NO: 510594 - DNA, 33 bp, Homo sapien
gtacggtagaaggtacgatgttttatcttttaa

SEQ ID NO: 510595 - DNA, 33 bp, Homo sapien
attgtttaagtttataggatgtctgtttgcaat

SEQ ID NO: 510596 - DNA, 33 bp, Homo sapien
attgtttaagtttatatgatgtctgtttgcaat

SEQ ID NO: 510597 - DNA, 33 bp, Homo sapien
agcctgtcaaattgtaacttatctgttctgtga

SEQ ID NO: 510598 - DNA, 33 bp, Homo sapien
agcctgtcaaattgtagcttatctgttctgtga

SEQ ID NO: 510599 - DNA, 33 bp, Homo sapien
cataagtgacttttcaaataaaatattagcaaa

SEQ ID NO: 510600 - DNA, 33 bp, Homo sapien
cataagtgacttttcacataaaatattagcaaa

SEQ ID NO: 510601 - DNA, 33 bp, Homo sapien
catcggaaatctcagacccttgtcctttctaga

SEQ ID NO: 510602 - DNA, 33 bp, Homo sapien
catcggaaatctcagatccttgtcctttctaga

SEQ ID NO: 510603 - DNA, 33 bp, Homo sapien
ctgttccaagcacttcacagtggtttcttcctc

SEQ ID NO: 510604 - DNA, 33 bp, Homo sapien
ctgttccaagcacttcgcagtggtttcttcctc

SEQ ID NO: 510605 - DNA, 33 bp, Homo sapien
cacacagttcagtccacagcatgaggttttggg

SEQ ID NO: 510606 - DNA, 33 bp, Homo sapien
cacacagttcagtccatagcatgaggttttggg

SEQ ID NO: 510607 - DNA, 33 bp, Homo sapien
caatatggcaagtcacactaggagacaaggttt

SEQ ID NO: 510608 - DNA, 33 bp, Homo sapien
caatatggcaagtcacgctaggagacaaggttt

SEQ ID NO: 510609 - DNA, 33 bp, Homo sapien
tgcaaatgcagaacaggacttttcatttaactt

SEQ ID NO: 510610 - DNA, 33 bp, Homo sapien
tgcaaatgcagaacagtacttttcatttaactt

SEQ ID NO: 510611 - DNA, 33 bp, Homo sapien
atactgaattgggatacgactataagagaggaa

SEQ ID NO: 510612 - DNA, 33 bp, Homo sapien
atactgaattgggatatgactataagagaggaa

SEQ ID NO: 510613 - DNA, 33 bp, Homo sapien
cagcagagaactcaagccttcggagcagggatg

SEQ ID NO: 510614 - DNA, 33 bp, Homo sapien
cagcagagaactcaaggcttcggagcagggatg

SEQ ID NO: 510615 - DNA, 33 bp, Homo sapien
gcgaatcagtactaaagtcctatactacagtgc

SEQ ID NO: 510616 - DNA, 33 bp, Homo sapien
gcgaatcagtactaaattcctatactacagtgc

SEQ ID NO: 510617 - DNA, 33 bp, Homo sapien
tggcagagccagaagaagaatccagacaattca

SEQ ID NO: 510618 - DNA, 33 bp, Homo sapien
tggcagagccagaagaggaatccagacaattca

SEQ ID NO: 510619 - DNA, 33 bp, Homo sapien
ctttcagacttcagctcaaatgctagctcctca

SEQ ID NO: 510620 - DNA, 33 bp, Homo sapien
ctttcagacttcagcttaaatgctagctcctca

SEQ ID NO: 510621 - DNA, 33 bp, Homo sapien
tgtattttcatatcctcacttgaattataaact

SEQ ID NO: 510622 - DNA, 33 bp, Homo sapien
tgtattttcatatccttacttgaattataaact

SEQ ID NO: 510623 - DNA, 33 bp, Homo sapien
gcaaactttgctgttacgtttaagggcagagag

SEQ ID NO: 510624 - DNA, 33 bp, Homo sapien
gcaaactttgctgttatgtttaagggcagagag

SEQ ID NO: 510625 - DNA, 33 bp, Homo sapien
agctgcaaactcaccacagcgtgctttcagact

SEQ ID NO: 510626 - DNA, 33 bp, Homo sapien
agctgcaaactcaccatagcgtgctttcagact

SEQ ID NO: 510627 - DNA, 33 bp, Homo sapien
ttatattaatggattcacggacccatcaataat

SEQ ID NO: 510628 - DNA, 33 bp, Homo sapien
ttatattaatggattcgcggacccatcaataat

SEQ ID NO: 510629 - DNA, 33 bp, Homo sapien
tgtcacattagtggtacgtataagggcacaaca

SEQ ID NO: 510630 - DNA, 33 bp, Homo sapien
tgtcacattagtggtatgtataagggcacaaca

SEQ ID NO: 510631 - DNA, 33 bp, Homo sapien
tttatgtaaaacaaatgattgaatagccatttg

SEQ ID NO: 510632 - DNA, 33 bp, Homo sapien
tttatgtaaaacaaattattgaatagccatttg

SEQ ID NO: 510633 - DNA, 33 bp, Homo sapien
aaattgaatttggagccatctcacaacactggg

SEQ ID NO: 510634 - DNA, 33 bp, Homo sapien
aaattgaatttggagctatctcacaacactggg

SEQ ID NO: 510635 - DNA, 33 bp, Homo sapien
tagaaaagtttagccaagcgtgatggcaggcgc

SEQ ID NO: 510636 - DNA, 33 bp, Homo sapien
tagaaaagtttagccaggcgtgatggcaggcgc

SEQ ID NO: 510637 - DNA, 33 bp, Homo sapien
ttcattcattggaaagaaggaaattatctgatg

SEQ ID NO: 510638 - DNA, 33 bp, Homo sapien
ttcattcattggaaaggaggaaattatctgatg

SEQ ID NO: 510639 - DNA, 33 bp, Homo sapien
gtagtcccaactcataagaaagcatcagaagag

SEQ ID NO: 510640 - DNA, 33 bp, Homo sapien
gtagtcccaactcataggaaagcatcagaagag

SEQ ID NO: 510641 - DNA, 33 bp, Homo sapien
caggtttcaatgtcaactatacttccttagaga

SEQ ID NO: 510642 - DNA, 33 bp, Homo sapien
caggtttcaatgtcaattatacttccttagaga

SEQ ID NO: 510643 - DNA, 33 bp, Homo sapien
attaaatttgaatgcgacatcaaattcctaaaa

SEQ ID NO: 510644 - DNA, 33 bp, Homo sapien
attaaatttgaatgcgtcatcaaattcctaaaa

SEQ ID NO: 510645 - DNA, 33 bp, Homo sapien
acacatgaaaataaagacatgctgtgaatgcaa

SEQ ID NO: 510646 - DNA, 33 bp, Homo sapien
acacatgaaaataaagtcatgctgtgaatgcaa

SEQ ID NO: 510647 - DNA, 33 bp, Homo sapien
acaggcatgagtctggccagatattccacattt

SEQ ID NO: 510648 - DNA, 33 bp, Homo sapien
acaggcatgagtctggtcagatattccacattt

SEQ ID NO: 510649 - DNA, 33 bp, Homo sapien
acttattcaggtaaccaaataatacctattccc

SEQ ID NO: 510650 - DNA, 33 bp, Homo sapien
acttattcaggtaaccgaataatacctattccc

SEQ ID NO: 510651 - DNA, 33 bp, Homo sapien
tgggcgcctgtgtatacaccacctagcttatgt

SEQ ID NO: 510652 - DNA, 33 bp, Homo sapien
tgggcgcctgtgtatataccacctagcttatgt

SEQ ID NO: 510653 - DNA, 33 bp, Homo sapien
cctagaacacagtagaggctcagcaaatatgtc

SEQ ID NO: 510654 - DNA, 33 bp, Homo sapien
cctagaacacagtagatgctcagcaaatatgtc

SEQ ID NO: 510655 - DNA, 33 bp, Homo sapien
tgcatggacaatgaaaaatgctcatgctaagtg

SEQ ID NO: 510656 - DNA, 33 bp, Homo sapien
tgcatggacaatgaaagatgctcatgctaagtg

SEQ ID NO: 510657 - DNA, 33 bp, Homo sapien
attagtagaaaatacacgggaaatattaacagc

SEQ ID NO: 510658 - DNA, 33 bp, Homo sapien
attagtagaaaatacatgggaaatattaacagc

SEQ ID NO: 510659 - DNA, 33 bp, Homo sapien
taaactcagctgtacaagggaaaataactccct

SEQ ID NO: 510660 - DNA, 33 bp, Homo sapien
taaactcagctgtacacgggaaaataactccct

SEQ ID NO: 510661 - DNA, 33 bp, Homo sapien
gggaagaggcaacacaatagagaaaatggcatt

SEQ ID NO: 510662 - DNA, 33 bp, Homo sapien
gggaagaggcaacacagtagagaaaatggcatt

SEQ ID NO: 510663 - DNA, 33 bp, Homo sapien
ggttcaacatggcggacactggggaagattata

SEQ ID NO: 510664 - DNA, 33 bp, Homo sapien
ggttcaacatggcggatactggggaagattata

SEQ ID NO: 510665 - DNA, 33 bp, Homo sapien
gaagattatattttccaatgggctggaagggtg

SEQ ID NO: 510666 - DNA, 33 bp, Homo sapien
gaagattatattttccgatgggctggaagggtg

SEQ ID NO: 510667 - DNA, 33 bp, Homo sapien
aagttacagggaaggacagagagatgctgtggg

SEQ ID NO: 510668 - DNA, 33 bp, Homo sapien
aagttacagggaaggatagagagatgctgtggg

SEQ ID NO: 510669 - DNA, 33 bp, Homo sapien
tacgcatatattttcaacctcctaatttgggta

SEQ ID NO: 510670 - DNA, 33 bp, Homo sapien
tacgcatatattttcagcctcctaatttgggta

SEQ ID NO: 510671 - DNA, 33 bp, Homo sapien
cttcttttaccttaaacagcctgtgtgcaaaga

SEQ ID NO: 510672 - DNA, 33 bp, Homo sapien
cttcttttaccttaaagagcctgtgtgcaaaga

SEQ ID NO: 510673 - DNA, 33 bp, Homo sapien
cttaatatttggtaaaggcaagatacattgtag

SEQ ID NO: 510674 - DNA, 33 bp, Homo sapien
cttaatatttggtaaatgcaagatacattgtag

SEQ ID NO: 510675 - DNA, 33 bp, Homo sapien
tgaatggtgaaaataccaatggcgatgacaatg

SEQ ID NO: 510676 - DNA, 33 bp, Homo sapien
tgaatggtgaaaatactaatggcgatgacaatg

SEQ ID NO: 510677 - DNA, 33 bp, Homo sapien
tgctgatggatcatgaaggatggtaagcagaaa

SEQ ID NO: 510678 - DNA, 33 bp, Homo sapien
tgctgatggatcatgagggatggtaagcagaaa

SEQ ID NO: 510679 - DNA, 33 bp, Homo sapien
cctgctcttggtgaagacatattaataaaattc

SEQ ID NO: 510680 - DNA, 33 bp, Homo sapien
cctgctcttggtgaaggcatattaataaaattc

SEQ ID NO: 510681 - DNA, 33 bp, Homo sapien
caaatgattttatggcactagtctcttagtttg

SEQ ID NO: 510682 - DNA, 33 bp, Homo sapien
caaatgattttatggcgctagtctcttagtttg

SEQ ID NO: 510683 - DNA, 33 bp, Homo sapien
ctgctcaaatccatcaaagctattgccatgtga

SEQ ID NO: 510684 - DNA, 33 bp, Homo sapien
ctgctcaaatccatcagagctattgccatgtga

SEQ ID NO: 510685 - DNA, 33 bp, Homo sapien
gctgtgtgattttgtgcaaagcatttaatcact

SEQ ID NO: 510686 - DNA, 33 bp, Homo sapien
gctgtgtgattttgtggaaagcatttaatcact

SEQ ID NO: 510687 - DNA, 33 bp, Homo sapien
ttctacaactgtaaaacgtgaataattttattt

SEQ ID NO: 510688 - DNA, 33 bp, Homo sapien
ttctacaactgtaaaatgtgaataattttattt

SEQ ID NO: 510689 - DNA, 33 bp, Homo sapien
tgactggctaggatgaagaagatacattcagga

SEQ ID NO: 510690 - DNA, 33 bp, Homo sapien
tgactggctaggatgaggaagatacattcagga

SEQ ID NO: 510691 - DNA, 33 bp, Homo sapien
gtagtgcacacagataataggggactgcacaac

SEQ ID NO: 510692 - DNA, 33 bp, Homo sapien
gtagtgcacacagatagtaggggactgcacaac

SEQ ID NO: 510693 - DNA, 33 bp, Homo sapien
actatcagacaagtaccgtacgactggccctcg

SEQ ID NO: 510694 - DNA, 33 bp, Homo sapien
actatcagacaagtactgtacgactggccctcg

SEQ ID NO: 510695 - DNA, 33 bp, Homo sapien
ggaatttcttctaaataagtacaaggcaatccc

SEQ ID NO: 510696 - DNA, 33 bp, Homo sapien
ggaatttcttctaaatgagtacaaggcaatccc

SEQ ID NO: 510697 - DNA, 33 bp, Homo sapien
tatagttccactcaaaatggcatgactaatttc

SEQ ID NO: 510698 - DNA, 33 bp, Homo sapien
tatagttccactcaaagtggcatgactaatttc

SEQ ID NO: 510699 - DNA, 33 bp, Homo sapien
gtgtaacctttggagacgatcaagcttttatgg

SEQ ID NO: 510700 - DNA, 33 bp, Homo sapien
gtgtaacctttggagatgatcaagcttttatgg

SEQ ID NO: 510701 - DNA, 33 bp, Homo sapien
gatgtaaagttctccaatgaatgttctataaat

SEQ ID NO: 510702 - DNA, 33 bp, Homo sapien
gatgtaaagttctccactgaatgttctataaat

SEQ ID NO: 510703 - DNA, 33 bp, Homo sapien
tccccagggagtagacactaatggatacctaat

SEQ ID NO: 510704 - DNA, 33 bp, Homo sapien
tccccagggagtagacgctaatggatacctaat

SEQ ID NO: 510705 - DNA, 33 bp, Homo sapien
cagtcaggccactgaaagaatctcagcaaatcc

SEQ ID NO: 510706 - DNA, 33 bp, Homo sapien
cagtcaggccactgaaggaatctcagcaaatcc

SEQ ID NO: 510707 - DNA, 33 bp, Homo sapien
atcaagccactccctaaacaaagcatcagatct

SEQ ID NO: 510708 - DNA, 33 bp, Homo sapien
atcaagccactccctatacaaagcatcagatct

SEQ ID NO: 510709 - DNA, 33 bp, Homo sapien
acctaatccttgagacccgagctgttcagctta

SEQ ID NO: 510710 - DNA, 33 bp, Homo sapien
acctaatccttgagacgcgagctgttcagctta

SEQ ID NO: 510711 - DNA, 33 bp, Homo sapien
tatatgtgattttcaacttcctaggcaccactt

SEQ ID NO: 510712 - DNA, 33 bp, Homo sapien
tatatgtgattttcaatttcctaggcaccactt

SEQ ID NO: 510713 - DNA, 33 bp, Homo sapien
ttgcatttccaggttacgccaggcaacagactc

SEQ ID NO: 510714 - DNA, 33 bp, Homo sapien
ttgcatttccaggttatgccaggcaacagactc

SEQ ID NO: 510715 - DNA, 33 bp, Homo sapien
tcagcctcttgggaaaacatcttgacccattca

SEQ ID NO: 510716 - DNA, 33 bp, Homo sapien
tcagcctcttgggaaagcatcttgacccattca

SEQ ID NO: 510717 - DNA, 33 bp, Homo sapien
tcaggtaccaactccacgtttaaccagctctgg

SEQ ID NO: 510718 - DNA, 33 bp, Homo sapien
tcaggtaccaactccaggtttaaccagctctgg

SEQ ID NO: 510719 - DNA, 33 bp, Homo sapien
taaagttcagagaaccaagttttctagttttct

SEQ ID NO: 510720 - DNA, 33 bp, Homo sapien
taaagttcagagaaccgagttttctagttttct

SEQ ID NO: 510721 - DNA, 33 bp, Homo sapien
aaaaagactggttgaccaactgatgacctgaaa

SEQ ID NO: 510722 - DNA, 33 bp, Homo sapien
aaaaagactggttgactaactgatgacctgaaa

SEQ ID NO: 510723 - DNA, 33 bp, Homo sapien
caaggctgtaaccggaagacagccagggtagat

SEQ ID NO: 510724 - DNA, 33 bp, Homo sapien
caaggctgtaaccggacgacagccagggtagat

SEQ ID NO: 510725 - DNA, 33 bp, Homo sapien
acaaagtctattaggacgatgtttctgacaaac

SEQ ID NO: 510726 - DNA, 33 bp, Homo sapien
acaaagtctattaggatgatgtttctgacaaac

SEQ ID NO: 510727 - DNA, 33 bp, Homo sapien
ctatcagtgtgactccaatatctactggaacaa

SEQ ID NO: 510728 - DNA, 33 bp, Homo sapien
ctatcagtgtgactccgatatctactggaacaa

SEQ ID NO: 510729 - DNA, 33 bp, Homo sapien
cctcctgatctgtcaaagtgtctgtacacatgc

SEQ ID NO: 510730 - DNA, 33 bp, Homo sapien
cctcctgatctgtcaaggtgtctgtacacatgc

SEQ ID NO: 510731 - DNA, 33 bp, Homo sapien
actgaggcccaaacaaaggaagtgcttttccag

SEQ ID NO: 510732 - DNA, 33 bp, Homo sapien
actgaggcccaaacaagggaagtgcttttccag

SEQ ID NO: 510733 - DNA, 33 bp, Homo sapien
ccagtcatgcattccacaccctggttataatat

SEQ ID NO: 510734 - DNA, 33 bp, Homo sapien
ccagtcatgcattccataccctggttataatat

SEQ ID NO: 510735 - DNA, 33 bp, Homo sapien
ccagccacatggagacacagtgagccgtctttg

SEQ ID NO: 510736 - DNA, 33 bp, Homo sapien
ccagccacatggagacgcagtgagccgtctttg

SEQ ID NO: 510737 - DNA, 33 bp, Homo sapien
agaggcaaactcacaagcttcttagaaggaggc

SEQ ID NO: 510738 - DNA, 33 bp, Homo sapien
agaggcaaactcacaatcttcttagaaggaggc

SEQ ID NO: 510739 - DNA, 33 bp, Homo sapien
gaacctccttaggaaccatacaaaatcaggaac

SEQ ID NO: 510740 - DNA, 33 bp, Homo sapien
gaacctccttaggaactatacaaaatcaggaac

SEQ ID NO: 510741 - DNA, 33 bp, Homo sapien
tggtttttacacattcaaatggttagaaagaaa

SEQ ID NO: 510742 - DNA, 33 bp, Homo sapien
tggtttttacacattcgaatggttagaaagaaa

SEQ ID NO: 510743 - DNA, 33 bp, Homo sapien
tcatgagctaccgagaaacatctcatgtttttc

SEQ ID NO: 510744 - DNA, 33 bp, Homo sapien
tcatgagctaccgagagacatctcatgtttttc

SEQ ID NO: 510745 - DNA, 33 bp, Homo sapien
ggaaagggaggtagaacggatagcatctagatt

SEQ ID NO: 510746 - DNA, 33 bp, Homo sapien
ggaaagggaggtagaatggatagcatctagatt

SEQ ID NO: 510747 - DNA, 33 bp, Homo sapien
ttaaatgttcctttaaacaccctcacagacaca

SEQ ID NO: 510748 - DNA, 33 bp, Homo sapien
ttaaatgttcctttaagcaccctcacagacaca

SEQ ID NO: 510749 - DNA, 33 bp, Homo sapien
gagggggccttttggaatatgagctttggttgc

SEQ ID NO: 510750 - DNA, 33 bp, Homo sapien
gagggggccttttggagtatgagctttggttgc

SEQ ID NO: 510751 - DNA, 33 bp, Homo sapien
ttcttttctgtgtaggacactcattgcattgca

SEQ ID NO: 510752 - DNA, 33 bp, Homo sapien
ttcttttctgtgtaggtcactcattgcattgca

SEQ ID NO: 510753 - DNA, 33 bp, Homo sapien
gtcttcccatgagggcacctgttttgcttcaca

SEQ ID NO: 510754 - DNA, 33 bp, Homo sapien
gtcttcccatgagggcgcctgttttgcttcaca

SEQ ID NO: 510755 - DNA, 33 bp, Homo sapien
acaaatttttacaacaacaagattgcaatgcat

SEQ ID NO: 510756 - DNA, 33 bp, Homo sapien
acaaatttttacaacagcaagattgcaatgcat

SEQ ID NO: 510757 - DNA, 33 bp, Homo sapien
gactatttaaaactgaaatatgtatgttaaact

SEQ ID NO: 510758 - DNA, 33 bp, Homo sapien
gactatttaaaactgagatatgtatgttaaact

SEQ ID NO: 510759 - DNA, 33 bp, Homo sapien
ctagtccaccattaacagcctgtatttatgtca

SEQ ID NO: 510760 - DNA, 33 bp, Homo sapien
ctagtccaccattaacggcctgtatttatgtca

SEQ ID NO: 510761 - DNA, 33 bp, Homo sapien
gtgcaaataaatgatacctgctatagaagagac

SEQ ID NO: 510762 - DNA, 33 bp, Homo sapien
gtgcaaataaatgatagctgctatagaagagac

SEQ ID NO: 510763 - DNA, 33 bp, Homo sapien
ttggtccaggaatcaccgaggaaggacacagca

SEQ ID NO: 510764 - DNA, 33 bp, Homo sapien
ttggtccaggaatcactgaggaaggacacagca

SEQ ID NO: 510765 - DNA, 33 bp, Homo sapien
gcctgtgagactgatcacctcaacaatcaatca

SEQ ID NO: 510766 - DNA, 33 bp, Homo sapien
gcctgtgagactgatcgcctcaacaatcaatca

SEQ ID NO: 510767 - DNA, 33 bp, Homo sapien
cagttcataacatttcccatctgaggtcagggt

SEQ ID NO: 510768 - DNA, 33 bp, Homo sapien
cagttcataacatttctcatctgaggtcagggt

SEQ ID NO: 510769 - DNA, 33 bp, Homo sapien
agtgatgcttactcagccgcggagcttccctgc

SEQ ID NO: 510770 - DNA, 33 bp, Homo sapien
agtgatgcttactcagtcgcggagcttccctgc

SEQ ID NO: 510771 - DNA, 33 bp, Homo sapien
cccggactgggaaataacaggaaaaggataggg

SEQ ID NO: 510772 - DNA, 33 bp, Homo sapien
cccggactgggaaatatcaggaaaaggataggg

SEQ ID NO: 510773 - DNA, 33 bp, Homo sapien
ataatgcagcactgaacgactctaaacaaacag

SEQ ID NO: 510774 - DNA, 33 bp, Homo sapien
ataatgcagcactgaatgactctaaacaaacag

SEQ ID NO: 510775 - DNA, 33 bp, Homo sapien
ttttgatgactggataacagcctatacatatgc

SEQ ID NO: 510776 - DNA, 33 bp, Homo sapien
ttttgatgactggatagcagcctatacatatgc

SEQ ID NO: 510777 - DNA, 33 bp, Homo sapien
attggtaccattcttgcattgctatgaagaact

SEQ ID NO: 510778 - DNA, 33 bp, Homo sapien
attggtaccattcttgtattgctatgaagaact

SEQ ID NO: 510779 - DNA, 33 bp, Homo sapien
ccttaaatataagttcgaatttcagatcacctc

SEQ ID NO: 510780 - DNA, 33 bp, Homo sapien
ccttaaatataagttctaatttcagatcacctc

SEQ ID NO: 510781 - DNA, 33 bp, Homo sapien
cggcccaaactcctaacggctgcatcttacctt

SEQ ID NO: 510782 - DNA, 33 bp, Homo sapien
cggcccaaactcctaatggctgcatcttacctt

SEQ ID NO: 510783 - DNA, 33 bp, Homo sapien
gggagcacaccccggagaaggaggccactgaca

SEQ ID NO: 510784 - DNA, 33 bp, Homo sapien
gggagcacaccccggataaggaggccactgaca

SEQ ID NO: 510785 - DNA, 33 bp, Homo sapien
gcctggcactacagaacatcagaaaggaccatc

SEQ ID NO: 510786 - DNA, 33 bp, Homo sapien
gcctggcactacagaagatcagaaaggaccatc

SEQ ID NO: 510787 - DNA, 33 bp, Homo sapien
gtttctcccccagaggccccataaaggaaagca

SEQ ID NO: 510788 - DNA, 33 bp, Homo sapien
gtttctcccccagaggtcccataaaggaaagca

SEQ ID NO: 510789 - DNA, 33 bp, Homo sapien
ttgagtcaccaaaatgcagagttactgctttcc

SEQ ID NO: 510790 - DNA, 33 bp, Homo sapien
ttgagtcaccaaaatggagagttactgctttcc

SEQ ID NO: 510791 - DNA, 33 bp, Homo sapien
tcgcctctcaccttcactcatacatatctgctt

SEQ ID NO: 510792 - DNA, 33 bp, Homo sapien
tcgcctctcaccttcattcatacatatctgctt

SEQ ID NO: 510793 - DNA, 33 bp, Homo sapien
cacccacgggagaagaacatggccccaggagtg

SEQ ID NO: 510794 - DNA, 33 bp, Homo sapien
cacccacgggagaagaccatggccccaggagtg

SEQ ID NO: 510795 - DNA, 33 bp, Homo sapien
ctcagaaccccatccaagacagaatcccaaacc

SEQ ID NO: 510796 - DNA, 33 bp, Homo sapien
ctcagaaccccatccaggacagaatcccaaacc

SEQ ID NO: 510797 - DNA, 33 bp, Homo sapien
ctttactgatcgcatccaatgtgccaagtactg

SEQ ID NO: 510798 - DNA, 33 bp, Homo sapien
ctttactgatcgcatctaatgtgccaagtactg

SEQ ID NO: 510799 - DNA, 33 bp, Homo sapien
gtgtctaattgaggtaccaagtgtacaggtggt

SEQ ID NO: 510800 - DNA, 33 bp, Homo sapien
gtgtctaattgaggtatcaagtgtacaggtggt

SEQ ID NO: 510801 - DNA, 33 bp, Homo sapien
cacaagtggtgaccacaattagaagcagcacct

SEQ ID NO: 510802 - DNA, 33 bp, Homo sapien
cacaagtggtgaccacgattagaagcagcacct

SEQ ID NO: 510803 - DNA, 33 bp, Homo sapien
gggtatgtaaaacacactggtctgcaagcttct

SEQ ID NO: 510804 - DNA, 33 bp, Homo sapien
gggtatgtaaaacacattggtctgcaagcttct

SEQ ID NO: 510805 - DNA, 33 bp, Homo sapien
ctggtgaaaaacagtacgtcaaattagctgagg

SEQ ID NO: 510806 - DNA, 33 bp, Homo sapien
ctggtgaaaaacagtatgtcaaattagctgagg

SEQ ID NO: 510807 - DNA, 33 bp, Homo sapien
gattatacctgaggagaatcttggagtaatcac

SEQ ID NO: 510808 - DNA, 33 bp, Homo sapien
gattatacctgaggaggatcttggagtaatcac

SEQ ID NO: 510809 - DNA, 33 bp, Homo sapien
ttgaacaaaccaatacacttgtactgaaagaag

SEQ ID NO: 510810 - DNA, 33 bp, Homo sapien
ttgaacaaaccaatactcttgtactgaaagaag

SEQ ID NO: 510811 - DNA, 33 bp, Homo sapien
aatggcgctgggcccacaagacaatccaggtgt

SEQ ID NO: 510812 - DNA, 33 bp, Homo sapien
aatggcgctgggcccataagacaatccaggtgt

SEQ ID NO: 510813 - DNA, 33 bp, Homo sapien
ggatacattcggcctccgacaagattttgaaga

SEQ ID NO: 510814 - DNA, 33 bp, Homo sapien
ggatacattcggcctctgacaagattttgaaga

SEQ ID NO: 510815 - DNA, 33 bp, Homo sapien
gatgagaaccagctcaagatactggctctcggt

SEQ ID NO: 510816 - DNA, 33 bp, Homo sapien
gatgagaaccagctcaggatactggctctcggt

SEQ ID NO: 510817 - DNA, 33 bp, Homo sapien
cacctcttttagtaaccacagtctcggcttaag

SEQ ID NO: 510818 - DNA, 33 bp, Homo sapien
cacctcttttagtaactacagtctcggcttaag

SEQ ID NO: 510819 - DNA, 33 bp, Homo sapien
aaaaacaaaccagagcactaaatatgaaaagaa

SEQ ID NO: 510820 - DNA, 33 bp, Homo sapien
aaaaacaaaccagagcgctaaatatgaaaagaa

SEQ ID NO: 510821 - DNA, 33 bp, Homo sapien
cactgctgggtttacccgaactgataggattgg

SEQ ID NO: 510822 - DNA, 33 bp, Homo sapien
cactgctgggtttacctgaactgataggattgg

SEQ ID NO: 510823 - DNA, 33 bp, Homo sapien
ataataccatgaattacgagaccaatgggacaa

SEQ ID NO: 510824 - DNA, 33 bp, Homo sapien
ataataccatgaattatgagaccaatgggacaa

SEQ ID NO: 510825 - DNA, 33 bp, Homo sapien
aacacatttaatttgtgaaactaagacttaaag

SEQ ID NO: 510826 - DNA, 33 bp, Homo sapien
aacacatttaatttgttaaactaagacttaaag

SEQ ID NO: 510827 - DNA, 33 bp, Homo sapien
taaagctctgtctaaacaatgctgtcagatgca

SEQ ID NO: 510828 - DNA, 33 bp, Homo sapien
taaagctctgtctaaataatgctgtcagatgca

SEQ ID NO: 510829 - DNA, 33 bp, Homo sapien
caaagtgcctgactcacagttagctcaagtaaa

SEQ ID NO: 510830 - DNA, 33 bp, Homo sapien
caaagtgcctgactcatagttagctcaagtaaa

SEQ ID NO: 510831 - DNA, 33 bp, Homo sapien
gaatgaaagacctggacgactttcagtgggtga

SEQ ID NO: 510832 - DNA, 33 bp, Homo sapien
gaatgaaagacctggatgactttcagtgggtga

SEQ ID NO: 510833 - DNA, 33 bp, Homo sapien
ggctgccccagggtacaaatgtagatgtttggc

SEQ ID NO: 510834 - DNA, 33 bp, Homo sapien
ggctgccccagggtacgaatgtagatgtttggc

SEQ ID NO: 510835 - DNA, 33 bp, Homo sapien
aggcctctctctcccaatgcaatctggaagctg

SEQ ID NO: 510836 - DNA, 33 bp, Homo sapien
aggcctctctctcccagtgcaatctggaagctg

SEQ ID NO: 510837 - DNA, 33 bp, Homo sapien
taggtacctaaaggcacgaataaacagagggaa

SEQ ID NO: 510838 - DNA, 33 bp, Homo sapien
taggtacctaaaggcatgaataaacagagggaa

SEQ ID NO: 510839 - DNA, 33 bp, Homo sapien
atagcatccaataacactaactgtagtcctcat

SEQ ID NO: 510840 - DNA, 33 bp, Homo sapien
atagcatccaataacattaactgtagtcctcat

SEQ ID NO: 510841 - DNA, 33 bp, Homo sapien
caacaataaggacctcaaagggagaaaatggcc

SEQ ID NO: 510842 - DNA, 33 bp, Homo sapien
caacaataaggacctcgaagggagaaaatggcc

SEQ ID NO: 510843 - DNA, 33 bp, Homo sapien
ctctgaggtgctgggtaaatgtttcagagaatt

SEQ ID NO: 510844 - DNA, 33 bp, Homo sapien
ctctgaggtgctgggtcaatgtttcagagaatt

SEQ ID NO: 510845 - DNA, 33 bp, Homo sapien
aaccccagagatgcaccgtctggatggacctct

SEQ ID NO: 510846 - DNA, 33 bp, Homo sapien
aaccccagagatgcactgtctggatggacctct

SEQ ID NO: 510847 - DNA, 33 bp, Homo sapien
atgcagcttactgccaaaatctcaggatgtttt

SEQ ID NO: 510848 - DNA, 33 bp, Homo sapien
atgcagcttactgccagaatctcaggatgtttt

SEQ ID NO: 510849 - DNA, 33 bp, Homo sapien
aaatatggagcaaagacacactacagtgaagca

SEQ ID NO: 510850 - DNA, 33 bp, Homo sapien
aaatatggagcaaagatacactacagtgaagca

SEQ ID NO: 510851 - DNA, 33 bp, Homo sapien
ttgaatctgaaactcggagctcaggtccgatga

SEQ ID NO: 510852 - DNA, 33 bp, Homo sapien
ttgaatctgaaactcgtagctcaggtccgatga

SEQ ID NO: 510853 - DNA, 33 bp, Homo sapien
gaacttgaccttagcaatattaccttttcttta

SEQ ID NO: 510854 - DNA, 33 bp, Homo sapien
gaacttgaccttagcagtattaccttttcttta

SEQ ID NO: 510855 - DNA, 33 bp, Homo sapien
attctcctactgtcaaagtttagaaaatcaaat

SEQ ID NO: 510856 - DNA, 33 bp, Homo sapien
attctcctactgtcaacgtttagaaaatcaaat

SEQ ID NO: 510857 - DNA, 33 bp, Homo sapien
tcccactgactgtagacgtcacaaaaccattgc

SEQ ID NO: 510858 - DNA, 33 bp, Homo sapien
tcccactgactgtagatgtcacaaaaccattgc

SEQ ID NO: 510859 - DNA, 33 bp, Homo sapien
tttgtgcatcaatggaaaatatcaagaaagtaa

SEQ ID NO: 510860 - DNA, 33 bp, Homo sapien
tttgtgcatcaatggacaatatcaagaaagtaa

SEQ ID NO: 510861 - DNA, 33 bp, Homo sapien
tagagagagggaaatagagattgcgtgtgtgtg

SEQ ID NO: 510862 - DNA, 33 bp, Homo sapien
tagagagagggaaatatagattgcgtgtgtgtg

SEQ ID NO: 510863 - DNA, 33 bp, Homo sapien
gactctaaactttgaacaagtaaggcaggtgga

SEQ ID NO: 510864 - DNA, 33 bp, Homo sapien
gactctaaactttgaataagtaaggcaggtgga

SEQ ID NO: 510865 - DNA, 33 bp, Homo sapien
ttttttttttgcagataacaaatgagtaacagg

SEQ ID NO: 510866 - DNA, 33 bp, Homo sapien
ttttttttttgcagatcacaaatgagtaacagg

SEQ ID NO: 510867 - DNA, 33 bp, Homo sapien
ggtctttgtggtttaacgaggaaaagaaagatg

SEQ ID NO: 510868 - DNA, 33 bp, Homo sapien
ggtctttgtggtttaatgaggaaaagaaagatg

SEQ ID NO: 510869 - DNA, 33 bp, Homo sapien
catccccggctttataccttatgaggtgtaact

SEQ ID NO: 510870 - DNA, 33 bp, Homo sapien
catccccggctttatatcttatgaggtgtaact

SEQ ID NO: 510871 - DNA, 33 bp, Homo sapien
tacaatgtcaatatctcacttgtacttagcagt

SEQ ID NO: 510872 - DNA, 33 bp, Homo sapien
tacaatgtcaatatcttacttgtacttagcagt

SEQ ID NO: 510873 - DNA, 33 bp, Homo sapien
gctggctaggtctctacagtgattctgtctatg

SEQ ID NO: 510874 - DNA, 33 bp, Homo sapien
gctggctaggtctctatagtgattctgtctatg

SEQ ID NO: 510875 - DNA, 33 bp, Homo sapien
acttccaacaaagccaataagaccctgtatgat

SEQ ID NO: 510876 - DNA, 33 bp, Homo sapien
acttccaacaaagccagtaagaccctgtatgat

SEQ ID NO: 510877 - DNA, 33 bp, Homo sapien
tttgatctctaggacactacatttggtgcagca

SEQ ID NO: 510878 - DNA, 33 bp, Homo sapien
tttgatctctaggacattacatttggtgcagca

SEQ ID NO: 510879 - DNA, 33 bp, Homo sapien
accagggtcaggaaaacgacaataaaaattcct

SEQ ID NO: 510880 - DNA, 33 bp, Homo sapien
accagggtcaggaaaatgacaataaaaattcct

SEQ ID NO: 510881 - DNA, 33 bp, Homo sapien
tacaccggcatctaacaaaatgaatttgataga

SEQ ID NO: 510882 - DNA, 33 bp, Homo sapien
tacaccggcatctaaccaaatgaatttgataga

SEQ ID NO: 510883 - DNA, 33 bp, Homo sapien
ctgtaaagcaactcaccagttacccgatcatgg

SEQ ID NO: 510884 - DNA, 33 bp, Homo sapien
ctgtaaagcaactcactagttacccgatcatgg

SEQ ID NO: 510885 - DNA, 33 bp, Homo sapien
ctaaaacagacaaaaaacttccaggaaaagaat

SEQ ID NO: 510886 - DNA, 33 bp, Homo sapien
ctaaaacagacaaaaagcttccaggaaaagaat

SEQ ID NO: 510887 - DNA, 33 bp, Homo sapien
aaacctagaatgaaaacttcaccatgaaaagca

SEQ ID NO: 510888 - DNA, 33 bp, Homo sapien
aaacctagaatgaaaagttcaccatgaaaagca

SEQ ID NO: 510889 - DNA, 33 bp, Homo sapien
ggatgaacaaattgcaaaacaagaggctggtcg

SEQ ID NO: 510890 - DNA, 33 bp, Homo sapien
ggatgaacaaattgcacaacaagaggctggtcg

SEQ ID NO: 510891 - DNA, 33 bp, Homo sapien
ggaataaccagtgcaggatgttagagcttcccg

SEQ ID NO: 510892 - DNA, 33 bp, Homo sapien
ggaataaccagtgcagtatgttagagcttcccg

SEQ ID NO: 510893 - DNA, 33 bp, Homo sapien
cttttagagtctaccaataccctatttttacag

SEQ ID NO: 510894 - DNA, 33 bp, Homo sapien
cttttagagtctaccagtaccctatttttacag

SEQ ID NO: 510895 - DNA, 33 bp, Homo sapien
gttttctgtttttaccacatctagtgatcattc

SEQ ID NO: 510896 - DNA, 33 bp, Homo sapien
gttttctgtttttaccgcatctagtgatcattc

SEQ ID NO: 510897 - DNA, 33 bp, Homo sapien
gcccttgcagcacagaagtgttttttctatcag

SEQ ID NO: 510898 - DNA, 33 bp, Homo sapien
gcccttgcagcacagatgtgttttttctatcag

SEQ ID NO: 510899 - DNA, 33 bp, Homo sapien
ctcctttggctagggtcaaactggagcagaact

SEQ ID NO: 510900 - DNA, 33 bp, Homo sapien
ctcctttggctagggttaaactggagcagaact

SEQ ID NO: 510901 - DNA, 33 bp, Homo sapien
gccaaaggagtttgtacggctctgttgaaagac

SEQ ID NO: 510902 - DNA, 33 bp, Homo sapien
gccaaaggagtttgtatggctctgttgaaagac

SEQ ID NO: 510903 - DNA, 33 bp, Homo sapien
attttatcaactacacaagtctttcatattcac

SEQ ID NO: 510904 - DNA, 33 bp, Homo sapien
attttatcaactacacgagtctttcatattcac

SEQ ID NO: 510905 - DNA, 33 bp, Homo sapien
gcataaattctaagacacagaaatttgaaggaa

SEQ ID NO: 510906 - DNA, 33 bp, Homo sapien
gcataaattctaagacgcagaaatttgaaggaa

SEQ ID NO: 510907 - DNA, 33 bp, Homo sapien
atataatgacaaataaatcacttaagagtctca

SEQ ID NO: 510908 - DNA, 33 bp, Homo sapien
atataatgacaaataattcacttaagagtctca

SEQ ID NO: 510909 - DNA, 33 bp, Homo sapien
catgccacatgaaataagagtttgggtacaatg

SEQ ID NO: 510910 - DNA, 33 bp, Homo sapien
catgccacatgaaataggagtttgggtacaatg

SEQ ID NO: 510911 - DNA, 33 bp, Homo sapien
gctgctactaaaattacggcaatcaccctcacc

SEQ ID NO: 510912 - DNA, 33 bp, Homo sapien
gctgctactaaaattatggcaatcaccctcacc

SEQ ID NO: 510913 - DNA, 33 bp, Homo sapien
tgctggtgttgggtgaaatgcaactgaggacgt

SEQ ID NO: 510914 - DNA, 33 bp, Homo sapien
tgctggtgttgggtgagatgcaactgaggacgt

SEQ ID NO: 510915 - DNA, 33 bp, Homo sapien
ttaaggaatggtatacaacctcagagccaaact

SEQ ID NO: 510916 - DNA, 33 bp, Homo sapien
ttaaggaatggtatacgacctcagagccaaact

SEQ ID NO: 510917 - DNA, 33 bp, Homo sapien
ataagtctgtaactgacaggtatacaaatgtat

SEQ ID NO: 510918 - DNA, 33 bp, Homo sapien
ataagtctgtaactgataggtatacaaatgtat

SEQ ID NO: 510919 - DNA, 33 bp, Homo sapien
gaagcagctcggcattaaagtataactgatgac

SEQ ID NO: 510920 - DNA, 33 bp, Homo sapien
gaagcagctcggcattcaagtataactgatgac

SEQ ID NO: 510921 - DNA, 33 bp, Homo sapien
aacaggttcatatacccactgtgcagtaacaga

SEQ ID NO: 510922 - DNA, 33 bp, Homo sapien
aacaggttcatatacctactgtgcagtaacaga

SEQ ID NO: 510923 - DNA, 33 bp, Homo sapien
tatttcgtaacttgaaactcatgatcctccaaa

SEQ ID NO: 510924 - DNA, 33 bp, Homo sapien
tatttcgtaacttgaatctcatgatcctccaaa

SEQ ID NO: 510925 - DNA, 33 bp, Homo sapien
caaattccggagaaaaacgttgctatagaataa

SEQ ID NO: 510926 - DNA, 33 bp, Homo sapien
caaattccggagaaaatcgttgctatagaataa

SEQ ID NO: 510927 - DNA, 33 bp, Homo sapien
cttttggaaagcatccacggcactttttctatg

SEQ ID NO: 510928 - DNA, 33 bp, Homo sapien
cttttggaaagcatcctcggcactttttctatg

SEQ ID NO: 510929 - DNA, 33 bp, Homo sapien
cagattgctgaacttcacaaaggctagagagct

SEQ ID NO: 510930 - DNA, 33 bp, Homo sapien
cagattgctgaacttcgcaaaggctagagagct

SEQ ID NO: 510931 - DNA, 33 bp, Homo sapien
cagtaagagcatgataaaccagtcaattatggc

SEQ ID NO: 510932 - DNA, 33 bp, Homo sapien
cagtaagagcatgatagaccagtcaattatggc

SEQ ID NO: 510933 - DNA, 33 bp, Homo sapien
ggaacacctgtatccaagcattttctacatttc

SEQ ID NO: 510934 - DNA, 33 bp, Homo sapien
ggaacacctgtatccaggcattttctacatttc

SEQ ID NO: 510935 - DNA, 33 bp, Homo sapien
atactgatcaggagggacaatggcaaccgtgag

SEQ ID NO: 510936 - DNA, 33 bp, Homo sapien
atactgatcaggaggggcaatggcaaccgtgag

SEQ ID NO: 510937 - DNA, 33 bp, Homo sapien
atgataaaatggacaactctataggccttcaat

SEQ ID NO: 510938 - DNA, 33 bp, Homo sapien
atgataaaatggacaattctataggccttcaat

SEQ ID NO: 510939 - DNA, 33 bp, Homo sapien
gtagcatttcttatcacggccctaaacagctgg

SEQ ID NO: 510940 - DNA, 33 bp, Homo sapien
gtagcatttcttatcatggccctaaacagctgg

SEQ ID NO: 510941 - DNA, 33 bp, Homo sapien
gttcctagcatagtacaagatgcaccagaagtt

SEQ ID NO: 510942 - DNA, 33 bp, Homo sapien
gttcctagcatagtaccagatgcaccagaagtt

SEQ ID NO: 510943 - DNA, 33 bp, Homo sapien
aggcccggaaatattacgcttcttatccagaat

SEQ ID NO: 510944 - DNA, 33 bp, Homo sapien
aggcccggaaatattatgcttcttatccagaat

SEQ ID NO: 510945 - DNA, 33 bp, Homo sapien
gctgtggctcttcccaacttggaccagcgaatg

SEQ ID NO: 510946 - DNA, 33 bp, Homo sapien
gctgtggctcttcccatcttggaccagcgaatg

SEQ ID NO: 510947 - DNA, 33 bp, Homo sapien
aaagattccacaaaaaagctactagacctgata

SEQ ID NO: 510948 - DNA, 33 bp, Homo sapien
aaagattccacaaaaaggctactagacctgata

SEQ ID NO: 510949 - DNA, 33 bp, Homo sapien
atgtgtagattttataaagtgtctaattttcta

SEQ ID NO: 510950 - DNA, 33 bp, Homo sapien
atgtgtagattttatagagtgtctaattttcta

SEQ ID NO: 510951 - DNA, 33 bp, Homo sapien
attctaccaagtgaaacagctgagtcctactaa

SEQ ID NO: 510952 - DNA, 33 bp, Homo sapien
attctaccaagtgaaagagctgagtcctactaa

SEQ ID NO: 510953 - DNA, 33 bp, Homo sapien
agactggcaggcaataaggaccccaaaaatggt

SEQ ID NO: 510954 - DNA, 33 bp, Homo sapien
agactggcaggcaatagggaccccaaaaatggt

SEQ ID NO: 510955 - DNA, 33 bp, Homo sapien
taaatccagggaagagacaaaaattgtgagagt

SEQ ID NO: 510956 - DNA, 33 bp, Homo sapien
taaatccagggaagaggcaaaaattgtgagagt

SEQ ID NO: 510957 - DNA, 33 bp, Homo sapien
tagagcaaatgtttgaaaagaagggtatatacg

SEQ ID NO: 510958 - DNA, 33 bp, Homo sapien
tagagcaaatgtttgagaagaagggtatatacg

SEQ ID NO: 510959 - DNA, 33 bp, Homo sapien
tctgattttactggacaaacactatcagcatga

SEQ ID NO: 510960 - DNA, 33 bp, Homo sapien
tctgattttactggactaacactatcagcatga

SEQ ID NO: 510961 - DNA, 33 bp, Homo sapien
tggaaccggcagagaaaagccctttagaagtag

SEQ ID NO: 510962 - DNA, 33 bp, Homo sapien
tggaaccggcagagaagagccctttagaagtag

SEQ ID NO: 510963 - DNA, 33 bp, Homo sapien
ggttaaatttctgagacacaacatctgacttca

SEQ ID NO: 510964 - DNA, 33 bp, Homo sapien
ggttaaatttctgagagacaacatctgacttca

SEQ ID NO: 510965 - DNA, 33 bp, Homo sapien
aaccacacataagccaataggaatcatgggcca

SEQ ID NO: 510966 - DNA, 33 bp, Homo sapien
aaccacacataagccagtaggaatcatgggcca

SEQ ID NO: 510967 - DNA, 33 bp, Homo sapien
acaaggccatgaaaagaatggctacacacagag

SEQ ID NO: 510968 - DNA, 33 bp, Homo sapien
acaaggccatgaaaaggatggctacacacagag

SEQ ID NO: 510969 - DNA, 33 bp, Homo sapien
tgcatatgtggatcagaacaaagaaggaaaaaa

SEQ ID NO: 510970 - DNA, 33 bp, Homo sapien
tgcatatgtggatcaggacaaagaaggaaaaaa

SEQ ID NO: 510971 - DNA, 33 bp, Homo sapien
ccaattgattgactaccgatttgactttgcatt

SEQ ID NO: 510972 - DNA, 33 bp, Homo sapien
ccaattgattgactactgatttgactttgcatt

SEQ ID NO: 510973 - DNA, 33 bp, Homo sapien
actttcaaatagccctaaagttatcataaaaaa

SEQ ID NO: 510974 - DNA, 33 bp, Homo sapien
actttcaaatagccctgaagttatcataaaaaa

SEQ ID NO: 510975 - DNA, 33 bp, Homo sapien
atatcagaaattttaactaacttgatgaaaatc

SEQ ID NO: 510976 - DNA, 33 bp, Homo sapien
atatcagaaattttaagtaacttgatgaaaatc

SEQ ID NO: 510977 - DNA, 33 bp, Homo sapien
tttgctgttcctaattaaaccttgtattcttct

SEQ ID NO: 510978 - DNA, 33 bp, Homo sapien
tttgctgttcctaatttaaccttgtattcttct

SEQ ID NO: 510979 - DNA, 33 bp, Homo sapien
ttaatgtctaggttaacgtctaggctaatgtcc

SEQ ID NO: 510980 - DNA, 33 bp, Homo sapien
ttaatgtctaggttaatgtctaggctaatgtcc

SEQ ID NO: 510981 - DNA, 33 bp, Homo sapien
aacaatctcatttgcacaagtagaaactatatg

SEQ ID NO: 510982 - DNA, 33 bp, Homo sapien
aacaatctcatttgcagaagtagaaactatatg

SEQ ID NO: 510983 - DNA, 33 bp, Homo sapien
agacattaaagcagtaagacagatttatagctt

SEQ ID NO: 510984 - DNA, 33 bp, Homo sapien
agacattaaagcagtaggacagatttatagctt

SEQ ID NO: 510985 - DNA, 33 bp, Homo sapien
gatgtcttcaaacacacgagtacaattcttcct

SEQ ID NO: 510986 - DNA, 33 bp, Homo sapien
gatgtcttcaaacacatgagtacaattcttcct

SEQ ID NO: 510987 - DNA, 33 bp, Homo sapien
gaagaagacagttccactcctgccctcaagtgt

SEQ ID NO: 510988 - DNA, 33 bp, Homo sapien
gaagaagacagttccattcctgccctcaagtgt

SEQ ID NO: 510989 - DNA, 33 bp, Homo sapien
cgatgttttgcaaatacaatgcaggcagagtat

SEQ ID NO: 510990 - DNA, 33 bp, Homo sapien
cgatgttttgcaaatataatgcaggcagagtat

SEQ ID NO: 510991 - DNA, 33 bp, Homo sapien
atgaagatgttatagactccatattgcatacac

SEQ ID NO: 510992 - DNA, 33 bp, Homo sapien
atgaagatgttatagagtccatattgcatacac

SEQ ID NO: 510993 - DNA, 33 bp, Homo sapien
cttaaaggtgccaatgcacactaaaactttgca

SEQ ID NO: 510994 - DNA, 33 bp, Homo sapien
cttaaaggtgccaatgtacactaaaactttgca

SEQ ID NO: 510995 - DNA, 33 bp, Homo sapien
tctcttgaattccatcaagtcatgcctttatcc

SEQ ID NO: 510996 - DNA, 33 bp, Homo sapien
tctcttgaattccatcgagtcatgcctttatcc

SEQ ID NO: 510997 - DNA, 33 bp, Homo sapien
ggggttaattcaaaagaaacaggacacacagtg

SEQ ID NO: 510998 - DNA, 33 bp, Homo sapien
ggggttaattcaaaaggaacaggacacacagtg

SEQ ID NO: 510999 - DNA, 33 bp, Homo sapien
tgtaaactgattcagcccttaggaaagcagttt

SEQ ID NO: 511000 - DNA, 33 bp, Homo sapien
tgtaaactgattcagctcttaggaaagcagttt

SEQ ID NO: 511001 - DNA, 33 bp, Homo sapien
attaaattctgggatcaaaaataaatttggata

SEQ ID NO: 511002 - DNA, 33 bp, Homo sapien
attaaattctgggatctaaaataaatttggata

SEQ ID NO: 511003 - DNA, 33 bp, Homo sapien
cccatctaggaagttacgctgggaaagacatga

SEQ ID NO: 511004 - DNA, 33 bp, Homo sapien
cccatctaggaagttatgctgggaaagacatga

SEQ ID NO: 511005 - DNA, 33 bp, Homo sapien
acctcctgcaagaatgcaatcagtaccagagaa

SEQ ID NO: 511006 - DNA, 33 bp, Homo sapien
acctcctgcaagaatgtaatcagtaccagagaa

SEQ ID NO: 511007 - DNA, 33 bp, Homo sapien
tgagaagatgaaaatccgagtttgtgtctctta

SEQ ID NO: 511008 - DNA, 33 bp, Homo sapien
tgagaagatgaaaatctgagtttgtgtctctta

SEQ ID NO: 511009 - DNA, 33 bp, Homo sapien
ctataaagaaatcttacgactcaacaaaaagag

SEQ ID NO: 511010 - DNA, 33 bp, Homo sapien
ctataaagaaatcttaggactcaacaaaaagag

SEQ ID NO: 511011 - DNA, 33 bp, Homo sapien
aagtggccttaggtagaaatgtctggctgaggt

SEQ ID NO: 511012 - DNA, 33 bp, Homo sapien
aagtggccttaggtaggaatgtctggctgaggt

SEQ ID NO: 511013 - DNA, 33 bp, Homo sapien
tgtggcagcattaactaaaaaagtctgagtcat

SEQ ID NO: 511014 - DNA, 33 bp, Homo sapien
tgtggcagcattaactgaaaaagtctgagtcat

SEQ ID NO: 511015 - DNA, 33 bp, Homo sapien
gagaaataagaggaccaagttccacaccaggtc

SEQ ID NO: 511016 - DNA, 33 bp, Homo sapien
gagaaataagaggaccgagttccacaccaggtc

SEQ ID NO: 511017 - DNA, 33 bp, Homo sapien
tttcctgcaatccaagccagtgagcctgtttgg

SEQ ID NO: 511018 - DNA, 33 bp, Homo sapien
tttcctgcaatccaagtcagtgagcctgtttgg

SEQ ID NO: 511019 - DNA, 33 bp, Homo sapien
gactctggggcttataagataacatcaattttg

SEQ ID NO: 511020 - DNA, 33 bp, Homo sapien
gactctggggcttataggataacatcaattttg

SEQ ID NO: 511021 - DNA, 33 bp, Homo sapien
gctttttgcacatatacgttgtctgaattcttg

SEQ ID NO: 511022 - DNA, 33 bp, Homo sapien
gctttttgcacatataggttgtctgaattcttg

SEQ ID NO: 511023 - DNA, 33 bp, Homo sapien
catcttgtggcacctaaaaccaactaataagcc

SEQ ID NO: 511024 - DNA, 33 bp, Homo sapien
catcttgtggcacctagaaccaactaataagcc

SEQ ID NO: 511025 - DNA, 33 bp, Homo sapien
tggagtggagctttaaaccacacttggactaag

SEQ ID NO: 511026 - DNA, 33 bp, Homo sapien
tggagtggagctttaagccacacttggactaag

SEQ ID NO: 511027 - DNA, 33 bp, Homo sapien
actaagaaaagggatagaatttgtgaatgccct

SEQ ID NO: 511028 - DNA, 33 bp, Homo sapien
actaagaaaagggatataatttgtgaatgccct

SEQ ID NO: 511029 - DNA, 33 bp, Homo sapien
gcagataagcaaggccacgttggcattttcatt

SEQ ID NO: 511030 - DNA, 33 bp, Homo sapien
gcagataagcaaggcctcgttggcattttcatt

SEQ ID NO: 511031 - DNA, 33 bp, Homo sapien
tctggtcaaggtataaagtctcaacgcaaaggt

SEQ ID NO: 511032 - DNA, 33 bp, Homo sapien
tctggtcaaggtataacgtctcaacgcaaaggt

SEQ ID NO: 511033 - DNA, 33 bp, Homo sapien
tgtgagtcatgaaagccgagatttggagagtcc

SEQ ID NO: 511034 - DNA, 33 bp, Homo sapien
tgtgagtcatgaaagctgagatttggagagtcc

SEQ ID NO: 511035 - DNA, 33 bp, Homo sapien
cttgctctagaagaaactaaaggaggcccagga

SEQ ID NO: 511036 - DNA, 33 bp, Homo sapien
cttgctctagaagaaattaaaggaggcccagga

SEQ ID NO: 511037 - DNA, 33 bp, Homo sapien
aggaatattttggtcccgataatatgaatgata

SEQ ID NO: 511038 - DNA, 33 bp, Homo sapien
aggaatattttggtcctgataatatgaatgata

SEQ ID NO: 511039 - DNA, 33 bp, Homo sapien
tagacaattcatgccacgtggataagcccaaga

SEQ ID NO: 511040 - DNA, 33 bp, Homo sapien
tagacaattcatgccatgtggataagcccaaga

SEQ ID NO: 511041 - DNA, 33 bp, Homo sapien
atgtcatatggcaaaggcataaatgcgttattc

SEQ ID NO: 511042 - DNA, 33 bp, Homo sapien
atgtcatatggcaaagtcataaatgcgttattc

SEQ ID NO: 511043 - DNA, 33 bp, Homo sapien
gggactttgatcagaaaaaagatgtgaattgat

SEQ ID NO: 511044 - DNA, 33 bp, Homo sapien
gggactttgatcagaagaaagatgtgaattgat

SEQ ID NO: 511045 - DNA, 33 bp, Homo sapien
atgcactctcaatacagccatcagttatattgt

SEQ ID NO: 511046 - DNA, 33 bp, Homo sapien
atgcactctcaatacatccatcagttatattgt

SEQ ID NO: 511047 - DNA, 33 bp, Homo sapien
tggtttttttttccaaatcactttgcaatctta

SEQ ID NO: 511048 - DNA, 33 bp, Homo sapien
tggtttttttttccaattcactttgcaatctta

SEQ ID NO: 511049 - DNA, 33 bp, Homo sapien
ccatctttcctccaaactccaggttcagctgct

SEQ ID NO: 511050 - DNA, 33 bp, Homo sapien
ccatctttcctccaaattccaggttcagctgct

SEQ ID NO: 511051 - DNA, 33 bp, Homo sapien
tatgcattgctgagaaatattatagtctcaata

SEQ ID NO: 511052 - DNA, 33 bp, Homo sapien
tatgcattgctgagaagtattatagtctcaata

SEQ ID NO: 511053 - DNA, 33 bp, Homo sapien
acatgaagaattttaccgcagagtaggccatac

SEQ ID NO: 511054 - DNA, 33 bp, Homo sapien
acatgaagaattttactgcagagtaggccatac

SEQ ID NO: 511055 - DNA, 33 bp, Homo sapien
tccttaaaacaccagaagtcacaatcaggaaaa

SEQ ID NO: 511056 - DNA, 33 bp, Homo sapien
tccttaaaacaccagaggtcacaatcaggaaaa

SEQ ID NO: 511057 - DNA, 33 bp, Homo sapien
tcaaattctcatggaacggtgggtttaagaagt

SEQ ID NO: 511058 - DNA, 33 bp, Homo sapien
tcaaattctcatggaagggtgggtttaagaagt

SEQ ID NO: 511059 - DNA, 33 bp, Homo sapien
cagtcaaaacttttagcagtctgaagcctgagg

SEQ ID NO: 511060 - DNA, 33 bp, Homo sapien
cagtcaaaacttttaggagtctgaagcctgagg

SEQ ID NO: 511061 - DNA, 33 bp, Homo sapien
agagcagcaccaaggacaagttgggctcagcag

SEQ ID NO: 511062 - DNA, 33 bp, Homo sapien
agagcagcaccaaggataagttgggctcagcag

SEQ ID NO: 511063 - DNA, 33 bp, Homo sapien
ggtaaaagtgaagaaagcatgggactggggtgg

SEQ ID NO: 511064 - DNA, 33 bp, Homo sapien
ggtaaaagtgaagaaatcatgggactggggtgg

SEQ ID NO: 511065 - DNA, 33 bp, Homo sapien
acatgtaaagtctggacgctaatgaggtaaaag

SEQ ID NO: 511066 - DNA, 33 bp, Homo sapien
acatgtaaagtctggatgctaatgaggtaaaag

SEQ ID NO: 511067 - DNA, 33 bp, Homo sapien
cagtcctgattactgaaggacgttgtttgcaac

SEQ ID NO: 511068 - DNA, 33 bp, Homo sapien
cagtcctgattactgatggacgttgtttgcaac

SEQ ID NO: 511069 - DNA, 33 bp, Homo sapien
cactgttgaaagagagacctagaagcagaagac

SEQ ID NO: 511070 - DNA, 33 bp, Homo sapien
cactgttgaaagagaggcctagaagcagaagac

SEQ ID NO: 511071 - DNA, 33 bp, Homo sapien
ggtccccagctaaatagaactcacctgtcttct

SEQ ID NO: 511072 - DNA, 33 bp, Homo sapien
ggtccccagctaaatataactcacctgtcttct

SEQ ID NO: 511073 - DNA, 33 bp, Homo sapien
aaaactgtggctcatccagaatcataagagctt

SEQ ID NO: 511074 - DNA, 33 bp, Homo sapien
aaaactgtggctcatctagaatcataagagctt

SEQ ID NO: 511075 - DNA, 33 bp, Homo sapien
tgaaaacaataaatcacatggcaaaccctcata

SEQ ID NO: 511076 - DNA, 33 bp, Homo sapien
tgaaaacaataaatcatatggcaaaccctcata

SEQ ID NO: 511077 - DNA, 33 bp, Homo sapien
acgtgtacacacagaacgtctccaacttatgag

SEQ ID NO: 511078 - DNA, 33 bp, Homo sapien
acgtgtacacacagaaggtctccaacttatgag

SEQ ID NO: 511079 - DNA, 33 bp, Homo sapien
ctaaacatgatataaaactctcctccattacag

SEQ ID NO: 511080 - DNA, 33 bp, Homo sapien
ctaaacatgatataaatctctcctccattacag

SEQ ID NO: 511081 - DNA, 33 bp, Homo sapien
gtaacaattagtgctacagtagaaaagacaggt

SEQ ID NO: 511082 - DNA, 33 bp, Homo sapien
gtaacaattagtgctatagtagaaaagacaggt

SEQ ID NO: 511083 - DNA, 33 bp, Homo sapien
agctgtttcacgtgggccagatgtctgagtagc

SEQ ID NO: 511084 - DNA, 33 bp, Homo sapien
agctgtttcacgtggggcagatgtctgagtagc

SEQ ID NO: 511085 - DNA, 33 bp, Homo sapien
cagatcacgtagaggacgaaccttctatttttt

SEQ ID NO: 511086 - DNA, 33 bp, Homo sapien
cagatcacgtagaggatgaaccttctatttttt

SEQ ID NO: 511087 - DNA, 33 bp, Homo sapien
acagagcaagagtctaccagctggcaagtatgc

SEQ ID NO: 511088 - DNA, 33 bp, Homo sapien
acagagcaagagtctatcagctggcaagtatgc

SEQ ID NO: 511089 - DNA, 33 bp, Homo sapien
ttcaaatcaagaagaaaacctaactatcctaaa

SEQ ID NO: 511090 - DNA, 33 bp, Homo sapien
ttcaaatcaagaagaagacctaactatcctaaa

SEQ ID NO: 511091 - DNA, 33 bp, Homo sapien
atcatcaacatagaaaattaacaagatattcag

SEQ ID NO: 511092 - DNA, 33 bp, Homo sapien
atcatcaacatagaaagttaacaagatattcag

SEQ ID NO: 511093 - DNA, 33 bp, Homo sapien
tcacagtgcaaggtccagaaaactgggctatgt

SEQ ID NO: 511094 - DNA, 33 bp, Homo sapien
tcacagtgcaaggtccggaaaactgggctatgt

SEQ ID NO: 511095 - DNA, 33 bp, Homo sapien
catttgttttcacccaagttatgctttataaac

SEQ ID NO: 511096 - DNA, 33 bp, Homo sapien
catttgttttcacccaggttatgctttataaac

SEQ ID NO: 511097 - DNA, 33 bp, Homo sapien
aaacttgctcacaaaagatcaccacttggcagt

SEQ ID NO: 511098 - DNA, 33 bp, Homo sapien
aaacttgctcacaaaatatcaccacttggcagt

SEQ ID NO: 511099 - DNA, 33 bp, Homo sapien
aagaaacatgaagaaacgctccctggcctttta

SEQ ID NO: 511100 - DNA, 33 bp, Homo sapien
aagaaacatgaagaaatgctccctggcctttta

SEQ ID NO: 511101 - DNA, 33 bp, Homo sapien
aatttaggctctgtccacacagattaggagtcc

SEQ ID NO: 511102 - DNA, 33 bp, Homo sapien
aatttaggctctgtccgcacagattaggagtcc

SEQ ID NO: 511103 - DNA, 33 bp, Homo sapien
agaggaaattgtactcactcagacattacctat

SEQ ID NO: 511104 - DNA, 33 bp, Homo sapien
agaggaaattgtactcgctcagacattacctat

SEQ ID NO: 511105 - DNA, 33 bp, Homo sapien
aagtctggttagcaaaggttgtcaacaaagatt

SEQ ID NO: 511106 - DNA, 33 bp, Homo sapien
aagtctggttagcaaatgttgtcaacaaagatt

SEQ ID NO: 511107 - DNA, 33 bp, Homo sapien
tgatgactgaagccacaattttatcataatttc

SEQ ID NO: 511108 - DNA, 33 bp, Homo sapien
tgatgactgaagccacgattttatcataatttc

SEQ ID NO: 511109 - DNA, 33 bp, Homo sapien
gtctacgtatgcacacaggtgcttttcttagca

SEQ ID NO: 511110 - DNA, 33 bp, Homo sapien
gtctacgtatgcacacgggtgcttttcttagca

SEQ ID NO: 511111 - DNA, 33 bp, Homo sapien
caaacagctggtataactaagtaaataaatgcc

SEQ ID NO: 511112 - DNA, 33 bp, Homo sapien
caaacagctggtataattaagtaaataaatgcc

SEQ ID NO: 511113 - DNA, 33 bp, Homo sapien
ctgtaatcattgtaaaatgctctaatacttgta

SEQ ID NO: 511114 - DNA, 33 bp, Homo sapien
ctgtaatcattgtaaattgctctaatacttgta

SEQ ID NO: 511115 - DNA, 33 bp, Homo sapien
actggttgctgtcctacgaatattggggctgtg

SEQ ID NO: 511116 - DNA, 33 bp, Homo sapien
actggttgctgtcctatgaatattggggctgtg

SEQ ID NO: 511117 - DNA, 33 bp, Homo sapien
aaagtcaaaataacaagcacatttcatatcgat

SEQ ID NO: 511118 - DNA, 33 bp, Homo sapien
aaagtcaaaataacaatcacatttcatatcgat

SEQ ID NO: 511119 - DNA, 33 bp, Homo sapien
acatagttaagccaacaaaaaatttagctgtta

SEQ ID NO: 511120 - DNA, 33 bp, Homo sapien
acatagttaagccaaccaaaaatttagctgtta

SEQ ID NO: 511121 - DNA, 33 bp, Homo sapien
tctgtctctattcttaacagctttatacaagtt

SEQ ID NO: 511122 - DNA, 33 bp, Homo sapien
tctgtctctattcttagcagctttatacaagtt

SEQ ID NO: 511123 - DNA, 33 bp, Homo sapien
aaagaaacgttggtgacgggatgactggtccat

SEQ ID NO: 511124 - DNA, 33 bp, Homo sapien
aaagaaacgttggtgatgggatgactggtccat

SEQ ID NO: 511125 - DNA, 33 bp, Homo sapien
gaacataaattcagaagaaaatattgccctggg

SEQ ID NO: 511126 - DNA, 33 bp, Homo sapien
gaacataaattcagaataaaatattgccctggg

SEQ ID NO: 511127 - DNA, 33 bp, Homo sapien
atatccaagggtgtccgatgcatctctcatcct

SEQ ID NO: 511128 - DNA, 33 bp, Homo sapien
atatccaagggtgtcctatgcatctctcatcct

SEQ ID NO: 511129 - DNA, 33 bp, Homo sapien
agggagttatcacgaacagattttaatactagt

SEQ ID NO: 511130 - DNA, 33 bp, Homo sapien
agggagttatcacgaagagattttaatactagt

SEQ ID NO: 511131 - DNA, 33 bp, Homo sapien
cacttctccttaaaaaaattctccatctacaag

SEQ ID NO: 511132 - DNA, 33 bp, Homo sapien
cacttctccttaaaaatattctccatctacaag

SEQ ID NO: 511133 - DNA, 33 bp, Homo sapien
atgtaggcagtacgaaacatttcttaaggaccc

SEQ ID NO: 511134 - DNA, 33 bp, Homo sapien
atgtaggcagtacgaagcatttcttaaggaccc

SEQ ID NO: 511135 - DNA, 33 bp, Homo sapien
agattgatccatcatacactagctggtttggtc

SEQ ID NO: 511136 - DNA, 33 bp, Homo sapien
agattgatccatcatatactagctggtttggtc

SEQ ID NO: 511137 - DNA, 33 bp, Homo sapien
caacatgaactgtcacaaaaattaaggaaacat

SEQ ID NO: 511138 - DNA, 33 bp, Homo sapien
caacatgaactgtcactaaaattaaggaaacat

SEQ ID NO: 511139 - DNA, 33 bp, Homo sapien
gaaataagttgttgaacaaagagaatctactgg

SEQ ID NO: 511140 - DNA, 33 bp, Homo sapien
gaaataagttgttgaataaagagaatctactgg

SEQ ID NO: 511141 - DNA, 33 bp, Homo sapien
aagacagtgattgaagcctataagtgcccacat

SEQ ID NO: 511142 - DNA, 33 bp, Homo sapien
aagacagtgattgaaggctataagtgcccacat

SEQ ID NO: 511143 - DNA, 33 bp, Homo sapien
actctgccacagtctcactatatacaaccttat

SEQ ID NO: 511144 - DNA, 33 bp, Homo sapien
actctgccacagtctcgctatatacaaccttat

SEQ ID NO: 511145 - DNA, 33 bp, Homo sapien
cagaagataagaaaacggtggtaaatccactag

SEQ ID NO: 511146 - DNA, 33 bp, Homo sapien
cagaagataagaaaactgtggtaaatccactag

SEQ ID NO: 511147 - DNA, 33 bp, Homo sapien
ttgactccaaaattcaaaaaggcccataataat

SEQ ID NO: 511148 - DNA, 33 bp, Homo sapien
ttgactccaaaattcagaaaggcccataataat

SEQ ID NO: 511149 - DNA, 33 bp, Homo sapien
tttgattcctgggtgcacatatctcatctgaaa

SEQ ID NO: 511150 - DNA, 33 bp, Homo sapien
tttgattcctgggtgcccatatctcatctgaaa

SEQ ID NO: 511151 - DNA, 33 bp, Homo sapien
agtgggcagacactcaataatgcttaaaaaacc

SEQ ID NO: 511152 - DNA, 33 bp, Homo sapien
agtgggcagacactcattaatgcttaaaaaacc

SEQ ID NO: 511153 - DNA, 33 bp, Homo sapien
atgtctttattaaccaatgagctaaaaactgca

SEQ ID NO: 511154 - DNA, 33 bp, Homo sapien
atgtctttattaaccagtgagctaaaaactgca

SEQ ID NO: 511155 - DNA, 33 bp, Homo sapien
agtaagagcatagtacagctttccagtgtttct

SEQ ID NO: 511156 - DNA, 33 bp, Homo sapien
agtaagagcatagtacggctttccagtgtttct

SEQ ID NO: 511157 - DNA, 33 bp, Homo sapien
aatgtaaacagatacacatatacccttcttacc

SEQ ID NO: 511158 - DNA, 33 bp, Homo sapien
aatgtaaacagatacatatatacccttcttacc

SEQ ID NO: 511159 - DNA, 33 bp, Homo sapien
taaaaaaaaaaacacaatatgctaacttcattc

SEQ ID NO: 511160 - DNA, 33 bp, Homo sapien
taaaaaaaaaaacacagtatgctaacttcattc

SEQ ID NO: 511161 - DNA, 33 bp, Homo sapien
gcacttaaactgtaggcccacactgactccagg

SEQ ID NO: 511162 - DNA, 33 bp, Homo sapien
gcacttaaactgtaggtccacactgactccagg

SEQ ID NO: 511163 - DNA, 33 bp, Homo sapien
tgttgccttctcagaacggccccaactgctacc

SEQ ID NO: 511164 - DNA, 33 bp, Homo sapien
tgttgccttctcagaatggccccaactgctacc

SEQ ID NO: 511165 - DNA, 33 bp, Homo sapien
tttggtgaaaatatcccctacatcgcgtgtgca

SEQ ID NO: 511166 - DNA, 33 bp, Homo sapien
tttggtgaaaatatcctctacatcgcgtgtgca

SEQ ID NO: 511167 - DNA, 33 bp, Homo sapien
gaaccatctaaccctacgtagcttgtatatttc

SEQ ID NO: 511168 - DNA, 33 bp, Homo sapien
gaaccatctaaccctatgtagcttgtatatttc

SEQ ID NO: 511169 - DNA, 33 bp, Homo sapien
atgtcgactactgataacatctgttacaaagga

SEQ ID NO: 511170 - DNA, 33 bp, Homo sapien
atgtcgactactgatatcatctgttacaaagga

SEQ ID NO: 511171 - DNA, 33 bp, Homo sapien
actttaaccagcagaagtagaatcaagggtgat

SEQ ID NO: 511172 - DNA, 33 bp, Homo sapien
actttaaccagcagaattagaatcaagggtgat

SEQ ID NO: 511173 - DNA, 33 bp, Homo sapien
ggtggtgaaatatagcagagactttggtgtctt

SEQ ID NO: 511174 - DNA, 33 bp, Homo sapien
ggtggtgaaatatagcggagactttggtgtctt

SEQ ID NO: 511175 - DNA, 33 bp, Homo sapien
atgaagacaaattttacggcacatgagagttca

SEQ ID NO: 511176 - DNA, 33 bp, Homo sapien
atgaagacaaattttatggcacatgagagttca

SEQ ID NO: 511177 - DNA, 33 bp, Homo sapien
aacgacaaaatggtgaatcaacatgaaatttgt

SEQ ID NO: 511178 - DNA, 33 bp, Homo sapien
aacgacaaaatggtgactcaacatgaaatttgt

SEQ ID NO: 511179 - DNA, 33 bp, Homo sapien
actgaaatgatggtgaaacacattgctaccagg

SEQ ID NO: 511180 - DNA, 33 bp, Homo sapien
actgaaatgatggtgagacacattgctaccagg

SEQ ID NO: 511181 - DNA, 33 bp, Homo sapien
aacttgagtaaattaaggttgaatatgagttta

SEQ ID NO: 511182 - DNA, 33 bp, Homo sapien
aacttgagtaaattaatgttgaatatgagttta

SEQ ID NO: 511183 - DNA, 33 bp, Homo sapien
ttgtgaggactcaagaaatttggttattacagg

SEQ ID NO: 511184 - DNA, 33 bp, Homo sapien
ttgtgaggactcaagacatttggttattacagg

SEQ ID NO: 511185 - DNA, 33 bp, Homo sapien
accctgataaaatagagtaaaccttgtatagga

SEQ ID NO: 511186 - DNA, 33 bp, Homo sapien
accctgataaaatagattaaaccttgtatagga

SEQ ID NO: 511187 - DNA, 33 bp, Homo sapien
agctaaagccaggcaacaggcacagtgtaaatg

SEQ ID NO: 511188 - DNA, 33 bp, Homo sapien
agctaaagccaggcaataggcacagtgtaaatg

SEQ ID NO: 511189 - DNA, 33 bp, Homo sapien
agcatcttggcagtctcacaagggagagaagga

SEQ ID NO: 511190 - DNA, 33 bp, Homo sapien
agcatcttggcagtctgacaagggagagaagga

SEQ ID NO: 511191 - DNA, 33 bp, Homo sapien
gctcttagactacaacagcattacactagaaaa

SEQ ID NO: 511192 - DNA, 33 bp, Homo sapien
gctcttagactacaacggcattacactagaaaa

SEQ ID NO: 511193 - DNA, 33 bp, Homo sapien
tcttcatgaattacccacatgagcttgaaagga

SEQ ID NO: 511194 - DNA, 33 bp, Homo sapien
tcttcatgaattacccgcatgagcttgaaagga

SEQ ID NO: 511195 - DNA, 33 bp, Homo sapien
tccggcggccctgatgaagatgatctgtaatga

SEQ ID NO: 511196 - DNA, 33 bp, Homo sapien
tccggcggccctgatggagatgatctgtaatga

SEQ ID NO: 511197 - DNA, 33 bp, Homo sapien
tatataaatgtaaccaccatcctgtagaagaac

SEQ ID NO: 511198 - DNA, 33 bp, Homo sapien
tatataaatgtaaccatcatcctgtagaagaac

SEQ ID NO: 511199 - DNA, 33 bp, Homo sapien
aaaaagttagttgctcaagatcatatcaagatt

SEQ ID NO: 511200 - DNA, 33 bp, Homo sapien
aaaaagttagttgctcgagatcatatcaagatt

SEQ ID NO: 511201 - DNA, 33 bp, Homo sapien
aacacatcttctaaaaatttcctttcttgtttt

SEQ ID NO: 511202 - DNA, 33 bp, Homo sapien
aacacatcttctaaaagtttcctttcttgtttt

SEQ ID NO: 511203 - DNA, 33 bp, Homo sapien
catgttatctccaggaagaagaatttgagatat

SEQ ID NO: 511204 - DNA, 33 bp, Homo sapien
catgttatctccaggaggaagaatttgagatat

SEQ ID NO: 511205 - DNA, 33 bp, Homo sapien
tcagtattagaaactacccttttgtttgcacca

SEQ ID NO: 511206 - DNA, 33 bp, Homo sapien
tcagtattagaaactatccttttgtttgcacca

SEQ ID NO: 511207 - DNA, 33 bp, Homo sapien
acgaatagaaacaccaatatttcagtgatctta

SEQ ID NO: 511208 - DNA, 33 bp, Homo sapien
acgaatagaaacaccagtatttcagtgatctta

SEQ ID NO: 511209 - DNA, 33 bp, Homo sapien
gaagatattcggtgcacaaaagaaaagagtatt

SEQ ID NO: 511210 - DNA, 33 bp, Homo sapien
gaagatattcggtgcataaaagaaaagagtatt

SEQ ID NO: 511211 - DNA, 33 bp, Homo sapien
aaaagtgccagtagagaaatacaggattttcat

SEQ ID NO: 511212 - DNA, 33 bp, Homo sapien
aaaagtgccagtagagtaatacaggattttcat

SEQ ID NO: 511213 - DNA, 33 bp, Homo sapien
agtgccaggaaattagcaaatttggacacaaac

SEQ ID NO: 511214 - DNA, 33 bp, Homo sapien
agtgccaggaaattaggaaatttggacacaaac

SEQ ID NO: 511215 - DNA, 33 bp, Homo sapien
aagtatactcaaacaaaagtgattgcttacaat

SEQ ID NO: 511216 - DNA, 33 bp, Homo sapien
aagtatactcaaacaacagtgattgcttacaat

SEQ ID NO: 511217 - DNA, 33 bp, Homo sapien
tagagcaagtgtgtaactggtcaaggatactgc

SEQ ID NO: 511218 - DNA, 33 bp, Homo sapien
tagagcaagtgtgtaattggtcaaggatactgc

SEQ ID NO: 511219 - DNA, 33 bp, Homo sapien
ggtagataagtagtagcaaaacttttgttagat

SEQ ID NO: 511220 - DNA, 33 bp, Homo sapien
ggtagataagtagtagtaaaacttttgttagat

SEQ ID NO: 511221 - DNA, 33 bp, Homo sapien
tataacattcctactccctggtgcagcacatga

SEQ ID NO: 511222 - DNA, 33 bp, Homo sapien
tataacattcctactctctggtgcagcacatga

SEQ ID NO: 511223 - DNA, 33 bp, Homo sapien
gaatagtgaattgaaactaatgaatcaggaaca

SEQ ID NO: 511224 - DNA, 33 bp, Homo sapien
gaatagtgaattgaaattaatgaatcaggaaca

SEQ ID NO: 511225 - DNA, 33 bp, Homo sapien
tttcacattttaatcaaccatttggatgtcctg

SEQ ID NO: 511226 - DNA, 33 bp, Homo sapien
tttcacattttaatcacccatttggatgtcctg

SEQ ID NO: 511227 - DNA, 33 bp, Homo sapien
gactgcagcatcataactccaactgaacccaat

SEQ ID NO: 511228 - DNA, 33 bp, Homo sapien
gactgcagcatcataattccaactgaacccaat

SEQ ID NO: 511229 - DNA, 33 bp, Homo sapien
cttgacaccacagtcaccagtgcttacatacat

SEQ ID NO: 511230 - DNA, 33 bp, Homo sapien
cttgacaccacagtcatcagtgcttacatacat

SEQ ID NO: 511231 - DNA, 33 bp, Homo sapien
cagagagaagttgacacccagtctccctaaggg

SEQ ID NO: 511232 - DNA, 33 bp, Homo sapien
cagagagaagttgacatccagtctccctaaggg

SEQ ID NO: 511233 - DNA, 33 bp, Homo sapien
tatatataataattgccatcctttattacataa

SEQ ID NO: 511234 - DNA, 33 bp, Homo sapien
tatatataataattgctatcctttattacataa

SEQ ID NO: 511235 - DNA, 33 bp, Homo sapien
aagcattaagaaatgaagcttaaagattttatt

SEQ ID NO: 511236 - DNA, 33 bp, Homo sapien
aagcattaagaaatgatgcttaaagattttatt

SEQ ID NO: 511237 - DNA, 33 bp, Homo sapien
gttaagaccaagtctcaactacgtggcttgaag

SEQ ID NO: 511238 - DNA, 33 bp, Homo sapien
gttaagaccaagtctctactacgtggcttgaag

SEQ ID NO: 511239 - DNA, 33 bp, Homo sapien
cacttcttactatcaaccctgatcacctcacat

SEQ ID NO: 511240 - DNA, 33 bp, Homo sapien
cacttcttactatcaatcctgatcacctcacat

SEQ ID NO: 511241 - DNA, 33 bp, Homo sapien
ccttgaggtcatgaacagtgattcatctctaga

SEQ ID NO: 511242 - DNA, 33 bp, Homo sapien
ccttgaggtcatgaacggtgattcatctctaga

SEQ ID NO: 511243 - DNA, 33 bp, Homo sapien
ttctttcattcaaaaaatatactgcatgtacat

SEQ ID NO: 511244 - DNA, 33 bp, Homo sapien
ttctttcattcaaaaattatactgcatgtacat

SEQ ID NO: 511245 - DNA, 33 bp, Homo sapien
aaacaaaacaaccagaagacaattaatagagtc

SEQ ID NO: 511246 - DNA, 33 bp, Homo sapien
aaacaaaacaaccagacgacaattaatagagtc

SEQ ID NO: 511247 - DNA, 33 bp, Homo sapien
tccacagaaagggaagacatcaaaattgcatgg

SEQ ID NO: 511248 - DNA, 33 bp, Homo sapien
tccacagaaagggaagccatcaaaattgcatgg

SEQ ID NO: 511249 - DNA, 33 bp, Homo sapien
cctcaaatcaatactcacagtgattttttggtc

SEQ ID NO: 511250 - DNA, 33 bp, Homo sapien
cctcaaatcaatactcccagtgattttttggtc

SEQ ID NO: 511251 - DNA, 33 bp, Homo sapien
cagatcttctgctccaacattccttgtagcctc

SEQ ID NO: 511252 - DNA, 33 bp, Homo sapien
cagatcttctgctccagcattccttgtagcctc

SEQ ID NO: 511253 - DNA, 33 bp, Homo sapien
tcagagatagcttgggaaaagtccaggttctgg

SEQ ID NO: 511254 - DNA, 33 bp, Homo sapien
tcagagatagcttgggtaaagtccaggttctgg

SEQ ID NO: 511255 - DNA, 33 bp, Homo sapien
atctctctccagcgtaagaaaatctgtttctag

SEQ ID NO: 511256 - DNA, 33 bp, Homo sapien
atctctctccagcgtaggaaaatctgtttctag

SEQ ID NO: 511257 - DNA, 33 bp, Homo sapien
cacattttccaataaacctaggactgacacaca

SEQ ID NO: 511258 - DNA, 33 bp, Homo sapien
cacattttccaataaatctaggactgacacaca

SEQ ID NO: 511259 - DNA, 33 bp, Homo sapien
ccaagcacagtcaaacaatgtcgggatcctcca

SEQ ID NO: 511260 - DNA, 33 bp, Homo sapien
ccaagcacagtcaaaccatgtcgggatcctcca

SEQ ID NO: 511261 - DNA, 33 bp, Homo sapien
gtgtgtgtgttattaaaggcagatgtaaaaatg

SEQ ID NO: 511262 - DNA, 33 bp, Homo sapien
gtgtgtgtgttattaagggcagatgtaaaaatg

SEQ ID NO: 511263 - DNA, 33 bp, Homo sapien
caggtcagttttctgaagtatactctcattgat

SEQ ID NO: 511264 - DNA, 33 bp, Homo sapien
caggtcagttttctgacgtatactctcattgat

SEQ ID NO: 511265 - DNA, 33 bp, Homo sapien
aggcatacgagatctagacccctgtgtgagagc

SEQ ID NO: 511266 - DNA, 33 bp, Homo sapien
aggcatacgagatctatacccctgtgtgagagc

SEQ ID NO: 511267 - DNA, 33 bp, Homo sapien
aagtatttagtttataagtgaactctgacaacg

SEQ ID NO: 511268 - DNA, 33 bp, Homo sapien
aagtatttagtttataggtgaactctgacaacg

SEQ ID NO: 511269 - DNA, 33 bp, Homo sapien
gctttttttaataatcactctgaattgacactt

SEQ ID NO: 511270 - DNA, 33 bp, Homo sapien
gctttttttaataatcgctctgaattgacactt

SEQ ID NO: 511271 - DNA, 33 bp, Homo sapien
attaaatatcaagacacggctaaaaataattaa

SEQ ID NO: 511272 - DNA, 33 bp, Homo sapien
attaaatatcaagacatggctaaaaataattaa

SEQ ID NO: 511273 - DNA, 33 bp, Homo sapien
tctcttccataatactcacaattctttccattg

SEQ ID NO: 511274 - DNA, 33 bp, Homo sapien
tctcttccataatactgacaattctttccattg

SEQ ID NO: 511275 - DNA, 33 bp, Homo sapien
ttgaatataagacaaaagacggaatgcatttgt

SEQ ID NO: 511276 - DNA, 33 bp, Homo sapien
ttgaatataagacaaaggacggaatgcatttgt

SEQ ID NO: 511277 - DNA, 33 bp, Homo sapien
tctgccaaatgatcaaaaatcaaggccttcagc

SEQ ID NO: 511278 - DNA, 33 bp, Homo sapien
tctgccaaatgatcaagaatcaaggccttcagc

SEQ ID NO: 511279 - DNA, 33 bp, Homo sapien
attcaagtcacagcacgctataggcttccaaaa

SEQ ID NO: 511280 - DNA, 33 bp, Homo sapien
attcaagtcacagcactctataggcttccaaaa

SEQ ID NO: 511281 - DNA, 33 bp, Homo sapien
ttttttgaagtttaggacatctgtgatttctta

SEQ ID NO: 511282 - DNA, 33 bp, Homo sapien
ttttttgaagtttaggtcatctgtgatttctta

SEQ ID NO: 511283 - DNA, 33 bp, Homo sapien
tctccaagttcatacaaggtgtcttatcccttc

SEQ ID NO: 511284 - DNA, 33 bp, Homo sapien
tctccaagttcatacagggtgtcttatcccttc

SEQ ID NO: 511285 - DNA, 33 bp, Homo sapien
gtatgggtcacaaagaacatcaggtgataacac

SEQ ID NO: 511286 - DNA, 33 bp, Homo sapien
gtatgggtcacaaagagcatcaggtgataacac

SEQ ID NO: 511287 - DNA, 33 bp, Homo sapien
agtaatgttaattgggcaaaacatcctgacaag

SEQ ID NO: 511288 - DNA, 33 bp, Homo sapien
agtaatgttaattggggaaaacatcctgacaag

SEQ ID NO: 511289 - DNA, 33 bp, Homo sapien
aaggcagaatcttccaccttatttctggtatat

SEQ ID NO: 511290 - DNA, 33 bp, Homo sapien
aaggcagaatcttccatcttatttctggtatat

SEQ ID NO: 511291 - DNA, 33 bp, Homo sapien
tctgcttatgtgcccaagcagaaaaaaaattat

SEQ ID NO: 511292 - DNA, 33 bp, Homo sapien
tctgcttatgtgcccatgcagaaaaaaaattat

SEQ ID NO: 511293 - DNA, 33 bp, Homo sapien
tccttaaacatggcaaccattacattatcagca

SEQ ID NO: 511294 - DNA, 33 bp, Homo sapien
tccttaaacatggcaatcattacattatcagca

SEQ ID NO: 511295 - DNA, 33 bp, Homo sapien
ataacttatattgataccatataccccctgttt

SEQ ID NO: 511296 - DNA, 33 bp, Homo sapien
ataacttatattgatagcatataccccctgttt

SEQ ID NO: 511297 - DNA, 33 bp, Homo sapien
ttgtggtactggtgcaatagtttcaacaaatta

SEQ ID NO: 511298 - DNA, 33 bp, Homo sapien
ttgtggtactggtgcagtagtttcaacaaatta

SEQ ID NO: 511299 - DNA, 33 bp, Homo sapien
tccccttttataacacagtcagttcttgtgaga

SEQ ID NO: 511300 - DNA, 33 bp, Homo sapien
tccccttttataacactgtcagttcttgtgaga

SEQ ID NO: 511301 - DNA, 33 bp, Homo sapien
taattgtcccagaagaacaaaaactggatgtgt

SEQ ID NO: 511302 - DNA, 33 bp, Homo sapien
taattgtcccagaagagcaaaaactggatgtgt

SEQ ID NO: 511303 - DNA, 33 bp, Homo sapien
ttttctgtacctctgagagacaatcactcaaaa

SEQ ID NO: 511304 - DNA, 33 bp, Homo sapien
ttttctgtacctctgatagacaatcactcaaaa

SEQ ID NO: 511305 - DNA, 33 bp, Homo sapien
cttgctataccagtcaaaaacacagtacatggt

SEQ ID NO: 511306 - DNA, 33 bp, Homo sapien
cttgctataccagtcagaaacacagtacatggt

SEQ ID NO: 511307 - DNA, 33 bp, Homo sapien
catgctattatgaggacgattaatattaatgtc

SEQ ID NO: 511308 - DNA, 33 bp, Homo sapien
catgctattatgaggatgattaatattaatgtc

SEQ ID NO: 511309 - DNA, 33 bp, Homo sapien
ttcatggtggagggtacgttttttatatatgac

SEQ ID NO: 511310 - DNA, 33 bp, Homo sapien
ttcatggtggagggtatgttttttatatatgac

SEQ ID NO: 511311 - DNA, 33 bp, Homo sapien
aaacctctcttctgggaactaggacacacttaa

SEQ ID NO: 511312 - DNA, 33 bp, Homo sapien
aaacctctcttctgggtactaggacacacttaa

SEQ ID NO: 511313 - DNA, 33 bp, Homo sapien
gctagaaaaaagagcacggctaagatgagaggc

SEQ ID NO: 511314 - DNA, 33 bp, Homo sapien
gctagaaaaaagagcatggctaagatgagaggc

SEQ ID NO: 511315 - DNA, 33 bp, Homo sapien
tccaaacatgattatgacagactgtttgaggaa

SEQ ID NO: 511316 - DNA, 33 bp, Homo sapien
tccaaacatgattatggcagactgtttgaggaa

SEQ ID NO: 511317 - DNA, 33 bp, Homo sapien
cactttcttgatcagagaatgcttaatagcatg

SEQ ID NO: 511318 - DNA, 33 bp, Homo sapien
cactttcttgatcagataatgcttaatagcatg

SEQ ID NO: 511319 - DNA, 33 bp, Homo sapien
atatgaccagaacttgaaagaatgctgttaaga

SEQ ID NO: 511320 - DNA, 33 bp, Homo sapien
atatgaccagaacttgcaagaatgctgttaaga

SEQ ID NO: 511321 - DNA, 33 bp, Homo sapien
atacatgactgatccaaaacagactctttcctg

SEQ ID NO: 511322 - DNA, 33 bp, Homo sapien
atacatgactgatccacaacagactctttcctg

SEQ ID NO: 511323 - DNA, 33 bp, Homo sapien
atacccatctgggtaacggattataaagaaact

SEQ ID NO: 511324 - DNA, 33 bp, Homo sapien
atacccatctgggtaatggattataaagaaact

SEQ ID NO: 511325 - DNA, 33 bp, Homo sapien
caaaacttgttctctcagacattggctattagg

SEQ ID NO: 511326 - DNA, 33 bp, Homo sapien
caaaacttgttctctcggacattggctattagg

SEQ ID NO: 511327 - DNA, 33 bp, Homo sapien
acaagacatttcacagaagtttgattactttgt

SEQ ID NO: 511328 - DNA, 33 bp, Homo sapien
acaagacatttcacaggagtttgattactttgt

SEQ ID NO: 511329 - DNA, 33 bp, Homo sapien
acttaagtgaagatttaaaaaatggactatttc

SEQ ID NO: 511330 - DNA, 33 bp, Homo sapien
acttaagtgaagattttaaaaatggactatttc

SEQ ID NO: 511331 - DNA, 33 bp, Homo sapien
ggatcataaaacatacaaaagttgatgctgaat

SEQ ID NO: 511332 - DNA, 33 bp, Homo sapien
ggatcataaaacataccaaagttgatgctgaat

SEQ ID NO: 511333 - DNA, 33 bp, Homo sapien
accaagtaatctaccaagcataaggatcataaa

SEQ ID NO: 511334 - DNA, 33 bp, Homo sapien
accaagtaatctaccaggcataaggatcataaa

SEQ ID NO: 511335 - DNA, 33 bp, Homo sapien
aaccttagtaaacacaatacacatgcggtcacc

SEQ ID NO: 511336 - DNA, 33 bp, Homo sapien
aaccttagtaaacacactacacatgcggtcacc

SEQ ID NO: 511337 - DNA, 33 bp, Homo sapien
tcaggagaatataatgcacttgcttagaccaaa

SEQ ID NO: 511338 - DNA, 33 bp, Homo sapien
tcaggagaatataatgtacttgcttagaccaaa

SEQ ID NO: 511339 - DNA, 33 bp, Homo sapien
gtactgagacaccaaccaggatggctaaggtag

SEQ ID NO: 511340 - DNA, 33 bp, Homo sapien
gtactgagacaccaactaggatggctaaggtag

SEQ ID NO: 511341 - DNA, 33 bp, Homo sapien
cgcagctcacagccacaaaagagaccccttcct

SEQ ID NO: 511342 - DNA, 33 bp, Homo sapien
cgcagctcacagccactaaagagaccccttcct

SEQ ID NO: 511343 - DNA, 33 bp, Homo sapien
agataaatttagcaaacagattgaaataactaa

SEQ ID NO: 511344 - DNA, 33 bp, Homo sapien
agataaatttagcaaagagattgaaataactaa

SEQ ID NO: 511345 - DNA, 33 bp, Homo sapien
gtgcaaagtagaaaacccttgcttgttaatcct

SEQ ID NO: 511346 - DNA, 33 bp, Homo sapien
gtgcaaagtagaaaactcttgcttgttaatcct

SEQ ID NO: 511347 - DNA, 33 bp, Homo sapien
ggaagccagagagagacggggagattccaggct

SEQ ID NO: 511348 - DNA, 33 bp, Homo sapien
ggaagccagagagagatggggagattccaggct

SEQ ID NO: 511349 - DNA, 33 bp, Homo sapien
tgtccatcttgcaaaaccattaagctaaataaa

SEQ ID NO: 511350 - DNA, 33 bp, Homo sapien
tgtccatcttgcaaaatcattaagctaaataaa

SEQ ID NO: 511351 - DNA, 33 bp, Homo sapien
tgtattttaaataatgcaagatgtcaagaagtt

SEQ ID NO: 511352 - DNA, 33 bp, Homo sapien
tgtattttaaataatggaagatgtcaagaagtt

SEQ ID NO: 511353 - DNA, 33 bp, Homo sapien
agacttgagaactgcagtagttagttaacagga

SEQ ID NO: 511354 - DNA, 33 bp, Homo sapien
agacttgagaactgcattagttagttaacagga

SEQ ID NO: 511355 - DNA, 33 bp, Homo sapien
cattattaagatgtcaatacttcacaaattgat

SEQ ID NO: 511356 - DNA, 33 bp, Homo sapien
cattattaagatgtcattacttcacaaattgat

SEQ ID NO: 511357 - DNA, 33 bp, Homo sapien
aagaatgatttaatgacgcttaattgaaaatgt

SEQ ID NO: 511358 - DNA, 33 bp, Homo sapien
aagaatgatttaatgatgcttaattgaaaatgt

SEQ ID NO: 511359 - DNA, 33 bp, Homo sapien
ttctaatgttaaagtacatttcaccatgattct

SEQ ID NO: 511360 - DNA, 33 bp, Homo sapien
ttctaatgttaaagtatatttcaccatgattct

SEQ ID NO: 511361 - DNA, 33 bp, Homo sapien
tgatattctgaggagacggcaatccatgtaatt

SEQ ID NO: 511362 - DNA, 33 bp, Homo sapien
tgatattctgaggagagggcaatccatgtaatt

SEQ ID NO: 511363 - DNA, 33 bp, Homo sapien
gatggataggactctacgtaaggcaaaagggga

SEQ ID NO: 511364 - DNA, 33 bp, Homo sapien
gatggataggactctatgtaaggcaaaagggga

SEQ ID NO: 511365 - DNA, 33 bp, Homo sapien
attctccaagatagaccatgtgttagattacaa

SEQ ID NO: 511366 - DNA, 33 bp, Homo sapien
attctccaagatagactatgtgttagattacaa

SEQ ID NO: 511367 - DNA, 33 bp, Homo sapien
tttttaagttgccaagaccactaggaatctaca

SEQ ID NO: 511368 - DNA, 33 bp, Homo sapien
tttttaagttgccaaggccactaggaatctaca

SEQ ID NO: 511369 - DNA, 33 bp, Homo sapien
cacaaaatgtaattggaatgcaaataagaaaac

SEQ ID NO: 511370 - DNA, 33 bp, Homo sapien
cacaaaatgtaattgggatgcaaataagaaaac

SEQ ID NO: 511371 - DNA, 33 bp, Homo sapien
ataaggtaacactaacaaaaatcagtgtaaaat

SEQ ID NO: 511372 - DNA, 33 bp, Homo sapien
ataaggtaacactaaccaaaatcagtgtaaaat

SEQ ID NO: 511373 - DNA, 33 bp, Homo sapien
cattgattaaattgataagacagtgtttcagtt

SEQ ID NO: 511374 - DNA, 33 bp, Homo sapien
cattgattaaattgatgagacagtgtttcagtt

SEQ ID NO: 511375 - DNA, 33 bp, Homo sapien
cttaatcagttaaatcaaatctatgagaagaaa

SEQ ID NO: 511376 - DNA, 33 bp, Homo sapien
cttaatcagttaaatcgaatctatgagaagaaa

SEQ ID NO: 511377 - DNA, 33 bp, Homo sapien
cattcagattttctccgcttcttgaacttttca

SEQ ID NO: 511378 - DNA, 33 bp, Homo sapien
cattcagattttctcctcttcttgaacttttca

SEQ ID NO: 511379 - DNA, 33 bp, Homo sapien
ccacttgtgacctgataagaagagtcaattctg

SEQ ID NO: 511380 - DNA, 33 bp, Homo sapien
ccacttgtgacctgatgagaagagtcaattctg

SEQ ID NO: 511381 - DNA, 33 bp, Homo sapien
gattaatgacagactacattactgattttttcc

SEQ ID NO: 511382 - DNA, 33 bp, Homo sapien
gattaatgacagactatattactgattttttcc

SEQ ID NO: 511383 - DNA, 33 bp, Homo sapien
tggcagtgagaacttccctggaatattttaaag

SEQ ID NO: 511384 - DNA, 33 bp, Homo sapien
tggcagtgagaacttctctggaatattttaaag

SEQ ID NO: 511385 - DNA, 33 bp, Homo sapien
cacctgaatacctcagacctatagcagtgattt

SEQ ID NO: 511386 - DNA, 33 bp, Homo sapien
cacctgaatacctcaggcctatagcagtgattt

SEQ ID NO: 511387 - DNA, 33 bp, Homo sapien
gtgccaagctcttaaccgcttacacaaatatta

SEQ ID NO: 511388 - DNA, 33 bp, Homo sapien
gtgccaagctcttaactgcttacacaaatatta

SEQ ID NO: 511389 - DNA, 33 bp, Homo sapien
aacacttctgagcctacagaatggcttttcatt

SEQ ID NO: 511390 - DNA, 33 bp, Homo sapien
aacacttctgagcctatagaatggcttttcatt

SEQ ID NO: 511391 - DNA, 33 bp, Homo sapien
cattttacatttgatcacttagtttctttgcat

SEQ ID NO: 511392 - DNA, 33 bp, Homo sapien
cattttacatttgatcgcttagtttctttgcat

SEQ ID NO: 511393 - DNA, 33 bp, Homo sapien
aaataaataggcaataagttagcaaggatattt

SEQ ID NO: 511394 - DNA, 33 bp, Homo sapien
aaataaataggcaatacgttagcaaggatattt

SEQ ID NO: 511395 - DNA, 33 bp, Homo sapien
ttgttctaatcttcacaatgggaaccagataca

SEQ ID NO: 511396 - DNA, 33 bp, Homo sapien
ttgttctaatcttcacgatgggaaccagataca

SEQ ID NO: 511397 - DNA, 33 bp, Homo sapien
ctctgtgtgtcagaccaaaggctctggtagagt

SEQ ID NO: 511398 - DNA, 33 bp, Homo sapien
ctctgtgtgtcagaccgaaggctctggtagagt

SEQ ID NO: 511399 - DNA, 33 bp, Homo sapien
agaggctgaagccaacagggtgagcagcaacag

SEQ ID NO: 511400 - DNA, 33 bp, Homo sapien
agaggctgaagccaacggggtgagcagcaacag

SEQ ID NO: 511401 - DNA, 33 bp, Homo sapien
agcagccctacggaaaagtggctagactgttaa

SEQ ID NO: 511402 - DNA, 33 bp, Homo sapien
agcagccctacggaaaggtggctagactgttaa

SEQ ID NO: 511403 - DNA, 33 bp, Homo sapien
caaggatccatctttaaggtgttcagtagggat

SEQ ID NO: 511404 - DNA, 33 bp, Homo sapien
caaggatccatctttagggtgttcagtagggat

SEQ ID NO: 511405 - DNA, 33 bp, Homo sapien
gtattgttgggtcatacgccaaataggtatttg

SEQ ID NO: 511406 - DNA, 33 bp, Homo sapien
gtattgttgggtcatatgccaaataggtatttg

SEQ ID NO: 511407 - DNA, 33 bp, Homo sapien
aaccctacagatccaccaaaaatttatttgaac

SEQ ID NO: 511408 - DNA, 33 bp, Homo sapien
aaccctacagatccacgaaaaatttatttgaac

SEQ ID NO: 511409 - DNA, 33 bp, Homo sapien
aacctatgaaaattataactcaaaatggataaa

SEQ ID NO: 511410 - DNA, 33 bp, Homo sapien
aacctatgaaaattattactcaaaatggataaa

SEQ ID NO: 511411 - DNA, 33 bp, Homo sapien
gtttcaatgttttgcacgtattttattctctca

SEQ ID NO: 511412 - DNA, 33 bp, Homo sapien
gtttcaatgttttgcaggtattttattctctca

SEQ ID NO: 511413 - DNA, 33 bp, Homo sapien
aaatgattacaggttacgaactaagctaatata

SEQ ID NO: 511414 - DNA, 33 bp, Homo sapien
aaatgattacaggttatgaactaagctaatata

SEQ ID NO: 511415 - DNA, 33 bp, Homo sapien
ttaaaaggaaatatcacgtgctcttatcaattg

SEQ ID NO: 511416 - DNA, 33 bp, Homo sapien
ttaaaaggaaatatcatgtgctcttatcaattg

SEQ ID NO: 511417 - DNA, 33 bp, Homo sapien
gaagtatctgaagttacgatggtttaacttata

SEQ ID NO: 511418 - DNA, 33 bp, Homo sapien
gaagtatctgaagttatgatggtttaacttata

SEQ ID NO: 511419 - DNA, 33 bp, Homo sapien
tattagggtcaaactacagtgagtaaattattc

SEQ ID NO: 511420 - DNA, 33 bp, Homo sapien
tattagggtcaaactagagtgagtaaattattc

SEQ ID NO: 511421 - DNA, 33 bp, Homo sapien
tgagtaatgctagatcaatgtgattccagacat

SEQ ID NO: 511422 - DNA, 33 bp, Homo sapien
tgagtaatgctagatcgatgtgattccagacat

SEQ ID NO: 511423 - DNA, 33 bp, Homo sapien
gagctagttgaaggcacggacgttttttgtttg

SEQ ID NO: 511424 - DNA, 33 bp, Homo sapien
gagctagttgaaggcatggacgttttttgtttg

SEQ ID NO: 511425 - DNA, 33 bp, Homo sapien
cactacatcaaaagaagataccacctggcctgc

SEQ ID NO: 511426 - DNA, 33 bp, Homo sapien
cactacatcaaaagaatataccacctggcctgc

SEQ ID NO: 511427 - DNA, 33 bp, Homo sapien
agagttgagtaggtgcaagctggtcacttgtgc

SEQ ID NO: 511428 - DNA, 33 bp, Homo sapien
agagttgagtaggtgcgagctggtcacttgtgc

SEQ ID NO: 511429 - DNA, 33 bp, Homo sapien
ggtgacacagaaaataggtagtgtctggtatta

SEQ ID NO: 511430 - DNA, 33 bp, Homo sapien
ggtgacacagaaaatatgtagtgtctggtatta

SEQ ID NO: 511431 - DNA, 33 bp, Homo sapien
gcctttattggcaatacggaattgttgcacttt

SEQ ID NO: 511432 - DNA, 33 bp, Homo sapien
gcctttattggcaatatggaattgttgcacttt

SEQ ID NO: 511433 - DNA, 33 bp, Homo sapien
caagcttcagctcaaacaaggcgtatgatttaa

SEQ ID NO: 511434 - DNA, 33 bp, Homo sapien
caagcttcagctcaaataaggcgtatgatttaa

SEQ ID NO: 511435 - DNA, 33 bp, Homo sapien
catttactgttcagcaaggtcactatagttaca

SEQ ID NO: 511436 - DNA, 33 bp, Homo sapien
catttactgttcagcatggtcactatagttaca

SEQ ID NO: 511437 - DNA, 33 bp, Homo sapien
aaagcaagccaaatcaaagcaatcatttataga

SEQ ID NO: 511438 - DNA, 33 bp, Homo sapien
aaagcaagccaaatcagagcaatcatttataga

SEQ ID NO: 511439 - DNA, 33 bp, Homo sapien
atattacagaacaaaactaaactgaagacaaat

SEQ ID NO: 511440 - DNA, 33 bp, Homo sapien
atattacagaacaaaagtaaactgaagacaaat

SEQ ID NO: 511441 - DNA, 33 bp, Homo sapien
aaactaccaagcatacactaataaaaactattt

SEQ ID NO: 511442 - DNA, 33 bp, Homo sapien
aaactaccaagcatacgctaataaaaactattt

SEQ ID NO: 511443 - DNA, 33 bp, Homo sapien
cataagattgtttgaactattctaggatttgtg

SEQ ID NO: 511444 - DNA, 33 bp, Homo sapien
cataagattgtttgaattattctaggatttgtg

SEQ ID NO: 511445 - DNA, 33 bp, Homo sapien
cacacaagatctttcaccattatgtctaacaag

SEQ ID NO: 511446 - DNA, 33 bp, Homo sapien
cacacaagatctttcagcattatgtctaacaag

SEQ ID NO: 511447 - DNA, 33 bp, Homo sapien
aggctttgttctctgacggtactttccttggca

SEQ ID NO: 511448 - DNA, 33 bp, Homo sapien
aggctttgttctctgatggtactttccttggca

SEQ ID NO: 511449 - DNA, 33 bp, Homo sapien
ttaaaacagtagcttcccaattgtttgcaggag

SEQ ID NO: 511450 - DNA, 33 bp, Homo sapien
ttaaaacagtagcttctcaattgtttgcaggag

SEQ ID NO: 511451 - DNA, 33 bp, Homo sapien
gactttgctagtgtcaactgtgcatccaggatc

SEQ ID NO: 511452 - DNA, 33 bp, Homo sapien
gactttgctagtgtcatctgtgcatccaggatc

SEQ ID NO: 511453 - DNA, 33 bp, Homo sapien
tcttggggttaaactccgagagacacaattgtg

SEQ ID NO: 511454 - DNA, 33 bp, Homo sapien
tcttggggttaaactctgagagacacaattgtg

SEQ ID NO: 511455 - DNA, 33 bp, Homo sapien
ttctacaatgaccatgcaaagcaaaaataaacc

SEQ ID NO: 511456 - DNA, 33 bp, Homo sapien
ttctacaatgaccatgtaaagcaaaaataaacc

SEQ ID NO: 511457 - DNA, 33 bp, Homo sapien
ttacaagtatgtgataactgggtttggttatgt

SEQ ID NO: 511458 - DNA, 33 bp, Homo sapien
ttacaagtatgtgatatctgggtttggttatgt

SEQ ID NO: 511459 - DNA, 33 bp, Homo sapien
aatatgcaggattggcacgaagaatatagatgg

SEQ ID NO: 511460 - DNA, 33 bp, Homo sapien
aatatgcaggattggcgcgaagaatatagatgg

SEQ ID NO: 511461 - DNA, 33 bp, Homo sapien
caaacatagacttagagggactgaatcagttct

SEQ ID NO: 511462 - DNA, 33 bp, Homo sapien
caaacatagacttagatggactgaatcagttct

SEQ ID NO: 511463 - DNA, 33 bp, Homo sapien
gtcattcaacaatcaaaccatctccacatatac

SEQ ID NO: 511464 - DNA, 33 bp, Homo sapien
gtcattcaacaatcaacccatctccacatatac

SEQ ID NO: 511465 - DNA, 33 bp, Homo sapien
aatatgttttccatgaaagatgtacgtaatttc

SEQ ID NO: 511466 - DNA, 33 bp, Homo sapien
aatatgttttccatgatagatgtacgtaatttc

SEQ ID NO: 511467 - DNA, 33 bp, Homo sapien
gtttcaatctcaataccgcaatttatcttttag

SEQ ID NO: 511468 - DNA, 33 bp, Homo sapien
gtttcaatctcaatactgcaatttatcttttag

SEQ ID NO: 511469 - DNA, 33 bp, Homo sapien
agctttctattctcaacttcagacaacagtgtg

SEQ ID NO: 511470 - DNA, 33 bp, Homo sapien
agctttctattctcaatttcagacaacagtgtg

SEQ ID NO: 511471 - DNA, 33 bp, Homo sapien
aaagctggtgtagacaatcaaagcctgaggacc

SEQ ID NO: 511472 - DNA, 33 bp, Homo sapien
aaagctggtgtagacattcaaagcctgaggacc

SEQ ID NO: 511473 - DNA, 33 bp, Homo sapien
ttaacttcagcatctccaccttagatttctcct

SEQ ID NO: 511474 - DNA, 33 bp, Homo sapien
ttaacttcagcatctctaccttagatttctcct

SEQ ID NO: 511475 - DNA, 33 bp, Homo sapien
taataacagtggattacagtttaaagagttaca

SEQ ID NO: 511476 - DNA, 33 bp, Homo sapien
taataacagtggattatagtttaaagagttaca

SEQ ID NO: 511477 - DNA, 33 bp, Homo sapien
gggacatctgaatggcacaactccatggtcacc

SEQ ID NO: 511478 - DNA, 33 bp, Homo sapien
gggacatctgaatggcgcaactccatggtcacc

SEQ ID NO: 511479 - DNA, 33 bp, Homo sapien
ataacacaaaacttccaagaagcgaatagtaaa

SEQ ID NO: 511480 - DNA, 33 bp, Homo sapien
ataacacaaaacttccgagaagcgaatagtaaa

SEQ ID NO: 511481 - DNA, 33 bp, Homo sapien
aagtaaatgtgtagaaatgccatgttgaaaggg

SEQ ID NO: 511482 - DNA, 33 bp, Homo sapien
aagtaaatgtgtagaagtgccatgttgaaaggg

SEQ ID NO: 511483 - DNA, 33 bp, Homo sapien
gtaacattgctagtgaatacacattttagaagg

SEQ ID NO: 511484 - DNA, 33 bp, Homo sapien
gtaacattgctagtgagtacacattttagaagg

SEQ ID NO: 511485 - DNA, 33 bp, Homo sapien
taccaatgtacaaaaaagcttccagaagataga

SEQ ID NO: 511486 - DNA, 33 bp, Homo sapien
taccaatgtacaaaaacgcttccagaagataga

SEQ ID NO: 511487 - DNA, 33 bp, Homo sapien
gcttatctgacttcctaaccatcagaatctcag

SEQ ID NO: 511488 - DNA, 33 bp, Homo sapien
gcttatctgacttccttaccatcagaatctcag

SEQ ID NO: 511489 - DNA, 33 bp, Homo sapien
tcaatagaaatgtatacggctgaatctcacttt

SEQ ID NO: 511490 - DNA, 33 bp, Homo sapien
tcaatagaaatgtatatggctgaatctcacttt

SEQ ID NO: 511491 - DNA, 33 bp, Homo sapien
catactaaaggagagactaaagttagaggttta

SEQ ID NO: 511492 - DNA, 33 bp, Homo sapien
catactaaaggagagattaaagttagaggttta

SEQ ID NO: 511493 - DNA, 33 bp, Homo sapien
agatcagtgctttccacgggtttgtaatgaagg

SEQ ID NO: 511494 - DNA, 33 bp, Homo sapien
agatcagtgctttccatgggtttgtaatgaagg

SEQ ID NO: 511495 - DNA, 33 bp, Homo sapien
gagatttttcaacatccgataacctgcatacag

SEQ ID NO: 511496 - DNA, 33 bp, Homo sapien
gagatttttcaacatctgataacctgcatacag

SEQ ID NO: 511497 - DNA, 33 bp, Homo sapien
tttagtactaaatcagcataggttaaattaaaa

SEQ ID NO: 511498 - DNA, 33 bp, Homo sapien
tttagtactaaatcaggataggttaaattaaaa

SEQ ID NO: 511499 - DNA, 33 bp, Homo sapien
cagctaagtaagaaaacgtactagagattatgt

SEQ ID NO: 511500 - DNA, 33 bp, Homo sapien
cagctaagtaagaaaatgtactagagattatgt

SEQ ID NO: 511501 - DNA, 33 bp, Homo sapien
ggtgatggaggaagaaagtcatgatcaaagcct

SEQ ID NO: 511502 - DNA, 33 bp, Homo sapien
ggtgatggaggaagaaggtcatgatcaaagcct

SEQ ID NO: 511503 - DNA, 33 bp, Homo sapien
taagtgtatacccctgaaactatcatcacaatc

SEQ ID NO: 511504 - DNA, 33 bp, Homo sapien
taagtgtatacccctgtaactatcatcacaatc

SEQ ID NO: 511505 - DNA, 33 bp, Homo sapien
atgtgtgtatctgccacgtatttattactttta

SEQ ID NO: 511506 - DNA, 33 bp, Homo sapien
atgtgtgtatctgccatgtatttattactttta

SEQ ID NO: 511507 - DNA, 33 bp, Homo sapien
gctgttagggaagtgaccttctaattgcccttt

SEQ ID NO: 511508 - DNA, 33 bp, Homo sapien
gctgttagggaagtgagcttctaattgcccttt

SEQ ID NO: 511509 - DNA, 33 bp, Homo sapien
ttattgcacattttaaagtagttaggaaagcat

SEQ ID NO: 511510 - DNA, 33 bp, Homo sapien
ttattgcacattttaaggtagttaggaaagcat

SEQ ID NO: 511511 - DNA, 33 bp, Homo sapien
atgagatattttgatgcaagcgtacaatgcata

SEQ ID NO: 511512 - DNA, 33 bp, Homo sapien
atgagatattttgatgtaagcgtacaatgcata

SEQ ID NO: 511513 - DNA, 33 bp, Homo sapien
atctgttgagtgattaacttaataactgaaaat

SEQ ID NO: 511514 - DNA, 33 bp, Homo sapien
atctgttgagtgattagcttaataactgaaaat

SEQ ID NO: 511515 - DNA, 33 bp, Homo sapien
tgttttatttttgtcacaactcagtcacataac

SEQ ID NO: 511516 - DNA, 33 bp, Homo sapien
tgttttatttttgtcagaactcagtcacataac

SEQ ID NO: 511517 - DNA, 33 bp, Homo sapien
aactgtttatttatgacgttgtggtgtaaagga

SEQ ID NO: 511518 - DNA, 33 bp, Homo sapien
aactgtttatttatgatgttgtggtgtaaagga

SEQ ID NO: 511519 - DNA, 33 bp, Homo sapien
atgttttatctggtacacattcactctcttttc

SEQ ID NO: 511520 - DNA, 33 bp, Homo sapien
atgttttatctggtacgcattcactctcttttc

SEQ ID NO: 511521 - DNA, 33 bp, Homo sapien
atcaagtaaagaagaaccagtggtgtcatgcct

SEQ ID NO: 511522 - DNA, 33 bp, Homo sapien
atcaagtaaagaagaatcagtggtgtcatgcct

SEQ ID NO: 511523 - DNA, 33 bp, Homo sapien
aaaaaacacggttcacgctacacttattctaac

SEQ ID NO: 511524 - DNA, 33 bp, Homo sapien
aaaaaacacggttcactctacacttattctaac

SEQ ID NO: 511525 - DNA, 33 bp, Homo sapien
ctttatcgaatcagccaagactaaacagcatag

SEQ ID NO: 511526 - DNA, 33 bp, Homo sapien
ctttatcgaatcagcccagactaaacagcatag

SEQ ID NO: 511527 - DNA, 33 bp, Homo sapien
acccttaaccagctgaccaaaacttaagagtcc

SEQ ID NO: 511528 - DNA, 33 bp, Homo sapien
acccttaaccagctgagcaaaacttaagagtcc

SEQ ID NO: 511529 - DNA, 33 bp, Homo sapien
gtgattgtgcatcctaagagaagcagagaaaat

SEQ ID NO: 511530 - DNA, 33 bp, Homo sapien
gtgattgtgcatcctaggagaagcagagaaaat

SEQ ID NO: 511531 - DNA, 33 bp, Homo sapien
caaaaacaagtcaggagacctatggagtatttt

SEQ ID NO: 511532 - DNA, 33 bp, Homo sapien
caaaaacaagtcaggatacctatggagtatttt

SEQ ID NO: 511533 - DNA, 33 bp, Homo sapien
ggcctgaagcttgagaagatctagcaacatatc

SEQ ID NO: 511534 - DNA, 33 bp, Homo sapien
ggcctgaagcttgagaggatctagcaacatatc

SEQ ID NO: 511535 - DNA, 33 bp, Homo sapien
gcttattgaattccagaacataaacatagcagg

SEQ ID NO: 511536 - DNA, 33 bp, Homo sapien
gcttattgaattccaggacataaacatagcagg

SEQ ID NO: 511537 - DNA, 33 bp, Homo sapien
cttgggcaatactcacaacctgtttcaatggtc

SEQ ID NO: 511538 - DNA, 33 bp, Homo sapien
cttgggcaatactcacgacctgtttcaatggtc

SEQ ID NO: 511539 - DNA, 33 bp, Homo sapien
gaagatggcaaaataacgagagaaagataaact

SEQ ID NO: 511540 - DNA, 33 bp, Homo sapien
gaagatggcaaaataatgagagaaagataaact

SEQ ID NO: 511541 - DNA, 33 bp, Homo sapien
gccatctgtaaactcacgcttcggaaggatcac

SEQ ID NO: 511542 - DNA, 33 bp, Homo sapien
gccatctgtaaactcatgcttcggaaggatcac

SEQ ID NO: 511543 - DNA, 33 bp, Homo sapien
cccaccaaatataattcaagctccttgtatagt

SEQ ID NO: 511544 - DNA, 33 bp, Homo sapien
cccaccaaatataatttaagctccttgtatagt

SEQ ID NO: 511545 - DNA, 33 bp, Homo sapien
atttatgtaattagagcaacagagacatgaaaa

SEQ ID NO: 511546 - DNA, 33 bp, Homo sapien
atttatgtaattagaggaacagagacatgaaaa

SEQ ID NO: 511547 - DNA, 33 bp, Homo sapien
atgtacttgtgtttcaagatgcctgagagcaga

SEQ ID NO: 511548 - DNA, 33 bp, Homo sapien
atgtacttgtgtttcaggatgcctgagagcaga

SEQ ID NO: 511549 - DNA, 33 bp, Homo sapien
ctactgctgcttctgacgctgttggaggaagtg

SEQ ID NO: 511550 - DNA, 33 bp, Homo sapien
ctactgctgcttctgatgctgttggaggaagtg

SEQ ID NO: 511551 - DNA, 33 bp, Homo sapien
atacctacgagttctacgaggattttgtagatt

SEQ ID NO: 511552 - DNA, 33 bp, Homo sapien
atacctacgagttctatgaggattttgtagatt

SEQ ID NO: 511553 - DNA, 33 bp, Homo sapien
accttcttaaccatgacagcaggaatggtacag

SEQ ID NO: 511554 - DNA, 33 bp, Homo sapien
accttcttaaccatgatagcaggaatggtacag

SEQ ID NO: 511555 - DNA, 33 bp, Homo sapien
tgagattgcctaaacaacaacttatatataaaa

SEQ ID NO: 511556 - DNA, 33 bp, Homo sapien
tgagattgcctaaacagcaacttatatataaaa

SEQ ID NO: 511557 - DNA, 33 bp, Homo sapien
tgataaaaaatcttcacgttgtacaatccagaa

SEQ ID NO: 511558 - DNA, 33 bp, Homo sapien
tgataaaaaatcttcatgttgtacaatccagaa

SEQ ID NO: 511559 - DNA, 33 bp, Homo sapien
ctcaagaatggcttccaatggtctttcagtgtg

SEQ ID NO: 511560 - DNA, 33 bp, Homo sapien
ctcaagaatggcttcctatggtctttcagtgtg

SEQ ID NO: 511561 - DNA, 33 bp, Homo sapien
aaaaccttcaatatctaaagtggcacgttgaag

SEQ ID NO: 511562 - DNA, 33 bp, Homo sapien
aaaaccttcaatatctgaagtggcacgttgaag

SEQ ID NO: 511563 - DNA, 33 bp, Homo sapien
aatcttgcaatcccaaccttttcactcattaag

SEQ ID NO: 511564 - DNA, 33 bp, Homo sapien
aatcttgcaatcccaatcttttcactcattaag

SEQ ID NO: 511565 - DNA, 33 bp, Homo sapien
cacaaaggtcacaaagacacattataagcaaac

SEQ ID NO: 511566 - DNA, 33 bp, Homo sapien
cacaaaggtcacaaaggcacattataagcaaac

SEQ ID NO: 511567 - DNA, 33 bp, Homo sapien
tttcttgtggccacagacataattttgctgaaa

SEQ ID NO: 511568 - DNA, 33 bp, Homo sapien
tttcttgtggccacaggcataattttgctgaaa

SEQ ID NO: 511569 - DNA, 33 bp, Homo sapien
atcataccagctgagacagtagatttttgaatg

SEQ ID NO: 511570 - DNA, 33 bp, Homo sapien
atcataccagctgagagagtagatttttgaatg

SEQ ID NO: 511571 - DNA, 33 bp, Homo sapien
tcagactagccccctaaaggatgagaggccaca

SEQ ID NO: 511572 - DNA, 33 bp, Homo sapien
tcagactagccccctacaggatgagaggccaca

SEQ ID NO: 511573 - DNA, 33 bp, Homo sapien
aaaagaaaattcacaacgtgtgtgcctgaaggt

SEQ ID NO: 511574 - DNA, 33 bp, Homo sapien
aaaagaaaattcacaatgtgtgtgcctgaaggt

SEQ ID NO: 511575 - DNA, 33 bp, Homo sapien
gatatagagtggcacaatagatttgaatgatga

SEQ ID NO: 511576 - DNA, 33 bp, Homo sapien
gatatagagtggcacagtagatttgaatgatga

SEQ ID NO: 511577 - DNA, 33 bp, Homo sapien
aaaatgagtaaagacccggtaggtgagagggca

SEQ ID NO: 511578 - DNA, 33 bp, Homo sapien
aaaatgagtaaagacctggtaggtgagagggca

SEQ ID NO: 511579 - DNA, 33 bp, Homo sapien
taagttttctgccccaatgatctgtttagtgcg

SEQ ID NO: 511580 - DNA, 33 bp, Homo sapien
taagttttctgccccagtgatctgtttagtgcg

SEQ ID NO: 511581 - DNA, 33 bp, Homo sapien
aacagaatcccagcagacattttaaaagaaaag

SEQ ID NO: 511582 - DNA, 33 bp, Homo sapien
aacagaatcccagcaggcattttaaaagaaaag

SEQ ID NO: 511583 - DNA, 33 bp, Homo sapien
gaaattttatagacaaggagaaggtgttagcta

SEQ ID NO: 511584 - DNA, 33 bp, Homo sapien
gaaattttatagacaatgagaaggtgttagcta

SEQ ID NO: 511585 - DNA, 33 bp, Homo sapien
tttataaggtatttccaactgctcgataaaaac

SEQ ID NO: 511586 - DNA, 33 bp, Homo sapien
tttataaggtatttccgactgctcgataaaaac

SEQ ID NO: 511587 - DNA, 33 bp, Homo sapien
gttctgatcagaaatacagtttttccaaggctg

SEQ ID NO: 511588 - DNA, 33 bp, Homo sapien
gttctgatcagaaatatagtttttccaaggctg

SEQ ID NO: 511589 - DNA, 33 bp, Homo sapien
gcctgtcaagacccgcacatagaaaggtgcacg

SEQ ID NO: 511590 - DNA, 33 bp, Homo sapien
gcctgtcaagacccgctcatagaaaggtgcacg

SEQ ID NO: 511591 - DNA, 33 bp, Homo sapien
tctagtttttctcttgcaggacattctgaatta

SEQ ID NO: 511592 - DNA, 33 bp, Homo sapien
tctagtttttctcttgtaggacattctgaatta

SEQ ID NO: 511593 - DNA, 33 bp, Homo sapien
attatgcatccaacaaaagtatatccagaatct

SEQ ID NO: 511594 - DNA, 33 bp, Homo sapien
attatgcatccaacaagagtatatccagaatct

SEQ ID NO: 511595 - DNA, 33 bp, Homo sapien
accatctattgaataggatgcccttttcccact

SEQ ID NO: 511596 - DNA, 33 bp, Homo sapien
accatctattgaatagtatgcccttttcccact

SEQ ID NO: 511597 - DNA, 33 bp, Homo sapien
agtatatttgctctggaattaagtgcaaatata

SEQ ID NO: 511598 - DNA, 33 bp, Homo sapien
agtatatttgctctggcattaagtgcaaatata

SEQ ID NO: 511599 - DNA, 33 bp, Homo sapien
catgttttattatccaatcaaacaatctttatc

SEQ ID NO: 511600 - DNA, 33 bp, Homo sapien
catgttttattatccattcaaacaatctttatc

SEQ ID NO: 511601 - DNA, 33 bp, Homo sapien
tcccatgaaaccacaaaggtgaaggacgttagc

SEQ ID NO: 511602 - DNA, 33 bp, Homo sapien
tcccatgaaaccacaatggtgaaggacgttagc

SEQ ID NO: 511603 - DNA, 33 bp, Homo sapien
agtattaacttgataccgaaaccaaagacacat

SEQ ID NO: 511604 - DNA, 33 bp, Homo sapien
agtattaacttgatactgaaaccaaagacacat

SEQ ID NO: 511605 - DNA, 33 bp, Homo sapien
agtcatcatctgaaagacatagagagaagcctc

SEQ ID NO: 511606 - DNA, 33 bp, Homo sapien
agtcatcatctgaaaggcatagagagaagcctc

SEQ ID NO: 511607 - DNA, 33 bp, Homo sapien
aatcatgttcactccacccaggaagaaaggcac

SEQ ID NO: 511608 - DNA, 33 bp, Homo sapien
aatcatgttcactccatccaggaagaaaggcac

SEQ ID NO: 511609 - DNA, 33 bp, Homo sapien
atttctcccaggtttcaagcaaggggtgaacta

SEQ ID NO: 511610 - DNA, 33 bp, Homo sapien
atttctcccaggtttcgagcaaggggtgaacta

SEQ ID NO: 511611 - DNA, 33 bp, Homo sapien
cttgctctgagtcatgaaatcctccttactttt

SEQ ID NO: 511612 - DNA, 33 bp, Homo sapien
cttgctctgagtcatggaatcctccttactttt

SEQ ID NO: 511613 - DNA, 33 bp, Homo sapien
gcatctttgacactggaacaaagaaagttctga

SEQ ID NO: 511614 - DNA, 33 bp, Homo sapien
gcatctttgacactgggacaaagaaagttctga

SEQ ID NO: 511615 - DNA, 33 bp, Homo sapien
ttctgtttacttgctccattagtgaaagaagat

SEQ ID NO: 511616 - DNA, 33 bp, Homo sapien
ttctgtttacttgctctattagtgaaagaagat

SEQ ID NO: 511617 - DNA, 33 bp, Homo sapien
caaacagcttcacttgcagttgatttttatttg

SEQ ID NO: 511618 - DNA, 33 bp, Homo sapien
caaacagcttcacttggagttgatttttatttg

SEQ ID NO: 511619 - DNA, 33 bp, Homo sapien
tcattcattacagctaaagcgatgtatacacac

SEQ ID NO: 511620 - DNA, 33 bp, Homo sapien
tcattcattacagctagagcgatgtatacacac

SEQ ID NO: 511621 - DNA, 33 bp, Homo sapien
accttttaatgactgacacttgattaaggctga

SEQ ID NO: 511622 - DNA, 33 bp, Homo sapien
accttttaatgactgatacttgattaaggctga

SEQ ID NO: 511623 - DNA, 33 bp, Homo sapien
gaggaccaatggatgaagttctagtgctttgag

SEQ ID NO: 511624 - DNA, 33 bp, Homo sapien
gaggaccaatggatgaggttctagtgctttgag

SEQ ID NO: 511625 - DNA, 33 bp, Homo sapien
tcagaaactaaactgcaatgcctcacagtaaag

SEQ ID NO: 511626 - DNA, 33 bp, Homo sapien
tcagaaactaaactgctatgcctcacagtaaag

SEQ ID NO: 511627 - DNA, 33 bp, Homo sapien
attttttggaaggtaaaaaagactgatcgataa

SEQ ID NO: 511628 - DNA, 33 bp, Homo sapien
attttttggaaggtaataaagactgatcgataa

SEQ ID NO: 511629 - DNA, 33 bp, Homo sapien
tttgtgttatttaatccacagctgcttttgcac

SEQ ID NO: 511630 - DNA, 33 bp, Homo sapien
tttgtgttatttaatctacagctgcttttgcac

SEQ ID NO: 511631 - DNA, 33 bp, Homo sapien
aattggctattgtcataacaaacctcatcccct

SEQ ID NO: 511632 - DNA, 33 bp, Homo sapien
aattggctattgtcattacaaacctcatcccct

SEQ ID NO: 511633 - DNA, 33 bp, Homo sapien
tattgaaatgtcaagccgaatacatttgaagtt

SEQ ID NO: 511634 - DNA, 33 bp, Homo sapien
tattgaaatgtcaagctgaatacatttgaagtt

SEQ ID NO: 511635 - DNA, 33 bp, Homo sapien
ttccacaaatacctaacgatagccaccacactt

SEQ ID NO: 511636 - DNA, 33 bp, Homo sapien
ttccacaaatacctaatgatagccaccacactt

SEQ ID NO: 511637 - DNA, 33 bp, Homo sapien
cacacaggttggtaagaacaaatcaggattgca

SEQ ID NO: 511638 - DNA, 33 bp, Homo sapien
cacacaggttggtaagcacaaatcaggattgca

SEQ ID NO: 511639 - DNA, 33 bp, Homo sapien
ttagtgatattcttcaaggacactgtgtccaat

SEQ ID NO: 511640 - DNA, 33 bp, Homo sapien
ttagtgatattcttcagggacactgtgtccaat

SEQ ID NO: 511641 - DNA, 33 bp, Homo sapien
aaagcattggagaaaactgccattaaagaaaga

SEQ ID NO: 511642 - DNA, 33 bp, Homo sapien
aaagcattggagaaaattgccattaaagaaaga

SEQ ID NO: 511643 - DNA, 33 bp, Homo sapien
agaaagagtcaggtataaaggtataactaccag

SEQ ID NO: 511644 - DNA, 33 bp, Homo sapien
agaaagagtcaggtatcaaggtataactaccag

SEQ ID NO: 511645 - DNA, 33 bp, Homo sapien
accttgttttaaatggccaaatggtatcctact

SEQ ID NO: 511646 - DNA, 33 bp, Homo sapien
accttgttttaaatggtcaaatggtatcctact

SEQ ID NO: 511647 - DNA, 33 bp, Homo sapien
tttcagtcttcctatccataaaacatggctaac

SEQ ID NO: 511648 - DNA, 33 bp, Homo sapien
tttcagtcttcctatctataaaacatggctaac

SEQ ID NO: 511649 - DNA, 33 bp, Homo sapien
ccctgagattcttagggaaaaacggctaggagc

SEQ ID NO: 511650 - DNA, 33 bp, Homo sapien
ccctgagattcttaggtaaaaacggctaggagc

SEQ ID NO: 511651 - DNA, 33 bp, Homo sapien
agatattgaggagatacgcgaatgcttggaaga

SEQ ID NO: 511652 - DNA, 33 bp, Homo sapien
agatattgaggagatatgcgaatgcttggaaga

SEQ ID NO: 511653 - DNA, 33 bp, Homo sapien
tgatttcagatcccacactcattaataagaatc

SEQ ID NO: 511654 - DNA, 33 bp, Homo sapien
tgatttcagatcccacgctcattaataagaatc

SEQ ID NO: 511655 - DNA, 33 bp, Homo sapien
ggaacaaagctggaaacgggcacaagaatccta

SEQ ID NO: 511656 - DNA, 33 bp, Homo sapien
ggaacaaagctggaaaggggcacaagaatccta

SEQ ID NO: 511657 - DNA, 33 bp, Homo sapien
acaccaacagaagtcacagaggcggacctggaa

SEQ ID NO: 511658 - DNA, 33 bp, Homo sapien
acaccaacagaagtcagagaggcggacctggaa

SEQ ID NO: 511659 - DNA, 33 bp, Homo sapien
tttgattcttttgtaacggcactgagcttaaaa

SEQ ID NO: 511660 - DNA, 33 bp, Homo sapien
tttgattcttttgtaatggcactgagcttaaaa

SEQ ID NO: 511661 - DNA, 33 bp, Homo sapien
tatgtttgccttcaggaagtttcaaatttgctt

SEQ ID NO: 511662 - DNA, 33 bp, Homo sapien
tatgtttgccttcagggagtttcaaatttgctt

SEQ ID NO: 511663 - DNA, 33 bp, Homo sapien
tccattcaggcttgtacagaaatctggctggct

SEQ ID NO: 511664 - DNA, 33 bp, Homo sapien
tccattcaggcttgtatagaaatctggctggct

SEQ ID NO: 511665 - DNA, 33 bp, Homo sapien
attaccttcctgactactaattttagcttgtcc

SEQ ID NO: 511666 - DNA, 33 bp, Homo sapien
attaccttcctgactattaattttagcttgtcc

SEQ ID NO: 511667 - DNA, 33 bp, Homo sapien
ctcctctcctaacagaatagcacacactgatat

SEQ ID NO: 511668 - DNA, 33 bp, Homo sapien
ctcctctcctaacagagtagcacacactgatat

SEQ ID NO: 511669 - DNA, 33 bp, Homo sapien
gcagaacaggagagtaagtaagtactggttttt

SEQ ID NO: 511670 - DNA, 33 bp, Homo sapien
gcagaacaggagagtaggtaagtactggttttt

SEQ ID NO: 511671 - DNA, 33 bp, Homo sapien
gaaagctgcctgctacaggacttgtggagagct

SEQ ID NO: 511672 - DNA, 33 bp, Homo sapien
gaaagctgcctgctacgggacttgtggagagct

SEQ ID NO: 511673 - DNA, 33 bp, Homo sapien
aaattagctgattacaacagatagtttctaaac

SEQ ID NO: 511674 - DNA, 33 bp, Homo sapien
aaattagctgattacaccagatagtttctaaac

SEQ ID NO: 511675 - DNA, 33 bp, Homo sapien
gacaaagggcaaggaaaaggggtgagtgtagga

SEQ ID NO: 511676 - DNA, 33 bp, Homo sapien
gacaaagggcaaggaagaggggtgagtgtagga

SEQ ID NO: 511677 - DNA, 33 bp, Homo sapien
cttctacaactccagccagataagcagagggaa

SEQ ID NO: 511678 - DNA, 33 bp, Homo sapien
cttctacaactccagcgagataagcagagggaa

SEQ ID NO: 511679 - DNA, 33 bp, Homo sapien
agggataaggtatgcccatgtggctagcagagt

SEQ ID NO: 511680 - DNA, 33 bp, Homo sapien
agggataaggtatgcctatgtggctagcagagt

SEQ ID NO: 511681 - DNA, 33 bp, Homo sapien
ggatgagacaagcttaaagactccacaagggga

SEQ ID NO: 511682 - DNA, 33 bp, Homo sapien
ggatgagacaagcttatagactccacaagggga

SEQ ID NO: 511683 - DNA, 33 bp, Homo sapien
cccccttgaaagtctgcaagttctgtagctgtt

SEQ ID NO: 511684 - DNA, 33 bp, Homo sapien
cccccttgaaagtctgtaagttctgtagctgtt

SEQ ID NO: 511685 - DNA, 33 bp, Homo sapien
cttttctgatgaagggccacttccaagaggagg

SEQ ID NO: 511686 - DNA, 33 bp, Homo sapien
cttttctgatgaaggggcacttccaagaggagg

SEQ ID NO: 511687 - DNA, 33 bp, Homo sapien
agcacaatataagtcaagctgaaggaaagagtg

SEQ ID NO: 511688 - DNA, 33 bp, Homo sapien
agcacaatataagtcatgctgaaggaaagagtg

SEQ ID NO: 511689 - DNA, 33 bp, Homo sapien
acagcaggccagtagccagtcagaccatgttct

SEQ ID NO: 511690 - DNA, 33 bp, Homo sapien
acagcaggccagtagctagtcagaccatgttct

SEQ ID NO: 511691 - DNA, 33 bp, Homo sapien
agtccctgaatgaaaacaggatattgataacag

SEQ ID NO: 511692 - DNA, 33 bp, Homo sapien
agtccctgaatgaaaataggatattgataacag

SEQ ID NO: 511693 - DNA, 33 bp, Homo sapien
actcaaaaaaatctggaacaatggtgaagtggg

SEQ ID NO: 511694 - DNA, 33 bp, Homo sapien
actcaaaaaaatctgggacaatggtgaagtggg

SEQ ID NO: 511695 - DNA, 33 bp, Homo sapien
tcttctggacaagtggaatagagcaagcctttg

SEQ ID NO: 511696 - DNA, 33 bp, Homo sapien
tcttctggacaagtgggatagagcaagcctttg

SEQ ID NO: 511697 - DNA, 33 bp, Homo sapien
agcaagcctttgctccactggagataatgtgcg

SEQ ID NO: 511698 - DNA, 33 bp, Homo sapien
agcaagcctttgctcctctggagataatgtgcg

SEQ ID NO: 511699 - DNA, 33 bp, Homo sapien
agatgcactttgcaaggccaactgggcttctgt

SEQ ID NO: 511700 - DNA, 33 bp, Homo sapien
agatgcactttgcaagtccaactgggcttctgt

SEQ ID NO: 511701 - DNA, 33 bp, Homo sapien
aggaaagacttgaatcacagggcagtcaatgtt

SEQ ID NO: 511702 - DNA, 33 bp, Homo sapien
aggaaagacttgaatcgcagggcagtcaatgtt

SEQ ID NO: 511703 - DNA, 33 bp, Homo sapien
acttcagctccaccaagcaccaagtagcatgat

SEQ ID NO: 511704 - DNA, 33 bp, Homo sapien
acttcagctccaccaatcaccaagtagcatgat

SEQ ID NO: 511705 - DNA, 33 bp, Homo sapien
gcgataccaagaataacgttaagaatcctcaaa

SEQ ID NO: 511706 - DNA, 33 bp, Homo sapien
gcgataccaagaataaggttaagaatcctcaaa

SEQ ID NO: 511707 - DNA, 33 bp, Homo sapien
accaatgttaacaagaaccttcattctctctat

SEQ ID NO: 511708 - DNA, 33 bp, Homo sapien
accaatgttaacaagacccttcattctctctat

SEQ ID NO: 511709 - DNA, 33 bp, Homo sapien
gaaattataagaaatcaattcacatgattatgg

SEQ ID NO: 511710 - DNA, 33 bp, Homo sapien
gaaattataagaaatcgattcacatgattatgg

SEQ ID NO: 511711 - DNA, 33 bp, Homo sapien
tcaatacactgatatactacttactcatttgag

SEQ ID NO: 511712 - DNA, 33 bp, Homo sapien
tcaatacactgatatattacttactcatttgag

SEQ ID NO: 511713 - DNA, 33 bp, Homo sapien
cattgcaaatgcagatcaaaaaaaagaaaagga

SEQ ID NO: 511714 - DNA, 33 bp, Homo sapien
cattgcaaatgcagatgaaaaaaaagaaaagga

SEQ ID NO: 511715 - DNA, 33 bp, Homo sapien
cacagatgtaagaaaaggaatgttttggataga

SEQ ID NO: 511716 - DNA, 33 bp, Homo sapien
cacagatgtaagaaaatgaatgttttggataga

SEQ ID NO: 511717 - DNA, 33 bp, Homo sapien
ttacacagggccacgtaaatcacataaggaaat

SEQ ID NO: 511718 - DNA, 33 bp, Homo sapien
ttacacagggccacgtgaatcacataaggaaat

SEQ ID NO: 511719 - DNA, 33 bp, Homo sapien
tcctctaccaagcaaaatgactaattaagctgg

SEQ ID NO: 511720 - DNA, 33 bp, Homo sapien
tcctctaccaagcaaagtgactaattaagctgg

SEQ ID NO: 511721 - DNA, 33 bp, Homo sapien
ttcttgaaacagccaaatgttgggtctgtgatt

SEQ ID NO: 511722 - DNA, 33 bp, Homo sapien
ttcttgaaacagccaagtgttgggtctgtgatt

SEQ ID NO: 511723 - DNA, 33 bp, Homo sapien
aacgatggctaatgaaccagagcaggcaaatca

SEQ ID NO: 511724 - DNA, 33 bp, Homo sapien
aacgatggctaatgaagcagagcaggcaaatca

SEQ ID NO: 511725 - DNA, 33 bp, Homo sapien
ttcaggtgggaagaaacaccaacagttaaagtg

SEQ ID NO: 511726 - DNA, 33 bp, Homo sapien
ttcaggtgggaagaaataccaacagttaaagtg

SEQ ID NO: 511727 - DNA, 33 bp, Homo sapien
atagagttacagcagcaatataaaatgttggct

SEQ ID NO: 511728 - DNA, 33 bp, Homo sapien
atagagttacagcagcgatataaaatgttggct

SEQ ID NO: 511729 - DNA, 33 bp, Homo sapien
aggacaggagagccaaaaggacatctgaaatta

SEQ ID NO: 511730 - DNA, 33 bp, Homo sapien
aggacaggagagccaacaggacatctgaaatta

SEQ ID NO: 511731 - DNA, 33 bp, Homo sapien
tgaccttgctgaaggacacgaagcagcttccgg

SEQ ID NO: 511732 - DNA, 33 bp, Homo sapien
tgaccttgctgaaggagacgaagcagcttccgg

SEQ ID NO: 511733 - DNA, 33 bp, Homo sapien
tgccatcatatcaagagaacagctcaaattagc

SEQ ID NO: 511734 - DNA, 33 bp, Homo sapien
tgccatcatatcaagataacagctcaaattagc

SEQ ID NO: 511735 - DNA, 33 bp, Homo sapien
gctttatttcactttgaagatattatacttttt

SEQ ID NO: 511736 - DNA, 33 bp, Homo sapien
gctttatttcactttgcagatattatacttttt

SEQ ID NO: 511737 - DNA, 33 bp, Homo sapien
caatctattggcaccacctttccaatagcatgt

SEQ ID NO: 511738 - DNA, 33 bp, Homo sapien
caatctattggcaccatctttccaatagcatgt

SEQ ID NO: 511739 - DNA, 33 bp, Homo sapien
tatgtaatgaaaacaagaaataagcacatgcta

SEQ ID NO: 511740 - DNA, 33 bp, Homo sapien
tatgtaatgaaaacaataaataagcacatgcta

SEQ ID NO: 511741 - DNA, 33 bp, Homo sapien
gactactaacattttcaaggctgttttgcattc

SEQ ID NO: 511742 - DNA, 33 bp, Homo sapien
gactactaacattttcgaggctgttttgcattc

SEQ ID NO: 511743 - DNA, 33 bp, Homo sapien
tagctgaaaatcactgacagaaggcagattaat

SEQ ID NO: 511744 - DNA, 33 bp, Homo sapien
tagctgaaaatcactgtcagaaggcagattaat

SEQ ID NO: 511745 - DNA, 33 bp, Homo sapien
ggtttccaaaagcagactaaagcattaaacaaa

SEQ ID NO: 511746 - DNA, 33 bp, Homo sapien
ggtttccaaaagcagattaaagcattaaacaaa

SEQ ID NO: 511747 - DNA, 33 bp, Homo sapien
agcatcagattgaccacatctcctgtgacatac

SEQ ID NO: 511748 - DNA, 33 bp, Homo sapien
agcatcagattgaccagatctcctgtgacatac

SEQ ID NO: 511749 - DNA, 33 bp, Homo sapien
gtcacttcatttccaagacatgattatgctttg

SEQ ID NO: 511750 - DNA, 33 bp, Homo sapien
gtcacttcatttccaatacatgattatgctttg

SEQ ID NO: 511751 - DNA, 33 bp, Homo sapien
caatgtgatgtcatgaaatataaccaaagcata

SEQ ID NO: 511752 - DNA, 33 bp, Homo sapien
caatgtgatgtcatgagatataaccaaagcata

SEQ ID NO: 511753 - DNA, 33 bp, Homo sapien
ttacctctgatgaagaagaaatggagctgtcac

SEQ ID NO: 511754 - DNA, 33 bp, Homo sapien
ttacctctgatgaagacgaaatggagctgtcac

SEQ ID NO: 511755 - DNA, 33 bp, Homo sapien
aggttcctacatcatacctcaatctttcatata

SEQ ID NO: 511756 - DNA, 33 bp, Homo sapien
aggttcctacatcatatctcaatctttcatata

SEQ ID NO: 511757 - DNA, 33 bp, Homo sapien
atgcaatagtatcaacagaactcaagaaaataa

SEQ ID NO: 511758 - DNA, 33 bp, Homo sapien
atgcaatagtatcaacggaactcaagaaaataa

SEQ ID NO: 511759 - DNA, 33 bp, Homo sapien
gccaacgtaaagctcagatcgttgcttcagagg

SEQ ID NO: 511760 - DNA, 33 bp, Homo sapien
gccaacgtaaagctcatatcgttgcttcagagg

SEQ ID NO: 511761 - DNA, 33 bp, Homo sapien
atacctgaatgtattagctggaatcatccaatc

SEQ ID NO: 511762 - DNA, 33 bp, Homo sapien
atacctgaatgtattatctggaatcatccaatc

SEQ ID NO: 511763 - DNA, 33 bp, Homo sapien
ttttaagtggcatagcccgcatttgaactgtgg

SEQ ID NO: 511764 - DNA, 33 bp, Homo sapien
ttttaagtggcatagctcgcatttgaactgtgg

SEQ ID NO: 511765 - DNA, 33 bp, Homo sapien
agaaaggagttgtctcaatcccacccaaattgt

SEQ ID NO: 511766 - DNA, 33 bp, Homo sapien
agaaaggagttgtctcgatcccacccaaattgt

SEQ ID NO: 511767 - DNA, 33 bp, Homo sapien
ggtctgagaaattaacgaaccactggtatcagt

SEQ ID NO: 511768 - DNA, 33 bp, Homo sapien
ggtctgagaaattaactaaccactggtatcagt

SEQ ID NO: 511769 - DNA, 33 bp, Homo sapien
attgtaaaacccatgaacttcagagcatcaaat

SEQ ID NO: 511770 - DNA, 33 bp, Homo sapien
attgtaaaacccatgaccttcagagcatcaaat

SEQ ID NO: 511771 - DNA, 33 bp, Homo sapien
gtgtgcttctgtgtgtaaataacagaaaatcca

SEQ ID NO: 511772 - DNA, 33 bp, Homo sapien
gtgtgcttctgtgtgtgaataacagaaaatcca

SEQ ID NO: 511773 - DNA, 33 bp, Homo sapien
aattgctccaagaatccaagttaaatgtaatat

SEQ ID NO: 511774 - DNA, 33 bp, Homo sapien
aattgctccaagaatctaagttaaatgtaatat

SEQ ID NO: 511775 - DNA, 33 bp, Homo sapien
gagaaattttacaacaacactggccgatagaaa

SEQ ID NO: 511776 - DNA, 33 bp, Homo sapien
gagaaattttacaacagcactggccgatagaaa

SEQ ID NO: 511777 - DNA, 33 bp, Homo sapien
ttgagtgacttccaaactctctgggagatgctc

SEQ ID NO: 511778 - DNA, 33 bp, Homo sapien
ttgagtgacttccaaattctctgggagatgctc

SEQ ID NO: 511779 - DNA, 33 bp, Homo sapien
tagacacatatatttacaccacacatatattta

SEQ ID NO: 511780 - DNA, 33 bp, Homo sapien
tagacacatatatttataccacacatatattta

SEQ ID NO: 511781 - DNA, 33 bp, Homo sapien
aagaagagatgttgacaaatggttcctgagatt

SEQ ID NO: 511782 - DNA, 33 bp, Homo sapien
aagaagagatgttgacgaatggttcctgagatt

SEQ ID NO: 511783 - DNA, 33 bp, Homo sapien
aataaaagcaatgggaataagggatcaagaaaa

SEQ ID NO: 511784 - DNA, 33 bp, Homo sapien
aataaaagcaatgggattaagggatcaagaaaa

SEQ ID NO: 511785 - DNA, 33 bp, Homo sapien
aggaaatgtcactgcagaaatagtaacttgcct

SEQ ID NO: 511786 - DNA, 33 bp, Homo sapien
aggaaatgtcactgcataaatagtaacttgcct

SEQ ID NO: 511787 - DNA, 33 bp, Homo sapien
tcttaagcaatagcaaagttagcaaagatgacg

SEQ ID NO: 511788 - DNA, 33 bp, Homo sapien
tcttaagcaatagcaatgttagcaaagatgacg

SEQ ID NO: 511789 - DNA, 33 bp, Homo sapien
cctgtgttagtacatccctcagacatgattctg

SEQ ID NO: 511790 - DNA, 33 bp, Homo sapien
cctgtgttagtacatctctcagacatgattctg

SEQ ID NO: 511791 - DNA, 33 bp, Homo sapien
cctctctcacactgtcacttccccacctaggtg

SEQ ID NO: 511792 - DNA, 33 bp, Homo sapien
cctctctcacactgtcgcttccccacctaggtg

SEQ ID NO: 511793 - DNA, 33 bp, Homo sapien
gaagtataacttcagaaagaccctgatcagatt

SEQ ID NO: 511794 - DNA, 33 bp, Homo sapien
gaagtataacttcagagagaccctgatcagatt

SEQ ID NO: 511795 - DNA, 33 bp, Homo sapien
agagtgggactccagacgtgcagacttaattca

SEQ ID NO: 511796 - DNA, 33 bp, Homo sapien
agagtgggactccagatgtgcagacttaattca

SEQ ID NO: 511797 - DNA, 33 bp, Homo sapien
ctattgacctttgagcaagtgggagtcagactg

SEQ ID NO: 511798 - DNA, 33 bp, Homo sapien
ctattgacctttgagcgagtgggagtcagactg

SEQ ID NO: 511799 - DNA, 33 bp, Homo sapien
ttctttttaaacatacagatggtctaatttgag

SEQ ID NO: 511800 - DNA, 33 bp, Homo sapien
ttctttttaaacatacggatggtctaatttgag

SEQ ID NO: 511801 - DNA, 33 bp, Homo sapien
gtgtctttgtgattacagaaatgtttgggttca

SEQ ID NO: 511802 - DNA, 33 bp, Homo sapien
gtgtctttgtgattacggaaatgtttgggttca

SEQ ID NO: 511803 - DNA, 33 bp, Homo sapien
agtgagagaggaaaagaactaaacctaccattt

SEQ ID NO: 511804 - DNA, 33 bp, Homo sapien
agtgagagaggaaaagtactaaacctaccattt

SEQ ID NO: 511805 - DNA, 33 bp, Homo sapien
agtactctttgcaacacactcagcttactcaag

SEQ ID NO: 511806 - DNA, 33 bp, Homo sapien
agtactctttgcaacatactcagcttactcaag

SEQ ID NO: 511807 - DNA, 33 bp, Homo sapien
cttcttctttgcttgaaacctaagaaatgccaa

SEQ ID NO: 511808 - DNA, 33 bp, Homo sapien
cttcttctttgcttgagacctaagaaatgccaa

SEQ ID NO: 511809 - DNA, 33 bp, Homo sapien
gtaataaaagttatgcaatgtgttctctctctc

SEQ ID NO: 511810 - DNA, 33 bp, Homo sapien
gtaataaaagttatgcgatgtgttctctctctc

SEQ ID NO: 511811 - DNA, 33 bp, Homo sapien
tactttgcacacataccgatgaccctgatttat

SEQ ID NO: 511812 - DNA, 33 bp, Homo sapien
tactttgcacacatactgatgaccctgatttat

SEQ ID NO: 511813 - DNA, 33 bp, Homo sapien
tatctcatagcatctccagttgcctgacttgat

SEQ ID NO: 511814 - DNA, 33 bp, Homo sapien
tatctcatagcatctctagttgcctgacttgat

SEQ ID NO: 511815 - DNA, 33 bp, Homo sapien
tcttacaagcagtcacagaactgataactttgt

SEQ ID NO: 511816 - DNA, 33 bp, Homo sapien
tcttacaagcagtcaccgaactgataactttgt

SEQ ID NO: 511817 - DNA, 33 bp, Homo sapien
aagctacgtacgtgaacactgttttgcagagac

SEQ ID NO: 511818 - DNA, 33 bp, Homo sapien
aagctacgtacgtgaatactgttttgcagagac

SEQ ID NO: 511819 - DNA, 33 bp, Homo sapien
gagaaattcaaacggacagcatataattataaa

SEQ ID NO: 511820 - DNA, 33 bp, Homo sapien
gagaaattcaaacggatagcatataattataaa

SEQ ID NO: 511821 - DNA, 33 bp, Homo sapien
cctagaatactttatcaactctgttttctctac

SEQ ID NO: 511822 - DNA, 33 bp, Homo sapien
cctagaatactttatcgactctgttttctctac

SEQ ID NO: 511823 - DNA, 33 bp, Homo sapien
acttaatttttaggtacgacattctctggtagc

SEQ ID NO: 511824 - DNA, 33 bp, Homo sapien
acttaatttttaggtatgacattctctggtagc

SEQ ID NO: 511825 - DNA, 33 bp, Homo sapien
gtcctgttctgaagggacaagtttcagctccaa

SEQ ID NO: 511826 - DNA, 33 bp, Homo sapien
gtcctgttctgaagggtcaagtttcagctccaa

SEQ ID NO: 511827 - DNA, 33 bp, Homo sapien
cgagcgggacctacaagtgtatttgctccaggg

SEQ ID NO: 511828 - DNA, 33 bp, Homo sapien
cgagcgggacctacaattgtatttgctccaggg

SEQ ID NO: 511829 - DNA, 33 bp, Homo sapien
ggtgtcagggaagcaacgaaggtaagcaggagc

SEQ ID NO: 511830 - DNA, 33 bp, Homo sapien
ggtgtcagggaagcaatgaaggtaagcaggagc

SEQ ID NO: 511831 - DNA, 33 bp, Homo sapien
aacacagcagaagtcacgcaaaatccagaattt

SEQ ID NO: 511832 - DNA, 33 bp, Homo sapien
aacacagcagaagtcatgcaaaatccagaattt

SEQ ID NO: 511833 - DNA, 33 bp, Homo sapien
gatttaatgcaaataagtcacaggcaaggacat

SEQ ID NO: 511834 - DNA, 33 bp, Homo sapien
gatttaatgcaaataattcacaggcaaggacat

SEQ ID NO: 511835 - DNA, 33 bp, Homo sapien
tgctaatacctcgagccacatataaggaatgtg

SEQ ID NO: 511836 - DNA, 33 bp, Homo sapien
tgctaatacctcgagctacatataaggaatgtg

SEQ ID NO: 511837 - DNA, 33 bp, Homo sapien
atcacttatcaatgccagaagttatgtgccgga

SEQ ID NO: 511838 - DNA, 33 bp, Homo sapien
atcacttatcaatgccggaagttatgtgccgga

SEQ ID NO: 511839 - DNA, 33 bp, Homo sapien
agtttatcccattggaagatgcactagacctgg

SEQ ID NO: 511840 - DNA, 33 bp, Homo sapien
agtttatcccattggaggatgcactagacctgg

SEQ ID NO: 511841 - DNA, 33 bp, Homo sapien
cttagaaactacaacacattatgaaaatcaagt

SEQ ID NO: 511842 - DNA, 33 bp, Homo sapien
cttagaaactacaacagattatgaaaatcaagt

SEQ ID NO: 511843 - DNA, 33 bp, Homo sapien
tgttcccagaatcagacgttgctgactttgatg

SEQ ID NO: 511844 - DNA, 33 bp, Homo sapien
tgttcccagaatcagatgttgctgactttgatg

SEQ ID NO: 511845 - DNA, 33 bp, Homo sapien
ctatatgaagcaaccaagttactcagtgaagga

SEQ ID NO: 511846 - DNA, 33 bp, Homo sapien
ctatatgaagcaaccaggttactcagtgaagga

SEQ ID NO: 511847 - DNA, 33 bp, Homo sapien
ggttcaaaaaatgtcaaacagtccagtatttat

SEQ ID NO: 511848 - DNA, 33 bp, Homo sapien
ggttcaaaaaatgtcagacagtccagtatttat

SEQ ID NO: 511849 - DNA, 33 bp, Homo sapien
tgccttcatccatatacatttcctgaccgtata

SEQ ID NO: 511850 - DNA, 33 bp, Homo sapien
tgccttcatccatatatatttcctgaccgtata

SEQ ID NO: 511851 - DNA, 33 bp, Homo sapien
catccaggtttctccaaatgccattattttgtt

SEQ ID NO: 511852 - DNA, 33 bp, Homo sapien
catccaggtttctccacatgccattattttgtt

SEQ ID NO: 511853 - DNA, 33 bp, Homo sapien
cgtagccttcataagccgcatttgatgtgtctg

SEQ ID NO: 511854 - DNA, 33 bp, Homo sapien
cgtagccttcataagctgcatttgatgtgtctg

SEQ ID NO: 511855 - DNA, 33 bp, Homo sapien
aaacgtgtgttaagcacatcacagcagctaagc

SEQ ID NO: 511856 - DNA, 33 bp, Homo sapien
aaacgtgtgttaagcatatcacagcagctaagc

SEQ ID NO: 511857 - DNA, 33 bp, Homo sapien
ggcagcaactgccacaagtcactggtcccgcca

SEQ ID NO: 511858 - DNA, 33 bp, Homo sapien
ggcagcaactgccacaggtcactggtcccgcca

SEQ ID NO: 511859 - DNA, 33 bp, Homo sapien
aagagactaagaaattaaagcacttaaccaaag

SEQ ID NO: 511860 - DNA, 33 bp, Homo sapien
aagagactaagaaatttaagcacttaaccaaag

SEQ ID NO: 511861 - DNA, 33 bp, Homo sapien
tcttcaccatgcttacagaaggaagttactatt

SEQ ID NO: 511862 - DNA, 33 bp, Homo sapien
tcttcaccatgcttacggaaggaagttactatt

SEQ ID NO: 511863 - DNA, 33 bp, Homo sapien
tgacttaatagttgtcaacctaaaaggaagaag

SEQ ID NO: 511864 - DNA, 33 bp, Homo sapien
tgacttaatagttgtcgacctaaaaggaagaag

SEQ ID NO: 511865 - DNA, 33 bp, Homo sapien
agattatagaaagaaccggcgtttagagcatgg

SEQ ID NO: 511866 - DNA, 33 bp, Homo sapien
agattatagaaagaactggcgtttagagcatgg

SEQ ID NO: 511867 - DNA, 33 bp, Homo sapien
agcctgggattttcaggattaaagagtaagtct

SEQ ID NO: 511868 - DNA, 33 bp, Homo sapien
agcctgggattttcagtattaaagagtaagtct

SEQ ID NO: 511869 - DNA, 33 bp, Homo sapien
agagtgaaatgttataaggtggttgaggaaata

SEQ ID NO: 511870 - DNA, 33 bp, Homo sapien
agagtgaaatgttatacggtggttgaggaaata

SEQ ID NO: 511871 - DNA, 33 bp, Homo sapien
taattaataccacaaggcagtaaatattatgag

SEQ ID NO: 511872 - DNA, 33 bp, Homo sapien
taattaataccacaagtcagtaaatattatgag

SEQ ID NO: 511873 - DNA, 33 bp, Homo sapien
gcaacaccttttaggccgagaatgtcttgatgg

SEQ ID NO: 511874 - DNA, 33 bp, Homo sapien
gcaacaccttttaggctgagaatgtcttgatgg

SEQ ID NO: 511875 - DNA, 33 bp, Homo sapien
gaactggccttgcgcacggctctggaagcagga

SEQ ID NO: 511876 - DNA, 33 bp, Homo sapien
gaactggccttgcgcatggctctggaagcagga

SEQ ID NO: 511877 - DNA, 33 bp, Homo sapien
gccgtactctgagaacaatgctgtaaagcttct

SEQ ID NO: 511878 - DNA, 33 bp, Homo sapien
gccgtactctgagaaccatgctgtaaagcttct

SEQ ID NO: 511879 - DNA, 33 bp, Homo sapien
tctcagatgtggttcccaagtaactctaggttt

SEQ ID NO: 511880 - DNA, 33 bp, Homo sapien
tctcagatgtggttcctaagtaactctaggttt

SEQ ID NO: 511881 - DNA, 33 bp, Homo sapien
ggttttacaattctcaatacaatgatttgatca

SEQ ID NO: 511882 - DNA, 33 bp, Homo sapien
ggttttacaattctcagtacaatgatttgatca

SEQ ID NO: 511883 - DNA, 33 bp, Homo sapien
cttgagtgccgaccacagtagacaatctctaac

SEQ ID NO: 511884 - DNA, 33 bp, Homo sapien
cttgagtgccgaccacggtagacaatctctaac

SEQ ID NO: 511885 - DNA, 33 bp, Homo sapien
ttcttagaaagccatgaagaggacaaagctcta

SEQ ID NO: 511886 - DNA, 33 bp, Homo sapien
ttcttagaaagccatggagaggacaaagctcta

SEQ ID NO: 511887 - DNA, 33 bp, Homo sapien
aaacagacaaaggaacacaacctagctgatttt

SEQ ID NO: 511888 - DNA, 33 bp, Homo sapien
aaacagacaaaggaacgcaacctagctgatttt

SEQ ID NO: 511889 - DNA, 33 bp, Homo sapien
agctgtgttatgaagcgcatacattaaaaatca

SEQ ID NO: 511890 - DNA, 33 bp, Homo sapien
agctgtgttatgaagctcatacattaaaaatca

SEQ ID NO: 511891 - DNA, 33 bp, Homo sapien
caatgatacagtgatacgggtttcatggtcagc

SEQ ID NO: 511892 - DNA, 33 bp, Homo sapien
caatgatacagtgatatgggtttcatggtcagc

SEQ ID NO: 511893 - DNA, 33 bp, Homo sapien
atcccagctcggactagcctaattgcattgggg

SEQ ID NO: 511894 - DNA, 33 bp, Homo sapien
atcccagctcggactatcctaattgcattgggg

SEQ ID NO: 511895 - DNA, 33 bp, Homo sapien
taagattgcttccacaaaattttcttttttcat

SEQ ID NO: 511896 - DNA, 33 bp, Homo sapien
taagattgcttccacagaattttcttttttcat

SEQ ID NO: 511897 - DNA, 33 bp, Homo sapien
gagggaggtccataggaaatatcagaatcagtg

SEQ ID NO: 511898 - DNA, 33 bp, Homo sapien
gagggaggtccatagggaatatcagaatcagtg

SEQ ID NO: 511899 - DNA, 33 bp, Homo sapien
gctcagatttcttgcaacagttgacagattttc

SEQ ID NO: 511900 - DNA, 33 bp, Homo sapien
gctcagatttcttgcatcagttgacagattttc

SEQ ID NO: 511901 - DNA, 33 bp, Homo sapien
ggtagaataagtgctacgtgagagaatgctaaa

SEQ ID NO: 511902 - DNA, 33 bp, Homo sapien
ggtagaataagtgctatgtgagagaatgctaaa

SEQ ID NO: 511903 - DNA, 33 bp, Homo sapien
tatagagattcagttgcaggagattaacgtaga

SEQ ID NO: 511904 - DNA, 33 bp, Homo sapien
tatagagattcagttgtaggagattaacgtaga

SEQ ID NO: 511905 - DNA, 33 bp, Homo sapien
agtgtagctcatggcacatttgttcatcttttc

SEQ ID NO: 511906 - DNA, 33 bp, Homo sapien
agtgtagctcatggcatatttgttcatcttttc

SEQ ID NO: 511907 - DNA, 33 bp, Homo sapien
cgtgcttaagtttaggaagcaagcatgtaggct

SEQ ID NO: 511908 - DNA, 33 bp, Homo sapien
cgtgcttaagtttagggagcaagcatgtaggct

SEQ ID NO: 511909 - DNA, 33 bp, Homo sapien
cctcaataactcagaaaatttggggacttgaac

SEQ ID NO: 511910 - DNA, 33 bp, Homo sapien
cctcaataactcagaagatttggggacttgaac

SEQ ID NO: 511911 - DNA, 33 bp, Homo sapien
tgacttgatcacatcacctaacctatctctaag

SEQ ID NO: 511912 - DNA, 33 bp, Homo sapien
tgacttgatcacatcatctaacctatctctaag

SEQ ID NO: 511913 - DNA, 33 bp, Homo sapien
agtattggttccctgaatatgttcctcagaccg

SEQ ID NO: 511914 - DNA, 33 bp, Homo sapien
agtattggttccctgagtatgttcctcagaccg

SEQ ID NO: 511915 - DNA, 33 bp, Homo sapien
aaacaagtgcattctcaataaacgtgtgtggag

SEQ ID NO: 511916 - DNA, 33 bp, Homo sapien
aaacaagtgcattctctataaacgtgtgtggag

SEQ ID NO: 511917 - DNA, 33 bp, Homo sapien
actgggcattactaaacgatgattttcaaattc

SEQ ID NO: 511918 - DNA, 33 bp, Homo sapien
actgggcattactaaaggatgattttcaaattc

SEQ ID NO: 511919 - DNA, 33 bp, Homo sapien
tgtgacaaacacccaacggcattatcaggttta

SEQ ID NO: 511920 - DNA, 33 bp, Homo sapien
tgtgacaaacacccaagggcattatcaggttta

SEQ ID NO: 511921 - DNA, 33 bp, Homo sapien
atttgaacaagccatacgagagatccactgtcc

SEQ ID NO: 511922 - DNA, 33 bp, Homo sapien
atttgaacaagccatatgagagatccactgtcc

SEQ ID NO: 511923 - DNA, 33 bp, Homo sapien
aaggactgaccaaaaacgtctggggaaaatgat

SEQ ID NO: 511924 - DNA, 33 bp, Homo sapien
aaggactgaccaaaaatgtctggggaaaatgat

SEQ ID NO: 511925 - DNA, 33 bp, Homo sapien
acgcttcatttatttgcatggtttgtgaattcc

SEQ ID NO: 511926 - DNA, 33 bp, Homo sapien
acgcttcatttatttggatggtttgtgaattcc

SEQ ID NO: 511927 - DNA, 33 bp, Homo sapien
aacaaagatttattgaggcactgcttgcgtaat

SEQ ID NO: 511928 - DNA, 33 bp, Homo sapien
aacaaagatttattgatgcactgcttgcgtaat

SEQ ID NO: 511929 - DNA, 33 bp, Homo sapien
agctagatttcaaaaaatatttggaaagcctgt

SEQ ID NO: 511930 - DNA, 33 bp, Homo sapien
agctagatttcaaaaattatttggaaagcctgt

SEQ ID NO: 511931 - DNA, 33 bp, Homo sapien
ctacagattgtcaatacccagcttaattgaact

SEQ ID NO: 511932 - DNA, 33 bp, Homo sapien
ctacagattgtcaatagccagcttaattgaact

SEQ ID NO: 511933 - DNA, 33 bp, Homo sapien
taatagtaattacagacgctgtaagcaattcca

SEQ ID NO: 511934 - DNA, 33 bp, Homo sapien
taatagtaattacagatgctgtaagcaattcca

SEQ ID NO: 511935 - DNA, 33 bp, Homo sapien
gcatcagtgtggtaaaatcttccctggtcatta

SEQ ID NO: 511936 - DNA, 33 bp, Homo sapien
gcatcagtgtggtaaagtcttccctggtcatta

SEQ ID NO: 511937 - DNA, 33 bp, Homo sapien
taataacctctacccacgaactttgccccagac

SEQ ID NO: 511938 - DNA, 33 bp, Homo sapien
taataacctctacccatgaactttgccccagac

SEQ ID NO: 511939 - DNA, 33 bp, Homo sapien
attagcacagctacaaagcagaagcacagcagt

SEQ ID NO: 511940 - DNA, 33 bp, Homo sapien
attagcacagctacaaggcagaagcacagcagt

SEQ ID NO: 511941 - DNA, 33 bp, Homo sapien
atttctttactttctgcaccttagtttctccat

SEQ ID NO: 511942 - DNA, 33 bp, Homo sapien
atttctttactttctggaccttagtttctccat

SEQ ID NO: 511943 - DNA, 33 bp, Homo sapien
aacaaataagcaagaagaaggtatctgatagaa

SEQ ID NO: 511944 - DNA, 33 bp, Homo sapien
aacaaataagcaagaataaggtatctgatagaa

SEQ ID NO: 511945 - DNA, 33 bp, Homo sapien
gacatgtgttttaactaactttgtgtggtgaat

SEQ ID NO: 511946 - DNA, 33 bp, Homo sapien
gacatgtgttttaactcactttgtgtggtgaat

SEQ ID NO: 511947 - DNA, 33 bp, Homo sapien
ttttgtcacagtaaggaacttgtcggggttagt

SEQ ID NO: 511948 - DNA, 33 bp, Homo sapien
ttttgtcacagtaaggtacttgtcggggttagt

SEQ ID NO: 511949 - DNA, 33 bp, Homo sapien
tcattttcttctctgcaaaatagctaacatatt

SEQ ID NO: 511950 - DNA, 33 bp, Homo sapien
tcattttcttctctgcgaaatagctaacatatt

SEQ ID NO: 511951 - DNA, 33 bp, Homo sapien
ctgtaggattacacaccaatctagtaaaacctg

SEQ ID NO: 511952 - DNA, 33 bp, Homo sapien
ctgtaggattacacacgaatctagtaaaacctg

SEQ ID NO: 511953 - DNA, 33 bp, Homo sapien
catggctgatttaagcaaggattgtttttgtct

SEQ ID NO: 511954 - DNA, 33 bp, Homo sapien
catggctgatttaagcgaggattgtttttgtct

SEQ ID NO: 511955 - DNA, 33 bp, Homo sapien
tcagaggattgtttaacgtacacgtgtgtactc

SEQ ID NO: 511956 - DNA, 33 bp, Homo sapien
tcagaggattgtttaatgtacacgtgtgtactc

SEQ ID NO: 511957 - DNA, 33 bp, Homo sapien
ttaagattgtgtactcaactcttaagacagaac

SEQ ID NO: 511958 - DNA, 33 bp, Homo sapien
ttaagattgtgtactcgactcttaagacagaac

SEQ ID NO: 511959 - DNA, 33 bp, Homo sapien
tttgctttgaactcaaaacaaaccgtaataaga

SEQ ID NO: 511960 - DNA, 33 bp, Homo sapien
tttgctttgaactcaagacaaaccgtaataaga

SEQ ID NO: 511961 - DNA, 33 bp, Homo sapien
ttgaaggtcaaccagactcctctttatccctca

SEQ ID NO: 511962 - DNA, 33 bp, Homo sapien
ttgaaggtcaaccagattcctctttatccctca

SEQ ID NO: 511963 - DNA, 33 bp, Homo sapien
tggtctaagtcacctaagtgagtaccatgtcaa

SEQ ID NO: 511964 - DNA, 33 bp, Homo sapien
tggtctaagtcacctatgtgagtaccatgtcaa

SEQ ID NO: 511965 - DNA, 33 bp, Homo sapien
aggcagataattatacaaggataatgttcacac

SEQ ID NO: 511966 - DNA, 33 bp, Homo sapien
aggcagataattatacgaggataatgttcacac

SEQ ID NO: 511967 - DNA, 33 bp, Homo sapien
tcctagagaaaaaaaggcaagtattgaataaac

SEQ ID NO: 511968 - DNA, 33 bp, Homo sapien
tcctagagaaaaaaagtcaagtattgaataaac

SEQ ID NO: 511969 - DNA, 33 bp, Homo sapien
ggagggcactcctgcacgaagaagtctctagtg

SEQ ID NO: 511970 - DNA, 33 bp, Homo sapien
ggagggcactcctgcatgaagaagtctctagtg

SEQ ID NO: 511971 - DNA, 33 bp, Homo sapien
ctcagagatgcaactgcaaaactcaagatttta

SEQ ID NO: 511972 - DNA, 33 bp, Homo sapien
ctcagagatgcaactggaaaactcaagatttta

SEQ ID NO: 511973 - DNA, 33 bp, Homo sapien
ctcatcatggtcgacactggcattcccattgtc

SEQ ID NO: 511974 - DNA, 33 bp, Homo sapien
ctcatcatggtcgacagtggcattcccattgtc

SEQ ID NO: 511975 - DNA, 33 bp, Homo sapien
agcaggtaaactcaacagccatggaattggcac

SEQ ID NO: 511976 - DNA, 33 bp, Homo sapien
agcaggtaaactcaacggccatggaattggcac

SEQ ID NO: 511977 - DNA, 33 bp, Homo sapien
tgcagaatgtgttataccatagggaagtgattt

SEQ ID NO: 511978 - DNA, 33 bp, Homo sapien
tgcagaatgtgttatatcatagggaagtgattt

SEQ ID NO: 511979 - DNA, 33 bp, Homo sapien
aatcctgacatcatccagctgccagtctcccta

SEQ ID NO: 511980 - DNA, 33 bp, Homo sapien
aatcctgacatcatccggctgccagtctcccta

SEQ ID NO: 511981 - DNA, 33 bp, Homo sapien
acctcttaatttatgacgagttttatttgctat

SEQ ID NO: 511982 - DNA, 33 bp, Homo sapien
acctcttaatttatgatgagttttatttgctat

SEQ ID NO: 511983 - DNA, 33 bp, Homo sapien
actacaatactcaaaactgaagggctagttttc

SEQ ID NO: 511984 - DNA, 33 bp, Homo sapien
actacaatactcaaaattgaagggctagttttc

SEQ ID NO: 511985 - DNA, 33 bp, Homo sapien
agaaaacccatttgacagcttagagtcaaaata

SEQ ID NO: 511986 - DNA, 33 bp, Homo sapien
agaaaacccatttgacggcttagagtcaaaata

SEQ ID NO: 511987 - DNA, 33 bp, Homo sapien
aaagtggactaatgaaacagaaataggaacctt

SEQ ID NO: 511988 - DNA, 33 bp, Homo sapien
aaagtggactaatgaagcagaaataggaacctt

SEQ ID NO: 511989 - DNA, 33 bp, Homo sapien
ctaggaaagtagaccaatatgaaaagtagcttg

SEQ ID NO: 511990 - DNA, 33 bp, Homo sapien
ctaggaaagtagaccagtatgaaaagtagcttg

SEQ ID NO: 511991 - DNA, 33 bp, Homo sapien
gggaatgggggctagcaaagaaagagtaactgt

SEQ ID NO: 511992 - DNA, 33 bp, Homo sapien
gggaatgggggctagcgaagaaagagtaactgt

SEQ ID NO: 511993 - DNA, 33 bp, Homo sapien
ctcttagggagttgtcaaggtcctctgtaagca

SEQ ID NO: 511994 - DNA, 33 bp, Homo sapien
ctcttagggagttgtcgaggtcctctgtaagca

SEQ ID NO: 511995 - DNA, 33 bp, Homo sapien
atatgatggtaaatgaaataatccgggcataga

SEQ ID NO: 511996 - DNA, 33 bp, Homo sapien
atatgatggtaaatgagataatccgggcataga

SEQ ID NO: 511997 - DNA, 33 bp, Homo sapien
aataagcagtagagtagctcataaacagattaa

SEQ ID NO: 511998 - DNA, 33 bp, Homo sapien
aataagcagtagagtatctcataaacagattaa

SEQ ID NO: 511999 - DNA, 33 bp, Homo sapien
tggcaagaaacctctacagaccaggcacttgga

SEQ ID NO: 512000 - DNA, 33 bp, Homo sapien
tggcaagaaacctctatagaccaggcacttgga

SEQ ID NO: 512001 - DNA, 33 bp, Homo sapien
aaacagagaaagactcaaggggccaccttcact

SEQ ID NO: 512002 - DNA, 33 bp, Homo sapien
aaacagagaaagactcgaggggccaccttcact

SEQ ID NO: 512003 - DNA, 33 bp, Homo sapien
tcatgctcatctgatacacctgcatgaatgccg

SEQ ID NO: 512004 - DNA, 33 bp, Homo sapien
tcatgctcatctgatatacctgcatgaatgccg

SEQ ID NO: 512005 - DNA, 33 bp, Homo sapien
gaagtctcaacatttccatcttgcacaattcag

SEQ ID NO: 512006 - DNA, 33 bp, Homo sapien
gaagtctcaacatttctatcttgcacaattcag

SEQ ID NO: 512007 - DNA, 33 bp, Homo sapien
catcatggtgatataacagcctgaagttaaaat

SEQ ID NO: 512008 - DNA, 33 bp, Homo sapien
catcatggtgatataatagcctgaagttaaaat

SEQ ID NO: 512009 - DNA, 33 bp, Homo sapien
gggtagtgtaggacaaacagtggagtgcatggg

SEQ ID NO: 512010 - DNA, 33 bp, Homo sapien
gggtagtgtaggacaagcagtggagtgcatggg

SEQ ID NO: 512011 - DNA, 33 bp, Homo sapien
gacagacaggagaatgcaattggggtttggcct

SEQ ID NO: 512012 - DNA, 33 bp, Homo sapien
gacagacaggagaatgtaattggggtttggcct

SEQ ID NO: 512013 - DNA, 33 bp, Homo sapien
aactggaaatttgaacactgagcaattatttca

SEQ ID NO: 512014 - DNA, 33 bp, Homo sapien
aactggaaatttgaactctgagcaattatttca

SEQ ID NO: 512015 - DNA, 33 bp, Homo sapien
tggttacaaccaatgcaagattttttccaaagc

SEQ ID NO: 512016 - DNA, 33 bp, Homo sapien
tggttacaaccaatgcgagattttttccaaagc

SEQ ID NO: 512017 - DNA, 33 bp, Homo sapien
catcaaccctgtctaaacatcctcacaccaacc

SEQ ID NO: 512018 - DNA, 33 bp, Homo sapien
catcaaccctgtctaagcatcctcacaccaacc

SEQ ID NO: 512019 - DNA, 33 bp, Homo sapien
gaaagtacagcagaggaataagcagcaaactgg

SEQ ID NO: 512020 - DNA, 33 bp, Homo sapien
gaaagtacagcagagggataagcagcaaactgg

SEQ ID NO: 512021 - DNA, 33 bp, Homo sapien
ttgcattggtctgcaaagcatatagtaggtcct

SEQ ID NO: 512022 - DNA, 33 bp, Homo sapien
ttgcattggtctgcaaggcatatagtaggtcct

SEQ ID NO: 512023 - DNA, 33 bp, Homo sapien
gtatacagataaggaccatttggaacattgtgg

SEQ ID NO: 512024 - DNA, 33 bp, Homo sapien
gtatacagataaggactatttggaacattgtgg

SEQ ID NO: 512025 - DNA, 33 bp, Homo sapien
tataatactgtgaagaagaatgctgcgagggaa

SEQ ID NO: 512026 - DNA, 33 bp, Homo sapien
tataatactgtgaagaggaatgctgcgagggaa

SEQ ID NO: 512027 - DNA, 33 bp, Homo sapien
ataggggttctggtcaagaaaatgaaacaaaag

SEQ ID NO: 512028 - DNA, 33 bp, Homo sapien
ataggggttctggtcaggaaaatgaaacaaaag

SEQ ID NO: 512029 - DNA, 33 bp, Homo sapien
ttagatcttatatgtacattgtggcacccaggc

SEQ ID NO: 512030 - DNA, 33 bp, Homo sapien
ttagatcttatatgtatattgtggcacccaggc

SEQ ID NO: 512031 - DNA, 33 bp, Homo sapien
ctttatatacatctgcactccttggtttaaatc

SEQ ID NO: 512032 - DNA, 33 bp, Homo sapien
ctttatatacatctgcgctccttggtttaaatc

SEQ ID NO: 512033 - DNA, 33 bp, Homo sapien
gaagatagaactgtagcattatagccatttgtt

SEQ ID NO: 512034 - DNA, 33 bp, Homo sapien
gaagatagaactgtagtattatagccatttgtt

SEQ ID NO: 512035 - DNA, 33 bp, Homo sapien
cttaaatctccagaagacatttgttgaataaaa

SEQ ID NO: 512036 - DNA, 33 bp, Homo sapien
cttaaatctccagaaggcatttgttgaataaaa

SEQ ID NO: 512037 - DNA, 33 bp, Homo sapien
aacatgggacatgctaccttaaatctccagaag

SEQ ID NO: 512038 - DNA, 33 bp, Homo sapien
aacatgggacatgctatcttaaatctccagaag

SEQ ID NO: 512039 - DNA, 33 bp, Homo sapien
catctttgtgtctaaaaagaataacatgggaca

SEQ ID NO: 512040 - DNA, 33 bp, Homo sapien
catctttgtgtctaaagagaataacatgggaca

SEQ ID NO: 512041 - DNA, 33 bp, Homo sapien
aacatctttcttttcaccatattgccactctgg

SEQ ID NO: 512042 - DNA, 33 bp, Homo sapien
aacatctttcttttcatcatattgccactctgg

SEQ ID NO: 512043 - DNA, 33 bp, Homo sapien
tcttaccatgacattcaatgtcctttcttacct

SEQ ID NO: 512044 - DNA, 33 bp, Homo sapien
tcttaccatgacattcgatgtcctttcttacct

SEQ ID NO: 512045 - DNA, 33 bp, Homo sapien
cccagtaggtagttgggataaggtctggaatcc

SEQ ID NO: 512046 - DNA, 33 bp, Homo sapien
cccagtaggtagttggtataaggtctggaatcc

SEQ ID NO: 512047 - DNA, 33 bp, Homo sapien
cttttatctctccttcccttacatgcagcatct

SEQ ID NO: 512048 - DNA, 33 bp, Homo sapien
cttttatctctccttctcttacatgcagcatct

SEQ ID NO: 512049 - DNA, 33 bp, Homo sapien
ggacagatggacagcgaacttcttggtagcaac

SEQ ID NO: 512050 - DNA, 33 bp, Homo sapien
ggacagatggacagcggacttcttggtagcaac

SEQ ID NO: 512051 - DNA, 33 bp, Homo sapien
tctgcactgctctgtaaaagttgtctgtttttt

SEQ ID NO: 512052 - DNA, 33 bp, Homo sapien
tctgcactgctctgtagaagttgtctgtttttt

SEQ ID NO: 512053 - DNA, 33 bp, Homo sapien
agtaatctccttctaagaggggtggccttcacg

SEQ ID NO: 512054 - DNA, 33 bp, Homo sapien
agtaatctccttctaataggggtggccttcacg

SEQ ID NO: 512055 - DNA, 33 bp, Homo sapien
gcctaacctttggatacgaaagagatagcaatg

SEQ ID NO: 512056 - DNA, 33 bp, Homo sapien
gcctaacctttggatatgaaagagatagcaatg

SEQ ID NO: 512057 - DNA, 33 bp, Homo sapien
aactctagtaggatccacctaactttctaaccc

SEQ ID NO: 512058 - DNA, 33 bp, Homo sapien
aactctagtaggatccgcctaactttctaaccc

SEQ ID NO: 512059 - DNA, 33 bp, Homo sapien
gtgtcttaaacgtgacacactacttctctcttt

SEQ ID NO: 512060 - DNA, 33 bp, Homo sapien
gtgtcttaaacgtgacgcactacttctctcttt

SEQ ID NO: 512061 - DNA, 33 bp, Homo sapien
ctacagaaaagtgtcaagcatagcataatagaa

SEQ ID NO: 512062 - DNA, 33 bp, Homo sapien
ctacagaaaagtgtcacgcatagcataatagaa

SEQ ID NO: 512063 - DNA, 33 bp, Homo sapien
ccatatccttatcatacctcttaatgttgccaa

SEQ ID NO: 512064 - DNA, 33 bp, Homo sapien
ccatatccttatcatatctcttaatgttgccaa

SEQ ID NO: 512065 - DNA, 33 bp, Homo sapien
gcatatctaaacatagaaagagcagagtaaaaa

SEQ ID NO: 512066 - DNA, 33 bp, Homo sapien
gcatatctaaacataggaagagcagagtaaaaa

SEQ ID NO: 512067 - DNA, 33 bp, Homo sapien
agtcattcttccttaacgaaaaggcttggacat

SEQ ID NO: 512068 - DNA, 33 bp, Homo sapien
agtcattcttccttaatgaaaaggcttggacat

SEQ ID NO: 512069 - DNA, 33 bp, Homo sapien
gacatgaataagcataacataactgtaagaagg

SEQ ID NO: 512070 - DNA, 33 bp, Homo sapien
gacatgaataagcataccataactgtaagaagg

SEQ ID NO: 512071 - DNA, 33 bp, Homo sapien
taatgcattcctctacagactctttgaaaggct

SEQ ID NO: 512072 - DNA, 33 bp, Homo sapien
taatgcattcctctacggactctttgaaaggct

SEQ ID NO: 512073 - DNA, 33 bp, Homo sapien
tgtacagaagaaagacaaactgtaaataatgta

SEQ ID NO: 512074 - DNA, 33 bp, Homo sapien
tgtacagaagaaagacgaactgtaaataatgta

SEQ ID NO: 512075 - DNA, 33 bp, Homo sapien
aactctctttagtatccctttatgtttttggag

SEQ ID NO: 512076 - DNA, 33 bp, Homo sapien
aactctctttagtatctctttatgtttttggag

SEQ ID NO: 512077 - DNA, 33 bp, Homo sapien
gtatattagactaagaaaactccaaaatctctt

SEQ ID NO: 512078 - DNA, 33 bp, Homo sapien
gtatattagactaagagaactccaaaatctctt

SEQ ID NO: 512079 - DNA, 33 bp, Homo sapien
agtaagctcaaatctacccatcagaacctcaga

SEQ ID NO: 512080 - DNA, 33 bp, Homo sapien
agtaagctcaaatctatccatcagaacctcaga

SEQ ID NO: 512081 - DNA, 33 bp, Homo sapien
ctatccaattctgtcacgcatacccttgtttaa

SEQ ID NO: 512082 - DNA, 33 bp, Homo sapien
ctatccaattctgtcatgcatacccttgtttaa

SEQ ID NO: 512083 - DNA, 33 bp, Homo sapien
gtgatgtaggtaaagcaaagtttaagagcaaag

SEQ ID NO: 512084 - DNA, 33 bp, Homo sapien
gtgatgtaggtaaagcgaagtttaagagcaaag

SEQ ID NO: 512085 - DNA, 33 bp, Homo sapien
agtgggccaaaaggaaaaacaaatcattatcaa

SEQ ID NO: 512086 - DNA, 33 bp, Homo sapien
agtgggccaaaaggaataacaaatcattatcaa

SEQ ID NO: 512087 - DNA, 33 bp, Homo sapien
ggcgttttatacattaacatacttctgggatgg

SEQ ID NO: 512088 - DNA, 33 bp, Homo sapien
ggcgttttatacattagcatacttctgggatgg

SEQ ID NO: 512089 - DNA, 33 bp, Homo sapien
ccttggtaagcaggtacgaaaggacaaaaaatg

SEQ ID NO: 512090 - DNA, 33 bp, Homo sapien
ccttggtaagcaggtaggaaaggacaaaaaatg

SEQ ID NO: 512091 - DNA, 33 bp, Homo sapien
cacctcttaaagaccgcacttcagaacacagtt

SEQ ID NO: 512092 - DNA, 33 bp, Homo sapien
cacctcttaaagaccgtacttcagaacacagtt

SEQ ID NO: 512093 - DNA, 33 bp, Homo sapien
aaagctctggatataaaacactctccaatttgc

SEQ ID NO: 512094 - DNA, 33 bp, Homo sapien
aaagctctggatataagacactctccaatttgc

SEQ ID NO: 512095 - DNA, 33 bp, Homo sapien
aaccaggattttctcacgatcctaagcttcctc

SEQ ID NO: 512096 - DNA, 33 bp, Homo sapien
aaccaggattttctcatgatcctaagcttcctc

SEQ ID NO: 512097 - DNA, 33 bp, Homo sapien
tatcaacgttttgccaactattttacattgtct

SEQ ID NO: 512098 - DNA, 33 bp, Homo sapien
tatcaacgttttgccagctattttacattgtct

SEQ ID NO: 512099 - DNA, 33 bp, Homo sapien
ttagtttttcaattcacaaacggaataacattt

SEQ ID NO: 512100 - DNA, 33 bp, Homo sapien
ttagtttttcaattcataaacggaataacattt

SEQ ID NO: 512101 - DNA, 33 bp, Homo sapien
caaacaatagatttgccgcaaaatactgcaaaa

SEQ ID NO: 512102 - DNA, 33 bp, Homo sapien
caaacaatagatttgctgcaaaatactgcaaaa

SEQ ID NO: 512103 - DNA, 33 bp, Homo sapien
tccagctcaatactaaagttgaatgtaaatgac

SEQ ID NO: 512104 - DNA, 33 bp, Homo sapien
tccagctcaatactaacgttgaatgtaaatgac

SEQ ID NO: 512105 - DNA, 33 bp, Homo sapien
gccagtgttttctatcccatcatctgtaagttt

SEQ ID NO: 512106 - DNA, 33 bp, Homo sapien
gccagtgttttctatctcatcatctgtaagttt

SEQ ID NO: 512107 - DNA, 33 bp, Homo sapien
aacagtaactatataactgcagtacttatttta

SEQ ID NO: 512108 - DNA, 33 bp, Homo sapien
aacagtaactatataattgcagtacttatttta

SEQ ID NO: 512109 - DNA, 33 bp, Homo sapien
tcaaagaaacccaagcaattgttatgaatagct

SEQ ID NO: 512110 - DNA, 33 bp, Homo sapien
tcaaagaaacccaagcgattgttatgaatagct

SEQ ID NO: 512111 - DNA, 33 bp, Homo sapien
aagtaactaacagctcaagatattttaaacttc

SEQ ID NO: 512112 - DNA, 33 bp, Homo sapien
aagtaactaacagctcgagatattttaaacttc

SEQ ID NO: 512113 - DNA, 33 bp, Homo sapien
ttaagttctttcgaaaatgtatatatcacatat

SEQ ID NO: 512114 - DNA, 33 bp, Homo sapien
ttaagttctttcgaaattgtatatatcacatat

SEQ ID NO: 512115 - DNA, 33 bp, Homo sapien
attttctgccatctttaaaaaaacataaaatac

SEQ ID NO: 512116 - DNA, 33 bp, Homo sapien
attttctgccatctttgaaaaaacataaaatac

SEQ ID NO: 512117 - DNA, 33 bp, Homo sapien
tggggtgagggataaagggttagagctacaaat

SEQ ID NO: 512118 - DNA, 33 bp, Homo sapien
tggggtgagggataaatggttagagctacaaat

SEQ ID NO: 512119 - DNA, 33 bp, Homo sapien
tctgaagtttgtgaacagatacactttcacctt

SEQ ID NO: 512120 - DNA, 33 bp, Homo sapien
tctgaagtttgtgaacggatacactttcacctt

SEQ ID NO: 512121 - DNA, 33 bp, Homo sapien
gtctgtgtttttgtcaactgtcctataccaaac

SEQ ID NO: 512122 - DNA, 33 bp, Homo sapien
gtctgtgtttttgtcatctgtcctataccaaac

SEQ ID NO: 512123 - DNA, 33 bp, Homo sapien
ctcttctacagaagaaaggagcttttatgctga

SEQ ID NO: 512124 - DNA, 33 bp, Homo sapien
ctcttctacagaagaacggagcttttatgctga

SEQ ID NO: 512125 - DNA, 33 bp, Homo sapien
caactgagcagtagtacagctgtgtcacaggcc

SEQ ID NO: 512126 - DNA, 33 bp, Homo sapien
caactgagcagtagtatagctgtgtcacaggcc

SEQ ID NO: 512127 - DNA, 33 bp, Homo sapien
agcagcttggcttacaaagaatggtttccgggt

SEQ ID NO: 512128 - DNA, 33 bp, Homo sapien
agcagcttggcttacagagaatggtttccgggt

SEQ ID NO: 512129 - DNA, 33 bp, Homo sapien
aaatccttctaggcaactatttggagatctctc

SEQ ID NO: 512130 - DNA, 33 bp, Homo sapien
aaatccttctaggcaattatttggagatctctc

SEQ ID NO: 512131 - DNA, 33 bp, Homo sapien
taaagacttaaatggacggctgaaactatgaaa

SEQ ID NO: 512132 - DNA, 33 bp, Homo sapien
taaagacttaaatggatggctgaaactatgaaa

SEQ ID NO: 512133 - DNA, 33 bp, Homo sapien
cacagaagagccaaacagagaagctatgattgt

SEQ ID NO: 512134 - DNA, 33 bp, Homo sapien
cacagaagagccaaacggagaagctatgattgt

SEQ ID NO: 512135 - DNA, 33 bp, Homo sapien
ttgtggattcataaggcaagcaggtaagcattg

SEQ ID NO: 512136 - DNA, 33 bp, Homo sapien
ttgtggattcataaggtaagcaggtaagcattg

SEQ ID NO: 512137 - DNA, 33 bp, Homo sapien
ggtcaaggatgttccacgattaactactagaga

SEQ ID NO: 512138 - DNA, 33 bp, Homo sapien
ggtcaaggatgttccatgattaactactagaga

SEQ ID NO: 512139 - DNA, 33 bp, Homo sapien
atacaaaatgtgtaaacaggtaattgaatacaa

SEQ ID NO: 512140 - DNA, 33 bp, Homo sapien
atacaaaatgtgtaaataggtaattgaatacaa

SEQ ID NO: 512141 - DNA, 33 bp, Homo sapien
tagttttttaaggacacattctcagagagagag

SEQ ID NO: 512142 - DNA, 33 bp, Homo sapien
tagttttttaaggacatattctcagagagagag

SEQ ID NO: 512143 - DNA, 33 bp, Homo sapien
gaaagtgatctggtaaatattcgactttgggta

SEQ ID NO: 512144 - DNA, 33 bp, Homo sapien
gaaagtgatctggtaagtattcgactttgggta

SEQ ID NO: 512145 - DNA, 33 bp, Homo sapien
tatttttgatgagtagcaaaagatggataaatt

SEQ ID NO: 512146 - DNA, 33 bp, Homo sapien
tatttttgatgagtagtaaaagatggataaatt

SEQ ID NO: 512147 - DNA, 33 bp, Homo sapien
atggttgtttatgataactgtaccaattcagag

SEQ ID NO: 512148 - DNA, 33 bp, Homo sapien
atggttgtttatgatagctgtaccaattcagag

SEQ ID NO: 512149 - DNA, 33 bp, Homo sapien
tatatagtgctgtgaacagagcaacaacttgcc

SEQ ID NO: 512150 - DNA, 33 bp, Homo sapien
tatatagtgctgtgaatagagcaacaacttgcc

SEQ ID NO: 512151 - DNA, 33 bp, Homo sapien
cacagaaaatgagaaacgattcaaaggatgtcc

SEQ ID NO: 512152 - DNA, 33 bp, Homo sapien
cacagaaaatgagaaatgattcaaaggatgtcc

SEQ ID NO: 512153 - DNA, 33 bp, Homo sapien
caatggtttagacatacaaacttctggattata

SEQ ID NO: 512154 - DNA, 33 bp, Homo sapien
caatggtttagacatagaaacttctggattata

SEQ ID NO: 512155 - DNA, 33 bp, Homo sapien
ccaaataaaataattcaccaacttcaataatcc

SEQ ID NO: 512156 - DNA, 33 bp, Homo sapien
ccaaataaaataattcgccaacttcaataatcc

SEQ ID NO: 512157 - DNA, 33 bp, Homo sapien
gtcaagttctctgctaacaatattgaaccaaat

SEQ ID NO: 512158 - DNA, 33 bp, Homo sapien
gtcaagttctctgctagcaatattgaaccaaat

SEQ ID NO: 512159 - DNA, 33 bp, Homo sapien
gccacttctacagcaacgatccaaatggctttt

SEQ ID NO: 512160 - DNA, 33 bp, Homo sapien
gccacttctacagcaatgatccaaatggctttt

SEQ ID NO: 512161 - DNA, 33 bp, Homo sapien
ccctagatcttactcaactcctatacatttctt

SEQ ID NO: 512162 - DNA, 33 bp, Homo sapien
ccctagatcttactcagctcctatacatttctt

SEQ ID NO: 512163 - DNA, 33 bp, Homo sapien
ggtactactgtgataacgagcaattcttttgga

SEQ ID NO: 512164 - DNA, 33 bp, Homo sapien
ggtactactgtgataatgagcaattcttttgga

SEQ ID NO: 512165 - DNA, 33 bp, Homo sapien
tagcccagacaaagccagacagatgattgattg

SEQ ID NO: 512166 - DNA, 33 bp, Homo sapien
tagcccagacaaagccggacagatgattgattg

SEQ ID NO: 512167 - DNA, 33 bp, Homo sapien
ctggatattcctcagacagtggaacactctgtc

SEQ ID NO: 512168 - DNA, 33 bp, Homo sapien
ctggatattcctcagatagtggaacactctgtc

SEQ ID NO: 512169 - DNA, 33 bp, Homo sapien
tggggtatacaagtgactaaatttgaaactact

SEQ ID NO: 512170 - DNA, 33 bp, Homo sapien
tggggtatacaagtgattaaatttgaaactact

SEQ ID NO: 512171 - DNA, 33 bp, Homo sapien
catgggtaaatataaaactccagaaaagctcat

SEQ ID NO: 512172 - DNA, 33 bp, Homo sapien
catgggtaaatataaagctccagaaaagctcat

SEQ ID NO: 512173 - DNA, 33 bp, Homo sapien
ggctgtgagggactccacaaatatttactgagc

SEQ ID NO: 512174 - DNA, 33 bp, Homo sapien
ggctgtgagggactccgcaaatatttactgagc

SEQ ID NO: 512175 - DNA, 33 bp, Homo sapien
attgaagacaatgaagaccatttcataaagaca

SEQ ID NO: 512176 - DNA, 33 bp, Homo sapien
attgaagacaatgaaggccatttcataaagaca

SEQ ID NO: 512177 - DNA, 33 bp, Homo sapien
ttttatggttcctcgacattctttaactagaaa

SEQ ID NO: 512178 - DNA, 33 bp, Homo sapien
ttttatggttcctcgatattctttaactagaaa

SEQ ID NO: 512179 - DNA, 33 bp, Homo sapien
taaaattaatactgcaaggaaacttcactacat

SEQ ID NO: 512180 - DNA, 33 bp, Homo sapien
taaaattaatactgcatggaaacttcactacat

SEQ ID NO: 512181 - DNA, 33 bp, Homo sapien
caatttgtattcaataggcttctggaagtctta

SEQ ID NO: 512182 - DNA, 33 bp, Homo sapien
caatttgtattcaatatgcttctggaagtctta

SEQ ID NO: 512183 - DNA, 33 bp, Homo sapien
ccctaacaatattttacatcatgatagatatta

SEQ ID NO: 512184 - DNA, 33 bp, Homo sapien
ccctaacaatattttagatcatgatagatatta

SEQ ID NO: 512185 - DNA, 33 bp, Homo sapien
ggatgcaaggaaaatcagagataataatacatt

SEQ ID NO: 512186 - DNA, 33 bp, Homo sapien
ggatgcaaggaaaatcggagataataatacatt

SEQ ID NO: 512187 - DNA, 33 bp, Homo sapien
gaacaaatgtgacaaacagcaaacagtttcaaa

SEQ ID NO: 512188 - DNA, 33 bp, Homo sapien
gaacaaatgtgacaaatagcaaacagtttcaaa

SEQ ID NO: 512189 - DNA, 33 bp, Homo sapien
gaggaagagactaacaaaagactcccttgactg

SEQ ID NO: 512190 - DNA, 33 bp, Homo sapien
gaggaagagactaacagaagactcccttgactg

SEQ ID NO: 512191 - DNA, 33 bp, Homo sapien
gaaattggtagtagaaacacactgtgtctgaaa

SEQ ID NO: 512192 - DNA, 33 bp, Homo sapien
gaaattggtagtagaagcacactgtgtctgaaa

SEQ ID NO: 512193 - DNA, 33 bp, Homo sapien
ttacagaatgtcctaaaaaggaaacatatgaaa

SEQ ID NO: 512194 - DNA, 33 bp, Homo sapien
ttacagaatgtcctaacaaggaaacatatgaaa

SEQ ID NO: 512195 - DNA, 33 bp, Homo sapien
cttttgaaaaccgagaaataattacaattttta

SEQ ID NO: 512196 - DNA, 33 bp, Homo sapien
cttttgaaaaccgagagataattacaattttta

SEQ ID NO: 512197 - DNA, 33 bp, Homo sapien
gtgtaccatcttatcaaagctcaaacaacattc

SEQ ID NO: 512198 - DNA, 33 bp, Homo sapien
gtgtaccatcttatcacagctcaaacaacattc

SEQ ID NO: 512199 - DNA, 33 bp, Homo sapien
tctctcacactatgaaaaggatagtttggaagg

SEQ ID NO: 512200 - DNA, 33 bp, Homo sapien
tctctcacactatgaagaggatagtttggaagg

SEQ ID NO: 512201 - DNA, 33 bp, Homo sapien
catgacagttgagctacgtgttgagacatgggc

SEQ ID NO: 512202 - DNA, 33 bp, Homo sapien
catgacagttgagctatgtgttgagacatgggc

SEQ ID NO: 512203 - DNA, 33 bp, Homo sapien
taaatccagaaaatgaataagactgacatgact

SEQ ID NO: 512204 - DNA, 33 bp, Homo sapien
taaatccagaaaatgagtaagactgacatgact

SEQ ID NO: 512205 - DNA, 33 bp, Homo sapien
gaagcattgctgagtaactgttgattttttatc

SEQ ID NO: 512206 - DNA, 33 bp, Homo sapien
gaagcattgctgagtatctgttgattttttatc

SEQ ID NO: 512207 - DNA, 33 bp, Homo sapien
ctagtagatgttgaaactaggacttgatcccag

SEQ ID NO: 512208 - DNA, 33 bp, Homo sapien
ctagtagatgttgaaagtaggacttgatcccag

SEQ ID NO: 512209 - DNA, 33 bp, Homo sapien
tcatattttaagcagaaagaacgttatcaggtt

SEQ ID NO: 512210 - DNA, 33 bp, Homo sapien
tcatattttaagcagagagaacgttatcaggtt

SEQ ID NO: 512211 - DNA, 33 bp, Homo sapien
cttttcttctgatagcacttttggcttgctact

SEQ ID NO: 512212 - DNA, 33 bp, Homo sapien
cttttcttctgatagcgcttttggcttgctact

SEQ ID NO: 512213 - DNA, 33 bp, Homo sapien
tgatccagaagactaaatagtgctgaaagcatc

SEQ ID NO: 512214 - DNA, 33 bp, Homo sapien
tgatccagaagactaagtagtgctgaaagcatc

SEQ ID NO: 512215 - DNA, 33 bp, Homo sapien
cctgaccttttaatgacgacctttctaactggt

SEQ ID NO: 512216 - DNA, 33 bp, Homo sapien
cctgaccttttaatgatgacctttctaactggt

SEQ ID NO: 512217 - DNA, 33 bp, Homo sapien
aactctgggaagtgcaatccacatgcaactcta

SEQ ID NO: 512218 - DNA, 33 bp, Homo sapien
aactctgggaagtgcagtccacatgcaactcta

SEQ ID NO: 512219 - DNA, 33 bp, Homo sapien
ctaagagagattgttaccactagaccagcccta

SEQ ID NO: 512220 - DNA, 33 bp, Homo sapien
ctaagagagattgttatcactagaccagcccta

SEQ ID NO: 512221 - DNA, 33 bp, Homo sapien
tgagggagagtaatgaacatctacattggattc

SEQ ID NO: 512222 - DNA, 33 bp, Homo sapien
tgagggagagtaatgagcatctacattggattc

SEQ ID NO: 512223 - DNA, 33 bp, Homo sapien
atgagactgcatggaacattagaacaggtagat

SEQ ID NO: 512224 - DNA, 33 bp, Homo sapien
atgagactgcatggaagattagaacaggtagat

SEQ ID NO: 512225 - DNA, 33 bp, Homo sapien
tatgatggtcgaatgacggcagatgctattggt

SEQ ID NO: 512226 - DNA, 33 bp, Homo sapien
tatgatggtcgaatgatggcagatgctattggt

SEQ ID NO: 512227 - DNA, 33 bp, Homo sapien
gataggagagaataaaagaaatcagattaaggg

SEQ ID NO: 512228 - DNA, 33 bp, Homo sapien
gataggagagaataaaggaaatcagattaaggg

SEQ ID NO: 512229 - DNA, 33 bp, Homo sapien
tggcatttagtcaaataattagtactgtcacat

SEQ ID NO: 512230 - DNA, 33 bp, Homo sapien
tggcatttagtcaaatgattagtactgtcacat

SEQ ID NO: 512231 - DNA, 33 bp, Homo sapien
cttaaataacctgggcaatgactcagagctgat

SEQ ID NO: 512232 - DNA, 33 bp, Homo sapien
cttaaataacctgggcgatgactcagagctgat

SEQ ID NO: 512233 - DNA, 33 bp, Homo sapien
atttctatattcatgcagagtaccagaggctta

SEQ ID NO: 512234 - DNA, 33 bp, Homo sapien
atttctatattcatgcggagtaccagaggctta

SEQ ID NO: 512235 - DNA, 33 bp, Homo sapien
ttatgccacaaccgtacaaaattcttaatgttt

SEQ ID NO: 512236 - DNA, 33 bp, Homo sapien
ttatgccacaaccgtataaaattcttaatgttt

SEQ ID NO: 512237 - DNA, 33 bp, Homo sapien
tcctcatggttaaaccaagtaataagttatcag

SEQ ID NO: 512238 - DNA, 33 bp, Homo sapien
tcctcatggttaaacccagtaataagttatcag

SEQ ID NO: 512239 - DNA, 33 bp, Homo sapien
ataaatgtgcaggatacagccaacagaattagg

SEQ ID NO: 512240 - DNA, 33 bp, Homo sapien
ataaatgtgcaggatagagccaacagaattagg

SEQ ID NO: 512241 - DNA, 33 bp, Homo sapien
ttgtttacagtgtgaaagatgaaacaagaagcc

SEQ ID NO: 512242 - DNA, 33 bp, Homo sapien
ttgtttacagtgtgaacgatgaaacaagaagcc

SEQ ID NO: 512243 - DNA, 33 bp, Homo sapien
agacatacgcaaagcaatgaaaaaagtgatttt

SEQ ID NO: 512244 - DNA, 33 bp, Homo sapien
agacatacgcaaagcactgaaaaaagtgatttt

SEQ ID NO: 512245 - DNA, 33 bp, Homo sapien
gaaatttgcataagtaacaatcttgctaatcac

SEQ ID NO: 512246 - DNA, 33 bp, Homo sapien
gaaatttgcataagtatcaatcttgctaatcac

SEQ ID NO: 512247 - DNA, 33 bp, Homo sapien
tctagagctgtgttgcacaaatatgtaagctac

SEQ ID NO: 512248 - DNA, 33 bp, Homo sapien
tctagagctgtgttgcgcaaatatgtaagctac

SEQ ID NO: 512249 - DNA, 33 bp, Homo sapien
agcttatgtgatgtacccttttagaagctaaaa

SEQ ID NO: 512250 - DNA, 33 bp, Homo sapien
agcttatgtgatgtactcttttagaagctaaaa

SEQ ID NO: 512251 - DNA, 33 bp, Homo sapien
gttttgtctctgccagcaagaaagggtttaagc

SEQ ID NO: 512252 - DNA, 33 bp, Homo sapien
gttttgtctctgccagtaagaaagggtttaagc

SEQ ID NO: 512253 - DNA, 33 bp, Homo sapien
aaaaagcaactctgtaccctttcgctgttgctg

SEQ ID NO: 512254 - DNA, 33 bp, Homo sapien
aaaaagcaactctgtatcctttcgctgttgctg

SEQ ID NO: 512255 - DNA, 33 bp, Homo sapien
catggctcgctcaatacgaatgtgctggaatgc

SEQ ID NO: 512256 - DNA, 33 bp, Homo sapien
catggctcgctcaatatgaatgtgctggaatgc

SEQ ID NO: 512257 - DNA, 33 bp, Homo sapien
gctacatcttagatacactgagaaggcatctgc

SEQ ID NO: 512258 - DNA, 33 bp, Homo sapien
gctacatcttagataccctgagaaggcatctgc

SEQ ID NO: 512259 - DNA, 33 bp, Homo sapien
cttcctgaaactcaccaaataacccgctagtca

SEQ ID NO: 512260 - DNA, 33 bp, Homo sapien
cttcctgaaactcacccaataacccgctagtca

SEQ ID NO: 512261 - DNA, 33 bp, Homo sapien
gattctcttacccataatagcccccaacactct

SEQ ID NO: 512262 - DNA, 33 bp, Homo sapien
gattctcttacccatagtagcccccaacactct

SEQ ID NO: 512263 - DNA, 33 bp, Homo sapien
gtgatgcttccattacaaagagctggtgtaaga

SEQ ID NO: 512264 - DNA, 33 bp, Homo sapien
gtgatgcttccattacgaagagctggtgtaaga

SEQ ID NO: 512265 - DNA, 33 bp, Homo sapien
ctacttgccaggaataaagtaagaagctcagtt

SEQ ID NO: 512266 - DNA, 33 bp, Homo sapien
ctacttgccaggaatagagtaagaagctcagtt

SEQ ID NO: 512267 - DNA, 33 bp, Homo sapien
tgcaacctgtaggaaagtcctttgtcttccctc

SEQ ID NO: 512268 - DNA, 33 bp, Homo sapien
tgcaacctgtaggaaattcctttgtcttccctc

SEQ ID NO: 512269 - DNA, 33 bp, Homo sapien
taagttatagtgaaagaccacgtgggagtacag

SEQ ID NO: 512270 - DNA, 33 bp, Homo sapien
taagttatagtgaaaggccacgtgggagtacag

SEQ ID NO: 512271 - DNA, 33 bp, Homo sapien
catctactattccaataaaattctaccagcatc

SEQ ID NO: 512272 - DNA, 33 bp, Homo sapien
catctactattccaatcaaattctaccagcatc

SEQ ID NO: 512273 - DNA, 33 bp, Homo sapien
gagaactgaattgatgcagtcacatagatgtct

SEQ ID NO: 512274 - DNA, 33 bp, Homo sapien
gagaactgaattgatggagtcacatagatgtct

SEQ ID NO: 512275 - DNA, 33 bp, Homo sapien
actctacttttttgggaaatcttgttctctact

SEQ ID NO: 512276 - DNA, 33 bp, Homo sapien
actctacttttttgggcaatcttgttctctact

SEQ ID NO: 512277 - DNA, 33 bp, Homo sapien
actgcaaacacaggagaagtgatttattcccaa

SEQ ID NO: 512278 - DNA, 33 bp, Homo sapien
actgcaaacacaggaggagtgatttattcccaa

SEQ ID NO: 512279 - DNA, 33 bp, Homo sapien
catcacatggagcttcgcaaatttaaaattaaa

SEQ ID NO: 512280 - DNA, 33 bp, Homo sapien
catcacatggagcttctcaaatttaaaattaaa

SEQ ID NO: 512281 - DNA, 33 bp, Homo sapien
ttgttttgtatcatggaaaatcctgacaacatg

SEQ ID NO: 512282 - DNA, 33 bp, Homo sapien
ttgttttgtatcatggcaaatcctgacaacatg

SEQ ID NO: 512283 - DNA, 33 bp, Homo sapien
actgtgaagcaagaacacttagaagcatctgcc

SEQ ID NO: 512284 - DNA, 33 bp, Homo sapien
actgtgaagcaagaacgcttagaagcatctgcc

SEQ ID NO: 512285 - DNA, 33 bp, Homo sapien
ctgagattgttggtaaactgacaaggtgcagcc

SEQ ID NO: 512286 - DNA, 33 bp, Homo sapien
ctgagattgttggtaacctgacaaggtgcagcc

SEQ ID NO: 512287 - DNA, 33 bp, Homo sapien
tcatcaaaacctaaccactagtcttaacagctg

SEQ ID NO: 512288 - DNA, 33 bp, Homo sapien
tcatcaaaacctaaccgctagtcttaacagctg

SEQ ID NO: 512289 - DNA, 33 bp, Homo sapien
tagaagatctacaaaaggtaaaagcaaatctac

SEQ ID NO: 512290 - DNA, 33 bp, Homo sapien
tagaagatctacaaaatgtaaaagcaaatctac

SEQ ID NO: 512291 - DNA, 33 bp, Homo sapien
cttctcaagtgcttccaattgcattttcctgta

SEQ ID NO: 512292 - DNA, 33 bp, Homo sapien
cttctcaagtgcttccgattgcattttcctgta

SEQ ID NO: 512293 - DNA, 33 bp, Homo sapien
ccagcgattggtcatacattttaacagatacaa

SEQ ID NO: 512294 - DNA, 33 bp, Homo sapien
ccagcgattggtcatatattttaacagatacaa

SEQ ID NO: 512295 - DNA, 33 bp, Homo sapien
agaccaaggaaaattgacaaatcacagctcttt

SEQ ID NO: 512296 - DNA, 33 bp, Homo sapien
agaccaaggaaaattgtcaaatcacagctcttt

SEQ ID NO: 512297 - DNA, 33 bp, Homo sapien
tgtgacacatttgtagccctggcaggaagcaag

SEQ ID NO: 512298 - DNA, 33 bp, Homo sapien
tgtgacacatttgtaggcctggcaggaagcaag

SEQ ID NO: 512299 - DNA, 33 bp, Homo sapien
tagcagaaatggcagaaaaatggaattgacaca

SEQ ID NO: 512300 - DNA, 33 bp, Homo sapien
tagcagaaatggcagagaaatggaattgacaca

SEQ ID NO: 512301 - DNA, 33 bp, Homo sapien
aggaaaatgttagcacaatcccttagagtacat

SEQ ID NO: 512302 - DNA, 33 bp, Homo sapien
aggaaaatgttagcactatcccttagagtacat

SEQ ID NO: 512303 - DNA, 33 bp, Homo sapien
agagtatatttctgaccggggtttgagcaaaag

SEQ ID NO: 512304 - DNA, 33 bp, Homo sapien
agagtatatttctgactggggtttgagcaaaag

SEQ ID NO: 512305 - DNA, 33 bp, Homo sapien
tgctagaaccaaaattcaacatggccaggactc

SEQ ID NO: 512306 - DNA, 33 bp, Homo sapien
tgctagaaccaaaatttaacatggccaggactc

SEQ ID NO: 512307 - DNA, 33 bp, Homo sapien
tagaatttgaaaggaagttatcacagtagctac

SEQ ID NO: 512308 - DNA, 33 bp, Homo sapien
tagaatttgaaaggaatttatcacagtagctac

SEQ ID NO: 512309 - DNA, 33 bp, Homo sapien
gaccaggagactgaacagtgtaggtccccatgg

SEQ ID NO: 512310 - DNA, 33 bp, Homo sapien
gaccaggagactgaacggtgtaggtccccatgg

SEQ ID NO: 512311 - DNA, 33 bp, Homo sapien
ttcatataagagatgacagttaattcaaatgtg

SEQ ID NO: 512312 - DNA, 33 bp, Homo sapien
ttcatataagagatgagagttaattcaaatgtg

SEQ ID NO: 512313 - DNA, 33 bp, Homo sapien
tgtaccatgatggagacatttccaattttaatt

SEQ ID NO: 512314 - DNA, 33 bp, Homo sapien
tgtaccatgatggagatatttccaattttaatt

SEQ ID NO: 512315 - DNA, 33 bp, Homo sapien
ctttatattaacgcatcaagcaatgagcccaca

SEQ ID NO: 512316 - DNA, 33 bp, Homo sapien
ctttatattaacgcattaagcaatgagcccaca

SEQ ID NO: 512317 - DNA, 33 bp, Homo sapien
gacaaggaatgtccacagtcactttgaatatct

SEQ ID NO: 512318 - DNA, 33 bp, Homo sapien
gacaaggaatgtccacggtcactttgaatatct

SEQ ID NO: 512319 - DNA, 33 bp, Homo sapien
tggttaaggccatgacaggaagtaggggtcaga

SEQ ID NO: 512320 - DNA, 33 bp, Homo sapien
tggttaaggccatgaccggaagtaggggtcaga

SEQ ID NO: 512321 - DNA, 33 bp, Homo sapien
tttgtggtcaaaataccctgtgtgtaaaattgt

SEQ ID NO: 512322 - DNA, 33 bp, Homo sapien
tttgtggtcaaaatacgctgtgtgtaaaattgt

SEQ ID NO: 512323 - DNA, 33 bp, Homo sapien
tctttccagagtctaagattcagcttgctgctt

SEQ ID NO: 512324 - DNA, 33 bp, Homo sapien
tctttccagagtctaatattcagcttgctgctt

SEQ ID NO: 512325 - DNA, 33 bp, Homo sapien
caaaacaaaggcaacaccaggccagtgagaagc

SEQ ID NO: 512326 - DNA, 33 bp, Homo sapien
caaaacaaaggcaacatcaggccagtgagaagc

SEQ ID NO: 512327 - DNA, 33 bp, Homo sapien
atttacatagagtagccctgaaagattgctcat

SEQ ID NO: 512328 - DNA, 33 bp, Homo sapien
atttacatagagtagctctgaaagattgctcat

SEQ ID NO: 512329 - DNA, 33 bp, Homo sapien
ggcttctttcaattcggataatgttttcaaggt

SEQ ID NO: 512330 - DNA, 33 bp, Homo sapien
ggcttctttcaattcgtataatgttttcaaggt

SEQ ID NO: 512331 - DNA, 33 bp, Homo sapien
gaaatcacaatgtggaactcctcaaggctatgc

SEQ ID NO: 512332 - DNA, 33 bp, Homo sapien
gaaatcacaatgtggacctcctcaaggctatgc

SEQ ID NO: 512333 - DNA, 33 bp, Homo sapien
gtaacaaatgctattccaagccctgtaatatat

SEQ ID NO: 512334 - DNA, 33 bp, Homo sapien
gtaacaaatgctattcgaagccctgtaatatat

SEQ ID NO: 512335 - DNA, 33 bp, Homo sapien
agagtataatgtcccacgctgaaagagaagact

SEQ ID NO: 512336 - DNA, 33 bp, Homo sapien
agagtataatgtcccaggctgaaagagaagact

SEQ ID NO: 512337 - DNA, 33 bp, Homo sapien
cgttcatcggacataacacgttttagtcaagaa

SEQ ID NO: 512338 - DNA, 33 bp, Homo sapien
cgttcatcggacataatacgttttagtcaagaa

SEQ ID NO: 512339 - DNA, 33 bp, Homo sapien
accaccatcaggctaaagtcaagattatgccag

SEQ ID NO: 512340 - DNA, 33 bp, Homo sapien
accaccatcaggctaacgtcaagattatgccag

SEQ ID NO: 512341 - DNA, 33 bp, Homo sapien
agtggtcacatattttaaaaaggcttgacaaat

SEQ ID NO: 512342 - DNA, 33 bp, Homo sapien
agtggtcacatatttttaaaaggcttgacaaat

SEQ ID NO: 512343 - DNA, 33 bp, Homo sapien
agatagttcacatcacaggactctatgcagaca

SEQ ID NO: 512344 - DNA, 33 bp, Homo sapien
agatagttcacatcactggactctatgcagaca

SEQ ID NO: 512345 - DNA, 33 bp, Homo sapien
tcataaagacctaacccctatgtcagggcacag

SEQ ID NO: 512346 - DNA, 33 bp, Homo sapien
tcataaagacctaaccgctatgtcagggcacag

SEQ ID NO: 512347 - DNA, 33 bp, Homo sapien
catgataaaaagacaaaacgtggtataaccata

SEQ ID NO: 512348 - DNA, 33 bp, Homo sapien
catgataaaaagacaacacgtggtataaccata

SEQ ID NO: 512349 - DNA, 33 bp, Homo sapien
aaacagaaactgaggcgctagtattttccatgc

SEQ ID NO: 512350 - DNA, 33 bp, Homo sapien
aaacagaaactgaggctctagtattttccatgc

SEQ ID NO: 512351 - DNA, 33 bp, Homo sapien
tagtttggaatataaacatgcagagtttctaaa

SEQ ID NO: 512352 - DNA, 33 bp, Homo sapien
tagtttggaatataaatatgcagagtttctaaa

SEQ ID NO: 512353 - DNA, 33 bp, Homo sapien
ctaagatacacataaacgctttgtagaaattga

SEQ ID NO: 512354 - DNA, 33 bp, Homo sapien
ctaagatacacataaatgctttgtagaaattga

SEQ ID NO: 512355 - DNA, 33 bp, Homo sapien
gattgctaaactattgaacagttcctacagtgt

SEQ ID NO: 512356 - DNA, 33 bp, Homo sapien
gattgctaaactattggacagttcctacagtgt

SEQ ID NO: 512357 - DNA, 33 bp, Homo sapien
ggcatccacaattattaaaactagccaatgcta

SEQ ID NO: 512358 - DNA, 33 bp, Homo sapien
ggcatccacaattattcaaactagccaatgcta

SEQ ID NO: 512359 - DNA, 33 bp, Homo sapien
tgcctcacactcataaatacttgatgtgtcctg

SEQ ID NO: 512360 - DNA, 33 bp, Homo sapien
tgcctcacactcataagtacttgatgtgtcctg

SEQ ID NO: 512361 - DNA, 33 bp, Homo sapien
ttccttgtcatggcaactaaattcagctacaaa

SEQ ID NO: 512362 - DNA, 33 bp, Homo sapien
ttccttgtcatggcaattaaattcagctacaaa

SEQ ID NO: 512363 - DNA, 33 bp, Homo sapien
aaacaaacataactaaagagaaagtcaaatgag

SEQ ID NO: 512364 - DNA, 33 bp, Homo sapien
aaacaaacataactaaggagaaagtcaaatgag

SEQ ID NO: 512365 - DNA, 33 bp, Homo sapien
aatataagcaacagcacgaaaagaatggaaatc

SEQ ID NO: 512366 - DNA, 33 bp, Homo sapien
aatataagcaacagcatgaaaagaatggaaatc

SEQ ID NO: 512367 - DNA, 33 bp, Homo sapien
tggaagtgacagaacagtctagacgagggaatg

SEQ ID NO: 512368 - DNA, 33 bp, Homo sapien
tggaagtgacagaacattctagacgagggaatg

SEQ ID NO: 512369 - DNA, 33 bp, Homo sapien
acctttcctgcaaatcaatgagagtcctgttca

SEQ ID NO: 512370 - DNA, 33 bp, Homo sapien
acctttcctgcaaatcgatgagagtcctgttca

SEQ ID NO: 512371 - DNA, 33 bp, Homo sapien
cccttttcatgaatccaatcattatttgtgtgg

SEQ ID NO: 512372 - DNA, 33 bp, Homo sapien
cccttttcatgaatccgatcattatttgtgtgg

SEQ ID NO: 512373 - DNA, 33 bp, Homo sapien
ctcaggaataacatcacggcaggcggaagtggg

SEQ ID NO: 512374 - DNA, 33 bp, Homo sapien
ctcaggaataacatcatggcaggcggaagtggg

SEQ ID NO: 512375 - DNA, 33 bp, Homo sapien
gagtaaagctgcatggaaggtgaataaaaattc

SEQ ID NO: 512376 - DNA, 33 bp, Homo sapien
gagtaaagctgcatggcaggtgaataaaaattc

SEQ ID NO: 512377 - DNA, 33 bp, Homo sapien
tgacatttcaaatcaacgtgaagtttttactat

SEQ ID NO: 512378 - DNA, 33 bp, Homo sapien
tgacatttcaaatcaatgtgaagtttttactat

SEQ ID NO: 512379 - DNA, 33 bp, Homo sapien
ggtatggatgaacggcacaagatgatggatagt

SEQ ID NO: 512380 - DNA, 33 bp, Homo sapien
ggtatggatgaacggcgcaagatgatggatagt

SEQ ID NO: 512381 - DNA, 33 bp, Homo sapien
tctgggggtggcggtaagtaacaaaagatgaag

SEQ ID NO: 512382 - DNA, 33 bp, Homo sapien
tctgggggtggcggtaggtaacaaaagatgaag

SEQ ID NO: 512383 - DNA, 33 bp, Homo sapien
caacctgaaaaggataagaatgtccatatcaca

SEQ ID NO: 512384 - DNA, 33 bp, Homo sapien
caacctgaaaaggatacgaatgtccatatcaca

SEQ ID NO: 512385 - DNA, 33 bp, Homo sapien
ttaaagcacacaaagtaaagggctgaatctgga

SEQ ID NO: 512386 - DNA, 33 bp, Homo sapien
ttaaagcacacaaagtgaagggctgaatctgga

SEQ ID NO: 512387 - DNA, 33 bp, Homo sapien
aggaaaaggctgtaccaagagcttattctgcat

SEQ ID NO: 512388 - DNA, 33 bp, Homo sapien
aggaaaaggctgtacccagagcttattctgcat

SEQ ID NO: 512389 - DNA, 33 bp, Homo sapien
tgagaccagatcagagaattcttcaagaaacat

SEQ ID NO: 512390 - DNA, 33 bp, Homo sapien
tgagaccagatcagagtattcttcaagaaacat

SEQ ID NO: 512391 - DNA, 33 bp, Homo sapien
gtatatggaggatggggatactcacaacagctt

SEQ ID NO: 512392 - DNA, 33 bp, Homo sapien
gtatatggaggatgggtatactcacaacagctt

SEQ ID NO: 512393 - DNA, 33 bp, Homo sapien
tttttagtatctgcaaactattccagtattcat

SEQ ID NO: 512394 - DNA, 33 bp, Homo sapien
tttttagtatctgcaatctattccagtattcat

SEQ ID NO: 512395 - DNA, 33 bp, Homo sapien
acttgcctgcaagtcaataaggggatggggaaa

SEQ ID NO: 512396 - DNA, 33 bp, Homo sapien
acttgcctgcaagtcagtaaggggatggggaaa

SEQ ID NO: 512397 - DNA, 33 bp, Homo sapien
aatgaggactccaatacgaagtgaatttgctga

SEQ ID NO: 512398 - DNA, 33 bp, Homo sapien
aatgaggactccaatatgaagtgaatttgctga

SEQ ID NO: 512399 - DNA, 33 bp, Homo sapien
aatagcgaagtgggtacaagcatgtttcattta

SEQ ID NO: 512400 - DNA, 33 bp, Homo sapien
aatagcgaagtgggtataagcatgtttcattta

SEQ ID NO: 512401 - DNA, 33 bp, Homo sapien
gaggtatgcctcctcaacatctaacttctgttt

SEQ ID NO: 512402 - DNA, 33 bp, Homo sapien
gaggtatgcctcctcagcatctaacttctgttt

SEQ ID NO: 512403 - DNA, 33 bp, Homo sapien
aagatcaacaaagccaagagctgattttgttaa

SEQ ID NO: 512404 - DNA, 33 bp, Homo sapien
aagatcaacaaagccaggagctgattttgttaa

SEQ ID NO: 512405 - DNA, 33 bp, Homo sapien
ctcttgattcctggaccgattaatcttggctat

SEQ ID NO: 512406 - DNA, 33 bp, Homo sapien
ctcttgattcctggactgattaatcttggctat

SEQ ID NO: 512407 - DNA, 33 bp, Homo sapien
atagtcaccatgtgtacgtaagctattaaactt

SEQ ID NO: 512408 - DNA, 33 bp, Homo sapien
atagtcaccatgtgtatgtaagctattaaactt

SEQ ID NO: 512409 - DNA, 33 bp, Homo sapien
tgtgaaatatagatgcaatagcaaacaatgggg

SEQ ID NO: 512410 - DNA, 33 bp, Homo sapien
tgtgaaatatagatgccatagcaaacaatgggg

SEQ ID NO: 512411 - DNA, 33 bp, Homo sapien
agtcatggaactggtaggtattcagcagggcac

SEQ ID NO: 512412 - DNA, 33 bp, Homo sapien
agtcatggaactggtatgtattcagcagggcac

SEQ ID NO: 512413 - DNA, 33 bp, Homo sapien
taaaacaaaagggtaccgcagacattgaataat

SEQ ID NO: 512414 - DNA, 33 bp, Homo sapien
taaaacaaaagggtactgcagacattgaataat

SEQ ID NO: 512415 - DNA, 33 bp, Homo sapien
acttcatttccactcaaggttaatcccaggtga

SEQ ID NO: 512416 - DNA, 33 bp, Homo sapien
acttcatttccactcagggttaatcccaggtga

SEQ ID NO: 512417 - DNA, 33 bp, Homo sapien
actgggagaagccacacctgtaggaattacaag

SEQ ID NO: 512418 - DNA, 33 bp, Homo sapien
actgggagaagccacatctgtaggaattacaag

SEQ ID NO: 512419 - DNA, 33 bp, Homo sapien
aatccacgaaaaagctaaaaattgaggtcagca

SEQ ID NO: 512420 - DNA, 33 bp, Homo sapien
aatccacgaaaaagctgaaaattgaggtcagca

SEQ ID NO: 512421 - DNA, 33 bp, Homo sapien
actcagaaacatacaacgaggtttgattccctg

SEQ ID NO: 512422 - DNA, 33 bp, Homo sapien
actcagaaacatacaatgaggtttgattccctg

SEQ ID NO: 512423 - DNA, 33 bp, Homo sapien
ttcccttttctgtctacgtcacaatgactcaac

SEQ ID NO: 512424 - DNA, 33 bp, Homo sapien
ttcccttttctgtctatgtcacaatgactcaac

SEQ ID NO: 512425 - DNA, 33 bp, Homo sapien
ccttgagtcctatacaagtggctccacaattac

SEQ ID NO: 512426 - DNA, 33 bp, Homo sapien
ccttgagtcctatacatgtggctccacaattac

SEQ ID NO: 512427 - DNA, 33 bp, Homo sapien
tctgggtgcttgttccacttccttgtgcattcc

SEQ ID NO: 512428 - DNA, 33 bp, Homo sapien
tctgggtgcttgttccgcttccttgtgcattcc

SEQ ID NO: 512429 - DNA, 33 bp, Homo sapien
gtgaccttcaaagatgaacaattttgacctagt

SEQ ID NO: 512430 - DNA, 33 bp, Homo sapien
gtgaccttcaaagatgcacaattttgacctagt

SEQ ID NO: 512431 - DNA, 33 bp, Homo sapien
ggaattaaaatgaatacgcgaagtgtggataac

SEQ ID NO: 512432 - DNA, 33 bp, Homo sapien
ggaattaaaatgaatatgcgaagtgtggataac

SEQ ID NO: 512433 - DNA, 33 bp, Homo sapien
gtgcttaaggacaggaaggataaacagggttgt

SEQ ID NO: 512434 - DNA, 33 bp, Homo sapien
gtgcttaaggacaggagggataaacagggttgt

SEQ ID NO: 512435 - DNA, 33 bp, Homo sapien
aatgaattctgacatgaaaaatacaagaatatg

SEQ ID NO: 512436 - DNA, 33 bp, Homo sapien
aatgaattctgacatggaaaatacaagaatatg

SEQ ID NO: 512437 - DNA, 33 bp, Homo sapien
aaatatactaactggacgaatcagcctattgat

SEQ ID NO: 512438 - DNA, 33 bp, Homo sapien
aaatatactaactggatgaatcagcctattgat

SEQ ID NO: 512439 - DNA, 33 bp, Homo sapien
tgagacatctaaaaagaactccatccagcgttc

SEQ ID NO: 512440 - DNA, 33 bp, Homo sapien
tgagacatctaaaaagtactccatccagcgttc

SEQ ID NO: 512441 - DNA, 33 bp, Homo sapien
ttaattattactctgaagaatttgaaccaaaga

SEQ ID NO: 512442 - DNA, 33 bp, Homo sapien
ttaattattactctgaggaatttgaaccaaaga

SEQ ID NO: 512443 - DNA, 33 bp, Homo sapien
cttcatcatgaacagacatgagaggatacaata

SEQ ID NO: 512444 - DNA, 33 bp, Homo sapien
cttcatcatgaacagatatgagaggatacaata

SEQ ID NO: 512445 - DNA, 33 bp, Homo sapien
tttttaatattgtagaacccttctgctttgatt

SEQ ID NO: 512446 - DNA, 33 bp, Homo sapien
tttttaatattgtagaccccttctgctttgatt

SEQ ID NO: 512447 - DNA, 33 bp, Homo sapien
ggaaggattctcctcaaagttatagaggaagca

SEQ ID NO: 512448 - DNA, 33 bp, Homo sapien
ggaaggattctcctcagagttatagaggaagca

SEQ ID NO: 512449 - DNA, 33 bp, Homo sapien
tctctcagcgttgctcaacaggatagcagcatc

SEQ ID NO: 512450 - DNA, 33 bp, Homo sapien
tctctcagcgttgctcgacaggatagcagcatc

SEQ ID NO: 512451 - DNA, 33 bp, Homo sapien
tattccttactggaggaaaatggtttaggtcag

SEQ ID NO: 512452 - DNA, 33 bp, Homo sapien
tattccttactggaggtaaatggtttaggtcag

SEQ ID NO: 512453 - DNA, 33 bp, Homo sapien
ggggcatttgagaagacgaaacactaagcacag

SEQ ID NO: 512454 - DNA, 33 bp, Homo sapien
ggggcatttgagaagatgaaacactaagcacag

SEQ ID NO: 512455 - DNA, 33 bp, Homo sapien
ttataaattaccattccgaaactgaaatagtgc

SEQ ID NO: 512456 - DNA, 33 bp, Homo sapien
ttataaattaccattctgaaactgaaatagtgc

SEQ ID NO: 512457 - DNA, 33 bp, Homo sapien
atgttatatcttgtcaactactttcttgaacat

SEQ ID NO: 512458 - DNA, 33 bp, Homo sapien
atgttatatcttgtcatctactttcttgaacat

SEQ ID NO: 512459 - DNA, 33 bp, Homo sapien
actttagtgacagtctcagaaagttgtggggtt

SEQ ID NO: 512460 - DNA, 33 bp, Homo sapien
actttagtgacagtctgagaaagttgtggggtt

SEQ ID NO: 512461 - DNA, 33 bp, Homo sapien
agagttgatgtagaacaggtattaattcttctc

SEQ ID NO: 512462 - DNA, 33 bp, Homo sapien
agagttgatgtagaacgggtattaattcttctc

SEQ ID NO: 512463 - DNA, 33 bp, Homo sapien
aagtaaacaaatataaagatggctaattgagct

SEQ ID NO: 512464 - DNA, 33 bp, Homo sapien
aagtaaacaaatataacgatggctaattgagct

SEQ ID NO: 512465 - DNA, 33 bp, Homo sapien
gagcttaggcacttaaaagggctctgtttttgt

SEQ ID NO: 512466 - DNA, 33 bp, Homo sapien
gagcttaggcacttaagagggctctgtttttgt

SEQ ID NO: 512467 - DNA, 33 bp, Homo sapien
gacactgttaagcatcactcctcagacccccaa

SEQ ID NO: 512468 - DNA, 33 bp, Homo sapien
gacactgttaagcatcgctcctcagacccccaa

SEQ ID NO: 512469 - DNA, 33 bp, Homo sapien
aaaaagggcaacattagctggaggaacacgtgg

SEQ ID NO: 512470 - DNA, 33 bp, Homo sapien
aaaaagggcaacattatctggaggaacacgtgg

SEQ ID NO: 512471 - DNA, 33 bp, Homo sapien
aaataagagcataaccacacctggcggcatata

SEQ ID NO: 512472 - DNA, 33 bp, Homo sapien
aaataagagcataaccgcacctggcggcatata

SEQ ID NO: 512473 - DNA, 33 bp, Homo sapien
caaaaggcaattatggaattcacagttattatt

SEQ ID NO: 512474 - DNA, 33 bp, Homo sapien
caaaaggcaattatgggattcacagttattatt

SEQ ID NO: 512475 - DNA, 33 bp, Homo sapien
gcacttccagagagctgaacgagttgctcagga

SEQ ID NO: 512476 - DNA, 33 bp, Homo sapien
gcacttccagagagcttaacgagttgctcagga

SEQ ID NO: 512477 - DNA, 33 bp, Homo sapien
attttccaaaaataataaatgcatgcatgaaac

SEQ ID NO: 512478 - DNA, 33 bp, Homo sapien
attttccaaaaataatgaatgcatgcatgaaac

SEQ ID NO: 512479 - DNA, 33 bp, Homo sapien
cagtgtgttacgtaagaaatgcctgtgtactgc

SEQ ID NO: 512480 - DNA, 33 bp, Homo sapien
cagtgtgttacgtaagcaatgcctgtgtactgc

SEQ ID NO: 512481 - DNA, 33 bp, Homo sapien
acgttgcctataccacaagactgggaatcagag

SEQ ID NO: 512482 - DNA, 33 bp, Homo sapien
acgttgcctataccactagactgggaatcagag

SEQ ID NO: 512483 - DNA, 33 bp, Homo sapien
agtgaaatagcaatacaatgagcataagtaact

SEQ ID NO: 512484 - DNA, 33 bp, Homo sapien
agtgaaatagcaatacgatgagcataagtaact

SEQ ID NO: 512485 - DNA, 33 bp, Homo sapien
tcagtgccaggagggaataactagttttacgta

SEQ ID NO: 512486 - DNA, 33 bp, Homo sapien
tcagtgccaggagggagtaactagttttacgta

SEQ ID NO: 512487 - DNA, 33 bp, Homo sapien
gtctgaacaatgccaacgttaccttttcatatt

SEQ ID NO: 512488 - DNA, 33 bp, Homo sapien
gtctgaacaatgccaatgttaccttttcatatt

SEQ ID NO: 512489 - DNA, 33 bp, Homo sapien
aatgttgtacatttagccctgataaccaccaga

SEQ ID NO: 512490 - DNA, 33 bp, Homo sapien
aatgttgtacatttagtcctgataaccaccaga

SEQ ID NO: 512491 - DNA, 33 bp, Homo sapien
gtttgtcagtaaggcactcaatcgccttgattt

SEQ ID NO: 512492 - DNA, 33 bp, Homo sapien
gtttgtcagtaaggcattcaatcgccttgattt

SEQ ID NO: 512493 - DNA, 33 bp, Homo sapien
aaagaatggtcatgtcccttgcaacaacagaga

SEQ ID NO: 512494 - DNA, 33 bp, Homo sapien
aaagaatggtcatgtcgcttgcaacaacagaga

SEQ ID NO: 512495 - DNA, 33 bp, Homo sapien
agttctctttcttacaacaaagacctcctagac

SEQ ID NO: 512496 - DNA, 33 bp, Homo sapien
agttctctttcttacagcaaagacctcctagac

SEQ ID NO: 512497 - DNA, 33 bp, Homo sapien
ctcatttcatggatcaatacaagataatccaga

SEQ ID NO: 512498 - DNA, 33 bp, Homo sapien
ctcatttcatggatcagtacaagataatccaga

SEQ ID NO: 512499 - DNA, 33 bp, Homo sapien
tggttagtctgggaaaacattttaagagacaaa

SEQ ID NO: 512500 - DNA, 33 bp, Homo sapien
tggttagtctgggaaagcattttaagagacaaa

SEQ ID NO: 512501 - DNA, 33 bp, Homo sapien
tctgtgcaagggaaaaccttcactaatgagtct

SEQ ID NO: 512502 - DNA, 33 bp, Homo sapien
tctgtgcaagggaaaatcttcactaatgagtct

SEQ ID NO: 512503 - DNA, 33 bp, Homo sapien
cacccttcaaagtcacacaaccaattctgaatt

SEQ ID NO: 512504 - DNA, 33 bp, Homo sapien
cacccttcaaagtcacgcaaccaattctgaatt

SEQ ID NO: 512505 - DNA, 33 bp, Homo sapien
gcaaaatttaattcataaaatgtagccactact

SEQ ID NO: 512506 - DNA, 33 bp, Homo sapien
gcaaaatttaattcatgaaatgtagccactact

SEQ ID NO: 512507 - DNA, 33 bp, Homo sapien
cagaaatccaataatacagatgtgcacaatcca

SEQ ID NO: 512508 - DNA, 33 bp, Homo sapien
cagaaatccaataatatagatgtgcacaatcca

SEQ ID NO: 512509 - DNA, 33 bp, Homo sapien
agaagggcagactcataagagacactcttctcc

SEQ ID NO: 512510 - DNA, 33 bp, Homo sapien
agaagggcagactcatgagagacactcttctcc

SEQ ID NO: 512511 - DNA, 33 bp, Homo sapien
ctcgccgcatattggacattgtggaacaactaa

SEQ ID NO: 512512 - DNA, 33 bp, Homo sapien
ctcgccgcatattggatattgtggaacaactaa

SEQ ID NO: 512513 - DNA, 33 bp, Homo sapien
tgacatcaacttttcaatattttaaggatgcaa

SEQ ID NO: 512514 - DNA, 33 bp, Homo sapien
tgacatcaacttttcagtattttaaggatgcaa

SEQ ID NO: 512515 - DNA, 33 bp, Homo sapien
tgtgaaagctttgtccacggttttcatattacg

SEQ ID NO: 512516 - DNA, 33 bp, Homo sapien
tgtgaaagctttgtccgcggttttcatattacg

SEQ ID NO: 512517 - DNA, 33 bp, Homo sapien
aatttagatgctttcccgagcagagattcaatg

SEQ ID NO: 512518 - DNA, 33 bp, Homo sapien
aatttagatgctttcctgagcagagattcaatg

SEQ ID NO: 512519 - DNA, 33 bp, Homo sapien
aacagctaataacaaaacactgtggatattaca

SEQ ID NO: 512520 - DNA, 33 bp, Homo sapien
aacagctaataacaaagcactgtggatattaca

SEQ ID NO: 512521 - DNA, 33 bp, Homo sapien
gtgtgatcacatggccaagctccgtgcctctct

SEQ ID NO: 512522 - DNA, 33 bp, Homo sapien
gtgtgatcacatggccgagctccgtgcctctct

SEQ ID NO: 512523 - DNA, 33 bp, Homo sapien
tctggtgggaagagaccactcgacttcagagaa

SEQ ID NO: 512524 - DNA, 33 bp, Homo sapien
tctggtgggaagagactactcgacttcagagaa

SEQ ID NO: 512525 - DNA, 33 bp, Homo sapien
caaaaatgaaagtaaaataagtgcatctttaga

SEQ ID NO: 512526 - DNA, 33 bp, Homo sapien
caaaaatgaaagtaaactaagtgcatctttaga

SEQ ID NO: 512527 - DNA, 33 bp, Homo sapien
gggcttttctggaagaatatgtggtctgagaaa

SEQ ID NO: 512528 - DNA, 33 bp, Homo sapien
gggcttttctggaagagtatgtggtctgagaaa

SEQ ID NO: 512529 - DNA, 33 bp, Homo sapien
atgagatgaaagttggacagcatggtgaaagca

SEQ ID NO: 512530 - DNA, 33 bp, Homo sapien
atgagatgaaagttgggcagcatggtgaaagca

SEQ ID NO: 512531 - DNA, 33 bp, Homo sapien
tagcatcattacaaggaagaaggaacccaggag

SEQ ID NO: 512532 - DNA, 33 bp, Homo sapien
tagcatcattacaagggagaaggaacccaggag

SEQ ID NO: 512533 - DNA, 33 bp, Homo sapien
ggatgtggacttgtgaaggttcatgttatgagt

SEQ ID NO: 512534 - DNA, 33 bp, Homo sapien
ggatgtggacttgtgagggttcatgttatgagt

SEQ ID NO: 512535 - DNA, 33 bp, Homo sapien
tcacaaatacaaaattcaaagtcttatctggga

SEQ ID NO: 512536 - DNA, 33 bp, Homo sapien
tcacaaatacaaaattgaaagtcttatctggga

SEQ ID NO: 512537 - DNA, 33 bp, Homo sapien
tttgtacttatttctacattccgagcataaaga

SEQ ID NO: 512538 - DNA, 33 bp, Homo sapien
tttgtacttatttctagattccgagcataaaga

SEQ ID NO: 512539 - DNA, 33 bp, Homo sapien
aatgccagtaagacaaattagcaagaacatttt

SEQ ID NO: 512540 - DNA, 33 bp, Homo sapien
aatgccagtaagacaatttagcaagaacatttt

SEQ ID NO: 512541 - DNA, 33 bp, Homo sapien
tcactagcccatgcaccgtatcaaacaattcat

SEQ ID NO: 512542 - DNA, 33 bp, Homo sapien
tcactagcccatgcactgtatcaaacaattcat

SEQ ID NO: 512543 - DNA, 33 bp, Homo sapien
aattggaaccttccaacgttgctgatgcaaaga

SEQ ID NO: 512544 - DNA, 33 bp, Homo sapien
aattggaaccttccaatgttgctgatgcaaaga

SEQ ID NO: 512545 - DNA, 33 bp, Homo sapien
ttggcatttgttaaccactttttttctgcatct

SEQ ID NO: 512546 - DNA, 33 bp, Homo sapien
ttggcatttgttaaccgctttttttctgcatct

SEQ ID NO: 512547 - DNA, 33 bp, Homo sapien
catcgtccttgactcacgaagaagcagccagtg

SEQ ID NO: 512548 - DNA, 33 bp, Homo sapien
catcgtccttgactcatgaagaagcagccagtg

SEQ ID NO: 512549 - DNA, 33 bp, Homo sapien
aattaagtgccccttacgcgtttagtccaaagt

SEQ ID NO: 512550 - DNA, 33 bp, Homo sapien
aattaagtgccccttatgcgtttagtccaaagt

SEQ ID NO: 512551 - DNA, 33 bp, Homo sapien
cccctcttgataccttcaagcaaagaaatcaga

SEQ ID NO: 512552 - DNA, 33 bp, Homo sapien
cccctcttgatacctttaagcaaagaaatcaga

SEQ ID NO: 512553 - DNA, 33 bp, Homo sapien
ttttttttgtgacataagtatgccttaaattac

SEQ ID NO: 512554 - DNA, 33 bp, Homo sapien
ttttttttgtgacataggtatgccttaaattac

SEQ ID NO: 512555 - DNA, 33 bp, Homo sapien
gacagaagcacatacacaaagcacggaaatgag

SEQ ID NO: 512556 - DNA, 33 bp, Homo sapien
gacagaagcacatacagaaagcacggaaatgag

SEQ ID NO: 512557 - DNA, 33 bp, Homo sapien
caatataattagtagacaaagatgttaaatcag

SEQ ID NO: 512558 - DNA, 33 bp, Homo sapien
caatataattagtagataaagatgttaaatcag

SEQ ID NO: 512559 - DNA, 33 bp, Homo sapien
ctctcataattgcataaagcctaataactatca

SEQ ID NO: 512560 - DNA, 33 bp, Homo sapien
ctctcataattgcatagagcctaataactatca

SEQ ID NO: 512561 - DNA, 33 bp, Homo sapien
tgacaaacttttgaaaatggagaacgcattagt

SEQ ID NO: 512562 - DNA, 33 bp, Homo sapien
tgacaaacttttgaaagtggagaacgcattagt

SEQ ID NO: 512563 - DNA, 33 bp, Homo sapien
gaaggcccaggtaagacgcatgctcagaaaggg

SEQ ID NO: 512564 - DNA, 33 bp, Homo sapien
gaaggcccaggtaagatgcatgctcagaaaggg

SEQ ID NO: 512565 - DNA, 33 bp, Homo sapien
tatagtgcaaggtagacgtcaatgttaattttt

SEQ ID NO: 512566 - DNA, 33 bp, Homo sapien
tatagtgcaaggtagatgtcaatgttaattttt

SEQ ID NO: 512567 - DNA, 33 bp, Homo sapien
tcctccactttgcaaacctgtaaggtcattttg

SEQ ID NO: 512568 - DNA, 33 bp, Homo sapien
tcctccactttgcaaatctgtaaggtcattttg

SEQ ID NO: 512569 - DNA, 33 bp, Homo sapien
ccccagaaaggcctgaactctctgtcttcacat

SEQ ID NO: 512570 - DNA, 33 bp, Homo sapien
ccccagaaaggcctgagctctctgtcttcacat

SEQ ID NO: 512571 - DNA, 33 bp, Homo sapien
ttgctgatataatttacggaatagttacaggat

SEQ ID NO: 512572 - DNA, 33 bp, Homo sapien
ttgctgatataatttatggaatagttacaggat

SEQ ID NO: 512573 - DNA, 33 bp, Homo sapien
ggtaatgtctgtttctaaaactatatggggata

SEQ ID NO: 512574 - DNA, 33 bp, Homo sapien
ggtaatgtctgtttcttaaactatatggggata

SEQ ID NO: 512575 - DNA, 33 bp, Homo sapien
acctgagtcgtgtaccaatgaaggccccaaatg

SEQ ID NO: 512576 - DNA, 33 bp, Homo sapien
acctgagtcgtgtaccgatgaaggccccaaatg

SEQ ID NO: 512577 - DNA, 33 bp, Homo sapien
aaacagatgatgtatgcagagagaaatgtgcct

SEQ ID NO: 512578 - DNA, 33 bp, Homo sapien
aaacagatgatgtatgtagagagaaatgtgcct

SEQ ID NO: 512579 - DNA, 33 bp, Homo sapien
gaaagcctaagtcacaatgcctgccacagtgag

SEQ ID NO: 512580 - DNA, 33 bp, Homo sapien
gaaagcctaagtcacagtgcctgccacagtgag

SEQ ID NO: 512581 - DNA, 33 bp, Homo sapien
aaacaggagctatttgaataatgactttgcaga

SEQ ID NO: 512582 - DNA, 33 bp, Homo sapien
aaacaggagctatttggataatgactttgcaga

SEQ ID NO: 512583 - DNA, 33 bp, Homo sapien
gacacgggccaggcaacggcgatttccacatac

SEQ ID NO: 512584 - DNA, 33 bp, Homo sapien
gacacgggccaggcaatggcgatttccacatac

SEQ ID NO: 512585 - DNA, 33 bp, Homo sapien
aattaggaaagggtgcacaattaggaaaggaaa

SEQ ID NO: 512586 - DNA, 33 bp, Homo sapien
aattaggaaagggtgcgcaattaggaaaggaaa

SEQ ID NO: 512587 - DNA, 33 bp, Homo sapien
agggcgctgtaattcaatcactcccaatggttt

SEQ ID NO: 512588 - DNA, 33 bp, Homo sapien
agggcgctgtaattcagtcactcccaatggttt

SEQ ID NO: 512589 - DNA, 33 bp, Homo sapien
gtccaatctaaagttcaatttgcatgtcaggag

SEQ ID NO: 512590 - DNA, 33 bp, Homo sapien
gtccaatctaaagttcgatttgcatgtcaggag

SEQ ID NO: 512591 - DNA, 33 bp, Homo sapien
gtgagtgaccaaaggaactactacttgtgggac

SEQ ID NO: 512592 - DNA, 33 bp, Homo sapien
gtgagtgaccaaaggacctactacttgtgggac

SEQ ID NO: 512593 - DNA, 33 bp, Homo sapien
ttgattgccaatggtcaatgatcgagaccaggg

SEQ ID NO: 512594 - DNA, 33 bp, Homo sapien
ttgattgccaatggtcgatgatcgagaccaggg

SEQ ID NO: 512595 - DNA, 33 bp, Homo sapien
agagggatgtacattacgttttttggtaaaatc

SEQ ID NO: 512596 - DNA, 33 bp, Homo sapien
agagggatgtacattaggttttttggtaaaatc

SEQ ID NO: 512597 - DNA, 33 bp, Homo sapien
ggccggcctggcggaaatgggtcctctccgctc

SEQ ID NO: 512598 - DNA, 33 bp, Homo sapien
ggccggcctggcggaagtgggtcctctccgctc

SEQ ID NO: 512599 - DNA, 33 bp, Homo sapien
tttactgatacactccagagggattcattgcag

SEQ ID NO: 512600 - DNA, 33 bp, Homo sapien
tttactgatacactccggagggattcattgcag

SEQ ID NO: 512601 - DNA, 33 bp, Homo sapien
aatccttcgctagggacgagcacacgagggtcc

SEQ ID NO: 512602 - DNA, 33 bp, Homo sapien
aatccttcgctagggatgagcacacgagggtcc

SEQ ID NO: 512603 - DNA, 33 bp, Homo sapien
gtggtgaccaggctcgcaggaaaggatgcctgt

SEQ ID NO: 512604 - DNA, 33 bp, Homo sapien
gtggtgaccaggctcgtaggaaaggatgcctgt

SEQ ID NO: 512605 - DNA, 33 bp, Homo sapien
aacccttgagttctcacggagccctctctggct

SEQ ID NO: 512606 - DNA, 33 bp, Homo sapien
aacccttgagttctcatggagccctctctggct

SEQ ID NO: 512607 - DNA, 33 bp, Homo sapien
gatttttacctctttacggtgtttcctcacttc

SEQ ID NO: 512608 - DNA, 33 bp, Homo sapien
gatttttacctctttatggtgtttcctcacttc

SEQ ID NO: 512609 - DNA, 33 bp, Homo sapien
accaggttaggcaaagaatgtgtggacacgaga

SEQ ID NO: 512610 - DNA, 33 bp, Homo sapien
accaggttaggcaaaggatgtgtggacacgaga

SEQ ID NO: 512611 - DNA, 33 bp, Homo sapien
ctgccatcaggagcacactgtgtaaccgacaag

SEQ ID NO: 512612 - DNA, 33 bp, Homo sapien
ctgccatcaggagcacgctgtgtaaccgacaag

SEQ ID NO: 512613 - DNA, 33 bp, Homo sapien
ccttagaaattttccacgtaaagaccagcattt

SEQ ID NO: 512614 - DNA, 33 bp, Homo sapien
ccttagaaattttccaggtaaagaccagcattt

SEQ ID NO: 512615 - DNA, 33 bp, Homo sapien
cccattacaatggctccacataataaaacagag

SEQ ID NO: 512616 - DNA, 33 bp, Homo sapien
cccattacaatggctctacataataaaacagag

SEQ ID NO: 512617 - DNA, 33 bp, Homo sapien
tagacttttccaatcaacaagcacctcaaagtt

SEQ ID NO: 512618 - DNA, 33 bp, Homo sapien
tagacttttccaatcaccaagcacctcaaagtt

SEQ ID NO: 512619 - DNA, 33 bp, Homo sapien
ccacttgaacttgctacggcccttgcttcaggt

SEQ ID NO: 512620 - DNA, 33 bp, Homo sapien
ccacttgaacttgctatggcccttgcttcaggt

SEQ ID NO: 512621 - DNA, 33 bp, Homo sapien
atccgatatcaggtcacgacttggccagtgctc

SEQ ID NO: 512622 - DNA, 33 bp, Homo sapien
atccgatatcaggtcaggacttggccagtgctc

SEQ ID NO: 512623 - DNA, 33 bp, Homo sapien; identical to SEQ ID NO: 512621

SEQ ID NO: 512624 - DNA, 33 bp, Homo sapien; identical to SEQ ID NO: 512622

SEQ ID NO: 512625 - DNA, 33 bp, Homo sapien
aagaatgtttgtttaccgctgcacacagttgct

SEQ ID NO: 512626 - DNA, 33 bp, Homo sapien
aagaatgtttgtttacggctgcacacagttgct

SEQ ID NO: 512627 - DNA, 33 bp, Homo sapien
cttgggccagttgcacagtatataagggcttga

SEQ ID NO: 512628 - DNA, 33 bp, Homo sapien
cttgggccagttgcacggtatataagggcttga

SEQ ID NO: 512629 - DNA, 33 bp, Homo sapien
ccaggcaggatgggccaagtcatgtgaaattca

SEQ ID NO: 512630 - DNA, 33 bp, Homo sapien
ccaggcaggatgggccgagtcatgtgaaattca

SEQ ID NO: 512631 - DNA, 33 bp, Homo sapien
atgctgacatgctaaactgcaaacattaaaatg

SEQ ID NO: 512632 - DNA, 33 bp, Homo sapien
atgctgacatgctaaattgcaaacattaaaatg

SEQ ID NO: 512633 - DNA, 33 bp, Homo sapien
cttcatctccaagttacacgtgggtgatgtggg

SEQ ID NO: 512634 - DNA, 33 bp, Homo sapien
cttcatctccaagttagacgtgggtgatgtggg

SEQ ID NO: 512635 - DNA, 33 bp, Homo sapien
atgagtgtttggaagccaactagggtgggactg

SEQ ID NO: 512636 - DNA, 33 bp, Homo sapien
atgagtgtttggaagcgaactagggtgggactg

SEQ ID NO: 512637 - DNA, 33 bp, Homo sapien
tgggtgagctttctaacgtttattttctctata

SEQ ID NO: 512638 - DNA, 33 bp, Homo sapien
tgggtgagctttctaatgtttattttctctata

SEQ ID NO: 512639 - DNA, 33 bp, Homo sapien
agctagcattttctaacacattgtgtagttatt

SEQ ID NO: 512640 - DNA, 33 bp, Homo sapien
agctagcattttctaatacattgtgtagttatt

SEQ ID NO: 512641 - DNA, 33 bp, Homo sapien
tgtggggtatctctgaaaacatgtttgccctgc

SEQ ID NO: 512642 - DNA, 33 bp, Homo sapien
tgtggggtatctctgagaacatgtttgccctgc

SEQ ID NO: 512643 - DNA, 33 bp, Homo sapien
ccatagtgggagaacacaccttcattccaagtc

SEQ ID NO: 512644 - DNA, 33 bp, Homo sapien
ccatagtgggagaacataccttcattccaagtc

SEQ ID NO: 512645 - DNA, 33 bp, Homo sapien
ctctccctatagttagaaagctttattgccatt

SEQ ID NO: 512646 - DNA, 33 bp, Homo sapien
ctctccctatagttagcaagctttattgccatt

SEQ ID NO: 512647 - DNA, 33 bp, Homo sapien
gttatcagttatctgaactagcaaatggaggat

SEQ ID NO: 512648 - DNA, 33 bp, Homo sapien
gttatcagttatctgagctagcaaatggaggat

SEQ ID NO: 512649 - DNA, 33 bp, Homo sapien
ttctatgtgtgtgcataagactcagtgtggagt

SEQ ID NO: 512650 - DNA, 33 bp, Homo sapien
ttctatgtgtgtgcatgagactcagtgtggagt

SEQ ID NO: 512651 - DNA, 33 bp, Homo sapien
tcccaaatctgaggaaggagttggacccacatc

SEQ ID NO: 512652 - DNA, 33 bp, Homo sapien
tcccaaatctgaggaatgagttggacccacatc

SEQ ID NO: 512653 - DNA, 33 bp, Homo sapien
cttttaaaaatgtcaccggcatctcaaaaaacg

SEQ ID NO: 512654 - DNA, 33 bp, Homo sapien
cttttaaaaatgtcacgggcatctcaaaaaacg

SEQ ID NO: 512655 - DNA, 33 bp, Homo sapien
gcaggttaactccatggaatatgatgatgcaac

SEQ ID NO: 512656 - DNA, 33 bp, Homo sapien
gcaggttaactccatgtaatatgatgatgcaac

SEQ ID NO: 512657 - DNA, 33 bp, Homo sapien
cctgtagattacttgccatgtggctgccatcgt

SEQ ID NO: 512658 - DNA, 33 bp, Homo sapien
cctgtagattacttgcgatgtggctgccatcgt

SEQ ID NO: 512659 - DNA, 33 bp, Homo sapien
ctaggtattcactgtcacaaataatcaacaggt

SEQ ID NO: 512660 - DNA, 33 bp, Homo sapien
ctaggtattcactgtcgcaaataatcaacaggt

SEQ ID NO: 512661 - DNA, 33 bp, Homo sapien
caattctaattctggagaaatgtctgaggcata

SEQ ID NO: 512662 - DNA, 33 bp, Homo sapien
caattctaattctggataaatgtctgaggcata

SEQ ID NO: 512663 - DNA, 33 bp, Homo sapien
caggcctttgggtgcacggagaatcagaatggg

SEQ ID NO: 512664 - DNA, 33 bp, Homo sapien
caggcctttgggtgcatggagaatcagaatggg

SEQ ID NO: 512665 - DNA, 33 bp, Homo sapien
atatggctgcttaaaaataatttgcattgtaaa

SEQ ID NO: 512666 - DNA, 33 bp, Homo sapien
atatggctgcttaaaagtaatttgcattgtaaa

SEQ ID NO: 512667 - DNA, 33 bp, Homo sapien
ctgaaagtgtctgaaagatgcatttgatggctc

SEQ ID NO: 512668 - DNA, 33 bp, Homo sapien
ctgaaagtgtctgaaatatgcatttgatggctc

SEQ ID NO: 512669 - DNA, 33 bp, Homo sapien
actcaaacgtgatttcaatcttaagtgtccagc

SEQ ID NO: 512670 - DNA, 33 bp, Homo sapien
actcaaacgtgatttcgatcttaagtgtccagc

SEQ ID NO: 512671 - DNA, 33 bp, Homo sapien
tttaattcattttctggaaatacccatgttctc

SEQ ID NO: 512672 - DNA, 33 bp, Homo sapien
tttaattcattttctgtaaatacccatgttctc

SEQ ID NO: 512673 - DNA, 33 bp, Homo sapien
ggattgtgactcagtacgatggagagatgagat

SEQ ID NO: 512674 - DNA, 33 bp, Homo sapien
ggattgtgactcagtatgatggagagatgagat

SEQ ID NO: 512675 - DNA, 33 bp, Homo sapien
tttagggtatgggaaaacaagcatgaaggattg

SEQ ID NO: 512676 - DNA, 33 bp, Homo sapien
tttagggtatgggaaagcaagcatgaaggattg

SEQ ID NO: 512677 - DNA, 33 bp, Homo sapien
gtagcaagaaacataaaaggaatgccagggtct

SEQ ID NO: 512678 - DNA, 33 bp, Homo sapien
gtagcaagaaacataagaggaatgccagggtct

SEQ ID NO: 512679 - DNA, 33 bp, Homo sapien
accaggaggctttaggaagagaaggaaactcct

SEQ ID NO: 512680 - DNA, 33 bp, Homo sapien
accaggaggctttaggcagagaaggaaactcct

SEQ ID NO: 512681 - DNA, 33 bp, Homo sapien
ggcttgcctggcaccactggagcaggtcttggc

SEQ ID NO: 512682 - DNA, 33 bp, Homo sapien
ggcttgcctggcaccattggagcaggtcttggc

SEQ ID NO: 512683 - DNA, 33 bp, Homo sapien
caggtttcaggaatcaactaagtcatcactttt

SEQ ID NO: 512684 - DNA, 33 bp, Homo sapien
caggtttcaggaatcagctaagtcatcactttt

SEQ ID NO: 512685 - DNA, 33 bp, Homo sapien
tgcacacacaaaagaacgccctgacaagtgcac

SEQ ID NO: 512686 - DNA, 33 bp, Homo sapien
tgcacacacaaaagaatgccctgacaagtgcac

SEQ ID NO: 512687 - DNA, 33 bp, Homo sapien
atcctgtctcactcaccgctaaccctgggcctg

SEQ ID NO: 512688 - DNA, 33 bp, Homo sapien
atcctgtctcactcactgctaaccctgggcctg

SEQ ID NO: 512689 - DNA, 33 bp, Homo sapien
aggaaggaaccatctaactcagcgtacccagtg

SEQ ID NO: 512690 - DNA, 33 bp, Homo sapien
aggaaggaaccatctagctcagcgtacccagtg

SEQ ID NO: 512691 - DNA, 33 bp, Homo sapien
tactcacttcgagggacgtgcataaggaaagcc

SEQ ID NO: 512692 - DNA, 33 bp, Homo sapien
tactcacttcgagggaggtgcataaggaaagcc

SEQ ID NO: 512693 - DNA, 33 bp, Homo sapien
ggggaaccatccaaacaaggtagaattggaaac

SEQ ID NO: 512694 - DNA, 33 bp, Homo sapien
ggggaaccatccaaaccaggtagaattggaaac

SEQ ID NO: 512695 - DNA, 33 bp, Homo sapien
acagaatcaggaataaccaaaatacatgattcc

SEQ ID NO: 512696 - DNA, 33 bp, Homo sapien
acagaatcaggaataatcaaaatacatgattcc

SEQ ID NO: 512697 - DNA, 33 bp, Homo sapien
agttaggtgctaattcactccggccagggcttc

SEQ ID NO: 512698 - DNA, 33 bp, Homo sapien
agttaggtgctaattcgctccggccagggcttc

SEQ ID NO: 512699 - DNA, 33 bp, Homo sapien
aaagaccagaaggaacactaggtccaattgttt

SEQ ID NO: 512700 - DNA, 33 bp, Homo sapien
aaagaccagaaggaacgctaggtccaattgttt

SEQ ID NO: 512701 - DNA, 33 bp, Homo sapien
tgttcacagacaatgacatacaaatacctccta

SEQ ID NO: 512702 - DNA, 33 bp, Homo sapien
tgttcacagacaatgatatacaaatacctccta

SEQ ID NO: 512703 - DNA, 33 bp, Homo sapien
agacagacagctcaacaagggctactataagca

SEQ ID NO: 512704 - DNA, 33 bp, Homo sapien
agacagacagctcaacgagggctactataagca

SEQ ID NO: 512705 - DNA, 33 bp, Homo sapien
cttcctaggactaagaatcgggtggagatgggt

SEQ ID NO: 512706 - DNA, 33 bp, Homo sapien
cttcctaggactaagagtcgggtggagatgggt

SEQ ID NO: 512707 - DNA, 33 bp, Homo sapien
tttggtcaatacagccaacacccacaaggtcat

SEQ ID NO: 512708 - DNA, 33 bp, Homo sapien
tttggtcaatacagccgacacccacaaggtcat

SEQ ID NO: 512709 - DNA, 33 bp, Homo sapien
caaaggggagcatgaacgaactttctggaatga

SEQ ID NO: 512710 - DNA, 33 bp, Homo sapien
caaaggggagcatgaaggaactttctggaatga

SEQ ID NO: 512711 - DNA, 33 bp, Homo sapien
acagtttgggcagatacacaaaatatgaaccag

SEQ ID NO: 512712 - DNA, 33 bp, Homo sapien
acagtttgggcagatatacaaaatatgaaccag

SEQ ID NO: 512713 - DNA, 33 bp, Homo sapien
cagcagggagcctggaatatggaaaacaggtca

SEQ ID NO: 512714 - DNA, 33 bp, Homo sapien
cagcagggagcctggagtatggaaaacaggtca

SEQ ID NO: 512715 - DNA, 33 bp, Homo sapien
agagcttccgtttgggaaaatggagagttctgg

SEQ ID NO: 512716 - DNA, 33 bp, Homo sapien
agagcttccgtttggggaaatggagagttctgg

SEQ ID NO: 512717 - DNA, 33 bp, Homo sapien
gagtcgagtgggttaccgaatggctgcaggggg

SEQ ID NO: 512718 - DNA, 33 bp, Homo sapien
gagtcgagtgggttactgaatggctgcaggggg

SEQ ID NO: 512719 - DNA, 33 bp, Homo sapien
ggtttgcatcagtacccatatctgagaaggagc

SEQ ID NO: 512720 - DNA, 33 bp, Homo sapien
ggtttgcatcagtacctatatctgagaaggagc

SEQ ID NO: 512721 - DNA, 33 bp, Homo sapien
gggttaagtgtgtagacattgttgccctcggtc

SEQ ID NO: 512722 - DNA, 33 bp, Homo sapien
gggttaagtgtgtagatattgttgccctcggtc

SEQ ID NO: 512723 - DNA, 33 bp, Homo sapien
ggggcctgaaggtccacgctccaagctcccagg

SEQ ID NO: 512724 - DNA, 33 bp, Homo sapien
ggggcctgaaggtccatgctccaagctcccagg

SEQ ID NO: 512725 - DNA, 33 bp, Homo sapien
ggaaccttctcaccaccgtctgagccacagttg

SEQ ID NO: 512726 - DNA, 33 bp, Homo sapien
ggaaccttctcaccactgtctgagccacagttg

SEQ ID NO: 512727 - DNA, 33 bp, Homo sapien
agctctgctgaatcccagaatacagtcgagggt

SEQ ID NO: 512728 - DNA, 33 bp, Homo sapien
agctctgctgaatcccggaatacagtcgagggt

SEQ ID NO: 512729 - DNA, 33 bp, Homo sapien
tccactgtttcccggacacaaatgccaatagca

SEQ ID NO: 512730 - DNA, 33 bp, Homo sapien
tccactgtttcccggatacaaatgccaatagca

SEQ ID NO: 512731 - DNA, 33 bp, Homo sapien
tgctcctacttctccaaagaaaacaaatacccc

SEQ ID NO: 512732 - DNA, 33 bp, Homo sapien
tgctcctacttctccagagaaaacaaatacccc

SEQ ID NO: 512733 - DNA, 33 bp, Homo sapien
ccttgccttgccctacagaatgcactttgtcct

SEQ ID NO: 512734 - DNA, 33 bp, Homo sapien
ccttgccttgccctacggaatgcactttgtcct

SEQ ID NO: 512735 - DNA, 33 bp, Homo sapien
ctctggcctcgtctcaagtattggaattaggtg

SEQ ID NO: 512736 - DNA, 33 bp, Homo sapien
ctctggcctcgtctcaggtattggaattaggtg

SEQ ID NO: 512737 - DNA, 33 bp, Homo sapien
ggccaaatactggacaataaatatgaggtgggc

SEQ ID NO: 512738 - DNA, 33 bp, Homo sapien
ggccaaatactggacagtaaatatgaggtgggc

SEQ ID NO: 512739 - DNA, 33 bp, Homo sapien
gctgacttaacaccaccaacccatggtaagggc

SEQ ID NO: 512740 - DNA, 33 bp, Homo sapien
gctgacttaacaccacgaacccatggtaagggc

SEQ ID NO: 512741 - DNA, 33 bp, Homo sapien
gacaccaacggacaccaagagacagagcccaca

SEQ ID NO: 512742 - DNA, 33 bp, Homo sapien
gacaccaacggacaccgagagacagagcccaca

SEQ ID NO: 512743 - DNA, 33 bp, Homo sapien
cttccctggattcttacgaactcaagttatgtc

SEQ ID NO: 512744 - DNA, 33 bp, Homo sapien
cttccctggattcttatgaactcaagttatgtc

SEQ ID NO: 512745 - DNA, 33 bp, Homo sapien
actctataaagtgtcaccttcatacttttagaa

SEQ ID NO: 512746 - DNA, 33 bp, Homo sapien
actctataaagtgtcatcttcatacttttagaa

SEQ ID NO: 512747 - DNA, 33 bp, Homo sapien
gtcctcaggccccccaatgatacctacaggcat

SEQ ID NO: 512748 - DNA, 33 bp, Homo sapien
gtcctcaggccccccagtgatacctacaggcat

SEQ ID NO: 512749 - DNA, 33 bp, Homo sapien
tcttatgatgaacactaaaaggagagtcagaga

SEQ ID NO: 512750 - DNA, 33 bp, Homo sapien
tcttatgatgaacactgaaaggagagtcagaga

SEQ ID NO: 512751 - DNA, 33 bp, Homo sapien
tagttgtaagcaaaccagaaaatcaaagctggg

SEQ ID NO: 512752 - DNA, 33 bp, Homo sapien
tagttgtaagcaaaccggaaaatcaaagctggg

SEQ ID NO: 512753 - DNA, 33 bp, Homo sapien
ctaggaatttaaccaacttcagcaatcagcctg

SEQ ID NO: 512754 - DNA, 33 bp, Homo sapien
ctaggaatttaaccaagttcagcaatcagcctg

SEQ ID NO: 512755 - DNA, 33 bp, Homo sapien
tgcatagagaaacatacgaaaggatggccgctg

SEQ ID NO: 512756 - DNA, 33 bp, Homo sapien
tgcatagagaaacatatgaaaggatggccgctg

SEQ ID NO: 512757 - DNA, 33 bp, Homo sapien
gacacctcttacagtcacagaaaacgacaggaa

SEQ ID NO: 512758 - DNA, 33 bp, Homo sapien
gacacctcttacagtcgcagaaaacgacaggaa

SEQ ID NO: 512759 - DNA, 33 bp, Homo sapien
aacaatcaccaaggaaattagagacacaagatg

SEQ ID NO: 512760 - DNA, 33 bp, Homo sapien
aacaatcaccaaggaagttagagacacaagatg

SEQ ID NO: 512761 - DNA, 33 bp, Homo sapien
acgcaggaatctcagaacttctccagcaaccat

SEQ ID NO: 512762 - DNA, 33 bp, Homo sapien
acgcaggaatctcagaccttctccagcaaccat

SEQ ID NO: 512763 - DNA, 33 bp, Homo sapien
cagatgttttgggcaacagattacaaatggaga

SEQ ID NO: 512764 - DNA, 33 bp, Homo sapien
cagatgttttgggcaagagattacaaatggaga

SEQ ID NO: 512765 - DNA, 33 bp, Homo sapien
atcaccttctatttaagctctattttcctaagc

SEQ ID NO: 512766 - DNA, 33 bp, Homo sapien
atcaccttctatttaatctctattttcctaagc

SEQ ID NO: 512767 - DNA, 33 bp, Homo sapien
attggactgtataccccgagaagagcacaggag

SEQ ID NO: 512768 - DNA, 33 bp, Homo sapien
attggactgtataccctgagaagagcacaggag

SEQ ID NO: 512769 - DNA, 33 bp, Homo sapien
aagggtcttgaacagaacaggagtcattcatta

SEQ ID NO: 512770 - DNA, 33 bp, Homo sapien
aagggtcttgaacagagcaggagtcattcatta

SEQ ID NO: 512771 - DNA, 33 bp, Homo sapien
tacacagagaatccatcaatacctggtccacac

SEQ ID NO: 512772 - DNA, 33 bp, Homo sapien
tacacagagaatccattaatacctggtccacac

SEQ ID NO: 512773 - DNA, 33 bp, Homo sapien
ggggtgccccggattacaggaagcagctggcag

SEQ ID NO: 512774 - DNA, 33 bp, Homo sapien
ggggtgccccggattataggaagcagctggcag

SEQ ID NO: 512775 - DNA, 33 bp, Homo sapien
gcagcttccctcaccaatggcccagtttccatc

SEQ ID NO: 512776 - DNA, 33 bp, Homo sapien
gcagcttccctcaccagtggcccagtttccatc

SEQ ID NO: 512777 - DNA, 33 bp, Homo sapien
ctgcgcctctgagtcagcaaacattggcaaagg

SEQ ID NO: 512778 - DNA, 33 bp, Homo sapien
ctgcgcctctgagtcatcaaacattggcaaagg

SEQ ID NO: 512779 - DNA, 33 bp, Homo sapien
ggtgtaaggagcatagcagcgaaatcctaaatt

SEQ ID NO: 512780 - DNA, 33 bp, Homo sapien
ggtgtaaggagcatagtagcgaaatcctaaatt

SEQ ID NO: 512781 - DNA, 33 bp, Homo sapien
ttgccttagaaaacaactacatctctgtgagta

SEQ ID NO: 512782 - DNA, 33 bp, Homo sapien
ttgccttagaaaacaagtacatctctgtgagta

SEQ ID NO: 512783 - DNA, 33 bp, Homo sapien
tttgcttagagaaaagcctgcatgtgtgactgg

SEQ ID NO: 512784 - DNA, 33 bp, Homo sapien
tttgcttagagaaaaggctgcatgtgtgactgg

SEQ ID NO: 512785 - DNA, 33 bp, Homo sapien
taaaccggtggtcttcaagtaatgcaaattacc

SEQ ID NO: 512786 - DNA, 33 bp, Homo sapien
taaaccggtggtcttcgagtaatgcaaattacc

SEQ ID NO: 512787 - DNA, 33 bp, Homo sapien
aacaaactgcccatacaacggtggcctcataag

SEQ ID NO: 512788 - DNA, 33 bp, Homo sapien
aacaaactgcccatacgacggtggcctcataag

SEQ ID NO: 512789 - DNA, 33 bp, Homo sapien
agagggtcacgtccacaggccggagctcaacat

SEQ ID NO: 512790 - DNA, 33 bp, Homo sapien
agagggtcacgtccaccggccggagctcaacat

SEQ ID NO: 512791 - DNA, 33 bp, Homo sapien
ttaaacatgagctgcccgatttttcttgcttgc

SEQ ID NO: 512792 - DNA, 33 bp, Homo sapien
ttaaacatgagctgcctgatttttcttgcttgc

SEQ ID NO: 512793 - DNA, 33 bp, Homo sapien
aaaaccctggtgtggacgtcggcctttactgag

SEQ ID NO: 512794 - DNA, 33 bp, Homo sapien
aaaaccctggtgtggatgtcggcctttactgag

SEQ ID NO: 512795 - DNA, 33 bp, Homo sapien
tgggacacgaagagggaagttatgtgatatatt

SEQ ID NO: 512796 - DNA, 33 bp, Homo sapien
tgggacacgaagaggggagttatgtgatatatt

SEQ ID NO: 512797 - DNA, 33 bp, Homo sapien
cgtgttacctattaataacttctctgaccaagt

SEQ ID NO: 512798 - DNA, 33 bp, Homo sapien
cgtgttacctattaatgacttctctgaccaagt

SEQ ID NO: 512799 - DNA, 33 bp, Homo sapien
gagagtgaaggagttaagaacatgccatcacaa

SEQ ID NO: 512800 - DNA, 33 bp, Homo sapien
gagagtgaaggagttaggaacatgccatcacaa

SEQ ID NO: 512801 - DNA, 33 bp, Homo sapien
gggccctgagactagggagcttgcctagatggg

SEQ ID NO: 512802 - DNA, 33 bp, Homo sapien
gggccctgagactaggtagcttgcctagatggg

SEQ ID NO: 512803 - DNA, 33 bp, Homo sapien
cctgccccggacctcaataagtacctggtaccc

SEQ ID NO: 512804 - DNA, 33 bp, Homo sapien
cctgccccggacctcagtaagtacctggtaccc

SEQ ID NO: 512805 - DNA, 33 bp, Homo sapien
ttgcctccagacagaaatgggccggtcacccag

SEQ ID NO: 512806 - DNA, 33 bp, Homo sapien
ttgcctccagacagaagtgggccggtcacccag

SEQ ID NO: 512807 - DNA, 33 bp, Homo sapien
aaagcaatgaaatttacgtgtaattcaaatgaa

SEQ ID NO: 512808 - DNA, 33 bp, Homo sapien
aaagcaatgaaatttatgtgtaattcaaatgaa

SEQ ID NO: 512809 - DNA, 33 bp, Homo sapien
gccgcgtaggtttctacgtcaacacgttccaga

SEQ ID NO: 512810 - DNA, 33 bp, Homo sapien
gccgcgtaggtttctatgtcaacacgttccaga

SEQ ID NO: 512811 - DNA, 33 bp, Homo sapien
acgagtcccttcaaaccgccaaaaagaaggatg

SEQ ID NO: 512812 - DNA, 33 bp, Homo sapien
acgagtcccttcaaactgccaaaaagaaggatg

SEQ ID NO: 512813 - DNA, 33 bp, Homo sapien
gacctgcggaagagacagcactacagcaggggt

SEQ ID NO: 512814 - DNA, 33 bp, Homo sapien
gacctgcggaagagacggcactacagcaggggt

SEQ ID NO: 512815 - DNA, 33 bp, Homo sapien
cagagaggaaactcgagagtgaaccaaaggcca

SEQ ID NO: 512816 - DNA, 33 bp, Homo sapien
cagagaggaaactcgatagtgaaccaaaggcca

SEQ ID NO: 512817 - DNA, 33 bp, Homo sapien
agcaactccctaaagggccttcagagcaaccca

SEQ ID NO: 512818 - DNA, 33 bp, Homo sapien
agcaactccctaaaggtccttcagagcaaccca

SEQ ID NO: 512819 - DNA, 33 bp, Homo sapien
cgaacgcaaaacgaagaactcacgatatcctca

SEQ ID NO: 512820 - DNA, 33 bp, Homo sapien
cgaacgcaaaacgaaggactcacgatatcctca

SEQ ID NO: 512821 - DNA, 33 bp, Homo sapien
cataatgaggaaggagaccgaaagaaaaccaga

SEQ ID NO: 512822 - DNA, 33 bp, Homo sapien
cataatgaggaaggagcccgaaagaaaaccaga

SEQ ID NO: 512823 - DNA, 33 bp, Homo sapien
tttgacttccataaaacgggctaacagcaaacc

SEQ ID NO: 512824 - DNA, 33 bp, Homo sapien
tttgacttccataaaaggggctaacagcaaacc

SEQ ID NO: 512825 - DNA, 33 bp, Homo sapien
aagaaatactgtagcaataacagaaacaaaatt

SEQ ID NO: 512826 - DNA, 33 bp, Homo sapien
aagaaatactgtagcagtaacagaaacaaaatt

SEQ ID NO: 512827 - DNA, 33 bp, Homo sapien
gttgctgcaaatataacgcttggtgtacaggcc

SEQ ID NO: 512828 - DNA, 33 bp, Homo sapien
gttgctgcaaatataaggcttggtgtacaggcc

SEQ ID NO: 512829 - DNA, 33 bp, Homo sapien
ggcagaagggtcaacacgtaacaacagtcaaaa

SEQ ID NO: 512830 - DNA, 33 bp, Homo sapien
ggcagaagggtcaacaggtaacaacagtcaaaa

SEQ ID NO: 512831 - DNA, 33 bp, Homo sapien
gcccctggaaatttctaaagaactgttgattga

SEQ ID NO: 512832 - DNA, 33 bp, Homo sapien
gcccctggaaatttctcaagaactgttgattga

SEQ ID NO: 512833 - DNA, 33 bp, Homo sapien
cctgtgtgtgcaccagacacgtctaggcctctt

SEQ ID NO: 512834 - DNA, 33 bp, Homo sapien
cctgtgtgtgcaccaggcacgtctaggcctctt

SEQ ID NO: 512835 - DNA, 33 bp, Homo sapien
acagcagctgggcccacgatcagatttcagata

SEQ ID NO: 512836 - DNA, 33 bp, Homo sapien
acagcagctgggcccatgatcagatttcagata

SEQ ID NO: 512837 - DNA, 33 bp, Homo sapien
agttgtcacttctcaacgtggcctctgagcagg

SEQ ID NO: 512838 - DNA, 33 bp, Homo sapien
agttgtcacttctcaatgtggcctctgagcagg

SEQ ID NO: 512839 - DNA, 33 bp, Homo sapien
ttttgaacagcccccaccagcttttgagacgat

SEQ ID NO: 512840 - DNA, 33 bp, Homo sapien
ttttgaacagcccccatcagcttttgagacgat

SEQ ID NO: 512841 - DNA, 33 bp, Homo sapien
acgtttaaataccactcaccttcggatcactaa

SEQ ID NO: 512842 - DNA, 33 bp, Homo sapien
acgtttaaataccacttaccttcggatcactaa

SEQ ID NO: 512843 - DNA, 33 bp, Homo sapien
ccagagggaaagaacacagcgaaggccaaaaag

SEQ ID NO: 512844 - DNA, 33 bp, Homo sapien
ccagagggaaagaacagagcgaaggccaaaaag

SEQ ID NO: 512845 - DNA, 33 bp, Homo sapien
gcccagggctggtcccaggcatttatattttta

SEQ ID NO: 512846 - DNA, 33 bp, Homo sapien
gcccagggctggtcccgggcatttatattttta

SEQ ID NO: 512847 - DNA, 33 bp, Homo sapien
gagccaccattgtgccacacccagagctgagtg

SEQ ID NO: 512848 - DNA, 33 bp, Homo sapien
gagccaccattgtgccgcacccagagctgagtg

SEQ ID NO: 512849 - DNA, 33 bp, Homo sapien
cctggctcccgagttgaaaaatccctgggaagg

SEQ ID NO: 512850 - DNA, 33 bp, Homo sapien
cctggctcccgagttggaaaatccctgggaagg

SEQ ID NO: 512851 - DNA, 33 bp, Homo sapien
ttgtaactaatacttacgtgtacatcaggttgt

SEQ ID NO: 512852 - DNA, 33 bp, Homo sapien
ttgtaactaatacttaggtgtacatcaggttgt

SEQ ID NO: 512853 - DNA, 33 bp, Homo sapien
cgcacttccaactccgacactctcagaagaggc

SEQ ID NO: 512854 - DNA, 33 bp, Homo sapien
cgcacttccaactccggcactctcagaagaggc

SEQ ID NO: 512855 - DNA, 33 bp, Homo sapien
gtgccatctatagagacacaaaacagatctgga

SEQ ID NO: 512856 - DNA, 33 bp, Homo sapien
gtgccatctatagagatacaaaacagatctgga

SEQ ID NO: 512857 - DNA, 33 bp, Homo sapien
tagaatgcaaaatacaaagtggatgttggtgaa

SEQ ID NO: 512858 - DNA, 33 bp, Homo sapien
tagaatgcaaaatacacagtggatgttggtgaa

SEQ ID NO: 512859 - DNA, 33 bp, Homo sapien
atttgatatttagagaccacccagtcaagggag

SEQ ID NO: 512860 - DNA, 33 bp, Homo sapien
atttgatatttagagatcacccagtcaagggag

SEQ ID NO: 512861 - DNA, 33 bp, Homo sapien
ttttgcccttcccttacgaccagcaagatcagc

SEQ ID NO: 512862 - DNA, 33 bp, Homo sapien
ttttgcccttcccttatgaccagcaagatcagc

SEQ ID NO: 512863 - DNA, 33 bp, Homo sapien
agtgactgctaaacataagatactcagcctcac

SEQ ID NO: 512864 - DNA, 33 bp, Homo sapien
agtgactgctaaacatgagatactcagcctcac

SEQ ID NO: 512865 - DNA, 33 bp, Homo sapien
gaccattctatacacaaagtgactgggtaagtg

SEQ ID NO: 512866 - DNA, 33 bp, Homo sapien
gaccattctatacacagagtgactgggtaagtg

SEQ ID NO: 512867 - DNA, 33 bp, Homo sapien
accttactctcaatccaacaccacagactctga

SEQ ID NO: 512868 - DNA, 33 bp, Homo sapien
accttactctcaatccgacaccacagactctga

SEQ ID NO: 512869 - DNA, 33 bp, Homo sapien
gaccattctacacacacagtgactggctaagtg

SEQ ID NO: 512870 - DNA, 33 bp, Homo sapien
gaccattctacacacagagtgactggctaagtg

SEQ ID NO: 512871 - DNA, 33 bp, Homo sapien
ggtagaggagatagaagaatttttaggatgaac

SEQ ID NO: 512872 - DNA, 33 bp, Homo sapien
ggtagaggagatagaataatttttaggatgaac

SEQ ID NO: 512873 - DNA, 33 bp, Homo sapien
gcaccaagaacagcaccgaggttatatcagaga

SEQ ID NO: 512874 - DNA, 33 bp, Homo sapien
gcaccaagaacagcactgaggttatatcagaga

SEQ ID NO: 512875 - DNA, 33 bp, Homo sapien
acaagtcagaaccagccgaagggaaagatgcat

SEQ ID NO: 512876 - DNA, 33 bp, Homo sapien
acaagtcagaaccagctgaagggaaagatgcat

SEQ ID NO: 512877 - DNA, 33 bp, Homo sapien
tgtgaagtgtggcccagacgtcaccgaaacagt

SEQ ID NO: 512878 - DNA, 33 bp, Homo sapien
tgtgaagtgtggcccatacgtcaccgaaacagt

SEQ ID NO: 512879 - DNA, 33 bp, Homo sapien
tcgcggtggtggtgccacaccgtcctgaggctg

SEQ ID NO: 512880 - DNA, 33 bp, Homo sapien
tcgcggtggtggtgccgcaccgtcctgaggctg

SEQ ID NO: 512881 - DNA, 33 bp, Homo sapien
tcattgcctaaatctacgtttgtcccaaaaggt

SEQ ID NO: 512882 - DNA, 33 bp, Homo sapien
tcattgcctaaatctatgtttgtcccaaaaggt

SEQ ID NO: 512883 - DNA, 33 bp, Homo sapien
gggtgttaacagcttgaaattgctattttctta

SEQ ID NO: 512884 - DNA, 33 bp, Homo sapien
gggtgttaacagcttggaattgctattttctta

SEQ ID NO: 512885 - DNA, 33 bp, Homo sapien
agtttctagtaaactgaaactggatcttctgtc

SEQ ID NO: 512886 - DNA, 33 bp, Homo sapien
agtttctagtaaactggaactggatcttctgtc

SEQ ID NO: 512887 - DNA, 33 bp, Homo sapien
ctttggtgttctttcaaactcactgtgtaggta

SEQ ID NO: 512888 - DNA, 33 bp, Homo sapien
ctttggtgttctttcagactcactgtgtaggta

SEQ ID NO: 512889 - DNA, 33 bp, Homo sapien
gcgtccccattgcaagacttgacccttgagcct

SEQ ID NO: 512890 - DNA, 33 bp, Homo sapien
gcgtccccattgcaagccttgacccttgagcct

SEQ ID NO: 512891 - DNA, 33 bp, Homo sapien
cacccagatgccagcaaatgatgtagctgcctg

SEQ ID NO: 512892 - DNA, 33 bp, Homo sapien
cacccagatgccagcacatgatgtagctgcctg

SEQ ID NO: 512893 - DNA, 33 bp, Homo sapien
ctgctctcactgattcaatatcttaggtctgtt

SEQ ID NO: 512894 - DNA, 33 bp, Homo sapien
ctgctctcactgattcgatatcttaggtctgtt

SEQ ID NO: 512895 - DNA, 33 bp, Homo sapien
taagagctctgcatgaaatcctttgaaaatgcc

SEQ ID NO: 512896 - DNA, 33 bp, Homo sapien
taagagctctgcatgatatcctttgaaaatgcc

SEQ ID NO: 512897 - DNA, 33 bp, Homo sapien
agtttctaatattttacgtgaccacgggaccac

SEQ ID NO: 512898 - DNA, 33 bp, Homo sapien
agtttctaatattttatgtgaccacgggaccac

SEQ ID NO: 512899 - DNA, 33 bp, Homo sapien
gttttctgagataatccgatcgccgaagtatct

SEQ ID NO: 512900 - DNA, 33 bp, Homo sapien
gttttctgagataatctgatcgccgaagtatct

SEQ ID NO: 512901 - DNA, 33 bp, Homo sapien
aaatcagctgaacaggccaaactattttcctaa

SEQ ID NO: 512902 - DNA, 33 bp, Homo sapien
aaatcagctgaacaggtcaaactattttcctaa

SEQ ID NO: 512903 - DNA, 33 bp, Homo sapien
ccctcttcggctgagacggagagaggcggtgct

SEQ ID NO: 512904 - DNA, 33 bp, Homo sapien
ccctcttcggctgagatggagagaggcggtgct

SEQ ID NO: 512905 - DNA, 33 bp, Homo sapien
tggtgattactaaaaactcaggaatagatgctg

SEQ ID NO: 512906 - DNA, 33 bp, Homo sapien
tggtgattactaaaaagtcaggaatagatgctg

SEQ ID NO: 512907 - DNA, 33 bp, Homo sapien
gactgattctagaacaaggtatgtgcattcctg

SEQ ID NO: 512908 - DNA, 33 bp, Homo sapien
gactgattctagaacagggtatgtgcattcctg

SEQ ID NO: 512909 - DNA, 33 bp, Homo sapien
cttgctaggaaagttacgtgttggatgtaaaca

SEQ ID NO: 512910 - DNA, 33 bp, Homo sapien
cttgctaggaaagttatgtgttggatgtaaaca

SEQ ID NO: 512911 - DNA, 33 bp, Homo sapien
atcaaaaggaaagaaacgctagaaataaagaac

SEQ ID NO: 512912 - DNA, 33 bp, Homo sapien
atcaaaaggaaagaaatgctagaaataaagaac

SEQ ID NO: 512913 - DNA, 33 bp, Homo sapien
aaggtagcaagctgtaaaattatcttatagaac

SEQ ID NO: 512914 - DNA, 33 bp, Homo sapien
aaggtagcaagctgtagaattatcttatagaac

SEQ ID NO: 512915 - DNA, 33 bp, Homo sapien
actgttgtgaacaaaagcctgttcgggcatcaa

SEQ ID NO: 512916 - DNA, 33 bp, Homo sapien
actgttgtgaacaaaatcctgttcgggcatcaa

SEQ ID NO: 512917 - DNA, 33 bp, Homo sapien; identical to SEQ ID NO: 512915

SEQ ID NO: 512918 - DNA, 33 bp, Homo sapien; identical to SEQ ID NO: 512916

SEQ ID NO: 512919 - DNA, 33 bp, Homo sapien
gcatcatttacattctcaacagcaatgcatgcg

SEQ ID NO: 512920 - DNA, 33 bp, Homo sapien
gcatcatttacattcttaacagcaatgcatgcg

SEQ ID NO: 512921 - DNA, 33 bp, Homo sapien
acatcagttggctgcaagtacatggcattattt

SEQ ID NO: 512922 - DNA, 33 bp, Homo sapien
acatcagttggctgcaggtacatggcattattt

SEQ ID NO: 512923 - DNA, 33 bp, Homo sapien
cactgtccaggaatcacagtgtaccccccaggt

SEQ ID NO: 512924 - DNA, 33 bp, Homo sapien
cactgtccaggaatcatagtgtaccccccaggt

SEQ ID NO: 512925 - DNA, 33 bp, Homo sapien
acccaaaaaaaatgacgggctacagatgcacct

SEQ ID NO: 512926 - DNA, 33 bp, Homo sapien
acccaaaaaaaatgactggctacagatgcacct

SEQ ID NO: 512927 - DNA, 33 bp, Homo sapien
gaagcaggaaaaagcagagtccaaaaagaaaac

SEQ ID NO: 512928 - DNA, 33 bp, Homo sapien
gaagcaggaaaaagcatagtccaaaaagaaaac

SEQ ID NO: 512929 - DNA, 33 bp, Homo sapien
cccaaagagaggtgcaaagaaaccactgctatt

SEQ ID NO: 512930 - DNA, 33 bp, Homo sapien
cccaaagagaggtgcacagaaaccactgctatt

SEQ ID NO: 512931 - DNA, 33 bp, Homo sapien
acagcctgactcttgagacccaggtttttaggt

SEQ ID NO: 512932 - DNA, 33 bp, Homo sapien
acagcctgactcttgatacccaggtttttaggt

SEQ ID NO: 512933 - DNA, 33 bp, Homo sapien
gtagctccatgtgaccaaagtacaaaaggagtt

SEQ ID NO: 512934 - DNA, 33 bp, Homo sapien
gtagctccatgtgaccgaagtacaaaaggagtt

SEQ ID NO: 512935 - DNA, 33 bp, Homo sapien
aagccaactggatggaactgcagaataatggct

SEQ ID NO: 512936 - DNA, 33 bp, Homo sapien
aagccaactggatggagctgcagaataatggct

SEQ ID NO: 512937 - DNA, 33 bp, Homo sapien
cagctccactgctagaagaaatacagtggccag

SEQ ID NO: 512938 - DNA, 33 bp, Homo sapien
cagctccactgctagaggaaatacagtggccag

SEQ ID NO: 512939 - DNA, 33 bp, Homo sapien
gataggacagtgagtaagaaatccagggatagc

SEQ ID NO: 512940 - DNA, 33 bp, Homo sapien
gataggacagtgagtaggaaatccagggatagc

SEQ ID NO: 512941 - DNA, 33 bp, Homo sapien
agggaagtagtaacgaaaaagctatatatttga

SEQ ID NO: 512942 - DNA, 33 bp, Homo sapien
agggaagtagtaacgagaaagctatatatttga

SEQ ID NO: 512943 - DNA, 33 bp, Homo sapien
aataacctcaaatatacgaactatgtcttctac

SEQ ID NO: 512944 - DNA, 33 bp, Homo sapien
aataacctcaaatataggaactatgtcttctac

SEQ ID NO: 512945 - DNA, 33 bp, Homo sapien
gatttggcaaaagataccgaagagcttacgtta

SEQ ID NO: 512946 - DNA, 33 bp, Homo sapien
gatttggcaaaagatatcgaagagcttacgtta

SEQ ID NO: 512947 - DNA, 33 bp, Homo sapien
tggaggaagagaaacacggatggagcgaaatgg

SEQ ID NO: 512948 - DNA, 33 bp, Homo sapien
tggaggaagagaaacatggatggagcgaaatgg

SEQ ID NO: 512949 - DNA, 33 bp, Homo sapien
ctgtatgcagtatttgcaggttatgttgcaggg

SEQ ID NO: 512950 - DNA, 33 bp, Homo sapien
ctgtatgcagtatttggaggttatgttgcaggg

SEQ ID NO: 512951 - DNA, 33 bp, Homo sapien
tattgttcagatcatcgacatatccacttttta

SEQ ID NO: 512952 - DNA, 33 bp, Homo sapien
tattgttcagatcatctacatatccacttttta

SEQ ID NO: 512953 - DNA, 33 bp, Homo sapien
aattaacatatcagcaagcaatcataagataaa

SEQ ID NO: 512954 - DNA, 33 bp, Homo sapien
aattaacatatcagcaggcaatcataagataaa

SEQ ID NO: 512955 - DNA, 33 bp, Homo sapien
tctttcacttggcaataagcatttaagattctt

SEQ ID NO: 512956 - DNA, 33 bp, Homo sapien
tctttcacttggcaatgagcatttaagattctt

SEQ ID NO: 512957 - DNA, 33 bp, Homo sapien
aagaattgagctatcaagccactaaaagacatg

SEQ ID NO: 512958 - DNA, 33 bp, Homo sapien
aagaattgagctatcacgccactaaaagacatg

SEQ ID NO: 512959 - DNA, 33 bp, Homo sapien
tttaagatgctctccacatctaagcactatttg

SEQ ID NO: 512960 - DNA, 33 bp, Homo sapien
tttaagatgctctccatatctaagcactatttg

SEQ ID NO: 512961 - DNA, 33 bp, Homo sapien
aaacatttgtgttcacacttttttggctgtgat

SEQ ID NO: 512962 - DNA, 33 bp, Homo sapien
aaacatttgtgttcacgcttttttggctgtgat

SEQ ID NO: 512963 - DNA, 33 bp, Homo sapien
tgtccaggtatgtcccaaaccagccaacttgaa

SEQ ID NO: 512964 - DNA, 33 bp, Homo sapien
tgtccaggtatgtcccgaaccagccaacttgaa

SEQ ID NO: 512965 - DNA, 33 bp, Homo sapien
tcaaggtgtgactacactgagcagtaacagcaa

SEQ ID NO: 512966 - DNA, 33 bp, Homo sapien
tcaaggtgtgactacattgagcagtaacagcaa

SEQ ID NO: 512967 - DNA, 33 bp, Homo sapien
actgaactaacatataacacttgtcatttgaca

SEQ ID NO: 512968 - DNA, 33 bp, Homo sapien
actgaactaacatatagcacttgtcatttgaca

SEQ ID NO: 512969 - DNA, 33 bp, Homo sapien
tctggggaactcactcaatttccatgctatctc

SEQ ID NO: 512970 - DNA, 33 bp, Homo sapien
tctggggaactcactctatttccatgctatctc

SEQ ID NO: 512971 - DNA, 33 bp, Homo sapien
tttaaatgtgtgcaacaaagaacacaatcaaga

SEQ ID NO: 512972 - DNA, 33 bp, Homo sapien
tttaaatgtgtgcaacgaagaacacaatcaaga

SEQ ID NO: 512973 - DNA, 33 bp, Homo sapien
cagaattacagtgatacgtgttacaggcatata

SEQ ID NO: 512974 - DNA, 33 bp, Homo sapien
cagaattacagtgatatgtgttacaggcatata

SEQ ID NO: 512975 - DNA, 33 bp, Homo sapien
gtctgcttttagtttcaaaataatgaccctaac

SEQ ID NO: 512976 - DNA, 33 bp, Homo sapien
gtctgcttttagtttcgaaataatgaccctaac

SEQ ID NO: 512977 - DNA, 33 bp, Homo sapien
tgaatatagtgcatgaaaagttccgggctatta

SEQ ID NO: 512978 - DNA, 33 bp, Homo sapien
tgaatatagtgcatgacaagttccgggctatta

SEQ ID NO: 512979 - DNA, 33 bp, Homo sapien
gttccaatgcaggggactcattcagctttagtg

SEQ ID NO: 512980 - DNA, 33 bp, Homo sapien
gttccaatgcaggggattcattcagctttagtg

SEQ ID NO: 512981 - DNA, 33 bp, Homo sapien
tcttgcagttttattacgatgtagttaggtgta

SEQ ID NO: 512982 - DNA, 33 bp, Homo sapien
tcttgcagttttattatgatgtagttaggtgta

SEQ ID NO: 512983 - DNA, 33 bp, Homo sapien
gtgtcaaagagacccacagctaacaattaatac

SEQ ID NO: 512984 - DNA, 33 bp, Homo sapien
gtgtcaaagagacccagagctaacaattaatac

SEQ ID NO: 512985 - DNA, 33 bp, Homo sapien
ataatggtacttctcacgataacaaaattgagg

SEQ ID NO: 512986 - DNA, 33 bp, Homo sapien
ataatggtacttctcatgataacaaaattgagg

SEQ ID NO: 512987 - DNA, 33 bp, Homo sapien
tatttacagtttaatcactcattttctacattg

SEQ ID NO: 512988 - DNA, 33 bp, Homo sapien
tatttacagtttaatcgctcattttctacattg

SEQ ID NO: 512989 - DNA, 33 bp, Homo sapien
tctcttgtctgttagcacaatctgtattgggcc

SEQ ID NO: 512990 - DNA, 33 bp, Homo sapien
tctcttgtctgttagcgcaatctgtattgggcc

SEQ ID NO: 512991 - DNA, 33 bp, Homo sapien
tacgtccggtgttgcaagcaagattaaaccact

SEQ ID NO: 512992 - DNA, 33 bp, Homo sapien
tacgtccggtgttgcaggcaagattaaaccact

SEQ ID NO: 512993 - DNA, 33 bp, Homo sapien
tcactttcatatgttaagctcctattgtgtgca

SEQ ID NO: 512994 - DNA, 33 bp, Homo sapien
tcactttcatatgttaggctcctattgtgtgca

SEQ ID NO: 512995 - DNA, 33 bp, Homo sapien
agcaatgcccgaaaccaaatcacttgatagaag

SEQ ID NO: 512996 - DNA, 33 bp, Homo sapien
agcaatgcccgaaaccgaatcacttgatagaag

SEQ ID NO: 512997 - DNA, 33 bp, Homo sapien
atgttataatcctgctaaaatttttctgtctgt

SEQ ID NO: 512998 - DNA, 33 bp, Homo sapien
atgttataatcctgctgaaatttttctgtctgt

SEQ ID NO: 512999 - DNA, 33 bp, Homo sapien
cagctctaccagcatagcatagagctaactgaa

SEQ ID NO: 513000 - DNA, 33 bp, Homo sapien
cagctctaccagcatatcatagagctaactgaa

SEQ ID NO: 513001 - DNA, 33 bp, Homo sapien
atgtttttcaaggttacctgaatatttgcgtct

SEQ ID NO: 513002 - DNA, 33 bp, Homo sapien
atgtttttcaaggttagctgaatatttgcgtct

SEQ ID NO: 513003 - DNA, 33 bp, Homo sapien
cccagaaaccgaaccaaattttagggagcagga

SEQ ID NO: 513004 - DNA, 33 bp, Homo sapien
cccagaaaccgaaccagattttagggagcagga

SEQ ID NO: 513005 - DNA, 33 bp, Homo sapien
ttgctagcatagctcacggaactcaggacggca

SEQ ID NO: 513006 - DNA, 33 bp, Homo sapien
ttgctagcatagctcatggaactcaggacggca

SEQ ID NO: 513007 - DNA, 33 bp, Homo sapien
ccttcccacacaactcacctgtgcgtgtttatt

SEQ ID NO: 513008 - DNA, 33 bp, Homo sapien
ccttcccacacaactcgcctgtgcgtgtttatt

SEQ ID NO: 513009 - DNA, 33 bp, Homo sapien
taacaaatgcatactacggataaggatgaaggg

SEQ ID NO: 513010 - DNA, 33 bp, Homo sapien
taacaaatgcatactatggataaggatgaaggg

SEQ ID NO: 513011 - DNA, 33 bp, Homo sapien
tacaatgccaaaagtaacaggagctatggtcct

SEQ ID NO: 513012 - DNA, 33 bp, Homo sapien
tacaatgccaaaagtaccaggagctatggtcct

SEQ ID NO: 513013 - DNA, 33 bp, Homo sapien
ggaaatcacagtattcacaggagggtgacggac

SEQ ID NO: 513014 - DNA, 33 bp, Homo sapien
ggaaatcacagtattcgcaggagggtgacggac

SEQ ID NO: 513015 - DNA, 33 bp, Homo sapien
ccactcaaaaaaaaacacagggcaggcctcagg

SEQ ID NO: 513016 - DNA, 33 bp, Homo sapien
ccactcaaaaaaaaactcagggcaggcctcagg

SEQ ID NO: 513017 - DNA, 33 bp, Homo sapien
tcaccagccatctgcaaacagctgcatacagat

SEQ ID NO: 513018 - DNA, 33 bp, Homo sapien
tcaccagccatctgcacacagctgcatacagat

SEQ ID NO: 513019 - DNA, 33 bp, Homo sapien
aattgtgtagaattgacgtgaatttttctttaa

SEQ ID NO: 513020 - DNA, 33 bp, Homo sapien
aattgtgtagaattgatgtgaatttttctttaa

SEQ ID NO: 513021 - DNA, 33 bp, Homo sapien
gatgccactaagaacactcatgattcaggagag

SEQ ID NO: 513022 - DNA, 33 bp, Homo sapien
gatgccactaagaacattcatgattcaggagag

SEQ ID NO: 513023 - DNA, 33 bp, Homo sapien
tgagagacctcaggcaagaaggatcaaatcatt

SEQ ID NO: 513024 - DNA, 33 bp, Homo sapien
tgagagacctcaggcaggaaggatcaaatcatt

SEQ ID NO: 513025 - DNA, 33 bp, Homo sapien
gtgcaagatagatttacagttagttttgttttg

SEQ ID NO: 513026 - DNA, 33 bp, Homo sapien
gtgcaagatagatttatagttagttttgttttg

SEQ ID NO: 513027 - DNA, 33 bp, Homo sapien
aatgtataatataaataaggaagccattcattt

SEQ ID NO: 513028 - DNA, 33 bp, Homo sapien
aatgtataatataaatgaggaagccattcattt

SEQ ID NO: 513029 - DNA, 33 bp, Homo sapien
gcagctgcaaggtgaccatatgagtgcgggagg

SEQ ID NO: 513030 - DNA, 33 bp, Homo sapien
gcagctgcaaggtgactatatgagtgcgggagg

SEQ ID NO: 513031 - DNA, 33 bp, Homo sapien
gtcttctacgtgcacacgctgacggtgggcgtc

SEQ ID NO: 513032 - DNA, 33 bp, Homo sapien
gtcttctacgtgcacatgctgacggtgggcgtc

SEQ ID NO: 513033 - DNA, 33 bp, Homo sapien
tgttgcaggttagggaatcaaggctgagtgtct

SEQ ID NO: 513034 - DNA, 33 bp, Homo sapien
tgttgcaggttagggagtcaaggctgagtgtct

SEQ ID NO: 513035 - DNA, 33 bp, Homo sapien
tttacagattatgttgcacaaaacacttgtggc

SEQ ID NO: 513036 - DNA, 33 bp, Homo sapien
tttacagattatgttgtacaaaacacttgtggc

SEQ ID NO: 513037 - DNA, 33 bp, Homo sapien
tctatgtctgttgaaaggtccatatgagttttg

SEQ ID NO: 513038 - DNA, 33 bp, Homo sapien
tctatgtctgttgaaatgtccatatgagttttg

SEQ ID NO: 513039 - DNA, 33 bp, Homo sapien
gagaatcggctggtaccggatctgtttccaagg

SEQ ID NO: 513040 - DNA, 33 bp, Homo sapien
gagaatcggctggtactggatctgtttccaagg

SEQ ID NO: 513041 - DNA, 33 bp, Homo sapien
gtgcatactagtctgaagcaggttaagctgtgc

SEQ ID NO: 513042 - DNA, 33 bp, Homo sapien
gtgcatactagtctgaggcaggttaagctgtgc

SEQ ID NO: 513043 - DNA, 33 bp, Homo sapien
agagattgcccttcacagaactttactctctta

SEQ ID NO: 513044 - DNA, 33 bp, Homo sapien
agagattgcccttcacggaactttactctctta

SEQ ID NO: 513045 - DNA, 33 bp, Homo sapien
ttcccaaaccctgtcacacattgaactcttcag

SEQ ID NO: 513046 - DNA, 33 bp, Homo sapien
ttcccaaaccctgtcatacattgaactcttcag

SEQ ID NO: 513047 - DNA, 33 bp, Homo sapien
catgacagcctcagagccgaccaccatgtaaaa

SEQ ID NO: 513048 - DNA, 33 bp, Homo sapien
catgacagcctcagagtcgaccaccatgtaaaa

SEQ ID NO: 513049 - DNA, 33 bp, Homo sapien
accaaaatgcagatacagataggcagaagatga

SEQ ID NO: 513050 - DNA, 33 bp, Homo sapien
accaaaatgcagatacggataggcagaagatga

SEQ ID NO: 513051 - DNA, 33 bp, Homo sapien
ttgcaaaggctgataccgggacaacactacttc

SEQ ID NO: 513052 - DNA, 33 bp, Homo sapien
ttgcaaaggctgatactgggacaacactacttc

SEQ ID NO: 513053 - DNA, 33 bp, Homo sapien
actgctcaagaaaaccaggaaggccagtcaatt

SEQ ID NO: 513054 - DNA, 33 bp, Homo sapien
actgctcaagaaaaccgggaaggccagtcaatt

SEQ ID NO: 513055 - DNA, 33 bp, Homo sapien
gtatgaaatttcaccaccttactcaacttggga

SEQ ID NO: 513056 - DNA, 33 bp, Homo sapien
gtatgaaatttcaccatcttactcaacttggga

SEQ ID NO: 513057 - DNA, 33 bp, Homo sapien
tagtcatttaggagacagaaatacaaagacatt

SEQ ID NO: 513058 - DNA, 33 bp, Homo sapien
tagtcatttaggagaccgaaatacaaagacatt

SEQ ID NO: 513059 - DNA, 33 bp, Homo sapien
ctttttgttcatattccaatgtcttccaaagtt

SEQ ID NO: 513060 - DNA, 33 bp, Homo sapien
ctttttgttcatattctaatgtcttccaaagtt

SEQ ID NO: 513061 - DNA, 33 bp, Homo sapien
cgaagatatgtctacacgtgaactgagaaggaa

SEQ ID NO: 513062 - DNA, 33 bp, Homo sapien
cgaagatatgtctacatgtgaactgagaaggaa

SEQ ID NO: 513063 - DNA, 33 bp, Homo sapien
aatttgccaagtgttcgagaatttctgtaacag

SEQ ID NO: 513064 - DNA, 33 bp, Homo sapien
aatttgccaagtgttctagaatttctgtaacag

SEQ ID NO: 513065 - DNA, 33 bp, Homo sapien
cactgaaggattcactaaattctccccagaaag

SEQ ID NO: 513066 - DNA, 33 bp, Homo sapien
cactgaaggattcactgaattctccccagaaag

SEQ ID NO: 513067 - DNA, 33 bp, Homo sapien
ccctccaatatgcacactgaaaagtgtttcctt

SEQ ID NO: 513068 - DNA, 33 bp, Homo sapien
ccctccaatatgcacattgaaaagtgtttcctt

SEQ ID NO: 513069 - DNA, 33 bp, Homo sapien
tggattaaagggaagaagagagaagctggctcc

SEQ ID NO: 513070 - DNA, 33 bp, Homo sapien
tggattaaagggaagatgagagaagctggctcc

SEQ ID NO: 513071 - DNA, 33 bp, Homo sapien
atcctggctattgacaacaccacgttaaatagc

SEQ ID NO: 513072 - DNA, 33 bp, Homo sapien
atcctggctattgacagcaccacgttaaatagc

SEQ ID NO: 513073 - DNA, 33 bp, Homo sapien
cgtacacttctagaccacttcctgactaggccc

SEQ ID NO: 513074 - DNA, 33 bp, Homo sapien
cgtacacttctagaccgcttcctgactaggccc

SEQ ID NO: 513075 - DNA, 33 bp, Homo sapien
gaacctttttattagcagagttgccattttctg

SEQ ID NO: 513076 - DNA, 33 bp, Homo sapien
gaacctttttattagctgagttgccattttctg

SEQ ID NO: 513077 - DNA, 33 bp, Homo sapien
caattctgaggaagaaaaaaatgctagcatgga

SEQ ID NO: 513078 - DNA, 33 bp, Homo sapien
caattctgaggaagaagaaaatgctagcatgga

SEQ ID NO: 513079 - DNA, 33 bp, Homo sapien
agtatgctaacacttaagagagagttttcagag

SEQ ID NO: 513080 - DNA, 33 bp, Homo sapien
agtatgctaacacttaggagagagttttcagag

SEQ ID NO: 513081 - DNA, 33 bp, Homo sapien
cttttctatagtttcagtcctgagagacttttg

SEQ ID NO: 513082 - DNA, 33 bp, Homo sapien
cttttctatagtttcattcctgagagacttttg

SEQ ID NO: 513083 - DNA, 33 bp, Homo sapien
acatacccttctgtccaccataatcttacctgc

SEQ ID NO: 513084 - DNA, 33 bp, Homo sapien
acatacccttctgtccgccataatcttacctgc

SEQ ID NO: 513085 - DNA, 33 bp, Homo sapien
gtggctgtcctctatacgcatcatgtccatgcc

SEQ ID NO: 513086 - DNA, 33 bp, Homo sapien
gtggctgtcctctatatgcatcatgtccatgcc

SEQ ID NO: 513087 - DNA, 33 bp, Homo sapien
tactggcttgtttaacaactcacctgttgaagg

SEQ ID NO: 513088 - DNA, 33 bp, Homo sapien
tactggcttgtttaaccactcacctgttgaagg

SEQ ID NO: 513089 - DNA, 33 bp, Homo sapien
ttctcatctgactcacaactgtccaacaggtga

SEQ ID NO: 513090 - DNA, 33 bp, Homo sapien
ttctcatctgactcacgactgtccaacaggtga

SEQ ID NO: 513091 - DNA, 33 bp, Homo sapien
gaggtatatcaggtcaatataatacactcgtag

SEQ ID NO: 513092 - DNA, 33 bp, Homo sapien
gaggtatatcaggtcagtataatacactcgtag

SEQ ID NO: 513093 - DNA, 33 bp, Homo sapien
taatgtaccaaacctgcaaattcatgtagggca

SEQ ID NO: 513094 - DNA, 33 bp, Homo sapien
taatgtaccaaacctggaaattcatgtagggca

SEQ ID NO: 513095 - DNA, 33 bp, Homo sapien
atggagtactgactaagtaagcagaggtggaca

SEQ ID NO: 513096 - DNA, 33 bp, Homo sapien
atggagtactgactaattaagcagaggtggaca

SEQ ID NO: 513097 - DNA, 33 bp, Homo sapien
aaaagatcttttggcaaaaatgcttacaatgca

SEQ ID NO: 513098 - DNA, 33 bp, Homo sapien
aaaagatcttttggcagaaatgcttacaatgca

SEQ ID NO: 513099 - DNA, 33 bp, Homo sapien
ttccttccaacaaagacgattaagaagacagca

SEQ ID NO: 513100 - DNA, 33 bp, Homo sapien
ttccttccaacaaagatgattaagaagacagca

SEQ ID NO: 513101 - DNA, 33 bp, Homo sapien
gctccaggaattcacaactttctcctgcatcat

SEQ ID NO: 513102 - DNA, 33 bp, Homo sapien
gctccaggaattcacagctttctcctgcatcat

SEQ ID NO: 513103 - DNA, 33 bp, Homo sapien
tcatatcacagtctaacggctaatcttcatagt

SEQ ID NO: 513104 - DNA, 33 bp, Homo sapien
tcatatcacagtctaatggctaatcttcatagt

SEQ ID NO: 513105 - DNA, 33 bp, Homo sapien
aaactctacatccaaaactctacatctaaatgt

SEQ ID NO: 513106 - DNA, 33 bp, Homo sapien
aaactctacatccaaagctctacatctaaatgt

SEQ ID NO: 513107 - DNA, 33 bp, Homo sapien
atttgagacacaggtacgagggcaaggccatgt

SEQ ID NO: 513108 - DNA, 33 bp, Homo sapien
atttgagacacaggtatgagggcaaggccatgt

SEQ ID NO: 513109 - DNA, 33 bp, Homo sapien
ctgtataagatctaaagccatggtttgaaaaaa

SEQ ID NO: 513110 - DNA, 33 bp, Homo sapien
ctgtataagatctaaatccatggtttgaaaaaa

SEQ ID NO: 513111 - DNA, 33 bp, Homo sapien
gtacaaatcatcacaccgggctgtttttacttt

SEQ ID NO: 513112 - DNA, 33 bp, Homo sapien
gtacaaatcatcacactgggctgtttttacttt

SEQ ID NO: 513113 - DNA, 33 bp, Homo sapien
tgtgatgatttgtaccgatgatcccaacgcttt

SEQ ID NO: 513114 - DNA, 33 bp, Homo sapien
tgtgatgatttgtacctatgatcccaacgcttt

SEQ ID NO: 513115 - DNA, 33 bp, Homo sapien
aaacaacgtgacagtaccaaattccctaaaaca

SEQ ID NO: 513116 - DNA, 33 bp, Homo sapien
aaacaacgtgacagtatcaaattccctaaaaca

SEQ ID NO: 513117 - DNA, 33 bp, Homo sapien
atctccaaaacttatccctattttctgaatgat

SEQ ID NO: 513118 - DNA, 33 bp, Homo sapien
atctccaaaacttatctctattttctgaatgat

SEQ ID NO: 513119 - DNA, 33 bp, Homo sapien
accagattttgctttccataattctgagaacat

SEQ ID NO: 513120 - DNA, 33 bp, Homo sapien
accagattttgctttctataattctgagaacat

SEQ ID NO: 513121 - DNA, 33 bp, Homo sapien
atttgtccatctgacacaaattaacctcttgct

SEQ ID NO: 513122 - DNA, 33 bp, Homo sapien
atttgtccatctgacataaattaacctcttgct

SEQ ID NO: 513123 - DNA, 33 bp, Homo sapien
tcaaaaaagaattctacgaaaccagctggatct

SEQ ID NO: 513124 - DNA, 33 bp, Homo sapien
tcaaaaaagaattctatgaaaccagctggatct

SEQ ID NO: 513125 - DNA, 33 bp, Homo sapien
cttttctggaatttcacataacacaatcatacc

SEQ ID NO: 513126 - DNA, 33 bp, Homo sapien
cttttctggaatttcatataacacaatcatacc

SEQ ID NO: 513127 - DNA, 33 bp, Homo sapien
cctagaatcttacccaagcatttcatattcagc

SEQ ID NO: 513128 - DNA, 33 bp, Homo sapien
cctagaatcttacccaggcatttcatattcagc

SEQ ID NO: 513129 - DNA, 33 bp, Homo sapien
gaaccttccacaaggcaaacttagagaaaccct

SEQ ID NO: 513130 - DNA, 33 bp, Homo sapien
gaaccttccacaaggcgaacttagagaaaccct

SEQ ID NO: 513131 - DNA, 33 bp, Homo sapien
ctgagggcacaagaaacgcagatgtccaaaatg

SEQ ID NO: 513132 - DNA, 33 bp, Homo sapien
ctgagggcacaagaaatgcagatgtccaaaatg

SEQ ID NO: 513133 - DNA, 33 bp, Homo sapien
tctggcctcttaacagaatcaggactaggcccc

SEQ ID NO: 513134 - DNA, 33 bp, Homo sapien
tctggcctcttaacaggatcaggactaggcccc

SEQ ID NO: 513135 - DNA, 33 bp, Homo sapien
tttctacagtacacaaccactatggtaaaaggc

SEQ ID NO: 513136 - DNA, 33 bp, Homo sapien
tttctacagtacacaatcactatggtaaaaggc

SEQ ID NO: 513137 - DNA, 33 bp, Homo sapien
aaggcgagttagcgcaacttctactcctgccac

SEQ ID NO: 513138 - DNA, 33 bp, Homo sapien
aaggcgagttagcgcatcttctactcctgccac

SEQ ID NO: 513139 - DNA, 33 bp, Homo sapien
tgatcatgcatacgaaaaattcagcatccagtg

SEQ ID NO: 513140 - DNA, 33 bp, Homo sapien
tgatcatgcatacgaacaattcagcatccagtg

SEQ ID NO: 513141 - DNA, 33 bp, Homo sapien
gcagaaagaatatgcaaatggaggctgcaaggg

SEQ ID NO: 513142 - DNA, 33 bp, Homo sapien
gcagaaagaatatgcagatggaggctgcaaggg

SEQ ID NO: 513143 - DNA, 33 bp, Homo sapien
cattcttaactctacaggtaaaaccagaggaaa

SEQ ID NO: 513144 - DNA, 33 bp, Homo sapien
cattcttaactctacatgtaaaaccagaggaaa

SEQ ID NO: 513145 - DNA, 33 bp, Homo sapien
gttacaaaatctatcactgagggaggctgtcca

SEQ ID NO: 513146 - DNA, 33 bp, Homo sapien
gttacaaaatctatcattgagggaggctgtcca

SEQ ID NO: 513147 - DNA, 33 bp, Homo sapien
atgcaggcaaaatcaactatgtattcagacatt

SEQ ID NO: 513148 - DNA, 33 bp, Homo sapien
atgcaggcaaaatcaattatgtattcagacatt

SEQ ID NO: 513149 - DNA, 33 bp, Homo sapien
gagaatatagactctgaattgatttttaaaaca

SEQ ID NO: 513150 - DNA, 33 bp, Homo sapien
gagaatatagactctggattgatttttaaaaca

SEQ ID NO: 513151 - DNA, 33 bp, Homo sapien
tgcaatcctacgtggaaagtcaaccacttagtt

SEQ ID NO: 513152 - DNA, 33 bp, Homo sapien
tgcaatcctacgtggagagtcaaccacttagtt

SEQ ID NO: 513153 - DNA, 33 bp, Homo sapien
ctaaatgctgtaaacacgtatgccttattctac

SEQ ID NO: 513154 - DNA, 33 bp, Homo sapien
ctaaatgctgtaaacatgtatgccttattctac

SEQ ID NO: 513155 - DNA, 33 bp, Homo sapien
caaagtgaagcccaaaacaaatacttgtagtta

SEQ ID NO: 513156 - DNA, 33 bp, Homo sapien
caaagtgaagcccaaagcaaatacttgtagtta

SEQ ID NO: 513157 - DNA, 33 bp, Homo sapien
aatagttttaaaaggacaagggagaatgtaaat

SEQ ID NO: 513158 - DNA, 33 bp, Homo sapien
aatagttttaaaaggagaagggagaatgtaaat

SEQ ID NO: 513159 - DNA, 33 bp, Homo sapien
ctcactgctcctcacacgaaggcagttcctgtg

SEQ ID NO: 513160 - DNA, 33 bp, Homo sapien
ctcactgctcctcacatgaaggcagttcctgtg

SEQ ID NO: 513161 - DNA, 33 bp, Homo sapien
tattacttataagccaaaagcatcaaaaacagt

SEQ ID NO: 513162 - DNA, 33 bp, Homo sapien
tattacttataagccagaagcatcaaaaacagt

SEQ ID NO: 513163 - DNA, 33 bp, Homo sapien
tgaggtacaaatccaacagagctttaatcccaa

SEQ ID NO: 513164 - DNA, 33 bp, Homo sapien
tgaggtacaaatccaatagagctttaatcccaa

SEQ ID NO: 513165 - DNA, 33 bp, Homo sapien
ttcagaagtgttcttccctctttgattttctgg

SEQ ID NO: 513166 - DNA, 33 bp, Homo sapien
ttcagaagtgttcttctctctttgattttctgg

SEQ ID NO: 513167 - DNA, 33 bp, Homo sapien
tcatgtaggtgggatcacaatatttgccctttt

SEQ ID NO: 513168 - DNA, 33 bp, Homo sapien
tcatgtaggtgggatcgcaatatttgccctttt

SEQ ID NO: 513169 - DNA, 33 bp, Homo sapien
aacacaagctgcatgacatgtaacagacatagc

SEQ ID NO: 513170 - DNA, 33 bp, Homo sapien
aacacaagctgcatgatatgtaacagacatagc

SEQ ID NO: 513171 - DNA, 33 bp, Homo sapien
ggtctttggactaagacagcagactttcttggg

SEQ ID NO: 513172 - DNA, 33 bp, Homo sapien
ggtctttggactaagatagcagactttcttggg

SEQ ID NO: 513173 - DNA, 33 bp, Homo sapien
ggtgtcaccattgctccatgattaatccagcaa

SEQ ID NO: 513174 - DNA, 33 bp, Homo sapien
ggtgtcaccattgctctatgattaatccagcaa

SEQ ID NO: 513175 - DNA, 33 bp, Homo sapien
gtttctgtcactctcaactgaacctaatgctaa

SEQ ID NO: 513176 - DNA, 33 bp, Homo sapien
gtttctgtcactctcagctgaacctaatgctaa

SEQ ID NO: 513177 - DNA, 33 bp, Homo sapien
ataccgcatccagagaagtcgcagagccacagc

SEQ ID NO: 513178 - DNA, 33 bp, Homo sapien
ataccgcatccagagaggtcgcagagccacagc

SEQ ID NO: 513179 - DNA, 33 bp, Homo sapien
ctccagacatgaccagcaggctctaaggctcat

SEQ ID NO: 513180 - DNA, 33 bp, Homo sapien
ctccagacatgaccaggaggctctaaggctcat

SEQ ID NO: 513181 - DNA, 33 bp, Homo sapien
atggctgaccaagtgccgagcaaatgaatgtgg

SEQ ID NO: 513182 - DNA, 33 bp, Homo sapien
atggctgaccaagtgctgagcaaatgaatgtgg

SEQ ID NO: 513183 - DNA, 33 bp, Homo sapien
agaagggacagccttaacccagcattttctgtg

SEQ ID NO: 513184 - DNA, 33 bp, Homo sapien
agaagggacagccttagcccagcattttctgtg

SEQ ID NO: 513185 - DNA, 33 bp, Homo sapien
ctggggtatgaggaacagtggtttctgggaaat

SEQ ID NO: 513186 - DNA, 33 bp, Homo sapien
ctggggtatgaggaacggtggtttctgggaaat

SEQ ID NO: 513187 - DNA, 33 bp, Homo sapien
ttcccactggtcccttcaagagctgagcaattt

SEQ ID NO: 513188 - DNA, 33 bp, Homo sapien
ttcccactggtccctttaagagctgagcaattt

SEQ ID NO: 513189 - DNA, 33 bp, Homo sapien
ggagaggagctggcggcaccatggagagcccag

SEQ ID NO: 513190 - DNA, 33 bp, Homo sapien
ggagaggagctggcggtaccatggagagcccag

SEQ ID NO: 513191 - DNA, 33 bp, Homo sapien
aggacatttaggatccacaggtgggcagaggga

SEQ ID NO: 513192 - DNA, 33 bp, Homo sapien
aggacatttaggatccgcaggtgggcagaggga

SEQ ID NO: 513193 - DNA, 33 bp, Homo sapien
cttcgtttctgtggcacgcgacagtttccacct

SEQ ID NO: 513194 - DNA, 33 bp, Homo sapien
cttcgtttctgtggcatgcgacagtttccacct

SEQ ID NO: 513195 - DNA, 33 bp, Homo sapien
attaatgaaggaaacccgcagatctaagactca

SEQ ID NO: 513196 - DNA, 33 bp, Homo sapien
attaatgaaggaaacctgcagatctaagactca

SEQ ID NO: 513197 - DNA, 33 bp, Homo sapien
gtgttgaatctacaaaccaatttggagaaaatc

SEQ ID NO: 513198 - DNA, 33 bp, Homo sapien
gtgttgaatctacaaagcaatttggagaaaatc

SEQ ID NO: 513199 - DNA, 33 bp, Homo sapien
gcgctttgtcttctcaaatacagtggacacata

SEQ ID NO: 513200 - DNA, 33 bp, Homo sapien
gcgctttgtcttctcatatacagtggacacata

SEQ ID NO: 513201 - DNA, 33 bp, Homo sapien
cataagtgcatgatgaagaacaagagctgagtg

SEQ ID NO: 513202 - DNA, 33 bp, Homo sapien
cataagtgcatgatgaggaacaagagctgagtg

SEQ ID NO: 513203 - DNA, 33 bp, Homo sapien
tgtccacaggccctgacgacgaggctttgaact

SEQ ID NO: 513204 - DNA, 33 bp, Homo sapien
tgtccacaggccctgatgacgaggctttgaact

SEQ ID NO: 513205 - DNA, 33 bp, Homo sapien
ctcccacagatctttaccatttcaggactctag

SEQ ID NO: 513206 - DNA, 33 bp, Homo sapien
ctcccacagatctttatcatttcaggactctag

SEQ ID NO: 513207 - DNA, 33 bp, Homo sapien
atgagataagaaaaaagcattaactgccttgac

SEQ ID NO: 513208 - DNA, 33 bp, Homo sapien
atgagataagaaaaaatcattaactgccttgac

SEQ ID NO: 513209 - DNA, 33 bp, Homo sapien
gtcttcacgtctgccaaatggagatcacattag

SEQ ID NO: 513210 - DNA, 33 bp, Homo sapien
gtcttcacgtctgccagatggagatcacattag

SEQ ID NO: 513211 - DNA, 33 bp, Homo sapien
agctccactggcgggacggtcccacagtcatgg

SEQ ID NO: 513212 - DNA, 33 bp, Homo sapien
agctccactggcgggatggtcccacagtcatgg

SEQ ID NO: 513213 - DNA, 33 bp, Homo sapien
cagccactacccttcaacaggatggtttcagtc

SEQ ID NO: 513214 - DNA, 33 bp, Homo sapien
cagccactacccttcaccaggatggtttcagtc

SEQ ID NO: 513215 - DNA, 33 bp, Homo sapien
tggggacagtataagacaatgttctggtggctg

SEQ ID NO: 513216 - DNA, 33 bp, Homo sapien
tggggacagtataagagaatgttctggtggctg

SEQ ID NO: 513217 - DNA, 33 bp, Homo sapien
gggtgcaaggcttaaaaggatggcttcagcaac

SEQ ID NO: 513218 - DNA, 33 bp, Homo sapien
gggtgcaaggcttaaagggatggcttcagcaac

SEQ ID NO: 513219 - DNA, 33 bp, Homo sapien
ggccccagcagatcaaatgtgacccaatttcat

SEQ ID NO: 513220 - DNA, 33 bp, Homo sapien
ggccccagcagatcaagtgtgacccaatttcat

SEQ ID NO: 513221 - DNA, 33 bp, Homo sapien
gctcaaggaactcatccgaagtgaatgaaattg

SEQ ID NO: 513222 - DNA, 33 bp, Homo sapien
gctcaaggaactcatctgaagtgaatgaaattg

SEQ ID NO: 513223 - DNA, 33 bp, Homo sapien
aatcgttctcttgtcaactatttactgagcctg

SEQ ID NO: 513224 - DNA, 33 bp, Homo sapien
aatcgttctcttgtcatctatttactgagcctg

SEQ ID NO: 513225 - DNA, 33 bp, Homo sapien
atattattgttgttaccaataaaacgccatgcc

SEQ ID NO: 513226 - DNA, 33 bp, Homo sapien
atattattgttgttactaataaaacgccatgcc

SEQ ID NO: 513227 - DNA, 33 bp, Homo sapien
actgatgttaattccaatctcccagttttactt

SEQ ID NO: 513228 - DNA, 33 bp, Homo sapien
actgatgttaattccagtctcccagttttactt

SEQ ID NO: 513229 - DNA, 33 bp, Homo sapien
ggtccaggggtaaaagcagctagtgatgagtta

SEQ ID NO: 513230 - DNA, 33 bp, Homo sapien
ggtccaggggtaaaaggagctagtgatgagtta

SEQ ID NO: 513231 - DNA, 33 bp, Homo sapien
gtctcctaatgtgtcacagaaaaaatgtccaag

SEQ ID NO: 513232 - DNA, 33 bp, Homo sapien
gtctcctaatgtgtcatagaaaaaatgtccaag

SEQ ID NO: 513233 - DNA, 33 bp, Homo sapien
aaacaaatagaagttacgcagagaaaaaaggct

SEQ ID NO: 513234 - DNA, 33 bp, Homo sapien
aaacaaatagaagttaggcagagaaaaaaggct

SEQ ID NO: 513235 - DNA, 33 bp, Homo sapien
ggaagattcgtgttcaccactgacagaggactc

SEQ ID NO: 513236 - DNA, 33 bp, Homo sapien
ggaagattcgtgttcatcactgacagaggactc

SEQ ID NO: 513237 - DNA, 33 bp, Homo sapien
gaatttaccagtaagaccatttggtgctgggct

SEQ ID NO: 513238 - DNA, 33 bp, Homo sapien
gaatttaccagtaagatcatttggtgctgggct

SEQ ID NO: 513239 - DNA, 33 bp, Homo sapien
gtagcattaaacaagacagtgcatgcagaattg

SEQ ID NO: 513240 - DNA, 33 bp, Homo sapien
gtagcattaaacaagatagtgcatgcagaattg

SEQ ID NO: 513241 - DNA, 33 bp, Homo sapien
gaacctggggccagagcatttggagtgttcttt

SEQ ID NO: 513242 - DNA, 33 bp, Homo sapien
gaacctggggccagagtatttggagtgttcttt

SEQ ID NO: 513243 - DNA, 33 bp, Homo sapien
aacagaatgatcagaaaaggacatctgagcaga

SEQ ID NO: 513244 - DNA, 33 bp, Homo sapien
aacagaatgatcagaagaggacatctgagcaga

SEQ ID NO: 513245 - DNA, 33 bp, Homo sapien
ctgctcagatgaaggagtcctcaccaattagca

SEQ ID NO: 513246 - DNA, 33 bp, Homo sapien
ctgctcagatgaaggattcctcaccaattagca

SEQ ID NO: 513247 - DNA, 33 bp, Homo sapien
ggggagcaaagtgacaccaaagaggctgtcagc

SEQ ID NO: 513248 - DNA, 33 bp, Homo sapien
ggggagcaaagtgacatcaaagaggctgtcagc

SEQ ID NO: 513249 - DNA, 33 bp, Homo sapien
tcagagaggacgcagcacctggttggagccaat

SEQ ID NO: 513250 - DNA, 33 bp, Homo sapien
tcagagaggacgcagctcctggttggagccaat

SEQ ID NO: 513251 - DNA, 33 bp, Homo sapien
attgaaaagctcttaacattgctgagtcccagc

SEQ ID NO: 513252 - DNA, 33 bp, Homo sapien
attgaaaagctcttaatattgctgagtcccagc

SEQ ID NO: 513253 - DNA, 33 bp, Homo sapien
cctactcaaaagtccaacgtagatatcaaatgg

SEQ ID NO: 513254 - DNA, 33 bp, Homo sapien
cctactcaaaagtccagcgtagatatcaaatgg

SEQ ID NO: 513255 - DNA, 33 bp, Homo sapien
gttaaattcactgtggaatgtgtaccccttacc

SEQ ID NO: 513256 - DNA, 33 bp, Homo sapien
gttaaattcactgtgggatgtgtaccccttacc

SEQ ID NO: 513257 - DNA, 33 bp, Homo sapien
gcttggctgtgaaaggccctaacatagtcacaa

SEQ ID NO: 513258 - DNA, 33 bp, Homo sapien
gcttggctgtgaaaggtcctaacatagtcacaa

SEQ ID NO: 513259 - DNA, 33 bp, Homo sapien
gggatgggagtaaaggaacttgccataagagag

SEQ ID NO: 513260 - DNA, 33 bp, Homo sapien
gggatgggagtaaagggacttgccataagagag

SEQ ID NO: 513261 - DNA, 33 bp, Homo sapien
aatttacaagactttcactggaaatattactta

SEQ ID NO: 513262 - DNA, 33 bp, Homo sapien
aatttacaagactttcgctggaaatattactta

SEQ ID NO: 513263 - DNA, 33 bp, Homo sapien
cgaggtaagcctcaataagcaggagacatttca

SEQ ID NO: 513264 - DNA, 33 bp, Homo sapien
cgaggtaagcctcaatgagcaggagacatttca

SEQ ID NO: 513265 - DNA, 33 bp, Homo sapien
cagaactttagaatgacgttcattagaaccttg

SEQ ID NO: 513266 - DNA, 33 bp, Homo sapien
cagaactttagaatgatgttcattagaaccttg

SEQ ID NO: 513267 - DNA, 33 bp, Homo sapien
gatggagggaacatgtaaaaacagccagaaaat

SEQ ID NO: 513268 - DNA, 33 bp, Homo sapien
gatggagggaacatgtgaaaacagccagaaaat

SEQ ID NO: 513269 - DNA, 33 bp, Homo sapien
atctacaaaatgcaaactaaagcaagtgtatca

SEQ ID NO: 513270 - DNA, 33 bp, Homo sapien
atctacaaaatgcaaattaaagcaagtgtatca

SEQ ID NO: 513271 - DNA, 33 bp, Homo sapien
atattagcaaggagtgaacagagagataagaga

SEQ ID NO: 513272 - DNA, 33 bp, Homo sapien
atattagcaaggagtggacagagagataagaga

SEQ ID NO: 513273 - DNA, 33 bp, Homo sapien
tgtattcacttaatacggatcagatgtgacaca

SEQ ID NO: 513274 - DNA, 33 bp, Homo sapien
tgtattcacttaatactgatcagatgtgacaca

SEQ ID NO: 513275 - DNA, 33 bp, Homo sapien
aaatcacactcatgccaaaatatgagaaataag

SEQ ID NO: 513276 - DNA, 33 bp, Homo sapien
aaatcacactcatgcccaaatatgagaaataag

SEQ ID NO: 513277 - DNA, 33 bp, Homo sapien
aggcaaaggcttagtgaatcaggaggagggaag

SEQ ID NO: 513278 - DNA, 33 bp, Homo sapien
aggcaaaggcttagtggatcaggaggagggaag

SEQ ID NO: 513279 - DNA, 33 bp, Homo sapien
ggcatgggattgggaacgctgtttactttggaa

SEQ ID NO: 513280 - DNA, 33 bp, Homo sapien
ggcatgggattgggaatgctgtttactttggaa

SEQ ID NO: 513281 - DNA, 33 bp, Homo sapien
actttgtaaccattaaatgagatatgtgaagtg

SEQ ID NO: 513282 - DNA, 33 bp, Homo sapien
actttgtaaccattaagtgagatatgtgaagtg

SEQ ID NO: 513283 - DNA, 33 bp, Homo sapien
aggttgctttggcctaagggcagcgtttacagt

SEQ ID NO: 513284 - DNA, 33 bp, Homo sapien
aggttgctttggcctacgggcagcgtttacagt

SEQ ID NO: 513285 - DNA, 33 bp, Homo sapien
agccagtaatttccataataacatcaaggttgc

SEQ ID NO: 513286 - DNA, 33 bp, Homo sapien
agccagtaatttccatgataacatcaaggttgc

SEQ ID NO: 513287 - DNA, 33 bp, Homo sapien
cactgttcggagggacacttggaataaaatgat

SEQ ID NO: 513288 - DNA, 33 bp, Homo sapien
cactgttcggagggacgcttggaataaaatgat

SEQ ID NO: 513289 - DNA, 33 bp, Homo sapien
tttattaactggaatcactgtgtccaattttgg

SEQ ID NO: 513290 - DNA, 33 bp, Homo sapien
tttattaactggaatcgctgtgtccaattttgg

SEQ ID NO: 513291 - DNA, 33 bp, Homo sapien
gttattgagggtaaaggcttcttgctaacctga

SEQ ID NO: 513292 - DNA, 33 bp, Homo sapien
gttattgagggtaaagtcttcttgctaacctga

SEQ ID NO: 513293 - DNA, 33 bp, Homo sapien
gaattcctgaaatgagacgtagccagaggtttt

SEQ ID NO: 513294 - DNA, 33 bp, Homo sapien
gaattcctgaaatgagtcgtagccagaggtttt

SEQ ID NO: 513295 - DNA, 33 bp, Homo sapien
atgtatctgataaaggaccttcctgaaatattg

SEQ ID NO: 513296 - DNA, 33 bp, Homo sapien
atgtatctgataaagggccttcctgaaatattg

SEQ ID NO: 513297 - DNA, 33 bp, Homo sapien
tgtgacttgaacttcaaatttccctgttgtgaa

SEQ ID NO: 513298 - DNA, 33 bp, Homo sapien
tgtgacttgaacttcacatttccctgttgtgaa

SEQ ID NO: 513299 - DNA, 33 bp, Homo sapien
acaagcctggaggaaaaggcggagagcagagga

SEQ ID NO: 513300 - DNA, 33 bp, Homo sapien
acaagcctggaggaaagggcggagagcagagga

SEQ ID NO: 513301 - DNA, 33 bp, Homo sapien
ctccagccattgccaaactgcagtcctattatt

SEQ ID NO: 513302 - DNA, 33 bp, Homo sapien
ctccagccattgccaagctgcagtcctattatt

SEQ ID NO: 513303 - DNA, 33 bp, Homo sapien
atggccaaaatggcccaagcaggaagaagggag

SEQ ID NO: 513304 - DNA, 33 bp, Homo sapien
atggccaaaatggcccgagcaggaagaagggag

SEQ ID NO: 513305 - DNA, 33 bp, Homo sapien
tgtatcagggaacacaaagacgttgtccccagg

SEQ ID NO: 513306 - DNA, 33 bp, Homo sapien
tgtatcagggaacacagagacgttgtccccagg

SEQ ID NO: 513307 - DNA, 33 bp, Homo sapien
cagttagccagtaagaagcaggcagaagtcctg

SEQ ID NO: 513308 - DNA, 33 bp, Homo sapien
cagttagccagtaagaggcaggcagaagtcctg

SEQ ID NO: 513309 - DNA, 33 bp, Homo sapien
ttagctgtgatgaagaagcatggcagagcagtt

SEQ ID NO: 513310 - DNA, 33 bp, Homo sapien
ttagctgtgatgaagaggcatggcagagcagtt

SEQ ID NO: 513311 - DNA, 33 bp, Homo sapien
tttaataatcttgcacaatcagggaaggtggtg

SEQ ID NO: 513312 - DNA, 33 bp, Homo sapien
tttaataatcttgcacgatcagggaaggtggtg

SEQ ID NO: 513313 - DNA, 33 bp, Homo sapien
aaaaccgcacattaggaaaggtatccaatcaat

SEQ ID NO: 513314 - DNA, 33 bp, Homo sapien
aaaaccgcacattaggcaaggtatccaatcaat

SEQ ID NO: 513315 - DNA, 33 bp, Homo sapien
ccccaggcatctagaaagttcctagcacgttcc

SEQ ID NO: 513316 - DNA, 33 bp, Homo sapien
ccccaggcatctagaaggttcctagcacgttcc

SEQ ID NO: 513317 - DNA, 33 bp, Homo sapien
gtttatatcaagccacactcataacaggtggcg

SEQ ID NO: 513318 - DNA, 33 bp, Homo sapien
gtttatatcaagccacgctcataacaggtggcg

SEQ ID NO: 513319 - DNA, 33 bp, Homo sapien
cacatgtccagcaacaagaagagaaggaaaaaa

SEQ ID NO: 513320 - DNA, 33 bp, Homo sapien
cacatgtccagcaacaggaagagaaggaaaaaa

SEQ ID NO: 513321 - DNA, 33 bp, Homo sapien
accacagccatgacaaagaccacaatgtctgcc

SEQ ID NO: 513322 - DNA, 33 bp, Homo sapien
accacagccatgacaaggaccacaatgtctgcc

SEQ ID NO: 513323 - DNA, 33 bp, Homo sapien
catagcccttgtcaccacctcataaatcatttg

SEQ ID NO: 513324 - DNA, 33 bp, Homo sapien
catagcccttgtcaccgcctcataaatcatttg

SEQ ID NO: 513325 - DNA, 33 bp, Homo sapien
cttattggtcttgacaaattctgatgtgattac

SEQ ID NO: 513326 - DNA, 33 bp, Homo sapien
cttattggtcttgacagattctgatgtgattac

SEQ ID NO: 513327 - DNA, 33 bp, Homo sapien
ttctgacccaagtccagctgtcagtaacagccg

SEQ ID NO: 513328 - DNA, 33 bp, Homo sapien
ttctgacccaagtccatctgtcagtaacagccg

SEQ ID NO: 513329 - DNA, 33 bp, Homo sapien
ggtgtggttcctgtaccggatctgccctgatgg

SEQ ID NO: 513330 - DNA, 33 bp, Homo sapien
ggtgtggttcctgtactggatctgccctgatgg

SEQ ID NO: 513331 - DNA, 33 bp, Homo sapien
caaacagcatctagcagctgtttcggtcaacaa

SEQ ID NO: 513332 - DNA, 33 bp, Homo sapien
caaacagcatctagcatctgtttcggtcaacaa

SEQ ID NO: 513333 - DNA, 33 bp, Homo sapien
ttttggaaaactgtgcaccatcatggcagattc

SEQ ID NO: 513334 - DNA, 33 bp, Homo sapien
ttttggaaaactgtgcgccatcatggcagattc

SEQ ID NO: 513335 - DNA, 33 bp, Homo sapien
tcaatttattccatgaagctggaaaaactcctc

SEQ ID NO: 513336 - DNA, 33 bp, Homo sapien
tcaatttattccatgaggctggaaaaactcctc

SEQ ID NO: 513337 - DNA, 33 bp, Homo sapien
ggttgtggagtctataagagggcttaaggcatt

SEQ ID NO: 513338 - DNA, 33 bp, Homo sapien
ggttgtggagtctatatgagggcttaaggcatt

SEQ ID NO: 513339 - DNA, 33 bp, Homo sapien
cgcaagaataaccaagaaaacatttgacataaa

SEQ ID NO: 513340 - DNA, 33 bp, Homo sapien
cgcaagaataaccaagcaaacatttgacataaa

SEQ ID NO: 513341 - DNA, 33 bp, Homo sapien
aaagactgataatacccactgctggcaagcatg

SEQ ID NO: 513342 - DNA, 33 bp, Homo sapien
aaagactgataatacctactgctggcaagcatg

SEQ ID NO: 513343 - DNA, 33 bp, Homo sapien
acagattggcaacttgcattcaagaagcttgat

SEQ ID NO: 513344 - DNA, 33 bp, Homo sapien
acagattggcaacttgtattcaagaagcttgat

SEQ ID NO: 513345 - DNA, 33 bp, Homo sapien
tagaccatgcggctgacaagaaaagagtatttc

SEQ ID NO: 513346 - DNA, 33 bp, Homo sapien
tagaccatgcggctgagaagaaaagagtatttc

SEQ ID NO: 513347 - DNA, 33 bp, Homo sapien
acagtttccgagcaaacagtggatcccaaataa

SEQ ID NO: 513348 - DNA, 33 bp, Homo sapien
acagtttccgagcaaatagtggatcccaaataa

SEQ ID NO: 513349 - DNA, 33 bp, Homo sapien
ctcaagagttctgacaacaaacacgcataagct

SEQ ID NO: 513350 - DNA, 33 bp, Homo sapien
ctcaagagttctgacagcaaacacgcataagct

SEQ ID NO: 513351 - DNA, 33 bp, Homo sapien
gcaagcagtgacccccagctcaggtaaaggatc

SEQ ID NO: 513352 - DNA, 33 bp, Homo sapien
gcaagcagtgacccccggctcaggtaaaggatc

SEQ ID NO: 513353 - DNA, 33 bp, Homo sapien
agaaatggaaataatgcagaaagagagagaggg

SEQ ID NO: 513354 - DNA, 33 bp, Homo sapien
agaaatggaaataatggagaaagagagagaggg

SEQ ID NO: 513355 - DNA, 33 bp, Homo sapien
accatgataaatcctgcaatactccttatttat

SEQ ID NO: 513356 - DNA, 33 bp, Homo sapien
accatgataaatcctggaatactccttatttat

SEQ ID NO: 513357 - DNA, 33 bp, Homo sapien
caaggcactatagtaaagtcagaatgagcaggg

SEQ ID NO: 513358 - DNA, 33 bp, Homo sapien
caaggcactatagtaaggtcagaatgagcaggg

SEQ ID NO: 513359 - DNA, 33 bp, Homo sapien
tgatgtggccaacacaaacttaaggattaccct

SEQ ID NO: 513360 - DNA, 33 bp, Homo sapien
tgatgtggccaacacacacttaaggattaccct

SEQ ID NO: 513361 - DNA, 33 bp, Homo sapien
ggttccatttaacacagtccctttgatcacact

SEQ ID NO: 513362 - DNA, 33 bp, Homo sapien
ggttccatttaacacattccctttgatcacact

SEQ ID NO: 513363 - DNA, 33 bp, Homo sapien
gcacgctctttctgcgcactcaccagcactgag

SEQ ID NO: 513364 - DNA, 33 bp, Homo sapien
gcacgctctttctgcggactcaccagcactgag

SEQ ID NO: 513365 - DNA, 33 bp, Homo sapien
gcaacgaggccattccaaaggttctacaggaca

SEQ ID NO: 513366 - DNA, 33 bp, Homo sapien
gcaacgaggccattccgaaggttctacaggaca

SEQ ID NO: 513367 - DNA, 33 bp, Homo sapien
aatggaaattaggcaactagcaacgaggagttt

SEQ ID NO: 513368 - DNA, 33 bp, Homo sapien
aatggaaattaggcaattagcaacgaggagttt

SEQ ID NO: 513369 - DNA, 33 bp, Homo sapien
ctggctgaacataagagaaatctaactatagta

SEQ ID NO: 513370 - DNA, 33 bp, Homo sapien
ctggctgaacataagataaatctaactatagta

SEQ ID NO: 513371 - DNA, 33 bp, Homo sapien
cactgacatccaggaaatacccccagaccaggg

SEQ ID NO: 513372 - DNA, 33 bp, Homo sapien
cactgacatccaggaagtacccccagaccaggg

SEQ ID NO: 513373 - DNA, 33 bp, Homo sapien
acccttcctgacagcacagctgggacccacatg

SEQ ID NO: 513374 - DNA, 33 bp, Homo sapien
acccttcctgacagcatagctgggacccacatg

SEQ ID NO: 513375 - DNA, 33 bp, Homo sapien
gttgatgatagccagacctggaaatggcctcat

SEQ ID NO: 513376 - DNA, 33 bp, Homo sapien
gttgatgatagccagagctggaaatggcctcat

SEQ ID NO: 513377 - DNA, 33 bp, Homo sapien
ggctcacacagattaaagggatatgtgtgcacc

SEQ ID NO: 513378 - DNA, 33 bp, Homo sapien
ggctcacacagattaaggggatatgtgtgcacc

SEQ ID NO: 513379 - DNA, 33 bp, Homo sapien
tgggaacacattgctacggcctctgcagcacct

SEQ ID NO: 513380 - DNA, 33 bp, Homo sapien
tgggaacacattgctatggcctctgcagcacct

SEQ ID NO: 513381 - DNA, 33 bp, Homo sapien
cagcacgagtgaagaacagcagaggcactgagg

SEQ ID NO: 513382 - DNA, 33 bp, Homo sapien
cagcacgagtgaagaagagcagaggcactgagg

SEQ ID NO: 513383 - DNA, 33 bp, Homo sapien
cctccgttcagccagcacgagtgaagaagagcg

SEQ ID NO: 513384 - DNA, 33 bp, Homo sapien
cctccgttcagccagcccgagtgaagaagagcg

SEQ ID NO: 513385 - DNA, 33 bp, Homo sapien
ttttataccaggaatacagcctccaataaggta

SEQ ID NO: 513386 - DNA, 33 bp, Homo sapien
ttttataccaggaatagagcctccaataaggta

SEQ ID NO: 513387 - DNA, 33 bp, Homo sapien
gactcccctccatgaacccacgggctaagccaa

SEQ ID NO: 513388 - DNA, 33 bp, Homo sapien
gactcccctccatgaatccacgggctaagccaa

SEQ ID NO: 513389 - DNA, 33 bp, Homo sapien
aggtaagagtctagtcacagtggaaacagcaag

SEQ ID NO: 513390 - DNA, 33 bp, Homo sapien
aggtaagagtctagtcgcagtggaaacagcaag

SEQ ID NO: 513391 - DNA, 33 bp, Homo sapien
ggggacagtaagaaagacctggaaacagagtgt

SEQ ID NO: 513392 - DNA, 33 bp, Homo sapien
ggggacagtaagaaagccctggaaacagagtgt

SEQ ID NO: 513393 - DNA, 33 bp, Homo sapien
ctgggcctttttctcaccatgcaatgcagagga

SEQ ID NO: 513394 - DNA, 33 bp, Homo sapien
ctgggcctttttctcatcatgcaatgcagagga

SEQ ID NO: 513395 - DNA, 33 bp, Homo sapien
catgattgcaagaccaatcatgtaggagaccaa

SEQ ID NO: 513396 - DNA, 33 bp, Homo sapien
catgattgcaagaccagtcatgtaggagaccaa

SEQ ID NO: 513397 - DNA, 33 bp, Homo sapien
tcccaaaacaaaactccaaatacacatcttgag

SEQ ID NO: 513398 - DNA, 33 bp, Homo sapien
tcccaaaacaaaactcgaaatacacatcttgag

SEQ ID NO: 513399 - DNA, 33 bp, Homo sapien
acatagcctgaggcaaagtttgggactcttgct

SEQ ID NO: 513400 - DNA, 33 bp, Homo sapien
acatagcctgaggcaaggtttgggactcttgct

SEQ ID NO: 513401 - DNA, 33 bp, Homo sapien
tccagctggctatgccacttctgcaagcacagt

SEQ ID NO: 513402 - DNA, 33 bp, Homo sapien
tccagctggctatgccgcttctgcaagcacagt

SEQ ID NO: 513403 - DNA, 33 bp, Homo sapien
gaattattatcagtagaaaggaatgcgtgggtt

SEQ ID NO: 513404 - DNA, 33 bp, Homo sapien
gaattattatcagtaggaaggaatgcgtgggtt

SEQ ID NO: 513405 - DNA, 33 bp, Homo sapien; identical to SEQ ID NO: 513403

SEQ ID NO: 513406 - DNA, 33 bp, Homo sapien; identical to SEQ ID NO: 513404

SEQ ID NO: 513407 - DNA, 33 bp, Homo sapien
ggtcagagtcccagtacgaataaaaaggaagac

SEQ ID NO: 513408 - DNA, 33 bp, Homo sapien
ggtcagagtcccagtaggaataaaaaggaagac

SEQ ID NO: 513409 - DNA, 33 bp, Homo sapien
gttttggccaatgaaacttaaggtgatgtgtgc

SEQ ID NO: 513410 - DNA, 33 bp, Homo sapien
gttttggccaatgaaatttaaggtgatgtgtgc

SEQ ID NO: 513411 - DNA, 33 bp, Homo sapien
agagaatgtgatctacccagatgatggcagcta

SEQ ID NO: 513412 - DNA, 33 bp, Homo sapien
agagaatgtgatctacgcagatgatggcagcta

SEQ ID NO: 513413 - DNA, 33 bp, Homo sapien
ctaaaaatgccaaagagcaaacagggagtgtag

SEQ ID NO: 513414 - DNA, 33 bp, Homo sapien
ctaaaaatgccaaagatcaaacagggagtgtag

SEQ ID NO: 513415 - DNA, 33 bp, Homo sapien
accaggtacaattcagaagccatatatatatat

SEQ ID NO: 513416 - DNA, 33 bp, Homo sapien
accaggtacaattcaggagccatatatatatat

SEQ ID NO: 513417 - DNA, 33 bp, Homo sapien
gccactgttccaggtaagagtctcatggagaac

SEQ ID NO: 513418 - DNA, 33 bp, Homo sapien
gccactgttccaggtaggagtctcatggagaac

SEQ ID NO: 513419 - DNA, 33 bp, Homo sapien
caaggtaagtctcagacggaaggcatgtgctaa

SEQ ID NO: 513420 - DNA, 33 bp, Homo sapien
caaggtaagtctcagatggaaggcatgtgctaa

SEQ ID NO: 513421 - DNA, 33 bp, Homo sapien
aagttaccacataggcgatgagcacattttaag

SEQ ID NO: 513422 - DNA, 33 bp, Homo sapien
aagttaccacataggctatgagcacattttaag

SEQ ID NO: 513423 - DNA, 33 bp, Homo sapien
gagtctgtgtgggagactattgtcagggctatg

SEQ ID NO: 513424 - DNA, 33 bp, Homo sapien
gagtctgtgtgggagagtattgtcagggctatg

SEQ ID NO: 513425 - DNA, 33 bp, Homo sapien
gcatcatgatcaaacaaggtttaaggcaagact

SEQ ID NO: 513426 - DNA, 33 bp, Homo sapien
gcatcatgatcaaacacggtttaaggcaagact

SEQ ID NO: 513427 - DNA, 33 bp, Homo sapien
agctctgtgatgcataagctctgtttgggcagg

SEQ ID NO: 513428 - DNA, 33 bp, Homo sapien
agctctgtgatgcatacgctctgtttgggcagg

SEQ ID NO: 513429 - DNA, 33 bp, Homo sapien
agttctccttaatccccgctctaactgtatccc

SEQ ID NO: 513430 - DNA, 33 bp, Homo sapien
agttctccttaatccctgctctaactgtatccc

SEQ ID NO: 513431 - DNA, 33 bp, Homo sapien
gtttgtcgggtgataacacaagctgggaaggag

SEQ ID NO: 513432 - DNA, 33 bp, Homo sapien
gtttgtcgggtgataatacaagctgggaaggag

SEQ ID NO: 513433 - DNA, 33 bp, Homo sapien
acttacctaatgcagacagaagtgaattttctg

SEQ ID NO: 513434 - DNA, 33 bp, Homo sapien
acttacctaatgcagagagaagtgaattttctg

SEQ ID NO: 513435 - DNA, 33 bp, Homo sapien
ctagccttcaggccaaaaaggtacagagaacag

SEQ ID NO: 513436 - DNA, 33 bp, Homo sapien
ctagccttcaggccaacaaggtacagagaacag

SEQ ID NO: 513437 - DNA, 33 bp, Homo sapien
gttgtaaattaggcaaactgaatgggcaataaa

SEQ ID NO: 513438 - DNA, 33 bp, Homo sapien
gttgtaaattaggcaacctgaatgggcaataaa

SEQ ID NO: 513439 - DNA, 33 bp, Homo sapien
catgcccaatagggacagccatgtgacggcacc

SEQ ID NO: 513440 - DNA, 33 bp, Homo sapien
catgcccaatagggacggccatgtgacggcacc

SEQ ID NO: 513441 - DNA, 33 bp, Homo sapien
aacaataagatgatgacccttgaaggaaaaaag

SEQ ID NO: 513442 - DNA, 33 bp, Homo sapien
aacaataagatgatgatccttgaaggaaaaaag

SEQ ID NO: 513443 - DNA, 33 bp, Homo sapien
caactggttgaagccaatagaaaatattttaga

SEQ ID NO: 513444 - DNA, 33 bp, Homo sapien
caactggttgaagccagtagaaaatattttaga

SEQ ID NO: 513445 - DNA, 33 bp, Homo sapien
ctgagatgaagtttccagaggaacgatcaggca

SEQ ID NO: 513446 - DNA, 33 bp, Homo sapien
ctgagatgaagtttccggaggaacgatcaggca

SEQ ID NO: 513447 - DNA, 33 bp, Homo sapien
aaactcagaagccatgaagaacacagccgcaca

SEQ ID NO: 513448 - DNA, 33 bp, Homo sapien
aaactcagaagccatgcagaacacagccgcaca

SEQ ID NO: 513449 - DNA, 33 bp, Homo sapien
tactaaatatttgtaacgagggatttactgtat

SEQ ID NO: 513450 - DNA, 33 bp, Homo sapien
tactaaatatttgtaatgagggatttactgtat

SEQ ID NO: 513451 - DNA, 33 bp, Homo sapien
agggtggtcagacatccgatggagcctgtaatg

SEQ ID NO: 513452 - DNA, 33 bp, Homo sapien
agggtggtcagacatctgatggagcctgtaatg

SEQ ID NO: 513453 - DNA, 33 bp, Homo sapien
agccagtgtttgatcacggcgcttctgactcca

SEQ ID NO: 513454 - DNA, 33 bp, Homo sapien
agccagtgtttgatcatggcgcttctgactcca

SEQ ID NO: 513455 - DNA, 33 bp, Homo sapien
ttgttttctgaaggacaatctattatttcttta

SEQ ID NO: 513456 - DNA, 33 bp, Homo sapien
ttgttttctgaaggaccatctattatttcttta

SEQ ID NO: 513457 - DNA, 33 bp, Homo sapien
taactacatcaacctccaaagtccaattttgtt

SEQ ID NO: 513458 - DNA, 33 bp, Homo sapien
taactacatcaacctctaaagtccaattttgtt

SEQ ID NO: 513459 - DNA, 33 bp, Homo sapien
ttgcacaggctcgactcaacccttcctttccct

SEQ ID NO: 513460 - DNA, 33 bp, Homo sapien
ttgcacaggctcgactgaacccttcctttccct

SEQ ID NO: 513461 - DNA, 33 bp, Homo sapien
tagttataaagtgtgacggtttgcttgagaata

SEQ ID NO: 513462 - DNA, 33 bp, Homo sapien
tagttataaagtgtgatggtttgcttgagaata

SEQ ID NO: 513463 - DNA, 33 bp, Homo sapien
actctgaagcataggacgagggcttttccagaa

SEQ ID NO: 513464 - DNA, 33 bp, Homo sapien
actctgaagcataggatgagggcttttccagaa

SEQ ID NO: 513465 - DNA, 33 bp, Homo sapien
tcacctacatcttcagcccagagataacctttg

SEQ ID NO: 513466 - DNA, 33 bp, Homo sapien
tcacctacatcttcagtccagagataacctttg

SEQ ID NO: 513467 - DNA, 33 bp, Homo sapien
ggagtgcacagtacaacataaggacaataatgg

SEQ ID NO: 513468 - DNA, 33 bp, Homo sapien
ggagtgcacagtacaatataaggacaataatgg

SEQ ID NO: 513469 - DNA, 33 bp, Homo sapien
aaaaccaccagctttacctatcaaaagacaaca

SEQ ID NO: 513470 - DNA, 33 bp, Homo sapien
aaaaccaccagctttagctatcaaaagacaaca

SEQ ID NO: 513471 - DNA, 33 bp, Homo sapien
cttaaaatgggcttgccaaatggcttgtcccca

SEQ ID NO: 513472 - DNA, 33 bp, Homo sapien
cttaaaatgggcttgctaaatggcttgtcccca

SEQ ID NO: 513473 - DNA, 33 bp, Homo sapien
caaatctgaccttccaagctcatggggacaagc

SEQ ID NO: 513474 - DNA, 33 bp, Homo sapien
caaatctgaccttccaggctcatggggacaagc

SEQ ID NO: 513475 - DNA, 33 bp, Homo sapien
attcagctcttgagacacttctgtgcaggtacc

SEQ ID NO: 513476 - DNA, 33 bp, Homo sapien
attcagctcttgagacgcttctgtgcaggtacc

SEQ ID NO: 513477 - DNA, 33 bp, Homo sapien
agcctattgtgggcagacaatacaaatgcaaat

SEQ ID NO: 513478 - DNA, 33 bp, Homo sapien
agcctattgtgggcagtcaatacaaatgcaaat

SEQ ID NO: 513479 - DNA, 33 bp, Homo sapien
attcagattctatctcaagaggaacacggtctg

SEQ ID NO: 513480 - DNA, 33 bp, Homo sapien
attcagattctatctcgagaggaacacggtctg

SEQ ID NO: 513481 - DNA, 33 bp, Homo sapien
cagttactctctatccccccattcgcatgtctt

SEQ ID NO: 513482 - DNA, 33 bp, Homo sapien
cagttactctctatcctcccattcgcatgtctt

SEQ ID NO: 513483 - DNA, 33 bp, Homo sapien
cttcctgactctaacacctcagtatccaaagtt

SEQ ID NO: 513484 - DNA, 33 bp, Homo sapien
cttcctgactctaacatctcagtatccaaagtt

SEQ ID NO: 513485 - DNA, 33 bp, Homo sapien
ataccacctggaataccagctgccacctgaaat

SEQ ID NO: 513486 - DNA, 33 bp, Homo sapien
ataccacctggaatacgagctgccacctgaaat

SEQ ID NO: 513487 - DNA, 33 bp, Homo sapien
aacaaaaagaataaagccagaagcaccacacta

SEQ ID NO: 513488 - DNA, 33 bp, Homo sapien
aacaaaaagaataaagtcagaagcaccacacta

SEQ ID NO: 513489 - DNA, 33 bp, Homo sapien
tctcagggccaagaaacgactgaaaatcagaaa

SEQ ID NO: 513490 - DNA, 33 bp, Homo sapien
tctcagggccaagaaatgactgaaaatcagaaa

SEQ ID NO: 513491 - DNA, 33 bp, Homo sapien
cttggaaagattgaacaacagatagtgagagga

SEQ ID NO: 513492 - DNA, 33 bp, Homo sapien
cttggaaagattgaacgacagatagtgagagga

SEQ ID NO: 513493 - DNA, 33 bp, Homo sapien
gtggaggaaggtggtagctcattgaagttttaa

SEQ ID NO: 513494 - DNA, 33 bp, Homo sapien
gtggaggaaggtggtatctcattgaagttttaa

SEQ ID NO: 513495 - DNA, 33 bp, Homo sapien
atcaactcaggaaacactgtcatctctacactg

SEQ ID NO: 513496 - DNA, 33 bp, Homo sapien
atcaactcaggaaacattgtcatctctacactg

SEQ ID NO: 513497 - DNA, 33 bp, Homo sapien
taccaccaatcttctacattttcactgaggtac

SEQ ID NO: 513498 - DNA, 33 bp, Homo sapien
taccaccaatcttctatattttcactgaggtac

SEQ ID NO: 513499 - DNA, 33 bp, Homo sapien
agagatagagtttagaatattttccaacttatc

SEQ ID NO: 513500 - DNA, 33 bp, Homo sapien
agagatagagtttagagtattttccaacttatc

SEQ ID NO: 513501 - DNA, 33 bp, Homo sapien
ttttagttctagcgtacgggtttgaataaatgt

SEQ ID NO: 513502 - DNA, 33 bp, Homo sapien
ttttagttctagcgtatgggtttgaataaatgt

SEQ ID NO: 513503 - DNA, 33 bp, Homo sapien
agcacagtcaacaaaaagatttcagtgtctcta

SEQ ID NO: 513504 - DNA, 33 bp, Homo sapien
agcacagtcaacaaaaggatttcagtgtctcta

SEQ ID NO: 513505 - DNA, 33 bp, Homo sapien
gaaaagttttggaggaagtttctggagatggcc

SEQ ID NO: 513506 - DNA, 33 bp, Homo sapien
gaaaagttttggaggatgtttctggagatggcc

SEQ ID NO: 513507 - DNA, 33 bp, Homo sapien
tgaagatcagcttcatcatatttgatttccaaa

SEQ ID NO: 513508 - DNA, 33 bp, Homo sapien
tgaagatcagcttcattatatttgatttccaaa

SEQ ID NO: 513509 - DNA, 33 bp, Homo sapien
taaattgcttgctatgacaacttctttattttt

SEQ ID NO: 513510 - DNA, 33 bp, Homo sapien
taaattgcttgctatgccaacttctttattttt

SEQ ID NO: 513511 - DNA, 33 bp, Homo sapien
ccgtgtctgtcttgataagcgattctgaggaca

SEQ ID NO: 513512 - DNA, 33 bp, Homo sapien
ccgtgtctgtcttgatgagcgattctgaggaca

SEQ ID NO: 513513 - DNA, 33 bp, Homo sapien
cataacaatggaggcaagcgacctgggactgct

SEQ ID NO: 513514 - DNA, 33 bp, Homo sapien
cataacaatggaggcacgcgacctgggactgct

SEQ ID NO: 513515 - DNA, 33 bp, Homo sapien
tggccgttcagttttcaaattctgtgaaattcc

SEQ ID NO: 513516 - DNA, 33 bp, Homo sapien
tggccgttcagttttcgaattctgtgaaattcc

SEQ ID NO: 513517 - DNA, 33 bp, Homo sapien
cttctgagacccacagaaatttaggagatataa

SEQ ID NO: 513518 - DNA, 33 bp, Homo sapien
cttctgagacccacagcaatttaggagatataa

SEQ ID NO: 513519 - DNA, 33 bp, Homo sapien
ctagttgatatggctaaaaaaaaaagcgtagga

SEQ ID NO: 513520 - DNA, 33 bp, Homo sapien
ctagttgatatggctacaaaaaaaagcgtagga

SEQ ID NO: 513521 - DNA, 33 bp, Homo sapien
agaggtttggtttctcagaacagtgagggttcg

SEQ ID NO: 513522 - DNA, 33 bp, Homo sapien
agaggtttggtttctcggaacagtgagggttcg

SEQ ID NO: 513523 - DNA, 33 bp, Homo sapien
ggaggttgtgttcttcccgtttagatcatgtaa

SEQ ID NO: 513524 - DNA, 33 bp, Homo sapien
ggaggttgtgttcttctcgtttagatcatgtaa

SEQ ID NO: 513525 - DNA, 33 bp, Homo sapien
tctccacaattcaccacgtgaccagagatggag

SEQ ID NO: 513526 - DNA, 33 bp, Homo sapien
tctccacaattcaccatgtgaccagagatggag

SEQ ID NO: 513527 - DNA, 33 bp, Homo sapien
ggaattgtttcacccccactcgtctttcagaca

SEQ ID NO: 513528 - DNA, 33 bp, Homo sapien
ggaattgtttcaccccgactcgtctttcagaca

SEQ ID NO: 513529 - DNA, 33 bp, Homo sapien
gctagagctggtgaacacccgcgctgtggccta

SEQ ID NO: 513530 - DNA, 33 bp, Homo sapien
gctagagctggtgaactcccgcgctgtggccta

SEQ ID NO: 513531 - DNA, 33 bp, Homo sapien
gtctcggcttttgacaagatctgctcactgagc

SEQ ID NO: 513532 - DNA, 33 bp, Homo sapien
gtctcggcttttgacacgatctgctcactgagc

SEQ ID NO: 513533 - DNA, 33 bp, Homo sapien
ttctttttgcttcttgcattttgatatttaaat

SEQ ID NO: 513534 - DNA, 33 bp, Homo sapien
ttctttttgcttcttgtattttgatatttaaat

SEQ ID NO: 513535 - DNA, 33 bp, Homo sapien
attcacatacgaaaaccgaagacagagtgataa

SEQ ID NO: 513536 - DNA, 33 bp, Homo sapien
attcacatacgaaaactgaagacagagtgataa

SEQ ID NO: 513537 - DNA, 33 bp, Homo sapien
gattaagcccagctacagagagtggaaggaagc

SEQ ID NO: 513538 - DNA, 33 bp, Homo sapien
gattaagcccagctacggagagtggaaggaagc

SEQ ID NO: 513539 - DNA, 33 bp, Homo sapien
aatctggggccaaacaatattacaaaagaataa

SEQ ID NO: 513540 - DNA, 33 bp, Homo sapien
aatctggggccaaacagtattacaaaagaataa

SEQ ID NO: 513541 - DNA, 33 bp, Homo sapien
tgatgattttcgtttccaatggaaggcttctat

SEQ ID NO: 513542 - DNA, 33 bp, Homo sapien
tgatgattttcgtttctaatggaaggcttctat

SEQ ID NO: 513543 - DNA, 33 bp, Homo sapien
aaccaaaaatacaggaaatcagtctcatatcca

SEQ ID NO: 513544 - DNA, 33 bp, Homo sapien
aaccaaaaatacaggagatcagtctcatatcca

SEQ ID NO: 513545 - DNA, 33 bp, Homo sapien
gtgaggctgggaaatgcatacctgcttgtgcct

SEQ ID NO: 513546 - DNA, 33 bp, Homo sapien
gtgaggctgggaaatgtatacctgcttgtgcct

SEQ ID NO: 513547 - DNA, 33 bp, Homo sapien
aaaccttgttaagccactgacacttggaaattg

SEQ ID NO: 513548 - DNA, 33 bp, Homo sapien
aaaccttgttaagccagtgacacttggaaattg

SEQ ID NO: 513549 - DNA, 33 bp, Homo sapien
gagctaacccaaagtgaagaatttataggataa

SEQ ID NO: 513550 - DNA, 33 bp, Homo sapien
gagctaacccaaagtggagaatttataggataa

SEQ ID NO: 513551 - DNA, 33 bp, Homo sapien
aagtcaactcagataacttagaaaaggaaatgt

SEQ ID NO: 513552 - DNA, 33 bp, Homo sapien
aagtcaactcagataatttagaaaaggaaatgt

SEQ ID NO: 513553 - DNA, 33 bp, Homo sapien
gcacaaaacgcaggagaatgaagaaacctgagg

SEQ ID NO: 513554 - DNA, 33 bp, Homo sapien
gcacaaaacgcaggagtatgaagaaacctgagg

SEQ ID NO: 513555 - DNA, 33 bp, Homo sapien
cttcactttctcaccaacatttcttactgcttg

SEQ ID NO: 513556 - DNA, 33 bp, Homo sapien
cttcactttctcaccagcatttcttactgcttg

SEQ ID NO: 513557 - DNA, 33 bp, Homo sapien
acaagaacatgacataagagcacccttttagca

SEQ ID NO: 513558 - DNA, 33 bp, Homo sapien
acaagaacatgacatacgagcacccttttagca

SEQ ID NO: 513559 - DNA, 33 bp, Homo sapien
cctacctttattgtcccgctctccttcctgcag

SEQ ID NO: 513560 - DNA, 33 bp, Homo sapien
cctacctttattgtccggctctccttcctgcag

SEQ ID NO: 513561 - DNA, 33 bp, Homo sapien
gctctagccccgattcccattacctgagtgttg

SEQ ID NO: 513562 - DNA, 33 bp, Homo sapien
gctctagccccgattcgcattacctgagtgttg

SEQ ID NO: 513563 - DNA, 33 bp, Homo sapien
agactgccgattgccaggtaagggatggaaagc

SEQ ID NO: 513564 - DNA, 33 bp, Homo sapien
agactgccgattgccatgtaagggatggaaagc

SEQ ID NO: 513565 - DNA, 33 bp, Homo sapien
ataaagccgcatgaagacacatcataactagat

SEQ ID NO: 513566 - DNA, 33 bp, Homo sapien
ataaagccgcatgaagtcacatcataactagat

SEQ ID NO: 513567 - DNA, 33 bp, Homo sapien
cctttgtgctgtcccaaagatttgtttgaggac

SEQ ID NO: 513568 - DNA, 33 bp, Homo sapien
cctttgtgctgtcccacagatttgtttgaggac

SEQ ID NO: 513569 - DNA, 33 bp, Homo sapien
caggggtggatcaggaacagatctccacaagga

SEQ ID NO: 513570 - DNA, 33 bp, Homo sapien
caggggtggatcaggagcagatctccacaagga

SEQ ID NO: 513571 - DNA, 33 bp, Homo sapien
aaagcacaaataagccaaaaatactaattgttt

SEQ ID NO: 513572 - DNA, 33 bp, Homo sapien
aaagcacaaataagccgaaaatactaattgttt

SEQ ID NO: 513573 - DNA, 33 bp, Homo sapien
gaggtatccgaatggtgaacttatatccacatg

SEQ ID NO: 513574 - DNA, 33 bp, Homo sapien
gaggtatccgaatggttaacttatatccacatg

SEQ ID NO: 513575 - DNA, 33 bp, Homo sapien
gcacagggtctttgaagtcgagttttcttacct

SEQ ID NO: 513576 - DNA, 33 bp, Homo sapien
gcacagggtctttgaattcgagttttcttacct

SEQ ID NO: 513577 - DNA, 33 bp, Homo sapien
tgctttttaatatttcacatcaggagacatact

SEQ ID NO: 513578 - DNA, 33 bp, Homo sapien
tgctttttaatatttcgcatcaggagacatact

SEQ ID NO: 513579 - DNA, 33 bp, Homo sapien
tctccaaaagacataacgtaaagccctattcag

SEQ ID NO: 513580 - DNA, 33 bp, Homo sapien
tctccaaaagacataaggtaaagccctattcag

SEQ ID NO: 513581 - DNA, 33 bp, Homo sapien
atggacagttaaaatacgcagttctcagttcct

SEQ ID NO: 513582 - DNA, 33 bp, Homo sapien
atggacagttaaaatatgcagttctcagttcct

SEQ ID NO: 513583 - DNA, 33 bp, Homo sapien
atccagaggtcacacaatgtaacattaaaaatg

SEQ ID NO: 513584 - DNA, 33 bp, Homo sapien
atccagaggtcacacagtgtaacattaaaaatg

SEQ ID NO: 513585 - DNA, 33 bp, Homo sapien
gctaagcattctcagaagacaaataaaaaccat

SEQ ID NO: 513586 - DNA, 33 bp, Homo sapien
gctaagcattctcagaggacaaataaaaaccat

SEQ ID NO: 513587 - DNA, 33 bp, Homo sapien
actggaagttagatgtaaagagttgattgtaca

SEQ ID NO: 513588 - DNA, 33 bp, Homo sapien
actggaagttagatgttaagagttgattgtaca

SEQ ID NO: 513589 - DNA, 33 bp, Homo sapien
cagcctggggaagtacaaggctcaatttagatc

SEQ ID NO: 513590 - DNA, 33 bp, Homo sapien
cagcctggggaagtacgaggctcaatttagatc

SEQ ID NO: 513591 - DNA, 33 bp, Homo sapien
cccactgctacccacaatgatgcttgcaaaggg

SEQ ID NO: 513592 - DNA, 33 bp, Homo sapien
cccactgctacccacagtgatgcttgcaaaggg

SEQ ID NO: 513593 - DNA, 33 bp, Homo sapien
gcaggctgtcgcgggacgagttgatgttacagc

SEQ ID NO: 513594 - DNA, 33 bp, Homo sapien
gcaggctgtcgcgggatgagttgatgttacagc

SEQ ID NO: 513595 - DNA, 33 bp, Homo sapien
tccaagagcaagcatcacaaggaagagagagcc

SEQ ID NO: 513596 - DNA, 33 bp, Homo sapien
tccaagagcaagcatcgcaaggaagagagagcc

SEQ ID NO: 513597 - DNA, 33 bp, Homo sapien
ttcttcagtcgaataaatgtctttcttgtctta

SEQ ID NO: 513598 - DNA, 33 bp, Homo sapien
ttcttcagtcgaataagtgtctttcttgtctta

SEQ ID NO: 513599 - DNA, 33 bp, Homo sapien
gctcccatcattaatacgccaaaaggggtccat

SEQ ID NO: 513600 - DNA, 33 bp, Homo sapien
gctcccatcattaatatgccaaaaggggtccat

SEQ ID NO: 513601 - DNA, 33 bp, Homo sapien
acatcttgttacttccaggaaatcactttctgc

SEQ ID NO: 513602 - DNA, 33 bp, Homo sapien
acatcttgttacttccgggaaatcactttctgc

SEQ ID NO: 513603 - DNA, 33 bp, Homo sapien
atagtacctagaaagaaaatgtctcaaatacct

SEQ ID NO: 513604 - DNA, 33 bp, Homo sapien
atagtacctagaaagagaatgtctcaaatacct

SEQ ID NO: 513605 - DNA, 33 bp, Homo sapien
tttaataacactggaaatgtggaagtgacccaa

SEQ ID NO: 513606 - DNA, 33 bp, Homo sapien
tttaataacactggaattgtggaagtgacccaa

SEQ ID NO: 513607 - DNA, 33 bp, Homo sapien
cccagaatttttcaaaaccatcctagttcgctg

SEQ ID NO: 513608 - DNA, 33 bp, Homo sapien
cccagaatttttcaaagccatcctagttcgctg

SEQ ID NO: 513609 - DNA, 33 bp, Homo sapien
tgttgcagacagataaatacaatgagactcaaa

SEQ ID NO: 513610 - DNA, 33 bp, Homo sapien
tgttgcagacagataagtacaatgagactcaaa

SEQ ID NO: 513611 - DNA, 33 bp, Homo sapien
aaaattaattgggataggggtaactgcactcaa

SEQ ID NO: 513612 - DNA, 33 bp, Homo sapien
aaaattaattgggatatgggtaactgcactcaa

SEQ ID NO: 513613 - DNA, 33 bp, Homo sapien
gccaggatggttctgcaactttatgaaggaaga

SEQ ID NO: 513614 - DNA, 33 bp, Homo sapien
gccaggatggttctgcgactttatgaaggaaga

SEQ ID NO: 513615 - DNA, 33 bp, Homo sapien
agctggttaaggtttacctgcagctgatgttgc

SEQ ID NO: 513616 - DNA, 33 bp, Homo sapien
agctggttaaggtttatctgcagctgatgttgc

SEQ ID NO: 513617 - DNA, 33 bp, Homo sapien
gcattgcaattcccatcatgaggagtttaatta

SEQ ID NO: 513618 - DNA, 33 bp, Homo sapien
gcattgcaattcccatgatgaggagtttaatta

SEQ ID NO: 513619 - DNA, 33 bp, Homo sapien
tgtctcttggcagaagcaagagtataaatatga

SEQ ID NO: 513620 - DNA, 33 bp, Homo sapien
tgtctcttggcagaaggaagagtataaatatga

SEQ ID NO: 513621 - DNA, 33 bp, Homo sapien
accttcctgtcttagacgattcattacttttga

SEQ ID NO: 513622 - DNA, 33 bp, Homo sapien
accttcctgtcttagatgattcattacttttga

SEQ ID NO: 513623 - DNA, 33 bp, Homo sapien
gaaatgtttgactttcacctttattgatgaatg

SEQ ID NO: 513624 - DNA, 33 bp, Homo sapien
gaaatgtttgactttcccctttattgatgaatg

SEQ ID NO: 513625 - DNA, 33 bp, Homo sapien
attttgagataggaataaggtacaagatgcagt

SEQ ID NO: 513626 - DNA, 33 bp, Homo sapien
attttgagataggaatgaggtacaagatgcagt

SEQ ID NO: 513627 - DNA, 33 bp, Homo sapien
ttgttgcaattcaccccactgtactctaccatc

SEQ ID NO: 513628 - DNA, 33 bp, Homo sapien
ttgttgcaattcaccctactgtactctaccatc

SEQ ID NO: 513629 - DNA, 33 bp, Homo sapien
ttgcctgacaaatagaaaggatggcaattttac

SEQ ID NO: 513630 - DNA, 33 bp, Homo sapien
ttgcctgacaaatagacaggatggcaattttac

SEQ ID NO: 513631 - DNA, 33 bp, Homo sapien
gatacagcagaaggcacgaatcctgtacagtaa

SEQ ID NO: 513632 - DNA, 33 bp, Homo sapien
gatacagcagaaggcaggaatcctgtacagtaa

SEQ ID NO: 513633 - DNA, 33 bp, Homo sapien
ataatctactaatgccaagagcctggtacacag

SEQ ID NO: 513634 - DNA, 33 bp, Homo sapien
ataatctactaatgccgagagcctggtacacag

SEQ ID NO: 513635 - DNA, 33 bp, Homo sapien
gacactgttaggagaacgaaaagactagcacat

SEQ ID NO: 513636 - DNA, 33 bp, Homo sapien
gacactgttaggagaatgaaaagactagcacat

SEQ ID NO: 513637 - DNA, 33 bp, Homo sapien
agcaatcctgataagacggatgaataaagtatg

SEQ ID NO: 513638 - DNA, 33 bp, Homo sapien
agcaatcctgataagatggatgaataaagtatg

SEQ ID NO: 513639 - DNA, 33 bp, Homo sapien
gtaaacactgtcccaacttcaaacagcacatat

SEQ ID NO: 513640 - DNA, 33 bp, Homo sapien
gtaaacactgtcccaatttcaaacagcacatat

SEQ ID NO: 513641 - DNA, 33 bp, Homo sapien
gtcacatattacaaaacgtctgggaaaacaggg

SEQ ID NO: 513642 - DNA, 33 bp, Homo sapien
gtcacatattacaaaatgtctgggaaaacaggg

SEQ ID NO: 513643 - DNA, 33 bp, Homo sapien
tgctttagcaacactaactcctagacttctcag

SEQ ID NO: 513644 - DNA, 33 bp, Homo sapien
tgctttagcaacactacctcctagacttctcag

SEQ ID NO: 513645 - DNA, 33 bp, Homo sapien
aaatacaagggaaaacacggaaacagtcacaga

SEQ ID NO: 513646 - DNA, 33 bp, Homo sapien
aaatacaagggaaaacgcggaaacagtcacaga

SEQ ID NO: 513647 - DNA, 33 bp, Homo sapien
attgttatagtttgaacggaagtaaattcatat

SEQ ID NO: 513648 - DNA, 33 bp, Homo sapien
attgttatagtttgaatggaagtaaattcatat

SEQ ID NO: 513649 - DNA, 33 bp, Homo sapien
tattcacaaatcatcaagtattgtcccaaattt

SEQ ID NO: 513650 - DNA, 33 bp, Homo sapien
tattcacaaatcatcacgtattgtcccaaattt

SEQ ID NO: 513651 - DNA, 33 bp, Homo sapien
acatctattttccaccagacagactctaattaa

SEQ ID NO: 513652 - DNA, 33 bp, Homo sapien
acatctattttccaccggacagactctaattaa

SEQ ID NO: 513653 - DNA, 33 bp, Homo sapien
aagggaaatggtagaaataaaaatcattgtagt

SEQ ID NO: 513654 - DNA, 33 bp, Homo sapien
aagggaaatggtagaagtaaaaatcattgtagt

SEQ ID NO: 513655 - DNA, 33 bp, Homo sapien
ttttatcgtcaaacaacattcaactgtatggat

SEQ ID NO: 513656 - DNA, 33 bp, Homo sapien
ttttatcgtcaaacaatattcaactgtatggat

SEQ ID NO: 513657 - DNA, 33 bp, Homo sapien
aacctcatggcaagtggaaggctcttatcacag

SEQ ID NO: 513658 - DNA, 33 bp, Homo sapien
aacctcatggcaagtgtaaggctcttatcacag

SEQ ID NO: 513659 - DNA, 33 bp, Homo sapien
aaagtttctgatttgcaaaagacatggataaga

SEQ ID NO: 513660 - DNA, 33 bp, Homo sapien
aaagtttctgatttgcgaaagacatggataaga

SEQ ID NO: 513661 - DNA, 33 bp, Homo sapien
ggctttagtgaatgaccctggctctccctagag

SEQ ID NO: 513662 - DNA, 33 bp, Homo sapien
ggctttagtgaatgactctggctctccctagag

SEQ ID NO: 513663 - DNA, 33 bp, Homo sapien
gcttcatggcctccacacacttggatttgccta

SEQ ID NO: 513664 - DNA, 33 bp, Homo sapien
gcttcatggcctccacgcacttggatttgccta

SEQ ID NO: 513665 - DNA, 33 bp, Homo sapien
tcctcatgcagtggagccgtttcctttgccacc

SEQ ID NO: 513666 - DNA, 33 bp, Homo sapien
tcctcatgcagtggagtcgtttcctttgccacc

SEQ ID NO: 513667 - DNA, 33 bp, Homo sapien
tgcatgtctgtttccacgtatgaggaccgtgat

SEQ ID NO: 513668 - DNA, 33 bp, Homo sapien
tgcatgtctgtttccatgtatgaggaccgtgat

SEQ ID NO: 513669 - DNA, 33 bp, Homo sapien
agaagagctgaatcccaggatactcttttccat

SEQ ID NO: 513670 - DNA, 33 bp, Homo sapien
agaagagctgaatcccgggatactcttttccat

SEQ ID NO: 513671 - DNA, 33 bp, Homo sapien
atgagcgttccgaggaagggggcagccagagca

SEQ ID NO: 513672 - DNA, 33 bp, Homo sapien
atgagcgttccgaggaggggggcagccagagca

SEQ ID NO: 513673 - DNA, 33 bp, Homo sapien
ctgcttctgcagctgcaaagctacttatctgca

SEQ ID NO: 513674 - DNA, 33 bp, Homo sapien
ctgcttctgcagctgcgaagctacttatctgca

SEQ ID NO: 513675 - DNA, 33 bp, Homo sapien
gattttaaagtgttcccccaggccatagtcagc

SEQ ID NO: 513676 - DNA, 33 bp, Homo sapien
gattttaaagtgttccgccaggccatagtcagc

SEQ ID NO: 513677 - DNA, 33 bp, Homo sapien
atacttgatagtaaaagactgaatgctgtttct

SEQ ID NO: 513678 - DNA, 33 bp, Homo sapien
atacttgatagtaaaatactgaatgctgtttct

SEQ ID NO: 513679 - DNA, 33 bp, Homo sapien
ctccagcctggaggacaagcaaaaattttaaaa

SEQ ID NO: 513680 - DNA, 33 bp, Homo sapien
ctccagcctggaggaccagcaaaaattttaaaa

SEQ ID NO: 513681 - DNA, 33 bp, Homo sapien
ggaatacagatggtgacagtaaagtctaactgt

SEQ ID NO: 513682 - DNA, 33 bp, Homo sapien
ggaatacagatggtgatagtaaagtctaactgt

SEQ ID NO: 513683 - DNA, 33 bp, Homo sapien
tagaagcaactacaccccactagtaatgatcat

SEQ ID NO: 513684 - DNA, 33 bp, Homo sapien
tagaagcaactacacctcactagtaatgatcat

SEQ ID NO: 513685 - DNA, 33 bp, Homo sapien
tttctgattttaaaaactcacttcacagccaaa

SEQ ID NO: 513686 - DNA, 33 bp, Homo sapien
tttctgattttaaaaattcacttcacagccaaa

SEQ ID NO: 513687 - DNA, 33 bp, Homo sapien
tgtgtcattatctttcaaatcatctgatctaaa

SEQ ID NO: 513688 - DNA, 33 bp, Homo sapien
tgtgtcattatctttcgaatcatctgatctaaa

SEQ ID NO: 513689 - DNA, 33 bp, Homo sapien
ggacattcatctgtcaaaatttccaggcaactt

SEQ ID NO: 513690 - DNA, 33 bp, Homo sapien
ggacattcatctgtcacaatttccaggcaactt

SEQ ID NO: 513691 - DNA, 33 bp, Homo sapien
ttgggcttcttgttacaacaacctaaagagggg

SEQ ID NO: 513692 - DNA, 33 bp, Homo sapien
ttgggcttcttgttacgacaacctaaagagggg

SEQ ID NO: 513693 - DNA, 33 bp, Homo sapien
agcaggtagacctagaaatcacgtgggccaaag

SEQ ID NO: 513694 - DNA, 33 bp, Homo sapien
agcaggtagacctagacatcacgtgggccaaag

SEQ ID NO: 513695 - DNA, 33 bp, Homo sapien
aaaagagaaaagaaaactcattaatgaaatgtt

SEQ ID NO: 513696 - DNA, 33 bp, Homo sapien
aaaagagaaaagaaaagtcattaatgaaatgtt

SEQ ID NO: 513697 - DNA, 33 bp, Homo sapien
ttaccaatgcgtgcgtcaccagtgcatgctggg

SEQ ID NO: 513698 - DNA, 33 bp, Homo sapien
ttaccaatgcgtgcgttaccagtgcatgctggg

SEQ ID NO: 513699 - DNA, 33 bp, Homo sapien
gtgaaaatttgttaaactctatgtgctcagaaa

SEQ ID NO: 513700 - DNA, 33 bp, Homo sapien
gtgaaaatttgttaaattctatgtgctcagaaa

SEQ ID NO: 513701 - DNA, 33 bp, Homo sapien
accaacaatatcctacagcatgagaaaaattaa

SEQ ID NO: 513702 - DNA, 33 bp, Homo sapien
accaacaatatcctacggcatgagaaaaattaa

SEQ ID NO: 513703 - DNA, 33 bp, Homo sapien
aatcattattctcacccactagagaccttctga

SEQ ID NO: 513704 - DNA, 33 bp, Homo sapien
aatcattattctcacctactagagaccttctga

SEQ ID NO: 513705 - DNA, 33 bp, Homo sapien
gaaagatggacaatcaatactttgtactctaca

SEQ ID NO: 513706 - DNA, 33 bp, Homo sapien
gaaagatggacaatcattactttgtactctaca

SEQ ID NO: 513707 - DNA, 33 bp, Homo sapien
gcattcatggaaatgaacccacaggctgtgtga

SEQ ID NO: 513708 - DNA, 33 bp, Homo sapien
gcattcatggaaatgagcccacaggctgtgtga

SEQ ID NO: 513709 - DNA, 33 bp, Homo sapien
agaaactgggtgaggaaatgatgaaacagatgg

SEQ ID NO: 513710 - DNA, 33 bp, Homo sapien
agaaactgggtgaggagatgatgaaacagatgg

SEQ ID NO: 513711 - DNA, 33 bp, Homo sapien
atgtcatgaggtgataacccaaatttttcagat

SEQ ID NO: 513712 - DNA, 33 bp, Homo sapien
atgtcatgaggtgataccccaaatttttcagat

SEQ ID NO: 513713 - DNA, 33 bp, Homo sapien
agtcattagtggcatcagaatccacacagcagc

SEQ ID NO: 513714 - DNA, 33 bp, Homo sapien
agtcattagtggcatcggaatccacacagcagc

SEQ ID NO: 513715 - DNA, 33 bp, Homo sapien
ttgcatttgagtgtgacgtgcagatggttccag

SEQ ID NO: 513716 - DNA, 33 bp, Homo sapien
ttgcatttgagtgtgatgtgcagatggttccag

SEQ ID NO: 513717 - DNA, 33 bp, Homo sapien
tattggcacacgaataaacacatagaccaatga

SEQ ID NO: 513718 - DNA, 33 bp, Homo sapien
tattggcacacgaatagacacatagaccaatga

SEQ ID NO: 513719 - DNA, 33 bp, Homo sapien
tgccattttctcattggattatttgcatttttt

SEQ ID NO: 513720 - DNA, 33 bp, Homo sapien
tgccattttctcattgtattatttgcatttttt

SEQ ID NO: 513721 - DNA, 33 bp, Homo sapien
cctgtcattttataaacgttttgcggcaagtct

SEQ ID NO: 513722 - DNA, 33 bp, Homo sapien
cctgtcattttataaatgttttgcggcaagtct

SEQ ID NO: 513723 - DNA, 33 bp, Homo sapien
tcccgggtgtcctgaacgtgtagaaagaaaagc

SEQ ID NO: 513724 - DNA, 33 bp, Homo sapien
tcccgggtgtcctgaatgtgtagaaagaaaagc

SEQ ID NO: 513725 - DNA, 33 bp, Homo sapien
gaactcagcttgtgagaagctctggagaaaccc

SEQ ID NO: 513726 - DNA, 33 bp, Homo sapien
gaactcagcttgtgaggagctctggagaaaccc

SEQ ID NO: 513727 - DNA, 33 bp, Homo sapien
atttccatccacaatgcagatttgcacagagaa

SEQ ID NO: 513728 - DNA, 33 bp, Homo sapien
atttccatccacaatgtagatttgcacagagaa

SEQ ID NO: 513729 - DNA, 33 bp, Homo sapien
ttggccttaaaaataccgagctagccccactcc

SEQ ID NO: 513730 - DNA, 33 bp, Homo sapien
ttggccttaaaaatactgagctagccccactcc

SEQ ID NO: 513731 - DNA, 33 bp, Homo sapien
taccttgacagaattccagcaacatctcaaaaa

SEQ ID NO: 513732 - DNA, 33 bp, Homo sapien
taccttgacagaattctagcaacatctcaaaaa

SEQ ID NO: 513733 - DNA, 33 bp, Homo sapien
taatgttatgtttttaccaatacagcatcatac

SEQ ID NO: 513734 - DNA, 33 bp, Homo sapien
taatgttatgtttttagcaatacagcatcatac

SEQ ID NO: 513735 - DNA, 33 bp, Homo sapien
cattctgaccttcaggaatcttcagtccagagc

SEQ ID NO: 513736 - DNA, 33 bp, Homo sapien
cattctgaccttcagggatcttcagtccagagc

SEQ ID NO: 513737 - DNA, 33 bp, Homo sapien
aacatggctccaaaaccctttgacattcttctc

SEQ ID NO: 513738 - DNA, 33 bp, Homo sapien
aacatggctccaaaacgctttgacattcttctc

SEQ ID NO: 513739 - DNA, 33 bp, Homo sapien
tgggcagatgctgcgaccacgcaacagcagact

SEQ ID NO: 513740 - DNA, 33 bp, Homo sapien
tgggcagatgctgcgatcacgcaacagcagact

SEQ ID NO: 513741 - DNA, 33 bp, Homo sapien
caaagatgtaaccaagacgaggtgagaagcaca

SEQ ID NO: 513742 - DNA, 33 bp, Homo sapien
caaagatgtaaccaaggcgaggtgagaagcaca

SEQ ID NO: 513743 - DNA, 33 bp, Homo sapien
tacctctgtattgcagacaagaatgcagtctca

SEQ ID NO: 513744 - DNA, 33 bp, Homo sapien
tacctctgtattgcaggcaagaatgcagtctca

SEQ ID NO: 513745 - DNA, 33 bp, Homo sapien
ctcagggcagacaggacctatagctggtgctca

SEQ ID NO: 513746 - DNA, 33 bp, Homo sapien
ctcagggcagacaggatctatagctggtgctca

SEQ ID NO: 513747 - DNA, 33 bp, Homo sapien
gaacaataaatcacaaataaaattggacaatac

SEQ ID NO: 513748 - DNA, 33 bp, Homo sapien
gaacaataaatcacaagtaaaattggacaatac

SEQ ID NO: 513749 - DNA, 33 bp, Homo sapien
ttcatcacgtttccccaacgctacccatgtctt

SEQ ID NO: 513750 - DNA, 33 bp, Homo sapien
ttcatcacgtttccccgacgctacccatgtctt

SEQ ID NO: 513751 - DNA, 33 bp, Homo sapien
caacacgtaacaaataccttgtgtggctcagct

SEQ ID NO: 513752 - DNA, 33 bp, Homo sapien
caacacgtaacaaatagcttgtgtggctcagct

SEQ ID NO: 513753 - DNA, 33 bp, Homo sapien
acattgaagcaaaccaaatatacagagaaaatc

SEQ ID NO: 513754 - DNA, 33 bp, Homo sapien
acattgaagcaaaccacatatacagagaaaatc

SEQ ID NO: 513755 - DNA, 33 bp, Homo sapien
cacctttcaatttttcacagcatgagctccaac

SEQ ID NO: 513756 - DNA, 33 bp, Homo sapien
cacctttcaatttttcgcagcatgagctccaac

SEQ ID NO: 513757 - DNA, 33 bp, Homo sapien
ggagggcacagtctagaaagggagaaagacaaa

SEQ ID NO: 513758 - DNA, 33 bp, Homo sapien
ggagggcacagtctagcaagggagaaagacaaa

SEQ ID NO: 513759 - DNA, 33 bp, Homo sapien
ctgtatctgctaccacaatgacattaggataat

SEQ ID NO: 513760 - DNA, 33 bp, Homo sapien
ctgtatctgctaccacgatgacattaggataat

SEQ ID NO: 513761 - DNA, 33 bp, Homo sapien
tcctcacctgtgaagaaccagctgaccagcggc

SEQ ID NO: 513762 - DNA, 33 bp, Homo sapien
tcctcacctgtgaagagccagctgaccagcggc

SEQ ID NO: 513763 - DNA, 33 bp, Homo sapien
ctctcaccattagccaaatgaggcaggccaaat

SEQ ID NO: 513764 - DNA, 33 bp, Homo sapien
ctctcaccattagccacatgaggcaggccaaat

SEQ ID NO: 513765 - DNA, 33 bp, Homo sapien
tgattctaatgtcttacggggttaaaatatatg

SEQ ID NO: 513766 - DNA, 33 bp, Homo sapien
tgattctaatgtcttatggggttaaaatatatg

SEQ ID NO: 513767 - DNA, 33 bp, Homo sapien
tcgtctctggcagatcactctgaccgtgttgaa

SEQ ID NO: 513768 - DNA, 33 bp, Homo sapien
tcgtctctggcagatccctctgaccgtgttgaa

SEQ ID NO: 513769 - DNA, 33 bp, Homo sapien
agctgtgttttgggcacggttgccttcccagtt

SEQ ID NO: 513770 - DNA, 33 bp, Homo sapien
agctgtgttttgggcatggttgccttcccagtt

SEQ ID NO: 513771 - DNA, 33 bp, Homo sapien
tcctttcatcttggaccctcagtgccttgttgc

SEQ ID NO: 513772 - DNA, 33 bp, Homo sapien
tcctttcatcttggactctcagtgccttgttgc

SEQ ID NO: 513773 - DNA, 33 bp, Homo sapien
tacctgtccaatccaaagctgtcacaggagaca

SEQ ID NO: 513774 - DNA, 33 bp, Homo sapien
tacctgtccaatccaatgctgtcacaggagaca

SEQ ID NO: 513775 - DNA, 33 bp, Homo sapien
aattgatgtggccgcaactctgcagtcctgcct

SEQ ID NO: 513776 - DNA, 33 bp, Homo sapien
aattgatgtggccgcatctctgcagtcctgcct

SEQ ID NO: 513777 - DNA, 33 bp, Homo sapien
tagaagactaggaataaagaggcagatgacctg

SEQ ID NO: 513778 - DNA, 33 bp, Homo sapien
tagaagactaggaatatagaggcagatgacctg

SEQ ID NO: 513779 - DNA, 33 bp, Homo sapien
ttgctgcggagaaggaggaaggtatgtataatt

SEQ ID NO: 513780 - DNA, 33 bp, Homo sapien
ttgctgcggagaaggatgaaggtatgtataatt

SEQ ID NO: 513781 - DNA, 33 bp, Homo sapien
gaatccattttttcagaccagacatcaggagtg

SEQ ID NO: 513782 - DNA, 33 bp, Homo sapien
gaatccattttttcaggccagacatcaggagtg

SEQ ID NO: 513783 - DNA, 33 bp, Homo sapien
ctgatgtgtaccacttcaaatcagtgaggaaaa

SEQ ID NO: 513784 - DNA, 33 bp, Homo sapien
ctgatgtgtaccacttgaaatcagtgaggaaaa

SEQ ID NO: 513785 - DNA, 33 bp, Homo sapien
ctgtgggccagttcaaactctttataaattacc

SEQ ID NO: 513786 - DNA, 33 bp, Homo sapien
ctgtgggccagttcaacctctttataaattacc

SEQ ID NO: 513787 - DNA, 33 bp, Homo sapien
ttacagatgctaatcaaagcaagtagataagag

SEQ ID NO: 513788 - DNA, 33 bp, Homo sapien
ttacagatgctaatcagagcaagtagataagag

SEQ ID NO: 513789 - DNA, 33 bp, Homo sapien
caaacaaaacaatgcaactttttccttcctact

SEQ ID NO: 513790 - DNA, 33 bp, Homo sapien
caaacaaaacaatgcacctttttccttcctact

SEQ ID NO: 513791 - DNA, 33 bp, Homo sapien
aactctgtactctcttcaaagcctttctgtaaa

SEQ ID NO: 513792 - DNA, 33 bp, Homo sapien
aactctgtactctcttgaaagcctttctgtaaa

SEQ ID NO: 513793 - DNA, 33 bp, Homo sapien
ccaagggcgcccacccaaaggctcagcaggaat

SEQ ID NO: 513794 - DNA, 33 bp, Homo sapien
ccaagggcgcccacccgaaggctcagcaggaat

SEQ ID NO: 513795 - DNA, 33 bp, Homo sapien
gcgggagagagaaacccaagagaagaaggaatg

SEQ ID NO: 513796 - DNA, 33 bp, Homo sapien
gcgggagagagaaaccgaagagaagaaggaatg

SEQ ID NO: 513797 - DNA, 33 bp, Homo sapien
gcatcatggggctgaaagtcaatttcccattta

SEQ ID NO: 513798 - DNA, 33 bp, Homo sapien
gcatcatggggctgaaggtcaatttcccattta

SEQ ID NO: 513799 - DNA, 33 bp, Homo sapien
cgaatggaagagagaaactttccttgcagaatc

SEQ ID NO: 513800 - DNA, 33 bp, Homo sapien
cgaatggaagagagaacctttccttgcagaatc

SEQ ID NO: 513801 - DNA, 33 bp, Homo sapien
tcacgtatgttatagacaaactcggggagctat

SEQ ID NO: 513802 - DNA, 33 bp, Homo sapien
tcacgtatgttatagagaaactcggggagctat

SEQ ID NO: 513803 - DNA, 33 bp, Homo sapien
gaaataacatcacctacgagattccagtgcata

SEQ ID NO: 513804 - DNA, 33 bp, Homo sapien
gaaataacatcacctatgagattccagtgcata

SEQ ID NO: 513805 - DNA, 33 bp, Homo sapien
acaccactattttgcccattaaattgacaccaa

SEQ ID NO: 513806 - DNA, 33 bp, Homo sapien
acaccactattttgcctattaaattgacaccaa

SEQ ID NO: 513807 - DNA, 33 bp, Homo sapien
agggctgatttgattacgtaaacgttttctaca

SEQ ID NO: 513808 - DNA, 33 bp, Homo sapien
agggctgatttgattatgtaaacgttttctaca

SEQ ID NO: 513809 - DNA, 33 bp, Homo sapien
ttccaggggcattaaaagcttgcatctttaata

SEQ ID NO: 513810 - DNA, 33 bp, Homo sapien
ttccaggggcattaaaggcttgcatctttaata

SEQ ID NO: 513811 - DNA, 33 bp, Homo sapien
gtatcacaaaactcaacgtgcttgacagcactg

SEQ ID NO: 513812 - DNA, 33 bp, Homo sapien
gtatcacaaaactcaatgtgcttgacagcactg

SEQ ID NO: 513813 - DNA, 33 bp, Homo sapien
ccagaccacagaacataagacactttccttatc

SEQ ID NO: 513814 - DNA, 33 bp, Homo sapien
ccagaccacagaacatgagacactttccttatc

SEQ ID NO: 513815 - DNA, 33 bp, Homo sapien
gactccattgtgcataaagagaaaaggactctc

SEQ ID NO: 513816 - DNA, 33 bp, Homo sapien
gactccattgtgcatatagagaaaaggactctc

SEQ ID NO: 513817 - DNA, 33 bp, Homo sapien
agaggagctctgataaaggcaagaaaagacaaa

SEQ ID NO: 513818 - DNA, 33 bp, Homo sapien
agaggagctctgataagggcaagaaaagacaaa

SEQ ID NO: 513819 - DNA, 33 bp, Homo sapien
ttaggcattgcacttgcatggaagcacttgtgt

SEQ ID NO: 513820 - DNA, 33 bp, Homo sapien
ttaggcattgcacttgtatggaagcacttgtgt

SEQ ID NO: 513821 - DNA, 33 bp, Homo sapien
gaaaaagaagataatgacaaagaagattacttt

SEQ ID NO: 513822 - DNA, 33 bp, Homo sapien
gaaaaagaagataatggcaaagaagattacttt

SEQ ID NO: 513823 - DNA, 33 bp, Homo sapien
tcctagcaagagtagacaaaaaggagcaaaagt

SEQ ID NO: 513824 - DNA, 33 bp, Homo sapien
tcctagcaagagtagagaaaaaggagcaaaagt

SEQ ID NO: 513825 - DNA, 33 bp, Homo sapien
attatttttatcttcccatcccctatgtcacac

SEQ ID NO: 513826 - DNA, 33 bp, Homo sapien
attatttttatcttcctatcccctatgtcacac

SEQ ID NO: 513827 - DNA, 33 bp, Homo sapien
tatgtcacactctcgaccgcactttaattgaaa

SEQ ID NO: 513828 - DNA, 33 bp, Homo sapien
tatgtcacactctcgatcgcactttaattgaaa

SEQ ID NO: 513829 - DNA, 33 bp, Homo sapien
aaggtgaatacatgacactgtgtttaagccaaa

SEQ ID NO: 513830 - DNA, 33 bp, Homo sapien
aaggtgaatacatgaccctgtgtttaagccaaa

SEQ ID NO: 513831 - DNA, 33 bp, Homo sapien
actatctcaatgaggaaaatatactcttcaaaa

SEQ ID NO: 513832 - DNA, 33 bp, Homo sapien
actatctcaatgaggacaatatactcttcaaaa

SEQ ID NO: 513833 - DNA, 33 bp, Homo sapien
tgctagcgttccatatcaaagtgctgcagactt

SEQ ID NO: 513834 - DNA, 33 bp, Homo sapien
tgctagcgttccatatgaaagtgctgcagactt

SEQ ID NO: 513835 - DNA, 33 bp, Homo sapien
tgtgtgtgtgagtttagaagtgtatgtaatgtg

SEQ ID NO: 513836 - DNA, 33 bp, Homo sapien
tgtgtgtgtgagtttataagtgtatgtaatgtg

SEQ ID NO: 513837 - DNA, 33 bp, Homo sapien
tggtgtgatctcatctcactgtaaactctgcct

SEQ ID NO: 513838 - DNA, 33 bp, Homo sapien
tggtgtgatctcatctgactgtaaactctgcct

SEQ ID NO: 513839 - DNA, 33 bp, Homo sapien
caggacaggcatgaagaagtaaaacaaaatgat

SEQ ID NO: 513840 - DNA, 33 bp, Homo sapien
caggacaggcatgaagcagtaaaacaaaatgat

SEQ ID NO: 513841 - DNA, 33 bp, Homo sapien
caagcccaggaaaaaccagacggtggattaggt

SEQ ID NO: 513842 - DNA, 33 bp, Homo sapien
caagcccaggaaaaacgagacggtggattaggt

SEQ ID NO: 513843 - DNA, 33 bp, Homo sapien
aaaatcctaactgaaacgtggtccagtccaagc

SEQ ID NO: 513844 - DNA, 33 bp, Homo sapien
aaaatcctaactgaaatgtggtccagtccaagc

SEQ ID NO: 513845 - DNA, 33 bp, Homo sapien
gtgaccattgtggtgcgctgtgttgaggctaga

SEQ ID NO: 513846 - DNA, 33 bp, Homo sapien
gtgaccattgtggtgctctgtgttgaggctaga

SEQ ID NO: 513847 - DNA, 33 bp, Homo sapien
cttctttcccctgccaagagataccagggcagg

SEQ ID NO: 513848 - DNA, 33 bp, Homo sapien
cttctttcccctgccaggagataccagggcagg

SEQ ID NO: 513849 - DNA, 33 bp, Homo sapien
tatctgcagaaaactcaaagcaacaacaggaga

SEQ ID NO: 513850 - DNA, 33 bp, Homo sapien
tatctgcagaaaactccaagcaacaacaggaga

SEQ ID NO: 513851 - DNA, 33 bp, Homo sapien
tcacacttataatggacgtctccaaaaacccac

SEQ ID NO: 513852 - DNA, 33 bp, Homo sapien
tcacacttataatggatgtctccaaaaacccac

SEQ ID NO: 513853 - DNA, 33 bp, Homo sapien
gttggacctgcgagtacccagaagtcaagaact

SEQ ID NO: 513854 - DNA, 33 bp, Homo sapien
gttggacctgcgagtatccagaagtcaagaact

SEQ ID NO: 513855 - DNA, 33 bp, Homo sapien
caagcactgaagcaaccgccctgcccctcagga

SEQ ID NO: 513856 - DNA, 33 bp, Homo sapien
caagcactgaagcaactgccctgcccctcagga

SEQ ID NO: 513857 - DNA, 33 bp, Homo sapien
tccaggttaaataaaacccatttgtgggcaaaa

SEQ ID NO: 513858 - DNA, 33 bp, Homo sapien
tccaggttaaataaaatccatttgtgggcaaaa

SEQ ID NO: 513859 - DNA, 33 bp, Homo sapien
gccatcctgactgccaagcatttagcacatctc

SEQ ID NO: 513860 - DNA, 33 bp, Homo sapien
gccatcctgactgccaggcatttagcacatctc

SEQ ID NO: 513861 - DNA, 33 bp, Homo sapien
tgaggaaagtgcacgacgggggaaggaaacagt

SEQ ID NO: 513862 - DNA, 33 bp, Homo sapien
tgaggaaagtgcacgatgggggaaggaaacagt

SEQ ID NO: 513863 - DNA, 33 bp, Homo sapien
aataatccctaaacccacctatgacttgtgagc

SEQ ID NO: 513864 - DNA, 33 bp, Homo sapien
aataatccctaaacccgcctatgacttgtgagc

SEQ ID NO: 513865 - DNA, 33 bp, Homo sapien
taaatgttctctgaaacgttagcccacaaggaa

SEQ ID NO: 513866 - DNA, 33 bp, Homo sapien
taaatgttctctgaaatgttagcccacaaggaa

SEQ ID NO: 513867 - DNA, 33 bp, Homo sapien
cctagtcaccccaaagccaggtcagagaactag

SEQ ID NO: 513868 - DNA, 33 bp, Homo sapien
cctagtcaccccaaagtcaggtcagagaactag

SEQ ID NO: 513869 - DNA, 33 bp, Homo sapien
caaagacgccatacagaaacagggctattgata

SEQ ID NO: 513870 - DNA, 33 bp, Homo sapien
caaagacgccatacaggaacagggctattgata

SEQ ID NO: 513871 - DNA, 33 bp, Homo sapien
aagggaaatccatcacactaacagttgactctc

SEQ ID NO: 513872 - DNA, 33 bp, Homo sapien
aagggaaatccatcacgctaacagttgactctc

SEQ ID NO: 513873 - DNA, 33 bp, Homo sapien
gtccacttggtctcagacactctaattccaggt

SEQ ID NO: 513874 - DNA, 33 bp, Homo sapien
gtccacttggtctcaggcactctaattccaggt

SEQ ID NO: 513875 - DNA, 33 bp, Homo sapien
ggaggccagatggatacgctgctgagatgaccc

SEQ ID NO: 513876 - DNA, 33 bp, Homo sapien
ggaggccagatggatatgctgctgagatgaccc

SEQ ID NO: 513877 - DNA, 33 bp, Homo sapien
ggagacagcattcctaagagaaggtgtcatgtg

SEQ ID NO: 513878 - DNA, 33 bp, Homo sapien
ggagacagcattcctaggagaaggtgtcatgtg

SEQ ID NO: 513879 - DNA, 33 bp, Homo sapien
caacctgagccctagaaatatagagatgaacgg

SEQ ID NO: 513880 - DNA, 33 bp, Homo sapien
caacctgagccctagagatatagagatgaacgg

SEQ ID NO: 513881 - DNA, 33 bp, Homo sapien
gggcacattattaattgaacagaagtcaaactg

SEQ ID NO: 513882 - DNA, 33 bp, Homo sapien
gggcacattattaatttaacagaagtcaaactg

SEQ ID NO: 513883 - DNA, 33 bp, Homo sapien
attcctttttaatccacctgttgataaatttgc

SEQ ID NO: 513884 - DNA, 33 bp, Homo sapien
attcctttttaatccatctgttgataaatttgc

SEQ ID NO: 513885 - DNA, 33 bp, Homo sapien
caggtccaccaaaagcacagcagggcagggtgc

SEQ ID NO: 513886 - DNA, 33 bp, Homo sapien
caggtccaccaaaagcgcagcagggcagggtgc

SEQ ID NO: 513887 - DNA, 33 bp, Homo sapien
ttgaacttgccaaagcactccggtgaactcacc

SEQ ID NO: 513888 - DNA, 33 bp, Homo sapien
ttgaacttgccaaagcgctccggtgaactcacc

SEQ ID NO: 513889 - DNA, 33 bp, Homo sapien
cactttcagccactgacgagtggacaaaggcac

SEQ ID NO: 513890 - DNA, 33 bp, Homo sapien
cactttcagccactgatgagtggacaaaggcac

SEQ ID NO: 513891 - DNA, 33 bp, Homo sapien
tagcacttgcgaagtaacaggtagggtgggtat

SEQ ID NO: 513892 - DNA, 33 bp, Homo sapien
tagcacttgcgaagtagcaggtagggtgggtat

SEQ ID NO: 513893 - DNA, 33 bp, Homo sapien
aagtcagtatatcaggaaagctataatgttcat

SEQ ID NO: 513894 - DNA, 33 bp, Homo sapien
aagtcagtatatcagggaagctataatgttcat

SEQ ID NO: 513895 - DNA, 33 bp, Homo sapien
atttcggtcccgtgtccccatgcctggtctaat

SEQ ID NO: 513896 - DNA, 33 bp, Homo sapien
atttcggtcccgtgtctccatgcctggtctaat

SEQ ID NO: 513897 - DNA, 33 bp, Homo sapien
ggaaagccgcaccccacgaagagttgccatacc

SEQ ID NO: 513898 - DNA, 33 bp, Homo sapien
ggaaagccgcaccccatgaagagttgccatacc

SEQ ID NO: 513899 - DNA, 33 bp, Homo sapien
ggacagcaacacacagactaaaaggccctacat

SEQ ID NO: 513900 - DNA, 33 bp, Homo sapien
ggacagcaacacacaggctaaaaggccctacat

SEQ ID NO: 513901 - DNA, 33 bp, Homo sapien
atctgaaacgatggcaatagaactttcccttcc

SEQ ID NO: 513902 - DNA, 33 bp, Homo sapien
atctgaaacgatggcagtagaactttcccttcc

SEQ ID NO: 513903 - DNA, 33 bp, Homo sapien
gctctaaggcctgaacagaacagaatgacctcc

SEQ ID NO: 513904 - DNA, 33 bp, Homo sapien
gctctaaggcctgaacggaacagaatgacctcc

SEQ ID NO: 513905 - DNA, 33 bp, Homo sapien
ccatactctgtgtccaaaatgtctcaagagtgc

SEQ ID NO: 513906 - DNA, 33 bp, Homo sapien
ccatactctgtgtccacaatgtctcaagagtgc

SEQ ID NO: 513907 - DNA, 33 bp, Homo sapien
aaggcaaggcaggttacgttttctgagggtagc

SEQ ID NO: 513908 - DNA, 33 bp, Homo sapien
aaggcaaggcaggttaggttttctgagggtagc

SEQ ID NO: 513909 - DNA, 33 bp, Homo sapien
gataatttctcagccacggagtctctttctttt

SEQ ID NO: 513910 - DNA, 33 bp, Homo sapien
gataatttctcagccatggagtctctttctttt

SEQ ID NO: 513911 - DNA, 33 bp, Homo sapien
tgccgggcaacctgaaagagcttcagagcatat

SEQ ID NO: 513912 - DNA, 33 bp, Homo sapien
tgccgggcaacctgaatgagcttcagagcatat

SEQ ID NO: 513913 - DNA, 33 bp, Homo sapien
aaaatctctgactacaatggtggattgtctatc

SEQ ID NO: 513914 - DNA, 33 bp, Homo sapien
aaaatctctgactacagtggtggattgtctatc

SEQ ID NO: 513915 - DNA, 33 bp, Homo sapien
tattcaccatcagggaaatagcaagggaaaaac

SEQ ID NO: 513916 - DNA, 33 bp, Homo sapien
tattcaccatcagggagatagcaagggaaaaac

SEQ ID NO: 513917 - DNA, 33 bp, Homo sapien
tcttggttagtgctaaataaatggtgctcctga

SEQ ID NO: 513918 - DNA, 33 bp, Homo sapien
tcttggttagtgctaagtaaatggtgctcctga

SEQ ID NO: 513919 - DNA, 33 bp, Homo sapien
tgctgatgtccgagacgagaggatggaacgtgg

SEQ ID NO: 513920 - DNA, 33 bp, Homo sapien
tgctgatgtccgagactagaggatggaacgtgg

SEQ ID NO: 513921 - DNA, 33 bp, Homo sapien
tcaccatttacagataagagagagaagtttcct

SEQ ID NO: 513922 - DNA, 33 bp, Homo sapien
tcaccatttacagatatgagagagaagtttcct

SEQ ID NO: 513923 - DNA, 33 bp, Homo sapien
ctgtgacaattgaaataaaatgcatgaagggac

SEQ ID NO: 513924 - DNA, 33 bp, Homo sapien
ctgtgacaattgaaatcaaatgcatgaagggac

SEQ ID NO: 513925 - DNA, 33 bp, Homo sapien
ccatataggggcacggccatcctactggagagc

SEQ ID NO: 513926 - DNA, 33 bp, Homo sapien
ccatataggggcacggtcatcctactggagagc

SEQ ID NO: 513927 - DNA, 33 bp, Homo sapien
aatttgtagctcaccactagacaatgactaact

SEQ ID NO: 513928 - DNA, 33 bp, Homo sapien
aatttgtagctcaccattagacaatgactaact

SEQ ID NO: 513929 - DNA, 33 bp, Homo sapien
acctattggctaatgaagtcaaatggtcttgac

SEQ ID NO: 513930 - DNA, 33 bp, Homo sapien
acctattggctaatgaggtcaaatggtcttgac

SEQ ID NO: 513931 - DNA, 33 bp, Homo sapien
cagtttgagccgcttaagaatttttaatttctt

SEQ ID NO: 513932 - DNA, 33 bp, Homo sapien
cagtttgagccgcttaggaatttttaatttctt

SEQ ID NO: 513933 - DNA, 33 bp, Homo sapien
cccaagattgggtaataagtagactgtggctgt

SEQ ID NO: 513934 - DNA, 33 bp, Homo sapien
cccaagattgggtaatcagtagactgtggctgt

SEQ ID NO: 513935 - DNA, 33 bp, Homo sapien
aggaaagcattgtcacaggtaccaggagttaaa

SEQ ID NO: 513936 - DNA, 33 bp, Homo sapien
aggaaagcattgtcacgggtaccaggagttaaa

SEQ ID NO: 513937 - DNA, 33 bp, Homo sapien
tttaggttaattcctacgtaccttatataaacc

SEQ ID NO: 513938 - DNA, 33 bp, Homo sapien
tttaggttaattcctatgtaccttatataaacc

SEQ ID NO: 513939 - DNA, 33 bp, Homo sapien
ggttctaaaacttagaagaggaaaagccaaaga

SEQ ID NO: 513940 - DNA, 33 bp, Homo sapien
ggttctaaaacttagaggaggaaaagccaaaga

SEQ ID NO: 513941 - DNA, 33 bp, Homo sapien
aaccagcaaaacacacccagacctgtggacaac

SEQ ID NO: 513942 - DNA, 33 bp, Homo sapien
aaccagcaaaacacactcagacctgtggacaac

SEQ ID NO: 513943 - DNA, 33 bp, Homo sapien
aggcagctgcttccagcaacatcgacattgagt

SEQ ID NO: 513944 - DNA, 33 bp, Homo sapien
aggcagctgcttccaggaacatcgacattgagt

SEQ ID NO: 513945 - DNA, 33 bp, Homo sapien
catgaacctgtgaaacaagacaagttatgtgct

SEQ ID NO: 513946 - DNA, 33 bp, Homo sapien
catgaacctgtgaaacgagacaagttatgtgct

SEQ ID NO: 513947 - DNA, 33 bp, Homo sapien
cgaggacagataggagaagacactggtgcacta

SEQ ID NO: 513948 - DNA, 33 bp, Homo sapien
cgaggacagataggagcagacactggtgcacta

SEQ ID NO: 513949 - DNA, 33 bp, Homo sapien
ttgaggttgcattccacgtgtgttaaagtagca

SEQ ID NO: 513950 - DNA, 33 bp, Homo sapien
ttgaggttgcattccatgtgtgttaaagtagca

SEQ ID NO: 513951 - DNA, 33 bp, Homo sapien
gtactggaaaacactacgtaagcaggaagcaca

SEQ ID NO: 513952 - DNA, 33 bp, Homo sapien
gtactggaaaacactatgtaagcaggaagcaca

SEQ ID NO: 513953 - DNA, 33 bp, Homo sapien
gaccaatcctaacaaggaaggcggtgggagaat

SEQ ID NO: 513954 - DNA, 33 bp, Homo sapien
gaccaatcctaacaagtaaggcggtgggagaat

SEQ ID NO: 513955 - DNA, 33 bp, Homo sapien
tgagctcttattcaaactctgtaactgaagtgc

SEQ ID NO: 513956 - DNA, 33 bp, Homo sapien
tgagctcttattcaaagtctgtaactgaagtgc

SEQ ID NO: 513957 - DNA, 33 bp, Homo sapien
agtctcctcagggagcaatgaagggttctgcag

SEQ ID NO: 513958 - DNA, 33 bp, Homo sapien
agtctcctcagggagcgatgaagggttctgcag

SEQ ID NO: 513959 - DNA, 33 bp, Homo sapien
ctcttccagcctttcagaaatacatgaatatgt

SEQ ID NO: 513960 - DNA, 33 bp, Homo sapien
ctcttccagcctttcataaatacatgaatatgt

SEQ ID NO: 513961 - DNA, 33 bp, Homo sapien
ttacgtagaccaaacaggtactccagtgcacct

SEQ ID NO: 513962 - DNA, 33 bp, Homo sapien
ttacgtagaccaaacatgtactccagtgcacct

SEQ ID NO: 513963 - DNA, 33 bp, Homo sapien
tatttattatgagtgaagttaagctttatttgc

SEQ ID NO: 513964 - DNA, 33 bp, Homo sapien
tatttattatgagtgaggttaagctttatttgc

SEQ ID NO: 513965 - DNA, 33 bp, Homo sapien
ttgataggcttactgacgcaaggattaaatagg

SEQ ID NO: 513966 - DNA, 33 bp, Homo sapien
ttgataggcttactgatgcaaggattaaatagg

SEQ ID NO: 513967 - DNA, 33 bp, Homo sapien
cgcgcgtgagagatcccggatacatctgcggtt

SEQ ID NO: 513968 - DNA, 33 bp, Homo sapien
cgcgcgtgagagatccgggatacatctgcggtt

SEQ ID NO: 513969 - DNA, 33 bp, Homo sapien
aatccatgaacctgaaatacttttccagttttt

SEQ ID NO: 513970 - DNA, 33 bp, Homo sapien
aatccatgaacctgaagtacttttccagttttt

SEQ ID NO: 513971 - DNA, 33 bp, Homo sapien
caactacttgtatgtcaaagcagaagtggttgt

SEQ ID NO: 513972 - DNA, 33 bp, Homo sapien
caactacttgtatgtcgaagcagaagtggttgt

SEQ ID NO: 513973 - DNA, 33 bp, Homo sapien; identical to SEQ ID NO: 513971

SEQ ID NO: 513974 - DNA, 33 bp, Homo sapien; identical to SEQ ID NO: 513972

SEQ ID NO: 513975 - DNA, 33 bp, Homo sapien
tttgattctcaatttacgacaaatgaagaacga

SEQ ID NO: 513976 - DNA, 33 bp, Homo sapien
tttgattctcaatttatgacaaatgaagaacga

SEQ ID NO: 513977 - DNA, 33 bp, Homo sapien
ggtttttcatgcacaccggtataagctaaagtt

SEQ ID NO: 513978 - DNA, 33 bp, Homo sapien
ggtttttcatgcacactggtataagctaaagtt

SEQ ID NO: 513979 - DNA, 33 bp, Homo sapien
gccacctcctgctggcaagatttgtttttgcat

SEQ ID NO: 513980 - DNA, 33 bp, Homo sapien
gccacctcctgctggcgagatttgtttttgcat

SEQ ID NO: 513981 - DNA, 33 bp, Homo sapien
aaaccaacccacttccaacaaatcttactgact

SEQ ID NO: 513982 - DNA, 33 bp, Homo sapien
aaaccaacccacttcccacaaatcttactgact

SEQ ID NO: 513983 - DNA, 33 bp, Homo sapien
atgaatgtacttacgaccttgttggaaaggaag

SEQ ID NO: 513984 - DNA, 33 bp, Homo sapien
atgaatgtacttacgagcttgttggaaaggaag

SEQ ID NO: 513985 - DNA, 33 bp, Homo sapien; identical to SEQ ID NO: 513983

SEQ ID NO: 513986 - DNA, 33 bp, Homo sapien; identical to SEQ ID NO: 513984

SEQ ID NO: 513987 - DNA, 33 bp, Homo sapien
acaatatattttgcaccgaacatgttattcagc

SEQ ID NO: 513988 - DNA, 33 bp, Homo sapien
acaatatattttgcacggaacatgttattcagc

SEQ ID NO: 513989 - DNA, 33 bp, Homo sapien
cccaagtcctgagactcagaaccactaaagaca

SEQ ID NO: 513990 - DNA, 33 bp, Homo sapien
cccaagtcctgagactgagaaccactaaagaca

SEQ ID NO: 513991 - DNA, 33 bp, Homo sapien
tcttatgctggtgcacgagagtcttgacctgca

SEQ ID NO: 513992 - DNA, 33 bp, Homo sapien
tcttatgctggtgcactagagtcttgacctgca

SEQ ID NO: 513993 - DNA, 33 bp, Homo sapien
cttgagtctgtaacaaatgaatagaggttaatt

SEQ ID NO: 513994 - DNA, 33 bp, Homo sapien
cttgagtctgtaacaactgaatagaggttaatt

SEQ ID NO: 513995 - DNA, 33 bp, Homo sapien
tgacacagctgactaacataaaactaaaatgac

SEQ ID NO: 513996 - DNA, 33 bp, Homo sapien
tgacacagctgactaatataaaactaaaatgac

SEQ ID NO: 513997 - DNA, 33 bp, Homo sapien
tttcttctactcatgccaacttctttcgactac

SEQ ID NO: 513998 - DNA, 33 bp, Homo sapien
tttcttctactcatgctaacttctttcgactac

SEQ ID NO: 513999 - DNA, 33 bp, Homo sapien
cccccatgcctgacaacatggctttctcaactt

SEQ ID NO: 514000 - DNA, 33 bp, Homo sapien
cccccatgcctgacaatatggctttctcaactt

SEQ ID NO: 514001 - DNA, 33 bp, Homo sapien
ccttctcttagcagcaccaggaaaaacagccca

SEQ ID NO: 514002 - DNA, 33 bp, Homo sapien
ccttctcttagcagcagcaggaaaaacagccca

SEQ ID NO: 514003 - DNA, 33 bp, Homo sapien; identical to SEQ ID NO: 514001

SEQ ID NO: 514004 - DNA, 33 bp, Homo sapien; identical to SEQ ID NO: 514002

SEQ ID NO: 514005 - DNA, 33 bp, Homo sapien
tgtgtgtgtgtagcacagaaaggggaagactgg

SEQ ID NO: 514006 - DNA, 33 bp, Homo sapien
tgtgtgtgtgtagcacggaaaggggaagactgg

SEQ ID NO: 514007 - DNA, 33 bp, Homo sapien
ttaaaaaggccactagcaagcgcgcgatgaacg

SEQ ID NO: 514008 - DNA, 33 bp, Homo sapien
ttaaaaaggccactaggaagcgcgcgatgaacg

SEQ ID NO: 514009 - DNA, 33 bp, Homo sapien
cccatagcaggcttacagattattgtattttca

SEQ ID NO: 514010 - DNA, 33 bp, Homo sapien
cccatagcaggcttacggattattgtattttca

SEQ ID NO: 514011 - DNA, 33 bp, Homo sapien
tcatgtctactttccacataacaacagaacaca

SEQ ID NO: 514012 - DNA, 33 bp, Homo sapien
tcatgtctactttccatataacaacagaacaca

SEQ ID NO: 514013 - DNA, 33 bp, Homo sapien
tatgtgaaaaaagcaccgaatcgagagttagga

SEQ ID NO: 514014 - DNA, 33 bp, Homo sapien
tatgtgaaaaaagcactgaatcgagagttagga

SEQ ID NO: 514015 - DNA, 33 bp, Homo sapien
tatgcttcattttgtgcaaatccattgcatcca

SEQ ID NO: 514016 - DNA, 33 bp, Homo sapien
tatgcttcattttgtgtaaatccattgcatcca

SEQ ID NO: 514017 - DNA, 33 bp, Homo sapien
agtcagcagtcatcaacatcgaggcaaggctct

SEQ ID NO: 514018 - DNA, 33 bp, Homo sapien
agtcagcagtcatcaatatcgaggcaaggctct

SEQ ID NO: 514019 - DNA, 33 bp, Homo sapien
aattaaatagcccataaaacaatctcagagcac

SEQ ID NO: 514020 - DNA, 33 bp, Homo sapien
aattaaatagcccatacaacaatctcagagcac

SEQ ID NO: 514021 - DNA, 33 bp, Homo sapien
aacagtgtgtagagcacggcctctctcctggaa

SEQ ID NO: 514022 - DNA, 33 bp, Homo sapien
aacagtgtgtagagcatggcctctctcctggaa

SEQ ID NO: 514023 - DNA, 33 bp, Homo sapien
ctgaaggtatatttcccaagaagcaagagtatt

SEQ ID NO: 514024 - DNA, 33 bp, Homo sapien
ctgaaggtatatttcctaagaagcaagagtatt

SEQ ID NO: 514025 - DNA, 33 bp, Homo sapien
ctgcatgattgttacaggaaatttatttgtcac

SEQ ID NO: 514026 - DNA, 33 bp, Homo sapien
ctgcatgattgttacatgaaatttatttgtcac

SEQ ID NO: 514027 - DNA, 33 bp, Homo sapien
ttaattcgtggggtgaaggacctatttgacatc

SEQ ID NO: 514028 - DNA, 33 bp, Homo sapien
ttaattcgtggggtgagggacctatttgacatc

SEQ ID NO: 514029 - DNA, 33 bp, Homo sapien
gtgacagttgggtgatcagcacctcctccactg

SEQ ID NO: 514030 - DNA, 33 bp, Homo sapien
gtgacagttgggtgatgagcacctcctccactg

SEQ ID NO: 514031 - DNA, 33 bp, Homo sapien
cagtagaggtttttgacagcatacaggatcctt

SEQ ID NO: 514032 - DNA, 33 bp, Homo sapien
cagtagaggtttttgatagcatacaggatcctt

SEQ ID NO: 514033 - DNA, 33 bp, Homo sapien
gactgagagagaaaaggcagtgcagcaggcagg

SEQ ID NO: 514034 - DNA, 33 bp, Homo sapien
gactgagagagaaaagtcagtgcagcaggcagg

SEQ ID NO: 514035 - DNA, 33 bp, Homo sapien
aactattgcaagaaaaataaggctttggtggaa

SEQ ID NO: 514036 - DNA, 33 bp, Homo sapien
aactattgcaagaaaagtaaggctttggtggaa

SEQ ID NO: 514037 - DNA, 33 bp, Homo sapien
tcctggtgtcctggctcacagacttgttttgtc

SEQ ID NO: 514038 - DNA, 33 bp, Homo sapien
tcctggtgtcctggcttacagacttgttttgtc

SEQ ID NO: 514039 - DNA, 33 bp, Homo sapien
aagatacagatgaaaaagacggaaaaaaatctt

SEQ ID NO: 514040 - DNA, 33 bp, Homo sapien
aagatacagatgaaaacgacggaaaaaaatctt

SEQ ID NO: 514041 - DNA, 33 bp, Homo sapien
ggctcagaaattaccccctccaaagtgtcagga

SEQ ID NO: 514042 - DNA, 33 bp, Homo sapien
ggctcagaaattacccgctccaaagtgtcagga

SEQ ID NO: 514043 - DNA, 33 bp, Homo sapien
agcagactgttctcaacgactgaaacatttttc

SEQ ID NO: 514044 - DNA, 33 bp, Homo sapien
agcagactgttctcaatgactgaaacatttttc

SEQ ID NO: 514045 - DNA, 33 bp, Homo sapien
ctggtcagaggagtccagacaacaatggaacct

SEQ ID NO: 514046 - DNA, 33 bp, Homo sapien
ctggtcagaggagtccggacaacaatggaacct

SEQ ID NO: 514047 - DNA, 33 bp, Homo sapien
gttgccatggagagtacgtgagaaattaaacct

SEQ ID NO: 514048 - DNA, 33 bp, Homo sapien
gttgccatggagagtatgtgagaaattaaacct

SEQ ID NO: 514049 - DNA, 33 bp, Homo sapien
gtttcctgcttacaaaaatgccactaagtcaag

SEQ ID NO: 514050 - DNA, 33 bp, Homo sapien
gtttcctgcttacaaagatgccactaagtcaag

SEQ ID NO: 514051 - DNA, 33 bp, Homo sapien
tggccgtgtgctttgcagagtagcacatgattg

SEQ ID NO: 514052 - DNA, 33 bp, Homo sapien
tggccgtgtgctttgcggagtagcacatgattg

SEQ ID NO: 514053 - DNA, 33 bp, Homo sapien
ggaggcccaggcctgccgagcgaagacatgccc

SEQ ID NO: 514054 - DNA, 33 bp, Homo sapien
ggaggcccaggcctgctgagcgaagacatgccc

SEQ ID NO: 514055 - DNA, 33 bp, Homo sapien
catcaacccaggaaaacgttagatgcaatctat

SEQ ID NO: 514056 - DNA, 33 bp, Homo sapien
catcaacccaggaaaatgttagatgcaatctat

SEQ ID NO: 514057 - DNA, 33 bp, Homo sapien
tacaaactctagattagcgcattgcttggcttt

SEQ ID NO: 514058 - DNA, 33 bp, Homo sapien
tacaaactctagattatcgcattgcttggcttt

SEQ ID NO: 514059 - DNA, 33 bp, Homo sapien
ggagccgggagggagacaaatgagactgagttt

SEQ ID NO: 514060 - DNA, 33 bp, Homo sapien
ggagccgggagggagagaaatgagactgagttt

SEQ ID NO: 514061 - DNA, 33 bp, Homo sapien
tgcctgacaggcagtacgagcaccgcatgaatg

SEQ ID NO: 514062 - DNA, 33 bp, Homo sapien
tgcctgacaggcagtaggagcaccgcatgaatg

SEQ ID NO: 514063 - DNA, 33 bp, Homo sapien
ccgcatgaatgctgccgagtggatggaggactc

SEQ ID NO: 514064 - DNA, 33 bp, Homo sapien
ccgcatgaatgctgcctagtggatggaggactc

SEQ ID NO: 514065 - DNA, 33 bp, Homo sapien
agcagatggtgatgccacgtgcagccagtgagg

SEQ ID NO: 514066 - DNA, 33 bp, Homo sapien
agcagatggtgatgccgcgtgcagccagtgagg

SEQ ID NO: 514067 - DNA, 33 bp, Homo sapien
caggaaagtaaaccaacgcctttctgagggaga

SEQ ID NO: 514068 - DNA, 33 bp, Homo sapien
caggaaagtaaaccaatgcctttctgagggaga

SEQ ID NO: 514069 - DNA, 33 bp, Homo sapien
ttccttattggctttacgtagattgaatttaca

SEQ ID NO: 514070 - DNA, 33 bp, Homo sapien
ttccttattggctttatgtagattgaatttaca

SEQ ID NO: 514071 - DNA, 33 bp, Homo sapien
actattcccatgcagactcagctgccataaaac

SEQ ID NO: 514072 - DNA, 33 bp, Homo sapien
actattcccatgcagattcagctgccataaaac

SEQ ID NO: 514073 - DNA, 33 bp, Homo sapien
agagatgttagcattacctgacaaggatttcaa

SEQ ID NO: 514074 - DNA, 33 bp, Homo sapien
agagatgttagcattatctgacaaggatttcaa

SEQ ID NO: 514075 - DNA, 33 bp, Homo sapien
acagggggtctcgccactgctcaagggagattc

SEQ ID NO: 514076 - DNA, 33 bp, Homo sapien
acagggggtctcgccagtgctcaagggagattc

SEQ ID NO: 514077 - DNA, 33 bp, Homo sapien
tcaacctaatggctaaaatcaacatgaccataa

SEQ ID NO: 514078 - DNA, 33 bp, Homo sapien
tcaacctaatggctaagatcaacatgaccataa

SEQ ID NO: 514079 - DNA, 33 bp, Homo sapien
caggctccatgtggaacgccttctgactgtgag

SEQ ID NO: 514080 - DNA, 33 bp, Homo sapien
caggctccatgtggaatgccttctgactgtgag

SEQ ID NO: 514081 - DNA, 33 bp, Homo sapien
agacatcataaactgcggaaaattagagacaat

SEQ ID NO: 514082 - DNA, 33 bp, Homo sapien
agacatcataaactgctgaaaattagagacaat

SEQ ID NO: 514083 - DNA, 33 bp, Homo sapien
aatggcaacaccaagaagacacagttgttggaa

SEQ ID NO: 514084 - DNA, 33 bp, Homo sapien
aatggcaacaccaagatgacacagttgttggaa

SEQ ID NO: 514085 - DNA, 33 bp, Homo sapien
aattaggagatgtcacagatttcgtgagttgtg

SEQ ID NO: 514086 - DNA, 33 bp, Homo sapien
aattaggagatgtcacggatttcgtgagttgtg

SEQ ID NO: 514087 - DNA, 33 bp, Homo sapien
ttcatacaattggaaaaagttaaggccttgctc

SEQ ID NO: 514088 - DNA, 33 bp, Homo sapien
ttcatacaattggaaagagttaaggccttgctc

SEQ ID NO: 514089 - DNA, 33 bp, Homo sapien
aggggagatgagaacaacggggcagaaagaagg

SEQ ID NO: 514090 - DNA, 33 bp, Homo sapien
aggggagatgagaacagcggggcagaaagaagg

SEQ ID NO: 514091 - DNA, 33 bp, Homo sapien
tgggaaatcagtcaaaagtcaggtcttcatgta

SEQ ID NO: 514092 - DNA, 33 bp, Homo sapien
tgggaaatcagtcaaaggtcaggtcttcatgta

SEQ ID NO: 514093 - DNA, 33 bp, Homo sapien
atcaaaagccattaacaaagtgagtactgactt

SEQ ID NO: 514094 - DNA, 33 bp, Homo sapien
atcaaaagccattaacgaagtgagtactgactt

SEQ ID NO: 514095 - DNA, 33 bp, Homo sapien
ttgtaatgaccatactaaggatgaactggcata

SEQ ID NO: 514096 - DNA, 33 bp, Homo sapien
ttgtaatgaccatactcaggatgaactggcata

SEQ ID NO: 514097 - DNA, 33 bp, Homo sapien
acagtcttgtgttgtacgagtctttcacatttt

SEQ ID NO: 514098 - DNA, 33 bp, Homo sapien
acagtcttgtgttgtatgagtctttcacatttt

SEQ ID NO: 514099 - DNA, 33 bp, Homo sapien
caaatgccatgttctccagtcaggaggtactgg

SEQ ID NO: 514100 - DNA, 33 bp, Homo sapien
caaatgccatgttctctagtcaggaggtactgg

SEQ ID NO: 514101 - DNA, 33 bp, Homo sapien
caatgagccaagattacgcttctgtactccagc

SEQ ID NO: 514102 - DNA, 33 bp, Homo sapien
caatgagccaagattatgcttctgtactccagc

SEQ ID NO: 514103 - DNA, 33 bp, Homo sapien
cccatgatacagtttcacagagttcagccccaa

SEQ ID NO: 514104 - DNA, 33 bp, Homo sapien
cccatgatacagtttcgcagagttcagccccaa

SEQ ID NO: 514105 - DNA, 33 bp, Homo sapien
ccacattacccgccacagtgaccaggtcggctc

SEQ ID NO: 514106 - DNA, 33 bp, Homo sapien
ccacattacccgccacggtgaccaggtcggctc

SEQ ID NO: 514107 - DNA, 33 bp, Homo sapien
ccctactctctcccaaacctcgcaactccctcc

SEQ ID NO: 514108 - DNA, 33 bp, Homo sapien
ccctactctctcccaatcctcgcaactccctcc

SEQ ID NO: 514109 - DNA, 33 bp, Homo sapien
ctgtccttccacacaactacagctatgaaaacc

SEQ ID NO: 514110 - DNA, 33 bp, Homo sapien
ctgtccttccacacaattacagctatgaaaacc

SEQ ID NO: 514111 - DNA, 33 bp, Homo sapien
gtctttggtttaggcacgaatattacaccattt

SEQ ID NO: 514112 - DNA, 33 bp, Homo sapien
gtctttggtttaggcatgaatattacaccattt

SEQ ID NO: 514113 - DNA, 33 bp, Homo sapien
tttcgaacctctgggaatacatctctatggctt

SEQ ID NO: 514114 - DNA, 33 bp, Homo sapien
tttcgaacctctgggactacatctctatggctt

SEQ ID NO: 514115 - DNA, 33 bp, Homo sapien
taaaacattgaatggactcatagaggtgctggg

SEQ ID NO: 514116 - DNA, 33 bp, Homo sapien
taaaacattgaatggattcatagaggtgctggg

SEQ ID NO: 514117 - DNA, 33 bp, Homo sapien
aaagaagaaggtggatcaagcttacagaagaat

SEQ ID NO: 514118 - DNA, 33 bp, Homo sapien
aaagaagaaggtggattaagcttacagaagaat

SEQ ID NO: 514119 - DNA, 33 bp, Homo sapien
ctgtggtgctgctgagcccagggacagtcactg

SEQ ID NO: 514120 - DNA, 33 bp, Homo sapien
ctgtggtgctgctgagtccagggacagtcactg

SEQ ID NO: 514121 - DNA, 33 bp, Homo sapien
tctgtcccacattcgcagattggaaagtaatgc

SEQ ID NO: 514122 - DNA, 33 bp, Homo sapien
tctgtcccacattcgcggattggaaagtaatgc

SEQ ID NO: 514123 - DNA, 33 bp, Homo sapien
tcagattcttaattgcccttaccatttcttaac

SEQ ID NO: 514124 - DNA, 33 bp, Homo sapien
tcagattcttaattgcgcttaccatttcttaac

SEQ ID NO: 514125 - DNA, 33 bp, Homo sapien
gtgtcaagcaataaagaagagtttggatttatc

SEQ ID NO: 514126 - DNA, 33 bp, Homo sapien
gtgtcaagcaataaaggagagtttggatttatc

SEQ ID NO: 514127 - DNA, 33 bp, Homo sapien
gaccaggatgttagcacgaggttgaagttcaca

SEQ ID NO: 514128 - DNA, 33 bp, Homo sapien
gaccaggatgttagcatgaggttgaagttcaca

SEQ ID NO: 514129 - DNA, 33 bp, Homo sapien; identical to SEQ ID NO: 514127

SEQ ID NO: 514130 - DNA, 33 bp, Homo sapien; identical to SEQ ID NO: 514128

SEQ ID NO: 514131 - DNA, 33 bp, Homo sapien
tctcaggatataggccagatagaaaatcagggg

SEQ ID NO: 514132 - DNA, 33 bp, Homo sapien
tctcaggatataggccggatagaaaatcagggg

SEQ ID NO: 514133 - DNA, 33 bp, Homo sapien; identical to SEQ ID NO: 514131

SEQ ID NO: 514134 - DNA, 33 bp, Homo sapien; identical to SEQ ID NO: 514132

SEQ ID NO: 514135 - DNA, 33 bp, Homo sapien
aattctaaagtttttacataggtgctaaagaaa

SEQ ID NO: 514136 - DNA, 33 bp, Homo sapien
aattctaaagtttttagataggtgctaaagaaa

SEQ ID NO: 514137 - DNA, 33 bp, Homo sapien
aataaggactaattggaattgatttatgagcag

SEQ ID NO: 514138 - DNA, 33 bp, Homo sapien
aataaggactaattggcattgatttatgagcag

SEQ ID NO: 514139 - DNA, 33 bp, Homo sapien; identical to SEQ ID NO: 514137

SEQ ID NO: 514140 - DNA, 33 bp, Homo sapien; identical to SEQ ID NO: 514138

SEQ ID NO: 514141 - DNA, 33 bp, Homo sapien
ctctccagaggcacagaaaggcttggtcatcac

SEQ ID NO: 514142 - DNA, 33 bp, Homo sapien
ctctccagaggcacaggaaggcttggtcatcac

SEQ ID NO: 514143 - DNA, 33 bp, Homo sapien
caggcaagatgacgacaggaagagaggtctgtg

SEQ ID NO: 514144 - DNA, 33 bp, Homo sapien
caggcaagatgacgacgggaagagaggtctgtg

SEQ ID NO: 514145 - DNA, 33 bp, Homo sapien
atattttctcatcataataaaagcaaattaggg

SEQ ID NO: 514146 - DNA, 33 bp, Homo sapien
atattttctcatcatagtaaaagcaaattaggg

SEQ ID NO: 514147 - DNA, 33 bp, Homo sapien
tttcatgcttcctctacgacaagctttgtaaca

SEQ ID NO: 514148 - DNA, 33 bp, Homo sapien
tttcatgcttcctctaggacaagctttgtaaca

SEQ ID NO: 514149 - DNA, 33 bp, Homo sapien
ggaggctggagctctccataggaggatgtgatg

SEQ ID NO: 514150 - DNA, 33 bp, Homo sapien
ggaggctggagctctctataggaggatgtgatg

SEQ ID NO: 514151 - DNA, 33 bp, Homo sapien
gctgacagtgactctacgtttcctagatttcag

SEQ ID NO: 514152 - DNA, 33 bp, Homo sapien
gctgacagtgactctatgtttcctagatttcag

SEQ ID NO: 514153 - DNA, 33 bp, Homo sapien
aaatcagagataaagacgcaagaaagagaattc

SEQ ID NO: 514154 - DNA, 33 bp, Homo sapien
aaatcagagataaagatgcaagaaagagaattc

SEQ ID NO: 514155 - DNA, 33 bp, Homo sapien
cttgttctatatgctgaaaactgttgcagggat

SEQ ID NO: 514156 - DNA, 33 bp, Homo sapien
cttgttctatatgctggaaactgttgcagggat

SEQ ID NO: 514157 - DNA, 33 bp, Homo sapien
aaacaaaaactctcttaaacgtgatactgtatt

SEQ ID NO: 514158 - DNA, 33 bp, Homo sapien
aaacaaaaactctcttgaacgtgatactgtatt

SEQ ID NO: 514159 - DNA, 33 bp, Homo sapien
ttattatgtcattgaagtatttcaggagctgaa

SEQ ID NO: 514160 - DNA, 33 bp, Homo sapien
ttattatgtcattgaattatttcaggagctgaa

SEQ ID NO: 514161 - DNA, 33 bp, Homo sapien
tatttgaattatctgaataaagctgtttctgtt

SEQ ID NO: 514162 - DNA, 33 bp, Homo sapien
tatttgaattatctgagtaaagctgtttctgtt

SEQ ID NO: 514163 - DNA, 33 bp, Homo sapien
cttccatttaagcacaaaaaaggtataaagtca

SEQ ID NO: 514164 - DNA, 33 bp, Homo sapien
cttccatttaagcacagaaaaggtataaagtca

SEQ ID NO: 514165 - DNA, 33 bp, Homo sapien
catcaaaagtcatcaacaagctcatgaccattc

SEQ ID NO: 514166 - DNA, 33 bp, Homo sapien
catcaaaagtcatcaataagctcatgaccattc

SEQ ID NO: 514167 - DNA, 33 bp, Homo sapien
aggctaaagaagtatcactggctccaaatgatt

SEQ ID NO: 514168 - DNA, 33 bp, Homo sapien
aggctaaagaagtatcgctggctccaaatgatt

SEQ ID NO: 514169 - DNA, 33 bp, Homo sapien
tctcatcataaggaacgatttattcactccatt

SEQ ID NO: 514170 - DNA, 33 bp, Homo sapien
tctcatcataaggaactatttattcactccatt

SEQ ID NO: 514171 - DNA, 33 bp, Homo sapien
ttgatacttttcagagaacaaaaaatctgtctt

SEQ ID NO: 514172 - DNA, 33 bp, Homo sapien
ttgatacttttcagagtacaaaaaatctgtctt

SEQ ID NO: 514173 - DNA, 33 bp, Homo sapien
tccccaagcagtgccgcatgctgcttaagagaa

SEQ ID NO: 514174 - DNA, 33 bp, Homo sapien
tccccaagcagtgccgtatgctgcttaagagaa

SEQ ID NO: 514175 - DNA, 33 bp, Homo sapien
attaaattccaggtcacggacagtgctgtgttc

SEQ ID NO: 514176 - DNA, 33 bp, Homo sapien
attaaattccaggtcagggacagtgctgtgttc

SEQ ID NO: 514177 - DNA, 33 bp, Homo sapien
atgggaagtttttagaagttgcaattcaagatg

SEQ ID NO: 514178 - DNA, 33 bp, Homo sapien
atgggaagtttttagaggttgcaattcaagatg

SEQ ID NO: 514179 - DNA, 33 bp, Homo sapien
agtttggaagtactacaagtttctatgaccaat

SEQ ID NO: 514180 - DNA, 33 bp, Homo sapien
agtttggaagtactaccagtttctatgaccaat

SEQ ID NO: 514181 - DNA, 33 bp, Homo sapien
aaagatcatgagtaaccggcatatgagatggca

SEQ ID NO: 514182 - DNA, 33 bp, Homo sapien
aaagatcatgagtaactggcatatgagatggca

SEQ ID NO: 514183 - DNA, 33 bp, Homo sapien
ttattgaaagagcctaactcaagtcttgagaca

SEQ ID NO: 514184 - DNA, 33 bp, Homo sapien
ttattgaaagagcctacctcaagtcttgagaca

SEQ ID NO: 514185 - DNA, 33 bp, Homo sapien
agtgtgatgactcagaaagagagttcaaaagac

SEQ ID NO: 514186 - DNA, 33 bp, Homo sapien
agtgtgatgactcagacagagagttcaaaagac

SEQ ID NO: 514187 - DNA, 33 bp, Homo sapien
tctgccattgtttccaacacatgcccctaaaaa

SEQ ID NO: 514188 - DNA, 33 bp, Homo sapien
tctgccattgtttccatcacatgcccctaaaaa

SEQ ID NO: 514189 - DNA, 33 bp, Homo sapien
tacctgaataaataaacagcaaagagagaagtc

SEQ ID NO: 514190 - DNA, 33 bp, Homo sapien
tacctgaataaataaatagcaaagagagaagtc

SEQ ID NO: 514191 - DNA, 33 bp, Homo sapien
cgaggatgctgtgaaacggtatggaggcttcaa

SEQ ID NO: 514192 - DNA, 33 bp, Homo sapien
cgaggatgctgtgaaatggtatggaggcttcaa

SEQ ID NO: 514193 - DNA, 33 bp, Homo sapien
tataagccctgtgtcacgatcttctgccctctt

SEQ ID NO: 514194 - DNA, 33 bp, Homo sapien
tataagccctgtgtcatgatcttctgccctctt

SEQ ID NO: 514195 - DNA, 33 bp, Homo sapien
tggtcaaggagacagacgagaaagtggctccca

SEQ ID NO: 514196 - DNA, 33 bp, Homo sapien
tggtcaaggagacagatgagaaagtggctccca

SEQ ID NO: 514197 - DNA, 33 bp, Homo sapien
caggcaaaacacaaaacgcaagaaaacttggtg

SEQ ID NO: 514198 - DNA, 33 bp, Homo sapien
caggcaaaacacaaaatgcaagaaaacttggtg

SEQ ID NO: 514199 - DNA, 33 bp, Homo sapien
agcctcacttcctgcaactgaaaataaggtcta

SEQ ID NO: 514200 - DNA, 33 bp, Homo sapien
agcctcacttcctgcatctgaaaataaggtcta

SEQ ID NO: 514201 - DNA, 33 bp, Homo sapien
ctgccttcgttatcagaaaaaaattagacttta

SEQ ID NO: 514202 - DNA, 33 bp, Homo sapien
ctgccttcgttatcaggaaaaaattagacttta

SEQ ID NO: 514203 - DNA, 33 bp, Homo sapien
tctcacgcgcatggaacctaatgaaatgcatct

SEQ ID NO: 514204 - DNA, 33 bp, Homo sapien
tctcacgcgcatggaatctaatgaaatgcatct

SEQ ID NO: 514205 - DNA, 33 bp, Homo sapien
ccaaaagcacaccaaaagcacaatggttgaaga

SEQ ID NO: 514206 - DNA, 33 bp, Homo sapien
ccaaaagcacaccaaaggcacaatggttgaaga

SEQ ID NO: 514207 - DNA, 33 bp, Homo sapien
accaaatggacacaacaaaggagccaaataatc

SEQ ID NO: 514208 - DNA, 33 bp, Homo sapien
accaaatggacacaacgaaggagccaaataatc

SEQ ID NO: 514209 - DNA, 33 bp, Homo sapien
ctcaacaccgaatacacacgaacgtaaagatga

SEQ ID NO: 514210 - DNA, 33 bp, Homo sapien
ctcaacaccgaatacatacgaacgtaaagatga

SEQ ID NO: 514211 - DNA, 33 bp, Homo sapien
gaccctgtctccacacacaaagacagcaggcag

SEQ ID NO: 514212 - DNA, 33 bp, Homo sapien
gaccctgtctccacacgcaaagacagcaggcag

SEQ ID NO: 514213 - DNA, 33 bp, Homo sapien
agagcatgaaggctcacatacgaggagcatagc

SEQ ID NO: 514214 - DNA, 33 bp, Homo sapien
agagcatgaaggctcagatacgaggagcatagc

SEQ ID NO: 514215 - DNA, 33 bp, Homo sapien
ccacctcacgctgatagagttggctactgcata

SEQ ID NO: 514216 - DNA, 33 bp, Homo sapien
ccacctcacgctgatatagttggctactgcata

SEQ ID NO: 514217 - DNA, 33 bp, Homo sapien
ggacttacacgcatagaaagtaaataaaatgta

SEQ ID NO: 514218 - DNA, 33 bp, Homo sapien
ggacttacacgcataggaagtaaataaaatgta

SEQ ID NO: 514219 - DNA, 33 bp, Homo sapien
caacagcctcaaaggacctcttaccatgaaggt

SEQ ID NO: 514220 - DNA, 33 bp, Homo sapien
caacagcctcaaaggatctcttaccatgaaggt

SEQ ID NO: 514221 - DNA, 33 bp, Homo sapien
cagatctggtagcaaaaaggaaacaaacactga

SEQ ID NO: 514222 - DNA, 33 bp, Homo sapien
cagatctggtagcaaagaggaaacaaacactga

SEQ ID NO: 514223 - DNA, 33 bp, Homo sapien
cttaccaaatgtaaaactcttaagcatatttca

SEQ ID NO: 514224 - DNA, 33 bp, Homo sapien
cttaccaaatgtaaaattcttaagcatatttca

SEQ ID NO: 514225 - DNA, 33 bp, Homo sapien; identical to SEQ ID NO: 514223

SEQ ID NO: 514226 - DNA, 33 bp, Homo sapien; identical to SEQ ID NO: 514224

SEQ ID NO: 514227 - DNA, 33 bp, Homo sapien
ttcacctctttcccaacctctggtatctcacac

SEQ ID NO: 514228 - DNA, 33 bp, Homo sapien
ttcacctctttcccaatctctggtatctcacac

SEQ ID NO: 514229 - DNA, 33 bp, Homo sapien; identical to SEQ ID NO: 514227

SEQ ID NO: 514230 - DNA, 33 bp, Homo sapien; identical to SEQ ID NO: 514228

SEQ ID NO: 514231 - DNA, 33 bp, Homo sapien
tgtgaataaaacactgccaacaccacagctgaa

SEQ ID NO: 514232 - DNA, 33 bp, Homo sapien
tgtgaataaaacactgtcaacaccacagctgaa

SEQ ID NO: 514233 - DNA, 33 bp, Homo sapien
aaaatgcaattcaaataagcataaaacatttac

SEQ ID NO: 514234 - DNA, 33 bp, Homo sapien
aaaatgcaattcaaattagcataaaacatttac

SEQ ID NO: 514235 - DNA, 33 bp, Homo sapien
tcttagttatgtcaaaatgtacaattaaattat

SEQ ID NO: 514236 - DNA, 33 bp, Homo sapien
tcttagttatgtcaaactgtacaattaaattat

SEQ ID NO: 514237 - DNA, 33 bp, Homo sapien
aggtgtatgaagaataaagtgaacatattattg

SEQ ID NO: 514238 - DNA, 33 bp, Homo sapien
aggtgtatgaagaatacagtgaacatattattg

SEQ ID NO: 514239 - DNA, 33 bp, Homo sapien
atttactcatttgacaaatatttgagtggtaga

SEQ ID NO: 514240 - DNA, 33 bp, Homo sapien
atttactcatttgacagatatttgagtggtaga

SEQ ID NO: 514241 - DNA, 33 bp, Homo sapien
gtcagtaacaagtagcccataacatctgaaggg

SEQ ID NO: 514242 - DNA, 33 bp, Homo sapien
gtcagtaacaagtagcgcataacatctgaaggg

SEQ ID NO: 514243 - DNA, 33 bp, Homo sapien
ttaaaaagctttcaaaatatatgacttaacata

SEQ ID NO: 514244 - DNA, 33 bp, Homo sapien
ttaaaaagctttcaaagtatatgacttaacata

SEQ ID NO: 514245 - DNA, 33 bp, Homo sapien; identical to SEQ ID NO: 514243

SEQ ID NO: 514246 - DNA, 33 bp, Homo sapien; identical to SEQ ID NO: 514244

SEQ ID NO: 514247 - DNA, 33 bp, Homo sapien
atttgaaggaggtgaaatggacaaaaagtaaat

SEQ ID NO: 514248 - DNA, 33 bp, Homo sapien
atttgaaggaggtgaagtggacaaaaagtaaat

SEQ ID NO: 514249 - DNA, 33 bp, Homo sapien
tctcctgagtggtttgcatgcttatctaccagc

SEQ ID NO: 514250 - DNA, 33 bp, Homo sapien
tctcctgagtggtttgtatgcttatctaccagc

SEQ ID NO: 514251 - DNA, 33 bp, Homo sapien
gctgtggaatagaaggccagaattgatcactat

SEQ ID NO: 514252 - DNA, 33 bp, Homo sapien
gctgtggaatagaaggtcagaattgatcactat

SEQ ID NO: 514253 - DNA, 33 bp, Homo sapien
gatgagactgggcatccctatcttgtactcaat

SEQ ID NO: 514254 - DNA, 33 bp, Homo sapien
gatgagactgggcatcgctatcttgtactcaat

SEQ ID NO: 514255 - DNA, 33 bp, Homo sapien
aaattggtgtagtaaccgtgatatatcagcata

SEQ ID NO: 514256 - DNA, 33 bp, Homo sapien
aaattggtgtagtaactgtgatatatcagcata

SEQ ID NO: 514257 - DNA, 33 bp, Homo sapien
agatcctcagtatgtacggtttcagctaggaaa

SEQ ID NO: 514258 - DNA, 33 bp, Homo sapien
agatcctcagtatgtatggtttcagctaggaaa

SEQ ID NO: 514259 - DNA, 33 bp, Homo sapien; identical to SEQ ID NO: 514257

SEQ ID NO: 514260 - DNA, 33 bp, Homo sapien; identical to SEQ ID NO: 514258

SEQ ID NO: 514261 - DNA, 33 bp, Homo sapien
aatgtaggtggaactgaaccaacagtttctcct

SEQ ID NO: 514262 - DNA, 33 bp, Homo sapien
aatgtaggtggaactggaccaacagtttctcct

SEQ ID NO: 514263 - DNA, 33 bp, Homo sapien
tgtgaaaggtcacatagctttgtttcttgagga

SEQ ID NO: 514264 - DNA, 33 bp, Homo sapien
tgtgaaaggtcacatatctttgtttcttgagga

SEQ ID NO: 514265 - DNA, 33 bp, Homo sapien
gaatttggtgaaatgcccattatacagaactgt

SEQ ID NO: 514266 - DNA, 33 bp, Homo sapien
gaatttggtgaaatgctcattatacagaactgt

SEQ ID NO: 514267 - DNA, 33 bp, Homo sapien
actttgttctacagatcacttcaatgcactatt

SEQ ID NO: 514268 - DNA, 33 bp, Homo sapien
actttgttctacagattacttcaatgcactatt

SEQ ID NO: 514269 - DNA, 33 bp, Homo sapien
aaattctgcaagtggactactaagagttttaat

SEQ ID NO: 514270 - DNA, 33 bp, Homo sapien
aaattctgcaagtggattactaagagttttaat

SEQ ID NO: 514271 - DNA, 33 bp, Homo sapien
taaagatactggaaaaagtgggtgcccggcggt

SEQ ID NO: 514272 - DNA, 33 bp, Homo sapien
taaagatactggaaaacgtgggtgcccggcggt

SEQ ID NO: 514273 - DNA, 33 bp, Homo sapien
gcctgcacgtgacctaccatacctgcctggtaa

SEQ ID NO: 514274 - DNA, 33 bp, Homo sapien
gcctgcacgtgacctatcatacctgcctggtaa

SEQ ID NO: 514275 - DNA, 33 bp, Homo sapien
ggggctgccatctggccattcacagactccatc

SEQ ID NO: 514276 - DNA, 33 bp, Homo sapien
ggggctgccatctggctattcacagactccatc

SEQ ID NO: 514277 - DNA, 33 bp, Homo sapien
aagcatgggaagagagaaaggatggagtctgtg

SEQ ID NO: 514278 - DNA, 33 bp, Homo sapien
aagcatgggaagagaggaaggatggagtctgtg

SEQ ID NO: 514279 - DNA, 33 bp, Homo sapien
acccagaagtcatcaacggctgataaatttgac

SEQ ID NO: 514280 - DNA, 33 bp, Homo sapien
acccagaagtcatcaatggctgataaatttgac

SEQ ID NO: 514281 - DNA, 33 bp, Homo sapien
tttccaaataaggaagcattcacaggtaccagg

SEQ ID NO: 514282 - DNA, 33 bp, Homo sapien
tttccaaataaggaaggattcacaggtaccagg

SEQ ID NO: 514283 - DNA, 33 bp, Homo sapien
cctgcgcttaaatcaaggtctcaaaggctttgt

SEQ ID NO: 514284 - DNA, 33 bp, Homo sapien
cctgcgcttaaatcaatgtctcaaaggctttgt

SEQ ID NO: 514285 - DNA, 33 bp, Homo sapien
gaaggaaacaaagccaccacatttctccctcca

SEQ ID NO: 514286 - DNA, 33 bp, Homo sapien
gaaggaaacaaagccatcacatttctccctcca

SEQ ID NO: 514287 - DNA, 33 bp, Homo sapien; identical to SEQ ID NO: 514285

SEQ ID NO: 514288 - DNA, 33 bp, Homo sapien; identical to SEQ ID NO: 514286

SEQ ID NO: 514289 - DNA, 33 bp, Homo sapien
gaaaatgaaagctgatcaacctgaattattttt

SEQ ID NO: 514290 - DNA, 33 bp, Homo sapien
gaaaatgaaagctgattaacctgaattattttt

SEQ ID NO: 514291 - DNA, 33 bp, Homo sapien
ttagaaactttgtgggcagtattctgctaatat

SEQ ID NO: 514292 - DNA, 33 bp, Homo sapien
ttagaaactttgtgggtagtattctgctaatat

SEQ ID NO: 514293 - DNA, 33 bp, Homo sapien
tcaagtatgaaattgacagaacacgagacaata

SEQ ID NO: 514294 - DNA, 33 bp, Homo sapien
tcaagtatgaaattgagagaacacgagacaata

SEQ ID NO: 514295 - DNA, 33 bp, Homo sapien
atttggtccattctgacaatgtctgtatttctt

SEQ ID NO: 514296 - DNA, 33 bp, Homo sapien
atttggtccattctgataatgtctgtatttctt

SEQ ID NO: 514297 - DNA, 33 bp, Homo sapien
acctctgactcaaatcaacaaacttgaaagccc

SEQ ID NO: 514298 - DNA, 33 bp, Homo sapien
acctctgactcaaatcgacaaacttgaaagccc

SEQ ID NO: 514299 - DNA, 33 bp, Homo sapien
caccactgtctattccactcttaatctgcactc

SEQ ID NO: 514300 - DNA, 33 bp, Homo sapien
caccactgtctattccgctcttaatctgcactc

SEQ ID NO: 514301 - DNA, 33 bp, Homo sapien
gggtatccacgtagaacgttgactggacaaaag

SEQ ID NO: 514302 - DNA, 33 bp, Homo sapien
gggtatccacgtagaatgttgactggacaaaag

SEQ ID NO: 514303 - DNA, 33 bp, Homo sapien
cacaaaatcatttacaatccgcattttctcacc

SEQ ID NO: 514304 - DNA, 33 bp, Homo sapien
cacaaaatcatttacagtccgcattttctcacc

SEQ ID NO: 514305 - DNA, 33 bp, Homo sapien
gagagtgcccacctccaaggtaagagggttatt

SEQ ID NO: 514306 - DNA, 33 bp, Homo sapien
gagagtgcccacctccgaggtaagagggttatt

SEQ ID NO: 514307 - DNA, 33 bp, Homo sapien
gataggtttagacatacggtcccattttgatga

SEQ ID NO: 514308 - DNA, 33 bp, Homo sapien
gataggtttagacatatggtcccattttgatga

SEQ ID NO: 514309 - DNA, 33 bp, Homo sapien; identical to SEQ ID NO: 514307

SEQ ID NO: 514310 - DNA, 33 bp, Homo sapien; identical to SEQ ID NO: 514308

SEQ ID NO: 514311 - DNA, 33 bp, Homo sapien
cgaatcacacagtccacaatttcctggtatcca

SEQ ID NO: 514312 - DNA, 33 bp, Homo sapien
cgaatcacacagtccataatttcctggtatcca

SEQ ID NO: 514313 - DNA, 33 bp, Homo sapien; identical to SEQ ID NO: 514311

SEQ ID NO: 514314 - DNA, 33 bp, Homo sapien; identical to SEQ ID NO: 514312

SEQ ID NO: 514315 - DNA, 33 bp, Homo sapien
tgtatgctggtagaaaaatcagtgtcaggacat

SEQ ID NO: 514316 - DNA, 33 bp, Homo sapien
tgtatgctggtagaaacatcagtgtcaggacat

SEQ ID NO: 514317 - DNA, 33 bp, Homo sapien
gtgataaaaatcacaaatctgaaccattcatga

SEQ ID NO: 514318 - DNA, 33 bp, Homo sapien
gtgataaaaatcacaagtctgaaccattcatga

SEQ ID NO: 514319 - DNA, 33 bp, Homo sapien
tgctacctgcagactacacgaagcaagaaacac

SEQ ID NO: 514320 - DNA, 33 bp, Homo sapien
tgctacctgcagactagacgaagcaagaaacac

SEQ ID NO: 514321 - DNA, 33 bp, Homo sapien
gttaataaatatttcacaatgcatcacagaaaa

SEQ ID NO: 514322 - DNA, 33 bp, Homo sapien
gttaataaatatttcagaatgcatcacagaaaa

SEQ ID NO: 514323 - DNA, 33 bp, Homo sapien
aagtgcaatattttcaataaacgtgatgttcag

SEQ ID NO: 514324 - DNA, 33 bp, Homo sapien
aagtgcaatattttcagtaaacgtgatgttcag

SEQ ID NO: 514325 - DNA, 33 bp, Homo sapien; identical to SEQ ID NO: 514323

SEQ ID NO: 514326 - DNA, 33 bp, Homo sapien; identical to SEQ ID NO: 514324

SEQ ID NO: 514327 - DNA, 33 bp, Homo sapien
tcttctgacaaagggccgatattcagaaactac

SEQ ID NO: 514328 - DNA, 33 bp, Homo sapien
tcttctgacaaagggcggatattcagaaactac

SEQ ID NO: 514329 - DNA, 33 bp, Homo sapien
ttgagggcaaccggtccgaccaaaacttattag

SEQ ID NO: 514330 - DNA, 33 bp, Homo sapien
ttgagggcaaccggtctgaccaaaacttattag

SEQ ID NO: 514331 - DNA, 33 bp, Homo sapien
ttggagagtatatttacgaaggggctatgcttc

SEQ ID NO: 514332 - DNA, 33 bp, Homo sapien
ttggagagtatatttatgaaggggctatgcttc

SEQ ID NO: 514333 - DNA, 33 bp, Homo sapien; identical to SEQ ID NO: 514331

SEQ ID NO: 514334 - DNA, 33 bp, Homo sapien; identical to SEQ ID NO: 514332

SEQ ID NO: 514335 - DNA, 33 bp, Homo sapien
aactgcatattttaacaatcactaattcataca

SEQ ID NO: 514336 - DNA, 33 bp, Homo sapien
aactgcatattttaacgatcactaattcataca

SEQ ID NO: 514337 - DNA, 33 bp, Homo sapien
cttttgtagtagttcacgtgatagtcttttttt

SEQ ID NO: 514338 - DNA, 33 bp, Homo sapien
cttttgtagtagttcatgtgatagtcttttttt

SEQ ID NO: 514339 - DNA, 33 bp, Homo sapien
ttatagatgtaattcaccaaatctacattttta

SEQ ID NO: 514340 - DNA, 33 bp, Homo sapien
ttatagatgtaattcatcaaatctacattttta

SEQ ID NO: 514341 - DNA, 33 bp, Homo sapien
ttgtcaatgtggataacggggtagctttaggag

SEQ ID NO: 514342 - DNA, 33 bp, Homo sapien
ttgtcaatgtggataatggggtagctttaggag

SEQ ID NO: 514343 - DNA, 33 bp, Homo sapien
tagaattggctaacataaagtccactgaggggc

SEQ ID NO: 514344 - DNA, 33 bp, Homo sapien
tagaattggctaacatcaagtccactgaggggc

SEQ ID NO: 514345 - DNA, 33 bp, Homo sapien
atcctgaccctgtataagcctaaactaatgtgc

SEQ ID NO: 514346 - DNA, 33 bp, Homo sapien
atcctgaccctgtataggcctaaactaatgtgc

SEQ ID NO: 514347 - DNA, 33 bp, Homo sapien
aagtggatatttttaacgcttggcagcctatgg

SEQ ID NO: 514348 - DNA, 33 bp, Homo sapien
aagtggatatttttaatgcttggcagcctatgg

SEQ ID NO: 514349 - DNA, 33 bp, Homo sapien; identical to SEQ ID NO: 514347

SEQ ID NO: 514350 - DNA, 33 bp, Homo sapien; identical to SEQ ID NO: 514348

SEQ ID NO: 514351 - DNA, 33 bp, Homo sapien
atattccgacttccaacgaatgcctcaaagcgg

SEQ ID NO: 514352 - DNA, 33 bp, Homo sapien
atattccgacttccaatgaatgcctcaaagcgg

SEQ ID NO: 514353 - DNA, 33 bp, Homo sapien
atctgcacctgtggccgatccacctgggcccat

SEQ ID NO: 514354 - DNA, 33 bp, Homo sapien
atctgcacctgtggcctatccacctgggcccat

SEQ ID NO: 514355 - DNA, 33 bp, Homo sapien
tgtggcaaaactcttacccttattaaatgcaaa

SEQ ID NO: 514356 - DNA, 33 bp, Homo sapien
tgtggcaaaactcttatccttattaaatgcaaa

SEQ ID NO: 514357 - DNA, 33 bp, Homo sapien
gccattcttgcagctgaaaggtggtattgcatt

SEQ ID NO: 514358 - DNA, 33 bp, Homo sapien
gccattcttgcagctgtaaggtggtattgcatt

SEQ ID NO: 514359 - DNA, 33 bp, Homo sapien
tagggccagattaggaaggctcaaatcctagtt

SEQ ID NO: 514360 - DNA, 33 bp, Homo sapien
tagggccagattaggagggctcaaatcctagtt

SEQ ID NO: 514361 - DNA, 33 bp, Homo sapien
tataagatttttctcccagatgagtgctgtgat

SEQ ID NO: 514362 - DNA, 33 bp, Homo sapien
tataagatttttctcctagatgagtgctgtgat

SEQ ID NO: 514363 - DNA, 33 bp, Homo sapien
gagcctgttctctgacaaggccttaagagatca

SEQ ID NO: 514364 - DNA, 33 bp, Homo sapien
gagcctgttctctgacgaggccttaagagatca

SEQ ID NO: 514365 - DNA, 33 bp, Homo sapien
gctagcaggattatagcagtcctaacttagttc

SEQ ID NO: 514366 - DNA, 33 bp, Homo sapien
gctagcaggattatagtagtcctaacttagttc

SEQ ID NO: 514367 - DNA, 33 bp, Homo sapien
ctctacgatggggaacaaaataatgatgtccac

SEQ ID NO: 514368 - DNA, 33 bp, Homo sapien
ctctacgatggggaacgaaataatgatgtccac

SEQ ID NO: 514369 - DNA, 33 bp, Homo sapien
ttctaggcttttcagaccctagactagaccatc

SEQ ID NO: 514370 - DNA, 33 bp, Homo sapien
ttctaggcttttcagatcctagactagaccatc

SEQ ID NO: 514371 - DNA, 33 bp, Homo sapien
agcaaaaatctcagcaaaatactagcaatacta

SEQ ID NO: 514372 - DNA, 33 bp, Homo sapien
agcaaaaatctcagcacaatactagcaatacta

SEQ ID NO: 514373 - DNA, 33 bp, Homo sapien
tatccttataccaaagacaaagagagcacaaaa

SEQ ID NO: 514374 - DNA, 33 bp, Homo sapien
tatccttataccaaagccaaagagagcacaaaa

SEQ ID NO: 514375 - DNA, 33 bp, Homo sapien; identical to SEQ ID NO: 514373

SEQ ID NO: 514376 - DNA, 33 bp, Homo sapien; identical to SEQ ID NO: 514374

SEQ ID NO: 514377 - DNA, 33 bp, Homo sapien
cagcagttaatgcagccatttggtcataaatgt

SEQ ID NO: 514378 - DNA, 33 bp, Homo sapien
cagcagttaatgcagctatttggtcataaatgt

SEQ ID NO: 514379 - DNA, 33 bp, Homo sapien
gttagacagttgttcacagtatactcctgtaat

SEQ ID NO: 514380 - DNA, 33 bp, Homo sapien
gttagacagttgttcatagtatactcctgtaat

SEQ ID NO: 514381 - DNA, 33 bp, Homo sapien
tgattacactctcttacgctctgaccaaacaat

SEQ ID NO: 514382 - DNA, 33 bp, Homo sapien
tgattacactctcttatgctctgaccaaacaat

SEQ ID NO: 514383 - DNA, 33 bp, Homo sapien
aggtataatttcccctaaagtattaatgagaag

SEQ ID NO: 514384 - DNA, 33 bp, Homo sapien
aggtataatttcccctgaagtattaatgagaag

SEQ ID NO: 514385 - DNA, 33 bp, Homo sapien
tttagcaaattcaatcaagttctgaagaggata

SEQ ID NO: 514386 - DNA, 33 bp, Homo sapien
tttagcaaattcaatcgagttctgaagaggata

SEQ ID NO: 514387 - DNA, 33 bp, Homo sapien
agaacagcagaaggtacaggaggaaagagaagt

SEQ ID NO: 514388 - DNA, 33 bp, Homo sapien
agaacagcagaaggtagaggaggaaagagaagt

SEQ ID NO: 514389 - DNA, 33 bp, Homo sapien
ataacctcagataagacagccagttctcccatg

SEQ ID NO: 514390 - DNA, 33 bp, Homo sapien
ataacctcagataagagagccagttctcccatg

SEQ ID NO: 514391 - DNA, 33 bp, Homo sapien
gccccaacatttcacaagtgctgaggagtccca

SEQ ID NO: 514392 - DNA, 33 bp, Homo sapien
gccccaacatttcacaggtgctgaggagtccca

SEQ ID NO: 514393 - DNA, 33 bp, Homo sapien
ctgagtttaatcctagaatgagaccttgagggg

SEQ ID NO: 514394 - DNA, 33 bp, Homo sapien
ctgagtttaatcctagcatgagaccttgagggg

SEQ ID NO: 514395 - DNA, 33 bp, Homo sapien
ctcctggatctggaaacctagtcaagaaacagg

SEQ ID NO: 514396 - DNA, 33 bp, Homo sapien
ctcctggatctggaaagctagtcaagaaacagg

SEQ ID NO: 514397 - DNA, 33 bp, Homo sapien
gctgatttcctgctccagcaacctggcttggat

SEQ ID NO: 514398 - DNA, 33 bp, Homo sapien
gctgatttcctgctccggcaacctggcttggat

SEQ ID NO: 514399 - DNA, 33 bp, Homo sapien
tggtgtctggccactcaagtaatagacaaggga

SEQ ID NO: 514400 - DNA, 33 bp, Homo sapien
tggtgtctggccactcgagtaatagacaaggga

SEQ ID NO: 514401 - DNA, 33 bp, Homo sapien
atggaaattggcaaagactatatcagcacatcc

SEQ ID NO: 514402 - DNA, 33 bp, Homo sapien
atggaaattggcaaagcctatatcagcacatcc

SEQ ID NO: 514403 - DNA, 33 bp, Homo sapien
tcataaatctggaattcaaacagggctcaacag

SEQ ID NO: 514404 - DNA, 33 bp, Homo sapien
tcataaatctggaatttaaacagggctcaacag

SEQ ID NO: 514405 - DNA, 33 bp, Homo sapien
tcagcattaggtgtgacgtgttcagcaagaatc

SEQ ID NO: 514406 - DNA, 33 bp, Homo sapien
tcagcattaggtgtgatgtgttcagcaagaatc

SEQ ID NO: 514407 - DNA, 33 bp, Homo sapien
atagtgccaggtgagaaaaaaaaagagtttgta

SEQ ID NO: 514408 - DNA, 33 bp, Homo sapien
atagtgccaggtgagacaaaaaaagagtttgta

SEQ ID NO: 514409 - DNA, 33 bp, Homo sapien
gagaagcaaggagagacgacaagttggccctgc

SEQ ID NO: 514410 - DNA, 33 bp, Homo sapien
gagaagcaaggagagatgacaagttggccctgc

SEQ ID NO: 514411 - DNA, 33 bp, Homo sapien
tatcccaatcgccacaccgatgcaatcatttta

SEQ ID NO: 514412 - DNA, 33 bp, Homo sapien
tatcccaatcgccacatcgatgcaatcatttta

SEQ ID NO: 514413 - DNA, 33 bp, Homo sapien
cttctggggaacagcgccaccattcgggtcacc

SEQ ID NO: 514414 - DNA, 33 bp, Homo sapien
cttctggggaacagcgtcaccattcgggtcacc

SEQ ID NO: 514415 - DNA, 33 bp, Homo sapien
aagttctgcagagataaagggaaccgtcttatc

SEQ ID NO: 514416 - DNA, 33 bp, Homo sapien
aagttctgcagagatacagggaaccgtcttatc

SEQ ID NO: 514417 - DNA, 33 bp, Homo sapien
catctactcagagaaaaacaggaaacacagaga

SEQ ID NO: 514418 - DNA, 33 bp, Homo sapien
catctactcagagaaatacaggaaacacagaga

SEQ ID NO: 514419 - DNA, 33 bp, Homo sapien
ccagctaaagaggtcaataattccatcctctgg

SEQ ID NO: 514420 - DNA, 33 bp, Homo sapien
ccagctaaagaggtcagtaattccatcctctgg

SEQ ID NO: 514421 - DNA, 33 bp, Homo sapien
cattgccaggctatgacgaaatagagctaccaa

SEQ ID NO: 514422 - DNA, 33 bp, Homo sapien
cattgccaggctatgatgaaatagagctaccaa

SEQ ID NO: 514423 - DNA, 33 bp, Homo sapien
aagacagaaaagctaaagacagcatcctaagcc

SEQ ID NO: 514424 - DNA, 33 bp, Homo sapien
aagacagaaaagctaaggacagcatcctaagcc

SEQ ID NO: 514425 - DNA, 33 bp, Homo sapien
tgaatttagactgaaaagtagactgagttaaat

SEQ ID NO: 514426 - DNA, 33 bp, Homo sapien
tgaatttagactgaaaggtagactgagttaaat

SEQ ID NO: 514427 - DNA, 33 bp, Homo sapien
ccctgctaaacattacaatcacctgtggaacta

SEQ ID NO: 514428 - DNA, 33 bp, Homo sapien
ccctgctaaacattacgatcacctgtggaacta

SEQ ID NO: 514429 - DNA, 33 bp, Homo sapien
acattggagtcacctgaaggcttaaataatgcc

SEQ ID NO: 514430 - DNA, 33 bp, Homo sapien
acattggagtcacctgcaggcttaaataatgcc

SEQ ID NO: 514431 - DNA, 33 bp, Homo sapien
tccctaggtccctgataaatctggttctttatt

SEQ ID NO: 514432 - DNA, 33 bp, Homo sapien
tccctaggtccctgatcaatctggttctttatt

SEQ ID NO: 514433 - DNA, 33 bp, Homo sapien
cactgccaagttccacagggaaggctcacctgg

SEQ ID NO: 514434 - DNA, 33 bp, Homo sapien
cactgccaagttccacggggaaggctcacctgg

SEQ ID NO: 514435 - DNA, 33 bp, Homo sapien
atgtgaagtccacacacaccacactccctccac

SEQ ID NO: 514436 - DNA, 33 bp, Homo sapien
atgtgaagtccacacataccacactccctccac

SEQ ID NO: 514437 - DNA, 33 bp, Homo sapien
aggataattaactgcaactgcctcatagggcct

SEQ ID NO: 514438 - DNA, 33 bp, Homo sapien
aggataattaactgcacctgcctcatagggcct

SEQ ID NO: 514439 - DNA, 33 bp, Homo sapien
aagcaaattgaaacacagagagtttaaggaact

SEQ ID NO: 514440 - DNA, 33 bp, Homo sapien
aagcaaattgaaacacggagagtttaaggaact

SEQ ID NO: 514441 - DNA, 33 bp, Homo sapien
cacttcatggttcaccaaacagtttcactagcc

SEQ ID NO: 514442 - DNA, 33 bp, Homo sapien
cacttcatggttcaccgaacagtttcactagcc

SEQ ID NO: 514443 - DNA, 33 bp, Homo sapien
aaaccccaacaacttacgaaagcactcaggatc

SEQ ID NO: 514444 - DNA, 33 bp, Homo sapien
aaaccccaacaacttatgaaagcactcaggatc

SEQ ID NO: 514445 - DNA, 33 bp, Homo sapien
gacctaagggaatcaaatggttgtctgccagtg

SEQ ID NO: 514446 - DNA, 33 bp, Homo sapien
gacctaagggaatcaagtggttgtctgccagtg

SEQ ID NO: 514447 - DNA, 33 bp, Homo sapien
gtcatttcctggcttcaatggctgtcggaattc

SEQ ID NO: 514448 - DNA, 33 bp, Homo sapien
gtcatttcctggcttccatggctgtcggaattc

SEQ ID NO: 514449 - DNA, 33 bp, Homo sapien
agaaaagaatccattaagtttagcaactgaagc

SEQ ID NO: 514450 - DNA, 33 bp, Homo sapien
agaaaagaatccattacgtttagcaactgaagc

SEQ ID NO: 514451 - DNA, 33 bp, Homo sapien
tgaaaagtcagaaggtaaatatgttaaaaaatg

SEQ ID NO: 514452 - DNA, 33 bp, Homo sapien
tgaaaagtcagaaggtgaatatgttaaaaaatg

SEQ ID NO: 514453 - DNA, 33 bp, Homo sapien
gtgtgtaagtgcttcactaagtttttcaaaaat

SEQ ID NO: 514454 - DNA, 33 bp, Homo sapien
gtgtgtaagtgcttcattaagtttttcaaaaat

SEQ ID NO: 514455 - DNA, 33 bp, Homo sapien
ttgtgtagggaagagaagagaaccacattgcat

SEQ ID NO: 514456 - DNA, 33 bp, Homo sapien
ttgtgtagggaagagacgagaaccacattgcat

SEQ ID NO: 514457 - DNA, 33 bp, Homo sapien
gtgaacagctctataactgctcatctttattga

SEQ ID NO: 514458 - DNA, 33 bp, Homo sapien
gtgaacagctctataattgctcatctttattga

SEQ ID NO: 514459 - DNA, 33 bp, Homo sapien
agagctgtagaaaatgaaggcaggaaaagcagt

SEQ ID NO: 514460 - DNA, 33 bp, Homo sapien
agagctgtagaaaatggaggcaggaaaagcagt

SEQ ID NO: 514461 - DNA, 33 bp, Homo sapien
gaggcaggacttctaagaaaatggtaccaggag

SEQ ID NO: 514462 - DNA, 33 bp, Homo sapien
gaggcaggacttctaataaaatggtaccaggag

SEQ ID NO: 514463 - DNA, 33 bp, Homo sapien
aaactgttcactgttgaatctgcatttatatac

SEQ ID NO: 514464 - DNA, 33 bp, Homo sapien
aaactgttcactgttgcatctgcatttatatac

SEQ ID NO: 514465 - DNA, 33 bp, Homo sapien
ctctggccatagcttacgtgtgcagtggaagca

SEQ ID NO: 514466 - DNA, 33 bp, Homo sapien
ctctggccatagcttatgtgtgcagtggaagca

SEQ ID NO: 514467 - DNA, 33 bp, Homo sapien
caagggaaagacacaaaggaatgaagcaacttg

SEQ ID NO: 514468 - DNA, 33 bp, Homo sapien
caagggaaagacacaacggaatgaagcaacttg

SEQ ID NO: 514469 - DNA, 33 bp, Homo sapien
aagaccttgcattctcggaacttcacagacttt

SEQ ID NO: 514470 - DNA, 33 bp, Homo sapien
aagaccttgcattctctgaacttcacagacttt

SEQ ID NO: 514471 - DNA, 33 bp, Homo sapien
ttagaggaagagagaacaatttatttgttggca

SEQ ID NO: 514472 - DNA, 33 bp, Homo sapien
ttagaggaagagagaagaatttatttgttggca

SEQ ID NO: 514473 - DNA, 33 bp, Homo sapien
ctcttttctcaaaggcgaagttacccagcaaat

SEQ ID NO: 514474 - DNA, 33 bp, Homo sapien
ctcttttctcaaaggctaagttacccagcaaat

SEQ ID NO: 514475 - DNA, 33 bp, Homo sapien
tcacccagtttccagacgtaagtcagctcacag

SEQ ID NO: 514476 - DNA, 33 bp, Homo sapien
tcacccagtttccagatgtaagtcagctcacag

SEQ ID NO: 514477 - DNA, 33 bp, Homo sapien
gtgtcctggactaaaacaactccagcaagggct

SEQ ID NO: 514478 - DNA, 33 bp, Homo sapien
gtgtcctggactaaaataactccagcaagggct

SEQ ID NO: 514479 - DNA, 33 bp, Homo sapien
ttactgattcacacccagattactataatacac

SEQ ID NO: 514480 - DNA, 33 bp, Homo sapien
ttactgattcacacccggattactataatacac

SEQ ID NO: 514481 - DNA, 33 bp, Homo sapien
acagagcaccacaggcgatagctagatacagac

SEQ ID NO: 514482 - DNA, 33 bp, Homo sapien
acagagcaccacaggctatagctagatacagac

SEQ ID NO: 514483 - DNA, 33 bp, Homo sapien
ttgtctgaacttaggaactatgaatacattcag

SEQ ID NO: 514484 - DNA, 33 bp, Homo sapien
ttgtctgaacttaggagctatgaatacattcag

SEQ ID NO: 514485 - DNA, 33 bp, Homo sapien
gaatttacacaaggtcacaactatccaagtttt

SEQ ID NO: 514486 - DNA, 33 bp, Homo sapien
gaatttacacaaggtcgcaactatccaagtttt

SEQ ID NO: 514487 - DNA, 33 bp, Homo sapien
cctgcaaacaataagcccacttcatgtcttgta

SEQ ID NO: 514488 - DNA, 33 bp, Homo sapien
cctgcaaacaataagctcacttcatgtcttgta

SEQ ID NO: 514489 - DNA, 33 bp, Homo sapien
cctcaaccctgaaaaacagtatgtccttcaaca

SEQ ID NO: 514490 - DNA, 33 bp, Homo sapien
cctcaaccctgaaaaatagtatgtccttcaaca

SEQ ID NO: 514491 - DNA, 33 bp, Homo sapien
ataagaataaagtacaaactagtgcctggctca

SEQ ID NO: 514492 - DNA, 33 bp, Homo sapien
ataagaataaagtacacactagtgcctggctca

SEQ ID NO: 514493 - DNA, 33 bp, Homo sapien
gaaggggtcagagagacggatctgtgtcagtta

SEQ ID NO: 514494 - DNA, 33 bp, Homo sapien
gaaggggtcagagagagggatctgtgtcagtta

SEQ ID NO: 514495 - DNA, 33 bp, Homo sapien
ccaatcttgtttttaactcagtgttctttgaat

SEQ ID NO: 514496 - DNA, 33 bp, Homo sapien
ccaatcttgtttttaagtcagtgttctttgaat

SEQ ID NO: 514497 - DNA, 33 bp, Homo sapien
ttctcccttgttcccactggaaaggcgaagtca

SEQ ID NO: 514498 - DNA, 33 bp, Homo sapien
ttctcccttgttcccattggaaaggcgaagtca

SEQ ID NO: 514499 - DNA, 33 bp, Homo sapien
ggatgcttgacagactcaatgccctcatctgtg

SEQ ID NO: 514500 - DNA, 33 bp, Homo sapien
ggatgcttgacagacttaatgccctcatctgtg

SEQ ID NO: 514501 - DNA, 33 bp, Homo sapien
tcaggcagttgagatacgtgcatgcatcaccgc

SEQ ID NO: 514502 - DNA, 33 bp, Homo sapien
tcaggcagttgagatatgtgcatgcatcaccgc

SEQ ID NO: 514503 - DNA, 33 bp, Homo sapien
ccctttggccgtcagacatacagcaagtgctca

SEQ ID NO: 514504 - DNA, 33 bp, Homo sapien
ccctttggccgtcagatatacagcaagtgctca

SEQ ID NO: 514505 - DNA, 33 bp, Homo sapien
atttgtcatgatgtcacgaaggaggttgcttcc

SEQ ID NO: 514506 - DNA, 33 bp, Homo sapien
atttgtcatgatgtcatgaaggaggttgcttcc

SEQ ID NO: 514507 - DNA, 33 bp, Homo sapien
ttaaggaagggattcactatcagttttcttcac

SEQ ID NO: 514508 - DNA, 33 bp, Homo sapien
ttaaggaagggattcagtatcagttttcttcac

SEQ ID NO: 514509 - DNA, 33 bp, Homo sapien
aatattctccctaacactctagcatagtggggg

SEQ ID NO: 514510 - DNA, 33 bp, Homo sapien
aatattctccctaacagtctagcatagtggggg

SEQ ID NO: 514511 - DNA, 33 bp, Homo sapien
agactttggaccacaccacatttgaagtactag

SEQ ID NO: 514512 - DNA, 33 bp, Homo sapien
agactttggaccacactacatttgaagtactag

SEQ ID NO: 514513 - DNA, 33 bp, Homo sapien
agcccaactgcaggataagtgcagatcccatgg

SEQ ID NO: 514514 - DNA, 33 bp, Homo sapien
agcccaactgcaggatgagtgcagatcccatgg

SEQ ID NO: 514515 - DNA, 33 bp, Homo sapien
gggtgtgcaccagtccaccagcattacagcttg

SEQ ID NO: 514516 - DNA, 33 bp, Homo sapien
gggtgtgcaccagtccgccagcattacagcttg

SEQ ID NO: 514517 - DNA, 33 bp, Homo sapien
agcataccactacttaagctgtccatatactgt

SEQ ID NO: 514518 - DNA, 33 bp, Homo sapien
agcataccactacttaggctgtccatatactgt

SEQ ID NO: 514519 - DNA, 33 bp, Homo sapien
tcaaggctttgctgtacgtttgaaccactgaac

SEQ ID NO: 514520 - DNA, 33 bp, Homo sapien
tcaaggctttgctgtatgtttgaaccactgaac

SEQ ID NO: 514521 - DNA, 33 bp, Homo sapien
ttcatccctactcaagaccagttaaatcagaac

SEQ ID NO: 514522 - DNA, 33 bp, Homo sapien
ttcatccctactcaaggccagttaaatcagaac

SEQ ID NO: 514523 - DNA, 33 bp, Homo sapien
ttcagtaaacatgttcaagctcccatacacaaa

SEQ ID NO: 514524 - DNA, 33 bp, Homo sapien
ttcagtaaacatgttcgagctcccatacacaaa

SEQ ID NO: 514525 - DNA, 33 bp, Homo sapien
cgacatcttacatggacgatttggatctatcct

SEQ ID NO: 514526 - DNA, 33 bp, Homo sapien
cgacatcttacatggatgatttggatctatcct

SEQ ID NO: 514527 - DNA, 33 bp, Homo sapien
tgaataaacattcattcaacactgcctcagaaa

SEQ ID NO: 514528 - DNA, 33 bp, Homo sapien
tgaataaacattcattgaacactgcctcagaaa

SEQ ID NO: 514529 - DNA, 33 bp, Homo sapien
tggtctttgacatggacagcaatagagaaatgt

SEQ ID NO: 514530 - DNA, 33 bp, Homo sapien
tggtctttgacatggagagcaatagagaaatgt

SEQ ID NO: 514531 - DNA, 33 bp, Homo sapien
ataccaggggctcccacgtaaagaatgtcaacc

SEQ ID NO: 514532 - DNA, 33 bp, Homo sapien
ataccaggggctcccatgtaaagaatgtcaacc

SEQ ID NO: 514533 - DNA, 33 bp, Homo sapien
ccccaccactggagacaactcagagttcatttt

SEQ ID NO: 514534 - DNA, 33 bp, Homo sapien
ccccaccactggagacgactcagagttcatttt

SEQ ID NO: 514535 - DNA, 33 bp, Homo sapien
tcagagcaaaaactaacgcaattgaacaaacac

SEQ ID NO: 514536 - DNA, 33 bp, Homo sapien
tcagagcaaaaactaatgcaattgaacaaacac

SEQ ID NO: 514537 - DNA, 33 bp, Homo sapien
gggccctgtgaccttacgtgagcagcaccatga

SEQ ID NO: 514538 - DNA, 33 bp, Homo sapien
gggccctgtgaccttatgtgagcagcaccatga

SEQ ID NO: 514539 - DNA, 33 bp, Homo sapien
gccgtatgtgtgggaacgaggatgtggagtgag

SEQ ID NO: 514540 - DNA, 33 bp, Homo sapien
gccgtatgtgtgggaatgaggatgtggagtgag

SEQ ID NO: 514541 - DNA, 33 bp, Homo sapien
gtgagccattcatgcgacccattagtctgctca

SEQ ID NO: 514542 - DNA, 33 bp, Homo sapien
gtgagccattcatgcggcccattagtctgctca

SEQ ID NO: 514543 - DNA, 33 bp, Homo sapien
tctaaactgagtcttgacaaatgaacaggcagg

SEQ ID NO: 514544 - DNA, 33 bp, Homo sapien
tctaaactgagtcttggcaaatgaacaggcagg

SEQ ID NO: 514545 - DNA, 33 bp, Homo sapien
atgtggcctaaccaataaaatgaaggtggaagt

SEQ ID NO: 514546 - DNA, 33 bp, Homo sapien
atgtggcctaaccaatgaaatgaaggtggaagt

SEQ ID NO: 514547 - DNA, 33 bp, Homo sapien
catgccaacttggccactaatcttcaccacctg

SEQ ID NO: 514548 - DNA, 33 bp, Homo sapien
catgccaacttggccattaatcttcaccacctg

SEQ ID NO: 514549 - DNA, 33 bp, Homo sapien
tggtgaggtgcacaccaaccctctcttttgcca

SEQ ID NO: 514550 - DNA, 33 bp, Homo sapien
tggtgaggtgcacaccgaccctctcttttgcca

SEQ ID NO: 514551 - DNA, 33 bp, Homo sapien
gcattgataataaatgccatggtcactatcatg

SEQ ID NO: 514552 - DNA, 33 bp, Homo sapien
gcattgataataaatgtcatggtcactatcatg

SEQ ID NO: 514553 - DNA, 33 bp, Homo sapien
tgtcatttcacctggacgggaagcatgtgagca

SEQ ID NO: 514554 - DNA, 33 bp, Homo sapien
tgtcatttcacctggatgggaagcatgtgagca

SEQ ID NO: 514555 - DNA, 33 bp, Homo sapien
accttgtctgacccgaagcgtccaaatcagcac

SEQ ID NO: 514556 - DNA, 33 bp, Homo sapien
accttgtctgacccgaggcgtccaaatcagcac

SEQ ID NO: 514557 - DNA, 33 bp, Homo sapien
gaagtacaacctcccacggtgtagcacagttca

SEQ ID NO: 514558 - DNA, 33 bp, Homo sapien
gaagtacaacctcccatggtgtagcacagttca

SEQ ID NO: 514559 - DNA, 33 bp, Homo sapien
aggatttgaacacagcgagggtcccctccaaca

SEQ ID NO: 514560 - DNA, 33 bp, Homo sapien
aggatttgaacacagctagggtcccctccaaca

SEQ ID NO: 514561 - DNA, 33 bp, Homo sapien
tgatttaaaaatatcactaggtcttctttgtgc

SEQ ID NO: 514562 - DNA, 33 bp, Homo sapien
tgatttaaaaatatcagtaggtcttctttgtgc

SEQ ID NO: 514563 - DNA, 33 bp, Homo sapien
tgccacttccactacaatgaccttttttcttta

SEQ ID NO: 514564 - DNA, 33 bp, Homo sapien
tgccacttccactacagtgaccttttttcttta

SEQ ID NO: 514565 - DNA, 33 bp, Homo sapien
ttacatatatgcccacagagaaataaagtccgt

SEQ ID NO: 514566 - DNA, 33 bp, Homo sapien
ttacatatatgcccacggagaaataaagtccgt

SEQ ID NO: 514567 - DNA, 33 bp, Homo sapien
tggattttcatcaaaaagatgagtaaaatgcct

SEQ ID NO: 514568 - DNA, 33 bp, Homo sapien
tggattttcatcaaaaggatgagtaaaatgcct

SEQ ID NO: 514569 - DNA, 33 bp, Homo sapien
agctatgtccaccagacggctctagggaatgac

SEQ ID NO: 514570 - DNA, 33 bp, Homo sapien
agctatgtccaccagagggctctagggaatgac

SEQ ID NO: 514571 - DNA, 33 bp, Homo sapien
atctggaaggttctcaatgacagttccagaatg

SEQ ID NO: 514572 - DNA, 33 bp, Homo sapien
atctggaaggttctcagtgacagttccagaatg

SEQ ID NO: 514573 - DNA, 33 bp, Homo sapien
gaagggaggaaaaggaaaagacgacagaaggaa

SEQ ID NO: 514574 - DNA, 33 bp, Homo sapien
gaagggaggaaaaggagaagacgacagaaggaa

SEQ ID NO: 514575 - DNA, 33 bp, Homo sapien
atggaggaaactaaagaagctcatgtccatatt

SEQ ID NO: 514576 - DNA, 33 bp, Homo sapien
atggaggaaactaaagcagctcatgtccatatt

SEQ ID NO: 514577 - DNA, 33 bp, Homo sapien
tgctacttctaacaaaattgttctgcaaaaata

SEQ ID NO: 514578 - DNA, 33 bp, Homo sapien
tgctacttctaacaaagttgttctgcaaaaata

SEQ ID NO: 514579 - DNA, 33 bp, Homo sapien
tttaatgcccacacaccggttatcgcagattta

SEQ ID NO: 514580 - DNA, 33 bp, Homo sapien
tttaatgcccacacactggttatcgcagattta

SEQ ID NO: 514581 - DNA, 33 bp, Homo sapien
catgtgagaatccataagctttggctatatcta

SEQ ID NO: 514582 - DNA, 33 bp, Homo sapien
catgtgagaatccataggctttggctatatcta

SEQ ID NO: 514583 - DNA, 33 bp, Homo sapien
aagtagggctaaacagacaagatgcaaatacat

SEQ ID NO: 514584 - DNA, 33 bp, Homo sapien
aagtagggctaaacaggcaagatgcaaatacat

SEQ ID NO: 514585 - DNA, 33 bp, Homo sapien
ggggtaggcacgtctcaatttctgtctttatag

SEQ ID NO: 514586 - DNA, 33 bp, Homo sapien
ggggtaggcacgtctctatttctgtctttatag

SEQ ID NO: 514587 - DNA, 33 bp, Homo sapien
tgtctataccatctatcaggttggtgcaattac

SEQ ID NO: 514588 - DNA, 33 bp, Homo sapien
tgtctataccatctattaggttggtgcaattac

SEQ ID NO: 514589 - DNA, 33 bp, Homo sapien
tactgttgtaaaccaaagttcttgaaataatca

SEQ ID NO: 514590 - DNA, 33 bp, Homo sapien
tactgttgtaaaccaaggttcttgaaataatca

SEQ ID NO: 514591 - DNA, 33 bp, Homo sapien
aatgccaaggacaatcaatagacagaggttgcc

SEQ ID NO: 514592 - DNA, 33 bp, Homo sapien
aatgccaaggacaatctatagacagaggttgcc

SEQ ID NO: 514593 - DNA, 33 bp, Homo sapien
tttgtggccaaaagaaatagttggtaggccagt

SEQ ID NO: 514594 - DNA, 33 bp, Homo sapien
tttgtggccaaaagaagtagttggtaggccagt

SEQ ID NO: 514595 - DNA, 33 bp, Homo sapien
acccatgagagtacgtaaagccaagaagcagaa

SEQ ID NO: 514596 - DNA, 33 bp, Homo sapien
acccatgagagtacgtgaagccaagaagcagaa

SEQ ID NO: 514597 - DNA, 33 bp, Homo sapien
cccaggtggattaagacaaggtccatgctggag

SEQ ID NO: 514598 - DNA, 33 bp, Homo sapien
cccaggtggattaagataaggtccatgctggag

SEQ ID NO: 514599 - DNA, 33 bp, Homo sapien
gacttgaaagttacccaaggacagttaatcctc

SEQ ID NO: 514600 - DNA, 33 bp, Homo sapien
gacttgaaagttacccgaggacagttaatcctc

SEQ ID NO: 514601 - DNA, 33 bp, Homo sapien
aaatctattgtttaaaatggacactacaggtaa

SEQ ID NO: 514602 - DNA, 33 bp, Homo sapien
aaatctattgtttaaagtggacactacaggtaa

SEQ ID NO: 514603 - DNA, 33 bp, Homo sapien
atctctaaatatccaaactgaggaattaaccag

SEQ ID NO: 514604 - DNA, 33 bp, Homo sapien
atctctaaatatccaagctgaggaattaaccag

SEQ ID NO: 514605 - DNA, 33 bp, Homo sapien
catctcactgcattgactatggtcttgtgtagc

SEQ ID NO: 514606 - DNA, 33 bp, Homo sapien
catctcactgcattgattatggtcttgtgtagc

SEQ ID NO: 514607 - DNA, 33 bp, Homo sapien
cgccctggactctccccctctcatcgtccatgc

SEQ ID NO: 514608 - DNA, 33 bp, Homo sapien
cgccctggactctcccgctctcatcgtccatgc

SEQ ID NO: 514609 - DNA, 33 bp, Homo sapien
caccaatagatcgtgaagccttattggatgttt

SEQ ID NO: 514610 - DNA, 33 bp, Homo sapien
caccaatagatcgtgaggccttattggatgttt

SEQ ID NO: 514611 - DNA, 33 bp, Homo sapien
cttccagatagtaaacaatagatatcataaaca

SEQ ID NO: 514612 - DNA, 33 bp, Homo sapien
cttccagatagtaaaccatagatatcataaaca

SEQ ID NO: 514613 - DNA, 33 bp, Homo sapien
tgaacaaaagctcagcggatccatatgtacatt

SEQ ID NO: 514614 - DNA, 33 bp, Homo sapien
tgaacaaaagctcagctgatccatatgtacatt

SEQ ID NO: 514615 - DNA, 33 bp, Homo sapien
tttcaattgactgccacgaaggatagtacttct

SEQ ID NO: 514616 - DNA, 33 bp, Homo sapien
tttcaattgactgccatgaaggatagtacttct

SEQ ID NO: 514617 - DNA, 33 bp, Homo sapien
gcttttctaggctcaaagaggtttggtgcttgg

SEQ ID NO: 514618 - DNA, 33 bp, Homo sapien
gcttttctaggctcaaggaggtttggtgcttgg

SEQ ID NO: 514619 - DNA, 33 bp, Homo sapien
aaagcagaactcctaacagctgtaataagcacc

SEQ ID NO: 514620 - DNA, 33 bp, Homo sapien
aaagcagaactcctaatagctgtaataagcacc

SEQ ID NO: 514621 - DNA, 33 bp, Homo sapien
taaactctaaaaaaaaccctggcgagaagtcta

SEQ ID NO: 514622 - DNA, 33 bp, Homo sapien
taaactctaaaaaaaatcctggcgagaagtcta

SEQ ID NO: 514623 - DNA, 33 bp, Homo sapien
atcccaccttcagcaacggtactcactgtagtt

SEQ ID NO: 514624 - DNA, 33 bp, Homo sapien
atcccaccttcagcaatggtactcactgtagtt

SEQ ID NO: 514625 - DNA, 33 bp, Homo sapien
ggttgtctgaggtaaaagtagctagatataatc

SEQ ID NO: 514626 - DNA, 33 bp, Homo sapien
ggttgtctgaggtaaaggtagctagatataatc

SEQ ID NO: 514627 - DNA, 33 bp, Homo sapien
gtgtggatcattttcacggctgcggtttttcat

SEQ ID NO: 514628 - DNA, 33 bp, Homo sapien
gtgtggatcattttcatggctgcggtttttcat

SEQ ID NO: 514629 - DNA, 33 bp, Homo sapien
taagaactcagtcacaagtacttaatgaaaaac

SEQ ID NO: 514630 - DNA, 33 bp, Homo sapien
taagaactcagtcacaggtacttaatgaaaaac

SEQ ID NO: 514631 - DNA, 33 bp, Homo sapien
tgtaactcctggccaaacatctacaaaagggac

SEQ ID NO: 514632 - DNA, 33 bp, Homo sapien
tgtaactcctggccaagcatctacaaaagggac

SEQ ID NO: 514633 - DNA, 33 bp, Homo sapien
ctaaccctgatgctctaactttccttggatagc

SEQ ID NO: 514634 - DNA, 33 bp, Homo sapien
ctaaccctgatgctctgactttccttggatagc

SEQ ID NO: 514635 - DNA, 33 bp, Homo sapien
cactggcaacctctaacgtacgtgcctaagcgg

SEQ ID NO: 514636 - DNA, 33 bp, Homo sapien
cactggcaacctctaatgtacgtgcctaagcgg

SEQ ID NO: 514637 - DNA, 33 bp, Homo sapien
catccaggttctccacagacttatcggtgtcgg

SEQ ID NO: 514638 - DNA, 33 bp, Homo sapien
catccaggttctccacggacttatcggtgtcgg

SEQ ID NO: 514639 - DNA, 33 bp, Homo sapien
cactctccttaacttacgtgcctgctggcaggc

SEQ ID NO: 514640 - DNA, 33 bp, Homo sapien
cactctccttaacttatgtgcctgctggcaggc

SEQ ID NO: 514641 - DNA, 33 bp, Homo sapien
cctaacaggacaatcaactccatgaaaatgcag

SEQ ID NO: 514642 - DNA, 33 bp, Homo sapien
cctaacaggacaatcagctccatgaaaatgcag

SEQ ID NO: 514643 - DNA, 33 bp, Homo sapien
tccatgaaaatgcaggccaatcccttaatttct

SEQ ID NO: 514644 - DNA, 33 bp, Homo sapien
tccatgaaaatgcaggtcaatcccttaatttct

SEQ ID NO: 514645 - DNA, 33 bp, Homo sapien
ctaaaaagagctcgataagtgttcacagctatt

SEQ ID NO: 514646 - DNA, 33 bp, Homo sapien
ctaaaaagagctcgatgagtgttcacagctatt

SEQ ID NO: 514647 - DNA, 33 bp, Homo sapien
tacagagctaaaaaaagcttgcctaatgtcaca

SEQ ID NO: 514648 - DNA, 33 bp, Homo sapien
tacagagctaaaaaaatcttgcctaatgtcaca

SEQ ID NO: 514649 - DNA, 33 bp, Homo sapien
aaagcaatacaggttacgtgatacaatttatag

SEQ ID NO: 514650 - DNA, 33 bp, Homo sapien
aaagcaatacaggttatgtgatacaatttatag

SEQ ID NO: 514651 - DNA, 33 bp, Homo sapien
tcataagttcatcagccatttgtgtttcctctc

SEQ ID NO: 514652 - DNA, 33 bp, Homo sapien
tcataagttcatcagctatttgtgtttcctctc

SEQ ID NO: 514653 - DNA, 33 bp, Homo sapien
gaatggaagaggataacaatcatgtcttcaaaa

SEQ ID NO: 514654 - DNA, 33 bp, Homo sapien
gaatggaagaggataagaatcatgtcttcaaaa

SEQ ID NO: 514655 - DNA, 33 bp, Homo sapien
caggactcctggaatcaagccgctactcttctc

SEQ ID NO: 514656 - DNA, 33 bp, Homo sapien
caggactcctggaatcgagccgctactcttctc

SEQ ID NO: 514657 - DNA, 33 bp, Homo sapien
ggttattggacactcaaattgatacttgccttt

SEQ ID NO: 514658 - DNA, 33 bp, Homo sapien
ggttattggacactcagattgatacttgccttt

SEQ ID NO: 514659 - DNA, 33 bp, Homo sapien
ttctctccggtccaaaacttcctgccttaaatt

SEQ ID NO: 514660 - DNA, 33 bp, Homo sapien
ttctctccggtccaaagcttcctgccttaaatt

SEQ ID NO: 514661 - DNA, 33 bp, Homo sapien
tagaaacactttgctaccttagtacagcacatg

SEQ ID NO: 514662 - DNA, 33 bp, Homo sapien
tagaaacactttgctatcttagtacagcacatg

SEQ ID NO: 514663 - DNA, 33 bp, Homo sapien
ctggctttacataaaccatcctctcaccaaaac

SEQ ID NO: 514664 - DNA, 33 bp, Homo sapien
ctggctttacataaactatcctctcaccaaaac

SEQ ID NO: 514665 - DNA, 33 bp, Homo sapien
ttaccaaattgggagcacccaaagtaatgtcag

SEQ ID NO: 514666 - DNA, 33 bp, Homo sapien
ttaccaaattgggagcgcccaaagtaatgtcag

SEQ ID NO: 514667 - DNA, 33 bp, Homo sapien
aagagaggccagaatcaatcagaatgaaaagct

SEQ ID NO: 514668 - DNA, 33 bp, Homo sapien
aagagaggccagaatcgatcagaatgaaaagct

SEQ ID NO: 514669 - DNA, 33 bp, Homo sapien
tagatgattcacatcaacagtggaggatctgac

SEQ ID NO: 514670 - DNA, 33 bp, Homo sapien
tagatgattcacatcatcagtggaggatctgac

SEQ ID NO: 514671 - DNA, 33 bp, Homo sapien
gctctttactagctgcaaacattcattaagttg

SEQ ID NO: 514672 - DNA, 33 bp, Homo sapien
gctctttactagctgccaacattcattaagttg

SEQ ID NO: 514673 - DNA, 33 bp, Homo sapien
gagcatcagtgaatccagacaagtaggttcaaa

SEQ ID NO: 514674 - DNA, 33 bp, Homo sapien
gagcatcagtgaatccggacaagtaggttcaaa

SEQ ID NO: 514675 - DNA, 33 bp, Homo sapien
attttgtttgctatcccgccatctcaattcctt

SEQ ID NO: 514676 - DNA, 33 bp, Homo sapien
attttgtttgctatcctgccatctcaattcctt

SEQ ID NO: 514677 - DNA, 33 bp, Homo sapien
ggaacagcttcaaatcaactcaaatggcttgac

SEQ ID NO: 514678 - DNA, 33 bp, Homo sapien
ggaacagcttcaaatcgactcaaatggcttgac

SEQ ID NO: 514679 - DNA, 33 bp, Homo sapien
gacaatggtctgtggaagaaaacgtatgtgatt

SEQ ID NO: 514680 - DNA, 33 bp, Homo sapien
gacaatggtctgtggacgaaaacgtatgtgatt

SEQ ID NO: 514681 - DNA, 33 bp, Homo sapien
ccaggctgaagttgcaccttttaatttgagcag

SEQ ID NO: 514682 - DNA, 33 bp, Homo sapien
ccaggctgaagttgcatcttttaatttgagcag

SEQ ID NO: 514683 - DNA, 33 bp, Homo sapien
ctgaaagcaatagtaaacacgatttttagcagc

SEQ ID NO: 514684 - DNA, 33 bp, Homo sapien
ctgaaagcaatagtaaccacgatttttagcagc

SEQ ID NO: 514685 - DNA, 33 bp, Homo sapien
gtattgaagagtaaaactgttatcagctctagg

SEQ ID NO: 514686 - DNA, 33 bp, Homo sapien
gtattgaagagtaaaattgttatcagctctagg

SEQ ID NO: 514687 - DNA, 33 bp, Homo sapien
actccacagctatcaaactctaaatgctcttcc

SEQ ID NO: 514688 - DNA, 33 bp, Homo sapien
actccacagctatcaatctctaaatgctcttcc

SEQ ID NO: 514689 - DNA, 33 bp, Homo sapien
atgcagataagcctgacactgttcatatgaacg

SEQ ID NO: 514690 - DNA, 33 bp, Homo sapien
atgcagataagcctgagactgttcatatgaacg

SEQ ID NO: 514691 - DNA, 33 bp, Homo sapien
aaactaaattacttgacgaggtacactgaacag

SEQ ID NO: 514692 - DNA, 33 bp, Homo sapien
aaactaaattacttgatgaggtacactgaacag

SEQ ID NO: 514693 - DNA, 33 bp, Homo sapien
aatcttggcaattccaatgattggtttaggagt

SEQ ID NO: 514694 - DNA, 33 bp, Homo sapien
aatcttggcaattccagtgattggtttaggagt

SEQ ID NO: 514695 - DNA, 33 bp, Homo sapien
ccttaattttatcaacagtagccatgtagctac

SEQ ID NO: 514696 - DNA, 33 bp, Homo sapien
ccttaattttatcaacggtagccatgtagctac

SEQ ID NO: 514697 - DNA, 33 bp, Homo sapien
tgggcttgctttcataccttcatgagctatttc

SEQ ID NO: 514698 - DNA, 33 bp, Homo sapien
tgggcttgctttcatatcttcatgagctatttc

SEQ ID NO: 514699 - DNA, 33 bp, Homo sapien
cccctattttatggctaagaaaagtcagatttc

SEQ ID NO: 514700 - DNA, 33 bp, Homo sapien
cccctattttatggctgagaaaagtcagatttc

SEQ ID NO: 514701 - DNA, 33 bp, Homo sapien
acctgattctaacatgcaaacctccaaactcta

SEQ ID NO: 514702 - DNA, 33 bp, Homo sapien
acctgattctaacatggaaacctccaaactcta

SEQ ID NO: 514703 - DNA, 33 bp, Homo sapien
gggaactgccaatataccgtcagtctttttctc

SEQ ID NO: 514704 - DNA, 33 bp, Homo sapien
gggaactgccaatatatcgtcagtctttttctc

SEQ ID NO: 514705 - DNA, 33 bp, Homo sapien
aactgaattactcagaacacaataaagttttaa

SEQ ID NO: 514706 - DNA, 33 bp, Homo sapien
aactgaattactcagaccacaataaagttttaa

SEQ ID NO: 514707 - DNA, 33 bp, Homo sapien
catatcagcatttcacactccttctaaaaccta

SEQ ID NO: 514708 - DNA, 33 bp, Homo sapien
catatcagcatttcacgctccttctaaaaccta

SEQ ID NO: 514709 - DNA, 33 bp, Homo sapien
gccattcatcaggtaacctctaatccggaatac

SEQ ID NO: 514710 - DNA, 33 bp, Homo sapien
gccattcatcaggtaatctctaatccggaatac

SEQ ID NO: 514711 - DNA, 33 bp, Homo sapien
ttattaattgcaagagaagaatcagtaacttta

SEQ ID NO: 514712 - DNA, 33 bp, Homo sapien
ttattaattgcaagaggagaatcagtaacttta

SEQ ID NO: 514713 - DNA, 33 bp, Homo sapien
gttctggaatgtgaaccgtgactgagttgaaat

SEQ ID NO: 514714 - DNA, 33 bp, Homo sapien
gttctggaatgtgaactgtgactgagttgaaat

SEQ ID NO: 514715 - DNA, 33 bp, Homo sapien
gagagaactgcaaatgccacttcacactgttta

SEQ ID NO: 514716 - DNA, 33 bp, Homo sapien
gagagaactgcaaatgtcacttcacactgttta

SEQ ID NO: 514717 - DNA, 33 bp, Homo sapien
ataaggttcaaactagcaaatgcaggaagacta

SEQ ID NO: 514718 - DNA, 33 bp, Homo sapien
ataaggttcaaactagtaaatgcaggaagacta

SEQ ID NO: 514719 - DNA, 33 bp, Homo sapien
atgccttcaattgagacgagtagtttcatgagt

SEQ ID NO: 514720 - DNA, 33 bp, Homo sapien
atgccttcaattgagatgagtagtttcatgagt

SEQ ID NO: 514721 - DNA, 33 bp, Homo sapien
aatatgtacttttacccatgtcatctcagtggt

SEQ ID NO: 514722 - DNA, 33 bp, Homo sapien
aatatgtacttttacctatgtcatctcagtggt

SEQ ID NO: 514723 - DNA, 33 bp, Homo sapien
aaatgagaaattaaaccagtgataaccaacttt

SEQ ID NO: 514724 - DNA, 33 bp, Homo sapien
aaatgagaaattaaactagtgataaccaacttt

SEQ ID NO: 514725 - DNA, 33 bp, Homo sapien
tggttacatagcaataaataagtggaacagtca

SEQ ID NO: 514726 - DNA, 33 bp, Homo sapien
tggttacatagcaatagataagtggaacagtca

SEQ ID NO: 514727 - DNA, 33 bp, Homo sapien
tcccatttgtaaccacagccactcacaggcttt

SEQ ID NO: 514728 - DNA, 33 bp, Homo sapien
tcccatttgtaaccacggccactcacaggcttt

SEQ ID NO: 514729 - DNA, 33 bp, Homo sapien
ttcaaggatgacctacccctgaaataaaacagc

SEQ ID NO: 514730 - DNA, 33 bp, Homo sapien
ttcaaggatgacctactcctgaaataaaacagc

SEQ ID NO: 514731 - DNA, 33 bp, Homo sapien
gtatcagatgagaagacgagaggccgtcctgtg

SEQ ID NO: 514732 - DNA, 33 bp, Homo sapien
gtatcagatgagaagatgagaggccgtcctgtg

SEQ ID NO: 514733 - DNA, 33 bp, Homo sapien
acatctagagacatttcaaaaagagtgcatatt

SEQ ID NO: 514734 - DNA, 33 bp, Homo sapien
acatctagagacatttgaaaaagagtgcatatt

SEQ ID NO: 514735 - DNA, 33 bp, Homo sapien
gacttcctttggtggaacactcttcccacattc

SEQ ID NO: 514736 - DNA, 33 bp, Homo sapien
gacttcctttggtggaccactcttcccacattc

SEQ ID NO: 514737 - DNA, 33 bp, Homo sapien
gtctctagcaattggccaaccttgaagggactg

SEQ ID NO: 514738 - DNA, 33 bp, Homo sapien
gtctctagcaattggctaaccttgaagggactg

SEQ ID NO: 514739 - DNA, 33 bp, Homo sapien
attctcacaggtttcaaaaggagggggatgcca

SEQ ID NO: 514740 - DNA, 33 bp, Homo sapien
attctcacaggtttcagaaggagggggatgcca

SEQ ID NO: 514741 - DNA, 33 bp, Homo sapien
cttctttgatagctctcagaatatttatggaga

SEQ ID NO: 514742 - DNA, 33 bp, Homo sapien
cttctttgatagctcttagaatatttatggaga

SEQ ID NO: 514743 - DNA, 33 bp, Homo sapien
cttctgtggtttcatccccctagcctgcttgca

SEQ ID NO: 514744 - DNA, 33 bp, Homo sapien
cttctgtggtttcatctccctagcctgcttgca

SEQ ID NO: 514745 - DNA, 33 bp, Homo sapien
cttctctctcccgcatcatcgatttcgccctct

SEQ ID NO: 514746 - DNA, 33 bp, Homo sapien
cttctctctcccgcattatcgatttcgccctct

SEQ ID NO: 514747 - DNA, 33 bp, Homo sapien
aaagctttaggcttacaaaaggcatccgtggca

SEQ ID NO: 514748 - DNA, 33 bp, Homo sapien
aaagctttaggcttacgaaaggcatccgtggca

SEQ ID NO: 514749 - DNA, 33 bp, Homo sapien
gggtgtgttcccaaagacctttcataatttgtt

SEQ ID NO: 514750 - DNA, 33 bp, Homo sapien
gggtgtgttcccaaaggcctttcataatttgtt

SEQ ID NO: 514751 - DNA, 33 bp, Homo sapien
tctcatctgtacaggcaatctggaccatactca

SEQ ID NO: 514752 - DNA, 33 bp, Homo sapien
tctcatctgtacaggctatctggaccatactca

SEQ ID NO: 514753 - DNA, 33 bp, Homo sapien
acttaaggtaaatttgaaaagagggttgaaata

SEQ ID NO: 514754 - DNA, 33 bp, Homo sapien
acttaaggtaaatttggaaagagggttgaaata

SEQ ID NO: 514755 - DNA, 33 bp, Homo sapien
ttcacttcctaagataactcctcattgatctcc

SEQ ID NO: 514756 - DNA, 33 bp, Homo sapien
ttcacttcctaagatatctcctcattgatctcc

SEQ ID NO: 514757 - DNA, 33 bp, Homo sapien
tgccatatatttctaaggtatctctctcaactg

SEQ ID NO: 514758 - DNA, 33 bp, Homo sapien
tgccatatatttctaatgtatctctctcaactg

SEQ ID NO: 514759 - DNA, 33 bp, Homo sapien
tctggcatagagtaaccacttcacactttaaaa

SEQ ID NO: 514760 - DNA, 33 bp, Homo sapien
tctggcatagagtaactacttcacactttaaaa

SEQ ID NO: 514761 - DNA, 33 bp, Homo sapien
cctttctaatatggcaagtaactactcagcagc

SEQ ID NO: 514762 - DNA, 33 bp, Homo sapien
cctttctaatatggcacgtaactactcagcagc

SEQ ID NO: 514763 - DNA, 33 bp, Homo sapien
tggttaacagtttgaaatcaggattgacactat

SEQ ID NO: 514764 - DNA, 33 bp, Homo sapien
tggttaacagtttgaagtcaggattgacactat

SEQ ID NO: 514765 - DNA, 33 bp, Homo sapien
ctggcccatctagccgcatggatgccaacagca

SEQ ID NO: 514766 - DNA, 33 bp, Homo sapien
ctggcccatctagccgtatggatgccaacagca

SEQ ID NO: 514767 - DNA, 33 bp, Homo sapien
aaatagttgccttcagaaaacataggaagaaca

SEQ ID NO: 514768 - DNA, 33 bp, Homo sapien
aaatagttgccttcagtaaacataggaagaaca

SEQ ID NO: 514769 - DNA, 33 bp, Homo sapien
tgcctgtagattctgaaaaaaaaaaattgaaca

SEQ ID NO: 514770 - DNA, 33 bp, Homo sapien
tgcctgtagattctgagaaaaaaaaattgaaca

SEQ ID NO: 514771 - DNA, 33 bp, Homo sapien
tgttgcctagttttaaatcttcttgcaacatca

SEQ ID NO: 514772 - DNA, 33 bp, Homo sapien
tgttgcctagttttaattcttcttgcaacatca

SEQ ID NO: 514773 - DNA, 33 bp, Homo sapien
atgtcattcaatgaaacttagctcactgatgga

SEQ ID NO: 514774 - DNA, 33 bp, Homo sapien
atgtcattcaatgaaagttagctcactgatgga

SEQ ID NO: 514775 - DNA, 33 bp, Homo sapien
aaaaattgtcaaaagtcactgttgggtgctgtg

SEQ ID NO: 514776 - DNA, 33 bp, Homo sapien
aaaaattgtcaaaagttactgttgggtgctgtg

SEQ ID NO: 514777 - DNA, 33 bp, Homo sapien
tagaagggaaatctaacaaagccagtttaaatg

SEQ ID NO: 514778 - DNA, 33 bp, Homo sapien
tagaagggaaatctaataaagccagtttaaatg

SEQ ID NO: 514779 - DNA, 33 bp, Homo sapien
ataaatagcggatacacaggcacaaagtgaggc

SEQ ID NO: 514780 - DNA, 33 bp, Homo sapien
ataaatagcggatacataggcacaaagtgaggc

SEQ ID NO: 514781 - DNA, 33 bp, Homo sapien
tcctgaataaccagcagtgatgcccaggtacta

SEQ ID NO: 514782 - DNA, 33 bp, Homo sapien
tcctgaataaccagcattgatgcccaggtacta

SEQ ID NO: 514783 - DNA, 33 bp, Homo sapien
gagtgctgaggactcactatagcatctctttca

SEQ ID NO: 514784 - DNA, 33 bp, Homo sapien
gagtgctgaggactcagtatagcatctctttca

SEQ ID NO: 514785 - DNA, 33 bp, Homo sapien
catctagatcagtttagagagtagctatttcta

SEQ ID NO: 514786 - DNA, 33 bp, Homo sapien
catctagatcagtttatagagtagctatttcta

SEQ ID NO: 514787 - DNA, 33 bp, Homo sapien
ataggaagacttttaaagatgattgccagtctt

SEQ ID NO: 514788 - DNA, 33 bp, Homo sapien
ataggaagacttttaaggatgattgccagtctt

SEQ ID NO: 514789 - DNA, 33 bp, Homo sapien
attctaaaaattatccacatatggccttcacat

SEQ ID NO: 514790 - DNA, 33 bp, Homo sapien
attctaaaaattatccgcatatggccttcacat

SEQ ID NO: 514791 - DNA, 33 bp, Homo sapien
ctggtaaaatgtgacaatatgagtggtatatta

SEQ ID NO: 514792 - DNA, 33 bp, Homo sapien
ctggtaaaatgtgacagtatgagtggtatatta

SEQ ID NO: 514793 - DNA, 33 bp, Homo sapien
atttaggttgagtgacaatcgcatgctggagca

SEQ ID NO: 514794 - DNA, 33 bp, Homo sapien
atttaggttgagtgacgatcgcatgctggagca

SEQ ID NO: 514795 - DNA, 33 bp, Homo sapien
gtggggaggtaacataccatcatattgctaata

SEQ ID NO: 514796 - DNA, 33 bp, Homo sapien
gtggggaggtaacatatcatcatattgctaata

SEQ ID NO: 514797 - DNA, 33 bp, Homo sapien
ctagtcaaaagaataggagtaagatggacatgg

SEQ ID NO: 514798 - DNA, 33 bp, Homo sapien
ctagtcaaaagaatagtagtaagatggacatgg

SEQ ID NO: 514799 - DNA, 33 bp, Homo sapien
atgtgtaatgtttctcaaacgtgacttggttca

SEQ ID NO: 514800 - DNA, 33 bp, Homo sapien
atgtgtaatgtttctcgaacgtgacttggttca

SEQ ID NO: 514801 - DNA, 33 bp, Homo sapien
tgtaggctagagtagacagggaaatcttttttt

SEQ ID NO: 514802 - DNA, 33 bp, Homo sapien
tgtaggctagagtagatagggaaatcttttttt

SEQ ID NO: 514803 - DNA, 33 bp, Homo sapien
gtaggaagagagcgtaaaatattaatttgcttt

SEQ ID NO: 514804 - DNA, 33 bp, Homo sapien
gtaggaagagagcgtacaatattaatttgcttt

SEQ ID NO: 514805 - DNA, 33 bp, Homo sapien
ttatatagcactgtcacagttttaacattttag

SEQ ID NO: 514806 - DNA, 33 bp, Homo sapien
ttatatagcactgtcatagttttaacattttag

SEQ ID NO: 514807 - DNA, 33 bp, Homo sapien
agaatccagatttgaaaataagcctgtctgaat

SEQ ID NO: 514808 - DNA, 33 bp, Homo sapien
agaatccagatttgaagataagcctgtctgaat

SEQ ID NO: 514809 - DNA, 33 bp, Homo sapien
ttgaaagtttagggaacattgggggcaagaagg

SEQ ID NO: 514810 - DNA, 33 bp, Homo sapien
ttgaaagtttagggaatattgggggcaagaagg

SEQ ID NO: 514811 - DNA, 33 bp, Homo sapien
ggctcctctgtagaaacgctccacaaaacaaag

SEQ ID NO: 514812 - DNA, 33 bp, Homo sapien
ggctcctctgtagaaatgctccacaaaacaaag

SEQ ID NO: 514813 - DNA, 33 bp, Homo sapien
taacttggaggctgaaaagtacaataatattta

SEQ ID NO: 514814 - DNA, 33 bp, Homo sapien
taacttggaggctgaacagtacaataatattta

SEQ ID NO: 514815 - DNA, 33 bp, Homo sapien
agcccatgatccattacattactgttccaactt

SEQ ID NO: 514816 - DNA, 33 bp, Homo sapien
agcccatgatccattatattactgttccaactt

SEQ ID NO: 514817 - DNA, 33 bp, Homo sapien
tctgattctgcctgataaataaggagcttaatg

SEQ ID NO: 514818 - DNA, 33 bp, Homo sapien
tctgattctgcctgatgaataaggagcttaatg

SEQ ID NO: 514819 - DNA, 33 bp, Homo sapien
ctttctgattagttgacgccaggccctactagt

SEQ ID NO: 514820 - DNA, 33 bp, Homo sapien
ctttctgattagttgatgccaggccctactagt

SEQ ID NO: 514821 - DNA, 33 bp, Homo sapien
tgtctgttagggcgagaaaaagcagaatatcat

SEQ ID NO: 514822 - DNA, 33 bp, Homo sapien
tgtctgttagggcgagcaaaagcagaatatcat

SEQ ID NO: 514823 - DNA, 33 bp, Homo sapien
tcacaaattcaccttcacttaaattggtcaaag

SEQ ID NO: 514824 - DNA, 33 bp, Homo sapien
tcacaaattcaccttcgcttaaattggtcaaag

SEQ ID NO: 514825 - DNA, 33 bp, Homo sapien
ccacacctaattactaaaactgtgcatctcaat

SEQ ID NO: 514826 - DNA, 33 bp, Homo sapien
ccacacctaattactataactgtgcatctcaat

SEQ ID NO: 514827 - DNA, 33 bp, Homo sapien
gtagaacctcactctacaaacacacccatgacc

SEQ ID NO: 514828 - DNA, 33 bp, Homo sapien
gtagaacctcactctataaacacacccatgacc

SEQ ID NO: 514829 - DNA, 33 bp, Homo sapien
cccacagccactgccaatagatactaagattcc

SEQ ID NO: 514830 - DNA, 33 bp, Homo sapien
cccacagccactgccagtagatactaagattcc

SEQ ID NO: 514831 - DNA, 33 bp, Homo sapien
aaacatgaaactttacaattggaaaaatacaca

SEQ ID NO: 514832 - DNA, 33 bp, Homo sapien
aaacatgaaactttacgattggaaaaatacaca

SEQ ID NO: 514833 - DNA, 33 bp, Homo sapien
gctgggggtgagagaacaaagggagccaaccaa

SEQ ID NO: 514834 - DNA, 33 bp, Homo sapien
gctgggggtgagagaagaaagggagccaaccaa

SEQ ID NO: 514835 - DNA, 33 bp, Homo sapien
ttttgtcatgaatatgcatcccactacaagtgt

SEQ ID NO: 514836 - DNA, 33 bp, Homo sapien
ttttgtcatgaatatggatcccactacaagtgt

SEQ ID NO: 514837 - DNA, 33 bp, Homo sapien
gtagatttgccatcaaccacaattgcagttaga

SEQ ID NO: 514838 - DNA, 33 bp, Homo sapien
gtagatttgccatcaatcacaattgcagttaga

SEQ ID NO: 514839 - DNA, 33 bp, Homo sapien
ttcatacaacagctacaatacatccaagcagta

SEQ ID NO: 514840 - DNA, 33 bp, Homo sapien
ttcatacaacagctacgatacatccaagcagta

SEQ ID NO: 514841 - DNA, 33 bp, Homo sapien
ctttctgcctaataaacgatgaaatggtcacat

SEQ ID NO: 514842 - DNA, 33 bp, Homo sapien
ctttctgcctaataaatgatgaaatggtcacat

SEQ ID NO: 514843 - DNA, 33 bp, Homo sapien
agctctcccttaagcaatgcaaaggaaagccaa

SEQ ID NO: 514844 - DNA, 33 bp, Homo sapien
agctctcccttaagcattgcaaaggaaagccaa

SEQ ID NO: 514845 - DNA, 33 bp, Homo sapien
gtattcatcaggaggaacaaggcactcaggaga

SEQ ID NO: 514846 - DNA, 33 bp, Homo sapien
gtattcatcaggaggagcaaggcactcaggaga

SEQ ID NO: 514847 - DNA, 33 bp, Homo sapien
tgaaggatacagtagacgtggcccaaaatggtg

SEQ ID NO: 514848 - DNA, 33 bp, Homo sapien
tgaaggatacagtagatgtggcccaaaatggtg

SEQ ID NO: 514849 - DNA, 33 bp, Homo sapien
agaagataattatgtgcacaataagtagtggtt

SEQ ID NO: 514850 - DNA, 33 bp, Homo sapien
agaagataattatgtgtacaataagtagtggtt

SEQ ID NO: 514851 - DNA, 33 bp, Homo sapien
ctctaactcatgagaaaaaaggcattctgagga

SEQ ID NO: 514852 - DNA, 33 bp, Homo sapien
ctctaactcatgagaagaaaggcattctgagga

SEQ ID NO: 514853 - DNA, 33 bp, Homo sapien
gtgcagcgatttgagagctttgctaagagaagc

SEQ ID NO: 514854 - DNA, 33 bp, Homo sapien
gtgcagcgatttgagatctttgctaagagaagc

SEQ ID NO: 514855 - DNA, 33 bp, Homo sapien
tctcaaatcgctgcacaagaacacaagcaacag

SEQ ID NO: 514856 - DNA, 33 bp, Homo sapien
tctcaaatcgctgcaccagaacacaagcaacag

SEQ ID NO: 514857 - DNA, 33 bp, Homo sapien
ggctcgtaatgcacacagtggactgaggtctgt

SEQ ID NO: 514858 - DNA, 33 bp, Homo sapien
ggctcgtaatgcacacggtggactgaggtctgt

SEQ ID NO: 514859 - DNA, 33 bp, Homo sapien
cttaaatcttcacccactaattatccaaaacaa

SEQ ID NO: 514860 - DNA, 33 bp, Homo sapien
cttaaatcttcacccagtaattatccaaaacaa

SEQ ID NO: 514861 - DNA, 33 bp, Homo sapien
agagaccacttctgaacgagaaagggctaaaca

SEQ ID NO: 514862 - DNA, 33 bp, Homo sapien
agagaccacttctgaatgagaaagggctaaaca

SEQ ID NO: 514863 - DNA, 33 bp, Homo sapien
tgattgctgttaaactaaatgtttttcactctg

SEQ ID NO: 514864 - DNA, 33 bp, Homo sapien
tgattgctgttaaactgaatgtttttcactctg

SEQ ID NO: 514865 - DNA, 33 bp, Homo sapien
gggtgctcctctatgcaccacagatgaaaggca

SEQ ID NO: 514866 - DNA, 33 bp, Homo sapien
gggtgctcctctatgcgccacagatgaaaggca

SEQ ID NO: 514867 - DNA, 33 bp, Homo sapien
tcactgatagtgttcaagagactaataaattag

SEQ ID NO: 514868 - DNA, 33 bp, Homo sapien
tcactgatagtgttcaggagactaataaattag

SEQ ID NO: 514869 - DNA, 33 bp, Homo sapien
agtaaagtcacttctgaaaggggctgagataat

SEQ ID NO: 514870 - DNA, 33 bp, Homo sapien
agtaaagtcacttctgcaaggggctgagataat

SEQ ID NO: 514871 - DNA, 33 bp, Homo sapien
tagagtccttaatttcccaaatagaccactccc

SEQ ID NO: 514872 - DNA, 33 bp, Homo sapien
tagagtccttaatttctcaaatagaccactccc

SEQ ID NO: 514873 - DNA, 33 bp, Homo sapien
tcaacttaagatgctacaactcttgtaaatgtt

SEQ ID NO: 514874 - DNA, 33 bp, Homo sapien
tcaacttaagatgctataactcttgtaaatgtt

SEQ ID NO: 514875 - DNA, 33 bp, Homo sapien
aaaaaacaatgttgcaccaagaagtcaattaaa

SEQ ID NO: 514876 - DNA, 33 bp, Homo sapien
aaaaaacaatgttgcatcaagaagtcaattaaa

SEQ ID NO: 514877 - DNA, 33 bp, Homo sapien
gaaggccagaaaccacagtaaatccattcatag

SEQ ID NO: 514878 - DNA, 33 bp, Homo sapien
gaaggccagaaaccacggtaaatccattcatag

SEQ ID NO: 514879 - DNA, 33 bp, Homo sapien
ataggacttgcttccccattattagcaccatct

SEQ ID NO: 514880 - DNA, 33 bp, Homo sapien
ataggacttgcttccctattattagcaccatct

SEQ ID NO: 514881 - DNA, 33 bp, Homo sapien
gaaaagccacatcataacactttaacctctata

SEQ ID NO: 514882 - DNA, 33 bp, Homo sapien
gaaaagccacatcatatcactttaacctctata

SEQ ID NO: 514883 - DNA, 33 bp, Homo sapien
ttggaaccaacctaaacgtccatgaatgataga

SEQ ID NO: 514884 - DNA, 33 bp, Homo sapien
ttggaaccaacctaaatgtccatgaatgataga

SEQ ID NO: 514885 - DNA, 33 bp, Homo sapien
ttcaagttgttgtatgcatgaagcattgtttct

SEQ ID NO: 514886 - DNA, 33 bp, Homo sapien
ttcaagttgttgtatgtatgaagcattgtttct

SEQ ID NO: 514887 - DNA, 33 bp, Homo sapien
ggatgtgcttgtcctacacgtaattaaactaag

SEQ ID NO: 514888 - DNA, 33 bp, Homo sapien
ggatgtgcttgtcctatacgtaattaaactaag

SEQ ID NO: 514889 - DNA, 33 bp, Homo sapien
aactggggaagaataactctaatgactgtaggt

SEQ ID NO: 514890 - DNA, 33 bp, Homo sapien
aactggggaagaataattctaatgactgtaggt

SEQ ID NO: 514891 - DNA, 33 bp, Homo sapien
atgaattctaggagcacaaaagctgaagcatat

SEQ ID NO: 514892 - DNA, 33 bp, Homo sapien
atgaattctaggagcagaaaagctgaagcatat

SEQ ID NO: 514893 - DNA, 33 bp, Homo sapien
aggttttgctcagatactaacttttcagtgatt

SEQ ID NO: 514894 - DNA, 33 bp, Homo sapien
aggttttgctcagatattaacttttcagtgatt

SEQ ID NO: 514895 - DNA, 33 bp, Homo sapien
cataatactctccataaaaaactctaggttcat

SEQ ID NO: 514896 - DNA, 33 bp, Homo sapien
cataatactctccatacaaaactctaggttcat

SEQ ID NO: 514897 - DNA, 33 bp, Homo sapien
atggtaactgagtagacggagctttcctggtga

SEQ ID NO: 514898 - DNA, 33 bp, Homo sapien
atggtaactgagtagatggagctttcctggtga

SEQ ID NO: 514899 - DNA, 33 bp, Homo sapien
tggaaactttttcaaactgtaggtcacagcaaa

SEQ ID NO: 514900 - DNA, 33 bp, Homo sapien
tggaaactttttcaaattgtaggtcacagcaaa

SEQ ID NO: 514901 - DNA, 33 bp, Homo sapien
tagtcacattactgataaagtgttcaaagcaac

SEQ ID NO: 514902 - DNA, 33 bp, Homo sapien
tagtcacattactgatgaagtgttcaaagcaac

SEQ ID NO: 514903 - DNA, 33 bp, Homo sapien
gtcacctgagggctcaacctcgtcgaagtatct

SEQ ID NO: 514904 - DNA, 33 bp, Homo sapien
gtcacctgagggctcagcctcgtcgaagtatct

SEQ ID NO: 514905 - DNA, 33 bp, Homo sapien
gtaaatggaagcaatgcagtacagtgaaaaaag

SEQ ID NO: 514906 - DNA, 33 bp, Homo sapien
gtaaatggaagcaatgtagtacagtgaaaaaag

SEQ ID NO: 514907 - DNA, 33 bp, Homo sapien
ttctctccattcttacacctgttatgattctgt

SEQ ID NO: 514908 - DNA, 33 bp, Homo sapien
ttctctccattcttacgcctgttatgattctgt

SEQ ID NO: 514909 - DNA, 33 bp, Homo sapien
tatgtgagattacacgaaataatgattttcttt

SEQ ID NO: 514910 - DNA, 33 bp, Homo sapien
tatgtgagattacacggaataatgattttcttt

SEQ ID NO: 514911 - DNA, 33 bp, Homo sapien
acatctccaattcctcacatcattattaattca

SEQ ID NO: 514912 - DNA, 33 bp, Homo sapien
acatctccaattcctctcatcattattaattca

SEQ ID NO: 514913 - DNA, 33 bp, Homo sapien
tagactaaggggacgccgagtattaaacaggtt

SEQ ID NO: 514914 - DNA, 33 bp, Homo sapien
tagactaaggggacgctgagtattaaacaggtt

SEQ ID NO: 514915 - DNA, 33 bp, Homo sapien
aaataatctatgcaagcattttcctgagtatat

SEQ ID NO: 514916 - DNA, 33 bp, Homo sapien
aaataatctatgcaagtattttcctgagtatat

SEQ ID NO: 514917 - DNA, 33 bp, Homo sapien
gcttcctcagcagtaacaattccatttctgaag

SEQ ID NO: 514918 - DNA, 33 bp, Homo sapien
gcttcctcagcagtaataattccatttctgaag

SEQ ID NO: 514919 - DNA, 33 bp, Homo sapien
atcttgcaactctgagaaaaatttaggtacatt

SEQ ID NO: 514920 - DNA, 33 bp, Homo sapien
atcttgcaactctgaggaaaatttaggtacatt

SEQ ID NO: 514921 - DNA, 33 bp, Homo sapien
ggcaaactgtgaaatacgaagcagcagtcatct

SEQ ID NO: 514922 - DNA, 33 bp, Homo sapien
ggcaaactgtgaaatatgaagcagcagtcatct

SEQ ID NO: 514923 - DNA, 33 bp, Homo sapien
tcctggccacttgtagaccactcccatttggcc

SEQ ID NO: 514924 - DNA, 33 bp, Homo sapien
tcctggccacttgtagcccactcccatttggcc

SEQ ID NO: 514925 - DNA, 33 bp, Homo sapien
agtctgcagcactagaagttatggctaagccta

SEQ ID NO: 514926 - DNA, 33 bp, Homo sapien
agtctgcagcactagaggttatggctaagccta

SEQ ID NO: 514927 - DNA, 33 bp, Homo sapien
aatagagaagtattaacggcaagctatgtgggt

SEQ ID NO: 514928 - DNA, 33 bp, Homo sapien
aatagagaagtattaatggcaagctatgtgggt

SEQ ID NO: 514929 - DNA, 33 bp, Homo sapien
aactttctgcatcatacggtattagtagcagct

SEQ ID NO: 514930 - DNA, 33 bp, Homo sapien
aactttctgcatcatatggtattagtagcagct

SEQ ID NO: 514931 - DNA, 33 bp, Homo sapien
gtagagatagatatggaaaactgggagcagagg

SEQ ID NO: 514932 - DNA, 33 bp, Homo sapien
gtagagatagatatgggaaactgggagcagagg

SEQ ID NO: 514933 - DNA, 33 bp, Homo sapien
ttgtctttgaattgcacgagaaggaatgttgta

SEQ ID NO: 514934 - DNA, 33 bp, Homo sapien
ttgtctttgaattgcatgagaaggaatgttgta

SEQ ID NO: 514935 - DNA, 33 bp, Homo sapien
gtttttctccaaattaacaatgtgactttaggt

SEQ ID NO: 514936 - DNA, 33 bp, Homo sapien
gtttttctccaaattagcaatgtgactttaggt

SEQ ID NO: 514937 - DNA, 33 bp, Homo sapien
tggagaagagtaaaccaaaggaaatctaatcct

SEQ ID NO: 514938 - DNA, 33 bp, Homo sapien
tggagaagagtaaaccgaaggaaatctaatcct

SEQ ID NO: 514939 - DNA, 33 bp, Homo sapien
ttctgcccaaggccaaattaactgtcttttctg

SEQ ID NO: 514940 - DNA, 33 bp, Homo sapien
ttctgcccaaggccaacttaactgtcttttctg

SEQ ID NO: 514941 - DNA, 33 bp, Homo sapien
caaagacctcaatcaaccagtatttttcctcta

SEQ ID NO: 514942 - DNA, 33 bp, Homo sapien
caaagacctcaatcaatcagtatttttcctcta

SEQ ID NO: 514943 - DNA, 33 bp, Homo sapien
tccttcctaatacatagggcaccaaggttgtta

SEQ ID NO: 514944 - DNA, 33 bp, Homo sapien
tccttcctaatacatatggcaccaaggttgtta

SEQ ID NO: 514945 - DNA, 33 bp, Homo sapien
ctcataaatgatgataatagctaacatttaggg

SEQ ID NO: 514946 - DNA, 33 bp, Homo sapien
ctcataaatgatgatagtagctaacatttaggg

SEQ ID NO: 514947 - DNA, 33 bp, Homo sapien
atattttgtattgacaagatttagatgattaaa

SEQ ID NO: 514948 - DNA, 33 bp, Homo sapien
atattttgtattgacatgatttagatgattaaa

SEQ ID NO: 514949 - DNA, 33 bp, Homo sapien
ggagcatcacaggaaacgtgcccaaagtgggga

SEQ ID NO: 514950 - DNA, 33 bp, Homo sapien
ggagcatcacaggaaatgtgcccaaagtgggga

SEQ ID NO: 514951 - DNA, 33 bp, Homo sapien
cagtcagcatagctggcaggtggtatagacttt

SEQ ID NO: 514952 - DNA, 33 bp, Homo sapien
cagtcagcatagctgggaggtggtatagacttt

SEQ ID NO: 514953 - DNA, 33 bp, Homo sapien
gatttctgagaacctgacagccataaaagagaa

SEQ ID NO: 514954 - DNA, 33 bp, Homo sapien
gatttctgagaacctggcagccataaaagagaa

SEQ ID NO: 514955 - DNA, 33 bp, Homo sapien
aaatggatggttaagaaagcatctgtgtgagta

SEQ ID NO: 514956 - DNA, 33 bp, Homo sapien
aaatggatggttaagagagcatctgtgtgagta

SEQ ID NO: 514957 - DNA, 33 bp, Homo sapien
aagcctaagaggctgccacggaaagtcccggta

SEQ ID NO: 514958 - DNA, 33 bp, Homo sapien
aagcctaagaggctgcgacggaaagtcccggta

SEQ ID NO: 514959 - DNA, 33 bp, Homo sapien
tcgggatggaatagagaccaggcatcaccattt

SEQ ID NO: 514960 - DNA, 33 bp, Homo sapien
tcgggatggaatagagcccaggcatcaccattt

SEQ ID NO: 514961 - DNA, 33 bp, Homo sapien
attggattgtcacaaaagcatacacttgttttt

SEQ ID NO: 514962 - DNA, 33 bp, Homo sapien
attggattgtcacaaaggcatacacttgttttt

SEQ ID NO: 514963 - DNA, 33 bp, Homo sapien
ggtcagtcaagagaataagaacattttagacaa

SEQ ID NO: 514964 - DNA, 33 bp, Homo sapien
ggtcagtcaagagaatgagaacattttagacaa

SEQ ID NO: 514965 - DNA, 33 bp, Homo sapien
tgattttgccctggaacgaccagatgaagatgc

SEQ ID NO: 514966 - DNA, 33 bp, Homo sapien
tgattttgccctggaatgaccagatgaagatgc

SEQ ID NO: 514967 - DNA, 33 bp, Homo sapien
cctatggctgataatacgtaatggagaaattgt

SEQ ID NO: 514968 - DNA, 33 bp, Homo sapien
cctatggctgataatatgtaatggagaaattgt

SEQ ID NO: 514969 - DNA, 33 bp, Homo sapien
ttaagtcttatatcagccgtggttagatgtaaa

SEQ ID NO: 514970 - DNA, 33 bp, Homo sapien
ttaagtcttatatcagtcgtggttagatgtaaa

SEQ ID NO: 514971 - DNA, 33 bp, Homo sapien
tactcctgctgagccagccctctcattattggt

SEQ ID NO: 514972 - DNA, 33 bp, Homo sapien
tactcctgctgagccatccctctcattattggt

SEQ ID NO: 514973 - DNA, 33 bp, Homo sapien
gcttttaagcatttagacaccatcatataaatc

SEQ ID NO: 514974 - DNA, 33 bp, Homo sapien
gcttttaagcatttaggcaccatcatataaatc

SEQ ID NO: 514975 - DNA, 33 bp, Homo sapien
ttgcaatgactgggtcacaagagagaaatgtca

SEQ ID NO: 514976 - DNA, 33 bp, Homo sapien
ttgcaatgactgggtcgcaagagagaaatgtca

SEQ ID NO: 514977 - DNA, 33 bp, Homo sapien
gatttcccggatcctccaacataaagtacctaa

SEQ ID NO: 514978 - DNA, 33 bp, Homo sapien
gatttcccggatcctctaacataaagtacctaa

SEQ ID NO: 514979 - DNA, 33 bp, Homo sapien
ctggagcagatagagcagaatgttcaagctgaa

SEQ ID NO: 514980 - DNA, 33 bp, Homo sapien
ctggagcagatagagcggaatgttcaagctgaa

SEQ ID NO: 514981 - DNA, 33 bp, Homo sapien
ggggttgctaggaaaaatgcaaagaaatgtgtc

SEQ ID NO: 514982 - DNA, 33 bp, Homo sapien
ggggttgctaggaaaagtgcaaagaaatgtgtc

SEQ ID NO: 514983 - DNA, 33 bp, Homo sapien
aggaaggttcaagatcccagtgctagtaaatgt

SEQ ID NO: 514984 - DNA, 33 bp, Homo sapien
aggaaggttcaagatctcagtgctagtaaatgt

SEQ ID NO: 514985 - DNA, 33 bp, Homo sapien
cagaatctggaagtgacaaagtgtttactctac

SEQ ID NO: 514986 - DNA, 33 bp, Homo sapien
cagaatctggaagtgagaaagtgtttactctac

SEQ ID NO: 514987 - DNA, 33 bp, Homo sapien
catggaggagaaaacacggaatagatcacacag

SEQ ID NO: 514988 - DNA, 33 bp, Homo sapien
catggaggagaaaacatggaatagatcacacag

SEQ ID NO: 514989 - DNA, 33 bp, Homo sapien
tacttttctccacataacattgttaccacaggg

SEQ ID NO: 514990 - DNA, 33 bp, Homo sapien
tacttttctccacatagcattgttaccacaggg

SEQ ID NO: 514991 - DNA, 33 bp, Homo sapien
acacactccaaaaatcactggatctggaacgat

SEQ ID NO: 514992 - DNA, 33 bp, Homo sapien
acacactccaaaaatcgctggatctggaacgat

SEQ ID NO: 514993 - DNA, 33 bp, Homo sapien
cacaaaaagctccgaactactgaataacaggat

SEQ ID NO: 514994 - DNA, 33 bp, Homo sapien
cacaaaaagctccgaattactgaataacaggat

SEQ ID NO: 514995 - DNA, 33 bp, Homo sapien; identical to SEQ ID NO: 514993

SEQ ID NO: 514996 - DNA, 33 bp, Homo sapien; identical to SEQ ID NO: 514994

SEQ ID NO: 514997 - DNA, 33 bp, Homo sapien
aatcccttcgtaatcaatcagggactcaagaag

SEQ ID NO: 514998 - DNA, 33 bp, Homo sapien
aatcccttcgtaatcagtcagggactcaagaag

SEQ ID NO: 514999 - DNA, 33 bp, Homo sapien
ctataaatggccaaggaaagggagatgaacatg

SEQ ID NO: 515000 - DNA, 33 bp, Homo sapien
ctataaatggccaagggaagggagatgaacatg

SEQ ID NO: 515001 - DNA, 33 bp, Homo sapien
tcttggcaatttctcaagtataagccaggcacc

SEQ ID NO: 515002 - DNA, 33 bp, Homo sapien
tcttggcaatttctcatgtataagccaggcacc

SEQ ID NO: 515003 - DNA, 33 bp, Homo sapien
tggctttctcaataaacttctgcttcagggaac

SEQ ID NO: 515004 - DNA, 33 bp, Homo sapien
tggctttctcaataaatttctgcttcagggaac

SEQ ID NO: 515005 - DNA, 33 bp, Homo sapien
tcaaggacaccatagaataaatttggaccaatt

SEQ ID NO: 515006 - DNA, 33 bp, Homo sapien
tcaaggacaccatagattaaatttggaccaatt

SEQ ID NO: 515007 - DNA, 33 bp, Homo sapien
cctcctggtattctgaatagtgtatatgtgaca

SEQ ID NO: 515008 - DNA, 33 bp, Homo sapien
cctcctggtattctgagtagtgtatatgtgaca

SEQ ID NO: 515009 - DNA, 33 bp, Homo sapien
cgcccatgacaaagaacgatcaggtccaaactg

SEQ ID NO: 515010 - DNA, 33 bp, Homo sapien
cgcccatgacaaagaatgatcaggtccaaactg

SEQ ID NO: 515011 - DNA, 33 bp, Homo sapien
ctctcctgcatttctggacctgcagtgatgggc

SEQ ID NO: 515012 - DNA, 33 bp, Homo sapien
ctctcctgcatttctgtacctgcagtgatgggc

SEQ ID NO: 515013 - DNA, 33 bp, Homo sapien
aggggcacagggcaaacggtactttatgtactc

SEQ ID NO: 515014 - DNA, 33 bp, Homo sapien
aggggcacagggcaaatggtactttatgtactc

SEQ ID NO: 515015 - DNA, 33 bp, Homo sapien
tttgggctctgtgcagcatccctatggtaagag

SEQ ID NO: 515016 - DNA, 33 bp, Homo sapien
tttgggctctgtgcagtatccctatggtaagag

SEQ ID NO: 515017 - DNA, 33 bp, Homo sapien
tctctctgggcctttaacccccacaatgaaaca

SEQ ID NO: 515018 - DNA, 33 bp, Homo sapien
tctctctgggcctttaccccccacaatgaaaca

SEQ ID NO: 515019 - DNA, 33 bp, Homo sapien
tggtaaaatagaagaaggcagagcccagatagc

SEQ ID NO: 515020 - DNA, 33 bp, Homo sapien
tggtaaaatagaagaatgcagagcccagatagc

SEQ ID NO: 515021 - DNA, 33 bp, Homo sapien
gatcactgccaaatgtcaaaccgatgagcagaa

SEQ ID NO: 515022 - DNA, 33 bp, Homo sapien
gatcactgccaaatgtgaaaccgatgagcagaa

SEQ ID NO: 515023 - DNA, 33 bp, Homo sapien
ctgggacttgagaagaagattgtgttaagcatt

SEQ ID NO: 515024 - DNA, 33 bp, Homo sapien
ctgggacttgagaagaggattgtgttaagcatt

SEQ ID NO: 515025 - DNA, 33 bp, Homo sapien
atattgaagagcagagaaagtcttggagacctt

SEQ ID NO: 515026 - DNA, 33 bp, Homo sapien
atattgaagagcagaggaagtcttggagacctt

SEQ ID NO: 515027 - DNA, 33 bp, Homo sapien
gagactgctgtaggtacgtgtttaaagcataca

SEQ ID NO: 515028 - DNA, 33 bp, Homo sapien
gagactgctgtaggtatgtgtttaaagcataca

SEQ ID NO: 515029 - DNA, 33 bp, Homo sapien
tgtttgagtgagaaggcagtgccaaattgctcc

SEQ ID NO: 515030 - DNA, 33 bp, Homo sapien
tgtttgagtgagaaggtagtgccaaattgctcc

SEQ ID NO: 515031 - DNA, 33 bp, Homo sapien
tgactctgtgagtagacgagagccattcaagga

SEQ ID NO: 515032 - DNA, 33 bp, Homo sapien
tgactctgtgagtagatgagagccattcaagga

SEQ ID NO: 515033 - DNA, 33 bp, Homo sapien
ataatagagtatctcaaatctaatgcccaacag

SEQ ID NO: 515034 - DNA, 33 bp, Homo sapien
ataatagagtatctcagatctaatgcccaacag

SEQ ID NO: 515035 - DNA, 33 bp, Homo sapien
ataagtaggtggctagaatcgtgaacattctac

SEQ ID NO: 515036 - DNA, 33 bp, Homo sapien
ataagtaggtggctaggatcgtgaacattctac

SEQ ID NO: 515037 - DNA, 33 bp, Homo sapien
cgtttgggtatggagaaatggagactactatta

SEQ ID NO: 515038 - DNA, 33 bp, Homo sapien
cgtttgggtatggagagatggagactactatta

SEQ ID NO: 515039 - DNA, 33 bp, Homo sapien
catgagccagctaaagaacataggatcaagtgt

SEQ ID NO: 515040 - DNA, 33 bp, Homo sapien
catgagccagctaaaggacataggatcaagtgt

SEQ ID NO: 515041 - DNA, 33 bp, Homo sapien
gacagtcactgaagtaaaagggcctacgtcgtc

SEQ ID NO: 515042 - DNA, 33 bp, Homo sapien
gacagtcactgaagtacaagggcctacgtcgtc

SEQ ID NO: 515043 - DNA, 33 bp, Homo sapien
ttgttgctgatatggcacaactaattattaact

SEQ ID NO: 515044 - DNA, 33 bp, Homo sapien
ttgttgctgatatggcgcaactaattattaact

SEQ ID NO: 515045 - DNA, 33 bp, Homo sapien
taagtaaatattaaaaatgaggcaataacttta

SEQ ID NO: 515046 - DNA, 33 bp, Homo sapien
taagtaaatattaaaattgaggcaataacttta

SEQ ID NO: 515047 - DNA, 33 bp, Homo sapien
tggatttaaatagccaaaagggtttagtctgaa

SEQ ID NO: 515048 - DNA, 33 bp, Homo sapien
tggatttaaatagccagaagggtttagtctgaa

SEQ ID NO: 515049 - DNA, 33 bp, Homo sapien
aaaaggagttgcacccaagacaatctatctagg

SEQ ID NO: 515050 - DNA, 33 bp, Homo sapien
aaaaggagttgcacccgagacaatctatctagg

SEQ ID NO: 515051 - DNA, 33 bp, Homo sapien
tccttctactccaagccgagacactagaatgta

SEQ ID NO: 515052 - DNA, 33 bp, Homo sapien
tccttctactccaagctgagacactagaatgta

SEQ ID NO: 515053 - DNA, 33 bp, Homo sapien
atcttctcactatgaaataagacaagaattgga

SEQ ID NO: 515054 - DNA, 33 bp, Homo sapien
atcttctcactatgaagtaagacaagaattgga

SEQ ID NO: 515055 - DNA, 33 bp, Homo sapien
ctctgaggatgataaacattgaagaggaagtta

SEQ ID NO: 515056 - DNA, 33 bp, Homo sapien
ctctgaggatgataaatattgaagaggaagtta

SEQ ID NO: 515057 - DNA, 33 bp, Homo sapien
aataaccattgttcaacctacaaatctactgga

SEQ ID NO: 515058 - DNA, 33 bp, Homo sapien
aataaccattgttcaatctacaaatctactgga

SEQ ID NO: 515059 - DNA, 33 bp, Homo sapien
actgattataagaacaggagtcctatcggttag

SEQ ID NO: 515060 - DNA, 33 bp, Homo sapien
actgattataagaacatgagtcctatcggttag

SEQ ID NO: 515061 - DNA, 33 bp, Homo sapien
tgcttaattctacggccagtgccttctgaataa

SEQ ID NO: 515062 - DNA, 33 bp, Homo sapien
tgcttaattctacggctagtgccttctgaataa

SEQ ID NO: 515063 - DNA, 33 bp, Homo sapien
gtctcttcttttcatcaaaacatcttcttctct

SEQ ID NO: 515064 - DNA, 33 bp, Homo sapien
gtctcttcttttcatcgaaacatcttcttctct

SEQ ID NO: 515065 - DNA, 33 bp, Homo sapien
gctgtcagtcctgttacaatccagtttcaacag

SEQ ID NO: 515066 - DNA, 33 bp, Homo sapien
gctgtcagtcctgttataatccagtttcaacag

SEQ ID NO: 515067 - DNA, 33 bp, Homo sapien
acattgtttttcttccgccaaaatttccttcag

SEQ ID NO: 515068 - DNA, 33 bp, Homo sapien
acattgtttttcttcctccaaaatttccttcag

SEQ ID NO: 515069 - DNA, 33 bp, Homo sapien
agccaaaagccaatcaatatccttatgctgcca

SEQ ID NO: 515070 - DNA, 33 bp, Homo sapien
agccaaaagccaatcagtatccttatgctgcca

SEQ ID NO: 515071 - DNA, 33 bp, Homo sapien
acacttaggacattcgcatcttaggactttagc

SEQ ID NO: 515072 - DNA, 33 bp, Homo sapien
acacttaggacattcgtatcttaggactttagc

SEQ ID NO: 515073 - DNA, 33 bp, Homo sapien
ctaaactcagtaggaaagtgccatgaagaaagg

SEQ ID NO: 515074 - DNA, 33 bp, Homo sapien
ctaaactcagtaggaatgtgccatgaagaaagg

SEQ ID NO: 515075 - DNA, 33 bp, Homo sapien
atttgaaaatccgtaaaaagaaatgtctaacag

SEQ ID NO: 515076 - DNA, 33 bp, Homo sapien
atttgaaaatccgtaagaagaaatgtctaacag

SEQ ID NO: 515077 - DNA, 33 bp, Homo sapien
gatgcctatggattaaacagggtggcgctttct

SEQ ID NO: 515078 - DNA, 33 bp, Homo sapien
gatgcctatggattaatcagggtggcgctttct

SEQ ID NO: 515079 - DNA, 33 bp, Homo sapien
tagtttcttgaaaataagtgattgctgctaatt

SEQ ID NO: 515080 - DNA, 33 bp, Homo sapien
tagtttcttgaaaatatgtgattgctgctaatt

SEQ ID NO: 515081 - DNA, 33 bp, Homo sapien
aattggagactacttagaggcaataatctcacc

SEQ ID NO: 515082 - DNA, 33 bp, Homo sapien
aattggagactacttataggcaataatctcacc

SEQ ID NO: 515083 - DNA, 33 bp, Homo sapien
atctgcaacatctgtagcaaaggccctaatatc

SEQ ID NO: 515084 - DNA, 33 bp, Homo sapien
atctgcaacatctgtatcaaaggccctaatatc

SEQ ID NO: 515085 - DNA, 33 bp, Homo sapien
tgtgtccaaaggcagactccattttgtctctta

SEQ ID NO: 515086 - DNA, 33 bp, Homo sapien
tgtgtccaaaggcagagtccattttgtctctta

SEQ ID NO: 515087 - DNA, 33 bp, Homo sapien
aaattggagccagaaaaggcctaccgtgacaag

SEQ ID NO: 515088 - DNA, 33 bp, Homo sapien
aaattggagccagaaagggcctaccgtgacaag

SEQ ID NO: 515089 - DNA, 33 bp, Homo sapien
gtggagaggcaaaccacgcgattgtgcggcgaa

SEQ ID NO: 515090 - DNA, 33 bp, Homo sapien
gtggagaggcaaaccatgcgattgtgcggcgaa

SEQ ID NO: 515091 - DNA, 33 bp, Homo sapien
gtctccccatctgtaaatgactaatagtaaggt

SEQ ID NO: 515092 - DNA, 33 bp, Homo sapien
gtctccccatctgtaagtgactaatagtaaggt

SEQ ID NO: 515093 - DNA, 33 bp, Homo sapien
gatgagccctaaagaactgagctaatgacttca

SEQ ID NO: 515094 - DNA, 33 bp, Homo sapien
gatgagccctaaagaattgagctaatgacttca

SEQ ID NO: 515095 - DNA, 33 bp, Homo sapien
actgccattttacagacggaagaactgaggcac

SEQ ID NO: 515096 - DNA, 33 bp, Homo sapien
actgccattttacagatggaagaactgaggcac

SEQ ID NO: 515097 - DNA, 33 bp, Homo sapien
ggctttgtagggagtacagagatcataaaatgt

SEQ ID NO: 515098 - DNA, 33 bp, Homo sapien
ggctttgtagggagtatagagatcataaaatgt

SEQ ID NO: 515099 - DNA, 33 bp, Homo sapien
gctaagagaagccctaagtaatggtaaatagca

SEQ ID NO: 515100 - DNA, 33 bp, Homo sapien
gctaagagaagccctatgtaatggtaaatagca

SEQ ID NO: 515101 - DNA, 33 bp, Homo sapien
accctctcctgggccactgatggtccactgtga

SEQ ID NO: 515102 - DNA, 33 bp, Homo sapien
accctctcctgggccattgatggtccactgtga

SEQ ID NO: 515103 - DNA, 33 bp, Homo sapien
ttcaaattttacagataaggaacctgaggtaca

SEQ ID NO: 515104 - DNA, 33 bp, Homo sapien
ttcaaattttacagatgaggaacctgaggtaca

SEQ ID NO: 515105 - DNA, 33 bp, Homo sapien
gatttatttctggaaactgaatagccattattg

SEQ ID NO: 515106 - DNA, 33 bp, Homo sapien
gatttatttctggaaattgaatagccattattg

SEQ ID NO: 515107 - DNA, 33 bp, Homo sapien
tagaaacattgctctgaaacttcaaaggtcaaa

SEQ ID NO: 515108 - DNA, 33 bp, Homo sapien
tagaaacattgctctggaacttcaaaggtcaaa

SEQ ID NO: 515109 - DNA, 33 bp, Homo sapien
ttgaagcctatgctaaataggaactacaagggg

SEQ ID NO: 515110 - DNA, 33 bp, Homo sapien
ttgaagcctatgctaactaggaactacaagggg

SEQ ID NO: 515111 - DNA, 33 bp, Homo sapien
atgaatataatgggaaagtgtcggcaggtctgt

SEQ ID NO: 515112 - DNA, 33 bp, Homo sapien
atgaatataatgggaatgtgtcggcaggtctgt

SEQ ID NO: 515113 - DNA, 33 bp, Homo sapien
cttgatgaacaaaataaagaagtagtcagctga

SEQ ID NO: 515114 - DNA, 33 bp, Homo sapien
cttgatgaacaaaatacagaagtagtcagctga

SEQ ID NO: 515115 - DNA, 33 bp, Homo sapien
tttagctagtttaagcagaaagggtacaagtgg

SEQ ID NO: 515116 - DNA, 33 bp, Homo sapien
tttagctagtttaagcggaaagggtacaagtgg

SEQ ID NO: 515117 - DNA, 33 bp, Homo sapien
gcattgatggtcagacaatgagagtgtagaaaa

SEQ ID NO: 515118 - DNA, 33 bp, Homo sapien
gcattgatggtcagaccatgagagtgtagaaaa

SEQ ID NO: 515119 - DNA, 33 bp, Homo sapien
cctacagccagcaaaaaaagatgtggagtttca

SEQ ID NO: 515120 - DNA, 33 bp, Homo sapien
cctacagccagcaaaagaagatgtggagtttca

SEQ ID NO: 515121 - DNA, 33 bp, Homo sapien
cttcacactattcgctaagaactataaccctgg

SEQ ID NO: 515122 - DNA, 33 bp, Homo sapien
cttcacactattcgctcagaactataaccctgg

SEQ ID NO: 515123 - DNA, 33 bp, Homo sapien
gaagtggcaagagttaactggaatatttgttta

SEQ ID NO: 515124 - DNA, 33 bp, Homo sapien
gaagtggcaagagttatctggaatatttgttta

SEQ ID NO: 515125 - DNA, 33 bp, Homo sapien
gtgaagttctccctgacaccccatggattgccc

SEQ ID NO: 515126 - DNA, 33 bp, Homo sapien
gtgaagttctccctgataccccatggattgccc

SEQ ID NO: 515127 - DNA, 33 bp, Homo sapien
cttagcagaggattacaaacagtgcccgagatc

SEQ ID NO: 515128 - DNA, 33 bp, Homo sapien
cttagcagaggattacgaacagtgcccgagatc

SEQ ID NO: 515129 - DNA, 33 bp, Homo sapien
atagtgaccacaagtaaataggattccattgag

SEQ ID NO: 515130 - DNA, 33 bp, Homo sapien
atagtgaccacaagtacataggattccattgag

SEQ ID NO: 515131 - DNA, 33 bp, Homo sapien
tgtcagatgtatggtcaccagatttattaccaa

SEQ ID NO: 515132 - DNA, 33 bp, Homo sapien
tgtcagatgtatggtcgccagatttattaccaa

SEQ ID NO: 515133 - DNA, 33 bp, Homo sapien
tagaggtaggtcattacgtttgcagatttggta

SEQ ID NO: 515134 - DNA, 33 bp, Homo sapien
tagaggtaggtcattaggtttgcagatttggta

SEQ ID NO: 515135 - DNA, 33 bp, Homo sapien
agcattggtgctattaccttacatttttttaca

SEQ ID NO: 515136 - DNA, 33 bp, Homo sapien
agcattggtgctattatcttacatttttttaca

SEQ ID NO: 515137 - DNA, 33 bp, Homo sapien
tcctgctgtcatgtgaagaaagaggagtttgcc

SEQ ID NO: 515138 - DNA, 33 bp, Homo sapien
tcctgctgtcatgtgaggaaagaggagtttgcc

SEQ ID NO: 515139 - DNA, 33 bp, Homo sapien
atagtataggttcacaaaggaaggtttcacaat

SEQ ID NO: 515140 - DNA, 33 bp, Homo sapien
atagtataggttcacacaggaaggtttcacaat

SEQ ID NO: 515141 - DNA, 33 bp, Homo sapien
tactcttgcaagccaaacaacatgtcaaatgaa

SEQ ID NO: 515142 - DNA, 33 bp, Homo sapien
tactcttgcaagccaatcaacatgtcaaatgaa

SEQ ID NO: 515143 - DNA, 33 bp, Homo sapien
acaagagggtaaagaactcatttcagaaggaag

SEQ ID NO: 515144 - DNA, 33 bp, Homo sapien
acaagagggtaaagaagtcatttcagaaggaag

SEQ ID NO: 515145 - DNA, 33 bp, Homo sapien
atttccaaccagaaaaaaagtcccagaaggcag

SEQ ID NO: 515146 - DNA, 33 bp, Homo sapien
atttccaaccagaaaacaagtcccagaaggcag

SEQ ID NO: 515147 - DNA, 33 bp, Homo sapien
cctggcctaacctgaaatcctgcctgcagcttt

SEQ ID NO: 515148 - DNA, 33 bp, Homo sapien
cctggcctaacctgaagtcctgcctgcagcttt

SEQ ID NO: 515149 - DNA, 33 bp, Homo sapien
aagattcaaatcgacaccttcttgtgccaaatc

SEQ ID NO: 515150 - DNA, 33 bp, Homo sapien
aagattcaaatcgacatcttcttgtgccaaatc

SEQ ID NO: 515151 - DNA, 33 bp, Homo sapien
tatcatattactcacaaaagctctttcaagctt

SEQ ID NO: 515152 - DNA, 33 bp, Homo sapien
tatcatattactcacagaagctctttcaagctt

SEQ ID NO: 515153 - DNA, 33 bp, Homo sapien
gcctgaaacttggtcaccaatttactagccatg

SEQ ID NO: 515154 - DNA, 33 bp, Homo sapien
gcctgaaacttggtcatcaatttactagccatg

SEQ ID NO: 515155 - DNA, 33 bp, Homo sapien
aaagctggagccagaactaccctgttaagctgc

SEQ ID NO: 515156 - DNA, 33 bp, Homo sapien
aaagctggagccagaattaccctgttaagctgc

SEQ ID NO: 515157 - DNA, 33 bp, Homo sapien
ttattaacctaaaaataatcgtgacagtcattt

SEQ ID NO: 515158 - DNA, 33 bp, Homo sapien
ttattaacctaaaaatgatcgtgacagtcattt

SEQ ID NO: 515159 - DNA, 33 bp, Homo sapien
tgtgtcacacaatgtcaaaatggagccaaaggc

SEQ ID NO: 515160 - DNA, 33 bp, Homo sapien
tgtgtcacacaatgtcgaaatggagccaaaggc

SEQ ID NO: 515161 - DNA, 33 bp, Homo sapien
tggacaatggtttcccaagctaaattcctaagg

SEQ ID NO: 515162 - DNA, 33 bp, Homo sapien
tggacaatggtttcccgagctaaattcctaagg

SEQ ID NO: 515163 - DNA, 33 bp, Homo sapien
acaaaataattagctacgaattcatcctcttaa

SEQ ID NO: 515164 - DNA, 33 bp, Homo sapien
acaaaataattagctatgaattcatcctcttaa

SEQ ID NO: 515165 - DNA, 33 bp, Homo sapien
acagacaacctaataactaaatcagatttcctt

SEQ ID NO: 515166 - DNA, 33 bp, Homo sapien
acagacaacctaataattaaatcagatttcctt

SEQ ID NO: 515167 - DNA, 33 bp, Homo sapien
acaatgctctacggacactttcctgggcaagat

SEQ ID NO: 515168 - DNA, 33 bp, Homo sapien
acaatgctctacggaccctttcctgggcaagat

SEQ ID NO: 515169 - DNA, 33 bp, Homo sapien
attaagaagtaatgtacgtggttaggggattct

SEQ ID NO: 515170 - DNA, 33 bp, Homo sapien
attaagaagtaatgtatgtggttaggggattct

SEQ ID NO: 515171 - DNA, 33 bp, Homo sapien
agactagtcactattacctgatctgttgaaaaa

SEQ ID NO: 515172 - DNA, 33 bp, Homo sapien
agactagtcactattatctgatctgttgaaaaa

SEQ ID NO: 515173 - DNA, 33 bp, Homo sapien
tgaagatcctgagatagcaacaaagagttagaa

SEQ ID NO: 515174 - DNA, 33 bp, Homo sapien
tgaagatcctgagatatcaacaaagagttagaa

SEQ ID NO: 515175 - DNA, 33 bp, Homo sapien
ttttaggtttttccaccagaatccatacaatgt

SEQ ID NO: 515176 - DNA, 33 bp, Homo sapien
ttttaggtttttccactagaatccatacaatgt

SEQ ID NO: 515177 - DNA, 33 bp, Homo sapien
aatgatttgaggaatacgagagataaccatttt

SEQ ID NO: 515178 - DNA, 33 bp, Homo sapien
aatgatttgaggaatatgagagataaccatttt

SEQ ID NO: 515179 - DNA, 33 bp, Homo sapien
agaccacaagcctaaaagtttgaaacaaaagag

SEQ ID NO: 515180 - DNA, 33 bp, Homo sapien
agaccacaagcctaaaggtttgaaacaaaagag

SEQ ID NO: 515181 - DNA, 33 bp, Homo sapien
tttgacatgggcaaagaagctactggttagaca

SEQ ID NO: 515182 - DNA, 33 bp, Homo sapien
tttgacatgggcaaaggagctactggttagaca

SEQ ID NO: 515183 - DNA, 33 bp, Homo sapien
gaacagacctgcctcacattaaagaagaaaaga

SEQ ID NO: 515184 - DNA, 33 bp, Homo sapien
gaacagacctgcctcagattaaagaagaaaaga

SEQ ID NO: 515185 - DNA, 33 bp, Homo sapien
ttttagaacccacaaacaagtgagaacatgcgg

SEQ ID NO: 515186 - DNA, 33 bp, Homo sapien
ttttagaacccacaaataagtgagaacatgcgg

SEQ ID NO: 515187 - DNA, 33 bp, Homo sapien
aactaacttgctgatacctgcaatgccactatg

SEQ ID NO: 515188 - DNA, 33 bp, Homo sapien
aactaacttgctgatagctgcaatgccactatg

SEQ ID NO: 515189 - DNA, 33 bp, Homo sapien
tgagaccatcatccaactacagagtgcctgcca

SEQ ID NO: 515190 - DNA, 33 bp, Homo sapien
tgagaccatcatccaattacagagtgcctgcca

SEQ ID NO: 515191 - DNA, 33 bp, Homo sapien
gccaatgaagagagtacattgaatgcaatttaa

SEQ ID NO: 515192 - DNA, 33 bp, Homo sapien
gccaatgaagagagtatattgaatgcaatttaa

SEQ ID NO: 515193 - DNA, 33 bp, Homo sapien
cttctaaatgacttaacctgacctaaaatatgt

SEQ ID NO: 515194 - DNA, 33 bp, Homo sapien
cttctaaatgacttaagctgacctaaaatatgt

SEQ ID NO: 515195 - DNA, 33 bp, Homo sapien
agttcgtgtgatctaccggtgccagatgtggag

SEQ ID NO: 515196 - DNA, 33 bp, Homo sapien
agttcgtgtgatctactggtgccagatgtggag

SEQ ID NO: 515197 - DNA, 33 bp, Homo sapien
ggtcaaatgactcaatcaaacatctgtctcatc

SEQ ID NO: 515198 - DNA, 33 bp, Homo sapien
ggtcaaatgactcaattaaacatctgtctcatc

SEQ ID NO: 515199 - DNA, 33 bp, Homo sapien
tcatccaactggcagaactcccttcaaagaaac

SEQ ID NO: 515200 - DNA, 33 bp, Homo sapien
tcatccaactggcagagctcccttcaaagaaac

SEQ ID NO: 515201 - DNA, 33 bp, Homo sapien
actcaaggcttacagaactctcatgaaataggc

SEQ ID NO: 515202 - DNA, 33 bp, Homo sapien
actcaaggcttacagacctctcatgaaataggc

SEQ ID NO: 515203 - DNA, 33 bp, Homo sapien
gtgcctgggggggttaaactccaagaatgccaa

SEQ ID NO: 515204 - DNA, 33 bp, Homo sapien
gtgcctgggggggttagactccaagaatgccaa

SEQ ID NO: 515205 - DNA, 33 bp, Homo sapien
acatttctgctggcaagatatgaaatgaactct

SEQ ID NO: 515206 - DNA, 33 bp, Homo sapien
acatttctgctggcaatatatgaaatgaactct

SEQ ID NO: 515207 - DNA, 33 bp, Homo sapien
tgagtttccaatgcacaattcgatgcttcagaa

SEQ ID NO: 515208 - DNA, 33 bp, Homo sapien
tgagtttccaatgcacgattcgatgcttcagaa

SEQ ID NO: 515209 - DNA, 33 bp, Homo sapien
tcccaaacacctctcaaatcgcaagtcacctgg

SEQ ID NO: 515210 - DNA, 33 bp, Homo sapien
tcccaaacacctctcacatcgcaagtcacctgg

SEQ ID NO: 515211 - DNA, 33 bp, Homo sapien
tggacaactgcaatcaaggccaaagtccagttt

SEQ ID NO: 515212 - DNA, 33 bp, Homo sapien
tggacaactgcaatcatggccaaagtccagttt

SEQ ID NO: 515213 - DNA, 33 bp, Homo sapien
ggtgaatatgtgatacaaatctggctaatggga

SEQ ID NO: 515214 - DNA, 33 bp, Homo sapien
ggtgaatatgtgatacgaatctggctaatggga

SEQ ID NO: 515215 - DNA, 33 bp, Homo sapien
tccaaccctctcattcacatttctagcaggagg

SEQ ID NO: 515216 - DNA, 33 bp, Homo sapien
tccaaccctctcattcgcatttctagcaggagg

SEQ ID NO: 515217 - DNA, 33 bp, Homo sapien
ctttggccaagattaactctcttcaaacaagtg

SEQ ID NO: 515218 - DNA, 33 bp, Homo sapien
ctttggccaagattaagtctcttcaaacaagtg

SEQ ID NO: 515219 - DNA, 33 bp, Homo sapien
cttcttccttgcttgaaaaatggcaagttaccg

SEQ ID NO: 515220 - DNA, 33 bp, Homo sapien
cttcttccttgcttgagaaatggcaagttaccg

SEQ ID NO: 515221 - DNA, 33 bp, Homo sapien
tgagtacaaggtgatacgaaattactcaggtga

SEQ ID NO: 515222 - DNA, 33 bp, Homo sapien
tgagtacaaggtgatatgaaattactcaggtga

SEQ ID NO: 515223 - DNA, 33 bp, Homo sapien
ccacacacatatcttaagctgtaattgagtcta

SEQ ID NO: 515224 - DNA, 33 bp, Homo sapien
ccacacacatatcttaggctgtaattgagtcta

SEQ ID NO: 515225 - DNA, 33 bp, Homo sapien
tagaaacagtttgtcaaattacacacacacaca

SEQ ID NO: 515226 - DNA, 33 bp, Homo sapien
tagaaacagtttgtcagattacacacacacaca

SEQ ID NO: 515227 - DNA, 33 bp, Homo sapien
ttaaaacctcgctgaaactttttgttttccaga

SEQ ID NO: 515228 - DNA, 33 bp, Homo sapien
ttaaaacctcgctgaacctttttgttttccaga

SEQ ID NO: 515229 - DNA, 33 bp, Homo sapien
aggtaaccattagtcactcatttggccaaaatg

SEQ ID NO: 515230 - DNA, 33 bp, Homo sapien
aggtaaccattagtcattcatttggccaaaatg

SEQ ID NO: 515231 - DNA, 33 bp, Homo sapien
tagatatgctgccctggaaatgaggacattgtc

SEQ ID NO: 515232 - DNA, 33 bp, Homo sapien
tagatatgctgccctgtaaatgaggacattgtc

SEQ ID NO: 515233 - DNA, 33 bp, Homo sapien
tagtatgtgcttcatacagaggttgtaagaata

SEQ ID NO: 515234 - DNA, 33 bp, Homo sapien
tagtatgtgcttcatagagaggttgtaagaata

SEQ ID NO: 515235 - DNA, 33 bp, Homo sapien
acccgaaggaacctaagaaacgtgtgtgataaa

SEQ ID NO: 515236 - DNA, 33 bp, Homo sapien
acccgaaggaacctaataaacgtgtgtgataaa

SEQ ID NO: 515237 - DNA, 33 bp, Homo sapien
ttaggcagacaatgaacggattcacaaagaata

SEQ ID NO: 515238 - DNA, 33 bp, Homo sapien
ttaggcagacaatgaatggattcacaaagaata

SEQ ID NO: 515239 - DNA, 33 bp, Homo sapien
tttctcagtaagaagggaccgaggactataaag

SEQ ID NO: 515240 - DNA, 33 bp, Homo sapien
tttctcagtaagaaggtaccgaggactataaag

SEQ ID NO: 515241 - DNA, 33 bp, Homo sapien
aaaaaaaggacagcaagttcaacgtggaggtga

SEQ ID NO: 515242 - DNA, 33 bp, Homo sapien
aaaaaaaggacagcaatttcaacgtggaggtga

SEQ ID NO: 515243 - DNA, 33 bp, Homo sapien
tccacttgacaggccaccttctctagagtttgg

SEQ ID NO: 515244 - DNA, 33 bp, Homo sapien
tccacttgacaggccatcttctctagagtttgg

SEQ ID NO: 515245 - DNA, 33 bp, Homo sapien
ataaataccaatcgcacggagtcactcacacag

SEQ ID NO: 515246 - DNA, 33 bp, Homo sapien
ataaataccaatcgcagggagtcactcacacag

SEQ ID NO: 515247 - DNA, 33 bp, Homo sapien
acttcttacctccacacatgcatagcctcccca

SEQ ID NO: 515248 - DNA, 33 bp, Homo sapien
acttcttacctccacagatgcatagcctcccca

SEQ ID NO: 515249 - DNA, 33 bp, Homo sapien
gaaggtcatagctcagcctaaacactatctcca

SEQ ID NO: 515250 - DNA, 33 bp, Homo sapien
gaaggtcatagctcagtctaaacactatctcca

SEQ ID NO: 515251 - DNA, 33 bp, Homo sapien
aagacaaagtcctaagcctgacaagtaatttgt

SEQ ID NO: 515252 - DNA, 33 bp, Homo sapien
aagacaaagtcctaaggctgacaagtaatttgt

SEQ ID NO: 515253 - DNA, 33 bp, Homo sapien
gggacagaaaagagaagcgttggtcaagaagga

SEQ ID NO: 515254 - DNA, 33 bp, Homo sapien
gggacagaaaagagaatcgttggtcaagaagga

SEQ ID NO: 515255 - DNA, 33 bp, Homo sapien
agtccaaacaccaggaatagcaaaagatgggct

SEQ ID NO: 515256 - DNA, 33 bp, Homo sapien
agtccaaacaccaggagtagcaaaagatgggct

SEQ ID NO: 515257 - DNA, 33 bp, Homo sapien
acttaataaagcttgacgagtttttacaaagtt

SEQ ID NO: 515258 - DNA, 33 bp, Homo sapien
acttaataaagcttgatgagtttttacaaagtt

SEQ ID NO: 515259 - DNA, 33 bp, Homo sapien
tcaaagagcatattctaaatgatttcactcctt

SEQ ID NO: 515260 - DNA, 33 bp, Homo sapien
tcaaagagcatattctgaatgatttcactcctt

SEQ ID NO: 515261 - DNA, 33 bp, Homo sapien
cattgagttctgaaataagcagactaaattttt

SEQ ID NO: 515262 - DNA, 33 bp, Homo sapien
cattgagttctgaaatgagcagactaaattttt

SEQ ID NO: 515263 - DNA, 33 bp, Homo sapien
acagtgggggtgtagacgaatgcatgcacccaa

SEQ ID NO: 515264 - DNA, 33 bp, Homo sapien
acagtgggggtgtagatgaatgcatgcacccaa

SEQ ID NO: 515265 - DNA, 33 bp, Homo sapien
catatgacccaatccacgccagacatagccatt

SEQ ID NO: 515266 - DNA, 33 bp, Homo sapien
catatgacccaatccaggccagacatagccatt

SEQ ID NO: 515267 - DNA, 33 bp, Homo sapien
tagctgatagtgatgacatatggagactttggt

SEQ ID NO: 515268 - DNA, 33 bp, Homo sapien
tagctgatagtgatgatatatggagactttggt

SEQ ID NO: 515269 - DNA, 33 bp, Homo sapien
ctatggctctggaacacggactgctattcacca

SEQ ID NO: 515270 - DNA, 33 bp, Homo sapien
ctatggctctggaacatggactgctattcacca

SEQ ID NO: 515271 - DNA, 33 bp, Homo sapien
cttcctacaaaatgaaacggatcttcctcagcc

SEQ ID NO: 515272 - DNA, 33 bp, Homo sapien
cttcctacaaaatgaagcggatcttcctcagcc

SEQ ID NO: 515273 - DNA, 33 bp, Homo sapien
ttctaattttcatttacagtcacaagttgctta

SEQ ID NO: 515274 - DNA, 33 bp, Homo sapien
ttctaattttcatttagagtcacaagttgctta

SEQ ID NO: 515275 - DNA, 33 bp, Homo sapien
tccacttgagggcgtacaccctgctcttctcat

SEQ ID NO: 515276 - DNA, 33 bp, Homo sapien
tccacttgagggcgtataccctgctcttctcat

SEQ ID NO: 515277 - DNA, 33 bp, Homo sapien
tcaggggaaatccagccgaaattttggtccatt

SEQ ID NO: 515278 - DNA, 33 bp, Homo sapien
tcaggggaaatccagctgaaattttggtccatt

SEQ ID NO: 515279 - DNA, 33 bp, Homo sapien
ccaaaacagtgacttcacccgtaagaacatttt

SEQ ID NO: 515280 - DNA, 33 bp, Homo sapien
ccaaaacagtgacttcgcccgtaagaacatttt

SEQ ID NO: 515281 - DNA, 33 bp, Homo sapien
atcacaggccctcttcacctatgttctcactga

SEQ ID NO: 515282 - DNA, 33 bp, Homo sapien
atcacaggccctcttcgcctatgttctcactga

SEQ ID NO: 515283 - DNA, 33 bp, Homo sapien
ttaataaaagcacctaaaggatgatttcccaga

SEQ ID NO: 515284 - DNA, 33 bp, Homo sapien
ttaataaaagcacctacaggatgatttcccaga

SEQ ID NO: 515285 - DNA, 33 bp, Homo sapien
ccaaattaatttagaaagggtgagcatgaactc

SEQ ID NO: 515286 - DNA, 33 bp, Homo sapien
ccaaattaatttagaaggggtgagcatgaactc

SEQ ID NO: 515287 - DNA, 33 bp, Homo sapien
cagaggcccttaccacaatttgaatgtttgtgc

SEQ ID NO: 515288 - DNA, 33 bp, Homo sapien
cagaggcccttaccacgatttgaatgtttgtgc

SEQ ID NO: 515289 - DNA, 33 bp, Homo sapien
atccactcctagaaaacagatggagccagtgct

SEQ ID NO: 515290 - DNA, 33 bp, Homo sapien
atccactcctagaaaagagatggagccagtgct

SEQ ID NO: 515291 - DNA, 33 bp, Homo sapien
aggaatagaataatcacggctgaaaatgtaatc

SEQ ID NO: 515292 - DNA, 33 bp, Homo sapien
aggaatagaataatcatggctgaaaatgtaatc

SEQ ID NO: 515293 - DNA, 33 bp, Homo sapien
ttgaatctgagatatcaagcaggtggatataga

SEQ ID NO: 515294 - DNA, 33 bp, Homo sapien
ttgaatctgagatatcgagcaggtggatataga

SEQ ID NO: 515295 - DNA, 33 bp, Homo sapien
agggacatggcagcaacgtatttttctacagaa

SEQ ID NO: 515296 - DNA, 33 bp, Homo sapien
agggacatggcagcaatgtatttttctacagaa

SEQ ID NO: 515297 - DNA, 33 bp, Homo sapien
ggcagggcctagaaccgacacaggatggaacct

SEQ ID NO: 515298 - DNA, 33 bp, Homo sapien
ggcagggcctagaacctacacaggatggaacct

SEQ ID NO: 515299 - DNA, 33 bp, Homo sapien
tccatgtctgtatacaacttcaactcttggtcc

SEQ ID NO: 515300 - DNA, 33 bp, Homo sapien
tccatgtctgtatacagcttcaactcttggtcc

SEQ ID NO: 515301 - DNA, 33 bp, Homo sapien
ttctggagtattgtgtaaagatgagtaagagtg

SEQ ID NO: 515302 - DNA, 33 bp, Homo sapien
ttctggagtattgtgtgaagatgagtaagagtg

SEQ ID NO: 515303 - DNA, 33 bp, Homo sapien
tcacaatgaaagccgacgaaaatttcccacctc

SEQ ID NO: 515304 - DNA, 33 bp, Homo sapien
tcacaatgaaagccgatgaaaatttcccacctc

SEQ ID NO: 515305 - DNA, 33 bp, Homo sapien
caaagggacaggtctacacaaaggacagtggct

SEQ ID NO: 515306 - DNA, 33 bp, Homo sapien
caaagggacaggtctatacaaaggacagtggct

SEQ ID NO: 515307 - DNA, 33 bp, Homo sapien
ttgctgcaaatacatccgagctaatttagagct

SEQ ID NO: 515308 - DNA, 33 bp, Homo sapien
ttgctgcaaatacatcggagctaatttagagct

SEQ ID NO: 515309 - DNA, 33 bp, Homo sapien
gcagtcctgagggtgccacaagctggccttggc

SEQ ID NO: 515310 - DNA, 33 bp, Homo sapien
gcagtcctgagggtgctacaagctggccttggc

SEQ ID NO: 515311 - DNA, 33 bp, Homo sapien
atttttcccgatgacactctcaactgctggtca

SEQ ID NO: 515312 - DNA, 33 bp, Homo sapien
atttttcccgatgacattctcaactgctggtca

SEQ ID NO: 515313 - DNA, 33 bp, Homo sapien
ccctagttctgccgacagagtgaacttggtaag

SEQ ID NO: 515314 - DNA, 33 bp, Homo sapien
ccctagttctgccgactgagtgaacttggtaag

SEQ ID NO: 515315 - DNA, 33 bp, Homo sapien
cccaggagactgccccagacaaccagcaggact

SEQ ID NO: 515316 - DNA, 33 bp, Homo sapien
cccaggagactgccccggacaaccagcaggact

SEQ ID NO: 515317 - DNA, 33 bp, Homo sapien
tggagaagtgacccaaagaacaagggcgaggga

SEQ ID NO: 515318 - DNA, 33 bp, Homo sapien
tggagaagtgacccaaggaacaagggcgaggga

SEQ ID NO: 515319 - DNA, 33 bp, Homo sapien
tggagacctctctgaaactgctctgtaagatga

SEQ ID NO: 515320 - DNA, 33 bp, Homo sapien
tggagacctctctgaagctgctctgtaagatga

SEQ ID NO: 515321 - DNA, 33 bp, Homo sapien
gaaccaaggcatgaaagaaggagtagccactct

SEQ ID NO: 515322 - DNA, 33 bp, Homo sapien
gaaccaaggcatgaaataaggagtagccactct

SEQ ID NO: 515323 - DNA, 33 bp, Homo sapien
taggggtgccctgtagaacagtaagaagagaat

SEQ ID NO: 515324 - DNA, 33 bp, Homo sapien
taggggtgccctgtaggacagtaagaagagaat

SEQ ID NO: 515325 - DNA, 33 bp, Homo sapien
ctcattttaaatgtaaatctactgtacttgtcc

SEQ ID NO: 515326 - DNA, 33 bp, Homo sapien
ctcattttaaatgtaagtctactgtacttgtcc

SEQ ID NO: 515327 - DNA, 33 bp, Homo sapien
ttcaacactaagagtaaaataaatctggcagga

SEQ ID NO: 515328 - DNA, 33 bp, Homo sapien
ttcaacactaagagtagaataaatctggcagga

SEQ ID NO: 515329 - DNA, 33 bp, Homo sapien
ttgaggctcatcctaacggtagtacttgatttt

SEQ ID NO: 515330 - DNA, 33 bp, Homo sapien
ttgaggctcatcctaatggtagtacttgatttt

SEQ ID NO: 515331 - DNA, 33 bp, Homo sapien
ttgtgttagaatgacaataggcttcaaatgatc

SEQ ID NO: 515332 - DNA, 33 bp, Homo sapien
ttgtgttagaatgacagtaggcttcaaatgatc

SEQ ID NO: 515333 - DNA, 33 bp, Homo sapien
cctgttctctgtgggaccagactgccaaagccc

SEQ ID NO: 515334 - DNA, 33 bp, Homo sapien
cctgttctctgtgggatcagactgccaaagccc

SEQ ID NO: 515335 - DNA, 33 bp, Homo sapien
ccaaacaggaagggaaaaggatttactgttata

SEQ ID NO: 515336 - DNA, 33 bp, Homo sapien
ccaaacaggaagggaagaggatttactgttata

SEQ ID NO: 515337 - DNA, 33 bp, Homo sapien
ggctccgataggcccacggcagatggaagaaag

SEQ ID NO: 515338 - DNA, 33 bp, Homo sapien
ggctccgataggcccatggcagatggaagaaag

SEQ ID NO: 515339 - DNA, 33 bp, Homo sapien
gatgctgtatctagaaccaggtacacccgtgtt

SEQ ID NO: 515340 - DNA, 33 bp, Homo sapien
gatgctgtatctagaatcaggtacacccgtgtt

SEQ ID NO: 515341 - DNA, 33 bp, Homo sapien
tgtgactttctaattacgccatgcagccagctg

SEQ ID NO: 515342 - DNA, 33 bp, Homo sapien
tgtgactttctaattatgccatgcagccagctg

SEQ ID NO: 515343 - DNA, 33 bp, Homo sapien
catttgttgctgctacagccctttggaaagcct

SEQ ID NO: 515344 - DNA, 33 bp, Homo sapien
catttgttgctgctacggccctttggaaagcct

SEQ ID NO: 515345 - DNA, 33 bp, Homo sapien
gaagagttctagagcaaggtaccaggccagaca

SEQ ID NO: 515346 - DNA, 33 bp, Homo sapien
gaagagttctagagcagggtaccaggccagaca

SEQ ID NO: 515347 - DNA, 33 bp, Homo sapien
tctgcttctcatccaacgagctgaggttcagaa

SEQ ID NO: 515348 - DNA, 33 bp, Homo sapien
tctgcttctcatccaatgagctgaggttcagaa

SEQ ID NO: 515349 - DNA, 33 bp, Homo sapien
tctgataatgttcagacatccagttatagagct

SEQ ID NO: 515350 - DNA, 33 bp, Homo sapien
tctgataatgttcagatatccagttatagagct

SEQ ID NO: 515351 - DNA, 33 bp, Homo sapien
gagaaagagacttgctcaaggaaacagagtgtc

SEQ ID NO: 515352 - DNA, 33 bp, Homo sapien
gagaaagagacttgcttaaggaaacagagtgtc

SEQ ID NO: 515353 - DNA, 33 bp, Homo sapien
cagacatgtcaggcctaaagatggggacgttct

SEQ ID NO: 515354 - DNA, 33 bp, Homo sapien
cagacatgtcaggcctgaagatggggacgttct

SEQ ID NO: 515355 - DNA, 33 bp, Homo sapien
agcagcatgggcatcgccagggaactcattagc

SEQ ID NO: 515356 - DNA, 33 bp, Homo sapien
agcagcatgggcatcgtcagggaactcattagc

SEQ ID NO: 515357 - DNA, 33 bp, Homo sapien
ggtaagaaagatggcccgaaacagtgttttcta

SEQ ID NO: 515358 - DNA, 33 bp, Homo sapien
ggtaagaaagatggcctgaaacagtgttttcta

SEQ ID NO: 515359 - DNA, 33 bp, Homo sapien
aataatcctgagacataatacaccatgaatatt

SEQ ID NO: 515360 - DNA, 33 bp, Homo sapien
aataatcctgagacatgatacaccatgaatatt

SEQ ID NO: 515361 - DNA, 33 bp, Homo sapien
aagttcaggaattcaggaagtctggagtaagtc

SEQ ID NO: 515362 - DNA, 33 bp, Homo sapien
aagttcaggaattcagtaagtctggagtaagtc

SEQ ID NO: 515363 - DNA, 33 bp, Homo sapien
ttttgcctgatattagacagcaacagtatggtg

SEQ ID NO: 515364 - DNA, 33 bp, Homo sapien
ttttgcctgatattaggcagcaacagtatggtg

SEQ ID NO: 515365 - DNA, 33 bp, Homo sapien
tggggcattttagagaacatagcattgaggtag

SEQ ID NO: 515366 - DNA, 33 bp, Homo sapien
tggggcattttagagagcatagcattgaggtag

SEQ ID NO: 515367 - DNA, 33 bp, Homo sapien
aatgctagaccaaggaaggaagaacatagcctt

SEQ ID NO: 515368 - DNA, 33 bp, Homo sapien
aatgctagaccaaggagggaagaacatagcctt

SEQ ID NO: 515369 - DNA, 33 bp, Homo sapien
tttaacaagtttatcaatgaagggatagcatct

SEQ ID NO: 515370 - DNA, 33 bp, Homo sapien
tttaacaagtttatcagtgaagggatagcatct

SEQ ID NO: 515371 - DNA, 33 bp, Homo sapien
ctctgagatgttaagggaaaaatcccagccctc

SEQ ID NO: 515372 - DNA, 33 bp, Homo sapien
ctctgagatgttaaggtaaaaatcccagccctc

SEQ ID NO: 515373 - DNA, 33 bp, Homo sapien
gtgagcttcatcttcaaccggcatccctgacac

SEQ ID NO: 515374 - DNA, 33 bp, Homo sapien
gtgagcttcatcttcacccggcatccctgacac

SEQ ID NO: 515375 - DNA, 33 bp, Homo sapien
gggagtagaatccacaaggaggataatggtaat

SEQ ID NO: 515376 - DNA, 33 bp, Homo sapien
gggagtagaatccacatggaggataatggtaat

SEQ ID NO: 515377 - DNA, 33 bp, Homo sapien
tccccattgcctgcacagagctgtcagtggttt

SEQ ID NO: 515378 - DNA, 33 bp, Homo sapien
tccccattgcctgcacggagctgtcagtggttt

SEQ ID NO: 515379 - DNA, 33 bp, Homo sapien
agagtgttgtggggtaaataatggaggcttacc

SEQ ID NO: 515380 - DNA, 33 bp, Homo sapien
agagtgttgtggggtagataatggaggcttacc

SEQ ID NO: 515381 - DNA, 33 bp, Homo sapien
gactctaaatctcatccaaggaaatggcctctc

SEQ ID NO: 515382 - DNA, 33 bp, Homo sapien
gactctaaatctcatcgaaggaaatggcctctc

SEQ ID NO: 515383 - DNA, 33 bp, Homo sapien
ggaaatggcctctccaagatccataccgtttta

SEQ ID NO: 515384 - DNA, 33 bp, Homo sapien
ggaaatggcctctccacgatccataccgtttta

SEQ ID NO: 515385 - DNA, 33 bp, Homo sapien
tgctttataccagtccaaagagttaagacggtt

SEQ ID NO: 515386 - DNA, 33 bp, Homo sapien
tgctttataccagtccgaagagttaagacggtt

SEQ ID NO: 515387 - DNA, 33 bp, Homo sapien
gatgttctctgctaaaactattaagtctgctta

SEQ ID NO: 515388 - DNA, 33 bp, Homo sapien
gatgttctctgctaaagctattaagtctgctta

SEQ ID NO: 515389 - DNA, 33 bp, Homo sapien
ttttgattaatctcgcacttaatgccagacaag

SEQ ID NO: 515390 - DNA, 33 bp, Homo sapien
ttttgattaatctcgcgcttaatgccagacaag

SEQ ID NO: 515391 - DNA, 33 bp, Homo sapien
tcctcaattctgagcacattttatggaggaagg

SEQ ID NO: 515392 - DNA, 33 bp, Homo sapien
tcctcaattctgagcatattttatggaggaagg

SEQ ID NO: 515393 - DNA, 33 bp, Homo sapien
gtttcttcaccttaaactgtgctatcatttttt

SEQ ID NO: 515394 - DNA, 33 bp, Homo sapien
gtttcttcaccttaaattgtgctatcatttttt

SEQ ID NO: 515395 - DNA, 33 bp, Homo sapien
ttcaactattaaacagactatccattcagtttc

SEQ ID NO: 515396 - DNA, 33 bp, Homo sapien
ttcaactattaaacaggctatccattcagtttc

SEQ ID NO: 515397 - DNA, 33 bp, Homo sapien
ggtcagaatcggagcacgttaattggagcagtt

SEQ ID NO: 515398 - DNA, 33 bp, Homo sapien
ggtcagaatcggagcatgttaattggagcagtt

SEQ ID NO: 515399 - DNA, 33 bp, Homo sapien
tacagacaattctccacgcaagcggaatgatcc

SEQ ID NO: 515400 - DNA, 33 bp, Homo sapien
tacagacaattctccatgcaagcggaatgatcc

SEQ ID NO: 515401 - DNA, 33 bp, Homo sapien
gcagccataaggcacaacttttcctgtagactt

SEQ ID NO: 515402 - DNA, 33 bp, Homo sapien
gcagccataaggcacagcttttcctgtagactt

SEQ ID NO: 515403 - DNA, 33 bp, Homo sapien
gctggctgctggctgcaactgtattttgcttgc

SEQ ID NO: 515404 - DNA, 33 bp, Homo sapien
gctggctgctggctgcgactgtattttgcttgc

SEQ ID NO: 515405 - DNA, 33 bp, Homo sapien
cccctccagcaaactacatgctcactgagggca

SEQ ID NO: 515406 - DNA, 33 bp, Homo sapien
cccctccagcaaactatatgctcactgagggca

SEQ ID NO: 515407 - DNA, 33 bp, Homo sapien
attagcatacttgacaggatagaatgctaagac

SEQ ID NO: 515408 - DNA, 33 bp, Homo sapien
attagcatacttgacatgatagaatgctaagac

SEQ ID NO: 515409 - DNA, 33 bp, Homo sapien
acacaaaccaacaaggcatcagagtcaatgcta

SEQ ID NO: 515410 - DNA, 33 bp, Homo sapien
acacaaaccaacaaggtatcagagtcaatgcta

SEQ ID NO: 515411 - DNA, 33 bp, Homo sapien
gtcacactgtcctaaccctatcagctttgttgc

SEQ ID NO: 515412 - DNA, 33 bp, Homo sapien
gtcacactgtcctaactctatcagctttgttgc

SEQ ID NO: 515413 - DNA, 33 bp, Homo sapien
aagctgctatatgctgccaattagaatgagacc

SEQ ID NO: 515414 - DNA, 33 bp, Homo sapien
aagctgctatatgctgtcaattagaatgagacc

SEQ ID NO: 515415 - DNA, 33 bp, Homo sapien
tgttgcaacatgcataagcacatcaaattcata

SEQ ID NO: 515416 - DNA, 33 bp, Homo sapien
tgttgcaacatgcatacgcacatcaaattcata

SEQ ID NO: 515417 - DNA, 33 bp, Homo sapien
aatttattgatccacccattctaccgtagatgg

SEQ ID NO: 515418 - DNA, 33 bp, Homo sapien
aatttattgatccacctattctaccgtagatgg

SEQ ID NO: 515419 - DNA, 33 bp, Homo sapien
ctgctcagcttttggcaagggcctcatgctgca

SEQ ID NO: 515420 - DNA, 33 bp, Homo sapien
ctgctcagcttttggcgagggcctcatgctgca

SEQ ID NO: 515421 - DNA, 33 bp, Homo sapien
cagtggccagtaattaaagaatttgaggaagcc

SEQ ID NO: 515422 - DNA, 33 bp, Homo sapien
cagtggccagtaattagagaatttgaggaagcc

SEQ ID NO: 515423 - DNA, 33 bp, Homo sapien
aaggagggtaaacacactgtaagtctaatcaaa

SEQ ID NO: 515424 - DNA, 33 bp, Homo sapien
aaggagggtaaacacattgtaagtctaatcaaa

SEQ ID NO: 515425 - DNA, 33 bp, Homo sapien
aaagcttttccttccaaattgcctagttgatgc

SEQ ID NO: 515426 - DNA, 33 bp, Homo sapien
aaagcttttccttccagattgcctagttgatgc

SEQ ID NO: 515427 - DNA, 33 bp, Homo sapien
ggacaaaaaggagatacgttatatggttattgc

SEQ ID NO: 515428 - DNA, 33 bp, Homo sapien
ggacaaaaaggagatatgttatatggttattgc

SEQ ID NO: 515429 - DNA, 33 bp, Homo sapien
ccaaagcaaaggagtacgtaaaagcaagtagaa

SEQ ID NO: 515430 - DNA, 33 bp, Homo sapien
ccaaagcaaaggagtatgtaaaagcaagtagaa

SEQ ID NO: 515431 - DNA, 33 bp, Homo sapien
cttcatccgtggaaaaattatccgccatgaaac

SEQ ID NO: 515432 - DNA, 33 bp, Homo sapien
cttcatccgtggaaaagttatccgccatgaaac

SEQ ID NO: 515433 - DNA, 33 bp, Homo sapien
taggtctgtggtctataaacagtaacctgttag

SEQ ID NO: 515434 - DNA, 33 bp, Homo sapien
taggtctgtggtctattaacagtaacctgttag

SEQ ID NO: 515435 - DNA, 33 bp, Homo sapien
ttgtgcgatgcttccacgcagttctgagatata

SEQ ID NO: 515436 - DNA, 33 bp, Homo sapien
ttgtgcgatgcttccaggcagttctgagatata

SEQ ID NO: 515437 - DNA, 33 bp, Homo sapien
aactctattggccctacctagtgaaacccaaaa

SEQ ID NO: 515438 - DNA, 33 bp, Homo sapien
aactctattggccctatctagtgaaacccaaaa

SEQ ID NO: 515439 - DNA, 33 bp, Homo sapien
aataaagaaaatcacaatcacaaaaatcaccac

SEQ ID NO: 515440 - DNA, 33 bp, Homo sapien
aataaagaaaatcacagtcacaaaaatcaccac

SEQ ID NO: 515441 - DNA, 33 bp, Homo sapien
aacactctacatctagaaaaaaaaccaagaatg

SEQ ID NO: 515442 - DNA, 33 bp, Homo sapien
aacactctacatctaggaaaaaaaccaagaatg

SEQ ID NO: 515443 - DNA, 33 bp, Homo sapien
gctacatcttatttgaacatggccagctttcac

SEQ ID NO: 515444 - DNA, 33 bp, Homo sapien
gctacatcttatttgagcatggccagctttcac

SEQ ID NO: 515445 - DNA, 33 bp, Homo sapien
acagccaaaacaactgcagaaatttaaagccta

SEQ ID NO: 515446 - DNA, 33 bp, Homo sapien
acagccaaaacaactggagaaatttaaagccta

SEQ ID NO: 515447 - DNA, 33 bp, Homo sapien
ttgcagatccagataacgttctgagattcgaat

SEQ ID NO: 515448 - DNA, 33 bp, Homo sapien
ttgcagatccagataatgttctgagattcgaat

SEQ ID NO: 515449 - DNA, 33 bp, Homo sapien
ctgaggaagacctcagaaatgttttagacagga

SEQ ID NO: 515450 - DNA, 33 bp, Homo sapien
ctgaggaagacctcaggaatgttttagacagga

SEQ ID NO: 515451 - DNA, 33 bp, Homo sapien
tcaatccagacttgaactagtggtgctgcatga

SEQ ID NO: 515452 - DNA, 33 bp, Homo sapien
tcaatccagacttgaagtagtggtgctgcatga

SEQ ID NO: 515453 - DNA, 33 bp, Homo sapien
gctgctctggagaaaccggcaaagacagggcgt

SEQ ID NO: 515454 - DNA, 33 bp, Homo sapien
gctgctctggagaaactggcaaagacagggcgt

SEQ ID NO: 515455 - DNA, 33 bp, Homo sapien
cacacttttctccatccctggaattcaaggaga

SEQ ID NO: 515456 - DNA, 33 bp, Homo sapien
cacacttttctccatctctggaattcaaggaga

SEQ ID NO: 515457 - DNA, 33 bp, Homo sapien
gaagacggaatataagcctactaaaaaccttga

SEQ ID NO: 515458 - DNA, 33 bp, Homo sapien
gaagacggaatataaggctactaaaaaccttga

SEQ ID NO: 515459 - DNA, 33 bp, Homo sapien
gaggttattccctaacaagtagattcaggggga

SEQ ID NO: 515460 - DNA, 33 bp, Homo sapien
gaggttattccctaaccagtagattcaggggga

SEQ ID NO: 515461 - DNA, 33 bp, Homo sapien
ctcttaagaactacaacggacctgtccaccagc

SEQ ID NO: 515462 - DNA, 33 bp, Homo sapien
ctcttaagaactacaatggacctgtccaccagc

SEQ ID NO: 515463 - DNA, 33 bp, Homo sapien
acctttcactggaaaacgttctcatccttccca

SEQ ID NO: 515464 - DNA, 33 bp, Homo sapien
acctttcactggaaaatgttctcatccttccca

SEQ ID NO: 515465 - DNA, 33 bp, Homo sapien
tgttgtgatgacttaacaattgcaaggtcactt

SEQ ID NO: 515466 - DNA, 33 bp, Homo sapien
tgttgtgatgacttaataattgcaaggtcactt

SEQ ID NO: 515467 - DNA, 33 bp, Homo sapien
ctaaattgttaagaccagaagagcctttgtttc

SEQ ID NO: 515468 - DNA, 33 bp, Homo sapien
ctaaattgttaagaccggaagagcctttgtttc

SEQ ID NO: 515469 - DNA, 33 bp, Homo sapien
cttgaacattcagcaagtctcacgtgtgggatc

SEQ ID NO: 515470 - DNA, 33 bp, Homo sapien
cttgaacattcagcaattctcacgtgtgggatc

SEQ ID NO: 515471 - DNA, 33 bp, Homo sapien
gggacttgattaaacaacagccacatgattatg

SEQ ID NO: 515472 - DNA, 33 bp, Homo sapien
gggacttgattaaacagcagccacatgattatg

SEQ ID NO: 515473 - DNA, 33 bp, Homo sapien
gtcagtgcttactttagaaggacactgcttagc

SEQ ID NO: 515474 - DNA, 33 bp, Homo sapien
gtcagtgcttactttataaggacactgcttagc

SEQ ID NO: 515475 - DNA, 33 bp, Homo sapien
tgctaggcaacatcaacggagtaatttttaaaa

SEQ ID NO: 515476 - DNA, 33 bp, Homo sapien
tgctaggcaacatcaatggagtaatttttaaaa

SEQ ID NO: 515477 - DNA, 33 bp, Homo sapien
tttaattccccacaaacagctgagtggctcttg

SEQ ID NO: 515478 - DNA, 33 bp, Homo sapien
tttaattccccacaaagagctgagtggctcttg

SEQ ID NO: 515479 - DNA, 33 bp, Homo sapien
tgtattttgttttgcaatacgtttctggcacct

SEQ ID NO: 515480 - DNA, 33 bp, Homo sapien
tgtattttgttttgcattacgtttctggcacct

SEQ ID NO: 515481 - DNA, 33 bp, Homo sapien
cctctgaatgaaaaaggcaaaagaagaatggaa

SEQ ID NO: 515482 - DNA, 33 bp, Homo sapien
cctctgaatgaaaaagtcaaaagaagaatggaa

SEQ ID NO: 515483 - DNA, 33 bp, Homo sapien
atgatagtggtattgacgcttggaaagatataa

SEQ ID NO: 515484 - DNA, 33 bp, Homo sapien
atgatagtggtattgatgcttggaaagatataa

SEQ ID NO: 515485 - DNA, 33 bp, Homo sapien
cttggatcttccctggaacacacaaaccttgct

SEQ ID NO: 515486 - DNA, 33 bp, Homo sapien
cttggatcttccctgggacacacaaaccttgct

SEQ ID NO: 515487 - DNA, 33 bp, Homo sapien
agcacctcaaataacaccttcagtgacttccaa

SEQ ID NO: 515488 - DNA, 33 bp, Homo sapien
agcacctcaaataacatcttcagtgacttccaa

SEQ ID NO: 515489 - DNA, 33 bp, Homo sapien
tgtgagggaggctccaataaaagttcaaagtat

SEQ ID NO: 515490 - DNA, 33 bp, Homo sapien
tgtgagggaggctccagtaaaagttcaaagtat

SEQ ID NO: 515491 - DNA, 33 bp, Homo sapien
tctttaaaaacaaagcagagaaactatgcattg

SEQ ID NO: 515492 - DNA, 33 bp, Homo sapien
tctttaaaaacaaagctgagaaactatgcattg

SEQ ID NO: 515493 - DNA, 33 bp, Homo sapien
aacaaattcttgggtacggtttgaagaaaggct

SEQ ID NO: 515494 - DNA, 33 bp, Homo sapien
aacaaattcttgggtatggtttgaagaaaggct

SEQ ID NO: 515495 - DNA, 33 bp, Homo sapien
cttaggcccccaactcaagaatataatacagtt

SEQ ID NO: 515496 - DNA, 33 bp, Homo sapien
cttaggcccccaactcgagaatataatacagtt

SEQ ID NO: 515497 - DNA, 33 bp, Homo sapien
gacttctgaaaccacaacattcaaccctctagt

SEQ ID NO: 515498 - DNA, 33 bp, Homo sapien
gacttctgaaaccacaccattcaaccctctagt

SEQ ID NO: 515499 - DNA, 33 bp, Homo sapien
cagggcaatgacactcgaaagatattttctctc

SEQ ID NO: 515500 - DNA, 33 bp, Homo sapien
cagggcaatgacactctaaagatattttctctc

SEQ ID NO: 515501 - DNA, 33 bp, Homo sapien
gtttataaaaactctcagaaacctcaaagaaca

SEQ ID NO: 515502 - DNA, 33 bp, Homo sapien
gtttataaaaactctctgaaacctcaaagaaca

SEQ ID NO: 515503 - DNA, 33 bp, Homo sapien
tcactgcttgtagagggatcagtgtgtggatct

SEQ ID NO: 515504 - DNA, 33 bp, Homo sapien
tcactgcttgtagaggtatcagtgtgtggatct

SEQ ID NO: 515505 - DNA, 33 bp, Homo sapien
gggtgcactgggtccacacgtgcagctaattcc

SEQ ID NO: 515506 - DNA, 33 bp, Homo sapien
gggtgcactgggtccatacgtgcagctaattcc

SEQ ID NO: 515507 - DNA, 33 bp, Homo sapien
aacattcataaacaggaagtgttgctaagaact

SEQ ID NO: 515508 - DNA, 33 bp, Homo sapien
aacattcataaacagggagtgttgctaagaact

SEQ ID NO: 515509 - DNA, 33 bp, Homo sapien
cctccactctacaaaaatcagaagggcaaagga

SEQ ID NO: 515510 - DNA, 33 bp, Homo sapien
cctccactctacaaaactcagaagggcaaagga

SEQ ID NO: 515511 - DNA, 33 bp, Homo sapien
cttatatttgaaaaaactcattgtttacctgaa

SEQ ID NO: 515512 - DNA, 33 bp, Homo sapien
cttatatttgaaaaaattcattgtttacctgaa

SEQ ID NO: 515513 - DNA, 33 bp, Homo sapien
catagaacaaatggtacgagcaagagttggaag

SEQ ID NO: 515514 - DNA, 33 bp, Homo sapien
catagaacaaatggtaggagcaagagttggaag

SEQ ID NO: 515515 - DNA, 33 bp, Homo sapien
agaaaaagccataacaaagactaatcattattc

SEQ ID NO: 515516 - DNA, 33 bp, Homo sapien
agaaaaagccataacacagactaatcattattc

SEQ ID NO: 515517 - DNA, 33 bp, Homo sapien
taccttcccaatttcaccttcagcctagctcat

SEQ ID NO: 515518 - DNA, 33 bp, Homo sapien
taccttcccaatttcatcttcagcctagctcat

SEQ ID NO: 515519 - DNA, 33 bp, Homo sapien
ctgctggggcgagtcacggctgagcaaaccctt

SEQ ID NO: 515520 - DNA, 33 bp, Homo sapien
ctgctggggcgagtcatggctgagcaaaccctt

SEQ ID NO: 515521 - DNA, 33 bp, Homo sapien
atacttgcttctgaaacgtagttatttagtccc

SEQ ID NO: 515522 - DNA, 33 bp, Homo sapien
atacttgcttctgaaatgtagttatttagtccc

SEQ ID NO: 515523 - DNA, 33 bp, Homo sapien
cagcccaccggtatcaactggatgcttgtgaga

SEQ ID NO: 515524 - DNA, 33 bp, Homo sapien
cagcccaccggtatcacctggatgcttgtgaga

SEQ ID NO: 515525 - DNA, 33 bp, Homo sapien
ccaagaagcagaaacactgtgcagattcacgac

SEQ ID NO: 515526 - DNA, 33 bp, Homo sapien
ccaagaagcagaaacattgtgcagattcacgac

SEQ ID NO: 515527 - DNA, 33 bp, Homo sapien
ccacagactattccatcatcaaagagcagggag

SEQ ID NO: 515528 - DNA, 33 bp, Homo sapien
ccacagactattccattatcaaagagcagggag

SEQ ID NO: 515529 - DNA, 33 bp, Homo sapien
ttcccagtacagctgaccaaccacacggcttcc

SEQ ID NO: 515530 - DNA, 33 bp, Homo sapien
ttcccagtacagctgatcaaccacacggcttcc

SEQ ID NO: 515531 - DNA, 33 bp, Homo sapien
gaaccttattaaaatacagcttgtaggaaaaca

SEQ ID NO: 515532 - DNA, 33 bp, Homo sapien
gaaccttattaaaatatagcttgtaggaaaaca

SEQ ID NO: 515533 - DNA, 33 bp, Homo sapien
cactgttcaatactgaaataccggggtgctcct

SEQ ID NO: 515534 - DNA, 33 bp, Homo sapien
cactgttcaatactgagataccggggtgctcct

SEQ ID NO: 515535 - DNA, 33 bp, Homo sapien
cctggaaaaacacagacagtgctgctgccttat

SEQ ID NO: 515536 - DNA, 33 bp, Homo sapien
cctggaaaaacacagagagtgctgctgccttat

SEQ ID NO: 515537 - DNA, 33 bp, Homo sapien
tactagaatcatgtacccttgaggacacagcta

SEQ ID NO: 515538 - DNA, 33 bp, Homo sapien
tactagaatcatgtactcttgaggacacagcta

SEQ ID NO: 515539 - DNA, 33 bp, Homo sapien
atacatacgaaacatacatagggcatgacaatt

SEQ ID NO: 515540 - DNA, 33 bp, Homo sapien
atacatacgaaacatatatagggcatgacaatt

SEQ ID NO: 515541 - DNA, 33 bp, Homo sapien
caattattctttctaaactgagaacgtgaataa

SEQ ID NO: 515542 - DNA, 33 bp, Homo sapien
caattattctttctaagctgagaacgtgaataa

SEQ ID NO: 515543 - DNA, 33 bp, Homo sapien
ttaccaatttcataaacgtgaaaatcccaacag

SEQ ID NO: 515544 - DNA, 33 bp, Homo sapien
ttaccaatttcataaatgtgaaaatcccaacag

SEQ ID NO: 515545 - DNA, 33 bp, Homo sapien
ttctgggatttaatggcaatacatatgtaatct

SEQ ID NO: 515546 - DNA, 33 bp, Homo sapien
ttctgggatttaatggtaatacatatgtaatct

SEQ ID NO: 515547 - DNA, 33 bp, Homo sapien
tctgatcccattttcacagccaatggcaataac

SEQ ID NO: 515548 - DNA, 33 bp, Homo sapien
tctgatcccattttcatagccaatggcaataac

SEQ ID NO: 515549 - DNA, 33 bp, Homo sapien
actcaaataaatacaacacgttcaacttctgtg

SEQ ID NO: 515550 - DNA, 33 bp, Homo sapien
actcaaataaatacaatacgttcaacttctgtg

SEQ ID NO: 515551 - DNA, 33 bp, Homo sapien
tggcaccttaaccacactgaattgcttttcccc

SEQ ID NO: 515552 - DNA, 33 bp, Homo sapien
tggcaccttaaccacattgaattgcttttcccc

SEQ ID NO: 515553 - DNA, 33 bp, Homo sapien
actgctgcagatgaaacggaaggaaacagtggg

SEQ ID NO: 515554 - DNA, 33 bp, Homo sapien
actgctgcagatgaaatggaaggaaacagtggg

SEQ ID NO: 515555 - DNA, 33 bp, Homo sapien
attgggtaaatccctacgtgggcaccggaaata

SEQ ID NO: 515556 - DNA, 33 bp, Homo sapien
attgggtaaatccctatgtgggcaccggaaata

SEQ ID NO: 515557 - DNA, 33 bp, Homo sapien
tttagattggtaatacacctgaaaacacaggcc

SEQ ID NO: 515558 - DNA, 33 bp, Homo sapien
tttagattggtaatacccctgaaaacacaggcc

SEQ ID NO: 515559 - DNA, 33 bp, Homo sapien
gtgagttcttcggatacaggctaacctcaccta

SEQ ID NO: 515560 - DNA, 33 bp, Homo sapien
gtgagttcttcggatataggctaacctcaccta

SEQ ID NO: 515561 - DNA, 33 bp, Homo sapien
taaataatcaacagtaccagtttgcatttattg

SEQ ID NO: 515562 - DNA, 33 bp, Homo sapien
taaataatcaacagtatcagtttgcatttattg

SEQ ID NO: 515563 - DNA, 33 bp, Homo sapien
aatgctccataatgcaaaggctccacctggctt

SEQ ID NO: 515564 - DNA, 33 bp, Homo sapien
aatgctccataatgcagaggctccacctggctt

SEQ ID NO: 515565 - DNA, 33 bp, Homo sapien
tttaaatgagctttctcaaagagacgctgtctc

SEQ ID NO: 515566 - DNA, 33 bp, Homo sapien
tttaaatgagctttcttaaagagacgctgtctc

SEQ ID NO: 515567 - DNA, 33 bp, Homo sapien
aaaattccactgagcaaaaaactcacctttgaa

SEQ ID NO: 515568 - DNA, 33 bp, Homo sapien
aaaattccactgagcacaaaactcacctttgaa

SEQ ID NO: 515569 - DNA, 33 bp, Homo sapien
gaaaagataagtcaaccgggaaatctagaccag

SEQ ID NO: 515570 - DNA, 33 bp, Homo sapien
gaaaagataagtcaactgggaaatctagaccag

SEQ ID NO: 515571 - DNA, 33 bp, Homo sapien
ttggctaatgcaagcaactttgtttatataggt

SEQ ID NO: 515572 - DNA, 33 bp, Homo sapien
ttggctaatgcaagcagctttgtttatataggt

SEQ ID NO: 515573 - DNA, 33 bp, Homo sapien
caactttcttcattctaaacattatagcaaaat

SEQ ID NO: 515574 - DNA, 33 bp, Homo sapien
caactttcttcattctcaacattatagcaaaat

SEQ ID NO: 515575 - DNA, 33 bp, Homo sapien
gcatgccagtaaaaggcagagctcactgggggc

SEQ ID NO: 515576 - DNA, 33 bp, Homo sapien
gcatgccagtaaaagggagagctcactgggggc

SEQ ID NO: 515577 - DNA, 33 bp, Homo sapien
caagtcgagacggctacgtgctaatgccttagc

SEQ ID NO: 515578 - DNA, 33 bp, Homo sapien
caagtcgagacggctatgtgctaatgccttagc

SEQ ID NO: 515579 - DNA, 33 bp, Homo sapien
ggcacacacctacctacagacatacagtttcag

SEQ ID NO: 515580 - DNA, 33 bp, Homo sapien
ggcacacacctacctatagacatacagtttcag

SEQ ID NO: 515581 - DNA, 33 bp, Homo sapien
tgcagggtcacctccacaacaaagctgagctgc

SEQ ID NO: 515582 - DNA, 33 bp, Homo sapien
tgcagggtcacctccagaacaaagctgagctgc

SEQ ID NO: 515583 - DNA, 33 bp, Homo sapien
agcacactgttgaaacggctggtaggaagacag

SEQ ID NO: 515584 - DNA, 33 bp, Homo sapien
agcacactgttgaaactgctggtaggaagacag

SEQ ID NO: 515585 - DNA, 33 bp, Homo sapien
agaatgaggttaaatacattgatggaggttatc

SEQ ID NO: 515586 - DNA, 33 bp, Homo sapien
agaatgaggttaaatagattgatggaggttatc

SEQ ID NO: 515587 - DNA, 33 bp, Homo sapien
cgtcactttggcttcccatgtccctgcccactg

SEQ ID NO: 515588 - DNA, 33 bp, Homo sapien
cgtcactttggcttcctatgtccctgcccactg

SEQ ID NO: 515589 - DNA, 33 bp, Homo sapien
ggtgagaagggccccacaactgtcactgtcacc

SEQ ID NO: 515590 - DNA, 33 bp, Homo sapien
ggtgagaagggccccataactgtcactgtcacc

SEQ ID NO: 515591 - DNA, 33 bp, Homo sapien
aagaaggctgggcaaacagaaaggcgcaaggac

SEQ ID NO: 515592 - DNA, 33 bp, Homo sapien
aagaaggctgggcaaagagaaaggcgcaaggac

SEQ ID NO: 515593 - DNA, 33 bp, Homo sapien
tgataaagatcagtaacgtaggataaacctcca

SEQ ID NO: 515594 - DNA, 33 bp, Homo sapien
tgataaagatcagtaatgtaggataaacctcca

SEQ ID NO: 515595 - DNA, 33 bp, Homo sapien
ataatcccactatcaaaaggatggtgccaaacc

SEQ ID NO: 515596 - DNA, 33 bp, Homo sapien
ataatcccactatcaagaggatggtgccaaacc

SEQ ID NO: 515597 - DNA, 33 bp, Homo sapien
gctgcaaattttgcaaacttttaacactctgct

SEQ ID NO: 515598 - DNA, 33 bp, Homo sapien
gctgcaaattttgcaagcttttaacactctgct

SEQ ID NO: 515599 - DNA, 33 bp, Homo sapien
ctgtatggttttaagaccacctcacgtttgtac

SEQ ID NO: 515600 - DNA, 33 bp, Homo sapien
ctgtatggttttaagatcacctcacgtttgtac

SEQ ID NO: 515601 - DNA, 33 bp, Homo sapien
aattttaggattcaaaagcaattaggggagagc

SEQ ID NO: 515602 - DNA, 33 bp, Homo sapien
aattttaggattcaaaggcaattaggggagagc

SEQ ID NO: 515603 - DNA, 33 bp, Homo sapien
agaattaagtgccaacagctaaaaccaaaaaga

SEQ ID NO: 515604 - DNA, 33 bp, Homo sapien
agaattaagtgccaactgctaaaaccaaaaaga

SEQ ID NO: 515605 - DNA, 33 bp, Homo sapien
ttgtcttgagtaacaacagtaagatggcactga

SEQ ID NO: 515606 - DNA, 33 bp, Homo sapien
ttgtcttgagtaacaagagtaagatggcactga

SEQ ID NO: 515607 - DNA, 33 bp, Homo sapien
caaaactggaaatagaactcttgtcaaagatat

SEQ ID NO: 515608 - DNA, 33 bp, Homo sapien
caaaactggaaatagatctcttgtcaaagatat

SEQ ID NO: 515609 - DNA, 33 bp, Homo sapien
gggaggagacagacaaggagagcttggaagggg

SEQ ID NO: 515610 - DNA, 33 bp, Homo sapien
gggaggagacagacaatgagagcttggaagggg

SEQ ID NO: 515611 - DNA, 33 bp, Homo sapien
tacccagagacttccacgtaaacaggacacaaa

SEQ ID NO: 515612 - DNA, 33 bp, Homo sapien
tacccagagacttccatgtaaacaggacacaaa

SEQ ID NO: 515613 - DNA, 33 bp, Homo sapien
gaaacttcaaaaggcaaaagagcagcagcctcc

SEQ ID NO: 515614 - DNA, 33 bp, Homo sapien
gaaacttcaaaaggcagaagagcagcagcctcc

SEQ ID NO: 515615 - DNA, 33 bp, Homo sapien
ctgcaggcaagtcatgcagtcaccctgactctg

SEQ ID NO: 515616 - DNA, 33 bp, Homo sapien
ctgcaggcaagtcatgtagtcaccctgactctg

SEQ ID NO: 515617 - DNA, 33 bp, Homo sapien
gctggggaagggaagacgctgtttctgacagaa

SEQ ID NO: 515618 - DNA, 33 bp, Homo sapien
gctggggaagggaagatgctgtttctgacagaa

SEQ ID NO: 515619 - DNA, 33 bp, Homo sapien
tgcaaggcctataaaacgtagacgttacctgac

SEQ ID NO: 515620 - DNA, 33 bp, Homo sapien
tgcaaggcctataaaatgtagacgttacctgac

SEQ ID NO: 515621 - DNA, 33 bp, Homo sapien
tttgcacctcaattcaatcataaatctattcat

SEQ ID NO: 515622 - DNA, 33 bp, Homo sapien
tttgcacctcaattcagtcataaatctattcat

SEQ ID NO: 515623 - DNA, 33 bp, Homo sapien
agggagaaagatttcacggccttgaagaccctt

SEQ ID NO: 515624 - DNA, 33 bp, Homo sapien
agggagaaagatttcatggccttgaagaccctt

SEQ ID NO: 515625 - DNA, 33 bp, Homo sapien
ttcattcctgctcaaacgggaaggcacatggtt

SEQ ID NO: 515626 - DNA, 33 bp, Homo sapien
ttcattcctgctcaaatgggaaggcacatggtt

SEQ ID NO: 515627 - DNA, 33 bp, Homo sapien
ggcacctacttataacccagtaaacctgtgaac

SEQ ID NO: 515628 - DNA, 33 bp, Homo sapien
ggcacctacttataactcagtaaacctgtgaac

SEQ ID NO: 515629 - DNA, 33 bp, Homo sapien
gggacagagggggccacgatagagtcctggagg

SEQ ID NO: 515630 - DNA, 33 bp, Homo sapien
gggacagagggggccatgatagagtcctggagg

SEQ ID NO: 515631 - DNA, 33 bp, Homo sapien
agatggggtcaatttaagtggactaacagggac

SEQ ID NO: 515632 - DNA, 33 bp, Homo sapien
agatggggtcaatttatgtggactaacagggac

SEQ ID NO: 515633 - DNA, 33 bp, Homo sapien
ccctatctgtgtactagctatcctatcctttta

SEQ ID NO: 515634 - DNA, 33 bp, Homo sapien
ccctatctgtgtactatctatcctatcctttta

SEQ ID NO: 515635 - DNA, 33 bp, Homo sapien
tgctcttggatgcaccactacctcttcctttgt

SEQ ID NO: 515636 - DNA, 33 bp, Homo sapien
tgctcttggatgcaccgctacctcttcctttgt

SEQ ID NO: 515637 - DNA, 33 bp, Homo sapien
ggtcaatgcagttcacacacagagccagattct

SEQ ID NO: 515638 - DNA, 33 bp, Homo sapien
ggtcaatgcagttcacgcacagagccagattct

SEQ ID NO: 515639 - DNA, 33 bp, Homo sapien
gggaattcatgtccacagaacttggccagcttg

SEQ ID NO: 515640 - DNA, 33 bp, Homo sapien
gggaattcatgtccacggaacttggccagcttg

SEQ ID NO: 515641 - DNA, 33 bp, Homo sapien
tagagccatgcctaagccttagaaaaaaagttc

SEQ ID NO: 515642 - DNA, 33 bp, Homo sapien
tagagccatgcctaagtcttagaaaaaaagttc

SEQ ID NO: 515643 - DNA, 33 bp, Homo sapien
ccatcttggcactgacagcatccgaagtgctag

SEQ ID NO: 515644 - DNA, 33 bp, Homo sapien
ccatcttggcactgacggcatccgaagtgctag

SEQ ID NO: 515645 - DNA, 33 bp, Homo sapien
ctgaaaccacaaacacgggctgggaaaatgaca

SEQ ID NO: 515646 - DNA, 33 bp, Homo sapien
ctgaaaccacaaacactggctgggaaaatgaca

SEQ ID NO: 515647 - DNA, 33 bp, Homo sapien
agtccaacaagacagaacgaaaaagaaacacct

SEQ ID NO: 515648 - DNA, 33 bp, Homo sapien
agtccaacaagacagaccgaaaaagaaacacct

SEQ ID NO: 515649 - DNA, 33 bp, Homo sapien
ggataatgtgatttagaatctggatggtgttag

SEQ ID NO: 515650 - DNA, 33 bp, Homo sapien
ggataatgtgatttaggatctggatggtgttag

SEQ ID NO: 515651 - DNA, 33 bp, Homo sapien
agggacaggcttacaaacaatagactacagaaa

SEQ ID NO: 515652 - DNA, 33 bp, Homo sapien
agggacaggcttacaagcaatagactacagaaa

SEQ ID NO: 515653 - DNA, 33 bp, Homo sapien
aacaatcaaaattacacatcagtggcaaactgc

SEQ ID NO: 515654 - DNA, 33 bp, Homo sapien
aacaatcaaaattacagatcagtggcaaactgc

SEQ ID NO: 515655 - DNA, 33 bp, Homo sapien
aaaggaagctgtcagaactaaggctgtgtggag

SEQ ID NO: 515656 - DNA, 33 bp, Homo sapien
aaaggaagctgtcagagctaaggctgtgtggag

SEQ ID NO: 515657 - DNA, 33 bp, Homo sapien
taccttttacaatggcagatataaaaggatttt

SEQ ID NO: 515658 - DNA, 33 bp, Homo sapien
taccttttacaatggcggatataaaaggatttt

SEQ ID NO: 515659 - DNA, 33 bp, Homo sapien
acctatgcaacaagcccccagtaaaatccctgg

SEQ ID NO: 515660 - DNA, 33 bp, Homo sapien
acctatgcaacaagcctccagtaaaatccctgg

SEQ ID NO: 515661 - DNA, 33 bp, Homo sapien
aagacgttgaaatagaaagaccatctctaagga

SEQ ID NO: 515662 - DNA, 33 bp, Homo sapien
aagacgttgaaatagatagaccatctctaagga

SEQ ID NO: 515663 - DNA, 33 bp, Homo sapien
gaaggagcagactgccagatggctcgatttgat

SEQ ID NO: 515664 - DNA, 33 bp, Homo sapien
gaaggagcagactgccggatggctcgatttgat

SEQ ID NO: 515665 - DNA, 33 bp, Homo sapien
ttgtgttctctctccacgaaaccagatcctgtt

SEQ ID NO: 515666 - DNA, 33 bp, Homo sapien
ttgtgttctctctccatgaaaccagatcctgtt

SEQ ID NO: 515667 - DNA, 33 bp, Homo sapien
cctgaccatcacagacgcaggtgccaagaacaa

SEQ ID NO: 515668 - DNA, 33 bp, Homo sapien
cctgaccatcacagactcaggtgccaagaacaa

SEQ ID NO: 515669 - DNA, 33 bp, Homo sapien
caaaatgggagttctacctaatggagttgctct

SEQ ID NO: 515670 - DNA, 33 bp, Homo sapien
caaaatgggagttctagctaatggagttgctct

SEQ ID NO: 515671 - DNA, 33 bp, Homo sapien
ggaatgaatgtccagagatcattatgtaggata

SEQ ID NO: 515672 - DNA, 33 bp, Homo sapien
ggaatgaatgtccagatatcattatgtaggata

SEQ ID NO: 515673 - DNA, 33 bp, Homo sapien
gctcaccaaaggcaatgacttgtccagaatcaa

SEQ ID NO: 515674 - DNA, 33 bp, Homo sapien
gctcaccaaaggcaattacttgtccagaatcaa

SEQ ID NO: 515675 - DNA, 33 bp, Homo sapien
gttacagaaggccagacaaaatgtaaatgtgag

SEQ ID NO: 515676 - DNA, 33 bp, Homo sapien
gttacagaaggccagagaaaatgtaaatgtgag

SEQ ID NO: 515677 - DNA, 33 bp, Homo sapien
agtaccacataacccacgtattgatcacttact

SEQ ID NO: 515678 - DNA, 33 bp, Homo sapien
agtaccacataacccaggtattgatcacttact

SEQ ID NO: 515679 - DNA, 33 bp, Homo sapien
acagcagcccagctgaccaagacccgagacaca

SEQ ID NO: 515680 - DNA, 33 bp, Homo sapien
acagcagcccagctgagcaagacccgagacaca

SEQ ID NO: 515681 - DNA, 33 bp, Homo sapien
gtgccatgatatcaatgaaacaaaattcctcat

SEQ ID NO: 515682 - DNA, 33 bp, Homo sapien
gtgccatgatatcaattaaacaaaattcctcat

SEQ ID NO: 515683 - DNA, 33 bp, Homo sapien
tcatattttgcaactaactgatcatctaacagt

SEQ ID NO: 515684 - DNA, 33 bp, Homo sapien
tcatattttgcaactagctgatcatctaacagt

SEQ ID NO: 515685 - DNA, 33 bp, Homo sapien
tcttcctctcgcctcagggtttctgctcttggc

SEQ ID NO: 515686 - DNA, 33 bp, Homo sapien
tcttcctctcgcctcatggtttctgctcttggc

SEQ ID NO: 515687 - DNA, 33 bp, Homo sapien
tccaggactctagcggcatcgaatgcttgttct

SEQ ID NO: 515688 - DNA, 33 bp, Homo sapien
tccaggactctagcggtatcgaatgcttgttct

SEQ ID NO: 515689 - DNA, 33 bp, Homo sapien
ccctttcctccttaaacgttggtgaactgagag

SEQ ID NO: 515690 - DNA, 33 bp, Homo sapien
ccctttcctccttaaatgttggtgaactgagag

SEQ ID NO: 515691 - DNA, 33 bp, Homo sapien
cagagaatatagtagaactgctatctgacaggt

SEQ ID NO: 515692 - DNA, 33 bp, Homo sapien
cagagaatatagtagacctgctatctgacaggt

SEQ ID NO: 515693 - DNA, 33 bp, Homo sapien
tagaagttttgagatacatatgcaccttgttct

SEQ ID NO: 515694 - DNA, 33 bp, Homo sapien
tagaagttttgagatatatatgcaccttgttct

SEQ ID NO: 515695 - DNA, 33 bp, Homo sapien
ggaattcttagtgaaactgcatgtattagggtt

SEQ ID NO: 515696 - DNA, 33 bp, Homo sapien
ggaattcttagtgaaattgcatgtattagggtt

SEQ ID NO: 515697 - DNA, 33 bp, Homo sapien
cctgcaaaactaggcacatattacttgaagcaa

SEQ ID NO: 515698 - DNA, 33 bp, Homo sapien
cctgcaaaactaggcatatattacttgaagcaa

SEQ ID NO: 515699 - DNA, 33 bp, Homo sapien
cccccaacaatcaggaaaagaaccatttctctt

SEQ ID NO: 515700 - DNA, 33 bp, Homo sapien
cccccaacaatcaggagaagaaccatttctctt

SEQ ID NO: 515701 - DNA, 33 bp, Homo sapien
gggaaaccaaatctcactcctgaggtctgcttt

SEQ ID NO: 515702 - DNA, 33 bp, Homo sapien
gggaaaccaaatctcattcctgaggtctgcttt

SEQ ID NO: 515703 - DNA, 33 bp, Homo sapien
gaggtctgcttttatccactaccatgcacagcc

SEQ ID NO: 515704 - DNA, 33 bp, Homo sapien
gaggtctgcttttatctactaccatgcacagcc

SEQ ID NO: 515705 - DNA, 33 bp, Homo sapien
tcttgtatggactttgaaaaaacaaatataaac

SEQ ID NO: 515706 - DNA, 33 bp, Homo sapien
tcttgtatggactttggaaaaacaaatataaac

SEQ ID NO: 515707 - DNA, 33 bp, Homo sapien
atatcaaaaaaaattacggcatctgctctccat

SEQ ID NO: 515708 - DNA, 33 bp, Homo sapien
atatcaaaaaaaattatggcatctgctctccat

SEQ ID NO: 515709 - DNA, 33 bp, Homo sapien
gtgactgaattaaacaaatcccaaagcctgccc

SEQ ID NO: 515710 - DNA, 33 bp, Homo sapien
gtgactgaattaaacacatcccaaagcctgccc

SEQ ID NO: 515711 - DNA, 33 bp, Homo sapien
ggcccccaccagatacactttaatctgccaggc

SEQ ID NO: 515712 - DNA, 33 bp, Homo sapien
ggcccccaccagataccctttaatctgccaggc

SEQ ID NO: 515713 - DNA, 33 bp, Homo sapien
catggtgaaactaaaacactcttctctactaaa

SEQ ID NO: 515714 - DNA, 33 bp, Homo sapien
catggtgaaactaaaatactcttctctactaaa

SEQ ID NO: 515715 - DNA, 33 bp, Homo sapien; identical to SEQ ID NO: 515713

SEQ ID NO: 515716 - DNA, 33 bp, Homo sapien; identical to SEQ ID NO: 515714

SEQ ID NO: 515717 - DNA, 33 bp, Homo sapien
ctctaatgactgatgacattaagcatcttttca

SEQ ID NO: 515718 - DNA, 33 bp, Homo sapien
ctctaatgactgatgatattaagcatcttttca

SEQ ID NO: 515719 - DNA, 33 bp, Homo sapien
tggaaatgttctcaaactagattatggtgaaag

SEQ ID NO: 515720 - DNA, 33 bp, Homo sapien
tggaaatgttctcaaattagattatggtgaaag

SEQ ID NO: 515721 - DNA, 33 bp, Homo sapien
gaacaggcatttgataaatcagtaggggaacta

SEQ ID NO: 515722 - DNA, 33 bp, Homo sapien
gaacaggcatttgatagatcagtaggggaacta

SEQ ID NO: 515723 - DNA, 33 bp, Homo sapien
acagcattgtcctatcagaactattgtttacag

SEQ ID NO: 515724 - DNA, 33 bp, Homo sapien
acagcattgtcctatcggaactattgtttacag

SEQ ID NO: 515725 - DNA, 33 bp, Homo sapien
ttggtgctgtgtttaacgaatgaacactgctct

SEQ ID NO: 515726 - DNA, 33 bp, Homo sapien
ttggtgctgtgtttaatgaatgaacactgctct

SEQ ID NO: 515727 - DNA, 33 bp, Homo sapien
ctagcactgtaagataataagagtgtgttgttc

SEQ ID NO: 515728 - DNA, 33 bp, Homo sapien
ctagcactgtaagatagtaagagtgtgttgttc

SEQ ID NO: 515729 - DNA, 33 bp, Homo sapien
tcaaggaatgaaaaaagtctggtagaggttgca

SEQ ID NO: 515730 - DNA, 33 bp, Homo sapien
tcaaggaatgaaaaaattctggtagaggttgca

SEQ ID NO: 515731 - DNA, 33 bp, Homo sapien
ccctggatgctcattcccctacttcactgggat

SEQ ID NO: 515732 - DNA, 33 bp, Homo sapien
ccctggatgctcattctcctacttcactgggat

SEQ ID NO: 515733 - DNA, 33 bp, Homo sapien
ctaaaggatctttaagaacgaggataaactata

SEQ ID NO: 515734 - DNA, 33 bp, Homo sapien
ctaaaggatctttaaggacgaggataaactata

SEQ ID NO: 515735 - DNA, 33 bp, Homo sapien
gatccagagaaatcgacgcttgagtatagagag

SEQ ID NO: 515736 - DNA, 33 bp, Homo sapien
gatccagagaaatcgatgcttgagtatagagag

SEQ ID NO: 515737 - DNA, 33 bp, Homo sapien
tattgaagaccagaacggtcatggtttgaaact

SEQ ID NO: 515738 - DNA, 33 bp, Homo sapien
tattgaagaccagaactgtcatggtttgaaact

SEQ ID NO: 515739 - DNA, 33 bp, Homo sapien
aaatgtaaatgaccggcagttgagcaatgatgg

SEQ ID NO: 515740 - DNA, 33 bp, Homo sapien
aaatgtaaatgaccggtagttgagcaatgatgg

SEQ ID NO: 515741 - DNA, 33 bp, Homo sapien
ctcatcacattaccaaatcaccactgacagagg

SEQ ID NO: 515742 - DNA, 33 bp, Homo sapien
ctcatcacattaccaagtcaccactgacagagg

SEQ ID NO: 515743 - DNA, 33 bp, Homo sapien
ttttactactctaataaaaccacagtatacatt

SEQ ID NO: 515744 - DNA, 33 bp, Homo sapien
ttttactactctaatagaaccacagtatacatt

SEQ ID NO: 515745 - DNA, 33 bp, Homo sapien
ctttaagaatgtttaacggacaaccacttggaa

SEQ ID NO: 515746 - DNA, 33 bp, Homo sapien
ctttaagaatgtttaatggacaaccacttggaa

SEQ ID NO: 515747 - DNA, 33 bp, Homo sapien
ttttaccatttagggacagtagtagtcaggaga

SEQ ID NO: 515748 - DNA, 33 bp, Homo sapien
ttttaccatttagggatagtagtagtcaggaga

SEQ ID NO: 515749 - DNA, 33 bp, Homo sapien
ttcccataaatgcttgcacttagcagtgagaac

SEQ ID NO: 515750 - DNA, 33 bp, Homo sapien
ttcccataaatgcttggacttagcagtgagaac

SEQ ID NO: 515751 - DNA, 33 bp, Homo sapien
atcatccactgagagaaagaacacaagaagagg

SEQ ID NO: 515752 - DNA, 33 bp, Homo sapien
atcatccactgagagagagaacacaagaagagg

SEQ ID NO: 515753 - DNA, 33 bp, Homo sapien
atagtcatattctaccaaaagaatggccagatc

SEQ ID NO: 515754 - DNA, 33 bp, Homo sapien
atagtcatattctacctaaagaatggccagatc

SEQ ID NO: 515755 - DNA, 33 bp, Homo sapien
caggccccttgcaaagactcaacttatttaggg

SEQ ID NO: 515756 - DNA, 33 bp, Homo sapien
caggccccttgcaaaggctcaacttatttaggg

SEQ ID NO: 515757 - DNA, 33 bp, Homo sapien
tgatatcacaatctacacatggattgcaaccca

SEQ ID NO: 515758 - DNA, 33 bp, Homo sapien
tgatatcacaatctactcatggattgcaaccca

SEQ ID NO: 515759 - DNA, 33 bp, Homo sapien
atgattttaggtggcacatgaacaatatttttt

SEQ ID NO: 515760 - DNA, 33 bp, Homo sapien
atgattttaggtggcatatgaacaatatttttt

SEQ ID NO: 515761 - DNA, 33 bp, Homo sapien
actgctgagataacagaattttcttcttgtata

SEQ ID NO: 515762 - DNA, 33 bp, Homo sapien
actgctgagataacagtattttcttcttgtata

SEQ ID NO: 515763 - DNA, 33 bp, Homo sapien
tcttggttaatgctgaagtcagtgttaaaaacc

SEQ ID NO: 515764 - DNA, 33 bp, Homo sapien
tcttggttaatgctgaggtcagtgttaaaaacc

SEQ ID NO: 515765 - DNA, 33 bp, Homo sapien
tgactggtgaagttacaggccctctgagtttaa

SEQ ID NO: 515766 - DNA, 33 bp, Homo sapien
tgactggtgaagttacgggccctctgagtttaa

SEQ ID NO: 515767 - DNA, 33 bp, Homo sapien
acaaagtaaatactcaatgagggttggtcatga

SEQ ID NO: 515768 - DNA, 33 bp, Homo sapien
acaaagtaaatactcagtgagggttggtcatga

SEQ ID NO: 515769 - DNA, 33 bp, Homo sapien
cggaagtatgtatgaacaggtgatatttccact

SEQ ID NO: 515770 - DNA, 33 bp, Homo sapien
cggaagtatgtatgaagaggtgatatttccact

SEQ ID NO: 515771 - DNA, 33 bp, Homo sapien
attttttgtgagatgcacacttttactaccctc

SEQ ID NO: 515772 - DNA, 33 bp, Homo sapien
attttttgtgagatgcgcacttttactaccctc

SEQ ID NO: 515773 - DNA, 33 bp, Homo sapien
atattttctttccaacaggcacctattatcaga

SEQ ID NO: 515774 - DNA, 33 bp, Homo sapien
atattttctttccaaccggcacctattatcaga

SEQ ID NO: 515775 - DNA, 33 bp, Homo sapien
attaacagtaattacaaaggacctattgtgttc

SEQ ID NO: 515776 - DNA, 33 bp, Homo sapien
attaacagtaattacagaggacctattgtgttc

SEQ ID NO: 515777 - DNA, 33 bp, Homo sapien
ctcagtacattcagacacatagactaacactag

SEQ ID NO: 515778 - DNA, 33 bp, Homo sapien
ctcagtacattcagacgcatagactaacactag

SEQ ID NO: 515779 - DNA, 33 bp, Homo sapien
tctttttcacaaaagaggtattggatctacaaa

SEQ ID NO: 515780 - DNA, 33 bp, Homo sapien
tctttttcacaaaagatgtattggatctacaaa

SEQ ID NO: 515781 - DNA, 33 bp, Homo sapien
ctagagggcaaagtaacgaggattctgaacata

SEQ ID NO: 515782 - DNA, 33 bp, Homo sapien
ctagagggcaaagtaaggaggattctgaacata

SEQ ID NO: 515783 - DNA, 33 bp, Homo sapien
aactctggtcatttaaaaacaaatacatttcaa

SEQ ID NO: 515784 - DNA, 33 bp, Homo sapien
aactctggtcatttaagaacaaatacatttcaa

SEQ ID NO: 515785 - DNA, 33 bp, Homo sapien
aagtcctatcacctccactggaagctgtatttg

SEQ ID NO: 515786 - DNA, 33 bp, Homo sapien
aagtcctatcacctccgctggaagctgtatttg

SEQ ID NO: 515787 - DNA, 33 bp, Homo sapien
tttttgttgttgttaaagaatcttgctctgtcg

SEQ ID NO: 515788 - DNA, 33 bp, Homo sapien
tttttgttgttgttaaggaatcttgctctgtcg

SEQ ID NO: 515789 - DNA, 33 bp, Homo sapien
attgacaggacatcacaacattatgaaaatcca

SEQ ID NO: 515790 - DNA, 33 bp, Homo sapien
attgacaggacatcacgacattatgaaaatcca

SEQ ID NO: 515791 - DNA, 33 bp, Homo sapien
agttagtagtattacaagccattttaagttggt

SEQ ID NO: 515792 - DNA, 33 bp, Homo sapien
agttagtagtattacaggccattttaagttggt

SEQ ID NO: 515793 - DNA, 33 bp, Homo sapien
tgcaattccatagcttcaaatgtctccttacag

SEQ ID NO: 515794 - DNA, 33 bp, Homo sapien
tgcaattccatagcttgaaatgtctccttacag

SEQ ID NO: 515795 - DNA, 33 bp, Homo sapien
tttaattccatagataggagagaagataaggaa

SEQ ID NO: 515796 - DNA, 33 bp, Homo sapien
tttaattccatagatatgagagaagataaggaa

SEQ ID NO: 515797 - DNA, 33 bp, Homo sapien
taagcttttaagtacaatacactcttctaaaat

SEQ ID NO: 515798 - DNA, 33 bp, Homo sapien
taagcttttaagtacagtacactcttctaaaat

SEQ ID NO: 515799 - DNA, 33 bp, Homo sapien
aaagaaacattccaagcctcacatcttttgtgc

SEQ ID NO: 515800 - DNA, 33 bp, Homo sapien
aaagaaacattccaagtctcacatcttttgtgc

SEQ ID NO: 515801 - DNA, 33 bp, Homo sapien
caaacaaatgtctgtaagtccatttcagcctca

SEQ ID NO: 515802 - DNA, 33 bp, Homo sapien
caaacaaatgtctgtaggtccatttcagcctca

SEQ ID NO: 515803 - DNA, 33 bp, Homo sapien
tgtgttaaatcttagaagtctttttctctccgt

SEQ ID NO: 515804 - DNA, 33 bp, Homo sapien
tgtgttaaatcttagaggtctttttctctccgt

SEQ ID NO: 515805 - DNA, 33 bp, Homo sapien
atttacaaggccataaatctggaatcttccaga

SEQ ID NO: 515806 - DNA, 33 bp, Homo sapien
atttacaaggccataagtctggaatcttccaga

SEQ ID NO: 515807 - DNA, 33 bp, Homo sapien
gaagaaaaaccactcacaatactaccttttggt

SEQ ID NO: 515808 - DNA, 33 bp, Homo sapien
gaagaaaaaccactcataatactaccttttggt

SEQ ID NO: 515809 - DNA, 33 bp, Homo sapien
tagtgatgtagttacacagagtggaagtagaat

SEQ ID NO: 515810 - DNA, 33 bp, Homo sapien
tagtgatgtagttacatagagtggaagtagaat

SEQ ID NO: 515811 - DNA, 33 bp, Homo sapien
tactttgaagtaaccaatagagtggcttgtctt

SEQ ID NO: 515812 - DNA, 33 bp, Homo sapien
tactttgaagtaaccagtagagtggcttgtctt

SEQ ID NO: 515813 - DNA, 33 bp, Homo sapien
acttgtgcagttgagtaaaatttgtcttttcca

SEQ ID NO: 515814 - DNA, 33 bp, Homo sapien
acttgtgcagttgagtgaaatttgtcttttcca

SEQ ID NO: 515815 - DNA, 33 bp, Homo sapien
aggaatatttgtggaccgagtgaggaaatgaat

SEQ ID NO: 515816 - DNA, 33 bp, Homo sapien
aggaatatttgtggactgagtgaggaaatgaat

SEQ ID NO: 515817 - DNA, 33 bp, Homo sapien
tgctatgtgctcattcaatcttcattgtcttcc

SEQ ID NO: 515818 - DNA, 33 bp, Homo sapien
tgctatgtgctcattccatcttcattgtcttcc

SEQ ID NO: 515819 - DNA, 33 bp, Homo sapien
ctctatttcctcttccaaccttcaatctgtaca

SEQ ID NO: 515820 - DNA, 33 bp, Homo sapien
ctctatttcctcttccgaccttcaatctgtaca

SEQ ID NO: 515821 - DNA, 33 bp, Homo sapien
ttgccacagatttaaaaccaaattcttccaaat

SEQ ID NO: 515822 - DNA, 33 bp, Homo sapien
ttgccacagatttaaatccaaattcttccaaat

SEQ ID NO: 515823 - DNA, 33 bp, Homo sapien
gttaataagttatcaccgagttagtaatattga

SEQ ID NO: 515824 - DNA, 33 bp, Homo sapien
gttaataagttatcactgagttagtaatattga

SEQ ID NO: 515825 - DNA, 33 bp, Homo sapien
cagcaagattcccaaaacttccaatttgaatga

SEQ ID NO: 515826 - DNA, 33 bp, Homo sapien
cagcaagattcccaaagcttccaatttgaatga

SEQ ID NO: 515827 - DNA, 33 bp, Homo sapien
atgcactgaatttctacaggttctatatatttc

SEQ ID NO: 515828 - DNA, 33 bp, Homo sapien
atgcactgaatttctagaggttctatatatttc

SEQ ID NO: 515829 - DNA, 33 bp, Homo sapien
gaataacaacctgtaacgtagtattgtataatg

SEQ ID NO: 515830 - DNA, 33 bp, Homo sapien
gaataacaacctgtaatgtagtattgtataatg

SEQ ID NO: 515831 - DNA, 33 bp, Homo sapien
catcttgtgactgctacagctgaaatgactgtt

SEQ ID NO: 515832 - DNA, 33 bp, Homo sapien
catcttgtgactgctatagctgaaatgactgtt

SEQ ID NO: 515833 - DNA, 33 bp, Homo sapien
caaattaccctgaataagtgtgtaggctccctc

SEQ ID NO: 515834 - DNA, 33 bp, Homo sapien
caaattaccctgaataggtgtgtaggctccctc

SEQ ID NO: 515835 - DNA, 33 bp, Homo sapien
tcacgtttgacaggaaaagaatggtatgtaagt

SEQ ID NO: 515836 - DNA, 33 bp, Homo sapien
tcacgtttgacaggaagagaatggtatgtaagt

SEQ ID NO: 515837 - DNA, 33 bp, Homo sapien
tgtatggatttagaaacgggacacaggctccat

SEQ ID NO: 515838 - DNA, 33 bp, Homo sapien
tgtatggatttagaaatgggacacaggctccat

SEQ ID NO: 515839 - DNA, 33 bp, Homo sapien
tatggtcactaaatgaataacaaggaaaataac

SEQ ID NO: 515840 - DNA, 33 bp, Homo sapien
tatggtcactaaatgagtaacaaggaaaataac

SEQ ID NO: 515841 - DNA, 33 bp, Homo sapien
tggtgacaaagaaagaacctgcttcagaaagaa

SEQ ID NO: 515842 - DNA, 33 bp, Homo sapien
tggtgacaaagaaagaccctgcttcagaaagaa

SEQ ID NO: 515843 - DNA, 33 bp, Homo sapien
gtggtaaaaagtgcaaattaaaaatgtctcgta

SEQ ID NO: 515844 - DNA, 33 bp, Homo sapien
gtggtaaaaagtgcaagttaaaaatgtctcgta

SEQ ID NO: 515845 - DNA, 33 bp, Homo sapien
acctgaaccgacactaccaagatgctgattatt

SEQ ID NO: 515846 - DNA, 33 bp, Homo sapien
acctgaaccgacactatcaagatgctgattatt

SEQ ID NO: 515847 - DNA, 33 bp, Homo sapien
atttttcttttcccgacgactgatggtgttgag

SEQ ID NO: 515848 - DNA, 33 bp, Homo sapien
atttttcttttcccgatgactgatggtgttgag

SEQ ID NO: 515849 - DNA, 33 bp, Homo sapien
ggcaatacctagtgctcacaaagatatcaaatg

SEQ ID NO: 515850 - DNA, 33 bp, Homo sapien
ggcaatacctagtgctgacaaagatatcaaatg

SEQ ID NO: 515851 - DNA, 33 bp, Homo sapien
aagcgttcggcaatagcagacgtgaaaataaaa

SEQ ID NO: 515852 - DNA, 33 bp, Homo sapien
aagcgttcggcaatagtagacgtgaaaataaaa

SEQ ID NO: 515853 - DNA, 33 bp, Homo sapien
gatactactacccaaaccttctgtgaatttttt

SEQ ID NO: 515854 - DNA, 33 bp, Homo sapien
gatactactacccaaagcttctgtgaatttttt

SEQ ID NO: 515855 - DNA, 33 bp, Homo sapien
ctagctactctacatgaaaagttgggagccttt

SEQ ID NO: 515856 - DNA, 33 bp, Homo sapien
ctagctactctacatggaaagttgggagccttt

SEQ ID NO: 515857 - DNA, 33 bp, Homo sapien
tctaaactaactgaaacgaaaagcagcagaagt

SEQ ID NO: 515858 - DNA, 33 bp, Homo sapien
tctaaactaactgaaatgaaaagcagcagaagt

SEQ ID NO: 515859 - DNA, 33 bp, Homo sapien
tacccccgatttgttacgggatggcaaaaagat

SEQ ID NO: 515860 - DNA, 33 bp, Homo sapien
tacccccgatttgttatgggatggcaaaaagat

SEQ ID NO: 515861 - DNA, 33 bp, Homo sapien
ccttaacatagattcaagataggaaaaaaggaa

SEQ ID NO: 515862 - DNA, 33 bp, Homo sapien
ccttaacatagattcaggataggaaaaaaggaa

SEQ ID NO: 515863 - DNA, 33 bp, Homo sapien
gttaacagagaatgcccaaaactggaaaaacaa

SEQ ID NO: 515864 - DNA, 33 bp, Homo sapien
gttaacagagaatgcctaaaactggaaaaacaa

SEQ ID NO: 515865 - DNA, 33 bp, Homo sapien
gagcgtaggaggcagccattttaacaatgaaaa

SEQ ID NO: 515866 - DNA, 33 bp, Homo sapien
gagcgtaggaggcagctattttaacaatgaaaa

SEQ ID NO: 515867 - DNA, 33 bp, Homo sapien
atttataaggctcaaacggaagccagaagaatg

SEQ ID NO: 515868 - DNA, 33 bp, Homo sapien
atttataaggctcaaatggaagccagaagaatg

SEQ ID NO: 515869 - DNA, 33 bp, Homo sapien
aacacttcagcaataacatcttaccataagtta

SEQ ID NO: 515870 - DNA, 33 bp, Homo sapien
aacacttcagcaataagatcttaccataagtta

SEQ ID NO: 515871 - DNA, 33 bp, Homo sapien
ggcagaggcagatggccagtatcatcctgaaag

SEQ ID NO: 515872 - DNA, 33 bp, Homo sapien
ggcagaggcagatggctagtatcatcctgaaag

SEQ ID NO: 515873 - DNA, 33 bp, Homo sapien
tgcaacagacaaggcaaaaaacctttagcagtg

SEQ ID NO: 515874 - DNA, 33 bp, Homo sapien
tgcaacagacaaggcagaaaacctttagcagtg

SEQ ID NO: 515875 - DNA, 33 bp, Homo sapien
tatagggagagatagacaatggatacacacaag

SEQ ID NO: 515876 - DNA, 33 bp, Homo sapien
tatagggagagatagagaatggatacacacaag

SEQ ID NO: 515877 - DNA, 33 bp, Homo sapien
agattatgtttgcttacatatttgaaagagtct

SEQ ID NO: 515878 - DNA, 33 bp, Homo sapien
agattatgtttgcttagatatttgaaagagtct

SEQ ID NO: 515879 - DNA, 33 bp, Homo sapien
gcatttgtgctttttaagatcacaatatgttgt

SEQ ID NO: 515880 - DNA, 33 bp, Homo sapien
gcatttgtgctttttaggatcacaatatgttgt

SEQ ID NO: 515881 - DNA, 33 bp, Homo sapien
atgtcatctgtcctgacggaaatacaaatcaaa

SEQ ID NO: 515882 - DNA, 33 bp, Homo sapien
atgtcatctgtcctgatggaaatacaaatcaaa

SEQ ID NO: 515883 - DNA, 33 bp, Homo sapien
caggtatctattgttacctaaactcttgttatc

SEQ ID NO: 515884 - DNA, 33 bp, Homo sapien
caggtatctattgttatctaaactcttgttatc

SEQ ID NO: 515885 - DNA, 33 bp, Homo sapien
atctcctcatgagctcaagaacagccgtttcat

SEQ ID NO: 515886 - DNA, 33 bp, Homo sapien
atctcctcatgagctccagaacagccgtttcat

SEQ ID NO: 515887 - DNA, 33 bp, Homo sapien
cagatgtaagttataacattcatggtagctgat

SEQ ID NO: 515888 - DNA, 33 bp, Homo sapien
cagatgtaagttataatattcatggtagctgat

SEQ ID NO: 515889 - DNA, 33 bp, Homo sapien
gaaaaggtattacataaaagctctgaccctaca

SEQ ID NO: 515890 - DNA, 33 bp, Homo sapien
gaaaaggtattacatagaagctctgaccctaca

SEQ ID NO: 515891 - DNA, 33 bp, Homo sapien
acaaattaatggtatcactccccaaaggacctc

SEQ ID NO: 515892 - DNA, 33 bp, Homo sapien
acaaattaatggtatcgctccccaaaggacctc

SEQ ID NO: 515893 - DNA, 33 bp, Homo sapien
aatctcacttgatgaaaactcttagttaaaatg

SEQ ID NO: 515894 - DNA, 33 bp, Homo sapien
aatctcacttgatgaagactcttagttaaaatg

SEQ ID NO: 515895 - DNA, 33 bp, Homo sapien
catgatcactgaagaccgcaacaataaagagaa

SEQ ID NO: 515896 - DNA, 33 bp, Homo sapien
catgatcactgaagactgcaacaataaagagaa

SEQ ID NO: 515897 - DNA, 33 bp, Homo sapien
ttggcagagaggcatacatactagcacactagt

SEQ ID NO: 515898 - DNA, 33 bp, Homo sapien
ttggcagagaggcatatatactagcacactagt

SEQ ID NO: 515899 - DNA, 33 bp, Homo sapien
tgctgcctgttagtcacggacactctttgctcc

SEQ ID NO: 515900 - DNA, 33 bp, Homo sapien
tgctgcctgttagtcatggacactctttgctcc

SEQ ID NO: 515901 - DNA, 33 bp, Homo sapien
tggttgcacacatttggaaatacactaaaagct

SEQ ID NO: 515902 - DNA, 33 bp, Homo sapien
tggttgcacacatttgtaaatacactaaaagct

SEQ ID NO: 515903 - DNA, 33 bp, Homo sapien
gtgaaaacagtaaagcagagtcagtacatattg

SEQ ID NO: 515904 - DNA, 33 bp, Homo sapien
gtgaaaacagtaaagcggagtcagtacatattg

SEQ ID NO: 515905 - DNA, 33 bp, Homo sapien
tcatcaacaaacatgcaattagcacttaaacat

SEQ ID NO: 515906 - DNA, 33 bp, Homo sapien
tcatcaacaaacatgccattagcacttaaacat

SEQ ID NO: 515907 - DNA, 33 bp, Homo sapien
acttgtgaaattactacagaactgattcatctc

SEQ ID NO: 515908 - DNA, 33 bp, Homo sapien
acttgtgaaattactatagaactgattcatctc

SEQ ID NO: 515909 - DNA, 33 bp, Homo sapien
ccttgaattatctatacgtctctcagaagataa

SEQ ID NO: 515910 - DNA, 33 bp, Homo sapien
ccttgaattatctatatgtctctcagaagataa

SEQ ID NO: 515911 - DNA, 33 bp, Homo sapien
gcaatatttgcggggcagaaggaaatacaaata

SEQ ID NO: 515912 - DNA, 33 bp, Homo sapien
gcaatatttgcggggcggaaggaaatacaaata

SEQ ID NO: 515913 - DNA, 33 bp, Homo sapien
gaaatgcctaaggaaagtaatcgaactatttct

SEQ ID NO: 515914 - DNA, 33 bp, Homo sapien
gaaatgcctaaggaaattaatcgaactatttct

SEQ ID NO: 515915 - DNA, 33 bp, Homo sapien
tccatcaggagcagagaaaaggagaagatggtg

SEQ ID NO: 515916 - DNA, 33 bp, Homo sapien
tccatcaggagcagagcaaaggagaagatggtg

SEQ ID NO: 515917 - DNA, 33 bp, Homo sapien
atccaaagctctattgcacagcaaattattctt

SEQ ID NO: 515918 - DNA, 33 bp, Homo sapien
atccaaagctctattgtacagcaaattattctt

SEQ ID NO: 515919 - DNA, 33 bp, Homo sapien
aagagggatgactaacagctaagacacgtcgcg

SEQ ID NO: 515920 - DNA, 33 bp, Homo sapien
aagagggatgactaaccgctaagacacgtcgcg

SEQ ID NO: 515921 - DNA, 33 bp, Homo sapien
ccaggaagtggaggaaagcggtaagagggatga

SEQ ID NO: 515922 - DNA, 33 bp, Homo sapien
ccaggaagtggaggaaggcggtaagagggatga

SEQ ID NO: 515923 - DNA, 33 bp, Homo sapien
atttataggttcctcaaagtacctgatgtccac

SEQ ID NO: 515924 - DNA, 33 bp, Homo sapien
atttataggttcctcacagtacctgatgtccac

SEQ ID NO: 515925 - DNA, 33 bp, Homo sapien
gcatctacattgatgactatctcttactaatct

SEQ ID NO: 515926 - DNA, 33 bp, Homo sapien
gcatctacattgatgagtatctcttactaatct

SEQ ID NO: 515927 - DNA, 33 bp, Homo sapien
ctgacgtaccatttacagaaacaacagttctgt

SEQ ID NO: 515928 - DNA, 33 bp, Homo sapien
ctgacgtaccatttacggaaacaacagttctgt

SEQ ID NO: 515929 - DNA, 33 bp, Homo sapien
ttagatttctagtacaacttgctaattggatta

SEQ ID NO: 515930 - DNA, 33 bp, Homo sapien
ttagatttctagtacaccttgctaattggatta

SEQ ID NO: 515931 - DNA, 33 bp, Homo sapien
taatctactatctctacggatttgtctattttg

SEQ ID NO: 515932 - DNA, 33 bp, Homo sapien
taatctactatctctatggatttgtctattttg

SEQ ID NO: 515933 - DNA, 33 bp, Homo sapien
tttggtggccggtaaacatagatgaagaaacta

SEQ ID NO: 515934 - DNA, 33 bp, Homo sapien
tttggtggccggtaaagatagatgaagaaacta

SEQ ID NO: 515935 - DNA, 33 bp, Homo sapien
gaaaatgctccatctacaggttaagaagccaaa

SEQ ID NO: 515936 - DNA, 33 bp, Homo sapien
gaaaatgctccatctataggttaagaagccaaa

SEQ ID NO: 515937 - DNA, 33 bp, Homo sapien
caaagaagctcagtcagggtaacttgcccgaga

SEQ ID NO: 515938 - DNA, 33 bp, Homo sapien
caaagaagctcagtcatggtaacttgcccgaga

SEQ ID NO: 515939 - DNA, 33 bp, Homo sapien
aagaatggagattacaatgaggtgatgaagacg

SEQ ID NO: 515940 - DNA, 33 bp, Homo sapien
aagaatggagattacagtgaggtgatgaagacg

SEQ ID NO: 515941 - DNA, 33 bp, Homo sapien
gactttccgggcaaagcataactcttaatgggc

SEQ ID NO: 515942 - DNA, 33 bp, Homo sapien
gactttccgggcaaagtataactcttaatgggc

SEQ ID NO: 515943 - DNA, 33 bp, Homo sapien
ttagaatcagcttccacgaaaatatctagtgtg

SEQ ID NO: 515944 - DNA, 33 bp, Homo sapien
ttagaatcagcttccatgaaaatatctagtgtg

SEQ ID NO: 515945 - DNA, 33 bp, Homo sapien
aggcccatggtgtttcccccgagagagttatag

SEQ ID NO: 515946 - DNA, 33 bp, Homo sapien
aggcccatggtgtttctcccgagagagttatag

SEQ ID NO: 515947 - DNA, 33 bp, Homo sapien
acattactaggaagccaactgggcaaggtggct

SEQ ID NO: 515948 - DNA, 33 bp, Homo sapien
acattactaggaagccgactgggcaaggtggct

SEQ ID NO: 515949 - DNA, 33 bp, Homo sapien
acaaagggctcattcaacgtgatccaaaacttc

SEQ ID NO: 515950 - DNA, 33 bp, Homo sapien
acaaagggctcattcagcgtgatccaaaacttc

SEQ ID NO: 515951 - DNA, 33 bp, Homo sapien
ggagaagtaccacccaacttccaatcactggca

SEQ ID NO: 515952 - DNA, 33 bp, Homo sapien
ggagaagtaccacccaccttccaatcactggca

SEQ ID NO: 515953 - DNA, 33 bp, Homo sapien
tagggaaaagtgctaaagacatgatatcaagta

SEQ ID NO: 515954 - DNA, 33 bp, Homo sapien
tagggaaaagtgctaatgacatgatatcaagta

SEQ ID NO: 515955 - DNA, 33 bp, Homo sapien
aagacaatattcaagggcaatctaatacagaga

SEQ ID NO: 515956 - DNA, 33 bp, Homo sapien
aagacaatattcaaggtcaatctaatacagaga

SEQ ID NO: 515957 - DNA, 33 bp, Homo sapien
tccctagaatgttgtcaagttaggcatctggct

SEQ ID NO: 515958 - DNA, 33 bp, Homo sapien
tccctagaatgttgtcgagttaggcatctggct

SEQ ID NO: 515959 - DNA, 33 bp, Homo sapien
ctagttttctgtagcaaattagttcaggtggta

SEQ ID NO: 515960 - DNA, 33 bp, Homo sapien
ctagttttctgtagcagattagttcaggtggta

SEQ ID NO: 515961 - DNA, 33 bp, Homo sapien
caaattatcctagcaactcgtactgtcagtcct

SEQ ID NO: 515962 - DNA, 33 bp, Homo sapien
caaattatcctagcaattcgtactgtcagtcct

SEQ ID NO: 515963 - DNA, 33 bp, Homo sapien
ctgctttgtagttaaccatagggtgataaaact

SEQ ID NO: 515964 - DNA, 33 bp, Homo sapien
ctgctttgtagttaactatagggtgataaaact

SEQ ID NO: 515965 - DNA, 33 bp, Homo sapien
gggacaaggtcattctaaaaccatgctaacatt

SEQ ID NO: 515966 - DNA, 33 bp, Homo sapien
gggacaaggtcattctgaaaccatgctaacatt

SEQ ID NO: 515967 - DNA, 33 bp, Homo sapien
cttcccctgaagtaaccactgttccgacttcaa

SEQ ID NO: 515968 - DNA, 33 bp, Homo sapien
cttcccctgaagtaactactgttccgacttcaa

SEQ ID NO: 515969 - DNA, 33 bp, Homo sapien
agtaacatggaattcacaagcctccttaatatt

SEQ ID NO: 515970 - DNA, 33 bp, Homo sapien
agtaacatggaattcataagcctccttaatatt

SEQ ID NO: 515971 - DNA, 33 bp, Homo sapien
aaatttctttgggacactgagagccaactgcaa

SEQ ID NO: 515972 - DNA, 33 bp, Homo sapien
aaatttctttgggacagtgagagccaactgcaa

SEQ ID NO: 515973 - DNA, 33 bp, Homo sapien
ctgcaatctcatgaataatcaagtgaagatgat

SEQ ID NO: 515974 - DNA, 33 bp, Homo sapien
ctgcaatctcatgaatgatcaagtgaagatgat

SEQ ID NO: 515975 - DNA, 33 bp, Homo sapien
cagtaatttatatttaccataatggcctagatg

SEQ ID NO: 515976 - DNA, 33 bp, Homo sapien
cagtaatttatatttatcataatggcctagatg

SEQ ID NO: 515977 - DNA, 33 bp, Homo sapien
cagccttgtctcactcaattactccaactggaa

SEQ ID NO: 515978 - DNA, 33 bp, Homo sapien
cagccttgtctcactcgattactccaactggaa

SEQ ID NO: 515979 - DNA, 33 bp, Homo sapien
caaatgtcactcaacaagagtctaaagaatcaa

SEQ ID NO: 515980 - DNA, 33 bp, Homo sapien
caaatgtcactcaacaggagtctaaagaatcaa

SEQ ID NO: 515981 - DNA, 33 bp, Homo sapien
catcaacaaagtgctacgcaaagttacacaagg

SEQ ID NO: 515982 - DNA, 33 bp, Homo sapien
catcaacaaagtgctatgcaaagttacacaagg

SEQ ID NO: 515983 - DNA, 33 bp, Homo sapien
tagcagttgtgttgaactggagggtataaaagg

SEQ ID NO: 515984 - DNA, 33 bp, Homo sapien
tagcagttgtgttgaagtggagggtataaaagg

SEQ ID NO: 515985 - DNA, 33 bp, Homo sapien
tctctcctatcccaccggaacactaaatataaa

SEQ ID NO: 515986 - DNA, 33 bp, Homo sapien
tctctcctatcccacctgaacactaaatataaa

SEQ ID NO: 515987 - DNA, 33 bp, Homo sapien
tgccaatttgttctcacattagtgcacaaatac

SEQ ID NO: 515988 - DNA, 33 bp, Homo sapien
tgccaatttgttctcatattagtgcacaaatac

SEQ ID NO: 515989 - DNA, 33 bp, Homo sapien
tgatgtcttacgtggacggcatcaggcaaagag

SEQ ID NO: 515990 - DNA, 33 bp, Homo sapien
tgatgtcttacgtggatggcatcaggcaaagag

SEQ ID NO: 515991 - DNA, 33 bp, Homo sapien
ctgtttcaattttcccgaagtcttgggctgtga

SEQ ID NO: 515992 - DNA, 33 bp, Homo sapien
ctgtttcaattttccctaagtcttgggctgtga

SEQ ID NO: 515993 - DNA, 33 bp, Homo sapien
gcacacacatagcatacaactttctggggtgtg

SEQ ID NO: 515994 - DNA, 33 bp, Homo sapien
gcacacacatagcatataactttctggggtgtg

SEQ ID NO: 515995 - DNA, 33 bp, Homo sapien
tgttttgttcactacaatatcactagtacctat

SEQ ID NO: 515996 - DNA, 33 bp, Homo sapien
tgttttgttcactacactatcactagtacctat

SEQ ID NO: 515997 - DNA, 33 bp, Homo sapien
cccagacagtaggatgcactgaaggacagcaga

SEQ ID NO: 515998 - DNA, 33 bp, Homo sapien
cccagacagtaggatggactgaaggacagcaga

SEQ ID NO: 515999 - DNA, 33 bp, Homo sapien
cctgctaacctatgagcatgaagctaatttgcc

SEQ ID NO: 516000 - DNA, 33 bp, Homo sapien
cctgctaacctatgaggatgaagctaatttgcc

SEQ ID NO: 516001 - DNA, 33 bp, Homo sapien
cctcaagtgacacttacggtattttaagtcaat

SEQ ID NO: 516002 - DNA, 33 bp, Homo sapien
cctcaagtgacacttatggtattttaagtcaat

SEQ ID NO: 516003 - DNA, 33 bp, Homo sapien
ggctacactgcctagaaatctttatgtctgtta

SEQ ID NO: 516004 - DNA, 33 bp, Homo sapien
ggctacactgcctagatatctttatgtctgtta

SEQ ID NO: 516005 - DNA, 33 bp, Homo sapien
gtcaaagtttgtgagacgaggggaccaaggggt

SEQ ID NO: 516006 - DNA, 33 bp, Homo sapien
gtcaaagtttgtgagatgaggggaccaaggggt

SEQ ID NO: 516007 - DNA, 33 bp, Homo sapien
atgcgtgcctgatgagcatagtaaattttggcc

SEQ ID NO: 516008 - DNA, 33 bp, Homo sapien
atgcgtgcctgatgagtatagtaaattttggcc

SEQ ID NO: 516009 - DNA, 33 bp, Homo sapien
agcatgggaaaaataacgaaaccatggcagcaa

SEQ ID NO: 516010 - DNA, 33 bp, Homo sapien
agcatgggaaaaataatgaaaccatggcagcaa

SEQ ID NO: 516011 - DNA, 33 bp, Homo sapien
caaacaaagcaagaaaataagcagtagcacctt

SEQ ID NO: 516012 - DNA, 33 bp, Homo sapien
caaacaaagcaagaaagtaagcagtagcacctt

SEQ ID NO: 516013 - DNA, 33 bp, Homo sapien
tataacgggagagagacgagtaaatgaaggatt

SEQ ID NO: 516014 - DNA, 33 bp, Homo sapien
tataacgggagagagatgagtaaatgaaggatt

SEQ ID NO: 516015 - DNA, 33 bp, Homo sapien
acacgttcagaatgaaactacttgcccaaagtc

SEQ ID NO: 516016 - DNA, 33 bp, Homo sapien
acacgttcagaatgaagctacttgcccaaagtc

SEQ ID NO: 516017 - DNA, 33 bp, Homo sapien
aatatcaattgacacactagtttataactttat

SEQ ID NO: 516018 - DNA, 33 bp, Homo sapien
aatatcaattgacacattagtttataactttat

SEQ ID NO: 516019 - DNA, 33 bp, Homo sapien
gcaacagcagaagtgaagactggcagcacatga

SEQ ID NO: 516020 - DNA, 33 bp, Homo sapien
gcaacagcagaagtgatgactggcagcacatga

SEQ ID NO: 516021 - DNA, 33 bp, Homo sapien
tgacaaagggaaacgcaagggttggtggcaaca

SEQ ID NO: 516022 - DNA, 33 bp, Homo sapien
tgacaaagggaaacgcgagggttggtggcaaca

SEQ ID NO: 516023 - DNA, 33 bp, Homo sapien
tctcatctgagccattaaagggagcctctcatc

SEQ ID NO: 516024 - DNA, 33 bp, Homo sapien
tctcatctgagccattgaagggagcctctcatc

SEQ ID NO: 516025 - DNA, 33 bp, Homo sapien
gactgctcctctgaaacggaattgatgaatttt

SEQ ID NO: 516026 - DNA, 33 bp, Homo sapien
gactgctcctctgaaatggaattgatgaatttt

SEQ ID NO: 516027 - DNA, 33 bp, Homo sapien
taaactatgaaaatccaaattttacaaacatat

SEQ ID NO: 516028 - DNA, 33 bp, Homo sapien
taaactatgaaaatccgaattttacaaacatat

SEQ ID NO: 516029 - DNA, 33 bp, Homo sapien
catgcccacggttacaacagttagctacccgtg

SEQ ID NO: 516030 - DNA, 33 bp, Homo sapien
catgcccacggttacaccagttagctacccgtg

SEQ ID NO: 516031 - DNA, 33 bp, Homo sapien
gacctgacacaaggaaagtccatgcttgataat

SEQ ID NO: 516032 - DNA, 33 bp, Homo sapien
gacctgacacaaggaatgtccatgcttgataat

SEQ ID NO: 516033 - DNA, 33 bp, Homo sapien
acttctgaaaaccgatgaatgtcacatattatg

SEQ ID NO: 516034 - DNA, 33 bp, Homo sapien
acttctgaaaaccgattaatgtcacatattatg

SEQ ID NO: 516035 - DNA, 33 bp, Homo sapien
tactacagagattcaccgaggtagacactgctg

SEQ ID NO: 516036 - DNA, 33 bp, Homo sapien
tactacagagattcactgaggtagacactgctg

SEQ ID NO: 516037 - DNA, 33 bp, Homo sapien
aactctatagtcatttcaaacacccttttcctg

SEQ ID NO: 516038 - DNA, 33 bp, Homo sapien
aactctatagtcattttaaacacccttttcctg

SEQ ID NO: 516039 - DNA, 33 bp, Homo sapien
tgactcattttacaaccgaaaagaaatggagct

SEQ ID NO: 516040 - DNA, 33 bp, Homo sapien
tgactcattttacaactgaaaagaaatggagct

SEQ ID NO: 516041 - DNA, 33 bp, Homo sapien
attctgtaaccttaagaagatggcagaaactgc

SEQ ID NO: 516042 - DNA, 33 bp, Homo sapien
attctgtaaccttaaggagatggcagaaactgc

SEQ ID NO: 516043 - DNA, 33 bp, Homo sapien
caaaggctttgcaagaaaaaacatccactttcc

SEQ ID NO: 516044 - DNA, 33 bp, Homo sapien
caaaggctttgcaagagaaaacatccactttcc

SEQ ID NO: 516045 - DNA, 33 bp, Homo sapien
ttcagtggcagactcaatcaccttatctccccc

SEQ ID NO: 516046 - DNA, 33 bp, Homo sapien
ttcagtggcagactcagtcaccttatctccccc

SEQ ID NO: 516047 - DNA, 33 bp, Homo sapien
acactctctggctctcaaagagttatagcacct

SEQ ID NO: 516048 - DNA, 33 bp, Homo sapien
acactctctggctctccaagagttatagcacct

SEQ ID NO: 516049 - DNA, 33 bp, Homo sapien
cttttcaggataagcacagaagagttcattccc

SEQ ID NO: 516050 - DNA, 33 bp, Homo sapien
cttttcaggataagcatagaagagttcattccc

SEQ ID NO: 516051 - DNA, 33 bp, Homo sapien
tgccattacattcaatgactttaactgatattc

SEQ ID NO: 516052 - DNA, 33 bp, Homo sapien
tgccattacattcaattactttaactgatattc

SEQ ID NO: 516053 - DNA, 33 bp, Homo sapien
ccagtgctgacctggaatcaatggctctgccca

SEQ ID NO: 516054 - DNA, 33 bp, Homo sapien
ccagtgctgacctggattcaatggctctgccca

SEQ ID NO: 516055 - DNA, 33 bp, Homo sapien
gtaacagactaaatgacgcatttccaggtgctc

SEQ ID NO: 516056 - DNA, 33 bp, Homo sapien
gtaacagactaaatgatgcatttccaggtgctc

SEQ ID NO: 516057 - DNA, 33 bp, Homo sapien
cgaaaacagtcagtggaaagggattcagggaag

SEQ ID NO: 516058 - DNA, 33 bp, Homo sapien
cgaaaacagtcagtgggaagggattcagggaag

SEQ ID NO: 516059 - DNA, 33 bp, Homo sapien
ggaaatggggaggtgcaagtcaaaggatgtaaa

SEQ ID NO: 516060 - DNA, 33 bp, Homo sapien
ggaaatggggaggtgcgagtcaaaggatgtaaa

SEQ ID NO: 516061 - DNA, 33 bp, Homo sapien
cgaggttatagcatgaggttatgggacacatat

SEQ ID NO: 516062 - DNA, 33 bp, Homo sapien
cgaggttatagcatgatgttatgggacacatat

SEQ ID NO: 516063 - DNA, 33 bp, Homo sapien
gctgaaagcattcagaaggacagagacttcatc

SEQ ID NO: 516064 - DNA, 33 bp, Homo sapien
gctgaaagcattcagatggacagagacttcatc

SEQ ID NO: 516065 - DNA, 33 bp, Homo sapien
tagagcttcctctttaaagattcatagaacggg

SEQ ID NO: 516066 - DNA, 33 bp, Homo sapien
tagagcttcctctttagagattcatagaacggg

SEQ ID NO: 516067 - DNA, 33 bp, Homo sapien
atccaactttgaacataagctgactctattggt

SEQ ID NO: 516068 - DNA, 33 bp, Homo sapien
atccaactttgaacatgagctgactctattggt

SEQ ID NO: 516069 - DNA, 33 bp, Homo sapien
ctgaaggaactgggaacgagttgctcactaagc

SEQ ID NO: 516070 - DNA, 33 bp, Homo sapien
ctgaaggaactgggaatgagttgctcactaagc

SEQ ID NO: 516071 - DNA, 33 bp, Homo sapien
cagatacagaatgcacagtatttgccgcagaat

SEQ ID NO: 516072 - DNA, 33 bp, Homo sapien
cagatacagaatgcacggtatttgccgcagaat

SEQ ID NO: 516073 - DNA, 33 bp, Homo sapien
attactgcgtttcaacaatgaacttaaattgtc

SEQ ID NO: 516074 - DNA, 33 bp, Homo sapien
attactgcgtttcaacgatgaacttaaattgtc

SEQ ID NO: 516075 - DNA, 33 bp, Homo sapien
tgcagctagatgtggccgatgatagaagaatgt

SEQ ID NO: 516076 - DNA, 33 bp, Homo sapien
tgcagctagatgtggctgatgatagaagaatgt

SEQ ID NO: 516077 - DNA, 33 bp, Homo sapien
aataagcacacaaaagaactcttgctagtactg

SEQ ID NO: 516078 - DNA, 33 bp, Homo sapien
aataagcacacaaaaggactcttgctagtactg

SEQ ID NO: 516079 - DNA, 33 bp, Homo sapien
tggaagtctgttcagccaggaaatgcaagagag

SEQ ID NO: 516080 - DNA, 33 bp, Homo sapien
tggaagtctgttcagcgaggaaatgcaagagag

SEQ ID NO: 516081 - DNA, 33 bp, Homo sapien
tgtaaatcaaggaatacgtactcaatggggaag

SEQ ID NO: 516082 - DNA, 33 bp, Homo sapien
tgtaaatcaaggaatatgtactcaatggggaag

SEQ ID NO: 516083 - DNA, 33 bp, Homo sapien
atagccataatcattgacaatccaggcacaaaa

SEQ ID NO: 516084 - DNA, 33 bp, Homo sapien
atagccataatcattggcaatccaggcacaaaa

SEQ ID NO: 516085 - DNA, 33 bp, Homo sapien
agagtctgaataaaaccatgatagaaataagga

SEQ ID NO: 516086 - DNA, 33 bp, Homo sapien
agagtctgaataaaacgatgatagaaataagga

SEQ ID NO: 516087 - DNA, 33 bp, Homo sapien
gctggtcatgatagaaagagaggccattcaatg

SEQ ID NO: 516088 - DNA, 33 bp, Homo sapien
gctggtcatgatagaaggagaggccattcaatg

SEQ ID NO: 516089 - DNA, 33 bp, Homo sapien
gtattgcctctctttcaatgggtaaggtaagca

SEQ ID NO: 516090 - DNA, 33 bp, Homo sapien
gtattgcctctctttcgatgggtaaggtaagca

SEQ ID NO: 516091 - DNA, 33 bp, Homo sapien
gtgactctgagacatacgcaggtgtgggaaacc

SEQ ID NO: 516092 - DNA, 33 bp, Homo sapien
gtgactctgagacatatgcaggtgtgggaaacc

SEQ ID NO: 516093 - DNA, 33 bp, Homo sapien
ggcagagatatgacaaccaagtgaagaataccc

SEQ ID NO: 516094 - DNA, 33 bp, Homo sapien
ggcagagatatgacaatcaagtgaagaataccc

SEQ ID NO: 516095 - DNA, 33 bp, Homo sapien
attgcttcgggtagtacgaacattttagcaata

SEQ ID NO: 516096 - DNA, 33 bp, Homo sapien
attgcttcgggtagtatgaacattttagcaata

SEQ ID NO: 516097 - DNA, 33 bp, Homo sapien
tagaaaattaggtgaccatatatgtgtgggttt

SEQ ID NO: 516098 - DNA, 33 bp, Homo sapien
tagaaaattaggtgactatatatgtgtgggttt

SEQ ID NO: 516099 - DNA, 33 bp, Homo sapien
tagggtgcaagataacaacccaacttcctttat

SEQ ID NO: 516100 - DNA, 33 bp, Homo sapien
tagggtgcaagataacgacccaacttcctttat

SEQ ID NO: 516101 - DNA, 33 bp, Homo sapien
attctaagatacgaggcaatggttcattgtggt

SEQ ID NO: 516102 - DNA, 33 bp, Homo sapien
attctaagatacgaggtaatggttcattgtggt

SEQ ID NO: 516103 - DNA, 33 bp, Homo sapien
ttccattgctagcaaccgaaaggattctgaaaa

SEQ ID NO: 516104 - DNA, 33 bp, Homo sapien
ttccattgctagcaactgaaaggattctgaaaa

SEQ ID NO: 516105 - DNA, 33 bp, Homo sapien
actcatggccactagaacctggttataagtggc

SEQ ID NO: 516106 - DNA, 33 bp, Homo sapien
actcatggccactagatcctggttataagtggc

SEQ ID NO: 516107 - DNA, 33 bp, Homo sapien
ctagcattcatgaccccgagcattttcttcttc

SEQ ID NO: 516108 - DNA, 33 bp, Homo sapien
ctagcattcatgaccctgagcattttcttcttc

SEQ ID NO: 516109 - DNA, 33 bp, Homo sapien
catggaggctaagtgacagttgtttaactcctc

SEQ ID NO: 516110 - DNA, 33 bp, Homo sapien
catggaggctaagtgatagttgtttaactcctc

SEQ ID NO: 516111 - DNA, 33 bp, Homo sapien
tctctgaagcacaaagaaagattacaagttcca

SEQ ID NO: 516112 - DNA, 33 bp, Homo sapien
tctctgaagcacaaagtaagattacaagttcca

SEQ ID NO: 516113 - DNA, 33 bp, Homo sapien
aagtggatatgagaaacgagctgttttctatta

SEQ ID NO: 516114 - DNA, 33 bp, Homo sapien
aagtggatatgagaaatgagctgttttctatta

SEQ ID NO: 516115 - DNA, 33 bp, Homo sapien
ctctctgcctaaagaaagtttagggtcctatac

SEQ ID NO: 516116 - DNA, 33 bp, Homo sapien
ctctctgcctaaagaaggtttagggtcctatac

SEQ ID NO: 516117 - DNA, 33 bp, Homo sapien
caccccagccgatgtcaaggaacagttaagtgc

SEQ ID NO: 516118 - DNA, 33 bp, Homo sapien
caccccagccgatgtcgaggaacagttaagtgc

SEQ ID NO: 516119 - DNA, 33 bp, Homo sapien
taagttctctttgcaaagtaacagtagccaaca

SEQ ID NO: 516120 - DNA, 33 bp, Homo sapien
taagttctctttgcaacgtaacagtagccaaca

SEQ ID NO: 516121 - DNA, 33 bp, Homo sapien
agggattgttggtagagtaagtctctgtgctgt

SEQ ID NO: 516122 - DNA, 33 bp, Homo sapien
agggattgttggtagattaagtctctgtgctgt

SEQ ID NO: 516123 - DNA, 33 bp, Homo sapien
taagcatggtcaatacgccatgattagacacag

SEQ ID NO: 516124 - DNA, 33 bp, Homo sapien
taagcatggtcaatactccatgattagacacag

SEQ ID NO: 516125 - DNA, 33 bp, Homo sapien
cctatcttggctccaacgtgtaaaactatgact

SEQ ID NO: 516126 - DNA, 33 bp, Homo sapien
cctatcttggctccaatgtgtaaaactatgact

SEQ ID NO: 516127 - DNA, 33 bp, Homo sapien
gggaatggctttgaaaatcaagtagcaagtcca

SEQ ID NO: 516128 - DNA, 33 bp, Homo sapien
gggaatggctttgaaagtcaagtagcaagtcca

SEQ ID NO: 516129 - DNA, 33 bp, Homo sapien
accaagatggaaaagacgaatcaaagtaggctt

SEQ ID NO: 516130 - DNA, 33 bp, Homo sapien
accaagatggaaaagatgaatcaaagtaggctt

SEQ ID NO: 516131 - DNA, 33 bp, Homo sapien
cctcagaccatgtaagactattataactccacc

SEQ ID NO: 516132 - DNA, 33 bp, Homo sapien
cctcagaccatgtaaggctattataactccacc

SEQ ID NO: 516133 - DNA, 33 bp, Homo sapien
ttcaaggacctctccacctggaagcaggaggca

SEQ ID NO: 516134 - DNA, 33 bp, Homo sapien
ttcaaggacctctccatctggaagcaggaggca

SEQ ID NO: 516135 - DNA, 33 bp, Homo sapien
tgtaagacttgccattcaagccaaagaccagtg

SEQ ID NO: 516136 - DNA, 33 bp, Homo sapien
tgtaagacttgccattgaagccaaagaccagtg

SEQ ID NO: 516137 - DNA, 33 bp, Homo sapien
gggtgctgtgggtgaacaccttcctctacaaat

SEQ ID NO: 516138 - DNA, 33 bp, Homo sapien
gggtgctgtgggtgaataccttcctctacaaat

SEQ ID NO: 516139 - DNA, 33 bp, Homo sapien
ctccagcctgatagcaaagcaaagatctcatct

SEQ ID NO: 516140 - DNA, 33 bp, Homo sapien
ctccagcctgatagcagagcaaagatctcatct

SEQ ID NO: 516141 - DNA, 33 bp, Homo sapien
aagaatgtgcattttaacaagtttccaggtgat

SEQ ID NO: 516142 - DNA, 33 bp, Homo sapien
aagaatgtgcattttagcaagtttccaggtgat

SEQ ID NO: 516143 - DNA, 33 bp, Homo sapien
tagtagagcctgcgtacgatgtacaagcaaaca

SEQ ID NO: 516144 - DNA, 33 bp, Homo sapien
tagtagagcctgcgtatgatgtacaagcaaaca

SEQ ID NO: 516145 - DNA, 33 bp, Homo sapien
ccacctccaggtgataagtgagagaagggaaga

SEQ ID NO: 516146 - DNA, 33 bp, Homo sapien
ccacctccaggtgataggtgagagaagggaaga

SEQ ID NO: 516147 - DNA, 33 bp, Homo sapien
gaggccagttaggagtcaaaatctacaatagga

SEQ ID NO: 516148 - DNA, 33 bp, Homo sapien
gaggccagttaggagttaaaatctacaatagga

SEQ ID NO: 516149 - DNA, 33 bp, Homo sapien
aggcaggaagttcctacaggcagggacaggaag

SEQ ID NO: 516150 - DNA, 33 bp, Homo sapien
aggcaggaagttcctataggcagggacaggaag

SEQ ID NO: 516151 - DNA, 33 bp, Homo sapien
ggttaggatttgggcaaagagaatacaacagga

SEQ ID NO: 516152 - DNA, 33 bp, Homo sapien
ggttaggatttgggcacagagaatacaacagga

SEQ ID NO: 516153 - DNA, 33 bp, Homo sapien
ccccggtgtctgtgataagaagggcctggcaca

SEQ ID NO: 516154 - DNA, 33 bp, Homo sapien
ccccggtgtctgtgatgagaagggcctggcaca

SEQ ID NO: 516155 - DNA, 33 bp, Homo sapien
atgttctttttgattcaccatcactaggttctt

SEQ ID NO: 516156 - DNA, 33 bp, Homo sapien
atgttctttttgattcgccatcactaggttctt

SEQ ID NO: 516157 - DNA, 33 bp, Homo sapien
caggctccttaaatacaagtcctagcaaaagaa

SEQ ID NO: 516158 - DNA, 33 bp, Homo sapien
caggctccttaaatacgagtcctagcaaaagaa

SEQ ID NO: 516159 - DNA, 33 bp, Homo sapien
aagacctttctttatgcatccctgactcatgcc

SEQ ID NO: 516160 - DNA, 33 bp, Homo sapien
aagacctttctttatggatccctgactcatgcc

SEQ ID NO: 516161 - DNA, 33 bp, Homo sapien
tcattccatcacctccaaagggggtctgccaga

SEQ ID NO: 516162 - DNA, 33 bp, Homo sapien
tcattccatcacctccgaagggggtctgccaga

SEQ ID NO: 516163 - DNA, 33 bp, Homo sapien
tttaaaagacaaaaggaactgtgagccgagaag

SEQ ID NO: 516164 - DNA, 33 bp, Homo sapien
tttaaaagacaaaagggactgtgagccgagaag

SEQ ID NO: 516165 - DNA, 33 bp, Homo sapien
taatctactgtcataaccatgtatgcactttag

SEQ ID NO: 516166 - DNA, 33 bp, Homo sapien
taatctactgtcataatcatgtatgcactttag

SEQ ID NO: 516167 - DNA, 33 bp, Homo sapien
cacccaatcaatcctcagaaatatatttttaac

SEQ ID NO: 516168 - DNA, 33 bp, Homo sapien
cacccaatcaatcctcggaaatatatttttaac

SEQ ID NO: 516169 - DNA, 33 bp, Homo sapien
accacttcttaatttacgccatgtcatgactga

SEQ ID NO: 516170 - DNA, 33 bp, Homo sapien
accacttcttaatttatgccatgtcatgactga

SEQ ID NO: 516171 - DNA, 33 bp, Homo sapien
agacaaataaaagatgacaattgatgtactcaa

SEQ ID NO: 516172 - DNA, 33 bp, Homo sapien
agacaaataaaagatggcaattgatgtactcaa

SEQ ID NO: 516173 - DNA, 33 bp, Homo sapien
caaggttcatcagagagaaagggccacatattt

SEQ ID NO: 516174 - DNA, 33 bp, Homo sapien
caaggttcatcagagataaagggccacatattt

SEQ ID NO: 516175 - DNA, 33 bp, Homo sapien
tatttagcaagaagggaattaaatgcagcattg

SEQ ID NO: 516176 - DNA, 33 bp, Homo sapien
tatttagcaagaagggtattaaatgcagcattg

SEQ ID NO: 516177 - DNA, 33 bp, Homo sapien
tggttttcagttctcacggccatttggattacg

SEQ ID NO: 516178 - DNA, 33 bp, Homo sapien
tggttttcagttctcatggccatttggattacg

SEQ ID NO: 516179 - DNA, 33 bp, Homo sapien
tcctctatccacacagcctaaccattttccaag

SEQ ID NO: 516180 - DNA, 33 bp, Homo sapien
tcctctatccacacaggctaaccattttccaag

SEQ ID NO: 516181 - DNA, 33 bp, Homo sapien
tccgctatactattcactcccatgcacactagc

SEQ ID NO: 516182 - DNA, 33 bp, Homo sapien
tccgctatactattcattcccatgcacactagc

SEQ ID NO: 516183 - DNA, 33 bp, Homo sapien
agaattccaaaaatcacgtgtacactaattgta

SEQ ID NO: 516184 - DNA, 33 bp, Homo sapien
agaattccaaaaatcatgtgtacactaattgta

SEQ ID NO: 516185 - DNA, 33 bp, Homo sapien
gatcagcattttggccacaacaatttgaccaat

SEQ ID NO: 516186 - DNA, 33 bp, Homo sapien
gatcagcattttggccgcaacaatttgaccaat

SEQ ID NO: 516187 - DNA, 33 bp, Homo sapien
ggtgaaatagaaggcaaacacctcgcactggag

SEQ ID NO: 516188 - DNA, 33 bp, Homo sapien
ggtgaaatagaaggcacacacctcgcactggag

SEQ ID NO: 516189 - DNA, 33 bp, Homo sapien
tgaatcatcaaagcagaaaaatttgtgtgtgtg

SEQ ID NO: 516190 - DNA, 33 bp, Homo sapien
tgaatcatcaaagcaggaaaatttgtgtgtgtg

SEQ ID NO: 516191 - DNA, 33 bp, Homo sapien
acaatcctggagacaaaggttatttactgcatg

SEQ ID NO: 516192 - DNA, 33 bp, Homo sapien
acaatcctggagacaagggttatttactgcatg

SEQ ID NO: 516193 - DNA, 33 bp, Homo sapien
ccgatttgatcaagtgaaagagagggcatcagt

SEQ ID NO: 516194 - DNA, 33 bp, Homo sapien
ccgatttgatcaagtggaagagagggcatcagt

SEQ ID NO: 516195 - DNA, 33 bp, Homo sapien
tgaagacagaagaacccggatgcgtttatattt

SEQ ID NO: 516196 - DNA, 33 bp, Homo sapien
tgaagacagaagaacctggatgcgtttatattt

SEQ ID NO: 516197 - DNA, 33 bp, Homo sapien
ctgtaaaccctaaacaacatcacaagtatcctt

SEQ ID NO: 516198 - DNA, 33 bp, Homo sapien
ctgtaaaccctaaacaccatcacaagtatcctt

SEQ ID NO: 516199 - DNA, 33 bp, Homo sapien
gcacagcatatataacaaaggtatacgtgagat

SEQ ID NO: 516200 - DNA, 33 bp, Homo sapien
gcacagcatatataacgaaggtatacgtgagat

SEQ ID NO: 516201 - DNA, 33 bp, Homo sapien
catactccgggaagatgagcttaattgctctag

SEQ ID NO: 516202 - DNA, 33 bp, Homo sapien
catactccgggaagattagcttaattgctctag

SEQ ID NO: 516203 - DNA, 33 bp, Homo sapien
tgaggtcatgggataaaagaagtgtggccttca

SEQ ID NO: 516204 - DNA, 33 bp, Homo sapien
tgaggtcatgggataagagaagtgtggccttca

SEQ ID NO: 516205 - DNA, 33 bp, Homo sapien
ctcttcaacagacaaacgacttagtcaacaagt

SEQ ID NO: 516206 - DNA, 33 bp, Homo sapien
ctcttcaacagacaaatgacttagtcaacaagt

SEQ ID NO: 516207 - DNA, 33 bp, Homo sapien
gaaaagcaggaggttgaattgataacaagaggt

SEQ ID NO: 516208 - DNA, 33 bp, Homo sapien
gaaaagcaggaggttggattgataacaagaggt

SEQ ID NO: 516209 - DNA, 33 bp, Homo sapien
gttatacttgaggtgaaaggtggacacagtcac

SEQ ID NO: 516210 - DNA, 33 bp, Homo sapien
gttatacttgaggtgagaggtggacacagtcac

SEQ ID NO: 516211 - DNA, 33 bp, Homo sapien
ccccacacaggacagaacctggaatcactttct

SEQ ID NO: 516212 - DNA, 33 bp, Homo sapien
ccccacacaggacagagcctggaatcactttct

SEQ ID NO: 516213 - DNA, 33 bp, Homo sapien
ctcacctacataaatccagaaggtgaacaagta

SEQ ID NO: 516214 - DNA, 33 bp, Homo sapien
ctcacctacataaatcgagaaggtgaacaagta

SEQ ID NO: 516215 - DNA, 33 bp, Homo sapien
aggtgtttatgacttagatcaaccattgatttg

SEQ ID NO: 516216 - DNA, 33 bp, Homo sapien
aggtgtttatgacttatatcaaccattgatttg

SEQ ID NO: 516217 - DNA, 33 bp, Homo sapien
attgagtgactccaacaaagtgctttggagagg

SEQ ID NO: 516218 - DNA, 33 bp, Homo sapien
attgagtgactccaacgaagtgctttggagagg

SEQ ID NO: 516219 - DNA, 33 bp, Homo sapien
tctgtgggatgtgtaccattttcttttacagcc

SEQ ID NO: 516220 - DNA, 33 bp, Homo sapien
tctgtgggatgtgtactattttcttttacagcc

SEQ ID NO: 516221 - DNA, 33 bp, Homo sapien
atggagcaaggtaataagtggtagcagtttctc

SEQ ID NO: 516222 - DNA, 33 bp, Homo sapien
atggagcaaggtaatacgtggtagcagtttctc

SEQ ID NO: 516223 - DNA, 33 bp, Homo sapien
atgttttcagtgtcaacgtaagggattggagtt

SEQ ID NO: 516224 - DNA, 33 bp, Homo sapien
atgttttcagtgtcaatgtaagggattggagtt

SEQ ID NO: 516225 - DNA, 33 bp, Homo sapien
aaaaaaaaaaatgagcaagatgttaccaaggac

SEQ ID NO: 516226 - DNA, 33 bp, Homo sapien
aaaaaaaaaaatgagcgagatgttaccaaggac

SEQ ID NO: 516227 - DNA, 33 bp, Homo sapien
tctctagcatggagacagaatgaggatgagcag

SEQ ID NO: 516228 - DNA, 33 bp, Homo sapien
tctctagcatggagacggaatgaggatgagcag

SEQ ID NO: 516229 - DNA, 33 bp, Homo sapien
tgagaaaagtgaatacccataaagtgatcccca

SEQ ID NO: 516230 - DNA, 33 bp, Homo sapien
tgagaaaagtgaatactcataaagtgatcccca

SEQ ID NO: 516231 - DNA, 33 bp, Homo sapien
ggttgcaggggccacaaacataagtgcctccag

SEQ ID NO: 516232 - DNA, 33 bp, Homo sapien
ggttgcaggggccacagacataagtgcctccag

SEQ ID NO: 516233 - DNA, 33 bp, Homo sapien
tatgtctctttatacccgccatctgctgggcac

SEQ ID NO: 516234 - DNA, 33 bp, Homo sapien
tatgtctctttatacctgccatctgctgggcac

SEQ ID NO: 516235 - DNA, 33 bp, Homo sapien
actactaattcttgaaagacattttgtggtgtg

SEQ ID NO: 516236 - DNA, 33 bp, Homo sapien
actactaattcttgaaggacattttgtggtgtg

SEQ ID NO: 516237 - DNA, 33 bp, Homo sapien
tgtagtgtagattcttgaacagaactgaatctc

SEQ ID NO: 516238 - DNA, 33 bp, Homo sapien
tgtagtgtagattctttaacagaactgaatctc

SEQ ID NO: 516239 - DNA, 33 bp, Homo sapien
cacagacaaatctgccattgtaaagagattcag

SEQ ID NO: 516240 - DNA, 33 bp, Homo sapien
cacagacaaatctgccgttgtaaagagattcag

SEQ ID NO: 516241 - DNA, 33 bp, Homo sapien
atggtccagatggctcaaggctaaggttccagc

SEQ ID NO: 516242 - DNA, 33 bp, Homo sapien
atggtccagatggctcgaggctaaggttccagc

SEQ ID NO: 516243 - DNA, 33 bp, Homo sapien
cagcagaattgtagggcaaacaagcacagtcac

SEQ ID NO: 516244 - DNA, 33 bp, Homo sapien
cagcagaattgtagggtaaacaagcacagtcac

SEQ ID NO: 516245 - DNA, 33 bp, Homo sapien
gaccaatactggcagacggtggttattggagaa

SEQ ID NO: 516246 - DNA, 33 bp, Homo sapien
gaccaatactggcagatggtggttattggagaa

SEQ ID NO: 516247 - DNA, 33 bp, Homo sapien
gacaaaagtcaacaaactttacatgaacctcac

SEQ ID NO: 516248 - DNA, 33 bp, Homo sapien
gacaaaagtcaacaaagtttacatgaacctcac

SEQ ID NO: 516249 - DNA, 33 bp, Homo sapien
ctgaaatgcaaactcccaactcgatatacttcc

SEQ ID NO: 516250 - DNA, 33 bp, Homo sapien
ctgaaatgcaaactcctaactcgatatacttcc

SEQ ID NO: 516251 - DNA, 33 bp, Homo sapien
aggaccctcaatgaccaaattattcaagccata

SEQ ID NO: 516252 - DNA, 33 bp, Homo sapien
aggaccctcaatgaccgaattattcaagccata

SEQ ID NO: 516253 - DNA, 33 bp, Homo sapien
tcatactcaacacccaatccaaaatatatccaa

SEQ ID NO: 516254 - DNA, 33 bp, Homo sapien
tcatactcaacacccagtccaaaatatatccaa

SEQ ID NO: 516255 - DNA, 33 bp, Homo sapien
gaatccaggtggcaggcaatactcagcagactg

SEQ ID NO: 516256 - DNA, 33 bp, Homo sapien
gaatccaggtggcaggtaatactcagcagactg

SEQ ID NO: 516257 - DNA, 33 bp, Homo sapien
ggagaagacctgctgacgagctggctttgggtt

SEQ ID NO: 516258 - DNA, 33 bp, Homo sapien
ggagaagacctgctgatgagctggctttgggtt

SEQ ID NO: 516259 - DNA, 33 bp, Homo sapien
gatgtgtgattcaatacgcaaattaaatattta

SEQ ID NO: 516260 - DNA, 33 bp, Homo sapien
gatgtgtgattcaatatgcaaattaaatattta

SEQ ID NO: 516261 - DNA, 33 bp, Homo sapien
ttttctgttcctgttacacctgagttctttaac

SEQ ID NO: 516262 - DNA, 33 bp, Homo sapien
ttttctgttcctgttatacctgagttctttaac

SEQ ID NO: 516263 - DNA, 33 bp, Homo sapien
agaaattgcatatcaaatccaaactcttagcta

SEQ ID NO: 516264 - DNA, 33 bp, Homo sapien
agaaattgcatatcaactccaaactcttagcta

SEQ ID NO: 516265 - DNA, 33 bp, Homo sapien
aattcagggtcaaacaggatcatttacaacaat

SEQ ID NO: 516266 - DNA, 33 bp, Homo sapien
aattcagggtcaaacatgatcatttacaacaat

SEQ ID NO: 516267 - DNA, 33 bp, Homo sapien
attctgaccatttagaccattgattgattgatt

SEQ ID NO: 516268 - DNA, 33 bp, Homo sapien
attctgaccatttagatcattgattgattgatt

SEQ ID NO: 516269 - DNA, 33 bp, Homo sapien
actaatacaccatccaatgcaggaagaaggcca

SEQ ID NO: 516270 - DNA, 33 bp, Homo sapien
actaatacaccatccagtgcaggaagaaggcca

SEQ ID NO: 516271 - DNA, 33 bp, Homo sapien
cctagacatcaggcaagttgcccaccaagaaag

SEQ ID NO: 516272 - DNA, 33 bp, Homo sapien
cctagacatcaggcaatttgcccaccaagaaag

SEQ ID NO: 516273 - DNA, 33 bp, Homo sapien
tctgattacaaattgaagccctcttaagagttc

SEQ ID NO: 516274 - DNA, 33 bp, Homo sapien
tctgattacaaattgaggccctcttaagagttc

SEQ ID NO: 516275 - DNA, 33 bp, Homo sapien
tctttcttatgaacaccaattaatcttaggttt

SEQ ID NO: 516276 - DNA, 33 bp, Homo sapien
tctttcttatgaacactaattaatcttaggttt

SEQ ID NO: 516277 - DNA, 33 bp, Homo sapien
gctctgttccaattgccatctctcactcttcac

SEQ ID NO: 516278 - DNA, 33 bp, Homo sapien
gctctgttccaattgctatctctcactcttcac

SEQ ID NO: 516279 - DNA, 33 bp, Homo sapien
ctaatcctctgaatcaggaaactgttaattcac

SEQ ID NO: 516280 - DNA, 33 bp, Homo sapien
ctaatcctctgaatcatgaaactgttaattcac

SEQ ID NO: 516281 - DNA, 33 bp, Homo sapien
aggttagaagtttgacccaggtctcattcagct

SEQ ID NO: 516282 - DNA, 33 bp, Homo sapien
aggttagaagtttgactcaggtctcattcagct

SEQ ID NO: 516283 - DNA, 33 bp, Homo sapien
tcgtattgttttaagccactaactttgtggtag

SEQ ID NO: 516284 - DNA, 33 bp, Homo sapien
tcgtattgttttaagctactaactttgtggtag

SEQ ID NO: 516285 - DNA, 33 bp, Homo sapien
taagcacactaatttacgtgagttttatatttt

SEQ ID NO: 516286 - DNA, 33 bp, Homo sapien
taagcacactaatttatgtgagttttatatttt

SEQ ID NO: 516287 - DNA, 33 bp, Homo sapien
gcagaagctcttctgcaaataaaccatgaagtt

SEQ ID NO: 516288 - DNA, 33 bp, Homo sapien
gcagaagctcttctgcgaataaaccatgaagtt

SEQ ID NO: 516289 - DNA, 33 bp, Homo sapien
attatcgaaactatgacgccagggcagagagaa

SEQ ID NO: 516290 - DNA, 33 bp, Homo sapien
attatcgaaactatgatgccagggcagagagaa

SEQ ID NO: 516291 - DNA, 33 bp, Homo sapien
ggataatgcagacaagaaggtaaaccatacaca

SEQ ID NO: 516292 - DNA, 33 bp, Homo sapien
ggataatgcagacaaggaggtaaaccatacaca

SEQ ID NO: 516293 - DNA, 33 bp, Homo sapien
tatggtgaaaaagagcaatggtctcaatatgct

SEQ ID NO: 516294 - DNA, 33 bp, Homo sapien
tatggtgaaaaagagcgatggtctcaatatgct

SEQ ID NO: 516295 - DNA, 33 bp, Homo sapien
atgtgtagtttgctgacattttctcctattctg

SEQ ID NO: 516296 - DNA, 33 bp, Homo sapien
atgtgtagtttgctgatattttctcctattctg

SEQ ID NO: 516297 - DNA, 33 bp, Homo sapien
ctacagggaaaaggaacaatgcaggagagttgt

SEQ ID NO: 516298 - DNA, 33 bp, Homo sapien
ctacagggaaaaggaataatgcaggagagttgt

SEQ ID NO: 516299 - DNA, 33 bp, Homo sapien
ccatccctacttgaacaacagaccaaattaatt

SEQ ID NO: 516300 - DNA, 33 bp, Homo sapien
ccatccctacttgaacgacagaccaaattaatt

SEQ ID NO: 516301 - DNA, 33 bp, Homo sapien
ccttctaacccaacaactgagtttttatgcaca

SEQ ID NO: 516302 - DNA, 33 bp, Homo sapien
ccttctaacccaacaagtgagtttttatgcaca

SEQ ID NO: 516303 - DNA, 33 bp, Homo sapien
tccttcatattagtcaaagaaaacctatgatat

SEQ ID NO: 516304 - DNA, 33 bp, Homo sapien
tccttcatattagtcagagaaaacctatgatat

SEQ ID NO: 516305 - DNA, 33 bp, Homo sapien
aattaatgccatttccagagttaatcagcagtg

SEQ ID NO: 516306 - DNA, 33 bp, Homo sapien
aattaatgccatttccggagttaatcagcagtg

SEQ ID NO: 516307 - DNA, 33 bp, Homo sapien
atctggatcattctgaagtgtttctcagaggtg

SEQ ID NO: 516308 - DNA, 33 bp, Homo sapien
atctggatcattctgacgtgtttctcagaggtg

SEQ ID NO: 516309 - DNA, 33 bp, Homo sapien
atttgctaacttgataatactaaggacagtaat

SEQ ID NO: 516310 - DNA, 33 bp, Homo sapien
atttgctaacttgatagtactaaggacagtaat

SEQ ID NO: 516311 - DNA, 33 bp, Homo sapien
ctatgtgttttctgaacaaattagtcacatgag

SEQ ID NO: 516312 - DNA, 33 bp, Homo sapien
ctatgtgttttctgaataaattagtcacatgag

SEQ ID NO: 516313 - DNA, 33 bp, Homo sapien
ggtggtgatttagaaagagagaatgattgaaag

SEQ ID NO: 516314 - DNA, 33 bp, Homo sapien
ggtggtgatttagaaatagagaatgattgaaag

SEQ ID NO: 516315 - DNA, 33 bp, Homo sapien
caatctgtgtgcagctaaacatttccagttttg

SEQ ID NO: 516316 - DNA, 33 bp, Homo sapien
caatctgtgtgcagctgaacatttccagttttg

SEQ ID NO: 516317 - DNA, 33 bp, Homo sapien
acttcaagtataggtacgttgttaatgcagaaa

SEQ ID NO: 516318 - DNA, 33 bp, Homo sapien
acttcaagtataggtatgttgttaatgcagaaa

SEQ ID NO: 516319 - DNA, 33 bp, Homo sapien
tcatgaggaccaaatcaccattttggtatgagc

SEQ ID NO: 516320 - DNA, 33 bp, Homo sapien
tcatgaggaccaaatcgccattttggtatgagc

SEQ ID NO: 516321 - DNA, 33 bp, Homo sapien
ctctggcaacataatagaaaagttcaccacatc

SEQ ID NO: 516322 - DNA, 33 bp, Homo sapien
ctctggcaacataatataaaagttcaccacatc

SEQ ID NO: 516323 - DNA, 33 bp, Homo sapien
tgtcccagatggcagagcccttttcaacctggg

SEQ ID NO: 516324 - DNA, 33 bp, Homo sapien
tgtcccagatggcagatcccttttcaacctggg

SEQ ID NO: 516325 - DNA, 33 bp, Homo sapien
tcgtttgcttactctccgacacttgttccaaac

SEQ ID NO: 516326 - DNA, 33 bp, Homo sapien
tcgtttgcttactctctgacacttgttccaaac

SEQ ID NO: 516327 - DNA, 33 bp, Homo sapien
gcgccccgggactgcaaatcctttaaacagagg

SEQ ID NO: 516328 - DNA, 33 bp, Homo sapien
gcgccccgggactgcagatcctttaaacagagg

SEQ ID NO: 516329 - DNA, 33 bp, Homo sapien
tcttagtggaacttcaccttgactgtacagtat

SEQ ID NO: 516330 - DNA, 33 bp, Homo sapien
tcttagtggaacttcatcttgactgtacagtat

SEQ ID NO: 516331 - DNA, 33 bp, Homo sapien
tcacaatgttgagtaaagctctgaacttcgtgg

SEQ ID NO: 516332 - DNA, 33 bp, Homo sapien
tcacaatgttgagtaaggctctgaacttcgtgg

SEQ ID NO: 516333 - DNA, 33 bp, Homo sapien
gctatatcgtgtaagactatgtgcatgattatt

SEQ ID NO: 516334 - DNA, 33 bp, Homo sapien
gctatatcgtgtaagagtatgtgcatgattatt

SEQ ID NO: 516335 - DNA, 33 bp, Homo sapien
taacatgtgacatatacatttttgaaaatcatc

SEQ ID NO: 516336 - DNA, 33 bp, Homo sapien
taacatgtgacatatagatttttgaaaatcatc

SEQ ID NO: 516337 - DNA, 33 bp, Homo sapien
aagggttaaaggctgactatggcttagtgtgtt

SEQ ID NO: 516338 - DNA, 33 bp, Homo sapien
aagggttaaaggctgattatggcttagtgtgtt

SEQ ID NO: 516339 - DNA, 33 bp, Homo sapien
attcagggaggtttacaaggaattgcttattaa

SEQ ID NO: 516340 - DNA, 33 bp, Homo sapien
attcagggaggtttaccaggaattgcttattaa

SEQ ID NO: 516341 - DNA, 33 bp, Homo sapien
atatgaagagagttcagtaaaggttttacttac

SEQ ID NO: 516342 - DNA, 33 bp, Homo sapien
atatgaagagagttcattaaaggttttacttac

SEQ ID NO: 516343 - DNA, 33 bp, Homo sapien
gtttccagtcatttccaaagttacttaggccaa

SEQ ID NO: 516344 - DNA, 33 bp, Homo sapien
gtttccagtcatttccgaagttacttaggccaa

SEQ ID NO: 516345 - DNA, 33 bp, Homo sapien
actccgggtagttaacacatagagaaggcaagt

SEQ ID NO: 516346 - DNA, 33 bp, Homo sapien
actccgggtagttaacgcatagagaaggcaagt

SEQ ID NO: 516347 - DNA, 33 bp, Homo sapien
ctggcccaagggttacaacaatgtcatcacatt

SEQ ID NO: 516348 - DNA, 33 bp, Homo sapien
ctggcccaagggttaccacaatgtcatcacatt

SEQ ID NO: 516349 - DNA, 33 bp, Homo sapien
acaatatcaaaggataacttccaggcctctcaa

SEQ ID NO: 516350 - DNA, 33 bp, Homo sapien
acaatatcaaaggataccttccaggcctctcaa

SEQ ID NO: 516351 - DNA, 33 bp, Homo sapien
ttggttggttatttaacgtgaaagagatgtgta

SEQ ID NO: 516352 - DNA, 33 bp, Homo sapien
ttggttggttatttaatgtgaaagagatgtgta

SEQ ID NO: 516353 - DNA, 33 bp, Homo sapien
gatctgacatggtttagcaatagcattgagcat

SEQ ID NO: 516354 - DNA, 33 bp, Homo sapien
gatctgacatggtttatcaatagcattgagcat

SEQ ID NO: 516355 - DNA, 33 bp, Homo sapien
caaggccactctattacgtatgagtcttccttt

SEQ ID NO: 516356 - DNA, 33 bp, Homo sapien
caaggccactctattatgtatgagtcttccttt

SEQ ID NO: 516357 - DNA, 33 bp, Homo sapien
ttctaactacatggtaagttctgtaaggacaga

SEQ ID NO: 516358 - DNA, 33 bp, Homo sapien
ttctaactacatggtaggttctgtaaggacaga

SEQ ID NO: 516359 - DNA, 33 bp, Homo sapien
gctgaacttccacatacataggaacaaaggtac

SEQ ID NO: 516360 - DNA, 33 bp, Homo sapien
gctgaacttccacatatataggaacaaaggtac

SEQ ID NO: 516361 - DNA, 33 bp, Homo sapien
gtttaatttcttccccaaaagcaaaaataaaca

SEQ ID NO: 516362 - DNA, 33 bp, Homo sapien
gtttaatttcttccccgaaagcaaaaataaaca

SEQ ID NO: 516363 - DNA, 33 bp, Homo sapien
tggaaagttagttggccagaagggaggctatgg

SEQ ID NO: 516364 - DNA, 33 bp, Homo sapien
tggaaagttagttggctagaagggaggctatgg

SEQ ID NO: 516365 - DNA, 33 bp, Homo sapien
attgtccaaaaatcacaaagttagtaactagac

SEQ ID NO: 516366 - DNA, 33 bp, Homo sapien
attgtccaaaaatcacgaagttagtaactagac

SEQ ID NO: 516367 - DNA, 33 bp, Homo sapien
ttcaggcaggaaatgaagattttatacttgggg

SEQ ID NO: 516368 - DNA, 33 bp, Homo sapien
ttcaggcaggaaatgatgattttatacttgggg

SEQ ID NO: 516369 - DNA, 33 bp, Homo sapien
gctggagacagaaaggaagaaacatgagttaga

SEQ ID NO: 516370 - DNA, 33 bp, Homo sapien
gctggagacagaaagggagaaacatgagttaga

SEQ ID NO: 516371 - DNA, 33 bp, Homo sapien
ggttcccactgagttgaaagttggagaacagct

SEQ ID NO: 516372 - DNA, 33 bp, Homo sapien
ggttcccactgagttggaagttggagaacagct

SEQ ID NO: 516373 - DNA, 33 bp, Homo sapien
tgggcatgacctcaggcaagcaagctctctgta

SEQ ID NO: 516374 - DNA, 33 bp, Homo sapien
tgggcatgacctcaggtaagcaagctctctgta

SEQ ID NO: 516375 - DNA, 33 bp, Homo sapien
gattacacacagacccaggagaatatataaaag

SEQ ID NO: 516376 - DNA, 33 bp, Homo sapien
gattacacacagacccgggagaatatataaaag

SEQ ID NO: 516377 - DNA, 33 bp, Homo sapien
cttgctgtctttcataccattaaatttcttcat

SEQ ID NO: 516378 - DNA, 33 bp, Homo sapien
cttgctgtctttcatatcattaaatttcttcat

SEQ ID NO: 516379 - DNA, 33 bp, Homo sapien
tacagaaaggttgaaaatacttctgccttccta

SEQ ID NO: 516380 - DNA, 33 bp, Homo sapien
tacagaaaggttgaaagtacttctgccttccta

SEQ ID NO: 516381 - DNA, 33 bp, Homo sapien
aaagataagttgggaacggaaagtgtgaaagga

SEQ ID NO: 516382 - DNA, 33 bp, Homo sapien
aaagataagttgggaatggaaagtgtgaaagga

SEQ ID NO: 516383 - DNA, 33 bp, Homo sapien
aacatgtaaacttgatcatataacttcatgaat

SEQ ID NO: 516384 - DNA, 33 bp, Homo sapien
aacatgtaaacttgatgatataacttcatgaat

SEQ ID NO: 516385 - DNA, 33 bp, Homo sapien
gtaagctgttaacatcccacaagtacagaaata

SEQ ID NO: 516386 - DNA, 33 bp, Homo sapien
gtaagctgttaacatctcacaagtacagaaata

SEQ ID NO: 516387 - DNA, 33 bp, Homo sapien
tcataactatagtaaccaagagttaaggaacag

SEQ ID NO: 516388 - DNA, 33 bp, Homo sapien
tcataactatagtaacgaagagttaaggaacag

SEQ ID NO: 516389 - DNA, 33 bp, Homo sapien
gagaagttcataaagcaatcaagtagaaaaaag

SEQ ID NO: 516390 - DNA, 33 bp, Homo sapien
gagaagttcataaagcgatcaagtagaaaaaag

SEQ ID NO: 516391 - DNA, 33 bp, Homo sapien
taacctcttacaagggacaaatcatttacgttt

SEQ ID NO: 516392 - DNA, 33 bp, Homo sapien
taacctcttacaaggggcaaatcatttacgttt

SEQ ID NO: 516393 - DNA, 33 bp, Homo sapien
acttttcgtgataaaaaatgtaaaagttatcca

SEQ ID NO: 516394 - DNA, 33 bp, Homo sapien
acttttcgtgataaaagatgtaaaagttatcca

SEQ ID NO: 516395 - DNA, 33 bp, Homo sapien
cttcctgggaaaaacaatgtttcactgacaaat

SEQ ID NO: 516396 - DNA, 33 bp, Homo sapien
cttcctgggaaaaacattgtttcactgacaaat

SEQ ID NO: 516397 - DNA, 33 bp, Homo sapien
tagtctgaattacacagcctgaataaatgttct

SEQ ID NO: 516398 - DNA, 33 bp, Homo sapien
tagtctgaattacacatcctgaataaatgttct

SEQ ID NO: 516399 - DNA, 33 bp, Homo sapien
aatgtcagatgccctacagtttcttcaaataac

SEQ ID NO: 516400 - DNA, 33 bp, Homo sapien
aatgtcagatgccctatagtttcttcaaataac

SEQ ID NO: 516401 - DNA, 33 bp, Homo sapien
gaagaaagagggagtaagggaacatttgggcaa

SEQ ID NO: 516402 - DNA, 33 bp, Homo sapien
gaagaaagagggagtaggggaacatttgggcaa

SEQ ID NO: 516403 - DNA, 33 bp, Homo sapien
tgtgtagaaagaagccacataagtaagttctta

SEQ ID NO: 516404 - DNA, 33 bp, Homo sapien
tgtgtagaaagaagccgcataagtaagttctta

SEQ ID NO: 516405 - DNA, 33 bp, Homo sapien
atgggttgtggcgtcaagactgttttgtgaccc

SEQ ID NO: 516406 - DNA, 33 bp, Homo sapien
atgggttgtggcgtcaggactgttttgtgaccc

SEQ ID NO: 516407 - DNA, 33 bp, Homo sapien
tacacaatgattaaaaaaatctcaattttggac

SEQ ID NO: 516408 - DNA, 33 bp, Homo sapien
tacacaatgattaaaagaatctcaattttggac

SEQ ID NO: 516409 - DNA, 33 bp, Homo sapien
tagactcctacacaataataatgggaaactata

SEQ ID NO: 516410 - DNA, 33 bp, Homo sapien
tagactcctacacaatgataatgggaaactata

SEQ ID NO: 516411 - DNA, 33 bp, Homo sapien
ttgaaaagaaagtcaacaagaaagtcagcttat

SEQ ID NO: 516412 - DNA, 33 bp, Homo sapien
ttgaaaagaaagtcaataagaaagtcagcttat

SEQ ID NO: 516413 - DNA, 33 bp, Homo sapien
actgactttgccctgaacaactggaagagtgga

SEQ ID NO: 516414 - DNA, 33 bp, Homo sapien
actgactttgccctgagcaactggaagagtgga

SEQ ID NO: 516415 - DNA, 33 bp, Homo sapien
atcataagcagttctaagttacagtttcaaaag

SEQ ID NO: 516416 - DNA, 33 bp, Homo sapien
atcataagcagttctacgttacagtttcaaaag

SEQ ID NO: 516417 - DNA, 33 bp, Homo sapien
tccagaatgtacaaagaactcttgaaactcact

SEQ ID NO: 516418 - DNA, 33 bp, Homo sapien
tccagaatgtacaaaggactcttgaaactcact

SEQ ID NO: 516419 - DNA, 33 bp, Homo sapien
ttcaaaagacaccattaaactgaaaagaaaagc

SEQ ID NO: 516420 - DNA, 33 bp, Homo sapien
ttcaaaagacaccattgaactgaaaagaaaagc

SEQ ID NO: 516421 - DNA, 33 bp, Homo sapien
atatatttcagtaaacacacaaatcggttttgt

SEQ ID NO: 516422 - DNA, 33 bp, Homo sapien
atatatttcagtaaacgcacaaatcggttttgt

SEQ ID NO: 516423 - DNA, 33 bp, Homo sapien
ataaaaggcccttctcaatagccacacagctac

SEQ ID NO: 516424 - DNA, 33 bp, Homo sapien
ataaaaggcccttctcgatagccacacagctac

SEQ ID NO: 516425 - DNA, 33 bp, Homo sapien
aaatgtaagttttgaaccactttaaaattgtca

SEQ ID NO: 516426 - DNA, 33 bp, Homo sapien
aaatgtaagttttgaatcactttaaaattgtca

SEQ ID NO: 516427 - DNA, 33 bp, Homo sapien
tatctttctttcatcaaaatttgagcctatgat

SEQ ID NO: 516428 - DNA, 33 bp, Homo sapien
tatctttctttcatcagaatttgagcctatgat

SEQ ID NO: 516429 - DNA, 33 bp, Homo sapien
accccagggccaatcactgaaggttccttggga

SEQ ID NO: 516430 - DNA, 33 bp, Homo sapien
accccagggccaatcattgaaggttccttggga

SEQ ID NO: 516431 - DNA, 33 bp, Homo sapien
tcaaggcctagaacacaataagtaccatggaag

SEQ ID NO: 516432 - DNA, 33 bp, Homo sapien
tcaaggcctagaacacgataagtaccatggaag

SEQ ID NO: 516433 - DNA, 33 bp, Homo sapien
tttcaataactgtctacatctgtgctgcctcac

SEQ ID NO: 516434 - DNA, 33 bp, Homo sapien
tttcaataactgtctatatctgtgctgcctcac

SEQ ID NO: 516435 - DNA, 33 bp, Homo sapien
ctcataatgcttttgacatacctctattagctt

SEQ ID NO: 516436 - DNA, 33 bp, Homo sapien
ctcataatgcttttgatatacctctattagctt

SEQ ID NO: 516437 - DNA, 33 bp, Homo sapien
gagaagacgaagacaaaggttttgtgagaaata

SEQ ID NO: 516438 - DNA, 33 bp, Homo sapien
gagaagacgaagacaacggttttgtgagaaata

SEQ ID NO: 516439 - DNA, 33 bp, Homo sapien
attcattcctctctgcccactacgcatttattg

SEQ ID NO: 516440 - DNA, 33 bp, Homo sapien
attcattcctctctgctcactacgcatttattg

SEQ ID NO: 516441 - DNA, 33 bp, Homo sapien
aaatcagtacaatccacacgatgcttccatatt

SEQ ID NO: 516442 - DNA, 33 bp, Homo sapien
aaatcagtacaatccatacgatgcttccatatt

SEQ ID NO: 516443 - DNA, 33 bp, Homo sapien
aggtgaactacagacaactagagtggagtataa

SEQ ID NO: 516444 - DNA, 33 bp, Homo sapien
aggtgaactacagacagctagagtggagtataa

SEQ ID NO: 516445 - DNA, 33 bp, Homo sapien
caaaggctttttagtacgtggagaagaatcaaa

SEQ ID NO: 516446 - DNA, 33 bp, Homo sapien
caaaggctttttagtatgtggagaagaatcaaa

SEQ ID NO: 516447 - DNA, 33 bp, Homo sapien
acttctgatggaggaaactttcgttatattatc

SEQ ID NO: 516448 - DNA, 33 bp, Homo sapien
acttctgatggaggaacctttcgttatattatc

SEQ ID NO: 516449 - DNA, 33 bp, Homo sapien
atagatataacgtagcaactatatttggcaagg

SEQ ID NO: 516450 - DNA, 33 bp, Homo sapien
atagatataacgtagcgactatatttggcaagg

SEQ ID NO: 516451 - DNA, 33 bp, Homo sapien
gtgtaggctgtggcaaatgacagattcctgaag

SEQ ID NO: 516452 - DNA, 33 bp, Homo sapien
gtgtaggctgtggcaagtgacagattcctgaag

SEQ ID NO: 516453 - DNA, 33 bp, Homo sapien
ggagaatggtacgatacagagagagaaaggaaa

SEQ ID NO: 516454 - DNA, 33 bp, Homo sapien
ggagaatggtacgatatagagagagaaaggaaa

SEQ ID NO: 516455 - DNA, 33 bp, Homo sapien
aagaaaggttggagaagatagagcctgggattc

SEQ ID NO: 516456 - DNA, 33 bp, Homo sapien
aagaaaggttggagaatatagagcctgggattc

SEQ ID NO: 516457 - DNA, 33 bp, Homo sapien
tttatgaggagtttgactatgagaataggatca

SEQ ID NO: 516458 - DNA, 33 bp, Homo sapien
tttatgaggagtttgattatgagaataggatca

SEQ ID NO: 516459 - DNA, 33 bp, Homo sapien
tcagaaaagagcaaaacctactgccattggtca

SEQ ID NO: 516460 - DNA, 33 bp, Homo sapien
tcagaaaagagcaaaatctactgccattggtca

SEQ ID NO: 516461 - DNA, 33 bp, Homo sapien
cagtgtgcactgtctaacactggaaatctctag

SEQ ID NO: 516462 - DNA, 33 bp, Homo sapien
cagtgtgcactgtctatcactggaaatctctag

SEQ ID NO: 516463 - DNA, 33 bp, Homo sapien
aatgtgattgtatgtcactaagagaaagtcttt

SEQ ID NO: 516464 - DNA, 33 bp, Homo sapien
aatgtgattgtatgtcgctaagagaaagtcttt

SEQ ID NO: 516465 - DNA, 33 bp, Homo sapien
catcaagagaatgccacgcacaaccatgggcca

SEQ ID NO: 516466 - DNA, 33 bp, Homo sapien
catcaagagaatgccatgcacaaccatgggcca

SEQ ID NO: 516467 - DNA, 33 bp, Homo sapien
tggggatgctaccacaaagaaccaaatcaatgg

SEQ ID NO: 516468 - DNA, 33 bp, Homo sapien
tggggatgctaccacagagaaccaaatcaatgg

SEQ ID NO: 516469 - DNA, 33 bp, Homo sapien
gaggcctcacaacatcactaattgtagcaggtg

SEQ ID NO: 516470 - DNA, 33 bp, Homo sapien
gaggcctcacaacatcgctaattgtagcaggtg

SEQ ID NO: 516471 - DNA, 33 bp, Homo sapien
attcaacagagtttgcgacattcaaattatagt

SEQ ID NO: 516472 - DNA, 33 bp, Homo sapien
attcaacagagtttgctacattcaaattatagt

SEQ ID NO: 516473 - DNA, 33 bp, Homo sapien
ttatccacaatgtgacaaaatataatactacat

SEQ ID NO: 516474 - DNA, 33 bp, Homo sapien
ttatccacaatgtgacgaaatataatactacat

SEQ ID NO: 516475 - DNA, 33 bp, Homo sapien
gttttgaagtaacccacatcaaaaaatgaagtg

SEQ ID NO: 516476 - DNA, 33 bp, Homo sapien
gttttgaagtaacccatatcaaaaaatgaagtg

SEQ ID NO: 516477 - DNA, 33 bp, Homo sapien
ataacagatttatgtacagtgtgttactttcct

SEQ ID NO: 516478 - DNA, 33 bp, Homo sapien
ataacagatttatgtatagtgtgttactttcct

SEQ ID NO: 516479 - DNA, 33 bp, Homo sapien
atgaagttgtatttcacagaaaaatgtttatta

SEQ ID NO: 516480 - DNA, 33 bp, Homo sapien
atgaagttgtatttcagagaaaaatgtttatta

SEQ ID NO: 516481 - DNA, 33 bp, Homo sapien
aatttactctcaactgaaaaataagatggaagg

SEQ ID NO: 516482 - DNA, 33 bp, Homo sapien
aatttactctcaactgcaaaataagatggaagg

SEQ ID NO: 516483 - DNA, 33 bp, Homo sapien
gatgttatcagtgaaaatagccaccatttaccc

SEQ ID NO: 516484 - DNA, 33 bp, Homo sapien
gatgttatcagtgaaagtagccaccatttaccc

SEQ ID NO: 516485 - DNA, 33 bp, Homo sapien
taagtgattttaaaaacagaagctgtggcagag

SEQ ID NO: 516486 - DNA, 33 bp, Homo sapien
taagtgattttaaaaatagaagctgtggcagag

SEQ ID NO: 516487 - DNA, 33 bp, Homo sapien
tgtggctgctctcataagctagagttttccaac

SEQ ID NO: 516488 - DNA, 33 bp, Homo sapien
tgtggctgctctcataggctagagttttccaac

SEQ ID NO: 516489 - DNA, 33 bp, Homo sapien
ctctgggacggcaccaagttattcccgaaactc

SEQ ID NO: 516490 - DNA, 33 bp, Homo sapien
ctctgggacggcaccaggttattcccgaaactc

SEQ ID NO: 516491 - DNA, 33 bp, Homo sapien
ttgcaaaggccagtaccgacaatcctcggtttt

SEQ ID NO: 516492 - DNA, 33 bp, Homo sapien
ttgcaaaggccagtactgacaatcctcggtttt

SEQ ID NO: 516493 - DNA, 33 bp, Homo sapien
tgtatggctttcattacagttagcaattattag

SEQ ID NO: 516494 - DNA, 33 bp, Homo sapien
tgtatggctttcattatagttagcaattattag

SEQ ID NO: 516495 - DNA, 33 bp, Homo sapien
tttatttttgacaaagcataagttcatgtttca

SEQ ID NO: 516496 - DNA, 33 bp, Homo sapien
tttatttttgacaaagtataagttcatgtttca

SEQ ID NO: 516497 - DNA, 33 bp, Homo sapien
atgaaaaccacaaccacgtgagtagttgcagag

SEQ ID NO: 516498 - DNA, 33 bp, Homo sapien
atgaaaaccacaaccatgtgagtagttgcagag

SEQ ID NO: 516499 - DNA, 33 bp, Homo sapien
tcatacatcaggttagcaaagctctcaagagtt

SEQ ID NO: 516500 - DNA, 33 bp, Homo sapien
tcatacatcaggttaggaaagctctcaagagtt

SEQ ID NO: 516501 - DNA, 33 bp, Homo sapien
cagtaactccttagcacggtgttaagaagcatg

SEQ ID NO: 516502 - DNA, 33 bp, Homo sapien
cagtaactccttagcagggtgttaagaagcatg

SEQ ID NO: 516503 - DNA, 33 bp, Homo sapien
ggctgtcagttaccacagaataacttccaactc

SEQ ID NO: 516504 - DNA, 33 bp, Homo sapien
ggctgtcagttaccacggaataacttccaactc

SEQ ID NO: 516505 - DNA, 33 bp, Homo sapien
agactaagtttatccaaaatatagtcagacata

SEQ ID NO: 516506 - DNA, 33 bp, Homo sapien
agactaagtttatccagaatatagtcagacata

SEQ ID NO: 516507 - DNA, 33 bp, Homo sapien
tgtgctatgccaagaacattacatgaatccagt

SEQ ID NO: 516508 - DNA, 33 bp, Homo sapien
tgtgctatgccaagaagattacatgaatccagt

SEQ ID NO: 516509 - DNA, 33 bp, Homo sapien
ataagttcaggttaaaatccaatttcccatcca

SEQ ID NO: 516510 - DNA, 33 bp, Homo sapien
ataagttcaggttaaagtccaatttcccatcca

SEQ ID NO: 516511 - DNA, 33 bp, Homo sapien
cctaaacattatttcaatctgccccagtttctt

SEQ ID NO: 516512 - DNA, 33 bp, Homo sapien
cctaaacattatttcactctgccccagtttctt

SEQ ID NO: 516513 - DNA, 33 bp, Homo sapien
aagccaataatgaggagaaagcgcagtgaaagg

SEQ ID NO: 516514 - DNA, 33 bp, Homo sapien
aagccaataatgaggataaagcgcagtgaaagg

SEQ ID NO: 516515 - DNA, 33 bp, Homo sapien
gctattgccaagaatgacaggtgtatatggcta

SEQ ID NO: 516516 - DNA, 33 bp, Homo sapien
gctattgccaagaatgccaggtgtatatggcta

SEQ ID NO: 516517 - DNA, 33 bp, Homo sapien
aaacccaaagtcaactcaatttttctcttatat

SEQ ID NO: 516518 - DNA, 33 bp, Homo sapien
aaacccaaagtcaactgaatttttctcttatat

SEQ ID NO: 516519 - DNA, 33 bp, Homo sapien
acttacctgtgacaacgaaaaattaaaacaatt

SEQ ID NO: 516520 - DNA, 33 bp, Homo sapien
acttacctgtgacaactaaaaattaaaacaatt

SEQ ID NO: 516521 - DNA, 33 bp, Homo sapien
atcacatttctatgaacttatcctgaaaacata

SEQ ID NO: 516522 - DNA, 33 bp, Homo sapien
atcacatttctatgaatttatcctgaaaacata

SEQ ID NO: 516523 - DNA, 33 bp, Homo sapien
ataaagctcatggtaacctggaaaacaaatgag

SEQ ID NO: 516524 - DNA, 33 bp, Homo sapien
ataaagctcatggtaatctggaaaacaaatgag

SEQ ID NO: 516525 - DNA, 33 bp, Homo sapien
gaagtgttccttgttcactgcatccacaaccac

SEQ ID NO: 516526 - DNA, 33 bp, Homo sapien
gaagtgttccttgttcgctgcatccacaaccac

SEQ ID NO: 516527 - DNA, 33 bp, Homo sapien
tggaatgaccttacaaactaaaatccacaacaa

SEQ ID NO: 516528 - DNA, 33 bp, Homo sapien
tggaatgaccttacaagctaaaatccacaacaa

SEQ ID NO: 516529 - DNA, 33 bp, Homo sapien
gatgggtccacttttaacagtattatccgtatt

SEQ ID NO: 516530 - DNA, 33 bp, Homo sapien
gatgggtccacttttatcagtattatccgtatt

SEQ ID NO: 516531 - DNA, 33 bp, Homo sapien
aatgtcccaggtattacgcctttatgccttctt

SEQ ID NO: 516532 - DNA, 33 bp, Homo sapien
aatgtcccaggtattatgcctttatgccttctt

SEQ ID NO: 516533 - DNA, 33 bp, Homo sapien
attatcatatattctcaaactgtacttgtattt

SEQ ID NO: 516534 - DNA, 33 bp, Homo sapien
attatcatatattctcgaactgtacttgtattt

SEQ ID NO: 516535 - DNA, 33 bp, Homo sapien
atttgagattagaagaaaagttattttggcagt

SEQ ID NO: 516536 - DNA, 33 bp, Homo sapien
atttgagattagaagagaagttattttggcagt

SEQ ID NO: 516537 - DNA, 33 bp, Homo sapien
tctacacccagaacacacttcctcggaccaaga

SEQ ID NO: 516538 - DNA, 33 bp, Homo sapien
tctacacccagaacacccttcctcggaccaaga

SEQ ID NO: 516539 - DNA, 33 bp, Homo sapien
ccatttaccgttttaacctgccatagtgtcatt

SEQ ID NO: 516540 - DNA, 33 bp, Homo sapien
ccatttaccgttttaatctgccatagtgtcatt

SEQ ID NO: 516541 - DNA, 33 bp, Homo sapien
tcatcaaaagtcttaacattagagatccacagt

SEQ ID NO: 516542 - DNA, 33 bp, Homo sapien
tcatcaaaagtcttaatattagagatccacagt

SEQ ID NO: 516543 - DNA, 33 bp, Homo sapien
gaatcagaatttcaccactttctggttagtgac

SEQ ID NO: 516544 - DNA, 33 bp, Homo sapien
gaatcagaatttcaccgctttctggttagtgac

SEQ ID NO: 516545 - DNA, 33 bp, Homo sapien
caaagcatacttgtcacctgtaccacactaccc

SEQ ID NO: 516546 - DNA, 33 bp, Homo sapien
caaagcatacttgtcatctgtaccacactaccc

SEQ ID NO: 516547 - DNA, 33 bp, Homo sapien
aggggcggcatacaaacggtcaacaaaataaat

SEQ ID NO: 516548 - DNA, 33 bp, Homo sapien
aggggcggcatacaaatggtcaacaaaataaat

SEQ ID NO: 516549 - DNA, 33 bp, Homo sapien
aggcctacctttccaccgtcattgtaactttct

SEQ ID NO: 516550 - DNA, 33 bp, Homo sapien
aggcctacctttccactgtcattgtaactttct

SEQ ID NO: 516551 - DNA, 33 bp, Homo sapien
aaaggtaggccttctaagctattctggagtaag

SEQ ID NO: 516552 - DNA, 33 bp, Homo sapien
aaaggtaggccttctatgctattctggagtaag

SEQ ID NO: 516553 - DNA, 33 bp, Homo sapien
gaaatcataggtgtagaagaaagtcagcaaagg

SEQ ID NO: 516554 - DNA, 33 bp, Homo sapien
gaaatcataggtgtaggagaaagtcagcaaagg

SEQ ID NO: 516555 - DNA, 33 bp, Homo sapien
acagcctggaagtgtaagggtcttagctccctg

SEQ ID NO: 516556 - DNA, 33 bp, Homo sapien
acagcctggaagtgtaggggtcttagctccctg

SEQ ID NO: 516557 - DNA, 33 bp, Homo sapien
gaaccttgaccaatgaaaaacaagattcaggag

SEQ ID NO: 516558 - DNA, 33 bp, Homo sapien
gaaccttgaccaatgagaaacaagattcaggag

SEQ ID NO: 516559 - DNA, 33 bp, Homo sapien
tgcctaaagattcaagaaaaggaagaaatgaag

SEQ ID NO: 516560 - DNA, 33 bp, Homo sapien
tgcctaaagattcaaggaaaggaagaaatgaag

SEQ ID NO: 516561 - DNA, 33 bp, Homo sapien
ttttatgattcctaaacggctgaggcaagactt

SEQ ID NO: 516562 - DNA, 33 bp, Homo sapien
ttttatgattcctaaatggctgaggcaagactt

SEQ ID NO: 516563 - DNA, 33 bp, Homo sapien
gctgaggggcttagagcatcttcttagtaatga

SEQ ID NO: 516564 - DNA, 33 bp, Homo sapien
gctgaggggcttagagtatcttcttagtaatga

SEQ ID NO: 516565 - DNA, 33 bp, Homo sapien
ttataatgcatgccagacactagttataaccca

SEQ ID NO: 516566 - DNA, 33 bp, Homo sapien
ttataatgcatgccaggcactagttataaccca

SEQ ID NO: 516567 - DNA, 33 bp, Homo sapien
taccagatttgactctcacacgtgttaagggta

SEQ ID NO: 516568 - DNA, 33 bp, Homo sapien
taccagatttgactcttacacgtgttaagggta

SEQ ID NO: 516569 - DNA, 33 bp, Homo sapien
caagcaccaacctgccaatcatggttcccttgt

SEQ ID NO: 516570 - DNA, 33 bp, Homo sapien
caagcaccaacctgccgatcatggttcccttgt

SEQ ID NO: 516571 - DNA, 33 bp, Homo sapien
tctgttctgaaagatagacaattgccaagtcca

SEQ ID NO: 516572 - DNA, 33 bp, Homo sapien
tctgttctgaaagatatacaattgccaagtcca

SEQ ID NO: 516573 - DNA, 33 bp, Homo sapien
gctttatacctccataactccatgtctatatca

SEQ ID NO: 516574 - DNA, 33 bp, Homo sapien
gctttatacctccatacctccatgtctatatca

SEQ ID NO: 516575 - DNA, 33 bp, Homo sapien
gaatagccataactaaatcttcctccccagctc

SEQ ID NO: 516576 - DNA, 33 bp, Homo sapien
gaatagccataactaattcttcctccccagctc

SEQ ID NO: 516577 - DNA, 33 bp, Homo sapien
ctaaataatgaaaagcaagcaggcagaaagatg

SEQ ID NO: 516578 - DNA, 33 bp, Homo sapien
ctaaataatgaaaagcgagcaggcagaaagatg

SEQ ID NO: 516579 - DNA, 33 bp, Homo sapien
gagtaaatggaaaaacacttcactacaggtcac

SEQ ID NO: 516580 - DNA, 33 bp, Homo sapien
gagtaaatggaaaaacgcttcactacaggtcac

SEQ ID NO: 516581 - DNA, 33 bp, Homo sapien
ttgtcattattttgccaaagatatttgagtcgg

SEQ ID NO: 516582 - DNA, 33 bp, Homo sapien
ttgtcattattttgcctaagatatttgagtcgg

SEQ ID NO: 516583 - DNA, 33 bp, Homo sapien
attccagacaatctgaaacaattattatagtcc

SEQ ID NO: 516584 - DNA, 33 bp, Homo sapien
attccagacaatctgacacaattattatagtcc

SEQ ID NO: 516585 - DNA, 33 bp, Homo sapien
acttcactaaggtttgaattagttgttcttact

SEQ ID NO: 516586 - DNA, 33 bp, Homo sapien
acttcactaaggtttgcattagttgttcttact

SEQ ID NO: 516587 - DNA, 33 bp, Homo sapien
gttcaccaaggtattaacactcttatattgaca

SEQ ID NO: 516588 - DNA, 33 bp, Homo sapien
gttcaccaaggtattagcactcttatattgaca

SEQ ID NO: 516589 - DNA, 33 bp, Homo sapien
acttgtagaacacttaactgtttatcaagcaat

SEQ ID NO: 516590 - DNA, 33 bp, Homo sapien
acttgtagaacacttagctgtttatcaagcaat

SEQ ID NO: 516591 - DNA, 33 bp, Homo sapien
atcttgtcaatattctaaagagttttctgatga

SEQ ID NO: 516592 - DNA, 33 bp, Homo sapien
atcttgtcaatattctgaagagttttctgatga

SEQ ID NO: 516593 - DNA, 33 bp, Homo sapien
gaggtataattatccaaatttttccagtgcatg

SEQ ID NO: 516594 - DNA, 33 bp, Homo sapien
gaggtataattatccagatttttccagtgcatg

SEQ ID NO: 516595 - DNA, 33 bp, Homo sapien
tcatgtgcaagagccaagcgtatagaagagtgc

SEQ ID NO: 516596 - DNA, 33 bp, Homo sapien
tcatgtgcaagagccaggcgtatagaagagtgc

SEQ ID NO: 516597 - DNA, 33 bp, Homo sapien
gaagggagctatgtgggatttacaaagcactct

SEQ ID NO: 516598 - DNA, 33 bp, Homo sapien
gaagggagctatgtggtatttacaaagcactct

SEQ ID NO: 516599 - DNA, 33 bp, Homo sapien
ctaacactctacactccagtcctttggccttcc

SEQ ID NO: 516600 - DNA, 33 bp, Homo sapien
ctaacactctacactctagtcctttggccttcc

SEQ ID NO: 516601 - DNA, 33 bp, Homo sapien
gactctcactatctaccatcttctccacatcct

SEQ ID NO: 516602 - DNA, 33 bp, Homo sapien
gactctcactatctactatcttctccacatcct

SEQ ID NO: 516603 - DNA, 33 bp, Homo sapien
tgtttactgatattaacgctttgagggttaaat

SEQ ID NO: 516604 - DNA, 33 bp, Homo sapien
tgtttactgatattaatgctttgagggttaaat

SEQ ID NO: 516605 - DNA, 33 bp, Homo sapien
caaaagcacttggacacgacaaagattcttaac

SEQ ID NO: 516606 - DNA, 33 bp, Homo sapien
caaaagcacttggacatgacaaagattcttaac

SEQ ID NO: 516607 - DNA, 33 bp, Homo sapien
tcactcaattttgctcactggtgattctagggg

SEQ ID NO: 516608 - DNA, 33 bp, Homo sapien
tcactcaattttgctcgctggtgattctagggg

SEQ ID NO: 516609 - DNA, 33 bp, Homo sapien
aacccttcttagacaacaaagcagaatttggtt

SEQ ID NO: 516610 - DNA, 33 bp, Homo sapien
aacccttcttagacaagaaagcagaatttggtt

SEQ ID NO: 516611 - DNA, 33 bp, Homo sapien
gggccactgaataaaccattaaagtgtagaaga

SEQ ID NO: 516612 - DNA, 33 bp, Homo sapien
gggccactgaataaacgattaaagtgtagaaga

SEQ ID NO: 516613 - DNA, 33 bp, Homo sapien
tagttctgcgttcaaccgcttagtctctcaaaa

SEQ ID NO: 516614 - DNA, 33 bp, Homo sapien
tagttctgcgttcaacggcttagtctctcaaaa

SEQ ID NO: 516615 - DNA, 33 bp, Homo sapien
ttggtctatggttacacccaatgcttctccaat

SEQ ID NO: 516616 - DNA, 33 bp, Homo sapien
ttggtctatggttacatccaatgcttctccaat

SEQ ID NO: 516617 - DNA, 33 bp, Homo sapien
aataaaatatccaaaaataagtatgctaggaat

SEQ ID NO: 516618 - DNA, 33 bp, Homo sapien
aataaaatatccaaaagtaagtatgctaggaat

SEQ ID NO: 516619 - DNA, 33 bp, Homo sapien
gtattgtcactttttcacagtattttgaatttt

SEQ ID NO: 516620 - DNA, 33 bp, Homo sapien
gtattgtcactttttcgcagtattttgaatttt

SEQ ID NO: 516621 - DNA, 33 bp, Homo sapien
ctcccttcacatggaaagcatcattaagaggac

SEQ ID NO: 516622 - DNA, 33 bp, Homo sapien
ctcccttcacatggaaggcatcattaagaggac

SEQ ID NO: 516623 - DNA, 33 bp, Homo sapien
taggggtcatctagacaaagaaagaagaaatat

SEQ ID NO: 516624 - DNA, 33 bp, Homo sapien
taggggtcatctagacgaagaaagaagaaatat

SEQ ID NO: 516625 - DNA, 33 bp, Homo sapien
gaagatgctgtcaccaatattaggcatgaatat

SEQ ID NO: 516626 - DNA, 33 bp, Homo sapien
gaagatgctgtcaccattattaggcatgaatat

SEQ ID NO: 516627 - DNA, 33 bp, Homo sapien
atgtatctgctctatacatggaacaccaagatg

SEQ ID NO: 516628 - DNA, 33 bp, Homo sapien
atgtatctgctctatatatggaacaccaagatg

SEQ ID NO: 516629 - DNA, 33 bp, Homo sapien
aggagtctgtaaataaagactgaaaacaataga

SEQ ID NO: 516630 - DNA, 33 bp, Homo sapien
aggagtctgtaaataaggactgaaaacaataga

SEQ ID NO: 516631 - DNA, 33 bp, Homo sapien
tgtccaaatattacctcaggagtctgtaaataa

SEQ ID NO: 516632 - DNA, 33 bp, Homo sapien
tgtccaaatattaccttaggagtctgtaaataa

SEQ ID NO: 516633 - DNA, 33 bp, Homo sapien
caataggagagtaaaaagagtggacaaagaaat

SEQ ID NO: 516634 - DNA, 33 bp, Homo sapien
caataggagagtaaaatgagtggacaaagaaat

SEQ ID NO: 516635 - DNA, 33 bp, Homo sapien
tcattttggtcaagaaagtctgtataaactcaa

SEQ ID NO: 516636 - DNA, 33 bp, Homo sapien
tcattttggtcaagaaggtctgtataaactcaa

SEQ ID NO: 516637 - DNA, 33 bp, Homo sapien
atcttattacatttacacagtttgcagtagact

SEQ ID NO: 516638 - DNA, 33 bp, Homo sapien
atcttattacatttacgcagtttgcagtagact

SEQ ID NO: 516639 - DNA, 33 bp, Homo sapien
aaggtcagggtattcacgtctgtttatgtcagg

SEQ ID NO: 516640 - DNA, 33 bp, Homo sapien
aaggtcagggtattcatgtctgtttatgtcagg

SEQ ID NO: 516641 - DNA, 33 bp, Homo sapien
cacaccagtttgcctccaggtcttaggccttta

SEQ ID NO: 516642 - DNA, 33 bp, Homo sapien
cacaccagtttgcctctaggtcttaggccttta

SEQ ID NO: 516643 - DNA, 33 bp, Homo sapien
aacaggagtagagttacggactctcagaaagaa

SEQ ID NO: 516644 - DNA, 33 bp, Homo sapien
aacaggagtagagttatggactctcagaaagaa

SEQ ID NO: 516645 - DNA, 33 bp, Homo sapien
atcccagttctgcccaggatttaagctctttag

SEQ ID NO: 516646 - DNA, 33 bp, Homo sapien
atcccagttctgcccatgatttaagctctttag

SEQ ID NO: 516647 - DNA, 33 bp, Homo sapien
ttctcaggtggatatcaacagtggtctagcaaa

SEQ ID NO: 516648 - DNA, 33 bp, Homo sapien
ttctcaggtggatatcgacagtggtctagcaaa

SEQ ID NO: 516649 - DNA, 33 bp, Homo sapien
ccaacttgttattccaatattctgtatcgaaca

SEQ ID NO: 516650 - DNA, 33 bp, Homo sapien
ccaacttgttattccagtattctgtatcgaaca

SEQ ID NO: 516651 - DNA, 33 bp, Homo sapien
tctaatttatagattaagcacagtaagaaatta

SEQ ID NO: 516652 - DNA, 33 bp, Homo sapien
tctaatttatagattatgcacagtaagaaatta

SEQ ID NO: 516653 - DNA, 33 bp, Homo sapien
agggcaaaatattctacgtaagactggtatttt

SEQ ID NO: 516654 - DNA, 33 bp, Homo sapien
agggcaaaatattctatgtaagactggtatttt

SEQ ID NO: 516655 - DNA, 33 bp, Homo sapien
tctagttgagcataaaacaaaggattcaataaa

SEQ ID NO: 516656 - DNA, 33 bp, Homo sapien
tctagttgagcataaagcaaaggattcaataaa

SEQ ID NO: 516657 - DNA, 33 bp, Homo sapien
ataatccctaagtgcaataagagttaagctgaa

SEQ ID NO: 516658 - DNA, 33 bp, Homo sapien
ataatccctaagtgcagtaagagttaagctgaa

SEQ ID NO: 516659 - DNA, 33 bp, Homo sapien
ttatagtccatggtaactacattgttctcatta

SEQ ID NO: 516660 - DNA, 33 bp, Homo sapien
ttatagtccatggtaagtacattgttctcatta

SEQ ID NO: 516661 - DNA, 33 bp, Homo sapien
ctatcattcactggtacaaaatcaatttcctat

SEQ ID NO: 516662 - DNA, 33 bp, Homo sapien
ctatcattcactggtagaaaatcaatttcctat

SEQ ID NO: 516663 - DNA, 33 bp, Homo sapien
ggaccaagttgcatcactaaaatagtaaataaa

SEQ ID NO: 516664 - DNA, 33 bp, Homo sapien
ggaccaagttgcatcagtaaaatagtaaataaa

SEQ ID NO: 516665 - DNA, 33 bp, Homo sapien
taattgtaacacctacaccataaagtagctgtg

SEQ ID NO: 516666 - DNA, 33 bp, Homo sapien
taattgtaacacctacgccataaagtagctgtg

SEQ ID NO: 516667 - DNA, 33 bp, Homo sapien
cacaaagttcacactaggcactgtaaacttaaa

SEQ ID NO: 516668 - DNA, 33 bp, Homo sapien
cacaaagttcacactatgcactgtaaacttaaa

SEQ ID NO: 516669 - DNA, 33 bp, Homo sapien
tctgaagtataagatacggcatctgacctcaag

SEQ ID NO: 516670 - DNA, 33 bp, Homo sapien
tctgaagtataagatatggcatctgacctcaag

SEQ ID NO: 516671 - DNA, 33 bp, Homo sapien
actatttgtgaacatcaaaacccaggttgtgat

SEQ ID NO: 516672 - DNA, 33 bp, Homo sapien
actatttgtgaacatccaaacccaggttgtgat

SEQ ID NO: 516673 - DNA, 33 bp, Homo sapien
aggcttttacttatggacattcatcagagatca

SEQ ID NO: 516674 - DNA, 33 bp, Homo sapien
aggcttttacttatgggcattcatcagagatca

SEQ ID NO: 516675 - DNA, 33 bp, Homo sapien
tcagcaatcattctaacgtaagacctgacagtg

SEQ ID NO: 516676 - DNA, 33 bp, Homo sapien
tcagcaatcattctaatgtaagacctgacagtg

SEQ ID NO: 516677 - DNA, 33 bp, Homo sapien
tcagtgaatttggaacacaggcatacaactcca

SEQ ID NO: 516678 - DNA, 33 bp, Homo sapien
tcagtgaatttggaacgcaggcatacaactcca

SEQ ID NO: 516679 - DNA, 33 bp, Homo sapien
tctagaggtggaggcacggtctgttcaatctcc

SEQ ID NO: 516680 - DNA, 33 bp, Homo sapien
tctagaggtggaggcagggtctgttcaatctcc

SEQ ID NO: 516681 - DNA, 33 bp, Homo sapien
actcaggatcgtttagaaatatgttgtttaatt

SEQ ID NO: 516682 - DNA, 33 bp, Homo sapien
actcaggatcgtttaggaatatgttgtttaatt

SEQ ID NO: 516683 - DNA, 33 bp, Homo sapien
gatctaattggagatacggtgagatttttactg

SEQ ID NO: 516684 - DNA, 33 bp, Homo sapien
gatctaattggagatatggtgagatttttactg

SEQ ID NO: 516685 - DNA, 33 bp, Homo sapien
agggtcatcaaggaccgatatgatttgtgccca

SEQ ID NO: 516686 - DNA, 33 bp, Homo sapien
agggtcatcaaggacctatatgatttgtgccca

SEQ ID NO: 516687 - DNA, 33 bp, Homo sapien
atctgaattttgtcacaggatattttgttgccc

SEQ ID NO: 516688 - DNA, 33 bp, Homo sapien
atctgaattttgtcacgggatattttgttgccc

SEQ ID NO: 516689 - DNA, 33 bp, Homo sapien
ttcatctcattactgcaagtttgtacgctttga

SEQ ID NO: 516690 - DNA, 33 bp, Homo sapien
ttcatctcattactgccagtttgtacgctttga

SEQ ID NO: 516691 - DNA, 33 bp, Homo sapien
tatttgtgccctgaaagaccatagttgtttcta

SEQ ID NO: 516692 - DNA, 33 bp, Homo sapien
tatttgtgccctgaaataccatagttgtttcta

SEQ ID NO: 516693 - DNA, 33 bp, Homo sapien
atctcatcttttttcccagatcatcttttgaga

SEQ ID NO: 516694 - DNA, 33 bp, Homo sapien
atctcatcttttttcctagatcatcttttgaga

SEQ ID NO: 516695 - DNA, 33 bp, Homo sapien
ttataaaactccatcaacatcgacaaaataatg

SEQ ID NO: 516696 - DNA, 33 bp, Homo sapien
ttataaaactccatcagcatcgacaaaataatg

SEQ ID NO: 516697 - DNA, 33 bp, Homo sapien
tgctgctcactttggacgtagaactttggcagg

SEQ ID NO: 516698 - DNA, 33 bp, Homo sapien
tgctgctcactttggatgtagaactttggcagg

SEQ ID NO: 516699 - DNA, 33 bp, Homo sapien
gcctagtcctgagtcacatatcttgtcccaaat

SEQ ID NO: 516700 - DNA, 33 bp, Homo sapien
gcctagtcctgagtcatatatcttgtcccaaat

SEQ ID NO: 516701 - DNA, 33 bp, Homo sapien
gtatttatgaaaagaaatcccagtgaaaattgt

SEQ ID NO: 516702 - DNA, 33 bp, Homo sapien
gtatttatgaaaagaagtcccagtgaaaattgt

SEQ ID NO: 516703 - DNA, 33 bp, Homo sapien
aaaggaaaagcaataccaacaataaaccctaaa

SEQ ID NO: 516704 - DNA, 33 bp, Homo sapien
aaaggaaaagcaatactaacaataaaccctaaa

SEQ ID NO: 516705 - DNA, 33 bp, Homo sapien
gacatatcgaatactagaaacaatctagaaact

SEQ ID NO: 516706 - DNA, 33 bp, Homo sapien
gacatatcgaatactataaacaatctagaaact

SEQ ID NO: 516707 - DNA, 33 bp, Homo sapien
tgatcattttcctttccccagtgcagttaccct

SEQ ID NO: 516708 - DNA, 33 bp, Homo sapien
tgatcattttcctttcgccagtgcagttaccct

SEQ ID NO: 516709 - DNA, 33 bp, Homo sapien
tgctacaaaactttgcccgaatggagctggatt

SEQ ID NO: 516710 - DNA, 33 bp, Homo sapien
tgctacaaaactttgctcgaatggagctggatt

SEQ ID NO: 516711 - DNA, 33 bp, Homo sapien
tcagaaattttgtaccacttatccaatccgtaa

SEQ ID NO: 516712 - DNA, 33 bp, Homo sapien
tcagaaattttgtaccgcttatccaatccgtaa

SEQ ID NO: 516713 - DNA, 33 bp, Homo sapien
ttcagcaagttgcatacgattaaaaggactctc

SEQ ID NO: 516714 - DNA, 33 bp, Homo sapien
ttcagcaagttgcatatgattaaaaggactctc

SEQ ID NO: 516715 - DNA, 33 bp, Homo sapien
tgtttctatacttctacctaaagccaaacgtat

SEQ ID NO: 516716 - DNA, 33 bp, Homo sapien
tgtttctatacttctatctaaagccaaacgtat

SEQ ID NO: 516717 - DNA, 33 bp, Homo sapien
attatgacacatggaaaaaaaaaaatatggtcc

SEQ ID NO: 516718 - DNA, 33 bp, Homo sapien
attatgacacatggaagaaaaaaaatatggtcc

SEQ ID NO: 516719 - DNA, 33 bp, Homo sapien
gacagtttctagtgacagcttcttgtttttgga

SEQ ID NO: 516720 - DNA, 33 bp, Homo sapien
gacagtttctagtgactgcttcttgtttttgga

SEQ ID NO: 516721 - DNA, 33 bp, Homo sapien
gcagactcactcactcaatctatctacctatcc

SEQ ID NO: 516722 - DNA, 33 bp, Homo sapien
gcagactcactcactcgatctatctacctatcc

SEQ ID NO: 516723 - DNA, 33 bp, Homo sapien
agaaaagctcattcaaattcagcagtgccttca

SEQ ID NO: 516724 - DNA, 33 bp, Homo sapien
agaaaagctcattcaagttcagcagtgccttca

SEQ ID NO: 516725 - DNA, 33 bp, Homo sapien
ttgttatttcttcacaggggaattgtgttttta

SEQ ID NO: 516726 - DNA, 33 bp, Homo sapien
ttgttatttcttcacatgggaattgtgttttta

SEQ ID NO: 516727 - DNA, 33 bp, Homo sapien
atgcatgaatttaagaccaaagggttgagataa

SEQ ID NO: 516728 - DNA, 33 bp, Homo sapien
atgcatgaatttaagagcaaagggttgagataa

SEQ ID NO: 516729 - DNA, 33 bp, Homo sapien
gttcagatgatgaaaacataaattcagtgaaag

SEQ ID NO: 516730 - DNA, 33 bp, Homo sapien
gttcagatgatgaaaatataaattcagtgaaag

SEQ ID NO: 516731 - DNA, 33 bp, Homo sapien
tatatgttatgaaaatcagagtgtacttggata

SEQ ID NO: 516732 - DNA, 33 bp, Homo sapien
tatatgttatgaaaatgagagtgtacttggata

SEQ ID NO: 516733 - DNA, 33 bp, Homo sapien
cattagacaattaaaacagcagaagttacaata

SEQ ID NO: 516734 - DNA, 33 bp, Homo sapien
cattagacaattaaaagagcagaagttacaata

SEQ ID NO: 516735 - DNA, 33 bp, Homo sapien
agtgagagacctgaataagcatgaagatctgta

SEQ ID NO: 516736 - DNA, 33 bp, Homo sapien
agtgagagacctgaatgagcatgaagatctgta

SEQ ID NO: 516737 - DNA, 33 bp, Homo sapien
tgactagtgtcagtacccaaacaagataaagac

SEQ ID NO: 516738 - DNA, 33 bp, Homo sapien
tgactagtgtcagtactcaaacaagataaagac

SEQ ID NO: 516739 - DNA, 33 bp, Homo sapien
accttccatagcttcaggttgcagttagaataa

SEQ ID NO: 516740 - DNA, 33 bp, Homo sapien
accttccatagcttcatgttgcagttagaataa

SEQ ID NO: 516741 - DNA, 33 bp, Homo sapien
acaggtttgctaaatcgaagtcatctttctgga

SEQ ID NO: 516742 - DNA, 33 bp, Homo sapien
acaggtttgctaaatctaagtcatctttctgga

SEQ ID NO: 516743 - DNA, 33 bp, Homo sapien
gcaaccagaatttacactccagattatagaaag

SEQ ID NO: 516744 - DNA, 33 bp, Homo sapien
gcaaccagaatttacagtccagattatagaaag

SEQ ID NO: 516745 - DNA, 33 bp, Homo sapien
caacatggaaactcaccaaacaggtaaaaagca

SEQ ID NO: 516746 - DNA, 33 bp, Homo sapien
caacatggaaactcactaaacaggtaaaaagca

SEQ ID NO: 516747 - DNA, 33 bp, Homo sapien
tcttcactaataaagagggacgaagaatgctac

SEQ ID NO: 516748 - DNA, 33 bp, Homo sapien
tcttcactaataaagatggacgaagaatgctac

SEQ ID NO: 516749 - DNA, 33 bp, Homo sapien
aaactactctatagcaccagttttgagctcaga

SEQ ID NO: 516750 - DNA, 33 bp, Homo sapien
aaactactctatagcagcagttttgagctcaga

SEQ ID NO: 516751 - DNA, 33 bp, Homo sapien
gtactgacagatccaaatacaaaatcacatgga

SEQ ID NO: 516752 - DNA, 33 bp, Homo sapien
gtactgacagatccaagtacaaaatcacatgga

SEQ ID NO: 516753 - DNA, 33 bp, Homo sapien
taagaatgaatgctacgactgactggtcaggga

SEQ ID NO: 516754 - DNA, 33 bp, Homo sapien
taagaatgaatgctactactgactggtcaggga

SEQ ID NO: 516755 - DNA, 33 bp, Homo sapien
tggcataaggtatgggacccagctgaagtcaat

SEQ ID NO: 516756 - DNA, 33 bp, Homo sapien
tggcataaggtatggggcccagctgaagtcaat

SEQ ID NO: 516757 - DNA, 33 bp, Homo sapien
acggagtctccaataaccctctcttctacagac

SEQ ID NO: 516758 - DNA, 33 bp, Homo sapien
acggagtctccaataatcctctcttctacagac

SEQ ID NO: 516759 - DNA, 33 bp, Homo sapien
tttcttgccttttccacgctctcctttattact

SEQ ID NO: 516760 - DNA, 33 bp, Homo sapien
tttcttgccttttccatgctctcctttattact

SEQ ID NO: 516761 - DNA, 33 bp, Homo sapien
tctttcagtgtgccaagaactgtgtttcaactg

SEQ ID NO: 516762 - DNA, 33 bp, Homo sapien
tctttcagtgtgccaataactgtgtttcaactg

SEQ ID NO: 516763 - DNA, 33 bp, Homo sapien
caaacatcatttacagaacctttgcccagtcaa

SEQ ID NO: 516764 - DNA, 33 bp, Homo sapien
caaacatcatttacaggacctttgcccagtcaa

SEQ ID NO: 516765 - DNA, 33 bp, Homo sapien
ttgttgaagtttaacacgaaccaattaaacaca

SEQ ID NO: 516766 - DNA, 33 bp, Homo sapien
ttgttgaagtttaacatgaaccaattaaacaca

SEQ ID NO: 516767 - DNA, 33 bp, Homo sapien
ctcttgcctaagaagaacatagttgcatatttt

SEQ ID NO: 516768 - DNA, 33 bp, Homo sapien
ctcttgcctaagaagaccatagttgcatatttt

SEQ ID NO: 516769 - DNA, 33 bp, Homo sapien
actcagaagttgaaaccaaagaggttaataaag

SEQ ID NO: 516770 - DNA, 33 bp, Homo sapien
actcagaagttgaaactaaagaggttaataaag

SEQ ID NO: 516771 - DNA, 33 bp, Homo sapien
tattcaaaaactaagccgctagtacatgaatac

SEQ ID NO: 516772 - DNA, 33 bp, Homo sapien
tattcaaaaactaagctgctagtacatgaatac

SEQ ID NO: 516773 - DNA, 33 bp, Homo sapien
tagttttgtagctagcaaaaagctctgggccta

SEQ ID NO: 516774 - DNA, 33 bp, Homo sapien
tagttttgtagctagccaaaagctctgggccta

SEQ ID NO: 516775 - DNA, 33 bp, Homo sapien
taagtacaattgtcaacccattatagtttatag

SEQ ID NO: 516776 - DNA, 33 bp, Homo sapien
taagtacaattgtcaatccattatagtttatag

SEQ ID NO: 516777 - DNA, 33 bp, Homo sapien
acggctatgcttgagcacaaagtctatgtgagc

SEQ ID NO: 516778 - DNA, 33 bp, Homo sapien
acggctatgcttgagcgcaaagtctatgtgagc

SEQ ID NO: 516779 - DNA, 33 bp, Homo sapien
cattttagagtaatcaataaaataggcttggac

SEQ ID NO: 516780 - DNA, 33 bp, Homo sapien
cattttagagtaatcagtaaaataggcttggac

SEQ ID NO: 516781 - DNA, 33 bp, Homo sapien
tttgcaggagtaatcccagttataaagaatttc

SEQ ID NO: 516782 - DNA, 33 bp, Homo sapien
tttgcaggagtaatccgagttataaagaatttc

SEQ ID NO: 516783 - DNA, 33 bp, Homo sapien
gacaatgggtcttttacattagtctgtaaattt

SEQ ID NO: 516784 - DNA, 33 bp, Homo sapien
gacaatgggtcttttatattagtctgtaaattt

SEQ ID NO: 516785 - DNA, 33 bp, Homo sapien
aagggatcacatttcactcaacagtgcacctct

SEQ ID NO: 516786 - DNA, 33 bp, Homo sapien
aagggatcacatttcattcaacagtgcacctct

SEQ ID NO: 516787 - DNA, 33 bp, Homo sapien
gtactactcaaaaccacgagcctttcagttaac

SEQ ID NO: 516788 - DNA, 33 bp, Homo sapien
gtactactcaaaaccatgagcctttcagttaac

SEQ ID NO: 516789 - DNA, 33 bp, Homo sapien
actggtaacaacaaagactgagactgaagtaag

SEQ ID NO: 516790 - DNA, 33 bp, Homo sapien
actggtaacaacaaaggctgagactgaagtaag

SEQ ID NO: 516791 - DNA, 33 bp, Homo sapien
tgtaagcctctagctcaatgacaaaggaacaaa

SEQ ID NO: 516792 - DNA, 33 bp, Homo sapien
tgtaagcctctagctccatgacaaaggaacaaa

SEQ ID NO: 516793 - DNA, 33 bp, Homo sapien
tcctgtggtgttattcaaggtttatagtattga

SEQ ID NO: 516794 - DNA, 33 bp, Homo sapien
tcctgtggtgttattcgaggtttatagtattga

SEQ ID NO: 516795 - DNA, 33 bp, Homo sapien
tgcttgatatgtactacgggttgaggtctgcag

SEQ ID NO: 516796 - DNA, 33 bp, Homo sapien
tgcttgatatgtactatgggttgaggtctgcag

SEQ ID NO: 516797 - DNA, 33 bp, Homo sapien
attatcgcctagcctaccttaagtgtattcaga

SEQ ID NO: 516798 - DNA, 33 bp, Homo sapien
attatcgcctagcctatcttaagtgtattcaga

SEQ ID NO: 516799 - DNA, 33 bp, Homo sapien
gccagctacatgcaagactgaagctggaacaga

SEQ ID NO: 516800 - DNA, 33 bp, Homo sapien
gccagctacatgcaaggctgaagctggaacaga

SEQ ID NO: 516801 - DNA, 33 bp, Homo sapien
tttatacgtcctttgaccttactgatgctttcc

SEQ ID NO: 516802 - DNA, 33 bp, Homo sapien
tttatacgtcctttgagcttactgatgctttcc

SEQ ID NO: 516803 - DNA, 33 bp, Homo sapien
ctgctatctgttaaagaagagttggctatgtaa

SEQ ID NO: 516804 - DNA, 33 bp, Homo sapien
ctgctatctgttaaaggagagttggctatgtaa

SEQ ID NO: 516805 - DNA, 33 bp, Homo sapien
tgctatgttacactgacgttcaaactcctagag

SEQ ID NO: 516806 - DNA, 33 bp, Homo sapien
tgctatgttacactgatgttcaaactcctagag

SEQ ID NO: 516807 - DNA, 33 bp, Homo sapien
aagacttcatgatgtgcaaattggtcatcatct

SEQ ID NO: 516808 - DNA, 33 bp, Homo sapien
aagacttcatgatgtgtaaattggtcatcatct

SEQ ID NO: 516809 - DNA, 33 bp, Homo sapien
tgtccataaagttttacgcagggaagaagatga

SEQ ID NO: 516810 - DNA, 33 bp, Homo sapien
tgtccataaagttttaggcagggaagaagatga

SEQ ID NO: 516811 - DNA, 33 bp, Homo sapien
aaatagcagtcataaaaatgttcactgaggtca

SEQ ID NO: 516812 - DNA, 33 bp, Homo sapien
aaatagcagtcataaagatgttcactgaggtca

SEQ ID NO: 516813 - DNA, 33 bp, Homo sapien
ttgagacaagtgagacagaatccagttaccaga

SEQ ID NO: 516814 - DNA, 33 bp, Homo sapien
ttgagacaagtgagactgaatccagttaccaga

SEQ ID NO: 516815 - DNA, 33 bp, Homo sapien
tcagctaaattccccaaaccagtaatatcaaca

SEQ ID NO: 516816 - DNA, 33 bp, Homo sapien
tcagctaaattccccagaccagtaatatcaaca

SEQ ID NO: 516817 - DNA, 33 bp, Homo sapien
tttagttcaatacataacaatcagccgtcagtt

SEQ ID NO: 516818 - DNA, 33 bp, Homo sapien
tttagttcaatacataccaatcagccgtcagtt

SEQ ID NO: 516819 - DNA, 33 bp, Homo sapien
tgatgtttgaaacatacgagttaggcaagaatt

SEQ ID NO: 516820 - DNA, 33 bp, Homo sapien
tgatgtttgaaacatatgagttaggcaagaatt

SEQ ID NO: 516821 - DNA, 33 bp, Homo sapien
tagctttctatgttcaaaagtcctttctttctt

SEQ ID NO: 516822 - DNA, 33 bp, Homo sapien
tagctttctatgttcagaagtcctttctttctt

SEQ ID NO: 516823 - DNA, 33 bp, Homo sapien
ggagacaaggcttttacgagacgattagatcat

SEQ ID NO: 516824 - DNA, 33 bp, Homo sapien
ggagacaaggcttttatgagacgattagatcat

SEQ ID NO: 516825 - DNA, 33 bp, Homo sapien
taggtgttcgttcttacagcctgagggaagtag

SEQ ID NO: 516826 - DNA, 33 bp, Homo sapien
taggtgttcgttcttatagcctgagggaagtag

SEQ ID NO: 516827 - DNA, 33 bp, Homo sapien
attatgaggcttaaaaacggagattagatgagt

SEQ ID NO: 516828 - DNA, 33 bp, Homo sapien
attatgaggcttaaaagcggagattagatgagt

SEQ ID NO: 516829 - DNA, 33 bp, Homo sapien
atatacctttactacaatcttgcctaaaaacct

SEQ ID NO: 516830 - DNA, 33 bp, Homo sapien
atatacctttactacagtcttgcctaaaaacct

SEQ ID NO: 516831 - DNA, 33 bp, Homo sapien
cagtaatccaggataaagtcccatctgcctatt

SEQ ID NO: 516832 - DNA, 33 bp, Homo sapien
cagtaatccaggataatgtcccatctgcctatt

SEQ ID NO: 516833 - DNA, 33 bp, Homo sapien
aataatgagtttaaaaattcattgcttatgagc

SEQ ID NO: 516834 - DNA, 33 bp, Homo sapien
aataatgagtttaaaagttcattgcttatgagc

SEQ ID NO: 516835 - DNA, 33 bp, Homo sapien
cacatatgtttcttagcagagtgcttgccatat

SEQ ID NO: 516836 - DNA, 33 bp, Homo sapien
cacatatgtttcttagtagagtgcttgccatat

SEQ ID NO: 516837 - DNA, 33 bp, Homo sapien
atatccttcatgctagaatgtgtaatattgtga

SEQ ID NO: 516838 - DNA, 33 bp, Homo sapien
atatccttcatgctaggatgtgtaatattgtga

SEQ ID NO: 516839 - DNA, 33 bp, Homo sapien
ggttatcatataaaagccatagttatctttctg

SEQ ID NO: 516840 - DNA, 33 bp, Homo sapien
ggttatcatataaaaggcatagttatctttctg

SEQ ID NO: 516841 - DNA, 33 bp, Homo sapien
gttaattaatctccaaagccagaactaagaaaa

SEQ ID NO: 516842 - DNA, 33 bp, Homo sapien
gttaattaatctccaaggccagaactaagaaaa

SEQ ID NO: 516843 - DNA, 33 bp, Homo sapien
tctgcttttagtgagagcctcagactgctttca

SEQ ID NO: 516844 - DNA, 33 bp, Homo sapien
tctgcttttagtgagatcctcagactgctttca

SEQ ID NO: 516845 - DNA, 33 bp, Homo sapien
actgactgaactaaaaattcactataaagagat

SEQ ID NO: 516846 - DNA, 33 bp, Homo sapien
actgactgaactaaaacttcactataaagagat

SEQ ID NO: 516847 - DNA, 33 bp, Homo sapien
aatccataccattttaagatcactatagttaac

SEQ ID NO: 516848 - DNA, 33 bp, Homo sapien
aatccataccattttaggatcactatagttaac

SEQ ID NO: 516849 - DNA, 33 bp, Homo sapien
ataaaataagcatagaactgaccttggaggccc

SEQ ID NO: 516850 - DNA, 33 bp, Homo sapien
ataaaataagcatagacctgaccttggaggccc

SEQ ID NO: 516851 - DNA, 33 bp, Homo sapien
aatatataaggctaaaatgttaacatcaagtat

SEQ ID NO: 516852 - DNA, 33 bp, Homo sapien
aatatataaggctaaagtgttaacatcaagtat

SEQ ID NO: 516853 - DNA, 33 bp, Homo sapien
ctaaaagctcttgatacggaggctgtgaaaagt

SEQ ID NO: 516854 - DNA, 33 bp, Homo sapien
ctaaaagctcttgatatggaggctgtgaaaagt

SEQ ID NO: 516855 - DNA, 33 bp, Homo sapien
agcttttagtttggtacgtttatttggcttcct

SEQ ID NO: 516856 - DNA, 33 bp, Homo sapien
agcttttagtttggtaggtttatttggcttcct

SEQ ID NO: 516857 - DNA, 33 bp, Homo sapien
gatatgttcaactgagaccagatcattcctgga

SEQ ID NO: 516858 - DNA, 33 bp, Homo sapien
gatatgttcaactgaggccagatcattcctgga

SEQ ID NO: 516859 - DNA, 33 bp, Homo sapien
catgcattaatagagcaaaggaacaatgatatt

SEQ ID NO: 516860 - DNA, 33 bp, Homo sapien
catgcattaatagagcgaaggaacaatgatatt

SEQ ID NO: 516861 - DNA, 33 bp, Homo sapien
tggagataagaaaaaaatcatccagctgtacat

SEQ ID NO: 516862 - DNA, 33 bp, Homo sapien
tggagataagaaaaaagtcatccagctgtacat

SEQ ID NO: 516863 - DNA, 33 bp, Homo sapien
caatcagaagccttaacgtagcaagagctggga

SEQ ID NO: 516864 - DNA, 33 bp, Homo sapien
caatcagaagccttaaggtagcaagagctggga

SEQ ID NO: 516865 - DNA, 33 bp, Homo sapien
atcaaattgttcacaacttcaggctcaaaattg

SEQ ID NO: 516866 - DNA, 33 bp, Homo sapien
atcaaattgttcacaatttcaggctcaaaattg

SEQ ID NO: 516867 - DNA, 33 bp, Homo sapien
gaggagaagctaggcaaatggttggaactgatt

SEQ ID NO: 516868 - DNA, 33 bp, Homo sapien
gaggagaagctaggcagatggttggaactgatt

SEQ ID NO: 516869 - DNA, 33 bp, Homo sapien
tatgctgcagtgacaacgtctcggttaacagca

SEQ ID NO: 516870 - DNA, 33 bp, Homo sapien
tatgctgcagtgacaatgtctcggttaacagca

SEQ ID NO: 516871 - DNA, 33 bp, Homo sapien
ctgctaagaagtacaacctcgggatgttagcat

SEQ ID NO: 516872 - DNA, 33 bp, Homo sapien
ctgctaagaagtacaatctcgggatgttagcat

SEQ ID NO: 516873 - DNA, 33 bp, Homo sapien
aaaattcgtatattgaagcctaacccccaagtt

SEQ ID NO: 516874 - DNA, 33 bp, Homo sapien
aaaattcgtatattgatgcctaacccccaagtt

SEQ ID NO: 516875 - DNA, 33 bp, Homo sapien
aacaaattgaaggcgacgaatgtggaggacttt

SEQ ID NO: 516876 - DNA, 33 bp, Homo sapien
aacaaattgaaggcgatgaatgtggaggacttt

SEQ ID NO: 516877 - DNA, 33 bp, Homo sapien
actagctaaaactaatgaaacgctaggaatttt

SEQ ID NO: 516878 - DNA, 33 bp, Homo sapien
actagctaaaactaattaaacgctaggaatttt

SEQ ID NO: 516879 - DNA, 33 bp, Homo sapien; identical to SEQ ID NO: 516877

SEQ ID NO: 516880 - DNA, 33 bp, Homo sapien; identical to SEQ ID NO: 516878

SEQ ID NO: 516881 - DNA, 33 bp, Homo sapien
ttgagttttgtccttaagtccacatatgcagtt

SEQ ID NO: 516882 - DNA, 33 bp, Homo sapien
ttgagttttgtccttaggtccacatatgcagtt

SEQ ID NO: 516883 - DNA, 33 bp, Homo sapien; identical to SEQ ID NO: 516881

SEQ ID NO: 516884 - DNA, 33 bp, Homo sapien; identical to SEQ ID NO: 516882

SEQ ID NO: 516885 - DNA, 33 bp, Homo sapien
tcccaattgaagattgcaaaccgtgacatcact

SEQ ID NO: 516886 - DNA, 33 bp, Homo sapien
tcccaattgaagattgtaaaccgtgacatcact

SEQ ID NO: 516887 - DNA, 33 bp, Homo sapien; identical to SEQ ID NO: 516885

SEQ ID NO: 516888 - DNA, 33 bp, Homo sapien; identical to SEQ ID NO: 516886

SEQ ID NO: 516889 - DNA, 33 bp, Homo sapien
aaagttgctcaaatgcagatttgcacgacagcc

SEQ ID NO: 516890 - DNA, 33 bp, Homo sapien
aaagttgctcaaatgccgatttgcacgacagcc

SEQ ID NO: 516891 - DNA, 33 bp, Homo sapien
tttcgtctcaaaaggaacatttgcaggctgtcg

SEQ ID NO: 516892 - DNA, 33 bp, Homo sapien
tttcgtctcaaaaggagcatttgcaggctgtcg

SEQ ID NO: 516893 - DNA, 33 bp, Homo sapien
aaggcatagttggagaaggctttttcttgtgaa

SEQ ID NO: 516894 - DNA, 33 bp, Homo sapien
aaggcatagttggagacggctttttcttgtgaa

SEQ ID NO: 516895 - DNA, 33 bp, Homo sapien
gttgataatgaggccaagaccggggccttcact

SEQ ID NO: 516896 - DNA, 33 bp, Homo sapien
gttgataatgaggccatgaccggggccttcact

SEQ ID NO: 516897 - DNA, 33 bp, Homo sapien
gtaccactgtattttaaatttacacatcaccac

SEQ ID NO: 516898 - DNA, 33 bp, Homo sapien
gtaccactgtattttacatttacacatcaccac

SEQ ID NO: 516899 - DNA, 33 bp, Homo sapien
gtaaattgtatacttgaatctcaagtccagttc

SEQ ID NO: 516900 - DNA, 33 bp, Homo sapien
gtaaattgtatacttggatctcaagtccagttc

SEQ ID NO: 516901 - DNA, 33 bp, Homo sapien
gtatttctgtaggttaagtttttggaaatggta

SEQ ID NO: 516902 - DNA, 33 bp, Homo sapien
gtatttctgtaggttacgtttttggaaatggta

SEQ ID NO: 516903 - DNA, 33 bp, Homo sapien; identical to SEQ ID NO: 516901

SEQ ID NO: 516904 - DNA, 33 bp, Homo sapien; identical to SEQ ID NO: 516902

SEQ ID NO: 516905 - DNA, 33 bp, Homo sapien
agcagtgacatctttaagtacaagtacacacca

SEQ ID NO: 516906 - DNA, 33 bp, Homo sapien
agcagtgacatctttaggtacaagtacacacca

SEQ ID NO: 516907 - DNA, 33 bp, Homo sapien
ggatatggctttcagaacaaacaagtaatacac

SEQ ID NO: 516908 - DNA, 33 bp, Homo sapien
ggatatggctttcagagcaaacaagtaatacac

SEQ ID NO: 516909 - DNA, 33 bp, Homo sapien
tccctgctcatttctcccgtggattgggccttc

SEQ ID NO: 516910 - DNA, 33 bp, Homo sapien
tccctgctcatttctctcgtggattgggccttc

SEQ ID NO: 516911 - DNA, 33 bp, Homo sapien
cagcgctttagctgcaagtaaatgccttcttgc

SEQ ID NO: 516912 - DNA, 33 bp, Homo sapien
cagcgctttagctgcatgtaaatgccttcttgc

SEQ ID NO: 516913 - DNA, 33 bp, Homo sapien
ttcatatctccatgcagtgattttttttttctc

SEQ ID NO: 516914 - DNA, 33 bp, Homo sapien
ttcatatctccatgcattgattttttttttctc

SEQ ID NO: 516915 - DNA, 33 bp, Homo sapien
tttaaagtgtacaagcaccgtatcaatattaag

SEQ ID NO: 516916 - DNA, 33 bp, Homo sapien
tttaaagtgtacaagccccgtatcaatattaag

SEQ ID NO: 516917 - DNA, 33 bp, Homo sapien
ttaccttccagttgtacgtaacctgtatttccc

SEQ ID NO: 516918 - DNA, 33 bp, Homo sapien
ttaccttccagttgtatgtaacctgtatttccc

SEQ ID NO: 516919 - DNA, 33 bp, Homo sapien
tttatgaggggtaggacataaatgcagagtttc

SEQ ID NO: 516920 - DNA, 33 bp, Homo sapien
tttatgaggggtaggagataaatgcagagtttc

SEQ ID NO: 516921 - DNA, 33 bp, Homo sapien
tggggagtccaagatcaagatattggcaggttc

SEQ ID NO: 516922 - DNA, 33 bp, Homo sapien
tggggagtccaagatccagatattggcaggttc

SEQ ID NO: 516923 - DNA, 33 bp, Homo sapien
tgttaagtatttcaccaacaggtacaggttata

SEQ ID NO: 516924 - DNA, 33 bp, Homo sapien
tgttaagtatttcaccgacaggtacaggttata

SEQ ID NO: 516925 - DNA, 33 bp, Homo sapien
gaagttgggttgggcagaactttgggaaacact

SEQ ID NO: 516926 - DNA, 33 bp, Homo sapien
gaagttgggttgggcataactttgggaaacact

SEQ ID NO: 516927 - DNA, 33 bp, Homo sapien
actggccagccaaatgaagaaggttgaaaccgc

SEQ ID NO: 516928 - DNA, 33 bp, Homo sapien
actggccagccaaatgcagaaggttgaaaccgc

SEQ ID NO: 516929 - DNA, 33 bp, Homo sapien
aggatgagaattttgaatagcatttgatttatt

SEQ ID NO: 516930 - DNA, 33 bp, Homo sapien
aggatgagaattttgagtagcatttgatttatt

SEQ ID NO: 516931 - DNA, 33 bp, Homo sapien
tagtaaaaagttaatacatgggctgaaagagga

SEQ ID NO: 516932 - DNA, 33 bp, Homo sapien
tagtaaaaagttaatagatgggctgaaagagga

SEQ ID NO: 516933 - DNA, 33 bp, Homo sapien
aatgaaaatagaagtacgaagctggattaaatg

SEQ ID NO: 516934 - DNA, 33 bp, Homo sapien
aatgaaaatagaagtaggaagctggattaaatg

SEQ ID NO: 516935 - DNA, 33 bp, Homo sapien
taagaatgtataaaaccgctctaactccatccc

SEQ ID NO: 516936 - DNA, 33 bp, Homo sapien
taagaatgtataaaactgctctaactccatccc

SEQ ID NO: 516937 - DNA, 33 bp, Homo sapien
gcagatggacactaagacaacaggtataaaatg

SEQ ID NO: 516938 - DNA, 33 bp, Homo sapien
gcagatggacactaagtcaacaggtataaaatg

SEQ ID NO: 516939 - DNA, 33 bp, Homo sapien
acagaacttggacttaggcattgacgtgggaaa

SEQ ID NO: 516940 - DNA, 33 bp, Homo sapien
acagaacttggacttatgcattgacgtgggaaa

SEQ ID NO: 516941 - DNA, 33 bp, Homo sapien
ttcaaacacaggaatccatgcatacgtgtatta

SEQ ID NO: 516942 - DNA, 33 bp, Homo sapien
ttcaaacacaggaatctatgcatacgtgtatta

SEQ ID NO: 516943 - DNA, 33 bp, Homo sapien
acatcttcaggctccaaggaagatcaaattaag

SEQ ID NO: 516944 - DNA, 33 bp, Homo sapien
acatcttcaggctccagggaagatcaaattaag

SEQ ID NO: 516945 - DNA, 33 bp, Homo sapien
ctatgactaaccattgcaaagatgcagaagcat

SEQ ID NO: 516946 - DNA, 33 bp, Homo sapien
ctatgactaaccattgtaaagatgcagaagcat

SEQ ID NO: 516947 - DNA, 33 bp, Homo sapien
taattgatctgatttacccatccccaagttaca

SEQ ID NO: 516948 - DNA, 33 bp, Homo sapien
taattgatctgatttatccatccccaagttaca

SEQ ID NO: 516949 - DNA, 33 bp, Homo sapien
aaacttagactctttgaattgttcccattaaat

SEQ ID NO: 516950 - DNA, 33 bp, Homo sapien
aaacttagactctttggattgttcccattaaat

SEQ ID NO: 516951 - DNA, 33 bp, Homo sapien
tctgccactgagattgaattaacaggagctcac

SEQ ID NO: 516952 - DNA, 33 bp, Homo sapien
tctgccactgagattggattaacaggagctcac

SEQ ID NO: 516953 - DNA, 33 bp, Homo sapien
atatgaaagtgctgtacaatttccaagttcctt

SEQ ID NO: 516954 - DNA, 33 bp, Homo sapien
atatgaaagtgctgtataatttccaagttcctt

SEQ ID NO: 516955 - DNA, 33 bp, Homo sapien
agtaaggctgacattaactgcaaacagattaaa

SEQ ID NO: 516956 - DNA, 33 bp, Homo sapien
agtaaggctgacattatctgcaaacagattaaa

SEQ ID NO: 516957 - DNA, 33 bp, Homo sapien
cagtttctttagccaacgggattttattaccaa

SEQ ID NO: 516958 - DNA, 33 bp, Homo sapien
cagtttctttagccaatgggattttattaccaa

SEQ ID NO: 516959 - DNA, 33 bp, Homo sapien
agctaaaattgaggacagagtgcatagaagaca

SEQ ID NO: 516960 - DNA, 33 bp, Homo sapien
agctaaaattgaggacggagtgcatagaagaca

SEQ ID NO: 516961 - DNA, 33 bp, Homo sapien
acataaatcaagtctgaatgaatctttggtatt

SEQ ID NO: 516962 - DNA, 33 bp, Homo sapien
acataaatcaagtctggatgaatctttggtatt

SEQ ID NO: 516963 - DNA, 33 bp, Homo sapien
tattccttttgttgaacgtctcccactattaaa

SEQ ID NO: 516964 - DNA, 33 bp, Homo sapien
tattccttttgttgaatgtctcccactattaaa

SEQ ID NO: 516965 - DNA, 33 bp, Homo sapien
cctcatcttcatcttcccatttgagcactcagt

SEQ ID NO: 516966 - DNA, 33 bp, Homo sapien
cctcatcttcatcttctcatttgagcactcagt

SEQ ID NO: 516967 - DNA, 33 bp, Homo sapien
atggtcttaggaatgacgatctaaccagaattg

SEQ ID NO: 516968 - DNA, 33 bp, Homo sapien
atggtcttaggaatgatgatctaaccagaattg

SEQ ID NO: 516969 - DNA, 33 bp, Homo sapien
ctggttgcagaagtgacagaaaaatgtgaacga

SEQ ID NO: 516970 - DNA, 33 bp, Homo sapien
ctggttgcagaagtgagagaaaaatgtgaacga

SEQ ID NO: 516971 - DNA, 33 bp, Homo sapien
gttggttttcagttcacgattcctttgttccta

SEQ ID NO: 516972 - DNA, 33 bp, Homo sapien
gttggttttcagttcatgattcctttgttccta

SEQ ID NO: 516973 - DNA, 33 bp, Homo sapien
catcaaatgccaccagcattccagaagaaatct

SEQ ID NO: 516974 - DNA, 33 bp, Homo sapien
catcaaatgccaccagtattccagaagaaatct

SEQ ID NO: 516975 - DNA, 33 bp, Homo sapien
agctcattaagccccaactgcacacttcaggac

SEQ ID NO: 516976 - DNA, 33 bp, Homo sapien
agctcattaagccccagctgcacacttcaggac

SEQ ID NO: 516977 - DNA, 33 bp, Homo sapien
aactggtatggtctgaataattacacaggtgat

SEQ ID NO: 516978 - DNA, 33 bp, Homo sapien
aactggtatggtctgagtaattacacaggtgat

SEQ ID NO: 516979 - DNA, 33 bp, Homo sapien
ccactgttaaggtacacctaggccttgaggaag

SEQ ID NO: 516980 - DNA, 33 bp, Homo sapien
ccactgttaaggtacatctaggccttgaggaag

SEQ ID NO: 516981 - DNA, 33 bp, Homo sapien
tttgcatgaaaagtaaactggaatggcaaatgc

SEQ ID NO: 516982 - DNA, 33 bp, Homo sapien
tttgcatgaaaagtaacctggaatggcaaatgc

SEQ ID NO: 516983 - DNA, 33 bp, Homo sapien
gacatctctcttcaccaatttgcccaagtcagt

SEQ ID NO: 516984 - DNA, 33 bp, Homo sapien
gacatctctcttcaccgatttgcccaagtcagt

SEQ ID NO: 516985 - DNA, 33 bp, Homo sapien
tccacaccagtttgctcaagctactttatcaag

SEQ ID NO: 516986 - DNA, 33 bp, Homo sapien
tccacaccagtttgctgaagctactttatcaag

SEQ ID NO: 516987 - DNA, 33 bp, Homo sapien
tgctttcttaccttcaaagtgacagagacaatg

SEQ ID NO: 516988 - DNA, 33 bp, Homo sapien
tgctttcttaccttcacagtgacagagacaatg

SEQ ID NO: 516989 - DNA, 33 bp, Homo sapien
ttttccagaacccagccaaataatatacttcat

SEQ ID NO: 516990 - DNA, 33 bp, Homo sapien
ttttccagaacccagcgaaataatatacttcat

SEQ ID NO: 516991 - DNA, 33 bp, Homo sapien
cactggtgtattgccactacctagtacagtatt

SEQ ID NO: 516992 - DNA, 33 bp, Homo sapien
cactggtgtattgccagtacctagtacagtatt

SEQ ID NO: 516993 - DNA, 33 bp, Homo sapien
cggccccatctttccacaatgtcacattggaga

SEQ ID NO: 516994 - DNA, 33 bp, Homo sapien
cggccccatctttccataatgtcacattggaga

SEQ ID NO: 516995 - DNA, 33 bp, Homo sapien
tgaagctgttttccgaaaattccaatgtacttg

SEQ ID NO: 516996 - DNA, 33 bp, Homo sapien
tgaagctgttttccgacaattccaatgtacttg

SEQ ID NO: 516997 - DNA, 33 bp, Homo sapien
ctggccttgtttactgaaagaagctctctgctg

SEQ ID NO: 516998 - DNA, 33 bp, Homo sapien
ctggccttgtttactggaagaagctctctgctg

SEQ ID NO: 516999 - DNA, 33 bp, Homo sapien
tctaataattttgacccaaagggcacataacac

SEQ ID NO: 517000 - DNA, 33 bp, Homo sapien
tctaataattttgacctaaagggcacataacac

SEQ ID NO: 517001 - DNA, 33 bp, Homo sapien
ttggcatatctgtgaagtgtcagcagggccaat

SEQ ID NO: 517002 - DNA, 33 bp, Homo sapien
ttggcatatctgtgaattgtcagcagggccaat

SEQ ID NO: 517003 - DNA, 33 bp, Homo sapien
gatccattaattctaaaacactactaatccact

SEQ ID NO: 517004 - DNA, 33 bp, Homo sapien
gatccattaattctaagacactactaatccact

SEQ ID NO: 517005 - DNA, 33 bp, Homo sapien
gatgctagatatttctaaacgttttgtgcccta

SEQ ID NO: 517006 - DNA, 33 bp, Homo sapien
gatgctagatatttctgaacgttttgtgcccta

SEQ ID NO: 517007 - DNA, 33 bp, Homo sapien
ttatgaatctctctacaagaagaaagaacccat

SEQ ID NO: 517008 - DNA, 33 bp, Homo sapien
ttatgaatctctctaccagaagaaagaacccat

SEQ ID NO: 517009 - DNA, 33 bp, Homo sapien
ctcctccagatatttaggtgatcagaaagaagt

SEQ ID NO: 517010 - DNA, 33 bp, Homo sapien
ctcctccagatatttatgtgatcagaaagaagt

SEQ ID NO: 517011 - DNA, 33 bp, Homo sapien
taaacgtttctccatgcatcatgaaatgtaatc

SEQ ID NO: 517012 - DNA, 33 bp, Homo sapien
taaacgtttctccatgtatcatgaaatgtaatc

SEQ ID NO: 517013 - DNA, 33 bp, Homo sapien
gaataacttgccaagaatcatttcccttaagct

SEQ ID NO: 517014 - DNA, 33 bp, Homo sapien
gaataacttgccaagagtcatttcccttaagct

SEQ ID NO: 517015 - DNA, 33 bp, Homo sapien
atgaaaaattatcctacgacaaactccttcagc

SEQ ID NO: 517016 - DNA, 33 bp, Homo sapien
atgaaaaattatcctatgacaaactccttcagc

SEQ ID NO: 517017 - DNA, 33 bp, Homo sapien
tctttatatctgcacactgtatatctgcttatg

SEQ ID NO: 517018 - DNA, 33 bp, Homo sapien
tctttatatctgcacattgtatatctgcttatg

SEQ ID NO: 517019 - DNA, 33 bp, Homo sapien
agtgaatcagcagatactaaaatgaaaacaaaa

SEQ ID NO: 517020 - DNA, 33 bp, Homo sapien
agtgaatcagcagatattaaaatgaaaacaaaa

SEQ ID NO: 517021 - DNA, 33 bp, Homo sapien
aattcttcacatcagaaaccaggataatttcta

SEQ ID NO: 517022 - DNA, 33 bp, Homo sapien
aattcttcacatcagagaccaggataatttcta

SEQ ID NO: 517023 - DNA, 33 bp, Homo sapien
aattagccattaatcaaaggtctaaaagtttta

SEQ ID NO: 517024 - DNA, 33 bp, Homo sapien
aattagccattaatcacaggtctaaaagtttta

SEQ ID NO: 517025 - DNA, 33 bp, Homo sapien
tttcttttatcgctaccaaattgtactatgact

SEQ ID NO: 517026 - DNA, 33 bp, Homo sapien
tttcttttatcgctactaaattgtactatgact

SEQ ID NO: 517027 - DNA, 33 bp, Homo sapien
attctggttattagtccctcatcagatagatag

SEQ ID NO: 517028 - DNA, 33 bp, Homo sapien
attctggttattagtctctcatcagatagatag

SEQ ID NO: 517029 - DNA, 33 bp, Homo sapien
gctattaatttcaagcaactttaagtatatgct

SEQ ID NO: 517030 - DNA, 33 bp, Homo sapien
gctattaatttcaagcgactttaagtatatgct

SEQ ID NO: 517031 - DNA, 33 bp, Homo sapien
tgcccccacatatccccaagtatggagccctgc

SEQ ID NO: 517032 - DNA, 33 bp, Homo sapien
tgcccccacatatccctaagtatggagccctgc

SEQ ID NO: 517033 - DNA, 33 bp, Homo sapien
taatattttgcttgcacggttactataaaaata

SEQ ID NO: 517034 - DNA, 33 bp, Homo sapien
taatattttgcttgcatggttactataaaaata

SEQ ID NO: 517035 - DNA, 33 bp, Homo sapien
atgtataaaacgttccccgtcttcctatgaata

SEQ ID NO: 517036 - DNA, 33 bp, Homo sapien
atgtataaaacgttcctcgtcttcctatgaata

SEQ ID NO: 517037 - DNA, 33 bp, Homo sapien
tccttcgctcgctcaacctcttttattcagtat

SEQ ID NO: 517038 - DNA, 33 bp, Homo sapien
tccttcgctcgctcaatctcttttattcagtat

SEQ ID NO: 517039 - DNA, 33 bp, Homo sapien
tccataccaccttcaacgctaacctgcttcagt

SEQ ID NO: 517040 - DNA, 33 bp, Homo sapien
tccataccaccttcaatgctaacctgcttcagt

SEQ ID NO: 517041 - DNA, 33 bp, Homo sapien
catgaacaaactagcccgaaatgatcttttgac

SEQ ID NO: 517042 - DNA, 33 bp, Homo sapien
catgaacaaactagcctgaaatgatcttttgac

SEQ ID NO: 517043 - DNA, 33 bp, Homo sapien
tgttcatttatgtgtacgtataggttaaggaag

SEQ ID NO: 517044 - DNA, 33 bp, Homo sapien
tgttcatttatgtgtatgtataggttaaggaag

SEQ ID NO: 517045 - DNA, 33 bp, Homo sapien
tcagagtaaagccaaacgtataaggacagaaat

SEQ ID NO: 517046 - DNA, 33 bp, Homo sapien
tcagagtaaagccaaatgtataaggacagaaat

SEQ ID NO: 517047 - DNA, 33 bp, Homo sapien
tgagaacattgagaaacggttattgcattgagc

SEQ ID NO: 517048 - DNA, 33 bp, Homo sapien
tgagaacattgagaaagggttattgcattgagc

SEQ ID NO: 517049 - DNA, 33 bp, Homo sapien
taaaaaatcagtagaaaacagaaaagtaataaa

SEQ ID NO: 517050 - DNA, 33 bp, Homo sapien
taaaaaatcagtagaagacagaaaagtaataaa

SEQ ID NO: 517051 - DNA, 33 bp, Homo sapien
aataatcttaaggtaccataagagagcagtcct

SEQ ID NO: 517052 - DNA, 33 bp, Homo sapien
aataatcttaaggtactataagagagcagtcct

SEQ ID NO: 517053 - DNA, 33 bp, Homo sapien
ggggtaaatgggcatcactttgtgaccttttca

SEQ ID NO: 517054 - DNA, 33 bp, Homo sapien
ggggtaaatgggcatcgctttgtgaccttttca

SEQ ID NO: 517055 - DNA, 33 bp, Homo sapien
agattgtgttcaagcagctctattaaaaagtta

SEQ ID NO: 517056 - DNA, 33 bp, Homo sapien
agattgtgttcaagcatctctattaaaaagtta

SEQ ID NO: 517057 - DNA, 33 bp, Homo sapien
tttcatttgtggcggaccatgatagcgctagct

SEQ ID NO: 517058 - DNA, 33 bp, Homo sapien
tttcatttgtggcggatcatgatagcgctagct

SEQ ID NO: 517059 - DNA, 33 bp, Homo sapien
caataattaaaaaaaagcttgttgaagtgaact

SEQ ID NO: 517060 - DNA, 33 bp, Homo sapien
caataattaaaaaaaatcttgttgaagtgaact

SEQ ID NO: 517061 - DNA, 33 bp, Homo sapien
cttctatttgatgaaacgagaggaaagagtaaa

SEQ ID NO: 517062 - DNA, 33 bp, Homo sapien
cttctatttgatgaaaggagaggaaagagtaaa

SEQ ID NO: 517063 - DNA, 33 bp, Homo sapien
ttggggataaaattcaagtcaagactgtaatca

SEQ ID NO: 517064 - DNA, 33 bp, Homo sapien
ttggggataaaattcaggtcaagactgtaatca

SEQ ID NO: 517065 - DNA, 33 bp, Homo sapien
aaatgaagaagaaagtaaacaatgtgaaatttt

SEQ ID NO: 517066 - DNA, 33 bp, Homo sapien
aaatgaagaagaaagtgaacaatgtgaaatttt

SEQ ID NO: 517067 - DNA, 33 bp, Homo sapien
atacataggaccagaaatagtgtctgttcccac

SEQ ID NO: 517068 - DNA, 33 bp, Homo sapien
atacataggaccagaagtagtgtctgttcccac

SEQ ID NO: 517069 - DNA, 33 bp, Homo sapien
ggcatataagaaaagacgaagcccagtgtacct

SEQ ID NO: 517070 - DNA, 33 bp, Homo sapien
ggcatataagaaaagatgaagcccagtgtacct

SEQ ID NO: 517071 - DNA, 33 bp, Homo sapien
aaagctctggggtccacgtgctgagatacttgg

SEQ ID NO: 517072 - DNA, 33 bp, Homo sapien
aaagctctggggtccatgtgctgagatacttgg

SEQ ID NO: 517073 - DNA, 33 bp, Homo sapien
ggaacagaatgcaccacaggaacagtaagttca

SEQ ID NO: 517074 - DNA, 33 bp, Homo sapien
ggaacagaatgcaccataggaacagtaagttca

SEQ ID NO: 517075 - DNA, 33 bp, Homo sapien
aaatgtccaggttacaatcggtgaatccgaccg

SEQ ID NO: 517076 - DNA, 33 bp, Homo sapien
aaatgtccaggttacagtcggtgaatccgaccg

SEQ ID NO: 517077 - DNA, 33 bp, Homo sapien
ttggccttagaaagtaagagattgataagtgca

SEQ ID NO: 517078 - DNA, 33 bp, Homo sapien
ttggccttagaaagtacgagattgataagtgca

SEQ ID NO: 517079 - DNA, 33 bp, Homo sapien
agctgcaagcacaaaacaaagaacttattttac

SEQ ID NO: 517080 - DNA, 33 bp, Homo sapien
agctgcaagcacaaaagaaagaacttattttac

SEQ ID NO: 517081 - DNA, 33 bp, Homo sapien
ttatttgaagacatgaactactctacctaccaa

SEQ ID NO: 517082 - DNA, 33 bp, Homo sapien
ttatttgaagacatgacctactctacctaccaa

SEQ ID NO: 517083 - DNA, 33 bp, Homo sapien
attcagatagaagccaactggaagtacagggca

SEQ ID NO: 517084 - DNA, 33 bp, Homo sapien
attcagatagaagccagctggaagtacagggca

SEQ ID NO: 517085 - DNA, 33 bp, Homo sapien
ttctctccactagctacaaagtaagagtataat

SEQ ID NO: 517086 - DNA, 33 bp, Homo sapien
ttctctccactagctagaaagtaagagtataat

SEQ ID NO: 517087 - DNA, 33 bp, Homo sapien
tcacatgataaaaatgacaacacataaacagat

SEQ ID NO: 517088 - DNA, 33 bp, Homo sapien
tcacatgataaaaatgtcaacacataaacagat

SEQ ID NO: 517089 - DNA, 33 bp, Homo sapien
gttgattgagaaaatagcaaatgtcagaaagtt

SEQ ID NO: 517090 - DNA, 33 bp, Homo sapien
gttgattgagaaaatatcaaatgtcagaaagtt

SEQ ID NO: 517091 - DNA, 33 bp, Homo sapien
gctgcctctgacatcaaactattgtgctttaat

SEQ ID NO: 517092 - DNA, 33 bp, Homo sapien
gctgcctctgacatcagactattgtgctttaat

SEQ ID NO: 517093 - DNA, 33 bp, Homo sapien
gaaatagtgaataagcccattaaaccagcatct

SEQ ID NO: 517094 - DNA, 33 bp, Homo sapien
gaaatagtgaataagctcattaaaccagcatct

SEQ ID NO: 517095 - DNA, 33 bp, Homo sapien
gaacatttcctgataccagtgcaacaggtgaca

SEQ ID NO: 517096 - DNA, 33 bp, Homo sapien
gaacatttcctgatactagtgcaacaggtgaca

SEQ ID NO: 517097 - DNA, 33 bp, Homo sapien
gggagatgattgacaacttaatctagttcggaa

SEQ ID NO: 517098 - DNA, 33 bp, Homo sapien
gggagatgattgacaatttaatctagttcggaa

SEQ ID NO: 517099 - DNA, 33 bp, Homo sapien
ttttttttcctttctacctatacctgttatttg

SEQ ID NO: 517100 - DNA, 33 bp, Homo sapien
ttttttttcctttctatctatacctgttatttg

SEQ ID NO: 517101 - DNA, 33 bp, Homo sapien
gggtacataagttgtacaaacaagggactgggc

SEQ ID NO: 517102 - DNA, 33 bp, Homo sapien
gggtacataagttgtataaacaagggactgggc

SEQ ID NO: 517103 - DNA, 33 bp, Homo sapien
tatcgaatgaattgaacaaagctctaagctata

SEQ ID NO: 517104 - DNA, 33 bp, Homo sapien
tatcgaatgaattgaataaagctctaagctata

SEQ ID NO: 517105 - DNA, 33 bp, Homo sapien
ttgaattaaatgcttaccttgttacactgttga

SEQ ID NO: 517106 - DNA, 33 bp, Homo sapien
ttgaattaaatgcttatcttgttacactgttga

SEQ ID NO: 517107 - DNA, 33 bp, Homo sapien
catgaagacctaatcacaagactggaggctgat

SEQ ID NO: 517108 - DNA, 33 bp, Homo sapien
catgaagacctaatcagaagactggaggctgat

SEQ ID NO: 517109 - DNA, 33 bp, Homo sapien
agaaaactgaggttcaggtcacacacttgagca

SEQ ID NO: 517110 - DNA, 33 bp, Homo sapien
agaaaactgaggttcatgtcacacacttgagca

SEQ ID NO: 517111 - DNA, 33 bp, Homo sapien
actgaacaagttgctcaattaaccattaatcag

SEQ ID NO: 517112 - DNA, 33 bp, Homo sapien
actgaacaagttgctccattaaccattaatcag

SEQ ID NO: 517113 - DNA, 33 bp, Homo sapien
gtgaagatgtgtggaaagccctcttgttgatgg

SEQ ID NO: 517114 - DNA, 33 bp, Homo sapien
gtgaagatgtgtggaaggccctcttgttgatgg

SEQ ID NO: 517115 - DNA, 33 bp, Homo sapien
ttgaaatgtaaacttccccttaacaatgtctgt

SEQ ID NO: 517116 - DNA, 33 bp, Homo sapien
ttgaaatgtaaacttcgccttaacaatgtctgt

SEQ ID NO: 517117 - DNA, 33 bp, Homo sapien
gctattcaactagtcaaccacacaatcacaaag

SEQ ID NO: 517118 - DNA, 33 bp, Homo sapien
gctattcaactagtcagccacacaatcacaaag

SEQ ID NO: 517119 - DNA, 33 bp, Homo sapien
tgcatatgtagttgaaactttgttacatattat

SEQ ID NO: 517120 - DNA, 33 bp, Homo sapien
tgcatatgtagttgaagctttgttacatattat

SEQ ID NO: 517121 - DNA, 33 bp, Homo sapien
aaacagtctctccccaatggataggcctgaacc

SEQ ID NO: 517122 - DNA, 33 bp, Homo sapien
aaacagtctctccccagtggataggcctgaacc

SEQ ID NO: 517123 - DNA, 33 bp, Homo sapien
ctttctattttcagcggaaattactgaacaatc

SEQ ID NO: 517124 - DNA, 33 bp, Homo sapien
ctttctattttcagcgtaaattactgaacaatc

SEQ ID NO: 517125 - DNA, 33 bp, Homo sapien
actgttggtgtgaagacgtaattgacagtcata

SEQ ID NO: 517126 - DNA, 33 bp, Homo sapien
actgttggtgtgaagatgtaattgacagtcata

SEQ ID NO: 517127 - DNA, 33 bp, Homo sapien
tgtggggcagagctcaacaggtcattgttcact

SEQ ID NO: 517128 - DNA, 33 bp, Homo sapien
tgtggggcagagctcagcaggtcattgttcact

SEQ ID NO: 517129 - DNA, 33 bp, Homo sapien
aacggccctaatcaagaccagcttcttcacaat

SEQ ID NO: 517130 - DNA, 33 bp, Homo sapien
aacggccctaatcaagtccagcttcttcacaat

SEQ ID NO: 517131 - DNA, 33 bp, Homo sapien
caatccctgagagtcaccttcttttgaaataat

SEQ ID NO: 517132 - DNA, 33 bp, Homo sapien
caatccctgagagtcatcttcttttgaaataat

SEQ ID NO: 517133 - DNA, 33 bp, Homo sapien
attaaatagcagattaaacgcatcagtaactgt

SEQ ID NO: 517134 - DNA, 33 bp, Homo sapien
attaaatagcagattatacgcatcagtaactgt

SEQ ID NO: 517135 - DNA, 33 bp, Homo sapien
gaaaaaggacaatgagcaattaaagtttgctta

SEQ ID NO: 517136 - DNA, 33 bp, Homo sapien
gaaaaaggacaatgagtaattaaagtttgctta

SEQ ID NO: 517137 - DNA, 33 bp, Homo sapien
ctgattacccagcctccaaattgtgtaaggcca

SEQ ID NO: 517138 - DNA, 33 bp, Homo sapien
ctgattacccagcctctaaattgtgtaaggcca

SEQ ID NO: 517139 - DNA, 33 bp, Homo sapien
cagctattacattccaatcttaggagctaggtt

SEQ ID NO: 517140 - DNA, 33 bp, Homo sapien
cagctattacattccactcttaggagctaggtt

SEQ ID NO: 517141 - DNA, 33 bp, Homo sapien
gagggcaaaacagggcacaaattcacagtgtgc

SEQ ID NO: 517142 - DNA, 33 bp, Homo sapien
gagggcaaaacagggcgcaaattcacagtgtgc

SEQ ID NO: 517143 - DNA, 33 bp, Homo sapien
tcagtagctgtctacacacacaaatgaggaatg

SEQ ID NO: 517144 - DNA, 33 bp, Homo sapien
tcagtagctgtctacatacacaaatgaggaatg

SEQ ID NO: 517145 - DNA, 33 bp, Homo sapien
gttgcatagggagcaacttcatgttcctttggc

SEQ ID NO: 517146 - DNA, 33 bp, Homo sapien
gttgcatagggagcaatttcatgttcctttggc

SEQ ID NO: 517147 - DNA, 33 bp, Homo sapien
ttcagaatgcaatgttaaaattactaagaacct

SEQ ID NO: 517148 - DNA, 33 bp, Homo sapien
ttcagaatgcaatgtttaaattactaagaacct

SEQ ID NO: 517149 - DNA, 33 bp, Homo sapien
gcaggcccagtggtgacgagttcccttaccatg

SEQ ID NO: 517150 - DNA, 33 bp, Homo sapien
gcaggcccagtggtgatgagttcccttaccatg

SEQ ID NO: 517151 - DNA, 33 bp, Homo sapien
tttcaggtacattaataaaacgtaggtttcgtc

SEQ ID NO: 517152 - DNA, 33 bp, Homo sapien
tttcaggtacattaatcaaacgtaggtttcgtc

SEQ ID NO: 517153 - DNA, 33 bp, Homo sapien
tgctccagttctgttaccttcaccactggcaga

SEQ ID NO: 517154 - DNA, 33 bp, Homo sapien
tgctccagttctgttatcttcaccactggcaga

SEQ ID NO: 517155 - DNA, 33 bp, Homo sapien
taatgccagaattacaagacggcaatgaggatt

SEQ ID NO: 517156 - DNA, 33 bp, Homo sapien
taatgccagaattacaggacggcaatgaggatt

SEQ ID NO: 517157 - DNA, 33 bp, Homo sapien
agaggagaggacagagaaatcttaaattggtag

SEQ ID NO: 517158 - DNA, 33 bp, Homo sapien
agaggagaggacagagcaatcttaaattggtag

SEQ ID NO: 517159 - DNA, 33 bp, Homo sapien
tcttaaattggtagacaagtaggagttggtgga

SEQ ID NO: 517160 - DNA, 33 bp, Homo sapien
tcttaaattggtagactagtaggagttggtgga

SEQ ID NO: 517161 - DNA, 33 bp, Homo sapien
acctgtttgtaacagtgaagattatgagacttc

SEQ ID NO: 517162 - DNA, 33 bp, Homo sapien
acctgtttgtaacagttaagattatgagacttc

SEQ ID NO: 517163 - DNA, 33 bp, Homo sapien
tagacttcttgcaggaaacctttacttgatccc

SEQ ID NO: 517164 - DNA, 33 bp, Homo sapien
tagacttcttgcaggacacctttacttgatccc

SEQ ID NO: 517165 - DNA, 33 bp, Homo sapien
agggaagacaggaaaaacatcatatgagcccag

SEQ ID NO: 517166 - DNA, 33 bp, Homo sapien
agggaagacaggaaaatcatcatatgagcccag

SEQ ID NO: 517167 - DNA, 33 bp, Homo sapien
gctgaaagcattttagacactactttactgggg

SEQ ID NO: 517168 - DNA, 33 bp, Homo sapien
gctgaaagcattttagccactactttactgggg

SEQ ID NO: 517169 - DNA, 33 bp, Homo sapien
cttctcgacattataacacctatcatgagtgcc

SEQ ID NO: 517170 - DNA, 33 bp, Homo sapien
cttctcgacattataatacctatcatgagtgcc

SEQ ID NO: 517171 - DNA, 33 bp, Homo sapien
agtgtccaacaatagaaacatggataataacct

SEQ ID NO: 517172 - DNA, 33 bp, Homo sapien
agtgtccaacaatagagacatggataataacct

SEQ ID NO: 517173 - DNA, 33 bp, Homo sapien
gaggatctgaaaagaaacattgaagaatgagta

SEQ ID NO: 517174 - DNA, 33 bp, Homo sapien
gaggatctgaaaagaagcattgaagaatgagta

SEQ ID NO: 517175 - DNA, 33 bp, Homo sapien
cagaccaatgaaggacaaactaatctctagcta

SEQ ID NO: 517176 - DNA, 33 bp, Homo sapien
cagaccaatgaaggacgaactaatctctagcta

SEQ ID NO: 517177 - DNA, 33 bp, Homo sapien
ccacattaaatttcacactaacctgctctatgt

SEQ ID NO: 517178 - DNA, 33 bp, Homo sapien
ccacattaaatttcacgctaacctgctctatgt

SEQ ID NO: 517179 - DNA, 33 bp, Homo sapien
cctgctctatgtcaggaacacatcatttagcat

SEQ ID NO: 517180 - DNA, 33 bp, Homo sapien
cctgctctatgtcagggacacatcatttagcat

SEQ ID NO: 517181 - DNA, 33 bp, Homo sapien
ggatctagaagcttaccgactgtttgtactgat

SEQ ID NO: 517182 - DNA, 33 bp, Homo sapien
ggatctagaagcttactgactgtttgtactgat

SEQ ID NO: 517183 - DNA, 33 bp, Homo sapien
gggatctttgtcttgcacattctttaatgaagg

SEQ ID NO: 517184 - DNA, 33 bp, Homo sapien
gggatctttgtcttgcgcattctttaatgaagg

SEQ ID NO: 517185 - DNA, 33 bp, Homo sapien
tccaccactttttgtacacacagacttgattag

SEQ ID NO: 517186 - DNA, 33 bp, Homo sapien
tccaccactttttgtatacacagacttgattag

SEQ ID NO: 517187 - DNA, 33 bp, Homo sapien
gttaattgaagctcgaaatgctaactaagaaac

SEQ ID NO: 517188 - DNA, 33 bp, Homo sapien
gttaattgaagctcgatatgctaactaagaaac

SEQ ID NO: 517189 - DNA, 33 bp, Homo sapien
tcactactctgccctacggtgatgataagaaca

SEQ ID NO: 517190 - DNA, 33 bp, Homo sapien
tcactactctgccctatggtgatgataagaaca

SEQ ID NO: 517191 - DNA, 33 bp, Homo sapien
acaccaagaggagttagacagacttataggatt

SEQ ID NO: 517192 - DNA, 33 bp, Homo sapien
acaccaagaggagttatacagacttataggatt

SEQ ID NO: 517193 - DNA, 33 bp, Homo sapien
ctagacatggaaagaaactaatactccacagtc

SEQ ID NO: 517194 - DNA, 33 bp, Homo sapien
ctagacatggaaagaacctaatactccacagtc

SEQ ID NO: 517195 - DNA, 33 bp, Homo sapien
cctgaatattgaactacgactttacaagtaact

SEQ ID NO: 517196 - DNA, 33 bp, Homo sapien
cctgaatattgaactatgactttacaagtaact

SEQ ID NO: 517197 - DNA, 33 bp, Homo sapien
aagctgtttcagttcacgtttgaagaccgtggg

SEQ ID NO: 517198 - DNA, 33 bp, Homo sapien
aagctgtttcagttcatgtttgaagaccgtggg

SEQ ID NO: 517199 - DNA, 33 bp, Homo sapien
ctcctgctgagcttccaaggtatatccaaagag

SEQ ID NO: 517200 - DNA, 33 bp, Homo sapien
ctcctgctgagcttccgaggtatatccaaagag

SEQ ID NO: 517201 - DNA, 33 bp, Homo sapien
aggtacatcatctgctcaatgcaccacaggtac

SEQ ID NO: 517202 - DNA, 33 bp, Homo sapien
aggtacatcatctgcttaatgcaccacaggtac

SEQ ID NO: 517203 - DNA, 33 bp, Homo sapien
cagctggacatttccccaaggtctatgagtctt

SEQ ID NO: 517204 - DNA, 33 bp, Homo sapien
cagctggacatttccctaaggtctatgagtctt

SEQ ID NO: 517205 - DNA, 33 bp, Homo sapien
tcattgcctaatcaaaatctctcttgctgaagt

SEQ ID NO: 517206 - DNA, 33 bp, Homo sapien
tcattgcctaatcaaactctctcttgctgaagt

SEQ ID NO: 517207 - DNA, 33 bp, Homo sapien
atctccttccagggtcactctaatgtatcctaa

SEQ ID NO: 517208 - DNA, 33 bp, Homo sapien
atctccttccagggtcgctctaatgtatcctaa

SEQ ID NO: 517209 - DNA, 33 bp, Homo sapien
agacaattaaaggctgaattatagagatggtag

SEQ ID NO: 517210 - DNA, 33 bp, Homo sapien
agacaattaaaggctggattatagagatggtag

SEQ ID NO: 517211 - DNA, 33 bp, Homo sapien
atggtcacacaaaattgaatgtcattcaagctc

SEQ ID NO: 517212 - DNA, 33 bp, Homo sapien
atggtcacacaaaatttaatgtcattcaagctc

SEQ ID NO: 517213 - DNA, 33 bp, Homo sapien
ttatggttctttttgacgggagcctccaattgc

SEQ ID NO: 517214 - DNA, 33 bp, Homo sapien
ttatggttctttttgatgggagcctccaattgc

SEQ ID NO: 517215 - DNA, 33 bp, Homo sapien
aatgcaaatcaaaaacagaggaatattaatgga

SEQ ID NO: 517216 - DNA, 33 bp, Homo sapien
aatgcaaatcaaaaacggaggaatattaatgga

SEQ ID NO: 517217 - DNA, 33 bp, Homo sapien
cattatggagattccactccccaaactgtgaaa

SEQ ID NO: 517218 - DNA, 33 bp, Homo sapien
cattatggagattccagtccccaaactgtgaaa

SEQ ID NO: 517219 - DNA, 33 bp, Homo sapien
aaacatttaaactctaagaatgcagatataatc

SEQ ID NO: 517220 - DNA, 33 bp, Homo sapien
aaacatttaaactctaggaatgcagatataatc

SEQ ID NO: 517221 - DNA, 33 bp, Homo sapien
cagtatttggatatgacctatgcccacatcccc

SEQ ID NO: 517222 - DNA, 33 bp, Homo sapien
cagtatttggatatgagctatgcccacatcccc

SEQ ID NO: 517223 - DNA, 33 bp, Homo sapien
aaacaaaggctacaaagttcataaaaactgcca

SEQ ID NO: 517224 - DNA, 33 bp, Homo sapien
aaacaaaggctacaaatttcataaaaactgcca

SEQ ID NO: 517225 - DNA, 33 bp, Homo sapien
gttctggctgtagtaactgtcattagatattat

SEQ ID NO: 517226 - DNA, 33 bp, Homo sapien
gttctggctgtagtaattgtcattagatattat

SEQ ID NO: 517227 - DNA, 33 bp, Homo sapien
aattatcacaaactaaatggattagacaacaga

SEQ ID NO: 517228 - DNA, 33 bp, Homo sapien
aattatcacaaactaattggattagacaacaga

SEQ ID NO: 517229 - DNA, 33 bp, Homo sapien
ttatatagataaattacgtgctgtgggggtttg

SEQ ID NO: 517230 - DNA, 33 bp, Homo sapien
ttatatagataaattatgtgctgtgggggtttg

SEQ ID NO: 517231 - DNA, 33 bp, Homo sapien
gttggtggtagagtaaataagttcaaccattgt

SEQ ID NO: 517232 - DNA, 33 bp, Homo sapien
gttggtggtagagtaagtaagttcaaccattgt

SEQ ID NO: 517233 - DNA, 33 bp, Homo sapien
aaactcttttaaatcccaaagtctgcatgaaaa

SEQ ID NO: 517234 - DNA, 33 bp, Homo sapien
aaactcttttaaatcctaaagtctgcatgaaaa

SEQ ID NO: 517235 - DNA, 33 bp, Homo sapien
gaaagcatcaactcatcaatatcgtcaattcaa

SEQ ID NO: 517236 - DNA, 33 bp, Homo sapien
gaaagcatcaactcattaatatcgtcaattcaa

SEQ ID NO: 517237 - DNA, 33 bp, Homo sapien
tgattccaactacctacgtctggtggttacaaa

SEQ ID NO: 517238 - DNA, 33 bp, Homo sapien
tgattccaactacctatgtctggtggttacaaa

SEQ ID NO: 517239 - DNA, 33 bp, Homo sapien
agaaacctataagagacacttaagcaatgagaa

SEQ ID NO: 517240 - DNA, 33 bp, Homo sapien
agaaacctataagagagacttaagcaatgagaa

SEQ ID NO: 517241 - DNA, 33 bp, Homo sapien
aaattttagccaggagacacttatatagacagg

SEQ ID NO: 517242 - DNA, 33 bp, Homo sapien
aaattttagccaggagtcacttatatagacagg

SEQ ID NO: 517243 - DNA, 33 bp, Homo sapien
ggactcaaggcagaaaagtatggttgctagaga

SEQ ID NO: 517244 - DNA, 33 bp, Homo sapien
ggactcaaggcagaaatgtatggttgctagaga

SEQ ID NO: 517245 - DNA, 33 bp, Homo sapien
ggaataaattacaccaaataattgtgctaaccc

SEQ ID NO: 517246 - DNA, 33 bp, Homo sapien
ggaataaattacaccagataattgtgctaaccc

SEQ ID NO: 517247 - DNA, 33 bp, Homo sapien
gccaagtgtgtcagaccgtaaccggcccatgaa

SEQ ID NO: 517248 - DNA, 33 bp, Homo sapien
gccaagtgtgtcagactgtaaccggcccatgaa

SEQ ID NO: 517249 - DNA, 33 bp, Homo sapien
actattgagcatggaagtaataagaaatacact

SEQ ID NO: 517250 - DNA, 33 bp, Homo sapien
actattgagcatggaattaataagaaatacact

SEQ ID NO: 517251 - DNA, 33 bp, Homo sapien
gataattacttagctacaaacaggtgcttttgt

SEQ ID NO: 517252 - DNA, 33 bp, Homo sapien
gataattacttagctataaacaggtgcttttgt

SEQ ID NO: 517253 - DNA, 33 bp, Homo sapien
atgcagttcaataactcaacttatgttcagact

SEQ ID NO: 517254 - DNA, 33 bp, Homo sapien
atgcagttcaataacttaacttatgttcagact

SEQ ID NO: 517255 - DNA, 33 bp, Homo sapien
taaatgccaagctggaaaataaagcagtctgga

SEQ ID NO: 517256 - DNA, 33 bp, Homo sapien
taaatgccaagctggagaataaagcagtctgga

SEQ ID NO: 517257 - DNA, 33 bp, Homo sapien
taatattggtgatatacagttaatgggatttca

SEQ ID NO: 517258 - DNA, 33 bp, Homo sapien
taatattggtgatatatagttaatgggatttca

SEQ ID NO: 517259 - DNA, 33 bp, Homo sapien
ctccttcttgttttcaccaccagggacatcaag

SEQ ID NO: 517260 - DNA, 33 bp, Homo sapien
ctccttcttgttttcatcaccagggacatcaag

SEQ ID NO: 517261 - DNA, 33 bp, Homo sapien
ttttatttaacctctagaacctgaaatgtgtat

SEQ ID NO: 517262 - DNA, 33 bp, Homo sapien
ttttatttaacctctataacctgaaatgtgtat

SEQ ID NO: 517263 - DNA, 33 bp, Homo sapien
caatgttgcatacttacgatagttcctgtattc

SEQ ID NO: 517264 - DNA, 33 bp, Homo sapien
caatgttgcatacttatgatagttcctgtattc

SEQ ID NO: 517265 - DNA, 33 bp, Homo sapien
aaagtgcttagaagtacgtcacagagaagccca

SEQ ID NO: 517266 - DNA, 33 bp, Homo sapien
aaagtgcttagaagtaggtcacagagaagccca

SEQ ID NO: 517267 - DNA, 33 bp, Homo sapien
tgttctctaaatatgaaactttttgcctcactc

SEQ ID NO: 517268 - DNA, 33 bp, Homo sapien
tgttctctaaatatgatactttttgcctcactc

SEQ ID NO: 517269 - DNA, 33 bp, Homo sapien
agcacgtcactctgacactcatcattagccaaa

SEQ ID NO: 517270 - DNA, 33 bp, Homo sapien
agcacgtcactctgaccctcatcattagccaaa

SEQ ID NO: 517271 - DNA, 33 bp, Homo sapien
attatttggcttggtaaaggaggtgtaaccact

SEQ ID NO: 517272 - DNA, 33 bp, Homo sapien
attatttggcttggtacaggaggtgtaaccact

SEQ ID NO: 517273 - DNA, 33 bp, Homo sapien
atttggggtattttaactgctgtatagagatag

SEQ ID NO: 517274 - DNA, 33 bp, Homo sapien
atttggggtattttaattgctgtatagagatag

SEQ ID NO: 517275 - DNA, 33 bp, Homo sapien
atgctgagcagaaactaacctattaagactttc

SEQ ID NO: 517276 - DNA, 33 bp, Homo sapien
atgctgagcagaaactgacctattaagactttc

SEQ ID NO: 517277 - DNA, 33 bp, Homo sapien
gtttcagctatgcaaaatgattatgttccagag

SEQ ID NO: 517278 - DNA, 33 bp, Homo sapien
gtttcagctatgcaaagtgattatgttccagag

SEQ ID NO: 517279 - DNA, 33 bp, Homo sapien
taggttgttagacatacggtccagtccttttct

SEQ ID NO: 517280 - DNA, 33 bp, Homo sapien
taggttgttagacatatggtccagtccttttct

SEQ ID NO: 517281 - DNA, 33 bp, Homo sapien
actttgaaacataaaaataattggtaacttcca

SEQ ID NO: 517282 - DNA, 33 bp, Homo sapien
actttgaaacataaaagtaattggtaacttcca

SEQ ID NO: 517283 - DNA, 33 bp, Homo sapien
gttggcagcattatacaggtaaatgagacaaac

SEQ ID NO: 517284 - DNA, 33 bp, Homo sapien
gttggcagcattatacgggtaaatgagacaaac

SEQ ID NO: 517285 - DNA, 33 bp, Homo sapien
aaaagtgaaggaatgccacttctgaggaggtga

SEQ ID NO: 517286 - DNA, 33 bp, Homo sapien
aaaagtgaaggaatgcgacttctgaggaggtga

SEQ ID NO: 517287 - DNA, 33 bp, Homo sapien
acaacccttgacatgacgtagtttctggtcaaa

SEQ ID NO: 517288 - DNA, 33 bp, Homo sapien
acaacccttgacatgatgtagtttctggtcaaa

SEQ ID NO: 517289 - DNA, 33 bp, Homo sapien
taatttgatggtttgcacccaaagtgaatttat

SEQ ID NO: 517290 - DNA, 33 bp, Homo sapien
taatttgatggtttgcgcccaaagtgaatttat

SEQ ID NO: 517291 - DNA, 33 bp, Homo sapien
taaagcatatcagagaacttcagaaccaagcaa

SEQ ID NO: 517292 - DNA, 33 bp, Homo sapien
taaagcatatcagagagcttcagaaccaagcaa

SEQ ID NO: 517293 - DNA, 33 bp, Homo sapien
caaatctctatgaggagagctataaaacattgc

SEQ ID NO: 517294 - DNA, 33 bp, Homo sapien
caaatctctatgaggatagctataaaacattgc

SEQ ID NO: 517295 - DNA, 33 bp, Homo sapien
tgttcacaactttccaatgccaaatcaacgttg

SEQ ID NO: 517296 - DNA, 33 bp, Homo sapien
tgttcacaactttccagtgccaaatcaacgttg

SEQ ID NO: 517297 - DNA, 33 bp, Homo sapien
caaccagttcataagacagtaatctaagaggaa

SEQ ID NO: 517298 - DNA, 33 bp, Homo sapien
caaccagttcataagagagtaatctaagaggaa

SEQ ID NO: 517299 - DNA, 33 bp, Homo sapien
atggctctctttaggaaaatacctcttattagt

SEQ ID NO: 517300 - DNA, 33 bp, Homo sapien
atggctctctttaggacaatacctcttattagt

SEQ ID NO: 517301 - DNA, 33 bp, Homo sapien
gatactttctgtctcaaagtaaaaagtagcatg

SEQ ID NO: 517302 - DNA, 33 bp, Homo sapien
gatactttctgtctcacagtaaaaagtagcatg

SEQ ID NO: 517303 - DNA, 33 bp, Homo sapien
tggtagaaagagcacaagatttggacagtctgg

SEQ ID NO: 517304 - DNA, 33 bp, Homo sapien
tggtagaaagagcacacgatttggacagtctgg

SEQ ID NO: 517305 - DNA, 33 bp, Homo sapien
atttccaatcatcataactatcctgtgatttgt

SEQ ID NO: 517306 - DNA, 33 bp, Homo sapien
atttccaatcatcatatctatcctgtgatttgt

SEQ ID NO: 517307 - DNA, 33 bp, Homo sapien
ctttttctttcccccaactgatagcactgcaga

SEQ ID NO: 517308 - DNA, 33 bp, Homo sapien
ctttttctttcccccagctgatagcactgcaga

SEQ ID NO: 517309 - DNA, 33 bp, Homo sapien
cccaatgattatgaacaggaagattctgcctct

SEQ ID NO: 517310 - DNA, 33 bp, Homo sapien
cccaatgattatgaacgggaagattctgcctct

SEQ ID NO: 517311 - DNA, 33 bp, Homo sapien
cctgctgactgtgtgccaatggtcagggcaaac

SEQ ID NO: 517312 - DNA, 33 bp, Homo sapien
cctgctgactgtgtgctaatggtcagggcaaac

SEQ ID NO: 517313 - DNA, 33 bp, Homo sapien
atatgctttatagggtgaattcagaaaacaaaa

SEQ ID NO: 517314 - DNA, 33 bp, Homo sapien
atatgctttatagggttaattcagaaaacaaaa

SEQ ID NO: 517315 - DNA, 33 bp, Homo sapien
aatgatttcacaaccacgtacggcaacaatgta

SEQ ID NO: 517316 - DNA, 33 bp, Homo sapien
aatgatttcacaaccatgtacggcaacaatgta

SEQ ID NO: 517317 - DNA, 33 bp, Homo sapien
gtctgatcgagttgtacattcatgtcaagtttc

SEQ ID NO: 517318 - DNA, 33 bp, Homo sapien
gtctgatcgagttgtatattcatgtcaagtttc

SEQ ID NO: 517319 - DNA, 33 bp, Homo sapien
aagtgcttacatgctaaaattaggaccaggttc

SEQ ID NO: 517320 - DNA, 33 bp, Homo sapien
aagtgcttacatgctagaattaggaccaggttc

SEQ ID NO: 517321 - DNA, 33 bp, Homo sapien
gagtgcaatgctcatacagggatggaataagta

SEQ ID NO: 517322 - DNA, 33 bp, Homo sapien
gagtgcaatgctcatatagggatggaataagta

SEQ ID NO: 517323 - DNA, 33 bp, Homo sapien
gagggaaacagagaaaatgtccagtgaacactt

SEQ ID NO: 517324 - DNA, 33 bp, Homo sapien
gagggaaacagagaaattgtccagtgaacactt

SEQ ID NO: 517325 - DNA, 33 bp, Homo sapien
ctttgctctatcctccccacacagtaaccctct

SEQ ID NO: 517326 - DNA, 33 bp, Homo sapien
ctttgctctatcctcctcacacagtaaccctct

SEQ ID NO: 517327 - DNA, 33 bp, Homo sapien
aatagataactctcaaaaatttgtgattgaggt

SEQ ID NO: 517328 - DNA, 33 bp, Homo sapien
aatagataactctcaagaatttgtgattgaggt

SEQ ID NO: 517329 - DNA, 33 bp, Homo sapien
gttaaaagtaaattggacagaaaaacacaacag

SEQ ID NO: 517330 - DNA, 33 bp, Homo sapien
gttaaaagtaaattgggcagaaaaacacaacag

SEQ ID NO: 517331 - DNA, 33 bp, Homo sapien
agtatattgccttatacccaatggtcacaaaaa

SEQ ID NO: 517332 - DNA, 33 bp, Homo sapien
agtatattgccttatatccaatggtcacaaaaa

SEQ ID NO: 517333 - DNA, 33 bp, Homo sapien
agatcagaggaagatgcaaaattcattagaagg

SEQ ID NO: 517334 - DNA, 33 bp, Homo sapien
agatcagaggaagatgtaaaattcattagaagg

SEQ ID NO: 517335 - DNA, 33 bp, Homo sapien
actttggtaagctctagattatgaacaaaacac

SEQ ID NO: 517336 - DNA, 33 bp, Homo sapien
actttggtaagctctatattatgaacaaaacac

SEQ ID NO: 517337 - DNA, 33 bp, Homo sapien
cagtcactaaaacagacggaaataaaggcaaca

SEQ ID NO: 517338 - DNA, 33 bp, Homo sapien
cagtcactaaaacagatggaaataaaggcaaca

SEQ ID NO: 517339 - DNA, 33 bp, Homo sapien
tgaaaaacttgtgagaagaatgttaaactgcac

SEQ ID NO: 517340 - DNA, 33 bp, Homo sapien
tgaaaaacttgtgagaggaatgttaaactgcac

SEQ ID NO: 517341 - DNA, 33 bp, Homo sapien
ttattaaatgcagttaacataacatatattaga

SEQ ID NO: 517342 - DNA, 33 bp, Homo sapien
ttattaaatgcagttaccataacatatattaga

SEQ ID NO: 517343 - DNA, 33 bp, Homo sapien
aataaacatggtataacgcatggaacaatgctc

SEQ ID NO: 517344 - DNA, 33 bp, Homo sapien
aataaacatggtataatgcatggaacaatgctc

SEQ ID NO: 517345 - DNA, 33 bp, Homo sapien
attatctgcctactcactattgatgcaaaaaaa

SEQ ID NO: 517346 - DNA, 33 bp, Homo sapien
attatctgcctactcagtattgatgcaaaaaaa

SEQ ID NO: 517347 - DNA, 33 bp, Homo sapien
tattgctcttttgggaatatatacttgctctga

SEQ ID NO: 517348 - DNA, 33 bp, Homo sapien
tattgctcttttgggagtatatacttgctctga

SEQ ID NO: 517349 - DNA, 33 bp, Homo sapien
ggaagcattattgtcaacatttcataaacgaag

SEQ ID NO: 517350 - DNA, 33 bp, Homo sapien
ggaagcattattgtcagcatttcataaacgaag

SEQ ID NO: 517351 - DNA, 33 bp, Homo sapien
atatccttttactgctcaccaaatccatgtaca

SEQ ID NO: 517352 - DNA, 33 bp, Homo sapien
atatccttttactgcttaccaaatccatgtaca

SEQ ID NO: 517353 - DNA, 33 bp, Homo sapien
tacaaaccaccttgaacgtggtgctttcctcta

SEQ ID NO: 517354 - DNA, 33 bp, Homo sapien
tacaaaccaccttgaatgtggtgctttcctcta

SEQ ID NO: 517355 - DNA, 33 bp, Homo sapien
ctctattttcagttgcaaaattctcatgcaaga

SEQ ID NO: 517356 - DNA, 33 bp, Homo sapien
ctctattttcagttgcgaaattctcatgcaaga

SEQ ID NO: 517357 - DNA, 33 bp, Homo sapien
taaagagaaattggtcaataaatgtttgttaaa

SEQ ID NO: 517358 - DNA, 33 bp, Homo sapien
taaagagaaattggtctataaatgtttgttaaa

SEQ ID NO: 517359 - DNA, 33 bp, Homo sapien
actggaataaccacaactcatttttcaggtccc

SEQ ID NO: 517360 - DNA, 33 bp, Homo sapien
actggaataaccacaattcatttttcaggtccc

SEQ ID NO: 517361 - DNA, 33 bp, Homo sapien
gcaatgagctaattataaggtaaaagattatta

SEQ ID NO: 517362 - DNA, 33 bp, Homo sapien
gcaatgagctaattatgaggtaaaagattatta

SEQ ID NO: 517363 - DNA, 33 bp, Homo sapien
gtgtacaaatccggagcaaaagccatcaaattc

SEQ ID NO: 517364 - DNA, 33 bp, Homo sapien
gtgtacaaatccggaggaaaagccatcaaattc

SEQ ID NO: 517365 - DNA, 33 bp, Homo sapien
gaagaatgcccttctcactgacagaactgtgag

SEQ ID NO: 517366 - DNA, 33 bp, Homo sapien
gaagaatgcccttctctctgacagaactgtgag

SEQ ID NO: 517367 - DNA, 33 bp, Homo sapien
catttagtttgctcaaaacttgtgcatatggca

SEQ ID NO: 517368 - DNA, 33 bp, Homo sapien
catttagtttgctcaacacttgtgcatatggca

SEQ ID NO: 517369 - DNA, 33 bp, Homo sapien
tacacagtgaagtgcacaggaagtttaagacaa

SEQ ID NO: 517370 - DNA, 33 bp, Homo sapien
tacacagtgaagtgcataggaagtttaagacaa

SEQ ID NO: 517371 - DNA, 33 bp, Homo sapien
aacttgttttagcagacaaagcacagaagatgc

SEQ ID NO: 517372 - DNA, 33 bp, Homo sapien
aacttgttttagcagagaaagcacagaagatgc

SEQ ID NO: 517373 - DNA, 33 bp, Homo sapien
gaccagtcacctcagaactaggcatacacaacc

SEQ ID NO: 517374 - DNA, 33 bp, Homo sapien
gaccagtcacctcagagctaggcatacacaacc

SEQ ID NO: 517375 - DNA, 33 bp, Homo sapien
acagccctattatagaagtcacacgatgatggg

SEQ ID NO: 517376 - DNA, 33 bp, Homo sapien
acagccctattatagaggtcacacgatgatggg

SEQ ID NO: 517377 - DNA, 33 bp, Homo sapien
caattacatgaggtcaaataattaaaaggaccc

SEQ ID NO: 517378 - DNA, 33 bp, Homo sapien
caattacatgaggtcagataattaaaaggaccc

SEQ ID NO: 517379 - DNA, 33 bp, Homo sapien
tcttgtgggttcatgacgtcaaaataaagtatt

SEQ ID NO: 517380 - DNA, 33 bp, Homo sapien
tcttgtgggttcatgatgtcaaaataaagtatt

SEQ ID NO: 517381 - DNA, 33 bp, Homo sapien
aatgggacaacttaagccaggtgcaagttaaac

SEQ ID NO: 517382 - DNA, 33 bp, Homo sapien
aatgggacaacttaaggcaggtgcaagttaaac

SEQ ID NO: 517383 - DNA, 33 bp, Homo sapien
atcctttcatgtggctcagcatcttcttatatc

SEQ ID NO: 517384 - DNA, 33 bp, Homo sapien
atcctttcatgtggcttagcatcttcttatatc

SEQ ID NO: 517385 - DNA, 33 bp, Homo sapien
ataaggcctatactgacgagttaagagcttgtg

SEQ ID NO: 517386 - DNA, 33 bp, Homo sapien
ataaggcctatactgatgagttaagagcttgtg

SEQ ID NO: 517387 - DNA, 33 bp, Homo sapien
tactctgccttttaaactatcaagacacaaagg

SEQ ID NO: 517388 - DNA, 33 bp, Homo sapien
tactctgccttttaaattatcaagacacaaagg

SEQ ID NO: 517389 - DNA, 33 bp, Homo sapien
ttaatatataatccagcatgaaattactctgcc

SEQ ID NO: 517390 - DNA, 33 bp, Homo sapien
ttaatatataatccaggatgaaattactctgcc

SEQ ID NO: 517391 - DNA, 33 bp, Homo sapien
aaaagtgtgaactttaaagcggactctcaggag

SEQ ID NO: 517392 - DNA, 33 bp, Homo sapien
aaaagtgtgaactttagagcggactctcaggag

SEQ ID NO: 517393 - DNA, 33 bp, Homo sapien
aatacatcgtaattgagcatctaaggtttagca

SEQ ID NO: 517394 - DNA, 33 bp, Homo sapien
aatacatcgtaattgatcatctaaggtttagca

SEQ ID NO: 517395 - DNA, 33 bp, Homo sapien
ctgtttccctttctagcattagctcactgcatt

SEQ ID NO: 517396 - DNA, 33 bp, Homo sapien
ctgtttccctttctagtattagctcactgcatt

SEQ ID NO: 517397 - DNA, 33 bp, Homo sapien
gattgttctgcttgaccaaaatctcctctgtgg

SEQ ID NO: 517398 - DNA, 33 bp, Homo sapien
gattgttctgcttgactaaaatctcctctgtgg

SEQ ID NO: 517399 - DNA, 33 bp, Homo sapien
aatttttttattggaacaaaacttgttgtactt

SEQ ID NO: 517400 - DNA, 33 bp, Homo sapien
aatttttttattggaagaaaacttgttgtactt

SEQ ID NO: 517401 - DNA, 33 bp, Homo sapien
acaaggagtataaaacaaactgtacaagctccc

SEQ ID NO: 517402 - DNA, 33 bp, Homo sapien
acaaggagtataaaacgaactgtacaagctccc

SEQ ID NO: 517403 - DNA, 33 bp, Homo sapien
tatcaatagcttaaaactgtagcatggaattag

SEQ ID NO: 517404 - DNA, 33 bp, Homo sapien
tatcaatagcttaaaattgtagcatggaattag

SEQ ID NO: 517405 - DNA, 33 bp, Homo sapien
agaagagactgaacacggcgctaggctctgaag

SEQ ID NO: 517406 - DNA, 33 bp, Homo sapien
agaagagactgaacactgcgctaggctctgaag

SEQ ID NO: 517407 - DNA, 33 bp, Homo sapien
tgttaaaaattaaatggcagaatacacgtacag

SEQ ID NO: 517408 - DNA, 33 bp, Homo sapien
tgttaaaaattaaatgtcagaatacacgtacag

SEQ ID NO: 517409 - DNA, 33 bp, Homo sapien
ctgcagatgaaactacaaatccattgtcttttg

SEQ ID NO: 517410 - DNA, 33 bp, Homo sapien
ctgcagatgaaactaccaatccattgtcttttg

SEQ ID NO: 517411 - DNA, 33 bp, Homo sapien
gagttacacagggttaaagtactttcagagttc

SEQ ID NO: 517412 - DNA, 33 bp, Homo sapien
gagttacacagggttatagtactttcagagttc

SEQ ID NO: 517413 - DNA, 33 bp, Homo sapien
catctcaataattacccagtcacaggtgtttaa

SEQ ID NO: 517414 - DNA, 33 bp, Homo sapien
catctcaataattacctagtcacaggtgtttaa

SEQ ID NO: 517415 - DNA, 33 bp, Homo sapien
ctttggccttacaaaacgtggccttaggaattg

SEQ ID NO: 517416 - DNA, 33 bp, Homo sapien
ctttggccttacaaaatgtggccttaggaattg

SEQ ID NO: 517417 - DNA, 33 bp, Homo sapien
aattgatcccaccaaaccattgcttcacagaaa

SEQ ID NO: 517418 - DNA, 33 bp, Homo sapien
aattgatcccaccaaagcattgcttcacagaaa

SEQ ID NO: 517419 - DNA, 33 bp, Homo sapien
tgataaaactgagtgaaattttaatggtcatct

SEQ ID NO: 517420 - DNA, 33 bp, Homo sapien
tgataaaactgagtgagattttaatggtcatct

SEQ ID NO: 517421 - DNA, 33 bp, Homo sapien
acggtccagcaacttaccagaatgactgtgggg

SEQ ID NO: 517422 - DNA, 33 bp, Homo sapien
acggtccagcaacttatcagaatgactgtgggg

SEQ ID NO: 517423 - DNA, 33 bp, Homo sapien
gtcccttattgttcaactgatgtagccttttcc

SEQ ID NO: 517424 - DNA, 33 bp, Homo sapien
gtcccttattgttcaattgatgtagccttttcc

SEQ ID NO: 517425 - DNA, 33 bp, Homo sapien
attaaaaatgtctttaaactcgagaagcaatat

SEQ ID NO: 517426 - DNA, 33 bp, Homo sapien
attaaaaatgtctttatactcgagaagcaatat

SEQ ID NO: 517427 - DNA, 33 bp, Homo sapien
aagagcagttatgaaaagaaataggttatggaa

SEQ ID NO: 517428 - DNA, 33 bp, Homo sapien
aagagcagttatgaaaggaaataggttatggaa

SEQ ID NO: 517429 - DNA, 33 bp, Homo sapien
aagaaggaattaacagcaagtcattgcaaatgg

SEQ ID NO: 517430 - DNA, 33 bp, Homo sapien
aagaaggaattaacagtaagtcattgcaaatgg

SEQ ID NO: 517431 - DNA, 33 bp, Homo sapien
atgaaatataacatcccggacttttccaatcaa

SEQ ID NO: 517432 - DNA, 33 bp, Homo sapien
atgaaatataacatcctggacttttccaatcaa

SEQ ID NO: 517433 - DNA, 33 bp, Homo sapien
tgaccttaagagacacagaatttagttgaggaa

SEQ ID NO: 517434 - DNA, 33 bp, Homo sapien
tgaccttaagagacacggaatttagttgaggaa

SEQ ID NO: 517435 - DNA, 33 bp, Homo sapien
tgaagattatggtagaccctcacacttagccaa

SEQ ID NO: 517436 - DNA, 33 bp, Homo sapien
tgaagattatggtagatcctcacacttagccaa

SEQ ID NO: 517437 - DNA, 33 bp, Homo sapien
aagacacaaactgcagaatactatgataataag

SEQ ID NO: 517438 - DNA, 33 bp, Homo sapien
aagacacaaactgcaggatactatgataataag

SEQ ID NO: 517439 - DNA, 33 bp, Homo sapien
ttggatgtattgcagcgcagaaaataattctcc

SEQ ID NO: 517440 - DNA, 33 bp, Homo sapien
ttggatgtattgcagctcagaaaataattctcc

SEQ ID NO: 517441 - DNA, 33 bp, Homo sapien
tacagattcaatattacgacgctgaagaataag

SEQ ID NO: 517442 - DNA, 33 bp, Homo sapien
tacagattcaatattatgacgctgaagaataag

SEQ ID NO: 517443 - DNA, 33 bp, Homo sapien
cagcacttttccacgactactgctctcccttca

SEQ ID NO: 517444 - DNA, 33 bp, Homo sapien
cagcacttttccacgagtactgctctcccttca

SEQ ID NO: 517445 - DNA, 33 bp, Homo sapien
aattctaaaattcatcaaccatctccaccacaa

SEQ ID NO: 517446 - DNA, 33 bp, Homo sapien
aattctaaaattcatcgaccatctccaccacaa

SEQ ID NO: 517447 - DNA, 33 bp, Homo sapien
atttatagaatggtgaaataggaatcgtttttg

SEQ ID NO: 517448 - DNA, 33 bp, Homo sapien
atttatagaatggtgacataggaatcgtttttg

SEQ ID NO: 517449 - DNA, 33 bp, Homo sapien
aggacagtcaaatagaactagggaaatggtaaa

SEQ ID NO: 517450 - DNA, 33 bp, Homo sapien
aggacagtcaaatagagctagggaaatggtaaa

SEQ ID NO: 517451 - DNA, 33 bp, Homo sapien
ctactcatctagacaagagaggaataatcctga

SEQ ID NO: 517452 - DNA, 33 bp, Homo sapien
ctactcatctagacaatagaggaataatcctga

SEQ ID NO: 517453 - DNA, 33 bp, Homo sapien
aagatatatgatgataacagaaattcaaaactg

SEQ ID NO: 517454 - DNA, 33 bp, Homo sapien
aagatatatgatgataccagaaattcaaaactg

SEQ ID NO: 517455 - DNA, 33 bp, Homo sapien
taacgaaatctacaaaatcaagataccatgtct

SEQ ID NO: 517456 - DNA, 33 bp, Homo sapien
taacgaaatctacaaagtcaagataccatgtct

SEQ ID NO: 517457 - DNA, 33 bp, Homo sapien
gaaaaaccactgctagaactattctcataagct

SEQ ID NO: 517458 - DNA, 33 bp, Homo sapien
gaaaaaccactgctagcactattctcataagct

SEQ ID NO: 517459 - DNA, 33 bp, Homo sapien
cctctgaagtgtcccacagaagctcaagcaggt

SEQ ID NO: 517460 - DNA, 33 bp, Homo sapien
cctctgaagtgtcccatagaagctcaagcaggt

SEQ ID NO: 517461 - DNA, 33 bp, Homo sapien
gaagatcaatgaactaataaaaatttccagaac

SEQ ID NO: 517462 - DNA, 33 bp, Homo sapien
gaagatcaatgaactactaaaaatttccagaac

SEQ ID NO: 517463 - DNA, 33 bp, Homo sapien
gagagaagtatgatacaagtgaaggtgatcatc

SEQ ID NO: 517464 - DNA, 33 bp, Homo sapien
gagagaagtatgatacgagtgaaggtgatcatc

SEQ ID NO: 517465 - DNA, 33 bp, Homo sapien
caagctggaaatgaccaagtaacctgtgctcat

SEQ ID NO: 517466 - DNA, 33 bp, Homo sapien
caagctggaaatgaccgagtaacctgtgctcat

SEQ ID NO: 517467 - DNA, 33 bp, Homo sapien
atgtgcatttttttgtcaagaacacacagaaca

SEQ ID NO: 517468 - DNA, 33 bp, Homo sapien
atgtgcatttttttgttaagaacacacagaaca

SEQ ID NO: 517469 - DNA, 33 bp, Homo sapien
ctgaatcatgtatctccagaactatttcaatta

SEQ ID NO: 517470 - DNA, 33 bp, Homo sapien
ctgaatcatgtatctctagaactatttcaatta

SEQ ID NO: 517471 - DNA, 33 bp, Homo sapien
ataatgcaaaatgagacgggcggaaaaccatga

SEQ ID NO: 517472 - DNA, 33 bp, Homo sapien
ataatgcaaaatgagatgggcggaaaaccatga

SEQ ID NO: 517473 - DNA, 33 bp, Homo sapien
cggttatattgtgcaactcacattctgagattt

SEQ ID NO: 517474 - DNA, 33 bp, Homo sapien
cggttatattgtgcaattcacattctgagattt

SEQ ID NO: 517475 - DNA, 33 bp, Homo sapien
gtgggattcttatctacgctagttcggaatatt

SEQ ID NO: 517476 - DNA, 33 bp, Homo sapien
gtgggattcttatctatgctagttcggaatatt

SEQ ID NO: 517477 - DNA, 33 bp, Homo sapien
tgtaataaagacctgcactcataagtccaggta

SEQ ID NO: 517478 - DNA, 33 bp, Homo sapien
tgtaataaagacctgcgctcataagtccaggta

SEQ ID NO: 517479 - DNA, 33 bp, Homo sapien
tttacctagtcttggcactagaaaagcacaata

SEQ ID NO: 517480 - DNA, 33 bp, Homo sapien
tttacctagtcttggctctagaaaagcacaata

SEQ ID NO: 517481 - DNA, 33 bp, Homo sapien
cagattacaagagaaaacgccaaatttactagg

SEQ ID NO: 517482 - DNA, 33 bp, Homo sapien
cagattacaagagaaatcgccaaatttactagg

SEQ ID NO: 517483 - DNA, 33 bp, Homo sapien
aggacaatgaatgcaaactacggagcagtcaga

SEQ ID NO: 517484 - DNA, 33 bp, Homo sapien
aggacaatgaatgcaacctacggagcagtcaga

SEQ ID NO: 517485 - DNA, 33 bp, Homo sapien
attattactcctggccaatgaactgtgtgagca

SEQ ID NO: 517486 - DNA, 33 bp, Homo sapien
attattactcctggcccatgaactgtgtgagca

SEQ ID NO: 517487 - DNA, 33 bp, Homo sapien
tgattgattgattgtccctaaaaggttggaatc

SEQ ID NO: 517488 - DNA, 33 bp, Homo sapien
tgattgattgattgtctctaaaaggttggaatc

SEQ ID NO: 517489 - DNA, 33 bp, Homo sapien
gtgaaacctctgataacgggggaccactgtatt

SEQ ID NO: 517490 - DNA, 33 bp, Homo sapien
gtgaaacctctgataatgggggaccactgtatt

SEQ ID NO: 517491 - DNA, 33 bp, Homo sapien
tccatgatgcttgcctaacaaagaatatcactt

SEQ ID NO: 517492 - DNA, 33 bp, Homo sapien
tccatgatgcttgcctgacaaagaatatcactt

SEQ ID NO: 517493 - DNA, 33 bp, Homo sapien
ttgctctttctgactacagaagattaaggacta

SEQ ID NO: 517494 - DNA, 33 bp, Homo sapien
ttgctctttctgactatagaagattaaggacta

SEQ ID NO: 517495 - DNA, 33 bp, Homo sapien
ttgccccttttgcacacataatagcaatatttg

SEQ ID NO: 517496 - DNA, 33 bp, Homo sapien
ttgccccttttgcacagataatagcaatatttg

SEQ ID NO: 517497 - DNA, 33 bp, Homo sapien
tgtagctgatattttacgacattcctcatttaa

SEQ ID NO: 517498 - DNA, 33 bp, Homo sapien
tgtagctgatattttatgacattcctcatttaa

SEQ ID NO: 517499 - DNA, 33 bp, Homo sapien
aaattattggtcttccaccaagtgatgctcttc

SEQ ID NO: 517500 - DNA, 33 bp, Homo sapien
aaattattggtcttccgccaagtgatgctcttc

SEQ ID NO: 517501 - DNA, 33 bp, Homo sapien
gatgtgctatctgcacgcttatatttgttgtag

SEQ ID NO: 517502 - DNA, 33 bp, Homo sapien
gatgtgctatctgcactcttatatttgttgtag

SEQ ID NO: 517503 - DNA, 33 bp, Homo sapien
cctgccacttaacgacaagagcagtactggtat

SEQ ID NO: 517504 - DNA, 33 bp, Homo sapien
cctgccacttaacgaccagagcagtactggtat

SEQ ID NO: 517505 - DNA, 33 bp, Homo sapien
cacagaatttgggataacatcagggagtgacca

SEQ ID NO: 517506 - DNA, 33 bp, Homo sapien
cacagaatttgggatagcatcagggagtgacca

SEQ ID NO: 517507 - DNA, 33 bp, Homo sapien
tatttttggagattgacgaaaattttacaaaga

SEQ ID NO: 517508 - DNA, 33 bp, Homo sapien
tatttttggagattgatgaaaattttacaaaga

SEQ ID NO: 517509 - DNA, 33 bp, Homo sapien
gacctctagacatttacagaaatcaaagtatct

SEQ ID NO: 517510 - DNA, 33 bp, Homo sapien
gacctctagacatttagagaaatcaaagtatct

SEQ ID NO: 517511 - DNA, 33 bp, Homo sapien
ttaatgagtatctgacgatttaacagatgtact

SEQ ID NO: 517512 - DNA, 33 bp, Homo sapien
ttaatgagtatctgactatttaacagatgtact

SEQ ID NO: 517513 - DNA, 33 bp, Homo sapien
ctgaatttaaagttcgaagtgcaaatttgcatg

SEQ ID NO: 517514 - DNA, 33 bp, Homo sapien
ctgaatttaaagttcgcagtgcaaatttgcatg

SEQ ID NO: 517515 - DNA, 33 bp, Homo sapien
atagaatatatccaggacatctacaattaataa

SEQ ID NO: 517516 - DNA, 33 bp, Homo sapien
atagaatatatccagggcatctacaattaataa

SEQ ID NO: 517517 - DNA, 33 bp, Homo sapien
ctctacctccaaatccaggaattcaggtcacag

SEQ ID NO: 517518 - DNA, 33 bp, Homo sapien
ctctacctccaaatccgggaattcaggtcacag

SEQ ID NO: 517519 - DNA, 33 bp, Homo sapien
aattgattgaccttcacagaatatacattgatt

SEQ ID NO: 517520 - DNA, 33 bp, Homo sapien
aattgattgaccttcatagaatatacattgatt

SEQ ID NO: 517521 - DNA, 33 bp, Homo sapien
tcctgtgggtgctttacgcattaatccacagaa

SEQ ID NO: 517522 - DNA, 33 bp, Homo sapien
tcctgtgggtgctttatgcattaatccacagaa

SEQ ID NO: 517523 - DNA, 33 bp, Homo sapien
tgcaatttcacgtagacacaaattttgaaagta

SEQ ID NO: 517524 - DNA, 33 bp, Homo sapien
tgcaatttcacgtagatacaaattttgaaagta

SEQ ID NO: 517525 - DNA, 33 bp, Homo sapien
tctttggcatcacctaaagacagtggcatatta

SEQ ID NO: 517526 - DNA, 33 bp, Homo sapien
tctttggcatcacctacagacagtggcatatta

SEQ ID NO: 517527 - DNA, 33 bp, Homo sapien
aatcagtgtgaatctgacaactagaccttctat

SEQ ID NO: 517528 - DNA, 33 bp, Homo sapien
aatcagtgtgaatctgtcaactagaccttctat

SEQ ID NO: 517529 - DNA, 33 bp, Homo sapien
gaggacaggaaacaaaaattttgacttctctgg

SEQ ID NO: 517530 - DNA, 33 bp, Homo sapien
gaggacaggaaacaaagattttgacttctctgg

SEQ ID NO: 517531 - DNA, 33 bp, Homo sapien
tgggcccactgacccacgtagtatcctactttt

SEQ ID NO: 517532 - DNA, 33 bp, Homo sapien
tgggcccactgacccatgtagtatcctactttt

SEQ ID NO: 517533 - DNA, 33 bp, Homo sapien
cagtagaaaagattccaaagaccgaagagacta

SEQ ID NO: 517534 - DNA, 33 bp, Homo sapien
cagtagaaaagattccgaagaccgaagagacta

SEQ ID NO: 517535 - DNA, 33 bp, Homo sapien
ggataacacagtgcaactaaacatggtgattcc

SEQ ID NO: 517536 - DNA, 33 bp, Homo sapien
ggataacacagtgcaattaaacatggtgattcc

SEQ ID NO: 517537 - DNA, 33 bp, Homo sapien
agataatgaacaaacacagttggctctctgatt

SEQ ID NO: 517538 - DNA, 33 bp, Homo sapien
agataatgaacaaacatagttggctctctgatt

SEQ ID NO: 517539 - DNA, 33 bp, Homo sapien
aattaaatctttactacagataaatcagataat

SEQ ID NO: 517540 - DNA, 33 bp, Homo sapien
aattaaatctttactagagataaatcagataat

SEQ ID NO: 517541 - DNA, 33 bp, Homo sapien
ataagtttttttatgtcaaaatctatatctgtg

SEQ ID NO: 517542 - DNA, 33 bp, Homo sapien
ataagtttttttatgtgaaaatctatatctgtg

SEQ ID NO: 517543 - DNA, 33 bp, Homo sapien
ttgctcatctctgtcccatttacacagtagaga

SEQ ID NO: 517544 - DNA, 33 bp, Homo sapien
ttgctcatctctgtccgatttacacagtagaga

SEQ ID NO: 517545 - DNA, 33 bp, Homo sapien
taagtatatttggaataaggctccagaagctac

SEQ ID NO: 517546 - DNA, 33 bp, Homo sapien
taagtatatttggaatgaggctccagaagctac

SEQ ID NO: 517547 - DNA, 33 bp, Homo sapien
aatgaaaatattctcaaattgattctggtgatt

SEQ ID NO: 517548 - DNA, 33 bp, Homo sapien
aatgaaaatattctcagattgattctggtgatt

SEQ ID NO: 517549 - DNA, 33 bp, Homo sapien
ttagactataaattaacgttcgttgacgacagt

SEQ ID NO: 517550 - DNA, 33 bp, Homo sapien
ttagactataaattaatgttcgttgacgacagt

SEQ ID NO: 517551 - DNA, 33 bp, Homo sapien
aagagggagggtttggcaatccacatgttgtca

SEQ ID NO: 517552 - DNA, 33 bp, Homo sapien
aagagggagggtttggtaatccacatgttgtca

SEQ ID NO: 517553 - DNA, 33 bp, Homo sapien
gcatgagaacagaccaatacagatgctcttaca

SEQ ID NO: 517554 - DNA, 33 bp, Homo sapien
gcatgagaacagaccattacagatgctcttaca

SEQ ID NO: 517555 - DNA, 33 bp, Homo sapien
gaattaatttctggtacatgcaaccacaaggaa

SEQ ID NO: 517556 - DNA, 33 bp, Homo sapien
gaattaatttctggtatatgcaaccacaaggaa

SEQ ID NO: 517557 - DNA, 33 bp, Homo sapien
gggagaagattagtacccaactccagtgctctt

SEQ ID NO: 517558 - DNA, 33 bp, Homo sapien
gggagaagattagtactcaactccagtgctctt

SEQ ID NO: 517559 - DNA, 33 bp, Homo sapien
taagtgagatgcccaaagttatggggcaaataa

SEQ ID NO: 517560 - DNA, 33 bp, Homo sapien
taagtgagatgcccaaggttatggggcaaataa

SEQ ID NO: 517561 - DNA, 33 bp, Homo sapien
agacaatggtcaagaacagggtcatcaaacttt

SEQ ID NO: 517562 - DNA, 33 bp, Homo sapien
agacaatggtcaagaatagggtcatcaaacttt

SEQ ID NO: 517563 - DNA, 33 bp, Homo sapien
cctaaggctcacacaaggggtgatttcacgatg

SEQ ID NO: 517564 - DNA, 33 bp, Homo sapien
cctaaggctcacacaatgggtgatttcacgatg

SEQ ID NO: 517565 - DNA, 33 bp, Homo sapien
aaatgaatctctgaacacatttccagaatcagg

SEQ ID NO: 517566 - DNA, 33 bp, Homo sapien
aaatgaatctctgaacgcatttccagaatcagg

SEQ ID NO: 517567 - DNA, 33 bp, Homo sapien
aaacagaggtaaacggaaaaacattagaagcaa

SEQ ID NO: 517568 - DNA, 33 bp, Homo sapien
aaacagaggtaaacgggaaaacattagaagcaa

SEQ ID NO: 517569 - DNA, 33 bp, Homo sapien
ccttgttggatgtggacgatgcatatctttttc

SEQ ID NO: 517570 - DNA, 33 bp, Homo sapien
ccttgttggatgtggatgatgcatatctttttc

SEQ ID NO: 517571 - DNA, 33 bp, Homo sapien
taattaataataacaccgtgtagttgcaaagtg

SEQ ID NO: 517572 - DNA, 33 bp, Homo sapien
taattaataataacacggtgtagttgcaaagtg

SEQ ID NO: 517573 - DNA, 33 bp, Homo sapien
ttgggcaacataaccaacattgaatagaatttc

SEQ ID NO: 517574 - DNA, 33 bp, Homo sapien
ttgggcaacataaccagcattgaatagaatttc

SEQ ID NO: 517575 - DNA, 33 bp, Homo sapien
aagctcacgttccagagaattagtctttgatgg

SEQ ID NO: 517576 - DNA, 33 bp, Homo sapien
aagctcacgttccagataattagtctttgatgg

SEQ ID NO: 517577 - DNA, 33 bp, Homo sapien
acgaatcatgtgaaaccattgcttattgaattt

SEQ ID NO: 517578 - DNA, 33 bp, Homo sapien
acgaatcatgtgaaactattgcttattgaattt

SEQ ID NO: 517579 - DNA, 33 bp, Homo sapien
gaacacagcatctttacgtgaccaattcttctc

SEQ ID NO: 517580 - DNA, 33 bp, Homo sapien
gaacacagcatctttatgtgaccaattcttctc

SEQ ID NO: 517581 - DNA, 33 bp, Homo sapien
atacccagctgaatctaacacataattaaggat

SEQ ID NO: 517582 - DNA, 33 bp, Homo sapien
atacccagctgaatcttacacataattaaggat

SEQ ID NO: 517583 - DNA, 33 bp, Homo sapien
gaactaacagatacgactccttagcaagtctga

SEQ ID NO: 517584 - DNA, 33 bp, Homo sapien
gaactaacagatacgattccttagcaagtctga

SEQ ID NO: 517585 - DNA, 33 bp, Homo sapien
ctcaggatttctctggccattctttatctgtca

SEQ ID NO: 517586 - DNA, 33 bp, Homo sapien
ctcaggatttctctggtcattctttatctgtca

SEQ ID NO: 517587 - DNA, 33 bp, Homo sapien
ttatcacagttacctcaagaagctcaggatttc

SEQ ID NO: 517588 - DNA, 33 bp, Homo sapien
ttatcacagttacctccagaagctcaggatttc

SEQ ID NO: 517589 - DNA, 33 bp, Homo sapien
tttagaatcagaggcactatttatccaccgttt

SEQ ID NO: 517590 - DNA, 33 bp, Homo sapien
tttagaatcagaggcattatttatccaccgttt

SEQ ID NO: 517591 - DNA, 33 bp, Homo sapien
tgcttccaaagagtacaataccagctatgaatc

SEQ ID NO: 517592 - DNA, 33 bp, Homo sapien
tgcttccaaagagtacgataccagctatgaatc

SEQ ID NO: 517593 - DNA, 33 bp, Homo sapien
tactgtaatgccatagacaaaattaatgagtta

SEQ ID NO: 517594 - DNA, 33 bp, Homo sapien
tactgtaatgccatagccaaaattaatgagtta

SEQ ID NO: 517595 - DNA, 33 bp, Homo sapien
caagagaatgtttagacggattgaagggatcct

SEQ ID NO: 517596 - DNA, 33 bp, Homo sapien
caagagaatgtttagatggattgaagggatcct

SEQ ID NO: 517597 - DNA, 33 bp, Homo sapien
gagaaagggtacttcacgcagaaccgcctgtgt

SEQ ID NO: 517598 - DNA, 33 bp, Homo sapien
gagaaagggtacttcatgcagaaccgcctgtgt

SEQ ID NO: 517599 - DNA, 33 bp, Homo sapien
aatagttttaactccactcactgttattcactt

SEQ ID NO: 517600 - DNA, 33 bp, Homo sapien
aatagttttaactccagtcactgttattcactt

SEQ ID NO: 517601 - DNA, 33 bp, Homo sapien
ctctgtgaattttcaaaacccatcttatatggc

SEQ ID NO: 517602 - DNA, 33 bp, Homo sapien
ctctgtgaattttcaacacccatcttatatggc

SEQ ID NO: 517603 - DNA, 33 bp, Homo sapien
tctcaagcacagttcaaaataaaacatagctca

SEQ ID NO: 517604 - DNA, 33 bp, Homo sapien
tctcaagcacagttcagaataaaacatagctca

SEQ ID NO: 517605 - DNA, 33 bp, Homo sapien
tctagacaccatttcaaaccctttccaaaactc

SEQ ID NO: 517606 - DNA, 33 bp, Homo sapien
tctagacaccatttcacaccctttccaaaactc

SEQ ID NO: 517607 - DNA, 33 bp, Homo sapien
aggatactcacagagaaatggactataccccta

SEQ ID NO: 517608 - DNA, 33 bp, Homo sapien
aggatactcacagagagatggactataccccta

SEQ ID NO: 517609 - DNA, 33 bp, Homo sapien
gagacctcagctgtcaacaacattttcatagct

SEQ ID NO: 517610 - DNA, 33 bp, Homo sapien
gagacctcagctgtcagcaacattttcatagct

SEQ ID NO: 517611 - DNA, 33 bp, Homo sapien
tattagaaaagtaggcacaatgtagtggctaaa

SEQ ID NO: 517612 - DNA, 33 bp, Homo sapien
tattagaaaagtaggcgcaatgtagtggctaaa

SEQ ID NO: 517613 - DNA, 33 bp, Homo sapien
gttacattgccacttacctgagtttcagacatc

SEQ ID NO: 517614 - DNA, 33 bp, Homo sapien
gttacattgccacttatctgagtttcagacatc

SEQ ID NO: 517615 - DNA, 33 bp, Homo sapien
cactaggcctttctgacattttcaacaataagc

SEQ ID NO: 517616 - DNA, 33 bp, Homo sapien
cactaggcctttctgatattttcaacaataagc

SEQ ID NO: 517617 - DNA, 33 bp, Homo sapien
agaaattgactagttacctttggctggggttgg

SEQ ID NO: 517618 - DNA, 33 bp, Homo sapien
agaaattgactagttatctttggctggggttgg

SEQ ID NO: 517619 - DNA, 33 bp, Homo sapien
cctcaaatgggtatcaactcatccttgctttcc

SEQ ID NO: 517620 - DNA, 33 bp, Homo sapien
cctcaaatgggtatcacctcatccttgctttcc

SEQ ID NO: 517621 - DNA, 33 bp, Homo sapien
ctgcagtctaccaggacgttagaggtgatctct

SEQ ID NO: 517622 - DNA, 33 bp, Homo sapien
ctgcagtctaccaggatgttagaggtgatctct

SEQ ID NO: 517623 - DNA, 33 bp, Homo sapien
atatgctacattcagaggagcaactattttaat

SEQ ID NO: 517624 - DNA, 33 bp, Homo sapien
atatgctacattcagatgagcaactattttaat

SEQ ID NO: 517625 - DNA, 33 bp, Homo sapien
taagggccactttataaacagaagtccattaat

SEQ ID NO: 517626 - DNA, 33 bp, Homo sapien
taagggccactttatagacagaagtccattaat

SEQ ID NO: 517627 - DNA, 33 bp, Homo sapien
gaactaaatgaatttaaacagtacagacaattt

SEQ ID NO: 517628 - DNA, 33 bp, Homo sapien
gaactaaatgaatttagacagtacagacaattt

SEQ ID NO: 517629 - DNA, 33 bp, Homo sapien
ttcaatccaataaaccagctagaccctgggcaa

SEQ ID NO: 517630 - DNA, 33 bp, Homo sapien
ttcaatccaataaacctgctagaccctgggcaa

SEQ ID NO: 517631 - DNA, 33 bp, Homo sapien
ttttgttaatgctaaaatgtttacaaacttccc

SEQ ID NO: 517632 - DNA, 33 bp, Homo sapien
ttttgttaatgctaaagtgtttacaaacttccc

SEQ ID NO: 517633 - DNA, 33 bp, Homo sapien
tctgttaccctggaaaatggtctggtttctata

SEQ ID NO: 517634 - DNA, 33 bp, Homo sapien
tctgttaccctggaaagtggtctggtttctata

SEQ ID NO: 517635 - DNA, 33 bp, Homo sapien
tgctctgttgaagtagcctacaaatgcttacag

SEQ ID NO: 517636 - DNA, 33 bp, Homo sapien
tgctctgttgaagtagtctacaaatgcttacag

SEQ ID NO: 517637 - DNA, 33 bp, Homo sapien
cagaaatgaatacaaactgccttgccctacttc

SEQ ID NO: 517638 - DNA, 33 bp, Homo sapien
cagaaatgaatacaaattgccttgccctacttc

SEQ ID NO: 517639 - DNA, 33 bp, Homo sapien
ggaagttttgctcccacgtgtttttaattcttt

SEQ ID NO: 517640 - DNA, 33 bp, Homo sapien
ggaagttttgctcccatgtgtttttaattcttt

SEQ ID NO: 517641 - DNA, 33 bp, Homo sapien
aaatttgtctcacgaaaaaaacagatcataaaa

SEQ ID NO: 517642 - DNA, 33 bp, Homo sapien
aaatttgtctcacgaagaaaacagatcataaaa

SEQ ID NO: 517643 - DNA, 33 bp, Homo sapien
aggtatccaaacccagaagttactactgcaaag

SEQ ID NO: 517644 - DNA, 33 bp, Homo sapien
aggtatccaaacccaggagttactactgcaaag

SEQ ID NO: 517645 - DNA, 33 bp, Homo sapien
atatagaaataacactaacctgatttgcatagc

SEQ ID NO: 517646 - DNA, 33 bp, Homo sapien
atatagaaataacactcacctgatttgcatagc

SEQ ID NO: 517647 - DNA, 33 bp, Homo sapien
atctgacaaataataaaagaatacagagaacaa

SEQ ID NO: 517648 - DNA, 33 bp, Homo sapien
atctgacaaataataacagaatacagagaacaa

SEQ ID NO: 517649 - DNA, 33 bp, Homo sapien
tttcatactgctataaaaatcggagacagggca

SEQ ID NO: 517650 - DNA, 33 bp, Homo sapien
tttcatactgctataacaatcggagacagggca

SEQ ID NO: 517651 - DNA, 33 bp, Homo sapien
attcttagagtcctgcaaagagaagagataacc

SEQ ID NO: 517652 - DNA, 33 bp, Homo sapien
attcttagagtcctgcgaagagaagagataacc

SEQ ID NO: 517653 - DNA, 33 bp, Homo sapien
agtcctgcccagtgagaagtaacactggcagac

SEQ ID NO: 517654 - DNA, 33 bp, Homo sapien
agtcctgcccagtgaggagtaacactggcagac

SEQ ID NO: 517655 - DNA, 33 bp, Homo sapien
actgaagaacaacaaaagtaatttggccatact

SEQ ID NO: 517656 - DNA, 33 bp, Homo sapien
actgaagaacaacaaaggtaatttggccatact

SEQ ID NO: 517657 - DNA, 33 bp, Homo sapien
taaatccttttgcttacgcagatctggttcatc

SEQ ID NO: 517658 - DNA, 33 bp, Homo sapien
taaatccttttgcttatgcagatctggttcatc

SEQ ID NO: 517659 - DNA, 33 bp, Homo sapien
tgtcacagtttcatggaactttaattagtttct

SEQ ID NO: 517660 - DNA, 33 bp, Homo sapien
tgtcacagtttcatgggactttaattagtttct

SEQ ID NO: 517661 - DNA, 33 bp, Homo sapien
acagcaacaacttccaatcaacttgatttctat

SEQ ID NO: 517662 - DNA, 33 bp, Homo sapien
acagcaacaacttccagtcaacttgatttctat

SEQ ID NO: 517663 - DNA, 33 bp, Homo sapien
actttgtgggccctggaaaacgatacttggatc

SEQ ID NO: 517664 - DNA, 33 bp, Homo sapien
actttgtgggccctgggaaacgatacttggatc

SEQ ID NO: 517665 - DNA, 33 bp, Homo sapien
gatatctaatcaaaccagcaaaatataatattt

SEQ ID NO: 517666 - DNA, 33 bp, Homo sapien
gatatctaatcaaaccggcaaaatataatattt

SEQ ID NO: 517667 - DNA, 33 bp, Homo sapien
aaaggaaataggctcaaattgcagcatggggga

SEQ ID NO: 517668 - DNA, 33 bp, Homo sapien
aaaggaaataggctcagattgcagcatggggga

SEQ ID NO: 517669 - DNA, 33 bp, Homo sapien
ttagcctccagttcccaagaagagtttctagag

SEQ ID NO: 517670 - DNA, 33 bp, Homo sapien
ttagcctccagttcccgagaagagtttctagag

SEQ ID NO: 517671 - DNA, 33 bp, Homo sapien
attttcaccactcaacactagctcctatcaatt

SEQ ID NO: 517672 - DNA, 33 bp, Homo sapien
attttcaccactcaacgctagctcctatcaatt

SEQ ID NO: 517673 - DNA, 33 bp, Homo sapien
cactgcaaacaattagcaagtctcaggacatgt

SEQ ID NO: 517674 - DNA, 33 bp, Homo sapien
cactgcaaacaattagtaagtctcaggacatgt

SEQ ID NO: 517675 - DNA, 33 bp, Homo sapien
tctgctagactgaaaacgtgttaaggaaataga

SEQ ID NO: 517676 - DNA, 33 bp, Homo sapien
tctgctagactgaaaatgtgttaaggaaataga

SEQ ID NO: 517677 - DNA, 33 bp, Homo sapien
agatgattgttgagtaacttgtatttgcagaaa

SEQ ID NO: 517678 - DNA, 33 bp, Homo sapien
agatgattgttgagtatcttgtatttgcagaaa

SEQ ID NO: 517679 - DNA, 33 bp, Homo sapien
actggacacaggtaaagaacttttcatttgggg

SEQ ID NO: 517680 - DNA, 33 bp, Homo sapien
actggacacaggtaaataacttttcatttgggg

SEQ ID NO: 517681 - DNA, 33 bp, Homo sapien
gtcctgtgtgaatagtaacactttcattcatta

SEQ ID NO: 517682 - DNA, 33 bp, Homo sapien
gtcctgtgtgaatagtgacactttcattcatta

SEQ ID NO: 517683 - DNA, 33 bp, Homo sapien
aagcaattggcaaggaatcatgaaagataaaga

SEQ ID NO: 517684 - DNA, 33 bp, Homo sapien
aagcaattggcaaggagtcatgaaagataaaga

SEQ ID NO: 517685 - DNA, 33 bp, Homo sapien
gtccaaaataagccaccggcatcttctgccagc

SEQ ID NO: 517686 - DNA, 33 bp, Homo sapien
gtccaaaataagccactggcatcttctgccagc

SEQ ID NO: 517687 - DNA, 33 bp, Homo sapien
tacctgtctgcacaaccatgtactcctcaaaga

SEQ ID NO: 517688 - DNA, 33 bp, Homo sapien
tacctgtctgcacaactatgtactcctcaaaga

SEQ ID NO: 517689 - DNA, 33 bp, Homo sapien
tggataggttgcattgcacatagtgaccagatg

SEQ ID NO: 517690 - DNA, 33 bp, Homo sapien
tggataggttgcattgtacatagtgaccagatg

SEQ ID NO: 517691 - DNA, 33 bp, Homo sapien
atcaagggattaagcacgagaggaaagcaaatc

SEQ ID NO: 517692 - DNA, 33 bp, Homo sapien
atcaagggattaagcatgagaggaaagcaaatc

SEQ ID NO: 517693 - DNA, 33 bp, Homo sapien
caacaataaatggaaaaaagtcctatgatgctc

SEQ ID NO: 517694 - DNA, 33 bp, Homo sapien
caacaataaatggaaagaagtcctatgatgctc

SEQ ID NO: 517695 - DNA, 33 bp, Homo sapien
aaaaatctcatatccactctgcttatgagatta

SEQ ID NO: 517696 - DNA, 33 bp, Homo sapien
aaaaatctcatatccagtctgcttatgagatta

SEQ ID NO: 517697 - DNA, 33 bp, Homo sapien
tgtctctaaagtctgaatcacttgaatgaggaa

SEQ ID NO: 517698 - DNA, 33 bp, Homo sapien
tgtctctaaagtctgagtcacttgaatgaggaa

SEQ ID NO: 517699 - DNA, 33 bp, Homo sapien
tcaaaggaggcaagcaaataggcatttatctca

SEQ ID NO: 517700 - DNA, 33 bp, Homo sapien
tcaaaggaggcaagcagataggcatttatctca

SEQ ID NO: 517701 - DNA, 33 bp, Homo sapien
tttggcattctgggtaaatacagtaaattttca

SEQ ID NO: 517702 - DNA, 33 bp, Homo sapien
tttggcattctgggtagatacagtaaattttca

SEQ ID NO: 517703 - DNA, 33 bp, Homo sapien
ggaaattaagcttacaactagatactgcattca

SEQ ID NO: 517704 - DNA, 33 bp, Homo sapien
ggaaattaagcttacagctagatactgcattca

SEQ ID NO: 517705 - DNA, 33 bp, Homo sapien
cagatgacatttaataacaaatggatacttgct

SEQ ID NO: 517706 - DNA, 33 bp, Homo sapien
cagatgacatttaatagcaaatggatacttgct

SEQ ID NO: 517707 - DNA, 33 bp, Homo sapien
ttgctaacgtagctaacgctcaatggaattgaa

SEQ ID NO: 517708 - DNA, 33 bp, Homo sapien
ttgctaacgtagctaatgctcaatggaattgaa

SEQ ID NO: 517709 - DNA, 33 bp, Homo sapien
acatttggaaggagcaccatcattcaaaccata

SEQ ID NO: 517710 - DNA, 33 bp, Homo sapien
acatttggaaggagcatcatcattcaaaccata

SEQ ID NO: 517711 - DNA, 33 bp, Homo sapien
caaagttgaaaaaccccgagtgaggcattggtg

SEQ ID NO: 517712 - DNA, 33 bp, Homo sapien
caaagttgaaaaaccctgagtgaggcattggtg

SEQ ID NO: 517713 - DNA, 33 bp, Homo sapien
taggttgctgaacttacgaaccattttatgaaa

SEQ ID NO: 517714 - DNA, 33 bp, Homo sapien
taggttgctgaacttatgaaccattttatgaaa

SEQ ID NO: 517715 - DNA, 33 bp, Homo sapien
tatggtgtaattaccacgtccaaaatatgctgc

SEQ ID NO: 517716 - DNA, 33 bp, Homo sapien
tatggtgtaattaccatgtccaaaatatgctgc

SEQ ID NO: 517717 - DNA, 33 bp, Homo sapien
cccctgctattaccagacaatattctagcaact

SEQ ID NO: 517718 - DNA, 33 bp, Homo sapien
cccctgctattaccaggcaatattctagcaact

SEQ ID NO: 517719 - DNA, 33 bp, Homo sapien
aaataagtgttggcccagcatcaaatctctcca

SEQ ID NO: 517720 - DNA, 33 bp, Homo sapien
aaataagtgttggcccggcatcaaatctctcca

SEQ ID NO: 517721 - DNA, 33 bp, Homo sapien
tctctaatgccaaatcaaagtctactatttggg

SEQ ID NO: 517722 - DNA, 33 bp, Homo sapien
tctctaatgccaaatcgaagtctactatttggg

SEQ ID NO: 517723 - DNA, 33 bp, Homo sapien
tgaaaagatgtttgtacggcaaaccttaggttt

SEQ ID NO: 517724 - DNA, 33 bp, Homo sapien
tgaaaagatgtttgtatggcaaaccttaggttt

SEQ ID NO: 517725 - DNA, 33 bp, Homo sapien
aaccactggattgaggaatttcttaaggtcaca

SEQ ID NO: 517726 - DNA, 33 bp, Homo sapien
aaccactggattgaggcatttcttaaggtcaca

SEQ ID NO: 517727 - DNA, 33 bp, Homo sapien
ttgcgggccccatgaacggtttaattgtacttt

SEQ ID NO: 517728 - DNA, 33 bp, Homo sapien
ttgcgggccccatgaatggtttaattgtacttt

SEQ ID NO: 517729 - DNA, 33 bp, Homo sapien
cctcttgaaacacttaccattaccaattattgt

SEQ ID NO: 517730 - DNA, 33 bp, Homo sapien
cctcttgaaacacttatcattaccaattattgt

SEQ ID NO: 517731 - DNA, 33 bp, Homo sapien
gacatttcacctaagacgcagttagtttcacag

SEQ ID NO: 517732 - DNA, 33 bp, Homo sapien
gacatttcacctaagatgcagttagtttcacag

SEQ ID NO: 517733 - DNA, 33 bp, Homo sapien
gtaatgctatagatgacatttttggtaaacagg

SEQ ID NO: 517734 - DNA, 33 bp, Homo sapien
gtaatgctatagatgatatttttggtaaacagg

SEQ ID NO: 517735 - DNA, 33 bp, Homo sapien
actagagagagagttaacacttcagagtatttt

SEQ ID NO: 517736 - DNA, 33 bp, Homo sapien
actagagagagagttatcacttcagagtatttt

SEQ ID NO: 517737 - DNA, 33 bp, Homo sapien
ttttaatttctggctacagcttctttgctaaga

SEQ ID NO: 517738 - DNA, 33 bp, Homo sapien
ttttaatttctggctagagcttctttgctaaga

SEQ ID NO: 517739 - DNA, 33 bp, Homo sapien
cctcttggcctttaaagtctcttcactgacaac

SEQ ID NO: 517740 - DNA, 33 bp, Homo sapien
cctcttggcctttaaattctcttcactgacaac

SEQ ID NO: 517741 - DNA, 33 bp, Homo sapien
acaaaaagcatttcacaatcattagaattcact

SEQ ID NO: 517742 - DNA, 33 bp, Homo sapien
acaaaaagcatttcacgatcattagaattcact

SEQ ID NO: 517743 - DNA, 33 bp, Homo sapien
cagatctagcctcttacgttttaaccttagtct

SEQ ID NO: 517744 - DNA, 33 bp, Homo sapien
cagatctagcctcttatgttttaaccttagtct

SEQ ID NO: 517745 - DNA, 33 bp, Homo sapien
ttgtaaatttcttcaaataagaggttatgtctg

SEQ ID NO: 517746 - DNA, 33 bp, Homo sapien
ttgtaaatttcttcaactaagaggttatgtctg

SEQ ID NO: 517747 - DNA, 33 bp, Homo sapien
tagtgaagatactggaaaataaatgggtccctc

SEQ ID NO: 517748 - DNA, 33 bp, Homo sapien
tagtgaagatactggacaataaatgggtccctc

SEQ ID NO: 517749 - DNA, 33 bp, Homo sapien
cttgaatagtgcaaaacagtcttcttaaataca

SEQ ID NO: 517750 - DNA, 33 bp, Homo sapien
cttgaatagtgcaaaatagtcttcttaaataca

SEQ ID NO: 517751 - DNA, 33 bp, Homo sapien
ctccagacagttcaaaaaggacaagtgttataa

SEQ ID NO: 517752 - DNA, 33 bp, Homo sapien
ctccagacagttcaaagaggacaagtgttataa

SEQ ID NO: 517753 - DNA, 33 bp, Homo sapien
agttataaccagggtacgcactttagaattgaa

SEQ ID NO: 517754 - DNA, 33 bp, Homo sapien
agttataaccagggtatgcactttagaattgaa

SEQ ID NO: 517755 - DNA, 33 bp, Homo sapien
catcactgtttgaccaaaaggatgatgcccaca

SEQ ID NO: 517756 - DNA, 33 bp, Homo sapien
catcactgtttgaccagaaggatgatgcccaca

SEQ ID NO: 517757 - DNA, 33 bp, Homo sapien
gcctctcatggaactcagagaggaaagcaaact

SEQ ID NO: 517758 - DNA, 33 bp, Homo sapien
gcctctcatggaactcggagaggaaagcaaact

SEQ ID NO: 517759 - DNA, 33 bp, Homo sapien
cattgagcgtcacagacgattttctcaactagg

SEQ ID NO: 517760 - DNA, 33 bp, Homo sapien
cattgagcgtcacagatgattttctcaactagg

SEQ ID NO: 517761 - DNA, 33 bp, Homo sapien
gtcaaaaatcaactcagagagctatcataacaa

SEQ ID NO: 517762 - DNA, 33 bp, Homo sapien
gtcaaaaatcaactcatagagctatcataacaa

SEQ ID NO: 517763 - DNA, 33 bp, Homo sapien
cttcagggctcaggtcgcatccccaagttacat

SEQ ID NO: 517764 - DNA, 33 bp, Homo sapien
cttcagggctcaggtctcatccccaagttacat

SEQ ID NO: 517765 - DNA, 33 bp, Homo sapien
taaatctcccaaactaaaagtcattgagatttg

SEQ ID NO: 517766 - DNA, 33 bp, Homo sapien
taaatctcccaaactagaagtcattgagatttg

SEQ ID NO: 517767 - DNA, 33 bp, Homo sapien
caatgctcatcattaacagtaagtttgccttat

SEQ ID NO: 517768 - DNA, 33 bp, Homo sapien
caatgctcatcattaatagtaagtttgccttat

SEQ ID NO: 517769 - DNA, 33 bp, Homo sapien
acagctatcaaaaacagtgaacaacaaagtgaa

SEQ ID NO: 517770 - DNA, 33 bp, Homo sapien
acagctatcaaaaacattgaacaacaaagtgaa

SEQ ID NO: 517771 - DNA, 33 bp, Homo sapien
tattgttattgggcaccgtataagacacaataa

SEQ ID NO: 517772 - DNA, 33 bp, Homo sapien
tattgttattgggcactgtataagacacaataa

SEQ ID NO: 517773 - DNA, 33 bp, Homo sapien
gtcaggtctctctttcaatatccccctgctaca

SEQ ID NO: 517774 - DNA, 33 bp, Homo sapien
gtcaggtctctctttcgatatccccctgctaca

SEQ ID NO: 517775 - DNA, 33 bp, Homo sapien
tcctcaatgactcacaataaactaaatgcttat

SEQ ID NO: 517776 - DNA, 33 bp, Homo sapien
tcctcaatgactcacagtaaactaaatgcttat

SEQ ID NO: 517777 - DNA, 33 bp, Homo sapien
accaacaaattattcactcactaactaatgcct

SEQ ID NO: 517778 - DNA, 33 bp, Homo sapien
accaacaaattattcattcactaactaatgcct

SEQ ID NO: 517779 - DNA, 33 bp, Homo sapien
ggaaataaggaagtaggatacctctgacaatta

SEQ ID NO: 517780 - DNA, 33 bp, Homo sapien
ggaaataaggaagtagtatacctctgacaatta

SEQ ID NO: 517781 - DNA, 33 bp, Homo sapien
taaacattgggaacacaggtgatagacacaaac

SEQ ID NO: 517782 - DNA, 33 bp, Homo sapien
taaacattgggaacactggtgatagacacaaac

SEQ ID NO: 517783 - DNA, 33 bp, Homo sapien
gaagttaggaggctaccgaaccaattcaaaaga

SEQ ID NO: 517784 - DNA, 33 bp, Homo sapien
gaagttaggaggctactgaaccaattcaaaaga

SEQ ID NO: 517785 - DNA, 33 bp, Homo sapien
ggcacattgatttctacctatctctgaatcaat

SEQ ID NO: 517786 - DNA, 33 bp, Homo sapien
ggcacattgatttctatctatctctgaatcaat

SEQ ID NO: 517787 - DNA, 33 bp, Homo sapien
agttatccctgcattacgctactttctaatgta

SEQ ID NO: 517788 - DNA, 33 bp, Homo sapien
agttatccctgcattatgctactttctaatgta

SEQ ID NO: 517789 - DNA, 33 bp, Homo sapien
gtgggcaagggcattacgggatgaaagaatagc

SEQ ID NO: 517790 - DNA, 33 bp, Homo sapien
gtgggcaagggcattatgggatgaaagaatagc

SEQ ID NO: 517791 - DNA, 33 bp, Homo sapien
ttgattgttccattaccatgagactgaaagatg

SEQ ID NO: 517792 - DNA, 33 bp, Homo sapien
ttgattgttccattactatgagactgaaagatg

SEQ ID NO: 517793 - DNA, 33 bp, Homo sapien
aaattggattaaatgacggattggatatggtga

SEQ ID NO: 517794 - DNA, 33 bp, Homo sapien
aaattggattaaatgatggattggatatggtga

SEQ ID NO: 517795 - DNA, 33 bp, Homo sapien
aactagagacagcagaaatacctgcaaccttgg

SEQ ID NO: 517796 - DNA, 33 bp, Homo sapien
aactagagacagcagagatacctgcaaccttgg

SEQ ID NO: 517797 - DNA, 33 bp, Homo sapien
cattcatttccccagacgcagaagactaaatct

SEQ ID NO: 517798 - DNA, 33 bp, Homo sapien
cattcatttccccagaggcagaagactaaatct

SEQ ID NO: 517799 - DNA, 33 bp, Homo sapien
atgtctgcaagaatagacattatcgttactaat

SEQ ID NO: 517800 - DNA, 33 bp, Homo sapien
atgtctgcaagaatagtcattatcgttactaat

SEQ ID NO: 517801 - DNA, 33 bp, Homo sapien
ttccaagaagacttgaagcagattagtaacgat

SEQ ID NO: 517802 - DNA, 33 bp, Homo sapien
ttccaagaagacttgatgcagattagtaacgat

SEQ ID NO: 517803 - DNA, 33 bp, Homo sapien
tgcttaatgtgattacccctctatcataggact

SEQ ID NO: 517804 - DNA, 33 bp, Homo sapien
tgcttaatgtgattactcctctatcataggact

SEQ ID NO: 517805 - DNA, 33 bp, Homo sapien
atttgtaagtgtggaccattttccaagatacaa

SEQ ID NO: 517806 - DNA, 33 bp, Homo sapien
atttgtaagtgtggactattttccaagatacaa

SEQ ID NO: 517807 - DNA, 33 bp, Homo sapien
tctatcccagttggcacctatttctaattattt

SEQ ID NO: 517808 - DNA, 33 bp, Homo sapien
tctatcccagttggcatctatttctaattattt

SEQ ID NO: 517809 - DNA, 33 bp, Homo sapien
atgctgtgattccataaagattcctgaacactg

SEQ ID NO: 517810 - DNA, 33 bp, Homo sapien
atgctgtgattccatagagattcctgaacactg

SEQ ID NO: 517811 - DNA, 33 bp, Homo sapien
gttgtattatcctttccacttgaaacagctaaa

SEQ ID NO: 517812 - DNA, 33 bp, Homo sapien
gttgtattatcctttcgacttgaaacagctaaa

SEQ ID NO: 517813 - DNA, 33 bp, Homo sapien
ttaggtatttaagttaagaacaaccagaaggag

SEQ ID NO: 517814 - DNA, 33 bp, Homo sapien
ttaggtatttaagttacgaacaaccagaaggag

SEQ ID NO: 517815 - DNA, 33 bp, Homo sapien
ttacttcatcactagccacttttttaaaaccag

SEQ ID NO: 517816 - DNA, 33 bp, Homo sapien
ttacttcatcactagcgacttttttaaaaccag

SEQ ID NO: 517817 - DNA, 33 bp, Homo sapien
gtttcaaagcgaggtcccaaataaagtctgcat

SEQ ID NO: 517818 - DNA, 33 bp, Homo sapien
gtttcaaagcgaggtctcaaataaagtctgcat

SEQ ID NO: 517819 - DNA, 33 bp, Homo sapien
atgtacatagcttaaccgataacttataaaact

SEQ ID NO: 517820 - DNA, 33 bp, Homo sapien
atgtacatagcttaactgataacttataaaact

SEQ ID NO: 517821 - DNA, 33 bp, Homo sapien
tttcaaattcaaaacaggacctactatttcctt

SEQ ID NO: 517822 - DNA, 33 bp, Homo sapien
tttcaaattcaaaacatgacctactatttcctt

SEQ ID NO: 517823 - DNA, 33 bp, Homo sapien
ctccgtaagtaccacaaaaatgaaatggaatat

SEQ ID NO: 517824 - DNA, 33 bp, Homo sapien
ctccgtaagtaccacacaaatgaaatggaatat

SEQ ID NO: 517825 - DNA, 33 bp, Homo sapien
acaagataaggaaaaaaatgaagtggtctatga

SEQ ID NO: 517826 - DNA, 33 bp, Homo sapien
acaagataaggaaaaacatgaagtggtctatga

SEQ ID NO: 517827 - DNA, 33 bp, Homo sapien
aaaaatgggtcgagtacagaaacagacacttct

SEQ ID NO: 517828 - DNA, 33 bp, Homo sapien
aaaaatgggtcgagtatagaaacagacacttct

SEQ ID NO: 517829 - DNA, 33 bp, Homo sapien
ttgtttttggcttcaccgtctactagtagtttc

SEQ ID NO: 517830 - DNA, 33 bp, Homo sapien
ttgtttttggcttcactgtctactagtagtttc

SEQ ID NO: 517831 - DNA, 33 bp, Homo sapien
atcataactacctaaaatgttattaaacagaga

SEQ ID NO: 517832 - DNA, 33 bp, Homo sapien
atcataactacctaaagtgttattaaacagaga

SEQ ID NO: 517833 - DNA, 33 bp, Homo sapien
gcatttcagacagtcaagaaaactggaaattca

SEQ ID NO: 517834 - DNA, 33 bp, Homo sapien
gcatttcagacagtcatgaaaactggaaattca

SEQ ID NO: 517835 - DNA, 33 bp, Homo sapien
gaaattctttgggctacggaagtacttttaggt

SEQ ID NO: 517836 - DNA, 33 bp, Homo sapien
gaaattctttgggctatggaagtacttttaggt

SEQ ID NO: 517837 - DNA, 33 bp, Homo sapien
gactcttggcttacaaactaggacaaatcacct

SEQ ID NO: 517838 - DNA, 33 bp, Homo sapien
gactcttggcttacaagctaggacaaatcacct

SEQ ID NO: 517839 - DNA, 33 bp, Homo sapien
agcagttaatttagaacgaatgtggcagggttt

SEQ ID NO: 517840 - DNA, 33 bp, Homo sapien
agcagttaatttagaatgaatgtggcagggttt

SEQ ID NO: 517841 - DNA, 33 bp, Homo sapien
gtaagtagcaaaggcgcacctagcgtgttgaca

SEQ ID NO: 517842 - DNA, 33 bp, Homo sapien
gtaagtagcaaaggcgtacctagcgtgttgaca

SEQ ID NO: 517843 - DNA, 33 bp, Homo sapien
cctcaaaactcacaacaactcacgttcttactc

SEQ ID NO: 517844 - DNA, 33 bp, Homo sapien
cctcaaaactcacaacgactcacgttcttactc

SEQ ID NO: 517845 - DNA, 33 bp, Homo sapien
atccaggtttttaaaaatcttgagtgcagccag

SEQ ID NO: 517846 - DNA, 33 bp, Homo sapien
atccaggtttttaaaagtcttgagtgcagccag

SEQ ID NO: 517847 - DNA, 33 bp, Homo sapien
attatgagaaatgacaacttggtccctgccatg

SEQ ID NO: 517848 - DNA, 33 bp, Homo sapien
attatgagaaatgacagcttggtccctgccatg

SEQ ID NO: 517849 - DNA, 33 bp, Homo sapien
cggaacagtttttgtaaacattcattagaacac

SEQ ID NO: 517850 - DNA, 33 bp, Homo sapien
cggaacagtttttgtatacattcattagaacac

SEQ ID NO: 517851 - DNA, 33 bp, Homo sapien
gagagactgagaaaataaaagctcttgtaatat

SEQ ID NO: 517852 - DNA, 33 bp, Homo sapien
gagagactgagaaaatgaaagctcttgtaatat

SEQ ID NO: 517853 - DNA, 33 bp, Homo sapien
gatagtttttgacttgcaatctagcatctaaag

SEQ ID NO: 517854 - DNA, 33 bp, Homo sapien
gatagtttttgacttgtaatctagcatctaaag

SEQ ID NO: 517855 - DNA, 33 bp, Homo sapien
aggagcaaagtatggcggaatttgggaatcaga

SEQ ID NO: 517856 - DNA, 33 bp, Homo sapien
aggagcaaagtatggctgaatttgggaatcaga

SEQ ID NO: 517857 - DNA, 33 bp, Homo sapien
tgtgcttctggtggaacaatcacctcttcaaat

SEQ ID NO: 517858 - DNA, 33 bp, Homo sapien
tgtgcttctggtggaagaatcacctcttcaaat

SEQ ID NO: 517859 - DNA, 33 bp, Homo sapien
aactacagattgtacaaatttgcagtagctaca

SEQ ID NO: 517860 - DNA, 33 bp, Homo sapien
aactacagattgtacacatttgcagtagctaca

SEQ ID NO: 517861 - DNA, 33 bp, Homo sapien
tataagcaggttttcacctttgagaatatcttg

SEQ ID NO: 517862 - DNA, 33 bp, Homo sapien
tataagcaggttttcatctttgagaatatcttg

SEQ ID NO: 517863 - DNA, 33 bp, Homo sapien
atttctgattgggccccgaagttagaaaactat

SEQ ID NO: 517864 - DNA, 33 bp, Homo sapien
atttctgattgggccctgaagttagaaaactat

SEQ ID NO: 517865 - DNA, 33 bp, Homo sapien
aattatgaagatataacgcaaaagtatatgact

SEQ ID NO: 517866 - DNA, 33 bp, Homo sapien
aattatgaagatataatgcaaaagtatatgact

SEQ ID NO: 517867 - DNA, 33 bp, Homo sapien
tgacataaggttttccaaaacatctctaagttg

SEQ ID NO: 517868 - DNA, 33 bp, Homo sapien
tgacataaggttttcctaaacatctctaagttg

SEQ ID NO: 517869 - DNA, 33 bp, Homo sapien
tgaaatattgagcagaataaatcaatacagggc

SEQ ID NO: 517870 - DNA, 33 bp, Homo sapien
tgaaatattgagcagagtaaatcaatacagggc

SEQ ID NO: 517871 - DNA, 33 bp, Homo sapien
cctagccggatgaataacagtgtttaatggacg

SEQ ID NO: 517872 - DNA, 33 bp, Homo sapien
cctagccggatgaataccagtgtttaatggacg

SEQ ID NO: 517873 - DNA, 33 bp, Homo sapien
aacaccactcaataaacgctcaattacatcgta

SEQ ID NO: 517874 - DNA, 33 bp, Homo sapien
aacaccactcaataaatgctcaattacatcgta

SEQ ID NO: 517875 - DNA, 33 bp, Homo sapien
aaatacatccaatttaggatcatttatcactaa

SEQ ID NO: 517876 - DNA, 33 bp, Homo sapien
aaatacatccaatttatgatcatttatcactaa

SEQ ID NO: 517877 - DNA, 33 bp, Homo sapien
tgcaccagaatctcccagaaaacttgttaaaag

SEQ ID NO: 517878 - DNA, 33 bp, Homo sapien
tgcaccagaatctcccggaaaacttgttaaaag

SEQ ID NO: 517879 - DNA, 33 bp, Homo sapien
gcccactgataactgaagtttggtcacagaatt

SEQ ID NO: 517880 - DNA, 33 bp, Homo sapien
gcccactgataactgaggtttggtcacagaatt

SEQ ID NO: 517881 - DNA, 33 bp, Homo sapien
cttaaaatagtctcaaaagagaaagtcacaagt

SEQ ID NO: 517882 - DNA, 33 bp, Homo sapien
cttaaaatagtctcaagagagaaagtcacaagt

SEQ ID NO: 517883 - DNA, 33 bp, Homo sapien
tacaagggaacttaaaatgatagaaaaagaagt

SEQ ID NO: 517884 - DNA, 33 bp, Homo sapien
tacaagggaacttaaagtgatagaaaaagaagt

SEQ ID NO: 517885 - DNA, 33 bp, Homo sapien
cttcctgttctgccatcagagaattatactgtg

SEQ ID NO: 517886 - DNA, 33 bp, Homo sapien
cttcctgttctgccattagagaattatactgtg

SEQ ID NO: 517887 - DNA, 33 bp, Homo sapien
tagctccttattttaaacacaatagttacttca

SEQ ID NO: 517888 - DNA, 33 bp, Homo sapien
tagctccttattttaagcacaatagttacttca

SEQ ID NO: 517889 - DNA, 33 bp, Homo sapien
tataacaaatgtctaccaaaagagtcaaactat

SEQ ID NO: 517890 - DNA, 33 bp, Homo sapien
tataacaaatgtctacgaaaagagtcaaactat

SEQ ID NO: 517891 - DNA, 33 bp, Homo sapien
tattacaagtttcctaaaacaaggagacacatg

SEQ ID NO: 517892 - DNA, 33 bp, Homo sapien
tattacaagtttcctataacaaggagacacatg

SEQ ID NO: 517893 - DNA, 33 bp, Homo sapien
tccagatatccatcaacaaatgacttactccct

SEQ ID NO: 517894 - DNA, 33 bp, Homo sapien
tccagatatccatcaataaatgacttactccct

SEQ ID NO: 517895 - DNA, 33 bp, Homo sapien
aaaaactagagagttaaaatgttgtttgctgta

SEQ ID NO: 517896 - DNA, 33 bp, Homo sapien
aaaaactagagagttagaatgttgtttgctgta

SEQ ID NO: 517897 - DNA, 33 bp, Homo sapien
taccagtgtggtacgaatatagacagaattata

SEQ ID NO: 517898 - DNA, 33 bp, Homo sapien
taccagtgtggtacgagtatagacagaattata

SEQ ID NO: 517899 - DNA, 33 bp, Homo sapien
tctggatccctcataacagggtttgcgctcgta

SEQ ID NO: 517900 - DNA, 33 bp, Homo sapien
tctggatccctcataatagggtttgcgctcgta

SEQ ID NO: 517901 - DNA, 33 bp, Homo sapien
gtttaggtctgatgaactgtaagggttgtgagt

SEQ ID NO: 517902 - DNA, 33 bp, Homo sapien
gtttaggtctgatgaagtgtaagggttgtgagt

SEQ ID NO: 517903 - DNA, 33 bp, Homo sapien
acatgaaaagcatggaatagacaaggagtcatt

SEQ ID NO: 517904 - DNA, 33 bp, Homo sapien
acatgaaaagcatggagtagacaaggagtcatt

SEQ ID NO: 517905 - DNA, 33 bp, Homo sapien
taaagaatgaatacaacgagtgtgtcacttcaa

SEQ ID NO: 517906 - DNA, 33 bp, Homo sapien
taaagaatgaatacaatgagtgtgtcacttcaa

SEQ ID NO: 517907 - DNA, 33 bp, Homo sapien
gttatgggtaagtaaacaggactgatggttgca

SEQ ID NO: 517908 - DNA, 33 bp, Homo sapien
gttatgggtaagtaaataggactgatggttgca

SEQ ID NO: 517909 - DNA, 33 bp, Homo sapien
ccaatttaaattccccaataaggccatatgaga

SEQ ID NO: 517910 - DNA, 33 bp, Homo sapien
ccaatttaaattcccctataaggccatatgaga

SEQ ID NO: 517911 - DNA, 33 bp, Homo sapien
ctagtttctgaaaataagagaatattcagaatt

SEQ ID NO: 517912 - DNA, 33 bp, Homo sapien
ctagtttctgaaaataggagaatattcagaatt

SEQ ID NO: 517913 - DNA, 33 bp, Homo sapien
cctcatgagcctttgacgaagtccaggttcttt

SEQ ID NO: 517914 - DNA, 33 bp, Homo sapien
cctcatgagcctttgatgaagtccaggttcttt

SEQ ID NO: 517915 - DNA, 33 bp, Homo sapien
ctagagcaacaagcaacgggaatagaataggac

SEQ ID NO: 517916 - DNA, 33 bp, Homo sapien
ctagagcaacaagcaatgggaatagaataggac

SEQ ID NO: 517917 - DNA, 33 bp, Homo sapien
gttgtcaaagaggacacggttctgagtagcatg

SEQ ID NO: 517918 - DNA, 33 bp, Homo sapien
gttgtcaaagaggacatggttctgagtagcatg

SEQ ID NO: 517919 - DNA, 33 bp, Homo sapien
gctcaatgcttagctcccaaatgtaagtgagaa

SEQ ID NO: 517920 - DNA, 33 bp, Homo sapien
gctcaatgcttagctctcaaatgtaagtgagaa

SEQ ID NO: 517921 - DNA, 33 bp, Homo sapien
ctataatgcagattcacgagcaatattgatgct

SEQ ID NO: 517922 - DNA, 33 bp, Homo sapien
ctataatgcagattcatgagcaatattgatgct

SEQ ID NO: 517923 - DNA, 33 bp, Homo sapien
tagtaatctggctaagacaataaaaacactgaa

SEQ ID NO: 517924 - DNA, 33 bp, Homo sapien
tagtaatctggctaagtcaataaaaacactgaa

SEQ ID NO: 517925 - DNA, 33 bp, Homo sapien
aaaagtttgaggacgacggtttcaagtgattca

SEQ ID NO: 517926 - DNA, 33 bp, Homo sapien
aaaagtttgaggacgatggtttcaagtgattca

SEQ ID NO: 517927 - DNA, 33 bp, Homo sapien
atcctgccctgaataaataagttgatatggggg

SEQ ID NO: 517928 - DNA, 33 bp, Homo sapien
atcctgccctgaataagtaagttgatatggggg

SEQ ID NO: 517929 - DNA, 33 bp, Homo sapien
cttctgtccttcataacacttaagcacttaagc

SEQ ID NO: 517930 - DNA, 33 bp, Homo sapien
cttctgtccttcataatacttaagcacttaagc

SEQ ID NO: 517931 - DNA, 33 bp, Homo sapien
agatgaaaagaaggaacggcagatgattgaaga

SEQ ID NO: 517932 - DNA, 33 bp, Homo sapien
agatgaaaagaaggaagggcagatgattgaaga

SEQ ID NO: 517933 - DNA, 33 bp, Homo sapien
tcaagaagaagcccaacagagagacgagagcta

SEQ ID NO: 517934 - DNA, 33 bp, Homo sapien
tcaagaagaagcccaatagagagacgagagcta

SEQ ID NO: 517935 - DNA, 33 bp, Homo sapien
agagaaaggtttccacagagtcattcatggaat

SEQ ID NO: 517936 - DNA, 33 bp, Homo sapien
agagaaaggtttccacggagtcattcatggaat

SEQ ID NO: 517937 - DNA, 33 bp, Homo sapien
attgtactttgttttaacctttcatcttttaga

SEQ ID NO: 517938 - DNA, 33 bp, Homo sapien
attgtactttgttttatcctttcatcttttaga

SEQ ID NO: 517939 - DNA, 33 bp, Homo sapien
taacttgtcccaacacagagaacatatatgaag

SEQ ID NO: 517940 - DNA, 33 bp, Homo sapien
taacttgtcccaacactgagaacatatatgaag

SEQ ID NO: 517941 - DNA, 33 bp, Homo sapien
ttttgagggaatctaacaacttttttctatact

SEQ ID NO: 517942 - DNA, 33 bp, Homo sapien
ttttgagggaatctaagaacttttttctatact

SEQ ID NO: 517943 - DNA, 33 bp, Homo sapien
tttccctggtgagaaacggactataattaaata

SEQ ID NO: 517944 - DNA, 33 bp, Homo sapien
tttccctggtgagaaatggactataattaaata

SEQ ID NO: 517945 - DNA, 33 bp, Homo sapien
gggcagaacctcacagccaacaaacattgcctt

SEQ ID NO: 517946 - DNA, 33 bp, Homo sapien
gggcagaacctcacagtcaacaaacattgcctt

SEQ ID NO: 517947 - DNA, 33 bp, Homo sapien
tgcagctctcctactacgtcaggtatacttcag

SEQ ID NO: 517948 - DNA, 33 bp, Homo sapien
tgcagctctcctactatgtcaggtatacttcag

SEQ ID NO: 517949 - DNA, 33 bp, Homo sapien
ggtttcttaatgccaaactaatgatgattttga

SEQ ID NO: 517950 - DNA, 33 bp, Homo sapien
ggtttcttaatgccaacctaatgatgattttga

SEQ ID NO: 517951 - DNA, 33 bp, Homo sapien
tcaggcttggaaacccactactaattcaataat

SEQ ID NO: 517952 - DNA, 33 bp, Homo sapien
tcaggcttggaaacccgctactaattcaataat

SEQ ID NO: 517953 - DNA, 33 bp, Homo sapien
acaggcaccgatagcactcacctaaatttaggg

SEQ ID NO: 517954 - DNA, 33 bp, Homo sapien
acaggcaccgatagcattcacctaaatttaggg

SEQ ID NO: 517955 - DNA, 33 bp, Homo sapien
aagaagttccattggtcaaaaacatgaattgta

SEQ ID NO: 517956 - DNA, 33 bp, Homo sapien
aagaagttccattggtgaaaaacatgaattgta

SEQ ID NO: 517957 - DNA, 33 bp, Homo sapien
gccttttctttgagaaatagttggtatttagct

SEQ ID NO: 517958 - DNA, 33 bp, Homo sapien
gccttttctttgagaagtagttggtatttagct

SEQ ID NO: 517959 - DNA, 33 bp, Homo sapien
tttcctacatttactcaatgctttacttactgc

SEQ ID NO: 517960 - DNA, 33 bp, Homo sapien
tttcctacatttactcgatgctttacttactgc

SEQ ID NO: 517961 - DNA, 33 bp, Homo sapien
tactaaaatgaatgtacgtttaatgtagtccta

SEQ ID NO: 517962 - DNA, 33 bp, Homo sapien
tactaaaatgaatgtaggtttaatgtagtccta

SEQ ID NO: 517963 - DNA, 33 bp, Homo sapien
ttgactttccactgaaaataatacaccttgaga

SEQ ID NO: 517964 - DNA, 33 bp, Homo sapien
ttgactttccactgaagataatacaccttgaga

SEQ ID NO: 517965 - DNA, 33 bp, Homo sapien
taaagacagttaaaataatcactggccagtaac

SEQ ID NO: 517966 - DNA, 33 bp, Homo sapien
taaagacagttaaaattatcactggccagtaac

SEQ ID NO: 517967 - DNA, 33 bp, Homo sapien
ggtaaaaagcccagtaggatctgttgtaaaaaa

SEQ ID NO: 517968 - DNA, 33 bp, Homo sapien
ggtaaaaagcccagtatgatctgttgtaaaaaa

SEQ ID NO: 517969 - DNA, 33 bp, Homo sapien
acaaagttattgattccatgtagcttcagatga

SEQ ID NO: 517970 - DNA, 33 bp, Homo sapien
acaaagttattgattctatgtagcttcagatga

SEQ ID NO: 517971 - DNA, 33 bp, Homo sapien
ggtttaactggatttacagaagcctcacaatca

SEQ ID NO: 517972 - DNA, 33 bp, Homo sapien
ggtttaactggatttatagaagcctcacaatca

SEQ ID NO: 517973 - DNA, 33 bp, Homo sapien
cttcaactcctaattaccagcagaaacatttct

SEQ ID NO: 517974 - DNA, 33 bp, Homo sapien
cttcaactcctaattatcagcagaaacatttct

SEQ ID NO: 517975 - DNA, 33 bp, Homo sapien
ggcattatctgcaccccatgcaaggatcacaaa

SEQ ID NO: 517976 - DNA, 33 bp, Homo sapien
ggcattatctgcaccctatgcaaggatcacaaa

SEQ ID NO: 517977 - DNA, 33 bp, Homo sapien
tatctggagcctgaccaataaagtgggttgagc

SEQ ID NO: 517978 - DNA, 33 bp, Homo sapien
tatctggagcctgaccgataaagtgggttgagc

SEQ ID NO: 517979 - DNA, 33 bp, Homo sapien
cacagtaacagaatgaaccaggctttctaagac

SEQ ID NO: 517980 - DNA, 33 bp, Homo sapien
cacagtaacagaatgagccaggctttctaagac

SEQ ID NO: 517981 - DNA, 33 bp, Homo sapien
attcagactgagattaaataattggtaaatcat

SEQ ID NO: 517982 - DNA, 33 bp, Homo sapien
attcagactgagattacataattggtaaatcat

SEQ ID NO: 517983 - DNA, 33 bp, Homo sapien
tttttaaaccacataaacattcaaatatttctt

SEQ ID NO: 517984 - DNA, 33 bp, Homo sapien
tttttaaaccacataaccattcaaatatttctt

SEQ ID NO: 517985 - DNA, 33 bp, Homo sapien
acatcaactctaggtcacaagtgatgcattttt

SEQ ID NO: 517986 - DNA, 33 bp, Homo sapien
acatcaactctaggtcgcaagtgatgcattttt

SEQ ID NO: 517987 - DNA, 33 bp, Homo sapien
aaataattttgagcataaactctacaccctatt

SEQ ID NO: 517988 - DNA, 33 bp, Homo sapien
aaataattttgagcatgaactctacaccctatt

SEQ ID NO: 517989 - DNA, 33 bp, Homo sapien
aggtgataaagatcacagagtaccattgacaca

SEQ ID NO: 517990 - DNA, 33 bp, Homo sapien
aggtgataaagatcaccgagtaccattgacaca

SEQ ID NO: 517991 - DNA, 33 bp, Homo sapien
agtcattggtgtttagcccagcttgaacatttg

SEQ ID NO: 517992 - DNA, 33 bp, Homo sapien
agtcattggtgtttagtccagcttgaacatttg

SEQ ID NO: 517993 - DNA, 33 bp, Homo sapien
ctacaaatggaattcagggttgctgagtagagt

SEQ ID NO: 517994 - DNA, 33 bp, Homo sapien
ctacaaatggaattcatggttgctgagtagagt

SEQ ID NO: 517995 - DNA, 33 bp, Homo sapien
ataatcaggcagttgacgtttattttgcctgtg

SEQ ID NO: 517996 - DNA, 33 bp, Homo sapien
ataatcaggcagttgatgtttattttgcctgtg

SEQ ID NO: 517997 - DNA, 33 bp, Homo sapien
ccctatatggaaattacggtggtatctaaaatt

SEQ ID NO: 517998 - DNA, 33 bp, Homo sapien
ccctatatggaaattatggtggtatctaaaatt

SEQ ID NO: 517999 - DNA, 33 bp, Homo sapien
gactttactcttagccactaaacttcactactt

SEQ ID NO: 518000 - DNA, 33 bp, Homo sapien
gactttactcttagcctctaaacttcactactt

SEQ ID NO: 518001 - DNA, 33 bp, Homo sapien
aacagtcaatctcaagaaatcgccaaaatactt

SEQ ID NO: 518002 - DNA, 33 bp, Homo sapien
aacagtcaatctcaaggaatcgccaaaatactt

SEQ ID NO: 518003 - DNA, 33 bp, Homo sapien
ttcttctgttgcatgaaaaatggctgtgaactc

SEQ ID NO: 518004 - DNA, 33 bp, Homo sapien
ttcttctgttgcatgacaaatggctgtgaactc

SEQ ID NO: 518005 - DNA, 33 bp, Homo sapien
gaatttactggacaaaagcaataggtagtatat

SEQ ID NO: 518006 - DNA, 33 bp, Homo sapien
gaatttactggacaaaggcaataggtagtatat

SEQ ID NO: 518007 - DNA, 33 bp, Homo sapien
ttaagtgtcaataagtaaaggcaaaattaaact

SEQ ID NO: 518008 - DNA, 33 bp, Homo sapien
ttaagtgtcaataagtgaaggcaaaattaaact

SEQ ID NO: 518009 - DNA, 33 bp, Homo sapien
actgttacctcttccaatcaatgttgagaggtg

SEQ ID NO: 518010 - DNA, 33 bp, Homo sapien
actgttacctcttccagtcaatgttgagaggtg

SEQ ID NO: 518011 - DNA, 33 bp, Homo sapien
taaacatactggttacacaatgactattactac

SEQ ID NO: 518012 - DNA, 33 bp, Homo sapien
taaacatactggttacgcaatgactattactac

SEQ ID NO: 518013 - DNA, 33 bp, Homo sapien
agagtaactgaaaccacggaaggtgaaaccatg

SEQ ID NO: 518014 - DNA, 33 bp, Homo sapien
agagtaactgaaaccatggaaggtgaaaccatg

SEQ ID NO: 518015 - DNA, 33 bp, Homo sapien
aactattaaaggaaataatgagtacatttgtca

SEQ ID NO: 518016 - DNA, 33 bp, Homo sapien
aactattaaaggaaatcatgagtacatttgtca

SEQ ID NO: 518017 - DNA, 33 bp, Homo sapien
tataagacattatcacactttaaatttcataag

SEQ ID NO: 518018 - DNA, 33 bp, Homo sapien
tataagacattatcacgctttaaatttcataag

SEQ ID NO: 518019 - DNA, 33 bp, Homo sapien
tggaagcaagaggatgacataatacaaggccct

SEQ ID NO: 518020 - DNA, 33 bp, Homo sapien
tggaagcaagaggatggcataatacaaggccct

SEQ ID NO: 518021 - DNA, 33 bp, Homo sapien
ccttttattttctagcacagtaccctactttag

SEQ ID NO: 518022 - DNA, 33 bp, Homo sapien
ccttttattttctagcgcagtaccctactttag

SEQ ID NO: 518023 - DNA, 33 bp, Homo sapien
ttatcggagcatcttacacttggttaactgtgt

SEQ ID NO: 518024 - DNA, 33 bp, Homo sapien
ttatcggagcatcttatacttggttaactgtgt

SEQ ID NO: 518025 - DNA, 33 bp, Homo sapien
atgtagtgtatttcccagcagcagattgtttaa

SEQ ID NO: 518026 - DNA, 33 bp, Homo sapien
atgtagtgtatttcccggcagcagattgtttaa

SEQ ID NO: 518027 - DNA, 33 bp, Homo sapien
tgagtttgaagcctcacgataaaagaagttttg

SEQ ID NO: 518028 - DNA, 33 bp, Homo sapien
tgagtttgaagcctcatgataaaagaagttttg

SEQ ID NO: 518029 - DNA, 33 bp, Homo sapien
atatggatagcaataaacatcataattctcaaa

SEQ ID NO: 518030 - DNA, 33 bp, Homo sapien
atatggatagcaataagcatcataattctcaaa

SEQ ID NO: 518031 - DNA, 33 bp, Homo sapien
agacatctaaaacagagaattttcagaataaaa

SEQ ID NO: 518032 - DNA, 33 bp, Homo sapien
agacatctaaaacagataattttcagaataaaa

SEQ ID NO: 518033 - DNA, 33 bp, Homo sapien
taaggccattctggcacagaaaaatacattttc

SEQ ID NO: 518034 - DNA, 33 bp, Homo sapien
taaggccattctggcatagaaaaatacattttc

SEQ ID NO: 518035 - DNA, 33 bp, Homo sapien
attttttcaatgctaacatttttattcaaatgc

SEQ ID NO: 518036 - DNA, 33 bp, Homo sapien
attttttcaatgctaagatttttattcaaatgc

SEQ ID NO: 518037 - DNA, 33 bp, Homo sapien
tctgtaccctctaaccaattctgtatcaaaagg

SEQ ID NO: 518038 - DNA, 33 bp, Homo sapien
tctgtaccctctaaccgattctgtatcaaaagg

SEQ ID NO: 518039 - DNA, 33 bp, Homo sapien
ggacatttttgaaacacctgtagtgcctccaag

SEQ ID NO: 518040 - DNA, 33 bp, Homo sapien
ggacatttttgaaacatctgtagtgcctccaag

SEQ ID NO: 518041 - DNA, 33 bp, Homo sapien
ggtggtgttagggagaaaagaggctatcaaaat

SEQ ID NO: 518042 - DNA, 33 bp, Homo sapien
ggtggtgttagggagacaagaggctatcaaaat

SEQ ID NO: 518043 - DNA, 33 bp, Homo sapien
cctgctaaggcttccacgatatagtatgcctgg

SEQ ID NO: 518044 - DNA, 33 bp, Homo sapien
cctgctaaggcttccatgatatagtatgcctgg

SEQ ID NO: 518045 - DNA, 33 bp, Homo sapien
taataacatagggtaactgagaaaagcatagga

SEQ ID NO: 518046 - DNA, 33 bp, Homo sapien
taataacatagggtaagtgagaaaagcatagga

SEQ ID NO: 518047 - DNA, 33 bp, Homo sapien
ttctctctctctcttaaaaagttcagctggtga

SEQ ID NO: 518048 - DNA, 33 bp, Homo sapien
ttctctctctctcttagaaagttcagctggtga

SEQ ID NO: 518049 - DNA, 33 bp, Homo sapien
tctccttgattctattaaaaccgcacccttgag

SEQ ID NO: 518050 - DNA, 33 bp, Homo sapien
tctccttgattctattgaaaccgcacccttgag

SEQ ID NO: 518051 - DNA, 33 bp, Homo sapien
atgtgtggtaagactacggaaagtcatctcgta

SEQ ID NO: 518052 - DNA, 33 bp, Homo sapien
atgtgtggtaagactatggaaagtcatctcgta

SEQ ID NO: 518053 - DNA, 33 bp, Homo sapien
tcctttttcattgtgcaaagaccttaattccat

SEQ ID NO: 518054 - DNA, 33 bp, Homo sapien
tcctttttcattgtgctaagaccttaattccat

SEQ ID NO: 518055 - DNA, 33 bp, Homo sapien
ctggttcactagactgacacaccacaaagggaa

SEQ ID NO: 518056 - DNA, 33 bp, Homo sapien
ctggttcactagactgtcacaccacaaagggaa

SEQ ID NO: 518057 - DNA, 33 bp, Homo sapien
aaggaaccatatataaaatttggatacccaaga

SEQ ID NO: 518058 - DNA, 33 bp, Homo sapien
aaggaaccatatataacatttggatacccaaga

SEQ ID NO: 518059 - DNA, 33 bp, Homo sapien
gacttacatgagtccacgaactgtgagctacca

SEQ ID NO: 518060 - DNA, 33 bp, Homo sapien
gacttacatgagtccatgaactgtgagctacca

SEQ ID NO: 518061 - DNA, 33 bp, Homo sapien
aaatagattctaaggacattgtgctacgcagat

SEQ ID NO: 518062 - DNA, 33 bp, Homo sapien
aaatagattctaaggatattgtgctacgcagat

SEQ ID NO: 518063 - DNA, 33 bp, Homo sapien
cagttcaatactgggacccaagtggattaccag

SEQ ID NO: 518064 - DNA, 33 bp, Homo sapien
cagttcaatactgggagccaagtggattaccag

SEQ ID NO: 518065 - DNA, 33 bp, Homo sapien
tctagcaaaatgctaaaatgttgaacaatacat

SEQ ID NO: 518066 - DNA, 33 bp, Homo sapien
tctagcaaaatgctaagatgttgaacaatacat

SEQ ID NO: 518067 - DNA, 33 bp, Homo sapien
tcatttacaatagataaaggctgtcagaaaact

SEQ ID NO: 518068 - DNA, 33 bp, Homo sapien
tcatttacaatagatacaggctgtcagaaaact

SEQ ID NO: 518069 - DNA, 33 bp, Homo sapien
tgtaacagaggaacaaccttattctaacaattg

SEQ ID NO: 518070 - DNA, 33 bp, Homo sapien
tgtaacagaggaacaatcttattctaacaattg

SEQ ID NO: 518071 - DNA, 33 bp, Homo sapien
aatagctcctatgtcacgtcaaacttgtaagta

SEQ ID NO: 518072 - DNA, 33 bp, Homo sapien
aatagctcctatgtcatgtcaaacttgtaagta

SEQ ID NO: 518073 - DNA, 33 bp, Homo sapien
gtatggctgatcaaaaaatactcaagtcaagac

SEQ ID NO: 518074 - DNA, 33 bp, Homo sapien
gtatggctgatcaaaagatactcaagtcaagac

SEQ ID NO: 518075 - DNA, 33 bp, Homo sapien
ttgattttctaccaacaagaaatggcaaattta

SEQ ID NO: 518076 - DNA, 33 bp, Homo sapien
ttgattttctaccaaccagaaatggcaaattta

SEQ ID NO: 518077 - DNA, 33 bp, Homo sapien
aaggttactaacatcaatgagagtaactgtcct

SEQ ID NO: 518078 - DNA, 33 bp, Homo sapien
aaggttactaacatcagtgagagtaactgtcct

SEQ ID NO: 518079 - DNA, 33 bp, Homo sapien
tggctgtttagggaagccatcctgagaaggatg

SEQ ID NO: 518080 - DNA, 33 bp, Homo sapien
tggctgtttagggaagtcatcctgagaaggatg

SEQ ID NO: 518081 - DNA, 33 bp, Homo sapien
aacattggtttacatacggtaatacacttgatc

SEQ ID NO: 518082 - DNA, 33 bp, Homo sapien
aacattggtttacatatggtaatacacttgatc

SEQ ID NO: 518083 - DNA, 33 bp, Homo sapien
ttaagtgctacattcaatatgagttcaaaaaag

SEQ ID NO: 518084 - DNA, 33 bp, Homo sapien
ttaagtgctacattcagtatgagttcaaaaaag

SEQ ID NO: 518085 - DNA, 33 bp, Homo sapien
ccaaaagacgacaaaacatagtaacaaccattt

SEQ ID NO: 518086 - DNA, 33 bp, Homo sapien
ccaaaagacgacaaaatatagtaacaaccattt

SEQ ID NO: 518087 - DNA, 33 bp, Homo sapien
ccctgcctgggaaaccacattctttcttcagat

SEQ ID NO: 518088 - DNA, 33 bp, Homo sapien
ccctgcctgggaaaccgcattctttcttcagat

SEQ ID NO: 518089 - DNA, 33 bp, Homo sapien
tacatcctcttccaaaaaacttgtgatttgtga

SEQ ID NO: 518090 - DNA, 33 bp, Homo sapien
tacatcctcttccaaagaacttgtgatttgtga

SEQ ID NO: 518091 - DNA, 33 bp, Homo sapien
gtgggatttaaaaaaaccagacagagttgataa

SEQ ID NO: 518092 - DNA, 33 bp, Homo sapien
gtgggatttaaaaaaagcagacagagttgataa

SEQ ID NO: 518093 - DNA, 33 bp, Homo sapien
gattggccagaaaagacgtagagtaaaaatact

SEQ ID NO: 518094 - DNA, 33 bp, Homo sapien
gattggccagaaaagatgtagagtaaaaatact

SEQ ID NO: 518095 - DNA, 33 bp, Homo sapien
tcaaaggtgaatagaaaatttggccagttttgt

SEQ ID NO: 518096 - DNA, 33 bp, Homo sapien
tcaaaggtgaatagaatatttggccagttttgt

SEQ ID NO: 518097 - DNA, 33 bp, Homo sapien
acttgggaatgatgacggaagataatttgggac

SEQ ID NO: 518098 - DNA, 33 bp, Homo sapien
acttgggaatgatgactgaagataatttgggac

SEQ ID NO: 518099 - DNA, 33 bp, Homo sapien
gtgtggaagtgagtgggattaagtggacagaac

SEQ ID NO: 518100 - DNA, 33 bp, Homo sapien
gtgtggaagtgagtggtattaagtggacagaac

SEQ ID NO: 518101 - DNA, 33 bp, Homo sapien
taaatcatagtagcaaaacacatatgctaaata

SEQ ID NO: 518102 - DNA, 33 bp, Homo sapien
taaatcatagtagcaagacacatatgctaaata

SEQ ID NO: 518103 - DNA, 33 bp, Homo sapien
aaattttgtacttgaaccattagtcttcaccca

SEQ ID NO: 518104 - DNA, 33 bp, Homo sapien
aaattttgtacttgaatcattagtcttcaccca

SEQ ID NO: 518105 - DNA, 33 bp, Homo sapien
tcttccagctactctaacttcttcccagcagtt

SEQ ID NO: 518106 - DNA, 33 bp, Homo sapien
tcttccagctactctaccttcttcccagcagtt

SEQ ID NO: 518107 - DNA, 33 bp, Homo sapien
tttttcatgagttccccgcatatagctcttcta

SEQ ID NO: 518108 - DNA, 33 bp, Homo sapien
tttttcatgagttccctgcatatagctcttcta

SEQ ID NO: 518109 - DNA, 33 bp, Homo sapien
ttaaaaccatcaaaaacccaccagaactagtaa

SEQ ID NO: 518110 - DNA, 33 bp, Homo sapien
ttaaaaccatcaaaaatccaccagaactagtaa

SEQ ID NO: 518111 - DNA, 33 bp, Homo sapien
agaatacctattgcaaaacttatgccaggcggg

SEQ ID NO: 518112 - DNA, 33 bp, Homo sapien
agaatacctattgcaacacttatgccaggcggg

SEQ ID NO: 518113 - DNA, 33 bp, Homo sapien
tatttttttggtgaagcctatcttagctgtttt

SEQ ID NO: 518114 - DNA, 33 bp, Homo sapien
tatttttttggtgaaggctatcttagctgtttt

SEQ ID NO: 518115 - DNA, 33 bp, Homo sapien
ccgggtgattaaagtcaatatcgaaaatcataa

SEQ ID NO: 518116 - DNA, 33 bp, Homo sapien
ccgggtgattaaagtctatatcgaaaatcataa

SEQ ID NO: 518117 - DNA, 33 bp, Homo sapien
ttaaatcatttcataacctctagacctaagaat

SEQ ID NO: 518118 - DNA, 33 bp, Homo sapien
ttaaatcatttcataagctctagacctaagaat

SEQ ID NO: 518119 - DNA, 33 bp, Homo sapien
gcatgagggactgacaatgcaagaatggctcag

SEQ ID NO: 518120 - DNA, 33 bp, Homo sapien
gcatgagggactgacagtgcaagaatggctcag

SEQ ID NO: 518121 - DNA, 33 bp, Homo sapien
ctgcaacttgcgattcaatacacagtgacagac

SEQ ID NO: 518122 - DNA, 33 bp, Homo sapien
ctgcaacttgcgattcgatacacagtgacagac

SEQ ID NO: 518123 - DNA, 33 bp, Homo sapien
ctcattctcaatcttacggagtacgggcggtga

SEQ ID NO: 518124 - DNA, 33 bp, Homo sapien
ctcattctcaatcttatggagtacgggcggtga

SEQ ID NO: 518125 - DNA, 33 bp, Homo sapien
ttgttaagatattttacgagaataggtgtcacc

SEQ ID NO: 518126 - DNA, 33 bp, Homo sapien
ttgttaagatattttatgagaataggtgtcacc

SEQ ID NO: 518127 - DNA, 33 bp, Homo sapien
cctgataacagtaaaaatggtagctcataatag

SEQ ID NO: 518128 - DNA, 33 bp, Homo sapien
cctgataacagtaaaattggtagctcataatag

SEQ ID NO: 518129 - DNA, 33 bp, Homo sapien
tgttttaaaaagaccactaatttggcataattg

SEQ ID NO: 518130 - DNA, 33 bp, Homo sapien
tgttttaaaaagaccattaatttggcataattg

SEQ ID NO: 518131 - DNA, 33 bp, Homo sapien
gacaactagcacagacaagaggtattacatgac

SEQ ID NO: 518132 - DNA, 33 bp, Homo sapien
gacaactagcacagacgagaggtattacatgac

SEQ ID NO: 518133 - DNA, 33 bp, Homo sapien
acactgttttgatttaggtctgtatatatggat

SEQ ID NO: 518134 - DNA, 33 bp, Homo sapien
acactgttttgatttatgtctgtatatatggat

SEQ ID NO: 518135 - DNA, 33 bp, Homo sapien
gaactatctgagataacatcgagcctaaaccac

SEQ ID NO: 518136 - DNA, 33 bp, Homo sapien
gaactatctgagataatatcgagcctaaaccac

SEQ ID NO: 518137 - DNA, 33 bp, Homo sapien
agtatataatgaaataacccagacctgtccaaa

SEQ ID NO: 518138 - DNA, 33 bp, Homo sapien
agtatataatgaaatatcccagacctgtccaaa

SEQ ID NO: 518139 - DNA, 33 bp, Homo sapien
tgcttaatcacctaagccagaatcattgaagtc

SEQ ID NO: 518140 - DNA, 33 bp, Homo sapien
tgcttaatcacctaagtcagaatcattgaagtc

SEQ ID NO: 518141 - DNA, 33 bp, Homo sapien
tattacatggatgtgccactattggtttatcca

SEQ ID NO: 518142 - DNA, 33 bp, Homo sapien
tattacatggatgtgctactattggtttatcca

SEQ ID NO: 518143 - DNA, 33 bp, Homo sapien
gcactattaaaccagaagtgattatatgtaact

SEQ ID NO: 518144 - DNA, 33 bp, Homo sapien
gcactattaaaccagaggtgattatatgtaact

SEQ ID NO: 518145 - DNA, 33 bp, Homo sapien
cttaatccagtgcttacatccatcatgccaagt

SEQ ID NO: 518146 - DNA, 33 bp, Homo sapien
cttaatccagtgcttatatccatcatgccaagt

SEQ ID NO: 518147 - DNA, 33 bp, Homo sapien
agaatgtattattgtacgaaactactcttcaac

SEQ ID NO: 518148 - DNA, 33 bp, Homo sapien
agaatgtattattgtatgaaactactcttcaac

SEQ ID NO: 518149 - DNA, 33 bp, Homo sapien
actagagttggagctcaatgctaaaaaggggtc

SEQ ID NO: 518150 - DNA, 33 bp, Homo sapien
actagagttggagctccatgctaaaaaggggtc

SEQ ID NO: 518151 - DNA, 33 bp, Homo sapien
tcaaaggtctactctccaatctccctaacttga

SEQ ID NO: 518152 - DNA, 33 bp, Homo sapien
tcaaaggtctactctctaatctccctaacttga

SEQ ID NO: 518153 - DNA, 33 bp, Homo sapien
tgttttgccagtatataaaagctgaggctgggg

SEQ ID NO: 518154 - DNA, 33 bp, Homo sapien
tgttttgccagtatatcaaagctgaggctgggg

SEQ ID NO: 518155 - DNA, 33 bp, Homo sapien
ttccttcctatatagcaaatgaaagtgatattt

SEQ ID NO: 518156 - DNA, 33 bp, Homo sapien
ttccttcctatatagcgaatgaaagtgatattt

SEQ ID NO: 518157 - DNA, 33 bp, Homo sapien
ggaaaggctaggataactattgaaagaagataa

SEQ ID NO: 518158 - DNA, 33 bp, Homo sapien
ggaaaggctaggataattattgaaagaagataa

SEQ ID NO: 518159 - DNA, 33 bp, Homo sapien
atttaatgtaatataaaattcagtggagaagtc

SEQ ID NO: 518160 - DNA, 33 bp, Homo sapien
atttaatgtaatataacattcagtggagaagtc

SEQ ID NO: 518161 - DNA, 33 bp, Homo sapien
aatagtggcaatgaaaatcgtgttgcttatact

SEQ ID NO: 518162 - DNA, 33 bp, Homo sapien
aatagtggcaatgaaactcgtgttgcttatact

SEQ ID NO: 518163 - DNA, 33 bp, Homo sapien
aatagcaacagcaaacgatgacaggttttcaat

SEQ ID NO: 518164 - DNA, 33 bp, Homo sapien
aatagcaacagcaaactatgacaggttttcaat

SEQ ID NO: 518165 - DNA, 33 bp, Homo sapien
agttaatttttgcgtaaggtgtgaaataggagc

SEQ ID NO: 518166 - DNA, 33 bp, Homo sapien
agttaatttttgcgtatggtgtgaaataggagc

SEQ ID NO: 518167 - DNA, 33 bp, Homo sapien
aaggtagtctgggatcaaacaagggaatagaag

SEQ ID NO: 518168 - DNA, 33 bp, Homo sapien
aaggtagtctgggatcgaacaagggaatagaag

SEQ ID NO: 518169 - DNA, 33 bp, Homo sapien
aggagcatactgataccagcctctagaataatc

SEQ ID NO: 518170 - DNA, 33 bp, Homo sapien
aggagcatactgatacgagcctctagaataatc

SEQ ID NO: 518171 - DNA, 33 bp, Homo sapien
gttatcagtcttcttacgttgacattatgactc

SEQ ID NO: 518172 - DNA, 33 bp, Homo sapien
gttatcagtcttcttatgttgacattatgactc

SEQ ID NO: 518173 - DNA, 33 bp, Homo sapien
gttgcttttctgtacaacttgtcttccaaacta

SEQ ID NO: 518174 - DNA, 33 bp, Homo sapien
gttgcttttctgtacatcttgtcttccaaacta

SEQ ID NO: 518175 - DNA, 33 bp, Homo sapien
tttaccagaaaagtcccgaaagtttacacaatt

SEQ ID NO: 518176 - DNA, 33 bp, Homo sapien
tttaccagaaaagtcctgaaagtttacacaatt

SEQ ID NO: 518177 - DNA, 33 bp, Homo sapien
gttttacttctttacaactgcacaaccttaagc

SEQ ID NO: 518178 - DNA, 33 bp, Homo sapien
gttttacttctttacatctgcacaaccttaagc

SEQ ID NO: 518179 - DNA, 33 bp, Homo sapien
ctactgttatggaactaacatcctacaagtcaa

SEQ ID NO: 518180 - DNA, 33 bp, Homo sapien
ctactgttatggaacttacatcctacaagtcaa

SEQ ID NO: 518181 - DNA, 33 bp, Homo sapien
atgcagctgtttataactgccctctcactaggc

SEQ ID NO: 518182 - DNA, 33 bp, Homo sapien
atgcagctgtttataattgccctctcactaggc

SEQ ID NO: 518183 - DNA, 33 bp, Homo sapien
tgattcagttaaaagagatgacatctgcagaaa

SEQ ID NO: 518184 - DNA, 33 bp, Homo sapien
tgattcagttaaaagatatgacatctgcagaaa

SEQ ID NO: 518185 - DNA, 33 bp, Homo sapien
ctagaaagcagctacacagggaaatacagctaa

SEQ ID NO: 518186 - DNA, 33 bp, Homo sapien
ctagaaagcagctacatagggaaatacagctaa

SEQ ID NO: 518187 - DNA, 33 bp, Homo sapien
acatcatattttcctgacactcaagtaaagaac

SEQ ID NO: 518188 - DNA, 33 bp, Homo sapien
acatcatattttcctggcactcaagtaaagaac

SEQ ID NO: 518189 - DNA, 33 bp, Homo sapien
tcttactgcattcaaccaaagtactacttgtcc

SEQ ID NO: 518190 - DNA, 33 bp, Homo sapien
tcttactgcattcaactaaagtactacttgtcc

SEQ ID NO: 518191 - DNA, 33 bp, Homo sapien
agtcttttcagaatcaaatcaaacaattatttc

SEQ ID NO: 518192 - DNA, 33 bp, Homo sapien
agtcttttcagaatcagatcaaacaattatttc

SEQ ID NO: 518193 - DNA, 33 bp, Homo sapien
tttcttccagattccaccatgaaagttgaaatt

SEQ ID NO: 518194 - DNA, 33 bp, Homo sapien
tttcttccagattccatcatgaaagttgaaatt

SEQ ID NO: 518195 - DNA, 33 bp, Homo sapien
ttgattgaaaaggaaaaaaatgtgctgagcaaa

SEQ ID NO: 518196 - DNA, 33 bp, Homo sapien
ttgattgaaaaggaaacaaatgtgctgagcaaa

SEQ ID NO: 518197 - DNA, 33 bp, Homo sapien
atatcaacccagagaactgcataacattatgat

SEQ ID NO: 518198 - DNA, 33 bp, Homo sapien
atatcaacccagagaagtgcataacattatgat

SEQ ID NO: 518199 - DNA, 33 bp, Homo sapien
ctctactcgacctcaaatgtgaggccaaatccc

SEQ ID NO: 518200 - DNA, 33 bp, Homo sapien
ctctactcgacctcaactgtgaggccaaatccc

SEQ ID NO: 518201 - DNA, 33 bp, Homo sapien
aaactagggaactacacatacagaggcataagt

SEQ ID NO: 518202 - DNA, 33 bp, Homo sapien
aaactagggaactacatatacagaggcataagt

SEQ ID NO: 518203 - DNA, 33 bp, Homo sapien
ccagggattcagaaagacatattttctgccttc

SEQ ID NO: 518204 - DNA, 33 bp, Homo sapien
ccagggattcagaaagtcatattttctgccttc

SEQ ID NO: 518205 - DNA, 33 bp, Homo sapien
aactgaaaatagagtacattgcagcaacaaatg

SEQ ID NO: 518206 - DNA, 33 bp, Homo sapien
aactgaaaatagagtatattgcagcaacaaatg

SEQ ID NO: 518207 - DNA, 33 bp, Homo sapien
agatccataatgcaccaggaatctcactacaga

SEQ ID NO: 518208 - DNA, 33 bp, Homo sapien
agatccataatgcaccgggaatctcactacaga

SEQ ID NO: 518209 - DNA, 33 bp, Homo sapien
gaattctcagctacaacgtagggtcaaattact

SEQ ID NO: 518210 - DNA, 33 bp, Homo sapien
gaattctcagctacaaggtagggtcaaattact

SEQ ID NO: 518211 - DNA, 33 bp, Homo sapien
caggcaccgaaccgtaaatgctaccttggggcc

SEQ ID NO: 518212 - DNA, 33 bp, Homo sapien
caggcaccgaaccgtagatgctaccttggggcc

SEQ ID NO: 518213 - DNA, 33 bp, Homo sapien
ttcatctccataattgaactccatctgaagaaa

SEQ ID NO: 518214 - DNA, 33 bp, Homo sapien
ttcatctccataattggactccatctgaagaaa

SEQ ID NO: 518215 - DNA, 33 bp, Homo sapien
tagactgagttcctacaatgtacctttgcttat

SEQ ID NO: 518216 - DNA, 33 bp, Homo sapien
tagactgagttcctacgatgtacctttgcttat

SEQ ID NO: 518217 - DNA, 33 bp, Homo sapien
cctatctacacttctacaagcactttccaaatc

SEQ ID NO: 518218 - DNA, 33 bp, Homo sapien
cctatctacacttctataagcactttccaaatc

SEQ ID NO: 518219 - DNA, 33 bp, Homo sapien
gaaagaatggtggaaaatgttctaagagagagg

SEQ ID NO: 518220 - DNA, 33 bp, Homo sapien
gaaagaatggtggaaagtgttctaagagagagg

SEQ ID NO: 518221 - DNA, 33 bp, Homo sapien
gaaaaatacttagaaacaataatcatgagcaaa

SEQ ID NO: 518222 - DNA, 33 bp, Homo sapien
gaaaaatacttagaaataataatcatgagcaaa

SEQ ID NO: 518223 - DNA, 33 bp, Homo sapien
gcaggtttcttgacacggaattggtgcttggca

SEQ ID NO: 518224 - DNA, 33 bp, Homo sapien
gcaggtttcttgacactgaattggtgcttggca

SEQ ID NO: 518225 - DNA, 33 bp, Homo sapien
cctgtctagatgatggaattgcataaagaaaga

SEQ ID NO: 518226 - DNA, 33 bp, Homo sapien
cctgtctagatgatggtattgcataaagaaaga

SEQ ID NO: 518227 - DNA, 33 bp, Homo sapien
aaagtaactaggtagcaataatcagaggaagtg

SEQ ID NO: 518228 - DNA, 33 bp, Homo sapien
aaagtaactaggtagcgataatcagaggaagtg

SEQ ID NO: 518229 - DNA, 33 bp, Homo sapien
ttaactgcaagttggcacctgaatccaaaaagt

SEQ ID NO: 518230 - DNA, 33 bp, Homo sapien
ttaactgcaagttggcgcctgaatccaaaaagt

SEQ ID NO: 518231 - DNA, 33 bp, Homo sapien
gattaccctcacactccccttgttaaaagctcc

SEQ ID NO: 518232 - DNA, 33 bp, Homo sapien
gattaccctcacactctccttgttaaaagctcc

SEQ ID NO: 518233 - DNA, 33 bp, Homo sapien
cctgttctttgctagccaagttgatatactagg

SEQ ID NO: 518234 - DNA, 33 bp, Homo sapien
cctgttctttgctagcgaagttgatatactagg

SEQ ID NO: 518235 - DNA, 33 bp, Homo sapien
tcagttctagcacaaaaaggatatatgggtggc

SEQ ID NO: 518236 - DNA, 33 bp, Homo sapien
tcagttctagcacaaagaggatatatgggtggc

SEQ ID NO: 518237 - DNA, 33 bp, Homo sapien
tttaaaacaagaaaatcaaggtgctattagttt

SEQ ID NO: 518238 - DNA, 33 bp, Homo sapien
tttaaaacaagaaaattaaggtgctattagttt

SEQ ID NO: 518239 - DNA, 33 bp, Homo sapien
aagttgattaatgacaccaatggtagaatagca

SEQ ID NO: 518240 - DNA, 33 bp, Homo sapien
aagttgattaatgacagcaatggtagaatagca

SEQ ID NO: 518241 - DNA, 33 bp, Homo sapien
agaggtcttaaagtgccgattatgattcagtag

SEQ ID NO: 518242 - DNA, 33 bp, Homo sapien
agaggtcttaaagtgctgattatgattcagtag

SEQ ID NO: 518243 - DNA, 33 bp, Homo sapien
catttcattcaaccacaaattaaacacgatgtc

SEQ ID NO: 518244 - DNA, 33 bp, Homo sapien
catttcattcaaccacgaattaaacacgatgtc

SEQ ID NO: 518245 - DNA, 33 bp, Homo sapien
aacaaactatgatgataaattacaaaatcctga

SEQ ID NO: 518246 - DNA, 33 bp, Homo sapien
aacaaactatgatgattaattacaaaatcctga

SEQ ID NO: 518247 - DNA, 33 bp, Homo sapien
tctttctccaaccttgcatggctacagcataaa

SEQ ID NO: 518248 - DNA, 33 bp, Homo sapien
tctttctccaaccttgtatggctacagcataaa

SEQ ID NO: 518249 - DNA, 33 bp, Homo sapien
tacaatgaaaatagtaactcatgtaaacagaac

SEQ ID NO: 518250 - DNA, 33 bp, Homo sapien
tacaatgaaaatagtacctcatgtaaacagaac

SEQ ID NO: 518251 - DNA, 33 bp, Homo sapien
caatctaaaggccacaaaaagaaaagaacatct

SEQ ID NO: 518252 - DNA, 33 bp, Homo sapien
caatctaaaggccacagaaagaaaagaacatct

SEQ ID NO: 518253 - DNA, 33 bp, Homo sapien
gtggcctttagattgaccatgtcttagaaggac

SEQ ID NO: 518254 - DNA, 33 bp, Homo sapien
gtggcctttagattgatcatgtcttagaaggac

SEQ ID NO: 518255 - DNA, 33 bp, Homo sapien
gtttggatataagctgaaattaaatggatcttg

SEQ ID NO: 518256 - DNA, 33 bp, Homo sapien
gtttggatataagctggaattaaatggatcttg

SEQ ID NO: 518257 - DNA, 33 bp, Homo sapien
ttgagctactgctgaaactagaacaagactcac

SEQ ID NO: 518258 - DNA, 33 bp, Homo sapien
ttgagctactgctgaagctagaacaagactcac

SEQ ID NO: 518259 - DNA, 33 bp, Homo sapien
aacccatccttgtaccagaggatgacaatactg

SEQ ID NO: 518260 - DNA, 33 bp, Homo sapien
aacccatccttgtaccggaggatgacaatactg

SEQ ID NO: 518261 - DNA, 33 bp, Homo sapien
caggcattgaggtgaacgtaatatgacctatct

SEQ ID NO: 518262 - DNA, 33 bp, Homo sapien
caggcattgaggtgaatgtaatatgacctatct

SEQ ID NO: 518263 - DNA, 33 bp, Homo sapien
tcttagacaaaggaccaaggataagtcaagctt

SEQ ID NO: 518264 - DNA, 33 bp, Homo sapien
tcttagacaaaggaccgaggataagtcaagctt

SEQ ID NO: 518265 - DNA, 33 bp, Homo sapien
tttgttttcattgaaaatgttagccagttatta

SEQ ID NO: 518266 - DNA, 33 bp, Homo sapien
tttgttttcattgaaagtgttagccagttatta

SEQ ID NO: 518267 - DNA, 33 bp, Homo sapien
caacctaatatcggaacctcctactaaaatgag

SEQ ID NO: 518268 - DNA, 33 bp, Homo sapien
caacctaatatcggaatctcctactaaaatgag

SEQ ID NO: 518269 - DNA, 33 bp, Homo sapien
ccatttgtgacagtataagttaatggtgtcctc

SEQ ID NO: 518270 - DNA, 33 bp, Homo sapien
ccatttgtgacagtatcagttaatggtgtcctc

SEQ ID NO: 518271 - DNA, 33 bp, Homo sapien
attgaaaaagtcttaaggctacatctcagtcca

SEQ ID NO: 518272 - DNA, 33 bp, Homo sapien
attgaaaaagtcttaatgctacatctcagtcca

SEQ ID NO: 518273 - DNA, 33 bp, Homo sapien
gttaatgacccttcaaaagcatctattttagca

SEQ ID NO: 518274 - DNA, 33 bp, Homo sapien
gttaatgacccttcaacagcatctattttagca

SEQ ID NO: 518275 - DNA, 33 bp, Homo sapien
gtaagagatataaactcaggctatgcagttgtc

SEQ ID NO: 518276 - DNA, 33 bp, Homo sapien
gtaagagatataaacttaggctatgcagttgtc

SEQ ID NO: 518277 - DNA, 33 bp, Homo sapien
ttgaacatggagcacaataattttgagtgttta

SEQ ID NO: 518278 - DNA, 33 bp, Homo sapien
ttgaacatggagcacagtaattttgagtgttta

SEQ ID NO: 518279 - DNA, 33 bp, Homo sapien
tctccacacactttcaccttcctgtgggatcca

SEQ ID NO: 518280 - DNA, 33 bp, Homo sapien
tctccacacactttcatcttcctgtgggatcca

SEQ ID NO: 518281 - DNA, 33 bp, Homo sapien
tgggccaaactgtgtaaggaagtagacaagcct

SEQ ID NO: 518282 - DNA, 33 bp, Homo sapien
tgggccaaactgtgtacggaagtagacaagcct

SEQ ID NO: 518283 - DNA, 33 bp, Homo sapien
ggctgcttctttgcttgaaaggactcatgtgat

SEQ ID NO: 518284 - DNA, 33 bp, Homo sapien
ggctgcttctttgctttaaaggactcatgtgat

SEQ ID NO: 518285 - DNA, 33 bp, Homo sapien
tttctgataatttgtaacagtagcaacagaaaa

SEQ ID NO: 518286 - DNA, 33 bp, Homo sapien
tttctgataatttgtaccagtagcaacagaaaa

SEQ ID NO: 518287 - DNA, 33 bp, Homo sapien
ggaacaaggaagactacagagaagatgatattt

SEQ ID NO: 518288 - DNA, 33 bp, Homo sapien
ggaacaaggaagactatagagaagatgatattt

SEQ ID NO: 518289 - DNA, 33 bp, Homo sapien
gatagaataaataatacgcaacttgaagggtat

SEQ ID NO: 518290 - DNA, 33 bp, Homo sapien
gatagaataaataatatgcaacttgaagggtat

SEQ ID NO: 518291 - DNA, 33 bp, Homo sapien
tctttaatcttaaaaacagccttagtagccagt

SEQ ID NO: 518292 - DNA, 33 bp, Homo sapien
tctttaatcttaaaaatagccttagtagccagt

SEQ ID NO: 518293 - DNA, 33 bp, Homo sapien
ctctgttttgtaattcgcaaacactggctacta

SEQ ID NO: 518294 - DNA, 33 bp, Homo sapien
ctctgttttgtaattctcaaacactggctacta

SEQ ID NO: 518295 - DNA, 33 bp, Homo sapien
tcagcattctattaggcacttagtctttagagt

SEQ ID NO: 518296 - DNA, 33 bp, Homo sapien
tcagcattctattaggtacttagtctttagagt

SEQ ID NO: 518297 - DNA, 33 bp, Homo sapien
ctctttccctcgcacaacctgttatcccttgta

SEQ ID NO: 518298 - DNA, 33 bp, Homo sapien
ctctttccctcgcacagcctgttatcccttgta

SEQ ID NO: 518299 - DNA, 33 bp, Homo sapien
aaaaatggcacgtaaaaaaactgactctgcaac

SEQ ID NO: 518300 - DNA, 33 bp, Homo sapien
aaaaatggcacgtaaacaaactgactctgcaac

SEQ ID NO: 518301 - DNA, 33 bp, Homo sapien
acatacacctataaaacgtttgcatattggaaa

SEQ ID NO: 518302 - DNA, 33 bp, Homo sapien
acatacacctataaaatgtttgcatattggaaa

SEQ ID NO: 518303 - DNA, 33 bp, Homo sapien
cataacatttctttgaactaggcattatctccc

SEQ ID NO: 518304 - DNA, 33 bp, Homo sapien
cataacatttctttgacctaggcattatctccc

SEQ ID NO: 518305 - DNA, 33 bp, Homo sapien
taatgagcataccacaacctagaaaacataata

SEQ ID NO: 518306 - DNA, 33 bp, Homo sapien
taatgagcataccacagcctagaaaacataata

SEQ ID NO: 518307 - DNA, 33 bp, Homo sapien
tgaacaattgggccacgagaagattttggacta

SEQ ID NO: 518308 - DNA, 33 bp, Homo sapien
tgaacaattgggccactagaagattttggacta

SEQ ID NO: 518309 - DNA, 33 bp, Homo sapien
gggacacagacattccaaaaatagccagactct

SEQ ID NO: 518310 - DNA, 33 bp, Homo sapien
gggacacagacattccgaaaatagccagactct

SEQ ID NO: 518311 - DNA, 33 bp, Homo sapien
taattaagttcatcacaattactttagatcaat

SEQ ID NO: 518312 - DNA, 33 bp, Homo sapien
taattaagttcatcacgattactttagatcaat

SEQ ID NO: 518313 - DNA, 33 bp, Homo sapien
aagacagataatctaaaatcaaaacttgtgaaa

SEQ ID NO: 518314 - DNA, 33 bp, Homo sapien
aagacagataatctaatatcaaaacttgtgaaa

SEQ ID NO: 518315 - DNA, 33 bp, Homo sapien
aacaggtaaaaatgtacgcaggtaataatattt

SEQ ID NO: 518316 - DNA, 33 bp, Homo sapien
aacaggtaaaaatgtatgcaggtaataatattt

SEQ ID NO: 518317 - DNA, 33 bp, Homo sapien
gggaagggagagccaaattacagtgaaaataag

SEQ ID NO: 518318 - DNA, 33 bp, Homo sapien
gggaagggagagccaacttacagtgaaaataag

SEQ ID NO: 518319 - DNA, 33 bp, Homo sapien
aagaagaggcatagaacagattgactctgagag

SEQ ID NO: 518320 - DNA, 33 bp, Homo sapien
aagaagaggcatagaatagattgactctgagag

SEQ ID NO: 518321 - DNA, 33 bp, Homo sapien
aatacaaaatgagttagccagtaataagtgttc

SEQ ID NO: 518322 - DNA, 33 bp, Homo sapien
aatacaaaatgagttatccagtaataagtgttc

SEQ ID NO: 518323 - DNA, 33 bp, Homo sapien
gcaagaagttgaggttcaaagggcagtttctaa

SEQ ID NO: 518324 - DNA, 33 bp, Homo sapien
gcaagaagttgaggttgaaagggcagtttctaa

SEQ ID NO: 518325 - DNA, 33 bp, Homo sapien
actattttgaccaagcagaattccaaagaagtg

SEQ ID NO: 518326 - DNA, 33 bp, Homo sapien
actattttgaccaagcggaattccaaagaagtg

SEQ ID NO: 518327 - DNA, 33 bp, Homo sapien
gggtgaagtctaaggtaaaaccatgatctgttc

SEQ ID NO: 518328 - DNA, 33 bp, Homo sapien
gggtgaagtctaaggtgaaaccatgatctgttc

SEQ ID NO: 518329 - DNA, 33 bp, Homo sapien
gtattgtgttaagtgcaacaagaaccaaaaaaa

SEQ ID NO: 518330 - DNA, 33 bp, Homo sapien
gtattgtgttaagtgctacaagaaccaaaaaaa

SEQ ID NO: 518331 - DNA, 33 bp, Homo sapien
agacatatggctaaataaataaagtacatcaca

SEQ ID NO: 518332 - DNA, 33 bp, Homo sapien
agacatatggctaaatgaataaagtacatcaca

SEQ ID NO: 518333 - DNA, 33 bp, Homo sapien
tcaggaaccaaacattcaatcctagaaaagtca

SEQ ID NO: 518334 - DNA, 33 bp, Homo sapien
tcaggaaccaaacatttaatcctagaaaagtca

SEQ ID NO: 518335 - DNA, 33 bp, Homo sapien
ttgacaaaatgaatataaaagctaagatgtaac

SEQ ID NO: 518336 - DNA, 33 bp, Homo sapien
ttgacaaaatgaatatcaaagctaagatgtaac

SEQ ID NO: 518337 - DNA, 33 bp, Homo sapien
ttaaacacttcagttacgttaagattatcatat

SEQ ID NO: 518338 - DNA, 33 bp, Homo sapien
ttaaacacttcagttatgttaagattatcatat

SEQ ID NO: 518339 - DNA, 33 bp, Homo sapien
gctagatacagctagaaatggaggttcttctct

SEQ ID NO: 518340 - DNA, 33 bp, Homo sapien
gctagatacagctagacatggaggttcttctct

SEQ ID NO: 518341 - DNA, 33 bp, Homo sapien
aaagttcaaatagactaacttcttagacaagct

SEQ ID NO: 518342 - DNA, 33 bp, Homo sapien
aaagttcaaatagactgacttcttagacaagct

SEQ ID NO: 518343 - DNA, 33 bp, Homo sapien
aatgtggagaaatcagcatgtaaagtaaacttg

SEQ ID NO: 518344 - DNA, 33 bp, Homo sapien
aatgtggagaaatcagtatgtaaagtaaacttg

SEQ ID NO: 518345 - DNA, 33 bp, Homo sapien
gttatgtatacgtctccagcaggacaaactcta

SEQ ID NO: 518346 - DNA, 33 bp, Homo sapien
gttatgtatacgtctcgagcaggacaaactcta

SEQ ID NO: 518347 - DNA, 33 bp, Homo sapien
tattataaaatacttacgaatggattgtatttt

SEQ ID NO: 518348 - DNA, 33 bp, Homo sapien
tattataaaatacttatgaatggattgtatttt

SEQ ID NO: 518349 - DNA, 33 bp, Homo sapien
aagataggtatgcttgcacctgagcagttgtgt

SEQ ID NO: 518350 - DNA, 33 bp, Homo sapien
aagataggtatgcttgtacctgagcagttgtgt

SEQ ID NO: 518351 - DNA, 33 bp, Homo sapien
ttctagcacagttaaaatcattacgtctatgta

SEQ ID NO: 518352 - DNA, 33 bp, Homo sapien
ttctagcacagttaaagtcattacgtctatgta

SEQ ID NO: 518353 - DNA, 33 bp, Homo sapien
ggataagaaaggtggcagaataataatttctct

SEQ ID NO: 518354 - DNA, 33 bp, Homo sapien
ggataagaaaggtggcggaataataatttctct

SEQ ID NO: 518355 - DNA, 33 bp, Homo sapien
gaaaaataaatcacaaagtgggcatcagttatc

SEQ ID NO: 518356 - DNA, 33 bp, Homo sapien
gaaaaataaatcacaatgtgggcatcagttatc

SEQ ID NO: 518357 - DNA, 33 bp, Homo sapien
tctaggaaatcattccagattcacagacagaat

SEQ ID NO: 518358 - DNA, 33 bp, Homo sapien
tctaggaaatcattccggattcacagacagaat

SEQ ID NO: 518359 - DNA, 33 bp, Homo sapien
ggcaaatgaacaaagcaagttaggccgatgtaa

SEQ ID NO: 518360 - DNA, 33 bp, Homo sapien
ggcaaatgaacaaagctagttaggccgatgtaa

SEQ ID NO: 518361 - DNA, 33 bp, Homo sapien
gtcctctggcagactgaagaaaatcaattaaat

SEQ ID NO: 518362 - DNA, 33 bp, Homo sapien
gtcctctggcagactggagaaaatcaattaaat

SEQ ID NO: 518363 - DNA, 33 bp, Homo sapien
gatacaaaacaagtgacagtgatcattaaatca

SEQ ID NO: 518364 - DNA, 33 bp, Homo sapien
gatacaaaacaagtgatagtgatcattaaatca

SEQ ID NO: 518365 - DNA, 33 bp, Homo sapien
ctggcagaagcaatggaattaacaaggcataca

SEQ ID NO: 518366 - DNA, 33 bp, Homo sapien
ctggcagaagcaatgggattaacaaggcataca

SEQ ID NO: 518367 - DNA, 33 bp, Homo sapien
ctgctattgagaatgacactttaaattttggaa

SEQ ID NO: 518368 - DNA, 33 bp, Homo sapien
ctgctattgagaatgatactttaaattttggaa

SEQ ID NO: 518369 - DNA, 33 bp, Homo sapien
gctgtaaaaaatgaagccatgtcttttgtagcc

SEQ ID NO: 518370 - DNA, 33 bp, Homo sapien
gctgtaaaaaatgaagtcatgtcttttgtagcc

SEQ ID NO: 518371 - DNA, 33 bp, Homo sapien
gagagtactggaatcaaaagcaataaagtctgg

SEQ ID NO: 518372 - DNA, 33 bp, Homo sapien
gagagtactggaatcacaagcaataaagtctgg

SEQ ID NO: 518373 - DNA, 33 bp, Homo sapien
gctttgaggaagaataaaatgcaagttaagcta

SEQ ID NO: 518374 - DNA, 33 bp, Homo sapien
gctttgaggaagaatataatgcaagttaagcta

SEQ ID NO: 518375 - DNA, 33 bp, Homo sapien
cacgtgtgagagcggacagagtcaatcaatgat

SEQ ID NO: 518376 - DNA, 33 bp, Homo sapien
cacgtgtgagagcggatagagtcaatcaatgat

SEQ ID NO: 518377 - DNA, 33 bp, Homo sapien
ttatcatctaatagccaatccggaattacgaaa

SEQ ID NO: 518378 - DNA, 33 bp, Homo sapien
ttatcatctaatagcccatccggaattacgaaa

SEQ ID NO: 518379 - DNA, 33 bp, Homo sapien
atgccataggaaagtcaccatctacattgaaga

SEQ ID NO: 518380 - DNA, 33 bp, Homo sapien
atgccataggaaagtcgccatctacattgaaga

SEQ ID NO: 518381 - DNA, 33 bp, Homo sapien
tacagagcttcttaaaaaagagctgcagagaaa

SEQ ID NO: 518382 - DNA, 33 bp, Homo sapien
tacagagcttcttaaacaagagctgcagagaaa

SEQ ID NO: 518383 - DNA, 33 bp, Homo sapien
aatctcaggttgccaaaaaattgtgtaatccca

SEQ ID NO: 518384 - DNA, 33 bp, Homo sapien
aatctcaggttgccaagaaattgtgtaatccca

SEQ ID NO: 518385 - DNA, 33 bp, Homo sapien
catcatgcctaagcccaactcttatacaaatgg

SEQ ID NO: 518386 - DNA, 33 bp, Homo sapien
catcatgcctaagcccgactcttatacaaatgg

SEQ ID NO: 518387 - DNA, 33 bp, Homo sapien
catggatggaactggcaattattaggttaagtg

SEQ ID NO: 518388 - DNA, 33 bp, Homo sapien
catggatggaactggcgattattaggttaagtg

SEQ ID NO: 518389 - DNA, 33 bp, Homo sapien
ctgagataactagcaaattattgccaaggtact

SEQ ID NO: 518390 - DNA, 33 bp, Homo sapien
ctgagataactagcaacttattgccaaggtact

SEQ ID NO: 518391 - DNA, 33 bp, Homo sapien
ttgcccagaggaagaaactacacttattatctt

SEQ ID NO: 518392 - DNA, 33 bp, Homo sapien
ttgcccagaggaagaagctacacttattatctt

SEQ ID NO: 518393 - DNA, 33 bp, Homo sapien
ctgttatccaaacagaccattctcagaatctca

SEQ ID NO: 518394 - DNA, 33 bp, Homo sapien
ctgttatccaaacagagcattctcagaatctca

SEQ ID NO: 518395 - DNA, 33 bp, Homo sapien
ttgacacaatgcacacaatcttattttgaggct

SEQ ID NO: 518396 - DNA, 33 bp, Homo sapien
ttgacacaatgcacacgatcttattttgaggct

SEQ ID NO: 518397 - DNA, 33 bp, Homo sapien
aaaacttatactggaaatgccacttttaaaata

SEQ ID NO: 518398 - DNA, 33 bp, Homo sapien
aaaacttatactggaagtgccacttttaaaata

SEQ ID NO: 518399 - DNA, 33 bp, Homo sapien
atatttatagctgtggcagtcagttatgacgct

SEQ ID NO: 518400 - DNA, 33 bp, Homo sapien
atatttatagctgtgggagtcagttatgacgct

SEQ ID NO: 518401 - DNA, 33 bp, Homo sapien
agaactaaaaattttgaaatcaagacggcaagc

SEQ ID NO: 518402 - DNA, 33 bp, Homo sapien
agaactaaaaattttggaatcaagacggcaagc

SEQ ID NO: 518403 - DNA, 33 bp, Homo sapien
tcttgctaagtgctgcaacactcagagtccata

SEQ ID NO: 518404 - DNA, 33 bp, Homo sapien
tcttgctaagtgctgcgacactcagagtccata

SEQ ID NO: 518405 - DNA, 33 bp, Homo sapien
gcttgactattgaggccaaagacttgatattca

SEQ ID NO: 518406 - DNA, 33 bp, Homo sapien
gcttgactattgaggctaaagacttgatattca

SEQ ID NO: 518407 - DNA, 33 bp, Homo sapien
gtgagttacagcaccaatacgccattcccactg

SEQ ID NO: 518408 - DNA, 33 bp, Homo sapien
gtgagttacagcaccagtacgccattcccactg

SEQ ID NO: 518409 - DNA, 33 bp, Homo sapien
actcaccatcgtgcaacagttagcaagtaaaat

SEQ ID NO: 518410 - DNA, 33 bp, Homo sapien
actcaccatcgtgcaatagttagcaagtaaaat

SEQ ID NO: 518411 - DNA, 33 bp, Homo sapien
atgagaaaaataatgaaatacaagcagtagttg

SEQ ID NO: 518412 - DNA, 33 bp, Homo sapien
atgagaaaaataatgagatacaagcagtagttg

SEQ ID NO: 518413 - DNA, 33 bp, Homo sapien
gtctcggctctacaacactagttataaattatt

SEQ ID NO: 518414 - DNA, 33 bp, Homo sapien
gtctcggctctacaacgctagttataaattatt

SEQ ID NO: 518415 - DNA, 33 bp, Homo sapien
tagccattcaacttcaaggactatagagtgctt

SEQ ID NO: 518416 - DNA, 33 bp, Homo sapien
tagccattcaacttcagggactatagagtgctt

SEQ ID NO: 518417 - DNA, 33 bp, Homo sapien
ataaagaaagagtttaagcctagtagttttcca

SEQ ID NO: 518418 - DNA, 33 bp, Homo sapien
ataaagaaagagtttaggcctagtagttttcca

SEQ ID NO: 518419 - DNA, 33 bp, Homo sapien
gttttaaacttttggggattgactgatatttga

SEQ ID NO: 518420 - DNA, 33 bp, Homo sapien
gttttaaacttttgggtattgactgatatttga

SEQ ID NO: 518421 - DNA, 33 bp, Homo sapien
aggcataggtgatggaagtacaattcacacagg

SEQ ID NO: 518422 - DNA, 33 bp, Homo sapien
aggcataggtgatggaggtacaattcacacagg

SEQ ID NO: 518423 - DNA, 33 bp, Homo sapien
ccgtgtttctaagtaacggtgatttagaggtca

SEQ ID NO: 518424 - DNA, 33 bp, Homo sapien
ccgtgtttctaagtaatggtgatttagaggtca

SEQ ID NO: 518425 - DNA, 33 bp, Homo sapien
attgaacaatgcaataaaaagaacaagtctctt

SEQ ID NO: 518426 - DNA, 33 bp, Homo sapien
attgaacaatgcaatagaaagaacaagtctctt

SEQ ID NO: 518427 - DNA, 33 bp, Homo sapien
atctgtacaatggaaacggtagtacctgcctca

SEQ ID NO: 518428 - DNA, 33 bp, Homo sapien
atctgtacaatggaaatggtagtacctgcctca

SEQ ID NO: 518429 - DNA, 33 bp, Homo sapien
ttcctgcaaatattcaagtattcaccttttgag

SEQ ID NO: 518430 - DNA, 33 bp, Homo sapien
ttcctgcaaatattcaggtattcaccttttgag

SEQ ID NO: 518431 - DNA, 33 bp, Homo sapien
agacagaaggaatattgaagaaatcaagcttta

SEQ ID NO: 518432 - DNA, 33 bp, Homo sapien
agacagaaggaatatttaagaaatcaagcttta

SEQ ID NO: 518433 - DNA, 33 bp, Homo sapien
gttatcagctcgctaaagcaagtttcaaccttt

SEQ ID NO: 518434 - DNA, 33 bp, Homo sapien
gttatcagctcgctaaggcaagtttcaaccttt

SEQ ID NO: 518435 - DNA, 33 bp, Homo sapien
tatgtcaaaaatataaaaaaggcttcagtgaaa

SEQ ID NO: 518436 - DNA, 33 bp, Homo sapien
tatgtcaaaaatataacaaaggcttcagtgaaa

SEQ ID NO: 518437 - DNA, 33 bp, Homo sapien
attacaattcatggtaccactcatctatgataa

SEQ ID NO: 518438 - DNA, 33 bp, Homo sapien
attacaattcatggtatcactcatctatgataa

SEQ ID NO: 518439 - DNA, 33 bp, Homo sapien
accttacatagtaaaacggactttgcagatgtg

SEQ ID NO: 518440 - DNA, 33 bp, Homo sapien
accttacatagtaaaatggactttgcagatgtg

SEQ ID NO: 518441 - DNA, 33 bp, Homo sapien
aatatttgaatgtttaaattgaattaccacact

SEQ ID NO: 518442 - DNA, 33 bp, Homo sapien
aatatttgaatgtttatattgaattaccacact

SEQ ID NO: 518443 - DNA, 33 bp, Homo sapien
gaagcaccctgagtcaactcgcttgagaatatt

SEQ ID NO: 518444 - DNA, 33 bp, Homo sapien
gaagcaccctgagtcagctcgcttgagaatatt

SEQ ID NO: 518445 - DNA, 33 bp, Homo sapien
tgtgaaaccagcacgaggtaacttatgaaaaac

SEQ ID NO: 518446 - DNA, 33 bp, Homo sapien
tgtgaaaccagcacgatgtaacttatgaaaaac

SEQ ID NO: 518447 - DNA, 33 bp, Homo sapien
cattagatgcaagacactgtaagcctgaataat

SEQ ID NO: 518448 - DNA, 33 bp, Homo sapien
cattagatgcaagacattgtaagcctgaataat

SEQ ID NO: 518449 - DNA, 33 bp, Homo sapien
taagatcatctccaaagttgaatcaggcaaaat

SEQ ID NO: 518450 - DNA, 33 bp, Homo sapien
taagatcatctccaaatttgaatcaggcaaaat

SEQ ID NO: 518451 - DNA, 33 bp, Homo sapien
tcctccacctattgaactgtgccaggaatgaga

SEQ ID NO: 518452 - DNA, 33 bp, Homo sapien
tcctccacctattgaattgtgccaggaatgaga

SEQ ID NO: 518453 - DNA, 33 bp, Homo sapien
gttaatgtcaatgttacgagatcatagtcttca

SEQ ID NO: 518454 - DNA, 33 bp, Homo sapien
gttaatgtcaatgttatgagatcatagtcttca

SEQ ID NO: 518455 - DNA, 33 bp, Homo sapien
acagttctgtgttccaactgctaggttctcatc

SEQ ID NO: 518456 - DNA, 33 bp, Homo sapien
acagttctgtgttccagctgctaggttctcatc

SEQ ID NO: 518457 - DNA, 33 bp, Homo sapien
ggattgttttggcagaaagggaattgtttttat

SEQ ID NO: 518458 - DNA, 33 bp, Homo sapien
ggattgttttggcagagagggaattgtttttat

SEQ ID NO: 518459 - DNA, 33 bp, Homo sapien
tttctttttgcagttacatgaattacaaattaa

SEQ ID NO: 518460 - DNA, 33 bp, Homo sapien
tttctttttgcagttatatgaattacaaattaa

SEQ ID NO: 518461 - DNA, 33 bp, Homo sapien
ttaaagtttcatcctacgacccaagcttgctca

SEQ ID NO: 518462 - DNA, 33 bp, Homo sapien
ttaaagtttcatcctatgacccaagcttgctca

SEQ ID NO: 518463 - DNA, 33 bp, Homo sapien
gcacacacacaaactcaagagcaattgatgaaa

SEQ ID NO: 518464 - DNA, 33 bp, Homo sapien
gcacacacacaaactctagagcaattgatgaaa

SEQ ID NO: 518465 - DNA, 33 bp, Homo sapien
tgacaccttaggacaactaggagtggctggagt

SEQ ID NO: 518466 - DNA, 33 bp, Homo sapien
tgacaccttaggacaattaggagtggctggagt

SEQ ID NO: 518467 - DNA, 33 bp, Homo sapien
ctcaacaatgtcatacaagggataagttagaat

SEQ ID NO: 518468 - DNA, 33 bp, Homo sapien
ctcaacaatgtcatacgagggataagttagaat

SEQ ID NO: 518469 - DNA, 33 bp, Homo sapien
gtgtagggcctcaagaaatgtttttaattccta

SEQ ID NO: 518470 - DNA, 33 bp, Homo sapien
gtgtagggcctcaagagatgtttttaattccta

SEQ ID NO: 518471 - DNA, 33 bp, Homo sapien
aataccaggaaccctacctgagtctttatcaac

SEQ ID NO: 518472 - DNA, 33 bp, Homo sapien
aataccaggaaccctatctgagtctttatcaac

SEQ ID NO: 518473 - DNA, 33 bp, Homo sapien
cctgccttcaatttaactgtttcatacatgtgt

SEQ ID NO: 518474 - DNA, 33 bp, Homo sapien
cctgccttcaatttaattgtttcatacatgtgt

SEQ ID NO: 518475 - DNA, 33 bp, Homo sapien
agcctctctcagcataagatttccagagattat

SEQ ID NO: 518476 - DNA, 33 bp, Homo sapien
agcctctctcagcataggatttccagagattat

SEQ ID NO: 518477 - DNA, 33 bp, Homo sapien
cccgtgttcacagacaccaaaagtccctgcaac

SEQ ID NO: 518478 - DNA, 33 bp, Homo sapien
cccgtgttcacagacatcaaaagtccctgcaac

SEQ ID NO: 518479 - DNA, 33 bp, Homo sapien
aagaatatcagcattcaaattatttgcaaactc

SEQ ID NO: 518480 - DNA, 33 bp, Homo sapien
aagaatatcagcattccaattatttgcaaactc

SEQ ID NO: 518481 - DNA, 33 bp, Homo sapien
cagaaaaagtccaaaacattcagtctaagtagc

SEQ ID NO: 518482 - DNA, 33 bp, Homo sapien
cagaaaaagtccaaaatattcagtctaagtagc

SEQ ID NO: 518483 - DNA, 33 bp, Homo sapien
tcttttccctgaatgacctttacagtgtgtctt

SEQ ID NO: 518484 - DNA, 33 bp, Homo sapien
tcttttccctgaatgatctttacagtgtgtctt

SEQ ID NO: 518485 - DNA, 33 bp, Homo sapien
aatatctaatttttgcaccacatgagacagtca

SEQ ID NO: 518486 - DNA, 33 bp, Homo sapien
aatatctaatttttgcgccacatgagacagtca

SEQ ID NO: 518487 - DNA, 33 bp, Homo sapien
ttaggttgtatacctccatttagactcatatta

SEQ ID NO: 518488 - DNA, 33 bp, Homo sapien
ttaggttgtatacctctatttagactcatatta

SEQ ID NO: 518489 - DNA, 33 bp, Homo sapien
aacattcagtttccaacgaatttcatacacaga

SEQ ID NO: 518490 - DNA, 33 bp, Homo sapien
aacattcagtttccaatgaatttcatacacaga

SEQ ID NO: 518491 - DNA, 33 bp, Homo sapien
caatggcttgttgcacagcatggagaagttgat

SEQ ID NO: 518492 - DNA, 33 bp, Homo sapien
caatggcttgttgcactgcatggagaagttgat

SEQ ID NO: 518493 - DNA, 33 bp, Homo sapien
atggtccatattgctaccactggtctttctgaa

SEQ ID NO: 518494 - DNA, 33 bp, Homo sapien
atggtccatattgctatcactggtctttctgaa

SEQ ID NO: 518495 - DNA, 33 bp, Homo sapien
ataaccatcttacagggagaaaatggatctggt

SEQ ID NO: 518496 - DNA, 33 bp, Homo sapien
ataaccatcttacaggtagaaaatggatctggt

SEQ ID NO: 518497 - DNA, 33 bp, Homo sapien
accaatctatctgtaacgaacagtaagcataaa

SEQ ID NO: 518498 - DNA, 33 bp, Homo sapien
accaatctatctgtaatgaacagtaagcataaa

SEQ ID NO: 518499 - DNA, 33 bp, Homo sapien
cagtcattagaatactaacaattgctaataaat

SEQ ID NO: 518500 - DNA, 33 bp, Homo sapien
cagtcattagaatactgacaattgctaataaat

SEQ ID NO: 518501 - DNA, 33 bp, Homo sapien
atttcctaaatgccaacaaagaatactgaccaa

SEQ ID NO: 518502 - DNA, 33 bp, Homo sapien
atttcctaaatgccaagaaagaatactgaccaa

SEQ ID NO: 518503 - DNA, 33 bp, Homo sapien
aatcagggtgtttttcactcaaaatagtcaata

SEQ ID NO: 518504 - DNA, 33 bp, Homo sapien
aatcagggtgtttttctctcaaaatagtcaata

SEQ ID NO: 518505 - DNA, 33 bp, Homo sapien
accaagtaagtgaagacgtctacaagaagaact

SEQ ID NO: 518506 - DNA, 33 bp, Homo sapien
accaagtaagtgaagatgtctacaagaagaact

SEQ ID NO: 518507 - DNA, 33 bp, Homo sapien
tcatctttgcctttccaaatatgaacatatgaa

SEQ ID NO: 518508 - DNA, 33 bp, Homo sapien
tcatctttgcctttcctaatatgaacatatgaa

SEQ ID NO: 518509 - DNA, 33 bp, Homo sapien
atgaaaatggcaataactgaattacatacagta

SEQ ID NO: 518510 - DNA, 33 bp, Homo sapien
atgaaaatggcaataattgaattacatacagta

SEQ ID NO: 518511 - DNA, 33 bp, Homo sapien
tgagggcatactctttaaaaaattcactctttg

SEQ ID NO: 518512 - DNA, 33 bp, Homo sapien
tgagggcatactcttttaaaaattcactctttg

SEQ ID NO: 518513 - DNA, 33 bp, Homo sapien
aagcatacttctaagacatagtggtgattctct

SEQ ID NO: 518514 - DNA, 33 bp, Homo sapien
aagcatacttctaagatatagtggtgattctct

SEQ ID NO: 518515 - DNA, 33 bp, Homo sapien
gtgtgactctagactcaatttcttgacactagt

SEQ ID NO: 518516 - DNA, 33 bp, Homo sapien
gtgtgactctagactcgatttcttgacactagt

SEQ ID NO: 518517 - DNA, 33 bp, Homo sapien
acttccaatgccaaaagctatacaaacctccac

SEQ ID NO: 518518 - DNA, 33 bp, Homo sapien
acttccaatgccaaaatctatacaaacctccac

SEQ ID NO: 518519 - DNA, 33 bp, Homo sapien
acactgtaattgcatacgttctgtcctaagaaa

SEQ ID NO: 518520 - DNA, 33 bp, Homo sapien
acactgtaattgcatatgttctgtcctaagaaa

SEQ ID NO: 518521 - DNA, 33 bp, Homo sapien
tattgttattcaataccggacaggaaacgctcc

SEQ ID NO: 518522 - DNA, 33 bp, Homo sapien
tattgttattcaatactggacaggaaacgctcc

SEQ ID NO: 518523 - DNA, 33 bp, Homo sapien
ctagagttgagccataaaccatattttagaagt

SEQ ID NO: 518524 - DNA, 33 bp, Homo sapien
ctagagttgagccatacaccatattttagaagt

SEQ ID NO: 518525 - DNA, 33 bp, Homo sapien
gtatgcattttaaaccagatagttccttagcaa

SEQ ID NO: 518526 - DNA, 33 bp, Homo sapien
gtatgcattttaaaccggatagttccttagcaa

SEQ ID NO: 518527 - DNA, 33 bp, Homo sapien
accctcttgtgttctcaatgtcactttggcttg

SEQ ID NO: 518528 - DNA, 33 bp, Homo sapien
accctcttgtgttctctatgtcactttggcttg

SEQ ID NO: 518529 - DNA, 33 bp, Homo sapien
ctctttttcaaattagaatgctcagtatttttt

SEQ ID NO: 518530 - DNA, 33 bp, Homo sapien
ctctttttcaaattagcatgctcagtatttttt

SEQ ID NO: 518531 - DNA, 33 bp, Homo sapien
ttaggcaacgatgactaactaaatccacaaaca

SEQ ID NO: 518532 - DNA, 33 bp, Homo sapien
ttaggcaacgatgactgactaaatccacaaaca

SEQ ID NO: 518533 - DNA, 33 bp, Homo sapien
attttattctgtgttcaagattataagcagggg

SEQ ID NO: 518534 - DNA, 33 bp, Homo sapien
attttattctgtgttcgagattataagcagggg

SEQ ID NO: 518535 - DNA, 33 bp, Homo sapien
aaactttcctaagcaaccatcattcttttgatg

SEQ ID NO: 518536 - DNA, 33 bp, Homo sapien
aaactttcctaagcaatcatcattcttttgatg

SEQ ID NO: 518537 - DNA, 33 bp, Homo sapien
aaagcctgtagttttcaacattaccttgcttct

SEQ ID NO: 518538 - DNA, 33 bp, Homo sapien
aaagcctgtagttttcgacattaccttgcttct

SEQ ID NO: 518539 - DNA, 33 bp, Homo sapien
ccttttctctatgtcaatatacctatacaaatg

SEQ ID NO: 518540 - DNA, 33 bp, Homo sapien
ccttttctctatgtcagtatacctatacaaatg

SEQ ID NO: 518541 - DNA, 33 bp, Homo sapien
acctacagaatacgaacgggttctcagtgtaca

SEQ ID NO: 518542 - DNA, 33 bp, Homo sapien
acctacagaatacgaatgggttctcagtgtaca

SEQ ID NO: 518543 - DNA, 33 bp, Homo sapien
ggcagaccgaagaccaaagatatcattctatcc

SEQ ID NO: 518544 - DNA, 33 bp, Homo sapien
ggcagaccgaagaccagagatatcattctatcc

SEQ ID NO: 518545 - DNA, 33 bp, Homo sapien
atgtaaatgaggtggacatgactccaagtttct

SEQ ID NO: 518546 - DNA, 33 bp, Homo sapien
atgtaaatgaggtggagatgactccaagtttct

SEQ ID NO: 518547 - DNA, 33 bp, Homo sapien
tccaacacactgacaactcttaaaaatgtttat

SEQ ID NO: 518548 - DNA, 33 bp, Homo sapien
tccaacacactgacaattcttaaaaatgtttat

SEQ ID NO: 518549 - DNA, 33 bp, Homo sapien
ttccatttttgctttacctctacacatattcac

SEQ ID NO: 518550 - DNA, 33 bp, Homo sapien
ttccatttttgctttatctctacacatattcac

SEQ ID NO: 518551 - DNA, 33 bp, Homo sapien
ccaaaagtaaactggccagctcctgcttgtttt

SEQ ID NO: 518552 - DNA, 33 bp, Homo sapien
ccaaaagtaaactggctagctcctgcttgtttt

SEQ ID NO: 518553 - DNA, 33 bp, Homo sapien
actccccatataattacgacagaattgttttct

SEQ ID NO: 518554 - DNA, 33 bp, Homo sapien
actccccatataattaggacagaattgttttct

SEQ ID NO: 518555 - DNA, 33 bp, Homo sapien
gttgcttgtctttgtccagtaaatggcaaactt

SEQ ID NO: 518556 - DNA, 33 bp, Homo sapien
gttgcttgtctttgtctagtaaatggcaaactt

SEQ ID NO: 518557 - DNA, 33 bp, Homo sapien
aataaacacttggagcacatagtgtaatcattt

SEQ ID NO: 518558 - DNA, 33 bp, Homo sapien
aataaacacttggagcgcatagtgtaatcattt

SEQ ID NO: 518559 - DNA, 33 bp, Homo sapien
ctgtaggggcaaggaagtaactaataggggttt

SEQ ID NO: 518560 - DNA, 33 bp, Homo sapien
ctgtaggggcaaggaattaactaataggggttt

SEQ ID NO: 518561 - DNA, 33 bp, Homo sapien
aggtgtgtgtaaaagaataaacctgtgtgacag

SEQ ID NO: 518562 - DNA, 33 bp, Homo sapien
aggtgtgtgtaaaagagtaaacctgtgtgacag

SEQ ID NO: 518563 - DNA, 33 bp, Homo sapien
ttcaccttttagcaggcaactgttagtgtggtg

SEQ ID NO: 518564 - DNA, 33 bp, Homo sapien
ttcaccttttagcaggtaactgttagtgtggtg

SEQ ID NO: 518565 - DNA, 33 bp, Homo sapien
ttaggacttcattgcaaaacaaaatatagaata

SEQ ID NO: 518566 - DNA, 33 bp, Homo sapien
ttaggacttcattgcacaacaaaatatagaata

SEQ ID NO: 518567 - DNA, 33 bp, Homo sapien
cctcaaattaacaaaaatgaattatctaatttt

SEQ ID NO: 518568 - DNA, 33 bp, Homo sapien
cctcaaattaacaaaagtgaattatctaatttt

SEQ ID NO: 518569 - DNA, 33 bp, Homo sapien
tcctaaattagaactcaattttctcctctgcac

SEQ ID NO: 518570 - DNA, 33 bp, Homo sapien
tcctaaattagaactccattttctcctctgcac

SEQ ID NO: 518571 - DNA, 33 bp, Homo sapien
ggatatcaacttgtgccattctcatttttattc

SEQ ID NO: 518572 - DNA, 33 bp, Homo sapien
ggatatcaacttgtgctattctcatttttattc

SEQ ID NO: 518573 - DNA, 33 bp, Homo sapien
gtaaaaccaaattaaacgtgattccttgatctt

SEQ ID NO: 518574 - DNA, 33 bp, Homo sapien
gtaaaaccaaattaaatgtgattccttgatctt

SEQ ID NO: 518575 - DNA, 33 bp, Homo sapien
tgtttttgtgagtgaactagagggaaaggtaga

SEQ ID NO: 518576 - DNA, 33 bp, Homo sapien
tgtttttgtgagtgaagtagagggaaaggtaga

SEQ ID NO: 518577 - DNA, 33 bp, Homo sapien
tctgacaattagtttaacttctgataatagctc

SEQ ID NO: 518578 - DNA, 33 bp, Homo sapien
tctgacaattagtttagcttctgataatagctc

SEQ ID NO: 518579 - DNA, 33 bp, Homo sapien
aattggttgaagggtaaatggaaactctgtatt

SEQ ID NO: 518580 - DNA, 33 bp, Homo sapien
aattggttgaagggtatatggaaactctgtatt

SEQ ID NO: 518581 - DNA, 33 bp, Homo sapien
cttctttccgaacccacatcctgccataatggc

SEQ ID NO: 518582 - DNA, 33 bp, Homo sapien
cttctttccgaacccatatcctgccataatggc

SEQ ID NO: 518583 - DNA, 33 bp, Homo sapien
catttcattttgacaccggctttatttcagttt

SEQ ID NO: 518584 - DNA, 33 bp, Homo sapien
catttcattttgacactggctttatttcagttt

SEQ ID NO: 518585 - DNA, 33 bp, Homo sapien
ccccttcttggtgataccttttttgctccacag

SEQ ID NO: 518586 - DNA, 33 bp, Homo sapien
ccccttcttggtgatatcttttttgctccacag

SEQ ID NO: 518587 - DNA, 33 bp, Homo sapien
agcaaaatattcaaaaatcatctgaagtgtccc

SEQ ID NO: 518588 - DNA, 33 bp, Homo sapien
agcaaaatattcaaaagtcatctgaagtgtccc

SEQ ID NO: 518589 - DNA, 33 bp, Homo sapien
aggttgtagagaaaaacgaatgctcatacactg

SEQ ID NO: 518590 - DNA, 33 bp, Homo sapien
aggttgtagagaaaaaggaatgctcatacactg

SEQ ID NO: 518591 - DNA, 33 bp, Homo sapien
gtttcaaacttgaacaatcttgatccagtgtct

SEQ ID NO: 518592 - DNA, 33 bp, Homo sapien
gtttcaaacttgaacagtcttgatccagtgtct

SEQ ID NO: 518593 - DNA, 33 bp, Homo sapien
ggttaaagagtaaccaaaatacctcaagtgatg

SEQ ID NO: 518594 - DNA, 33 bp, Homo sapien
ggttaaagagtaaccataatacctcaagtgatg

SEQ ID NO: 518595 - DNA, 33 bp, Homo sapien
tgtcctttcagaaatccgagttattattaattc

SEQ ID NO: 518596 - DNA, 33 bp, Homo sapien
tgtcctttcagaaatctgagttattattaattc

SEQ ID NO: 518597 - DNA, 33 bp, Homo sapien
gtacccttcccatagaagttccaccaattcaac

SEQ ID NO: 518598 - DNA, 33 bp, Homo sapien
gtacccttcccatagacgttccaccaattcaac

SEQ ID NO: 518599 - DNA, 33 bp, Homo sapien
gtccaacaatgagtcacgggtaaataaaaggtg

SEQ ID NO: 518600 - DNA, 33 bp, Homo sapien
gtccaacaatgagtcatgggtaaataaaaggtg

SEQ ID NO: 518601 - DNA, 33 bp, Homo sapien
gtaaagttccctggacgatatcacataagcgat

SEQ ID NO: 518602 - DNA, 33 bp, Homo sapien
gtaaagttccctggactatatcacataagcgat

SEQ ID NO: 518603 - DNA, 33 bp, Homo sapien
tgcactggaaatcttaaccaatatcatcttacc

SEQ ID NO: 518604 - DNA, 33 bp, Homo sapien
tgcactggaaatcttacccaatatcatcttacc

SEQ ID NO: 518605 - DNA, 33 bp, Homo sapien
aactatagaatttaccaaggaaatgtgaagttt

SEQ ID NO: 518606 - DNA, 33 bp, Homo sapien
aactatagaatttaccgaggaaatgtgaagttt

SEQ ID NO: 518607 - DNA, 33 bp, Homo sapien
aggttcagcaaattaaaggagatgtgtttctga

SEQ ID NO: 518608 - DNA, 33 bp, Homo sapien
aggttcagcaaattaatggagatgtgtttctga

SEQ ID NO: 518609 - DNA, 33 bp, Homo sapien
cagcagttaagagtggacattgaattctccaac

SEQ ID NO: 518610 - DNA, 33 bp, Homo sapien
cagcagttaagagtgggcattgaattctccaac

SEQ ID NO: 518611 - DNA, 33 bp, Homo sapien
gtccctctgtttcagacataagatgaagttacg

SEQ ID NO: 518612 - DNA, 33 bp, Homo sapien
gtccctctgtttcagatataagatgaagttacg

SEQ ID NO: 518613 - DNA, 33 bp, Homo sapien
gaatgagagcagaaaaacttgaagtctgagagg

SEQ ID NO: 518614 - DNA, 33 bp, Homo sapien
gaatgagagcagaaaagcttgaagtctgagagg

SEQ ID NO: 518615 - DNA, 33 bp, Homo sapien
gattaattttcattgaagtgatactggaagtta

SEQ ID NO: 518616 - DNA, 33 bp, Homo sapien
gattaattttcattgaggtgatactggaagtta

SEQ ID NO: 518617 - DNA, 33 bp, Homo sapien
catttgattttagttacgtttctcactagctct

SEQ ID NO: 518618 - DNA, 33 bp, Homo sapien
catttgattttagttatgtttctcactagctct

SEQ ID NO: 518619 - DNA, 33 bp, Homo sapien
agacagaagtaggagcaagagtactcagaaaaa

SEQ ID NO: 518620 - DNA, 33 bp, Homo sapien
agacagaagtaggagcgagagtactcagaaaaa

SEQ ID NO: 518621 - DNA, 33 bp, Homo sapien
aagaaagtaaggattacctgttatctcaccact

SEQ ID NO: 518622 - DNA, 33 bp, Homo sapien
aagaaagtaaggattatctgttatctcaccact

SEQ ID NO: 518623 - DNA, 33 bp, Homo sapien
tgtcaggaagaatccaatgaagctctggaataa

SEQ ID NO: 518624 - DNA, 33 bp, Homo sapien
tgtcaggaagaatccagtgaagctctggaataa

SEQ ID NO: 518625 - DNA, 33 bp, Homo sapien
tcccacagagaagtcacggtttttattactacg

SEQ ID NO: 518626 - DNA, 33 bp, Homo sapien
tcccacagagaagtcatggtttttattactacg

SEQ ID NO: 518627 - DNA, 33 bp, Homo sapien
ccatgagatatattcaactgtccaatcgaaatt

SEQ ID NO: 518628 - DNA, 33 bp, Homo sapien
ccatgagatatattcatctgtccaatcgaaatt

SEQ ID NO: 518629 - DNA, 33 bp, Homo sapien
aagttttggttctccactctagggactttcaac

SEQ ID NO: 518630 - DNA, 33 bp, Homo sapien
aagttttggttctccagtctagggactttcaac

SEQ ID NO: 518631 - DNA, 33 bp, Homo sapien
catgaagaataggaaaagttgtgctatgtggca

SEQ ID NO: 518632 - DNA, 33 bp, Homo sapien
catgaagaataggaaatgttgtgctatgtggca

SEQ ID NO: 518633 - DNA, 33 bp, Homo sapien
ccctagccatgtgtaacggtgagacaattaaac

SEQ ID NO: 518634 - DNA, 33 bp, Homo sapien
ccctagccatgtgtaatggtgagacaattaaac

SEQ ID NO: 518635 - DNA, 33 bp, Homo sapien
tcctttgagaacccaactgttatgagtaacaca

SEQ ID NO: 518636 - DNA, 33 bp, Homo sapien
tcctttgagaacccaattgttatgagtaacaca

SEQ ID NO: 518637 - DNA, 33 bp, Homo sapien
atttggcttttgacaccgaccagaattcattct

SEQ ID NO: 518638 - DNA, 33 bp, Homo sapien
atttggcttttgacactgaccagaattcattct

SEQ ID NO: 518639 - DNA, 33 bp, Homo sapien
tgcctggttccaacgaataaaggaagtggcaag

SEQ ID NO: 518640 - DNA, 33 bp, Homo sapien
tgcctggttccaacgagtaaaggaagtggcaag

SEQ ID NO: 518641 - DNA, 33 bp, Homo sapien
tttccttgctaagctaagtttatggtagctatc

SEQ ID NO: 518642 - DNA, 33 bp, Homo sapien
tttccttgctaagctatgtttatggtagctatc

SEQ ID NO: 518643 - DNA, 33 bp, Homo sapien
cacatccaaatgaggcaactgaggagagttcac

SEQ ID NO: 518644 - DNA, 33 bp, Homo sapien
cacatccaaatgaggcgactgaggagagttcac

SEQ ID NO: 518645 - DNA, 33 bp, Homo sapien
gaacttcatctacttcaagagtcctgtgagcag

SEQ ID NO: 518646 - DNA, 33 bp, Homo sapien
gaacttcatctacttcgagagtcctgtgagcag

SEQ ID NO: 518647 - DNA, 33 bp, Homo sapien
ggtgcccagaatgtaagtataaaggaagctttt

SEQ ID NO: 518648 - DNA, 33 bp, Homo sapien
ggtgcccagaatgtaattataaaggaagctttt

SEQ ID NO: 518649 - DNA, 33 bp, Homo sapien
tatcccttatgatgtcgaaagttcttacaaaaa

SEQ ID NO: 518650 - DNA, 33 bp, Homo sapien
tatcccttatgatgtctaaagttcttacaaaaa

SEQ ID NO: 518651 - DNA, 33 bp, Homo sapien
cttcacacccttatcaccactataccagcatga

SEQ ID NO: 518652 - DNA, 33 bp, Homo sapien
cttcacacccttatcatcactataccagcatga

SEQ ID NO: 518653 - DNA, 33 bp, Homo sapien
tttcatcttttaaaacggaaatgcggtacccat

SEQ ID NO: 518654 - DNA, 33 bp, Homo sapien
tttcatcttttaaaactgaaatgcggtacccat

SEQ ID NO: 518655 - DNA, 33 bp, Homo sapien
acttctactatttacaatgctgcagaagtgttg

SEQ ID NO: 518656 - DNA, 33 bp, Homo sapien
acttctactatttacagtgctgcagaagtgttg

SEQ ID NO: 518657 - DNA, 33 bp, Homo sapien
aagggaggagtatcccaaaagatagagctcaga

SEQ ID NO: 518658 - DNA, 33 bp, Homo sapien
aagggaggagtatcccgaaagatagagctcaga

SEQ ID NO: 518659 - DNA, 33 bp, Homo sapien
ttcttggagtattcaacctgtgttcatcaaaag

SEQ ID NO: 518660 - DNA, 33 bp, Homo sapien
ttcttggagtattcaagctgtgttcatcaaaag

SEQ ID NO: 518661 - DNA, 33 bp, Homo sapien
cttcaggactaaattacgttatgcagtaaatat

SEQ ID NO: 518662 - DNA, 33 bp, Homo sapien
cttcaggactaaattatgttatgcagtaaatat

SEQ ID NO: 518663 - DNA, 33 bp, Homo sapien
tagtgaaataaaggtaggatgtagacattgtaa

SEQ ID NO: 518664 - DNA, 33 bp, Homo sapien
tagtgaaataaaggtatgatgtagacattgtaa

SEQ ID NO: 518665 - DNA, 33 bp, Homo sapien
cctataactggtaataagaagagtattgataag

SEQ ID NO: 518666 - DNA, 33 bp, Homo sapien
cctataactggtaataggaagagtattgataag

SEQ ID NO: 518667 - DNA, 33 bp, Homo sapien
attaaattggtagtgacgcttacaagagaagtg

SEQ ID NO: 518668 - DNA, 33 bp, Homo sapien
attaaattggtagtgatgcttacaagagaagtg

SEQ ID NO: 518669 - DNA, 33 bp, Homo sapien
gaggtgacatctaagcagaacacttaagaacaa

SEQ ID NO: 518670 - DNA, 33 bp, Homo sapien
gaggtgacatctaagcggaacacttaagaacaa

SEQ ID NO: 518671 - DNA, 33 bp, Homo sapien
aaactggtacacataaataaagtagcttcctga

SEQ ID NO: 518672 - DNA, 33 bp, Homo sapien
aaactggtacacataagtaaagtagcttcctga

SEQ ID NO: 518673 - DNA, 33 bp, Homo sapien
gaaaatacataaccaaagaaaacacttaaaaca

SEQ ID NO: 518674 - DNA, 33 bp, Homo sapien
gaaaatacataaccaaggaaaacacttaaaaca

SEQ ID NO: 518675 - DNA, 33 bp, Homo sapien
ggtgtatagacaaggcactttttgtactgttac

SEQ ID NO: 518676 - DNA, 33 bp, Homo sapien
ggtgtatagacaaggccctttttgtactgttac

SEQ ID NO: 518677 - DNA, 33 bp, Homo sapien
tgagagtttgtctcacagagtgtctgtcattat

SEQ ID NO: 518678 - DNA, 33 bp, Homo sapien
tgagagtttgtctcacggagtgtctgtcattat

SEQ ID NO: 518679 - DNA, 33 bp, Homo sapien
tgatctataaggaagcaaaaacaaggtcaagaa

SEQ ID NO: 518680 - DNA, 33 bp, Homo sapien
tgatctataaggaagccaaaacaaggtcaagaa

SEQ ID NO: 518681 - DNA, 33 bp, Homo sapien
tgttgctctttccatacggcattctttgaaaga

SEQ ID NO: 518682 - DNA, 33 bp, Homo sapien
tgttgctctttccatatggcattctttgaaaga

SEQ ID NO: 518683 - DNA, 33 bp, Homo sapien
ctatatgatatagaaaatgaaaatccaccacca

SEQ ID NO: 518684 - DNA, 33 bp, Homo sapien
ctatatgatatagaaagtgaaaatccaccacca

SEQ ID NO: 518685 - DNA, 33 bp, Homo sapien
cccaagcagataacatcaagaaaaaaagacctt

SEQ ID NO: 518686 - DNA, 33 bp, Homo sapien
cccaagcagataacatgaagaaaaaaagacctt

SEQ ID NO: 518687 - DNA, 33 bp, Homo sapien
aatttgtgatgataaaatctcttgcatgaaaaa

SEQ ID NO: 518688 - DNA, 33 bp, Homo sapien
aatttgtgatgataaagtctcttgcatgaaaaa

SEQ ID NO: 518689 - DNA, 33 bp, Homo sapien
tttcccatagaaaagcaatagtttcaagcagcc

SEQ ID NO: 518690 - DNA, 33 bp, Homo sapien
tttcccatagaaaagcgatagtttcaagcagcc

SEQ ID NO: 518691 - DNA, 33 bp, Homo sapien
ttcacctctgcttccaaaagtccaattctctct

SEQ ID NO: 518692 - DNA, 33 bp, Homo sapien
ttcacctctgcttccacaagtccaattctctct

SEQ ID NO: 518693 - DNA, 33 bp, Homo sapien
aagaagaataccctacacacagatttcatgaaa

SEQ ID NO: 518694 - DNA, 33 bp, Homo sapien
aagaagaataccctacgcacagatttcatgaaa

SEQ ID NO: 518695 - DNA, 33 bp, Homo sapien
atgctttctgataggaaatttggcaaaacctct

SEQ ID NO: 518696 - DNA, 33 bp, Homo sapien
atgctttctgataggacatttggcaaaacctct

SEQ ID NO: 518697 - DNA, 33 bp, Homo sapien
taaggttaaaagaacaatcaaccagggttactc

SEQ ID NO: 518698 - DNA, 33 bp, Homo sapien
taaggttaaaagaacagtcaaccagggttactc

SEQ ID NO: 518699 - DNA, 33 bp, Homo sapien
ttcagtcaaccaagataaatgagctctagagat

SEQ ID NO: 518700 - DNA, 33 bp, Homo sapien
ttcagtcaaccaagatgaatgagctctagagat

SEQ ID NO: 518701 - DNA, 33 bp, Homo sapien
attgttgaccaaggtacagtgttttacagcaga

SEQ ID NO: 518702 - DNA, 33 bp, Homo sapien
attgttgaccaaggtagagtgttttacagcaga

SEQ ID NO: 518703 - DNA, 33 bp, Homo sapien
tcattaagtgatagaaaccggtattagcaaacc

SEQ ID NO: 518704 - DNA, 33 bp, Homo sapien
tcattaagtgatagaacccggtattagcaaacc

SEQ ID NO: 518705 - DNA, 33 bp, Homo sapien
acctgctgatggccaaaaaaacagagaacaaaa

SEQ ID NO: 518706 - DNA, 33 bp, Homo sapien
acctgctgatggccaataaaacagagaacaaaa

SEQ ID NO: 518707 - DNA, 33 bp, Homo sapien
tattacatcttggaaacggtaactgtaccaatt

SEQ ID NO: 518708 - DNA, 33 bp, Homo sapien
tattacatcttggaaatggtaactgtaccaatt

SEQ ID NO: 518709 - DNA, 33 bp, Homo sapien
ttggaaggtttcagacaagagtacaactaggca

SEQ ID NO: 518710 - DNA, 33 bp, Homo sapien
ttggaaggtttcagacgagagtacaactaggca

SEQ ID NO: 518711 - DNA, 33 bp, Homo sapien
tttttaagagagtttcaaggagatatcaggagt

SEQ ID NO: 518712 - DNA, 33 bp, Homo sapien
tttttaagagagtttccaggagatatcaggagt

SEQ ID NO: 518713 - DNA, 33 bp, Homo sapien
gaagctgtattttagaacatgttttgacacggt

SEQ ID NO: 518714 - DNA, 33 bp, Homo sapien
gaagctgtattttagaccatgttttgacacggt

SEQ ID NO: 518715 - DNA, 33 bp, Homo sapien
taaaaaatatctacagactcaatgtcactgaaa

SEQ ID NO: 518716 - DNA, 33 bp, Homo sapien
taaaaaatatctacagcctcaatgtcactgaaa

SEQ ID NO: 518717 - DNA, 33 bp, Homo sapien
aagacaggacttcagcaatgttttagaaggctg

SEQ ID NO: 518718 - DNA, 33 bp, Homo sapien
aagacaggacttcagctatgttttagaaggctg

SEQ ID NO: 518719 - DNA, 33 bp, Homo sapien
ggaaaaaatactccagaagattgcttttagtct

SEQ ID NO: 518720 - DNA, 33 bp, Homo sapien
ggaaaaaatactccagcagattgcttttagtct

SEQ ID NO: 518721 - DNA, 33 bp, Homo sapien
ttcaacatttcttctcaaagttccacgaccttg

SEQ ID NO: 518722 - DNA, 33 bp, Homo sapien
ttcaacatttcttctcgaagttccacgaccttg

SEQ ID NO: 518723 - DNA, 33 bp, Homo sapien
caagaaagtgttttaaatgttccaccagttggc

SEQ ID NO: 518724 - DNA, 33 bp, Homo sapien
caagaaagtgttttaagtgttccaccagttggc

SEQ ID NO: 518725 - DNA, 33 bp, Homo sapien
cacaagcataaatctagctagtgacccatgagc

SEQ ID NO: 518726 - DNA, 33 bp, Homo sapien
cacaagcataaatctatctagtgacccatgagc

SEQ ID NO: 518727 - DNA, 33 bp, Homo sapien
ctggctggaaattgaaaccaatatgaaactttc

SEQ ID NO: 518728 - DNA, 33 bp, Homo sapien
ctggctggaaattgaagccaatatgaaactttc

SEQ ID NO: 518729 - DNA, 33 bp, Homo sapien
ttaatgtcatagtttgaatgttacaatgacaat

SEQ ID NO: 518730 - DNA, 33 bp, Homo sapien
ttaatgtcatagtttgtatgttacaatgacaat

SEQ ID NO: 518731 - DNA, 33 bp, Homo sapien
attctactttaatctgaaactataatctataaa

SEQ ID NO: 518732 - DNA, 33 bp, Homo sapien
attctactttaatctggaactataatctataaa

SEQ ID NO: 518733 - DNA, 33 bp, Homo sapien
ttcatataatagtcaaaatctttcaaatctatt

SEQ ID NO: 518734 - DNA, 33 bp, Homo sapien
ttcatataatagtcaagatctttcaaatctatt

SEQ ID NO: 518735 - DNA, 33 bp, Homo sapien
atctgagagacggagtaaatagcacactaatga

SEQ ID NO: 518736 - DNA, 33 bp, Homo sapien
atctgagagacggagtgaatagcacactaatga

SEQ ID NO: 518737 - DNA, 33 bp, Homo sapien
tgattcaatttaatcacgttttgtgttggaacc

SEQ ID NO: 518738 - DNA, 33 bp, Homo sapien
tgattcaatttaatcatgttttgtgttggaacc

SEQ ID NO: 518739 - DNA, 33 bp, Homo sapien
ttctgaaaagaagtaaatgtggcaataaaatat

SEQ ID NO: 518740 - DNA, 33 bp, Homo sapien
ttctgaaaagaagtaagtgtggcaataaaatat

SEQ ID NO: 518741 - DNA, 33 bp, Homo sapien
acatagcaaggtcaaacaataaatacccttagg

SEQ ID NO: 518742 - DNA, 33 bp, Homo sapien
acatagcaaggtcaaagaataaatacccttagg

SEQ ID NO: 518743 - DNA, 33 bp, Homo sapien
gagagagttaatgtaccaccctggattcttgtc

SEQ ID NO: 518744 - DNA, 33 bp, Homo sapien
gagagagttaatgtactaccctggattcttgtc

SEQ ID NO: 518745 - DNA, 33 bp, Homo sapien
cataatgatgtatagaaacaattattatggctg

SEQ ID NO: 518746 - DNA, 33 bp, Homo sapien
cataatgatgtatagagacaattattatggctg

SEQ ID NO: 518747 - DNA, 33 bp, Homo sapien
agattctttctgctcaagtgttcactgtcttct

SEQ ID NO: 518748 - DNA, 33 bp, Homo sapien
agattctttctgctcatgtgttcactgtcttct

SEQ ID NO: 518749 - DNA, 33 bp, Homo sapien
ggctgaactcattttccctgccagagcaggagg

SEQ ID NO: 518750 - DNA, 33 bp, Homo sapien
ggctgaactcattttctctgccagagcaggagg

SEQ ID NO: 518751 - DNA, 33 bp, Homo sapien
aaaatggatattgaaaagaatacactataaact

SEQ ID NO: 518752 - DNA, 33 bp, Homo sapien
aaaatggatattgaaatgaatacactataaact

SEQ ID NO: 518753 - DNA, 33 bp, Homo sapien
aaatcacaagaaagccaaatgaaaaaatcagac

SEQ ID NO: 518754 - DNA, 33 bp, Homo sapien
aaatcacaagaaagccgaatgaaaaaatcagac

SEQ ID NO: 518755 - DNA, 33 bp, Homo sapien; identical to SEQ ID NO: 518753

SEQ ID NO: 518756 - DNA, 33 bp, Homo sapien; identical to SEQ ID NO: 518754

SEQ ID NO: 518757 - DNA, 33 bp, Homo sapien
ataacaatcactgtaccgcacacatacatggta

SEQ ID NO: 518758 - DNA, 33 bp, Homo sapien
ataacaatcactgtacggcacacatacatggta

SEQ ID NO: 518759 - DNA, 33 bp, Homo sapien
taatataaactcaagagaaatagacttcagcca

SEQ ID NO: 518760 - DNA, 33 bp, Homo sapien
taatataaactcaagataaatagacttcagcca

SEQ ID NO: 518761 - DNA, 33 bp, Homo sapien
tatgatctttctctcaaaggatatttttgcatt

SEQ ID NO: 518762 - DNA, 33 bp, Homo sapien
tatgatctttctctcataggatatttttgcatt

SEQ ID NO: 518763 - DNA, 33 bp, Homo sapien
attttgcagagatctaacttctcctggattagt

SEQ ID NO: 518764 - DNA, 33 bp, Homo sapien
attttgcagagatctagcttctcctggattagt

SEQ ID NO: 518765 - DNA, 33 bp, Homo sapien
gcagacaatagggtcaaagtcctggatgcatct

SEQ ID NO: 518766 - DNA, 33 bp, Homo sapien
gcagacaatagggtcagagtcctggatgcatct

SEQ ID NO: 518767 - DNA, 33 bp, Homo sapien
taataaaatgatgacaacctcatagaataggga

SEQ ID NO: 518768 - DNA, 33 bp, Homo sapien
taataaaatgatgacagcctcatagaataggga

SEQ ID NO: 518769 - DNA, 33 bp, Homo sapien
gcatataatgactctacgcctaaagctcagggg

SEQ ID NO: 518770 - DNA, 33 bp, Homo sapien
gcatataatgactctatgcctaaagctcagggg

SEQ ID NO: 518771 - DNA, 33 bp, Homo sapien
aaagtggagtatacccaacagccatgtttgcta

SEQ ID NO: 518772 - DNA, 33 bp, Homo sapien
aaagtggagtatacccgacagccatgtttgcta

SEQ ID NO: 518773 - DNA, 33 bp, Homo sapien
ggtcaggcagcattcaacacagaattaaattaa

SEQ ID NO: 518774 - DNA, 33 bp, Homo sapien
ggtcaggcagcattcaccacagaattaaattaa

SEQ ID NO: 518775 - DNA, 33 bp, Homo sapien
tgaacttatcatggtcaacaaaacacaagactt

SEQ ID NO: 518776 - DNA, 33 bp, Homo sapien
tgaacttatcatggtccacaaaacacaagactt

SEQ ID NO: 518777 - DNA, 33 bp, Homo sapien
ctagtcttcagtttccacttcactttggcatct

SEQ ID NO: 518778 - DNA, 33 bp, Homo sapien
ctagtcttcagtttcctcttcactttggcatct

SEQ ID NO: 518779 - DNA, 33 bp, Homo sapien
ttacataccaaacaaactcacatattaatggtg

SEQ ID NO: 518780 - DNA, 33 bp, Homo sapien
ttacataccaaacaaagtcacatattaatggtg

SEQ ID NO: 518781 - DNA, 33 bp, Homo sapien
ctgactggtaagccaaaaaatgctgtcctatca

SEQ ID NO: 518782 - DNA, 33 bp, Homo sapien
ctgactggtaagccaagaaatgctgtcctatca

SEQ ID NO: 518783 - DNA, 33 bp, Homo sapien
ggaatgaatttttgtcaaacaatgttctaattt

SEQ ID NO: 518784 - DNA, 33 bp, Homo sapien
ggaatgaatttttgtcgaacaatgttctaattt

SEQ ID NO: 518785 - DNA, 33 bp, Homo sapien
cttgatccatgggatacgagttaagtaacagca

SEQ ID NO: 518786 - DNA, 33 bp, Homo sapien
cttgatccatgggatatgagttaagtaacagca

SEQ ID NO: 518787 - DNA, 33 bp, Homo sapien
gataattgatgagagcagctacactaaaaaaac

SEQ ID NO: 518788 - DNA, 33 bp, Homo sapien
gataattgatgagagcggctacactaaaaaaac

SEQ ID NO: 518789 - DNA, 33 bp, Homo sapien
agtggaagatagttgtcaagggactcaaccttc

SEQ ID NO: 518790 - DNA, 33 bp, Homo sapien
agtggaagatagttgtgaagggactcaaccttc

SEQ ID NO: 518791 - DNA, 33 bp, Homo sapien
ttgtattttccaaaacagttatactatctctgg

SEQ ID NO: 518792 - DNA, 33 bp, Homo sapien
ttgtattttccaaaactgttatactatctctgg

SEQ ID NO: 518793 - DNA, 33 bp, Homo sapien
tggtataacatggagaactcactgaattgtgga

SEQ ID NO: 518794 - DNA, 33 bp, Homo sapien
tggtataacatggagagctcactgaattgtgga

SEQ ID NO: 518795 - DNA, 33 bp, Homo sapien
caatttgtggatcaaacgcaattaagtgtaata

SEQ ID NO: 518796 - DNA, 33 bp, Homo sapien
caatttgtggatcaaatgcaattaagtgtaata

SEQ ID NO: 518797 - DNA, 33 bp, Homo sapien
gatacttttgcttttacgatgccatctgcagag

SEQ ID NO: 518798 - DNA, 33 bp, Homo sapien
gatacttttgcttttatgatgccatctgcagag

SEQ ID NO: 518799 - DNA, 33 bp, Homo sapien
ttcacttagcataagcaaagaggcaacaattca

SEQ ID NO: 518800 - DNA, 33 bp, Homo sapien
ttcacttagcataagcgaagaggcaacaattca

SEQ ID NO: 518801 - DNA, 33 bp, Homo sapien
atgtattcacatccaacttgaatagatttttaa

SEQ ID NO: 518802 - DNA, 33 bp, Homo sapien
atgtattcacatccaatttgaatagatttttaa

SEQ ID NO: 518803 - DNA, 33 bp, Homo sapien
cccctgcctcctgtcacgtacagttttttatgt

SEQ ID NO: 518804 - DNA, 33 bp, Homo sapien
cccctgcctcctgtcatgtacagttttttatgt

SEQ ID NO: 518805 - DNA, 33 bp, Homo sapien
gaattgggccataccaagcagataaatccacac

SEQ ID NO: 518806 - DNA, 33 bp, Homo sapien
gaattgggccataccaggcagataaatccacac

SEQ ID NO: 518807 - DNA, 33 bp, Homo sapien
gcattaggtctttgaaagttggctagaatccaa

SEQ ID NO: 518808 - DNA, 33 bp, Homo sapien
gcattaggtctttgaaggttggctagaatccaa

SEQ ID NO: 518809 - DNA, 33 bp, Homo sapien
attgcatatgattacactaccattataatccaa

SEQ ID NO: 518810 - DNA, 33 bp, Homo sapien
attgcatatgattacagtaccattataatccaa

SEQ ID NO: 518811 - DNA, 33 bp, Homo sapien
gttgaaactgtgggtacggatgatattatcttg

SEQ ID NO: 518812 - DNA, 33 bp, Homo sapien
gttgaaactgtgggtatggatgatattatcttg

SEQ ID NO: 518813 - DNA, 33 bp, Homo sapien
tctggcttaaataattaaactatggcattagtt

SEQ ID NO: 518814 - DNA, 33 bp, Homo sapien
tctggcttaaataattgaactatggcattagtt

SEQ ID NO: 518815 - DNA, 33 bp, Homo sapien
accaaatgttaccagcagatctttgttcttaga

SEQ ID NO: 518816 - DNA, 33 bp, Homo sapien
accaaatgttaccagcggatctttgttcttaga

SEQ ID NO: 518817 - DNA, 33 bp, Homo sapien
aacaacaacaaaattaagggtcaatatccccat

SEQ ID NO: 518818 - DNA, 33 bp, Homo sapien
aacaacaacaaaattacgggtcaatatccccat

SEQ ID NO: 518819 - DNA, 33 bp, Homo sapien
tgcaacagaatccacacgacattgagttgtgca

SEQ ID NO: 518820 - DNA, 33 bp, Homo sapien
tgcaacagaatccacatgacattgagttgtgca

SEQ ID NO: 518821 - DNA, 33 bp, Homo sapien
tagaatgaaaaaaaccacataaatccagtacat

SEQ ID NO: 518822 - DNA, 33 bp, Homo sapien
tagaatgaaaaaaaccgcataaatccagtacat

SEQ ID NO: 518823 - DNA, 33 bp, Homo sapien
cagaaacagggtactaggtaaccgtctctttca

SEQ ID NO: 518824 - DNA, 33 bp, Homo sapien
cagaaacagggtactatgtaaccgtctctttca

SEQ ID NO: 518825 - DNA, 33 bp, Homo sapien
gctagggttactagcaacaaatccatatgggtc

SEQ ID NO: 518826 - DNA, 33 bp, Homo sapien
gctagggttactagcagcaaatccatatgggtc

SEQ ID NO: 518827 - DNA, 33 bp, Homo sapien
gatttttatctatccaaggagaagtaagcttaa

SEQ ID NO: 518828 - DNA, 33 bp, Homo sapien
gatttttatctatccagggagaagtaagcttaa

SEQ ID NO: 518829 - DNA, 33 bp, Homo sapien
acaaaataagacaaaaaacaatgaagtgaagag

SEQ ID NO: 518830 - DNA, 33 bp, Homo sapien
acaaaataagacaaaagacaatgaagtgaagag

SEQ ID NO: 518831 - DNA, 33 bp, Homo sapien
caagtaagaataaacaactcatcatcaagtaaa

SEQ ID NO: 518832 - DNA, 33 bp, Homo sapien
caagtaagaataaacatctcatcatcaagtaaa

SEQ ID NO: 518833 - DNA, 33 bp, Homo sapien
aaaatagagaataactcagatgtgtatttattt

SEQ ID NO: 518834 - DNA, 33 bp, Homo sapien
aaaatagagaataacttagatgtgtatttattt

SEQ ID NO: 518835 - DNA, 33 bp, Homo sapien
cagtgtgagaatgatgaatataaaacaccaaat

SEQ ID NO: 518836 - DNA, 33 bp, Homo sapien
cagtgtgagaatgatggatataaaacaccaaat

SEQ ID NO: 518837 - DNA, 33 bp, Homo sapien
ctttctggaccagtacactcagcttttctgttc

SEQ ID NO: 518838 - DNA, 33 bp, Homo sapien
ctttctggaccagtacgctcagcttttctgttc

SEQ ID NO: 518839 - DNA, 33 bp, Homo sapien
ttttcctaatttgttaaatggacaaaataactc

SEQ ID NO: 518840 - DNA, 33 bp, Homo sapien
ttttcctaatttgttacatggacaaaataactc

SEQ ID NO: 518841 - DNA, 33 bp, Homo sapien
tgaacaaggggcactaacagatcatacagatct

SEQ ID NO: 518842 - DNA, 33 bp, Homo sapien
tgaacaaggggcactagcagatcatacagatct

SEQ ID NO: 518843 - DNA, 33 bp, Homo sapien
ccttaaacttatattaaaatggagcacttgtct

SEQ ID NO: 518844 - DNA, 33 bp, Homo sapien
ccttaaacttatattacaatggagcacttgtct

SEQ ID NO: 518845 - DNA, 33 bp, Homo sapien
atggtttgctctttgacgcaatggttcacaaag

SEQ ID NO: 518846 - DNA, 33 bp, Homo sapien
atggtttgctctttgatgcaatggttcacaaag

SEQ ID NO: 518847 - DNA, 33 bp, Homo sapien
agaggccagagtcaacccacggcattaagcatc

SEQ ID NO: 518848 - DNA, 33 bp, Homo sapien
agaggccagagtcaacgcacggcattaagcatc

SEQ ID NO: 518849 - DNA, 33 bp, Homo sapien
tgacccaggatattcaaagaaaatgcaaaacca

SEQ ID NO: 518850 - DNA, 33 bp, Homo sapien
tgacccaggatattcacagaaaatgcaaaacca

SEQ ID NO: 518851 - DNA, 33 bp, Homo sapien
gtgatactgtttgaacactaggtctttgatgtt

SEQ ID NO: 518852 - DNA, 33 bp, Homo sapien
gtgatactgtttgaacgctaggtctttgatgtt

SEQ ID NO: 518853 - DNA, 33 bp, Homo sapien
aggaagctctgcatgggagagtttcacttctat

SEQ ID NO: 518854 - DNA, 33 bp, Homo sapien
aggaagctctgcatggtagagtttcacttctat

SEQ ID NO: 518855 - DNA, 33 bp, Homo sapien
ctagagctaaaagtcaccttcataggtcatttc

SEQ ID NO: 518856 - DNA, 33 bp, Homo sapien
ctagagctaaaagtcagcttcataggtcatttc

SEQ ID NO: 518857 - DNA, 33 bp, Homo sapien
ctgtgcatgaacaagggacagaaggcagcattc

SEQ ID NO: 518858 - DNA, 33 bp, Homo sapien
ctgtgcatgaacaaggtacagaaggcagcattc

SEQ ID NO: 518859 - DNA, 33 bp, Homo sapien
tgtggactccttagtgccacagactctgaaaaa

SEQ ID NO: 518860 - DNA, 33 bp, Homo sapien
tgtggactccttagtgtcacagactctgaaaaa

SEQ ID NO: 518861 - DNA, 33 bp, Homo sapien
accacacaaagaatcactcagctagagcaaaag

SEQ ID NO: 518862 - DNA, 33 bp, Homo sapien
accacacaaagaatcattcagctagagcaaaag

SEQ ID NO: 518863 - DNA, 33 bp, Homo sapien
aaacctgatccagttaacaggttcatcaggcct

SEQ ID NO: 518864 - DNA, 33 bp, Homo sapien
aaacctgatccagttatcaggttcatcaggcct

SEQ ID NO: 518865 - DNA, 33 bp, Homo sapien
caagggcattttaaagactaattatgtagcatt

SEQ ID NO: 518866 - DNA, 33 bp, Homo sapien
caagggcattttaaagtctaattatgtagcatt

SEQ ID NO: 518867 - DNA, 33 bp, Homo sapien
tgacccagcctaccgaaaagctttgtaaatttg

SEQ ID NO: 518868 - DNA, 33 bp, Homo sapien
tgacccagcctaccgagaagctttgtaaatttg

SEQ ID NO: 518869 - DNA, 33 bp, Homo sapien
atttcctgtagccacactggaaaagttaaatga

SEQ ID NO: 518870 - DNA, 33 bp, Homo sapien
atttcctgtagccacattggaaaagttaaatga

SEQ ID NO: 518871 - DNA, 33 bp, Homo sapien
tctgtgaacagccagtcaatagaacagctttaa

SEQ ID NO: 518872 - DNA, 33 bp, Homo sapien
tctgtgaacagccagttaatagaacagctttaa

SEQ ID NO: 518873 - DNA, 33 bp, Homo sapien
acagggctttgcagtcaactacaaggagtttag

SEQ ID NO: 518874 - DNA, 33 bp, Homo sapien
acagggctttgcagtcgactacaaggagtttag

SEQ ID NO: 518875 - DNA, 33 bp, Homo sapien
tctggtcctcttggaacactggctcctggaacg

SEQ ID NO: 518876 - DNA, 33 bp, Homo sapien
tctggtcctcttggaatactggctcctggaacg

SEQ ID NO: 518877 - DNA, 33 bp, Homo sapien
attcaaagatgaggaacggagaactaaaatcac

SEQ ID NO: 518878 - DNA, 33 bp, Homo sapien
attcaaagatgaggaatggagaactaaaatcac

SEQ ID NO: 518879 - DNA, 33 bp, Homo sapien
tttttttggtgtatcccaattcttacattcaaa

SEQ ID NO: 518880 - DNA, 33 bp, Homo sapien
tttttttggtgtatcctaattcttacattcaaa

SEQ ID NO: 518881 - DNA, 33 bp, Homo sapien
aaaatgtatctgatataaaaaccctacatttta

SEQ ID NO: 518882 - DNA, 33 bp, Homo sapien
aaaatgtatctgatatcaaaaccctacatttta

SEQ ID NO: 518883 - DNA, 33 bp, Homo sapien
ttaaattcttcctcaaaaatctcagaactttta

SEQ ID NO: 518884 - DNA, 33 bp, Homo sapien
ttaaattcttcctcaacaatctcagaactttta

SEQ ID NO: 518885 - DNA, 33 bp, Homo sapien
ctattaattaatccacaaaatgatatctggctc

SEQ ID NO: 518886 - DNA, 33 bp, Homo sapien
ctattaattaatccaccaaatgatatctggctc

SEQ ID NO: 518887 - DNA, 33 bp, Homo sapien
tccttatgcctcataacgttttctctgctgatg

SEQ ID NO: 518888 - DNA, 33 bp, Homo sapien
tccttatgcctcataatgttttctctgctgatg

SEQ ID NO: 518889 - DNA, 33 bp, Homo sapien
agcctcaagaggattaaaattgtcctattaatc

SEQ ID NO: 518890 - DNA, 33 bp, Homo sapien
agcctcaagaggattacaattgtcctattaatc

SEQ ID NO: 518891 - DNA, 33 bp, Homo sapien
atgcattgcgctatgacgttatgaagactacca

SEQ ID NO: 518892 - DNA, 33 bp, Homo sapien
atgcattgcgctatgatgttatgaagactacca

SEQ ID NO: 518893 - DNA, 33 bp, Homo sapien
ttagtaagacagtccaaagtgccaagagtaagg

SEQ ID NO: 518894 - DNA, 33 bp, Homo sapien
ttagtaagacagtccagagtgccaagagtaagg

SEQ ID NO: 518895 - DNA, 33 bp, Homo sapien
aaaggggtaactaagacacacagttcaggaaat

SEQ ID NO: 518896 - DNA, 33 bp, Homo sapien
aaaggggtaactaagatacacagttcaggaaat

SEQ ID NO: 518897 - DNA, 33 bp, Homo sapien
taaagtaattgggtgaaaaagctattcccctga

SEQ ID NO: 518898 - DNA, 33 bp, Homo sapien
taaagtaattgggtgagaaagctattcccctga

SEQ ID NO: 518899 - DNA, 33 bp, Homo sapien
ctctccgtctctttgaagctcattgtagtgggg

SEQ ID NO: 518900 - DNA, 33 bp, Homo sapien
ctctccgtctctttgaggctcattgtagtgggg

SEQ ID NO: 518901 - DNA, 33 bp, Homo sapien
aaaatttccagggtgtaaaataggaagtaaaga

SEQ ID NO: 518902 - DNA, 33 bp, Homo sapien
aaaatttccagggtgtgaaataggaagtaaaga

SEQ ID NO: 518903 - DNA, 33 bp, Homo sapien
tgttttttgccctacaacttgtccccaatcatt

SEQ ID NO: 518904 - DNA, 33 bp, Homo sapien
tgttttttgccctacagcttgtccccaatcatt

SEQ ID NO: 518905 - DNA, 33 bp, Homo sapien
attagatattcatccaacattcaggaggtgcag

SEQ ID NO: 518906 - DNA, 33 bp, Homo sapien
attagatattcatccatcattcaggaggtgcag

SEQ ID NO: 518907 - DNA, 33 bp, Homo sapien
atgattcagtgaattcaaaaatacccaggtcat

SEQ ID NO: 518908 - DNA, 33 bp, Homo sapien
atgattcagtgaattcgaaaatacccaggtcat

SEQ ID NO: 518909 - DNA, 33 bp, Homo sapien
ggaatatctaattataagacatcagacaactct

SEQ ID NO: 518910 - DNA, 33 bp, Homo sapien
ggaatatctaattatatgacatcagacaactct

SEQ ID NO: 518911 - DNA, 33 bp, Homo sapien
gtctaaaagttttggcacttcaagagcttctgg

SEQ ID NO: 518912 - DNA, 33 bp, Homo sapien
gtctaaaagttttggcgcttcaagagcttctgg

SEQ ID NO: 518913 - DNA, 33 bp, Homo sapien
tctggaatggctttatcaaagtttgcctcattt

SEQ ID NO: 518914 - DNA, 33 bp, Homo sapien
tctggaatggctttatgaaagtttgcctcattt

SEQ ID NO: 518915 - DNA, 33 bp, Homo sapien
actcttccataggtaacgtggactcccgggaaa

SEQ ID NO: 518916 - DNA, 33 bp, Homo sapien
actcttccataggtaatgtggactcccgggaaa

SEQ ID NO: 518917 - DNA, 33 bp, Homo sapien
ctgcagcaaacttgtaaatttttgccaggaccc

SEQ ID NO: 518918 - DNA, 33 bp, Homo sapien
ctgcagcaaacttgtacatttttgccaggaccc

SEQ ID NO: 518919 - DNA, 33 bp, Homo sapien
attttggaaacaaccacgttggaaagggcattt

SEQ ID NO: 518920 - DNA, 33 bp, Homo sapien
attttggaaacaaccatgttggaaagggcattt

SEQ ID NO: 518921 - DNA, 33 bp, Homo sapien
gttcttgataaaatcacgcaaacataagcagtc

SEQ ID NO: 518922 - DNA, 33 bp, Homo sapien
gttcttgataaaatcatgcaaacataagcagtc

SEQ ID NO: 518923 - DNA, 33 bp, Homo sapien
ttcctggggtcgtctcaatggtgagatataact

SEQ ID NO: 518924 - DNA, 33 bp, Homo sapien
ttcctggggtcgtctcgatggtgagatataact

SEQ ID NO: 518925 - DNA, 33 bp, Homo sapien
agcctccagcttgtaaatgttatgccacaaact

SEQ ID NO: 518926 - DNA, 33 bp, Homo sapien
agcctccagcttgtaactgttatgccacaaact

SEQ ID NO: 518927 - DNA, 33 bp, Homo sapien
gtaggcaaaatccctgaatccagaacgtaatgc

SEQ ID NO: 518928 - DNA, 33 bp, Homo sapien
gtaggcaaaatccctgtatccagaacgtaatgc

SEQ ID NO: 518929 - DNA, 33 bp, Homo sapien
acccacatttctcttaccgaacagttacagatt

SEQ ID NO: 518930 - DNA, 33 bp, Homo sapien
acccacatttctcttatcgaacagttacagatt

SEQ ID NO: 518931 - DNA, 33 bp, Homo sapien
gtgtaaatcacatcaccgacaagaaacattttt

SEQ ID NO: 518932 - DNA, 33 bp, Homo sapien
gtgtaaatcacatcactgacaagaaacattttt

SEQ ID NO: 518933 - DNA, 33 bp, Homo sapien
gggacagtaagaagtaaataaggagtaggtctt

SEQ ID NO: 518934 - DNA, 33 bp, Homo sapien
gggacagtaagaagtagataaggagtaggtctt

SEQ ID NO: 518935 - DNA, 33 bp, Homo sapien
atagttagaattcttaactctgacaagcatcta

SEQ ID NO: 518936 - DNA, 33 bp, Homo sapien
atagttagaattcttacctctgacaagcatcta

SEQ ID NO: 518937 - DNA, 33 bp, Homo sapien
tttttttccatgtttcaaatgattatgaaagac

SEQ ID NO: 518938 - DNA, 33 bp, Homo sapien
tttttttccatgtttccaatgattatgaaagac

SEQ ID NO: 518939 - DNA, 33 bp, Homo sapien
gttaactgacataacactgaaatcaaagactcc

SEQ ID NO: 518940 - DNA, 33 bp, Homo sapien
gttaactgacataacattgaaatcaaagactcc

SEQ ID NO: 518941 - DNA, 33 bp, Homo sapien
ggctttcatccacttacgttgcggcaccctttg

SEQ ID NO: 518942 - DNA, 33 bp, Homo sapien
ggctttcatccacttatgttgcggcaccctttg

SEQ ID NO: 518943 - DNA, 33 bp, Homo sapien
tttaaagaaaaagtagaaaatgacaacagaaca

SEQ ID NO: 518944 - DNA, 33 bp, Homo sapien
tttaaagaaaaagtaggaaatgacaacagaaca

SEQ ID NO: 518945 - DNA, 33 bp, Homo sapien
catcagtaggggttagaatatactgatgattct

SEQ ID NO: 518946 - DNA, 33 bp, Homo sapien
catcagtaggggttaggatatactgatgattct

SEQ ID NO: 518947 - DNA, 33 bp, Homo sapien
tcagaaaagagtgagacgaaaaaggatatatat

SEQ ID NO: 518948 - DNA, 33 bp, Homo sapien
tcagaaaagagtgagaggaaaaaggatatatat

SEQ ID NO: 518949 - DNA, 33 bp, Homo sapien
attgtgatagacaatcacgtagcctggtgtcaa

SEQ ID NO: 518950 - DNA, 33 bp, Homo sapien
attgtgatagacaatcccgtagcctggtgtcaa

SEQ ID NO: 518951 - DNA, 33 bp, Homo sapien
tttttcatgatctcaaacaataatcccaatccc

SEQ ID NO: 518952 - DNA, 33 bp, Homo sapien
tttttcatgatctcaagcaataatcccaatccc

SEQ ID NO: 518953 - DNA, 33 bp, Homo sapien
agagttgagaatgcacagtcttggatatcctgt

SEQ ID NO: 518954 - DNA, 33 bp, Homo sapien
agagttgagaatgcaccgtcttggatatcctgt

SEQ ID NO: 518955 - DNA, 33 bp, Homo sapien
tggtcttttctcacaccagattagaagcttctt

SEQ ID NO: 518956 - DNA, 33 bp, Homo sapien
tggtcttttctcacactagattagaagcttctt

SEQ ID NO: 518957 - DNA, 33 bp, Homo sapien
ccagtttgtgctaagaaaaaggagaagcaggat

SEQ ID NO: 518958 - DNA, 33 bp, Homo sapien
ccagtttgtgctaagataaaggagaagcaggat

SEQ ID NO: 518959 - DNA, 33 bp, Homo sapien
atatttagcgtgtaaccgtccatttttcattac

SEQ ID NO: 518960 - DNA, 33 bp, Homo sapien
atatttagcgtgtaactgtccatttttcattac

SEQ ID NO: 518961 - DNA, 33 bp, Homo sapien
tataaactgtttttcacgtcataacaaatacat

SEQ ID NO: 518962 - DNA, 33 bp, Homo sapien
tataaactgtttttcatgtcataacaaatacat

SEQ ID NO: 518963 - DNA, 33 bp, Homo sapien
ggagttgccaggggaaagaccagctgctcgtac

SEQ ID NO: 518964 - DNA, 33 bp, Homo sapien
ggagttgccaggggaaggaccagctgctcgtac

SEQ ID NO: 518965 - DNA, 33 bp, Homo sapien
aaaaatagatcatctgaaactgaccctttatga

SEQ ID NO: 518966 - DNA, 33 bp, Homo sapien
aaaaatagatcatctggaactgaccctttatga

SEQ ID NO: 518967 - DNA, 33 bp, Homo sapien
atggatatactgaaatcattctaagtcatcttt

SEQ ID NO: 518968 - DNA, 33 bp, Homo sapien
atggatatactgaaattattctaagtcatcttt

SEQ ID NO: 518969 - DNA, 33 bp, Homo sapien
cctccttccttgaataccatggaaaattcaact

SEQ ID NO: 518970 - DNA, 33 bp, Homo sapien
cctccttccttgaatagcatggaaaattcaact

SEQ ID NO: 518971 - DNA, 33 bp, Homo sapien
gggttaacctcacagtaaaggaatctttcacat

SEQ ID NO: 518972 - DNA, 33 bp, Homo sapien
gggttaacctcacagtgaaggaatctttcacat

SEQ ID NO: 518973 - DNA, 33 bp, Homo sapien
aacaggtttgaatatcaataatggagtctcttt

SEQ ID NO: 518974 - DNA, 33 bp, Homo sapien
aacaggtttgaatatcgataatggagtctcttt

SEQ ID NO: 518975 - DNA, 33 bp, Homo sapien
cctagaagaaaatctaccaataaactgaatgtg

SEQ ID NO: 518976 - DNA, 33 bp, Homo sapien
cctagaagaaaatctatcaataaactgaatgtg

SEQ ID NO: 518977 - DNA, 33 bp, Homo sapien
ctgtgtctcttagatacaagggcctaggagacc

SEQ ID NO: 518978 - DNA, 33 bp, Homo sapien
ctgtgtctcttagatagaagggcctaggagacc

SEQ ID NO: 518979 - DNA, 33 bp, Homo sapien
agaatctcatcacaaacttaacagtacaaattg

SEQ ID NO: 518980 - DNA, 33 bp, Homo sapien
agaatctcatcacaaatttaacagtacaaattg

SEQ ID NO: 518981 - DNA, 33 bp, Homo sapien
tcctgctaactttcagacaagattatttttatg

SEQ ID NO: 518982 - DNA, 33 bp, Homo sapien
tcctgctaactttcagccaagattatttttatg

SEQ ID NO: 518983 - DNA, 33 bp, Homo sapien
aaacagataatgaaacaagccattgtagttcca

SEQ ID NO: 518984 - DNA, 33 bp, Homo sapien
aaacagataatgaaactagccattgtagttcca

SEQ ID NO: 518985 - DNA, 33 bp, Homo sapien
tcagaaatgattcaggaatttgagtataaatgt

SEQ ID NO: 518986 - DNA, 33 bp, Homo sapien
tcagaaatgattcaggtatttgagtataaatgt

SEQ ID NO: 518987 - DNA, 33 bp, Homo sapien
taaggtatctggaatacagctgaaaagacaaaa

SEQ ID NO: 518988 - DNA, 33 bp, Homo sapien
taaggtatctggaatagagctgaaaagacaaaa

SEQ ID NO: 518989 - DNA, 33 bp, Homo sapien
aacccatagataagtcacaaaatagttataaaa

SEQ ID NO: 518990 - DNA, 33 bp, Homo sapien
aacccatagataagtctcaaaatagttataaaa

SEQ ID NO: 518991 - DNA, 33 bp, Homo sapien
cactgaacctggcctaaaatagaactgttaaca

SEQ ID NO: 518992 - DNA, 33 bp, Homo sapien
cactgaacctggcctagaatagaactgttaaca

SEQ ID NO: 518993 - DNA, 33 bp, Homo sapien
gagattagtcttttcacgctacacacgctcatt

SEQ ID NO: 518994 - DNA, 33 bp, Homo sapien
gagattagtcttttcatgctacacacgctcatt

SEQ ID NO: 518995 - DNA, 33 bp, Homo sapien
gaaagaggatgtctaaataataccaagtgagtc

SEQ ID NO: 518996 - DNA, 33 bp, Homo sapien
gaaagaggatgtctaagtaataccaagtgagtc

SEQ ID NO: 518997 - DNA, 33 bp, Homo sapien
ttggcataaatctcaacaggaattagctgcttc

SEQ ID NO: 518998 - DNA, 33 bp, Homo sapien
ttggcataaatctcaataggaattagctgcttc

SEQ ID NO: 518999 - DNA, 33 bp, Homo sapien
attttcaccagagataaacagttttaaaatcca

SEQ ID NO: 519000 - DNA, 33 bp, Homo sapien
attttcaccagagatagacagttttaaaatcca

SEQ ID NO: 519001 - DNA, 33 bp, Homo sapien
actatctggaaggaagaataattgtactaattt

SEQ ID NO: 519002 - DNA, 33 bp, Homo sapien
actatctggaaggaagtataattgtactaattt

SEQ ID NO: 519003 - DNA, 33 bp, Homo sapien
tggatggcaatgctaacaggcaaaatttctgtt

SEQ ID NO: 519004 - DNA, 33 bp, Homo sapien
tggatggcaatgctaataggcaaaatttctgtt

SEQ ID NO: 519005 - DNA, 33 bp, Homo sapien
tttagggacttctaccaccatccatgttcttca

SEQ ID NO: 519006 - DNA, 33 bp, Homo sapien
tttagggacttctaccgccatccatgttcttca

SEQ ID NO: 519007 - DNA, 33 bp, Homo sapien
tcaaaacacaggtagcaaaagagacagatgtat

SEQ ID NO: 519008 - DNA, 33 bp, Homo sapien
tcaaaacacaggtagcgaaagagacagatgtat

SEQ ID NO: 519009 - DNA, 33 bp, Homo sapien
tacaggacaggtaaaccccaaatcgggcctcac

SEQ ID NO: 519010 - DNA, 33 bp, Homo sapien
tacaggacaggtaaactccaaatcgggcctcac

SEQ ID NO: 519011 - DNA, 33 bp, Homo sapien
taaactactttacggacgctacaaaagggaatt

SEQ ID NO: 519012 - DNA, 33 bp, Homo sapien
taaactactttacggatgctacaaaagggaatt

SEQ ID NO: 519013 - DNA, 33 bp, Homo sapien
tactgtagctttggcactgaactttaagtggaa

SEQ ID NO: 519014 - DNA, 33 bp, Homo sapien
tactgtagctttggcattgaactttaagtggaa

SEQ ID NO: 519015 - DNA, 33 bp, Homo sapien
agatcaggaagctataacaaaataccagagagt

SEQ ID NO: 519016 - DNA, 33 bp, Homo sapien
agatcaggaagctatagcaaaataccagagagt

SEQ ID NO: 519017 - DNA, 33 bp, Homo sapien
ataggcaggaggataaaaaattactgctttgct

SEQ ID NO: 519018 - DNA, 33 bp, Homo sapien
ataggcaggaggataagaaattactgctttgct

SEQ ID NO: 519019 - DNA, 33 bp, Homo sapien
gtaagtcaaattccgcaatactattgaagcatc

SEQ ID NO: 519020 - DNA, 33 bp, Homo sapien
gtaagtcaaattccgcgatactattgaagcatc

SEQ ID NO: 519021 - DNA, 33 bp, Homo sapien
catggtgttgcactcaagaaattcacagtccag

SEQ ID NO: 519022 - DNA, 33 bp, Homo sapien
catggtgttgcactcaggaaattcacagtccag

SEQ ID NO: 519023 - DNA, 33 bp, Homo sapien
ttgatacaaatacacccgaagttctaccctgct

SEQ ID NO: 519024 - DNA, 33 bp, Homo sapien
ttgatacaaatacacctgaagttctaccctgct

SEQ ID NO: 519025 - DNA, 33 bp, Homo sapien
ttaacaatagctatccaccaccaaagcacttaa

SEQ ID NO: 519026 - DNA, 33 bp, Homo sapien
ttaacaatagctatccgccaccaaagcacttaa

SEQ ID NO: 519027 - DNA, 33 bp, Homo sapien
aaaagttgtttttgccaatactgctttcaagca

SEQ ID NO: 519028 - DNA, 33 bp, Homo sapien
aaaagttgtttttgccgatactgctttcaagca

SEQ ID NO: 519029 - DNA, 33 bp, Homo sapien
ctctaagaatcagaccccatacagaaaagctct

SEQ ID NO: 519030 - DNA, 33 bp, Homo sapien
ctctaagaatcagaccgcatacagaaaagctct

SEQ ID NO: 519031 - DNA, 33 bp, Homo sapien
tctcttattccatcatcaggtccactgcaggca

SEQ ID NO: 519032 - DNA, 33 bp, Homo sapien
tctcttattccatcattaggtccactgcaggca

SEQ ID NO: 519033 - DNA, 33 bp, Homo sapien
gaactgaggctaaacaacaggccaaggacaaag

SEQ ID NO: 519034 - DNA, 33 bp, Homo sapien
gaactgaggctaaacagcaggccaaggacaaag

SEQ ID NO: 519035 - DNA, 33 bp, Homo sapien
tggtatgccattagcacattttcttaaagaaaa

SEQ ID NO: 519036 - DNA, 33 bp, Homo sapien
tggtatgccattagcagattttcttaaagaaaa

SEQ ID NO: 519037 - DNA, 33 bp, Homo sapien
ctacctttgagacctaagaagtacgcagagaca

SEQ ID NO: 519038 - DNA, 33 bp, Homo sapien
ctacctttgagacctatgaagtacgcagagaca

SEQ ID NO: 519039 - DNA, 33 bp, Homo sapien
gctgaacttgctgcccagagaccttcagttaat

SEQ ID NO: 519040 - DNA, 33 bp, Homo sapien
gctgaacttgctgcccggagaccttcagttaat

SEQ ID NO: 519041 - DNA, 33 bp, Homo sapien
ttttaaataatcatcaaatgcccccagagcttt

SEQ ID NO: 519042 - DNA, 33 bp, Homo sapien
ttttaaataatcatcagatgcccccagagcttt

SEQ ID NO: 519043 - DNA, 33 bp, Homo sapien
gatgtagcttgtcaaacatgtgaaatagtctca

SEQ ID NO: 519044 - DNA, 33 bp, Homo sapien
gatgtagcttgtcaaagatgtgaaatagtctca

SEQ ID NO: 519045 - DNA, 33 bp, Homo sapien
cagtttctactttcaacgaggcattcaattggc

SEQ ID NO: 519046 - DNA, 33 bp, Homo sapien
cagtttctactttcaatgaggcattcaattggc

SEQ ID NO: 519047 - DNA, 33 bp, Homo sapien
ttctaccacttcttcaaaggacctggctcaata

SEQ ID NO: 519048 - DNA, 33 bp, Homo sapien
ttctaccacttcttcagaggacctggctcaata

SEQ ID NO: 519049 - DNA, 33 bp, Homo sapien
cttatgaatagctgtaaaggtgaatttgatgct

SEQ ID NO: 519050 - DNA, 33 bp, Homo sapien
cttatgaatagctgtagaggtgaatttgatgct

SEQ ID NO: 519051 - DNA, 33 bp, Homo sapien
atctgattcattttaacggcaggcatgtgtgtg

SEQ ID NO: 519052 - DNA, 33 bp, Homo sapien
atctgattcattttaatggcaggcatgtgtgtg

SEQ ID NO: 519053 - DNA, 33 bp, Homo sapien
gggttgcactgtgctcaaaatacagagcatcat

SEQ ID NO: 519054 - DNA, 33 bp, Homo sapien
gggttgcactgtgctcgaaatacagagcatcat

SEQ ID NO: 519055 - DNA, 33 bp, Homo sapien
catataatctgacataccattccaattctatag

SEQ ID NO: 519056 - DNA, 33 bp, Homo sapien
catataatctgacatatcattccaattctatag

SEQ ID NO: 519057 - DNA, 33 bp, Homo sapien
gtctacctcgtctacccactccttgaagacaca

SEQ ID NO: 519058 - DNA, 33 bp, Homo sapien
gtctacctcgtctacctactccttgaagacaca

SEQ ID NO: 519059 - DNA, 33 bp, Homo sapien
gtgccccagcatgacccggctggactaatccag

SEQ ID NO: 519060 - DNA, 33 bp, Homo sapien
gtgccccagcatgacctggctggactaatccag

SEQ ID NO: 519061 - DNA, 33 bp, Homo sapien
gctctcatgcagggaaatgtggacagaataatt

SEQ ID NO: 519062 - DNA, 33 bp, Homo sapien
gctctcatgcagggaactgtggacagaataatt

SEQ ID NO: 519063 - DNA, 33 bp, Homo sapien
aaggagatctggagtaaaagttctagtagaccc

SEQ ID NO: 519064 - DNA, 33 bp, Homo sapien
aaggagatctggagtagaagttctagtagaccc

SEQ ID NO: 519065 - DNA, 33 bp, Homo sapien
aattgtgatacgttgggaaaattcacactgtta

SEQ ID NO: 519066 - DNA, 33 bp, Homo sapien
aattgtgatacgttggtaaaattcacactgtta

SEQ ID NO: 519067 - DNA, 33 bp, Homo sapien
gtttaaattgaccacacggttagaaatgagaaa

SEQ ID NO: 519068 - DNA, 33 bp, Homo sapien
gtttaaattgaccacatggttagaaatgagaaa

SEQ ID NO: 519069 - DNA, 33 bp, Homo sapien
tatgcattttccatcactctttggtaccctgtt

SEQ ID NO: 519070 - DNA, 33 bp, Homo sapien
tatgcattttccatcattctttggtaccctgtt

SEQ ID NO: 519071 - DNA, 33 bp, Homo sapien
tgtttggatacagaaacgaaatttgaagatctg

SEQ ID NO: 519072 - DNA, 33 bp, Homo sapien
tgtttggatacagaaatgaaatttgaagatctg

SEQ ID NO: 519073 - DNA, 33 bp, Homo sapien
agcagcaataaaatcactagaggttgctaagca

SEQ ID NO: 519074 - DNA, 33 bp, Homo sapien
agcagcaataaaatcattagaggttgctaagca

SEQ ID NO: 519075 - DNA, 33 bp, Homo sapien
gaaagcagtttagctaaaaacatttcactcagg

SEQ ID NO: 519076 - DNA, 33 bp, Homo sapien
gaaagcagtttagctagaaacatttcactcagg

SEQ ID NO: 519077 - DNA, 33 bp, Homo sapien
ctatcctgatataacaaacaattgccatgcttc

SEQ ID NO: 519078 - DNA, 33 bp, Homo sapien
ctatcctgatataacatacaattgccatgcttc

SEQ ID NO: 519079 - DNA, 33 bp, Homo sapien
atttgattatttcatcaaaggataagaatagta

SEQ ID NO: 519080 - DNA, 33 bp, Homo sapien
atttgattatttcatccaaggataagaatagta

SEQ ID NO: 519081 - DNA, 33 bp, Homo sapien
aatgctgaacaaaaccacattattgatttgatg

SEQ ID NO: 519082 - DNA, 33 bp, Homo sapien
aatgctgaacaaaacctcattattgatttgatg

SEQ ID NO: 519083 - DNA, 33 bp, Homo sapien
tttcatgcatctcatcaattaaaatatccatgt

SEQ ID NO: 519084 - DNA, 33 bp, Homo sapien
tttcatgcatctcatccattaaaatatccatgt

SEQ ID NO: 519085 - DNA, 33 bp, Homo sapien
aattgctatgatgtataaaccataaaggcagtg

SEQ ID NO: 519086 - DNA, 33 bp, Homo sapien
aattgctatgatgtatgaaccataaaggcagtg

SEQ ID NO: 519087 - DNA, 33 bp, Homo sapien
taagtttatattctcagtatcttggtaacccag

SEQ ID NO: 519088 - DNA, 33 bp, Homo sapien
taagtttatattctcattatcttggtaacccag

SEQ ID NO: 519089 - DNA, 33 bp, Homo sapien
caccaggttgtttatacgagagtttctgtgggt

SEQ ID NO: 519090 - DNA, 33 bp, Homo sapien
caccaggttgtttatatgagagtttctgtgggt

SEQ ID NO: 519091 - DNA, 33 bp, Homo sapien
gggtcgtttggctttccactaggtggctttcca

SEQ ID NO: 519092 - DNA, 33 bp, Homo sapien
gggtcgtttggctttctactaggtggctttcca

SEQ ID NO: 519093 - DNA, 33 bp, Homo sapien
ttcagtcctgaagccactaggtggaatagacca

SEQ ID NO: 519094 - DNA, 33 bp, Homo sapien
ttcagtcctgaagccattaggtggaatagacca

SEQ ID NO: 519095 - DNA, 33 bp, Homo sapien
tcaaggtggattgtttacctgtctgttttgtaa

SEQ ID NO: 519096 - DNA, 33 bp, Homo sapien
tcaaggtggattgtttccctgtctgttttgtaa

SEQ ID NO: 519097 - DNA, 33 bp, Homo sapien
tattctcccactacaaatgctagaatgctagat

SEQ ID NO: 519098 - DNA, 33 bp, Homo sapien
tattctcccactacaagtgctagaatgctagat

SEQ ID NO: 519099 - DNA, 33 bp, Homo sapien
cacacttgagcaattacgtaggaaaaaggagtc

SEQ ID NO: 519100 - DNA, 33 bp, Homo sapien
cacacttgagcaattatgtaggaaaaaggagtc

SEQ ID NO: 519101 - DNA, 33 bp, Homo sapien
atgctttttttgactacctttgtccatagcttg

SEQ ID NO: 519102 - DNA, 33 bp, Homo sapien
atgctttttttgactatctttgtccatagcttg

SEQ ID NO: 519103 - DNA, 33 bp, Homo sapien
ccttacttcaatccttaaacattatatcctgga

SEQ ID NO: 519104 - DNA, 33 bp, Homo sapien
ccttacttcaatccttgaacattatatcctgga

SEQ ID NO: 519105 - DNA, 33 bp, Homo sapien
accttgatatccctagaccctacttgaggtcat

SEQ ID NO: 519106 - DNA, 33 bp, Homo sapien
accttgatatccctagcccctacttgaggtcat

SEQ ID NO: 519107 - DNA, 33 bp, Homo sapien
tgtgctgtcctggcataaattcaatgacgtgac

SEQ ID NO: 519108 - DNA, 33 bp, Homo sapien
tgtgctgtcctggcattaattcaatgacgtgac

SEQ ID NO: 519109 - DNA, 33 bp, Homo sapien
atattcacattgataactgcatccatggcagaa

SEQ ID NO: 519110 - DNA, 33 bp, Homo sapien
atattcacattgataattgcatccatggcagaa

SEQ ID NO: 519111 - DNA, 33 bp, Homo sapien
ctacaagattttctccactttatcattcagccc

SEQ ID NO: 519112 - DNA, 33 bp, Homo sapien
ctacaagattttctccgctttatcattcagccc

SEQ ID NO: 519113 - DNA, 33 bp, Homo sapien
ccctgtggtaaataaacgagcaaaatcaactct

SEQ ID NO: 519114 - DNA, 33 bp, Homo sapien
ccctgtggtaaataaatgagcaaaatcaactct

SEQ ID NO: 519115 - DNA, 33 bp, Homo sapien
tttatcagtgcgtccacagaacaatgccagaaa

SEQ ID NO: 519116 - DNA, 33 bp, Homo sapien
tttatcagtgcgtccagagaacaatgccagaaa

SEQ ID NO: 519117 - DNA, 33 bp, Homo sapien
aggatccactattgtaacaaaaatctacatcta

SEQ ID NO: 519118 - DNA, 33 bp, Homo sapien
aggatccactattgtatcaaaaatctacatcta

SEQ ID NO: 519119 - DNA, 33 bp, Homo sapien
aagtgatcagctcagcaattaatatacatggac

SEQ ID NO: 519120 - DNA, 33 bp, Homo sapien
aagtgatcagctcagcgattaatatacatggac

SEQ ID NO: 519121 - DNA, 33 bp, Homo sapien
cctggtctcggtccccagaaatggcaatctgac

SEQ ID NO: 519122 - DNA, 33 bp, Homo sapien
cctggtctcggtccccggaaatggcaatctgac

SEQ ID NO: 519123 - DNA, 33 bp, Homo sapien
actaaatgctctgttacaaggatgaatgatgct

SEQ ID NO: 519124 - DNA, 33 bp, Homo sapien
actaaatgctctgttataaggatgaatgatgct

SEQ ID NO: 519125 - DNA, 33 bp, Homo sapien
attctttcttctgaaaacccacagctcactcat

SEQ ID NO: 519126 - DNA, 33 bp, Homo sapien
attctttcttctgaaagcccacagctcactcat

SEQ ID NO: 519127 - DNA, 33 bp, Homo sapien
cctttctctgttcacactattatgttctatctg

SEQ ID NO: 519128 - DNA, 33 bp, Homo sapien
cctttctctgttcacagtattatgttctatctg

SEQ ID NO: 519129 - DNA, 33 bp, Homo sapien
agagagtcttgaaatacaagcttcagtgtaaac

SEQ ID NO: 519130 - DNA, 33 bp, Homo sapien
agagagtcttgaaatataagcttcagtgtaaac

SEQ ID NO: 519131 - DNA, 33 bp, Homo sapien
aagcaatgtgtaaaacactggaaagggaaatca

SEQ ID NO: 519132 - DNA, 33 bp, Homo sapien
aagcaatgtgtaaaacgctggaaagggaaatca

SEQ ID NO: 519133 - DNA, 33 bp, Homo sapien
agtaaatttcattacaactaattttttgaggca

SEQ ID NO: 519134 - DNA, 33 bp, Homo sapien
agtaaatttcattacacctaattttttgaggca

SEQ ID NO: 519135 - DNA, 33 bp, Homo sapien
atgtacaaaacttttagagtctcattccctatc

SEQ ID NO: 519136 - DNA, 33 bp, Homo sapien
atgtacaaaacttttatagtctcattccctatc

SEQ ID NO: 519137 - DNA, 33 bp, Homo sapien
tcattcattccctcaacgactgtgagaaaataa

SEQ ID NO: 519138 - DNA, 33 bp, Homo sapien
tcattcattccctcaatgactgtgagaaaataa

SEQ ID NO: 519139 - DNA, 33 bp, Homo sapien
ccatcgtaaagtattcaagacaggatccaaaca

SEQ ID NO: 519140 - DNA, 33 bp, Homo sapien
ccatcgtaaagtattcgagacaggatccaaaca

SEQ ID NO: 519141 - DNA, 33 bp, Homo sapien
caaatttcatatcttaccagaaagaagttttgt

SEQ ID NO: 519142 - DNA, 33 bp, Homo sapien
caaatttcatatcttagcagaaagaagttttgt

SEQ ID NO: 519143 - DNA, 33 bp, Homo sapien
tgctcagaatttaggaagtgactctggaaaatc

SEQ ID NO: 519144 - DNA, 33 bp, Homo sapien
tgctcagaatttaggaggtgactctggaaaatc

SEQ ID NO: 519145 - DNA, 33 bp, Homo sapien
actaacaaccgtgtgaacttgacagcaaattcc

SEQ ID NO: 519146 - DNA, 33 bp, Homo sapien
actaacaaccgtgtgagcttgacagcaaattcc

SEQ ID NO: 519147 - DNA, 33 bp, Homo sapien
tatgttaaccaccatacgatagtcttccacgat

SEQ ID NO: 519148 - DNA, 33 bp, Homo sapien
tatgttaaccaccataggatagtcttccacgat

SEQ ID NO: 519149 - DNA, 33 bp, Homo sapien
gcatattgccacaggacggaattgatggagata

SEQ ID NO: 519150 - DNA, 33 bp, Homo sapien
gcatattgccacaggatggaattgatggagata

SEQ ID NO: 519151 - DNA, 33 bp, Homo sapien
tcatttgaaagttagactagcctggaggatctg

SEQ ID NO: 519152 - DNA, 33 bp, Homo sapien
tcatttgaaagttagagtagcctggaggatctg

SEQ ID NO: 519153 - DNA, 33 bp, Homo sapien
aggaggactggaagttaaaacatctcttaagag

SEQ ID NO: 519154 - DNA, 33 bp, Homo sapien
aggaggactggaagttgaaacatctcttaagag

SEQ ID NO: 519155 - DNA, 33 bp, Homo sapien
aagggtaaaacatacaacactctgatgacctgc

SEQ ID NO: 519156 - DNA, 33 bp, Homo sapien
aagggtaaaacatacagcactctgatgacctgc

SEQ ID NO: 519157 - DNA, 33 bp, Homo sapien
tctaagtggttttagaagcaatccattcatcca

SEQ ID NO: 519158 - DNA, 33 bp, Homo sapien
tctaagtggttttagaggcaatccattcatcca

SEQ ID NO: 519159 - DNA, 33 bp, Homo sapien
ttaagcagctatcttgcagtgtaggcccttaaa

SEQ ID NO: 519160 - DNA, 33 bp, Homo sapien
ttaagcagctatcttgtagtgtaggcccttaaa

SEQ ID NO: 519161 - DNA, 33 bp, Homo sapien
agaaatgggagagacacgattccagcaggggaa

SEQ ID NO: 519162 - DNA, 33 bp, Homo sapien
agaaatgggagagacatgattccagcaggggaa

SEQ ID NO: 519163 - DNA, 33 bp, Homo sapien
agggactaatgtggaactctcaaccatgttccc

SEQ ID NO: 519164 - DNA, 33 bp, Homo sapien
agggactaatgtggaagtctcaaccatgttccc

SEQ ID NO: 519165 - DNA, 33 bp, Homo sapien
cccaatctaaatccaaacagcttttatacttgt

SEQ ID NO: 519166 - DNA, 33 bp, Homo sapien
cccaatctaaatccaagcagcttttatacttgt

SEQ ID NO: 519167 - DNA, 33 bp, Homo sapien
tttataccaacctctgaatctctgcccatgcta

SEQ ID NO: 519168 - DNA, 33 bp, Homo sapien
tttataccaacctctggatctctgcccatgcta

SEQ ID NO: 519169 - DNA, 33 bp, Homo sapien
tccatacttaaaagaacacagagaggtgagaat

SEQ ID NO: 519170 - DNA, 33 bp, Homo sapien
tccatacttaaaagaagacagagaggtgagaat

SEQ ID NO: 519171 - DNA, 33 bp, Homo sapien
tgtacctctggcaagagaaatgcatatagaaga

SEQ ID NO: 519172 - DNA, 33 bp, Homo sapien
tgtacctctggcaagataaatgcatatagaaga

SEQ ID NO: 519173 - DNA, 33 bp, Homo sapien
gatttatgcattaatccactgacagcagagccc

SEQ ID NO: 519174 - DNA, 33 bp, Homo sapien
gatttatgcattaatctactgacagcagagccc

SEQ ID NO: 519175 - DNA, 33 bp, Homo sapien
cacattatgtatctgacctctaaattcgcctta

SEQ ID NO: 519176 - DNA, 33 bp, Homo sapien
cacattatgtatctgatctctaaattcgcctta

SEQ ID NO: 519177 - DNA, 33 bp, Homo sapien
cttctgtcagttggaaagtgaacaaaattacaa

SEQ ID NO: 519178 - DNA, 33 bp, Homo sapien
cttctgtcagttggaatgtgaacaaaattacaa

SEQ ID NO: 519179 - DNA, 33 bp, Homo sapien
cacttgttagtaaagaagtgcaataactttggg

SEQ ID NO: 519180 - DNA, 33 bp, Homo sapien
cacttgttagtaaagaggtgcaataactttggg

SEQ ID NO: 519181 - DNA, 33 bp, Homo sapien
agtcattaggccttcactacaaacccctcaaaa

SEQ ID NO: 519182 - DNA, 33 bp, Homo sapien
agtcattaggccttcattacaaacccctcaaaa

SEQ ID NO: 519183 - DNA, 33 bp, Homo sapien
atatcaaaccaggtaaagatgaagactttaaat

SEQ ID NO: 519184 - DNA, 33 bp, Homo sapien
atatcaaaccaggtaatgatgaagactttaaat

SEQ ID NO: 519185 - DNA, 33 bp, Homo sapien
tcaaaacttaatgacactggctttggcaaattc

SEQ ID NO: 519186 - DNA, 33 bp, Homo sapien
tcaaaacttaatgacattggctttggcaaattc

SEQ ID NO: 519187 - DNA, 33 bp, Homo sapien
atacaatttccatgttcctataaaaatggggtt

SEQ ID NO: 519188 - DNA, 33 bp, Homo sapien
atacaatttccatgttgctataaaaatggggtt

SEQ ID NO: 519189 - DNA, 33 bp, Homo sapien
aaaacaaatactgctccccatttttaagcatta

SEQ ID NO: 519190 - DNA, 33 bp, Homo sapien
aaaacaaatactgctcgccatttttaagcatta

SEQ ID NO: 519191 - DNA, 33 bp, Homo sapien
ggccagacactcgatacaatgaaaagaacacag

SEQ ID NO: 519192 - DNA, 33 bp, Homo sapien
ggccagacactcgatataatgaaaagaacacag

SEQ ID NO: 519193 - DNA, 33 bp, Homo sapien
gagcctgcacatagtacgtgtgtaattaatgca

SEQ ID NO: 519194 - DNA, 33 bp, Homo sapien
gagcctgcacatagtaggtgtgtaattaatgca

SEQ ID NO: 519195 - DNA, 33 bp, Homo sapien
gtgatgcttgtaataacagcagaatgaactgag

SEQ ID NO: 519196 - DNA, 33 bp, Homo sapien
gtgatgcttgtaataatagcagaatgaactgag

SEQ ID NO: 519197 - DNA, 33 bp, Homo sapien
ggcccttgtttttccacgtatggcttattttgc

SEQ ID NO: 519198 - DNA, 33 bp, Homo sapien
ggcccttgtttttccatgtatggcttattttgc

SEQ ID NO: 519199 - DNA, 33 bp, Homo sapien
tactatttattgatacacctgctctgtgccaga

SEQ ID NO: 519200 - DNA, 33 bp, Homo sapien
tactatttattgatacccctgctctgtgccaga

SEQ ID NO: 519201 - DNA, 33 bp, Homo sapien
atttcttaagttgtagaaaacctggcgtgctca

SEQ ID NO: 519202 - DNA, 33 bp, Homo sapien
atttcttaagttgtaggaaacctggcgtgctca

SEQ ID NO: 519203 - DNA, 33 bp, Homo sapien
taaggaactgtgtcagaactaaactgagtcata

SEQ ID NO: 519204 - DNA, 33 bp, Homo sapien
taaggaactgtgtcaggactaaactgagtcata

SEQ ID NO: 519205 - DNA, 33 bp, Homo sapien
aaaaggtaaacaatgagcttatgtctattaggt

SEQ ID NO: 519206 - DNA, 33 bp, Homo sapien
aaaaggtaaacaatgatcttatgtctattaggt

SEQ ID NO: 519207 - DNA, 33 bp, Homo sapien
cttttgttcagggaagaattttatgtccagatg

SEQ ID NO: 519208 - DNA, 33 bp, Homo sapien
cttttgttcagggaagtattttatgtccagatg

SEQ ID NO: 519209 - DNA, 33 bp, Homo sapien
ataaaggaagaaaaaaatggagacaacagactc

SEQ ID NO: 519210 - DNA, 33 bp, Homo sapien
ataaaggaagaaaaaattggagacaacagactc

SEQ ID NO: 519211 - DNA, 33 bp, Homo sapien
tacaaattactcaaaaattcaaaaagcttgaaa

SEQ ID NO: 519212 - DNA, 33 bp, Homo sapien
tacaaattactcaaaagttcaaaaagcttgaaa

SEQ ID NO: 519213 - DNA, 33 bp, Homo sapien
aagcctgctttccaggccccgcgtatattctag

SEQ ID NO: 519214 - DNA, 33 bp, Homo sapien
aagcctgctttccaggtcccgcgtatattctag

SEQ ID NO: 519215 - DNA, 33 bp, Homo sapien
caagtttactcatctgcaaaatgacagggccga

SEQ ID NO: 519216 - DNA, 33 bp, Homo sapien
caagtttactcatctgtaaaatgacagggccga

SEQ ID NO: 519217 - DNA, 33 bp, Homo sapien
gataggtaaaacataagaattcatcaaaaaatt

SEQ ID NO: 519218 - DNA, 33 bp, Homo sapien
gataggtaaaacataataattcatcaaaaaatt

SEQ ID NO: 519219 - DNA, 33 bp, Homo sapien
ataaaatggaccttaaagttattacacataata

SEQ ID NO: 519220 - DNA, 33 bp, Homo sapien
ataaaatggaccttaacgttattacacataata

SEQ ID NO: 519221 - DNA, 33 bp, Homo sapien
gtgaaggtgttaaggaagttagcttagtgttgt

SEQ ID NO: 519222 - DNA, 33 bp, Homo sapien
gtgaaggtgttaaggaggttagcttagtgttgt

SEQ ID NO: 519223 - DNA, 33 bp, Homo sapien
gagaagcagtgaatcccgacaccaaaccaagta

SEQ ID NO: 519224 - DNA, 33 bp, Homo sapien
gagaagcagtgaatcctgacaccaaaccaagta

SEQ ID NO: 519225 - DNA, 33 bp, Homo sapien
caaccaatcacatgaaagttagaaatacggttc

SEQ ID NO: 519226 - DNA, 33 bp, Homo sapien
caaccaatcacatgaatgttagaaatacggttc

SEQ ID NO: 519227 - DNA, 33 bp, Homo sapien
aaccaatatgacttagaagtaccagtagataca

SEQ ID NO: 519228 - DNA, 33 bp, Homo sapien
aaccaatatgacttagcagtaccagtagataca

SEQ ID NO: 519229 - DNA, 33 bp, Homo sapien
catgcaaaactcttgacagaagacattcagaaa

SEQ ID NO: 519230 - DNA, 33 bp, Homo sapien
catgcaaaactcttgatagaagacattcagaaa

SEQ ID NO: 519231 - DNA, 33 bp, Homo sapien
gcttggaatgtaggcccgaatctatgcaacaag

SEQ ID NO: 519232 - DNA, 33 bp, Homo sapien
gcttggaatgtaggcctgaatctatgcaacaag

SEQ ID NO: 519233 - DNA, 33 bp, Homo sapien
caggtcagctagaaaactgtggctctttcctgt

SEQ ID NO: 519234 - DNA, 33 bp, Homo sapien
caggtcagctagaaaattgtggctctttcctgt

SEQ ID NO: 519235 - DNA, 33 bp, Homo sapien
attaatttggataaaacccttctgcaaaagcca

SEQ ID NO: 519236 - DNA, 33 bp, Homo sapien
attaatttggataaaagccttctgcaaaagcca

SEQ ID NO: 519237 - DNA, 33 bp, Homo sapien
ctcccatctaggaagccgctgtgttgatggccc

SEQ ID NO: 519238 - DNA, 33 bp, Homo sapien
ctcccatctaggaagctgctgtgttgatggccc

SEQ ID NO: 519239 - DNA, 33 bp, Homo sapien
agtgtcaaatgtaacactcttgatttttctagg

SEQ ID NO: 519240 - DNA, 33 bp, Homo sapien
agtgtcaaatgtaacattcttgatttttctagg

SEQ ID NO: 519241 - DNA, 33 bp, Homo sapien
acacaatctatgacaaaatttttctggcagttc

SEQ ID NO: 519242 - DNA, 33 bp, Homo sapien
acacaatctatgacaagatttttctggcagttc

SEQ ID NO: 519243 - DNA, 33 bp, Homo sapien
gttgctgctcaagttccatataggagaagcctc

SEQ ID NO: 519244 - DNA, 33 bp, Homo sapien
gttgctgctcaagttctatataggagaagcctc

SEQ ID NO: 519245 - DNA, 33 bp, Homo sapien
gtgtggtgctccaaaccggtaataatagggtcc

SEQ ID NO: 519246 - DNA, 33 bp, Homo sapien
gtgtggtgctccaaactggtaataatagggtcc

SEQ ID NO: 519247 - DNA, 33 bp, Homo sapien
tgaaattatgtctaggcatttttcctacagatg

SEQ ID NO: 519248 - DNA, 33 bp, Homo sapien
tgaaattatgtctaggtatttttcctacagatg

SEQ ID NO: 519249 - DNA, 33 bp, Homo sapien
acttctgccatttagcaattaaaatactgtttg

SEQ ID NO: 519250 - DNA, 33 bp, Homo sapien
acttctgccatttagcgattaaaatactgtttg

SEQ ID NO: 519251 - DNA, 33 bp, Homo sapien
caacaatataccccaccgattttaagaaaatca

SEQ ID NO: 519252 - DNA, 33 bp, Homo sapien
caacaatataccccactgattttaagaaaatca

SEQ ID NO: 519253 - DNA, 33 bp, Homo sapien
ccttgggactgttagccacatatatcagggcat

SEQ ID NO: 519254 - DNA, 33 bp, Homo sapien
ccttgggactgttagctacatatatcagggcat

SEQ ID NO: 519255 - DNA, 33 bp, Homo sapien
cagtgaagcaaatacactgagtcctgtttcctg

SEQ ID NO: 519256 - DNA, 33 bp, Homo sapien
cagtgaagcaaatacattgagtcctgtttcctg

SEQ ID NO: 519257 - DNA, 33 bp, Homo sapien
aagctttaaaatgacacgttgaaagatacgatt

SEQ ID NO: 519258 - DNA, 33 bp, Homo sapien
aagctttaaaatgacaggttgaaagatacgatt

SEQ ID NO: 519259 - DNA, 33 bp, Homo sapien
ttgtagagtttattacagcaagtaacctgtgtt

SEQ ID NO: 519260 - DNA, 33 bp, Homo sapien
ttgtagagtttattacggcaagtaacctgtgtt

SEQ ID NO: 519261 - DNA, 33 bp, Homo sapien
gtttagtgtcaagttgaaggaagagagggttta

SEQ ID NO: 519262 - DNA, 33 bp, Homo sapien
gtttagtgtcaagttgtaggaagagagggttta

SEQ ID NO: 519263 - DNA, 33 bp, Homo sapien
tcaaatcatttgaagaatagttgtttagtgagt

SEQ ID NO: 519264 - DNA, 33 bp, Homo sapien
tcaaatcatttgaagagtagttgtttagtgagt

SEQ ID NO: 519265 - DNA, 33 bp, Homo sapien
gatgaaatgcatgtcaagtatcaggtttcaagt

SEQ ID NO: 519266 - DNA, 33 bp, Homo sapien
gatgaaatgcatgtcaggtatcaggtttcaagt

SEQ ID NO: 519267 - DNA, 33 bp, Homo sapien
atggaatcaatcatacaccaaagctcagcacca

SEQ ID NO: 519268 - DNA, 33 bp, Homo sapien
atggaatcaatcataccccaaagctcagcacca

SEQ ID NO: 519269 - DNA, 33 bp, Homo sapien
tgattcttgtcttcacactttgtcctgtgtctt

SEQ ID NO: 519270 - DNA, 33 bp, Homo sapien
tgattcttgtcttcacgctttgtcctgtgtctt

SEQ ID NO: 519271 - DNA, 33 bp, Homo sapien
tttttaatatacacaccagaggatgttttcagt

SEQ ID NO: 519272 - DNA, 33 bp, Homo sapien
tttttaatatacacactagaggatgttttcagt

SEQ ID NO: 519273 - DNA, 33 bp, Homo sapien
gattaacactgccttaaaagctaatgtcatttt

SEQ ID NO: 519274 - DNA, 33 bp, Homo sapien
gattaacactgccttacaagctaatgtcatttt

SEQ ID NO: 519275 - DNA, 33 bp, Homo sapien
gcttaaatagtgcagacggtttttttgtggggg

SEQ ID NO: 519276 - DNA, 33 bp, Homo sapien
gcttaaatagtgcagatggtttttttgtggggg

SEQ ID NO: 519277 - DNA, 33 bp, Homo sapien
ttaactatagttgcccaattatgccactaaaca

SEQ ID NO: 519278 - DNA, 33 bp, Homo sapien
ttaactatagttgccctattatgccactaaaca

SEQ ID NO: 519279 - DNA, 33 bp, Homo sapien
gcgtattcatttaaaccccaacaaacatggaat

SEQ ID NO: 519280 - DNA, 33 bp, Homo sapien
gcgtattcatttaaactccaacaaacatggaat

SEQ ID NO: 519281 - DNA, 33 bp, Homo sapien
atgatgtcttgtgacaaataataaagctatggg

SEQ ID NO: 519282 - DNA, 33 bp, Homo sapien
atgatgtcttgtgacagataataaagctatggg

SEQ ID NO: 519283 - DNA, 33 bp, Homo sapien
gctacactgaagaaacgcttctaacgatttcct

SEQ ID NO: 519284 - DNA, 33 bp, Homo sapien
gctacactgaagaaactcttctaacgatttcct

SEQ ID NO: 519285 - DNA, 33 bp, Homo sapien
ttggtgcttttgtaaacagctgtgttttaacct

SEQ ID NO: 519286 - DNA, 33 bp, Homo sapien
ttggtgcttttgtaaatagctgtgttttaacct

SEQ ID NO: 519287 - DNA, 33 bp, Homo sapien
ctacggacactgtatacgctgagtttcatcaat

SEQ ID NO: 519288 - DNA, 33 bp, Homo sapien
ctacggacactgtatatgctgagtttcatcaat

SEQ ID NO: 519289 - DNA, 33 bp, Homo sapien
gctgccaaggtatccacctcggacatggtgtta

SEQ ID NO: 519290 - DNA, 33 bp, Homo sapien
gctgccaaggtatccatctcggacatggtgtta

SEQ ID NO: 519291 - DNA, 33 bp, Homo sapien
tttctctgtgccttaaataactatttgacaatg

SEQ ID NO: 519292 - DNA, 33 bp, Homo sapien
tttctctgtgccttaagtaactatttgacaatg

SEQ ID NO: 519293 - DNA, 33 bp, Homo sapien
tggaaaaggttagaagcctctaagaaatgacac

SEQ ID NO: 519294 - DNA, 33 bp, Homo sapien
tggaaaaggttagaaggctctaagaaatgacac

SEQ ID NO: 519295 - DNA, 33 bp, Homo sapien
aagcaccagcagccagaaaacttgtatactctt

SEQ ID NO: 519296 - DNA, 33 bp, Homo sapien
aagcaccagcagccagcaaacttgtatactctt

SEQ ID NO: 519297 - DNA, 33 bp, Homo sapien
tctttctgaaaatcaacttatctggctaatctg

SEQ ID NO: 519298 - DNA, 33 bp, Homo sapien
tctttctgaaaatcaatttatctggctaatctg

SEQ ID NO: 519299 - DNA, 33 bp, Homo sapien
acagcatctcttgtctaaaagtgcttacaagag

SEQ ID NO: 519300 - DNA, 33 bp, Homo sapien
acagcatctcttgtctgaaagtgcttacaagag

SEQ ID NO: 519301 - DNA, 33 bp, Homo sapien
aaccaacatttctatcagacagtaattgatatt

SEQ ID NO: 519302 - DNA, 33 bp, Homo sapien
aaccaacatttctatccgacagtaattgatatt

SEQ ID NO: 519303 - DNA, 33 bp, Homo sapien
aggaaatcttactgagccataggagttcattag

SEQ ID NO: 519304 - DNA, 33 bp, Homo sapien
aggaaatcttactgaggcataggagttcattag

SEQ ID NO: 519305 - DNA, 33 bp, Homo sapien
gaaatcacaaagttcacactcctcctatttccc

SEQ ID NO: 519306 - DNA, 33 bp, Homo sapien
gaaatcacaaagttcatactcctcctatttccc

SEQ ID NO: 519307 - DNA, 33 bp, Homo sapien
aggatctataacgtaccaggatctttagatgta

SEQ ID NO: 519308 - DNA, 33 bp, Homo sapien
aggatctataacgtactaggatctttagatgta

SEQ ID NO: 519309 - DNA, 33 bp, Homo sapien
cgtaagtatagtgaacaattcaaatttatcaaa

SEQ ID NO: 519310 - DNA, 33 bp, Homo sapien
cgtaagtatagtgaacgattcaaatttatcaaa

SEQ ID NO: 519311 - DNA, 33 bp, Homo sapien
atcctgacttttagtacagcagtgagaattttt

SEQ ID NO: 519312 - DNA, 33 bp, Homo sapien
atcctgacttttagtagagcagtgagaattttt

SEQ ID NO: 519313 - DNA, 33 bp, Homo sapien
gttgaaattgaaacccagaatctgaatataccc

SEQ ID NO: 519314 - DNA, 33 bp, Homo sapien
gttgaaattgaaacccggaatctgaatataccc

SEQ ID NO: 519315 - DNA, 33 bp, Homo sapien
ccaggaagcaactagcaatgggcgctggagaaa

SEQ ID NO: 519316 - DNA, 33 bp, Homo sapien
ccaggaagcaactagcgatgggcgctggagaaa

SEQ ID NO: 519317 - DNA, 33 bp, Homo sapien
ataaatagtaagatacacactgggaactagaac

SEQ ID NO: 519318 - DNA, 33 bp, Homo sapien
ataaatagtaagatacgcactgggaactagaac

SEQ ID NO: 519319 - DNA, 33 bp, Homo sapien
tttgtaaaattcaaacacagccaattaagtagg

SEQ ID NO: 519320 - DNA, 33 bp, Homo sapien
tttgtaaaattcaaacgcagccaattaagtagg

SEQ ID NO: 519321 - DNA, 33 bp, Homo sapien
ttacttgcttacttaactatcatgtatcttcta

SEQ ID NO: 519322 - DNA, 33 bp, Homo sapien
ttacttgcttacttaattatcatgtatcttcta

SEQ ID NO: 519323 - DNA, 33 bp, Homo sapien
aaaatgaagtaaggtaaaaggatagtgtattag

SEQ ID NO: 519324 - DNA, 33 bp, Homo sapien
aaaatgaagtaaggtagaaggatagtgtattag

SEQ ID NO: 519325 - DNA, 33 bp, Homo sapien
gttgcaacaaagcatacgagatgttctgccctt

SEQ ID NO: 519326 - DNA, 33 bp, Homo sapien
gttgcaacaaagcatatgagatgttctgccctt

SEQ ID NO: 519327 - DNA, 33 bp, Homo sapien
taaatgtaaacacacaactttcaaatacttgca

SEQ ID NO: 519328 - DNA, 33 bp, Homo sapien
taaatgtaaacacacatctttcaaatacttgca

SEQ ID NO: 519329 - DNA, 33 bp, Homo sapien
gtgagaagcccttatcaaaatcatcatcccatt

SEQ ID NO: 519330 - DNA, 33 bp, Homo sapien
gtgagaagcccttatcgaaatcatcatcccatt

SEQ ID NO: 519331 - DNA, 33 bp, Homo sapien
ggtagaattgattgcaaagttgcttcatattct

SEQ ID NO: 519332 - DNA, 33 bp, Homo sapien
ggtagaattgattgcagagttgcttcatattct

SEQ ID NO: 519333 - DNA, 33 bp, Homo sapien
ccagcaacggaaagatcatatcagcacagcagg

SEQ ID NO: 519334 - DNA, 33 bp, Homo sapien
ccagcaacggaaagattatatcagcacagcagg

SEQ ID NO: 519335 - DNA, 33 bp, Homo sapien
ctttcggcataaatacacattattagacttagg

SEQ ID NO: 519336 - DNA, 33 bp, Homo sapien
ctttcggcataaatacgcattattagacttagg

SEQ ID NO: 519337 - DNA, 33 bp, Homo sapien
aacgcccttataatacagcctcctcaactcaaa

SEQ ID NO: 519338 - DNA, 33 bp, Homo sapien
aacgcccttataataccgcctcctcaactcaaa

SEQ ID NO: 519339 - DNA, 33 bp, Homo sapien
tcctgtctccatccacaattggtctgggaatta

SEQ ID NO: 519340 - DNA, 33 bp, Homo sapien
tcctgtctccatccacgattggtctgggaatta

SEQ ID NO: 519341 - DNA, 33 bp, Homo sapien
ttgtagcgtgtgtcaaatatgtagttccttttt

SEQ ID NO: 519342 - DNA, 33 bp, Homo sapien
ttgtagcgtgtgtcaactatgtagttccttttt

SEQ ID NO: 519343 - DNA, 33 bp, Homo sapien
aagatcagtctccagacaaataatgttaagtgc

SEQ ID NO: 519344 - DNA, 33 bp, Homo sapien
aagatcagtctccagagaaataatgttaagtgc

SEQ ID NO: 519345 - DNA, 33 bp, Homo sapien
gggttagagcggttatcaaggcagggcatttca

SEQ ID NO: 519346 - DNA, 33 bp, Homo sapien
gggttagagcggttattaaggcagggcatttca

SEQ ID NO: 519347 - DNA, 33 bp, Homo sapien
ccaggcttttggattaagttttgtttctgttaa

SEQ ID NO: 519348 - DNA, 33 bp, Homo sapien
ccaggcttttggattatgttttgtttctgttaa

SEQ ID NO: 519349 - DNA, 33 bp, Homo sapien
gaacgatttttttggaacgatatggcatatgaa

SEQ ID NO: 519350 - DNA, 33 bp, Homo sapien
gaacgatttttttggaccgatatggcatatgaa

SEQ ID NO: 519351 - DNA, 33 bp, Homo sapien
tacttaaaggccgtaactaatacaaagttattc

SEQ ID NO: 519352 - DNA, 33 bp, Homo sapien
tacttaaaggccgtaattaatacaaagttattc

SEQ ID NO: 519353 - DNA, 33 bp, Homo sapien
caggtgaatgacagataagtcaaaacttcatag

SEQ ID NO: 519354 - DNA, 33 bp, Homo sapien
caggtgaatgacagatgagtcaaaacttcatag

SEQ ID NO: 519355 - DNA, 33 bp, Homo sapien
tgctggaagatgcaaaaaaaagttgtccagatg

SEQ ID NO: 519356 - DNA, 33 bp, Homo sapien
tgctggaagatgcaaacaaaagttgtccagatg

SEQ ID NO: 519357 - DNA, 33 bp, Homo sapien
ttttcttttacagcaacaaatgagtccactaca

SEQ ID NO: 519358 - DNA, 33 bp, Homo sapien
ttttcttttacagcaataaatgagtccactaca

SEQ ID NO: 519359 - DNA, 33 bp, Homo sapien
acctgtgaagaacaagcatggttcgaggatatt

SEQ ID NO: 519360 - DNA, 33 bp, Homo sapien
acctgtgaagaacaagtatggttcgaggatatt

SEQ ID NO: 519361 - DNA, 33 bp, Homo sapien
tgtaaccataatttctcaaggaagaatatcacc

SEQ ID NO: 519362 - DNA, 33 bp, Homo sapien
tgtaaccataatttctgaaggaagaatatcacc

SEQ ID NO: 519363 - DNA, 33 bp, Homo sapien
attgagacttgtgaaactgaggtaacctgcttg

SEQ ID NO: 519364 - DNA, 33 bp, Homo sapien
attgagacttgtgaaattgaggtaacctgcttg

SEQ ID NO: 519365 - DNA, 33 bp, Homo sapien
ggacttaagatggtaactaaaatgtgtggatgt

SEQ ID NO: 519366 - DNA, 33 bp, Homo sapien
ggacttaagatggtaagtaaaatgtgtggatgt

SEQ ID NO: 519367 - DNA, 33 bp, Homo sapien
tagtgcatcagttttcaaaatgtagtctctgga

SEQ ID NO: 519368 - DNA, 33 bp, Homo sapien
tagtgcatcagttttcgaaatgtagtctctgga

SEQ ID NO: 519369 - DNA, 33 bp, Homo sapien
tcacatacagtatgcaagcacaaattttctcca

SEQ ID NO: 519370 - DNA, 33 bp, Homo sapien
tcacatacagtatgcacgcacaaattttctcca

SEQ ID NO: 519371 - DNA, 33 bp, Homo sapien
atggaaacagtttcagaagcagtcctgcaaggc

SEQ ID NO: 519372 - DNA, 33 bp, Homo sapien
atggaaacagtttcaggagcagtcctgcaaggc

SEQ ID NO: 519373 - DNA, 33 bp, Homo sapien
gagtctggtgagacagaacaatcacatgacaag

SEQ ID NO: 519374 - DNA, 33 bp, Homo sapien
gagtctggtgagacagtacaatcacatgacaag

SEQ ID NO: 519375 - DNA, 33 bp, Homo sapien
gagaatgctgcatcctaagataaggcaaaactg

SEQ ID NO: 519376 - DNA, 33 bp, Homo sapien
gagaatgctgcatcctgagataaggcaaaactg

SEQ ID NO: 519377 - DNA, 33 bp, Homo sapien
tttgactttaaaaatccattgcagtagcttaaa

SEQ ID NO: 519378 - DNA, 33 bp, Homo sapien
tttgactttaaaaatctattgcagtagcttaaa

SEQ ID NO: 519379 - DNA, 33 bp, Homo sapien
tcctttgcagtgaaagcctaagtgagattgcac

SEQ ID NO: 519380 - DNA, 33 bp, Homo sapien
tcctttgcagtgaaagtctaagtgagattgcac

SEQ ID NO: 519381 - DNA, 33 bp, Homo sapien
aaaggctgctgactaagatcagttctatcttta

SEQ ID NO: 519382 - DNA, 33 bp, Homo sapien
aaaggctgctgactaatatcagttctatcttta

SEQ ID NO: 519383 - DNA, 33 bp, Homo sapien
agagatgatccattcaatcaagcccttttgagt

SEQ ID NO: 519384 - DNA, 33 bp, Homo sapien
agagatgatccattcagtcaagcccttttgagt

SEQ ID NO: 519385 - DNA, 33 bp, Homo sapien
taaattacttgtgacacaaaagaaaaggcttag

SEQ ID NO: 519386 - DNA, 33 bp, Homo sapien
taaattacttgtgacataaaagaaaaggcttag

SEQ ID NO: 519387 - DNA, 33 bp, Homo sapien
gtctatgtgtcttccaccaaactgttcttttaa

SEQ ID NO: 519388 - DNA, 33 bp, Homo sapien
gtctatgtgtcttccatcaaactgttcttttaa

SEQ ID NO: 519389 - DNA, 33 bp, Homo sapien
gtcaaagattgggaaaatacattctgcttacca

SEQ ID NO: 519390 - DNA, 33 bp, Homo sapien
gtcaaagattgggaaagtacattctgcttacca

SEQ ID NO: 519391 - DNA, 33 bp, Homo sapien
aggactgacttggtataaggcaccagggccacc

SEQ ID NO: 519392 - DNA, 33 bp, Homo sapien
aggactgacttggtatgaggcaccagggccacc

SEQ ID NO: 519393 - DNA, 33 bp, Homo sapien
tttctgggttctctcccatgcccaggacgatgg

SEQ ID NO: 519394 - DNA, 33 bp, Homo sapien
tttctgggttctctcctatgcccaggacgatgg

SEQ ID NO: 519395 - DNA, 33 bp, Homo sapien
tgctgttgggaatttcaaactttttgcattttt

SEQ ID NO: 519396 - DNA, 33 bp, Homo sapien
tgctgttgggaatttctaactttttgcattttt

SEQ ID NO: 519397 - DNA, 33 bp, Homo sapien
tccaatcaatagagacaattaaatgacacatac

SEQ ID NO: 519398 - DNA, 33 bp, Homo sapien
tccaatcaatagagacgattaaatgacacatac

SEQ ID NO: 519399 - DNA, 33 bp, Homo sapien
tcctaattcctttaaaacacaacattaacaggt

SEQ ID NO: 519400 - DNA, 33 bp, Homo sapien
tcctaattcctttaaagcacaacattaacaggt

SEQ ID NO: 519401 - DNA, 33 bp, Homo sapien
taagagttctggtcccaagatttaaagttaaat

SEQ ID NO: 519402 - DNA, 33 bp, Homo sapien
taagagttctggtcccgagatttaaagttaaat

SEQ ID NO: 519403 - DNA, 33 bp, Homo sapien
cctggccatttggttccagatggttctatacaa

SEQ ID NO: 519404 - DNA, 33 bp, Homo sapien
cctggccatttggttctagatggttctatacaa

SEQ ID NO: 519405 - DNA, 33 bp, Homo sapien
aataaaaatcttgatacgttctttatcatatac

SEQ ID NO: 519406 - DNA, 33 bp, Homo sapien
aataaaaatcttgataggttctttatcatatac

SEQ ID NO: 519407 - DNA, 33 bp, Homo sapien
tcccaatgtttctcaccgatgcctacttgaaga

SEQ ID NO: 519408 - DNA, 33 bp, Homo sapien
tcccaatgtttctcactgatgcctacttgaaga

SEQ ID NO: 519409 - DNA, 33 bp, Homo sapien
aagcggaaggtgagaaataattgtgttgatgaa

SEQ ID NO: 519410 - DNA, 33 bp, Homo sapien
aagcggaaggtgagaagtaattgtgttgatgaa

SEQ ID NO: 519411 - DNA, 33 bp, Homo sapien
tgcattatggctttaaaaggaagtaaaagaatc

SEQ ID NO: 519412 - DNA, 33 bp, Homo sapien
tgcattatggctttaagaggaagtaaaagaatc

SEQ ID NO: 519413 - DNA, 33 bp, Homo sapien
gaaacgggaagcccaacgattagctaagtgtag

SEQ ID NO: 519414 - DNA, 33 bp, Homo sapien
gaaacgggaagcccaatgattagctaagtgtag

SEQ ID NO: 519415 - DNA, 33 bp, Homo sapien
tcctaagaaaaagagacggatgatatattctgc

SEQ ID NO: 519416 - DNA, 33 bp, Homo sapien
tcctaagaaaaagagagggatgatatattctgc

SEQ ID NO: 519417 - DNA, 33 bp, Homo sapien
ccttataagacaaagaaggaatgaggacaatct

SEQ ID NO: 519418 - DNA, 33 bp, Homo sapien
ccttataagacaaagagggaatgaggacaatct

SEQ ID NO: 519419 - DNA, 33 bp, Homo sapien
taaaagcaagatgttacgtgtcaattgtaattg

SEQ ID NO: 519420 - DNA, 33 bp, Homo sapien
taaaagcaagatgttatgtgtcaattgtaattg

SEQ ID NO: 519421 - DNA, 33 bp, Homo sapien
ccacaagaaattgttgcaataaaatgcttcatg

SEQ ID NO: 519422 - DNA, 33 bp, Homo sapien
ccacaagaaattgttgtaataaaatgcttcatg

SEQ ID NO: 519423 - DNA, 33 bp, Homo sapien
tttgtgttcagtctcaatcaaggattataactt

SEQ ID NO: 519424 - DNA, 33 bp, Homo sapien
tttgtgttcagtctcactcaaggattataactt

SEQ ID NO: 519425 - DNA, 33 bp, Homo sapien
gtatgtgtgtgatgcaatattacttaaaatcaa

SEQ ID NO: 519426 - DNA, 33 bp, Homo sapien
gtatgtgtgtgatgcagtattacttaaaatcaa

SEQ ID NO: 519427 - DNA, 33 bp, Homo sapien
cagtgcaagacatcataaggggtgaggttgaga

SEQ ID NO: 519428 - DNA, 33 bp, Homo sapien
cagtgcaagacatcattaggggtgaggttgaga

SEQ ID NO: 519429 - DNA, 33 bp, Homo sapien
atttttatacatagtaaaagtgcaagcaagtca

SEQ ID NO: 519430 - DNA, 33 bp, Homo sapien
atttttatacatagtagaagtgcaagcaagtca

SEQ ID NO: 519431 - DNA, 33 bp, Homo sapien
tttttaaacggtgtccactctatacactaacac

SEQ ID NO: 519432 - DNA, 33 bp, Homo sapien
tttttaaacggtgtccgctctatacactaacac

SEQ ID NO: 519433 - DNA, 33 bp, Homo sapien
aaaataagttgaatgacggcaaattctccttga

SEQ ID NO: 519434 - DNA, 33 bp, Homo sapien
aaaataagttgaatgatggcaaattctccttga

SEQ ID NO: 519435 - DNA, 33 bp, Homo sapien
atatttgcatttccaacgtagagaatttgtcac

SEQ ID NO: 519436 - DNA, 33 bp, Homo sapien
atatttgcatttccaatgtagagaatttgtcac

SEQ ID NO: 519437 - DNA, 33 bp, Homo sapien
ggcttatacctatgacgggatatttcactccag

SEQ ID NO: 519438 - DNA, 33 bp, Homo sapien
ggcttatacctatgactggatatttcactccag

SEQ ID NO: 519439 - DNA, 33 bp, Homo sapien
taaaagactgatgacactgaagattggtaagga

SEQ ID NO: 519440 - DNA, 33 bp, Homo sapien
taaaagactgatgacagtgaagattggtaagga

SEQ ID NO: 519441 - DNA, 33 bp, Homo sapien
gcatccagatgttagaagaacggaaagataata

SEQ ID NO: 519442 - DNA, 33 bp, Homo sapien
gcatccagatgttagaggaacggaaagataata

SEQ ID NO: 519443 - DNA, 33 bp, Homo sapien
gataactctacatcaaaaaatagcagaaaacta

SEQ ID NO: 519444 - DNA, 33 bp, Homo sapien
gataactctacatcaagaaatagcagaaaacta

SEQ ID NO: 519445 - DNA, 33 bp, Homo sapien
aatatttagtgctttacgtaggagctgacctac

SEQ ID NO: 519446 - DNA, 33 bp, Homo sapien
aatatttagtgctttatgtaggagctgacctac

SEQ ID NO: 519447 - DNA, 33 bp, Homo sapien
atgttatcattgcccaacaactaacctgctctt

SEQ ID NO: 519448 - DNA, 33 bp, Homo sapien
atgttatcattgcccagcaactaacctgctctt

SEQ ID NO: 519449 - DNA, 33 bp, Homo sapien
cacaacaactataaaactcgtactcagctccac

SEQ ID NO: 519450 - DNA, 33 bp, Homo sapien
cacaacaactataaaattcgtactcagctccac

SEQ ID NO: 519451 - DNA, 33 bp, Homo sapien
tttgctaaggcaataaatcataatattctcaca

SEQ ID NO: 519452 - DNA, 33 bp, Homo sapien
tttgctaaggcaataagtcataatattctcaca

SEQ ID NO: 519453 - DNA, 33 bp, Homo sapien
aatttgtgaacttagaagtatgatctcagtatc

SEQ ID NO: 519454 - DNA, 33 bp, Homo sapien
aatttgtgaacttagaggtatgatctcagtatc

SEQ ID NO: 519455 - DNA, 33 bp, Homo sapien
tagtggatgactattaagaacctgcaatgtgat

SEQ ID NO: 519456 - DNA, 33 bp, Homo sapien
tagtggatgactattaggaacctgcaatgtgat

SEQ ID NO: 519457 - DNA, 33 bp, Homo sapien
gactaccttgattttaaaaacttagcatcatag

SEQ ID NO: 519458 - DNA, 33 bp, Homo sapien
gactaccttgattttagaaacttagcatcatag

SEQ ID NO: 519459 - DNA, 33 bp, Homo sapien
aagtgcctaaaatatccagcacacattaagcaa

SEQ ID NO: 519460 - DNA, 33 bp, Homo sapien
aagtgcctaaaatatctagcacacattaagcaa

SEQ ID NO: 519461 - DNA, 33 bp, Homo sapien
cggaagcgggagacataatccagaatatatatc

SEQ ID NO: 519462 - DNA, 33 bp, Homo sapien
cggaagcgggagacattatccagaatatatatc

SEQ ID NO: 519463 - DNA, 33 bp, Homo sapien
tatattattccaggaaacttcttggcttacctt

SEQ ID NO: 519464 - DNA, 33 bp, Homo sapien
tatattattccaggaaccttcttggcttacctt

SEQ ID NO: 519465 - DNA, 33 bp, Homo sapien
atttgtggaaaaagtacgcattgattacacaat

SEQ ID NO: 519466 - DNA, 33 bp, Homo sapien
atttgtggaaaaagtatgcattgattacacaat

SEQ ID NO: 519467 - DNA, 33 bp, Homo sapien
tccaaatgtagagccaaatttgctcatgggaca

SEQ ID NO: 519468 - DNA, 33 bp, Homo sapien
tccaaatgtagagccatatttgctcatgggaca

SEQ ID NO: 519469 - DNA, 33 bp, Homo sapien
gttgcagagatgataacgacaaaagttgacctc

SEQ ID NO: 519470 - DNA, 33 bp, Homo sapien
gttgcagagatgataatgacaaaagttgacctc

SEQ ID NO: 519471 - DNA, 33 bp, Homo sapien
aatccttacctattaaacgctttgagtagggtg

SEQ ID NO: 519472 - DNA, 33 bp, Homo sapien
aatccttacctattaagcgctttgagtagggtg

SEQ ID NO: 519473 - DNA, 33 bp, Homo sapien
ggtttaagagtttagcagaacaaacaagtgtag

SEQ ID NO: 519474 - DNA, 33 bp, Homo sapien
ggtttaagagtttagctgaacaaacaagtgtag

SEQ ID NO: 519475 - DNA, 33 bp, Homo sapien
ctcaacctttccaagcaacattttcatttagaa

SEQ ID NO: 519476 - DNA, 33 bp, Homo sapien
ctcaacctttccaagcgacattttcatttagaa

SEQ ID NO: 519477 - DNA, 33 bp, Homo sapien
aggttcaaatcactgaagaaatagtatttatac

SEQ ID NO: 519478 - DNA, 33 bp, Homo sapien
aggttcaaatcactgaggaaatagtatttatac

SEQ ID NO: 519479 - DNA, 33 bp, Homo sapien
aaagatagatcttaggcaatttcttgctcttaa

SEQ ID NO: 519480 - DNA, 33 bp, Homo sapien
aaagatagatcttaggtaatttcttgctcttaa

SEQ ID NO: 519481 - DNA, 33 bp, Homo sapien
attatcatcctaaaaaaatattagctaaaattt

SEQ ID NO: 519482 - DNA, 33 bp, Homo sapien
attatcatcctaaaaatatattagctaaaattt

SEQ ID NO: 519483 - DNA, 33 bp, Homo sapien
gatttcttgatttagacatgacaaggactagag

SEQ ID NO: 519484 - DNA, 33 bp, Homo sapien
gatttcttgatttagatatgacaaggactagag

SEQ ID NO: 519485 - DNA, 33 bp, Homo sapien
aacagtcctttgtagcaaacactatgtgtgtca

SEQ ID NO: 519486 - DNA, 33 bp, Homo sapien
aacagtcctttgtagcgaacactatgtgtgtca

SEQ ID NO: 519487 - DNA, 33 bp, Homo sapien
gcaaactggcttccaacgttcaatatattcacc

SEQ ID NO: 519488 - DNA, 33 bp, Homo sapien
gcaaactggcttccaatgttcaatatattcacc

SEQ ID NO: 519489 - DNA, 33 bp, Homo sapien
tggtgtttctccttcacatgctttattctatag

SEQ ID NO: 519490 - DNA, 33 bp, Homo sapien
tggtgtttctccttcagatgctttattctatag

SEQ ID NO: 519491 - DNA, 33 bp, Homo sapien
atcacaccagcaccacaaggaaattgattctcc

SEQ ID NO: 519492 - DNA, 33 bp, Homo sapien
atcacaccagcaccacgaggaaattgattctcc

SEQ ID NO: 519493 - DNA, 33 bp, Homo sapien
ctggcctaagaagaaaggattgaaatgctcaga

SEQ ID NO: 519494 - DNA, 33 bp, Homo sapien
ctggcctaagaagaaatgattgaaatgctcaga

SEQ ID NO: 519495 - DNA, 33 bp, Homo sapien
tggtcacaaagcattcagaacaaaggtttgctg

SEQ ID NO: 519496 - DNA, 33 bp, Homo sapien
tggtcacaaagcattcggaacaaaggtttgctg

SEQ ID NO: 519497 - DNA, 33 bp, Homo sapien
ttgtgatgtgtctgtaggtaactatgaaaaaaa

SEQ ID NO: 519498 - DNA, 33 bp, Homo sapien
ttgtgatgtgtctgtatgtaactatgaaaaaaa

SEQ ID NO: 519499 - DNA, 33 bp, Homo sapien
tctagtcaaattaattcaaggcctttgacaaat

SEQ ID NO: 519500 - DNA, 33 bp, Homo sapien
tctagtcaaattaattgaaggcctttgacaaat

SEQ ID NO: 519501 - DNA, 33 bp, Homo sapien
ttgcctttcattcttccatacaacattcttcca

SEQ ID NO: 519502 - DNA, 33 bp, Homo sapien
ttgcctttcattcttctatacaacattcttcca

SEQ ID NO: 519503 - DNA, 33 bp, Homo sapien
cacatactgtttagaaaattatgccccagattt

SEQ ID NO: 519504 - DNA, 33 bp, Homo sapien
cacatactgtttagaagattatgccccagattt

SEQ ID NO: 519505 - DNA, 33 bp, Homo sapien
gtctcctcaggaattacattggtaacatcagag

SEQ ID NO: 519506 - DNA, 33 bp, Homo sapien
gtctcctcaggaattatattggtaacatcagag

SEQ ID NO: 519507 - DNA, 33 bp, Homo sapien
ctacttggcaaatataccaattactcttctatc

SEQ ID NO: 519508 - DNA, 33 bp, Homo sapien
ctacttggcaaatatatcaattactcttctatc

SEQ ID NO: 519509 - DNA, 33 bp, Homo sapien
ccagaaactacagaaactcacacaagaagatat

SEQ ID NO: 519510 - DNA, 33 bp, Homo sapien
ccagaaactacagaaattcacacaagaagatat

SEQ ID NO: 519511 - DNA, 33 bp, Homo sapien
agctacaggggccaggaaaaggtacatggagtg

SEQ ID NO: 519512 - DNA, 33 bp, Homo sapien
agctacaggggccagggaaaggtacatggagtg

SEQ ID NO: 519513 - DNA, 33 bp, Homo sapien
gtaggttattatttaaagttccatgccttaggt

SEQ ID NO: 519514 - DNA, 33 bp, Homo sapien
gtaggttattatttaatgttccatgccttaggt

SEQ ID NO: 519515 - DNA, 33 bp, Homo sapien
cagtagcttgatcttgaacttaaaacttctgga

SEQ ID NO: 519516 - DNA, 33 bp, Homo sapien
cagtagcttgatcttggacttaaaacttctgga

SEQ ID NO: 519517 - DNA, 33 bp, Homo sapien
aaaggcaaggcctaaaatacaaaaatgtgataa

SEQ ID NO: 519518 - DNA, 33 bp, Homo sapien
aaaggcaaggcctaaagtacaaaaatgtgataa

SEQ ID NO: 519519 - DNA, 33 bp, Homo sapien
ctaggctcacatttccacttgactctttttttt

SEQ ID NO: 519520 - DNA, 33 bp, Homo sapien
ctaggctcacatttccgcttgactctttttttt

SEQ ID NO: 519521 - DNA, 33 bp, Homo sapien
ctgagtctctgattaacatagttgtctaccaac

SEQ ID NO: 519522 - DNA, 33 bp, Homo sapien
ctgagtctctgattaatatagttgtctaccaac

SEQ ID NO: 519523 - DNA, 33 bp, Homo sapien
gtctctggactgtgaacactttgagaataagaa

SEQ ID NO: 519524 - DNA, 33 bp, Homo sapien
gtctctggactgtgaatactttgagaataagaa

SEQ ID NO: 519525 - DNA, 33 bp, Homo sapien
ttgccaggtggactgacgctgatttccaagatt

SEQ ID NO: 519526 - DNA, 33 bp, Homo sapien
ttgccaggtggactgatgctgatttccaagatt

SEQ ID NO: 519527 - DNA, 33 bp, Homo sapien
attgctaagtggagacaggaaacaattgcttca

SEQ ID NO: 519528 - DNA, 33 bp, Homo sapien
attgctaagtggagacgggaaacaattgcttca

SEQ ID NO: 519529 - DNA, 33 bp, Homo sapien
gtggcttgaagtagcaacataaccactcaacca

SEQ ID NO: 519530 - DNA, 33 bp, Homo sapien
gtggcttgaagtagcagcataaccactcaacca

SEQ ID NO: 519531 - DNA, 33 bp, Homo sapien
atatcaacattataacagccatctactaaagat

SEQ ID NO: 519532 - DNA, 33 bp, Homo sapien
atatcaacattataacggccatctactaaagat

SEQ ID NO: 519533 - DNA, 33 bp, Homo sapien
caatgacaggacattcactaggtcattctgtgt

SEQ ID NO: 519534 - DNA, 33 bp, Homo sapien
caatgacaggacattctctaggtcattctgtgt

SEQ ID NO: 519535 - DNA, 33 bp, Homo sapien
gaagaagtaactcagcaacagactggtcacctt

SEQ ID NO: 519536 - DNA, 33 bp, Homo sapien
gaagaagtaactcagcgacagactggtcacctt

SEQ ID NO: 519537 - DNA, 33 bp, Homo sapien
agcttttgtataatgaccagatttttctaaacc

SEQ ID NO: 519538 - DNA, 33 bp, Homo sapien
agcttttgtataatgatcagatttttctaaacc

SEQ ID NO: 519539 - DNA, 33 bp, Homo sapien
aaaactgaagtcttgacgagagtttcttaccac

SEQ ID NO: 519540 - DNA, 33 bp, Homo sapien
aaaactgaagtcttgatgagagtttcttaccac

SEQ ID NO: 519541 - DNA, 33 bp, Homo sapien
aggaagatatcaaattaaagttaggagaagaaa

SEQ ID NO: 519542 - DNA, 33 bp, Homo sapien
aggaagatatcaaattcaagttaggagaagaaa

SEQ ID NO: 519543 - DNA, 33 bp, Homo sapien
gcctgtaagagaagatcaaggagggaatctgag

SEQ ID NO: 519544 - DNA, 33 bp, Homo sapien
gcctgtaagagaagatgaaggagggaatctgag

SEQ ID NO: 519545 - DNA, 33 bp, Homo sapien
ttttgtgtaacagtaactgaatcttgtagttta

SEQ ID NO: 519546 - DNA, 33 bp, Homo sapien
ttttgtgtaacagtaattgaatcttgtagttta

SEQ ID NO: 519547 - DNA, 33 bp, Homo sapien
aaaaaatacaagagccaccttgaaataatgttt

SEQ ID NO: 519548 - DNA, 33 bp, Homo sapien
aaaaaatacaagagccgccttgaaataatgttt

SEQ ID NO: 519549 - DNA, 33 bp, Homo sapien
taatttaaactgtgaaaccctactatgaagatg

SEQ ID NO: 519550 - DNA, 33 bp, Homo sapien
taatttaaactgtgaagccctactatgaagatg

SEQ ID NO: 519551 - DNA, 33 bp, Homo sapien
actggtagcaagtagtaaagtgattttctaagt

SEQ ID NO: 519552 - DNA, 33 bp, Homo sapien
actggtagcaagtagttaagtgattttctaagt

SEQ ID NO: 519553 - DNA, 33 bp, Homo sapien
gagcccaacgatttctaaaggtacatggccagt

SEQ ID NO: 519554 - DNA, 33 bp, Homo sapien
gagcccaacgatttctgaaggtacatggccagt

SEQ ID NO: 519555 - DNA, 33 bp, Homo sapien
tataggttaaactgtacgctgttactttccaga

SEQ ID NO: 519556 - DNA, 33 bp, Homo sapien
tataggttaaactgtatgctgttactttccaga

SEQ ID NO: 519557 - DNA, 33 bp, Homo sapien
aatagatgggaagacacaacaggtgaaaccaat

SEQ ID NO: 519558 - DNA, 33 bp, Homo sapien
aatagatgggaagacataacaggtgaaaccaat

SEQ ID NO: 519559 - DNA, 33 bp, Homo sapien
tattttctgaagtctcaagactattttaaacaa

SEQ ID NO: 519560 - DNA, 33 bp, Homo sapien
tattttctgaagtctccagactattttaaacaa

SEQ ID NO: 519561 - DNA, 33 bp, Homo sapien
aatgataacatggttgcaaataattaaatatat

SEQ ID NO: 519562 - DNA, 33 bp, Homo sapien
aatgataacatggttggaaataattaaatatat

SEQ ID NO: 519563 - DNA, 33 bp, Homo sapien
acaagcagaaaatcaaaggctgtggatcctttt

SEQ ID NO: 519564 - DNA, 33 bp, Homo sapien
acaagcagaaaatcaagggctgtggatcctttt

SEQ ID NO: 519565 - DNA, 33 bp, Homo sapien
gttcatatttatttgccattctacagtagcctg

SEQ ID NO: 519566 - DNA, 33 bp, Homo sapien
gttcatatttatttgcgattctacagtagcctg

SEQ ID NO: 519567 - DNA, 33 bp, Homo sapien
tacatgcatcctgacactggattattactagtt

SEQ ID NO: 519568 - DNA, 33 bp, Homo sapien
tacatgcatcctgacagtggattattactagtt

SEQ ID NO: 519569 - DNA, 33 bp, Homo sapien
ctccctcctcaggcaccggcacttattttgctc

SEQ ID NO: 519570 - DNA, 33 bp, Homo sapien
ctccctcctcaggcactggcacttattttgctc

SEQ ID NO: 519571 - DNA, 33 bp, Homo sapien
aagaagaaaactgtcaggatccctacttttaca

SEQ ID NO: 519572 - DNA, 33 bp, Homo sapien
aagaagaaaactgtcatgatccctacttttaca

SEQ ID NO: 519573 - DNA, 33 bp, Homo sapien
catgtttaggatggtacgcaatcttccagaatg

SEQ ID NO: 519574 - DNA, 33 bp, Homo sapien
catgtttaggatggtatgcaatcttccagaatg

SEQ ID NO: 519575 - DNA, 33 bp, Homo sapien
tcgtgcagttatactcagaaaagtattccaagt

SEQ ID NO: 519576 - DNA, 33 bp, Homo sapien
tcgtgcagttatactcggaaaagtattccaagt

SEQ ID NO: 519577 - DNA, 33 bp, Homo sapien
tatcaggagaaaatcactgaatatggaaaaacg

SEQ ID NO: 519578 - DNA, 33 bp, Homo sapien
tatcaggagaaaatcattgaatatggaaaaacg

SEQ ID NO: 519579 - DNA, 33 bp, Homo sapien
tttcagtttttgagaaccagcaaaagagtgttg

SEQ ID NO: 519580 - DNA, 33 bp, Homo sapien
tttcagtttttgagaatcagcaaaagagtgttg

SEQ ID NO: 519581 - DNA, 33 bp, Homo sapien
tattaaagggccagataagggacatacttggat

SEQ ID NO: 519582 - DNA, 33 bp, Homo sapien
tattaaagggccagatgagggacatacttggat

SEQ ID NO: 519583 - DNA, 33 bp, Homo sapien
taaaacattgtcaaaaattagtagaagtccacc

SEQ ID NO: 519584 - DNA, 33 bp, Homo sapien
taaaacattgtcaaaagttagtagaagtccacc

SEQ ID NO: 519585 - DNA, 33 bp, Homo sapien
atttaggcagtgaaaaaaatgcaattccagtga

SEQ ID NO: 519586 - DNA, 33 bp, Homo sapien
atttaggcagtgaaaagaatgcaattccagtga

SEQ ID NO: 519587 - DNA, 33 bp, Homo sapien
ttatttgatccaatcaatgaaagcagaagtaga

SEQ ID NO: 519588 - DNA, 33 bp, Homo sapien
ttatttgatccaatcagtgaaagcagaagtaga

SEQ ID NO: 519589 - DNA, 33 bp, Homo sapien
gcatattacacaaaatcactgagaaaagcatga

SEQ ID NO: 519590 - DNA, 33 bp, Homo sapien
gcatattacacaaaattactgagaaaagcatga

SEQ ID NO: 519591 - DNA, 33 bp, Homo sapien
aaatagagattcctaccattccttttctccttc

SEQ ID NO: 519592 - DNA, 33 bp, Homo sapien
aaatagagattcctactattccttttctccttc

SEQ ID NO: 519593 - DNA, 33 bp, Homo sapien
gtgcagaatgtccatcactcaataactgattca

SEQ ID NO: 519594 - DNA, 33 bp, Homo sapien
gtgcagaatgtccatcgctcaataactgattca

SEQ ID NO: 519595 - DNA, 33 bp, Homo sapien
gtcatctttaaagttacctaatgctgttttatg

SEQ ID NO: 519596 - DNA, 33 bp, Homo sapien
gtcatctttaaagttatctaatgctgttttatg

SEQ ID NO: 519597 - DNA, 33 bp, Homo sapien
aattacaaggaagcaaatgggcaaattttccaa

SEQ ID NO: 519598 - DNA, 33 bp, Homo sapien
aattacaaggaagcaagtgggcaaattttccaa

SEQ ID NO: 519599 - DNA, 33 bp, Homo sapien
ttctaaatagattgtacgtcttaacgtttttgt

SEQ ID NO: 519600 - DNA, 33 bp, Homo sapien
ttctaaatagattgtatgtcttaacgtttttgt

SEQ ID NO: 519601 - DNA, 33 bp, Homo sapien
ctataatgaaatagtaagaagcagataaaatga

SEQ ID NO: 519602 - DNA, 33 bp, Homo sapien
ctataatgaaatagtatgaagcagataaaatga

SEQ ID NO: 519603 - DNA, 33 bp, Homo sapien
aactgagaataagaaaacagacttgagcaaaaa

SEQ ID NO: 519604 - DNA, 33 bp, Homo sapien
aactgagaataagaaagcagacttgagcaaaaa

SEQ ID NO: 519605 - DNA, 33 bp, Homo sapien
ttccttttaaaacctacgaaactgagacacaca

SEQ ID NO: 519606 - DNA, 33 bp, Homo sapien
ttccttttaaaacctatgaaactgagacacaca

SEQ ID NO: 519607 - DNA, 33 bp, Homo sapien
caacattcctgtagcaaaagacacgttaacaag

SEQ ID NO: 519608 - DNA, 33 bp, Homo sapien
caacattcctgtagcataagacacgttaacaag

SEQ ID NO: 519609 - DNA, 33 bp, Homo sapien
tatgaactcacaggtaaccaaatatagatacag

SEQ ID NO: 519610 - DNA, 33 bp, Homo sapien
tatgaactcacaggtagccaaatatagatacag

SEQ ID NO: 519611 - DNA, 33 bp, Homo sapien
ttctgctgctgtataaaggtaccttagaaaata

SEQ ID NO: 519612 - DNA, 33 bp, Homo sapien
ttctgctgctgtataagggtaccttagaaaata

SEQ ID NO: 519613 - DNA, 33 bp, Homo sapien
aagtaagtggaatagaaagaacagatattaaaa

SEQ ID NO: 519614 - DNA, 33 bp, Homo sapien
aagtaagtggaatagatagaacagatattaaaa

SEQ ID NO: 519615 - DNA, 33 bp, Homo sapien
tttactacatcactaaacacactctttagtgaa

SEQ ID NO: 519616 - DNA, 33 bp, Homo sapien
tttactacatcactaagcacactctttagtgaa

SEQ ID NO: 519617 - DNA, 33 bp, Homo sapien
tacttaacatatggaacgctggtgtgggatcag

SEQ ID NO: 519618 - DNA, 33 bp, Homo sapien
tacttaacatatggaatgctggtgtgggatcag

SEQ ID NO: 519619 - DNA, 33 bp, Homo sapien
ggtgtagcctgcataaactctgcctaagggagc

SEQ ID NO: 519620 - DNA, 33 bp, Homo sapien
ggtgtagcctgcataacctctgcctaagggagc

SEQ ID NO: 519621 - DNA, 33 bp, Homo sapien
cagtagtttaagtaaaatagtttgcatgacaat

SEQ ID NO: 519622 - DNA, 33 bp, Homo sapien
cagtagtttaagtaaagtagtttgcatgacaat

SEQ ID NO: 519623 - DNA, 33 bp, Homo sapien
ttactttttatttccacgatgttgtgtaaaaca

SEQ ID NO: 519624 - DNA, 33 bp, Homo sapien
ttactttttatttccatgatgttgtgtaaaaca

SEQ ID NO: 519625 - DNA, 33 bp, Homo sapien
tagggcaacttttgacaaataggagatggtttc

SEQ ID NO: 519626 - DNA, 33 bp, Homo sapien
tagggcaacttttgactaataggagatggtttc

SEQ ID NO: 519627 - DNA, 33 bp, Homo sapien
ctttagaccatcactccacgggaaaagtgctcc

SEQ ID NO: 519628 - DNA, 33 bp, Homo sapien
ctttagaccatcactctacgggaaaagtgctcc

SEQ ID NO: 519629 - DNA, 33 bp, Homo sapien
gctgtgcaccattgtaaacattcagaatagcaa

SEQ ID NO: 519630 - DNA, 33 bp, Homo sapien
gctgtgcaccattgtatacattcagaatagcaa

SEQ ID NO: 519631 - DNA, 33 bp, Homo sapien
ctaagcacacatggaaacacttttgtttgtagc

SEQ ID NO: 519632 - DNA, 33 bp, Homo sapien
ctaagcacacatggaaccacttttgtttgtagc

SEQ ID NO: 519633 - DNA, 33 bp, Homo sapien
tggtgaaatattctgaaaacactaaactatttt

SEQ ID NO: 519634 - DNA, 33 bp, Homo sapien
tggtgaaatattctgacaacactaaactatttt

SEQ ID NO: 519635 - DNA, 33 bp, Homo sapien
aatagggatatagataaagatatttttcacagc

SEQ ID NO: 519636 - DNA, 33 bp, Homo sapien
aatagggatatagatagagatatttttcacagc

SEQ ID NO: 519637 - DNA, 33 bp, Homo sapien
tgttttatgtacaccaatatcagtctttgtgat

SEQ ID NO: 519638 - DNA, 33 bp, Homo sapien
tgttttatgtacaccagtatcagtctttgtgat

SEQ ID NO: 519639 - DNA, 33 bp, Homo sapien
atgacagtatgcaaaactgagtgttctgttaag

SEQ ID NO: 519640 - DNA, 33 bp, Homo sapien
atgacagtatgcaaaattgagtgttctgttaag

SEQ ID NO: 519641 - DNA, 33 bp, Homo sapien
gcatactgtcatcaaaaataattccctaagaca

SEQ ID NO: 519642 - DNA, 33 bp, Homo sapien
gcatactgtcatcaaacataattccctaagaca

SEQ ID NO: 519643 - DNA, 33 bp, Homo sapien
acagagtgtgagaagacagataatttatcctta

SEQ ID NO: 519644 - DNA, 33 bp, Homo sapien
acagagtgtgagaagatagataatttatcctta

SEQ ID NO: 519645 - DNA, 33 bp, Homo sapien
ccactgaagtgctggaaagacacagctaaggag

SEQ ID NO: 519646 - DNA, 33 bp, Homo sapien
ccactgaagtgctggagagacacagctaaggag

SEQ ID NO: 519647 - DNA, 33 bp, Homo sapien
taataggcacagaggacgtaagatgactgggta

SEQ ID NO: 519648 - DNA, 33 bp, Homo sapien
taataggcacagaggatgtaagatgactgggta

SEQ ID NO: 519649 - DNA, 33 bp, Homo sapien
aacagaaacaatgaccacagaagaaggaaagag

SEQ ID NO: 519650 - DNA, 33 bp, Homo sapien
aacagaaacaatgaccgcagaagaaggaaagag

SEQ ID NO: 519651 - DNA, 33 bp, Homo sapien
taatgatgctcctgacactcctgttgtattctt

SEQ ID NO: 519652 - DNA, 33 bp, Homo sapien
taatgatgctcctgacgctcctgttgtattctt

SEQ ID NO: 519653 - DNA, 33 bp, Homo sapien
gtgagagtaatcagagcagaaaaagagcacttc

SEQ ID NO: 519654 - DNA, 33 bp, Homo sapien
gtgagagtaatcagaggagaaaaagagcacttc

SEQ ID NO: 519655 - DNA, 33 bp, Homo sapien
tagaaatagtttcttgcagaaagttggtctaaa

SEQ ID NO: 519656 - DNA, 33 bp, Homo sapien
tagaaatagtttcttgtagaaagttggtctaaa

SEQ ID NO: 519657 - DNA, 33 bp, Homo sapien
atgtcagaaatggtacaacacagcacaaatacg

SEQ ID NO: 519658 - DNA, 33 bp, Homo sapien
atgtcagaaatggtacgacacagcacaaatacg

SEQ ID NO: 519659 - DNA, 33 bp, Homo sapien
agtactcacctcgatacgccttgctgctcagaa

SEQ ID NO: 519660 - DNA, 33 bp, Homo sapien
agtactcacctcgatatgccttgctgctcagaa

SEQ ID NO: 519661 - DNA, 33 bp, Homo sapien
tgtacatgttgaacaaacattcagcaaacatta

SEQ ID NO: 519662 - DNA, 33 bp, Homo sapien
tgtacatgttgaacaagcattcagcaaacatta

SEQ ID NO: 519663 - DNA, 33 bp, Homo sapien
catagaaagagaaatacccacctgtaattgttc

SEQ ID NO: 519664 - DNA, 33 bp, Homo sapien
catagaaagagaaatatccacctgtaattgttc

SEQ ID NO: 519665 - DNA, 33 bp, Homo sapien
ttctagatttttgagcagactatttaaagcata

SEQ ID NO: 519666 - DNA, 33 bp, Homo sapien
ttctagatttttgagcggactatttaaagcata

SEQ ID NO: 519667 - DNA, 33 bp, Homo sapien
ttcttttgcatgttaacatctggttgtcccagc

SEQ ID NO: 519668 - DNA, 33 bp, Homo sapien
ttcttttgcatgttaatatctggttgtcccagc

SEQ ID NO: 519669 - DNA, 33 bp, Homo sapien
attggacaacgtgcaacataggactctgattct

SEQ ID NO: 519670 - DNA, 33 bp, Homo sapien
attggacaacgtgcaatataggactctgattct

SEQ ID NO: 519671 - DNA, 33 bp, Homo sapien
cagttttgacacacaacataatctaatctaacc

SEQ ID NO: 519672 - DNA, 33 bp, Homo sapien
cagttttgacacacaatataatctaatctaacc

SEQ ID NO: 519673 - DNA, 33 bp, Homo sapien
acacacacagaagacaaaagcgtctgaacatca

SEQ ID NO: 519674 - DNA, 33 bp, Homo sapien
acacacacagaagacagaagcgtctgaacatca

SEQ ID NO: 519675 - DNA, 33 bp, Homo sapien
gcaaatgccataaactcagtcaaaatacctgat

SEQ ID NO: 519676 - DNA, 33 bp, Homo sapien
gcaaatgccataaactgagtcaaaatacctgat

SEQ ID NO: 519677 - DNA, 33 bp, Homo sapien
tgaagcccaggtcaaacgcgctcattaaaagtg

SEQ ID NO: 519678 - DNA, 33 bp, Homo sapien
tgaagcccaggtcaaaggcgctcattaaaagtg

SEQ ID NO: 519679 - DNA, 33 bp, Homo sapien
tttaataattcattaaagatcacatttatatct

SEQ ID NO: 519680 - DNA, 33 bp, Homo sapien
tttaataattcattaaggatcacatttatatct

SEQ ID NO: 519681 - DNA, 33 bp, Homo sapien
gtatcggtttccagcaatgataaaaatgctaac

SEQ ID NO: 519682 - DNA, 33 bp, Homo sapien
gtatcggtttccagcagtgataaaaatgctaac

SEQ ID NO: 519683 - DNA, 33 bp, Homo sapien
gtgagattgttagtaccctggagcatacctggg

SEQ ID NO: 519684 - DNA, 33 bp, Homo sapien
gtgagattgttagtactctggagcatacctggg

SEQ ID NO: 519685 - DNA, 33 bp, Homo sapien
cagatatttggcatgaagtttccaaaatatcca

SEQ ID NO: 519686 - DNA, 33 bp, Homo sapien
cagatatttggcatgatgtttccaaaatatcca

SEQ ID NO: 519687 - DNA, 33 bp, Homo sapien
aagatacagtggtttaaatggtgataacatttt

SEQ ID NO: 519688 - DNA, 33 bp, Homo sapien
aagatacagtggtttagatggtgataacatttt

SEQ ID NO: 519689 - DNA, 33 bp, Homo sapien
atttgaggagagacagcatgacatccatttcta

SEQ ID NO: 519690 - DNA, 33 bp, Homo sapien
atttgaggagagacagtatgacatccatttcta

SEQ ID NO: 519691 - DNA, 33 bp, Homo sapien
ttattttaacactttaagtagcttacaattttc

SEQ ID NO: 519692 - DNA, 33 bp, Homo sapien
ttattttaacactttacgtagcttacaattttc

SEQ ID NO: 519693 - DNA, 33 bp, Homo sapien
aataaataaataaccacggaatcatttcaaaat

SEQ ID NO: 519694 - DNA, 33 bp, Homo sapien
aataaataaataaccatggaatcatttcaaaat

SEQ ID NO: 519695 - DNA, 33 bp, Homo sapien
tatgaacacctggacaaaattccatttgcatat

SEQ ID NO: 519696 - DNA, 33 bp, Homo sapien
tatgaacacctggacagaattccatttgcatat

SEQ ID NO: 519697 - DNA, 33 bp, Homo sapien
tgccattaagaaacaactcagaggtttaacaag

SEQ ID NO: 519698 - DNA, 33 bp, Homo sapien
tgccattaagaaacaattcagaggtttaacaag

SEQ ID NO: 519699 - DNA, 33 bp, Homo sapien
caagagaaatggaaaacaagatgacgcagttta

SEQ ID NO: 519700 - DNA, 33 bp, Homo sapien
caagagaaatggaaaataagatgacgcagttta

SEQ ID NO: 519701 - DNA, 33 bp, Homo sapien
gtatatggctcccgtgaatgtaatatcagatct

SEQ ID NO: 519702 - DNA, 33 bp, Homo sapien
gtatatggctcccgtggatgtaatatcagatct

SEQ ID NO: 519703 - DNA, 33 bp, Homo sapien
aatatgggcaaggcacaaacactatgcagtgct

SEQ ID NO: 519704 - DNA, 33 bp, Homo sapien
aatatgggcaaggcacgaacactatgcagtgct

SEQ ID NO: 519705 - DNA, 33 bp, Homo sapien
attaatgttagccctcaaattttgttctctttt

SEQ ID NO: 519706 - DNA, 33 bp, Homo sapien
attaatgttagccctccaattttgttctctttt

SEQ ID NO: 519707 - DNA, 33 bp, Homo sapien
gatgctcccataaacaacatgtgatttgatctt

SEQ ID NO: 519708 - DNA, 33 bp, Homo sapien
gatgctcccataaacagcatgtgatttgatctt

SEQ ID NO: 519709 - DNA, 33 bp, Homo sapien
cccaaagagagtgtaacagtgctcttttagctc

SEQ ID NO: 519710 - DNA, 33 bp, Homo sapien
cccaaagagagtgtaatagtgctcttttagctc

SEQ ID NO: 519711 - DNA, 33 bp, Homo sapien
tcttaactggaagacacagtgaagtgtaagaga

SEQ ID NO: 519712 - DNA, 33 bp, Homo sapien
tcttaactggaagacatagtgaagtgtaagaga

SEQ ID NO: 519713 - DNA, 33 bp, Homo sapien
ctcggatagtatccacaaaacagaatcagacag

SEQ ID NO: 519714 - DNA, 33 bp, Homo sapien
ctcggatagtatccacgaaacagaatcagacag

SEQ ID NO: 519715 - DNA, 33 bp, Homo sapien
gggtacacattaaaaaagattagagacgctatc

SEQ ID NO: 519716 - DNA, 33 bp, Homo sapien
gggtacacattaaaaaggattagagacgctatc

SEQ ID NO: 519717 - DNA, 33 bp, Homo sapien
ccatgtgcaaacctagaacagtattactctagg

SEQ ID NO: 519718 - DNA, 33 bp, Homo sapien
ccatgtgcaaacctaggacagtattactctagg

SEQ ID NO: 519719 - DNA, 33 bp, Homo sapien
tgttgcttaccggaaaccttaaagagataggag

SEQ ID NO: 519720 - DNA, 33 bp, Homo sapien
tgttgcttaccggaaatcttaaagagataggag

SEQ ID NO: 519721 - DNA, 33 bp, Homo sapien
aagcagcaaatacagcagacttattgatgagat

SEQ ID NO: 519722 - DNA, 33 bp, Homo sapien
aagcagcaaatacagcggacttattgatgagat

SEQ ID NO: 519723 - DNA, 33 bp, Homo sapien
gcgtgttagatttctccaaagaggtagaacgca

SEQ ID NO: 519724 - DNA, 33 bp, Homo sapien
gcgtgttagatttctctaaagaggtagaacgca

SEQ ID NO: 519725 - DNA, 33 bp, Homo sapien
ttaggagccatggcttaaagaacacctcatata

SEQ ID NO: 519726 - DNA, 33 bp, Homo sapien
ttaggagccatggctttaagaacacctcatata

SEQ ID NO: 519727 - DNA, 33 bp, Homo sapien
caagcatattttatcactcaaatttaggagatg

SEQ ID NO: 519728 - DNA, 33 bp, Homo sapien
caagcatattttatcattcaaatttaggagatg

SEQ ID NO: 519729 - DNA, 33 bp, Homo sapien
tcaagtagttatcaaacgctatgtattaatttc

SEQ ID NO: 519730 - DNA, 33 bp, Homo sapien
tcaagtagttatcaaatgctatgtattaatttc

SEQ ID NO: 519731 - DNA, 33 bp, Homo sapien
agtgtggttccaagagccagttattgtgcaagt

SEQ ID NO: 519732 - DNA, 33 bp, Homo sapien
agtgtggttccaagagtcagttattgtgcaagt

SEQ ID NO: 519733 - DNA, 33 bp, Homo sapien
tcgctcagtggacctacactcacattcatctga

SEQ ID NO: 519734 - DNA, 33 bp, Homo sapien
tcgctcagtggacctatactcacattcatctga

SEQ ID NO: 519735 - DNA, 33 bp, Homo sapien
agtcctttcaggataaaagtcctttaggatatt

SEQ ID NO: 519736 - DNA, 33 bp, Homo sapien
agtcctttcaggataacagtcctttaggatatt

SEQ ID NO: 519737 - DNA, 33 bp, Homo sapien
caaagagagactaataactcaattgggtaacag

SEQ ID NO: 519738 - DNA, 33 bp, Homo sapien
caaagagagactaatacctcaattgggtaacag

SEQ ID NO: 519739 - DNA, 33 bp, Homo sapien
ttcagtgaattcttgcaaatatttttctagtcc

SEQ ID NO: 519740 - DNA, 33 bp, Homo sapien
ttcagtgaattcttgcgaatatttttctagtcc

SEQ ID NO: 519741 - DNA, 33 bp, Homo sapien
cagttcgctggcttaaagaatacttaggggacc

SEQ ID NO: 519742 - DNA, 33 bp, Homo sapien
cagttcgctggcttaaggaatacttaggggacc

SEQ ID NO: 519743 - DNA, 33 bp, Homo sapien
aatataattgattgcaagaaatacataaccctg

SEQ ID NO: 519744 - DNA, 33 bp, Homo sapien
aatataattgattgcaggaaatacataaccctg

SEQ ID NO: 519745 - DNA, 33 bp, Homo sapien
aaaccagggtactttgaagaccttctgaaatct

SEQ ID NO: 519746 - DNA, 33 bp, Homo sapien
aaaccagggtactttggagaccttctgaaatct

SEQ ID NO: 519747 - DNA, 33 bp, Homo sapien
aatattaaaatgagtaacagggacaccctacaa

SEQ ID NO: 519748 - DNA, 33 bp, Homo sapien
aatattaaaatgagtatcagggacaccctacaa

SEQ ID NO: 519749 - DNA, 33 bp, Homo sapien
acagagttctagctaccgcatcataaggagttt

SEQ ID NO: 519750 - DNA, 33 bp, Homo sapien
acagagttctagctactgcatcataaggagttt

SEQ ID NO: 519751 - DNA, 33 bp, Homo sapien
ttatatgaacacacagcattatctaattttcta

SEQ ID NO: 519752 - DNA, 33 bp, Homo sapien
ttatatgaacacacaggattatctaattttcta

SEQ ID NO: 519753 - DNA, 33 bp, Homo sapien
aaagaaatccctcacaaaagtttctctttgaag

SEQ ID NO: 519754 - DNA, 33 bp, Homo sapien
aaagaaatccctcacagaagtttctctttgaag

SEQ ID NO: 519755 - DNA, 33 bp, Homo sapien
gacagaagatctctcaacttccatagagaaaag

SEQ ID NO: 519756 - DNA, 33 bp, Homo sapien
gacagaagatctctcaccttccatagagaaaag

SEQ ID NO: 519757 - DNA, 33 bp, Homo sapien
ttagctaaagggagtaccatgttttacttttga

SEQ ID NO: 519758 - DNA, 33 bp, Homo sapien
ttagctaaagggagtatcatgttttacttttga

SEQ ID NO: 519759 - DNA, 33 bp, Homo sapien
tttcaatatatgtgaaactttgcagttgaacta

SEQ ID NO: 519760 - DNA, 33 bp, Homo sapien
tttcaatatatgtgaacctttgcagttgaacta

SEQ ID NO: 519761 - DNA, 33 bp, Homo sapien
aattagtaagtgcattaaatccaaagaaactca

SEQ ID NO: 519762 - DNA, 33 bp, Homo sapien
aattagtaagtgcattgaatccaaagaaactca

SEQ ID NO: 519763 - DNA, 33 bp, Homo sapien
cagtgcctgctatgtacgaggctgtattcccat

SEQ ID NO: 519764 - DNA, 33 bp, Homo sapien
cagtgcctgctatgtatgaggctgtattcccat

SEQ ID NO: 519765 - DNA, 33 bp, Homo sapien
gtcatttgagttcaaactactgttgtggatatg

SEQ ID NO: 519766 - DNA, 33 bp, Homo sapien
gtcatttgagttcaaagtactgttgtggatatg

SEQ ID NO: 519767 - DNA, 33 bp, Homo sapien
tcctgtcttcaggaaaatgacttcaccttgcgc

SEQ ID NO: 519768 - DNA, 33 bp, Homo sapien
tcctgtcttcaggaaagtgacttcaccttgcgc

SEQ ID NO: 519769 - DNA, 33 bp, Homo sapien
gaatattttaagtattcaaatgcatcctccctc

SEQ ID NO: 519770 - DNA, 33 bp, Homo sapien
gaatattttaagtattgaaatgcatcctccctc

SEQ ID NO: 519771 - DNA, 33 bp, Homo sapien
tcctccctctaagcaacgcataatagacattca

SEQ ID NO: 519772 - DNA, 33 bp, Homo sapien
tcctccctctaagcaatgcataatagacattca

SEQ ID NO: 519773 - DNA, 33 bp, Homo sapien
acagccttttattttgccaaaactgaatgagca

SEQ ID NO: 519774 - DNA, 33 bp, Homo sapien
acagccttttattttgtcaaaactgaatgagca

SEQ ID NO: 519775 - DNA, 33 bp, Homo sapien
ttccatacctctagaaactaaatgtagctggtg

SEQ ID NO: 519776 - DNA, 33 bp, Homo sapien
ttccatacctctagaatctaaatgtagctggtg

SEQ ID NO: 519777 - DNA, 33 bp, Homo sapien
agtggagccatcctatgaaagtctttgaagctt

SEQ ID NO: 519778 - DNA, 33 bp, Homo sapien
agtggagccatcctattaaagtctttgaagctt

SEQ ID NO: 519779 - DNA, 33 bp, Homo sapien
atctggttaaagttcacaacgcagctagacaag

SEQ ID NO: 519780 - DNA, 33 bp, Homo sapien
atctggttaaagttcataacgcagctagacaag

SEQ ID NO: 519781 - DNA, 33 bp, Homo sapien
caacagacttcactcgaaggccaaacagtgctc

SEQ ID NO: 519782 - DNA, 33 bp, Homo sapien
caacagacttcactcggaggccaaacagtgctc

SEQ ID NO: 519783 - DNA, 33 bp, Homo sapien
aacccagaagacattcaaaaactatgaattcat

SEQ ID NO: 519784 - DNA, 33 bp, Homo sapien
aacccagaagacattcgaaaactatgaattcat

SEQ ID NO: 519785 - DNA, 33 bp, Homo sapien
catgccaagccctcaccaagactattctaaaca

SEQ ID NO: 519786 - DNA, 33 bp, Homo sapien
catgccaagccctcactaagactattctaaaca

SEQ ID NO: 519787 - DNA, 33 bp, Homo sapien
ggagttgcctacaaggcccacataatttagccc

SEQ ID NO: 519788 - DNA, 33 bp, Homo sapien
ggagttgcctacaagggccacataatttagccc

SEQ ID NO: 519789 - DNA, 33 bp, Homo sapien
aggacaatctacatagactaaatcacagacatt

SEQ ID NO: 519790 - DNA, 33 bp, Homo sapien
aggacaatctacatagtctaaatcacagacatt

SEQ ID NO: 519791 - DNA, 33 bp, Homo sapien
ctcctagactcaaagaacatttaccaaatgctt

SEQ ID NO: 519792 - DNA, 33 bp, Homo sapien
ctcctagactcaaagagcatttaccaaatgctt

SEQ ID NO: 519793 - DNA, 33 bp, Homo sapien
ccaacgtgaaagaaaacgcaaaaagtagcagaa

SEQ ID NO: 519794 - DNA, 33 bp, Homo sapien
ccaacgtgaaagaaaatgcaaaaagtagcagaa

SEQ ID NO: 519795 - DNA, 33 bp, Homo sapien
aatgatgagttaagaggagcagaatccttgcag

SEQ ID NO: 519796 - DNA, 33 bp, Homo sapien
aatgatgagttaagagtagcagaatccttgcag

SEQ ID NO: 519797 - DNA, 33 bp, Homo sapien
aaattaatctcctacaagtgctactataattaa

SEQ ID NO: 519798 - DNA, 33 bp, Homo sapien
aaattaatctcctacatgtgctactataattaa

SEQ ID NO: 519799 - DNA, 33 bp, Homo sapien
tcaatagccggaatcaatcaagcggaagaaagg

SEQ ID NO: 519800 - DNA, 33 bp, Homo sapien
tcaatagccggaatcagtcaagcggaagaaagg

SEQ ID NO: 519801 - DNA, 33 bp, Homo sapien
attttgtttgattagagtctaagaaatgccaat

SEQ ID NO: 519802 - DNA, 33 bp, Homo sapien
attttgtttgattagattctaagaaatgccaat

SEQ ID NO: 519803 - DNA, 33 bp, Homo sapien
aggaatgtcaaggctacgagagatttaacacac

SEQ ID NO: 519804 - DNA, 33 bp, Homo sapien
aggaatgtcaaggctatgagagatttaacacac

SEQ ID NO: 519805 - DNA, 33 bp, Homo sapien
ggagagccacaactaacacattgcttaattact

SEQ ID NO: 519806 - DNA, 33 bp, Homo sapien
ggagagccacaactaatacattgcttaattact

SEQ ID NO: 519807 - DNA, 33 bp, Homo sapien
tgtgcactaaagtcaactgctatttgctgagga

SEQ ID NO: 519808 - DNA, 33 bp, Homo sapien
tgtgcactaaagtcaagtgctatttgctgagga

SEQ ID NO: 519809 - DNA, 33 bp, Homo sapien
attttcatattaaacaatcttcattacttttct

SEQ ID NO: 519810 - DNA, 33 bp, Homo sapien
attttcatattaaacagtcttcattacttttct

SEQ ID NO: 519811 - DNA, 33 bp, Homo sapien
ggaaatagtaattccacgatgaaaaaatagcct

SEQ ID NO: 519812 - DNA, 33 bp, Homo sapien
ggaaatagtaattccatgatgaaaaaatagcct

SEQ ID NO: 519813 - DNA, 33 bp, Homo sapien
gctttaaaataaaataaattggtctgacacttg

SEQ ID NO: 519814 - DNA, 33 bp, Homo sapien
gctttaaaataaaatagattggtctgacacttg

SEQ ID NO: 519815 - DNA, 33 bp, Homo sapien
tctcccatttcaatagcactagtgatctactcc

SEQ ID NO: 519816 - DNA, 33 bp, Homo sapien
tctcccatttcaataggactagtgatctactcc

SEQ ID NO: 519817 - DNA, 33 bp, Homo sapien
actaaagtaagttctactactcattgtgaaatg

SEQ ID NO: 519818 - DNA, 33 bp, Homo sapien
actaaagtaagttctattactcattgtgaaatg

SEQ ID NO: 519819 - DNA, 33 bp, Homo sapien
tctctcttctaggcaactcatcaaaatctctaa

SEQ ID NO: 519820 - DNA, 33 bp, Homo sapien
tctctcttctaggcaattcatcaaaatctctaa

SEQ ID NO: 519821 - DNA, 33 bp, Homo sapien
ctaatgactaacacaactgagaaactatctgag

SEQ ID NO: 519822 - DNA, 33 bp, Homo sapien
ctaatgactaacacaattgagaaactatctgag

SEQ ID NO: 519823 - DNA, 33 bp, Homo sapien
tgaaaatatacaagacaacgtttttgtgacata

SEQ ID NO: 519824 - DNA, 33 bp, Homo sapien
tgaaaatatacaagactacgtttttgtgacata

SEQ ID NO: 519825 - DNA, 33 bp, Homo sapien
ggagaaacaaataacaagaggacagtagaatga

SEQ ID NO: 519826 - DNA, 33 bp, Homo sapien
ggagaaacaaataacaggaggacagtagaatga

SEQ ID NO: 519827 - DNA, 33 bp, Homo sapien
taggtgtgctcagataacctctttaaacagcaa

SEQ ID NO: 519828 - DNA, 33 bp, Homo sapien
taggtgtgctcagataccctctttaaacagcaa

SEQ ID NO: 519829 - DNA, 33 bp, Homo sapien
aattttcatgttaaaacgcatctcccctaattg

SEQ ID NO: 519830 - DNA, 33 bp, Homo sapien
aattttcatgttaaaatgcatctcccctaattg

SEQ ID NO: 519831 - DNA, 33 bp, Homo sapien
gccacttgttgaatagaagaatggaaacatggt

SEQ ID NO: 519832 - DNA, 33 bp, Homo sapien
gccacttgttgaataggagaatggaaacatggt

SEQ ID NO: 519833 - DNA, 33 bp, Homo sapien
aaaaaaaagaatctaactgctagctgtttatca

SEQ ID NO: 519834 - DNA, 33 bp, Homo sapien
aaaaaaaagaatctaattgctagctgtttatca

SEQ ID NO: 519835 - DNA, 33 bp, Homo sapien
ccctgcaggaaagagacagactgacaaaaagca

SEQ ID NO: 519836 - DNA, 33 bp, Homo sapien
ccctgcaggaaagagatagactgacaaaaagca

SEQ ID NO: 519837 - DNA, 33 bp, Homo sapien
actgccacctaagcaaaatgtgacactagcact

SEQ ID NO: 519838 - DNA, 33 bp, Homo sapien
actgccacctaagcaagatgtgacactagcact

SEQ ID NO: 519839 - DNA, 33 bp, Homo sapien
aacagaccttgtttgaagtttcgtacatatagt

SEQ ID NO: 519840 - DNA, 33 bp, Homo sapien
aacagaccttgtttgaggtttcgtacatatagt

SEQ ID NO: 519841 - DNA, 33 bp, Homo sapien
aagtcattggtgagaacgtgtccaagaacatag

SEQ ID NO: 519842 - DNA, 33 bp, Homo sapien
aagtcattggtgagaatgtgtccaagaacatag

SEQ ID NO: 519843 - DNA, 33 bp, Homo sapien
tatttgccattcctgcacctttttgttctcttt

SEQ ID NO: 519844 - DNA, 33 bp, Homo sapien
tatttgccattcctgcgcctttttgttctcttt

SEQ ID NO: 519845 - DNA, 33 bp, Homo sapien
taacactgagaggtaagaaatttcagaggagag

SEQ ID NO: 519846 - DNA, 33 bp, Homo sapien
taacactgagaggtaataaatttcagaggagag

SEQ ID NO: 519847 - DNA, 33 bp, Homo sapien
ttattctcgatccaggacaataacatctttgct

SEQ ID NO: 519848 - DNA, 33 bp, Homo sapien
ttattctcgatccagggcaataacatctttgct

SEQ ID NO: 519849 - DNA, 33 bp, Homo sapien
gtgccaggtacatagaggatgttcaataaataa

SEQ ID NO: 519850 - DNA, 33 bp, Homo sapien
gtgccaggtacatagatgatgttcaataaataa

SEQ ID NO: 519851 - DNA, 33 bp, Homo sapien
caactgttatacaaccaaggaatttcagccact

SEQ ID NO: 519852 - DNA, 33 bp, Homo sapien
caactgttatacaacccaggaatttcagccact

SEQ ID NO: 519853 - DNA, 33 bp, Homo sapien
acctgtaggaatctccagaaaattatcctgagt

SEQ ID NO: 519854 - DNA, 33 bp, Homo sapien
acctgtaggaatctccggaaaattatcctgagt

SEQ ID NO: 519855 - DNA, 33 bp, Homo sapien
gctgaaaatgattaaaagagagatcaggtatgc

SEQ ID NO: 519856 - DNA, 33 bp, Homo sapien
gctgaaaatgattaaaggagagatcaggtatgc

SEQ ID NO: 519857 - DNA, 33 bp, Homo sapien
tagacgcaacatttcacggcagacaaccatcta

SEQ ID NO: 519858 - DNA, 33 bp, Homo sapien
tagacgcaacatttcatggcagacaaccatcta

SEQ ID NO: 519859 - DNA, 33 bp, Homo sapien
tagtttatagaccattgaaagatccctgtctca

SEQ ID NO: 519860 - DNA, 33 bp, Homo sapien
tagtttatagaccatttaaagatccctgtctca

SEQ ID NO: 519861 - DNA, 33 bp, Homo sapien
gactgatactactttacctgatctaggttcttt

SEQ ID NO: 519862 - DNA, 33 bp, Homo sapien
gactgatactactttatctgatctaggttcttt

SEQ ID NO: 519863 - DNA, 33 bp, Homo sapien
ggaggtgatttgatgtcacactaatgcaagctc

SEQ ID NO: 519864 - DNA, 33 bp, Homo sapien
ggaggtgatttgatgttacactaatgcaagctc

SEQ ID NO: 519865 - DNA, 33 bp, Homo sapien
gatttgttatgcagcactagtaactgaaacagc

SEQ ID NO: 519866 - DNA, 33 bp, Homo sapien
gatttgttatgcagcattagtaactgaaacagc

SEQ ID NO: 519867 - DNA, 33 bp, Homo sapien
tctagaatagtaggacacacaggagaatggctt

SEQ ID NO: 519868 - DNA, 33 bp, Homo sapien
tctagaatagtaggacgcacaggagaatggctt

SEQ ID NO: 519869 - DNA, 33 bp, Homo sapien
gccatatactagaaccaggtaaaaatgcagaac

SEQ ID NO: 519870 - DNA, 33 bp, Homo sapien
gccatatactagaaccgggtaaaaatgcagaac

SEQ ID NO: 519871 - DNA, 33 bp, Homo sapien
agggggctgatttctacggaagttcattacata

SEQ ID NO: 519872 - DNA, 33 bp, Homo sapien
agggggctgatttctatggaagttcattacata

SEQ ID NO: 519873 - DNA, 33 bp, Homo sapien
ataaaagatttgaaaaatggtactcctatacgg

SEQ ID NO: 519874 - DNA, 33 bp, Homo sapien
ataaaagatttgaaaagtggtactcctatacgg

SEQ ID NO: 519875 - DNA, 33 bp, Homo sapien
tatgttgatcttattcactgatatttattctcc

SEQ ID NO: 519876 - DNA, 33 bp, Homo sapien
tatgttgatcttattcgctgatatttattctcc

SEQ ID NO: 519877 - DNA, 33 bp, Homo sapien
aggactgttagaatctaagaaatgtttgtattg

SEQ ID NO: 519878 - DNA, 33 bp, Homo sapien
aggactgttagaatctgagaaatgtttgtattg

SEQ ID NO: 519879 - DNA, 33 bp, Homo sapien
ggcacgctactcacagacctatctccgtccccc

SEQ ID NO: 519880 - DNA, 33 bp, Homo sapien
ggcacgctactcacagtcctatctccgtccccc

SEQ ID NO: 519881 - DNA, 33 bp, Homo sapien
gtgttagttatttgtgcatgaagcttggcttta

SEQ ID NO: 519882 - DNA, 33 bp, Homo sapien
gtgttagttatttgtgtatgaagcttggcttta

SEQ ID NO: 519883 - DNA, 33 bp, Homo sapien
atgagttttagccagactcctcacacttgtttc

SEQ ID NO: 519884 - DNA, 33 bp, Homo sapien
atgagttttagccagattcctcacacttgtttc

SEQ ID NO: 519885 - DNA, 33 bp, Homo sapien
ctgagaaagtggcaataaagtatgcatggatct

SEQ ID NO: 519886 - DNA, 33 bp, Homo sapien
ctgagaaagtggcaatgaagtatgcatggatct

SEQ ID NO: 519887 - DNA, 33 bp, Homo sapien
agccctcgtagagtaacgtcactgttattatca

SEQ ID NO: 519888 - DNA, 33 bp, Homo sapien
agccctcgtagagtaatgtcactgttattatca

SEQ ID NO: 519889 - DNA, 33 bp, Homo sapien
aagcaccacttgactacggggtgaccagggcag

SEQ ID NO: 519890 - DNA, 33 bp, Homo sapien
aagcaccacttgactatggggtgaccagggcag

SEQ ID NO: 519891 - DNA, 33 bp, Homo sapien
tattcatcttccagagactaaatttgaccatta

SEQ ID NO: 519892 - DNA, 33 bp, Homo sapien
tattcatcttccagagtctaaatttgaccatta

SEQ ID NO: 519893 - DNA, 33 bp, Homo sapien
ctggccatgagtgtctcacagctccccttcaga

SEQ ID NO: 519894 - DNA, 33 bp, Homo sapien
ctggccatgagtgtcttacagctccccttcaga

SEQ ID NO: 519895 - DNA, 33 bp, Homo sapien
gctgttctgccaggcacctatgtgttactttga

SEQ ID NO: 519896 - DNA, 33 bp, Homo sapien
gctgttctgccaggcagctatgtgttactttga

SEQ ID NO: 519897 - DNA, 33 bp, Homo sapien
tcaggacacggattaaatcttacatgtctttag

SEQ ID NO: 519898 - DNA, 33 bp, Homo sapien
tcaggacacggattaagtcttacatgtctttag

SEQ ID NO: 519899 - DNA, 33 bp, Homo sapien
gcctacacaacgcccagctgtgatcaaggtgga

SEQ ID NO: 519900 - DNA, 33 bp, Homo sapien
gcctacacaacgcccatctgtgatcaaggtgga

SEQ ID NO: 519901 - DNA, 33 bp, Homo sapien
attgcaccaaataacacgaatttccaacaagag

SEQ ID NO: 519902 - DNA, 33 bp, Homo sapien
attgcaccaaataacatgaatttccaacaagag

SEQ ID NO: 519903 - DNA, 33 bp, Homo sapien
aattcctttccatgcagctggacccagttcttt

SEQ ID NO: 519904 - DNA, 33 bp, Homo sapien
aattcctttccatgcatctggacccagttcttt

SEQ ID NO: 519905 - DNA, 33 bp, Homo sapien
tggaatagctaatgaacagttcaactggggctc

SEQ ID NO: 519906 - DNA, 33 bp, Homo sapien
tggaatagctaatgaatagttcaactggggctc

SEQ ID NO: 519907 - DNA, 33 bp, Homo sapien
tatcttttctttccacacaagattttaggcaac

SEQ ID NO: 519908 - DNA, 33 bp, Homo sapien
tatcttttctttccacgcaagattttaggcaac

SEQ ID NO: 519909 - DNA, 33 bp, Homo sapien
ttttagaaccaggaaaaagtttaggctcagtga

SEQ ID NO: 519910 - DNA, 33 bp, Homo sapien
ttttagaaccaggaaagagtttaggctcagtga

SEQ ID NO: 519911 - DNA, 33 bp, Homo sapien
gcaaaatcggatagacagtcaagttatcaaaca

SEQ ID NO: 519912 - DNA, 33 bp, Homo sapien
gcaaaatcggatagacggtcaagttatcaaaca

SEQ ID NO: 519913 - DNA, 33 bp, Homo sapien
gttagtcaggttaacacactataatgcatcagc

SEQ ID NO: 519914 - DNA, 33 bp, Homo sapien
gttagtcaggttaacatactataatgcatcagc

SEQ ID NO: 519915 - DNA, 33 bp, Homo sapien
tcattcagtgaagcctaaaatacttctagcatt

SEQ ID NO: 519916 - DNA, 33 bp, Homo sapien
tcattcagtgaagcctgaaatacttctagcatt

SEQ ID NO: 519917 - DNA, 33 bp, Homo sapien
cctcaaaaaatatccacagttgtgcacttcatg

SEQ ID NO: 519918 - DNA, 33 bp, Homo sapien
cctcaaaaaatatccatagttgtgcacttcatg

SEQ ID NO: 519919 - DNA, 33 bp, Homo sapien
cagtagtctacaatcactattcctggagagtac

SEQ ID NO: 519920 - DNA, 33 bp, Homo sapien
cagtagtctacaatcattattcctggagagtac

SEQ ID NO: 519921 - DNA, 33 bp, Homo sapien
atttttctgattatacaaagcaatatgggttca

SEQ ID NO: 519922 - DNA, 33 bp, Homo sapien
atttttctgattataccaagcaatatgggttca

SEQ ID NO: 519923 - DNA, 33 bp, Homo sapien
atcactccagaaaaacacaaggtgaaattatgt

SEQ ID NO: 519924 - DNA, 33 bp, Homo sapien
atcactccagaaaaacgcaaggtgaaattatgt

SEQ ID NO: 519925 - DNA, 33 bp, Homo sapien
gggtggtgaaagtatgaatgttcactataatgt

SEQ ID NO: 519926 - DNA, 33 bp, Homo sapien
gggtggtgaaagtatgcatgttcactataatgt

SEQ ID NO: 519927 - DNA, 33 bp, Homo sapien
agagaaaaatgtttaccggaatgtcaggatctg

SEQ ID NO: 519928 - DNA, 33 bp, Homo sapien
agagaaaaatgtttactggaatgtcaggatctg

SEQ ID NO: 519929 - DNA, 33 bp, Homo sapien
aagaaaaattaggcacagtaagacattaccaac

SEQ ID NO: 519930 - DNA, 33 bp, Homo sapien
aagaaaaattaggcacggtaagacattaccaac

SEQ ID NO: 519931 - DNA, 33 bp, Homo sapien
aaggaggccatcaatcagattattgttaccttc

SEQ ID NO: 519932 - DNA, 33 bp, Homo sapien
aaggaggccatcaatcggattattgttaccttc

SEQ ID NO: 519933 - DNA, 33 bp, Homo sapien
tacaaaaattaactcaaagcgtattaaagactt

SEQ ID NO: 519934 - DNA, 33 bp, Homo sapien
tacaaaaattaactcatagcgtattaaagactt

SEQ ID NO: 519935 - DNA, 33 bp, Homo sapien
ttggaccagtttgacacagggcggagtgagtaa

SEQ ID NO: 519936 - DNA, 33 bp, Homo sapien
ttggaccagtttgacatagggcggagtgagtaa

SEQ ID NO: 519937 - DNA, 33 bp, Homo sapien
tgagaacaaggaatcaatctgagagcaaacaga

SEQ ID NO: 519938 - DNA, 33 bp, Homo sapien
tgagaacaaggaatcagtctgagagcaaacaga

SEQ ID NO: 519939 - DNA, 33 bp, Homo sapien
tagcccgaaacagtaaccttgcagcctcatgtc

SEQ ID NO: 519940 - DNA, 33 bp, Homo sapien
tagcccgaaacagtaatcttgcagcctcatgtc

SEQ ID NO: 519941 - DNA, 33 bp, Homo sapien
attaatgacatagagcagatagttgttttttgt

SEQ ID NO: 519942 - DNA, 33 bp, Homo sapien
attaatgacatagagccgatagttgttttttgt

SEQ ID NO: 519943 - DNA, 33 bp, Homo sapien
agaggaacaagtgaaactgaggaatacgtcacc

SEQ ID NO: 519944 - DNA, 33 bp, Homo sapien
agaggaacaagtgaaagtgaggaatacgtcacc

SEQ ID NO: 519945 - DNA, 33 bp, Homo sapien
ctccatgtggttttaacagacctgggccaccag

SEQ ID NO: 519946 - DNA, 33 bp, Homo sapien
ctccatgtggttttaatagacctgggccaccag

SEQ ID NO: 519947 - DNA, 33 bp, Homo sapien
tacatttgcaaactcaaattttgtagtagtgag

SEQ ID NO: 519948 - DNA, 33 bp, Homo sapien
tacatttgcaaactcatattttgtagtagtgag

SEQ ID NO: 519949 - DNA, 33 bp, Homo sapien
gatatggcttgagattaaaaggccaaatcaagc

SEQ ID NO: 519950 - DNA, 33 bp, Homo sapien
gatatggcttgagattgaaaggccaaatcaagc

SEQ ID NO: 519951 - DNA, 33 bp, Homo sapien
gacagtgtaaaggacaaaaattaaccaatattt

SEQ ID NO: 519952 - DNA, 33 bp, Homo sapien
gacagtgtaaaggacacaaattaaccaatattt

SEQ ID NO: 519953 - DNA, 33 bp, Homo sapien
tccatgaaatctttaacctggcggatcccttat

SEQ ID NO: 519954 - DNA, 33 bp, Homo sapien
tccatgaaatctttaagctggcggatcccttat

SEQ ID NO: 519955 - DNA, 33 bp, Homo sapien
atcctaatcacccatcaaagtcaaacccagtgc

SEQ ID NO: 519956 - DNA, 33 bp, Homo sapien
atcctaatcacccatcgaagtcaaacccagtgc

SEQ ID NO: 519957 - DNA, 33 bp, Homo sapien
tgtttactgaggttaaccattcaagccgctgtt

SEQ ID NO: 519958 - DNA, 33 bp, Homo sapien
tgtttactgaggttaatcattcaagccgctgtt

SEQ ID NO: 519959 - DNA, 33 bp, Homo sapien
tccttcctctcagagcagcaaaaaattacatat

SEQ ID NO: 519960 - DNA, 33 bp, Homo sapien
tccttcctctcagagcggcaaaaaattacatat

SEQ ID NO: 519961 - DNA, 33 bp, Homo sapien
gagtaaaaggaaaaagcagaggatatactataa

SEQ ID NO: 519962 - DNA, 33 bp, Homo sapien
gagtaaaaggaaaaaggagaggatatactataa

SEQ ID NO: 519963 - DNA, 33 bp, Homo sapien
aacgatgcaagtattaaagtggtaaaaatgtta

SEQ ID NO: 519964 - DNA, 33 bp, Homo sapien
aacgatgcaagtattacagtggtaaaaatgtta

SEQ ID NO: 519965 - DNA, 33 bp, Homo sapien
gtatatttgactaataagagacactagaaggag

SEQ ID NO: 519966 - DNA, 33 bp, Homo sapien
gtatatttgactaataggagacactagaaggag

SEQ ID NO: 519967 - DNA, 33 bp, Homo sapien
ttgccatttggcattgcagttcctcttactaga

SEQ ID NO: 519968 - DNA, 33 bp, Homo sapien
ttgccatttggcattgtagttcctcttactaga

SEQ ID NO: 519969 - DNA, 33 bp, Homo sapien
tctaagtgtatctctacctttaatttcttcatt

SEQ ID NO: 519970 - DNA, 33 bp, Homo sapien
tctaagtgtatctctagctttaatttcttcatt

SEQ ID NO: 519971 - DNA, 33 bp, Homo sapien
ccttctgtcaacctgacatcctttacatctttt

SEQ ID NO: 519972 - DNA, 33 bp, Homo sapien
ccttctgtcaacctgatatcctttacatctttt

SEQ ID NO: 519973 - DNA, 33 bp, Homo sapien
ttgccatattacctaacgaatgagcctgagatg

SEQ ID NO: 519974 - DNA, 33 bp, Homo sapien
ttgccatattacctaatgaatgagcctgagatg

SEQ ID NO: 519975 - DNA, 33 bp, Homo sapien
aacatattcttcatcaaagatgcactagaaaac

SEQ ID NO: 519976 - DNA, 33 bp, Homo sapien
aacatattcttcatcagagatgcactagaaaac

SEQ ID NO: 519977 - DNA, 33 bp, Homo sapien
aatgacataactatgaatcaaagtcatttgtaa

SEQ ID NO: 519978 - DNA, 33 bp, Homo sapien
aatgacataactatgagtcaaagtcatttgtaa

SEQ ID NO: 519979 - DNA, 33 bp, Homo sapien
ctccgctgacctgttcacttgcccagtatcatc

SEQ ID NO: 519980 - DNA, 33 bp, Homo sapien
ctccgctgacctgttcgcttgcccagtatcatc

SEQ ID NO: 519981 - DNA, 33 bp, Homo sapien
tggcaagttccttcacagagaagagggaaagaa

SEQ ID NO: 519982 - DNA, 33 bp, Homo sapien
tggcaagttccttcacggagaagagggaaagaa

SEQ ID NO: 519983 - DNA, 33 bp, Homo sapien
cataactttgtgcttccagcatgcaacttgatt

SEQ ID NO: 519984 - DNA, 33 bp, Homo sapien
cataactttgtgcttctagcatgcaacttgatt

SEQ ID NO: 519985 - DNA, 33 bp, Homo sapien
ccttgggcttgtgatacatagcaaggaagtatc

SEQ ID NO: 519986 - DNA, 33 bp, Homo sapien
ccttgggcttgtgatatatagcaaggaagtatc

SEQ ID NO: 519987 - DNA, 33 bp, Homo sapien
gcaactccttgtctgaaccctcattgaatacac

SEQ ID NO: 519988 - DNA, 33 bp, Homo sapien
gcaactccttgtctgagccctcattgaatacac

SEQ ID NO: 519989 - DNA, 33 bp, Homo sapien
ggcaaaattccagagacgtgcgctgttcttatc

SEQ ID NO: 519990 - DNA, 33 bp, Homo sapien
ggcaaaattccagagatgtgcgctgttcttatc

SEQ ID NO: 519991 - DNA, 33 bp, Homo sapien
tcagcataaataacaaaagcatactgtgaacag

SEQ ID NO: 519992 - DNA, 33 bp, Homo sapien
tcagcataaataacaagagcatactgtgaacag

SEQ ID NO: 519993 - DNA, 33 bp, Homo sapien
aaaacttgcttcaaatgaatgcatagaagtaaa

SEQ ID NO: 519994 - DNA, 33 bp, Homo sapien
aaaacttgcttcaaattaatgcatagaagtaaa

SEQ ID NO: 519995 - DNA, 33 bp, Homo sapien
cctattgttgagtggaagccttaatgataacat

SEQ ID NO: 519996 - DNA, 33 bp, Homo sapien
cctattgttgagtggaggccttaatgataacat

SEQ ID NO: 519997 - DNA, 33 bp, Homo sapien
caaataagcatcctaacgacgtatctgaagaaa

SEQ ID NO: 519998 - DNA, 33 bp, Homo sapien
caaataagcatcctaatgacgtatctgaagaaa

SEQ ID NO: 519999 - DNA, 33 bp, Homo sapien
taattgaaagatttggaaaatttcatcctggcc

SEQ ID NO: 520000 - DNA, 33 bp, Homo sapien
taattgaaagatttgggaaatttcatcctggcc

SEQ ID NO: 520001 - DNA, 33 bp, Homo sapien
tcccttctattcatgtgaatccctttagcaaac

SEQ ID NO: 520002 - DNA, 33 bp, Homo sapien
tcccttctattcatgttaatccctttagcaaac

SEQ ID NO: 520003 - DNA, 33 bp, Homo sapien
attcaggtgctgttcagtaaaacaatgggagag

SEQ ID NO: 520004 - DNA, 33 bp, Homo sapien
attcaggtgctgttcattaaaacaatgggagag

SEQ ID NO: 520005 - DNA, 33 bp, Homo sapien
gtctctagagccttcaagaatacttatttcaaa

SEQ ID NO: 520006 - DNA, 33 bp, Homo sapien
gtctctagagccttcaggaatacttatttcaaa

SEQ ID NO: 520007 - DNA, 33 bp, Homo sapien
tggatctgcagcaagacgatgcttctgcacttc

SEQ ID NO: 520008 - DNA, 33 bp, Homo sapien
tggatctgcagcaagatgatgcttctgcacttc

SEQ ID NO: 520009 - DNA, 33 bp, Homo sapien
ttttcttggctagaaacgtacactatatgtaaa

SEQ ID NO: 520010 - DNA, 33 bp, Homo sapien
ttttcttggctagaaatgtacactatatgtaaa

SEQ ID NO: 520011 - DNA, 33 bp, Homo sapien
aaataaaatggcactcaaggtggtgtgagcatt

SEQ ID NO: 520012 - DNA, 33 bp, Homo sapien
aaataaaatggcactcgaggtggtgtgagcatt

SEQ ID NO: 520013 - DNA, 33 bp, Homo sapien
tgttctgtctctgttaaatttgttctatccctg

SEQ ID NO: 520014 - DNA, 33 bp, Homo sapien
tgttctgtctctgttagatttgttctatccctg

SEQ ID NO: 520015 - DNA, 33 bp, Homo sapien
agaagactatgtgaaaaaacaaaagatggctct

SEQ ID NO: 520016 - DNA, 33 bp, Homo sapien
agaagactatgtgaaacaacaaaagatggctct

SEQ ID NO: 520017 - DNA, 33 bp, Homo sapien
ccaggcagttcttgcactgagtcctagctctta

SEQ ID NO: 520018 - DNA, 33 bp, Homo sapien
ccaggcagttcttgcattgagtcctagctctta

SEQ ID NO: 520019 - DNA, 33 bp, Homo sapien
ttacagcagtttcaaacctcatattcttagtcc

SEQ ID NO: 520020 - DNA, 33 bp, Homo sapien
ttacagcagtttcaaatctcatattcttagtcc

SEQ ID NO: 520021 - DNA, 33 bp, Homo sapien
tgaatttcttcgggaaagctggatttaacagct

SEQ ID NO: 520022 - DNA, 33 bp, Homo sapien
tgaatttcttcgggaaggctggatttaacagct

SEQ ID NO: 520023 - DNA, 33 bp, Homo sapien
gtttaattgacccaacagcaaggaaattttagt

SEQ ID NO: 520024 - DNA, 33 bp, Homo sapien
gtttaattgacccaacggcaaggaaattttagt

SEQ ID NO: 520025 - DNA, 33 bp, Homo sapien
caccctagcagtcaccaaaatggcaagaagggt

SEQ ID NO: 520026 - DNA, 33 bp, Homo sapien
caccctagcagtcaccgaaatggcaagaagggt

SEQ ID NO: 520027 - DNA, 33 bp, Homo sapien
tttacagaaccgaacactggagcataatggcaa

SEQ ID NO: 520028 - DNA, 33 bp, Homo sapien
tttacagaaccgaacattggagcataatggcaa

SEQ ID NO: 520029 - DNA, 33 bp, Homo sapien
cttcacaaaggtctcacagattggaaattcatc

SEQ ID NO: 520030 - DNA, 33 bp, Homo sapien
cttcacaaaggtctcatagattggaaattcatc

SEQ ID NO: 520031 - DNA, 33 bp, Homo sapien
catttaagaaactgcaagtcaagtctgtatgga

SEQ ID NO: 520032 - DNA, 33 bp, Homo sapien
catttaagaaactgcaggtcaagtctgtatgga

SEQ ID NO: 520033 - DNA, 33 bp, Homo sapien
ttctttgacctttgacagccattaagatttcac

SEQ ID NO: 520034 - DNA, 33 bp, Homo sapien
ttctttgacctttgacggccattaagatttcac

SEQ ID NO: 520035 - DNA, 33 bp, Homo sapien
ttacccaccagtgtcaagctctgaactatttat

SEQ ID NO: 520036 - DNA, 33 bp, Homo sapien
ttacccaccagtgtcaggctctgaactatttat

SEQ ID NO: 520037 - DNA, 33 bp, Homo sapien
ttggttgctttgcagacaatctttgtaccacac

SEQ ID NO: 520038 - DNA, 33 bp, Homo sapien
ttggttgctttgcagataatctttgtaccacac

SEQ ID NO: 520039 - DNA, 33 bp, Homo sapien
aataatgtggatagcaacgtggcatggaggatg

SEQ ID NO: 520040 - DNA, 33 bp, Homo sapien
aataatgtggatagcagcgtggcatggaggatg

SEQ ID NO: 520041 - DNA, 33 bp, Homo sapien
agagttctcatgacaacaaacattcaaaaatta

SEQ ID NO: 520042 - DNA, 33 bp, Homo sapien
agagttctcatgacaataaacattcaaaaatta

SEQ ID NO: 520043 - DNA, 33 bp, Homo sapien
aagggagagaaatggaagcaagaaggccaactt

SEQ ID NO: 520044 - DNA, 33 bp, Homo sapien
aagggagagaaatggacgcaagaaggccaactt

SEQ ID NO: 520045 - DNA, 33 bp, Homo sapien
gaggcaatcgagacttcaaataattggtttact

SEQ ID NO: 520046 - DNA, 33 bp, Homo sapien
gaggcaatcgagactttaaataattggtttact

SEQ ID NO: 520047 - DNA, 33 bp, Homo sapien
gtccagtgaagaaatactacttagacccaacag

SEQ ID NO: 520048 - DNA, 33 bp, Homo sapien
gtccagtgaagaaatagtacttagacccaacag

SEQ ID NO: 520049 - DNA, 33 bp, Homo sapien
aatacatctatgccaacgactagtggttaaatt

SEQ ID NO: 520050 - DNA, 33 bp, Homo sapien
aatacatctatgccaatgactagtggttaaatt

SEQ ID NO: 520051 - DNA, 33 bp, Homo sapien
ccctctaaagctctataactttacaatcacctt

SEQ ID NO: 520052 - DNA, 33 bp, Homo sapien
ccctctaaagctctattactttacaatcacctt

SEQ ID NO: 520053 - DNA, 33 bp, Homo sapien
tggtgatgttttgaaaatacaatcaggaaaaaa

SEQ ID NO: 520054 - DNA, 33 bp, Homo sapien
tggtgatgttttgaaactacaatcaggaaaaaa

SEQ ID NO: 520055 - DNA, 33 bp, Homo sapien
tctatttgaagagctcacttcaacctaacagct

SEQ ID NO: 520056 - DNA, 33 bp, Homo sapien
tctatttgaagagctcgcttcaacctaacagct

SEQ ID NO: 520057 - DNA, 33 bp, Homo sapien
ctggtggaataagacaatcagttcaggagttgt

SEQ ID NO: 520058 - DNA, 33 bp, Homo sapien
ctggtggaataagacactcagttcaggagttgt

SEQ ID NO: 520059 - DNA, 33 bp, Homo sapien
atattggtgagatttaaccgcctcattacttga

SEQ ID NO: 520060 - DNA, 33 bp, Homo sapien
atattggtgagatttagccgcctcattacttga

SEQ ID NO: 520061 - DNA, 33 bp, Homo sapien
ttgagatgaaactgagacaagaaaaatacattt

SEQ ID NO: 520062 - DNA, 33 bp, Homo sapien
ttgagatgaaactgaggcaagaaaaatacattt

SEQ ID NO: 520063 - DNA, 33 bp, Homo sapien
tttacctctgtacaaacaatccaactgggggag

SEQ ID NO: 520064 - DNA, 33 bp, Homo sapien
tttacctctgtacaaataatccaactgggggag

SEQ ID NO: 520065 - DNA, 33 bp, Homo sapien
atcagtggttgtcaagaaaagagaagtatggaa

SEQ ID NO: 520066 - DNA, 33 bp, Homo sapien
atcagtggttgtcaaggaaagagaagtatggaa

SEQ ID NO: 520067 - DNA, 33 bp, Homo sapien
ttttcaaaaacttaccggctatttgaatttcct

SEQ ID NO: 520068 - DNA, 33 bp, Homo sapien
ttttcaaaaacttacctgctatttgaatttcct

SEQ ID NO: 520069 - DNA, 33 bp, Homo sapien
tatgaataagcaataacgatccaacacattcca

SEQ ID NO: 520070 - DNA, 33 bp, Homo sapien
tatgaataagcaataatgatccaacacattcca

SEQ ID NO: 520071 - DNA, 33 bp, Homo sapien
atcataggggtacctgaaaataaattagatgca

SEQ ID NO: 520072 - DNA, 33 bp, Homo sapien
atcataggggtacctggaaataaattagatgca

SEQ ID NO: 520073 - DNA, 33 bp, Homo sapien
acagaaaaaaatttctcacagctatgagtaagc

SEQ ID NO: 520074 - DNA, 33 bp, Homo sapien
acagaaaaaaatttctgacagctatgagtaagc

SEQ ID NO: 520075 - DNA, 33 bp, Homo sapien
tgcctcagttaagtcccgaaataatcagtttac

SEQ ID NO: 520076 - DNA, 33 bp, Homo sapien
tgcctcagttaagtcctgaaataatcagtttac

SEQ ID NO: 520077 - DNA, 33 bp, Homo sapien
ctaagaggccaggaaaaaaaagctcctagatag

SEQ ID NO: 520078 - DNA, 33 bp, Homo sapien
ctaagaggccaggaaagaaaagctcctagatag

SEQ ID NO: 520079 - DNA, 33 bp, Homo sapien
tttagcctttgtataccagtgtttattcaccta

SEQ ID NO: 520080 - DNA, 33 bp, Homo sapien
tttagcctttgtatactagtgtttattcaccta

SEQ ID NO: 520081 - DNA, 33 bp, Homo sapien
ccttttattcacttccacatgagtctatataat

SEQ ID NO: 520082 - DNA, 33 bp, Homo sapien
ccttttattcacttccgcatgagtctatataat

SEQ ID NO: 520083 - DNA, 33 bp, Homo sapien
atgtgggcaaatgcctcaggataaaaaccagcc

SEQ ID NO: 520084 - DNA, 33 bp, Homo sapien
atgtgggcaaatgcctgaggataaaaaccagcc

SEQ ID NO: 520085 - DNA, 33 bp, Homo sapien
gagaaccattgatgtaagggttaggaagaagac

SEQ ID NO: 520086 - DNA, 33 bp, Homo sapien
gagaaccattgatgtaggggttaggaagaagac

SEQ ID NO: 520087 - DNA, 33 bp, Homo sapien
tgacatttcgagtgagacctaagatctttaagg

SEQ ID NO: 520088 - DNA, 33 bp, Homo sapien
tgacatttcgagtgaggcctaagatctttaagg

SEQ ID NO: 520089 - DNA, 33 bp, Homo sapien
caaaaataggtgagtacggttcaataaaatatt

SEQ ID NO: 520090 - DNA, 33 bp, Homo sapien
caaaaataggtgagtatggttcaataaaatatt

SEQ ID NO: 520091 - DNA, 33 bp, Homo sapien
aagtaacttattctcacgtccagacctttaacc

SEQ ID NO: 520092 - DNA, 33 bp, Homo sapien
aagtaacttattctcatgtccagacctttaacc

SEQ ID NO: 520093 - DNA, 33 bp, Homo sapien
tagttatctataaggaatactgttacaggtagg

SEQ ID NO: 520094 - DNA, 33 bp, Homo sapien
tagttatctataaggagtactgttacaggtagg

SEQ ID NO: 520095 - DNA, 33 bp, Homo sapien
agatgttctttgttaacatgacacaaaggcaaa

SEQ ID NO: 520096 - DNA, 33 bp, Homo sapien
agatgttctttgttaatatgacacaaaggcaaa

SEQ ID NO: 520097 - DNA, 33 bp, Homo sapien
gcttctcagattaactgagcttaaaaataatta

SEQ ID NO: 520098 - DNA, 33 bp, Homo sapien
gcttctcagattaacttagcttaaaaataatta

SEQ ID NO: 520099 - DNA, 33 bp, Homo sapien
tggcgaccattctttaagggctatagtggaata

SEQ ID NO: 520100 - DNA, 33 bp, Homo sapien
tggcgaccattctttaggggctatagtggaata

SEQ ID NO: 520101 - DNA, 33 bp, Homo sapien
atgctcaaataaagtgacacgaacacaaaagct

SEQ ID NO: 520102 - DNA, 33 bp, Homo sapien
atgctcaaataaagtggcacgaacacaaaagct

SEQ ID NO: 520103 - DNA, 33 bp, Homo sapien
agagcaaaggatcaaaaaagacaaaggacagat

SEQ ID NO: 520104 - DNA, 33 bp, Homo sapien
agagcaaaggatcaaacaagacaaaggacagat

SEQ ID NO: 520105 - DNA, 33 bp, Homo sapien
ggtgtcatcttggaagactatctacaacctctc

SEQ ID NO: 520106 - DNA, 33 bp, Homo sapien
ggtgtcatcttggaagtctatctacaacctctc

SEQ ID NO: 520107 - DNA, 33 bp, Homo sapien
tcttaaggctgacttaaaatgtaacatattata

SEQ ID NO: 520108 - DNA, 33 bp, Homo sapien
tcttaaggctgacttagaatgtaacatattata

SEQ ID NO: 520109 - DNA, 33 bp, Homo sapien
cagttgtatgctcctacgtcaacataatcagtt

SEQ ID NO: 520110 - DNA, 33 bp, Homo sapien
cagttgtatgctcctatgtcaacataatcagtt

SEQ ID NO: 520111 - DNA, 33 bp, Homo sapien
atttgaaagcacctgaagcaaatgaatgaatat

SEQ ID NO: 520112 - DNA, 33 bp, Homo sapien
atttgaaagcacctgaggcaaatgaatgaatat

SEQ ID NO: 520113 - DNA, 33 bp, Homo sapien
ggatgaatggaggatgaatagatgaataataaa

SEQ ID NO: 520114 - DNA, 33 bp, Homo sapien
ggatgaatggaggatggatagatgaataataaa

SEQ ID NO: 520115 - DNA, 33 bp, Homo sapien
tttggtcactctctaacatgtcttcaaataatt

SEQ ID NO: 520116 - DNA, 33 bp, Homo sapien
tttggtcactctctaatatgtcttcaaataatt

SEQ ID NO: 520117 - DNA, 33 bp, Homo sapien
aatgtctcatgtaaacaaacaggaaagcataga

SEQ ID NO: 520118 - DNA, 33 bp, Homo sapien
aatgtctcatgtaaacgaacaggaaagcataga

SEQ ID NO: 520119 - DNA, 33 bp, Homo sapien
agagacaggaaaagaaataggtggaagacattt

SEQ ID NO: 520120 - DNA, 33 bp, Homo sapien
agagacaggaaaagaattaggtggaagacattt

SEQ ID NO: 520121 - DNA, 33 bp, Homo sapien
gcactcctcctgttaacggatgaggttgattag

SEQ ID NO: 520122 - DNA, 33 bp, Homo sapien
gcactcctcctgttaatggatgaggttgattag

SEQ ID NO: 520123 - DNA, 33 bp, Homo sapien
ttgttatcccgggacaaaaagttagcttctatg

SEQ ID NO: 520124 - DNA, 33 bp, Homo sapien
ttgttatcccgggacagaaagttagcttctatg

SEQ ID NO: 520125 - DNA, 33 bp, Homo sapien
ggtggaggctttcttacaacaggctgccacccc

SEQ ID NO: 520126 - DNA, 33 bp, Homo sapien
ggtggaggctttcttataacaggctgccacccc

SEQ ID NO: 520127 - DNA, 33 bp, Homo sapien
ccatttatccttcaccaatggccctattttaag

SEQ ID NO: 520128 - DNA, 33 bp, Homo sapien
ccatttatccttcaccgatggccctattttaag

SEQ ID NO: 520129 - DNA, 33 bp, Homo sapien
gttgataatctgacatcaagaaaacaaaaaggg

SEQ ID NO: 520130 - DNA, 33 bp, Homo sapien
gttgataatctgacatgaagaaaacaaaaaggg

SEQ ID NO: 520131 - DNA, 33 bp, Homo sapien
cattttctttctgtaaccttgttttgaacttct

SEQ ID NO: 520132 - DNA, 33 bp, Homo sapien
cattttctttctgtaatcttgttttgaacttct

SEQ ID NO: 520133 - DNA, 33 bp, Homo sapien
taaagcgcatgaagaactgaattcccaaaattg

SEQ ID NO: 520134 - DNA, 33 bp, Homo sapien
taaagcgcatgaagaattgaattcccaaaattg

SEQ ID NO: 520135 - DNA, 33 bp, Homo sapien
ttaacccaggatatgccaggccaagccaggccc

SEQ ID NO: 520136 - DNA, 33 bp, Homo sapien
ttaacccaggatatgctaggccaagccaggccc

SEQ ID NO: 520137 - DNA, 33 bp, Homo sapien
tgcttctcagcatgacaaactcttccttaaaac

SEQ ID NO: 520138 - DNA, 33 bp, Homo sapien
tgcttctcagcatgacgaactcttccttaaaac

SEQ ID NO: 520139 - DNA, 33 bp, Homo sapien
cccagaatctagcataatacttggttcatagtt

SEQ ID NO: 520140 - DNA, 33 bp, Homo sapien
cccagaatctagcatagtacttggttcatagtt

SEQ ID NO: 520141 - DNA, 33 bp, Homo sapien
agcgaggactaaatgacggaaacacttggacat

SEQ ID NO: 520142 - DNA, 33 bp, Homo sapien
agcgaggactaaatgatggaaacacttggacat

SEQ ID NO: 520143 - DNA, 33 bp, Homo sapien
catttttgcattattacattcactgtcattagg

SEQ ID NO: 520144 - DNA, 33 bp, Homo sapien
catttttgcattattatattcactgtcattagg

SEQ ID NO: 520145 - DNA, 33 bp, Homo sapien
tcatatcagttcatcccagaaacattgaagata

SEQ ID NO: 520146 - DNA, 33 bp, Homo sapien
tcatatcagttcatcctagaaacattgaagata

SEQ ID NO: 520147 - DNA, 33 bp, Homo sapien
tgcaatttctgatagtaacctttctttgacttt

SEQ ID NO: 520148 - DNA, 33 bp, Homo sapien
tgcaatttctgatagtgacctttctttgacttt

SEQ ID NO: 520149 - DNA, 33 bp, Homo sapien
tgaccaagtaacttcaaatttatctgtggaaat

SEQ ID NO: 520150 - DNA, 33 bp, Homo sapien
tgaccaagtaacttcacatttatctgtggaaat

SEQ ID NO: 520151 - DNA, 33 bp, Homo sapien
agcggaactgacataaatagatgctggcacatg

SEQ ID NO: 520152 - DNA, 33 bp, Homo sapien
agcggaactgacataagtagatgctggcacatg

SEQ ID NO: 520153 - DNA, 33 bp, Homo sapien
aaggaataacgttgtaagaatagacaaaagata

SEQ ID NO: 520154 - DNA, 33 bp, Homo sapien
aaggaataacgttgtaggaatagacaaaagata

SEQ ID NO: 520155 - DNA, 33 bp, Homo sapien
atatctgttctatctgaagttcatctgaaagga

SEQ ID NO: 520156 - DNA, 33 bp, Homo sapien
atatctgttctatctgcagttcatctgaaagga

SEQ ID NO: 520157 - DNA, 33 bp, Homo sapien
aagatggccatactaccagaaacagtttacaga

SEQ ID NO: 520158 - DNA, 33 bp, Homo sapien
aagatggccatactactagaaacagtttacaga

SEQ ID NO: 520159 - DNA, 33 bp, Homo sapien
acaaagataaataagacaagggatgtgtgtata

SEQ ID NO: 520160 - DNA, 33 bp, Homo sapien
acaaagataaataagataagggatgtgtgtata

SEQ ID NO: 520161 - DNA, 33 bp, Homo sapien
ctgagtagacaaaacactagtaatgcacagata

SEQ ID NO: 520162 - DNA, 33 bp, Homo sapien
ctgagtagacaaaacagtagtaatgcacagata

SEQ ID NO: 520163 - DNA, 33 bp, Homo sapien
aagaaaatcaagttgccaaaattcaatccacca

SEQ ID NO: 520164 - DNA, 33 bp, Homo sapien
aagaaaatcaagttgctaaaattcaatccacca

SEQ ID NO: 520165 - DNA, 33 bp, Homo sapien
accaaaagccatttccagagactaatttgcatt

SEQ ID NO: 520166 - DNA, 33 bp, Homo sapien
accaaaagccatttccggagactaatttgcatt

SEQ ID NO: 520167 - DNA, 33 bp, Homo sapien
atcttgtattcttgtacgatcacaagccaggag

SEQ ID NO: 520168 - DNA, 33 bp, Homo sapien
atcttgtattcttgtatgatcacaagccaggag

SEQ ID NO: 520169 - DNA, 33 bp, Homo sapien
tataaaacttacactaaaggagcaactaattta

SEQ ID NO: 520170 - DNA, 33 bp, Homo sapien
tataaaacttacactacaggagcaactaattta

SEQ ID NO: 520171 - DNA, 33 bp, Homo sapien
ctagggccaggcaaataatatcagtaagtaaag

SEQ ID NO: 520172 - DNA, 33 bp, Homo sapien
ctagggccaggcaaattatatcagtaagtaaag

SEQ ID NO: 520173 - DNA, 33 bp, Homo sapien
tacttcggtgattaaaagtcaggaacatttaaa

SEQ ID NO: 520174 - DNA, 33 bp, Homo sapien
tacttcggtgattaaaggtcaggaacatttaaa

SEQ ID NO: 520175 - DNA, 33 bp, Homo sapien
ctgactcatgtgctaaagccttttcaaggcaca

SEQ ID NO: 520176 - DNA, 33 bp, Homo sapien
ctgactcatgtgctaaggccttttcaaggcaca

SEQ ID NO: 520177 - DNA, 33 bp, Homo sapien
agcaccacatggtaagccaactagataaccaaa

SEQ ID NO: 520178 - DNA, 33 bp, Homo sapien
agcaccacatggtaagtcaactagataaccaaa

SEQ ID NO: 520179 - DNA, 33 bp, Homo sapien
aaggctaaattgttgacgcttattccagaaggt

SEQ ID NO: 520180 - DNA, 33 bp, Homo sapien
aaggctaaattgttgatgcttattccagaaggt

SEQ ID NO: 520181 - DNA, 33 bp, Homo sapien
tacagactacagacttcaaacagaaagcgtagg

SEQ ID NO: 520182 - DNA, 33 bp, Homo sapien
tacagactacagacttgaaacagaaagcgtagg

SEQ ID NO: 520183 - DNA, 33 bp, Homo sapien
agattgttgttctcaaaggactcctttagtcag

SEQ ID NO: 520184 - DNA, 33 bp, Homo sapien
agattgttgttctcaatggactcctttagtcag

SEQ ID NO: 520185 - DNA, 33 bp, Homo sapien
gtttaaaagtcttgaaagcttgtatccacatat

SEQ ID NO: 520186 - DNA, 33 bp, Homo sapien
gtttaaaagtcttgaaggcttgtatccacatat

SEQ ID NO: 520187 - DNA, 33 bp, Homo sapien
ccaggtaaatggtcagaaaagagaaaaggagag

SEQ ID NO: 520188 - DNA, 33 bp, Homo sapien
ccaggtaaatggtcaggaaagagaaaaggagag

SEQ ID NO: 520189 - DNA, 33 bp, Homo sapien
gcatttcatttaatccacacagtaaccagcaag

SEQ ID NO: 520190 - DNA, 33 bp, Homo sapien
gcatttcatttaatccgcacagtaaccagcaag

SEQ ID NO: 520191 - DNA, 33 bp, Homo sapien
aacatcatctagaacacctataattttcatgtc

SEQ ID NO: 520192 - DNA, 33 bp, Homo sapien
aacatcatctagaacatctataattttcatgtc

SEQ ID NO: 520193 - DNA, 33 bp, Homo sapien
gcaaggggaggtgtgcaaagctgtcctggattc

SEQ ID NO: 520194 - DNA, 33 bp, Homo sapien
gcaaggggaggtgtgcgaagctgtcctggattc

SEQ ID NO: 520195 - DNA, 33 bp, Homo sapien
atgaagtccagttagagtacaactaaatcaagg

SEQ ID NO: 520196 - DNA, 33 bp, Homo sapien
atgaagtccagttagattacaactaaatcaagg

SEQ ID NO: 520197 - DNA, 33 bp, Homo sapien
tttaggattactcttacgatcttttgtcctgag

SEQ ID NO: 520198 - DNA, 33 bp, Homo sapien
tttaggattactcttaggatcttttgtcctgag

SEQ ID NO: 520199 - DNA, 33 bp, Homo sapien
taaaacacctaacaaaagatttaagttgcatcc

SEQ ID NO: 520200 - DNA, 33 bp, Homo sapien
taaaacacctaacaaaggatttaagttgcatcc

SEQ ID NO: 520201 - DNA, 33 bp, Homo sapien
tcgtcacctgctggtaaccttccttgacccctc

SEQ ID NO: 520202 - DNA, 33 bp, Homo sapien
tcgtcacctgctggtagccttccttgacccctc

SEQ ID NO: 520203 - DNA, 33 bp, Homo sapien
ataggccctgactttacaaagcacttcacaagt

SEQ ID NO: 520204 - DNA, 33 bp, Homo sapien
ataggccctgactttagaaagcacttcacaagt

SEQ ID NO: 520205 - DNA, 33 bp, Homo sapien
tattttgaattgatacagtaggaatataatcct

SEQ ID NO: 520206 - DNA, 33 bp, Homo sapien
tattttgaattgatacggtaggaatataatcct

SEQ ID NO: 520207 - DNA, 33 bp, Homo sapien
tttctacgcggtcaaacaaaactcatcccttac

SEQ ID NO: 520208 - DNA, 33 bp, Homo sapien
tttctacgcggtcaaataaaactcatcccttac

SEQ ID NO: 520209 - DNA, 33 bp, Homo sapien
gttcaggtcaaacatcgagctcaatatagttaa

SEQ ID NO: 520210 - DNA, 33 bp, Homo sapien
gttcaggtcaaacatctagctcaatatagttaa

SEQ ID NO: 520211 - DNA, 33 bp, Homo sapien
tcaatttctctgtcaacttcattctatgtttat

SEQ ID NO: 520212 - DNA, 33 bp, Homo sapien
tcaatttctctgtcaatttcattctatgtttat

SEQ ID NO: 520213 - DNA, 33 bp, Homo sapien
tctttcagctgtaagaacagagaactccttaaa

SEQ ID NO: 520214 - DNA, 33 bp, Homo sapien
tctttcagctgtaagagcagagaactccttaaa

SEQ ID NO: 520215 - DNA, 33 bp, Homo sapien
gtccccaaatgcctggcagaaacaaatgaaaat

SEQ ID NO: 520216 - DNA, 33 bp, Homo sapien
gtccccaaatgcctggtagaaacaaatgaaaat

SEQ ID NO: 520217 - DNA, 33 bp, Homo sapien
cttggccaatgtctcaagtttcatccatattgt

SEQ ID NO: 520218 - DNA, 33 bp, Homo sapien
cttggccaatgtctcaggtttcatccatattgt

SEQ ID NO: 520219 - DNA, 33 bp, Homo sapien
tcaagacccattgctacgctaccttcaagggac

SEQ ID NO: 520220 - DNA, 33 bp, Homo sapien
tcaagacccattgctatgctaccttcaagggac

SEQ ID NO: 520221 - DNA, 33 bp, Homo sapien
accatgcaggagcataagaagcaatgttaaacc

SEQ ID NO: 520222 - DNA, 33 bp, Homo sapien
accatgcaggagcataggaagcaatgttaaacc

SEQ ID NO: 520223 - DNA, 33 bp, Homo sapien
gaactgacaaccactacgctgggaatttcctct

SEQ ID NO: 520224 - DNA, 33 bp, Homo sapien
gaactgacaaccactatgctgggaatttcctct

SEQ ID NO: 520225 - DNA, 33 bp, Homo sapien
ccctcattccttcaaaatggtcatctgataaat

SEQ ID NO: 520226 - DNA, 33 bp, Homo sapien
ccctcattccttcaaactggtcatctgataaat

SEQ ID NO: 520227 - DNA, 33 bp, Homo sapien
aaatctgtttaagtcccatgtgtacagtgcacc

SEQ ID NO: 520228 - DNA, 33 bp, Homo sapien
aaatctgtttaagtcctatgtgtacagtgcacc

SEQ ID NO: 520229 - DNA, 33 bp, Homo sapien
gattagattcctataacatcggagctggcacag

SEQ ID NO: 520230 - DNA, 33 bp, Homo sapien
gattagattcctataagatcggagctggcacag

SEQ ID NO: 520231 - DNA, 33 bp, Homo sapien
atctatttctaatcaactcatatggtagccaat

SEQ ID NO: 520232 - DNA, 33 bp, Homo sapien
atctatttctaatcaagtcatatggtagccaat

SEQ ID NO: 520233 - DNA, 33 bp, Homo sapien
caggagttcattgtcaaagggtagcaaatagtc

SEQ ID NO: 520234 - DNA, 33 bp, Homo sapien
caggagttcattgtcagagggtagcaaatagtc

SEQ ID NO: 520235 - DNA, 33 bp, Homo sapien
gacttaagatacctcacaaaagacatgagatta

SEQ ID NO: 520236 - DNA, 33 bp, Homo sapien
gacttaagatacctcagaaaagacatgagatta

SEQ ID NO: 520237 - DNA, 33 bp, Homo sapien
attctacaatatggcacaatagaactatttgtc

SEQ ID NO: 520238 - DNA, 33 bp, Homo sapien
attctacaatatggcagaatagaactatttgtc

SEQ ID NO: 520239 - DNA, 33 bp, Homo sapien
gatattggactttagaactgatgctggaatggg

SEQ ID NO: 520240 - DNA, 33 bp, Homo sapien
gatattggactttagagctgatgctggaatggg

SEQ ID NO: 520241 - DNA, 33 bp, Homo sapien
gatggagagatctagacgctggtgccccgttgt

SEQ ID NO: 520242 - DNA, 33 bp, Homo sapien
gatggagagatctagatgctggtgccccgttgt

SEQ ID NO: 520243 - DNA, 33 bp, Homo sapien
gcagtttcagcagtagcaatggtattgaagaga

SEQ ID NO: 520244 - DNA, 33 bp, Homo sapien
gcagtttcagcagtagtaatggtattgaagaga

SEQ ID NO: 520245 - DNA, 33 bp, Homo sapien
tctcagcgatgttagcaaaggtggattgagcac

SEQ ID NO: 520246 - DNA, 33 bp, Homo sapien
tctcagcgatgttagcgaaggtggattgagcac

SEQ ID NO: 520247 - DNA, 33 bp, Homo sapien
agtattcctgaatcgacgctcctaacaatgtct

SEQ ID NO: 520248 - DNA, 33 bp, Homo sapien
agtattcctgaatcgatgctcctaacaatgtct

SEQ ID NO: 520249 - DNA, 33 bp, Homo sapien
aaatgaagtactgtcaaatgctaccacttggat

SEQ ID NO: 520250 - DNA, 33 bp, Homo sapien
aaatgaagtactgtcagatgctaccacttggat

SEQ ID NO: 520251 - DNA, 33 bp, Homo sapien
catgaaagagcaaaacacagcagtaaaggtaat

SEQ ID NO: 520252 - DNA, 33 bp, Homo sapien
catgaaagagcaaaacgcagcagtaaaggtaat

SEQ ID NO: 520253 - DNA, 33 bp, Homo sapien
ccaaatagcatcgatacaagcgagaatgttata

SEQ ID NO: 520254 - DNA, 33 bp, Homo sapien
ccaaatagcatcgatataagcgagaatgttata

SEQ ID NO: 520255 - DNA, 33 bp, Homo sapien
aacagaagaaatgtagaaaaaaggtacacatac

SEQ ID NO: 520256 - DNA, 33 bp, Homo sapien
aacagaagaaatgtaggaaaaaggtacacatac

SEQ ID NO: 520257 - DNA, 33 bp, Homo sapien
cactttgatatatggaaagtctattgtgtgcta

SEQ ID NO: 520258 - DNA, 33 bp, Homo sapien
cactttgatatatggagagtctattgtgtgcta

SEQ ID NO: 520259 - DNA, 33 bp, Homo sapien
ggtagggttggttatccagagtccgttccttcc

SEQ ID NO: 520260 - DNA, 33 bp, Homo sapien
ggtagggttggttatctagagtccgttccttcc

SEQ ID NO: 520261 - DNA, 33 bp, Homo sapien
gagacagttaagtcagaaaagattctcttagat

SEQ ID NO: 520262 - DNA, 33 bp, Homo sapien
gagacagttaagtcagtaaagattctcttagat

SEQ ID NO: 520263 - DNA, 33 bp, Homo sapien
gctcagagactggtataacctttgcaagctgaa

SEQ ID NO: 520264 - DNA, 33 bp, Homo sapien
gctcagagactggtatgacctttgcaagctgaa

SEQ ID NO: 520265 - DNA, 33 bp, Homo sapien
gtcttctgtagtatcaaccttgttcttcatcct

SEQ ID NO: 520266 - DNA, 33 bp, Homo sapien
gtcttctgtagtatcatccttgttcttcatcct

SEQ ID NO: 520267 - DNA, 33 bp, Homo sapien
gataaggagctagccaaggtagtgtgtgtgtgt

SEQ ID NO: 520268 - DNA, 33 bp, Homo sapien
gataaggagctagccagggtagtgtgtgtgtgt

SEQ ID NO: 520269 - DNA, 33 bp, Homo sapien
tactgagcaaactgtaaaacaacaataaaggat

SEQ ID NO: 520270 - DNA, 33 bp, Homo sapien
tactgagcaaactgtacaacaacaataaaggat

SEQ ID NO: 520271 - DNA, 33 bp, Homo sapien
tcctcttggggaagcccggaaggatgtggctct

SEQ ID NO: 520272 - DNA, 33 bp, Homo sapien
tcctcttggggaagcctggaaggatgtggctct

SEQ ID NO: 520273 - DNA, 33 bp, Homo sapien
aacagacctgagtttaagtaacttgaaggaagt

SEQ ID NO: 520274 - DNA, 33 bp, Homo sapien
aacagacctgagtttacgtaacttgaaggaagt

SEQ ID NO: 520275 - DNA, 33 bp, Homo sapien
cctgactccattagcccaaatattgacattagt

SEQ ID NO: 520276 - DNA, 33 bp, Homo sapien
cctgactccattagcctaaatattgacattagt

SEQ ID NO: 520277 - DNA, 33 bp, Homo sapien
tattagtcataattaactaagcagctactatgg

SEQ ID NO: 520278 - DNA, 33 bp, Homo sapien
tattagtcataattaagtaagcagctactatgg

SEQ ID NO: 520279 - DNA, 33 bp, Homo sapien
atgaaatcagacaagacctctgtttgaagtttt

SEQ ID NO: 520280 - DNA, 33 bp, Homo sapien
atgaaatcagacaagatctctgtttgaagtttt

SEQ ID NO: 520281 - DNA, 33 bp, Homo sapien
gagctttgaattgaaaatgagctccagcctggg

SEQ ID NO: 520282 - DNA, 33 bp, Homo sapien
gagctttgaattgaaattgagctccagcctggg

SEQ ID NO: 520283 - DNA, 33 bp, Homo sapien
tcatgatttagagcaactaagtgttctcaagag

SEQ ID NO: 520284 - DNA, 33 bp, Homo sapien
tcatgatttagagcaagtaagtgttctcaagag

SEQ ID NO: 520285 - DNA, 33 bp, Homo sapien
caagttttggagcaatcaccgatagttactggc

SEQ ID NO: 520286 - DNA, 33 bp, Homo sapien
caagttttggagcaattaccgatagttactggc

SEQ ID NO: 520287 - DNA, 33 bp, Homo sapien
gagatgttttcaacacaataccaatgatgtaat

SEQ ID NO: 520288 - DNA, 33 bp, Homo sapien
gagatgttttcaacacgataccaatgatgtaat

SEQ ID NO: 520289 - DNA, 33 bp, Homo sapien
cagcaattttccacgaataaattcttctcaggt

SEQ ID NO: 520290 - DNA, 33 bp, Homo sapien
cagcaattttccacgagtaaattcttctcaggt

SEQ ID NO: 520291 - DNA, 33 bp, Homo sapien
aacagcacattgagaccccaaaatcctgatggt

SEQ ID NO: 520292 - DNA, 33 bp, Homo sapien
aacagcacattgagactccaaaatcctgatggt

SEQ ID NO: 520293 - DNA, 33 bp, Homo sapien
agtcagacattatcaaaaaatcaaatcatcatc

SEQ ID NO: 520294 - DNA, 33 bp, Homo sapien
agtcagacattatcaacaaatcaaatcatcatc

SEQ ID NO: 520295 - DNA, 33 bp, Homo sapien
atgccatatcccagaaataaattccaaagggtt

SEQ ID NO: 520296 - DNA, 33 bp, Homo sapien
atgccatatcccagaagtaaattccaaagggtt

SEQ ID NO: 520297 - DNA, 33 bp, Homo sapien
ttccggctactttttccataatttgatttgcaa

SEQ ID NO: 520298 - DNA, 33 bp, Homo sapien
ttccggctactttttctataatttgatttgcaa

SEQ ID NO: 520299 - DNA, 33 bp, Homo sapien
aagggagtgtccataaacataactctaatcatg

SEQ ID NO: 520300 - DNA, 33 bp, Homo sapien
aagggagtgtccataaccataactctaatcatg

SEQ ID NO: 520301 - DNA, 33 bp, Homo sapien
agtgcctggatcatcacaagtgctcaataaata

SEQ ID NO: 520302 - DNA, 33 bp, Homo sapien
agtgcctggatcatcataagtgctcaataaata

SEQ ID NO: 520303 - DNA, 33 bp, Homo sapien
ctactcaaaaaactctaaacagctctgcctacc

SEQ ID NO: 520304 - DNA, 33 bp, Homo sapien
ctactcaaaaaactcttaacagctctgcctacc

SEQ ID NO: 520305 - DNA, 33 bp, Homo sapien
ggcttggacaggaagacagcaagaacaaggcag

SEQ ID NO: 520306 - DNA, 33 bp, Homo sapien
ggcttggacaggaagatagcaagaacaaggcag

SEQ ID NO: 520307 - DNA, 33 bp, Homo sapien
tagcagcctggacagaatagattaactttgcaa

SEQ ID NO: 520308 - DNA, 33 bp, Homo sapien
tagcagcctggacagactagattaactttgcaa

SEQ ID NO: 520309 - DNA, 33 bp, Homo sapien
aatgcctaacttcctcaatgtttgcaggtttcc

SEQ ID NO: 520310 - DNA, 33 bp, Homo sapien
aatgcctaacttcctcgatgtttgcaggtttcc

SEQ ID NO: 520311 - DNA, 33 bp, Homo sapien
acagcttgcttcctgacgtaggttttgtctatc

SEQ ID NO: 520312 - DNA, 33 bp, Homo sapien
acagcttgcttcctgatgtaggttttgtctatc

SEQ ID NO: 520313 - DNA, 33 bp, Homo sapien
atcatagcatttcacccctaaatacttgagatg

SEQ ID NO: 520314 - DNA, 33 bp, Homo sapien
atcatagcatttcacctctaaatacttgagatg

SEQ ID NO: 520315 - DNA, 33 bp, Homo sapien
ataggtgatgctgtgaagttcgtatggcacgat

SEQ ID NO: 520316 - DNA, 33 bp, Homo sapien
ataggtgatgctgtgaggttcgtatggcacgat

SEQ ID NO: 520317 - DNA, 33 bp, Homo sapien
agaatgtccttattaacctgaacattcctcgta

SEQ ID NO: 520318 - DNA, 33 bp, Homo sapien
agaatgtccttattaatctgaacattcctcgta

SEQ ID NO: 520319 - DNA, 33 bp, Homo sapien
caaggctaagagtctacgggaaaggtggactaa

SEQ ID NO: 520320 - DNA, 33 bp, Homo sapien
caaggctaagagtctatgggaaaggtggactaa

SEQ ID NO: 520321 - DNA, 33 bp, Homo sapien
agacttttatgtgaacgctgaatgcatcttggc

SEQ ID NO: 520322 - DNA, 33 bp, Homo sapien
agacttttatgtgaactctgaatgcatcttggc

SEQ ID NO: 520323 - DNA, 33 bp, Homo sapien
aaagctgaggaatcaactgggggattttgaatt

SEQ ID NO: 520324 - DNA, 33 bp, Homo sapien
aaagctgaggaatcaattgggggattttgaatt

SEQ ID NO: 520325 - DNA, 33 bp, Homo sapien
ttaatgttctgtgaaacagtctaaactaattgt

SEQ ID NO: 520326 - DNA, 33 bp, Homo sapien
ttaatgttctgtgaaatagtctaaactaattgt

SEQ ID NO: 520327 - DNA, 33 bp, Homo sapien
tgaaattatcacctcaatcaagataatgaacac

SEQ ID NO: 520328 - DNA, 33 bp, Homo sapien
tgaaattatcacctcagtcaagataatgaacac

SEQ ID NO: 520329 - DNA, 33 bp, Homo sapien
actgtaataaaagttacgtgaatatgggctctc

SEQ ID NO: 520330 - DNA, 33 bp, Homo sapien
actgtaataaaagttatgtgaatatgggctctc

SEQ ID NO: 520331 - DNA, 33 bp, Homo sapien
taatgtgttcacgtcacaaaggtacatgtcaaa

SEQ ID NO: 520332 - DNA, 33 bp, Homo sapien
taatgtgttcacgtcagaaaggtacatgtcaaa

SEQ ID NO: 520333 - DNA, 33 bp, Homo sapien
ggcctggcatttgtccaaagtgttttaggccac

SEQ ID NO: 520334 - DNA, 33 bp, Homo sapien
ggcctggcatttgtccgaagtgttttaggccac

SEQ ID NO: 520335 - DNA, 33 bp, Homo sapien
caccacaggaaaagcactataactctaaatagc

SEQ ID NO: 520336 - DNA, 33 bp, Homo sapien
caccacaggaaaagcattataactctaaatagc

SEQ ID NO: 520337 - DNA, 33 bp, Homo sapien
ggagggatggcagggaaaatcaaggaaaatgtc

SEQ ID NO: 520338 - DNA, 33 bp, Homo sapien
ggagggatggcagggagaatcaaggaaaatgtc

SEQ ID NO: 520339 - DNA, 33 bp, Homo sapien
gcaaagtttaacttaactggcagctttctattt

SEQ ID NO: 520340 - DNA, 33 bp, Homo sapien
gcaaagtttaacttaattggcagctttctattt

SEQ ID NO: 520341 - DNA, 33 bp, Homo sapien
caaaatttacatacaacgagccaagaagttgag

SEQ ID NO: 520342 - DNA, 33 bp, Homo sapien
caaaatttacatacaaggagccaagaagttgag

SEQ ID NO: 520343 - DNA, 33 bp, Homo sapien
gtcagggcacaagaaactcgaggtgcacacatg

SEQ ID NO: 520344 - DNA, 33 bp, Homo sapien
gtcagggcacaagaaagtcgaggtgcacacatg

SEQ ID NO: 520345 - DNA, 33 bp, Homo sapien
aaaacacttagaagatcataaaatgctggggaa

SEQ ID NO: 520346 - DNA, 33 bp, Homo sapien
aaaacacttagaagatgataaaatgctggggaa

SEQ ID NO: 520347 - DNA, 33 bp, Homo sapien
tttgcaaaaggtccataagccaaaaagaggtta

SEQ ID NO: 520348 - DNA, 33 bp, Homo sapien
tttgcaaaaggtccatgagccaaaaagaggtta

SEQ ID NO: 520349 - DNA, 33 bp, Homo sapien
gtgtaggatttgagtacaggaggagactaattt

SEQ ID NO: 520350 - DNA, 33 bp, Homo sapien
gtgtaggatttgagtataggaggagactaattt

SEQ ID NO: 520351 - DNA, 33 bp, Homo sapien
aatttaatcaaggaacacacgttatggtgcatg

SEQ ID NO: 520352 - DNA, 33 bp, Homo sapien
aatttaatcaaggaacccacgttatggtgcatg

SEQ ID NO: 520353 - DNA, 33 bp, Homo sapien
acctcattgctataagcagcttggagccctgaa

SEQ ID NO: 520354 - DNA, 33 bp, Homo sapien
acctcattgctataagtagcttggagccctgaa

SEQ ID NO: 520355 - DNA, 33 bp, Homo sapien
caacccttaaacttgacagataattttgctgat

SEQ ID NO: 520356 - DNA, 33 bp, Homo sapien
caacccttaaacttgagagataattttgctgat

SEQ ID NO: 520357 - DNA, 33 bp, Homo sapien
aacttacctataagaccctgttcagcttttatc

SEQ ID NO: 520358 - DNA, 33 bp, Homo sapien
aacttacctataagactctgttcagcttttatc

SEQ ID NO: 520359 - DNA, 33 bp, Homo sapien
ggtatgatcagtaaagaaaactgggagaatagt

SEQ ID NO: 520360 - DNA, 33 bp, Homo sapien
ggtatgatcagtaaaggaaactgggagaatagt

SEQ ID NO: 520361 - DNA, 33 bp, Homo sapien
tactattgataataaagcctcatttgtatcagt

SEQ ID NO: 520362 - DNA, 33 bp, Homo sapien
tactattgataataaatcctcatttgtatcagt

SEQ ID NO: 520363 - DNA, 33 bp, Homo sapien
accctagattaaaaaggctatcaacccaccctt

SEQ ID NO: 520364 - DNA, 33 bp, Homo sapien
accctagattaaaaagtctatcaacccaccctt

SEQ ID NO: 520365 - DNA, 33 bp, Homo sapien
ctgttctacctggacactggacttaattgagtt

SEQ ID NO: 520366 - DNA, 33 bp, Homo sapien
ctgttctacctggacagtggacttaattgagtt

SEQ ID NO: 520367 - DNA, 33 bp, Homo sapien
tgtctaaatacgacaaacccatgcctgatttgc

SEQ ID NO: 520368 - DNA, 33 bp, Homo sapien
tgtctaaatacgacaagcccatgcctgatttgc

SEQ ID NO: 520369 - DNA, 33 bp, Homo sapien
aagaaagaagaatttgaagggtgaactgtaaag

SEQ ID NO: 520370 - DNA, 33 bp, Homo sapien
aagaaagaagaatttggagggtgaactgtaaag

SEQ ID NO: 520371 - DNA, 33 bp, Homo sapien
acgtacttcgtatagacctgtttaatagaactt

SEQ ID NO: 520372 - DNA, 33 bp, Homo sapien
acgtacttcgtatagatctgtttaatagaactt

SEQ ID NO: 520373 - DNA, 33 bp, Homo sapien
ctcttcacaacatccaaacaggtgagcaaaaga

SEQ ID NO: 520374 - DNA, 33 bp, Homo sapien
ctcttcacaacatccatacaggtgagcaaaaga

SEQ ID NO: 520375 - DNA, 33 bp, Homo sapien
gcaatttatggagcaaatgacacgctgtaactt

SEQ ID NO: 520376 - DNA, 33 bp, Homo sapien
gcaatttatggagcaagtgacacgctgtaactt

SEQ ID NO: 520377 - DNA, 33 bp, Homo sapien
cctcaactgaatgccacgtattagagtgcattt

SEQ ID NO: 520378 - DNA, 33 bp, Homo sapien
cctcaactgaatgccatgtattagagtgcattt

SEQ ID NO: 520379 - DNA, 33 bp, Homo sapien
gtctttatacttgagaaaaagatataggtggac

SEQ ID NO: 520380 - DNA, 33 bp, Homo sapien
gtctttatacttgagagaaagatataggtggac

SEQ ID NO: 520381 - DNA, 33 bp, Homo sapien
cagatcaaggtcacaaaagagcttatattttgc

SEQ ID NO: 520382 - DNA, 33 bp, Homo sapien
cagatcaaggtcacaatagagcttatattttgc

SEQ ID NO: 520383 - DNA, 33 bp, Homo sapien
aattagcaaaattccacacacgtaactcattta

SEQ ID NO: 520384 - DNA, 33 bp, Homo sapien
aattagcaaaattccatacacgtaactcattta

SEQ ID NO: 520385 - DNA, 33 bp, Homo sapien
ctgggttcaaacaaaacgtgcatgtgaaggatt

SEQ ID NO: 520386 - DNA, 33 bp, Homo sapien
ctgggttcaaacaaaatgtgcatgtgaaggatt

SEQ ID NO: 520387 - DNA, 33 bp, Homo sapien
attcaaaacaatagcacgagccatgaagataag

SEQ ID NO: 520388 - DNA, 33 bp, Homo sapien
attcaaaacaatagcatgagccatgaagataag

SEQ ID NO: 520389 - DNA, 33 bp, Homo sapien
gacatttgtgtccatgaaccgttggtgatatgt

SEQ ID NO: 520390 - DNA, 33 bp, Homo sapien
gacatttgtgtccatgcaccgttggtgatatgt

SEQ ID NO: 520391 - DNA, 33 bp, Homo sapien
aaataaaatagaataaaatgtccaagatccaaa

SEQ ID NO: 520392 - DNA, 33 bp, Homo sapien
aaataaaatagaataacatgtccaagatccaaa

SEQ ID NO: 520393 - DNA, 33 bp, Homo sapien
ctttggtattcaccaaatatacctaaatcaact

SEQ ID NO: 520394 - DNA, 33 bp, Homo sapien
ctttggtattcaccaactatacctaaatcaact

SEQ ID NO: 520395 - DNA, 33 bp, Homo sapien
ttaatggcctctgatcaaatgtcacatcttcaa

SEQ ID NO: 520396 - DNA, 33 bp, Homo sapien
ttaatggcctctgatcgaatgtcacatcttcaa

SEQ ID NO: 520397 - DNA, 33 bp, Homo sapien
tcttaccaattcagttcaaagcttctaatttag

SEQ ID NO: 520398 - DNA, 33 bp, Homo sapien
tcttaccaattcagttgaaagcttctaatttag

SEQ ID NO: 520399 - DNA, 33 bp, Homo sapien
actaaccaagaagtaacactagattgatcacaa

SEQ ID NO: 520400 - DNA, 33 bp, Homo sapien
actaaccaagaagtaagactagattgatcacaa

SEQ ID NO: 520401 - DNA, 33 bp, Homo sapien
ccacatgagactgaaaaattgattaagagaatc

SEQ ID NO: 520402 - DNA, 33 bp, Homo sapien
ccacatgagactgaaacattgattaagagaatc

SEQ ID NO: 520403 - DNA, 33 bp, Homo sapien
attcctctatccttgaccttagtccatttcttc

SEQ ID NO: 520404 - DNA, 33 bp, Homo sapien
attcctctatccttgatcttagtccatttcttc

SEQ ID NO: 520405 - DNA, 33 bp, Homo sapien
tagtatgaagagggaccggtagttagtgggacc

SEQ ID NO: 520406 - DNA, 33 bp, Homo sapien
tagtatgaagagggactggtagttagtgggacc

SEQ ID NO: 520407 - DNA, 33 bp, Homo sapien
tacttttggagggataacataagacagtgaaga

SEQ ID NO: 520408 - DNA, 33 bp, Homo sapien
tacttttggagggataccataagacagtgaaga

SEQ ID NO: 520409 - DNA, 33 bp, Homo sapien
tataatgggctaggccaaggaagaatgtctttc

SEQ ID NO: 520410 - DNA, 33 bp, Homo sapien
tataatgggctaggccgaggaagaatgtctttc

SEQ ID NO: 520411 - DNA, 33 bp, Homo sapien
accctgtgtctggccacgtcatttgtcagaggt

SEQ ID NO: 520412 - DNA, 33 bp, Homo sapien
accctgtgtctggccatgtcatttgtcagaggt

SEQ ID NO: 520413 - DNA, 33 bp, Homo sapien
tacactttttctaacactgactttaacttggtg

SEQ ID NO: 520414 - DNA, 33 bp, Homo sapien
tacactttttctaacattgactttaacttggtg

SEQ ID NO: 520415 - DNA, 33 bp, Homo sapien
ccccaaagcacaaaacaaactgaaatgagagat

SEQ ID NO: 520416 - DNA, 33 bp, Homo sapien
ccccaaagcacaaaaccaactgaaatgagagat

SEQ ID NO: 520417 - DNA, 33 bp, Homo sapien
ttggcagaagaacagaaaattttatgttgtttt

SEQ ID NO: 520418 - DNA, 33 bp, Homo sapien
ttggcagaagaacagataattttatgttgtttt

SEQ ID NO: 520419 - DNA, 33 bp, Homo sapien
atcttcaagtattaccccttccacacatgagaa

SEQ ID NO: 520420 - DNA, 33 bp, Homo sapien
atcttcaagtattaccgcttccacacatgagaa

SEQ ID NO: 520421 - DNA, 33 bp, Homo sapien
taacttggggaaaaaacacagaatggctcctat

SEQ ID NO: 520422 - DNA, 33 bp, Homo sapien
taacttggggaaaaaagacagaatggctcctat

SEQ ID NO: 520423 - DNA, 33 bp, Homo sapien
agacaatgccttttcccgcaaaaagtgcttgct

SEQ ID NO: 520424 - DNA, 33 bp, Homo sapien
agacaatgccttttcctgcaaaaagtgcttgct

SEQ ID NO: 520425 - DNA, 33 bp, Homo sapien
ccccttcacttctcaccctctcatatgcactct

SEQ ID NO: 520426 - DNA, 33 bp, Homo sapien
ccccttcacttctcactctctcatatgcactct

SEQ ID NO: 520427 - DNA, 33 bp, Homo sapien
gaatgtaaatgagcgacaataaagagccccagg

SEQ ID NO: 520428 - DNA, 33 bp, Homo sapien
gaatgtaaatgagcgagaataaagagccccagg

SEQ ID NO: 520429 - DNA, 33 bp, Homo sapien
acctccaaataagccaatcttgctgagatgacc

SEQ ID NO: 520430 - DNA, 33 bp, Homo sapien
acctccaaataagccattcttgctgagatgacc

SEQ ID NO: 520431 - DNA, 33 bp, Homo sapien
ctgttgccaagatgtacctatttaaccatacct

SEQ ID NO: 520432 - DNA, 33 bp, Homo sapien
ctgttgccaagatgtatctatttaaccatacct

SEQ ID NO: 520433 - DNA, 33 bp, Homo sapien
tttcgacctacaaaaacagcaacttcatatggc

SEQ ID NO: 520434 - DNA, 33 bp, Homo sapien
tttcgacctacaaaaagagcaacttcatatggc

SEQ ID NO: 520435 - DNA, 33 bp, Homo sapien
gctgtcaattgagctgaaatgtcaaggggcaag

SEQ ID NO: 520436 - DNA, 33 bp, Homo sapien
gctgtcaattgagctggaatgtcaaggggcaag

SEQ ID NO: 520437 - DNA, 33 bp, Homo sapien
gacttctaattggccacacttggtgaaaatgtc

SEQ ID NO: 520438 - DNA, 33 bp, Homo sapien
gacttctaattggccagacttggtgaaaatgtc

SEQ ID NO: 520439 - DNA, 33 bp, Homo sapien
gaaaccaatacctcccacattctcataccttgt

SEQ ID NO: 520440 - DNA, 33 bp, Homo sapien
gaaaccaatacctcccgcattctcataccttgt

SEQ ID NO: 520441 - DNA, 33 bp, Homo sapien
ttcattcattacaagagatccacctctactcat

SEQ ID NO: 520442 - DNA, 33 bp, Homo sapien
ttcattcattacaagatatccacctctactcat

SEQ ID NO: 520443 - DNA, 33 bp, Homo sapien
ttcatagtaaagtacacagtaaagcaaactcat

SEQ ID NO: 520444 - DNA, 33 bp, Homo sapien
ttcatagtaaagtacatagtaaagcaaactcat

SEQ ID NO: 520445 - DNA, 33 bp, Homo sapien
attgagaatgtgcacaaatatggagctgtagat

SEQ ID NO: 520446 - DNA, 33 bp, Homo sapien
attgagaatgtgcacagatatggagctgtagat

SEQ ID NO: 520447 - DNA, 33 bp, Homo sapien
ttttaactttcagaacgagattatgaactctgt

SEQ ID NO: 520448 - DNA, 33 bp, Homo sapien
ttttaactttcagaactagattatgaactctgt

SEQ ID NO: 520449 - DNA, 33 bp, Homo sapien
gtgcagggttttcagacgtgtttttgtgaaact

SEQ ID NO: 520450 - DNA, 33 bp, Homo sapien
gtgcagggttttcagatgtgtttttgtgaaact

SEQ ID NO: 520451 - DNA, 33 bp, Homo sapien
ccataattttttacaagagctagacagagtaac

SEQ ID NO: 520452 - DNA, 33 bp, Homo sapien
ccataattttttacaatagctagacagagtaac

SEQ ID NO: 520453 - DNA, 33 bp, Homo sapien
gtttcaaatacagctacgtagaggtcccccaat

SEQ ID NO: 520454 - DNA, 33 bp, Homo sapien
gtttcaaatacagctatgtagaggtcccccaat

SEQ ID NO: 520455 - DNA, 33 bp, Homo sapien
aataatcattttcagaatcatggcctaaaaagg

SEQ ID NO: 520456 - DNA, 33 bp, Homo sapien
aataatcattttcagagtcatggcctaaaaagg

SEQ ID NO: 520457 - DNA, 33 bp, Homo sapien
ggggtggaattggacacggaaaggagtggatag

SEQ ID NO: 520458 - DNA, 33 bp, Homo sapien
ggggtggaattggacatggaaaggagtggatag

SEQ ID NO: 520459 - DNA, 33 bp, Homo sapien
cttccaggagagattcaacactggccattgact

SEQ ID NO: 520460 - DNA, 33 bp, Homo sapien
cttccaggagagattcgacactggccattgact

SEQ ID NO: 520461 - DNA, 33 bp, Homo sapien
ctactgaaagatgacaaatagtgagtttaataa

SEQ ID NO: 520462 - DNA, 33 bp, Homo sapien
ctactgaaagatgacagatagtgagtttaataa

SEQ ID NO: 520463 - DNA, 33 bp, Homo sapien
gagcgatttggacagaagacatgaatttgaggg

SEQ ID NO: 520464 - DNA, 33 bp, Homo sapien
gagcgatttggacagatgacatgaatttgaggg

SEQ ID NO: 520465 - DNA, 33 bp, Homo sapien
ggagaatattcagggggagagcaattatatgag

SEQ ID NO: 520466 - DNA, 33 bp, Homo sapien
ggagaatattcaggggtagagcaattatatgag

SEQ ID NO: 520467 - DNA, 33 bp, Homo sapien
cccaggtttccattacgctcagtgatgtttctc

SEQ ID NO: 520468 - DNA, 33 bp, Homo sapien
cccaggtttccattactctcagtgatgtttctc

SEQ ID NO: 520469 - DNA, 33 bp, Homo sapien
ttgagcaattgcaagacatcctataaatacctt

SEQ ID NO: 520470 - DNA, 33 bp, Homo sapien
ttgagcaattgcaagagatcctataaatacctt

SEQ ID NO: 520471 - DNA, 33 bp, Homo sapien
agaccaaaacatcaggaaagagccataccatgg

SEQ ID NO: 520472 - DNA, 33 bp, Homo sapien
agaccaaaacatcaggcaagagccataccatgg

SEQ ID NO: 520473 - DNA, 33 bp, Homo sapien
tgaaacctatacttccaaacattcaacccagtg

SEQ ID NO: 520474 - DNA, 33 bp, Homo sapien
tgaaacctatacttcccaacattcaacccagtg

SEQ ID NO: 520475 - DNA, 33 bp, Homo sapien
aattttgaattagtgacaaggagaaatgacctt

SEQ ID NO: 520476 - DNA, 33 bp, Homo sapien
aattttgaattagtgataaggagaaatgacctt

SEQ ID NO: 520477 - DNA, 33 bp, Homo sapien
tttgttcaaatgtaagcactaggttgatattac

SEQ ID NO: 520478 - DNA, 33 bp, Homo sapien
tttgttcaaatgtaaggactaggttgatattac

SEQ ID NO: 520479 - DNA, 33 bp, Homo sapien
gagaaacagatttaccaattagagtacaatgct

SEQ ID NO: 520480 - DNA, 33 bp, Homo sapien
gagaaacagatttaccgattagagtacaatgct

SEQ ID NO: 520481 - DNA, 33 bp, Homo sapien
agcagactgcaatccaatattctttccaggttg

SEQ ID NO: 520482 - DNA, 33 bp, Homo sapien
agcagactgcaatccagtattctttccaggttg

SEQ ID NO: 520483 - DNA, 33 bp, Homo sapien
aattccactccaacaacgctaaaggaagttctt

SEQ ID NO: 520484 - DNA, 33 bp, Homo sapien
aattccactccaacaatgctaaaggaagttctt

SEQ ID NO: 520485 - DNA, 33 bp, Homo sapien
ttgcttgctgattttgaaaagtgttctgaacat

SEQ ID NO: 520486 - DNA, 33 bp, Homo sapien
ttgcttgctgattttggaaagtgttctgaacat

SEQ ID NO: 520487 - DNA, 33 bp, Homo sapien
attacccttgaaacagaatgataaagctgagaa

SEQ ID NO: 520488 - DNA, 33 bp, Homo sapien
attacccttgaaacaggatgataaagctgagaa

SEQ ID NO: 520489 - DNA, 33 bp, Homo sapien
catcctcttttctctaccttgaccatcactgac

SEQ ID NO: 520490 - DNA, 33 bp, Homo sapien
catcctcttttctctatcttgaccatcactgac

SEQ ID NO: 520491 - DNA, 33 bp, Homo sapien
cttcacagtccatttagcactgaattatattaa

SEQ ID NO: 520492 - DNA, 33 bp, Homo sapien
cttcacagtccatttatcactgaattatattaa

SEQ ID NO: 520493 - DNA, 33 bp, Homo sapien
gcctatcaggatgttacgagaattaatttagat

SEQ ID NO: 520494 - DNA, 33 bp, Homo sapien
gcctatcaggatgttatgagaattaatttagat

SEQ ID NO: 520495 - DNA, 33 bp, Homo sapien
tcagcctttttcctcacaaggatacaggaagct

SEQ ID NO: 520496 - DNA, 33 bp, Homo sapien
tcagcctttttcctcagaaggatacaggaagct

SEQ ID NO: 520497 - DNA, 33 bp, Homo sapien
gtttttgctaggttcactcagtttatcttaagt

SEQ ID NO: 520498 - DNA, 33 bp, Homo sapien
gtttttgctaggttcattcagtttatcttaagt

SEQ ID NO: 520499 - DNA, 33 bp, Homo sapien
ttcctgcctcctaaagaatttgctcaagaggta

SEQ ID NO: 520500 - DNA, 33 bp, Homo sapien
ttcctgcctcctaaaggatttgctcaagaggta

SEQ ID NO: 520501 - DNA, 33 bp, Homo sapien
atcctgtgtatcatgaagctatagaaagaactg

SEQ ID NO: 520502 - DNA, 33 bp, Homo sapien
atcctgtgtatcatgaggctatagaaagaactg

SEQ ID NO: 520503 - DNA, 33 bp, Homo sapien
agagtgtatcctatctaaagcacaaagacacta

SEQ ID NO: 520504 - DNA, 33 bp, Homo sapien
agagtgtatcctatctgaagcacaaagacacta

SEQ ID NO: 520505 - DNA, 33 bp, Homo sapien
atcttgcatcacctgacctttcatatgaaagta

SEQ ID NO: 520506 - DNA, 33 bp, Homo sapien
atcttgcatcacctgagctttcatatgaaagta

SEQ ID NO: 520507 - DNA, 33 bp, Homo sapien
ttcctgcatgtaaaacaatactcatccttttcc

SEQ ID NO: 520508 - DNA, 33 bp, Homo sapien
ttcctgcatgtaaaactatactcatccttttcc

SEQ ID NO: 520509 - DNA, 33 bp, Homo sapien
aactcctctgctggggaaaccttgtcttgactg

SEQ ID NO: 520510 - DNA, 33 bp, Homo sapien
aactcctctgctggggtaaccttgtcttgactg

SEQ ID NO: 520511 - DNA, 33 bp, Homo sapien
ctggactgatgggatccaagcagcactaagaag

SEQ ID NO: 520512 - DNA, 33 bp, Homo sapien
ctggactgatgggatctaagcagcactaagaag

SEQ ID NO: 520513 - DNA, 33 bp, Homo sapien
atccacatgaaatctcactttatgcactgatca

SEQ ID NO: 520514 - DNA, 33 bp, Homo sapien
atccacatgaaatctcgctttatgcactgatca

SEQ ID NO: 520515 - DNA, 33 bp, Homo sapien
gtactgaagtagtgaaagtagcagtagtagtga

SEQ ID NO: 520516 - DNA, 33 bp, Homo sapien
gtactgaagtagtgaaggtagcagtagtagtga

SEQ ID NO: 520517 - DNA, 33 bp, Homo sapien
tttgtagattagaatacgggtttcaggccaggt

SEQ ID NO: 520518 - DNA, 33 bp, Homo sapien
tttgtagattagaatatgggtttcaggccaggt

SEQ ID NO: 520519 - DNA, 33 bp, Homo sapien
gagtttgggattgaccaaaagcttacattacta

SEQ ID NO: 520520 - DNA, 33 bp, Homo sapien
gagtttgggattgacctaaagcttacattacta

SEQ ID NO: 520521 - DNA, 33 bp, Homo sapien
ttataaggcctcaaaaatcccatttatttatgg

SEQ ID NO: 520522 - DNA, 33 bp, Homo sapien
ttataaggcctcaaaagtcccatttatttatgg

SEQ ID NO: 520523 - DNA, 33 bp, Homo sapien
actcttctgaatcatcaaaaagatttaattata

SEQ ID NO: 520524 - DNA, 33 bp, Homo sapien
actcttctgaatcatcgaaaagatttaattata

SEQ ID NO: 520525 - DNA, 33 bp, Homo sapien
aggtgtgaagctggaaaaaacagtgattattgg

SEQ ID NO: 520526 - DNA, 33 bp, Homo sapien
aggtgtgaagctggaacaaacagtgattattgg

SEQ ID NO: 520527 - DNA, 33 bp, Homo sapien
taacatgtgactgcacagccttcagataaatcc

SEQ ID NO: 520528 - DNA, 33 bp, Homo sapien
taacatgtgactgcaccgccttcagataaatcc

SEQ ID NO: 520529 - DNA, 33 bp, Homo sapien
cgttaaaagttgaagacagaatgagcataagga

SEQ ID NO: 520530 - DNA, 33 bp, Homo sapien
cgttaaaagttgaagagagaatgagcataagga

SEQ ID NO: 520531 - DNA, 33 bp, Homo sapien
agagtaggataggggaagatctgacacagaaca

SEQ ID NO: 520532 - DNA, 33 bp, Homo sapien
agagtaggataggggatgatctgacacagaaca

SEQ ID NO: 520533 - DNA, 33 bp, Homo sapien
actgtgataaccacaaaagagtttaaggaaagg

SEQ ID NO: 520534 - DNA, 33 bp, Homo sapien
actgtgataaccacaatagagtttaaggaaagg

SEQ ID NO: 520535 - DNA, 33 bp, Homo sapien
agacattgtcaggtcacgaagtgcatctctcac

SEQ ID NO: 520536 - DNA, 33 bp, Homo sapien
agacattgtcaggtcatgaagtgcatctctcac

SEQ ID NO: 520537 - DNA, 33 bp, Homo sapien
acatggttgctgccaccgagggactgggaatga

SEQ ID NO: 520538 - DNA, 33 bp, Homo sapien
acatggttgctgccactgagggactgggaatga

SEQ ID NO: 520539 - DNA, 33 bp, Homo sapien
cccacctaacagccaacagggagcttttaaaag

SEQ ID NO: 520540 - DNA, 33 bp, Homo sapien
cccacctaacagccaatagggagcttttaaaag

SEQ ID NO: 520541 - DNA, 33 bp, Homo sapien
aaatgctgcatacatactaaaactttatatttg

SEQ ID NO: 520542 - DNA, 33 bp, Homo sapien
aaatgctgcatacatattaaaactttatatttg

SEQ ID NO: 520543 - DNA, 33 bp, Homo sapien
tggcaagaccttagcaatgattaaaaggtactt

SEQ ID NO: 520544 - DNA, 33 bp, Homo sapien
tggcaagaccttagcagtgattaaaaggtactt

SEQ ID NO: 520545 - DNA, 33 bp, Homo sapien
tgagcacttactatggacaaagtactgtgtttg

SEQ ID NO: 520546 - DNA, 33 bp, Homo sapien
tgagcacttactatgggcaaagtactgtgtttg

SEQ ID NO: 520547 - DNA, 33 bp, Homo sapien
ccatgcattgactatccatgtactaggagcatc

SEQ ID NO: 520548 - DNA, 33 bp, Homo sapien
ccatgcattgactatcgatgtactaggagcatc

SEQ ID NO: 520549 - DNA, 33 bp, Homo sapien
agggttgttataaagactaggagagctaacagg

SEQ ID NO: 520550 - DNA, 33 bp, Homo sapien
agggttgttataaagattaggagagctaacagg

SEQ ID NO: 520551 - DNA, 33 bp, Homo sapien
gtactgatctcttttccacttttacaattttta

SEQ ID NO: 520552 - DNA, 33 bp, Homo sapien
gtactgatctcttttctacttttacaattttta

SEQ ID NO: 520553 - DNA, 33 bp, Homo sapien
gtcagtaatgacgtaacgccttcctttagagga

SEQ ID NO: 520554 - DNA, 33 bp, Homo sapien
gtcagtaatgacgtaatgccttcctttagagga

SEQ ID NO: 520555 - DNA, 33 bp, Homo sapien
ttttccagttgtggcaacagtagagaccacagt

SEQ ID NO: 520556 - DNA, 33 bp, Homo sapien
ttttccagttgtggcatcagtagagaccacagt

SEQ ID NO: 520557 - DNA, 33 bp, Homo sapien
gagttcttctgacctcaatttgccaaacctttt

SEQ ID NO: 520558 - DNA, 33 bp, Homo sapien
gagttcttctgacctctatttgccaaacctttt

SEQ ID NO: 520559 - DNA, 33 bp, Homo sapien
aataaattgagttaataatatgcgagagggctt

SEQ ID NO: 520560 - DNA, 33 bp, Homo sapien
aataaattgagttaatgatatgcgagagggctt

SEQ ID NO: 520561 - DNA, 33 bp, Homo sapien
ctcgcttgtccttagacataccaacacaccctc

SEQ ID NO: 520562 - DNA, 33 bp, Homo sapien
ctcgcttgtccttagatataccaacacaccctc

SEQ ID NO: 520563 - DNA, 33 bp, Homo sapien
taaaggaatgaactaaagtgtcaactgctgccc

SEQ ID NO: 520564 - DNA, 33 bp, Homo sapien
taaaggaatgaactaatgtgtcaactgctgccc

SEQ ID NO: 520565 - DNA, 33 bp, Homo sapien
tttctgtattcctataaatgttcttgaactttt

SEQ ID NO: 520566 - DNA, 33 bp, Homo sapien
tttctgtattcctatagatgttcttgaactttt

SEQ ID NO: 520567 - DNA, 33 bp, Homo sapien
gggaaagaaccactcaataggagaaaaggaaaa

SEQ ID NO: 520568 - DNA, 33 bp, Homo sapien
gggaaagaaccactcagtaggagaaaaggaaaa

SEQ ID NO: 520569 - DNA, 33 bp, Homo sapien
tgaatccatctctacacgctataacctagctga

SEQ ID NO: 520570 - DNA, 33 bp, Homo sapien
tgaatccatctctacaggctataacctagctga

SEQ ID NO: 520571 - DNA, 33 bp, Homo sapien
cattggaatcaaaagaccagaagtggagaagaa

SEQ ID NO: 520572 - DNA, 33 bp, Homo sapien
cattggaatcaaaagatcagaagtggagaagaa

SEQ ID NO: 520573 - DNA, 33 bp, Homo sapien
cagaatcaaatcctccacttgcattattgaaag

SEQ ID NO: 520574 - DNA, 33 bp, Homo sapien
cagaatcaaatcctccgcttgcattattgaaag

SEQ ID NO: 520575 - DNA, 33 bp, Homo sapien
aatgccaggaaaatacaactccaacaaacgaaa

SEQ ID NO: 520576 - DNA, 33 bp, Homo sapien
aatgccaggaaaatacgactccaacaaacgaaa

SEQ ID NO: 520577 - DNA, 33 bp, Homo sapien
tgttattgttggctctaactgataccaggacag

SEQ ID NO: 520578 - DNA, 33 bp, Homo sapien
tgttattgttggctctcactgataccaggacag

SEQ ID NO: 520579 - DNA, 33 bp, Homo sapien
ttttgtaagtaagttaacattattgcattcaag

SEQ ID NO: 520580 - DNA, 33 bp, Homo sapien
ttttgtaagtaagttatcattattgcattcaag

SEQ ID NO: 520581 - DNA, 33 bp, Homo sapien
gcctcatgcctttataaatggagtaaagcatga

SEQ ID NO: 520582 - DNA, 33 bp, Homo sapien
gcctcatgcctttatagatggagtaaagcatga

SEQ ID NO: 520583 - DNA, 33 bp, Homo sapien
ctactgggcacactaacatcaaatattttcaga

SEQ ID NO: 520584 - DNA, 33 bp, Homo sapien
ctactgggcacactaatatcaaatattttcaga

SEQ ID NO: 520585 - DNA, 33 bp, Homo sapien
gaaattttttcagcaaaacagagatataacatc

SEQ ID NO: 520586 - DNA, 33 bp, Homo sapien
gaaattttttcagcaacacagagatataacatc

SEQ ID NO: 520587 - DNA, 33 bp, Homo sapien
ctattagcattcaaacagtgtaggcataaaaat

SEQ ID NO: 520588 - DNA, 33 bp, Homo sapien
ctattagcattcaaactgtgtaggcataaaaat

SEQ ID NO: 520589 - DNA, 33 bp, Homo sapien
ttcagagaactgtgaaagtcaaacataaaaatg

SEQ ID NO: 520590 - DNA, 33 bp, Homo sapien
ttcagagaactgtgaaggtcaaacataaaaatg

SEQ ID NO: 520591 - DNA, 33 bp, Homo sapien
atttatctgtgcaagaaaatattatccagcaat

SEQ ID NO: 520592 - DNA, 33 bp, Homo sapien
atttatctgtgcaagacaatattatccagcaat

SEQ ID NO: 520593 - DNA, 33 bp, Homo sapien
cagtgaaatcttgttaaccggatttgttttact

SEQ ID NO: 520594 - DNA, 33 bp, Homo sapien
cagtgaaatcttgttatccggatttgttttact

SEQ ID NO: 520595 - DNA, 33 bp, Homo sapien
aattgtggaagtccaagagataggatggtaact

SEQ ID NO: 520596 - DNA, 33 bp, Homo sapien
aattgtggaagtccaatagataggatggtaact

SEQ ID NO: 520597 - DNA, 33 bp, Homo sapien
gggactgctctctcccgaagctcatttcaagtt

SEQ ID NO: 520598 - DNA, 33 bp, Homo sapien
gggactgctctctccctaagctcatttcaagtt

SEQ ID NO: 520599 - DNA, 33 bp, Homo sapien
atgatgtaaaactagaaacagtgaacaagaaac

SEQ ID NO: 520600 - DNA, 33 bp, Homo sapien
atgatgtaaaactagagacagtgaacaagaaac

SEQ ID NO: 520601 - DNA, 33 bp, Homo sapien
attaacttagtcacaaacaccatgactaaaaat

SEQ ID NO: 520602 - DNA, 33 bp, Homo sapien
attaacttagtcacaatcaccatgactaaaaat

SEQ ID NO: 520603 - DNA, 33 bp, Homo sapien
ttgctatgagcctgtaagtgtatgtgtgtacat

SEQ ID NO: 520604 - DNA, 33 bp, Homo sapien
ttgctatgagcctgtatgtgtatgtgtgtacat

SEQ ID NO: 520605 - DNA, 33 bp, Homo sapien
ataaaagagttcattaaattagacaccattccc

SEQ ID NO: 520606 - DNA, 33 bp, Homo sapien
ataaaagagttcattatattagacaccattccc

SEQ ID NO: 520607 - DNA, 33 bp, Homo sapien
ctccaaatcaccacaggaatgaccaaaggggtg

SEQ ID NO: 520608 - DNA, 33 bp, Homo sapien
ctccaaatcaccacagtaatgaccaaaggggtg

SEQ ID NO: 520609 - DNA, 33 bp, Homo sapien
aatggaaaaaactgtccgacaagcccttattca

SEQ ID NO: 520610 - DNA, 33 bp, Homo sapien
aatggaaaaaactgtcggacaagcccttattca

SEQ ID NO: 520611 - DNA, 33 bp, Homo sapien
aacctatcatttcccaactgtaaataatttact

SEQ ID NO: 520612 - DNA, 33 bp, Homo sapien
aacctatcatttcccagctgtaaataatttact

SEQ ID NO: 520613 - DNA, 33 bp, Homo sapien
gtggccctttagctcacgtcttccccgttttcc

SEQ ID NO: 520614 - DNA, 33 bp, Homo sapien
gtggccctttagctcatgtcttccccgttttcc

SEQ ID NO: 520615 - DNA, 33 bp, Homo sapien
taactaagaaaccaagacgaaagcttgagaaga

SEQ ID NO: 520616 - DNA, 33 bp, Homo sapien
taactaagaaaccaaggcgaaagcttgagaaga

SEQ ID NO: 520617 - DNA, 33 bp, Homo sapien
ttctctttttttctcacgtacaacagacagttt

SEQ ID NO: 520618 - DNA, 33 bp, Homo sapien
ttctctttttttctcatgtacaacagacagttt

SEQ ID NO: 520619 - DNA, 33 bp, Homo sapien
caacaccacagttgatagtagtacatagtctga

SEQ ID NO: 520620 - DNA, 33 bp, Homo sapien
caacaccacagttgatggtagtacatagtctga

SEQ ID NO: 520621 - DNA, 33 bp, Homo sapien
ttgtgttttaactgaaatgttcttataaaaact

SEQ ID NO: 520622 - DNA, 33 bp, Homo sapien
ttgtgttttaactgaagtgttcttataaaaact

SEQ ID NO: 520623 - DNA, 33 bp, Homo sapien
tctgagaaaagaaacccagtcaagaacctgaca

SEQ ID NO: 520624 - DNA, 33 bp, Homo sapien
tctgagaaaagaaacctagtcaagaacctgaca

SEQ ID NO: 520625 - DNA, 33 bp, Homo sapien
gcagaagatgtacagaccattagttttgcaggc

SEQ ID NO: 520626 - DNA, 33 bp, Homo sapien
gcagaagatgtacagatcattagttttgcaggc

SEQ ID NO: 520627 - DNA, 33 bp, Homo sapien
cacagaaagcttctatgaagtaaatctatatgc

SEQ ID NO: 520628 - DNA, 33 bp, Homo sapien
cacagaaagcttctattaagtaaatctatatgc

SEQ ID NO: 520629 - DNA, 33 bp, Homo sapien
tatctgtcatgtgatacgtctaagtgtttcaac

SEQ ID NO: 520630 - DNA, 33 bp, Homo sapien
tatctgtcatgtgatatgtctaagtgtttcaac

SEQ ID NO: 520631 - DNA, 33 bp, Homo sapien
gtatgacattactgaaatgcagagttttgatga

SEQ ID NO: 520632 - DNA, 33 bp, Homo sapien
gtatgacattactgaattgcagagttttgatga

SEQ ID NO: 520633 - DNA, 33 bp, Homo sapien
ccccatcaaattttcaactactagttttggcac

SEQ ID NO: 520634 - DNA, 33 bp, Homo sapien
ccccatcaaattttcacctactagttttggcac

SEQ ID NO: 520635 - DNA, 33 bp, Homo sapien
cggctcagcttaccatattttcagagttatctc

SEQ ID NO: 520636 - DNA, 33 bp, Homo sapien
cggctcagcttaccatgttttcagagttatctc

SEQ ID NO: 520637 - DNA, 33 bp, Homo sapien
tagtgtttagctttccaacaagattcagagacc

SEQ ID NO: 520638 - DNA, 33 bp, Homo sapien
tagtgtttagctttccgacaagattcagagacc

SEQ ID NO: 520639 - DNA, 33 bp, Homo sapien
tggtgttaacaacagcaaagagacttcacactg

SEQ ID NO: 520640 - DNA, 33 bp, Homo sapien
tggtgttaacaacagcgaagagacttcacactg

SEQ ID NO: 520641 - DNA, 33 bp, Homo sapien
tggtgtaaagtcatgcaaaattttacttagctt

SEQ ID NO: 520642 - DNA, 33 bp, Homo sapien
tggtgtaaagtcatgcgaaattttacttagctt

SEQ ID NO: 520643 - DNA, 33 bp, Homo sapien
aatatctctcctaaggacatatttggctccaca

SEQ ID NO: 520644 - DNA, 33 bp, Homo sapien
aatatctctcctaagggcatatttggctccaca

SEQ ID NO: 520645 - DNA, 33 bp, Homo sapien
gagctcctcagggttccatctcagcagactttt

SEQ ID NO: 520646 - DNA, 33 bp, Homo sapien
gagctcctcagggttctatctcagcagactttt

SEQ ID NO: 520647 - DNA, 33 bp, Homo sapien
gggttaacttcaaccaacaaacaattttctttt

SEQ ID NO: 520648 - DNA, 33 bp, Homo sapien
gggttaacttcaaccagcaaacaattttctttt

SEQ ID NO: 520649 - DNA, 33 bp, Homo sapien
aaggatgggacctagaaggtattcaaaaaaaat

SEQ ID NO: 520650 - DNA, 33 bp, Homo sapien
aaggatgggacctagagggtattcaaaaaaaat

SEQ ID NO: 520651 - DNA, 33 bp, Homo sapien
gggctgagctgtccagaaagaggggtgggataa

SEQ ID NO: 520652 - DNA, 33 bp, Homo sapien
gggctgagctgtccaggaagaggggtgggataa

SEQ ID NO: 520653 - DNA, 33 bp, Homo sapien
agagatgtgcagcaacaaactcagttccaaatg

SEQ ID NO: 520654 - DNA, 33 bp, Homo sapien
agagatgtgcagcaacgaactcagttccaaatg

SEQ ID NO: 520655 - DNA, 33 bp, Homo sapien
agcaagaacaaagatgaaacctctccaagtcca

SEQ ID NO: 520656 - DNA, 33 bp, Homo sapien
agcaagaacaaagatggaacctctccaagtcca

SEQ ID NO: 520657 - DNA, 33 bp, Homo sapien
ttctcttagtgcccatcagaagctataaaacga

SEQ ID NO: 520658 - DNA, 33 bp, Homo sapien
ttctcttagtgcccattagaagctataaaacga

SEQ ID NO: 520659 - DNA, 33 bp, Homo sapien
agtacattatggaagacagcaactgttttatta

SEQ ID NO: 520660 - DNA, 33 bp, Homo sapien
agtacattatggaagagagcaactgttttatta

SEQ ID NO: 520661 - DNA, 33 bp, Homo sapien
aacaaagattccataacgtgggaagaaacccaa

SEQ ID NO: 520662 - DNA, 33 bp, Homo sapien
aacaaagattccataatgtgggaagaaacccaa

SEQ ID NO: 520663 - DNA, 33 bp, Homo sapien
agcagtagtatttagcagcatgattggcatact

SEQ ID NO: 520664 - DNA, 33 bp, Homo sapien
agcagtagtatttagcggcatgattggcatact

SEQ ID NO: 520665 - DNA, 33 bp, Homo sapien
ttttctcgagtgtgaaaattttgagaaccttcc

SEQ ID NO: 520666 - DNA, 33 bp, Homo sapien
ttttctcgagtgtgaacattttgagaaccttcc

SEQ ID NO: 520667 - DNA, 33 bp, Homo sapien
tccccctcctgctttcactctcatctctttatt

SEQ ID NO: 520668 - DNA, 33 bp, Homo sapien
tccccctcctgctttcgctctcatctctttatt

SEQ ID NO: 520669 - DNA, 33 bp, Homo sapien
gtagaccttataattacgagaatgtgctgtaat

SEQ ID NO: 520670 - DNA, 33 bp, Homo sapien
gtagaccttataattaggagaatgtgctgtaat

SEQ ID NO: 520671 - DNA, 33 bp, Homo sapien
gcagcaaagctgaaacaaaaatggctcagcata

SEQ ID NO: 520672 - DNA, 33 bp, Homo sapien
gcagcaaagctgaaacgaaaatggctcagcata

SEQ ID NO: 520673 - DNA, 33 bp, Homo sapien
aaatatttctaagcaaactctaatcaacaaaac

SEQ ID NO: 520674 - DNA, 33 bp, Homo sapien
aaatatttctaagcaagctctaatcaacaaaac

SEQ ID NO: 520675 - DNA, 33 bp, Homo sapien
gatcacataaattgacacttctgtaaatagtta

SEQ ID NO: 520676 - DNA, 33 bp, Homo sapien
gatcacataaattgacccttctgtaaatagtta

SEQ ID NO: 520677 - DNA, 33 bp, Homo sapien
gtatgagatttagtgccgaggctcctgtgagac

SEQ ID NO: 520678 - DNA, 33 bp, Homo sapien
gtatgagatttagtgctgaggctcctgtgagac

SEQ ID NO: 520679 - DNA, 33 bp, Homo sapien
gattctgttgtgaagggaatacagtccatactt

SEQ ID NO: 520680 - DNA, 33 bp, Homo sapien
gattctgttgtgaaggtaatacagtccatactt

SEQ ID NO: 520681 - DNA, 33 bp, Homo sapien
gggtcatcctctgaaacacacactacctgtact

SEQ ID NO: 520682 - DNA, 33 bp, Homo sapien
gggtcatcctctgaaatacacactacctgtact

SEQ ID NO: 520683 - DNA, 33 bp, Homo sapien
gaagagctataaccagccacgatgcaatttcca

SEQ ID NO: 520684 - DNA, 33 bp, Homo sapien
gaagagctataaccaggcacgatgcaatttcca

SEQ ID NO: 520685 - DNA, 33 bp, Homo sapien
gcaccaaacattgaaccagtatccacttcgaaa

SEQ ID NO: 520686 - DNA, 33 bp, Homo sapien
gcaccaaacattgaacgagtatccacttcgaaa

SEQ ID NO: 520687 - DNA, 33 bp, Homo sapien
tgaacgcctttaagaaatggtccctggctgccc

SEQ ID NO: 520688 - DNA, 33 bp, Homo sapien
tgaacgcctttaagaagtggtccctggctgccc

SEQ ID NO: 520689 - DNA, 33 bp, Homo sapien
cttggttcttacaacaactcttcttggcaggat

SEQ ID NO: 520690 - DNA, 33 bp, Homo sapien
cttggttcttacaacatctcttcttggcaggat

SEQ ID NO: 520691 - DNA, 33 bp, Homo sapien
aaaatctgattgtaccacttgatcacctgtgtg

SEQ ID NO: 520692 - DNA, 33 bp, Homo sapien
aaaatctgattgtaccgcttgatcacctgtgtg

SEQ ID NO: 520693 - DNA, 33 bp, Homo sapien
acagataagcctgtacaccaaactgagggaagt

SEQ ID NO: 520694 - DNA, 33 bp, Homo sapien
acagataagcctgtacgccaaactgagggaagt

SEQ ID NO: 520695 - DNA, 33 bp, Homo sapien
tctgagttttatgttacgtgggctacacctatt

SEQ ID NO: 520696 - DNA, 33 bp, Homo sapien
tctgagttttatgttatgtgggctacacctatt

SEQ ID NO: 520697 - DNA, 33 bp, Homo sapien
tgtgaaatcttctgaacgtaccactaacaccta

SEQ ID NO: 520698 - DNA, 33 bp, Homo sapien
tgtgaaatcttctgaatgtaccactaacaccta

SEQ ID NO: 520699 - DNA, 33 bp, Homo sapien
tattttcattactaagaacaatccatatttaaa

SEQ ID NO: 520700 - DNA, 33 bp, Homo sapien
tattttcattactaagcacaatccatatttaaa

SEQ ID NO: 520701 - DNA, 33 bp, Homo sapien
agatctttgctgtgaaccttaatcttttctagg

SEQ ID NO: 520702 - DNA, 33 bp, Homo sapien
agatctttgctgtgaatcttaatcttttctagg

SEQ ID NO: 520703 - DNA, 33 bp, Homo sapien
atgaagggctccataacagttaatgaaggtaag

SEQ ID NO: 520704 - DNA, 33 bp, Homo sapien
atgaagggctccataatagttaatgaaggtaag

SEQ ID NO: 520705 - DNA, 33 bp, Homo sapien
taatcattgatttagaaacagttaagatataac

SEQ ID NO: 520706 - DNA, 33 bp, Homo sapien
taatcattgatttagatacagttaagatataac

SEQ ID NO: 520707 - DNA, 33 bp, Homo sapien
tcctgaaaaggacttcacaacatttttgtttat

SEQ ID NO: 520708 - DNA, 33 bp, Homo sapien
tcctgaaaaggacttcgcaacatttttgtttat

SEQ ID NO: 520709 - DNA, 33 bp, Homo sapien
caaggagaacactaagactcaggaactaaagta

SEQ ID NO: 520710 - DNA, 33 bp, Homo sapien
caaggagaacactaaggctcaggaactaaagta

SEQ ID NO: 520711 - DNA, 33 bp, Homo sapien
cttgggaactagtctaggaacaagcaacaggat

SEQ ID NO: 520712 - DNA, 33 bp, Homo sapien
cttgggaactagtctatgaacaagcaacaggat

SEQ ID NO: 520713 - DNA, 33 bp, Homo sapien
atgttaaataaggggcaatgaaccagtaagtag

SEQ ID NO: 520714 - DNA, 33 bp, Homo sapien
atgttaaataaggggccatgaaccagtaagtag

SEQ ID NO: 520715 - DNA, 33 bp, Homo sapien
cagcaaaactcttcaaaaacttcccaaagctat

SEQ ID NO: 520716 - DNA, 33 bp, Homo sapien
cagcaaaactcttcaacaacttcccaaagctat

SEQ ID NO: 520717 - DNA, 33 bp, Homo sapien
gagagaaatgagtggacacacaaggaataaata

SEQ ID NO: 520718 - DNA, 33 bp, Homo sapien
gagagaaatgagtggatacacaaggaataaata

SEQ ID NO: 520719 - DNA, 33 bp, Homo sapien
ttcagtcctaacagtgaagattatacacacaca

SEQ ID NO: 520720 - DNA, 33 bp, Homo sapien
ttcagtcctaacagtggagattatacacacaca

SEQ ID NO: 520721 - DNA, 33 bp, Homo sapien
ggatgccaaaagcacaatgagggatggagtgat

SEQ ID NO: 520722 - DNA, 33 bp, Homo sapien
ggatgccaaaagcacagtgagggatggagtgat

SEQ ID NO: 520723 - DNA, 33 bp, Homo sapien
ccattcatcatcagtgaaatttgggtggagttg

SEQ ID NO: 520724 - DNA, 33 bp, Homo sapien
ccattcatcatcagtggaatttgggtggagttg

SEQ ID NO: 520725 - DNA, 33 bp, Homo sapien
ttctcttctatttctaagctcctttgaactgcc

SEQ ID NO: 520726 - DNA, 33 bp, Homo sapien
ttctcttctatttctaggctcctttgaactgcc

SEQ ID NO: 520727 - DNA, 33 bp, Homo sapien
aataatgtgaaaaaacacgcatctttttcttca

SEQ ID NO: 520728 - DNA, 33 bp, Homo sapien
aataatgtgaaaaaactcgcatctttttcttca

SEQ ID NO: 520729 - DNA, 33 bp, Homo sapien
gagacagctatcacccaaagataccaatgatct

SEQ ID NO: 520730 - DNA, 33 bp, Homo sapien
gagacagctatcacccgaagataccaatgatct

SEQ ID NO: 520731 - DNA, 33 bp, Homo sapien
tatttttgtaccatgaacaactcaatttctttt

SEQ ID NO: 520732 - DNA, 33 bp, Homo sapien
tatttttgtaccatgaccaactcaatttctttt

SEQ ID NO: 520733 - DNA, 33 bp, Homo sapien
ccaaatttgactcttccctctgttcaatcttac

SEQ ID NO: 520734 - DNA, 33 bp, Homo sapien
ccaaatttgactcttctctctgttcaatcttac

SEQ ID NO: 520735 - DNA, 33 bp, Homo sapien
cttgtagattcctttacgtaggtaatatgtctc

SEQ ID NO: 520736 - DNA, 33 bp, Homo sapien
cttgtagattcctttaggtaggtaatatgtctc

SEQ ID NO: 520737 - DNA, 33 bp, Homo sapien
caagtggcacatcacaataacttaagctcactt

SEQ ID NO: 520738 - DNA, 33 bp, Homo sapien
caagtggcacatcacagtaacttaagctcactt

SEQ ID NO: 520739 - DNA, 33 bp, Homo sapien
gagtgtgtaaatacaaaagtgtgctcaatacac

SEQ ID NO: 520740 - DNA, 33 bp, Homo sapien
gagtgtgtaaatacaagagtgtgctcaatacac

SEQ ID NO: 520741 - DNA, 33 bp, Homo sapien
caggagaatctgaacacgtcttggagggacaag

SEQ ID NO: 520742 - DNA, 33 bp, Homo sapien
caggagaatctgaacatgtcttggagggacaag

SEQ ID NO: 520743 - DNA, 33 bp, Homo sapien
cctggatcacactggacgtgcaggctgtgagtt

SEQ ID NO: 520744 - DNA, 33 bp, Homo sapien
cctggatcacactggatgtgcaggctgtgagtt

SEQ ID NO: 520745 - DNA, 33 bp, Homo sapien
caggtgcagcaggcataatgatcagtaaataac

SEQ ID NO: 520746 - DNA, 33 bp, Homo sapien
caggtgcagcaggcatcatgatcagtaaataac

SEQ ID NO: 520747 - DNA, 33 bp, Homo sapien
tttcccacatacgcagacaaaggcagcagttgg

SEQ ID NO: 520748 - DNA, 33 bp, Homo sapien
tttcccacatacgcagtcaaaggcagcagttgg

SEQ ID NO: 520749 - DNA, 33 bp, Homo sapien
aggagacactggacacaatttctttgtaaatta

SEQ ID NO: 520750 - DNA, 33 bp, Homo sapien
aggagacactggacacgatttctttgtaaatta

SEQ ID NO: 520751 - DNA, 33 bp, Homo sapien
aggagaccagcaaagaatattgaaagaaagaaa

SEQ ID NO: 520752 - DNA, 33 bp, Homo sapien
aggagaccagcaaagactattgaaagaaagaaa

SEQ ID NO: 520753 - DNA, 33 bp, Homo sapien
agggaatgtgaccaaaatgccaggaaaatactt

SEQ ID NO: 520754 - DNA, 33 bp, Homo sapien
agggaatgtgaccaaagtgccaggaaaatactt

SEQ ID NO: 520755 - DNA, 33 bp, Homo sapien
tacaattttcctcctcactcaaggcataggctc

SEQ ID NO: 520756 - DNA, 33 bp, Homo sapien
tacaattttcctcctcgctcaaggcataggctc

SEQ ID NO: 520757 - DNA, 33 bp, Homo sapien
tatcagcattacttgaagatttgttggaaatga

SEQ ID NO: 520758 - DNA, 33 bp, Homo sapien
tatcagcattacttgaggatttgttggaaatga

SEQ ID NO: 520759 - DNA, 33 bp, Homo sapien
gttcagaggttaaaaaatgggctcaaagtcata

SEQ ID NO: 520760 - DNA, 33 bp, Homo sapien
gttcagaggttaaaaagtgggctcaaagtcata

SEQ ID NO: 520761 - DNA, 33 bp, Homo sapien
cagtttattgatgaggaaactcaagagcataga

SEQ ID NO: 520762 - DNA, 33 bp, Homo sapien
cagtttattgatgagggaactcaagagcataga

SEQ ID NO: 520763 - DNA, 33 bp, Homo sapien
aattagttcatgcaaaatggaagttatagactc

SEQ ID NO: 520764 - DNA, 33 bp, Homo sapien
aattagttcatgcaaagtggaagttatagactc

SEQ ID NO: 520765 - DNA, 33 bp, Homo sapien
gttcctcctttgccaacgttagttagaaagaag

SEQ ID NO: 520766 - DNA, 33 bp, Homo sapien
gttcctcctttgccaatgttagttagaaagaag

SEQ ID NO: 520767 - DNA, 33 bp, Homo sapien
gaacaatgtgatttgacggaaaccattagctgg

SEQ ID NO: 520768 - DNA, 33 bp, Homo sapien
gaacaatgtgatttgatggaaaccattagctgg

SEQ ID NO: 520769 - DNA, 33 bp, Homo sapien
ttcctcattataaccaactatctggcctggttt

SEQ ID NO: 520770 - DNA, 33 bp, Homo sapien
ttcctcattataaccagctatctggcctggttt

SEQ ID NO: 520771 - DNA, 33 bp, Homo sapien
cgaagttactcaacacaaaggatttggaaagta

SEQ ID NO: 520772 - DNA, 33 bp, Homo sapien
cgaagttactcaacacgaaggatttggaaagta

SEQ ID NO: 520773 - DNA, 33 bp, Homo sapien
attgctaaaacctcacggaacagatgcagccaa

SEQ ID NO: 520774 - DNA, 33 bp, Homo sapien
attgctaaaacctcactgaacagatgcagccaa

SEQ ID NO: 520775 - DNA, 33 bp, Homo sapien
aaaacgtttgctgatacgttaactgaattttcc

SEQ ID NO: 520776 - DNA, 33 bp, Homo sapien
aaaacgtttgctgatatgttaactgaattttcc

SEQ ID NO: 520777 - DNA, 33 bp, Homo sapien
attatggttgtattaccgctgttaaaagctgag

SEQ ID NO: 520778 - DNA, 33 bp, Homo sapien
attatggttgtattactgctgttaaaagctgag

SEQ ID NO: 520779 - DNA, 33 bp, Homo sapien
agtttggcaaacatcaacaaagttctagagagc

SEQ ID NO: 520780 - DNA, 33 bp, Homo sapien
agtttggcaaacatcagcaaagttctagagagc

SEQ ID NO: 520781 - DNA, 33 bp, Homo sapien
cacggaatgtagttgacgcagaagtttgaccag

SEQ ID NO: 520782 - DNA, 33 bp, Homo sapien
cacggaatgtagttgatgcagaagtttgaccag

SEQ ID NO: 520783 - DNA, 33 bp, Homo sapien
agggtgctttgattccaggaagatggaggctat

SEQ ID NO: 520784 - DNA, 33 bp, Homo sapien
agggtgctttgattccgggaagatggaggctat

SEQ ID NO: 520785 - DNA, 33 bp, Homo sapien
cctccaactcttccccacaagcaaaaatcttag

SEQ ID NO: 520786 - DNA, 33 bp, Homo sapien
cctccaactcttccccgcaagcaaaaatcttag

SEQ ID NO: 520787 - DNA, 33 bp, Homo sapien
gagtgacagtgcagaccaagaactggagtcatt

SEQ ID NO: 520788 - DNA, 33 bp, Homo sapien
gagtgacagtgcagacgaagaactggagtcatt

SEQ ID NO: 520789 - DNA, 33 bp, Homo sapien
ggcctggagagagaacaaattgagaaagagtac

SEQ ID NO: 520790 - DNA, 33 bp, Homo sapien
ggcctggagagagaaccaattgagaaagagtac

SEQ ID NO: 520791 - DNA, 33 bp, Homo sapien
tttaaccttaaggaagccaatcttactgcatct

SEQ ID NO: 520792 - DNA, 33 bp, Homo sapien
tttaaccttaaggaaggcaatcttactgcatct

SEQ ID NO: 520793 - DNA, 33 bp, Homo sapien
acagataagcttctaaagacaaattttcacctc

SEQ ID NO: 520794 - DNA, 33 bp, Homo sapien
acagataagcttctaaggacaaattttcacctc

SEQ ID NO: 520795 - DNA, 33 bp, Homo sapien
taaactgagatcataaatgcctatttttttctc

SEQ ID NO: 520796 - DNA, 33 bp, Homo sapien
taaactgagatcataattgcctatttttttctc

SEQ ID NO: 520797 - DNA, 33 bp, Homo sapien
taccatgtactccataatataatcttttaaatg

SEQ ID NO: 520798 - DNA, 33 bp, Homo sapien
taccatgtactccatactataatcttttaaatg

SEQ ID NO: 520799 - DNA, 33 bp, Homo sapien
ctagagtgttttttggccatggctaccaaaatg

SEQ ID NO: 520800 - DNA, 33 bp, Homo sapien
ctagagtgttttttggtcatggctaccaaaatg

SEQ ID NO: 520801 - DNA, 33 bp, Homo sapien
gattttacaagttttagctgagtgggttcctac

SEQ ID NO: 520802 - DNA, 33 bp, Homo sapien
gattttacaagttttatctgagtgggttcctac

SEQ ID NO: 520803 - DNA, 33 bp, Homo sapien
ctgttggttttcaaaacagtctaccttaattgg

SEQ ID NO: 520804 - DNA, 33 bp, Homo sapien
ctgttggttttcaaaatagtctaccttaattgg

SEQ ID NO: 520805 - DNA, 33 bp, Homo sapien
ggcaaatatgtgactaagtaaaagaaattcatc

SEQ ID NO: 520806 - DNA, 33 bp, Homo sapien
ggcaaatatgtgactaggtaaaagaaattcatc

SEQ ID NO: 520807 - DNA, 33 bp, Homo sapien
caaggaaatgaaatgagagttcaaaggaggaag

SEQ ID NO: 520808 - DNA, 33 bp, Homo sapien
caaggaaatgaaatgatagttcaaaggaggaag

SEQ ID NO: 520809 - DNA, 33 bp, Homo sapien
ttgggaataaccaaaccagaaaggccaattaag

SEQ ID NO: 520810 - DNA, 33 bp, Homo sapien
ttgggaataaccaaactagaaaggccaattaag

SEQ ID NO: 520811 - DNA, 33 bp, Homo sapien
gttctttgattacagactaattttctagcccca

SEQ ID NO: 520812 - DNA, 33 bp, Homo sapien
gttctttgattacagattaattttctagcccca

SEQ ID NO: 520813 - DNA, 33 bp, Homo sapien
aacttgctggccttcaggtttcaaattaaatat

SEQ ID NO: 520814 - DNA, 33 bp, Homo sapien
aacttgctggccttcatgtttcaaattaaatat

SEQ ID NO: 520815 - DNA, 33 bp, Homo sapien
tatcattgtggttgaacagcattttgcaaatga

SEQ ID NO: 520816 - DNA, 33 bp, Homo sapien
tatcattgtggttgaagagcattttgcaaatga

SEQ ID NO: 520817 - DNA, 33 bp, Homo sapien
aactctctgatttgaagtaagacctatttttat

SEQ ID NO: 520818 - DNA, 33 bp, Homo sapien
aactctctgatttgaattaagacctatttttat

SEQ ID NO: 520819 - DNA, 33 bp, Homo sapien
gacctctttcactaaacgacaagccaatatact

SEQ ID NO: 520820 - DNA, 33 bp, Homo sapien
gacctctttcactaaatgacaagccaatatact

SEQ ID NO: 520821 - DNA, 33 bp, Homo sapien
tggtgttagaaaatagaaaaagatgagaagtag

SEQ ID NO: 520822 - DNA, 33 bp, Homo sapien
tggtgttagaaaataggaaaagatgagaagtag

SEQ ID NO: 520823 - DNA, 33 bp, Homo sapien
gtgctgcaatttatcaataagactggcttatta

SEQ ID NO: 520824 - DNA, 33 bp, Homo sapien
gtgctgcaatttatcagtaagactggcttatta

SEQ ID NO: 520825 - DNA, 33 bp, Homo sapien
aaccagttcctactcacatatcttgtaggccac

SEQ ID NO: 520826 - DNA, 33 bp, Homo sapien
aaccagttcctactcatatatcttgtaggccac

SEQ ID NO: 520827 - DNA, 33 bp, Homo sapien
caattaatgttaatcaaaattcccaaatctttt

SEQ ID NO: 520828 - DNA, 33 bp, Homo sapien
caattaatgttaatcagaattcccaaatctttt

SEQ ID NO: 520829 - DNA, 33 bp, Homo sapien
atctcaagaccacaacaggaacatagccaagtc

SEQ ID NO: 520830 - DNA, 33 bp, Homo sapien
atctcaagaccacaacgggaacatagccaagtc

SEQ ID NO: 520831 - DNA, 33 bp, Homo sapien
tctttcctatcagttaaaatgctttagttgtga

SEQ ID NO: 520832 - DNA, 33 bp, Homo sapien
tctttcctatcagttataatgctttagttgtga

SEQ ID NO: 520833 - DNA, 33 bp, Homo sapien
actgataggaaagaccacatattggtgaaaaag

SEQ ID NO: 520834 - DNA, 33 bp, Homo sapien
actgataggaaagaccgcatattggtgaaaaag

SEQ ID NO: 520835 - DNA, 33 bp, Homo sapien
gcactctcctctggaacagctgctgattccttc

SEQ ID NO: 520836 - DNA, 33 bp, Homo sapien
gcactctcctctggaatagctgctgattccttc

SEQ ID NO: 520837 - DNA, 33 bp, Homo sapien
gagaaaggcaccatataagtgagttgactcaaa

SEQ ID NO: 520838 - DNA, 33 bp, Homo sapien
gagaaaggcaccatatgagtgagttgactcaaa

SEQ ID NO: 520839 - DNA, 33 bp, Homo sapien
aagctgttaaatctcaagactgtgtttggatgt

SEQ ID NO: 520840 - DNA, 33 bp, Homo sapien
aagctgttaaatctcaggactgtgtttggatgt

SEQ ID NO: 520841 - DNA, 33 bp, Homo sapien
ggtttcattttaaatgcaatggatgatcactga

SEQ ID NO: 520842 - DNA, 33 bp, Homo sapien
ggtttcattttaaatgtaatggatgatcactga

SEQ ID NO: 520843 - DNA, 33 bp, Homo sapien
cttatgcttactgtcccacttattttaaaaatt

SEQ ID NO: 520844 - DNA, 33 bp, Homo sapien
cttatgcttactgtcctacttattttaaaaatt

SEQ ID NO: 520845 - DNA, 33 bp, Homo sapien
aaggatgtttctactcacccagaatagcacttc

SEQ ID NO: 520846 - DNA, 33 bp, Homo sapien
aaggatgtttctactcgcccagaatagcacttc

SEQ ID NO: 520847 - DNA, 33 bp, Homo sapien
tgtttgcctttctatcagagcaagatttatgta

SEQ ID NO: 520848 - DNA, 33 bp, Homo sapien
tgtttgcctttctatcggagcaagatttatgta

SEQ ID NO: 520849 - DNA, 33 bp, Homo sapien
tgcttgttagattctgaaaatcctgtttccttc

SEQ ID NO: 520850 - DNA, 33 bp, Homo sapien
tgcttgttagattctgcaaatcctgtttccttc

SEQ ID NO: 520851 - DNA, 33 bp, Homo sapien
tatttgcttcttcaacagtatcgtaaagattcc

SEQ ID NO: 520852 - DNA, 33 bp, Homo sapien
tatttgcttcttcaactgtatcgtaaagattcc

SEQ ID NO: 520853 - DNA, 33 bp, Homo sapien
tgcccagcgtcgatcccggaagatgtagctgcc

SEQ ID NO: 520854 - DNA, 33 bp, Homo sapien
tgcccagcgtcgatcctggaagatgtagctgcc

SEQ ID NO: 520855 - DNA, 33 bp, Homo sapien
gttctgtagcctctcccctgagattctgattgc

SEQ ID NO: 520856 - DNA, 33 bp, Homo sapien
gttctgtagcctctccgctgagattctgattgc

SEQ ID NO: 520857 - DNA, 33 bp, Homo sapien
cattccaaattatagaatatcaggctgacagcc

SEQ ID NO: 520858 - DNA, 33 bp, Homo sapien
cattccaaattatagactatcaggctgacagcc

SEQ ID NO: 520859 - DNA, 33 bp, Homo sapien
agaggaaagagataaactgaggaaagaacagtt

SEQ ID NO: 520860 - DNA, 33 bp, Homo sapien
agaggaaagagataaattgaggaaagaacagtt

SEQ ID NO: 520861 - DNA, 33 bp, Homo sapien
taaaataccaggaataaatccaagtgacttttt

SEQ ID NO: 520862 - DNA, 33 bp, Homo sapien
taaaataccaggaatacatccaagtgacttttt

SEQ ID NO: 520863 - DNA, 33 bp, Homo sapien
tgttttaacatgagaggaaaagcatggtgaaag

SEQ ID NO: 520864 - DNA, 33 bp, Homo sapien
tgttttaacatgagagtaaaagcatggtgaaag

SEQ ID NO: 520865 - DNA, 33 bp, Homo sapien
ttaagctggcctgtaaggttcttcaaattgtga

SEQ ID NO: 520866 - DNA, 33 bp, Homo sapien
ttaagctggcctgtaatgttcttcaaattgtga

SEQ ID NO: 520867 - DNA, 33 bp, Homo sapien
ctcatcagcagtataacgtggaagagggtttaa

SEQ ID NO: 520868 - DNA, 33 bp, Homo sapien
ctcatcagcagtataatgtggaagagggtttaa

SEQ ID NO: 520869 - DNA, 33 bp, Homo sapien
ctcctcttactcataaatggcttattcctttct

SEQ ID NO: 520870 - DNA, 33 bp, Homo sapien
ctcctcttactcataagtggcttattcctttct

SEQ ID NO: 520871 - DNA, 33 bp, Homo sapien
tcaataactggcaaaaacttcatttaaaaatag

SEQ ID NO: 520872 - DNA, 33 bp, Homo sapien
tcaataactggcaaaagcttcatttaaaaatag

SEQ ID NO: 520873 - DNA, 33 bp, Homo sapien
tgtctgttttgagggcacgttgaaaacagtgtt

SEQ ID NO: 520874 - DNA, 33 bp, Homo sapien
tgtctgttttgagggcgcgttgaaaacagtgtt

SEQ ID NO: 520875 - DNA, 33 bp, Homo sapien
attacaaatgaagcaccataaatgttttatcca

SEQ ID NO: 520876 - DNA, 33 bp, Homo sapien
attacaaatgaagcacgataaatgttttatcca

SEQ ID NO: 520877 - DNA, 33 bp, Homo sapien
ttatgtacatttgtggaagatatagctcagtca

SEQ ID NO: 520878 - DNA, 33 bp, Homo sapien
ttatgtacatttgtgggagatatagctcagtca

SEQ ID NO: 520879 - DNA, 33 bp, Homo sapien
tcatgctcaaataaatgattgtctaactcttca

SEQ ID NO: 520880 - DNA, 33 bp, Homo sapien
tcatgctcaaataaattattgtctaactcttca

SEQ ID NO: 520881 - DNA, 33 bp, Homo sapien
ttccctttttgtgggcagacccatattttctag

SEQ ID NO: 520882 - DNA, 33 bp, Homo sapien
ttccctttttgtgggctgacccatattttctag

SEQ ID NO: 520883 - DNA, 33 bp, Homo sapien
catttccactctttcaataattgacagaataag

SEQ ID NO: 520884 - DNA, 33 bp, Homo sapien
catttccactctttcagtaattgacagaataag

SEQ ID NO: 520885 - DNA, 33 bp, Homo sapien
tatttagactggaaaagagtggtgtctgaatgg

SEQ ID NO: 520886 - DNA, 33 bp, Homo sapien
tatttagactggaaaatagtggtgtctgaatgg

SEQ ID NO: 520887 - DNA, 33 bp, Homo sapien
gcctgtttggccactactaccaatgaagtattt

SEQ ID NO: 520888 - DNA, 33 bp, Homo sapien
gcctgtttggccactattaccaatgaagtattt

SEQ ID NO: 520889 - DNA, 33 bp, Homo sapien
tcattgactttgaaaaaaattccagtcattatc

SEQ ID NO: 520890 - DNA, 33 bp, Homo sapien
tcattgactttgaaaagaattccagtcattatc

SEQ ID NO: 520891 - DNA, 33 bp, Homo sapien
gtggattactacaagacggcattttctttctgt

SEQ ID NO: 520892 - DNA, 33 bp, Homo sapien
gtggattactacaagatggcattttctttctgt

SEQ ID NO: 520893 - DNA, 33 bp, Homo sapien
aacatttggctctgaaactcaacctggaatcct

SEQ ID NO: 520894 - DNA, 33 bp, Homo sapien
aacatttggctctgaagctcaacctggaatcct

SEQ ID NO: 520895 - DNA, 33 bp, Homo sapien
tttttcatgactgatacgacattttgttagaag

SEQ ID NO: 520896 - DNA, 33 bp, Homo sapien
tttttcatgactgatatgacattttgttagaag

SEQ ID NO: 520897 - DNA, 33 bp, Homo sapien
ggaaggggtgatgctaaaattttttcatgactg

SEQ ID NO: 520898 - DNA, 33 bp, Homo sapien
ggaaggggtgatgctagaattttttcatgactg

SEQ ID NO: 520899 - DNA, 33 bp, Homo sapien
tgaagccataaggcaaagtttctagttttattt

SEQ ID NO: 520900 - DNA, 33 bp, Homo sapien
tgaagccataaggcaacgtttctagttttattt

SEQ ID NO: 520901 - DNA, 33 bp, Homo sapien
atgtgtcaacactgataaaaagtagataaaact

SEQ ID NO: 520902 - DNA, 33 bp, Homo sapien
atgtgtcaacactgatgaaaagtagataaaact

SEQ ID NO: 520903 - DNA, 33 bp, Homo sapien
gtactactttggtctccattttatctgcacatc

SEQ ID NO: 520904 - DNA, 33 bp, Homo sapien
gtactactttggtctctattttatctgcacatc

SEQ ID NO: 520905 - DNA, 33 bp, Homo sapien
ataggcccgtaggaaggccagcaggaagaagag

SEQ ID NO: 520906 - DNA, 33 bp, Homo sapien
ataggcccgtaggaagtccagcaggaagaagag

SEQ ID NO: 520907 - DNA, 33 bp, Homo sapien
tgatgataaggagaaacgataagaagatgctgg

SEQ ID NO: 520908 - DNA, 33 bp, Homo sapien
tgatgataaggagaaaggataagaagatgctgg

SEQ ID NO: 520909 - DNA, 33 bp, Homo sapien
atagataccgtagagcactagaacctaattccc

SEQ ID NO: 520910 - DNA, 33 bp, Homo sapien
atagataccgtagagcgctagaacctaattccc

SEQ ID NO: 520911 - DNA, 33 bp, Homo sapien
cataaatacttactgaggacattttttatgcca

SEQ ID NO: 520912 - DNA, 33 bp, Homo sapien
cataaatacttactgatgacattttttatgcca

SEQ ID NO: 520913 - DNA, 33 bp, Homo sapien
agcttccatgcctccaactcttgctctacataa

SEQ ID NO: 520914 - DNA, 33 bp, Homo sapien
agcttccatgcctccagctcttgctctacataa

SEQ ID NO: 520915 - DNA, 33 bp, Homo sapien
cccacactttcacatacgatcttaggctttgca

SEQ ID NO: 520916 - DNA, 33 bp, Homo sapien
cccacactttcacatatgatcttaggctttgca

SEQ ID NO: 520917 - DNA, 33 bp, Homo sapien
atacacaaacacatccacttatacacacactgc

SEQ ID NO: 520918 - DNA, 33 bp, Homo sapien
atacacaaacacatccgcttatacacacactgc

SEQ ID NO: 520919 - DNA, 33 bp, Homo sapien
gaagttacagttgccacctggacactttatgct

SEQ ID NO: 520920 - DNA, 33 bp, Homo sapien
gaagttacagttgccatctggacactttatgct

SEQ ID NO: 520921 - DNA, 33 bp, Homo sapien
tgccctagaggaccagcatattctgtgcagaat

SEQ ID NO: 520922 - DNA, 33 bp, Homo sapien
tgccctagaggaccagtatattctgtgcagaat

SEQ ID NO: 520923 - DNA, 33 bp, Homo sapien
cttagtcaatgaagacagcaccgatttaaatct

SEQ ID NO: 520924 - DNA, 33 bp, Homo sapien
cttagtcaatgaagacggcaccgatttaaatct

SEQ ID NO: 520925 - DNA, 33 bp, Homo sapien
atagtacttccccaaacaaaactgcctttataa

SEQ ID NO: 520926 - DNA, 33 bp, Homo sapien
atagtacttccccaaataaaactgcctttataa

SEQ ID NO: 520927 - DNA, 33 bp, Homo sapien
accagtgctggtcaacaaggccacaactataat

SEQ ID NO: 520928 - DNA, 33 bp, Homo sapien
accagtgctggtcaacgaggccacaactataat

SEQ ID NO: 520929 - DNA, 33 bp, Homo sapien
tgaggaatttataactcactaatggaggcaatc

SEQ ID NO: 520930 - DNA, 33 bp, Homo sapien
tgaggaatttataactgactaatggaggcaatc

SEQ ID NO: 520931 - DNA, 33 bp, Homo sapien
agacttagactaagccacattaccaacttctct

SEQ ID NO: 520932 - DNA, 33 bp, Homo sapien
agacttagactaagccgcattaccaacttctct

SEQ ID NO: 520933 - DNA, 33 bp, Homo sapien
ggagattcactcctaacagggaagacatctgaa

SEQ ID NO: 520934 - DNA, 33 bp, Homo sapien
ggagattcactcctaatagggaagacatctgaa

SEQ ID NO: 520935 - DNA, 33 bp, Homo sapien
tcagtacactttgttacgtagattccactggtg

SEQ ID NO: 520936 - DNA, 33 bp, Homo sapien
tcagtacactttgttatgtagattccactggtg

SEQ ID NO: 520937 - DNA, 33 bp, Homo sapien
tgttccagtcatcagaatataactgacagctaa

SEQ ID NO: 520938 - DNA, 33 bp, Homo sapien
tgttccagtcatcagagtataactgacagctaa

SEQ ID NO: 520939 - DNA, 33 bp, Homo sapien
tagatcatatcctttacgtccaatcatatttct

SEQ ID NO: 520940 - DNA, 33 bp, Homo sapien
tagatcatatcctttatgtccaatcatatttct

SEQ ID NO: 520941 - DNA, 33 bp, Homo sapien
taacatctaattttaccgagtctgaatcccaat

SEQ ID NO: 520942 - DNA, 33 bp, Homo sapien
taacatctaattttactgagtctgaatcccaat

SEQ ID NO: 520943 - DNA, 33 bp, Homo sapien
caggcccaaggcagaaccactgacaagcccttt

SEQ ID NO: 520944 - DNA, 33 bp, Homo sapien
caggcccaaggcagaatcactgacaagcccttt

SEQ ID NO: 520945 - DNA, 33 bp, Homo sapien
ctgcagatccgcttctgacaaggcttggcctgg

SEQ ID NO: 520946 - DNA, 33 bp, Homo sapien
ctgcagatccgcttcttacaaggcttggcctgg

SEQ ID NO: 520947 - DNA, 33 bp, Homo sapien
agtagaatcagacaaacaggctatgactgtatt

SEQ ID NO: 520948 - DNA, 33 bp, Homo sapien
agtagaatcagacaaataggctatgactgtatt

SEQ ID NO: 520949 - DNA, 33 bp, Homo sapien
tttatatctggctacactgaaatctgaataaat

SEQ ID NO: 520950 - DNA, 33 bp, Homo sapien
tttatatctggctacattgaaatctgaataaat

SEQ ID NO: 520951 - DNA, 33 bp, Homo sapien
gatccagttgatgaacacgaagtcaagagcttt

SEQ ID NO: 520952 - DNA, 33 bp, Homo sapien
gatccagttgatgaacgcgaagtcaagagcttt

SEQ ID NO: 520953 - DNA, 33 bp, Homo sapien
tttgctccagtctataagagagtaatcagaatg

SEQ ID NO: 520954 - DNA, 33 bp, Homo sapien
tttgctccagtctataggagagtaatcagaatg

SEQ ID NO: 520955 - DNA, 33 bp, Homo sapien
aaacactacaaataacacttagtctgcaaaatg

SEQ ID NO: 520956 - DNA, 33 bp, Homo sapien
aaacactacaaataactcttagtctgcaaaatg

SEQ ID NO: 520957 - DNA, 33 bp, Homo sapien; identical to SEQ ID NO: 520955

SEQ ID NO: 520958 - DNA, 33 bp, Homo sapien; identical to SEQ ID NO: 520956

SEQ ID NO: 520959 - DNA, 33 bp, Homo sapien
gattcatttcttcagaacatattagccctgaac

SEQ ID NO: 520960 - DNA, 33 bp, Homo sapien
gattcatttcttcagagcatattagccctgaac

SEQ ID NO: 520961 - DNA, 33 bp, Homo sapien
cctgacccagtagaaacgctttgcaaccagatg

SEQ ID NO: 520962 - DNA, 33 bp, Homo sapien
cctgacccagtagaaatgctttgcaaccagatg

SEQ ID NO: 520963 - DNA, 33 bp, Homo sapien
cttttcaaatttgatacgctattctaagtaatc

SEQ ID NO: 520964 - DNA, 33 bp, Homo sapien
cttttcaaatttgatatgctattctaagtaatc

SEQ ID NO: 520965 - DNA, 33 bp, Homo sapien
catttctctgggtccaatgaaataaggttaata

SEQ ID NO: 520966 - DNA, 33 bp, Homo sapien
catttctctgggtccagtgaaataaggttaata

SEQ ID NO: 520967 - DNA, 33 bp, Homo sapien
gcaactacttactccaactcttttagttccagg

SEQ ID NO: 520968 - DNA, 33 bp, Homo sapien
gcaactacttactccatctcttttagttccagg

SEQ ID NO: 520969 - DNA, 33 bp, Homo sapien
atagtagcattttagaaccttggtgggaatttg

SEQ ID NO: 520970 - DNA, 33 bp, Homo sapien
atagtagcattttagacccttggtgggaatttg

SEQ ID NO: 520971 - DNA, 33 bp, Homo sapien
tatagagtgtctgtaacatagtaaggaaatctt

SEQ ID NO: 520972 - DNA, 33 bp, Homo sapien
tatagagtgtctgtaatatagtaaggaaatctt

SEQ ID NO: 520973 - DNA, 33 bp, Homo sapien
agccaatcatacgccaaattcaaaatgtctctg

SEQ ID NO: 520974 - DNA, 33 bp, Homo sapien
agccaatcatacgccagattcaaaatgtctctg

SEQ ID NO: 520975 - DNA, 33 bp, Homo sapien
ctttatctgtgtgcaaagtatattccattcccc

SEQ ID NO: 520976 - DNA, 33 bp, Homo sapien
ctttatctgtgtgcaaggtatattccattcccc

SEQ ID NO: 520977 - DNA, 33 bp, Homo sapien
tgactaattggagaccagaaccagtgaataaat

SEQ ID NO: 520978 - DNA, 33 bp, Homo sapien
tgactaattggagacccgaaccagtgaataaat

SEQ ID NO: 520979 - DNA, 33 bp, Homo sapien
gctgctagtgacaagaagctcactacttgggtg

SEQ ID NO: 520980 - DNA, 33 bp, Homo sapien
gctgctagtgacaagaggctcactacttgggtg

SEQ ID NO: 520981 - DNA, 33 bp, Homo sapien
ttgaagtcaaaatagcaatgttttatttgcctt

SEQ ID NO: 520982 - DNA, 33 bp, Homo sapien
ttgaagtcaaaatagcgatgttttatttgcctt

SEQ ID NO: 520983 - DNA, 33 bp, Homo sapien
agttggtgctgcattcaattagcaaatacagta

SEQ ID NO: 520984 - DNA, 33 bp, Homo sapien
agttggtgctgcattctattagcaaatacagta

SEQ ID NO: 520985 - DNA, 33 bp, Homo sapien
gaagctcagagtaaaccaagcagtaaaaataca

SEQ ID NO: 520986 - DNA, 33 bp, Homo sapien
gaagctcagagtaaactaagcagtaaaaataca

SEQ ID NO: 520987 - DNA, 33 bp, Homo sapien
gtcatgtaccatagtactaaagctgaagtagct

SEQ ID NO: 520988 - DNA, 33 bp, Homo sapien
gtcatgtaccatagtattaaagctgaagtagct

SEQ ID NO: 520989 - DNA, 33 bp, Homo sapien
ctcacctgctgagacaatactctccacagagag

SEQ ID NO: 520990 - DNA, 33 bp, Homo sapien
ctcacctgctgagacagtactctccacagagag

SEQ ID NO: 520991 - DNA, 33 bp, Homo sapien
aatgcttgggtaattgcagcctatacatgtata

SEQ ID NO: 520992 - DNA, 33 bp, Homo sapien
aatgcttgggtaattgtagcctatacatgtata

SEQ ID NO: 520993 - DNA, 33 bp, Homo sapien
ctaagtaaggcagagaactaaggaaagcagcac

SEQ ID NO: 520994 - DNA, 33 bp, Homo sapien
ctaagtaaggcagagagctaaggaaagcagcac

SEQ ID NO: 520995 - DNA, 33 bp, Homo sapien
aattctttgttcctcaatagaagactgaagaat

SEQ ID NO: 520996 - DNA, 33 bp, Homo sapien
aattctttgttcctcagtagaagactgaagaat

SEQ ID NO: 520997 - DNA, 33 bp, Homo sapien
aaaaccgctggttggacgaaaaacgtatacagc

SEQ ID NO: 520998 - DNA, 33 bp, Homo sapien
aaaaccgctggttggatgaaaaacgtatacagc

SEQ ID NO: 520999 - DNA, 33 bp, Homo sapien
ctgctgaaatcctaaaaactattataagcctct

SEQ ID NO: 521000 - DNA, 33 bp, Homo sapien
ctgctgaaatcctaaagactattataagcctct

SEQ ID NO: 521001 - DNA, 33 bp, Homo sapien
tggcagtgagtacaacaatccgatcttcaatat

SEQ ID NO: 521002 - DNA, 33 bp, Homo sapien
tggcagtgagtacaacgatccgatcttcaatat

SEQ ID NO: 521003 - DNA, 33 bp, Homo sapien
tatctttcttttctccaatcttcaatatctgaa

SEQ ID NO: 521004 - DNA, 33 bp, Homo sapien
tatctttcttttctccgatcttcaatatctgaa

SEQ ID NO: 521005 - DNA, 33 bp, Homo sapien
tatatacgtacatcgacacatggatattcagat

SEQ ID NO: 521006 - DNA, 33 bp, Homo sapien
tatatacgtacatcgatacatggatattcagat

SEQ ID NO: 521007 - DNA, 33 bp, Homo sapien
ttcctccctcggcttacgttctcttccagaagg

SEQ ID NO: 521008 - DNA, 33 bp, Homo sapien
ttcctccctcggcttatgttctcttccagaagg

SEQ ID NO: 521009 - DNA, 33 bp, Homo sapien
aatctgaatttttgccaaaagctggaatgaact

SEQ ID NO: 521010 - DNA, 33 bp, Homo sapien
aatctgaatttttgccgaaagctggaatgaact

SEQ ID NO: 521011 - DNA, 33 bp, Homo sapien
gaatttgaatttgtcaataatgctctgcctttt

SEQ ID NO: 521012 - DNA, 33 bp, Homo sapien
gaatttgaatttgtcagtaatgctctgcctttt

SEQ ID NO: 521013 - DNA, 33 bp, Homo sapien
ggcccagagaagttaccagaattgaccattgtc

SEQ ID NO: 521014 - DNA, 33 bp, Homo sapien
ggcccagagaagttactagaattgaccattgtc

SEQ ID NO: 521015 - DNA, 33 bp, Homo sapien
agtgtctagatccatactaagcagaaacatgtt

SEQ ID NO: 521016 - DNA, 33 bp, Homo sapien
agtgtctagatccatattaagcagaaacatgtt

SEQ ID NO: 521017 - DNA, 33 bp, Homo sapien
gcatataaatgctttccagctgttatctcaaga

SEQ ID NO: 521018 - DNA, 33 bp, Homo sapien
gcatataaatgctttctagctgttatctcaaga

SEQ ID NO: 521019 - DNA, 33 bp, Homo sapien
atttaaatttgcccaaagtttaaagctcctgca

SEQ ID NO: 521020 - DNA, 33 bp, Homo sapien
atttaaatttgcccaatgtttaaagctcctgca

SEQ ID NO: 521021 - DNA, 33 bp, Homo sapien
acacttgctgaaacaactgcccatgattctcat

SEQ ID NO: 521022 - DNA, 33 bp, Homo sapien
acacttgctgaaacaattgcccatgattctcat

SEQ ID NO: 521023 - DNA, 33 bp, Homo sapien
gaggtatccaaaagcacgaagcagaagtgtgtt

SEQ ID NO: 521024 - DNA, 33 bp, Homo sapien
gaggtatccaaaagcatgaagcagaagtgtgtt

SEQ ID NO: 521025 - DNA, 33 bp, Homo sapien
agatttgcaacaaaaacgggatggtccagctct

SEQ ID NO: 521026 - DNA, 33 bp, Homo sapien
agatttgcaacaaaaatgggatggtccagctct

SEQ ID NO: 521027 - DNA, 33 bp, Homo sapien
cctacagtgatgatcagagccataaccactatt

SEQ ID NO: 521028 - DNA, 33 bp, Homo sapien
cctacagtgatgatcatagccataaccactatt

SEQ ID NO: 521029 - DNA, 33 bp, Homo sapien
tttgtaaacacactaacatatgcagtttctcac

SEQ ID NO: 521030 - DNA, 33 bp, Homo sapien
tttgtaaacacactaatatatgcagtttctcac

SEQ ID NO: 521031 - DNA, 33 bp, Homo sapien
caagagggtcaacaaaaaagagaacttcaaggg

SEQ ID NO: 521032 - DNA, 33 bp, Homo sapien
caagagggtcaacaaacaagagaacttcaaggg

SEQ ID NO: 521033 - DNA, 33 bp, Homo sapien
atgtcacagttcttaacagtgcaagaggccagt

SEQ ID NO: 521034 - DNA, 33 bp, Homo sapien
atgtcacagttcttaatagtgcaagaggccagt

SEQ ID NO: 521035 - DNA, 33 bp, Homo sapien
ctcaaataccttgttaagtggataagtggaagc

SEQ ID NO: 521036 - DNA, 33 bp, Homo sapien
ctcaaataccttgttaggtggataagtggaagc

SEQ ID NO: 521037 - DNA, 33 bp, Homo sapien
caattgaaccatcaaggcctagaagtcattcac

SEQ ID NO: 521038 - DNA, 33 bp, Homo sapien
caattgaaccatcaagtcctagaagtcattcac

SEQ ID NO: 521039 - DNA, 33 bp, Homo sapien
gtactagttatgtacccgaatggtgatgattaa

SEQ ID NO: 521040 - DNA, 33 bp, Homo sapien
gtactagttatgtacctgaatggtgatgattaa

SEQ ID NO: 521041 - DNA, 33 bp, Homo sapien
acctaatgctttcaagaaaataatcctatgatg

SEQ ID NO: 521042 - DNA, 33 bp, Homo sapien
acctaatgctttcaagtaaataatcctatgatg

SEQ ID NO: 521043 - DNA, 33 bp, Homo sapien
tcccaacttattaaagccttcctggaaagttgt

SEQ ID NO: 521044 - DNA, 33 bp, Homo sapien
tcccaacttattaaaggcttcctggaaagttgt

SEQ ID NO: 521045 - DNA, 33 bp, Homo sapien
aaaattgcagttaatccatttgcctagtgttcc

SEQ ID NO: 521046 - DNA, 33 bp, Homo sapien
aaaattgcagttaatctatttgcctagtgttcc

SEQ ID NO: 521047 - DNA, 33 bp, Homo sapien
tctcattgccattatcaatctttttttctaggg

SEQ ID NO: 521048 - DNA, 33 bp, Homo sapien
tctcattgccattatctatctttttttctaggg

SEQ ID NO: 521049 - DNA, 33 bp, Homo sapien
ttaatacataaaactgaagaacatttttcttaa

SEQ ID NO: 521050 - DNA, 33 bp, Homo sapien
ttaatacataaaactggagaacatttttcttaa

SEQ ID NO: 521051 - DNA, 33 bp, Homo sapien
ccagtgtatttgtttgcaggacgtgcactgttc

SEQ ID NO: 521052 - DNA, 33 bp, Homo sapien
ccagtgtatttgtttgtaggacgtgcactgttc

SEQ ID NO: 521053 - DNA, 33 bp, Homo sapien
gcctacatcaaagtaaagctgtgagaatgaaat

SEQ ID NO: 521054 - DNA, 33 bp, Homo sapien
gcctacatcaaagtaaggctgtgagaatgaaat

SEQ ID NO: 521055 - DNA, 33 bp, Homo sapien
aggacttctgagagccactcagggacctgccac

SEQ ID NO: 521056 - DNA, 33 bp, Homo sapien
aggacttctgagagccgctcagggacctgccac

SEQ ID NO: 521057 - DNA, 33 bp, Homo sapien
cagcaccatgctaaaaagaacatcaagggagta

SEQ ID NO: 521058 - DNA, 33 bp, Homo sapien
cagcaccatgctaaaaggaacatcaagggagta

SEQ ID NO: 521059 - DNA, 33 bp, Homo sapien
aaactttcatgaaggacgtaattcattgattca

SEQ ID NO: 521060 - DNA, 33 bp, Homo sapien
aaactttcatgaaggatgtaattcattgattca

SEQ ID NO: 521061 - DNA, 33 bp, Homo sapien
aggaggtaatttagaacaggagctctccctggg

SEQ ID NO: 521062 - DNA, 33 bp, Homo sapien
aggaggtaatttagaataggagctctccctggg

SEQ ID NO: 521063 - DNA, 33 bp, Homo sapien
gcaaccttgattcagaaatagttgctttttgtt

SEQ ID NO: 521064 - DNA, 33 bp, Homo sapien
gcaaccttgattcagacatagttgctttttgtt

SEQ ID NO: 521065 - DNA, 33 bp, Homo sapien
cactgcaaagtattaacatggcaaactctacgc

SEQ ID NO: 521066 - DNA, 33 bp, Homo sapien
cactgcaaagtattaagatggcaaactctacgc

SEQ ID NO: 521067 - DNA, 33 bp, Homo sapien
actgaagtgaaatccaatagttttgaaggaacc

SEQ ID NO: 521068 - DNA, 33 bp, Homo sapien
actgaagtgaaatccagtagttttgaaggaacc

SEQ ID NO: 521069 - DNA, 33 bp, Homo sapien
gtcaattcagctgtgcaatttctcctttcttct

SEQ ID NO: 521070 - DNA, 33 bp, Homo sapien
gtcaattcagctgtgcgatttctcctttcttct

SEQ ID NO: 521071 - DNA, 33 bp, Homo sapien
tagtggatgaattaagaaagaatgagaaggcac

SEQ ID NO: 521072 - DNA, 33 bp, Homo sapien
tagtggatgaattaaggaagaatgagaaggcac

SEQ ID NO: 521073 - DNA, 33 bp, Homo sapien
aggagaaataatccagaaacatgacagaattag

SEQ ID NO: 521074 - DNA, 33 bp, Homo sapien
aggagaaataatccaggaacatgacagaattag

SEQ ID NO: 521075 - DNA, 33 bp, Homo sapien
gggtgtttggtcctgaaccctccttctcttttc

SEQ ID NO: 521076 - DNA, 33 bp, Homo sapien
gggtgtttggtcctgacccctccttctcttttc

SEQ ID NO: 521077 - DNA, 33 bp, Homo sapien
tcaggaccaaacacccacaggtaggcaccctct

SEQ ID NO: 521078 - DNA, 33 bp, Homo sapien
tcaggaccaaacacccgcaggtaggcaccctct

SEQ ID NO: 521079 - DNA, 33 bp, Homo sapien
acttatagtttacatagggatttgacatgtaaa

SEQ ID NO: 521080 - DNA, 33 bp, Homo sapien
acttatagtttacatatggatttgacatgtaaa

SEQ ID NO: 521081 - DNA, 33 bp, Homo sapien
gcggtacaaatatggacgtcattaaactatttt

SEQ ID NO: 521082 - DNA, 33 bp, Homo sapien
gcggtacaaatatggatgtcattaaactatttt

SEQ ID NO: 521083 - DNA, 33 bp, Homo sapien
ggagaacttgtaatgacaacctaaaatatcacc

SEQ ID NO: 521084 - DNA, 33 bp, Homo sapien
ggagaacttgtaatgataacctaaaatatcacc

SEQ ID NO: 521085 - DNA, 33 bp, Homo sapien
ttctttggagtgcaaacagctagatttcaaaga

SEQ ID NO: 521086 - DNA, 33 bp, Homo sapien
ttctttggagtgcaaatagctagatttcaaaga

SEQ ID NO: 521087 - DNA, 33 bp, Homo sapien
agcacttaaaataataggtcagcaatttgccca

SEQ ID NO: 521088 - DNA, 33 bp, Homo sapien
agcacttaaaataatatgtcagcaatttgccca

SEQ ID NO: 521089 - DNA, 33 bp, Homo sapien
taggtttctgtgtaaacaccaattatcactaat

SEQ ID NO: 521090 - DNA, 33 bp, Homo sapien
taggtttctgtgtaaataccaattatcactaat

SEQ ID NO: 521091 - DNA, 33 bp, Homo sapien
catttttaagctagcactgaccctaagtgggtc

SEQ ID NO: 521092 - DNA, 33 bp, Homo sapien
catttttaagctagcattgaccctaagtgggtc

SEQ ID NO: 521093 - DNA, 33 bp, Homo sapien
tgtaatgtgaggaatcaaatggtcaagttataa

SEQ ID NO: 521094 - DNA, 33 bp, Homo sapien
tgtaatgtgaggaatcgaatggtcaagttataa

SEQ ID NO: 521095 - DNA, 33 bp, Homo sapien
ccggtctctcccagaaaattggaactccacata

SEQ ID NO: 521096 - DNA, 33 bp, Homo sapien
ccggtctctcccagaagattggaactccacata

SEQ ID NO: 521097 - DNA, 33 bp, Homo sapien
ggtgttgcctagaacaatggaacaaacaaccat

SEQ ID NO: 521098 - DNA, 33 bp, Homo sapien
ggtgttgcctagaacagtggaacaaacaaccat

SEQ ID NO: 521099 - DNA, 33 bp, Homo sapien
aataaaaccttatcaacactaaaagacagtgtg

SEQ ID NO: 521100 - DNA, 33 bp, Homo sapien
aataaaaccttatcaatactaaaagacagtgtg

SEQ ID NO: 521101 - DNA, 33 bp, Homo sapien
gactaagtcaaaggccaaattttatgtgtctca

SEQ ID NO: 521102 - DNA, 33 bp, Homo sapien
gactaagtcaaaggccgaattttatgtgtctca

SEQ ID NO: 521103 - DNA, 33 bp, Homo sapien
tgccttgtcttttctactaagtcagggcttgaa

SEQ ID NO: 521104 - DNA, 33 bp, Homo sapien
tgccttgtcttttctattaagtcagggcttgaa

SEQ ID NO: 521105 - DNA, 33 bp, Homo sapien
tttctattaatgggaaaaagtgcctcagaagcc

SEQ ID NO: 521106 - DNA, 33 bp, Homo sapien
tttctattaatgggaagaagtgcctcagaagcc

SEQ ID NO: 521107 - DNA, 33 bp, Homo sapien
gagtttcctgagaggacaatttaatgcaattcg

SEQ ID NO: 521108 - DNA, 33 bp, Homo sapien
gagtttcctgagaggataatttaatgcaattcg

SEQ ID NO: 521109 - DNA, 33 bp, Homo sapien
taatgagctcacatacgaagaatggcagcacag

SEQ ID NO: 521110 - DNA, 33 bp, Homo sapien
taatgagctcacatactaagaatggcagcacag

SEQ ID NO: 521111 - DNA, 33 bp, Homo sapien
agacaaagcagagaggcaaagatctgagccaac

SEQ ID NO: 521112 - DNA, 33 bp, Homo sapien
agacaaagcagagaggtaaagatctgagccaac

SEQ ID NO: 521113 - DNA, 33 bp, Homo sapien
gatgaaatggatttgacgcggttggctcagatc

SEQ ID NO: 521114 - DNA, 33 bp, Homo sapien
gatgaaatggatttgatgcggttggctcagatc

SEQ ID NO: 521115 - DNA, 33 bp, Homo sapien
agtggagaaactttgaacaatgagacctaaggg

SEQ ID NO: 521116 - DNA, 33 bp, Homo sapien
agtggagaaactttgagcaatgagacctaaggg

SEQ ID NO: 521117 - DNA, 33 bp, Homo sapien
tcagattcttagttaaatctcttcgggatgagg

SEQ ID NO: 521118 - DNA, 33 bp, Homo sapien
tcagattcttagttaactctcttcgggatgagg

SEQ ID NO: 521119 - DNA, 33 bp, Homo sapien
acctaattgacttagaagttaaatatatataca

SEQ ID NO: 521120 - DNA, 33 bp, Homo sapien
acctaattgacttagaggttaaatatatataca

SEQ ID NO: 521121 - DNA, 33 bp, Homo sapien
aggtcaatacatgtaaataattaatgtgtcaca

SEQ ID NO: 521122 - DNA, 33 bp, Homo sapien
aggtcaatacatgtaagtaattaatgtgtcaca

SEQ ID NO: 521123 - DNA, 33 bp, Homo sapien
gggatatggcggtgaaataggcacaagacggga

SEQ ID NO: 521124 - DNA, 33 bp, Homo sapien
gggatatggcggtgaagtaggcacaagacggga

SEQ ID NO: 521125 - DNA, 33 bp, Homo sapien
acctttgctaagagctaaaatcagtggtcagtg

SEQ ID NO: 521126 - DNA, 33 bp, Homo sapien
acctttgctaagagctgaaatcagtggtcagtg

SEQ ID NO: 521127 - DNA, 33 bp, Homo sapien
gacttttagtggaagagaactcaattacgtttg

SEQ ID NO: 521128 - DNA, 33 bp, Homo sapien
gacttttagtggaagataactcaattacgtttg

SEQ ID NO: 521129 - DNA, 33 bp, Homo sapien
tgtaaatttgacagaaaattcctatagcaagtg

SEQ ID NO: 521130 - DNA, 33 bp, Homo sapien
tgtaaatttgacagaacattcctatagcaagtg

SEQ ID NO: 521131 - DNA, 33 bp, Homo sapien
aaagaattagagattggaaagcctgaggaatta

SEQ ID NO: 521132 - DNA, 33 bp, Homo sapien
aaagaattagagattgtaaagcctgaggaatta

SEQ ID NO: 521133 - DNA, 33 bp, Homo sapien
ctaattggctggtcaaagtgttttccttaaaaa

SEQ ID NO: 521134 - DNA, 33 bp, Homo sapien
ctaattggctggtcaaggtgttttccttaaaaa

SEQ ID NO: 521135 - DNA, 33 bp, Homo sapien
aatatttgatgggataaaacgcagccactaaac

SEQ ID NO: 521136 - DNA, 33 bp, Homo sapien
aatatttgatgggatataacgcagccactaaac

SEQ ID NO: 521137 - DNA, 33 bp, Homo sapien
gaaaatgcagcctataataggaaacataatcaa

SEQ ID NO: 521138 - DNA, 33 bp, Homo sapien
gaaaatgcagcctatagtaggaaacataatcaa

SEQ ID NO: 521139 - DNA, 33 bp, Homo sapien
gtaaacgtttgagtacactacctaatgctccaa

SEQ ID NO: 521140 - DNA, 33 bp, Homo sapien
gtaaacgtttgagtacgctacctaatgctccaa

SEQ ID NO: 521141 - DNA, 33 bp, Homo sapien
tagataacaaaaaatacggacagcaaatttctc

SEQ ID NO: 521142 - DNA, 33 bp, Homo sapien
tagataacaaaaaatatggacagcaaatttctc

SEQ ID NO: 521143 - DNA, 33 bp, Homo sapien
gaaattgtgggcagtacagaaatctagcaaaaa

SEQ ID NO: 521144 - DNA, 33 bp, Homo sapien
gaaattgtgggcagtatagaaatctagcaaaaa

SEQ ID NO: 521145 - DNA, 33 bp, Homo sapien
gcttttagctgacccacatatctagttaattta

SEQ ID NO: 521146 - DNA, 33 bp, Homo sapien
gcttttagctgacccatatatctagttaattta

SEQ ID NO: 521147 - DNA, 33 bp, Homo sapien
atgtttgtcacaaataaccaactgttctgcggg

SEQ ID NO: 521148 - DNA, 33 bp, Homo sapien
atgtttgtcacaaatagccaactgttctgcggg

SEQ ID NO: 521149 - DNA, 33 bp, Homo sapien
ccctccaaagaatccactcacccagaaagcctt

SEQ ID NO: 521150 - DNA, 33 bp, Homo sapien
ccctccaaagaatccattcacccagaaagcctt

SEQ ID NO: 521151 - DNA, 33 bp, Homo sapien
aatgtgtggaaatctaaatgctttgatcatcag

SEQ ID NO: 521152 - DNA, 33 bp, Homo sapien
aatgtgtggaaatctagatgctttgatcatcag

SEQ ID NO: 521153 - DNA, 33 bp, Homo sapien
gcagtcaggagtggagaagttctttctgagaaa

SEQ ID NO: 521154 - DNA, 33 bp, Homo sapien
gcagtcaggagtggagtagttctttctgagaaa

SEQ ID NO: 521155 - DNA, 33 bp, Homo sapien
gaaagcagtggttccaagagtctttatttgaat

SEQ ID NO: 521156 - DNA, 33 bp, Homo sapien
gaaagcagtggttccaggagtctttatttgaat

SEQ ID NO: 521157 - DNA, 33 bp, Homo sapien
ttaaagacactgacaccggcaattatggaagat

SEQ ID NO: 521158 - DNA, 33 bp, Homo sapien
ttaaagacactgacactggcaattatggaagat

SEQ ID NO: 521159 - DNA, 33 bp, Homo sapien
caatccaaatatgccacgttataatctagaatt

SEQ ID NO: 521160 - DNA, 33 bp, Homo sapien
caatccaaatatgccatgttataatctagaatt

SEQ ID NO: 521161 - DNA, 33 bp, Homo sapien
tgggtgaagggagagacggggagtgaagtcatt

SEQ ID NO: 521162 - DNA, 33 bp, Homo sapien
tgggtgaagggagagatggggagtgaagtcatt

SEQ ID NO: 521163 - DNA, 33 bp, Homo sapien
agacagtaagaaaatcccaaatgtatcaggatc

SEQ ID NO: 521164 - DNA, 33 bp, Homo sapien
agacagtaagaaaatctcaaatgtatcaggatc

SEQ ID NO: 521165 - DNA, 33 bp, Homo sapien
gtcaggatggcagaaaacaccaatgtaccacta

SEQ ID NO: 521166 - DNA, 33 bp, Homo sapien
gtcaggatggcagaaatcaccaatgtaccacta

SEQ ID NO: 521167 - DNA, 33 bp, Homo sapien
gtactcggatctatgaaaaagtagaataaaaat

SEQ ID NO: 521168 - DNA, 33 bp, Homo sapien
gtactcggatctatgagaaagtagaataaaaat

SEQ ID NO: 521169 - DNA, 33 bp, Homo sapien
gcaggaacttcatgggacagtctgggctttgtt

SEQ ID NO: 521170 - DNA, 33 bp, Homo sapien
gcaggaacttcatgggtcagtctgggctttgtt

SEQ ID NO: 521171 - DNA, 33 bp, Homo sapien
aaagcaagcttgtttaagttccataagttgctt

SEQ ID NO: 521172 - DNA, 33 bp, Homo sapien
aaagcaagcttgtttaggttccataagttgctt

SEQ ID NO: 521173 - DNA, 33 bp, Homo sapien
ccaaataccaaatcctcaaattgtctgcaaata

SEQ ID NO: 521174 - DNA, 33 bp, Homo sapien
ccaaataccaaatccttaaattgtctgcaaata

SEQ ID NO: 521175 - DNA, 33 bp, Homo sapien
ctcacctaggaggttacggcgggtctcaatgcg

SEQ ID NO: 521176 - DNA, 33 bp, Homo sapien
ctcacctaggaggttatggcgggtctcaatgcg

SEQ ID NO: 521177 - DNA, 33 bp, Homo sapien
tttccaagggtagaaaatgatggctattctcct

SEQ ID NO: 521178 - DNA, 33 bp, Homo sapien
tttccaagggtagaaattgatggctattctcct

SEQ ID NO: 521179 - DNA, 33 bp, Homo sapien
tgatcgaaatggaggccaaacaggtccaaacca

SEQ ID NO: 521180 - DNA, 33 bp, Homo sapien
tgatcgaaatggaggcgaaacaggtccaaacca

SEQ ID NO: 521181 - DNA, 33 bp, Homo sapien
caatgcagaaagggtacgagatgctaggagatt

SEQ ID NO: 521182 - DNA, 33 bp, Homo sapien
caatgcagaaagggtaggagatgctaggagatt

SEQ ID NO: 521183 - DNA, 33 bp, Homo sapien
atcattgaacacagaactgaacaactttatatc

SEQ ID NO: 521184 - DNA, 33 bp, Homo sapien
atcattgaacacagaattgaacaactttatatc

SEQ ID NO: 521185 - DNA, 33 bp, Homo sapien
agaaaaacaggggaagaaagaccatgcttgata

SEQ ID NO: 521186 - DNA, 33 bp, Homo sapien
agaaaaacaggggaaggaagaccatgcttgata

SEQ ID NO: 521187 - DNA, 33 bp, Homo sapien
tggaagtatatggaacgataagacagagggaaa

SEQ ID NO: 521188 - DNA, 33 bp, Homo sapien
tggaagtatatggaactataagacagagggaaa

SEQ ID NO: 521189 - DNA, 33 bp, Homo sapien
ccaaaaggcaactctacgtcaattaaaaatgtg

SEQ ID NO: 521190 - DNA, 33 bp, Homo sapien
ccaaaaggcaactctatgtcaattaaaaatgtg

SEQ ID NO: 521191 - DNA, 33 bp, Homo sapien
cgattaccagtcgccaatatgagtcctggactc

SEQ ID NO: 521192 - DNA, 33 bp, Homo sapien
cgattaccagtcgccagtatgagtcctggactc

SEQ ID NO: 521193 - DNA, 33 bp, Homo sapien
attcagtgagtcattcaatttaatcttacattt

SEQ ID NO: 521194 - DNA, 33 bp, Homo sapien
attcagtgagtcattcgatttaatcttacattt

SEQ ID NO: 521195 - DNA, 33 bp, Homo sapien
tggaacttctgattacagtaaggctgacatcaa

SEQ ID NO: 521196 - DNA, 33 bp, Homo sapien
tggaacttctgattacggtaaggctgacatcaa

SEQ ID NO: 521197 - DNA, 33 bp, Homo sapien
aaatttgctgtctgtcacagtgtggtcagaaat

SEQ ID NO: 521198 - DNA, 33 bp, Homo sapien
aaatttgctgtctgtcgcagtgtggtcagaaat

SEQ ID NO: 521199 - DNA, 33 bp, Homo sapien
aaaagcaggatgtttgaagttaaaacagtggtt

SEQ ID NO: 521200 - DNA, 33 bp, Homo sapien
aaaagcaggatgtttggagttaaaacagtggtt

SEQ ID NO: 521201 - DNA, 33 bp, Homo sapien
gtgttgctgcatgtcactatgatctgttcattc

SEQ ID NO: 521202 - DNA, 33 bp, Homo sapien
gtgttgctgcatgtcattatgatctgttcattc

SEQ ID NO: 521203 - DNA, 33 bp, Homo sapien
ctattctaacattgccaagtagtactatctcca

SEQ ID NO: 521204 - DNA, 33 bp, Homo sapien
ctattctaacattgcctagtagtactatctcca

SEQ ID NO: 521205 - DNA, 33 bp, Homo sapien
cttcggtctagtgtaaaaggtggtttcctgatt

SEQ ID NO: 521206 - DNA, 33 bp, Homo sapien
cttcggtctagtgtaagaggtggtttcctgatt

SEQ ID NO: 521207 - DNA, 33 bp, Homo sapien
tagctatttgtgagcaggataagacttttaaat

SEQ ID NO: 521208 - DNA, 33 bp, Homo sapien
tagctatttgtgagcatgataagacttttaaat

SEQ ID NO: 521209 - DNA, 33 bp, Homo sapien
ctggctcattaaggtaactgtgtactatgcgat

SEQ ID NO: 521210 - DNA, 33 bp, Homo sapien
ctggctcattaaggtagctgtgtactatgcgat

SEQ ID NO: 521211 - DNA, 33 bp, Homo sapien
tacactatccaagacactatcaggacaactggt

SEQ ID NO: 521212 - DNA, 33 bp, Homo sapien
tacactatccaagacattatcaggacaactggt

SEQ ID NO: 521213 - DNA, 33 bp, Homo sapien
cttgcttttaaatatgaagagcatcctggatta

SEQ ID NO: 521214 - DNA, 33 bp, Homo sapien
cttgcttttaaatatggagagcatcctggatta

SEQ ID NO: 521215 - DNA, 33 bp, Homo sapien
ggagtttctgatgggaactttcgaggaatgctc

SEQ ID NO: 521216 - DNA, 33 bp, Homo sapien
ggagtttctgatgggacctttcgaggaatgctc

SEQ ID NO: 521217 - DNA, 33 bp, Homo sapien
atttactgctatcttacagccttgaatactaca

SEQ ID NO: 521218 - DNA, 33 bp, Homo sapien
atttactgctatcttagagccttgaatactaca

SEQ ID NO: 521219 - DNA, 33 bp, Homo sapien
gagtgacaaggctgtacactaactggttcacta

SEQ ID NO: 521220 - DNA, 33 bp, Homo sapien
gagtgacaaggctgtagactaactggttcacta

SEQ ID NO: 521221 - DNA, 33 bp, Homo sapien
atacacataggataaaagattgcctgagaaggg

SEQ ID NO: 521222 - DNA, 33 bp, Homo sapien
atacacataggataaatgattgcctgagaaggg

SEQ ID NO: 521223 - DNA, 33 bp, Homo sapien
tcttaattagccctcactgaacaatatttttct

SEQ ID NO: 521224 - DNA, 33 bp, Homo sapien
tcttaattagccctcattgaacaatatttttct

SEQ ID NO: 521225 - DNA, 33 bp, Homo sapien
ctggtcttcttttgcaactaatttacaacatgg

SEQ ID NO: 521226 - DNA, 33 bp, Homo sapien
ctggtcttcttttgcagctaatttacaacatgg

SEQ ID NO: 521227 - DNA, 33 bp, Homo sapien
cacaagaatctagacacggtgaaggaataaatg

SEQ ID NO: 521228 - DNA, 33 bp, Homo sapien
cacaagaatctagacatggtgaaggaataaatg

SEQ ID NO: 521229 - DNA, 33 bp, Homo sapien
tacatcctgattgtgacggtgacagtttcacaa

SEQ ID NO: 521230 - DNA, 33 bp, Homo sapien
tacatcctgattgtgatggtgacagtttcacaa

SEQ ID NO: 521231 - DNA, 33 bp, Homo sapien
ttgagacagtgaatataagcctatgtacaacac

SEQ ID NO: 521232 - DNA, 33 bp, Homo sapien
ttgagacagtgaatatgagcctatgtacaacac

SEQ ID NO: 521233 - DNA, 33 bp, Homo sapien
gcttttattcctatcccagtccatgtggagatt

SEQ ID NO: 521234 - DNA, 33 bp, Homo sapien
gcttttattcctatcctagtccatgtggagatt

SEQ ID NO: 521235 - DNA, 33 bp, Homo sapien
tggagctccgtgaatcacaaaatatgtcaatac

SEQ ID NO: 521236 - DNA, 33 bp, Homo sapien
tggagctccgtgaatcgcaaaatatgtcaatac

SEQ ID NO: 521237 - DNA, 33 bp, Homo sapien
taagcatatgttgcaaacttggaaagagcagga

SEQ ID NO: 521238 - DNA, 33 bp, Homo sapien
taagcatatgttgcaatcttggaaagagcagga

SEQ ID NO: 521239 - DNA, 33 bp, Homo sapien
tttacagatccaaagcaaatttttaaatctcca

SEQ ID NO: 521240 - DNA, 33 bp, Homo sapien
tttacagatccaaagcgaatttttaaatctcca

SEQ ID NO: 521241 - DNA, 33 bp, Homo sapien
gcagctggcatttttaagtgctctattttctcc

SEQ ID NO: 521242 - DNA, 33 bp, Homo sapien
gcagctggcatttttatgtgctctattttctcc

SEQ ID NO: 521243 - DNA, 33 bp, Homo sapien
ctacctcctacagcaacaagatgttttctttca

SEQ ID NO: 521244 - DNA, 33 bp, Homo sapien
ctacctcctacagcaataagatgttttctttca

SEQ ID NO: 521245 - DNA, 33 bp, Homo sapien
gtaggcagaagagggaaaaactgctctagtata

SEQ ID NO: 521246 - DNA, 33 bp, Homo sapien
gtaggcagaagagggagaaactgctctagtata

SEQ ID NO: 521247 - DNA, 33 bp, Homo sapien
aatagatttaatgccactgacttgttcatttac

SEQ ID NO: 521248 - DNA, 33 bp, Homo sapien
aatagatttaatgccattgacttgttcatttac

SEQ ID NO: 521249 - DNA, 33 bp, Homo sapien
tttaagtggatgtgtacataagattcttagaag

SEQ ID NO: 521250 - DNA, 33 bp, Homo sapien
tttaagtggatgtgtatataagattcttagaag

SEQ ID NO: 521251 - DNA, 33 bp, Homo sapien
gaaaaagtagtcaaaaattgggcacccatcact

SEQ ID NO: 521252 - DNA, 33 bp, Homo sapien
gaaaaagtagtcaaaacttgggcacccatcact

SEQ ID NO: 521253 - DNA, 33 bp, Homo sapien
ctcagctttgtatctcggacttgttcaatgtta

SEQ ID NO: 521254 - DNA, 33 bp, Homo sapien
ctcagctttgtatctctgacttgttcaatgtta

SEQ ID NO: 521255 - DNA, 33 bp, Homo sapien
tggcaactcaatcaccagcattatttccagtgt

SEQ ID NO: 521256 - DNA, 33 bp, Homo sapien
tggcaactcaatcaccggcattatttccagtgt

SEQ ID NO: 521257 - DNA, 33 bp, Homo sapien
tagattctcagcagaagaattttcagtgtatct

SEQ ID NO: 521258 - DNA, 33 bp, Homo sapien
tagattctcagcagaataattttcagtgtatct

SEQ ID NO: 521259 - DNA, 33 bp, Homo sapien
ttatgggattaccagactagaaagaagactgat

SEQ ID NO: 521260 - DNA, 33 bp, Homo sapien
ttatgggattaccagattagaaagaagactgat

SEQ ID NO: 521261 - DNA, 33 bp, Homo sapien
gcactaatctgtgccacaaggtttttggataat

SEQ ID NO: 521262 - DNA, 33 bp, Homo sapien
gcactaatctgtgccagaaggtttttggataat

SEQ ID NO: 521263 - DNA, 33 bp, Homo sapien
cataatgaacttacaaaattgaacttacataat

SEQ ID NO: 521264 - DNA, 33 bp, Homo sapien
cataatgaacttacaacattgaacttacataat

SEQ ID NO: 521265 - DNA, 33 bp, Homo sapien
tcagcccttatttgacaaaacctctcttctaac

SEQ ID NO: 521266 - DNA, 33 bp, Homo sapien
tcagcccttatttgacgaaacctctcttctaac

SEQ ID NO: 521267 - DNA, 33 bp, Homo sapien
tcaaggatcttggaaaaccagctgcatgttgaa

SEQ ID NO: 521268 - DNA, 33 bp, Homo sapien
tcaaggatcttggaaagccagctgcatgttgaa

SEQ ID NO: 521269 - DNA, 33 bp, Homo sapien
tctgtctccaaacaaaaaaatggctcattgtaa

SEQ ID NO: 521270 - DNA, 33 bp, Homo sapien
tctgtctccaaacaaagaaatggctcattgtaa

SEQ ID NO: 521271 - DNA, 33 bp, Homo sapien
taatggtgtgttagctaaaaaaggcttacaaca

SEQ ID NO: 521272 - DNA, 33 bp, Homo sapien
taatggtgtgttagctgaaaaaggcttacaaca

SEQ ID NO: 521273 - DNA, 33 bp, Homo sapien
cactgaggggagataccgaggttgaggatttat

SEQ ID NO: 521274 - DNA, 33 bp, Homo sapien
cactgaggggagatactgaggttgaggatttat

SEQ ID NO: 521275 - DNA, 33 bp, Homo sapien
ctggatatatgtatgtcaatctgtttatcctag

SEQ ID NO: 521276 - DNA, 33 bp, Homo sapien
ctggatatatgtatgtgaatctgtttatcctag

SEQ ID NO: 521277 - DNA, 33 bp, Homo sapien
atgtccttaaagttacaactactttcctgaaag

SEQ ID NO: 521278 - DNA, 33 bp, Homo sapien
atgtccttaaagttacgactactttcctgaaag

SEQ ID NO: 521279 - DNA, 33 bp, Homo sapien
actgacttgcatagaacagtttcctccagaggg

SEQ ID NO: 521280 - DNA, 33 bp, Homo sapien
actgacttgcatagaatagtttcctccagaggg

SEQ ID NO: 521281 - DNA, 33 bp, Homo sapien
ctaagtcccagactgacgccaaaatggggagca

SEQ ID NO: 521282 - DNA, 33 bp, Homo sapien
ctaagtcccagactgatgccaaaatggggagca

SEQ ID NO: 521283 - DNA, 33 bp, Homo sapien
aggccactcctaatcaacaatgtttccttctgt

SEQ ID NO: 521284 - DNA, 33 bp, Homo sapien
aggccactcctaatcagcaatgtttccttctgt

SEQ ID NO: 521285 - DNA, 33 bp, Homo sapien
tctcaggtgcagtatgcagttacaatcgtctgt

SEQ ID NO: 521286 - DNA, 33 bp, Homo sapien
tctcaggtgcagtatgtagttacaatcgtctgt

SEQ ID NO: 521287 - DNA, 33 bp, Homo sapien
ccacaatccacgacacacccatgttgctgcatg

SEQ ID NO: 521288 - DNA, 33 bp, Homo sapien
ccacaatccacgacacgcccatgttgctgcatg

SEQ ID NO: 521289 - DNA, 33 bp, Homo sapien
cagctggaaacactgaagtcttagcagagagca

SEQ ID NO: 521290 - DNA, 33 bp, Homo sapien
cagctggaaacactgaggtcttagcagagagca

SEQ ID NO: 521291 - DNA, 33 bp, Homo sapien
ttcttgcacttacatcactgatttgtttgttga

SEQ ID NO: 521292 - DNA, 33 bp, Homo sapien
ttcttgcacttacatcgctgatttgtttgttga

SEQ ID NO: 521293 - DNA, 33 bp, Homo sapien
gtaatcctcatctccccgcaacagttgtagtga

SEQ ID NO: 521294 - DNA, 33 bp, Homo sapien
gtaatcctcatctccctgcaacagttgtagtga

SEQ ID NO: 521295 - DNA, 33 bp, Homo sapien
ggtagaactgcctagacgtcttgaaaactagcc

SEQ ID NO: 521296 - DNA, 33 bp, Homo sapien
ggtagaactgcctagatgtcttgaaaactagcc

SEQ ID NO: 521297 - DNA, 33 bp, Homo sapien
attgcagtaagcccgaagcagaaaagagaaggc

SEQ ID NO: 521298 - DNA, 33 bp, Homo sapien
attgcagtaagcccgaggcagaaaagagaaggc

SEQ ID NO: 521299 - DNA, 33 bp, Homo sapien
catatatgtggaatgacaatgagaattgtgata

SEQ ID NO: 521300 - DNA, 33 bp, Homo sapien
catatatgtggaatgataatgagaattgtgata

SEQ ID NO: 521301 - DNA, 33 bp, Homo sapien
tctacagagctgcaggcaagaagcagaagtcaa

SEQ ID NO: 521302 - DNA, 33 bp, Homo sapien
tctacagagctgcagggaagaagcagaagtcaa

SEQ ID NO: 521303 - DNA, 33 bp, Homo sapien
tagacataggaagagcaagtatgaatatgcgta

SEQ ID NO: 521304 - DNA, 33 bp, Homo sapien
tagacataggaagagccagtatgaatatgcgta

SEQ ID NO: 521305 - DNA, 33 bp, Homo sapien
atgtaaagaagctacacattatttcagctataa

SEQ ID NO: 521306 - DNA, 33 bp, Homo sapien
atgtaaagaagctacatattatttcagctataa

SEQ ID NO: 521307 - DNA, 33 bp, Homo sapien
ttactaaaaggagtgcaagattaaaactgtgct

SEQ ID NO: 521308 - DNA, 33 bp, Homo sapien
ttactaaaaggagtgcgagattaaaactgtgct

SEQ ID NO: 521309 - DNA, 33 bp, Homo sapien
agatttaaaggcataaagagttagaggatgtat

SEQ ID NO: 521310 - DNA, 33 bp, Homo sapien
agatttaaaggcataaggagttagaggatgtat

SEQ ID NO: 521311 - DNA, 33 bp, Homo sapien
ttacaagcaattatctaaagttaagctaatcca

SEQ ID NO: 521312 - DNA, 33 bp, Homo sapien
ttacaagcaattatctgaagttaagctaatcca

SEQ ID NO: 521313 - DNA, 33 bp, Homo sapien
caacatcccagatccacaagtgcttgaaatttg

SEQ ID NO: 521314 - DNA, 33 bp, Homo sapien
caacatcccagatccataagtgcttgaaatttg

SEQ ID NO: 521315 - DNA, 33 bp, Homo sapien
tgtcatcctgaccagaacgatgttattcaggca

SEQ ID NO: 521316 - DNA, 33 bp, Homo sapien
tgtcatcctgaccagagcgatgttattcaggca

SEQ ID NO: 521317 - DNA, 33 bp, Homo sapien
tcatctaatatcagcaatcttaaccatttcaat

SEQ ID NO: 521318 - DNA, 33 bp, Homo sapien
tcatctaatatcagcagtcttaaccatttcaat

SEQ ID NO: 521319 - DNA, 33 bp, Homo sapien
ttagcactcacgacttcaacttatgatcacaaa

SEQ ID NO: 521320 - DNA, 33 bp, Homo sapien
ttagcactcacgactttaacttatgatcacaaa

SEQ ID NO: 521321 - DNA, 33 bp, Homo sapien
attttgagaaatacaaaacaaggtacagcagcc

SEQ ID NO: 521322 - DNA, 33 bp, Homo sapien
attttgagaaatacaagacaaggtacagcagcc

SEQ ID NO: 521323 - DNA, 33 bp, Homo sapien
atataaagatggttaccgcaagcaacttggcca

SEQ ID NO: 521324 - DNA, 33 bp, Homo sapien
atataaagatggttactgcaagcaacttggcca

SEQ ID NO: 521325 - DNA, 33 bp, Homo sapien
ggtttctgaaaggagacgctaagatgaaaattg

SEQ ID NO: 521326 - DNA, 33 bp, Homo sapien
ggtttctgaaaggagatgctaagatgaaaattg

SEQ ID NO: 521327 - DNA, 33 bp, Homo sapien
ttgataacagagaaaaagatgatttggatctaa

SEQ ID NO: 521328 - DNA, 33 bp, Homo sapien
ttgataacagagaaaaggatgatttggatctaa

SEQ ID NO: 521329 - DNA, 33 bp, Homo sapien
cagaggtaacatttacactcaaacttggagaga

SEQ ID NO: 521330 - DNA, 33 bp, Homo sapien
cagaggtaacatttacgctcaaacttggagaga

SEQ ID NO: 521331 - DNA, 33 bp, Homo sapien
agcctcaggtcccgaacgctcttcctctgcccc

SEQ ID NO: 521332 - DNA, 33 bp, Homo sapien
agcctcaggtcccgaatgctcttcctctgcccc

SEQ ID NO: 521333 - DNA, 33 bp, Homo sapien
ttataaacgggattggcatgacttaatagccaa

SEQ ID NO: 521334 - DNA, 33 bp, Homo sapien
ttataaacgggattggtatgacttaatagccaa

SEQ ID NO: 521335 - DNA, 33 bp, Homo sapien
tgatctgcagaaaaaaacgttataaatatttat

SEQ ID NO: 521336 - DNA, 33 bp, Homo sapien
tgatctgcagaaaaaaccgttataaatatttat

SEQ ID NO: 521337 - DNA, 33 bp, Homo sapien
gccctgtaccatgtgaggtactgacaacctgtg

SEQ ID NO: 521338 - DNA, 33 bp, Homo sapien
gccctgtaccatgtgatgtactgacaacctgtg

SEQ ID NO: 521339 - DNA, 33 bp, Homo sapien
atgtggtaccattacaaaaatgattagcaactt

SEQ ID NO: 521340 - DNA, 33 bp, Homo sapien
atgtggtaccattacagaaatgattagcaactt

SEQ ID NO: 521341 - DNA, 33 bp, Homo sapien
aattcacgcctctggccgatcctccagatatag

SEQ ID NO: 521342 - DNA, 33 bp, Homo sapien
aattcacgcctctggctgatcctccagatatag

SEQ ID NO: 521343 - DNA, 33 bp, Homo sapien
ggttgggagttgaagacgctggttaagagaata

SEQ ID NO: 521344 - DNA, 33 bp, Homo sapien
ggttgggagttgaagatgctggttaagagaata

SEQ ID NO: 521345 - DNA, 33 bp, Homo sapien
tttccaacaatgcagaactattcatagatcccc

SEQ ID NO: 521346 - DNA, 33 bp, Homo sapien
tttccaacaatgcagagctattcatagatcccc

SEQ ID NO: 521347 - DNA, 33 bp, Homo sapien
atgtactgtcgttccacagaagaggtcatagat

SEQ ID NO: 521348 - DNA, 33 bp, Homo sapien
atgtactgtcgttccatagaagaggtcatagat

SEQ ID NO: 521349 - DNA, 33 bp, Homo sapien
ttcagttaaatacagaataaagcgtgaagcttc

SEQ ID NO: 521350 - DNA, 33 bp, Homo sapien
ttcagttaaatacagagtaaagcgtgaagcttc

SEQ ID NO: 521351 - DNA, 33 bp, Homo sapien
cattactttgatttcagtattttgatcaacctc

SEQ ID NO: 521352 - DNA, 33 bp, Homo sapien
cattactttgatttcattattttgatcaacctc

SEQ ID NO: 521353 - DNA, 33 bp, Homo sapien
cccaataacttctttgcagccttgtgagatcct

SEQ ID NO: 521354 - DNA, 33 bp, Homo sapien
cccaataacttctttggagccttgtgagatcct

SEQ ID NO: 521355 - DNA, 33 bp, Homo sapien
aatagacaagaagggacgcacatagagttggcc

SEQ ID NO: 521356 - DNA, 33 bp, Homo sapien
aatagacaagaagggatgcacatagagttggcc

SEQ ID NO: 521357 - DNA, 33 bp, Homo sapien
atggaatcatgccatacgcaatttttttttttt

SEQ ID NO: 521358 - DNA, 33 bp, Homo sapien
atggaatcatgccatatgcaatttttttttttt

SEQ ID NO: 521359 - DNA, 33 bp, Homo sapien
cctccacgcaagaatacagtgtataagaatgtt

SEQ ID NO: 521360 - DNA, 33 bp, Homo sapien
cctccacgcaagaatatagtgtataagaatgtt

SEQ ID NO: 521361 - DNA, 33 bp, Homo sapien
taatgcaatggtattcagaaatggcagctttgg

SEQ ID NO: 521362 - DNA, 33 bp, Homo sapien
taatgcaatggtattcggaaatggcagctttgg

SEQ ID NO: 521363 - DNA, 33 bp, Homo sapien
acccaggacctgattaccagtttggaactgact

SEQ ID NO: 521364 - DNA, 33 bp, Homo sapien
acccaggacctgattagcagtttggaactgact

SEQ ID NO: 521365 - DNA, 33 bp, Homo sapien
aggtatttagcctgtgcaaatagtgcattttaa

SEQ ID NO: 521366 - DNA, 33 bp, Homo sapien
aggtatttagcctgtggaaatagtgcattttaa

SEQ ID NO: 521367 - DNA, 33 bp, Homo sapien
cattgaaacctaaccacgctgttctctaggata

SEQ ID NO: 521368 - DNA, 33 bp, Homo sapien
cattgaaacctaaccatgctgttctctaggata

SEQ ID NO: 521369 - DNA, 33 bp, Homo sapien
tcagtctgaaaaagaccaaaagaccaagtgtgt

SEQ ID NO: 521370 - DNA, 33 bp, Homo sapien
tcagtctgaaaaagacgaaaagaccaagtgtgt

SEQ ID NO: 521371 - DNA, 33 bp, Homo sapien
gattctgaccactgaacgtgaggtatacttatg

SEQ ID NO: 521372 - DNA, 33 bp, Homo sapien
gattctgaccactgaatgtgaggtatacttatg

SEQ ID NO: 521373 - DNA, 33 bp, Homo sapien
cacagggtgcatgataataagataaaacacttc

SEQ ID NO: 521374 - DNA, 33 bp, Homo sapien
cacagggtgcatgatactaagataaaacacttc

SEQ ID NO: 521375 - DNA, 33 bp, Homo sapien
cgaagtgccgtgtcagaagacaacaagtacatg

SEQ ID NO: 521376 - DNA, 33 bp, Homo sapien
cgaagtgccgtgtcaggagacaacaagtacatg

SEQ ID NO: 521377 - DNA, 33 bp, Homo sapien
gcttggtagccaatgacctttcagtgcgagctg

SEQ ID NO: 521378 - DNA, 33 bp, Homo sapien
gcttggtagccaatgatctttcagtgcgagctg

SEQ ID NO: 521379 - DNA, 33 bp, Homo sapien
actgatgtggcagtaaaccaagggactaagcac

SEQ ID NO: 521380 - DNA, 33 bp, Homo sapien
actgatgtggcagtaatccaagggactaagcac

SEQ ID NO: 521381 - DNA, 33 bp, Homo sapien
tatggaatgaactagactatcaataagctgaaa

SEQ ID NO: 521382 - DNA, 33 bp, Homo sapien
tatggaatgaactagagtatcaataagctgaaa

SEQ ID NO: 521383 - DNA, 33 bp, Homo sapien
tgtccggaagtcctagcaggtgaaaggttaggt

SEQ ID NO: 521384 - DNA, 33 bp, Homo sapien
tgtccggaagtcctagtaggtgaaaggttaggt

SEQ ID NO: 521385 - DNA, 33 bp, Homo sapien
gacaaagctagctaagccttagcccaaatcttc

SEQ ID NO: 521386 - DNA, 33 bp, Homo sapien
gacaaagctagctaagtcttagcccaaatcttc

SEQ ID NO: 521387 - DNA, 33 bp, Homo sapien
ataagccagaaacagacgtggcttcctcagcat

SEQ ID NO: 521388 - DNA, 33 bp, Homo sapien
ataagccagaaacagaggtggcttcctcagcat

SEQ ID NO: 521389 - DNA, 33 bp, Homo sapien
gactgccaaatttaacagtggattttgttataa

SEQ ID NO: 521390 - DNA, 33 bp, Homo sapien
gactgccaaatttaacggtggattttgttataa

SEQ ID NO: 521391 - DNA, 33 bp, Homo sapien
atgaaagggtgccaaacagcattttggaaacag

SEQ ID NO: 521392 - DNA, 33 bp, Homo sapien
atgaaagggtgccaaagagcattttggaaacag

SEQ ID NO: 521393 - DNA, 33 bp, Homo sapien
gatagggaaccagagaacttatggtacaaaatg

SEQ ID NO: 521394 - DNA, 33 bp, Homo sapien
gatagggaaccagagaccttatggtacaaaatg

SEQ ID NO: 521395 - DNA, 33 bp, Homo sapien
caataaaataatccccaaaactcagtcacttca

SEQ ID NO: 521396 - DNA, 33 bp, Homo sapien
caataaaataatcccccaaactcagtcacttca

SEQ ID NO: 521397 - DNA, 33 bp, Homo sapien
gccaattaagtaagtcacaaattctcctaaagg

SEQ ID NO: 521398 - DNA, 33 bp, Homo sapien
gccaattaagtaagtcgcaaattctcctaaagg

SEQ ID NO: 521399 - DNA, 33 bp, Homo sapien
gtccaaagtacatacactacacaaaactatcta

SEQ ID NO: 521400 - DNA, 33 bp, Homo sapien
gtccaaagtacatacagtacacaaaactatcta

SEQ ID NO: 521401 - DNA, 33 bp, Homo sapien
ccatttgactggaataagattatgaggaaaact

SEQ ID NO: 521402 - DNA, 33 bp, Homo sapien
ccatttgactggaataggattatgaggaaaact

SEQ ID NO: 521403 - DNA, 33 bp, Homo sapien
cataacccacagaagcgagtccatagtgctggt

SEQ ID NO: 521404 - DNA, 33 bp, Homo sapien
cataacccacagaagctagtccatagtgctggt

SEQ ID NO: 521405 - DNA, 33 bp, Homo sapien
tatggacaagaaggcaacagagtcttgcagtag

SEQ ID NO: 521406 - DNA, 33 bp, Homo sapien
tatggacaagaaggcagcagagtcttgcagtag

SEQ ID NO: 521407 - DNA, 33 bp, Homo sapien
tcaactttctagaccaatgatttttggactaat

SEQ ID NO: 521408 - DNA, 33 bp, Homo sapien
tcaactttctagaccagtgatttttggactaat

SEQ ID NO: 521409 - DNA, 33 bp, Homo sapien
atgtgacatgcacactcactcacaccaacattc

SEQ ID NO: 521410 - DNA, 33 bp, Homo sapien
atgtgacatgcacacttactcacaccaacattc

SEQ ID NO: 521411 - DNA, 33 bp, Homo sapien
tgctgtgcaccttgaccatggaaccaacactag

SEQ ID NO: 521412 - DNA, 33 bp, Homo sapien
tgctgtgcaccttgactatggaaccaacactag

SEQ ID NO: 521413 - DNA, 33 bp, Homo sapien
atgtgacattaaaatacctactccaggacctgg

SEQ ID NO: 521414 - DNA, 33 bp, Homo sapien
atgtgacattaaaatatctactccaggacctgg

SEQ ID NO: 521415 - DNA, 33 bp, Homo sapien
gttctctcagaatacaccttttgtctgagttta

SEQ ID NO: 521416 - DNA, 33 bp, Homo sapien
gttctctcagaatacatcttttgtctgagttta

SEQ ID NO: 521417 - DNA, 33 bp, Homo sapien
tttagctgtcaagctcactggtcatctttccct

SEQ ID NO: 521418 - DNA, 33 bp, Homo sapien
tttagctgtcaagctcgctggtcatctttccct

SEQ ID NO: 521419 - DNA, 33 bp, Homo sapien
cagctctggtagataaagctctactatttatag

SEQ ID NO: 521420 - DNA, 33 bp, Homo sapien
cagctctggtagataatgctctactatttatag

SEQ ID NO: 521421 - DNA, 33 bp, Homo sapien
atgcaagcaacccctcacacataggcagaactg

SEQ ID NO: 521422 - DNA, 33 bp, Homo sapien
atgcaagcaacccctcgcacataggcagaactg

SEQ ID NO: 521423 - DNA, 33 bp, Homo sapien
tcaactcaatgttttacgaaactgacttgcaaa

SEQ ID NO: 521424 - DNA, 33 bp, Homo sapien
tcaactcaatgttttatgaaactgacttgcaaa

SEQ ID NO: 521425 - DNA, 33 bp, Homo sapien
acccagtttcagaatagaagcaatagctaggag

SEQ ID NO: 521426 - DNA, 33 bp, Homo sapien
acccagtttcagaatataagcaatagctaggag

SEQ ID NO: 521427 - DNA, 33 bp, Homo sapien
actggggagcaaagcacggaagttcaagtctag

SEQ ID NO: 521428 - DNA, 33 bp, Homo sapien
actggggagcaaagcatggaagttcaagtctag

SEQ ID NO: 521429 - DNA, 33 bp, Homo sapien
gaattctaatgggaaacgtttttgctaagcatc

SEQ ID NO: 521430 - DNA, 33 bp, Homo sapien
gaattctaatgggaaatgtttttgctaagcatc

SEQ ID NO: 521431 - DNA, 33 bp, Homo sapien
tgagccacatgacagacacattctgatggacaa

SEQ ID NO: 521432 - DNA, 33 bp, Homo sapien
tgagccacatgacagatacattctgatggacaa

SEQ ID NO: 521433 - DNA, 33 bp, Homo sapien
agacccggacgacctcacagctttttgcaaatg

SEQ ID NO: 521434 - DNA, 33 bp, Homo sapien
agacccggacgacctcgcagctttttgcaaatg

SEQ ID NO: 521435 - DNA, 33 bp, Homo sapien
gggacattcaagactgaagtgggagtggctgtc

SEQ ID NO: 521436 - DNA, 33 bp, Homo sapien
gggacattcaagactgtagtgggagtggctgtc

SEQ ID NO: 521437 - DNA, 33 bp, Homo sapien
tttagagcagacatcaatgaagtcaggaaagga

SEQ ID NO: 521438 - DNA, 33 bp, Homo sapien
tttagagcagacatcagtgaagtcaggaaagga

SEQ ID NO: 521439 - DNA, 33 bp, Homo sapien
ctggtccaccagtcaacggttagtgctctttct

SEQ ID NO: 521440 - DNA, 33 bp, Homo sapien
ctggtccaccagtcaagggttagtgctctttct

SEQ ID NO: 521441 - DNA, 33 bp, Homo sapien
attctaatccatcagcaacttgggacttcaaac

SEQ ID NO: 521442 - DNA, 33 bp, Homo sapien
attctaatccatcagcgacttgggacttcaaac

SEQ ID NO: 521443 - DNA, 33 bp, Homo sapien
tagagtatgtgaaacacggaggttacaaactaa

SEQ ID NO: 521444 - DNA, 33 bp, Homo sapien
tagagtatgtgaaacatggaggttacaaactaa

SEQ ID NO: 521445 - DNA, 33 bp, Homo sapien
attctgaaggacagcaatatcttcttgctatca

SEQ ID NO: 521446 - DNA, 33 bp, Homo sapien
attctgaaggacagcagtatcttcttgctatca

SEQ ID NO: 521447 - DNA, 33 bp, Homo sapien
ggagcagggcagaaataaatcagccaccaactt

SEQ ID NO: 521448 - DNA, 33 bp, Homo sapien
ggagcagggcagaaatgaatcagccaccaactt

SEQ ID NO: 521449 - DNA, 33 bp, Homo sapien
acagccctcattttgcaagcctttccccttcac

SEQ ID NO: 521450 - DNA, 33 bp, Homo sapien
acagccctcattttgcgagcctttccccttcac

SEQ ID NO: 521451 - DNA, 33 bp, Homo sapien
ttaagtcaaagaaaaaagcattaacaagtgtac

SEQ ID NO: 521452 - DNA, 33 bp, Homo sapien
ttaagtcaaagaaaaacgcattaacaagtgtac

SEQ ID NO: 521453 - DNA, 33 bp, Homo sapien
gaggatagctcttgctcaccatttacacttatt

SEQ ID NO: 521454 - DNA, 33 bp, Homo sapien
gaggatagctcttgctgaccatttacacttatt

SEQ ID NO: 521455 - DNA, 33 bp, Homo sapien
tatgaacagcaatgccacacctccacgatctgc

SEQ ID NO: 521456 - DNA, 33 bp, Homo sapien
tatgaacagcaatgccgcacctccacgatctgc

SEQ ID NO: 521457 - DNA, 33 bp, Homo sapien
aaaataaatgagaaacagctttcaggaaactca

SEQ ID NO: 521458 - DNA, 33 bp, Homo sapien
aaaataaatgagaaacggctttcaggaaactca

SEQ ID NO: 521459 - DNA, 33 bp, Homo sapien
ccatatgaggattacaaaatttcaagacagcaa

SEQ ID NO: 521460 - DNA, 33 bp, Homo sapien
ccatatgaggattacacaatttcaagacagcaa

SEQ ID NO: 521461 - DNA, 33 bp, Homo sapien
gatatcattatgaatacggaatgtcatcaagca

SEQ ID NO: 521462 - DNA, 33 bp, Homo sapien
gatatcattatgaatagggaatgtcatcaagca

SEQ ID NO: 521463 - DNA, 33 bp, Homo sapien
ccatgtccagccaaaaattatgattctttagat

SEQ ID NO: 521464 - DNA, 33 bp, Homo sapien
ccatgtccagccaaaagttatgattctttagat

SEQ ID NO: 521465 - DNA, 33 bp, Homo sapien
gatcatgtacaggactcaaaactgtaatcatta

SEQ ID NO: 521466 - DNA, 33 bp, Homo sapien
gatcatgtacaggacttaaaactgtaatcatta

SEQ ID NO: 521467 - DNA, 33 bp, Homo sapien
ggtaggagtgcttaaaatatcaggagcacccta

SEQ ID NO: 521468 - DNA, 33 bp, Homo sapien
ggtaggagtgcttaaactatcaggagcacccta

SEQ ID NO: 521469 - DNA, 33 bp, Homo sapien
aaaatggctgagtttgcagcctgtcctgctttt

SEQ ID NO: 521470 - DNA, 33 bp, Homo sapien
aaaatggctgagtttgtagcctgtcctgctttt

SEQ ID NO: 521471 - DNA, 33 bp, Homo sapien
ctggggagggagcagacggatgaaaggaaatgg

SEQ ID NO: 521472 - DNA, 33 bp, Homo sapien
ctggggagggagcagatggatgaaaggaaatgg

SEQ ID NO: 521473 - DNA, 33 bp, Homo sapien
cattgacccaaatcaccggctaaatgtactaca

SEQ ID NO: 521474 - DNA, 33 bp, Homo sapien
cattgacccaaatcactggctaaatgtactaca

SEQ ID NO: 521475 - DNA, 33 bp, Homo sapien
catttggccctcagtaaaagttcctcactgtag

SEQ ID NO: 521476 - DNA, 33 bp, Homo sapien
catttggccctcagtagaagttcctcactgtag

SEQ ID NO: 521477 - DNA, 33 bp, Homo sapien
gactcagtagaaaagacgtttcaaaaataggca

SEQ ID NO: 521478 - DNA, 33 bp, Homo sapien
gactcagtagaaaagatgtttcaaaaataggca

SEQ ID NO: 521479 - DNA, 33 bp, Homo sapien
taggtgcattaactatcaactcaaagaggattg

SEQ ID NO: 521480 - DNA, 33 bp, Homo sapien
taggtgcattaactattaactcaaagaggattg

SEQ ID NO: 521481 - DNA, 33 bp, Homo sapien
cctgcactgttttccaatcccttaacattactt

SEQ ID NO: 521482 - DNA, 33 bp, Homo sapien
cctgcactgttttccagtcccttaacattactt

SEQ ID NO: 521483 - DNA, 33 bp, Homo sapien
ggactaaaagatctcaactacaggaactcaggc

SEQ ID NO: 521484 - DNA, 33 bp, Homo sapien
ggactaaaagatctcatctacaggaactcaggc

SEQ ID NO: 521485 - DNA, 33 bp, Homo sapien
cttacttcatcttcgtgtttcagcttactaacc

SEQ ID NO: 521486 - DNA, 33 bp, Homo sapien
cttacttcatcttcgtttttcagcttactaacc

SEQ ID NO: 521487 - DNA, 33 bp, Homo sapien
ctccaccacaagtacaaatgcataaaacaaaaa

SEQ ID NO: 521488 - DNA, 33 bp, Homo sapien
ctccaccacaagtacatatgcataaaacaaaaa

SEQ ID NO: 521489 - DNA, 33 bp, Homo sapien
gaaatgagaccaaaaacgggccaagctttgagg

SEQ ID NO: 521490 - DNA, 33 bp, Homo sapien
gaaatgagaccaaaaatgggccaagctttgagg

SEQ ID NO: 521491 - DNA, 33 bp, Homo sapien
taatggtagaacagacacaagggatcctggctc

SEQ ID NO: 521492 - DNA, 33 bp, Homo sapien
taatggtagaacagacgcaagggatcctggctc

SEQ ID NO: 521493 - DNA, 33 bp, Homo sapien
acatggtcattgagcccgccctctcgttccttg

SEQ ID NO: 521494 - DNA, 33 bp, Homo sapien
acatggtcattgagcctgccctctcgttccttg

SEQ ID NO: 521495 - DNA, 33 bp, Homo sapien
ctttcctttcagcggcaaagtacttcatcttct

SEQ ID NO: 521496 - DNA, 33 bp, Homo sapien
ctttcctttcagcggcgaagtacttcatcttct

SEQ ID NO: 521497 - DNA, 33 bp, Homo sapien
ctttctcatagtcacacggttgctatatctcct

SEQ ID NO: 521498 - DNA, 33 bp, Homo sapien
ctttctcatagtcacatggttgctatatctcct

SEQ ID NO: 521499 - DNA, 33 bp, Homo sapien
ttttaaagaggtgattcaagtaccgttgctaag

SEQ ID NO: 521500 - DNA, 33 bp, Homo sapien
ttttaaagaggtgattgaagtaccgttgctaag

SEQ ID NO: 521501 - DNA, 33 bp, Homo sapien
aattccacagttcaaacgcccttcttaagggtc

SEQ ID NO: 521502 - DNA, 33 bp, Homo sapien
aattccacagttcaaatgcccttcttaagggtc

SEQ ID NO: 521503 - DNA, 33 bp, Homo sapien
atattaagtacaatcacattacctccttagtag

SEQ ID NO: 521504 - DNA, 33 bp, Homo sapien
atattaagtacaatcatattacctccttagtag

SEQ ID NO: 521505 - DNA, 33 bp, Homo sapien
ttttggatgacaggtaagttttaaatctttatg

SEQ ID NO: 521506 - DNA, 33 bp, Homo sapien
ttttggatgacaggtatgttttaaatctttatg

SEQ ID NO: 521507 - DNA, 33 bp, Homo sapien
actttttggatgctaccagtttttagatttgag

SEQ ID NO: 521508 - DNA, 33 bp, Homo sapien
actttttggatgctactagtttttagatttgag

SEQ ID NO: 521509 - DNA, 33 bp, Homo sapien
aggcatattcactcttcaacaaacaagtcttga

SEQ ID NO: 521510 - DNA, 33 bp, Homo sapien
aggcatattcactcttgaacaaacaagtcttga

SEQ ID NO: 521511 - DNA, 33 bp, Homo sapien
gaatctaatgctccaaaggtagttaagagcatt

SEQ ID NO: 521512 - DNA, 33 bp, Homo sapien
gaatctaatgctccaagggtagttaagagcatt

SEQ ID NO: 521513 - DNA, 33 bp, Homo sapien
agtttttggtgctacaaattaaaaaatcaaatt

SEQ ID NO: 521514 - DNA, 33 bp, Homo sapien
agtttttggtgctacacattaaaaaatcaaatt

SEQ ID NO: 521515 - DNA, 33 bp, Homo sapien
acttttgctgtgttagaagaagttgaccaggaa

SEQ ID NO: 521516 - DNA, 33 bp, Homo sapien
acttttgctgtgttaggagaagttgaccaggaa

SEQ ID NO: 521517 - DNA, 33 bp, Homo sapien
aactgattttcaagtacggtgtagagcactcta

SEQ ID NO: 521518 - DNA, 33 bp, Homo sapien
aactgattttcaagtatggtgtagagcactcta

SEQ ID NO: 521519 - DNA, 33 bp, Homo sapien
aagtataaatgatttcaaatcactggaaacaat

SEQ ID NO: 521520 - DNA, 33 bp, Homo sapien
aagtataaatgatttcgaatcactggaaacaat

SEQ ID NO: 521521 - DNA, 33 bp, Homo sapien
atatcctggaatttcaccttctataatgtctgt

SEQ ID NO: 521522 - DNA, 33 bp, Homo sapien
atatcctggaatttcatcttctataatgtctgt

SEQ ID NO: 521523 - DNA, 33 bp, Homo sapien
ccagtgtgaaaattcaactttgcaaaacagatc

SEQ ID NO: 521524 - DNA, 33 bp, Homo sapien
ccagtgtgaaaattcagctttgcaaaacagatc

SEQ ID NO: 521525 - DNA, 33 bp, Homo sapien
atacttgaccatcctccctgttccttggaatct

SEQ ID NO: 521526 - DNA, 33 bp, Homo sapien
atacttgaccatcctctctgttccttggaatct

SEQ ID NO: 521527 - DNA, 33 bp, Homo sapien
gaaggatgcaataaataaaaaggagaatcagag

SEQ ID NO: 521528 - DNA, 33 bp, Homo sapien
gaaggatgcaataaattaaaaggagaatcagag

SEQ ID NO: 521529 - DNA, 33 bp, Homo sapien
aattggaatcaggagaaattgtacgtaaaatat

SEQ ID NO: 521530 - DNA, 33 bp, Homo sapien
aattggaatcaggagagattgtacgtaaaatat

SEQ ID NO: 521531 - DNA, 33 bp, Homo sapien
gagctcatctatttcaagttcctagaacaatat

SEQ ID NO: 521532 - DNA, 33 bp, Homo sapien
gagctcatctatttcaggttcctagaacaatat

SEQ ID NO: 521533 - DNA, 33 bp, Homo sapien
aattcattatttttagaacagattccacatcct

SEQ ID NO: 521534 - DNA, 33 bp, Homo sapien
aattcattatttttagtacagattccacatcct

SEQ ID NO: 521535 - DNA, 33 bp, Homo sapien
cttattctccccaccaagttcctgagaaacttc

SEQ ID NO: 521536 - DNA, 33 bp, Homo sapien
cttattctccccaccacgttcctgagaaacttc

SEQ ID NO: 521537 - DNA, 33 bp, Homo sapien
aaatacatatggaatcgaactgaattaatgata

SEQ ID NO: 521538 - DNA, 33 bp, Homo sapien
aaatacatatggaatctaactgaattaatgata

SEQ ID NO: 521539 - DNA, 33 bp, Homo sapien
cttactaagtgtcaaactctgctagtgtaggga

SEQ ID NO: 521540 - DNA, 33 bp, Homo sapien
cttactaagtgtcaaagtctgctagtgtaggga

SEQ ID NO: 521541 - DNA, 33 bp, Homo sapien
tgagatattaactcacacttgtcaagatggcta

SEQ ID NO: 521542 - DNA, 33 bp, Homo sapien
tgagatattaactcacgcttgtcaagatggcta

SEQ ID NO: 521543 - DNA, 33 bp, Homo sapien
tttctgtatatctctacgtatcccactggttct

SEQ ID NO: 521544 - DNA, 33 bp, Homo sapien
tttctgtatatctctatgtatcccactggttct

SEQ ID NO: 521545 - DNA, 33 bp, Homo sapien
taaaaatgccttaacaagcgattataaatatgc

SEQ ID NO: 521546 - DNA, 33 bp, Homo sapien
taaaaatgccttaacacgcgattataaatatgc

SEQ ID NO: 521547 - DNA, 33 bp, Homo sapien
aaagatagaaagaaacaatgagcctctttaata

SEQ ID NO: 521548 - DNA, 33 bp, Homo sapien
aaagatagaaagaaactatgagcctctttaata

SEQ ID NO: 521549 - DNA, 33 bp, Homo sapien
ttctggatataaatacacttcatcacgatatta

SEQ ID NO: 521550 - DNA, 33 bp, Homo sapien
ttctggatataaatacgcttcatcacgatatta

SEQ ID NO: 521551 - DNA, 33 bp, Homo sapien
agtgtacagtttgtgaaggtccattatctacca

SEQ ID NO: 521552 - DNA, 33 bp, Homo sapien
agtgtacagtttgtgatggtccattatctacca

SEQ ID NO: 521553 - DNA, 33 bp, Homo sapien
ttaaagcatgaacttagggagtctctgaatccg

SEQ ID NO: 521554 - DNA, 33 bp, Homo sapien
ttaaagcatgaacttatggagtctctgaatccg

SEQ ID NO: 521555 - DNA, 33 bp, Homo sapien
tactctgatcgctgtaataaacctatatgattg

SEQ ID NO: 521556 - DNA, 33 bp, Homo sapien
tactctgatcgctgtagtaaacctatatgattg

SEQ ID NO: 521557 - DNA, 33 bp, Homo sapien
caaccacttctttccaatataccagccagtcac

SEQ ID NO: 521558 - DNA, 33 bp, Homo sapien
caaccacttctttccattataccagccagtcac

SEQ ID NO: 521559 - DNA, 33 bp, Homo sapien
gaaaagaggcttgccaacctatgtgagttaatc

SEQ ID NO: 521560 - DNA, 33 bp, Homo sapien
gaaaagaggcttgccatcctatgtgagttaatc

SEQ ID NO: 521561 - DNA, 33 bp, Homo sapien
aagagaataagttggactaaaatgcaattccac

SEQ ID NO: 521562 - DNA, 33 bp, Homo sapien
aagagaataagttggagtaaaatgcaattccac

SEQ ID NO: 521563 - DNA, 33 bp, Homo sapien
tggaatgcagcaaaggaataaagatatgaaaaa

SEQ ID NO: 521564 - DNA, 33 bp, Homo sapien
tggaatgcagcaaagggataaagatatgaaaaa

SEQ ID NO: 521565 - DNA, 33 bp, Homo sapien
atcaacatacaaaaaacatggcataaacataaa

SEQ ID NO: 521566 - DNA, 33 bp, Homo sapien
atcaacatacaaaaaatatggcataaacataaa

SEQ ID NO: 521567 - DNA, 33 bp, Homo sapien
ctttatgcattctgggaacaagtcctttatcaa

SEQ ID NO: 521568 - DNA, 33 bp, Homo sapien
ctttatgcattctgggtacaagtcctttatcaa

SEQ ID NO: 521569 - DNA, 33 bp, Homo sapien
atctgtaagatagcaagtccaaccccttctctt

SEQ ID NO: 521570 - DNA, 33 bp, Homo sapien
atctgtaagatagcaattccaaccccttctctt

SEQ ID NO: 521571 - DNA, 33 bp, Homo sapien
acaggcgagattgggcgcattcctactcctgac

SEQ ID NO: 521572 - DNA, 33 bp, Homo sapien
acaggcgagattgggctcattcctactcctgac

SEQ ID NO: 521573 - DNA, 33 bp, Homo sapien
gtcctctgccaaagttctaagttttcatgaaaa

SEQ ID NO: 521574 - DNA, 33 bp, Homo sapien
gtcctctgccaaagttgtaagttttcatgaaaa

SEQ ID NO: 521575 - DNA, 33 bp, Homo sapien
agccaaaaatgagtgaataatattatgcagtgt

SEQ ID NO: 521576 - DNA, 33 bp, Homo sapien
agccaaaaatgagtgagtaatattatgcagtgt

SEQ ID NO: 521577 - DNA, 33 bp, Homo sapien
tgcatcctgataatgacaacagccctaaccata

SEQ ID NO: 521578 - DNA, 33 bp, Homo sapien
tgcatcctgataatgataacagccctaaccata

SEQ ID NO: 521579 - DNA, 33 bp, Homo sapien
ttgttcctaaaagtacaccagttacagcgtcct

SEQ ID NO: 521580 - DNA, 33 bp, Homo sapien
ttgttcctaaaagtactccagttacagcgtcct

SEQ ID NO: 521581 - DNA, 33 bp, Homo sapien
tgtttgttttttcagacagtgaaaagaatgtac

SEQ ID NO: 521582 - DNA, 33 bp, Homo sapien
tgtttgttttttcagagagtgaaaagaatgtac

SEQ ID NO: 521583 - DNA, 33 bp, Homo sapien
ttttaactcataggcaaattggcttggtctttg

SEQ ID NO: 521584 - DNA, 33 bp, Homo sapien
ttttaactcataggcatattggcttggtctttg

SEQ ID NO: 521585 - DNA, 33 bp, Homo sapien
aggagcagtttccagggaccctggagcaagtga

SEQ ID NO: 521586 - DNA, 33 bp, Homo sapien
aggagcagtttccaggtaccctggagcaagtga

SEQ ID NO: 521587 - DNA, 33 bp, Homo sapien
cttaagataaaaataaagtgaaagttgtgtata

SEQ ID NO: 521588 - DNA, 33 bp, Homo sapien
cttaagataaaaataaggtgaaagttgtgtata

SEQ ID NO: 521589 - DNA, 33 bp, Homo sapien
tgtgaggattttaaggcagccctaatgtgggtt

SEQ ID NO: 521590 - DNA, 33 bp, Homo sapien
tgtgaggattttaaggtagccctaatgtgggtt

SEQ ID NO: 521591 - DNA, 33 bp, Homo sapien
tatctgtaaccccaaaattaatacagtgctttt

SEQ ID NO: 521592 - DNA, 33 bp, Homo sapien
tatctgtaaccccaaagttaatacagtgctttt

SEQ ID NO: 521593 - DNA, 33 bp, Homo sapien
agtctttcaaaacacaacataccaccgtgcctt

SEQ ID NO: 521594 - DNA, 33 bp, Homo sapien
agtctttcaaaacacaccataccaccgtgcctt

SEQ ID NO: 521595 - DNA, 33 bp, Homo sapien
tggatatggcaagagaagttgtggtcaaactta

SEQ ID NO: 521596 - DNA, 33 bp, Homo sapien
tggatatggcaagagaggttgtggtcaaactta

SEQ ID NO: 521597 - DNA, 33 bp, Homo sapien
tcttttgaggcaccaactctcggtctccctttc

SEQ ID NO: 521598 - DNA, 33 bp, Homo sapien
tcttttgaggcaccaattctcggtctccctttc

SEQ ID NO: 521599 - DNA, 33 bp, Homo sapien
cctatcacatttacacaaggttgtagggtcagc

SEQ ID NO: 521600 - DNA, 33 bp, Homo sapien
cctatcacatttacacgaggttgtagggtcagc

SEQ ID NO: 521601 - DNA, 33 bp, Homo sapien
atggagccaggtgacaatacagcttctttaagc

SEQ ID NO: 521602 - DNA, 33 bp, Homo sapien
atggagccaggtgacactacagcttctttaagc

SEQ ID NO: 521603 - DNA, 33 bp, Homo sapien
ggaccaaagggaaaataatcttcatgtgggatc

SEQ ID NO: 521604 - DNA, 33 bp, Homo sapien
ggaccaaagggaaaatcatcttcatgtgggatc

SEQ ID NO: 521605 - DNA, 33 bp, Homo sapien
caactctcacattcctaagacatccctggctca

SEQ ID NO: 521606 - DNA, 33 bp, Homo sapien
caactctcacattcctgagacatccctggctca

SEQ ID NO: 521607 - DNA, 33 bp, Homo sapien
gctcttaaactagaacagtcttacagacactag

SEQ ID NO: 521608 - DNA, 33 bp, Homo sapien
gctcttaaactagaacggtcttacagacactag

SEQ ID NO: 521609 - DNA, 33 bp, Homo sapien
ctaaatcccaagatgccccaggatgaaggcgca

SEQ ID NO: 521610 - DNA, 33 bp, Homo sapien
ctaaatcccaagatgctccaggatgaaggcgca

SEQ ID NO: 521611 - DNA, 33 bp, Homo sapien
ggcaaagttgcattcaactgatttggtctctgc

SEQ ID NO: 521612 - DNA, 33 bp, Homo sapien
ggcaaagttgcattcagctgatttggtctctgc

SEQ ID NO: 521613 - DNA, 33 bp, Homo sapien
gttcttaatgaaataacgctggctagagccctt

SEQ ID NO: 521614 - DNA, 33 bp, Homo sapien
gttcttaatgaaataatgctggctagagccctt

SEQ ID NO: 521615 - DNA, 33 bp, Homo sapien
attaaaagatacagaaaactgggagctagaagt

SEQ ID NO: 521616 - DNA, 33 bp, Homo sapien
attaaaagatacagaagactgggagctagaagt

SEQ ID NO: 521617 - DNA, 33 bp, Homo sapien
tagtcaactgaattggaagcagacaaatttttc

SEQ ID NO: 521618 - DNA, 33 bp, Homo sapien
tagtcaactgaattgggagcagacaaatttttc

SEQ ID NO: 521619 - DNA, 33 bp, Homo sapien
tgcctgtcttgcttaaagaatcataagactatg

SEQ ID NO: 521620 - DNA, 33 bp, Homo sapien
tgcctgtcttgcttaaggaatcataagactatg

SEQ ID NO: 521621 - DNA, 33 bp, Homo sapien
aggaaataaaagcttacagttagcagcattcaa

SEQ ID NO: 521622 - DNA, 33 bp, Homo sapien
aggaaataaaagcttatagttagcagcattcaa

SEQ ID NO: 521623 - DNA, 33 bp, Homo sapien
gccagagcctgatgaaagttgcccttgtgtatt

SEQ ID NO: 521624 - DNA, 33 bp, Homo sapien
gccagagcctgatgaaggttgcccttgtgtatt

SEQ ID NO: 521625 - DNA, 33 bp, Homo sapien
atgacatcgatgtggacagaaaattccttggct

SEQ ID NO: 521626 - DNA, 33 bp, Homo sapien
atgacatcgatgtggagagaaaattccttggct

SEQ ID NO: 521627 - DNA, 33 bp, Homo sapien
tctcttgacttccacacagaaaatgaaaaccac

SEQ ID NO: 521628 - DNA, 33 bp, Homo sapien
tctcttgacttccacatagaaaatgaaaaccac

SEQ ID NO: 521629 - DNA, 33 bp, Homo sapien
atgcaaccagttggtaaacaaaacacattttaa

SEQ ID NO: 521630 - DNA, 33 bp, Homo sapien
atgcaaccagttggtagacaaaacacattttaa

SEQ ID NO: 521631 - DNA, 33 bp, Homo sapien
ttgctctctttgatcccgaagacatcaaggagg

SEQ ID NO: 521632 - DNA, 33 bp, Homo sapien
ttgctctctttgatcctgaagacatcaaggagg

SEQ ID NO: 521633 - DNA, 33 bp, Homo sapien
caacatttgtagaccacgtaatatgtgcagagc

SEQ ID NO: 521634 - DNA, 33 bp, Homo sapien
caacatttgtagaccatgtaatatgtgcagagc

SEQ ID NO: 521635 - DNA, 33 bp, Homo sapien
tctgttggtttgaactaagaggacagtctatgc

SEQ ID NO: 521636 - DNA, 33 bp, Homo sapien
tctgttggtttgaactgagaggacagtctatgc

SEQ ID NO: 521637 - DNA, 33 bp, Homo sapien
cacacatttaatggcacgaaataacacagattt

SEQ ID NO: 521638 - DNA, 33 bp, Homo sapien
cacacatttaatggcatgaaataacacagattt

SEQ ID NO: 521639 - DNA, 33 bp, Homo sapien
cacattttcatcacagaaagttctattagacag

SEQ ID NO: 521640 - DNA, 33 bp, Homo sapien
cacattttcatcacaggaagttctattagacag

SEQ ID NO: 521641 - DNA, 33 bp, Homo sapien
gctacactgaagccataactactctatgctttg

SEQ ID NO: 521642 - DNA, 33 bp, Homo sapien
gctacactgaagccatgactactctatgctttg

SEQ ID NO: 521643 - DNA, 33 bp, Homo sapien
tagggctgtgccgtccaatacaggaaccaccag

SEQ ID NO: 521644 - DNA, 33 bp, Homo sapien
tagggctgtgccgtccgatacaggaaccaccag

SEQ ID NO: 521645 - DNA, 33 bp, Homo sapien
acctagaggaatgtgccgaaacagtagtaggtg

SEQ ID NO: 521646 - DNA, 33 bp, Homo sapien
acctagaggaatgtgctgaaacagtagtaggtg

SEQ ID NO: 521647 - DNA, 33 bp, Homo sapien
ttcatggaaaggaccacaacttgggtatcttga

SEQ ID NO: 521648 - DNA, 33 bp, Homo sapien
ttcatggaaaggaccagaacttgggtatcttga

SEQ ID NO: 521649 - DNA, 33 bp, Homo sapien
gaaaagaaaatgcagggatatgctatttgtgtt

SEQ ID NO: 521650 - DNA, 33 bp, Homo sapien
gaaaagaaaatgcaggtatatgctatttgtgtt

SEQ ID NO: 521651 - DNA, 33 bp, Homo sapien
ggccccctgaccctgaaaactgtgtagcaagac

SEQ ID NO: 521652 - DNA, 33 bp, Homo sapien
ggccccctgaccctgataactgtgtagcaagac

SEQ ID NO: 521653 - DNA, 33 bp, Homo sapien
agacctgagtcttctacataccatgtttggggt

SEQ ID NO: 521654 - DNA, 33 bp, Homo sapien
agacctgagtcttctatataccatgtttggggt

SEQ ID NO: 521655 - DNA, 33 bp, Homo sapien
caatatatacttaataaactctgccaaataaca

SEQ ID NO: 521656 - DNA, 33 bp, Homo sapien
caatatatacttaatacactctgccaaataaca

SEQ ID NO: 521657 - DNA, 33 bp, Homo sapien
tcagtattcaacaacccgcttaatgcctaccgt

SEQ ID NO: 521658 - DNA, 33 bp, Homo sapien
tcagtattcaacaacctgcttaatgcctaccgt

SEQ ID NO: 521659 - DNA, 33 bp, Homo sapien
ggaaattaatcatgagccaaaagagatgtccag

SEQ ID NO: 521660 - DNA, 33 bp, Homo sapien
ggaaattaatcatgaggcaaaagagatgtccag

SEQ ID NO: 521661 - DNA, 33 bp, Homo sapien
aaaaaaaaaagacaacaatgcaactattttttg

SEQ ID NO: 521662 - DNA, 33 bp, Homo sapien
aaaaaaaaaagacaacgatgcaactattttttg

SEQ ID NO: 521663 - DNA, 33 bp, Homo sapien
gtttgaatagctgttacatgatgctgtcagaaa

SEQ ID NO: 521664 - DNA, 33 bp, Homo sapien
gtttgaatagctgttatatgatgctgtcagaaa

SEQ ID NO: 521665 - DNA, 33 bp, Homo sapien
atatttgcgtgcacacagcattggggcccgggg

SEQ ID NO: 521666 - DNA, 33 bp, Homo sapien
atatttgcgtgcacacggcattggggcccgggg

SEQ ID NO: 521667 - DNA, 33 bp, Homo sapien
gcacagttatgaatccacaacctgtaagttctg

SEQ ID NO: 521668 - DNA, 33 bp, Homo sapien
gcacagttatgaatccgcaacctgtaagttctg

SEQ ID NO: 521669 - DNA, 33 bp, Homo sapien
caaatatgaaatgacaatgaagtcgtattaatg

SEQ ID NO: 521670 - DNA, 33 bp, Homo sapien
caaatatgaaatgacagtgaagtcgtattaatg

SEQ ID NO: 521671 - DNA, 33 bp, Homo sapien
atggctagaattttaaaggactgacaataccaa

SEQ ID NO: 521672 - DNA, 33 bp, Homo sapien
atggctagaattttaacggactgacaataccaa

SEQ ID NO: 521673 - DNA, 33 bp, Homo sapien
gaaacagttggaggtaaagttagataaatacag

SEQ ID NO: 521674 - DNA, 33 bp, Homo sapien
gaaacagttggaggtacagttagataaatacag

SEQ ID NO: 521675 - DNA, 33 bp, Homo sapien
aatgatttatccaacacggaagaggccaagaac

SEQ ID NO: 521676 - DNA, 33 bp, Homo sapien
aatgatttatccaacatggaagaggccaagaac

SEQ ID NO: 521677 - DNA, 33 bp, Homo sapien
cacttagttcttttcacaatggtctagtttccc

SEQ ID NO: 521678 - DNA, 33 bp, Homo sapien
cacttagttcttttcagaatggtctagtttccc

SEQ ID NO: 521679 - DNA, 33 bp, Homo sapien
tgggttaatgaggaaacgtatggttatgaaagg

SEQ ID NO: 521680 - DNA, 33 bp, Homo sapien
tgggttaatgaggaaatgtatggttatgaaagg

SEQ ID NO: 521681 - DNA, 33 bp, Homo sapien
aaaacttgatgtcagcacctcctaagcggagtt

SEQ ID NO: 521682 - DNA, 33 bp, Homo sapien
aaaacttgatgtcagcgcctcctaagcggagtt

SEQ ID NO: 521683 - DNA, 33 bp, Homo sapien
cctgattaaaccttcactaagtttcaaactcca

SEQ ID NO: 521684 - DNA, 33 bp, Homo sapien
cctgattaaaccttcagtaagtttcaaactcca

SEQ ID NO: 521685 - DNA, 33 bp, Homo sapien
aggcacttgcttaatgcactttttccaccacaa

SEQ ID NO: 521686 - DNA, 33 bp, Homo sapien
aggcacttgcttaatgtactttttccaccacaa

SEQ ID NO: 521687 - DNA, 33 bp, Homo sapien
cccatggataattggcacacatgagctttattt

SEQ ID NO: 521688 - DNA, 33 bp, Homo sapien
cccatggataattggcgcacatgagctttattt

SEQ ID NO: 521689 - DNA, 33 bp, Homo sapien
aaatccaggtcacagacggactgttttctctcc

SEQ ID NO: 521690 - DNA, 33 bp, Homo sapien
aaatccaggtcacagagggactgttttctctcc

SEQ ID NO: 521691 - DNA, 33 bp, Homo sapien
gtgacagagccaggaacaggacttggtgctcct

SEQ ID NO: 521692 - DNA, 33 bp, Homo sapien
gtgacagagccaggaagaggacttggtgctcct

SEQ ID NO: 521693 - DNA, 33 bp, Homo sapien
acttcaacacatttcaaggaagttcaggatcag

SEQ ID NO: 521694 - DNA, 33 bp, Homo sapien
acttcaacacatttcagggaagttcaggatcag

SEQ ID NO: 521695 - DNA, 33 bp, Homo sapien
cttcattctcttggaacctggatattttttcac

SEQ ID NO: 521696 - DNA, 33 bp, Homo sapien
cttcattctcttggaagctggatattttttcac

SEQ ID NO: 521697 - DNA, 33 bp, Homo sapien
ttggttaaagctctaaaaattcaatgtcaaaag

SEQ ID NO: 521698 - DNA, 33 bp, Homo sapien
ttggttaaagctctaagaattcaatgtcaaaag

SEQ ID NO: 521699 - DNA, 33 bp, Homo sapien
ttggcaatatcaccaactctaaaaagcatttga

SEQ ID NO: 521700 - DNA, 33 bp, Homo sapien
ttggcaatatcaccaagtctaaaaagcatttga

SEQ ID NO: 521701 - DNA, 33 bp, Homo sapien
ggattgcttgggtctaaggggtcaagactgcgg

SEQ ID NO: 521702 - DNA, 33 bp, Homo sapien
ggattgcttgggtctagggggtcaagactgcgg

SEQ ID NO: 521703 - DNA, 33 bp, Homo sapien
atcctaaaagagatcactatgactgcagacagt

SEQ ID NO: 521704 - DNA, 33 bp, Homo sapien
atcctaaaagagatcattatgactgcagacagt

SEQ ID NO: 521705 - DNA, 33 bp, Homo sapien
attatgactgattagacgacccttctcggggcc

SEQ ID NO: 521706 - DNA, 33 bp, Homo sapien
attatgactgattagatgacccttctcggggcc

SEQ ID NO: 521707 - DNA, 33 bp, Homo sapien
tcatacacgtaaatctcaatctggaaggaagat

SEQ ID NO: 521708 - DNA, 33 bp, Homo sapien
tcatacacgtaaatcttaatctggaaggaagat

SEQ ID NO: 521709 - DNA, 33 bp, Homo sapien
tctccagaagttttacacttgagtgcacccaga

SEQ ID NO: 521710 - DNA, 33 bp, Homo sapien
tctccagaagttttacgcttgagtgcacccaga

SEQ ID NO: 521711 - DNA, 33 bp, Homo sapien
ctttccatataatcaacgagtttgcattcccta

SEQ ID NO: 521712 - DNA, 33 bp, Homo sapien
ctttccatataatcaatgagtttgcattcccta

SEQ ID NO: 521713 - DNA, 33 bp, Homo sapien
acctacaatctcaccaaaaggtaaccacatcta

SEQ ID NO: 521714 - DNA, 33 bp, Homo sapien
acctacaatctcaccacaaggtaaccacatcta

SEQ ID NO: 521715 - DNA, 33 bp, Homo sapien
atttagaagccattctcacttgtgactcataaa

SEQ ID NO: 521716 - DNA, 33 bp, Homo sapien
atttagaagccattcttacttgtgactcataaa

SEQ ID NO: 521717 - DNA, 33 bp, Homo sapien
ggccctggtccctaataatcttggagctgcact

SEQ ID NO: 521718 - DNA, 33 bp, Homo sapien
ggccctggtccctaatcatcttggagctgcact

SEQ ID NO: 521719 - DNA, 33 bp, Homo sapien
tcaatgcattcctctgaaatgaaggtactctgc

SEQ ID NO: 521720 - DNA, 33 bp, Homo sapien
tcaatgcattcctctgcaatgaaggtactctgc

SEQ ID NO: 521721 - DNA, 33 bp, Homo sapien
cccacctacagtcctccaaattgcatgagccac

SEQ ID NO: 521722 - DNA, 33 bp, Homo sapien
cccacctacagtcctctaaattgcatgagccac

SEQ ID NO: 521723 - DNA, 33 bp, Homo sapien
tgagttctaccagaagaagctgtggactcttaa

SEQ ID NO: 521724 - DNA, 33 bp, Homo sapien
tgagttctaccagaagcagctgtggactcttaa

SEQ ID NO: 521725 - DNA, 33 bp, Homo sapien
tattcttccaccgttaacatactgatgaagagt

SEQ ID NO: 521726 - DNA, 33 bp, Homo sapien
tattcttccaccgttagcatactgatgaagagt

SEQ ID NO: 521727 - DNA, 33 bp, Homo sapien
gagaatgagaatctgaaaatcatcacccaacaa

SEQ ID NO: 521728 - DNA, 33 bp, Homo sapien
gagaatgagaatctgagaatcatcacccaacaa

SEQ ID NO: 521729 - DNA, 33 bp, Homo sapien
catgcaaagaatgtaacgtagtgcttataatgc

SEQ ID NO: 521730 - DNA, 33 bp, Homo sapien
catgcaaagaatgtaatgtagtgcttataatgc

SEQ ID NO: 521731 - DNA, 33 bp, Homo sapien
gaacatcccagtgaaaatcaatggggaagtcac

SEQ ID NO: 521732 - DNA, 33 bp, Homo sapien
gaacatcccagtgaaactcaatggggaagtcac

SEQ ID NO: 521733 - DNA, 33 bp, Homo sapien
aaaaggacaatgaggacggggcccttccaagaa

SEQ ID NO: 521734 - DNA, 33 bp, Homo sapien
aaaaggacaatgaggatggggcccttccaagaa

SEQ ID NO: 521735 - DNA, 33 bp, Homo sapien
gatctacagaaacccaatacacaggaaacactg

SEQ ID NO: 521736 - DNA, 33 bp, Homo sapien
gatctacagaaacccactacacaggaaacactg

SEQ ID NO: 521737 - DNA, 33 bp, Homo sapien
ttttatcagccaagaactgtgttaacccagcct

SEQ ID NO: 521738 - DNA, 33 bp, Homo sapien
ttttatcagccaagaattgtgttaacccagcct

SEQ ID NO: 521739 - DNA, 33 bp, Homo sapien
tacattcattttataaagccaggtgtaattggg

SEQ ID NO: 521740 - DNA, 33 bp, Homo sapien
tacattcattttataacgccaggtgtaattggg

SEQ ID NO: 521741 - DNA, 33 bp, Homo sapien
gagtctcattaaacaaaatctcggaaagttggg

SEQ ID NO: 521742 - DNA, 33 bp, Homo sapien
gagtctcattaaacaacatctcggaaagttggg

SEQ ID NO: 521743 - DNA, 33 bp, Homo sapien
aataaggtaaaattcaaataagcttgcagttaa

SEQ ID NO: 521744 - DNA, 33 bp, Homo sapien
aataaggtaaaattcagataagcttgcagttaa

SEQ ID NO: 521745 - DNA, 33 bp, Homo sapien
aataaaaatgatacttcaagatgaaaacgaact

SEQ ID NO: 521746 - DNA, 33 bp, Homo sapien
aataaaaatgatacttgaagatgaaaacgaact

SEQ ID NO: 521747 - DNA, 33 bp, Homo sapien
aaactggataaactaaaccagaaaaatgtacat

SEQ ID NO: 521748 - DNA, 33 bp, Homo sapien
aaactggataaactaagccagaaaaatgtacat

SEQ ID NO: 521749 - DNA, 33 bp, Homo sapien
ggcctggtctactaaactcttaaatatttgttt

SEQ ID NO: 521750 - DNA, 33 bp, Homo sapien
ggcctggtctactaaagtcttaaatatttgttt

SEQ ID NO: 521751 - DNA, 33 bp, Homo sapien
ctaccagaaaatctaactctcaatctttaaaat

SEQ ID NO: 521752 - DNA, 33 bp, Homo sapien
ctaccagaaaatctaattctcaatctttaaaat

SEQ ID NO: 521753 - DNA, 33 bp, Homo sapien
agacagacaatccctgcaggctttctctcttgt

SEQ ID NO: 521754 - DNA, 33 bp, Homo sapien
agacagacaatccctgtaggctttctctcttgt

SEQ ID NO: 521755 - DNA, 33 bp, Homo sapien
attgccaaaccaaaagaaattttcattagtcac

SEQ ID NO: 521756 - DNA, 33 bp, Homo sapien
attgccaaaccaaaaggaattttcattagtcac

SEQ ID NO: 521757 - DNA, 33 bp, Homo sapien
ggatgtttcttttcgacacctacagatctacct

SEQ ID NO: 521758 - DNA, 33 bp, Homo sapien
ggatgtttcttttcgatacctacagatctacct

SEQ ID NO: 521759 - DNA, 33 bp, Homo sapien
tgtggctacttctggacaaggaggaagggaatg

SEQ ID NO: 521760 - DNA, 33 bp, Homo sapien
tgtggctacttctggataaggaggaagggaatg

SEQ ID NO: 521761 - DNA, 33 bp, Homo sapien
agaagagacagaaagaaagcttatttgggtgtc

SEQ ID NO: 521762 - DNA, 33 bp, Homo sapien
agaagagacagaaagagagcttatttgggtgtc

SEQ ID NO: 521763 - DNA, 33 bp, Homo sapien
ataaattcattgttacaggtagttaggcatgag

SEQ ID NO: 521764 - DNA, 33 bp, Homo sapien
ataaattcattgttacgggtagttaggcatgag

SEQ ID NO: 521765 - DNA, 33 bp, Homo sapien
atttttagagataatcactgaaccatcacctga

SEQ ID NO: 521766 - DNA, 33 bp, Homo sapien
atttttagagataatcgctgaaccatcacctga

SEQ ID NO: 521767 - DNA, 33 bp, Homo sapien
attaagaatgcagtagaagatcaaacaaaggaa

SEQ ID NO: 521768 - DNA, 33 bp, Homo sapien
attaagaatgcagtaggagatcaaacaaaggaa

SEQ ID NO: 521769 - DNA, 33 bp, Homo sapien
ataacatctttaaataccagctcaaatattacc

SEQ ID NO: 521770 - DNA, 33 bp, Homo sapien
ataacatctttaaatagcagctcaaatattacc

SEQ ID NO: 521771 - DNA, 33 bp, Homo sapien
gagggagagatcatgaacataggagtaaagaat

SEQ ID NO: 521772 - DNA, 33 bp, Homo sapien
gagggagagatcatgagcataggagtaaagaat

SEQ ID NO: 521773 - DNA, 33 bp, Homo sapien
ttacaaacacaggaaaatggctaaggctgaatg

SEQ ID NO: 521774 - DNA, 33 bp, Homo sapien
ttacaaacacaggaaactggctaaggctgaatg

SEQ ID NO: 521775 - DNA, 33 bp, Homo sapien
tgaaggggactcagaaccagaaccagactcagg

SEQ ID NO: 521776 - DNA, 33 bp, Homo sapien
tgaaggggactcagaatcagaaccagactcagg

SEQ ID NO: 521777 - DNA, 33 bp, Homo sapien
tgttattataccgggacatgctgtaatggactg

SEQ ID NO: 521778 - DNA, 33 bp, Homo sapien
tgttattataccgggagatgctgtaatggactg

SEQ ID NO: 521779 - DNA, 33 bp, Homo sapien
cctgacctagacccaacgctgctttgccccacc

SEQ ID NO: 521780 - DNA, 33 bp, Homo sapien
cctgacctagacccaatgctgctttgccccacc

SEQ ID NO: 521781 - DNA, 33 bp, Homo sapien
cgagatactatgttacaccgttcagaatggcca

SEQ ID NO: 521782 - DNA, 33 bp, Homo sapien
cgagatactatgttacgccgttcagaatggcca

SEQ ID NO: 521783 - DNA, 33 bp, Homo sapien
attattctgaggagtccataggtttttccagca

SEQ ID NO: 521784 - DNA, 33 bp, Homo sapien
attattctgaggagtctataggtttttccagca

SEQ ID NO: 521785 - DNA, 33 bp, Homo sapien
tgctcatggcaacatcgccctgctggtgctgca

SEQ ID NO: 521786 - DNA, 33 bp, Homo sapien
tgctcatggcaacatctccctgctggtgctgca

SEQ ID NO: 521787 - DNA, 33 bp, Homo sapien
aaagagttccgagaagacacaatgttgtttaca

SEQ ID NO: 521788 - DNA, 33 bp, Homo sapien
aaagagttccgagaaggcacaatgttgtttaca

SEQ ID NO: 521789 - DNA, 33 bp, Homo sapien
tcaagggatgagcttacacattcagtacagatt

SEQ ID NO: 521790 - DNA, 33 bp, Homo sapien
tcaagggatgagcttagacattcagtacagatt

SEQ ID NO: 521791 - DNA, 33 bp, Homo sapien
aaacagagagtttttacacagctagagaaaagg

SEQ ID NO: 521792 - DNA, 33 bp, Homo sapien
aaacagagagtttttatacagctagagaaaagg

SEQ ID NO: 521793 - DNA, 33 bp, Homo sapien
actcaattttaagaaccgatcagaccagcctgg

SEQ ID NO: 521794 - DNA, 33 bp, Homo sapien
actcaattttaagaactgatcagaccagcctgg

SEQ ID NO: 521795 - DNA, 33 bp, Homo sapien
acaggtaatggagtaacgtcctggaagtggtag

SEQ ID NO: 521796 - DNA, 33 bp, Homo sapien
acaggtaatggagtaatgtcctggaagtggtag

SEQ ID NO: 521797 - DNA, 33 bp, Homo sapien
gaaaggatatagttggacaaaaacacaaatata

SEQ ID NO: 521798 - DNA, 33 bp, Homo sapien
gaaaggatatagttggtcaaaaacacaaatata

SEQ ID NO: 521799 - DNA, 33 bp, Homo sapien
tcatattccttcccaaactagcatatcctcctg

SEQ ID NO: 521800 - DNA, 33 bp, Homo sapien
tcatattccttcccaatctagcatatcctcctg

SEQ ID NO: 521801 - DNA, 33 bp, Homo sapien
aggagaagaagaggtcaagaccaagcaattgat

SEQ ID NO: 521802 - DNA, 33 bp, Homo sapien
aggagaagaagaggtcgagaccaagcaattgat

SEQ ID NO: 521803 - DNA, 33 bp, Homo sapien
gaccatcctttacaatcacactggagtctagga

SEQ ID NO: 521804 - DNA, 33 bp, Homo sapien
gaccatcctttacaatgacactggagtctagga

SEQ ID NO: 521805 - DNA, 33 bp, Homo sapien
acacactggcagttgcacatggagaaattttca

SEQ ID NO: 521806 - DNA, 33 bp, Homo sapien
acacactggcagttgcgcatggagaaattttca

SEQ ID NO: 521807 - DNA, 33 bp, Homo sapien
ttctatcagttcttcactctggaatggtctcag

SEQ ID NO: 521808 - DNA, 33 bp, Homo sapien
ttctatcagttcttcattctggaatggtctcag

SEQ ID NO: 521809 - DNA, 33 bp, Homo sapien
ttgaaaattttccaaaatctaatcagtgtggct

SEQ ID NO: 521810 - DNA, 33 bp, Homo sapien
ttgaaaattttccaaagtctaatcagtgtggct

SEQ ID NO: 521811 - DNA, 33 bp, Homo sapien
agatgctacttcacaccgaggaagatggctatt

SEQ ID NO: 521812 - DNA, 33 bp, Homo sapien
agatgctacttcacactgaggaagatggctatt

SEQ ID NO: 521813 - DNA, 33 bp, Homo sapien
atgaaccttatattgacgcaatgttaccaccta

SEQ ID NO: 521814 - DNA, 33 bp, Homo sapien
atgaaccttatattgatgcaatgttaccaccta

SEQ ID NO: 521815 - DNA, 33 bp, Homo sapien
gacacatgcatgcataagttccttacagcacta

SEQ ID NO: 521816 - DNA, 33 bp, Homo sapien
gacacatgcatgcatatgttccttacagcacta

SEQ ID NO: 521817 - DNA, 33 bp, Homo sapien
ttgaataagttgttgacactattttgaacaaaa

SEQ ID NO: 521818 - DNA, 33 bp, Homo sapien
ttgaataagttgttgatactattttgaacaaaa

SEQ ID NO: 521819 - DNA, 33 bp, Homo sapien
ggatgttggatttatcagaccagtaatttaaaa

SEQ ID NO: 521820 - DNA, 33 bp, Homo sapien
ggatgttggatttatcggaccagtaatttaaaa

SEQ ID NO: 521821 - DNA, 33 bp, Homo sapien
acttcagcctgggagaactgcaggtatttgact

SEQ ID NO: 521822 - DNA, 33 bp, Homo sapien
acttcagcctgggagagctgcaggtatttgact

SEQ ID NO: 521823 - DNA, 33 bp, Homo sapien
ctagtgatcccactaccgagtatatatgcagag

SEQ ID NO: 521824 - DNA, 33 bp, Homo sapien
ctagtgatcccactactgagtatatatgcagag

SEQ ID NO: 521825 - DNA, 33 bp, Homo sapien
taattttagcattccaatcattagcctgaactc

SEQ ID NO: 521826 - DNA, 33 bp, Homo sapien
taattttagcattccagtcattagcctgaactc

SEQ ID NO: 521827 - DNA, 33 bp, Homo sapien
ccaattcttaaattacacaaggataagaagctg

SEQ ID NO: 521828 - DNA, 33 bp, Homo sapien
ccaattcttaaattacgcaaggataagaagctg

SEQ ID NO: 521829 - DNA, 33 bp, Homo sapien
gcccaatatcttctgaccatttttcagtatctc

SEQ ID NO: 521830 - DNA, 33 bp, Homo sapien
gcccaatatcttctgatcatttttcagtatctc

SEQ ID NO: 521831 - DNA, 33 bp, Homo sapien
ttatgtcacttactcaatatgttttctactttt

SEQ ID NO: 521832 - DNA, 33 bp, Homo sapien
ttatgtcacttactcagtatgttttctactttt

SEQ ID NO: 521833 - DNA, 33 bp, Homo sapien
ctcaggaaatcatcgcaaaaggcatctcttcac

SEQ ID NO: 521834 - DNA, 33 bp, Homo sapien
ctcaggaaatcatcgcgaaaggcatctcttcac

SEQ ID NO: 521835 - DNA, 33 bp, Homo sapien
tgctgctgtgtttaaccgggctccgttcttgtt

SEQ ID NO: 521836 - DNA, 33 bp, Homo sapien
tgctgctgtgtttaactgggctccgttcttgtt

SEQ ID NO: 521837 - DNA, 33 bp, Homo sapien
gctctaaactatgagagattaggatcctggaat

SEQ ID NO: 521838 - DNA, 33 bp, Homo sapien
gctctaaactatgagatattaggatcctggaat

SEQ ID NO: 521839 - DNA, 33 bp, Homo sapien
atggtattgcctaaacaaaactgctgttgccct

SEQ ID NO: 521840 - DNA, 33 bp, Homo sapien
atggtattgcctaaaccaaactgctgttgccct

SEQ ID NO: 521841 - DNA, 33 bp, Homo sapien
aattaattattttctcaaatcagtttctcacct

SEQ ID NO: 521842 - DNA, 33 bp, Homo sapien
aattaattattttctcgaatcagtttctcacct

SEQ ID NO: 521843 - DNA, 33 bp, Homo sapien
tctctcctgtggccaaaatttaggctgagtttc

SEQ ID NO: 521844 - DNA, 33 bp, Homo sapien
tctctcctgtggccaacatttaggctgagtttc

SEQ ID NO: 521845 - DNA, 33 bp, Homo sapien
tacaaatacttcatcacatatactgttggtttt

SEQ ID NO: 521846 - DNA, 33 bp, Homo sapien
tacaaatacttcatcagatatactgttggtttt

SEQ ID NO: 521847 - DNA, 33 bp, Homo sapien
aactggctcacctcagcccgtggttttaggtca

SEQ ID NO: 521848 - DNA, 33 bp, Homo sapien
aactggctcacctcagtccgtggttttaggtca

SEQ ID NO: 521849 - DNA, 33 bp, Homo sapien
gactaagtcatataaaatgatttctgtcctcca

SEQ ID NO: 521850 - DNA, 33 bp, Homo sapien
gactaagtcatataaagtgatttctgtcctcca

SEQ ID NO: 521851 - DNA, 33 bp, Homo sapien
ctccaaaactgagagaaatggggagtgatggaa

SEQ ID NO: 521852 - DNA, 33 bp, Homo sapien
ctccaaaactgagagacatggggagtgatggaa

SEQ ID NO: 521853 - DNA, 33 bp, Homo sapien
gggcagagtatgtagacctgagtaggatttaaa

SEQ ID NO: 521854 - DNA, 33 bp, Homo sapien
gggcagagtatgtagagctgagtaggatttaaa

SEQ ID NO: 521855 - DNA, 33 bp, Homo sapien
aagagtaggcccttcacgtgcattctggattcc

SEQ ID NO: 521856 - DNA, 33 bp, Homo sapien
aagagtaggcccttcatgtgcattctggattcc

SEQ ID NO: 521857 - DNA, 33 bp, Homo sapien
ttcgttatttttggcagagttgtgatgattctt

SEQ ID NO: 521858 - DNA, 33 bp, Homo sapien
ttcgttatttttggcatagttgtgatgattctt

SEQ ID NO: 521859 - DNA, 33 bp, Homo sapien
tgtcttctgtgtgcaacaaatggggcaatactt

SEQ ID NO: 521860 - DNA, 33 bp, Homo sapien
tgtcttctgtgtgcaataaatggggcaatactt

SEQ ID NO: 521861 - DNA, 33 bp, Homo sapien
atattaagtaatttaacggccaatgccctcagt

SEQ ID NO: 521862 - DNA, 33 bp, Homo sapien
atattaagtaatttaatggccaatgccctcagt

SEQ ID NO: 521863 - DNA, 33 bp, Homo sapien
gttgtcattatcattgaaatatcccttaacata

SEQ ID NO: 521864 - DNA, 33 bp, Homo sapien
gttgtcattatcattgcaatatcccttaacata

SEQ ID NO: 521865 - DNA, 33 bp, Homo sapien
atatattctagaaaaacctttattcacaagaca

SEQ ID NO: 521866 - DNA, 33 bp, Homo sapien
atatattctagaaaaatctttattcacaagaca

SEQ ID NO: 521867 - DNA, 33 bp, Homo sapien
tcactttctatatagaccacctggtgtaggcaa

SEQ ID NO: 521868 - DNA, 33 bp, Homo sapien
tcactttctatatagatcacctggtgtaggcaa

SEQ ID NO: 521869 - DNA, 33 bp, Homo sapien
tgggtgggatatagataaaacatgagttgacaa

SEQ ID NO: 521870 - DNA, 33 bp, Homo sapien
tgggtgggatatagatgaaacatgagttgacaa

SEQ ID NO: 521871 - DNA, 33 bp, Homo sapien
tgacctgtggggcttacggctcttgtaggatta

SEQ ID NO: 521872 - DNA, 33 bp, Homo sapien
tgacctgtggggcttatggctcttgtaggatta

SEQ ID NO: 521873 - DNA, 33 bp, Homo sapien
gtgggttaatgctatgcacaggacctgatggct

SEQ ID NO: 521874 - DNA, 33 bp, Homo sapien
gtgggttaatgctatggacaggacctgatggct

SEQ ID NO: 521875 - DNA, 33 bp, Homo sapien
ggaatacagaagacaaccaagttagtggaaggg

SEQ ID NO: 521876 - DNA, 33 bp, Homo sapien
ggaatacagaagacaatcaagttagtggaaggg

SEQ ID NO: 521877 - DNA, 33 bp, Homo sapien
actccccaagctagatgagattgcatttccttc

SEQ ID NO: 521878 - DNA, 33 bp, Homo sapien
actccccaagctagattagattgcatttccttc

SEQ ID NO: 521879 - DNA, 33 bp, Homo sapien
gagatatgtactgggaaatcctgaccagataac

SEQ ID NO: 521880 - DNA, 33 bp, Homo sapien
gagatatgtactgggagatcctgaccagataac

SEQ ID NO: 521881 - DNA, 33 bp, Homo sapien
aacggaagctcaacaaacatttggattatgagt

SEQ ID NO: 521882 - DNA, 33 bp, Homo sapien
aacggaagctcaacaagcatttggattatgagt

SEQ ID NO: 521883 - DNA, 33 bp, Homo sapien
gagtattttctatgggaaagatgttggctccac

SEQ ID NO: 521884 - DNA, 33 bp, Homo sapien
gagtattttctatggggaagatgttggctccac

SEQ ID NO: 521885 - DNA, 33 bp, Homo sapien
gttaagttatattcaaaaagacatctagaagag

SEQ ID NO: 521886 - DNA, 33 bp, Homo sapien
gttaagttatattcaagaagacatctagaagag

SEQ ID NO: 521887 - DNA, 33 bp, Homo sapien
ctttattgtggtgttacgtatggaaatgggaag

SEQ ID NO: 521888 - DNA, 33 bp, Homo sapien
ctttattgtggtgttatgtatggaaatgggaag

SEQ ID NO: 521889 - DNA, 33 bp, Homo sapien
gccacaactttcaatcaacttgagagaggcccc

SEQ ID NO: 521890 - DNA, 33 bp, Homo sapien
gccacaactttcaatcgacttgagagaggcccc

SEQ ID NO: 521891 - DNA, 33 bp, Homo sapien
gaggcatttgcaaagcagagaaacatttaaaaa

SEQ ID NO: 521892 - DNA, 33 bp, Homo sapien
gaggcatttgcaaagcggagaaacatttaaaaa

SEQ ID NO: 521893 - DNA, 33 bp, Homo sapien
atttttttctcctttaccggcataactagtttt

SEQ ID NO: 521894 - DNA, 33 bp, Homo sapien
atttttttctcctttatcggcataactagtttt

SEQ ID NO: 521895 - DNA, 33 bp, Homo sapien
gaaggaaattttattacgctattgacctaggca

SEQ ID NO: 521896 - DNA, 33 bp, Homo sapien
gaaggaaattttattatgctattgacctaggca

SEQ ID NO: 521897 - DNA, 33 bp, Homo sapien
gatttaatgaaaattacggttacagtcttaaat

SEQ ID NO: 521898 - DNA, 33 bp, Homo sapien
gatttaatgaaaattatggttacagtcttaaat

SEQ ID NO: 521899 - DNA, 33 bp, Homo sapien
tgtgttatggaagaaactaatctacatggtcag

SEQ ID NO: 521900 - DNA, 33 bp, Homo sapien
tgtgttatggaagaaagtaatctacatggtcag

SEQ ID NO: 521901 - DNA, 33 bp, Homo sapien
ttccctggaggagatacccgaagcacatgaagc

SEQ ID NO: 521902 - DNA, 33 bp, Homo sapien
ttccctggaggagatatccgaagcacatgaagc

SEQ ID NO: 521903 - DNA, 33 bp, Homo sapien
gtattatatttcagaaaacgggaagaatgaccc

SEQ ID NO: 521904 - DNA, 33 bp, Homo sapien
gtattatatttcagaagacgggaagaatgaccc

SEQ ID NO: 521905 - DNA, 33 bp, Homo sapien
catgggttaaaaagaaagaacactgtcagactt

SEQ ID NO: 521906 - DNA, 33 bp, Homo sapien
catgggttaaaaagaaggaacactgtcagactt

SEQ ID NO: 521907 - DNA, 33 bp, Homo sapien
gagagaaaaacctcagaattaggtgaacacata

SEQ ID NO: 521908 - DNA, 33 bp, Homo sapien
gagagaaaaacctcaggattaggtgaacacata

SEQ ID NO: 521909 - DNA, 33 bp, Homo sapien
tctcttcccactctgcaacatataaacacacac

SEQ ID NO: 521910 - DNA, 33 bp, Homo sapien
tctcttcccactctgcgacatataaacacacac

SEQ ID NO: 521911 - DNA, 33 bp, Homo sapien
ggaagggaagggaatacccaacagaagtctgag

SEQ ID NO: 521912 - DNA, 33 bp, Homo sapien
ggaagggaagggaatatccaacagaagtctgag

SEQ ID NO: 521913 - DNA, 33 bp, Homo sapien
aaatatggataaaaacaagcatccctcaagagg

SEQ ID NO: 521914 - DNA, 33 bp, Homo sapien
aaatatggataaaaactagcatccctcaagagg

SEQ ID NO: 521915 - DNA, 33 bp, Homo sapien
acaaagttgagaagaccgaagtgacattagatc

SEQ ID NO: 521916 - DNA, 33 bp, Homo sapien
acaaagttgagaagacggaagtgacattagatc

SEQ ID NO: 521917 - DNA, 33 bp, Homo sapien
cccctggatgtgtaagactctttgctatgaata

SEQ ID NO: 521918 - DNA, 33 bp, Homo sapien
cccctggatgtgtaaggctctttgctatgaata

SEQ ID NO: 521919 - DNA, 33 bp, Homo sapien
ttttgatattccctgaccttcttgaatatatgg

SEQ ID NO: 521920 - DNA, 33 bp, Homo sapien
ttttgatattccctgagcttcttgaatatatgg

SEQ ID NO: 521921 - DNA, 33 bp, Homo sapien
cagataaatacacctaaaactggtaatcggcag

SEQ ID NO: 521922 - DNA, 33 bp, Homo sapien
cagataaatacacctagaactggtaatcggcag

SEQ ID NO: 521923 - DNA, 33 bp, Homo sapien
caagcaggactttaataatcagagcacggaatt

SEQ ID NO: 521924 - DNA, 33 bp, Homo sapien
caagcaggactttaattatcagagcacggaatt

SEQ ID NO: 521925 - DNA, 33 bp, Homo sapien
ttttctgcctcaatacaaagaacttagagatgg

SEQ ID NO: 521926 - DNA, 33 bp, Homo sapien
ttttctgcctcaataccaagaacttagagatgg

SEQ ID NO: 521927 - DNA, 33 bp, Homo sapien
agcaaatgctgacatacaagctggagcaagaga

SEQ ID NO: 521928 - DNA, 33 bp, Homo sapien
agcaaatgctgacatagaagctggagcaagaga

SEQ ID NO: 521929 - DNA, 33 bp, Homo sapien
taatgtagatggaacaactttatattggaaaaa

SEQ ID NO: 521930 - DNA, 33 bp, Homo sapien
taatgtagatggaacagctttatattggaaaaa

SEQ ID NO: 521931 - DNA, 33 bp, Homo sapien
gccatttgaaacagacacatagtatcactgaat

SEQ ID NO: 521932 - DNA, 33 bp, Homo sapien
gccatttgaaacagacccatagtatcactgaat

SEQ ID NO: 521933 - DNA, 33 bp, Homo sapien
cctattgtatcaactacgttatttcattgaacc

SEQ ID NO: 521934 - DNA, 33 bp, Homo sapien
cctattgtatcaactatgttatttcattgaacc

SEQ ID NO: 521935 - DNA, 33 bp, Homo sapien
ttctgtagccctgtgcacttctgtcaataggtt

SEQ ID NO: 521936 - DNA, 33 bp, Homo sapien
ttctgtagccctgtgcgcttctgtcaataggtt

SEQ ID NO: 521937 - DNA, 33 bp, Homo sapien
ccttttaatttatgtgcatcggtagtcttgact

SEQ ID NO: 521938 - DNA, 33 bp, Homo sapien
ccttttaatttatgtgtatcggtagtcttgact

SEQ ID NO: 521939 - DNA, 33 bp, Homo sapien
ctctccaaacatcatccaaaatatcaatctgat

SEQ ID NO: 521940 - DNA, 33 bp, Homo sapien
ctctccaaacatcatctaaaatatcaatctgat

SEQ ID NO: 521941 - DNA, 33 bp, Homo sapien
caaaagacaaccggtaaaattcccatcagacat

SEQ ID NO: 521942 - DNA, 33 bp, Homo sapien
caaaagacaaccggtataattcccatcagacat

SEQ ID NO: 521943 - DNA, 33 bp, Homo sapien
ctctaggatgattacacagggttgccagataac

SEQ ID NO: 521944 - DNA, 33 bp, Homo sapien
ctctaggatgattacagagggttgccagataac

SEQ ID NO: 521945 - DNA, 33 bp, Homo sapien
gcaactgcactgcaacaatttagtcctttagtg

SEQ ID NO: 521946 - DNA, 33 bp, Homo sapien
gcaactgcactgcaaccatttagtcctttagtg

SEQ ID NO: 521947 - DNA, 33 bp, Homo sapien
acttctcaggatttcgaagtgttttatttgtaa

SEQ ID NO: 521948 - DNA, 33 bp, Homo sapien
acttctcaggatttcgtagtgttttatttgtaa

SEQ ID NO: 521949 - DNA, 33 bp, Homo sapien
aagcagaggggaacgccgatgaacaaattatgt

SEQ ID NO: 521950 - DNA, 33 bp, Homo sapien
aagcagaggggaacgctgatgaacaaattatgt

SEQ ID NO: 521951 - DNA, 33 bp, Homo sapien
atcatattgtacaccagaagtatatatcatttc

SEQ ID NO: 521952 - DNA, 33 bp, Homo sapien
atcatattgtacaccataagtatatatcatttc

SEQ ID NO: 521953 - DNA, 33 bp, Homo sapien
atgttttgatataaacagacattgtggaatagc

SEQ ID NO: 521954 - DNA, 33 bp, Homo sapien
atgttttgatataaacggacattgtggaatagc

SEQ ID NO: 521955 - DNA, 33 bp, Homo sapien
taagaacactttggatcataatttctcaaagtt

SEQ ID NO: 521956 - DNA, 33 bp, Homo sapien
taagaacactttggatgataatttctcaaagtt

SEQ ID NO: 521957 - DNA, 33 bp, Homo sapien
gattaagaaggccaaactcttagtaactggatg

SEQ ID NO: 521958 - DNA, 33 bp, Homo sapien
gattaagaaggccaaattcttagtaactggatg

SEQ ID NO: 521959 - DNA, 33 bp, Homo sapien
aaaaatatgcgttttacaacatttactgagcac

SEQ ID NO: 521960 - DNA, 33 bp, Homo sapien
aaaaatatgcgttttataacatttactgagcac

SEQ ID NO: 521961 - DNA, 33 bp, Homo sapien
tataaggtaatacagtaaaaaattccagggatt

SEQ ID NO: 521962 - DNA, 33 bp, Homo sapien
tataaggtaatacagtcaaaaattccagggatt

SEQ ID NO: 521963 - DNA, 33 bp, Homo sapien
aaagtatccaaagatcaccaggtatttgaggaa

SEQ ID NO: 521964 - DNA, 33 bp, Homo sapien
aaagtatccaaagatccccaggtatttgaggaa

SEQ ID NO: 521965 - DNA, 33 bp, Homo sapien
ttatttaccttctgggaacattggctctgtata

SEQ ID NO: 521966 - DNA, 33 bp, Homo sapien
ttatttaccttctggggacattggctctgtata

SEQ ID NO: 521967 - DNA, 33 bp, Homo sapien
ttatttaagcgggtacaagttggcttccaaact

SEQ ID NO: 521968 - DNA, 33 bp, Homo sapien
ttatttaagcgggtaccagttggcttccaaact

SEQ ID NO: 521969 - DNA, 33 bp, Homo sapien
aagatactttgtccaaacctattatgagcccag

SEQ ID NO: 521970 - DNA, 33 bp, Homo sapien
aagatactttgtccaaccctattatgagcccag

SEQ ID NO: 521971 - DNA, 33 bp, Homo sapien
tgattgatttaaaaaaactgagatggagcctgg

SEQ ID NO: 521972 - DNA, 33 bp, Homo sapien
tgattgatttaaaaaacctgagatggagcctgg

SEQ ID NO: 521973 - DNA, 33 bp, Homo sapien
aatttttttagtttacactgatggcatctcagt

SEQ ID NO: 521974 - DNA, 33 bp, Homo sapien
aatttttttagtttaccctgatggcatctcagt

SEQ ID NO: 521975 - DNA, 33 bp, Homo sapien
gaccgaatagacactggataccaaccagcagtt

SEQ ID NO: 521976 - DNA, 33 bp, Homo sapien
gaccgaatagacactgtataccaaccagcagtt

SEQ ID NO: 521977 - DNA, 33 bp, Homo sapien
cttaactctgaaaatacactcctattctcaaat

SEQ ID NO: 521978 - DNA, 33 bp, Homo sapien
cttaactctgaaaatatactcctattctcaaat

SEQ ID NO: 521979 - DNA, 33 bp, Homo sapien
gagtacaaaaacaacaaaggtgaatggaaacac

SEQ ID NO: 521980 - DNA, 33 bp, Homo sapien
gagtacaaaaacaacataggtgaatggaaacac

SEQ ID NO: 521981 - DNA, 33 bp, Homo sapien
agtattgtaaaccatacgaatgtgctggtgtat

SEQ ID NO: 521982 - DNA, 33 bp, Homo sapien
agtattgtaaaccatatgaatgtgctggtgtat

SEQ ID NO: 521983 - DNA, 33 bp, Homo sapien
atgaaagctagaagtaagaagtgctgattgagt

SEQ ID NO: 521984 - DNA, 33 bp, Homo sapien
atgaaagctagaagtaggaagtgctgattgagt

SEQ ID NO: 521985 - DNA, 33 bp, Homo sapien
atatttcaccaagttacattaagttcactcaat

SEQ ID NO: 521986 - DNA, 33 bp, Homo sapien
atatttcaccaagttatattaagttcactcaat

SEQ ID NO: 521987 - DNA, 33 bp, Homo sapien
gttgttacaatattacaaagaatgttggtgtga

SEQ ID NO: 521988 - DNA, 33 bp, Homo sapien
gttgttacaatattacgaagaatgttggtgtga

SEQ ID NO: 521989 - DNA, 33 bp, Homo sapien
cctctccggataagaaatagttgtatgtcatgt

SEQ ID NO: 521990 - DNA, 33 bp, Homo sapien
cctctccggataagaagtagttgtatgtcatgt

SEQ ID NO: 521991 - DNA, 33 bp, Homo sapien
cagtcagaccatcagcgagattcaagacccacc

SEQ ID NO: 521992 - DNA, 33 bp, Homo sapien
cagtcagaccatcagctagattcaagacccacc

SEQ ID NO: 521993 - DNA, 33 bp, Homo sapien
gtcctctcttcctggacgggtaatcacgtttct

SEQ ID NO: 521994 - DNA, 33 bp, Homo sapien
gtcctctcttcctggatgggtaatcacgtttct

SEQ ID NO: 521995 - DNA, 33 bp, Homo sapien
atatttgccaagcaacaaccatgtaccaaatcc

SEQ ID NO: 521996 - DNA, 33 bp, Homo sapien
atatttgccaagcaacgaccatgtaccaaatcc

SEQ ID NO: 521997 - DNA, 33 bp, Homo sapien
tatcctttttggagtacggattctcagtgcctg

SEQ ID NO: 521998 - DNA, 33 bp, Homo sapien
tatcctttttggagtatggattctcagtgcctg

SEQ ID NO: 521999 - DNA, 33 bp, Homo sapien
aaatatacttgcctaggcacataaagtcagtaa

SEQ ID NO: 522000 - DNA, 33 bp, Homo sapien
aaatatacttgcctagtcacataaagtcagtaa

SEQ ID NO: 522001 - DNA, 33 bp, Homo sapien
tcttattgtccaaaaacataaactacatcaaat

SEQ ID NO: 522002 - DNA, 33 bp, Homo sapien
tcttattgtccaaaaatataaactacatcaaat

SEQ ID NO: 522003 - DNA, 33 bp, Homo sapien
gtaagcaaggaaataaagtaaaactgaaactta

SEQ ID NO: 522004 - DNA, 33 bp, Homo sapien
gtaagcaaggaaataatgtaaaactgaaactta

SEQ ID NO: 522005 - DNA, 33 bp, Homo sapien
gttggaagaatgattgaagaagagaggaaaaaa

SEQ ID NO: 522006 - DNA, 33 bp, Homo sapien
gttggaagaatgattgtagaagagaggaaaaaa

SEQ ID NO: 522007 - DNA, 33 bp, Homo sapien
aaagtcatcactgtaggctaaggtagttaggtc

SEQ ID NO: 522008 - DNA, 33 bp, Homo sapien
aaagtcatcactgtagtctaaggtagttaggtc

SEQ ID NO: 522009 - DNA, 33 bp, Homo sapien
tttagtatgaagaataaattgtagggaaggctg

SEQ ID NO: 522010 - DNA, 33 bp, Homo sapien
tttagtatgaagaatagattgtagggaaggctg

SEQ ID NO: 522011 - DNA, 33 bp, Homo sapien
acagttagtagagcaaaaatttcccaggccgag

SEQ ID NO: 522012 - DNA, 33 bp, Homo sapien
acagttagtagagcaagaatttcccaggccgag

SEQ ID NO: 522013 - DNA, 33 bp, Homo sapien
gcttgaaggaagaaaacgtatactctgggcaca

SEQ ID NO: 522014 - DNA, 33 bp, Homo sapien
gcttgaaggaagaaaaggtatactctgggcaca

SEQ ID NO: 522015 - DNA, 33 bp, Homo sapien
tagggaatgccacttacctgatgcttgaaggaa

SEQ ID NO: 522016 - DNA, 33 bp, Homo sapien
tagggaatgccacttatctgatgcttgaaggaa

SEQ ID NO: 522017 - DNA, 33 bp, Homo sapien
tttgagaaaagagagaaaatagcatgaatgttt

SEQ ID NO: 522018 - DNA, 33 bp, Homo sapien
tttgagaaaagagagagaatagcatgaatgttt

SEQ ID NO: 522019 - DNA, 33 bp, Homo sapien
atagttacgcaaaacacggctccggaggtaaaa

SEQ ID NO: 522020 - DNA, 33 bp, Homo sapien
atagttacgcaaaacatggctccggaggtaaaa

SEQ ID NO: 522021 - DNA, 33 bp, Homo sapien
ctccctaagttagactcagagcttgggagggtg

SEQ ID NO: 522022 - DNA, 33 bp, Homo sapien
ctccctaagttagactgagagcttgggagggtg

SEQ ID NO: 522023 - DNA, 33 bp, Homo sapien
attgaacattaaagcactgaagcataatttttt

SEQ ID NO: 522024 - DNA, 33 bp, Homo sapien
attgaacattaaagcattgaagcataatttttt

SEQ ID NO: 522025 - DNA, 33 bp, Homo sapien
attaattcccattataagccacaattttgctca

SEQ ID NO: 522026 - DNA, 33 bp, Homo sapien
attaattcccattatacgccacaattttgctca

SEQ ID NO: 522027 - DNA, 33 bp, Homo sapien
aaagtttcctgccttcaactgaaagaatttttc

SEQ ID NO: 522028 - DNA, 33 bp, Homo sapien
aaagtttcctgccttccactgaaagaatttttc

SEQ ID NO: 522029 - DNA, 33 bp, Homo sapien
agactggtgtatctgaaaaaacataatttatgc

SEQ ID NO: 522030 - DNA, 33 bp, Homo sapien
agactggtgtatctgagaaaacataatttatgc

SEQ ID NO: 522031 - DNA, 33 bp, Homo sapien
gctaaaaaagacactaacaaatggcaggcagaa

SEQ ID NO: 522032 - DNA, 33 bp, Homo sapien
gctaaaaaagacactaccaaatggcaggcagaa

SEQ ID NO: 522033 - DNA, 33 bp, Homo sapien
tccatatggacataatcactggagcaaaagaag

SEQ ID NO: 522034 - DNA, 33 bp, Homo sapien
tccatatggacataatgactggagcaaaagaag

SEQ ID NO: 522035 - DNA, 33 bp, Homo sapien
atatcttgactagccaactttacattgtaagta

SEQ ID NO: 522036 - DNA, 33 bp, Homo sapien
atatcttgactagccatctttacattgtaagta

SEQ ID NO: 522037 - DNA, 33 bp, Homo sapien
tttttctgacaaaggacgtttgtatctaagtgt

SEQ ID NO: 522038 - DNA, 33 bp, Homo sapien
tttttctgacaaaggatgtttgtatctaagtgt

SEQ ID NO: 522039 - DNA, 33 bp, Homo sapien
ggtgataactttgagtaacagcatttcataaat

SEQ ID NO: 522040 - DNA, 33 bp, Homo sapien
ggtgataactttgagtcacagcatttcataaat

SEQ ID NO: 522041 - DNA, 33 bp, Homo sapien
ttggcgagaccataaactaaatacgcaaatcat

SEQ ID NO: 522042 - DNA, 33 bp, Homo sapien
ttggcgagaccataaattaaatacgcaaatcat

SEQ ID NO: 522043 - DNA, 33 bp, Homo sapien
aagagaaacttttgagacaatttactgagctat

SEQ ID NO: 522044 - DNA, 33 bp, Homo sapien
aagagaaacttttgaggcaatttactgagctat

SEQ ID NO: 522045 - DNA, 33 bp, Homo sapien
actgaagttgagaaaaattaggtgctaaagcag

SEQ ID NO: 522046 - DNA, 33 bp, Homo sapien
actgaagttgagaaaacttaggtgctaaagcag

SEQ ID NO: 522047 - DNA, 33 bp, Homo sapien
acagcaagatctgtctaacatcaggaacttata

SEQ ID NO: 522048 - DNA, 33 bp, Homo sapien
acagcaagatctgtctgacatcaggaacttata

SEQ ID NO: 522049 - DNA, 33 bp, Homo sapien
tgcccgctttgttatgcaaactgtgaatggtat

SEQ ID NO: 522050 - DNA, 33 bp, Homo sapien
tgcccgctttgttatgtaaactgtgaatggtat

SEQ ID NO: 522051 - DNA, 33 bp, Homo sapien
gactcacagctaagtgaagtatttttcaaactt

SEQ ID NO: 522052 - DNA, 33 bp, Homo sapien
gactcacagctaagtgcagtatttttcaaactt

SEQ ID NO: 522053 - DNA, 33 bp, Homo sapien
caaccatcaattatagcatgaattactgtatca

SEQ ID NO: 522054 - DNA, 33 bp, Homo sapien
caaccatcaattataggatgaattactgtatca

SEQ ID NO: 522055 - DNA, 33 bp, Homo sapien
tggtcactttttattacgttatgctgtgttatt

SEQ ID NO: 522056 - DNA, 33 bp, Homo sapien
tggtcactttttattatgttatgctgtgttatt

SEQ ID NO: 522057 - DNA, 33 bp, Homo sapien
gcatagctggaggtgacgatataatctaccagg

SEQ ID NO: 522058 - DNA, 33 bp, Homo sapien
gcatagctggaggtgatgatataatctaccagg

SEQ ID NO: 522059 - DNA, 33 bp, Homo sapien
atgtttgcttcattcaaagtaaatagtaaaccc

SEQ ID NO: 522060 - DNA, 33 bp, Homo sapien
atgtttgcttcattcacagtaaatagtaaaccc

SEQ ID NO: 522061 - DNA, 33 bp, Homo sapien
gcctggaaagttcctacgtaattgtctaactct

SEQ ID NO: 522062 - DNA, 33 bp, Homo sapien
gcctggaaagttcctatgtaattgtctaactct

SEQ ID NO: 522063 - DNA, 33 bp, Homo sapien
agttcttacagaaatacgcacaagaaatttact

SEQ ID NO: 522064 - DNA, 33 bp, Homo sapien
agttcttacagaaatatgcacaagaaatttact

SEQ ID NO: 522065 - DNA, 33 bp, Homo sapien
tattttattccagctacatgctacaataggagt

SEQ ID NO: 522066 - DNA, 33 bp, Homo sapien
tattttattccagctatatgctacaataggagt

SEQ ID NO: 522067 - DNA, 33 bp, Homo sapien
aaagatcagacagttagaagtgtgcggtcttat

SEQ ID NO: 522068 - DNA, 33 bp, Homo sapien
aaagatcagacagttataagtgtgcggtcttat

SEQ ID NO: 522069 - DNA, 33 bp, Homo sapien
aaggaaaaacattaagcatgatcgctgacttca

SEQ ID NO: 522070 - DNA, 33 bp, Homo sapien
aaggaaaaacattaagtatgatcgctgacttca

SEQ ID NO: 522071 - DNA, 33 bp, Homo sapien
attttcatgacttttaagaacagacacaactaa

SEQ ID NO: 522072 - DNA, 33 bp, Homo sapien
attttcatgacttttaggaacagacacaactaa

SEQ ID NO: 522073 - DNA, 33 bp, Homo sapien
tacttctctctcaatgcacaaatgcacctcagt

SEQ ID NO: 522074 - DNA, 33 bp, Homo sapien
tacttctctctcaatgtacaaatgcacctcagt

SEQ ID NO: 522075 - DNA, 33 bp, Homo sapien
tctgcaccaaatcaacaactgctgttaaatcta

SEQ ID NO: 522076 - DNA, 33 bp, Homo sapien
tctgcaccaaatcaacgactgctgttaaatcta

SEQ ID NO: 522077 - DNA, 33 bp, Homo sapien
ttatcaaaattactaacctcaggatgctgaaat

SEQ ID NO: 522078 - DNA, 33 bp, Homo sapien
ttatcaaaattactaagctcaggatgctgaaat

SEQ ID NO: 522079 - DNA, 33 bp, Homo sapien
acatctaatagcataactgtcacattgaaataa

SEQ ID NO: 522080 - DNA, 33 bp, Homo sapien
acatctaatagcataagtgtcacattgaaataa

SEQ ID NO: 522081 - DNA, 33 bp, Homo sapien
cttttccatcaacctccgacattctatgcagaa

SEQ ID NO: 522082 - DNA, 33 bp, Homo sapien
cttttccatcaacctctgacattctatgcagaa

SEQ ID NO: 522083 - DNA, 33 bp, Homo sapien
aaattacattcccaacaatagtctagtagggtt

SEQ ID NO: 522084 - DNA, 33 bp, Homo sapien
aaattacattcccaacgatagtctagtagggtt

SEQ ID NO: 522085 - DNA, 33 bp, Homo sapien
caaggcatatgataatcaaactatccaaagtca

SEQ ID NO: 522086 - DNA, 33 bp, Homo sapien
caaggcatatgataatgaaactatccaaagtca

SEQ ID NO: 522087 - DNA, 33 bp, Homo sapien
tatgttgaagacctaactcctagtacctcagaa

SEQ ID NO: 522088 - DNA, 33 bp, Homo sapien
tatgttgaagacctaattcctagtacctcagaa

SEQ ID NO: 522089 - DNA, 33 bp, Homo sapien
aatgcatagcttaacaaaaaatgtagaaaaacc

SEQ ID NO: 522090 - DNA, 33 bp, Homo sapien
aatgcatagcttaacacaaaatgtagaaaaacc

SEQ ID NO: 522091 - DNA, 33 bp, Homo sapien
gagagaacagagacaaagagcaatatgaaataa

SEQ ID NO: 522092 - DNA, 33 bp, Homo sapien
gagagaacagagacaaggagcaatatgaaataa

SEQ ID NO: 522093 - DNA, 33 bp, Homo sapien
ctgacctggactaagaacactctacagggtgca

SEQ ID NO: 522094 - DNA, 33 bp, Homo sapien
ctgacctggactaagagcactctacagggtgca

SEQ ID NO: 522095 - DNA, 33 bp, Homo sapien
gtaccagcctctcatcacaaggggaggtttcta

SEQ ID NO: 522096 - DNA, 33 bp, Homo sapien
gtaccagcctctcatcgcaaggggaggtttcta

SEQ ID NO: 522097 - DNA, 33 bp, Homo sapien
agtagaacgaaccaaaccaaatatcctaaaatg

SEQ ID NO: 522098 - DNA, 33 bp, Homo sapien
agtagaacgaaccaaatcaaatatcctaaaatg

SEQ ID NO: 522099 - DNA, 33 bp, Homo sapien
ttatactactgggtgaataaataacagaggaga

SEQ ID NO: 522100 - DNA, 33 bp, Homo sapien
ttatactactgggtgactaaataacagaggaga

SEQ ID NO: 522101 - DNA, 33 bp, Homo sapien
aaaattccatatcctagagcaaggaagggatga

SEQ ID NO: 522102 - DNA, 33 bp, Homo sapien
aaaattccatatcctatagcaaggaagggatga

SEQ ID NO: 522103 - DNA, 33 bp, Homo sapien
ttttgacagttaaagaagtctcaacatgacatg

SEQ ID NO: 522104 - DNA, 33 bp, Homo sapien
ttttgacagttaaagatgtctcaacatgacatg

SEQ ID NO: 522105 - DNA, 33 bp, Homo sapien
ctatagaacttataaccacaatcacagtacata

SEQ ID NO: 522106 - DNA, 33 bp, Homo sapien
ctatagaacttataacgacaatcacagtacata

SEQ ID NO: 522107 - DNA, 33 bp, Homo sapien
caaaacaaaatgtaaacactgagacttcctttg

SEQ ID NO: 522108 - DNA, 33 bp, Homo sapien
caaaacaaaatgtaaagactgagacttcctttg

SEQ ID NO: 522109 - DNA, 33 bp, Homo sapien
tgaagctgtctgtaccaagaacatagtccatgc

SEQ ID NO: 522110 - DNA, 33 bp, Homo sapien
tgaagctgtctgtacctagaacatagtccatgc

SEQ ID NO: 522111 - DNA, 33 bp, Homo sapien
gtacatggaacctaagcagattatttaggagct

SEQ ID NO: 522112 - DNA, 33 bp, Homo sapien
gtacatggaacctaaggagattatttaggagct

SEQ ID NO: 522113 - DNA, 33 bp, Homo sapien
ggtttttatatggcataaggttaagtactagct

SEQ ID NO: 522114 - DNA, 33 bp, Homo sapien
ggtttttatatggcatcaggttaagtactagct

SEQ ID NO: 522115 - DNA, 33 bp, Homo sapien
tgagctaagcactgcaataggttttgaagacaa

SEQ ID NO: 522116 - DNA, 33 bp, Homo sapien
tgagctaagcactgcagtaggttttgaagacaa

SEQ ID NO: 522117 - DNA, 33 bp, Homo sapien
aactgacacccgaaggaccaaaactagccaaga

SEQ ID NO: 522118 - DNA, 33 bp, Homo sapien
aactgacacccgaagggccaaaactagccaaga

SEQ ID NO: 522119 - DNA, 33 bp, Homo sapien
atggtagtttaaggcacgcatacctcagtcccc

SEQ ID NO: 522120 - DNA, 33 bp, Homo sapien
atggtagtttaaggcaggcatacctcagtcccc

SEQ ID NO: 522121 - DNA, 33 bp, Homo sapien
atcccggaaggtgagaagtccaaaagtaaataa

SEQ ID NO: 522122 - DNA, 33 bp, Homo sapien
atcccggaaggtgagaggtccaaaagtaaataa

SEQ ID NO: 522123 - DNA, 33 bp, Homo sapien
caagcaataacatgaaatacaaagaagcagaag

SEQ ID NO: 522124 - DNA, 33 bp, Homo sapien
caagcaataacatgaactacaaagaagcagaag

SEQ ID NO: 522125 - DNA, 33 bp, Homo sapien
atatgaagcagtagggaaatccataaattattt

SEQ ID NO: 522126 - DNA, 33 bp, Homo sapien
atatgaagcagtaggggaatccataaattattt

SEQ ID NO: 522127 - DNA, 33 bp, Homo sapien
ttacttcttatctcacccctttcctaaaatccc

SEQ ID NO: 522128 - DNA, 33 bp, Homo sapien
ttacttcttatctcacgcctttcctaaaatccc

SEQ ID NO: 522129 - DNA, 33 bp, Homo sapien
tttcttatcaagtgaggagaatatgttttgagc

SEQ ID NO: 522130 - DNA, 33 bp, Homo sapien
tttcttatcaagtgagtagaatatgttttgagc

SEQ ID NO: 522131 - DNA, 33 bp, Homo sapien
aattgcttgaatcacacggcaaaagttctaata

SEQ ID NO: 522132 - DNA, 33 bp, Homo sapien
aattgcttgaatcacatggcaaaagttctaata

SEQ ID NO: 522133 - DNA, 33 bp, Homo sapien
taattcactaaataccaatgcacttttatttgg

SEQ ID NO: 522134 - DNA, 33 bp, Homo sapien
taattcactaaataccgatgcacttttatttgg

SEQ ID NO: 522135 - DNA, 33 bp, Homo sapien
aacaacaccttgattaactccatttcaagggga

SEQ ID NO: 522136 - DNA, 33 bp, Homo sapien
aacaacaccttgattagctccatttcaagggga

SEQ ID NO: 522137 - DNA, 33 bp, Homo sapien
atctacaaatagcaaagagatgtagacatacat

SEQ ID NO: 522138 - DNA, 33 bp, Homo sapien
atctacaaatagcaaatagatgtagacatacat

SEQ ID NO: 522139 - DNA, 33 bp, Homo sapien
ttgagaagaaaaaaaaagtcacatggaagacat

SEQ ID NO: 522140 - DNA, 33 bp, Homo sapien
ttgagaagaaaaaaaatgtcacatggaagacat

SEQ ID NO: 522141 - DNA, 33 bp, Homo sapien
cctaaggaaacaatcacgctgtggcagaagata

SEQ ID NO: 522142 - DNA, 33 bp, Homo sapien
cctaaggaaacaatcatgctgtggcagaagata

SEQ ID NO: 522143 - DNA, 33 bp, Homo sapien
aagtccttcggcacaactggaagctggagaata

SEQ ID NO: 522144 - DNA, 33 bp, Homo sapien
aagtccttcggcacaattggaagctggagaata

SEQ ID NO: 522145 - DNA, 33 bp, Homo sapien
gaggcatcatttaagcaaattgtcccaggtcac

SEQ ID NO: 522146 - DNA, 33 bp, Homo sapien
gaggcatcatttaagccaattgtcccaggtcac

SEQ ID NO: 522147 - DNA, 33 bp, Homo sapien
acgaggcttagtattccagtgacaaaataatct

SEQ ID NO: 522148 - DNA, 33 bp, Homo sapien
acgaggcttagtattcgagtgacaaaataatct

SEQ ID NO: 522149 - DNA, 33 bp, Homo sapien
atgtttgattcagccaagtttaaaataattaat

SEQ ID NO: 522150 - DNA, 33 bp, Homo sapien
atgtttgattcagccatgtttaaaataattaat

SEQ ID NO: 522151 - DNA, 33 bp, Homo sapien
cacaaatgagattgggcaatgctatcaagggag

SEQ ID NO: 522152 - DNA, 33 bp, Homo sapien
cacaaatgagattgggtaatgctatcaagggag

SEQ ID NO: 522153 - DNA, 33 bp, Homo sapien
ggatgcatagtttgcacatacgttcttcctttc

SEQ ID NO: 522154 - DNA, 33 bp, Homo sapien
ggatgcatagtttgcagatacgttcttcctttc

SEQ ID NO: 522155 - DNA, 33 bp, Homo sapien
ttgggctatatgtttgcatatgggctgagtgag

SEQ ID NO: 522156 - DNA, 33 bp, Homo sapien
ttgggctatatgtttgtatatgggctgagtgag

SEQ ID NO: 522157 - DNA, 33 bp, Homo sapien
taatatcatcccctaacaagtacttatgttgcc

SEQ ID NO: 522158 - DNA, 33 bp, Homo sapien
taatatcatcccctaagaagtacttatgttgcc

SEQ ID NO: 522159 - DNA, 33 bp, Homo sapien
attaaagtgcactaaaaatatttctgactccta

SEQ ID NO: 522160 - DNA, 33 bp, Homo sapien
attaaagtgcactaaagatatttctgactccta

SEQ ID NO: 522161 - DNA, 33 bp, Homo sapien
caggctttttagaaaacggtctctatatctgaa

SEQ ID NO: 522162 - DNA, 33 bp, Homo sapien
caggctttttagaaaatggtctctatatctgaa

SEQ ID NO: 522163 - DNA, 33 bp, Homo sapien
ttcttctactagcccccacaaactgtcttactc

SEQ ID NO: 522164 - DNA, 33 bp, Homo sapien
ttcttctactagccccgacaaactgtcttactc

SEQ ID NO: 522165 - DNA, 33 bp, Homo sapien
tcttggggttagagtacgggtgttgtaggcaat

SEQ ID NO: 522166 - DNA, 33 bp, Homo sapien
tcttggggttagagtaggggtgttgtaggcaat

SEQ ID NO: 522167 - DNA, 33 bp, Homo sapien
taagtggtagctctaacaatggtgaatatgttt

SEQ ID NO: 522168 - DNA, 33 bp, Homo sapien
taagtggtagctctaataatggtgaatatgttt

SEQ ID NO: 522169 - DNA, 33 bp, Homo sapien
ctcatcccaatacctacagaagtgactagcaca

SEQ ID NO: 522170 - DNA, 33 bp, Homo sapien
ctcatcccaatacctagagaagtgactagcaca

SEQ ID NO: 522171 - DNA, 33 bp, Homo sapien
ttctgtcactaggtcccaggaaattggagtcat

SEQ ID NO: 522172 - DNA, 33 bp, Homo sapien
ttctgtcactaggtcctaggaaattggagtcat

SEQ ID NO: 522173 - DNA, 33 bp, Homo sapien
tatgtatccaattgccaactcaaaactcttaca

SEQ ID NO: 522174 - DNA, 33 bp, Homo sapien
tatgtatccaattgccgactcaaaactcttaca

SEQ ID NO: 522175 - DNA, 33 bp, Homo sapien
gcatataaagtaaatacgaggtactgatttgaa

SEQ ID NO: 522176 - DNA, 33 bp, Homo sapien
gcatataaagtaaatatgaggtactgatttgaa

SEQ ID NO: 522177 - DNA, 33 bp, Homo sapien
tcttgtaaagtggccaaagagtgttctaatgat

SEQ ID NO: 522178 - DNA, 33 bp, Homo sapien
tcttgtaaagtggccatagagtgttctaatgat

SEQ ID NO: 522179 - DNA, 33 bp, Homo sapien
attactggttgtgtcaccatcaagaaattgttt

SEQ ID NO: 522180 - DNA, 33 bp, Homo sapien
attactggttgtgtcatcatcaagaaattgttt

SEQ ID NO: 522181 - DNA, 33 bp, Homo sapien
tttgctattgccttagaaaaaatgcttctagat

SEQ ID NO: 522182 - DNA, 33 bp, Homo sapien
tttgctattgccttaggaaaaatgcttctagat

SEQ ID NO: 522183 - DNA, 33 bp, Homo sapien
ctttacacaatgctaaacaaacaaatacacata

SEQ ID NO: 522184 - DNA, 33 bp, Homo sapien
ctttacacaatgctaagcaaacaaatacacata

SEQ ID NO: 522185 - DNA, 33 bp, Homo sapien
ggagattacagctttacagtgagaaagactagt

SEQ ID NO: 522186 - DNA, 33 bp, Homo sapien
ggagattacagctttatagtgagaaagactagt

SEQ ID NO: 522187 - DNA, 33 bp, Homo sapien
ctcaatatagccataacttaatctctctcctct

SEQ ID NO: 522188 - DNA, 33 bp, Homo sapien
ctcaatatagccataagttaatctctctcctct

SEQ ID NO: 522189 - DNA, 33 bp, Homo sapien
tgtgagaacacagagaaaaagtgaccactgcaa

SEQ ID NO: 522190 - DNA, 33 bp, Homo sapien
tgtgagaacacagagagaaagtgaccactgcaa

SEQ ID NO: 522191 - DNA, 33 bp, Homo sapien
gaaaacaactctcaaccccgaattttataacca

SEQ ID NO: 522192 - DNA, 33 bp, Homo sapien
gaaaacaactctcaactccgaattttataacca

SEQ ID NO: 522193 - DNA, 33 bp, Homo sapien
aatagatattgggtgcgaaagatacagtcacag

SEQ ID NO: 522194 - DNA, 33 bp, Homo sapien
aatagatattgggtgctaaagatacagtcacag

SEQ ID NO: 522195 - DNA, 33 bp, Homo sapien
tttatattttcttttacggatgatgactttggt

SEQ ID NO: 522196 - DNA, 33 bp, Homo sapien
tttatattttcttttatggatgatgactttggt

SEQ ID NO: 522197 - DNA, 33 bp, Homo sapien
cccagcttctaacaaccgtaattctactctcta

SEQ ID NO: 522198 - DNA, 33 bp, Homo sapien
cccagcttctaacaactgtaattctactctcta

SEQ ID NO: 522199 - DNA, 33 bp, Homo sapien
taaaacatagaatgtacggagatgagttatgta

SEQ ID NO: 522200 - DNA, 33 bp, Homo sapien
taaaacatagaatgtatggagatgagttatgta

SEQ ID NO: 522201 - DNA, 33 bp, Homo sapien
ctaatgagaatgaatcgaaatctgtggcgagaa

SEQ ID NO: 522202 - DNA, 33 bp, Homo sapien
ctaatgagaatgaatctaaatctgtggcgagaa

SEQ ID NO: 522203 - DNA, 33 bp, Homo sapien
cttcttactgtacttaaagtttttgacagtaga

SEQ ID NO: 522204 - DNA, 33 bp, Homo sapien
cttcttactgtacttagagtttttgacagtaga

SEQ ID NO: 522205 - DNA, 33 bp, Homo sapien
acgatcaaggagctagaaattcaattcctagtg

SEQ ID NO: 522206 - DNA, 33 bp, Homo sapien
acgatcaaggagctagcaattcaattcctagtg

SEQ ID NO: 522207 - DNA, 33 bp, Homo sapien
gatgtgatccttgtgcaaatcccatagtcattt

SEQ ID NO: 522208 - DNA, 33 bp, Homo sapien
gatgtgatccttgtgccaatcccatagtcattt

SEQ ID NO: 522209 - DNA, 33 bp, Homo sapien
gggtttaagggatacaacacaatttgagaatcg

SEQ ID NO: 522210 - DNA, 33 bp, Homo sapien
gggtttaagggatacatcacaatttgagaatcg

SEQ ID NO: 522211 - DNA, 33 bp, Homo sapien
taattccttcacaacacgattaaaactagaact

SEQ ID NO: 522212 - DNA, 33 bp, Homo sapien
taattccttcacaacatgattaaaactagaact

SEQ ID NO: 522213 - DNA, 33 bp, Homo sapien
tattatgcaagtagtcacttaattgagcctttc

SEQ ID NO: 522214 - DNA, 33 bp, Homo sapien
tattatgcaagtagtctcttaattgagcctttc

SEQ ID NO: 522215 - DNA, 33 bp, Homo sapien
cactccccttgtgtccgcttaacaaacaatcac

SEQ ID NO: 522216 - DNA, 33 bp, Homo sapien
cactccccttgtgtcctcttaacaaacaatcac

SEQ ID NO: 522217 - DNA, 33 bp, Homo sapien
tttataccatagcgcaatatattcccccatact

SEQ ID NO: 522218 - DNA, 33 bp, Homo sapien
tttataccatagcgcactatattcccccatact

SEQ ID NO: 522219 - DNA, 33 bp, Homo sapien
cagttattttaaagtaaggatgagaccgaatga

SEQ ID NO: 522220 - DNA, 33 bp, Homo sapien
cagttattttaaagtagggatgagaccgaatga

SEQ ID NO: 522221 - DNA, 33 bp, Homo sapien
aacatagtaagcactcaataacacttcattgaa

SEQ ID NO: 522222 - DNA, 33 bp, Homo sapien
aacatagtaagcactcgataacacttcattgaa

SEQ ID NO: 522223 - DNA, 33 bp, Homo sapien
tgtgccaaatctgaatcatcactcagctggtaa

SEQ ID NO: 522224 - DNA, 33 bp, Homo sapien
tgtgccaaatctgaattatcactcagctggtaa

SEQ ID NO: 522225 - DNA, 33 bp, Homo sapien
cgtatctgatggaggagaacttgtatctgatct

SEQ ID NO: 522226 - DNA, 33 bp, Homo sapien
cgtatctgatggaggataacttgtatctgatct

SEQ ID NO: 522227 - DNA, 33 bp, Homo sapien
caggtagtgtgagtctcactttttttctttaat

SEQ ID NO: 522228 - DNA, 33 bp, Homo sapien
caggtagtgtgagtcttactttttttctttaat

SEQ ID NO: 522229 - DNA, 33 bp, Homo sapien
attttctatctgcggaataactcacaatgaata

SEQ ID NO: 522230 - DNA, 33 bp, Homo sapien
attttctatctgcggagtaactcacaatgaata

SEQ ID NO: 522231 - DNA, 33 bp, Homo sapien
aattgaaaattaaccaagctgtattagaattat

SEQ ID NO: 522232 - DNA, 33 bp, Homo sapien
aattgaaaattaaccatgctgtattagaattat

SEQ ID NO: 522233 - DNA, 33 bp, Homo sapien
tgtaattgaggtagtcagaatttaatgatagct

SEQ ID NO: 522234 - DNA, 33 bp, Homo sapien
tgtaattgaggtagtcggaatttaatgatagct

SEQ ID NO: 522235 - DNA, 33 bp, Homo sapien
agaccaatgactcccacctgatttctttcagtc

SEQ ID NO: 522236 - DNA, 33 bp, Homo sapien
agaccaatgactcccatctgatttctttcagtc

SEQ ID NO: 522237 - DNA, 33 bp, Homo sapien
aagaagccattggaaagatagcagtactgatat

SEQ ID NO: 522238 - DNA, 33 bp, Homo sapien
aagaagccattggaaatatagcagtactgatat

SEQ ID NO: 522239 - DNA, 33 bp, Homo sapien
acccaagacttctgcactgaaagcttctccagc

SEQ ID NO: 522240 - DNA, 33 bp, Homo sapien
acccaagacttctgcattgaaagcttctccagc

SEQ ID NO: 522241 - DNA, 33 bp, Homo sapien
atttgtctgctttggaacactctgaagtccctg

SEQ ID NO: 522242 - DNA, 33 bp, Homo sapien
atttgtctgctttggatcactctgaagtccctg

SEQ ID NO: 522243 - DNA, 33 bp, Homo sapien
attcatatttgaggctcaaacttaaggtcaagt

SEQ ID NO: 522244 - DNA, 33 bp, Homo sapien
attcatatttgaggctgaaacttaaggtcaagt

SEQ ID NO: 522245 - DNA, 33 bp, Homo sapien
agataattccaatgtcaagccaagattaagagc

SEQ ID NO: 522246 - DNA, 33 bp, Homo sapien
agataattccaatgtccagccaagattaagagc

SEQ ID NO: 522247 - DNA, 33 bp, Homo sapien
gaaacataagagcacacctataagaatatgttt

SEQ ID NO: 522248 - DNA, 33 bp, Homo sapien
gaaacataagagcacagctataagaatatgttt

SEQ ID NO: 522249 - DNA, 33 bp, Homo sapien
tatatcctgtatttcacgctgtgataatcaccc

SEQ ID NO: 522250 - DNA, 33 bp, Homo sapien
tatatcctgtatttcatgctgtgataatcaccc

SEQ ID NO: 522251 - DNA, 33 bp, Homo sapien
ttaccaacttctggtgaaaaactccagcatttt

SEQ ID NO: 522252 - DNA, 33 bp, Homo sapien
ttaccaacttctggtggaaaactccagcatttt

SEQ ID NO: 522253 - DNA, 33 bp, Homo sapien
tgaacttcagagaagacgattgactttctttcc

SEQ ID NO: 522254 - DNA, 33 bp, Homo sapien
tgaacttcagagaagaggattgactttctttcc

SEQ ID NO: 522255 - DNA, 33 bp, Homo sapien
ttagagagacataagacacatcagtgaactcat

SEQ ID NO: 522256 - DNA, 33 bp, Homo sapien
ttagagagacataagagacatcagtgaactcat

SEQ ID NO: 522257 - DNA, 33 bp, Homo sapien
tcatcataccacaatccctcattgatactatgg

SEQ ID NO: 522258 - DNA, 33 bp, Homo sapien
tcatcataccacaatctctcattgatactatgg

SEQ ID NO: 522259 - DNA, 33 bp, Homo sapien
atataaatgactgctactaagtgtcagagtgat

SEQ ID NO: 522260 - DNA, 33 bp, Homo sapien
atataaatgactgctattaagtgtcagagtgat

SEQ ID NO: 522261 - DNA, 33 bp, Homo sapien
aatctgcaatgtgtaaacacctacaccaataac

SEQ ID NO: 522262 - DNA, 33 bp, Homo sapien
aatctgcaatgtgtaaccacctacaccaataac

SEQ ID NO: 522263 - DNA, 33 bp, Homo sapien
gaattgatttttagtgaagtaagctacaaattg

SEQ ID NO: 522264 - DNA, 33 bp, Homo sapien
gaattgatttttagtgcagtaagctacaaattg

SEQ ID NO: 522265 - DNA, 33 bp, Homo sapien
tcattgaaagcagctacgggaatatagggatca

SEQ ID NO: 522266 - DNA, 33 bp, Homo sapien
tcattgaaagcagctatgggaatatagggatca

SEQ ID NO: 522267 - DNA, 33 bp, Homo sapien
actctggccttttaaactgggacatggcactag

SEQ ID NO: 522268 - DNA, 33 bp, Homo sapien
actctggccttttaaattgggacatggcactag

SEQ ID NO: 522269 - DNA, 33 bp, Homo sapien
gtgttaaattagggtaactacaaggaaagtagg

SEQ ID NO: 522270 - DNA, 33 bp, Homo sapien
gtgttaaattagggtagctacaaggaaagtagg

SEQ ID NO: 522271 - DNA, 33 bp, Homo sapien
acattgatatgataaaatgcagtttaaagaatt

SEQ ID NO: 522272 - DNA, 33 bp, Homo sapien
acattgatatgataaagtgcagtttaaagaatt

SEQ ID NO: 522273 - DNA, 33 bp, Homo sapien
tccttattgagtttatcacacatatgtttgctt

SEQ ID NO: 522274 - DNA, 33 bp, Homo sapien
tccttattgagtttatgacacatatgtttgctt

SEQ ID NO: 522275 - DNA, 33 bp, Homo sapien
tttttgagataaaagaaaaggtcataagggtat

SEQ ID NO: 522276 - DNA, 33 bp, Homo sapien
tttttgagataaaagacaaggtcataagggtat

SEQ ID NO: 522277 - DNA, 33 bp, Homo sapien
gacagattttctcaaaatgatggcttattttgc

SEQ ID NO: 522278 - DNA, 33 bp, Homo sapien
gacagattttctcaaattgatggcttattttgc

SEQ ID NO: 522279 - DNA, 33 bp, Homo sapien
ttgagacaacaaggacagaaattcttaggagca

SEQ ID NO: 522280 - DNA, 33 bp, Homo sapien
ttgagacaacaaggacggaaattcttaggagca

SEQ ID NO: 522281 - DNA, 33 bp, Homo sapien
tcttttagtatgtggacgagcatggcaatttac

SEQ ID NO: 522282 - DNA, 33 bp, Homo sapien
tcttttagtatgtggatgagcatggcaatttac

SEQ ID NO: 522283 - DNA, 33 bp, Homo sapien
tcccatttgaacataacagctgcaaaccatcat

SEQ ID NO: 522284 - DNA, 33 bp, Homo sapien
tcccatttgaacataatagctgcaaaccatcat

SEQ ID NO: 522285 - DNA, 33 bp, Homo sapien
atacaagtcagtctcactgaagataataaggca

SEQ ID NO: 522286 - DNA, 33 bp, Homo sapien
atacaagtcagtctcattgaagataataaggca

SEQ ID NO: 522287 - DNA, 33 bp, Homo sapien
tcttcatactagaagggaagtacaatgaagaaa

SEQ ID NO: 522288 - DNA, 33 bp, Homo sapien
tcttcatactagaaggtaagtacaatgaagaaa

SEQ ID NO: 522289 - DNA, 33 bp, Homo sapien
ttgtataccagatgaacgaagtgggaaatcaac

SEQ ID NO: 522290 - DNA, 33 bp, Homo sapien
ttgtataccagatgaatgaagtgggaaatcaac

SEQ ID NO: 522291 - DNA, 33 bp, Homo sapien
agtgaacaacatttgaccctacttctgctattt

SEQ ID NO: 522292 - DNA, 33 bp, Homo sapien
agtgaacaacatttgatcctacttctgctattt

SEQ ID NO: 522293 - DNA, 33 bp, Homo sapien
tgggtaatttgtatggacatagggaatagataa

SEQ ID NO: 522294 - DNA, 33 bp, Homo sapien
tgggtaatttgtatgggcatagggaatagataa

SEQ ID NO: 522295 - DNA, 33 bp, Homo sapien
gtactgagtgaaataacggactagccttgtacc

SEQ ID NO: 522296 - DNA, 33 bp, Homo sapien
gtactgagtgaaataatggactagccttgtacc

SEQ ID NO: 522297 - DNA, 33 bp, Homo sapien
atttgcaagttaaatacaatggcctatgaggaa

SEQ ID NO: 522298 - DNA, 33 bp, Homo sapien
atttgcaagttaaatagaatggcctatgaggaa

SEQ ID NO: 522299 - DNA, 33 bp, Homo sapien
tggagtaaagcggccaataagccagggaatggt

SEQ ID NO: 522300 - DNA, 33 bp, Homo sapien
tggagtaaagcggccagtaagccagggaatggt

SEQ ID NO: 522301 - DNA, 33 bp, Homo sapien
tccattccaatttcgaatagaaaatcttagtct

SEQ ID NO: 522302 - DNA, 33 bp, Homo sapien
tccattccaatttcgagtagaaaatcttagtct

SEQ ID NO: 522303 - DNA, 33 bp, Homo sapien
acattcagatgggataacaaaaagtcttttatc

SEQ ID NO: 522304 - DNA, 33 bp, Homo sapien
acattcagatgggatagcaaaaagtcttttatc

SEQ ID NO: 522305 - DNA, 33 bp, Homo sapien
aagctaaattatcctccgaatttgtccctgata

SEQ ID NO: 522306 - DNA, 33 bp, Homo sapien
aagctaaattatcctctgaatttgtccctgata

SEQ ID NO: 522307 - DNA, 33 bp, Homo sapien
aggaaacaattgagctcagaagtcttggaacaa

SEQ ID NO: 522308 - DNA, 33 bp, Homo sapien
aggaaacaattgagcttagaagtcttggaacaa

SEQ ID NO: 522309 - DNA, 33 bp, Homo sapien
gattaattattatacaactttgactgttatgaa

SEQ ID NO: 522310 - DNA, 33 bp, Homo sapien
gattaattattatacatctttgactgttatgaa

SEQ ID NO: 522311 - DNA, 33 bp, Homo sapien
gcttctgtaaaggctccatgaattcaatatcca

SEQ ID NO: 522312 - DNA, 33 bp, Homo sapien
gcttctgtaaaggctctatgaattcaatatcca

SEQ ID NO: 522313 - DNA, 33 bp, Homo sapien
gtgttttaaattctgacctcaattgtttagaca

SEQ ID NO: 522314 - DNA, 33 bp, Homo sapien
gtgttttaaattctgatctcaattgtttagaca

SEQ ID NO: 522315 - DNA, 33 bp, Homo sapien
tttggcttttaaacaacgacatgaagttaagtt

SEQ ID NO: 522316 - DNA, 33 bp, Homo sapien
tttggcttttaaacaatgacatgaagttaagtt

SEQ ID NO: 522317 - DNA, 33 bp, Homo sapien
attgtaacctaaaaccaccacatttatagcaaa

SEQ ID NO: 522318 - DNA, 33 bp, Homo sapien
attgtaacctaaaaccgccacatttatagcaaa

SEQ ID NO: 522319 - DNA, 33 bp, Homo sapien
caaggtgtattagaaacggcaggcttgaaatgg

SEQ ID NO: 522320 - DNA, 33 bp, Homo sapien
caaggtgtattagaaagggcaggcttgaaatgg

SEQ ID NO: 522321 - DNA, 33 bp, Homo sapien
tgagagggattgtgtcactaggcctactttttt

SEQ ID NO: 522322 - DNA, 33 bp, Homo sapien
tgagagggattgtgtcgctaggcctactttttt

SEQ ID NO: 522323 - DNA, 33 bp, Homo sapien
gcatcttacaggcttgaaagcaggctaaaaata

SEQ ID NO: 522324 - DNA, 33 bp, Homo sapien
gcatcttacaggcttggaagcaggctaaaaata

SEQ ID NO: 522325 - DNA, 33 bp, Homo sapien
cattacctatggaaaaaagtcccaggcccttat

SEQ ID NO: 522326 - DNA, 33 bp, Homo sapien
cattacctatggaaaagagtcccaggcccttat

SEQ ID NO: 522327 - DNA, 33 bp, Homo sapien
ggatgagaccttgaaagagagctgtggctttag

SEQ ID NO: 522328 - DNA, 33 bp, Homo sapien
ggatgagaccttgaaatagagctgtggctttag

SEQ ID NO: 522329 - DNA, 33 bp, Homo sapien
ctgtctgaaaagaaaccggagatctggaaggaa

SEQ ID NO: 522330 - DNA, 33 bp, Homo sapien
ctgtctgaaaagaaactggagatctggaaggaa

SEQ ID NO: 522331 - DNA, 33 bp, Homo sapien
attcctgaattcaggaaatttcatagggtattg

SEQ ID NO: 522332 - DNA, 33 bp, Homo sapien
attcctgaattcaggatatttcatagggtattg

SEQ ID NO: 522333 - DNA, 33 bp, Homo sapien
gtctgttttgttaccgaccagcttgctgagctg

SEQ ID NO: 522334 - DNA, 33 bp, Homo sapien
gtctgttttgttaccggccagcttgctgagctg

SEQ ID NO: 522335 - DNA, 33 bp, Homo sapien
tttcccctgacgtagacatcggtggaactttgt

SEQ ID NO: 522336 - DNA, 33 bp, Homo sapien
tttcccctgacgtagagatcggtggaactttgt

SEQ ID NO: 522337 - DNA, 33 bp, Homo sapien
ctccctatccttgtgactatggccttgcacctt

SEQ ID NO: 522338 - DNA, 33 bp, Homo sapien
ctccctatccttgtgattatggccttgcacctt

SEQ ID NO: 522339 - DNA, 33 bp, Homo sapien
aatgtcactgaagaaaactcttaattagactaa

SEQ ID NO: 522340 - DNA, 33 bp, Homo sapien
aatgtcactgaagaaatctcttaattagactaa

SEQ ID NO: 522341 - DNA, 33 bp, Homo sapien
catgtacatgatatacacaattttgtcaatcat

SEQ ID NO: 522342 - DNA, 33 bp, Homo sapien
catgtacatgatatacgcaattttgtcaatcat

SEQ ID NO: 522343 - DNA, 33 bp, Homo sapien
taaatttaccttagccagaaaacacaaatagta

SEQ ID NO: 522344 - DNA, 33 bp, Homo sapien
taaatttaccttagccggaaaacacaaatagta

SEQ ID NO: 522345 - DNA, 33 bp, Homo sapien
ttttatcctcctagcactagttgtctgacaaga

SEQ ID NO: 522346 - DNA, 33 bp, Homo sapien
ttttatcctcctagcattagttgtctgacaaga

SEQ ID NO: 522347 - DNA, 33 bp, Homo sapien
tcaggatttagactcacaattatatggacaatt

SEQ ID NO: 522348 - DNA, 33 bp, Homo sapien
tcaggatttagactcagaattatatggacaatt

SEQ ID NO: 522349 - DNA, 33 bp, Homo sapien
agagaaagaaaaggaacgatcagaaaagttgag

SEQ ID NO: 522350 - DNA, 33 bp, Homo sapien
agagaaagaaaaggaatgatcagaaaagttgag

SEQ ID NO: 522351 - DNA, 33 bp, Homo sapien
aggagggaaacttcaaaagcgtcaagtgatgta

SEQ ID NO: 522352 - DNA, 33 bp, Homo sapien
aggagggaaacttcaatagcgtcaagtgatgta

SEQ ID NO: 522353 - DNA, 33 bp, Homo sapien
aataaacccgtgttgactaaatgctctgaaatg

SEQ ID NO: 522354 - DNA, 33 bp, Homo sapien
aataaacccgtgttgattaaatgctctgaaatg

SEQ ID NO: 522355 - DNA, 33 bp, Homo sapien
gttcttcctgattaaaattaatgagctagaaat

SEQ ID NO: 522356 - DNA, 33 bp, Homo sapien
gttcttcctgattaaagttaatgagctagaaat

SEQ ID NO: 522357 - DNA, 33 bp, Homo sapien
catatctctccttcaaactgaatcttaacacat

SEQ ID NO: 522358 - DNA, 33 bp, Homo sapien
catatctctccttcaatctgaatcttaacacat

SEQ ID NO: 522359 - DNA, 33 bp, Homo sapien
tgtatgtagttagtaacactgctgcagcggttg

SEQ ID NO: 522360 - DNA, 33 bp, Homo sapien
tgtatgtagttagtaatactgctgcagcggttg

SEQ ID NO: 522361 - DNA, 33 bp, Homo sapien
aacttgagagagaaacccaagagaactgagaaa

SEQ ID NO: 522362 - DNA, 33 bp, Homo sapien
aacttgagagagaaactcaagagaactgagaaa

SEQ ID NO: 522363 - DNA, 33 bp, Homo sapien
gagctaatcaggagaacagtgttggttgtatat

SEQ ID NO: 522364 - DNA, 33 bp, Homo sapien
gagctaatcaggagaatagtgttggttgtatat

SEQ ID NO: 522365 - DNA, 33 bp, Homo sapien
attgacttgttaatgcaaactgaagagttgagg

SEQ ID NO: 522366 - DNA, 33 bp, Homo sapien
attgacttgttaatgccaactgaagagttgagg

SEQ ID NO: 522367 - DNA, 33 bp, Homo sapien
tttggtaaatagctagccagtgtcatctgtggc

SEQ ID NO: 522368 - DNA, 33 bp, Homo sapien
tttggtaaatagctagtcagtgtcatctgtggc

SEQ ID NO: 522369 - DNA, 33 bp, Homo sapien
aaagataatgctaaggaagagtgtaaagaatgg

SEQ ID NO: 522370 - DNA, 33 bp, Homo sapien
aaagataatgctaaggcagagtgtaaagaatgg

SEQ ID NO: 522371 - DNA, 33 bp, Homo sapien
tagtcagttgttaccccctcctcatgtgcctca

SEQ ID NO: 522372 - DNA, 33 bp, Homo sapien
tagtcagttgttacccgctcctcatgtgcctca

SEQ ID NO: 522373 - DNA, 33 bp, Homo sapien
gttaatacaatgataaaactatatgatgggatg

SEQ ID NO: 522374 - DNA, 33 bp, Homo sapien
gttaatacaatgataacactatatgatgggatg

SEQ ID NO: 522375 - DNA, 33 bp, Homo sapien
ccccatctgtcatccacgtggagccataaactt

SEQ ID NO: 522376 - DNA, 33 bp, Homo sapien
ccccatctgtcatccaggtggagccataaactt

SEQ ID NO: 522377 - DNA, 33 bp, Homo sapien
agaggggcaatgatagaatgtggcaataagtaa

SEQ ID NO: 522378 - DNA, 33 bp, Homo sapien
agaggggcaatgataggatgtggcaataagtaa

SEQ ID NO: 522379 - DNA, 33 bp, Homo sapien
cctgtcctcttgtccaactgctctgtttctccc

SEQ ID NO: 522380 - DNA, 33 bp, Homo sapien
cctgtcctcttgtccagctgctctgtttctccc

SEQ ID NO: 522381 - DNA, 33 bp, Homo sapien
cagagatgagatgagaatataggtgttagttca

SEQ ID NO: 522382 - DNA, 33 bp, Homo sapien
cagagatgagatgagagtataggtgttagttca

SEQ ID NO: 522383 - DNA, 33 bp, Homo sapien
acctcatcttgaaaaaactctggaaatgaatta

SEQ ID NO: 522384 - DNA, 33 bp, Homo sapien
acctcatcttgaaaaacctctggaaatgaatta

SEQ ID NO: 522385 - DNA, 33 bp, Homo sapien
aacaaacaataggctggagttgatattatacca

SEQ ID NO: 522386 - DNA, 33 bp, Homo sapien
aacaaacaataggctgtagttgatattatacca

SEQ ID NO: 522387 - DNA, 33 bp, Homo sapien
aggttttcctttcaaactgctatggagtgtgat

SEQ ID NO: 522388 - DNA, 33 bp, Homo sapien
aggttttcctttcaaattgctatggagtgtgat

SEQ ID NO: 522389 - DNA, 33 bp, Homo sapien
catttacattgtgttacgtactgtaagtggtct

SEQ ID NO: 522390 - DNA, 33 bp, Homo sapien
catttacattgtgttaggtactgtaagtggtct

SEQ ID NO: 522391 - DNA, 33 bp, Homo sapien
aagatgtaatcaaaaaagtgagtgtgcctgaat

SEQ ID NO: 522392 - DNA, 33 bp, Homo sapien
aagatgtaatcaaaaaggtgagtgtgcctgaat

SEQ ID NO: 522393 - DNA, 33 bp, Homo sapien
tgtgtgcatgagagagaagcaaggacatacatt

SEQ ID NO: 522394 - DNA, 33 bp, Homo sapien
tgtgtgcatgagagaggagcaaggacatacatt

SEQ ID NO: 522395 - DNA, 33 bp, Homo sapien
aaaagatgttaaaaggaagaccactcatacagt

SEQ ID NO: 522396 - DNA, 33 bp, Homo sapien
aaaagatgttaaaagggagaccactcatacagt

SEQ ID NO: 522397 - DNA, 33 bp, Homo sapien
tttctaaagtgttgtcgaaagctgtatctgtag

SEQ ID NO: 522398 - DNA, 33 bp, Homo sapien
tttctaaagtgttgtctaaagctgtatctgtag

SEQ ID NO: 522399 - DNA, 33 bp, Homo sapien
gttcagtacttcatcagtcactagtatttattg

SEQ ID NO: 522400 - DNA, 33 bp, Homo sapien
gttcagtacttcatcattcactagtatttattg

SEQ ID NO: 522401 - DNA, 33 bp, Homo sapien
gctataaacatacaacaaaatagtctgcctttt

SEQ ID NO: 522402 - DNA, 33 bp, Homo sapien
gctataaacatacaacgaaatagtctgcctttt

SEQ ID NO: 522403 - DNA, 33 bp, Homo sapien
caccaaattccttcaagacttggtacaaatgtc

SEQ ID NO: 522404 - DNA, 33 bp, Homo sapien
caccaaattccttcaatacttggtacaaatgtc

SEQ ID NO: 522405 - DNA, 33 bp, Homo sapien
aaagagaatggagtgcagatctctacatcccgt

SEQ ID NO: 522406 - DNA, 33 bp, Homo sapien
aaagagaatggagtgccgatctctacatcccgt

SEQ ID NO: 522407 - DNA, 33 bp, Homo sapien
acaaaatgtctgtaagaaaataatgataaaagt

SEQ ID NO: 522408 - DNA, 33 bp, Homo sapien
acaaaatgtctgtaaggaaataatgataaaagt

SEQ ID NO: 522409 - DNA, 33 bp, Homo sapien
tgatctgaggactacaggattgattagtggcgt

SEQ ID NO: 522410 - DNA, 33 bp, Homo sapien
tgatctgaggactacatgattgattagtggcgt

SEQ ID NO: 522411 - DNA, 33 bp, Homo sapien
atttgattcagctgacgggatagtatcaagata

SEQ ID NO: 522412 - DNA, 33 bp, Homo sapien
atttgattcagctgactggatagtatcaagata

SEQ ID NO: 522413 - DNA, 33 bp, Homo sapien
tgccaggtcatatggacatctctcaaacccaaa

SEQ ID NO: 522414 - DNA, 33 bp, Homo sapien
tgccaggtcatatggatatctctcaaacccaaa

SEQ ID NO: 522415 - DNA, 33 bp, Homo sapien
tatatgcatcacggtacgtaggtcctttatggc

SEQ ID NO: 522416 - DNA, 33 bp, Homo sapien
tatatgcatcacggtatgtaggtcctttatggc

SEQ ID NO: 522417 - DNA, 33 bp, Homo sapien
acaaaatagcagactaacatggaggtgaaaaag

SEQ ID NO: 522418 - DNA, 33 bp, Homo sapien
acaaaatagcagactagcatggaggtgaaaaag

SEQ ID NO: 522419 - DNA, 33 bp, Homo sapien
tctgtatcaaattgccagaaattaacatggtga

SEQ ID NO: 522420 - DNA, 33 bp, Homo sapien
tctgtatcaaattgccggaaattaacatggtga

SEQ ID NO: 522421 - DNA, 33 bp, Homo sapien
acaatgaccaacagaaaacaatgttagatgttc

SEQ ID NO: 522422 - DNA, 33 bp, Homo sapien
acaatgaccaacagaacacaatgttagatgttc

SEQ ID NO: 522423 - DNA, 33 bp, Homo sapien
tcaaaacagacttttaacgaggagtagaaggtt

SEQ ID NO: 522424 - DNA, 33 bp, Homo sapien
tcaaaacagacttttagcgaggagtagaaggtt

SEQ ID NO: 522425 - DNA, 33 bp, Homo sapien
aaaaagtatgggaaaccaattgatgagtgaact

SEQ ID NO: 522426 - DNA, 33 bp, Homo sapien
aaaaagtatgggaaacgaattgatgagtgaact

SEQ ID NO: 522427 - DNA, 33 bp, Homo sapien
attactcccagttccacgcaacatttgaagtcc

SEQ ID NO: 522428 - DNA, 33 bp, Homo sapien
attactcccagttccatgcaacatttgaagtcc

SEQ ID NO: 522429 - DNA, 33 bp, Homo sapien
gactcctgctggtaccacataccagacagcaca

SEQ ID NO: 522430 - DNA, 33 bp, Homo sapien
gactcctgctggtaccgcataccagacagcaca

SEQ ID NO: 522431 - DNA, 33 bp, Homo sapien
aactattaagactcaaagttcttgtccaatatg

SEQ ID NO: 522432 - DNA, 33 bp, Homo sapien
aactattaagactcaaggttcttgtccaatatg

SEQ ID NO: 522433 - DNA, 33 bp, Homo sapien
gtaggatggaagttaaaactcagttcactcatc

SEQ ID NO: 522434 - DNA, 33 bp, Homo sapien
gtaggatggaagttaatactcagttcactcatc

SEQ ID NO: 522435 - DNA, 33 bp, Homo sapien
gtctttctcattgggactaacttgacatgaact

SEQ ID NO: 522436 - DNA, 33 bp, Homo sapien
gtctttctcattgggagtaacttgacatgaact

SEQ ID NO: 522437 - DNA, 33 bp, Homo sapien
gataaaaatggaaacacctctagactaatcagg

SEQ ID NO: 522438 - DNA, 33 bp, Homo sapien
gataaaaatggaaacagctctagactaatcagg

SEQ ID NO: 522439 - DNA, 33 bp, Homo sapien
tgtatattttcaattacgtctttctcagaatgc

SEQ ID NO: 522440 - DNA, 33 bp, Homo sapien
tgtatattttcaattatgtctttctcagaatgc

SEQ ID NO: 522441 - DNA, 33 bp, Homo sapien
ttattctctgtccgtaccaatccaatctatcct

SEQ ID NO: 522442 - DNA, 33 bp, Homo sapien
ttattctctgtccgtatcaatccaatctatcct

SEQ ID NO: 522443 - DNA, 33 bp, Homo sapien
ggcttcagtgtaccaccccttgttgtctaatca

SEQ ID NO: 522444 - DNA, 33 bp, Homo sapien
ggcttcagtgtaccactccttgttgtctaatca

SEQ ID NO: 522445 - DNA, 33 bp, Homo sapien
aaaagaaacagaaaaacaacctctgtgtatttg

SEQ ID NO: 522446 - DNA, 33 bp, Homo sapien
aaaagaaacagaaaaagaacctctgtgtatttg

SEQ ID NO: 522447 - DNA, 33 bp, Homo sapien
aagttagattacacaaaggttacacaaaggcct

SEQ ID NO: 522448 - DNA, 33 bp, Homo sapien
aagttagattacacaacggttacacaaaggcct

SEQ ID NO: 522449 - DNA, 33 bp, Homo sapien
gctgattttaagtcaactgtgctcaactctggc

SEQ ID NO: 522450 - DNA, 33 bp, Homo sapien
gctgattttaagtcaattgtgctcaactctggc

SEQ ID NO: 522451 - DNA, 33 bp, Homo sapien
ttatagaaactggagtcaagttccctggaaaag

SEQ ID NO: 522452 - DNA, 33 bp, Homo sapien
ttatagaaactggagtgaagttccctggaaaag

SEQ ID NO: 522453 - DNA, 33 bp, Homo sapien
accagtgaatgcaatacgtatgggtccactgct

SEQ ID NO: 522454 - DNA, 33 bp, Homo sapien
accagtgaatgcaatatgtatgggtccactgct

SEQ ID NO: 522455 - DNA, 33 bp, Homo sapien
agagaccatcgttttccaacagtagcacaaatg

SEQ ID NO: 522456 - DNA, 33 bp, Homo sapien
agagaccatcgttttctaacagtagcacaaatg

SEQ ID NO: 522457 - DNA, 33 bp, Homo sapien
tgcccattcataaaaactatgctaagaattgag

SEQ ID NO: 522458 - DNA, 33 bp, Homo sapien
tgcccattcataaaaagtatgctaagaattgag

SEQ ID NO: 522459 - DNA, 33 bp, Homo sapien
gtgtctctttttctcagaaaggatctcatatct

SEQ ID NO: 522460 - DNA, 33 bp, Homo sapien
gtgtctctttttctcataaaggatctcatatct

SEQ ID NO: 522461 - DNA, 33 bp, Homo sapien
aatgcttagaagtcaaccagtggctttgtgaaa

SEQ ID NO: 522462 - DNA, 33 bp, Homo sapien
aatgcttagaagtcaatcagtggctttgtgaaa

SEQ ID NO: 522463 - DNA, 33 bp, Homo sapien
tgagaaataaaattgcccaggagattttgagga

SEQ ID NO: 522464 - DNA, 33 bp, Homo sapien
tgagaaataaaattgctcaggagattttgagga

SEQ ID NO: 522465 - DNA, 33 bp, Homo sapien
ctctaaattactcaaggccatacaaatgttatt

SEQ ID NO: 522466 - DNA, 33 bp, Homo sapien
ctctaaattactcaagtccatacaaatgttatt

SEQ ID NO: 522467 - DNA, 33 bp, Homo sapien
gtaacatctggaactccgagaatctttttcctt

SEQ ID NO: 522468 - DNA, 33 bp, Homo sapien
gtaacatctggaactctgagaatctttttcctt

SEQ ID NO: 522469 - DNA, 33 bp, Homo sapien
tgttacacacggatcacataaagtgtttctggg

SEQ ID NO: 522470 - DNA, 33 bp, Homo sapien
tgttacacacggatcatataaagtgtttctggg

SEQ ID NO: 522471 - DNA, 33 bp, Homo sapien
caatattccttcttcacgtctccgatcatacta

SEQ ID NO: 522472 - DNA, 33 bp, Homo sapien
caatattccttcttcatgtctccgatcatacta

SEQ ID NO: 522473 - DNA, 33 bp, Homo sapien
gtatccatataacttcaaataaggtgaattcat

SEQ ID NO: 522474 - DNA, 33 bp, Homo sapien
gtatccatataacttcgaataaggtgaattcat

SEQ ID NO: 522475 - DNA, 33 bp, Homo sapien
gctctgcttctctgaaataatggactggaatga

SEQ ID NO: 522476 - DNA, 33 bp, Homo sapien
gctctgcttctctgaagtaatggactggaatga

SEQ ID NO: 522477 - DNA, 33 bp, Homo sapien
ttcgtgaaaatggatacctgtacttgaactcat

SEQ ID NO: 522478 - DNA, 33 bp, Homo sapien
ttcgtgaaaatggatatctgtacttgaactcat

SEQ ID NO: 522479 - DNA, 33 bp, Homo sapien
atcaagtgcatccaagaatatgtaagtattttt

SEQ ID NO: 522480 - DNA, 33 bp, Homo sapien
atcaagtgcatccaagcatatgtaagtattttt

SEQ ID NO: 522481 - DNA, 33 bp, Homo sapien
agatcaagcactaaacaccagaactgttggctc

SEQ ID NO: 522482 - DNA, 33 bp, Homo sapien
agatcaagcactaaacgccagaactgttggctc

SEQ ID NO: 522483 - DNA, 33 bp, Homo sapien
aaaaacatctagcctacagtggtcattcaataa

SEQ ID NO: 522484 - DNA, 33 bp, Homo sapien
aaaaacatctagcctatagtggtcattcaataa

SEQ ID NO: 522485 - DNA, 33 bp, Homo sapien
attaattaaccctcaccacaaccaaacatatta

SEQ ID NO: 522486 - DNA, 33 bp, Homo sapien
attaattaaccctcactacaaccaaacatatta

SEQ ID NO: 522487 - DNA, 33 bp, Homo sapien
tccagaccactacagggactacagaggcagaaa

SEQ ID NO: 522488 - DNA, 33 bp, Homo sapien
tccagaccactacaggtactacagaggcagaaa

SEQ ID NO: 522489 - DNA, 33 bp, Homo sapien
atgtagaggctaaacactgaattggaatacctt

SEQ ID NO: 522490 - DNA, 33 bp, Homo sapien
atgtagaggctaaacattgaattggaatacctt

SEQ ID NO: 522491 - DNA, 33 bp, Homo sapien
gtcttgttggctaataccaggcaagtttttctg

SEQ ID NO: 522492 - DNA, 33 bp, Homo sapien
gtcttgttggctaatatcaggcaagtttttctg

SEQ ID NO: 522493 - DNA, 33 bp, Homo sapien
agccaccgaaaccggacgatgcctccttcttaa

SEQ ID NO: 522494 - DNA, 33 bp, Homo sapien
agccaccgaaaccggatgatgcctccttcttaa

SEQ ID NO: 522495 - DNA, 33 bp, Homo sapien
aggaatgtgaaataaaataactaccaaggagca

SEQ ID NO: 522496 - DNA, 33 bp, Homo sapien
aggaatgtgaaataaagtaactaccaaggagca

SEQ ID NO: 522497 - DNA, 33 bp, Homo sapien
tcaagaatatcaatggccatacattagagacac

SEQ ID NO: 522498 - DNA, 33 bp, Homo sapien
tcaagaatatcaatgggcatacattagagacac

SEQ ID NO: 522499 - DNA, 33 bp, Homo sapien
atgtaaacacaaacaacaattcttgcttatcaa

SEQ ID NO: 522500 - DNA, 33 bp, Homo sapien
atgtaaacacaaacaataattcttgcttatcaa

SEQ ID NO: 522501 - DNA, 33 bp, Homo sapien
cttcctacatttcagcaagattagataactgac

SEQ ID NO: 522502 - DNA, 33 bp, Homo sapien
cttcctacatttcagcgagattagataactgac

SEQ ID NO: 522503 - DNA, 33 bp, Homo sapien
aaattactaaatgtgaagttgatcagaaacaca

SEQ ID NO: 522504 - DNA, 33 bp, Homo sapien
aaattactaaatgtgatgttgatcagaaacaca

SEQ ID NO: 522505 - DNA, 33 bp, Homo sapien
taatctcaggtcttcacgtaaaacaaaggcctt

SEQ ID NO: 522506 - DNA, 33 bp, Homo sapien
taatctcaggtcttcatgtaaaacaaaggcctt

SEQ ID NO: 522507 - DNA, 33 bp, Homo sapien
atacatcttggacttgaaactaaatgcaaatat

SEQ ID NO: 522508 - DNA, 33 bp, Homo sapien
atacatcttggacttggaactaaatgcaaatat

SEQ ID NO: 522509 - DNA, 33 bp, Homo sapien
atttggggataggagaactgagtgggccaaatg

SEQ ID NO: 522510 - DNA, 33 bp, Homo sapien
atttggggataggagagctgagtgggccaaatg

SEQ ID NO: 522511 - DNA, 33 bp, Homo sapien
aacatatactctcatgaaatgtttctagattca

SEQ ID NO: 522512 - DNA, 33 bp, Homo sapien
aacatatactctcatggaatgtttctagattca

SEQ ID NO: 522513 - DNA, 33 bp, Homo sapien
cacaaaactgacaacaaaagagaaatgataaat

SEQ ID NO: 522514 - DNA, 33 bp, Homo sapien
cacaaaactgacaacagaagagaaatgataaat

SEQ ID NO: 522515 - DNA, 33 bp, Homo sapien
tgtctcatgccaaagcaagtagtcactgcaccc

SEQ ID NO: 522516 - DNA, 33 bp, Homo sapien
tgtctcatgccaaagcgagtagtcactgcaccc

SEQ ID NO: 522517 - DNA, 33 bp, Homo sapien
agagagagaagggaaaagtaatgctacaatttc

SEQ ID NO: 522518 - DNA, 33 bp, Homo sapien
agagagagaagggaaaggtaatgctacaatttc

SEQ ID NO: 522519 - DNA, 33 bp, Homo sapien
ctaagattgaaccccacaagaggatgctctgtg

SEQ ID NO: 522520 - DNA, 33 bp, Homo sapien
ctaagattgaaccccagaagaggatgctctgtg

SEQ ID NO: 522521 - DNA, 33 bp, Homo sapien
gaggccagagattgaccggtaagaaattcttac

SEQ ID NO: 522522 - DNA, 33 bp, Homo sapien
gaggccagagattgactggtaagaaattcttac

SEQ ID NO: 522523 - DNA, 33 bp, Homo sapien
agctatatataaggccagctgcaaactccttaa

SEQ ID NO: 522524 - DNA, 33 bp, Homo sapien
agctatatataaggccggctgcaaactccttaa

SEQ ID NO: 522525 - DNA, 33 bp, Homo sapien
atcaaaattttgctgccattattctctaactcc

SEQ ID NO: 522526 - DNA, 33 bp, Homo sapien
atcaaaattttgctgcgattattctctaactcc

SEQ ID NO: 522527 - DNA, 33 bp, Homo sapien
gcaggcattcctgtgaagcactctagttcttct

SEQ ID NO: 522528 - DNA, 33 bp, Homo sapien
gcaggcattcctgtgatgcactctagttcttct

SEQ ID NO: 522529 - DNA, 33 bp, Homo sapien
tagttcttcttgttgcactttatttttccatat

SEQ ID NO: 522530 - DNA, 33 bp, Homo sapien
tagttcttcttgttgcgctttatttttccatat

SEQ ID NO: 522531 - DNA, 33 bp, Homo sapien
tatttcaggaaaaatccagacatatggaaaaat

SEQ ID NO: 522532 - DNA, 33 bp, Homo sapien
tatttcaggaaaaatcgagacatatggaaaaat

SEQ ID NO: 522533 - DNA, 33 bp, Homo sapien
tgaataaaactctgagaaaaccaaacattaaat

SEQ ID NO: 522534 - DNA, 33 bp, Homo sapien
tgaataaaactctgaggaaaccaaacattaaat

SEQ ID NO: 522535 - DNA, 33 bp, Homo sapien
tctttggatcaaccaaagtttaaccctaacatg

SEQ ID NO: 522536 - DNA, 33 bp, Homo sapien
tctttggatcaaccaatgtttaaccctaacatg

SEQ ID NO: 522537 - DNA, 33 bp, Homo sapien
acaatatactgccaaacgtactacatcacctcc

SEQ ID NO: 522538 - DNA, 33 bp, Homo sapien
acaatatactgccaaatgtactacatcacctcc

SEQ ID NO: 522539 - DNA, 33 bp, Homo sapien
agcctttctaaaaggcaattgaaacagcctcct

SEQ ID NO: 522540 - DNA, 33 bp, Homo sapien
agcctttctaaaaggccattgaaacagcctcct

SEQ ID NO: 522541 - DNA, 33 bp, Homo sapien
attaacttgactgcaacgcagaggagtataaat

SEQ ID NO: 522542 - DNA, 33 bp, Homo sapien
attaacttgactgcaatgcagaggagtataaat

SEQ ID NO: 522543 - DNA, 33 bp, Homo sapien
agatatttttaccttgcaccagtggcaaaatga

SEQ ID NO: 522544 - DNA, 33 bp, Homo sapien
agatatttttaccttgtaccagtggcaaaatga

SEQ ID NO: 522545 - DNA, 33 bp, Homo sapien
tggggcttctgcaggaccatcccggctagattc

SEQ ID NO: 522546 - DNA, 33 bp, Homo sapien
tggggcttctgcaggatcatcccggctagattc

SEQ ID NO: 522547 - DNA, 33 bp, Homo sapien
aactagtaggctataccaaagcaggagaaggct

SEQ ID NO: 522548 - DNA, 33 bp, Homo sapien
aactagtaggctatacgaaagcaggagaaggct

SEQ ID NO: 522549 - DNA, 33 bp, Homo sapien
aaatctaagccataaaatttatctaatgttaaa

SEQ ID NO: 522550 - DNA, 33 bp, Homo sapien
aaatctaagccataaactttatctaatgttaaa

SEQ ID NO: 522551 - DNA, 33 bp, Homo sapien
tggaataactgtcaccaatgtgtctggaaactg

SEQ ID NO: 522552 - DNA, 33 bp, Homo sapien
tggaataactgtcaccgatgtgtctggaaactg

SEQ ID NO: 522553 - DNA, 33 bp, Homo sapien
aagccactcaactgtaccaaacttatgccacag

SEQ ID NO: 522554 - DNA, 33 bp, Homo sapien
aagccactcaactgtatcaaacttatgccacag

SEQ ID NO: 522555 - DNA, 33 bp, Homo sapien
tagaaattgggaaaaaatatgtggaatatatgt

SEQ ID NO: 522556 - DNA, 33 bp, Homo sapien
tagaaattgggaaaaattatgtggaatatatgt

SEQ ID NO: 522557 - DNA, 33 bp, Homo sapien
tttcacctttcgttacaatacagcaataacgtc

SEQ ID NO: 522558 - DNA, 33 bp, Homo sapien
tttcacctttcgttacgatacagcaataacgtc

SEQ ID NO: 522559 - DNA, 33 bp, Homo sapien
taaagaaatcactagccaggttgatgaaagaac

SEQ ID NO: 522560 - DNA, 33 bp, Homo sapien
taaagaaatcactagcgaggttgatgaaagaac

SEQ ID NO: 522561 - DNA, 33 bp, Homo sapien
tgatgaagattcttccactgttaattgcaattt

SEQ ID NO: 522562 - DNA, 33 bp, Homo sapien
tgatgaagattcttcccctgttaattgcaattt

SEQ ID NO: 522563 - DNA, 33 bp, Homo sapien
gcaagccagagacttaaccaattgaaaaacaaa

SEQ ID NO: 522564 - DNA, 33 bp, Homo sapien
gcaagccagagacttagccaattgaaaaacaaa

SEQ ID NO: 522565 - DNA, 33 bp, Homo sapien
tctacatcagtattaacgtaagtgccattccag

SEQ ID NO: 522566 - DNA, 33 bp, Homo sapien
tctacatcagtattaaggtaagtgccattccag

SEQ ID NO: 522567 - DNA, 33 bp, Homo sapien
aataaaacagaactcacatgaaatgagagaaaa

SEQ ID NO: 522568 - DNA, 33 bp, Homo sapien
aataaaacagaactcagatgaaatgagagaaaa

SEQ ID NO: 522569 - DNA, 33 bp, Homo sapien
atgaaccaaatagcagcagagaaagtcctcatg

SEQ ID NO: 522570 - DNA, 33 bp, Homo sapien
atgaaccaaatagcaggagagaaagtcctcatg

SEQ ID NO: 522571 - DNA, 33 bp, Homo sapien
cttgagtatgctcatacggctgcttatagggta

SEQ ID NO: 522572 - DNA, 33 bp, Homo sapien
cttgagtatgctcatatggctgcttatagggta

SEQ ID NO: 522573 - DNA, 33 bp, Homo sapien
tttgtctgttgccttacgtaaaaacaaaatcat

SEQ ID NO: 522574 - DNA, 33 bp, Homo sapien
tttgtctgttgccttatgtaaaaacaaaatcat

SEQ ID NO: 522575 - DNA, 33 bp, Homo sapien
tggccacttttctgtacagcaaccgaggtgata

SEQ ID NO: 522576 - DNA, 33 bp, Homo sapien
tggccacttttctgtatagcaaccgaggtgata

SEQ ID NO: 522577 - DNA, 33 bp, Homo sapien
taattcagccacaaataaagaccctacgcaaag

SEQ ID NO: 522578 - DNA, 33 bp, Homo sapien
taattcagccacaaatgaagaccctacgcaaag

SEQ ID NO: 522579 - DNA, 33 bp, Homo sapien
gattatttagattttaaccaccaagatttcaat

SEQ ID NO: 522580 - DNA, 33 bp, Homo sapien
gattatttagattttatccaccaagatttcaat

SEQ ID NO: 522581 - DNA, 33 bp, Homo sapien
actaggacccagaatccctaatccagcagagcc

SEQ ID NO: 522582 - DNA, 33 bp, Homo sapien
actaggacccagaatctctaatccagcagagcc

SEQ ID NO: 522583 - DNA, 33 bp, Homo sapien
acctgaggagtagagaatatatgatttccagaa

SEQ ID NO: 522584 - DNA, 33 bp, Homo sapien
acctgaggagtagagattatatgatttccagaa

SEQ ID NO: 522585 - DNA, 33 bp, Homo sapien
tgtgtagttttcaccaaaagtgttcttacccag

SEQ ID NO: 522586 - DNA, 33 bp, Homo sapien
tgtgtagttttcaccagaagtgttcttacccag

SEQ ID NO: 522587 - DNA, 33 bp, Homo sapien
ttttcatttcttttcaatccagacttctggagg

SEQ ID NO: 522588 - DNA, 33 bp, Homo sapien
ttttcatttcttttcagtccagacttctggagg

SEQ ID NO: 522589 - DNA, 33 bp, Homo sapien
tgtagtctggctctcaagtggtaatcttgacta

SEQ ID NO: 522590 - DNA, 33 bp, Homo sapien
tgtagtctggctctcaggtggtaatcttgacta

SEQ ID NO: 522591 - DNA, 33 bp, Homo sapien
tgtacagtagcattaccctcacaacgacctgct

SEQ ID NO: 522592 - DNA, 33 bp, Homo sapien
tgtacagtagcattacgctcacaacgacctgct

SEQ ID NO: 522593 - DNA, 33 bp, Homo sapien
ggaaatattgcttagaaataacagctctacata

SEQ ID NO: 522594 - DNA, 33 bp, Homo sapien
ggaaatattgcttagacataacagctctacata

SEQ ID NO: 522595 - DNA, 33 bp, Homo sapien
atcctttaaataatgcagcacttttgggtatct

SEQ ID NO: 522596 - DNA, 33 bp, Homo sapien
atcctttaaataatgcggcacttttgggtatct

SEQ ID NO: 522597 - DNA, 33 bp, Homo sapien
ggtcctcatccacaaacgacagtaatgttgttc

SEQ ID NO: 522598 - DNA, 33 bp, Homo sapien
ggtcctcatccacaaatgacagtaatgttgttc

SEQ ID NO: 522599 - DNA, 33 bp, Homo sapien
aaggcagagggtggacagaaaatgtgctgacct

SEQ ID NO: 522600 - DNA, 33 bp, Homo sapien
aaggcagagggtggacggaaaatgtgctgacct

SEQ ID NO: 522601 - DNA, 33 bp, Homo sapien
aaagaaacaacatgaggcaaatttagaaaataa

SEQ ID NO: 522602 - DNA, 33 bp, Homo sapien
aaagaaacaacatgagtcaaatttagaaaataa

SEQ ID NO: 522603 - DNA, 33 bp, Homo sapien
acagaactgtgataaacgaggatttggacagaa

SEQ ID NO: 522604 - DNA, 33 bp, Homo sapien
acagaactgtgataaatgaggatttggacagaa

SEQ ID NO: 522605 - DNA, 33 bp, Homo sapien
aatgatctttgttgtacaaggccagatataagc

SEQ ID NO: 522606 - DNA, 33 bp, Homo sapien
aatgatctttgttgtataaggccagatataagc

SEQ ID NO: 522607 - DNA, 33 bp, Homo sapien
tccaggtctcccaataagaatcttttgaagagc

SEQ ID NO: 522608 - DNA, 33 bp, Homo sapien
tccaggtctcccaatatgaatcttttgaagagc

SEQ ID NO: 522609 - DNA, 33 bp, Homo sapien
tggagctttcaagtggaatattcatgagtggct

SEQ ID NO: 522610 - DNA, 33 bp, Homo sapien
tggagctttcaagtgggatattcatgagtggct

SEQ ID NO: 522611 - DNA, 33 bp, Homo sapien
ggagctcatttccccaacctgaaatttgaggaa

SEQ ID NO: 522612 - DNA, 33 bp, Homo sapien
ggagctcatttccccatcctgaaatttgaggaa

SEQ ID NO: 522613 - DNA, 33 bp, Homo sapien
agtgttcctgtacactaacaatgaactatccaa

SEQ ID NO: 522614 - DNA, 33 bp, Homo sapien
agtgttcctgtacactgacaatgaactatccaa

SEQ ID NO: 522615 - DNA, 33 bp, Homo sapien
agaaaaaagtcttaaaccagactcaaggaaata

SEQ ID NO: 522616 - DNA, 33 bp, Homo sapien
agaaaaaagtcttaaagcagactcaaggaaata

SEQ ID NO: 522617 - DNA, 33 bp, Homo sapien
cacttatagatccaacaggcttggaatattttt

SEQ ID NO: 522618 - DNA, 33 bp, Homo sapien
cacttatagatccaactggcttggaatattttt

SEQ ID NO: 522619 - DNA, 33 bp, Homo sapien
agagagaaacccagaaatagagagacatatcat

SEQ ID NO: 522620 - DNA, 33 bp, Homo sapien
agagagaaacccagaactagagagacatatcat

SEQ ID NO: 522621 - DNA, 33 bp, Homo sapien
aggtgttgttttcaaaatgtcaagagtaatcca

SEQ ID NO: 522622 - DNA, 33 bp, Homo sapien
aggtgttgttttcaaagtgtcaagagtaatcca

SEQ ID NO: 522623 - DNA, 33 bp, Homo sapien
aatggcctgaaattccccctgggacaactgtag

SEQ ID NO: 522624 - DNA, 33 bp, Homo sapien
aatggcctgaaattcctcctgggacaactgtag

SEQ ID NO: 522625 - DNA, 33 bp, Homo sapien
tttcctattctctctcaccagaaaaataaatgt

SEQ ID NO: 522626 - DNA, 33 bp, Homo sapien
tttcctattctctctcgccagaaaaataaatgt

SEQ ID NO: 522627 - DNA, 33 bp, Homo sapien
gatcacagtaatctacacacagctatcacacat

SEQ ID NO: 522628 - DNA, 33 bp, Homo sapien
gatcacagtaatctacgcacagctatcacacat

SEQ ID NO: 522629 - DNA, 33 bp, Homo sapien
ataattgaaaagtgccacctgaaatgtctctga

SEQ ID NO: 522630 - DNA, 33 bp, Homo sapien
ataattgaaaagtgccgcctgaaatgtctctga

SEQ ID NO: 522631 - DNA, 33 bp, Homo sapien
tctacacacattgtgaaacaaaacaaaatctgg

SEQ ID NO: 522632 - DNA, 33 bp, Homo sapien
tctacacacattgtgacacaaaacaaaatctgg

SEQ ID NO: 522633 - DNA, 33 bp, Homo sapien
caccatcactaggagacagaaaattgtcagctc

SEQ ID NO: 522634 - DNA, 33 bp, Homo sapien
caccatcactaggagatagaaaattgtcagctc

SEQ ID NO: 522635 - DNA, 33 bp, Homo sapien
cccatggtttctttcacggactatcattgagtg

SEQ ID NO: 522636 - DNA, 33 bp, Homo sapien
cccatggtttctttcatggactatcattgagtg

SEQ ID NO: 522637 - DNA, 33 bp, Homo sapien
acatagatcaatggaccaaaatagggaacccag

SEQ ID NO: 522638 - DNA, 33 bp, Homo sapien
acatagatcaatggactaaaatagggaacccag

SEQ ID NO: 522639 - DNA, 33 bp, Homo sapien
atctataactacagaaatggtctgtgaacttat

SEQ ID NO: 522640 - DNA, 33 bp, Homo sapien
atctataactacagaactggtctgtgaacttat

SEQ ID NO: 522641 - DNA, 33 bp, Homo sapien
tatctaatggacagccagaaaacccagagagac

SEQ ID NO: 522642 - DNA, 33 bp, Homo sapien
tatctaatggacagccggaaaacccagagagac

SEQ ID NO: 522643 - DNA, 33 bp, Homo sapien
gcaagtattgaaatccacttagaaaagtcagga

SEQ ID NO: 522644 - DNA, 33 bp, Homo sapien
gcaagtattgaaatcctcttagaaaagtcagga

SEQ ID NO: 522645 - DNA, 33 bp, Homo sapien
taaagattcttatctacgtccatttctagtcat

SEQ ID NO: 522646 - DNA, 33 bp, Homo sapien
taaagattcttatctaggtccatttctagtcat

SEQ ID NO: 522647 - DNA, 33 bp, Homo sapien
ctccaatacaactgaagctggtttccctcaagt

SEQ ID NO: 522648 - DNA, 33 bp, Homo sapien
ctccaatacaactgaatctggtttccctcaagt

SEQ ID NO: 522649 - DNA, 33 bp, Homo sapien
taatagtttggacaaacgagtcctggtcccttt

SEQ ID NO: 522650 - DNA, 33 bp, Homo sapien
taatagtttggacaaatgagtcctggtcccttt

SEQ ID NO: 522651 - DNA, 33 bp, Homo sapien
taaaaagtgcaggggacgtgcataggaaaggaa

SEQ ID NO: 522652 - DNA, 33 bp, Homo sapien
taaaaagtgcaggggatgtgcataggaaaggaa

SEQ ID NO: 522653 - DNA, 33 bp, Homo sapien
aacactactactaaaacctgggtcattttctag

SEQ ID NO: 522654 - DNA, 33 bp, Homo sapien
aacactactactaaaatctgggtcattttctag

SEQ ID NO: 522655 - DNA, 33 bp, Homo sapien
tactgtaccaatgggaataggcctcattaccaa

SEQ ID NO: 522656 - DNA, 33 bp, Homo sapien
tactgtaccaatgggagtaggcctcattaccaa

SEQ ID NO: 522657 - DNA, 33 bp, Homo sapien
cattttccttgacaaacatgatataaggcactt

SEQ ID NO: 522658 - DNA, 33 bp, Homo sapien
cattttccttgacaaatatgatataaggcactt

SEQ ID NO: 522659 - DNA, 33 bp, Homo sapien
gagtatagagcaaggcatggctaaaatacaagc

SEQ ID NO: 522660 - DNA, 33 bp, Homo sapien
gagtatagagcaaggcgtggctaaaatacaagc

SEQ ID NO: 522661 - DNA, 33 bp, Homo sapien
ttgtaaagcgaacaccacatatttaaatagaaa

SEQ ID NO: 522662 - DNA, 33 bp, Homo sapien
ttgtaaagcgaacaccgcatatttaaatagaaa

SEQ ID NO: 522663 - DNA, 33 bp, Homo sapien
atttcatttgatcacaacatatttttacaaatc

SEQ ID NO: 522664 - DNA, 33 bp, Homo sapien
atttcatttgatcacagcatatttttacaaatc

SEQ ID NO: 522665 - DNA, 33 bp, Homo sapien
ataggttagtgactaaatcgaaagttgacttaa

SEQ ID NO: 522666 - DNA, 33 bp, Homo sapien
ataggttagtgactaagtcgaaagttgacttaa

SEQ ID NO: 522667 - DNA, 33 bp, Homo sapien
tcactttcaactgggaactaaacgttaagaact

SEQ ID NO: 522668 - DNA, 33 bp, Homo sapien
tcactttcaactgggagctaaacgttaagaact

SEQ ID NO: 522669 - DNA, 33 bp, Homo sapien
gtgtgataaaagacaacgaagagatggttgaaa

SEQ ID NO: 522670 - DNA, 33 bp, Homo sapien
gtgtgataaaagacaatgaagagatggttgaaa

SEQ ID NO: 522671 - DNA, 33 bp, Homo sapien
tacctcaattgttatgcagatttcactctgtac

SEQ ID NO: 522672 - DNA, 33 bp, Homo sapien
tacctcaattgttatgtagatttcactctgtac

SEQ ID NO: 522673 - DNA, 33 bp, Homo sapien
tcccaaagtagagtacaggaaaggtatatgtct

SEQ ID NO: 522674 - DNA, 33 bp, Homo sapien
tcccaaagtagagtacgggaaaggtatatgtct

SEQ ID NO: 522675 - DNA, 33 bp, Homo sapien
cgttaaccattgtataaacccatagcatcttcc

SEQ ID NO: 522676 - DNA, 33 bp, Homo sapien
cgttaaccattgtatatacccatagcatcttcc

SEQ ID NO: 522677 - DNA, 33 bp, Homo sapien
atctgcagcctagaagaaagtctttaccagaac

SEQ ID NO: 522678 - DNA, 33 bp, Homo sapien
atctgcagcctagaaggaagtctttaccagaac

SEQ ID NO: 522679 - DNA, 33 bp, Homo sapien
ttttcatacaggaagaaacatagtcacacatat

SEQ ID NO: 522680 - DNA, 33 bp, Homo sapien
ttttcatacaggaagacacatagtcacacatat

SEQ ID NO: 522681 - DNA, 33 bp, Homo sapien
catttaagtgaatgataagatgtatttggagta

SEQ ID NO: 522682 - DNA, 33 bp, Homo sapien
catttaagtgaatgattagatgtatttggagta

SEQ ID NO: 522683 - DNA, 33 bp, Homo sapien
aattatgtaagtcaaccaagtattatgaaagga

SEQ ID NO: 522684 - DNA, 33 bp, Homo sapien
aattatgtaagtcaactaagtattatgaaagga

SEQ ID NO: 522685 - DNA, 33 bp, Homo sapien
ttgtgtgttataattacgctcagggagtaaaca

SEQ ID NO: 522686 - DNA, 33 bp, Homo sapien
ttgtgtgttataattatgctcagggagtaaaca

SEQ ID NO: 522687 - DNA, 33 bp, Homo sapien
cagtatatcttgcaaaccactctacatcatatt

SEQ ID NO: 522688 - DNA, 33 bp, Homo sapien
cagtatatcttgcaaagcactctacatcatatt

SEQ ID NO: 522689 - DNA, 33 bp, Homo sapien
attgtattaatccaataaggagcatgcaaaaag

SEQ ID NO: 522690 - DNA, 33 bp, Homo sapien
attgtattaatccaatcaggagcatgcaaaaag

SEQ ID NO: 522691 - DNA, 33 bp, Homo sapien
cctgtttagaaattctgactgagcttactccat

SEQ ID NO: 522692 - DNA, 33 bp, Homo sapien
cctgtttagaaattcttactgagcttactccat

SEQ ID NO: 522693 - DNA, 33 bp, Homo sapien
taagctgatattttaggccctatcagcctgtgt

SEQ ID NO: 522694 - DNA, 33 bp, Homo sapien
taagctgatattttagtccctatcagcctgtgt

SEQ ID NO: 522695 - DNA, 33 bp, Homo sapien
tgcatggctctcatcacagagaggaacaaaagg

SEQ ID NO: 522696 - DNA, 33 bp, Homo sapien
tgcatggctctcatcatagagaggaacaaaagg

SEQ ID NO: 522697 - DNA, 33 bp, Homo sapien
aaatactaaaggtaaacaacctcaaagatttaa

SEQ ID NO: 522698 - DNA, 33 bp, Homo sapien
aaatactaaaggtaaagaacctcaaagatttaa

SEQ ID NO: 522699 - DNA, 33 bp, Homo sapien
ttgtttgcttttcttgaagatttgtttcagttt

SEQ ID NO: 522700 - DNA, 33 bp, Homo sapien
ttgtttgcttttcttgcagatttgtttcagttt

SEQ ID NO: 522701 - DNA, 33 bp, Homo sapien
caggatatgttatgagcacctggtccaggataa

SEQ ID NO: 522702 - DNA, 33 bp, Homo sapien
caggatatgttatgagtacctggtccaggataa

SEQ ID NO: 522703 - DNA, 33 bp, Homo sapien
ccatttcaaggaatgaagcaaacacttttcctt

SEQ ID NO: 522704 - DNA, 33 bp, Homo sapien
ccatttcaaggaatgaggcaaacacttttcctt

SEQ ID NO: 522705 - DNA, 33 bp, Homo sapien
acttcaaatttaaggaatagcatatgcaaaagc

SEQ ID NO: 522706 - DNA, 33 bp, Homo sapien
acttcaaatttaaggactagcatatgcaaaagc

SEQ ID NO: 522707 - DNA, 33 bp, Homo sapien
gatggacacaatagcaagtgtttgagaaaggag

SEQ ID NO: 522708 - DNA, 33 bp, Homo sapien
gatggacacaatagcaggtgtttgagaaaggag

SEQ ID NO: 522709 - DNA, 33 bp, Homo sapien
tgagcaaaacctcctacctacagccttccctgc

SEQ ID NO: 522710 - DNA, 33 bp, Homo sapien
tgagcaaaacctcctatctacagccttccctgc

SEQ ID NO: 522711 - DNA, 33 bp, Homo sapien
tgtatctacacaatacactttaagagtctgaaa

SEQ ID NO: 522712 - DNA, 33 bp, Homo sapien
tgtatctacacaatacgctttaagagtctgaaa

SEQ ID NO: 522713 - DNA, 33 bp, Homo sapien
gacgaaaaaaattgatcaagagataaatatata

SEQ ID NO: 522714 - DNA, 33 bp, Homo sapien
gacgaaaaaaattgatgaagagataaatatata

SEQ ID NO: 522715 - DNA, 33 bp, Homo sapien
ccttcctacatcactacaacatttctgcagttg

SEQ ID NO: 522716 - DNA, 33 bp, Homo sapien
ccttcctacatcactagaacatttctgcagttg

SEQ ID NO: 522717 - DNA, 33 bp, Homo sapien
tggaaacaacatcaaaatttaggctttttaagc

SEQ ID NO: 522718 - DNA, 33 bp, Homo sapien
tggaaacaacatcaaactttaggctttttaagc

SEQ ID NO: 522719 - DNA, 33 bp, Homo sapien
tatacacttttgaacacgtgacagtaaatattt

SEQ ID NO: 522720 - DNA, 33 bp, Homo sapien
tatacacttttgaacatgtgacagtaaatattt

SEQ ID NO: 522721 - DNA, 33 bp, Homo sapien
gcactaaattgcgctacatatgacatagaaggc

SEQ ID NO: 522722 - DNA, 33 bp, Homo sapien
gcactaaattgcgctatatatgacatagaaggc

SEQ ID NO: 522723 - DNA, 33 bp, Homo sapien
gggttttgaaataagcaagaaaggttggaacat

SEQ ID NO: 522724 - DNA, 33 bp, Homo sapien
gggttttgaaataagcgagaaaggttggaacat

SEQ ID NO: 522725 - DNA, 33 bp, Homo sapien
actcttatcaaacaggacattagagttcaacaa

SEQ ID NO: 522726 - DNA, 33 bp, Homo sapien
actcttatcaaacagggcattagagttcaacaa

SEQ ID NO: 522727 - DNA, 33 bp, Homo sapien
atggctgttcactgcagtattgtttgaaatggc

SEQ ID NO: 522728 - DNA, 33 bp, Homo sapien
atggctgttcactgcattattgtttgaaatggc

SEQ ID NO: 522729 - DNA, 33 bp, Homo sapien
ctaacggagcacataccgtatctctttttgagt

SEQ ID NO: 522730 - DNA, 33 bp, Homo sapien
ctaacggagcacatactgtatctctttttgagt

SEQ ID NO: 522731 - DNA, 33 bp, Homo sapien
ttcttcatcagttcaacgtgggtggtaatcata

SEQ ID NO: 522732 - DNA, 33 bp, Homo sapien
ttcttcatcagttcaatgtgggtggtaatcata

SEQ ID NO: 522733 - DNA, 33 bp, Homo sapien
aaagaaaaagagatcacgactacaagttaagtt

SEQ ID NO: 522734 - DNA, 33 bp, Homo sapien
aaagaaaaagagatcatgactacaagttaagtt

SEQ ID NO: 522735 - DNA, 33 bp, Homo sapien
aaattttgctaaaaggaaacaaagaatgtttaa

SEQ ID NO: 522736 - DNA, 33 bp, Homo sapien
aaattttgctaaaagggaacaaagaatgtttaa

SEQ ID NO: 522737 - DNA, 33 bp, Homo sapien
aaaatcactctcctaccacgacagagaaagcag

SEQ ID NO: 522738 - DNA, 33 bp, Homo sapien
aaaatcactctcctactacgacagagaaagcag

SEQ ID NO: 522739 - DNA, 33 bp, Homo sapien
cttggcttctaagatacgatggtttgtaatatc

SEQ ID NO: 522740 - DNA, 33 bp, Homo sapien
cttggcttctaagataggatggtttgtaatatc

SEQ ID NO: 522741 - DNA, 33 bp, Homo sapien
actcttcaagtgatcacacctggttttcttgtc

SEQ ID NO: 522742 - DNA, 33 bp, Homo sapien
actcttcaagtgatcatacctggttttcttgtc

SEQ ID NO: 522743 - DNA, 33 bp, Homo sapien
cagggcgcttcccctccagaactgcctagcagg

SEQ ID NO: 522744 - DNA, 33 bp, Homo sapien
cagggcgcttcccctctagaactgcctagcagg

SEQ ID NO: 522745 - DNA, 33 bp, Homo sapien
agaagaggccagggtacacttggcaaaggaatc

SEQ ID NO: 522746 - DNA, 33 bp, Homo sapien
agaagaggccagggtagacttggcaaaggaatc

SEQ ID NO: 522747 - DNA, 33 bp, Homo sapien
ttgagtttatggttaacggcacagagagaagtc

SEQ ID NO: 522748 - DNA, 33 bp, Homo sapien
ttgagtttatggttaatggcacagagagaagtc

SEQ ID NO: 522749 - DNA, 33 bp, Homo sapien
caaggtgataatattacggagtggaggctttgg

SEQ ID NO: 522750 - DNA, 33 bp, Homo sapien
caaggtgataatattagggagtggaggctttgg

SEQ ID NO: 522751 - DNA, 33 bp, Homo sapien
tccttgtatgagggtggaatgcttggagctgcc

SEQ ID NO: 522752 - DNA, 33 bp, Homo sapien
tccttgtatgagggtgtaatgcttggagctgcc

SEQ ID NO: 522753 - DNA, 33 bp, Homo sapien
acatacccatctctaaaaaagtgcagtgccaag

SEQ ID NO: 522754 - DNA, 33 bp, Homo sapien
acatacccatctctaagaaagtgcagtgccaag

SEQ ID NO: 522755 - DNA, 33 bp, Homo sapien
ttctatctcacaataacaagcagtaccccaagg

SEQ ID NO: 522756 - DNA, 33 bp, Homo sapien
ttctatctcacaataataagcagtaccccaagg

SEQ ID NO: 522757 - DNA, 33 bp, Homo sapien
gtgattacccaagcaccgtgattccaaagcttt

SEQ ID NO: 522758 - DNA, 33 bp, Homo sapien
gtgattacccaagcactgtgattccaaagcttt

SEQ ID NO: 522759 - DNA, 33 bp, Homo sapien
caacaaggaatggggcaaagaaaaatggaatga

SEQ ID NO: 522760 - DNA, 33 bp, Homo sapien
caacaaggaatggggcgaagaaaaatggaatga

SEQ ID NO: 522761 - DNA, 33 bp, Homo sapien
acatctccaatacacacaatcattttcgttttc

SEQ ID NO: 522762 - DNA, 33 bp, Homo sapien
acatctccaatacacataatcattttcgttttc

SEQ ID NO: 522763 - DNA, 33 bp, Homo sapien
ccttccagtcattcacaactcagcttaaatgtc

SEQ ID NO: 522764 - DNA, 33 bp, Homo sapien
ccttccagtcattcacgactcagcttaaatgtc

SEQ ID NO: 522765 - DNA, 33 bp, Homo sapien
ttacccactaagttccagatttatttgccttct

SEQ ID NO: 522766 - DNA, 33 bp, Homo sapien
ttacccactaagttccggatttatttgccttct

SEQ ID NO: 522767 - DNA, 33 bp, Homo sapien
agtcactctggacataatacaccttcactgtta

SEQ ID NO: 522768 - DNA, 33 bp, Homo sapien
agtcactctggacatagtacaccttcactgtta

SEQ ID NO: 522769 - DNA, 33 bp, Homo sapien
tcttttcagtatgaaagtgttgctttttcaagt

SEQ ID NO: 522770 - DNA, 33 bp, Homo sapien
tcttttcagtatgaaattgttgctttttcaagt

SEQ ID NO: 522771 - DNA, 33 bp, Homo sapien
gtagatgcaagtatagaaaaaaggacacaatgg

SEQ ID NO: 522772 - DNA, 33 bp, Homo sapien
gtagatgcaagtataggaaaaaggacacaatgg

SEQ ID NO: 522773 - DNA, 33 bp, Homo sapien
tgccctagctgcagtacagaggatgccttttag

SEQ ID NO: 522774 - DNA, 33 bp, Homo sapien
tgccctagctgcagtatagaggatgccttttag

SEQ ID NO: 522775 - DNA, 33 bp, Homo sapien
aggcaaatgaatgatacagtctttggcataacc

SEQ ID NO: 522776 - DNA, 33 bp, Homo sapien
aggcaaatgaatgatatagtctttggcataacc

SEQ ID NO: 522777 - DNA, 33 bp, Homo sapien
agtccacatagagttacaggaccaactgccttg

SEQ ID NO: 522778 - DNA, 33 bp, Homo sapien
agtccacatagagttataggaccaactgccttg

SEQ ID NO: 522779 - DNA, 33 bp, Homo sapien
caagaaaagtctctcaaggtcattactatactt

SEQ ID NO: 522780 - DNA, 33 bp, Homo sapien
caagaaaagtctctcatggtcattactatactt

SEQ ID NO: 522781 - DNA, 33 bp, Homo sapien
agacatcatgacaaaaccctgtatcaaccaaaa

SEQ ID NO: 522782 - DNA, 33 bp, Homo sapien
agacatcatgacaaaatcctgtatcaaccaaaa

SEQ ID NO: 522783 - DNA, 33 bp, Homo sapien
gctgtagtcctcattacgcctctctaaaaagcc

SEQ ID NO: 522784 - DNA, 33 bp, Homo sapien
gctgtagtcctcattatgcctctctaaaaagcc

SEQ ID NO: 522785 - DNA, 33 bp, Homo sapien
tcatagaggtaataaagaagttccatgcactct

SEQ ID NO: 522786 - DNA, 33 bp, Homo sapien
tcatagaggtaataaataagttccatgcactct

SEQ ID NO: 522787 - DNA, 33 bp, Homo sapien
ttttaaggacagttgcagatcccacaatcttaa

SEQ ID NO: 522788 - DNA, 33 bp, Homo sapien
ttttaaggacagttgcggatcccacaatcttaa

SEQ ID NO: 522789 - DNA, 33 bp, Homo sapien
tataatgatctacagacggttttactaatgtaa

SEQ ID NO: 522790 - DNA, 33 bp, Homo sapien
tataatgatctacagagggttttactaatgtaa

SEQ ID NO: 522791 - DNA, 33 bp, Homo sapien
ggcaggggtgaattaaaactatgcatatttggg

SEQ ID NO: 522792 - DNA, 33 bp, Homo sapien
ggcaggggtgaattaatactatgcatatttggg

SEQ ID NO: 522793 - DNA, 33 bp, Homo sapien
cgactagctaagactaccgttgtgcaccaacac

SEQ ID NO: 522794 - DNA, 33 bp, Homo sapien
cgactagctaagactatcgttgtgcaccaacac

SEQ ID NO: 522795 - DNA, 33 bp, Homo sapien
ctcaagctctacacaaatgcttcctgtaattcc

SEQ ID NO: 522796 - DNA, 33 bp, Homo sapien
ctcaagctctacacaactgcttcctgtaattcc

SEQ ID NO: 522797 - DNA, 33 bp, Homo sapien
gcagaaaactgaatgactaataggagggcatta

SEQ ID NO: 522798 - DNA, 33 bp, Homo sapien
gcagaaaactgaatgattaataggagggcatta

SEQ ID NO: 522799 - DNA, 33 bp, Homo sapien
attagccaactctagacacatactgaattcatt

SEQ ID NO: 522800 - DNA, 33 bp, Homo sapien
attagccaactctagagacatactgaattcatt

SEQ ID NO: 522801 - DNA, 33 bp, Homo sapien
tggaggacaagggcacaagcagaaacatacaag

SEQ ID NO: 522802 - DNA, 33 bp, Homo sapien
tggaggacaagggcaccagcagaaacatacaag

SEQ ID NO: 522803 - DNA, 33 bp, Homo sapien
tcaagtctcaaattacaaaagggttaaggaaat

SEQ ID NO: 522804 - DNA, 33 bp, Homo sapien
tcaagtctcaaattacgaaagggttaaggaaat

SEQ ID NO: 522805 - DNA, 33 bp, Homo sapien
tcagtgctaaaaataacggaatgagaaaagaaa

SEQ ID NO: 522806 - DNA, 33 bp, Homo sapien
tcagtgctaaaaataatggaatgagaaaagaaa

SEQ ID NO: 522807 - DNA, 33 bp, Homo sapien
caacaagtaaatgttcactggacatcgatattt

SEQ ID NO: 522808 - DNA, 33 bp, Homo sapien
caacaagtaaatgttctctggacatcgatattt

SEQ ID NO: 522809 - DNA, 33 bp, Homo sapien
atgtaaattaaaatccacattatgtataagcat

SEQ ID NO: 522810 - DNA, 33 bp, Homo sapien
atgtaaattaaaatcctcattatgtataagcat

SEQ ID NO: 522811 - DNA, 33 bp, Homo sapien
atagtttgcaacctagaaactaatggtcttggc

SEQ ID NO: 522812 - DNA, 33 bp, Homo sapien
atagtttgcaacctaggaactaatggtcttggc

SEQ ID NO: 522813 - DNA, 33 bp, Homo sapien
ttcaagccgttactgtcaataaagcaccccagc

SEQ ID NO: 522814 - DNA, 33 bp, Homo sapien
ttcaagccgttactgtgaataaagcaccccagc

SEQ ID NO: 522815 - DNA, 33 bp, Homo sapien
atttaaaaattatgtgaagcccctagaggattt

SEQ ID NO: 522816 - DNA, 33 bp, Homo sapien
atttaaaaattatgtgtagcccctagaggattt

SEQ ID NO: 522817 - DNA, 33 bp, Homo sapien
acacacataatcaaagaaaatttaatgagtatt

SEQ ID NO: 522818 - DNA, 33 bp, Homo sapien
acacacataatcaaaggaaatttaatgagtatt

SEQ ID NO: 522819 - DNA, 33 bp, Homo sapien
gaaatgtaaaccattcacacaattcaattaaac

SEQ ID NO: 522820 - DNA, 33 bp, Homo sapien
gaaatgtaaaccattcgcacaattcaattaaac

SEQ ID NO: 522821 - DNA, 33 bp, Homo sapien
atgctctttctaacaggctactatgcctctcca

SEQ ID NO: 522822 - DNA, 33 bp, Homo sapien
atgctctttctaacagtctactatgcctctcca

SEQ ID NO: 522823 - DNA, 33 bp, Homo sapien
ctggattatcttgaaaaaaaacactccattatc

SEQ ID NO: 522824 - DNA, 33 bp, Homo sapien
ctggattatcttgaaagaaaacactccattatc

SEQ ID NO: 522825 - DNA, 33 bp, Homo sapien
atactacaggcaccaactgctaactttcagaac

SEQ ID NO: 522826 - DNA, 33 bp, Homo sapien
atactacaggcaccaattgctaactttcagaac

SEQ ID NO: 522827 - DNA, 33 bp, Homo sapien
tctgagtggaaaaaaaacaagtagactacatat

SEQ ID NO: 522828 - DNA, 33 bp, Homo sapien
tctgagtggaaaaaaaccaagtagactacatat

SEQ ID NO: 522829 - DNA, 33 bp, Homo sapien
cttgtccagtgagaacaacatgcccaacctggt

SEQ ID NO: 522830 - DNA, 33 bp, Homo sapien
cttgtccagtgagaacgacatgcccaacctggt

SEQ ID NO: 522831 - DNA, 33 bp, Homo sapien
aagaaaaagagtagaacacaaatatgcaaagtc

SEQ ID NO: 522832 - DNA, 33 bp, Homo sapien
aagaaaaagagtagaatacaaatatgcaaagtc

SEQ ID NO: 522833 - DNA, 33 bp, Homo sapien
tccactaggttggtacaaaaattctgtccttga

SEQ ID NO: 522834 - DNA, 33 bp, Homo sapien
tccactaggttggtactaaaattctgtccttga

SEQ ID NO: 522835 - DNA, 33 bp, Homo sapien
ttattcatttatccaccaatgggaacttgggtt

SEQ ID NO: 522836 - DNA, 33 bp, Homo sapien
ttattcatttatccactaatgggaacttgggtt

SEQ ID NO: 522837 - DNA, 33 bp, Homo sapien
ctttattctggagtaacatatcagatgagaagt

SEQ ID NO: 522838 - DNA, 33 bp, Homo sapien
ctttattctggagtaagatatcagatgagaagt

SEQ ID NO: 522839 - DNA, 33 bp, Homo sapien
gcacacacttttaaagcaactctagctctccag

SEQ ID NO: 522840 - DNA, 33 bp, Homo sapien
gcacacacttttaaagtaactctagctctccag

SEQ ID NO: 522841 - DNA, 33 bp, Homo sapien
taatatgtccagtaataacatatgctccttgct

SEQ ID NO: 522842 - DNA, 33 bp, Homo sapien
taatatgtccagtaatcacatatgctccttgct

SEQ ID NO: 522843 - DNA, 33 bp, Homo sapien
gtgactaatgagaaaacaccgctttatgattct

SEQ ID NO: 522844 - DNA, 33 bp, Homo sapien
gtgactaatgagaaaagaccgctttatgattct

SEQ ID NO: 522845 - DNA, 33 bp, Homo sapien
taatcaagttataaacccagtcatctcctcaga

SEQ ID NO: 522846 - DNA, 33 bp, Homo sapien
taatcaagttataaacgcagtcatctcctcaga

SEQ ID NO: 522847 - DNA, 33 bp, Homo sapien
acacttaagacttccacgtggctttcatttttc

SEQ ID NO: 522848 - DNA, 33 bp, Homo sapien
acacttaagacttccatgtggctttcatttttc

SEQ ID NO: 522849 - DNA, 33 bp, Homo sapien
tgtcctgcagacatcaatgaagaacctagaaca

SEQ ID NO: 522850 - DNA, 33 bp, Homo sapien
tgtcctgcagacatcagtgaagaacctagaaca

SEQ ID NO: 522851 - DNA, 33 bp, Homo sapien
cacaatgcaaccacaaatattaacaacagaata

SEQ ID NO: 522852 - DNA, 33 bp, Homo sapien
cacaatgcaaccacaagtattaacaacagaata

SEQ ID NO: 522853 - DNA, 33 bp, Homo sapien
aaaactgttagtaaaccgctcaaaacatataga

SEQ ID NO: 522854 - DNA, 33 bp, Homo sapien
aaaactgttagtaaactgctcaaaacatataga

SEQ ID NO: 522855 - DNA, 33 bp, Homo sapien
aaataattcatgtccactagatagatcaagatg

SEQ ID NO: 522856 - DNA, 33 bp, Homo sapien
aaataattcatgtccattagatagatcaagatg

SEQ ID NO: 522857 - DNA, 33 bp, Homo sapien
taccctaatgaaaatgcagataaactcaaggtc

SEQ ID NO: 522858 - DNA, 33 bp, Homo sapien
taccctaatgaaaatggagataaactcaaggtc

SEQ ID NO: 522859 - DNA, 33 bp, Homo sapien
ttttcctggccacccaaaagattgctccatcaa

SEQ ID NO: 522860 - DNA, 33 bp, Homo sapien
ttttcctggccacccagaagattgctccatcaa

SEQ ID NO: 522861 - DNA, 33 bp, Homo sapien
aatttgtaacctaatgaagtatagtggttctcc

SEQ ID NO: 522862 - DNA, 33 bp, Homo sapien
aatttgtaacctaatgtagtatagtggttctcc

SEQ ID NO: 522863 - DNA, 33 bp, Homo sapien
ttgacttgaattaaaaattgtaagatttggcaa

SEQ ID NO: 522864 - DNA, 33 bp, Homo sapien
ttgacttgaattaaaagttgtaagatttggcaa

SEQ ID NO: 522865 - DNA, 33 bp, Homo sapien
tgtagccccttccaccaaataggttagctctca

SEQ ID NO: 522866 - DNA, 33 bp, Homo sapien
tgtagccccttccaccgaataggttagctctca

SEQ ID NO: 522867 - DNA, 33 bp, Homo sapien
accacctatgcattaactcagattctttccata

SEQ ID NO: 522868 - DNA, 33 bp, Homo sapien
accacctatgcattaattcagattctttccata

SEQ ID NO: 522869 - DNA, 33 bp, Homo sapien
tgttgttctgatataaccatttaaagctacaga

SEQ ID NO: 522870 - DNA, 33 bp, Homo sapien
tgttgttctgatataatcatttaaagctacaga

SEQ ID NO: 522871 - DNA, 33 bp, Homo sapien
tttgaagcacatggtaaatatttcactataaaa

SEQ ID NO: 522872 - DNA, 33 bp, Homo sapien
tttgaagcacatggtatatatttcactataaaa

SEQ ID NO: 522873 - DNA, 33 bp, Homo sapien
aagccaaacatggtaacgatgtatggtattatg

SEQ ID NO: 522874 - DNA, 33 bp, Homo sapien
aagccaaacatggtaatgatgtatggtattatg

SEQ ID NO: 522875 - DNA, 33 bp, Homo sapien
tagttccaaatatcaaaaagtgtgtgatctatg

SEQ ID NO: 522876 - DNA, 33 bp, Homo sapien
tagttccaaatatcaagaagtgtgtgatctatg

SEQ ID NO: 522877 - DNA, 33 bp, Homo sapien
ggtcctaagttggttcaatcacactaggtttca

SEQ ID NO: 522878 - DNA, 33 bp, Homo sapien
ggtcctaagttggttcgatcacactaggtttca

SEQ ID NO: 522879 - DNA, 33 bp, Homo sapien
catctatgagttcaaacctaaaatctattaaaa

SEQ ID NO: 522880 - DNA, 33 bp, Homo sapien
catctatgagttcaaatctaaaatctattaaaa

SEQ ID NO: 522881 - DNA, 33 bp, Homo sapien
tattagttccaggtggcaatttagacctatgtt

SEQ ID NO: 522882 - DNA, 33 bp, Homo sapien
tattagttccaggtggtaatttagacctatgtt

SEQ ID NO: 522883 - DNA, 33 bp, Homo sapien
catatgatctaacctgcataatgacccatctgc

SEQ ID NO: 522884 - DNA, 33 bp, Homo sapien
catatgatctaacctgtataatgacccatctgc

SEQ ID NO: 522885 - DNA, 33 bp, Homo sapien
atgtaacagatgaactcaaactcagatttcagg

SEQ ID NO: 522886 - DNA, 33 bp, Homo sapien
atgtaacagatgaactgaaactcagatttcagg

SEQ ID NO: 522887 - DNA, 33 bp, Homo sapien
tgtggaccatactatacgtagcaaagctttaga

SEQ ID NO: 522888 - DNA, 33 bp, Homo sapien
tgtggaccatactatatgtagcaaagctttaga

SEQ ID NO: 522889 - DNA, 33 bp, Homo sapien
aaatgaaggcatatcaaaacgataatcaaaaac

SEQ ID NO: 522890 - DNA, 33 bp, Homo sapien
aaatgaaggcatatcagaacgataatcaaaaac

SEQ ID NO: 522891 - DNA, 33 bp, Homo sapien
cgatgtgagaagtaaaagcagttatggaggggg

SEQ ID NO: 522892 - DNA, 33 bp, Homo sapien
cgatgtgagaagtaaaggcagttatggaggggg

SEQ ID NO: 522893 - DNA, 33 bp, Homo sapien
cagccaaaagctagtacatatcataagcaggca

SEQ ID NO: 522894 - DNA, 33 bp, Homo sapien
cagccaaaagctagtagatatcataagcaggca

SEQ ID NO: 522895 - DNA, 33 bp, Homo sapien
atgtccctattctcaaatattcaatcagtgtat

SEQ ID NO: 522896 - DNA, 33 bp, Homo sapien
atgtccctattctcaagtattcaatcagtgtat

SEQ ID NO: 522897 - DNA, 33 bp, Homo sapien
tctttcccccgttggacatttataagattggaa

SEQ ID NO: 522898 - DNA, 33 bp, Homo sapien
tctttcccccgttggatatttataagattggaa

SEQ ID NO: 522899 - DNA, 33 bp, Homo sapien
gatccctctctgtataaatattcgtgcattttt

SEQ ID NO: 522900 - DNA, 33 bp, Homo sapien
gatccctctctgtatatatattcgtgcattttt

SEQ ID NO: 522901 - DNA, 33 bp, Homo sapien
gatgggggaatttagacgcaaatatgcttgatt

SEQ ID NO: 522902 - DNA, 33 bp, Homo sapien
gatgggggaatttagatgcaaatatgcttgatt

SEQ ID NO: 522903 - DNA, 33 bp, Homo sapien
taatctagaaaaaagacggaaagtgaatgagac

SEQ ID NO: 522904 - DNA, 33 bp, Homo sapien
taatctagaaaaaagatggaaagtgaatgagac

SEQ ID NO: 522905 - DNA, 33 bp, Homo sapien
tttatgcaaaacaaatcaaagacttaaatgtaa

SEQ ID NO: 522906 - DNA, 33 bp, Homo sapien
tttatgcaaaacaaatgaaagacttaaatgtaa

SEQ ID NO: 522907 - DNA, 33 bp, Homo sapien
cttctaacattaaacaatgagggaaatgtgagt

SEQ ID NO: 522908 - DNA, 33 bp, Homo sapien
cttctaacattaaacattgagggaaatgtgagt

SEQ ID NO: 522909 - DNA, 33 bp, Homo sapien
attcttatttgtatcccgagctatgcttcaaac

SEQ ID NO: 522910 - DNA, 33 bp, Homo sapien
attcttatttgtatcctgagctatgcttcaaac

SEQ ID NO: 522911 - DNA, 33 bp, Homo sapien
attcactaagaagcacacttttctgacatagtc

SEQ ID NO: 522912 - DNA, 33 bp, Homo sapien
attcactaagaagcacgcttttctgacatagtc

SEQ ID NO: 522913 - DNA, 33 bp, Homo sapien
ctttgactgaagaacccgaaaaagatcccaagt

SEQ ID NO: 522914 - DNA, 33 bp, Homo sapien
ctttgactgaagaacctgaaaaagatcccaagt

SEQ ID NO: 522915 - DNA, 33 bp, Homo sapien
cgcagtatggttgagcacatcaaatttacaata

SEQ ID NO: 522916 - DNA, 33 bp, Homo sapien
cgcagtatggttgagcgcatcaaatttacaata

SEQ ID NO: 522917 - DNA, 33 bp, Homo sapien
agaatgcaaagaataccgaaaggttgtttagct

SEQ ID NO: 522918 - DNA, 33 bp, Homo sapien
agaatgcaaagaatacggaaaggttgtttagct

SEQ ID NO: 522919 - DNA, 33 bp, Homo sapien
gatctttttaatcaaccagatgacatcatgggg

SEQ ID NO: 522920 - DNA, 33 bp, Homo sapien
gatctttttaatcaacgagatgacatcatgggg

SEQ ID NO: 522921 - DNA, 33 bp, Homo sapien
ggcaggtcatcccatcaagtatacatttctcag

SEQ ID NO: 522922 - DNA, 33 bp, Homo sapien
ggcaggtcatcccatcgagtatacatttctcag

SEQ ID NO: 522923 - DNA, 33 bp, Homo sapien
gggtgtgcaattaggaaaaatgatgactttcat

SEQ ID NO: 522924 - DNA, 33 bp, Homo sapien
gggtgtgcaattaggagaaatgatgactttcat

SEQ ID NO: 522925 - DNA, 33 bp, Homo sapien
tatactgccccccaaaattgagatcatattcta

SEQ ID NO: 522926 - DNA, 33 bp, Homo sapien
tatactgccccccaaagttgagatcatattcta

SEQ ID NO: 522927 - DNA, 33 bp, Homo sapien
tgtatgtttgtctttacgccagtatctttatgc

SEQ ID NO: 522928 - DNA, 33 bp, Homo sapien
tgtatgtttgtctttatgccagtatctttatgc

SEQ ID NO: 522929 - DNA, 33 bp, Homo sapien
tacatgcaaaaaattacagagtctcactctgga

SEQ ID NO: 522930 - DNA, 33 bp, Homo sapien
tacatgcaaaaaattatagagtctcactctgga

SEQ ID NO: 522931 - DNA, 33 bp, Homo sapien
aatcttgaaggtagcaaagtagaagcaaatacg

SEQ ID NO: 522932 - DNA, 33 bp, Homo sapien
aatcttgaaggtagcagagtagaagcaaatacg

SEQ ID NO: 522933 - DNA, 33 bp, Homo sapien
atgaaataaaaaacagatgaacaatgtaaaagt

SEQ ID NO: 522934 - DNA, 33 bp, Homo sapien
atgaaataaaaaacaggtgaacaatgtaaaagt

SEQ ID NO: 522935 - DNA, 33 bp, Homo sapien
tacagggaaatagttcaaaaatatcacaagatt

SEQ ID NO: 522936 - DNA, 33 bp, Homo sapien
tacagggaaatagttcgaaaatatcacaagatt

SEQ ID NO: 522937 - DNA, 33 bp, Homo sapien
cttttagtagcccatgcaagatgttactgaaga

SEQ ID NO: 522938 - DNA, 33 bp, Homo sapien
cttttagtagcccatgtaagatgttactgaaga

SEQ ID NO: 522939 - DNA, 33 bp, Homo sapien
gacaaatgccttttcacgtcttagcactaggct

SEQ ID NO: 522940 - DNA, 33 bp, Homo sapien
gacaaatgccttttcatgtcttagcactaggct

SEQ ID NO: 522941 - DNA, 33 bp, Homo sapien
attacgtaatggtaaacggatcaattcatcaag

SEQ ID NO: 522942 - DNA, 33 bp, Homo sapien
attacgtaatggtaaatggatcaattcatcaag

SEQ ID NO: 522943 - DNA, 33 bp, Homo sapien
ttaaaagtgcttaaaaatgtgtgacacttcccc

SEQ ID NO: 522944 - DNA, 33 bp, Homo sapien
ttaaaagtgcttaaaagtgtgtgacacttcccc

SEQ ID NO: 522945 - DNA, 33 bp, Homo sapien
tttcaagaccaagatgccaaaaaagcaattgca

SEQ ID NO: 522946 - DNA, 33 bp, Homo sapien
tttcaagaccaagatgtcaaaaaagcaattgca

SEQ ID NO: 522947 - DNA, 33 bp, Homo sapien
agaaagctatgtctgaatattggagtgataaag

SEQ ID NO: 522948 - DNA, 33 bp, Homo sapien
agaaagctatgtctgagtattggagtgataaag

SEQ ID NO: 522949 - DNA, 33 bp, Homo sapien
tctgaaatggaaatgtaaatgagtaaacacgct

SEQ ID NO: 522950 - DNA, 33 bp, Homo sapien
tctgaaatggaaatgtgaatgagtaaacacgct

SEQ ID NO: 522951 - DNA, 33 bp, Homo sapien
gccagctaacgatgtaagagcacagagtgatgc

SEQ ID NO: 522952 - DNA, 33 bp, Homo sapien
gccagctaacgatgtaggagcacagagtgatgc

SEQ ID NO: 522953 - DNA, 33 bp, Homo sapien
aaacattaagatgcacaaagttcagtttttctc

SEQ ID NO: 522954 - DNA, 33 bp, Homo sapien
aaacattaagatgcacgaagttcagtttttctc

SEQ ID NO: 522955 - DNA, 33 bp, Homo sapien
atattttattcaggaaccttttatctcttttcc

SEQ ID NO: 522956 - DNA, 33 bp, Homo sapien
atattttattcaggaatcttttatctcttttcc

SEQ ID NO: 522957 - DNA, 33 bp, Homo sapien
aatgggaagcccaataagagtcattctgcatct

SEQ ID NO: 522958 - DNA, 33 bp, Homo sapien
aatgggaagcccaataggagtcattctgcatct

SEQ ID NO: 522959 - DNA, 33 bp, Homo sapien
acagttgttgagcccactgctaaaatgtgtttg

SEQ ID NO: 522960 - DNA, 33 bp, Homo sapien
acagttgttgagcccagtgctaaaatgtgtttg

SEQ ID NO: 522961 - DNA, 33 bp, Homo sapien
gagaaaggtatcaaaacatcaatggcatggaag

SEQ ID NO: 522962 - DNA, 33 bp, Homo sapien
gagaaaggtatcaaaatatcaatggcatggaag

SEQ ID NO: 522963 - DNA, 33 bp, Homo sapien
cggtaaatataagccaaaagcctattttatgtg

SEQ ID NO: 522964 - DNA, 33 bp, Homo sapien
cggtaaatataagccagaagcctattttatgtg

SEQ ID NO: 522965 - DNA, 33 bp, Homo sapien
tcttttcctttttgtcaccaaagcaggatttga

SEQ ID NO: 522966 - DNA, 33 bp, Homo sapien
tcttttcctttttgtcgccaaagcaggatttga

SEQ ID NO: 522967 - DNA, 33 bp, Homo sapien
gtagtcttccagattacgtgacatttaagagtt

SEQ ID NO: 522968 - DNA, 33 bp, Homo sapien
gtagtcttccagattatgtgacatttaagagtt

SEQ ID NO: 522969 - DNA, 33 bp, Homo sapien
aaaagcatggacatagaaaggtagcttgacagc

SEQ ID NO: 522970 - DNA, 33 bp, Homo sapien
aaaagcatggacataggaaggtagcttgacagc

SEQ ID NO: 522971 - DNA, 33 bp, Homo sapien
tatacttgaaccatgaatatcagtacttgcatt

SEQ ID NO: 522972 - DNA, 33 bp, Homo sapien
tatacttgaaccatgactatcagtacttgcatt

SEQ ID NO: 522973 - DNA, 33 bp, Homo sapien
tttggacgccaaacaaaagctcgggatatggag

SEQ ID NO: 522974 - DNA, 33 bp, Homo sapien
tttggacgccaaacaagagctcgggatatggag

SEQ ID NO: 522975 - DNA, 33 bp, Homo sapien
agagtgacaaaatcaaaagttcaataaatgcag

SEQ ID NO: 522976 - DNA, 33 bp, Homo sapien
agagtgacaaaatcaagagttcaataaatgcag

SEQ ID NO: 522977 - DNA, 33 bp, Homo sapien
agagccactataacaccggacaaaccagcaatc

SEQ ID NO: 522978 - DNA, 33 bp, Homo sapien
agagccactataacactggacaaaccagcaatc

SEQ ID NO: 522979 - DNA, 33 bp, Homo sapien
caatcagtgtggtcacaacgtgtgggctccctt

SEQ ID NO: 522980 - DNA, 33 bp, Homo sapien
caatcagtgtggtcacgacgtgtgggctccctt

SEQ ID NO: 522981 - DNA, 33 bp, Homo sapien
caaggaactttagcacaagtgattccattttga

SEQ ID NO: 522982 - DNA, 33 bp, Homo sapien
caaggaactttagcacgagtgattccattttga

SEQ ID NO: 522983 - DNA, 33 bp, Homo sapien
tgatgtcggctacaaccaggtcgttttccatct

SEQ ID NO: 522984 - DNA, 33 bp, Homo sapien
tgatgtcggctacaactaggtcgttttccatct

SEQ ID NO: 522985 - DNA, 33 bp, Homo sapien
ctgcattctcctcaagactgtgattatcaccag

SEQ ID NO: 522986 - DNA, 33 bp, Homo sapien
ctgcattctcctcaaggctgtgattatcaccag

SEQ ID NO: 522987 - DNA, 33 bp, Homo sapien
tggggaaatgaataggccaaaaaggaagatatt

SEQ ID NO: 522988 - DNA, 33 bp, Homo sapien
tggggaaatgaataggtcaaaaaggaagatatt

SEQ ID NO: 522989 - DNA, 33 bp, Homo sapien
taaaaccaagatgtcaataggacctcagtccct

SEQ ID NO: 522990 - DNA, 33 bp, Homo sapien
taaaaccaagatgtcagtaggacctcagtccct

SEQ ID NO: 522991 - DNA, 33 bp, Homo sapien
tgtctctgaggctccaagtaaaacaaagcattt

SEQ ID NO: 522992 - DNA, 33 bp, Homo sapien
tgtctctgaggctccacgtaaaacaaagcattt

SEQ ID NO: 522993 - DNA, 33 bp, Homo sapien
ggccagaatgagctttcaaaatgtacatcagac

SEQ ID NO: 522994 - DNA, 33 bp, Homo sapien
ggccagaatgagctttgaaaatgtacatcagac

SEQ ID NO: 522995 - DNA, 33 bp, Homo sapien
acgttccatgtgcacaatctatgatgaagctga

SEQ ID NO: 522996 - DNA, 33 bp, Homo sapien
acgttccatgtgcacagtctatgatgaagctga

SEQ ID NO: 522997 - DNA, 33 bp, Homo sapien
ataagatgtgaagagaataagaatgacaccaat

SEQ ID NO: 522998 - DNA, 33 bp, Homo sapien
ataagatgtgaagagagtaagaatgacaccaat

SEQ ID NO: 522999 - DNA, 33 bp, Homo sapien
tggtcccagggtattaggaggctctctgaagtt

SEQ ID NO: 523000 - DNA, 33 bp, Homo sapien
tggtcccagggtattatgaggctctctgaagtt

SEQ ID NO: 523001 - DNA, 33 bp, Homo sapien
taatccttccaagaaccgaaaagcattggaagg

SEQ ID NO: 523002 - DNA, 33 bp, Homo sapien
taatccttccaagaactgaaaagcattggaagg

SEQ ID NO: 523003 - DNA, 33 bp, Homo sapien
tgatccacaaatacagaagcttacataatattt

SEQ ID NO: 523004 - DNA, 33 bp, Homo sapien
tgatccacaaatacaggagcttacataatattt

SEQ ID NO: 523005 - DNA, 33 bp, Homo sapien
gaaagtcaggcttaaaagctagaactggtcccc

SEQ ID NO: 523006 - DNA, 33 bp, Homo sapien
gaaagtcaggcttaaaggctagaactggtcccc

SEQ ID NO: 523007 - DNA, 33 bp, Homo sapien
attggtagctggaaaccggccatattgggagta

SEQ ID NO: 523008 - DNA, 33 bp, Homo sapien
attggtagctggaaactggccatattgggagta

SEQ ID NO: 523009 - DNA, 33 bp, Homo sapien
aatcatgtgagatgtaccaaacatttagtcgta

SEQ ID NO: 523010 - DNA, 33 bp, Homo sapien
aatcatgtgagatgtatcaaacatttagtcgta

SEQ ID NO: 523011 - DNA, 33 bp, Homo sapien
aaagactcttcattgcaccaggggctcttcttt

SEQ ID NO: 523012 - DNA, 33 bp, Homo sapien
aaagactcttcattgcgccaggggctcttcttt

SEQ ID NO: 523013 - DNA, 33 bp, Homo sapien
tgagggaaagaatgctcacttacacaggatgca

SEQ ID NO: 523014 - DNA, 33 bp, Homo sapien
tgagggaaagaatgctgacttacacaggatgca

SEQ ID NO: 523015 - DNA, 33 bp, Homo sapien
atttgatattcctccaaaggtaattgtgcggct

SEQ ID NO: 523016 - DNA, 33 bp, Homo sapien
atttgatattcctccagaggtaattgtgcggct

SEQ ID NO: 523017 - DNA, 33 bp, Homo sapien
tatagtatgtgctcaaagtgtagtactctgtag

SEQ ID NO: 523018 - DNA, 33 bp, Homo sapien
tatagtatgtgctcaatgtgtagtactctgtag

SEQ ID NO: 523019 - DNA, 33 bp, Homo sapien
atgattctttatctcaaaacattcagtttacaa

SEQ ID NO: 523020 - DNA, 33 bp, Homo sapien
atgattctttatctcagaacattcagtttacaa

SEQ ID NO: 523021 - DNA, 33 bp, Homo sapien
gtcaaactgacattcaatcccaatgaaacagat

SEQ ID NO: 523022 - DNA, 33 bp, Homo sapien
gtcaaactgacattcagtcccaatgaaacagat

SEQ ID NO: 523023 - DNA, 33 bp, Homo sapien
atcctttgaagttttacaccagaatcactgaaa

SEQ ID NO: 523024 - DNA, 33 bp, Homo sapien
atcctttgaagttttagaccagaatcactgaaa

SEQ ID NO: 523025 - DNA, 33 bp, Homo sapien
tggaacactagaagagaaaaacaggtggcttgt

SEQ ID NO: 523026 - DNA, 33 bp, Homo sapien
tggaacactagaagaggaaaacaggtggcttgt

SEQ ID NO: 523027 - DNA, 33 bp, Homo sapien
gattctaagtgccttacagattagatagaagtc

SEQ ID NO: 523028 - DNA, 33 bp, Homo sapien
gattctaagtgccttatagattagatagaagtc

SEQ ID NO: 523029 - DNA, 33 bp, Homo sapien
aacagtggtttcccaaaggagtgtcagttgtat

SEQ ID NO: 523030 - DNA, 33 bp, Homo sapien
aacagtggtttcccaagggagtgtcagttgtat

SEQ ID NO: 523031 - DNA, 33 bp, Homo sapien
tcttgctccacggagaataagtgtttatggtat

SEQ ID NO: 523032 - DNA, 33 bp, Homo sapien
tcttgctccacggagagtaagtgtttatggtat

SEQ ID NO: 523033 - DNA, 33 bp, Homo sapien
ctgcaagtagagccaaatgttctcaagtgtttc

SEQ ID NO: 523034 - DNA, 33 bp, Homo sapien
ctgcaagtagagccaactgttctcaagtgtttc

SEQ ID NO: 523035 - DNA, 33 bp, Homo sapien
gctttgtctggactgaatatgcattgatctctt

SEQ ID NO: 523036 - DNA, 33 bp, Homo sapien
gctttgtctggactgactatgcattgatctctt

SEQ ID NO: 523037 - DNA, 33 bp, Homo sapien
agatcagaaaggcatacaggaagtctcattttt

SEQ ID NO: 523038 - DNA, 33 bp, Homo sapien
agatcagaaaggcatagaggaagtctcattttt

SEQ ID NO: 523039 - DNA, 33 bp, Homo sapien
attgaatgtcacataacggtttctgagataata

SEQ ID NO: 523040 - DNA, 33 bp, Homo sapien
attgaatgtcacataatggtttctgagataata

SEQ ID NO: 523041 - DNA, 33 bp, Homo sapien
agaaggacattacagaagagaatacagaggaat

SEQ ID NO: 523042 - DNA, 33 bp, Homo sapien
agaaggacattacagaggagaatacagaggaat

SEQ ID NO: 523043 - DNA, 33 bp, Homo sapien
agacagcctttatccacgggtctttttatgatc

SEQ ID NO: 523044 - DNA, 33 bp, Homo sapien
agacagcctttatccatgggtctttttatgatc

SEQ ID NO: 523045 - DNA, 33 bp, Homo sapien
tctaagactaactggacgaaagaggctggtggc

SEQ ID NO: 523046 - DNA, 33 bp, Homo sapien
tctaagactaactggatgaaagaggctggtggc

SEQ ID NO: 523047 - DNA, 33 bp, Homo sapien
tctgcagatatagagcaccaactgtatatacat

SEQ ID NO: 523048 - DNA, 33 bp, Homo sapien
tctgcagatatagagcgccaactgtatatacat

SEQ ID NO: 523049 - DNA, 33 bp, Homo sapien
tcatcaccaacatcaaaatacagggaatttcca

SEQ ID NO: 523050 - DNA, 33 bp, Homo sapien
tcatcaccaacatcaagatacagggaatttcca

SEQ ID NO: 523051 - DNA, 33 bp, Homo sapien
agtggaataataacttcaaggtgtttagagaaa

SEQ ID NO: 523052 - DNA, 33 bp, Homo sapien
agtggaataataactttaaggtgtttagagaaa

SEQ ID NO: 523053 - DNA, 33 bp, Homo sapien
aaagttgtgaagtaagcccatgtttttatctat

SEQ ID NO: 523054 - DNA, 33 bp, Homo sapien
aaagttgtgaagtaaggccatgtttttatctat

SEQ ID NO: 523055 - DNA, 33 bp, Homo sapien
actcacagaaacatcactaccaacaaccagcac

SEQ ID NO: 523056 - DNA, 33 bp, Homo sapien
actcacagaaacatcattaccaacaaccagcac

SEQ ID NO: 523057 - DNA, 33 bp, Homo sapien
actacaaataagtgtaccaaagacatctggttt

SEQ ID NO: 523058 - DNA, 33 bp, Homo sapien
actacaaataagtgtatcaaagacatctggttt

SEQ ID NO: 523059 - DNA, 33 bp, Homo sapien
agtgaaaatgaaaacaccatatcaaaacctgtg

SEQ ID NO: 523060 - DNA, 33 bp, Homo sapien
agtgaaaatgaaaacagcatatcaaaacctgtg

SEQ ID NO: 523061 - DNA, 33 bp, Homo sapien
tgttggaacagcaccactatgaatccatttgct

SEQ ID NO: 523062 - DNA, 33 bp, Homo sapien
tgttggaacagcaccagtatgaatccatttgct

SEQ ID NO: 523063 - DNA, 33 bp, Homo sapien
catctgagaggcagtaaaaatgtaatacaacgc

SEQ ID NO: 523064 - DNA, 33 bp, Homo sapien
catctgagaggcagtacaaatgtaatacaacgc

SEQ ID NO: 523065 - DNA, 33 bp, Homo sapien
tgctaacattttggaaactacatttctgcaacg

SEQ ID NO: 523066 - DNA, 33 bp, Homo sapien
tgctaacattttggaacctacatttctgcaacg

SEQ ID NO: 523067 - DNA, 33 bp, Homo sapien
gtagattctcaataaacgtttgattgcttaatg

SEQ ID NO: 523068 - DNA, 33 bp, Homo sapien
gtagattctcaataaatgtttgattgcttaatg

SEQ ID NO: 523069 - DNA, 33 bp, Homo sapien
tcacagacttggcacactactacttctaataca

SEQ ID NO: 523070 - DNA, 33 bp, Homo sapien
tcacagacttggcacattactacttctaataca

SEQ ID NO: 523071 - DNA, 33 bp, Homo sapien
ccaagcttagaccaacagtagacaaactatagt

SEQ ID NO: 523072 - DNA, 33 bp, Homo sapien
ccaagcttagaccaacggtagacaaactatagt

SEQ ID NO: 523073 - DNA, 33 bp, Homo sapien
aaagctgccaagtaacactggtactataggaag

SEQ ID NO: 523074 - DNA, 33 bp, Homo sapien
aaagctgccaagtaacgctggtactataggaag

SEQ ID NO: 523075 - DNA, 33 bp, Homo sapien
gggaagaaaggtaaaacaggaagctggagaaag

SEQ ID NO: 523076 - DNA, 33 bp, Homo sapien
gggaagaaaggtaaaataggaagctggagaaag

SEQ ID NO: 523077 - DNA, 33 bp, Homo sapien
tttcccaagtaggagaagaaagattttaggata

SEQ ID NO: 523078 - DNA, 33 bp, Homo sapien
tttcccaagtaggagacgaaagattttaggata

SEQ ID NO: 523079 - DNA, 33 bp, Homo sapien
tgcattttggtttcacaaaccttcacataaagt

SEQ ID NO: 523080 - DNA, 33 bp, Homo sapien
tgcattttggtttcactaaccttcacataaagt

SEQ ID NO: 523081 - DNA, 33 bp, Homo sapien
tcatcggcaaccacaacagaggcagctaataat

SEQ ID NO: 523082 - DNA, 33 bp, Homo sapien
tcatcggcaaccacaatagaggcagctaataat

SEQ ID NO: 523083 - DNA, 33 bp, Homo sapien
aggaagagagagaaagaagtagagggtgaaggt

SEQ ID NO: 523084 - DNA, 33 bp, Homo sapien
aggaagagagagaaagtagtagagggtgaaggt

SEQ ID NO: 523085 - DNA, 33 bp, Homo sapien
gtaatgcacctttaaaatatgtagtttctggtt

SEQ ID NO: 523086 - DNA, 33 bp, Homo sapien
gtaatgcacctttaaagtatgtagtttctggtt

SEQ ID NO: 523087 - DNA, 33 bp, Homo sapien
aacactgtgcagtccaacgggttaatcactagc

SEQ ID NO: 523088 - DNA, 33 bp, Homo sapien
aacactgtgcagtccagcgggttaatcactagc

SEQ ID NO: 523089 - DNA, 33 bp, Homo sapien
agcaaattagtctgacaccatgaactctccccc

SEQ ID NO: 523090 - DNA, 33 bp, Homo sapien
agcaaattagtctgacgccatgaactctccccc

SEQ ID NO: 523091 - DNA, 33 bp, Homo sapien
atattaattagactgacaggggaaagaagatat

SEQ ID NO: 523092 - DNA, 33 bp, Homo sapien
atattaattagactgataggggaaagaagatat

SEQ ID NO: 523093 - DNA, 33 bp, Homo sapien
attcaggccctaggaggctaattcttagttgtg

SEQ ID NO: 523094 - DNA, 33 bp, Homo sapien
attcaggccctaggagtctaattcttagttgtg

SEQ ID NO: 523095 - DNA, 33 bp, Homo sapien
tgtatgaaatcagaaaagttggtagttctcttt

SEQ ID NO: 523096 - DNA, 33 bp, Homo sapien
tgtatgaaatcagaaacgttggtagttctcttt

SEQ ID NO: 523097 - DNA, 33 bp, Homo sapien
gtcctaaaatgttagaatagggaatactttgtt

SEQ ID NO: 523098 - DNA, 33 bp, Homo sapien
gtcctaaaatgttagagtagggaatactttgtt

SEQ ID NO: 523099 - DNA, 33 bp, Homo sapien
gagatgaatcttgagtaaagtacctggcgaaga

SEQ ID NO: 523100 - DNA, 33 bp, Homo sapien
gagatgaatcttgagtgaagtacctggcgaaga

SEQ ID NO: 523101 - DNA, 33 bp, Homo sapien
agacagcagaccgcacagatatgaggatgagat

SEQ ID NO: 523102 - DNA, 33 bp, Homo sapien
agacagcagaccgcacggatatgaggatgagat

SEQ ID NO: 523103 - DNA, 33 bp, Homo sapien
tgtctggtgagttgtcagaagaaaaacagatgg

SEQ ID NO: 523104 - DNA, 33 bp, Homo sapien
tgtctggtgagttgtcggaagaaaaacagatgg

SEQ ID NO: 523105 - DNA, 33 bp, Homo sapien
atatgtggtaaactgccaggaagggtacccacc

SEQ ID NO: 523106 - DNA, 33 bp, Homo sapien
atatgtggtaaactgctaggaagggtacccacc

SEQ ID NO: 523107 - DNA, 33 bp, Homo sapien
cttggaaagtcgaccacctgcaaaggagattgg

SEQ ID NO: 523108 - DNA, 33 bp, Homo sapien
cttggaaagtcgaccatctgcaaaggagattgg

SEQ ID NO: 523109 - DNA, 33 bp, Homo sapien
atcaaattcaaaagatcagttcaaaagatcaaa

SEQ ID NO: 523110 - DNA, 33 bp, Homo sapien
atcaaattcaaaagatgagttcaaaagatcaaa

SEQ ID NO: 523111 - DNA, 33 bp, Homo sapien
catagagaggtgatataaatgtctaaggttaca

SEQ ID NO: 523112 - DNA, 33 bp, Homo sapien
catagagaggtgatatgaatgtctaaggttaca

SEQ ID NO: 523113 - DNA, 33 bp, Homo sapien
tctaagcttgctcctagggtgctcatcttgatg

SEQ ID NO: 523114 - DNA, 33 bp, Homo sapien
tctaagcttgctcctatggtgctcatcttgatg

SEQ ID NO: 523115 - DNA, 33 bp, Homo sapien
atcctctttgtactgagattgtaagtgatacga

SEQ ID NO: 523116 - DNA, 33 bp, Homo sapien
atcctctttgtactgatattgtaagtgatacga

SEQ ID NO: 523117 - DNA, 33 bp, Homo sapien
aaatttcaagaattcacagagaacctggagatc

SEQ ID NO: 523118 - DNA, 33 bp, Homo sapien
aaatttcaagaattcatagagaacctggagatc

SEQ ID NO: 523119 - DNA, 33 bp, Homo sapien
taacacgtgtaggacacgaatgaggactggcaa

SEQ ID NO: 523120 - DNA, 33 bp, Homo sapien
taacacgtgtaggacatgaatgaggactggcaa

SEQ ID NO: 523121 - DNA, 33 bp, Homo sapien
aaaataaccaactctgcacggtgacgagattca

SEQ ID NO: 523122 - DNA, 33 bp, Homo sapien
aaaataaccaactctgtacggtgacgagattca

SEQ ID NO: 523123 - DNA, 33 bp, Homo sapien
atcataagaaaatccacgtgtttcccagactcc

SEQ ID NO: 523124 - DNA, 33 bp, Homo sapien
atcataagaaaatccatgtgtttcccagactcc

SEQ ID NO: 523125 - DNA, 33 bp, Homo sapien
gtcagggagaggtacaaaatccagagcagccta

SEQ ID NO: 523126 - DNA, 33 bp, Homo sapien
gtcagggagaggtacagaatccagagcagccta

SEQ ID NO: 523127 - DNA, 33 bp, Homo sapien
ctgattgtggtcaagggccaaattctaccctcc

SEQ ID NO: 523128 - DNA, 33 bp, Homo sapien
ctgattgtggtcaaggtccaaattctaccctcc

SEQ ID NO: 523129 - DNA, 33 bp, Homo sapien
tgtgttgtaatatttaaattttctgcagagaca

SEQ ID NO: 523130 - DNA, 33 bp, Homo sapien
tgtgttgtaatatttacattttctgcagagaca

SEQ ID NO: 523131 - DNA, 33 bp, Homo sapien
cagtttttttattctgccacccttagctgtttt

SEQ ID NO: 523132 - DNA, 33 bp, Homo sapien
cagtttttttattctgtcacccttagctgtttt

SEQ ID NO: 523133 - DNA, 33 bp, Homo sapien
ggcctagcaaaaacatcagctgtctactacatg

SEQ ID NO: 523134 - DNA, 33 bp, Homo sapien
ggcctagcaaaaacattagctgtctactacatg

SEQ ID NO: 523135 - DNA, 33 bp, Homo sapien
agagatagaattgtgacgttaagttccccaagt

SEQ ID NO: 523136 - DNA, 33 bp, Homo sapien
agagatagaattgtgatgttaagttccccaagt

SEQ ID NO: 523137 - DNA, 33 bp, Homo sapien
gagagaataaaggacaaggctaaagttttcttc

SEQ ID NO: 523138 - DNA, 33 bp, Homo sapien
gagagaataaaggacatggctaaagttttcttc

SEQ ID NO: 523139 - DNA, 33 bp, Homo sapien
gcttttcattgtactccccttcatgtatttaac

SEQ ID NO: 523140 - DNA, 33 bp, Homo sapien
gcttttcattgtactctccttcatgtatttaac

SEQ ID NO: 523141 - DNA, 33 bp, Homo sapien
cttggctgtttagatcaatctccatggttaacg

SEQ ID NO: 523142 - DNA, 33 bp, Homo sapien
cttggctgtttagatcgatctccatggttaacg

SEQ ID NO: 523143 - DNA, 33 bp, Homo sapien
tgaggtgacttcacaaacctccccagtagtcgc

SEQ ID NO: 523144 - DNA, 33 bp, Homo sapien
tgaggtgacttcacaaccctccccagtagtcgc

SEQ ID NO: 523145 - DNA, 33 bp, Homo sapien
tcatatgcagcattgcgagtgattatgtgattt

SEQ ID NO: 523146 - DNA, 33 bp, Homo sapien
tcatatgcagcattgctagtgattatgtgattt

SEQ ID NO: 523147 - DNA, 33 bp, Homo sapien
tataccataaccaaacaagatttatcacaggaa

SEQ ID NO: 523148 - DNA, 33 bp, Homo sapien
tataccataaccaaacgagatttatcacaggaa

SEQ ID NO: 523149 - DNA, 33 bp, Homo sapien
gctcctgttcaccgggacccagttgaaccccat

SEQ ID NO: 523150 - DNA, 33 bp, Homo sapien
gctcctgttcaccgggtcccagttgaaccccat

SEQ ID NO: 523151 - DNA, 33 bp, Homo sapien
ggaagaaagtatttccagaatcaaggtgccaca

SEQ ID NO: 523152 - DNA, 33 bp, Homo sapien
ggaagaaagtatttccggaatcaaggtgccaca

SEQ ID NO: 523153 - DNA, 33 bp, Homo sapien
gggctgtgtattttaaagcttccattttctatt

SEQ ID NO: 523154 - DNA, 33 bp, Homo sapien
gggctgtgtattttaaggcttccattttctatt

SEQ ID NO: 523155 - DNA, 33 bp, Homo sapien
cttatgtagaaggataactgacttgaggttgag

SEQ ID NO: 523156 - DNA, 33 bp, Homo sapien
cttatgtagaaggatatctgacttgaggttgag

SEQ ID NO: 523157 - DNA, 33 bp, Homo sapien
agctgacactggagaacttaggcttcctgacgc

SEQ ID NO: 523158 - DNA, 33 bp, Homo sapien
agctgacactggagaatttaggcttcctgacgc

SEQ ID NO: 523159 - DNA, 33 bp, Homo sapien
aggatttagaaaaggaactaagtatgtgggctt

SEQ ID NO: 523160 - DNA, 33 bp, Homo sapien
aggatttagaaaaggatctaagtatgtgggctt

SEQ ID NO: 523161 - DNA, 33 bp, Homo sapien
taatgctccaccagaaacctcgaagactttccc

SEQ ID NO: 523162 - DNA, 33 bp, Homo sapien
taatgctccaccagaagcctcgaagactttccc

SEQ ID NO: 523163 - DNA, 33 bp, Homo sapien
gcactaaagtatttctcaatatcttagtgaagg

SEQ ID NO: 523164 - DNA, 33 bp, Homo sapien
gcactaaagtatttctgaatatcttagtgaagg

SEQ ID NO: 523165 - DNA, 33 bp, Homo sapien
acaaaacctcctgttaccaggttgcaaatgtcc

SEQ ID NO: 523166 - DNA, 33 bp, Homo sapien
acaaaacctcctgttatcaggttgcaaatgtcc

SEQ ID NO: 523167 - DNA, 33 bp, Homo sapien
gtatatttcctaacaacctgtttttacctcatc

SEQ ID NO: 523168 - DNA, 33 bp, Homo sapien
gtatatttcctaacaatctgtttttacctcatc

SEQ ID NO: 523169 - DNA, 33 bp, Homo sapien
aaaagccatgaggttgcactaatatctacaatt

SEQ ID NO: 523170 - DNA, 33 bp, Homo sapien
aaaagccatgaggttgtactaatatctacaatt

SEQ ID NO: 523171 - DNA, 33 bp, Homo sapien
tccctaaatcttatcaaccagtgcctacacctc

SEQ ID NO: 523172 - DNA, 33 bp, Homo sapien
tccctaaatcttatcacccagtgcctacacctc

SEQ ID NO: 523173 - DNA, 33 bp, Homo sapien
aaagcaacttccaagaatcacttgttttggcaa

SEQ ID NO: 523174 - DNA, 33 bp, Homo sapien
aaagcaacttccaagactcacttgttttggcaa

SEQ ID NO: 523175 - DNA, 33 bp, Homo sapien
acctttacatatctggacaaaaacacctttaag

SEQ ID NO: 523176 - DNA, 33 bp, Homo sapien
acctttacatatctgggcaaaaacacctttaag

SEQ ID NO: 523177 - DNA, 33 bp, Homo sapien
tgagactctagttatagacggatgtggttttgc

SEQ ID NO: 523178 - DNA, 33 bp, Homo sapien
tgagactctagttatatacggatgtggttttgc

SEQ ID NO: 523179 - DNA, 33 bp, Homo sapien
ttctgtcccactaaaagtttacctagtttggac

SEQ ID NO: 523180 - DNA, 33 bp, Homo sapien
ttctgtcccactaaaattttacctagtttggac

SEQ ID NO: 523181 - DNA, 33 bp, Homo sapien
cattttcagattgtgacggaaggcataagagga

SEQ ID NO: 523182 - DNA, 33 bp, Homo sapien
cattttcagattgtgatggaaggcataagagga

SEQ ID NO: 523183 - DNA, 33 bp, Homo sapien
tcatttagaacaccaaatgtaggcaacacccag

SEQ ID NO: 523184 - DNA, 33 bp, Homo sapien
tcatttagaacaccaagtgtaggcaacacccag

SEQ ID NO: 523185 - DNA, 33 bp, Homo sapien
acacctttatttcaagaaagaaacaccatgctc

SEQ ID NO: 523186 - DNA, 33 bp, Homo sapien
acacctttatttcaagcaagaaacaccatgctc

SEQ ID NO: 523187 - DNA, 33 bp, Homo sapien
gagagcagacttgagaatccccaggcagcttca

SEQ ID NO: 523188 - DNA, 33 bp, Homo sapien
gagagcagacttgagagtccccaggcagcttca

SEQ ID NO: 523189 - DNA, 33 bp, Homo sapien
ccaacttaattcagaaaagagttctccaggctg

SEQ ID NO: 523190 - DNA, 33 bp, Homo sapien
ccaacttaattcagaatagagttctccaggctg

SEQ ID NO: 523191 - DNA, 33 bp, Homo sapien
ctaaaatagttgatttcaaagaaccagattgat

SEQ ID NO: 523192 - DNA, 33 bp, Homo sapien
ctaaaatagttgatttgaaagaaccagattgat

SEQ ID NO: 523193 - DNA, 33 bp, Homo sapien
aaatgaaaagctacaaacatttagggctacctt

SEQ ID NO: 523194 - DNA, 33 bp, Homo sapien
aaatgaaaagctacaagcatttagggctacctt

SEQ ID NO: 523195 - DNA, 33 bp, Homo sapien
atctgaatcaactgtaaactatacttaataata

SEQ ID NO: 523196 - DNA, 33 bp, Homo sapien
atctgaatcaactgtagactatacttaataata

SEQ ID NO: 523197 - DNA, 33 bp, Homo sapien
actaaaatcccaggaaatatgaacactctagac

SEQ ID NO: 523198 - DNA, 33 bp, Homo sapien
actaaaatcccaggaactatgaacactctagac

SEQ ID NO: 523199 - DNA, 33 bp, Homo sapien
gaactggtagtcaagaaacaagccaaagtccac

SEQ ID NO: 523200 - DNA, 33 bp, Homo sapien
gaactggtagtcaagatacaagccaaagtccac

SEQ ID NO: 523201 - DNA, 33 bp, Homo sapien
atgcctccaagaagtacgggattgtgttaaatg

SEQ ID NO: 523202 - DNA, 33 bp, Homo sapien
atgcctccaagaagtatgggattgtgttaaatg

SEQ ID NO: 523203 - DNA, 33 bp, Homo sapien
ttaccctgttgccacaataatgctattgccata

SEQ ID NO: 523204 - DNA, 33 bp, Homo sapien
ttaccctgttgccacactaatgctattgccata

SEQ ID NO: 523205 - DNA, 33 bp, Homo sapien
ccatttgcccatcccaaacagaggtagcctcct

SEQ ID NO: 523206 - DNA, 33 bp, Homo sapien
ccatttgcccatcccagacagaggtagcctcct

SEQ ID NO: 523207 - DNA, 33 bp, Homo sapien
acagcctcccatgcaaagaaattagatgaccgt

SEQ ID NO: 523208 - DNA, 33 bp, Homo sapien
acagcctcccatgcaaggaaattagatgaccgt

SEQ ID NO: 523209 - DNA, 33 bp, Homo sapien
ttcatagtctctggacagaagagccaaaatgtg

SEQ ID NO: 523210 - DNA, 33 bp, Homo sapien
ttcatagtctctggacggaagagccaaaatgtg

SEQ ID NO: 523211 - DNA, 33 bp, Homo sapien
agagaaggatttcataaagtctttccatttagc

SEQ ID NO: 523212 - DNA, 33 bp, Homo sapien
agagaaggatttcatacagtctttccatttagc

SEQ ID NO: 523213 - DNA, 33 bp, Homo sapien
agcaggccaattcagactcaaccggcctaggac

SEQ ID NO: 523214 - DNA, 33 bp, Homo sapien
agcaggccaattcagagtcaaccggcctaggac

SEQ ID NO: 523215 - DNA, 33 bp, Homo sapien
tgcttagaaaaactcaatctgtaatccaaaata

SEQ ID NO: 523216 - DNA, 33 bp, Homo sapien
tgcttagaaaaactcagtctgtaatccaaaata

SEQ ID NO: 523217 - DNA, 33 bp, Homo sapien
tttgtgtacatccttacgtgctgggtgagtctc

SEQ ID NO: 523218 - DNA, 33 bp, Homo sapien
tttgtgtacatccttatgtgctgggtgagtctc

SEQ ID NO: 523219 - DNA, 33 bp, Homo sapien
tatcatgtagtgataacatagaacgatgggaaa

SEQ ID NO: 523220 - DNA, 33 bp, Homo sapien
tatcatgtagtgataatatagaacgatgggaaa

SEQ ID NO: 523221 - DNA, 33 bp, Homo sapien
ataatttaaagcttcaaagtctggcatctgcat

SEQ ID NO: 523222 - DNA, 33 bp, Homo sapien
ataatttaaagcttcagagtctggcatctgcat

SEQ ID NO: 523223 - DNA, 33 bp, Homo sapien
ctaggatctagagacaactcttaaaccttgtaa

SEQ ID NO: 523224 - DNA, 33 bp, Homo sapien
ctaggatctagagacacctcttaaaccttgtaa

SEQ ID NO: 523225 - DNA, 33 bp, Homo sapien
agtatgccgcacaaagcagagacataagcggat

SEQ ID NO: 523226 - DNA, 33 bp, Homo sapien
agtatgccgcacaaagtagagacataagcggat

SEQ ID NO: 523227 - DNA, 33 bp, Homo sapien
acttaagcacctactaagtgtcaagcactgttc

SEQ ID NO: 523228 - DNA, 33 bp, Homo sapien
acttaagcacctactatgtgtcaagcactgttc

SEQ ID NO: 523229 - DNA, 33 bp, Homo sapien
gtgcaaagttaggaaccaacctgatgacatatc

SEQ ID NO: 523230 - DNA, 33 bp, Homo sapien
gtgcaaagttaggaacgaacctgatgacatatc

SEQ ID NO: 523231 - DNA, 33 bp, Homo sapien
gaccccaaataattgaccagacatgatcttagc

SEQ ID NO: 523232 - DNA, 33 bp, Homo sapien
gaccccaaataattgagcagacatgatcttagc

SEQ ID NO: 523233 - DNA, 33 bp, Homo sapien
atgaaactttgagcaacagaacttcctggggcc

SEQ ID NO: 523234 - DNA, 33 bp, Homo sapien
atgaaactttgagcaatagaacttcctggggcc

SEQ ID NO: 523235 - DNA, 33 bp, Homo sapien
atagatagaactagaccgaaatattatgacttg

SEQ ID NO: 523236 - DNA, 33 bp, Homo sapien
atagatagaactagactgaaatattatgacttg

SEQ ID NO: 523237 - DNA, 33 bp, Homo sapien
ctaggaaatgatcagcaaagaggcttcacaaac

SEQ ID NO: 523238 - DNA, 33 bp, Homo sapien
ctaggaaatgatcagcgaagaggcttcacaaac

SEQ ID NO: 523239 - DNA, 33 bp, Homo sapien
ctctagtctgagaacacagtgatactattattt

SEQ ID NO: 523240 - DNA, 33 bp, Homo sapien
ctctagtctgagaacatagtgatactattattt

SEQ ID NO: 523241 - DNA, 33 bp, Homo sapien
ggttgagacgcattcaaactagtcattgtggta

SEQ ID NO: 523242 - DNA, 33 bp, Homo sapien
ggttgagacgcattcagactagtcattgtggta

SEQ ID NO: 523243 - DNA, 33 bp, Homo sapien
accgtgatgatgcccaaacatcgtggttcagga

SEQ ID NO: 523244 - DNA, 33 bp, Homo sapien
accgtgatgatgcccacacatcgtggttcagga

SEQ ID NO: 523245 - DNA, 33 bp, Homo sapien
atgctgagaagcaaaaacatgacaaatgtttgt

SEQ ID NO: 523246 - DNA, 33 bp, Homo sapien
atgctgagaagcaaaaccatgacaaatgtttgt

SEQ ID NO: 523247 - DNA, 33 bp, Homo sapien
cactcaagtacttgctaactctcttcaccatgt

SEQ ID NO: 523248 - DNA, 33 bp, Homo sapien
cactcaagtacttgctgactctcttcaccatgt

SEQ ID NO: 523249 - DNA, 33 bp, Homo sapien
acaacctcagtgattacagtttgagataacagt

SEQ ID NO: 523250 - DNA, 33 bp, Homo sapien
acaacctcagtgattagagtttgagataacagt

SEQ ID NO: 523251 - DNA, 33 bp, Homo sapien
atatcactatgagaaactgagaggcattgtcca

SEQ ID NO: 523252 - DNA, 33 bp, Homo sapien
atatcactatgagaaattgagaggcattgtcca

SEQ ID NO: 523253 - DNA, 33 bp, Homo sapien
ttgatccgatcctgtgaaactcactagtgagag

SEQ ID NO: 523254 - DNA, 33 bp, Homo sapien
ttgatccgatcctgtggaactcactagtgagag

SEQ ID NO: 523255 - DNA, 33 bp, Homo sapien
aaatttgtacaatcacaatgtatcaattattta

SEQ ID NO: 523256 - DNA, 33 bp, Homo sapien
aaatttgtacaatcactatgtatcaattattta

SEQ ID NO: 523257 - DNA, 33 bp, Homo sapien
cctgctcggccacaaaatgatatacaattctta

SEQ ID NO: 523258 - DNA, 33 bp, Homo sapien
cctgctcggccacaaactgatatacaattctta

SEQ ID NO: 523259 - DNA, 33 bp, Homo sapien
ggatgatctcttataactgcatgaggtatggag

SEQ ID NO: 523260 - DNA, 33 bp, Homo sapien
ggatgatctcttataattgcatgaggtatggag

SEQ ID NO: 523261 - DNA, 33 bp, Homo sapien
ttgccacttagaaccacaggatgtacttactaa

SEQ ID NO: 523262 - DNA, 33 bp, Homo sapien
ttgccacttagaaccataggatgtacttactaa

SEQ ID NO: 523263 - DNA, 33 bp, Homo sapien
tattttaatggctgagacacccaaagggctaac

SEQ ID NO: 523264 - DNA, 33 bp, Homo sapien
tattttaatggctgaggcacccaaagggctaac

SEQ ID NO: 523265 - DNA, 33 bp, Homo sapien
atgcagaggagtcacacgtatgaaaaaactgac

SEQ ID NO: 523266 - DNA, 33 bp, Homo sapien
atgcagaggagtcacatgtatgaaaaaactgac

SEQ ID NO: 523267 - DNA, 33 bp, Homo sapien
accaaacatcaaactccccgtgcttttttgcag

SEQ ID NO: 523268 - DNA, 33 bp, Homo sapien
accaaacatcaaactcgccgtgcttttttgcag

SEQ ID NO: 523269 - DNA, 33 bp, Homo sapien
ggaggaaaagccattccaaggatgcattatttt

SEQ ID NO: 523270 - DNA, 33 bp, Homo sapien
ggaggaaaagccattctaaggatgcattatttt

SEQ ID NO: 523271 - DNA, 33 bp, Homo sapien
agatgatgaaagtgaaagtgatgatgattatgc

SEQ ID NO: 523272 - DNA, 33 bp, Homo sapien
agatgatgaaagtgaaggtgatgatgattatgc

SEQ ID NO: 523273 - DNA, 33 bp, Homo sapien
ctcatggataagggggaactattatagtatgga

SEQ ID NO: 523274 - DNA, 33 bp, Homo sapien
ctcatggataaggggggactattatagtatgga

SEQ ID NO: 523275 - DNA, 33 bp, Homo sapien
tttgtcctgatattaaccaactgaacatcagcc

SEQ ID NO: 523276 - DNA, 33 bp, Homo sapien
tttgtcctgatattaagcaactgaacatcagcc

SEQ ID NO: 523277 - DNA, 33 bp, Homo sapien
atccaacaagtttataccaggaaagtaacatgg

SEQ ID NO: 523278 - DNA, 33 bp, Homo sapien
atccaacaagtttatagcaggaaagtaacatgg

SEQ ID NO: 523279 - DNA, 33 bp, Homo sapien
tgacttcatgaccatcaattagttttgtctgtt

SEQ ID NO: 523280 - DNA, 33 bp, Homo sapien
tgacttcatgaccatcgattagttttgtctgtt

SEQ ID NO: 523281 - DNA, 33 bp, Homo sapien
cttctggcagcaggagaataaaaggaaccaact

SEQ ID NO: 523282 - DNA, 33 bp, Homo sapien
cttctggcagcaggaggataaaaggaaccaact

SEQ ID NO: 523283 - DNA, 33 bp, Homo sapien
aagacaatgaattataagttcaatcataacatt

SEQ ID NO: 523284 - DNA, 33 bp, Homo sapien
aagacaatgaattataggttcaatcataacatt

SEQ ID NO: 523285 - DNA, 33 bp, Homo sapien
agttagtacttcactacgactgagttccagtta

SEQ ID NO: 523286 - DNA, 33 bp, Homo sapien
agttagtacttcactatgactgagttccagtta

SEQ ID NO: 523287 - DNA, 33 bp, Homo sapien
actataaggtagaccactgatctagttcagagt

SEQ ID NO: 523288 - DNA, 33 bp, Homo sapien
actataaggtagaccattgatctagttcagagt

SEQ ID NO: 523289 - DNA, 33 bp, Homo sapien
tcttccaatactttcacggagttaaactcaata

SEQ ID NO: 523290 - DNA, 33 bp, Homo sapien
tcttccaatactttcatggagttaaactcaata

SEQ ID NO: 523291 - DNA, 33 bp, Homo sapien
gaatcaaagtttggcacatgttttcattttgtt

SEQ ID NO: 523292 - DNA, 33 bp, Homo sapien
gaatcaaagtttggcatatgttttcattttgtt

SEQ ID NO: 523293 - DNA, 33 bp, Homo sapien
ctaatattgctagtgggaatacaaagtgataca

SEQ ID NO: 523294 - DNA, 33 bp, Homo sapien
ctaatattgctagtggtaatacaaagtgataca

SEQ ID NO: 523295 - DNA, 33 bp, Homo sapien
cttgtttcctctatacggctacccacaaatgac

SEQ ID NO: 523296 - DNA, 33 bp, Homo sapien
cttgtttcctctatactgctacccacaaatgac

SEQ ID NO: 523297 - DNA, 33 bp, Homo sapien
tgcacttgatattaaactgtaaaaaccacaata

SEQ ID NO: 523298 - DNA, 33 bp, Homo sapien
tgcacttgatattaaattgtaaaaaccacaata

SEQ ID NO: 523299 - DNA, 33 bp, Homo sapien
ggcaagtcatgtaggaagataagtggtaagtct

SEQ ID NO: 523300 - DNA, 33 bp, Homo sapien
ggcaagtcatgtaggaggataagtggtaagtct

SEQ ID NO: 523301 - DNA, 33 bp, Homo sapien
gtggccttcgctttcacggttttcttttaatta

SEQ ID NO: 523302 - DNA, 33 bp, Homo sapien
gtggccttcgctttcatggttttcttttaatta

SEQ ID NO: 523303 - DNA, 33 bp, Homo sapien
agtcatacccttagaaaagaagccagtcagtat

SEQ ID NO: 523304 - DNA, 33 bp, Homo sapien
agtcatacccttagaatagaagccagtcagtat

SEQ ID NO: 523305 - DNA, 33 bp, Homo sapien
gaaatctaaggcaatacggtaagcttttctaat

SEQ ID NO: 523306 - DNA, 33 bp, Homo sapien
gaaatctaaggcaatatggtaagcttttctaat

SEQ ID NO: 523307 - DNA, 33 bp, Homo sapien
acaaacttacaaactggattcttcaatctcttt

SEQ ID NO: 523308 - DNA, 33 bp, Homo sapien
acaaacttacaaactgtattcttcaatctcttt

SEQ ID NO: 523309 - DNA, 33 bp, Homo sapien
acaataaagcggttcacaaacctgacagagagc

SEQ ID NO: 523310 - DNA, 33 bp, Homo sapien
acaataaagcggttcagaaacctgacagagagc

SEQ ID NO: 523311 - DNA, 33 bp, Homo sapien
caagacagaattagacaagcttaatttatgggg

SEQ ID NO: 523312 - DNA, 33 bp, Homo sapien
caagacagaattagacgagcttaatttatgggg

SEQ ID NO: 523313 - DNA, 33 bp, Homo sapien
catcattctgctcttacaaaactttggcaaatg

SEQ ID NO: 523314 - DNA, 33 bp, Homo sapien
catcattctgctcttataaaactttggcaaatg

SEQ ID NO: 523315 - DNA, 33 bp, Homo sapien
taaatccaattaactacactgaatgccaaattc

SEQ ID NO: 523316 - DNA, 33 bp, Homo sapien
taaatccaattaactatactgaatgccaaattc

SEQ ID NO: 523317 - DNA, 33 bp, Homo sapien
aaaaggttgaatagaaagggatttaagctgaga

SEQ ID NO: 523318 - DNA, 33 bp, Homo sapien
aaaaggttgaatagaaggggatttaagctgaga

SEQ ID NO: 523319 - DNA, 33 bp, Homo sapien
gaggatattttggtaaaggaacgaggtggcgga

SEQ ID NO: 523320 - DNA, 33 bp, Homo sapien
gaggatattttggtaagggaacgaggtggcgga

SEQ ID NO: 523321 - DNA, 33 bp, Homo sapien
actccatccattaccacgcttaagtccactcta

SEQ ID NO: 523322 - DNA, 33 bp, Homo sapien
actccatccattaccatgcttaagtccactcta

SEQ ID NO: 523323 - DNA, 33 bp, Homo sapien
agtcagaataaaaacaaatgaagagtcatctca

SEQ ID NO: 523324 - DNA, 33 bp, Homo sapien
agtcagaataaaaacagatgaagagtcatctca

SEQ ID NO: 523325 - DNA, 33 bp, Homo sapien
aagagaaatgatgggactagtaaaaatagagta

SEQ ID NO: 523326 - DNA, 33 bp, Homo sapien
aagagaaatgatgggagtagtaaaaatagagta

SEQ ID NO: 523327 - DNA, 33 bp, Homo sapien
tattaccaatggtaaccgctcacttaacaaaaa

SEQ ID NO: 523328 - DNA, 33 bp, Homo sapien
tattaccaatggtaactgctcacttaacaaaaa

SEQ ID NO: 523329 - DNA, 33 bp, Homo sapien
ctcgaggatttgtgtcaaaagtttattttaaaa

SEQ ID NO: 523330 - DNA, 33 bp, Homo sapien
ctcgaggatttgtgtccaaagtttattttaaaa

SEQ ID NO: 523331 - DNA, 33 bp, Homo sapien
catagtgaaaaacacccagaaacaattctctct

SEQ ID NO: 523332 - DNA, 33 bp, Homo sapien
catagtgaaaaacaccgagaaacaattctctct

SEQ ID NO: 523333 - DNA, 33 bp, Homo sapien
gaaagaagttacccaaataggaagattgaaaat

SEQ ID NO: 523334 - DNA, 33 bp, Homo sapien
gaaagaagttacccaagtaggaagattgaaaat

SEQ ID NO: 523335 - DNA, 33 bp, Homo sapien
gaatggtatggcatgaatcataactcagttttt

SEQ ID NO: 523336 - DNA, 33 bp, Homo sapien
gaatggtatggcatgagtcataactcagttttt

SEQ ID NO: 523337 - DNA, 33 bp, Homo sapien
aatatgtagacagtaactccaggtgactgcaat

SEQ ID NO: 523338 - DNA, 33 bp, Homo sapien
aatatgtagacagtaattccaggtgactgcaat

SEQ ID NO: 523339 - DNA, 33 bp, Homo sapien
ctggcacagttcgacaagttttagaacattagc

SEQ ID NO: 523340 - DNA, 33 bp, Homo sapien
ctggcacagttcgacaggttttagaacattagc

SEQ ID NO: 523341 - DNA, 33 bp, Homo sapien
ataagacctaatatagaaggttacttgagtttg

SEQ ID NO: 523342 - DNA, 33 bp, Homo sapien
ataagacctaatataggaggttacttgagtttg

SEQ ID NO: 523343 - DNA, 33 bp, Homo sapien
ggcttctcatcttaacagctccgtgggtcaaat

SEQ ID NO: 523344 - DNA, 33 bp, Homo sapien
ggcttctcatcttaacggctccgtgggtcaaat

SEQ ID NO: 523345 - DNA, 33 bp, Homo sapien
gtcctcactattattacctgcatcttataaatg

SEQ ID NO: 523346 - DNA, 33 bp, Homo sapien
gtcctcactattattatctgcatcttataaatg

SEQ ID NO: 523347 - DNA, 33 bp, Homo sapien
ccagtgccagaagctaactgttccttgttcttt

SEQ ID NO: 523348 - DNA, 33 bp, Homo sapien
ccagtgccagaagctagctgttccttgttcttt

SEQ ID NO: 523349 - DNA, 33 bp, Homo sapien
tgaacacaagtagcaaagattctttctgtcaag

SEQ ID NO: 523350 - DNA, 33 bp, Homo sapien
tgaacacaagtagcaaggattctttctgtcaag

SEQ ID NO: 523351 - DNA, 33 bp, Homo sapien
ggatatattagacctgaaataaatggttgttcg

SEQ ID NO: 523352 - DNA, 33 bp, Homo sapien
ggatatattagacctgcaataaatggttgttcg

SEQ ID NO: 523353 - DNA, 33 bp, Homo sapien
acaatgtttctgtgaacgtggctacaggttctg

SEQ ID NO: 523354 - DNA, 33 bp, Homo sapien
acaatgtttctgtgaatgtggctacaggttctg

SEQ ID NO: 523355 - DNA, 33 bp, Homo sapien
attttattttgtactaagcaaagattgaattta

SEQ ID NO: 523356 - DNA, 33 bp, Homo sapien
attttattttgtactatgcaaagattgaattta

SEQ ID NO: 523357 - DNA, 33 bp, Homo sapien
acctggcccacaaaccacattcttatatttttg

SEQ ID NO: 523358 - DNA, 33 bp, Homo sapien
acctggcccacaaaccgcattcttatatttttg

SEQ ID NO: 523359 - DNA, 33 bp, Homo sapien
agtataagattatgaactgaatgcaagtattat

SEQ ID NO: 523360 - DNA, 33 bp, Homo sapien
agtataagattatgaattgaatgcaagtattat

SEQ ID NO: 523361 - DNA, 33 bp, Homo sapien
ggaaggatgaatgtcaaggaggaagtcatcagt

SEQ ID NO: 523362 - DNA, 33 bp, Homo sapien
ggaaggatgaatgtcagggaggaagtcatcagt

SEQ ID NO: 523363 - DNA, 33 bp, Homo sapien
cccaacatcctacataccaggtgagacttttct

SEQ ID NO: 523364 - DNA, 33 bp, Homo sapien
cccaacatcctacatatcaggtgagacttttct

SEQ ID NO: 523365 - DNA, 33 bp, Homo sapien
tgtgtaggtgcatgaaaggaagtgataggagac

SEQ ID NO: 523366 - DNA, 33 bp, Homo sapien
tgtgtaggtgcatgaagggaagtgataggagac

SEQ ID NO: 523367 - DNA, 33 bp, Homo sapien
atgttccagccagtaacaaatgagagtttcagc

SEQ ID NO: 523368 - DNA, 33 bp, Homo sapien
atgttccagccagtaataaatgagagtttcagc

SEQ ID NO: 523369 - DNA, 33 bp, Homo sapien
accattcaacctattacgtgcccacaacttctc

SEQ ID NO: 523370 - DNA, 33 bp, Homo sapien
accattcaacctattatgtgcccacaacttctc

SEQ ID NO: 523371 - DNA, 33 bp, Homo sapien
gactgctagttcaaaacaccagacatatgagta

SEQ ID NO: 523372 - DNA, 33 bp, Homo sapien
gactgctagttcaaaataccagacatatgagta

SEQ ID NO: 523373 - DNA, 33 bp, Homo sapien
accagccaatgaacgacatagccttaaaattat

SEQ ID NO: 523374 - DNA, 33 bp, Homo sapien
accagccaatgaacgatatagccttaaaattat

SEQ ID NO: 523375 - DNA, 33 bp, Homo sapien
cagacaggaaccacaaaaaaagtcactgacaga

SEQ ID NO: 523376 - DNA, 33 bp, Homo sapien
cagacaggaaccacaagaaaagtcactgacaga

SEQ ID NO: 523377 - DNA, 33 bp, Homo sapien
agataggtacagaatccaagtgggccctgcaat

SEQ ID NO: 523378 - DNA, 33 bp, Homo sapien
agataggtacagaatctaagtgggccctgcaat

SEQ ID NO: 523379 - DNA, 33 bp, Homo sapien
attgtggagttaaatgacattccttttagacaa

SEQ ID NO: 523380 - DNA, 33 bp, Homo sapien
attgtggagttaaatggcattccttttagacaa

SEQ ID NO: 523381 - DNA, 33 bp, Homo sapien
ctttatactttcctgaactttacaacttgtcta

SEQ ID NO: 523382 - DNA, 33 bp, Homo sapien
ctttatactttcctgacctttacaacttgtcta

SEQ ID NO: 523383 - DNA, 33 bp, Homo sapien
aatgatcaccaatggccactaaaatcatcagct

SEQ ID NO: 523384 - DNA, 33 bp, Homo sapien
aatgatcaccaatggctactaaaatcatcagct

SEQ ID NO: 523385 - DNA, 33 bp, Homo sapien
ggctcattttatcacaagtatacacaagctact

SEQ ID NO: 523386 - DNA, 33 bp, Homo sapien
ggctcattttatcacacgtatacacaagctact

SEQ ID NO: 523387 - DNA, 33 bp, Homo sapien
agtaattcaaaaagaaaataggctgttatgaat

SEQ ID NO: 523388 - DNA, 33 bp, Homo sapien
agtaattcaaaaagaagataggctgttatgaat

SEQ ID NO: 523389 - DNA, 33 bp, Homo sapien
agtaaatttgtgtatggcaactgtaatgaaaaa

SEQ ID NO: 523390 - DNA, 33 bp, Homo sapien
agtaaatttgtgtatgtcaactgtaatgaaaaa

SEQ ID NO: 523391 - DNA, 33 bp, Homo sapien
ctgtctgtcacttacacaaatcgttgatgtctt

SEQ ID NO: 523392 - DNA, 33 bp, Homo sapien
ctgtctgtcacttacataaatcgttgatgtctt

SEQ ID NO: 523393 - DNA, 33 bp, Homo sapien
aaataccctgatttccccatgcaatttttctcc

SEQ ID NO: 523394 - DNA, 33 bp, Homo sapien
aaataccctgatttccgcatgcaatttttctcc

SEQ ID NO: 523395 - DNA, 33 bp, Homo sapien
gtagagaaagtgtctgaaagtaaacatgcaaag

SEQ ID NO: 523396 - DNA, 33 bp, Homo sapien
gtagagaaagtgtctgcaagtaaacatgcaaag

SEQ ID NO: 523397 - DNA, 33 bp, Homo sapien
ctttaaatcctttgaacgtacctctttttaaag

SEQ ID NO: 523398 - DNA, 33 bp, Homo sapien
ctttaaatcctttgaatgtacctctttttaaag

SEQ ID NO: 523399 - DNA, 33 bp, Homo sapien
actggtacaggattcaatagcgacatttataaa

SEQ ID NO: 523400 - DNA, 33 bp, Homo sapien
actggtacaggattcagtagcgacatttataaa

SEQ ID NO: 523401 - DNA, 33 bp, Homo sapien
gtcagtttcctgcaaaaaacaaattcagataca

SEQ ID NO: 523402 - DNA, 33 bp, Homo sapien
gtcagtttcctgcaaagaacaaattcagataca

SEQ ID NO: 523403 - DNA, 33 bp, Homo sapien
agttgtattccagctagataggtcattgaggtt

SEQ ID NO: 523404 - DNA, 33 bp, Homo sapien
agttgtattccagctatataggtcattgaggtt

SEQ ID NO: 523405 - DNA, 33 bp, Homo sapien
ggcaaccttagagaaacggaagttgaggcagaa

SEQ ID NO: 523406 - DNA, 33 bp, Homo sapien
ggcaaccttagagaaatggaagttgaggcagaa

SEQ ID NO: 523407 - DNA, 33 bp, Homo sapien
acgctctcccacttcaaatcaatcctctaccct

SEQ ID NO: 523408 - DNA, 33 bp, Homo sapien
acgctctcccacttcatatcaatcctctaccct

SEQ ID NO: 523409 - DNA, 33 bp, Homo sapien
aaataagcacagtagaatacacataacagatac

SEQ ID NO: 523410 - DNA, 33 bp, Homo sapien
aaataagcacagtagactacacataacagatac

SEQ ID NO: 523411 - DNA, 33 bp, Homo sapien
acataagatgttttaacacatggaccttggcct

SEQ ID NO: 523412 - DNA, 33 bp, Homo sapien
acataagatgttttaagacatggaccttggcct

SEQ ID NO: 523413 - DNA, 33 bp, Homo sapien
tttcttctttcattaaatcttcctcacatcaaa

SEQ ID NO: 523414 - DNA, 33 bp, Homo sapien
tttcttctttcattaactcttcctcacatcaaa

SEQ ID NO: 523415 - DNA, 33 bp, Homo sapien
tcagtttgcttaggaaatctatgaaacgtgatt

SEQ ID NO: 523416 - DNA, 33 bp, Homo sapien
tcagtttgcttaggaagtctatgaaacgtgatt

SEQ ID NO: 523417 - DNA, 33 bp, Homo sapien
ccccagtgtccccggcaatgacacattacctgc

SEQ ID NO: 523418 - DNA, 33 bp, Homo sapien
ccccagtgtccccggcgatgacacattacctgc

SEQ ID NO: 523419 - DNA, 33 bp, Homo sapien
tgccagcgctgttcaacaggagaataatatgag

SEQ ID NO: 523420 - DNA, 33 bp, Homo sapien
tgccagcgctgttcaataggagaataatatgag

SEQ ID NO: 523421 - DNA, 33 bp, Homo sapien
ttgcctgcctttcacactgagaccaaaacagat

SEQ ID NO: 523422 - DNA, 33 bp, Homo sapien
ttgcctgcctttcacattgagaccaaaacagat

SEQ ID NO: 523423 - DNA, 33 bp, Homo sapien
taaaaacaactcggcacattagagcaaaacact

SEQ ID NO: 523424 - DNA, 33 bp, Homo sapien
taaaaacaactcggcatattagagcaaaacact

SEQ ID NO: 523425 - DNA, 33 bp, Homo sapien
cccaggatgtgctgctcactggccatgcaacct

SEQ ID NO: 523426 - DNA, 33 bp, Homo sapien
cccaggatgtgctgctgactggccatgcaacct

SEQ ID NO: 523427 - DNA, 33 bp, Homo sapien
caagttactttcgttcaagtattttcagtaaca

SEQ ID NO: 523428 - DNA, 33 bp, Homo sapien
caagttactttcgttcgagtattttcagtaaca

SEQ ID NO: 523429 - DNA, 33 bp, Homo sapien
acaatctcaggaataaaagcactgcttgcacct

SEQ ID NO: 523430 - DNA, 33 bp, Homo sapien
acaatctcaggaataagagcactgcttgcacct

SEQ ID NO: 523431 - DNA, 33 bp, Homo sapien
ataattattactcttcaatgtggcccaaggacg

SEQ ID NO: 523432 - DNA, 33 bp, Homo sapien
ataattattactcttcgatgtggcccaaggacg

SEQ ID NO: 523433 - DNA, 33 bp, Homo sapien
cttcagccaacatctaataacaccgtatctatc

SEQ ID NO: 523434 - DNA, 33 bp, Homo sapien
cttcagccaacatctagtaacaccgtatctatc

SEQ ID NO: 523435 - DNA, 33 bp, Homo sapien
ttgtggagcttggacaaggaggggcgagatgga

SEQ ID NO: 523436 - DNA, 33 bp, Homo sapien
ttgtggagcttggacagggaggggcgagatgga

SEQ ID NO: 523437 - DNA, 33 bp, Homo sapien
caccccttttacctaacgatccaaagagttgtg

SEQ ID NO: 523438 - DNA, 33 bp, Homo sapien
caccccttttacctaatgatccaaagagttgtg

SEQ ID NO: 523439 - DNA, 33 bp, Homo sapien
ggttcctccacagcaaagatgccttttacctgc

SEQ ID NO: 523440 - DNA, 33 bp, Homo sapien
ggttcctccacagcaacgatgccttttacctgc

SEQ ID NO: 523441 - DNA, 33 bp, Homo sapien
tttatctttgctgcccactaactcccttcccag

SEQ ID NO: 523442 - DNA, 33 bp, Homo sapien
tttatctttgctgcccgctaactcccttcccag

SEQ ID NO: 523443 - DNA, 33 bp, Homo sapien
aaaggaaattattagcaagcagattatgacttg

SEQ ID NO: 523444 - DNA, 33 bp, Homo sapien
aaaggaaattattagcgagcagattatgacttg

SEQ ID NO: 523445 - DNA, 33 bp, Homo sapien
aggttagaaatgatgaacacaggaggggtcctg

SEQ ID NO: 523446 - DNA, 33 bp, Homo sapien
aggttagaaatgatgatcacaggaggggtcctg

SEQ ID NO: 523447 - DNA, 33 bp, Homo sapien
tagacctggtcgaagaaaggggttcctgctccc

SEQ ID NO: 523448 - DNA, 33 bp, Homo sapien
tagacctggtcgaagagaggggttcctgctccc

SEQ ID NO: 523449 - DNA, 33 bp, Homo sapien
gacaggagacaggaacggtgaatgtaagtccag

SEQ ID NO: 523450 - DNA, 33 bp, Homo sapien
gacaggagacaggaactgtgaatgtaagtccag

SEQ ID NO: 523451 - DNA, 33 bp, Homo sapien
acaaggacaacttggaggttgaaagcaagatag

SEQ ID NO: 523452 - DNA, 33 bp, Homo sapien
acaaggacaacttggatgttgaaagcaagatag

SEQ ID NO: 523453 - DNA, 33 bp, Homo sapien
tgccaagatggcacaaacaatgttcatttggtt

SEQ ID NO: 523454 - DNA, 33 bp, Homo sapien
tgccaagatggcacaaccaatgttcatttggtt

SEQ ID NO: 523455 - DNA, 33 bp, Homo sapien
ctagataaatctcaaccgatgccagcgtttgga

SEQ ID NO: 523456 - DNA, 33 bp, Homo sapien
ctagataaatctcaactgatgccagcgtttgga

SEQ ID NO: 523457 - DNA, 33 bp, Homo sapien
ctctctcaaaaattgacgtagaccaggcacggt

SEQ ID NO: 523458 - DNA, 33 bp, Homo sapien
ctctctcaaaaattgatgtagaccaggcacggt

SEQ ID NO: 523459 - DNA, 33 bp, Homo sapien
gataaaggcaggttaaaagcaaaagatggaagc

SEQ ID NO: 523460 - DNA, 33 bp, Homo sapien
gataaaggcaggttaacagcaaaagatggaagc

SEQ ID NO: 523461 - DNA, 33 bp, Homo sapien
gatgcggagccctaacacccccaaagagtggga

SEQ ID NO: 523462 - DNA, 33 bp, Homo sapien
gatgcggagccctaacgcccccaaagagtggga

SEQ ID NO: 523463 - DNA, 33 bp, Homo sapien
tctggaaagcaagaagaccatcctggaagagcc

SEQ ID NO: 523464 - DNA, 33 bp, Homo sapien
tctggaaagcaagaaggccatcctggaagagcc

SEQ ID NO: 523465 - DNA, 33 bp, Homo sapien
tgtctggaaatgaagcactggggtcaacaacct

SEQ ID NO: 523466 - DNA, 33 bp, Homo sapien
tgtctggaaatgaagccctggggtcaacaacct

SEQ ID NO: 523467 - DNA, 33 bp, Homo sapien
catgcctcttcccttccgaaaagcctgcagact

SEQ ID NO: 523468 - DNA, 33 bp, Homo sapien
catgcctcttcccttctgaaaagcctgcagact

SEQ ID NO: 523469 - DNA, 33 bp, Homo sapien
tcctctctgaggaggacacgtaatgacgccttg

SEQ ID NO: 523470 - DNA, 33 bp, Homo sapien
tcctctctgaggaggagacgtaatgacgccttg

SEQ ID NO: 523471 - DNA, 33 bp, Homo sapien
ggctgccatctctcaggatctgtgcactgctga

SEQ ID NO: 523472 - DNA, 33 bp, Homo sapien
ggctgccatctctcagtatctgtgcactgctga

SEQ ID NO: 523473 - DNA, 33 bp, Homo sapien
agggaggtgtaaataccaataagctccatgcaa

SEQ ID NO: 523474 - DNA, 33 bp, Homo sapien
agggaggtgtaaatactaataagctccatgcaa

SEQ ID NO: 523475 - DNA, 33 bp, Homo sapien
aagaaggcacgaagacactaaaccagtggttct

SEQ ID NO: 523476 - DNA, 33 bp, Homo sapien
aagaaggcacgaagaccctaaaccagtggttct

SEQ ID NO: 523477 - DNA, 33 bp, Homo sapien
attcactgaagtgtgacggcggggagtggagct

SEQ ID NO: 523478 - DNA, 33 bp, Homo sapien
attcactgaagtgtgatggcggggagtggagct

SEQ ID NO: 523479 - DNA, 33 bp, Homo sapien
tggccaattcagttcacaagtgctaaacctgtt

SEQ ID NO: 523480 - DNA, 33 bp, Homo sapien
tggccaattcagttcagaagtgctaaacctgtt

SEQ ID NO: 523481 - DNA, 33 bp, Homo sapien
ggtctcagatggatccccgctttcctggagaag

SEQ ID NO: 523482 - DNA, 33 bp, Homo sapien
ggtctcagatggatcctcgctttcctggagaag

SEQ ID NO: 523483 - DNA, 33 bp, Homo sapien
tctagactctctttcacggatcagccttgccca

SEQ ID NO: 523484 - DNA, 33 bp, Homo sapien
tctagactctctttcatggatcagccttgccca

SEQ ID NO: 523485 - DNA, 33 bp, Homo sapien
ctgccaagtctaacacaaagagacacgtgaaca

SEQ ID NO: 523486 - DNA, 33 bp, Homo sapien
ctgccaagtctaacaccaagagacacgtgaaca

SEQ ID NO: 523487 - DNA, 33 bp, Homo sapien
gggaaatgaaaagaccagaaggcctcctggctc

SEQ ID NO: 523488 - DNA, 33 bp, Homo sapien
gggaaatgaaaagaccggaaggcctcctggctc

SEQ ID NO: 523489 - DNA, 33 bp, Homo sapien
taagtgtggcaagaagactcatacacagtatca

SEQ ID NO: 523490 - DNA, 33 bp, Homo sapien
taagtgtggcaagaagtctcatacacagtatca

SEQ ID NO: 523491 - DNA, 33 bp, Homo sapien
atttttttatggcttacactgagcaattatgtc

SEQ ID NO: 523492 - DNA, 33 bp, Homo sapien
atttttttatggcttatactgagcaattatgtc

SEQ ID NO: 523493 - DNA, 33 bp, Homo sapien
tcctcacctcttcttaactagcggtaagtgttg

SEQ ID NO: 523494 - DNA, 33 bp, Homo sapien
tcctcacctcttcttagctagcggtaagtgttg

SEQ ID NO: 523495 - DNA, 33 bp, Homo sapien
tgacattttttaggcacagtttaaagtctattt

SEQ ID NO: 523496 - DNA, 33 bp, Homo sapien
tgacattttttaggcagagtttaaagtctattt

SEQ ID NO: 523497 - DNA, 33 bp, Homo sapien
cctttcctatatgaccacaacttaatgtagaac

SEQ ID NO: 523498 - DNA, 33 bp, Homo sapien
cctttcctatatgaccgcaacttaatgtagaac

SEQ ID NO: 523499 - DNA, 33 bp, Homo sapien
gcgtaacttcagagaagaatctggctggagata

SEQ ID NO: 523500 - DNA, 33 bp, Homo sapien
gcgtaacttcagagaataatctggctggagata

SEQ ID NO: 523501 - DNA, 33 bp, Homo sapien
tatatctataagctgcaaaagtgcaaaaggcaa

SEQ ID NO: 523502 - DNA, 33 bp, Homo sapien
tatatctataagctgcgaaagtgcaaaaggcaa

SEQ ID NO: 523503 - DNA, 33 bp, Homo sapien
gagatgcaggtttcccagagagctggatgacaa

SEQ ID NO: 523504 - DNA, 33 bp, Homo sapien
gagatgcaggtttcccggagagctggatgacaa

SEQ ID NO: 523505 - DNA, 33 bp, Homo sapien
ggacaagttgggactgaaacaaagaaagccaca

SEQ ID NO: 523506 - DNA, 33 bp, Homo sapien
ggacaagttgggactggaacaaagaaagccaca

SEQ ID NO: 523507 - DNA, 33 bp, Homo sapien
acatcatttttgacctgaaaaaatagcaaatgt

SEQ ID NO: 523508 - DNA, 33 bp, Homo sapien
acatcatttttgaccttaaaaaatagcaaatgt

SEQ ID NO: 523509 - DNA, 33 bp, Homo sapien
ccctcatatcaccctaaagaaaggcaaatctag

SEQ ID NO: 523510 - DNA, 33 bp, Homo sapien
ccctcatatcaccctatagaaaggcaaatctag

SEQ ID NO: 523511 - DNA, 33 bp, Homo sapien
ggagaccaataactcacgtgtggatctttaata

SEQ ID NO: 523512 - DNA, 33 bp, Homo sapien
ggagaccaataactcatgtgtggatctttaata

SEQ ID NO: 523513 - DNA, 33 bp, Homo sapien
agggaaccaggaaacacgaagttgctgaggaca

SEQ ID NO: 523514 - DNA, 33 bp, Homo sapien
agggaaccaggaaacatgaagttgctgaggaca

SEQ ID NO: 523515 - DNA, 33 bp, Homo sapien
atgctaagatagggcacgaccgaacttggtttg

SEQ ID NO: 523516 - DNA, 33 bp, Homo sapien
atgctaagatagggcatgaccgaacttggtttg

SEQ ID NO: 523517 - DNA, 33 bp, Homo sapien
aaaatagaaccatgagccgggtgccaaagtctt

SEQ ID NO: 523518 - DNA, 33 bp, Homo sapien
aaaatagaaccatgagtcgggtgccaaagtctt

SEQ ID NO: 523519 - DNA, 33 bp, Homo sapien
aagtctgccaatgaagaaggatttatttgtttt

SEQ ID NO: 523520 - DNA, 33 bp, Homo sapien
aagtctgccaatgaaggaggatttatttgtttt

SEQ ID NO: 523521 - DNA, 33 bp, Homo sapien
gattagcaaagtagaagaaaaattagagaaaat

SEQ ID NO: 523522 - DNA, 33 bp, Homo sapien
gattagcaaagtagaataaaaattagagaaaat

SEQ ID NO: 523523 - DNA, 33 bp, Homo sapien
aagtgtggagataacacgtatttactagttctt

SEQ ID NO: 523524 - DNA, 33 bp, Homo sapien
aagtgtggagataacatgtatttactagttctt

SEQ ID NO: 523525 - DNA, 33 bp, Homo sapien; identical to SEQ ID NO: 523523

SEQ ID NO: 523526 - DNA, 33 bp, Homo sapien; identical to SEQ ID NO: 523524

SEQ ID NO: 523527 - DNA, 33 bp, Homo sapien
aggccccttgtgtaaacgcagaagagatgttta

SEQ ID NO: 523528 - DNA, 33 bp, Homo sapien
aggccccttgtgtaaatgcagaagagatgttta

SEQ ID NO: 523529 - DNA, 33 bp, Homo sapien
caaggtttaaatataaggatgctgcaaatattg

SEQ ID NO: 523530 - DNA, 33 bp, Homo sapien
caaggtttaaatataatgatgctgcaaatattg

SEQ ID NO: 523531 - DNA, 33 bp, Homo sapien
attctggtactcttcaccagttacccccaatga

SEQ ID NO: 523532 - DNA, 33 bp, Homo sapien
attctggtactcttcatcagttacccccaatga

SEQ ID NO: 523533 - DNA, 33 bp, Homo sapien
aactagagcaaaaaccaatgaattaaaaataag

SEQ ID NO: 523534 - DNA, 33 bp, Homo sapien
aactagagcaaaaacccatgaattaaaaataag

SEQ ID NO: 523535 - DNA, 33 bp, Homo sapien
aggcttcagtatatgacgttcctttggtctaga

SEQ ID NO: 523536 - DNA, 33 bp, Homo sapien
aggcttcagtatatgatgttcctttggtctaga

SEQ ID NO: 523537 - DNA, 33 bp, Homo sapien
tcataaaacacattgacgctttcactgtgctct

SEQ ID NO: 523538 - DNA, 33 bp, Homo sapien
tcataaaacacattgatgctttcactgtgctct

SEQ ID NO: 523539 - DNA, 33 bp, Homo sapien
agggaaaggagcaaacaatggacaaaaagaaca

SEQ ID NO: 523540 - DNA, 33 bp, Homo sapien
agggaaaggagcaaacgatggacaaaaagaaca

SEQ ID NO: 523541 - DNA, 33 bp, Homo sapien
acttgcaaaggaaagacgcaagatcaggtttac

SEQ ID NO: 523542 - DNA, 33 bp, Homo sapien
acttgcaaaggaaagatgcaagatcaggtttac

SEQ ID NO: 523543 - DNA, 33 bp, Homo sapien
ctggtgaagagtccaccaaataaccatgctagt

SEQ ID NO: 523544 - DNA, 33 bp, Homo sapien
ctggtgaagagtccactaaataaccatgctagt

SEQ ID NO: 523545 - DNA, 33 bp, Homo sapien
tcacacatgaagttacggatctaagtcacagca

SEQ ID NO: 523546 - DNA, 33 bp, Homo sapien
tcacacatgaagttactgatctaagtcacagca

SEQ ID NO: 523547 - DNA, 33 bp, Homo sapien
ctgaaatgatgcttgacagaaaaaaaatctctt

SEQ ID NO: 523548 - DNA, 33 bp, Homo sapien
ctgaaatgatgcttgagagaaaaaaaatctctt

SEQ ID NO: 523549 - DNA, 33 bp, Homo sapien
tctcatgtaacatgaaatctggagataggtggc

SEQ ID NO: 523550 - DNA, 33 bp, Homo sapien
tctcatgtaacatgaagtctggagataggtggc

SEQ ID NO: 523551 - DNA, 33 bp, Homo sapien
ttatccactccattcccaaaactaccttcccac

SEQ ID NO: 523552 - DNA, 33 bp, Homo sapien
ttatccactccattcctaaaactaccttcccac

SEQ ID NO: 523553 - DNA, 33 bp, Homo sapien
tcagatcagttctttccccaaacagtagttatt

SEQ ID NO: 523554 - DNA, 33 bp, Homo sapien
tcagatcagttctttctccaaacagtagttatt

SEQ ID NO: 523555 - DNA, 33 bp, Homo sapien
gagatggcctgtagaacgtccagtctttccacc

SEQ ID NO: 523556 - DNA, 33 bp, Homo sapien
gagatggcctgtagaatgtccagtctttccacc

SEQ ID NO: 523557 - DNA, 33 bp, Homo sapien
catttgtgccaaaaagacatcagtttatttaag

SEQ ID NO: 523558 - DNA, 33 bp, Homo sapien
catttgtgccaaaaaggcatcagtttatttaag

SEQ ID NO: 523559 - DNA, 33 bp, Homo sapien
atttattgtttcattacggactcctttgaatta

SEQ ID NO: 523560 - DNA, 33 bp, Homo sapien
atttattgtttcattatggactcctttgaatta

SEQ ID NO: 523561 - DNA, 33 bp, Homo sapien
tggctgtaccacacaacggatgtatgaccttgg

SEQ ID NO: 523562 - DNA, 33 bp, Homo sapien
tggctgtaccacacaatggatgtatgaccttgg

SEQ ID NO: 523563 - DNA, 33 bp, Homo sapien
tgaaggctatagttaacaacattgtattgctta

SEQ ID NO: 523564 - DNA, 33 bp, Homo sapien
tgaaggctatagttaataacattgtattgctta

SEQ ID NO: 523565 - DNA, 33 bp, Homo sapien
ttttgaggctttcctcaatgacctcagcttctt

SEQ ID NO: 523566 - DNA, 33 bp, Homo sapien
ttttgaggctttcctcgatgacctcagcttctt

SEQ ID NO: 523567 - DNA, 33 bp, Homo sapien
gtggccaaaatgttggcagaaatttgaacagta

SEQ ID NO: 523568 - DNA, 33 bp, Homo sapien
gtggccaaaatgttggtagaaatttgaacagta

SEQ ID NO: 523569 - DNA, 33 bp, Homo sapien
aataaaacagtcacagaaggataaacagcacac

SEQ ID NO: 523570 - DNA, 33 bp, Homo sapien
aataaaacagtcacaggaggataaacagcacac

SEQ ID NO: 523571 - DNA, 33 bp, Homo sapien
cataatggatcattccaccataaaaaaaggaaa

SEQ ID NO: 523572 - DNA, 33 bp, Homo sapien
cataatggatcattccgccataaaaaaaggaaa

SEQ ID NO: 523573 - DNA, 33 bp, Homo sapien
aaaaataatctttgaccagaaaatgaaggttgc

SEQ ID NO: 523574 - DNA, 33 bp, Homo sapien
aaaaataatctttgactagaaaatgaaggttgc

SEQ ID NO: 523575 - DNA, 33 bp, Homo sapien
aattcaatttagacaaaacaaattcctcaattt

SEQ ID NO: 523576 - DNA, 33 bp, Homo sapien
aattcaatttagacaacacaaattcctcaattt

SEQ ID NO: 523577 - DNA, 33 bp, Homo sapien
catccatcttttcttacggtatctgtgagtaaa

SEQ ID NO: 523578 - DNA, 33 bp, Homo sapien
catccatcttttcttatggtatctgtgagtaaa

SEQ ID NO: 523579 - DNA, 33 bp, Homo sapien
gttgctctagtacagacgggatacactttggga

SEQ ID NO: 523580 - DNA, 33 bp, Homo sapien
gttgctctagtacagatgggatacactttggga

SEQ ID NO: 523581 - DNA, 33 bp, Homo sapien
tagctttaaactcagaaaggacttttcccctgc

SEQ ID NO: 523582 - DNA, 33 bp, Homo sapien
tagctttaaactcagagaggacttttcccctgc

SEQ ID NO: 523583 - DNA, 33 bp, Homo sapien
tagcatcacataaacagaaaacctgagatagtg

SEQ ID NO: 523584 - DNA, 33 bp, Homo sapien
tagcatcacataaacataaaacctgagatagtg

SEQ ID NO: 523585 - DNA, 33 bp, Homo sapien
tattcatgaaaaacccagaaaactgcctcattt

SEQ ID NO: 523586 - DNA, 33 bp, Homo sapien
tattcatgaaaaacccggaaaactgcctcattt

SEQ ID NO: 523587 - DNA, 33 bp, Homo sapien
ctcacaagtagcatcaacatatcgtgcaactca

SEQ ID NO: 523588 - DNA, 33 bp, Homo sapien
ctcacaagtagcatcatcatatcgtgcaactca

SEQ ID NO: 523589 - DNA, 33 bp, Homo sapien
gttctacttgctgtcacagaggctaaggtttta

SEQ ID NO: 523590 - DNA, 33 bp, Homo sapien
gttctacttgctgtcatagaggctaaggtttta

SEQ ID NO: 523591 - DNA, 33 bp, Homo sapien
taagcaaggagaaaagactttcagtttaacttc

SEQ ID NO: 523592 - DNA, 33 bp, Homo sapien
taagcaaggagaaaagcctttcagtttaacttc

SEQ ID NO: 523593 - DNA, 33 bp, Homo sapien
acacttggttatgacactgcaactataaagata

SEQ ID NO: 523594 - DNA, 33 bp, Homo sapien
acacttggttatgacagtgcaactataaagata

SEQ ID NO: 523595 - DNA, 33 bp, Homo sapien
tggttatagaaccaaacgtacaaatgtgcctta

SEQ ID NO: 523596 - DNA, 33 bp, Homo sapien
tggttatagaaccaaatgtacaaatgtgcctta

SEQ ID NO: 523597 - DNA, 33 bp, Homo sapien
cctcctaattttacccacacataaacctcaaag

SEQ ID NO: 523598 - DNA, 33 bp, Homo sapien
cctcctaattttacccgcacataaacctcaaag

SEQ ID NO: 523599 - DNA, 33 bp, Homo sapien
gtctttttggattaagaattcatcaatatttgt

SEQ ID NO: 523600 - DNA, 33 bp, Homo sapien
gtctttttggattaagtattcatcaatatttgt

SEQ ID NO: 523601 - DNA, 33 bp, Homo sapien
caagagggttacataacgtggtctcaggtttag

SEQ ID NO: 523602 - DNA, 33 bp, Homo sapien
caagagggttacataatgtggtctcaggtttag

SEQ ID NO: 523603 - DNA, 33 bp, Homo sapien
actcagctggtagtgacataaaatagtacagcc

SEQ ID NO: 523604 - DNA, 33 bp, Homo sapien
actcagctggtagtgatataaaatagtacagcc

SEQ ID NO: 523605 - DNA, 33 bp, Homo sapien
aggaatttccagaggaagagcaatgggggaaga

SEQ ID NO: 523606 - DNA, 33 bp, Homo sapien
aggaatttccagaggatgagcaatgggggaaga

SEQ ID NO: 523607 - DNA, 33 bp, Homo sapien
catcaccaggataaagaaagtgattggattctg

SEQ ID NO: 523608 - DNA, 33 bp, Homo sapien
catcaccaggataaaggaagtgattggattctg

SEQ ID NO: 523609 - DNA, 33 bp, Homo sapien
ttgctgcccgtttcccgccgcctgcagttaatg

SEQ ID NO: 523610 - DNA, 33 bp, Homo sapien
ttgctgcccgtttccctccgcctgcagttaatg

SEQ ID NO: 523611 - DNA, 33 bp, Homo sapien
ctgttagccatgtgagaatacggtagttcttcc

SEQ ID NO: 523612 - DNA, 33 bp, Homo sapien
ctgttagccatgtgaggatacggtagttcttcc

SEQ ID NO: 523613 - DNA, 33 bp, Homo sapien
ttttttcctatacatacatccttcgcttgcact

SEQ ID NO: 523614 - DNA, 33 bp, Homo sapien
ttttttcctatacatatatccttcgcttgcact

SEQ ID NO: 523615 - DNA, 33 bp, Homo sapien
catgtgcaaaccaggaaaagatgaataatccaa

SEQ ID NO: 523616 - DNA, 33 bp, Homo sapien
catgtgcaaaccaggagaagatgaataatccaa

SEQ ID NO: 523617 - DNA, 33 bp, Homo sapien
gacatactgttaatcacgtattttctggtaagc

SEQ ID NO: 523618 - DNA, 33 bp, Homo sapien
gacatactgttaatcatgtattttctggtaagc

SEQ ID NO: 523619 - DNA, 33 bp, Homo sapien
ctctcactgatgtcacaggttacctatgcaatc

SEQ ID NO: 523620 - DNA, 33 bp, Homo sapien
ctctcactgatgtcacgggttacctatgcaatc

SEQ ID NO: 523621 - DNA, 33 bp, Homo sapien
ctttctcttttacttacggcagttgaggcccac

SEQ ID NO: 523622 - DNA, 33 bp, Homo sapien
ctttctcttttacttatggcagttgaggcccac

SEQ ID NO: 523623 - DNA, 33 bp, Homo sapien
tcagtgtgatttgagtcactactactgggacct

SEQ ID NO: 523624 - DNA, 33 bp, Homo sapien
tcagtgtgatttgagttactactactgggacct

SEQ ID NO: 523625 - DNA, 33 bp, Homo sapien
actcagatctttcccactacaggtcccgtcagg

SEQ ID NO: 523626 - DNA, 33 bp, Homo sapien
actcagatctttcccattacaggtcccgtcagg

SEQ ID NO: 523627 - DNA, 33 bp, Homo sapien
tctcaacagctaaaaaagcacaggaaagcgtat

SEQ ID NO: 523628 - DNA, 33 bp, Homo sapien
tctcaacagctaaaaaggcacaggaaagcgtat

SEQ ID NO: 523629 - DNA, 33 bp, Homo sapien
tgtatatggcaagcccccaacttccacttggcc

SEQ ID NO: 523630 - DNA, 33 bp, Homo sapien
tgtatatggcaagcccgcaacttccacttggcc

SEQ ID NO: 523631 - DNA, 33 bp, Homo sapien
cagataagaattccaaaagaaaaagaagattgg

SEQ ID NO: 523632 - DNA, 33 bp, Homo sapien
cagataagaattccaagagaaaaagaagattgg

SEQ ID NO: 523633 - DNA, 33 bp, Homo sapien
aggaaaataggcaggacggtaccttcacaaaag

SEQ ID NO: 523634 - DNA, 33 bp, Homo sapien
aggaaaataggcaggatggtaccttcacaaaag

SEQ ID NO: 523635 - DNA, 33 bp, Homo sapien
catctcattgctagaagtgttatttgctgggcc

SEQ ID NO: 523636 - DNA, 33 bp, Homo sapien
catctcattgctagaattgttatttgctgggcc

SEQ ID NO: 523637 - DNA, 33 bp, Homo sapien
gaagcctgaagtcatacataggctcaataactt

SEQ ID NO: 523638 - DNA, 33 bp, Homo sapien
gaagcctgaagtcatatataggctcaataactt

SEQ ID NO: 523639 - DNA, 33 bp, Homo sapien
ctgagccaggggatccaaagaaagagagggatg

SEQ ID NO: 523640 - DNA, 33 bp, Homo sapien
ctgagccaggggatccgaagaaagagagggatg

SEQ ID NO: 523641 - DNA, 33 bp, Homo sapien
ctgctgtgacaagctagaatttgaaggagtaga

SEQ ID NO: 523642 - DNA, 33 bp, Homo sapien
ctgctgtgacaagctataatttgaaggagtaga

SEQ ID NO: 523643 - DNA, 33 bp, Homo sapien
tctcactgtgtgtcaccctatgtcaggctttct

SEQ ID NO: 523644 - DNA, 33 bp, Homo sapien
tctcactgtgtgtcactctatgtcaggctttct

SEQ ID NO: 523645 - DNA, 33 bp, Homo sapien
tgcttgagaatctgccaatcagttgatggctaa

SEQ ID NO: 523646 - DNA, 33 bp, Homo sapien
tgcttgagaatctgcccatcagttgatggctaa

SEQ ID NO: 523647 - DNA, 33 bp, Homo sapien
tcagtcacacttttaaccaactccgatagggca

SEQ ID NO: 523648 - DNA, 33 bp, Homo sapien
tcagtcacacttttaagcaactccgatagggca

SEQ ID NO: 523649 - DNA, 33 bp, Homo sapien
agtggaattgcttcaacgcgctacacaaaggga

SEQ ID NO: 523650 - DNA, 33 bp, Homo sapien
agtggaattgcttcaatgcgctacacaaaggga

SEQ ID NO: 523651 - DNA, 33 bp, Homo sapien
tcacctctacaaagacaaggcagttatctaacc

SEQ ID NO: 523652 - DNA, 33 bp, Homo sapien
tcacctctacaaagacgaggcagttatctaacc

SEQ ID NO: 523653 - DNA, 33 bp, Homo sapien
agaactgaagttgttacgcctcttggaaaaata

SEQ ID NO: 523654 - DNA, 33 bp, Homo sapien
agaactgaagttgttaggcctcttggaaaaata

SEQ ID NO: 523655 - DNA, 33 bp, Homo sapien
ttagtaaccaggctcactaacgagagatggatg

SEQ ID NO: 523656 - DNA, 33 bp, Homo sapien
ttagtaaccaggctcattaacgagagatggatg

SEQ ID NO: 523657 - DNA, 33 bp, Homo sapien
cctgactgacttgtaaaaagacttccctattct

SEQ ID NO: 523658 - DNA, 33 bp, Homo sapien
cctgactgacttgtaagaagacttccctattct

SEQ ID NO: 523659 - DNA, 33 bp, Homo sapien
tcctcctctctagacaatgattcttgcgatgag

SEQ ID NO: 523660 - DNA, 33 bp, Homo sapien
tcctcctctctagacagtgattcttgcgatgag

SEQ ID NO: 523661 - DNA, 33 bp, Homo sapien
tgagggtgacagggaacagatggtacaaaccaa

SEQ ID NO: 523662 - DNA, 33 bp, Homo sapien
tgagggtgacagggaagagatggtacaaaccaa

SEQ ID NO: 523663 - DNA, 33 bp, Homo sapien
cttacagatttttgaaagaaagtcatttgacta

SEQ ID NO: 523664 - DNA, 33 bp, Homo sapien
cttacagatttttgaacgaaagtcatttgacta

SEQ ID NO: 523665 - DNA, 33 bp, Homo sapien
cacctgctatacccagacaggtttctcaacctt

SEQ ID NO: 523666 - DNA, 33 bp, Homo sapien
cacctgctatacccaggcaggtttctcaacctt

SEQ ID NO: 523667 - DNA, 33 bp, Homo sapien
tccgcaggtgtgaaacaatttgctttctggctt

SEQ ID NO: 523668 - DNA, 33 bp, Homo sapien
tccgcaggtgtgaaacgatttgctttctggctt

SEQ ID NO: 523669 - DNA, 33 bp, Homo sapien
ttgaagaaggagctgcaatagaccagacagaca

SEQ ID NO: 523670 - DNA, 33 bp, Homo sapien
ttgaagaaggagctgcgatagaccagacagaca

SEQ ID NO: 523671 - DNA, 33 bp, Homo sapien
ccatctttactctcccaatttccttcacatctc

SEQ ID NO: 523672 - DNA, 33 bp, Homo sapien
ccatctttactctcccgatttccttcacatctc

SEQ ID NO: 523673 - DNA, 33 bp, Homo sapien
ctaggacgatacttgacgattgtgtgggggacc

SEQ ID NO: 523674 - DNA, 33 bp, Homo sapien
ctaggacgatacttgaggattgtgtgggggacc

SEQ ID NO: 523675 - DNA, 33 bp, Homo sapien
ggaaccttctctatgacgttcagttgacctaga

SEQ ID NO: 523676 - DNA, 33 bp, Homo sapien
ggaaccttctctatgatgttcagttgacctaga

SEQ ID NO: 523677 - DNA, 33 bp, Homo sapien
aagctggttttacaataaggtgtctgtaaactg

SEQ ID NO: 523678 - DNA, 33 bp, Homo sapien
aagctggttttacaatcaggtgtctgtaaactg

SEQ ID NO: 523679 - DNA, 33 bp, Homo sapien
cccccctgcaaacccacgacagaacattgaaag

SEQ ID NO: 523680 - DNA, 33 bp, Homo sapien
cccccctgcaaacccatgacagaacattgaaag

SEQ ID NO: 523681 - DNA, 33 bp, Homo sapien
gatgccgaagaaaaacaaatgtaagctgtgccc

SEQ ID NO: 523682 - DNA, 33 bp, Homo sapien
gatgccgaagaaaaaccaatgtaagctgtgccc

SEQ ID NO: 523683 - DNA, 33 bp, Homo sapien
aaggatgagaggcacccgagcaacacttctgca

SEQ ID NO: 523684 - DNA, 33 bp, Homo sapien
aaggatgagaggcacctgagcaacacttctgca

SEQ ID NO: 523685 - DNA, 33 bp, Homo sapien
attggaagatgttaaaatgctaatttgagagaa

SEQ ID NO: 523686 - DNA, 33 bp, Homo sapien
attggaagatgttaaagtgctaatttgagagaa

SEQ ID NO: 523687 - DNA, 33 bp, Homo sapien
gtccttgatgacggaaagaaccataaagtaatc

SEQ ID NO: 523688 - DNA, 33 bp, Homo sapien
gtccttgatgacggaaggaaccataaagtaatc

SEQ ID NO: 523689 - DNA, 33 bp, Homo sapien
ggggtttccttggtacagcactatttgtaaaag

SEQ ID NO: 523690 - DNA, 33 bp, Homo sapien
ggggtttccttggtacggcactatttgtaaaag

SEQ ID NO: 523691 - DNA, 33 bp, Homo sapien
gagactgaggttctgaaaaactaaacttctgtt

SEQ ID NO: 523692 - DNA, 33 bp, Homo sapien
gagactgaggttctgagaaactaaacttctgtt

SEQ ID NO: 523693 - DNA, 33 bp, Homo sapien
atgggatatgctgaaacgaaactgaggattttt

SEQ ID NO: 523694 - DNA, 33 bp, Homo sapien
atgggatatgctgaaatgaaactgaggattttt

SEQ ID NO: 523695 - DNA, 33 bp, Homo sapien
aatcagagaatggtcacgacagtttatcgagtc

SEQ ID NO: 523696 - DNA, 33 bp, Homo sapien
aatcagagaatggtcatgacagtttatcgagtc

SEQ ID NO: 523697 - DNA, 33 bp, Homo sapien
acagtggaaggtttacaaggagttataatgatg

SEQ ID NO: 523698 - DNA, 33 bp, Homo sapien
acagtggaaggtttacgaggagttataatgatg

SEQ ID NO: 523699 - DNA, 33 bp, Homo sapien
aacctgtactctgtccagacattccttatccaa

SEQ ID NO: 523700 - DNA, 33 bp, Homo sapien
aacctgtactctgtccggacattccttatccaa

SEQ ID NO: 523701 - DNA, 33 bp, Homo sapien
aataataataattttacagaagccagtgttgaa

SEQ ID NO: 523702 - DNA, 33 bp, Homo sapien
aataataataattttagagaagccagtgttgaa

SEQ ID NO: 523703 - DNA, 33 bp, Homo sapien
ctactggttcaatggacaaaacagtgaacatct

SEQ ID NO: 523704 - DNA, 33 bp, Homo sapien
ctactggttcaatggataaaacagtgaacatct

SEQ ID NO: 523705 - DNA, 33 bp, Homo sapien
aattatattaatacaaagtgaggttaagttcag

SEQ ID NO: 523706 - DNA, 33 bp, Homo sapien
aattatattaatacaaggtgaggttaagttcag

SEQ ID NO: 523707 - DNA, 33 bp, Homo sapien
tgatctatgaaagttacgtttattagactactg

SEQ ID NO: 523708 - DNA, 33 bp, Homo sapien
tgatctatgaaagttatgtttattagactactg

SEQ ID NO: 523709 - DNA, 33 bp, Homo sapien
cccctgcagataccaacggataactgtaatgca

SEQ ID NO: 523710 - DNA, 33 bp, Homo sapien
cccctgcagataccaatggataactgtaatgca

SEQ ID NO: 523711 - DNA, 33 bp, Homo sapien
ctgcatccaaaatacactgagaaatagtattga

SEQ ID NO: 523712 - DNA, 33 bp, Homo sapien
ctgcatccaaaatacagtgagaaatagtattga

SEQ ID NO: 523713 - DNA, 33 bp, Homo sapien
agaatagagaagtgaagaattgaatcatgattt

SEQ ID NO: 523714 - DNA, 33 bp, Homo sapien
agaatagagaagtgaataattgaatcatgattt

SEQ ID NO: 523715 - DNA, 33 bp, Homo sapien
tattctgacctataaccgcattctgttgtccat

SEQ ID NO: 523716 - DNA, 33 bp, Homo sapien
tattctgacctataactgcattctgttgtccat

SEQ ID NO: 523717 - DNA, 33 bp, Homo sapien
aagagagatcttgaggcatacaggcaattcctg

SEQ ID NO: 523718 - DNA, 33 bp, Homo sapien
aagagagatcttgagggatacaggcaattcctg

SEQ ID NO: 523719 - DNA, 33 bp, Homo sapien
actctgtatcaggcacaatgaagaaaaatgacc

SEQ ID NO: 523720 - DNA, 33 bp, Homo sapien
actctgtatcaggcacgatgaagaaaaatgacc

SEQ ID NO: 523721 - DNA, 33 bp, Homo sapien
gtcctagtcttatttacggaaacacctctacca

SEQ ID NO: 523722 - DNA, 33 bp, Homo sapien
gtcctagtcttatttatggaaacacctctacca

SEQ ID NO: 523723 - DNA, 33 bp, Homo sapien
ctaatagctgggattacaaggcataaaccacca

SEQ ID NO: 523724 - DNA, 33 bp, Homo sapien
ctaatagctgggattagaaggcataaaccacca

SEQ ID NO: 523725 - DNA, 33 bp, Homo sapien
tcaacattgaaagatgaactaccatgaaaatcc

SEQ ID NO: 523726 - DNA, 33 bp, Homo sapien
tcaacattgaaagatgcactaccatgaaaatcc

SEQ ID NO: 523727 - DNA, 33 bp, Homo sapien
tagccagaatttggggaaaaaaactgttcatta

SEQ ID NO: 523728 - DNA, 33 bp, Homo sapien
tagccagaatttgggggaaaaaactgttcatta

SEQ ID NO: 523729 - DNA, 33 bp, Homo sapien
aatttattacctcacccagcaaaatgttcagat

SEQ ID NO: 523730 - DNA, 33 bp, Homo sapien
aatttattacctcacctagcaaaatgttcagat

SEQ ID NO: 523731 - DNA, 33 bp, Homo sapien
aactatgcagagagaaaataaaagtaactgagg

SEQ ID NO: 523732 - DNA, 33 bp, Homo sapien
aactatgcagagagaagataaaagtaactgagg

SEQ ID NO: 523733 - DNA, 33 bp, Homo sapien
tcggcaaaaccagccactatgttatgaggatgc

SEQ ID NO: 523734 - DNA, 33 bp, Homo sapien
tcggcaaaaccagccattatgttatgaggatgc

SEQ ID NO: 523735 - DNA, 33 bp, Homo sapien
ccttagataatgtccactgctttttatcatgaa

SEQ ID NO: 523736 - DNA, 33 bp, Homo sapien
ccttagataatgtccagtgctttttatcatgaa

SEQ ID NO: 523737 - DNA, 33 bp, Homo sapien
aaataagaaagaagacaaggttcggagaagttc

SEQ ID NO: 523738 - DNA, 33 bp, Homo sapien
aaataagaaagaagacgaggttcggagaagttc

SEQ ID NO: 523739 - DNA, 33 bp, Homo sapien
gtgctgtcacatactacgtcttattcattcctt

SEQ ID NO: 523740 - DNA, 33 bp, Homo sapien
gtgctgtcacatactaggtcttattcattcctt

SEQ ID NO: 523741 - DNA, 33 bp, Homo sapien
tctgtgagcacattacacatagagaaatatttc

SEQ ID NO: 523742 - DNA, 33 bp, Homo sapien
tctgtgagcacattacgcatagagaaatatttc

SEQ ID NO: 523743 - DNA, 33 bp, Homo sapien
ttgggttgattttcaaagtttcctggtttgaac

SEQ ID NO: 523744 - DNA, 33 bp, Homo sapien
ttgggttgattttcaacgtttcctggtttgaac

SEQ ID NO: 523745 - DNA, 33 bp, Homo sapien
aatgaatttgcaaaaacggaaataaagctatag

SEQ ID NO: 523746 - DNA, 33 bp, Homo sapien
aatgaatttgcaaaaatggaaataaagctatag

SEQ ID NO: 523747 - DNA, 33 bp, Homo sapien
tccctacagtagtggacctaataagagtcttgc

SEQ ID NO: 523748 - DNA, 33 bp, Homo sapien
tccctacagtagtggagctaataagagtcttgc

SEQ ID NO: 523749 - DNA, 33 bp, Homo sapien
gagcagtctgggttgactaataacactggggct

SEQ ID NO: 523750 - DNA, 33 bp, Homo sapien
gagcagtctgggttgattaataacactggggct

SEQ ID NO: 523751 - DNA, 33 bp, Homo sapien
caatctccctcacaccaataaatgtgatattgc

SEQ ID NO: 523752 - DNA, 33 bp, Homo sapien
caatctccctcacaccgataaatgtgatattgc

SEQ ID NO: 523753 - DNA, 33 bp, Homo sapien
atagctccagactgcaaaagagctctggtaaac

SEQ ID NO: 523754 - DNA, 33 bp, Homo sapien
atagctccagactgcagaagagctctggtaaac

SEQ ID NO: 523755 - DNA, 33 bp, Homo sapien
tctaatctttcagccacaggtaacatggactcc

SEQ ID NO: 523756 - DNA, 33 bp, Homo sapien
tctaatctttcagccataggtaacatggactcc

SEQ ID NO: 523757 - DNA, 33 bp, Homo sapien
gcctttcacataagacaacaggttccactggat

SEQ ID NO: 523758 - DNA, 33 bp, Homo sapien
gcctttcacataagacgacaggttccactggat

SEQ ID NO: 523759 - DNA, 33 bp, Homo sapien
tcatgtcaaggaagcaatactaatttcagtgat

SEQ ID NO: 523760 - DNA, 33 bp, Homo sapien
tcatgtcaaggaagcagtactaatttcagtgat

SEQ ID NO: 523761 - DNA, 33 bp, Homo sapien
gactgctaagcaaaaacaggcttttggtgagta

SEQ ID NO: 523762 - DNA, 33 bp, Homo sapien
gactgctaagcaaaaataggcttttggtgagta

SEQ ID NO: 523763 - DNA, 33 bp, Homo sapien
agtctcctataggcacggcggaaaggtattaag

SEQ ID NO: 523764 - DNA, 33 bp, Homo sapien
agtctcctataggcactgcggaaaggtattaag

SEQ ID NO: 523765 - DNA, 33 bp, Homo sapien
gttctgatatttaacccaccctcaaaggatcat

SEQ ID NO: 523766 - DNA, 33 bp, Homo sapien
gttctgatatttaacctaccctcaaaggatcat

SEQ ID NO: 523767 - DNA, 33 bp, Homo sapien
aataacagtaatcaagaaaatcaaacattgcaa

SEQ ID NO: 523768 - DNA, 33 bp, Homo sapien
aataacagtaatcaagcaaatcaaacattgcaa

SEQ ID NO: 523769 - DNA, 33 bp, Homo sapien
ttcaggatgataaacagtataggctctggagtt

SEQ ID NO: 523770 - DNA, 33 bp, Homo sapien
ttcaggatgataaacattataggctctggagtt

SEQ ID NO: 523771 - DNA, 33 bp, Homo sapien
catgtttgaatttgcaaaagtagttctttcaaa

SEQ ID NO: 523772 - DNA, 33 bp, Homo sapien
catgtttgaatttgcacaagtagttctttcaaa

SEQ ID NO: 523773 - DNA, 33 bp, Homo sapien
gcatagaagtgcagcaaaaaattttacagtatc

SEQ ID NO: 523774 - DNA, 33 bp, Homo sapien
gcatagaagtgcagcagaaaattttacagtatc

SEQ ID NO: 523775 - DNA, 33 bp, Homo sapien
ttagtgacaaacatcacgtggcatagaagtgca

SEQ ID NO: 523776 - DNA, 33 bp, Homo sapien
ttagtgacaaacatcatgtggcatagaagtgca

SEQ ID NO: 523777 - DNA, 33 bp, Homo sapien
tgatacaggctcaagactcaaagagaaagataa

SEQ ID NO: 523778 - DNA, 33 bp, Homo sapien
tgatacaggctcaagagtcaaagagaaagataa

SEQ ID NO: 523779 - DNA, 33 bp, Homo sapien
aatgcttatctcactcaaaaatcccatacctag

SEQ ID NO: 523780 - DNA, 33 bp, Homo sapien
aatgcttatctcactcgaaaatcccatacctag

SEQ ID NO: 523781 - DNA, 33 bp, Homo sapien
agaaccagcaggggaacctgtgtctttcaacct

SEQ ID NO: 523782 - DNA, 33 bp, Homo sapien
agaaccagcaggggaatctgtgtctttcaacct

SEQ ID NO: 523783 - DNA, 33 bp, Homo sapien
ggcattgggatctgacaaggactctatatttac

SEQ ID NO: 523784 - DNA, 33 bp, Homo sapien
ggcattgggatctgacgaggactctatatttac

SEQ ID NO: 523785 - DNA, 33 bp, Homo sapien
ttcctcgtatcagggcaatggaaggtcgtagag

SEQ ID NO: 523786 - DNA, 33 bp, Homo sapien
ttcctcgtatcagggccatggaaggtcgtagag

SEQ ID NO: 523787 - DNA, 33 bp, Homo sapien
aagaagtctatgaatagcgcagttaatgggtac

SEQ ID NO: 523788 - DNA, 33 bp, Homo sapien
aagaagtctatgaatatcgcagttaatgggtac

SEQ ID NO: 523789 - DNA, 33 bp, Homo sapien
ttcagtaaagtttgacaataaaaaatcaatata

SEQ ID NO: 523790 - DNA, 33 bp, Homo sapien
ttcagtaaagtttgacgataaaaaatcaatata

SEQ ID NO: 523791 - DNA, 33 bp, Homo sapien
aacaagggcagacaaccgatactctacagttta

SEQ ID NO: 523792 - DNA, 33 bp, Homo sapien
aacaagggcagacaactgatactctacagttta

SEQ ID NO: 523793 - DNA, 33 bp, Homo sapien
gctcagcatcaagggactattgtaccaatttct

SEQ ID NO: 523794 - DNA, 33 bp, Homo sapien
gctcagcatcaagggattattgtaccaatttct

SEQ ID NO: 523795 - DNA, 33 bp, Homo sapien
accttagcgcttacaccgagactgccattgaaa

SEQ ID NO: 523796 - DNA, 33 bp, Homo sapien
accttagcgcttacactgagactgccattgaaa

SEQ ID NO: 523797 - DNA, 33 bp, Homo sapien
ttactagcaagttttgaaaagtaggtggctttc

SEQ ID NO: 523798 - DNA, 33 bp, Homo sapien
ttactagcaagttttggaaagtaggtggctttc

SEQ ID NO: 523799 - DNA, 33 bp, Homo sapien
aacaagctaaactttgcagtctcacaagcagaa

SEQ ID NO: 523800 - DNA, 33 bp, Homo sapien
aacaagctaaactttgtagtctcacaagcagaa

SEQ ID NO: 523801 - DNA, 33 bp, Homo sapien
tagtataacctttcccacatgaaacaggaagtc

SEQ ID NO: 523802 - DNA, 33 bp, Homo sapien
tagtataacctttcccgcatgaaacaggaagtc

SEQ ID NO: 523803 - DNA, 33 bp, Homo sapien
attgactggaacaagactactcagctacaacat

SEQ ID NO: 523804 - DNA, 33 bp, Homo sapien
attgactggaacaagattactcagctacaacat

SEQ ID NO: 523805 - DNA, 33 bp, Homo sapien
ggttgtgaataccgtgaaaaaaatgtgggcttt

SEQ ID NO: 523806 - DNA, 33 bp, Homo sapien
ggttgtgaataccgtgcaaaaaatgtgggcttt

SEQ ID NO: 523807 - DNA, 33 bp, Homo sapien
ctatttcagtgcattagaactttattttgcaaa

SEQ ID NO: 523808 - DNA, 33 bp, Homo sapien
ctatttcagtgcattataactttattttgcaaa

SEQ ID NO: 523809 - DNA, 33 bp, Homo sapien
agttatgttgaacaaacatgagctgttataaat

SEQ ID NO: 523810 - DNA, 33 bp, Homo sapien
agttatgttgaacaaatatgagctgttataaat

SEQ ID NO: 523811 - DNA, 33 bp, Homo sapien
gctaaggataaggtaccaaacaacagcgactct

SEQ ID NO: 523812 - DNA, 33 bp, Homo sapien
gctaaggataaggtactaaacaacagcgactct

SEQ ID NO: 523813 - DNA, 33 bp, Homo sapien
tttggaagctttcaacgctaacttttcaaactt

SEQ ID NO: 523814 - DNA, 33 bp, Homo sapien
tttggaagctttcaactctaacttttcaaactt

SEQ ID NO: 523815 - DNA, 33 bp, Homo sapien
actctctttaaataaaacataatacccacagaa

SEQ ID NO: 523816 - DNA, 33 bp, Homo sapien
actctctttaaataaatcataatacccacagaa

SEQ ID NO: 523817 - DNA, 33 bp, Homo sapien
tgtcttaagacacatgaaaaagttgaattctct

SEQ ID NO: 523818 - DNA, 33 bp, Homo sapien
tgtcttaagacacatggaaaagttgaattctct

SEQ ID NO: 523819 - DNA, 33 bp, Homo sapien
gggagattaattccaaatgaaaaggatccaaag

SEQ ID NO: 523820 - DNA, 33 bp, Homo sapien
gggagattaattccaactgaaaaggatccaaag

SEQ ID NO: 523821 - DNA, 33 bp, Homo sapien
gctgaacactgagttcaattgctaatggccaat

SEQ ID NO: 523822 - DNA, 33 bp, Homo sapien
gctgaacactgagttccattgctaatggccaat

SEQ ID NO: 523823 - DNA, 33 bp, Homo sapien
cagaactgtgagtaaccgagagaccctactggt

SEQ ID NO: 523824 - DNA, 33 bp, Homo sapien
cagaactgtgagtaactgagagaccctactggt

SEQ ID NO: 523825 - DNA, 33 bp, Homo sapien
accagaaagtgggaaacgagatagttttctaga

SEQ ID NO: 523826 - DNA, 33 bp, Homo sapien
accagaaagtgggaaaggagatagttttctaga

SEQ ID NO: 523827 - DNA, 33 bp, Homo sapien
cttttgatgccatatccaagtaaacattgccta

SEQ ID NO: 523828 - DNA, 33 bp, Homo sapien
cttttgatgccatatctaagtaaacattgccta

SEQ ID NO: 523829 - DNA, 33 bp, Homo sapien
tataagtgggatatgacaggagttaagatacag

SEQ ID NO: 523830 - DNA, 33 bp, Homo sapien
tataagtgggatatgagaggagttaagatacag

SEQ ID NO: 523831 - DNA, 33 bp, Homo sapien
acctgcacactgacgaagcatcttaaatttaac

SEQ ID NO: 523832 - DNA, 33 bp, Homo sapien
acctgcacactgacgaggcatcttaaatttaac

SEQ ID NO: 523833 - DNA, 33 bp, Homo sapien
aaatccaactggattgaataagaagtctgttgc

SEQ ID NO: 523834 - DNA, 33 bp, Homo sapien
aaatccaactggattggataagaagtctgttgc

SEQ ID NO: 523835 - DNA, 33 bp, Homo sapien
caaattcaaggtactacgtcacagaacacttca

SEQ ID NO: 523836 - DNA, 33 bp, Homo sapien
caaattcaaggtactatgtcacagaacacttca

SEQ ID NO: 523837 - DNA, 33 bp, Homo sapien
tctgcagcttgttgggaaaataactcttatctg

SEQ ID NO: 523838 - DNA, 33 bp, Homo sapien
tctgcagcttgttgggtaaataactcttatctg

SEQ ID NO: 523839 - DNA, 33 bp, Homo sapien
aacagtggaaataaaaagttatctagtgtctaa

SEQ ID NO: 523840 - DNA, 33 bp, Homo sapien
aacagtggaaataaaaggttatctagtgtctaa

SEQ ID NO: 523841 - DNA, 33 bp, Homo sapien
gtttataatagcttgcaaatgactatgtgcttg

SEQ ID NO: 523842 - DNA, 33 bp, Homo sapien
gtttataatagcttgcgaatgactatgtgcttg

SEQ ID NO: 523843 - DNA, 33 bp, Homo sapien
ttgattttttttcctacgagatcattgtcatat

SEQ ID NO: 523844 - DNA, 33 bp, Homo sapien
ttgattttttttcctatgagatcattgtcatat

SEQ ID NO: 523845 - DNA, 33 bp, Homo sapien
gagttgggacgagatgcacagtagcacaccact

SEQ ID NO: 523846 - DNA, 33 bp, Homo sapien
gagttgggacgagatggacagtagcacaccact

SEQ ID NO: 523847 - DNA, 33 bp, Homo sapien
tctttaacacactgaggatatgtattctccttc

SEQ ID NO: 523848 - DNA, 33 bp, Homo sapien
tctttaacacactgagtatatgtattctccttc

SEQ ID NO: 523849 - DNA, 33 bp, Homo sapien
gcctttaataagacaaccaagatcagagttcac

SEQ ID NO: 523850 - DNA, 33 bp, Homo sapien
gcctttaataagacaatcaagatcagagttcac

SEQ ID NO: 523851 - DNA, 33 bp, Homo sapien
ggaggtttgccctatccactcaggaaagggaac

SEQ ID NO: 523852 - DNA, 33 bp, Homo sapien
ggaggtttgccctatctactcaggaaagggaac

SEQ ID NO: 523853 - DNA, 33 bp, Homo sapien
cctgggcgccacactacgctttaggaaattttc

SEQ ID NO: 523854 - DNA, 33 bp, Homo sapien
cctgggcgccacactatgctttaggaaattttc

SEQ ID NO: 523855 - DNA, 33 bp, Homo sapien
aactagacagagggaaatcactcatcgcggtgg

SEQ ID NO: 523856 - DNA, 33 bp, Homo sapien
aactagacagagggaagtcactcatcgcggtgg

SEQ ID NO: 523857 - DNA, 33 bp, Homo sapien
caaattgttaggattacatgtgtgagccaccac

SEQ ID NO: 523858 - DNA, 33 bp, Homo sapien
caaattgttaggattatatgtgtgagccaccac

SEQ ID NO: 523859 - DNA, 33 bp, Homo sapien
atcaacataaatgaagaaagtgattgtgaggag

SEQ ID NO: 523860 - DNA, 33 bp, Homo sapien
atcaacataaatgaaggaagtgattgtgaggag

SEQ ID NO: 523861 - DNA, 33 bp, Homo sapien
tatttttcaacctggccgatgcttagagaaaat

SEQ ID NO: 523862 - DNA, 33 bp, Homo sapien
tatttttcaacctggctgatgcttagagaaaat

SEQ ID NO: 523863 - DNA, 33 bp, Homo sapien
ggtatttggtcagtcactattctgagtgtgtct

SEQ ID NO: 523864 - DNA, 33 bp, Homo sapien
ggtatttggtcagtcattattctgagtgtgtct

SEQ ID NO: 523865 - DNA, 33 bp, Homo sapien
atacagctcaccataacgtagaatgaggggagc

SEQ ID NO: 523866 - DNA, 33 bp, Homo sapien
atacagctcaccataatgtagaatgaggggagc

SEQ ID NO: 523867 - DNA, 33 bp, Homo sapien
gctctggaaataaaacaatcactagaaattgaa

SEQ ID NO: 523868 - DNA, 33 bp, Homo sapien
gctctggaaataaaactatcactagaaattgaa

SEQ ID NO: 523869 - DNA, 33 bp, Homo sapien
gaacttttacaactcaataacaagaagaacgtg

SEQ ID NO: 523870 - DNA, 33 bp, Homo sapien
gaacttttacaactcactaacaagaagaacgtg

SEQ ID NO: 523871 - DNA, 33 bp, Homo sapien
atacatctacaatctccacccgttaaactacaa

SEQ ID NO: 523872 - DNA, 33 bp, Homo sapien
atacatctacaatctctacccgttaaactacaa

SEQ ID NO: 523873 - DNA, 33 bp, Homo sapien
gttcaccttagtagcacaaattcaggtatggtt

SEQ ID NO: 523874 - DNA, 33 bp, Homo sapien
gttcaccttagtagcataaattcaggtatggtt

SEQ ID NO: 523875 - DNA, 33 bp, Homo sapien
atttttgcagtaatacagcagaagcgatgtgct

SEQ ID NO: 523876 - DNA, 33 bp, Homo sapien
atttttgcagtaatacggcagaagcgatgtgct

SEQ ID NO: 523877 - DNA, 33 bp, Homo sapien
aaaacacaaaaaaccaaagcaacgtgtctgctc

SEQ ID NO: 523878 - DNA, 33 bp, Homo sapien
aaaacacaaaaaaccacagcaacgtgtctgctc

SEQ ID NO: 523879 - DNA, 33 bp, Homo sapien
agtagcatgtggtaacagagcaaggaatatagg

SEQ ID NO: 523880 - DNA, 33 bp, Homo sapien
agtagcatgtggtaacggagcaaggaatatagg

SEQ ID NO: 523881 - DNA, 33 bp, Homo sapien
aatatagggtggtagcagacacacccagtatcc

SEQ ID NO: 523882 - DNA, 33 bp, Homo sapien
aatatagggtggtagccgacacacccagtatcc

SEQ ID NO: 523883 - DNA, 33 bp, Homo sapien
gcactgatgatattataaagtgagtatgacacc

SEQ ID NO: 523884 - DNA, 33 bp, Homo sapien
gcactgatgatattatgaagtgagtatgacacc

SEQ ID NO: 523885 - DNA, 33 bp, Homo sapien
gtttagatgagataacacgtcagttcctgaaac

SEQ ID NO: 523886 - DNA, 33 bp, Homo sapien
gtttagatgagataacgcgtcagttcctgaaac

SEQ ID NO: 523887 - DNA, 33 bp, Homo sapien
ctctttattcaaacacactaagcatagttttat

SEQ ID NO: 523888 - DNA, 33 bp, Homo sapien
ctctttattcaaacacgctaagcatagttttat

SEQ ID NO: 523889 - DNA, 33 bp, Homo sapien
catcaaagaaaaaagaacaacactaagcacaat

SEQ ID NO: 523890 - DNA, 33 bp, Homo sapien
catcaaagaaaaaagaccaacactaagcacaat

SEQ ID NO: 523891 - DNA, 33 bp, Homo sapien
ggagagctcaaagtctgaagttgttgctcatgg

SEQ ID NO: 523892 - DNA, 33 bp, Homo sapien
ggagagctcaaagtcttaagttgttgctcatgg

SEQ ID NO: 523893 - DNA, 33 bp, Homo sapien
attgatgtaaatttgcaagtatctttaaagttc

SEQ ID NO: 523894 - DNA, 33 bp, Homo sapien
attgatgtaaatttgcgagtatctttaaagttc

SEQ ID NO: 523895 - DNA, 33 bp, Homo sapien
cagcttctgaagttcccgataatagggcatctg

SEQ ID NO: 523896 - DNA, 33 bp, Homo sapien
cagcttctgaagttcctgataatagggcatctg

SEQ ID NO: 523897 - DNA, 33 bp, Homo sapien
ctttggttttctataaagctcatagatttcatt

SEQ ID NO: 523898 - DNA, 33 bp, Homo sapien
ctttggttttctataatgctcatagatttcatt

SEQ ID NO: 523899 - DNA, 33 bp, Homo sapien
actcacagtacactgacaaactagaggaaatgt

SEQ ID NO: 523900 - DNA, 33 bp, Homo sapien
actcacagtacactgataaactagaggaaatgt

SEQ ID NO: 523901 - DNA, 33 bp, Homo sapien
ttaatgagacatgagtaactaaaaagtgataga

SEQ ID NO: 523902 - DNA, 33 bp, Homo sapien
ttaatgagacatgagtgactaaaaagtgataga

SEQ ID NO: 523903 - DNA, 33 bp, Homo sapien
aaaagagactacacaaactggaactttgttgcc

SEQ ID NO: 523904 - DNA, 33 bp, Homo sapien
aaaagagactacacaagctggaactttgttgcc

SEQ ID NO: 523905 - DNA, 33 bp, Homo sapien
ctgactgctaccttaacgctctagttctaacac

SEQ ID NO: 523906 - DNA, 33 bp, Homo sapien
ctgactgctaccttaatgctctagttctaacac

SEQ ID NO: 523907 - DNA, 33 bp, Homo sapien
tttttgaggtggattacgtatagttcgggcctc

SEQ ID NO: 523908 - DNA, 33 bp, Homo sapien
tttttgaggtggattatgtatagttcgggcctc

SEQ ID NO: 523909 - DNA, 33 bp, Homo sapien
gaaccagagaattgaaaagccatcagttttgct

SEQ ID NO: 523910 - DNA, 33 bp, Homo sapien
gaaccagagaattgaagagccatcagttttgct

SEQ ID NO: 523911 - DNA, 33 bp, Homo sapien
atatatattagagctgaacaataaactttgatc

SEQ ID NO: 523912 - DNA, 33 bp, Homo sapien
atatatattagagctggacaataaactttgatc

SEQ ID NO: 523913 - DNA, 33 bp, Homo sapien
actgaatccaagtagacgaaggacagtctatgt

SEQ ID NO: 523914 - DNA, 33 bp, Homo sapien
actgaatccaagtagatgaaggacagtctatgt

SEQ ID NO: 523915 - DNA, 33 bp, Homo sapien
ccgtatgaataatggaaagaaacaaattcctgt

SEQ ID NO: 523916 - DNA, 33 bp, Homo sapien
ccgtatgaataatggagagaaacaaattcctgt

SEQ ID NO: 523917 - DNA, 33 bp, Homo sapien
gctctgtaaagtcagaagagaatcattggcaca

SEQ ID NO: 523918 - DNA, 33 bp, Homo sapien
gctctgtaaagtcagaggagaatcattggcaca

SEQ ID NO: 523919 - DNA, 33 bp, Homo sapien
acgtcagacagacttacgtttttatcttggtgg

SEQ ID NO: 523920 - DNA, 33 bp, Homo sapien
acgtcagacagacttatgtttttatcttggtgg

SEQ ID NO: 523921 - DNA, 33 bp, Homo sapien
ttctgatccacatgataatcacagaatgaggac

SEQ ID NO: 523922 - DNA, 33 bp, Homo sapien
ttctgatccacatgatgatcacagaatgaggac

SEQ ID NO: 523923 - DNA, 33 bp, Homo sapien
cacgttgttgagtttacacttgattttatagaa

SEQ ID NO: 523924 - DNA, 33 bp, Homo sapien
cacgttgttgagtttagacttgattttatagaa

SEQ ID NO: 523925 - DNA, 33 bp, Homo sapien
aataatggacagagagaagttgatgatgcagtg

SEQ ID NO: 523926 - DNA, 33 bp, Homo sapien
aataatggacagagagcagttgatgatgcagtg

SEQ ID NO: 523927 - DNA, 33 bp, Homo sapien
aaattaaatacaactacgtctactgccactaaa

SEQ ID NO: 523928 - DNA, 33 bp, Homo sapien
aaattaaatacaactatgtctactgccactaaa

SEQ ID NO: 523929 - DNA, 33 bp, Homo sapien
cttgaggttagccattaaagactagcgtgacca

SEQ ID NO: 523930 - DNA, 33 bp, Homo sapien
cttgaggttagccattcaagactagcgtgacca

SEQ ID NO: 523931 - DNA, 33 bp, Homo sapien
ttaaacttatcaaataaaagtgtactagataag

SEQ ID NO: 523932 - DNA, 33 bp, Homo sapien
ttaaacttatcaaatagaagtgtactagataag

SEQ ID NO: 523933 - DNA, 33 bp, Homo sapien
aaagcttagatacaccacaaggcagcagctaag

SEQ ID NO: 523934 - DNA, 33 bp, Homo sapien
aaagcttagatacaccgcaaggcagcagctaag

SEQ ID NO: 523935 - DNA, 33 bp, Homo sapien
agcataattgtcataacgaaaaatggaaatacc

SEQ ID NO: 523936 - DNA, 33 bp, Homo sapien
agcataattgtcataaggaaaaatggaaatacc

SEQ ID NO: 523937 - DNA, 33 bp, Homo sapien
gataaattggtacaatgattatgagtcaattat

SEQ ID NO: 523938 - DNA, 33 bp, Homo sapien
gataaattggtacaattattatgagtcaattat

SEQ ID NO: 523939 - DNA, 33 bp, Homo sapien
cccacttgatgaactacgaatgattatttaact

SEQ ID NO: 523940 - DNA, 33 bp, Homo sapien
cccacttgatgaactatgaatgattatttaact

SEQ ID NO: 523941 - DNA, 33 bp, Homo sapien
taagttgatctgttgagggattgggatgcattg

SEQ ID NO: 523942 - DNA, 33 bp, Homo sapien
taagttgatctgttgatggattgggatgcattg

SEQ ID NO: 523943 - DNA, 33 bp, Homo sapien
tttatagcctatggcacaatggcaacccattag

SEQ ID NO: 523944 - DNA, 33 bp, Homo sapien
tttatagcctatggcagaatggcaacccattag

SEQ ID NO: 523945 - DNA, 33 bp, Homo sapien
gtaaacaagcaattacaacaccactgagtaaag

SEQ ID NO: 523946 - DNA, 33 bp, Homo sapien
gtaaacaagcaattacgacaccactgagtaaag

SEQ ID NO: 523947 - DNA, 33 bp, Homo sapien
catccatatacagaacaaattacactaggaaac

SEQ ID NO: 523948 - DNA, 33 bp, Homo sapien
catccatatacagaacgaattacactaggaaac

SEQ ID NO: 523949 - DNA, 33 bp, Homo sapien
taatgtcagtgaaatcagaagcttgttcatcag

SEQ ID NO: 523950 - DNA, 33 bp, Homo sapien
taatgtcagtgaaatcggaagcttgttcatcag

SEQ ID NO: 523951 - DNA, 33 bp, Homo sapien
atgttttattatctaaaaggtcatttggtgctt

SEQ ID NO: 523952 - DNA, 33 bp, Homo sapien
atgttttattatctaagaggtcatttggtgctt

SEQ ID NO: 523953 - DNA, 33 bp, Homo sapien
tagcttcagccatgtgaatgaaataaaggaatt

SEQ ID NO: 523954 - DNA, 33 bp, Homo sapien
tagcttcagccatgtggatgaaataaaggaatt

SEQ ID NO: 523955 - DNA, 33 bp, Homo sapien
agaatcagaacacttaagccggaaaggacctca

SEQ ID NO: 523956 - DNA, 33 bp, Homo sapien
agaatcagaacacttacgccggaaaggacctca

SEQ ID NO: 523957 - DNA, 33 bp, Homo sapien
gacatgatgatcttcaagattggagtctatcta

SEQ ID NO: 523958 - DNA, 33 bp, Homo sapien
gacatgatgatcttcaggattggagtctatcta

SEQ ID NO: 523959 - DNA, 33 bp, Homo sapien
cgtataagctggaaaagaaaaggtaagagcact

SEQ ID NO: 523960 - DNA, 33 bp, Homo sapien
cgtataagctggaaaataaaaggtaagagcact

SEQ ID NO: 523961 - DNA, 33 bp, Homo sapien
acctccacatctgctaaagaatgaatgctgatt

SEQ ID NO: 523962 - DNA, 33 bp, Homo sapien
acctccacatctgctagagaatgaatgctgatt

SEQ ID NO: 523963 - DNA, 33 bp, Homo sapien
ctttgttcctgtctgtgaaataaggacattaga

SEQ ID NO: 523964 - DNA, 33 bp, Homo sapien
ctttgttcctgtctgttaaataaggacattaga

SEQ ID NO: 523965 - DNA, 33 bp, Homo sapien
gaagaagcaagagaaaatttctcaaacctgagg

SEQ ID NO: 523966 - DNA, 33 bp, Homo sapien
gaagaagcaagagaaagtttctcaaacctgagg

SEQ ID NO: 523967 - DNA, 33 bp, Homo sapien
gttcagtgatcaaccacgtgaagcttcacttac

SEQ ID NO: 523968 - DNA, 33 bp, Homo sapien
gttcagtgatcaaccatgtgaagcttcacttac

SEQ ID NO: 523969 - DNA, 33 bp, Homo sapien
tttttcagttgcttcccaaaataagtatattaa

SEQ ID NO: 523970 - DNA, 33 bp, Homo sapien
tttttcagttgcttccgaaaataagtatattaa

SEQ ID NO: 523971 - DNA, 33 bp, Homo sapien
atcactgacccaaagcaaaaagcaccaggttta

SEQ ID NO: 523972 - DNA, 33 bp, Homo sapien
atcactgacccaaagcgaaaagcaccaggttta

SEQ ID NO: 523973 - DNA, 33 bp, Homo sapien
gaatggcaaagtgataacaagtgcaggcaacaa

SEQ ID NO: 523974 - DNA, 33 bp, Homo sapien
gaatggcaaagtgatagcaagtgcaggcaacaa

SEQ ID NO: 523975 - DNA, 33 bp, Homo sapien
gggctttgcttgattccacccttgtttgtctta

SEQ ID NO: 523976 - DNA, 33 bp, Homo sapien
gggctttgcttgattctacccttgtttgtctta

SEQ ID NO: 523977 - DNA, 33 bp, Homo sapien
atacttctatacttgtaaatcattggctaatgc

SEQ ID NO: 523978 - DNA, 33 bp, Homo sapien
atacttctatacttgtcaatcattggctaatgc

SEQ ID NO: 523979 - DNA, 33 bp, Homo sapien
catgcattcccaggcacggtctgctgtctctgc

SEQ ID NO: 523980 - DNA, 33 bp, Homo sapien
catgcattcccaggcatggtctgctgtctctgc

SEQ ID NO: 523981 - DNA, 33 bp, Homo sapien
tataggcccagtatgaaaggttgctcagcaggg

SEQ ID NO: 523982 - DNA, 33 bp, Homo sapien
tataggcccagtatgagaggttgctcagcaggg

SEQ ID NO: 523983 - DNA, 33 bp, Homo sapien
aaaaagaatagaagcaaaagtgtactgttgtgt

SEQ ID NO: 523984 - DNA, 33 bp, Homo sapien
aaaaagaatagaagcagaagtgtactgttgtgt

SEQ ID NO: 523985 - DNA, 33 bp, Homo sapien
tatccagaagtataaacggttgttgggagaata

SEQ ID NO: 523986 - DNA, 33 bp, Homo sapien
tatccagaagtataaatggttgttgggagaata

SEQ ID NO: 523987 - DNA, 33 bp, Homo sapien
gagcttctaacctttaaaatgcatatgaatcac

SEQ ID NO: 523988 - DNA, 33 bp, Homo sapien
gagcttctaacctttacaatgcatatgaatcac

SEQ ID NO: 523989 - DNA, 33 bp, Homo sapien
tcaacccaatgataccggattttggacttctga

SEQ ID NO: 523990 - DNA, 33 bp, Homo sapien
tcaacccaatgatacctgattttggacttctga

SEQ ID NO: 523991 - DNA, 33 bp, Homo sapien
gcttgtggctgcataaccagaatcttcaggtcc

SEQ ID NO: 523992 - DNA, 33 bp, Homo sapien
gcttgtggctgcataagcagaatcttcaggtcc

SEQ ID NO: 523993 - DNA, 33 bp, Homo sapien
gaaagcagccaaaatgaatgtcaaatatcaagt

SEQ ID NO: 523994 - DNA, 33 bp, Homo sapien
gaaagcagccaaaatggatgtcaaatatcaagt

SEQ ID NO: 523995 - DNA, 33 bp, Homo sapien
atttgaatcactcttagctgacttagttggtca

SEQ ID NO: 523996 - DNA, 33 bp, Homo sapien
atttgaatcactcttatctgacttagttggtca

SEQ ID NO: 523997 - DNA, 33 bp, Homo sapien
cttctaattctcatagccctgctatcccctaca

SEQ ID NO: 523998 - DNA, 33 bp, Homo sapien
cttctaattctcatagtcctgctatcccctaca

SEQ ID NO: 523999 - DNA, 33 bp, Homo sapien
tttgtttccacagcacactctaacttatcttaa

SEQ ID NO: 524000 - DNA, 33 bp, Homo sapien
tttgtttccacagcactctctaacttatcttaa

SEQ ID NO: 524001 - DNA, 33 bp, Homo sapien
tggaaattttcagagaacctttgaatggtatta

SEQ ID NO: 524002 - DNA, 33 bp, Homo sapien
tggaaattttcagagatcctttgaatggtatta

SEQ ID NO: 524003 - DNA, 33 bp, Homo sapien
ttctagaaatggttcaatctatgtttatgtttt

SEQ ID NO: 524004 - DNA, 33 bp, Homo sapien
ttctagaaatggttcagtctatgtttatgtttt

SEQ ID NO: 524005 - DNA, 33 bp, Homo sapien
gtttcactccactaacgacacttggcttaatcc

SEQ ID NO: 524006 - DNA, 33 bp, Homo sapien
gtttcactccactaactacacttggcttaatcc

SEQ ID NO: 524007 - DNA, 33 bp, Homo sapien
tagtgtgaatgcactacaactgaccttgagtac

SEQ ID NO: 524008 - DNA, 33 bp, Homo sapien
tagtgtgaatgcactataactgaccttgagtac

SEQ ID NO: 524009 - DNA, 33 bp, Homo sapien
ttttctctgtgtttgacaatgtaacagaggttt

SEQ ID NO: 524010 - DNA, 33 bp, Homo sapien
ttttctctgtgtttgataatgtaacagaggttt

SEQ ID NO: 524011 - DNA, 33 bp, Homo sapien
catgaagctcttagacaaacacacaggggcaaa

SEQ ID NO: 524012 - DNA, 33 bp, Homo sapien
catgaagctcttagacgaacacacaggggcaaa

SEQ ID NO: 524013 - DNA, 33 bp, Homo sapien
aaagatgatagagttacaaaggattcctgaaga

SEQ ID NO: 524014 - DNA, 33 bp, Homo sapien
aaagatgatagagttagaaaggattcctgaaga

SEQ ID NO: 524015 - DNA, 33 bp, Homo sapien
ttttgtccagcagatactagtgagaagctcggc

SEQ ID NO: 524016 - DNA, 33 bp, Homo sapien
ttttgtccagcagatattagtgagaagctcggc

SEQ ID NO: 524017 - DNA, 33 bp, Homo sapien
gctactgatattttgccaatcatgagatattat

SEQ ID NO: 524018 - DNA, 33 bp, Homo sapien
gctactgatattttgctaatcatgagatattat

SEQ ID NO: 524019 - DNA, 33 bp, Homo sapien
taggtactctgcttcaagctctggaaatctaga

SEQ ID NO: 524020 - DNA, 33 bp, Homo sapien
taggtactctgcttcaggctctggaaatctaga

SEQ ID NO: 524021 - DNA, 33 bp, Homo sapien
atttctagagtctttgaatcttagttgaactgg

SEQ ID NO: 524022 - DNA, 33 bp, Homo sapien
atttctagagtctttggatcttagttgaactgg

SEQ ID NO: 524023 - DNA, 33 bp, Homo sapien
gcttcatgccatctacaagctacaacagttcca

SEQ ID NO: 524024 - DNA, 33 bp, Homo sapien
gcttcatgccatctacgagctacaacagttcca

SEQ ID NO: 524025 - DNA, 33 bp, Homo sapien
tgagaattgccaagaaaaagaggaagagctggg

SEQ ID NO: 524026 - DNA, 33 bp, Homo sapien
tgagaattgccaagaagaagaggaagagctggg

SEQ ID NO: 524027 - DNA, 33 bp, Homo sapien
aaatccaaaaatccaaactccaaaatgctccaa

SEQ ID NO: 524028 - DNA, 33 bp, Homo sapien
aaatccaaaaatccaagctccaaaatgctccaa

SEQ ID NO: 524029 - DNA, 33 bp, Homo sapien
ccaggagtgataaccacagcatggtgccctcct

SEQ ID NO: 524030 - DNA, 33 bp, Homo sapien
ccaggagtgataaccagagcatggtgccctcct

SEQ ID NO: 524031 - DNA, 33 bp, Homo sapien
atggatcaaattaaaacagtgttggtcctgtta

SEQ ID NO: 524032 - DNA, 33 bp, Homo sapien
atggatcaaattaaaatagtgttggtcctgtta

SEQ ID NO: 524033 - DNA, 33 bp, Homo sapien
gtccagtggtaaaagacgaaacacgctatccct

SEQ ID NO: 524034 - DNA, 33 bp, Homo sapien
gtccagtggtaaaagaggaaacacgctatccct

SEQ ID NO: 524035 - DNA, 33 bp, Homo sapien
gcaggcaagggggagaaattatagtatgcaact

SEQ ID NO: 524036 - DNA, 33 bp, Homo sapien
gcaggcaagggggagagattatagtatgcaact

SEQ ID NO: 524037 - DNA, 33 bp, Homo sapien
ctcaccctgaagtagaagggctgttgggtctag

SEQ ID NO: 524038 - DNA, 33 bp, Homo sapien
ctcaccctgaagtagaggggctgttgggtctag

SEQ ID NO: 524039 - DNA, 33 bp, Homo sapien
cctgcccacctttaccccgtgcatattgtggca

SEQ ID NO: 524040 - DNA, 33 bp, Homo sapien
cctgcccacctttacctcgtgcatattgtggca

SEQ ID NO: 524041 - DNA, 33 bp, Homo sapien
tcgccactgtttcaaacgtgcttcttctaactt

SEQ ID NO: 524042 - DNA, 33 bp, Homo sapien
tcgccactgtttcaaatgtgcttcttctaactt

SEQ ID NO: 524043 - DNA, 33 bp, Homo sapien
tccttttccattgactcagcaggtctgcccaga

SEQ ID NO: 524044 - DNA, 33 bp, Homo sapien
tccttttccattgactgagcaggtctgcccaga

SEQ ID NO: 524045 - DNA, 33 bp, Homo sapien
tggaaattctgttttaaggctaattcatattcc

SEQ ID NO: 524046 - DNA, 33 bp, Homo sapien
tggaaattctgttttagggctaattcatattcc

SEQ ID NO: 524047 - DNA, 33 bp, Homo sapien
agttaatgacactgaaatgcacactgaaaaatg

SEQ ID NO: 524048 - DNA, 33 bp, Homo sapien
agttaatgacactgaactgcacactgaaaaatg

SEQ ID NO: 524049 - DNA, 33 bp, Homo sapien
ctggtccatctgtaaagcagaactatggcatag

SEQ ID NO: 524050 - DNA, 33 bp, Homo sapien
ctggtccatctgtaaatcagaactatggcatag

SEQ ID NO: 524051 - DNA, 33 bp, Homo sapien
aactgtattcagtagcaagcgctcatgcctggt

SEQ ID NO: 524052 - DNA, 33 bp, Homo sapien
aactgtattcagtagccagcgctcatgcctggt

SEQ ID NO: 524053 - DNA, 33 bp, Homo sapien
ggtagtgctatatttcaacgggaggatctcctg

SEQ ID NO: 524054 - DNA, 33 bp, Homo sapien
ggtagtgctatatttcgacgggaggatctcctg

SEQ ID NO: 524055 - DNA, 33 bp, Homo sapien
aactaggaaaaccataagtcaggcacagtggct

SEQ ID NO: 524056 - DNA, 33 bp, Homo sapien
aactaggaaaaccataggtcaggcacagtggct

SEQ ID NO: 524057 - DNA, 33 bp, Homo sapien
aggtatcagccctggacgttgtatttttctaag

SEQ ID NO: 524058 - DNA, 33 bp, Homo sapien
aggtatcagccctggatgttgtatttttctaag

SEQ ID NO: 524059 - DNA, 33 bp, Homo sapien
tggttcctataccacaatctagaaacctggcat

SEQ ID NO: 524060 - DNA, 33 bp, Homo sapien
tggttcctataccacagtctagaaacctggcat

SEQ ID NO: 524061 - DNA, 33 bp, Homo sapien
cttacgacctcctcaccactggtctcctttttg

SEQ ID NO: 524062 - DNA, 33 bp, Homo sapien
cttacgacctcctcactactggtctcctttttg

SEQ ID NO: 524063 - DNA, 33 bp, Homo sapien
taactccagggtgttacctcctttgcaaataat

SEQ ID NO: 524064 - DNA, 33 bp, Homo sapien
taactccagggtgttatctcctttgcaaataat

SEQ ID NO: 524065 - DNA, 33 bp, Homo sapien
acccatgttcactggcgaaaattgtttacatct

SEQ ID NO: 524066 - DNA, 33 bp, Homo sapien
acccatgttcactggctaaaattgtttacatct

SEQ ID NO: 524067 - DNA, 33 bp, Homo sapien
atcttcaaaggtaaaaaggtgtgctgaagtaga

SEQ ID NO: 524068 - DNA, 33 bp, Homo sapien
atcttcaaaggtaaaacggtgtgctgaagtaga

SEQ ID NO: 524069 - DNA, 33 bp, Homo sapien
cctaggattttaactgaaaacaatctttaagga

SEQ ID NO: 524070 - DNA, 33 bp, Homo sapien
cctaggattttaactggaaacaatctttaagga

SEQ ID NO: 524071 - DNA, 33 bp, Homo sapien
ggacaatatactactacgtgttacgagacacta

SEQ ID NO: 524072 - DNA, 33 bp, Homo sapien
ggacaatatactactatgtgttacgagacacta

SEQ ID NO: 524073 - DNA, 33 bp, Homo sapien
gaagtacaaattcttacacaggctgagtatcgc

SEQ ID NO: 524074 - DNA, 33 bp, Homo sapien
gaagtacaaattcttatacaggctgagtatcgc

SEQ ID NO: 524075 - DNA, 33 bp, Homo sapien
gagtggttcagttaaacaatctttacagttcca

SEQ ID NO: 524076 - DNA, 33 bp, Homo sapien
gagtggttcagttaaataatctttacagttcca

SEQ ID NO: 524077 - DNA, 33 bp, Homo sapien
tctgtgggtagatggaatagaagcaatttcaaa

SEQ ID NO: 524078 - DNA, 33 bp, Homo sapien
tctgtgggtagatggagtagaagcaatttcaaa

SEQ ID NO: 524079 - DNA, 33 bp, Homo sapien
ggttgtggcccatttacggtcttgaaatcaact

SEQ ID NO: 524080 - DNA, 33 bp, Homo sapien
ggttgtggcccatttatggtcttgaaatcaact

SEQ ID NO: 524081 - DNA, 33 bp, Homo sapien
taattctggaaggcagcaaagaaaccgtctgga

SEQ ID NO: 524082 - DNA, 33 bp, Homo sapien
taattctggaaggcagtaaagaaaccgtctgga

SEQ ID NO: 524083 - DNA, 33 bp, Homo sapien
gaccctcttcaagtcccagactgaacatggcac

SEQ ID NO: 524084 - DNA, 33 bp, Homo sapien
gaccctcttcaagtcctagactgaacatggcac

SEQ ID NO: 524085 - DNA, 33 bp, Homo sapien
ctttggctttgactagcaggactttcctctgta

SEQ ID NO: 524086 - DNA, 33 bp, Homo sapien
ctttggctttgactagtaggactttcctctgta

SEQ ID NO: 524087 - DNA, 33 bp, Homo sapien
tttcatgtgcaaaggcccaggatcacgtgtcag

SEQ ID NO: 524088 - DNA, 33 bp, Homo sapien
tttcatgtgcaaaggctcaggatcacgtgtcag

SEQ ID NO: 524089 - DNA, 33 bp, Homo sapien
cagcactttgctcatccctggttatcataagac

SEQ ID NO: 524090 - DNA, 33 bp, Homo sapien
cagcactttgctcatctctggttatcataagac

SEQ ID NO: 524091 - DNA, 33 bp, Homo sapien
ggtcctttgtgaaactgagccccagtggtctgt

SEQ ID NO: 524092 - DNA, 33 bp, Homo sapien
ggtcctttgtgaaacttagccccagtggtctgt

SEQ ID NO: 524093 - DNA, 33 bp, Homo sapien
tcctggtgaaaactggacatagtcattgctaaa

SEQ ID NO: 524094 - DNA, 33 bp, Homo sapien
tcctggtgaaaactgggcatagtcattgctaaa

SEQ ID NO: 524095 - DNA, 33 bp, Homo sapien
gcccttcttctagcaaatgctaagacacactaa

SEQ ID NO: 524096 - DNA, 33 bp, Homo sapien
gcccttcttctagcaagtgctaagacacactaa

SEQ ID NO: 524097 - DNA, 33 bp, Homo sapien
ggcttcagagctagacgatctgagttcaaatcc

SEQ ID NO: 524098 - DNA, 33 bp, Homo sapien
ggcttcagagctagactatctgagttcaaatcc

SEQ ID NO: 524099 - DNA, 33 bp, Homo sapien
gttactcattacaaaagtaggttacagtctgtt

SEQ ID NO: 524100 - DNA, 33 bp, Homo sapien
gttactcattacaaaattaggttacagtctgtt

SEQ ID NO: 524101 - DNA, 33 bp, Homo sapien
attcaagttgaaagtaccctacagaacatctaa

SEQ ID NO: 524102 - DNA, 33 bp, Homo sapien
attcaagttgaaagtatcctacagaacatctaa

SEQ ID NO: 524103 - DNA, 33 bp, Homo sapien
tttctgcaatttttacacgtttctcagaaacac

SEQ ID NO: 524104 - DNA, 33 bp, Homo sapien
tttctgcaatttttacgcgtttctcagaaacac

SEQ ID NO: 524105 - DNA, 33 bp, Homo sapien
tacattactaccaaagacgagatacatgaaagc

SEQ ID NO: 524106 - DNA, 33 bp, Homo sapien
tacattactaccaaaggcgagatacatgaaagc

SEQ ID NO: 524107 - DNA, 33 bp, Homo sapien
ttacaaacataaagtaagcaagtggatcttcag

SEQ ID NO: 524108 - DNA, 33 bp, Homo sapien
ttacaaacataaagtacgcaagtggatcttcag

SEQ ID NO: 524109 - DNA, 33 bp, Homo sapien
aaccccttatcttaacacaggtactcccttcta

SEQ ID NO: 524110 - DNA, 33 bp, Homo sapien
aaccccttatcttaacgcaggtactcccttcta

SEQ ID NO: 524111 - DNA, 33 bp, Homo sapien
attaaagtgtgttaagcagtgaattttttgagc

SEQ ID NO: 524112 - DNA, 33 bp, Homo sapien
attaaagtgtgttaagtagtgaattttttgagc

SEQ ID NO: 524113 - DNA, 33 bp, Homo sapien
catgaaaccaatatgaaagttttgttgttgttg

SEQ ID NO: 524114 - DNA, 33 bp, Homo sapien
catgaaaccaatatgacagttttgttgttgttg

SEQ ID NO: 524115 - DNA, 33 bp, Homo sapien
agatgtaaaatcgctacagtttaacgatatatt

SEQ ID NO: 524116 - DNA, 33 bp, Homo sapien
agatgtaaaatcgctatagtttaacgatatatt

SEQ ID NO: 524117 - DNA, 33 bp, Homo sapien
gaggaacaaatgaagccagggcaatgttagaac

SEQ ID NO: 524118 - DNA, 33 bp, Homo sapien
gaggaacaaatgaagctagggcaatgttagaac

SEQ ID NO: 524119 - DNA, 33 bp, Homo sapien
gtcattacagccacaacgctttttctccttttc

SEQ ID NO: 524120 - DNA, 33 bp, Homo sapien
gtcattacagccacaatgctttttctccttttc

SEQ ID NO: 524121 - DNA, 33 bp, Homo sapien
ggaagtagcaaaagcacagaggcaaaaaaaaaa

SEQ ID NO: 524122 - DNA, 33 bp, Homo sapien
ggaagtagcaaaagcagagaggcaaaaaaaaaa

SEQ ID NO: 524123 - DNA, 33 bp, Homo sapien
ctagtccagtgcttgacacacggaaaacacata

SEQ ID NO: 524124 - DNA, 33 bp, Homo sapien
ctagtccagtgcttgatacacggaaaacacata

SEQ ID NO: 524125 - DNA, 33 bp, Homo sapien
aattggaaagcagagaaacaatgaaaaattttt

SEQ ID NO: 524126 - DNA, 33 bp, Homo sapien
aattggaaagcagagacacaatgaaaaattttt

SEQ ID NO: 524127 - DNA, 33 bp, Homo sapien
gctataatggaaatggaaaacatataatcttgc

SEQ ID NO: 524128 - DNA, 33 bp, Homo sapien
gctataatggaaatgggaaacatataatcttgc

SEQ ID NO: 524129 - DNA, 33 bp, Homo sapien
tggcacttagttacataaccacagttaactaca

SEQ ID NO: 524130 - DNA, 33 bp, Homo sapien
tggcacttagttacatgaccacagttaactaca

SEQ ID NO: 524131 - DNA, 33 bp, Homo sapien
agaaaatcagcgcacaaagatgccaagagaatc

SEQ ID NO: 524132 - DNA, 33 bp, Homo sapien
agaaaatcagcgcacagagatgccaagagaatc

SEQ ID NO: 524133 - DNA, 33 bp, Homo sapien
atacatttgatgttcacattatagttgtattcc

SEQ ID NO: 524134 - DNA, 33 bp, Homo sapien
atacatttgatgttcatattatagttgtattcc

SEQ ID NO: 524135 - DNA, 33 bp, Homo sapien
tcttgccaacagaatacgagtggaagtggtaca

SEQ ID NO: 524136 - DNA, 33 bp, Homo sapien
tcttgccaacagaatatgagtggaagtggtaca

SEQ ID NO: 524137 - DNA, 33 bp, Homo sapien
cattggctgccaaaaacgagacaaagatgtggt

SEQ ID NO: 524138 - DNA, 33 bp, Homo sapien
cattggctgccaaaaatgagacaaagatgtggt

SEQ ID NO: 524139 - DNA, 33 bp, Homo sapien
atcccttgtctgttgcagatgtgggtagacttg

SEQ ID NO: 524140 - DNA, 33 bp, Homo sapien
atcccttgtctgttgcggatgtgggtagacttg

SEQ ID NO: 524141 - DNA, 33 bp, Homo sapien
acttttcttcagcccacacttttttacttttat

SEQ ID NO: 524142 - DNA, 33 bp, Homo sapien
acttttcttcagcccatacttttttacttttat

SEQ ID NO: 524143 - DNA, 33 bp, Homo sapien
ctgcttccaggctgaccgtaaataccctgaaaa

SEQ ID NO: 524144 - DNA, 33 bp, Homo sapien
ctgcttccaggctgactgtaaataccctgaaaa

SEQ ID NO: 524145 - DNA, 33 bp, Homo sapien
aagcaacaactgatgcaaagaatctcagttttg

SEQ ID NO: 524146 - DNA, 33 bp, Homo sapien
aagcaacaactgatgcgaagaatctcagttttg

SEQ ID NO: 524147 - DNA, 33 bp, Homo sapien
cttgctggcaacatgaaagacaagttacatatg

SEQ ID NO: 524148 - DNA, 33 bp, Homo sapien
cttgctggcaacatgagagacaagttacatatg

SEQ ID NO: 524149 - DNA, 33 bp, Homo sapien
taaagcaattctatgaatcataacctgcattta

SEQ ID NO: 524150 - DNA, 33 bp, Homo sapien
taaagcaattctatgattcataacctgcattta

SEQ ID NO: 524151 - DNA, 33 bp, Homo sapien
caaacctgtattttacaaagatttgaggcaact

SEQ ID NO: 524152 - DNA, 33 bp, Homo sapien
caaacctgtattttacgaagatttgaggcaact

SEQ ID NO: 524153 - DNA, 33 bp, Homo sapien
ttcaagtgagagttggaaatataatctttcaat

SEQ ID NO: 524154 - DNA, 33 bp, Homo sapien
ttcaagtgagagttgggaatataatctttcaat

SEQ ID NO: 524155 - DNA, 33 bp, Homo sapien
gctcaatctagcattacaagtttagcaacatct

SEQ ID NO: 524156 - DNA, 33 bp, Homo sapien
gctcaatctagcattataagtttagcaacatct

SEQ ID NO: 524157 - DNA, 33 bp, Homo sapien
cctcaaattcaaagcaagctgatttccaagcat

SEQ ID NO: 524158 - DNA, 33 bp, Homo sapien
cctcaaattcaaagcaggctgatttccaagcat

SEQ ID NO: 524159 - DNA, 33 bp, Homo sapien
cttcggataccttttaaagtggatactgcgatg

SEQ ID NO: 524160 - DNA, 33 bp, Homo sapien
cttcggataccttttagagtggatactgcgatg

SEQ ID NO: 524161 - DNA, 33 bp, Homo sapien
cacctctacactgctcacacatatatttttatt

SEQ ID NO: 524162 - DNA, 33 bp, Homo sapien
cacctctacactgctcgcacatatatttttatt

SEQ ID NO: 524163 - DNA, 33 bp, Homo sapien
catcttggttgcatcaatgaatgaatagaaata

SEQ ID NO: 524164 - DNA, 33 bp, Homo sapien
catcttggttgcatcagtgaatgaatagaaata

SEQ ID NO: 524165 - DNA, 33 bp, Homo sapien
ccaatcttgaaagcaaccacagaggcaatatag

SEQ ID NO: 524166 - DNA, 33 bp, Homo sapien
ccaatcttgaaagcaagcacagaggcaatatag

SEQ ID NO: 524167 - DNA, 33 bp, Homo sapien
gatctggaaaaatgcaatctggtatttacacat

SEQ ID NO: 524168 - DNA, 33 bp, Homo sapien
gatctggaaaaatgcagtctggtatttacacat

SEQ ID NO: 524169 - DNA, 33 bp, Homo sapien
tttagtatctttaaaagcagtgacaaccataac

SEQ ID NO: 524170 - DNA, 33 bp, Homo sapien
tttagtatctttaaaatcagtgacaaccataac

SEQ ID NO: 524171 - DNA, 33 bp, Homo sapien
agctgtttatcactctgacggccaatgtgagat

SEQ ID NO: 524172 - DNA, 33 bp, Homo sapien
agctgtttatcactcttacggccaatgtgagat

SEQ ID NO: 524173 - DNA, 33 bp, Homo sapien
atgctgcctggctagaaaaatcaacatcagatg

SEQ ID NO: 524174 - DNA, 33 bp, Homo sapien
atgctgcctggctagagaaatcaacatcagatg

SEQ ID NO: 524175 - DNA, 33 bp, Homo sapien
ctctctctctctcatacagtttcagcaggtcat

SEQ ID NO: 524176 - DNA, 33 bp, Homo sapien
ctctctctctctcatatagtttcagcaggtcat

SEQ ID NO: 524177 - DNA, 33 bp, Homo sapien
gtggaatttttgaagtaaatgtctaggaaagta

SEQ ID NO: 524178 - DNA, 33 bp, Homo sapien
gtggaatttttgaagttaatgtctaggaaagta

SEQ ID NO: 524179 - DNA, 33 bp, Homo sapien
gacaatatttttaccacaagtcactgtactaca

SEQ ID NO: 524180 - DNA, 33 bp, Homo sapien
gacaatatttttaccagaagtcactgtactaca

SEQ ID NO: 524181 - DNA, 33 bp, Homo sapien
ctaaatttcacaccctaacatgagctgctcagt

SEQ ID NO: 524182 - DNA, 33 bp, Homo sapien
ctaaatttcacaccctgacatgagctgctcagt

SEQ ID NO: 524183 - DNA, 33 bp, Homo sapien
ctactttatgaacagaaaacactgaggccagga

SEQ ID NO: 524184 - DNA, 33 bp, Homo sapien
ctactttatgaacagagaacactgaggccagga

SEQ ID NO: 524185 - DNA, 33 bp, Homo sapien
cttctaaagtcttccagagtctcatatctgcca

SEQ ID NO: 524186 - DNA, 33 bp, Homo sapien
cttctaaagtcttccatagtctcatatctgcca

SEQ ID NO: 524187 - DNA, 33 bp, Homo sapien
tactaaagtgcctaccacgttgcatcatgataa

SEQ ID NO: 524188 - DNA, 33 bp, Homo sapien
tactaaagtgcctaccgcgttgcatcatgataa

SEQ ID NO: 524189 - DNA, 33 bp, Homo sapien
aactacacttgctggactagttctcttaaacat

SEQ ID NO: 524190 - DNA, 33 bp, Homo sapien
aactacacttgctggagtagttctcttaaacat

SEQ ID NO: 524191 - DNA, 33 bp, Homo sapien
tcttcactggcttcataacgtgctctcctctgt

SEQ ID NO: 524192 - DNA, 33 bp, Homo sapien
tcttcactggcttcatgacgtgctctcctctgt

SEQ ID NO: 524193 - DNA, 33 bp, Homo sapien
tggcattcctttttacaatgggacaaattctgt

SEQ ID NO: 524194 - DNA, 33 bp, Homo sapien
tggcattcctttttacgatgggacaaattctgt

SEQ ID NO: 524195 - DNA, 33 bp, Homo sapien
ggggaacacagggagacgctggagttttgggac

SEQ ID NO: 524196 - DNA, 33 bp, Homo sapien
ggggaacacagggagatgctggagttttgggac

SEQ ID NO: 524197 - DNA, 33 bp, Homo sapien
actgtggtttctttcaatcggtgcacagagaat

SEQ ID NO: 524198 - DNA, 33 bp, Homo sapien
actgtggtttctttcagtcggtgcacagagaat

SEQ ID NO: 524199 - DNA, 33 bp, Homo sapien
gaagggaatgtagagacgcccacgtgttctgtt

SEQ ID NO: 524200 - DNA, 33 bp, Homo sapien
gaagggaatgtagagatgcccacgtgttctgtt

SEQ ID NO: 524201 - DNA, 33 bp, Homo sapien
atctaataatcttaccaaaaaatgtagatggga

SEQ ID NO: 524202 - DNA, 33 bp, Homo sapien
atctaataatcttaccgaaaaatgtagatggga

SEQ ID NO: 524203 - DNA, 33 bp, Homo sapien
gacctagctttcaccacgtaggccacttaagat

SEQ ID NO: 524204 - DNA, 33 bp, Homo sapien
gacctagctttcaccatgtaggccacttaagat

SEQ ID NO: 524205 - DNA, 33 bp, Homo sapien
gtcaggtaggatctataagtcatgatgatgata

SEQ ID NO: 524206 - DNA, 33 bp, Homo sapien
gtcaggtaggatctatgagtcatgatgatgata

SEQ ID NO: 524207 - DNA, 33 bp, Homo sapien
aactgaaagtccagatgacctggttcttagtgg

SEQ ID NO: 524208 - DNA, 33 bp, Homo sapien
aactgaaagtccagattacctggttcttagtgg

SEQ ID NO: 524209 - DNA, 33 bp, Homo sapien
tcacagtttttctaaaatcaagttccaattatc

SEQ ID NO: 524210 - DNA, 33 bp, Homo sapien
tcacagtttttctaaagtcaagttccaattatc

SEQ ID NO: 524211 - DNA, 33 bp, Homo sapien
ccattgctggaagggaagaagtcactttgatgt

SEQ ID NO: 524212 - DNA, 33 bp, Homo sapien
ccattgctggaagggaggaagtcactttgatgt

SEQ ID NO: 524213 - DNA, 33 bp, Homo sapien
gctgactttacaaaaacgaaatgaaagggacag

SEQ ID NO: 524214 - DNA, 33 bp, Homo sapien
gctgactttacaaaaatgaaatgaaagggacag

SEQ ID NO: 524215 - DNA, 33 bp, Homo sapien
tctttaggattgtatacattgtttgccttgatt

SEQ ID NO: 524216 - DNA, 33 bp, Homo sapien
tctttaggattgtatatattgtttgccttgatt

SEQ ID NO: 524217 - DNA, 33 bp, Homo sapien
gtgataatggaaagccaacagatttttagttat

SEQ ID NO: 524218 - DNA, 33 bp, Homo sapien
gtgataatggaaagccgacagatttttagttat

SEQ ID NO: 524219 - DNA, 33 bp, Homo sapien
ttacaggagacctagaaaatgcatctaaatatg

SEQ ID NO: 524220 - DNA, 33 bp, Homo sapien
ttacaggagacctagacaatgcatctaaatatg

SEQ ID NO: 524221 - DNA, 33 bp, Homo sapien
tgtaattacagtactactaacattctactctca

SEQ ID NO: 524222 - DNA, 33 bp, Homo sapien
tgtaattacagtactagtaacattctactctca

SEQ ID NO: 524223 - DNA, 33 bp, Homo sapien
gttgaggcagagttgccatttgatcagttggtc

SEQ ID NO: 524224 - DNA, 33 bp, Homo sapien
gttgaggcagagttgctatttgatcagttggtc

SEQ ID NO: 524225 - DNA, 33 bp, Homo sapien
ttgataaaatggaagtgaatgagaatggcttta

SEQ ID NO: 524226 - DNA, 33 bp, Homo sapien
ttgataaaatggaagttaatgagaatggcttta

SEQ ID NO: 524227 - DNA, 33 bp, Homo sapien
tttgacgtacagggagccagaatggacatagct

SEQ ID NO: 524228 - DNA, 33 bp, Homo sapien
tttgacgtacagggaggcagaatggacatagct

SEQ ID NO: 524229 - DNA, 33 bp, Homo sapien
ggttcatactgatggcccaggtttcttcatctc

SEQ ID NO: 524230 - DNA, 33 bp, Homo sapien
ggttcatactgatggcgcaggtttcttcatctc

SEQ ID NO: 524231 - DNA, 33 bp, Homo sapien
cagagaaagcagccaaatagaaaagatgaagat

SEQ ID NO: 524232 - DNA, 33 bp, Homo sapien
cagagaaagcagccaagtagaaaagatgaagat

SEQ ID NO: 524233 - DNA, 33 bp, Homo sapien
atgcaggtcttcctcacagtctgatacacaaag

SEQ ID NO: 524234 - DNA, 33 bp, Homo sapien
atgcaggtcttcctcatagtctgatacacaaag

SEQ ID NO: 524235 - DNA, 33 bp, Homo sapien
gtgtatatctttccacaaacatatctacagttt

SEQ ID NO: 524236 - DNA, 33 bp, Homo sapien
gtgtatatctttccaccaacatatctacagttt

SEQ ID NO: 524237 - DNA, 33 bp, Homo sapien
accaatggggccttgtaaagttatattattgat

SEQ ID NO: 524238 - DNA, 33 bp, Homo sapien
accaatggggccttgtgaagttatattattgat

SEQ ID NO: 524239 - DNA, 33 bp, Homo sapien
ggaaacagagagggtaaaaagagggaccagaga

SEQ ID NO: 524240 - DNA, 33 bp, Homo sapien
ggaaacagagagggtacaaagagggaccagaga

SEQ ID NO: 524241 - DNA, 33 bp, Homo sapien
atgtctaaaggagaaagagaggccaagtggggc

SEQ ID NO: 524242 - DNA, 33 bp, Homo sapien
atgtctaaaggagaaatagaggccaagtggggc

SEQ ID NO: 524243 - DNA, 33 bp, Homo sapien
ataggggcaggtaagtaaactgtctaatatagg

SEQ ID NO: 524244 - DNA, 33 bp, Homo sapien
ataggggcaggtaagttaactgtctaatatagg

SEQ ID NO: 524245 - DNA, 33 bp, Homo sapien
tttaatttgtatagtaagtatgaatttgctcag

SEQ ID NO: 524246 - DNA, 33 bp, Homo sapien
tttaatttgtatagtaggtatgaatttgctcag

SEQ ID NO: 524247 - DNA, 33 bp, Homo sapien
cacaagtacatagacaaaaatgcaaaccaccat

SEQ ID NO: 524248 - DNA, 33 bp, Homo sapien
cacaagtacatagacacaaatgcaaaccaccat

SEQ ID NO: 524249 - DNA, 33 bp, Homo sapien
taagcaaataccactacccagtagaagacacaa

SEQ ID NO: 524250 - DNA, 33 bp, Homo sapien
taagcaaataccactatccagtagaagacacaa

SEQ ID NO: 524251 - DNA, 33 bp, Homo sapien
acgctgcaagtgcaagcagattgccttcaataa

SEQ ID NO: 524252 - DNA, 33 bp, Homo sapien
acgctgcaagtgcaagtagattgccttcaataa

SEQ ID NO: 524253 - DNA, 33 bp, Homo sapien
cacaagacctgtgggaatcaatttcaggagtaa

SEQ ID NO: 524254 - DNA, 33 bp, Homo sapien
cacaagacctgtgggagtcaatttcaggagtaa

SEQ ID NO: 524255 - DNA, 33 bp, Homo sapien
caagacaaattacaagccaatctctttaatgaa

SEQ ID NO: 524256 - DNA, 33 bp, Homo sapien
caagacaaattacaagtcaatctctttaatgaa

SEQ ID NO: 524257 - DNA, 33 bp, Homo sapien
gaagatgggtggcaaacgttctttttctttaca

SEQ ID NO: 524258 - DNA, 33 bp, Homo sapien
gaagatgggtggcaaatgttctttttctttaca

SEQ ID NO: 524259 - DNA, 33 bp, Homo sapien
cactccgaggctacacagtgtaagcttattgct

SEQ ID NO: 524260 - DNA, 33 bp, Homo sapien
cactccgaggctacacggtgtaagcttattgct

SEQ ID NO: 524261 - DNA, 33 bp, Homo sapien
catggaggcagtagagaaaagggaactagaagc

SEQ ID NO: 524262 - DNA, 33 bp, Homo sapien
catggaggcagtagaggaaagggaactagaagc

SEQ ID NO: 524263 - DNA, 33 bp, Homo sapien
aggcccacacaaataaatggccattgagacatg

SEQ ID NO: 524264 - DNA, 33 bp, Homo sapien
aggcccacacaaataagtggccattgagacatg

SEQ ID NO: 524265 - DNA, 33 bp, Homo sapien
ttgttatctaagaaaaaatcaatcatgcggaaa

SEQ ID NO: 524266 - DNA, 33 bp, Homo sapien
ttgttatctaagaaaatatcaatcatgcggaaa

SEQ ID NO: 524267 - DNA, 33 bp, Homo sapien
gggctgaatcggagtacagttccacaaaactaa

SEQ ID NO: 524268 - DNA, 33 bp, Homo sapien
gggctgaatcggagtagagttccacaaaactaa

SEQ ID NO: 524269 - DNA, 33 bp, Homo sapien
agagaagacagccttacgacaatggggacagag

SEQ ID NO: 524270 - DNA, 33 bp, Homo sapien
agagaagacagccttatgacaatggggacagag

SEQ ID NO: 524271 - DNA, 33 bp, Homo sapien
actctcaactttatacgccaaattgcatatttc

SEQ ID NO: 524272 - DNA, 33 bp, Homo sapien
actctcaactttatactccaaattgcatatttc

SEQ ID NO: 524273 - DNA, 33 bp, Homo sapien
agaataaaggaaagaaatggtattattgaagcc

SEQ ID NO: 524274 - DNA, 33 bp, Homo sapien
agaataaaggaaagaagtggtattattgaagcc

SEQ ID NO: 524275 - DNA, 33 bp, Homo sapien
gatgactaaagtcacaaaagttatataagtcat

SEQ ID NO: 524276 - DNA, 33 bp, Homo sapien
gatgactaaagtcacagaagttatataagtcat

SEQ ID NO: 524277 - DNA, 33 bp, Homo sapien
ttggtgccatctctttcaaaagcaattgaaaat

SEQ ID NO: 524278 - DNA, 33 bp, Homo sapien
ttggtgccatctctttgaaaagcaattgaaaat

SEQ ID NO: 524279 - DNA, 33 bp, Homo sapien
ccaaaattatcttctgaaactttgttaccttta

SEQ ID NO: 524280 - DNA, 33 bp, Homo sapien
ccaaaattatcttctggaactttgttaccttta

SEQ ID NO: 524281 - DNA, 33 bp, Homo sapien
acagcacaggctgacaactcttttgggataaat

SEQ ID NO: 524282 - DNA, 33 bp, Homo sapien
acagcacaggctgacagctcttttgggataaat

SEQ ID NO: 524283 - DNA, 33 bp, Homo sapien
atttcacccctaaacaagctgagaactgagggg

SEQ ID NO: 524284 - DNA, 33 bp, Homo sapien
atttcacccctaaacacgctgagaactgagggg

SEQ ID NO: 524285 - DNA, 33 bp, Homo sapien
acaggtactttaaataagtctcattcaagtggt

SEQ ID NO: 524286 - DNA, 33 bp, Homo sapien
acaggtactttaaatatgtctcattcaagtggt

SEQ ID NO: 524287 - DNA, 33 bp, Homo sapien
caatactattcctccacatattcacttgggttg

SEQ ID NO: 524288 - DNA, 33 bp, Homo sapien
caatactattcctccagatattcacttgggttg

SEQ ID NO: 524289 - DNA, 33 bp, Homo sapien
aaaactcacaagtgaaaattcatgaggcaattc

SEQ ID NO: 524290 - DNA, 33 bp, Homo sapien
aaaactcacaagtgaagattcatgaggcaattc

SEQ ID NO: 524291 - DNA, 33 bp, Homo sapien
atattcaaattgttcagtctttttcagaactta

SEQ ID NO: 524292 - DNA, 33 bp, Homo sapien
atattcaaattgttcattctttttcagaactta

SEQ ID NO: 524293 - DNA, 33 bp, Homo sapien
acctgtgaaaatatcaatcaaggtaatttatat

SEQ ID NO: 524294 - DNA, 33 bp, Homo sapien
acctgtgaaaatatcagtcaaggtaatttatat

SEQ ID NO: 524295 - DNA, 33 bp, Homo sapien
tgcacttttctatctccattcccacgagacaat

SEQ ID NO: 524296 - DNA, 33 bp, Homo sapien
tgcacttttctatctctattcccacgagacaat

SEQ ID NO: 524297 - DNA, 33 bp, Homo sapien
ttgaaggattcagtgcgaatagtttatttggaa

SEQ ID NO: 524298 - DNA, 33 bp, Homo sapien
ttgaaggattcagtgctaatagtttatttggaa

SEQ ID NO: 524299 - DNA, 33 bp, Homo sapien
taaacaaggtatacgaaatgttgagggctatgg

SEQ ID NO: 524300 - DNA, 33 bp, Homo sapien
taaacaaggtatacgagatgttgagggctatgg

SEQ ID NO: 524301 - DNA, 33 bp, Homo sapien
atggtagatgcaatataaactttttctctgcct

SEQ ID NO: 524302 - DNA, 33 bp, Homo sapien
atggtagatgcaatatgaactttttctctgcct

SEQ ID NO: 524303 - DNA, 33 bp, Homo sapien
ggggacatctgacttacatttgtatcattcaca

SEQ ID NO: 524304 - DNA, 33 bp, Homo sapien
ggggacatctgacttatatttgtatcattcaca

SEQ ID NO: 524305 - DNA, 33 bp, Homo sapien
aaaacatgactgtaaaataagtgtggtaagtat

SEQ ID NO: 524306 - DNA, 33 bp, Homo sapien
aaaacatgactgtaaagtaagtgtggtaagtat

SEQ ID NO: 524307 - DNA, 33 bp, Homo sapien
cctctcctcagaatccaaacaaagacaagtttc

SEQ ID NO: 524308 - DNA, 33 bp, Homo sapien
cctctcctcagaatcccaacaaagacaagtttc

SEQ ID NO: 524309 - DNA, 33 bp, Homo sapien
agcaacaagaggcaaactgcccaacatttaagt

SEQ ID NO: 524310 - DNA, 33 bp, Homo sapien
agcaacaagaggcaaattgcccaacatttaagt

SEQ ID NO: 524311 - DNA, 33 bp, Homo sapien
catgtgtgaggagcaactgactgagacctactg

SEQ ID NO: 524312 - DNA, 33 bp, Homo sapien
catgtgtgaggagcaattgactgagacctactg

SEQ ID NO: 524313 - DNA, 33 bp, Homo sapien
ttgttgccattggctcaaacttccttctttagc

SEQ ID NO: 524314 - DNA, 33 bp, Homo sapien
ttgttgccattggctcgaacttccttctttagc

SEQ ID NO: 524315 - DNA, 33 bp, Homo sapien
acaaaatgaatgatgaagttaaacacccaagct

SEQ ID NO: 524316 - DNA, 33 bp, Homo sapien
acaaaatgaatgatgaggttaaacacccaagct

SEQ ID NO: 524317 - DNA, 33 bp, Homo sapien
gtggtgggctggaacaaaaaatgcaatatttca

SEQ ID NO: 524318 - DNA, 33 bp, Homo sapien
gtggtgggctggaacagaaaatgcaatatttca

SEQ ID NO: 524319 - DNA, 33 bp, Homo sapien
aaatgtcatcaatcagaattttcagtaaataat

SEQ ID NO: 524320 - DNA, 33 bp, Homo sapien
aaatgtcatcaatcagcattttcagtaaataat

SEQ ID NO: 524321 - DNA, 33 bp, Homo sapien
actcatctaataattcagaacaccatgtgttgg

SEQ ID NO: 524322 - DNA, 33 bp, Homo sapien
actcatctaataattcggaacaccatgtgttgg

SEQ ID NO: 524323 - DNA, 33 bp, Homo sapien
tatgttttctgagccacctggtaggagcaggat

SEQ ID NO: 524324 - DNA, 33 bp, Homo sapien
tatgttttctgagccatctggtaggagcaggat

SEQ ID NO: 524325 - DNA, 33 bp, Homo sapien
accagaaagtagtgtcaaacagaactttatggg

SEQ ID NO: 524326 - DNA, 33 bp, Homo sapien
accagaaagtagtgtcgaacagaactttatggg

SEQ ID NO: 524327 - DNA, 33 bp, Homo sapien
aacataatgtcctccaagtttatgatgttttac

SEQ ID NO: 524328 - DNA, 33 bp, Homo sapien
aacataatgtcctccaggtttatgatgttttac

SEQ ID NO: 524329 - DNA, 33 bp, Homo sapien
gagcccactctcaccactcttattcaccctgga

SEQ ID NO: 524330 - DNA, 33 bp, Homo sapien
gagcccactctcaccattcttattcaccctgga

SEQ ID NO: 524331 - DNA, 33 bp, Homo sapien
tagctatggttccaaaagtgcagggtgcagcag

SEQ ID NO: 524332 - DNA, 33 bp, Homo sapien
tagctatggttccaaaggtgcagggtgcagcag

SEQ ID NO: 524333 - DNA, 33 bp, Homo sapien
atggatctaagaagaaaggtcgatttttcagct

SEQ ID NO: 524334 - DNA, 33 bp, Homo sapien
atggatctaagaagaatggtcgatttttcagct

SEQ ID NO: 524335 - DNA, 33 bp, Homo sapien
actatgaagtgtcaagcatttatacagatttat

SEQ ID NO: 524336 - DNA, 33 bp, Homo sapien
actatgaagtgtcaaggatttatacagatttat

SEQ ID NO: 524337 - DNA, 33 bp, Homo sapien
tctactccttcaaaaacaagactccagtggcta

SEQ ID NO: 524338 - DNA, 33 bp, Homo sapien
tctactccttcaaaaagaagactccagtggcta

SEQ ID NO: 524339 - DNA, 33 bp, Homo sapien
ctcccttttctttccaccaatgacagttcagac

SEQ ID NO: 524340 - DNA, 33 bp, Homo sapien
ctcccttttctttccatcaatgacagttcagac

SEQ ID NO: 524341 - DNA, 33 bp, Homo sapien
tagccattcactgttaaccatggcctgctaata

SEQ ID NO: 524342 - DNA, 33 bp, Homo sapien
tagccattcactgttagccatggcctgctaata

SEQ ID NO: 524343 - DNA, 33 bp, Homo sapien
aacattcttgtgtaggcccagaaaacggattta

SEQ ID NO: 524344 - DNA, 33 bp, Homo sapien
aacattcttgtgtaggtccagaaaacggattta

SEQ ID NO: 524345 - DNA, 33 bp, Homo sapien
tttctaactcttctgtaaatctgaaactattca

SEQ ID NO: 524346 - DNA, 33 bp, Homo sapien
tttctaactcttctgtgaatctgaaactattca

SEQ ID NO: 524347 - DNA, 33 bp, Homo sapien
gattttttgctgtagagaccaaaagtctgtatc

SEQ ID NO: 524348 - DNA, 33 bp, Homo sapien
gattttttgctgtagataccaaaagtctgtatc

SEQ ID NO: 524349 - DNA, 33 bp, Homo sapien
aatgaagcctatactggaccaggttttgtgcta

SEQ ID NO: 524350 - DNA, 33 bp, Homo sapien
aatgaagcctatactgtaccaggttttgtgcta

SEQ ID NO: 524351 - DNA, 33 bp, Homo sapien
tctaataagcgggcaaactcactgggattagga

SEQ ID NO: 524352 - DNA, 33 bp, Homo sapien
tctaataagcgggcaagctcactgggattagga

SEQ ID NO: 524353 - DNA, 33 bp, Homo sapien
attagaagcacaaaaactccaactgtaatcttt

SEQ ID NO: 524354 - DNA, 33 bp, Homo sapien
attagaagcacaaaaagtccaactgtaatcttt

SEQ ID NO: 524355 - DNA, 33 bp, Homo sapien
atgtttgtttacctccaaaaacagtcatatcag

SEQ ID NO: 524356 - DNA, 33 bp, Homo sapien
atgtttgtttacctccgaaaacagtcatatcag

SEQ ID NO: 524357 - DNA, 33 bp, Homo sapien
ggacagagggagccacaaggaaaagaactatct

SEQ ID NO: 524358 - DNA, 33 bp, Homo sapien
ggacagagggagccaccaggaaaagaactatct

SEQ ID NO: 524359 - DNA, 33 bp, Homo sapien
gactacaaaccacacaaatgtatcctggtaaac

SEQ ID NO: 524360 - DNA, 33 bp, Homo sapien
gactacaaaccacacagatgtatcctggtaaac

SEQ ID NO: 524361 - DNA, 33 bp, Homo sapien
gcttaagatgtttgaaaggtttcttattgcact

SEQ ID NO: 524362 - DNA, 33 bp, Homo sapien
gcttaagatgtttgaatggtttcttattgcact

SEQ ID NO: 524363 - DNA, 33 bp, Homo sapien
atcatctgaaggcaaaagcataaatctagtcac

SEQ ID NO: 524364 - DNA, 33 bp, Homo sapien
atcatctgaaggcaaaggcataaatctagtcac

SEQ ID NO: 524365 - DNA, 33 bp, Homo sapien
catgctttcactctagaaactttgatccagtgt

SEQ ID NO: 524366 - DNA, 33 bp, Homo sapien
catgctttcactctaggaactttgatccagtgt

SEQ ID NO: 524367 - DNA, 33 bp, Homo sapien
gctctagactactctaccattccttgtggattt

SEQ ID NO: 524368 - DNA, 33 bp, Homo sapien
gctctagactactctatcattccttgtggattt

SEQ ID NO: 524369 - DNA, 33 bp, Homo sapien
cttgtcacctagccaagcagaatgaaggccact

SEQ ID NO: 524370 - DNA, 33 bp, Homo sapien
cttgtcacctagccaatcagaatgaaggccact

SEQ ID NO: 524371 - DNA, 33 bp, Homo sapien
ggcacattttatattcacgctttgaggaagtgc

SEQ ID NO: 524372 - DNA, 33 bp, Homo sapien
ggcacattttatattcgcgctttgaggaagtgc

SEQ ID NO: 524373 - DNA, 33 bp, Homo sapien
tgcataaaaaaaagaaatgctctggttggctag

SEQ ID NO: 524374 - DNA, 33 bp, Homo sapien
tgcataaaaaaaagaagtgctctggttggctag

SEQ ID NO: 524375 - DNA, 33 bp, Homo sapien
tggtcctatggcaatacggagttttgtggtgta

SEQ ID NO: 524376 - DNA, 33 bp, Homo sapien
tggtcctatggcaatatggagttttgtggtgta

SEQ ID NO: 524377 - DNA, 33 bp, Homo sapien
ctcaagtttctcaaatcagaggatcacttgagt

SEQ ID NO: 524378 - DNA, 33 bp, Homo sapien
ctcaagtttctcaaatgagaggatcacttgagt

SEQ ID NO: 524379 - DNA, 33 bp, Homo sapien
agggtgtttgggggtgaaattaacatttatttg

SEQ ID NO: 524380 - DNA, 33 bp, Homo sapien
agggtgtttgggggtggaattaacatttatttg

SEQ ID NO: 524381 - DNA, 33 bp, Homo sapien
gctgagctgcttcgagccctgtatgatgttgaa

SEQ ID NO: 524382 - DNA, 33 bp, Homo sapien
gctgagctgcttcgagtcctgtatgatgttgaa

SEQ ID NO: 524383 - DNA, 33 bp, Homo sapien
ctgtttgcacagaatccaattttggtgtattta

SEQ ID NO: 524384 - DNA, 33 bp, Homo sapien
ctgtttgcacagaatctaattttggtgtattta

SEQ ID NO: 524385 - DNA, 33 bp, Homo sapien
tcctggctatttataactcacatttctccccat

SEQ ID NO: 524386 - DNA, 33 bp, Homo sapien
tcctggctatttataattcacatttctccccat

SEQ ID NO: 524387 - DNA, 33 bp, Homo sapien
aagatcacaaaggaaacagcatcacactgtgtg

SEQ ID NO: 524388 - DNA, 33 bp, Homo sapien
aagatcacaaaggaaatagcatcacactgtgtg

SEQ ID NO: 524389 - DNA, 33 bp, Homo sapien
taaatgtggcaggcacgcttgattgtctaccca

SEQ ID NO: 524390 - DNA, 33 bp, Homo sapien
taaatgtggcaggcactcttgattgtctaccca

SEQ ID NO: 524391 - DNA, 33 bp, Homo sapien
aaatgcaatcgttacactcttgttgctgggcat

SEQ ID NO: 524392 - DNA, 33 bp, Homo sapien
aaatgcaatcgttacattcttgttgctgggcat

SEQ ID NO: 524393 - DNA, 33 bp, Homo sapien
ctctcttcatgtttcaaaacaccagagcagaga

SEQ ID NO: 524394 - DNA, 33 bp, Homo sapien
ctctcttcatgtttcagaacaccagagcagaga

SEQ ID NO: 524395 - DNA, 33 bp, Homo sapien
atatactctacacaaaccctagttcctgcttgc

SEQ ID NO: 524396 - DNA, 33 bp, Homo sapien
atatactctacacaaatcctagttcctgcttgc

SEQ ID NO: 524397 - DNA, 33 bp, Homo sapien
atggcatggtcttaaaacactctttctcaagga

SEQ ID NO: 524398 - DNA, 33 bp, Homo sapien
atggcatggtcttaaagcactctttctcaagga

SEQ ID NO: 524399 - DNA, 33 bp, Homo sapien
tgcagggaggcttccaacaggtaacacagaaaa

SEQ ID NO: 524400 - DNA, 33 bp, Homo sapien
tgcagggaggcttccaccaggtaacacagaaaa

SEQ ID NO: 524401 - DNA, 33 bp, Homo sapien
tttaagcaaaaccataataacagtagtagttac

SEQ ID NO: 524402 - DNA, 33 bp, Homo sapien
tttaagcaaaaccatagtaacagtagtagttac

SEQ ID NO: 524403 - DNA, 33 bp, Homo sapien
tgcttagaggctaagaaagaggataatacctcc

SEQ ID NO: 524404 - DNA, 33 bp, Homo sapien
tgcttagaggctaagacagaggataatacctcc

SEQ ID NO: 524405 - DNA, 33 bp, Homo sapien
cttgaaactcagaaaaatcatgctataaaggtt

SEQ ID NO: 524406 - DNA, 33 bp, Homo sapien
cttgaaactcagaaaagtcatgctataaaggtt

SEQ ID NO: 524407 - DNA, 33 bp, Homo sapien
tttcatcttgctccagaaaaccttttcacgaaa

SEQ ID NO: 524408 - DNA, 33 bp, Homo sapien
tttcatcttgctccaggaaaccttttcacgaaa

SEQ ID NO: 524409 - DNA, 33 bp, Homo sapien
ggaatgtagcagtaataagataactaagaatga

SEQ ID NO: 524410 - DNA, 33 bp, Homo sapien
ggaatgtagcagtaatgagataactaagaatga

SEQ ID NO: 524411 - DNA, 33 bp, Homo sapien
gattcacagaagagacaacaagtgaattggatc

SEQ ID NO: 524412 - DNA, 33 bp, Homo sapien
gattcacagaagagacgacaagtgaattggatc

SEQ ID NO: 524413 - DNA, 33 bp, Homo sapien
gctttaatagagaagcaaatatagctctgtgat

SEQ ID NO: 524414 - DNA, 33 bp, Homo sapien
gctttaatagagaagcgaatatagctctgtgat

SEQ ID NO: 524415 - DNA, 33 bp, Homo sapien
aataagaattacttgaactgttatataggaagt

SEQ ID NO: 524416 - DNA, 33 bp, Homo sapien
aataagaattacttgagctgttatataggaagt

SEQ ID NO: 524417 - DNA, 33 bp, Homo sapien
agaggatgtggaaaaagagaaacagttttacac

SEQ ID NO: 524418 - DNA, 33 bp, Homo sapien
agaggatgtggaaaaatagaaacagttttacac

SEQ ID NO: 524419 - DNA, 33 bp, Homo sapien
gacttgaaacattaaccattgcatgataagatt

SEQ ID NO: 524420 - DNA, 33 bp, Homo sapien
gacttgaaacattaacgattgcatgataagatt

SEQ ID NO: 524421 - DNA, 33 bp, Homo sapien
atcaatttgtcttgaaaacgtatcaaataaaag

SEQ ID NO: 524422 - DNA, 33 bp, Homo sapien
atcaatttgtcttgaagacgtatcaaataaaag

SEQ ID NO: 524423 - DNA, 33 bp, Homo sapien
tttctggtttgagtaaatggatgcaagatgatg

SEQ ID NO: 524424 - DNA, 33 bp, Homo sapien
tttctggtttgagtaagtggatgcaagatgatg

SEQ ID NO: 524425 - DNA, 33 bp, Homo sapien
tagagagttagttactcaccttccactcacttc

SEQ ID NO: 524426 - DNA, 33 bp, Homo sapien
tagagagttagttactgaccttccactcacttc

SEQ ID NO: 524427 - DNA, 33 bp, Homo sapien
gtctggagtctgaatcactacactgtgctttct

SEQ ID NO: 524428 - DNA, 33 bp, Homo sapien
gtctggagtctgaatcgctacactgtgctttct

SEQ ID NO: 524429 - DNA, 33 bp, Homo sapien
gcagcccagaacaaggccccagatccaccacag

SEQ ID NO: 524430 - DNA, 33 bp, Homo sapien
gcagcccagaacaaggtcccagatccaccacag

SEQ ID NO: 524431 - DNA, 33 bp, Homo sapien
ctatcctcaagtagaccctagtgtctgttattc

SEQ ID NO: 524432 - DNA, 33 bp, Homo sapien
ctatcctcaagtagacgctagtgtctgttattc

SEQ ID NO: 524433 - DNA, 33 bp, Homo sapien
tagatcttctgaatgccagttccaaatgattgc

SEQ ID NO: 524434 - DNA, 33 bp, Homo sapien
tagatcttctgaatgctagttccaaatgattgc

SEQ ID NO: 524435 - DNA, 33 bp, Homo sapien
tcatctgtcattggtccacattaagcaacattc

SEQ ID NO: 524436 - DNA, 33 bp, Homo sapien
tcatctgtcattggtctacattaagcaacattc

SEQ ID NO: 524437 - DNA, 33 bp, Homo sapien
tcatagtggtattttacggacctacaggatgaa

SEQ ID NO: 524438 - DNA, 33 bp, Homo sapien
tcatagtggtattttatggacctacaggatgaa

SEQ ID NO: 524439 - DNA, 33 bp, Homo sapien
tgttgcagtagctttaccattatcaacaccagc

SEQ ID NO: 524440 - DNA, 33 bp, Homo sapien
tgttgcagtagctttatcattatcaacaccagc

SEQ ID NO: 524441 - DNA, 33 bp, Homo sapien
agaaactaggaaggaggcattgaaagaaatcta

SEQ ID NO: 524442 - DNA, 33 bp, Homo sapien
agaaactaggaaggagtcattgaaagaaatcta

SEQ ID NO: 524443 - DNA, 33 bp, Homo sapien
ccaccatccaatacaccgtagtatgtgtaagtt

SEQ ID NO: 524444 - DNA, 33 bp, Homo sapien
ccaccatccaatacactgtagtatgtgtaagtt

SEQ ID NO: 524445 - DNA, 33 bp, Homo sapien
cttgactgtcaagcaaatgatacggactttctt

SEQ ID NO: 524446 - DNA, 33 bp, Homo sapien
cttgactgtcaagcaagtgatacggactttctt

SEQ ID NO: 524447 - DNA, 33 bp, Homo sapien
cggctaatacctttaccggcctgtctgatttca

SEQ ID NO: 524448 - DNA, 33 bp, Homo sapien
cggctaatacctttactggcctgtctgatttca

SEQ ID NO: 524449 - DNA, 33 bp, Homo sapien
agcacataagaggtacacaaaaagctttagctc

SEQ ID NO: 524450 - DNA, 33 bp, Homo sapien
agcacataagaggtactcaaaaagctttagctc

SEQ ID NO: 524451 - DNA, 33 bp, Homo sapien
agatatctgtgctagacgtgctcacaagcatgt

SEQ ID NO: 524452 - DNA, 33 bp, Homo sapien
agatatctgtgctagatgtgctcacaagcatgt

SEQ ID NO: 524453 - DNA, 33 bp, Homo sapien
acctctgtaactcagccctcaacacgtatctgt

SEQ ID NO: 524454 - DNA, 33 bp, Homo sapien
acctctgtaactcagctctcaacacgtatctgt

SEQ ID NO: 524455 - DNA, 33 bp, Homo sapien
taggatctggccttgaaaaataagcacaatgtc

SEQ ID NO: 524456 - DNA, 33 bp, Homo sapien
taggatctggccttgacaaataagcacaatgtc

SEQ ID NO: 524457 - DNA, 33 bp, Homo sapien
agtagaatttctccccggcatccacaccactga

SEQ ID NO: 524458 - DNA, 33 bp, Homo sapien
agtagaatttctcccctgcatccacaccactga

SEQ ID NO: 524459 - DNA, 33 bp, Homo sapien
tcctgcacaaaaccaacgaacaacaattacact

SEQ ID NO: 524460 - DNA, 33 bp, Homo sapien
tcctgcacaaaaccaatgaacaacaattacact

SEQ ID NO: 524461 - DNA, 33 bp, Homo sapien
ctcaccctggcctagaataagtaaatgctctgg

SEQ ID NO: 524462 - DNA, 33 bp, Homo sapien
ctcaccctggcctagagtaagtaaatgctctgg

SEQ ID NO: 524463 - DNA, 33 bp, Homo sapien
caatttggagactgagaaaatgagacgcaatgt

SEQ ID NO: 524464 - DNA, 33 bp, Homo sapien
caatttggagactgaggaaatgagacgcaatgt

SEQ ID NO: 524465 - DNA, 33 bp, Homo sapien
atagcagtttaataaaatatcttgtgctaagtt

SEQ ID NO: 524466 - DNA, 33 bp, Homo sapien
atagcagtttaataaagtatcttgtgctaagtt

SEQ ID NO: 524467 - DNA, 33 bp, Homo sapien
gactagtacaaagacagacacctggcagggcag

SEQ ID NO: 524468 - DNA, 33 bp, Homo sapien
gactagtacaaagacatacacctggcagggcag

SEQ ID NO: 524469 - DNA, 33 bp, Homo sapien
aaattgctgctaaatagcctccagaaaatctca

SEQ ID NO: 524470 - DNA, 33 bp, Homo sapien
aaattgctgctaaatatcctccagaaaatctca

SEQ ID NO: 524471 - DNA, 33 bp, Homo sapien
ctttcatattgtataacggaaatggtattttac

SEQ ID NO: 524472 - DNA, 33 bp, Homo sapien
ctttcatattgtataatggaaatggtattttac

SEQ ID NO: 524473 - DNA, 33 bp, Homo sapien
cccactctaacctccccacttagtcacctacac

SEQ ID NO: 524474 - DNA, 33 bp, Homo sapien
cccactctaacctccctacttagtcacctacac

SEQ ID NO: 524475 - DNA, 33 bp, Homo sapien
taaacaaatggaaaaaaagtctatgcttcatgg

SEQ ID NO: 524476 - DNA, 33 bp, Homo sapien
taaacaaatggaaaaacagtctatgcttcatgg

SEQ ID NO: 524477 - DNA, 33 bp, Homo sapien
atgagtaggcctattcaatttaaagaagagcta

SEQ ID NO: 524478 - DNA, 33 bp, Homo sapien
atgagtaggcctattcgatttaaagaagagcta

SEQ ID NO: 524479 - DNA, 33 bp, Homo sapien
atcacagtcagtgtcaatcataaatatatgtgt

SEQ ID NO: 524480 - DNA, 33 bp, Homo sapien
atcacagtcagtgtcagtcataaatatatgtgt

SEQ ID NO: 524481 - DNA, 33 bp, Homo sapien
acttctgaaatctttacgagtaggcaagctgtg

SEQ ID NO: 524482 - DNA, 33 bp, Homo sapien
acttctgaaatctttatgagtaggcaagctgtg

SEQ ID NO: 524483 - DNA, 33 bp, Homo sapien
ttagagtcatttgaaagagactactctggcaga

SEQ ID NO: 524484 - DNA, 33 bp, Homo sapien
ttagagtcatttgaaatagactactctggcaga

SEQ ID NO: 524485 - DNA, 33 bp, Homo sapien
gagtttgcttcccaaacagtacataggctacaa

SEQ ID NO: 524486 - DNA, 33 bp, Homo sapien
gagtttgcttcccaaagagtacataggctacaa

SEQ ID NO: 524487 - DNA, 33 bp, Homo sapien
tgttacaggaagatcaacgttccaatagtcaga

SEQ ID NO: 524488 - DNA, 33 bp, Homo sapien
tgttacaggaagatcagcgttccaatagtcaga

SEQ ID NO: 524489 - DNA, 33 bp, Homo sapien
ggaattgcataatcacagaaagggttgatgaga

SEQ ID NO: 524490 - DNA, 33 bp, Homo sapien
ggaattgcataatcacggaaagggttgatgaga

SEQ ID NO: 524491 - DNA, 33 bp, Homo sapien
ttctcaaggcagaaaacctgtcttaagagcctt

SEQ ID NO: 524492 - DNA, 33 bp, Homo sapien
ttctcaaggcagaaaagctgtcttaagagcctt

SEQ ID NO: 524493 - DNA, 33 bp, Homo sapien
aggaaaattaatagcactaaatgttcatattaa

SEQ ID NO: 524494 - DNA, 33 bp, Homo sapien
aggaaaattaatagcagtaaatgttcatattaa

SEQ ID NO: 524495 - DNA, 33 bp, Homo sapien
tctgctttgtattttccatgcaaaaagagatga

SEQ ID NO: 524496 - DNA, 33 bp, Homo sapien
tctgctttgtattttctatgcaaaaagagatga

SEQ ID NO: 524497 - DNA, 33 bp, Homo sapien
cttggaatgtcagttacgttctcagtcaaatct

SEQ ID NO: 524498 - DNA, 33 bp, Homo sapien
cttggaatgtcagttatgttctcagtcaaatct

SEQ ID NO: 524499 - DNA, 33 bp, Homo sapien
atcactagtactcaaaatgtttactctcataac

SEQ ID NO: 524500 - DNA, 33 bp, Homo sapien
atcactagtactcaaactgtttactctcataac

SEQ ID NO: 524501 - DNA, 33 bp, Homo sapien
caggataaacaagacaatctcactggttaaacc

SEQ ID NO: 524502 - DNA, 33 bp, Homo sapien
caggataaacaagacagtctcactggttaaacc

SEQ ID NO: 524503 - DNA, 33 bp, Homo sapien
tcttgcatttctattccccttccacattgtaaa

SEQ ID NO: 524504 - DNA, 33 bp, Homo sapien
tcttgcatttctattctccttccacattgtaaa

SEQ ID NO: 524505 - DNA, 33 bp, Homo sapien
gggaagatactgaatccaattttggacaacagt

SEQ ID NO: 524506 - DNA, 33 bp, Homo sapien
gggaagatactgaatctaattttggacaacagt

SEQ ID NO: 524507 - DNA, 33 bp, Homo sapien
tttcagtacatcttccacaatatttgccagact

SEQ ID NO: 524508 - DNA, 33 bp, Homo sapien
tttcagtacatcttccgcaatatttgccagact

SEQ ID NO: 524509 - DNA, 33 bp, Homo sapien
agtcttcttcccttcaacatttaaattcatatt

SEQ ID NO: 524510 - DNA, 33 bp, Homo sapien
agtcttcttcccttcagcatttaaattcatatt

SEQ ID NO: 524511 - DNA, 33 bp, Homo sapien
agaggaagaaaccaaaagctcaaagaggcaagt

SEQ ID NO: 524512 - DNA, 33 bp, Homo sapien
agaggaagaaaccaaaggctcaaagaggcaagt

SEQ ID NO: 524513 - DNA, 33 bp, Homo sapien
caatgtaaaccaagaaataagccaaggtgggat

SEQ ID NO: 524514 - DNA, 33 bp, Homo sapien
caatgtaaaccaagaagtaagccaaggtgggat

SEQ ID NO: 524515 - DNA, 33 bp, Homo sapien
ttcagaatgtgaatgaagtctgtttagcgaaag

SEQ ID NO: 524516 - DNA, 33 bp, Homo sapien
ttcagaatgtgaatgacgtctgtttagcgaaag

SEQ ID NO: 524517 - DNA, 33 bp, Homo sapien
caagataaccctgaaaagaattcacttaaacta

SEQ ID NO: 524518 - DNA, 33 bp, Homo sapien
caagataaccctgaaatgaattcacttaaacta

SEQ ID NO: 524519 - DNA, 33 bp, Homo sapien
ctgtaggaaatagatacgtatttaaaagacagt

SEQ ID NO: 524520 - DNA, 33 bp, Homo sapien
ctgtaggaaatagatatgtatttaaaagacagt

SEQ ID NO: 524521 - DNA, 33 bp, Homo sapien
atattgtgaagaagaaaaatgaaatttgtgcat

SEQ ID NO: 524522 - DNA, 33 bp, Homo sapien
atattgtgaagaagaagaatgaaatttgtgcat

SEQ ID NO: 524523 - DNA, 33 bp, Homo sapien
cacacaaagcagaatacgaaatgtcaaaatgac

SEQ ID NO: 524524 - DNA, 33 bp, Homo sapien
cacacaaagcagaatatgaaatgtcaaaatgac

SEQ ID NO: 524525 - DNA, 33 bp, Homo sapien
tatgactgcacagatcaaaagtgtcgaactcac

SEQ ID NO: 524526 - DNA, 33 bp, Homo sapien
tatgactgcacagatcgaaagtgtcgaactcac

SEQ ID NO: 524527 - DNA, 33 bp, Homo sapien
tgtagttagcctgatacggtagaaagaatacag

SEQ ID NO: 524528 - DNA, 33 bp, Homo sapien
tgtagttagcctgatatggtagaaagaatacag

SEQ ID NO: 524529 - DNA, 33 bp, Homo sapien
atattggtcggaaacaaggaaatgaagatgctg

SEQ ID NO: 524530 - DNA, 33 bp, Homo sapien
atattggtcggaaacagggaaatgaagatgctg

SEQ ID NO: 524531 - DNA, 33 bp, Homo sapien
ttggtctttctaattccaaagtatctctgcacc

SEQ ID NO: 524532 - DNA, 33 bp, Homo sapien
ttggtctttctaattctaaagtatctctgcacc

SEQ ID NO: 524533 - DNA, 33 bp, Homo sapien
attggttgatataatacaggcgttcagctttct

SEQ ID NO: 524534 - DNA, 33 bp, Homo sapien
attggttgatataatataggcgttcagctttct

SEQ ID NO: 524535 - DNA, 33 bp, Homo sapien
ctcattaatctgaccactcctactctacatttc

SEQ ID NO: 524536 - DNA, 33 bp, Homo sapien
ctcattaatctgaccagtcctactctacatttc

SEQ ID NO: 524537 - DNA, 33 bp, Homo sapien
tcactttctgacttgacagcggtctcactaacc

SEQ ID NO: 524538 - DNA, 33 bp, Homo sapien
tcactttctgacttgagagcggtctcactaacc

SEQ ID NO: 524539 - DNA, 33 bp, Homo sapien
ttagaagagagcattacaagatccccttgcgcc

SEQ ID NO: 524540 - DNA, 33 bp, Homo sapien
ttagaagagagcattataagatccccttgcgcc

SEQ ID NO: 524541 - DNA, 33 bp, Homo sapien
tggtgtgtggacaatccgaatatgaaggtgtta

SEQ ID NO: 524542 - DNA, 33 bp, Homo sapien
tggtgtgtggacaatctgaatatgaaggtgtta

SEQ ID NO: 524543 - DNA, 33 bp, Homo sapien
ggaaaattgatttgaaagggaaagactggagat

SEQ ID NO: 524544 - DNA, 33 bp, Homo sapien
ggaaaattgatttgaatgggaaagactggagat

SEQ ID NO: 524545 - DNA, 33 bp, Homo sapien
atctagacagagaataagctcattttcagagtc

SEQ ID NO: 524546 - DNA, 33 bp, Homo sapien
atctagacagagaatatgctcattttcagagtc

SEQ ID NO: 524547 - DNA, 33 bp, Homo sapien
gattataaagttcagaatatccaaatctaaccc

SEQ ID NO: 524548 - DNA, 33 bp, Homo sapien
gattataaagttcagagtatccaaatctaaccc

SEQ ID NO: 524549 - DNA, 33 bp, Homo sapien
ctaaacttcagaataaacttcagggcaataaaa

SEQ ID NO: 524550 - DNA, 33 bp, Homo sapien
ctaaacttcagaataaccttcagggcaataaaa

SEQ ID NO: 524551 - DNA, 33 bp, Homo sapien
taatcaccaaaaataacgatgaccagaattttc

SEQ ID NO: 524552 - DNA, 33 bp, Homo sapien
taatcaccaaaaataatgatgaccagaattttc

SEQ ID NO: 524553 - DNA, 33 bp, Homo sapien
gagccagctctggcaaatgctccaaattgtgtg

SEQ ID NO: 524554 - DNA, 33 bp, Homo sapien
gagccagctctggcaagtgctccaaattgtgtg

SEQ ID NO: 524555 - DNA, 33 bp, Homo sapien
taaacttgacaagaaacggtcaagacctataaa

SEQ ID NO: 524556 - DNA, 33 bp, Homo sapien
taaacttgacaagaaatggtcaagacctataaa

SEQ ID NO: 524557 - DNA, 33 bp, Homo sapien
aaagaatagaagatgacggattaggatctcagt

SEQ ID NO: 524558 - DNA, 33 bp, Homo sapien
aaagaatagaagatgatggattaggatctcagt

SEQ ID NO: 524559 - DNA, 33 bp, Homo sapien
cctctgagctatgagaaccataattagaattaa

SEQ ID NO: 524560 - DNA, 33 bp, Homo sapien
cctctgagctatgagacccataattagaattaa

SEQ ID NO: 524561 - DNA, 33 bp, Homo sapien
attgtagtagtccaggaaagatgatggtggctt

SEQ ID NO: 524562 - DNA, 33 bp, Homo sapien
attgtagtagtccaggcaagatgatggtggctt

SEQ ID NO: 524563 - DNA, 33 bp, Homo sapien
tatgttgcctgtcttacggtaattctgccattt

SEQ ID NO: 524564 - DNA, 33 bp, Homo sapien
tatgttgcctgtcttatggtaattctgccattt

SEQ ID NO: 524565 - DNA, 33 bp, Homo sapien
cttgatatgtacctatcagatggcgttactgaa

SEQ ID NO: 524566 - DNA, 33 bp, Homo sapien
cttgatatgtacctattagatggcgttactgaa

SEQ ID NO: 524567 - DNA, 33 bp, Homo sapien
gtaattgatgaagaaacattgatacattagtat

SEQ ID NO: 524568 - DNA, 33 bp, Homo sapien
gtaattgatgaagaaatattgatacattagtat

SEQ ID NO: 524569 - DNA, 33 bp, Homo sapien
acactacactaatgcaatatgttaataggctgg

SEQ ID NO: 524570 - DNA, 33 bp, Homo sapien
acactacactaatgcactatgttaataggctgg

SEQ ID NO: 524571 - DNA, 33 bp, Homo sapien
gttgccatcattcccacgttacagagatcaact

SEQ ID NO: 524572 - DNA, 33 bp, Homo sapien
gttgccatcattcccatgttacagagatcaact

SEQ ID NO: 524573 - DNA, 33 bp, Homo sapien
agatagaatttcctgaaacctaaaagtggagaa

SEQ ID NO: 524574 - DNA, 33 bp, Homo sapien
agatagaatttcctgagacctaaaagtggagaa

SEQ ID NO: 524575 - DNA, 33 bp, Homo sapien
tgattttaacaaagctcaatgaggtgcaagaga

SEQ ID NO: 524576 - DNA, 33 bp, Homo sapien
tgattttaacaaagcttaatgaggtgcaagaga

SEQ ID NO: 524577 - DNA, 33 bp, Homo sapien
gaaagaacacagaatactaattaagccttaaaa

SEQ ID NO: 524578 - DNA, 33 bp, Homo sapien
gaaagaacacagaatattaattaagccttaaaa

SEQ ID NO: 524579 - DNA, 33 bp, Homo sapien
tcaagtagtgaggtgccaccattacagttttgc

SEQ ID NO: 524580 - DNA, 33 bp, Homo sapien
tcaagtagtgaggtgctaccattacagttttgc

SEQ ID NO: 524581 - DNA, 33 bp, Homo sapien
atatctgactcaaaaagtccaattatctgcctc

SEQ ID NO: 524582 - DNA, 33 bp, Homo sapien
atatctgactcaaaaattccaattatctgcctc

SEQ ID NO: 524583 - DNA, 33 bp, Homo sapien
aagggaggaaattgtacgtaacagattaacaag

SEQ ID NO: 524584 - DNA, 33 bp, Homo sapien
aagggaggaaattgtatgtaacagattaacaag

SEQ ID NO: 524585 - DNA, 33 bp, Homo sapien
aacttgaatttttaaccagccctcctgacaatt

SEQ ID NO: 524586 - DNA, 33 bp, Homo sapien
aacttgaatttttaactagccctcctgacaatt

SEQ ID NO: 524587 - DNA, 33 bp, Homo sapien
aaagcaaaatactagcaaattgtagtcaacaca

SEQ ID NO: 524588 - DNA, 33 bp, Homo sapien
aaagcaaaatactagcgaattgtagtcaacaca

SEQ ID NO: 524589 - DNA, 33 bp, Homo sapien
gcggggcttggaaaacaccatttatgctaaatt

SEQ ID NO: 524590 - DNA, 33 bp, Homo sapien
gcggggcttggaaaacgccatttatgctaaatt

SEQ ID NO: 524591 - DNA, 33 bp, Homo sapien
aagatgagcatcttaaaaagagcaagaacttct

SEQ ID NO: 524592 - DNA, 33 bp, Homo sapien
aagatgagcatcttaagaagagcaagaacttct

SEQ ID NO: 524593 - DNA, 33 bp, Homo sapien
tgaatatagaaagagaaacgatgtagcttagga

SEQ ID NO: 524594 - DNA, 33 bp, Homo sapien
tgaatatagaaagagagacgatgtagcttagga

SEQ ID NO: 524595 - DNA, 33 bp, Homo sapien
tttaaatgccactaacagaaagtaactaaaaat

SEQ ID NO: 524596 - DNA, 33 bp, Homo sapien
tttaaatgccactaacggaaagtaactaaaaat

SEQ ID NO: 524597 - DNA, 33 bp, Homo sapien
ttagtgtttcatctagaataaaaatgccaagaa

SEQ ID NO: 524598 - DNA, 33 bp, Homo sapien
ttagtgtttcatctaggataaaaatgccaagaa

SEQ ID NO: 524599 - DNA, 33 bp, Homo sapien; identical to SEQ ID NO: 524597

SEQ ID NO: 524600 - DNA, 33 bp, Homo sapien; identical to SEQ ID NO: 524598

SEQ ID NO: 524601 - DNA, 33 bp, Homo sapien
aaaatgtagatccaaacgcctcaaataagagga

SEQ ID NO: 524602 - DNA, 33 bp, Homo sapien
aaaatgtagatccaaaggcctcaaataagagga

SEQ ID NO: 524603 - DNA, 33 bp, Homo sapien
atttccaaaaaggaagcacatcttgtgttaagt

SEQ ID NO: 524604 - DNA, 33 bp, Homo sapien
atttccaaaaaggaagtacatcttgtgttaagt

SEQ ID NO: 524605 - DNA, 33 bp, Homo sapien
cacaaaatcgctgcaaactatggactattttcc

SEQ ID NO: 524606 - DNA, 33 bp, Homo sapien
cacaaaatcgctgcaatctatggactattttcc

SEQ ID NO: 524607 - DNA, 33 bp, Homo sapien
tgaagctgtggtcagacagaaagataaatgaat

SEQ ID NO: 524608 - DNA, 33 bp, Homo sapien
tgaagctgtggtcagagagaaagataaatgaat

SEQ ID NO: 524609 - DNA, 33 bp, Homo sapien
tcagttcatggactaacgtttttatggatgata

SEQ ID NO: 524610 - DNA, 33 bp, Homo sapien
tcagttcatggactaaggtttttatggatgata

SEQ ID NO: 524611 - DNA, 33 bp, Homo sapien
gctctattatgtagtacgagggtaaagaaggaa

SEQ ID NO: 524612 - DNA, 33 bp, Homo sapien
gctctattatgtagtatgagggtaaagaaggaa

SEQ ID NO: 524613 - DNA, 33 bp, Homo sapien
aagaagtgttggttcaatctgaatcttgagagt

SEQ ID NO: 524614 - DNA, 33 bp, Homo sapien
aagaagtgttggttcagtctgaatcttgagagt

SEQ ID NO: 524615 - DNA, 33 bp, Homo sapien
aagtaggtattgagggaaactcttaaatccctt

SEQ ID NO: 524616 - DNA, 33 bp, Homo sapien
aagtaggtattgagggcaactcttaaatccctt

SEQ ID NO: 524617 - DNA, 33 bp, Homo sapien
catccatttgcctgggaaaattgttaaaatatt

SEQ ID NO: 524618 - DNA, 33 bp, Homo sapien
catccatttgcctggggaaattgttaaaatatt

SEQ ID NO: 524619 - DNA, 33 bp, Homo sapien
gccctgacataagtaaatagagattgttaggta

SEQ ID NO: 524620 - DNA, 33 bp, Homo sapien
gccctgacataagtaagtagagattgttaggta

SEQ ID NO: 524621 - DNA, 33 bp, Homo sapien
catacagttgctatacacatggcatatagtgga

SEQ ID NO: 524622 - DNA, 33 bp, Homo sapien
catacagttgctatacgcatggcatatagtgga

SEQ ID NO: 524623 - DNA, 33 bp, Homo sapien
accccaaatcacagaccgggaaagcaaagatag

SEQ ID NO: 524624 - DNA, 33 bp, Homo sapien
accccaaatcacagactgggaaagcaaagatag

SEQ ID NO: 524625 - DNA, 33 bp, Homo sapien
tatggccaccatactgaaaaattctggtttcgt

SEQ ID NO: 524626 - DNA, 33 bp, Homo sapien
tatggccaccatactggaaaattctggtttcgt

SEQ ID NO: 524627 - DNA, 33 bp, Homo sapien
gtttttgcaattacaacgtgatcttttgttgaa

SEQ ID NO: 524628 - DNA, 33 bp, Homo sapien
gtttttgcaattacaaggtgatcttttgttgaa

SEQ ID NO: 524629 - DNA, 33 bp, Homo sapien
tggtttcactttagaactactctgccacacatt

SEQ ID NO: 524630 - DNA, 33 bp, Homo sapien
tggtttcactttagaattactctgccacacatt

SEQ ID NO: 524631 - DNA, 33 bp, Homo sapien
actgagacatattgcacaaaagatgtttccata

SEQ ID NO: 524632 - DNA, 33 bp, Homo sapien
actgagacatattgcagaaaagatgtttccata

SEQ ID NO: 524633 - DNA, 33 bp, Homo sapien
ccttatacatagtaccaatgatggttgtgctcc

SEQ ID NO: 524634 - DNA, 33 bp, Homo sapien
ccttatacatagtaccgatgatggttgtgctcc

SEQ ID NO: 524635 - DNA, 33 bp, Homo sapien
gaaagatatccaaagccgcatttattgttgtca

SEQ ID NO: 524636 - DNA, 33 bp, Homo sapien
gaaagatatccaaagctgcatttattgttgtca

SEQ ID NO: 524637 - DNA, 33 bp, Homo sapien
taaagctctgtaaagcactctcatttctgcttg

SEQ ID NO: 524638 - DNA, 33 bp, Homo sapien
taaagctctgtaaagcgctctcatttctgcttg

SEQ ID NO: 524639 - DNA, 33 bp, Homo sapien
cctgacttggataagccattcctttctggcatg

SEQ ID NO: 524640 - DNA, 33 bp, Homo sapien
cctgacttggataagcgattcctttctggcatg

SEQ ID NO: 524641 - DNA, 33 bp, Homo sapien
agcctggacaacttacccaggttagacatatga

SEQ ID NO: 524642 - DNA, 33 bp, Homo sapien
agcctggacaacttactcaggttagacatatga

SEQ ID NO: 524643 - DNA, 33 bp, Homo sapien
gccagcactggcagtacgcccgcttcctcgggt

SEQ ID NO: 524644 - DNA, 33 bp, Homo sapien
gccagcactggcagtatgcccgcttcctcgggt

SEQ ID NO: 524645 - DNA, 33 bp, Homo sapien
tttaaaatgtgtgcaacgatgttactttttttt

SEQ ID NO: 524646 - DNA, 33 bp, Homo sapien
tttaaaatgtgtgcaatgatgttactttttttt

SEQ ID NO: 524647 - DNA, 33 bp, Homo sapien
caccacagatcgtaaaaattccatcaagagcac

SEQ ID NO: 524648 - DNA, 33 bp, Homo sapien
caccacagatcgtaaagattccatcaagagcac

SEQ ID NO: 524649 - DNA, 33 bp, Homo sapien
gcaaactagaagaacaacataagaatgcgtaat

SEQ ID NO: 524650 - DNA, 33 bp, Homo sapien
gcaaactagaagaacaccataagaatgcgtaat

SEQ ID NO: 524651 - DNA, 33 bp, Homo sapien
ttcaaataacttttggccaggtattgggttcct

SEQ ID NO: 524652 - DNA, 33 bp, Homo sapien
ttcaaataacttttgggcaggtattgggttcct

SEQ ID NO: 524653 - DNA, 33 bp, Homo sapien
atacatggaaagattagatttgagccatatgaa

SEQ ID NO: 524654 - DNA, 33 bp, Homo sapien
atacatggaaagattatatttgagccatatgaa

SEQ ID NO: 524655 - DNA, 33 bp, Homo sapien
gtatcagatttttgaaatgaagtgcctccatgt

SEQ ID NO: 524656 - DNA, 33 bp, Homo sapien
gtatcagatttttgaactgaagtgcctccatgt

SEQ ID NO: 524657 - DNA, 33 bp, Homo sapien
ctttgatggccatgcccgaaaatttgtctccat

SEQ ID NO: 524658 - DNA, 33 bp, Homo sapien
ctttgatggccatgcctgaaaatttgtctccat

SEQ ID NO: 524659 - DNA, 33 bp, Homo sapien
caagccagcgtctgtgaaaagggcactttatga

SEQ ID NO: 524660 - DNA, 33 bp, Homo sapien
caagccagcgtctgtgtaaagggcactttatga

SEQ ID NO: 524661 - DNA, 33 bp, Homo sapien
caactgcctcttctcagtaggtaagcccagtgc

SEQ ID NO: 524662 - DNA, 33 bp, Homo sapien
caactgcctcttctcattaggtaagcccagtgc

SEQ ID NO: 524663 - DNA, 33 bp, Homo sapien
aggagtcattcaagtgcagaaattaagttaaac

SEQ ID NO: 524664 - DNA, 33 bp, Homo sapien
aggagtcattcaagtgtagaaattaagttaaac

SEQ ID NO: 524665 - DNA, 33 bp, Homo sapien
tacaccaattatccacaggtgatctaaaatgtc

SEQ ID NO: 524666 - DNA, 33 bp, Homo sapien
tacaccaattatccaccggtgatctaaaatgtc

SEQ ID NO: 524667 - DNA, 33 bp, Homo sapien
ccatcatgccttgtagccgttctccttgtcctg

SEQ ID NO: 524668 - DNA, 33 bp, Homo sapien
ccatcatgccttgtagtcgttctccttgtcctg

SEQ ID NO: 524669 - DNA, 33 bp, Homo sapien
aggaatttacttctggcccactttacttgcata

SEQ ID NO: 524670 - DNA, 33 bp, Homo sapien
aggaatttacttctggtccactttacttgcata

SEQ ID NO: 524671 - DNA, 33 bp, Homo sapien
caagaggaacaggtaaaagtctaagcctggctc

SEQ ID NO: 524672 - DNA, 33 bp, Homo sapien
caagaggaacaggtaagagtctaagcctggctc

SEQ ID NO: 524673 - DNA, 33 bp, Homo sapien
ctttctttggacagagaaattttgagtacttaa

SEQ ID NO: 524674 - DNA, 33 bp, Homo sapien
ctttctttggacagaggaattttgagtacttaa

SEQ ID NO: 524675 - DNA, 33 bp, Homo sapien
attagtcctaatgaccaatccccacgatcattc

SEQ ID NO: 524676 - DNA, 33 bp, Homo sapien
attagtcctaatgacccatccccacgatcattc

SEQ ID NO: 524677 - DNA, 33 bp, Homo sapien
tgcttctcacgaggcaatgcaaccttatttgga

SEQ ID NO: 524678 - DNA, 33 bp, Homo sapien
tgcttctcacgaggcagtgcaaccttatttgga

SEQ ID NO: 524679 - DNA, 33 bp, Homo sapien
aggaaagtatagaaaacgagtctgaataagcaa

SEQ ID NO: 524680 - DNA, 33 bp, Homo sapien
aggaaagtatagaaaatgagtctgaataagcaa

SEQ ID NO: 524681 - DNA, 33 bp, Homo sapien
aatgtctttatccacaaactagttccttctgct

SEQ ID NO: 524682 - DNA, 33 bp, Homo sapien
aatgtctttatccacatactagttccttctgct

SEQ ID NO: 524683 - DNA, 33 bp, Homo sapien
ttaaactagctatcagacggccatggtagcatg

SEQ ID NO: 524684 - DNA, 33 bp, Homo sapien
ttaaactagctatcagtcggccatggtagcatg

SEQ ID NO: 524685 - DNA, 33 bp, Homo sapien
tatttgttttcctgaaaatcatcattagagttc

SEQ ID NO: 524686 - DNA, 33 bp, Homo sapien
tatttgttttcctgaagatcatcattagagttc

SEQ ID NO: 524687 - DNA, 33 bp, Homo sapien
gtttaaatgtgacttaaaagtgatgttttcttc

SEQ ID NO: 524688 - DNA, 33 bp, Homo sapien
gtttaaatgtgacttagaagtgatgttttcttc

SEQ ID NO: 524689 - DNA, 33 bp, Homo sapien
gagttaatcaaaggaaactagtgcttcattcct

SEQ ID NO: 524690 - DNA, 33 bp, Homo sapien
gagttaatcaaaggaacctagtgcttcattcct

SEQ ID NO: 524691 - DNA, 33 bp, Homo sapien
ttttaatgtaaaataacgcttgaggtaaatagc

SEQ ID NO: 524692 - DNA, 33 bp, Homo sapien
ttttaatgtaaaataatgcttgaggtaaatagc

SEQ ID NO: 524693 - DNA, 33 bp, Homo sapien
tagttgatacctttgaataatcactttctagat

SEQ ID NO: 524694 - DNA, 33 bp, Homo sapien
tagttgatacctttgagtaatcactttctagat

SEQ ID NO: 524695 - DNA, 33 bp, Homo sapien
gattacaaaccaagagaagtgttgtaaaagcaa

SEQ ID NO: 524696 - DNA, 33 bp, Homo sapien
gattacaaaccaagaggagtgttgtaaaagcaa

SEQ ID NO: 524697 - DNA, 33 bp, Homo sapien
catggtcctaatcaaaagtgtggagcatacatg

SEQ ID NO: 524698 - DNA, 33 bp, Homo sapien
catggtcctaatcaaatgtgtggagcatacatg

SEQ ID NO: 524699 - DNA, 33 bp, Homo sapien
tttccttttgcttcctaaagctcttgttcagaa

SEQ ID NO: 524700 - DNA, 33 bp, Homo sapien
tttccttttgcttcctcaagctcttgttcagaa

SEQ ID NO: 524701 - DNA, 33 bp, Homo sapien
cccagaattatctctacggtcattttcaaaatt

SEQ ID NO: 524702 - DNA, 33 bp, Homo sapien
cccagaattatctctatggtcattttcaaaatt

SEQ ID NO: 524703 - DNA, 33 bp, Homo sapien
ttacatcatatcgtcacatcatactgttacaat

SEQ ID NO: 524704 - DNA, 33 bp, Homo sapien
ttacatcatatcgtcatatcatactgttacaat

SEQ ID NO: 524705 - DNA, 33 bp, Homo sapien
gttttaagatgttggaaggtggtaagatctatg

SEQ ID NO: 524706 - DNA, 33 bp, Homo sapien
gttttaagatgttggatggtggtaagatctatg

SEQ ID NO: 524707 - DNA, 33 bp, Homo sapien
gattaccagctatttacgagaagtatctgtttt

SEQ ID NO: 524708 - DNA, 33 bp, Homo sapien
gattaccagctatttatgagaagtatctgtttt

SEQ ID NO: 524709 - DNA, 33 bp, Homo sapien
aaacatgagaaacataaccccaaatgaaaaaga

SEQ ID NO: 524710 - DNA, 33 bp, Homo sapien
aaacatgagaaacatatccccaaatgaaaaaga

SEQ ID NO: 524711 - DNA, 33 bp, Homo sapien
gattacattttatatcacaaatcagaaaacgaa

SEQ ID NO: 524712 - DNA, 33 bp, Homo sapien
gattacattttatatctcaaatcagaaaacgaa

SEQ ID NO: 524713 - DNA, 33 bp, Homo sapien
ctataatttttttatcaactatgcaaacatttt

SEQ ID NO: 524714 - DNA, 33 bp, Homo sapien
ctataatttttttatctactatgcaaacatttt

SEQ ID NO: 524715 - DNA, 33 bp, Homo sapien
agagacattgcaggaaaaaagggttaggttttg

SEQ ID NO: 524716 - DNA, 33 bp, Homo sapien
agagacattgcaggaagaaagggttaggttttg

SEQ ID NO: 524717 - DNA, 33 bp, Homo sapien
cccagtagaaaagcagcctcttttgacaaggaa

SEQ ID NO: 524718 - DNA, 33 bp, Homo sapien
cccagtagaaaagcaggctcttttgacaaggaa

SEQ ID NO: 524719 - DNA, 33 bp, Homo sapien
tgcagctgtctgactaagatggctgttttgctg

SEQ ID NO: 524720 - DNA, 33 bp, Homo sapien
tgcagctgtctgactaggatggctgttttgctg

SEQ ID NO: 524721 - DNA, 33 bp, Homo sapien
cataaggtattgttggccacctctgaatttgat

SEQ ID NO: 524722 - DNA, 33 bp, Homo sapien
cataaggtattgttggtcacctctgaatttgat

SEQ ID NO: 524723 - DNA, 33 bp, Homo sapien
atcattaactgtctcacgttcgataactcctga

SEQ ID NO: 524724 - DNA, 33 bp, Homo sapien
atcattaactgtctcatgttcgataactcctga

SEQ ID NO: 524725 - DNA, 33 bp, Homo sapien
gaccacgggcctgaaaacacaaataaatcaagt

SEQ ID NO: 524726 - DNA, 33 bp, Homo sapien
gaccacgggcctgaaatcacaaataaatcaagt

SEQ ID NO: 524727 - DNA, 33 bp, Homo sapien
caaactatgagaaccacgatcaatgacttggac

SEQ ID NO: 524728 - DNA, 33 bp, Homo sapien
caaactatgagaaccatgatcaatgacttggac

SEQ ID NO: 524729 - DNA, 33 bp, Homo sapien
accatgacactagcccaatttgtaagagtcaaa

SEQ ID NO: 524730 - DNA, 33 bp, Homo sapien
accatgacactagccccatttgtaagagtcaaa

SEQ ID NO: 524731 - DNA, 33 bp, Homo sapien
acatggaaagagtataacaatttaccatcattg

SEQ ID NO: 524732 - DNA, 33 bp, Homo sapien
acatggaaagagtatagcaatttaccatcattg

SEQ ID NO: 524733 - DNA, 33 bp, Homo sapien
cattcagagatgcaataataggctccaaaatat

SEQ ID NO: 524734 - DNA, 33 bp, Homo sapien
cattcagagatgcaattataggctccaaaatat

SEQ ID NO: 524735 - DNA, 33 bp, Homo sapien
cttgtcagctgcccccaaatggtaacaccacat

SEQ ID NO: 524736 - DNA, 33 bp, Homo sapien
cttgtcagctgccccctaatggtaacaccacat

SEQ ID NO: 524737 - DNA, 33 bp, Homo sapien
gtgttatgccatagtaaacatgattaccggtac

SEQ ID NO: 524738 - DNA, 33 bp, Homo sapien
gtgttatgccatagtagacatgattaccggtac

SEQ ID NO: 524739 - DNA, 33 bp, Homo sapien
aaaaagcactggaacactggacttggattcaga

SEQ ID NO: 524740 - DNA, 33 bp, Homo sapien
aaaaagcactggaacattggacttggattcaga

SEQ ID NO: 524741 - DNA, 33 bp, Homo sapien
cttgcctacaatgacaacaagtgcctaagacca

SEQ ID NO: 524742 - DNA, 33 bp, Homo sapien
cttgcctacaatgacagcaagtgcctaagacca

SEQ ID NO: 524743 - DNA, 33 bp, Homo sapien
agtggcccaccttgaaactaattttaaacacat

SEQ ID NO: 524744 - DNA, 33 bp, Homo sapien
agtggcccaccttgaagctaattttaaacacat

SEQ ID NO: 524745 - DNA, 33 bp, Homo sapien
agtaacaatcaaggtaaatgtgaaagtgctcca

SEQ ID NO: 524746 - DNA, 33 bp, Homo sapien
agtaacaatcaaggtagatgtgaaagtgctcca

SEQ ID NO: 524747 - DNA, 33 bp, Homo sapien
ctacatattcaaagaaatgcttaggaaggattg

SEQ ID NO: 524748 - DNA, 33 bp, Homo sapien
ctacatattcaaagaactgcttaggaaggattg

SEQ ID NO: 524749 - DNA, 33 bp, Homo sapien
tctgacttaggtataccgctcctggaacccaac

SEQ ID NO: 524750 - DNA, 33 bp, Homo sapien
tctgacttaggtatactgctcctggaacccaac

SEQ ID NO: 524751 - DNA, 33 bp, Homo sapien
ttggctcccaattagagatcctgccaagttata

SEQ ID NO: 524752 - DNA, 33 bp, Homo sapien
ttggctcccaattagatatcctgccaagttata

SEQ ID NO: 524753 - DNA, 33 bp, Homo sapien
aagcctacagaacagacagaagtaggaaaagac

SEQ ID NO: 524754 - DNA, 33 bp, Homo sapien
aagcctacagaacagatagaagtaggaaaagac

SEQ ID NO: 524755 - DNA, 33 bp, Homo sapien
aatgtacttctacctccattccactatagctcc

SEQ ID NO: 524756 - DNA, 33 bp, Homo sapien
aatgtacttctacctctattccactatagctcc

SEQ ID NO: 524757 - DNA, 33 bp, Homo sapien
tttggtgattgttatacctatttccactatact

SEQ ID NO: 524758 - DNA, 33 bp, Homo sapien
tttggtgattgttatatctatttccactatact

SEQ ID NO: 524759 - DNA, 33 bp, Homo sapien
tacaagccggacttctaaaagacaaacaaaaat

SEQ ID NO: 524760 - DNA, 33 bp, Homo sapien
tacaagccggacttctgaaagacaaacaaaaat

SEQ ID NO: 524761 - DNA, 33 bp, Homo sapien
atgtttcaaaacttaaagcactgtgggaacaag

SEQ ID NO: 524762 - DNA, 33 bp, Homo sapien
atgtttcaaaacttaacgcactgtgggaacaag

SEQ ID NO: 524763 - DNA, 33 bp, Homo sapien
gtgattattactgaccaggtatctaatgatagg

SEQ ID NO: 524764 - DNA, 33 bp, Homo sapien
gtgattattactgaccgggtatctaatgatagg

SEQ ID NO: 524765 - DNA, 33 bp, Homo sapien
tgaatatttctacacaataaatgcataagtaca

SEQ ID NO: 524766 - DNA, 33 bp, Homo sapien
tgaatatttctacacagtaaatgcataagtaca

SEQ ID NO: 524767 - DNA, 33 bp, Homo sapien
tgatgtgaaccacccactataagaaactcaaag

SEQ ID NO: 524768 - DNA, 33 bp, Homo sapien
tgatgtgaaccacccattataagaaactcaaag

SEQ ID NO: 524769 - DNA, 33 bp, Homo sapien
tagagaattatgtagaactacctttttttctag

SEQ ID NO: 524770 - DNA, 33 bp, Homo sapien
tagagaattatgtagagctacctttttttctag

SEQ ID NO: 524771 - DNA, 33 bp, Homo sapien
ttctggccaacatttacggatagctctttcttg

SEQ ID NO: 524772 - DNA, 33 bp, Homo sapien
ttctggccaacatttagggatagctctttcttg

SEQ ID NO: 524773 - DNA, 33 bp, Homo sapien
agcataattttgtaccagagattcattagcttc

SEQ ID NO: 524774 - DNA, 33 bp, Homo sapien
agcataattttgtaccggagattcattagcttc

SEQ ID NO: 524775 - DNA, 33 bp, Homo sapien
agaggttagaaagaaaatgatagttgccatcag

SEQ ID NO: 524776 - DNA, 33 bp, Homo sapien
agaggttagaaagaaagtgatagttgccatcag

SEQ ID NO: 524777 - DNA, 33 bp, Homo sapien
gtgtaccagtgacatacaggagagagtggtcaa

SEQ ID NO: 524778 - DNA, 33 bp, Homo sapien
gtgtaccagtgacatataggagagagtggtcaa

SEQ ID NO: 524779 - DNA, 33 bp, Homo sapien
tgccagtgatttcagactaatagagaacaaaat

SEQ ID NO: 524780 - DNA, 33 bp, Homo sapien
tgccagtgatttcagattaatagagaacaaaat

SEQ ID NO: 524781 - DNA, 33 bp, Homo sapien
tttgcagcttacattacaaattgacaagataga

SEQ ID NO: 524782 - DNA, 33 bp, Homo sapien
tttgcagcttacattataaattgacaagataga

SEQ ID NO: 524783 - DNA, 33 bp, Homo sapien
ataagttggtggcgtacacctagttgcatttta

SEQ ID NO: 524784 - DNA, 33 bp, Homo sapien
ataagttggtggcgtatacctagttgcatttta

SEQ ID NO: 524785 - DNA, 33 bp, Homo sapien
tgttgtcaacttggacacctctcattatcttat

SEQ ID NO: 524786 - DNA, 33 bp, Homo sapien
tgttgtcaacttggacccctctcattatcttat

SEQ ID NO: 524787 - DNA, 33 bp, Homo sapien
aatggcttgataattacagctcttcccacttct

SEQ ID NO: 524788 - DNA, 33 bp, Homo sapien
aatggcttgataattagagctcttcccacttct

SEQ ID NO: 524789 - DNA, 33 bp, Homo sapien
tctattcagtcctacactggctcatgaccgttt

SEQ ID NO: 524790 - DNA, 33 bp, Homo sapien
tctattcagtcctacattggctcatgaccgttt

SEQ ID NO: 524791 - DNA, 33 bp, Homo sapien
cattctaagctatgaaataggctcacattgttt

SEQ ID NO: 524792 - DNA, 33 bp, Homo sapien
cattctaagctatgaattaggctcacattgttt

SEQ ID NO: 524793 - DNA, 33 bp, Homo sapien
gtactactgtgtaaaaagtactataccagaaaa

SEQ ID NO: 524794 - DNA, 33 bp, Homo sapien
gtactactgtgtaaaaggtactataccagaaaa

SEQ ID NO: 524795 - DNA, 33 bp, Homo sapien
cggatctagcctttaacgaactttagaggtaga

SEQ ID NO: 524796 - DNA, 33 bp, Homo sapien
cggatctagcctttaatgaactttagaggtaga

SEQ ID NO: 524797 - DNA, 33 bp, Homo sapien
agaagatatagtgacacgaatatgctaaaagtg

SEQ ID NO: 524798 - DNA, 33 bp, Homo sapien
agaagatatagtgacaggaatatgctaaaagtg

SEQ ID NO: 524799 - DNA, 33 bp, Homo sapien
tcaaaggatgaagttaaagctgttggagtagaa

SEQ ID NO: 524800 - DNA, 33 bp, Homo sapien
tcaaaggatgaagttagagctgttggagtagaa

SEQ ID NO: 524801 - DNA, 33 bp, Homo sapien
tgaaatacatgtgatcataagaagcaacaatag

SEQ ID NO: 524802 - DNA, 33 bp, Homo sapien
tgaaatacatgtgatcgtaagaagcaacaatag

SEQ ID NO: 524803 - DNA, 33 bp, Homo sapien
ggatccttgagtcatagaaataatttgagcagc

SEQ ID NO: 524804 - DNA, 33 bp, Homo sapien
ggatccttgagtcatataaataatttgagcagc

SEQ ID NO: 524805 - DNA, 33 bp, Homo sapien
ttggattgagttgcatcaaacaaaattgaagtg

SEQ ID NO: 524806 - DNA, 33 bp, Homo sapien
ttggattgagttgcattaaacaaaattgaagtg

SEQ ID NO: 524807 - DNA, 33 bp, Homo sapien
ctgagtgttacccacaaaatgatattagaagaa

SEQ ID NO: 524808 - DNA, 33 bp, Homo sapien
ctgagtgttacccacataatgatattagaagaa

SEQ ID NO: 524809 - DNA, 33 bp, Homo sapien
atttactgaacaaaaccccacttctgtagaagg

SEQ ID NO: 524810 - DNA, 33 bp, Homo sapien
atttactgaacaaaactccacttctgtagaagg

SEQ ID NO: 524811 - DNA, 33 bp, Homo sapien
catgtagattctaataagcatagaaaactgctg

SEQ ID NO: 524812 - DNA, 33 bp, Homo sapien
catgtagattctaataggcatagaaaactgctg

SEQ ID NO: 524813 - DNA, 33 bp, Homo sapien
acagagaatcatgcaaacagatcattaacaaat

SEQ ID NO: 524814 - DNA, 33 bp, Homo sapien
acagagaatcatgcaaccagatcattaacaaat

SEQ ID NO: 524815 - DNA, 33 bp, Homo sapien
ggaattcaatgtctccagcatctaagaacatca

SEQ ID NO: 524816 - DNA, 33 bp, Homo sapien
ggaattcaatgtctcctgcatctaagaacatca

SEQ ID NO: 524817 - DNA, 33 bp, Homo sapien
caagttagtgaacagtcacaggtctttttctta

SEQ ID NO: 524818 - DNA, 33 bp, Homo sapien
caagttagtgaacagtgacaggtctttttctta

SEQ ID NO: 524819 - DNA, 33 bp, Homo sapien
tttaccttcgaataccaaggattgtgctataaa

SEQ ID NO: 524820 - DNA, 33 bp, Homo sapien
tttaccttcgaataccgaggattgtgctataaa

SEQ ID NO: 524821 - DNA, 33 bp, Homo sapien
tatggtcaatgacaaaactcacgagaagacaaa

SEQ ID NO: 524822 - DNA, 33 bp, Homo sapien
tatggtcaatgacaaacctcacgagaagacaaa

SEQ ID NO: 524823 - DNA, 33 bp, Homo sapien
tataaatgaaagacgccctataacagcagaaat

SEQ ID NO: 524824 - DNA, 33 bp, Homo sapien
tataaatgaaagacgctctataacagcagaaat

SEQ ID NO: 524825 - DNA, 33 bp, Homo sapien
taaggaaatagaagagaccccactaaataagat

SEQ ID NO: 524826 - DNA, 33 bp, Homo sapien
taaggaaatagaagagcccccactaaataagat

SEQ ID NO: 524827 - DNA, 33 bp, Homo sapien
gttttcagaactctaccaaatctcccagcacca

SEQ ID NO: 524828 - DNA, 33 bp, Homo sapien
gttttcagaactctactaaatctcccagcacca

SEQ ID NO: 524829 - DNA, 33 bp, Homo sapien
aaatgttgtccaataactagaaagtaatatttt

SEQ ID NO: 524830 - DNA, 33 bp, Homo sapien
aaatgttgtccaataattagaaagtaatatttt

SEQ ID NO: 524831 - DNA, 33 bp, Homo sapien
gaaatgtgccagtagaactttatgggtgaaaaa

SEQ ID NO: 524832 - DNA, 33 bp, Homo sapien
gaaatgtgccagtagagctttatgggtgaaaaa

SEQ ID NO: 524833 - DNA, 33 bp, Homo sapien
aaaatatattcagaacaattcagaggaaaccac

SEQ ID NO: 524834 - DNA, 33 bp, Homo sapien
aaaatatattcagaactattcagaggaaaccac

SEQ ID NO: 524835 - DNA, 33 bp, Homo sapien
tctaggaccactgttacgatttaacttcatgga

SEQ ID NO: 524836 - DNA, 33 bp, Homo sapien
tctaggaccactgttatgatttaacttcatgga

SEQ ID NO: 524837 - DNA, 33 bp, Homo sapien
actttaaaactctaaccggtctttggatgatga

SEQ ID NO: 524838 - DNA, 33 bp, Homo sapien
actttaaaactctaactggtctttggatgatga

SEQ ID NO: 524839 - DNA, 33 bp, Homo sapien
gacgagttacctgaagaattatcatatttagca

SEQ ID NO: 524840 - DNA, 33 bp, Homo sapien
gacgagttacctgaaggattatcatatttagca

SEQ ID NO: 524841 - DNA, 33 bp, Homo sapien
ttttaaggtgttaagaaattacaattttgaata

SEQ ID NO: 524842 - DNA, 33 bp, Homo sapien
ttttaaggtgttaagagattacaattttgaata

SEQ ID NO: 524843 - DNA, 33 bp, Homo sapien
attatgcacagataaaccacagtagtaaaataa

SEQ ID NO: 524844 - DNA, 33 bp, Homo sapien
attatgcacagataaatcacagtagtaaaataa

SEQ ID NO: 524845 - DNA, 33 bp, Homo sapien
taacttggcttcatcaaagttttttgttttgtt

SEQ ID NO: 524846 - DNA, 33 bp, Homo sapien
taacttggcttcatcagagttttttgttttgtt

SEQ ID NO: 524847 - DNA, 33 bp, Homo sapien
tccctaggacaaatcacggtacattttcagtgg

SEQ ID NO: 524848 - DNA, 33 bp, Homo sapien
tccctaggacaaatcagggtacattttcagtgg

SEQ ID NO: 524849 - DNA, 33 bp, Homo sapien
ctaactttgtccaatacggtgacactttttggc

SEQ ID NO: 524850 - DNA, 33 bp, Homo sapien
ctaactttgtccaatatggtgacactttttggc

SEQ ID NO: 524851 - DNA, 33 bp, Homo sapien
ttcttacaatgacccacgaagtttgaaggttgg

SEQ ID NO: 524852 - DNA, 33 bp, Homo sapien
ttcttacaatgacccatgaagtttgaaggttgg

SEQ ID NO: 524853 - DNA, 33 bp, Homo sapien
tgcaggtgaaagattaaagcacttgagcgaagc

SEQ ID NO: 524854 - DNA, 33 bp, Homo sapien
tgcaggtgaaagattacagcacttgagcgaagc

SEQ ID NO: 524855 - DNA, 33 bp, Homo sapien
cactctgtaatacaaacgtcctggaagcagaga

SEQ ID NO: 524856 - DNA, 33 bp, Homo sapien
cactctgtaatacaaatgtcctggaagcagaga

SEQ ID NO: 524857 - DNA, 33 bp, Homo sapien
tcttcaccttgattcaaaaaaacacagctgttt

SEQ ID NO: 524858 - DNA, 33 bp, Homo sapien
tcttcaccttgattcacaaaaacacagctgttt

SEQ ID NO: 524859 - DNA, 33 bp, Homo sapien
tgaatcaaacggaagaagttcctaggaatgttg

SEQ ID NO: 524860 - DNA, 33 bp, Homo sapien
tgaatcaaacggaagacgttcctaggaatgttg

SEQ ID NO: 524861 - DNA, 33 bp, Homo sapien
gaactagaacaattaccagggataatgaggggc

SEQ ID NO: 524862 - DNA, 33 bp, Homo sapien
gaactagaacaattactagggataatgaggggc

SEQ ID NO: 524863 - DNA, 33 bp, Homo sapien
actgatacagaatcataaaaggcctcaggcaca

SEQ ID NO: 524864 - DNA, 33 bp, Homo sapien
actgatacagaatcatcaaaggcctcaggcaca

SEQ ID NO: 524865 - DNA, 33 bp, Homo sapien
gtgtcagagagagagagcagtttttaatggttg

SEQ ID NO: 524866 - DNA, 33 bp, Homo sapien
gtgtcagagagagagatcagtttttaatggttg

SEQ ID NO: 524867 - DNA, 33 bp, Homo sapien
tacagaggactatggaaaaagaggtatggcttg

SEQ ID NO: 524868 - DNA, 33 bp, Homo sapien
tacagaggactatggagaaagaggtatggcttg

SEQ ID NO: 524869 - DNA, 33 bp, Homo sapien
gctgtctggtccaggactaacgaagactcttat

SEQ ID NO: 524870 - DNA, 33 bp, Homo sapien
gctgtctggtccaggagtaacgaagactcttat

SEQ ID NO: 524871 - DNA, 33 bp, Homo sapien
tttaattaactaacacaatcacattgcttcttt

SEQ ID NO: 524872 - DNA, 33 bp, Homo sapien
tttaattaactaacacgatcacattgcttcttt

SEQ ID NO: 524873 - DNA, 33 bp, Homo sapien
ttgctgatgtcaaataagtttggaagtggttca

SEQ ID NO: 524874 - DNA, 33 bp, Homo sapien
ttgctgatgtcaaataggtttggaagtggttca

SEQ ID NO: 524875 - DNA, 33 bp, Homo sapien
tgcagcattactggcacaaagttcctcatccag

SEQ ID NO: 524876 - DNA, 33 bp, Homo sapien
tgcagcattactggcataaagttcctcatccag

SEQ ID NO: 524877 - DNA, 33 bp, Homo sapien
catgtttatgtaggaaactactggaaaagccag

SEQ ID NO: 524878 - DNA, 33 bp, Homo sapien
catgtttatgtaggaagctactggaaaagccag

SEQ ID NO: 524879 - DNA, 33 bp, Homo sapien
acatggtgagttgcaacgctttgattattaata

SEQ ID NO: 524880 - DNA, 33 bp, Homo sapien
acatggtgagttgcaatgctttgattattaata

SEQ ID NO: 524881 - DNA, 33 bp, Homo sapien
ccttccaggtgaaacaaacaacttagaactatt

SEQ ID NO: 524882 - DNA, 33 bp, Homo sapien
ccttccaggtgaaacatacaacttagaactatt

SEQ ID NO: 524883 - DNA, 33 bp, Homo sapien
catgctggttaggccaatgatggaaactgagat

SEQ ID NO: 524884 - DNA, 33 bp, Homo sapien
catgctggttaggccagtgatggaaactgagat

SEQ ID NO: 524885 - DNA, 33 bp, Homo sapien
gacattctctgcaaagcaaaggataacatcata

SEQ ID NO: 524886 - DNA, 33 bp, Homo sapien
gacattctctgcaaagtaaaggataacatcata

SEQ ID NO: 524887 - DNA, 33 bp, Homo sapien
acaaacacttgtcgagcactgtgtggagtactg

SEQ ID NO: 524888 - DNA, 33 bp, Homo sapien
acaaacacttgtcgagtactgtgtggagtactg

SEQ ID NO: 524889 - DNA, 33 bp, Homo sapien
tggctccagactgaatgaaatcacattaaaata

SEQ ID NO: 524890 - DNA, 33 bp, Homo sapien
tggctccagactgaattaaatcacattaaaata

SEQ ID NO: 524891 - DNA, 33 bp, Homo sapien
ctgaatttttcacttaacttcatattgggtcaa

SEQ ID NO: 524892 - DNA, 33 bp, Homo sapien
ctgaatttttcacttagcttcatattgggtcaa

SEQ ID NO: 524893 - DNA, 33 bp, Homo sapien
cttacaacaaagaacaaacaggtgattgttact

SEQ ID NO: 524894 - DNA, 33 bp, Homo sapien
cttacaacaaagaacacacaggtgattgttact

SEQ ID NO: 524895 - DNA, 33 bp, Homo sapien
tcaaagagtatacttaaacaaaccttgatggta

SEQ ID NO: 524896 - DNA, 33 bp, Homo sapien
tcaaagagtatacttacacaaaccttgatggta

SEQ ID NO: 524897 - DNA, 33 bp, Homo sapien
tatgttctgagaaatgcatccttagacaatttc

SEQ ID NO: 524898 - DNA, 33 bp, Homo sapien
tatgttctgagaaatgtatccttagacaatttc

SEQ ID NO: 524899 - DNA, 33 bp, Homo sapien
aaaaggtgcgagatgacagataactcctttcaa

SEQ ID NO: 524900 - DNA, 33 bp, Homo sapien
aaaaggtgcgagatgagagataactcctttcaa

SEQ ID NO: 524901 - DNA, 33 bp, Homo sapien
gcagtccaggaaataacaaacattttgcaattt

SEQ ID NO: 524902 - DNA, 33 bp, Homo sapien
gcagtccaggaaataataaacattttgcaattt

SEQ ID NO: 524903 - DNA, 33 bp, Homo sapien
tttggtaggcagcatacgagtgaagtgctgttt

SEQ ID NO: 524904 - DNA, 33 bp, Homo sapien
tttggtaggcagcatatgagtgaagtgctgttt

SEQ ID NO: 524905 - DNA, 33 bp, Homo sapien
taaagtacacataaggcaataagggtctgaatg

SEQ ID NO: 524906 - DNA, 33 bp, Homo sapien
taaagtacacataaggtaataagggtctgaatg

SEQ ID NO: 524907 - DNA, 33 bp, Homo sapien
acagacttgatcttgacaattgaaagggtaaac

SEQ ID NO: 524908 - DNA, 33 bp, Homo sapien
acagacttgatcttgataattgaaagggtaaac

SEQ ID NO: 524909 - DNA, 33 bp, Homo sapien
gattaatttacctgatcaaggcgtactattttt

SEQ ID NO: 524910 - DNA, 33 bp, Homo sapien
gattaatttacctgattaaggcgtactattttt

SEQ ID NO: 524911 - DNA, 33 bp, Homo sapien
tgtaggaacatggagacataactgcagagaaat

SEQ ID NO: 524912 - DNA, 33 bp, Homo sapien
tgtaggaacatggagatataactgcagagaaat

SEQ ID NO: 524913 - DNA, 33 bp, Homo sapien
ttgaggtatagtgacacgaagacaatgtaggtt

SEQ ID NO: 524914 - DNA, 33 bp, Homo sapien
ttgaggtatagtgacatgaagacaatgtaggtt

SEQ ID NO: 524915 - DNA, 33 bp, Homo sapien
ttgttttgatcatatcactttatttacaaacta

SEQ ID NO: 524916 - DNA, 33 bp, Homo sapien
ttgttttgatcatatcgctttatttacaaacta

SEQ ID NO: 524917 - DNA, 33 bp, Homo sapien
agactgctctatcaaaatgaacagccacaaatt

SEQ ID NO: 524918 - DNA, 33 bp, Homo sapien
agactgctctatcaaagtgaacagccacaaatt

SEQ ID NO: 524919 - DNA, 33 bp, Homo sapien
agtaaaccaggcttgaactccttcatagtctct

SEQ ID NO: 524920 - DNA, 33 bp, Homo sapien
agtaaaccaggcttgagctccttcatagtctct

SEQ ID NO: 524921 - DNA, 33 bp, Homo sapien
ccagtcataatttctcccactgttatggcagca

SEQ ID NO: 524922 - DNA, 33 bp, Homo sapien
ccagtcataatttctctcactgttatggcagca

SEQ ID NO: 524923 - DNA, 33 bp, Homo sapien
aggtagttccaaccaaatgtaaactaagttgat

SEQ ID NO: 524924 - DNA, 33 bp, Homo sapien
aggtagttccaaccaagtgtaaactaagttgat

SEQ ID NO: 524925 - DNA, 33 bp, Homo sapien
ctgtttttaaaatagcagatcccagttacttag

SEQ ID NO: 524926 - DNA, 33 bp, Homo sapien
ctgtttttaaaatagcggatcccagttacttag

SEQ ID NO: 524927 - DNA, 33 bp, Homo sapien
tatgttcagtacacatcatgggaatatataaat

SEQ ID NO: 524928 - DNA, 33 bp, Homo sapien
tatgttcagtacacattatgggaatatataaat

SEQ ID NO: 524929 - DNA, 33 bp, Homo sapien
attggtatttgcaatcaatccagtctcgccaca

SEQ ID NO: 524930 - DNA, 33 bp, Homo sapien
attggtatttgcaatcgatccagtctcgccaca

SEQ ID NO: 524931 - DNA, 33 bp, Homo sapien
aacaaacaccaattagcccactctgtaatcagc

SEQ ID NO: 524932 - DNA, 33 bp, Homo sapien
aacaaacaccaattagtccactctgtaatcagc

SEQ ID NO: 524933 - DNA, 33 bp, Homo sapien
ctatgagagagagcatgaccttagggtgagtac

SEQ ID NO: 524934 - DNA, 33 bp, Homo sapien
ctatgagagagagcattaccttagggtgagtac

SEQ ID NO: 524935 - DNA, 33 bp, Homo sapien
agagacattgaaactgaaaaccaggataagaag

SEQ ID NO: 524936 - DNA, 33 bp, Homo sapien
agagacattgaaactgcaaaccaggataagaag

SEQ ID NO: 524937 - DNA, 33 bp, Homo sapien
tcaccttcaggacttaaagagaatgtacgatct

SEQ ID NO: 524938 - DNA, 33 bp, Homo sapien
tcaccttcaggacttagagagaatgtacgatct

SEQ ID NO: 524939 - DNA, 33 bp, Homo sapien
aatatcatctacaaaagtatagccaaaagtttc

SEQ ID NO: 524940 - DNA, 33 bp, Homo sapien
aatatcatctacaaaattatagccaaaagtttc

SEQ ID NO: 524941 - DNA, 33 bp, Homo sapien
tgaactgaatgcttctaacttaatctaaggaaa

SEQ ID NO: 524942 - DNA, 33 bp, Homo sapien
tgaactgaatgcttctgacttaatctaaggaaa

SEQ ID NO: 524943 - DNA, 33 bp, Homo sapien
tgggaggattcagtgaatatccaatttggggcc

SEQ ID NO: 524944 - DNA, 33 bp, Homo sapien
tgggaggattcagtgactatccaatttggggcc

SEQ ID NO: 524945 - DNA, 33 bp, Homo sapien
atggagcaggagaacaatacatgactggatgtg

SEQ ID NO: 524946 - DNA, 33 bp, Homo sapien
atggagcaggagaacagtacatgactggatgtg

SEQ ID NO: 524947 - DNA, 33 bp, Homo sapien
tgagctttataataacagtgctgagaaggtcta

SEQ ID NO: 524948 - DNA, 33 bp, Homo sapien
tgagctttataataacggtgctgagaaggtcta

SEQ ID NO: 524949 - DNA, 33 bp, Homo sapien
catcaggagcttttccaaacgaatggtacttta

SEQ ID NO: 524950 - DNA, 33 bp, Homo sapien
catcaggagcttttccgaacgaatggtacttta

SEQ ID NO: 524951 - DNA, 33 bp, Homo sapien
gactagacttagggaaacgaatgaggaggctct

SEQ ID NO: 524952 - DNA, 33 bp, Homo sapien
gactagacttagggaagcgaatgaggaggctct

SEQ ID NO: 524953 - DNA, 33 bp, Homo sapien
tttctccatttcagcaataaattaatgggtgtt

SEQ ID NO: 524954 - DNA, 33 bp, Homo sapien
tttctccatttcagcagtaaattaatgggtgtt

SEQ ID NO: 524955 - DNA, 33 bp, Homo sapien
aggagtcaatggctagaagagccaaaagaaata

SEQ ID NO: 524956 - DNA, 33 bp, Homo sapien
aggagtcaatggctaggagagccaaaagaaata

SEQ ID NO: 524957 - DNA, 33 bp, Homo sapien
ttcattaaaacatccaacatttctacccattta

SEQ ID NO: 524958 - DNA, 33 bp, Homo sapien
ttcattaaaacatccatcatttctacccattta

SEQ ID NO: 524959 - DNA, 33 bp, Homo sapien
aacctcacaaaggagacgaaaatttgattgggt

SEQ ID NO: 524960 - DNA, 33 bp, Homo sapien
aacctcacaaaggagatgaaaatttgattgggt

SEQ ID NO: 524961 - DNA, 33 bp, Homo sapien
tgccttacttttgtctcaaatacagtgcaatag

SEQ ID NO: 524962 - DNA, 33 bp, Homo sapien
tgccttacttttgtctgaaatacagtgcaatag

SEQ ID NO: 524963 - DNA, 33 bp, Homo sapien
tttatccacacacaaactttgtgctcagtcctc

SEQ ID NO: 524964 - DNA, 33 bp, Homo sapien
tttatccacacacaaagtttgtgctcagtcctc

SEQ ID NO: 524965 - DNA, 33 bp, Homo sapien
tgtgtaatggttcataatagcctcttaggttct

SEQ ID NO: 524966 - DNA, 33 bp, Homo sapien
tgtgtaatggttcatagtagcctcttaggttct

SEQ ID NO: 524967 - DNA, 33 bp, Homo sapien
tcaggattgtaattaacggatggagatgttgat

SEQ ID NO: 524968 - DNA, 33 bp, Homo sapien
tcaggattgtaattaatggatggagatgttgat

SEQ ID NO: 524969 - DNA, 33 bp, Homo sapien
acatctcagctaatgtaaatcaactgcctaact

SEQ ID NO: 524970 - DNA, 33 bp, Homo sapien
acatctcagctaatgtcaatcaactgcctaact

SEQ ID NO: 524971 - DNA, 33 bp, Homo sapien
ctttggacatagaacacggatatttggaagaga

SEQ ID NO: 524972 - DNA, 33 bp, Homo sapien
ctttggacatagaacatggatatttggaagaga

SEQ ID NO: 524973 - DNA, 33 bp, Homo sapien
actggattagggctcacactaacgagctaatta

SEQ ID NO: 524974 - DNA, 33 bp, Homo sapien
actggattagggctcatactaacgagctaatta

SEQ ID NO: 524975 - DNA, 33 bp, Homo sapien
gccgagcgtttgagatcagggtgctagcatagt

SEQ ID NO: 524976 - DNA, 33 bp, Homo sapien
gccgagcgtttgagattagggtgctagcatagt

SEQ ID NO: 524977 - DNA, 33 bp, Homo sapien
aaactcacttcctaaacgattgtttttaaataa

SEQ ID NO: 524978 - DNA, 33 bp, Homo sapien
aaactcacttcctaaatgattgtttttaaataa

SEQ ID NO: 524979 - DNA, 33 bp, Homo sapien
aaaactcagatatagacggaaagtcattaccta

SEQ ID NO: 524980 - DNA, 33 bp, Homo sapien
aaaactcagatatagatggaaagtcattaccta

SEQ ID NO: 524981 - DNA, 33 bp, Homo sapien
tgacctgactctgaccaacatatactcacatgc

SEQ ID NO: 524982 - DNA, 33 bp, Homo sapien
tgacctgactctgaccgacatatactcacatgc

SEQ ID NO: 524983 - DNA, 33 bp, Homo sapien
ttcaattagttgaaaaagattagttgcagtcat

SEQ ID NO: 524984 - DNA, 33 bp, Homo sapien
ttcaattagttgaaaaggattagttgcagtcat

SEQ ID NO: 524985 - DNA, 33 bp, Homo sapien
aggtatatatttttaaaggggaatgcagcaaaa

SEQ ID NO: 524986 - DNA, 33 bp, Homo sapien
aggtatatatttttaagggggaatgcagcaaaa

SEQ ID NO: 524987 - DNA, 33 bp, Homo sapien
tctttgcttcattcaaagttttgcccaaatgtc

SEQ ID NO: 524988 - DNA, 33 bp, Homo sapien
tctttgcttcattcaaggttttgcccaaatgtc

SEQ ID NO: 524989 - DNA, 33 bp, Homo sapien
gaaaagtttagaatggaacaagcaaagggttga

SEQ ID NO: 524990 - DNA, 33 bp, Homo sapien
gaaaagtttagaatgggacaagcaaagggttga

SEQ ID NO: 524991 - DNA, 33 bp, Homo sapien
gcaaaaagctgtgctacgtatcaaaaatgtact

SEQ ID NO: 524992 - DNA, 33 bp, Homo sapien
gcaaaaagctgtgctatgtatcaaaaatgtact

SEQ ID NO: 524993 - DNA, 33 bp, Homo sapien
acaatgaatctcagccgcagaagaatatggctg

SEQ ID NO: 524994 - DNA, 33 bp, Homo sapien
acaatgaatctcagcctcagaagaatatggctg

SEQ ID NO: 524995 - DNA, 33 bp, Homo sapien
gcccaattttctgaccaaacaagttcagatatt

SEQ ID NO: 524996 - DNA, 33 bp, Homo sapien
gcccaattttctgaccgaacaagttcagatatt

SEQ ID NO: 524997 - DNA, 33 bp, Homo sapien
gaaggcagaaggaacaagattcaaaatgagaga

SEQ ID NO: 524998 - DNA, 33 bp, Homo sapien
gaaggcagaaggaacaggattcaaaatgagaga

SEQ ID NO: 524999 - DNA, 33 bp, Homo sapien
gaataattcttaccccaatcattttggctgcag

SEQ ID NO: 525000 - DNA, 33 bp, Homo sapien
gaataattcttaccccgatcattttggctgcag

SEQ ID NO: 525001 - DNA, 33 bp, Homo sapien
tttttactcctttctagggtaagccaaatgttg

SEQ ID NO: 525002 - DNA, 33 bp, Homo sapien
tttttactcctttctatggtaagccaaatgttg

SEQ ID NO: 525003 - DNA, 33 bp, Homo sapien
caagttaatgggttggaaatagattaacacgta

SEQ ID NO: 525004 - DNA, 33 bp, Homo sapien
caagttaatgggttgggaatagattaacacgta

SEQ ID NO: 525005 - DNA, 33 bp, Homo sapien
ccagtttattcaagtagatcaccacaactgatt

SEQ ID NO: 525006 - DNA, 33 bp, Homo sapien
ccagtttattcaagtatatcaccacaactgatt

SEQ ID NO: 525007 - DNA, 33 bp, Homo sapien
atttattttttgagcagagaagaatgtgaagcc

SEQ ID NO: 525008 - DNA, 33 bp, Homo sapien
atttattttttgagcatagaagaatgtgaagcc

SEQ ID NO: 525009 - DNA, 33 bp, Homo sapien
cccaagttggaacaaaagagttgagttacattt

SEQ ID NO: 525010 - DNA, 33 bp, Homo sapien
cccaagttggaacaaaggagttgagttacattt

SEQ ID NO: 525011 - DNA, 33 bp, Homo sapien
aacagctgtttaatgacagaactgtgaagagaa

SEQ ID NO: 525012 - DNA, 33 bp, Homo sapien
aacagctgtttaatgatagaactgtgaagagaa

SEQ ID NO: 525013 - DNA, 33 bp, Homo sapien
agggctctcctggagtaaaaggtgagatataga

SEQ ID NO: 525014 - DNA, 33 bp, Homo sapien
agggctctcctggagtgaaaggtgagatataga

SEQ ID NO: 525015 - DNA, 33 bp, Homo sapien
atttcaatgcaaactactaaatatcactgctga

SEQ ID NO: 525016 - DNA, 33 bp, Homo sapien
atttcaatgcaaactagtaaatatcactgctga

SEQ ID NO: 525017 - DNA, 33 bp, Homo sapien
aaaatggctggtacatcacttccataggcagaa

SEQ ID NO: 525018 - DNA, 33 bp, Homo sapien
aaaatggctggtacattacttccataggcagaa

SEQ ID NO: 525019 - DNA, 33 bp, Homo sapien
tcagtaaaataccttactaagcttttggagcac

SEQ ID NO: 525020 - DNA, 33 bp, Homo sapien
tcagtaaaataccttagtaagcttttggagcac

SEQ ID NO: 525021 - DNA, 33 bp, Homo sapien
atttccccccatttcccataaaatacttagcaa

SEQ ID NO: 525022 - DNA, 33 bp, Homo sapien
atttccccccatttcctataaaatacttagcaa

SEQ ID NO: 525023 - DNA, 33 bp, Homo sapien
taatcagttggttcacaaaaaaagctaatctaa

SEQ ID NO: 525024 - DNA, 33 bp, Homo sapien
taatcagttggttcacgaaaaaagctaatctaa

SEQ ID NO: 525025 - DNA, 33 bp, Homo sapien
ccacaaacgtaatttccaaaagacccaagtcct

SEQ ID NO: 525026 - DNA, 33 bp, Homo sapien
ccacaaacgtaatttcgaaaagacccaagtcct

SEQ ID NO: 525027 - DNA, 33 bp, Homo sapien
aacataaagtagacaaaagggaaagcaaatatg

SEQ ID NO: 525028 - DNA, 33 bp, Homo sapien
aacataaagtagacaagagggaaagcaaatatg

SEQ ID NO: 525029 - DNA, 33 bp, Homo sapien
aggtagaagtgaaatccgatcatgtggacaatt

SEQ ID NO: 525030 - DNA, 33 bp, Homo sapien
aggtagaagtgaaatctgatcatgtggacaatt

SEQ ID NO: 525031 - DNA, 33 bp, Homo sapien
gagtctgctcttttaccatttgtatcctgaaat

SEQ ID NO: 525032 - DNA, 33 bp, Homo sapien
gagtctgctcttttactatttgtatcctgaaat

SEQ ID NO: 525033 - DNA, 33 bp, Homo sapien
gactattctgaccactcaggctcacagtcagtg

SEQ ID NO: 525034 - DNA, 33 bp, Homo sapien
gactattctgaccactgaggctcacagtcagtg

SEQ ID NO: 525035 - DNA, 33 bp, Homo sapien
aagaactttctattcaatcaatgttgctgtgat

SEQ ID NO: 525036 - DNA, 33 bp, Homo sapien
aagaactttctattcagtcaatgttgctgtgat

SEQ ID NO: 525037 - DNA, 33 bp, Homo sapien
cattatttacctctcaactataggcagataaga

SEQ ID NO: 525038 - DNA, 33 bp, Homo sapien
cattatttacctctcagctataggcagataaga

SEQ ID NO: 525039 - DNA, 33 bp, Homo sapien
ctgtcacttttgatagaaatgcacaagaaagtt

SEQ ID NO: 525040 - DNA, 33 bp, Homo sapien
ctgtcacttttgataggaatgcacaagaaagtt

SEQ ID NO: 525041 - DNA, 33 bp, Homo sapien
tgagatgattaggagacggagcagaaaaagtag

SEQ ID NO: 525042 - DNA, 33 bp, Homo sapien
tgagatgattaggagatggagcagaaaaagtag

SEQ ID NO: 525043 - DNA, 33 bp, Homo sapien
agaaaaagtagaaaacaagcttggcaaggtaaa

SEQ ID NO: 525044 - DNA, 33 bp, Homo sapien
agaaaaagtagaaaacgagcttggcaaggtaaa

SEQ ID NO: 525045 - DNA, 33 bp, Homo sapien
ccagcatctcatcacaataatgctatataatag

SEQ ID NO: 525046 - DNA, 33 bp, Homo sapien
ccagcatctcatcacagtaatgctatataatag

SEQ ID NO: 525047 - DNA, 33 bp, Homo sapien
aacttgttccccaacccacacaatggtagaagc

SEQ ID NO: 525048 - DNA, 33 bp, Homo sapien
aacttgttccccaacctacacaatggtagaagc

SEQ ID NO: 525049 - DNA, 33 bp, Homo sapien
gtaagcatcctaatcccgattacccacaattgg

SEQ ID NO: 525050 - DNA, 33 bp, Homo sapien
gtaagcatcctaatcctgattacccacaattgg

SEQ ID NO: 525051 - DNA, 33 bp, Homo sapien
aacaatgtaaactgaacgaggtcaaattatctt

SEQ ID NO: 525052 - DNA, 33 bp, Homo sapien
aacaatgtaaactgaatgaggtcaaattatctt

SEQ ID NO: 525053 - DNA, 33 bp, Homo sapien
cttaaaataatttggagagtcacctttactatg

SEQ ID NO: 525054 - DNA, 33 bp, Homo sapien
cttaaaataatttggatagtcacctttactatg

SEQ ID NO: 525055 - DNA, 33 bp, Homo sapien
aacttctggaatgccaagaattgaaaagagcag

SEQ ID NO: 525056 - DNA, 33 bp, Homo sapien
aacttctggaatgccaggaattgaaaagagcag

SEQ ID NO: 525057 - DNA, 33 bp, Homo sapien
aaagctggaaaggcaaatctaacaacttctgga

SEQ ID NO: 525058 - DNA, 33 bp, Homo sapien
aaagctggaaaggcaagtctaacaacttctgga

SEQ ID NO: 525059 - DNA, 33 bp, Homo sapien
taagtaacacacaaaaagcccaatctcataaaa

SEQ ID NO: 525060 - DNA, 33 bp, Homo sapien
taagtaacacacaaaaggcccaatctcataaaa

SEQ ID NO: 525061 - DNA, 33 bp, Homo sapien
aatattatgctggctaacttctgtttcttctct

SEQ ID NO: 525062 - DNA, 33 bp, Homo sapien
aatattatgctggctagcttctgtttcttctct

SEQ ID NO: 525063 - DNA, 33 bp, Homo sapien
cctttatctattcacaggagtcaactatgaatt

SEQ ID NO: 525064 - DNA, 33 bp, Homo sapien
cctttatctattcacatgagtcaactatgaatt

SEQ ID NO: 525065 - DNA, 33 bp, Homo sapien
cgagatttttcttttcacctttctaccagctcc

SEQ ID NO: 525066 - DNA, 33 bp, Homo sapien
cgagatttttcttttcgcctttctaccagctcc

SEQ ID NO: 525067 - DNA, 33 bp, Homo sapien
tgtttaatttggactcacttttattcaaataaa

SEQ ID NO: 525068 - DNA, 33 bp, Homo sapien
tgtttaatttggactctcttttattcaaataaa

SEQ ID NO: 525069 - DNA, 33 bp, Homo sapien
gagtacgaacatttaagtcttggataatttcca

SEQ ID NO: 525070 - DNA, 33 bp, Homo sapien
gagtacgaacatttaattcttggataatttcca

SEQ ID NO: 525071 - DNA, 33 bp, Homo sapien
attatttactaaattacgtacagtctatactcc

SEQ ID NO: 525072 - DNA, 33 bp, Homo sapien
attatttactaaattatgtacagtctatactcc

SEQ ID NO: 525073 - DNA, 33 bp, Homo sapien
gttatgaatacaattaaaagtccatcagtatcc

SEQ ID NO: 525074 - DNA, 33 bp, Homo sapien
gttatgaatacaattagaagtccatcagtatcc

SEQ ID NO: 525075 - DNA, 33 bp, Homo sapien
gctttaagagttctgacgcctatttaagtaaat

SEQ ID NO: 525076 - DNA, 33 bp, Homo sapien
gctttaagagttctgatgcctatttaagtaaat

SEQ ID NO: 525077 - DNA, 33 bp, Homo sapien
atttctgtcaagcccaacagcttacctactata

SEQ ID NO: 525078 - DNA, 33 bp, Homo sapien
atttctgtcaagcccatcagcttacctactata

SEQ ID NO: 525079 - DNA, 33 bp, Homo sapien
ccattcttacccgttaccagtttcatcacttgc

SEQ ID NO: 525080 - DNA, 33 bp, Homo sapien
ccattcttacccgttagcagtttcatcacttgc

SEQ ID NO: 525081 - DNA, 33 bp, Homo sapien
ttgccttgatctttccacattgcctttcacctt

SEQ ID NO: 525082 - DNA, 33 bp, Homo sapien
ttgccttgatctttccgcattgcctttcacctt

SEQ ID NO: 525083 - DNA, 33 bp, Homo sapien
aatattagaatgttagaccaacagcaataaaat

SEQ ID NO: 525084 - DNA, 33 bp, Homo sapien
aatattagaatgttaggccaacagcaataaaat

SEQ ID NO: 525085 - DNA, 33 bp, Homo sapien
ttgaaaggaatttgtacgccattagtttagccc

SEQ ID NO: 525086 - DNA, 33 bp, Homo sapien
ttgaaaggaatttgtaggccattagtttagccc

SEQ ID NO: 525087 - DNA, 33 bp, Homo sapien
ttgtatggaaacactgaacttttatgtgggagg

SEQ ID NO: 525088 - DNA, 33 bp, Homo sapien
ttgtatggaaacactgcacttttatgtgggagg

SEQ ID NO: 525089 - DNA, 33 bp, Homo sapien
atattatttgaacatacggcatgtgccagacac

SEQ ID NO: 525090 - DNA, 33 bp, Homo sapien
atattatttgaacatatggcatgtgccagacac

SEQ ID NO: 525091 - DNA, 33 bp, Homo sapien
atgagtatccaatgagacctatcgtgtgctcag

SEQ ID NO: 525092 - DNA, 33 bp, Homo sapien
atgagtatccaatgagtcctatcgtgtgctcag

SEQ ID NO: 525093 - DNA, 33 bp, Homo sapien
aagctgaataaagacacgaaaagaaacagtgat

SEQ ID NO: 525094 - DNA, 33 bp, Homo sapien
aagctgaataaagacatgaaaagaaacagtgat

SEQ ID NO: 525095 - DNA, 33 bp, Homo sapien
tagccctttaataagcacttaaattctgttaat

SEQ ID NO: 525096 - DNA, 33 bp, Homo sapien
tagccctttaataagcgcttaaattctgttaat

SEQ ID NO: 525097 - DNA, 33 bp, Homo sapien
gtttcattgctgtaaaactatatttcatgacaa

SEQ ID NO: 525098 - DNA, 33 bp, Homo sapien
gtttcattgctgtaaacctatatttcatgacaa

SEQ ID NO: 525099 - DNA, 33 bp, Homo sapien
aaagatatgaattgtgcattttaatcagtatac

SEQ ID NO: 525100 - DNA, 33 bp, Homo sapien
aaagatatgaattgtgtattttaatcagtatac

SEQ ID NO: 525101 - DNA, 33 bp, Homo sapien
ctaatagttctgtgcaatctggtaaatcctgtc

SEQ ID NO: 525102 - DNA, 33 bp, Homo sapien
ctaatagttctgtgcagtctggtaaatcctgtc

SEQ ID NO: 525103 - DNA, 33 bp, Homo sapien
gatatcacccttaagccgacaaaaaacacttgg

SEQ ID NO: 525104 - DNA, 33 bp, Homo sapien
gatatcacccttaagctgacaaaaaacacttgg

SEQ ID NO: 525105 - DNA, 33 bp, Homo sapien
tacacccgattaacacagccttgaaagcctgag

SEQ ID NO: 525106 - DNA, 33 bp, Homo sapien
tacacccgattaacacggccttgaaagcctgag

SEQ ID NO: 525107 - DNA, 33 bp, Homo sapien
gcaatctatagtaggaaaaagatgatggtaagt

SEQ ID NO: 525108 - DNA, 33 bp, Homo sapien
gcaatctatagtaggagaaagatgatggtaagt

SEQ ID NO: 525109 - DNA, 33 bp, Homo sapien
gggacaattaagtagacgtcgaaatcaatccta

SEQ ID NO: 525110 - DNA, 33 bp, Homo sapien
gggacaattaagtagatgtcgaaatcaatccta

SEQ ID NO: 525111 - DNA, 33 bp, Homo sapien
ttttaggccacaaatgaagtgacagaataaaat

SEQ ID NO: 525112 - DNA, 33 bp, Homo sapien
ttttaggccacaaatgcagtgacagaataaaat

SEQ ID NO: 525113 - DNA, 33 bp, Homo sapien
ttacctttgatcaatacattcttgagtgcagat

SEQ ID NO: 525114 - DNA, 33 bp, Homo sapien
ttacctttgatcaatatattcttgagtgcagat

SEQ ID NO: 525115 - DNA, 33 bp, Homo sapien
acttagcattttacaccacttgtcctatttgtg

SEQ ID NO: 525116 - DNA, 33 bp, Homo sapien
acttagcattttacactacttgtcctatttgtg

SEQ ID NO: 525117 - DNA, 33 bp, Homo sapien
agaagcaagacactacaaaacgttcatctagaa

SEQ ID NO: 525118 - DNA, 33 bp, Homo sapien
agaagcaagacactacgaaacgttcatctagaa

SEQ ID NO: 525119 - DNA, 33 bp, Homo sapien
ttctggaaacactgaacattatgaatgatgtag

SEQ ID NO: 525120 - DNA, 33 bp, Homo sapien
ttctggaaacactgaatattatgaatgatgtag

SEQ ID NO: 525121 - DNA, 33 bp, Homo sapien
gagaactttcaatcaacgggaagttaggctttg

SEQ ID NO: 525122 - DNA, 33 bp, Homo sapien
gagaactttcaatcaatgggaagttaggctttg

SEQ ID NO: 525123 - DNA, 33 bp, Homo sapien
tcactgagtgctatgacataaaaaagataaaat

SEQ ID NO: 525124 - DNA, 33 bp, Homo sapien
tcactgagtgctatgagataaaaaagataaaat

SEQ ID NO: 525125 - DNA, 33 bp, Homo sapien
ggatgtatcatgtgaccctacctaatctttttc

SEQ ID NO: 525126 - DNA, 33 bp, Homo sapien
ggatgtatcatgtgactctacctaatctttttc

SEQ ID NO: 525127 - DNA, 33 bp, Homo sapien
agcaaatatagcaagaactaaggtatggaggta

SEQ ID NO: 525128 - DNA, 33 bp, Homo sapien
agcaaatatagcaagacctaaggtatggaggta

SEQ ID NO: 525129 - DNA, 33 bp, Homo sapien
atggctattttgctcaaatcaatgatatttcag

SEQ ID NO: 525130 - DNA, 33 bp, Homo sapien
atggctattttgctcagatcaatgatatttcag

SEQ ID NO: 525131 - DNA, 33 bp, Homo sapien
aatataatgcaaaccacaaaggcaagccatgta

SEQ ID NO: 525132 - DNA, 33 bp, Homo sapien
aatataatgcaaaccataaaggcaagccatgta

SEQ ID NO: 525133 - DNA, 33 bp, Homo sapien
atgaacttgtcagctacgaatttaactaaaacc

SEQ ID NO: 525134 - DNA, 33 bp, Homo sapien
atgaacttgtcagctatgaatttaactaaaacc

SEQ ID NO: 525135 - DNA, 33 bp, Homo sapien
ataaaataaccaagagaatggggtgtgaatgga

SEQ ID NO: 525136 - DNA, 33 bp, Homo sapien
ataaaataaccaagaggatggggtgtgaatgga

SEQ ID NO: 525137 - DNA, 33 bp, Homo sapien
actacaaaagcgagagcaaataagaacatattt

SEQ ID NO: 525138 - DNA, 33 bp, Homo sapien
actacaaaagcgagagtaaataagaacatattt

SEQ ID NO: 525139 - DNA, 33 bp, Homo sapien
agtcttctcctgaatacgctagttctctacatt

SEQ ID NO: 525140 - DNA, 33 bp, Homo sapien
agtcttctcctgaatatgctagttctctacatt

SEQ ID NO: 525141 - DNA, 33 bp, Homo sapien
ggaaaaatatctactaacattcttccctcgatt

SEQ ID NO: 525142 - DNA, 33 bp, Homo sapien
ggaaaaatatctactagcattcttccctcgatt

SEQ ID NO: 525143 - DNA, 33 bp, Homo sapien
gagaaaactacagagacattagatgatttgtgt

SEQ ID NO: 525144 - DNA, 33 bp, Homo sapien
gagaaaactacagagagattagatgatttgtgt

SEQ ID NO: 525145 - DNA, 33 bp, Homo sapien
gactccatccaccaaaatcacataaatgttgta

SEQ ID NO: 525146 - DNA, 33 bp, Homo sapien
gactccatccaccaaagtcacataaatgttgta

SEQ ID NO: 525147 - DNA, 33 bp, Homo sapien
aggttgacaatcacataagctatattctgcttt

SEQ ID NO: 525148 - DNA, 33 bp, Homo sapien
aggttgacaatcacatgagctatattctgcttt

SEQ ID NO: 525149 - DNA, 33 bp, Homo sapien
acctcatggctatccacaaacctaagctgcttc

SEQ ID NO: 525150 - DNA, 33 bp, Homo sapien
acctcatggctatccagaaacctaagctgcttc

SEQ ID NO: 525151 - DNA, 33 bp, Homo sapien
agacttcaactaaaccaatgccaaaactcatga

SEQ ID NO: 525152 - DNA, 33 bp, Homo sapien
agacttcaactaaaccgatgccaaaactcatga

SEQ ID NO: 525153 - DNA, 33 bp, Homo sapien
aaaaactggaaaaatacggaggttgtgttaagc

SEQ ID NO: 525154 - DNA, 33 bp, Homo sapien
aaaaactggaaaaatatggaggttgtgttaagc

SEQ ID NO: 525155 - DNA, 33 bp, Homo sapien
tccaggagttctaatcaaccaatacaaagattg

SEQ ID NO: 525156 - DNA, 33 bp, Homo sapien
tccaggagttctaatcgaccaatacaaagattg

SEQ ID NO: 525157 - DNA, 33 bp, Homo sapien
catatgaaaggcttcaagtcctgacatcaccag

SEQ ID NO: 525158 - DNA, 33 bp, Homo sapien
catatgaaaggcttcatgtcctgacatcaccag

SEQ ID NO: 525159 - DNA, 33 bp, Homo sapien
ttaacacaggagacataaacgttatctgtactt

SEQ ID NO: 525160 - DNA, 33 bp, Homo sapien
ttaacacaggagacatcaacgttatctgtactt

SEQ ID NO: 525161 - DNA, 33 bp, Homo sapien
catgcgtttaggcccccgaaatcctcatcacct

SEQ ID NO: 525162 - DNA, 33 bp, Homo sapien
catgcgtttaggcccctgaaatcctcatcacct

SEQ ID NO: 525163 - DNA, 33 bp, Homo sapien
gaaatgtaaatgtcaacgtcgttttttgtgtat

SEQ ID NO: 525164 - DNA, 33 bp, Homo sapien
gaaatgtaaatgtcaatgtcgttttttgtgtat

SEQ ID NO: 525165 - DNA, 33 bp, Homo sapien
agaacattttttcccccgaatgctgatgtaatc

SEQ ID NO: 525166 - DNA, 33 bp, Homo sapien
agaacattttttcccctgaatgctgatgtaatc

SEQ ID NO: 525167 - DNA, 33 bp, Homo sapien
atgtaaacaggataccagatcccaagtgcaatt

SEQ ID NO: 525168 - DNA, 33 bp, Homo sapien
atgtaaacaggataccggatcccaagtgcaatt

SEQ ID NO: 525169 - DNA, 33 bp, Homo sapien
tagatgttcttcctaacatggccgacactgata

SEQ ID NO: 525170 - DNA, 33 bp, Homo sapien
tagatgttcttcctaatatggccgacactgata

SEQ ID NO: 525171 - DNA, 33 bp, Homo sapien
gttttgctcaagagatcacttgtaacatccagt

SEQ ID NO: 525172 - DNA, 33 bp, Homo sapien
gttttgctcaagagatgacttgtaacatccagt

SEQ ID NO: 525173 - DNA, 33 bp, Homo sapien
tatagattgaaaagtacagattcttcaacttct

SEQ ID NO: 525174 - DNA, 33 bp, Homo sapien
tatagattgaaaagtagagattcttcaacttct

SEQ ID NO: 525175 - DNA, 33 bp, Homo sapien
aaggtcacacagtaaaatcatgggctcaacgtg

SEQ ID NO: 525176 - DNA, 33 bp, Homo sapien
aaggtcacacagtaaagtcatgggctcaacgtg

SEQ ID NO: 525177 - DNA, 33 bp, Homo sapien
caactgagaacaaggccgccatgtcatgcaatt

SEQ ID NO: 525178 - DNA, 33 bp, Homo sapien
caactgagaacaaggcggccatgtcatgcaatt

SEQ ID NO: 525179 - DNA, 33 bp, Homo sapien
tcttgtccccatttgcacattaacaagaaaatc

SEQ ID NO: 525180 - DNA, 33 bp, Homo sapien
tcttgtccccatttgcgcattaacaagaaaatc

SEQ ID NO: 525181 - DNA, 33 bp, Homo sapien
gactgaaccatctacaaatgaaccacaaaaaag

SEQ ID NO: 525182 - DNA, 33 bp, Homo sapien
gactgaaccatctacatatgaaccacaaaaaag

SEQ ID NO: 525183 - DNA, 33 bp, Homo sapien
agatcactaattgatccctgagcttttatcctc

SEQ ID NO: 525184 - DNA, 33 bp, Homo sapien
agatcactaattgatcgctgagcttttatcctc

SEQ ID NO: 525185 - DNA, 33 bp, Homo sapien
ttcaatgatgttgaaccctggatgctaaataat

SEQ ID NO: 525186 - DNA, 33 bp, Homo sapien
ttcaatgatgttgaactctggatgctaaataat

SEQ ID NO: 525187 - DNA, 33 bp, Homo sapien
tgtttataaggaccacaagtttgaagtacctat

SEQ ID NO: 525188 - DNA, 33 bp, Homo sapien
tgtttataaggaccaccagtttgaagtacctat

SEQ ID NO: 525189 - DNA, 33 bp, Homo sapien
atatcgatgtgcaagacagttgacagtgcactc

SEQ ID NO: 525190 - DNA, 33 bp, Homo sapien
atatcgatgtgcaagatagttgacagtgcactc

SEQ ID NO: 525191 - DNA, 33 bp, Homo sapien
atgctgcattgaagtaacaatttagaaatgcca

SEQ ID NO: 525192 - DNA, 33 bp, Homo sapien
atgctgcattgaagtatcaatttagaaatgcca

SEQ ID NO: 525193 - DNA, 33 bp, Homo sapien
ttatgcattccctgaggaacatcaatagatcgc

SEQ ID NO: 525194 - DNA, 33 bp, Homo sapien
ttatgcattccctgagtaacatcaatagatcgc

SEQ ID NO: 525195 - DNA, 33 bp, Homo sapien
gatctagtagtgtatacagcaattaaacagttt

SEQ ID NO: 525196 - DNA, 33 bp, Homo sapien
gatctagtagtgtatatagcaattaaacagttt

SEQ ID NO: 525197 - DNA, 33 bp, Homo sapien
ctttagcatctttggaacatgcaattttagagt

SEQ ID NO: 525198 - DNA, 33 bp, Homo sapien
ctttagcatctttggatcatgcaattttagagt

SEQ ID NO: 525199 - DNA, 33 bp, Homo sapien
ttagttttgatggtaaactttttctcctgcttc

SEQ ID NO: 525200 - DNA, 33 bp, Homo sapien
ttagttttgatggtaacctttttctcctgcttc

SEQ ID NO: 525201 - DNA, 33 bp, Homo sapien
gagcaaactctggatgaattttgtgctatctcc

SEQ ID NO: 525202 - DNA, 33 bp, Homo sapien
gagcaaactctggatgcattttgtgctatctcc

SEQ ID NO: 525203 - DNA, 33 bp, Homo sapien
gctgaattaggctaggacacctttaaattgaag

SEQ ID NO: 525204 - DNA, 33 bp, Homo sapien
gctgaattaggctagggcacctttaaattgaag

SEQ ID NO: 525205 - DNA, 33 bp, Homo sapien
tattacctacaccctcgcaagtcagatcaagtg

SEQ ID NO: 525206 - DNA, 33 bp, Homo sapien
tattacctacaccctctcaagtcagatcaagtg

SEQ ID NO: 525207 - DNA, 33 bp, Homo sapien
gcttggtaactccagacacagggaatgcagcag

SEQ ID NO: 525208 - DNA, 33 bp, Homo sapien
gcttggtaactccagatacagggaatgcagcag

SEQ ID NO: 525209 - DNA, 33 bp, Homo sapien
gtcctattatgtcatagacagacacggaaaact

SEQ ID NO: 525210 - DNA, 33 bp, Homo sapien
gtcctattatgtcatatacagacacggaaaact

SEQ ID NO: 525211 - DNA, 33 bp, Homo sapien
aatttggccaacactaagggtgactgcttgcta

SEQ ID NO: 525212 - DNA, 33 bp, Homo sapien
aatttggccaacactaggggtgactgcttgcta

SEQ ID NO: 525213 - DNA, 33 bp, Homo sapien
agaaagcttggccagaatagtcttgatggcctc

SEQ ID NO: 525214 - DNA, 33 bp, Homo sapien
agaaagcttggccagagtagtcttgatggcctc

SEQ ID NO: 525215 - DNA, 33 bp, Homo sapien
actcctggaatgctagaagccagcaaaagggag

SEQ ID NO: 525216 - DNA, 33 bp, Homo sapien
actcctggaatgctagcagccagcaaaagggag

SEQ ID NO: 525217 - DNA, 33 bp, Homo sapien
ctaaattcaatgaggaaaggaaagcagtccatt

SEQ ID NO: 525218 - DNA, 33 bp, Homo sapien
ctaaattcaatgaggagaggaaagcagtccatt

SEQ ID NO: 525219 - DNA, 33 bp, Homo sapien
acaaactgtagaaatcaatgacatgaaatggac

SEQ ID NO: 525220 - DNA, 33 bp, Homo sapien
acaaactgtagaaatctatgacatgaaatggac

SEQ ID NO: 525221 - DNA, 33 bp, Homo sapien
tttaatcaaaagataacggaagtcaaacatttc

SEQ ID NO: 525222 - DNA, 33 bp, Homo sapien
tttaatcaaaagataatggaagtcaaacatttc

SEQ ID NO: 525223 - DNA, 33 bp, Homo sapien
ggtgagattactaccacctttgaagttagatgt

SEQ ID NO: 525224 - DNA, 33 bp, Homo sapien
ggtgagattactaccatctttgaagttagatgt

SEQ ID NO: 525225 - DNA, 33 bp, Homo sapien
agatacaggagcaacaatcttctatacatggtt

SEQ ID NO: 525226 - DNA, 33 bp, Homo sapien
agatacaggagcaacagtcttctatacatggtt

SEQ ID NO: 525227 - DNA, 33 bp, Homo sapien
ttttaatggacatttacagcaaggaaatgaact

SEQ ID NO: 525228 - DNA, 33 bp, Homo sapien
ttttaatggacatttatagcaaggaaatgaact

SEQ ID NO: 525229 - DNA, 33 bp, Homo sapien
atacgagaattatacacaaatccctaaggcatg

SEQ ID NO: 525230 - DNA, 33 bp, Homo sapien
atacgagaattatacagaaatccctaaggcatg

SEQ ID NO: 525231 - DNA, 33 bp, Homo sapien
agcaaaatgggccaaagcacctcgttttgtgtt

SEQ ID NO: 525232 - DNA, 33 bp, Homo sapien
agcaaaatgggccaaatcacctcgttttgtgtt

SEQ ID NO: 525233 - DNA, 33 bp, Homo sapien
gattacatgaagtttgaattcttgatataaatt

SEQ ID NO: 525234 - DNA, 33 bp, Homo sapien
gattacatgaagtttgtattcttgatataaatt

SEQ ID NO: 525235 - DNA, 33 bp, Homo sapien
atgttgatctggtgcacggagctcaaattaggt

SEQ ID NO: 525236 - DNA, 33 bp, Homo sapien
atgttgatctggtgcatggagctcaaattaggt

SEQ ID NO: 525237 - DNA, 33 bp, Homo sapien
tcaaccactctcaaagccaaccaggttatgttg

SEQ ID NO: 525238 - DNA, 33 bp, Homo sapien
tcaaccactctcaaagtcaaccaggttatgttg

SEQ ID NO: 525239 - DNA, 33 bp, Homo sapien
ttttgtttgagattaacgggaaaaagacagata

SEQ ID NO: 525240 - DNA, 33 bp, Homo sapien
ttttgtttgagattaatgggaaaaagacagata

SEQ ID NO: 525241 - DNA, 33 bp, Homo sapien
tcctcagctccatatcacctacatgaaagttcg

SEQ ID NO: 525242 - DNA, 33 bp, Homo sapien
tcctcagctccatatcgcctacatgaaagttcg

SEQ ID NO: 525243 - DNA, 33 bp, Homo sapien
taataatcatgttaataacactttgcacaaaaa

SEQ ID NO: 525244 - DNA, 33 bp, Homo sapien
taataatcatgttaatgacactttgcacaaaaa

SEQ ID NO: 525245 - DNA, 33 bp, Homo sapien
tatattacagcttgtacgacgttgagtattcat

SEQ ID NO: 525246 - DNA, 33 bp, Homo sapien
tatattacagcttgtatgacgttgagtattcat

SEQ ID NO: 525247 - DNA, 33 bp, Homo sapien
atattcaggaaattacacttgatgcatattgga

SEQ ID NO: 525248 - DNA, 33 bp, Homo sapien
atattcaggaaattacgcttgatgcatattgga

SEQ ID NO: 525249 - DNA, 33 bp, Homo sapien
gatagaaaattgcttacagatcatgcggcttgc

SEQ ID NO: 525250 - DNA, 33 bp, Homo sapien
gatagaaaattgcttatagatcatgcggcttgc

SEQ ID NO: 525251 - DNA, 33 bp, Homo sapien
agatcattgttgagtacgctgtcttgtatctca

SEQ ID NO: 525252 - DNA, 33 bp, Homo sapien
agatcattgttgagtatgctgtcttgtatctca

SEQ ID NO: 525253 - DNA, 33 bp, Homo sapien
catagactgaaaaaaaatatcagtacctcacaa

SEQ ID NO: 525254 - DNA, 33 bp, Homo sapien
catagactgaaaaaaactatcagtacctcacaa

SEQ ID NO: 525255 - DNA, 33 bp, Homo sapien
acttctataaaagacgaagttggttgtacttcc

SEQ ID NO: 525256 - DNA, 33 bp, Homo sapien
acttctataaaagacggagttggttgtacttcc

SEQ ID NO: 525257 - DNA, 33 bp, Homo sapien
cacagtcaggtgaagacggttaccagtaaggca

SEQ ID NO: 525258 - DNA, 33 bp, Homo sapien
cacagtcaggtgaagatggttaccagtaaggca

SEQ ID NO: 525259 - DNA, 33 bp, Homo sapien
ttgtatacctataaaaatgtacattggcacaaa

SEQ ID NO: 525260 - DNA, 33 bp, Homo sapien
ttgtatacctataaaagtgtacattggcacaaa

SEQ ID NO: 525261 - DNA, 33 bp, Homo sapien
aactcattgtacctaaactgtttgtacaaacaa

SEQ ID NO: 525262 - DNA, 33 bp, Homo sapien
aactcattgtacctaacctgtttgtacaaacaa

SEQ ID NO: 525263 - DNA, 33 bp, Homo sapien
tgtaatacagaagagaatcacaaataaaaagtc

SEQ ID NO: 525264 - DNA, 33 bp, Homo sapien
tgtaatacagaagagattcacaaataaaaagtc

SEQ ID NO: 525265 - DNA, 33 bp, Homo sapien
tgtcactctgtatcccaatctctcatttcaaaa

SEQ ID NO: 525266 - DNA, 33 bp, Homo sapien
tgtcactctgtatcccgatctctcatttcaaaa

SEQ ID NO: 525267 - DNA, 33 bp, Homo sapien
acacatgtggcagctcaatggactctgctgttt

SEQ ID NO: 525268 - DNA, 33 bp, Homo sapien
acacatgtggcagctcgatggactctgctgttt

SEQ ID NO: 525269 - DNA, 33 bp, Homo sapien
ctgggttgtatacagacggcagtttactactca

SEQ ID NO: 525270 - DNA, 33 bp, Homo sapien
ctgggttgtatacagagggcagtttactactca

SEQ ID NO: 525271 - DNA, 33 bp, Homo sapien
gtgtaaaattcaagcaactttcctcttccccta

SEQ ID NO: 525272 - DNA, 33 bp, Homo sapien
gtgtaaaattcaagcacctttcctcttccccta

SEQ ID NO: 525273 - DNA, 33 bp, Homo sapien
gctaagtgagataacaaactcacaggacaaata

SEQ ID NO: 525274 - DNA, 33 bp, Homo sapien
gctaagtgagataacacactcacaggacaaata

SEQ ID NO: 525275 - DNA, 33 bp, Homo sapien
acccttacaggtcccacagttgaggtaggaata

SEQ ID NO: 525276 - DNA, 33 bp, Homo sapien
acccttacaggtcccatagttgaggtaggaata

SEQ ID NO: 525277 - DNA, 33 bp, Homo sapien
atatgtaattgcataactggctcttaaaacttg

SEQ ID NO: 525278 - DNA, 33 bp, Homo sapien
atatgtaattgcataattggctcttaaaacttg

SEQ ID NO: 525279 - DNA, 33 bp, Homo sapien
atggcctcgggaggcacgtggagtttggttgga

SEQ ID NO: 525280 - DNA, 33 bp, Homo sapien
atggcctcgggaggcatgtggagtttggttgga

SEQ ID NO: 525281 - DNA, 33 bp, Homo sapien
attaaaatcctgagtcaagggaattaaaaaagg

SEQ ID NO: 525282 - DNA, 33 bp, Homo sapien
attaaaatcctgagtcgagggaattaaaaaagg

SEQ ID NO: 525283 - DNA, 33 bp, Homo sapien
aaggtaaaacatgtgagaaatgagataagacct

SEQ ID NO: 525284 - DNA, 33 bp, Homo sapien
aaggtaaaacatgtgataaatgagataagacct

SEQ ID NO: 525285 - DNA, 33 bp, Homo sapien
tcctggaagaggcttcacagatacctcttgttc

SEQ ID NO: 525286 - DNA, 33 bp, Homo sapien
tcctggaagaggcttcgcagatacctcttgttc

SEQ ID NO: 525287 - DNA, 33 bp, Homo sapien
agacatcccatgatttaaaagcaagcttcagca

SEQ ID NO: 525288 - DNA, 33 bp, Homo sapien
agacatcccatgatttgaaagcaagcttcagca

SEQ ID NO: 525289 - DNA, 33 bp, Homo sapien
acttaacagcaacaggaaagtaatgttctttca

SEQ ID NO: 525290 - DNA, 33 bp, Homo sapien
acttaacagcaacagggaagtaatgttctttca

SEQ ID NO: 525291 - DNA, 33 bp, Homo sapien
ctgatatttcttttaaatgcaagtgatgttaaa

SEQ ID NO: 525292 - DNA, 33 bp, Homo sapien
ctgatatttcttttaagtgcaagtgatgttaaa

SEQ ID NO: 525293 - DNA, 33 bp, Homo sapien
ttgaacatatgatttcaaagtatggtttatatt

SEQ ID NO: 525294 - DNA, 33 bp, Homo sapien
ttgaacatatgatttcgaagtatggtttatatt

SEQ ID NO: 525295 - DNA, 33 bp, Homo sapien
caaataacggaatagaatatcttgttcttaacc

SEQ ID NO: 525296 - DNA, 33 bp, Homo sapien
caaataacggaatagagtatcttgttcttaacc

SEQ ID NO: 525297 - DNA, 33 bp, Homo sapien
tatctgtatttcagaacgtgaagtctcactggg

SEQ ID NO: 525298 - DNA, 33 bp, Homo sapien
tatctgtatttcagaatgtgaagtctcactggg

SEQ ID NO: 525299 - DNA, 33 bp, Homo sapien
aaaataactgccctcacgaagctttcattctaa

SEQ ID NO: 525300 - DNA, 33 bp, Homo sapien
aaaataactgccctcatgaagctttcattctaa

SEQ ID NO: 525301 - DNA, 33 bp, Homo sapien
caagggttcataatgcacctcttttatgtgctc

SEQ ID NO: 525302 - DNA, 33 bp, Homo sapien
caagggttcataatgcgcctcttttatgtgctc

SEQ ID NO: 525303 - DNA, 33 bp, Homo sapien
agcaatgcaaatttaacacgtagtcactgcagc

SEQ ID NO: 525304 - DNA, 33 bp, Homo sapien
agcaatgcaaatttaatacgtagtcactgcagc

SEQ ID NO: 525305 - DNA, 33 bp, Homo sapien
cacacagcgacagtcaaaacgattccttcagtg

SEQ ID NO: 525306 - DNA, 33 bp, Homo sapien
cacacagcgacagtcagaacgattccttcagtg

SEQ ID NO: 525307 - DNA, 33 bp, Homo sapien
aaagtgagtcaaacaaaaagtggtttttcttca

SEQ ID NO: 525308 - DNA, 33 bp, Homo sapien
aaagtgagtcaaacaagaagtggtttttcttca

SEQ ID NO: 525309 - DNA, 33 bp, Homo sapien
ttcagaactgctgtgacgatcaaaggaaatcaa

SEQ ID NO: 525310 - DNA, 33 bp, Homo sapien
ttcagaactgctgtgaggatcaaaggaaatcaa

SEQ ID NO: 525311 - DNA, 33 bp, Homo sapien
ccagtgcctcttccctcaaacaagtgaaacaac

SEQ ID NO: 525312 - DNA, 33 bp, Homo sapien
ccagtgcctcttccctgaaacaagtgaaacaac

SEQ ID NO: 525313 - DNA, 33 bp, Homo sapien
ccagtcaagaatgccaatatgatgctgaaggac

SEQ ID NO: 525314 - DNA, 33 bp, Homo sapien
ccagtcaagaatgccagtatgatgctgaaggac

SEQ ID NO: 525315 - DNA, 33 bp, Homo sapien
ataaaaacagcatttcaagaagaggcaaagaaa

SEQ ID NO: 525316 - DNA, 33 bp, Homo sapien
ataaaaacagcatttcgagaagaggcaaagaaa

SEQ ID NO: 525317 - DNA, 33 bp, Homo sapien
acttgtgtttgggaaaaacttatttgtgattgt

SEQ ID NO: 525318 - DNA, 33 bp, Homo sapien
acttgtgtttgggaaagacttatttgtgattgt

SEQ ID NO: 525319 - DNA, 33 bp, Homo sapien
agaatttctcaatttcaatcattaaagaccaca

SEQ ID NO: 525320 - DNA, 33 bp, Homo sapien
agaatttctcaatttccatcattaaagaccaca

SEQ ID NO: 525321 - DNA, 33 bp, Homo sapien
atttaaaggtattgggccaacctccatgtataa

SEQ ID NO: 525322 - DNA, 33 bp, Homo sapien
atttaaaggtattgggtcaacctccatgtataa

SEQ ID NO: 525323 - DNA, 33 bp, Homo sapien
agactcagaaaacagcaacgataaagccttgga

SEQ ID NO: 525324 - DNA, 33 bp, Homo sapien
agactcagaaaacagctacgataaagccttgga

SEQ ID NO: 525325 - DNA, 33 bp, Homo sapien
tggtcactatatgggaatacctgaacagaggct

SEQ ID NO: 525326 - DNA, 33 bp, Homo sapien
tggtcactatatgggactacctgaacagaggct

SEQ ID NO: 525327 - DNA, 33 bp, Homo sapien
aatatgatgtgactgaaagatattggaacagga

SEQ ID NO: 525328 - DNA, 33 bp, Homo sapien
aatatgatgtgactgacagatattggaacagga

SEQ ID NO: 525329 - DNA, 33 bp, Homo sapien
aggattgggattgtggcaagataaaatagaaat

SEQ ID NO: 525330 - DNA, 33 bp, Homo sapien
aggattgggattgtggtaagataaaatagaaat

SEQ ID NO: 525331 - DNA, 33 bp, Homo sapien
cttaattgcacttcacaaacattggatttttta

SEQ ID NO: 525332 - DNA, 33 bp, Homo sapien
cttaattgcacttcacgaacattggatttttta

SEQ ID NO: 525333 - DNA, 33 bp, Homo sapien
acactttcaggttttcaatgaaatagcacagtt

SEQ ID NO: 525334 - DNA, 33 bp, Homo sapien
acactttcaggttttcgatgaaatagcacagtt

SEQ ID NO: 525335 - DNA, 33 bp, Homo sapien
agtgggatgctggggacgaaaaagaatgtattt

SEQ ID NO: 525336 - DNA, 33 bp, Homo sapien
agtgggatgctggggatgaaaaagaatgtattt

SEQ ID NO: 525337 - DNA, 33 bp, Homo sapien
gaaacatggaactaggaaggaaaatcaaatgct

SEQ ID NO: 525338 - DNA, 33 bp, Homo sapien
gaaacatggaactagggaggaaaatcaaatgct

SEQ ID NO: 525339 - DNA, 33 bp, Homo sapien
tgaaagcaatcagttgaaacaagggaaacatgg

SEQ ID NO: 525340 - DNA, 33 bp, Homo sapien
tgaaagcaatcagttgtaacaagggaaacatgg

SEQ ID NO: 525341 - DNA, 33 bp, Homo sapien
aaaatggaggaatatacacagactcacaaattt

SEQ ID NO: 525342 - DNA, 33 bp, Homo sapien
aaaatggaggaatatatacagactcacaaattt

SEQ ID NO: 525343 - DNA, 33 bp, Homo sapien
atgagcctattcataactaaagacagaataacc

SEQ ID NO: 525344 - DNA, 33 bp, Homo sapien
atgagcctattcataagtaaagacagaataacc

SEQ ID NO: 525345 - DNA, 33 bp, Homo sapien
aagtcatataacatcaaagtgaaggggtataag

SEQ ID NO: 525346 - DNA, 33 bp, Homo sapien
aagtcatataacatcagagtgaaggggtataag

SEQ ID NO: 525347 - DNA, 33 bp, Homo sapien
catgtcagatcccagaaaactataataacgaga

SEQ ID NO: 525348 - DNA, 33 bp, Homo sapien
catgtcagatcccagacaactataataacgaga

SEQ ID NO: 525349 - DNA, 33 bp, Homo sapien
atttgtattatttttacatttgccactatttca

SEQ ID NO: 525350 - DNA, 33 bp, Homo sapien
atttgtattatttttagatttgccactatttca

SEQ ID NO: 525351 - DNA, 33 bp, Homo sapien
cctgggatctaaactccaaaacatatcctgaac

SEQ ID NO: 525352 - DNA, 33 bp, Homo sapien
cctgggatctaaactctaaaacatatcctgaac

SEQ ID NO: 525353 - DNA, 33 bp, Homo sapien
gctgctgttgatactgcatagaaactacttttt

SEQ ID NO: 525354 - DNA, 33 bp, Homo sapien
gctgctgttgatactggatagaaactacttttt

SEQ ID NO: 525355 - DNA, 33 bp, Homo sapien
cccatctctgtgtgacaatgaagtagagcaaat

SEQ ID NO: 525356 - DNA, 33 bp, Homo sapien
cccatctctgtgtgacgatgaagtagagcaaat

SEQ ID NO: 525357 - DNA, 33 bp, Homo sapien
cccttgagatccatccgagttgaatgtatcaaa

SEQ ID NO: 525358 - DNA, 33 bp, Homo sapien
cccttgagatccatcctagttgaatgtatcaaa

SEQ ID NO: 525359 - DNA, 33 bp, Homo sapien
tgtatggttctgcttacgtaagagtctcaaagg

SEQ ID NO: 525360 - DNA, 33 bp, Homo sapien
tgtatggttctgcttatgtaagagtctcaaagg

SEQ ID NO: 525361 - DNA, 33 bp, Homo sapien
ttaacacaggtacagaacttattctgatttcat

SEQ ID NO: 525362 - DNA, 33 bp, Homo sapien
ttaacacaggtacagaccttattctgatttcat

SEQ ID NO: 525363 - DNA, 33 bp, Homo sapien
tagtggggaactagaaaagagtgctggattaca

SEQ ID NO: 525364 - DNA, 33 bp, Homo sapien
tagtggggaactagaagagagtgctggattaca

SEQ ID NO: 525365 - DNA, 33 bp, Homo sapien
tgatatattgattaaacgagacagctgagacac

SEQ ID NO: 525366 - DNA, 33 bp, Homo sapien
tgatatattgattaaatgagacagctgagacac

SEQ ID NO: 525367 - DNA, 33 bp, Homo sapien
tgtattatacgagaacaaactagctagcctggt

SEQ ID NO: 525368 - DNA, 33 bp, Homo sapien
tgtattatacgagaacgaactagctagcctggt

SEQ ID NO: 525369 - DNA, 33 bp, Homo sapien
gccatagtttgttcacacttaccttatgctgtt

SEQ ID NO: 525370 - DNA, 33 bp, Homo sapien
gccatagtttgttcacccttaccttatgctgtt

SEQ ID NO: 525371 - DNA, 33 bp, Homo sapien
caagaactaacctttcccataagccataagctg

SEQ ID NO: 525372 - DNA, 33 bp, Homo sapien
caagaactaacctttcgcataagccataagctg

SEQ ID NO: 525373 - DNA, 33 bp, Homo sapien
tctacaggtcactagacgcaggattgctggaga

SEQ ID NO: 525374 - DNA, 33 bp, Homo sapien
tctacaggtcactagatgcaggattgctggaga

SEQ ID NO: 525375 - DNA, 33 bp, Homo sapien
ttcatgttttgcaaaaggtacttaagtttgagt

SEQ ID NO: 525376 - DNA, 33 bp, Homo sapien
ttcatgttttgcaaaatgtacttaagtttgagt

SEQ ID NO: 525377 - DNA, 33 bp, Homo sapien
aaaaaaaaaaagtaaccatgtgaggagatacat

SEQ ID NO: 525378 - DNA, 33 bp, Homo sapien
aaaaaaaaaaagtaactatgtgaggagatacat

SEQ ID NO: 525379 - DNA, 33 bp, Homo sapien
cacaggaaatgagtcaatcaggatttttgaatt

SEQ ID NO: 525380 - DNA, 33 bp, Homo sapien
cacaggaaatgagtcattcaggatttttgaatt

SEQ ID NO: 525381 - DNA, 33 bp, Homo sapien
ggaaggataagcttaccattagccagatgtcca

SEQ ID NO: 525382 - DNA, 33 bp, Homo sapien
ggaaggataagcttactattagccagatgtcca

SEQ ID NO: 525383 - DNA, 33 bp, Homo sapien
gactgctaacctgtgcaaaaagtatgaaacgga

SEQ ID NO: 525384 - DNA, 33 bp, Homo sapien
gactgctaacctgtgcgaaaagtatgaaacgga

SEQ ID NO: 525385 - DNA, 33 bp, Homo sapien
aaattatacacgtaacacacagtaagcattaaa

SEQ ID NO: 525386 - DNA, 33 bp, Homo sapien
aaattatacacgtaacgcacagtaagcattaaa

SEQ ID NO: 525387 - DNA, 33 bp, Homo sapien
aagatagcaaaaaggaactaacataagaatata

SEQ ID NO: 525388 - DNA, 33 bp, Homo sapien
aagatagcaaaaaggatctaacataagaatata

SEQ ID NO: 525389 - DNA, 33 bp, Homo sapien
catagtttttcaattcgacatttgtcaaatcat

SEQ ID NO: 525390 - DNA, 33 bp, Homo sapien
catagtttttcaattctacatttgtcaaatcat

SEQ ID NO: 525391 - DNA, 33 bp, Homo sapien
gtataaacagtaaaaacaatgctaatactatta

SEQ ID NO: 525392 - DNA, 33 bp, Homo sapien
gtataaacagtaaaaataatgctaatactatta

SEQ ID NO: 525393 - DNA, 33 bp, Homo sapien
agatattatttaaaataaagctcaggccaggca

SEQ ID NO: 525394 - DNA, 33 bp, Homo sapien
agatattatttaaaatgaagctcaggccaggca

SEQ ID NO: 525395 - DNA, 33 bp, Homo sapien
aaggaaataatgtcagactagctaaaggaagta

SEQ ID NO: 525396 - DNA, 33 bp, Homo sapien
aaggaaataatgtcaggctagctaaaggaagta

SEQ ID NO: 525397 - DNA, 33 bp, Homo sapien
tagtgctgctttccaacgtactttgagagtatt

SEQ ID NO: 525398 - DNA, 33 bp, Homo sapien
tagtgctgctttccaatgtactttgagagtatt

SEQ ID NO: 525399 - DNA, 33 bp, Homo sapien
aaaaatgtcaatatatcaagtagctgaaatatt

SEQ ID NO: 525400 - DNA, 33 bp, Homo sapien
aaaaatgtcaatatatgaagtagctgaaatatt

SEQ ID NO: 525401 - DNA, 33 bp, Homo sapien
ctaagagtgaatttacgacatacttctacatag

SEQ ID NO: 525402 - DNA, 33 bp, Homo sapien
ctaagagtgaatttactacatacttctacatag

SEQ ID NO: 525403 - DNA, 33 bp, Homo sapien
actcttaacctcataacgaattccaaaaagaag

SEQ ID NO: 525404 - DNA, 33 bp, Homo sapien
actcttaacctcataatgaattccaaaaagaag

SEQ ID NO: 525405 - DNA, 33 bp, Homo sapien
tataattcacaatgtcatagaatgctaaatgcg

SEQ ID NO: 525406 - DNA, 33 bp, Homo sapien
tataattcacaatgtcgtagaatgctaaatgcg

SEQ ID NO: 525407 - DNA, 33 bp, Homo sapien
aatctttcatgaaagcaaaagtcaattgataag

SEQ ID NO: 525408 - DNA, 33 bp, Homo sapien
aatctttcatgaaagcgaaagtcaattgataag

SEQ ID NO: 525409 - DNA, 33 bp, Homo sapien
actataaggagtccaaattatatgacatataga

SEQ ID NO: 525410 - DNA, 33 bp, Homo sapien
actataaggagtccaagttatatgacatataga

SEQ ID NO: 525411 - DNA, 33 bp, Homo sapien
ttgtccagaagcttagcagcaaaacaaattgct

SEQ ID NO: 525412 - DNA, 33 bp, Homo sapien
ttgtccagaagcttagtagcaaaacaaattgct

SEQ ID NO: 525413 - DNA, 33 bp, Homo sapien
tccattctttcctttcacattttttatgagtct

SEQ ID NO: 525414 - DNA, 33 bp, Homo sapien
tccattctttcctttcgcattttttatgagtct

SEQ ID NO: 525415 - DNA, 33 bp, Homo sapien
tctagtgttgatctgagaacataactcttttct

SEQ ID NO: 525416 - DNA, 33 bp, Homo sapien
tctagtgttgatctgataacataactcttttct

SEQ ID NO: 525417 - DNA, 33 bp, Homo sapien
atcattctagatttaccgaactttaggagagaa

SEQ ID NO: 525418 - DNA, 33 bp, Homo sapien
atcattctagatttactgaactttaggagagaa

SEQ ID NO: 525419 - DNA, 33 bp, Homo sapien
aaaataccatcattgaaggttttgctttatttg

SEQ ID NO: 525420 - DNA, 33 bp, Homo sapien
aaaataccatcattgagggttttgctttatttg

SEQ ID NO: 525421 - DNA, 33 bp, Homo sapien
aaatcaaatgcaaaaaaaaatcctacaggaagt

SEQ ID NO: 525422 - DNA, 33 bp, Homo sapien
aaatcaaatgcaaaaagaaatcctacaggaagt

SEQ ID NO: 525423 - DNA, 33 bp, Homo sapien
cctgaaaggaagagtaaaccagtacatctgggg

SEQ ID NO: 525424 - DNA, 33 bp, Homo sapien
cctgaaaggaagagtagaccagtacatctgggg

SEQ ID NO: 525425 - DNA, 33 bp, Homo sapien
cccaagtgtaaatgcactgattcaaaactgtga

SEQ ID NO: 525426 - DNA, 33 bp, Homo sapien
cccaagtgtaaatgcagtgattcaaaactgtga

SEQ ID NO: 525427 - DNA, 33 bp, Homo sapien
ggaagcatgaaaaggcactgggtattttcaata

SEQ ID NO: 525428 - DNA, 33 bp, Homo sapien
ggaagcatgaaaaggcgctgggtattttcaata

SEQ ID NO: 525429 - DNA, 33 bp, Homo sapien
attggagcaagtcttacaacaatctgtggcctc

SEQ ID NO: 525430 - DNA, 33 bp, Homo sapien
attggagcaagtcttataacaatctgtggcctc

SEQ ID NO: 525431 - DNA, 33 bp, Homo sapien
tcaatatcattaaaagaactatactacccaaag

SEQ ID NO: 525432 - DNA, 33 bp, Homo sapien
tcaatatcattaaaaggactatactacccaaag

SEQ ID NO: 525433 - DNA, 33 bp, Homo sapien
tcttttatgaagaacacctatgaatgaaagtaa

SEQ ID NO: 525434 - DNA, 33 bp, Homo sapien
tcttttatgaagaacatctatgaatgaaagtaa

SEQ ID NO: 525435 - DNA, 33 bp, Homo sapien
aatttctgtcctaaaccggcaatatccttgtat

SEQ ID NO: 525436 - DNA, 33 bp, Homo sapien
aatttctgtcctaaactggcaatatccttgtat

SEQ ID NO: 525437 - DNA, 33 bp, Homo sapien
aaacaggcctaggaacacagaccaaagggcaaa

SEQ ID NO: 525438 - DNA, 33 bp, Homo sapien
aaacaggcctaggaacgcagaccaaagggcaaa

SEQ ID NO: 525439 - DNA, 33 bp, Homo sapien
actggcagtttgactcaagtctgttttcttttc

SEQ ID NO: 525440 - DNA, 33 bp, Homo sapien
actggcagtttgactcgagtctgttttcttttc

SEQ ID NO: 525441 - DNA, 33 bp, Homo sapien
agagtaagatctaggaagtatcaactggattta

SEQ ID NO: 525442 - DNA, 33 bp, Homo sapien
agagtaagatctaggaggtatcaactggattta

SEQ ID NO: 525443 - DNA, 33 bp, Homo sapien
accaaagcatgctcagcagtcaagtttgctaaa

SEQ ID NO: 525444 - DNA, 33 bp, Homo sapien
accaaagcatgctcagtagtcaagtttgctaaa

SEQ ID NO: 525445 - DNA, 33 bp, Homo sapien
ttgttaagtatgatggcatatcaccgctcttat

SEQ ID NO: 525446 - DNA, 33 bp, Homo sapien
ttgttaagtatgatggtatatcaccgctcttat

SEQ ID NO: 525447 - DNA, 33 bp, Homo sapien
tacacttgacagagacaactaaagaacatgcaa

SEQ ID NO: 525448 - DNA, 33 bp, Homo sapien
tacacttgacagagactactaaagaacatgcaa

SEQ ID NO: 525449 - DNA, 33 bp, Homo sapien
aacactttgtttttaaacccaaatgtagtgtaa

SEQ ID NO: 525450 - DNA, 33 bp, Homo sapien
aacactttgtttttaagcccaaatgtagtgtaa

SEQ ID NO: 525451 - DNA, 33 bp, Homo sapien
gcagtatggttcatacacatggaaacactagat

SEQ ID NO: 525452 - DNA, 33 bp, Homo sapien
gcagtatggttcatacgcatggaaacactagat

SEQ ID NO: 525453 - DNA, 33 bp, Homo sapien
aaatttatttggaacccggacaacatagtgaga

SEQ ID NO: 525454 - DNA, 33 bp, Homo sapien
aaatttatttggaacctggacaacatagtgaga

SEQ ID NO: 525455 - DNA, 33 bp, Homo sapien
atcttgaatttttttccactagttggtgaaaaa

SEQ ID NO: 525456 - DNA, 33 bp, Homo sapien
atcttgaatttttttctactagttggtgaaaaa

SEQ ID NO: 525457 - DNA, 33 bp, Homo sapien
gagaaagaggaagatcaaatttagaggaagctc

SEQ ID NO: 525458 - DNA, 33 bp, Homo sapien
gagaaagaggaagatcgaatttagaggaagctc

SEQ ID NO: 525459 - DNA, 33 bp, Homo sapien
actctctcctatcaaacggcatattaatttcta

SEQ ID NO: 525460 - DNA, 33 bp, Homo sapien
actctctcctatcaaatggcatattaatttcta

SEQ ID NO: 525461 - DNA, 33 bp, Homo sapien
ttcttttagctacttgaaaggatgtcatgtaag

SEQ ID NO: 525462 - DNA, 33 bp, Homo sapien
ttcttttagctacttggaaggatgtcatgtaag

SEQ ID NO: 525463 - DNA, 33 bp, Homo sapien
tttgagtcagatggtaacactatcaccattaga

SEQ ID NO: 525464 - DNA, 33 bp, Homo sapien
tttgagtcagatggtagcactatcaccattaga

SEQ ID NO: 525465 - DNA, 33 bp, Homo sapien
caccaggtctttcctacatcacctggggattac

SEQ ID NO: 525466 - DNA, 33 bp, Homo sapien
caccaggtctttcctatatcacctggggattac

SEQ ID NO: 525467 - DNA, 33 bp, Homo sapien
atgtaaaactcattgaatataggccgggcacag

SEQ ID NO: 525468 - DNA, 33 bp, Homo sapien
atgtaaaactcattgactataggccgggcacag

SEQ ID NO: 525469 - DNA, 33 bp, Homo sapien
ccaaaatcatccagtcaccaaatctgacagctg

SEQ ID NO: 525470 - DNA, 33 bp, Homo sapien
ccaaaatcatccagtcgccaaatctgacagctg

SEQ ID NO: 525471 - DNA, 33 bp, Homo sapien
caacatactacccacaaatgttagtcatacctt

SEQ ID NO: 525472 - DNA, 33 bp, Homo sapien
caacatactacccacatatgttagtcatacctt

SEQ ID NO: 525473 - DNA, 33 bp, Homo sapien
ttcattctgtagggacaaccatttattgaataa

SEQ ID NO: 525474 - DNA, 33 bp, Homo sapien
ttcattctgtagggacgaccatttattgaataa

SEQ ID NO: 525475 - DNA, 33 bp, Homo sapien
acccacaaaataactcacagggattttgactga

SEQ ID NO: 525476 - DNA, 33 bp, Homo sapien
acccacaaaataactcgcagggattttgactga

SEQ ID NO: 525477 - DNA, 33 bp, Homo sapien
gccaatagaatattgaagtagaagaacaaaacc

SEQ ID NO: 525478 - DNA, 33 bp, Homo sapien
gccaatagaatattgatgtagaagaacaaaacc

SEQ ID NO: 525479 - DNA, 33 bp, Homo sapien
gagtaagcatatgaaccgatattcaacattata

SEQ ID NO: 525480 - DNA, 33 bp, Homo sapien
gagtaagcatatgaactgatattcaacattata

SEQ ID NO: 525481 - DNA, 33 bp, Homo sapien
agttgagtttttcccactaatagtactgagggg

SEQ ID NO: 525482 - DNA, 33 bp, Homo sapien
agttgagtttttcccattaatagtactgagggg

SEQ ID NO: 525483 - DNA, 33 bp, Homo sapien
gcaattcatcagccagcattctaaatggtgaca

SEQ ID NO: 525484 - DNA, 33 bp, Homo sapien
gcaattcatcagccaggattctaaatggtgaca

SEQ ID NO: 525485 - DNA, 33 bp, Homo sapien
atatattagttataatcaccatgagaagcccca

SEQ ID NO: 525486 - DNA, 33 bp, Homo sapien
atatattagttataatgaccatgagaagcccca

SEQ ID NO: 525487 - DNA, 33 bp, Homo sapien
agggatgctgacgataactaggaaatgaaggag

SEQ ID NO: 525488 - DNA, 33 bp, Homo sapien
agggatgctgacgatatctaggaaatgaaggag

SEQ ID NO: 525489 - DNA, 33 bp, Homo sapien
aaagtattcgtctgaaccagctttaattttttt

SEQ ID NO: 525490 - DNA, 33 bp, Homo sapien
aaagtattcgtctgaagcagctttaattttttt

SEQ ID NO: 525491 - DNA, 33 bp, Homo sapien
caagttacttggataaatacaatgcatagctaa

SEQ ID NO: 525492 - DNA, 33 bp, Homo sapien
caagttacttggataattacaatgcatagctaa

SEQ ID NO: 525493 - DNA, 33 bp, Homo sapien
ggttgtatagttcacaaaacagggtaccacaga

SEQ ID NO: 525494 - DNA, 33 bp, Homo sapien
ggttgtatagttcacagaacagggtaccacaga

SEQ ID NO: 525495 - DNA, 33 bp, Homo sapien
ttgaaattattctgcacaggatatttgtccatt

SEQ ID NO: 525496 - DNA, 33 bp, Homo sapien
ttgaaattattctgcataggatatttgtccatt

SEQ ID NO: 525497 - DNA, 33 bp, Homo sapien
ccaaaatataaaatgaatatccatgactacatg

SEQ ID NO: 525498 - DNA, 33 bp, Homo sapien
ccaaaatataaaatgactatccatgactacatg

SEQ ID NO: 525499 - DNA, 33 bp, Homo sapien
aagggttagagaataacagcatgactaagatat

SEQ ID NO: 525500 - DNA, 33 bp, Homo sapien
aagggttagagaataatagcatgactaagatat

SEQ ID NO: 525501 - DNA, 33 bp, Homo sapien
gttcttttaggccacacgttacaacaaaagatg

SEQ ID NO: 525502 - DNA, 33 bp, Homo sapien
gttcttttaggccacatgttacaacaaaagatg

SEQ ID NO: 525503 - DNA, 33 bp, Homo sapien
gaactacatctgcagcaaatggtaaaatccaaa

SEQ ID NO: 525504 - DNA, 33 bp, Homo sapien
gaactacatctgcagcgaatggtaaaatccaaa

SEQ ID NO: 525505 - DNA, 33 bp, Homo sapien
agttgttgctattaaactgtagtcaatgaataa

SEQ ID NO: 525506 - DNA, 33 bp, Homo sapien
agttgttgctattaaattgtagtcaatgaataa

SEQ ID NO: 525507 - DNA, 33 bp, Homo sapien
ttatcaaattttcaaaattactcacgccatcac

SEQ ID NO: 525508 - DNA, 33 bp, Homo sapien
ttatcaaattttcaaagttactcacgccatcac

SEQ ID NO: 525509 - DNA, 33 bp, Homo sapien
agactcaaagaaaagaaggctagaaatacatga

SEQ ID NO: 525510 - DNA, 33 bp, Homo sapien
agactcaaagaaaagagggctagaaatacatga

SEQ ID NO: 525511 - DNA, 33 bp, Homo sapien
gaacaaagacatcaagaataatttatgcagata

SEQ ID NO: 525512 - DNA, 33 bp, Homo sapien
gaacaaagacatcaaggataatttatgcagata

SEQ ID NO: 525513 - DNA, 33 bp, Homo sapien
aaacatagtttttagtcaaacaaagtggttata

SEQ ID NO: 525514 - DNA, 33 bp, Homo sapien
aaacatagtttttagtgaaacaaagtggttata

SEQ ID NO: 525515 - DNA, 33 bp, Homo sapien
tatgtttctttgatgcaaataacctcatatgtg

SEQ ID NO: 525516 - DNA, 33 bp, Homo sapien
tatgtttctttgatgccaataacctcatatgtg

SEQ ID NO: 525517 - DNA, 33 bp, Homo sapien
aattccgctagtactacgaaggctaatcttgca

SEQ ID NO: 525518 - DNA, 33 bp, Homo sapien
aattccgctagtactatgaaggctaatcttgca

SEQ ID NO: 525519 - DNA, 33 bp, Homo sapien
tttaggggaaaacaaactgtagtcagaaggttt

SEQ ID NO: 525520 - DNA, 33 bp, Homo sapien
tttaggggaaaacaaattgtagtcagaaggttt

SEQ ID NO: 525521 - DNA, 33 bp, Homo sapien
aaataactcatatttcaaaatttacatagctga

SEQ ID NO: 525522 - DNA, 33 bp, Homo sapien
aaataactcatatttcgaaatttacatagctga

SEQ ID NO: 525523 - DNA, 33 bp, Homo sapien
atactggggggtcaaaaacacagtttactttgc

SEQ ID NO: 525524 - DNA, 33 bp, Homo sapien
atactggggggtcaaacacacagtttactttgc

SEQ ID NO: 525525 - DNA, 33 bp, Homo sapien
atttgagaaaggatgaactaaaggaatgagtaa

SEQ ID NO: 525526 - DNA, 33 bp, Homo sapien
atttgagaaaggatgatctaaaggaatgagtaa

SEQ ID NO: 525527 - DNA, 33 bp, Homo sapien
tgttaatattgggaagaaaactagaaatcaaga

SEQ ID NO: 525528 - DNA, 33 bp, Homo sapien
tgttaatattgggaaggaaactagaaatcaaga

SEQ ID NO: 525529 - DNA, 33 bp, Homo sapien
ctgtaattggctgactgaagccttcctccctgc

SEQ ID NO: 525530 - DNA, 33 bp, Homo sapien
ctgtaattggctgacttaagccttcctccctgc

SEQ ID NO: 525531 - DNA, 33 bp, Homo sapien
aataacttagaggtaaataagtacaaatagtat

SEQ ID NO: 525532 - DNA, 33 bp, Homo sapien
aataacttagaggtaagtaagtacaaatagtat

SEQ ID NO: 525533 - DNA, 33 bp, Homo sapien
taacagtaaaaacccacgagtctacaattatct

SEQ ID NO: 525534 - DNA, 33 bp, Homo sapien
taacagtaaaaacccatgagtctacaattatct

SEQ ID NO: 525535 - DNA, 33 bp, Homo sapien
caattttagatgtcaaccttattgataatgaac

SEQ ID NO: 525536 - DNA, 33 bp, Homo sapien
caattttagatgtcaagcttattgataatgaac

SEQ ID NO: 525537 - DNA, 33 bp, Homo sapien
tctaaatctcagcttaagtattttccattgttt

SEQ ID NO: 525538 - DNA, 33 bp, Homo sapien
tctaaatctcagcttaggtattttccattgttt

SEQ ID NO: 525539 - DNA, 33 bp, Homo sapien
gtccacattaataggaccattgttaggctggta

SEQ ID NO: 525540 - DNA, 33 bp, Homo sapien
gtccacattaataggatcattgttaggctggta

SEQ ID NO: 525541 - DNA, 33 bp, Homo sapien
tcaacaaaggtcaatacgaaggacgtcccaaat

SEQ ID NO: 525542 - DNA, 33 bp, Homo sapien
tcaacaaaggtcaatatgaaggacgtcccaaat

SEQ ID NO: 525543 - DNA, 33 bp, Homo sapien
cacacacacaaatacaatgcgctatacggagtg

SEQ ID NO: 525544 - DNA, 33 bp, Homo sapien
cacacacacaaatacagtgcgctatacggagtg

SEQ ID NO: 525545 - DNA, 33 bp, Homo sapien
cattctccctgttggaaggtggcaatagttgct

SEQ ID NO: 525546 - DNA, 33 bp, Homo sapien
cattctccctgttggagggtggcaatagttgct

SEQ ID NO: 525547 - DNA, 33 bp, Homo sapien
tgttctgctgcccttaagcctgtcggggatttg

SEQ ID NO: 525548 - DNA, 33 bp, Homo sapien
tgttctgctgcccttaggcctgtcggggatttg

SEQ ID NO: 525549 - DNA, 33 bp, Homo sapien
ctccaaggcttcaatgccaagtttcaatacact

SEQ ID NO: 525550 - DNA, 33 bp, Homo sapien
ctccaaggcttcaatggcaagtttcaatacact

SEQ ID NO: 525551 - DNA, 33 bp, Homo sapien
agcagaacgaggggcaaaatgaccctgtattgc

SEQ ID NO: 525552 - DNA, 33 bp, Homo sapien
agcagaacgaggggcacaatgaccctgtattgc

SEQ ID NO: 525553 - DNA, 33 bp, Homo sapien
ctcttgctttttagccgggatgcagttggtcaa

SEQ ID NO: 525554 - DNA, 33 bp, Homo sapien
ctcttgctttttagcctggatgcagttggtcaa

SEQ ID NO: 525555 - DNA, 33 bp, Homo sapien
tgttttgtcctgttacgggcatctagaactgat

SEQ ID NO: 525556 - DNA, 33 bp, Homo sapien
tgttttgtcctgttactggcatctagaactgat

SEQ ID NO: 525557 - DNA, 33 bp, Homo sapien
gttgcttaggatggaaaggatgttctaggaata

SEQ ID NO: 525558 - DNA, 33 bp, Homo sapien
gttgcttaggatggaagggatgttctaggaata

SEQ ID NO: 525559 - DNA, 33 bp, Homo sapien
atttatttattttcctcacagtggaatagcatt

SEQ ID NO: 525560 - DNA, 33 bp, Homo sapien
atttatttattttcctgacagtggaatagcatt

SEQ ID NO: 525561 - DNA, 33 bp, Homo sapien
ttattctgcaaacatcacaattaggagaaaaga

SEQ ID NO: 525562 - DNA, 33 bp, Homo sapien
ttattctgcaaacatcgcaattaggagaaaaga

SEQ ID NO: 525563 - DNA, 33 bp, Homo sapien
catgttaaagtacccaaaatccatccaactgaa

SEQ ID NO: 525564 - DNA, 33 bp, Homo sapien
catgttaaagtacccagaatccatccaactgaa

SEQ ID NO: 525565 - DNA, 33 bp, Homo sapien
actgtatcagagcttacatcagtgctaagtatg

SEQ ID NO: 525566 - DNA, 33 bp, Homo sapien
actgtatcagagcttagatcagtgctaagtatg

SEQ ID NO: 525567 - DNA, 33 bp, Homo sapien
ctcttaggatgaaaacaactccttaacacggcc

SEQ ID NO: 525568 - DNA, 33 bp, Homo sapien
ctcttaggatgaaaactactccttaacacggcc

SEQ ID NO: 525569 - DNA, 33 bp, Homo sapien
tatttgaatttcacacaaaggtagttatgtggg

SEQ ID NO: 525570 - DNA, 33 bp, Homo sapien
tatttgaatttcacacgaaggtagttatgtggg

SEQ ID NO: 525571 - DNA, 33 bp, Homo sapien
tttcaagactctcaagaacttatagtgataaag

SEQ ID NO: 525572 - DNA, 33 bp, Homo sapien
tttcaagactctcaagtacttatagtgataaag

SEQ ID NO: 525573 - DNA, 33 bp, Homo sapien
ctacctgcactaaaacacctgcttcttatttta

SEQ ID NO: 525574 - DNA, 33 bp, Homo sapien
ctacctgcactaaaacgcctgcttcttatttta

SEQ ID NO: 525575 - DNA, 33 bp, Homo sapien
tttcaattgttaaataaccacacatgcagaggc

SEQ ID NO: 525576 - DNA, 33 bp, Homo sapien
tttcaattgttaaatagccacacatgcagaggc

SEQ ID NO: 525577 - DNA, 33 bp, Homo sapien
tggaagctcatctgaaccttggagttctcttcc

SEQ ID NO: 525578 - DNA, 33 bp, Homo sapien
tggaagctcatctgaagcttggagttctcttcc

SEQ ID NO: 525579 - DNA, 33 bp, Homo sapien
actgttttctcaagaacgcactgaagtgagctg

SEQ ID NO: 525580 - DNA, 33 bp, Homo sapien
actgttttctcaagaaggcactgaagtgagctg

SEQ ID NO: 525581 - DNA, 33 bp, Homo sapien
gggatgaagactggacacaagctggtcaatcag

SEQ ID NO: 525582 - DNA, 33 bp, Homo sapien
gggatgaagactggacccaagctggtcaatcag

SEQ ID NO: 525583 - DNA, 33 bp, Homo sapien
aataactagttccataataatgcattaatttct

SEQ ID NO: 525584 - DNA, 33 bp, Homo sapien
aataactagttccatagtaatgcattaatttct

SEQ ID NO: 525585 - DNA, 33 bp, Homo sapien
agaaaggcgttcagttcaaaaagtgcaatataa

SEQ ID NO: 525586 - DNA, 33 bp, Homo sapien
agaaaggcgttcagtttaaaaagtgcaatataa

SEQ ID NO: 525587 - DNA, 33 bp, Homo sapien
aaacagtacagaataaacttcaaatatagtgag

SEQ ID NO: 525588 - DNA, 33 bp, Homo sapien
aaacagtacagaataagcttcaaatatagtgag

SEQ ID NO: 525589 - DNA, 33 bp, Homo sapien
tttgagtaggtggtaacgtctgacacctgagag

SEQ ID NO: 525590 - DNA, 33 bp, Homo sapien
tttgagtaggtggtaaggtctgacacctgagag

SEQ ID NO: 525591 - DNA, 33 bp, Homo sapien
gcttcccagttcgttacgttgaacacattttct

SEQ ID NO: 525592 - DNA, 33 bp, Homo sapien
gcttcccagttcgttatgttgaacacattttct

SEQ ID NO: 525593 - DNA, 33 bp, Homo sapien
tatattaaagacaaaaatgaggtcaaatacttt

SEQ ID NO: 525594 - DNA, 33 bp, Homo sapien
tatattaaagacaaaagtgaggtcaaatacttt

SEQ ID NO: 525595 - DNA, 33 bp, Homo sapien
aagagtggatgtatgagagcactcagattggtt

SEQ ID NO: 525596 - DNA, 33 bp, Homo sapien
aagagtggatgtatgatagcactcagattggtt

SEQ ID NO: 525597 - DNA, 33 bp, Homo sapien
gcacaaaaatattgccaaacaattttaacttta

SEQ ID NO: 525598 - DNA, 33 bp, Homo sapien
gcacaaaaatattgccgaacaattttaacttta

SEQ ID NO: 525599 - DNA, 33 bp, Homo sapien
ttctggtgaacaattccaagccgtaatgcctgg

SEQ ID NO: 525600 - DNA, 33 bp, Homo sapien
ttctggtgaacaattctaagccgtaatgcctgg

SEQ ID NO: 525601 - DNA, 33 bp, Homo sapien
gtaagtgacaatgctgaataagctacaaagaaa

SEQ ID NO: 525602 - DNA, 33 bp, Homo sapien
gtaagtgacaatgctgcataagctacaaagaaa

SEQ ID NO: 525603 - DNA, 33 bp, Homo sapien
gaatctctctctcatcaaatccctctcatcctt

SEQ ID NO: 525604 - DNA, 33 bp, Homo sapien
gaatctctctctcatcgaatccctctcatcctt

SEQ ID NO: 525605 - DNA, 33 bp, Homo sapien
ttgtatacggaatcagaaataatgcaacaattc

SEQ ID NO: 525606 - DNA, 33 bp, Homo sapien
ttgtatacggaatcagtaataatgcaacaattc

SEQ ID NO: 525607 - DNA, 33 bp, Homo sapien
ttttaactacagccaaataaataatgctatcat

SEQ ID NO: 525608 - DNA, 33 bp, Homo sapien
ttttaactacagccaactaaataatgctatcat

SEQ ID NO: 525609 - DNA, 33 bp, Homo sapien
tctttctaagtgaataagatatggtccttgttc

SEQ ID NO: 525610 - DNA, 33 bp, Homo sapien
tctttctaagtgaataggatatggtccttgttc

SEQ ID NO: 525611 - DNA, 33 bp, Homo sapien
taattacatgcccttacaaaatttggcttgtct

SEQ ID NO: 525612 - DNA, 33 bp, Homo sapien
taattacatgcccttataaaatttggcttgtct

SEQ ID NO: 525613 - DNA, 33 bp, Homo sapien
gcactttctaaaggcacggatgacccacagccc

SEQ ID NO: 525614 - DNA, 33 bp, Homo sapien
gcactttctaaaggcatggatgacccacagccc

SEQ ID NO: 525615 - DNA, 33 bp, Homo sapien
accccatagacatttcacataacttgtaattct

SEQ ID NO: 525616 - DNA, 33 bp, Homo sapien
accccatagacatttcgcataacttgtaattct

SEQ ID NO: 525617 - DNA, 33 bp, Homo sapien
gccaggaatttggttcaacttttctagaagact

SEQ ID NO: 525618 - DNA, 33 bp, Homo sapien
gccaggaatttggttcgacttttctagaagact

SEQ ID NO: 525619 - DNA, 33 bp, Homo sapien
agtctactgctacttacgcaaccacagattctc

SEQ ID NO: 525620 - DNA, 33 bp, Homo sapien
agtctactgctacttatgcaaccacagattctc

SEQ ID NO: 525621 - DNA, 33 bp, Homo sapien
tcaggtaagataataaaagagtttgtaagacac

SEQ ID NO: 525622 - DNA, 33 bp, Homo sapien
tcaggtaagataataagagagtttgtaagacac

SEQ ID NO: 525623 - DNA, 33 bp, Homo sapien
acatacttggctattcacataagaaagtcttag

SEQ ID NO: 525624 - DNA, 33 bp, Homo sapien
acatacttggctattcgcataagaaagtcttag

SEQ ID NO: 525625 - DNA, 33 bp, Homo sapien
ttatacagccttcttacactggggtatgattgt

SEQ ID NO: 525626 - DNA, 33 bp, Homo sapien
ttatacagccttcttatactggggtatgattgt

SEQ ID NO: 525627 - DNA, 33 bp, Homo sapien
tcccttaaataaagtacgcagtggacagtgttt

SEQ ID NO: 525628 - DNA, 33 bp, Homo sapien
tcccttaaataaagtatgcagtggacagtgttt

SEQ ID NO: 525629 - DNA, 33 bp, Homo sapien
cctgagtaagcaaaaaatgccttgaacatttat

SEQ ID NO: 525630 - DNA, 33 bp, Homo sapien
cctgagtaagcaaaaagtgccttgaacatttat

SEQ ID NO: 525631 - DNA, 33 bp, Homo sapien
tagtgattctactaaacgtctggcaaaatgtaa

SEQ ID NO: 525632 - DNA, 33 bp, Homo sapien
tagtgattctactaaatgtctggcaaaatgtaa

SEQ ID NO: 525633 - DNA, 33 bp, Homo sapien
aatggtaagttgtcctaaaaattggaaacaatt

SEQ ID NO: 525634 - DNA, 33 bp, Homo sapien
aatggtaagttgtcctgaaaattggaaacaatt

SEQ ID NO: 525635 - DNA, 33 bp, Homo sapien
tgaaatggcctggtgaactaaggtatatattag

SEQ ID NO: 525636 - DNA, 33 bp, Homo sapien
tgaaatggcctggtgagctaaggtatatattag

SEQ ID NO: 525637 - DNA, 33 bp, Homo sapien
tcaaaactcattttgaaagccctgcctattagg

SEQ ID NO: 525638 - DNA, 33 bp, Homo sapien
tcaaaactcattttgagagccctgcctattagg

SEQ ID NO: 525639 - DNA, 33 bp, Homo sapien
tcacatgtttccattaagatagtcttcaagaga

SEQ ID NO: 525640 - DNA, 33 bp, Homo sapien
tcacatgtttccattacgatagtcttcaagaga

SEQ ID NO: 525641 - DNA, 33 bp, Homo sapien
ctcgtcattgcatccactcttctcccctcacat

SEQ ID NO: 525642 - DNA, 33 bp, Homo sapien
ctcgtcattgcatccattcttctcccctcacat

SEQ ID NO: 525643 - DNA, 33 bp, Homo sapien
tgtcattctgatatcaatcctttggtagaggag

SEQ ID NO: 525644 - DNA, 33 bp, Homo sapien
tgtcattctgatatcattcctttggtagaggag

SEQ ID NO: 525645 - DNA, 33 bp, Homo sapien
taaagacaaactttgcgcactgtgagttggcct

SEQ ID NO: 525646 - DNA, 33 bp, Homo sapien
taaagacaaactttgctcactgtgagttggcct

SEQ ID NO: 525647 - DNA, 33 bp, Homo sapien
ggctctgtggcaaccacaatactcaattctgct

SEQ ID NO: 525648 - DNA, 33 bp, Homo sapien
ggctctgtggcaaccataatactcaattctgct

SEQ ID NO: 525649 - DNA, 33 bp, Homo sapien
tgtttaaataacacaaggacaaaggctgggatc

SEQ ID NO: 525650 - DNA, 33 bp, Homo sapien
tgtttaaataacacaatgacaaaggctgggatc

SEQ ID NO: 525651 - DNA, 33 bp, Homo sapien
tacaagttgtatcgcacggggaatagtggaaat

SEQ ID NO: 525652 - DNA, 33 bp, Homo sapien
tacaagttgtatcgcatggggaatagtggaaat

SEQ ID NO: 525653 - DNA, 33 bp, Homo sapien
aagacccagctacacaatgcaagtattatgatg

SEQ ID NO: 525654 - DNA, 33 bp, Homo sapien
aagacccagctacacagtgcaagtattatgatg

SEQ ID NO: 525655 - DNA, 33 bp, Homo sapien
ttgccctctgattgaaacacaatgcaaatcctt

SEQ ID NO: 525656 - DNA, 33 bp, Homo sapien
ttgccctctgattgaagcacaatgcaaatcctt

SEQ ID NO: 525657 - DNA, 33 bp, Homo sapien
agacttggactaacccacaagacagtgattaac

SEQ ID NO: 525658 - DNA, 33 bp, Homo sapien
agacttggactaacccccaagacagtgattaac

SEQ ID NO: 525659 - DNA, 33 bp, Homo sapien
tttggacagtatctgcccgaagattagaagccg

SEQ ID NO: 525660 - DNA, 33 bp, Homo sapien
tttggacagtatctgctcgaagattagaagccg

SEQ ID NO: 525661 - DNA, 33 bp, Homo sapien
aaattggaatcacaagcctaatttaacaaatac

SEQ ID NO: 525662 - DNA, 33 bp, Homo sapien
aaattggaatcacaaggctaatttaacaaatac

SEQ ID NO: 525663 - DNA, 33 bp, Homo sapien
gtgagaaagggatctcaagaatgctagggctgg

SEQ ID NO: 525664 - DNA, 33 bp, Homo sapien
gtgagaaagggatctcgagaatgctagggctgg

SEQ ID NO: 525665 - DNA, 33 bp, Homo sapien
cattaacctctggttacgggtaaacgacaaagt

SEQ ID NO: 525666 - DNA, 33 bp, Homo sapien
cattaacctctggttaggggtaaacgacaaagt

SEQ ID NO: 525667 - DNA, 33 bp, Homo sapien
atatggaaatagaatacgtcacttattttaaaa

SEQ ID NO: 525668 - DNA, 33 bp, Homo sapien
atatggaaatagaataggtcacttattttaaaa

SEQ ID NO: 525669 - DNA, 33 bp, Homo sapien
agtcattgcaagagaaggaagtttgtttctatt

SEQ ID NO: 525670 - DNA, 33 bp, Homo sapien
agtcattgcaagagaatgaagtttgtttctatt

SEQ ID NO: 525671 - DNA, 33 bp, Homo sapien
tgttacaccatgtgacaatagctaaatctcagt

SEQ ID NO: 525672 - DNA, 33 bp, Homo sapien
tgttacaccatgtgacgatagctaaatctcagt

SEQ ID NO: 525673 - DNA, 33 bp, Homo sapien
gattaagtttcttatacacctggttctgtcttc

SEQ ID NO: 525674 - DNA, 33 bp, Homo sapien
gattaagtttcttatatacctggttctgtcttc

SEQ ID NO: 525675 - DNA, 33 bp, Homo sapien
tatgtatgaactctgacggtccaaacatatata

SEQ ID NO: 525676 - DNA, 33 bp, Homo sapien
tatgtatgaactctgatggtccaaacatatata

SEQ ID NO: 525677 - DNA, 33 bp, Homo sapien
tttaaaagaagtcaacaagaaaggtatacaaac

SEQ ID NO: 525678 - DNA, 33 bp, Homo sapien
tttaaaagaagtcaacgagaaaggtatacaaac

SEQ ID NO: 525679 - DNA, 33 bp, Homo sapien
cagacacattaggtgaactatcagtagtacttc

SEQ ID NO: 525680 - DNA, 33 bp, Homo sapien
cagacacattaggtgatctatcagtagtacttc

SEQ ID NO: 525681 - DNA, 33 bp, Homo sapien
cttactagctttgtaacggtggatatattcatt

SEQ ID NO: 525682 - DNA, 33 bp, Homo sapien
cttactagctttgtaatggtggatatattcatt

SEQ ID NO: 525683 - DNA, 33 bp, Homo sapien
cttaactttagtcaaccgtgaatgattgattat

SEQ ID NO: 525684 - DNA, 33 bp, Homo sapien
cttaactttagtcaactgtgaatgattgattat

SEQ ID NO: 525685 - DNA, 33 bp, Homo sapien
tctaagctctgaagcaacaatgtaatggcaagc

SEQ ID NO: 525686 - DNA, 33 bp, Homo sapien
tctaagctctgaagcatcaatgtaatggcaagc

SEQ ID NO: 525687 - DNA, 33 bp, Homo sapien
gtgatgaatcacataaaataaaccgtaattctt

SEQ ID NO: 525688 - DNA, 33 bp, Homo sapien
gtgatgaatcacataagataaaccgtaattctt

SEQ ID NO: 525689 - DNA, 33 bp, Homo sapien
atatagaccaattcagaaatagttttgccactg

SEQ ID NO: 525690 - DNA, 33 bp, Homo sapien
atatagaccaattcagtaatagttttgccactg

SEQ ID NO: 525691 - DNA, 33 bp, Homo sapien
ggagacaatgttgttagaatctgtctctagggg

SEQ ID NO: 525692 - DNA, 33 bp, Homo sapien
ggagacaatgttgttataatctgtctctagggg

SEQ ID NO: 525693 - DNA, 33 bp, Homo sapien
ctgggagctcataaagactccctagttcaggaa

SEQ ID NO: 525694 - DNA, 33 bp, Homo sapien
ctgggagctcataaaggctccctagttcaggaa

SEQ ID NO: 525695 - DNA, 33 bp, Homo sapien
tccgtgatttggaaaaatgcaagcctgggcagc

SEQ ID NO: 525696 - DNA, 33 bp, Homo sapien
tccgtgatttggaaaagtgcaagcctgggcagc

SEQ ID NO: 525697 - DNA, 33 bp, Homo sapien
gacatttggagaaataaaacagatgggagaatt

SEQ ID NO: 525698 - DNA, 33 bp, Homo sapien
gacatttggagaaatagaacagatgggagaatt

SEQ ID NO: 525699 - DNA, 33 bp, Homo sapien
ggtaatgacagttcagacagaaaagcaaaattt

SEQ ID NO: 525700 - DNA, 33 bp, Homo sapien
ggtaatgacagttcaggcagaaaagcaaaattt

SEQ ID NO: 525701 - DNA, 33 bp, Homo sapien
cctgcttatggtaaaacgctaagtactaactgc

SEQ ID NO: 525702 - DNA, 33 bp, Homo sapien
cctgcttatggtaaaatgctaagtactaactgc

SEQ ID NO: 525703 - DNA, 33 bp, Homo sapien
tttaaactctatgcagcatttactacctctgat

SEQ ID NO: 525704 - DNA, 33 bp, Homo sapien
tttaaactctatgcaggatttactacctctgat

SEQ ID NO: 525705 - DNA, 33 bp, Homo sapien
attagagctgaagagcactatttacacttctta

SEQ ID NO: 525706 - DNA, 33 bp, Homo sapien
attagagctgaagagcgctatttacacttctta

SEQ ID NO: 525707 - DNA, 33 bp, Homo sapien
gcagtcaaatgagtcaacctcatactaactgct

SEQ ID NO: 525708 - DNA, 33 bp, Homo sapien
gcagtcaaatgagtcaccctcatactaactgct

SEQ ID NO: 525709 - DNA, 33 bp, Homo sapien
gggatgtttgtgactacagaggtcaatcatatc

SEQ ID NO: 525710 - DNA, 33 bp, Homo sapien
gggatgtttgtgactatagaggtcaatcatatc

SEQ ID NO: 525711 - DNA, 33 bp, Homo sapien
tatgaatgttggtgtacgaatacctgtttgagt

SEQ ID NO: 525712 - DNA, 33 bp, Homo sapien
tatgaatgttggtgtatgaatacctgtttgagt

SEQ ID NO: 525713 - DNA, 33 bp, Homo sapien
tagctagctatcaagcaaacagagctgaggaga

SEQ ID NO: 525714 - DNA, 33 bp, Homo sapien
tagctagctatcaagccaacagagctgaggaga

SEQ ID NO: 525715 - DNA, 33 bp, Homo sapien
ttaggtcaaatttgtacggtacatttctgaaat

SEQ ID NO: 525716 - DNA, 33 bp, Homo sapien
ttaggtcaaatttgtatggtacatttctgaaat

SEQ ID NO: 525717 - DNA, 33 bp, Homo sapien
ataaatgtttaggacacatctgcacatacatgg

SEQ ID NO: 525718 - DNA, 33 bp, Homo sapien
ataaatgtttaggacatatctgcacatacatgg

SEQ ID NO: 525719 - DNA, 33 bp, Homo sapien
tttgaaaatccttcacagaaaatttgttgtcga

SEQ ID NO: 525720 - DNA, 33 bp, Homo sapien
tttgaaaatccttcacggaaaatttgttgtcga

SEQ ID NO: 525721 - DNA, 33 bp, Homo sapien
ctttctcctgttagtacaacctgtttcttcaaa

SEQ ID NO: 525722 - DNA, 33 bp, Homo sapien
ctttctcctgttagtataacctgtttcttcaaa

SEQ ID NO: 525723 - DNA, 33 bp, Homo sapien
cctctggcaactaccaatctactccctattttc

SEQ ID NO: 525724 - DNA, 33 bp, Homo sapien
cctctggcaactaccagtctactccctattttc

SEQ ID NO: 525725 - DNA, 33 bp, Homo sapien
caatgatgagacataaaccttgaatatcttctt

SEQ ID NO: 525726 - DNA, 33 bp, Homo sapien
caatgatgagacataagccttgaatatcttctt

SEQ ID NO: 525727 - DNA, 33 bp, Homo sapien
gtatcctacacacatgacaattctaaattttta

SEQ ID NO: 525728 - DNA, 33 bp, Homo sapien
gtatcctacacacatggcaattctaaattttta

SEQ ID NO: 525729 - DNA, 33 bp, Homo sapien
ttgagcaaacaaataacgacctaagcacagtat

SEQ ID NO: 525730 - DNA, 33 bp, Homo sapien
ttgagcaaacaaataatgacctaagcacagtat

SEQ ID NO: 525731 - DNA, 33 bp, Homo sapien
ctaggaattactgaaacctctcagatcatcatc

SEQ ID NO: 525732 - DNA, 33 bp, Homo sapien
ctaggaattactgaaatctctcagatcatcatc

SEQ ID NO: 525733 - DNA, 33 bp, Homo sapien
acagttataaagttggcaaatggttatactctg

SEQ ID NO: 525734 - DNA, 33 bp, Homo sapien
acagttataaagttggtaaatggttatactctg

SEQ ID NO: 525735 - DNA, 33 bp, Homo sapien
aatttgtggtacaatacactctcatgctgggca

SEQ ID NO: 525736 - DNA, 33 bp, Homo sapien
aatttgtggtacaatatactctcatgctgggca

SEQ ID NO: 525737 - DNA, 33 bp, Homo sapien
caaatgggtccatcacaaccaggttgacaacat

SEQ ID NO: 525738 - DNA, 33 bp, Homo sapien
caaatgggtccatcacgaccaggttgacaacat

SEQ ID NO: 525739 - DNA, 33 bp, Homo sapien
aatggttaacagtttgaacattccaggctaatg

SEQ ID NO: 525740 - DNA, 33 bp, Homo sapien
aatggttaacagtttgtacattccaggctaatg

SEQ ID NO: 525741 - DNA, 33 bp, Homo sapien
gatgtgtttaagaaatcacaatattgcagataa

SEQ ID NO: 525742 - DNA, 33 bp, Homo sapien
gatgtgtttaagaaattacaatattgcagataa

SEQ ID NO: 525743 - DNA, 33 bp, Homo sapien
tccaacacagttcaacacatgaaaacaatttgt

SEQ ID NO: 525744 - DNA, 33 bp, Homo sapien
tccaacacagttcaacgcatgaaaacaatttgt

SEQ ID NO: 525745 - DNA, 33 bp, Homo sapien
acaatttctaaagtgcaccatgaaaacaaactg

SEQ ID NO: 525746 - DNA, 33 bp, Homo sapien
acaatttctaaagtgccccatgaaaacaaactg

SEQ ID NO: 525747 - DNA, 33 bp, Homo sapien
tctgtgataagaaagcactgcataagataggaa

SEQ ID NO: 525748 - DNA, 33 bp, Homo sapien
tctgtgataagaaagcgctgcataagataggaa

SEQ ID NO: 525749 - DNA, 33 bp, Homo sapien
gatacataggttatgacaccaagacatttataa

SEQ ID NO: 525750 - DNA, 33 bp, Homo sapien
gatacataggttatgataccaagacatttataa

SEQ ID NO: 525751 - DNA, 33 bp, Homo sapien
aaatgtacttagctcacagaggtaatgtgattc

SEQ ID NO: 525752 - DNA, 33 bp, Homo sapien
aaatgtacttagctcatagaggtaatgtgattc

SEQ ID NO: 525753 - DNA, 33 bp, Homo sapien
gtatcaaaatctgaccagctaaattggaatcac

SEQ ID NO: 525754 - DNA, 33 bp, Homo sapien
gtatcaaaatctgaccggctaaattggaatcac

SEQ ID NO: 525755 - DNA, 33 bp, Homo sapien
cccttctcatttgtcagagcctgtgagttcaag

SEQ ID NO: 525756 - DNA, 33 bp, Homo sapien
cccttctcatttgtcatagcctgtgagttcaag

SEQ ID NO: 525757 - DNA, 33 bp, Homo sapien
aatgaattcccaacaactatttaggtacagcag

SEQ ID NO: 525758 - DNA, 33 bp, Homo sapien
aatgaattcccaacaagtatttaggtacagcag

SEQ ID NO: 525759 - DNA, 33 bp, Homo sapien
gctagagcttttgaagaaaacctgggccttttt

SEQ ID NO: 525760 - DNA, 33 bp, Homo sapien
gctagagcttttgaaggaaacctgggccttttt

SEQ ID NO: 525761 - DNA, 33 bp, Homo sapien
agctcctgtaaaactaaaagtcacccagactct

SEQ ID NO: 525762 - DNA, 33 bp, Homo sapien
agctcctgtaaaactacaagtcacccagactct

SEQ ID NO: 525763 - DNA, 33 bp, Homo sapien
aatactttgcatgacactgtaatagtggacaca

SEQ ID NO: 525764 - DNA, 33 bp, Homo sapien
aatactttgcatgacattgtaatagtggacaca

SEQ ID NO: 525765 - DNA, 33 bp, Homo sapien
tctttaggattgcttaactaattgaattccact

SEQ ID NO: 525766 - DNA, 33 bp, Homo sapien
tctttaggattgcttatctaattgaattccact

SEQ ID NO: 525767 - DNA, 33 bp, Homo sapien
catgtgtcctcttctacgggaaacagagatata

SEQ ID NO: 525768 - DNA, 33 bp, Homo sapien
catgtgtcctcttctatgggaaacagagatata

SEQ ID NO: 525769 - DNA, 33 bp, Homo sapien
tgcagataattgagtcccccagaattatgcagg

SEQ ID NO: 525770 - DNA, 33 bp, Homo sapien
tgcagataattgagtcgcccagaattatgcagg

SEQ ID NO: 525771 - DNA, 33 bp, Homo sapien
cttgtgatcagaaaaagaagttgtgacagaatt

SEQ ID NO: 525772 - DNA, 33 bp, Homo sapien
cttgtgatcagaaaaataagttgtgacagaatt

SEQ ID NO: 525773 - DNA, 33 bp, Homo sapien
gtgttgaagtaaaactcacattttgtgactctg

SEQ ID NO: 525774 - DNA, 33 bp, Homo sapien
gtgttgaagtaaaacttacattttgtgactctg

SEQ ID NO: 525775 - DNA, 33 bp, Homo sapien
gagtttttgagctggaacaggaaattatcttac

SEQ ID NO: 525776 - DNA, 33 bp, Homo sapien
gagtttttgagctggagcaggaaattatcttac

SEQ ID NO: 525777 - DNA, 33 bp, Homo sapien
catcatttcccagacactgagtaacttcaaatg

SEQ ID NO: 525778 - DNA, 33 bp, Homo sapien
catcatttcccagacattgagtaacttcaaatg

SEQ ID NO: 525779 - DNA, 33 bp, Homo sapien
attattcatattctggccatctgacacttcatt

SEQ ID NO: 525780 - DNA, 33 bp, Homo sapien
attattcatattctgggcatctgacacttcatt

SEQ ID NO: 525781 - DNA, 33 bp, Homo sapien
tcaatctgtaatgcataaacctgctaaacaggc

SEQ ID NO: 525782 - DNA, 33 bp, Homo sapien
tcaatctgtaatgcatgaacctgctaaacaggc

SEQ ID NO: 525783 - DNA, 33 bp, Homo sapien
agtaacaaccacattcacaggacagagacggag

SEQ ID NO: 525784 - DNA, 33 bp, Homo sapien
agtaacaaccacattcgcaggacagagacggag

SEQ ID NO: 525785 - DNA, 33 bp, Homo sapien
tgtctgttagttttaccacataaaggagagtct

SEQ ID NO: 525786 - DNA, 33 bp, Homo sapien
tgtctgttagttttacgacataaaggagagtct

SEQ ID NO: 525787 - DNA, 33 bp, Homo sapien
ttttgattggaataatcagataaagcacactac

SEQ ID NO: 525788 - DNA, 33 bp, Homo sapien
ttttgattggaataatgagataaagcacactac

SEQ ID NO: 525789 - DNA, 33 bp, Homo sapien
ataagtgtttatcatccgagaactgattaaata

SEQ ID NO: 525790 - DNA, 33 bp, Homo sapien
ataagtgtttatcatctgagaactgattaaata

SEQ ID NO: 525791 - DNA, 33 bp, Homo sapien
tggatggtcatattgccgagctaaactccttta

SEQ ID NO: 525792 - DNA, 33 bp, Homo sapien
tggatggtcatattgctgagctaaactccttta

SEQ ID NO: 525793 - DNA, 33 bp, Homo sapien
attttgcagtgagaaaataaaggctcaaggtct

SEQ ID NO: 525794 - DNA, 33 bp, Homo sapien
attttgcagtgagaaactaaaggctcaaggtct

SEQ ID NO: 525795 - DNA, 33 bp, Homo sapien
tgggtagaggcaaggaacctgctcaaaattcca

SEQ ID NO: 525796 - DNA, 33 bp, Homo sapien
tgggtagaggcaaggaccctgctcaaaattcca

SEQ ID NO: 525797 - DNA, 33 bp, Homo sapien
gaccccactttgaaaaacactgtcctagaattt

SEQ ID NO: 525798 - DNA, 33 bp, Homo sapien
gaccccactttgaaaaccactgtcctagaattt

SEQ ID NO: 525799 - DNA, 33 bp, Homo sapien
tcttttggctattgctaaaagggattcttcttt

SEQ ID NO: 525800 - DNA, 33 bp, Homo sapien
tcttttggctattgctgaaagggattcttcttt

SEQ ID NO: 525801 - DNA, 33 bp, Homo sapien
gataggtggtcaataaagttcatttctaacctt

SEQ ID NO: 525802 - DNA, 33 bp, Homo sapien
gataggtggtcaataatgttcatttctaacctt

SEQ ID NO: 525803 - DNA, 33 bp, Homo sapien
tcatgcacccttaaaagtaacacaaaatagaat

SEQ ID NO: 525804 - DNA, 33 bp, Homo sapien
tcatgcacccttaaaattaacacaaaatagaat

SEQ ID NO: 525805 - DNA, 33 bp, Homo sapien
caatgattttgggacacgtgaaaatgcttttac

SEQ ID NO: 525806 - DNA, 33 bp, Homo sapien
caatgattttgggacatgtgaaaatgcttttac

SEQ ID NO: 525807 - DNA, 33 bp, Homo sapien
aaagtgaagctcactacagtcagagtacactaa

SEQ ID NO: 525808 - DNA, 33 bp, Homo sapien
aaagtgaagctcactatagtcagagtacactaa

SEQ ID NO: 525809 - DNA, 33 bp, Homo sapien
accacaaccctaaccagaccacatgaaaacaca

SEQ ID NO: 525810 - DNA, 33 bp, Homo sapien
accacaaccctaaccataccacatgaaaacaca

SEQ ID NO: 525811 - DNA, 33 bp, Homo sapien
tgtccttcaaataaacacagtcagacaaaaaca

SEQ ID NO: 525812 - DNA, 33 bp, Homo sapien
tgtccttcaaataaacccagtcagacaaaaaca

SEQ ID NO: 525813 - DNA, 33 bp, Homo sapien
cgttctttgtttcaaaatgcaaattgtaacaat

SEQ ID NO: 525814 - DNA, 33 bp, Homo sapien
cgttctttgtttcaaagtgcaaattgtaacaat

SEQ ID NO: 525815 - DNA, 33 bp, Homo sapien
gcagtgcagtcactaactctgatttcctaagaa

SEQ ID NO: 525816 - DNA, 33 bp, Homo sapien
gcagtgcagtcactaattctgatttcctaagaa

SEQ ID NO: 525817 - DNA, 33 bp, Homo sapien
aagatgtatgctacctaaaatgatgactctaaa

SEQ ID NO: 525818 - DNA, 33 bp, Homo sapien
aagatgtatgctacctgaaatgatgactctaaa

SEQ ID NO: 525819 - DNA, 33 bp, Homo sapien
cactaaaaacagggatcatacaggcacactctt

SEQ ID NO: 525820 - DNA, 33 bp, Homo sapien
cactaaaaacagggatgatacaggcacactctt

SEQ ID NO: 525821 - DNA, 33 bp, Homo sapien
catggcaatgaatgtacaggaagtataaaatca

SEQ ID NO: 525822 - DNA, 33 bp, Homo sapien
catggcaatgaatgtataggaagtataaaatca

SEQ ID NO: 525823 - DNA, 33 bp, Homo sapien
gtgacttttattgctaagaaaatttgtaagaat

SEQ ID NO: 525824 - DNA, 33 bp, Homo sapien
gtgacttttattgctaggaaaatttgtaagaat

SEQ ID NO: 525825 - DNA, 33 bp, Homo sapien
taaagggaaaccataaccaggtcatctttaatt

SEQ ID NO: 525826 - DNA, 33 bp, Homo sapien
taaagggaaaccataatcaggtcatctttaatt

SEQ ID NO: 525827 - DNA, 33 bp, Homo sapien
ccatatccggccacctcagagtgttttaattca

SEQ ID NO: 525828 - DNA, 33 bp, Homo sapien
ccatatccggccaccttagagtgttttaattca

SEQ ID NO: 525829 - DNA, 33 bp, Homo sapien
attgtagaaattttcaatcacgctaattaacat

SEQ ID NO: 525830 - DNA, 33 bp, Homo sapien
attgtagaaattttcagtcacgctaattaacat

SEQ ID NO: 525831 - DNA, 33 bp, Homo sapien
tgctaagccagtacccaaaattattattctctt

SEQ ID NO: 525832 - DNA, 33 bp, Homo sapien
tgctaagccagtacccgaaattattattctctt

SEQ ID NO: 525833 - DNA, 33 bp, Homo sapien
gcttggtataaaaggaagcattccctaagctca

SEQ ID NO: 525834 - DNA, 33 bp, Homo sapien
gcttggtataaaaggatgcattccctaagctca

SEQ ID NO: 525835 - DNA, 33 bp, Homo sapien
cttgtcaggttgtgtacggaggttctcatgctg

SEQ ID NO: 525836 - DNA, 33 bp, Homo sapien
cttgtcaggttgtgtatggaggttctcatgctg

SEQ ID NO: 525837 - DNA, 33 bp, Homo sapien
cctcactatacaaaacgctaccatactagtcta

SEQ ID NO: 525838 - DNA, 33 bp, Homo sapien
cctcactatacaaaactctaccatactagtcta

SEQ ID NO: 525839 - DNA, 33 bp, Homo sapien
catgaatgttataagaaaccagttgagaaaatc

SEQ ID NO: 525840 - DNA, 33 bp, Homo sapien
catgaatgttataagagaccagttgagaaaatc

SEQ ID NO: 525841 - DNA, 33 bp, Homo sapien
tgtacaatactttatcaatgccatttttatgat

SEQ ID NO: 525842 - DNA, 33 bp, Homo sapien
tgtacaatactttatccatgccatttttatgat

SEQ ID NO: 525843 - DNA, 33 bp, Homo sapien
atatcaaactggatcaatcaaggatgcagctct

SEQ ID NO: 525844 - DNA, 33 bp, Homo sapien
atatcaaactggatcagtcaaggatgcagctct

SEQ ID NO: 525845 - DNA, 33 bp, Homo sapien
ctgggcatattgctaccctgaataaaatctgga

SEQ ID NO: 525846 - DNA, 33 bp, Homo sapien
ctgggcatattgctactctgaataaaatctgga

SEQ ID NO: 525847 - DNA, 33 bp, Homo sapien
cttctcccttctgccaatcttcacatgtgtttt

SEQ ID NO: 525848 - DNA, 33 bp, Homo sapien
cttctcccttctgccagtcttcacatgtgtttt

SEQ ID NO: 525849 - DNA, 33 bp, Homo sapien
catgaactcatgcataacaagtgtatttatttt

SEQ ID NO: 525850 - DNA, 33 bp, Homo sapien
catgaactcatgcataccaagtgtatttatttt

SEQ ID NO: 525851 - DNA, 33 bp, Homo sapien
gaaaacgatcatttcacgtttaaaggacatgat

SEQ ID NO: 525852 - DNA, 33 bp, Homo sapien
gaaaacgatcatttcatgtttaaaggacatgat

SEQ ID NO: 525853 - DNA, 33 bp, Homo sapien
tgaccatgaataacccaccggactggaccaaaa

SEQ ID NO: 525854 - DNA, 33 bp, Homo sapien
tgaccatgaataacccgccggactggaccaaaa

SEQ ID NO: 525855 - DNA, 33 bp, Homo sapien
ataacactgccatgtaaaaaggtaaactgctga

SEQ ID NO: 525856 - DNA, 33 bp, Homo sapien
ataacactgccatgtagaaaggtaaactgctga

SEQ ID NO: 525857 - DNA, 33 bp, Homo sapien
ttaactctcatgtgtacgcagacccaaaaatca

SEQ ID NO: 525858 - DNA, 33 bp, Homo sapien
ttaactctcatgtgtatgcagacccaaaaatca

SEQ ID NO: 525859 - DNA, 33 bp, Homo sapien
gaatgtgggatattcaaacactgaattagtatt

SEQ ID NO: 525860 - DNA, 33 bp, Homo sapien
gaatgtgggatattcacacactgaattagtatt

SEQ ID NO: 525861 - DNA, 33 bp, Homo sapien
ctctgtgttctttcacagggttttcatcacatc

SEQ ID NO: 525862 - DNA, 33 bp, Homo sapien
ctctgtgttctttcacggggttttcatcacatc

SEQ ID NO: 525863 - DNA, 33 bp, Homo sapien
ccatgtgtacaaaaacagttctatacttatgct

SEQ ID NO: 525864 - DNA, 33 bp, Homo sapien
ccatgtgtacaaaaactgttctatacttatgct

SEQ ID NO: 525865 - DNA, 33 bp, Homo sapien
ccgtgtaacttcctcaccagtgaaataggagac

SEQ ID NO: 525866 - DNA, 33 bp, Homo sapien
ccgtgtaacttcctcatcagtgaaataggagac

SEQ ID NO: 525867 - DNA, 33 bp, Homo sapien
cattctttcaacatcacattaattgaaatgtct

SEQ ID NO: 525868 - DNA, 33 bp, Homo sapien
cattctttcaacatcagattaattgaaatgtct

SEQ ID NO: 525869 - DNA, 33 bp, Homo sapien
gttgatattttatagaactaggaatgcttgtat

SEQ ID NO: 525870 - DNA, 33 bp, Homo sapien
gttgatattttatagacctaggaatgcttgtat

SEQ ID NO: 525871 - DNA, 33 bp, Homo sapien
ttttaaataattaccaagaagctcatcatcatc

SEQ ID NO: 525872 - DNA, 33 bp, Homo sapien
ttttaaataattaccatgaagctcatcatcatc

SEQ ID NO: 525873 - DNA, 33 bp, Homo sapien
attttacatcagaaacactatctttaatttatg

SEQ ID NO: 525874 - DNA, 33 bp, Homo sapien
attttacatcagaaacgctatctttaatttatg

SEQ ID NO: 525875 - DNA, 33 bp, Homo sapien
tgttttagaaacctagacacagatacaatccta

SEQ ID NO: 525876 - DNA, 33 bp, Homo sapien
tgttttagaaacctaggcacagatacaatccta

SEQ ID NO: 525877 - DNA, 33 bp, Homo sapien
ttaccaaaaccatttcgattctacatgataact

SEQ ID NO: 525878 - DNA, 33 bp, Homo sapien
ttaccaaaaccatttctattctacatgataact

SEQ ID NO: 525879 - DNA, 33 bp, Homo sapien
actttgttttttcttacctgccagtctacctgt

SEQ ID NO: 525880 - DNA, 33 bp, Homo sapien
actttgttttttcttatctgccagtctacctgt

SEQ ID NO: 525881 - DNA, 33 bp, Homo sapien
gctgataaaaccttaaacacttagtctagagga

SEQ ID NO: 525882 - DNA, 33 bp, Homo sapien
gctgataaaaccttaaccacttagtctagagga

SEQ ID NO: 525883 - DNA, 33 bp, Homo sapien
ctatctccataaagaaatggctcttctatgtct

SEQ ID NO: 525884 - DNA, 33 bp, Homo sapien
ctatctccataaagaagtggctcttctatgtct

SEQ ID NO: 525885 - DNA, 33 bp, Homo sapien
tcctttctttcaagagcataaactagtgaacat

SEQ ID NO: 525886 - DNA, 33 bp, Homo sapien
tcctttctttcaagaggataaactagtgaacat

SEQ ID NO: 525887 - DNA, 33 bp, Homo sapien
aagcagagcaattgtaagtaaaggcacatgtgg

SEQ ID NO: 525888 - DNA, 33 bp, Homo sapien
aagcagagcaattgtaggtaaaggcacatgtgg

SEQ ID NO: 525889 - DNA, 33 bp, Homo sapien
tctttttttgttgaaaaatgtatgctgaagtct

SEQ ID NO: 525890 - DNA, 33 bp, Homo sapien
tctttttttgttgaaagatgtatgctgaagtct

SEQ ID NO: 525891 - DNA, 33 bp, Homo sapien
ttcttaacaccgatgacgagaagtgtcaggaga

SEQ ID NO: 525892 - DNA, 33 bp, Homo sapien
ttcttaacaccgatgatgagaagtgtcaggaga

SEQ ID NO: 525893 - DNA, 33 bp, Homo sapien
tagctgcacagagttccattggatgatttttca

SEQ ID NO: 525894 - DNA, 33 bp, Homo sapien
tagctgcacagagttctattggatgatttttca

SEQ ID NO: 525895 - DNA, 33 bp, Homo sapien
tattacggaagtaacacggactgtggagtactt

SEQ ID NO: 525896 - DNA, 33 bp, Homo sapien
tattacggaagtaacatggactgtggagtactt

SEQ ID NO: 525897 - DNA, 33 bp, Homo sapien
atgtttagtttataacactttgcttcttaaaga

SEQ ID NO: 525898 - DNA, 33 bp, Homo sapien
atgtttagtttataacgctttgcttcttaaaga

SEQ ID NO: 525899 - DNA, 33 bp, Homo sapien
agaagctaagtgaacaacagtatctacccttct

SEQ ID NO: 525900 - DNA, 33 bp, Homo sapien
agaagctaagtgaacagcagtatctacccttct

SEQ ID NO: 525901 - DNA, 33 bp, Homo sapien
ttacatagattagaccaaagtctgctttattcc

SEQ ID NO: 525902 - DNA, 33 bp, Homo sapien
ttacatagattagacccaagtctgctttattcc

SEQ ID NO: 525903 - DNA, 33 bp, Homo sapien
tccaatgtttaaaacaccatgattctaaaattt

SEQ ID NO: 525904 - DNA, 33 bp, Homo sapien
tccaatgtttaaaacagcatgattctaaaattt

SEQ ID NO: 525905 - DNA, 33 bp, Homo sapien
gatcatactgaatgacactatagctacttgtgt

SEQ ID NO: 525906 - DNA, 33 bp, Homo sapien
gatcatactgaatgactctatagctacttgtgt

SEQ ID NO: 525907 - DNA, 33 bp, Homo sapien
aagccccacaattcaacagcttaatgtgtacaa

SEQ ID NO: 525908 - DNA, 33 bp, Homo sapien
aagccccacaattcaatagcttaatgtgtacaa

SEQ ID NO: 525909 - DNA, 33 bp, Homo sapien
tgatacagctatttcacaacacttctgaattgc

SEQ ID NO: 525910 - DNA, 33 bp, Homo sapien
tgatacagctatttcataacacttctgaattgc

SEQ ID NO: 525911 - DNA, 33 bp, Homo sapien
ggacagcttgactaaaatgacatcaatccactt

SEQ ID NO: 525912 - DNA, 33 bp, Homo sapien
ggacagcttgactaaattgacatcaatccactt

SEQ ID NO: 525913 - DNA, 33 bp, Homo sapien
cgggaagtccaatgaacaagtctttgggattta

SEQ ID NO: 525914 - DNA, 33 bp, Homo sapien
cgggaagtccaatgaagaagtctttgggattta

SEQ ID NO: 525915 - DNA, 33 bp, Homo sapien
aaaagttggtttccataatcttgtctactttct

SEQ ID NO: 525916 - DNA, 33 bp, Homo sapien
aaaagttggtttccatgatcttgtctactttct

SEQ ID NO: 525917 - DNA, 33 bp, Homo sapien
gaattgcaatcattaaaaggcacataaccttct

SEQ ID NO: 525918 - DNA, 33 bp, Homo sapien
gaattgcaatcattaataggcacataaccttct

SEQ ID NO: 525919 - DNA, 33 bp, Homo sapien
attgtagtaggtggaaatacacagaaaacagaa

SEQ ID NO: 525920 - DNA, 33 bp, Homo sapien
attgtagtaggtggaattacacagaaaacagaa

SEQ ID NO: 525921 - DNA, 33 bp, Homo sapien
aacagtgttgggcataaaactttccctattgga

SEQ ID NO: 525922 - DNA, 33 bp, Homo sapien
aacagtgttgggcatacaactttccctattgga

SEQ ID NO: 525923 - DNA, 33 bp, Homo sapien
tatagaaactagccatcacttaagcaatctccc

SEQ ID NO: 525924 - DNA, 33 bp, Homo sapien
tatagaaactagccattacttaagcaatctccc

SEQ ID NO: 525925 - DNA, 33 bp, Homo sapien
cttgtaatttccatgacgtaggctaaagaagca

SEQ ID NO: 525926 - DNA, 33 bp, Homo sapien
cttgtaatttccatgatgtaggctaaagaagca

SEQ ID NO: 525927 - DNA, 33 bp, Homo sapien
taaatttaaaacgcataagggattgttatccga

SEQ ID NO: 525928 - DNA, 33 bp, Homo sapien
taaatttaaaacgcatgagggattgttatccga

SEQ ID NO: 525929 - DNA, 33 bp, Homo sapien
gtggttcaccatgaaacactagaataaaacaac

SEQ ID NO: 525930 - DNA, 33 bp, Homo sapien
gtggttcaccatgaaatactagaataaaacaac

SEQ ID NO: 525931 - DNA, 33 bp, Homo sapien
tgaatcttctgatggaaagcacacatagaacaa

SEQ ID NO: 525932 - DNA, 33 bp, Homo sapien
tgaatcttctgatggagagcacacatagaacaa

SEQ ID NO: 525933 - DNA, 33 bp, Homo sapien
aatcctttctccaatacggttacacaaacatac

SEQ ID NO: 525934 - DNA, 33 bp, Homo sapien
aatcctttctccaatatggttacacaaacatac

SEQ ID NO: 525935 - DNA, 33 bp, Homo sapien
gacaagtagaaggggaagcaaagtcaaaaggaa

SEQ ID NO: 525936 - DNA, 33 bp, Homo sapien
gacaagtagaaggggaggcaaagtcaaaaggaa

SEQ ID NO: 525937 - DNA, 33 bp, Homo sapien
agggtattaacaaatgccactaatgtatacact

SEQ ID NO: 525938 - DNA, 33 bp, Homo sapien
agggtattaacaaatgtcactaatgtatacact

SEQ ID NO: 525939 - DNA, 33 bp, Homo sapien
gaaaatattcctggtaagagtcagaaattcaat

SEQ ID NO: 525940 - DNA, 33 bp, Homo sapien
gaaaatattcctggtaggagtcagaaattcaat

SEQ ID NO: 525941 - DNA, 33 bp, Homo sapien
tttgtgtggccaataacgagatttttatccaaa

SEQ ID NO: 525942 - DNA, 33 bp, Homo sapien
tttgtgtggccaataatgagatttttatccaaa

SEQ ID NO: 525943 - DNA, 33 bp, Homo sapien
atgaatttctttatccaatttcctcttatcctt

SEQ ID NO: 525944 - DNA, 33 bp, Homo sapien
atgaatttctttatccgatttcctcttatcctt

SEQ ID NO: 525945 - DNA, 33 bp, Homo sapien
aaattattccagatgactatagttttcaaatga

SEQ ID NO: 525946 - DNA, 33 bp, Homo sapien
aaattattccagatgattatagttttcaaatga

SEQ ID NO: 525947 - DNA, 33 bp, Homo sapien
tttgcagtgtttgttggatagctcattttgcat

SEQ ID NO: 525948 - DNA, 33 bp, Homo sapien
tttgcagtgtttgttgtatagctcattttgcat

SEQ ID NO: 525949 - DNA, 33 bp, Homo sapien
ctgttttgtgagggtacagagagaagagaatcc

SEQ ID NO: 525950 - DNA, 33 bp, Homo sapien
ctgttttgtgagggtatagagagaagagaatcc

SEQ ID NO: 525951 - DNA, 33 bp, Homo sapien
atgttaggctacactaaaaaataagacttaaaa

SEQ ID NO: 525952 - DNA, 33 bp, Homo sapien
atgttaggctacactacaaaataagacttaaaa

SEQ ID NO: 525953 - DNA, 33 bp, Homo sapien
aaatctatcaatgtgccacatcataacaactgt

SEQ ID NO: 525954 - DNA, 33 bp, Homo sapien
aaatctatcaatgtgctacatcataacaactgt

SEQ ID NO: 525955 - DNA, 33 bp, Homo sapien
tggtacaaaaacagacacatagaacaatggacc

SEQ ID NO: 525956 - DNA, 33 bp, Homo sapien
tggtacaaaaacagacgcatagaacaatggacc

SEQ ID NO: 525957 - DNA, 33 bp, Homo sapien
cctcaagtggaaagaaaggttctcttttggagc

SEQ ID NO: 525958 - DNA, 33 bp, Homo sapien
cctcaagtggaaagaagggttctcttttggagc

SEQ ID NO: 525959 - DNA, 33 bp, Homo sapien
tttaggaattaagaataagccagtgaaatacac

SEQ ID NO: 525960 - DNA, 33 bp, Homo sapien
tttaggaattaagaatgagccagtgaaatacac

SEQ ID NO: 525961 - DNA, 33 bp, Homo sapien
agggtgtgttataatacctgcactctgatatat

SEQ ID NO: 525962 - DNA, 33 bp, Homo sapien
agggtgtgttataatagctgcactctgatatat

SEQ ID NO: 525963 - DNA, 33 bp, Homo sapien
cccaaatatgtgaagcaaaaacttaaaactaaa

SEQ ID NO: 525964 - DNA, 33 bp, Homo sapien
cccaaatatgtgaagcgaaaacttaaaactaaa

SEQ ID NO: 525965 - DNA, 33 bp, Homo sapien
acagaatcagggaagtcaaatcaatagatattg

SEQ ID NO: 525966 - DNA, 33 bp, Homo sapien
acagaatcagggaagttaaatcaatagatattg

SEQ ID NO: 525967 - DNA, 33 bp, Homo sapien
gttcaaatatattgccaattttctctaatgaac

SEQ ID NO: 525968 - DNA, 33 bp, Homo sapien
gttcaaatatattgccgattttctctaatgaac

SEQ ID NO: 525969 - DNA, 33 bp, Homo sapien
agcttagtgcaaactgaagtacgccaaattaag

SEQ ID NO: 525970 - DNA, 33 bp, Homo sapien
agcttagtgcaaactgcagtacgccaaattaag

SEQ ID NO: 525971 - DNA, 33 bp, Homo sapien
aatgattgataggaaagttgctgcattcagtac

SEQ ID NO: 525972 - DNA, 33 bp, Homo sapien
aatgattgataggaaatttgctgcattcagtac

SEQ ID NO: 525973 - DNA, 33 bp, Homo sapien
aaataatctacaaagacagcattcagtagaaaa

SEQ ID NO: 525974 - DNA, 33 bp, Homo sapien
aaataatctacaaagatagcattcagtagaaaa

SEQ ID NO: 525975 - DNA, 33 bp, Homo sapien
aactttagtcagctagcaggattccttcaatag

SEQ ID NO: 525976 - DNA, 33 bp, Homo sapien
aactttagtcagctagtaggattccttcaatag

SEQ ID NO: 525977 - DNA, 33 bp, Homo sapien
attagtttccaacatccgaatttggtgtgtggt

SEQ ID NO: 525978 - DNA, 33 bp, Homo sapien
attagtttccaacatctgaatttggtgtgtggt

SEQ ID NO: 525979 - DNA, 33 bp, Homo sapien
gaagcacgtagtcaaaaaagaatcagggataat

SEQ ID NO: 525980 - DNA, 33 bp, Homo sapien
gaagcacgtagtcaaagaagaatcagggataat

SEQ ID NO: 525981 - DNA, 33 bp, Homo sapien
aacttcaaactgattacctctacttggtgtcta

SEQ ID NO: 525982 - DNA, 33 bp, Homo sapien
aacttcaaactgattatctctacttggtgtcta

SEQ ID NO: 525983 - DNA, 33 bp, Homo sapien
ggtaatttgtaggaaaatgtgtactaatgcaga

SEQ ID NO: 525984 - DNA, 33 bp, Homo sapien
ggtaatttgtaggaaattgtgtactaatgcaga

SEQ ID NO: 525985 - DNA, 33 bp, Homo sapien
caacaagaaagaacacaacccagatccatccat

SEQ ID NO: 525986 - DNA, 33 bp, Homo sapien
caacaagaaagaacacgacccagatccatccat

SEQ ID NO: 525987 - DNA, 33 bp, Homo sapien
atgcaggaaaattggaacccttgttgactgttg

SEQ ID NO: 525988 - DNA, 33 bp, Homo sapien
atgcaggaaaattggatcccttgttgactgttg

SEQ ID NO: 525989 - DNA, 33 bp, Homo sapien
actctgactctgaggaagatttctgtgtagttg

SEQ ID NO: 525990 - DNA, 33 bp, Homo sapien
actctgactctgaggatgatttctgtgtagttg

SEQ ID NO: 525991 - DNA, 33 bp, Homo sapien
aactctgtctccaatacgaccttctctccattc

SEQ ID NO: 525992 - DNA, 33 bp, Homo sapien
aactctgtctccaatatgaccttctctccattc

SEQ ID NO: 525993 - DNA, 33 bp, Homo sapien
tctcatctgcctggagcagaggatattttctgt

SEQ ID NO: 525994 - DNA, 33 bp, Homo sapien
tctcatctgcctggagtagaggatattttctgt

SEQ ID NO: 525995 - DNA, 33 bp, Homo sapien
ccctccttcagcaatacgtctactctttattct

SEQ ID NO: 525996 - DNA, 33 bp, Homo sapien
ccctccttcagcaataggtctactctttattct

SEQ ID NO: 525997 - DNA, 33 bp, Homo sapien
atattcacagattcaaccggctggatagaaaat

SEQ ID NO: 525998 - DNA, 33 bp, Homo sapien
atattcacagattcaatcggctggatagaaaat

SEQ ID NO: 525999 - DNA, 33 bp, Homo sapien
gatattactcccaaaactgcagaaagtgtacac

SEQ ID NO: 526000 - DNA, 33 bp, Homo sapien
gatattactcccaaaattgcagaaagtgtacac

SEQ ID NO: 526001 - DNA, 33 bp, Homo sapien
ataaaactgcaaccacaaaattaggacccaacc

SEQ ID NO: 526002 - DNA, 33 bp, Homo sapien
ataaaactgcaaccacgaaattaggacccaacc

SEQ ID NO: 526003 - DNA, 33 bp, Homo sapien
gtgggagctaagaaaaatagaaaacacggaggt

SEQ ID NO: 526004 - DNA, 33 bp, Homo sapien
gtgggagctaagaaaagtagaaaacacggaggt

SEQ ID NO: 526005 - DNA, 33 bp, Homo sapien
cactagacagtacccacgtagaaactctgtgtg

SEQ ID NO: 526006 - DNA, 33 bp, Homo sapien
cactagacagtacccatgtagaaactctgtgtg

SEQ ID NO: 526007 - DNA, 33 bp, Homo sapien
cccagaaaaactggaagaagtgtctgttttctc

SEQ ID NO: 526008 - DNA, 33 bp, Homo sapien
cccagaaaaactggaataagtgtctgttttctc

SEQ ID NO: 526009 - DNA, 33 bp, Homo sapien
tgattccatctacacacgactttcagagtaatc

SEQ ID NO: 526010 - DNA, 33 bp, Homo sapien
tgattccatctacacatgactttcagagtaatc

SEQ ID NO: 526011 - DNA, 33 bp, Homo sapien
caggacagtacttccccatcattctttataggc

SEQ ID NO: 526012 - DNA, 33 bp, Homo sapien
caggacagtacttcccgatcattctttataggc

SEQ ID NO: 526013 - DNA, 33 bp, Homo sapien
tagctttatttgcaccaagtgacttttatttac

SEQ ID NO: 526014 - DNA, 33 bp, Homo sapien
tagctttatttgcaccgagtgacttttatttac

SEQ ID NO: 526015 - DNA, 33 bp, Homo sapien
ataaaacaatgccttaagtttgggacacatacc

SEQ ID NO: 526016 - DNA, 33 bp, Homo sapien
ataaaacaatgccttaggtttgggacacatacc

SEQ ID NO: 526017 - DNA, 33 bp, Homo sapien
tttcctatgtttctaacacacttttgcataact

SEQ ID NO: 526018 - DNA, 33 bp, Homo sapien
tttcctatgtttctaagacacttttgcataact

SEQ ID NO: 526019 - DNA, 33 bp, Homo sapien
gataagtaacagaaagcaggggaaatgttgttt

SEQ ID NO: 526020 - DNA, 33 bp, Homo sapien
gataagtaacagaaagtaggggaaatgttgttt

SEQ ID NO: 526021 - DNA, 33 bp, Homo sapien
aagtttctatgagaaactgatggttgtaaatta

SEQ ID NO: 526022 - DNA, 33 bp, Homo sapien
aagtttctatgagaaattgatggttgtaaatta

SEQ ID NO: 526023 - DNA, 33 bp, Homo sapien
gaggcaaccatcctcacctactgcattttccca

SEQ ID NO: 526024 - DNA, 33 bp, Homo sapien
gaggcaaccatcctcatctactgcattttccca

SEQ ID NO: 526025 - DNA, 33 bp, Homo sapien
caacatttctcatgcaaatttatctggagcgca

SEQ ID NO: 526026 - DNA, 33 bp, Homo sapien
caacatttctcatgcagatttatctggagcgca

SEQ ID NO: 526027 - DNA, 33 bp, Homo sapien
tggtctgtttcttacccagagatgagcctcaaa

SEQ ID NO: 526028 - DNA, 33 bp, Homo sapien
tggtctgtttcttacctagagatgagcctcaaa

SEQ ID NO: 526029 - DNA, 33 bp, Homo sapien
ataccatgaatttaccaatccatctcaaactct

SEQ ID NO: 526030 - DNA, 33 bp, Homo sapien
ataccatgaatttacccatccatctcaaactct

SEQ ID NO: 526031 - DNA, 33 bp, Homo sapien
gatttcaatctctataagaaaaggacatttgtc

SEQ ID NO: 526032 - DNA, 33 bp, Homo sapien
gatttcaatctctataggaaaaggacatttgtc

SEQ ID NO: 526033 - DNA, 33 bp, Homo sapien
gtctgaaaacccttcacaacacattttcccagt

SEQ ID NO: 526034 - DNA, 33 bp, Homo sapien
gtctgaaaacccttcataacacattttcccagt

SEQ ID NO: 526035 - DNA, 33 bp, Homo sapien
caacatagaagaaatgcagggtactgttggaac

SEQ ID NO: 526036 - DNA, 33 bp, Homo sapien
caacatagaagaaatggagggtactgttggaac

SEQ ID NO: 526037 - DNA, 33 bp, Homo sapien
attatcaggctagccacgcttggtaatgtgtaa

SEQ ID NO: 526038 - DNA, 33 bp, Homo sapien
attatcaggctagccatgcttggtaatgtgtaa

SEQ ID NO: 526039 - DNA, 33 bp, Homo sapien
ggacacttggtaatacaccttggaacttcagtg

SEQ ID NO: 526040 - DNA, 33 bp, Homo sapien
ggacacttggtaataccccttggaacttcagtg

SEQ ID NO: 526041 - DNA, 33 bp, Homo sapien
cacaaaacctccagaaatatagcaagtagtatt

SEQ ID NO: 526042 - DNA, 33 bp, Homo sapien
cacaaaacctccagaagtatagcaagtagtatt

SEQ ID NO: 526043 - DNA, 33 bp, Homo sapien
attagagactgatggaactcttggaaatgtgag

SEQ ID NO: 526044 - DNA, 33 bp, Homo sapien
attagagactgatggagctcttggaaatgtgag

SEQ ID NO: 526045 - DNA, 33 bp, Homo sapien
gaaaaaagaggctacacgttcgtctgtcccaga

SEQ ID NO: 526046 - DNA, 33 bp, Homo sapien
gaaaaaagaggctacatgttcgtctgtcccaga

SEQ ID NO: 526047 - DNA, 33 bp, Homo sapien
cctctggggttggataacttctcttggctcaat

SEQ ID NO: 526048 - DNA, 33 bp, Homo sapien
cctctggggttggatagcttctcttggctcaat

SEQ ID NO: 526049 - DNA, 33 bp, Homo sapien
tatcaacacctaaaaaggacactttctaagagt

SEQ ID NO: 526050 - DNA, 33 bp, Homo sapien
tatcaacacctaaaaatgacactttctaagagt

SEQ ID NO: 526051 - DNA, 33 bp, Homo sapien
agcatctgaatgggaaatgaaaaaataggaaca

SEQ ID NO: 526052 - DNA, 33 bp, Homo sapien
agcatctgaatgggaactgaaaaaataggaaca

SEQ ID NO: 526053 - DNA, 33 bp, Homo sapien
tattattcagcctaacacagcaggtaatagttt

SEQ ID NO: 526054 - DNA, 33 bp, Homo sapien
tattattcagcctaactcagcaggtaatagttt

SEQ ID NO: 526055 - DNA, 33 bp, Homo sapien
caaaatgactcgtttaacaaaatgaaaacagca

SEQ ID NO: 526056 - DNA, 33 bp, Homo sapien
caaaatgactcgtttagcaaaatgaaaacagca

SEQ ID NO: 526057 - DNA, 33 bp, Homo sapien
gctgtcatctctgagacagaaaggtgcaggaaa

SEQ ID NO: 526058 - DNA, 33 bp, Homo sapien
gctgtcatctctgagatagaaaggtgcaggaaa

SEQ ID NO: 526059 - DNA, 33 bp, Homo sapien
atgctacaattttggaacaatgaaaaatgacat

SEQ ID NO: 526060 - DNA, 33 bp, Homo sapien
atgctacaattttggagcaatgaaaaatgacat

SEQ ID NO: 526061 - DNA, 33 bp, Homo sapien
ataaatattagagtaactggtgggaaatttaaa

SEQ ID NO: 526062 - DNA, 33 bp, Homo sapien
ataaatattagagtaattggtgggaaatttaaa

SEQ ID NO: 526063 - DNA, 33 bp, Homo sapien
aggtcttcagagagagaatttgtaagtaaggga

SEQ ID NO: 526064 - DNA, 33 bp, Homo sapien
aggtcttcagagagaggatttgtaagtaaggga

SEQ ID NO: 526065 - DNA, 33 bp, Homo sapien
caatacttttgcataacgagatgtctgctctct

SEQ ID NO: 526066 - DNA, 33 bp, Homo sapien
caatacttttgcataatgagatgtctgctctct

SEQ ID NO: 526067 - DNA, 33 bp, Homo sapien
actcctgagtgtatcactgataaaaggattctt

SEQ ID NO: 526068 - DNA, 33 bp, Homo sapien
actcctgagtgtatcattgataaaaggattctt

SEQ ID NO: 526069 - DNA, 33 bp, Homo sapien
tgagtgtggtttggggaaagatcataagtgtgc

SEQ ID NO: 526070 - DNA, 33 bp, Homo sapien
tgagtgtggtttgggggaagatcataagtgtgc

SEQ ID NO: 526071 - DNA, 33 bp, Homo sapien
ttttctccatgcctccaattatgcaatagatta

SEQ ID NO: 526072 - DNA, 33 bp, Homo sapien
ttttctccatgcctccgattatgcaatagatta

SEQ ID NO: 526073 - DNA, 33 bp, Homo sapien
ttttcttttcagcatgacatatgagaacttaac

SEQ ID NO: 526074 - DNA, 33 bp, Homo sapien
ttttcttttcagcatggcatatgagaacttaac

SEQ ID NO: 526075 - DNA, 33 bp, Homo sapien
acataaggaggtcccaatattaggctgttaaca

SEQ ID NO: 526076 - DNA, 33 bp, Homo sapien
acataaggaggtcccactattaggctgttaaca

SEQ ID NO: 526077 - DNA, 33 bp, Homo sapien
atttcacaatctagccccaacctagctttctac

SEQ ID NO: 526078 - DNA, 33 bp, Homo sapien
atttcacaatctagccgcaacctagctttctac

SEQ ID NO: 526079 - DNA, 33 bp, Homo sapien
gggctaaatggcctacacaaagccacaccgctg

SEQ ID NO: 526080 - DNA, 33 bp, Homo sapien
gggctaaatggcctacgcaaagccacaccgctg

SEQ ID NO: 526081 - DNA, 33 bp, Homo sapien
gaagatgtttaacctccgaaactcgttttcttc

SEQ ID NO: 526082 - DNA, 33 bp, Homo sapien
gaagatgtttaacctctgaaactcgttttcttc

SEQ ID NO: 526083 - DNA, 33 bp, Homo sapien
aggcttacagaagtcacgtgataaaatcagtta

SEQ ID NO: 526084 - DNA, 33 bp, Homo sapien
aggcttacagaagtcatgtgataaaatcagtta

SEQ ID NO: 526085 - DNA, 33 bp, Homo sapien
ccacttcatacatttaaactgatgaggttcttt

SEQ ID NO: 526086 - DNA, 33 bp, Homo sapien
ccacttcatacatttacactgatgaggttcttt

SEQ ID NO: 526087 - DNA, 33 bp, Homo sapien
ataaccacgaagcaaactccagagcaattgggg

SEQ ID NO: 526088 - DNA, 33 bp, Homo sapien
ataaccacgaagcaaattccagagcaattgggg

SEQ ID NO: 526089 - DNA, 33 bp, Homo sapien
ctgtttagggtatcggcaacattaaatcatcca

SEQ ID NO: 526090 - DNA, 33 bp, Homo sapien
ctgtttagggtatcggtaacattaaatcatcca

SEQ ID NO: 526091 - DNA, 33 bp, Homo sapien
gtgaataggcaacaacagtcttgaaaaagaaaa

SEQ ID NO: 526092 - DNA, 33 bp, Homo sapien
gtgaataggcaacaacggtcttgaaaaagaaaa

SEQ ID NO: 526093 - DNA, 33 bp, Homo sapien
tttttggatgtctacaactacatataactcaat

SEQ ID NO: 526094 - DNA, 33 bp, Homo sapien
tttttggatgtctacagctacatataactcaat

SEQ ID NO: 526095 - DNA, 33 bp, Homo sapien
tggaaaatgtagaaaagtgtttaagacatacag

SEQ ID NO: 526096 - DNA, 33 bp, Homo sapien
tggaaaatgtagaaaattgtttaagacatacag

SEQ ID NO: 526097 - DNA, 33 bp, Homo sapien
tataccaagaagccgaaaaatatttgatcttca

SEQ ID NO: 526098 - DNA, 33 bp, Homo sapien
tataccaagaagccgataaatatttgatcttca

SEQ ID NO: 526099 - DNA, 33 bp, Homo sapien
tcctgttcagcatatacatacaggattttctgt

SEQ ID NO: 526100 - DNA, 33 bp, Homo sapien
tcctgttcagcatatagatacaggattttctgt

SEQ ID NO: 526101 - DNA, 33 bp, Homo sapien
ggaaagttggccgtaacactttttcaagatttg

SEQ ID NO: 526102 - DNA, 33 bp, Homo sapien
ggaaagttggccgtaagactttttcaagatttg

SEQ ID NO: 526103 - DNA, 33 bp, Homo sapien
ggagacacggaaaaaaactctaataatgagttt

SEQ ID NO: 526104 - DNA, 33 bp, Homo sapien
ggagacacggaaaaaatctctaataatgagttt

SEQ ID NO: 526105 - DNA, 33 bp, Homo sapien
cttagccaacagaacactgcttatccaacacta

SEQ ID NO: 526106 - DNA, 33 bp, Homo sapien
cttagccaacagaacagtgcttatccaacacta

SEQ ID NO: 526107 - DNA, 33 bp, Homo sapien
aagctttagaaaatacaaggccctttctgcact

SEQ ID NO: 526108 - DNA, 33 bp, Homo sapien
aagctttagaaaatacgaggccctttctgcact

SEQ ID NO: 526109 - DNA, 33 bp, Homo sapien
agacaatatgtgcaaaagtcctggactgggagg

SEQ ID NO: 526110 - DNA, 33 bp, Homo sapien
agacaatatgtgcaaatgtcctggactgggagg

SEQ ID NO: 526111 - DNA, 33 bp, Homo sapien
taaagtggtattgtacacatttgtttaagcttc

SEQ ID NO: 526112 - DNA, 33 bp, Homo sapien
taaagtggtattgtacgcatttgtttaagcttc

SEQ ID NO: 526113 - DNA, 33 bp, Homo sapien
acatcttaactagccgcaagagtttcatattga

SEQ ID NO: 526114 - DNA, 33 bp, Homo sapien
acatcttaactagccgtaagagtttcatattga

SEQ ID NO: 526115 - DNA, 33 bp, Homo sapien
gaaacattaatgactgcaaggatcccctcacgt

SEQ ID NO: 526116 - DNA, 33 bp, Homo sapien
gaaacattaatgactggaaggatcccctcacgt

SEQ ID NO: 526117 - DNA, 33 bp, Homo sapien
aagtaaatggtatatcagaagacagcaagtgct

SEQ ID NO: 526118 - DNA, 33 bp, Homo sapien
aagtaaatggtatatcggaagacagcaagtgct

SEQ ID NO: 526119 - DNA, 33 bp, Homo sapien
agagaatattctgcctcaaaccttaggagatac

SEQ ID NO: 526120 - DNA, 33 bp, Homo sapien
agagaatattctgcctgaaaccttaggagatac

SEQ ID NO: 526121 - DNA, 33 bp, Homo sapien
tagtttccaacttccaatgcagcagttatttaa

SEQ ID NO: 526122 - DNA, 33 bp, Homo sapien
tagtttccaacttccagtgcagcagttatttaa

SEQ ID NO: 526123 - DNA, 33 bp, Homo sapien
aaaagatattgagctgcattaaaatatttttta

SEQ ID NO: 526124 - DNA, 33 bp, Homo sapien
aaaagatattgagctggattaaaatatttttta

SEQ ID NO: 526125 - DNA, 33 bp, Homo sapien
taattctgtcgtattacgtactttcactatctt

SEQ ID NO: 526126 - DNA, 33 bp, Homo sapien
taattctgtcgtattatgtactttcactatctt

SEQ ID NO: 526127 - DNA, 33 bp, Homo sapien
aaattggaagtcaaaaattatttatctcattat

SEQ ID NO: 526128 - DNA, 33 bp, Homo sapien
aaattggaagtcaaaagttatttatctcattat

SEQ ID NO: 526129 - DNA, 33 bp, Homo sapien
agtataggggagtatgcactttcatatagagac

SEQ ID NO: 526130 - DNA, 33 bp, Homo sapien
agtataggggagtatggactttcatatagagac

SEQ ID NO: 526131 - DNA, 33 bp, Homo sapien
tcttgggaagaggagacattgcttttctttgac

SEQ ID NO: 526132 - DNA, 33 bp, Homo sapien
tcttgggaagaggagatattgcttttctttgac

SEQ ID NO: 526133 - DNA, 33 bp, Homo sapien
tattactggaataagactaaagaatcaggttct

SEQ ID NO: 526134 - DNA, 33 bp, Homo sapien
tattactggaataagattaaagaatcaggttct

SEQ ID NO: 526135 - DNA, 33 bp, Homo sapien
aatgctgattgtacaacgttgattatgtttatg

SEQ ID NO: 526136 - DNA, 33 bp, Homo sapien
aatgctgattgtacaatgttgattatgtttatg

SEQ ID NO: 526137 - DNA, 33 bp, Homo sapien
agccctaccctgtaagccccagaaactaccagc

SEQ ID NO: 526138 - DNA, 33 bp, Homo sapien
agccctaccctgtaagtcccagaaactaccagc

SEQ ID NO: 526139 - DNA, 33 bp, Homo sapien
tgtatacatacctataacatgcccttgaaatga

SEQ ID NO: 526140 - DNA, 33 bp, Homo sapien
tgtatacatacctatatcatgcccttgaaatga

SEQ ID NO: 526141 - DNA, 33 bp, Homo sapien
attacatatctggaagcagtgttaaagactgat

SEQ ID NO: 526142 - DNA, 33 bp, Homo sapien
attacatatctggaagtagtgttaaagactgat

SEQ ID NO: 526143 - DNA, 33 bp, Homo sapien
ttattgtgatgagaaaaacttagtaacagatat

SEQ ID NO: 526144 - DNA, 33 bp, Homo sapien
ttattgtgatgagaaatacttagtaacagatat

SEQ ID NO: 526145 - DNA, 33 bp, Homo sapien
ctgcagtttcctataaacataattggtttagca

SEQ ID NO: 526146 - DNA, 33 bp, Homo sapien
ctgcagtttcctataatcataattggtttagca

SEQ ID NO: 526147 - DNA, 33 bp, Homo sapien
cagccttccctcctccaggaagattctaggtct

SEQ ID NO: 526148 - DNA, 33 bp, Homo sapien
cagccttccctcctcccggaagattctaggtct

SEQ ID NO: 526149 - DNA, 33 bp, Homo sapien
ctttgaaagaagcacaaagaagtttcaaagagg

SEQ ID NO: 526150 - DNA, 33 bp, Homo sapien
ctttgaaagaagcacagagaagtttcaaagagg

SEQ ID NO: 526151 - DNA, 33 bp, Homo sapien
actaaggagaaaccaccaacagtcacaaggcca

SEQ ID NO: 526152 - DNA, 33 bp, Homo sapien
actaaggagaaaccactaacagtcacaaggcca

SEQ ID NO: 526153 - DNA, 33 bp, Homo sapien
gataaacacataactaagcagttctgagaaagg

SEQ ID NO: 526154 - DNA, 33 bp, Homo sapien
gataaacacataactaggcagttctgagaaagg

SEQ ID NO: 526155 - DNA, 33 bp, Homo sapien
ctcacagcaaggacaaacaatataggccttgat

SEQ ID NO: 526156 - DNA, 33 bp, Homo sapien
ctcacagcaaggacaagcaatataggccttgat

SEQ ID NO: 526157 - DNA, 33 bp, Homo sapien
aatataggccttgatcccacttagtcctcacaa

SEQ ID NO: 526158 - DNA, 33 bp, Homo sapien
aatataggccttgatctcacttagtcctcacaa

SEQ ID NO: 526159 - DNA, 33 bp, Homo sapien
agggtcctagaaaagtcacccacatgacttact

SEQ ID NO: 526160 - DNA, 33 bp, Homo sapien
agggtcctagaaaagttacccacatgacttact

SEQ ID NO: 526161 - DNA, 33 bp, Homo sapien
agtgaacacagctaatgataaacaggaaaggtg

SEQ ID NO: 526162 - DNA, 33 bp, Homo sapien
agtgaacacagctaattataaacaggaaaggtg

SEQ ID NO: 526163 - DNA, 33 bp, Homo sapien
tcctatttctgttaatcagttaggttctccatc

SEQ ID NO: 526164 - DNA, 33 bp, Homo sapien
tcctatttctgttaatgagttaggttctccatc

SEQ ID NO: 526165 - DNA, 33 bp, Homo sapien
aggaatttcagctatcagagaagaaaattgcaa

SEQ ID NO: 526166 - DNA, 33 bp, Homo sapien
aggaatttcagctatcggagaagaaaattgcaa

SEQ ID NO: 526167 - DNA, 33 bp, Homo sapien
tcaggcgagaacacagactcagtagttaagtga

SEQ ID NO: 526168 - DNA, 33 bp, Homo sapien
tcaggcgagaacacaggctcagtagttaagtga

SEQ ID NO: 526169 - DNA, 33 bp, Homo sapien
agcaaggcaacattgaccaaatttcaaaatggg

SEQ ID NO: 526170 - DNA, 33 bp, Homo sapien
agcaaggcaacattgatcaaatttcaaaatggg

SEQ ID NO: 526171 - DNA, 33 bp, Homo sapien
gtcacttctacagagacagagttcacactgggt

SEQ ID NO: 526172 - DNA, 33 bp, Homo sapien
gtcacttctacagagagagagttcacactgggt

SEQ ID NO: 526173 - DNA, 33 bp, Homo sapien
actcattttaagcaacgacactgacatgatggc

SEQ ID NO: 526174 - DNA, 33 bp, Homo sapien
actcattttaagcaactacactgacatgatggc

SEQ ID NO: 526175 - DNA, 33 bp, Homo sapien
ttctccatgatattgcagatggtattcctgtag

SEQ ID NO: 526176 - DNA, 33 bp, Homo sapien
ttctccatgatattgcggatggtattcctgtag

SEQ ID NO: 526177 - DNA, 33 bp, Homo sapien
atggcctaatggtaaaacatcaggcacattcta

SEQ ID NO: 526178 - DNA, 33 bp, Homo sapien
atggcctaatggtaaagcatcaggcacattcta

SEQ ID NO: 526179 - DNA, 33 bp, Homo sapien
aatacagtggagctcacggagttagagagtaga

SEQ ID NO: 526180 - DNA, 33 bp, Homo sapien
aatacagtggagctcatggagttagagagtaga

SEQ ID NO: 526181 - DNA, 33 bp, Homo sapien
ttttcttggattcttacgatacgactggtcata

SEQ ID NO: 526182 - DNA, 33 bp, Homo sapien
ttttcttggattcttatgatacgactggtcata

SEQ ID NO: 526183 - DNA, 33 bp, Homo sapien
cagcttttgctggatcacctgattgtttcttta

SEQ ID NO: 526184 - DNA, 33 bp, Homo sapien
cagcttttgctggatcccctgattgtttcttta

SEQ ID NO: 526185 - DNA, 33 bp, Homo sapien
aaggaaacagatgaaccgtcacccagaatgcta

SEQ ID NO: 526186 - DNA, 33 bp, Homo sapien
aaggaaacagatgaactgtcacccagaatgcta

SEQ ID NO: 526187 - DNA, 33 bp, Homo sapien
gcatctgaatttgttcgctgacttgcaaattta

SEQ ID NO: 526188 - DNA, 33 bp, Homo sapien
gcatctgaatttgttctctgacttgcaaattta

SEQ ID NO: 526189 - DNA, 33 bp, Homo sapien
acttgctgatgctaccactgttagggagatcaa

SEQ ID NO: 526190 - DNA, 33 bp, Homo sapien
acttgctgatgctaccgctgttagggagatcaa

SEQ ID NO: 526191 - DNA, 33 bp, Homo sapien
ataaacatcatacctacggctactgagattgtt

SEQ ID NO: 526192 - DNA, 33 bp, Homo sapien
ataaacatcatacctatggctactgagattgtt

SEQ ID NO: 526193 - DNA, 33 bp, Homo sapien
aaaggagtaacaggccccaagctaatctgaaac

SEQ ID NO: 526194 - DNA, 33 bp, Homo sapien
aaaggagtaacaggccgcaagctaatctgaaac

SEQ ID NO: 526195 - DNA, 33 bp, Homo sapien
agtcttatcttgttccagcaccaactcaaaagt

SEQ ID NO: 526196 - DNA, 33 bp, Homo sapien
agtcttatcttgttccggcaccaactcaaaagt

SEQ ID NO: 526197 - DNA, 33 bp, Homo sapien
tttgaagttagaatcaacaagctgtgatgaagg

SEQ ID NO: 526198 - DNA, 33 bp, Homo sapien
tttgaagttagaatcagcaagctgtgatgaagg

SEQ ID NO: 526199 - DNA, 33 bp, Homo sapien
ttttcctctgacatccaacatggaatccttcat

SEQ ID NO: 526200 - DNA, 33 bp, Homo sapien
ttttcctctgacatccgacatggaatccttcat

SEQ ID NO: 526201 - DNA, 33 bp, Homo sapien
taggttcaaagccaaactgagcaggaggtaccc

SEQ ID NO: 526202 - DNA, 33 bp, Homo sapien
taggttcaaagccaaattgagcaggaggtaccc

SEQ ID NO: 526203 - DNA, 33 bp, Homo sapien
tctcaccattagacgaaggtcacagggggtcat

SEQ ID NO: 526204 - DNA, 33 bp, Homo sapien
tctcaccattagacgagggtcacagggggtcat

SEQ ID NO: 526205 - DNA, 33 bp, Homo sapien
cttcacgtgtctctacactactctacgacattt

SEQ ID NO: 526206 - DNA, 33 bp, Homo sapien
cttcacgtgtctctacgctactctacgacattt

SEQ ID NO: 526207 - DNA, 33 bp, Homo sapien
tagcataaattgccacactaccagctaattgac

SEQ ID NO: 526208 - DNA, 33 bp, Homo sapien
tagcataaattgccacgctaccagctaattgac

SEQ ID NO: 526209 - DNA, 33 bp, Homo sapien
taaaacacaagggaaacgatagatgacaatacc

SEQ ID NO: 526210 - DNA, 33 bp, Homo sapien
taaaacacaagggaaaggatagatgacaatacc

SEQ ID NO: 526211 - DNA, 33 bp, Homo sapien
atagtatctacaaacagaaacactgggttcata

SEQ ID NO: 526212 - DNA, 33 bp, Homo sapien
atagtatctacaaacataaacactgggttcata

SEQ ID NO: 526213 - DNA, 33 bp, Homo sapien
cccacttttatggattcaaacaatgtataactc

SEQ ID NO: 526214 - DNA, 33 bp, Homo sapien
cccacttttatggattgaaacaatgtataactc

SEQ ID NO: 526215 - DNA, 33 bp, Homo sapien
agtttttatgtgcaaaagagagtctcaacagtg

SEQ ID NO: 526216 - DNA, 33 bp, Homo sapien
agtttttatgtgcaaaggagagtctcaacagtg

SEQ ID NO: 526217 - DNA, 33 bp, Homo sapien
ttaaccttctcagaaaccttcactgtaaggcca

SEQ ID NO: 526218 - DNA, 33 bp, Homo sapien
ttaaccttctcagaaatcttcactgtaaggcca

SEQ ID NO: 526219 - DNA, 33 bp, Homo sapien
atccttgagtctcataataccaaataaactgga

SEQ ID NO: 526220 - DNA, 33 bp, Homo sapien
atccttgagtctcatagtaccaaataaactgga

SEQ ID NO: 526221 - DNA, 33 bp, Homo sapien
aagagcagtatatacacgatgtcctgtactttg

SEQ ID NO: 526222 - DNA, 33 bp, Homo sapien
aagagcagtatatacatgatgtcctgtactttg

SEQ ID NO: 526223 - DNA, 33 bp, Homo sapien
ttgtctaatagcctcacacaggggttgataagg

SEQ ID NO: 526224 - DNA, 33 bp, Homo sapien
ttgtctaatagcctcatacaggggttgataagg

SEQ ID NO: 526225 - DNA, 33 bp, Homo sapien
gccatacattttgcagacctcgtggagcattaa

SEQ ID NO: 526226 - DNA, 33 bp, Homo sapien
gccatacattttgcagccctcgtggagcattaa

SEQ ID NO: 526227 - DNA, 33 bp, Homo sapien
atgcaaaattgaattacagtaaaatcacttgca

SEQ ID NO: 526228 - DNA, 33 bp, Homo sapien
atgcaaaattgaattatagtaaaatcacttgca

SEQ ID NO: 526229 - DNA, 33 bp, Homo sapien
catatttcaaaaaacaacaagatgggatgcact

SEQ ID NO: 526230 - DNA, 33 bp, Homo sapien
catatttcaaaaaacagcaagatgggatgcact

SEQ ID NO: 526231 - DNA, 33 bp, Homo sapien
agctattgactttagccgaatatgaattatgcc

SEQ ID NO: 526232 - DNA, 33 bp, Homo sapien
agctattgactttagctgaatatgaattatgcc

SEQ ID NO: 526233 - DNA, 33 bp, Homo sapien
atgcttaaaactgagcacaaatgaggcattgga

SEQ ID NO: 526234 - DNA, 33 bp, Homo sapien
atgcttaaaactgagcgcaaatgaggcattgga

SEQ ID NO: 526235 - DNA, 33 bp, Homo sapien
atgaagttgcagtgaacgaacattttccaatta

SEQ ID NO: 526236 - DNA, 33 bp, Homo sapien
atgaagttgcagtgaatgaacattttccaatta

SEQ ID NO: 526237 - DNA, 33 bp, Homo sapien
aacatttcctgattacagatgtgaaaacttgtt

SEQ ID NO: 526238 - DNA, 33 bp, Homo sapien
aacatttcctgattacggatgtgaaaacttgtt

SEQ ID NO: 526239 - DNA, 33 bp, Homo sapien
ctatcgaaggacaaaccgaaatcccatggcagt

SEQ ID NO: 526240 - DNA, 33 bp, Homo sapien
ctatcgaaggacaaactgaaatcccatggcagt

SEQ ID NO: 526241 - DNA, 33 bp, Homo sapien
ctccagctgcagcccaaagaagcaagattaagc

SEQ ID NO: 526242 - DNA, 33 bp, Homo sapien
ctccagctgcagcccagagaagcaagattaagc

SEQ ID NO: 526243 - DNA, 33 bp, Homo sapien
agtgtctaggtaaagcaccattttttggagtgg

SEQ ID NO: 526244 - DNA, 33 bp, Homo sapien
agtgtctaggtaaagcgccattttttggagtgg

SEQ ID NO: 526245 - DNA, 33 bp, Homo sapien
ttcaatccttccttaaatccaggaagcagcaat

SEQ ID NO: 526246 - DNA, 33 bp, Homo sapien
ttcaatccttccttaattccaggaagcagcaat

SEQ ID NO: 526247 - DNA, 33 bp, Homo sapien
ctactcttgtgtctaaactcaactaactgctca

SEQ ID NO: 526248 - DNA, 33 bp, Homo sapien
ctactcttgtgtctaatctcaactaactgctca

SEQ ID NO: 526249 - DNA, 33 bp, Homo sapien
gaagaacagtaggcgacgaggttacacggatag

SEQ ID NO: 526250 - DNA, 33 bp, Homo sapien
gaagaacagtaggcgatgaggttacacggatag

SEQ ID NO: 526251 - DNA, 33 bp, Homo sapien
ctagctcaggccagaaccttatcactatcatca

SEQ ID NO: 526252 - DNA, 33 bp, Homo sapien
ctagctcaggccagaatcttatcactatcatca

SEQ ID NO: 526253 - DNA, 33 bp, Homo sapien
attctcaaaatatctacgctcttctaggctaaa

SEQ ID NO: 526254 - DNA, 33 bp, Homo sapien
attctcaaaatatctatgctcttctaggctaaa

SEQ ID NO: 526255 - DNA, 33 bp, Homo sapien
ccatgttattgagaacagccagtagtctagcaa

SEQ ID NO: 526256 - DNA, 33 bp, Homo sapien
ccatgttattgagaacggccagtagtctagcaa

SEQ ID NO: 526257 - DNA, 33 bp, Homo sapien
ctcggtgaacaggttaaaaaccactgaatctta

SEQ ID NO: 526258 - DNA, 33 bp, Homo sapien
ctcggtgaacaggttataaaccactgaatctta

SEQ ID NO: 526259 - DNA, 33 bp, Homo sapien
tccctaaagcctctcaatagagcaaagaaagaa

SEQ ID NO: 526260 - DNA, 33 bp, Homo sapien
tccctaaagcctctcagtagagcaaagaaagaa

SEQ ID NO: 526261 - DNA, 33 bp, Homo sapien
tcataattttgtctacaggaacactgttgcata

SEQ ID NO: 526262 - DNA, 33 bp, Homo sapien
tcataattttgtctacgggaacactgttgcata

SEQ ID NO: 526263 - DNA, 33 bp, Homo sapien
acgtatttggcgtataacataacttagtatttg

SEQ ID NO: 526264 - DNA, 33 bp, Homo sapien
acgtatttggcgtatagcataacttagtatttg

SEQ ID NO: 526265 - DNA, 33 bp, Homo sapien
tgaatagctttcaatgccataaaatgttcaact

SEQ ID NO: 526266 - DNA, 33 bp, Homo sapien
tgaatagctttcaatgtcataaaatgttcaact

SEQ ID NO: 526267 - DNA, 33 bp, Homo sapien
ataatatgtttatgtacgtctctgctgatgtat

SEQ ID NO: 526268 - DNA, 33 bp, Homo sapien
ataatatgtttatgtatgtctctgctgatgtat

SEQ ID NO: 526269 - DNA, 33 bp, Homo sapien
ctcattgtggctttgacatgactatgtattttc

SEQ ID NO: 526270 - DNA, 33 bp, Homo sapien
ctcattgtggctttgatatgactatgtattttc

SEQ ID NO: 526271 - DNA, 33 bp, Homo sapien
gcattttcaccaccaacttctttctctcaggtt

SEQ ID NO: 526272 - DNA, 33 bp, Homo sapien
gcattttcaccaccaagttctttctctcaggtt

SEQ ID NO: 526273 - DNA, 33 bp, Homo sapien
gtgttgagactgattacaaaggagcataagaaa

SEQ ID NO: 526274 - DNA, 33 bp, Homo sapien
gtgttgagactgattataaaggagcataagaaa

SEQ ID NO: 526275 - DNA, 33 bp, Homo sapien
cattttcaccgtgaagcagcactgctaaaacaa

SEQ ID NO: 526276 - DNA, 33 bp, Homo sapien
cattttcaccgtgaagtagcactgctaaaacaa

SEQ ID NO: 526277 - DNA, 33 bp, Homo sapien
ctgactatggaaagccaaagggcattaaagctt

SEQ ID NO: 526278 - DNA, 33 bp, Homo sapien
ctgactatggaaagccgaagggcattaaagctt

SEQ ID NO: 526279 - DNA, 33 bp, Homo sapien
taatgatgcaatatgccgactaatttttccaga

SEQ ID NO: 526280 - DNA, 33 bp, Homo sapien
taatgatgcaatatgctgactaatttttccaga

SEQ ID NO: 526281 - DNA, 33 bp, Homo sapien
tttacttcctgttctgaatgtcttccctaaagg

SEQ ID NO: 526282 - DNA, 33 bp, Homo sapien
tttacttcctgttctggatgtcttccctaaagg

SEQ ID NO: 526283 - DNA, 33 bp, Homo sapien
tttcttcattcagagaaaaaaagaggtaagtgc

SEQ ID NO: 526284 - DNA, 33 bp, Homo sapien
tttcttcattcagagagaaaaagaggtaagtgc

SEQ ID NO: 526285 - DNA, 33 bp, Homo sapien
aaacaagcaaagtgaccacagcaaatttaggca

SEQ ID NO: 526286 - DNA, 33 bp, Homo sapien
aaacaagcaaagtgacgacagcaaatttaggca

SEQ ID NO: 526287 - DNA, 33 bp, Homo sapien
gcccactagactgacacctaaacagaatactac

SEQ ID NO: 526288 - DNA, 33 bp, Homo sapien
gcccactagactgacagctaaacagaatactac

SEQ ID NO: 526289 - DNA, 33 bp, Homo sapien
atggtgtcctaaaatcccagaagctttattcac

SEQ ID NO: 526290 - DNA, 33 bp, Homo sapien
atggtgtcctaaaatcgcagaagctttattcac

SEQ ID NO: 526291 - DNA, 33 bp, Homo sapien
ttctattcttgctccaactgcttaaagtattta

SEQ ID NO: 526292 - DNA, 33 bp, Homo sapien
ttctattcttgctccagctgcttaaagtattta

SEQ ID NO: 526293 - DNA, 33 bp, Homo sapien
gcattggatttggtataaagtcatagcccagat

SEQ ID NO: 526294 - DNA, 33 bp, Homo sapien
gcattggatttggtatgaagtcatagcccagat

SEQ ID NO: 526295 - DNA, 33 bp, Homo sapien
ctttcactcaataaaactatttcagctcttgta

SEQ ID NO: 526296 - DNA, 33 bp, Homo sapien
ctttcactcaataaaagtatttcagctcttgta

SEQ ID NO: 526297 - DNA, 33 bp, Homo sapien
acttacaaagcttgcaccaagttaataaatgca

SEQ ID NO: 526298 - DNA, 33 bp, Homo sapien
acttacaaagcttgcatcaagttaataaatgca

SEQ ID NO: 526299 - DNA, 33 bp, Homo sapien
actgagttaaaatagcagagccccagtgattaa

SEQ ID NO: 526300 - DNA, 33 bp, Homo sapien
actgagttaaaatagccgagccccagtgattaa

SEQ ID NO: 526301 - DNA, 33 bp, Homo sapien
ttggcaaagtgggaaaagtctatagaactgaga

SEQ ID NO: 526302 - DNA, 33 bp, Homo sapien
ttggcaaagtgggaaacgtctatagaactgaga

SEQ ID NO: 526303 - DNA, 33 bp, Homo sapien
cagctgttgctgccaagactcatctcttgatag

SEQ ID NO: 526304 - DNA, 33 bp, Homo sapien
cagctgttgctgccaatactcatctcttgatag

SEQ ID NO: 526305 - DNA, 33 bp, Homo sapien
aaattaatggaacacccctttgctgctatatct

SEQ ID NO: 526306 - DNA, 33 bp, Homo sapien
aaattaatggaacacctctttgctgctatatct

SEQ ID NO: 526307 - DNA, 33 bp, Homo sapien
cgtaagggcaagaaccaatgaaacctgcattat

SEQ ID NO: 526308 - DNA, 33 bp, Homo sapien
cgtaagggcaagaacccatgaaacctgcattat

SEQ ID NO: 526309 - DNA, 33 bp, Homo sapien
gtatatttttccagggccatatttatttcagtc

SEQ ID NO: 526310 - DNA, 33 bp, Homo sapien
gtatatttttccagggtcatatttatttcagtc

SEQ ID NO: 526311 - DNA, 33 bp, Homo sapien
actgattccaccttcacggtattttctgagtgg

SEQ ID NO: 526312 - DNA, 33 bp, Homo sapien
actgattccaccttcatggtattttctgagtgg

SEQ ID NO: 526313 - DNA, 33 bp, Homo sapien
accaagctatcctgaaagttagagcagagctac

SEQ ID NO: 526314 - DNA, 33 bp, Homo sapien
accaagctatcctgaaggttagagcagagctac

SEQ ID NO: 526315 - DNA, 33 bp, Homo sapien
ggaaatgggttgaaccactacatagtctgatgc

SEQ ID NO: 526316 - DNA, 33 bp, Homo sapien
ggaaatgggttgaaccgctacatagtctgatgc

SEQ ID NO: 526317 - DNA, 33 bp, Homo sapien
acaatacattcaaaggccaaatatggaatatat

SEQ ID NO: 526318 - DNA, 33 bp, Homo sapien
acaatacattcaaaggtcaaatatggaatatat

SEQ ID NO: 526319 - DNA, 33 bp, Homo sapien
gagaagactcagatagacatagccattttcaat

SEQ ID NO: 526320 - DNA, 33 bp, Homo sapien
gagaagactcagatagccatagccattttcaat

SEQ ID NO: 526321 - DNA, 33 bp, Homo sapien
tctagcctccttccaactctgtggtcaaaatat

SEQ ID NO: 526322 - DNA, 33 bp, Homo sapien
tctagcctccttccaattctgtggtcaaaatat

SEQ ID NO: 526323 - DNA, 33 bp, Homo sapien
taagagcataaataaaacctttggcacactcta

SEQ ID NO: 526324 - DNA, 33 bp, Homo sapien
taagagcataaataaagcctttggcacactcta

SEQ ID NO: 526325 - DNA, 33 bp, Homo sapien
agtcaggattctaaaccatcacttaaattggtt

SEQ ID NO: 526326 - DNA, 33 bp, Homo sapien
agtcaggattctaaactatcacttaaattggtt

SEQ ID NO: 526327 - DNA, 33 bp, Homo sapien
caaaatgatcaaagacaaagcgatttctcacct

SEQ ID NO: 526328 - DNA, 33 bp, Homo sapien
caaaatgatcaaagacgaagcgatttctcacct

SEQ ID NO: 526329 - DNA, 33 bp, Homo sapien
accctcaagaagacaacagcttttagaaaagtc

SEQ ID NO: 526330 - DNA, 33 bp, Homo sapien
accctcaagaagacaatagcttttagaaaagtc

SEQ ID NO: 526331 - DNA, 33 bp, Homo sapien
aataagagggtactcactgaaatcacaggattg

SEQ ID NO: 526332 - DNA, 33 bp, Homo sapien
aataagagggtactcattgaaatcacaggattg

SEQ ID NO: 526333 - DNA, 33 bp, Homo sapien
tgatattgagatgacaacttgtactgcagtcct

SEQ ID NO: 526334 - DNA, 33 bp, Homo sapien
tgatattgagatgacagcttgtactgcagtcct

SEQ ID NO: 526335 - DNA, 33 bp, Homo sapien
gggggcagcctctgaaattacaaggaatgaaaa

SEQ ID NO: 526336 - DNA, 33 bp, Homo sapien
gggggcagcctctgaagttacaaggaatgaaaa

SEQ ID NO: 526337 - DNA, 33 bp, Homo sapien
aaaaaaattgtggtgaagcaacagtgcactaaa

SEQ ID NO: 526338 - DNA, 33 bp, Homo sapien
aaaaaaattgtggtgaggcaacagtgcactaaa

SEQ ID NO: 526339 - DNA, 33 bp, Homo sapien
ttaactagaaaacatacacatgcaaattttctc

SEQ ID NO: 526340 - DNA, 33 bp, Homo sapien
ttaactagaaaacatatacatgcaaattttctc

SEQ ID NO: 526341 - DNA, 33 bp, Homo sapien
tgcaaaatcatgatgacggtacctgaatcctag

SEQ ID NO: 526342 - DNA, 33 bp, Homo sapien
tgcaaaatcatgatgatggtacctgaatcctag

SEQ ID NO: 526343 - DNA, 33 bp, Homo sapien
tctgtttttccctaaaaattggacgttgtgaca

SEQ ID NO: 526344 - DNA, 33 bp, Homo sapien
tctgtttttccctaaatattggacgttgtgaca

SEQ ID NO: 526345 - DNA, 33 bp, Homo sapien
agaaagatgcatactcgctgttaggtccacacc

SEQ ID NO: 526346 - DNA, 33 bp, Homo sapien
agaaagatgcatactctctgttaggtccacacc

SEQ ID NO: 526347 - DNA, 33 bp, Homo sapien
ccttctctttcagtccaataagctaaggcctta

SEQ ID NO: 526348 - DNA, 33 bp, Homo sapien
ccttctctttcagtccgataagctaaggcctta

SEQ ID NO: 526349 - DNA, 33 bp, Homo sapien
tctgttgcacaaaaaactgatttcaaactgtag

SEQ ID NO: 526350 - DNA, 33 bp, Homo sapien
tctgttgcacaaaaaattgatttcaaactgtag

SEQ ID NO: 526351 - DNA, 33 bp, Homo sapien
taccaaaaaatggaaaaagaataacaagttgtc

SEQ ID NO: 526352 - DNA, 33 bp, Homo sapien
taccaaaaaatggaaagagaataacaagttgtc

SEQ ID NO: 526353 - DNA, 33 bp, Homo sapien
ggttgccagttacaccaaattggcttggcaatc

SEQ ID NO: 526354 - DNA, 33 bp, Homo sapien
ggttgccagttacaccgaattggcttggcaatc

SEQ ID NO: 526355 - DNA, 33 bp, Homo sapien
aaggaagaagtttttcaatcaaatctcttctat

SEQ ID NO: 526356 - DNA, 33 bp, Homo sapien
aaggaagaagtttttcgatcaaatctcttctat

SEQ ID NO: 526357 - DNA, 33 bp, Homo sapien
cgaaatttagaccagcgcactaggaactttaac

SEQ ID NO: 526358 - DNA, 33 bp, Homo sapien
cgaaatttagaccagctcactaggaactttaac

SEQ ID NO: 526359 - DNA, 33 bp, Homo sapien
gaggtgtccatcactaactagctccttaaaaag

SEQ ID NO: 526360 - DNA, 33 bp, Homo sapien
gaggtgtccatcactagctagctccttaaaaag

SEQ ID NO: 526361 - DNA, 33 bp, Homo sapien
attttatttgcaattcagaaacaagtaggggca

SEQ ID NO: 526362 - DNA, 33 bp, Homo sapien
attttatttgcaattcggaaacaagtaggggca

SEQ ID NO: 526363 - DNA, 33 bp, Homo sapien
ccaagacaaaacgaacaaagagaaaatgactcc

SEQ ID NO: 526364 - DNA, 33 bp, Homo sapien
ccaagacaaaacgaacgaagagaaaatgactcc

SEQ ID NO: 526365 - DNA, 33 bp, Homo sapien
tcagcagtagagacaaggagaatttaaggagac

SEQ ID NO: 526366 - DNA, 33 bp, Homo sapien
tcagcagtagagacaatgagaatttaaggagac

SEQ ID NO: 526367 - DNA, 33 bp, Homo sapien
tactgtaactgaaagagaatttgatggaaagtg

SEQ ID NO: 526368 - DNA, 33 bp, Homo sapien
tactgtaactgaaagataatttgatggaaagtg

SEQ ID NO: 526369 - DNA, 33 bp, Homo sapien
ttctttaagagtgatacgaaaaaagttgtaagt

SEQ ID NO: 526370 - DNA, 33 bp, Homo sapien
ttctttaagagtgataggaaaaaagttgtaagt

SEQ ID NO: 526371 - DNA, 33 bp, Homo sapien
tcctgacaccctctccactcattctaagctgca

SEQ ID NO: 526372 - DNA, 33 bp, Homo sapien
tcctgacaccctctccgctcattctaagctgca

SEQ ID NO: 526373 - DNA, 33 bp, Homo sapien
actcattggtaaaaagcctccttgataagcttt

SEQ ID NO: 526374 - DNA, 33 bp, Homo sapien
actcattggtaaaaaggctccttgataagcttt

SEQ ID NO: 526375 - DNA, 33 bp, Homo sapien
ggtgctaggaggtaaaaacaacagaggtccact

SEQ ID NO: 526376 - DNA, 33 bp, Homo sapien
ggtgctaggaggtaaacacaacagaggtccact

SEQ ID NO: 526377 - DNA, 33 bp, Homo sapien
aaggagtacaatggccaaatcttatggtaagag

SEQ ID NO: 526378 - DNA, 33 bp, Homo sapien
aaggagtacaatggccgaatcttatggtaagag

SEQ ID NO: 526379 - DNA, 33 bp, Homo sapien
aagaatacacagaaaaacaaactcaacaataag

SEQ ID NO: 526380 - DNA, 33 bp, Homo sapien
aagaatacacagaaaaccaaactcaacaataag

SEQ ID NO: 526381 - DNA, 33 bp, Homo sapien
ggagtagaagctaaagacgccaagggggagaag

SEQ ID NO: 526382 - DNA, 33 bp, Homo sapien
ggagtagaagctaaagccgccaagggggagaag

SEQ ID NO: 526383 - DNA, 33 bp, Homo sapien
ttgacccatattcaagaaatggcagcctcaaca

SEQ ID NO: 526384 - DNA, 33 bp, Homo sapien
ttgacccatattcaaggaatggcagcctcaaca

SEQ ID NO: 526385 - DNA, 33 bp, Homo sapien
gatgtgttaggtaatactaagttcaaaatcaac

SEQ ID NO: 526386 - DNA, 33 bp, Homo sapien
gatgtgttaggtaatattaagttcaaaatcaac

SEQ ID NO: 526387 - DNA, 33 bp, Homo sapien
aacccaccaagttgaactagtaaacggaatcta

SEQ ID NO: 526388 - DNA, 33 bp, Homo sapien
aacccaccaagttgaattagtaaacggaatcta

SEQ ID NO: 526389 - DNA, 33 bp, Homo sapien
gcattcaccttgtaagccagttcttattgtccc

SEQ ID NO: 526390 - DNA, 33 bp, Homo sapien
gcattcaccttgtaaggcagttcttattgtccc

SEQ ID NO: 526391 - DNA, 33 bp, Homo sapien
cttatcatcgtgtactaaaataatctgtcacat

SEQ ID NO: 526392 - DNA, 33 bp, Homo sapien
cttatcatcgtgtactgaaataatctgtcacat

SEQ ID NO: 526393 - DNA, 33 bp, Homo sapien
tcaaaaggccaacctacagtagtgatgttatct

SEQ ID NO: 526394 - DNA, 33 bp, Homo sapien
tcaaaaggccaacctatagtagtgatgttatct

SEQ ID NO: 526395 - DNA, 33 bp, Homo sapien
attatacattttatcacgagaaagcttgtgagg

SEQ ID NO: 526396 - DNA, 33 bp, Homo sapien
attatacattttatcatgagaaagcttgtgagg

SEQ ID NO: 526397 - DNA, 33 bp, Homo sapien
ttgtgttcatagttcaatcaaaactctgcagtg

SEQ ID NO: 526398 - DNA, 33 bp, Homo sapien
ttgtgttcatagttcagtcaaaactctgcagtg

SEQ ID NO: 526399 - DNA, 33 bp, Homo sapien
actgagaaggaaataccagtaagatgggagaac

SEQ ID NO: 526400 - DNA, 33 bp, Homo sapien
actgagaaggaaatacgagtaagatgggagaac

SEQ ID NO: 526401 - DNA, 33 bp, Homo sapien
atgcaaagtgtcaacactggggagtcaacaaga

SEQ ID NO: 526402 - DNA, 33 bp, Homo sapien
atgcaaagtgtcaacattggggagtcaacaaga

SEQ ID NO: 526403 - DNA, 33 bp, Homo sapien
ctcccctatctccgtgcagctatcttatgattc

SEQ ID NO: 526404 - DNA, 33 bp, Homo sapien
ctcccctatctccgtgtagctatcttatgattc

SEQ ID NO: 526405 - DNA, 33 bp, Homo sapien
tggtcatctgctgaagcatctggatgtgttacc

SEQ ID NO: 526406 - DNA, 33 bp, Homo sapien
tggtcatctgctgaagtatctggatgtgttacc

SEQ ID NO: 526407 - DNA, 33 bp, Homo sapien
ctgagggatagcactaaaacagtaccaaaatga

SEQ ID NO: 526408 - DNA, 33 bp, Homo sapien
ctgagggatagcactataacagtaccaaaatga

SEQ ID NO: 526409 - DNA, 33 bp, Homo sapien
atctctgcctatatcaactgtggttcaagttat

SEQ ID NO: 526410 - DNA, 33 bp, Homo sapien
atctctgcctatatcacctgtggttcaagttat

SEQ ID NO: 526411 - DNA, 33 bp, Homo sapien
cattcctgttagaaaggacttagcgtgttggtt

SEQ ID NO: 526412 - DNA, 33 bp, Homo sapien
cattcctgttagaaagtacttagcgtgttggtt

SEQ ID NO: 526413 - DNA, 33 bp, Homo sapien
agaagtgtgtataggccatccatttctccaggt

SEQ ID NO: 526414 - DNA, 33 bp, Homo sapien
agaagtgtgtataggcgatccatttctccaggt

SEQ ID NO: 526415 - DNA, 33 bp, Homo sapien
caatggtttgggaagaaatcatcccttcaacgg

SEQ ID NO: 526416 - DNA, 33 bp, Homo sapien
caatggtttgggaagacatcatcccttcaacgg

SEQ ID NO: 526417 - DNA, 33 bp, Homo sapien
catagataccagccacactaattggaaatttcc

SEQ ID NO: 526418 - DNA, 33 bp, Homo sapien
catagataccagccaccctaattggaaatttcc

SEQ ID NO: 526419 - DNA, 33 bp, Homo sapien
ctctcctcgaacataacacattgtaagcacaaa

SEQ ID NO: 526420 - DNA, 33 bp, Homo sapien
ctctcctcgaacataatacattgtaagcacaaa

SEQ ID NO: 526421 - DNA, 33 bp, Homo sapien
acataaacctaatttaccttcattctggctcta

SEQ ID NO: 526422 - DNA, 33 bp, Homo sapien
acataaacctaatttatcttcattctggctcta

SEQ ID NO: 526423 - DNA, 33 bp, Homo sapien
gagaggttactgggcaccagcttgatttgtcct

SEQ ID NO: 526424 - DNA, 33 bp, Homo sapien
gagaggttactgggcatcagcttgatttgtcct

SEQ ID NO: 526425 - DNA, 33 bp, Homo sapien
actctgccgtgtctcaatagttttcttttgttt

SEQ ID NO: 526426 - DNA, 33 bp, Homo sapien
actctgccgtgtctcactagttttcttttgttt

SEQ ID NO: 526427 - DNA, 33 bp, Homo sapien
aatttggctgcatggaataactagagattatct

SEQ ID NO: 526428 - DNA, 33 bp, Homo sapien
aatttggctgcatggagtaactagagattatct

SEQ ID NO: 526429 - DNA, 33 bp, Homo sapien
caagactcagcatctcaaggaagaaatcttacc

SEQ ID NO: 526430 - DNA, 33 bp, Homo sapien
caagactcagcatctcgaggaagaaatcttacc

SEQ ID NO: 526431 - DNA, 33 bp, Homo sapien
aagattcatgagaataaagcaaaagttcataga

SEQ ID NO: 526432 - DNA, 33 bp, Homo sapien
aagattcatgagaatagagcaaaagttcataga

SEQ ID NO: 526433 - DNA, 33 bp, Homo sapien
tgtcccatcaatttgcccatcatgaatttacct

SEQ ID NO: 526434 - DNA, 33 bp, Homo sapien
tgtcccatcaatttgctcatcatgaatttacct

SEQ ID NO: 526435 - DNA, 33 bp, Homo sapien
tcaggttaggaacacaaggccaatttttcaatg

SEQ ID NO: 526436 - DNA, 33 bp, Homo sapien
tcaggttaggaacacagggccaatttttcaatg

SEQ ID NO: 526437 - DNA, 33 bp, Homo sapien
ggaggatctccaaatacgacccaggatgaggtg

SEQ ID NO: 526438 - DNA, 33 bp, Homo sapien
ggaggatctccaaatatgacccaggatgaggtg

SEQ ID NO: 526439 - DNA, 33 bp, Homo sapien
ttgtagcacttatgagacctgtgagattgctag

SEQ ID NO: 526440 - DNA, 33 bp, Homo sapien
ttgtagcacttatgaggcctgtgagattgctag

SEQ ID NO: 526441 - DNA, 33 bp, Homo sapien
ccactgaacgataaccaccagcaagaagttatc

SEQ ID NO: 526442 - DNA, 33 bp, Homo sapien
ccactgaacgataaccgccagcaagaagttatc

SEQ ID NO: 526443 - DNA, 33 bp, Homo sapien
gtttcgactgtagtcagcatgccatatgttcag

SEQ ID NO: 526444 - DNA, 33 bp, Homo sapien
gtttcgactgtagtcatcatgccatatgttcag

SEQ ID NO: 526445 - DNA, 33 bp, Homo sapien
tgagtactagtaagtgcagcatctagagtcagc

SEQ ID NO: 526446 - DNA, 33 bp, Homo sapien
tgagtactagtaagtgtagcatctagagtcagc

SEQ ID NO: 526447 - DNA, 33 bp, Homo sapien
aggtactatgttctacagattttacatgtatta

SEQ ID NO: 526448 - DNA, 33 bp, Homo sapien
aggtactatgttctacggattttacatgtatta

SEQ ID NO: 526449 - DNA, 33 bp, Homo sapien
acattaggtagtaacaaaaaggaatgaggaaat

SEQ ID NO: 526450 - DNA, 33 bp, Homo sapien
acattaggtagtaacacaaaggaatgaggaaat

SEQ ID NO: 526451 - DNA, 33 bp, Homo sapien
tcaacatgtacaataagaacagtgaaggagaag

SEQ ID NO: 526452 - DNA, 33 bp, Homo sapien
tcaacatgtacaataataacagtgaaggagaag

SEQ ID NO: 526453 - DNA, 33 bp, Homo sapien
tctgacacgaattatgcaaaatgcaaatggtag

SEQ ID NO: 526454 - DNA, 33 bp, Homo sapien
tctgacacgaattatgtaaaatgcaaatggtag

SEQ ID NO: 526455 - DNA, 33 bp, Homo sapien
tgtttatgacagcaaaattctaatcaacatggt

SEQ ID NO: 526456 - DNA, 33 bp, Homo sapien
tgtttatgacagcaaatttctaatcaacatggt

SEQ ID NO: 526457 - DNA, 33 bp, Homo sapien
acacagattcatgtcaactttctctgtaactgt

SEQ ID NO: 526458 - DNA, 33 bp, Homo sapien
acacagattcatgtcagctttctctgtaactgt

SEQ ID NO: 526459 - DNA, 33 bp, Homo sapien
atcctcatgcttgacaaaattggaaactgctgc

SEQ ID NO: 526460 - DNA, 33 bp, Homo sapien
atcctcatgcttgacacaattggaaactgctgc

SEQ ID NO: 526461 - DNA, 33 bp, Homo sapien
gtaaatattaactaagcacccactgtttgtcag

SEQ ID NO: 526462 - DNA, 33 bp, Homo sapien
gtaaatattaactaaggacccactgtttgtcag

SEQ ID NO: 526463 - DNA, 33 bp, Homo sapien
gtgctaggtattggaaacatacaaaggaattct

SEQ ID NO: 526464 - DNA, 33 bp, Homo sapien
gtgctaggtattggaagcatacaaaggaattct

SEQ ID NO: 526465 - DNA, 33 bp, Homo sapien
ctcctgcctaatttagcccgcaaaactaaagtc

SEQ ID NO: 526466 - DNA, 33 bp, Homo sapien
ctcctgcctaatttagtccgcaaaactaaagtc

SEQ ID NO: 526467 - DNA, 33 bp, Homo sapien
caagcataaggataaaacaaaaactgcatctgg

SEQ ID NO: 526468 - DNA, 33 bp, Homo sapien
caagcataaggataaagcaaaaactgcatctgg

SEQ ID NO: 526469 - DNA, 33 bp, Homo sapien
tgtgggatatgatttacgtttttagaattgccc

SEQ ID NO: 526470 - DNA, 33 bp, Homo sapien
tgtgggatatgatttatgtttttagaattgccc

SEQ ID NO: 526471 - DNA, 33 bp, Homo sapien
cacaccattgttttacaaagttttcagaaggat

SEQ ID NO: 526472 - DNA, 33 bp, Homo sapien
cacaccattgttttacgaagttttcagaaggat

SEQ ID NO: 526473 - DNA, 33 bp, Homo sapien
tccagaaagaaggaacagcccatgcaaagatcc

SEQ ID NO: 526474 - DNA, 33 bp, Homo sapien
tccagaaagaaggaacggcccatgcaaagatcc

SEQ ID NO: 526475 - DNA, 33 bp, Homo sapien
gcaaggtaaggaggccaatttgactgaagagga

SEQ ID NO: 526476 - DNA, 33 bp, Homo sapien
gcaaggtaaggaggccgatttgactgaagagga

SEQ ID NO: 526477 - DNA, 33 bp, Homo sapien
atgtagggtccaagagaacgacaaggatcgagg

SEQ ID NO: 526478 - DNA, 33 bp, Homo sapien
atgtagggtccaagaggacgacaaggatcgagg

SEQ ID NO: 526479 - DNA, 33 bp, Homo sapien
tgcttctgtcacttagacgttatccattaagga

SEQ ID NO: 526480 - DNA, 33 bp, Homo sapien
tgcttctgtcacttaggcgttatccattaagga

SEQ ID NO: 526481 - DNA, 33 bp, Homo sapien
gtgaattctagaaagccacagttccagagatgc

SEQ ID NO: 526482 - DNA, 33 bp, Homo sapien
gtgaattctagaaagcgacagttccagagatgc

SEQ ID NO: 526483 - DNA, 33 bp, Homo sapien
tcccagtaagaatccccgaggtaagatttcctg

SEQ ID NO: 526484 - DNA, 33 bp, Homo sapien
tcccagtaagaatccctgaggtaagatttcctg

SEQ ID NO: 526485 - DNA, 33 bp, Homo sapien
agtaacagaagtaatactagtaatagtagcaac

SEQ ID NO: 526486 - DNA, 33 bp, Homo sapien
agtaacagaagtaatagtagtaatagtagcaac

SEQ ID NO: 526487 - DNA, 33 bp, Homo sapien
tctttttaaatgagtccatgtagtcctttttag

SEQ ID NO: 526488 - DNA, 33 bp, Homo sapien
tctttttaaatgagtcgatgtagtcctttttag

SEQ ID NO: 526489 - DNA, 33 bp, Homo sapien
tttgctaagatgcagactcccattcggaagggc

SEQ ID NO: 526490 - DNA, 33 bp, Homo sapien
tttgctaagatgcagattcccattcggaagggc

SEQ ID NO: 526491 - DNA, 33 bp, Homo sapien
gactttgagtggcaaaatggtagactgagcttt

SEQ ID NO: 526492 - DNA, 33 bp, Homo sapien
gactttgagtggcaaagtggtagactgagcttt

SEQ ID NO: 526493 - DNA, 33 bp, Homo sapien
tctcctccagttagacacagccaggcagtactg

SEQ ID NO: 526494 - DNA, 33 bp, Homo sapien
tctcctccagttagactcagccaggcagtactg

SEQ ID NO: 526495 - DNA, 33 bp, Homo sapien
agatttaaaaaagaaacgcaagcaaacaaacaa

SEQ ID NO: 526496 - DNA, 33 bp, Homo sapien
agatttaaaaaagaaatgcaagcaaacaaacaa

SEQ ID NO: 526497 - DNA, 33 bp, Homo sapien
ctcccttggaaaccgaagaaatgagacttagac

SEQ ID NO: 526498 - DNA, 33 bp, Homo sapien
ctcccttggaaaccgaggaaatgagacttagac

SEQ ID NO: 526499 - DNA, 33 bp, Homo sapien
acacctagcatgacgcacgtaatgtctggtttg

SEQ ID NO: 526500 - DNA, 33 bp, Homo sapien
acacctagcatgacgcgcgtaatgtctggtttg

SEQ ID NO: 526501 - DNA, 33 bp, Homo sapien
caccacacagtgacaacgtagggtgtaatgtgt

SEQ ID NO: 526502 - DNA, 33 bp, Homo sapien
caccacacagtgacaatgtagggtgtaatgtgt

SEQ ID NO: 526503 - DNA, 33 bp, Homo sapien
ctgaagtctagaagaaaggcaaaagtgagatat

SEQ ID NO: 526504 - DNA, 33 bp, Homo sapien
ctgaagtctagaagaatggcaaaagtgagatat

SEQ ID NO: 526505 - DNA, 33 bp, Homo sapien
gaaaaagcactcatgcaatggattttaagggaa

SEQ ID NO: 526506 - DNA, 33 bp, Homo sapien
gaaaaagcactcatgcgatggattttaagggaa

SEQ ID NO: 526507 - DNA, 33 bp, Homo sapien
ttagtcatttacaccacgatgggcttgacaaat

SEQ ID NO: 526508 - DNA, 33 bp, Homo sapien
ttagtcatttacaccatgatgggcttgacaaat

SEQ ID NO: 526509 - DNA, 33 bp, Homo sapien
ctgaaatttgttaaccccacatttgttgttaac

SEQ ID NO: 526510 - DNA, 33 bp, Homo sapien
ctgaaatttgttaacctcacatttgttgttaac

SEQ ID NO: 526511 - DNA, 33 bp, Homo sapien
caaatttcagaaattaccaaagcatctatgttg

SEQ ID NO: 526512 - DNA, 33 bp, Homo sapien
caaatttcagaaattatcaaagcatctatgttg

SEQ ID NO: 526513 - DNA, 33 bp, Homo sapien
actcaagaatttgccaatgatagttgtgttttt

SEQ ID NO: 526514 - DNA, 33 bp, Homo sapien
actcaagaatttgccagtgatagttgtgttttt

SEQ ID NO: 526515 - DNA, 33 bp, Homo sapien
tgggaagagagtgctacggacaggttgcttcaa

SEQ ID NO: 526516 - DNA, 33 bp, Homo sapien
tgggaagagagtgctatggacaggttgcttcaa

SEQ ID NO: 526517 - DNA, 33 bp, Homo sapien
tctccggaacaagacactatcactgaagggagc

SEQ ID NO: 526518 - DNA, 33 bp, Homo sapien
tctccggaacaagacattatcactgaagggagc

SEQ ID NO: 526519 - DNA, 33 bp, Homo sapien
gctctcctctgtgtagacccaacttggagcaca

SEQ ID NO: 526520 - DNA, 33 bp, Homo sapien
gctctcctctgtgtagtcccaacttggagcaca

SEQ ID NO: 526521 - DNA, 33 bp, Homo sapien
ttttatagtcagtaaacggtcactttgaagtcc

SEQ ID NO: 526522 - DNA, 33 bp, Homo sapien
ttttatagtcagtaaatggtcactttgaagtcc

SEQ ID NO: 526523 - DNA, 33 bp, Homo sapien
tggcaaggccaaaaggcacaagtgtcctggttt

SEQ ID NO: 526524 - DNA, 33 bp, Homo sapien
tggcaaggccaaaaggtacaagtgtcctggttt

SEQ ID NO: 526525 - DNA, 33 bp, Homo sapien
gggcctgacatgcggacaatacccagttagggg

SEQ ID NO: 526526 - DNA, 33 bp, Homo sapien
gggcctgacatgcggataatacccagttagggg

SEQ ID NO: 526527 - DNA, 33 bp, Homo sapien
aagtgggaaaggctacaagtgattagacaaaaa

SEQ ID NO: 526528 - DNA, 33 bp, Homo sapien
aagtgggaaaggctacgagtgattagacaaaaa

SEQ ID NO: 526529 - DNA, 33 bp, Homo sapien
agaacacacgcagacccagcatagagaagcact

SEQ ID NO: 526530 - DNA, 33 bp, Homo sapien
agaacacacgcagaccgagcatagagaagcact

SEQ ID NO: 526531 - DNA, 33 bp, Homo sapien
agcacctctatcagtacaacagcgtttctccac

SEQ ID NO: 526532 - DNA, 33 bp, Homo sapien
agcacctctatcagtagaacagcgtttctccac

SEQ ID NO: 526533 - DNA, 33 bp, Homo sapien
actgtcctgtgtcctgaagatgtttagagcatc

SEQ ID NO: 526534 - DNA, 33 bp, Homo sapien
actgtcctgtgtcctgcagatgtttagagcatc

SEQ ID NO: 526535 - DNA, 33 bp, Homo sapien
aaatgtcccttgacaaatagactgtccctgtta

SEQ ID NO: 526536 - DNA, 33 bp, Homo sapien
aaatgtcccttgacaagtagactgtccctgtta

SEQ ID NO: 526537 - DNA, 33 bp, Homo sapien
atagcgctgaatttagaaagtgagaaatactaa

SEQ ID NO: 526538 - DNA, 33 bp, Homo sapien
atagcgctgaatttaggaagtgagaaatactaa

SEQ ID NO: 526539 - DNA, 33 bp, Homo sapien
aactgtgtgccacgaactgaggtaagattttcc

SEQ ID NO: 526540 - DNA, 33 bp, Homo sapien
aactgtgtgccacgaattgaggtaagattttcc

SEQ ID NO: 526541 - DNA, 33 bp, Homo sapien
atttgcgctgaccttacataatatgccaacgaa

SEQ ID NO: 526542 - DNA, 33 bp, Homo sapien
atttgcgctgaccttatataatatgccaacgaa

SEQ ID NO: 526543 - DNA, 33 bp, Homo sapien
cagaaatatagatctgcaaaaatcaaagaatca

SEQ ID NO: 526544 - DNA, 33 bp, Homo sapien
cagaaatatagatctggaaaaatcaaagaatca

SEQ ID NO: 526545 - DNA, 33 bp, Homo sapien
gcataccagggtcaggccataggacagcggtat

SEQ ID NO: 526546 - DNA, 33 bp, Homo sapien
gcataccagggtcaggtcataggacagcggtat

SEQ ID NO: 526547 - DNA, 33 bp, Homo sapien
ctcaccggggcgcaacaaagaccgaataaagag

SEQ ID NO: 526548 - DNA, 33 bp, Homo sapien
ctcaccggggcgcaaccaagaccgaataaagag

SEQ ID NO: 526549 - DNA, 33 bp, Homo sapien
ctgaaataatgatacccgaatcctgagatatgg

SEQ ID NO: 526550 - DNA, 33 bp, Homo sapien
ctgaaataatgatacctgaatcctgagatatgg

SEQ ID NO: 526551 - DNA, 33 bp, Homo sapien
acttctctctgtgccaaaactttttgtaaaaca

SEQ ID NO: 526552 - DNA, 33 bp, Homo sapien
acttctctctgtgccagaactttttgtaaaaca

SEQ ID NO: 526553 - DNA, 33 bp, Homo sapien
aaacgatttttctaccaatcaacgaagtgccaa

SEQ ID NO: 526554 - DNA, 33 bp, Homo sapien
aaacgatttttctaccgatcaacgaagtgccaa

SEQ ID NO: 526555 - DNA, 33 bp, Homo sapien
aacgaagtgccaaataccagaataaggtgatcc

SEQ ID NO: 526556 - DNA, 33 bp, Homo sapien
aacgaagtgccaaatatcagaataaggtgatcc

SEQ ID NO: 526557 - DNA, 33 bp, Homo sapien
tatttacatggcatagaactttaaaaaaaaaag

SEQ ID NO: 526558 - DNA, 33 bp, Homo sapien
tatttacatggcataggactttaaaaaaaaaag

SEQ ID NO: 526559 - DNA, 33 bp, Homo sapien
tggcaaaacttcaaaaaaggcacctacctcaac

SEQ ID NO: 526560 - DNA, 33 bp, Homo sapien
tggcaaaacttcaaaagaggcacctacctcaac

SEQ ID NO: 526561 - DNA, 33 bp, Homo sapien
ctgaagaaaatcgatcaccgtcatttgtcatgg

SEQ ID NO: 526562 - DNA, 33 bp, Homo sapien
ctgaagaaaatcgatcgccgtcatttgtcatgg

SEQ ID NO: 526563 - DNA, 33 bp, Homo sapien
caaatctcaagggaagccaatattaatttgttt

SEQ ID NO: 526564 - DNA, 33 bp, Homo sapien
caaatctcaagggaaggcaatattaatttgttt

SEQ ID NO: 526565 - DNA, 33 bp, Homo sapien
agtctggtggcccccaaatgtagctgcacagct

SEQ ID NO: 526566 - DNA, 33 bp, Homo sapien
agtctggtggcccccacatgtagctgcacagct

SEQ ID NO: 526567 - DNA, 33 bp, Homo sapien
ctaggactcagtgaaaagggcactgttatacac

SEQ ID NO: 526568 - DNA, 33 bp, Homo sapien
ctaggactcagtgaaatgggcactgttatacac

SEQ ID NO: 526569 - DNA, 33 bp, Homo sapien
gtttcctaattccctgaatcaaagttttatcat

SEQ ID NO: 526570 - DNA, 33 bp, Homo sapien
gtttcctaattccctgtatcaaagttttatcat

SEQ ID NO: 526571 - DNA, 33 bp, Homo sapien
tacttactgtggctggcattatctggaagacca

SEQ ID NO: 526572 - DNA, 33 bp, Homo sapien
tacttactgtggctgggattatctggaagacca

SEQ ID NO: 526573 - DNA, 33 bp, Homo sapien
aggcactttgttttacagagcaggatatgtgaa

SEQ ID NO: 526574 - DNA, 33 bp, Homo sapien
aggcactttgttttacggagcaggatatgtgaa

SEQ ID NO: 526575 - DNA, 33 bp, Homo sapien
tacatttgttcctgagacccagctacatcagtg

SEQ ID NO: 526576 - DNA, 33 bp, Homo sapien
tacatttgttcctgaggcccagctacatcagtg

SEQ ID NO: 526577 - DNA, 33 bp, Homo sapien
gagtacactgggtcacacttttctgcaactagc

SEQ ID NO: 526578 - DNA, 33 bp, Homo sapien
gagtacactgggtcacccttttctgcaactagc

SEQ ID NO: 526579 - DNA, 33 bp, Homo sapien
agaatctataagaggaacgttgccatggaatgc

SEQ ID NO: 526580 - DNA, 33 bp, Homo sapien
agaatctataagaggagcgttgccatggaatgc

SEQ ID NO: 526581 - DNA, 33 bp, Homo sapien
tttactattgtaggcccatgctaaacacagcct

SEQ ID NO: 526582 - DNA, 33 bp, Homo sapien
tttactattgtaggcctatgctaaacacagcct

SEQ ID NO: 526583 - DNA, 33 bp, Homo sapien
tattccctcttacatacgctcatcaaattaatc

SEQ ID NO: 526584 - DNA, 33 bp, Homo sapien
tattccctcttacatatgctcatcaaattaatc

SEQ ID NO: 526585 - DNA, 33 bp, Homo sapien
atgattgttatggtaactgaaaggtagagacag

SEQ ID NO: 526586 - DNA, 33 bp, Homo sapien
atgattgttatggtaattgaaaggtagagacag

SEQ ID NO: 526587 - DNA, 33 bp, Homo sapien
ctgcagcaagtgttgaagtgcaggcactgctgg

SEQ ID NO: 526588 - DNA, 33 bp, Homo sapien
ctgcagcaagtgttgaggtgcaggcactgctgg

SEQ ID NO: 526589 - DNA, 33 bp, Homo sapien
atcaaatgatcaatgaaatgaaaaggtgattat

SEQ ID NO: 526590 - DNA, 33 bp, Homo sapien
atcaaatgatcaatgagatgaaaaggtgattat

SEQ ID NO: 526591 - DNA, 33 bp, Homo sapien
ctgcggctaggagtgtcacacatggttgaggta

SEQ ID NO: 526592 - DNA, 33 bp, Homo sapien
ctgcggctaggagtgtgacacatggttgaggta

SEQ ID NO: 526593 - DNA, 33 bp, Homo sapien
tcacctactgctgtacaatcccattcctaacag

SEQ ID NO: 526594 - DNA, 33 bp, Homo sapien
tcacctactgctgtacgatcccattcctaacag

SEQ ID NO: 526595 - DNA, 33 bp, Homo sapien
tgtcattaggatcaacagaatatattggttgga

SEQ ID NO: 526596 - DNA, 33 bp, Homo sapien
tgtcattaggatcaacggaatatattggttgga

SEQ ID NO: 526597 - DNA, 33 bp, Homo sapien
aatctctgtctatttcacacggcttttgtgaca

SEQ ID NO: 526598 - DNA, 33 bp, Homo sapien
aatctctgtctatttcccacggcttttgtgaca

SEQ ID NO: 526599 - DNA, 33 bp, Homo sapien
ttacaaagacaacaacaaatgccaacaaatatt

SEQ ID NO: 526600 - DNA, 33 bp, Homo sapien
ttacaaagacaacaaccaatgccaacaaatatt

SEQ ID NO: 526601 - DNA, 33 bp, Homo sapien
ggttactccgcagaataacaactctcaataatc

SEQ ID NO: 526602 - DNA, 33 bp, Homo sapien
ggttactccgcagaatgacaactctcaataatc

SEQ ID NO: 526603 - DNA, 33 bp, Homo sapien
atcaggaagtgaaagagaaattgttgaagaaag

SEQ ID NO: 526604 - DNA, 33 bp, Homo sapien
atcaggaagtgaaagataaattgttgaagaaag

SEQ ID NO: 526605 - DNA, 33 bp, Homo sapien
agagagaagagcaacaagcaaagactgcaccct

SEQ ID NO: 526606 - DNA, 33 bp, Homo sapien
agagagaagagcaacaggcaaagactgcaccct

SEQ ID NO: 526607 - DNA, 33 bp, Homo sapien
catccccatcactggacaattccacttcaacat

SEQ ID NO: 526608 - DNA, 33 bp, Homo sapien
catccccatcactggataattccacttcaacat

SEQ ID NO: 526609 - DNA, 33 bp, Homo sapien
gcttactgatttatgaacaaaatgtggattagg

SEQ ID NO: 526610 - DNA, 33 bp, Homo sapien
gcttactgatttatgagcaaaatgtggattagg

SEQ ID NO: 526611 - DNA, 33 bp, Homo sapien
gccctctgcatcccggaaccttcttgccagctc

SEQ ID NO: 526612 - DNA, 33 bp, Homo sapien
gccctctgcatcccgggaccttcttgccagctc

SEQ ID NO: 526613 - DNA, 33 bp, Homo sapien
ctgagatcatagtgtacggaaacctgggtctcc

SEQ ID NO: 526614 - DNA, 33 bp, Homo sapien
ctgagatcatagtgtatggaaacctgggtctcc

SEQ ID NO: 526615 - DNA, 33 bp, Homo sapien
tgttccttttgccagaagaaagctttttagttg

SEQ ID NO: 526616 - DNA, 33 bp, Homo sapien
tgttccttttgccagacgaaagctttttagttg

SEQ ID NO: 526617 - DNA, 33 bp, Homo sapien
aaactgaagctttgcaaccgttaaactctaact

SEQ ID NO: 526618 - DNA, 33 bp, Homo sapien
aaactgaagctttgcacccgttaaactctaact

SEQ ID NO: 526619 - DNA, 33 bp, Homo sapien
tttattatgtgctagacgtgaagagagcagggc

SEQ ID NO: 526620 - DNA, 33 bp, Homo sapien
tttattatgtgctagatgtgaagagagcagggc

SEQ ID NO: 526621 - DNA, 33 bp, Homo sapien
gaagaatttctcccacagagagagatcagaata

SEQ ID NO: 526622 - DNA, 33 bp, Homo sapien
gaagaatttctcccactgagagagatcagaata

SEQ ID NO: 526623 - DNA, 33 bp, Homo sapien
caagaaataatcacaaatataacaagtgagcag

SEQ ID NO: 526624 - DNA, 33 bp, Homo sapien
caagaaataatcacaactataacaagtgagcag

SEQ ID NO: 526625 - DNA, 33 bp, Homo sapien
gcaactcaaaatgacacagaggaagaaacttca

SEQ ID NO: 526626 - DNA, 33 bp, Homo sapien
gcaactcaaaatgacagagaggaagaaacttca

SEQ ID NO: 526627 - DNA, 33 bp, Homo sapien
tggtattatgaggattgaacaaatagtatatgt

SEQ ID NO: 526628 - DNA, 33 bp, Homo sapien
tggtattatgaggatttaacaaatagtatatgt

SEQ ID NO: 526629 - DNA, 33 bp, Homo sapien
ccattctcacaaaggccacttaacaaggatgag

SEQ ID NO: 526630 - DNA, 33 bp, Homo sapien
ccattctcacaaaggctacttaacaaggatgag

SEQ ID NO: 526631 - DNA, 33 bp, Homo sapien
aggggccagggtagacacctgcacagggcattt

SEQ ID NO: 526632 - DNA, 33 bp, Homo sapien
aggggccagggtagacgcctgcacagggcattt

SEQ ID NO: 526633 - DNA, 33 bp, Homo sapien
gaatctgagacccataaactataataccttgtg

SEQ ID NO: 526634 - DNA, 33 bp, Homo sapien
gaatctgagacccatagactataataccttgtg

SEQ ID NO: 526635 - DNA, 33 bp, Homo sapien
attcttcctttccctcaatggttgatagagttc

SEQ ID NO: 526636 - DNA, 33 bp, Homo sapien
attcttcctttccctcgatggttgatagagttc

SEQ ID NO: 526637 - DNA, 33 bp, Homo sapien
atgttcaaagtgcaagaaagggaagctggcaag

SEQ ID NO: 526638 - DNA, 33 bp, Homo sapien
atgttcaaagtgcaaggaagggaagctggcaag

SEQ ID NO: 526639 - DNA, 33 bp, Homo sapien
actcattcccagatttaaaaggctcagcctacc

SEQ ID NO: 526640 - DNA, 33 bp, Homo sapien
actcattcccagatttgaaaggctcagcctacc

SEQ ID NO: 526641 - DNA, 33 bp, Homo sapien
atgatgcctggtacataatacacactcaactat

SEQ ID NO: 526642 - DNA, 33 bp, Homo sapien
atgatgcctggtacatgatacacactcaactat

SEQ ID NO: 526643 - DNA, 33 bp, Homo sapien
agcctgcaaaactgtacagagttcatattttct

SEQ ID NO: 526644 - DNA, 33 bp, Homo sapien
agcctgcaaaactgtatagagttcatattttct

SEQ ID NO: 526645 - DNA, 33 bp, Homo sapien
agaacagtgcacttaaaaatggttatgatggta

SEQ ID NO: 526646 - DNA, 33 bp, Homo sapien
agaacagtgcacttaacaatggttatgatggta

SEQ ID NO: 526647 - DNA, 33 bp, Homo sapien
atggatgtataaacaacaaggctagcagtaata

SEQ ID NO: 526648 - DNA, 33 bp, Homo sapien
atggatgtataaacaataaggctagcagtaata

SEQ ID NO: 526649 - DNA, 33 bp, Homo sapien
cagttatggtggactacatcaatggacttggaa

SEQ ID NO: 526650 - DNA, 33 bp, Homo sapien
cagttatggtggactagatcaatggacttggaa

SEQ ID NO: 526651 - DNA, 33 bp, Homo sapien
atttatacaactggggaactcacattatctttg

SEQ ID NO: 526652 - DNA, 33 bp, Homo sapien
atttatacaactgggggactcacattatctttg

SEQ ID NO: 526653 - DNA, 33 bp, Homo sapien
acactatatgtgaaaacacactggaaactagaa

SEQ ID NO: 526654 - DNA, 33 bp, Homo sapien
acactatatgtgaaaatacactggaaactagaa

SEQ ID NO: 526655 - DNA, 33 bp, Homo sapien
actgtttgcctttccacgtgaaggcaaagagaa

SEQ ID NO: 526656 - DNA, 33 bp, Homo sapien
actgtttgcctttccatgtgaaggcaaagagaa

SEQ ID NO: 526657 - DNA, 33 bp, Homo sapien
gaacatcaagtgtcaaaaggtgtgttaggattg

SEQ ID NO: 526658 - DNA, 33 bp, Homo sapien
gaacatcaagtgtcaacaggtgtgttaggattg

SEQ ID NO: 526659 - DNA, 33 bp, Homo sapien
caatattgttaatggcccttaggtcttgagacc

SEQ ID NO: 526660 - DNA, 33 bp, Homo sapien
caatattgttaatggctcttaggtcttgagacc

SEQ ID NO: 526661 - DNA, 33 bp, Homo sapien
gtaaggtcaattgatacggtttctgaaggagag

SEQ ID NO: 526662 - DNA, 33 bp, Homo sapien
gtaaggtcaattgatatggtttctgaaggagag

SEQ ID NO: 526663 - DNA, 33 bp, Homo sapien
taggtaactgtctaagaatagatggcatgactc

SEQ ID NO: 526664 - DNA, 33 bp, Homo sapien
taggtaactgtctaaggatagatggcatgactc

SEQ ID NO: 526665 - DNA, 33 bp, Homo sapien
tgtggatatagcacccacactgtttatcacttt

SEQ ID NO: 526666 - DNA, 33 bp, Homo sapien
tgtggatatagcaccctcactgtttatcacttt

SEQ ID NO: 526667 - DNA, 33 bp, Homo sapien
gtctatctttccagcactactcagatgactaca

SEQ ID NO: 526668 - DNA, 33 bp, Homo sapien
gtctatctttccagcagtactcagatgactaca

SEQ ID NO: 526669 - DNA, 33 bp, Homo sapien
taaaaaggaaaccttacgtagtgtgtggtgggg

SEQ ID NO: 526670 - DNA, 33 bp, Homo sapien
taaaaaggaaaccttatgtagtgtgtggtgggg

SEQ ID NO: 526671 - DNA, 33 bp, Homo sapien
cccactcatcatggtgaaagttgctcagaacta

SEQ ID NO: 526672 - DNA, 33 bp, Homo sapien
cccactcatcatggtggaagttgctcagaacta

SEQ ID NO: 526673 - DNA, 33 bp, Homo sapien
ttccaggcctaaggtcacatatcaaataacaac

SEQ ID NO: 526674 - DNA, 33 bp, Homo sapien
ttccaggcctaaggtcgcatatcaaataacaac

SEQ ID NO: 526675 - DNA, 33 bp, Homo sapien
atgtattttcaaatcaacaacagtcactcactg

SEQ ID NO: 526676 - DNA, 33 bp, Homo sapien
atgtattttcaaatcaccaacagtcactcactg

SEQ ID NO: 526677 - DNA, 33 bp, Homo sapien
gacttatccagtactacgttcattacttgggtg

SEQ ID NO: 526678 - DNA, 33 bp, Homo sapien
gacttatccagtactatgttcattacttgggtg

SEQ ID NO: 526679 - DNA, 33 bp, Homo sapien
attacaaaatagccaacagtttatcctaaatga

SEQ ID NO: 526680 - DNA, 33 bp, Homo sapien
attacaaaatagccaatagtttatcctaaatga

SEQ ID NO: 526681 - DNA, 33 bp, Homo sapien
agttagaaaacacacaaaagttcttgttatctc

SEQ ID NO: 526682 - DNA, 33 bp, Homo sapien
agttagaaaacacacacaagttcttgttatctc

SEQ ID NO: 526683 - DNA, 33 bp, Homo sapien
cgacattatcttttaccgcaaggaaggaagcag

SEQ ID NO: 526684 - DNA, 33 bp, Homo sapien
cgacattatcttttacggcaaggaaggaagcag

SEQ ID NO: 526685 - DNA, 33 bp, Homo sapien
ccaattaataacagatcaaacagttaaatccaa

SEQ ID NO: 526686 - DNA, 33 bp, Homo sapien
ccaattaataacagatgaaacagttaaatccaa

SEQ ID NO: 526687 - DNA, 33 bp, Homo sapien
ggttccaacacaaatacccaggtgtaactggct

SEQ ID NO: 526688 - DNA, 33 bp, Homo sapien
ggttccaacacaaatatccaggtgtaactggct

SEQ ID NO: 526689 - DNA, 33 bp, Homo sapien
aaaatgtagagtgttacgtcatgtttctataga

SEQ ID NO: 526690 - DNA, 33 bp, Homo sapien
aaaatgtagagtgttatgtcatgtttctataga

SEQ ID NO: 526691 - DNA, 33 bp, Homo sapien
tggaatgggaccaaaaattctacaattacggat

SEQ ID NO: 526692 - DNA, 33 bp, Homo sapien
tggaatgggaccaaaacttctacaattacggat

SEQ ID NO: 526693 - DNA, 33 bp, Homo sapien
tagacaaattttatgccaaggcagtatatatta

SEQ ID NO: 526694 - DNA, 33 bp, Homo sapien
tagacaaattttatgctaaggcagtatatatta

SEQ ID NO: 526695 - DNA, 33 bp, Homo sapien
atttctgtctttaaaactgtcatggagctttcc

SEQ ID NO: 526696 - DNA, 33 bp, Homo sapien
atttctgtctttaaaattgtcatggagctttcc

SEQ ID NO: 526697 - DNA, 33 bp, Homo sapien
gcccactgccttcaccaccatactgacccactg

SEQ ID NO: 526698 - DNA, 33 bp, Homo sapien
gcccactgccttcaccgccatactgacccactg

SEQ ID NO: 526699 - DNA, 33 bp, Homo sapien
cattccaacttgagaaatggcttgataccctgt

SEQ ID NO: 526700 - DNA, 33 bp, Homo sapien
cattccaacttgagaagtggcttgataccctgt

SEQ ID NO: 526701 - DNA, 33 bp, Homo sapien
caattgactattgaaaataggtttgtgaggttt

SEQ ID NO: 526702 - DNA, 33 bp, Homo sapien
caattgactattgaaagtaggtttgtgaggttt

SEQ ID NO: 526703 - DNA, 33 bp, Homo sapien
ggactgtatctggaaagaaatagaaatataaaa

SEQ ID NO: 526704 - DNA, 33 bp, Homo sapien
ggactgtatctggaaataaatagaaatataaaa

SEQ ID NO: 526705 - DNA, 33 bp, Homo sapien
aggtggtgtttcagaaagactggagagagtgga

SEQ ID NO: 526706 - DNA, 33 bp, Homo sapien
aggtggtgtttcagaaggactggagagagtgga

SEQ ID NO: 526707 - DNA, 33 bp, Homo sapien
cattacaatgcacacaatgaagttcttagctga

SEQ ID NO: 526708 - DNA, 33 bp, Homo sapien
cattacaatgcacacagtgaagttcttagctga

SEQ ID NO: 526709 - DNA, 33 bp, Homo sapien
caagagagatgacagtcactacaacttggctct

SEQ ID NO: 526710 - DNA, 33 bp, Homo sapien
caagagagatgacagtgactacaacttggctct

SEQ ID NO: 526711 - DNA, 33 bp, Homo sapien
aacgagaggtattttacaggcagaatttcacct

SEQ ID NO: 526712 - DNA, 33 bp, Homo sapien
aacgagaggtattttataggcagaatttcacct

SEQ ID NO: 526713 - DNA, 33 bp, Homo sapien
aatactggtcttacaaagttgcttccttatatg

SEQ ID NO: 526714 - DNA, 33 bp, Homo sapien
aatactggtcttacaaggttgcttccttatatg

SEQ ID NO: 526715 - DNA, 33 bp, Homo sapien
ttcagattcttccaaaaagtacagtaggaaaat

SEQ ID NO: 526716 - DNA, 33 bp, Homo sapien
ttcagattcttccaaatagtacagtaggaaaat

SEQ ID NO: 526717 - DNA, 33 bp, Homo sapien
acatttattaagcatcgatgcacaagacatggt

SEQ ID NO: 526718 - DNA, 33 bp, Homo sapien
acatttattaagcatctatgcacaagacatggt

SEQ ID NO: 526719 - DNA, 33 bp, Homo sapien
gaagttaagctttgtccaaaaatacttatataa

SEQ ID NO: 526720 - DNA, 33 bp, Homo sapien
gaagttaagctttgtctaaaaatacttatataa

SEQ ID NO: 526721 - DNA, 33 bp, Homo sapien
taggcctttactgtacactggaaagagagggca

SEQ ID NO: 526722 - DNA, 33 bp, Homo sapien
taggcctttactgtacgctggaaagagagggca

SEQ ID NO: 526723 - DNA, 33 bp, Homo sapien
ctagaggacacttagtaaaaacagcataagaaa

SEQ ID NO: 526724 - DNA, 33 bp, Homo sapien
ctagaggacacttagtgaaaacagcataagaaa

SEQ ID NO: 526725 - DNA, 33 bp, Homo sapien
gttgaatgcttgacccaacctttgttcatctgc

SEQ ID NO: 526726 - DNA, 33 bp, Homo sapien
gttgaatgcttgaccccacctttgttcatctgc

SEQ ID NO: 526727 - DNA, 33 bp, Homo sapien
tgcctaacaaaatctccaagtgatacacaagaa

SEQ ID NO: 526728 - DNA, 33 bp, Homo sapien
tgcctaacaaaatctcgaagtgatacacaagaa

SEQ ID NO: 526729 - DNA, 33 bp, Homo sapien
tatactgtaattcacaaggtaagacctacagaa

SEQ ID NO: 526730 - DNA, 33 bp, Homo sapien
tatactgtaattcacagggtaagacctacagaa

SEQ ID NO: 526731 - DNA, 33 bp, Homo sapien
aagcaggaaaaaacaacgcctcattaggtgata

SEQ ID NO: 526732 - DNA, 33 bp, Homo sapien
aagcaggaaaaaacaatgcctcattaggtgata

SEQ ID NO: 526733 - DNA, 33 bp, Homo sapien
gaaaacgacatagtcaaaacagaaaagtgaaag

SEQ ID NO: 526734 - DNA, 33 bp, Homo sapien
gaaaacgacatagtcagaacagaaaagtgaaag

SEQ ID NO: 526735 - DNA, 33 bp, Homo sapien
ttataatgagactcacaattcactgtaattttg

SEQ ID NO: 526736 - DNA, 33 bp, Homo sapien
ttataatgagactcacgattcactgtaattttg

SEQ ID NO: 526737 - DNA, 33 bp, Homo sapien
atcctgaaagaatgaccccatcttcatatatca

SEQ ID NO: 526738 - DNA, 33 bp, Homo sapien
atcctgaaagaatgactccatcttcatatatca

SEQ ID NO: 526739 - DNA, 33 bp, Homo sapien
catagtacatgaaaagacacttggtccactttg

SEQ ID NO: 526740 - DNA, 33 bp, Homo sapien
catagtacatgaaaaggcacttggtccactttg

SEQ ID NO: 526741 - DNA, 33 bp, Homo sapien
ttaatacttgaaacaacgtgtgaatgagaagcg

SEQ ID NO: 526742 - DNA, 33 bp, Homo sapien
ttaatacttgaaacaatgtgtgaatgagaagcg

SEQ ID NO: 526743 - DNA, 33 bp, Homo sapien
aattgctgtcagttaactcaggttaagaggcta

SEQ ID NO: 526744 - DNA, 33 bp, Homo sapien
aattgctgtcagttaattcaggttaagaggcta

SEQ ID NO: 526745 - DNA, 33 bp, Homo sapien
ttgtcaactgcaaagcactcgtcggacatagta

SEQ ID NO: 526746 - DNA, 33 bp, Homo sapien
ttgtcaactgcaaagccctcgtcggacatagta

SEQ ID NO: 526747 - DNA, 33 bp, Homo sapien
ttcttttttgaggagaccttttgtccaggtagt

SEQ ID NO: 526748 - DNA, 33 bp, Homo sapien
ttcttttttgaggagatcttttgtccaggtagt

SEQ ID NO: 526749 - DNA, 33 bp, Homo sapien
gcccatcagaagctaaacaacagcactatctta

SEQ ID NO: 526750 - DNA, 33 bp, Homo sapien
gcccatcagaagctaaccaacagcactatctta

SEQ ID NO: 526751 - DNA, 33 bp, Homo sapien
aagattttaattaaagcctgatttagatgtgca

SEQ ID NO: 526752 - DNA, 33 bp, Homo sapien
aagattttaattaaaggctgatttagatgtgca

SEQ ID NO: 526753 - DNA, 33 bp, Homo sapien
ctttgtaccttttccaatatgatagataaaatt

SEQ ID NO: 526754 - DNA, 33 bp, Homo sapien
ctttgtaccttttccagtatgatagataaaatt

SEQ ID NO: 526755 - DNA, 33 bp, Homo sapien
gtctgaatttctttgacacttaaatgccaagac

SEQ ID NO: 526756 - DNA, 33 bp, Homo sapien
gtctgaatttctttgagacttaaatgccaagac

SEQ ID NO: 526757 - DNA, 33 bp, Homo sapien
acacaatgtattagtcaccaaacaaatcaaatt

SEQ ID NO: 526758 - DNA, 33 bp, Homo sapien
acacaatgtattagtcgccaaacaaatcaaatt

SEQ ID NO: 526759 - DNA, 33 bp, Homo sapien
gaatttaaaatcgttacgccagaactcttcctt

SEQ ID NO: 526760 - DNA, 33 bp, Homo sapien
gaatttaaaatcgttatgccagaactcttcctt

SEQ ID NO: 526761 - DNA, 33 bp, Homo sapien
tgtctatatgactgaacgaattatctactcact

SEQ ID NO: 526762 - DNA, 33 bp, Homo sapien
tgtctatatgactgaatgaattatctactcact

SEQ ID NO: 526763 - DNA, 33 bp, Homo sapien
tccctgaaatttttcagcatcgctaaacagtag

SEQ ID NO: 526764 - DNA, 33 bp, Homo sapien
tccctgaaatttttcatcatcgctaaacagtag

SEQ ID NO: 526765 - DNA, 33 bp, Homo sapien
gctcacttgaatcacccggggagcttcaaaagc

SEQ ID NO: 526766 - DNA, 33 bp, Homo sapien
gctcacttgaatcacctggggagcttcaaaagc

SEQ ID NO: 526767 - DNA, 33 bp, Homo sapien
ggaatccccagattcaagttgccagagcctggt

SEQ ID NO: 526768 - DNA, 33 bp, Homo sapien
ggaatccccagattcacgttgccagagcctggt

SEQ ID NO: 526769 - DNA, 33 bp, Homo sapien
taggttttagcaacctcacttatagccagagac

SEQ ID NO: 526770 - DNA, 33 bp, Homo sapien
taggttttagcaacctgacttatagccagagac

SEQ ID NO: 526771 - DNA, 33 bp, Homo sapien
aagtcaagcagaaaaacaccagacatcagtaga

SEQ ID NO: 526772 - DNA, 33 bp, Homo sapien
aagtcaagcagaaaaataccagacatcagtaga

SEQ ID NO: 526773 - DNA, 33 bp, Homo sapien
aggccagacttaggaactggtctcttatcacag

SEQ ID NO: 526774 - DNA, 33 bp, Homo sapien
aggccagacttaggaattggtctcttatcacag

SEQ ID NO: 526775 - DNA, 33 bp, Homo sapien
taacgtgcactgctaaatgaaagagagattatt

SEQ ID NO: 526776 - DNA, 33 bp, Homo sapien
taacgtgcactgctaagtgaaagagagattatt

SEQ ID NO: 526777 - DNA, 33 bp, Homo sapien
tttaaaatggacaaaacgtgctagcagattagt

SEQ ID NO: 526778 - DNA, 33 bp, Homo sapien
tttaaaatggacaaaatgtgctagcagattagt

SEQ ID NO: 526779 - DNA, 33 bp, Homo sapien
ccactacactctaacacgagaatcctggactcc

SEQ ID NO: 526780 - DNA, 33 bp, Homo sapien
ccactacactctaacatgagaatcctggactcc

SEQ ID NO: 526781 - DNA, 33 bp, Homo sapien
cataagagcacctaagaccagcatataagccaa

SEQ ID NO: 526782 - DNA, 33 bp, Homo sapien
cataagagcacctaaggccagcatataagccaa

SEQ ID NO: 526783 - DNA, 33 bp, Homo sapien
aagaactaaaatgtggccagtgaaccagtcagt

SEQ ID NO: 526784 - DNA, 33 bp, Homo sapien
aagaactaaaatgtggtcagtgaaccagtcagt

SEQ ID NO: 526785 - DNA, 33 bp, Homo sapien
gagaagggatgcaagaactcggaagtatgccaa

SEQ ID NO: 526786 - DNA, 33 bp, Homo sapien
gagaagggatgcaagacctcggaagtatgccaa

SEQ ID NO: 526787 - DNA, 33 bp, Homo sapien
tctcactgtggcctgactaaaaaccagcggcat

SEQ ID NO: 526788 - DNA, 33 bp, Homo sapien
tctcactgtggcctgattaaaaaccagcggcat

SEQ ID NO: 526789 - DNA, 33 bp, Homo sapien
atcttccaagcctcatgaactataaggtcccat

SEQ ID NO: 526790 - DNA, 33 bp, Homo sapien
atcttccaagcctcattaactataaggtcccat

SEQ ID NO: 526791 - DNA, 33 bp, Homo sapien
agaatagtttctgttacgtaaacacagctgata

SEQ ID NO: 526792 - DNA, 33 bp, Homo sapien
agaatagtttctgttatgtaaacacagctgata

SEQ ID NO: 526793 - DNA, 33 bp, Homo sapien
cttattttcagtctggaatcattgcagtgatta

SEQ ID NO: 526794 - DNA, 33 bp, Homo sapien
cttattttcagtctgggatcattgcagtgatta

SEQ ID NO: 526795 - DNA, 33 bp, Homo sapien
tgattggtggaagtgacgtcatgtatggtaaac

SEQ ID NO: 526796 - DNA, 33 bp, Homo sapien
tgattggtggaagtgatgtcatgtatggtaaac

SEQ ID NO: 526797 - DNA, 33 bp, Homo sapien
gaagaccaagtgagcacgagtacttagccaagc

SEQ ID NO: 526798 - DNA, 33 bp, Homo sapien
gaagaccaagtgagcaggagtacttagccaagc

SEQ ID NO: 526799 - DNA, 33 bp, Homo sapien
atggcctattgatgtacgacagccatttgctag

SEQ ID NO: 526800 - DNA, 33 bp, Homo sapien
atggcctattgatgtatgacagccatttgctag

SEQ ID NO: 526801 - DNA, 33 bp, Homo sapien
ctctcagcctgcagtactaatcatgctttttat

SEQ ID NO: 526802 - DNA, 33 bp, Homo sapien
ctctcagcctgcagtattaatcatgctttttat

SEQ ID NO: 526803 - DNA, 33 bp, Homo sapien
gtcagaccaagcgcaagaattgttggagacatg

SEQ ID NO: 526804 - DNA, 33 bp, Homo sapien
gtcagaccaagcgcaataattgttggagacatg

SEQ ID NO: 526805 - DNA, 33 bp, Homo sapien
attctcactatctcacactggccgtcttgaccc

SEQ ID NO: 526806 - DNA, 33 bp, Homo sapien
attctcactatctcaccctggccgtcttgaccc

SEQ ID NO: 526807 - DNA, 33 bp, Homo sapien
tcacagtattaagctacggatttttatgtattg

SEQ ID NO: 526808 - DNA, 33 bp, Homo sapien
tcacagtattaagctatggatttttatgtattg

SEQ ID NO: 526809 - DNA, 33 bp, Homo sapien
aaagaaagatatgagcaagctgaaacagacttt

SEQ ID NO: 526810 - DNA, 33 bp, Homo sapien
aaagaaagatatgagcgagctgaaacagacttt

SEQ ID NO: 526811 - DNA, 33 bp, Homo sapien
taagcatgaccatgaactgcagaatatccaggc

SEQ ID NO: 526812 - DNA, 33 bp, Homo sapien
taagcatgaccatgaattgcagaatatccaggc

SEQ ID NO: 526813 - DNA, 33 bp, Homo sapien
ggcctctagcgctgaacggcttttatctcaaca

SEQ ID NO: 526814 - DNA, 33 bp, Homo sapien
ggcctctagcgctgaatggcttttatctcaaca

SEQ ID NO: 526815 - DNA, 33 bp, Homo sapien
atatgggacacatccactatagggtttgggccc

SEQ ID NO: 526816 - DNA, 33 bp, Homo sapien
atatgggacacatccattatagggtttgggccc

SEQ ID NO: 526817 - DNA, 33 bp, Homo sapien
gcatagctaatttccaagtttgccctgttagaa

SEQ ID NO: 526818 - DNA, 33 bp, Homo sapien
gcatagctaatttccaggtttgccctgttagaa

SEQ ID NO: 526819 - DNA, 33 bp, Homo sapien
ttcagttaaattcaaccatgtagactaggaaat

SEQ ID NO: 526820 - DNA, 33 bp, Homo sapien
ttcagttaaattcaactatgtagactaggaaat

SEQ ID NO: 526821 - DNA, 33 bp, Homo sapien
cttcttggcctagagtaaaaaacatacaaacaa

SEQ ID NO: 526822 - DNA, 33 bp, Homo sapien
cttcttggcctagagtgaaaaacatacaaacaa

SEQ ID NO: 526823 - DNA, 33 bp, Homo sapien
cattttgttcctgtacaccaatattattcgtgt

SEQ ID NO: 526824 - DNA, 33 bp, Homo sapien
cattttgttcctgtaccccaatattattcgtgt

SEQ ID NO: 526825 - DNA, 33 bp, Homo sapien
tgtgaagactgacatgaaaagaaataagagtct

SEQ ID NO: 526826 - DNA, 33 bp, Homo sapien
tgtgaagactgacatggaaagaaataagagtct

SEQ ID NO: 526827 - DNA, 33 bp, Homo sapien
agaaatcaaaatcatcaataagcctatgaaaca

SEQ ID NO: 526828 - DNA, 33 bp, Homo sapien
agaaatcaaaatcatcgataagcctatgaaaca

SEQ ID NO: 526829 - DNA, 33 bp, Homo sapien
atcatgacattatgagaacattgaggctggaaa

SEQ ID NO: 526830 - DNA, 33 bp, Homo sapien
atcatgacattatgaggacattgaggctggaaa

SEQ ID NO: 526831 - DNA, 33 bp, Homo sapien
aaaccaagagagtaccaggagcttatgttcaaa

SEQ ID NO: 526832 - DNA, 33 bp, Homo sapien
aaaccaagagagtacccggagcttatgttcaaa

SEQ ID NO: 526833 - DNA, 33 bp, Homo sapien
ccctccaagaagaaacacttcagatgatagaaa

SEQ ID NO: 526834 - DNA, 33 bp, Homo sapien
ccctccaagaagaaacgcttcagatgatagaaa

SEQ ID NO: 526835 - DNA, 33 bp, Homo sapien
ctaatggcacgggaaactgttcacatgtacggt

SEQ ID NO: 526836 - DNA, 33 bp, Homo sapien
ctaatggcacgggaaattgttcacatgtacggt

SEQ ID NO: 526837 - DNA, 33 bp, Homo sapien
ccatactgaatcaggccaatgggctcctgtagg

SEQ ID NO: 526838 - DNA, 33 bp, Homo sapien
ccatactgaatcaggctaatgggctcctgtagg

SEQ ID NO: 526839 - DNA, 33 bp, Homo sapien
tgatcaggcaacaagacggtagaaggcagaggt

SEQ ID NO: 526840 - DNA, 33 bp, Homo sapien
tgatcaggcaacaagagggtagaaggcagaggt

SEQ ID NO: 526841 - DNA, 33 bp, Homo sapien
caagtggaccagaaacaagtattctaaaaataa

SEQ ID NO: 526842 - DNA, 33 bp, Homo sapien
caagtggaccagaaacgagtattctaaaaataa

SEQ ID NO: 526843 - DNA, 33 bp, Homo sapien
aaaccttccgtgggtgacacaaaatctaccagt

SEQ ID NO: 526844 - DNA, 33 bp, Homo sapien
aaaccttccgtgggtggcacaaaatctaccagt

SEQ ID NO: 526845 - DNA, 33 bp, Homo sapien
tgaattaacatcaataaacgcaaatgaaattga

SEQ ID NO: 526846 - DNA, 33 bp, Homo sapien
tgaattaacatcaatagacgcaaatgaaattga

SEQ ID NO: 526847 - DNA, 33 bp, Homo sapien
tgcagagatctggaaacggaagggttagtgaga

SEQ ID NO: 526848 - DNA, 33 bp, Homo sapien
tgcagagatctggaaatggaagggttagtgaga

SEQ ID NO: 526849 - DNA, 33 bp, Homo sapien
gcatttgccagtcatagctctccaggcaattac

SEQ ID NO: 526850 - DNA, 33 bp, Homo sapien
gcatttgccagtcatatctctccaggcaattac

SEQ ID NO: 526851 - DNA, 33 bp, Homo sapien
gtcttgattgcctgtcactcttcttggaattga

SEQ ID NO: 526852 - DNA, 33 bp, Homo sapien
gtcttgattgcctgtctctcttcttggaattga

SEQ ID NO: 526853 - DNA, 33 bp, Homo sapien
caccaccatacttacacacctttcatttcaaac

SEQ ID NO: 526854 - DNA, 33 bp, Homo sapien
caccaccatacttacatacctttcatttcaaac

SEQ ID NO: 526855 - DNA, 33 bp, Homo sapien
ttaattctttctccaaagggtgaatgataatgg

SEQ ID NO: 526856 - DNA, 33 bp, Homo sapien
ttaattctttctccaatgggtgaatgataatgg

SEQ ID NO: 526857 - DNA, 33 bp, Homo sapien
tgggaagaatagctcaccagtataatggatcaa

SEQ ID NO: 526858 - DNA, 33 bp, Homo sapien
tgggaagaatagctcatcagtataatggatcaa

SEQ ID NO: 526859 - DNA, 33 bp, Homo sapien
aaatctgaatgacaaaataacaagtaaggttac

SEQ ID NO: 526860 - DNA, 33 bp, Homo sapien
aaatctgaatgacaaagtaacaagtaaggttac

SEQ ID NO: 526861 - DNA, 33 bp, Homo sapien
ctacggctgtggactacgactagactatagacc

SEQ ID NO: 526862 - DNA, 33 bp, Homo sapien
ctacggctgtggactatgactagactatagacc

SEQ ID NO: 526863 - DNA, 33 bp, Homo sapien
catgatccaactgttcacacaaaagggaggttg

SEQ ID NO: 526864 - DNA, 33 bp, Homo sapien
catgatccaactgttcgcacaaaagggaggttg

SEQ ID NO: 526865 - DNA, 33 bp, Homo sapien
agaagtggcccaagaagcctacttgtgtacaga

SEQ ID NO: 526866 - DNA, 33 bp, Homo sapien
agaagtggcccaagaatcctacttgtgtacaga

SEQ ID NO: 526867 - DNA, 33 bp, Homo sapien
aaatgttaattgcaagcacctagatcagtgctc

SEQ ID NO: 526868 - DNA, 33 bp, Homo sapien
aaatgttaattgcaagtacctagatcagtgctc

SEQ ID NO: 526869 - DNA, 33 bp, Homo sapien
ccaggctttttgaggacgaacaaaattagaaat

SEQ ID NO: 526870 - DNA, 33 bp, Homo sapien
ccaggctttttgaggatgaacaaaattagaaat

SEQ ID NO: 526871 - DNA, 33 bp, Homo sapien
cttctaaaatctccacagacttaactagggccc

SEQ ID NO: 526872 - DNA, 33 bp, Homo sapien
cttctaaaatctccacggacttaactagggccc

SEQ ID NO: 526873 - DNA, 33 bp, Homo sapien
aacatcaattttatcacgtgaaaggatgagaaa

SEQ ID NO: 526874 - DNA, 33 bp, Homo sapien
aacatcaattttatcatgtgaaaggatgagaaa

SEQ ID NO: 526875 - DNA, 33 bp, Homo sapien
aggaagtatatttcaacgattaaattttcacct

SEQ ID NO: 526876 - DNA, 33 bp, Homo sapien
aggaagtatatttcaatgattaaattttcacct

SEQ ID NO: 526877 - DNA, 33 bp, Homo sapien
aatgtatgatgtaaagaattttaaccacttctg

SEQ ID NO: 526878 - DNA, 33 bp, Homo sapien
aatgtatgatgtaaagcattttaaccacttctg

SEQ ID NO: 526879 - DNA, 33 bp, Homo sapien
gcactgctctgacccacggaaagaatgggcgtt

SEQ ID NO: 526880 - DNA, 33 bp, Homo sapien
gcactgctctgacccatggaaagaatgggcgtt

SEQ ID NO: 526881 - DNA, 33 bp, Homo sapien
acctgccacaaagcaccatcctaagccatctat

SEQ ID NO: 526882 - DNA, 33 bp, Homo sapien
acctgccacaaagcactatcctaagccatctat

SEQ ID NO: 526883 - DNA, 33 bp, Homo sapien
tcctctttgctcttaagctaccaaatgtaggcg

SEQ ID NO: 526884 - DNA, 33 bp, Homo sapien
tcctctttgctcttaatctaccaaatgtaggcg

SEQ ID NO: 526885 - DNA, 33 bp, Homo sapien
ggaagctattgtggtcaaataaaggtttggagg

SEQ ID NO: 526886 - DNA, 33 bp, Homo sapien
ggaagctattgtggtcgaataaaggtttggagg

SEQ ID NO: 526887 - DNA, 33 bp, Homo sapien
tcttttcttcatattacggcctcagagttccaa

SEQ ID NO: 526888 - DNA, 33 bp, Homo sapien
tcttttcttcatattatggcctcagagttccaa

SEQ ID NO: 526889 - DNA, 33 bp, Homo sapien
aaagcttcacggccagaaaactgaactatccac

SEQ ID NO: 526890 - DNA, 33 bp, Homo sapien
aaagcttcacggccaggaaactgaactatccac

SEQ ID NO: 526891 - DNA, 33 bp, Homo sapien
tgtaactttgtaccaacgagcaggctaacttca

SEQ ID NO: 526892 - DNA, 33 bp, Homo sapien
tgtaactttgtaccaatgagcaggctaacttca

SEQ ID NO: 526893 - DNA, 33 bp, Homo sapien
tagctgcaactgaaacaacgatttggaaccatt

SEQ ID NO: 526894 - DNA, 33 bp, Homo sapien
tagctgcaactgaaacgacgatttggaaccatt

SEQ ID NO: 526895 - DNA, 33 bp, Homo sapien
gcctactttttgtagcaatgggctgtgtatctc

SEQ ID NO: 526896 - DNA, 33 bp, Homo sapien
gcctactttttgtagcgatgggctgtgtatctc

SEQ ID NO: 526897 - DNA, 33 bp, Homo sapien
cttggaaagatagtaaacaagaaagtaacttta

SEQ ID NO: 526898 - DNA, 33 bp, Homo sapien
cttggaaagatagtaagcaagaaagtaacttta

SEQ ID NO: 526899 - DNA, 33 bp, Homo sapien
cagaagaaagaaattacacccatacctctcacc

SEQ ID NO: 526900 - DNA, 33 bp, Homo sapien
cagaagaaagaaattagacccatacctctcacc

SEQ ID NO: 526901 - DNA, 33 bp, Homo sapien
tagatgattaatataaacctctctctgctcaag

SEQ ID NO: 526902 - DNA, 33 bp, Homo sapien
tagatgattaatataaccctctctctgctcaag

SEQ ID NO: 526903 - DNA, 33 bp, Homo sapien
tcatagttcaatgctaaacactgggcttttctg

SEQ ID NO: 526904 - DNA, 33 bp, Homo sapien
tcatagttcaatgctagacactgggcttttctg

SEQ ID NO: 526905 - DNA, 33 bp, Homo sapien
tcaggaaatggttctaagttttagagtcaatac

SEQ ID NO: 526906 - DNA, 33 bp, Homo sapien
tcaggaaatggttctacgttttagagtcaatac

SEQ ID NO: 526907 - DNA, 33 bp, Homo sapien
aagatagtatttagtcccccaagttagttgttt

SEQ ID NO: 526908 - DNA, 33 bp, Homo sapien
aagatagtatttagtctcccaagttagttgttt

SEQ ID NO: 526909 - DNA, 33 bp, Homo sapien
attgactggttattcactgaacactgttaccat

SEQ ID NO: 526910 - DNA, 33 bp, Homo sapien
attgactggttattcattgaacactgttaccat

SEQ ID NO: 526911 - DNA, 33 bp, Homo sapien
cagtatattgatcaaacagaaaggtgtagcata

SEQ ID NO: 526912 - DNA, 33 bp, Homo sapien
cagtatattgatcaaatagaaaggtgtagcata

SEQ ID NO: 526913 - DNA, 33 bp, Homo sapien
caaaaaccagtaaaagaaaacattggcaaggat

SEQ ID NO: 526914 - DNA, 33 bp, Homo sapien
caaaaaccagtaaaaggaaacattggcaaggat

SEQ ID NO: 526915 - DNA, 33 bp, Homo sapien
tgctaccaactttcaactgttgtcctgaatttc

SEQ ID NO: 526916 - DNA, 33 bp, Homo sapien
tgctaccaactttcaattgttgtcctgaatttc

SEQ ID NO: 526917 - DNA, 33 bp, Homo sapien
gaaggataaaagaccacagcttggattcagtgt

SEQ ID NO: 526918 - DNA, 33 bp, Homo sapien
gaaggataaaagaccagagcttggattcagtgt

SEQ ID NO: 526919 - DNA, 33 bp, Homo sapien
tgatcataaaatcatcacaaacacagagcagct

SEQ ID NO: 526920 - DNA, 33 bp, Homo sapien
tgatcataaaatcatcgcaaacacagagcagct

SEQ ID NO: 526921 - DNA, 33 bp, Homo sapien
agaggcagtttataaagtcaagaaatgtgttgt

SEQ ID NO: 526922 - DNA, 33 bp, Homo sapien
agaggcagtttataaattcaagaaatgtgttgt

SEQ ID NO: 526923 - DNA, 33 bp, Homo sapien
ccaagtttacggactacgagctgaaggcctatg

SEQ ID NO: 526924 - DNA, 33 bp, Homo sapien
ccaagtttacggactatgagctgaaggcctatg

SEQ ID NO: 526925 - DNA, 33 bp, Homo sapien
tgaacccccaaagaaaaccctggcacagattaa

SEQ ID NO: 526926 - DNA, 33 bp, Homo sapien
tgaacccccaaagaaacccctggcacagattaa

SEQ ID NO: 526927 - DNA, 33 bp, Homo sapien
ttgaatcctactctgccagctgtgcagtcccag

SEQ ID NO: 526928 - DNA, 33 bp, Homo sapien
ttgaatcctactctgctagctgtgcagtcccag

SEQ ID NO: 526929 - DNA, 33 bp, Homo sapien
tgtatgtaggttcctcaaaaagttagaaataga

SEQ ID NO: 526930 - DNA, 33 bp, Homo sapien
tgtatgtaggttcctccaaaagttagaaataga

SEQ ID NO: 526931 - DNA, 33 bp, Homo sapien
ctacatccctagacaaaagatcttccttcagca

SEQ ID NO: 526932 - DNA, 33 bp, Homo sapien
ctacatccctagacaagagatcttccttcagca

SEQ ID NO: 526933 - DNA, 33 bp, Homo sapien
cttcctctcatacagaaaaatcaatgcagaaat

SEQ ID NO: 526934 - DNA, 33 bp, Homo sapien
cttcctctcatacagataaatcaatgcagaaat

SEQ ID NO: 526935 - DNA, 33 bp, Homo sapien
tcatcaggttacaagacgagaagaaaggtgatg

SEQ ID NO: 526936 - DNA, 33 bp, Homo sapien
tcatcaggttacaagatgagaagaaaggtgatg

SEQ ID NO: 526937 - DNA, 33 bp, Homo sapien
atgcccacacttttcacagaatcatatttcctt

SEQ ID NO: 526938 - DNA, 33 bp, Homo sapien
atgcccacacttttcatagaatcatatttcctt

SEQ ID NO: 526939 - DNA, 33 bp, Homo sapien
aatataacattataaacttggtatcctagatgg

SEQ ID NO: 526940 - DNA, 33 bp, Homo sapien
aatataacattataaatttggtatcctagatgg

SEQ ID NO: 526941 - DNA, 33 bp, Homo sapien
tcaaaaattgtgtaaccggcaaatgttacagtc

SEQ ID NO: 526942 - DNA, 33 bp, Homo sapien
tcaaaaattgtgtaactggcaaatgttacagtc

SEQ ID NO: 526943 - DNA, 33 bp, Homo sapien
gctttttaacagcatccaatttagaacaaatac

SEQ ID NO: 526944 - DNA, 33 bp, Homo sapien
gctttttaacagcatctaatttagaacaaatac

SEQ ID NO: 526945 - DNA, 33 bp, Homo sapien
attcagtttgcatagaagaaacatctagaaatc

SEQ ID NO: 526946 - DNA, 33 bp, Homo sapien
attcagtttgcatagaggaaacatctagaaatc

SEQ ID NO: 526947 - DNA, 33 bp, Homo sapien
gaagtgaattaagcacaatcaactcagtactca

SEQ ID NO: 526948 - DNA, 33 bp, Homo sapien
gaagtgaattaagcacgatcaactcagtactca

SEQ ID NO: 526949 - DNA, 33 bp, Homo sapien
tatgtataaagcactaacctagagccattttgt

SEQ ID NO: 526950 - DNA, 33 bp, Homo sapien
tatgtataaagcactagcctagagccattttgt

SEQ ID NO: 526951 - DNA, 33 bp, Homo sapien
aaaaatcaagaattgaagcaaacaatagacatg

SEQ ID NO: 526952 - DNA, 33 bp, Homo sapien
aaaaatcaagaattgaggcaaacaatagacatg

SEQ ID NO: 526953 - DNA, 33 bp, Homo sapien
tttctcagcttaatagccagccagctgtttgac

SEQ ID NO: 526954 - DNA, 33 bp, Homo sapien
tttctcagcttaatagtcagccagctgtttgac

SEQ ID NO: 526955 - DNA, 33 bp, Homo sapien
atcttctttgttgatccctgaagtttctggttt

SEQ ID NO: 526956 - DNA, 33 bp, Homo sapien
atcttctttgttgatctctgaagtttctggttt

SEQ ID NO: 526957 - DNA, 33 bp, Homo sapien
aagaaagacaaaaaaaattctacactgagaaga

SEQ ID NO: 526958 - DNA, 33 bp, Homo sapien
aagaaagacaaaaaaatttctacactgagaaga

SEQ ID NO: 526959 - DNA, 33 bp, Homo sapien
ctaaacagacgtttcccgattccaatagccaat

SEQ ID NO: 526960 - DNA, 33 bp, Homo sapien
ctaaacagacgtttcctgattccaatagccaat

SEQ ID NO: 526961 - DNA, 33 bp, Homo sapien
actatacatagtggcaaagttgcaaggcccttc

SEQ ID NO: 526962 - DNA, 33 bp, Homo sapien
actatacatagtggcacagttgcaaggcccttc

SEQ ID NO: 526963 - DNA, 33 bp, Homo sapien
tattatttaagtctccccacctttcagggcctc

SEQ ID NO: 526964 - DNA, 33 bp, Homo sapien
tattatttaagtctcctcacctttcagggcctc

SEQ ID NO: 526965 - DNA, 33 bp, Homo sapien
tgagtcaggtacctcactcttcctccaatggtg

SEQ ID NO: 526966 - DNA, 33 bp, Homo sapien
tgagtcaggtacctcagtcttcctccaatggtg

SEQ ID NO: 526967 - DNA, 33 bp, Homo sapien
ctaatcctggcaaaaaattgagcccaggtgcgg

SEQ ID NO: 526968 - DNA, 33 bp, Homo sapien
ctaatcctggcaaaaatttgagcccaggtgcgg

SEQ ID NO: 526969 - DNA, 33 bp, Homo sapien
gaagtgggagcctgaactattcttatttgcata

SEQ ID NO: 526970 - DNA, 33 bp, Homo sapien
gaagtgggagcctgaagtattcttatttgcata

SEQ ID NO: 526971 - DNA, 33 bp, Homo sapien
gacacagaaaaacagacagtggaatctagaaaa

SEQ ID NO: 526972 - DNA, 33 bp, Homo sapien
gacacagaaaaacagagagtggaatctagaaaa

SEQ ID NO: 526973 - DNA, 33 bp, Homo sapien
gttagctggagagagagctgaactataagttga

SEQ ID NO: 526974 - DNA, 33 bp, Homo sapien
gttagctggagagagatctgaactataagttga

SEQ ID NO: 526975 - DNA, 33 bp, Homo sapien
ttgttcaaattccctcccaggaagatcttaagc

SEQ ID NO: 526976 - DNA, 33 bp, Homo sapien
ttgttcaaattccctctcaggaagatcttaagc

SEQ ID NO: 526977 - DNA, 33 bp, Homo sapien
tctttctgctcatcaccagtgccttgtactaaa

SEQ ID NO: 526978 - DNA, 33 bp, Homo sapien
tctttctgctcatcacgagtgccttgtactaaa

SEQ ID NO: 526979 - DNA, 33 bp, Homo sapien
ggagcaaggagttagaaaattggcagcagcatt

SEQ ID NO: 526980 - DNA, 33 bp, Homo sapien
ggagcaaggagttagagaattggcagcagcatt

SEQ ID NO: 526981 - DNA, 33 bp, Homo sapien
ggttgataggcagttcaatggctgcaggaaggg

SEQ ID NO: 526982 - DNA, 33 bp, Homo sapien
ggttgataggcagttcgatggctgcaggaaggg

SEQ ID NO: 526983 - DNA, 33 bp, Homo sapien
attttaactgggttcacggaggagaattctgaa

SEQ ID NO: 526984 - DNA, 33 bp, Homo sapien
attttaactgggttcatggaggagaattctgaa

SEQ ID NO: 526985 - DNA, 33 bp, Homo sapien
ctttggatagaccatacgttatgatctgtccag

SEQ ID NO: 526986 - DNA, 33 bp, Homo sapien
ctttggatagaccatatgttatgatctgtccag

SEQ ID NO: 526987 - DNA, 33 bp, Homo sapien
acttgaatgtgctatcaatcacctggggaatct

SEQ ID NO: 526988 - DNA, 33 bp, Homo sapien
acttgaatgtgctatccatcacctggggaatct

SEQ ID NO: 526989 - DNA, 33 bp, Homo sapien
catccatttgtacctcacacacctacctgatga

SEQ ID NO: 526990 - DNA, 33 bp, Homo sapien
catccatttgtacctcgcacacctacctgatga

SEQ ID NO: 526991 - DNA, 33 bp, Homo sapien
gttctggattccaaaagtaactttcagtatggc

SEQ ID NO: 526992 - DNA, 33 bp, Homo sapien
gttctggattccaaaattaactttcagtatggc

SEQ ID NO: 526993 - DNA, 33 bp, Homo sapien
gtttcactgcagagcaagtcctcttcccagtcc

SEQ ID NO: 526994 - DNA, 33 bp, Homo sapien
gtttcactgcagagcacgtcctcttcccagtcc

SEQ ID NO: 526995 - DNA, 33 bp, Homo sapien
catctgaaccatcgccacagtcatcatcgccat

SEQ ID NO: 526996 - DNA, 33 bp, Homo sapien
catctgaaccatcgccgcagtcatcatcgccat

SEQ ID NO: 526997 - DNA, 33 bp, Homo sapien
ctgtctgaaagttgaacggactatgtcttaagg

SEQ ID NO: 526998 - DNA, 33 bp, Homo sapien
ctgtctgaaagttgaatggactatgtcttaagg

SEQ ID NO: 526999 - DNA, 33 bp, Homo sapien
gaaggtatgcttaacaggtcagggtgttcagtt

SEQ ID NO: 527000 - DNA, 33 bp, Homo sapien
gaaggtatgcttaacatgtcagggtgttcagtt

SEQ ID NO: 527001 - DNA, 33 bp, Homo sapien
aggaatgcttagtcaacgtttcatttattatcc

SEQ ID NO: 527002 - DNA, 33 bp, Homo sapien
aggaatgcttagtcaatgtttcatttattatcc

SEQ ID NO: 527003 - DNA, 33 bp, Homo sapien
aagtattgtaagcaagcctatgtacttcaggag

SEQ ID NO: 527004 - DNA, 33 bp, Homo sapien
aagtattgtaagcaaggctatgtacttcaggag

SEQ ID NO: 527005 - DNA, 33 bp, Homo sapien
cagaaaaactatagaaatgcaacacaatagaac

SEQ ID NO: 527006 - DNA, 33 bp, Homo sapien
cagaaaaactatagaagtgcaacacaatagaac

SEQ ID NO: 527007 - DNA, 33 bp, Homo sapien
gtcagttcacaaactaccacctctcagcaatgt

SEQ ID NO: 527008 - DNA, 33 bp, Homo sapien
gtcagttcacaaactatcacctctcagcaatgt

SEQ ID NO: 527009 - DNA, 33 bp, Homo sapien
ccacactggactccaacggtacattagcgcctg

SEQ ID NO: 527010 - DNA, 33 bp, Homo sapien
ccacactggactccaatggtacattagcgcctg

SEQ ID NO: 527011 - DNA, 33 bp, Homo sapien
actaccattttgttaactggataccgaatgcct

SEQ ID NO: 527012 - DNA, 33 bp, Homo sapien
actaccattttgttaattggataccgaatgcct

SEQ ID NO: 527013 - DNA, 33 bp, Homo sapien
cacaagcacaatgtgaaataggtatttttacac

SEQ ID NO: 527014 - DNA, 33 bp, Homo sapien
cacaagcacaatgtgagataggtatttttacac

SEQ ID NO: 527015 - DNA, 33 bp, Homo sapien
aacaaaagaaagaagaagatgttggtaaagaca

SEQ ID NO: 527016 - DNA, 33 bp, Homo sapien
aacaaaagaaagaagatgatgttggtaaagaca

SEQ ID NO: 527017 - DNA, 33 bp, Homo sapien
gacaacccatgctacaaccagcttgtctccaga

SEQ ID NO: 527018 - DNA, 33 bp, Homo sapien
gacaacccatgctacagccagcttgtctccaga

SEQ ID NO: 527019 - DNA, 33 bp, Homo sapien
cagcctatatcataacagtaacaagaaacaggc

SEQ ID NO: 527020 - DNA, 33 bp, Homo sapien
cagcctatatcataacggtaacaagaaacaggc

SEQ ID NO: 527021 - DNA, 33 bp, Homo sapien
cattgactcttttctccagtaattttaggtagc

SEQ ID NO: 527022 - DNA, 33 bp, Homo sapien
cattgactcttttctcgagtaattttaggtagc

SEQ ID NO: 527023 - DNA, 33 bp, Homo sapien
gggtgcacatctaattaaagtcttgtaattctt

SEQ ID NO: 527024 - DNA, 33 bp, Homo sapien
gggtgcacatctaattcaagtcttgtaattctt

SEQ ID NO: 527025 - DNA, 33 bp, Homo sapien
aggggccaaagcaaaacggccttatagaccaga

SEQ ID NO: 527026 - DNA, 33 bp, Homo sapien
aggggccaaagcaaaatggccttatagaccaga

SEQ ID NO: 527027 - DNA, 33 bp, Homo sapien
gtcagttctcccctggaaaatcatcagatatca

SEQ ID NO: 527028 - DNA, 33 bp, Homo sapien
gtcagttctcccctggcaaatcatcagatatca

SEQ ID NO: 527029 - DNA, 33 bp, Homo sapien
aatgacctttgtgctacgaaaattggtaaaatg

SEQ ID NO: 527030 - DNA, 33 bp, Homo sapien
aatgacctttgtgctatgaaaattggtaaaatg

SEQ ID NO: 527031 - DNA, 33 bp, Homo sapien
gtttctcttactcctcacaagaaccctagtagt

SEQ ID NO: 527032 - DNA, 33 bp, Homo sapien
gtttctcttactcctcgcaagaaccctagtagt

SEQ ID NO: 527033 - DNA, 33 bp, Homo sapien
caaacacattcacacacagcaggattccatacc

SEQ ID NO: 527034 - DNA, 33 bp, Homo sapien
caaacacattcacacatagcaggattccatacc

SEQ ID NO: 527035 - DNA, 33 bp, Homo sapien
ccacctctagagaaatcaggccaatgtgaaata

SEQ ID NO: 527036 - DNA, 33 bp, Homo sapien
ccacctctagagaaatgaggccaatgtgaaata

SEQ ID NO: 527037 - DNA, 33 bp, Homo sapien
tgccaaccctggattaaaggattggaaatgagc

SEQ ID NO: 527038 - DNA, 33 bp, Homo sapien
tgccaaccctggattataggattggaaatgagc

SEQ ID NO: 527039 - DNA, 33 bp, Homo sapien
gaaaagcatcaatgtcaaggatctgaagtaact

SEQ ID NO: 527040 - DNA, 33 bp, Homo sapien
gaaaagcatcaatgtccaggatctgaagtaact

SEQ ID NO: 527041 - DNA, 33 bp, Homo sapien
tcactcccttcctcagaattccttgctaggaag

SEQ ID NO: 527042 - DNA, 33 bp, Homo sapien
tcactcccttcctcaggattccttgctaggaag

SEQ ID NO: 527043 - DNA, 33 bp, Homo sapien
tgttccaagtcaacaaactaaactgaaacacat

SEQ ID NO: 527044 - DNA, 33 bp, Homo sapien
tgttccaagtcaacaacctaaactgaaacacat

SEQ ID NO: 527045 - DNA, 33 bp, Homo sapien
tttttctgtctttaagaagctcacatatctgtg

SEQ ID NO: 527046 - DNA, 33 bp, Homo sapien
tttttctgtctttaagtagctcacatatctgtg

SEQ ID NO: 527047 - DNA, 33 bp, Homo sapien
gtgccaccatgtaccacgaagtgccacaggcaa

SEQ ID NO: 527048 - DNA, 33 bp, Homo sapien
gtgccaccatgtaccatgaagtgccacaggcaa

SEQ ID NO: 527049 - DNA, 33 bp, Homo sapien
cctaaagtgcatggtacgggtgtctaggtgaaa

SEQ ID NO: 527050 - DNA, 33 bp, Homo sapien
cctaaagtgcatggtatgggtgtctaggtgaaa

SEQ ID NO: 527051 - DNA, 33 bp, Homo sapien
actcatgtgagggtcaaagaggtagcagccaaa

SEQ ID NO: 527052 - DNA, 33 bp, Homo sapien
actcatgtgagggtcacagaggtagcagccaaa

SEQ ID NO: 527053 - DNA, 33 bp, Homo sapien
agacccatttgtttggacaatacattttccttt

SEQ ID NO: 527054 - DNA, 33 bp, Homo sapien
agacccatttgtttgggcaatacattttccttt

SEQ ID NO: 527055 - DNA, 33 bp, Homo sapien
cagtgtaattaccaagacaaacataaagagtaa

SEQ ID NO: 527056 - DNA, 33 bp, Homo sapien
cagtgtaattaccaaggcaaacataaagagtaa

SEQ ID NO: 527057 - DNA, 33 bp, Homo sapien
ctgtgattacaccttgcaaaatagaccacattc

SEQ ID NO: 527058 - DNA, 33 bp, Homo sapien
ctgtgattacaccttggaaaatagaccacattc

SEQ ID NO: 527059 - DNA, 33 bp, Homo sapien
ttccataaaacaaagacgatgtcagttctccaa

SEQ ID NO: 527060 - DNA, 33 bp, Homo sapien
ttccataaaacaaagatgatgtcagttctccaa

SEQ ID NO: 527061 - DNA, 33 bp, Homo sapien
aaagatgaaatgccaaagtaacttatgggagaa

SEQ ID NO: 527062 - DNA, 33 bp, Homo sapien
aaagatgaaatgccaaggtaacttatgggagaa

SEQ ID NO: 527063 - DNA, 33 bp, Homo sapien
ggattagctgaatgaaaccctcaggagaactcc

SEQ ID NO: 527064 - DNA, 33 bp, Homo sapien
ggattagctgaatgaagccctcaggagaactcc

SEQ ID NO: 527065 - DNA, 33 bp, Homo sapien
acaaagatacttaaacagcaatatttgaatgta

SEQ ID NO: 527066 - DNA, 33 bp, Homo sapien
acaaagatacttaaacggcaatatttgaatgta

SEQ ID NO: 527067 - DNA, 33 bp, Homo sapien
agaaaaaaatgccataaaggtctctgcctgttt

SEQ ID NO: 527068 - DNA, 33 bp, Homo sapien
agaaaaaaatgccatagaggtctctgcctgttt

SEQ ID NO: 527069 - DNA, 33 bp, Homo sapien
gcctccacttcttcacgctgaccttgcttttat

SEQ ID NO: 527070 - DNA, 33 bp, Homo sapien
gcctccacttcttcactctgaccttgcttttat

SEQ ID NO: 527071 - DNA, 33 bp, Homo sapien
ttgatacacaaaagaaatatgctccctggcttc

SEQ ID NO: 527072 - DNA, 33 bp, Homo sapien
ttgatacacaaaagaagtatgctccctggcttc

SEQ ID NO: 527073 - DNA, 33 bp, Homo sapien
cttgagtcacagtaaacagctgcttagtggtac

SEQ ID NO: 527074 - DNA, 33 bp, Homo sapien
cttgagtcacagtaaatagctgcttagtggtac

SEQ ID NO: 527075 - DNA, 33 bp, Homo sapien
aaatgtagtttgaagaccttgtagacctcttag

SEQ ID NO: 527076 - DNA, 33 bp, Homo sapien
aaatgtagtttgaagatcttgtagacctcttag

SEQ ID NO: 527077 - DNA, 33 bp, Homo sapien
tctttcaatgctaccaatgactgccattatgct

SEQ ID NO: 527078 - DNA, 33 bp, Homo sapien
tctttcaatgctaccagtgactgccattatgct

SEQ ID NO: 527079 - DNA, 33 bp, Homo sapien
gagcaaacaaaaggaactacagtcaggaaccgc

SEQ ID NO: 527080 - DNA, 33 bp, Homo sapien
gagcaaacaaaaggaagtacagtcaggaaccgc

SEQ ID NO: 527081 - DNA, 33 bp, Homo sapien
gtagtatttagcacggaaacatggtgttcaggt

SEQ ID NO: 527082 - DNA, 33 bp, Homo sapien
gtagtatttagcacgggaacatggtgttcaggt

SEQ ID NO: 527083 - DNA, 33 bp, Homo sapien
atattgtaggcatttacgtccatcaacaaatct

SEQ ID NO: 527084 - DNA, 33 bp, Homo sapien
atattgtaggcatttatgtccatcaacaaatct

SEQ ID NO: 527085 - DNA, 33 bp, Homo sapien
ctgttttagtccttgcactgtatttggtttcac

SEQ ID NO: 527086 - DNA, 33 bp, Homo sapien
ctgttttagtccttgcgctgtatttggtttcac

SEQ ID NO: 527087 - DNA, 33 bp, Homo sapien
aggttcttcagaggacactatcgccatttgggg

SEQ ID NO: 527088 - DNA, 33 bp, Homo sapien
aggttcttcagaggacgctatcgccatttgggg

SEQ ID NO: 527089 - DNA, 33 bp, Homo sapien
ttttgaggactccataagtaacaaataggttgg

SEQ ID NO: 527090 - DNA, 33 bp, Homo sapien
ttttgaggactccatacgtaacaaataggttgg

SEQ ID NO: 527091 - DNA, 33 bp, Homo sapien
agaaggtaatgtggaacagaggatttcataaaa

SEQ ID NO: 527092 - DNA, 33 bp, Homo sapien
agaaggtaatgtggaatagaggatttcataaaa

SEQ ID NO: 527093 - DNA, 33 bp, Homo sapien
agacagaagatataagacgaagttcaaatgatg

SEQ ID NO: 527094 - DNA, 33 bp, Homo sapien
agacagaagatataagccgaagttcaaatgatg

SEQ ID NO: 527095 - DNA, 33 bp, Homo sapien
gaggtgaactgacttaacactgcaaatttcttc

SEQ ID NO: 527096 - DNA, 33 bp, Homo sapien
gaggtgaactgacttaccactgcaaatttcttc

SEQ ID NO: 527097 - DNA, 33 bp, Homo sapien
cttaaatcaaaactcacccttactaaagcaggg

SEQ ID NO: 527098 - DNA, 33 bp, Homo sapien
cttaaatcaaaactcatccttactaaagcaggg

SEQ ID NO: 527099 - DNA, 33 bp, Homo sapien
tgattttgatgatatgccaagtttggggagcta

SEQ ID NO: 527100 - DNA, 33 bp, Homo sapien
tgattttgatgatatgtcaagtttggggagcta

SEQ ID NO: 527101 - DNA, 33 bp, Homo sapien
caagtaaagtttgagagattgtcaaaggcccaa

SEQ ID NO: 527102 - DNA, 33 bp, Homo sapien
caagtaaagtttgagatattgtcaaaggcccaa

SEQ ID NO: 527103 - DNA, 33 bp, Homo sapien
aggagtaataatgaaggaccagatagagtgaga

SEQ ID NO: 527104 - DNA, 33 bp, Homo sapien
aggagtaataatgaagtaccagatagagtgaga

SEQ ID NO: 527105 - DNA, 33 bp, Homo sapien
aaggacaaatttccaacgcagacatgagaagaa

SEQ ID NO: 527106 - DNA, 33 bp, Homo sapien
aaggacaaatttccaatgcagacatgagaagaa

SEQ ID NO: 527107 - DNA, 33 bp, Homo sapien
aatatcatcaccaaacacaacaaaaaattattt

SEQ ID NO: 527108 - DNA, 33 bp, Homo sapien
aatatcatcaccaaacgcaacaaaaaattattt

SEQ ID NO: 527109 - DNA, 33 bp, Homo sapien
caagccaatggcagacaaatgatttatattgaa

SEQ ID NO: 527110 - DNA, 33 bp, Homo sapien
caagccaatggcagacgaatgatttatattgaa

SEQ ID NO: 527111 - DNA, 33 bp, Homo sapien
agcaagagtagttctacgaatgtcaggaaaagg

SEQ ID NO: 527112 - DNA, 33 bp, Homo sapien
agcaagagtagttctatgaatgtcaggaaaagg

SEQ ID NO: 527113 - DNA, 33 bp, Homo sapien
actggtgagagtcagagaactgttagggtaata

SEQ ID NO: 527114 - DNA, 33 bp, Homo sapien
actggtgagagtcagataactgttagggtaata

SEQ ID NO: 527115 - DNA, 33 bp, Homo sapien
gattatacttgcataacctgatagaagcaacca

SEQ ID NO: 527116 - DNA, 33 bp, Homo sapien
gattatacttgcataatctgatagaagcaacca

SEQ ID NO: 527117 - DNA, 33 bp, Homo sapien
tagtgttaatcaagaacgtggttgaaattcctg

SEQ ID NO: 527118 - DNA, 33 bp, Homo sapien
tagtgttaatcaagaatgtggttgaaattcctg

SEQ ID NO: 527119 - DNA, 33 bp, Homo sapien
ctttctttgtcaaaaaccaacttctggactaaa

SEQ ID NO: 527120 - DNA, 33 bp, Homo sapien
ctttctttgtcaaaaatcaacttctggactaaa

SEQ ID NO: 527121 - DNA, 33 bp, Homo sapien
caaacaaatcttggaacgttgaaacagcaaaaa

SEQ ID NO: 527122 - DNA, 33 bp, Homo sapien
caaacaaatcttggaaggttgaaacagcaaaaa

SEQ ID NO: 527123 - DNA, 33 bp, Homo sapien
agctgggataatcaaggcttcttggaaagctga

SEQ ID NO: 527124 - DNA, 33 bp, Homo sapien
agctgggataatcaagtcttcttggaaagctga

SEQ ID NO: 527125 - DNA, 33 bp, Homo sapien
cacccttaatgagtagaatcttttccaactcca

SEQ ID NO: 527126 - DNA, 33 bp, Homo sapien
cacccttaatgagtaggatcttttccaactcca

SEQ ID NO: 527127 - DNA, 33 bp, Homo sapien
gcgtgtgggatttggaagtttatttaatgatta

SEQ ID NO: 527128 - DNA, 33 bp, Homo sapien
gcgtgtgggatttggacgtttatttaatgatta

SEQ ID NO: 527129 - DNA, 33 bp, Homo sapien
agtaaaaccaggtcaacgaagtgataacaagaa

SEQ ID NO: 527130 - DNA, 33 bp, Homo sapien
agtaaaaccaggtcaatgaagtgataacaagaa

SEQ ID NO: 527131 - DNA, 33 bp, Homo sapien
aggaggcatacgggaaattatgcaaatatagag

SEQ ID NO: 527132 - DNA, 33 bp, Homo sapien
aggaggcatacgggaagttatgcaaatatagag

SEQ ID NO: 527133 - DNA, 33 bp, Homo sapien
atggtttaatgattagacagcctgactccaaag

SEQ ID NO: 527134 - DNA, 33 bp, Homo sapien
atggtttaatgattaggcagcctgactccaaag

SEQ ID NO: 527135 - DNA, 33 bp, Homo sapien
atcgtacaagggaattcaagttatctgtatctt

SEQ ID NO: 527136 - DNA, 33 bp, Homo sapien
atcgtacaagggaattgaagttatctgtatctt

SEQ ID NO: 527137 - DNA, 33 bp, Homo sapien
ggaagagacaatgagaaatctttcacttactat

SEQ ID NO: 527138 - DNA, 33 bp, Homo sapien
ggaagagacaatgagacatctttcacttactat

SEQ ID NO: 527139 - DNA, 33 bp, Homo sapien
agctggagtgccttcaatcataagcatagcttt

SEQ ID NO: 527140 - DNA, 33 bp, Homo sapien
agctggagtgccttcagtcataagcatagcttt

SEQ ID NO: 527141 - DNA, 33 bp, Homo sapien
attagttttgctggtagaaatcatcactattaa

SEQ ID NO: 527142 - DNA, 33 bp, Homo sapien
attagttttgctggtataaatcatcactattaa

SEQ ID NO: 527143 - DNA, 33 bp, Homo sapien
ggaaatgcagaaaagtcaattcttgagttatct

SEQ ID NO: 527144 - DNA, 33 bp, Homo sapien
ggaaatgcagaaaagttaattcttgagttatct

SEQ ID NO: 527145 - DNA, 33 bp, Homo sapien
atggccttcctctctaataaactagggtctctt

SEQ ID NO: 527146 - DNA, 33 bp, Homo sapien
atggccttcctctctactaaactagggtctctt

SEQ ID NO: 527147 - DNA, 33 bp, Homo sapien
ttagatagtagagaataacctaaacgacctata

SEQ ID NO: 527148 - DNA, 33 bp, Homo sapien
ttagatagtagagaatcacctaaacgacctata

SEQ ID NO: 527149 - DNA, 33 bp, Homo sapien
agcctcataccacttacctgcaccggtagagtt

SEQ ID NO: 527150 - DNA, 33 bp, Homo sapien
agcctcataccacttatctgcaccggtagagtt

SEQ ID NO: 527151 - DNA, 33 bp, Homo sapien
agccaaaagttgactacagaacgacactctaca

SEQ ID NO: 527152 - DNA, 33 bp, Homo sapien
agccaaaagttgactatagaacgacactctaca

SEQ ID NO: 527153 - DNA, 33 bp, Homo sapien
aatttacagatacacacagtgtggcaaataagt

SEQ ID NO: 527154 - DNA, 33 bp, Homo sapien
aatttacagatacacatagtgtggcaaataagt

SEQ ID NO: 527155 - DNA, 33 bp, Homo sapien
catgtaagtgagttcacatggtattcgtccttt

SEQ ID NO: 527156 - DNA, 33 bp, Homo sapien
catgtaagtgagttcatatggtattcgtccttt

SEQ ID NO: 527157 - DNA, 33 bp, Homo sapien
ccatgttctgacattacgttgactatgtatatt

SEQ ID NO: 527158 - DNA, 33 bp, Homo sapien
ccatgttctgacattatgttgactatgtatatt

SEQ ID NO: 527159 - DNA, 33 bp, Homo sapien
ggctaaaggaaaggtcacaaatcagctgttaac

SEQ ID NO: 527160 - DNA, 33 bp, Homo sapien
ggctaaaggaaaggtcgcaaatcagctgttaac

SEQ ID NO: 527161 - DNA, 33 bp, Homo sapien
ttttcattaaaaggaacttcaagtcacaactgc

SEQ ID NO: 527162 - DNA, 33 bp, Homo sapien
ttttcattaaaaggaatttcaagtcacaactgc

SEQ ID NO: 527163 - DNA, 33 bp, Homo sapien
tgtgtagtgtcataggccattgtagttattttg

SEQ ID NO: 527164 - DNA, 33 bp, Homo sapien
tgtgtagtgtcataggtcattgtagttattttg

SEQ ID NO: 527165 - DNA, 33 bp, Homo sapien
aagtagtactacataacattgatgaggtaagca

SEQ ID NO: 527166 - DNA, 33 bp, Homo sapien
aagtagtactacataatattgatgaggtaagca

SEQ ID NO: 527167 - DNA, 33 bp, Homo sapien
tagccagcagggaaaacttccaggtttgagaat

SEQ ID NO: 527168 - DNA, 33 bp, Homo sapien
tagccagcagggaaaatttccaggtttgagaat

SEQ ID NO: 527169 - DNA, 33 bp, Homo sapien
cgtgggtgtgaggacaacatcttgtagatggtc

SEQ ID NO: 527170 - DNA, 33 bp, Homo sapien
cgtgggtgtgaggacatcatcttgtagatggtc

SEQ ID NO: 527171 - DNA, 33 bp, Homo sapien
tagaataaacttggagaaaacagcaaaataaaa

SEQ ID NO: 527172 - DNA, 33 bp, Homo sapien
tagaataaacttggagtaaacagcaaaataaaa

SEQ ID NO: 527173 - DNA, 33 bp, Homo sapien
aattaataaccttataatagcctctaagtattc

SEQ ID NO: 527174 - DNA, 33 bp, Homo sapien
aattaataaccttatagtagcctctaagtattc

SEQ ID NO: 527175 - DNA, 33 bp, Homo sapien
acctcctctcttaccagtccttcctcttagtta

SEQ ID NO: 527176 - DNA, 33 bp, Homo sapien
acctcctctcttaccattccttcctcttagtta

SEQ ID NO: 527177 - DNA, 33 bp, Homo sapien
atttaaaatatttccacacgttctttgatactc

SEQ ID NO: 527178 - DNA, 33 bp, Homo sapien
atttaaaatatttccatacgttctttgatactc

SEQ ID NO: 527179 - DNA, 33 bp, Homo sapien
taattaaaatacggtcgctgcccaaagaagaca

SEQ ID NO: 527180 - DNA, 33 bp, Homo sapien
taattaaaatacggtctctgcccaaagaagaca

SEQ ID NO: 527181 - DNA, 33 bp, Homo sapien
taataagccatgctaaaagtgggctgtagaggt

SEQ ID NO: 527182 - DNA, 33 bp, Homo sapien
taataagccatgctaagagtgggctgtagaggt

SEQ ID NO: 527183 - DNA, 33 bp, Homo sapien
cgacatttctgcactacctattctgttttattg

SEQ ID NO: 527184 - DNA, 33 bp, Homo sapien
cgacatttctgcactatctattctgttttattg

SEQ ID NO: 527185 - DNA, 33 bp, Homo sapien
tatgtgcttatatgcaatgaggtattgattttt

SEQ ID NO: 527186 - DNA, 33 bp, Homo sapien
tatgtgcttatatgcagtgaggtattgattttt

SEQ ID NO: 527187 - DNA, 33 bp, Homo sapien
gcagaagcaagaaaatcacgtggttccagaaag

SEQ ID NO: 527188 - DNA, 33 bp, Homo sapien
gcagaagcaagaaaattacgtggttccagaaag

SEQ ID NO: 527189 - DNA, 33 bp, Homo sapien
gattagtcatttgcaactaaagagtcatgatga

SEQ ID NO: 527190 - DNA, 33 bp, Homo sapien
gattagtcatttgcaagtaaagagtcatgatga

SEQ ID NO: 527191 - DNA, 33 bp, Homo sapien
aactcacagcagttacaataaaaagaagaatac

SEQ ID NO: 527192 - DNA, 33 bp, Homo sapien
aactcacagcagttacgataaaaagaagaatac

SEQ ID NO: 527193 - DNA, 33 bp, Homo sapien
atcttaaaaatgagggaattatcctagattatc

SEQ ID NO: 527194 - DNA, 33 bp, Homo sapien
atcttaaaaatgaggggattatcctagattatc

SEQ ID NO: 527195 - DNA, 33 bp, Homo sapien
ttatttagcctactacaaggtgataaagcattt

SEQ ID NO: 527196 - DNA, 33 bp, Homo sapien
ttatttagcctactacgaggtgataaagcattt

SEQ ID NO: 527197 - DNA, 33 bp, Homo sapien
ttttgtaaataatttcacttttctggaactcat

SEQ ID NO: 527198 - DNA, 33 bp, Homo sapien
ttttgtaaataatttcgcttttctggaactcat

SEQ ID NO: 527199 - DNA, 33 bp, Homo sapien
accagtgctaggacccgctgtgacccactgtac

SEQ ID NO: 527200 - DNA, 33 bp, Homo sapien
accagtgctaggaccctctgtgacccactgtac

SEQ ID NO: 527201 - DNA, 33 bp, Homo sapien
ggtaataagtactatgcattaaaataaagcagg

SEQ ID NO: 527202 - DNA, 33 bp, Homo sapien
ggtaataagtactatggattaaaataaagcagg

SEQ ID NO: 527203 - DNA, 33 bp, Homo sapien
ccaggaagtctttggcaagctttaatctctgac

SEQ ID NO: 527204 - DNA, 33 bp, Homo sapien
ccaggaagtctttggcgagctttaatctctgac

SEQ ID NO: 527205 - DNA, 33 bp, Homo sapien
catatttttaaatcgagattggaaacttttcat

SEQ ID NO: 527206 - DNA, 33 bp, Homo sapien
catatttttaaatcgatattggaaacttttcat

SEQ ID NO: 527207 - DNA, 33 bp, Homo sapien
tgtatcttctttcaaagtctgtcagtgattgat

SEQ ID NO: 527208 - DNA, 33 bp, Homo sapien
tgtatcttctttcaaattctgtcagtgattgat

SEQ ID NO: 527209 - DNA, 33 bp, Homo sapien
atcctttaaaagagaaatggattcctattgcaa

SEQ ID NO: 527210 - DNA, 33 bp, Homo sapien
atcctttaaaagagaagtggattcctattgcaa

SEQ ID NO: 527211 - DNA, 33 bp, Homo sapien
tacattcttccaggaactagagacaacgtctgc

SEQ ID NO: 527212 - DNA, 33 bp, Homo sapien
tacattcttccaggaagtagagacaacgtctgc

SEQ ID NO: 527213 - DNA, 33 bp, Homo sapien
ctgaaccacaaaaccactgaaactgttatatca

SEQ ID NO: 527214 - DNA, 33 bp, Homo sapien
ctgaaccacaaaaccattgaaactgttatatca

SEQ ID NO: 527215 - DNA, 33 bp, Homo sapien
ctttctgctgtgatcaatgaagttataatggaa

SEQ ID NO: 527216 - DNA, 33 bp, Homo sapien
ctttctgctgtgatcagtgaagttataatggaa

SEQ ID NO: 527217 - DNA, 33 bp, Homo sapien
gactgaataaatgctaactatttctcactgtga

SEQ ID NO: 527218 - DNA, 33 bp, Homo sapien
gactgaataaatgctagctatttctcactgtga

SEQ ID NO: 527219 - DNA, 33 bp, Homo sapien
gaattctgacttttcaggtatcggattttcttt

SEQ ID NO: 527220 - DNA, 33 bp, Homo sapien
gaattctgacttttcatgtatcggattttcttt

SEQ ID NO: 527221 - DNA, 33 bp, Homo sapien
ttttgacagctaaggaaagtcttagaagattgc

SEQ ID NO: 527222 - DNA, 33 bp, Homo sapien
ttttgacagctaaggagagtcttagaagattgc

SEQ ID NO: 527223 - DNA, 33 bp, Homo sapien
gcttgaactaaagacaactaagctagcaattta

SEQ ID NO: 527224 - DNA, 33 bp, Homo sapien
gcttgaactaaagacacctaagctagcaattta

SEQ ID NO: 527225 - DNA, 33 bp, Homo sapien
tcactgaagtttaaaactacctagcatttctga

SEQ ID NO: 527226 - DNA, 33 bp, Homo sapien
tcactgaagtttaaaattacctagcatttctga

SEQ ID NO: 527227 - DNA, 33 bp, Homo sapien
gtactttgtgtcaaaagctcctgttttctgtta

SEQ ID NO: 527228 - DNA, 33 bp, Homo sapien
gtactttgtgtcaaaatctcctgttttctgtta

SEQ ID NO: 527229 - DNA, 33 bp, Homo sapien
acatggcctcctaatacgcaaaaagacctgggg

SEQ ID NO: 527230 - DNA, 33 bp, Homo sapien
acatggcctcctaatatgcaaaaagacctgggg

SEQ ID NO: 527231 - DNA, 33 bp, Homo sapien
aaattcaagaaaagaacaagttgtgacacaaat

SEQ ID NO: 527232 - DNA, 33 bp, Homo sapien
aaattcaagaaaagaagaagttgtgacacaaat

SEQ ID NO: 527233 - DNA, 33 bp, Homo sapien
cttttaactcagagggccccagtacgagtttaa

SEQ ID NO: 527234 - DNA, 33 bp, Homo sapien
cttttaactcagagggtcccagtacgagtttaa

SEQ ID NO: 527235 - DNA, 33 bp, Homo sapien
cgttgggaaatctgaaataccagcactgtatcc

SEQ ID NO: 527236 - DNA, 33 bp, Homo sapien
cgttgggaaatctgaagtaccagcactgtatcc

SEQ ID NO: 527237 - DNA, 33 bp, Homo sapien
gtaataattaactacactctattaaggctgatg

SEQ ID NO: 527238 - DNA, 33 bp, Homo sapien
gtaataattaactacagtctattaaggctgatg

SEQ ID NO: 527239 - DNA, 33 bp, Homo sapien
tttgacacagatggaacaggaggagacaatgtg

SEQ ID NO: 527240 - DNA, 33 bp, Homo sapien
tttgacacagatggaagaggaggagacaatgtg

SEQ ID NO: 527241 - DNA, 33 bp, Homo sapien
gaaagtctttgaaacacgatctttgttagaact

SEQ ID NO: 527242 - DNA, 33 bp, Homo sapien
gaaagtctttgaaacatgatctttgttagaact

SEQ ID NO: 527243 - DNA, 33 bp, Homo sapien
gctaagagttatcaaccggcagattcttcctgc

SEQ ID NO: 527244 - DNA, 33 bp, Homo sapien
gctaagagttatcaactggcagattcttcctgc

SEQ ID NO: 527245 - DNA, 33 bp, Homo sapien
atcaaaaggctattaaacaacctggaattaata

SEQ ID NO: 527246 - DNA, 33 bp, Homo sapien
atcaaaaggctattaaccaacctggaattaata

SEQ ID NO: 527247 - DNA, 33 bp, Homo sapien
gcttaccatgtgcttcaccctaaagatccaaaa

SEQ ID NO: 527248 - DNA, 33 bp, Homo sapien
gcttaccatgtgcttcgccctaaagatccaaaa

SEQ ID NO: 527249 - DNA, 33 bp, Homo sapien
caagatagagatgcagaaggataaatgttgctt

SEQ ID NO: 527250 - DNA, 33 bp, Homo sapien
caagatagagatgcaggaggataaatgttgctt

SEQ ID NO: 527251 - DNA, 33 bp, Homo sapien
tttgcagtgaagccaacaaagtttaagcttcag

SEQ ID NO: 527252 - DNA, 33 bp, Homo sapien
tttgcagtgaagccaataaagtttaagcttcag

SEQ ID NO: 527253 - DNA, 33 bp, Homo sapien
agcctcataattaagaagctgtttcgaaatgta

SEQ ID NO: 527254 - DNA, 33 bp, Homo sapien
agcctcataattaagaggctgtttcgaaatgta

SEQ ID NO: 527255 - DNA, 33 bp, Homo sapien
agttatctgtttaaaactggaaatggttggtaa

SEQ ID NO: 527256 - DNA, 33 bp, Homo sapien
agttatctgtttaaaattggaaatggttggtaa

SEQ ID NO: 527257 - DNA, 33 bp, Homo sapien
ggtattatatgcagtacggaacaccttagaaca

SEQ ID NO: 527258 - DNA, 33 bp, Homo sapien
ggtattatatgcagtatggaacaccttagaaca

SEQ ID NO: 527259 - DNA, 33 bp, Homo sapien
attcaatacagtaataagttgacaggtttgtag

SEQ ID NO: 527260 - DNA, 33 bp, Homo sapien
attcaatacagtaataggttgacaggtttgtag

SEQ ID NO: 527261 - DNA, 33 bp, Homo sapien
ggacaaaagggatcaactaagacttactcagag

SEQ ID NO: 527262 - DNA, 33 bp, Homo sapien
ggacaaaagggatcaattaagacttactcagag

SEQ ID NO: 527263 - DNA, 33 bp, Homo sapien
tgacttactggttctacctgtagccgtagttca

SEQ ID NO: 527264 - DNA, 33 bp, Homo sapien
tgacttactggttctatctgtagccgtagttca

SEQ ID NO: 527265 - DNA, 33 bp, Homo sapien
ggaatgtggggcacaaaaattaataagacatga

SEQ ID NO: 527266 - DNA, 33 bp, Homo sapien
ggaatgtggggcacaagaattaataagacatga

SEQ ID NO: 527267 - DNA, 33 bp, Homo sapien
gttataaacgagttgcgaaagtatgtccagatt

SEQ ID NO: 527268 - DNA, 33 bp, Homo sapien
gttataaacgagttgctaaagtatgtccagatt

SEQ ID NO: 527269 - DNA, 33 bp, Homo sapien
tttccaaataaatcgcacaaactcaattaacat

SEQ ID NO: 527270 - DNA, 33 bp, Homo sapien
tttccaaataaatcgcgcaaactcaattaacat

SEQ ID NO: 527271 - DNA, 33 bp, Homo sapien
tagcaggttagaactgcagtataaattccaaga

SEQ ID NO: 527272 - DNA, 33 bp, Homo sapien
tagcaggttagaactgtagtataaattccaaga

SEQ ID NO: 527273 - DNA, 33 bp, Homo sapien
ttaagtgtatcttgtgaaatatctaggactgcc

SEQ ID NO: 527274 - DNA, 33 bp, Homo sapien
ttaagtgtatcttgtgcaatatctaggactgcc

SEQ ID NO: 527275 - DNA, 33 bp, Homo sapien
agatataaagagcaataattcagtgtaaaatta

SEQ ID NO: 527276 - DNA, 33 bp, Homo sapien
agatataaagagcaatgattcagtgtaaaatta

SEQ ID NO: 527277 - DNA, 33 bp, Homo sapien
tgtacttgatatttaacatgaatgtgtgcttcc

SEQ ID NO: 527278 - DNA, 33 bp, Homo sapien
tgtacttgatatttaatatgaatgtgtgcttcc

SEQ ID NO: 527279 - DNA, 33 bp, Homo sapien
ttagtggtttccaagagatgaggggaggttgga

SEQ ID NO: 527280 - DNA, 33 bp, Homo sapien
ttagtggtttccaagatatgaggggaggttgga

SEQ ID NO: 527281 - DNA, 33 bp, Homo sapien
ctgaaaaattggtcacaggtagggttgaaagga

SEQ ID NO: 527282 - DNA, 33 bp, Homo sapien
ctgaaaaattggtcacgggtagggttgaaagga

SEQ ID NO: 527283 - DNA, 33 bp, Homo sapien
gtcctttgtgtcatacccataatacagaagaca

SEQ ID NO: 527284 - DNA, 33 bp, Homo sapien
gtcctttgtgtcatactcataatacagaagaca

SEQ ID NO: 527285 - DNA, 33 bp, Homo sapien
ccactggactcaaaaacagtcgatgtagaacca

SEQ ID NO: 527286 - DNA, 33 bp, Homo sapien
ccactggactcaaaaatagtcgatgtagaacca

SEQ ID NO: 527287 - DNA, 33 bp, Homo sapien
acaatttaaccttagccagatcctctccctcat

SEQ ID NO: 527288 - DNA, 33 bp, Homo sapien
acaatttaaccttagctagatcctctccctcat

SEQ ID NO: 527289 - DNA, 33 bp, Homo sapien
acatctttgagaagtacgaagaactggaatacc

SEQ ID NO: 527290 - DNA, 33 bp, Homo sapien
acatctttgagaagtaggaagaactggaatacc

SEQ ID NO: 527291 - DNA, 33 bp, Homo sapien
aaaagatctagtgataacctaaaagacaggagt

SEQ ID NO: 527292 - DNA, 33 bp, Homo sapien
aaaagatctagtgataccctaaaagacaggagt

SEQ ID NO: 527293 - DNA, 33 bp, Homo sapien
ccctctgaagagcaaaaaaaattacttattcag

SEQ ID NO: 527294 - DNA, 33 bp, Homo sapien
ccctctgaagagcaaacaaaattacttattcag

SEQ ID NO: 527295 - DNA, 33 bp, Homo sapien
ctaaattgctcaacagaatgctcactcagcagt

SEQ ID NO: 527296 - DNA, 33 bp, Homo sapien
ctaaattgctcaacaggatgctcactcagcagt

SEQ ID NO: 527297 - DNA, 33 bp, Homo sapien
atacaaattcccaccacgtgagaaaatctttta

SEQ ID NO: 527298 - DNA, 33 bp, Homo sapien
atacaaattcccaccatgtgagaaaatctttta

SEQ ID NO: 527299 - DNA, 33 bp, Homo sapien
taaaaaatggtaccacagcattaacagatacct

SEQ ID NO: 527300 - DNA, 33 bp, Homo sapien
taaaaaatggtaccacggcattaacagatacct

SEQ ID NO: 527301 - DNA, 33 bp, Homo sapien
aattacaaaagtagacagcaaacatattttgaa

SEQ ID NO: 527302 - DNA, 33 bp, Homo sapien
aattacaaaagtagacggcaaacatattttgaa

SEQ ID NO: 527303 - DNA, 33 bp, Homo sapien
ttttcaggttgaaagaactttttatgccaatta

SEQ ID NO: 527304 - DNA, 33 bp, Homo sapien
ttttcaggttgaaagacctttttatgccaatta

SEQ ID NO: 527305 - DNA, 33 bp, Homo sapien
gtgaacacaattaaaaatgaacagttatgccta

SEQ ID NO: 527306 - DNA, 33 bp, Homo sapien
gtgaacacaattaaaagtgaacagttatgccta

SEQ ID NO: 527307 - DNA, 33 bp, Homo sapien
gccatgtgtaacaccaacatcttttagggacct

SEQ ID NO: 527308 - DNA, 33 bp, Homo sapien
gccatgtgtaacaccagcatcttttagggacct

SEQ ID NO: 527309 - DNA, 33 bp, Homo sapien
gcagcattgactaaaacgtaaaacagaggatga

SEQ ID NO: 527310 - DNA, 33 bp, Homo sapien
gcagcattgactaaaatgtaaaacagaggatga

SEQ ID NO: 527311 - DNA, 33 bp, Homo sapien
ctctttcagaagaccaaagtgctaatgccattc

SEQ ID NO: 527312 - DNA, 33 bp, Homo sapien
ctctttcagaagaccagagtgctaatgccattc

SEQ ID NO: 527313 - DNA, 33 bp, Homo sapien
ctaattgtaatgaaaacgtatttttgccagatc

SEQ ID NO: 527314 - DNA, 33 bp, Homo sapien
ctaattgtaatgaaaatgtatttttgccagatc

SEQ ID NO: 527315 - DNA, 33 bp, Homo sapien
aaaattgatactttacagcttgacacatggttt

SEQ ID NO: 527316 - DNA, 33 bp, Homo sapien
aaaattgatactttacggcttgacacatggttt

SEQ ID NO: 527317 - DNA, 33 bp, Homo sapien
gtgtgagtacaaatgacaggaacaatggacatc

SEQ ID NO: 527318 - DNA, 33 bp, Homo sapien
gtgtgagtacaaatgagaggaacaatggacatc

SEQ ID NO: 527319 - DNA, 33 bp, Homo sapien
gatataaaagatcttaacagcttgaggtgcaat

SEQ ID NO: 527320 - DNA, 33 bp, Homo sapien
gatataaaagatcttagcagcttgaggtgcaat

SEQ ID NO: 527321 - DNA, 33 bp, Homo sapien
tatggtgttggaagacagtaattgcgcctggaa

SEQ ID NO: 527322 - DNA, 33 bp, Homo sapien
tatggtgttggaagaccgtaattgcgcctggaa

SEQ ID NO: 527323 - DNA, 33 bp, Homo sapien
ttaatgtggaaaggcacccgtattaattttcta

SEQ ID NO: 527324 - DNA, 33 bp, Homo sapien
ttaatgtggaaaggcatccgtattaattttcta

SEQ ID NO: 527325 - DNA, 33 bp, Homo sapien
gtgaaagtccttgttaagaaggaaatttgaagg

SEQ ID NO: 527326 - DNA, 33 bp, Homo sapien
gtgaaagtccttgttaggaaggaaatttgaagg

SEQ ID NO: 527327 - DNA, 33 bp, Homo sapien
actccaaactggttctaaaagtttcttccagga

SEQ ID NO: 527328 - DNA, 33 bp, Homo sapien
actccaaactggttctgaaagtttcttccagga

SEQ ID NO: 527329 - DNA, 33 bp, Homo sapien
ccaaagacacttaacccgagccacatgaggatt

SEQ ID NO: 527330 - DNA, 33 bp, Homo sapien
ccaaagacacttaacctgagccacatgaggatt

SEQ ID NO: 527331 - DNA, 33 bp, Homo sapien
ttcaagtgactcagaaaattatatatatgtatg

SEQ ID NO: 527332 - DNA, 33 bp, Homo sapien
ttcaagtgactcagaacattatatatatgtatg

SEQ ID NO: 527333 - DNA, 33 bp, Homo sapien
ccacaacagatcacgacggaacccttgaaaacg

SEQ ID NO: 527334 - DNA, 33 bp, Homo sapien
ccacaacagatcacgatggaacccttgaaaacg

SEQ ID NO: 527335 - DNA, 33 bp, Homo sapien
ccaaatttgataaaaacggcaaccctataagta

SEQ ID NO: 527336 - DNA, 33 bp, Homo sapien
ccaaatttgataaaaatggcaaccctataagta

SEQ ID NO: 527337 - DNA, 33 bp, Homo sapien
tacaggagccataggaaaatattggaatcaatt

SEQ ID NO: 527338 - DNA, 33 bp, Homo sapien
tacaggagccataggagaatattggaatcaatt

SEQ ID NO: 527339 - DNA, 33 bp, Homo sapien
agttttcatcactaataatcgaaatgtccaccc

SEQ ID NO: 527340 - DNA, 33 bp, Homo sapien
agttttcatcactaatgatcgaaatgtccaccc

SEQ ID NO: 527341 - DNA, 33 bp, Homo sapien
aagctagaatttggaaatagctcctgtggtagt

SEQ ID NO: 527342 - DNA, 33 bp, Homo sapien
aagctagaatttggaactagctcctgtggtagt

SEQ ID NO: 527343 - DNA, 33 bp, Homo sapien
ttaaccaggtattagaagtctgaaaggcaaaag

SEQ ID NO: 527344 - DNA, 33 bp, Homo sapien
ttaaccaggtattagaggtctgaaaggcaaaag

SEQ ID NO: 527345 - DNA, 33 bp, Homo sapien
tggggtgaataaaagaaacactcaacaggaaag

SEQ ID NO: 527346 - DNA, 33 bp, Homo sapien
tggggtgaataaaagacacactcaacaggaaag

SEQ ID NO: 527347 - DNA, 33 bp, Homo sapien
attgttccacctgaccaaagatgagactaaacc

SEQ ID NO: 527348 - DNA, 33 bp, Homo sapien
attgttccacctgaccgaagatgagactaaacc

SEQ ID NO: 527349 - DNA, 33 bp, Homo sapien
ttcagggccggcagaacggcataaatcagtttt

SEQ ID NO: 527350 - DNA, 33 bp, Homo sapien
ttcagggccggcagaatggcataaatcagtttt

SEQ ID NO: 527351 - DNA, 33 bp, Homo sapien
tctcccttataaaagccctgtcaaagctaggca

SEQ ID NO: 527352 - DNA, 33 bp, Homo sapien
tctcccttataaaagctctgtcaaagctaggca

SEQ ID NO: 527353 - DNA, 33 bp, Homo sapien
tttatggttgttacacagagcattattgtggta

SEQ ID NO: 527354 - DNA, 33 bp, Homo sapien
tttatggttgttacacggagcattattgtggta

SEQ ID NO: 527355 - DNA, 33 bp, Homo sapien
tggaggagaatgttgacatatagccacatggaa

SEQ ID NO: 527356 - DNA, 33 bp, Homo sapien
tggaggagaatgttgatatatagccacatggaa

SEQ ID NO: 527357 - DNA, 33 bp, Homo sapien
actttgaagcaattccaaatggcactctctagg

SEQ ID NO: 527358 - DNA, 33 bp, Homo sapien
actttgaagcaattccgaatggcactctctagg

SEQ ID NO: 527359 - DNA, 33 bp, Homo sapien
attaagttggtggagaagcactttgctgaacaa

SEQ ID NO: 527360 - DNA, 33 bp, Homo sapien
attaagttggtggagaggcactttgctgaacaa

SEQ ID NO: 527361 - DNA, 33 bp, Homo sapien
aaaaacactagggctcagaaactctgttaaatt

SEQ ID NO: 527362 - DNA, 33 bp, Homo sapien
aaaaacactagggctccgaaactctgttaaatt

SEQ ID NO: 527363 - DNA, 33 bp, Homo sapien
gaattccctctgtccgaaatgctcttcgtgttc

SEQ ID NO: 527364 - DNA, 33 bp, Homo sapien
gaattccctctgtccggaatgctcttcgtgttc

SEQ ID NO: 527365 - DNA, 33 bp, Homo sapien
aacagaggagaaataaacgtccactggatcttt

SEQ ID NO: 527366 - DNA, 33 bp, Homo sapien
aacagaggagaaataagcgtccactggatcttt

SEQ ID NO: 527367 - DNA, 33 bp, Homo sapien
cctgactaccatatccagcagctaacgaactct

SEQ ID NO: 527368 - DNA, 33 bp, Homo sapien
cctgactaccatatcctgcagctaacgaactct

SEQ ID NO: 527369 - DNA, 33 bp, Homo sapien
ttgaaaactattgtcaagaactaggagatcagc

SEQ ID NO: 527370 - DNA, 33 bp, Homo sapien
ttgaaaactattgtcaggaactaggagatcagc

SEQ ID NO: 527371 - DNA, 33 bp, Homo sapien
ctaggagcttatttcccacattaggtcaaaagc

SEQ ID NO: 527372 - DNA, 33 bp, Homo sapien
ctaggagcttatttcctacattaggtcaaaagc

SEQ ID NO: 527373 - DNA, 33 bp, Homo sapien
tgaggactaatgaacacgagtgggcaaatccaa

SEQ ID NO: 527374 - DNA, 33 bp, Homo sapien
tgaggactaatgaacatgagtgggcaaatccaa

SEQ ID NO: 527375 - DNA, 33 bp, Homo sapien
gaaaaacatgatgctcagaaaaaatacctaaca

SEQ ID NO: 527376 - DNA, 33 bp, Homo sapien
gaaaaacatgatgctcggaaaaaatacctaaca

SEQ ID NO: 527377 - DNA, 33 bp, Homo sapien
aaggaaaagtcaaagacagtcaaaattacttca

SEQ ID NO: 527378 - DNA, 33 bp, Homo sapien
aaggaaaagtcaaagatagtcaaaattacttca

SEQ ID NO: 527379 - DNA, 33 bp, Homo sapien
tttttctagaatgccaatctgaacattgagacc

SEQ ID NO: 527380 - DNA, 33 bp, Homo sapien
tttttctagaatgccagtctgaacattgagacc

SEQ ID NO: 527381 - DNA, 33 bp, Homo sapien
acctcatttatgccacaggtagtatcatgacct

SEQ ID NO: 527382 - DNA, 33 bp, Homo sapien
acctcatttatgccacgggtagtatcatgacct

SEQ ID NO: 527383 - DNA, 33 bp, Homo sapien
tcgtttgttttcttgacgtgtgcagtttagcca

SEQ ID NO: 527384 - DNA, 33 bp, Homo sapien
tcgtttgttttcttgatgtgtgcagtttagcca

SEQ ID NO: 527385 - DNA, 33 bp, Homo sapien
cttgcagcagtcatagccagggagatttaaaaa

SEQ ID NO: 527386 - DNA, 33 bp, Homo sapien
cttgcagcagtcatagtcagggagatttaaaaa

SEQ ID NO: 527387 - DNA, 33 bp, Homo sapien
taacacatagtaagcactcgctaaacgctagct

SEQ ID NO: 527388 - DNA, 33 bp, Homo sapien
taacacatagtaagcagtcgctaaacgctagct

SEQ ID NO: 527389 - DNA, 33 bp, Homo sapien
tgaggcacaacccagacgctcagtgttccagca

SEQ ID NO: 527390 - DNA, 33 bp, Homo sapien
tgaggcacaacccagaggctcagtgttccagca

SEQ ID NO: 527391 - DNA, 33 bp, Homo sapien
ctgagccacttccaaacagagtccatattcaga

SEQ ID NO: 527392 - DNA, 33 bp, Homo sapien
ctgagccacttccaaatagagtccatattcaga

SEQ ID NO: 527393 - DNA, 33 bp, Homo sapien
aggtctttggagcaaacgctagtcattatctgt

SEQ ID NO: 527394 - DNA, 33 bp, Homo sapien
aggtctttggagcaaaggctagtcattatctgt

SEQ ID NO: 527395 - DNA, 33 bp, Homo sapien
aacttgtttcttgttcccaatcttctccagaaa

SEQ ID NO: 527396 - DNA, 33 bp, Homo sapien
aacttgtttcttgttctcaatcttctccagaaa

SEQ ID NO: 527397 - DNA, 33 bp, Homo sapien
gccacatcagatgtcccaaaaaggccctgggct

SEQ ID NO: 527398 - DNA, 33 bp, Homo sapien
gccacatcagatgtcctaaaaaggccctgggct

SEQ ID NO: 527399 - DNA, 33 bp, Homo sapien
catcatgactgaatcaaccaagaaacggaagaa

SEQ ID NO: 527400 - DNA, 33 bp, Homo sapien
catcatgactgaatcagccaagaaacggaagaa

SEQ ID NO: 527401 - DNA, 33 bp, Homo sapien
gccatgatgtctacaacgagtggtgatgctgtc

SEQ ID NO: 527402 - DNA, 33 bp, Homo sapien
gccatgatgtctacaatgagtggtgatgctgtc

SEQ ID NO: 527403 - DNA, 33 bp, Homo sapien
cactggctggggtaaaattgtgtcagtatgaat

SEQ ID NO: 527404 - DNA, 33 bp, Homo sapien
cactggctggggtaaagttgtgtcagtatgaat

SEQ ID NO: 527405 - DNA, 33 bp, Homo sapien
gaggattaagtttatacgcaggtatggttacca

SEQ ID NO: 527406 - DNA, 33 bp, Homo sapien
gaggattaagtttatatgcaggtatggttacca

SEQ ID NO: 527407 - DNA, 33 bp, Homo sapien
gaaaggcccgtttatacagagggagttgatgtt

SEQ ID NO: 527408 - DNA, 33 bp, Homo sapien
gaaaggcccgtttatatagagggagttgatgtt

SEQ ID NO: 527409 - DNA, 33 bp, Homo sapien
attgataagaaaggaaatagttactggaccata

SEQ ID NO: 527410 - DNA, 33 bp, Homo sapien
attgataagaaaggaagtagttactggaccata

SEQ ID NO: 527411 - DNA, 33 bp, Homo sapien
ggactctgacacaaatcagagaaggaagttcca

SEQ ID NO: 527412 - DNA, 33 bp, Homo sapien
ggactctgacacaaatgagagaaggaagttcca

SEQ ID NO: 527413 - DNA, 33 bp, Homo sapien
ctagaagggatgaggaaataaactttaaaatgc

SEQ ID NO: 527414 - DNA, 33 bp, Homo sapien
ctagaagggatgaggacataaactttaaaatgc

SEQ ID NO: 527415 - DNA, 33 bp, Homo sapien
agttctgcccgagtgaaggtaagatgccagctg

SEQ ID NO: 527416 - DNA, 33 bp, Homo sapien
agttctgcccgagtgacggtaagatgccagctg

SEQ ID NO: 527417 - DNA, 33 bp, Homo sapien
atgtcatctgtctagaatatattttcaactctc

SEQ ID NO: 527418 - DNA, 33 bp, Homo sapien
atgtcatctgtctagagtatattttcaactctc

SEQ ID NO: 527419 - DNA, 33 bp, Homo sapien
atgtacaagattgagacgtacaaaactgaaggc

SEQ ID NO: 527420 - DNA, 33 bp, Homo sapien
atgtacaagattgagatgtacaaaactgaaggc

SEQ ID NO: 527421 - DNA, 33 bp, Homo sapien
gtttcccttaggatcaactgtatttgccatttg

SEQ ID NO: 527422 - DNA, 33 bp, Homo sapien
gtttcccttaggatcagctgtatttgccatttg

SEQ ID NO: 527423 - DNA, 33 bp, Homo sapien
atcaagagggccaagactcaaaagtggatctcc

SEQ ID NO: 527424 - DNA, 33 bp, Homo sapien
atcaagagggccaagattcaaaagtggatctcc

SEQ ID NO: 527425 - DNA, 33 bp, Homo sapien
gagacttaatttgatacggctggagagcaggat

SEQ ID NO: 527426 - DNA, 33 bp, Homo sapien
gagacttaatttgatatggctggagagcaggat

SEQ ID NO: 527427 - DNA, 33 bp, Homo sapien
gttaaacataaagaacaatgaaagactatgtct

SEQ ID NO: 527428 - DNA, 33 bp, Homo sapien
gttaaacataaagaacgatgaaagactatgtct

SEQ ID NO: 527429 - DNA, 33 bp, Homo sapien
aaattggtcccataatgagaggcatttcctctg

SEQ ID NO: 527430 - DNA, 33 bp, Homo sapien
aaattggtcccataattagaggcatttcctctg

SEQ ID NO: 527431 - DNA, 33 bp, Homo sapien
atttcttcttcttgcactgagatcactggatta

SEQ ID NO: 527432 - DNA, 33 bp, Homo sapien
atttcttcttcttgcattgagatcactggatta

SEQ ID NO: 527433 - DNA, 33 bp, Homo sapien
attctctcagcctagaaccttctcactttgatt

SEQ ID NO: 527434 - DNA, 33 bp, Homo sapien
attctctcagcctagacccttctcactttgatt

SEQ ID NO: 527435 - DNA, 33 bp, Homo sapien
aaccaccaggagtatcactttacacccactagg

SEQ ID NO: 527436 - DNA, 33 bp, Homo sapien
aaccaccaggagtatcgctttacacccactagg

SEQ ID NO: 527437 - DNA, 33 bp, Homo sapien
ttcaatattgcttttcacacggggtaacttttt

SEQ ID NO: 527438 - DNA, 33 bp, Homo sapien
ttcaatattgcttttcgcacggggtaacttttt

SEQ ID NO: 527439 - DNA, 33 bp, Homo sapien
cttatttctttgcacaacctcttctaccactca

SEQ ID NO: 527440 - DNA, 33 bp, Homo sapien
cttatttctttgcacaccctcttctaccactca

SEQ ID NO: 527441 - DNA, 33 bp, Homo sapien
atgcacgtttcttcaaagtttcatcttttctca

SEQ ID NO: 527442 - DNA, 33 bp, Homo sapien
atgcacgtttcttcaaggtttcatcttttctca

SEQ ID NO: 527443 - DNA, 33 bp, Homo sapien
ttccctggataccaaacggaagtgatttcaact

SEQ ID NO: 527444 - DNA, 33 bp, Homo sapien
ttccctggataccaaatggaagtgatttcaact

SEQ ID NO: 527445 - DNA, 33 bp, Homo sapien
gctttcatgtacttaccgagcactatgtttggc

SEQ ID NO: 527446 - DNA, 33 bp, Homo sapien
gctttcatgtacttactgagcactatgtttggc

SEQ ID NO: 527447 - DNA, 33 bp, Homo sapien
attttacatatgatacaactgaggcttagagga

SEQ ID NO: 527448 - DNA, 33 bp, Homo sapien
attttacatatgataccactgaggcttagagga

SEQ ID NO: 527449 - DNA, 33 bp, Homo sapien
gtgttcttagatgaaacaattggcctagtattc

SEQ ID NO: 527450 - DNA, 33 bp, Homo sapien
gtgttcttagatgaaataattggcctagtattc

SEQ ID NO: 527451 - DNA, 33 bp, Homo sapien
gtgtgtgtattaatgaagtatctgactttaaaa

SEQ ID NO: 527452 - DNA, 33 bp, Homo sapien
gtgtgtgtattaatgacgtatctgactttaaaa

SEQ ID NO: 527453 - DNA, 33 bp, Homo sapien
gcacttaaggaattagaatgtgaccataactat

SEQ ID NO: 527454 - DNA, 33 bp, Homo sapien
gcacttaaggaattagcatgtgaccataactat

SEQ ID NO: 527455 - DNA, 33 bp, Homo sapien
gcatagaatcatccagaaaatttggtgaacaca

SEQ ID NO: 527456 - DNA, 33 bp, Homo sapien
gcatagaatcatccaggaaatttggtgaacaca

SEQ ID NO: 527457 - DNA, 33 bp, Homo sapien
aaaacactaccctatactaagctgcctcatggg

SEQ ID NO: 527458 - DNA, 33 bp, Homo sapien
aaaacactaccctatagtaagctgcctcatggg

SEQ ID NO: 527459 - DNA, 33 bp, Homo sapien
aaaactcagtgagttgaaagcaagaaaaattag

SEQ ID NO: 527460 - DNA, 33 bp, Homo sapien
aaaactcagtgagttggaagcaagaaaaattag

SEQ ID NO: 527461 - DNA, 33 bp, Homo sapien
tgacaactttttcagcactttgaatatgtcatc

SEQ ID NO: 527462 - DNA, 33 bp, Homo sapien
tgacaactttttcagcgctttgaatatgtcatc

SEQ ID NO: 527463 - DNA, 33 bp, Homo sapien
gggtgaaggtggaggaactgtgctatattatag

SEQ ID NO: 527464 - DNA, 33 bp, Homo sapien
gggtgaaggtggaggagctgtgctatattatag

SEQ ID NO: 527465 - DNA, 33 bp, Homo sapien
cctgacacactggacaataacagttggaactga

SEQ ID NO: 527466 - DNA, 33 bp, Homo sapien
cctgacacactggacattaacagttggaactga

SEQ ID NO: 527467 - DNA, 33 bp, Homo sapien
aatttcctccttcaataagaactcggcaatatc

SEQ ID NO: 527468 - DNA, 33 bp, Homo sapien
aatttcctccttcaatgagaactcggcaatatc

SEQ ID NO: 527469 - DNA, 33 bp, Homo sapien
gaaggtgccatgtcaacagagatgatggagggg

SEQ ID NO: 527470 - DNA, 33 bp, Homo sapien
gaaggtgccatgtcaatagagatgatggagggg

SEQ ID NO: 527471 - DNA, 33 bp, Homo sapien
tagtctagcctcaacaaattaggttttttggac

SEQ ID NO: 527472 - DNA, 33 bp, Homo sapien
tagtctagcctcaacagattaggttttttggac

SEQ ID NO: 527473 - DNA, 33 bp, Homo sapien
aggatgtaaaaaagcacagtatgtccaaaaaac

SEQ ID NO: 527474 - DNA, 33 bp, Homo sapien
aggatgtaaaaaagcatagtatgtccaaaaaac

SEQ ID NO: 527475 - DNA, 33 bp, Homo sapien
ttcagtgagcctgccaactgaaatttcagaaca

SEQ ID NO: 527476 - DNA, 33 bp, Homo sapien
ttcagtgagcctgccagctgaaatttcagaaca

SEQ ID NO: 527477 - DNA, 33 bp, Homo sapien
tggtgggttgtcttccgcagctttaggtttatt

SEQ ID NO: 527478 - DNA, 33 bp, Homo sapien
tggtgggttgtcttcctcagctttaggtttatt

SEQ ID NO: 527479 - DNA, 33 bp, Homo sapien
gtgatttaggcatgcacaagttgtttttctttg

SEQ ID NO: 527480 - DNA, 33 bp, Homo sapien
gtgatttaggcatgcataagttgtttttctttg

SEQ ID NO: 527481 - DNA, 33 bp, Homo sapien
actttaatgtaaaccacggactctgggtaatta

SEQ ID NO: 527482 - DNA, 33 bp, Homo sapien
actttaatgtaaaccatggactctgggtaatta

SEQ ID NO: 527483 - DNA, 33 bp, Homo sapien
ccagtaataggatcccacagaaagaatcagaca

SEQ ID NO: 527484 - DNA, 33 bp, Homo sapien
ccagtaataggatcccgcagaaagaatcagaca

SEQ ID NO: 527485 - DNA, 33 bp, Homo sapien
cttcttggatctcttccaattcaacaggcaatg

SEQ ID NO: 527486 - DNA, 33 bp, Homo sapien
cttcttggatctcttctaattcaacaggcaatg

SEQ ID NO: 527487 - DNA, 33 bp, Homo sapien
ttgaagatccaaaaaaggaagatagtaggcatt

SEQ ID NO: 527488 - DNA, 33 bp, Homo sapien
ttgaagatccaaaaaatgaagatagtaggcatt

SEQ ID NO: 527489 - DNA, 33 bp, Homo sapien
ggcatttagggtttaacatctgtggtttcagct

SEQ ID NO: 527490 - DNA, 33 bp, Homo sapien
ggcatttagggtttaatatctgtggtttcagct

SEQ ID NO: 527491 - DNA, 33 bp, Homo sapien
agtggaggcttccatgcaggtaggtacaaacag

SEQ ID NO: 527492 - DNA, 33 bp, Homo sapien
agtggaggcttccatgtaggtaggtacaaacag

SEQ ID NO: 527493 - DNA, 33 bp, Homo sapien
gttttatttaacaaaagggctagctagaggcag

SEQ ID NO: 527494 - DNA, 33 bp, Homo sapien
gttttatttaacaaaatggctagctagaggcag

SEQ ID NO: 527495 - DNA, 33 bp, Homo sapien
aagctggtgttgactgaaagttttatggtaagt

SEQ ID NO: 527496 - DNA, 33 bp, Homo sapien
aagctggtgttgactggaagttttatggtaagt

SEQ ID NO: 527497 - DNA, 33 bp, Homo sapien
caatacggacaggtcacgtaaaagaaaagcctc

SEQ ID NO: 527498 - DNA, 33 bp, Homo sapien
caatacggacaggtcatgtaaaagaaaagcctc

SEQ ID NO: 527499 - DNA, 33 bp, Homo sapien
aagttcctacagagtaactgcatatttgataaa

SEQ ID NO: 527500 - DNA, 33 bp, Homo sapien
aagttcctacagagtagctgcatatttgataaa

SEQ ID NO: 527501 - DNA, 33 bp, Homo sapien
catggagctaggttgaccaaagaaaagatttgc

SEQ ID NO: 527502 - DNA, 33 bp, Homo sapien
catggagctaggttgagcaaagaaaagatttgc

SEQ ID NO: 527503 - DNA, 33 bp, Homo sapien
tttaaactgacagacaatggaaaatcccaaagg

SEQ ID NO: 527504 - DNA, 33 bp, Homo sapien
tttaaactgacagacagtggaaaatcccaaagg

SEQ ID NO: 527505 - DNA, 33 bp, Homo sapien
ctccaactgggtttctcaatttattgttgatgg

SEQ ID NO: 527506 - DNA, 33 bp, Homo sapien
ctccaactgggtttctgaatttattgttgatgg

SEQ ID NO: 527507 - DNA, 33 bp, Homo sapien
ttctagtgagtctttcaaaatatttcctgactt

SEQ ID NO: 527508 - DNA, 33 bp, Homo sapien
ttctagtgagtctttcgaaatatttcctgactt

SEQ ID NO: 527509 - DNA, 33 bp, Homo sapien
aggcgtagtggtttcccatattgtggaggaatt

SEQ ID NO: 527510 - DNA, 33 bp, Homo sapien
aggcgtagtggtttcctatattgtggaggaatt

SEQ ID NO: 527511 - DNA, 33 bp, Homo sapien
actaggaaaaataagaatagcaccagagggaac

SEQ ID NO: 527512 - DNA, 33 bp, Homo sapien
actaggaaaaataagactagcaccagagggaac

SEQ ID NO: 527513 - DNA, 33 bp, Homo sapien
cttgtgctgattcccaatgagacagtagcactt

SEQ ID NO: 527514 - DNA, 33 bp, Homo sapien
cttgtgctgattcccagtgagacagtagcactt

SEQ ID NO: 527515 - DNA, 33 bp, Homo sapien
tccttgggctttataaagaaaggtggtagtccc

SEQ ID NO: 527516 - DNA, 33 bp, Homo sapien
tccttgggctttataaggaaaggtggtagtccc

SEQ ID NO: 527517 - DNA, 33 bp, Homo sapien
ttatttatctgatgaaagaactctacaagcatc

SEQ ID NO: 527518 - DNA, 33 bp, Homo sapien
ttatttatctgatgaaggaactctacaagcatc

SEQ ID NO: 527519 - DNA, 33 bp, Homo sapien
gccaaggtctccaaaaatcaatgcctgtgctta

SEQ ID NO: 527520 - DNA, 33 bp, Homo sapien
gccaaggtctccaaaagtcaatgcctgtgctta

SEQ ID NO: 527521 - DNA, 33 bp, Homo sapien
caccagtgacttatgacaccttagcaaagcctt

SEQ ID NO: 527522 - DNA, 33 bp, Homo sapien
caccagtgacttatgataccttagcaaagcctt

SEQ ID NO: 527523 - DNA, 33 bp, Homo sapien
ctgatgtgtgttcacaaaagtacaagagcctat

SEQ ID NO: 527524 - DNA, 33 bp, Homo sapien
ctgatgtgtgttcacagaagtacaagagcctat

SEQ ID NO: 527525 - DNA, 33 bp, Homo sapien
gtttgcttgaaaataacatggctgtcacatggc

SEQ ID NO: 527526 - DNA, 33 bp, Homo sapien
gtttgcttgaaaataatatggctgtcacatggc

SEQ ID NO: 527527 - DNA, 33 bp, Homo sapien
ctgcattttattgccacgtcggcagtaggtcag

SEQ ID NO: 527528 - DNA, 33 bp, Homo sapien
ctgcattttattgccatgtcggcagtaggtcag

SEQ ID NO: 527529 - DNA, 33 bp, Homo sapien
aaagtgctctgaacaactgggggtaaaaataag

SEQ ID NO: 527530 - DNA, 33 bp, Homo sapien
aaagtgctctgaacaattgggggtaaaaataag

SEQ ID NO: 527531 - DNA, 33 bp, Homo sapien
tccaatttgctgtaggaaactggtgctgatctt

SEQ ID NO: 527532 - DNA, 33 bp, Homo sapien
tccaatttgctgtagggaactggtgctgatctt

SEQ ID NO: 527533 - DNA, 33 bp, Homo sapien
tgtctctgatgtcttcacttgggtcatagagct

SEQ ID NO: 527534 - DNA, 33 bp, Homo sapien
tgtctctgatgtcttcgcttgggtcatagagct

SEQ ID NO: 527535 - DNA, 33 bp, Homo sapien
ggaaggaaatgcttcaactgggatgggtaaaga

SEQ ID NO: 527536 - DNA, 33 bp, Homo sapien
ggaaggaaatgcttcatctgggatgggtaaaga

SEQ ID NO: 527537 - DNA, 33 bp, Homo sapien
caccagttgccttccacgtcgtcagactctgat

SEQ ID NO: 527538 - DNA, 33 bp, Homo sapien
caccagttgccttccatgtcgtcagactctgat

SEQ ID NO: 527539 - DNA, 33 bp, Homo sapien
taacacttacataacacctgaagtatcataaga

SEQ ID NO: 527540 - DNA, 33 bp, Homo sapien
taacacttacataacatctgaagtatcataaga

SEQ ID NO: 527541 - DNA, 33 bp, Homo sapien
gatttgtatgttttaaagatggctttgaaatcc

SEQ ID NO: 527542 - DNA, 33 bp, Homo sapien
gatttgtatgttttaaggatggctttgaaatcc

SEQ ID NO: 527543 - DNA, 33 bp, Homo sapien
atctgagaggattagaaggaacagtgcccagtg

SEQ ID NO: 527544 - DNA, 33 bp, Homo sapien
atctgagaggattagagggaacagtgcccagtg

SEQ ID NO: 527545 - DNA, 33 bp, Homo sapien
agttccgttttgcccacgttgtgttgaaagagg

SEQ ID NO: 527546 - DNA, 33 bp, Homo sapien
agttccgttttgcccatgttgtgttgaaagagg

SEQ ID NO: 527547 - DNA, 33 bp, Homo sapien
agttctttacatgaacaaaagtaacctaagaaa

SEQ ID NO: 527548 - DNA, 33 bp, Homo sapien
agttctttacatgaacgaaagtaacctaagaaa

SEQ ID NO: 527549 - DNA, 33 bp, Homo sapien
gaaacaaagtctatcaagtctccataacttcca

SEQ ID NO: 527550 - DNA, 33 bp, Homo sapien
gaaacaaagtctatcaggtctccataacttcca

SEQ ID NO: 527551 - DNA, 33 bp, Homo sapien
actgatttaacttgaacagtattacctttgagg

SEQ ID NO: 527552 - DNA, 33 bp, Homo sapien
actgatttaacttgaagagtattacctttgagg

SEQ ID NO: 527553 - DNA, 33 bp, Homo sapien
ataaagagcataataaagtgtaacatggaaaac

SEQ ID NO: 527554 - DNA, 33 bp, Homo sapien
ataaagagcataataacgtgtaacatggaaaac

SEQ ID NO: 527555 - DNA, 33 bp, Homo sapien
tgcctgttgcttttgccaacaaactgctttgcc

SEQ ID NO: 527556 - DNA, 33 bp, Homo sapien
tgcctgttgcttttgctaacaaactgctttgcc

SEQ ID NO: 527557 - DNA, 33 bp, Homo sapien
ttttcaactggatatacactattgtgatagctt

SEQ ID NO: 527558 - DNA, 33 bp, Homo sapien
ttttcaactggatatatactattgtgatagctt

SEQ ID NO: 527559 - DNA, 33 bp, Homo sapien
cctcccacttagctccagaagatatctgctatg

SEQ ID NO: 527560 - DNA, 33 bp, Homo sapien
cctcccacttagctccggaagatatctgctatg

SEQ ID NO: 527561 - DNA, 33 bp, Homo sapien
gcctctgcctgagtgacgatggcaacactgctc

SEQ ID NO: 527562 - DNA, 33 bp, Homo sapien
gcctctgcctgagtgatgatggcaacactgctc

SEQ ID NO: 527563 - DNA, 33 bp, Homo sapien
atcatctaggtacctcaccctctgaacttccac

SEQ ID NO: 527564 - DNA, 33 bp, Homo sapien
atcatctaggtacctcgccctctgaacttccac

SEQ ID NO: 527565 - DNA, 33 bp, Homo sapien
gccaggagatacaaaaaggtcagagagaagaga

SEQ ID NO: 527566 - DNA, 33 bp, Homo sapien
gccaggagatacaaaagggtcagagagaagaga

SEQ ID NO: 527567 - DNA, 33 bp, Homo sapien
tatgtgaaatcctatcactctctctgctgctga

SEQ ID NO: 527568 - DNA, 33 bp, Homo sapien
tatgtgaaatcctatctctctctctgctgctga

SEQ ID NO: 527569 - DNA, 33 bp, Homo sapien
ccactggctgtcagaaccactgaaacctgctcc

SEQ ID NO: 527570 - DNA, 33 bp, Homo sapien
ccactggctgtcagaatcactgaaacctgctcc

SEQ ID NO: 527571 - DNA, 33 bp, Homo sapien
aacagatgcctttcaaatacatgagctggtggt

SEQ ID NO: 527572 - DNA, 33 bp, Homo sapien
aacagatgcctttcaactacatgagctggtggt

SEQ ID NO: 527573 - DNA, 33 bp, Homo sapien
tgtattctaagtaaaaactaacagtgaccttga

SEQ ID NO: 527574 - DNA, 33 bp, Homo sapien
tgtattctaagtaaaagctaacagtgaccttga

SEQ ID NO: 527575 - DNA, 33 bp, Homo sapien
catctttttgaagttacagcattttgtttttgt

SEQ ID NO: 527576 - DNA, 33 bp, Homo sapien
catctttttgaagttatagcattttgtttttgt

SEQ ID NO: 527577 - DNA, 33 bp, Homo sapien
ctttaaaagaagcccaatgacaatttgagacca

SEQ ID NO: 527578 - DNA, 33 bp, Homo sapien
ctttaaaagaagcccagtgacaatttgagacca

SEQ ID NO: 527579 - DNA, 33 bp, Homo sapien
cctcaatctcaactgacgtctgactttactgag

SEQ ID NO: 527580 - DNA, 33 bp, Homo sapien
cctcaatctcaactgaggtctgactttactgag

SEQ ID NO: 527581 - DNA, 33 bp, Homo sapien
attcacagttacagaacttaaaatggattccgt

SEQ ID NO: 527582 - DNA, 33 bp, Homo sapien
attcacagttacagaatttaaaatggattccgt

SEQ ID NO: 527583 - DNA, 33 bp, Homo sapien
ggctaagtatactggaatcatttgtaagttgct

SEQ ID NO: 527584 - DNA, 33 bp, Homo sapien
ggctaagtatactggagtcatttgtaagttgct

SEQ ID NO: 527585 - DNA, 33 bp, Homo sapien
tagtggagcggatcacgcagggtcgaaatctag

SEQ ID NO: 527586 - DNA, 33 bp, Homo sapien
tagtggagcggatcactcagggtcgaaatctag

SEQ ID NO: 527587 - DNA, 33 bp, Homo sapien
ttggagagagacaagacgatgggtccattatag

SEQ ID NO: 527588 - DNA, 33 bp, Homo sapien
ttggagagagacaagaggatgggtccattatag

SEQ ID NO: 527589 - DNA, 33 bp, Homo sapien
tagagaaaagtaccaaacaaactctcgcataat

SEQ ID NO: 527590 - DNA, 33 bp, Homo sapien
tagagaaaagtaccaaccaaactctcgcataat

SEQ ID NO: 527591 - DNA, 33 bp, Homo sapien
attatataaatgcaaacgtaatctatgaacatg

SEQ ID NO: 527592 - DNA, 33 bp, Homo sapien
attatataaatgcaaaggtaatctatgaacatg

SEQ ID NO: 527593 - DNA, 33 bp, Homo sapien
agagcagtggaagttacagctagaaaagaagat

SEQ ID NO: 527594 - DNA, 33 bp, Homo sapien
agagcagtggaagttagagctagaaaagaagat

SEQ ID NO: 527595 - DNA, 33 bp, Homo sapien
tcaggagctgtggctagacaggccatgaaagac

SEQ ID NO: 527596 - DNA, 33 bp, Homo sapien
tcaggagctgtggctatacaggccatgaaagac

SEQ ID NO: 527597 - DNA, 33 bp, Homo sapien
tagtgtctgatttccacgtgccttcctgaggga

SEQ ID NO: 527598 - DNA, 33 bp, Homo sapien
tagtgtctgatttccatgtgccttcctgaggga

SEQ ID NO: 527599 - DNA, 33 bp, Homo sapien
aaagatgttttcagcccgagggagccaaaaaga

SEQ ID NO: 527600 - DNA, 33 bp, Homo sapien
aaagatgttttcagcctgagggagccaaaaaga

SEQ ID NO: 527601 - DNA, 33 bp, Homo sapien
tcttgtctggatgccactgaattcaccttaaac

SEQ ID NO: 527602 - DNA, 33 bp, Homo sapien
tcttgtctggatgccattgaattcaccttaaac

SEQ ID NO: 527603 - DNA, 33 bp, Homo sapien
acttgcagaaccaaaacgctgagctgcccaaag

SEQ ID NO: 527604 - DNA, 33 bp, Homo sapien
acttgcagaaccaaaatgctgagctgcccaaag

SEQ ID NO: 527605 - DNA, 33 bp, Homo sapien
gaaaaactagaaaaacacaggttgtctgctaaa

SEQ ID NO: 527606 - DNA, 33 bp, Homo sapien
gaaaaactagaaaaactcaggttgtctgctaaa

SEQ ID NO: 527607 - DNA, 33 bp, Homo sapien
tgggtctagggcaaagaataagcagcacacaag

SEQ ID NO: 527608 - DNA, 33 bp, Homo sapien
tgggtctagggcaaagcataagcagcacacaag

SEQ ID NO: 527609 - DNA, 33 bp, Homo sapien
tactttcttaaatggacaaactgcaatcatttt

SEQ ID NO: 527610 - DNA, 33 bp, Homo sapien
tactttcttaaatggagaaactgcaatcatttt

SEQ ID NO: 527611 - DNA, 33 bp, Homo sapien
atacagtcattattgtaaagggaagaacatata

SEQ ID NO: 527612 - DNA, 33 bp, Homo sapien
atacagtcattattgtgaagggaagaacatata

SEQ ID NO: 527613 - DNA, 33 bp, Homo sapien
cagaaatagaaatatgaatgattctgtacctgc

SEQ ID NO: 527614 - DNA, 33 bp, Homo sapien
cagaaatagaaatatggatgattctgtacctgc

SEQ ID NO: 527615 - DNA, 33 bp, Homo sapien
ctccctctattactccccaccatatatcagtca

SEQ ID NO: 527616 - DNA, 33 bp, Homo sapien
ctccctctattactcctcaccatatatcagtca

SEQ ID NO: 527617 - DNA, 33 bp, Homo sapien
gttctctctgaacacactgcagaaaagtgatgc

SEQ ID NO: 527618 - DNA, 33 bp, Homo sapien
gttctctctgaacacattgcagaaaagtgatgc

SEQ ID NO: 527619 - DNA, 33 bp, Homo sapien
ttatgtcgtgaatctccacctggtttctcactt

SEQ ID NO: 527620 - DNA, 33 bp, Homo sapien
ttatgtcgtgaatctctacctggtttctcactt

SEQ ID NO: 527621 - DNA, 33 bp, Homo sapien
gtcacatttcagggctaaactagtaaaggcttt

SEQ ID NO: 527622 - DNA, 33 bp, Homo sapien
gtcacatttcagggctgaactagtaaaggcttt

SEQ ID NO: 527623 - DNA, 33 bp, Homo sapien
aaataacggccaactgaaaataaagccaattag

SEQ ID NO: 527624 - DNA, 33 bp, Homo sapien
aaataacggccaactgcaaataaagccaattag

SEQ ID NO: 527625 - DNA, 33 bp, Homo sapien
attactctgttggatgcattgatcctgattagc

SEQ ID NO: 527626 - DNA, 33 bp, Homo sapien
attactctgttggatgtattgatcctgattagc

SEQ ID NO: 527627 - DNA, 33 bp, Homo sapien
cagattttgtcctcaaagagattaatgtcaaag

SEQ ID NO: 527628 - DNA, 33 bp, Homo sapien
cagattttgtcctcaaggagattaatgtcaaag

SEQ ID NO: 527629 - DNA, 33 bp, Homo sapien
taccttgcacgtgaaagctgtttcttccatctc

SEQ ID NO: 527630 - DNA, 33 bp, Homo sapien
taccttgcacgtgaaatctgtttcttccatctc

SEQ ID NO: 527631 - DNA, 33 bp, Homo sapien
tatgtattgtgaataagaacaacatcttaggac

SEQ ID NO: 527632 - DNA, 33 bp, Homo sapien
tatgtattgtgaataataacaacatcttaggac

SEQ ID NO: 527633 - DNA, 33 bp, Homo sapien
agtcaggagcaactgcaagattttcctatatca

SEQ ID NO: 527634 - DNA, 33 bp, Homo sapien
agtcaggagcaactgcgagattttcctatatca

SEQ ID NO: 527635 - DNA, 33 bp, Homo sapien
catctatccgaatcaactatctccctgatcact

SEQ ID NO: 527636 - DNA, 33 bp, Homo sapien
catctatccgaatcaattatctccctgatcact

SEQ ID NO: 527637 - DNA, 33 bp, Homo sapien
tctgagaaatgtgccactagacaattttgtctt

SEQ ID NO: 527638 - DNA, 33 bp, Homo sapien
tctgagaaatgtgccattagacaattttgtctt

SEQ ID NO: 527639 - DNA, 33 bp, Homo sapien
caagcctgaaattccactgatgtgttgatgatg

SEQ ID NO: 527640 - DNA, 33 bp, Homo sapien
caagcctgaaattccagtgatgtgttgatgatg

SEQ ID NO: 527641 - DNA, 33 bp, Homo sapien
ctggacatgctaagcacaggataccctggaaac

SEQ ID NO: 527642 - DNA, 33 bp, Homo sapien
ctggacatgctaagcataggataccctggaaac

SEQ ID NO: 527643 - DNA, 33 bp, Homo sapien
acttagtggcttaaaacggcaaacatttgttat

SEQ ID NO: 527644 - DNA, 33 bp, Homo sapien
acttagtggcttaaaatggcaaacatttgttat

SEQ ID NO: 527645 - DNA, 33 bp, Homo sapien
ttctgccatgtattacaatgtacctgtttttcc

SEQ ID NO: 527646 - DNA, 33 bp, Homo sapien
ttctgccatgtattaccatgtacctgtttttcc

SEQ ID NO: 527647 - DNA, 33 bp, Homo sapien
acgggagcaggaattacggcgaaaatggccacc

SEQ ID NO: 527648 - DNA, 33 bp, Homo sapien
acgggagcaggaattatggcgaaaatggccacc

SEQ ID NO: 527649 - DNA, 33 bp, Homo sapien
caaatgaacctgagaacgcctcatccacaaaat

SEQ ID NO: 527650 - DNA, 33 bp, Homo sapien
caaatgaacctgagaatgcctcatccacaaaat

SEQ ID NO: 527651 - DNA, 33 bp, Homo sapien
ctcatttgtgacttacaactgtgcatgaattag

SEQ ID NO: 527652 - DNA, 33 bp, Homo sapien
ctcatttgtgacttacgactgtgcatgaattag

SEQ ID NO: 527653 - DNA, 33 bp, Homo sapien
tatcagtgctttcttacgcaatgacagacagtc

SEQ ID NO: 527654 - DNA, 33 bp, Homo sapien
tatcagtgctttcttatgcaatgacagacagtc

SEQ ID NO: 527655 - DNA, 33 bp, Homo sapien
tcctgttaaaagtagaaaaggattttgtgcatt

SEQ ID NO: 527656 - DNA, 33 bp, Homo sapien
tcctgttaaaagtagagaaggattttgtgcatt

SEQ ID NO: 527657 - DNA, 33 bp, Homo sapien
gttctttgaatgaaagcagaaatgatcgctaac

SEQ ID NO: 527658 - DNA, 33 bp, Homo sapien
gttctttgaatgaaagtagaaatgatcgctaac

SEQ ID NO: 527659 - DNA, 33 bp, Homo sapien
ctgtgtgggccaaagcgccagacccacagtgtt

SEQ ID NO: 527660 - DNA, 33 bp, Homo sapien
ctgtgtgggccaaagctccagacccacagtgtt

SEQ ID NO: 527661 - DNA, 33 bp, Homo sapien
acacccaggctgaaaccatcacttgtcagtcct

SEQ ID NO: 527662 - DNA, 33 bp, Homo sapien
acacccaggctgaaactatcacttgtcagtcct

SEQ ID NO: 527663 - DNA, 33 bp, Homo sapien
attcatgaacttcagcggacttgggtagtaccc

SEQ ID NO: 527664 - DNA, 33 bp, Homo sapien
attcatgaacttcagctgacttgggtagtaccc

SEQ ID NO: 527665 - DNA, 33 bp, Homo sapien
agaacaggaaacaccaataattaaaatactgct

SEQ ID NO: 527666 - DNA, 33 bp, Homo sapien
agaacaggaaacaccagtaattaaaatactgct

SEQ ID NO: 527667 - DNA, 33 bp, Homo sapien
catctctgctccatgaaatctggcatctcagct

SEQ ID NO: 527668 - DNA, 33 bp, Homo sapien
catctctgctccatgatatctggcatctcagct

SEQ ID NO: 527669 - DNA, 33 bp, Homo sapien
taattccaccacagaccgacatacgtgtttaat

SEQ ID NO: 527670 - DNA, 33 bp, Homo sapien
taattccaccacagactgacatacgtgtttaat

SEQ ID NO: 527671 - DNA, 33 bp, Homo sapien
cagactctgcaagccaatccttctagggaagaa

SEQ ID NO: 527672 - DNA, 33 bp, Homo sapien
cagactctgcaagccagtccttctagggaagaa

SEQ ID NO: 527673 - DNA, 33 bp, Homo sapien
ctgagcaggtaaataacgtgagttcaattccat

SEQ ID NO: 527674 - DNA, 33 bp, Homo sapien
ctgagcaggtaaataatgtgagttcaattccat

SEQ ID NO: 527675 - DNA, 33 bp, Homo sapien
agtcaatcacaagcaagtacaacgtgggtaacc

SEQ ID NO: 527676 - DNA, 33 bp, Homo sapien
agtcaatcacaagcaattacaacgtgggtaacc

SEQ ID NO: 527677 - DNA, 33 bp, Homo sapien
aagaggcaaagtttgaacctttccttgttgaga

SEQ ID NO: 527678 - DNA, 33 bp, Homo sapien
aagaggcaaagtttgatcctttccttgttgaga

SEQ ID NO: 527679 - DNA, 33 bp, Homo sapien
tcgggtccaaccgccaaacttactaaatcagaa

SEQ ID NO: 527680 - DNA, 33 bp, Homo sapien
tcgggtccaaccgccagacttactaaatcagaa

SEQ ID NO: 527681 - DNA, 33 bp, Homo sapien
gagacttaaaaatcaccgactctgaggctgggc

SEQ ID NO: 527682 - DNA, 33 bp, Homo sapien
gagacttaaaaatcactgactctgaggctgggc

SEQ ID NO: 527683 - DNA, 33 bp, Homo sapien
tggaatgtgtgtggaaataatgcgtctccttca

SEQ ID NO: 527684 - DNA, 33 bp, Homo sapien
tggaatgtgtgtggaagtaatgcgtctccttca

SEQ ID NO: 527685 - DNA, 33 bp, Homo sapien
agtttacttcattttccaaccatcagagccagt

SEQ ID NO: 527686 - DNA, 33 bp, Homo sapien
agtttacttcattttctaaccatcagagccagt

SEQ ID NO: 527687 - DNA, 33 bp, Homo sapien
atcactatgatgactacccattgaacagtgaat

SEQ ID NO: 527688 - DNA, 33 bp, Homo sapien
atcactatgatgactatccattgaacagtgaat

SEQ ID NO: 527689 - DNA, 33 bp, Homo sapien
tgcctgcagcttttacaacatccttccttcctt

SEQ ID NO: 527690 - DNA, 33 bp, Homo sapien
tgcctgcagcttttacgacatccttccttcctt

SEQ ID NO: 527691 - DNA, 33 bp, Homo sapien
tgaagatgtggtttcaaaaagtaaagaatatga

SEQ ID NO: 527692 - DNA, 33 bp, Homo sapien
tgaagatgtggtttcagaaagtaaagaatatga

SEQ ID NO: 527693 - DNA, 33 bp, Homo sapien
aatctctgtgaaaaaacggaaggcaaaacaggg

SEQ ID NO: 527694 - DNA, 33 bp, Homo sapien
aatctctgtgaaaaaatggaaggcaaaacaggg

SEQ ID NO: 527695 - DNA, 33 bp, Homo sapien
acatacaaaagccaaaagaatttatcatcacca

SEQ ID NO: 527696 - DNA, 33 bp, Homo sapien
acatacaaaagccaaaggaatttatcatcacca

SEQ ID NO: 527697 - DNA, 33 bp, Homo sapien
aaaccgtcagtgtaaacgagatcaccagggaga

SEQ ID NO: 527698 - DNA, 33 bp, Homo sapien
aaaccgtcagtgtaaatgagatcaccagggaga

SEQ ID NO: 527699 - DNA, 33 bp, Homo sapien
aaatggcccgagagtaccagctggcaaaaaaat

SEQ ID NO: 527700 - DNA, 33 bp, Homo sapien
aaatggcccgagagtatcagctggcaaaaaaat

SEQ ID NO: 527701 - DNA, 33 bp, Homo sapien
ggctaaaagtaagacacaattgtgaggctgggc

SEQ ID NO: 527702 - DNA, 33 bp, Homo sapien
ggctaaaagtaagacataattgtgaggctgggc

SEQ ID NO: 527703 - DNA, 33 bp, Homo sapien
ttaaagtgactgcttagagttctatgagaaaca

SEQ ID NO: 527704 - DNA, 33 bp, Homo sapien
ttaaagtgactgcttatagttctatgagaaaca

SEQ ID NO: 527705 - DNA, 33 bp, Homo sapien
gaccatccacagaggacaagctgtttcactaaa

SEQ ID NO: 527706 - DNA, 33 bp, Homo sapien
gaccatccacagaggagaagctgtttcactaaa

SEQ ID NO: 527707 - DNA, 33 bp, Homo sapien
atacttcttacgtaccaatctattttattgtgc

SEQ ID NO: 527708 - DNA, 33 bp, Homo sapien
atacttcttacgtacccatctattttattgtgc

SEQ ID NO: 527709 - DNA, 33 bp, Homo sapien
tggtatttgcctgaaacattgatgttggtcaag

SEQ ID NO: 527710 - DNA, 33 bp, Homo sapien
tggtatttgcctgaaatattgatgttggtcaag

SEQ ID NO: 527711 - DNA, 33 bp, Homo sapien
tctgaaaggaaaacaaattccaggacactcgtt

SEQ ID NO: 527712 - DNA, 33 bp, Homo sapien
tctgaaaggaaaacaagttccaggacactcgtt

SEQ ID NO: 527713 - DNA, 33 bp, Homo sapien
ggacaggcaagggcagcatttatcagaatgaaa

SEQ ID NO: 527714 - DNA, 33 bp, Homo sapien
ggacaggcaagggcaggatttatcagaatgaaa

SEQ ID NO: 527715 - DNA, 33 bp, Homo sapien
aaggtaaaaccaagatcatacctcaaaacataa

SEQ ID NO: 527716 - DNA, 33 bp, Homo sapien
aaggtaaaaccaagatgatacctcaaaacataa

SEQ ID NO: 527717 - DNA, 33 bp, Homo sapien
tggtgtaaaatgatgaataactcccatagagaa

SEQ ID NO: 527718 - DNA, 33 bp, Homo sapien
tggtgtaaaatgatgagtaactcccatagagaa

SEQ ID NO: 527719 - DNA, 33 bp, Homo sapien
actatttgtgtttacactgacataaaagcaaag

SEQ ID NO: 527720 - DNA, 33 bp, Homo sapien
actatttgtgtttacattgacataaaagcaaag

SEQ ID NO: 527721 - DNA, 33 bp, Homo sapien
agacctaccgctgcgaggaactggattcggcca

SEQ ID NO: 527722 - DNA, 33 bp, Homo sapien
agacctaccgctgcgatgaactggattcggcca

SEQ ID NO: 527723 - DNA, 33 bp, Homo sapien
aaaaaagttttgtagcaatagattatcactatg

SEQ ID NO: 527724 - DNA, 33 bp, Homo sapien
aaaaaagttttgtagcgatagattatcactatg

SEQ ID NO: 527725 - DNA, 33 bp, Homo sapien
ttatcattctgtgctgcactatatactctgagg

SEQ ID NO: 527726 - DNA, 33 bp, Homo sapien
ttatcattctgtgctggactatatactctgagg

SEQ ID NO: 527727 - DNA, 33 bp, Homo sapien
attgacagagctcaacaaaaagcaactggatga

SEQ ID NO: 527728 - DNA, 33 bp, Homo sapien
attgacagagctcaacgaaaagcaactggatga

SEQ ID NO: 527729 - DNA, 33 bp, Homo sapien
taaataaaagagttatcagtcatgttttcaata

SEQ ID NO: 527730 - DNA, 33 bp, Homo sapien
taaataaaagagttatgagtcatgttttcaata

SEQ ID NO: 527731 - DNA, 33 bp, Homo sapien
caggactatagacttacggatggctatcttgtc

SEQ ID NO: 527732 - DNA, 33 bp, Homo sapien
caggactatagacttatggatggctatcttgtc

SEQ ID NO: 527733 - DNA, 33 bp, Homo sapien
ctctttagaagctgcacgtaactagccaattgt

SEQ ID NO: 527734 - DNA, 33 bp, Homo sapien
ctctttagaagctgcatgtaactagccaattgt

SEQ ID NO: 527735 - DNA, 33 bp, Homo sapien
ttgcacaggttcagcacgaaaagacacatcaaa

SEQ ID NO: 527736 - DNA, 33 bp, Homo sapien
ttgcacaggttcagcatgaaaagacacatcaaa

SEQ ID NO: 527737 - DNA, 33 bp, Homo sapien
aatctgatagctgtagcattttcctaaactgtt

SEQ ID NO: 527738 - DNA, 33 bp, Homo sapien
aatctgatagctgtagtattttcctaaactgtt

SEQ ID NO: 527739 - DNA, 33 bp, Homo sapien
atgaggaagactctaaagcaataaactagatgc

SEQ ID NO: 527740 - DNA, 33 bp, Homo sapien
atgaggaagactctaaggcaataaactagatgc

SEQ ID NO: 527741 - DNA, 33 bp, Homo sapien
aaagggcttatttcaacaatgccaatggttcaa

SEQ ID NO: 527742 - DNA, 33 bp, Homo sapien
aaagggcttatttcaagaatgccaatggttcaa

SEQ ID NO: 527743 - DNA, 33 bp, Homo sapien
aaattaagaactcttacgttagcaacaacttga

SEQ ID NO: 527744 - DNA, 33 bp, Homo sapien
aaattaagaactcttatgttagcaacaacttga

SEQ ID NO: 527745 - DNA, 33 bp, Homo sapien
gtgctggtaggattgtcaatcagagtgtctgcc

SEQ ID NO: 527746 - DNA, 33 bp, Homo sapien
gtgctggtaggattgttaatcagagtgtctgcc

SEQ ID NO: 527747 - DNA, 33 bp, Homo sapien
gtggaaaggctgtatccatgtcatttgtttagc

SEQ ID NO: 527748 - DNA, 33 bp, Homo sapien
gtggaaaggctgtatcgatgtcatttgtttagc

SEQ ID NO: 527749 - DNA, 33 bp, Homo sapien
gaatctatgtgccataggattttttttttcttt

SEQ ID NO: 527750 - DNA, 33 bp, Homo sapien
gaatctatgtgccatatgattttttttttcttt

SEQ ID NO: 527751 - DNA, 33 bp, Homo sapien
agatggtcccataagcaaatttcttgtggtttg

SEQ ID NO: 527752 - DNA, 33 bp, Homo sapien
agatggtcccataagcgaatttcttgtggtttg

SEQ ID NO: 527753 - DNA, 33 bp, Homo sapien
tttctaaatactttacacctttgacaaaatgag

SEQ ID NO: 527754 - DNA, 33 bp, Homo sapien
tttctaaatactttacgcctttgacaaaatgag

SEQ ID NO: 527755 - DNA, 33 bp, Homo sapien; identical to SEQ ID NO: 527753

SEQ ID NO: 527756 - DNA, 33 bp, Homo sapien; identical to SEQ ID NO: 527754

SEQ ID NO: 527757 - DNA, 33 bp, Homo sapien
gactggttaatggtgactaggtatcaaatatca

SEQ ID NO: 527758 - DNA, 33 bp, Homo sapien
gactggttaatggtgattaggtatcaaatatca

SEQ ID NO: 527759 - DNA, 33 bp, Homo sapien
ttataaatctagaccacgtggaacagaagtttt

SEQ ID NO: 527760 - DNA, 33 bp, Homo sapien
ttataaatctagaccatgtggaacagaagtttt

SEQ ID NO: 527761 - DNA, 33 bp, Homo sapien
aaagcaatgacctgtcaaacttcaataatatat

SEQ ID NO: 527762 - DNA, 33 bp, Homo sapien
aaagcaatgacctgtccaacttcaataatatat

SEQ ID NO: 527763 - DNA, 33 bp, Homo sapien
gtcagcaggatgtatacggtaaccgaaacccta

SEQ ID NO: 527764 - DNA, 33 bp, Homo sapien
gtcagcaggatgtatatggtaaccgaaacccta

SEQ ID NO: 527765 - DNA, 33 bp, Homo sapien
tgataccatgtgaaagaaagttctgcctctatt

SEQ ID NO: 527766 - DNA, 33 bp, Homo sapien
tgataccatgtgaaagtaagttctgcctctatt

SEQ ID NO: 527767 - DNA, 33 bp, Homo sapien
aaagataatcagacaaatctgtagatggcagac

SEQ ID NO: 527768 - DNA, 33 bp, Homo sapien
aaagataatcagacaattctgtagatggcagac

SEQ ID NO: 527769 - DNA, 33 bp, Homo sapien
gaacatagtcttctcaacctaccattgaacact

SEQ ID NO: 527770 - DNA, 33 bp, Homo sapien
gaacatagtcttctcagcctaccattgaacact

SEQ ID NO: 527771 - DNA, 33 bp, Homo sapien
agtgatctttttttcccgagacatgggatcagc

SEQ ID NO: 527772 - DNA, 33 bp, Homo sapien
agtgatctttttttcctgagacatgggatcagc

SEQ ID NO: 527773 - DNA, 33 bp, Homo sapien
atgtgggaactatacaacgtactattttatata

SEQ ID NO: 527774 - DNA, 33 bp, Homo sapien
atgtgggaactatacagcgtactattttatata

SEQ ID NO: 527775 - DNA, 33 bp, Homo sapien
gctttgatgaacacataaagaatcatttgtagt

SEQ ID NO: 527776 - DNA, 33 bp, Homo sapien
gctttgatgaacacattaagaatcatttgtagt

SEQ ID NO: 527777 - DNA, 33 bp, Homo sapien
ttccagtaagtgtttaagtgcctaatgcacaga

SEQ ID NO: 527778 - DNA, 33 bp, Homo sapien
ttccagtaagtgtttaggtgcctaatgcacaga

SEQ ID NO: 527779 - DNA, 33 bp, Homo sapien
ttctccttctttctgacacatttagttatattt

SEQ ID NO: 527780 - DNA, 33 bp, Homo sapien
ttctccttctttctgagacatttagttatattt

SEQ ID NO: 527781 - DNA, 33 bp, Homo sapien
tgatcttgtaagtagacagcagaatagaggcag

SEQ ID NO: 527782 - DNA, 33 bp, Homo sapien
tgatcttgtaagtagagagcagaatagaggcag

SEQ ID NO: 527783 - DNA, 33 bp, Homo sapien
gggtgtgaagtaatatcagctcgtttattttaa

SEQ ID NO: 527784 - DNA, 33 bp, Homo sapien
gggtgtgaagtaatatgagctcgtttattttaa

SEQ ID NO: 527785 - DNA, 33 bp, Homo sapien
ggggtgaaatcttcggaaagtgtgtgtctgtgt

SEQ ID NO: 527786 - DNA, 33 bp, Homo sapien
ggggtgaaatcttcgggaagtgtgtgtctgtgt

SEQ ID NO: 527787 - DNA, 33 bp, Homo sapien
ctaacaacttgactaacgattgggcaaagaatc

SEQ ID NO: 527788 - DNA, 33 bp, Homo sapien
ctaacaacttgactaatgattgggcaaagaatc

SEQ ID NO: 527789 - DNA, 33 bp, Homo sapien
agtgtcaagtctgcaaccctgtgattaagtgca

SEQ ID NO: 527790 - DNA, 33 bp, Homo sapien
agtgtcaagtctgcaatcctgtgattaagtgca

SEQ ID NO: 527791 - DNA, 33 bp, Homo sapien
aatctggcaacatttaccgaaagccctaaaatt

SEQ ID NO: 527792 - DNA, 33 bp, Homo sapien
aatctggcaacatttatcgaaagccctaaaatt

SEQ ID NO: 527793 - DNA, 33 bp, Homo sapien
caacactatgtcctcaatatccagttcacggcc

SEQ ID NO: 527794 - DNA, 33 bp, Homo sapien
caacactatgtcctcagtatccagttcacggcc

SEQ ID NO: 527795 - DNA, 33 bp, Homo sapien
ttctatgggttaaaaaccaggacagtggttacc

SEQ ID NO: 527796 - DNA, 33 bp, Homo sapien
ttctatgggttaaaaatcaggacagtggttacc

SEQ ID NO: 527797 - DNA, 33 bp, Homo sapien
aatgctagttagtaaaatatggatgctattaat

SEQ ID NO: 527798 - DNA, 33 bp, Homo sapien
aatgctagttagtaaagtatggatgctattaat

SEQ ID NO: 527799 - DNA, 33 bp, Homo sapien
aatctggtgtttcctaaaggcatttcgatgagg

SEQ ID NO: 527800 - DNA, 33 bp, Homo sapien
aatctggtgtttcctataggcatttcgatgagg

SEQ ID NO: 527801 - DNA, 33 bp, Homo sapien
ttatacagaatatatcagaggaaatttgacagt

SEQ ID NO: 527802 - DNA, 33 bp, Homo sapien
ttatacagaatatatcggaggaaatttgacagt

SEQ ID NO: 527803 - DNA, 33 bp, Homo sapien
ggaacacactatttacactgtgctgcaccttac

SEQ ID NO: 527804 - DNA, 33 bp, Homo sapien
ggaacacactatttacgctgtgctgcaccttac

SEQ ID NO: 527805 - DNA, 33 bp, Homo sapien
gtttacaaaatctgacgcagtaatgtgtccttt

SEQ ID NO: 527806 - DNA, 33 bp, Homo sapien
gtttacaaaatctgactcagtaatgtgtccttt

SEQ ID NO: 527807 - DNA, 33 bp, Homo sapien
tctacatctttgctatgaaaaaagtcatctcct

SEQ ID NO: 527808 - DNA, 33 bp, Homo sapien
tctacatctttgctattaaaaaagtcatctcct

SEQ ID NO: 527809 - DNA, 33 bp, Homo sapien
aaggtactaggggttacgactccaacatatgtt

SEQ ID NO: 527810 - DNA, 33 bp, Homo sapien
aaggtactaggggttatgactccaacatatgtt

SEQ ID NO: 527811 - DNA, 33 bp, Homo sapien
ttatttagaagtagggccattatagttgtaatt

SEQ ID NO: 527812 - DNA, 33 bp, Homo sapien
ttatttagaagtagggtcattatagttgtaatt

SEQ ID NO: 527813 - DNA, 33 bp, Homo sapien
ttaataatctctaggaataagtaatggacttga

SEQ ID NO: 527814 - DNA, 33 bp, Homo sapien
ttaataatctctaggactaagtaatggacttga

SEQ ID NO: 527815 - DNA, 33 bp, Homo sapien
tcatttttttgttcctgacgctgtcctttcagg

SEQ ID NO: 527816 - DNA, 33 bp, Homo sapien
tcatttttttgttccttacgctgtcctttcagg

SEQ ID NO: 527817 - DNA, 33 bp, Homo sapien
tgtgcgcctttggttccagctcctgggcaggct

SEQ ID NO: 527818 - DNA, 33 bp, Homo sapien
tgtgcgcctttggttctagctcctgggcaggct

SEQ ID NO: 527819 - DNA, 33 bp, Homo sapien
attatgtagccataaaaatttaaaaagaccact

SEQ ID NO: 527820 - DNA, 33 bp, Homo sapien
attatgtagccataaagatttaaaaagaccact

SEQ ID NO: 527821 - DNA, 33 bp, Homo sapien
tacattttcccaaagaatctgaaagcgcttaca

SEQ ID NO: 527822 - DNA, 33 bp, Homo sapien
tacattttcccaaagagtctgaaagcgcttaca

SEQ ID NO: 527823 - DNA, 33 bp, Homo sapien
gagctcatgagatttccagttccttcctttttg

SEQ ID NO: 527824 - DNA, 33 bp, Homo sapien
gagctcatgagatttctagttccttcctttttg

SEQ ID NO: 527825 - DNA, 33 bp, Homo sapien
gtgttcttaggcggagacaatacctaagccagg

SEQ ID NO: 527826 - DNA, 33 bp, Homo sapien
gtgttcttaggcggaggcaatacctaagccagg

SEQ ID NO: 527827 - DNA, 33 bp, Homo sapien
ttgttatttgtgcaaagcaatgaagtgtcattt

SEQ ID NO: 527828 - DNA, 33 bp, Homo sapien
ttgttatttgtgcaaatcaatgaagtgtcattt

SEQ ID NO: 527829 - DNA, 33 bp, Homo sapien
gttgacagcctgtcagcagccagttcttcccat

SEQ ID NO: 527830 - DNA, 33 bp, Homo sapien
gttgacagcctgtcagtagccagttcttcccat

SEQ ID NO: 527831 - DNA, 33 bp, Homo sapien
agtgaatcttttgggcactgctaattactatac

SEQ ID NO: 527832 - DNA, 33 bp, Homo sapien
agtgaatcttttgggctctgctaattactatac

SEQ ID NO: 527833 - DNA, 33 bp, Homo sapien
agacagagacttcagaaagtagtagaagagaaa

SEQ ID NO: 527834 - DNA, 33 bp, Homo sapien
agacagagacttcagatagtagtagaagagaaa

SEQ ID NO: 527835 - DNA, 33 bp, Homo sapien
cactcgcttgcttaagaactgtctcttgttgct

SEQ ID NO: 527836 - DNA, 33 bp, Homo sapien
cactcgcttgcttaagtactgtctcttgttgct

SEQ ID NO: 527837 - DNA, 33 bp, Homo sapien
tcctggtggatgaggagatgtgaaagaacagga

SEQ ID NO: 527838 - DNA, 33 bp, Homo sapien
tcctggtggatgaggatatgtgaaagaacagga

SEQ ID NO: 527839 - DNA, 33 bp, Homo sapien
ggaagtaatgtcaacactcagagcccttctcac

SEQ ID NO: 527840 - DNA, 33 bp, Homo sapien
ggaagtaatgtcaacattcagagcccttctcac

SEQ ID NO: 527841 - DNA, 33 bp, Homo sapien
ggttttgatagataaaatggtcctcttgaagtt

SEQ ID NO: 527842 - DNA, 33 bp, Homo sapien
ggttttgatagataaagtggtcctcttgaagtt

SEQ ID NO: 527843 - DNA, 33 bp, Homo sapien
cctccagcattgaatcacttttctaggtagaaa

SEQ ID NO: 527844 - DNA, 33 bp, Homo sapien
cctccagcattgaatcgcttttctaggtagaaa

SEQ ID NO: 527845 - DNA, 33 bp, Homo sapien
attcacctggcagcacaagttgacgtgtgacct

SEQ ID NO: 527846 - DNA, 33 bp, Homo sapien
attcacctggcagcactagttgacgtgtgacct

SEQ ID NO: 527847 - DNA, 33 bp, Homo sapien
tgcaaatactttgagaccgtgcccttgattact

SEQ ID NO: 527848 - DNA, 33 bp, Homo sapien
tgcaaatactttgagatcgtgcccttgattact

SEQ ID NO: 527849 - DNA, 33 bp, Homo sapien
agcagtgctgaatgggaaagcctggatccatgg

SEQ ID NO: 527850 - DNA, 33 bp, Homo sapien
agcagtgctgaatggggaagcctggatccatgg

SEQ ID NO: 527851 - DNA, 33 bp, Homo sapien
tgtatcagcagcccaacgtgatgtcttgtgacc

SEQ ID NO: 527852 - DNA, 33 bp, Homo sapien
tgtatcagcagcccaaggtgatgtcttgtgacc

SEQ ID NO: 527853 - DNA, 33 bp, Homo sapien
tgaaaatttgaagcaaggataacaatttaatca

SEQ ID NO: 527854 - DNA, 33 bp, Homo sapien
tgaaaatttgaagcaatgataacaatttaatca

SEQ ID NO: 527855 - DNA, 33 bp, Homo sapien
aataatagacagtttacagaatctcaatggggt

SEQ ID NO: 527856 - DNA, 33 bp, Homo sapien
aataatagacagtttatagaatctcaatggggt

SEQ ID NO: 527857 - DNA, 33 bp, Homo sapien
tggccgagatcccttgaaaagtttctatatgct

SEQ ID NO: 527858 - DNA, 33 bp, Homo sapien
tggccgagatcccttgcaaagtttctatatgct

SEQ ID NO: 527859 - DNA, 33 bp, Homo sapien
aaaaatgaactgtagacaattctgagcaacacc

SEQ ID NO: 527860 - DNA, 33 bp, Homo sapien
aaaaatgaactgtagataattctgagcaacacc

SEQ ID NO: 527861 - DNA, 33 bp, Homo sapien
tgctgattaaggtggaacaaagaaccaggaagt

SEQ ID NO: 527862 - DNA, 33 bp, Homo sapien
tgctgattaaggtggagcaaagaaccaggaagt

SEQ ID NO: 527863 - DNA, 33 bp, Homo sapien
gttaatcatcagacagaaaacacagatggtacc

SEQ ID NO: 527864 - DNA, 33 bp, Homo sapien
gttaatcatcagacagcaaacacagatggtacc

SEQ ID NO: 527865 - DNA, 33 bp, Homo sapien
atcctaacattccttaacactaatgtataatgc

SEQ ID NO: 527866 - DNA, 33 bp, Homo sapien
atcctaacattccttagcactaatgtataatgc

SEQ ID NO: 527867 - DNA, 33 bp, Homo sapien
gaagaagagagtaacacggtagctctctgcccc

SEQ ID NO: 527868 - DNA, 33 bp, Homo sapien
gaagaagagagtaacatggtagctctctgcccc

SEQ ID NO: 527869 - DNA, 33 bp, Homo sapien
tgcagagggcagatctaaaagagctgttagcat

SEQ ID NO: 527870 - DNA, 33 bp, Homo sapien
tgcagagggcagatctgaaagagctgttagcat

SEQ ID NO: 527871 - DNA, 33 bp, Homo sapien
tggaatgagttgtccaaacattcttaaatttag

SEQ ID NO: 527872 - DNA, 33 bp, Homo sapien
tggaatgagttgtccagacattcttaaatttag

SEQ ID NO: 527873 - DNA, 33 bp, Homo sapien
atttttatacaattcaccagcttaatcaaaaac

SEQ ID NO: 527874 - DNA, 33 bp, Homo sapien
atttttatacaattcagcagcttaatcaaaaac

SEQ ID NO: 527875 - DNA, 33 bp, Homo sapien
agcaaggcacatgatgaataggagtaaaatgaa

SEQ ID NO: 527876 - DNA, 33 bp, Homo sapien
agcaaggcacatgatgtataggagtaaaatgaa

SEQ ID NO: 527877 - DNA, 33 bp, Homo sapien
cttagatgcataaatacaaggtatagcaatttt

SEQ ID NO: 527878 - DNA, 33 bp, Homo sapien
cttagatgcataaatagaaggtatagcaatttt

SEQ ID NO: 527879 - DNA, 33 bp, Homo sapien
ctgcgggccacatatacctcctgaaaacagata

SEQ ID NO: 527880 - DNA, 33 bp, Homo sapien
ctgcgggccacatatatctcctgaaaacagata

SEQ ID NO: 527881 - DNA, 33 bp, Homo sapien
cttaaggtttgcttggaatcttttacattagcc

SEQ ID NO: 527882 - DNA, 33 bp, Homo sapien
cttaaggtttgcttggcatcttttacattagcc

SEQ ID NO: 527883 - DNA, 33 bp, Homo sapien
tggaggaaatttggcaaaagttcatgccgaaca

SEQ ID NO: 527884 - DNA, 33 bp, Homo sapien
tggaggaaatttggcacaagttcatgccgaaca

SEQ ID NO: 527885 - DNA, 33 bp, Homo sapien
gccttgccttttgagaactttggaggaaatttg

SEQ ID NO: 527886 - DNA, 33 bp, Homo sapien
gccttgccttttgagagctttggaggaaatttg

SEQ ID NO: 527887 - DNA, 33 bp, Homo sapien
cacatcttcaagtagacgttgtgtaacagctga

SEQ ID NO: 527888 - DNA, 33 bp, Homo sapien
cacatcttcaagtagatgttgtgtaacagctga

SEQ ID NO: 527889 - DNA, 33 bp, Homo sapien
catccacggccaccagcaggtgaaaaacaccca

SEQ ID NO: 527890 - DNA, 33 bp, Homo sapien
catccacggccaccaggaggtgaaaaacaccca

SEQ ID NO: 527891 - DNA, 33 bp, Homo sapien
gagctgctgttcttaaataacgcaaacccctcg

SEQ ID NO: 527892 - DNA, 33 bp, Homo sapien
gagctgctgttcttaagtaacgcaaacccctcg

SEQ ID NO: 527893 - DNA, 33 bp, Homo sapien
ttttttatgaaggcaaagaagagttagtcccca

SEQ ID NO: 527894 - DNA, 33 bp, Homo sapien
ttttttatgaaggcaaggaagagttagtcccca

SEQ ID NO: 527895 - DNA, 33 bp, Homo sapien
tatcggtttatttgtcaatatctctaccagtat

SEQ ID NO: 527896 - DNA, 33 bp, Homo sapien
tatcggtttatttgtccatatctctaccagtat

SEQ ID NO: 527897 - DNA, 33 bp, Homo sapien
cacaaccagctcctacactgacttaatgtgtaa

SEQ ID NO: 527898 - DNA, 33 bp, Homo sapien
cacaaccagctcctacgctgacttaatgtgtaa

SEQ ID NO: 527899 - DNA, 33 bp, Homo sapien
taactgaaatttagcaatctctttattatgaat

SEQ ID NO: 527900 - DNA, 33 bp, Homo sapien
taactgaaatttagcagtctctttattatgaat

SEQ ID NO: 527901 - DNA, 33 bp, Homo sapien
tagaatgtagagtaagaagacatgttgtgaggg

SEQ ID NO: 527902 - DNA, 33 bp, Homo sapien
tagaatgtagagtaaggagacatgttgtgaggg

SEQ ID NO: 527903 - DNA, 33 bp, Homo sapien
aaaacctaattggaaccggctcgagaaagaaca

SEQ ID NO: 527904 - DNA, 33 bp, Homo sapien
aaaacctaattggaacgggctcgagaaagaaca

SEQ ID NO: 527905 - DNA, 33 bp, Homo sapien
taaacctacaaagaccaatgtgaattcagcctc

SEQ ID NO: 527906 - DNA, 33 bp, Homo sapien
taaacctacaaagaccgatgtgaattcagcctc

SEQ ID NO: 527907 - DNA, 33 bp, Homo sapien
tgtctgggaagcaaacaccgtacggaaatacca

SEQ ID NO: 527908 - DNA, 33 bp, Homo sapien
tgtctgggaagcaaacgccgtacggaaatacca

SEQ ID NO: 527909 - DNA, 33 bp, Homo sapien
aaaactgatcattaaccagaaatttaactataa

SEQ ID NO: 527910 - DNA, 33 bp, Homo sapien
aaaactgatcattaactagaaatttaactataa

SEQ ID NO: 527911 - DNA, 33 bp, Homo sapien
tagcaaggtaaaggtacgttgtatgttaagtta

SEQ ID NO: 527912 - DNA, 33 bp, Homo sapien
tagcaaggtaaaggtatgttgtatgttaagtta

SEQ ID NO: 527913 - DNA, 33 bp, Homo sapien
aatggagctaaggataccttaatattggtggtt

SEQ ID NO: 527914 - DNA, 33 bp, Homo sapien
aatggagctaaggatatcttaatattggtggtt

SEQ ID NO: 527915 - DNA, 33 bp, Homo sapien
atgaaacaacaccttacggactttctgaggtct

SEQ ID NO: 527916 - DNA, 33 bp, Homo sapien
atgaaacaacaccttatggactttctgaggtct

SEQ ID NO: 527917 - DNA, 33 bp, Homo sapien
cacaggataatcgctgcagacgcttctgttcaa

SEQ ID NO: 527918 - DNA, 33 bp, Homo sapien
cacaggataatcgctgtagacgcttctgttcaa

SEQ ID NO: 527919 - DNA, 33 bp, Homo sapien
gctggaatcatctgaaatctcacaggtcagcta

SEQ ID NO: 527920 - DNA, 33 bp, Homo sapien
gctggaatcatctgaagtctcacaggtcagcta

SEQ ID NO: 527921 - DNA, 33 bp, Homo sapien
atggaggctccgctacataggcatgcttgatta

SEQ ID NO: 527922 - DNA, 33 bp, Homo sapien
atggaggctccgctacgtaggcatgcttgatta

SEQ ID NO: 527923 - DNA, 33 bp, Homo sapien
tttgtgtatagtgtaaagttggagtcagtttag

SEQ ID NO: 527924 - DNA, 33 bp, Homo sapien
tttgtgtatagtgtaaggttggagtcagtttag

SEQ ID NO: 527925 - DNA, 33 bp, Homo sapien
ttcaccaaaatgtggacggaaaggctatgagct

SEQ ID NO: 527926 - DNA, 33 bp, Homo sapien
ttcaccaaaatgtggatggaaaggctatgagct

SEQ ID NO: 527927 - DNA, 33 bp, Homo sapien
ttaattgtaaaactctaaaaagcattagggagg

SEQ ID NO: 527928 - DNA, 33 bp, Homo sapien
ttaattgtaaaactctgaaaagcattagggagg

SEQ ID NO: 527929 - DNA, 33 bp, Homo sapien
ccctcaggccaaattcaagtttacatggctgcc

SEQ ID NO: 527930 - DNA, 33 bp, Homo sapien
ccctcaggccaaattctagtttacatggctgcc

SEQ ID NO: 527931 - DNA, 33 bp, Homo sapien
ccaacccctcttcattgaaagaaagctactaca

SEQ ID NO: 527932 - DNA, 33 bp, Homo sapien
ccaacccctcttcatttaaagaaagctactaca

SEQ ID NO: 527933 - DNA, 33 bp, Homo sapien
attttccttaatcataaagtgttgttgttgtgg

SEQ ID NO: 527934 - DNA, 33 bp, Homo sapien
attttccttaatcatacagtgttgttgttgtgg

SEQ ID NO: 527935 - DNA, 33 bp, Homo sapien
atggccaggtgggagactagagatccaagtgcc

SEQ ID NO: 527936 - DNA, 33 bp, Homo sapien
atggccaggtgggagattagagatccaagtgcc

SEQ ID NO: 527937 - DNA, 33 bp, Homo sapien
tttgtgctggtaccaaacattgaatcagagaag

SEQ ID NO: 527938 - DNA, 33 bp, Homo sapien
tttgtgctggtaccaagcattgaatcagagaag

SEQ ID NO: 527939 - DNA, 33 bp, Homo sapien
cagttccttcattcccacaacaagaggagatta

SEQ ID NO: 527940 - DNA, 33 bp, Homo sapien
cagttccttcattcccgcaacaagaggagatta

SEQ ID NO: 527941 - DNA, 33 bp, Homo sapien
tcagattccaaaaacaaacaaatgaatctcttg

SEQ ID NO: 527942 - DNA, 33 bp, Homo sapien
tcagattccaaaaacagacaaatgaatctcttg

SEQ ID NO: 527943 - DNA, 33 bp, Homo sapien
atctccactagcaagtaaagtttataagtgatt

SEQ ID NO: 527944 - DNA, 33 bp, Homo sapien
atctccactagcaagtgaagtttataagtgatt

SEQ ID NO: 527945 - DNA, 33 bp, Homo sapien
tgctatggatatacctcaacagaaacaacaaac

SEQ ID NO: 527946 - DNA, 33 bp, Homo sapien
tgctatggatatacctgaacagaaacaacaaac

SEQ ID NO: 527947 - DNA, 33 bp, Homo sapien
gcccagagaatcctaactgatactcaaggagag

SEQ ID NO: 527948 - DNA, 33 bp, Homo sapien
gcccagagaatcctaattgatactcaaggagag

SEQ ID NO: 527949 - DNA, 33 bp, Homo sapien
cctgtctcccttccaccgatgatgaacccaaga

SEQ ID NO: 527950 - DNA, 33 bp, Homo sapien
cctgtctcccttccactgatgatgaacccaaga

SEQ ID NO: 527951 - DNA, 33 bp, Homo sapien
aagacccttaactaccaacatgatcgaagcagt

SEQ ID NO: 527952 - DNA, 33 bp, Homo sapien
aagacccttaactaccgacatgatcgaagcagt

SEQ ID NO: 527953 - DNA, 33 bp, Homo sapien
tcctgaggctgccagagaaagtctgttttctta

SEQ ID NO: 527954 - DNA, 33 bp, Homo sapien
tcctgaggctgccagataaagtctgttttctta

SEQ ID NO: 527955 - DNA, 33 bp, Homo sapien
tacttctcagaattaaaccacctgtaacatgtc

SEQ ID NO: 527956 - DNA, 33 bp, Homo sapien
tacttctcagaattaagccacctgtaacatgtc

SEQ ID NO: 527957 - DNA, 33 bp, Homo sapien
aagtaaacaaggaaaactaggagtgatgttcaa

SEQ ID NO: 527958 - DNA, 33 bp, Homo sapien
aagtaaacaaggaaaattaggagtgatgttcaa

SEQ ID NO: 527959 - DNA, 33 bp, Homo sapien
tcagtgagaattaagaaaagtagatggattgga

SEQ ID NO: 527960 - DNA, 33 bp, Homo sapien
tcagtgagaattaagagaagtagatggattgga

SEQ ID NO: 527961 - DNA, 33 bp, Homo sapien
gaggggtgagcgggtagtaagggaacaaacgag

SEQ ID NO: 527962 - DNA, 33 bp, Homo sapien
gaggggtgagcgggtattaagggaacaaacgag

SEQ ID NO: 527963 - DNA, 33 bp, Homo sapien
agtgtccaacagagaaattctatgccattttag

SEQ ID NO: 527964 - DNA, 33 bp, Homo sapien
agtgtccaacagagaatttctatgccattttag

SEQ ID NO: 527965 - DNA, 33 bp, Homo sapien
gaaatgtaattttacaaggaagatgcaagttca

SEQ ID NO: 527966 - DNA, 33 bp, Homo sapien
gaaatgtaattttacagggaagatgcaagttca

SEQ ID NO: 527967 - DNA, 33 bp, Homo sapien
ggcttcatctattagcaaacaattatgatttaa

SEQ ID NO: 527968 - DNA, 33 bp, Homo sapien
ggcttcatctattagcgaacaattatgatttaa

SEQ ID NO: 527969 - DNA, 33 bp, Homo sapien
agtatggtaaccctacacagaatcaaggaccag

SEQ ID NO: 527970 - DNA, 33 bp, Homo sapien
agtatggtaaccctacgcagaatcaaggaccag

SEQ ID NO: 527971 - DNA, 33 bp, Homo sapien
gtgagcaggaaaataaaaaaaattgcattgaaa

SEQ ID NO: 527972 - DNA, 33 bp, Homo sapien
gtgagcaggaaaataacaaaaattgcattgaaa

SEQ ID NO: 527973 - DNA, 33 bp, Homo sapien
taaacctcaaagcctacggttagccacaaagat

SEQ ID NO: 527974 - DNA, 33 bp, Homo sapien
taaacctcaaagcctagggttagccacaaagat

SEQ ID NO: 527975 - DNA, 33 bp, Homo sapien
aatctgttgcatgggaaacagaacattcggttt

SEQ ID NO: 527976 - DNA, 33 bp, Homo sapien
aatctgttgcatgggacacagaacattcggttt

SEQ ID NO: 527977 - DNA, 33 bp, Homo sapien
catctgtgactttatgaaatgtgcatcttgact

SEQ ID NO: 527978 - DNA, 33 bp, Homo sapien
catctgtgactttatgcaatgtgcatcttgact

SEQ ID NO: 527979 - DNA, 33 bp, Homo sapien
gcacatgggtcagaccaaaaatgtccagctgta

SEQ ID NO: 527980 - DNA, 33 bp, Homo sapien
gcacatgggtcagaccgaaaatgtccagctgta

SEQ ID NO: 527981 - DNA, 33 bp, Homo sapien
ttctctcctcattcccaatgtcctaaatagcag

SEQ ID NO: 527982 - DNA, 33 bp, Homo sapien
ttctctcctcattccccatgtcctaaatagcag

SEQ ID NO: 527983 - DNA, 33 bp, Homo sapien
aataaatctagatgacactattcaactttatag

SEQ ID NO: 527984 - DNA, 33 bp, Homo sapien
aataaatctagatgaccctattcaactttatag

SEQ ID NO: 527985 - DNA, 33 bp, Homo sapien
caatgtaacctcattggaagtcgaggaatatct

SEQ ID NO: 527986 - DNA, 33 bp, Homo sapien
caatgtaacctcattgtaagtcgaggaatatct

SEQ ID NO: 527987 - DNA, 33 bp, Homo sapien
cctagtttgatttcggaataactctctcctatt

SEQ ID NO: 527988 - DNA, 33 bp, Homo sapien
cctagtttgatttcgggataactctctcctatt

SEQ ID NO: 527989 - DNA, 33 bp, Homo sapien
tgggtacttaaaccccagaagatttgcaactag

SEQ ID NO: 527990 - DNA, 33 bp, Homo sapien
tgggtacttaaaccccggaagatttgcaactag

SEQ ID NO: 527991 - DNA, 33 bp, Homo sapien
agagactggttattggaagctatgttgatttta

SEQ ID NO: 527992 - DNA, 33 bp, Homo sapien
agagactggttattgggagctatgttgatttta

SEQ ID NO: 527993 - DNA, 33 bp, Homo sapien
tccatggcaggataaaaggaaaaggagccttaa

SEQ ID NO: 527994 - DNA, 33 bp, Homo sapien
tccatggcaggataaagggaaaaggagccttaa

SEQ ID NO: 527995 - DNA, 33 bp, Homo sapien
ttgatggagagcgttacatgaccccagaagact

SEQ ID NO: 527996 - DNA, 33 bp, Homo sapien
ttgatggagagcgttatatgaccccagaagact

SEQ ID NO: 527997 - DNA, 33 bp, Homo sapien
atgttttcctcaacataaattcagacactaatt

SEQ ID NO: 527998 - DNA, 33 bp, Homo sapien
atgttttcctcaacatcaattcagacactaatt

SEQ ID NO: 527999 - DNA, 33 bp, Homo sapien
accgtccagcttaaaccgattttttgtctaaac

SEQ ID NO: 528000 - DNA, 33 bp, Homo sapien
accgtccagcttaaactgattttttgtctaaac

SEQ ID NO: 528001 - DNA, 33 bp, Homo sapien
ggcagatcactcgaacacagaagttcaagacca

SEQ ID NO: 528002 - DNA, 33 bp, Homo sapien
ggcagatcactcgaacccagaagttcaagacca

SEQ ID NO: 528003 - DNA, 33 bp, Homo sapien
ctatccctcattatgacagtttccttgatagct

SEQ ID NO: 528004 - DNA, 33 bp, Homo sapien
ctatccctcattatgatagtttccttgatagct

SEQ ID NO: 528005 - DNA, 33 bp, Homo sapien
tacgatggcctcttcacgttagcaatttcaagg

SEQ ID NO: 528006 - DNA, 33 bp, Homo sapien
tacgatggcctcttcatgttagcaatttcaagg

SEQ ID NO: 528007 - DNA, 33 bp, Homo sapien
cagaagtttcttgaaacgctcgatggtgtaggg

SEQ ID NO: 528008 - DNA, 33 bp, Homo sapien
cagaagtttcttgaaatgctcgatggtgtaggg

SEQ ID NO: 528009 - DNA, 33 bp, Homo sapien
aggtgtggtggaattacacagtgcatttagttt

SEQ ID NO: 528010 - DNA, 33 bp, Homo sapien
aggtgtggtggaattatacagtgcatttagttt

SEQ ID NO: 528011 - DNA, 33 bp, Homo sapien
tgaaagtgtgaaccataagaggctgccatccat

SEQ ID NO: 528012 - DNA, 33 bp, Homo sapien
tgaaagtgtgaaccattagaggctgccatccat

SEQ ID NO: 528013 - DNA, 33 bp, Homo sapien
gcacaaacagcaaagagaaatccacttgatttt

SEQ ID NO: 528014 - DNA, 33 bp, Homo sapien
gcacaaacagcaaagataaatccacttgatttt

SEQ ID NO: 528015 - DNA, 33 bp, Homo sapien
acttagaactacccagacatcctttcttatctt

SEQ ID NO: 528016 - DNA, 33 bp, Homo sapien
acttagaactacccagtcatcctttcttatctt

SEQ ID NO: 528017 - DNA, 33 bp, Homo sapien
tggtcactccatagaaatcagtgtgtaaagttc

SEQ ID NO: 528018 - DNA, 33 bp, Homo sapien
tggtcactccatagaagtcagtgtgtaaagttc

SEQ ID NO: 528019 - DNA, 33 bp, Homo sapien
gaagatgttcctctataaaatggtagttagatc

SEQ ID NO: 528020 - DNA, 33 bp, Homo sapien
gaagatgttcctctatgaaatggtagttagatc

SEQ ID NO: 528021 - DNA, 33 bp, Homo sapien
ttcctcattccataccaggagtcctgtgcttcc

SEQ ID NO: 528022 - DNA, 33 bp, Homo sapien
ttcctcattccataccgggagtcctgtgcttcc

SEQ ID NO: 528023 - DNA, 33 bp, Homo sapien
gcttctatctcttacacggagactcataccatt

SEQ ID NO: 528024 - DNA, 33 bp, Homo sapien
gcttctatctcttacatggagactcataccatt

SEQ ID NO: 528025 - DNA, 33 bp, Homo sapien
attacagcgaaacagaaatagggattgttttct

SEQ ID NO: 528026 - DNA, 33 bp, Homo sapien
attacagcgaaacagagatagggattgttttct

SEQ ID NO: 528027 - DNA, 33 bp, Homo sapien
acagtatatttcctgcgaattgatgtcgctcca

SEQ ID NO: 528028 - DNA, 33 bp, Homo sapien
acagtatatttcctgctaattgatgtcgctcca

SEQ ID NO: 528029 - DNA, 33 bp, Homo sapien
cttcaatgcctaataacgtatagtcaatttggg

SEQ ID NO: 528030 - DNA, 33 bp, Homo sapien
cttcaatgcctaataaggtatagtcaatttggg

SEQ ID NO: 528031 - DNA, 33 bp, Homo sapien
tgatttatgattaccaagagagaaaaacaacaa

SEQ ID NO: 528032 - DNA, 33 bp, Homo sapien
tgatttatgattaccaggagagaaaaacaacaa

SEQ ID NO: 528033 - DNA, 33 bp, Homo sapien
aagcttaatcctgtaaatccaaatccagggctg

SEQ ID NO: 528034 - DNA, 33 bp, Homo sapien
aagcttaatcctgtaagtccaaatccagggctg

SEQ ID NO: 528035 - DNA, 33 bp, Homo sapien
ctccggtacctgttccgcacctgagctcaaggg

SEQ ID NO: 528036 - DNA, 33 bp, Homo sapien
ctccggtacctgttcctcacctgagctcaaggg

SEQ ID NO: 528037 - DNA, 33 bp, Homo sapien
attttaaagcccactgaaattagagtgcttgtt

SEQ ID NO: 528038 - DNA, 33 bp, Homo sapien
attttaaagcccactggaattagagtgcttgtt

SEQ ID NO: 528039 - DNA, 33 bp, Homo sapien
aaggatgttgaagacccgctgagaggagatgaa

SEQ ID NO: 528040 - DNA, 33 bp, Homo sapien
aaggatgttgaagaccggctgagaggagatgaa

SEQ ID NO: 528041 - DNA, 33 bp, Homo sapien
ctactatagctaatacaatgaccttgaagttag

SEQ ID NO: 528042 - DNA, 33 bp, Homo sapien
ctactatagctaataccatgaccttgaagttag

SEQ ID NO: 528043 - DNA, 33 bp, Homo sapien
tgggcgtgaatgaggacgacaacattgaggagc

SEQ ID NO: 528044 - DNA, 33 bp, Homo sapien
tgggcgtgaatgaggatgacaacattgaggagc

SEQ ID NO: 528045 - DNA, 33 bp, Homo sapien
ttttcttccagcctaaactttttcctttagcat

SEQ ID NO: 528046 - DNA, 33 bp, Homo sapien
ttttcttccagcctaagctttttcctttagcat

SEQ ID NO: 528047 - DNA, 33 bp, Homo sapien
cgagccagtagagtcagtagaccctcattttac

SEQ ID NO: 528048 - DNA, 33 bp, Homo sapien
cgagccagtagagtcattagaccctcattttac

SEQ ID NO: 528049 - DNA, 33 bp, Homo sapien
ttttcaaatggactcaatatccctcaagtctat

SEQ ID NO: 528050 - DNA, 33 bp, Homo sapien
ttttcaaatggactcattatccctcaagtctat

SEQ ID NO: 528051 - DNA, 33 bp, Homo sapien
aaagagccagaattcaccagacctggtctcagg

SEQ ID NO: 528052 - DNA, 33 bp, Homo sapien
aaagagccagaattcagcagacctggtctcagg

SEQ ID NO: 528053 - DNA, 33 bp, Homo sapien
aaaaaaaactttgggcactttagatagctaaat

SEQ ID NO: 528054 - DNA, 33 bp, Homo sapien
aaaaaaaactttgggcgctttagatagctaaat

SEQ ID NO: 528055 - DNA, 33 bp, Homo sapien
ggggatgtaactgcagcaacaggttgtatgtaa

SEQ ID NO: 528056 - DNA, 33 bp, Homo sapien
ggggatgtaactgcaggaacaggttgtatgtaa

SEQ ID NO: 528057 - DNA, 33 bp, Homo sapien
cttccaggacccaaaaatatatcacagtaagat

SEQ ID NO: 528058 - DNA, 33 bp, Homo sapien
cttccaggacccaaaagtatatcacagtaagat

SEQ ID NO: 528059 - DNA, 33 bp, Homo sapien
accattctaactattaccagagccagagttggg

SEQ ID NO: 528060 - DNA, 33 bp, Homo sapien
accattctaactattatcagagccagagttggg

SEQ ID NO: 528061 - DNA, 33 bp, Homo sapien
aaacgaacagaatttacgacaggtaaacatagt

SEQ ID NO: 528062 - DNA, 33 bp, Homo sapien
aaacgaacagaatttatgacaggtaaacatagt

SEQ ID NO: 528063 - DNA, 33 bp, Homo sapien
cactatctgggtagcacgatcatttctacccca

SEQ ID NO: 528064 - DNA, 33 bp, Homo sapien
cactatctgggtagcaggatcatttctacccca

SEQ ID NO: 528065 - DNA, 33 bp, Homo sapien
tatgtattgagaactacgcagagtatgcactga

SEQ ID NO: 528066 - DNA, 33 bp, Homo sapien
tatgtattgagaactatgcagagtatgcactga

SEQ ID NO: 528067 - DNA, 33 bp, Homo sapien
ggcggaggagctcagacgaagctgttaaccgga

SEQ ID NO: 528068 - DNA, 33 bp, Homo sapien
ggcggaggagctcagatgaagctgttaaccgga

SEQ ID NO: 528069 - DNA, 33 bp, Homo sapien
acatcccttaaagatacagcaataaggaagcca

SEQ ID NO: 528070 - DNA, 33 bp, Homo sapien
acatcccttaaagatagagcaataaggaagcca

SEQ ID NO: 528071 - DNA, 33 bp, Homo sapien
ctaacacattcatcacaggtccaacctcatgac

SEQ ID NO: 528072 - DNA, 33 bp, Homo sapien
ctaacacattcatcacgggtccaacctcatgac

SEQ ID NO: 528073 - DNA, 33 bp, Homo sapien
tatattaggaggtatcagaattttctcaattct

SEQ ID NO: 528074 - DNA, 33 bp, Homo sapien
tatattaggaggtatcggaattttctcaattct

SEQ ID NO: 528075 - DNA, 33 bp, Homo sapien
tagagacagaaacctcacaaattcagatgccaa

SEQ ID NO: 528076 - DNA, 33 bp, Homo sapien
tagagacagaaacctcgcaaattcagatgccaa

SEQ ID NO: 528077 - DNA, 33 bp, Homo sapien
tccccacagtctgaaagctacagtccttctaat

SEQ ID NO: 528078 - DNA, 33 bp, Homo sapien
tccccacagtctgaaatctacagtccttctaat

SEQ ID NO: 528079 - DNA, 33 bp, Homo sapien
acattcttgggacttaacccagacctactgaat

SEQ ID NO: 528080 - DNA, 33 bp, Homo sapien
acattcttgggacttaccccagacctactgaat

SEQ ID NO: 528081 - DNA, 33 bp, Homo sapien
tatttatttctagataaacttatgtgcttccct

SEQ ID NO: 528082 - DNA, 33 bp, Homo sapien
tatttatttctagatagacttatgtgcttccct

SEQ ID NO: 528083 - DNA, 33 bp, Homo sapien
agacacacaggaagaaaaattgggtaaacacaa

SEQ ID NO: 528084 - DNA, 33 bp, Homo sapien
agacacacaggaagaacaattgggtaaacacaa

SEQ ID NO: 528085 - DNA, 33 bp, Homo sapien
aaccctaatggaaaggaaaacaacatccttcgg

SEQ ID NO: 528086 - DNA, 33 bp, Homo sapien
aaccctaatggaaagggaaacaacatccttcgg

SEQ ID NO: 528087 - DNA, 33 bp, Homo sapien
ttcctcttctggcagcaagtgcgacctctttta

SEQ ID NO: 528088 - DNA, 33 bp, Homo sapien
ttcctcttctggcagcgagtgcgacctctttta

SEQ ID NO: 528089 - DNA, 33 bp, Homo sapien
tgcgagatatgtgtagccattgttatttgttcc

SEQ ID NO: 528090 - DNA, 33 bp, Homo sapien
tgcgagatatgtgtagtcattgttatttgttcc

SEQ ID NO: 528091 - DNA, 33 bp, Homo sapien
catggtaagaagttaccagttggagcaggggaa

SEQ ID NO: 528092 - DNA, 33 bp, Homo sapien
catggtaagaagttactagttggagcaggggaa

SEQ ID NO: 528093 - DNA, 33 bp, Homo sapien
ctacttaagtgatctccattatctgcacttaac

SEQ ID NO: 528094 - DNA, 33 bp, Homo sapien
ctacttaagtgatctctattatctgcacttaac

SEQ ID NO: 528095 - DNA, 33 bp, Homo sapien
gttggctccatagccacgtgactgtagctctga

SEQ ID NO: 528096 - DNA, 33 bp, Homo sapien
gttggctccatagccatgtgactgtagctctga

SEQ ID NO: 528097 - DNA, 33 bp, Homo sapien
agggctgagcaggaacaatattctaggcaggag

SEQ ID NO: 528098 - DNA, 33 bp, Homo sapien
agggctgagcaggaacgatattctaggcaggag

SEQ ID NO: 528099 - DNA, 33 bp, Homo sapien
acgacccccgggaagacgtaagatcaccctgtg

SEQ ID NO: 528100 - DNA, 33 bp, Homo sapien
acgacccccgggaagatgtaagatcaccctgtg

SEQ ID NO: 528101 - DNA, 33 bp, Homo sapien
ggactgacgggagagaaaaatcagagtgactgc

SEQ ID NO: 528102 - DNA, 33 bp, Homo sapien
ggactgacgggagagagaaatcagagtgactgc

SEQ ID NO: 528103 - DNA, 33 bp, Homo sapien
gttaatgcagagatgacgtttggggtctatacc

SEQ ID NO: 528104 - DNA, 33 bp, Homo sapien
gttaatgcagagatgatgtttggggtctatacc

SEQ ID NO: 528105 - DNA, 33 bp, Homo sapien
gaaatttgttgcaggaataagatgagactgcaa

SEQ ID NO: 528106 - DNA, 33 bp, Homo sapien
gaaatttgttgcaggagtaagatgagactgcaa

SEQ ID NO: 528107 - DNA, 33 bp, Homo sapien
gcacagctgggctccactctggaatctggaatc

SEQ ID NO: 528108 - DNA, 33 bp, Homo sapien
gcacagctgggctccattctggaatctggaatc

SEQ ID NO: 528109 - DNA, 33 bp, Homo sapien
gacaatcatgactctcaattttccttccttccc

SEQ ID NO: 528110 - DNA, 33 bp, Homo sapien
gacaatcatgactctccattttccttccttccc

SEQ ID NO: 528111 - DNA, 33 bp, Homo sapien
ctttcatgtgcattgaacaaggctttttcactt

SEQ ID NO: 528112 - DNA, 33 bp, Homo sapien
ctttcatgtgcattgagcaaggctttttcactt

SEQ ID NO: 528113 - DNA, 33 bp, Homo sapien
ccctttcagctctcaaagttattctaagctctg

SEQ ID NO: 528114 - DNA, 33 bp, Homo sapien
ccctttcagctctcaaggttattctaagctctg

SEQ ID NO: 528115 - DNA, 33 bp, Homo sapien
catcacttaaatgtaacgatgaacaatactgag

SEQ ID NO: 528116 - DNA, 33 bp, Homo sapien
catcacttaaatgtaaggatgaacaatactgag

SEQ ID NO: 528117 - DNA, 33 bp, Homo sapien
gctgttgtacttgcgaacttgttatttttgtat

SEQ ID NO: 528118 - DNA, 33 bp, Homo sapien
gctgttgtacttgcgatcttgttatttttgtat

SEQ ID NO: 528119 - DNA, 33 bp, Homo sapien
actgagaggctcatacagaggttttatacttag

SEQ ID NO: 528120 - DNA, 33 bp, Homo sapien
actgagaggctcatacggaggttttatacttag

SEQ ID NO: 528121 - DNA, 33 bp, Homo sapien
atatagacttcgtactaacattttaaaaggtga

SEQ ID NO: 528122 - DNA, 33 bp, Homo sapien
atatagacttcgtactcacattttaaaaggtga

SEQ ID NO: 528123 - DNA, 33 bp, Homo sapien
aatggcaagttgttcacggatatctattctccc

SEQ ID NO: 528124 - DNA, 33 bp, Homo sapien
aatggcaagttgttcatggatatctattctccc

SEQ ID NO: 528125 - DNA, 33 bp, Homo sapien
cttaaacatggcttgcaatagcaatagttgtgc

SEQ ID NO: 528126 - DNA, 33 bp, Homo sapien
cttaaacatggcttgcgatagcaatagttgtgc

SEQ ID NO: 528127 - DNA, 33 bp, Homo sapien
attgaaaaataagcgcaacggagggagatctga

SEQ ID NO: 528128 - DNA, 33 bp, Homo sapien
attgaaaaataagcgcgacggagggagatctga

SEQ ID NO: 528129 - DNA, 33 bp, Homo sapien
ataaacaaccctaaacaatggtagttataatct

SEQ ID NO: 528130 - DNA, 33 bp, Homo sapien
ataaacaaccctaaacgatggtagttataatct

SEQ ID NO: 528131 - DNA, 33 bp, Homo sapien
gacctcaccattcaaagagtctgatcgagttgg

SEQ ID NO: 528132 - DNA, 33 bp, Homo sapien
gacctcaccattcaaatagtctgatcgagttgg

SEQ ID NO: 528133 - DNA, 33 bp, Homo sapien
tccttttgaagcaaaagaatccaaaaggagtaa

SEQ ID NO: 528134 - DNA, 33 bp, Homo sapien
tccttttgaagcaaaataatccaaaaggagtaa

SEQ ID NO: 528135 - DNA, 33 bp, Homo sapien
tgggaagaacctggaacggcatccctatggatg

SEQ ID NO: 528136 - DNA, 33 bp, Homo sapien
tgggaagaacctggaatggcatccctatggatg

SEQ ID NO: 528137 - DNA, 33 bp, Homo sapien
ccatttaggcttcagcactgctggagtcctttc

SEQ ID NO: 528138 - DNA, 33 bp, Homo sapien
ccatttaggcttcagctctgctggagtcctttc

SEQ ID NO: 528139 - DNA, 33 bp, Homo sapien
ctaccctaatcacaccactccagttatcaaagc

SEQ ID NO: 528140 - DNA, 33 bp, Homo sapien
ctaccctaatcacaccgctccagttatcaaagc

SEQ ID NO: 528141 - DNA, 33 bp, Homo sapien
gtttaggtatcacttaaagagggctgagggcca

SEQ ID NO: 528142 - DNA, 33 bp, Homo sapien
gtttaggtatcacttacagagggctgagggcca

SEQ ID NO: 528143 - DNA, 33 bp, Homo sapien
gatttgttcatagttcaccattagctggtagtc

SEQ ID NO: 528144 - DNA, 33 bp, Homo sapien
gatttgttcatagttcgccattagctggtagtc

SEQ ID NO: 528145 - DNA, 33 bp, Homo sapien
atggaggatcagaaaccgaacttattcttctac

SEQ ID NO: 528146 - DNA, 33 bp, Homo sapien
atggaggatcagaaactgaacttattcttctac

SEQ ID NO: 528147 - DNA, 33 bp, Homo sapien
cttggtctataatggacgtctccagattggata

SEQ ID NO: 528148 - DNA, 33 bp, Homo sapien
cttggtctataatggatgtctccagattggata

SEQ ID NO: 528149 - DNA, 33 bp, Homo sapien
cttgatagcagcaagcaaaagagacggcagcct

SEQ ID NO: 528150 - DNA, 33 bp, Homo sapien
cttgatagcagcaagcgaaagagacggcagcct

SEQ ID NO: 528151 - DNA, 33 bp, Homo sapien
atgggcccagttacacaagattaaaatggagac

SEQ ID NO: 528152 - DNA, 33 bp, Homo sapien
atgggcccagttacaccagattaaaatggagac

SEQ ID NO: 528153 - DNA, 33 bp, Homo sapien
aggaaagcggcttcagaaggacattcattcatt

SEQ ID NO: 528154 - DNA, 33 bp, Homo sapien
aggaaagcggcttcaggaggacattcattcatt

SEQ ID NO: 528155 - DNA, 33 bp, Homo sapien
agtgagtgaatattcaatgaaagtttgctaact

SEQ ID NO: 528156 - DNA, 33 bp, Homo sapien
agtgagtgaatattcagtgaaagtttgctaact

SEQ ID NO: 528157 - DNA, 33 bp, Homo sapien
ggtgtccgtgagttcaatctcctactctctact

SEQ ID NO: 528158 - DNA, 33 bp, Homo sapien
ggtgtccgtgagttcagtctcctactctctact

SEQ ID NO: 528159 - DNA, 33 bp, Homo sapien
tctgcctttggctagcaagtctcagtttgaggc

SEQ ID NO: 528160 - DNA, 33 bp, Homo sapien
tctgcctttggctagcgagtctcagtttgaggc

SEQ ID NO: 528161 - DNA, 33 bp, Homo sapien
atccatagaatctaaccgcagagcgactgggag

SEQ ID NO: 528162 - DNA, 33 bp, Homo sapien
atccatagaatctaactgcagagcgactgggag

SEQ ID NO: 528163 - DNA, 33 bp, Homo sapien
aatccacaggtgagcgaatgggagttggaaaga

SEQ ID NO: 528164 - DNA, 33 bp, Homo sapien
aatccacaggtgagcggatgggagttggaaaga

SEQ ID NO: 528165 - DNA, 33 bp, Homo sapien
gacaacagcctacttacagatttctcctgcttt

SEQ ID NO: 528166 - DNA, 33 bp, Homo sapien
gacaacagcctacttatagatttctcctgcttt

SEQ ID NO: 528167 - DNA, 33 bp, Homo sapien
tcattctcctttcatgccacagtgtagcctgtt

SEQ ID NO: 528168 - DNA, 33 bp, Homo sapien
tcattctcctttcatgtcacagtgtagcctgtt

SEQ ID NO: 528169 - DNA, 33 bp, Homo sapien
aaacaaagaccgaaataagactgagcactacac

SEQ ID NO: 528170 - DNA, 33 bp, Homo sapien
aaacaaagaccgaaatcagactgagcactacac

SEQ ID NO: 528171 - DNA, 33 bp, Homo sapien
tgctaaattccagcgacggtttctgccagggcc

SEQ ID NO: 528172 - DNA, 33 bp, Homo sapien
tgctaaattccagcgatggtttctgccagggcc

SEQ ID NO: 528173 - DNA, 33 bp, Homo sapien
gtgacttgattctgcacagatgtcaattctttt

SEQ ID NO: 528174 - DNA, 33 bp, Homo sapien
gtgacttgattctgcatagatgtcaattctttt

SEQ ID NO: 528175 - DNA, 33 bp, Homo sapien
attatctatctcactaagccaaaggggatctat

SEQ ID NO: 528176 - DNA, 33 bp, Homo sapien
attatctatctcactatgccaaaggggatctat

SEQ ID NO: 528177 - DNA, 33 bp, Homo sapien
atgaatctacttggcacagtctggtgctctggt

SEQ ID NO: 528178 - DNA, 33 bp, Homo sapien
atgaatctacttggcagagtctggtgctctggt

SEQ ID NO: 528179 - DNA, 33 bp, Homo sapien
tgtcacaagcaagcacaattcaaggcatattag

SEQ ID NO: 528180 - DNA, 33 bp, Homo sapien
tgtcacaagcaagcacgattcaaggcatattag

SEQ ID NO: 528181 - DNA, 33 bp, Homo sapien
tcaatccgtcaatcaacaaggacaagaaaggaa

SEQ ID NO: 528182 - DNA, 33 bp, Homo sapien
tcaatccgtcaatcaataaggacaagaaaggaa

SEQ ID NO: 528183 - DNA, 33 bp, Homo sapien
aatgagatagaaatgcagaatgaaagagaatag

SEQ ID NO: 528184 - DNA, 33 bp, Homo sapien
aatgagatagaaatgcggaatgaaagagaatag

SEQ ID NO: 528185 - DNA, 33 bp, Homo sapien
taattgtgacaatgtaactattctgtggagtat

SEQ ID NO: 528186 - DNA, 33 bp, Homo sapien
taattgtgacaatgtagctattctgtggagtat

SEQ ID NO: 528187 - DNA, 33 bp, Homo sapien
acaaaaggttatggaaataattgtgacaatgta

SEQ ID NO: 528188 - DNA, 33 bp, Homo sapien
acaaaaggttatggaattaattgtgacaatgta

SEQ ID NO: 528189 - DNA, 33 bp, Homo sapien
ttaaactttcatttgccaggttgtgaggaagtt

SEQ ID NO: 528190 - DNA, 33 bp, Homo sapien
ttaaactttcatttgctaggttgtgaggaagtt

SEQ ID NO: 528191 - DNA, 33 bp, Homo sapien
attcagaatatttcagcaaccattacagccaaa

SEQ ID NO: 528192 - DNA, 33 bp, Homo sapien
attcagaatatttcagtaaccattacagccaaa

SEQ ID NO: 528193 - DNA, 33 bp, Homo sapien
gtctgatgccttctagaaaagctcttcttagca

SEQ ID NO: 528194 - DNA, 33 bp, Homo sapien
gtctgatgccttctaggaaagctcttcttagca

SEQ ID NO: 528195 - DNA, 33 bp, Homo sapien
ttttcatgagtgtttgcaaatttcacctggctt

SEQ ID NO: 528196 - DNA, 33 bp, Homo sapien
ttttcatgagtgtttgtaaatttcacctggctt

SEQ ID NO: 528197 - DNA, 33 bp, Homo sapien
cactgatctcttggaactaagttaaaaggctaa

SEQ ID NO: 528198 - DNA, 33 bp, Homo sapien
cactgatctcttggaattaagttaaaaggctaa

SEQ ID NO: 528199 - DNA, 33 bp, Homo sapien
ttgtagaagactgttcgcaggccgcagtgtggc

SEQ ID NO: 528200 - DNA, 33 bp, Homo sapien
ttgtagaagactgttctcaggccgcagtgtggc

SEQ ID NO: 528201 - DNA, 33 bp, Homo sapien
cattccctgcatgttcaaatacagacaaaaatc

SEQ ID NO: 528202 - DNA, 33 bp, Homo sapien
cattccctgcatgttcgaatacagacaaaaatc

SEQ ID NO: 528203 - DNA, 33 bp, Homo sapien
ttgttttatgcaattacaaggtttgcttcatga

SEQ ID NO: 528204 - DNA, 33 bp, Homo sapien
ttgttttatgcaattataaggtttgcttcatga

SEQ ID NO: 528205 - DNA, 33 bp, Homo sapien
gaacaaatccagcccgaaattttcatgtttaca

SEQ ID NO: 528206 - DNA, 33 bp, Homo sapien
gaacaaatccagcccggaattttcatgtttaca

SEQ ID NO: 528207 - DNA, 33 bp, Homo sapien
tccaggttattctgaaatgattctttgggactg

SEQ ID NO: 528208 - DNA, 33 bp, Homo sapien
tccaggttattctgaagtgattctttgggactg

SEQ ID NO: 528209 - DNA, 33 bp, Homo sapien
tagcaatacagacacaagttttaatcttgaatc

SEQ ID NO: 528210 - DNA, 33 bp, Homo sapien
tagcaatacagacacaggttttaatcttgaatc

SEQ ID NO: 528211 - DNA, 33 bp, Homo sapien
cctctcttgatacctaaggtcctgaatgcagaa

SEQ ID NO: 528212 - DNA, 33 bp, Homo sapien
cctctcttgatacctagggtcctgaatgcagaa

SEQ ID NO: 528213 - DNA, 33 bp, Homo sapien
aaagaagaagtaatcaagtaatcaaagccttat

SEQ ID NO: 528214 - DNA, 33 bp, Homo sapien
aaagaagaagtaatcacgtaatcaaagccttat

SEQ ID NO: 528215 - DNA, 33 bp, Homo sapien
atcaggaatcacaggaaaaataaggctttgatt

SEQ ID NO: 528216 - DNA, 33 bp, Homo sapien
atcaggaatcacaggagaaataaggctttgatt

SEQ ID NO: 528217 - DNA, 33 bp, Homo sapien
ttactaaatattcctaaaactctagatggtatt

SEQ ID NO: 528218 - DNA, 33 bp, Homo sapien
ttactaaatattcctacaactctagatggtatt

SEQ ID NO: 528219 - DNA, 33 bp, Homo sapien
taggcattgttctgaacggacaggaaagcaaac

SEQ ID NO: 528220 - DNA, 33 bp, Homo sapien
taggcattgttctgaatggacaggaaagcaaac

SEQ ID NO: 528221 - DNA, 33 bp, Homo sapien
tctaataaatgacaaactgcttttcatgtcttc

SEQ ID NO: 528222 - DNA, 33 bp, Homo sapien
tctaataaatgacaaagtgcttttcatgtcttc

SEQ ID NO: 528223 - DNA, 33 bp, Homo sapien
taaatgactgaagccacaacatttccataagta

SEQ ID NO: 528224 - DNA, 33 bp, Homo sapien
taaatgactgaagccagaacatttccataagta

SEQ ID NO: 528225 - DNA, 33 bp, Homo sapien
gagttaacaatatgtgaaagttctggtttgaat

SEQ ID NO: 528226 - DNA, 33 bp, Homo sapien
gagttaacaatatgtggaagttctggtttgaat

SEQ ID NO: 528227 - DNA, 33 bp, Homo sapien
aaagtatgattgttctcaaaaagataccaggtt

SEQ ID NO: 528228 - DNA, 33 bp, Homo sapien
aaagtatgattgttcttaaaaagataccaggtt

SEQ ID NO: 528229 - DNA, 33 bp, Homo sapien
tgtatccatctcatacacagtttttcataatgt

SEQ ID NO: 528230 - DNA, 33 bp, Homo sapien
tgtatccatctcatacgcagtttttcataatgt

SEQ ID NO: 528231 - DNA, 33 bp, Homo sapien
gactgtaagcctctatcactcactgggaataat

SEQ ID NO: 528232 - DNA, 33 bp, Homo sapien
gactgtaagcctctatgactcactgggaataat

SEQ ID NO: 528233 - DNA, 33 bp, Homo sapien
tcatgagcttcaatcccatgtctagaagacatc

SEQ ID NO: 528234 - DNA, 33 bp, Homo sapien
tcatgagcttcaatcctatgtctagaagacatc

SEQ ID NO: 528235 - DNA, 33 bp, Homo sapien
gtcctttggtcttaagcaactgcttttaatcac

SEQ ID NO: 528236 - DNA, 33 bp, Homo sapien
gtcctttggtcttaaggaactgcttttaatcac

SEQ ID NO: 528237 - DNA, 33 bp, Homo sapien
tttggggttttgacacaacaattgaccagcatt

SEQ ID NO: 528238 - DNA, 33 bp, Homo sapien
tttggggttttgacacgacaattgaccagcatt

SEQ ID NO: 528239 - DNA, 33 bp, Homo sapien
tgcggggtctcaaaaacatctcaaacaccagta

SEQ ID NO: 528240 - DNA, 33 bp, Homo sapien
tgcggggtctcaaaaatatctcaaacaccagta

SEQ ID NO: 528241 - DNA, 33 bp, Homo sapien
tccatatccaggaaaacttggccataactaaga

SEQ ID NO: 528242 - DNA, 33 bp, Homo sapien
tccatatccaggaaaatttggccataactaaga

SEQ ID NO: 528243 - DNA, 33 bp, Homo sapien
aaatcttttgcgtaagacagtaccattgatagt

SEQ ID NO: 528244 - DNA, 33 bp, Homo sapien
aaatcttttgcgtaaggcagtaccattgatagt

SEQ ID NO: 528245 - DNA, 33 bp, Homo sapien
agtcctaagaaaaaacccaagtactccgtcagg

SEQ ID NO: 528246 - DNA, 33 bp, Homo sapien
agtcctaagaaaaaacgcaagtactccgtcagg

SEQ ID NO: 528247 - DNA, 33 bp, Homo sapien
gcttgtaaaggtctcaaaaagactgttctagaa

SEQ ID NO: 528248 - DNA, 33 bp, Homo sapien
gcttgtaaaggtctcagaaagactgttctagaa

SEQ ID NO: 528249 - DNA, 33 bp, Homo sapien
agaaaaagacagaaccactactttgtatttcca

SEQ ID NO: 528250 - DNA, 33 bp, Homo sapien
agaaaaagacagaaccgctactttgtatttcca

SEQ ID NO: 528251 - DNA, 33 bp, Homo sapien
actatgccgctctccacaaaaattctacaatat

SEQ ID NO: 528252 - DNA, 33 bp, Homo sapien
actatgccgctctccataaaaattctacaatat

SEQ ID NO: 528253 - DNA, 33 bp, Homo sapien
ttgtagtaggaaaacgacagcttactttcagat

SEQ ID NO: 528254 - DNA, 33 bp, Homo sapien
ttgtagtaggaaaacggcagcttactttcagat

SEQ ID NO: 528255 - DNA, 33 bp, Homo sapien
aaaagaaaaaaagacacgtgcaatgatggctct

SEQ ID NO: 528256 - DNA, 33 bp, Homo sapien
aaaagaaaaaaagacatgtgcaatgatggctct

SEQ ID NO: 528257 - DNA, 33 bp, Homo sapien
gcctactacatactggccattatggagatactg

SEQ ID NO: 528258 - DNA, 33 bp, Homo sapien
gcctactacatactgggcattatggagatactg

SEQ ID NO: 528259 - DNA, 33 bp, Homo sapien
taaggagacagttaataatggacacttttgaaa

SEQ ID NO: 528260 - DNA, 33 bp, Homo sapien
taaggagacagttaatgatggacacttttgaaa

SEQ ID NO: 528261 - DNA, 33 bp, Homo sapien
ggcctgtaaggaacccagctgcacagcaggaga

SEQ ID NO: 528262 - DNA, 33 bp, Homo sapien
ggcctgtaaggaacccggctgcacagcaggaga

SEQ ID NO: 528263 - DNA, 33 bp, Homo sapien
agctcatagcagaggcaccagattaggattaga

SEQ ID NO: 528264 - DNA, 33 bp, Homo sapien
agctcatagcagaggcgccagattaggattaga

SEQ ID NO: 528265 - DNA, 33 bp, Homo sapien
taagacatttcaacaaactctgtaaattagttt

SEQ ID NO: 528266 - DNA, 33 bp, Homo sapien
taagacatttcaacaatctctgtaaattagttt

SEQ ID NO: 528267 - DNA, 33 bp, Homo sapien
tcacggtgccgggctaatagaacccatttcagt

SEQ ID NO: 528268 - DNA, 33 bp, Homo sapien
tcacggtgccgggctagtagaacccatttcagt

SEQ ID NO: 528269 - DNA, 33 bp, Homo sapien
cttctctctgacgtccagctacttcttctcttc

SEQ ID NO: 528270 - DNA, 33 bp, Homo sapien
cttctctctgacgtccggctacttcttctcttc

SEQ ID NO: 528271 - DNA, 33 bp, Homo sapien
atcaggagtcacaggcaacccctaggtgctgct

SEQ ID NO: 528272 - DNA, 33 bp, Homo sapien
atcaggagtcacaggccacccctaggtgctgct

SEQ ID NO: 528273 - DNA, 33 bp, Homo sapien
ggggccacctctatcaaataacaaattaccaca

SEQ ID NO: 528274 - DNA, 33 bp, Homo sapien
ggggccacctctatcagataacaaattaccaca

SEQ ID NO: 528275 - DNA, 33 bp, Homo sapien
ataagagttgcatagaaaagggatgatttaact

SEQ ID NO: 528276 - DNA, 33 bp, Homo sapien
ataagagttgcatagacaagggatgatttaact

SEQ ID NO: 528277 - DNA, 33 bp, Homo sapien
accaggcaccaccccaatagctcaaagcccacc

SEQ ID NO: 528278 - DNA, 33 bp, Homo sapien
accaggcaccaccccagtagctcaaagcccacc

SEQ ID NO: 528279 - DNA, 33 bp, Homo sapien
ttctgaaaagagatgaactcaacatgaatacaa

SEQ ID NO: 528280 - DNA, 33 bp, Homo sapien
ttctgaaaagagatgacctcaacatgaatacaa

SEQ ID NO: 528281 - DNA, 33 bp, Homo sapien
acaattctattagtttaaaacagggcaatgtag

SEQ ID NO: 528282 - DNA, 33 bp, Homo sapien
acaattctattagtttcaaacagggcaatgtag

SEQ ID NO: 528283 - DNA, 33 bp, Homo sapien
gttcagacattagtaaacaatcctggaatctct

SEQ ID NO: 528284 - DNA, 33 bp, Homo sapien
gttcagacattagtaagcaatcctggaatctct

SEQ ID NO: 528285 - DNA, 33 bp, Homo sapien
taattcatgggaccaactgagagtaatctttct

SEQ ID NO: 528286 - DNA, 33 bp, Homo sapien
taattcatgggaccaattgagagtaatctttct

SEQ ID NO: 528287 - DNA, 33 bp, Homo sapien; identical to SEQ ID NO: 528285

SEQ ID NO: 528288 - DNA, 33 bp, Homo sapien; identical to SEQ ID NO: 528286

SEQ ID NO: 528289 - DNA, 33 bp, Homo sapien
actaggtgcactgtcaatcagtagtaatatttt

SEQ ID NO: 528290 - DNA, 33 bp, Homo sapien
actaggtgcactgtcagtcagtagtaatatttt

SEQ ID NO: 528291 - DNA, 33 bp, Homo sapien
tttatatcaaaaagcaataggcaatgttaatct

SEQ ID NO: 528292 - DNA, 33 bp, Homo sapien
tttatatcaaaaagcattaggcaatgttaatct

SEQ ID NO: 528293 - DNA, 33 bp, Homo sapien
gtcttcttaatttgaaaccattttcccctcaat

SEQ ID NO: 528294 - DNA, 33 bp, Homo sapien
gtcttcttaatttgaagccattttcccctcaat

SEQ ID NO: 528295 - DNA, 33 bp, Homo sapien
ttttaggctctcagaaatattgagcaaaaggta

SEQ ID NO: 528296 - DNA, 33 bp, Homo sapien
ttttaggctctcagaagtattgagcaaaaggta

SEQ ID NO: 528297 - DNA, 33 bp, Homo sapien
ctctgtgaagaaataaaattctaatggcttctg

SEQ ID NO: 528298 - DNA, 33 bp, Homo sapien
ctctgtgaagaaataacattctaatggcttctg

SEQ ID NO: 528299 - DNA, 33 bp, Homo sapien
tgtcagaagcatctcaccggaaaactagaaacc

SEQ ID NO: 528300 - DNA, 33 bp, Homo sapien
tgtcagaagcatctcagcggaaaactagaaacc

SEQ ID NO: 528301 - DNA, 33 bp, Homo sapien
ggaagtatttcatctcaccctctaggctgatgc

SEQ ID NO: 528302 - DNA, 33 bp, Homo sapien
ggaagtatttcatctcgccctctaggctgatgc

SEQ ID NO: 528303 - DNA, 33 bp, Homo sapien
catacctccatgtagagacacaaaaccagaatg

SEQ ID NO: 528304 - DNA, 33 bp, Homo sapien
catacctccatgtagatacacaaaaccagaatg

SEQ ID NO: 528305 - DNA, 33 bp, Homo sapien
gttgactacttgcaggaacggaagagtttgttt

SEQ ID NO: 528306 - DNA, 33 bp, Homo sapien
gttgactacttgcagggacggaagagtttgttt

SEQ ID NO: 528307 - DNA, 33 bp, Homo sapien
acccaaatactcaggcaactcagggaattcatt

SEQ ID NO: 528308 - DNA, 33 bp, Homo sapien
acccaaatactcaggcgactcagggaattcatt

SEQ ID NO: 528309 - DNA, 33 bp, Homo sapien
taacctgcaatagttcacaagtaatttaacata

SEQ ID NO: 528310 - DNA, 33 bp, Homo sapien
taacctgcaatagttctcaagtaatttaacata

SEQ ID NO: 528311 - DNA, 33 bp, Homo sapien
tttaggcctataataaatgaagccgctaggaac

SEQ ID NO: 528312 - DNA, 33 bp, Homo sapien
tttaggcctataataagtgaagccgctaggaac

SEQ ID NO: 528313 - DNA, 33 bp, Homo sapien
ctttcacctagattacggaaatagcttccttat

SEQ ID NO: 528314 - DNA, 33 bp, Homo sapien
ctttcacctagattactgaaatagcttccttat

SEQ ID NO: 528315 - DNA, 33 bp, Homo sapien
catatatccaatttcacacttaacatctagaat

SEQ ID NO: 528316 - DNA, 33 bp, Homo sapien
catatatccaatttcatacttaacatctagaat

SEQ ID NO: 528317 - DNA, 33 bp, Homo sapien
taatccatatatcactaagtcgaaatgattaat

SEQ ID NO: 528318 - DNA, 33 bp, Homo sapien
taatccatatatcactgagtcgaaatgattaat

SEQ ID NO: 528319 - DNA, 33 bp, Homo sapien
cagatattttaatgtgcaataagggactgtaat

SEQ ID NO: 528320 - DNA, 33 bp, Homo sapien
cagatattttaatgtggaataagggactgtaat

SEQ ID NO: 528321 - DNA, 33 bp, Homo sapien
tattgcatgccaccataatacatgctgtgggtg

SEQ ID NO: 528322 - DNA, 33 bp, Homo sapien
tattgcatgccaccatgatacatgctgtgggtg

SEQ ID NO: 528323 - DNA, 33 bp, Homo sapien
agtgttaaatggaaagaattgccatctattgtc

SEQ ID NO: 528324 - DNA, 33 bp, Homo sapien
agtgttaaatggaaagtattgccatctattgtc

SEQ ID NO: 528325 - DNA, 33 bp, Homo sapien
ggctgataaagatctaaagtcatttccagtgat

SEQ ID NO: 528326 - DNA, 33 bp, Homo sapien
ggctgataaagatctagagtcatttccagtgat

SEQ ID NO: 528327 - DNA, 33 bp, Homo sapien
taggtacttctatacaatccaaaacaagcacag

SEQ ID NO: 528328 - DNA, 33 bp, Homo sapien
taggtacttctatacagtccaaaacaagcacag

SEQ ID NO: 528329 - DNA, 33 bp, Homo sapien
gctcttcatcttgctcaattttcaccccatcac

SEQ ID NO: 528330 - DNA, 33 bp, Homo sapien
gctcttcatcttgctcgattttcaccccatcac

SEQ ID NO: 528331 - DNA, 33 bp, Homo sapien
ggcaaactgagatttgaattcaggtctgacatc

SEQ ID NO: 528332 - DNA, 33 bp, Homo sapien
ggcaaactgagatttgcattcaggtctgacatc

SEQ ID NO: 528333 - DNA, 33 bp, Homo sapien
atgaaaaataagtaggaccctcaacccagtatt

SEQ ID NO: 528334 - DNA, 33 bp, Homo sapien
atgaaaaataagtaggtccctcaacccagtatt

SEQ ID NO: 528335 - DNA, 33 bp, Homo sapien
ctgctattccagagaactgtgaaagtctgtgat

SEQ ID NO: 528336 - DNA, 33 bp, Homo sapien
ctgctattccagagaattgtgaaagtctgtgat

SEQ ID NO: 528337 - DNA, 33 bp, Homo sapien
ggaaaactgggctttcaaactcagaggattacc

SEQ ID NO: 528338 - DNA, 33 bp, Homo sapien
ggaaaactgggctttctaactcagaggattacc

SEQ ID NO: 528339 - DNA, 33 bp, Homo sapien
tatacagagtatctcccatgtgttaggtatatg

SEQ ID NO: 528340 - DNA, 33 bp, Homo sapien
tatacagagtatctcctatgtgttaggtatatg

SEQ ID NO: 528341 - DNA, 33 bp, Homo sapien
tacgaacatctgactacatccacatacatacat

SEQ ID NO: 528342 - DNA, 33 bp, Homo sapien
tacgaacatctgactatatccacatacatacat

SEQ ID NO: 528343 - DNA, 33 bp, Homo sapien
gttgatgatctatacaaggcatatatagcgcta

SEQ ID NO: 528344 - DNA, 33 bp, Homo sapien
gttgatgatctatacatggcatatatagcgcta

SEQ ID NO: 528345 - DNA, 33 bp, Homo sapien
atgccttctttctgcactcttactgttcagtga

SEQ ID NO: 528346 - DNA, 33 bp, Homo sapien
atgccttctttctgcattcttactgttcagtga

SEQ ID NO: 528347 - DNA, 33 bp, Homo sapien
ttagaaaagccagagacgtttttgagcataatt

SEQ ID NO: 528348 - DNA, 33 bp, Homo sapien
ttagaaaagccagagatgtttttgagcataatt

SEQ ID NO: 528349 - DNA, 33 bp, Homo sapien
gtagctctcagactcaatgaagtccttgctgtt

SEQ ID NO: 528350 - DNA, 33 bp, Homo sapien
gtagctctcagactcagtgaagtccttgctgtt

SEQ ID NO: 528351 - DNA, 33 bp, Homo sapien
gcctatgagagaatgcaagtaaagaagacaggt

SEQ ID NO: 528352 - DNA, 33 bp, Homo sapien
gcctatgagagaatgcgagtaaagaagacaggt

SEQ ID NO: 528353 - DNA, 33 bp, Homo sapien
tcactttagaactaaacctaattgcagggataa

SEQ ID NO: 528354 - DNA, 33 bp, Homo sapien
tcactttagaactaaatctaattgcagggataa

SEQ ID NO: 528355 - DNA, 33 bp, Homo sapien
ttaaggatctgtgttcactagctttttgtttgt

SEQ ID NO: 528356 - DNA, 33 bp, Homo sapien
ttaaggatctgtgttcgctagctttttgtttgt

SEQ ID NO: 528357 - DNA, 33 bp, Homo sapien
cctgaataaaggatacacactatggcaggtgtt

SEQ ID NO: 528358 - DNA, 33 bp, Homo sapien
cctgaataaaggatacccactatggcaggtgtt

SEQ ID NO: 528359 - DNA, 33 bp, Homo sapien
ctgcacactccaaccacatcattctagttcatc

SEQ ID NO: 528360 - DNA, 33 bp, Homo sapien
ctgcacactccaaccagatcattctagttcatc

SEQ ID NO: 528361 - DNA, 33 bp, Homo sapien
gtacatttttatttcccgagtgcctcactttcc

SEQ ID NO: 528362 - DNA, 33 bp, Homo sapien
gtacatttttatttcctgagtgcctcactttcc

SEQ ID NO: 528363 - DNA, 33 bp, Homo sapien
cacataactcaaagaacctccagcttggcctga

SEQ ID NO: 528364 - DNA, 33 bp, Homo sapien
cacataactcaaagaagctccagcttggcctga

SEQ ID NO: 528365 - DNA, 33 bp, Homo sapien
tctcttaaaagtttcacgtaatccctggaacta

SEQ ID NO: 528366 - DNA, 33 bp, Homo sapien
tctcttaaaagtttcatgtaatccctggaacta

SEQ ID NO: 528367 - DNA, 33 bp, Homo sapien
cacactgctaaatacacggataaaacaagctga

SEQ ID NO: 528368 - DNA, 33 bp, Homo sapien
cacactgctaaatacatggataaaacaagctga

SEQ ID NO: 528369 - DNA, 33 bp, Homo sapien
agatggtgtccctggcaagcctaggtgtttgac

SEQ ID NO: 528370 - DNA, 33 bp, Homo sapien
agatggtgtccctggcgagcctaggtgtttgac

SEQ ID NO: 528371 - DNA, 33 bp, Homo sapien
agtatccagtacgacaatgtccgaagcacagga

SEQ ID NO: 528372 - DNA, 33 bp, Homo sapien
agtatccagtacgacagtgtccgaagcacagga

SEQ ID NO: 528373 - DNA, 33 bp, Homo sapien
gagagagctgtacacacggctctttcctcccac

SEQ ID NO: 528374 - DNA, 33 bp, Homo sapien
gagagagctgtacacatggctctttcctcccac

SEQ ID NO: 528375 - DNA, 33 bp, Homo sapien
aattgcattctcaatacagccagacaaagcaga

SEQ ID NO: 528376 - DNA, 33 bp, Homo sapien
aattgcattctcaatatagccagacaaagcaga

SEQ ID NO: 528377 - DNA, 33 bp, Homo sapien
gtggataattggaaatcaacaaatttaaaattt

SEQ ID NO: 528378 - DNA, 33 bp, Homo sapien
gtggataattggaaatgaacaaatttaaaattt

SEQ ID NO: 528379 - DNA, 33 bp, Homo sapien
ccaattcatggtcaaacgttaatagaggaagga

SEQ ID NO: 528380 - DNA, 33 bp, Homo sapien
ccaattcatggtcaaatgttaatagaggaagga

SEQ ID NO: 528381 - DNA, 33 bp, Homo sapien
cactgcacacacagagacatctgctctgattct

SEQ ID NO: 528382 - DNA, 33 bp, Homo sapien
cactgcacacacagagtcatctgctctgattct

SEQ ID NO: 528383 - DNA, 33 bp, Homo sapien
ccacccagcagaaaaacggatcatcctggcctc

SEQ ID NO: 528384 - DNA, 33 bp, Homo sapien
ccacccagcagaaaaatggatcatcctggcctc

SEQ ID NO: 528385 - DNA, 33 bp, Homo sapien
cagaattttgcttccacgtagaaatgtctataa

SEQ ID NO: 528386 - DNA, 33 bp, Homo sapien
cagaattttgcttccatgtagaaatgtctataa

SEQ ID NO: 528387 - DNA, 33 bp, Homo sapien
tagcttagaagagtgacataatgtttagaccct

SEQ ID NO: 528388 - DNA, 33 bp, Homo sapien
tagcttagaagagtgatataatgtttagaccct

SEQ ID NO: 528389 - DNA, 33 bp, Homo sapien
agcaccagaaaagcatgaaaaacaggaagccac

SEQ ID NO: 528390 - DNA, 33 bp, Homo sapien
agcaccagaaaagcattaaaaacaggaagccac

SEQ ID NO: 528391 - DNA, 33 bp, Homo sapien
actcttcgacccctcaaagtctggattttgccc

SEQ ID NO: 528392 - DNA, 33 bp, Homo sapien
actcttcgacccctcacagtctggattttgccc

SEQ ID NO: 528393 - DNA, 33 bp, Homo sapien
tcctttgcatgttcacagtcttcctttcagttc

SEQ ID NO: 528394 - DNA, 33 bp, Homo sapien
tcctttgcatgttcacggtcttcctttcagttc

SEQ ID NO: 528395 - DNA, 33 bp, Homo sapien
accctggccagttacacgtgagtttcagaacgg

SEQ ID NO: 528396 - DNA, 33 bp, Homo sapien
accctggccagttacatgtgagtttcagaacgg

SEQ ID NO: 528397 - DNA, 33 bp, Homo sapien
tacttattgtcataacccaatctagaagaaaag

SEQ ID NO: 528398 - DNA, 33 bp, Homo sapien
tacttattgtcataactcaatctagaagaaaag

SEQ ID NO: 528399 - DNA, 33 bp, Homo sapien
aggaaagtctgagaaacggatagccaaaaggag

SEQ ID NO: 528400 - DNA, 33 bp, Homo sapien
aggaaagtctgagaaatggatagccaaaaggag

SEQ ID NO: 528401 - DNA, 33 bp, Homo sapien
attgtcaaattgtgaaacttgcattgaaggtaa

SEQ ID NO: 528402 - DNA, 33 bp, Homo sapien
attgtcaaattgtgaagcttgcattgaaggtaa

SEQ ID NO: 528403 - DNA, 33 bp, Homo sapien
aaccaccctggacaacggttgctcttcccttct

SEQ ID NO: 528404 - DNA, 33 bp, Homo sapien
aaccaccctggacaactgttgctcttcccttct

SEQ ID NO: 528405 - DNA, 33 bp, Homo sapien
aagaaaatctaggctcaatcaagccaatttgta

SEQ ID NO: 528406 - DNA, 33 bp, Homo sapien
aagaaaatctaggctcgatcaagccaatttgta

SEQ ID NO: 528407 - DNA, 33 bp, Homo sapien
actatttgtatctgacagtaagaagagactgaa

SEQ ID NO: 528408 - DNA, 33 bp, Homo sapien
actatttgtatctgactgtaagaagagactgaa

SEQ ID NO: 528409 - DNA, 33 bp, Homo sapien
gctcagagtataatcacgctatcaatgaaccgt

SEQ ID NO: 528410 - DNA, 33 bp, Homo sapien
gctcagagtataatcatgctatcaatgaaccgt

SEQ ID NO: 528411 - DNA, 33 bp, Homo sapien
aatcagatccactcagaaagaatgtattattaa

SEQ ID NO: 528412 - DNA, 33 bp, Homo sapien
aatcagatccactcaggaagaatgtattattaa

SEQ ID NO: 528413 - DNA, 33 bp, Homo sapien
attaagcaactacttacgcaagcaatcatttaa

SEQ ID NO: 528414 - DNA, 33 bp, Homo sapien
attaagcaactacttatgcaagcaatcatttaa

SEQ ID NO: 528415 - DNA, 33 bp, Homo sapien
acagaatattacattccaaaactgacactcttc

SEQ ID NO: 528416 - DNA, 33 bp, Homo sapien
acagaatattacattcgaaaactgacactcttc

SEQ ID NO: 528417 - DNA, 33 bp, Homo sapien
tcttccattatatcgccagttgttaaagtacag

SEQ ID NO: 528418 - DNA, 33 bp, Homo sapien
tcttccattatatcgctagttgttaaagtacag

SEQ ID NO: 528419 - DNA, 33 bp, Homo sapien
gcacattggcatggcccatagtaaaatatgcag

SEQ ID NO: 528420 - DNA, 33 bp, Homo sapien
gcacattggcatggcctatagtaaaatatgcag

SEQ ID NO: 528421 - DNA, 33 bp, Homo sapien
agtttctgaatcctaaacaacattcaagctgca

SEQ ID NO: 528422 - DNA, 33 bp, Homo sapien
agtttctgaatcctaagcaacattcaagctgca

SEQ ID NO: 528423 - DNA, 33 bp, Homo sapien
ttaatatggctcatcggatgagtgaacacacga

SEQ ID NO: 528424 - DNA, 33 bp, Homo sapien
ttaatatggctcatcgtatgagtgaacacacga

SEQ ID NO: 528425 - DNA, 33 bp, Homo sapien
ctgctttctcttttagccaagcttctaggaggg

SEQ ID NO: 528426 - DNA, 33 bp, Homo sapien
ctgctttctcttttagtcaagcttctaggaggg

SEQ ID NO: 528427 - DNA, 33 bp, Homo sapien
tcagcagcaaataacacggaaccctcctagaag

SEQ ID NO: 528428 - DNA, 33 bp, Homo sapien
tcagcagcaaataacagggaaccctcctagaag

SEQ ID NO: 528429 - DNA, 33 bp, Homo sapien
ccccatgtccaagtcaagtagtagatgagggct

SEQ ID NO: 528430 - DNA, 33 bp, Homo sapien
ccccatgtccaagtcacgtagtagatgagggct

SEQ ID NO: 528431 - DNA, 33 bp, Homo sapien
acagatactaaatccacgacccgggagatgcta

SEQ ID NO: 528432 - DNA, 33 bp, Homo sapien
acagatactaaatccatgacccgggagatgcta

SEQ ID NO: 528433 - DNA, 33 bp, Homo sapien
aatattcttttgttcacgttaaaactgtccttg

SEQ ID NO: 528434 - DNA, 33 bp, Homo sapien
aatattcttttgttcatgttaaaactgtccttg

SEQ ID NO: 528435 - DNA, 33 bp, Homo sapien
gctttacataaactgactaatatctggtgggca

SEQ ID NO: 528436 - DNA, 33 bp, Homo sapien
gctttacataaactgattaatatctggtgggca

SEQ ID NO: 528437 - DNA, 33 bp, Homo sapien
acaccactagaaacaactggtataatcaacttg

SEQ ID NO: 528438 - DNA, 33 bp, Homo sapien
acaccactagaaacaattggtataatcaacttg

SEQ ID NO: 528439 - DNA, 33 bp, Homo sapien
actttgcaataaatgcactgttaggacagagga

SEQ ID NO: 528440 - DNA, 33 bp, Homo sapien
actttgcaataaatgcgctgttaggacagagga

SEQ ID NO: 528441 - DNA, 33 bp, Homo sapien
ttcacctcataaatcacctctactctcttacga

SEQ ID NO: 528442 - DNA, 33 bp, Homo sapien
ttcacctcataaatcatctctactctcttacga

SEQ ID NO: 528443 - DNA, 33 bp, Homo sapien
taggtgagcaagtctcaagaccctcagtggtgc

SEQ ID NO: 528444 - DNA, 33 bp, Homo sapien
taggtgagcaagtctccagaccctcagtggtgc

SEQ ID NO: 528445 - DNA, 33 bp, Homo sapien
cttactctccacagggcatagatgtagtgcctg

SEQ ID NO: 528446 - DNA, 33 bp, Homo sapien
cttactctccacagggtatagatgtagtgcctg

SEQ ID NO: 528447 - DNA, 33 bp, Homo sapien
gcaagagtcactagtaacaacagaatcatgtga

SEQ ID NO: 528448 - DNA, 33 bp, Homo sapien
gcaagagtcactagtagcaacagaatcatgtga

SEQ ID NO: 528449 - DNA, 33 bp, Homo sapien
catttgggtgaatcaacatatttgcaaagaggg

SEQ ID NO: 528450 - DNA, 33 bp, Homo sapien
catttgggtgaatcaagatatttgcaaagaggg

SEQ ID NO: 528451 - DNA, 33 bp, Homo sapien
atagcattgtttaaaaatcctgaattcatttgc

SEQ ID NO: 528452 - DNA, 33 bp, Homo sapien
atagcattgtttaaaagtcctgaattcatttgc

SEQ ID NO: 528453 - DNA, 33 bp, Homo sapien
ttttttgatgaagaagaaataatcaggctactc

SEQ ID NO: 528454 - DNA, 33 bp, Homo sapien
ttttttgatgaagaaggaataatcaggctactc

SEQ ID NO: 528455 - DNA, 33 bp, Homo sapien
acagcttgggattacactcatcacttatattta

SEQ ID NO: 528456 - DNA, 33 bp, Homo sapien
acagcttgggattacattcatcacttatattta

SEQ ID NO: 528457 - DNA, 33 bp, Homo sapien
gcatcaaattcaatgacgaagtaaatgaagctt

SEQ ID NO: 528458 - DNA, 33 bp, Homo sapien
gcatcaaattcaatgatgaagtaaatgaagctt

SEQ ID NO: 528459 - DNA, 33 bp, Homo sapien
tctttgaagtaaacaacgtatgaggacaggaga

SEQ ID NO: 528460 - DNA, 33 bp, Homo sapien
tctttgaagtaaacaatgtatgaggacaggaga

SEQ ID NO: 528461 - DNA, 33 bp, Homo sapien
tgccgggccttggcccactgaactcgctgactc

SEQ ID NO: 528462 - DNA, 33 bp, Homo sapien
tgccgggccttggcccgctgaactcgctgactc

SEQ ID NO: 528463 - DNA, 33 bp, Homo sapien
ttatacctactggtataagagctaaaaaaactt

SEQ ID NO: 528464 - DNA, 33 bp, Homo sapien
ttatacctactggtatgagagctaaaaaaactt

SEQ ID NO: 528465 - DNA, 33 bp, Homo sapien
tgaaaatacaatgctacgttgccactgtgcttt

SEQ ID NO: 528466 - DNA, 33 bp, Homo sapien
tgaaaatacaatgctatgttgccactgtgcttt

SEQ ID NO: 528467 - DNA, 33 bp, Homo sapien
aattctctttcagctaccgcatttaataacgct

SEQ ID NO: 528468 - DNA, 33 bp, Homo sapien
aattctctttcagctatcgcatttaataacgct

SEQ ID NO: 528469 - DNA, 33 bp, Homo sapien
ccttaaaacagaggacaagcaaggactaagaac

SEQ ID NO: 528470 - DNA, 33 bp, Homo sapien
ccttaaaacagaggacgagcaaggactaagaac

SEQ ID NO: 528471 - DNA, 33 bp, Homo sapien
ggaaccagtgaatggaaaaaagtagaatcacat

SEQ ID NO: 528472 - DNA, 33 bp, Homo sapien
ggaaccagtgaatggacaaaagtagaatcacat

SEQ ID NO: 528473 - DNA, 33 bp, Homo sapien
tcaaactggccttgcacgttcttccttccctct

SEQ ID NO: 528474 - DNA, 33 bp, Homo sapien
tcaaactggccttgcatgttcttccttccctct

SEQ ID NO: 528475 - DNA, 33 bp, Homo sapien
acattttagggtttacaactgcctctcagagga

SEQ ID NO: 528476 - DNA, 33 bp, Homo sapien
acattttagggtttacgactgcctctcagagga

SEQ ID NO: 528477 - DNA, 33 bp, Homo sapien
tgattcactgaaatcactcctatccagttctct

SEQ ID NO: 528478 - DNA, 33 bp, Homo sapien
tgattcactgaaatcattcctatccagttctct

SEQ ID NO: 528479 - DNA, 33 bp, Homo sapien
tgcccaagagtagaggaatcagacatcatgtgt

SEQ ID NO: 528480 - DNA, 33 bp, Homo sapien
tgcccaagagtagagggatcagacatcatgtgt

SEQ ID NO: 528481 - DNA, 33 bp, Homo sapien
atgctacaaaatatagaagagatccattacaag

SEQ ID NO: 528482 - DNA, 33 bp, Homo sapien
atgctacaaaatataggagagatccattacaag

SEQ ID NO: 528483 - DNA, 33 bp, Homo sapien
aaatgtgtactgcttaccccaataaagttcgct

SEQ ID NO: 528484 - DNA, 33 bp, Homo sapien
aaatgtgtactgcttatcccaataaagttcgct

SEQ ID NO: 528485 - DNA, 33 bp, Homo sapien
aacaaaagagaattcacaccctaatcctgatgc

SEQ ID NO: 528486 - DNA, 33 bp, Homo sapien
aacaaaagagaattcataccctaatcctgatgc

SEQ ID NO: 528487 - DNA, 33 bp, Homo sapien
aggcaactttctataacgccaggccggagtggg

SEQ ID NO: 528488 - DNA, 33 bp, Homo sapien
aggcaactttctataatgccaggccggagtggg

SEQ ID NO: 528489 - DNA, 33 bp, Homo sapien
cttagccagaatgtcacggtatttgaacaatag

SEQ ID NO: 528490 - DNA, 33 bp, Homo sapien
cttagccagaatgtcatggtatttgaacaatag

SEQ ID NO: 528491 - DNA, 33 bp, Homo sapien
ttcctagccagagaaaactcaggaagagtggaa

SEQ ID NO: 528492 - DNA, 33 bp, Homo sapien
ttcctagccagagaaagctcaggaagagtggaa

SEQ ID NO: 528493 - DNA, 33 bp, Homo sapien
aatggaggagaatcgacgatttcaggaaggagt

SEQ ID NO: 528494 - DNA, 33 bp, Homo sapien
aatggaggagaatcgatgatttcaggaaggagt

SEQ ID NO: 528495 - DNA, 33 bp, Homo sapien
actaggaaaacaacaacggcaagaactttatca

SEQ ID NO: 528496 - DNA, 33 bp, Homo sapien
actaggaaaacaacaatggcaagaactttatca

SEQ ID NO: 528497 - DNA, 33 bp, Homo sapien
cgagaaagaataatacaaaagaagtgtggccag

SEQ ID NO: 528498 - DNA, 33 bp, Homo sapien
cgagaaagaataatacgaaagaagtgtggccag

SEQ ID NO: 528499 - DNA, 33 bp, Homo sapien
ttccaatttttagcaacggctggcccctttgag

SEQ ID NO: 528500 - DNA, 33 bp, Homo sapien
ttccaatttttagcaatggctggcccctttgag

SEQ ID NO: 528501 - DNA, 33 bp, Homo sapien
catgtgtactattttacgtggtttatactattc

SEQ ID NO: 528502 - DNA, 33 bp, Homo sapien
catgtgtactattttatgtggtttatactattc

SEQ ID NO: 528503 - DNA, 33 bp, Homo sapien
agccttagtttccatcaaatgcagattataatc

SEQ ID NO: 528504 - DNA, 33 bp, Homo sapien
agccttagtttccatcgaatgcagattataatc

SEQ ID NO: 528505 - DNA, 33 bp, Homo sapien
agtttgttactatgtaagtgaatgcaagtgtgt

SEQ ID NO: 528506 - DNA, 33 bp, Homo sapien
agtttgttactatgtaggtgaatgcaagtgtgt

SEQ ID NO: 528507 - DNA, 33 bp, Homo sapien
atcttatacatggaacaatacctccaaattatt

SEQ ID NO: 528508 - DNA, 33 bp, Homo sapien
atcttatacatggaacgatacctccaaattatt

SEQ ID NO: 528509 - DNA, 33 bp, Homo sapien
taacaaggtgactaccaaggcacaaaagatcta

SEQ ID NO: 528510 - DNA, 33 bp, Homo sapien
taacaaggtgactaccgaggcacaaaagatcta

SEQ ID NO: 528511 - DNA, 33 bp, Homo sapien
aattgaccatatttccaatgccttaatgtcctc

SEQ ID NO: 528512 - DNA, 33 bp, Homo sapien
aattgaccatatttccgatgccttaatgtcctc

SEQ ID NO: 528513 - DNA, 33 bp, Homo sapien
atatatatcataaaaacgtgtcccaatgtgtaa

SEQ ID NO: 528514 - DNA, 33 bp, Homo sapien
atatatatcataaaaaggtgtcccaatgtgtaa

SEQ ID NO: 528515 - DNA, 33 bp, Homo sapien
aagaggctgaaacaaccctgtgtaggacactga

SEQ ID NO: 528516 - DNA, 33 bp, Homo sapien
aagaggctgaaacaactctgtgtaggacactga

SEQ ID NO: 528517 - DNA, 33 bp, Homo sapien
gcccagccggtcctcaacaattgtaggagtcta

SEQ ID NO: 528518 - DNA, 33 bp, Homo sapien
gcccagccggtcctcatcaattgtaggagtcta

SEQ ID NO: 528519 - DNA, 33 bp, Homo sapien
tcaactaagttggtaaagaccttgatctaaatt

SEQ ID NO: 528520 - DNA, 33 bp, Homo sapien
tcaactaagttggtaatgaccttgatctaaatt

SEQ ID NO: 528521 - DNA, 33 bp, Homo sapien
gctggataccagaccacgtagctcttttgtagc

SEQ ID NO: 528522 - DNA, 33 bp, Homo sapien
gctggataccagaccatgtagctcttttgtagc

SEQ ID NO: 528523 - DNA, 33 bp, Homo sapien
ttccctttgagttttacggtgataatagctggc

SEQ ID NO: 528524 - DNA, 33 bp, Homo sapien
ttccctttgagttttagggtgataatagctggc

SEQ ID NO: 528525 - DNA, 33 bp, Homo sapien
agaaccacattaagcaaaaatttccttttcatt

SEQ ID NO: 528526 - DNA, 33 bp, Homo sapien
agaaccacattaagcagaaatttccttttcatt

SEQ ID NO: 528527 - DNA, 33 bp, Homo sapien
ccttttggttttcccactggaaattgtggactc

SEQ ID NO: 528528 - DNA, 33 bp, Homo sapien
ccttttggttttcccattggaaattgtggactc

SEQ ID NO: 528529 - DNA, 33 bp, Homo sapien
cattttataggtaaggaccacaagtctcagaag

SEQ ID NO: 528530 - DNA, 33 bp, Homo sapien
cattttataggtaagggccacaagtctcagaag

SEQ ID NO: 528531 - DNA, 33 bp, Homo sapien
gaattagaagctgtacaatatcatcattagaaa

SEQ ID NO: 528532 - DNA, 33 bp, Homo sapien
gaattagaagctgtaccatatcatcattagaaa

SEQ ID NO: 528533 - DNA, 33 bp, Homo sapien
aagcaaatgtgaaatacgaaacttttttggttc

SEQ ID NO: 528534 - DNA, 33 bp, Homo sapien
aagcaaatgtgaaatatgaaacttttttggttc

SEQ ID NO: 528535 - DNA, 33 bp, Homo sapien
acagaagatgagtgacaatttgccatattatct

SEQ ID NO: 528536 - DNA, 33 bp, Homo sapien
acagaagatgagtgacgatttgccatattatct

SEQ ID NO: 528537 - DNA, 33 bp, Homo sapien
tcattttgaaagtctgcaaaaattatttggcct

SEQ ID NO: 528538 - DNA, 33 bp, Homo sapien
tcattttgaaagtctggaaaaattatttggcct

SEQ ID NO: 528539 - DNA, 33 bp, Homo sapien
cgtgagaacttgtaaaatgtgtgacgaaactga

SEQ ID NO: 528540 - DNA, 33 bp, Homo sapien
cgtgagaacttgtaaactgtgtgacgaaactga

SEQ ID NO: 528541 - DNA, 33 bp, Homo sapien
ttggctttgtaggataagaattcaagtccacgc

SEQ ID NO: 528542 - DNA, 33 bp, Homo sapien
ttggctttgtaggataggaattcaagtccacgc

SEQ ID NO: 528543 - DNA, 33 bp, Homo sapien
atgtatcaacattatacataaaaccattaaaca

SEQ ID NO: 528544 - DNA, 33 bp, Homo sapien
atgtatcaacattatagataaaaccattaaaca

SEQ ID NO: 528545 - DNA, 33 bp, Homo sapien
agataaaatcctaaacaacactcagttgatgct

SEQ ID NO: 528546 - DNA, 33 bp, Homo sapien
agataaaatcctaaacgacactcagttgatgct

SEQ ID NO: 528547 - DNA, 33 bp, Homo sapien
atgacttccttgattacagttttattccttctg

SEQ ID NO: 528548 - DNA, 33 bp, Homo sapien
atgacttccttgattatagttttattccttctg

SEQ ID NO: 528549 - DNA, 33 bp, Homo sapien
ttcttggttgtatcaacgaaatctctggtcctt

SEQ ID NO: 528550 - DNA, 33 bp, Homo sapien
ttcttggttgtatcaatgaaatctctggtcctt

SEQ ID NO: 528551 - DNA, 33 bp, Homo sapien
atggagctcaacaaaaccatccagcaggttcac

SEQ ID NO: 528552 - DNA, 33 bp, Homo sapien
atggagctcaacaaaatcatccagcaggttcac

SEQ ID NO: 528553 - DNA, 33 bp, Homo sapien
ttgaactgtgtgaaaacgcctgaacttcccctg

SEQ ID NO: 528554 - DNA, 33 bp, Homo sapien
ttgaactgtgtgaaaatgcctgaacttcccctg

SEQ ID NO: 528555 - DNA, 33 bp, Homo sapien
cttattcactgaaatacagcttactaaatggtt

SEQ ID NO: 528556 - DNA, 33 bp, Homo sapien
cttattcactgaaatatagcttactaaatggtt

SEQ ID NO: 528557 - DNA, 33 bp, Homo sapien
caggccatacatagacaatctctaaggtgattt

SEQ ID NO: 528558 - DNA, 33 bp, Homo sapien
caggccatacatagacgatctctaaggtgattt

SEQ ID NO: 528559 - DNA, 33 bp, Homo sapien
tgcctctgtgcaataacgatctattttctttta

SEQ ID NO: 528560 - DNA, 33 bp, Homo sapien
tgcctctgtgcaataatgatctattttctttta

SEQ ID NO: 528561 - DNA, 33 bp, Homo sapien
ttaacttatggcagtacagttgtttgcctctgt

SEQ ID NO: 528562 - DNA, 33 bp, Homo sapien
ttaacttatggcagtatagttgtttgcctctgt

SEQ ID NO: 528563 - DNA, 33 bp, Homo sapien
gaaaggaggaggaagactaacggacaccttctc

SEQ ID NO: 528564 - DNA, 33 bp, Homo sapien
gaaaggaggaggaagagtaacggacaccttctc

SEQ ID NO: 528565 - DNA, 33 bp, Homo sapien
agtaaaggtccaaaaggcttctttcagcctccg

SEQ ID NO: 528566 - DNA, 33 bp, Homo sapien
agtaaaggtccaaaagtcttctttcagcctccg

SEQ ID NO: 528567 - DNA, 33 bp, Homo sapien
ccaagacagctagtagcaggtaatatatatagc

SEQ ID NO: 528568 - DNA, 33 bp, Homo sapien
ccaagacagctagtagtaggtaatatatatagc

SEQ ID NO: 528569 - DNA, 33 bp, Homo sapien
ttgctgtaataaacaacgtacagggtgagctga

SEQ ID NO: 528570 - DNA, 33 bp, Homo sapien
ttgctgtaataaacaatgtacagggtgagctga

SEQ ID NO: 528571 - DNA, 33 bp, Homo sapien
tttaataagaatggttaaaatggtaagttatat

SEQ ID NO: 528572 - DNA, 33 bp, Homo sapien
tttaataagaatggttgaaatggtaagttatat

SEQ ID NO: 528573 - DNA, 33 bp, Homo sapien
ctgtgaggttcagagcacttacataatgaggta

SEQ ID NO: 528574 - DNA, 33 bp, Homo sapien
ctgtgaggttcagagcgcttacataatgaggta

SEQ ID NO: 528575 - DNA, 33 bp, Homo sapien
agcagcagtgttcatcacattactgcaggaatt

SEQ ID NO: 528576 - DNA, 33 bp, Homo sapien
agcagcagtgttcatcgcattactgcaggaatt

SEQ ID NO: 528577 - DNA, 33 bp, Homo sapien
attagccatagggtaacgtaaatcaaaatcaca

SEQ ID NO: 528578 - DNA, 33 bp, Homo sapien
attagccatagggtaatgtaaatcaaaatcaca

SEQ ID NO: 528579 - DNA, 33 bp, Homo sapien
aggaatacaaaacacacaacttcaaaactgaaa

SEQ ID NO: 528580 - DNA, 33 bp, Homo sapien
aggaatacaaaacacagaacttcaaaactgaaa

SEQ ID NO: 528581 - DNA, 33 bp, Homo sapien
atttatgtcttaatgaaaagatgatagatgtca

SEQ ID NO: 528582 - DNA, 33 bp, Homo sapien
atttatgtcttaatgagaagatgatagatgtca

SEQ ID NO: 528583 - DNA, 33 bp, Homo sapien
tgcgtccagcttacacaatcataattcaaaggt

SEQ ID NO: 528584 - DNA, 33 bp, Homo sapien
tgcgtccagcttacacgatcataattcaaaggt

SEQ ID NO: 528585 - DNA, 33 bp, Homo sapien
ttccattccttaatgacagatgatgtagagcat

SEQ ID NO: 528586 - DNA, 33 bp, Homo sapien
ttccattccttaatgatagatgatgtagagcat

SEQ ID NO: 528587 - DNA, 33 bp, Homo sapien
taagaacagacacaacagagtttgctagagtac

SEQ ID NO: 528588 - DNA, 33 bp, Homo sapien
taagaacagacacaacggagtttgctagagtac

SEQ ID NO: 528589 - DNA, 33 bp, Homo sapien
ccggtgaaacagcgttcggtggccactgaccgg

SEQ ID NO: 528590 - DNA, 33 bp, Homo sapien
ccggtgaaacagcgtttggtggccactgaccgg

SEQ ID NO: 528591 - DNA, 33 bp, Homo sapien
acaccataggtacctaacaaggtttctgctgtg

SEQ ID NO: 528592 - DNA, 33 bp, Homo sapien
acaccataggtacctatcaaggtttctgctgtg

SEQ ID NO: 528593 - DNA, 33 bp, Homo sapien
gagtcgaagatcaaacccatcgtctcttttttc

SEQ ID NO: 528594 - DNA, 33 bp, Homo sapien
gagtcgaagatcaaactcatcgtctcttttttc

SEQ ID NO: 528595 - DNA, 33 bp, Homo sapien
gaaatggtgaaacaatcaatgataattcacatg

SEQ ID NO: 528596 - DNA, 33 bp, Homo sapien
gaaatggtgaaacaatgaatgataattcacatg

SEQ ID NO: 528597 - DNA, 33 bp, Homo sapien
cattatttgcaactctcacatgcacctgctctt

SEQ ID NO: 528598 - DNA, 33 bp, Homo sapien
cattatttgcaactctgacatgcacctgctctt

SEQ ID NO: 528599 - DNA, 33 bp, Homo sapien
taactgcatcctgccaaaaatgacttcccagtg

SEQ ID NO: 528600 - DNA, 33 bp, Homo sapien
taactgcatcctgccagaaatgacttcccagtg

SEQ ID NO: 528601 - DNA, 33 bp, Homo sapien
gattggcacctactgaaccagtttagcgggaag

SEQ ID NO: 528602 - DNA, 33 bp, Homo sapien
gattggcacctactgagccagtttagcgggaag

SEQ ID NO: 528603 - DNA, 33 bp, Homo sapien
tgtgctgctgcgagccaccttgctagacctttg

SEQ ID NO: 528604 - DNA, 33 bp, Homo sapien
tgtgctgctgcgagcctccttgctagacctttg

SEQ ID NO: 528605 - DNA, 33 bp, Homo sapien
cagaatagtagtgaaacagccgaccaaactgaa

SEQ ID NO: 528606 - DNA, 33 bp, Homo sapien
cagaatagtagtgaaatagccgaccaaactgaa

SEQ ID NO: 528607 - DNA, 33 bp, Homo sapien
ttcccaaatgcaagccaaaaaaggttctgtgac

SEQ ID NO: 528608 - DNA, 33 bp, Homo sapien
ttcccaaatgcaagcctaaaaaggttctgtgac

SEQ ID NO: 528609 - DNA, 33 bp, Homo sapien
ttcttaaactttctgaacatttaactctctctc

SEQ ID NO: 528610 - DNA, 33 bp, Homo sapien
ttcttaaactttctgaccatttaactctctctc

SEQ ID NO: 528611 - DNA, 33 bp, Homo sapien
acatgttagaaacgtagcatgaacaatgagggg

SEQ ID NO: 528612 - DNA, 33 bp, Homo sapien
acatgttagaaacgtatcatgaacaatgagggg

SEQ ID NO: 528613 - DNA, 33 bp, Homo sapien
actctattttgggtctcactaatcacaatcccc

SEQ ID NO: 528614 - DNA, 33 bp, Homo sapien
actctattttgggtctgactaatcacaatcccc

SEQ ID NO: 528615 - DNA, 33 bp, Homo sapien
tcttgaattggattaaatattggatgttgtagc

SEQ ID NO: 528616 - DNA, 33 bp, Homo sapien
tcttgaattggattaagtattggatgttgtagc

SEQ ID NO: 528617 - DNA, 33 bp, Homo sapien
acatgaagatgaacaaaatcctgtatcattcta

SEQ ID NO: 528618 - DNA, 33 bp, Homo sapien
acatgaagatgaacaacatcctgtatcattcta

SEQ ID NO: 528619 - DNA, 33 bp, Homo sapien
tagaggagcctaaggacatatatgactagaggt

SEQ ID NO: 528620 - DNA, 33 bp, Homo sapien
tagaggagcctaaggagatatatgactagaggt

SEQ ID NO: 528621 - DNA, 33 bp, Homo sapien
ctttcaaaaccatcccagctagaatacctgagt

SEQ ID NO: 528622 - DNA, 33 bp, Homo sapien
ctttcaaaaccatcccggctagaatacctgagt

SEQ ID NO: 528623 - DNA, 33 bp, Homo sapien
cagcttcttacctatcccagtttctccagattg

SEQ ID NO: 528624 - DNA, 33 bp, Homo sapien
cagcttcttacctatcgcagtttctccagattg

SEQ ID NO: 528625 - DNA, 33 bp, Homo sapien
gtgtatgtttaagatgaatgataatcctaatac

SEQ ID NO: 528626 - DNA, 33 bp, Homo sapien
gtgtatgtttaagatgtatgataatcctaatac

SEQ ID NO: 528627 - DNA, 33 bp, Homo sapien
catcttaaacatacaccactcctttattagcaa

SEQ ID NO: 528628 - DNA, 33 bp, Homo sapien
catcttaaacatacactactcctttattagcaa

SEQ ID NO: 528629 - DNA, 33 bp, Homo sapien
ggcctttgtgatttgcaatattttccataatat

SEQ ID NO: 528630 - DNA, 33 bp, Homo sapien
ggcctttgtgatttgcgatattttccataatat

SEQ ID NO: 528631 - DNA, 33 bp, Homo sapien
ttgctttcataggctggacccttcaagcatttt

SEQ ID NO: 528632 - DNA, 33 bp, Homo sapien
ttgctttcataggctgtacccttcaagcatttt

SEQ ID NO: 528633 - DNA, 33 bp, Homo sapien
ggcatcctatagcaaaacgaagcgttggggatt

SEQ ID NO: 528634 - DNA, 33 bp, Homo sapien
ggcatcctatagcaaaccgaagcgttggggatt

SEQ ID NO: 528635 - DNA, 33 bp, Homo sapien
ttgctctaccttttccaacataatgaatctgtg

SEQ ID NO: 528636 - DNA, 33 bp, Homo sapien
ttgctctaccttttccgacataatgaatctgtg

SEQ ID NO: 528637 - DNA, 33 bp, Homo sapien
agaaaaggatattcgacagtttatgtaattttt

SEQ ID NO: 528638 - DNA, 33 bp, Homo sapien
agaaaaggatattcgagagtttatgtaattttt

SEQ ID NO: 528639 - DNA, 33 bp, Homo sapien
agtcaatacaccaatacgccgcagctcttcaaa

SEQ ID NO: 528640 - DNA, 33 bp, Homo sapien
agtcaatacaccaatatgccgcagctcttcaaa

SEQ ID NO: 528641 - DNA, 33 bp, Homo sapien
taattatcctttttccacagaatatccttctat

SEQ ID NO: 528642 - DNA, 33 bp, Homo sapien
taattatcctttttccgcagaatatccttctat

SEQ ID NO: 528643 - DNA, 33 bp, Homo sapien
atatttagaagagggcaaagagtttgatatgat

SEQ ID NO: 528644 - DNA, 33 bp, Homo sapien
atatttagaagagggcgaagagtttgatatgat

SEQ ID NO: 528645 - DNA, 33 bp, Homo sapien
catcatagtttcagcaagtttttcctttgactg

SEQ ID NO: 528646 - DNA, 33 bp, Homo sapien
catcatagtttcagcaggtttttcctttgactg

SEQ ID NO: 528647 - DNA, 33 bp, Homo sapien
ggctgcaatcatctaacggtgtcttcactcaca

SEQ ID NO: 528648 - DNA, 33 bp, Homo sapien
ggctgcaatcatctaatggtgtcttcactcaca

SEQ ID NO: 528649 - DNA, 33 bp, Homo sapien
tgttagtctttcattaactgccattagtttcaa

SEQ ID NO: 528650 - DNA, 33 bp, Homo sapien
tgttagtctttcattatctgccattagtttcaa

SEQ ID NO: 528651 - DNA, 33 bp, Homo sapien
aaatcactggctcaaaatagccaccattttatg

SEQ ID NO: 528652 - DNA, 33 bp, Homo sapien
aaatcactggctcaaagtagccaccattttatg

SEQ ID NO: 528653 - DNA, 33 bp, Homo sapien
agcaacttgcttctaacgaatggaacaaggtat

SEQ ID NO: 528654 - DNA, 33 bp, Homo sapien
agcaacttgcttctaatgaatggaacaaggtat

SEQ ID NO: 528655 - DNA, 33 bp, Homo sapien
aatcaccatgttggacagacaccatcgggagaa

SEQ ID NO: 528656 - DNA, 33 bp, Homo sapien
aatcaccatgttggacggacaccatcgggagaa

SEQ ID NO: 528657 - DNA, 33 bp, Homo sapien
tgtctctgctatccaccggccattttcaaactt

SEQ ID NO: 528658 - DNA, 33 bp, Homo sapien
tgtctctgctatccactggccattttcaaactt

SEQ ID NO: 528659 - DNA, 33 bp, Homo sapien
ttctgcatgaaatatacgacaaagtcttcggct

SEQ ID NO: 528660 - DNA, 33 bp, Homo sapien
ttctgcatgaaatatatgacaaagtcttcggct

SEQ ID NO: 528661 - DNA, 33 bp, Homo sapien
ttatctggaaaatgaaagtgggaaacagtagta

SEQ ID NO: 528662 - DNA, 33 bp, Homo sapien
ttatctggaaaatgaatgtgggaaacagtagta

SEQ ID NO: 528663 - DNA, 33 bp, Homo sapien
ctccatagcatccctccctaacttgtctgggaa

SEQ ID NO: 528664 - DNA, 33 bp, Homo sapien
ctccatagcatccctctctaacttgtctgggaa

SEQ ID NO: 528665 - DNA, 33 bp, Homo sapien
tttctattttaactcaacttctttcactgatgt

SEQ ID NO: 528666 - DNA, 33 bp, Homo sapien
tttctattttaactcatcttctttcactgatgt

SEQ ID NO: 528667 - DNA, 33 bp, Homo sapien
gaaggtcaaggtgagaaatagaatactggcctc

SEQ ID NO: 528668 - DNA, 33 bp, Homo sapien
gaaggtcaaggtgagacatagaatactggcctc

SEQ ID NO: 528669 - DNA, 33 bp, Homo sapien
gataaatgggagcgccggaatgagggatagtta

SEQ ID NO: 528670 - DNA, 33 bp, Homo sapien
gataaatgggagcgcctgaatgagggatagtta

SEQ ID NO: 528671 - DNA, 33 bp, Homo sapien
tggtacagcctatcacagtaatacatcaagaca

SEQ ID NO: 528672 - DNA, 33 bp, Homo sapien
tggtacagcctatcacggtaatacatcaagaca

SEQ ID NO: 528673 - DNA, 33 bp, Homo sapien
tacaaatgttttcaagactaacgtatgcattca

SEQ ID NO: 528674 - DNA, 33 bp, Homo sapien
tacaaatgttttcaaggctaacgtatgcattca

SEQ ID NO: 528675 - DNA, 33 bp, Homo sapien
gaaatagcttcaataactgccatcttctctccc

SEQ ID NO: 528676 - DNA, 33 bp, Homo sapien
gaaatagcttcaataattgccatcttctctccc

SEQ ID NO: 528677 - DNA, 33 bp, Homo sapien
ataaaatacaaacagacgagaagaggaaaaact

SEQ ID NO: 528678 - DNA, 33 bp, Homo sapien
ataaaatacaaacagatgagaagaggaaaaact

SEQ ID NO: 528679 - DNA, 33 bp, Homo sapien
gagaagggtaaggaagaatgaagaatgaagctg

SEQ ID NO: 528680 - DNA, 33 bp, Homo sapien
gagaagggtaaggaaggatgaagaatgaagctg

SEQ ID NO: 528681 - DNA, 33 bp, Homo sapien
caagctaaaattactccagctgcgatgtgactt

SEQ ID NO: 528682 - DNA, 33 bp, Homo sapien
caagctaaaattactctagctgcgatgtgactt

SEQ ID NO: 528683 - DNA, 33 bp, Homo sapien
tgaacttggtaggcataagctagcaacttcaaa

SEQ ID NO: 528684 - DNA, 33 bp, Homo sapien
tgaacttggtaggcatgagctagcaacttcaaa

SEQ ID NO: 528685 - DNA, 33 bp, Homo sapien
aacttgcccaaagttaaaagctagtgaatgatg

SEQ ID NO: 528686 - DNA, 33 bp, Homo sapien
aacttgcccaaagttataagctagtgaatgatg

SEQ ID NO: 528687 - DNA, 33 bp, Homo sapien
tataacattgtttggaatatagcaagcactaca

SEQ ID NO: 528688 - DNA, 33 bp, Homo sapien
tataacattgtttggactatagcaagcactaca

SEQ ID NO: 528689 - DNA, 33 bp, Homo sapien
acaaatcctcaattataaatgggagctaaatga

SEQ ID NO: 528690 - DNA, 33 bp, Homo sapien
acaaatcctcaattatgaatgggagctaaatga

SEQ ID NO: 528691 - DNA, 33 bp, Homo sapien
agctgaaacaatgtaaaacacctctgacttgac

SEQ ID NO: 528692 - DNA, 33 bp, Homo sapien
agctgaaacaatgtaagacacctctgacttgac

SEQ ID NO: 528693 - DNA, 33 bp, Homo sapien
aaaccaagactctccccctaaagcagcccttga

SEQ ID NO: 528694 - DNA, 33 bp, Homo sapien
aaaccaagactctcccgctaaagcagcccttga

SEQ ID NO: 528695 - DNA, 33 bp, Homo sapien
tttcttctctcagtcccgattttattcatgtct

SEQ ID NO: 528696 - DNA, 33 bp, Homo sapien
tttcttctctcagtcctgattttattcatgtct

SEQ ID NO: 528697 - DNA, 33 bp, Homo sapien
agaacagtgactctctaaaaacaactgaccttc

SEQ ID NO: 528698 - DNA, 33 bp, Homo sapien
agaacagtgactctctgaaaacaactgaccttc

SEQ ID NO: 528699 - DNA, 33 bp, Homo sapien
atgatgatactgtgataaaaaccctcaatgata

SEQ ID NO: 528700 - DNA, 33 bp, Homo sapien
atgatgatactgtgatgaaaaccctcaatgata

SEQ ID NO: 528701 - DNA, 33 bp, Homo sapien
cttatccctaaacagccctagacttactttgcc

SEQ ID NO: 528702 - DNA, 33 bp, Homo sapien
cttatccctaaacagctctagacttactttgcc

SEQ ID NO: 528703 - DNA, 33 bp, Homo sapien
gaggttatcggtgcacagatcaaaagggagatg

SEQ ID NO: 528704 - DNA, 33 bp, Homo sapien
gaggttatcggtgcacggatcaaaagggagatg

SEQ ID NO: 528705 - DNA, 33 bp, Homo sapien
ctgcaatcctttagcactctggaccagccgctg

SEQ ID NO: 528706 - DNA, 33 bp, Homo sapien
ctgcaatcctttagcagtctggaccagccgctg

SEQ ID NO: 528707 - DNA, 33 bp, Homo sapien
gtaaagggaatgctccacaatattgttctgggg

SEQ ID NO: 528708 - DNA, 33 bp, Homo sapien
gtaaagggaatgctccgcaatattgttctgggg

SEQ ID NO: 528709 - DNA, 33 bp, Homo sapien
tacacaaaactacctcaactctttttattttgc

SEQ ID NO: 528710 - DNA, 33 bp, Homo sapien
tacacaaaactacctcgactctttttattttgc

SEQ ID NO: 528711 - DNA, 33 bp, Homo sapien
tatcagggaatctctcgctttaggaactctctt

SEQ ID NO: 528712 - DNA, 33 bp, Homo sapien
tatcagggaatctctctctttaggaactctctt

SEQ ID NO: 528713 - DNA, 33 bp, Homo sapien
cctgattatttccttaacatttggccttaagca

SEQ ID NO: 528714 - DNA, 33 bp, Homo sapien
cctgattatttccttagcatttggccttaagca

SEQ ID NO: 528715 - DNA, 33 bp, Homo sapien
aatctgcaacaagtacaattttaattctctgca

SEQ ID NO: 528716 - DNA, 33 bp, Homo sapien
aatctgcaacaagtacgattttaattctctgca

SEQ ID NO: 528717 - DNA, 33 bp, Homo sapien
tgtgatgtatgatgtacgttgagataagtgagg

SEQ ID NO: 528718 - DNA, 33 bp, Homo sapien
tgtgatgtatgatgtatgttgagataagtgagg

SEQ ID NO: 528719 - DNA, 33 bp, Homo sapien
ttacatacgttattacaatactcctaagaagta

SEQ ID NO: 528720 - DNA, 33 bp, Homo sapien
ttacatacgttattacgatactcctaagaagta

SEQ ID NO: 528721 - DNA, 33 bp, Homo sapien
acattcaggatctagcccaggcaggtcgggaag

SEQ ID NO: 528722 - DNA, 33 bp, Homo sapien
acattcaggatctagctcaggcaggtcgggaag

SEQ ID NO: 528723 - DNA, 33 bp, Homo sapien
tgcagctttgtgaaaacacagcctccagagggc

SEQ ID NO: 528724 - DNA, 33 bp, Homo sapien
tgcagctttgtgaaaatacagcctccagagggc

SEQ ID NO: 528725 - DNA, 33 bp, Homo sapien
agggatcgtagtcagacgtggactcattagtga

SEQ ID NO: 528726 - DNA, 33 bp, Homo sapien
agggatcgtagtcagatgtggactcattagtga

SEQ ID NO: 528727 - DNA, 33 bp, Homo sapien
gaatcgatggccaaaggcttaacaggactaaaa

SEQ ID NO: 528728 - DNA, 33 bp, Homo sapien
gaatcgatggccaaagtcttaacaggactaaaa

SEQ ID NO: 528729 - DNA, 33 bp, Homo sapien
ggtagagctgggattcagaaccatgtctatctg

SEQ ID NO: 528730 - DNA, 33 bp, Homo sapien
ggtagagctgggattcggaaccatgtctatctg

SEQ ID NO: 528731 - DNA, 33 bp, Homo sapien
tctgggaaaacagcagaatgactgatatttctg

SEQ ID NO: 528732 - DNA, 33 bp, Homo sapien
tctgggaaaacagcaggatgactgatatttctg

SEQ ID NO: 528733 - DNA, 33 bp, Homo sapien
attacagtttcagaaagatgcacataaataagt

SEQ ID NO: 528734 - DNA, 33 bp, Homo sapien
attacagtttcagaaatatgcacataaataagt

SEQ ID NO: 528735 - DNA, 33 bp, Homo sapien
ttctatctattctaaaatacttgtgctgctcat

SEQ ID NO: 528736 - DNA, 33 bp, Homo sapien
ttctatctattctaaactacttgtgctgctcat

SEQ ID NO: 528737 - DNA, 33 bp, Homo sapien
gtgaagacatatttgaactacaatttgcctttt

SEQ ID NO: 528738 - DNA, 33 bp, Homo sapien
gtgaagacatatttgagctacaatttgcctttt

SEQ ID NO: 528739 - DNA, 33 bp, Homo sapien
ctgccttttgaaatgaaaagatgaatcctagtt

SEQ ID NO: 528740 - DNA, 33 bp, Homo sapien
ctgccttttgaaatgacaagatgaatcctagtt

SEQ ID NO: 528741 - DNA, 33 bp, Homo sapien
tgtatttagcttgggaaaccagagcattgactg

SEQ ID NO: 528742 - DNA, 33 bp, Homo sapien
tgtatttagcttgggagaccagagcattgactg

SEQ ID NO: 528743 - DNA, 33 bp, Homo sapien
ttaagcaactacaaaacgcaggcactggaaagg

SEQ ID NO: 528744 - DNA, 33 bp, Homo sapien
ttaagcaactacaaaatgcaggcactggaaagg

SEQ ID NO: 528745 - DNA, 33 bp, Homo sapien
gtgagaatatgtttccaatttgccctctgctct

SEQ ID NO: 528746 - DNA, 33 bp, Homo sapien
gtgagaatatgtttccgatttgccctctgctct

SEQ ID NO: 528747 - DNA, 33 bp, Homo sapien
atttgcctcttcctccccagaagtcaattattt

SEQ ID NO: 528748 - DNA, 33 bp, Homo sapien
atttgcctcttcctcctcagaagtcaattattt

SEQ ID NO: 528749 - DNA, 33 bp, Homo sapien
caacatttaaaggtgaaaggaaatgagtcatta

SEQ ID NO: 528750 - DNA, 33 bp, Homo sapien
caacatttaaaggtgagaggaaatgagtcatta

SEQ ID NO: 528751 - DNA, 33 bp, Homo sapien
aagccatttagaggaaagatagtggcaaattca

SEQ ID NO: 528752 - DNA, 33 bp, Homo sapien
aagccatttagaggaaggatagtggcaaattca

SEQ ID NO: 528753 - DNA, 33 bp, Homo sapien
aggtagaagggcaagagaatacatgtacatatg

SEQ ID NO: 528754 - DNA, 33 bp, Homo sapien
aggtagaagggcaagataatacatgtacatatg

SEQ ID NO: 528755 - DNA, 33 bp, Homo sapien
caatctattcagaaaaaataatccatgtacata

SEQ ID NO: 528756 - DNA, 33 bp, Homo sapien
caatctattcagaaaacataatccatgtacata

SEQ ID NO: 528757 - DNA, 33 bp, Homo sapien
attatatcatgtaaaactggggtctaataacat

SEQ ID NO: 528758 - DNA, 33 bp, Homo sapien
attatatcatgtaaaattggggtctaataacat

SEQ ID NO: 528759 - DNA, 33 bp, Homo sapien
tgctgtggttttctcaatctttaatcaggaata

SEQ ID NO: 528760 - DNA, 33 bp, Homo sapien
tgctgtggttttctcagtctttaatcaggaata

SEQ ID NO: 528761 - DNA, 33 bp, Homo sapien
cccaagatgaagtcacaggtatggcctctgaaa

SEQ ID NO: 528762 - DNA, 33 bp, Homo sapien
cccaagatgaagtcacgggtatggcctctgaaa

SEQ ID NO: 528763 - DNA, 33 bp, Homo sapien
cttcccattatgtcacactgagtctatggatgt

SEQ ID NO: 528764 - DNA, 33 bp, Homo sapien
cttcccattatgtcacgctgagtctatggatgt

SEQ ID NO: 528765 - DNA, 33 bp, Homo sapien
tttatatagagatgaacagtctgatatagagaa

SEQ ID NO: 528766 - DNA, 33 bp, Homo sapien
tttatatagagatgaagagtctgatatagagaa

SEQ ID NO: 528767 - DNA, 33 bp, Homo sapien
ctgcagcaaagcgggcaaatgacatttattttg

SEQ ID NO: 528768 - DNA, 33 bp, Homo sapien
ctgcagcaaagcgggcgaatgacatttattttg

SEQ ID NO: 528769 - DNA, 33 bp, Homo sapien
atctaaatgtgtcttacaggctgaggagaagtc

SEQ ID NO: 528770 - DNA, 33 bp, Homo sapien
atctaaatgtgtcttataggctgaggagaagtc

SEQ ID NO: 528771 - DNA, 33 bp, Homo sapien
gccctataatacgtaactagtcactcatcctta

SEQ ID NO: 528772 - DNA, 33 bp, Homo sapien
gccctataatacgtaattagtcactcatcctta

SEQ ID NO: 528773 - DNA, 33 bp, Homo sapien
gactcccaaactcataaaacatggacacccatt

SEQ ID NO: 528774 - DNA, 33 bp, Homo sapien
gactcccaaactcatagaacatggacacccatt

SEQ ID NO: 528775 - DNA, 33 bp, Homo sapien
tcagactgcagagggacgtggctaagtccaaat

SEQ ID NO: 528776 - DNA, 33 bp, Homo sapien
tcagactgcagagggatgtggctaagtccaaat

SEQ ID NO: 528777 - DNA, 33 bp, Homo sapien
atacagtgcaacacaaatggagcattctcctac

SEQ ID NO: 528778 - DNA, 33 bp, Homo sapien
atacagtgcaacacaagtggagcattctcctac

SEQ ID NO: 528779 - DNA, 33 bp, Homo sapien
ggttagaaagagaaaggctgagacctttttagt

SEQ ID NO: 528780 - DNA, 33 bp, Homo sapien
ggttagaaagagaaagtctgagacctttttagt

SEQ ID NO: 528781 - DNA, 33 bp, Homo sapien
aagaataccattttgccattcttagaaaccttc

SEQ ID NO: 528782 - DNA, 33 bp, Homo sapien
aagaataccattttgcgattcttagaaaccttc

SEQ ID NO: 528783 - DNA, 33 bp, Homo sapien
tccatgctttttacaactctggctttatcacat

SEQ ID NO: 528784 - DNA, 33 bp, Homo sapien
tccatgctttttacaattctggctttatcacat

SEQ ID NO: 528785 - DNA, 33 bp, Homo sapien
aattaaaacagtgagacgttggtacaagaagag

SEQ ID NO: 528786 - DNA, 33 bp, Homo sapien
aattaaaacagtgagatgttggtacaagaagag

SEQ ID NO: 528787 - DNA, 33 bp, Homo sapien
gcaaagagttttaacaacaactacactaatgga

SEQ ID NO: 528788 - DNA, 33 bp, Homo sapien
gcaaagagttttaacagcaactacactaatgga

SEQ ID NO: 528789 - DNA, 33 bp, Homo sapien
tcttaggtctttgtacagtaaatgctttgctgg

SEQ ID NO: 528790 - DNA, 33 bp, Homo sapien
tcttaggtctttgtacggtaaatgctttgctgg

SEQ ID NO: 528791 - DNA, 33 bp, Homo sapien
ggcaaagtagagttacaggtggttgtctctgca

SEQ ID NO: 528792 - DNA, 33 bp, Homo sapien
ggcaaagtagagttaccggtggttgtctctgca

SEQ ID NO: 528793 - DNA, 33 bp, Homo sapien
aaatgacacagccatccatagcactagagaagg

SEQ ID NO: 528794 - DNA, 33 bp, Homo sapien
aaatgacacagccatcgatagcactagagaagg

SEQ ID NO: 528795 - DNA, 33 bp, Homo sapien
acttggtcgcccattccctaagacctgtccagt

SEQ ID NO: 528796 - DNA, 33 bp, Homo sapien
acttggtcgcccattctctaagacctgtccagt

SEQ ID NO: 528797 - DNA, 33 bp, Homo sapien
ccatgtgtagaagccagcatggaggcagaaaag

SEQ ID NO: 528798 - DNA, 33 bp, Homo sapien
ccatgtgtagaagccatcatggaggcagaaaag

SEQ ID NO: 528799 - DNA, 33 bp, Homo sapien
ctcattaaaaagatcccagtctccaagatacat

SEQ ID NO: 528800 - DNA, 33 bp, Homo sapien
ctcattaaaaagatcctagtctccaagatacat

SEQ ID NO: 528801 - DNA, 33 bp, Homo sapien
gtcagaaaagtaaactcacttgaactgaaccag

SEQ ID NO: 528802 - DNA, 33 bp, Homo sapien
gtcagaaaagtaaactgacttgaactgaaccag

SEQ ID NO: 528803 - DNA, 33 bp, Homo sapien
ggagcatctgcttaacaattgtaacctgtaggt

SEQ ID NO: 528804 - DNA, 33 bp, Homo sapien
ggagcatctgcttaaccattgtaacctgtaggt

SEQ ID NO: 528805 - DNA, 33 bp, Homo sapien
gactggaaatccaacactgaggtgccggcaggg

SEQ ID NO: 528806 - DNA, 33 bp, Homo sapien
gactggaaatccaacagtgaggtgccggcaggg

SEQ ID NO: 528807 - DNA, 33 bp, Homo sapien
gcccacagaacaataacgaagactatttccact

SEQ ID NO: 528808 - DNA, 33 bp, Homo sapien
gcccacagaacaataatgaagactatttccact

SEQ ID NO: 528809 - DNA, 33 bp, Homo sapien
tcccccaacaaaaaagccagctagccattcaat

SEQ ID NO: 528810 - DNA, 33 bp, Homo sapien
tcccccaacaaaaaagtcagctagccattcaat

SEQ ID NO: 528811 - DNA, 33 bp, Homo sapien
gagaggtgcactgtagaatttggtggttttacc

SEQ ID NO: 528812 - DNA, 33 bp, Homo sapien
gagaggtgcactgtagcatttggtggttttacc

SEQ ID NO: 528813 - DNA, 33 bp, Homo sapien
caatctctgttctcaaaggatttatactaaggt

SEQ ID NO: 528814 - DNA, 33 bp, Homo sapien
caatctctgttctcaagggatttatactaaggt

SEQ ID NO: 528815 - DNA, 33 bp, Homo sapien
gaaaaatctgtggttcaatgctttccaggtagt

SEQ ID NO: 528816 - DNA, 33 bp, Homo sapien
gaaaaatctgtggttcgatgctttccaggtagt

SEQ ID NO: 528817 - DNA, 33 bp, Homo sapien
gtgctttgctctgttacattttaagtatcttct

SEQ ID NO: 528818 - DNA, 33 bp, Homo sapien
gtgctttgctctgttatattttaagtatcttct

SEQ ID NO: 528819 - DNA, 33 bp, Homo sapien
acaaaaatcattgtgaagtatagagaaggccac

SEQ ID NO: 528820 - DNA, 33 bp, Homo sapien
acaaaaatcattgtgaggtatagagaaggccac

SEQ ID NO: 528821 - DNA, 33 bp, Homo sapien
ggccatctccactcaacgtttatggtattttca

SEQ ID NO: 528822 - DNA, 33 bp, Homo sapien
ggccatctccactcaatgtttatggtattttca

SEQ ID NO: 528823 - DNA, 33 bp, Homo sapien
tcatcatcaggacttccctggcttagttccact

SEQ ID NO: 528824 - DNA, 33 bp, Homo sapien
tcatcatcaggacttcgctggcttagttccact

SEQ ID NO: 528825 - DNA, 33 bp, Homo sapien
acacttgattgtaaaaaacagaaactcaaccta

SEQ ID NO: 528826 - DNA, 33 bp, Homo sapien
acacttgattgtaaaagacagaaactcaaccta

SEQ ID NO: 528827 - DNA, 33 bp, Homo sapien
aagcaatctgacaaataataactctgttaggag

SEQ ID NO: 528828 - DNA, 33 bp, Homo sapien
aagcaatctgacaaatgataactctgttaggag

SEQ ID NO: 528829 - DNA, 33 bp, Homo sapien
ccaggatgatagttcacgtaactcctaacagag

SEQ ID NO: 528830 - DNA, 33 bp, Homo sapien
ccaggatgatagttcatgtaactcctaacagag

SEQ ID NO: 528831 - DNA, 33 bp, Homo sapien
tactatgcttggaaacgcttggtaatacaggat

SEQ ID NO: 528832 - DNA, 33 bp, Homo sapien
tactatgcttggaaactcttggtaatacaggat

SEQ ID NO: 528833 - DNA, 33 bp, Homo sapien
gaaactgaaatacctacactttaacaagatgtt

SEQ ID NO: 528834 - DNA, 33 bp, Homo sapien
gaaactgaaatacctagactttaacaagatgtt

SEQ ID NO: 528835 - DNA, 33 bp, Homo sapien
tggtagcctggatatacggttaagatgtgtatt

SEQ ID NO: 528836 - DNA, 33 bp, Homo sapien
tggtagcctggatatatggttaagatgtgtatt

SEQ ID NO: 528837 - DNA, 33 bp, Homo sapien
cacataggtggtaagcagcagaactgggagaca

SEQ ID NO: 528838 - DNA, 33 bp, Homo sapien
cacataggtggtaagcggcagaactgggagaca

SEQ ID NO: 528839 - DNA, 33 bp, Homo sapien
gtaacatttagtggacgcgattatctgtatacc

SEQ ID NO: 528840 - DNA, 33 bp, Homo sapien
gtaacatttagtggactcgattatctgtatacc

SEQ ID NO: 528841 - DNA, 33 bp, Homo sapien
gcattcagaaaatgtacagatcaaatgtatata

SEQ ID NO: 528842 - DNA, 33 bp, Homo sapien
gcattcagaaaatgtagagatcaaatgtatata

SEQ ID NO: 528843 - DNA, 33 bp, Homo sapien
atgtcgggcatggccacgtgcctttttgtaacc

SEQ ID NO: 528844 - DNA, 33 bp, Homo sapien
atgtcgggcatggccatgtgcctttttgtaacc

SEQ ID NO: 528845 - DNA, 33 bp, Homo sapien
aattaagttgcagtaacaacccctcaaatcaca

SEQ ID NO: 528846 - DNA, 33 bp, Homo sapien
aattaagttgcagtaagaacccctcaaatcaca

SEQ ID NO: 528847 - DNA, 33 bp, Homo sapien
ttttgctctgatataaccctgcttcaaaaagca

SEQ ID NO: 528848 - DNA, 33 bp, Homo sapien
ttttgctctgatataagcctgcttcaaaaagca

SEQ ID NO: 528849 - DNA, 33 bp, Homo sapien
cattcctgacttacccactagatgctggtagca

SEQ ID NO: 528850 - DNA, 33 bp, Homo sapien
cattcctgacttacccgctagatgctggtagca

SEQ ID NO: 528851 - DNA, 33 bp, Homo sapien
aaaattaaaaaggaaaataaagcagagttatgg

SEQ ID NO: 528852 - DNA, 33 bp, Homo sapien
aaaattaaaaaggaaagtaaagcagagttatgg

SEQ ID NO: 528853 - DNA, 33 bp, Homo sapien
ttattgtcatggaatagctttttaaaatggctg

SEQ ID NO: 528854 - DNA, 33 bp, Homo sapien
ttattgtcatggaatatctttttaaaatggctg

SEQ ID NO: 528855 - DNA, 33 bp, Homo sapien
tgggccacagagcaagaagcaaaatgtaaacat

SEQ ID NO: 528856 - DNA, 33 bp, Homo sapien
tgggccacagagcaagtagcaaaatgtaaacat

SEQ ID NO: 528857 - DNA, 33 bp, Homo sapien
gatgagggaatgaccaatagctggaagcagtgg

SEQ ID NO: 528858 - DNA, 33 bp, Homo sapien
gatgagggaatgaccagtagctggaagcagtgg

SEQ ID NO: 528859 - DNA, 33 bp, Homo sapien
atagtgaaaatgtatcagagtagtcaaaattca

SEQ ID NO: 528860 - DNA, 33 bp, Homo sapien
atagtgaaaatgtatcggagtagtcaaaattca

SEQ ID NO: 528861 - DNA, 33 bp, Homo sapien
catggtttctagtgtaagcatcctggtgcagac

SEQ ID NO: 528862 - DNA, 33 bp, Homo sapien
catggtttctagtgtaggcatcctggtgcagac

SEQ ID NO: 528863 - DNA, 33 bp, Homo sapien
tgacagatgatgcccacgtgggactcttctcta

SEQ ID NO: 528864 - DNA, 33 bp, Homo sapien
tgacagatgatgcccatgtgggactcttctcta

SEQ ID NO: 528865 - DNA, 33 bp, Homo sapien
ttaaatttagtaacaacatgaacttgaaactat

SEQ ID NO: 528866 - DNA, 33 bp, Homo sapien
ttaaatttagtaacaatatgaacttgaaactat

SEQ ID NO: 528867 - DNA, 33 bp, Homo sapien
gaaagggaaaatgagaacctggaatggaaagag

SEQ ID NO: 528868 - DNA, 33 bp, Homo sapien
gaaagggaaaatgagagcctggaatggaaagag

SEQ ID NO: 528869 - DNA, 33 bp, Homo sapien
tgatgacaaacttttacagaacctactctgtgc

SEQ ID NO: 528870 - DNA, 33 bp, Homo sapien
tgatgacaaacttttatagaacctactctgtgc

SEQ ID NO: 528871 - DNA, 33 bp, Homo sapien
gctgctatcacctttacctgccctatcacttcc

SEQ ID NO: 528872 - DNA, 33 bp, Homo sapien
gctgctatcacctttatctgccctatcacttcc

SEQ ID NO: 528873 - DNA, 33 bp, Homo sapien
agatggcaaatgagtacacgaaaagatgttcca

SEQ ID NO: 528874 - DNA, 33 bp, Homo sapien
agatggcaaatgagtatacgaaaagatgttcca

SEQ ID NO: 528875 - DNA, 33 bp, Homo sapien
gtaagttagaaagtgtcaagaaaatcataagga

SEQ ID NO: 528876 - DNA, 33 bp, Homo sapien
gtaagttagaaagtgttaagaaaatcataagga

SEQ ID NO: 528877 - DNA, 33 bp, Homo sapien
actattttgacattcaatctttgattttctgac

SEQ ID NO: 528878 - DNA, 33 bp, Homo sapien
actattttgacattcagtctttgattttctgac

SEQ ID NO: 528879 - DNA, 33 bp, Homo sapien
accaaaggctatgaggaattctggagtaaaaca

SEQ ID NO: 528880 - DNA, 33 bp, Homo sapien
accaaaggctatgaggcattctggagtaaaaca

SEQ ID NO: 528881 - DNA, 33 bp, Homo sapien
gatataatctgagccacgttgctagtcaagctg

SEQ ID NO: 528882 - DNA, 33 bp, Homo sapien
gatataatctgagccatgttgctagtcaagctg

SEQ ID NO: 528883 - DNA, 33 bp, Homo sapien
ctagtcttagcataaacgtgtccttccttctaa

SEQ ID NO: 528884 - DNA, 33 bp, Homo sapien
ctagtcttagcataaaggtgtccttccttctaa

SEQ ID NO: 528885 - DNA, 33 bp, Homo sapien
cactatgccttgtttccctgatctctgcccaca

SEQ ID NO: 528886 - DNA, 33 bp, Homo sapien
cactatgccttgtttctctgatctctgcccaca

SEQ ID NO: 528887 - DNA, 33 bp, Homo sapien
gtgccttgctttgggacatttgcattttaattt

SEQ ID NO: 528888 - DNA, 33 bp, Homo sapien
gtgccttgctttgggatatttgcattttaattt

SEQ ID NO: 528889 - DNA, 33 bp, Homo sapien
ggtgtttcctgtgacccctttctctgtgctctc

SEQ ID NO: 528890 - DNA, 33 bp, Homo sapien
ggtgtttcctgtgacctctttctctgtgctctc

SEQ ID NO: 528891 - DNA, 33 bp, Homo sapien
cttatggatcttcttacatcttctttgtccaca

SEQ ID NO: 528892 - DNA, 33 bp, Homo sapien
cttatggatcttcttatatcttctttgtccaca

SEQ ID NO: 528893 - DNA, 33 bp, Homo sapien
gggaaatagacaacacccctctgctccttgaaa

SEQ ID NO: 528894 - DNA, 33 bp, Homo sapien
gggaaatagacaacactcctctgctccttgaaa

SEQ ID NO: 528895 - DNA, 33 bp, Homo sapien
aagacttgaaacccggaagcaaggggtggtgtg

SEQ ID NO: 528896 - DNA, 33 bp, Homo sapien
aagacttgaaacccggcagcaaggggtggtgtg

SEQ ID NO: 528897 - DNA, 33 bp, Homo sapien
ctgctcagccactaaacgtgtaggagcaaccac

SEQ ID NO: 528898 - DNA, 33 bp, Homo sapien
ctgctcagccactaaatgtgtaggagcaaccac

SEQ ID NO: 528899 - DNA, 33 bp, Homo sapien
agattgtacacttggcacataaatatttcagca

SEQ ID NO: 528900 - DNA, 33 bp, Homo sapien
agattgtacacttggcgcataaatatttcagca

SEQ ID NO: 528901 - DNA, 33 bp, Homo sapien
aagatggatctgaataagtaaaactgtgaaata

SEQ ID NO: 528902 - DNA, 33 bp, Homo sapien
aagatggatctgaatatgtaaaactgtgaaata

SEQ ID NO: 528903 - DNA, 33 bp, Homo sapien
gcactggaaacgtggccagtttgaatccagatg

SEQ ID NO: 528904 - DNA, 33 bp, Homo sapien
gcactggaaacgtggctagtttgaatccagatg

SEQ ID NO: 528905 - DNA, 33 bp, Homo sapien
ttattcttttaatggccgacagtattcttttgt

SEQ ID NO: 528906 - DNA, 33 bp, Homo sapien
ttattcttttaatggctgacagtattcttttgt

SEQ ID NO: 528907 - DNA, 33 bp, Homo sapien
gctgcttaataaagcacgttaaagtgataagga

SEQ ID NO: 528908 - DNA, 33 bp, Homo sapien
gctgcttaataaagcatgttaaagtgataagga

SEQ ID NO: 528909 - DNA, 33 bp, Homo sapien
agtcttaagataaaccagctttcacattttcaa

SEQ ID NO: 528910 - DNA, 33 bp, Homo sapien
agtcttaagataaacccgctttcacattttcaa

SEQ ID NO: 528911 - DNA, 33 bp, Homo sapien
ttgaccatagtaatgtaaatctgagacttcttt

SEQ ID NO: 528912 - DNA, 33 bp, Homo sapien
ttgaccatagtaatgtgaatctgagacttcttt

SEQ ID NO: 528913 - DNA, 33 bp, Homo sapien
gcactttgtataagaccgtaaacaccaaattat

SEQ ID NO: 528914 - DNA, 33 bp, Homo sapien
gcactttgtataagactgtaaacaccaaattat

SEQ ID NO: 528915 - DNA, 33 bp, Homo sapien
cctgcatttaccactgcagacaaatgataccaa

SEQ ID NO: 528916 - DNA, 33 bp, Homo sapien
cctgcatttaccactgtagacaaatgataccaa

SEQ ID NO: 528917 - DNA, 33 bp, Homo sapien
tgaaggttcgttacataaacacatcacaggctt

SEQ ID NO: 528918 - DNA, 33 bp, Homo sapien
tgaaggttcgttacatgaacacatcacaggctt

SEQ ID NO: 528919 - DNA, 33 bp, Homo sapien
aggaactagccaattaactgtcaatctatctat

SEQ ID NO: 528920 - DNA, 33 bp, Homo sapien
aggaactagccaattagctgtcaatctatctat

SEQ ID NO: 528921 - DNA, 33 bp, Homo sapien
ctcatgaatttgagctaaaagaagtttccaaaa

SEQ ID NO: 528922 - DNA, 33 bp, Homo sapien
ctcatgaatttgagctgaaagaagtttccaaaa

SEQ ID NO: 528923 - DNA, 33 bp, Homo sapien
atgtagagcataatgggccatcaaaaaggaata

SEQ ID NO: 528924 - DNA, 33 bp, Homo sapien
atgtagagcataatggtccatcaaaaaggaata

SEQ ID NO: 528925 - DNA, 33 bp, Homo sapien
gatggttcactgaattcaagaaagtgatacatt

SEQ ID NO: 528926 - DNA, 33 bp, Homo sapien
gatggttcactgaatttaagaaagtgatacatt

SEQ ID NO: 528927 - DNA, 33 bp, Homo sapien
ctacaaaatggcaataagttctcttgggtgctc

SEQ ID NO: 528928 - DNA, 33 bp, Homo sapien
ctacaaaatggcaatatgttctcttgggtgctc

SEQ ID NO: 528929 - DNA, 33 bp, Homo sapien
agtttcagggtggtaaagaacccctgcaatcta

SEQ ID NO: 528930 - DNA, 33 bp, Homo sapien
agtttcagggtggtaaggaacccctgcaatcta

SEQ ID NO: 528931 - DNA, 33 bp, Homo sapien
gatgggcaaatttaaaagactgcttaagaaaat

SEQ ID NO: 528932 - DNA, 33 bp, Homo sapien
gatgggcaaatttaaacgactgcttaagaaaat

SEQ ID NO: 528933 - DNA, 33 bp, Homo sapien
tactagtgttttcaaacgacgaacttttggcct

SEQ ID NO: 528934 - DNA, 33 bp, Homo sapien
tactagtgttttcaaatgacgaacttttggcct

SEQ ID NO: 528935 - DNA, 33 bp, Homo sapien
caggagtgagctgtaacaagccatgatcatgcc

SEQ ID NO: 528936 - DNA, 33 bp, Homo sapien
caggagtgagctgtaataagccatgatcatgcc

SEQ ID NO: 528937 - DNA, 33 bp, Homo sapien
tggtatgttaccacctcacaatacaaaggaata

SEQ ID NO: 528938 - DNA, 33 bp, Homo sapien
tggtatgttaccaccttacaatacaaaggaata

SEQ ID NO: 528939 - DNA, 33 bp, Homo sapien
tacctctcagagaatgcatatgattaaatcaga

SEQ ID NO: 528940 - DNA, 33 bp, Homo sapien
tacctctcagagaatggatatgattaaatcaga

SEQ ID NO: 528941 - DNA, 33 bp, Homo sapien
gagtaatatagtttcaagctattcaattcacct

SEQ ID NO: 528942 - DNA, 33 bp, Homo sapien
gagtaatatagtttcatgctattcaattcacct

SEQ ID NO: 528943 - DNA, 33 bp, Homo sapien
aggtgctactgagtgggcattcaagattcctat

SEQ ID NO: 528944 - DNA, 33 bp, Homo sapien
aggtgctactgagtggtcattcaagattcctat

SEQ ID NO: 528945 - DNA, 33 bp, Homo sapien
gcaaaagggggacagacgaagttcacagaggat

SEQ ID NO: 528946 - DNA, 33 bp, Homo sapien
gcaaaagggggacagatgaagttcacagaggat

SEQ ID NO: 528947 - DNA, 33 bp, Homo sapien
gtttattttacacatacccaggataaaacataa

SEQ ID NO: 528948 - DNA, 33 bp, Homo sapien
gtttattttacacatatccaggataaaacataa

SEQ ID NO: 528949 - DNA, 33 bp, Homo sapien
cctctgatcataacaaatgagttgtccctgccc

SEQ ID NO: 528950 - DNA, 33 bp, Homo sapien
cctctgatcataacaagtgagttgtccctgccc

SEQ ID NO: 528951 - DNA, 33 bp, Homo sapien
caccttgattcagaaccattttggccgtttaac

SEQ ID NO: 528952 - DNA, 33 bp, Homo sapien
caccttgattcagaacgattttggccgtttaac

SEQ ID NO: 528953 - DNA, 33 bp, Homo sapien
gagacacaaaaccataggtccaaaaagctcaga

SEQ ID NO: 528954 - DNA, 33 bp, Homo sapien
gagacacaaaaccatatgtccaaaaagctcaga

SEQ ID NO: 528955 - DNA, 33 bp, Homo sapien
ttaccatagtttcaaaattgcagagagagagag

SEQ ID NO: 528956 - DNA, 33 bp, Homo sapien
ttaccatagtttcaaagttgcagagagagagag

SEQ ID NO: 528957 - DNA, 33 bp, Homo sapien
tgcagtttcagttaaaaatcctatctgaatcct

SEQ ID NO: 528958 - DNA, 33 bp, Homo sapien
tgcagtttcagttaaacatcctatctgaatcct

SEQ ID NO: 528959 - DNA, 33 bp, Homo sapien
ttgcagaggcataccactggctactttagaaaa

SEQ ID NO: 528960 - DNA, 33 bp, Homo sapien
ttgcagaggcataccattggctactttagaaaa

SEQ ID NO: 528961 - DNA, 33 bp, Homo sapien
agcctctgtctcaaaagttctctctgtctatat

SEQ ID NO: 528962 - DNA, 33 bp, Homo sapien
agcctctgtctcaaaatttctctctgtctatat

SEQ ID NO: 528963 - DNA, 33 bp, Homo sapien
ttaaaaataaacaacccagtttcacctaaggca

SEQ ID NO: 528964 - DNA, 33 bp, Homo sapien
ttaaaaataaacaacctagtttcacctaaggca

SEQ ID NO: 528965 - DNA, 33 bp, Homo sapien
agttacatataacaacaagtgccttcattttca

SEQ ID NO: 528966 - DNA, 33 bp, Homo sapien
agttacatataacaacgagtgccttcattttca

SEQ ID NO: 528967 - DNA, 33 bp, Homo sapien
cattgtaatattgtatcaagctatttaatctac

SEQ ID NO: 528968 - DNA, 33 bp, Homo sapien
cattgtaatattgtatgaagctatttaatctac

SEQ ID NO: 528969 - DNA, 33 bp, Homo sapien
tgcaatattttccacaataaacagaagttggtt

SEQ ID NO: 528970 - DNA, 33 bp, Homo sapien
tgcaatattttccacagtaaacagaagttggtt

SEQ ID NO: 528971 - DNA, 33 bp, Homo sapien
agttatattgcttccaaaaactggcgaagtcat

SEQ ID NO: 528972 - DNA, 33 bp, Homo sapien
agttatattgcttccagaaactggcgaagtcat

SEQ ID NO: 528973 - DNA, 33 bp, Homo sapien
gtaaatggtttgtttcaaggccctatggtagaa

SEQ ID NO: 528974 - DNA, 33 bp, Homo sapien
gtaaatggtttgtttcgaggccctatggtagaa

SEQ ID NO: 528975 - DNA, 33 bp, Homo sapien
agggaagtcttttgtgcaacttttatgttgtat

SEQ ID NO: 528976 - DNA, 33 bp, Homo sapien
agggaagtcttttgtggaacttttatgttgtat

SEQ ID NO: 528977 - DNA, 33 bp, Homo sapien
atgtgagccctgagaactgttcatcctactctg

SEQ ID NO: 528978 - DNA, 33 bp, Homo sapien
atgtgagccctgagaattgttcatcctactctg

SEQ ID NO: 528979 - DNA, 33 bp, Homo sapien
tgctggggactggtaccgatctgtggcgtgtga

SEQ ID NO: 528980 - DNA, 33 bp, Homo sapien
tgctggggactggtactgatctgtggcgtgtga

SEQ ID NO: 528981 - DNA, 33 bp, Homo sapien
gtaagcttagtgtagacagagaaaaacatctga

SEQ ID NO: 528982 - DNA, 33 bp, Homo sapien
gtaagcttagtgtagagagagaaaaacatctga

SEQ ID NO: 528983 - DNA, 33 bp, Homo sapien
agaactagtctccttgaaaatagtgttgagcta

SEQ ID NO: 528984 - DNA, 33 bp, Homo sapien
agaactagtctccttgcaaatagtgttgagcta

SEQ ID NO: 528985 - DNA, 33 bp, Homo sapien
ctgaaaaaagcttagacgcagtggcaacctagt

SEQ ID NO: 528986 - DNA, 33 bp, Homo sapien
ctgaaaaaagcttagatgcagtggcaacctagt

SEQ ID NO: 528987 - DNA, 33 bp, Homo sapien
caggacccccggaaaaatgcagctccagataag

SEQ ID NO: 528988 - DNA, 33 bp, Homo sapien
caggacccccggaaaattgcagctccagataag

SEQ ID NO: 528989 - DNA, 33 bp, Homo sapien
tcctgtttagatggtaaacatggcttatgcctc

SEQ ID NO: 528990 - DNA, 33 bp, Homo sapien
tcctgtttagatggtacacatggcttatgcctc

SEQ ID NO: 528991 - DNA, 33 bp, Homo sapien
acgactaacaaggtgcgcttcttcaggttaagc

SEQ ID NO: 528992 - DNA, 33 bp, Homo sapien
acgactaacaaggtgctcttcttcaggttaagc

SEQ ID NO: 528993 - DNA, 33 bp, Homo sapien
cacattttccagctaaactcagttgtttgaaga

SEQ ID NO: 528994 - DNA, 33 bp, Homo sapien
cacattttccagctaagctcagttgtttgaaga

SEQ ID NO: 528995 - DNA, 33 bp, Homo sapien
ccatctattgacttacacacactatagctccag

SEQ ID NO: 528996 - DNA, 33 bp, Homo sapien
ccatctattgacttacccacactatagctccag

SEQ ID NO: 528997 - DNA, 33 bp, Homo sapien
tatacccttcagtcaaagttccaagaagcgggt

SEQ ID NO: 528998 - DNA, 33 bp, Homo sapien
tatacccttcagtcaatgttccaagaagcgggt

SEQ ID NO: 528999 - DNA, 33 bp, Homo sapien
gccggtgatgaccaaactggagacagcgcgcgt

SEQ ID NO: 529000 - DNA, 33 bp, Homo sapien
gccggtgatgaccaaattggagacagcgcgcgt

SEQ ID NO: 529001 - DNA, 33 bp, Homo sapien
tcttttcaactaactagcttcctcttgcataaa

SEQ ID NO: 529002 - DNA, 33 bp, Homo sapien
tcttttcaactaactatcttcctcttgcataaa

SEQ ID NO: 529003 - DNA, 33 bp, Homo sapien
gagcattcagaatacaaaaaatgtttatccatt

SEQ ID NO: 529004 - DNA, 33 bp, Homo sapien
gagcattcagaatacacaaaatgtttatccatt

SEQ ID NO: 529005 - DNA, 33 bp, Homo sapien
ttgaaccctatagcctgaatcagcttgctggaa

SEQ ID NO: 529006 - DNA, 33 bp, Homo sapien
ttgaaccctatagccttaatcagcttgctggaa

SEQ ID NO: 529007 - DNA, 33 bp, Homo sapien
tatggaatttagcaaactaatactaaactatta

SEQ ID NO: 529008 - DNA, 33 bp, Homo sapien
tatggaatttagcaaagtaatactaaactatta

SEQ ID NO: 529009 - DNA, 33 bp, Homo sapien
atctcaggacagggtaagaaagagagacttcat

SEQ ID NO: 529010 - DNA, 33 bp, Homo sapien
atctcaggacagggtaggaaagagagacttcat

SEQ ID NO: 529011 - DNA, 33 bp, Homo sapien
atgttaaatctatttgaacgaagaaggagtagg

SEQ ID NO: 529012 - DNA, 33 bp, Homo sapien
atgttaaatctatttgtacgaagaaggagtagg

SEQ ID NO: 529013 - DNA, 33 bp, Homo sapien
tcttagaagacttagaataacactgaatatttt

SEQ ID NO: 529014 - DNA, 33 bp, Homo sapien
tcttagaagacttagactaacactgaatatttt

SEQ ID NO: 529015 - DNA, 33 bp, Homo sapien
aatcacattttaagcccgacagaagacacccac

SEQ ID NO: 529016 - DNA, 33 bp, Homo sapien
aatcacattttaagcctgacagaagacacccac

SEQ ID NO: 529017 - DNA, 33 bp, Homo sapien
aaaatggacattctagaaactcaaaaatactta

SEQ ID NO: 529018 - DNA, 33 bp, Homo sapien
aaaatggacattctaggaactcaaaaatactta

SEQ ID NO: 529019 - DNA, 33 bp, Homo sapien
gaagacaatcttaagaagtcacatactgtatga

SEQ ID NO: 529020 - DNA, 33 bp, Homo sapien
gaagacaatcttaagaggtcacatactgtatga

SEQ ID NO: 529021 - DNA, 33 bp, Homo sapien
attcaaggacatgaaaaagcagcatagtagaaa

SEQ ID NO: 529022 - DNA, 33 bp, Homo sapien
attcaaggacatgaaagagcagcatagtagaaa

SEQ ID NO: 529023 - DNA, 33 bp, Homo sapien
ttattaaaaaaggaaaattccgcagcaagacaa

SEQ ID NO: 529024 - DNA, 33 bp, Homo sapien
ttattaaaaaaggaaagttccgcagcaagacaa

SEQ ID NO: 529025 - DNA, 33 bp, Homo sapien
catagattcaatcaaccgcagataaaaagatgt

SEQ ID NO: 529026 - DNA, 33 bp, Homo sapien
catagattcaatcaactgcagataaaaagatgt

SEQ ID NO: 529027 - DNA, 33 bp, Homo sapien
tatctgtaaatgtgatcacaaagccattatatt

SEQ ID NO: 529028 - DNA, 33 bp, Homo sapien
tatctgtaaatgtgatgacaaagccattatatt

SEQ ID NO: 529029 - DNA, 33 bp, Homo sapien
cccctcacacctgcaaatatttagctcaagatc

SEQ ID NO: 529030 - DNA, 33 bp, Homo sapien
cccctcacacctgcaattatttagctcaagatc

SEQ ID NO: 529031 - DNA, 33 bp, Homo sapien
gagccaccacgctcagccgagaatcaacattat

SEQ ID NO: 529032 - DNA, 33 bp, Homo sapien
gagccaccacgctcaggcgagaatcaacattat

SEQ ID NO: 529033 - DNA, 33 bp, Homo sapien
agttggattatgaatgaaaattgagatctgttc

SEQ ID NO: 529034 - DNA, 33 bp, Homo sapien
agttggattatgaatggaaattgagatctgttc

SEQ ID NO: 529035 - DNA, 33 bp, Homo sapien
atggcttacattaaaactgctaaagttctttcc

SEQ ID NO: 529036 - DNA, 33 bp, Homo sapien
atggcttacattaaaattgctaaagttctttcc

SEQ ID NO: 529037 - DNA, 33 bp, Homo sapien
acatgagatttagtcacacctggattttattcc

SEQ ID NO: 529038 - DNA, 33 bp, Homo sapien
acatgagatttagtcagacctggattttattcc

SEQ ID NO: 529039 - DNA, 33 bp, Homo sapien
cctcacgtctaccaggaaactgctagaagtctg

SEQ ID NO: 529040 - DNA, 33 bp, Homo sapien
cctcacgtctaccaggcaactgctagaagtctg

SEQ ID NO: 529041 - DNA, 33 bp, Homo sapien
gaatgattagcagatacggcagtggaattaagt

SEQ ID NO: 529042 - DNA, 33 bp, Homo sapien
gaatgattagcagatatggcagtggaattaagt

SEQ ID NO: 529043 - DNA, 33 bp, Homo sapien
gccaaacaaatctatacgctttctcttcaacca

SEQ ID NO: 529044 - DNA, 33 bp, Homo sapien
gccaaacaaatctatatgctttctcttcaacca

SEQ ID NO: 529045 - DNA, 33 bp, Homo sapien
ccccttacttcaagaaaaggagtctctcaccat

SEQ ID NO: 529046 - DNA, 33 bp, Homo sapien
ccccttacttcaagaagaggagtctctcaccat

SEQ ID NO: 529047 - DNA, 33 bp, Homo sapien
aactcctttaggtgaacaccaaggagcacaact

SEQ ID NO: 529048 - DNA, 33 bp, Homo sapien
aactcctttaggtgaataccaaggagcacaact

SEQ ID NO: 529049 - DNA, 33 bp, Homo sapien
agccagggagttcaaaactgcatacagtgagtg

SEQ ID NO: 529050 - DNA, 33 bp, Homo sapien
agccagggagttcaaagctgcatacagtgagtg

SEQ ID NO: 529051 - DNA, 33 bp, Homo sapien
aacatcaagcagactggactcttggaacttttc

SEQ ID NO: 529052 - DNA, 33 bp, Homo sapien
aacatcaagcagactgtactcttggaacttttc

SEQ ID NO: 529053 - DNA, 33 bp, Homo sapien
ttattcagttagttcccatttggcaactgctta

SEQ ID NO: 529054 - DNA, 33 bp, Homo sapien
ttattcagttagttcctatttggcaactgctta

SEQ ID NO: 529055 - DNA, 33 bp, Homo sapien
cttaatttatcacaaagatgccaatgaaattca

SEQ ID NO: 529056 - DNA, 33 bp, Homo sapien
cttaatttatcacaaatatgccaatgaaattca

SEQ ID NO: 529057 - DNA, 33 bp, Homo sapien
ccatatttattaatcaatcattcccagttactc

SEQ ID NO: 529058 - DNA, 33 bp, Homo sapien
ccatatttattaatcagtcattcccagttactc

SEQ ID NO: 529059 - DNA, 33 bp, Homo sapien
ttcttgattattgtaaatgtccttctgagtttg

SEQ ID NO: 529060 - DNA, 33 bp, Homo sapien
ttcttgattattgtaattgtccttctgagtttg

SEQ ID NO: 529061 - DNA, 33 bp, Homo sapien
cttgacaactacgtaaccttaggcaagtttagt

SEQ ID NO: 529062 - DNA, 33 bp, Homo sapien
cttgacaactacgtaatcttaggcaagtttagt

SEQ ID NO: 529063 - DNA, 33 bp, Homo sapien
gtgggaatgcaaaatacaagaagcaggagcaag

SEQ ID NO: 529064 - DNA, 33 bp, Homo sapien
gtgggaatgcaaaatataagaagcaggagcaag

SEQ ID NO: 529065 - DNA, 33 bp, Homo sapien
tatggctcataagtgaactcagcagatttccca

SEQ ID NO: 529066 - DNA, 33 bp, Homo sapien
tatggctcataagtgacctcagcagatttccca

SEQ ID NO: 529067 - DNA, 33 bp, Homo sapien
tattttttttcaataaaccacctacaaagcttc

SEQ ID NO: 529068 - DNA, 33 bp, Homo sapien
tattttttttcaataatccacctacaaagcttc

SEQ ID NO: 529069 - DNA, 33 bp, Homo sapien
aatacgtttaaaagatcaaggcagttaaaggga

SEQ ID NO: 529070 - DNA, 33 bp, Homo sapien
aatacgtttaaaagattaaggcagttaaaggga

SEQ ID NO: 529071 - DNA, 33 bp, Homo sapien
taatttacttactactcaaatagcccctgcatt

SEQ ID NO: 529072 - DNA, 33 bp, Homo sapien
taatttacttactacttaaatagcccctgcatt

SEQ ID NO: 529073 - DNA, 33 bp, Homo sapien
gttattctgccagtggaaaatagaaatctgttt

SEQ ID NO: 529074 - DNA, 33 bp, Homo sapien
gttattctgccagtgggaaatagaaatctgttt

SEQ ID NO: 529075 - DNA, 33 bp, Homo sapien
ttgatgaactctcatacgctccttgtgggaatg

SEQ ID NO: 529076 - DNA, 33 bp, Homo sapien
ttgatgaactctcatatgctccttgtgggaatg

SEQ ID NO: 529077 - DNA, 33 bp, Homo sapien
ctcctgtggccctaaccggcaaatctgaaatca

SEQ ID NO: 529078 - DNA, 33 bp, Homo sapien
ctcctgtggccctaactggcaaatctgaaatca

SEQ ID NO: 529079 - DNA, 33 bp, Homo sapien
atcagaatcaaggaaacttgtaggctgaggcga

SEQ ID NO: 529080 - DNA, 33 bp, Homo sapien
atcagaatcaaggaaatttgtaggctgaggcga

SEQ ID NO: 529081 - DNA, 33 bp, Homo sapien
attctaaatgcttttccagtgaatccattaatg

SEQ ID NO: 529082 - DNA, 33 bp, Homo sapien
attctaaatgcttttctagtgaatccattaatg

SEQ ID NO: 529083 - DNA, 33 bp, Homo sapien
agtttgggctaggaaacgccagtgttattccag

SEQ ID NO: 529084 - DNA, 33 bp, Homo sapien
agtttgggctaggaaatgccagtgttattccag

SEQ ID NO: 529085 - DNA, 33 bp, Homo sapien
tgagagtattgtgagacggttataatttttatg

SEQ ID NO: 529086 - DNA, 33 bp, Homo sapien
tgagagtattgtgagatggttataatttttatg

SEQ ID NO: 529087 - DNA, 33 bp, Homo sapien
gtttaatatcactcctaaattcatctgtagctt

SEQ ID NO: 529088 - DNA, 33 bp, Homo sapien
gtttaatatcactcctgaattcatctgtagctt

SEQ ID NO: 529089 - DNA, 33 bp, Homo sapien
ctttgacctttaaactcaactcagtattcaact

SEQ ID NO: 529090 - DNA, 33 bp, Homo sapien
ctttgacctttaaacttaactcagtattcaact

SEQ ID NO: 529091 - DNA, 33 bp, Homo sapien
ttacagacagagtaatcaagatttacgtggtta

SEQ ID NO: 529092 - DNA, 33 bp, Homo sapien
ttacagacagagtaattaagatttacgtggtta

SEQ ID NO: 529093 - DNA, 33 bp, Homo sapien
ggattgttaatgaggaaaggctttgcatgacat

SEQ ID NO: 529094 - DNA, 33 bp, Homo sapien
ggattgttaatgaggagaggctttgcatgacat

SEQ ID NO: 529095 - DNA, 33 bp, Homo sapien
taggagcacatcaaacagggcaaaattggtaaa

SEQ ID NO: 529096 - DNA, 33 bp, Homo sapien
taggagcacatcaaacggggcaaaattggtaaa

SEQ ID NO: 529097 - DNA, 33 bp, Homo sapien
atgatggctccaaaaggctccaacatctcccag

SEQ ID NO: 529098 - DNA, 33 bp, Homo sapien
atgatggctccaaaagtctccaacatctcccag

SEQ ID NO: 529099 - DNA, 33 bp, Homo sapien
cctgcattagacaaggaaacaaaaagacataaa

SEQ ID NO: 529100 - DNA, 33 bp, Homo sapien
cctgcattagacaaggtaacaaaaagacataaa

SEQ ID NO: 529101 - DNA, 33 bp, Homo sapien
ttgtatcttgagtataaagacttcacaggtaaa

SEQ ID NO: 529102 - DNA, 33 bp, Homo sapien
ttgtatcttgagtatagagacttcacaggtaaa

SEQ ID NO: 529103 - DNA, 33 bp, Homo sapien
ttgctgatttaatttcaatttgtggtcaaccac

SEQ ID NO: 529104 - DNA, 33 bp, Homo sapien
ttgctgatttaatttcgatttgtggtcaaccac

SEQ ID NO: 529105 - DNA, 33 bp, Homo sapien
tccagcctcctcgtaactgtgctcgctttccta

SEQ ID NO: 529106 - DNA, 33 bp, Homo sapien
tccagcctcctcgtaattgtgctcgctttccta

SEQ ID NO: 529107 - DNA, 33 bp, Homo sapien
gggttgcccagtctgcaagagggaagagcttgg

SEQ ID NO: 529108 - DNA, 33 bp, Homo sapien
gggttgcccagtctgcgagagggaagagcttgg

SEQ ID NO: 529109 - DNA, 33 bp, Homo sapien
cttactgccctgagtcaagtaagcagtcacaag

SEQ ID NO: 529110 - DNA, 33 bp, Homo sapien
cttactgccctgagtccagtaagcagtcacaag

SEQ ID NO: 529111 - DNA, 33 bp, Homo sapien
ggtaaggagtttttcaaccactgaggacttgcc

SEQ ID NO: 529112 - DNA, 33 bp, Homo sapien
ggtaaggagtttttcatccactgaggacttgcc

SEQ ID NO: 529113 - DNA, 33 bp, Homo sapien
tgctatcaaacctggaaaaaattaccttgagga

SEQ ID NO: 529114 - DNA, 33 bp, Homo sapien
tgctatcaaacctggacaaaattaccttgagga

SEQ ID NO: 529115 - DNA, 33 bp, Homo sapien
gatatagtaaaatgtacagaacttgcctccaaa

SEQ ID NO: 529116 - DNA, 33 bp, Homo sapien
gatatagtaaaatgtatagaacttgcctccaaa

SEQ ID NO: 529117 - DNA, 33 bp, Homo sapien
ggtgattcaattcacaacagatggtgcttctct

SEQ ID NO: 529118 - DNA, 33 bp, Homo sapien
ggtgattcaattcacagcagatggtgcttctct

SEQ ID NO: 529119 - DNA, 33 bp, Homo sapien
aaggcagatttgaaaaataggaagtaggctcag

SEQ ID NO: 529120 - DNA, 33 bp, Homo sapien
aaggcagatttgaaaagtaggaagtaggctcag

SEQ ID NO: 529121 - DNA, 33 bp, Homo sapien
gcataaataaaggagacgaagggggcttccaga

SEQ ID NO: 529122 - DNA, 33 bp, Homo sapien
gcataaataaaggagatgaagggggcttccaga

SEQ ID NO: 529123 - DNA, 33 bp, Homo sapien
ccatcactcagtggacacaaagtcaatgttcat

SEQ ID NO: 529124 - DNA, 33 bp, Homo sapien
ccatcactcagtggacgcaaagtcaatgttcat

SEQ ID NO: 529125 - DNA, 33 bp, Homo sapien
aaactccctgtcctcacagttgcattaacccat

SEQ ID NO: 529126 - DNA, 33 bp, Homo sapien
aaactccctgtcctcatagttgcattaacccat

SEQ ID NO: 529127 - DNA, 33 bp, Homo sapien
acttatgtctattccaataagtgtcagtattgt

SEQ ID NO: 529128 - DNA, 33 bp, Homo sapien
acttatgtctattccagtaagtgtcagtattgt

SEQ ID NO: 529129 - DNA, 33 bp, Homo sapien
tcctccctctgaaactaagaactttaggccagc

SEQ ID NO: 529130 - DNA, 33 bp, Homo sapien
tcctccctctgaaactgagaactttaggccagc

SEQ ID NO: 529131 - DNA, 33 bp, Homo sapien
ttgacaggctaagaagacagttatggtataggc

SEQ ID NO: 529132 - DNA, 33 bp, Homo sapien
ttgacaggctaagaaggcagttatggtataggc

SEQ ID NO: 529133 - DNA, 33 bp, Homo sapien
tttgtgctttgcatcaactatgggcccttcaat

SEQ ID NO: 529134 - DNA, 33 bp, Homo sapien
tttgtgctttgcatcacctatgggcccttcaat

SEQ ID NO: 529135 - DNA, 33 bp, Homo sapien
acatttgaccatttaaacccagaggcatgaatt

SEQ ID NO: 529136 - DNA, 33 bp, Homo sapien
acatttgaccatttaatcccagaggcatgaatt

SEQ ID NO: 529137 - DNA, 33 bp, Homo sapien
aattatgtcacagataggattactcagtaggag

SEQ ID NO: 529138 - DNA, 33 bp, Homo sapien
aattatgtcacagatatgattactcagtaggag

SEQ ID NO: 529139 - DNA, 33 bp, Homo sapien
tccactgaataaggccagcagaaatggcttatt

SEQ ID NO: 529140 - DNA, 33 bp, Homo sapien
tccactgaataaggccggcagaaatggcttatt

SEQ ID NO: 529141 - DNA, 33 bp, Homo sapien
gctagtggatgaaaacaataccttttaaggcgg

SEQ ID NO: 529142 - DNA, 33 bp, Homo sapien
gctagtggatgaaaacgataccttttaaggcgg

SEQ ID NO: 529143 - DNA, 33 bp, Homo sapien
tctgagaacatttttccactcatgccactggcc

SEQ ID NO: 529144 - DNA, 33 bp, Homo sapien
tctgagaacatttttcgactcatgccactggcc

SEQ ID NO: 529145 - DNA, 33 bp, Homo sapien
tctggtgtaaaccggacgaaatctcacgcctga

SEQ ID NO: 529146 - DNA, 33 bp, Homo sapien
tctggtgtaaaccggatgaaatctcacgcctga

SEQ ID NO: 529147 - DNA, 33 bp, Homo sapien
gctcaggttctcagcacgagccaaagctgcctt

SEQ ID NO: 529148 - DNA, 33 bp, Homo sapien
gctcaggttctcagcatgagccaaagctgcctt

SEQ ID NO: 529149 - DNA, 33 bp, Homo sapien
cacaaggaagctgaaaaggccctggaatcctat

SEQ ID NO: 529150 - DNA, 33 bp, Homo sapien
cacaaggaagctgaaagggccctggaatcctat

SEQ ID NO: 529151 - DNA, 33 bp, Homo sapien
gcagttcttccacctgcattggaatagggtaag

SEQ ID NO: 529152 - DNA, 33 bp, Homo sapien
gcagttcttccacctggattggaatagggtaag

SEQ ID NO: 529153 - DNA, 33 bp, Homo sapien
ccaaaaagaagtccacagaagctcaaaaaattg

SEQ ID NO: 529154 - DNA, 33 bp, Homo sapien
ccaaaaagaagtccacggaagctcaaaaaattg

SEQ ID NO: 529155 - DNA, 33 bp, Homo sapien
acacttaggttgattccctgtcttagctattgt

SEQ ID NO: 529156 - DNA, 33 bp, Homo sapien
acacttaggttgattcgctgtcttagctattgt

SEQ ID NO: 529157 - DNA, 33 bp, Homo sapien
aagtagggctataccaaatcagcaagacgtcta

SEQ ID NO: 529158 - DNA, 33 bp, Homo sapien
aagtagggctataccatatcagcaagacgtcta

SEQ ID NO: 529159 - DNA, 33 bp, Homo sapien
cagattttaaaattcacgaagagctcaccttgg

SEQ ID NO: 529160 - DNA, 33 bp, Homo sapien
cagattttaaaattcatgaagagctcaccttgg

SEQ ID NO: 529161 - DNA, 33 bp, Homo sapien
tctcatattttctatacaggaaactgtgtcatt

SEQ ID NO: 529162 - DNA, 33 bp, Homo sapien
tctcatattttctatagaggaaactgtgtcatt

SEQ ID NO: 529163 - DNA, 33 bp, Homo sapien
tccaaataagcatcagaaagagcagtcctgaat

SEQ ID NO: 529164 - DNA, 33 bp, Homo sapien
tccaaataagcatcaggaagagcagtcctgaat

SEQ ID NO: 529165 - DNA, 33 bp, Homo sapien
aaactaggccagcccaagtatgtgataagagca

SEQ ID NO: 529166 - DNA, 33 bp, Homo sapien
aaactaggccagcccatgtatgtgataagagca

SEQ ID NO: 529167 - DNA, 33 bp, Homo sapien
acagttgaagaaccaccatatcatcagctgctt

SEQ ID NO: 529168 - DNA, 33 bp, Homo sapien
acagttgaagaaccactatatcatcagctgctt

SEQ ID NO: 529169 - DNA, 33 bp, Homo sapien
cccatcttttgtcttcaaagcctgacagctctt

SEQ ID NO: 529170 - DNA, 33 bp, Homo sapien
cccatcttttgtcttcgaagcctgacagctctt

SEQ ID NO: 529171 - DNA, 33 bp, Homo sapien
tcttatgaattaacttaaagatcacctaagata

SEQ ID NO: 529172 - DNA, 33 bp, Homo sapien
tcttatgaattaactttaagatcacctaagata

SEQ ID NO: 529173 - DNA, 33 bp, Homo sapien
cactcacaactgaaaacgaccactcttaattca

SEQ ID NO: 529174 - DNA, 33 bp, Homo sapien
cactcacaactgaaaatgaccactcttaattca

SEQ ID NO: 529175 - DNA, 33 bp, Homo sapien
gggagaagaacaaaaacagaagcatagcttgag

SEQ ID NO: 529176 - DNA, 33 bp, Homo sapien
gggagaagaacaaaaagagaagcatagcttgag

SEQ ID NO: 529177 - DNA, 33 bp, Homo sapien
caatgtaagatctgccaaaaactaaaatttgag

SEQ ID NO: 529178 - DNA, 33 bp, Homo sapien
caatgtaagatctgccgaaaactaaaatttgag

SEQ ID NO: 529179 - DNA, 33 bp, Homo sapien
atttgtctgttgtttaccagagtcaaaaaagct

SEQ ID NO: 529180 - DNA, 33 bp, Homo sapien
atttgtctgttgtttatcagagtcaaaaaagct

SEQ ID NO: 529181 - DNA, 33 bp, Homo sapien
caagaacagaggttacaggttacaagacagcaa

SEQ ID NO: 529182 - DNA, 33 bp, Homo sapien
caagaacagaggttacgggttacaagacagcaa

SEQ ID NO: 529183 - DNA, 33 bp, Homo sapien
cacatatttaccataaggcctggaagagtaaag

SEQ ID NO: 529184 - DNA, 33 bp, Homo sapien
cacatatttaccataatgcctggaagagtaaag

SEQ ID NO: 529185 - DNA, 33 bp, Homo sapien
ataagaattgtctctgcagttggtttcctcttc

SEQ ID NO: 529186 - DNA, 33 bp, Homo sapien
ataagaattgtctctggagttggtttcctcttc

SEQ ID NO: 529187 - DNA, 33 bp, Homo sapien
cattcattccaccctacaagcatttaacaacct

SEQ ID NO: 529188 - DNA, 33 bp, Homo sapien
cattcattccaccctataagcatttaacaacct

SEQ ID NO: 529189 - DNA, 33 bp, Homo sapien
acagacaaggtctccaaggtcaacttactcata

SEQ ID NO: 529190 - DNA, 33 bp, Homo sapien
acagacaaggtctccacggtcaacttactcata

SEQ ID NO: 529191 - DNA, 33 bp, Homo sapien
catacaaaccagagaaaaactcatagtgcgtta

SEQ ID NO: 529192 - DNA, 33 bp, Homo sapien
catacaaaccagagaagaactcatagtgcgtta

SEQ ID NO: 529193 - DNA, 33 bp, Homo sapien
ccagccgcattttagacgtgagatgcagagaag

SEQ ID NO: 529194 - DNA, 33 bp, Homo sapien
ccagccgcattttagatgtgagatgcagagaag

SEQ ID NO: 529195 - DNA, 33 bp, Homo sapien
agatctggggctgtaacgtttcttgctgacact

SEQ ID NO: 529196 - DNA, 33 bp, Homo sapien
agatctggggctgtaatgtttcttgctgacact

SEQ ID NO: 529197 - DNA, 33 bp, Homo sapien
tgaatctaaactatgacattctgtatgttagaa

SEQ ID NO: 529198 - DNA, 33 bp, Homo sapien
tgaatctaaactatgatattctgtatgttagaa

SEQ ID NO: 529199 - DNA, 33 bp, Homo sapien
aaaactactgatgttaacctaagaacagtggaa

SEQ ID NO: 529200 - DNA, 33 bp, Homo sapien
aaaactactgatgttaccctaagaacagtggaa

SEQ ID NO: 529201 - DNA, 33 bp, Homo sapien
aaattgtaccttaaaaacagctgtgtgtgtgtg

SEQ ID NO: 529202 - DNA, 33 bp, Homo sapien
aaattgtaccttaaaatcagctgtgtgtgtgtg

SEQ ID NO: 529203 - DNA, 33 bp, Homo sapien
cctccaagcagttaacacccttccttgcattga

SEQ ID NO: 529204 - DNA, 33 bp, Homo sapien
cctccaagcagttaacgcccttccttgcattga

SEQ ID NO: 529205 - DNA, 33 bp, Homo sapien
gcttttactctcagaccgaccgtagaagcagac

SEQ ID NO: 529206 - DNA, 33 bp, Homo sapien
gcttttactctcagactgaccgtagaagcagac

SEQ ID NO: 529207 - DNA, 33 bp, Homo sapien
cccagatgccaggagaatcggttactgatggct

SEQ ID NO: 529208 - DNA, 33 bp, Homo sapien
cccagatgccaggagagtcggttactgatggct

SEQ ID NO: 529209 - DNA, 33 bp, Homo sapien
gcttttctcacagggaatatgggatatgtgttg

SEQ ID NO: 529210 - DNA, 33 bp, Homo sapien
gcttttctcacagggattatgggatatgtgttg

SEQ ID NO: 529211 - DNA, 33 bp, Homo sapien
taaagtctacattcaggctcaaatacctggaca

SEQ ID NO: 529212 - DNA, 33 bp, Homo sapien
taaagtctacattcagtctcaaatacctggaca

SEQ ID NO: 529213 - DNA, 33 bp, Homo sapien
agaggaattcggatccacctgatttaattcctt

SEQ ID NO: 529214 - DNA, 33 bp, Homo sapien
agaggaattcggatccgcctgatttaattcctt

SEQ ID NO: 529215 - DNA, 33 bp, Homo sapien
tctgtgaacatagaaagcttcataattttccag

SEQ ID NO: 529216 - DNA, 33 bp, Homo sapien
tctgtgaacatagaaatcttcataattttccag

SEQ ID NO: 529217 - DNA, 33 bp, Homo sapien
aaaagccccaagtccaagaagtttgcagtctca

SEQ ID NO: 529218 - DNA, 33 bp, Homo sapien
aaaagccccaagtccacgaagtttgcagtctca

SEQ ID NO: 529219 - DNA, 33 bp, Homo sapien
tcacccacacgtagatcagttttcgtaactggg

SEQ ID NO: 529220 - DNA, 33 bp, Homo sapien
tcacccacacgtagatgagttttcgtaactggg

SEQ ID NO: 529221 - DNA, 33 bp, Homo sapien
tgcctagaggagtagcaagaaatgatcctgagt

SEQ ID NO: 529222 - DNA, 33 bp, Homo sapien
tgcctagaggagtagcgagaaatgatcctgagt

SEQ ID NO: 529223 - DNA, 33 bp, Homo sapien
gatctttgttctacaactgtaaggaacagaatt

SEQ ID NO: 529224 - DNA, 33 bp, Homo sapien
gatctttgttctacaagtgtaaggaacagaatt

SEQ ID NO: 529225 - DNA, 33 bp, Homo sapien
gtggtggtttctgagaacactttcaacaccatg

SEQ ID NO: 529226 - DNA, 33 bp, Homo sapien
gtggtggtttctgagagcactttcaacaccatg

SEQ ID NO: 529227 - DNA, 33 bp, Homo sapien
ctgagctggtatctaaggtggaagacaaacccc

SEQ ID NO: 529228 - DNA, 33 bp, Homo sapien
ctgagctggtatctaatgtggaagacaaacccc

SEQ ID NO: 529229 - DNA, 33 bp, Homo sapien
tataggtcatgaagtacgcaattttacctgcaa

SEQ ID NO: 529230 - DNA, 33 bp, Homo sapien
tataggtcatgaagtaggcaattttacctgcaa

SEQ ID NO: 529231 - DNA, 33 bp, Homo sapien
ccctagatacttgaccacaaggtacaataaaac

SEQ ID NO: 529232 - DNA, 33 bp, Homo sapien
ccctagatacttgacctcaaggtacaataaaac

SEQ ID NO: 529233 - DNA, 33 bp, Homo sapien
cagcttttaatggtcaaaaatactggttttact

SEQ ID NO: 529234 - DNA, 33 bp, Homo sapien
cagcttttaatggtcagaaatactggttttact

SEQ ID NO: 529235 - DNA, 33 bp, Homo sapien
gtgttttctggtagcaccaaggataaagtatgc

SEQ ID NO: 529236 - DNA, 33 bp, Homo sapien
gtgttttctggtagcatcaaggataaagtatgc

SEQ ID NO: 529237 - DNA, 33 bp, Homo sapien
tgatggtttgggcttaagtggtgtcactgaaca

SEQ ID NO: 529238 - DNA, 33 bp, Homo sapien
tgatggtttgggcttacgtggtgtcactgaaca

SEQ ID NO: 529239 - DNA, 33 bp, Homo sapien
cctttggcatgcaaaacttatccaagttagagg

SEQ ID NO: 529240 - DNA, 33 bp, Homo sapien
cctttggcatgcaaaatttatccaagttagagg

SEQ ID NO: 529241 - DNA, 33 bp, Homo sapien
aatagttttctgttggcatgtgaagtaatccaa

SEQ ID NO: 529242 - DNA, 33 bp, Homo sapien
aatagttttctgttggtatgtgaagtaatccaa

SEQ ID NO: 529243 - DNA, 33 bp, Homo sapien
gaaaagggcaatcctacatatccatgatcctga

SEQ ID NO: 529244 - DNA, 33 bp, Homo sapien
gaaaagggcaatcctatatatccatgatcctga

SEQ ID NO: 529245 - DNA, 33 bp, Homo sapien
cagaatgacaacataacagcaaagaaacaacct

SEQ ID NO: 529246 - DNA, 33 bp, Homo sapien
cagaatgacaacataagagcaaagaaacaacct

SEQ ID NO: 529247 - DNA, 33 bp, Homo sapien
gtgagaatgagtaagaacctggcagaaagctca

SEQ ID NO: 529248 - DNA, 33 bp, Homo sapien
gtgagaatgagtaagaccctggcagaaagctca

SEQ ID NO: 529249 - DNA, 33 bp, Homo sapien
cgttacttctgtaaacccggagctgtggaagac

SEQ ID NO: 529250 - DNA, 33 bp, Homo sapien
cgttacttctgtaaactcggagctgtggaagac

SEQ ID NO: 529251 - DNA, 33 bp, Homo sapien
gatgcagcccagtacaatggattagctgggatt

SEQ ID NO: 529252 - DNA, 33 bp, Homo sapien
gatgcagcccagtacagtggattagctgggatt

SEQ ID NO: 529253 - DNA, 33 bp, Homo sapien
tgttaagtccataacactgtcagtagaattata

SEQ ID NO: 529254 - DNA, 33 bp, Homo sapien
tgttaagtccataacattgtcagtagaattata

SEQ ID NO: 529255 - DNA, 33 bp, Homo sapien
atccccatacgcattacgcagtcactccctttt

SEQ ID NO: 529256 - DNA, 33 bp, Homo sapien
atccccatacgcattatgcagtcactccctttt

SEQ ID NO: 529257 - DNA, 33 bp, Homo sapien
aaaataggcaaatccacggtgacaaagccaatt

SEQ ID NO: 529258 - DNA, 33 bp, Homo sapien
aaaataggcaaatccatggtgacaaagccaatt

SEQ ID NO: 529259 - DNA, 33 bp, Homo sapien
tactttccagattctccatccttaacgtgtgac

SEQ ID NO: 529260 - DNA, 33 bp, Homo sapien
tactttccagattctctatccttaacgtgtgac

SEQ ID NO: 529261 - DNA, 33 bp, Homo sapien
aacagaacagggtaccagcgaagtccaaggaag

SEQ ID NO: 529262 - DNA, 33 bp, Homo sapien
aacagaacagggtaccggcgaagtccaaggaag

SEQ ID NO: 529263 - DNA, 33 bp, Homo sapien
acaccattatggatcactcaaacaagaaaaatt

SEQ ID NO: 529264 - DNA, 33 bp, Homo sapien
acaccattatggatcattcaaacaagaaaaatt

SEQ ID NO: 529265 - DNA, 33 bp, Homo sapien
aagtttaatggatatcaccaaattgcttttcac

SEQ ID NO: 529266 - DNA, 33 bp, Homo sapien
aagtttaatggatatcgccaaattgcttttcac

SEQ ID NO: 529267 - DNA, 33 bp, Homo sapien
ttgttacttttaaaaacgaggctattagaaaat

SEQ ID NO: 529268 - DNA, 33 bp, Homo sapien
ttgttacttttaaaaatgaggctattagaaaat

SEQ ID NO: 529269 - DNA, 33 bp, Homo sapien
gttgtgtgctatgtgaaaaattttcatctttac

SEQ ID NO: 529270 - DNA, 33 bp, Homo sapien
gttgtgtgctatgtgagaaattttcatctttac

SEQ ID NO: 529271 - DNA, 33 bp, Homo sapien
tgtctctgtcctcttccaaattttacttcttct

SEQ ID NO: 529272 - DNA, 33 bp, Homo sapien
tgtctctgtcctcttcgaaattttacttcttct

SEQ ID NO: 529273 - DNA, 33 bp, Homo sapien
caggcatacagtagaaacagaagcacacaggac

SEQ ID NO: 529274 - DNA, 33 bp, Homo sapien
caggcatacagtagaagcagaagcacacaggac

SEQ ID NO: 529275 - DNA, 33 bp, Homo sapien
acagtctatcaaatcaatgacactaaatgagtc

SEQ ID NO: 529276 - DNA, 33 bp, Homo sapien
acagtctatcaaatcagtgacactaaatgagtc

SEQ ID NO: 529277 - DNA, 33 bp, Homo sapien
ttgtttttagaaccaacggcctgtactcaatgg

SEQ ID NO: 529278 - DNA, 33 bp, Homo sapien
ttgtttttagaaccaatggcctgtactcaatgg

SEQ ID NO: 529279 - DNA, 33 bp, Homo sapien
gcatttcatcttcttcaaactaaaaacctttaa

SEQ ID NO: 529280 - DNA, 33 bp, Homo sapien
gcatttcatcttcttcgaactaaaaacctttaa

SEQ ID NO: 529281 - DNA, 33 bp, Homo sapien
tgtctcatctgtcccaactgtccattgattctt

SEQ ID NO: 529282 - DNA, 33 bp, Homo sapien
tgtctcatctgtcccacctgtccattgattctt

SEQ ID NO: 529283 - DNA, 33 bp, Homo sapien
gcaatatcaagtgagaatccccctcaaagcctg

SEQ ID NO: 529284 - DNA, 33 bp, Homo sapien
gcaatatcaagtgagagtccccctcaaagcctg

SEQ ID NO: 529285 - DNA, 33 bp, Homo sapien
ctattgcctcatgttcaatgtcatcaaccaaaa

SEQ ID NO: 529286 - DNA, 33 bp, Homo sapien
ctattgcctcatgttcgatgtcatcaaccaaaa

SEQ ID NO: 529287 - DNA, 33 bp, Homo sapien
tctccatcccaggcaaagtaggctcatttgacg

SEQ ID NO: 529288 - DNA, 33 bp, Homo sapien
tctccatcccaggcaatgtaggctcatttgacg

SEQ ID NO: 529289 - DNA, 33 bp, Homo sapien
tgtaaaaatacaggaactatgaaaaagcaaaga

SEQ ID NO: 529290 - DNA, 33 bp, Homo sapien
tgtaaaaatacaggaattatgaaaaagcaaaga

SEQ ID NO: 529291 - DNA, 33 bp, Homo sapien
agttaaaatacgacacactttagtaccagttgt

SEQ ID NO: 529292 - DNA, 33 bp, Homo sapien
agttaaaatacgacacgctttagtaccagttgt

SEQ ID NO: 529293 - DNA, 33 bp, Homo sapien
acttgccatttgcccccaccacattcatgaact

SEQ ID NO: 529294 - DNA, 33 bp, Homo sapien
acttgccatttgccccgaccacattcatgaact

SEQ ID NO: 529295 - DNA, 33 bp, Homo sapien
cttcagccaatatgcaacagacctcaaaactgg

SEQ ID NO: 529296 - DNA, 33 bp, Homo sapien
cttcagccaatatgcaccagacctcaaaactgg

SEQ ID NO: 529297 - DNA, 33 bp, Homo sapien
tcattcacgcggccatcagtcttttcaaaattt

SEQ ID NO: 529298 - DNA, 33 bp, Homo sapien
tcattcacgcggccattagtcttttcaaaattt

SEQ ID NO: 529299 - DNA, 33 bp, Homo sapien
tggatattcttttttccctttggggcacagtca

SEQ ID NO: 529300 - DNA, 33 bp, Homo sapien
tggatattcttttttctctttggggcacagtca

SEQ ID NO: 529301 - DNA, 33 bp, Homo sapien
ctgtggtaatccatcaatagatattcaatgagc

SEQ ID NO: 529302 - DNA, 33 bp, Homo sapien
ctgtggtaatccatcagtagatattcaatgagc

SEQ ID NO: 529303 - DNA, 33 bp, Homo sapien
tgaaaaatgaagaaaacgctcatcaaaagaaga

SEQ ID NO: 529304 - DNA, 33 bp, Homo sapien
tgaaaaatgaagaaaatgctcatcaaaagaaga

SEQ ID NO: 529305 - DNA, 33 bp, Homo sapien
agattcagtttacaaacggaccccatgtcagac

SEQ ID NO: 529306 - DNA, 33 bp, Homo sapien
agattcagtttacaaatggaccccatgtcagac

SEQ ID NO: 529307 - DNA, 33 bp, Homo sapien
tttgaattagttggctcaatcatcaatagaagg

SEQ ID NO: 529308 - DNA, 33 bp, Homo sapien
tttgaattagttggcttaatcatcaatagaagg

SEQ ID NO: 529309 - DNA, 33 bp, Homo sapien
tgatgtgccacaaaagaacatgcaggtacaaga

SEQ ID NO: 529310 - DNA, 33 bp, Homo sapien
tgatgtgccacaaaaggacatgcaggtacaaga

SEQ ID NO: 529311 - DNA, 33 bp, Homo sapien
tttaatattcatttcaaacagacttcacctcca

SEQ ID NO: 529312 - DNA, 33 bp, Homo sapien
tttaatattcatttcagacagacttcacctcca

SEQ ID NO: 529313 - DNA, 33 bp, Homo sapien
tgagaccatagtgtcacagactaagctcacatg

SEQ ID NO: 529314 - DNA, 33 bp, Homo sapien
tgagaccatagtgtcatagactaagctcacatg

SEQ ID NO: 529315 - DNA, 33 bp, Homo sapien
tcgttgtgctgtcctacagatgagccacaaggc

SEQ ID NO: 529316 - DNA, 33 bp, Homo sapien
tcgttgtgctgtcctagagatgagccacaaggc

SEQ ID NO: 529317 - DNA, 33 bp, Homo sapien
tctgtaggcaatcaaaaaaatcataaatctaag

SEQ ID NO: 529318 - DNA, 33 bp, Homo sapien
tctgtaggcaatcaaacaaatcataaatctaag

SEQ ID NO: 529319 - DNA, 33 bp, Homo sapien
cccccactactcttgaacgctgggatgaatggg

SEQ ID NO: 529320 - DNA, 33 bp, Homo sapien
cccccactactcttgagcgctgggatgaatggg

SEQ ID NO: 529321 - DNA, 33 bp, Homo sapien
tttttcttacctctctaaagtaactactgcact

SEQ ID NO: 529322 - DNA, 33 bp, Homo sapien
tttttcttacctctctgaagtaactactgcact

SEQ ID NO: 529323 - DNA, 33 bp, Homo sapien
gccttgcacattgtcaatactatgctagtgtta

SEQ ID NO: 529324 - DNA, 33 bp, Homo sapien
gccttgcacattgtcagtactatgctagtgtta

SEQ ID NO: 529325 - DNA, 33 bp, Homo sapien
ctgtattttatccagcaaacctcatcccagacc

SEQ ID NO: 529326 - DNA, 33 bp, Homo sapien
ctgtattttatccagcgaacctcatcccagacc

SEQ ID NO: 529327 - DNA, 33 bp, Homo sapien
ggcccctgatgagggaacccttttggcagactc

SEQ ID NO: 529328 - DNA, 33 bp, Homo sapien
ggcccctgatgagggagcccttttggcagactc

SEQ ID NO: 529329 - DNA, 33 bp, Homo sapien
tttgctgtcagtccaaatatcttctttaaattc

SEQ ID NO: 529330 - DNA, 33 bp, Homo sapien
tttgctgtcagtccaagtatcttctttaaattc

SEQ ID NO: 529331 - DNA, 33 bp, Homo sapien
cagcctggtgctcttcccagaaccgccgcctgg

SEQ ID NO: 529332 - DNA, 33 bp, Homo sapien
cagcctggtgctcttctcagaaccgccgcctgg

SEQ ID NO: 529333 - DNA, 33 bp, Homo sapien
ccaatttaaactttacaacattcttgataccag

SEQ ID NO: 529334 - DNA, 33 bp, Homo sapien
ccaatttaaactttacgacattcttgataccag

SEQ ID NO: 529335 - DNA, 33 bp, Homo sapien
aaagagctaagatgctaacccaagtagtaacgc

SEQ ID NO: 529336 - DNA, 33 bp, Homo sapien
aaagagctaagatgctgacccaagtagtaacgc

SEQ ID NO: 529337 - DNA, 33 bp, Homo sapien
ctgtgtgaagttagcaagagaaagaggaccatt

SEQ ID NO: 529338 - DNA, 33 bp, Homo sapien
ctgtgtgaagttagcaggagaaagaggaccatt

SEQ ID NO: 529339 - DNA, 33 bp, Homo sapien
ctgtgggccttccttcacaatgtcaccaaatgg

SEQ ID NO: 529340 - DNA, 33 bp, Homo sapien
ctgtgggccttccttcgcaatgtcaccaaatgg

SEQ ID NO: 529341 - DNA, 33 bp, Homo sapien
gcattattacagaggcccccttcaatgacccag

SEQ ID NO: 529342 - DNA, 33 bp, Homo sapien
gcattattacagaggctcccttcaatgacccag

SEQ ID NO: 529343 - DNA, 33 bp, Homo sapien
gtgtctgacaccctgacaaaaccatttatattc

SEQ ID NO: 529344 - DNA, 33 bp, Homo sapien
gtgtctgacaccctgagaaaaccatttatattc

SEQ ID NO: 529345 - DNA, 33 bp, Homo sapien
gatttagtatgtggaacgtgaaactttttttcc

SEQ ID NO: 529346 - DNA, 33 bp, Homo sapien
gatttagtatgtggaatgtgaaactttttttcc

SEQ ID NO: 529347 - DNA, 33 bp, Homo sapien
gaaccctacagaaaaacgtaatagtgtccacta

SEQ ID NO: 529348 - DNA, 33 bp, Homo sapien
gaaccctacagaaaaatgtaatagtgtccacta

SEQ ID NO: 529349 - DNA, 33 bp, Homo sapien
gctgttttccccaggagacctaaaatgactgca

SEQ ID NO: 529350 - DNA, 33 bp, Homo sapien
gctgttttccccaggatacctaaaatgactgca

SEQ ID NO: 529351 - DNA, 33 bp, Homo sapien
tcaatcccacgagtccaatatcactcagtgggt

SEQ ID NO: 529352 - DNA, 33 bp, Homo sapien
tcaatcccacgagtcccatatcactcagtgggt

SEQ ID NO: 529353 - DNA, 33 bp, Homo sapien
aataacagtattcattaaaaccgatggcaaaat

SEQ ID NO: 529354 - DNA, 33 bp, Homo sapien
aataacagtattcattgaaaccgatggcaaaat

SEQ ID NO: 529355 - DNA, 33 bp, Homo sapien
tctaagggttcaaaatcagggtgtagcttttaa

SEQ ID NO: 529356 - DNA, 33 bp, Homo sapien
tctaagggttcaaaatgagggtgtagcttttaa

SEQ ID NO: 529357 - DNA, 33 bp, Homo sapien
tcatggtctgcagtaactgttttaaactgtttc

SEQ ID NO: 529358 - DNA, 33 bp, Homo sapien
tcatggtctgcagtaattgttttaaactgtttc

SEQ ID NO: 529359 - DNA, 33 bp, Homo sapien
gttgaagaacaacttacgggtatcatggtgtaa

SEQ ID NO: 529360 - DNA, 33 bp, Homo sapien
gttgaagaacaacttatgggtatcatggtgtaa

SEQ ID NO: 529361 - DNA, 33 bp, Homo sapien
agcatggggttgcttacgaactgcaaatatttt

SEQ ID NO: 529362 - DNA, 33 bp, Homo sapien
agcatggggttgcttatgaactgcaaatatttt

SEQ ID NO: 529363 - DNA, 33 bp, Homo sapien
taaggccaaagaagcacggagcatggggttgct

SEQ ID NO: 529364 - DNA, 33 bp, Homo sapien
taaggccaaagaagcatggagcatggggttgct

SEQ ID NO: 529365 - DNA, 33 bp, Homo sapien
ttccagttaaaatagacggcaccctttctgtgg

SEQ ID NO: 529366 - DNA, 33 bp, Homo sapien
ttccagttaaaatagatggcaccctttctgtgg

SEQ ID NO: 529367 - DNA, 33 bp, Homo sapien
ttcataagacttgtaccgagtggctactgtgtg

SEQ ID NO: 529368 - DNA, 33 bp, Homo sapien
ttcataagacttgtactgagtggctactgtgtg

SEQ ID NO: 529369 - DNA, 33 bp, Homo sapien
atctataccaacctacacaggtcaatttcatga

SEQ ID NO: 529370 - DNA, 33 bp, Homo sapien
atctataccaacctacgcaggtcaatttcatga

SEQ ID NO: 529371 - DNA, 33 bp, Homo sapien
tgctcggacagggacactaatttgcttcagtgc

SEQ ID NO: 529372 - DNA, 33 bp, Homo sapien
tgctcggacagggacattaatttgcttcagtgc

SEQ ID NO: 529373 - DNA, 33 bp, Homo sapien
tccattcagacaagaacaacataatgaccaaag

SEQ ID NO: 529374 - DNA, 33 bp, Homo sapien
tccattcagacaagaagaacataatgaccaaag

SEQ ID NO: 529375 - DNA, 33 bp, Homo sapien
taaaactggcttgacaaataaactcctttgcat

SEQ ID NO: 529376 - DNA, 33 bp, Homo sapien
taaaactggcttgacagataaactcctttgcat

SEQ ID NO: 529377 - DNA, 33 bp, Homo sapien
cagctttcatccttgaactcactttcaagcatt

SEQ ID NO: 529378 - DNA, 33 bp, Homo sapien
cagctttcatccttgagctcactttcaagcatt

SEQ ID NO: 529379 - DNA, 33 bp, Homo sapien
gccattagccagcattcaatcaaaagaccatgt

SEQ ID NO: 529380 - DNA, 33 bp, Homo sapien
gccattagccagcattgaatcaaaagaccatgt

SEQ ID NO: 529381 - DNA, 33 bp, Homo sapien
atttaaacaaaaataccatgacaacacaaagag

SEQ ID NO: 529382 - DNA, 33 bp, Homo sapien
atttaaacaaaaatactatgacaacacaaagag

SEQ ID NO: 529383 - DNA, 33 bp, Homo sapien
gctgaacctgctttacaactaagagctgagcat

SEQ ID NO: 529384 - DNA, 33 bp, Homo sapien
gctgaacctgctttacgactaagagctgagcat

SEQ ID NO: 529385 - DNA, 33 bp, Homo sapien
ccaagaccactcttgaaacatataaatcttctt

SEQ ID NO: 529386 - DNA, 33 bp, Homo sapien
ccaagaccactcttgagacatataaatcttctt

SEQ ID NO: 529387 - DNA, 33 bp, Homo sapien
acagctctataacaacaggaagaaatgctcaac

SEQ ID NO: 529388 - DNA, 33 bp, Homo sapien
acagctctataacaacgggaagaaatgctcaac

SEQ ID NO: 529389 - DNA, 33 bp, Homo sapien
ttttgagaataccaaacgatcctggaggttttt

SEQ ID NO: 529390 - DNA, 33 bp, Homo sapien
ttttgagaataccaaatgatcctggaggttttt

SEQ ID NO: 529391 - DNA, 33 bp, Homo sapien
ggacccctgtttgtaaacctgagaaacagaaag

SEQ ID NO: 529392 - DNA, 33 bp, Homo sapien
ggacccctgtttgtaaccctgagaaacagaaag

SEQ ID NO: 529393 - DNA, 33 bp, Homo sapien
gtatgaaacggagcataatacacaacagttagt

SEQ ID NO: 529394 - DNA, 33 bp, Homo sapien
gtatgaaacggagcatgatacacaacagttagt

SEQ ID NO: 529395 - DNA, 33 bp, Homo sapien
catctacgaaaaccacacacttgaaaccaacat

SEQ ID NO: 529396 - DNA, 33 bp, Homo sapien
catctacgaaaaccacgcacttgaaaccaacat

SEQ ID NO: 529397 - DNA, 33 bp, Homo sapien
cattcagaacgagaaccaagatgatgttgaatt

SEQ ID NO: 529398 - DNA, 33 bp, Homo sapien
cattcagaacgagaactaagatgatgttgaatt

SEQ ID NO: 529399 - DNA, 33 bp, Homo sapien
ctacggtcagttttcacgctaagcttttctatt

SEQ ID NO: 529400 - DNA, 33 bp, Homo sapien
ctacggtcagttttcaggctaagcttttctatt

SEQ ID NO: 529401 - DNA, 33 bp, Homo sapien
tttcatgttcaagatacgttgttttagtgcttt

SEQ ID NO: 529402 - DNA, 33 bp, Homo sapien
tttcatgttcaagatatgttgttttagtgcttt

SEQ ID NO: 529403 - DNA, 33 bp, Homo sapien
atacaaacttactgaaccatagaattatttttt

SEQ ID NO: 529404 - DNA, 33 bp, Homo sapien
atacaaacttactgaagcatagaattatttttt

SEQ ID NO: 529405 - DNA, 33 bp, Homo sapien
tgggctttagcatccactcatcctcatcaatcc

SEQ ID NO: 529406 - DNA, 33 bp, Homo sapien
tgggctttagcatccattcatcctcatcaatcc

SEQ ID NO: 529407 - DNA, 33 bp, Homo sapien
gtcagctgctataaccaagaccccaaaacaata

SEQ ID NO: 529408 - DNA, 33 bp, Homo sapien
gtcagctgctataaccgagaccccaaaacaata

SEQ ID NO: 529409 - DNA, 33 bp, Homo sapien
ctatattttattcaaaacaagctcctaactctt

SEQ ID NO: 529410 - DNA, 33 bp, Homo sapien
ctatattttattcaaatcaagctcctaactctt

SEQ ID NO: 529411 - DNA, 33 bp, Homo sapien
aatgctctttccaacacatggaactgttttctc

SEQ ID NO: 529412 - DNA, 33 bp, Homo sapien
aatgctctttccaacatatggaactgttttctc

SEQ ID NO: 529413 - DNA, 33 bp, Homo sapien
ctgcttggcacttcaacgataaagtgaattttt

SEQ ID NO: 529414 - DNA, 33 bp, Homo sapien
ctgcttggcacttcaatgataaagtgaattttt

SEQ ID NO: 529415 - DNA, 33 bp, Homo sapien
tgaatttttgaatgaccctgcaaaccaaatttt

SEQ ID NO: 529416 - DNA, 33 bp, Homo sapien
tgaatttttgaatgacgctgcaaaccaaatttt

SEQ ID NO: 529417 - DNA, 33 bp, Homo sapien
cctatcgagtgcaagacattatccggagggctg

SEQ ID NO: 529418 - DNA, 33 bp, Homo sapien
cctatcgagtgcaagatattatccggagggctg

SEQ ID NO: 529419 - DNA, 33 bp, Homo sapien
gtcagctcctccaaaaacagggactgatcttgt

SEQ ID NO: 529420 - DNA, 33 bp, Homo sapien
gtcagctcctccaaaagcagggactgatcttgt

SEQ ID NO: 529421 - DNA, 33 bp, Homo sapien
actgaggttgatcttagaattaatttgcctatt

SEQ ID NO: 529422 - DNA, 33 bp, Homo sapien
actgaggttgatcttataattaatttgcctatt

SEQ ID NO: 529423 - DNA, 33 bp, Homo sapien
tacgtgtggaacaaataaagaccttaagcacag

SEQ ID NO: 529424 - DNA, 33 bp, Homo sapien
tacgtgtggaacaaatgaagaccttaagcacag

SEQ ID NO: 529425 - DNA, 33 bp, Homo sapien
tggacaatcttaggaacatttgatacggttcag

SEQ ID NO: 529426 - DNA, 33 bp, Homo sapien
tggacaatcttaggaatatttgatacggttcag

SEQ ID NO: 529427 - DNA, 33 bp, Homo sapien
gccaatgagacatgaaaggaaacttgagggggg

SEQ ID NO: 529428 - DNA, 33 bp, Homo sapien
gccaatgagacatgaagggaaacttgagggggg

SEQ ID NO: 529429 - DNA, 33 bp, Homo sapien
gcctcatgtataaaacggagggaacttgactat

SEQ ID NO: 529430 - DNA, 33 bp, Homo sapien
gcctcatgtataaaactgagggaacttgactat

SEQ ID NO: 529431 - DNA, 33 bp, Homo sapien
tttttttggttggtaacacaaaccacgacttaa

SEQ ID NO: 529432 - DNA, 33 bp, Homo sapien
tttttttggttggtaatacaaaccacgacttaa

SEQ ID NO: 529433 - DNA, 33 bp, Homo sapien
gcatggtaataaatatgaacgcagtttgtgact

SEQ ID NO: 529434 - DNA, 33 bp, Homo sapien
gcatggtaataaatattaacgcagtttgtgact

SEQ ID NO: 529435 - DNA, 33 bp, Homo sapien
tctagctggcgagttgaaaaggcaagatcaaac

SEQ ID NO: 529436 - DNA, 33 bp, Homo sapien
tctagctggcgagttggaaaggcaagatcaaac

SEQ ID NO: 529437 - DNA, 33 bp, Homo sapien
catcactgtaaataaagccacatgaaaagcttt

SEQ ID NO: 529438 - DNA, 33 bp, Homo sapien
catcactgtaaataaatccacatgaaaagcttt

SEQ ID NO: 529439 - DNA, 33 bp, Homo sapien
gccagggctgggctgacaaatttttagggtaaa

SEQ ID NO: 529440 - DNA, 33 bp, Homo sapien
gccagggctgggctgagaaatttttagggtaaa

SEQ ID NO: 529441 - DNA, 33 bp, Homo sapien
ttccattacttcccatcatctccaagaaggtgg

SEQ ID NO: 529442 - DNA, 33 bp, Homo sapien
ttccattacttcccattatctccaagaaggtgg

SEQ ID NO: 529443 - DNA, 33 bp, Homo sapien
ccagggaagagggaatgatagggatacagaaga

SEQ ID NO: 529444 - DNA, 33 bp, Homo sapien
ccagggaagagggaattatagggatacagaaga

SEQ ID NO: 529445 - DNA, 33 bp, Homo sapien
tcttgcaggaggaaagcacctttttctgaatat

SEQ ID NO: 529446 - DNA, 33 bp, Homo sapien
tcttgcaggaggaaagtacctttttctgaatat

SEQ ID NO: 529447 - DNA, 33 bp, Homo sapien
tcctgagtaatggagcacagatgagtgttttgg

SEQ ID NO: 529448 - DNA, 33 bp, Homo sapien
tcctgagtaatggagcgcagatgagtgttttgg

SEQ ID NO: 529449 - DNA, 33 bp, Homo sapien
ctattcatcaaaataaatctgcaagcattccac

SEQ ID NO: 529450 - DNA, 33 bp, Homo sapien
ctattcatcaaaataagtctgcaagcattccac

SEQ ID NO: 529451 - DNA, 33 bp, Homo sapien
ctaggtaaatatccaaagctgtttccaaagata

SEQ ID NO: 529452 - DNA, 33 bp, Homo sapien
ctaggtaaatatccaaggctgtttccaaagata

SEQ ID NO: 529453 - DNA, 33 bp, Homo sapien
ttaagacaagaaaaaacggctgtattagtcaga

SEQ ID NO: 529454 - DNA, 33 bp, Homo sapien
ttaagacaagaaaaaagggctgtattagtcaga

SEQ ID NO: 529455 - DNA, 33 bp, Homo sapien
tgttgttgtgagctctcactggatatttgtcac

SEQ ID NO: 529456 - DNA, 33 bp, Homo sapien
tgttgttgtgagctcttactggatatttgtcac

SEQ ID NO: 529457 - DNA, 33 bp, Homo sapien
acttctgctgctaaggaaaccactgtgttcagt

SEQ ID NO: 529458 - DNA, 33 bp, Homo sapien
acttctgctgctaagggaaccactgtgttcagt

SEQ ID NO: 529459 - DNA, 33 bp, Homo sapien
tcaaaaggagaatcgactaatagttggcatttt

SEQ ID NO: 529460 - DNA, 33 bp, Homo sapien
tcaaaaggagaatcgattaatagttggcatttt

SEQ ID NO: 529461 - DNA, 33 bp, Homo sapien
tcttgaaatcaaatgcaatgcttactgctgaaa

SEQ ID NO: 529462 - DNA, 33 bp, Homo sapien
tcttgaaatcaaatgcgatgcttactgctgaaa

SEQ ID NO: 529463 - DNA, 33 bp, Homo sapien
attgtacatatttagagaaggtcaaagattatt

SEQ ID NO: 529464 - DNA, 33 bp, Homo sapien
attgtacatatttagataaggtcaaagattatt

SEQ ID NO: 529465 - DNA, 33 bp, Homo sapien
ccaagttatgcaggaacgacactggatcacctc

SEQ ID NO: 529466 - DNA, 33 bp, Homo sapien
ccaagttatgcaggaatgacactggatcacctc

SEQ ID NO: 529467 - DNA, 33 bp, Homo sapien
taccttcatactttttggtttcctggcttctat

SEQ ID NO: 529468 - DNA, 33 bp, Homo sapien
taccttcatacttttttgtttcctggcttctat

SEQ ID NO: 529469 - DNA, 33 bp, Homo sapien
taaagtctccacaagaagtttcatggggttttg

SEQ ID NO: 529470 - DNA, 33 bp, Homo sapien
taaagtctccacaagaggtttcatggggttttg

SEQ ID NO: 529471 - DNA, 33 bp, Homo sapien
gcatattctgtcagtcaagtttcaacaaaatta

SEQ ID NO: 529472 - DNA, 33 bp, Homo sapien
gcatattctgtcagtcgagtttcaacaaaatta

SEQ ID NO: 529473 - DNA, 33 bp, Homo sapien
gagtcccaaagcttgacaggcatgcagtttaca

SEQ ID NO: 529474 - DNA, 33 bp, Homo sapien
gagtcccaaagcttgataggcatgcagtttaca

SEQ ID NO: 529475 - DNA, 33 bp, Homo sapien
tctggaaagtatcccactgcattaagaaaatct

SEQ ID NO: 529476 - DNA, 33 bp, Homo sapien
tctggaaagtatcccagtgcattaagaaaatct

SEQ ID NO: 529477 - DNA, 33 bp, Homo sapien
atgcacataaacctctaaatagtatctggcaca

SEQ ID NO: 529478 - DNA, 33 bp, Homo sapien
atgcacataaacctctgaatagtatctggcaca

SEQ ID NO: 529479 - DNA, 33 bp, Homo sapien
tctcctgtaagaacaccgaggaatagacttaca

SEQ ID NO: 529480 - DNA, 33 bp, Homo sapien
tctcctgtaagaacactgaggaatagacttaca

SEQ ID NO: 529481 - DNA, 33 bp, Homo sapien
gagatggggtatataagaaagaaccatgtaaag

SEQ ID NO: 529482 - DNA, 33 bp, Homo sapien
gagatggggtatataataaagaaccatgtaaag

SEQ ID NO: 529483 - DNA, 33 bp, Homo sapien
ctataaaattaacatgaaaacaatttatcattg

SEQ ID NO: 529484 - DNA, 33 bp, Homo sapien
ctataaaattaacatggaaacaatttatcattg

SEQ ID NO: 529485 - DNA, 33 bp, Homo sapien
gtcataaaagctaaaaatatgtgttaatggggc

SEQ ID NO: 529486 - DNA, 33 bp, Homo sapien
gtcataaaagctaaaagtatgtgttaatggggc

SEQ ID NO: 529487 - DNA, 33 bp, Homo sapien
agaatgattgcttgacaatgactagttatcaga

SEQ ID NO: 529488 - DNA, 33 bp, Homo sapien
agaatgattgcttgacgatgactagttatcaga

SEQ ID NO: 529489 - DNA, 33 bp, Homo sapien
atggtgtcctgattaggatgataaatcttatgg

SEQ ID NO: 529490 - DNA, 33 bp, Homo sapien
atggtgtcctgattagtatgataaatcttatgg

SEQ ID NO: 529491 - DNA, 33 bp, Homo sapien
agtgctggggtctgggacagctctgctctgaga

SEQ ID NO: 529492 - DNA, 33 bp, Homo sapien
agtgctggggtctggggcagctctgctctgaga

SEQ ID NO: 529493 - DNA, 33 bp, Homo sapien
ctgctatggactacacacagagctggttggagc

SEQ ID NO: 529494 - DNA, 33 bp, Homo sapien
ctgctatggactacacgcagagctggttggagc

SEQ ID NO: 529495 - DNA, 33 bp, Homo sapien
aagaccacccagacacaatccagcggagaggga

SEQ ID NO: 529496 - DNA, 33 bp, Homo sapien
aagaccacccagacacgatccagcggagaggga

SEQ ID NO: 529497 - DNA, 33 bp, Homo sapien
aaagcaatgccagttaagctgctgccctaacaa

SEQ ID NO: 529498 - DNA, 33 bp, Homo sapien
aaagcaatgccagttacgctgctgccctaacaa

SEQ ID NO: 529499 - DNA, 33 bp, Homo sapien
caaagaattgagtccaactcgtctcagattcct

SEQ ID NO: 529500 - DNA, 33 bp, Homo sapien
caaagaattgagtccagctcgtctcagattcct

SEQ ID NO: 529501 - DNA, 33 bp, Homo sapien
tgtgctttttgaatcagagtttgtttttgtttt

SEQ ID NO: 529502 - DNA, 33 bp, Homo sapien
tgtgctttttgaatcatagtttgtttttgtttt

SEQ ID NO: 529503 - DNA, 33 bp, Homo sapien
agcaactgagtagcccaaaaaagccattgtaat

SEQ ID NO: 529504 - DNA, 33 bp, Homo sapien
agcaactgagtagcccgaaaaagccattgtaat

SEQ ID NO: 529505 - DNA, 33 bp, Homo sapien
aagagagtctcaacagcattcctgcaacaacaa

SEQ ID NO: 529506 - DNA, 33 bp, Homo sapien
aagagagtctcaacaggattcctgcaacaacaa

SEQ ID NO: 529507 - DNA, 33 bp, Homo sapien
agaacacagcagaaataagctccgtgactacat

SEQ ID NO: 529508 - DNA, 33 bp, Homo sapien
agaacacagcagaaattagctccgtgactacat

SEQ ID NO: 529509 - DNA, 33 bp, Homo sapien
tatttatgttactttacgtggcccctgggacat

SEQ ID NO: 529510 - DNA, 33 bp, Homo sapien
tatttatgttactttatgtggcccctgggacat

SEQ ID NO: 529511 - DNA, 33 bp, Homo sapien
gaaggttccagagcaacagcgagatttttcata

SEQ ID NO: 529512 - DNA, 33 bp, Homo sapien
gaaggttccagagcaatagcgagatttttcata

SEQ ID NO: 529513 - DNA, 33 bp, Homo sapien
tccaacaagctagagaaaaaacttcttccattc

SEQ ID NO: 529514 - DNA, 33 bp, Homo sapien
tccaacaagctagagataaaacttcttccattc

SEQ ID NO: 529515 - DNA, 33 bp, Homo sapien
ctgtgtggccagaaacaattaacacactctagc

SEQ ID NO: 529516 - DNA, 33 bp, Homo sapien
ctgtgtggccagaaaccattaacacactctagc

SEQ ID NO: 529517 - DNA, 33 bp, Homo sapien
agtccttaaggtgaacaatgtactcccaccagc

SEQ ID NO: 529518 - DNA, 33 bp, Homo sapien
agtccttaaggtgaacgatgtactcccaccagc

SEQ ID NO: 529519 - DNA, 33 bp, Homo sapien
gaagtatgaataactcccatttacaaaagtgta

SEQ ID NO: 529520 - DNA, 33 bp, Homo sapien
gaagtatgaataactcgcatttacaaaagtgta

SEQ ID NO: 529521 - DNA, 33 bp, Homo sapien
acaaggaatggtggagcctcagtccttgttttc

SEQ ID NO: 529522 - DNA, 33 bp, Homo sapien
acaaggaatggtggaggctcagtccttgttttc

SEQ ID NO: 529523 - DNA, 33 bp, Homo sapien
aatcacccctaaatcaacactggcttccccagg

SEQ ID NO: 529524 - DNA, 33 bp, Homo sapien
aatcacccctaaatcagcactggcttccccagg

SEQ ID NO: 529525 - DNA, 33 bp, Homo sapien
gctgggatgttcattacgtgaaaaagggacttt

SEQ ID NO: 529526 - DNA, 33 bp, Homo sapien
gctgggatgttcattatgtgaaaaagggacttt

SEQ ID NO: 529527 - DNA, 33 bp, Homo sapien
tgaaggtgccagttgagcacaggatgaccaccg

SEQ ID NO: 529528 - DNA, 33 bp, Homo sapien
tgaaggtgccagttgatcacaggatgaccaccg

SEQ ID NO: 529529 - DNA, 33 bp, Homo sapien
tctctccaactttcaaatgtgtttctctttgtc

SEQ ID NO: 529530 - DNA, 33 bp, Homo sapien
tctctccaactttcaactgtgtttctctttgtc

SEQ ID NO: 529531 - DNA, 33 bp, Homo sapien
gacagatacacatctaaatccatcagctgtggc

SEQ ID NO: 529532 - DNA, 33 bp, Homo sapien
gacagatacacatctagatccatcagctgtggc

SEQ ID NO: 529533 - DNA, 33 bp, Homo sapien
gtttttaaatgatcacaatacagtttgctgtaa

SEQ ID NO: 529534 - DNA, 33 bp, Homo sapien
gtttttaaatgatcacgatacagtttgctgtaa

SEQ ID NO: 529535 - DNA, 33 bp, Homo sapien
agcactatgaatctccaactgtcttagcttatc

SEQ ID NO: 529536 - DNA, 33 bp, Homo sapien
agcactatgaatctccgactgtcttagcttatc

SEQ ID NO: 529537 - DNA, 33 bp, Homo sapien
acaataaaacctataacgcacaaattgagttgt

SEQ ID NO: 529538 - DNA, 33 bp, Homo sapien
acaataaaacctataatgcacaaattgagttgt

SEQ ID NO: 529539 - DNA, 33 bp, Homo sapien
tagatgtccttttaaaatctgatctgcaaaaag

SEQ ID NO: 529540 - DNA, 33 bp, Homo sapien
tagatgtccttttaaagtctgatctgcaaaaag

SEQ ID NO: 529541 - DNA, 33 bp, Homo sapien
catggtatttcacaaaacataaaatataaaaga

SEQ ID NO: 529542 - DNA, 33 bp, Homo sapien
catggtatttcacaaagcataaaatataaaaga

SEQ ID NO: 529543 - DNA, 33 bp, Homo sapien
aaaaacttcccaacaacgaaactggttttgctg

SEQ ID NO: 529544 - DNA, 33 bp, Homo sapien
aaaaacttcccaacaatgaaactggttttgctg

SEQ ID NO: 529545 - DNA, 33 bp, Homo sapien
gtctgtcatgtcagaaagatcagtgatgacgtc

SEQ ID NO: 529546 - DNA, 33 bp, Homo sapien
gtctgtcatgtcagaaggatcagtgatgacgtc

SEQ ID NO: 529547 - DNA, 33 bp, Homo sapien
cctctccatttttaacacatcaatattttatct

SEQ ID NO: 529548 - DNA, 33 bp, Homo sapien
cctctccatttttaacgcatcaatattttatct

SEQ ID NO: 529549 - DNA, 33 bp, Homo sapien
agcaagaaaaggatagccaaatctcttgctccc

SEQ ID NO: 529550 - DNA, 33 bp, Homo sapien
agcaagaaaaggataggcaaatctcttgctccc

SEQ ID NO: 529551 - DNA, 33 bp, Homo sapien
cattttccaagtgggaagaaatttggcattagt

SEQ ID NO: 529552 - DNA, 33 bp, Homo sapien
cattttccaagtgggaggaaatttggcattagt

SEQ ID NO: 529553 - DNA, 33 bp, Homo sapien
agtaattggcctcaaaatatgtcctgccctttg

SEQ ID NO: 529554 - DNA, 33 bp, Homo sapien
agtaattggcctcaaagtatgtcctgccctttg

SEQ ID NO: 529555 - DNA, 33 bp, Homo sapien
tatgcactcttcaaaacacaaaaggtaaagtag

SEQ ID NO: 529556 - DNA, 33 bp, Homo sapien
tatgcactcttcaaaatacaaaaggtaaagtag

SEQ ID NO: 529557 - DNA, 33 bp, Homo sapien
tcaacaagcattaaacacctactacaaagcatc

SEQ ID NO: 529558 - DNA, 33 bp, Homo sapien
tcaacaagcattaaacgcctactacaaagcatc

SEQ ID NO: 529559 - DNA, 33 bp, Homo sapien
acagggaatccattatcagctttggcatggtga

SEQ ID NO: 529560 - DNA, 33 bp, Homo sapien
acagggaatccattattagctttggcatggtga

SEQ ID NO: 529561 - DNA, 33 bp, Homo sapien
gaaatatgtgaaaaaggccaggcacaatggctc

SEQ ID NO: 529562 - DNA, 33 bp, Homo sapien
gaaatatgtgaaaaagtccaggcacaatggctc

SEQ ID NO: 529563 - DNA, 33 bp, Homo sapien
gaaccagacttttaacaaataatcaaataagtg

SEQ ID NO: 529564 - DNA, 33 bp, Homo sapien
gaaccagacttttaacgaataatcaaataagtg

SEQ ID NO: 529565 - DNA, 33 bp, Homo sapien
tggttgctattaacagaaaagcaagctggaaag

SEQ ID NO: 529566 - DNA, 33 bp, Homo sapien
tggttgctattaacaggaaagcaagctggaaag

SEQ ID NO: 529567 - DNA, 33 bp, Homo sapien
gatctccctggtcctaaaatgaacctagcacta

SEQ ID NO: 529568 - DNA, 33 bp, Homo sapien
gatctccctggtcctacaatgaacctagcacta

SEQ ID NO: 529569 - DNA, 33 bp, Homo sapien
attcatgggcttagtacagcacaatttgtttat

SEQ ID NO: 529570 - DNA, 33 bp, Homo sapien
attcatgggcttagtatagcacaatttgtttat

SEQ ID NO: 529571 - DNA, 33 bp, Homo sapien
gaactgctcgctcccaaggtcaggatcttacgg

SEQ ID NO: 529572 - DNA, 33 bp, Homo sapien
gaactgctcgctcccatggtcaggatcttacgg

SEQ ID NO: 529573 - DNA, 33 bp, Homo sapien
gtatagagacagaaaaaggagcaactagattca

SEQ ID NO: 529574 - DNA, 33 bp, Homo sapien
gtatagagacagaaaacggagcaactagattca

SEQ ID NO: 529575 - DNA, 33 bp, Homo sapien
ttgtgttcaaataaagacctgggggaattacac

SEQ ID NO: 529576 - DNA, 33 bp, Homo sapien
ttgtgttcaaataaaggcctgggggaattacac

SEQ ID NO: 529577 - DNA, 33 bp, Homo sapien
tttcttggcctgcagacccctcgttttcttccc

SEQ ID NO: 529578 - DNA, 33 bp, Homo sapien
tttcttggcctgcagatccctcgttttcttccc

SEQ ID NO: 529579 - DNA, 33 bp, Homo sapien
gttcacgccatttccgaaaacgtgaccctaaat

SEQ ID NO: 529580 - DNA, 33 bp, Homo sapien
gttcacgccatttccggaaacgtgaccctaaat

SEQ ID NO: 529581 - DNA, 33 bp, Homo sapien
agcagaagaaactgtacgttttgagggaaaatc

SEQ ID NO: 529582 - DNA, 33 bp, Homo sapien
agcagaagaaactgtatgttttgagggaaaatc

SEQ ID NO: 529583 - DNA, 33 bp, Homo sapien
tgaaaaattgatgtcacacccatagagctggat

SEQ ID NO: 529584 - DNA, 33 bp, Homo sapien
tgaaaaattgatgtcatacccatagagctggat

SEQ ID NO: 529585 - DNA, 33 bp, Homo sapien
ctgcagggcgcgccgccgatgggtctcagactt

SEQ ID NO: 529586 - DNA, 33 bp, Homo sapien
ctgcagggcgcgccgctgatgggtctcagactt

SEQ ID NO: 529587 - DNA, 33 bp, Homo sapien
ggaaagtgcaaagacaatataagggcccatttt

SEQ ID NO: 529588 - DNA, 33 bp, Homo sapien
ggaaagtgcaaagacagtataagggcccatttt

SEQ ID NO: 529589 - DNA, 33 bp, Homo sapien
gaacaatggagccatcaaaaaggccttctccca

SEQ ID NO: 529590 - DNA, 33 bp, Homo sapien
gaacaatggagccatcgaaaaggccttctccca

SEQ ID NO: 529591 - DNA, 33 bp, Homo sapien
ccttccagataagctaaatcaaacccctaattt

SEQ ID NO: 529592 - DNA, 33 bp, Homo sapien
ccttccagataagctacatcaaacccctaattt

SEQ ID NO: 529593 - DNA, 33 bp, Homo sapien
ttttttttggatgacacgataatcagacagcct

SEQ ID NO: 529594 - DNA, 33 bp, Homo sapien
ttttttttggatgacatgataatcagacagcct

SEQ ID NO: 529595 - DNA, 33 bp, Homo sapien
ataaataaacaagcaactctaatactacataat

SEQ ID NO: 529596 - DNA, 33 bp, Homo sapien
ataaataaacaagcaattctaatactacataat

SEQ ID NO: 529597 - DNA, 33 bp, Homo sapien
cgacattgtagccctacgttttcaatgcattgc

SEQ ID NO: 529598 - DNA, 33 bp, Homo sapien
cgacattgtagccctatgttttcaatgcattgc

SEQ ID NO: 529599 - DNA, 33 bp, Homo sapien
ccttcccaaaattgcccgactgctgtcacttga

SEQ ID NO: 529600 - DNA, 33 bp, Homo sapien
ccttcccaaaattgcctgactgctgtcacttga

SEQ ID NO: 529601 - DNA, 33 bp, Homo sapien
ttaatcaaggagataaggttgtgcatgcctaag

SEQ ID NO: 529602 - DNA, 33 bp, Homo sapien
ttaatcaaggagataatgttgtgcatgcctaag

SEQ ID NO: 529603 - DNA, 33 bp, Homo sapien
tcactctagcaacaaaaggctctctaagaacta

SEQ ID NO: 529604 - DNA, 33 bp, Homo sapien
tcactctagcaacaaagggctctctaagaacta

SEQ ID NO: 529605 - DNA, 33 bp, Homo sapien
cttctcacatttgtagcaatttgctcatgatct

SEQ ID NO: 529606 - DNA, 33 bp, Homo sapien
cttctcacatttgtagtaatttgctcatgatct

SEQ ID NO: 529607 - DNA, 33 bp, Homo sapien
aaaactggccagaaagccacgccgatattggct

SEQ ID NO: 529608 - DNA, 33 bp, Homo sapien
aaaactggccagaaaggcacgccgatattggct

SEQ ID NO: 529609 - DNA, 33 bp, Homo sapien
tagatggtaaagtcgtgaagttaaatgagatca

SEQ ID NO: 529610 - DNA, 33 bp, Homo sapien
tagatggtaaagtcgttaagttaaatgagatca

SEQ ID NO: 529611 - DNA, 33 bp, Homo sapien
tcttgaatttacagtgaagatgttttatactga

SEQ ID NO: 529612 - DNA, 33 bp, Homo sapien
tcttgaatttacagtgcagatgttttatactga

SEQ ID NO: 529613 - DNA, 33 bp, Homo sapien
tcccttagggcaagaaactttccaatccagttt

SEQ ID NO: 529614 - DNA, 33 bp, Homo sapien
tcccttagggcaagaagctttccaatccagttt

SEQ ID NO: 529615 - DNA, 33 bp, Homo sapien
aacattgttacagatagggtttggattcgtatc

SEQ ID NO: 529616 - DNA, 33 bp, Homo sapien
aacattgttacagatatggtttggattcgtatc

SEQ ID NO: 529617 - DNA, 33 bp, Homo sapien
tctacaaatcaatcacacaggtatcattctagg

SEQ ID NO: 529618 - DNA, 33 bp, Homo sapien
tctacaaatcaatcacgcaggtatcattctagg

SEQ ID NO: 529619 - DNA, 33 bp, Homo sapien
ggttatcaaggcatgactactttcaccacactt

SEQ ID NO: 529620 - DNA, 33 bp, Homo sapien
ggttatcaaggcatgattactttcaccacactt

SEQ ID NO: 529621 - DNA, 33 bp, Homo sapien
ttaaagcagtgagctccgaacccataaaattac

SEQ ID NO: 529622 - DNA, 33 bp, Homo sapien
ttaaagcagtgagctctgaacccataaaattac

SEQ ID NO: 529623 - DNA, 33 bp, Homo sapien
ttgctatagtttactacctttctgtgaacttag

SEQ ID NO: 529624 - DNA, 33 bp, Homo sapien
ttgctatagtttactagctttctgtgaacttag

SEQ ID NO: 529625 - DNA, 33 bp, Homo sapien
atctccctcattttcccacaattcatctttcat

SEQ ID NO: 529626 - DNA, 33 bp, Homo sapien
atctccctcattttccgacaattcatctttcat

SEQ ID NO: 529627 - DNA, 33 bp, Homo sapien
aacaacattgacccaccatgagtaaaagcattt

SEQ ID NO: 529628 - DNA, 33 bp, Homo sapien
aacaacattgacccactatgagtaaaagcattt

SEQ ID NO: 529629 - DNA, 33 bp, Homo sapien
aacatgtgacaaaataaggatagagatagggga

SEQ ID NO: 529630 - DNA, 33 bp, Homo sapien
aacatgtgacaaaatagggatagagatagggga

SEQ ID NO: 529631 - DNA, 33 bp, Homo sapien
aaggtttattataagcaaacaagagtctctaaa

SEQ ID NO: 529632 - DNA, 33 bp, Homo sapien
aaggtttattataagcgaacaagagtctctaaa

SEQ ID NO: 529633 - DNA, 33 bp, Homo sapien
tgtttgataggtacacaagactcctttttatga

SEQ ID NO: 529634 - DNA, 33 bp, Homo sapien
tgtttgataggtacacgagactcctttttatga

SEQ ID NO: 529635 - DNA, 33 bp, Homo sapien
atgttaatgtgtaagcgctaaaacatagtttat

SEQ ID NO: 529636 - DNA, 33 bp, Homo sapien
atgttaatgtgtaagctctaaaacatagtttat

SEQ ID NO: 529637 - DNA, 33 bp, Homo sapien
tggaaatcatattgagacactaccaagatgggc

SEQ ID NO: 529638 - DNA, 33 bp, Homo sapien
tggaaatcatattgagtcactaccaagatgggc

SEQ ID NO: 529639 - DNA, 33 bp, Homo sapien
ttgtttgtttttaagagctctccaaaatctaga

SEQ ID NO: 529640 - DNA, 33 bp, Homo sapien
ttgtttgtttttaagatctctccaaaatctaga

SEQ ID NO: 529641 - DNA, 33 bp, Homo sapien
atctctaagtataagcaccttattgacaatctc

SEQ ID NO: 529642 - DNA, 33 bp, Homo sapien
atctctaagtataagcgccttattgacaatctc

SEQ ID NO: 529643 - DNA, 33 bp, Homo sapien
ctgtgcacaacctgccactttaaaaacacatat

SEQ ID NO: 529644 - DNA, 33 bp, Homo sapien
ctgtgcacaacctgcccctttaaaaacacatat

SEQ ID NO: 529645 - DNA, 33 bp, Homo sapien
ttagtcttctatatcaaccagaaagaggtcctt

SEQ ID NO: 529646 - DNA, 33 bp, Homo sapien
ttagtcttctatatcatccagaaagaggtcctt

SEQ ID NO: 529647 - DNA, 33 bp, Homo sapien
taaccctgcagttacacctttgccaggagctgg

SEQ ID NO: 529648 - DNA, 33 bp, Homo sapien
taaccctgcagttacatctttgccaggagctgg

SEQ ID NO: 529649 - DNA, 33 bp, Homo sapien
tcttgaatacaaaatacgttttatcccagagag

SEQ ID NO: 529650 - DNA, 33 bp, Homo sapien
tcttgaatacaaaatatgttttatcccagagag

SEQ ID NO: 529651 - DNA, 33 bp, Homo sapien
ggcaatttgtctgatacgtttttacttagcctg

SEQ ID NO: 529652 - DNA, 33 bp, Homo sapien
ggcaatttgtctgatatgtttttacttagcctg

SEQ ID NO: 529653 - DNA, 33 bp, Homo sapien
taaagacatgaaaagccaggagaatggtcagtg

SEQ ID NO: 529654 - DNA, 33 bp, Homo sapien
taaagacatgaaaagctaggagaatggtcagtg

SEQ ID NO: 529655 - DNA, 33 bp, Homo sapien
aggctgtctacctcaaactagagccttggttaa

SEQ ID NO: 529656 - DNA, 33 bp, Homo sapien
aggctgtctacctcaatctagagccttggttaa

SEQ ID NO: 529657 - DNA, 33 bp, Homo sapien
tgctccttataattgcaagaacttactttccaa

SEQ ID NO: 529658 - DNA, 33 bp, Homo sapien
tgctccttataattgccagaacttactttccaa

SEQ ID NO: 529659 - DNA, 33 bp, Homo sapien
accaccccacttcacaacagacccaggcagtca

SEQ ID NO: 529660 - DNA, 33 bp, Homo sapien
accaccccacttcacaccagacccaggcagtca

SEQ ID NO: 529661 - DNA, 33 bp, Homo sapien
ctccccagctgtctacaagggaaccaagagcac

SEQ ID NO: 529662 - DNA, 33 bp, Homo sapien
ctccccagctgtctactagggaaccaagagcac

SEQ ID NO: 529663 - DNA, 33 bp, Homo sapien
caagtcctctattcaccggctcgattaccggcc

SEQ ID NO: 529664 - DNA, 33 bp, Homo sapien
caagtcctctattcactggctcgattaccggcc

SEQ ID NO: 529665 - DNA, 33 bp, Homo sapien
gtatcttgacacttaggattccctttgaatttg

SEQ ID NO: 529666 - DNA, 33 bp, Homo sapien
gtatcttgacacttagtattccctttgaatttg

SEQ ID NO: 529667 - DNA, 33 bp, Homo sapien
gcagcttgagtcattcactttcagctcaatgtt

SEQ ID NO: 529668 - DNA, 33 bp, Homo sapien
gcagcttgagtcattcgctttcagctcaatgtt

SEQ ID NO: 529669 - DNA, 33 bp, Homo sapien
attattatctttatggaaactcattcatctaat

SEQ ID NO: 529670 - DNA, 33 bp, Homo sapien
attattatctttatgggaactcattcatctaat

SEQ ID NO: 529671 - DNA, 33 bp, Homo sapien
caatggaaacgaagcaagtgctaccacctgtag

SEQ ID NO: 529672 - DNA, 33 bp, Homo sapien
caatggaaacgaagcaggtgctaccacctgtag

SEQ ID NO: 529673 - DNA, 33 bp, Homo sapien
gctatgagaattagataagaccgtattaaagtg

SEQ ID NO: 529674 - DNA, 33 bp, Homo sapien
gctatgagaattagatgagaccgtattaaagtg

SEQ ID NO: 529675 - DNA, 33 bp, Homo sapien
tctaaagaagattctacggttgctatataacag

SEQ ID NO: 529676 - DNA, 33 bp, Homo sapien
tctaaagaagattctatggttgctatataacag

SEQ ID NO: 529677 - DNA, 33 bp, Homo sapien
agataaagtgttaagtaaattgtgtctgaaaac

SEQ ID NO: 529678 - DNA, 33 bp, Homo sapien
agataaagtgttaagtcaattgtgtctgaaaac

SEQ ID NO: 529679 - DNA, 33 bp, Homo sapien
tgggaattaaaatgccggcttccaagataaagt

SEQ ID NO: 529680 - DNA, 33 bp, Homo sapien
tgggaattaaaatgcctgcttccaagataaagt

SEQ ID NO: 529681 - DNA, 33 bp, Homo sapien
cctgggaaccaaaaccaacccagttgagatcca

SEQ ID NO: 529682 - DNA, 33 bp, Homo sapien
cctgggaaccaaaaccgacccagttgagatcca

SEQ ID NO: 529683 - DNA, 33 bp, Homo sapien
ccatgaatttcaatagaatcagctttggtttca

SEQ ID NO: 529684 - DNA, 33 bp, Homo sapien
ccatgaatttcaatagcatcagctttggtttca

SEQ ID NO: 529685 - DNA, 33 bp, Homo sapien
taaagttgtgattacacgtgaaaaagtctgacc

SEQ ID NO: 529686 - DNA, 33 bp, Homo sapien
taaagttgtgattacatgtgaaaaagtctgacc

SEQ ID NO: 529687 - DNA, 33 bp, Homo sapien
cattgatgtcctatcaatcagacagtgcattta

SEQ ID NO: 529688 - DNA, 33 bp, Homo sapien
cattgatgtcctatcactcagacagtgcattta

SEQ ID NO: 529689 - DNA, 33 bp, Homo sapien
aatactgtctggagggcaaatagacgccatatc

SEQ ID NO: 529690 - DNA, 33 bp, Homo sapien
aatactgtctggagggtaaatagacgccatatc

SEQ ID NO: 529691 - DNA, 33 bp, Homo sapien
cttgcctcctggagtcacctatgtggcaattga

SEQ ID NO: 529692 - DNA, 33 bp, Homo sapien
cttgcctcctggagtcgcctatgtggcaattga

SEQ ID NO: 529693 - DNA, 33 bp, Homo sapien
gcatacaagcacatggaacaaatagatactgca

SEQ ID NO: 529694 - DNA, 33 bp, Homo sapien
gcatacaagcacatgggacaaatagatactgca

SEQ ID NO: 529695 - DNA, 33 bp, Homo sapien
aaatttgcaaggtttacggagcttcaagttcaa

SEQ ID NO: 529696 - DNA, 33 bp, Homo sapien
aaatttgcaaggtttatggagcttcaagttcaa

SEQ ID NO: 529697 - DNA, 33 bp, Homo sapien
ccattgcagggaaacaaagggactgccaaattg

SEQ ID NO: 529698 - DNA, 33 bp, Homo sapien
ccattgcagggaaacacagggactgccaaattg

SEQ ID NO: 529699 - DNA, 33 bp, Homo sapien
aggactggcttgttaaaatttctctaccaggag

SEQ ID NO: 529700 - DNA, 33 bp, Homo sapien
aggactggcttgttaacatttctctaccaggag

SEQ ID NO: 529701 - DNA, 33 bp, Homo sapien
gtaggtaacaaaatcactcctggcaatgtgttg

SEQ ID NO: 529702 - DNA, 33 bp, Homo sapien
gtaggtaacaaaatcattcctggcaatgtgttg

SEQ ID NO: 529703 - DNA, 33 bp, Homo sapien
gaagggtcagcagttacggagtaaaaatacaaa

SEQ ID NO: 529704 - DNA, 33 bp, Homo sapien
gaagggtcagcagttatggagtaaaaatacaaa

SEQ ID NO: 529705 - DNA, 33 bp, Homo sapien
tcttgattgtctcctaccaacttccacctattt

SEQ ID NO: 529706 - DNA, 33 bp, Homo sapien
tcttgattgtctcctatcaacttccacctattt

SEQ ID NO: 529707 - DNA, 33 bp, Homo sapien
ggccctttaatacttacggaatctgggatgctc

SEQ ID NO: 529708 - DNA, 33 bp, Homo sapien
ggccctttaatacttatggaatctgggatgctc

SEQ ID NO: 529709 - DNA, 33 bp, Homo sapien
caggatccattgcatgcatctcttagtcctttt

SEQ ID NO: 529710 - DNA, 33 bp, Homo sapien
caggatccattgcatgtatctcttagtcctttt

SEQ ID NO: 529711 - DNA, 33 bp, Homo sapien
cagcaaccagtggacacatcctgaaactcatac

SEQ ID NO: 529712 - DNA, 33 bp, Homo sapien
cagcaaccagtggacatatcctgaaactcatac

SEQ ID NO: 529713 - DNA, 33 bp, Homo sapien
acaaatgtcctttttccaacctacaacgactct

SEQ ID NO: 529714 - DNA, 33 bp, Homo sapien
acaaatgtcctttttctaacctacaacgactct

SEQ ID NO: 529715 - DNA, 33 bp, Homo sapien
tatggtatgagtatggaatcaagaaatggattc

SEQ ID NO: 529716 - DNA, 33 bp, Homo sapien
tatggtatgagtatggtatcaagaaatggattc

SEQ ID NO: 529717 - DNA, 33 bp, Homo sapien
ttaataataatcataaacacaacaataaacaca

SEQ ID NO: 529718 - DNA, 33 bp, Homo sapien
ttaataataatcataaccacaacaataaacaca

SEQ ID NO: 529719 - DNA, 33 bp, Homo sapien
agcagttgaatgttgacactaagtccagacctc

SEQ ID NO: 529720 - DNA, 33 bp, Homo sapien
agcagttgaatgttgatactaagtccagacctc

SEQ ID NO: 529721 - DNA, 33 bp, Homo sapien
aagggttaacataggcaattctgtctacttgat

SEQ ID NO: 529722 - DNA, 33 bp, Homo sapien
aagggttaacataggctattctgtctacttgat

SEQ ID NO: 529723 - DNA, 33 bp, Homo sapien
tgctaaacttcctcacgcttaagtccagttctc

SEQ ID NO: 529724 - DNA, 33 bp, Homo sapien
tgctaaacttcctcactcttaagtccagttctc

SEQ ID NO: 529725 - DNA, 33 bp, Homo sapien
agcacatctaatttgcgctctagtctaatgctt

SEQ ID NO: 529726 - DNA, 33 bp, Homo sapien
agcacatctaatttgctctctagtctaatgctt

SEQ ID NO: 529727 - DNA, 33 bp, Homo sapien
cttcctaattgtcagaaaactgggtgcacctat

SEQ ID NO: 529728 - DNA, 33 bp, Homo sapien
cttcctaattgtcagagaactgggtgcacctat

SEQ ID NO: 529729 - DNA, 33 bp, Homo sapien
gataggcccgaaagacactcacaaataattttc

SEQ ID NO: 529730 - DNA, 33 bp, Homo sapien
gataggcccgaaagactctcacaaataattttc

SEQ ID NO: 529731 - DNA, 33 bp, Homo sapien
aggatccctagtgtagaagagaaaaggttacaa

SEQ ID NO: 529732 - DNA, 33 bp, Homo sapien
aggatccctagtgtaggagagaaaaggttacaa

SEQ ID NO: 529733 - DNA, 33 bp, Homo sapien
aaaggagatagtggccagattgtatagaacgtt

SEQ ID NO: 529734 - DNA, 33 bp, Homo sapien
aaaggagatagtggcccgattgtatagaacgtt

SEQ ID NO: 529735 - DNA, 33 bp, Homo sapien
aatatatatgatggcacgtagtaagttgccaaa

SEQ ID NO: 529736 - DNA, 33 bp, Homo sapien
aatatatatgatggcatgtagtaagttgccaaa

SEQ ID NO: 529737 - DNA, 33 bp, Homo sapien
aatttaatgaagataactaatttccttaaggta

SEQ ID NO: 529738 - DNA, 33 bp, Homo sapien
aatttaatgaagataagtaatttccttaaggta

SEQ ID NO: 529739 - DNA, 33 bp, Homo sapien
atgtgatattctcctaaatcactgagctattgg

SEQ ID NO: 529740 - DNA, 33 bp, Homo sapien
atgtgatattctcctacatcactgagctattgg

SEQ ID NO: 529741 - DNA, 33 bp, Homo sapien
tggagattctgtgcataagaataccagccaaga

SEQ ID NO: 529742 - DNA, 33 bp, Homo sapien
tggagattctgtgcatgagaataccagccaaga

SEQ ID NO: 529743 - DNA, 33 bp, Homo sapien
gaacaggtctgttcacacttgtttctggttgat

SEQ ID NO: 529744 - DNA, 33 bp, Homo sapien
gaacaggtctgttcacgcttgtttctggttgat

SEQ ID NO: 529745 - DNA, 33 bp, Homo sapien
gcccagaactgatgtacctagggttggcattag

SEQ ID NO: 529746 - DNA, 33 bp, Homo sapien
gcccagaactgatgtatctagggttggcattag

SEQ ID NO: 529747 - DNA, 33 bp, Homo sapien
ccatatgcagatgatcaatatgacttcatcact

SEQ ID NO: 529748 - DNA, 33 bp, Homo sapien
ccatatgcagatgatcgatatgacttcatcact

SEQ ID NO: 529749 - DNA, 33 bp, Homo sapien
tgagattatggcagtacattgaccttcctaatg

SEQ ID NO: 529750 - DNA, 33 bp, Homo sapien
tgagattatggcagtatattgaccttcctaatg

SEQ ID NO: 529751 - DNA, 33 bp, Homo sapien
taaggcccatgagattcaactaatttagaattc

SEQ ID NO: 529752 - DNA, 33 bp, Homo sapien
taaggcccatgagatttaactaatttagaattc

SEQ ID NO: 529753 - DNA, 33 bp, Homo sapien
cttgattctttgcaaacgaaacaagcctgcata

SEQ ID NO: 529754 - DNA, 33 bp, Homo sapien
cttgattctttgcaaatgaaacaagcctgcata

SEQ ID NO: 529755 - DNA, 33 bp, Homo sapien
tccccaccaactctgaacttgaatattctgcat

SEQ ID NO: 529756 - DNA, 33 bp, Homo sapien
tccccaccaactctgatcttgaatattctgcat

SEQ ID NO: 529757 - DNA, 33 bp, Homo sapien
tctttggcaaggtaaacggggagctgcttatac

SEQ ID NO: 529758 - DNA, 33 bp, Homo sapien
tctttggcaaggtaaatggggagctgcttatac

SEQ ID NO: 529759 - DNA, 33 bp, Homo sapien
caagcctgcattaacccacttcaaaggagtctg

SEQ ID NO: 529760 - DNA, 33 bp, Homo sapien
caagcctgcattaacctacttcaaaggagtctg

SEQ ID NO: 529761 - DNA, 33 bp, Homo sapien
ctcatactttggttgaaatgacagatattaaac

SEQ ID NO: 529762 - DNA, 33 bp, Homo sapien
ctcatactttggttgagatgacagatattaaac

SEQ ID NO: 529763 - DNA, 33 bp, Homo sapien
acccctgctctaacacaccagatagagtttttt

SEQ ID NO: 529764 - DNA, 33 bp, Homo sapien
acccctgctctaacacgccagatagagtttttt

SEQ ID NO: 529765 - DNA, 33 bp, Homo sapien
tttaagtgtgtaaagacggaataaaagactcca

SEQ ID NO: 529766 - DNA, 33 bp, Homo sapien
tttaagtgtgtaaagatggaataaaagactcca

SEQ ID NO: 529767 - DNA, 33 bp, Homo sapien
gctggttacgcttgcaactctcagcaagaaaat

SEQ ID NO: 529768 - DNA, 33 bp, Homo sapien
gctggttacgcttgcagctctcagcaagaaaat

SEQ ID NO: 529769 - DNA, 33 bp, Homo sapien
cacactagatgcttccagaggaattctgtaacc

SEQ ID NO: 529770 - DNA, 33 bp, Homo sapien
cacactagatgcttcctgaggaattctgtaacc

SEQ ID NO: 529771 - DNA, 33 bp, Homo sapien
atgtttatttcagccaacttctccttcctaggt

SEQ ID NO: 529772 - DNA, 33 bp, Homo sapien
atgtttatttcagccatcttctccttcctaggt

SEQ ID NO: 529773 - DNA, 33 bp, Homo sapien
cacattctagtgtgtcaaagatgtgtgatcaca

SEQ ID NO: 529774 - DNA, 33 bp, Homo sapien
cacattctagtgtgtctaagatgtgtgatcaca

SEQ ID NO: 529775 - DNA, 33 bp, Homo sapien
ggattttctttcgttacagcactgcagcaattt

SEQ ID NO: 529776 - DNA, 33 bp, Homo sapien
ggattttctttcgttatagcactgcagcaattt

SEQ ID NO: 529777 - DNA, 33 bp, Homo sapien
tcagttaaggatacaacttcccgttttcagtta

SEQ ID NO: 529778 - DNA, 33 bp, Homo sapien
tcagttaaggatacaatttcccgttttcagtta

SEQ ID NO: 529779 - DNA, 33 bp, Homo sapien
aaaagggttgagctagccacattctaagctccc

SEQ ID NO: 529780 - DNA, 33 bp, Homo sapien
aaaagggttgagctagtcacattctaagctccc

SEQ ID NO: 529781 - DNA, 33 bp, Homo sapien
ctgagctcctggaatacagaataccaggttatg

SEQ ID NO: 529782 - DNA, 33 bp, Homo sapien
ctgagctcctggaatagagaataccaggttatg

SEQ ID NO: 529783 - DNA, 33 bp, Homo sapien
aatctcaaagtccagaaatttattggtctcctt

SEQ ID NO: 529784 - DNA, 33 bp, Homo sapien
aatctcaaagtccagatatttattggtctcctt

SEQ ID NO: 529785 - DNA, 33 bp, Homo sapien
cacctgaggtccccaccgcttttagcccagaac

SEQ ID NO: 529786 - DNA, 33 bp, Homo sapien
cacctgaggtccccactgcttttagcccagaac

SEQ ID NO: 529787 - DNA, 33 bp, Homo sapien
agcagagtgacatgagacctggtattcccaaca

SEQ ID NO: 529788 - DNA, 33 bp, Homo sapien
agcagagtgacatgaggcctggtattcccaaca

SEQ ID NO: 529789 - DNA, 33 bp, Homo sapien
tttattatagttgccacgtattcttgctgcatg

SEQ ID NO: 529790 - DNA, 33 bp, Homo sapien
tttattatagttgccatgtattcttgctgcatg

SEQ ID NO: 529791 - DNA, 33 bp, Homo sapien
tgtgacaagagcattaccaattgcatagctggt

SEQ ID NO: 529792 - DNA, 33 bp, Homo sapien
tgtgacaagagcattagcaattgcatagctggt

SEQ ID NO: 529793 - DNA, 33 bp, Homo sapien
cctctctctcacaaacacttctggagattgaag

SEQ ID NO: 529794 - DNA, 33 bp, Homo sapien
cctctctctcacaaacgcttctggagattgaag

SEQ ID NO: 529795 - DNA, 33 bp, Homo sapien
tgccttttatgatggaataattggttctgagtt

SEQ ID NO: 529796 - DNA, 33 bp, Homo sapien
tgccttttatgatggagtaattggttctgagtt

SEQ ID NO: 529797 - DNA, 33 bp, Homo sapien
taagcaagctatgacacagtattgtaaatacaa

SEQ ID NO: 529798 - DNA, 33 bp, Homo sapien
taagcaagctatgacagagtattgtaaatacaa

SEQ ID NO: 529799 - DNA, 33 bp, Homo sapien
cttgataagagctttcgattaaaaaccagtgca

SEQ ID NO: 529800 - DNA, 33 bp, Homo sapien
cttgataagagctttctattaaaaaccagtgca

SEQ ID NO: 529801 - DNA, 33 bp, Homo sapien
agtatacatctagtgaatagcaaagccactatt

SEQ ID NO: 529802 - DNA, 33 bp, Homo sapien
agtatacatctagtgagtagcaaagccactatt

SEQ ID NO: 529803 - DNA, 33 bp, Homo sapien
gcctttcacactagcaagcttcttgatctcttt

SEQ ID NO: 529804 - DNA, 33 bp, Homo sapien
gcctttcacactagcaggcttcttgatctcttt

SEQ ID NO: 529805 - DNA, 33 bp, Homo sapien
aattattactgattaccatgaaataagtcaaca

SEQ ID NO: 529806 - DNA, 33 bp, Homo sapien
aattattactgattactatgaaataagtcaaca

SEQ ID NO: 529807 - DNA, 33 bp, Homo sapien
gcaagtttgtaaaaaaataactatcacccagtt

SEQ ID NO: 529808 - DNA, 33 bp, Homo sapien
gcaagtttgtaaaaaagtaactatcacccagtt

SEQ ID NO: 529809 - DNA, 33 bp, Homo sapien
aacttgtcagacactactaggcacgtgaattaa

SEQ ID NO: 529810 - DNA, 33 bp, Homo sapien
aacttgtcagacactattaggcacgtgaattaa

SEQ ID NO: 529811 - DNA, 33 bp, Homo sapien
aaggagaagttacatacagcattcattctctta

SEQ ID NO: 529812 - DNA, 33 bp, Homo sapien
aaggagaagttacatagagcattcattctctta

SEQ ID NO: 529813 - DNA, 33 bp, Homo sapien
cctcttagagaaaaaaatctgtaaccaattcat

SEQ ID NO: 529814 - DNA, 33 bp, Homo sapien
cctcttagagaaaaaagtctgtaaccaattcat

SEQ ID NO: 529815 - DNA, 33 bp, Homo sapien
ctatcttccttattcaaaacaaaacaatgcttc

SEQ ID NO: 529816 - DNA, 33 bp, Homo sapien
ctatcttccttattcagaacaaaacaatgcttc

SEQ ID NO: 529817 - DNA, 33 bp, Homo sapien
ctgtggctcaaactcacatcactggaattccaa

SEQ ID NO: 529818 - DNA, 33 bp, Homo sapien
ctgtggctcaaactcagatcactggaattccaa

SEQ ID NO: 529819 - DNA, 33 bp, Homo sapien
gcttcctggaagagaccgcacgtcaggtagcca

SEQ ID NO: 529820 - DNA, 33 bp, Homo sapien
gcttcctggaagagacggcacgtcaggtagcca

SEQ ID NO: 529821 - DNA, 33 bp, Homo sapien
tccagtttttagaacactgcttgactcagaagt

SEQ ID NO: 529822 - DNA, 33 bp, Homo sapien
tccagtttttagaacagtgcttgactcagaagt

SEQ ID NO: 529823 - DNA, 33 bp, Homo sapien
tattttggattgcactgaaaatgtgaaggtata

SEQ ID NO: 529824 - DNA, 33 bp, Homo sapien
tattttggattgcacttaaaatgtgaaggtata

SEQ ID NO: 529825 - DNA, 33 bp, Homo sapien
gctgcatttctctacaataagaagaggtacagg

SEQ ID NO: 529826 - DNA, 33 bp, Homo sapien
gctgcatttctctacattaagaagaggtacagg

SEQ ID NO: 529827 - DNA, 33 bp, Homo sapien
gtcaaaataaaggcacactgaaaatatacacta

SEQ ID NO: 529828 - DNA, 33 bp, Homo sapien
gtcaaaataaaggcacgctgaaaatatacacta

SEQ ID NO: 529829 - DNA, 33 bp, Homo sapien
tcttacttccaaaaaacagtctgcaagagtatc

SEQ ID NO: 529830 - DNA, 33 bp, Homo sapien
tcttacttccaaaaaatagtctgcaagagtatc

SEQ ID NO: 529831 - DNA, 33 bp, Homo sapien
gtatcctacgcaggtacatgaataaatctatac

SEQ ID NO: 529832 - DNA, 33 bp, Homo sapien
gtatcctacgcaggtatatgaataaatctatac

SEQ ID NO: 529833 - DNA, 33 bp, Homo sapien
agttgtatttaattaggacttgagctagtcata

SEQ ID NO: 529834 - DNA, 33 bp, Homo sapien
agttgtatttaattagtacttgagctagtcata

SEQ ID NO: 529835 - DNA, 33 bp, Homo sapien
ctctgggtggactgtcaaggaatataaatatca

SEQ ID NO: 529836 - DNA, 33 bp, Homo sapien
ctctgggtggactgtcgaggaatataaatatca

SEQ ID NO: 529837 - DNA, 33 bp, Homo sapien
cctataattcagacgacgtctatgtaatgctta

SEQ ID NO: 529838 - DNA, 33 bp, Homo sapien
cctataattcagacgatgtctatgtaatgctta

SEQ ID NO: 529839 - DNA, 33 bp, Homo sapien
tgtctgactaattcagacaagacttatttccaa

SEQ ID NO: 529840 - DNA, 33 bp, Homo sapien
tgtctgactaattcaggcaagacttatttccaa

SEQ ID NO: 529841 - DNA, 33 bp, Homo sapien
ggctccattgaataacagtcattgagttgagac

SEQ ID NO: 529842 - DNA, 33 bp, Homo sapien
ggctccattgaataacggtcattgagttgagac

SEQ ID NO: 529843 - DNA, 33 bp, Homo sapien
gggcagagtgctgagacgagcacatgcttaggt

SEQ ID NO: 529844 - DNA, 33 bp, Homo sapien
gggcagagtgctgagatgagcacatgcttaggt

SEQ ID NO: 529845 - DNA, 33 bp, Homo sapien
agactttcttagcgtgcattgcattttttaatc

SEQ ID NO: 529846 - DNA, 33 bp, Homo sapien
agactttcttagcgtgtattgcattttttaatc

SEQ ID NO: 529847 - DNA, 33 bp, Homo sapien
tttggcaaatattaaaccatgttgtttggacaa

SEQ ID NO: 529848 - DNA, 33 bp, Homo sapien
tttggcaaatattaaatcatgttgtttggacaa

SEQ ID NO: 529849 - DNA, 33 bp, Homo sapien
tcgctcttttcacttagatctcggcttaaatat

SEQ ID NO: 529850 - DNA, 33 bp, Homo sapien
tcgctcttttcacttatatctcggcttaaatat

SEQ ID NO: 529851 - DNA, 33 bp, Homo sapien
ctgcctgttccctgtacgtgatttgaggcttat

SEQ ID NO: 529852 - DNA, 33 bp, Homo sapien
ctgcctgttccctgtatgtgatttgaggcttat

SEQ ID NO: 529853 - DNA, 33 bp, Homo sapien
tttagcatgccaaagagcctaatcaagtcttaa

SEQ ID NO: 529854 - DNA, 33 bp, Homo sapien
tttagcatgccaaagatcctaatcaagtcttaa

SEQ ID NO: 529855 - DNA, 33 bp, Homo sapien
cttcgagagttacacaatggaataggggggagt

SEQ ID NO: 529856 - DNA, 33 bp, Homo sapien
cttcgagagttacacagtggaataggggggagt

SEQ ID NO: 529857 - DNA, 33 bp, Homo sapien
gaatgctaaatttggaggtcaataggggattat

SEQ ID NO: 529858 - DNA, 33 bp, Homo sapien
gaatgctaaatttggatgtcaataggggattat

SEQ ID NO: 529859 - DNA, 33 bp, Homo sapien
cctggctcctagatcccagggacatcaaagttg

SEQ ID NO: 529860 - DNA, 33 bp, Homo sapien
cctggctcctagatccgagggacatcaaagttg

SEQ ID NO: 529861 - DNA, 33 bp, Homo sapien
aggaagcaagtgccacaattggtttgagaggaa

SEQ ID NO: 529862 - DNA, 33 bp, Homo sapien
aggaagcaagtgccacgattggtttgagaggaa

SEQ ID NO: 529863 - DNA, 33 bp, Homo sapien
cttcatgatttttcaaaataaaaaatgtgcatc

SEQ ID NO: 529864 - DNA, 33 bp, Homo sapien
cttcatgatttttcaacataaaaaatgtgcatc

SEQ ID NO: 529865 - DNA, 33 bp, Homo sapien
catggactaaaacatgaaaggagtcttaatttt

SEQ ID NO: 529866 - DNA, 33 bp, Homo sapien
catggactaaaacatggaaggagtcttaatttt

SEQ ID NO: 529867 - DNA, 33 bp, Homo sapien
gtgcagctttgtatataaagtgatttctctgtg

SEQ ID NO: 529868 - DNA, 33 bp, Homo sapien
gtgcagctttgtatattaagtgatttctctgtg

SEQ ID NO: 529869 - DNA, 33 bp, Homo sapien
ctagaatcccatcagaaaggttttgaagaagaa

SEQ ID NO: 529870 - DNA, 33 bp, Homo sapien
ctagaatcccatcagagaggttttgaagaagaa

SEQ ID NO: 529871 - DNA, 33 bp, Homo sapien
cagggaggctgactagcacttagtggactggat

SEQ ID NO: 529872 - DNA, 33 bp, Homo sapien
cagggaggctgactagtacttagtggactggat

SEQ ID NO: 529873 - DNA, 33 bp, Homo sapien
ggagttcggtgcattcactctctttttacccat

SEQ ID NO: 529874 - DNA, 33 bp, Homo sapien
ggagttcggtgcattcgctctctttttacccat

SEQ ID NO: 529875 - DNA, 33 bp, Homo sapien
cttcttgtccctttagcaggtctttgccagttc

SEQ ID NO: 529876 - DNA, 33 bp, Homo sapien
cttcttgtccctttagtaggtctttgccagttc

SEQ ID NO: 529877 - DNA, 33 bp, Homo sapien
gggccaacgaggaaacaaaatgggcagcccaga

SEQ ID NO: 529878 - DNA, 33 bp, Homo sapien
gggccaacgaggaaaccaaatgggcagcccaga

SEQ ID NO: 529879 - DNA, 33 bp, Homo sapien
atttgttgatggccaactagatgcagatacaag

SEQ ID NO: 529880 - DNA, 33 bp, Homo sapien
atttgttgatggccaattagatgcagatacaag

SEQ ID NO: 529881 - DNA, 33 bp, Homo sapien
cagagtcaaccaaagaatatgtagccaaaaagt

SEQ ID NO: 529882 - DNA, 33 bp, Homo sapien
cagagtcaaccaaagagtatgtagccaaaaagt

SEQ ID NO: 529883 - DNA, 33 bp, Homo sapien
acccctgaatcctctacattggtttttatgtcg

SEQ ID NO: 529884 - DNA, 33 bp, Homo sapien
acccctgaatcctctatattggtttttatgtcg

SEQ ID NO: 529885 - DNA, 33 bp, Homo sapien
aacaggctaaccaggacatttcttctcatggca

SEQ ID NO: 529886 - DNA, 33 bp, Homo sapien
aacaggctaaccaggatatttcttctcatggca

SEQ ID NO: 529887 - DNA, 33 bp, Homo sapien
ctctgtttcatcaccagtaataagagtaataat

SEQ ID NO: 529888 - DNA, 33 bp, Homo sapien
ctctgtttcatcaccattaataagagtaataat

SEQ ID NO: 529889 - DNA, 33 bp, Homo sapien
aatgaatgaggatggacagaattgagacatcag

SEQ ID NO: 529890 - DNA, 33 bp, Homo sapien
aatgaatgaggatggatagaattgagacatcag

SEQ ID NO: 529891 - DNA, 33 bp, Homo sapien
cataacattccagagccatgattcctgcccttg

SEQ ID NO: 529892 - DNA, 33 bp, Homo sapien
cataacattccagagcgatgattcctgcccttg

SEQ ID NO: 529893 - DNA, 33 bp, Homo sapien
agcatgacctcatctcaaagggtacacagagtt

SEQ ID NO: 529894 - DNA, 33 bp, Homo sapien
agcatgacctcatctcgaagggtacacagagtt

SEQ ID NO: 529895 - DNA, 33 bp, Homo sapien
gttattgtatcctcccaacaaggtgataagata

SEQ ID NO: 529896 - DNA, 33 bp, Homo sapien
gttattgtatcctccccacaaggtgataagata

SEQ ID NO: 529897 - DNA, 33 bp, Homo sapien
aaaacaggagaaggacacaatttgaagaaatca

SEQ ID NO: 529898 - DNA, 33 bp, Homo sapien
aaaacaggagaaggacgcaatttgaagaaatca

SEQ ID NO: 529899 - DNA, 33 bp, Homo sapien
tgaggtggaatatgtgcaattaagaaggatacc

SEQ ID NO: 529900 - DNA, 33 bp, Homo sapien
tgaggtggaatatgtgtaattaagaaggatacc

SEQ ID NO: 529901 - DNA, 33 bp, Homo sapien
cctctaaatatccaaacgcagtctggtttttta

SEQ ID NO: 529902 - DNA, 33 bp, Homo sapien
cctctaaatatccaaatgcagtctggtttttta

SEQ ID NO: 529903 - DNA, 33 bp, Homo sapien
aatttcagtgggtgcacataaagtaaaacgcac

SEQ ID NO: 529904 - DNA, 33 bp, Homo sapien
aatttcagtgggtgcatataaagtaaaacgcac

SEQ ID NO: 529905 - DNA, 33 bp, Homo sapien
tcctgctctaactagcacttgaactgggccagc

SEQ ID NO: 529906 - DNA, 33 bp, Homo sapien
tcctgctctaactagctcttgaactgggccagc

SEQ ID NO: 529907 - DNA, 33 bp, Homo sapien
gtttttaactgcctgacatatgcaatagtgaca

SEQ ID NO: 529908 - DNA, 33 bp, Homo sapien
gtttttaactgcctgatatatgcaatagtgaca

SEQ ID NO: 529909 - DNA, 33 bp, Homo sapien
cagcttcaaaaaggcaagtgattgagggaagaa

SEQ ID NO: 529910 - DNA, 33 bp, Homo sapien
cagcttcaaaaaggcaggtgattgagggaagaa

SEQ ID NO: 529911 - DNA, 33 bp, Homo sapien
acctgctctgtctcaaggcacctctcccctaac

SEQ ID NO: 529912 - DNA, 33 bp, Homo sapien
acctgctctgtctcaatgcacctctcccctaac

SEQ ID NO: 529913 - DNA, 33 bp, Homo sapien
atgatgtgctatttgacgaagaaataggagact

SEQ ID NO: 529914 - DNA, 33 bp, Homo sapien
atgatgtgctatttgatgaagaaataggagact

SEQ ID NO: 529915 - DNA, 33 bp, Homo sapien
tctcttggagatgaacacactatacatgcaagt

SEQ ID NO: 529916 - DNA, 33 bp, Homo sapien
tctcttggagatgaacgcactatacatgcaagt

SEQ ID NO: 529917 - DNA, 33 bp, Homo sapien
ctgtctttgccgggtaaccattttcactactag

SEQ ID NO: 529918 - DNA, 33 bp, Homo sapien
ctgtctttgccgggtagccattttcactactag

SEQ ID NO: 529919 - DNA, 33 bp, Homo sapien
atggaggacaaaagcaatatgcaccccccttat

SEQ ID NO: 529920 - DNA, 33 bp, Homo sapien
atggaggacaaaagcagtatgcaccccccttat

SEQ ID NO: 529921 - DNA, 33 bp, Homo sapien
atctcagtatgaggacaactccacgaaagcaaa

SEQ ID NO: 529922 - DNA, 33 bp, Homo sapien
atctcagtatgaggaccactccacgaaagcaaa

SEQ ID NO: 529923 - DNA, 33 bp, Homo sapien
tttgttggccgaaggacaatcactgcccatctg

SEQ ID NO: 529924 - DNA, 33 bp, Homo sapien
tttgttggccgaaggataatcactgcccatctg

SEQ ID NO: 529925 - DNA, 33 bp, Homo sapien
tcacctgcaataaatagccaatcatattatagc

SEQ ID NO: 529926 - DNA, 33 bp, Homo sapien
tcacctgcaataaatatccaatcatattatagc

SEQ ID NO: 529927 - DNA, 33 bp, Homo sapien
gcacccccaattatgagattttgtcttccctga

SEQ ID NO: 529928 - DNA, 33 bp, Homo sapien
gcacccccaattatgatattttgtcttccctga

SEQ ID NO: 529929 - DNA, 33 bp, Homo sapien
actaatggtgtctaccacactagggtcagagtt

SEQ ID NO: 529930 - DNA, 33 bp, Homo sapien
actaatggtgtctaccgcactagggtcagagtt

SEQ ID NO: 529931 - DNA, 33 bp, Homo sapien
tgacatttttttgaagaactttaactatctaca

SEQ ID NO: 529932 - DNA, 33 bp, Homo sapien
tgacatttttttgaaggactttaactatctaca

SEQ ID NO: 529933 - DNA, 33 bp, Homo sapien
gtgattccaggctggactatatgtgccatcccc

SEQ ID NO: 529934 - DNA, 33 bp, Homo sapien
gtgattccaggctggattatatgtgccatcccc

SEQ ID NO: 529935 - DNA, 33 bp, Homo sapien
gatttttgacaaattgaaaggcaattcaacggg

SEQ ID NO: 529936 - DNA, 33 bp, Homo sapien
gatttttgacaaattggaaggcaattcaacggg

SEQ ID NO: 529937 - DNA, 33 bp, Homo sapien
cgataatgttagtcagaaccttatgaactctct

SEQ ID NO: 529938 - DNA, 33 bp, Homo sapien
cgataatgttagtcagcaccttatgaactctct

SEQ ID NO: 529939 - DNA, 33 bp, Homo sapien
tcaagtgtatacctgccgagtttgatcaatttg

SEQ ID NO: 529940 - DNA, 33 bp, Homo sapien
tcaagtgtatacctgctgagtttgatcaatttg

SEQ ID NO: 529941 - DNA, 33 bp, Homo sapien
aaagagcttatttatacggaatgctaatttctt

SEQ ID NO: 529942 - DNA, 33 bp, Homo sapien
aaagagcttatttatatggaatgctaatttctt

SEQ ID NO: 529943 - DNA, 33 bp, Homo sapien
cagagactgctccaggccagagatgtcagtgta

SEQ ID NO: 529944 - DNA, 33 bp, Homo sapien
cagagactgctccaggtcagagatgtcagtgta

SEQ ID NO: 529945 - DNA, 33 bp, Homo sapien
tatcttaacactgacaaaatgaccattcacttt

SEQ ID NO: 529946 - DNA, 33 bp, Homo sapien
tatcttaacactgacagaatgaccattcacttt

SEQ ID NO: 529947 - DNA, 33 bp, Homo sapien
ggccttccttattaggaatcaaactaactgaga

SEQ ID NO: 529948 - DNA, 33 bp, Homo sapien
ggccttccttattagggatcaaactaactgaga

SEQ ID NO: 529949 - DNA, 33 bp, Homo sapien
aggaagctcccagacaagggtggttattgggat

SEQ ID NO: 529950 - DNA, 33 bp, Homo sapien
aggaagctcccagacaggggtggttattgggat

SEQ ID NO: 529951 - DNA, 33 bp, Homo sapien
atggaaataaacacaacgttaacgtcattacag

SEQ ID NO: 529952 - DNA, 33 bp, Homo sapien
atggaaataaacacaatgttaacgtcattacag

SEQ ID NO: 529953 - DNA, 33 bp, Homo sapien
attcctacagatcgtgaacttaagacatttata

SEQ ID NO: 529954 - DNA, 33 bp, Homo sapien
attcctacagatcgtggacttaagacatttata

SEQ ID NO: 529955 - DNA, 33 bp, Homo sapien
ttagagcacctcattaacctgaataactgagac

SEQ ID NO: 529956 - DNA, 33 bp, Homo sapien
ttagagcacctcattagcctgaataactgagac

SEQ ID NO: 529957 - DNA, 33 bp, Homo sapien
acctatgaattcagaccataaggccgtgtatac

SEQ ID NO: 529958 - DNA, 33 bp, Homo sapien
acctatgaattcagactataaggccgtgtatac

SEQ ID NO: 529959 - DNA, 33 bp, Homo sapien
atttttctcaggaaaccgatgaggtctttggat

SEQ ID NO: 529960 - DNA, 33 bp, Homo sapien
atttttctcaggaaactgatgaggtctttggat

SEQ ID NO: 529961 - DNA, 33 bp, Homo sapien
ctgtccatgatgtgctaaatttgaagatggaat

SEQ ID NO: 529962 - DNA, 33 bp, Homo sapien
ctgtccatgatgtgctgaatttgaagatggaat

SEQ ID NO: 529963 - DNA, 33 bp, Homo sapien
ccttccaagctcagagaaaagctcagcctctgg

SEQ ID NO: 529964 - DNA, 33 bp, Homo sapien
ccttccaagctcagaggaaagctcagcctctgg

SEQ ID NO: 529965 - DNA, 33 bp, Homo sapien
atatggtgggcaaaaacagtgataggtgcaaac

SEQ ID NO: 529966 - DNA, 33 bp, Homo sapien
atatggtgggcaaaaatagtgataggtgcaaac

SEQ ID NO: 529967 - DNA, 33 bp, Homo sapien
tcactgggaaataataacgagcttggtgccatc

SEQ ID NO: 529968 - DNA, 33 bp, Homo sapien
tcactgggaaataatagcgagcttggtgccatc

SEQ ID NO: 529969 - DNA, 33 bp, Homo sapien
aacttgattgtcttaacgatgtcacgtacagga

SEQ ID NO: 529970 - DNA, 33 bp, Homo sapien
aacttgattgtcttaaggatgtcacgtacagga

SEQ ID NO: 529971 - DNA, 33 bp, Homo sapien
atgcaaaatggtactacgactttagaagaaagt

SEQ ID NO: 529972 - DNA, 33 bp, Homo sapien
atgcaaaatggtactatgactttagaagaaagt

SEQ ID NO: 529973 - DNA, 33 bp, Homo sapien
tcccagttcatagtcacatcagggttcactctt

SEQ ID NO: 529974 - DNA, 33 bp, Homo sapien
tcccagttcatagtcatatcagggttcactctt

SEQ ID NO: 529975 - DNA, 33 bp, Homo sapien
tctattaactcttacaatacatatttctctctc

SEQ ID NO: 529976 - DNA, 33 bp, Homo sapien
tctattaactcttacagtacatatttctctctc

SEQ ID NO: 529977 - DNA, 33 bp, Homo sapien
aaatttgaggcttgagcatttaactgactttct

SEQ ID NO: 529978 - DNA, 33 bp, Homo sapien
aaatttgaggcttgaggatttaactgactttct

SEQ ID NO: 529979 - DNA, 33 bp, Homo sapien
aaagctggtaccagaaaaaattgcatgatttga

SEQ ID NO: 529980 - DNA, 33 bp, Homo sapien
aaagctggtaccagaataaattgcatgatttga

SEQ ID NO: 529981 - DNA, 33 bp, Homo sapien
caaccagacctacactcaacccttggtgtttgg

SEQ ID NO: 529982 - DNA, 33 bp, Homo sapien
caaccagacctacactgaacccttggtgtttgg

SEQ ID NO: 529983 - DNA, 33 bp, Homo sapien
acagaaagccaacacgaagacaataattatcac

SEQ ID NO: 529984 - DNA, 33 bp, Homo sapien
acagaaagccaacacggagacaataattatcac

SEQ ID NO: 529985 - DNA, 33 bp, Homo sapien
ttaaatacttttggtacagttgaatatgtacag

SEQ ID NO: 529986 - DNA, 33 bp, Homo sapien
ttaaatacttttggtagagttgaatatgtacag

SEQ ID NO: 529987 - DNA, 33 bp, Homo sapien
taggaaagcatgatgaaaaagctaagtaatgaa

SEQ ID NO: 529988 - DNA, 33 bp, Homo sapien
taggaaagcatgatgacaaagctaagtaatgaa

SEQ ID NO: 529989 - DNA, 33 bp, Homo sapien
gagatccccttgaagacgaaactgaaagaaatg

SEQ ID NO: 529990 - DNA, 33 bp, Homo sapien
gagatccccttgaagatgaaactgaaagaaatg

SEQ ID NO: 529991 - DNA, 33 bp, Homo sapien
gctgaagctaatcctcaaactatcaaacatcag

SEQ ID NO: 529992 - DNA, 33 bp, Homo sapien
gctgaagctaatcctccaactatcaaacatcag

SEQ ID NO: 529993 - DNA, 33 bp, Homo sapien
cagagtcagtgtaagaagggacttcccaggacc

SEQ ID NO: 529994 - DNA, 33 bp, Homo sapien
cagagtcagtgtaagaggggacttcccaggacc

SEQ ID NO: 529995 - DNA, 33 bp, Homo sapien
tatgtgtaatttaccactgggcttgtgatatgg

SEQ ID NO: 529996 - DNA, 33 bp, Homo sapien
tatgtgtaatttaccattgggcttgtgatatgg

SEQ ID NO: 529997 - DNA, 33 bp, Homo sapien
cctctaggctctgtacaacatggtctctctgcc

SEQ ID NO: 529998 - DNA, 33 bp, Homo sapien
cctctaggctctgtacgacatggtctctctgcc

SEQ ID NO: 529999 - DNA, 33 bp, Homo sapien
aaactgcactgcaatcacctgttgaacctgctc

SEQ ID NO: 530000 - DNA, 33 bp, Homo sapien
aaactgcactgcaatcgcctgttgaacctgctc

SEQ ID NO: 530001 - DNA, 33 bp, Homo sapien
tgcctaacagttggcagtagtagtttagagatt

SEQ ID NO: 530002 - DNA, 33 bp, Homo sapien
tgcctaacagttggcattagtagtttagagatt

SEQ ID NO: 530003 - DNA, 33 bp, Homo sapien
cttactatcaaccctacgagtgctagcaactac

SEQ ID NO: 530004 - DNA, 33 bp, Homo sapien
cttactatcaaccctatgagtgctagcaactac

SEQ ID NO: 530005 - DNA, 33 bp, Homo sapien
aagtgaaagtaactgcaagtcatctattaaaat

SEQ ID NO: 530006 - DNA, 33 bp, Homo sapien
aagtgaaagtaactgcgagtcatctattaaaat

SEQ ID NO: 530007 - DNA, 33 bp, Homo sapien
cactatacttcagtcaaaacaatctttttaaaa

SEQ ID NO: 530008 - DNA, 33 bp, Homo sapien
cactatacttcagtcagaacaatctttttaaaa

SEQ ID NO: 530009 - DNA, 33 bp, Homo sapien
atggacatcctcaaaaagctcattgtcttatgg

SEQ ID NO: 530010 - DNA, 33 bp, Homo sapien
atggacatcctcaaaacgctcattgtcttatgg

SEQ ID NO: 530011 - DNA, 33 bp, Homo sapien
ggaatgaattaaccaacagagaagagtatttgg

SEQ ID NO: 530012 - DNA, 33 bp, Homo sapien
ggaatgaattaaccaatagagaagagtatttgg

SEQ ID NO: 530013 - DNA, 33 bp, Homo sapien
ttccggttgtatatggacatcttatcatctgtg

SEQ ID NO: 530014 - DNA, 33 bp, Homo sapien
ttccggttgtatatggccatcttatcatctgtg

SEQ ID NO: 530015 - DNA, 33 bp, Homo sapien
gtaaaacaaattaatacagctgtcaactcataa

SEQ ID NO: 530016 - DNA, 33 bp, Homo sapien
gtaaaacaaattaatatagctgtcaactcataa

SEQ ID NO: 530017 - DNA, 33 bp, Homo sapien
aaataaaatggctatacagatggctcaaaatat

SEQ ID NO: 530018 - DNA, 33 bp, Homo sapien
aaataaaatggctatatagatggctcaaaatat

SEQ ID NO: 530019 - DNA, 33 bp, Homo sapien
attgggagaaaacttaactttatggcaagttca

SEQ ID NO: 530020 - DNA, 33 bp, Homo sapien
attgggagaaaacttatctttatggcaagttca

SEQ ID NO: 530021 - DNA, 33 bp, Homo sapien
ccccagaattttacagccacctactttatatgc

SEQ ID NO: 530022 - DNA, 33 bp, Homo sapien
ccccagaattttacagtcacctactttatatgc

SEQ ID NO: 530023 - DNA, 33 bp, Homo sapien
gttcctgagtagatgaacttctaaaaggcagga

SEQ ID NO: 530024 - DNA, 33 bp, Homo sapien
gttcctgagtagatgagcttctaaaaggcagga

SEQ ID NO: 530025 - DNA, 33 bp, Homo sapien
tctctctgagttccagcaaccgctttttcccct

SEQ ID NO: 530026 - DNA, 33 bp, Homo sapien
tctctctgagttccagtaaccgctttttcccct

SEQ ID NO: 530027 - DNA, 33 bp, Homo sapien
agctaatcttacatcaatatcagaatgccaggc

SEQ ID NO: 530028 - DNA, 33 bp, Homo sapien
agctaatcttacatcagtatcagaatgccaggc

SEQ ID NO: 530029 - DNA, 33 bp, Homo sapien
actctgatttaaaaccaacacagcatatcagca

SEQ ID NO: 530030 - DNA, 33 bp, Homo sapien
actctgatttaaaaccgacacagcatatcagca

SEQ ID NO: 530031 - DNA, 33 bp, Homo sapien
cgggcctgcatcaaagaagaaaagaaaagcatc

SEQ ID NO: 530032 - DNA, 33 bp, Homo sapien
cgggcctgcatcaaaggagaaaagaaaagcatc

SEQ ID NO: 530033 - DNA, 33 bp, Homo sapien
ttatgcaaccatgtacactattcagctaaaact

SEQ ID NO: 530034 - DNA, 33 bp, Homo sapien
ttatgcaaccatgtacgctattcagctaaaact

SEQ ID NO: 530035 - DNA, 33 bp, Homo sapien
gcacttctaccctttccctgcttctgctgtctg

SEQ ID NO: 530036 - DNA, 33 bp, Homo sapien
gcacttctaccctttcgctgcttctgctgtctg

SEQ ID NO: 530037 - DNA, 33 bp, Homo sapien
gaaaacacaggtccacacaaagacttgtatgaa

SEQ ID NO: 530038 - DNA, 33 bp, Homo sapien
gaaaacacaggtccacgcaaagacttgtatgaa

SEQ ID NO: 530039 - DNA, 33 bp, Homo sapien
aagagcatccatccatcaacctcttcatctcct

SEQ ID NO: 530040 - DNA, 33 bp, Homo sapien
aagagcatccatccattaacctcttcatctcct

SEQ ID NO: 530041 - DNA, 33 bp, Homo sapien
acttcagagcaaggcaatctctggcaatgacaa

SEQ ID NO: 530042 - DNA, 33 bp, Homo sapien
acttcagagcaaggcagtctctggcaatgacaa

SEQ ID NO: 530043 - DNA, 33 bp, Homo sapien
tgagttcatcttgaccagggggtctgacctttt

SEQ ID NO: 530044 - DNA, 33 bp, Homo sapien
tgagttcatcttgaccggggggtctgacctttt

SEQ ID NO: 530045 - DNA, 33 bp, Homo sapien
acttggaagattcttcgaaatcagtgataacca

SEQ ID NO: 530046 - DNA, 33 bp, Homo sapien
acttggaagattcttctaaatcagtgataacca

SEQ ID NO: 530047 - DNA, 33 bp, Homo sapien
catatacttctctaccaccatccactcttcttc

SEQ ID NO: 530048 - DNA, 33 bp, Homo sapien
catatacttctctaccgccatccactcttcttc

SEQ ID NO: 530049 - DNA, 33 bp, Homo sapien
taatggaaatttgacacgaggacagcattagag

SEQ ID NO: 530050 - DNA, 33 bp, Homo sapien
taatggaaatttgacatgaggacagcattagag

SEQ ID NO: 530051 - DNA, 33 bp, Homo sapien
acactaaaggccatacagaagggcaactactga

SEQ ID NO: 530052 - DNA, 33 bp, Homo sapien
acactaaaggccataccgaagggcaactactga

SEQ ID NO: 530053 - DNA, 33 bp, Homo sapien
agcaaccctcagaaaaagagacaaactccccag

SEQ ID NO: 530054 - DNA, 33 bp, Homo sapien
agcaaccctcagaaaaggagacaaactccccag

SEQ ID NO: 530055 - DNA, 33 bp, Homo sapien
aagtgaagtgaattgcacgtgaattgtgacgta

SEQ ID NO: 530056 - DNA, 33 bp, Homo sapien
aagtgaagtgaattgcgcgtgaattgtgacgta

SEQ ID NO: 530057 - DNA, 33 bp, Homo sapien
cattctatctcccttacagagtcattggaagct

SEQ ID NO: 530058 - DNA, 33 bp, Homo sapien
cattctatctcccttatagagtcattggaagct

SEQ ID NO: 530059 - DNA, 33 bp, Homo sapien
aggcaaggcttaatgcgaaactttattgggagg

SEQ ID NO: 530060 - DNA, 33 bp, Homo sapien
aggcaaggcttaatgctaaactttattgggagg

SEQ ID NO: 530061 - DNA, 33 bp, Homo sapien
cctccacttatggctgcattttagattaacaag

SEQ ID NO: 530062 - DNA, 33 bp, Homo sapien
cctccacttatggctgtattttagattaacaag

SEQ ID NO: 530063 - DNA, 33 bp, Homo sapien
catttcttgctcaacaacccacaatgacttctc

SEQ ID NO: 530064 - DNA, 33 bp, Homo sapien
catttcttgctcaacagcccacaatgacttctc

SEQ ID NO: 530065 - DNA, 33 bp, Homo sapien
tcaatgagatgaaaaggagtaatatgtaagtat

SEQ ID NO: 530066 - DNA, 33 bp, Homo sapien
tcaatgagatgaaaagtagtaatatgtaagtat

SEQ ID NO: 530067 - DNA, 33 bp, Homo sapien
tctattggctcttgtcaccacctagcagaacct

SEQ ID NO: 530068 - DNA, 33 bp, Homo sapien
tctattggctcttgtcgccacctagcagaacct

SEQ ID NO: 530069 - DNA, 33 bp, Homo sapien
catggtgcatgctctcaactgcagtgttatgcc

SEQ ID NO: 530070 - DNA, 33 bp, Homo sapien
catggtgcatgctctcgactgcagtgttatgcc

SEQ ID NO: 530071 - DNA, 33 bp, Homo sapien
aagtttctattattatcaccacccccttccaat

SEQ ID NO: 530072 - DNA, 33 bp, Homo sapien
aagtttctattattattaccacccccttccaat

SEQ ID NO: 530073 - DNA, 33 bp, Homo sapien
tgagtaatacctgtaaagaaattaaagctattc

SEQ ID NO: 530074 - DNA, 33 bp, Homo sapien
tgagtaatacctgtaacgaaattaaagctattc

SEQ ID NO: 530075 - DNA, 33 bp, Homo sapien
ctaactgcttcagttgaaagacaaagtcaagcc

SEQ ID NO: 530076 - DNA, 33 bp, Homo sapien
ctaactgcttcagttggaagacaaagtcaagcc

SEQ ID NO: 530077 - DNA, 33 bp, Homo sapien
tgtgcatttccaacaaattcccacgtgacgctg

SEQ ID NO: 530078 - DNA, 33 bp, Homo sapien
tgtgcatttccaacaagttcccacgtgacgctg

SEQ ID NO: 530079 - DNA, 33 bp, Homo sapien
taaagcagcatgaatacgaattccaagtaacaa

SEQ ID NO: 530080 - DNA, 33 bp, Homo sapien
taaagcagcatgaatatgaattccaagtaacaa

SEQ ID NO: 530081 - DNA, 33 bp, Homo sapien
ttctcataattgcaaaaccaacccttcaccaaa

SEQ ID NO: 530082 - DNA, 33 bp, Homo sapien
ttctcataattgcaaagccaacccttcaccaaa

SEQ ID NO: 530083 - DNA, 33 bp, Homo sapien
ttttctgatagccccaactctgatttgtttcca

SEQ ID NO: 530084 - DNA, 33 bp, Homo sapien
ttttctgatagccccagctctgatttgtttcca

SEQ ID NO: 530085 - DNA, 33 bp, Homo sapien
agatgtttttgttggaccatcgcgtatccctga

SEQ ID NO: 530086 - DNA, 33 bp, Homo sapien
agatgtttttgttggatcatcgcgtatccctga

SEQ ID NO: 530087 - DNA, 33 bp, Homo sapien
ggtagaaagccaagaacgtccaaatgagagtgg

SEQ ID NO: 530088 - DNA, 33 bp, Homo sapien
ggtagaaagccaagaaggtccaaatgagagtgg

SEQ ID NO: 530089 - DNA, 33 bp, Homo sapien
atagaagaatgccacaataaccagcaggggaga

SEQ ID NO: 530090 - DNA, 33 bp, Homo sapien
atagaagaatgccacagtaaccagcaggggaga

SEQ ID NO: 530091 - DNA, 33 bp, Homo sapien
atctagatccttctgacaggaaagttcatgctc

SEQ ID NO: 530092 - DNA, 33 bp, Homo sapien
atctagatccttctgataggaaagttcatgctc

SEQ ID NO: 530093 - DNA, 33 bp, Homo sapien
cctttgcattccttagaccaacagtccccaatc

SEQ ID NO: 530094 - DNA, 33 bp, Homo sapien
cctttgcattccttaggccaacagtccccaatc

SEQ ID NO: 530095 - DNA, 33 bp, Homo sapien
tgtgacagaaactagactaggaacactttagaa

SEQ ID NO: 530096 - DNA, 33 bp, Homo sapien
tgtgacagaaactagattaggaacactttagaa

SEQ ID NO: 530097 - DNA, 33 bp, Homo sapien
cagctggctctttactcaccaaacctcttagat

SEQ ID NO: 530098 - DNA, 33 bp, Homo sapien
cagctggctctttacttaccaaacctcttagat

SEQ ID NO: 530099 - DNA, 33 bp, Homo sapien
actgcactgtccctcacgcttgaaatttggctc

SEQ ID NO: 530100 - DNA, 33 bp, Homo sapien
actgcactgtccctcatgcttgaaatttggctc

SEQ ID NO: 530101 - DNA, 33 bp, Homo sapien
gaactcatatcctaagcagaggagacacagagg

SEQ ID NO: 530102 - DNA, 33 bp, Homo sapien
gaactcatatcctaagtagaggagacacagagg

SEQ ID NO: 530103 - DNA, 33 bp, Homo sapien
cttgaggaacagttaacgaggaaatattgacac

SEQ ID NO: 530104 - DNA, 33 bp, Homo sapien
cttgaggaacagttaaggaggaaatattgacac

SEQ ID NO: 530105 - DNA, 33 bp, Homo sapien
ctgcctttgatagtcaacatacatacagtatgc

SEQ ID NO: 530106 - DNA, 33 bp, Homo sapien
ctgcctttgatagtcaccatacatacagtatgc

SEQ ID NO: 530107 - DNA, 33 bp, Homo sapien
tttgttgctacatacaaagtaaaaaacctcatc

SEQ ID NO: 530108 - DNA, 33 bp, Homo sapien
tttgttgctacatacagagtaaaaaacctcatc

SEQ ID NO: 530109 - DNA, 33 bp, Homo sapien
acctagagtagacgaaacctgggccattgtcag

SEQ ID NO: 530110 - DNA, 33 bp, Homo sapien
acctagagtagacgaagcctgggccattgtcag

SEQ ID NO: 530111 - DNA, 33 bp, Homo sapien
tgcccaaatacttctccattcccaacatctgtg

SEQ ID NO: 530112 - DNA, 33 bp, Homo sapien
tgcccaaatacttctctattcccaacatctgtg

SEQ ID NO: 530113 - DNA, 33 bp, Homo sapien
tctgtgccatctgagacaaagatatttttaggc

SEQ ID NO: 530114 - DNA, 33 bp, Homo sapien
tctgtgccatctgagagaaagatatttttaggc

SEQ ID NO: 530115 - DNA, 33 bp, Homo sapien
cctataaaaagctcaactgaatttgcttcagtt

SEQ ID NO: 530116 - DNA, 33 bp, Homo sapien
cctataaaaagctcaagtgaatttgcttcagtt

SEQ ID NO: 530117 - DNA, 33 bp, Homo sapien
tagtaatctacggccaagctttcacagctgtgg

SEQ ID NO: 530118 - DNA, 33 bp, Homo sapien
tagtaatctacggccaggctttcacagctgtgg

SEQ ID NO: 530119 - DNA, 33 bp, Homo sapien
atgcctaattatactccccttctcttttatggt

SEQ ID NO: 530120 - DNA, 33 bp, Homo sapien
atgcctaattatactctccttctcttttatggt

SEQ ID NO: 530121 - DNA, 33 bp, Homo sapien
gggttatagccttcaaagtggctatctcacagg

SEQ ID NO: 530122 - DNA, 33 bp, Homo sapien
gggttatagccttcaaggtggctatctcacagg

SEQ ID NO: 530123 - DNA, 33 bp, Homo sapien
caaacataaaaccacacggatggctggtcccat

SEQ ID NO: 530124 - DNA, 33 bp, Homo sapien
caaacataaaaccacatggatggctggtcccat

SEQ ID NO: 530125 - DNA, 33 bp, Homo sapien
aggccagcagcatcatcatccgataggaagttg

SEQ ID NO: 530126 - DNA, 33 bp, Homo sapien
aggccagcagcatcattatccgataggaagttg

SEQ ID NO: 530127 - DNA, 33 bp, Homo sapien
acatacatggagtccaataaacatctattgaac

SEQ ID NO: 530128 - DNA, 33 bp, Homo sapien
acatacatggagtccagtaaacatctattgaac

SEQ ID NO: 530129 - DNA, 33 bp, Homo sapien
aaagagtggaaatgaccagcagggtttacactt

SEQ ID NO: 530130 - DNA, 33 bp, Homo sapien
aaagagtggaaatgactagcagggtttacactt

SEQ ID NO: 530131 - DNA, 33 bp, Homo sapien
taaaggagaacacgaaagtctttccaggcttcc

SEQ ID NO: 530132 - DNA, 33 bp, Homo sapien
taaaggagaacacgaaggtctttccaggcttcc

SEQ ID NO: 530133 - DNA, 33 bp, Homo sapien
caggcactcttctaatcactccatgtgcattgt

SEQ ID NO: 530134 - DNA, 33 bp, Homo sapien
caggcactcttctaattactccatgtgcattgt

SEQ ID NO: 530135 - DNA, 33 bp, Homo sapien
gctaatcctaccagaacaggcagtatttatatg

SEQ ID NO: 530136 - DNA, 33 bp, Homo sapien
gctaatcctaccagaataggcagtatttatatg

SEQ ID NO: 530137 - DNA, 33 bp, Homo sapien
gaagttgcatcactataaagggtgtatgtgagg

SEQ ID NO: 530138 - DNA, 33 bp, Homo sapien
gaagttgcatcactatgaagggtgtatgtgagg

SEQ ID NO: 530139 - DNA, 33 bp, Homo sapien
tttgacaagggtgccaagataatccagtgagga

SEQ ID NO: 530140 - DNA, 33 bp, Homo sapien
tttgacaagggtgccaggataatccagtgagga

SEQ ID NO: 530141 - DNA, 33 bp, Homo sapien
aaatcatagaagaacacattgataagatgtcaa

SEQ ID NO: 530142 - DNA, 33 bp, Homo sapien
aaatcatagaagaacatattgataagatgtcaa

SEQ ID NO: 530143 - DNA, 33 bp, Homo sapien
tgattttttttcccccacatatcagagttgggt

SEQ ID NO: 530144 - DNA, 33 bp, Homo sapien
tgattttttttccccctcatatcagagttgggt

SEQ ID NO: 530145 - DNA, 33 bp, Homo sapien
ggtgatttttttcctacagtgcccaacagccta

SEQ ID NO: 530146 - DNA, 33 bp, Homo sapien
ggtgatttttttcctatagtgcccaacagccta

SEQ ID NO: 530147 - DNA, 33 bp, Homo sapien
aacattggcctctgaccggtgttctcaactcca

SEQ ID NO: 530148 - DNA, 33 bp, Homo sapien
aacattggcctctgactggtgttctcaactcca

SEQ ID NO: 530149 - DNA, 33 bp, Homo sapien
tgaggaaggactccataactcataacattggcc

SEQ ID NO: 530150 - DNA, 33 bp, Homo sapien
tgaggaaggactccatgactcataacattggcc

SEQ ID NO: 530151 - DNA, 33 bp, Homo sapien
gcagaaagactgcagagcttaataagtttggaa

SEQ ID NO: 530152 - DNA, 33 bp, Homo sapien
gcagaaagactgcagatcttaataagtttggaa

SEQ ID NO: 530153 - DNA, 33 bp, Homo sapien
aatctcacatactcaaacaatacaacacttcca

SEQ ID NO: 530154 - DNA, 33 bp, Homo sapien
aatctcacatactcaaccaatacaacacttcca

SEQ ID NO: 530155 - DNA, 33 bp, Homo sapien
gaaagtgtgaaattccgatttgcagatggtgac

SEQ ID NO: 530156 - DNA, 33 bp, Homo sapien
gaaagtgtgaaattcctatttgcagatggtgac

SEQ ID NO: 530157 - DNA, 33 bp, Homo sapien
ttgaggactagctcaccatcattccagtatttt

SEQ ID NO: 530158 - DNA, 33 bp, Homo sapien
ttgaggactagctcactatcattccagtatttt

SEQ ID NO: 530159 - DNA, 33 bp, Homo sapien
ggaagggaagtttgcaaatcagaagcttatgga

SEQ ID NO: 530160 - DNA, 33 bp, Homo sapien
ggaagggaagtttgcagatcagaagcttatgga

SEQ ID NO: 530161 - DNA, 33 bp, Homo sapien
catgtcaacccctgtccaggataccgctacaaa

SEQ ID NO: 530162 - DNA, 33 bp, Homo sapien
catgtcaacccctgtctaggataccgctacaaa

SEQ ID NO: 530163 - DNA, 33 bp, Homo sapien
ggttctgaccttcacacatggccccggagaata

SEQ ID NO: 530164 - DNA, 33 bp, Homo sapien
ggttctgaccttcacatatggccccggagaata

SEQ ID NO: 530165 - DNA, 33 bp, Homo sapien
taggcttacagctaaaattcaatgagaaggcaa

SEQ ID NO: 530166 - DNA, 33 bp, Homo sapien
taggcttacagctaaacttcaatgagaaggcaa

SEQ ID NO: 530167 - DNA, 33 bp, Homo sapien
aatcagactggaaataagacagaacatcattgt

SEQ ID NO: 530168 - DNA, 33 bp, Homo sapien
aatcagactggaaataggacagaacatcattgt

SEQ ID NO: 530169 - DNA, 33 bp, Homo sapien
ggtatctccattctgacctatcaaaactcgctc

SEQ ID NO: 530170 - DNA, 33 bp, Homo sapien
ggtatctccattctgagctatcaaaactcgctc

SEQ ID NO: 530171 - DNA, 33 bp, Homo sapien
gtatataaatttcagaagacattcggacctcct

SEQ ID NO: 530172 - DNA, 33 bp, Homo sapien
gtatataaatttcagaggacattcggacctcct

SEQ ID NO: 530173 - DNA, 33 bp, Homo sapien
tctaagctaattcttacgcaagacaccggctga

SEQ ID NO: 530174 - DNA, 33 bp, Homo sapien
tctaagctaattcttatgcaagacaccggctga

SEQ ID NO: 530175 - DNA, 33 bp, Homo sapien
ttatcatccaaagtaacaaaagggaaggaataa

SEQ ID NO: 530176 - DNA, 33 bp, Homo sapien
ttatcatccaaagtaataaaagggaaggaataa

SEQ ID NO: 530177 - DNA, 33 bp, Homo sapien
tgttcattctgcaaaaattaattatgctgtaag

SEQ ID NO: 530178 - DNA, 33 bp, Homo sapien
tgttcattctgcaaaagttaattatgctgtaag

SEQ ID NO: 530179 - DNA, 33 bp, Homo sapien
ctgaacttagaaaaccaaatttctctcttctcg

SEQ ID NO: 530180 - DNA, 33 bp, Homo sapien
ctgaacttagaaaaccgaatttctctcttctcg

SEQ ID NO: 530181 - DNA, 33 bp, Homo sapien
agtcttcctggcttaaagaaccagagcacagtg

SEQ ID NO: 530182 - DNA, 33 bp, Homo sapien
agtcttcctggcttaaggaaccagagcacagtg

SEQ ID NO: 530183 - DNA, 33 bp, Homo sapien
ctttaaaaaatgcaataatggacagcaaggaac

SEQ ID NO: 530184 - DNA, 33 bp, Homo sapien
ctttaaaaaatgcaatgatggacagcaaggaac

SEQ ID NO: 530185 - DNA, 33 bp, Homo sapien
cactgcttatcctcaactacctagcctgtattt

SEQ ID NO: 530186 - DNA, 33 bp, Homo sapien
cactgcttatcctcaagtacctagcctgtattt

SEQ ID NO: 530187 - DNA, 33 bp, Homo sapien
ggggataccactctgacgaacagtcatgaatag

SEQ ID NO: 530188 - DNA, 33 bp, Homo sapien
ggggataccactctgatgaacagtcatgaatag

SEQ ID NO: 530189 - DNA, 33 bp, Homo sapien
tcgattctaggttacaggaataccaatctttac

SEQ ID NO: 530190 - DNA, 33 bp, Homo sapien
tcgattctaggttacatgaataccaatctttac

SEQ ID NO: 530191 - DNA, 33 bp, Homo sapien
tagaattaaccaactccagtgcaaatctgtttg

SEQ ID NO: 530192 - DNA, 33 bp, Homo sapien
tagaattaaccaactctagtgcaaatctgtttg

SEQ ID NO: 530193 - DNA, 33 bp, Homo sapien
catgttaggaacctacaatcaggaagtataaaa

SEQ ID NO: 530194 - DNA, 33 bp, Homo sapien
catgttaggaacctactatcaggaagtataaaa

SEQ ID NO: 530195 - DNA, 33 bp, Homo sapien
aactactgctggattacgtaagaaagtagtgtt

SEQ ID NO: 530196 - DNA, 33 bp, Homo sapien
aactactgctggattatgtaagaaagtagtgtt

SEQ ID NO: 530197 - DNA, 33 bp, Homo sapien
aaagagtagtttcagaaaatttttggtggccag

SEQ ID NO: 530198 - DNA, 33 bp, Homo sapien
aaagagtagtttcagataatttttggtggccag

SEQ ID NO: 530199 - DNA, 33 bp, Homo sapien
tagaagtataaatctaacctgagagtcaacact

SEQ ID NO: 530200 - DNA, 33 bp, Homo sapien
tagaagtataaatctagcctgagagtcaacact

SEQ ID NO: 530201 - DNA, 33 bp, Homo sapien
cactgacatatagaacactcaagccaaagaacc

SEQ ID NO: 530202 - DNA, 33 bp, Homo sapien
cactgacatatagaaccctcaagccaaagaacc

SEQ ID NO: 530203 - DNA, 33 bp, Homo sapien
cttggtgggtttggcactgagcctcaagacact

SEQ ID NO: 530204 - DNA, 33 bp, Homo sapien
cttggtgggtttggcattgagcctcaagacact

SEQ ID NO: 530205 - DNA, 33 bp, Homo sapien
cgaccacaccgtgtacaaggctcaaaatcgcca

SEQ ID NO: 530206 - DNA, 33 bp, Homo sapien
cgaccacaccgtgtaccaggctcaaaatcgcca

SEQ ID NO: 530207 - DNA, 33 bp, Homo sapien
ataataacatggaatccacagcatctattccaa

SEQ ID NO: 530208 - DNA, 33 bp, Homo sapien
ataataacatggaatctacagcatctattccaa

SEQ ID NO: 530209 - DNA, 33 bp, Homo sapien
ctttacagatggaatgaaaggtcttcatggttt

SEQ ID NO: 530210 - DNA, 33 bp, Homo sapien
ctttacagatggaatggaaggtcttcatggttt

SEQ ID NO: 530211 - DNA, 33 bp, Homo sapien
gcttccaagcacttaccaaaggtcattttgctt

SEQ ID NO: 530212 - DNA, 33 bp, Homo sapien
gcttccaagcacttactaaaggtcattttgctt

SEQ ID NO: 530213 - DNA, 33 bp, Homo sapien
agactcttgagctccaaactctgagtacatcca

SEQ ID NO: 530214 - DNA, 33 bp, Homo sapien
agactcttgagctccagactctgagtacatcca

SEQ ID NO: 530215 - DNA, 33 bp, Homo sapien
tcagaaagaaaatgagaatctcccactagttag

SEQ ID NO: 530216 - DNA, 33 bp, Homo sapien
tcagaaagaaaatgaggatctcccactagttag

SEQ ID NO: 530217 - DNA, 33 bp, Homo sapien
tgggttcagacaacaaagctatagaatgtgctt

SEQ ID NO: 530218 - DNA, 33 bp, Homo sapien
tgggttcagacaacaaggctatagaatgtgctt

SEQ ID NO: 530219 - DNA, 33 bp, Homo sapien
gactgaatatatcttcaaagactcatgagaggc

SEQ ID NO: 530220 - DNA, 33 bp, Homo sapien
gactgaatatatcttcgaagactcatgagaggc

SEQ ID NO: 530221 - DNA, 33 bp, Homo sapien
tgagaccgggcttggaccagctgaaaaggatta

SEQ ID NO: 530222 - DNA, 33 bp, Homo sapien
tgagaccgggcttggatcagctgaaaaggatta

SEQ ID NO: 530223 - DNA, 33 bp, Homo sapien
aagaccagatgaagaaaggcaatcaacaacttg

SEQ ID NO: 530224 - DNA, 33 bp, Homo sapien
aagaccagatgaagaagggcaatcaacaacttg

SEQ ID NO: 530225 - DNA, 33 bp, Homo sapien
aataaaaagacctttgcatccttgtcatctcct

SEQ ID NO: 530226 - DNA, 33 bp, Homo sapien
aataaaaagacctttgtatccttgtcatctcct

SEQ ID NO: 530227 - DNA, 33 bp, Homo sapien
cactgtgaaggctgaaatacttgcagggaagaa

SEQ ID NO: 530228 - DNA, 33 bp, Homo sapien
cactgtgaaggctgaagtacttgcagggaagaa

SEQ ID NO: 530229 - DNA, 33 bp, Homo sapien
tttcttggctctaaccaattatatcatctctgt

SEQ ID NO: 530230 - DNA, 33 bp, Homo sapien
tttcttggctctaacctattatatcatctctgt

SEQ ID NO: 530231 - DNA, 33 bp, Homo sapien
tcaaactactgtataactgcttaggcctagcca

SEQ ID NO: 530232 - DNA, 33 bp, Homo sapien
tcaaactactgtataagtgcttaggcctagcca

SEQ ID NO: 530233 - DNA, 33 bp, Homo sapien
tcaaatgcttaagatagaggacacatgactaaa

SEQ ID NO: 530234 - DNA, 33 bp, Homo sapien
tcaaatgcttaagatataggacacatgactaaa

SEQ ID NO: 530235 - DNA, 33 bp, Homo sapien
tatttcacaaacgtgcaaatttcacttttgaac

SEQ ID NO: 530236 - DNA, 33 bp, Homo sapien
tatttcacaaacgtgctaatttcacttttgaac

SEQ ID NO: 530237 - DNA, 33 bp, Homo sapien
tttaaaagatggaggccaccacaaatatataaa

SEQ ID NO: 530238 - DNA, 33 bp, Homo sapien
tttaaaagatggaggctaccacaaatatataaa

SEQ ID NO: 530239 - DNA, 33 bp, Homo sapien
tctggcattaccaatcggagagtcactttttat

SEQ ID NO: 530240 - DNA, 33 bp, Homo sapien
tctggcattaccaatctgagagtcactttttat

SEQ ID NO: 530241 - DNA, 33 bp, Homo sapien
cagctatcagagaaaaatgtccctataattcta

SEQ ID NO: 530242 - DNA, 33 bp, Homo sapien
cagctatcagagaaaagtgtccctataattcta

SEQ ID NO: 530243 - DNA, 33 bp, Homo sapien
taatacaaggagaagaagccatgcactttccaa

SEQ ID NO: 530244 - DNA, 33 bp, Homo sapien
taatacaaggagaagaggccatgcactttccaa

SEQ ID NO: 530245 - DNA, 33 bp, Homo sapien
agatggtacattttccgatttgggtcatcataa

SEQ ID NO: 530246 - DNA, 33 bp, Homo sapien
agatggtacattttcctatttgggtcatcataa

SEQ ID NO: 530247 - DNA, 33 bp, Homo sapien
acagatttgcggaagaccttttccaccattgga

SEQ ID NO: 530248 - DNA, 33 bp, Homo sapien
acagatttgcggaagatcttttccaccattgga

SEQ ID NO: 530249 - DNA, 33 bp, Homo sapien; identical to SEQ ID NO: 530247

SEQ ID NO: 530250 - DNA, 33 bp, Homo sapien; identical to SEQ ID NO: 530248

SEQ ID NO: 530251 - DNA, 33 bp, Homo sapien
aaagccctatacaaaacgaagcagcgctaatga

SEQ ID NO: 530252 - DNA, 33 bp, Homo sapien
aaagccctatacaaaatgaagcagcgctaatga

SEQ ID NO: 530253 - DNA, 33 bp, Homo sapien
actcaagaagaagtcaaagagtacaaggaagta

SEQ ID NO: 530254 - DNA, 33 bp, Homo sapien
actcaagaagaagtcagagagtacaaggaagta

SEQ ID NO: 530255 - DNA, 33 bp, Homo sapien
ggttagggagtagtcaatagtaagtcctccaac

SEQ ID NO: 530256 - DNA, 33 bp, Homo sapien
ggttagggagtagtcagtagtaagtcctccaac

SEQ ID NO: 530257 - DNA, 33 bp, Homo sapien
tctttcactgaggagcaagtcaaactagacaat

SEQ ID NO: 530258 - DNA, 33 bp, Homo sapien
tctttcactgaggagcgagtcaaactagacaat

SEQ ID NO: 530259 - DNA, 33 bp, Homo sapien
cagctaccgttgaaaccctttcagaggcagtgc

SEQ ID NO: 530260 - DNA, 33 bp, Homo sapien
cagctaccgttgaaactctttcagaggcagtgc

SEQ ID NO: 530261 - DNA, 33 bp, Homo sapien
gtaatatctaccaaaacgcaaatacacattccc

SEQ ID NO: 530262 - DNA, 33 bp, Homo sapien
gtaatatctaccaaaatgcaaatacacattccc

SEQ ID NO: 530263 - DNA, 33 bp, Homo sapien
tctccatcaggtcttcaatgaactcagcttccc

SEQ ID NO: 530264 - DNA, 33 bp, Homo sapien
tctccatcaggtcttcgatgaactcagcttccc

SEQ ID NO: 530265 - DNA, 33 bp, Homo sapien
gtgttcaccattatagcttgattatttgttttt

SEQ ID NO: 530266 - DNA, 33 bp, Homo sapien
gtgttcaccattataggttgattatttgttttt

SEQ ID NO: 530267 - DNA, 33 bp, Homo sapien
ccaaaagagagtcctaactatacacactactga

SEQ ID NO: 530268 - DNA, 33 bp, Homo sapien
ccaaaagagagtcctagctatacacactactga

SEQ ID NO: 530269 - DNA, 33 bp, Homo sapien
tgcctagcaccagacacgcttagttctgagacg

SEQ ID NO: 530270 - DNA, 33 bp, Homo sapien
tgcctagcaccagacatgcttagttctgagacg

SEQ ID NO: 530271 - DNA, 33 bp, Homo sapien
tcacatctgaaataaaaagatcctcatagcatc

SEQ ID NO: 530272 - DNA, 33 bp, Homo sapien
tcacatctgaaataaagagatcctcatagcatc

SEQ ID NO: 530273 - DNA, 33 bp, Homo sapien
cgacagagaggttgagaaatcagcctggaaaca

SEQ ID NO: 530274 - DNA, 33 bp, Homo sapien
cgacagagaggttgaggaatcagcctggaaaca

SEQ ID NO: 530275 - DNA, 33 bp, Homo sapien
aaatgcactggtttaccattctcaaaatattgt

SEQ ID NO: 530276 - DNA, 33 bp, Homo sapien
aaatgcactggtttactattctcaaaatattgt

SEQ ID NO: 530277 - DNA, 33 bp, Homo sapien
tttctagctgggaaccaccatttgcctgaagga

SEQ ID NO: 530278 - DNA, 33 bp, Homo sapien
tttctagctgggaaccgccatttgcctgaagga

SEQ ID NO: 530279 - DNA, 33 bp, Homo sapien
ggatgcccagtgcattgaaaatcgaaactctta

SEQ ID NO: 530280 - DNA, 33 bp, Homo sapien
ggatgcccagtgcatttaaaatcgaaactctta

SEQ ID NO: 530281 - DNA, 33 bp, Homo sapien
atgcactgggcatccaaaatataccggtgcagg

SEQ ID NO: 530282 - DNA, 33 bp, Homo sapien
atgcactgggcatccagaatataccggtgcagg

SEQ ID NO: 530283 - DNA, 33 bp, Homo sapien
ggttgggtggcaagaaacttcatgtagagccca

SEQ ID NO: 530284 - DNA, 33 bp, Homo sapien
ggttgggtggcaagaaccttcatgtagagccca

SEQ ID NO: 530285 - DNA, 33 bp, Homo sapien
tttgcacatgggggaccgcttattcggagacac

SEQ ID NO: 530286 - DNA, 33 bp, Homo sapien
tttgcacatgggggactgcttattcggagacac

SEQ ID NO: 530287 - DNA, 33 bp, Homo sapien
atactattagcagtcactctcgctttttttccg

SEQ ID NO: 530288 - DNA, 33 bp, Homo sapien
atactattagcagtcattctcgctttttttccg

SEQ ID NO: 530289 - DNA, 33 bp, Homo sapien
agtgcgtagatccagacagcctgaagaccaagt

SEQ ID NO: 530290 - DNA, 33 bp, Homo sapien
agtgcgtagatccagagagcctgaagaccaagt

SEQ ID NO: 530291 - DNA, 33 bp, Homo sapien
gaatggctattttcaacgctactacagtgtgca

SEQ ID NO: 530292 - DNA, 33 bp, Homo sapien
gaatggctattttcaatgctactacagtgtgca

SEQ ID NO: 530293 - DNA, 33 bp, Homo sapien
aaacagtcaatggcaaccatcacatgctactaa

SEQ ID NO: 530294 - DNA, 33 bp, Homo sapien
aaacagtcaatggcaatcatcacatgctactaa

SEQ ID NO: 530295 - DNA, 33 bp, Homo sapien
cttcctgtaattcctcacaaaacagtcaatggc

SEQ ID NO: 530296 - DNA, 33 bp, Homo sapien
cttcctgtaattcctcgcaaaacagtcaatggc

SEQ ID NO: 530297 - DNA, 33 bp, Homo sapien
ggaaatggaaatagtcacaaattcagggacttg

SEQ ID NO: 530298 - DNA, 33 bp, Homo sapien
ggaaatggaaatagtcgcaaattcagggacttg

SEQ ID NO: 530299 - DNA, 33 bp, Homo sapien
gcagcatatccttctaactggacaaaaatggct

SEQ ID NO: 530300 - DNA, 33 bp, Homo sapien
gcagcatatccttctagctggacaaaaatggct

SEQ ID NO: 530301 - DNA, 33 bp, Homo sapien
tatgtttttgattcaaatcctttccatttgccc

SEQ ID NO: 530302 - DNA, 33 bp, Homo sapien
tatgtttttgattcaagtcctttccatttgccc

SEQ ID NO: 530303 - DNA, 33 bp, Homo sapien
cttagctttatctgaaagtcaaactgccttctt

SEQ ID NO: 530304 - DNA, 33 bp, Homo sapien
cttagctttatctgaaggtcaaactgccttctt

SEQ ID NO: 530305 - DNA, 33 bp, Homo sapien
caattaaatgcttcccacaacaattcatcagcc

SEQ ID NO: 530306 - DNA, 33 bp, Homo sapien
caattaaatgcttcccgcaacaattcatcagcc

SEQ ID NO: 530307 - DNA, 33 bp, Homo sapien
cgggtttgtttaggaacgcaacaaaagattatt

SEQ ID NO: 530308 - DNA, 33 bp, Homo sapien
cgggtttgtttaggaatgcaacaaaagattatt

SEQ ID NO: 530309 - DNA, 33 bp, Homo sapien
actacctggctccaacaatggtttataagcatt

SEQ ID NO: 530310 - DNA, 33 bp, Homo sapien
actacctggctccaaccatggtttataagcatt

SEQ ID NO: 530311 - DNA, 33 bp, Homo sapien
acctccctgcctagaaataagtctctgccagtc

SEQ ID NO: 530312 - DNA, 33 bp, Homo sapien
acctccctgcctagaagtaagtctctgccagtc

SEQ ID NO: 530313 - DNA, 33 bp, Homo sapien
acatagtttacaaagactatctcagagggcaga

SEQ ID NO: 530314 - DNA, 33 bp, Homo sapien
acatagtttacaaagattatctcagagggcaga

SEQ ID NO: 530315 - DNA, 33 bp, Homo sapien
aggctgctaaaaagaaaatttgaaaatccacaa

SEQ ID NO: 530316 - DNA, 33 bp, Homo sapien
aggctgctaaaaagaatatttgaaaatccacaa

SEQ ID NO: 530317 - DNA, 33 bp, Homo sapien
atcaccacattgaaaaactttctggtttgtaat

SEQ ID NO: 530318 - DNA, 33 bp, Homo sapien
atcaccacattgaaaatctttctggtttgtaat

SEQ ID NO: 530319 - DNA, 33 bp, Homo sapien
agttactctgcagttacatagcagtccaagagt

SEQ ID NO: 530320 - DNA, 33 bp, Homo sapien
agttactctgcagttatatagcagtccaagagt

SEQ ID NO: 530321 - DNA, 33 bp, Homo sapien
agtaagcactcaaaaaatattagttgttgtttt

SEQ ID NO: 530322 - DNA, 33 bp, Homo sapien
agtaagcactcaaaaagtattagttgttgtttt

SEQ ID NO: 530323 - DNA, 33 bp, Homo sapien
agcagagtccatctccacactctatcaaaattg

SEQ ID NO: 530324 - DNA, 33 bp, Homo sapien
agcagagtccatctccgcactctatcaaaattg

SEQ ID NO: 530325 - DNA, 33 bp, Homo sapien
atatcaatgtgtaaaccagctaaactttttttg

SEQ ID NO: 530326 - DNA, 33 bp, Homo sapien
atatcaatgtgtaaacgagctaaactttttttg

SEQ ID NO: 530327 - DNA, 33 bp, Homo sapien
ttgcagggggcttcgacattgaaagggcaattt

SEQ ID NO: 530328 - DNA, 33 bp, Homo sapien
ttgcagggggcttcgatattgaaagggcaattt

SEQ ID NO: 530329 - DNA, 33 bp, Homo sapien
cttaaaggagaaaacactccttattcaccaaaa

SEQ ID NO: 530330 - DNA, 33 bp, Homo sapien
cttaaaggagaaaacattccttattcaccaaaa

SEQ ID NO: 530331 - DNA, 33 bp, Homo sapien
tttttgtatctttagtaaaggcaaagtttcacc

SEQ ID NO: 530332 - DNA, 33 bp, Homo sapien
tttttgtatctttagtgaaggcaaagtttcacc

SEQ ID NO: 530333 - DNA, 33 bp, Homo sapien
gcaaaatgcctctacaataaaaagtgtggcttt

SEQ ID NO: 530334 - DNA, 33 bp, Homo sapien
gcaaaatgcctctacagtaaaaagtgtggcttt

SEQ ID NO: 530335 - DNA, 33 bp, Homo sapien
atttttgcacttaggacacttaatgccaccatt

SEQ ID NO: 530336 - DNA, 33 bp, Homo sapien
atttttgcacttaggatacttaatgccaccatt

SEQ ID NO: 530337 - DNA, 33 bp, Homo sapien
aaatgggcaggagtccaaatgaaaagggcccga

SEQ ID NO: 530338 - DNA, 33 bp, Homo sapien
aaatgggcaggagtccgaatgaaaagggcccga

SEQ ID NO: 530339 - DNA, 33 bp, Homo sapien
gggctaagctaaggaaatggaacactattctaa

SEQ ID NO: 530340 - DNA, 33 bp, Homo sapien
gggctaagctaaggaactggaacactattctaa

SEQ ID NO: 530341 - DNA, 33 bp, Homo sapien
tgtagtgttcactttgaaattcactgccccttc

SEQ ID NO: 530342 - DNA, 33 bp, Homo sapien
tgtagtgttcactttgcaattcactgccccttc

SEQ ID NO: 530343 - DNA, 33 bp, Homo sapien
ccatctgctacatctcagaatcaacaggatgaa

SEQ ID NO: 530344 - DNA, 33 bp, Homo sapien
ccatctgctacatctccgaatcaacaggatgaa

SEQ ID NO: 530345 - DNA, 33 bp, Homo sapien
agaaaggcagtatttacagaagaagcatttaat

SEQ ID NO: 530346 - DNA, 33 bp, Homo sapien
agaaaggcagtatttatagaagaagcatttaat

SEQ ID NO: 530347 - DNA, 33 bp, Homo sapien
accctgcaacactctacgtaccagaaattttaa

SEQ ID NO: 530348 - DNA, 33 bp, Homo sapien
accctgcaacactctatgtaccagaaattttaa

SEQ ID NO: 530349 - DNA, 33 bp, Homo sapien
tagccataattcagccaaaactaaacttgagac

SEQ ID NO: 530350 - DNA, 33 bp, Homo sapien
tagccataattcagccgaaactaaacttgagac

SEQ ID NO: 530351 - DNA, 33 bp, Homo sapien
ggccgatgtttccagacagcttcatttcctgct

SEQ ID NO: 530352 - DNA, 33 bp, Homo sapien
ggccgatgtttccagagagcttcatttcctgct

SEQ ID NO: 530353 - DNA, 33 bp, Homo sapien
tattcatgttactaaccggatcccatgctcttc

SEQ ID NO: 530354 - DNA, 33 bp, Homo sapien
tattcatgttactaactggatcccatgctcttc

SEQ ID NO: 530355 - DNA, 33 bp, Homo sapien
agtattttgtctcactgaagcttttcaatgact

SEQ ID NO: 530356 - DNA, 33 bp, Homo sapien
agtattttgtctcacttaagcttttcaatgact

SEQ ID NO: 530357 - DNA, 33 bp, Homo sapien
acatagcaagccctcactaagtatttgtcaaat

SEQ ID NO: 530358 - DNA, 33 bp, Homo sapien
acatagcaagccctcagtaagtatttgtcaaat

SEQ ID NO: 530359 - DNA, 33 bp, Homo sapien
gactctctgaagggccagacagaacagaaactg

SEQ ID NO: 530360 - DNA, 33 bp, Homo sapien
gactctctgaagggccggacagaacagaaactg

SEQ ID NO: 530361 - DNA, 33 bp, Homo sapien
acaagcaaaaggaatcagaaagaagtctgaaca

SEQ ID NO: 530362 - DNA, 33 bp, Homo sapien
acaagcaaaaggaatccgaaagaagtctgaaca

SEQ ID NO: 530363 - DNA, 33 bp, Homo sapien
caccttagatgtgatagcagaatatgcctgagt

SEQ ID NO: 530364 - DNA, 33 bp, Homo sapien
caccttagatgtgatatcagaatatgcctgagt

SEQ ID NO: 530365 - DNA, 33 bp, Homo sapien
tgaaggaaggtaaagaagtcaattctggcggtg

SEQ ID NO: 530366 - DNA, 33 bp, Homo sapien
tgaaggaaggtaaagacgtcaattctggcggtg

SEQ ID NO: 530367 - DNA, 33 bp, Homo sapien
gaatggcagtgaagaacgtatattcagtgagct

SEQ ID NO: 530368 - DNA, 33 bp, Homo sapien
gaatggcagtgaagaatgtatattcagtgagct

SEQ ID NO: 530369 - DNA, 33 bp, Homo sapien
tgggccacatcttagacctaaagcttttttgga

SEQ ID NO: 530370 - DNA, 33 bp, Homo sapien
tgggccacatcttagagctaaagcttttttgga

SEQ ID NO: 530371 - DNA, 33 bp, Homo sapien
tataactatttcaaaactagtgttccattccca

SEQ ID NO: 530372 - DNA, 33 bp, Homo sapien
tataactatttcaaaattagtgttccattccca

SEQ ID NO: 530373 - DNA, 33 bp, Homo sapien
gacataagtggaccacaaaagagctcaggggca

SEQ ID NO: 530374 - DNA, 33 bp, Homo sapien
gacataagtggaccacgaaagagctcaggggca

SEQ ID NO: 530375 - DNA, 33 bp, Homo sapien
gttaaatgggtataagaagcctgttttccccat

SEQ ID NO: 530376 - DNA, 33 bp, Homo sapien
gttaaatgggtataaggagcctgttttccccat

SEQ ID NO: 530377 - DNA, 33 bp, Homo sapien
ctccttctcaagaggacgacgatgtgccagagg

SEQ ID NO: 530378 - DNA, 33 bp, Homo sapien
ctccttctcaagaggatgacgatgtgccagagg

SEQ ID NO: 530379 - DNA, 33 bp, Homo sapien
gctctgatttgagatgcaaaagatgtaaaatta

SEQ ID NO: 530380 - DNA, 33 bp, Homo sapien
gctctgatttgagatgtaaaagatgtaaaatta

SEQ ID NO: 530381 - DNA, 33 bp, Homo sapien
tacagtgtttatgtcaagtttgtatgctgtcag

SEQ ID NO: 530382 - DNA, 33 bp, Homo sapien
tacagtgtttatgtcaggtttgtatgctgtcag

SEQ ID NO: 530383 - DNA, 33 bp, Homo sapien
tacagtctatgaggaaacccattcaaggctagc

SEQ ID NO: 530384 - DNA, 33 bp, Homo sapien
tacagtctatgaggaagcccattcaaggctagc

SEQ ID NO: 530385 - DNA, 33 bp, Homo sapien
attatacttaaatggaaggcaaaattaacagga

SEQ ID NO: 530386 - DNA, 33 bp, Homo sapien
attatacttaaatggagggcaaaattaacagga

SEQ ID NO: 530387 - DNA, 33 bp, Homo sapien
tgtaactagtcatctaaaatcagattaaagcct

SEQ ID NO: 530388 - DNA, 33 bp, Homo sapien
tgtaactagtcatctagaatcagattaaagcct

SEQ ID NO: 530389 - DNA, 33 bp, Homo sapien
aatattcttatgcagactaagctgatgaaaaac

SEQ ID NO: 530390 - DNA, 33 bp, Homo sapien
aatattcttatgcagattaagctgatgaaaaac

SEQ ID NO: 530391 - DNA, 33 bp, Homo sapien
caaactatgtctcacactctcgtataatttcat

SEQ ID NO: 530392 - DNA, 33 bp, Homo sapien
caaactatgtctcacattctcgtataatttcat

SEQ ID NO: 530393 - DNA, 33 bp, Homo sapien
aaatctagatacaaaaaaggtaagatagaggta

SEQ ID NO: 530394 - DNA, 33 bp, Homo sapien
aaatctagatacaaaagaggtaagatagaggta

SEQ ID NO: 530395 - DNA, 33 bp, Homo sapien
ttgaagtggggaacacaggaaatttgagggaaa

SEQ ID NO: 530396 - DNA, 33 bp, Homo sapien
ttgaagtggggaacacgggaaatttgagggaaa

SEQ ID NO: 530397 - DNA, 33 bp, Homo sapien
ttgagggaaatgatacaaactccaaatggacac

SEQ ID NO: 530398 - DNA, 33 bp, Homo sapien
ttgagggaaatgatacgaactccaaatggacac

SEQ ID NO: 530399 - DNA, 33 bp, Homo sapien
ataatgtgtgtgaacaaatttctacaacctttc

SEQ ID NO: 530400 - DNA, 33 bp, Homo sapien
ataatgtgtgtgaacagatttctacaacctttc

SEQ ID NO: 530401 - DNA, 33 bp, Homo sapien
aggagctacaaagggaagtctttaatgtgatgt

SEQ ID NO: 530402 - DNA, 33 bp, Homo sapien
aggagctacaaagggatgtctttaatgtgatgt

SEQ ID NO: 530403 - DNA, 33 bp, Homo sapien
aagccgcaccaatcctcaagacatagctaaagc

SEQ ID NO: 530404 - DNA, 33 bp, Homo sapien
aagccgcaccaatccttaagacatagctaaagc

SEQ ID NO: 530405 - DNA, 33 bp, Homo sapien
tgaggttgctgcagacccacatggatttgccac

SEQ ID NO: 530406 - DNA, 33 bp, Homo sapien
tgaggttgctgcagactcacatggatttgccac

SEQ ID NO: 530407 - DNA, 33 bp, Homo sapien
ggcaccaggtttcctaagcacattggagatgat

SEQ ID NO: 530408 - DNA, 33 bp, Homo sapien
ggcaccaggtttcctaggcacattggagatgat

SEQ ID NO: 530409 - DNA, 33 bp, Homo sapien
gctttcttaaggcagagcacagaaaacactctg

SEQ ID NO: 530410 - DNA, 33 bp, Homo sapien
gctttcttaaggcagatcacagaaaacactctg

SEQ ID NO: 530411 - DNA, 33 bp, Homo sapien
ccaggacttgaagatacaaggacagaagaaaga

SEQ ID NO: 530412 - DNA, 33 bp, Homo sapien
ccaggacttgaagatataaggacagaagaaaga

SEQ ID NO: 530413 - DNA, 33 bp, Homo sapien
tgccaggagccgtggaaatacaaaattgagaac

SEQ ID NO: 530414 - DNA, 33 bp, Homo sapien
tgccaggagccgtggagatacaaaattgagaac

SEQ ID NO: 530415 - DNA, 33 bp, Homo sapien
cctgttgcctttcagaaggagttaatggatagc

SEQ ID NO: 530416 - DNA, 33 bp, Homo sapien
cctgttgcctttcagacggagttaatggatagc

SEQ ID NO: 530417 - DNA, 33 bp, Homo sapien
tgactaaagtctcacaatgaagtgtttattatc

SEQ ID NO: 530418 - DNA, 33 bp, Homo sapien
tgactaaagtctcacagtgaagtgtttattatc

SEQ ID NO: 530419 - DNA, 33 bp, Homo sapien
agaggaggtgagattcaaactgacctatatagg

SEQ ID NO: 530420 - DNA, 33 bp, Homo sapien
agaggaggtgagattcgaactgacctatatagg

SEQ ID NO: 530421 - DNA, 33 bp, Homo sapien
tcgctaaaaaatatgcagagtgtatgaagttgg

SEQ ID NO: 530422 - DNA, 33 bp, Homo sapien
tcgctaaaaaatatgcggagtgtatgaagttgg

SEQ ID NO: 530423 - DNA, 33 bp, Homo sapien
gatacttattgagtagcctaccaagtgctgtgg

SEQ ID NO: 530424 - DNA, 33 bp, Homo sapien
gatacttattgagtagtctaccaagtgctgtgg

SEQ ID NO: 530425 - DNA, 33 bp, Homo sapien
tgcaaagtgtaaatcacgaaatcagttttgtgg

SEQ ID NO: 530426 - DNA, 33 bp, Homo sapien
tgcaaagtgtaaatcatgaaatcagttttgtgg

SEQ ID NO: 530427 - DNA, 33 bp, Homo sapien
tgcatgagtgcacacacaaaagataacagcatt

SEQ ID NO: 530428 - DNA, 33 bp, Homo sapien
tgcatgagtgcacacataaaagataacagcatt

SEQ ID NO: 530429 - DNA, 33 bp, Homo sapien
gctgctcaggctcttacaagaccaaaatcaagg

SEQ ID NO: 530430 - DNA, 33 bp, Homo sapien
gctgctcaggctcttataagaccaaaatcaagg

SEQ ID NO: 530431 - DNA, 33 bp, Homo sapien
gtgaggatcttgggggccaacattctgcctccc

SEQ ID NO: 530432 - DNA, 33 bp, Homo sapien
gtgaggatcttgggggtcaacattctgcctccc

SEQ ID NO: 530433 - DNA, 33 bp, Homo sapien
acaacacagtacagagaagcaaacagttcacaa

SEQ ID NO: 530434 - DNA, 33 bp, Homo sapien
acaacacagtacagaggagcaaacagttcacaa

SEQ ID NO: 530435 - DNA, 33 bp, Homo sapien
gctaccagtgcacagaagaaggtgttaaggaag

SEQ ID NO: 530436 - DNA, 33 bp, Homo sapien
gctaccagtgcacagaggaaggtgttaaggaag

SEQ ID NO: 530437 - DNA, 33 bp, Homo sapien
gcttgtcacacagttcacatgaagacttcctta

SEQ ID NO: 530438 - DNA, 33 bp, Homo sapien
gcttgtcacacagttcccatgaagacttcctta

SEQ ID NO: 530439 - DNA, 33 bp, Homo sapien
atagggagaatgctcactaatggtgaacatctc

SEQ ID NO: 530440 - DNA, 33 bp, Homo sapien
atagggagaatgctcattaatggtgaacatctc

SEQ ID NO: 530441 - DNA, 33 bp, Homo sapien
tggttccaggacagcgaatggataccaaaatct

SEQ ID NO: 530442 - DNA, 33 bp, Homo sapien
tggttccaggacagcgcatggataccaaaatct

SEQ ID NO: 530443 - DNA, 33 bp, Homo sapien
tctccgcagacctttacgtggctttgctccttc

SEQ ID NO: 530444 - DNA, 33 bp, Homo sapien
tctccgcagacctttatgtggctttgctccttc

SEQ ID NO: 530445 - DNA, 33 bp, Homo sapien
tgcctcatgtcaatccaactccttccaaccaca

SEQ ID NO: 530446 - DNA, 33 bp, Homo sapien
tgcctcatgtcaatccgactccttccaaccaca

SEQ ID NO: 530447 - DNA, 33 bp, Homo sapien
tgaaaagaagatcaaaacagagaaaagatgtgg

SEQ ID NO: 530448 - DNA, 33 bp, Homo sapien
tgaaaagaagatcaaatcagagaaaagatgtgg

SEQ ID NO: 530449 - DNA, 33 bp, Homo sapien
catggtctttagcatgacataccacatcttttc

SEQ ID NO: 530450 - DNA, 33 bp, Homo sapien
catggtctttagcatggcataccacatcttttc

SEQ ID NO: 530451 - DNA, 33 bp, Homo sapien
gccctaggaagaggtaacaagcgctggcaaaat

SEQ ID NO: 530452 - DNA, 33 bp, Homo sapien
gccctaggaagaggtaccaagcgctggcaaaat

SEQ ID NO: 530453 - DNA, 33 bp, Homo sapien
agaattctgcctgaaacgaaggttaattataac

SEQ ID NO: 530454 - DNA, 33 bp, Homo sapien
agaattctgcctgaaatgaaggttaattataac

SEQ ID NO: 530455 - DNA, 33 bp, Homo sapien
tgtgtaggacagccacagaaatggccaaacaca

SEQ ID NO: 530456 - DNA, 33 bp, Homo sapien
tgtgtaggacagccacggaaatggccaaacaca

SEQ ID NO: 530457 - DNA, 33 bp, Homo sapien
ttagctcccatttataagagagaacatgcatta

SEQ ID NO: 530458 - DNA, 33 bp, Homo sapien
ttagctcccatttataggagagaacatgcatta

SEQ ID NO: 530459 - DNA, 33 bp, Homo sapien
acaatttccaacacaggaactcctgacccctcg

SEQ ID NO: 530460 - DNA, 33 bp, Homo sapien
acaatttccaacacagtaactcctgacccctcg

SEQ ID NO: 530461 - DNA, 33 bp, Homo sapien
ggttgctccttcccccaaggatctcaggacatg

SEQ ID NO: 530462 - DNA, 33 bp, Homo sapien
ggttgctccttcccccgaggatctcaggacatg

SEQ ID NO: 530463 - DNA, 33 bp, Homo sapien
ataaatgcgatgttgaacaaaataattaacatc

SEQ ID NO: 530464 - DNA, 33 bp, Homo sapien
ataaatgcgatgttgagcaaaataattaacatc

SEQ ID NO: 530465 - DNA, 33 bp, Homo sapien
tgaaaaactgagtatcaaaccataataaagaat

SEQ ID NO: 530466 - DNA, 33 bp, Homo sapien
tgaaaaactgagtatcgaaccataataaagaat

SEQ ID NO: 530467 - DNA, 33 bp, Homo sapien
attcaggttcaaaaaaaaagctcacattatttt

SEQ ID NO: 530468 - DNA, 33 bp, Homo sapien
attcaggttcaaaaaacaagctcacattatttt

SEQ ID NO: 530469 - DNA, 33 bp, Homo sapien
cccaaagagaaatcaaagtgcaattactggaag

SEQ ID NO: 530470 - DNA, 33 bp, Homo sapien
cccaaagagaaatcaaggtgcaattactggaag

SEQ ID NO: 530471 - DNA, 33 bp, Homo sapien
cagaatcaagccttaaggaacggacataattcc

SEQ ID NO: 530472 - DNA, 33 bp, Homo sapien
cagaatcaagccttaatgaacggacataattcc

SEQ ID NO: 530473 - DNA, 33 bp, Homo sapien
gtaataaagaccaaaacgtaacaggtagtatgt

SEQ ID NO: 530474 - DNA, 33 bp, Homo sapien
gtaataaagaccaaaatgtaacaggtagtatgt

SEQ ID NO: 530475 - DNA, 33 bp, Homo sapien
aaactcaagtccagtgaagtgaatagatccact

SEQ ID NO: 530476 - DNA, 33 bp, Homo sapien
aaactcaagtccagtggagtgaatagatccact

SEQ ID NO: 530477 - DNA, 33 bp, Homo sapien
caggtggaccaggggaaagtagtacttgggaag

SEQ ID NO: 530478 - DNA, 33 bp, Homo sapien
caggtggaccaggggagagtagtacttgggaag

SEQ ID NO: 530479 - DNA, 33 bp, Homo sapien
tatgagcccaaataaccgaagcaatactaagca

SEQ ID NO: 530480 - DNA, 33 bp, Homo sapien
tatgagcccaaataactgaagcaatactaagca

SEQ ID NO: 530481 - DNA, 33 bp, Homo sapien
aaaagacataatgtgactacccagtagtgactt

SEQ ID NO: 530482 - DNA, 33 bp, Homo sapien
aaaagacataatgtgattacccagtagtgactt

SEQ ID NO: 530483 - DNA, 33 bp, Homo sapien
ctggcaggactggctacgtaatttatagagccc

SEQ ID NO: 530484 - DNA, 33 bp, Homo sapien
ctggcaggactggctatgtaatttatagagccc

SEQ ID NO: 530485 - DNA, 33 bp, Homo sapien
gagccaagctgagggcaacttagagcagctgtg

SEQ ID NO: 530486 - DNA, 33 bp, Homo sapien
gagccaagctgagggccacttagagcagctgtg

SEQ ID NO: 530487 - DNA, 33 bp, Homo sapien
tctgtgtgttggataaactccctgcctttaatg

SEQ ID NO: 530488 - DNA, 33 bp, Homo sapien
tctgtgtgttggataagctccctgcctttaatg

SEQ ID NO: 530489 - DNA, 33 bp, Homo sapien
gtaagggaacagtcaactcagtatcaaacttga

SEQ ID NO: 530490 - DNA, 33 bp, Homo sapien
gtaagggaacagtcaattcagtatcaaacttga

SEQ ID NO: 530491 - DNA, 33 bp, Homo sapien
agacgaagcatccaaacatatcactgtgatttt

SEQ ID NO: 530492 - DNA, 33 bp, Homo sapien
agacgaagcatccaaatatatcactgtgatttt

SEQ ID NO: 530493 - DNA, 33 bp, Homo sapien
agatgtatctatttgacgtcaagcaattaaaga

SEQ ID NO: 530494 - DNA, 33 bp, Homo sapien
agatgtatctatttgatgtcaagcaattaaaga

SEQ ID NO: 530495 - DNA, 33 bp, Homo sapien
ccaagtgttaagccgagacttaaaaataaattt

SEQ ID NO: 530496 - DNA, 33 bp, Homo sapien
ccaagtgttaagccgatacttaaaaataaattt

SEQ ID NO: 530497 - DNA, 33 bp, Homo sapien
cagagtgaggcatcagaataagtcttcagttat

SEQ ID NO: 530498 - DNA, 33 bp, Homo sapien
cagagtgaggcatcagcataagtcttcagttat

SEQ ID NO: 530499 - DNA, 33 bp, Homo sapien
ccaatgctattaaacactgggtggcacctttaa

SEQ ID NO: 530500 - DNA, 33 bp, Homo sapien
ccaatgctattaaacattgggtggcacctttaa

SEQ ID NO: 530501 - DNA, 33 bp, Homo sapien
gtaatttatactggaaaacctcactttatcact

SEQ ID NO: 530502 - DNA, 33 bp, Homo sapien
gtaatttatactggaacacctcactttatcact

SEQ ID NO: 530503 - DNA, 33 bp, Homo sapien
acatgaaaggatgatcaacatcattagccatca

SEQ ID NO: 530504 - DNA, 33 bp, Homo sapien
acatgaaaggatgatcgacatcattagccatca

SEQ ID NO: 530505 - DNA, 33 bp, Homo sapien
attagcatcattcaggcaccatcctcaacacca

SEQ ID NO: 530506 - DNA, 33 bp, Homo sapien
attagcatcattcagggaccatcctcaacacca

SEQ ID NO: 530507 - DNA, 33 bp, Homo sapien
catgttttcataaatcacataaatcgctttcct

SEQ ID NO: 530508 - DNA, 33 bp, Homo sapien
catgttttcataaatcgcataaatcgctttcct

SEQ ID NO: 530509 - DNA, 33 bp, Homo sapien
aacagaacaaataagccgagacttcaatcatga

SEQ ID NO: 530510 - DNA, 33 bp, Homo sapien
aacagaacaaataagctgagacttcaatcatga

SEQ ID NO: 530511 - DNA, 33 bp, Homo sapien
ctgcttcaagatcttcaaaggttttccattgca

SEQ ID NO: 530512 - DNA, 33 bp, Homo sapien
ctgcttcaagatcttcgaaggttttccattgca

SEQ ID NO: 530513 - DNA, 33 bp, Homo sapien
tccttccttcctctccacaggtaatcactaata

SEQ ID NO: 530514 - DNA, 33 bp, Homo sapien
tccttccttcctctccgcaggtaatcactaata

SEQ ID NO: 530515 - DNA, 33 bp, Homo sapien
gcaggccttttggcacacttgactttaaccttt

SEQ ID NO: 530516 - DNA, 33 bp, Homo sapien
gcaggccttttggcacgcttgactttaaccttt

SEQ ID NO: 530517 - DNA, 33 bp, Homo sapien
gctgtggaagctctgaacttttagacttaacac

SEQ ID NO: 530518 - DNA, 33 bp, Homo sapien
gctgtggaagctctgaccttttagacttaacac

SEQ ID NO: 530519 - DNA, 33 bp, Homo sapien
tgggtatcaccttaaacacttcactttctttgg

SEQ ID NO: 530520 - DNA, 33 bp, Homo sapien
tgggtatcaccttaaagacttcactttctttgg

SEQ ID NO: 530521 - DNA, 33 bp, Homo sapien
ggtgtagaattgtaaaattatcatagaggaagc

SEQ ID NO: 530522 - DNA, 33 bp, Homo sapien
ggtgtagaattgtaaatttatcatagaggaagc

SEQ ID NO: 530523 - DNA, 33 bp, Homo sapien
gcagctatctcaatcaaatgctgatccttccca

SEQ ID NO: 530524 - DNA, 33 bp, Homo sapien
gcagctatctcaatcacatgctgatccttccca

SEQ ID NO: 530525 - DNA, 33 bp, Homo sapien
tcaagcacctggaataaccagctaattagacca

SEQ ID NO: 530526 - DNA, 33 bp, Homo sapien
tcaagcacctggaatagccagctaattagacca

SEQ ID NO: 530527 - DNA, 33 bp, Homo sapien
caatttgtttttgaaacgccatctgaaggagta

SEQ ID NO: 530528 - DNA, 33 bp, Homo sapien
caatttgtttttgaaatgccatctgaaggagta

SEQ ID NO: 530529 - DNA, 33 bp, Homo sapien
ataagataacctttctgaagtaaggcagaggga

SEQ ID NO: 530530 - DNA, 33 bp, Homo sapien
ataagataacctttcttaagtaaggcagaggga

SEQ ID NO: 530531 - DNA, 33 bp, Homo sapien
ttccaggagacctataaaaaatgcccatagcaa

SEQ ID NO: 530532 - DNA, 33 bp, Homo sapien
ttccaggagacctatacaaaatgcccatagcaa

SEQ ID NO: 530533 - DNA, 33 bp, Homo sapien
acatgaataaatgaggaaaaggaaatgtattag

SEQ ID NO: 530534 - DNA, 33 bp, Homo sapien
acatgaataaatgagggaaaggaaatgtattag

SEQ ID NO: 530535 - DNA, 33 bp, Homo sapien
tacctcctgaagaaaaaatacactgtctgaagc

SEQ ID NO: 530536 - DNA, 33 bp, Homo sapien
tacctcctgaagaaaacatacactgtctgaagc

SEQ ID NO: 530537 - DNA, 33 bp, Homo sapien
tacaagcaaaaagaaaggcgtatacatgtttat

SEQ ID NO: 530538 - DNA, 33 bp, Homo sapien
tacaagcaaaaagaaatgcgtatacatgtttat

SEQ ID NO: 530539 - DNA, 33 bp, Homo sapien
atattttggtgatagcagcacctcacgtctagg

SEQ ID NO: 530540 - DNA, 33 bp, Homo sapien
atattttggtgatagcggcacctcacgtctagg

SEQ ID NO: 530541 - DNA, 33 bp, Homo sapien
tggaggaccaggggagccaggatgaatgaagaa

SEQ ID NO: 530542 - DNA, 33 bp, Homo sapien
tggaggaccaggggagtcaggatgaatgaagaa

SEQ ID NO: 530543 - DNA, 33 bp, Homo sapien
gcactttactcttaccacaactgtttgctggga

SEQ ID NO: 530544 - DNA, 33 bp, Homo sapien
gcactttactcttaccgcaactgtttgctggga

SEQ ID NO: 530545 - DNA, 33 bp, Homo sapien
aactttggtgtccacaagaatcaccatgagtgt

SEQ ID NO: 530546 - DNA, 33 bp, Homo sapien
aactttggtgtccacaggaatcaccatgagtgt

SEQ ID NO: 530547 - DNA, 33 bp, Homo sapien
atgaatatggatgcaaacaaacctaaataaaat

SEQ ID NO: 530548 - DNA, 33 bp, Homo sapien
atgaatatggatgcaagcaaacctaaataaaat

SEQ ID NO: 530549 - DNA, 33 bp, Homo sapien
tagtgcctagttcacaatccaaatacaaatcta

SEQ ID NO: 530550 - DNA, 33 bp, Homo sapien
tagtgcctagttcacactccaaatacaaatcta

SEQ ID NO: 530551 - DNA, 33 bp, Homo sapien
gggtggacctgaataaagagttaggaagaaaac

SEQ ID NO: 530552 - DNA, 33 bp, Homo sapien
gggtggacctgaataatgagttaggaagaaaac

SEQ ID NO: 530553 - DNA, 33 bp, Homo sapien
taaattgtttgttaaactgttaaaattactgag

SEQ ID NO: 530554 - DNA, 33 bp, Homo sapien
taaattgtttgttaaagtgttaaaattactgag

SEQ ID NO: 530555 - DNA, 33 bp, Homo sapien
taactagtttttctcacgtgaaagactggcaag

SEQ ID NO: 530556 - DNA, 33 bp, Homo sapien
taactagtttttctcatgtgaaagactggcaag

SEQ ID NO: 530557 - DNA, 33 bp, Homo sapien
tttggtttcctactgcaagggctttaaatcatg

SEQ ID NO: 530558 - DNA, 33 bp, Homo sapien
tttggtttcctactgcgagggctttaaatcatg

SEQ ID NO: 530559 - DNA, 33 bp, Homo sapien
cacattcattacagtaaacaagcattcagcatt

SEQ ID NO: 530560 - DNA, 33 bp, Homo sapien
cacattcattacagtatacaagcattcagcatt

SEQ ID NO: 530561 - DNA, 33 bp, Homo sapien
gctgaacattggtggaaaaaattacacattgac

SEQ ID NO: 530562 - DNA, 33 bp, Homo sapien
gctgaacattggtggagaaaattacacattgac

SEQ ID NO: 530563 - DNA, 33 bp, Homo sapien
gagaaactggtgggataaatgagattagtagtt

SEQ ID NO: 530564 - DNA, 33 bp, Homo sapien
gagaaactggtgggatgaatgagattagtagtt

SEQ ID NO: 530565 - DNA, 33 bp, Homo sapien
caacctgcttcttgaacggatttgtacctgact

SEQ ID NO: 530566 - DNA, 33 bp, Homo sapien
caacctgcttcttgaatggatttgtacctgact

SEQ ID NO: 530567 - DNA, 33 bp, Homo sapien
agaagaagaagaagaaaaatttgactatcactg

SEQ ID NO: 530568 - DNA, 33 bp, Homo sapien
agaagaagaagaagaagaatttgactatcactg

SEQ ID NO: 530569 - DNA, 33 bp, Homo sapien
tagagtaaaagtccaaatgcaaacaatggccta

SEQ ID NO: 530570 - DNA, 33 bp, Homo sapien
tagagtaaaagtccaagtgcaaacaatggccta

SEQ ID NO: 530571 - DNA, 33 bp, Homo sapien
aaaaacactagaacgcactagagatgacagaac

SEQ ID NO: 530572 - DNA, 33 bp, Homo sapien
aaaaacactagaacgcgctagagatgacagaac

SEQ ID NO: 530573 - DNA, 33 bp, Homo sapien
taccatatatgaccccaaaacatatgattaagt

SEQ ID NO: 530574 - DNA, 33 bp, Homo sapien
taccatatatgacccccaaacatatgattaagt

SEQ ID NO: 530575 - DNA, 33 bp, Homo sapien
gacccctttccagcaagattctacttttggagt

SEQ ID NO: 530576 - DNA, 33 bp, Homo sapien
gacccctttccagcaatattctacttttggagt

SEQ ID NO: 530577 - DNA, 33 bp, Homo sapien
tttgctgataaaataaaacagaatcggctgggc

SEQ ID NO: 530578 - DNA, 33 bp, Homo sapien
tttgctgataaaataatacagaatcggctgggc

SEQ ID NO: 530579 - DNA, 33 bp, Homo sapien
gcatactgggttcctcagaaaagtggaagacat

SEQ ID NO: 530580 - DNA, 33 bp, Homo sapien
gcatactgggttcctcggaaaagtggaagacat

SEQ ID NO: 530581 - DNA, 33 bp, Homo sapien
atttcttcatatgtaaaatgggataatagaacc

SEQ ID NO: 530582 - DNA, 33 bp, Homo sapien
atttcttcatatgtaagatgggataatagaacc

SEQ ID NO: 530583 - DNA, 33 bp, Homo sapien
ttgaggtttctactcagcccagtactttattct

SEQ ID NO: 530584 - DNA, 33 bp, Homo sapien
ttgaggtttctactcatcccagtactttattct

SEQ ID NO: 530585 - DNA, 33 bp, Homo sapien
caaggaattgagaaaaagtcattccctggattt

SEQ ID NO: 530586 - DNA, 33 bp, Homo sapien
caaggaattgagaaaaggtcattccctggattt

SEQ ID NO: 530587 - DNA, 33 bp, Homo sapien
gctctgcagtacccaacggctgaatcaatggag

SEQ ID NO: 530588 - DNA, 33 bp, Homo sapien
gctctgcagtacccaatggctgaatcaatggag

SEQ ID NO: 530589 - DNA, 33 bp, Homo sapien
tgaagattttgctaacagggtgatataactgga

SEQ ID NO: 530590 - DNA, 33 bp, Homo sapien
tgaagattttgctaacggggtgatataactgga

SEQ ID NO: 530591 - DNA, 33 bp, Homo sapien
atactctaagttgtaacaggtcaataaacagct

SEQ ID NO: 530592 - DNA, 33 bp, Homo sapien
atactctaagttgtaataggtcaataaacagct

SEQ ID NO: 530593 - DNA, 33 bp, Homo sapien
acaggttttgaactgaatagccagagaaatctc

SEQ ID NO: 530594 - DNA, 33 bp, Homo sapien
acaggttttgaactgagtagccagagaaatctc

SEQ ID NO: 530595 - DNA, 33 bp, Homo sapien
gactttctctgagtgacatggttatgcgatgta

SEQ ID NO: 530596 - DNA, 33 bp, Homo sapien
gactttctctgagtgatatggttatgcgatgta

SEQ ID NO: 530597 - DNA, 33 bp, Homo sapien
aattgccacttagtgaactctggctttctaaaa

SEQ ID NO: 530598 - DNA, 33 bp, Homo sapien
aattgccacttagtgagctctggctttctaaaa

SEQ ID NO: 530599 - DNA, 33 bp, Homo sapien
acagtgtcagagttaaaaattgtgtgcaggcct

SEQ ID NO: 530600 - DNA, 33 bp, Homo sapien
acagtgtcagagttaacaattgtgtgcaggcct

SEQ ID NO: 530601 - DNA, 33 bp, Homo sapien
gccttcaaaatccagcacaaaactgcaactccc

SEQ ID NO: 530602 - DNA, 33 bp, Homo sapien
gccttcaaaatccagcgcaaaactgcaactccc

SEQ ID NO: 530603 - DNA, 33 bp, Homo sapien
gttgtgaaccatacaacctctgctgtggctact

SEQ ID NO: 530604 - DNA, 33 bp, Homo sapien
gttgtgaaccatacaatctctgctgtggctact

SEQ ID NO: 530605 - DNA, 33 bp, Homo sapien
tgacatccaggatcagaaattacaaatccaaat

SEQ ID NO: 530606 - DNA, 33 bp, Homo sapien
tgacatccaggatcaggaattacaaatccaaat

SEQ ID NO: 530607 - DNA, 33 bp, Homo sapien
gtgggctttgaatgaacaggccactgttggttt

SEQ ID NO: 530608 - DNA, 33 bp, Homo sapien
gtgggctttgaatgaataggccactgttggttt

SEQ ID NO: 530609 - DNA, 33 bp, Homo sapien
ttataattgccgtaataaagcatgatccgtatg

SEQ ID NO: 530610 - DNA, 33 bp, Homo sapien
ttataattgccgtaatgaagcatgatccgtatg

SEQ ID NO: 530611 - DNA, 33 bp, Homo sapien
ggaacacatatttcaccgtagctctttaatttg

SEQ ID NO: 530612 - DNA, 33 bp, Homo sapien
ggaacacatatttcactgtagctctttaatttg

SEQ ID NO: 530613 - DNA, 33 bp, Homo sapien
aaaaagctagttttacacatactgccatattct

SEQ ID NO: 530614 - DNA, 33 bp, Homo sapien
aaaaagctagttttacgcatactgccatattct

SEQ ID NO: 530615 - DNA, 33 bp, Homo sapien
cagacactgtttaataaggctcaattagtttat

SEQ ID NO: 530616 - DNA, 33 bp, Homo sapien
cagacactgtttaatacggctcaattagtttat

SEQ ID NO: 530617 - DNA, 33 bp, Homo sapien
cagtaaagttaggtgccgactgagttctctgaa

SEQ ID NO: 530618 - DNA, 33 bp, Homo sapien
cagtaaagttaggtgctgactgagttctctgaa

SEQ ID NO: 530619 - DNA, 33 bp, Homo sapien
gatgccagaccccataagatcagaaaagaaaac

SEQ ID NO: 530620 - DNA, 33 bp, Homo sapien
gatgccagaccccataggatcagaaaagaaaac

SEQ ID NO: 530621 - DNA, 33 bp, Homo sapien
ttatcatgttagcatcagacccttccttgtgag

SEQ ID NO: 530622 - DNA, 33 bp, Homo sapien
ttatcatgttagcatcggacccttccttgtgag

SEQ ID NO: 530623 - DNA, 33 bp, Homo sapien
ttttaatattgtttaacgggtgcacagtttaca

SEQ ID NO: 530624 - DNA, 33 bp, Homo sapien
ttttaatattgtttaatgggtgcacagtttaca

SEQ ID NO: 530625 - DNA, 33 bp, Homo sapien
aaaacctgctgcgtgaagaatctgtgcccagtt

SEQ ID NO: 530626 - DNA, 33 bp, Homo sapien
aaaacctgctgcgtgaggaatctgtgcccagtt

SEQ ID NO: 530627 - DNA, 33 bp, Homo sapien
tctgttgtcatgaagaacatcacttccctgaca

SEQ ID NO: 530628 - DNA, 33 bp, Homo sapien
tctgttgtcatgaagagcatcacttccctgaca

SEQ ID NO: 530629 - DNA, 33 bp, Homo sapien
gaattaagggaaagaaccaacatttattggagt

SEQ ID NO: 530630 - DNA, 33 bp, Homo sapien
gaattaagggaaagaatcaacatttattggagt

SEQ ID NO: 530631 - DNA, 33 bp, Homo sapien
acagagctgtttatagaaggagactagctaata

SEQ ID NO: 530632 - DNA, 33 bp, Homo sapien
acagagctgtttataggaggagactagctaata

SEQ ID NO: 530633 - DNA, 33 bp, Homo sapien
agggacatgaatttaaacttggaaggataatgt

SEQ ID NO: 530634 - DNA, 33 bp, Homo sapien
agggacatgaatttaagcttggaaggataatgt

SEQ ID NO: 530635 - DNA, 33 bp, Homo sapien
aggaaaggaagaaatgacaactctaaattgtag

SEQ ID NO: 530636 - DNA, 33 bp, Homo sapien
aggaaaggaagaaatggcaactctaaattgtag

SEQ ID NO: 530637 - DNA, 33 bp, Homo sapien
taaaagtaaaggcaaacagattattgtggaagc

SEQ ID NO: 530638 - DNA, 33 bp, Homo sapien
taaaagtaaaggcaaatagattattgtggaagc

SEQ ID NO: 530639 - DNA, 33 bp, Homo sapien
tttttcttaaattaagccattgtttttcatgga

SEQ ID NO: 530640 - DNA, 33 bp, Homo sapien
tttttcttaaattaagtcattgtttttcatgga

SEQ ID NO: 530641 - DNA, 33 bp, Homo sapien
atagagatatagcaccagacaaagggatgtcaa

SEQ ID NO: 530642 - DNA, 33 bp, Homo sapien
atagagatatagcaccggacaaagggatgtcaa

SEQ ID NO: 530643 - DNA, 33 bp, Homo sapien
gctaacaagaacaggacgacagtcaagtcagta

SEQ ID NO: 530644 - DNA, 33 bp, Homo sapien
gctaacaagaacaggatgacagtcaagtcagta

SEQ ID NO: 530645 - DNA, 33 bp, Homo sapien
ggattatttaatgagtaaagaggctttctagtt

SEQ ID NO: 530646 - DNA, 33 bp, Homo sapien
ggattatttaatgagtgaagaggctttctagtt

SEQ ID NO: 530647 - DNA, 33 bp, Homo sapien
gacttcattgctatacccatgttacttataatc

SEQ ID NO: 530648 - DNA, 33 bp, Homo sapien
gacttcattgctatacgcatgttacttataatc

SEQ ID NO: 530649 - DNA, 33 bp, Homo sapien
gcaacaaatagagtccccttcaacagactttca

SEQ ID NO: 530650 - DNA, 33 bp, Homo sapien
gcaacaaatagagtcctcttcaacagactttca

SEQ ID NO: 530651 - DNA, 33 bp, Homo sapien
cgggtagcttgtgtcaccagtatattgccagtg

SEQ ID NO: 530652 - DNA, 33 bp, Homo sapien
cgggtagcttgtgtcatcagtatattgccagtg

SEQ ID NO: 530653 - DNA, 33 bp, Homo sapien
gaaaagaaatgcaagccagcggaggatgctgaa

SEQ ID NO: 530654 - DNA, 33 bp, Homo sapien
gaaaagaaatgcaagctagcggaggatgctgaa

SEQ ID NO: 530655 - DNA, 33 bp, Homo sapien
actttaatacagatccaggacttaattccccaa

SEQ ID NO: 530656 - DNA, 33 bp, Homo sapien
actttaatacagatcccggacttaattccccaa

SEQ ID NO: 530657 - DNA, 33 bp, Homo sapien
tgcagcaagttcatacaatacaggaatttgttc

SEQ ID NO: 530658 - DNA, 33 bp, Homo sapien
tgcagcaagttcatacgatacaggaatttgttc

SEQ ID NO: 530659 - DNA, 33 bp, Homo sapien; identical to SEQ ID NO: 530657

SEQ ID NO: 530660 - DNA, 33 bp, Homo sapien; identical to SEQ ID NO: 530658

SEQ ID NO: 530661 - DNA, 33 bp, Homo sapien
cacacttctgtcaaacggaaaccttataagatt

SEQ ID NO: 530662 - DNA, 33 bp, Homo sapien
cacacttctgtcaaactgaaaccttataagatt

SEQ ID NO: 530663 - DNA, 33 bp, Homo sapien; identical to SEQ ID NO: 530661

SEQ ID NO: 530664 - DNA, 33 bp, Homo sapien; identical to SEQ ID NO: 530662

SEQ ID NO: 530665 - DNA, 33 bp, Homo sapien
tgttcctaattgtccccatgctgccagatctgg

SEQ ID NO: 530666 - DNA, 33 bp, Homo sapien
tgttcctaattgtccctatgctgccagatctgg

SEQ ID NO: 530667 - DNA, 33 bp, Homo sapien
tgagacagagggaagcagactgagagttcttga

SEQ ID NO: 530668 - DNA, 33 bp, Homo sapien
tgagacagagggaagccgactgagagttcttga

SEQ ID NO: 530669 - DNA, 33 bp, Homo sapien
aattccctgagttatacaagtctccagcgatgt

SEQ ID NO: 530670 - DNA, 33 bp, Homo sapien
aattccctgagttatagaagtctccagcgatgt

SEQ ID NO: 530671 - DNA, 33 bp, Homo sapien
caaataaatgttacacagcagttggtagcttta

SEQ ID NO: 530672 - DNA, 33 bp, Homo sapien
caaataaatgttacacggcagttggtagcttta

SEQ ID NO: 530673 - DNA, 33 bp, Homo sapien
tccttttagatatgcaaacattcaattaaagtg

SEQ ID NO: 530674 - DNA, 33 bp, Homo sapien
tccttttagatatgcatacattcaattaaagtg

SEQ ID NO: 530675 - DNA, 33 bp, Homo sapien
aggtcaatgacctggccgaaggtgttccgtact

SEQ ID NO: 530676 - DNA, 33 bp, Homo sapien
aggtcaatgacctggctgaaggtgttccgtact

SEQ ID NO: 530677 - DNA, 33 bp, Homo sapien
tgtatttgagcaaccactggatcagaatcaagt

SEQ ID NO: 530678 - DNA, 33 bp, Homo sapien
tgtatttgagcaaccattggatcagaatcaagt

SEQ ID NO: 530679 - DNA, 33 bp, Homo sapien
cttccaaaaaccccatgaaggcacagagtaaaa

SEQ ID NO: 530680 - DNA, 33 bp, Homo sapien
cttccaaaaaccccattaaggcacagagtaaaa

SEQ ID NO: 530681 - DNA, 33 bp, Homo sapien
actgaaactcaattcaccatctctggcttgact

SEQ ID NO: 530682 - DNA, 33 bp, Homo sapien
actgaaactcaattcatcatctctggcttgact

SEQ ID NO: 530683 - DNA, 33 bp, Homo sapien
tactgacatccttctaaaagatcaggaacccta

SEQ ID NO: 530684 - DNA, 33 bp, Homo sapien
tactgacatccttctagaagatcaggaacccta

SEQ ID NO: 530685 - DNA, 33 bp, Homo sapien
tcctctgcaggggaaaaggagagagagatggtt

SEQ ID NO: 530686 - DNA, 33 bp, Homo sapien
tcctctgcaggggaaacggagagagagatggtt

SEQ ID NO: 530687 - DNA, 33 bp, Homo sapien
tctcttatttgacctcacagactatgcctgaga

SEQ ID NO: 530688 - DNA, 33 bp, Homo sapien
tctcttatttgacctcgcagactatgcctgaga

SEQ ID NO: 530689 - DNA, 33 bp, Homo sapien
atttatttaaagtatcagaagacataggagttt

SEQ ID NO: 530690 - DNA, 33 bp, Homo sapien
atttatttaaagtatccgaagacataggagttt

SEQ ID NO: 530691 - DNA, 33 bp, Homo sapien
aaaatggcatcaaaccagagtcatgtactttta

SEQ ID NO: 530692 - DNA, 33 bp, Homo sapien
aaaatggcatcaaaccggagtcatgtactttta

SEQ ID NO: 530693 - DNA, 33 bp, Homo sapien
ggatacctagcttgataataattcttcctccag

SEQ ID NO: 530694 - DNA, 33 bp, Homo sapien
ggatacctagcttgatgataattcttcctccag

SEQ ID NO: 530695 - DNA, 33 bp, Homo sapien
gttccactggtgaaaaactttacattattttta

SEQ ID NO: 530696 - DNA, 33 bp, Homo sapien
gttccactggtgaaaacctttacattattttta

SEQ ID NO: 530697 - DNA, 33 bp, Homo sapien
ggcgtcctatctttaaagtcatatatttgcatg

SEQ ID NO: 530698 - DNA, 33 bp, Homo sapien
ggcgtcctatctttaaggtcatatatttgcatg

SEQ ID NO: 530699 - DNA, 33 bp, Homo sapien
aatttctctgtcaaacaattatggacatttcta

SEQ ID NO: 530700 - DNA, 33 bp, Homo sapien
aatttctctgtcaaactattatggacatttcta

SEQ ID NO: 530701 - DNA, 33 bp, Homo sapien
tcttctgtcacaactcccttctgtacttcagga

SEQ ID NO: 530702 - DNA, 33 bp, Homo sapien
tcttctgtcacaactctcttctgtacttcagga

SEQ ID NO: 530703 - DNA, 33 bp, Homo sapien
cagttcctttgtaccacgaaagcttgatttctg

SEQ ID NO: 530704 - DNA, 33 bp, Homo sapien
cagttcctttgtaccatgaaagcttgatttctg

SEQ ID NO: 530705 - DNA, 33 bp, Homo sapien
aattaattttaatgtcaatttcaaagacagcat

SEQ ID NO: 530706 - DNA, 33 bp, Homo sapien
aattaattttaatgtcgatttcaaagacagcat

SEQ ID NO: 530707 - DNA, 33 bp, Homo sapien
ttttccaggtgtatcacaacagcctactttcta

SEQ ID NO: 530708 - DNA, 33 bp, Homo sapien
ttttccaggtgtatcataacagcctactttcta

SEQ ID NO: 530709 - DNA, 33 bp, Homo sapien
ctatcgcattattataccatcatttttggaact

SEQ ID NO: 530710 - DNA, 33 bp, Homo sapien
ctatcgcattattatagcatcatttttggaact

SEQ ID NO: 530711 - DNA, 33 bp, Homo sapien
ttgcatgagatacttacggggtggaatttaaaa

SEQ ID NO: 530712 - DNA, 33 bp, Homo sapien
ttgcatgagatacttatggggtggaatttaaaa

SEQ ID NO: 530713 - DNA, 33 bp, Homo sapien
agtacttttaagagaccatgaaaatctacagac

SEQ ID NO: 530714 - DNA, 33 bp, Homo sapien
agtacttttaagagacgatgaaaatctacagac

SEQ ID NO: 530715 - DNA, 33 bp, Homo sapien
taaaactaacaagaacgccaaaggttggcattt

SEQ ID NO: 530716 - DNA, 33 bp, Homo sapien
taaaactaacaagaactccaaaggttggcattt

SEQ ID NO: 530717 - DNA, 33 bp, Homo sapien
tataacaacagaaaacaacattccccaaattta

SEQ ID NO: 530718 - DNA, 33 bp, Homo sapien
tataacaacagaaaactacattccccaaattta

SEQ ID NO: 530719 - DNA, 33 bp, Homo sapien
gcacagcttttagacacagtcatatctagggca

SEQ ID NO: 530720 - DNA, 33 bp, Homo sapien
gcacagcttttagacatagtcatatctagggca

SEQ ID NO: 530721 - DNA, 33 bp, Homo sapien
taaagcatacagtggacggagagcaaatgctaa

SEQ ID NO: 530722 - DNA, 33 bp, Homo sapien
taaagcatacagtggatggagagcaaatgctaa

SEQ ID NO: 530723 - DNA, 33 bp, Homo sapien
cacttcctcagtaacacggggaatttgattcaa

SEQ ID NO: 530724 - DNA, 33 bp, Homo sapien
cacttcctcagtaacatggggaatttgattcaa

SEQ ID NO: 530725 - DNA, 33 bp, Homo sapien
ggtcttccggatatcacggcacagaagcgggca

SEQ ID NO: 530726 - DNA, 33 bp, Homo sapien
ggtcttccggatatcatggcacagaagcgggca

SEQ ID NO: 530727 - DNA, 33 bp, Homo sapien
acaaatatgtagtggaaagaagaatccaccgaa

SEQ ID NO: 530728 - DNA, 33 bp, Homo sapien
acaaatatgtagtggagagaagaatccaccgaa

SEQ ID NO: 530729 - DNA, 33 bp, Homo sapien
atttagaacaaggtgacattttctcagaaggtt

SEQ ID NO: 530730 - DNA, 33 bp, Homo sapien
atttagaacaaggtgatattttctcagaaggtt

SEQ ID NO: 530731 - DNA, 33 bp, Homo sapien
taaaatgtgggatagcaatacgatgggatatca

SEQ ID NO: 530732 - DNA, 33 bp, Homo sapien
taaaatgtgggatagccatacgatgggatatca

SEQ ID NO: 530733 - DNA, 33 bp, Homo sapien
agtcctgattaaaaggacattttgtggcagttg

SEQ ID NO: 530734 - DNA, 33 bp, Homo sapien
agtcctgattaaaaggccattttgtggcagttg

SEQ ID NO: 530735 - DNA, 33 bp, Homo sapien
agcaaggaggggtaaccggatgtgaatcatgag

SEQ ID NO: 530736 - DNA, 33 bp, Homo sapien
agcaaggaggggtaactggatgtgaatcatgag

SEQ ID NO: 530737 - DNA, 33 bp, Homo sapien
actccatgattctaaacgacccttaggcttggg

SEQ ID NO: 530738 - DNA, 33 bp, Homo sapien
actccatgattctaaatgacccttaggcttggg

SEQ ID NO: 530739 - DNA, 33 bp, Homo sapien
cttcagttggttcacacgcaaaataacagtgca

SEQ ID NO: 530740 - DNA, 33 bp, Homo sapien
cttcagttggttcacatgcaaaataacagtgca

SEQ ID NO: 530741 - DNA, 33 bp, Homo sapien
ttattaatccagtggacacttaaaaattgtatt

SEQ ID NO: 530742 - DNA, 33 bp, Homo sapien
ttattaatccagtggatacttaaaaattgtatt

SEQ ID NO: 530743 - DNA, 33 bp, Homo sapien
atactcatatgtggaaatatccataacccatgt

SEQ ID NO: 530744 - DNA, 33 bp, Homo sapien
atactcatatgtggaagtatccataacccatgt

SEQ ID NO: 530745 - DNA, 33 bp, Homo sapien
agtgtaaaagcatttgcaaaggcgacttttatc

SEQ ID NO: 530746 - DNA, 33 bp, Homo sapien
agtgtaaaagcatttgtaaaggcgacttttatc

SEQ ID NO: 530747 - DNA, 33 bp, Homo sapien
taaatttctaatgatgaatatgcctttatatgt

SEQ ID NO: 530748 - DNA, 33 bp, Homo sapien
taaatttctaatgatggatatgcctttatatgt

SEQ ID NO: 530749 - DNA, 33 bp, Homo sapien
atgtttaattggtgtacgttaatggtggttaaa

SEQ ID NO: 530750 - DNA, 33 bp, Homo sapien
atgtttaattggtgtatgttaatggtggttaaa

SEQ ID NO: 530751 - DNA, 33 bp, Homo sapien
aatagcagctccagaaataggtaataaaatgaa

SEQ ID NO: 530752 - DNA, 33 bp, Homo sapien
aatagcagctccagaactaggtaataaaatgaa

SEQ ID NO: 530753 - DNA, 33 bp, Homo sapien
atatcttattccaaaacatcagctggtgtggaa

SEQ ID NO: 530754 - DNA, 33 bp, Homo sapien
atatcttattccaaaatatcagctggtgtggaa

SEQ ID NO: 530755 - DNA, 33 bp, Homo sapien
accagcattagggctacacaatgtcctaaatag

SEQ ID NO: 530756 - DNA, 33 bp, Homo sapien
accagcattagggctatacaatgtcctaaatag

SEQ ID NO: 530757 - DNA, 33 bp, Homo sapien
ttatcacaaccaaagcagaagatggttctgaca

SEQ ID NO: 530758 - DNA, 33 bp, Homo sapien
ttatcacaaccaaagccgaagatggttctgaca

SEQ ID NO: 530759 - DNA, 33 bp, Homo sapien
tgcaaatgtagatcacactcctcttcaggcaga

SEQ ID NO: 530760 - DNA, 33 bp, Homo sapien
tgcaaatgtagatcacgctcctcttcaggcaga

SEQ ID NO: 530761 - DNA, 33 bp, Homo sapien
aactggatcacacacacaaaaactgctttgctt

SEQ ID NO: 530762 - DNA, 33 bp, Homo sapien
aactggatcacacacagaaaaactgctttgctt

SEQ ID NO: 530763 - DNA, 33 bp, Homo sapien
taatatggttgtttcaaatgattacagcacagt

SEQ ID NO: 530764 - DNA, 33 bp, Homo sapien
taatatggttgtttcagatgattacagcacagt

SEQ ID NO: 530765 - DNA, 33 bp, Homo sapien
caagatgtcaacattactaagagaaagagccaa

SEQ ID NO: 530766 - DNA, 33 bp, Homo sapien
caagatgtcaacattagtaagagaaagagccaa

SEQ ID NO: 530767 - DNA, 33 bp, Homo sapien
cttctgagttttaacaatgacccagtattctga

SEQ ID NO: 530768 - DNA, 33 bp, Homo sapien
cttctgagttttaacagtgacccagtattctga

SEQ ID NO: 530769 - DNA, 33 bp, Homo sapien
agcacaatgcctcacacaacagaaacacaacat

SEQ ID NO: 530770 - DNA, 33 bp, Homo sapien
agcacaatgcctcacagaacagaaacacaacat

SEQ ID NO: 530771 - DNA, 33 bp, Homo sapien
gcaataagcaattcaaacgaccttaacagaaat

SEQ ID NO: 530772 - DNA, 33 bp, Homo sapien
gcaataagcaattcaagcgaccttaacagaaat

SEQ ID NO: 530773 - DNA, 33 bp, Homo sapien
taaacatggaattaagacaatcagaattgttgt

SEQ ID NO: 530774 - DNA, 33 bp, Homo sapien
taaacatggaattaaggcaatcagaattgttgt

SEQ ID NO: 530775 - DNA, 33 bp, Homo sapien
gtgaccttcaagaacaactttacagtcaattta

SEQ ID NO: 530776 - DNA, 33 bp, Homo sapien
gtgaccttcaagaacatctttacagtcaattta

SEQ ID NO: 530777 - DNA, 33 bp, Homo sapien
atgtttcctgtcttccactagcatttttatcca

SEQ ID NO: 530778 - DNA, 33 bp, Homo sapien
atgtttcctgtcttccgctagcatttttatcca

SEQ ID NO: 530779 - DNA, 33 bp, Homo sapien
aatgtttaaatgtgaacgcccttagcctggcca

SEQ ID NO: 530780 - DNA, 33 bp, Homo sapien
aatgtttaaatgtgaatgcccttagcctggcca

SEQ ID NO: 530781 - DNA, 33 bp, Homo sapien
ggtcaaactctcctgccaatttagacactcagt

SEQ ID NO: 530782 - DNA, 33 bp, Homo sapien
ggtcaaactctcctgctaatttagacactcagt

SEQ ID NO: 530783 - DNA, 33 bp, Homo sapien
ctattagaccagaccaaaatttgcctcctcatt

SEQ ID NO: 530784 - DNA, 33 bp, Homo sapien
ctattagaccagaccagaatttgcctcctcatt

SEQ ID NO: 530785 - DNA, 33 bp, Homo sapien
atcaatcaagttaaatcagtaattgctctactg

SEQ ID NO: 530786 - DNA, 33 bp, Homo sapien
atcaatcaagttaaatgagtaattgctctactg

SEQ ID NO: 530787 - DNA, 33 bp, Homo sapien
tccttttagtggcatacgaggccttctgcattt

SEQ ID NO: 530788 - DNA, 33 bp, Homo sapien
tccttttagtggcatatgaggccttctgcattt

SEQ ID NO: 530789 - DNA, 33 bp, Homo sapien
aaaatattcagggtcccatcacaaacatttgga

SEQ ID NO: 530790 - DNA, 33 bp, Homo sapien
aaaatattcagggtcctatcacaaacatttgga

SEQ ID NO: 530791 - DNA, 33 bp, Homo sapien
acatgggaacaatgccagaattgtggtctagtg

SEQ ID NO: 530792 - DNA, 33 bp, Homo sapien
acatgggaacaatgccggaattgtggtctagtg

SEQ ID NO: 530793 - DNA, 33 bp, Homo sapien
tgaaaagcatccagtaagttgttgtggctggag

SEQ ID NO: 530794 - DNA, 33 bp, Homo sapien
tgaaaagcatccagtaggttgttgtggctggag

SEQ ID NO: 530795 - DNA, 33 bp, Homo sapien
aggacagagagaaggacatagtggtagaacatg

SEQ ID NO: 530796 - DNA, 33 bp, Homo sapien
aggacagagagaaggagatagtggtagaacatg

SEQ ID NO: 530797 - DNA, 33 bp, Homo sapien
ttaaatccaaagtcctcacctaggcttaacagt

SEQ ID NO: 530798 - DNA, 33 bp, Homo sapien
ttaaatccaaagtccttacctaggcttaacagt

SEQ ID NO: 530799 - DNA, 33 bp, Homo sapien
cagcttctctataagaactggtagaataattat

SEQ ID NO: 530800 - DNA, 33 bp, Homo sapien
cagcttctctataagatctggtagaataattat

SEQ ID NO: 530801 - DNA, 33 bp, Homo sapien
gtgtgaagaggaattacaacagacacccctgct

SEQ ID NO: 530802 - DNA, 33 bp, Homo sapien
gtgtgaagaggaattataacagacacccctgct

SEQ ID NO: 530803 - DNA, 33 bp, Homo sapien
caataaactataagtgaatcatcaaacatcacc

SEQ ID NO: 530804 - DNA, 33 bp, Homo sapien
caataaactataagtgcatcatcaaacatcacc

SEQ ID NO: 530805 - DNA, 33 bp, Homo sapien
tctttttccttccggacagtctcagtaattatt

SEQ ID NO: 530806 - DNA, 33 bp, Homo sapien
tctttttccttccggagagtctcagtaattatt

SEQ ID NO: 530807 - DNA, 33 bp, Homo sapien
acatcatgtagaacagaccagactttaaatcag

SEQ ID NO: 530808 - DNA, 33 bp, Homo sapien
acatcatgtagaacaggccagactttaaatcag

SEQ ID NO: 530809 - DNA, 33 bp, Homo sapien
agagtagaccctcaataagcaaacttgtaagcc

SEQ ID NO: 530810 - DNA, 33 bp, Homo sapien
agagtagaccctcaatgagcaaacttgtaagcc

SEQ ID NO: 530811 - DNA, 33 bp, Homo sapien
tctgcctgtaccattccctataggctgaagatg

SEQ ID NO: 530812 - DNA, 33 bp, Homo sapien
tctgcctgtaccattcgctataggctgaagatg

SEQ ID NO: 530813 - DNA, 33 bp, Homo sapien
ttattagctgacatacagagtggtattattagt

SEQ ID NO: 530814 - DNA, 33 bp, Homo sapien
ttattagctgacatacggagtggtattattagt

SEQ ID NO: 530815 - DNA, 33 bp, Homo sapien
gatgctatcctctgaaataactgtgagtacagt

SEQ ID NO: 530816 - DNA, 33 bp, Homo sapien
gatgctatcctctgaagtaactgtgagtacagt

SEQ ID NO: 530817 - DNA, 33 bp, Homo sapien
tcagtgtaatcctttaaatcagagtaatctttc

SEQ ID NO: 530818 - DNA, 33 bp, Homo sapien
tcagtgtaatcctttatatcagagtaatctttc

SEQ ID NO: 530819 - DNA, 33 bp, Homo sapien
aaacagtatgatcaccaatgaactgatatttac

SEQ ID NO: 530820 - DNA, 33 bp, Homo sapien
aaacagtatgatcaccgatgaactgatatttac

SEQ ID NO: 530821 - DNA, 33 bp, Homo sapien
tagaagctagactgtacctttagtcacaatgtt

SEQ ID NO: 530822 - DNA, 33 bp, Homo sapien
tagaagctagactgtatctttagtcacaatgtt

SEQ ID NO: 530823 - DNA, 33 bp, Homo sapien
cttaactctttgaagaagtaatagcaacgattc

SEQ ID NO: 530824 - DNA, 33 bp, Homo sapien
cttaactctttgaagacgtaatagcaacgattc

SEQ ID NO: 530825 - DNA, 33 bp, Homo sapien
tggtctaatgctggtacctctgaaaagtgctat

SEQ ID NO: 530826 - DNA, 33 bp, Homo sapien
tggtctaatgctggtagctctgaaaagtgctat

SEQ ID NO: 530827 - DNA, 33 bp, Homo sapien
tcgtgaagaccaaattaaaatgtgcaagcaaaa

SEQ ID NO: 530828 - DNA, 33 bp, Homo sapien
tcgtgaagaccaaattcaaatgtgcaagcaaaa

SEQ ID NO: 530829 - DNA, 33 bp, Homo sapien
ccactccacattcttaaattgataaagcatatg

SEQ ID NO: 530830 - DNA, 33 bp, Homo sapien
ccactccacattcttacattgataaagcatatg

SEQ ID NO: 530831 - DNA, 33 bp, Homo sapien
gtaaccaatgctgaacagtcaaaaataatttca

SEQ ID NO: 530832 - DNA, 33 bp, Homo sapien
gtaaccaatgctgaacggtcaaaaataatttca

SEQ ID NO: 530833 - DNA, 33 bp, Homo sapien
tgcctttccacagaaccctaaagtagctacctt

SEQ ID NO: 530834 - DNA, 33 bp, Homo sapien
tgcctttccacagaacgctaaagtagctacctt

SEQ ID NO: 530835 - DNA, 33 bp, Homo sapien
attctgtgtggaacataaggaaacataaaacac

SEQ ID NO: 530836 - DNA, 33 bp, Homo sapien
attctgtgtggaacatgaggaaacataaaacac

SEQ ID NO: 530837 - DNA, 33 bp, Homo sapien
aattgattacattaagcacagtaaatggaagaa

SEQ ID NO: 530838 - DNA, 33 bp, Homo sapien
aattgattacattaaggacagtaaatggaagaa

SEQ ID NO: 530839 - DNA, 33 bp, Homo sapien
atagtgctgcaaggaacgtatgaatgcatgtgt

SEQ ID NO: 530840 - DNA, 33 bp, Homo sapien
atagtgctgcaaggaatgtatgaatgcatgtgt

SEQ ID NO: 530841 - DNA, 33 bp, Homo sapien
gcctggacttctgtcaatctgttaggttctaag

SEQ ID NO: 530842 - DNA, 33 bp, Homo sapien
gcctggacttctgtcagtctgttaggttctaag

SEQ ID NO: 530843 - DNA, 33 bp, Homo sapien
aatgtttatatgttcaataccacaaatacataa

SEQ ID NO: 530844 - DNA, 33 bp, Homo sapien
aatgtttatatgttcactaccacaaatacataa

SEQ ID NO: 530845 - DNA, 33 bp, Homo sapien
acaatgcacagaaagcgattaggatcgtgttta

SEQ ID NO: 530846 - DNA, 33 bp, Homo sapien
acaatgcacagaaagctattaggatcgtgttta

SEQ ID NO: 530847 - DNA, 33 bp, Homo sapien
gcccctcttcattcataatcctaatgggccagg

SEQ ID NO: 530848 - DNA, 33 bp, Homo sapien
gcccctcttcattcatgatcctaatgggccagg

SEQ ID NO: 530849 - DNA, 33 bp, Homo sapien
ttccaggtgagagccaaatcaaaaatactatcc

SEQ ID NO: 530850 - DNA, 33 bp, Homo sapien
ttccaggtgagagccacatcaaaaatactatcc

SEQ ID NO: 530851 - DNA, 33 bp, Homo sapien
tcatttaatctttccaataatcctatcagatag

SEQ ID NO: 530852 - DNA, 33 bp, Homo sapien
tcatttaatctttccagtaatcctatcagatag

SEQ ID NO: 530853 - DNA, 33 bp, Homo sapien
tttgtagatgggacctcaaaagtctgtattttc

SEQ ID NO: 530854 - DNA, 33 bp, Homo sapien
tttgtagatgggacctgaaaagtctgtattttc

SEQ ID NO: 530855 - DNA, 33 bp, Homo sapien
gactgccttgaaatgaaggattctgtgtggaag

SEQ ID NO: 530856 - DNA, 33 bp, Homo sapien
gactgccttgaaatgagggattctgtgtggaag

SEQ ID NO: 530857 - DNA, 33 bp, Homo sapien
caaatatgggatttgccgagtttaaaataacag

SEQ ID NO: 530858 - DNA, 33 bp, Homo sapien
caaatatgggatttgctgagtttaaaataacag

SEQ ID NO: 530859 - DNA, 33 bp, Homo sapien
atcatgtgcatgaagacgctctttatccctcag

SEQ ID NO: 530860 - DNA, 33 bp, Homo sapien
atcatgtgcatgaagaggctctttatccctcag

SEQ ID NO: 530861 - DNA, 33 bp, Homo sapien
ggctgcaagtttgagaacaatgtgtcggcagct

SEQ ID NO: 530862 - DNA, 33 bp, Homo sapien
ggctgcaagtttgagatcaatgtgtcggcagct

SEQ ID NO: 530863 - DNA, 33 bp, Homo sapien
ttcttaacgtgtgaacggatttctaattaaatt

SEQ ID NO: 530864 - DNA, 33 bp, Homo sapien
ttcttaacgtgtgaactgatttctaattaaatt

SEQ ID NO: 530865 - DNA, 33 bp, Homo sapien
acataacataactccacgtctacagaaaaaaga

SEQ ID NO: 530866 - DNA, 33 bp, Homo sapien
acataacataactccatgtctacagaaaaaaga

SEQ ID NO: 530867 - DNA, 33 bp, Homo sapien
tggcaaaaagccctaaaatgtagcctgggaagc

SEQ ID NO: 530868 - DNA, 33 bp, Homo sapien
tggcaaaaagccctaacatgtagcctgggaagc

SEQ ID NO: 530869 - DNA, 33 bp, Homo sapien
aaagatgcatcggaaaccaatgacagcaaaaat

SEQ ID NO: 530870 - DNA, 33 bp, Homo sapien
aaagatgcatcggaaatcaatgacagcaaaaat

SEQ ID NO: 530871 - DNA, 33 bp, Homo sapien
ctggcaggataagctacattctaggaggatgga

SEQ ID NO: 530872 - DNA, 33 bp, Homo sapien
ctggcaggataagctatattctaggaggatgga

SEQ ID NO: 530873 - DNA, 33 bp, Homo sapien
tgatagcaatttgaaaacttttaagactcaagc

SEQ ID NO: 530874 - DNA, 33 bp, Homo sapien
tgatagcaatttgaaagcttttaagactcaagc

SEQ ID NO: 530875 - DNA, 33 bp, Homo sapien
tgactcagcactttacagagaaaaattgttctg

SEQ ID NO: 530876 - DNA, 33 bp, Homo sapien
tgactcagcactttaccgagaaaaattgttctg

SEQ ID NO: 530877 - DNA, 33 bp, Homo sapien
gatgctttttctatcacgtgggttagacggcct

SEQ ID NO: 530878 - DNA, 33 bp, Homo sapien
gatgctttttctatcatgtgggttagacggcct

SEQ ID NO: 530879 - DNA, 33 bp, Homo sapien
ctacattttccctgtaaagacacacaaaaaatc

SEQ ID NO: 530880 - DNA, 33 bp, Homo sapien
ctacattttccctgtagagacacacaaaaaatc

SEQ ID NO: 530881 - DNA, 33 bp, Homo sapien
taaaagatttaaagccaataacagctttttaag

SEQ ID NO: 530882 - DNA, 33 bp, Homo sapien
taaaagatttaaagccgataacagctttttaag

SEQ ID NO: 530883 - DNA, 33 bp, Homo sapien
ttgcgatccacataaacatttaacattgtatta

SEQ ID NO: 530884 - DNA, 33 bp, Homo sapien
ttgcgatccacataaagatttaacattgtatta

SEQ ID NO: 530885 - DNA, 33 bp, Homo sapien
cactagtgagtcaataaccttcagagtgctcca

SEQ ID NO: 530886 - DNA, 33 bp, Homo sapien
cactagtgagtcaatacccttcagagtgctcca

SEQ ID NO: 530887 - DNA, 33 bp, Homo sapien
acgaaaatgggatatgacaggcaataaacctta

SEQ ID NO: 530888 - DNA, 33 bp, Homo sapien
acgaaaatgggatatggcaggcaataaacctta

SEQ ID NO: 530889 - DNA, 33 bp, Homo sapien
catattgaagaggttgcacagagtaacatgaga

SEQ ID NO: 530890 - DNA, 33 bp, Homo sapien
catattgaagaggttgtacagagtaacatgaga

SEQ ID NO: 530891 - DNA, 33 bp, Homo sapien
acagatactataagcacagaattcctacactta

SEQ ID NO: 530892 - DNA, 33 bp, Homo sapien
acagatactataagcagagaattcctacactta

SEQ ID NO: 530893 - DNA, 33 bp, Homo sapien
acacaagtgacttcccaagttaatacataaatg

SEQ ID NO: 530894 - DNA, 33 bp, Homo sapien
acacaagtgacttcccgagttaatacataaatg

SEQ ID NO: 530895 - DNA, 33 bp, Homo sapien
tttaccttcacgggtcaagggcaaatggaaggt

SEQ ID NO: 530896 - DNA, 33 bp, Homo sapien
tttaccttcacgggtcgagggcaaatggaaggt

SEQ ID NO: 530897 - DNA, 33 bp, Homo sapien
aggtcttttactctcacaggctgaaactcttta

SEQ ID NO: 530898 - DNA, 33 bp, Homo sapien
aggtcttttactctcataggctgaaactcttta

SEQ ID NO: 530899 - DNA, 33 bp, Homo sapien
aaccttatactttttacgtagtctttggatact

SEQ ID NO: 530900 - DNA, 33 bp, Homo sapien
aaccttatactttttatgtagtctttggatact

SEQ ID NO: 530901 - DNA, 33 bp, Homo sapien
ataggaaacttcactacactaagcatttgaaat

SEQ ID NO: 530902 - DNA, 33 bp, Homo sapien
ataggaaacttcactagactaagcatttgaaat

SEQ ID NO: 530903 - DNA, 33 bp, Homo sapien
ggagatctcaggagcaaataggaaaattaccac

SEQ ID NO: 530904 - DNA, 33 bp, Homo sapien
ggagatctcaggagcagataggaaaattaccac

SEQ ID NO: 530905 - DNA, 33 bp, Homo sapien
tcaaactctttgtgcactcagttgactacagta

SEQ ID NO: 530906 - DNA, 33 bp, Homo sapien
tcaaactctttgtgcagtcagttgactacagta

SEQ ID NO: 530907 - DNA, 33 bp, Homo sapien
ttattcaaattctgaaagcttagcctattcatc

SEQ ID NO: 530908 - DNA, 33 bp, Homo sapien
ttattcaaattctgaacgcttagcctattcatc

SEQ ID NO: 530909 - DNA, 33 bp, Homo sapien
tatttcttgctctccacatccagtaagttcata

SEQ ID NO: 530910 - DNA, 33 bp, Homo sapien
tatttcttgctctccatatccagtaagttcata

SEQ ID NO: 530911 - DNA, 33 bp, Homo sapien
tccgtcaaacagctcccggacacttctttcctc

SEQ ID NO: 530912 - DNA, 33 bp, Homo sapien
tccgtcaaacagctcctggacacttctttcctc

SEQ ID NO: 530913 - DNA, 33 bp, Homo sapien
gagactgctcctataactgaggaatcagcagca

SEQ ID NO: 530914 - DNA, 33 bp, Homo sapien
gagactgctcctataattgaggaatcagcagca

SEQ ID NO: 530915 - DNA, 33 bp, Homo sapien
agctgctacaaggatgacatactctaggcctgc

SEQ ID NO: 530916 - DNA, 33 bp, Homo sapien
agctgctacaaggatggcatactctaggcctgc

SEQ ID NO: 530917 - DNA, 33 bp, Homo sapien
aataagaaaagggtagaattttgcacatgtaag

SEQ ID NO: 530918 - DNA, 33 bp, Homo sapien
aataagaaaagggtagtattttgcacatgtaag

SEQ ID NO: 530919 - DNA, 33 bp, Homo sapien
ccaccaactgatgacagatattttaaaagttta

SEQ ID NO: 530920 - DNA, 33 bp, Homo sapien
ccaccaactgatgacatatattttaaaagttta

SEQ ID NO: 530921 - DNA, 33 bp, Homo sapien
ttactatgtgccactacctcattttaggcccta

SEQ ID NO: 530922 - DNA, 33 bp, Homo sapien
ttactatgtgccactagctcattttaggcccta

SEQ ID NO: 530923 - DNA, 33 bp, Homo sapien
gatccactcaagagaactgttttaacctcaagt

SEQ ID NO: 530924 - DNA, 33 bp, Homo sapien
gatccactcaagagaattgttttaacctcaagt

SEQ ID NO: 530925 - DNA, 33 bp, Homo sapien
cctgtcatccttaatccattcaaagtgggatgg

SEQ ID NO: 530926 - DNA, 33 bp, Homo sapien
cctgtcatccttaatctattcaaagtgggatgg

SEQ ID NO: 530927 - DNA, 33 bp, Homo sapien
gggcagaatgaaatgacgggcacagacacagag

SEQ ID NO: 530928 - DNA, 33 bp, Homo sapien
gggcagaatgaaatgatgggcacagacacagag

SEQ ID NO: 530929 - DNA, 33 bp, Homo sapien
ggagaaaaatacattcgatcataggcaccacag

SEQ ID NO: 530930 - DNA, 33 bp, Homo sapien
ggagaaaaatacattctatcataggcaccacag

SEQ ID NO: 530931 - DNA, 33 bp, Homo sapien
ctcttcactttctcaaatcctctgaatttctta

SEQ ID NO: 530932 - DNA, 33 bp, Homo sapien
ctcttcactttctcaagtcctctgaatttctta

SEQ ID NO: 530933 - DNA, 33 bp, Homo sapien
aaagaatttggaccaacaaaagtacaatttgcc

SEQ ID NO: 530934 - DNA, 33 bp, Homo sapien
aaagaatttggaccaataaaagtacaatttgcc

SEQ ID NO: 530935 - DNA, 33 bp, Homo sapien
aaatcatcacataaaaagatttcatagctgtcc

SEQ ID NO: 530936 - DNA, 33 bp, Homo sapien
aaatcatcacataaaaggatttcatagctgtcc

SEQ ID NO: 530937 - DNA, 33 bp, Homo sapien
cagaaccactcaaggaccactttcctagctaaa

SEQ ID NO: 530938 - DNA, 33 bp, Homo sapien
cagaaccactcaaggagcactttcctagctaaa

SEQ ID NO: 530939 - DNA, 33 bp, Homo sapien
ccttattcgataaagcaattatcactgcagagc

SEQ ID NO: 530940 - DNA, 33 bp, Homo sapien
ccttattcgataaagcgattatcactgcagagc

SEQ ID NO: 530941 - DNA, 33 bp, Homo sapien
ccatagcctccttgcaatcacgtgagaataatt

SEQ ID NO: 530942 - DNA, 33 bp, Homo sapien
ccatagcctccttgcagtcacgtgagaataatt

SEQ ID NO: 530943 - DNA, 33 bp, Homo sapien
tctcctgaatcaaatacactgcaaaggagaatt

SEQ ID NO: 530944 - DNA, 33 bp, Homo sapien
tctcctgaatcaaatatactgcaaaggagaatt

SEQ ID NO: 530945 - DNA, 33 bp, Homo sapien
agatgatttcaaagtacaaagttccaaaccact

SEQ ID NO: 530946 - DNA, 33 bp, Homo sapien
agatgatttcaaagtataaagttccaaaccact

SEQ ID NO: 530947 - DNA, 33 bp, Homo sapien
actataaactttggtaacgattttcagtttgct

SEQ ID NO: 530948 - DNA, 33 bp, Homo sapien
actataaactttggtagcgattttcagtttgct

SEQ ID NO: 530949 - DNA, 33 bp, Homo sapien
atattcgggctctttacgtccttgagtcttttg

SEQ ID NO: 530950 - DNA, 33 bp, Homo sapien
atattcgggctctttaggtccttgagtcttttg

SEQ ID NO: 530951 - DNA, 33 bp, Homo sapien
tctaggaacaatgctcaccttttgtaacttttt

SEQ ID NO: 530952 - DNA, 33 bp, Homo sapien
tctaggaacaatgctcgccttttgtaacttttt

SEQ ID NO: 530953 - DNA, 33 bp, Homo sapien
ttacgtgctcccacgacggtatctgccatacat

SEQ ID NO: 530954 - DNA, 33 bp, Homo sapien
ttacgtgctcccacgatggtatctgccatacat

SEQ ID NO: 530955 - DNA, 33 bp, Homo sapien
tttctggagcaactaccaagtgtaaggcactgc

SEQ ID NO: 530956 - DNA, 33 bp, Homo sapien
tttctggagcaactacgaagtgtaaggcactgc

SEQ ID NO: 530957 - DNA, 33 bp, Homo sapien
cacaggcacacagttaccaggtcttacatgtgt

SEQ ID NO: 530958 - DNA, 33 bp, Homo sapien
cacaggcacacagttatcaggtcttacatgtgt

SEQ ID NO: 530959 - DNA, 33 bp, Homo sapien
taaaccaaaccaagaaaaatggaaatagatcct

SEQ ID NO: 530960 - DNA, 33 bp, Homo sapien
taaaccaaaccaagaataatggaaatagatcct

SEQ ID NO: 530961 - DNA, 33 bp, Homo sapien
tcattttttcacctcaactcagtatgtcaggtc

SEQ ID NO: 530962 - DNA, 33 bp, Homo sapien
tcattttttcacctcacctcagtatgtcaggtc

SEQ ID NO: 530963 - DNA, 33 bp, Homo sapien
ctctgagcagacatcccggactgccataatttg

SEQ ID NO: 530964 - DNA, 33 bp, Homo sapien
ctctgagcagacatcctggactgccataatttg

SEQ ID NO: 530965 - DNA, 33 bp, Homo sapien
gaatcttcagtcactaagcaggctgacctcagg

SEQ ID NO: 530966 - DNA, 33 bp, Homo sapien
gaatcttcagtcactaggcaggctgacctcagg

SEQ ID NO: 530967 - DNA, 33 bp, Homo sapien
acaggaagctggatcactcagtctctggctctc

SEQ ID NO: 530968 - DNA, 33 bp, Homo sapien
acaggaagctggatcattcagtctctggctctc

SEQ ID NO: 530969 - DNA, 33 bp, Homo sapien
accaaggaaatacagacagcaatgaaagggctt

SEQ ID NO: 530970 - DNA, 33 bp, Homo sapien
accaaggaaatacagagagcaatgaaagggctt

SEQ ID NO: 530971 - DNA, 33 bp, Homo sapien
agagagtaaagccactaaactttctctctctgc

SEQ ID NO: 530972 - DNA, 33 bp, Homo sapien
agagagtaaagccactgaactttctctctctgc

SEQ ID NO: 530973 - DNA, 33 bp, Homo sapien
agagctgtaggttgaaacttgagcttccctcca

SEQ ID NO: 530974 - DNA, 33 bp, Homo sapien
agagctgtaggttgaatcttgagcttccctcca

SEQ ID NO: 530975 - DNA, 33 bp, Homo sapien
ggaaaagagaacctgtcaaagatgagcaaggat

SEQ ID NO: 530976 - DNA, 33 bp, Homo sapien
ggaaaagagaacctgtgaaagatgagcaaggat

SEQ ID NO: 530977 - DNA, 33 bp, Homo sapien
acaattgaagaatcagacatcatttagagttgt

SEQ ID NO: 530978 - DNA, 33 bp, Homo sapien
acaattgaagaatcagtcatcatttagagttgt

SEQ ID NO: 530979 - DNA, 33 bp, Homo sapien
caaatgttacattagaaaacaaactcttgacac

SEQ ID NO: 530980 - DNA, 33 bp, Homo sapien
caaatgttacattagagaacaaactcttgacac

SEQ ID NO: 530981 - DNA, 33 bp, Homo sapien
tcctttgaaaaagaaaagcgtagctgtgctcca

SEQ ID NO: 530982 - DNA, 33 bp, Homo sapien
tcctttgaaaaagaaaggcgtagctgtgctcca

SEQ ID NO: 530983 - DNA, 33 bp, Homo sapien
acctgtctggcctgaaacatttggcatctattc

SEQ ID NO: 530984 - DNA, 33 bp, Homo sapien
acctgtctggcctgaatcatttggcatctattc

SEQ ID NO: 530985 - DNA, 33 bp, Homo sapien
ccattgccagtttgaagatccagttaagcctca

SEQ ID NO: 530986 - DNA, 33 bp, Homo sapien
ccattgccagtttgaatatccagttaagcctca

SEQ ID NO: 530987 - DNA, 33 bp, Homo sapien
tctacttccctgcttacctttgctttctccaat

SEQ ID NO: 530988 - DNA, 33 bp, Homo sapien
tctacttccctgcttatctttgctttctccaat

SEQ ID NO: 530989 - DNA, 33 bp, Homo sapien
atctaagtttgtttcacggtaggcaaagagaca

SEQ ID NO: 530990 - DNA, 33 bp, Homo sapien
atctaagtttgtttcatggtaggcaaagagaca

SEQ ID NO: 530991 - DNA, 33 bp, Homo sapien
aaaagtagttacaataatagaaatcctcatgcc

SEQ ID NO: 530992 - DNA, 33 bp, Homo sapien
aaaagtagttacaatagtagaaatcctcatgcc

SEQ ID NO: 530993 - DNA, 33 bp, Homo sapien
tcatgcctctgttatccagatttaatatttatc

SEQ ID NO: 530994 - DNA, 33 bp, Homo sapien
tcatgcctctgttatcgagatttaatatttatc

SEQ ID NO: 530995 - DNA, 33 bp, Homo sapien
agatactcctcgacacaagcaaccacaggacat

SEQ ID NO: 530996 - DNA, 33 bp, Homo sapien
agatactcctcgacacgagcaaccacaggacat

SEQ ID NO: 530997 - DNA, 33 bp, Homo sapien
cacagtgtagaatggacaatgatcagaggctct

SEQ ID NO: 530998 - DNA, 33 bp, Homo sapien
cacagtgtagaatggataatgatcagaggctct

SEQ ID NO: 530999 - DNA, 33 bp, Homo sapien
gttgccaacttttccaaagataattttggcaac

SEQ ID NO: 531000 - DNA, 33 bp, Homo sapien
gttgccaacttttccagagataattttggcaac

SEQ ID NO: 531001 - DNA, 33 bp, Homo sapien
tttataaagttatttacgtcaatgttccagtaa

SEQ ID NO: 531002 - DNA, 33 bp, Homo sapien
tttataaagttatttatgtcaatgttccagtaa

SEQ ID NO: 531003 - DNA, 33 bp, Homo sapien
cttgggcaaatgaagacgtcatggatatgatat

SEQ ID NO: 531004 - DNA, 33 bp, Homo sapien
cttgggcaaatgaagaggtcatggatatgatat

SEQ ID NO: 531005 - DNA, 33 bp, Homo sapien
tgttagtttcaaacgaagtacacagtgagtgag

SEQ ID NO: 531006 - DNA, 33 bp, Homo sapien
tgttagtttcaaacgaggtacacagtgagtgag

SEQ ID NO: 531007 - DNA, 33 bp, Homo sapien
aaaagtttatcaaagtaaaagaacttggaagca

SEQ ID NO: 531008 - DNA, 33 bp, Homo sapien
aaaagtttatcaaagtgaaagaacttggaagca

SEQ ID NO: 531009 - DNA, 33 bp, Homo sapien
ggagctcttgctctcacggaacttatgttagac

SEQ ID NO: 531010 - DNA, 33 bp, Homo sapien
ggagctcttgctctcatggaacttatgttagac

SEQ ID NO: 531011 - DNA, 33 bp, Homo sapien
actaataggtcttgaaaatttgttactcacttt

SEQ ID NO: 531012 - DNA, 33 bp, Homo sapien
actaataggtcttgaatatttgttactcacttt

SEQ ID NO: 531013 - DNA, 33 bp, Homo sapien
ggtagctaatattcaccaagcatttgctgtgtg

SEQ ID NO: 531014 - DNA, 33 bp, Homo sapien
ggtagctaatattcacgaagcatttgctgtgtg

SEQ ID NO: 531015 - DNA, 33 bp, Homo sapien
cgccagaaccatctcaaatagacaaagttttta

SEQ ID NO: 531016 - DNA, 33 bp, Homo sapien
cgccagaaccatctcagatagacaaagttttta

SEQ ID NO: 531017 - DNA, 33 bp, Homo sapien
acaagtgtcagtaaccactttaagaacaacaaa

SEQ ID NO: 531018 - DNA, 33 bp, Homo sapien
acaagtgtcagtaaccgctttaagaacaacaaa

SEQ ID NO: 531019 - DNA, 33 bp, Homo sapien
tgactggttgaggacacgatttgagtattattg

SEQ ID NO: 531020 - DNA, 33 bp, Homo sapien
tgactggttgaggacatgatttgagtattattg

SEQ ID NO: 531021 - DNA, 33 bp, Homo sapien
ctcggagtttctccaggatctagatcactcata

SEQ ID NO: 531022 - DNA, 33 bp, Homo sapien
ctcggagtttctccagtatctagatcactcata

SEQ ID NO: 531023 - DNA, 33 bp, Homo sapien
gcaccagcagtgtctagctcctggaagtttgtt

SEQ ID NO: 531024 - DNA, 33 bp, Homo sapien
gcaccagcagtgtctatctcctggaagtttgtt

SEQ ID NO: 531025 - DNA, 33 bp, Homo sapien
cattgctcctgggataagctaataaatatggac

SEQ ID NO: 531026 - DNA, 33 bp, Homo sapien
cattgctcctgggataggctaataaatatggac

SEQ ID NO: 531027 - DNA, 33 bp, Homo sapien
tgataaacaatctacaaggctatgaattggtta

SEQ ID NO: 531028 - DNA, 33 bp, Homo sapien
tgataaacaatctacatggctatgaattggtta

SEQ ID NO: 531029 - DNA, 33 bp, Homo sapien
agtagtaactctaggacgtaggatttgtgataa

SEQ ID NO: 531030 - DNA, 33 bp, Homo sapien
agtagtaactctaggatgtaggatttgtgataa

SEQ ID NO: 531031 - DNA, 33 bp, Homo sapien
ttgtaagtgggaagaccgctaccaaaaccatat

SEQ ID NO: 531032 - DNA, 33 bp, Homo sapien
ttgtaagtgggaagactgctaccaaaaccatat

SEQ ID NO: 531033 - DNA, 33 bp, Homo sapien
ctctgcagtcacaacaatctgtttgttataggg

SEQ ID NO: 531034 - DNA, 33 bp, Homo sapien
ctctgcagtcacaacagtctgtttgttataggg

SEQ ID NO: 531035 - DNA, 33 bp, Homo sapien
catggttatagggctgcaagacagagattctat

SEQ ID NO: 531036 - DNA, 33 bp, Homo sapien
catggttatagggctgtaagacagagattctat

SEQ ID NO: 531037 - DNA, 33 bp, Homo sapien
ctccttgttcatgcacaaaacagaatatgttaa

SEQ ID NO: 531038 - DNA, 33 bp, Homo sapien
ctccttgttcatgcacgaaacagaatatgttaa

SEQ ID NO: 531039 - DNA, 33 bp, Homo sapien
tgtctaagatgtcataaacagagtaaacaacca

SEQ ID NO: 531040 - DNA, 33 bp, Homo sapien
tgtctaagatgtcatatacagagtaaacaacca

SEQ ID NO: 531041 - DNA, 33 bp, Homo sapien
tcttccagtataggacaattctaacatctgtac

SEQ ID NO: 531042 - DNA, 33 bp, Homo sapien
tcttccagtataggacgattctaacatctgtac

SEQ ID NO: 531043 - DNA, 33 bp, Homo sapien
gaaaacatagtgtaaaatgtcagcttacaaaga

SEQ ID NO: 531044 - DNA, 33 bp, Homo sapien
gaaaacatagtgtaaagtgtcagcttacaaaga

SEQ ID NO: 531045 - DNA, 33 bp, Homo sapien
cccttcttgaagctcagatgttagtaagctagt

SEQ ID NO: 531046 - DNA, 33 bp, Homo sapien
cccttcttgaagctcatatgttagtaagctagt

SEQ ID NO: 531047 - DNA, 33 bp, Homo sapien
gcaaaatggtgttagaaaaacagaatttgtaaa

SEQ ID NO: 531048 - DNA, 33 bp, Homo sapien
gcaaaatggtgttagacaaacagaatttgtaaa

SEQ ID NO: 531049 - DNA, 33 bp, Homo sapien
tacctctttttacaaaatgggaacagtactagc

SEQ ID NO: 531050 - DNA, 33 bp, Homo sapien
tacctctttttacaaagtgggaacagtactagc

SEQ ID NO: 531051 - DNA, 33 bp, Homo sapien
gagagtttttgaaagaagcaccacaaatgaatt

SEQ ID NO: 531052 - DNA, 33 bp, Homo sapien
gagagtttttgaaagaggcaccacaaatgaatt

SEQ ID NO: 531053 - DNA, 33 bp, Homo sapien
ggagctgcgctttgaaggcctcagaaactgttc

SEQ ID NO: 531054 - DNA, 33 bp, Homo sapien
ggagctgcgctttgaatgcctcagaaactgttc

SEQ ID NO: 531055 - DNA, 33 bp, Homo sapien
caacattttagggaagaacaagcacactctgag

SEQ ID NO: 531056 - DNA, 33 bp, Homo sapien
caacattttagggaaggacaagcacactctgag

SEQ ID NO: 531057 - DNA, 33 bp, Homo sapien
tataattcctggcatacgtagagtattaccttt

SEQ ID NO: 531058 - DNA, 33 bp, Homo sapien
tataattcctggcatatgtagagtattaccttt

SEQ ID NO: 531059 - DNA, 33 bp, Homo sapien
gctaaaaaaatacttacgtcaagtgcctttcac

SEQ ID NO: 531060 - DNA, 33 bp, Homo sapien
gctaaaaaaatacttatgtcaagtgcctttcac

SEQ ID NO: 531061 - DNA, 33 bp, Homo sapien
cttgggaatgagagtacagaattttggaaatag

SEQ ID NO: 531062 - DNA, 33 bp, Homo sapien
cttgggaatgagagtagagaattttggaaatag

SEQ ID NO: 531063 - DNA, 33 bp, Homo sapien
ttaaaatgagcttgaggagattttaaagtcagg

SEQ ID NO: 531064 - DNA, 33 bp, Homo sapien
ttaaaatgagcttgagtagattttaaagtcagg

SEQ ID NO: 531065 - DNA, 33 bp, Homo sapien
gtgagctctaaacccaacggcaagcatccttat

SEQ ID NO: 531066 - DNA, 33 bp, Homo sapien
gtgagctctaaacccagcggcaagcatccttat

SEQ ID NO: 531067 - DNA, 33 bp, Homo sapien
gaatccagcaatgtatcaaaagaattatatacc

SEQ ID NO: 531068 - DNA, 33 bp, Homo sapien
gaatccagcaatgtatgaaaagaattatatacc

SEQ ID NO: 531069 - DNA, 33 bp, Homo sapien
gttgttctaaagctcagatctaaaagttctgta

SEQ ID NO: 531070 - DNA, 33 bp, Homo sapien
gttgttctaaagctcatatctaaaagttctgta

SEQ ID NO: 531071 - DNA, 33 bp, Homo sapien
tctggtactcagaactaaactttttgcctccct

SEQ ID NO: 531072 - DNA, 33 bp, Homo sapien
tctggtactcagaactcaactttttgcctccct

SEQ ID NO: 531073 - DNA, 33 bp, Homo sapien
gctttccacaatcatacgaaaggttgtcttcac

SEQ ID NO: 531074 - DNA, 33 bp, Homo sapien
gctttccacaatcatatgaaaggttgtcttcac

SEQ ID NO: 531075 - DNA, 33 bp, Homo sapien
tctggtatagatcaaacgcagctataaccagta

SEQ ID NO: 531076 - DNA, 33 bp, Homo sapien
tctggtatagatcaaatgcagctataaccagta

SEQ ID NO: 531077 - DNA, 33 bp, Homo sapien
ccagtattctaaaaaaaacagtgctgtaacagg

SEQ ID NO: 531078 - DNA, 33 bp, Homo sapien
ccagtattctaaaaaacacagtgctgtaacagg

SEQ ID NO: 531079 - DNA, 33 bp, Homo sapien
gaaaatatgtgtttcacgaagatgtgcagcaac

SEQ ID NO: 531080 - DNA, 33 bp, Homo sapien
gaaaatatgtgtttcatgaagatgtgcagcaac

SEQ ID NO: 531081 - DNA, 33 bp, Homo sapien
caacatcagttttacccaagggctgttttcatt

SEQ ID NO: 531082 - DNA, 33 bp, Homo sapien
caacatcagttttacctaagggctgttttcatt

SEQ ID NO: 531083 - DNA, 33 bp, Homo sapien
gatcaattgttccaaaatggttttccttagtat

SEQ ID NO: 531084 - DNA, 33 bp, Homo sapien
gatcaattgttccaaagtggttttccttagtat

SEQ ID NO: 531085 - DNA, 33 bp, Homo sapien
gaacaattttaatggacatgatttgtagtgtcc

SEQ ID NO: 531086 - DNA, 33 bp, Homo sapien
gaacaattttaatggatatgatttgtagtgtcc

SEQ ID NO: 531087 - DNA, 33 bp, Homo sapien
ggcacattaataccacactgattactttgtctg

SEQ ID NO: 531088 - DNA, 33 bp, Homo sapien
ggcacattaataccacgctgattactttgtctg

SEQ ID NO: 531089 - DNA, 33 bp, Homo sapien
cgaacacaccttatcaactacatcccttgtgac

SEQ ID NO: 531090 - DNA, 33 bp, Homo sapien
cgaacacaccttatcagctacatcccttgtgac

SEQ ID NO: 531091 - DNA, 33 bp, Homo sapien
aactcctatccaaacacattatgctcctttgtg

SEQ ID NO: 531092 - DNA, 33 bp, Homo sapien
aactcctatccaaacatattatgctcctttgtg

SEQ ID NO: 531093 - DNA, 33 bp, Homo sapien
taaaatacaacattgcaagaaacgtttcagctt

SEQ ID NO: 531094 - DNA, 33 bp, Homo sapien
taaaatacaacattgctagaaacgtttcagctt

SEQ ID NO: 531095 - DNA, 33 bp, Homo sapien
ttgtgggaatcaaaaaacaagttgtagtccagc

SEQ ID NO: 531096 - DNA, 33 bp, Homo sapien
ttgtgggaatcaaaaatcaagttgtagtccagc

SEQ ID NO: 531097 - DNA, 33 bp, Homo sapien
ccatgctaggaacttaagtgtggaatggacaaa

SEQ ID NO: 531098 - DNA, 33 bp, Homo sapien
ccatgctaggaacttacgtgtggaatggacaaa

SEQ ID NO: 531099 - DNA, 33 bp, Homo sapien
acacacaacatttagcaataatggcctgtattt

SEQ ID NO: 531100 - DNA, 33 bp, Homo sapien
acacacaacatttagcgataatggcctgtattt

SEQ ID NO: 531101 - DNA, 33 bp, Homo sapien
ccacagcaatgaatgacagtatctgtttctcca

SEQ ID NO: 531102 - DNA, 33 bp, Homo sapien
ccacagcaatgaatgagagtatctgtttctcca

SEQ ID NO: 531103 - DNA, 33 bp, Homo sapien
ttcttcctatcctagcacaggtcatgagtagta

SEQ ID NO: 531104 - DNA, 33 bp, Homo sapien
ttcttcctatcctagcgcaggtcatgagtagta

SEQ ID NO: 531105 - DNA, 33 bp, Homo sapien
ctctctcttttccaaaccttcaatgctgttaaa

SEQ ID NO: 531106 - DNA, 33 bp, Homo sapien
ctctctcttttccaaatcttcaatgctgttaaa

SEQ ID NO: 531107 - DNA, 33 bp, Homo sapien
atagatgttatcactcacgagagagttatgatt

SEQ ID NO: 531108 - DNA, 33 bp, Homo sapien
atagatgttatcactcgcgagagagttatgatt

SEQ ID NO: 531109 - DNA, 33 bp, Homo sapien
ggactgaaattttacacccagggacagtatctc

SEQ ID NO: 531110 - DNA, 33 bp, Homo sapien
ggactgaaattttacatccagggacagtatctc

SEQ ID NO: 531111 - DNA, 33 bp, Homo sapien
aaatttatgaagttcaagttgtaaagaacaaac

SEQ ID NO: 531112 - DNA, 33 bp, Homo sapien
aaatttatgaagttcaggttgtaaagaacaaac

SEQ ID NO: 531113 - DNA, 33 bp, Homo sapien
tacacttgggttcttgaacttttggaagaccaa

SEQ ID NO: 531114 - DNA, 33 bp, Homo sapien
tacacttgggttcttggacttttggaagaccaa

SEQ ID NO: 531115 - DNA, 33 bp, Homo sapien
aagaatcctgcccttcacgtccttagccaaggc

SEQ ID NO: 531116 - DNA, 33 bp, Homo sapien
aagaatcctgcccttcgcgtccttagccaaggc

SEQ ID NO: 531117 - DNA, 33 bp, Homo sapien
ttagcaggtacacagacgagaaaaatatcagca

SEQ ID NO: 531118 - DNA, 33 bp, Homo sapien
ttagcaggtacacagatgagaaaaatatcagca

SEQ ID NO: 531119 - DNA, 33 bp, Homo sapien
ctcattccctctaacacaggatttcccagcctc

SEQ ID NO: 531120 - DNA, 33 bp, Homo sapien
ctcattccctctaacataggatttcccagcctc

SEQ ID NO: 531121 - DNA, 33 bp, Homo sapien
aaaatttcatccctgaatcagacaatagtatca

SEQ ID NO: 531122 - DNA, 33 bp, Homo sapien
aaaatttcatccctgagtcagacaatagtatca

SEQ ID NO: 531123 - DNA, 33 bp, Homo sapien
tttaattaaagtgataacagtgcttaatgtaat

SEQ ID NO: 531124 - DNA, 33 bp, Homo sapien
tttaattaaagtgatatcagtgcttaatgtaat

SEQ ID NO: 531125 - DNA, 33 bp, Homo sapien
ttcagtgcatggagtacaagagttgagtcttgg

SEQ ID NO: 531126 - DNA, 33 bp, Homo sapien
ttcagtgcatggagtataagagttgagtcttgg

SEQ ID NO: 531127 - DNA, 33 bp, Homo sapien
gtcattttcagtaacaaggatgcagctggaggc

SEQ ID NO: 531128 - DNA, 33 bp, Homo sapien
gtcattttcagtaacatggatgcagctggaggc

SEQ ID NO: 531129 - DNA, 33 bp, Homo sapien
aatgaagtgaggaagacatgaagacttgttgtt

SEQ ID NO: 531130 - DNA, 33 bp, Homo sapien
aatgaagtgaggaagatatgaagacttgttgtt

SEQ ID NO: 531131 - DNA, 33 bp, Homo sapien
catataccaaagctcaatctgatataatcaagg

SEQ ID NO: 531132 - DNA, 33 bp, Homo sapien
catataccaaagctcagtctgatataatcaagg

SEQ ID NO: 531133 - DNA, 33 bp, Homo sapien
aacagaaaactccgtgcagtagattgaacttgg

SEQ ID NO: 531134 - DNA, 33 bp, Homo sapien
aacagaaaactccgtgtagtagattgaacttgg

SEQ ID NO: 531135 - DNA, 33 bp, Homo sapien
ggcttacaggctctaaacctctatcagactgat

SEQ ID NO: 531136 - DNA, 33 bp, Homo sapien
ggcttacaggctctaatcctctatcagactgat

SEQ ID NO: 531137 - DNA, 33 bp, Homo sapien
agggccggttagggtaactagtcagccttattg

SEQ ID NO: 531138 - DNA, 33 bp, Homo sapien
agggccggttagggtagctagtcagccttattg

SEQ ID NO: 531139 - DNA, 33 bp, Homo sapien
tactcattagaaacaaatgaaggctagaagaca

SEQ ID NO: 531140 - DNA, 33 bp, Homo sapien
tactcattagaaacaactgaaggctagaagaca

SEQ ID NO: 531141 - DNA, 33 bp, Homo sapien
cagatataatgtggaacccatgactagaggact

SEQ ID NO: 531142 - DNA, 33 bp, Homo sapien
cagatataatgtggaatccatgactagaggact

SEQ ID NO: 531143 - DNA, 33 bp, Homo sapien
actctaagacttcctaagattcttctgtctatt

SEQ ID NO: 531144 - DNA, 33 bp, Homo sapien
actctaagacttcctacgattcttctgtctatt

SEQ ID NO: 531145 - DNA, 33 bp, Homo sapien
aatttgaccaatggaaaattagcaagtatgatg

SEQ ID NO: 531146 - DNA, 33 bp, Homo sapien
aatttgaccaatggaacattagcaagtatgatg

SEQ ID NO: 531147 - DNA, 33 bp, Homo sapien
atgctgaatacagaagccagacaaaggaatgca

SEQ ID NO: 531148 - DNA, 33 bp, Homo sapien
atgctgaatacagaagtcagacaaaggaatgca

SEQ ID NO: 531149 - DNA, 33 bp, Homo sapien
gatgaaaaaactcaagaaacataaggtgaatag

SEQ ID NO: 531150 - DNA, 33 bp, Homo sapien
gatgaaaaaactcaagcaacataaggtgaatag

SEQ ID NO: 531151 - DNA, 33 bp, Homo sapien
gagttcatgtgatttacgtagccctggcaggaa

SEQ ID NO: 531152 - DNA, 33 bp, Homo sapien
gagttcatgtgatttatgtagccctggcaggaa

SEQ ID NO: 531153 - DNA, 33 bp, Homo sapien
aactgtagagcattgaaagatcttagacattgt

SEQ ID NO: 531154 - DNA, 33 bp, Homo sapien
aactgtagagcattgagagatcttagacattgt

SEQ ID NO: 531155 - DNA, 33 bp, Homo sapien
cagttgcaaattagtgcagagaacttagagcat

SEQ ID NO: 531156 - DNA, 33 bp, Homo sapien
cagttgcaaattagtgtagagaacttagagcat

SEQ ID NO: 531157 - DNA, 33 bp, Homo sapien
tagagaacttggttacacacctgttcctgtggc

SEQ ID NO: 531158 - DNA, 33 bp, Homo sapien
tagagaacttggttacccacctgttcctgtggc

SEQ ID NO: 531159 - DNA, 33 bp, Homo sapien
ctaaatcaaacaatgaataacagttctgcaaac

SEQ ID NO: 531160 - DNA, 33 bp, Homo sapien
ctaaatcaaacaatgagtaacagttctgcaaac

SEQ ID NO: 531161 - DNA, 33 bp, Homo sapien
cccagtggacatttaccccatcttcaggtgttt

SEQ ID NO: 531162 - DNA, 33 bp, Homo sapien
cccagtggacatttactccatcttcaggtgttt

SEQ ID NO: 531163 - DNA, 33 bp, Homo sapien
gcaacctgtgatctaagattttttttactacaa

SEQ ID NO: 531164 - DNA, 33 bp, Homo sapien
gcaacctgtgatctaatattttttttactacaa

SEQ ID NO: 531165 - DNA, 33 bp, Homo sapien
gaattattttttaccaatcaacaataagattaa

SEQ ID NO: 531166 - DNA, 33 bp, Homo sapien
gaattattttttaccagtcaacaataagattaa

SEQ ID NO: 531167 - DNA, 33 bp, Homo sapien
tttgttgtgattggacacgtttggtcacattcc

SEQ ID NO: 531168 - DNA, 33 bp, Homo sapien
tttgttgtgattggactcgtttggtcacattcc

SEQ ID NO: 531169 - DNA, 33 bp, Homo sapien
ccaaattaaaaatattcaaacagctacaatttt

SEQ ID NO: 531170 - DNA, 33 bp, Homo sapien
ccaaattaaaaatattgaaacagctacaatttt

SEQ ID NO: 531171 - DNA, 33 bp, Homo sapien
ggaatagcattgaaatcagtaaggctcttttac

SEQ ID NO: 531172 - DNA, 33 bp, Homo sapien
ggaatagcattgaaattagtaaggctcttttac

SEQ ID NO: 531173 - DNA, 33 bp, Homo sapien
cctttcttcttgcaaccggaatttggggctccc

SEQ ID NO: 531174 - DNA, 33 bp, Homo sapien
cctttcttcttgcaactggaatttggggctccc

SEQ ID NO: 531175 - DNA, 33 bp, Homo sapien
ttacattgttctgtaactgtttcttgttctttt

SEQ ID NO: 531176 - DNA, 33 bp, Homo sapien
ttacattgttctgtaattgtttcttgttctttt

SEQ ID NO: 531177 - DNA, 33 bp, Homo sapien
cctgtctctagctttcccaaaattgtttcatcc

SEQ ID NO: 531178 - DNA, 33 bp, Homo sapien
cctgtctctagctttctcaaaattgtttcatcc

SEQ ID NO: 531179 - DNA, 33 bp, Homo sapien
acttgtggagaggtgacgaggaatactctgaaa

SEQ ID NO: 531180 - DNA, 33 bp, Homo sapien
acttgtggagaggtgatgaggaatactctgaaa

SEQ ID NO: 531181 - DNA, 33 bp, Homo sapien
atttgttgagggaaaggctctagacagaagcaa

SEQ ID NO: 531182 - DNA, 33 bp, Homo sapien
atttgttgagggaaagtctctagacagaagcaa

SEQ ID NO: 531183 - DNA, 33 bp, Homo sapien
gtgatcagacccaacaacagatcgtgggggtga

SEQ ID NO: 531184 - DNA, 33 bp, Homo sapien
gtgatcagacccaacaccagatcgtgggggtga

SEQ ID NO: 531185 - DNA, 33 bp, Homo sapien
cctatctcgtaatttacgaaggaacgaggttta

SEQ ID NO: 531186 - DNA, 33 bp, Homo sapien
cctatctcgtaatttatgaaggaacgaggttta

SEQ ID NO: 531187 - DNA, 33 bp, Homo sapien
ttggagccagctgaagccagagttgtgaagttc

SEQ ID NO: 531188 - DNA, 33 bp, Homo sapien
ttggagccagctgaagtcagagttgtgaagttc

SEQ ID NO: 531189 - DNA, 33 bp, Homo sapien
taagtcaaagcaataacctgtggacgatagctt

SEQ ID NO: 531190 - DNA, 33 bp, Homo sapien
taagtcaaagcaataatctgtggacgatagctt

SEQ ID NO: 531191 - DNA, 33 bp, Homo sapien
tctctttcaaggaagcactggttactggatagc

SEQ ID NO: 531192 - DNA, 33 bp, Homo sapien
tctctttcaaggaagcgctggttactggatagc

SEQ ID NO: 531193 - DNA, 33 bp, Homo sapien
ttgttttaatgaggaaaatacagatgcaggagg

SEQ ID NO: 531194 - DNA, 33 bp, Homo sapien
ttgttttaatgaggaagatacagatgcaggagg

SEQ ID NO: 531195 - DNA, 33 bp, Homo sapien
taaatgatgagaattactaactcaaagaaggaa

SEQ ID NO: 531196 - DNA, 33 bp, Homo sapien
taaatgatgagaattattaactcaaagaaggaa

SEQ ID NO: 531197 - DNA, 33 bp, Homo sapien
ttgcagaagcacagcagactttgttcatgttga

SEQ ID NO: 531198 - DNA, 33 bp, Homo sapien
ttgcagaagcacagcatactttgttcatgttga

SEQ ID NO: 531199 - DNA, 33 bp, Homo sapien
ctaaactgatcattaccgccagtataaagcact

SEQ ID NO: 531200 - DNA, 33 bp, Homo sapien
ctaaactgatcattactgccagtataaagcact

SEQ ID NO: 531201 - DNA, 33 bp, Homo sapien
tctttagaagtgtcagaaaaattgagaaatgtc

SEQ ID NO: 531202 - DNA, 33 bp, Homo sapien
tctttagaagtgtcaggaaaattgagaaatgtc

SEQ ID NO: 531203 - DNA, 33 bp, Homo sapien
cataaaaattctcaaactcctgtctgtttttac

SEQ ID NO: 531204 - DNA, 33 bp, Homo sapien
cataaaaattctcaaagtcctgtctgtttttac

SEQ ID NO: 531205 - DNA, 33 bp, Homo sapien
gcattgataagacaccaagggaattcccaggat

SEQ ID NO: 531206 - DNA, 33 bp, Homo sapien
gcattgataagacaccgagggaattcccaggat

SEQ ID NO: 531207 - DNA, 33 bp, Homo sapien
tatgttaggaaatagaactcattgatattagaa

SEQ ID NO: 531208 - DNA, 33 bp, Homo sapien
tatgttaggaaatagagctcattgatattagaa

SEQ ID NO: 531209 - DNA, 33 bp, Homo sapien
taagcatctttcaagccaagagaatcgagcatt

SEQ ID NO: 531210 - DNA, 33 bp, Homo sapien
taagcatctttcaagctaagagaatcgagcatt

SEQ ID NO: 531211 - DNA, 33 bp, Homo sapien
agctgcccttcctttaaaatgctgtcaagtcaa

SEQ ID NO: 531212 - DNA, 33 bp, Homo sapien
agctgcccttcctttataatgctgtcaagtcaa

SEQ ID NO: 531213 - DNA, 33 bp, Homo sapien
gaccatgactgttatacgcctttaatcctccca

SEQ ID NO: 531214 - DNA, 33 bp, Homo sapien
gaccatgactgttatatgcctttaatcctccca

SEQ ID NO: 531215 - DNA, 33 bp, Homo sapien
ataacaggctgcaataactgaggattttatata

SEQ ID NO: 531216 - DNA, 33 bp, Homo sapien
ataacaggctgcaatagctgaggattttatata

SEQ ID NO: 531217 - DNA, 33 bp, Homo sapien
cactaaattagatgcacagggatgatttaatat

SEQ ID NO: 531218 - DNA, 33 bp, Homo sapien
cactaaattagatgcagagggatgatttaatat

SEQ ID NO: 531219 - DNA, 33 bp, Homo sapien
tgatttaatatttagtcaagagacgatgcaata

SEQ ID NO: 531220 - DNA, 33 bp, Homo sapien
tgatttaatatttagttaagagacgatgcaata

SEQ ID NO: 531221 - DNA, 33 bp, Homo sapien
tcctttaattggtaaacctcaattccaatggca

SEQ ID NO: 531222 - DNA, 33 bp, Homo sapien
tcctttaattggtaaatctcaattccaatggca

SEQ ID NO: 531223 - DNA, 33 bp, Homo sapien
cctgtattcaaaatacaaaatccaaaacaattc

SEQ ID NO: 531224 - DNA, 33 bp, Homo sapien
cctgtattcaaaatacgaaatccaaaacaattc

SEQ ID NO: 531225 - DNA, 33 bp, Homo sapien
tagttaaacacttgcactcatctcatcctatta

SEQ ID NO: 531226 - DNA, 33 bp, Homo sapien
tagttaaacacttgcattcatctcatcctatta

SEQ ID NO: 531227 - DNA, 33 bp, Homo sapien
aacaaccaaatctggacgatggagattgagcct

SEQ ID NO: 531228 - DNA, 33 bp, Homo sapien
aacaaccaaatctggatgatggagattgagcct

SEQ ID NO: 531229 - DNA, 33 bp, Homo sapien
aatgactcaacaaaatgatttacccatatattg

SEQ ID NO: 531230 - DNA, 33 bp, Homo sapien
aatgactcaacaaaattatttacccatatattg

SEQ ID NO: 531231 - DNA, 33 bp, Homo sapien
cctaggtagaaccgaaaagagtaatatagctat

SEQ ID NO: 531232 - DNA, 33 bp, Homo sapien
cctaggtagaaccgaagagagtaatatagctat

SEQ ID NO: 531233 - DNA, 33 bp, Homo sapien
gcttgctgtctatatacatgagaaaactaagga

SEQ ID NO: 531234 - DNA, 33 bp, Homo sapien
gcttgctgtctatatatatgagaaaactaagga

SEQ ID NO: 531235 - DNA, 33 bp, Homo sapien
catcagatgactaaaacattcaaaaaaatatcc

SEQ ID NO: 531236 - DNA, 33 bp, Homo sapien
catcagatgactaaaagattcaaaaaaatatcc

SEQ ID NO: 531237 - DNA, 33 bp, Homo sapien
tagcctatgacttgccccttagaggtcaaacct

SEQ ID NO: 531238 - DNA, 33 bp, Homo sapien
tagcctatgacttgccgcttagaggtcaaacct

SEQ ID NO: 531239 - DNA, 33 bp, Homo sapien
cccaagctagaccatcaatagttcctcactccc

SEQ ID NO: 531240 - DNA, 33 bp, Homo sapien
cccaagctagaccatcgatagttcctcactccc

SEQ ID NO: 531241 - DNA, 33 bp, Homo sapien
atgtgatgaaattcaaccttcatttataataaa

SEQ ID NO: 531242 - DNA, 33 bp, Homo sapien
atgtgatgaaattcaatcttcatttataataaa

SEQ ID NO: 531243 - DNA, 33 bp, Homo sapien
aactattgtcttctgaacacatgcaggcccaac

SEQ ID NO: 531244 - DNA, 33 bp, Homo sapien
aactattgtcttctgagcacatgcaggcccaac

SEQ ID NO: 531245 - DNA, 33 bp, Homo sapien
ccggcatggaagtgaacgattggactcttagct

SEQ ID NO: 531246 - DNA, 33 bp, Homo sapien
ccggcatggaagtgaatgattggactcttagct

SEQ ID NO: 531247 - DNA, 33 bp, Homo sapien
cttattaaacccaatccacagaatcatcacgtg

SEQ ID NO: 531248 - DNA, 33 bp, Homo sapien
cttattaaacccaatcgacagaatcatcacgtg

SEQ ID NO: 531249 - DNA, 33 bp, Homo sapien
gaagctatctctaacagaattaatgcacaaagt

SEQ ID NO: 531250 - DNA, 33 bp, Homo sapien
gaagctatctctaacataattaatgcacaaagt

SEQ ID NO: 531251 - DNA, 33 bp, Homo sapien
tctatcccacttcacactgctttataagcaaaa

SEQ ID NO: 531252 - DNA, 33 bp, Homo sapien
tctatcccacttcacattgctttataagcaaaa

SEQ ID NO: 531253 - DNA, 33 bp, Homo sapien
agcagaaagagatttacagtcagaatcactttt

SEQ ID NO: 531254 - DNA, 33 bp, Homo sapien
agcagaaagagatttatagtcagaatcactttt

SEQ ID NO: 531255 - DNA, 33 bp, Homo sapien
aagtcatttgagaagaagtttatgttttcctct

SEQ ID NO: 531256 - DNA, 33 bp, Homo sapien
aagtcatttgagaagaggtttatgttttcctct

SEQ ID NO: 531257 - DNA, 33 bp, Homo sapien
ctggggttaaaactcgaagttgaagcctaagtt

SEQ ID NO: 531258 - DNA, 33 bp, Homo sapien
ctggggttaaaactcggagttgaagcctaagtt

SEQ ID NO: 531259 - DNA, 33 bp, Homo sapien
tgatttggtcttagcacctggtttgtcctctct

SEQ ID NO: 531260 - DNA, 33 bp, Homo sapien
tgatttggtcttagcatctggtttgtcctctct

SEQ ID NO: 531261 - DNA, 33 bp, Homo sapien
ctgagaatagcatttcaattgtggttcaagaaa

SEQ ID NO: 531262 - DNA, 33 bp, Homo sapien
ctgagaatagcatttccattgtggttcaagaaa

SEQ ID NO: 531263 - DNA, 33 bp, Homo sapien
aatcagaatggcaaccaaaaaataacaaagtga

SEQ ID NO: 531264 - DNA, 33 bp, Homo sapien
aatcagaatggcaaccgaaaaataacaaagtga

SEQ ID NO: 531265 - DNA, 33 bp, Homo sapien
tatagtcttcttttcaaccatttcagatcattc

SEQ ID NO: 531266 - DNA, 33 bp, Homo sapien
tatagtcttcttttcacccatttcagatcattc

SEQ ID NO: 531267 - DNA, 33 bp, Homo sapien
gttgaaaacaattgcacgagtccaacttgctct

SEQ ID NO: 531268 - DNA, 33 bp, Homo sapien
gttgaaaacaattgcatgagtccaacttgctct

SEQ ID NO: 531269 - DNA, 33 bp, Homo sapien
tttttgctaatagaaacgcaagacaataattgc

SEQ ID NO: 531270 - DNA, 33 bp, Homo sapien
tttttgctaatagaaaggcaagacaataattgc

SEQ ID NO: 531271 - DNA, 33 bp, Homo sapien
ccaaacttctttacaggatcctcagtatttttt

SEQ ID NO: 531272 - DNA, 33 bp, Homo sapien
ccaaacttctttacagtatcctcagtatttttt

SEQ ID NO: 531273 - DNA, 33 bp, Homo sapien
gcctctgcacagactcagaaccacctatcttgt

SEQ ID NO: 531274 - DNA, 33 bp, Homo sapien
gcctctgcacagactcggaaccacctatcttgt

SEQ ID NO: 531275 - DNA, 33 bp, Homo sapien
cattttgcagctcaagacaccctgaaagaatta

SEQ ID NO: 531276 - DNA, 33 bp, Homo sapien
cattttgcagctcaaggcaccctgaaagaatta

SEQ ID NO: 531277 - DNA, 33 bp, Homo sapien
tgcaggccctgaggataatcatgaaagactgat

SEQ ID NO: 531278 - DNA, 33 bp, Homo sapien
tgcaggccctgaggatgatcatgaaagactgat

SEQ ID NO: 531279 - DNA, 33 bp, Homo sapien
catttccaatataatcacgtgcacaaaactaca

SEQ ID NO: 531280 - DNA, 33 bp, Homo sapien
catttccaatataatcgcgtgcacaaaactaca

SEQ ID NO: 531281 - DNA, 33 bp, Homo sapien
ttacccacaatcttaccaacaaaaggctgtcca

SEQ ID NO: 531282 - DNA, 33 bp, Homo sapien
ttacccacaatcttactaacaaaaggctgtcca

SEQ ID NO: 531283 - DNA, 33 bp, Homo sapien
agcagttctgagtaagaagttgaataaatggat

SEQ ID NO: 531284 - DNA, 33 bp, Homo sapien
agcagttctgagtaaggagttgaataaatggat

SEQ ID NO: 531285 - DNA, 33 bp, Homo sapien
gcaggagagtaaacaaaggaaaagagtcttcta

SEQ ID NO: 531286 - DNA, 33 bp, Homo sapien
gcaggagagtaaacaagggaaaagagtcttcta

SEQ ID NO: 531287 - DNA, 33 bp, Homo sapien
taacgttctggtcaaacgtggtgagataagtgt

SEQ ID NO: 531288 - DNA, 33 bp, Homo sapien
taacgttctggtcaaatgtggtgagataagtgt

SEQ ID NO: 531289 - DNA, 33 bp, Homo sapien
caaagatgctaaaagacaagatgcttgacaagg

SEQ ID NO: 531290 - DNA, 33 bp, Homo sapien
caaagatgctaaaagagaagatgcttgacaagg

SEQ ID NO: 531291 - DNA, 33 bp, Homo sapien
ataggctgcagaagtcaacagggaacctataat

SEQ ID NO: 531292 - DNA, 33 bp, Homo sapien
ataggctgcagaagtcgacagggaacctataat

SEQ ID NO: 531293 - DNA, 33 bp, Homo sapien
tacttgtgggcaaacaatgagttggaacaaaag

SEQ ID NO: 531294 - DNA, 33 bp, Homo sapien
tacttgtgggcaaacagtgagttggaacaaaag

SEQ ID NO: 531295 - DNA, 33 bp, Homo sapien
ttttggaaaactgggacgtagagatgttagaaa

SEQ ID NO: 531296 - DNA, 33 bp, Homo sapien
ttttggaaaactgggatgtagagatgttagaaa

SEQ ID NO: 531297 - DNA, 33 bp, Homo sapien
aattgtaatgcaatggcatttgtatatctaaaa

SEQ ID NO: 531298 - DNA, 33 bp, Homo sapien
aattgtaatgcaatggtatttgtatatctaaaa

SEQ ID NO: 531299 - DNA, 33 bp, Homo sapien
gcaaagcctaagataacgttccagtggttatga

SEQ ID NO: 531300 - DNA, 33 bp, Homo sapien
gcaaagcctaagataatgttccagtggttatga

SEQ ID NO: 531301 - DNA, 33 bp, Homo sapien
ccagaggcttgggaataagtgatacagggtgca

SEQ ID NO: 531302 - DNA, 33 bp, Homo sapien
ccagaggcttgggaatgagtgatacagggtgca

SEQ ID NO: 531303 - DNA, 33 bp, Homo sapien
ttcacatttaatcggggaaagtatgacaatagt

SEQ ID NO: 531304 - DNA, 33 bp, Homo sapien
ttcacatttaatcgggtaaagtatgacaatagt

SEQ ID NO: 531305 - DNA, 33 bp, Homo sapien
aattgaccaggcagacccatcttttttatctgt

SEQ ID NO: 531306 - DNA, 33 bp, Homo sapien
aattgaccaggcagactcatcttttttatctgt

SEQ ID NO: 531307 - DNA, 33 bp, Homo sapien
agagaacaccataaagaagtcataaaagacact

SEQ ID NO: 531308 - DNA, 33 bp, Homo sapien
agagaacaccataaaggagtcataaaagacact

SEQ ID NO: 531309 - DNA, 33 bp, Homo sapien
gaaaactagctggtaggatcttagtctgtctgg

SEQ ID NO: 531310 - DNA, 33 bp, Homo sapien
gaaaactagctggtagtatcttagtctgtctgg

SEQ ID NO: 531311 - DNA, 33 bp, Homo sapien
aaagataataattaaaacagacttcttgtcaga

SEQ ID NO: 531312 - DNA, 33 bp, Homo sapien
aaagataataattaaagcagacttcttgtcaga

SEQ ID NO: 531313 - DNA, 33 bp, Homo sapien
tgaggtttgagggacccatgtcaagattttcaa

SEQ ID NO: 531314 - DNA, 33 bp, Homo sapien
tgaggtttgagggacctatgtcaagattttcaa

SEQ ID NO: 531315 - DNA, 33 bp, Homo sapien
taaaagaatttggacaggagcttcaaaagaagt

SEQ ID NO: 531316 - DNA, 33 bp, Homo sapien
taaaagaatttggacatgagcttcaaaagaagt

SEQ ID NO: 531317 - DNA, 33 bp, Homo sapien
ttcagtttagtcattacgctcctttctaaaaac

SEQ ID NO: 531318 - DNA, 33 bp, Homo sapien
ttcagtttagtcattatgctcctttctaaaaac

SEQ ID NO: 531319 - DNA, 33 bp, Homo sapien
tttttttggatgatagaactgtttttctttttg

SEQ ID NO: 531320 - DNA, 33 bp, Homo sapien
tttttttggatgataggactgtttttctttttg

SEQ ID NO: 531321 - DNA, 33 bp, Homo sapien
taccaaatttgcattcacagtttatcaaagagg

SEQ ID NO: 531322 - DNA, 33 bp, Homo sapien
taccaaatttgcattcgcagtttatcaaagagg

SEQ ID NO: 531323 - DNA, 33 bp, Homo sapien
acagggaggtagaaaaaatacacaatgttgtgg

SEQ ID NO: 531324 - DNA, 33 bp, Homo sapien
acagggaggtagaaaatatacacaatgttgtgg

SEQ ID NO: 531325 - DNA, 33 bp, Homo sapien
gatctgaacagtagaacgtgaacagaagtttgg

SEQ ID NO: 531326 - DNA, 33 bp, Homo sapien
gatctgaacagtagaatgtgaacagaagtttgg

SEQ ID NO: 531327 - DNA, 33 bp, Homo sapien
tagctacaatattacaatctctgtctctgtcta

SEQ ID NO: 531328 - DNA, 33 bp, Homo sapien
tagctacaatattacagtctctgtctctgtcta

SEQ ID NO: 531329 - DNA, 33 bp, Homo sapien
cacaaagagataaacaatagacattggagtcta

SEQ ID NO: 531330 - DNA, 33 bp, Homo sapien
cacaaagagataaacagtagacattggagtcta

SEQ ID NO: 531331 - DNA, 33 bp, Homo sapien
taaaggtattaaatcaataagtctctctgtctt

SEQ ID NO: 531332 - DNA, 33 bp, Homo sapien
taaaggtattaaatcagtaagtctctctgtctt

SEQ ID NO: 531333 - DNA, 33 bp, Homo sapien
ctcttgtttgccccaacggttatcactgcctca

SEQ ID NO: 531334 - DNA, 33 bp, Homo sapien
ctcttgtttgccccaatggttatcactgcctca

SEQ ID NO: 531335 - DNA, 33 bp, Homo sapien
acaaatgtactgaaagaaacatgggattttatt

SEQ ID NO: 531336 - DNA, 33 bp, Homo sapien
acaaatgtactgaaaggaacatgggattttatt

SEQ ID NO: 531337 - DNA, 33 bp, Homo sapien
ctagtctgagtgttacaacccactaacattatt

SEQ ID NO: 531338 - DNA, 33 bp, Homo sapien
ctagtctgagtgttacgacccactaacattatt

SEQ ID NO: 531339 - DNA, 33 bp, Homo sapien
tgtcttttctgtaatacgttttgatgcattccc

SEQ ID NO: 531340 - DNA, 33 bp, Homo sapien
tgtcttttctgtaataggttttgatgcattccc

SEQ ID NO: 531341 - DNA, 33 bp, Homo sapien
acagaaaagacagatacattgcttcttgcatca

SEQ ID NO: 531342 - DNA, 33 bp, Homo sapien
acagaaaagacagatatattgcttcttgcatca

SEQ ID NO: 531343 - DNA, 33 bp, Homo sapien
tgtcttagaaatgggaaaaacttgaactcttca

SEQ ID NO: 531344 - DNA, 33 bp, Homo sapien
tgtcttagaaatgggagaaacttgaactcttca

SEQ ID NO: 531345 - DNA, 33 bp, Homo sapien
gtaggggacctaagatcagtctttgggcagcag

SEQ ID NO: 531346 - DNA, 33 bp, Homo sapien
gtaggggacctaagatgagtctttgggcagcag

SEQ ID NO: 531347 - DNA, 33 bp, Homo sapien
aggagatatttcgagacaatagcatgctaaaaa

SEQ ID NO: 531348 - DNA, 33 bp, Homo sapien
aggagatatttcgagagaatagcatgctaaaaa

SEQ ID NO: 531349 - DNA, 33 bp, Homo sapien
atttccatcataacacacaaaagggacacactg

SEQ ID NO: 531350 - DNA, 33 bp, Homo sapien
atttccatcataacacgcaaaagggacacactg

SEQ ID NO: 531351 - DNA, 33 bp, Homo sapien
atggaggtggcttgtacgactggttggactcct

SEQ ID NO: 531352 - DNA, 33 bp, Homo sapien
atggaggtggcttgtatgactggttggactcct

SEQ ID NO: 531353 - DNA, 33 bp, Homo sapien
ttgtggccagctgaacacctgacatttagtaga

SEQ ID NO: 531354 - DNA, 33 bp, Homo sapien
ttgtggccagctgaacgcctgacatttagtaga

SEQ ID NO: 531355 - DNA, 33 bp, Homo sapien
catactgtctgttcaacgaggacggggaagcta

SEQ ID NO: 531356 - DNA, 33 bp, Homo sapien
catactgtctgttcaatgaggacggggaagcta

SEQ ID NO: 531357 - DNA, 33 bp, Homo sapien
ggaataacaagattgacagacggaagagtttca

SEQ ID NO: 531358 - DNA, 33 bp, Homo sapien
ggaataacaagattgagagacggaagagtttca

SEQ ID NO: 531359 - DNA, 33 bp, Homo sapien
tgcagcttttctcagaaattacctccaatcaca

SEQ ID NO: 531360 - DNA, 33 bp, Homo sapien
tgcagcttttctcagatattacctccaatcaca

SEQ ID NO: 531361 - DNA, 33 bp, Homo sapien
ctccacatttccaagaaaaagaatctgattgaa

SEQ ID NO: 531362 - DNA, 33 bp, Homo sapien
ctccacatttccaagagaaagaatctgattgaa

SEQ ID NO: 531363 - DNA, 33 bp, Homo sapien
ccatgtgcacaaggaaacatctatataccaaaa

SEQ ID NO: 531364 - DNA, 33 bp, Homo sapien
ccatgtgcacaaggaagcatctatataccaaaa

SEQ ID NO: 531365 - DNA, 33 bp, Homo sapien
ggtctttatatagtacagcaaggagtttggact

SEQ ID NO: 531366 - DNA, 33 bp, Homo sapien
ggtctttatatagtacggcaaggagtttggact

SEQ ID NO: 531367 - DNA, 33 bp, Homo sapien
tctggaagttcagagaaatacagttgaggtgag

SEQ ID NO: 531368 - DNA, 33 bp, Homo sapien
tctggaagttcagagagatacagttgaggtgag

SEQ ID NO: 531369 - DNA, 33 bp, Homo sapien
acctaataccattcacaaaggctggagccctca

SEQ ID NO: 531370 - DNA, 33 bp, Homo sapien
acctaataccattcacgaaggctggagccctca

SEQ ID NO: 531371 - DNA, 33 bp, Homo sapien
tcctattgccaatccaatccaatctaatcattt

SEQ ID NO: 531372 - DNA, 33 bp, Homo sapien
tcctattgccaatccagtccaatctaatcattt

SEQ ID NO: 531373 - DNA, 33 bp, Homo sapien
tcttttttttttaaaggctgtgtggatatttgc

SEQ ID NO: 531374 - DNA, 33 bp, Homo sapien
tcttttttttttaaagtctgtgtggatatttgc

SEQ ID NO: 531375 - DNA, 33 bp, Homo sapien
tctttccaagaaaatacagtgcaggaaggtcag

SEQ ID NO: 531376 - DNA, 33 bp, Homo sapien
tctttccaagaaaatatagtgcaggaaggtcag

SEQ ID NO: 531377 - DNA, 33 bp, Homo sapien
agtatggaaatttctcacatagctaaaaataga

SEQ ID NO: 531378 - DNA, 33 bp, Homo sapien
agtatggaaatttctcgcatagctaaaaataga

SEQ ID NO: 531379 - DNA, 33 bp, Homo sapien
tgggactgagacatgaatggactgtactccctg

SEQ ID NO: 531380 - DNA, 33 bp, Homo sapien
tgggactgagacatgagtggactgtactccctg

SEQ ID NO: 531381 - DNA, 33 bp, Homo sapien
tgtgaaaagagaagaaatgaccttgtgttgagt

SEQ ID NO: 531382 - DNA, 33 bp, Homo sapien
tgtgaaaagagaagaattgaccttgtgttgagt

SEQ ID NO: 531383 - DNA, 33 bp, Homo sapien
atgtcactataccttaaaatgtgtttttctcaa

SEQ ID NO: 531384 - DNA, 33 bp, Homo sapien
atgtcactataccttagaatgtgtttttctcaa

SEQ ID NO: 531385 - DNA, 33 bp, Homo sapien
gctgtgccaatttacacggaaaaaaaagatatt

SEQ ID NO: 531386 - DNA, 33 bp, Homo sapien
gctgtgccaatttacagggaaaaaaaagatatt

SEQ ID NO: 531387 - DNA, 33 bp, Homo sapien
ggcaaactattgtgcaaactttgaacagcacat

SEQ ID NO: 531388 - DNA, 33 bp, Homo sapien
ggcaaactattgtgcagactttgaacagcacat

SEQ ID NO: 531389 - DNA, 33 bp, Homo sapien
acccttatcttcccagccatgaataatgcaata

SEQ ID NO: 531390 - DNA, 33 bp, Homo sapien
acccttatcttcccaggcatgaataatgcaata

SEQ ID NO: 531391 - DNA, 33 bp, Homo sapien
cttgtcctgtagaattaaagcaaccacgttaaa

SEQ ID NO: 531392 - DNA, 33 bp, Homo sapien
cttgtcctgtagaattcaagcaaccacgttaaa

SEQ ID NO: 531393 - DNA, 33 bp, Homo sapien
ccaaatttttatgcacacaagtttctagcacat

SEQ ID NO: 531394 - DNA, 33 bp, Homo sapien
ccaaatttttatgcacgcaagtttctagcacat

SEQ ID NO: 531395 - DNA, 33 bp, Homo sapien
tagggcataattacccagctgaactagatccag

SEQ ID NO: 531396 - DNA, 33 bp, Homo sapien
tagggcataattacccggctgaactagatccag

SEQ ID NO: 531397 - DNA, 33 bp, Homo sapien
aagaagaggatggtataaggtctgttctctgtg

SEQ ID NO: 531398 - DNA, 33 bp, Homo sapien
aagaagaggatggtatgaggtctgttctctgtg

SEQ ID NO: 531399 - DNA, 33 bp, Homo sapien
aaccactgctcaatggaatagaagaggaaacaa

SEQ ID NO: 531400 - DNA, 33 bp, Homo sapien
aaccactgctcaatggcatagaagaggaaacaa

SEQ ID NO: 531401 - DNA, 33 bp, Homo sapien
taacttcagtgcattacattttaaattcctatt

SEQ ID NO: 531402 - DNA, 33 bp, Homo sapien
taacttcagtgcattatattttaaattcctatt

SEQ ID NO: 531403 - DNA, 33 bp, Homo sapien
gtggcttggattaggaggttagcagtggaggca

SEQ ID NO: 531404 - DNA, 33 bp, Homo sapien
gtggcttggattaggatgttagcagtggaggca

SEQ ID NO: 531405 - DNA, 33 bp, Homo sapien
aggtgataaccagaagaactggcaaccatagat

SEQ ID NO: 531406 - DNA, 33 bp, Homo sapien
aggtgataaccagaaggactggcaaccatagat

SEQ ID NO: 531407 - DNA, 33 bp, Homo sapien
ttgtgagatctggatcacagtcagaggctctcc

SEQ ID NO: 531408 - DNA, 33 bp, Homo sapien
ttgtgagatctggatcgcagtcagaggctctcc

SEQ ID NO: 531409 - DNA, 33 bp, Homo sapien
ggccatctctgctttaaagtatgcaatagtgta

SEQ ID NO: 531410 - DNA, 33 bp, Homo sapien
ggccatctctgctttatagtatgcaatagtgta

SEQ ID NO: 531411 - DNA, 33 bp, Homo sapien
tcttctttcttcacaacttatttccacttattt

SEQ ID NO: 531412 - DNA, 33 bp, Homo sapien
tcttctttcttcacaatttatttccacttattt

SEQ ID NO: 531413 - DNA, 33 bp, Homo sapien
ggagatagtgttagaactgatctgcctcacacc

SEQ ID NO: 531414 - DNA, 33 bp, Homo sapien
ggagatagtgttagaattgatctgcctcacacc

SEQ ID NO: 531415 - DNA, 33 bp, Homo sapien
taacttgacatactatcagtttgtaaaaacaca

SEQ ID NO: 531416 - DNA, 33 bp, Homo sapien
taacttgacatactatgagtttgtaaaaacaca

SEQ ID NO: 531417 - DNA, 33 bp, Homo sapien
gtattaatgacagaaaatatgaacttacagaaa

SEQ ID NO: 531418 - DNA, 33 bp, Homo sapien
gtattaatgacagaaagtatgaacttacagaaa

SEQ ID NO: 531419 - DNA, 33 bp, Homo sapien
ttgaatgtaggtaccaagcaagggaacatttgc

SEQ ID NO: 531420 - DNA, 33 bp, Homo sapien
ttgaatgtaggtaccacgcaagggaacatttgc

SEQ ID NO: 531421 - DNA, 33 bp, Homo sapien
actgtttggtcttcagaaataatatattgcaat

SEQ ID NO: 531422 - DNA, 33 bp, Homo sapien
actgtttggtcttcagtaataatatattgcaat

SEQ ID NO: 531423 - DNA, 33 bp, Homo sapien
ttatctattgaacctccagaagattgtctaaaa

SEQ ID NO: 531424 - DNA, 33 bp, Homo sapien
ttatctattgaacctctagaagattgtctaaaa

SEQ ID NO: 531425 - DNA, 33 bp, Homo sapien
tagcctttctaagatacagttcttcatttgtaa

SEQ ID NO: 531426 - DNA, 33 bp, Homo sapien
tagcctttctaagatagagttcttcatttgtaa

SEQ ID NO: 531427 - DNA, 33 bp, Homo sapien
gcactatcacacagaacgtacagaaatatttta

SEQ ID NO: 531428 - DNA, 33 bp, Homo sapien
gcactatcacacagaatgtacagaaatatttta

SEQ ID NO: 531429 - DNA, 33 bp, Homo sapien
atgtgggagccaatcgaatttcatctctgcaaa

SEQ ID NO: 531430 - DNA, 33 bp, Homo sapien
atgtgggagccaatcgcatttcatctctgcaaa

SEQ ID NO: 531431 - DNA, 33 bp, Homo sapien
gcttacttagtagtgacctgaacttacacactt

SEQ ID NO: 531432 - DNA, 33 bp, Homo sapien
gcttacttagtagtgatctgaacttacacactt

SEQ ID NO: 531433 - DNA, 33 bp, Homo sapien
catatcaatagataaacgttaatagtggctgta

SEQ ID NO: 531434 - DNA, 33 bp, Homo sapien
catatcaatagataaatgttaatagtggctgta

SEQ ID NO: 531435 - DNA, 33 bp, Homo sapien
ggaatgaatgcatgtgaaacaacctggtttact

SEQ ID NO: 531436 - DNA, 33 bp, Homo sapien
ggaatgaatgcatgtgtaacaacctggtttact

SEQ ID NO: 531437 - DNA, 33 bp, Homo sapien
caaataaattagctctgaactcttcatgtaaca

SEQ ID NO: 531438 - DNA, 33 bp, Homo sapien
caaataaattagctcttaactcttcatgtaaca

SEQ ID NO: 531439 - DNA, 33 bp, Homo sapien
acatgattcttgttccaacctctgtaggatgtg

SEQ ID NO: 531440 - DNA, 33 bp, Homo sapien
acatgattcttgttccgacctctgtaggatgtg

SEQ ID NO: 531441 - DNA, 33 bp, Homo sapien
ggaagggcatatctgcaagagctggtatgttgg

SEQ ID NO: 531442 - DNA, 33 bp, Homo sapien
ggaagggcatatctgcgagagctggtatgttgg

SEQ ID NO: 531443 - DNA, 33 bp, Homo sapien
aaataaacgtatttccaagtctatttcttattc

SEQ ID NO: 531444 - DNA, 33 bp, Homo sapien
aaataaacgtatttccgagtctatttcttattc

SEQ ID NO: 531445 - DNA, 33 bp, Homo sapien
ctttcactatacaggagatttattggatataca

SEQ ID NO: 531446 - DNA, 33 bp, Homo sapien
ctttcactatacaggatatttattggatataca

SEQ ID NO: 531447 - DNA, 33 bp, Homo sapien
cctgggaagttcaaaaccaaggcgtctgcatat

SEQ ID NO: 531448 - DNA, 33 bp, Homo sapien
cctgggaagttcaaaatcaaggcgtctgcatat

SEQ ID NO: 531449 - DNA, 33 bp, Homo sapien
ccatatgaaagaaaacagtaatgaggatcagtg

SEQ ID NO: 531450 - DNA, 33 bp, Homo sapien
ccatatgaaagaaaacggtaatgaggatcagtg

SEQ ID NO: 531451 - DNA, 33 bp, Homo sapien
accaaagagagataaaatgatttctacccacag

SEQ ID NO: 531452 - DNA, 33 bp, Homo sapien
accaaagagagataaactgatttctacccacag

SEQ ID NO: 531453 - DNA, 33 bp, Homo sapien
cattgaactaccagatcataaagcctctctcta

SEQ ID NO: 531454 - DNA, 33 bp, Homo sapien
cattgaactaccagatgataaagcctctctcta

SEQ ID NO: 531455 - DNA, 33 bp, Homo sapien
tttttcaattctaatacctaggatgacatatgc

SEQ ID NO: 531456 - DNA, 33 bp, Homo sapien
tttttcaattctaatagctaggatgacatatgc

SEQ ID NO: 531457 - DNA, 33 bp, Homo sapien
gagacagaggaagagacaggggtagaaaattta

SEQ ID NO: 531458 - DNA, 33 bp, Homo sapien
gagacagaggaagagataggggtagaaaattta

SEQ ID NO: 531459 - DNA, 33 bp, Homo sapien
tttcatttctggtcaaaccaggcagaacccaca

SEQ ID NO: 531460 - DNA, 33 bp, Homo sapien
tttcatttctggtcaagccaggcagaacccaca

SEQ ID NO: 531461 - DNA, 33 bp, Homo sapien
ttttgggtactgaacaaaatatcataggctgac

SEQ ID NO: 531462 - DNA, 33 bp, Homo sapien
ttttgggtactgaacagaatatcataggctgac

SEQ ID NO: 531463 - DNA, 33 bp, Homo sapien
gctaagtgagtatgaacgaccaataagttatgt

SEQ ID NO: 531464 - DNA, 33 bp, Homo sapien
gctaagtgagtatgaatgaccaataagttatgt

SEQ ID NO: 531465 - DNA, 33 bp, Homo sapien
ctcaaaatagcaagggaaaaaaacggcaatgct

SEQ ID NO: 531466 - DNA, 33 bp, Homo sapien
ctcaaaatagcaagggcaaaaaacggcaatgct

SEQ ID NO: 531467 - DNA, 33 bp, Homo sapien
tttgagatgttgaacacgaaagaacttttaaaa

SEQ ID NO: 531468 - DNA, 33 bp, Homo sapien
tttgagatgttgaacatgaaagaacttttaaaa

SEQ ID NO: 531469 - DNA, 33 bp, Homo sapien
tctgggccagaggaaaatcacctaggggttgtc

SEQ ID NO: 531470 - DNA, 33 bp, Homo sapien
tctgggccagaggaaagtcacctaggggttgtc

SEQ ID NO: 531471 - DNA, 33 bp, Homo sapien
tagtactcaaccctggccaaacaatagaattac

SEQ ID NO: 531472 - DNA, 33 bp, Homo sapien
tagtactcaaccctggtcaaacaatagaattac

SEQ ID NO: 531473 - DNA, 33 bp, Homo sapien
ggaatagctggcgatccatatgcagaagaatga

SEQ ID NO: 531474 - DNA, 33 bp, Homo sapien
ggaatagctggcgatctatatgcagaagaatga

SEQ ID NO: 531475 - DNA, 33 bp, Homo sapien
tcctgaatagtgatacaggaaaaaagacttaag

SEQ ID NO: 531476 - DNA, 33 bp, Homo sapien
tcctgaatagtgatacgggaaaaaagacttaag

SEQ ID NO: 531477 - DNA, 33 bp, Homo sapien
ggataaatttctcccactgaatgcagaatagta

SEQ ID NO: 531478 - DNA, 33 bp, Homo sapien
ggataaatttctcccattgaatgcagaatagta

SEQ ID NO: 531479 - DNA, 33 bp, Homo sapien
ctcatcttttcagagggaatgttatgtactttt

SEQ ID NO: 531480 - DNA, 33 bp, Homo sapien
ctcatcttttcagaggtaatgttatgtactttt

SEQ ID NO: 531481 - DNA, 33 bp, Homo sapien
tgtaaggtttatattacgcttacaggtactgaa

SEQ ID NO: 531482 - DNA, 33 bp, Homo sapien
tgtaaggtttatattatgcttacaggtactgaa

SEQ ID NO: 531483 - DNA, 33 bp, Homo sapien
tattctttccttccaaagtccttctcagaaaag

SEQ ID NO: 531484 - DNA, 33 bp, Homo sapien
tattctttccttccaaggtccttctcagaaaag

SEQ ID NO: 531485 - DNA, 33 bp, Homo sapien
aacaagacaaattagacggaagtgggcaaagtc

SEQ ID NO: 531486 - DNA, 33 bp, Homo sapien
aacaagacaaattagatggaagtgggcaaagtc

SEQ ID NO: 531487 - DNA, 33 bp, Homo sapien
attccagcaaaatcagaagaattgggtaaccaa

SEQ ID NO: 531488 - DNA, 33 bp, Homo sapien
attccagcaaaatcaggagaattgggtaaccaa

SEQ ID NO: 531489 - DNA, 33 bp, Homo sapien
agaaatgtattcactccatctacaggctagctt

SEQ ID NO: 531490 - DNA, 33 bp, Homo sapien
agaaatgtattcactctatctacaggctagctt

SEQ ID NO: 531491 - DNA, 33 bp, Homo sapien
gagtggagatactagaatattggagagctcttg

SEQ ID NO: 531492 - DNA, 33 bp, Homo sapien
gagtggagatactagagtattggagagctcttg

SEQ ID NO: 531493 - DNA, 33 bp, Homo sapien
tctcagctctcacacactgaagctccatgcctg

SEQ ID NO: 531494 - DNA, 33 bp, Homo sapien
tctcagctctcacacattgaagctccatgcctg

SEQ ID NO: 531495 - DNA, 33 bp, Homo sapien
ccttactgaaaccttacgacatgatgctgttaa

SEQ ID NO: 531496 - DNA, 33 bp, Homo sapien
ccttactgaaaccttatgacatgatgctgttaa

SEQ ID NO: 531497 - DNA, 33 bp, Homo sapien
ggattagaaataacaggatttgatgacatcttt

SEQ ID NO: 531498 - DNA, 33 bp, Homo sapien
ggattagaaataacagtatttgatgacatcttt

SEQ ID NO: 531499 - DNA, 33 bp, Homo sapien
atcaacttgccacttcaccatgtcgtattcctg

SEQ ID NO: 531500 - DNA, 33 bp, Homo sapien
atcaacttgccacttcgccatgtcgtattcctg

SEQ ID NO: 531501 - DNA, 33 bp, Homo sapien
gaaacctcatctctacaatttaccaacacttag

SEQ ID NO: 531502 - DNA, 33 bp, Homo sapien
gaaacctcatctctacgatttaccaacacttag

SEQ ID NO: 531503 - DNA, 33 bp, Homo sapien
gagacatctcacagaaatacagtcagaggtcac

SEQ ID NO: 531504 - DNA, 33 bp, Homo sapien
gagacatctcacagaagtacagtcagaggtcac

SEQ ID NO: 531505 - DNA, 33 bp, Homo sapien
catgcaccaatgtccaaacttattaggtaagca

SEQ ID NO: 531506 - DNA, 33 bp, Homo sapien
catgcaccaatgtccagacttattaggtaagca

SEQ ID NO: 531507 - DNA, 33 bp, Homo sapien
tgtctatccagagagaacgattgagagagaaag

SEQ ID NO: 531508 - DNA, 33 bp, Homo sapien
tgtctatccagagagagcgattgagagagaaag

SEQ ID NO: 531509 - DNA, 33 bp, Homo sapien
agcatggatcagaacaataagagctagcaagat

SEQ ID NO: 531510 - DNA, 33 bp, Homo sapien
agcatggatcagaacagtaagagctagcaagat

SEQ ID NO: 531511 - DNA, 33 bp, Homo sapien
gtgacacacccgaagccgattgatagaatcatt

SEQ ID NO: 531512 - DNA, 33 bp, Homo sapien
gtgacacacccgaagctgattgatagaatcatt

SEQ ID NO: 531513 - DNA, 33 bp, Homo sapien
cagcaaaataaacagaacaaagaaacacgcatg

SEQ ID NO: 531514 - DNA, 33 bp, Homo sapien
cagcaaaataaacagagcaaagaaacacgcatg

SEQ ID NO: 531515 - DNA, 33 bp, Homo sapien
aacttcaatatggatccgaaatggcctgtggat

SEQ ID NO: 531516 - DNA, 33 bp, Homo sapien
aacttcaatatggatctgaaatggcctgtggat

SEQ ID NO: 531517 - DNA, 33 bp, Homo sapien
tggaaacttctgtacaaagcactcacaatttgc

SEQ ID NO: 531518 - DNA, 33 bp, Homo sapien
tggaaacttctgtacagagcactcacaatttgc

SEQ ID NO: 531519 - DNA, 33 bp, Homo sapien
ttactatcataacaacggaatgaagtaaatgct

SEQ ID NO: 531520 - DNA, 33 bp, Homo sapien
ttactatcataacaactgaatgaagtaaatgct

SEQ ID NO: 531521 - DNA, 33 bp, Homo sapien
ccaatcctttgggttaactgatttagtaggtaa

SEQ ID NO: 531522 - DNA, 33 bp, Homo sapien
ccaatcctttgggttagctgatttagtaggtaa

SEQ ID NO: 531523 - DNA, 33 bp, Homo sapien
ctgagtacagtacccacgctagactaactatac

SEQ ID NO: 531524 - DNA, 33 bp, Homo sapien
ctgagtacagtacccatgctagactaactatac

SEQ ID NO: 531525 - DNA, 33 bp, Homo sapien
atccacatatatttacaagtattgattacaaca

SEQ ID NO: 531526 - DNA, 33 bp, Homo sapien
atccacatatatttactagtattgattacaaca

SEQ ID NO: 531527 - DNA, 33 bp, Homo sapien
gaaaatagttctcccactatagctgttgtacaa

SEQ ID NO: 531528 - DNA, 33 bp, Homo sapien
gaaaatagttctcccattatagctgttgtacaa

SEQ ID NO: 531529 - DNA, 33 bp, Homo sapien
gtatctttatcaccgcaactataccacaagtca

SEQ ID NO: 531530 - DNA, 33 bp, Homo sapien
gtatctttatcaccgcgactataccacaagtca

SEQ ID NO: 531531 - DNA, 33 bp, Homo sapien
tggctcaaatttgtccacgcaaaattggttttt

SEQ ID NO: 531532 - DNA, 33 bp, Homo sapien
tggctcaaatttgtccgcgcaaaattggttttt

SEQ ID NO: 531533 - DNA, 33 bp, Homo sapien
ctgctcaaatattaccacatgaatgaaaccatt

SEQ ID NO: 531534 - DNA, 33 bp, Homo sapien
ctgctcaaatattacctcatgaatgaaaccatt

SEQ ID NO: 531535 - DNA, 33 bp, Homo sapien
ttagtaatcaaacttcaaaaggttgagaataca

SEQ ID NO: 531536 - DNA, 33 bp, Homo sapien
ttagtaatcaaacttcgaaaggttgagaataca

SEQ ID NO: 531537 - DNA, 33 bp, Homo sapien
ctttattgaattgaccaggcattctgctgaaaa

SEQ ID NO: 531538 - DNA, 33 bp, Homo sapien
ctttattgaattgacctggcattctgctgaaaa

SEQ ID NO: 531539 - DNA, 33 bp, Homo sapien
tggtgctagaataaccagaaatccataagaaaa

SEQ ID NO: 531540 - DNA, 33 bp, Homo sapien
tggtgctagaataaccggaaatccataagaaaa

SEQ ID NO: 531541 - DNA, 33 bp, Homo sapien
tttgtgtcctgcctaacaaataactgcttattc

SEQ ID NO: 531542 - DNA, 33 bp, Homo sapien
tttgtgtcctgcctaagaaataactgcttattc

SEQ ID NO: 531543 - DNA, 33 bp, Homo sapien
tgtacactgatacttacagcaattttattcata

SEQ ID NO: 531544 - DNA, 33 bp, Homo sapien
tgtacactgatacttatagcaattttattcata

SEQ ID NO: 531545 - DNA, 33 bp, Homo sapien
tggaattcttctttcaaaggaagctgccataat

SEQ ID NO: 531546 - DNA, 33 bp, Homo sapien
tggaattcttctttcagaggaagctgccataat

SEQ ID NO: 531547 - DNA, 33 bp, Homo sapien
atggtatttagtggaaagatgtttgctctcaag

SEQ ID NO: 531548 - DNA, 33 bp, Homo sapien
atggtatttagtggaacgatgtttgctctcaag

SEQ ID NO: 531549 - DNA, 33 bp, Homo sapien
cctaaccttaagcaaacgtcttcaccattttaa

SEQ ID NO: 531550 - DNA, 33 bp, Homo sapien
cctaaccttaagcaaatgtcttcaccattttaa

SEQ ID NO: 531551 - DNA, 33 bp, Homo sapien
aggggatggtggagaaataatatttgaagcaat

SEQ ID NO: 531552 - DNA, 33 bp, Homo sapien
aggggatggtggagaagtaatatttgaagcaat

SEQ ID NO: 531553 - DNA, 33 bp, Homo sapien
ttcttatttcagaccactaaattttgaaggatg

SEQ ID NO: 531554 - DNA, 33 bp, Homo sapien
ttcttatttcagaccattaaattttgaaggatg

SEQ ID NO: 531555 - DNA, 33 bp, Homo sapien
cataaactgacagatacgtgaatgagtaagcag

SEQ ID NO: 531556 - DNA, 33 bp, Homo sapien
cataaactgacagatatgtgaatgagtaagcag

SEQ ID NO: 531557 - DNA, 33 bp, Homo sapien
gtttcaagtcagttcacatttagggttgctacc

SEQ ID NO: 531558 - DNA, 33 bp, Homo sapien
gtttcaagtcagttcagatttagggttgctacc

SEQ ID NO: 531559 - DNA, 33 bp, Homo sapien
tttaaagcctatttcaaatgttacatctttttg

SEQ ID NO: 531560 - DNA, 33 bp, Homo sapien
tttaaagcctatttcagatgttacatctttttg

SEQ ID NO: 531561 - DNA, 33 bp, Homo sapien
caaacttaggaatgatgacgaacgaagaaaacc

SEQ ID NO: 531562 - DNA, 33 bp, Homo sapien
caaacttaggaatgattacgaacgaagaaaacc

SEQ ID NO: 531563 - DNA, 33 bp, Homo sapien
gcatactgtcagcctagaagacaaactcagcac

SEQ ID NO: 531564 - DNA, 33 bp, Homo sapien
gcatactgtcagcctataagacaaactcagcac

SEQ ID NO: 531565 - DNA, 33 bp, Homo sapien
aatcagatcttaatgcccactgcccctttgagt

SEQ ID NO: 531566 - DNA, 33 bp, Homo sapien
aatcagatcttaatgctcactgcccctttgagt

SEQ ID NO: 531567 - DNA, 33 bp, Homo sapien
ctccggaaaagaagagaaagtggagataagtaa

SEQ ID NO: 531568 - DNA, 33 bp, Homo sapien
ctccggaaaagaagaggaagtggagataagtaa

SEQ ID NO: 531569 - DNA, 33 bp, Homo sapien
aatgacaactgtaactaaccaataccctgtcaa

SEQ ID NO: 531570 - DNA, 33 bp, Homo sapien
aatgacaactgtaactgaccaataccctgtcaa

SEQ ID NO: 531571 - DNA, 33 bp, Homo sapien
aatacaaaaggtgtgccgaagtatggatagcat

SEQ ID NO: 531572 - DNA, 33 bp, Homo sapien
aatacaaaaggtgtgctgaagtatggatagcat

SEQ ID NO: 531573 - DNA, 33 bp, Homo sapien
tatactagagatgataaccacaaaacttaagtc

SEQ ID NO: 531574 - DNA, 33 bp, Homo sapien
tatactagagatgatacccacaaaacttaagtc

SEQ ID NO: 531575 - DNA, 33 bp, Homo sapien
agccgcctgatagaacagtagccatgctcttta

SEQ ID NO: 531576 - DNA, 33 bp, Homo sapien
agccgcctgatagaacggtagccatgctcttta

SEQ ID NO: 531577 - DNA, 33 bp, Homo sapien
aacatttatctagcaccaacttacgtggagggc

SEQ ID NO: 531578 - DNA, 33 bp, Homo sapien
aacatttatctagcacgaacttacgtggagggc

SEQ ID NO: 531579 - DNA, 33 bp, Homo sapien
cctacaacgacagtatcaataggagaaaaatga

SEQ ID NO: 531580 - DNA, 33 bp, Homo sapien
cctacaacgacagtatgaataggagaaaaatga

SEQ ID NO: 531581 - DNA, 33 bp, Homo sapien
aacttgatgaatagaacggaagagcccaacaca

SEQ ID NO: 531582 - DNA, 33 bp, Homo sapien
aacttgatgaatagaatggaagagcccaacaca

SEQ ID NO: 531583 - DNA, 33 bp, Homo sapien
ctctgttgctgagatacacagtattaaccatta

SEQ ID NO: 531584 - DNA, 33 bp, Homo sapien
ctctgttgctgagatatacagtattaaccatta

SEQ ID NO: 531585 - DNA, 33 bp, Homo sapien
gagattccattaatgacggtgacaaaataatta

SEQ ID NO: 531586 - DNA, 33 bp, Homo sapien
gagattccattaatgatggtgacaaaataatta

SEQ ID NO: 531587 - DNA, 33 bp, Homo sapien
attagcaaacacataaaatttgtagagcagata

SEQ ID NO: 531588 - DNA, 33 bp, Homo sapien
attagcaaacacataatatttgtagagcagata

SEQ ID NO: 531589 - DNA, 33 bp, Homo sapien
caacatggggaattaaaggagacatgacagata

SEQ ID NO: 531590 - DNA, 33 bp, Homo sapien
caacatggggaattaagggagacatgacagata

SEQ ID NO: 531591 - DNA, 33 bp, Homo sapien
tgttagtggctgagctaaaaaagacacgaaaga

SEQ ID NO: 531592 - DNA, 33 bp, Homo sapien
tgttagtggctgagcttaaaaagacacgaaaga

SEQ ID NO: 531593 - DNA, 33 bp, Homo sapien
tttattgagctactacaaagttaaacaatatgc

SEQ ID NO: 531594 - DNA, 33 bp, Homo sapien
tttattgagctactacgaagttaaacaatatgc

SEQ ID NO: 531595 - DNA, 33 bp, Homo sapien
ctcctgattaactgaaacgattccactttgtca

SEQ ID NO: 531596 - DNA, 33 bp, Homo sapien
ctcctgattaactgaagcgattccactttgtca

SEQ ID NO: 531597 - DNA, 33 bp, Homo sapien
tgactgctctaatctccctttttttgtaggttt

SEQ ID NO: 531598 - DNA, 33 bp, Homo sapien
tgactgctctaatctctctttttttgtaggttt

SEQ ID NO: 531599 - DNA, 33 bp, Homo sapien
acattttagggaaggcacttgtaaatttactaa

SEQ ID NO: 531600 - DNA, 33 bp, Homo sapien
acattttagggaaggcgcttgtaaatttactaa

SEQ ID NO: 531601 - DNA, 33 bp, Homo sapien
tggaatgtcatgtcaacagataatgtctgaaat

SEQ ID NO: 531602 - DNA, 33 bp, Homo sapien
tggaatgtcatgtcaatagataatgtctgaaat

SEQ ID NO: 531603 - DNA, 33 bp, Homo sapien
gtaaattaaatcagaaataagtttgctatgatg

SEQ ID NO: 531604 - DNA, 33 bp, Homo sapien
gtaaattaaatcagaagtaagtttgctatgatg

SEQ ID NO: 531605 - DNA, 33 bp, Homo sapien
gtttgcctctaacaaactgtcatatttacactc

SEQ ID NO: 531606 - DNA, 33 bp, Homo sapien
gtttgcctctaacaaattgtcatatttacactc

SEQ ID NO: 531607 - DNA, 33 bp, Homo sapien
ttcgggagaaagaaaacgtagtaccacctgaga

SEQ ID NO: 531608 - DNA, 33 bp, Homo sapien
ttcgggagaaagaaaatgtagtaccacctgaga

SEQ ID NO: 531609 - DNA, 33 bp, Homo sapien
catgtggatacatagaagtttaaatttatataa

SEQ ID NO: 531610 - DNA, 33 bp, Homo sapien
catgtggatacatagaggtttaaatttatataa

SEQ ID NO: 531611 - DNA, 33 bp, Homo sapien
gacacgtgttctcttacctttgtaatcatgtga

SEQ ID NO: 531612 - DNA, 33 bp, Homo sapien
gacacgtgttctcttatctttgtaatcatgtga

SEQ ID NO: 531613 - DNA, 33 bp, Homo sapien
ctgcctatatatcccactacaagcccctagcag

SEQ ID NO: 531614 - DNA, 33 bp, Homo sapien
ctgcctatatatcccattacaagcccctagcag

SEQ ID NO: 531615 - DNA, 33 bp, Homo sapien
agtaaaagtgggatgacgagcctggctaagttg

SEQ ID NO: 531616 - DNA, 33 bp, Homo sapien
agtaaaagtgggatgatgagcctggctaagttg

SEQ ID NO: 531617 - DNA, 33 bp, Homo sapien
tgtattaggacacgtacgtacccaatactgaac

SEQ ID NO: 531618 - DNA, 33 bp, Homo sapien
tgtattaggacacgtatgtacccaatactgaac

SEQ ID NO: 531619 - DNA, 33 bp, Homo sapien
atgtgcattaggttgccgaaaagattaaatgag

SEQ ID NO: 531620 - DNA, 33 bp, Homo sapien
atgtgcattaggttgctgaaaagattaaatgag

SEQ ID NO: 531621 - DNA, 33 bp, Homo sapien
tacattccccatattccagtagattgttttatc

SEQ ID NO: 531622 - DNA, 33 bp, Homo sapien
tacattccccatattcgagtagattgttttatc

SEQ ID NO: 531623 - DNA, 33 bp, Homo sapien
cggtagggccactttgcaggacagcttggcagt

SEQ ID NO: 531624 - DNA, 33 bp, Homo sapien
cggtagggccactttgtaggacagcttggcagt

SEQ ID NO: 531625 - DNA, 33 bp, Homo sapien
cacatgactgtaaacacataaggaagtggaatc

SEQ ID NO: 531626 - DNA, 33 bp, Homo sapien
cacatgactgtaaacatataaggaagtggaatc

SEQ ID NO: 531627 - DNA, 33 bp, Homo sapien
ctgtctaacctatttacctctgatgagtcaaat

SEQ ID NO: 531628 - DNA, 33 bp, Homo sapien
ctgtctaacctatttatctctgatgagtcaaat

SEQ ID NO: 531629 - DNA, 33 bp, Homo sapien
gtgctgagaatttgatgacattgtagaattacc

SEQ ID NO: 531630 - DNA, 33 bp, Homo sapien
gtgctgagaatttgattacattgtagaattacc

SEQ ID NO: 531631 - DNA, 33 bp, Homo sapien
aatcaattttcctccaatataatttttctccat

SEQ ID NO: 531632 - DNA, 33 bp, Homo sapien
aatcaattttcctccagtataatttttctccat

SEQ ID NO: 531633 - DNA, 33 bp, Homo sapien
atgaggctgtagataaagaatctaaggcacagg

SEQ ID NO: 531634 - DNA, 33 bp, Homo sapien
atgaggctgtagataaggaatctaaggcacagg

SEQ ID NO: 531635 - DNA, 33 bp, Homo sapien
atatacttcataattacatctctgcctcaataa

SEQ ID NO: 531636 - DNA, 33 bp, Homo sapien
atatacttcataattatatctctgcctcaataa

SEQ ID NO: 531637 - DNA, 33 bp, Homo sapien
gtatatacctatgcctaaatttttccatcattg

SEQ ID NO: 531638 - DNA, 33 bp, Homo sapien
gtatatacctatgcctgaatttttccatcattg

SEQ ID NO: 531639 - DNA, 33 bp, Homo sapien
tgaaatggcttaattaccatgacctccttaata

SEQ ID NO: 531640 - DNA, 33 bp, Homo sapien
tgaaatggcttaattatcatgacctccttaata

SEQ ID NO: 531641 - DNA, 33 bp, Homo sapien
gaataataatatggaaccagcaactaggaacac

SEQ ID NO: 531642 - DNA, 33 bp, Homo sapien
gaataataatatggaatcagcaactaggaacac

SEQ ID NO: 531643 - DNA, 33 bp, Homo sapien
gggggatgaagaattaactcatgaccaaacgag

SEQ ID NO: 531644 - DNA, 33 bp, Homo sapien
gggggatgaagaattatctcatgaccaaacgag

SEQ ID NO: 531645 - DNA, 33 bp, Homo sapien
tattctggagtacacacggtgggaaacttttag

SEQ ID NO: 531646 - DNA, 33 bp, Homo sapien
tattctggagtacacatggtgggaaacttttag

SEQ ID NO: 531647 - DNA, 33 bp, Homo sapien
tctgggtgaggctatgacaaagagggacttgat

SEQ ID NO: 531648 - DNA, 33 bp, Homo sapien
tctgggtgaggctatggcaaagagggacttgat

SEQ ID NO: 531649 - DNA, 33 bp, Homo sapien
taattccctcttgtcacggaagggagccggtgg

SEQ ID NO: 531650 - DNA, 33 bp, Homo sapien
taattccctcttgtcatggaagggagccggtgg

SEQ ID NO: 531651 - DNA, 33 bp, Homo sapien
ggtgaggaagatataaagtattactgaggtgtt

SEQ ID NO: 531652 - DNA, 33 bp, Homo sapien
ggtgaggaagatataacgtattactgaggtgtt

SEQ ID NO: 531653 - DNA, 33 bp, Homo sapien
tgcatgaacctcaaaagtattttcattccatgt

SEQ ID NO: 531654 - DNA, 33 bp, Homo sapien
tgcatgaacctcaaaattattttcattccatgt

SEQ ID NO: 531655 - DNA, 33 bp, Homo sapien
aaggttcagagtgaacaatacataaacttataa

SEQ ID NO: 531656 - DNA, 33 bp, Homo sapien
aaggttcagagtgaacgatacataaacttataa

SEQ ID NO: 531657 - DNA, 33 bp, Homo sapien
tcatggatgaaaagagacagtatcaataaaatg

SEQ ID NO: 531658 - DNA, 33 bp, Homo sapien
tcatggatgaaaagaggcagtatcaataaaatg

SEQ ID NO: 531659 - DNA, 33 bp, Homo sapien
tagtccatttttcctaacatcatcactgataaa

SEQ ID NO: 531660 - DNA, 33 bp, Homo sapien
tagtccatttttcctagcatcatcactgataaa

SEQ ID NO: 531661 - DNA, 33 bp, Homo sapien
ggaaattattccaacaacttatgtcctctatcc

SEQ ID NO: 531662 - DNA, 33 bp, Homo sapien
ggaaattattccaacatcttatgtcctctatcc

SEQ ID NO: 531663 - DNA, 33 bp, Homo sapien
gtaagtgtctggtatccagtattacctgaaaat

SEQ ID NO: 531664 - DNA, 33 bp, Homo sapien
gtaagtgtctggtatcgagtattacctgaaaat

SEQ ID NO: 531665 - DNA, 33 bp, Homo sapien
ctcacctctaggggtacagaattgtcctccaac

SEQ ID NO: 531666 - DNA, 33 bp, Homo sapien
ctcacctctaggggtatagaattgtcctccaac

SEQ ID NO: 531667 - DNA, 33 bp, Homo sapien
ttcttctgtaaattgcgacttgctttaggtgac

SEQ ID NO: 531668 - DNA, 33 bp, Homo sapien
ttcttctgtaaattgctacttgctttaggtgac

SEQ ID NO: 531669 - DNA, 33 bp, Homo sapien
acacacattatacatacagaggtttagccatat

SEQ ID NO: 531670 - DNA, 33 bp, Homo sapien
acacacattatacatatagaggtttagccatat

SEQ ID NO: 531671 - DNA, 33 bp, Homo sapien
tatcaacacgtaagaacatatcaactttctaaa

SEQ ID NO: 531672 - DNA, 33 bp, Homo sapien
tatcaacacgtaagaatatatcaactttctaaa

SEQ ID NO: 531673 - DNA, 33 bp, Homo sapien
agatttatagaggtgaagaatactgaataagta

SEQ ID NO: 531674 - DNA, 33 bp, Homo sapien
agatttatagaggtgacgaatactgaataagta

SEQ ID NO: 531675 - DNA, 33 bp, Homo sapien
tctggcctaaaaataacgtgctttgcccatcac

SEQ ID NO: 531676 - DNA, 33 bp, Homo sapien
tctggcctaaaaataatgtgctttgcccatcac

SEQ ID NO: 531677 - DNA, 33 bp, Homo sapien
tgattgttataacacaagtgaaaccaaatgcat

SEQ ID NO: 531678 - DNA, 33 bp, Homo sapien
tgattgttataacacaggtgaaaccaaatgcat

SEQ ID NO: 531679 - DNA, 33 bp, Homo sapien
gggtgcctgggaaagaataaaagtgctgaggaa

SEQ ID NO: 531680 - DNA, 33 bp, Homo sapien
gggtgcctgggaaagattaaaagtgctgaggaa

SEQ ID NO: 531681 - DNA, 33 bp, Homo sapien
caattcacatttatagccagtgttcaaacataa

SEQ ID NO: 531682 - DNA, 33 bp, Homo sapien
caattcacatttatagtcagtgttcaaacataa

SEQ ID NO: 531683 - DNA, 33 bp, Homo sapien
cattaccagaactggacgaaaatgctgtcatct

SEQ ID NO: 531684 - DNA, 33 bp, Homo sapien
cattaccagaactggatgaaaatgctgtcatct

SEQ ID NO: 531685 - DNA, 33 bp, Homo sapien
aaattgatggaaggacaaatggaagtagagtaa

SEQ ID NO: 531686 - DNA, 33 bp, Homo sapien
aaattgatggaaggaccaatggaagtagagtaa

SEQ ID NO: 531687 - DNA, 33 bp, Homo sapien
tccacaactactatcacctgcctttccaattta

SEQ ID NO: 531688 - DNA, 33 bp, Homo sapien
tccacaactactatcatctgcctttccaattta

SEQ ID NO: 531689 - DNA, 33 bp, Homo sapien
ttaacatggtgcttgaccaacattatggattca

SEQ ID NO: 531690 - DNA, 33 bp, Homo sapien
ttaacatggtgcttgatcaacattatggattca

SEQ ID NO: 531691 - DNA, 33 bp, Homo sapien
agggaaatggctacaaagtggcatgagaaagct

SEQ ID NO: 531692 - DNA, 33 bp, Homo sapien
agggaaatggctacaaggtggcatgagaaagct

SEQ ID NO: 531693 - DNA, 33 bp, Homo sapien
tggtgtagctctgtgactatttatataacctac

SEQ ID NO: 531694 - DNA, 33 bp, Homo sapien
tggtgtagctctgtgattatttatataacctac

SEQ ID NO: 531695 - DNA, 33 bp, Homo sapien
tgcaatttctctttgacggcatacaccacacag

SEQ ID NO: 531696 - DNA, 33 bp, Homo sapien
tgcaatttctctttgatggcatacaccacacag

SEQ ID NO: 531697 - DNA, 33 bp, Homo sapien
gaatctccatgagaagaacactataatggccac

SEQ ID NO: 531698 - DNA, 33 bp, Homo sapien
gaatctccatgagaaggacactataatggccac

SEQ ID NO: 531699 - DNA, 33 bp, Homo sapien
cgaattattatccccacctagtagtatgagaac

SEQ ID NO: 531700 - DNA, 33 bp, Homo sapien
cgaattattatccccatctagtagtatgagaac

SEQ ID NO: 531701 - DNA, 33 bp, Homo sapien
acaattcttatgcaacaaaaactgccttgccta

SEQ ID NO: 531702 - DNA, 33 bp, Homo sapien
acaattcttatgcaacgaaaactgccttgccta

SEQ ID NO: 531703 - DNA, 33 bp, Homo sapien
ttaaatgacctggaacaataaaaagaattgaat

SEQ ID NO: 531704 - DNA, 33 bp, Homo sapien
ttaaatgacctggaaccataaaaagaattgaat

SEQ ID NO: 531705 - DNA, 33 bp, Homo sapien
cctaattcaaggtcatgaagatatacacctatg

SEQ ID NO: 531706 - DNA, 33 bp, Homo sapien
cctaattcaaggtcattaagatatacacctatg

SEQ ID NO: 531707 - DNA, 33 bp, Homo sapien
ttagatcaactagcaaacctcaaaacaatttca

SEQ ID NO: 531708 - DNA, 33 bp, Homo sapien
ttagatcaactagcaagcctcaaaacaatttca

SEQ ID NO: 531709 - DNA, 33 bp, Homo sapien
gtctggtctgtagttaaatcccatgatatataa

SEQ ID NO: 531710 - DNA, 33 bp, Homo sapien
gtctggtctgtagttagatcccatgatatataa

SEQ ID NO: 531711 - DNA, 33 bp, Homo sapien
ggttgcagtcaagaagccagcccattcacacag

SEQ ID NO: 531712 - DNA, 33 bp, Homo sapien
ggttgcagtcaagaagtcagcccattcacacag

SEQ ID NO: 531713 - DNA, 33 bp, Homo sapien
tctggaaccgattaaacacattcatttttacca

SEQ ID NO: 531714 - DNA, 33 bp, Homo sapien
tctggaaccgattaaagacattcatttttacca

SEQ ID NO: 531715 - DNA, 33 bp, Homo sapien
gatgtttcaacatatacaagtcgatgttattta

SEQ ID NO: 531716 - DNA, 33 bp, Homo sapien
gatgtttcaacatatagaagtcgatgttattta

SEQ ID NO: 531717 - DNA, 33 bp, Homo sapien
catctttgtcttggtcgcattcttaggagaaat

SEQ ID NO: 531718 - DNA, 33 bp, Homo sapien
catctttgtcttggtctcattcttaggagaaat

SEQ ID NO: 531719 - DNA, 33 bp, Homo sapien
ggtcagcatgtaattacgttgttgcatttcaga

SEQ ID NO: 531720 - DNA, 33 bp, Homo sapien
ggtcagcatgtaattatgttgttgcatttcaga

SEQ ID NO: 531721 - DNA, 33 bp, Homo sapien
aagggatgtcttagaaagttagattagagagag

SEQ ID NO: 531722 - DNA, 33 bp, Homo sapien
aagggatgtcttagaaggttagattagagagag

SEQ ID NO: 531723 - DNA, 33 bp, Homo sapien
cattttgtcaccggcaactgtttttgccttttt

SEQ ID NO: 531724 - DNA, 33 bp, Homo sapien
cattttgtcaccggcatctgtttttgccttttt

SEQ ID NO: 531725 - DNA, 33 bp, Homo sapien
gcactatggagtgtgaactaaactgtaggttag

SEQ ID NO: 531726 - DNA, 33 bp, Homo sapien
gcactatggagtgtgagctaaactgtaggttag

SEQ ID NO: 531727 - DNA, 33 bp, Homo sapien
actggcaatagcagtgaagaagaacatggagat

SEQ ID NO: 531728 - DNA, 33 bp, Homo sapien
actggcaatagcagtggagaagaacatggagat

SEQ ID NO: 531729 - DNA, 33 bp, Homo sapien
gtctgaaaggaaacagcctctgagtttgaagat

SEQ ID NO: 531730 - DNA, 33 bp, Homo sapien
gtctgaaaggaaacagtctctgagtttgaagat

SEQ ID NO: 531731 - DNA, 33 bp, Homo sapien
agcaaatctttcattcacactcactatctcttt

SEQ ID NO: 531732 - DNA, 33 bp, Homo sapien
agcaaatctttcattcgcactcactatctcttt

SEQ ID NO: 531733 - DNA, 33 bp, Homo sapien
agagctaataatcttaaagctgaccccaggact

SEQ ID NO: 531734 - DNA, 33 bp, Homo sapien
agagctaataatcttagagctgaccccaggact

SEQ ID NO: 531735 - DNA, 33 bp, Homo sapien
aagttggacaaactacagactgagctttagtac

SEQ ID NO: 531736 - DNA, 33 bp, Homo sapien
aagttggacaaactacggactgagctttagtac

SEQ ID NO: 531737 - DNA, 33 bp, Homo sapien
ttggaataggaattaaaagtcattttgcaaata

SEQ ID NO: 531738 - DNA, 33 bp, Homo sapien
ttggaataggaattaagagtcattttgcaaata

SEQ ID NO: 531739 - DNA, 33 bp, Homo sapien
agacctaaaagtgaggaaaagattgaattttgc

SEQ ID NO: 531740 - DNA, 33 bp, Homo sapien
agacctaaaagtgagggaaagattgaattttgc

SEQ ID NO: 531741 - DNA, 33 bp, Homo sapien
catgtgctaatttgcacgcttgtgggcacccta

SEQ ID NO: 531742 - DNA, 33 bp, Homo sapien
catgtgctaatttgcatgcttgtgggcacccta

SEQ ID NO: 531743 - DNA, 33 bp, Homo sapien
tacccttttagataagcagaagtctgttttgtt

SEQ ID NO: 531744 - DNA, 33 bp, Homo sapien
tacccttttagataaggagaagtctgttttgtt

SEQ ID NO: 531745 - DNA, 33 bp, Homo sapien
ctctcctttctttaatcactaatcctgtcattt

SEQ ID NO: 531746 - DNA, 33 bp, Homo sapien
ctctcctttctttaattactaatcctgtcattt

SEQ ID NO: 531747 - DNA, 33 bp, Homo sapien
cacttcctcttttgaacgtcttatcctttaatt

SEQ ID NO: 531748 - DNA, 33 bp, Homo sapien
cacttcctcttttgaatgtcttatcctttaatt

SEQ ID NO: 531749 - DNA, 33 bp, Homo sapien
cagttaatctgggtaacttaagtataaaatcca

SEQ ID NO: 531750 - DNA, 33 bp, Homo sapien
cagttaatctgggtaatttaagtataaaatcca

SEQ ID NO: 531751 - DNA, 33 bp, Homo sapien
ctggttcagtcttgtcacacttccagatgtgca

SEQ ID NO: 531752 - DNA, 33 bp, Homo sapien
ctggttcagtcttgtcgcacttccagatgtgca

SEQ ID NO: 531753 - DNA, 33 bp, Homo sapien
ctcagaaagatacctaacagcttcctatgtgag

SEQ ID NO: 531754 - DNA, 33 bp, Homo sapien
ctcagaaagatacctaccagcttcctatgtgag

SEQ ID NO: 531755 - DNA, 33 bp, Homo sapien
tccactcaagttgtgaaagcatttctaattttg

SEQ ID NO: 531756 - DNA, 33 bp, Homo sapien
tccactcaagttgtgagagcatttctaattttg

SEQ ID NO: 531757 - DNA, 33 bp, Homo sapien
aaaacagaaaccaaaccggactctagaatgttt

SEQ ID NO: 531758 - DNA, 33 bp, Homo sapien
aaaacagaaaccaaactggactctagaatgttt

SEQ ID NO: 531759 - DNA, 33 bp, Homo sapien
aaggctaaccaaaacacatacagaggccaatgg

SEQ ID NO: 531760 - DNA, 33 bp, Homo sapien
aaggctaaccaaaacagatacagaggccaatgg

SEQ ID NO: 531761 - DNA, 33 bp, Homo sapien
ctctgtaaaggcctaagaaaagcaaattactga

SEQ ID NO: 531762 - DNA, 33 bp, Homo sapien
ctctgtaaaggcctaataaaagcaaattactga

SEQ ID NO: 531763 - DNA, 33 bp, Homo sapien
ccttcttccaaaaaaacttggagatccctgttc

SEQ ID NO: 531764 - DNA, 33 bp, Homo sapien
ccttcttccaaaaaaagttggagatccctgttc

SEQ ID NO: 531765 - DNA, 33 bp, Homo sapien
tgtgagaagttacataaaatagtgatactgtag

SEQ ID NO: 531766 - DNA, 33 bp, Homo sapien
tgtgagaagttacatacaatagtgatactgtag

SEQ ID NO: 531767 - DNA, 33 bp, Homo sapien
ttgaactccacacttgcaccatcatggcactcc

SEQ ID NO: 531768 - DNA, 33 bp, Homo sapien
ttgaactccacacttgtaccatcatggcactcc

SEQ ID NO: 531769 - DNA, 33 bp, Homo sapien
tttcatctgaacattgaagaatgacatctacat

SEQ ID NO: 531770 - DNA, 33 bp, Homo sapien
tttcatctgaacattgcagaatgacatctacat

SEQ ID NO: 531771 - DNA, 33 bp, Homo sapien
caaatacaattcagagaccttactgtggcatgt

SEQ ID NO: 531772 - DNA, 33 bp, Homo sapien
caaatacaattcagagcccttactgtggcatgt

SEQ ID NO: 531773 - DNA, 33 bp, Homo sapien
aacccattttaagacccaatccaagtgtcattt

SEQ ID NO: 531774 - DNA, 33 bp, Homo sapien
aacccattttaagacctaatccaagtgtcattt

SEQ ID NO: 531775 - DNA, 33 bp, Homo sapien
ctggttctactggtaaactgtttttcaaaataa

SEQ ID NO: 531776 - DNA, 33 bp, Homo sapien
ctggttctactggtaatctgtttttcaaaataa

SEQ ID NO: 531777 - DNA, 33 bp, Homo sapien
attctatattgctccccattttactgggcatga

SEQ ID NO: 531778 - DNA, 33 bp, Homo sapien
attctatattgctccctattttactgggcatga

SEQ ID NO: 531779 - DNA, 33 bp, Homo sapien
atagaatctgaagctcacataaggtttaacagt

SEQ ID NO: 531780 - DNA, 33 bp, Homo sapien
atagaatctgaagctctcataaggtttaacagt

SEQ ID NO: 531781 - DNA, 33 bp, Homo sapien
atctcgcatcctgcacaatgttgaacacagagc

SEQ ID NO: 531782 - DNA, 33 bp, Homo sapien
atctcgcatcctgcactatgttgaacacagagc

SEQ ID NO: 531783 - DNA, 33 bp, Homo sapien
ttgaatcatttgcgccaaggaactggacagacc

SEQ ID NO: 531784 - DNA, 33 bp, Homo sapien
ttgaatcatttgcgcccaggaactggacagacc

SEQ ID NO: 531785 - DNA, 33 bp, Homo sapien
agtgatttccagtatacgctgttaagtttaaaa

SEQ ID NO: 531786 - DNA, 33 bp, Homo sapien
agtgatttccagtatatgctgttaagtttaaaa

SEQ ID NO: 531787 - DNA, 33 bp, Homo sapien
cctctatatctcaaagaaaactcaatttcaact

SEQ ID NO: 531788 - DNA, 33 bp, Homo sapien
cctctatatctcaaaggaaactcaatttcaact

SEQ ID NO: 531789 - DNA, 33 bp, Homo sapien
cctcctctaccatctaccggttgtttaaccttg

SEQ ID NO: 531790 - DNA, 33 bp, Homo sapien
cctcctctaccatctatcggttgtttaaccttg

SEQ ID NO: 531791 - DNA, 33 bp, Homo sapien
taaccattttggagtacaaattagaggaagcca

SEQ ID NO: 531792 - DNA, 33 bp, Homo sapien
taaccattttggagtagaaattagaggaagcca

SEQ ID NO: 531793 - DNA, 33 bp, Homo sapien
tcttctcccaataggtaaagtacgacagagctc

SEQ ID NO: 531794 - DNA, 33 bp, Homo sapien
tcttctcccaataggtgaagtacgacagagctc

SEQ ID NO: 531795 - DNA, 33 bp, Homo sapien
aaaggcatagccatcaactataatatggacctc

SEQ ID NO: 531796 - DNA, 33 bp, Homo sapien
aaaggcatagccatcagctataatatggacctc

SEQ ID NO: 531797 - DNA, 33 bp, Homo sapien
ggaactgtcttaaaagcctgaaagaagtcagat

SEQ ID NO: 531798 - DNA, 33 bp, Homo sapien
ggaactgtcttaaaagtctgaaagaagtcagat

SEQ ID NO: 531799 - DNA, 33 bp, Homo sapien
gcatgaagttgaaggacattaaaccatttgcaa

SEQ ID NO: 531800 - DNA, 33 bp, Homo sapien
gcatgaagttgaaggatattaaaccatttgcaa

SEQ ID NO: 531801 - DNA, 33 bp, Homo sapien
tgcactgtaggttaaactggctctttgggctaa

SEQ ID NO: 531802 - DNA, 33 bp, Homo sapien
tgcactgtaggttaaattggctctttgggctaa

SEQ ID NO: 531803 - DNA, 33 bp, Homo sapien
aatggggaagcagtcaagaagaaagtgagtccc

SEQ ID NO: 531804 - DNA, 33 bp, Homo sapien
aatggggaagcagtcaggaagaaagtgagtccc

SEQ ID NO: 531805 - DNA, 33 bp, Homo sapien
ttggatttgtgtgggacgataacatgtgttttt

SEQ ID NO: 531806 - DNA, 33 bp, Homo sapien
ttggatttgtgtgggatgataacatgtgttttt

SEQ ID NO: 531807 - DNA, 33 bp, Homo sapien
aattggcttctcttaactatatgagatagggtt

SEQ ID NO: 531808 - DNA, 33 bp, Homo sapien
aattggcttctcttaagtatatgagatagggtt

SEQ ID NO: 531809 - DNA, 33 bp, Homo sapien
actagtactgtcccagaaaaatttatacacctt

SEQ ID NO: 531810 - DNA, 33 bp, Homo sapien
actagtactgtcccaggaaaatttatacacctt

SEQ ID NO: 531811 - DNA, 33 bp, Homo sapien
ggaggacgacctcgaaaccatgaacgcagagga

SEQ ID NO: 531812 - DNA, 33 bp, Homo sapien
ggaggacgacctcgaagccatgaacgcagagga

SEQ ID NO: 531813 - DNA, 33 bp, Homo sapien
ttgcacctgcgagaacagaaaaaattgatttca

SEQ ID NO: 531814 - DNA, 33 bp, Homo sapien
ttgcacctgcgagaacggaaaaaattgatttca

SEQ ID NO: 531815 - DNA, 33 bp, Homo sapien
aaggaagaaatgtgcacggttaaataaaatgag

SEQ ID NO: 531816 - DNA, 33 bp, Homo sapien
aaggaagaaatgtgcatggttaaataaaatgag

SEQ ID NO: 531817 - DNA, 33 bp, Homo sapien
aatagagcttactagacgacttttatttttcaa

SEQ ID NO: 531818 - DNA, 33 bp, Homo sapien
aatagagcttactagatgacttttatttttcaa

SEQ ID NO: 531819 - DNA, 33 bp, Homo sapien
agaagattcagagagcaaaagatttggaactga

SEQ ID NO: 531820 - DNA, 33 bp, Homo sapien
agaagattcagagagctaaagatttggaactga

SEQ ID NO: 531821 - DNA, 33 bp, Homo sapien
ggcagagggcagaaccaggaatgattctctgga

SEQ ID NO: 531822 - DNA, 33 bp, Homo sapien
ggcagagggcagaacccggaatgattctctgga

SEQ ID NO: 531823 - DNA, 33 bp, Homo sapien
ggcccaagcagttccaagactctcgaaccatta

SEQ ID NO: 531824 - DNA, 33 bp, Homo sapien
ggcccaagcagttccaggactctcgaaccatta

SEQ ID NO: 531825 - DNA, 33 bp, Homo sapien
aacagggacaagcatacggcttagagtctgaaa

SEQ ID NO: 531826 - DNA, 33 bp, Homo sapien
aacagggacaagcatagggcttagagtctgaaa

SEQ ID NO: 531827 - DNA, 33 bp, Homo sapien
gagtgcttgtatctcaaatcaaagaagtttgtt

SEQ ID NO: 531828 - DNA, 33 bp, Homo sapien
gagtgcttgtatctcagatcaaagaagtttgtt

SEQ ID NO: 531829 - DNA, 33 bp, Homo sapien
tagcaggaactctggacataggtgatgtttaag

SEQ ID NO: 531830 - DNA, 33 bp, Homo sapien
tagcaggaactctggatataggtgatgtttaag

SEQ ID NO: 531831 - DNA, 33 bp, Homo sapien
aaagagaagttgattaacagtattttattttat

SEQ ID NO: 531832 - DNA, 33 bp, Homo sapien
aaagagaagttgattaccagtattttattttat

SEQ ID NO: 531833 - DNA, 33 bp, Homo sapien
gtgcatagtaccatgacaaaggatacagtcttt

SEQ ID NO: 531834 - DNA, 33 bp, Homo sapien
gtgcatagtaccatgataaaggatacagtcttt

SEQ ID NO: 531835 - DNA, 33 bp, Homo sapien
gtgctcccttaaattcaatgtgagttcttcaat

SEQ ID NO: 531836 - DNA, 33 bp, Homo sapien
gtgctcccttaaattcgatgtgagttcttcaat

SEQ ID NO: 531837 - DNA, 33 bp, Homo sapien
ttcttcaatgagatgggatgatattaacttgca

SEQ ID NO: 531838 - DNA, 33 bp, Homo sapien
ttcttcaatgagatggtatgatattaacttgca

SEQ ID NO: 531839 - DNA, 33 bp, Homo sapien
ataatgtttcttagctcaaggcactagtgtagg

SEQ ID NO: 531840 - DNA, 33 bp, Homo sapien
ataatgtttcttagcttaaggcactagtgtagg

SEQ ID NO: 531841 - DNA, 33 bp, Homo sapien
aatggcaacaacactgaactgagcaacgagagg

SEQ ID NO: 531842 - DNA, 33 bp, Homo sapien
aatggcaacaacactggactgagcaacgagagg

SEQ ID NO: 531843 - DNA, 33 bp, Homo sapien
atgactggatgtaccaagaaatttttctctgac

SEQ ID NO: 531844 - DNA, 33 bp, Homo sapien
atgactggatgtaccatgaaatttttctctgac

SEQ ID NO: 531845 - DNA, 33 bp, Homo sapien
gcaactgattgtaacccggacactctggccaaa

SEQ ID NO: 531846 - DNA, 33 bp, Homo sapien
gcaactgattgtaaccgggacactctggccaaa

SEQ ID NO: 531847 - DNA, 33 bp, Homo sapien
gagatgacaaagatccgaactaaggttgtggta

SEQ ID NO: 531848 - DNA, 33 bp, Homo sapien
gagatgacaaagatcctaactaaggttgtggta

SEQ ID NO: 531849 - DNA, 33 bp, Homo sapien
cccaatttctcagttacgctaatggtcaaatta

SEQ ID NO: 531850 - DNA, 33 bp, Homo sapien
cccaatttctcagttatgctaatggtcaaatta

SEQ ID NO: 531851 - DNA, 33 bp, Homo sapien
gctacaaggaaaacatcaagatgagttccaggt

SEQ ID NO: 531852 - DNA, 33 bp, Homo sapien
gctacaaggaaaacattaagatgagttccaggt

SEQ ID NO: 531853 - DNA, 33 bp, Homo sapien
taccactctgcctaaaatactcttgtttaagtc

SEQ ID NO: 531854 - DNA, 33 bp, Homo sapien
taccactctgcctaaactactcttgtttaagtc

SEQ ID NO: 531855 - DNA, 33 bp, Homo sapien
tatctgcactttcgaaactgatacgacagattt

SEQ ID NO: 531856 - DNA, 33 bp, Homo sapien
tatctgcactttcgaagctgatacgacagattt

SEQ ID NO: 531857 - DNA, 33 bp, Homo sapien
agcaatagactgtacaatataacctgggtgtat

SEQ ID NO: 531858 - DNA, 33 bp, Homo sapien
agcaatagactgtacagtataacctgggtgtat

SEQ ID NO: 531859 - DNA, 33 bp, Homo sapien
cagttttcttaataacaagcaacagagtgttgc

SEQ ID NO: 531860 - DNA, 33 bp, Homo sapien
cagttttcttaataaccagcaacagagtgttgc

SEQ ID NO: 531861 - DNA, 33 bp, Homo sapien
gccattatgtagtgataatagtagagaatatag

SEQ ID NO: 531862 - DNA, 33 bp, Homo sapien
gccattatgtagtgatgatagtagagaatatag

SEQ ID NO: 531863 - DNA, 33 bp, Homo sapien
ggcagcttatactgtaccattttaaattctttc

SEQ ID NO: 531864 - DNA, 33 bp, Homo sapien
ggcagcttatactgtatcattttaaattctttc

SEQ ID NO: 531865 - DNA, 33 bp, Homo sapien
tcatctacacagctaccgacaagttagtgggtg

SEQ ID NO: 531866 - DNA, 33 bp, Homo sapien
tcatctacacagctactgacaagttagtgggtg

SEQ ID NO: 531867 - DNA, 33 bp, Homo sapien
tagatgagagagactagaaacatcaggtgcaat

SEQ ID NO: 531868 - DNA, 33 bp, Homo sapien
tagatgagagagactataaacatcaggtgcaat

SEQ ID NO: 531869 - DNA, 33 bp, Homo sapien
ttgaaaatcagcctgaaatggtaccttataagt

SEQ ID NO: 531870 - DNA, 33 bp, Homo sapien
ttgaaaatcagcctgagatggtaccttataagt

SEQ ID NO: 531871 - DNA, 33 bp, Homo sapien
tcagaaatgatacaaacgtgggatggcactaaa

SEQ ID NO: 531872 - DNA, 33 bp, Homo sapien
tcagaaatgatacaaatgtgggatggcactaaa

SEQ ID NO: 531873 - DNA, 33 bp, Homo sapien
caaacaggggcaaggacgaacagagaaaggtgg

SEQ ID NO: 531874 - DNA, 33 bp, Homo sapien
caaacaggggcaaggatgaacagagaaaggtgg

SEQ ID NO: 531875 - DNA, 33 bp, Homo sapien
ttaaatatagccaaaccgaaatgtcccaatttc

SEQ ID NO: 531876 - DNA, 33 bp, Homo sapien
ttaaatatagccaaactgaaatgtcccaatttc

SEQ ID NO: 531877 - DNA, 33 bp, Homo sapien
tagactaaaaatgggaagatacttaacgagaaa

SEQ ID NO: 531878 - DNA, 33 bp, Homo sapien
tagactaaaaatgggaggatacttaacgagaaa

SEQ ID NO: 531879 - DNA, 33 bp, Homo sapien
ttacttaagggagaccagcacaaatacaatttt

SEQ ID NO: 531880 - DNA, 33 bp, Homo sapien
ttacttaagggagaccggcacaaatacaatttt

SEQ ID NO: 531881 - DNA, 33 bp, Homo sapien
caaaaatagataccccaatacccctaactgagc

SEQ ID NO: 531882 - DNA, 33 bp, Homo sapien
caaaaatagataccccgatacccctaactgagc

SEQ ID NO: 531883 - DNA, 33 bp, Homo sapien
ggtctaggtaacagagaatattatgtctggatg

SEQ ID NO: 531884 - DNA, 33 bp, Homo sapien
ggtctaggtaacagaggatattatgtctggatg

SEQ ID NO: 531885 - DNA, 33 bp, Homo sapien
aaagtcaatccttcaaactttttttggcaccag

SEQ ID NO: 531886 - DNA, 33 bp, Homo sapien
aaagtcaatccttcaacctttttttggcaccag

SEQ ID NO: 531887 - DNA, 33 bp, Homo sapien
aaaatcctgtgacagacacttctttactgaatg

SEQ ID NO: 531888 - DNA, 33 bp, Homo sapien
aaaatcctgtgacagatacttctttactgaatg

SEQ ID NO: 531889 - DNA, 33 bp, Homo sapien
attcaatggactcagactagagttctttgaaat

SEQ ID NO: 531890 - DNA, 33 bp, Homo sapien
attcaatggactcagattagagttctttgaaat

SEQ ID NO: 531891 - DNA, 33 bp, Homo sapien
tgagtccattgaataaataggtgtctgcatagt

SEQ ID NO: 531892 - DNA, 33 bp, Homo sapien
tgagtccattgaataagtaggtgtctgcatagt

SEQ ID NO: 531893 - DNA, 33 bp, Homo sapien
taggggacctctaacaataaatctagctaagct

SEQ ID NO: 531894 - DNA, 33 bp, Homo sapien
taggggacctctaacagtaaatctagctaagct

SEQ ID NO: 531895 - DNA, 33 bp, Homo sapien
ctacccaagcccagagaagactcacagatatag

SEQ ID NO: 531896 - DNA, 33 bp, Homo sapien
ctacccaagcccagagcagactcacagatatag

SEQ ID NO: 531897 - DNA, 33 bp, Homo sapien
aacagagatgaataaaaaacggggttcatctct

SEQ ID NO: 531898 - DNA, 33 bp, Homo sapien
aacagagatgaataaataacggggttcatctct

SEQ ID NO: 531899 - DNA, 33 bp, Homo sapien
ggttatgcatcagcaaatgtaggtatctgtgaa

SEQ ID NO: 531900 - DNA, 33 bp, Homo sapien
ggttatgcatcagcaagtgtaggtatctgtgaa

SEQ ID NO: 531901 - DNA, 33 bp, Homo sapien
caaagtccactctaaaatgatttctcgtacaat

SEQ ID NO: 531902 - DNA, 33 bp, Homo sapien
caaagtccactctaaagtgatttctcgtacaat

SEQ ID NO: 531903 - DNA, 33 bp, Homo sapien
tgtgattcctgataagaaagatctgaggtaaac

SEQ ID NO: 531904 - DNA, 33 bp, Homo sapien
tgtgattcctgataagtaagatctgaggtaaac

SEQ ID NO: 531905 - DNA, 33 bp, Homo sapien
taagggtaaaggtaaacgtttgcagaagcctag

SEQ ID NO: 531906 - DNA, 33 bp, Homo sapien
taagggtaaaggtaaatgtttgcagaagcctag

SEQ ID NO: 531907 - DNA, 33 bp, Homo sapien
tcttctgctttttaaaatgagtaggagcccata

SEQ ID NO: 531908 - DNA, 33 bp, Homo sapien
tcttctgctttttaaagtgagtaggagcccata

SEQ ID NO: 531909 - DNA, 33 bp, Homo sapien
attttcaacagaagctcagatatcaagacagat

SEQ ID NO: 531910 - DNA, 33 bp, Homo sapien
attttcaacagaagcttagatatcaagacagat

SEQ ID NO: 531911 - DNA, 33 bp, Homo sapien
taaatactaaaaattacgtttatgcagaaaagc

SEQ ID NO: 531912 - DNA, 33 bp, Homo sapien
taaatactaaaaattatgtttatgcagaaaagc

SEQ ID NO: 531913 - DNA, 33 bp, Homo sapien
cccacttggataatcaataagcaccacaatatg

SEQ ID NO: 531914 - DNA, 33 bp, Homo sapien
cccacttggataatcagtaagcaccacaatatg

SEQ ID NO: 531915 - DNA, 33 bp, Homo sapien
tgtgtaataagttgaacagtatcccagtttgca

SEQ ID NO: 531916 - DNA, 33 bp, Homo sapien
tgtgtaataagttgaatagtatcccagtttgca

SEQ ID NO: 531917 - DNA, 33 bp, Homo sapien
tatgactgaggtaagactagtgtttaatttggc

SEQ ID NO: 531918 - DNA, 33 bp, Homo sapien
tatgactgaggtaagattagtgtttaatttggc

SEQ ID NO: 531919 - DNA, 33 bp, Homo sapien
ttaggtagaattcaccaaaatcgaattaaattt

SEQ ID NO: 531920 - DNA, 33 bp, Homo sapien
ttaggtagaattcaccgaaatcgaattaaattt

SEQ ID NO: 531921 - DNA, 33 bp, Homo sapien
ctcacctgcttatgtacctcacattaatatgac

SEQ ID NO: 531922 - DNA, 33 bp, Homo sapien
ctcacctgcttatgtatctcacattaatatgac

SEQ ID NO: 531923 - DNA, 33 bp, Homo sapien
cacatttccaaaatagctgcctaaaatgaagat

SEQ ID NO: 531924 - DNA, 33 bp, Homo sapien
cacatttccaaaataggtgcctaaaatgaagat

SEQ ID NO: 531925 - DNA, 33 bp, Homo sapien
agatacagacttttgacgaatttagataacaga

SEQ ID NO: 531926 - DNA, 33 bp, Homo sapien
agatacagacttttgatgaatttagataacaga

SEQ ID NO: 531927 - DNA, 33 bp, Homo sapien
acaaactgagaatgcaagtggatacacacgtga

SEQ ID NO: 531928 - DNA, 33 bp, Homo sapien
acaaactgagaatgcatgtggatacacacgtga

SEQ ID NO: 531929 - DNA, 33 bp, Homo sapien
caacggaagccaataacagatcatagttgccag

SEQ ID NO: 531930 - DNA, 33 bp, Homo sapien
caacggaagccaataatagatcatagttgccag

SEQ ID NO: 531931 - DNA, 33 bp, Homo sapien
gatccttggaaagtaacagcaatctttaaccct

SEQ ID NO: 531932 - DNA, 33 bp, Homo sapien
gatccttggaaagtaatagcaatctttaaccct

SEQ ID NO: 531933 - DNA, 33 bp, Homo sapien
ccccacgaacagataccattattccctggacat

SEQ ID NO: 531934 - DNA, 33 bp, Homo sapien
ccccacgaacagatactattattccctggacat

SEQ ID NO: 531935 - DNA, 33 bp, Homo sapien
aaaatctctttaaggaagtatgcgaataacggt

SEQ ID NO: 531936 - DNA, 33 bp, Homo sapien
aaaatctctttaaggaggtatgcgaataacggt

SEQ ID NO: 531937 - DNA, 33 bp, Homo sapien
cagggcagtaaacaaacgcaagtgacagaattg

SEQ ID NO: 531938 - DNA, 33 bp, Homo sapien
cagggcagtaaacaaatgcaagtgacagaattg

SEQ ID NO: 531939 - DNA, 33 bp, Homo sapien
caagggagtgacagaaatgataaaggagccaca

SEQ ID NO: 531940 - DNA, 33 bp, Homo sapien
caagggagtgacagaagtgataaaggagccaca

SEQ ID NO: 531941 - DNA, 33 bp, Homo sapien
gcagcaaatgaaagaaaaaagtaggtcagcgag

SEQ ID NO: 531942 - DNA, 33 bp, Homo sapien
gcagcaaatgaaagaagaaagtaggtcagcgag

SEQ ID NO: 531943 - DNA, 33 bp, Homo sapien
gctccgagtcaatggagagtaatttggactgtc

SEQ ID NO: 531944 - DNA, 33 bp, Homo sapien
gctccgagtcaatggatagtaatttggactgtc

SEQ ID NO: 531945 - DNA, 33 bp, Homo sapien
tagagatggatgaaaacgaattggtctggggat

SEQ ID NO: 531946 - DNA, 33 bp, Homo sapien
tagagatggatgaaaatgaattggtctggggat

SEQ ID NO: 531947 - DNA, 33 bp, Homo sapien
tctgaggcttgctgacagccgtacatgcaaact

SEQ ID NO: 531948 - DNA, 33 bp, Homo sapien
tctgaggcttgctgacggccgtacatgcaaact

SEQ ID NO: 531949 - DNA, 33 bp, Homo sapien
gataaagaaaagagtgcaaagttttcatttggt

SEQ ID NO: 531950 - DNA, 33 bp, Homo sapien
gataaagaaaagagtggaaagttttcatttggt

SEQ ID NO: 531951 - DNA, 33 bp, Homo sapien
ttcttgattcaatacaccacaatattagatact

SEQ ID NO: 531952 - DNA, 33 bp, Homo sapien
ttcttgattcaatacagcacaatattagatact

SEQ ID NO: 531953 - DNA, 33 bp, Homo sapien
acattatggagaacaacataattttaggttggc

SEQ ID NO: 531954 - DNA, 33 bp, Homo sapien
acattatggagaacaatataattttaggttggc

SEQ ID NO: 531955 - DNA, 33 bp, Homo sapien
aaagcttgtatgctaggatagagtcaattatcc

SEQ ID NO: 531956 - DNA, 33 bp, Homo sapien
aaagcttgtatgctagtatagagtcaattatcc

SEQ ID NO: 531957 - DNA, 33 bp, Homo sapien
tctgtaaagggaaaaacctggtatgcagcactt

SEQ ID NO: 531958 - DNA, 33 bp, Homo sapien
tctgtaaagggaaaaatctggtatgcagcactt

SEQ ID NO: 531959 - DNA, 33 bp, Homo sapien
ccagaggatttaataccatgtcatgtaaatctc

SEQ ID NO: 531960 - DNA, 33 bp, Homo sapien
ccagaggatttaatactatgtcatgtaaatctc

SEQ ID NO: 531961 - DNA, 33 bp, Homo sapien
ggatttttccaagctcaagtagaagcacagcac

SEQ ID NO: 531962 - DNA, 33 bp, Homo sapien
ggatttttccaagctcgagtagaagcacagcac

SEQ ID NO: 531963 - DNA, 33 bp, Homo sapien
gacttatctagcccaacaatccctgcatgtaag

SEQ ID NO: 531964 - DNA, 33 bp, Homo sapien
gacttatctagcccaataatccctgcatgtaag

SEQ ID NO: 531965 - DNA, 33 bp, Homo sapien
acctggggtgagaaaggctcttggcttcttaca

SEQ ID NO: 531966 - DNA, 33 bp, Homo sapien
acctggggtgagaaagtctcttggcttcttaca

SEQ ID NO: 531967 - DNA, 33 bp, Homo sapien
gtcttggaagccatgcactaattttgattcgtg

SEQ ID NO: 531968 - DNA, 33 bp, Homo sapien
gtcttggaagccatgcgctaattttgattcgtg

SEQ ID NO: 531969 - DNA, 33 bp, Homo sapien
ctgtaatacactttgaacatcagattcttgtag

SEQ ID NO: 531970 - DNA, 33 bp, Homo sapien
ctgtaatacactttgagcatcagattcttgtag

SEQ ID NO: 531971 - DNA, 33 bp, Homo sapien
tatacataccctaaaaatttctaagtgtgtcct

SEQ ID NO: 531972 - DNA, 33 bp, Homo sapien
tatacataccctaaaagtttctaagtgtgtcct

SEQ ID NO: 531973 - DNA, 33 bp, Homo sapien
gctcaaggagtgaaaaaaggcactataagttta

SEQ ID NO: 531974 - DNA, 33 bp, Homo sapien
gctcaaggagtgaaaacaggcactataagttta

SEQ ID NO: 531975 - DNA, 33 bp, Homo sapien
gaagtggaactacttaccatcacctctagtgac

SEQ ID NO: 531976 - DNA, 33 bp, Homo sapien
gaagtggaactacttatcatcacctctagtgac

SEQ ID NO: 531977 - DNA, 33 bp, Homo sapien; identical to SEQ ID NO: 531975

SEQ ID NO: 531978 - DNA, 33 bp, Homo sapien; identical to SEQ ID NO: 531976

SEQ ID NO: 531979 - DNA, 33 bp, Homo sapien
ctacaaccactcaatacaggctgactatgaatt

SEQ ID NO: 531980 - DNA, 33 bp, Homo sapien
ctacaaccactcaatataggctgactatgaatt

SEQ ID NO: 531981 - DNA, 33 bp, Homo sapien
tactcagaaagggaaacagagaaagccagagca

SEQ ID NO: 531982 - DNA, 33 bp, Homo sapien
tactcagaaagggaaagagagaaagccagagca

SEQ ID NO: 531983 - DNA, 33 bp, Homo sapien
cagtttagtagagttacggaaatacagttttaa

SEQ ID NO: 531984 - DNA, 33 bp, Homo sapien
cagtttagtagagttatggaaatacagttttaa

SEQ ID NO: 531985 - DNA, 33 bp, Homo sapien
gtacatcatctgataactcatcttcctaccaac

SEQ ID NO: 531986 - DNA, 33 bp, Homo sapien
gtacatcatctgataattcatcttcctaccaac

SEQ ID NO: 531987 - DNA, 33 bp, Homo sapien
cagctcatggtcaggaaaagccaagtacagatc

SEQ ID NO: 531988 - DNA, 33 bp, Homo sapien
cagctcatggtcaggacaagccaagtacagatc

SEQ ID NO: 531989 - DNA, 33 bp, Homo sapien
tgaatattttcaaatcacctttaggactgctag

SEQ ID NO: 531990 - DNA, 33 bp, Homo sapien
tgaatattttcaaatcgcctttaggactgctag

SEQ ID NO: 531991 - DNA, 33 bp, Homo sapien
ttaagattgtcctacacgttgcataaaacagaa

SEQ ID NO: 531992 - DNA, 33 bp, Homo sapien
ttaagattgtcctacatgttgcataaaacagaa

SEQ ID NO: 531993 - DNA, 33 bp, Homo sapien
agcttaagggttaatacgatgatgagcaaacat

SEQ ID NO: 531994 - DNA, 33 bp, Homo sapien
agcttaagggttaatatgatgatgagcaaacat

SEQ ID NO: 531995 - DNA, 33 bp, Homo sapien
atgggagcttagaccaagtagtaatggttgaga

SEQ ID NO: 531996 - DNA, 33 bp, Homo sapien
atgggagcttagaccaggtagtaatggttgaga

SEQ ID NO: 531997 - DNA, 33 bp, Homo sapien
gcttagtaagtgtaaacgtggcaggctaaggac

SEQ ID NO: 531998 - DNA, 33 bp, Homo sapien
gcttagtaagtgtaaatgtggcaggctaaggac

SEQ ID NO: 531999 - DNA, 33 bp, Homo sapien
cttattccttgttttccctgagttatgacatag

SEQ ID NO: 532000 - DNA, 33 bp, Homo sapien
cttattccttgttttctctgagttatgacatag

SEQ ID NO: 532001 - DNA, 33 bp, Homo sapien
tttctaaatgaactaaaaatagcagggaacttt

SEQ ID NO: 532002 - DNA, 33 bp, Homo sapien
tttctaaatgaactaataatagcagggaacttt

SEQ ID NO: 532003 - DNA, 33 bp, Homo sapien
agcaaagtattagtaaatcagccaaagatagag

SEQ ID NO: 532004 - DNA, 33 bp, Homo sapien
agcaaagtattagtaagtcagccaaagatagag

SEQ ID NO: 532005 - DNA, 33 bp, Homo sapien
aacttgtaatatatcacctgtttactaaagtgt

SEQ ID NO: 532006 - DNA, 33 bp, Homo sapien
aacttgtaatatatcagctgtttactaaagtgt

SEQ ID NO: 532007 - DNA, 33 bp, Homo sapien
attcttaagcttcaaaccaccagaaggtttccc

SEQ ID NO: 532008 - DNA, 33 bp, Homo sapien
attcttaagcttcaaatcaccagaaggtttccc

SEQ ID NO: 532009 - DNA, 33 bp, Homo sapien
aaagggggattgaatccataatagttgtcatat

SEQ ID NO: 532010 - DNA, 33 bp, Homo sapien
aaagggggattgaatctataatagttgtcatat

SEQ ID NO: 532011 - DNA, 33 bp, Homo sapien
ggtcgtgtttagaaacccttgactttatgcttt

SEQ ID NO: 532012 - DNA, 33 bp, Homo sapien
ggtcgtgtttagaaactcttgactttatgcttt

SEQ ID NO: 532013 - DNA, 33 bp, Homo sapien
ccggtgaactgtgaaaactgaccctgcatccaa

SEQ ID NO: 532014 - DNA, 33 bp, Homo sapien
ccggtgaactgtgaaagctgaccctgcatccaa

SEQ ID NO: 532015 - DNA, 33 bp, Homo sapien
gattataaatagctccaaaggattagttgagtc

SEQ ID NO: 532016 - DNA, 33 bp, Homo sapien
gattataaatagctccgaaggattagttgagtc

SEQ ID NO: 532017 - DNA, 33 bp, Homo sapien
atacccctgctctactaaggacacattctccac

SEQ ID NO: 532018 - DNA, 33 bp, Homo sapien
atacccctgctctactgaggacacattctccac

SEQ ID NO: 532019 - DNA, 33 bp, Homo sapien
gaaatgagataaaagaaatggagagtagacaga

SEQ ID NO: 532020 - DNA, 33 bp, Homo sapien
gaaatgagataaaagagatggagagtagacaga

SEQ ID NO: 532021 - DNA, 33 bp, Homo sapien
gatggatgactcctaactgatattaaccagtta

SEQ ID NO: 532022 - DNA, 33 bp, Homo sapien
gatggatgactcctaattgatattaaccagtta

SEQ ID NO: 532023 - DNA, 33 bp, Homo sapien
cctagatttagcaagacgcaaaagtcaactgat

SEQ ID NO: 532024 - DNA, 33 bp, Homo sapien
cctagatttagcaagatgcaaaagtcaactgat

SEQ ID NO: 532025 - DNA, 33 bp, Homo sapien
aattttctatcaaaaaacatttcagaagtcaaa

SEQ ID NO: 532026 - DNA, 33 bp, Homo sapien
aattttctatcaaaaagcatttcagaagtcaaa

SEQ ID NO: 532027 - DNA, 33 bp, Homo sapien
atattatttacaactaaaacacgagcttaatgg

SEQ ID NO: 532028 - DNA, 33 bp, Homo sapien
atattatttacaactagaacacgagcttaatgg

SEQ ID NO: 532029 - DNA, 33 bp, Homo sapien
gagaagtcttctaggccaggagttttcttatgc

SEQ ID NO: 532030 - DNA, 33 bp, Homo sapien
gagaagtcttctaggcgaggagttttcttatgc

SEQ ID NO: 532031 - DNA, 33 bp, Homo sapien
tcaatgaatttcaacaaatgtatagatgagtgt

SEQ ID NO: 532032 - DNA, 33 bp, Homo sapien
tcaatgaatttcaacagatgtatagatgagtgt

SEQ ID NO: 532033 - DNA, 33 bp, Homo sapien
agaaaaaagcagcagcagaagaagaagacacca

SEQ ID NO: 532034 - DNA, 33 bp, Homo sapien
agaaaaaagcagcagcggaagaagaagacacca

SEQ ID NO: 532035 - DNA, 33 bp, Homo sapien
gagaaactctgtgtcaatagcttcagtacttgg

SEQ ID NO: 532036 - DNA, 33 bp, Homo sapien
gagaaactctgtgtcagtagcttcagtacttgg

SEQ ID NO: 532037 - DNA, 33 bp, Homo sapien
ctgccccgttaccacactggctgtctcctagta

SEQ ID NO: 532038 - DNA, 33 bp, Homo sapien
ctgccccgttaccacattggctgtctcctagta

SEQ ID NO: 532039 - DNA, 33 bp, Homo sapien
atataaaactgcaatgccaatgatgcattttca

SEQ ID NO: 532040 - DNA, 33 bp, Homo sapien
atataaaactgcaatgtcaatgatgcattttca

SEQ ID NO: 532041 - DNA, 33 bp, Homo sapien
accagtaggcatagtaaatgattatatatggct

SEQ ID NO: 532042 - DNA, 33 bp, Homo sapien
accagtaggcatagtagatgattatatatggct

SEQ ID NO: 532043 - DNA, 33 bp, Homo sapien
atggtcaataaccttcaacagctgatctaaaaa

SEQ ID NO: 532044 - DNA, 33 bp, Homo sapien
atggtcaataaccttcgacagctgatctaaaaa

SEQ ID NO: 532045 - DNA, 33 bp, Homo sapien
cttaagagactctacacagccttatcccagtta

SEQ ID NO: 532046 - DNA, 33 bp, Homo sapien
cttaagagactctacatagccttatcccagtta

SEQ ID NO: 532047 - DNA, 33 bp, Homo sapien
agatctgtatgtcttaccaaaaacagacaagct

SEQ ID NO: 532048 - DNA, 33 bp, Homo sapien
agatctgtatgtcttatcaaaaacagacaagct

SEQ ID NO: 532049 - DNA, 33 bp, Homo sapien
tttggcatatgactaaatgaatgtgtatatggt

SEQ ID NO: 532050 - DNA, 33 bp, Homo sapien
tttggcatatgactaactgaatgtgtatatggt

SEQ ID NO: 532051 - DNA, 33 bp, Homo sapien
attatatggtgattccaagaagtagtatataga

SEQ ID NO: 532052 - DNA, 33 bp, Homo sapien
attatatggtgattccgagaagtagtatataga

SEQ ID NO: 532053 - DNA, 33 bp, Homo sapien
ttaaggggaaactacaggattgataggatgtgc

SEQ ID NO: 532054 - DNA, 33 bp, Homo sapien
ttaaggggaaactacatgattgataggatgtgc

SEQ ID NO: 532055 - DNA, 33 bp, Homo sapien
gttttgcaatgttactaaaattccaaagaaaga

SEQ ID NO: 532056 - DNA, 33 bp, Homo sapien
gttttgcaatgttactgaaattccaaagaaaga

SEQ ID NO: 532057 - DNA, 33 bp, Homo sapien
aagttaactttacataaacagttctgcttcctt

SEQ ID NO: 532058 - DNA, 33 bp, Homo sapien
aagttaactttacatacacagttctgcttcctt

SEQ ID NO: 532059 - DNA, 33 bp, Homo sapien
aggagttcgttgaatgaattatcattgaacatg

SEQ ID NO: 532060 - DNA, 33 bp, Homo sapien
aggagttcgttgaatgcattatcattgaacatg

SEQ ID NO: 532061 - DNA, 33 bp, Homo sapien
ctggaacaaggcagcaaagaaaacagaaatgtc

SEQ ID NO: 532062 - DNA, 33 bp, Homo sapien
ctggaacaaggcagcacagaaaacagaaatgtc

SEQ ID NO: 532063 - DNA, 33 bp, Homo sapien
tcttctgcctttaaacaagctcatgtgaaaaaa

SEQ ID NO: 532064 - DNA, 33 bp, Homo sapien
tcttctgcctttaaacgagctcatgtgaaaaaa

SEQ ID NO: 532065 - DNA, 33 bp, Homo sapien
ttgagtataggtggaaactgtgactatgataaa

SEQ ID NO: 532066 - DNA, 33 bp, Homo sapien
ttgagtataggtggaatctgtgactatgataaa

SEQ ID NO: 532067 - DNA, 33 bp, Homo sapien
aaagttttcaaaattacggccagttttctcttt

SEQ ID NO: 532068 - DNA, 33 bp, Homo sapien
aaagttttcaaaattatggccagttttctcttt

SEQ ID NO: 532069 - DNA, 33 bp, Homo sapien
tcaagagatggtcctagatactgatgtttttat

SEQ ID NO: 532070 - DNA, 33 bp, Homo sapien
tcaagagatggtcctatatactgatgtttttat

SEQ ID NO: 532071 - DNA, 33 bp, Homo sapien
ttctggggccatatacaaaggcacattatcttg

SEQ ID NO: 532072 - DNA, 33 bp, Homo sapien
ttctggggccatatacgaaggcacattatcttg

SEQ ID NO: 532073 - DNA, 33 bp, Homo sapien
gaattaggacttgaagcatggacgaggacagag

SEQ ID NO: 532074 - DNA, 33 bp, Homo sapien
gaattaggacttgaagtatggacgaggacagag

SEQ ID NO: 532075 - DNA, 33 bp, Homo sapien
atgttgcctagttgaaagaatagttaatgtttt

SEQ ID NO: 532076 - DNA, 33 bp, Homo sapien
atgttgcctagttgaaggaatagttaatgtttt

SEQ ID NO: 532077 - DNA, 33 bp, Homo sapien
ctgtttggtcgtaggtcaccattcccctgagat

SEQ ID NO: 532078 - DNA, 33 bp, Homo sapien
ctgtttggtcgtaggttaccattcccctgagat

SEQ ID NO: 532079 - DNA, 33 bp, Homo sapien
aaagatcaaatgtcacaaaggaggatactatct

SEQ ID NO: 532080 - DNA, 33 bp, Homo sapien
aaagatcaaatgtcacgaaggaggatactatct

SEQ ID NO: 532081 - DNA, 33 bp, Homo sapien
aggaattttccattaccgacattgattcaattc

SEQ ID NO: 532082 - DNA, 33 bp, Homo sapien
aggaattttccattactgacattgattcaattc

SEQ ID NO: 532083 - DNA, 33 bp, Homo sapien
ctattggaagtctggcaaagtcagtggatggtt

SEQ ID NO: 532084 - DNA, 33 bp, Homo sapien
ctattggaagtctggcgaagtcagtggatggtt

SEQ ID NO: 532085 - DNA, 33 bp, Homo sapien
ttcaagagatattaaccgggatagtacataggt

SEQ ID NO: 532086 - DNA, 33 bp, Homo sapien
ttcaagagatattaactgggatagtacataggt

SEQ ID NO: 532087 - DNA, 33 bp, Homo sapien
gtgacatctttcttccacttgacgccctctcca

SEQ ID NO: 532088 - DNA, 33 bp, Homo sapien
gtgacatctttcttccgcttgacgccctctcca

SEQ ID NO: 532089 - DNA, 33 bp, Homo sapien
aaacaacaacttgctcaaagtaaaatgttgtca

SEQ ID NO: 532090 - DNA, 33 bp, Homo sapien
aaacaacaacttgctcgaagtaaaatgttgtca

SEQ ID NO: 532091 - DNA, 33 bp, Homo sapien
ttttggttatggtatacgtagaaagggtgacac

SEQ ID NO: 532092 - DNA, 33 bp, Homo sapien
ttttggttatggtatatgtagaaagggtgacac

SEQ ID NO: 532093 - DNA, 33 bp, Homo sapien
ttattacattctgggacgcaattatcaaaaact

SEQ ID NO: 532094 - DNA, 33 bp, Homo sapien
ttattacattctgggatgcaattatcaaaaact

SEQ ID NO: 532095 - DNA, 33 bp, Homo sapien
tgagttaagagttgtacgattagttctacttga

SEQ ID NO: 532096 - DNA, 33 bp, Homo sapien
tgagttaagagttgtatgattagttctacttga

SEQ ID NO: 532097 - DNA, 33 bp, Homo sapien
aagtagcattttgctcaagtacaatatagatat

SEQ ID NO: 532098 - DNA, 33 bp, Homo sapien
aagtagcattttgctccagtacaatatagatat

SEQ ID NO: 532099 - DNA, 33 bp, Homo sapien
tgttgtttttctatcaataaaaagctgacttta

SEQ ID NO: 532100 - DNA, 33 bp, Homo sapien
tgttgtttttctatcagtaaaaagctgacttta

SEQ ID NO: 532101 - DNA, 33 bp, Homo sapien
ttatagtcctgtgttacgtattttcctcttttg

SEQ ID NO: 532102 - DNA, 33 bp, Homo sapien
ttatagtcctgtgttatgtattttcctcttttg

SEQ ID NO: 532103 - DNA, 33 bp, Homo sapien
ggagctgggattctaaccaaagcaggccattcc

SEQ ID NO: 532104 - DNA, 33 bp, Homo sapien
ggagctgggattctaatcaaagcaggccattcc

SEQ ID NO: 532105 - DNA, 33 bp, Homo sapien
ttctgttgggttctaaaacatcgcatatacttt

SEQ ID NO: 532106 - DNA, 33 bp, Homo sapien
ttctgttgggttctaacacatcgcatatacttt

SEQ ID NO: 532107 - DNA, 33 bp, Homo sapien
tgaaaagacaaaactacgcacactccccagatc

SEQ ID NO: 532108 - DNA, 33 bp, Homo sapien
tgaaaagacaaaactatgcacactccccagatc

SEQ ID NO: 532109 - DNA, 33 bp, Homo sapien
tgttagagaacccgataagagctaggtaaccct

SEQ ID NO: 532110 - DNA, 33 bp, Homo sapien
tgttagagaacccgattagagctaggtaaccct

SEQ ID NO: 532111 - DNA, 33 bp, Homo sapien
ctcatgttgagggtaaaagagaaaaatgtagtc

SEQ ID NO: 532112 - DNA, 33 bp, Homo sapien
ctcatgttgagggtaagagagaaaaatgtagtc

SEQ ID NO: 532113 - DNA, 33 bp, Homo sapien
cagctgtcctttgtcacggcaagaatgtgagtc

SEQ ID NO: 532114 - DNA, 33 bp, Homo sapien
cagctgtcctttgtcatggcaagaatgtgagtc

SEQ ID NO: 532115 - DNA, 33 bp, Homo sapien
tttgtccagtcaacgaaaaacagtggatgtcaa

SEQ ID NO: 532116 - DNA, 33 bp, Homo sapien
tttgtccagtcaacgataaacagtggatgtcaa

SEQ ID NO: 532117 - DNA, 33 bp, Homo sapien
acagctgttgtaatgactaggatgatgtaagca

SEQ ID NO: 532118 - DNA, 33 bp, Homo sapien
acagctgttgtaatgattaggatgatgtaagca

SEQ ID NO: 532119 - DNA, 33 bp, Homo sapien
ctgctgctatcagtccactgcctctagatacct

SEQ ID NO: 532120 - DNA, 33 bp, Homo sapien
ctgctgctatcagtccgctgcctctagatacct

SEQ ID NO: 532121 - DNA, 33 bp, Homo sapien
gtgcatctcttttaaccatggccaattgaatac

SEQ ID NO: 532122 - DNA, 33 bp, Homo sapien
gtgcatctcttttaacgatggccaattgaatac

SEQ ID NO: 532123 - DNA, 33 bp, Homo sapien
cattcctaaatatccaagtagagaacttttgct

SEQ ID NO: 532124 - DNA, 33 bp, Homo sapien
cattcctaaatatccacgtagagaacttttgct

SEQ ID NO: 532125 - DNA, 33 bp, Homo sapien
aggacaggaatggtcacgttgatgtgttcttct

SEQ ID NO: 532126 - DNA, 33 bp, Homo sapien
aggacaggaatggtcatgttgatgtgttcttct

SEQ ID NO: 532127 - DNA, 33 bp, Homo sapien
gcagaatggaaaaataagaaagcataatagcca

SEQ ID NO: 532128 - DNA, 33 bp, Homo sapien
gcagaatggaaaaatacgaaagcataatagcca

SEQ ID NO: 532129 - DNA, 33 bp, Homo sapien
ctaaagtgaacagtccaaaatagcgagtagggt

SEQ ID NO: 532130 - DNA, 33 bp, Homo sapien
ctaaagtgaacagtccgaaatagcgagtagggt

SEQ ID NO: 532131 - DNA, 33 bp, Homo sapien
aaaatggttcaactaactggttctggctctggg

SEQ ID NO: 532132 - DNA, 33 bp, Homo sapien
aaaatggttcaactaagtggttctggctctggg

SEQ ID NO: 532133 - DNA, 33 bp, Homo sapien
tgagttttacaaaatccgacaccatatgtattt

SEQ ID NO: 532134 - DNA, 33 bp, Homo sapien
tgagttttacaaaatctgacaccatatgtattt

SEQ ID NO: 532135 - DNA, 33 bp, Homo sapien
aaatttccaagttatcggaatcaaacttaaatt

SEQ ID NO: 532136 - DNA, 33 bp, Homo sapien
aaatttccaagttatctgaatcaaacttaaatt

SEQ ID NO: 532137 - DNA, 33 bp, Homo sapien
tattagttggacttaacgtcttaaacacatctc

SEQ ID NO: 532138 - DNA, 33 bp, Homo sapien
tattagttggacttaatgtcttaaacacatctc

SEQ ID NO: 532139 - DNA, 33 bp, Homo sapien
gtaagtgaattagaataagaatgtcaagcagaa

SEQ ID NO: 532140 - DNA, 33 bp, Homo sapien
gtaagtgaattagaatgagaatgtcaagcagaa

SEQ ID NO: 532141 - DNA, 33 bp, Homo sapien
tggattgagatcagctcacgttctggttgagtc

SEQ ID NO: 532142 - DNA, 33 bp, Homo sapien
tggattgagatcagcttacgttctggttgagtc

SEQ ID NO: 532143 - DNA, 33 bp, Homo sapien
tgtttcactatttatccgaaacatctggctttt

SEQ ID NO: 532144 - DNA, 33 bp, Homo sapien
tgtttcactatttatctgaaacatctggctttt

SEQ ID NO: 532145 - DNA, 33 bp, Homo sapien
agacgtaagagcaaaacgcctttctcaaggagc

SEQ ID NO: 532146 - DNA, 33 bp, Homo sapien
agacgtaagagcaaaatgcctttctcaaggagc

SEQ ID NO: 532147 - DNA, 33 bp, Homo sapien
gcttttaacacctaaacagaggagcacagtaat

SEQ ID NO: 532148 - DNA, 33 bp, Homo sapien
gcttttaacacctaaatagaggagcacagtaat

SEQ ID NO: 532149 - DNA, 33 bp, Homo sapien
tttggtaacaggatcaatagctcaaatttcact

SEQ ID NO: 532150 - DNA, 33 bp, Homo sapien
tttggtaacaggatcagtagctcaaatttcact

SEQ ID NO: 532151 - DNA, 33 bp, Homo sapien
tggatgggaaaaatgcaagaatttgggcaagga

SEQ ID NO: 532152 - DNA, 33 bp, Homo sapien
tggatgggaaaaatgccagaatttgggcaagga

SEQ ID NO: 532153 - DNA, 33 bp, Homo sapien
aattttgcattggtgaaccagtaggctgactta

SEQ ID NO: 532154 - DNA, 33 bp, Homo sapien
aattttgcattggtgacccagtaggctgactta

SEQ ID NO: 532155 - DNA, 33 bp, Homo sapien
cccatgagtaattcccagcagaagtccaggcac

SEQ ID NO: 532156 - DNA, 33 bp, Homo sapien
cccatgagtaattccctgcagaagtccaggcac

SEQ ID NO: 532157 - DNA, 33 bp, Homo sapien
tatccttggactgagcaaatgattacttttgtc

SEQ ID NO: 532158 - DNA, 33 bp, Homo sapien
tatccttggactgagcgaatgattacttttgtc

SEQ ID NO: 532159 - DNA, 33 bp, Homo sapien
agattggagtgaaatacatgtggcctttatgat

SEQ ID NO: 532160 - DNA, 33 bp, Homo sapien
agattggagtgaaatatatgtggcctttatgat

SEQ ID NO: 532161 - DNA, 33 bp, Homo sapien
agaacaggaagaagccaatgcaaaggcatggag

SEQ ID NO: 532162 - DNA, 33 bp, Homo sapien
agaacaggaagaagccgatgcaaaggcatggag

SEQ ID NO: 532163 - DNA, 33 bp, Homo sapien
gggttcttaccagcaaactgacttctaatgcac

SEQ ID NO: 532164 - DNA, 33 bp, Homo sapien
gggttcttaccagcaacctgacttctaatgcac

SEQ ID NO: 532165 - DNA, 33 bp, Homo sapien
acgctgacaaagcaggaacaggtaagctgatcc

SEQ ID NO: 532166 - DNA, 33 bp, Homo sapien
acgctgacaaagcagggacaggtaagctgatcc

SEQ ID NO: 532167 - DNA, 33 bp, Homo sapien
attctaccaacaataacgcaagcttggaaaagg

SEQ ID NO: 532168 - DNA, 33 bp, Homo sapien
attctaccaacaataatgcaagcttggaaaagg

SEQ ID NO: 532169 - DNA, 33 bp, Homo sapien
tggccagtgtgtgagggatataaatgttagttt

SEQ ID NO: 532170 - DNA, 33 bp, Homo sapien
tggccagtgtgtgaggtatataaatgttagttt

SEQ ID NO: 532171 - DNA, 33 bp, Homo sapien
acattcttccaaaaacagacttccacctatctc

SEQ ID NO: 532172 - DNA, 33 bp, Homo sapien
acattcttccaaaaacggacttccacctatctc

SEQ ID NO: 532173 - DNA, 33 bp, Homo sapien
ttaattaattgcctggcacggcacaggtaagca

SEQ ID NO: 532174 - DNA, 33 bp, Homo sapien
ttaattaattgcctggtacggcacaggtaagca

SEQ ID NO: 532175 - DNA, 33 bp, Homo sapien
tttgtttagcttatgacggatgatacataaatg

SEQ ID NO: 532176 - DNA, 33 bp, Homo sapien
tttgtttagcttatgatggatgatacataaatg

SEQ ID NO: 532177 - DNA, 33 bp, Homo sapien
gcacagggtctcagacaatgggaaaacgcaagt

SEQ ID NO: 532178 - DNA, 33 bp, Homo sapien
gcacagggtctcagactatgggaaaacgcaagt

SEQ ID NO: 532179 - DNA, 33 bp, Homo sapien
ttaaaccatcccaactaaaaacacttgaaagag

SEQ ID NO: 532180 - DNA, 33 bp, Homo sapien
ttaaaccatcccaactgaaaacacttgaaagag

SEQ ID NO: 532181 - DNA, 33 bp, Homo sapien
agcttgttaacatcaacaaatggaaaaaaaaga

SEQ ID NO: 532182 - DNA, 33 bp, Homo sapien
agcttgttaacatcaagaaatggaaaaaaaaga

SEQ ID NO: 532183 - DNA, 33 bp, Homo sapien
gtggtaccttagacagaacaaatgagcaaaaag

SEQ ID NO: 532184 - DNA, 33 bp, Homo sapien
gtggtaccttagacaggacaaatgagcaaaaag

SEQ ID NO: 532185 - DNA, 33 bp, Homo sapien
tcatcatgtatccaacagtcttaagctgtagag

SEQ ID NO: 532186 - DNA, 33 bp, Homo sapien
tcatcatgtatccaacggtcttaagctgtagag

SEQ ID NO: 532187 - DNA, 33 bp, Homo sapien
ttctaaagtgaaaagaccagacatagactaaga

SEQ ID NO: 532188 - DNA, 33 bp, Homo sapien
ttctaaagtgaaaagatcagacatagactaaga

SEQ ID NO: 532189 - DNA, 33 bp, Homo sapien
atctgataaagtcaaaaatgcacagatccaata

SEQ ID NO: 532190 - DNA, 33 bp, Homo sapien
atctgataaagtcaaagatgcacagatccaata

SEQ ID NO: 532191 - DNA, 33 bp, Homo sapien
tcctttggtttgaagaagaaggaaggagggaat

SEQ ID NO: 532192 - DNA, 33 bp, Homo sapien
tcctttggtttgaagaggaaggaaggagggaat

SEQ ID NO: 532193 - DNA, 33 bp, Homo sapien
caatagttgttactaacggctggtcaatgtgct

SEQ ID NO: 532194 - DNA, 33 bp, Homo sapien
caatagttgttactaatggctggtcaatgtgct

SEQ ID NO: 532195 - DNA, 33 bp, Homo sapien
ttccaggtgctatctgccacagctttgcatggc

SEQ ID NO: 532196 - DNA, 33 bp, Homo sapien
ttccaggtgctatctgtcacagctttgcatggc

SEQ ID NO: 532197 - DNA, 33 bp, Homo sapien; identical to SEQ ID NO: 532195

SEQ ID NO: 532198 - DNA, 33 bp, Homo sapien; identical to SEQ ID NO: 532196

SEQ ID NO: 532199 - DNA, 33 bp, Homo sapien
tcatttgagaaatgtcaaaaggccaaattgcac

SEQ ID NO: 532200 - DNA, 33 bp, Homo sapien
tcatttgagaaatgtccaaaggccaaattgcac

SEQ ID NO: 532201 - DNA, 33 bp, Homo sapien
cttctaggcaaagcaccgcactaataaactgac

SEQ ID NO: 532202 - DNA, 33 bp, Homo sapien
cttctaggcaaagcactgcactaataaactgac

SEQ ID NO: 532203 - DNA, 33 bp, Homo sapien
ggaatcccaaaagaaagtaaggactgtgataag

SEQ ID NO: 532204 - DNA, 33 bp, Homo sapien
ggaatcccaaaagaaattaaggactgtgataag

SEQ ID NO: 532205 - DNA, 33 bp, Homo sapien
gtgttttataccaacactagtggcaagagttcc

SEQ ID NO: 532206 - DNA, 33 bp, Homo sapien
gtgttttataccaacattagtggcaagagttcc

SEQ ID NO: 532207 - DNA, 33 bp, Homo sapien
ctataaaacctgataacagaccttgctagctta

SEQ ID NO: 532208 - DNA, 33 bp, Homo sapien
ctataaaacctgataatagaccttgctagctta

SEQ ID NO: 532209 - DNA, 33 bp, Homo sapien
gagtccccttgtaaacagctaggtatattttgt

SEQ ID NO: 532210 - DNA, 33 bp, Homo sapien
gagtccccttgtaaaccgctaggtatattttgt

SEQ ID NO: 532211 - DNA, 33 bp, Homo sapien
ggtagagcatatgaacagagagaaaggccagag

SEQ ID NO: 532212 - DNA, 33 bp, Homo sapien
ggtagagcatatgaacggagagaaaggccagag

SEQ ID NO: 532213 - DNA, 33 bp, Homo sapien
gcttctaggctaagacagtaccaaggtagatac

SEQ ID NO: 532214 - DNA, 33 bp, Homo sapien
gcttctaggctaagacggtaccaaggtagatac

SEQ ID NO: 532215 - DNA, 33 bp, Homo sapien
ctccatagaaataaccagcatgaagacattaaa

SEQ ID NO: 532216 - DNA, 33 bp, Homo sapien
ctccatagaaataaccggcatgaagacattaaa

SEQ ID NO: 532217 - DNA, 33 bp, Homo sapien
aaatggcagagaatgaaactttcaagtaattgg

SEQ ID NO: 532218 - DNA, 33 bp, Homo sapien
aaatggcagagaatgagactttcaagtaattgg

SEQ ID NO: 532219 - DNA, 33 bp, Homo sapien
aatgcattgggttacaacctgataaacccattg

SEQ ID NO: 532220 - DNA, 33 bp, Homo sapien
aatgcattgggttacatcctgataaacccattg

SEQ ID NO: 532221 - DNA, 33 bp, Homo sapien
agaattgccgtattgaccaggaaaagattatgt

SEQ ID NO: 532222 - DNA, 33 bp, Homo sapien
agaattgccgtattgatcaggaaaagattatgt

SEQ ID NO: 532223 - DNA, 33 bp, Homo sapien
acttgtgccattaggaagttgggagaggaagat

SEQ ID NO: 532224 - DNA, 33 bp, Homo sapien
acttgtgccattaggaggttgggagaggaagat

SEQ ID NO: 532225 - DNA, 33 bp, Homo sapien
aatatcattttctcacagtatattggaggccag

SEQ ID NO: 532226 - DNA, 33 bp, Homo sapien
aatatcattttctcacggtatattggaggccag

SEQ ID NO: 532227 - DNA, 33 bp, Homo sapien
tccaccaaccaatttacaaacttgtcaatatca

SEQ ID NO: 532228 - DNA, 33 bp, Homo sapien
tccaccaaccaatttataaacttgtcaatatca

SEQ ID NO: 532229 - DNA, 33 bp, Homo sapien
tgaaacccaacattcaagttaaagagagcctga

SEQ ID NO: 532230 - DNA, 33 bp, Homo sapien
tgaaacccaacattcacgttaaagagagcctga

SEQ ID NO: 532231 - DNA, 33 bp, Homo sapien
tcagggaccttcagagaaaggagagactgaact

SEQ ID NO: 532232 - DNA, 33 bp, Homo sapien
tcagggaccttcagaggaaggagagactgaact

SEQ ID NO: 532233 - DNA, 33 bp, Homo sapien
tgtgttggcttggagcaaagaatagaatgggtt

SEQ ID NO: 532234 - DNA, 33 bp, Homo sapien
tgtgttggcttggagcgaagaatagaatgggtt

SEQ ID NO: 532235 - DNA, 33 bp, Homo sapien
aaaaactgttaatgtccagatttatgtctctag

SEQ ID NO: 532236 - DNA, 33 bp, Homo sapien
aaaaactgttaatgtctagatttatgtctctag

SEQ ID NO: 532237 - DNA, 33 bp, Homo sapien
ccaccttcaaaatatggaaaattctggccatct

SEQ ID NO: 532238 - DNA, 33 bp, Homo sapien
ccaccttcaaaatatgtaaaattctggccatct

SEQ ID NO: 532239 - DNA, 33 bp, Homo sapien
ttcaggaatcttgtacgggggagggtagctgaa

SEQ ID NO: 532240 - DNA, 33 bp, Homo sapien
ttcaggaatcttgtactggggagggtagctgaa

SEQ ID NO: 532241 - DNA, 33 bp, Homo sapien
tcatttgaaggcctgaacctgaattttcaaata

SEQ ID NO: 532242 - DNA, 33 bp, Homo sapien
tcatttgaaggcctgagcctgaattttcaaata

SEQ ID NO: 532243 - DNA, 33 bp, Homo sapien
tactactcactaccaaaagagaggagtgctaaa

SEQ ID NO: 532244 - DNA, 33 bp, Homo sapien
tactactcactaccaagagagaggagtgctaaa

SEQ ID NO: 532245 - DNA, 33 bp, Homo sapien
atttcatggatgctggcaagaagatatggagct

SEQ ID NO: 532246 - DNA, 33 bp, Homo sapien
atttcatggatgctggtaagaagatatggagct

SEQ ID NO: 532247 - DNA, 33 bp, Homo sapien
cttggtggtagatttacgggtgttcactctaca

SEQ ID NO: 532248 - DNA, 33 bp, Homo sapien
cttggtggtagatttatgggtgttcactctaca

SEQ ID NO: 532249 - DNA, 33 bp, Homo sapien
cattttccatattaagaacctaagacctacaga

SEQ ID NO: 532250 - DNA, 33 bp, Homo sapien
cattttccatattaaggacctaagacctacaga

SEQ ID NO: 532251 - DNA, 33 bp, Homo sapien
ttttttaagactagaaaaggttgagattgaaaa

SEQ ID NO: 532252 - DNA, 33 bp, Homo sapien
ttttttaagactagaagaggttgagattgaaaa

SEQ ID NO: 532253 - DNA, 33 bp, Homo sapien
atatgacgtttcaataaatcaaaatatttgaca

SEQ ID NO: 532254 - DNA, 33 bp, Homo sapien
atatgacgtttcaatacatcaaaatatttgaca

SEQ ID NO: 532255 - DNA, 33 bp, Homo sapien
gtcattacacttaacaatattttctctgcagat

SEQ ID NO: 532256 - DNA, 33 bp, Homo sapien
gtcattacacttaacagtattttctctgcagat

SEQ ID NO: 532257 - DNA, 33 bp, Homo sapien
gtacattgcagtggaacgagcattgtatattga

SEQ ID NO: 532258 - DNA, 33 bp, Homo sapien
gtacattgcagtggaatgagcattgtatattga

SEQ ID NO: 532259 - DNA, 33 bp, Homo sapien
atctgtatgttagcccaatttgaaacaactctg

SEQ ID NO: 532260 - DNA, 33 bp, Homo sapien
atctgtatgttagcccgatttgaaacaactctg

SEQ ID NO: 532261 - DNA, 33 bp, Homo sapien
gattatatttgtgttcaaggtggtatcatttat

SEQ ID NO: 532262 - DNA, 33 bp, Homo sapien
gattatatttgtgttcgaggtggtatcatttat

SEQ ID NO: 532263 - DNA, 33 bp, Homo sapien
cttcttatcctgcagaagtctggtagcaaactg

SEQ ID NO: 532264 - DNA, 33 bp, Homo sapien
cttcttatcctgcagaggtctggtagcaaactg

SEQ ID NO: 532265 - DNA, 33 bp, Homo sapien
caagtgcttgacagccacctatgatgaaataag

SEQ ID NO: 532266 - DNA, 33 bp, Homo sapien
caagtgcttgacagcctcctatgatgaaataag

SEQ ID NO: 532267 - DNA, 33 bp, Homo sapien
tgataaatccttccacaactgggttcttccttt

SEQ ID NO: 532268 - DNA, 33 bp, Homo sapien
tgataaatccttccacgactgggttcttccttt

SEQ ID NO: 532269 - DNA, 33 bp, Homo sapien
aaagagtgtagggcaaagccagatcataagata

SEQ ID NO: 532270 - DNA, 33 bp, Homo sapien
aaagagtgtagggcaaggccagatcataagata

SEQ ID NO: 532271 - DNA, 33 bp, Homo sapien
ggggtatacattaaaccagaaaagccatgagtc

SEQ ID NO: 532272 - DNA, 33 bp, Homo sapien
ggggtatacattaaactagaaaagccatgagtc

SEQ ID NO: 532273 - DNA, 33 bp, Homo sapien
tgtgtaatgctcttccaaaataaaactactgac

SEQ ID NO: 532274 - DNA, 33 bp, Homo sapien
tgtgtaatgctcttccgaaataaaactactgac

SEQ ID NO: 532275 - DNA, 33 bp, Homo sapien
aaaatatagctaacgaacgcataaagtacacat

SEQ ID NO: 532276 - DNA, 33 bp, Homo sapien
aaaatatagctaacgagcgcataaagtacacat

SEQ ID NO: 532277 - DNA, 33 bp, Homo sapien
taatatgcaacaaaacagcgtatgagttacgct

SEQ ID NO: 532278 - DNA, 33 bp, Homo sapien
taatatgcaacaaaacggcgtatgagttacgct

SEQ ID NO: 532279 - DNA, 33 bp, Homo sapien
cacctgcccatagctccaacctacttaatatac

SEQ ID NO: 532280 - DNA, 33 bp, Homo sapien
cacctgcccatagctctaacctacttaatatac

SEQ ID NO: 532281 - DNA, 33 bp, Homo sapien
taaatgaaggttcgaactgtgacaaccgttaca

SEQ ID NO: 532282 - DNA, 33 bp, Homo sapien
taaatgaaggttcgaattgtgacaaccgttaca

SEQ ID NO: 532283 - DNA, 33 bp, Homo sapien
tgctgcctctctgctcgcatctccttgttctca

SEQ ID NO: 532284 - DNA, 33 bp, Homo sapien
tgctgcctctctgctctcatctccttgttctca

SEQ ID NO: 532285 - DNA, 33 bp, Homo sapien
cagaagcaatgtccaactaaggctatacatttg

SEQ ID NO: 532286 - DNA, 33 bp, Homo sapien
cagaagcaatgtccaattaaggctatacatttg

SEQ ID NO: 532287 - DNA, 33 bp, Homo sapien
taaatgataaagtctaataaagttggcaattac

SEQ ID NO: 532288 - DNA, 33 bp, Homo sapien
taaatgataaagtctagtaaagttggcaattac

SEQ ID NO: 532289 - DNA, 33 bp, Homo sapien
gggtaaggtttgcagaccatttgccttttaaaa

SEQ ID NO: 532290 - DNA, 33 bp, Homo sapien
gggtaaggtttgcagatcatttgccttttaaaa

SEQ ID NO: 532291 - DNA, 33 bp, Homo sapien
gagaagatatggagaagtgagagtttgaaaatc

SEQ ID NO: 532292 - DNA, 33 bp, Homo sapien
gagaagatatggagaattgagagtttgaaaatc

SEQ ID NO: 532293 - DNA, 33 bp, Homo sapien
atcactcagaatcatggaattaaatggaaatta

SEQ ID NO: 532294 - DNA, 33 bp, Homo sapien
atcactcagaatcatgtaattaaatggaaatta

SEQ ID NO: 532295 - DNA, 33 bp, Homo sapien
ttttgtgtttcaaaataagttgaccttactgta

SEQ ID NO: 532296 - DNA, 33 bp, Homo sapien
ttttgtgtttcaaaatcagttgaccttactgta

SEQ ID NO: 532297 - DNA, 33 bp, Homo sapien
gtttagaaaggatagcagaagtagcgtatctat

SEQ ID NO: 532298 - DNA, 33 bp, Homo sapien
gtttagaaaggatagcggaagtagcgtatctat

SEQ ID NO: 532299 - DNA, 33 bp, Homo sapien
gtagtcaatattgagagcaggtaatataatgcc

SEQ ID NO: 532300 - DNA, 33 bp, Homo sapien
gtagtcaatattgagatcaggtaatataatgcc

SEQ ID NO: 532301 - DNA, 33 bp, Homo sapien
ctatgatgatatacaacgttaactttaggggag

SEQ ID NO: 532302 - DNA, 33 bp, Homo sapien
ctatgatgatatacaatgttaactttaggggag

SEQ ID NO: 532303 - DNA, 33 bp, Homo sapien
gccccagctggagtacacaaacacaattcactg

SEQ ID NO: 532304 - DNA, 33 bp, Homo sapien
gccccagctggagtacgcaaacacaattcactg

SEQ ID NO: 532305 - DNA, 33 bp, Homo sapien
gatcttttaaggttaccgaatctctttgtcctc

SEQ ID NO: 532306 - DNA, 33 bp, Homo sapien
gatcttttaaggttactgaatctctttgtcctc

SEQ ID NO: 532307 - DNA, 33 bp, Homo sapien
ctgtcctacttccttcaatcttaatttccctta

SEQ ID NO: 532308 - DNA, 33 bp, Homo sapien
ctgtcctacttccttcgatcttaatttccctta

SEQ ID NO: 532309 - DNA, 33 bp, Homo sapien
ataaagtgcctacagtaaaatgcagttgcaata

SEQ ID NO: 532310 - DNA, 33 bp, Homo sapien
ataaagtgcctacagtgaaatgcagttgcaata

SEQ ID NO: 532311 - DNA, 33 bp, Homo sapien
tctattcctctacttacatcattctaatgaaag

SEQ ID NO: 532312 - DNA, 33 bp, Homo sapien
tctattcctctacttatatcattctaatgaaag

SEQ ID NO: 532313 - DNA, 33 bp, Homo sapien
aagaaatatatgagaaagaaatgttgcaggata

SEQ ID NO: 532314 - DNA, 33 bp, Homo sapien
aagaaatatatgagaaggaaatgttgcaggata

SEQ ID NO: 532315 - DNA, 33 bp, Homo sapien
tataggaatgggttaacagaaaatctttgacta

SEQ ID NO: 532316 - DNA, 33 bp, Homo sapien
tataggaatgggttaagagaaaatctttgacta

SEQ ID NO: 532317 - DNA, 33 bp, Homo sapien
tggagaaaaagctaacaagaagagtgctttacg

SEQ ID NO: 532318 - DNA, 33 bp, Homo sapien
tggagaaaaagctaacgagaagagtgctttacg

SEQ ID NO: 532319 - DNA, 33 bp, Homo sapien
agcctgatgcctcccactgaaaagtttgccatc

SEQ ID NO: 532320 - DNA, 33 bp, Homo sapien
agcctgatgcctcccattgaaaagtttgccatc

SEQ ID NO: 532321 - DNA, 33 bp, Homo sapien
agataatcttcactgacactttagaagaatctc

SEQ ID NO: 532322 - DNA, 33 bp, Homo sapien
agataatcttcactgatactttagaagaatctc

SEQ ID NO: 532323 - DNA, 33 bp, Homo sapien
tcaacagacatctaagaaaaacaggatgaaata

SEQ ID NO: 532324 - DNA, 33 bp, Homo sapien
tcaacagacatctaaggaaaacaggatgaaata

SEQ ID NO: 532325 - DNA, 33 bp, Homo sapien
tttcatattattaaaaaaggactgatgttacag

SEQ ID NO: 532326 - DNA, 33 bp, Homo sapien
tttcatattattaaaagaggactgatgttacag

SEQ ID NO: 532327 - DNA, 33 bp, Homo sapien
gtaaacgtgtgaccctcaagccctaagttgtca

SEQ ID NO: 532328 - DNA, 33 bp, Homo sapien
gtaaacgtgtgaccctgaagccctaagttgtca

SEQ ID NO: 532329 - DNA, 33 bp, Homo sapien
ttaagtcctgtgggcaccaagttgtggttagtt

SEQ ID NO: 532330 - DNA, 33 bp, Homo sapien
ttaagtcctgtgggcatcaagttgtggttagtt

SEQ ID NO: 532331 - DNA, 33 bp, Homo sapien
agcaggccaagaaagaaaatatgaatgtatata

SEQ ID NO: 532332 - DNA, 33 bp, Homo sapien
agcaggccaagaaagagaatatgaatgtatata

SEQ ID NO: 532333 - DNA, 33 bp, Homo sapien
actggcgattacagaaagtgggagggtaagagg

SEQ ID NO: 532334 - DNA, 33 bp, Homo sapien
actggcgattacagaaggtgggagggtaagagg

SEQ ID NO: 532335 - DNA, 33 bp, Homo sapien
ggcaacttgtgatccaagtaattggctttcagt

SEQ ID NO: 532336 - DNA, 33 bp, Homo sapien
ggcaacttgtgatccacgtaattggctttcagt

SEQ ID NO: 532337 - DNA, 33 bp, Homo sapien
ctcagctaaagaactcaatgaatttcaactttg

SEQ ID NO: 532338 - DNA, 33 bp, Homo sapien
ctcagctaaagaactcgatgaatttcaactttg

SEQ ID NO: 532339 - DNA, 33 bp, Homo sapien; identical to SEQ ID NO: 532337

SEQ ID NO: 532340 - DNA, 33 bp, Homo sapien; identical to SEQ ID NO: 532338

SEQ ID NO: 532341 - DNA, 33 bp, Homo sapien
aaaaagcaattcataaactgataaactttctgt

SEQ ID NO: 532342 - DNA, 33 bp, Homo sapien
aaaaagcaattcataagctgataaactttctgt

SEQ ID NO: 532343 - DNA, 33 bp, Homo sapien
aagagttgcttgattccacaaggatgattacaa

SEQ ID NO: 532344 - DNA, 33 bp, Homo sapien
aagagttgcttgattctacaaggatgattacaa

SEQ ID NO: 532345 - DNA, 33 bp, Homo sapien
ctcagttttcactctgccacaggcaaatagaca

SEQ ID NO: 532346 - DNA, 33 bp, Homo sapien
ctcagttttcactctgtcacaggcaaatagaca

SEQ ID NO: 532347 - DNA, 33 bp, Homo sapien
acgttttactaggcacaatagcttctccagctt

SEQ ID NO: 532348 - DNA, 33 bp, Homo sapien
acgttttactaggcactatagcttctccagctt

SEQ ID NO: 532349 - DNA, 33 bp, Homo sapien
agcatttccacgccccaaggatttccactcaga

SEQ ID NO: 532350 - DNA, 33 bp, Homo sapien
agcatttccacgcccccaggatttccactcaga

SEQ ID NO: 532351 - DNA, 33 bp, Homo sapien
tcaaaaggtaagccaacctatctttgtagacta

SEQ ID NO: 532352 - DNA, 33 bp, Homo sapien
tcaaaaggtaagccaagctatctttgtagacta

SEQ ID NO: 532353 - DNA, 33 bp, Homo sapien
cttctttgtatgtttgaaatagttcataattac

SEQ ID NO: 532354 - DNA, 33 bp, Homo sapien
cttctttgtatgtttgtaatagttcataattac

SEQ ID NO: 532355 - DNA, 33 bp, Homo sapien
agagggactagcataaatacagatagatgggaa

SEQ ID NO: 532356 - DNA, 33 bp, Homo sapien
agagggactagcataagtacagatagatgggaa

SEQ ID NO: 532357 - DNA, 33 bp, Homo sapien
agcccctaggtttcaaatgactaccatctctgg

SEQ ID NO: 532358 - DNA, 33 bp, Homo sapien
agcccctaggtttcaagtgactaccatctctgg

SEQ ID NO: 532359 - DNA, 33 bp, Homo sapien
aagcacccactcaactcacctgacccaaaatgt

SEQ ID NO: 532360 - DNA, 33 bp, Homo sapien
aagcacccactcaacttacctgacccaaaatgt

SEQ ID NO: 532361 - DNA, 33 bp, Homo sapien
cagtaccctattgatacatgtccatctgtgtgg

SEQ ID NO: 532362 - DNA, 33 bp, Homo sapien
cagtaccctattgatatatgtccatctgtgtgg

SEQ ID NO: 532363 - DNA, 33 bp, Homo sapien
aagactgtctcttcacccctgcaactttttcaa

SEQ ID NO: 532364 - DNA, 33 bp, Homo sapien
aagactgtctcttcactcctgcaactttttcaa

SEQ ID NO: 532365 - DNA, 33 bp, Homo sapien
agaaaaccaaatatcaggtattctctcttataa

SEQ ID NO: 532366 - DNA, 33 bp, Homo sapien
agaaaaccaaatatcatgtattctctcttataa

SEQ ID NO: 532367 - DNA, 33 bp, Homo sapien
gttcccagcaacttccagcttcagtttagccct

SEQ ID NO: 532368 - DNA, 33 bp, Homo sapien
gttcccagcaacttccggcttcagtttagccct

SEQ ID NO: 532369 - DNA, 33 bp, Homo sapien
cctcacaatcaaagggaaggtgaaaggcacatc

SEQ ID NO: 532370 - DNA, 33 bp, Homo sapien
cctcacaatcaaagggtaggtgaaaggcacatc

SEQ ID NO: 532371 - DNA, 33 bp, Homo sapien
cagtgctaagagtgaactgcatttaaaaattat

SEQ ID NO: 532372 - DNA, 33 bp, Homo sapien
cagtgctaagagtgaattgcatttaaaaattat

SEQ ID NO: 532373 - DNA, 33 bp, Homo sapien
aaaccagataaacccactagttggaagagttct

SEQ ID NO: 532374 - DNA, 33 bp, Homo sapien
aaaccagataaacccattagttggaagagttct

SEQ ID NO: 532375 - DNA, 33 bp, Homo sapien
atccagtttcttgctacaactgcttcaggaaac

SEQ ID NO: 532376 - DNA, 33 bp, Homo sapien
atccagtttcttgctataactgcttcaggaaac

SEQ ID NO: 532377 - DNA, 33 bp, Homo sapien
attgactgcataaaaactttacatatggatagg

SEQ ID NO: 532378 - DNA, 33 bp, Homo sapien
attgactgcataaaaattttacatatggatagg

SEQ ID NO: 532379 - DNA, 33 bp, Homo sapien
aagtttcacaaacaacactttccattgctatgt

SEQ ID NO: 532380 - DNA, 33 bp, Homo sapien
aagtttcacaaacaacgctttccattgctatgt

SEQ ID NO: 532381 - DNA, 33 bp, Homo sapien
gacagacttgatagtaagaaaattgtggtaaga

SEQ ID NO: 532382 - DNA, 33 bp, Homo sapien
gacagacttgatagtatgaaaattgtggtaaga

SEQ ID NO: 532383 - DNA, 33 bp, Homo sapien
atgtggtttagcactaaaaattctgttgaggat

SEQ ID NO: 532384 - DNA, 33 bp, Homo sapien
atgtggtttagcactagaaattctgttgaggat

SEQ ID NO: 532385 - DNA, 33 bp, Homo sapien
aatagctgagtaaaatgaaatcaaacatttatg

SEQ ID NO: 532386 - DNA, 33 bp, Homo sapien
aatagctgagtaaaattaaatcaaacatttatg

SEQ ID NO: 532387 - DNA, 33 bp, Homo sapien
ggcaaactgagacctacggcaatctgacaaaaa

SEQ ID NO: 532388 - DNA, 33 bp, Homo sapien
ggcaaactgagacctatggcaatctgacaaaaa

SEQ ID NO: 532389 - DNA, 33 bp, Homo sapien
gctggctttgtgtccacaagaaaagtataggct

SEQ ID NO: 532390 - DNA, 33 bp, Homo sapien
gctggctttgtgtccagaagaaaagtataggct

SEQ ID NO: 532391 - DNA, 33 bp, Homo sapien
tctctgaagaaacagcccataagcctgctccag

SEQ ID NO: 532392 - DNA, 33 bp, Homo sapien
tctctgaagaaacagctcataagcctgctccag

SEQ ID NO: 532393 - DNA, 33 bp, Homo sapien
ttctccaaaattgagacaccaaccattcttcag

SEQ ID NO: 532394 - DNA, 33 bp, Homo sapien
ttctccaaaattgagataccaaccattcttcag

SEQ ID NO: 532395 - DNA, 33 bp, Homo sapien
atgcccttgaatttaactggatttctctctttc

SEQ ID NO: 532396 - DNA, 33 bp, Homo sapien
atgcccttgaatttaattggatttctctctttc

SEQ ID NO: 532397 - DNA, 33 bp, Homo sapien
tagctaaagacatgaaataaaaccagcaaaaaa

SEQ ID NO: 532398 - DNA, 33 bp, Homo sapien
tagctaaagacatgaagtaaaaccagcaaaaaa

SEQ ID NO: 532399 - DNA, 33 bp, Homo sapien
cattcagtttcttagcactattctaggccttat

SEQ ID NO: 532400 - DNA, 33 bp, Homo sapien
cattcagtttcttagcgctattctaggccttat

SEQ ID NO: 532401 - DNA, 33 bp, Homo sapien
gattctggatttggcactgaaaaggagtttcag

SEQ ID NO: 532402 - DNA, 33 bp, Homo sapien
gattctggatttggcattgaaaaggagtttcag

SEQ ID NO: 532403 - DNA, 33 bp, Homo sapien
aagatatttttaaaccaaaaagcattcaatagt

SEQ ID NO: 532404 - DNA, 33 bp, Homo sapien
aagatatttttaaaccgaaaagcattcaatagt

SEQ ID NO: 532405 - DNA, 33 bp, Homo sapien
tccattgttctcgaaaagtgctagtggtcaaat

SEQ ID NO: 532406 - DNA, 33 bp, Homo sapien
tccattgttctcgaaaggtgctagtggtcaaat

SEQ ID NO: 532407 - DNA, 33 bp, Homo sapien
atcagcaatatcacacaagaatgaaattggtgc

SEQ ID NO: 532408 - DNA, 33 bp, Homo sapien
atcagcaatatcacacgagaatgaaattggtgc

SEQ ID NO: 532409 - DNA, 33 bp, Homo sapien
ttgaaggtatacatgaaagataactatccatat

SEQ ID NO: 532410 - DNA, 33 bp, Homo sapien
ttgaaggtatacatgacagataactatccatat

SEQ ID NO: 532411 - DNA, 33 bp, Homo sapien
ggggaaccctcataaactgtcagtaggaatgta

SEQ ID NO: 532412 - DNA, 33 bp, Homo sapien
ggggaaccctcataaattgtcagtaggaatgta

SEQ ID NO: 532413 - DNA, 33 bp, Homo sapien
acagtcatatctctaccacatcttactggaatg

SEQ ID NO: 532414 - DNA, 33 bp, Homo sapien
acagtcatatctctacgacatcttactggaatg

SEQ ID NO: 532415 - DNA, 33 bp, Homo sapien
gtatcctccttgctaaatatctcaacaccttaa

SEQ ID NO: 532416 - DNA, 33 bp, Homo sapien
gtatcctccttgctaattatctcaacaccttaa

SEQ ID NO: 532417 - DNA, 33 bp, Homo sapien
caggctgcagtcatctcaacattcaactgaagt

SEQ ID NO: 532418 - DNA, 33 bp, Homo sapien
caggctgcagtcatcttaacattcaactgaagt

SEQ ID NO: 532419 - DNA, 33 bp, Homo sapien
ccccagatacattaaactatgtttgacagaaag

SEQ ID NO: 532420 - DNA, 33 bp, Homo sapien
ccccagatacattaaattatgtttgacagaaag

SEQ ID NO: 532421 - DNA, 33 bp, Homo sapien
accatagaagtgatccaagattccattaacaac

SEQ ID NO: 532422 - DNA, 33 bp, Homo sapien
accatagaagtgatccgagattccattaacaac

SEQ ID NO: 532423 - DNA, 33 bp, Homo sapien
tgattctctgcttggactcaatggaaacataac

SEQ ID NO: 532424 - DNA, 33 bp, Homo sapien
tgattctctgcttggattcaatggaaacataac

SEQ ID NO: 532425 - DNA, 33 bp, Homo sapien
catcatttgtttctccagcatctcaattttcct

SEQ ID NO: 532426 - DNA, 33 bp, Homo sapien
catcatttgtttctccggcatctcaattttcct

SEQ ID NO: 532427 - DNA, 33 bp, Homo sapien
tttggtaagtctcctcaaaaattgcttttaaaa

SEQ ID NO: 532428 - DNA, 33 bp, Homo sapien
tttggtaagtctcctcgaaaattgcttttaaaa

SEQ ID NO: 532429 - DNA, 33 bp, Homo sapien
atctaattaatctaaacaggttctgcacagcac

SEQ ID NO: 532430 - DNA, 33 bp, Homo sapien
atctaattaatctaaagaggttctgcacagcac

SEQ ID NO: 532431 - DNA, 33 bp, Homo sapien
aaaaatcataaggttaccccttgtcaattcagc

SEQ ID NO: 532432 - DNA, 33 bp, Homo sapien
aaaaatcataaggttatcccttgtcaattcagc

SEQ ID NO: 532433 - DNA, 33 bp, Homo sapien
actatttaaatgattacgtctattaggcagtat

SEQ ID NO: 532434 - DNA, 33 bp, Homo sapien
actatttaaatgattatgtctattaggcagtat

SEQ ID NO: 532435 - DNA, 33 bp, Homo sapien
atcatttttaggcacaaaagtcatagttactga

SEQ ID NO: 532436 - DNA, 33 bp, Homo sapien
atcatttttaggcacagaagtcatagttactga

SEQ ID NO: 532437 - DNA, 33 bp, Homo sapien
agcagaccaagtggaaatgattaaccaatctta

SEQ ID NO: 532438 - DNA, 33 bp, Homo sapien
agcagaccaagtggaactgattaaccaatctta

SEQ ID NO: 532439 - DNA, 33 bp, Homo sapien
cccagtgcacaggcaagcccttagtctgagcca

SEQ ID NO: 532440 - DNA, 33 bp, Homo sapien
cccagtgcacaggcaatcccttagtctgagcca

SEQ ID NO: 532441 - DNA, 33 bp, Homo sapien
gagtgatgtgtataacccctggtttaactgatt

SEQ ID NO: 532442 - DNA, 33 bp, Homo sapien
gagtgatgtgtataactcctggtttaactgatt

SEQ ID NO: 532443 - DNA, 33 bp, Homo sapien
ttctttggcacacttacgtatttgtatgaagtc

SEQ ID NO: 532444 - DNA, 33 bp, Homo sapien
ttctttggcacacttatgtatttgtatgaagtc

SEQ ID NO: 532445 - DNA, 33 bp, Homo sapien
atgccgtacagtaggaaacactgagaaattctg

SEQ ID NO: 532446 - DNA, 33 bp, Homo sapien
atgccgtacagtaggagacactgagaaattctg

SEQ ID NO: 532447 - DNA, 33 bp, Homo sapien
gtatacataactcagaaactttggtgctcagga

SEQ ID NO: 532448 - DNA, 33 bp, Homo sapien
gtatacataactcagagactttggtgctcagga

SEQ ID NO: 532449 - DNA, 33 bp, Homo sapien
caggaagaagaacctacgagtgggtgtgtattc

SEQ ID NO: 532450 - DNA, 33 bp, Homo sapien
caggaagaagaacctatgagtgggtgtgtattc

SEQ ID NO: 532451 - DNA, 33 bp, Homo sapien
tagagttgatagaagcaaaattactgagacact

SEQ ID NO: 532452 - DNA, 33 bp, Homo sapien
tagagttgatagaagcgaaattactgagacact

SEQ ID NO: 532453 - DNA, 33 bp, Homo sapien
tctcaggctgggcttcactatccctcatgtatc

SEQ ID NO: 532454 - DNA, 33 bp, Homo sapien
tctcaggctgggcttctctatccctcatgtatc

SEQ ID NO: 532455 - DNA, 33 bp, Homo sapien
acaaaataggcaagaaagtatgtgtttcagctg

SEQ ID NO: 532456 - DNA, 33 bp, Homo sapien
acaaaataggcaagaaggtatgtgtttcagctg

SEQ ID NO: 532457 - DNA, 33 bp, Homo sapien
ataaagtctacagttaaagcttctaagatcacc

SEQ ID NO: 532458 - DNA, 33 bp, Homo sapien
ataaagtctacagttacagcttctaagatcacc

SEQ ID NO: 532459 - DNA, 33 bp, Homo sapien
tttagccaaagcgggcaacaagcttggtgtttt

SEQ ID NO: 532460 - DNA, 33 bp, Homo sapien
tttagccaaagcgggccacaagcttggtgtttt

SEQ ID NO: 532461 - DNA, 33 bp, Homo sapien
ctgatttacattctaactattgatattctaaat

SEQ ID NO: 532462 - DNA, 33 bp, Homo sapien
ctgatttacattctaagtattgatattctaaat

SEQ ID NO: 532463 - DNA, 33 bp, Homo sapien
acctaaatgtccatcaagagacaaatggataag

SEQ ID NO: 532464 - DNA, 33 bp, Homo sapien
acctaaatgtccatcaggagacaaatggataag

SEQ ID NO: 532465 - DNA, 33 bp, Homo sapien
ctctatagattttttcccttcctatcttcatct

SEQ ID NO: 532466 - DNA, 33 bp, Homo sapien
ctctatagattttttctcttcctatcttcatct

SEQ ID NO: 532467 - DNA, 33 bp, Homo sapien
gggtttggtaatgctacggtttgaatgttgttg

SEQ ID NO: 532468 - DNA, 33 bp, Homo sapien
gggtttggtaatgctatggtttgaatgttgttg

SEQ ID NO: 532469 - DNA, 33 bp, Homo sapien
tttcatcatcttaaccacattccaaagggagaa

SEQ ID NO: 532470 - DNA, 33 bp, Homo sapien
tttcatcatcttaaccgcattccaaagggagaa

SEQ ID NO: 532471 - DNA, 33 bp, Homo sapien
tatgcttgtagattcacaaaaggtctgaaggga

SEQ ID NO: 532472 - DNA, 33 bp, Homo sapien
tatgcttgtagattcataaaaggtctgaaggga

SEQ ID NO: 532473 - DNA, 33 bp, Homo sapien
ggcctcacagaaaacaatacgaagatttctcaa

SEQ ID NO: 532474 - DNA, 33 bp, Homo sapien
ggcctcacagaaaacagtacgaagatttctcaa

SEQ ID NO: 532475 - DNA, 33 bp, Homo sapien
acattgcttccttagacgaaattttgaagagaa

SEQ ID NO: 532476 - DNA, 33 bp, Homo sapien
acattgcttccttagatgaaattttgaagagaa

SEQ ID NO: 532477 - DNA, 33 bp, Homo sapien
aggcaaaacaagtgtcaagcaagattaaattgg

SEQ ID NO: 532478 - DNA, 33 bp, Homo sapien
aggcaaaacaagtgtcgagcaagattaaattgg

SEQ ID NO: 532479 - DNA, 33 bp, Homo sapien
ttgcataatgactccaactcccatacaatgtgg

SEQ ID NO: 532480 - DNA, 33 bp, Homo sapien
ttgcataatgactccatctcccatacaatgtgg

SEQ ID NO: 532481 - DNA, 33 bp, Homo sapien
caagtcgtggttaaaactgaacactgagttaag

SEQ ID NO: 532482 - DNA, 33 bp, Homo sapien
caagtcgtggttaaaattgaacactgagttaag

SEQ ID NO: 532483 - DNA, 33 bp, Homo sapien
aatacagtatattgaaaatgacaatggtcatat

SEQ ID NO: 532484 - DNA, 33 bp, Homo sapien
aatacagtatattgaatatgacaatggtcatat

SEQ ID NO: 532485 - DNA, 33 bp, Homo sapien
caaaaatgaagattcacaatagaaattaatttc

SEQ ID NO: 532486 - DNA, 33 bp, Homo sapien
caaaaatgaagattcagaatagaaattaatttc

SEQ ID NO: 532487 - DNA, 33 bp, Homo sapien
tctacatgattctaaaagttgtgggcttgatat

SEQ ID NO: 532488 - DNA, 33 bp, Homo sapien
tctacatgattctaaacgttgtgggcttgatat

SEQ ID NO: 532489 - DNA, 33 bp, Homo sapien
attaaaagtagtacagaaagaggccaagagtgg

SEQ ID NO: 532490 - DNA, 33 bp, Homo sapien
attaaaagtagtacaggaagaggccaagagtgg

SEQ ID NO: 532491 - DNA, 33 bp, Homo sapien
atgaagagtggggagaacatacttggcagaaga

SEQ ID NO: 532492 - DNA, 33 bp, Homo sapien
atgaagagtggggagagcatacttggcagaaga

SEQ ID NO: 532493 - DNA, 33 bp, Homo sapien
atgttcactaattgtacgcctttatttaagcta

SEQ ID NO: 532494 - DNA, 33 bp, Homo sapien
atgttcactaattgtatgcctttatttaagcta

SEQ ID NO: 532495 - DNA, 33 bp, Homo sapien
cttcattttatccctgaagccttttggtaaaga

SEQ ID NO: 532496 - DNA, 33 bp, Homo sapien
cttcattttatccctggagccttttggtaaaga

SEQ ID NO: 532497 - DNA, 33 bp, Homo sapien
aggctcattttcgatgcaaatttagtcttttgc

SEQ ID NO: 532498 - DNA, 33 bp, Homo sapien
aggctcattttcgatgtaaatttagtcttttgc

SEQ ID NO: 532499 - DNA, 33 bp, Homo sapien
attttccacatccttcaaccaacaaaaataaaa

SEQ ID NO: 532500 - DNA, 33 bp, Homo sapien
attttccacatccttcgaccaacaaaaataaaa

SEQ ID NO: 532501 - DNA, 33 bp, Homo sapien
tgactttcttcacctggaacagaaagatcctgg

SEQ ID NO: 532502 - DNA, 33 bp, Homo sapien
tgactttcttcacctgtaacagaaagatcctgg

SEQ ID NO: 532503 - DNA, 33 bp, Homo sapien
ttttctagaaattctacgccagatccgtcacat

SEQ ID NO: 532504 - DNA, 33 bp, Homo sapien
ttttctagaaattctatgccagatccgtcacat

SEQ ID NO: 532505 - DNA, 33 bp, Homo sapien
atggaggagacatataagaaaccttagagctta

SEQ ID NO: 532506 - DNA, 33 bp, Homo sapien
atggaggagacatataggaaaccttagagctta

SEQ ID NO: 532507 - DNA, 33 bp, Homo sapien
gagttttctggacaaacccaaatgagagagaaa

SEQ ID NO: 532508 - DNA, 33 bp, Homo sapien
gagttttctggacaaagccaaatgagagagaaa

SEQ ID NO: 532509 - DNA, 33 bp, Homo sapien
tatgaatacgctattaaataatttgatgggaac

SEQ ID NO: 532510 - DNA, 33 bp, Homo sapien
tatgaatacgctattacataatttgatgggaac

SEQ ID NO: 532511 - DNA, 33 bp, Homo sapien
aaattacctaggttcacgtattccgttatagct

SEQ ID NO: 532512 - DNA, 33 bp, Homo sapien
aaattacctaggttcaggtattccgttatagct

SEQ ID NO: 532513 - DNA, 33 bp, Homo sapien
gggggtttatgaatcacgtttacacagtctcca

SEQ ID NO: 532514 - DNA, 33 bp, Homo sapien
gggggtttatgaatcatgtttacacagtctcca

SEQ ID NO: 532515 - DNA, 33 bp, Homo sapien
ctggaggattctgccaatgacgatccctcacca

SEQ ID NO: 532516 - DNA, 33 bp, Homo sapien
ctggaggattctgccagtgacgatccctcacca

SEQ ID NO: 532517 - DNA, 33 bp, Homo sapien
attaggagagaattacgggaacgaatgggttct

SEQ ID NO: 532518 - DNA, 33 bp, Homo sapien
attaggagagaattactggaacgaatgggttct

SEQ ID NO: 532519 - DNA, 33 bp, Homo sapien
gcagccatgaagggaccatcaccaagcggtaag

SEQ ID NO: 532520 - DNA, 33 bp, Homo sapien
gcagccatgaagggactatcaccaagcggtaag

SEQ ID NO: 532521 - DNA, 33 bp, Homo sapien; identical to SEQ ID NO: 532519

SEQ ID NO: 532522 - DNA, 33 bp, Homo sapien; identical to SEQ ID NO: 532520

SEQ ID NO: 532523 - DNA, 33 bp, Homo sapien
tgtctttagtctgtcaactgcactagtctcttt

SEQ ID NO: 532524 - DNA, 33 bp, Homo sapien
tgtctttagtctgtcagctgcactagtctcttt

SEQ ID NO: 532525 - DNA, 33 bp, Homo sapien; identical to SEQ ID NO: 532523

SEQ ID NO: 532526 - DNA, 33 bp, Homo sapien; identical to SEQ ID NO: 532524

SEQ ID NO: 532527 - DNA, 33 bp, Homo sapien
gggcagattgaaagcaaagccttaaggactgaa

SEQ ID NO: 532528 - DNA, 33 bp, Homo sapien
gggcagattgaaagcagagccttaaggactgaa

SEQ ID NO: 532529 - DNA, 33 bp, Homo sapien
agcaaatatttaattcaaactaatcactggtca

SEQ ID NO: 532530 - DNA, 33 bp, Homo sapien
agcaaatatttaattccaactaatcactggtca

SEQ ID NO: 532531 - DNA, 33 bp, Homo sapien
tttggaaaaactggaacacacataagttgctgg

SEQ ID NO: 532532 - DNA, 33 bp, Homo sapien
tttggaaaaactggaagacacataagttgctgg

SEQ ID NO: 532533 - DNA, 33 bp, Homo sapien
taaatcccatcttgctaaaagccaaaattaaaa

SEQ ID NO: 532534 - DNA, 33 bp, Homo sapien
taaatcccatcttgctgaaagccaaaattaaaa

SEQ ID NO: 532535 - DNA, 33 bp, Homo sapien
attctcctggcatctaccaaactgtatatcatt

SEQ ID NO: 532536 - DNA, 33 bp, Homo sapien
attctcctggcatctatcaaactgtatatcatt

SEQ ID NO: 532537 - DNA, 33 bp, Homo sapien
aaacaataatattttcacagtaaaagcagatgc

SEQ ID NO: 532538 - DNA, 33 bp, Homo sapien
aaacaataatattttcgcagtaaaagcagatgc

SEQ ID NO: 532539 - DNA, 33 bp, Homo sapien
ctactctctactccaacaggtcaaattttttag

SEQ ID NO: 532540 - DNA, 33 bp, Homo sapien
ctactctctactccaataggtcaaattttttag

SEQ ID NO: 532541 - DNA, 33 bp, Homo sapien
agaggtcattgaaatacaagtgattattgatag

SEQ ID NO: 532542 - DNA, 33 bp, Homo sapien
agaggtcattgaaatataagtgattattgatag

SEQ ID NO: 532543 - DNA, 33 bp, Homo sapien
cttcctccaacagataccaagtgttattaggtg

SEQ ID NO: 532544 - DNA, 33 bp, Homo sapien
cttcctccaacagatatcaagtgttattaggtg

SEQ ID NO: 532545 - DNA, 33 bp, Homo sapien
ctctcaggcctttgaactataccaccagctttc

SEQ ID NO: 532546 - DNA, 33 bp, Homo sapien
ctctcaggcctttgaagtataccaccagctttc

SEQ ID NO: 532547 - DNA, 33 bp, Homo sapien
gtaaataaggattatgaatatacccagccacgt

SEQ ID NO: 532548 - DNA, 33 bp, Homo sapien
gtaaataaggattatgtatatacccagccacgt

SEQ ID NO: 532549 - DNA, 33 bp, Homo sapien
gagaacttggagctgaagtaggtggcttcctac

SEQ ID NO: 532550 - DNA, 33 bp, Homo sapien
gagaacttggagctgaggtaggtggcttcctac

SEQ ID NO: 532551 - DNA, 33 bp, Homo sapien
agtcaaggtagtactccaaatgtataggatctg

SEQ ID NO: 532552 - DNA, 33 bp, Homo sapien
agtcaaggtagtactctaaatgtataggatctg

SEQ ID NO: 532553 - DNA, 33 bp, Homo sapien
aacatctctgaagtaaccagtgtcaaatgttaa

SEQ ID NO: 532554 - DNA, 33 bp, Homo sapien
aacatctctgaagtaatcagtgtcaaatgttaa

SEQ ID NO: 532555 - DNA, 33 bp, Homo sapien
gtggcaccagatttcacatggacatagccctca

SEQ ID NO: 532556 - DNA, 33 bp, Homo sapien
gtggcaccagatttcatatggacatagccctca

SEQ ID NO: 532557 - DNA, 33 bp, Homo sapien
gagtgctttctgcacaatagtagaacttgacct

SEQ ID NO: 532558 - DNA, 33 bp, Homo sapien
gagtgctttctgcacagtagtagaacttgacct

SEQ ID NO: 532559 - DNA, 33 bp, Homo sapien
tgagactgataattcacaaacgtaagagattta

SEQ ID NO: 532560 - DNA, 33 bp, Homo sapien
tgagactgataattcataaacgtaagagattta

SEQ ID NO: 532561 - DNA, 33 bp, Homo sapien
tccaaactcttcctgtaaatccagttctaaagt

SEQ ID NO: 532562 - DNA, 33 bp, Homo sapien
tccaaactcttcctgttaatccagttctaaagt

SEQ ID NO: 532563 - DNA, 33 bp, Homo sapien
gttctgggtcaacgcactcaccaaacctgccca

SEQ ID NO: 532564 - DNA, 33 bp, Homo sapien
gttctgggtcaacgcagtcaccaaacctgccca

SEQ ID NO: 532565 - DNA, 33 bp, Homo sapien
cttccaactaaataccaccaagtgacctaagtt

SEQ ID NO: 532566 - DNA, 33 bp, Homo sapien
cttccaactaaataccgccaagtgacctaagtt

SEQ ID NO: 532567 - DNA, 33 bp, Homo sapien
agaagttgcaattggaagatgtgctattctaca

SEQ ID NO: 532568 - DNA, 33 bp, Homo sapien
agaagttgcaattggaggatgtgctattctaca

SEQ ID NO: 532569 - DNA, 33 bp, Homo sapien
cagaaacgttttgtcaatccaatgtacacttat

SEQ ID NO: 532570 - DNA, 33 bp, Homo sapien
cagaaacgttttgtcattccaatgtacacttat

SEQ ID NO: 532571 - DNA, 33 bp, Homo sapien
cactttaccctatcaaattctgcaaacttgtca

SEQ ID NO: 532572 - DNA, 33 bp, Homo sapien
cactttaccctatcaacttctgcaaacttgtca

SEQ ID NO: 532573 - DNA, 33 bp, Homo sapien
acttggttagagatgagaaaacattggtaggtt

SEQ ID NO: 532574 - DNA, 33 bp, Homo sapien
acttggttagagatgataaaacattggtaggtt

SEQ ID NO: 532575 - DNA, 33 bp, Homo sapien
tctttgtcctctgatacaactatcttcaaaaat

SEQ ID NO: 532576 - DNA, 33 bp, Homo sapien
tctttgtcctctgatataactatcttcaaaaat

SEQ ID NO: 532577 - DNA, 33 bp, Homo sapien
atttctgtaaagcaacgcactgtgtatatcatt

SEQ ID NO: 532578 - DNA, 33 bp, Homo sapien
atttctgtaaagcaactcactgtgtatatcatt

SEQ ID NO: 532579 - DNA, 33 bp, Homo sapien
aataccaaattccaggcaggtctatgtcaagag

SEQ ID NO: 532580 - DNA, 33 bp, Homo sapien
aataccaaattccaggtaggtctatgtcaagag

SEQ ID NO: 532581 - DNA, 33 bp, Homo sapien
aatgtcaaatggtcgacgttctaatagttatct

SEQ ID NO: 532582 - DNA, 33 bp, Homo sapien
aatgtcaaatggtcgatgttctaatagttatct

SEQ ID NO: 532583 - DNA, 33 bp, Homo sapien
taagatatcagctcaaatatcattttctcagga

SEQ ID NO: 532584 - DNA, 33 bp, Homo sapien
taagatatcagctcaagtatcattttctcagga

SEQ ID NO: 532585 - DNA, 33 bp, Homo sapien
cattctatacaaggaacatttaaccaaatagag

SEQ ID NO: 532586 - DNA, 33 bp, Homo sapien
cattctatacaaggaagatttaaccaaatagag

SEQ ID NO: 532587 - DNA, 33 bp, Homo sapien
catggcaactctgagcactagtcagttctgcac

SEQ ID NO: 532588 - DNA, 33 bp, Homo sapien
catggcaactctgagcgctagtcagttctgcac

SEQ ID NO: 532589 - DNA, 33 bp, Homo sapien
agaagttttttaatgacgcacattgttgcaaga

SEQ ID NO: 532590 - DNA, 33 bp, Homo sapien
agaagttttttaatgatgcacattgttgcaaga

SEQ ID NO: 532591 - DNA, 33 bp, Homo sapien
tcgacaatctctcccgcatctgtttttggtttt

SEQ ID NO: 532592 - DNA, 33 bp, Homo sapien
tcgacaatctctcccgtatctgtttttggtttt

SEQ ID NO: 532593 - DNA, 33 bp, Homo sapien
tcccctacactgaaacaattttactgggttttg

SEQ ID NO: 532594 - DNA, 33 bp, Homo sapien
tcccctacactgaaacgattttactgggttttg

SEQ ID NO: 532595 - DNA, 33 bp, Homo sapien
tactttctaaagtttaagtgacattcttgagtt

SEQ ID NO: 532596 - DNA, 33 bp, Homo sapien
tactttctaaagtttaggtgacattcttgagtt

SEQ ID NO: 532597 - DNA, 33 bp, Homo sapien
attttgacttctattaacatgtatttatttact

SEQ ID NO: 532598 - DNA, 33 bp, Homo sapien
attttgacttctattatcatgtatttatttact

SEQ ID NO: 532599 - DNA, 33 bp, Homo sapien
gggggaaatcagcctccgagatctaatcaccac

SEQ ID NO: 532600 - DNA, 33 bp, Homo sapien
gggggaaatcagcctctgagatctaatcaccac

SEQ ID NO: 532601 - DNA, 33 bp, Homo sapien
tctttgtttatgcaaacgagtataggcttttag

SEQ ID NO: 532602 - DNA, 33 bp, Homo sapien
tctttgtttatgcaaatgagtataggcttttag

SEQ ID NO: 532603 - DNA, 33 bp, Homo sapien
tttccaacactagttacgaggaaacaaagtgaa

SEQ ID NO: 532604 - DNA, 33 bp, Homo sapien
tttccaacactagttatgaggaaacaaagtgaa

SEQ ID NO: 532605 - DNA, 33 bp, Homo sapien
tcctcacagaaatagacgaaacaatcctgaaag

SEQ ID NO: 532606 - DNA, 33 bp, Homo sapien
tcctcacagaaatagatgaaacaatcctgaaag

SEQ ID NO: 532607 - DNA, 33 bp, Homo sapien
ccatgactgtggcaccacgctgggaaagcttaa

SEQ ID NO: 532608 - DNA, 33 bp, Homo sapien
ccatgactgtggcaccgcgctgggaaagcttaa

SEQ ID NO: 532609 - DNA, 33 bp, Homo sapien
ccagagaccgcattcacaaagtaaaaagaagga

SEQ ID NO: 532610 - DNA, 33 bp, Homo sapien
ccagagaccgcattcataaagtaaaaagaagga

SEQ ID NO: 532611 - DNA, 33 bp, Homo sapien
tgatttttcaaggtcaaaagtgcttagttacaa

SEQ ID NO: 532612 - DNA, 33 bp, Homo sapien
tgatttttcaaggtcagaagtgcttagttacaa

SEQ ID NO: 532613 - DNA, 33 bp, Homo sapien
agaatcaaagaaactcaatcaatgaagaaagat

SEQ ID NO: 532614 - DNA, 33 bp, Homo sapien
agaatcaaagaaactcgatcaatgaagaaagat

SEQ ID NO: 532615 - DNA, 33 bp, Homo sapien
gatctgcagtagcatacgggtttgaatcaacat

SEQ ID NO: 532616 - DNA, 33 bp, Homo sapien
gatctgcagtagcatatgggtttgaatcaacat

SEQ ID NO: 532617 - DNA, 33 bp, Homo sapien
gtattaatgtggtagaaatgaatactgtttgtt

SEQ ID NO: 532618 - DNA, 33 bp, Homo sapien
gtattaatgtggtagatatgaatactgtttgtt

SEQ ID NO: 532619 - DNA, 33 bp, Homo sapien
caccacacccagctgaataagctatttttatgt

SEQ ID NO: 532620 - DNA, 33 bp, Homo sapien
caccacacccagctgagtaagctatttttatgt

SEQ ID NO: 532621 - DNA, 33 bp, Homo sapien
tttccttgcagtttaccggatgtttttgtctac

SEQ ID NO: 532622 - DNA, 33 bp, Homo sapien
tttccttgcagtttactggatgtttttgtctac

SEQ ID NO: 532623 - DNA, 33 bp, Homo sapien
aagtctcaataggctgaaatcaaagtattggtc

SEQ ID NO: 532624 - DNA, 33 bp, Homo sapien
aagtctcaataggctgcaatcaaagtattggtc

SEQ ID NO: 532625 - DNA, 33 bp, Homo sapien
atgtttcttcagtggccatcacagtgcctacat

SEQ ID NO: 532626 - DNA, 33 bp, Homo sapien
atgtttcttcagtggctatcacagtgcctacat

SEQ ID NO: 532627 - DNA, 33 bp, Homo sapien
tattccactttagtagaaatgaatatgctgtta

SEQ ID NO: 532628 - DNA, 33 bp, Homo sapien
tattccactttagtagtaatgaatatgctgtta

SEQ ID NO: 532629 - DNA, 33 bp, Homo sapien
agaggtttactactaacgcattcatcaaccact

SEQ ID NO: 532630 - DNA, 33 bp, Homo sapien
agaggtttactactaatgcattcatcaaccact

SEQ ID NO: 532631 - DNA, 33 bp, Homo sapien
atccctgaagtttgaccctctttttgtcaggat

SEQ ID NO: 532632 - DNA, 33 bp, Homo sapien
atccctgaagtttgactctctttttgtcaggat

SEQ ID NO: 532633 - DNA, 33 bp, Homo sapien
gatgatcatgtccaaaagtgaaattaatgtatt

SEQ ID NO: 532634 - DNA, 33 bp, Homo sapien
gatgatcatgtccaaacgtgaaattaatgtatt

SEQ ID NO: 532635 - DNA, 33 bp, Homo sapien
ttgtaacagacctagaacatatcctgtgaacat

SEQ ID NO: 532636 - DNA, 33 bp, Homo sapien
ttgtaacagacctagagcatatcctgtgaacat

SEQ ID NO: 532637 - DNA, 33 bp, Homo sapien
accataaacactgtgcacgcttaggctacacta

SEQ ID NO: 532638 - DNA, 33 bp, Homo sapien
accataaacactgtgcgcgcttaggctacacta

SEQ ID NO: 532639 - DNA, 33 bp, Homo sapien
agcatagtacctgatacatagcttctccatcct

SEQ ID NO: 532640 - DNA, 33 bp, Homo sapien
agcatagtacctgatatatagcttctccatcct

SEQ ID NO: 532641 - DNA, 33 bp, Homo sapien
gaagatactgctctaaacctgtcaataacttca

SEQ ID NO: 532642 - DNA, 33 bp, Homo sapien
gaagatactgctctaatcctgtcaataacttca

SEQ ID NO: 532643 - DNA, 33 bp, Homo sapien
atgtggtcataagggcaaggttctaattcaata

SEQ ID NO: 532644 - DNA, 33 bp, Homo sapien
atgtggtcataagggcgaggttctaattcaata

SEQ ID NO: 532645 - DNA, 33 bp, Homo sapien
agccaaaccatatcataagctgactttaaaacc

SEQ ID NO: 532646 - DNA, 33 bp, Homo sapien
agccaaaccatatcatgagctgactttaaaacc

SEQ ID NO: 532647 - DNA, 33 bp, Homo sapien
taactttcctcattgaccctgaaatcttaccat

SEQ ID NO: 532648 - DNA, 33 bp, Homo sapien
taactttcctcattgagcctgaaatcttaccat

SEQ ID NO: 532649 - DNA, 33 bp, Homo sapien
gtccaggctaaatgaaagtctgaatatgctact

SEQ ID NO: 532650 - DNA, 33 bp, Homo sapien
gtccaggctaaatgaatgtctgaatatgctact

SEQ ID NO: 532651 - DNA, 33 bp, Homo sapien
acacctcttgactccaaagggaagccacaagtt

SEQ ID NO: 532652 - DNA, 33 bp, Homo sapien
acacctcttgactccacagggaagccacaagtt

SEQ ID NO: 532653 - DNA, 33 bp, Homo sapien
ttagctactgtcatagccattaatttcttccta

SEQ ID NO: 532654 - DNA, 33 bp, Homo sapien
ttagctactgtcatagtcattaatttcttccta

SEQ ID NO: 532655 - DNA, 33 bp, Homo sapien
tgaaacagtggatagaagcagaactcagtctga

SEQ ID NO: 532656 - DNA, 33 bp, Homo sapien
tgaaacagtggatagaggcagaactcagtctga

SEQ ID NO: 532657 - DNA, 33 bp, Homo sapien
attgtaactatgaatacaaaaatgttggtatta

SEQ ID NO: 532658 - DNA, 33 bp, Homo sapien
attgtaactatgaatataaaaatgttggtatta

SEQ ID NO: 532659 - DNA, 33 bp, Homo sapien
tgttatagttacgtaaaatataatcactgtagg

SEQ ID NO: 532660 - DNA, 33 bp, Homo sapien
tgttatagttacgtaacatataatcactgtagg

SEQ ID NO: 532661 - DNA, 33 bp, Homo sapien
tgggcagcctgaagggaaactttgtgttgaaga

SEQ ID NO: 532662 - DNA, 33 bp, Homo sapien
tgggcagcctgaaggggaactttgtgttgaaga

SEQ ID NO: 532663 - DNA, 33 bp, Homo sapien
attttcataagtggtcaataaagaagtgagaga

SEQ ID NO: 532664 - DNA, 33 bp, Homo sapien
attttcataagtggtcgataaagaagtgagaga

SEQ ID NO: 532665 - DNA, 33 bp, Homo sapien
aaaaatcagagtataaatcaaaagtttacatat

SEQ ID NO: 532666 - DNA, 33 bp, Homo sapien
aaaaatcagagtataagtcaaaagtttacatat

SEQ ID NO: 532667 - DNA, 33 bp, Homo sapien
tatgaatggaccattacgttgttgcttctaaca

SEQ ID NO: 532668 - DNA, 33 bp, Homo sapien
tatgaatggaccattaggttgttgcttctaaca

SEQ ID NO: 532669 - DNA, 33 bp, Homo sapien
aaaagaaggacttcacaaccagttgtctgtggc

SEQ ID NO: 532670 - DNA, 33 bp, Homo sapien
aaaagaaggacttcacgaccagttgtctgtggc

SEQ ID NO: 532671 - DNA, 33 bp, Homo sapien
tccatgactgcttaccaaacttgtttatcaaaa

SEQ ID NO: 532672 - DNA, 33 bp, Homo sapien
tccatgactgcttacctaacttgtttatcaaaa

SEQ ID NO: 532673 - DNA, 33 bp, Homo sapien
cctccagtatctgcaaactctaatctagtttct

SEQ ID NO: 532674 - DNA, 33 bp, Homo sapien
cctccagtatctgcaacctctaatctagtttct

SEQ ID NO: 532675 - DNA, 33 bp, Homo sapien
acgagagattgtggtacgctcagtatatattta

SEQ ID NO: 532676 - DNA, 33 bp, Homo sapien
acgagagattgtggtatgctcagtatatattta

SEQ ID NO: 532677 - DNA, 33 bp, Homo sapien
tctatggaaaacactacggcgagttctcaaaga

SEQ ID NO: 532678 - DNA, 33 bp, Homo sapien
tctatggaaaacactatggcgagttctcaaaga

SEQ ID NO: 532679 - DNA, 33 bp, Homo sapien
gatggctaataaggacacgaaaatatactcaac

SEQ ID NO: 532680 - DNA, 33 bp, Homo sapien
gatggctaataaggacgcgaaaatatactcaac

SEQ ID NO: 532681 - DNA, 33 bp, Homo sapien
ttaaagacagcactcaatatcataaacaaatta

SEQ ID NO: 532682 - DNA, 33 bp, Homo sapien
ttaaagacagcactcagtatcataaacaaatta

SEQ ID NO: 532683 - DNA, 33 bp, Homo sapien
ctatacaaatttttcaccatttccagtatagca

SEQ ID NO: 532684 - DNA, 33 bp, Homo sapien
ctatacaaatttttcagcatttccagtatagca

SEQ ID NO: 532685 - DNA, 33 bp, Homo sapien
tggtgttggaattaccactatatatggcctgaa

SEQ ID NO: 532686 - DNA, 33 bp, Homo sapien
tggtgttggaattaccgctatatatggcctgaa

SEQ ID NO: 532687 - DNA, 33 bp, Homo sapien
tcttcccgtttgtacacacccagcctttaaatt

SEQ ID NO: 532688 - DNA, 33 bp, Homo sapien
tcttcccgtttgtacatacccagcctttaaatt

SEQ ID NO: 532689 - DNA, 33 bp, Homo sapien
ttttttatactctgcagaattgtatgaaatatc

SEQ ID NO: 532690 - DNA, 33 bp, Homo sapien
ttttttatactctgcataattgtatgaaatatc

SEQ ID NO: 532691 - DNA, 33 bp, Homo sapien
gtataatatgccataaccaagtgttatttattt

SEQ ID NO: 532692 - DNA, 33 bp, Homo sapien
gtataatatgccataagcaagtgttatttattt

SEQ ID NO: 532693 - DNA, 33 bp, Homo sapien
gcttttctgaagttgacgcagatttcaaaaatg

SEQ ID NO: 532694 - DNA, 33 bp, Homo sapien
gcttttctgaagttgatgcagatttcaaaaatg

SEQ ID NO: 532695 - DNA, 33 bp, Homo sapien
cttcctaacttatctacgaggctagcaaacctt

SEQ ID NO: 532696 - DNA, 33 bp, Homo sapien
cttcctaacttatctatgaggctagcaaacctt

SEQ ID NO: 532697 - DNA, 33 bp, Homo sapien
tatgtatagaaaagcccaggttctggtaaatgt

SEQ ID NO: 532698 - DNA, 33 bp, Homo sapien
tatgtatagaaaagcctaggttctggtaaatgt

SEQ ID NO: 532699 - DNA, 33 bp, Homo sapien
tgaagaggaaatcttcacacctgagactaagaa

SEQ ID NO: 532700 - DNA, 33 bp, Homo sapien
tgaagaggaaatcttcgcacctgagactaagaa

SEQ ID NO: 532701 - DNA, 33 bp, Homo sapien
cagtggtaaggcaatacgtttaaaagagcataa

SEQ ID NO: 532702 - DNA, 33 bp, Homo sapien
cagtggtaaggcaataggtttaaaagagcataa

SEQ ID NO: 532703 - DNA, 33 bp, Homo sapien
tatctcagaatctttccatgttgactgctttgc

SEQ ID NO: 532704 - DNA, 33 bp, Homo sapien
tatctcagaatctttctatgttgactgctttgc

SEQ ID NO: 532705 - DNA, 33 bp, Homo sapien
ctatttcctaatgaggccacatccttttaataa

SEQ ID NO: 532706 - DNA, 33 bp, Homo sapien
ctatttcctaatgaggtcacatccttttaataa

SEQ ID NO: 532707 - DNA, 33 bp, Homo sapien
aatggaggttaggtgtaaagaatagtactgcca

SEQ ID NO: 532708 - DNA, 33 bp, Homo sapien
aatggaggttaggtgtgaagaatagtactgcca

SEQ ID NO: 532709 - DNA, 33 bp, Homo sapien
ataacaaatgttggatcaaatgctacttgaggt

SEQ ID NO: 532710 - DNA, 33 bp, Homo sapien
ataacaaatgttggattaaatgctacttgaggt

SEQ ID NO: 532711 - DNA, 33 bp, Homo sapien
aatcatctgggataaacggccagaggtgtaatt

SEQ ID NO: 532712 - DNA, 33 bp, Homo sapien
aatcatctgggataaatggccagaggtgtaatt

SEQ ID NO: 532713 - DNA, 33 bp, Homo sapien
gactgccgttttcctcaaaacaatgccccctgt

SEQ ID NO: 532714 - DNA, 33 bp, Homo sapien
gactgccgttttcctcgaaacaatgccccctgt

SEQ ID NO: 532715 - DNA, 33 bp, Homo sapien
gctgtttctacaaataaaaagggcagaaaatat

SEQ ID NO: 532716 - DNA, 33 bp, Homo sapien
gctgtttctacaaatataaagggcagaaaatat

SEQ ID NO: 532717 - DNA, 33 bp, Homo sapien
gttctcagttcaataacgtgcaaggaactgaat

SEQ ID NO: 532718 - DNA, 33 bp, Homo sapien
gttctcagttcaataatgtgcaaggaactgaat

SEQ ID NO: 532719 - DNA, 33 bp, Homo sapien
ggaatggtaatcaaagcatatggctacccttcc

SEQ ID NO: 532720 - DNA, 33 bp, Homo sapien
ggaatggtaatcaaagtatatggctacccttcc

SEQ ID NO: 532721 - DNA, 33 bp, Homo sapien
caactgtatgagatcaccattcttaaattccca

SEQ ID NO: 532722 - DNA, 33 bp, Homo sapien
caactgtatgagatcagcattcttaaattccca

SEQ ID NO: 532723 - DNA, 33 bp, Homo sapien
aaaaataaacactccaagcaatgttagatgata

SEQ ID NO: 532724 - DNA, 33 bp, Homo sapien
aaaaataaacactccaggcaatgttagatgata

SEQ ID NO: 532725 - DNA, 33 bp, Homo sapien
cattttcctttggatacagtgttaaatttctcc

SEQ ID NO: 532726 - DNA, 33 bp, Homo sapien
cattttcctttggatagagtgttaaatttctcc

SEQ ID NO: 532727 - DNA, 33 bp, Homo sapien
gtaatgagaacacagaacataataaatatttga

SEQ ID NO: 532728 - DNA, 33 bp, Homo sapien
gtaatgagaacacagagcataataaatatttga

SEQ ID NO: 532729 - DNA, 33 bp, Homo sapien
cacttcaaacattccaggatcagcagtcccaga

SEQ ID NO: 532730 - DNA, 33 bp, Homo sapien
cacttcaaacattccatgatcagcagtcccaga

SEQ ID NO: 532731 - DNA, 33 bp, Homo sapien
gaaaaattatgcattaacacaaagatccatgtc

SEQ ID NO: 532732 - DNA, 33 bp, Homo sapien
gaaaaattatgcattagcacaaagatccatgtc

SEQ ID NO: 532733 - DNA, 33 bp, Homo sapien
tctaaatttggaagcaacgagtatgtctttcaa

SEQ ID NO: 532734 - DNA, 33 bp, Homo sapien
tctaaatttggaagcaccgagtatgtctttcaa

SEQ ID NO: 532735 - DNA, 33 bp, Homo sapien
tttgtgtatatacaaaatcaatcttatatcctg

SEQ ID NO: 532736 - DNA, 33 bp, Homo sapien
tttgtgtatatacaaattcaatcttatatcctg

SEQ ID NO: 532737 - DNA, 33 bp, Homo sapien
aaagatttttatgacacgaagtagcgagtccag

SEQ ID NO: 532738 - DNA, 33 bp, Homo sapien
aaagatttttatgacatgaagtagcgagtccag

SEQ ID NO: 532739 - DNA, 33 bp, Homo sapien
tctaaatccctttccagattcattcagtccagc

SEQ ID NO: 532740 - DNA, 33 bp, Homo sapien
tctaaatccctttccatattcattcagtccagc

SEQ ID NO: 532741 - DNA, 33 bp, Homo sapien
aaaaaagtaattgcagacatccataacctgaaa

SEQ ID NO: 532742 - DNA, 33 bp, Homo sapien
aaaaaagtaattgcagtcatccataacctgaaa

SEQ ID NO: 532743 - DNA, 33 bp, Homo sapien
ataatctaattgactaccttctgttcaattacc

SEQ ID NO: 532744 - DNA, 33 bp, Homo sapien
ataatctaattgactagcttctgttcaattacc

SEQ ID NO: 532745 - DNA, 33 bp, Homo sapien
tacatttttcagagcactagcaatgattctata

SEQ ID NO: 532746 - DNA, 33 bp, Homo sapien
tacatttttcagagcagtagcaatgattctata

SEQ ID NO: 532747 - DNA, 33 bp, Homo sapien
tggcattattccagaccagtttgctaacattaa

SEQ ID NO: 532748 - DNA, 33 bp, Homo sapien
tggcattattccagactagtttgctaacattaa

SEQ ID NO: 532749 - DNA, 33 bp, Homo sapien
tctaatgtctcttagcaacctatgcaatctaaa

SEQ ID NO: 532750 - DNA, 33 bp, Homo sapien
tctaatgtctcttagctacctatgcaatctaaa

SEQ ID NO: 532751 - DNA, 33 bp, Homo sapien
tttttaaaacaattacaggttatgaagatgttg

SEQ ID NO: 532752 - DNA, 33 bp, Homo sapien
tttttaaaacaattacgggttatgaagatgttg

SEQ ID NO: 532753 - DNA, 33 bp, Homo sapien
ctcaccaattattggaacaccctgatttacaaa

SEQ ID NO: 532754 - DNA, 33 bp, Homo sapien
ctcaccaattattggagcaccctgatttacaaa

SEQ ID NO: 532755 - DNA, 33 bp, Homo sapien
tacagctgaagtatacaatagtcagatgatctg

SEQ ID NO: 532756 - DNA, 33 bp, Homo sapien
tacagctgaagtatacgatagtcagatgatctg

SEQ ID NO: 532757 - DNA, 33 bp, Homo sapien
cgttgaactatagcagaaaaagagctgtgacac

SEQ ID NO: 532758 - DNA, 33 bp, Homo sapien
cgttgaactatagcaggaaaagagctgtgacac

SEQ ID NO: 532759 - DNA, 33 bp, Homo sapien
tacttgaaacctacagaaaaaaaagtgtatatc

SEQ ID NO: 532760 - DNA, 33 bp, Homo sapien
tacttgaaacctacaggaaaaaaagtgtatatc

SEQ ID NO: 532761 - DNA, 33 bp, Homo sapien
ggcaaaagtaatcctaactctcagtttaagtgt

SEQ ID NO: 532762 - DNA, 33 bp, Homo sapien
ggcaaaagtaatcctatctctcagtttaagtgt

SEQ ID NO: 532763 - DNA, 33 bp, Homo sapien
aaaaataaaaatagcaagatgtggtcacacaca

SEQ ID NO: 532764 - DNA, 33 bp, Homo sapien
aaaaataaaaatagcaggatgtggtcacacaca

SEQ ID NO: 532765 - DNA, 33 bp, Homo sapien
caatggcctctatcaaatgagaactgccctctt

SEQ ID NO: 532766 - DNA, 33 bp, Homo sapien
caatggcctctatcaagtgagaactgccctctt

SEQ ID NO: 532767 - DNA, 33 bp, Homo sapien
aaaatacagatatacaatagcttacctccatac

SEQ ID NO: 532768 - DNA, 33 bp, Homo sapien
aaaatacagatatacagtagcttacctccatac

SEQ ID NO: 532769 - DNA, 33 bp, Homo sapien
taaactggatatagacaaaatggacctaataga

SEQ ID NO: 532770 - DNA, 33 bp, Homo sapien
taaactggatatagacgaaatggacctaataga

SEQ ID NO: 532771 - DNA, 33 bp, Homo sapien
aaattgtgtccggatgcatctgaaataattatg

SEQ ID NO: 532772 - DNA, 33 bp, Homo sapien
aaattgtgtccggatgtatctgaaataattatg

SEQ ID NO: 532773 - DNA, 33 bp, Homo sapien
aattaagtttccaataaagcagtatagactagg

SEQ ID NO: 532774 - DNA, 33 bp, Homo sapien
aattaagtttccaatacagcagtatagactagg

SEQ ID NO: 532775 - DNA, 33 bp, Homo sapien
ttagaagtcctatggaatcagtcctagagtagc

SEQ ID NO: 532776 - DNA, 33 bp, Homo sapien
ttagaagtcctatggagtcagtcctagagtagc

SEQ ID NO: 532777 - DNA, 33 bp, Homo sapien
caatgatattataccaaaagttcattgtgtttt

SEQ ID NO: 532778 - DNA, 33 bp, Homo sapien
caatgatattataccagaagttcattgtgtttt

SEQ ID NO: 532779 - DNA, 33 bp, Homo sapien
cctgtgatgcctcatacagggtaaagttcgatg

SEQ ID NO: 532780 - DNA, 33 bp, Homo sapien
cctgtgatgcctcatatagggtaaagttcgatg

SEQ ID NO: 532781 - DNA, 33 bp, Homo sapien
gtcaggataaaaaaaaatcagtccagttaaatg

SEQ ID NO: 532782 - DNA, 33 bp, Homo sapien
gtcaggataaaaaaaactcagtccagttaaatg

SEQ ID NO: 532783 - DNA, 33 bp, Homo sapien
ggcttttagatacataagaaaaatcagaggaat

SEQ ID NO: 532784 - DNA, 33 bp, Homo sapien
ggcttttagatacataggaaaaatcagaggaat

SEQ ID NO: 532785 - DNA, 33 bp, Homo sapien
aaatgtccatccttcagaagagtaatgctactg

SEQ ID NO: 532786 - DNA, 33 bp, Homo sapien
aaatgtccatccttcataagagtaatgctactg

SEQ ID NO: 532787 - DNA, 33 bp, Homo sapien
tacaagatactctgaaagactcttctactacaa

SEQ ID NO: 532788 - DNA, 33 bp, Homo sapien
tacaagatactctgaaggactcttctactacaa

SEQ ID NO: 532789 - DNA, 33 bp, Homo sapien
tttagaattctatgtgaagtacacaacatttga

SEQ ID NO: 532790 - DNA, 33 bp, Homo sapien
tttagaattctatgtggagtacacaacatttga

SEQ ID NO: 532791 - DNA, 33 bp, Homo sapien
attatcctgtccttaacaagattgtgtcctgta

SEQ ID NO: 532792 - DNA, 33 bp, Homo sapien
attatcctgtccttaagaagattgtgtcctgta

SEQ ID NO: 532793 - DNA, 33 bp, Homo sapien
tcttcaaattatacttaaagacagtgccaggat

SEQ ID NO: 532794 - DNA, 33 bp, Homo sapien
tcttcaaattatacttcaagacagtgccaggat

SEQ ID NO: 532795 - DNA, 33 bp, Homo sapien
actgataaaactagaaaagtatagatctgtatt

SEQ ID NO: 532796 - DNA, 33 bp, Homo sapien
actgataaaactagaagagtatagatctgtatt

SEQ ID NO: 532797 - DNA, 33 bp, Homo sapien
gccactaaattttaaacagttccacatattgta

SEQ ID NO: 532798 - DNA, 33 bp, Homo sapien
gccactaaattttaaagagttccacatattgta

SEQ ID NO: 532799 - DNA, 33 bp, Homo sapien
tgtcaaccaagaataccgtatctatcagaacta

SEQ ID NO: 532800 - DNA, 33 bp, Homo sapien
tgtcaaccaagaatactgtatctatcagaacta

SEQ ID NO: 532801 - DNA, 33 bp, Homo sapien
acaaagaatcaaaaacgatcagaatcaacttct

SEQ ID NO: 532802 - DNA, 33 bp, Homo sapien
acaaagaatcaaaaactatcagaatcaacttct

SEQ ID NO: 532803 - DNA, 33 bp, Homo sapien
gtcacattcttaaacagcttcctctgatcatct

SEQ ID NO: 532804 - DNA, 33 bp, Homo sapien
gtcacattcttaaacatcttcctctgatcatct

SEQ ID NO: 532805 - DNA, 33 bp, Homo sapien
gaatatgctgagtttcactgggagccaggaagt

SEQ ID NO: 532806 - DNA, 33 bp, Homo sapien
gaatatgctgagtttcgctgggagccaggaagt

SEQ ID NO: 532807 - DNA, 33 bp, Homo sapien
cccagtgtcttggtcactaacatttgacttctt

SEQ ID NO: 532808 - DNA, 33 bp, Homo sapien
cccagtgtcttggtcattaacatttgacttctt

SEQ ID NO: 532809 - DNA, 33 bp, Homo sapien
ggtctaagccatttgacaagtctgtaggaggtt

SEQ ID NO: 532810 - DNA, 33 bp, Homo sapien
ggtctaagccatttgagaagtctgtaggaggtt

SEQ ID NO: 532811 - DNA, 33 bp, Homo sapien
tttccctaatggttcacgttattatgcaattgt

SEQ ID NO: 532812 - DNA, 33 bp, Homo sapien
tttccctaatggttcatgttattatgcaattgt

SEQ ID NO: 532813 - DNA, 33 bp, Homo sapien
atacgcaaagcaatcaatctacagattcaatgc

SEQ ID NO: 532814 - DNA, 33 bp, Homo sapien
atacgcaaagcaatcagtctacagattcaatgc

SEQ ID NO: 532815 - DNA, 33 bp, Homo sapien
ctcttaaattctttagaacaaaatcacttcatt

SEQ ID NO: 532816 - DNA, 33 bp, Homo sapien
ctcttaaattctttaggacaaaatcacttcatt

SEQ ID NO: 532817 - DNA, 33 bp, Homo sapien
atggcagatagcagaccccccatcttaactcaa

SEQ ID NO: 532818 - DNA, 33 bp, Homo sapien
atggcagatagcagactccccatcttaactcaa

SEQ ID NO: 532819 - DNA, 33 bp, Homo sapien
tgcagaaataggtatgcatgaaaaaaatgataa

SEQ ID NO: 532820 - DNA, 33 bp, Homo sapien
tgcagaaataggtatgtatgaaaaaaatgataa

SEQ ID NO: 532821 - DNA, 33 bp, Homo sapien
ataaactggcagtaaactctgtcagctttcctt

SEQ ID NO: 532822 - DNA, 33 bp, Homo sapien
ataaactggcagtaaattctgtcagctttcctt

SEQ ID NO: 532823 - DNA, 33 bp, Homo sapien
gtggcctctgtcattaaacaactgtcattcatt

SEQ ID NO: 532824 - DNA, 33 bp, Homo sapien
gtggcctctgtcattacacaactgtcattcatt

SEQ ID NO: 532825 - DNA, 33 bp, Homo sapien
ttaatatttttgcacaactacttttggatcctt

SEQ ID NO: 532826 - DNA, 33 bp, Homo sapien
ttaatatttttgcacagctacttttggatcctt

SEQ ID NO: 532827 - DNA, 33 bp, Homo sapien
gaacaaaagagattgggatagaacaagctaaaa

SEQ ID NO: 532828 - DNA, 33 bp, Homo sapien
gaacaaaagagattggtatagaacaagctaaaa

SEQ ID NO: 532829 - DNA, 33 bp, Homo sapien
gcataaaatacactcaacagtttctaagaatat

SEQ ID NO: 532830 - DNA, 33 bp, Homo sapien
gcataaaatacactcagcagtttctaagaatat

SEQ ID NO: 532831 - DNA, 33 bp, Homo sapien
cccaagaagtgcaccactgaaaactaaagcatc

SEQ ID NO: 532832 - DNA, 33 bp, Homo sapien
cccaagaagtgcaccattgaaaactaaagcatc

SEQ ID NO: 532833 - DNA, 33 bp, Homo sapien
atcaagaagtctacttaaaattgtctgaaatat

SEQ ID NO: 532834 - DNA, 33 bp, Homo sapien
atcaagaagtctacttgaaattgtctgaaatat

SEQ ID NO: 532835 - DNA, 33 bp, Homo sapien
gtgtccttatctaaccacaaaactgctaagcct

SEQ ID NO: 532836 - DNA, 33 bp, Homo sapien
gtgtccttatctaaccgcaaaactgctaagcct

SEQ ID NO: 532837 - DNA, 33 bp, Homo sapien
agaggtaaaattggtaactacgaagataagaat

SEQ ID NO: 532838 - DNA, 33 bp, Homo sapien
agaggtaaaattggtagctacgaagataagaat

SEQ ID NO: 532839 - DNA, 33 bp, Homo sapien
cacagacattttcagcaaagtttttgtctaatt

SEQ ID NO: 532840 - DNA, 33 bp, Homo sapien
cacagacattttcagcgaagtttttgtctaatt

SEQ ID NO: 532841 - DNA, 33 bp, Homo sapien
aaagaataaggcttgaaagaagagcttctgaac

SEQ ID NO: 532842 - DNA, 33 bp, Homo sapien
aaagaataaggcttgagagaagagcttctgaac

SEQ ID NO: 532843 - DNA, 33 bp, Homo sapien
cacggttaacaaattacgggctcacatcatgag

SEQ ID NO: 532844 - DNA, 33 bp, Homo sapien
cacggttaacaaattatgggctcacatcatgag

SEQ ID NO: 532845 - DNA, 33 bp, Homo sapien
tttggtttatgtatgcaagattggcttttaaag

SEQ ID NO: 532846 - DNA, 33 bp, Homo sapien
tttggtttatgtatgcgagattggcttttaaag

SEQ ID NO: 532847 - DNA, 33 bp, Homo sapien
tgatgttagcttgtcacatataggcttttgatg

SEQ ID NO: 532848 - DNA, 33 bp, Homo sapien
tgatgttagcttgtcatatataggcttttgatg

SEQ ID NO: 532849 - DNA, 33 bp, Homo sapien
gcactcttggtagaaacatcattggtcacaata

SEQ ID NO: 532850 - DNA, 33 bp, Homo sapien
gcactcttggtagaaatatcattggtcacaata

SEQ ID NO: 532851 - DNA, 33 bp, Homo sapien
ccaaaccaatctgtaccggcataatgctgatca

SEQ ID NO: 532852 - DNA, 33 bp, Homo sapien
ccaaaccaatctgtactggcataatgctgatca

SEQ ID NO: 532853 - DNA, 33 bp, Homo sapien
tttgaagtatttttagacataatctcaactaac

SEQ ID NO: 532854 - DNA, 33 bp, Homo sapien
tttgaagtatttttagtcataatctcaactaac

SEQ ID NO: 532855 - DNA, 33 bp, Homo sapien
aaaaaagttgaaaatacgtctacacaaacacct

SEQ ID NO: 532856 - DNA, 33 bp, Homo sapien
aaaaaagttgaaaatatgtctacacaaacacct

SEQ ID NO: 532857 - DNA, 33 bp, Homo sapien
tattattccaatactacacaaatcacactattt

SEQ ID NO: 532858 - DNA, 33 bp, Homo sapien
tattattccaatactatacaaatcacactattt

SEQ ID NO: 532859 - DNA, 33 bp, Homo sapien
ttctgcattaggtttcaccagcaatctatcctg

SEQ ID NO: 532860 - DNA, 33 bp, Homo sapien
ttctgcattaggtttcgccagcaatctatcctg

SEQ ID NO: 532861 - DNA, 33 bp, Homo sapien
agtgggttgtagtgtacctctgcaggtggtttg

SEQ ID NO: 532862 - DNA, 33 bp, Homo sapien
agtgggttgtagtgtatctctgcaggtggtttg

SEQ ID NO: 532863 - DNA, 33 bp, Homo sapien
ttcatagaagcctataatagccctaacatgaag

SEQ ID NO: 532864 - DNA, 33 bp, Homo sapien
ttcatagaagcctatagtagccctaacatgaag

SEQ ID NO: 532865 - DNA, 33 bp, Homo sapien
aaacttgtacactgaagtctataaaactttggt

SEQ ID NO: 532866 - DNA, 33 bp, Homo sapien
aaacttgtacactgaattctataaaactttggt

SEQ ID NO: 532867 - DNA, 33 bp, Homo sapien
caagaaccagcatgaactctcgggacctctcaa

SEQ ID NO: 532868 - DNA, 33 bp, Homo sapien
caagaaccagcatgaagtctcgggacctctcaa

SEQ ID NO: 532869 - DNA, 33 bp, Homo sapien
aagcagtaacagaagaaagaggcatcaatgtag

SEQ ID NO: 532870 - DNA, 33 bp, Homo sapien
aagcagtaacagaagagagaggcatcaatgtag

SEQ ID NO: 532871 - DNA, 33 bp, Homo sapien
acgtaatttgcacatcgcagggctgataaggag

SEQ ID NO: 532872 - DNA, 33 bp, Homo sapien
acgtaatttgcacatctcagggctgataaggag

SEQ ID NO: 532873 - DNA, 33 bp, Homo sapien
tgcctcattttcttgaagtgaacaccctgcacc

SEQ ID NO: 532874 - DNA, 33 bp, Homo sapien
tgcctcattttcttgacgtgaacaccctgcacc

SEQ ID NO: 532875 - DNA, 33 bp, Homo sapien
aaagtgtaaaacaaccacctcattcttgacaga

SEQ ID NO: 532876 - DNA, 33 bp, Homo sapien
aaagtgtaaaacaacctcctcattcttgacaga

SEQ ID NO: 532877 - DNA, 33 bp, Homo sapien
tgacagaatatttccaactttcactccacagtt

SEQ ID NO: 532878 - DNA, 33 bp, Homo sapien
tgacagaatatttccatctttcactccacagtt

SEQ ID NO: 532879 - DNA, 33 bp, Homo sapien
ctttgttggttacagagaggctacattttgaca

SEQ ID NO: 532880 - DNA, 33 bp, Homo sapien
ctttgttggttacagataggctacattttgaca

SEQ ID NO: 532881 - DNA, 33 bp, Homo sapien
tactctcaagaatataagcctttgaagtttaat

SEQ ID NO: 532882 - DNA, 33 bp, Homo sapien
tactctcaagaatataggcctttgaagtttaat

SEQ ID NO: 532883 - DNA, 33 bp, Homo sapien
atttcacacttaagaacaccgtgattgattagc

SEQ ID NO: 532884 - DNA, 33 bp, Homo sapien
atttcacacttaagaataccgtgattgattagc

SEQ ID NO: 532885 - DNA, 33 bp, Homo sapien
cagagcactccataggccactttacacactaaa

SEQ ID NO: 532886 - DNA, 33 bp, Homo sapien
cagagcactccataggtcactttacacactaaa

SEQ ID NO: 532887 - DNA, 33 bp, Homo sapien
tgtttacatatcgacacctatttcaatagcagt

SEQ ID NO: 532888 - DNA, 33 bp, Homo sapien
tgtttacatatcgacatctatttcaatagcagt

SEQ ID NO: 532889 - DNA, 33 bp, Homo sapien
tctagagtaatcatgccacattttgtaatgctt

SEQ ID NO: 532890 - DNA, 33 bp, Homo sapien
tctagagtaatcatgctacattttgtaatgctt

SEQ ID NO: 532891 - DNA, 33 bp, Homo sapien
aagttcatgcgtttgacctgtctggtggttccc

SEQ ID NO: 532892 - DNA, 33 bp, Homo sapien
aagttcatgcgtttgagctgtctggtggttccc

SEQ ID NO: 532893 - DNA, 33 bp, Homo sapien
cttgttgaaatttaagaccactttcaatttctc

SEQ ID NO: 532894 - DNA, 33 bp, Homo sapien
cttgttgaaatttaaggccactttcaatttctc

SEQ ID NO: 532895 - DNA, 33 bp, Homo sapien
ggtaggtgttaggagacgaaaattttgctgaac

SEQ ID NO: 532896 - DNA, 33 bp, Homo sapien
ggtaggtgttaggagatgaaaattttgctgaac

SEQ ID NO: 532897 - DNA, 33 bp, Homo sapien
agaagcaaatattagcaccattgacactggaca

SEQ ID NO: 532898 - DNA, 33 bp, Homo sapien
agaagcaaatattagcgccattgacactggaca

SEQ ID NO: 532899 - DNA, 33 bp, Homo sapien
agcattgctgaaagtaacctctaagatatgata

SEQ ID NO: 532900 - DNA, 33 bp, Homo sapien
agcattgctgaaagtaccctctaagatatgata

SEQ ID NO: 532901 - DNA, 33 bp, Homo sapien
agatttccttccttaaatctcaaacattgaaaa

SEQ ID NO: 532902 - DNA, 33 bp, Homo sapien
agatttccttccttaagtctcaaacattgaaaa

SEQ ID NO: 532903 - DNA, 33 bp, Homo sapien
ttattggttaatatgtcaatctgaagaaagggt

SEQ ID NO: 532904 - DNA, 33 bp, Homo sapien
ttattggttaatatgtgaatctgaagaaagggt

SEQ ID NO: 532905 - DNA, 33 bp, Homo sapien
tacacacaaatgtttacattattgctcataatt

SEQ ID NO: 532906 - DNA, 33 bp, Homo sapien
tacacacaaatgtttatattattgctcataatt

SEQ ID NO: 532907 - DNA, 33 bp, Homo sapien
aaagcattcaaaaaaagtatgatgtgtttaatc

SEQ ID NO: 532908 - DNA, 33 bp, Homo sapien
aaagcattcaaaaaaattatgatgtgtttaatc

SEQ ID NO: 532909 - DNA, 33 bp, Homo sapien
taatttgagggaaagacgatttgtacattgaat

SEQ ID NO: 532910 - DNA, 33 bp, Homo sapien
taatttgagggaaagatgatttgtacattgaat

SEQ ID NO: 532911 - DNA, 33 bp, Homo sapien
tagaaacatgaagaaaccttagtacaatgacac

SEQ ID NO: 532912 - DNA, 33 bp, Homo sapien
tagaaacatgaagaaagcttagtacaatgacac

SEQ ID NO: 532913 - DNA, 33 bp, Homo sapien
attaatccgtttcaaccacagcttttgaaaagg

SEQ ID NO: 532914 - DNA, 33 bp, Homo sapien
attaatccgtttcaactacagcttttgaaaagg

SEQ ID NO: 532915 - DNA, 33 bp, Homo sapien
gtttatggaaacttcacgttaataatagggtat

SEQ ID NO: 532916 - DNA, 33 bp, Homo sapien
gtttatggaaacttcatgttaataatagggtat

SEQ ID NO: 532917 - DNA, 33 bp, Homo sapien
ttctcaatatctctggccagttaagcagaaagg

SEQ ID NO: 532918 - DNA, 33 bp, Homo sapien
ttctcaatatctctggtcagttaagcagaaagg

SEQ ID NO: 532919 - DNA, 33 bp, Homo sapien
agacaacagcgccagaaatggttttgccactac

SEQ ID NO: 532920 - DNA, 33 bp, Homo sapien
agacaacagcgccagacatggttttgccactac

SEQ ID NO: 532921 - DNA, 33 bp, Homo sapien
aataaccacattaataagagtggaggaatgaag

SEQ ID NO: 532922 - DNA, 33 bp, Homo sapien
aataaccacattaataggagtggaggaatgaag

SEQ ID NO: 532923 - DNA, 33 bp, Homo sapien
acttagcactgaaagcactcgtgttaaaacaaa

SEQ ID NO: 532924 - DNA, 33 bp, Homo sapien
acttagcactgaaagctctcgtgttaaaacaaa

SEQ ID NO: 532925 - DNA, 33 bp, Homo sapien
gagagagatacatcgaagaaaaatttgttgaac

SEQ ID NO: 532926 - DNA, 33 bp, Homo sapien
gagagagatacatcgaggaaaaatttgttgaac

SEQ ID NO: 532927 - DNA, 33 bp, Homo sapien
gcagaaggctgttataataacggcattgccttt

SEQ ID NO: 532928 - DNA, 33 bp, Homo sapien
gcagaaggctgttatagtaacggcattgccttt

SEQ ID NO: 532929 - DNA, 33 bp, Homo sapien
actttagacactgattcaaacacatcaaagagg

SEQ ID NO: 532930 - DNA, 33 bp, Homo sapien
actttagacactgatttaaacacatcaaagagg

SEQ ID NO: 532931 - DNA, 33 bp, Homo sapien
ttgtctgcagtctcaccagcatctgttctttat

SEQ ID NO: 532932 - DNA, 33 bp, Homo sapien
ttgtctgcagtctcactagcatctgttctttat

SEQ ID NO: 532933 - DNA, 33 bp, Homo sapien
attaactaagaattacaaaatgcaggttataat

SEQ ID NO: 532934 - DNA, 33 bp, Homo sapien
attaactaagaattacgaaatgcaggttataat

SEQ ID NO: 532935 - DNA, 33 bp, Homo sapien
aatactgtgactccttgaaattgtccttccata

SEQ ID NO: 532936 - DNA, 33 bp, Homo sapien
aatactgtgactcctttaaattgtccttccata

SEQ ID NO: 532937 - DNA, 33 bp, Homo sapien
tttgatagcctccaaaattgtgagaaaataagt

SEQ ID NO: 532938 - DNA, 33 bp, Homo sapien
tttgatagcctccaaagttgtgagaaaataagt

SEQ ID NO: 532939 - DNA, 33 bp, Homo sapien
ggcattcagcataaaccgcattgttttcacaaa

SEQ ID NO: 532940 - DNA, 33 bp, Homo sapien
ggcattcagcataaactgcattgttttcacaaa

SEQ ID NO: 532941 - DNA, 33 bp, Homo sapien
tgccattttctctgtcaaccattaattcacttg

SEQ ID NO: 532942 - DNA, 33 bp, Homo sapien
tgccattttctctgtcgaccattaattcacttg

SEQ ID NO: 532943 - DNA, 33 bp, Homo sapien
ctccctctctcgaatcaaaatattctattcaaa

SEQ ID NO: 532944 - DNA, 33 bp, Homo sapien
ctccctctctcgaatcgaaatattctattcaaa

SEQ ID NO: 532945 - DNA, 33 bp, Homo sapien
attcttgacaagtataaagtgccattaaagaca

SEQ ID NO: 532946 - DNA, 33 bp, Homo sapien
attcttgacaagtatacagtgccattaaagaca

SEQ ID NO: 532947 - DNA, 33 bp, Homo sapien
acaatatattcaaacaataacagctttttaaga

SEQ ID NO: 532948 - DNA, 33 bp, Homo sapien
acaatatattcaaacagtaacagctttttaaga

SEQ ID NO: 532949 - DNA, 33 bp, Homo sapien
atgtgggattgcgagaaaaattggagaagatac

SEQ ID NO: 532950 - DNA, 33 bp, Homo sapien
atgtgggattgcgagagaaattggagaagatac

SEQ ID NO: 532951 - DNA, 33 bp, Homo sapien
caatctcctgaagccactatgccagcgtcttta

SEQ ID NO: 532952 - DNA, 33 bp, Homo sapien
caatctcctgaagccagtatgccagcgtcttta

SEQ ID NO: 532953 - DNA, 33 bp, Homo sapien
tgaggtgatccttagcaactggaggaagatgtc

SEQ ID NO: 532954 - DNA, 33 bp, Homo sapien
tgaggtgatccttagccactggaggaagatgtc

SEQ ID NO: 532955 - DNA, 33 bp, Homo sapien
acgtaccatgaactaacatcttgtagcttacat

SEQ ID NO: 532956 - DNA, 33 bp, Homo sapien
acgtaccatgaactaatatcttgtagcttacat

SEQ ID NO: 532957 - DNA, 33 bp, Homo sapien
atcttgacacgaaaaccgtatcaggatactatg

SEQ ID NO: 532958 - DNA, 33 bp, Homo sapien
atcttgacacgaaaactgtatcaggatactatg

SEQ ID NO: 532959 - DNA, 33 bp, Homo sapien
actcttaggttagttacggcgaagagattccaa

SEQ ID NO: 532960 - DNA, 33 bp, Homo sapien
actcttaggttagttatggcgaagagattccaa

SEQ ID NO: 532961 - DNA, 33 bp, Homo sapien
ttcaaacagaattaaacgtgacctcatcagatt

SEQ ID NO: 532962 - DNA, 33 bp, Homo sapien
ttcaaacagaattaaatgtgacctcatcagatt

SEQ ID NO: 532963 - DNA, 33 bp, Homo sapien
gatatgtttaatgaaacggaatctgaaggggga

SEQ ID NO: 532964 - DNA, 33 bp, Homo sapien
gatatgtttaatgaaatggaatctgaaggggga

SEQ ID NO: 532965 - DNA, 33 bp, Homo sapien
ttattgatgagagatcaccacaaagagaagaag

SEQ ID NO: 532966 - DNA, 33 bp, Homo sapien
ttattgatgagagatccccacaaagagaagaag

SEQ ID NO: 532967 - DNA, 33 bp, Homo sapien
caaagtgtagaagatgaaaaatctgattatcgt

SEQ ID NO: 532968 - DNA, 33 bp, Homo sapien
caaagtgtagaagatggaaaatctgattatcgt

SEQ ID NO: 532969 - DNA, 33 bp, Homo sapien
actgcacaatgcttgtcaaatggtgcttgtatt

SEQ ID NO: 532970 - DNA, 33 bp, Homo sapien
actgcacaatgcttgttaaatggtgcttgtatt

SEQ ID NO: 532971 - DNA, 33 bp, Homo sapien
tatcaagttaacctgacgttggaaaatttcatt

SEQ ID NO: 532972 - DNA, 33 bp, Homo sapien
tatcaagttaacctgatgttggaaaatttcatt

SEQ ID NO: 532973 - DNA, 33 bp, Homo sapien
ctcaggaatttctttacagcagtggaagaatgt

SEQ ID NO: 532974 - DNA, 33 bp, Homo sapien
ctcaggaatttctttatagcagtggaagaatgt

SEQ ID NO: 532975 - DNA, 33 bp, Homo sapien
atttgagattgcttcaatactttcaatatttgc

SEQ ID NO: 532976 - DNA, 33 bp, Homo sapien
atttgagattgcttcagtactttcaatatttgc

SEQ ID NO: 532977 - DNA, 33 bp, Homo sapien
tcctgtaaatatcaccaggcttgagattgaatt

SEQ ID NO: 532978 - DNA, 33 bp, Homo sapien
tcctgtaaatatcaccgggcttgagattgaatt

SEQ ID NO: 532979 - DNA, 33 bp, Homo sapien
ctttaaaaagaggcataatccttcaaagaaata

SEQ ID NO: 532980 - DNA, 33 bp, Homo sapien
ctttaaaaagaggcatgatccttcaaagaaata

SEQ ID NO: 532981 - DNA, 33 bp, Homo sapien
ccactcctataatgtcggaattgtggaattata

SEQ ID NO: 532982 - DNA, 33 bp, Homo sapien
ccactcctataatgtctgaattgtggaattata

SEQ ID NO: 532983 - DNA, 33 bp, Homo sapien
tttagaaattatgacaaatgaaatgtaacatag

SEQ ID NO: 532984 - DNA, 33 bp, Homo sapien
tttagaaattatgacagatgaaatgtaacatag

SEQ ID NO: 532985 - DNA, 33 bp, Homo sapien
gatagcttatgttgtacgtgggggtggaaggac

SEQ ID NO: 532986 - DNA, 33 bp, Homo sapien
gatagcttatgttgtatgtgggggtggaaggac

SEQ ID NO: 532987 - DNA, 33 bp, Homo sapien
agaagtaactccataactgatagcttatgttgt

SEQ ID NO: 532988 - DNA, 33 bp, Homo sapien
agaagtaactccataattgatagcttatgttgt

SEQ ID NO: 532989 - DNA, 33 bp, Homo sapien
gattacaactaaacaccgtgggtaactactgag

SEQ ID NO: 532990 - DNA, 33 bp, Homo sapien
gattacaactaaacactgtgggtaactactgag

SEQ ID NO: 532991 - DNA, 33 bp, Homo sapien
acaggaatctcctaaccggtcagaaaacaatgg

SEQ ID NO: 532992 - DNA, 33 bp, Homo sapien
acaggaatctcctaactggtcagaaaacaatgg

SEQ ID NO: 532993 - DNA, 33 bp, Homo sapien
gtgggaaagaaagggaataggcattagagggta

SEQ ID NO: 532994 - DNA, 33 bp, Homo sapien
gtgggaaagaaagggagtaggcattagagggta

SEQ ID NO: 532995 - DNA, 33 bp, Homo sapien
gaactcactagcaaaaagtaaaataggccaggt

SEQ ID NO: 532996 - DNA, 33 bp, Homo sapien
gaactcactagcaaaaggtaaaataggccaggt

SEQ ID NO: 532997 - DNA, 33 bp, Homo sapien
aaaagttttattccataactgcatcagcaagta

SEQ ID NO: 532998 - DNA, 33 bp, Homo sapien
aaaagttttattccatcactgcatcagcaagta

SEQ ID NO: 532999 - DNA, 33 bp, Homo sapien
ttggaagtgtctgtaacattgagttaatatggt

SEQ ID NO: 533000 - DNA, 33 bp, Homo sapien
ttggaagtgtctgtaatattgagttaatatggt

SEQ ID NO: 533001 - DNA, 33 bp, Homo sapien
ctgacttaatagtttccactcctggcacattcc

SEQ ID NO: 533002 - DNA, 33 bp, Homo sapien
ctgacttaatagtttctactcctggcacattcc

SEQ ID NO: 533003 - DNA, 33 bp, Homo sapien
cctgccctgcatattagctgactgacccttgcc

SEQ ID NO: 533004 - DNA, 33 bp, Homo sapien
cctgccctgcatattatctgactgacccttgcc

SEQ ID NO: 533005 - DNA, 33 bp, Homo sapien
ggggcttattttcatacgtgatgtgagtttgtg

SEQ ID NO: 533006 - DNA, 33 bp, Homo sapien
ggggcttattttcatatgtgatgtgagtttgtg

SEQ ID NO: 533007 - DNA, 33 bp, Homo sapien
atctccttgtagaaaaatccagcaatcaatatc

SEQ ID NO: 533008 - DNA, 33 bp, Homo sapien
atctccttgtagaaaagtccagcaatcaatatc

SEQ ID NO: 533009 - DNA, 33 bp, Homo sapien
caaaatacaaacttctcaacatatgtgttgtcc

SEQ ID NO: 533010 - DNA, 33 bp, Homo sapien
caaaatacaaacttcttaacatatgtgttgtcc

SEQ ID NO: 533011 - DNA, 33 bp, Homo sapien
tttaatatgccttgtaaattttttgttgaagtc

SEQ ID NO: 533012 - DNA, 33 bp, Homo sapien
tttaatatgccttgtacattttttgttgaagtc

SEQ ID NO: 533013 - DNA, 33 bp, Homo sapien
acactataaatgctcaaaaaccataagcacttt

SEQ ID NO: 533014 - DNA, 33 bp, Homo sapien
acactataaatgctcagaaaccataagcacttt

SEQ ID NO: 533015 - DNA, 33 bp, Homo sapien
taaattactgtacaacaagcagtgtgtggattt

SEQ ID NO: 533016 - DNA, 33 bp, Homo sapien
taaattactgtacaaccagcagtgtgtggattt

SEQ ID NO: 533017 - DNA, 33 bp, Homo sapien
gtcaagtagaagaaaaactacaggtacttaaag

SEQ ID NO: 533018 - DNA, 33 bp, Homo sapien
gtcaagtagaagaaaacctacaggtacttaaag

SEQ ID NO: 533019 - DNA, 33 bp, Homo sapien
ctgtaaagatgtagcacgatggagatctttcag

SEQ ID NO: 533020 - DNA, 33 bp, Homo sapien
ctgtaaagatgtagcatgatggagatctttcag

SEQ ID NO: 533021 - DNA, 33 bp, Homo sapien
ctgctttcagcaaccacgaaattgtggcaaatt

SEQ ID NO: 533022 - DNA, 33 bp, Homo sapien
ctgctttcagcaaccatgaaattgtggcaaatt

SEQ ID NO: 533023 - DNA, 33 bp, Homo sapien
taagcaaaaaaaacagactgatgatgaaggcct

SEQ ID NO: 533024 - DNA, 33 bp, Homo sapien
taagcaaaaaaaacaggctgatgatgaaggcct

SEQ ID NO: 533025 - DNA, 33 bp, Homo sapien
tgagcaaccaatggaccatagagagcagttaaa

SEQ ID NO: 533026 - DNA, 33 bp, Homo sapien
tgagcaaccaatggactatagagagcagttaaa

SEQ ID NO: 533027 - DNA, 33 bp, Homo sapien
tgcctgcaagatgaaccagtcaaccttttacta

SEQ ID NO: 533028 - DNA, 33 bp, Homo sapien
tgcctgcaagatgaactagtcaaccttttacta

SEQ ID NO: 533029 - DNA, 33 bp, Homo sapien
acagggctatatcacaaataaccactaaaggag

SEQ ID NO: 533030 - DNA, 33 bp, Homo sapien
acagggctatatcacacataaccactaaaggag

SEQ ID NO: 533031 - DNA, 33 bp, Homo sapien
ctagattcaaaattgaactaagccacttactat

SEQ ID NO: 533032 - DNA, 33 bp, Homo sapien
ctagattcaaaattgagctaagccacttactat

SEQ ID NO: 533033 - DNA, 33 bp, Homo sapien
cagagtcttgtccaaacttcttatagaacactt

SEQ ID NO: 533034 - DNA, 33 bp, Homo sapien
cagagtcttgtccaaatttcttatagaacactt

SEQ ID NO: 533035 - DNA, 33 bp, Homo sapien
ttctattaatatttcaggttctacctcaaatcc

SEQ ID NO: 533036 - DNA, 33 bp, Homo sapien
ttctattaatatttcatgttctacctcaaatcc

SEQ ID NO: 533037 - DNA, 33 bp, Homo sapien
tactccacattccaaactaaacaagcctttttt

SEQ ID NO: 533038 - DNA, 33 bp, Homo sapien
tactccacattccaaagtaaacaagcctttttt

SEQ ID NO: 533039 - DNA, 33 bp, Homo sapien
aatggtagctagtagacggtgaatttaagcaag

SEQ ID NO: 533040 - DNA, 33 bp, Homo sapien
aatggtagctagtagatggtgaatttaagcaag

SEQ ID NO: 533041 - DNA, 33 bp, Homo sapien
aggtgatgctcaacaagccacttatcttatgag

SEQ ID NO: 533042 - DNA, 33 bp, Homo sapien
aggtgatgctcaacaatccacttatcttatgag

SEQ ID NO: 533043 - DNA, 33 bp, Homo sapien
aaagttacatttgtggacatctgcatctcacat

SEQ ID NO: 533044 - DNA, 33 bp, Homo sapien
aaagttacatttgtggccatctgcatctcacat

SEQ ID NO: 533045 - DNA, 33 bp, Homo sapien
ttcctagttatgcaggaaattaattcgggggac

SEQ ID NO: 533046 - DNA, 33 bp, Homo sapien
ttcctagttatgcagggaattaattcgggggac

SEQ ID NO: 533047 - DNA, 33 bp, Homo sapien
ttacatctgtccccaacggtatttagtaagaga

SEQ ID NO: 533048 - DNA, 33 bp, Homo sapien
ttacatctgtccccaatggtatttagtaagaga

SEQ ID NO: 533049 - DNA, 33 bp, Homo sapien
ggatgggctctatgatcagtctctaatgaggta

SEQ ID NO: 533050 - DNA, 33 bp, Homo sapien
ggatgggctctatgattagtctctaatgaggta

SEQ ID NO: 533051 - DNA, 33 bp, Homo sapien
aggcagcctttggcaaacactacacactttctt

SEQ ID NO: 533052 - DNA, 33 bp, Homo sapien
aggcagcctttggcaatcactacacactttctt

SEQ ID NO: 533053 - DNA, 33 bp, Homo sapien
ttcctttgccacagaaatgagacatttacagca

SEQ ID NO: 533054 - DNA, 33 bp, Homo sapien
ttcctttgccacagaagtgagacatttacagca

SEQ ID NO: 533055 - DNA, 33 bp, Homo sapien
cctacgtctaccctcaacagacaactaaaaaaa

SEQ ID NO: 533056 - DNA, 33 bp, Homo sapien
cctacgtctaccctcatcagacaactaaaaaaa

SEQ ID NO: 533057 - DNA, 33 bp, Homo sapien
atgtcatgagaaaatcaaatctagtgaacattt

SEQ ID NO: 533058 - DNA, 33 bp, Homo sapien
atgtcatgagaaaatcgaatctagtgaacattt

SEQ ID NO: 533059 - DNA, 33 bp, Homo sapien
caatctggtaagataaggacaatcactaatcta

SEQ ID NO: 533060 - DNA, 33 bp, Homo sapien
caatctggtaagataatgacaatcactaatcta

SEQ ID NO: 533061 - DNA, 33 bp, Homo sapien
cactggattacttttaaataggtgcatagcatt

SEQ ID NO: 533062 - DNA, 33 bp, Homo sapien
cactggattacttttatataggtgcatagcatt

SEQ ID NO: 533063 - DNA, 33 bp, Homo sapien
gaggaagccaagaacccagaattgccaatagac

SEQ ID NO: 533064 - DNA, 33 bp, Homo sapien
gaggaagccaagaacctagaattgccaatagac

SEQ ID NO: 533065 - DNA, 33 bp, Homo sapien
aattctgccctagataataatcaaatccccaaa

SEQ ID NO: 533066 - DNA, 33 bp, Homo sapien
aattctgccctagatagtaatcaaatccccaaa

SEQ ID NO: 533067 - DNA, 33 bp, Homo sapien
taattcatcaaagagcagattcttattcaagat

SEQ ID NO: 533068 - DNA, 33 bp, Homo sapien
taattcatcaaagagcggattcttattcaagat

SEQ ID NO: 533069 - DNA, 33 bp, Homo sapien
gttttttgctccttcacagcttcagtttgtacg

SEQ ID NO: 533070 - DNA, 33 bp, Homo sapien
gttttttgctccttcatagcttcagtttgtacg

SEQ ID NO: 533071 - DNA, 33 bp, Homo sapien
cagcatttccaaccacaggatggtgtacaggta

SEQ ID NO: 533072 - DNA, 33 bp, Homo sapien
cagcatttccaaccacgggatggtgtacaggta

SEQ ID NO: 533073 - DNA, 33 bp, Homo sapien
aaaacttttccttcacaaaagacattgttaaga

SEQ ID NO: 533074 - DNA, 33 bp, Homo sapien
aaaacttttccttcacgaaagacattgttaaga

SEQ ID NO: 533075 - DNA, 33 bp, Homo sapien
attgagatgaaaatgaatacgtagaatagcaat

SEQ ID NO: 533076 - DNA, 33 bp, Homo sapien
attgagatgaaaatgagtacgtagaatagcaat

SEQ ID NO: 533077 - DNA, 33 bp, Homo sapien
aaaaccttgtgtctgaagtaacaatattcaatg

SEQ ID NO: 533078 - DNA, 33 bp, Homo sapien
aaaaccttgtgtctgacgtaacaatattcaatg

SEQ ID NO: 533079 - DNA, 33 bp, Homo sapien
gacaaggatatggaaacgttaagtggtaaaatt

SEQ ID NO: 533080 - DNA, 33 bp, Homo sapien
gacaaggatatggaaaggttaagtggtaaaatt

SEQ ID NO: 533081 - DNA, 33 bp, Homo sapien
ttggcctggaattgtaaaaaagccatggcttat

SEQ ID NO: 533082 - DNA, 33 bp, Homo sapien
ttggcctggaattgtacaaaagccatggcttat

SEQ ID NO: 533083 - DNA, 33 bp, Homo sapien
ctaatttgctttaatagagaagagcagtttcct

SEQ ID NO: 533084 - DNA, 33 bp, Homo sapien
ctaatttgctttaatatagaagagcagtttcct

SEQ ID NO: 533085 - DNA, 33 bp, Homo sapien
ataggaagttccagaaccagagaaacagaggct

SEQ ID NO: 533086 - DNA, 33 bp, Homo sapien
ataggaagttccagaatcagagaaacagaggct

SEQ ID NO: 533087 - DNA, 33 bp, Homo sapien
cttctggctccctcccaactttacgtctcactg

SEQ ID NO: 533088 - DNA, 33 bp, Homo sapien
cttctggctccctccccactttacgtctcactg

SEQ ID NO: 533089 - DNA, 33 bp, Homo sapien
atcagtcaaacctacaccatggtccaatggttc

SEQ ID NO: 533090 - DNA, 33 bp, Homo sapien
atcagtcaaacctacatcatggtccaatggttc

SEQ ID NO: 533091 - DNA, 33 bp, Homo sapien
ggaactgtcttagaccacagtacaggcatataa

SEQ ID NO: 533092 - DNA, 33 bp, Homo sapien
ggaactgtcttagaccgcagtacaggcatataa

SEQ ID NO: 533093 - DNA, 33 bp, Homo sapien
actataaaacgatgagccaaaataattacaggg

SEQ ID NO: 533094 - DNA, 33 bp, Homo sapien
actataaaacgatgaggcaaaataattacaggg

SEQ ID NO: 533095 - DNA, 33 bp, Homo sapien
tcgtgagcattgataacccagtaacataccact

SEQ ID NO: 533096 - DNA, 33 bp, Homo sapien
tcgtgagcattgataatccagtaacataccact

SEQ ID NO: 533097 - DNA, 33 bp, Homo sapien
cagaggataagaacaacgtagttttggggctta

SEQ ID NO: 533098 - DNA, 33 bp, Homo sapien
cagaggataagaacaatgtagttttggggctta

SEQ ID NO: 533099 - DNA, 33 bp, Homo sapien
agtgtctgggttaagacaagaagttaagaccaa

SEQ ID NO: 533100 - DNA, 33 bp, Homo sapien
agtgtctgggttaagataagaagttaagaccaa

SEQ ID NO: 533101 - DNA, 33 bp, Homo sapien
agcctgacactggatacatgggatatgatctaa

SEQ ID NO: 533102 - DNA, 33 bp, Homo sapien
agcctgacactggatatatgggatatgatctaa

SEQ ID NO: 533103 - DNA, 33 bp, Homo sapien
ccagaaatttagagccaaagaaacaggccctaa

SEQ ID NO: 533104 - DNA, 33 bp, Homo sapien
ccagaaatttagagccgaagaaacaggccctaa

SEQ ID NO: 533105 - DNA, 33 bp, Homo sapien
tggttgagtaattaaaatgagtttttgaaggtc

SEQ ID NO: 533106 - DNA, 33 bp, Homo sapien
tggttgagtaattaaactgagtttttgaaggtc

SEQ ID NO: 533107 - DNA, 33 bp, Homo sapien
actagcattaactctaaaattctttcagcttgt

SEQ ID NO: 533108 - DNA, 33 bp, Homo sapien
actagcattaactctagaattctttcagcttgt

SEQ ID NO: 533109 - DNA, 33 bp, Homo sapien
tttaatgctcagaagaagcccacaaagtactat

SEQ ID NO: 533110 - DNA, 33 bp, Homo sapien
tttaatgctcagaagaggcccacaaagtactat

SEQ ID NO: 533111 - DNA, 33 bp, Homo sapien
gagaagactcctaaaccaggcagactttgggct

SEQ ID NO: 533112 - DNA, 33 bp, Homo sapien
gagaagactcctaaactaggcagactttgggct

SEQ ID NO: 533113 - DNA, 33 bp, Homo sapien
aggacagcttataaacactaatttctttcgtca

SEQ ID NO: 533114 - DNA, 33 bp, Homo sapien
aggacagcttataaacgctaatttctttcgtca

SEQ ID NO: 533115 - DNA, 33 bp, Homo sapien
acaaaggccttaggaccggttaacttgtgtttg

SEQ ID NO: 533116 - DNA, 33 bp, Homo sapien
acaaaggccttaggactggttaacttgtgtttg

SEQ ID NO: 533117 - DNA, 33 bp, Homo sapien
gtgagtcagaagtatgccaatggcaccaatcag

SEQ ID NO: 533118 - DNA, 33 bp, Homo sapien
gtgagtcagaagtatgtcaatggcaccaatcag

SEQ ID NO: 533119 - DNA, 33 bp, Homo sapien
actaaggaatgaattacagtggaaagacatgct

SEQ ID NO: 533120 - DNA, 33 bp, Homo sapien
actaaggaatgaattatagtggaaagacatgct

SEQ ID NO: 533121 - DNA, 33 bp, Homo sapien
ttttcggactaaaacactcaagttggttgttga

SEQ ID NO: 533122 - DNA, 33 bp, Homo sapien
ttttcggactaaaacagtcaagttggttgttga

SEQ ID NO: 533123 - DNA, 33 bp, Homo sapien
aaaaattaagctgttgccaaattatacaaccaa

SEQ ID NO: 533124 - DNA, 33 bp, Homo sapien
aaaaattaagctgttggcaaattatacaaccaa

SEQ ID NO: 533125 - DNA, 33 bp, Homo sapien
gaagttatagtttacaaggtatccatctgaacc

SEQ ID NO: 533126 - DNA, 33 bp, Homo sapien
gaagttatagtttacatggtatccatctgaacc

SEQ ID NO: 533127 - DNA, 33 bp, Homo sapien
ttgtcttggccaaaacaagtaacatgacaaagc

SEQ ID NO: 533128 - DNA, 33 bp, Homo sapien
ttgtcttggccaaaacgagtaacatgacaaagc

SEQ ID NO: 533129 - DNA, 33 bp, Homo sapien
aattccgacgttataaataatttctcctaagct

SEQ ID NO: 533130 - DNA, 33 bp, Homo sapien
aattccgacgttataagtaatttctcctaagct

SEQ ID NO: 533131 - DNA, 33 bp, Homo sapien
atcttaagtacaatgaacaaggccagatgtatc

SEQ ID NO: 533132 - DNA, 33 bp, Homo sapien
atcttaagtacaatgagcaaggccagatgtatc

SEQ ID NO: 533133 - DNA, 33 bp, Homo sapien
ctaccacaaaggcacccgcacttgtgtgttcat

SEQ ID NO: 533134 - DNA, 33 bp, Homo sapien
ctaccacaaaggcacctgcacttgtgtgttcat

SEQ ID NO: 533135 - DNA, 33 bp, Homo sapien
taaaatctgaattttagctagacccacaaacac

SEQ ID NO: 533136 - DNA, 33 bp, Homo sapien
taaaatctgaattttatctagacccacaaacac

SEQ ID NO: 533137 - DNA, 33 bp, Homo sapien
ctacctttaactgcaacggagtttgtgaaaatc

SEQ ID NO: 533138 - DNA, 33 bp, Homo sapien
ctacctttaactgcaatggagtttgtgaaaatc

SEQ ID NO: 533139 - DNA, 33 bp, Homo sapien
ggccaaataatataaactgttcttagcaaatca

SEQ ID NO: 533140 - DNA, 33 bp, Homo sapien
ggccaaataatataaagtgttcttagcaaatca

SEQ ID NO: 533141 - DNA, 33 bp, Homo sapien
atcttgtttaagccacgattattttggattttt

SEQ ID NO: 533142 - DNA, 33 bp, Homo sapien
atcttgtttaagccactattattttggattttt

SEQ ID NO: 533143 - DNA, 33 bp, Homo sapien
taatggaagtttgcaactagaaactaaaactct

SEQ ID NO: 533144 - DNA, 33 bp, Homo sapien
taatggaagtttgcaagtagaaactaaaactct

SEQ ID NO: 533145 - DNA, 33 bp, Homo sapien
tcagcattaaccatcacaggtggtatagccaaa

SEQ ID NO: 533146 - DNA, 33 bp, Homo sapien
tcagcattaaccatcataggtggtatagccaaa

SEQ ID NO: 533147 - DNA, 33 bp, Homo sapien
gtctgtataagcaaacaactaacagacaggaga

SEQ ID NO: 533148 - DNA, 33 bp, Homo sapien
gtctgtataagcaaactactaacagacaggaga

SEQ ID NO: 533149 - DNA, 33 bp, Homo sapien
aatgatttgcaccaaactggcatatgactgccg

SEQ ID NO: 533150 - DNA, 33 bp, Homo sapien
aatgatttgcaccaaattggcatatgactgccg

SEQ ID NO: 533151 - DNA, 33 bp, Homo sapien
ggcaaacctgcttacactgacggttatggaggc

SEQ ID NO: 533152 - DNA, 33 bp, Homo sapien
ggcaaacctgcttacattgacggttatggaggc

SEQ ID NO: 533153 - DNA, 33 bp, Homo sapien
aacattgcttcagagagccagaacagttcacct

SEQ ID NO: 533154 - DNA, 33 bp, Homo sapien
aacattgcttcagagatccagaacagttcacct

SEQ ID NO: 533155 - DNA, 33 bp, Homo sapien
cagagtgctgtggcaacattgtaaaagtccatt

SEQ ID NO: 533156 - DNA, 33 bp, Homo sapien
cagagtgctgtggcaatattgtaaaagtccatt

SEQ ID NO: 533157 - DNA, 33 bp, Homo sapien
atgaacacacccatcccgctatcaggtaagtca

SEQ ID NO: 533158 - DNA, 33 bp, Homo sapien
atgaacacacccatccggctatcaggtaagtca

SEQ ID NO: 533159 - DNA, 33 bp, Homo sapien
tgcaacctctgtgtcaggttctaactgatgtct

SEQ ID NO: 533160 - DNA, 33 bp, Homo sapien
tgcaacctctgtgtcatgttctaactgatgtct

SEQ ID NO: 533161 - DNA, 33 bp, Homo sapien
ggaataaaagatgactaaaacaggattcttttc

SEQ ID NO: 533162 - DNA, 33 bp, Homo sapien
ggaataaaagatgactgaaacaggattcttttc

SEQ ID NO: 533163 - DNA, 33 bp, Homo sapien
agtgagaggcaaagcacagtgtggaatgagaat

SEQ ID NO: 533164 - DNA, 33 bp, Homo sapien
agtgagaggcaaagcatagtgtggaatgagaat

SEQ ID NO: 533165 - DNA, 33 bp, Homo sapien
cgaaactttcacaaaacagtgcttagaaggcat

SEQ ID NO: 533166 - DNA, 33 bp, Homo sapien
cgaaactttcacaaaagagtgcttagaaggcat

SEQ ID NO: 533167 - DNA, 33 bp, Homo sapien
ctggtattcttattgccaatttgtacagtttaa

SEQ ID NO: 533168 - DNA, 33 bp, Homo sapien
ctggtattcttattgctaatttgtacagtttaa

SEQ ID NO: 533169 - DNA, 33 bp, Homo sapien
aattagatatagagaaagctctacaatgcatga

SEQ ID NO: 533170 - DNA, 33 bp, Homo sapien
aattagatatagagaaggctctacaatgcatga

SEQ ID NO: 533171 - DNA, 33 bp, Homo sapien
gctggtaacagactccagatcaagggaaatgga

SEQ ID NO: 533172 - DNA, 33 bp, Homo sapien
gctggtaacagactccggatcaagggaaatgga

SEQ ID NO: 533173 - DNA, 33 bp, Homo sapien
ccctgtcttgtttaacagcactaaccatataca

SEQ ID NO: 533174 - DNA, 33 bp, Homo sapien
ccctgtcttgtttaacggcactaaccatataca

SEQ ID NO: 533175 - DNA, 33 bp, Homo sapien
cctacactgagccaccacttgtgaataatattg

SEQ ID NO: 533176 - DNA, 33 bp, Homo sapien
cctacactgagccaccgcttgtgaataatattg

SEQ ID NO: 533177 - DNA, 33 bp, Homo sapien
tagttgccttaaaatccatttatattcgcaaat

SEQ ID NO: 533178 - DNA, 33 bp, Homo sapien
tagttgccttaaaatctatttatattcgcaaat

SEQ ID NO: 533179 - DNA, 33 bp, Homo sapien
catgttagaatgagaaaatcacaactatataag

SEQ ID NO: 533180 - DNA, 33 bp, Homo sapien
catgttagaatgagaagatcacaactatataag

SEQ ID NO: 533181 - DNA, 33 bp, Homo sapien
ggaaaacaagactacaatactcttgcaggagaa

SEQ ID NO: 533182 - DNA, 33 bp, Homo sapien
ggaaaacaagactacagtactcttgcaggagaa

SEQ ID NO: 533183 - DNA, 33 bp, Homo sapien
aaccaaacatacacataataagatttttaggac

SEQ ID NO: 533184 - DNA, 33 bp, Homo sapien
aaccaaacatacacattataagatttttaggac

SEQ ID NO: 533185 - DNA, 33 bp, Homo sapien
cactaatcaaaagcgacgtattatgaaaagaaa

SEQ ID NO: 533186 - DNA, 33 bp, Homo sapien
cactaatcaaaagcgatgtattatgaaaagaaa

SEQ ID NO: 533187 - DNA, 33 bp, Homo sapien
gatactgtaactggggaaaattagtacatccaa

SEQ ID NO: 533188 - DNA, 33 bp, Homo sapien
gatactgtaactgggggaaattagtacatccaa

SEQ ID NO: 533189 - DNA, 33 bp, Homo sapien
gatcttatacagcaaacgaaacctgtggtcttg

SEQ ID NO: 533190 - DNA, 33 bp, Homo sapien
gatcttatacagcaaatgaaacctgtggtcttg

SEQ ID NO: 533191 - DNA, 33 bp, Homo sapien
cagagacccttttccaaagctgcttgagtgcat

SEQ ID NO: 533192 - DNA, 33 bp, Homo sapien
cagagacccttttccagagctgcttgagtgcat

SEQ ID NO: 533193 - DNA, 33 bp, Homo sapien
ttgttgagtgaccataactgcagagaccctttt

SEQ ID NO: 533194 - DNA, 33 bp, Homo sapien
ttgttgagtgaccatatctgcagagaccctttt

SEQ ID NO: 533195 - DNA, 33 bp, Homo sapien
agaggacgtatattcacgcctaaataaataaac

SEQ ID NO: 533196 - DNA, 33 bp, Homo sapien
agaggacgtatattcatgcctaaataaataaac

SEQ ID NO: 533197 - DNA, 33 bp, Homo sapien
caccaaacaaacaatgcagaaacttaataaaaa

SEQ ID NO: 533198 - DNA, 33 bp, Homo sapien
caccaaacaaacaatgtagaaacttaataaaaa

SEQ ID NO: 533199 - DNA, 33 bp, Homo sapien
tgtgatgttacttgcacatctgagattgcgtgt

SEQ ID NO: 533200 - DNA, 33 bp, Homo sapien
tgtgatgttacttgcagatctgagattgcgtgt

SEQ ID NO: 533201 - DNA, 33 bp, Homo sapien
tcattgtcaaatgtgaaagcaaggtagcaggct

SEQ ID NO: 533202 - DNA, 33 bp, Homo sapien
tcattgtcaaatgtgatagcaaggtagcaggct

SEQ ID NO: 533203 - DNA, 33 bp, Homo sapien
tagatggtattgatacagaggttaaagaatcag

SEQ ID NO: 533204 - DNA, 33 bp, Homo sapien
tagatggtattgataccgaggttaaagaatcag

SEQ ID NO: 533205 - DNA, 33 bp, Homo sapien
ccatgtgcctatagtcacccctggagtgtgagc

SEQ ID NO: 533206 - DNA, 33 bp, Homo sapien
ccatgtgcctatagtcccccctggagtgtgagc

SEQ ID NO: 533207 - DNA, 33 bp, Homo sapien
gatccccccacttcaaccttgcaaagaactgga

SEQ ID NO: 533208 - DNA, 33 bp, Homo sapien
gatccccccacttcaatcttgcaaagaactgga

SEQ ID NO: 533209 - DNA, 33 bp, Homo sapien
caggagttccaggttacgataagtcatgagcct

SEQ ID NO: 533210 - DNA, 33 bp, Homo sapien
caggagttccaggttatgataagtcatgagcct

SEQ ID NO: 533211 - DNA, 33 bp, Homo sapien
gcttaatgactaacaaccattttggcactgatc

SEQ ID NO: 533212 - DNA, 33 bp, Homo sapien
gcttaatgactaacaatcattttggcactgatc

SEQ ID NO: 533213 - DNA, 33 bp, Homo sapien
cattgctgagactccacggcctaaacattgtct

SEQ ID NO: 533214 - DNA, 33 bp, Homo sapien
cattgctgagactccagggcctaaacattgtct

SEQ ID NO: 533215 - DNA, 33 bp, Homo sapien
acaagtgatgaagacacaatatgtattcaaaaa

SEQ ID NO: 533216 - DNA, 33 bp, Homo sapien
acaagtgatgaagacagaatatgtattcaaaaa

SEQ ID NO: 533217 - DNA, 33 bp, Homo sapien
aagaagactcaggagcagaagtctgagaacctg

SEQ ID NO: 533218 - DNA, 33 bp, Homo sapien
aagaagactcaggagcggaagtctgagaacctg

SEQ ID NO: 533219 - DNA, 33 bp, Homo sapien
tgatgtctgttttgtaagactacactgctaact

SEQ ID NO: 533220 - DNA, 33 bp, Homo sapien
tgatgtctgttttgtaggactacactgctaact

SEQ ID NO: 533221 - DNA, 33 bp, Homo sapien
ttctattcaaaggactaacatattttaacgaga

SEQ ID NO: 533222 - DNA, 33 bp, Homo sapien
ttctattcaaaggactgacatattttaacgaga

SEQ ID NO: 533223 - DNA, 33 bp, Homo sapien
caaagaattccaggcaaatggaagagcaatttt

SEQ ID NO: 533224 - DNA, 33 bp, Homo sapien
caaagaattccaggcagatggaagagcaatttt

SEQ ID NO: 533225 - DNA, 33 bp, Homo sapien
tggtaccatttgttgacgattaggagtagaaaa

SEQ ID NO: 533226 - DNA, 33 bp, Homo sapien
tggtaccatttgttgatgattaggagtagaaaa

SEQ ID NO: 533227 - DNA, 33 bp, Homo sapien
ttgacatgcttgattaaaaaaaagattataaat

SEQ ID NO: 533228 - DNA, 33 bp, Homo sapien
ttgacatgcttgattagaaaaaagattataaat

SEQ ID NO: 533229 - DNA, 33 bp, Homo sapien
gacaaaaatcttgtgacgagaggttcacaggaa

SEQ ID NO: 533230 - DNA, 33 bp, Homo sapien
gacaaaaatcttgtgatgagaggttcacaggaa

SEQ ID NO: 533231 - DNA, 33 bp, Homo sapien
atttatccaatgaagacgaacaaatgctgagaa

SEQ ID NO: 533232 - DNA, 33 bp, Homo sapien
atttatccaatgaagatgaacaaatgctgagaa

SEQ ID NO: 533233 - DNA, 33 bp, Homo sapien
ttattacatattggcaaccattccaccaacaga

SEQ ID NO: 533234 - DNA, 33 bp, Homo sapien
ttattacatattggcagccattccaccaacaga

SEQ ID NO: 533235 - DNA, 33 bp, Homo sapien
gcagatgagggcttaccctggttgttagtaatt

SEQ ID NO: 533236 - DNA, 33 bp, Homo sapien
gcagatgagggcttactctggttgttagtaatt

SEQ ID NO: 533237 - DNA, 33 bp, Homo sapien
ggtagatatattcagaagtgagctctggggagt

SEQ ID NO: 533238 - DNA, 33 bp, Homo sapien
ggtagatatattcagaggtgagctctggggagt

SEQ ID NO: 533239 - DNA, 33 bp, Homo sapien
ttaaaaactaacacaacgcatggcttattaccc

SEQ ID NO: 533240 - DNA, 33 bp, Homo sapien
ttaaaaactaacacaatgcatggcttattaccc

SEQ ID NO: 533241 - DNA, 33 bp, Homo sapien
ctcctgggctaaatcagccttccttctcaccct

SEQ ID NO: 533242 - DNA, 33 bp, Homo sapien
ctcctgggctaaatcatccttccttctcaccct

SEQ ID NO: 533243 - DNA, 33 bp, Homo sapien
gcttcttttaaagtaaaacatcctgaccaatgc

SEQ ID NO: 533244 - DNA, 33 bp, Homo sapien
gcttcttttaaagtaagacatcctgaccaatgc

SEQ ID NO: 533245 - DNA, 33 bp, Homo sapien
acaactgaaaagtttacaggtaggacttccttg

SEQ ID NO: 533246 - DNA, 33 bp, Homo sapien
acaactgaaaagtttagaggtaggacttccttg

SEQ ID NO: 533247 - DNA, 33 bp, Homo sapien
aggtacattagagataaatgccttggccagaaa

SEQ ID NO: 533248 - DNA, 33 bp, Homo sapien
aggtacattagagatagatgccttggccagaaa

SEQ ID NO: 533249 - DNA, 33 bp, Homo sapien
ccatgtgagctgctgacgattaaatgagtaaat

SEQ ID NO: 533250 - DNA, 33 bp, Homo sapien
ccatgtgagctgctgaggattaaatgagtaaat

SEQ ID NO: 533251 - DNA, 33 bp, Homo sapien
cattaaaagctgaggacaagtcgcagttattca

SEQ ID NO: 533252 - DNA, 33 bp, Homo sapien
cattaaaagctgaggataagtcgcagttattca

SEQ ID NO: 533253 - DNA, 33 bp, Homo sapien
atactcctgtactaagaacttcaggtatttacg

SEQ ID NO: 533254 - DNA, 33 bp, Homo sapien
atactcctgtactaaggacttcaggtatttacg

SEQ ID NO: 533255 - DNA, 33 bp, Homo sapien
ctcatgagttaagacccactggcctggaattcc

SEQ ID NO: 533256 - DNA, 33 bp, Homo sapien
ctcatgagttaagacctactggcctggaattcc

SEQ ID NO: 533257 - DNA, 33 bp, Homo sapien
ctcacccagtcaggaaaaatgggatcaaggacc

SEQ ID NO: 533258 - DNA, 33 bp, Homo sapien
ctcacccagtcaggaagaatgggatcaaggacc

SEQ ID NO: 533259 - DNA, 33 bp, Homo sapien
acaaacacaaaaaaccaacacttgtgtggtgtg

SEQ ID NO: 533260 - DNA, 33 bp, Homo sapien
acaaacacaaaaaacctacacttgtgtggtgtg

SEQ ID NO: 533261 - DNA, 33 bp, Homo sapien
atgtggctccccagtacgatggccgggaaagag

SEQ ID NO: 533262 - DNA, 33 bp, Homo sapien
atgtggctccccagtatgatggccgggaaagag

SEQ ID NO: 533263 - DNA, 33 bp, Homo sapien
cattttcagattgcacccacatacccagatgac

SEQ ID NO: 533264 - DNA, 33 bp, Homo sapien
cattttcagattgcacgcacatacccagatgac

SEQ ID NO: 533265 - DNA, 33 bp, Homo sapien
catttcctcttcctcacaaataaggtaaacttt

SEQ ID NO: 533266 - DNA, 33 bp, Homo sapien
catttcctcttcctcagaaataaggtaaacttt

SEQ ID NO: 533267 - DNA, 33 bp, Homo sapien
agccggtctccaagacaacggcgtgcaggctgg

SEQ ID NO: 533268 - DNA, 33 bp, Homo sapien
agccggtctccaagacgacggcgtgcaggctgg

SEQ ID NO: 533269 - DNA, 33 bp, Homo sapien
atgatctggttctcaaagattaaaaacatgaaa

SEQ ID NO: 533270 - DNA, 33 bp, Homo sapien
atgatctggttctcaaggattaaaaacatgaaa

SEQ ID NO: 533271 - DNA, 33 bp, Homo sapien
atggccttggtgccaacttagtgaaaaattgct

SEQ ID NO: 533272 - DNA, 33 bp, Homo sapien
atggccttggtgccaatttagtgaaaaattgct

SEQ ID NO: 533273 - DNA, 33 bp, Homo sapien
ttagcaccaaaggttaactaatttaagcagctc

SEQ ID NO: 533274 - DNA, 33 bp, Homo sapien
ttagcaccaaaggttacctaatttaagcagctc

SEQ ID NO: 533275 - DNA, 33 bp, Homo sapien
tcctgaggaattccaaagtatccattcacttga

SEQ ID NO: 533276 - DNA, 33 bp, Homo sapien
tcctgaggaattccaacgtatccattcacttga

SEQ ID NO: 533277 - DNA, 33 bp, Homo sapien
attagctacaacacaaagagtaaatggggtctc

SEQ ID NO: 533278 - DNA, 33 bp, Homo sapien
attagctacaacacaaggagtaaatggggtctc

SEQ ID NO: 533279 - DNA, 33 bp, Homo sapien
ggttggggaagccagacagtcaaattccaagag

SEQ ID NO: 533280 - DNA, 33 bp, Homo sapien
ggttggggaagccagagagtcaaattccaagag

SEQ ID NO: 533281 - DNA, 33 bp, Homo sapien
gattgagagcctttaagcccaagtccgcaattt

SEQ ID NO: 533282 - DNA, 33 bp, Homo sapien
gattgagagcctttaatcccaagtccgcaattt

SEQ ID NO: 533283 - DNA, 33 bp, Homo sapien
tccaggcagagggaaccgtactgacaaatgaac

SEQ ID NO: 533284 - DNA, 33 bp, Homo sapien
tccaggcagagggaactgtactgacaaatgaac

SEQ ID NO: 533285 - DNA, 33 bp, Homo sapien
tatgtatgcctaatgagctttctggtgaattgg

SEQ ID NO: 533286 - DNA, 33 bp, Homo sapien
tatgtatgcctaatgatctttctggtgaattgg

SEQ ID NO: 533287 - DNA, 33 bp, Homo sapien
ttcaagtgattttcagaccacaaataaatattg

SEQ ID NO: 533288 - DNA, 33 bp, Homo sapien
ttcaagtgattttcaggccacaaataaatattg

SEQ ID NO: 533289 - DNA, 33 bp, Homo sapien
tccactctttttgtgaacagctgtcagaattgt

SEQ ID NO: 533290 - DNA, 33 bp, Homo sapien
tccactctttttgtgaccagctgtcagaattgt

SEQ ID NO: 533291 - DNA, 33 bp, Homo sapien
atccacaattaagatacgaaaaagcgaaaagtg

SEQ ID NO: 533292 - DNA, 33 bp, Homo sapien
atccacaattaagatatgaaaaagcgaaaagtg

SEQ ID NO: 533293 - DNA, 33 bp, Homo sapien
taataagattaaaataagttgtgagccgggaaa

SEQ ID NO: 533294 - DNA, 33 bp, Homo sapien
taataagattaaaataggttgtgagccgggaaa

SEQ ID NO: 533295 - DNA, 33 bp, Homo sapien
aattaggattattaacaatgatacgctgactac

SEQ ID NO: 533296 - DNA, 33 bp, Homo sapien
aattaggattattaaccatgatacgctgactac

SEQ ID NO: 533297 - DNA, 33 bp, Homo sapien
cttttaaaatgtttccactaccaggcatggtgg

SEQ ID NO: 533298 - DNA, 33 bp, Homo sapien
cttttaaaatgtttccgctaccaggcatggtgg

SEQ ID NO: 533299 - DNA, 33 bp, Homo sapien
caaacagtataaaatcccattccaacttaaaag

SEQ ID NO: 533300 - DNA, 33 bp, Homo sapien
caaacagtataaaatctcattccaacttaaaag

SEQ ID NO: 533301 - DNA, 33 bp, Homo sapien
gctttaaataatttacagactctctggataaat

SEQ ID NO: 533302 - DNA, 33 bp, Homo sapien
gctttaaataatttacggactctctggataaat

SEQ ID NO: 533303 - DNA, 33 bp, Homo sapien
atattttcttctttaaccccgagcttcatataa

SEQ ID NO: 533304 - DNA, 33 bp, Homo sapien
atattttcttctttaatcccgagcttcatataa

SEQ ID NO: 533305 - DNA, 33 bp, Homo sapien
tcctgcttggatctccaaaaatgctagaattcc

SEQ ID NO: 533306 - DNA, 33 bp, Homo sapien
tcctgcttggatctccgaaaatgctagaattcc

SEQ ID NO: 533307 - DNA, 33 bp, Homo sapien
ctaaggatcatcgtgagagtgcacatttgagaa

SEQ ID NO: 533308 - DNA, 33 bp, Homo sapien
ctaaggatcatcgtgatagtgcacatttgagaa

SEQ ID NO: 533309 - DNA, 33 bp, Homo sapien
tctctggctgaacttgaacagattcaaaagagg

SEQ ID NO: 533310 - DNA, 33 bp, Homo sapien
tctctggctgaacttggacagattcaaaagagg

SEQ ID NO: 533311 - DNA, 33 bp, Homo sapien
acaaaatgagggtacaaccaaatagcgtaccca

SEQ ID NO: 533312 - DNA, 33 bp, Homo sapien
acaaaatgagggtacatccaaatagcgtaccca

SEQ ID NO: 533313 - DNA, 33 bp, Homo sapien
aatgtgaagaggttaacagaggttaatactagg

SEQ ID NO: 533314 - DNA, 33 bp, Homo sapien
aatgtgaagaggttaatagaggttaatactagg

SEQ ID NO: 533315 - DNA, 33 bp, Homo sapien
agtaaactacaatgcactatttctcatgaacat

SEQ ID NO: 533316 - DNA, 33 bp, Homo sapien
agtaaactacaatgcagtatttctcatgaacat

SEQ ID NO: 533317 - DNA, 33 bp, Homo sapien
taacttcttcacttaaacattgctcagttaaat

SEQ ID NO: 533318 - DNA, 33 bp, Homo sapien
taacttcttcacttaatcattgctcagttaaat

SEQ ID NO: 533319 - DNA, 33 bp, Homo sapien
aaggcttagttgacaaaaggcctcagagaagcc

SEQ ID NO: 533320 - DNA, 33 bp, Homo sapien
aaggcttagttgacaagaggcctcagagaagcc

SEQ ID NO: 533321 - DNA, 33 bp, Homo sapien
acacctgcacttaaccacacgttcctctccagc

SEQ ID NO: 533322 - DNA, 33 bp, Homo sapien
acacctgcacttaaccgcacgttcctctccagc

SEQ ID NO: 533323 - DNA, 33 bp, Homo sapien
ctaaatacctacaatcaccttatctttgacaaa

SEQ ID NO: 533324 - DNA, 33 bp, Homo sapien
ctaaatacctacaatcgccttatctttgacaaa

SEQ ID NO: 533325 - DNA, 33 bp, Homo sapien
aataaatttggactgaataacggaggtaattgc

SEQ ID NO: 533326 - DNA, 33 bp, Homo sapien
aataaatttggactgagtaacggaggtaattgc

SEQ ID NO: 533327 - DNA, 33 bp, Homo sapien
ccagaagattgcatgacagataaaatgcacctt

SEQ ID NO: 533328 - DNA, 33 bp, Homo sapien
ccagaagattgcatgatagataaaatgcacctt

SEQ ID NO: 533329 - DNA, 33 bp, Homo sapien
taaacatatatttcaaatgtacgcaataacctt

SEQ ID NO: 533330 - DNA, 33 bp, Homo sapien
taaacatatatttcaattgtacgcaataacctt

SEQ ID NO: 533331 - DNA, 33 bp, Homo sapien
cagttaaccattctcagctactgttcatattat

SEQ ID NO: 533332 - DNA, 33 bp, Homo sapien
cagttaaccattctcatctactgttcatattat

SEQ ID NO: 533333 - DNA, 33 bp, Homo sapien
gttgaactctgccaacggtattatataaaatga

SEQ ID NO: 533334 - DNA, 33 bp, Homo sapien
gttgaactctgccaactgtattatataaaatga

SEQ ID NO: 533335 - DNA, 33 bp, Homo sapien
aatattcttgggagtacggctaacattcagttg

SEQ ID NO: 533336 - DNA, 33 bp, Homo sapien
aatattcttgggagtatggctaacattcagttg

SEQ ID NO: 533337 - DNA, 33 bp, Homo sapien
atcaaagatgaatcctaaggaaatgccttgtat

SEQ ID NO: 533338 - DNA, 33 bp, Homo sapien
atcaaagatgaatcctcaggaaatgccttgtat

SEQ ID NO: 533339 - DNA, 33 bp, Homo sapien
gctggacagccattgaactgggctttcatttgt

SEQ ID NO: 533340 - DNA, 33 bp, Homo sapien
gctggacagccattgagctgggctttcatttgt

SEQ ID NO: 533341 - DNA, 33 bp, Homo sapien
gagtggctattattcaacctactagaaggagtt

SEQ ID NO: 533342 - DNA, 33 bp, Homo sapien
gagtggctattattcaccctactagaaggagtt

SEQ ID NO: 533343 - DNA, 33 bp, Homo sapien
gttgaaatgagagtaccatttttttcctattct

SEQ ID NO: 533344 - DNA, 33 bp, Homo sapien
gttgaaatgagagtactatttttttcctattct

SEQ ID NO: 533345 - DNA, 33 bp, Homo sapien
tcctgaaggaacagtacgtaaaagcctctttga

SEQ ID NO: 533346 - DNA, 33 bp, Homo sapien
tcctgaaggaacagtaggtaaaagcctctttga

SEQ ID NO: 533347 - DNA, 33 bp, Homo sapien
gaggatgtagcaacaaaaagagatctgggtaaa

SEQ ID NO: 533348 - DNA, 33 bp, Homo sapien
gaggatgtagcaacaagaagagatctgggtaaa

SEQ ID NO: 533349 - DNA, 33 bp, Homo sapien
tgccagcaagggcaaactctgtagcagccccat

SEQ ID NO: 533350 - DNA, 33 bp, Homo sapien
tgccagcaagggcaaagtctgtagcagccccat

SEQ ID NO: 533351 - DNA, 33 bp, Homo sapien
aaaagaatatgaatgcagactggtcttagctac

SEQ ID NO: 533352 - DNA, 33 bp, Homo sapien
aaaagaatatgaatgctgactggtcttagctac

SEQ ID NO: 533353 - DNA, 33 bp, Homo sapien
tgtttttgctgtgatgaaaaaacacaaaaagta

SEQ ID NO: 533354 - DNA, 33 bp, Homo sapien
tgtttttgctgtgatgtaaaaacacaaaaagta

SEQ ID NO: 533355 - DNA, 33 bp, Homo sapien
caaagaaatttgggaaaaaggtgtgcagatgga

SEQ ID NO: 533356 - DNA, 33 bp, Homo sapien
caaagaaatttgggaagaaggtgtgcagatgga

SEQ ID NO: 533357 - DNA, 33 bp, Homo sapien
atctgagaagatttgaagctcactatatgcctc

SEQ ID NO: 533358 - DNA, 33 bp, Homo sapien
atctgagaagatttgaggctcactatatgcctc

SEQ ID NO: 533359 - DNA, 33 bp, Homo sapien
ccacttttagctgtggaataaaaataggactga

SEQ ID NO: 533360 - DNA, 33 bp, Homo sapien
ccacttttagctgtgggataaaaataggactga

SEQ ID NO: 533361 - DNA, 33 bp, Homo sapien
ctgcactagaagcaaactttaggtaccctggcc

SEQ ID NO: 533362 - DNA, 33 bp, Homo sapien
ctgcactagaagcaaattttaggtaccctggcc

SEQ ID NO: 533363 - DNA, 33 bp, Homo sapien
aagagaggcttccttaacacagatttttttaag

SEQ ID NO: 533364 - DNA, 33 bp, Homo sapien
aagagaggcttccttaccacagatttttttaag

SEQ ID NO: 533365 - DNA, 33 bp, Homo sapien
ttaaagtgtatttagaaaatatgaccagcaagt

SEQ ID NO: 533366 - DNA, 33 bp, Homo sapien
ttaaagtgtatttagagaatatgaccagcaagt

SEQ ID NO: 533367 - DNA, 33 bp, Homo sapien
tataaatgcttactcaaatatttctacaatgtt

SEQ ID NO: 533368 - DNA, 33 bp, Homo sapien
tataaatgcttactcagatatttctacaatgtt

SEQ ID NO: 533369 - DNA, 33 bp, Homo sapien
aaaacagctccagagacgcttatgcaaggtcac

SEQ ID NO: 533370 - DNA, 33 bp, Homo sapien
aaaacagctccagagatgcttatgcaaggtcac

SEQ ID NO: 533371 - DNA, 33 bp, Homo sapien
ttccaagtggttgaaacttgataaaagcctcta

SEQ ID NO: 533372 - DNA, 33 bp, Homo sapien
ttccaagtggttgaaagttgataaaagcctcta

SEQ ID NO: 533373 - DNA, 33 bp, Homo sapien
tcatttccttgttgataagtgatattgagaatc

SEQ ID NO: 533374 - DNA, 33 bp, Homo sapien
tcatttccttgttgattagtgatattgagaatc

SEQ ID NO: 533375 - DNA, 33 bp, Homo sapien
aaagaacaatcctggaagccccacacttctgaa

SEQ ID NO: 533376 - DNA, 33 bp, Homo sapien
aaagaacaatcctggacgccccacacttctgaa

SEQ ID NO: 533377 - DNA, 33 bp, Homo sapien
ctatattcaaaataaccatctagccaacaaaga

SEQ ID NO: 533378 - DNA, 33 bp, Homo sapien
ctatattcaaaataacgatctagccaacaaaga

SEQ ID NO: 533379 - DNA, 33 bp, Homo sapien
ctcactccacagaatacgaagccatgtgggtat

SEQ ID NO: 533380 - DNA, 33 bp, Homo sapien
ctcactccacagaataggaagccatgtgggtat

SEQ ID NO: 533381 - DNA, 33 bp, Homo sapien
cttgtaagtatcatacacctcattcctaccctg

SEQ ID NO: 533382 - DNA, 33 bp, Homo sapien
cttgtaagtatcatacccctcattcctaccctg

SEQ ID NO: 533383 - DNA, 33 bp, Homo sapien
taagtatgatatttgacgccatgacactgattt

SEQ ID NO: 533384 - DNA, 33 bp, Homo sapien
taagtatgatatttgatgccatgacactgattt

SEQ ID NO: 533385 - DNA, 33 bp, Homo sapien
gacaggatatgaatcaaatgtgttctggaaacc

SEQ ID NO: 533386 - DNA, 33 bp, Homo sapien
gacaggatatgaatcagatgtgttctggaaacc

SEQ ID NO: 533387 - DNA, 33 bp, Homo sapien
actaactggttctaaacggttctaaagaatcaa

SEQ ID NO: 533388 - DNA, 33 bp, Homo sapien
actaactggttctaaatggttctaaagaatcaa

SEQ ID NO: 533389 - DNA, 33 bp, Homo sapien
atacactcttaaaccacacgatcgcatgagaac

SEQ ID NO: 533390 - DNA, 33 bp, Homo sapien
atacactcttaaaccatacgatcgcatgagaac

SEQ ID NO: 533391 - DNA, 33 bp, Homo sapien
atccatgctctacaaaagaaggatacacccaac

SEQ ID NO: 533392 - DNA, 33 bp, Homo sapien
atccatgctctacaaaggaaggatacacccaac

SEQ ID NO: 533393 - DNA, 33 bp, Homo sapien
aaccactgatgtagaacagggtctatgccctct

SEQ ID NO: 533394 - DNA, 33 bp, Homo sapien
aaccactgatgtagaatagggtctatgccctct

SEQ ID NO: 533395 - DNA, 33 bp, Homo sapien
aggttcaagcaattctaagaagaaactggaatc

SEQ ID NO: 533396 - DNA, 33 bp, Homo sapien
aggttcaagcaattctgagaagaaactggaatc

SEQ ID NO: 533397 - DNA, 33 bp, Homo sapien
aagatgaaaagtagcaactttggtgattaaatg

SEQ ID NO: 533398 - DNA, 33 bp, Homo sapien
aagatgaaaagtagcatctttggtgattaaatg

SEQ ID NO: 533399 - DNA, 33 bp, Homo sapien
ctacagatggtatttcaaaaatatgtaattaaa

SEQ ID NO: 533400 - DNA, 33 bp, Homo sapien
ctacagatggtatttcgaaaatatgtaattaaa

SEQ ID NO: 533401 - DNA, 33 bp, Homo sapien
tctcacagaaagtacacgaatgctgaatttctt

SEQ ID NO: 533402 - DNA, 33 bp, Homo sapien
tctcacagaaagtacaggaatgctgaatttctt

SEQ ID NO: 533403 - DNA, 33 bp, Homo sapien
ttttaaaactatgacgaaaagattgagaaggtt

SEQ ID NO: 533404 - DNA, 33 bp, Homo sapien
ttttaaaactatgacgtaaagattgagaaggtt

SEQ ID NO: 533405 - DNA, 33 bp, Homo sapien
agatttttttatgaccagaagataccgtgtagc

SEQ ID NO: 533406 - DNA, 33 bp, Homo sapien
agatttttttatgaccggaagataccgtgtagc

SEQ ID NO: 533407 - DNA, 33 bp, Homo sapien
aatatttatattcaaaactcgtaatggactaat

SEQ ID NO: 533408 - DNA, 33 bp, Homo sapien
aatatttatattcaaacctcgtaatggactaat

SEQ ID NO: 533409 - DNA, 33 bp, Homo sapien
cttcatttaattctaaacaaggcagccagaata

SEQ ID NO: 533410 - DNA, 33 bp, Homo sapien
cttcatttaattctaaccaaggcagccagaata

SEQ ID NO: 533411 - DNA, 33 bp, Homo sapien
gcaaataatgaaaagaagtcaagttaagtgatt

SEQ ID NO: 533412 - DNA, 33 bp, Homo sapien
gcaaataatgaaaagaggtcaagttaagtgatt

SEQ ID NO: 533413 - DNA, 33 bp, Homo sapien
gcattatctcatttaccggtcacattaaccttc

SEQ ID NO: 533414 - DNA, 33 bp, Homo sapien
gcattatctcatttactggtcacattaaccttc

SEQ ID NO: 533415 - DNA, 33 bp, Homo sapien
ggattcctgaaattcaatcatgggtatctgagt

SEQ ID NO: 533416 - DNA, 33 bp, Homo sapien
ggattcctgaaattcactcatgggtatctgagt

SEQ ID NO: 533417 - DNA, 33 bp, Homo sapien
gtttaatagaccttaacaacaacagcgaaacat

SEQ ID NO: 533418 - DNA, 33 bp, Homo sapien
gtttaatagaccttaagaacaacagcgaaacat

SEQ ID NO: 533419 - DNA, 33 bp, Homo sapien
aaatcaagagtaataacgcaaatacacaagtca

SEQ ID NO: 533420 - DNA, 33 bp, Homo sapien
aaatcaagagtaataatgcaaatacacaagtca

SEQ ID NO: 533421 - DNA, 33 bp, Homo sapien
catctgaggatttcaacaagactgaaacattca

SEQ ID NO: 533422 - DNA, 33 bp, Homo sapien
catctgaggatttcaagaagactgaaacattca

SEQ ID NO: 533423 - DNA, 33 bp, Homo sapien
attatatcttccctcccatatgagaaaagcaag

SEQ ID NO: 533424 - DNA, 33 bp, Homo sapien
attatatcttccctcctatatgagaaaagcaag

SEQ ID NO: 533425 - DNA, 33 bp, Homo sapien
tgagaccaatgattacacagatattttgcatat

SEQ ID NO: 533426 - DNA, 33 bp, Homo sapien
tgagaccaatgattacgcagatattttgcatat

SEQ ID NO: 533427 - DNA, 33 bp, Homo sapien
tgagtgttaatttgaacccgcattcactaatta

SEQ ID NO: 533428 - DNA, 33 bp, Homo sapien
tgagtgttaatttgaatccgcattcactaatta

SEQ ID NO: 533429 - DNA, 33 bp, Homo sapien
taccaaatgatatgctcaaaattcaccataatt

SEQ ID NO: 533430 - DNA, 33 bp, Homo sapien
taccaaatgatatgctgaaaattcaccataatt

SEQ ID NO: 533431 - DNA, 33 bp, Homo sapien
ctttatggggtgtctaatagaagttgtatcatt

SEQ ID NO: 533432 - DNA, 33 bp, Homo sapien
ctttatggggtgtctagtagaagttgtatcatt

SEQ ID NO: 533433 - DNA, 33 bp, Homo sapien
caataatcaatgaagcaattttgagccaacgtg

SEQ ID NO: 533434 - DNA, 33 bp, Homo sapien
caataatcaatgaagcgattttgagccaacgtg

SEQ ID NO: 533435 - DNA, 33 bp, Homo sapien
catacaaattcaaaataagtggtcagtttggtc

SEQ ID NO: 533436 - DNA, 33 bp, Homo sapien
catacaaattcaaaatcagtggtcagtttggtc

SEQ ID NO: 533437 - DNA, 33 bp, Homo sapien
gcttgtgttaaccagcccatagacccgcttact

SEQ ID NO: 533438 - DNA, 33 bp, Homo sapien
gcttgtgttaaccagctcatagacccgcttact

SEQ ID NO: 533439 - DNA, 33 bp, Homo sapien
atgcaatcagttgggacgatgattactatagag

SEQ ID NO: 533440 - DNA, 33 bp, Homo sapien
atgcaatcagttgggaggatgattactatagag

SEQ ID NO: 533441 - DNA, 33 bp, Homo sapien
gatttgtctaagcaaggccacaaagaaagaaag

SEQ ID NO: 533442 - DNA, 33 bp, Homo sapien
gatttgtctaagcaagtccacaaagaaagaaag

SEQ ID NO: 533443 - DNA, 33 bp, Homo sapien
atcaggaaaattccaactctgcctcttctaggg

SEQ ID NO: 533444 - DNA, 33 bp, Homo sapien
atcaggaaaattccaattctgcctcttctaggg

SEQ ID NO: 533445 - DNA, 33 bp, Homo sapien
tgtgggcatagtagaacaatagacaatggacac

SEQ ID NO: 533446 - DNA, 33 bp, Homo sapien
tgtgggcatagtagaataatagacaatggacac

SEQ ID NO: 533447 - DNA, 33 bp, Homo sapien
tgattagtgattttcaccattttttcatatgct

SEQ ID NO: 533448 - DNA, 33 bp, Homo sapien
tgattagtgattttcagcattttttcatatgct

SEQ ID NO: 533449 - DNA, 33 bp, Homo sapien
ttatccaatttctcaaaaccatttattgaatag

SEQ ID NO: 533450 - DNA, 33 bp, Homo sapien
ttatccaatttctcaacaccatttattgaatag

SEQ ID NO: 533451 - DNA, 33 bp, Homo sapien
ttgtcagtaccttggcaagaagcctggttgcct

SEQ ID NO: 533452 - DNA, 33 bp, Homo sapien
ttgtcagtaccttggctagaagcctggttgcct

SEQ ID NO: 533453 - DNA, 33 bp, Homo sapien
ccaagcaatcacaaaaaccaaaagcaccactga

SEQ ID NO: 533454 - DNA, 33 bp, Homo sapien
ccaagcaatcacaaaacccaaaagcaccactga

SEQ ID NO: 533455 - DNA, 33 bp, Homo sapien
gaagaaaaaaacctcaactcatgttcaaagaat

SEQ ID NO: 533456 - DNA, 33 bp, Homo sapien
gaagaaaaaaacctcatctcatgttcaaagaat

SEQ ID NO: 533457 - DNA, 33 bp, Homo sapien
tcttctaagcagcttcaacataccactctctga

SEQ ID NO: 533458 - DNA, 33 bp, Homo sapien
tcttctaagcagcttccacataccactctctga

SEQ ID NO: 533459 - DNA, 33 bp, Homo sapien
atatctctaatattctaaaaaaagttgcactct

SEQ ID NO: 533460 - DNA, 33 bp, Homo sapien
atatctctaatattcttaaaaaagttgcactct

SEQ ID NO: 533461 - DNA, 33 bp, Homo sapien
gatccctttttctttgcagtatgtaagggatca

SEQ ID NO: 533462 - DNA, 33 bp, Homo sapien
gatccctttttctttgtagtatgtaagggatca

SEQ ID NO: 533463 - DNA, 33 bp, Homo sapien
cgcaccagagttttagaatgtatggatttcatt

SEQ ID NO: 533464 - DNA, 33 bp, Homo sapien
cgcaccagagttttagtatgtatggatttcatt

SEQ ID NO: 533465 - DNA, 33 bp, Homo sapien
gtagttcagctttataggtctttgtaatatcca

SEQ ID NO: 533466 - DNA, 33 bp, Homo sapien
gtagttcagctttatatgtctttgtaatatcca

SEQ ID NO: 533467 - DNA, 33 bp, Homo sapien
gtcactgttgctttaccacatatgactgttttg

SEQ ID NO: 533468 - DNA, 33 bp, Homo sapien
gtcactgttgctttactacatatgactgttttg

SEQ ID NO: 533469 - DNA, 33 bp, Homo sapien
gcaaatgagaattaaccggtatagaaacctttg

SEQ ID NO: 533470 - DNA, 33 bp, Homo sapien
gcaaatgagaattaactggtatagaaacctttg

SEQ ID NO: 533471 - DNA, 33 bp, Homo sapien
tacttttattattgccaaccttctatttcatag

SEQ ID NO: 533472 - DNA, 33 bp, Homo sapien
tacttttattattgccgaccttctatttcatag

SEQ ID NO: 533473 - DNA, 33 bp, Homo sapien
ttaaagtgttgaaagacaaaattatctacctga

SEQ ID NO: 533474 - DNA, 33 bp, Homo sapien
ttaaagtgttgaaagagaaaattatctacctga

SEQ ID NO: 533475 - DNA, 33 bp, Homo sapien
tttagcaaaaaactacagagttatcaaggtctt

SEQ ID NO: 533476 - DNA, 33 bp, Homo sapien
tttagcaaaaaactacggagttatcaaggtctt

SEQ ID NO: 533477 - DNA, 33 bp, Homo sapien
aatcaatgcgataccaatcaaaaccacatccaa

SEQ ID NO: 533478 - DNA, 33 bp, Homo sapien
aatcaatgcgataccagtcaaaaccacatccaa

SEQ ID NO: 533479 - DNA, 33 bp, Homo sapien
aggtcaataacagagacgaaattttgatttcta

SEQ ID NO: 533480 - DNA, 33 bp, Homo sapien
aggtcaataacagagatgaaattttgatttcta

SEQ ID NO: 533481 - DNA, 33 bp, Homo sapien
tcttggttgataagccaatataagcaaatatgg

SEQ ID NO: 533482 - DNA, 33 bp, Homo sapien
tcttggttgataagccgatataagcaaatatgg

SEQ ID NO: 533483 - DNA, 33 bp, Homo sapien
tcacataggcaaggcaatatttaataagatcaa

SEQ ID NO: 533484 - DNA, 33 bp, Homo sapien
tcacataggcaaggcagtatttaataagatcaa

SEQ ID NO: 533485 - DNA, 33 bp, Homo sapien
aatgtaaaccagctacacatgaacaggaattat

SEQ ID NO: 533486 - DNA, 33 bp, Homo sapien
aatgtaaaccagctacgcatgaacaggaattat

SEQ ID NO: 533487 - DNA, 33 bp, Homo sapien
cactctgttttttattcaaaagtgtagtccatt

SEQ ID NO: 533488 - DNA, 33 bp, Homo sapien
cactctgttttttattgaaaagtgtagtccatt

SEQ ID NO: 533489 - DNA, 33 bp, Homo sapien
atgcacagaatttgagaacattatcacctattc

SEQ ID NO: 533490 - DNA, 33 bp, Homo sapien
atgcacagaatttgaggacattatcacctattc

SEQ ID NO: 533491 - DNA, 33 bp, Homo sapien
ttagagacatcataagaaataaaaactgtggcc

SEQ ID NO: 533492 - DNA, 33 bp, Homo sapien
ttagagacatcataaggaataaaaactgtggcc

SEQ ID NO: 533493 - DNA, 33 bp, Homo sapien
ctcgtgccaacacttacatgttagtagtcaaat

SEQ ID NO: 533494 - DNA, 33 bp, Homo sapien
ctcgtgccaacacttatatgttagtagtcaaat

SEQ ID NO: 533495 - DNA, 33 bp, Homo sapien
ggaataatgtaggaaaccctcaggtacctctta

SEQ ID NO: 533496 - DNA, 33 bp, Homo sapien
ggaataatgtaggaaatcctcaggtacctctta

SEQ ID NO: 533497 - DNA, 33 bp, Homo sapien
aatagatataatgtacggagaaggatccacctt

SEQ ID NO: 533498 - DNA, 33 bp, Homo sapien
aatagatataatgtactgagaaggatccacctt

SEQ ID NO: 533499 - DNA, 33 bp, Homo sapien
aaagcccaggctataacctataatgctctatgc

SEQ ID NO: 533500 - DNA, 33 bp, Homo sapien
aaagcccaggctataatctataatgctctatgc

SEQ ID NO: 533501 - DNA, 33 bp, Homo sapien
gagtcatttctcagtacgaccatgtgacttttg

SEQ ID NO: 533502 - DNA, 33 bp, Homo sapien
gagtcatttctcagtatgaccatgtgacttttg

SEQ ID NO: 533503 - DNA, 33 bp, Homo sapien
cataaggatgtgaagacgtttcaacttgtccat

SEQ ID NO: 533504 - DNA, 33 bp, Homo sapien
cataaggatgtgaagatgtttcaacttgtccat

SEQ ID NO: 533505 - DNA, 33 bp, Homo sapien
actatgtaaagctccactgagtcatctcggtcc

SEQ ID NO: 533506 - DNA, 33 bp, Homo sapien
actatgtaaagctccattgagtcatctcggtcc

SEQ ID NO: 533507 - DNA, 33 bp, Homo sapien
ttctgtgagattcaggcagaagagccacttata

SEQ ID NO: 533508 - DNA, 33 bp, Homo sapien
ttctgtgagattcaggtagaagagccacttata

SEQ ID NO: 533509 - DNA, 33 bp, Homo sapien
tgttatcagtcacacaacatttcaaggacacat

SEQ ID NO: 533510 - DNA, 33 bp, Homo sapien
tgttatcagtcacacagcatttcaaggacacat

SEQ ID NO: 533511 - DNA, 33 bp, Homo sapien
attttattcattgttagggccaaagaggctaga

SEQ ID NO: 533512 - DNA, 33 bp, Homo sapien
attttattcattgttatggccaaagaggctaga

SEQ ID NO: 533513 - DNA, 33 bp, Homo sapien
accctcaaacatgagacgaatgaattgcaagta

SEQ ID NO: 533514 - DNA, 33 bp, Homo sapien
accctcaaacatgagatgaatgaattgcaagta

SEQ ID NO: 533515 - DNA, 33 bp, Homo sapien
caccaagctttgacagcatctgaacacttattg

SEQ ID NO: 533516 - DNA, 33 bp, Homo sapien
caccaagctttgacagtatctgaacacttattg

SEQ ID NO: 533517 - DNA, 33 bp, Homo sapien
ttttggtagtttccatgaagtagttggttatat

SEQ ID NO: 533518 - DNA, 33 bp, Homo sapien
ttttggtagtttccattaagtagttggttatat

SEQ ID NO: 533519 - DNA, 33 bp, Homo sapien
tttagaatggattgtcaaaacaacatctggttt

SEQ ID NO: 533520 - DNA, 33 bp, Homo sapien
tttagaatggattgtcgaaacaacatctggttt

SEQ ID NO: 533521 - DNA, 33 bp, Homo sapien
aaagagtctgaaaacacattgagtaatggagaa

SEQ ID NO: 533522 - DNA, 33 bp, Homo sapien
aaagagtctgaaaacatattgagtaatggagaa

SEQ ID NO: 533523 - DNA, 33 bp, Homo sapien
atctggtagtaaagaactagaagaaagtgcatt

SEQ ID NO: 533524 - DNA, 33 bp, Homo sapien
atctggtagtaaagaattagaagaaagtgcatt

SEQ ID NO: 533525 - DNA, 33 bp, Homo sapien
catacttttgctaaaaatgactaggaatgattg

SEQ ID NO: 533526 - DNA, 33 bp, Homo sapien
catacttttgctaaaattgactaggaatgattg

SEQ ID NO: 533527 - DNA, 33 bp, Homo sapien
tgttaacatatgctaaataaatcatggcaattt

SEQ ID NO: 533528 - DNA, 33 bp, Homo sapien
tgttaacatatgctaagtaaatcatggcaattt

SEQ ID NO: 533529 - DNA, 33 bp, Homo sapien
caaatgcatagcaaaaagcagcggaaatttgta

SEQ ID NO: 533530 - DNA, 33 bp, Homo sapien
caaatgcatagcaaaaggcagcggaaatttgta

SEQ ID NO: 533531 - DNA, 33 bp, Homo sapien
tacacatcaggactccacatctgcaggtgggag

SEQ ID NO: 533532 - DNA, 33 bp, Homo sapien
tacacatcaggactccgcatctgcaggtgggag

SEQ ID NO: 533533 - DNA, 33 bp, Homo sapien
gtaaatgtattcactcaccaaccaggaaggcct

SEQ ID NO: 533534 - DNA, 33 bp, Homo sapien
gtaaatgtattcactcgccaaccaggaaggcct

SEQ ID NO: 533535 - DNA, 33 bp, Homo sapien
tgattgaggttgataactgaacaatgcagttca

SEQ ID NO: 533536 - DNA, 33 bp, Homo sapien
tgattgaggttgataattgaacaatgcagttca

SEQ ID NO: 533537 - DNA, 33 bp, Homo sapien
ttgctctctttactaccacctccaacacatagc

SEQ ID NO: 533538 - DNA, 33 bp, Homo sapien
ttgctctctttactactacctccaacacatagc

SEQ ID NO: 533539 - DNA, 33 bp, Homo sapien
cagagacatataggctcacttagttacactagt

SEQ ID NO: 533540 - DNA, 33 bp, Homo sapien
cagagacatataggcttacttagttacactagt

SEQ ID NO: 533541 - DNA, 33 bp, Homo sapien
tgaagctttgccatagaccatgatgaaaactaa

SEQ ID NO: 533542 - DNA, 33 bp, Homo sapien
tgaagctttgccataggccatgatgaaaactaa

SEQ ID NO: 533543 - DNA, 33 bp, Homo sapien
acccaaataatttacaatatcatgcattttaca

SEQ ID NO: 533544 - DNA, 33 bp, Homo sapien
acccaaataatttacagtatcatgcattttaca

SEQ ID NO: 533545 - DNA, 33 bp, Homo sapien
gagagcgaggtttttcacgcactacatgagtga

SEQ ID NO: 533546 - DNA, 33 bp, Homo sapien
gagagcgaggtttttcgcgcactacatgagtga

SEQ ID NO: 533547 - DNA, 33 bp, Homo sapien
caggtttgtaacaatcagaatctagtctttgta

SEQ ID NO: 533548 - DNA, 33 bp, Homo sapien
caggtttgtaacaatctgaatctagtctttgta

SEQ ID NO: 533549 - DNA, 33 bp, Homo sapien
aacagcaaagttttcccagaaacagttatttct

SEQ ID NO: 533550 - DNA, 33 bp, Homo sapien
aacagcaaagttttcctagaaacagttatttct

SEQ ID NO: 533551 - DNA, 33 bp, Homo sapien
aataatgttacccaaagatgtagcaacctaata

SEQ ID NO: 533552 - DNA, 33 bp, Homo sapien
aataatgttacccaaatatgtagcaacctaata

SEQ ID NO: 533553 - DNA, 33 bp, Homo sapien
ttatcttggctagatgaactgccaaaaactaaa

SEQ ID NO: 533554 - DNA, 33 bp, Homo sapien
ttatcttggctagatgtactgccaaaaactaaa

SEQ ID NO: 533555 - DNA, 33 bp, Homo sapien
ttggtttagatccctaccagaaattgactggat

SEQ ID NO: 533556 - DNA, 33 bp, Homo sapien
ttggtttagatccctatcagaaattgactggat

SEQ ID NO: 533557 - DNA, 33 bp, Homo sapien
ggattatgttaaaaggccaaatctaacagtaat

SEQ ID NO: 533558 - DNA, 33 bp, Homo sapien
ggattatgttaaaaggtcaaatctaacagtaat

SEQ ID NO: 533559 - DNA, 33 bp, Homo sapien
atagttctcagaaaaacaggaatagagagaaac

SEQ ID NO: 533560 - DNA, 33 bp, Homo sapien
atagttctcagaaaaataggaatagagagaaac

SEQ ID NO: 533561 - DNA, 33 bp, Homo sapien
aacaggggctactgacaaaagctcctcagcagg

SEQ ID NO: 533562 - DNA, 33 bp, Homo sapien
aacaggggctactgacgaaagctcctcagcagg

SEQ ID NO: 533563 - DNA, 33 bp, Homo sapien
aaataaaaatgttggcaaattccattcagtcag

SEQ ID NO: 533564 - DNA, 33 bp, Homo sapien
aaataaaaatgttggcgaattccattcagtcag

SEQ ID NO: 533565 - DNA, 33 bp, Homo sapien
catcctaagaacagtacagttgacctcagtgcc

SEQ ID NO: 533566 - DNA, 33 bp, Homo sapien
catcctaagaacagtatagttgacctcagtgcc

SEQ ID NO: 533567 - DNA, 33 bp, Homo sapien
gataatccaaaattacaagatagatttcaaaac

SEQ ID NO: 533568 - DNA, 33 bp, Homo sapien
gataatccaaaattacgagatagatttcaaaac

SEQ ID NO: 533569 - DNA, 33 bp, Homo sapien
gcggttgaagttgtgtcaatgaaaatgtttcag

SEQ ID NO: 533570 - DNA, 33 bp, Homo sapien
gcggttgaagttgtgtgaatgaaaatgtttcag

SEQ ID NO: 533571 - DNA, 33 bp, Homo sapien
aaacacaatcaggaataacaaaggcgacattac

SEQ ID NO: 533572 - DNA, 33 bp, Homo sapien
aaacacaatcaggaatgacaaaggcgacattac

SEQ ID NO: 533573 - DNA, 33 bp, Homo sapien
tcttgtagtatagttccaagtagggtaatgcct

SEQ ID NO: 533574 - DNA, 33 bp, Homo sapien
tcttgtagtatagttcgaagtagggtaatgcct

SEQ ID NO: 533575 - DNA, 33 bp, Homo sapien
atatcgttgggagcaactgggagttttcaaaca

SEQ ID NO: 533576 - DNA, 33 bp, Homo sapien
atatcgttgggagcaagtgggagttttcaaaca

SEQ ID NO: 533577 - DNA, 33 bp, Homo sapien
aacctatttccaggaaacctattgtcacttttt

SEQ ID NO: 533578 - DNA, 33 bp, Homo sapien
aacctatttccaggaagcctattgtcacttttt

SEQ ID NO: 533579 - DNA, 33 bp, Homo sapien
agataacacatctgtcacttttaaacctgataa

SEQ ID NO: 533580 - DNA, 33 bp, Homo sapien
agataacacatctgtcgcttttaaacctgataa

SEQ ID NO: 533581 - DNA, 33 bp, Homo sapien
ctatcaaggaaaccaccgtattgtaagcacctt

SEQ ID NO: 533582 - DNA, 33 bp, Homo sapien
ctatcaaggaaaccactgtattgtaagcacctt

SEQ ID NO: 533583 - DNA, 33 bp, Homo sapien
aaactggaatctatggaaatactgactctaaaa

SEQ ID NO: 533584 - DNA, 33 bp, Homo sapien
aaactggaatctatggcaatactgactctaaaa

SEQ ID NO: 533585 - DNA, 33 bp, Homo sapien
aattgataaatctcccagcaaaataacaaacaa

SEQ ID NO: 533586 - DNA, 33 bp, Homo sapien
aattgataaatctcccggcaaaataacaaacaa

SEQ ID NO: 533587 - DNA, 33 bp, Homo sapien
tccttttggcaggggcacaattcaatccataaa

SEQ ID NO: 533588 - DNA, 33 bp, Homo sapien
tccttttggcaggggcgcaattcaatccataaa

SEQ ID NO: 533589 - DNA, 33 bp, Homo sapien
ttttgagctttttaaaattaactcagatgggca

SEQ ID NO: 533590 - DNA, 33 bp, Homo sapien
ttttgagctttttaaatttaactcagatgggca

SEQ ID NO: 533591 - DNA, 33 bp, Homo sapien
tgtttttaaaagaccagtagtccattctacctt

SEQ ID NO: 533592 - DNA, 33 bp, Homo sapien
tgtttttaaaagaccattagtccattctacctt

SEQ ID NO: 533593 - DNA, 33 bp, Homo sapien
ctccttttctgtgacaccttatggctctaagtc

SEQ ID NO: 533594 - DNA, 33 bp, Homo sapien
ctccttttctgtgacatcttatggctctaagtc

SEQ ID NO: 533595 - DNA, 33 bp, Homo sapien
ttttagtgaaacagagacagccaagggagagac

SEQ ID NO: 533596 - DNA, 33 bp, Homo sapien
ttttagtgaaacagagtcagccaagggagagac

SEQ ID NO: 533597 - DNA, 33 bp, Homo sapien
ctggtgtgtctgagcactgaacttttaaaaact

SEQ ID NO: 533598 - DNA, 33 bp, Homo sapien
ctggtgtgtctgagcattgaacttttaaaaact

SEQ ID NO: 533599 - DNA, 33 bp, Homo sapien
ttgatgctgaaagacccgaaggaattctggtta

SEQ ID NO: 533600 - DNA, 33 bp, Homo sapien
ttgatgctgaaagacctgaaggaattctggtta

SEQ ID NO: 533601 - DNA, 33 bp, Homo sapien
ggctgtgagaggcgaaatcacataggaaaaatt

SEQ ID NO: 533602 - DNA, 33 bp, Homo sapien
ggctgtgagaggcgaagtcacataggaaaaatt

SEQ ID NO: 533603 - DNA, 33 bp, Homo sapien
tttaatacctgacaaactacagttgcaataccc

SEQ ID NO: 533604 - DNA, 33 bp, Homo sapien
tttaatacctgacaaagtacagttgcaataccc

SEQ ID NO: 533605 - DNA, 33 bp, Homo sapien
acaaggagatgcttcaaagatcctaagaaagtg

SEQ ID NO: 533606 - DNA, 33 bp, Homo sapien
acaaggagatgcttcagagatcctaagaaagtg

SEQ ID NO: 533607 - DNA, 33 bp, Homo sapien
tagagtcaaagaatcaataacaaaatgccacat

SEQ ID NO: 533608 - DNA, 33 bp, Homo sapien
tagagtcaaagaatcagtaacaaaatgccacat

SEQ ID NO: 533609 - DNA, 33 bp, Homo sapien
agagtttcttgcagccagatactgtgggtcact

SEQ ID NO: 533610 - DNA, 33 bp, Homo sapien
agagtttcttgcagccggatactgtgggtcact

SEQ ID NO: 533611 - DNA, 33 bp, Homo sapien
ttacctgaactatatcacctcgaaagaaaaaga

SEQ ID NO: 533612 - DNA, 33 bp, Homo sapien
ttacctgaactatatcgcctcgaaagaaaaaga

SEQ ID NO: 533613 - DNA, 33 bp, Homo sapien
ttcggtatgttgaccacgagttaatgactcatt

SEQ ID NO: 533614 - DNA, 33 bp, Homo sapien
ttcggtatgttgaccatgagttaatgactcatt

SEQ ID NO: 533615 - DNA, 33 bp, Homo sapien
ttccttgatcactgtaccctggaatacctcctt

SEQ ID NO: 533616 - DNA, 33 bp, Homo sapien
ttccttgatcactgtatcctggaatacctcctt

SEQ ID NO: 533617 - DNA, 33 bp, Homo sapien
ccatttgtagttgtcaccctgaatttgtgatat

SEQ ID NO: 533618 - DNA, 33 bp, Homo sapien
ccatttgtagttgtcagcctgaatttgtgatat

SEQ ID NO: 533619 - DNA, 33 bp, Homo sapien
accagctaagtaacagacaaacagatcaatgga

SEQ ID NO: 533620 - DNA, 33 bp, Homo sapien
accagctaagtaacaggcaaacagatcaatgga

SEQ ID NO: 533621 - DNA, 33 bp, Homo sapien
aagtccattgctttccaatacatgactaatgaa

SEQ ID NO: 533622 - DNA, 33 bp, Homo sapien
aagtccattgctttcctatacatgactaatgaa

SEQ ID NO: 533623 - DNA, 33 bp, Homo sapien
ttcaaatgttgaaccaatcttgaacatctgaga

SEQ ID NO: 533624 - DNA, 33 bp, Homo sapien
ttcaaatgttgaaccagtcttgaacatctgaga

SEQ ID NO: 533625 - DNA, 33 bp, Homo sapien
tttattatgctttttacgcatggttggatttga

SEQ ID NO: 533626 - DNA, 33 bp, Homo sapien
tttattatgctttttatgcatggttggatttga

SEQ ID NO: 533627 - DNA, 33 bp, Homo sapien
cactagatgcttgaaacgcctgtaagaaaagaa

SEQ ID NO: 533628 - DNA, 33 bp, Homo sapien
cactagatgcttgaaatgcctgtaagaaaagaa

SEQ ID NO: 533629 - DNA, 33 bp, Homo sapien
tttatagattcagacacgcataataagaaatag

SEQ ID NO: 533630 - DNA, 33 bp, Homo sapien
tttatagattcagacaggcataataagaaatag

SEQ ID NO: 533631 - DNA, 33 bp, Homo sapien
cactcattacactacactagggtccatctatta

SEQ ID NO: 533632 - DNA, 33 bp, Homo sapien
cactcattacactacagtagggtccatctatta

SEQ ID NO: 533633 - DNA, 33 bp, Homo sapien
atcttcagacaaaaataaggaaagggcactgtg

SEQ ID NO: 533634 - DNA, 33 bp, Homo sapien
atcttcagacaaaaatgaggaaagggcactgtg

SEQ ID NO: 533635 - DNA, 33 bp, Homo sapien
tctttgcagatgtacccaaaatgtaatttaaga

SEQ ID NO: 533636 - DNA, 33 bp, Homo sapien
tctttgcagatgtacctaaaatgtaatttaaga

SEQ ID NO: 533637 - DNA, 33 bp, Homo sapien
aatgccaacaggtttccatttattgtgtacttt

SEQ ID NO: 533638 - DNA, 33 bp, Homo sapien
aatgccaacaggtttctatttattgtgtacttt

SEQ ID NO: 533639 - DNA, 33 bp, Homo sapien
aatgaaatagactgcaatgagacaaaactgaat

SEQ ID NO: 533640 - DNA, 33 bp, Homo sapien
aatgaaatagactgcagtgagacaaaactgaat

SEQ ID NO: 533641 - DNA, 33 bp, Homo sapien
agcaagccagcttgccaacacaaatcacaggaa

SEQ ID NO: 533642 - DNA, 33 bp, Homo sapien
agcaagccagcttgccgacacaaatcacaggaa

SEQ ID NO: 533643 - DNA, 33 bp, Homo sapien
agtttctaaaaggtgaacaaccaactgatctta

SEQ ID NO: 533644 - DNA, 33 bp, Homo sapien
agtttctaaaaggtgatcaaccaactgatctta

SEQ ID NO: 533645 - DNA, 33 bp, Homo sapien
ttggagtccaaagtcacggttaaaatgtattct

SEQ ID NO: 533646 - DNA, 33 bp, Homo sapien
ttggagtccaaagtcatggttaaaatgtattct

SEQ ID NO: 533647 - DNA, 33 bp, Homo sapien
ctgtttgtgctgatcacactttgcaaatgccca

SEQ ID NO: 533648 - DNA, 33 bp, Homo sapien
ctgtttgtgctgatcatactttgcaaatgccca

SEQ ID NO: 533649 - DNA, 33 bp, Homo sapien
ggaaaccaataaccaactgcagaaatattattt

SEQ ID NO: 533650 - DNA, 33 bp, Homo sapien
ggaaaccaataaccaattgcagaaatattattt

SEQ ID NO: 533651 - DNA, 33 bp, Homo sapien
atgtaggcctcagccaaatttgtagtcagccag

SEQ ID NO: 533652 - DNA, 33 bp, Homo sapien
atgtaggcctcagccagatttgtagtcagccag

SEQ ID NO: 533653 - DNA, 33 bp, Homo sapien
taagtggccttttcaacacataaacatttgaca

SEQ ID NO: 533654 - DNA, 33 bp, Homo sapien
taagtggccttttcaatacataaacatttgaca

SEQ ID NO: 533655 - DNA, 33 bp, Homo sapien
atggtggtagagaaccaaagtttattagcatct

SEQ ID NO: 533656 - DNA, 33 bp, Homo sapien
atggtggtagagaaccgaagtttattagcatct

SEQ ID NO: 533657 - DNA, 33 bp, Homo sapien
tattctttccatgtaacgatgcagcaaatacat

SEQ ID NO: 533658 - DNA, 33 bp, Homo sapien
tattctttccatgtaatgatgcagcaaatacat

SEQ ID NO: 533659 - DNA, 33 bp, Homo sapien
caggagcctaactatacgacacaattatttaaa

SEQ ID NO: 533660 - DNA, 33 bp, Homo sapien
caggagcctaactatatgacacaattatttaaa

SEQ ID NO: 533661 - DNA, 33 bp, Homo sapien
gatatattgaggagcccagtaagatcttaaatc

SEQ ID NO: 533662 - DNA, 33 bp, Homo sapien
gatatattgaggagcctagtaagatcttaaatc

SEQ ID NO: 533663 - DNA, 33 bp, Homo sapien
tctgctgggatatgcaaccacaagggctagcct

SEQ ID NO: 533664 - DNA, 33 bp, Homo sapien
tctgctgggatatgcagccacaagggctagcct

SEQ ID NO: 533665 - DNA, 33 bp, Homo sapien
gcacatttgaagaaacaaggacttttccagtct

SEQ ID NO: 533666 - DNA, 33 bp, Homo sapien
gcacatttgaagaaaccaggacttttccagtct

SEQ ID NO: 533667 - DNA, 33 bp, Homo sapien
atctttgcatttgctcaagaaaccggactgtcc

SEQ ID NO: 533668 - DNA, 33 bp, Homo sapien
atctttgcatttgctcgagaaaccggactgtcc

SEQ ID NO: 533669 - DNA, 33 bp, Homo sapien
aagtggaaactatatacctggctttctatacac

SEQ ID NO: 533670 - DNA, 33 bp, Homo sapien
aagtggaaactatatatctggctttctatacac

SEQ ID NO: 533671 - DNA, 33 bp, Homo sapien
aaaatactgttctagacgagtgaaactccattt

SEQ ID NO: 533672 - DNA, 33 bp, Homo sapien
aaaatactgttctagatgagtgaaactccattt

SEQ ID NO: 533673 - DNA, 33 bp, Homo sapien
tgtaaatctgtgatcacaaacgagtttacagac

SEQ ID NO: 533674 - DNA, 33 bp, Homo sapien
tgtaaatctgtgatcataaacgagtttacagac

SEQ ID NO: 533675 - DNA, 33 bp, Homo sapien
ataatgtctgttttacgcctttaacttgctatg

SEQ ID NO: 533676 - DNA, 33 bp, Homo sapien
ataatgtctgttttactcctttaacttgctatg

SEQ ID NO: 533677 - DNA, 33 bp, Homo sapien
tgtttctccaaaaatacgagagcaactatagag

SEQ ID NO: 533678 - DNA, 33 bp, Homo sapien
tgtttctccaaaaatatgagagcaactatagag

SEQ ID NO: 533679 - DNA, 33 bp, Homo sapien
tgaaaatgaggcctaccgcattaagccactaaa

SEQ ID NO: 533680 - DNA, 33 bp, Homo sapien
tgaaaatgaggcctactgcattaagccactaaa

SEQ ID NO: 533681 - DNA, 33 bp, Homo sapien
gggttttagaattcacaggttaataatggcatg

SEQ ID NO: 533682 - DNA, 33 bp, Homo sapien
gggttttagaattcacgggttaataatggcatg

SEQ ID NO: 533683 - DNA, 33 bp, Homo sapien
cattgctataaaactacctgaaaatgtggaagt

SEQ ID NO: 533684 - DNA, 33 bp, Homo sapien
cattgctataaaactatctgaaaatgtggaagt

SEQ ID NO: 533685 - DNA, 33 bp, Homo sapien
ccaaagtgatatcccaaaaggagacatttcagt

SEQ ID NO: 533686 - DNA, 33 bp, Homo sapien
ccaaagtgatatcccagaaggagacatttcagt

SEQ ID NO: 533687 - DNA, 33 bp, Homo sapien
aagaaatcctgattcacgttaaatgtgtttgta

SEQ ID NO: 533688 - DNA, 33 bp, Homo sapien
aagaaatcctgattcatgttaaatgtgtttgta

SEQ ID NO: 533689 - DNA, 33 bp, Homo sapien
ctatgagcagccaaatgaaccacacagcctctt

SEQ ID NO: 533690 - DNA, 33 bp, Homo sapien
ctatgagcagccaaattaaccacacagcctctt

SEQ ID NO: 533691 - DNA, 33 bp, Homo sapien
tcctggggctctactgccactctgctatgccca

SEQ ID NO: 533692 - DNA, 33 bp, Homo sapien
tcctggggctctactgtcactctgctatgccca

SEQ ID NO: 533693 - DNA, 33 bp, Homo sapien
tgaaagtctattatacaaaattctaggctttta

SEQ ID NO: 533694 - DNA, 33 bp, Homo sapien
tgaaagtctattataccaaattctaggctttta

SEQ ID NO: 533695 - DNA, 33 bp, Homo sapien
gaagactcaagctcaaataagactgagcatcac

SEQ ID NO: 533696 - DNA, 33 bp, Homo sapien
gaagactcaagctcaagtaagactgagcatcac

SEQ ID NO: 533697 - DNA, 33 bp, Homo sapien
cttgtaatcagcagtcactccagagaatgaaga

SEQ ID NO: 533698 - DNA, 33 bp, Homo sapien
cttgtaatcagcagtcgctccagagaatgaaga

SEQ ID NO: 533699 - DNA, 33 bp, Homo sapien
acatttcacacgtagcccctcctaagtgctggc

SEQ ID NO: 533700 - DNA, 33 bp, Homo sapien
acatttcacacgtagcgcctcctaagtgctggc

SEQ ID NO: 533701 - DNA, 33 bp, Homo sapien
agtaacctcatcgtaaatagaagagcatctgta

SEQ ID NO: 533702 - DNA, 33 bp, Homo sapien
agtaacctcatcgtaagtagaagagcatctgta

SEQ ID NO: 533703 - DNA, 33 bp, Homo sapien
gtcctcttttgagaagcatccgtttagatcctt

SEQ ID NO: 533704 - DNA, 33 bp, Homo sapien
gtcctcttttgagaagtatccgtttagatcctt

SEQ ID NO: 533705 - DNA, 33 bp, Homo sapien
tgtcattgcactcagaaccttgctgggcacaaa

SEQ ID NO: 533706 - DNA, 33 bp, Homo sapien
tgtcattgcactcagagccttgctgggcacaaa

SEQ ID NO: 533707 - DNA, 33 bp, Homo sapien
gaaaaattcaatgaacactatcatgaacatgac

SEQ ID NO: 533708 - DNA, 33 bp, Homo sapien
gaaaaattcaatgaacgctatcatgaacatgac

SEQ ID NO: 533709 - DNA, 33 bp, Homo sapien
aggataactatagctaaggagttgttatgagaa

SEQ ID NO: 533710 - DNA, 33 bp, Homo sapien
aggataactatagctatggagttgttatgagaa

SEQ ID NO: 533711 - DNA, 33 bp, Homo sapien
tcatttaagctgggtacggagtttgaattatat

SEQ ID NO: 533712 - DNA, 33 bp, Homo sapien
tcatttaagctgggtatggagtttgaattatat

SEQ ID NO: 533713 - DNA, 33 bp, Homo sapien
gcttatggtggactaaactggtacccaaaggaa

SEQ ID NO: 533714 - DNA, 33 bp, Homo sapien
gcttatggtggactaatctggtacccaaaggaa

SEQ ID NO: 533715 - DNA, 33 bp, Homo sapien
catatattttccaaaactgataagccatggtga

SEQ ID NO: 533716 - DNA, 33 bp, Homo sapien
catatattttccaaaattgataagccatggtga

SEQ ID NO: 533717 - DNA, 33 bp, Homo sapien
gtataatagagtttacaaaaggttcaagaaatc

SEQ ID NO: 533718 - DNA, 33 bp, Homo sapien
gtataatagagtttacgaaaggttcaagaaatc

SEQ ID NO: 533719 - DNA, 33 bp, Homo sapien
aaagaactgtcgatccagactctgacatccaat

SEQ ID NO: 533720 - DNA, 33 bp, Homo sapien
aaagaactgtcgatccggactctgacatccaat

SEQ ID NO: 533721 - DNA, 33 bp, Homo sapien
ataaatactggaagaacggttggcacaaacccc

SEQ ID NO: 533722 - DNA, 33 bp, Homo sapien
ataaatactggaagaatggttggcacaaacccc

SEQ ID NO: 533723 - DNA, 33 bp, Homo sapien
ttctgtaattttttgacagatactggacattgt

SEQ ID NO: 533724 - DNA, 33 bp, Homo sapien
ttctgtaattttttgatagatactggacattgt

SEQ ID NO: 533725 - DNA, 33 bp, Homo sapien
gatcattttacctccacgccttgtgactctgaa

SEQ ID NO: 533726 - DNA, 33 bp, Homo sapien
gatcattttacctccatgccttgtgactctgaa

SEQ ID NO: 533727 - DNA, 33 bp, Homo sapien
taccagagatagaaggacattatacaattaccc

SEQ ID NO: 533728 - DNA, 33 bp, Homo sapien
taccagagatagaagggcattatacaattaccc

SEQ ID NO: 533729 - DNA, 33 bp, Homo sapien
tgtgagccactctacccggactcattattcatc

SEQ ID NO: 533730 - DNA, 33 bp, Homo sapien
tgtgagccactctacctggactcattattcatc

SEQ ID NO: 533731 - DNA, 33 bp, Homo sapien
ctaggaagtcacacagcatagtctttgttttgt

SEQ ID NO: 533732 - DNA, 33 bp, Homo sapien
ctaggaagtcacacaggatagtctttgttttgt

SEQ ID NO: 533733 - DNA, 33 bp, Homo sapien
aaaatggactgtgccaacttattatgggactaa

SEQ ID NO: 533734 - DNA, 33 bp, Homo sapien
aaaatggactgtgccaccttattatgggactaa

SEQ ID NO: 533735 - DNA, 33 bp, Homo sapien
caatggcaaaagattcacaaattatatcttaga

SEQ ID NO: 533736 - DNA, 33 bp, Homo sapien
caatggcaaaagattcgcaaattatatcttaga

SEQ ID NO: 533737 - DNA, 33 bp, Homo sapien
gaatacctaattttcacactgtcagccaaaagg

SEQ ID NO: 533738 - DNA, 33 bp, Homo sapien
gaatacctaattttcatactgtcagccaaaagg

SEQ ID NO: 533739 - DNA, 33 bp, Homo sapien
catgtttcagcatgaccatggacaaaattcaac

SEQ ID NO: 533740 - DNA, 33 bp, Homo sapien
catgtttcagcatgactatggacaaaattcaac

SEQ ID NO: 533741 - DNA, 33 bp, Homo sapien
ttgtatttggaaatcaataggaatttggagaga

SEQ ID NO: 533742 - DNA, 33 bp, Homo sapien
ttgtatttggaaatcagtaggaatttggagaga

SEQ ID NO: 533743 - DNA, 33 bp, Homo sapien
aataaatggtgccataactattgtctatccata

SEQ ID NO: 533744 - DNA, 33 bp, Homo sapien
aataaatggtgccatacctattgtctatccata

SEQ ID NO: 533745 - DNA, 33 bp, Homo sapien
cccagtggtttagcagccattaggagtacagcc

SEQ ID NO: 533746 - DNA, 33 bp, Homo sapien
cccagtggtttagcagtcattaggagtacagcc

SEQ ID NO: 533747 - DNA, 33 bp, Homo sapien
agagggtcgtgtggcaagaaattgtatgtggca

SEQ ID NO: 533748 - DNA, 33 bp, Homo sapien
agagggtcgtgtggcaggaaattgtatgtggca

SEQ ID NO: 533749 - DNA, 33 bp, Homo sapien
gaatctcataaagtaccagatctgtcatgtttt

SEQ ID NO: 533750 - DNA, 33 bp, Homo sapien
gaatctcataaagtactagatctgtcatgtttt

SEQ ID NO: 533751 - DNA, 33 bp, Homo sapien
ttctgaaagcctgttacgtcaaaataaaagttt

SEQ ID NO: 533752 - DNA, 33 bp, Homo sapien
ttctgaaagcctgttatgtcaaaataaaagttt

SEQ ID NO: 533753 - DNA, 33 bp, Homo sapien
tctgttactaagccacagtacaatgataaaaac

SEQ ID NO: 533754 - DNA, 33 bp, Homo sapien
tctgttactaagccacggtacaatgataaaaac

SEQ ID NO: 533755 - DNA, 33 bp, Homo sapien
aaaaatcaaactaactaaaggactgaatgccta

SEQ ID NO: 533756 - DNA, 33 bp, Homo sapien
aaaaatcaaactaactgaaggactgaatgccta

SEQ ID NO: 533757 - DNA, 33 bp, Homo sapien
tttatttcttgctgagcatgggagttattggga

SEQ ID NO: 533758 - DNA, 33 bp, Homo sapien
tttatttcttgctgagtatgggagttattggga

SEQ ID NO: 533759 - DNA, 33 bp, Homo sapien
agcaagtgctgatgaaatgcaatgttatttatc

SEQ ID NO: 533760 - DNA, 33 bp, Homo sapien
agcaagtgctgatgaagtgcaatgttatttatc

SEQ ID NO: 533761 - DNA, 33 bp, Homo sapien
ataaacaatctaatgacattcagtgccttcaca

SEQ ID NO: 533762 - DNA, 33 bp, Homo sapien
ataaacaatctaatgatattcagtgccttcaca

SEQ ID NO: 533763 - DNA, 33 bp, Homo sapien
gtctggctgagttatccctctggatgtaaactg

SEQ ID NO: 533764 - DNA, 33 bp, Homo sapien
gtctggctgagttatctctctggatgtaaactg

SEQ ID NO: 533765 - DNA, 33 bp, Homo sapien
ttaaatttacaatgcccccaaaattgatattag

SEQ ID NO: 533766 - DNA, 33 bp, Homo sapien
ttaaatttacaatgcctccaaaattgatattag

SEQ ID NO: 533767 - DNA, 33 bp, Homo sapien
acttccttgcacatagacaataaaacacatctg

SEQ ID NO: 533768 - DNA, 33 bp, Homo sapien
acttccttgcacataggcaataaaacacatctg

SEQ ID NO: 533769 - DNA, 33 bp, Homo sapien
aacccacagtagttccacagagaagaaatgaaa

SEQ ID NO: 533770 - DNA, 33 bp, Homo sapien
aacccacagtagttccgcagagaagaaatgaaa

SEQ ID NO: 533771 - DNA, 33 bp, Homo sapien
tttagttgctttaccacgaaaaatcagtcacat

SEQ ID NO: 533772 - DNA, 33 bp, Homo sapien
tttagttgctttaccatgaaaaatcagtcacat

SEQ ID NO: 533773 - DNA, 33 bp, Homo sapien
aattctctgaatacagaaatcacctgatattag

SEQ ID NO: 533774 - DNA, 33 bp, Homo sapien
aattctctgaatacaggaatcacctgatattag

SEQ ID NO: 533775 - DNA, 33 bp, Homo sapien
tggaagaacaacttcacataaaaaggggcaaga

SEQ ID NO: 533776 - DNA, 33 bp, Homo sapien
tggaagaacaacttcagataaaaaggggcaaga

SEQ ID NO: 533777 - DNA, 33 bp, Homo sapien
tctatataagacagataaggcagagttcaaaat

SEQ ID NO: 533778 - DNA, 33 bp, Homo sapien
tctatataagacagatgaggcagagttcaaaat

SEQ ID NO: 533779 - DNA, 33 bp, Homo sapien
atatacataatgcttaccatatgcctggcacta

SEQ ID NO: 533780 - DNA, 33 bp, Homo sapien
atatacataatgcttatcatatgcctggcacta

SEQ ID NO: 533781 - DNA, 33 bp, Homo sapien
tcatcagactggttgaggatcaagttcagtcac

SEQ ID NO: 533782 - DNA, 33 bp, Homo sapien
tcatcagactggttgatgatcaagttcagtcac

SEQ ID NO: 533783 - DNA, 33 bp, Homo sapien
tctctccctatactcgacctgatatttcagttt

SEQ ID NO: 533784 - DNA, 33 bp, Homo sapien
tctctccctatactcgtcctgatatttcagttt

SEQ ID NO: 533785 - DNA, 33 bp, Homo sapien
aaattcaagattaaaacggttttctacctgcat

SEQ ID NO: 533786 - DNA, 33 bp, Homo sapien
aaattcaagattaaaatggttttctacctgcat

SEQ ID NO: 533787 - DNA, 33 bp, Homo sapien
gtttgtgtaacatgggaatgatgtgccactcct

SEQ ID NO: 533788 - DNA, 33 bp, Homo sapien
gtttgtgtaacatggggatgatgtgccactcct

SEQ ID NO: 533789 - DNA, 33 bp, Homo sapien
tgttctccttctttaccggtgactgaaaaggca

SEQ ID NO: 533790 - DNA, 33 bp, Homo sapien
tgttctccttctttactggtgactgaaaaggca

SEQ ID NO: 533791 - DNA, 33 bp, Homo sapien
cttctgggcatttccaatatgtgctaggatgtg

SEQ ID NO: 533792 - DNA, 33 bp, Homo sapien
cttctgggcatttccagtatgtgctaggatgtg

SEQ ID NO: 533793 - DNA, 33 bp, Homo sapien
taatcacatctaacataatacaactttcctttg

SEQ ID NO: 533794 - DNA, 33 bp, Homo sapien
taatcacatctaacatgatacaactttcctttg

SEQ ID NO: 533795 - DNA, 33 bp, Homo sapien
aatgtagattaaggagaattcaatgcaccaaat

SEQ ID NO: 533796 - DNA, 33 bp, Homo sapien
aatgtagattaaggaggattcaatgcaccaaat

SEQ ID NO: 533797 - DNA, 33 bp, Homo sapien
ctggatgaaagtaacacagaaagagagtagaat

SEQ ID NO: 533798 - DNA, 33 bp, Homo sapien
ctggatgaaagtaacatagaaagagagtagaat

SEQ ID NO: 533799 - DNA, 33 bp, Homo sapien
cctacccttatgaaataatcctctcaaggaact

SEQ ID NO: 533800 - DNA, 33 bp, Homo sapien
cctacccttatgaaattatcctctcaaggaact

SEQ ID NO: 533801 - DNA, 33 bp, Homo sapien
tattctgaggaactgaaaaaatgtcagtgaagc

SEQ ID NO: 533802 - DNA, 33 bp, Homo sapien
tattctgaggaactgagaaaatgtcagtgaagc

SEQ ID NO: 533803 - DNA, 33 bp, Homo sapien
gacagctcatgttcccaatgcacttgtagctct

SEQ ID NO: 533804 - DNA, 33 bp, Homo sapien
gacagctcatgttcccgatgcacttgtagctct

SEQ ID NO: 533805 - DNA, 33 bp, Homo sapien
tcaacttttctaccaacgattttgcatttatct

SEQ ID NO: 533806 - DNA, 33 bp, Homo sapien
tcaacttttctaccaatgattttgcatttatct

SEQ ID NO: 533807 - DNA, 33 bp, Homo sapien
gactaataaagttgtacaagagataaatgcaaa

SEQ ID NO: 533808 - DNA, 33 bp, Homo sapien
gactaataaagttgtataagagataaatgcaaa

SEQ ID NO: 533809 - DNA, 33 bp, Homo sapien
ttagcattatgaggaaaaatgaatacttataaa

SEQ ID NO: 533810 - DNA, 33 bp, Homo sapien
ttagcattatgaggaagaatgaatacttataaa

SEQ ID NO: 533811 - DNA, 33 bp, Homo sapien
aaatatttcgtacattcaaccaactgtgcctac

SEQ ID NO: 533812 - DNA, 33 bp, Homo sapien
aaatatttcgtacattgaaccaactgtgcctac

SEQ ID NO: 533813 - DNA, 33 bp, Homo sapien
cagatattctattaacacttccatgaaaaatga

SEQ ID NO: 533814 - DNA, 33 bp, Homo sapien
cagatattctattaacgcttccatgaaaaatga

SEQ ID NO: 533815 - DNA, 33 bp, Homo sapien
aaacacatctcccaaaagttggagtagtgggac

SEQ ID NO: 533816 - DNA, 33 bp, Homo sapien
aaacacatctcccaaaggttggagtagtgggac

SEQ ID NO: 533817 - DNA, 33 bp, Homo sapien
ggagagatagacagataatcaatagatagatag

SEQ ID NO: 533818 - DNA, 33 bp, Homo sapien
ggagagatagacagattatcaatagatagatag

SEQ ID NO: 533819 - DNA, 33 bp, Homo sapien
ctttttgtttgttgtacagttatttgttctact

SEQ ID NO: 533820 - DNA, 33 bp, Homo sapien
ctttttgtttgttgtatagttatttgttctact

SEQ ID NO: 533821 - DNA, 33 bp, Homo sapien
ttcacaaattggagaaatgaagaggaagcaaca

SEQ ID NO: 533822 - DNA, 33 bp, Homo sapien
ttcacaaattggagaactgaagaggaagcaaca

SEQ ID NO: 533823 - DNA, 33 bp, Homo sapien
aaaaactcatataaccgcaattgaccttgcttt

SEQ ID NO: 533824 - DNA, 33 bp, Homo sapien
aaaaactcatataacctcaattgaccttgcttt

SEQ ID NO: 533825 - DNA, 33 bp, Homo sapien
atgaaagagataataaagagataacgtaactat

SEQ ID NO: 533826 - DNA, 33 bp, Homo sapien
atgaaagagataataacgagataacgtaactat

SEQ ID NO: 533827 - DNA, 33 bp, Homo sapien
ttgaatgcttttgtgcaacttcatttgggttca

SEQ ID NO: 533828 - DNA, 33 bp, Homo sapien
ttgaatgcttttgtgccacttcatttgggttca

SEQ ID NO: 533829 - DNA, 33 bp, Homo sapien
ccacccaaaataccaacagaagtttcactgcaa

SEQ ID NO: 533830 - DNA, 33 bp, Homo sapien
ccacccaaaataccaatagaagtttcactgcaa

SEQ ID NO: 533831 - DNA, 33 bp, Homo sapien
gtagatgagcccaggaagttgaaattcttgtat

SEQ ID NO: 533832 - DNA, 33 bp, Homo sapien
gtagatgagcccaggatgttgaaattcttgtat

SEQ ID NO: 533833 - DNA, 33 bp, Homo sapien
ctaacttcatctcccactaaccccttgtgtgca

SEQ ID NO: 533834 - DNA, 33 bp, Homo sapien
ctaacttcatctcccattaaccccttgtgtgca

SEQ ID NO: 533835 - DNA, 33 bp, Homo sapien
ttaaatgaaagtgtcgaaatgtaatgtatagag

SEQ ID NO: 533836 - DNA, 33 bp, Homo sapien
ttaaatgaaagtgtcggaatgtaatgtatagag

SEQ ID NO: 533837 - DNA, 33 bp, Homo sapien
ccttctgacctctgtcacctcggtctccatgat

SEQ ID NO: 533838 - DNA, 33 bp, Homo sapien
ccttctgacctctgtcgcctcggtctccatgat

SEQ ID NO: 533839 - DNA, 33 bp, Homo sapien
atgtttctgccactcaatacaatcaacagtacc

SEQ ID NO: 533840 - DNA, 33 bp, Homo sapien
atgtttctgccactcagtacaatcaacagtacc

SEQ ID NO: 533841 - DNA, 33 bp, Homo sapien
taaaaagaaaagactaccagaaatatgtgctct

SEQ ID NO: 533842 - DNA, 33 bp, Homo sapien
taaaaagaaaagactatcagaaatatgtgctct

SEQ ID NO: 533843 - DNA, 33 bp, Homo sapien
aactccacacacatgacaatgacaatgtggtaa

SEQ ID NO: 533844 - DNA, 33 bp, Homo sapien
aactccacacacatgataatgacaatgtggtaa

SEQ ID NO: 533845 - DNA, 33 bp, Homo sapien
atttaaagtttactgggcattgaacaaagaaag

SEQ ID NO: 533846 - DNA, 33 bp, Homo sapien
atttaaagtttactggtcattgaacaaagaaag

SEQ ID NO: 533847 - DNA, 33 bp, Homo sapien
gatttttgctttacaaaagttcatacacatttt

SEQ ID NO: 533848 - DNA, 33 bp, Homo sapien
gatttttgctttacaagagttcatacacatttt

SEQ ID NO: 533849 - DNA, 33 bp, Homo sapien
cacagtctttcttcaactgtagatacagaattc

SEQ ID NO: 533850 - DNA, 33 bp, Homo sapien
cacagtctttcttcaattgtagatacagaattc

SEQ ID NO: 533851 - DNA, 33 bp, Homo sapien
ttcctttaactatagacggataggtgaagagtt

SEQ ID NO: 533852 - DNA, 33 bp, Homo sapien
ttcctttaactatagatggataggtgaagagtt

SEQ ID NO: 533853 - DNA, 33 bp, Homo sapien
cttgtacacactccctaagcactctgaatttat

SEQ ID NO: 533854 - DNA, 33 bp, Homo sapien
cttgtacacactcccttagcactctgaatttat

SEQ ID NO: 533855 - DNA, 33 bp, Homo sapien
cttttgaagctaattacaaggcaccttgacaag

SEQ ID NO: 533856 - DNA, 33 bp, Homo sapien
cttttgaagctaattataaggcaccttgacaag

SEQ ID NO: 533857 - DNA, 33 bp, Homo sapien
aaccaattgtattttgaacatgatttaacatct

SEQ ID NO: 533858 - DNA, 33 bp, Homo sapien
aaccaattgtattttggacatgatttaacatct

SEQ ID NO: 533859 - DNA, 33 bp, Homo sapien
ctaagagcatcatggcactttttaatgataatc

SEQ ID NO: 533860 - DNA, 33 bp, Homo sapien
ctaagagcatcatggcgctttttaatgataatc

SEQ ID NO: 533861 - DNA, 33 bp, Homo sapien
gacccaagggaggtaaaaactctggatgaatcc

SEQ ID NO: 533862 - DNA, 33 bp, Homo sapien
gacccaagggaggtaagaactctggatgaatcc

SEQ ID NO: 533863 - DNA, 33 bp, Homo sapien
aatgtgtgtgccttcacgaatcaaactaacagg

SEQ ID NO: 533864 - DNA, 33 bp, Homo sapien
aatgtgtgtgccttcaggaatcaaactaacagg

SEQ ID NO: 533865 - DNA, 33 bp, Homo sapien
aggcatactcagattacattttacatttctggt

SEQ ID NO: 533866 - DNA, 33 bp, Homo sapien
aggcatactcagattatattttacatttctggt

SEQ ID NO: 533867 - DNA, 33 bp, Homo sapien
gaaggcactaaggatacatagctgtgaacaaca

SEQ ID NO: 533868 - DNA, 33 bp, Homo sapien
gaaggcactaaggatatatagctgtgaacaaca

SEQ ID NO: 533869 - DNA, 33 bp, Homo sapien
taattgtctaagatcaccttgtttgtatatttg

SEQ ID NO: 533870 - DNA, 33 bp, Homo sapien
taattgtctaagatcatcttgtttgtatatttg

SEQ ID NO: 533871 - DNA, 33 bp, Homo sapien
aactgagagttctggacaaaattaatgacctgt

SEQ ID NO: 533872 - DNA, 33 bp, Homo sapien
aactgagagttctggataaaattaatgacctgt

SEQ ID NO: 533873 - DNA, 33 bp, Homo sapien
attcctcaaattctggccaaaatagaatttttc

SEQ ID NO: 533874 - DNA, 33 bp, Homo sapien
attcctcaaattctggtcaaaatagaatttttc

SEQ ID NO: 533875 - DNA, 33 bp, Homo sapien
ggtgccatggtaagagaatgttgacaaaaatac

SEQ ID NO: 533876 - DNA, 33 bp, Homo sapien
ggtgccatggtaagaggatgttgacaaaaatac

SEQ ID NO: 533877 - DNA, 33 bp, Homo sapien
gttttttcagaatagcactgcccaaaagatatg

SEQ ID NO: 533878 - DNA, 33 bp, Homo sapien
gttttttcagaatagctctgcccaaaagatatg

SEQ ID NO: 533879 - DNA, 33 bp, Homo sapien
tctcttagctactacactgattgtcctatgact

SEQ ID NO: 533880 - DNA, 33 bp, Homo sapien
tctcttagctactacattgattgtcctatgact

SEQ ID NO: 533881 - DNA, 33 bp, Homo sapien
gactgcagtgtgagaacgtggtaaaatgtaatt

SEQ ID NO: 533882 - DNA, 33 bp, Homo sapien
gactgcagtgtgagaatgtggtaaaatgtaatt

SEQ ID NO: 533883 - DNA, 33 bp, Homo sapien
aattagcagggtgtggaagcttggtcctgtaat

SEQ ID NO: 533884 - DNA, 33 bp, Homo sapien
aattagcagggtgtggcagcttggtcctgtaat

SEQ ID NO: 533885 - DNA, 33 bp, Homo sapien
ctactaatttgtgacactgaaaaaagcacattg

SEQ ID NO: 533886 - DNA, 33 bp, Homo sapien
ctactaatttgtgacagtgaaaaaagcacattg

SEQ ID NO: 533887 - DNA, 33 bp, Homo sapien
tagagagtcagaagcaacatttcctcccagctt

SEQ ID NO: 533888 - DNA, 33 bp, Homo sapien
tagagagtcagaagcatcatttcctcccagctt

SEQ ID NO: 533889 - DNA, 33 bp, Homo sapien
gggaattaaaagatgactaaatcaaggacttgg

SEQ ID NO: 533890 - DNA, 33 bp, Homo sapien
gggaattaaaagatgagtaaatcaaggacttgg

SEQ ID NO: 533891 - DNA, 33 bp, Homo sapien
atctctgtttgctaaaggttttgaattgaagtc

SEQ ID NO: 533892 - DNA, 33 bp, Homo sapien
atctctgtttgctaaatgttttgaattgaagtc

SEQ ID NO: 533893 - DNA, 33 bp, Homo sapien
ttaggggttttttctagctacttgtgttgacct

SEQ ID NO: 533894 - DNA, 33 bp, Homo sapien
ttaggggttttttctatctacttgtgttgacct

SEQ ID NO: 533895 - DNA, 33 bp, Homo sapien
aattccatttcataaacgttggagctatccatt

SEQ ID NO: 533896 - DNA, 33 bp, Homo sapien
aattccatttcataaaggttggagctatccatt

SEQ ID NO: 533897 - DNA, 33 bp, Homo sapien
gccttcagatttctcacagagtccaggtccatc

SEQ ID NO: 533898 - DNA, 33 bp, Homo sapien
gccttcagatttctcatagagtccaggtccatc

SEQ ID NO: 533899 - DNA, 33 bp, Homo sapien; identical to SEQ ID NO: 533897

SEQ ID NO: 533900 - DNA, 33 bp, Homo sapien; identical to SEQ ID NO: 533898

SEQ ID NO: 533901 - DNA, 33 bp, Homo sapien
gctggcttggaagaaccgagaggagcttgacaa

SEQ ID NO: 533902 - DNA, 33 bp, Homo sapien
gctggcttggaagaactgagaggagcttgacaa

SEQ ID NO: 533903 - DNA, 33 bp, Homo sapien; identical to SEQ ID NO: 533901

SEQ ID NO: 533904 - DNA, 33 bp, Homo sapien; identical to SEQ ID NO: 533902

SEQ ID NO: 533905 - DNA, 33 bp, Homo sapien
catcctgtagttatgcaattccaacaaaaaata

SEQ ID NO: 533906 - DNA, 33 bp, Homo sapien
catcctgtagttatgcgattccaacaaaaaata

SEQ ID NO: 533907 - DNA, 33 bp, Homo sapien
gaagaagtcatttgataacctaatagcagattg

SEQ ID NO: 533908 - DNA, 33 bp, Homo sapien
gaagaagtcatttgatgacctaatagcagattg

SEQ ID NO: 533909 - DNA, 33 bp, Homo sapien
tccagttaggttttacaattactgaaatgactt

SEQ ID NO: 533910 - DNA, 33 bp, Homo sapien
tccagttaggttttaccattactgaaatgactt

SEQ ID NO: 533911 - DNA, 33 bp, Homo sapien
tcaccagaattagaccagactagtcaacctcct

SEQ ID NO: 533912 - DNA, 33 bp, Homo sapien
tcaccagaattagaccggactagtcaacctcct

SEQ ID NO: 533913 - DNA, 33 bp, Homo sapien
aggaagcagaaacctacattccaaaaccatgga

SEQ ID NO: 533914 - DNA, 33 bp, Homo sapien
aggaagcagaaacctagattccaaaaccatgga

SEQ ID NO: 533915 - DNA, 33 bp, Homo sapien
aggtgaccaactgccccaattggcccaggactt

SEQ ID NO: 533916 - DNA, 33 bp, Homo sapien
aggtgaccaactgcccgaattggcccaggactt

SEQ ID NO: 533917 - DNA, 33 bp, Homo sapien
atatatatcacctcaaacatttgttattttttg

SEQ ID NO: 533918 - DNA, 33 bp, Homo sapien
atatatatcacctcaatcatttgttattttttg

SEQ ID NO: 533919 - DNA, 33 bp, Homo sapien
tggctctcctggaggacgataagataaagtaat

SEQ ID NO: 533920 - DNA, 33 bp, Homo sapien
tggctctcctggaggatgataagataaagtaat

SEQ ID NO: 533921 - DNA, 33 bp, Homo sapien
tctggaacttcaactacacatatgtcagacctt

SEQ ID NO: 533922 - DNA, 33 bp, Homo sapien
tctggaacttcaactatacatatgtcagacctt

SEQ ID NO: 533923 - DNA, 33 bp, Homo sapien
ttttaagaaagccaaaagactcttgccagcttt

SEQ ID NO: 533924 - DNA, 33 bp, Homo sapien
ttttaagaaagccaaaggactcttgccagcttt

SEQ ID NO: 533925 - DNA, 33 bp, Homo sapien
ttccatctggaatttacggactaaaacagaagt

SEQ ID NO: 533926 - DNA, 33 bp, Homo sapien
ttccatctggaatttatggactaaaacagaagt

SEQ ID NO: 533927 - DNA, 33 bp, Homo sapien
acttatagttggaatagtatactcagcaaaagc

SEQ ID NO: 533928 - DNA, 33 bp, Homo sapien
acttatagttggaatattatactcagcaaaagc

SEQ ID NO: 533929 - DNA, 33 bp, Homo sapien
agagagaaagtctgaacgagatagtctttgaag

SEQ ID NO: 533930 - DNA, 33 bp, Homo sapien
agagagaaagtctgaatgagatagtctttgaag

SEQ ID NO: 533931 - DNA, 33 bp, Homo sapien
aaaagttcagagcaagactagaaataagagtta

SEQ ID NO: 533932 - DNA, 33 bp, Homo sapien
aaaagttcagagcaaggctagaaataagagtta

SEQ ID NO: 533933 - DNA, 33 bp, Homo sapien
aaacacaaatggattcaaatgtcagctttatta

SEQ ID NO: 533934 - DNA, 33 bp, Homo sapien
aaacacaaatggattcgaatgtcagctttatta

SEQ ID NO: 533935 - DNA, 33 bp, Homo sapien
tctttaggaaaacagaacggatgaccaattctt

SEQ ID NO: 533936 - DNA, 33 bp, Homo sapien
tctttaggaaaacagatcggatgaccaattctt

SEQ ID NO: 533937 - DNA, 33 bp, Homo sapien
ccattattactagaagaccaataccattcttgt

SEQ ID NO: 533938 - DNA, 33 bp, Homo sapien
ccattattactagaagtccaataccattcttgt

SEQ ID NO: 533939 - DNA, 33 bp, Homo sapien
gcttttggagtgcaaagaaaatgtagctcaacc

SEQ ID NO: 533940 - DNA, 33 bp, Homo sapien
gcttttggagtgcaaataaaatgtagctcaacc

SEQ ID NO: 533941 - DNA, 33 bp, Homo sapien
cagcacatctgctttaaactgactgactgacct

SEQ ID NO: 533942 - DNA, 33 bp, Homo sapien
cagcacatctgctttacactgactgactgacct

SEQ ID NO: 533943 - DNA, 33 bp, Homo sapien
agaggttttcagctataacattaatgctgactt

SEQ ID NO: 533944 - DNA, 33 bp, Homo sapien
agaggttttcagctatcacattaatgctgactt

SEQ ID NO: 533945 - DNA, 33 bp, Homo sapien
ctgatcccagcttacaaacataggttcaacacc

SEQ ID NO: 533946 - DNA, 33 bp, Homo sapien
ctgatcccagcttacagacataggttcaacacc

SEQ ID NO: 533947 - DNA, 33 bp, Homo sapien
accagatgtctttcaaaggatgactgattaaac

SEQ ID NO: 533948 - DNA, 33 bp, Homo sapien
accagatgtctttcaacggatgactgattaaac

SEQ ID NO: 533949 - DNA, 33 bp, Homo sapien
aagttggtagaaaaataaagggtgagagtatag

SEQ ID NO: 533950 - DNA, 33 bp, Homo sapien
aagttggtagaaaaatcaagggtgagagtatag

SEQ ID NO: 533951 - DNA, 33 bp, Homo sapien
cataggccttcagaacactgcaattccgcaaag

SEQ ID NO: 533952 - DNA, 33 bp, Homo sapien
cataggccttcagaacgctgcaattccgcaaag

SEQ ID NO: 533953 - DNA, 33 bp, Homo sapien
gcctatgaatggtctacggactttggacttaga

SEQ ID NO: 533954 - DNA, 33 bp, Homo sapien
gcctatgaatggtctatggactttggacttaga

SEQ ID NO: 533955 - DNA, 33 bp, Homo sapien
agcaggaagttggcaccaggttgatataatgaa

SEQ ID NO: 533956 - DNA, 33 bp, Homo sapien
agcaggaagttggcacgaggttgatataatgaa

SEQ ID NO: 533957 - DNA, 33 bp, Homo sapien
gagagatcaaaaaacaagtcaagtcacaggata

SEQ ID NO: 533958 - DNA, 33 bp, Homo sapien
gagagatcaaaaaacaggtcaagtcacaggata

SEQ ID NO: 533959 - DNA, 33 bp, Homo sapien
aactagtccaaagaaacttctggtgactgttaa

SEQ ID NO: 533960 - DNA, 33 bp, Homo sapien
aactagtccaaagaaagttctggtgactgttaa

SEQ ID NO: 533961 - DNA, 33 bp, Homo sapien
aaaccttccagagcagaacgtactccacgcaca

SEQ ID NO: 533962 - DNA, 33 bp, Homo sapien
aaaccttccagagcaggacgtactccacgcaca

SEQ ID NO: 533963 - DNA, 33 bp, Homo sapien
aaaccattcattccacggccttttcactgtcca

SEQ ID NO: 533964 - DNA, 33 bp, Homo sapien
aaaccattcattccactgccttttcactgtcca

SEQ ID NO: 533965 - DNA, 33 bp, Homo sapien
aagagaaggtatatgaaacatccatccatcttt

SEQ ID NO: 533966 - DNA, 33 bp, Homo sapien
aagagaaggtatatgagacatccatccatcttt

SEQ ID NO: 533967 - DNA, 33 bp, Homo sapien
gacacaggcggggtgacaaaaagcgatggtagt

SEQ ID NO: 533968 - DNA, 33 bp, Homo sapien
gacacaggcggggtgagaaaaagcgatggtagt

SEQ ID NO: 533969 - DNA, 33 bp, Homo sapien
cctggtcatgacactacgcgaccccgctggctc

SEQ ID NO: 533970 - DNA, 33 bp, Homo sapien
cctggtcatgacactaggcgaccccgctggctc

SEQ ID NO: 533971 - DNA, 33 bp, Homo sapien
ttagaagtaacttagcactgatggtggaggcca

SEQ ID NO: 533972 - DNA, 33 bp, Homo sapien
ttagaagtaacttagcgctgatggtggaggcca

SEQ ID NO: 533973 - DNA, 33 bp, Homo sapien
tgtaggtgtgttgaccaagtggttctatgatgt

SEQ ID NO: 533974 - DNA, 33 bp, Homo sapien
tgtaggtgtgttgacccagtggttctatgatgt

SEQ ID NO: 533975 - DNA, 33 bp, Homo sapien
acaacaatttggagtacctcacaaagcagcaaa

SEQ ID NO: 533976 - DNA, 33 bp, Homo sapien
acaacaatttggagtatctcacaaagcagcaaa

SEQ ID NO: 533977 - DNA, 33 bp, Homo sapien
atcactagatgataggaatttctcagctccata

SEQ ID NO: 533978 - DNA, 33 bp, Homo sapien
atcactagatgatagggatttctcagctccata

SEQ ID NO: 533979 - DNA, 33 bp, Homo sapien
atgactttaactctgcccatacctagactcaga

SEQ ID NO: 533980 - DNA, 33 bp, Homo sapien
atgactttaactctgctcatacctagactcaga

SEQ ID NO: 533981 - DNA, 33 bp, Homo sapien
gctatgctgtacaataataagtagactgtaaga

SEQ ID NO: 533982 - DNA, 33 bp, Homo sapien
gctatgctgtacaatattaagtagactgtaaga

SEQ ID NO: 533983 - DNA, 33 bp, Homo sapien
agcctcgtaactgagaaagacaataaacaagta

SEQ ID NO: 533984 - DNA, 33 bp, Homo sapien
agcctcgtaactgagacagacaataaacaagta

SEQ ID NO: 533985 - DNA, 33 bp, Homo sapien
attgagtcactgaagaaattaaggaagaaataa

SEQ ID NO: 533986 - DNA, 33 bp, Homo sapien
attgagtcactgaagatattaaggaagaaataa

SEQ ID NO: 533987 - DNA, 33 bp, Homo sapien
ttcatcccacaagtaaatgttagcttctttatt

SEQ ID NO: 533988 - DNA, 33 bp, Homo sapien
ttcatcccacaagtaactgttagcttctttatt

SEQ ID NO: 533989 - DNA, 33 bp, Homo sapien
acatagtagtaacttaataagtctaggttgact

SEQ ID NO: 533990 - DNA, 33 bp, Homo sapien
acatagtagtaacttagtaagtctaggttgact

SEQ ID NO: 533991 - DNA, 33 bp, Homo sapien
cagaaaataggcatcccggagaaggaaattatt

SEQ ID NO: 533992 - DNA, 33 bp, Homo sapien
cagaaaataggcatcctggagaaggaaattatt

SEQ ID NO: 533993 - DNA, 33 bp, Homo sapien
attctcaagcataacaatgggatagaagttttc

SEQ ID NO: 533994 - DNA, 33 bp, Homo sapien
attctcaagcataacagtgggatagaagttttc

SEQ ID NO: 533995 - DNA, 33 bp, Homo sapien
atggctcagccctgaaagagcctacggcattag

SEQ ID NO: 533996 - DNA, 33 bp, Homo sapien
atggctcagccctgaaggagcctacggcattag

SEQ ID NO: 533997 - DNA, 33 bp, Homo sapien
aggttgaattccaaggccaaatttgtaaacatt

SEQ ID NO: 533998 - DNA, 33 bp, Homo sapien
aggttgaattccaaggtcaaatttgtaaacatt

SEQ ID NO: 533999 - DNA, 33 bp, Homo sapien
ttagacctgtttaaaactctaaagcacatgtta

SEQ ID NO: 534000 - DNA, 33 bp, Homo sapien
ttagacctgtttaaaattctaaagcacatgtta

SEQ ID NO: 534001 - DNA, 33 bp, Homo sapien
gtctactgtcatttccagatgcattattttaca

SEQ ID NO: 534002 - DNA, 33 bp, Homo sapien
gtctactgtcatttccggatgcattattttaca

SEQ ID NO: 534003 - DNA, 33 bp, Homo sapien
ctcatagaaatacttacgtttactggcttatta

SEQ ID NO: 534004 - DNA, 33 bp, Homo sapien
ctcatagaaatacttatgtttactggcttatta

SEQ ID NO: 534005 - DNA, 33 bp, Homo sapien
tcatggaaaaaggtacagagctttcactaatta

SEQ ID NO: 534006 - DNA, 33 bp, Homo sapien
tcatggaaaaaggtacggagctttcactaatta

SEQ ID NO: 534007 - DNA, 33 bp, Homo sapien
tccagtttggagcaaccctctcctccctagtct

SEQ ID NO: 534008 - DNA, 33 bp, Homo sapien
tccagtttggagcaactctctcctccctagtct

SEQ ID NO: 534009 - DNA, 33 bp, Homo sapien
aagaaagaaaataaaaactccagcagaattctt

SEQ ID NO: 534010 - DNA, 33 bp, Homo sapien
aagaaagaaaataaaatctccagcagaattctt

SEQ ID NO: 534011 - DNA, 33 bp, Homo sapien
gtggttattgaactcacgtgagatgctccagaa

SEQ ID NO: 534012 - DNA, 33 bp, Homo sapien
gtggttattgaactcatgtgagatgctccagaa

SEQ ID NO: 534013 - DNA, 33 bp, Homo sapien
attcaagaaaacgttcaaaaatagatatggtca

SEQ ID NO: 534014 - DNA, 33 bp, Homo sapien
attcaagaaaacgttcgaaaatagatatggtca

SEQ ID NO: 534015 - DNA, 33 bp, Homo sapien
gcacaactggacaaaaagaaaccagacagaggt

SEQ ID NO: 534016 - DNA, 33 bp, Homo sapien
gcacaactggacaaaaggaaaccagacagaggt

SEQ ID NO: 534017 - DNA, 33 bp, Homo sapien
aaaagttctttacatcactgtgcaacaaagcaa

SEQ ID NO: 534018 - DNA, 33 bp, Homo sapien
aaaagttctttacatcgctgtgcaacaaagcaa

SEQ ID NO: 534019 - DNA, 33 bp, Homo sapien
tgcctgagataccctgaacatgcatatgactgg

SEQ ID NO: 534020 - DNA, 33 bp, Homo sapien
tgcctgagataccctggacatgcatatgactgg

SEQ ID NO: 534021 - DNA, 33 bp, Homo sapien
ctgaattcttggtaacagaaatcagtttcctaa

SEQ ID NO: 534022 - DNA, 33 bp, Homo sapien
ctgaattcttggtaacggaaatcagtttcctaa

SEQ ID NO: 534023 - DNA, 33 bp, Homo sapien
ataatctttttgaatgaaagttcttgatctcga

SEQ ID NO: 534024 - DNA, 33 bp, Homo sapien
ataatctttttgaatggaagttcttgatctcga

SEQ ID NO: 534025 - DNA, 33 bp, Homo sapien
cttagcatgtctacagaaatttagtgtcaggtc

SEQ ID NO: 534026 - DNA, 33 bp, Homo sapien
cttagcatgtctacaggaatttagtgtcaggtc

SEQ ID NO: 534027 - DNA, 33 bp, Homo sapien
tgttacccaggttggacggcaatagtgcaatca

SEQ ID NO: 534028 - DNA, 33 bp, Homo sapien
tgttacccaggttggatggcaatagtgcaatca

SEQ ID NO: 534029 - DNA, 33 bp, Homo sapien
aaacagctatctttcggccaattctcaactgcc

SEQ ID NO: 534030 - DNA, 33 bp, Homo sapien
aaacagctatctttcgtccaattctcaactgcc

SEQ ID NO: 534031 - DNA, 33 bp, Homo sapien
tacttgctgaacataagtggaattgtaagaaaa

SEQ ID NO: 534032 - DNA, 33 bp, Homo sapien
tacttgctgaacataattggaattgtaagaaaa

SEQ ID NO: 534033 - DNA, 33 bp, Homo sapien
attagatttttgactcaatatacaacaaattgt

SEQ ID NO: 534034 - DNA, 33 bp, Homo sapien
attagatttttgactcgatatacaacaaattgt

SEQ ID NO: 534035 - DNA, 33 bp, Homo sapien
tataattcaatagacaataacaccataaaccta

SEQ ID NO: 534036 - DNA, 33 bp, Homo sapien
tataattcaatagacagtaacaccataaaccta

SEQ ID NO: 534037 - DNA, 33 bp, Homo sapien
tcactagaactccacaatagtaattgctgcaag

SEQ ID NO: 534038 - DNA, 33 bp, Homo sapien
tcactagaactccacagtagtaattgctgcaag

SEQ ID NO: 534039 - DNA, 33 bp, Homo sapien
gaacacttgactcagaagctgcttgtaagacac

SEQ ID NO: 534040 - DNA, 33 bp, Homo sapien
gaacacttgactcagaggctgcttgtaagacac

SEQ ID NO: 534041 - DNA, 33 bp, Homo sapien
ggccgttttcttcaaaagctcagttttctcatc

SEQ ID NO: 534042 - DNA, 33 bp, Homo sapien
ggccgttttcttcaaaggctcagttttctcatc

SEQ ID NO: 534043 - DNA, 33 bp, Homo sapien
atgagaagaatttcacgggccacctatcctatt

SEQ ID NO: 534044 - DNA, 33 bp, Homo sapien
atgagaagaatttcactggccacctatcctatt

SEQ ID NO: 534045 - DNA, 33 bp, Homo sapien
gtttctaattccaattaaatctgatgaaaagat

SEQ ID NO: 534046 - DNA, 33 bp, Homo sapien
gtttctaattccaattcaatctgatgaaaagat

SEQ ID NO: 534047 - DNA, 33 bp, Homo sapien
tccctccaggaatctacacaactcccatgctgc

SEQ ID NO: 534048 - DNA, 33 bp, Homo sapien
tccctccaggaatctatacaactcccatgctgc

SEQ ID NO: 534049 - DNA, 33 bp, Homo sapien
agtagaccctgagtaccatggctcactcatgct

SEQ ID NO: 534050 - DNA, 33 bp, Homo sapien
agtagaccctgagtactatggctcactcatgct

SEQ ID NO: 534051 - DNA, 33 bp, Homo sapien
tgcctcgcgctagcagcaaggtagtgtggtgtg

SEQ ID NO: 534052 - DNA, 33 bp, Homo sapien
tgcctcgcgctagcaggaaggtagtgtggtgtg

SEQ ID NO: 534053 - DNA, 33 bp, Homo sapien
taaacccagaaggccaagagcaaaaatcgtgat

SEQ ID NO: 534054 - DNA, 33 bp, Homo sapien
taaacccagaaggccacgagcaaaaatcgtgat

SEQ ID NO: 534055 - DNA, 33 bp, Homo sapien
aaagtaatagccaacacgagaattttatatata

SEQ ID NO: 534056 - DNA, 33 bp, Homo sapien
aaagtaatagccaacatgagaattttatatata

SEQ ID NO: 534057 - DNA, 33 bp, Homo sapien
gatgccaggcagaacaatcaaatgcttcaccca

SEQ ID NO: 534058 - DNA, 33 bp, Homo sapien
gatgccaggcagaacagtcaaatgcttcaccca

SEQ ID NO: 534059 - DNA, 33 bp, Homo sapien
tcttaagaccagaggacgcaatgggatggggta

SEQ ID NO: 534060 - DNA, 33 bp, Homo sapien
tcttaagaccagaggatgcaatgggatggggta

SEQ ID NO: 534061 - DNA, 33 bp, Homo sapien
tgtcttaagtaggccaaagaaattgcaaaggag

SEQ ID NO: 534062 - DNA, 33 bp, Homo sapien
tgtcttaagtaggccagagaaattgcaaaggag

SEQ ID NO: 534063 - DNA, 33 bp, Homo sapien
aagctgcatttaggaactaaaatattccaactg

SEQ ID NO: 534064 - DNA, 33 bp, Homo sapien
aagctgcatttaggaagtaaaatattccaactg

SEQ ID NO: 534065 - DNA, 33 bp, Homo sapien
ttaagttttataaggcaactagattacttcaaa

SEQ ID NO: 534066 - DNA, 33 bp, Homo sapien
ttaagttttataaggcgactagattacttcaaa

SEQ ID NO: 534067 - DNA, 33 bp, Homo sapien
atataatatgtccaccaagaacaacttaaaatt

SEQ ID NO: 534068 - DNA, 33 bp, Homo sapien
atataatatgtccacctagaacaacttaaaatt

SEQ ID NO: 534069 - DNA, 33 bp, Homo sapien
aatttatacctgtacacgtagggttcttggact

SEQ ID NO: 534070 - DNA, 33 bp, Homo sapien
aatttatacctgtacatgtagggttcttggact

SEQ ID NO: 534071 - DNA, 33 bp, Homo sapien
agaaaagtcttttgccacatttggaccaatgtt

SEQ ID NO: 534072 - DNA, 33 bp, Homo sapien
agaaaagtcttttgccgcatttggaccaatgtt

SEQ ID NO: 534073 - DNA, 33 bp, Homo sapien
tctaacgacttttcaccatgtctgtgactacca

SEQ ID NO: 534074 - DNA, 33 bp, Homo sapien
tctaacgacttttcacgatgtctgtgactacca

SEQ ID NO: 534075 - DNA, 33 bp, Homo sapien
atccttgcattaatcaacagctaagatttatat

SEQ ID NO: 534076 - DNA, 33 bp, Homo sapien
atccttgcattaatcagcagctaagatttatat

SEQ ID NO: 534077 - DNA, 33 bp, Homo sapien
tcatactttccacatcagaagttccttatgaca

SEQ ID NO: 534078 - DNA, 33 bp, Homo sapien
tcatactttccacatcggaagttccttatgaca

SEQ ID NO: 534079 - DNA, 33 bp, Homo sapien
tgtggttgatttgtaccctaggtgatctttggc

SEQ ID NO: 534080 - DNA, 33 bp, Homo sapien
tgtggttgatttgtacgctaggtgatctttggc

SEQ ID NO: 534081 - DNA, 33 bp, Homo sapien
tttattccttcaaaacagacacaataatacact

SEQ ID NO: 534082 - DNA, 33 bp, Homo sapien
tttattccttcaaaaccgacacaataatacact

SEQ ID NO: 534083 - DNA, 33 bp, Homo sapien
tagaaaaacagagctcaaccaaaatagtgtttg

SEQ ID NO: 534084 - DNA, 33 bp, Homo sapien
tagaaaaacagagctcgaccaaaatagtgtttg

SEQ ID NO: 534085 - DNA, 33 bp, Homo sapien
catcaaagatgcaaaaatgattaagtcacctgt

SEQ ID NO: 534086 - DNA, 33 bp, Homo sapien
catcaaagatgcaaaagtgattaagtcacctgt

SEQ ID NO: 534087 - DNA, 33 bp, Homo sapien
caagtcgtatgatagtcaatagtgaaaggaagg

SEQ ID NO: 534088 - DNA, 33 bp, Homo sapien
caagtcgtatgatagtgaatagtgaaaggaagg

SEQ ID NO: 534089 - DNA, 33 bp, Homo sapien
ttagatatttaacttaccgaaaaatgttagacc

SEQ ID NO: 534090 - DNA, 33 bp, Homo sapien
ttagatatttaacttatcgaaaaatgttagacc

SEQ ID NO: 534091 - DNA, 33 bp, Homo sapien
tattctatgtgttgggcaactagttttgatgga

SEQ ID NO: 534092 - DNA, 33 bp, Homo sapien
tattctatgtgttgggtaactagttttgatgga

SEQ ID NO: 534093 - DNA, 33 bp, Homo sapien
actaaaccaccgaggactacattcctgtgagcc

SEQ ID NO: 534094 - DNA, 33 bp, Homo sapien
actaaaccaccgaggattacattcctgtgagcc

SEQ ID NO: 534095 - DNA, 33 bp, Homo sapien
gaattcactcttcttcacactactatttatata

SEQ ID NO: 534096 - DNA, 33 bp, Homo sapien
gaattcactcttcttcgcactactatttatata

SEQ ID NO: 534097 - DNA, 33 bp, Homo sapien
ctgtggagagattttaggttccaaaatggtgta

SEQ ID NO: 534098 - DNA, 33 bp, Homo sapien
ctgtggagagattttatgttccaaaatggtgta

SEQ ID NO: 534099 - DNA, 33 bp, Homo sapien
agtctaaagttagagaatcatttagctcatctt

SEQ ID NO: 534100 - DNA, 33 bp, Homo sapien
agtctaaagttagagagtcatttagctcatctt

SEQ ID NO: 534101 - DNA, 33 bp, Homo sapien
tgatattgttagtacagtatcaatatcacctca

SEQ ID NO: 534102 - DNA, 33 bp, Homo sapien
tgatattgttagtacattatcaatatcacctca

SEQ ID NO: 534103 - DNA, 33 bp, Homo sapien
ctcaaagaaacattccacaagtcttttttctta

SEQ ID NO: 534104 - DNA, 33 bp, Homo sapien
ctcaaagaaacattccgcaagtcttttttctta

SEQ ID NO: 534105 - DNA, 33 bp, Homo sapien
agtgcagcaccaatcaatgaagtgggcagcacc

SEQ ID NO: 534106 - DNA, 33 bp, Homo sapien
agtgcagcaccaatcattgaagtgggcagcacc

SEQ ID NO: 534107 - DNA, 33 bp, Homo sapien
tatactgatttgctcacggaatctaaataagag

SEQ ID NO: 534108 - DNA, 33 bp, Homo sapien
tatactgatttgctcatggaatctaaataagag

SEQ ID NO: 534109 - DNA, 33 bp, Homo sapien
gttatgaacactgttggaggttcagttgctcac

SEQ ID NO: 534110 - DNA, 33 bp, Homo sapien
gttatgaacactgttgtaggttcagttgctcac

SEQ ID NO: 534111 - DNA, 33 bp, Homo sapien
gcagcctagatatcctcagcacagtttagcatt

SEQ ID NO: 534112 - DNA, 33 bp, Homo sapien
gcagcctagatatccttagcacagtttagcatt

SEQ ID NO: 534113 - DNA, 33 bp, Homo sapien
atttggttctaatccaatatacacctaatattt

SEQ ID NO: 534114 - DNA, 33 bp, Homo sapien
atttggttctaatccagtatacacctaatattt

SEQ ID NO: 534115 - DNA, 33 bp, Homo sapien
ctgttttttcactcaacaatgtatcattaacat

SEQ ID NO: 534116 - DNA, 33 bp, Homo sapien
ctgttttttcactcaagaatgtatcattaacat

SEQ ID NO: 534117 - DNA, 33 bp, Homo sapien
ctgttaaggaggtcttaaaaagtgcacactcag

SEQ ID NO: 534118 - DNA, 33 bp, Homo sapien
ctgttaaggaggtctttaaaagtgcacactcag

SEQ ID NO: 534119 - DNA, 33 bp, Homo sapien
ctggccttgaacacaaccttgaacacatataca

SEQ ID NO: 534120 - DNA, 33 bp, Homo sapien
ctggccttgaacacaatcttgaacacatataca

SEQ ID NO: 534121 - DNA, 33 bp, Homo sapien
atcctggccagagttcccttggatagactacag

SEQ ID NO: 534122 - DNA, 33 bp, Homo sapien
atcctggccagagttctcttggatagactacag

SEQ ID NO: 534123 - DNA, 33 bp, Homo sapien
acagccatcatgaatccataagtgaatgttaat

SEQ ID NO: 534124 - DNA, 33 bp, Homo sapien
acagccatcatgaatcgataagtgaatgttaat

SEQ ID NO: 534125 - DNA, 33 bp, Homo sapien
atcttcaagaatagaaaccattaagatacaaat

SEQ ID NO: 534126 - DNA, 33 bp, Homo sapien
atcttcaagaatagaagccattaagatacaaat

SEQ ID NO: 534127 - DNA, 33 bp, Homo sapien
aaatgctaacaaaaaaaaactggagtcatgata

SEQ ID NO: 534128 - DNA, 33 bp, Homo sapien
aaatgctaacaaaaaagaactggagtcatgata

SEQ ID NO: 534129 - DNA, 33 bp, Homo sapien
ccccttggccgaaagaggtggttctgttaagtc

SEQ ID NO: 534130 - DNA, 33 bp, Homo sapien
ccccttggccgaaagatgtggttctgttaagtc

SEQ ID NO: 534131 - DNA, 33 bp, Homo sapien
tagatgatcagtgaacactatatttgttaagct

SEQ ID NO: 534132 - DNA, 33 bp, Homo sapien
tagatgatcagtgaacgctatatttgttaagct

SEQ ID NO: 534133 - DNA, 33 bp, Homo sapien
atgaagtaactggtgcaataaaatattatagtg

SEQ ID NO: 534134 - DNA, 33 bp, Homo sapien
atgaagtaactggtgcgataaaatattatagtg

SEQ ID NO: 534135 - DNA, 33 bp, Homo sapien
cttgtttcttgtaccaatggggctgaaatagcc

SEQ ID NO: 534136 - DNA, 33 bp, Homo sapien
cttgtttcttgtaccagtggggctgaaatagcc

SEQ ID NO: 534137 - DNA, 33 bp, Homo sapien
agggattactgtattcactgggacaattaatcc

SEQ ID NO: 534138 - DNA, 33 bp, Homo sapien
agggattactgtattcgctgggacaattaatcc

SEQ ID NO: 534139 - DNA, 33 bp, Homo sapien
tatttatttatttttacgctgaaattggagatc

SEQ ID NO: 534140 - DNA, 33 bp, Homo sapien
tatttatttatttttatgctgaaattggagatc

SEQ ID NO: 534141 - DNA, 33 bp, Homo sapien
aatttgaaatcaattgcaagaatcaccaaaatg

SEQ ID NO: 534142 - DNA, 33 bp, Homo sapien
aatttgaaatcaattgtaagaatcaccaaaatg

SEQ ID NO: 534143 - DNA, 33 bp, Homo sapien
gcaatctacagattcaatattcctatcaaacta

SEQ ID NO: 534144 - DNA, 33 bp, Homo sapien
gcaatctacagattcagtattcctatcaaacta

SEQ ID NO: 534145 - DNA, 33 bp, Homo sapien
tcagcatttcaagttggaaaaggaagttaaatg

SEQ ID NO: 534146 - DNA, 33 bp, Homo sapien
tcagcatttcaagttgtaaaaggaagttaaatg

SEQ ID NO: 534147 - DNA, 33 bp, Homo sapien
actcctattggcaaaccggcccaattccatatt

SEQ ID NO: 534148 - DNA, 33 bp, Homo sapien
actcctattggcaaactggcccaattccatatt

SEQ ID NO: 534149 - DNA, 33 bp, Homo sapien
acagctataatttctacgcaaacctgcaagccc

SEQ ID NO: 534150 - DNA, 33 bp, Homo sapien
acagctataatttctatgcaaacctgcaagccc

SEQ ID NO: 534151 - DNA, 33 bp, Homo sapien
aagggtttggtgtgtcaatcactaaaaagcaaa

SEQ ID NO: 534152 - DNA, 33 bp, Homo sapien
aagggtttggtgtgtcgatcactaaaaagcaaa

SEQ ID NO: 534153 - DNA, 33 bp, Homo sapien
aaagccaagttgtgaaaggttgctttgaggcta

SEQ ID NO: 534154 - DNA, 33 bp, Homo sapien
aaagccaagttgtgaagggttgctttgaggcta

SEQ ID NO: 534155 - DNA, 33 bp, Homo sapien
accttcaagctcctagccatcctgtagatctag

SEQ ID NO: 534156 - DNA, 33 bp, Homo sapien
accttcaagctcctagtcatcctgtagatctag

SEQ ID NO: 534157 - DNA, 33 bp, Homo sapien
tgagaacacaataatacggatagaagttctcgc

SEQ ID NO: 534158 - DNA, 33 bp, Homo sapien
tgagaacacaataatatggatagaagttctcgc

SEQ ID NO: 534159 - DNA, 33 bp, Homo sapien
agtgaacaaaaaatagcctatgaaattctgata

SEQ ID NO: 534160 - DNA, 33 bp, Homo sapien
agtgaacaaaaaataggctatgaaattctgata

SEQ ID NO: 534161 - DNA, 33 bp, Homo sapien
atatcaaatatccacaagtactgggtctacttc

SEQ ID NO: 534162 - DNA, 33 bp, Homo sapien
atatcaaatatccacatgtactgggtctacttc

SEQ ID NO: 534163 - DNA, 33 bp, Homo sapien
tgtatgccttacctagcagtgattttatttcca

SEQ ID NO: 534164 - DNA, 33 bp, Homo sapien
tgtatgccttacctagtagtgattttatttcca

SEQ ID NO: 534165 - DNA, 33 bp, Homo sapien
taatcctatcacatcgacaacatctgaattttg

SEQ ID NO: 534166 - DNA, 33 bp, Homo sapien
taatcctatcacatcggcaacatctgaattttg

SEQ ID NO: 534167 - DNA, 33 bp, Homo sapien
catacgtgtgtttaaaactgttctatttatgcc

SEQ ID NO: 534168 - DNA, 33 bp, Homo sapien
catacgtgtgtttaaatctgttctatttatgcc

SEQ ID NO: 534169 - DNA, 33 bp, Homo sapien
gcctattcgtttacacagcagattttagaagtt

SEQ ID NO: 534170 - DNA, 33 bp, Homo sapien
gcctattcgtttacacggcagattttagaagtt

SEQ ID NO: 534171 - DNA, 33 bp, Homo sapien
tgcatatcaaccaggaagtgttttggccttctt

SEQ ID NO: 534172 - DNA, 33 bp, Homo sapien
tgcatatcaaccaggaggtgttttggccttctt

SEQ ID NO: 534173 - DNA, 33 bp, Homo sapien
atacgtttatgtgccacctatatgtaagaagac

SEQ ID NO: 534174 - DNA, 33 bp, Homo sapien
atacgtttatgtgccatctatatgtaagaagac

SEQ ID NO: 534175 - DNA, 33 bp, Homo sapien
tttatgagagcactaaaactctaatatcatcac

SEQ ID NO: 534176 - DNA, 33 bp, Homo sapien
tttatgagagcactaatactctaatatcatcac

SEQ ID NO: 534177 - DNA, 33 bp, Homo sapien
gagtagtaactaaatacgaaagtgttcaatgag

SEQ ID NO: 534178 - DNA, 33 bp, Homo sapien
gagtagtaactaaatatgaaagtgttcaatgag

SEQ ID NO: 534179 - DNA, 33 bp, Homo sapien
atattccaagatcacaatattggtccctggagg

SEQ ID NO: 534180 - DNA, 33 bp, Homo sapien
atattccaagatcacagtattggtccctggagg

SEQ ID NO: 534181 - DNA, 33 bp, Homo sapien
tgatccaatagagaaaaaagattatgttgatga

SEQ ID NO: 534182 - DNA, 33 bp, Homo sapien
tgatccaatagagaaacaagattatgttgatga

SEQ ID NO: 534183 - DNA, 33 bp, Homo sapien
tctgacttgttggctacaatgctatgccactcc

SEQ ID NO: 534184 - DNA, 33 bp, Homo sapien
tctgacttgttggctataatgctatgccactcc

SEQ ID NO: 534185 - DNA, 33 bp, Homo sapien
cagagtaaatggatagaacagtatcttacacag

SEQ ID NO: 534186 - DNA, 33 bp, Homo sapien
cagagtaaatggataggacagtatcttacacag

SEQ ID NO: 534187 - DNA, 33 bp, Homo sapien
cagtatcctacctacaatcacggtgctgctgaa

SEQ ID NO: 534188 - DNA, 33 bp, Homo sapien
cagtatcctacctacagtcacggtgctgctgaa

SEQ ID NO: 534189 - DNA, 33 bp, Homo sapien
gtgttacattataagaggatcaggcaagatgtg

SEQ ID NO: 534190 - DNA, 33 bp, Homo sapien
gtgttacattataagatgatcaggcaagatgtg

SEQ ID NO: 534191 - DNA, 33 bp, Homo sapien
cttccagtagcctggcagaagagtagatactta

SEQ ID NO: 534192 - DNA, 33 bp, Homo sapien
cttccagtagcctggcggaagagtagatactta

SEQ ID NO: 534193 - DNA, 33 bp, Homo sapien
catcctttgtaacataaaagagactctcaatga

SEQ ID NO: 534194 - DNA, 33 bp, Homo sapien
catcctttgtaacatacaagagactctcaatga

SEQ ID NO: 534195 - DNA, 33 bp, Homo sapien
agggtgttttaggatacggcaaggaaagctata

SEQ ID NO: 534196 - DNA, 33 bp, Homo sapien
agggtgttttaggatatggcaaggaaagctata

SEQ ID NO: 534197 - DNA, 33 bp, Homo sapien
gccacatgaggacagaacaagaaggcagcagtc

SEQ ID NO: 534198 - DNA, 33 bp, Homo sapien
gccacatgaggacagagcaagaaggcagcagtc

SEQ ID NO: 534199 - DNA, 33 bp, Homo sapien
tgagatacttattatccatgtggttctgtttag

SEQ ID NO: 534200 - DNA, 33 bp, Homo sapien
tgagatacttattatctatgtggttctgtttag

SEQ ID NO: 534201 - DNA, 33 bp, Homo sapien
ttagtcagttttcacactacccgagactgagta

SEQ ID NO: 534202 - DNA, 33 bp, Homo sapien
ttagtcagttttcacattacccgagactgagta

SEQ ID NO: 534203 - DNA, 33 bp, Homo sapien
aaaatatccagcacccaacaaagtaaagtttac

SEQ ID NO: 534204 - DNA, 33 bp, Homo sapien
aaaatatccagcacccgacaaagtaaagtttac

SEQ ID NO: 534205 - DNA, 33 bp, Homo sapien
gtagggatgtcgtttcaccatacagattttacc

SEQ ID NO: 534206 - DNA, 33 bp, Homo sapien
gtagggatgtcgtttcgccatacagattttacc

SEQ ID NO: 534207 - DNA, 33 bp, Homo sapien
acacatagctattatcaatttggtaagtaacct

SEQ ID NO: 534208 - DNA, 33 bp, Homo sapien
acacatagctattatccatttggtaagtaacct

SEQ ID NO: 534209 - DNA, 33 bp, Homo sapien
aaaaggaagagctatgccacattatggttggga

SEQ ID NO: 534210 - DNA, 33 bp, Homo sapien
aaaaggaagagctatgtcacattatggttggga

SEQ ID NO: 534211 - DNA, 33 bp, Homo sapien
tcataatctcagtagaaacttttgtgaaactag

SEQ ID NO: 534212 - DNA, 33 bp, Homo sapien
tcataatctcagtagacacttttgtgaaactag

SEQ ID NO: 534213 - DNA, 33 bp, Homo sapien
agtgggaagcataggaaaagttatggaaatatg

SEQ ID NO: 534214 - DNA, 33 bp, Homo sapien
agtgggaagcataggacaagttatggaaatatg

SEQ ID NO: 534215 - DNA, 33 bp, Homo sapien
tgtgtccaagctctcactccatcttggccagga

SEQ ID NO: 534216 - DNA, 33 bp, Homo sapien
tgtgtccaagctctcattccatcttggccagga

SEQ ID NO: 534217 - DNA, 33 bp, Homo sapien
ttgtgagacaaattcaaaaaatgctagttcagg

SEQ ID NO: 534218 - DNA, 33 bp, Homo sapien
ttgtgagacaaattcagaaaatgctagttcagg

SEQ ID NO: 534219 - DNA, 33 bp, Homo sapien
agcattaaattacgacaaaaaatcatgtaagaa

SEQ ID NO: 534220 - DNA, 33 bp, Homo sapien
agcattaaattacgacgaaaaatcatgtaagaa

SEQ ID NO: 534221 - DNA, 33 bp, Homo sapien
tttatttgtcaaaatgcaagtgctctttgatat

SEQ ID NO: 534222 - DNA, 33 bp, Homo sapien
tttatttgtcaaaatgtaagtgctctttgatat

SEQ ID NO: 534223 - DNA, 33 bp, Homo sapien
ttcacagctcaaaaaaattacactaggctaatc

SEQ ID NO: 534224 - DNA, 33 bp, Homo sapien
ttcacagctcaaaaaagttacactaggctaatc

SEQ ID NO: 534225 - DNA, 33 bp, Homo sapien
tcaaacaagattgaaaggcttccatgttttcaa

SEQ ID NO: 534226 - DNA, 33 bp, Homo sapien
tcaaacaagattgaaatgcttccatgttttcaa

SEQ ID NO: 534227 - DNA, 33 bp, Homo sapien
tctgagttcccagtacactagtctccccttatc

SEQ ID NO: 534228 - DNA, 33 bp, Homo sapien
tctgagttcccagtactctagtctccccttatc

SEQ ID NO: 534229 - DNA, 33 bp, Homo sapien
atacctgattggcaaaacagagcctaagaacca

SEQ ID NO: 534230 - DNA, 33 bp, Homo sapien
atacctgattggcaaagcagagcctaagaacca

SEQ ID NO: 534231 - DNA, 33 bp, Homo sapien
atcaatttattagctaactgctgagattcctaa

SEQ ID NO: 534232 - DNA, 33 bp, Homo sapien
atcaatttattagctatctgctgagattcctaa

SEQ ID NO: 534233 - DNA, 33 bp, Homo sapien
aggtttgatcattatacgtcactatttgacttc

SEQ ID NO: 534234 - DNA, 33 bp, Homo sapien
aggtttgatcattatatgtcactatttgacttc

SEQ ID NO: 534235 - DNA, 33 bp, Homo sapien
ctaggaagttgtgggaaaagattcaaacctagg

SEQ ID NO: 534236 - DNA, 33 bp, Homo sapien
ctaggaagttgtgggacaagattcaaacctagg

SEQ ID NO: 534237 - DNA, 33 bp, Homo sapien
gtttataccatgaactaaatgtttggaagccac

SEQ ID NO: 534238 - DNA, 33 bp, Homo sapien
gtttataccatgaactgaatgtttggaagccac

SEQ ID NO: 534239 - DNA, 33 bp, Homo sapien
tactaattcagttaaacaaggaaacaatcaaaa

SEQ ID NO: 534240 - DNA, 33 bp, Homo sapien
tactaattcagttaaagaaggaaacaatcaaaa

SEQ ID NO: 534241 - DNA, 33 bp, Homo sapien
tcttcttgcctctgacccatgctagtacactgc

SEQ ID NO: 534242 - DNA, 33 bp, Homo sapien
tcttcttgcctctgactcatgctagtacactgc

SEQ ID NO: 534243 - DNA, 33 bp, Homo sapien
aatgtatgcgtccctccaaaattcatatgttgg

SEQ ID NO: 534244 - DNA, 33 bp, Homo sapien
aatgtatgcgtccctctaaaattcatatgttgg

SEQ ID NO: 534245 - DNA, 33 bp, Homo sapien
ggtgtgtggctttgagaaggataaaaaggagga

SEQ ID NO: 534246 - DNA, 33 bp, Homo sapien
ggtgtgtggctttgaggaggataaaaaggagga

SEQ ID NO: 534247 - DNA, 33 bp, Homo sapien
ggccaaggcaagaggagcaattaaagtcaggag

SEQ ID NO: 534248 - DNA, 33 bp, Homo sapien
ggccaaggcaagaggatcaattaaagtcaggag

SEQ ID NO: 534249 - DNA, 33 bp, Homo sapien
taaagcacatctggagaactgtacataatatat

SEQ ID NO: 534250 - DNA, 33 bp, Homo sapien
taaagcacatctggaggactgtacataatatat

SEQ ID NO: 534251 - DNA, 33 bp, Homo sapien
aaaccttttggaaacaaggctcaatgtctcaga

SEQ ID NO: 534252 - DNA, 33 bp, Homo sapien
aaaccttttggaaacagggctcaatgtctcaga

SEQ ID NO: 534253 - DNA, 33 bp, Homo sapien
tgtctaagaactccacacattggtaagacctaa

SEQ ID NO: 534254 - DNA, 33 bp, Homo sapien
tgtctaagaactccacgcattggtaagacctaa

SEQ ID NO: 534255 - DNA, 33 bp, Homo sapien
gagaagaaggagaaaaaaaagtaggcatgatct

SEQ ID NO: 534256 - DNA, 33 bp, Homo sapien
gagaagaaggagaaaagaaagtaggcatgatct

SEQ ID NO: 534257 - DNA, 33 bp, Homo sapien
acattagccgaacccaagtagaagacacgagaa

SEQ ID NO: 534258 - DNA, 33 bp, Homo sapien
acattagccgaacccaggtagaagacacgagaa

SEQ ID NO: 534259 - DNA, 33 bp, Homo sapien
ctgtttcttcacagtaccaattgccatcaggag

SEQ ID NO: 534260 - DNA, 33 bp, Homo sapien
ctgtttcttcacagtatcaattgccatcaggag

SEQ ID NO: 534261 - DNA, 33 bp, Homo sapien
actcagtaaatagtcccgaacggaagagaaaat

SEQ ID NO: 534262 - DNA, 33 bp, Homo sapien
actcagtaaatagtccggaacggaagagaaaat

SEQ ID NO: 534263 - DNA, 33 bp, Homo sapien
aaacctaagccaaagacagaggcccttggaagt

SEQ ID NO: 534264 - DNA, 33 bp, Homo sapien
aaacctaagccaaagagagaggcccttggaagt

SEQ ID NO: 534265 - DNA, 33 bp, Homo sapien
ttaaactgccatagtacgcactgttatgactga

SEQ ID NO: 534266 - DNA, 33 bp, Homo sapien
ttaaactgccatagtatgcactgttatgactga

SEQ ID NO: 534267 - DNA, 33 bp, Homo sapien
tgagaatatgtaaacacgaatgtggccttgctc

SEQ ID NO: 534268 - DNA, 33 bp, Homo sapien
tgagaatatgtaaacaggaatgtggccttgctc

SEQ ID NO: 534269 - DNA, 33 bp, Homo sapien
atgctccctgaagaggccattctgttctcttct

SEQ ID NO: 534270 - DNA, 33 bp, Homo sapien
atgctccctgaagaggtcattctgttctcttct

SEQ ID NO: 534271 - DNA, 33 bp, Homo sapien
agagacagggagtctacgtgcctaaaagcattg

SEQ ID NO: 534272 - DNA, 33 bp, Homo sapien
agagacagggagtctatgtgcctaaaagcattg

SEQ ID NO: 534273 - DNA, 33 bp, Homo sapien
ggaggaaaggatagcacgtgggaaattgtatgg

SEQ ID NO: 534274 - DNA, 33 bp, Homo sapien
ggaggaaaggatagcatgtgggaaattgtatgg

SEQ ID NO: 534275 - DNA, 33 bp, Homo sapien
tttggtctattcatggaaaaggtttgtcacagc

SEQ ID NO: 534276 - DNA, 33 bp, Homo sapien
tttggtctattcatgggaaaggtttgtcacagc

SEQ ID NO: 534277 - DNA, 33 bp, Homo sapien
ctgggaggagtgagaaatgacacagtactaggg

SEQ ID NO: 534278 - DNA, 33 bp, Homo sapien
ctgggaggagtgagaactgacacagtactaggg

SEQ ID NO: 534279 - DNA, 33 bp, Homo sapien
cataaactggaaaacgcagaggagataaattcc

SEQ ID NO: 534280 - DNA, 33 bp, Homo sapien
cataaactggaaaacggagaggagataaattcc

SEQ ID NO: 534281 - DNA, 33 bp, Homo sapien; identical to SEQ ID NO: 534279

SEQ ID NO: 534282 - DNA, 33 bp, Homo sapien; identical to SEQ ID NO: 534280

SEQ ID NO: 534283 - DNA, 33 bp, Homo sapien
agttgatttttttataaggtgagaaatgaggat

SEQ ID NO: 534284 - DNA, 33 bp, Homo sapien
agttgatttttttatacggtgagaaatgaggat

SEQ ID NO: 534285 - DNA, 33 bp, Homo sapien
catcaggaatttgaagcatttctaggaatctag

SEQ ID NO: 534286 - DNA, 33 bp, Homo sapien
catcaggaatttgaaggatttctaggaatctag

SEQ ID NO: 534287 - DNA, 33 bp, Homo sapien
tacagctcacaggctactaccaagtgttggtca

SEQ ID NO: 534288 - DNA, 33 bp, Homo sapien
tacagctcacaggctattaccaagtgttggtca

SEQ ID NO: 534289 - DNA, 33 bp, Homo sapien
gtatccacctacagtacaataagtagcagaagt

SEQ ID NO: 534290 - DNA, 33 bp, Homo sapien
gtatccacctacagtataataagtagcagaagt

SEQ ID NO: 534291 - DNA, 33 bp, Homo sapien
agtcagtctggaaaggaaaaccaacccattttg

SEQ ID NO: 534292 - DNA, 33 bp, Homo sapien
agtcagtctggaaagggaaaccaacccattttg

SEQ ID NO: 534293 - DNA, 33 bp, Homo sapien
tgatgtggaatttacacaatccatgagattcca

SEQ ID NO: 534294 - DNA, 33 bp, Homo sapien
tgatgtggaatttacataatccatgagattcca

SEQ ID NO: 534295 - DNA, 33 bp, Homo sapien
ggtgctgcaggcagatcactctcatggtctggc

SEQ ID NO: 534296 - DNA, 33 bp, Homo sapien
ggtgctgcaggcagatgactctcatggtctggc

SEQ ID NO: 534297 - DNA, 33 bp, Homo sapien
aaatgtaagtttggaaagaaagataattgactt

SEQ ID NO: 534298 - DNA, 33 bp, Homo sapien
aaatgtaagtttggaaggaaagataattgactt

SEQ ID NO: 534299 - DNA, 33 bp, Homo sapien
agaatccagcaactagaaacttagtggcagttc

SEQ ID NO: 534300 - DNA, 33 bp, Homo sapien
agaatccagcaactaggaacttagtggcagttc

SEQ ID NO: 534301 - DNA, 33 bp, Homo sapien
tgtcctctttgcctataaagtgcctacttactc

SEQ ID NO: 534302 - DNA, 33 bp, Homo sapien
tgtcctctttgcctatgaagtgcctacttactc

SEQ ID NO: 534303 - DNA, 33 bp, Homo sapien
aatcaaagtaggaaagaacctcattttaatcat

SEQ ID NO: 534304 - DNA, 33 bp, Homo sapien
aatcaaagtaggaaaggacctcattttaatcat

SEQ ID NO: 534305 - DNA, 33 bp, Homo sapien
aaaaccaacccgaacaatacaatgatttcatcc

SEQ ID NO: 534306 - DNA, 33 bp, Homo sapien
aaaaccaacccgaacagtacaatgatttcatcc

SEQ ID NO: 534307 - DNA, 33 bp, Homo sapien
ttctttagggatagtaacagcaccttgccttac

SEQ ID NO: 534308 - DNA, 33 bp, Homo sapien
ttctttagggatagtagcagcaccttgccttac

SEQ ID NO: 534309 - DNA, 33 bp, Homo sapien
tctgttgttcaagcgcacagatggaaagggttg

SEQ ID NO: 534310 - DNA, 33 bp, Homo sapien
tctgttgttcaagcgcgcagatggaaagggttg

SEQ ID NO: 534311 - DNA, 33 bp, Homo sapien
ctatttaattgtggagcaaatgacctcttatta

SEQ ID NO: 534312 - DNA, 33 bp, Homo sapien
ctatttaattgtggagtaaatgacctcttatta

SEQ ID NO: 534313 - DNA, 33 bp, Homo sapien
tcttgcaatccaagcgaagagagaagactggct

SEQ ID NO: 534314 - DNA, 33 bp, Homo sapien
tcttgcaatccaagcggagagagaagactggct

SEQ ID NO: 534315 - DNA, 33 bp, Homo sapien
tgctttccctaactccaattccacttctctttg

SEQ ID NO: 534316 - DNA, 33 bp, Homo sapien
tgctttccctaactcccattccacttctctttg

SEQ ID NO: 534317 - DNA, 33 bp, Homo sapien
caccctcaagtagaccccgctgtctgttgtttc

SEQ ID NO: 534318 - DNA, 33 bp, Homo sapien
caccctcaagtagaccgcgctgtctgttgtttc

SEQ ID NO: 534319 - DNA, 33 bp, Homo sapien
aaattccttcccccaacacagcctgcaattttt

SEQ ID NO: 534320 - DNA, 33 bp, Homo sapien
aaattccttcccccaatacagcctgcaattttt

SEQ ID NO: 534321 - DNA, 33 bp, Homo sapien
attactcttttatccccatttattcctagcaaa

SEQ ID NO: 534322 - DNA, 33 bp, Homo sapien
attactcttttatcccgatttattcctagcaaa

SEQ ID NO: 534323 - DNA, 33 bp, Homo sapien
tatatgacttagaaataaaagtaagaacattcc

SEQ ID NO: 534324 - DNA, 33 bp, Homo sapien
tatatgacttagaaatgaaagtaagaacattcc

SEQ ID NO: 534325 - DNA, 33 bp, Homo sapien
atttcacattaggaacaagctgtgtgatctcag

SEQ ID NO: 534326 - DNA, 33 bp, Homo sapien
atttcacattaggaaccagctgtgtgatctcag

SEQ ID NO: 534327 - DNA, 33 bp, Homo sapien
tctaggctgagagttccaaaagaaagcagctgg

SEQ ID NO: 534328 - DNA, 33 bp, Homo sapien
tctaggctgagagttctaaaagaaagcagctgg

SEQ ID NO: 534329 - DNA, 33 bp, Homo sapien
attcctattgttttacactggaaagaaggcttt

SEQ ID NO: 534330 - DNA, 33 bp, Homo sapien
attcctattgttttacgctggaaagaaggcttt

SEQ ID NO: 534331 - DNA, 33 bp, Homo sapien
ggatcgggtgctcatgaacaagtgactggctta

SEQ ID NO: 534332 - DNA, 33 bp, Homo sapien
ggatcgggtgctcatggacaagtgactggctta

SEQ ID NO: 534333 - DNA, 33 bp, Homo sapien
agaaactgcaccaagaaatttaggaactcattg

SEQ ID NO: 534334 - DNA, 33 bp, Homo sapien
agaaactgcaccaagagatttaggaactcattg

SEQ ID NO: 534335 - DNA, 33 bp, Homo sapien
caattaggagactccaatgactatcaaatctaa

SEQ ID NO: 534336 - DNA, 33 bp, Homo sapien
caattaggagactccagtgactatcaaatctaa

SEQ ID NO: 534337 - DNA, 33 bp, Homo sapien
cacataaatacaatggccaaggcaaagactgaa

SEQ ID NO: 534338 - DNA, 33 bp, Homo sapien
cacataaatacaatggtcaaggcaaagactgaa

SEQ ID NO: 534339 - DNA, 33 bp, Homo sapien
ttcaaaattacagaaaatgacaaaaagtgtgct

SEQ ID NO: 534340 - DNA, 33 bp, Homo sapien
ttcaaaattacagaaagtgacaaaaagtgtgct

SEQ ID NO: 534341 - DNA, 33 bp, Homo sapien
cattcactaaacacacaataactgccctacatt

SEQ ID NO: 534342 - DNA, 33 bp, Homo sapien
cattcactaaacacacgataactgccctacatt

SEQ ID NO: 534343 - DNA, 33 bp, Homo sapien
gctaatcagaaatccaaaagaatgtaaccgttt

SEQ ID NO: 534344 - DNA, 33 bp, Homo sapien
gctaatcagaaatccagaagaatgtaaccgttt

SEQ ID NO: 534345 - DNA, 33 bp, Homo sapien
catttctgccgtccacacagttgcttcttctcc

SEQ ID NO: 534346 - DNA, 33 bp, Homo sapien
catttctgccgtccacgcagttgcttcttctcc

SEQ ID NO: 534347 - DNA, 33 bp, Homo sapien
gcatggaaactccaacagtatgtgttaaaattc

SEQ ID NO: 534348 - DNA, 33 bp, Homo sapien
gcatggaaactccaacggtatgtgttaaaattc

SEQ ID NO: 534349 - DNA, 33 bp, Homo sapien
gccattgtgttttccacctagacaattgcatca

SEQ ID NO: 534350 - DNA, 33 bp, Homo sapien
gccattgtgttttccatctagacaattgcatca

SEQ ID NO: 534351 - DNA, 33 bp, Homo sapien
cccttgacaaaatacaaaactcacttaccagaa

SEQ ID NO: 534352 - DNA, 33 bp, Homo sapien
cccttgacaaaatacataactcacttaccagaa

SEQ ID NO: 534353 - DNA, 33 bp, Homo sapien
tgcctcgacctggaaccatgtattcgatggagt

SEQ ID NO: 534354 - DNA, 33 bp, Homo sapien
tgcctcgacctggaacgatgtattcgatggagt

SEQ ID NO: 534355 - DNA, 33 bp, Homo sapien
gtcttaaagagaagcactaatctcggccatgtt

SEQ ID NO: 534356 - DNA, 33 bp, Homo sapien
gtcttaaagagaagcattaatctcggccatgtt

SEQ ID NO: 534357 - DNA, 33 bp, Homo sapien
tcaaattagagcctgaaaagtctaagcaagaac

SEQ ID NO: 534358 - DNA, 33 bp, Homo sapien
tcaaattagagcctgagaagtctaagcaagaac

SEQ ID NO: 534359 - DNA, 33 bp, Homo sapien
ctattcttagaggaaactatcatgttctagctc

SEQ ID NO: 534360 - DNA, 33 bp, Homo sapien
ctattcttagaggaaagtatcatgttctagctc

SEQ ID NO: 534361 - DNA, 33 bp, Homo sapien
actagcactttatttcacctcccctcagggact

SEQ ID NO: 534362 - DNA, 33 bp, Homo sapien
actagcactttatttcgcctcccctcagggact

SEQ ID NO: 534363 - DNA, 33 bp, Homo sapien
aagggtagtagccaagaatgaggagacataaag

SEQ ID NO: 534364 - DNA, 33 bp, Homo sapien
aagggtagtagccaaggatgaggagacataaag

SEQ ID NO: 534365 - DNA, 33 bp, Homo sapien
gttgaggatgaaagtcccagaataaccaaggtc

SEQ ID NO: 534366 - DNA, 33 bp, Homo sapien
gttgaggatgaaagtctcagaataaccaaggtc

SEQ ID NO: 534367 - DNA, 33 bp, Homo sapien
ccatcctcaaagacaaacactcaagtttataaa

SEQ ID NO: 534368 - DNA, 33 bp, Homo sapien
ccatcctcaaagacaagcactcaagtttataaa

SEQ ID NO: 534369 - DNA, 33 bp, Homo sapien
ctgcaatgaagaagcgcagattttgacaatagt

SEQ ID NO: 534370 - DNA, 33 bp, Homo sapien
ctgcaatgaagaagcgtagattttgacaatagt

SEQ ID NO: 534371 - DNA, 33 bp, Homo sapien
ttctacaaccaagtgaagcagagaaatgggcag

SEQ ID NO: 534372 - DNA, 33 bp, Homo sapien
ttctacaaccaagtgaggcagagaaatgggcag

SEQ ID NO: 534373 - DNA, 33 bp, Homo sapien
aatatgcattggtttacggacaattgtatagtt

SEQ ID NO: 534374 - DNA, 33 bp, Homo sapien
aatatgcattggtttagggacaattgtatagtt

SEQ ID NO: 534375 - DNA, 33 bp, Homo sapien
caccagcaaagagacaaatacacttttatgaca

SEQ ID NO: 534376 - DNA, 33 bp, Homo sapien
caccagcaaagagacagatacacttttatgaca

SEQ ID NO: 534377 - DNA, 33 bp, Homo sapien
ttttagaaactatgaccaggtaagaggtcggat

SEQ ID NO: 534378 - DNA, 33 bp, Homo sapien
ttttagaaactatgactaggtaagaggtcggat

SEQ ID NO: 534379 - DNA, 33 bp, Homo sapien
gaatactttaggagaactggtgaagcataatgc

SEQ ID NO: 534380 - DNA, 33 bp, Homo sapien
gaatactttaggagaattggtgaagcataatgc

SEQ ID NO: 534381 - DNA, 33 bp, Homo sapien
tctaatcacaaaggaaaatatcactgaacaatg

SEQ ID NO: 534382 - DNA, 33 bp, Homo sapien
tctaatcacaaaggaagatatcactgaacaatg

SEQ ID NO: 534383 - DNA, 33 bp, Homo sapien
tcctagggtcctctaaacatgactctcttatca

SEQ ID NO: 534384 - DNA, 33 bp, Homo sapien
tcctagggtcctctaagcatgactctcttatca

SEQ ID NO: 534385 - DNA, 33 bp, Homo sapien
aaaggcctagtgtcaacggctgagcatccttct

SEQ ID NO: 534386 - DNA, 33 bp, Homo sapien
aaaggcctagtgtcaatggctgagcatccttct

SEQ ID NO: 534387 - DNA, 33 bp, Homo sapien
ggaagtaccaaggcagcaactggtagaacttaa

SEQ ID NO: 534388 - DNA, 33 bp, Homo sapien
ggaagtaccaaggcaggaactggtagaacttaa

SEQ ID NO: 534389 - DNA, 33 bp, Homo sapien
aggcaggcaagttataaaaggtgagcaaaacca

SEQ ID NO: 534390 - DNA, 33 bp, Homo sapien
aggcaggcaagttatacaaggtgagcaaaacca

SEQ ID NO: 534391 - DNA, 33 bp, Homo sapien
attaccttacaaactcaactaattgaaatcttt

SEQ ID NO: 534392 - DNA, 33 bp, Homo sapien
attaccttacaaactccactaattgaaatcttt

SEQ ID NO: 534393 - DNA, 33 bp, Homo sapien
caaagctctgttcttaaatttgtcgccacatat

SEQ ID NO: 534394 - DNA, 33 bp, Homo sapien
caaagctctgttcttacatttgtcgccacatat

SEQ ID NO: 534395 - DNA, 33 bp, Homo sapien
actagtgtaacactaaaatgctatgattaacca

SEQ ID NO: 534396 - DNA, 33 bp, Homo sapien
actagtgtaacactaagatgctatgattaacca

SEQ ID NO: 534397 - DNA, 33 bp, Homo sapien
tcggaacgtttgctgaactctataatttgtatt

SEQ ID NO: 534398 - DNA, 33 bp, Homo sapien
tcggaacgtttgctgagctctataatttgtatt

SEQ ID NO: 534399 - DNA, 33 bp, Homo sapien
tttcaagtttctttcacctcaaactgacagctt

SEQ ID NO: 534400 - DNA, 33 bp, Homo sapien
tttcaagtttctttcagctcaaactgacagctt

SEQ ID NO: 534401 - DNA, 33 bp, Homo sapien
cacccaagagttctgacagagacgtacaaggag

SEQ ID NO: 534402 - DNA, 33 bp, Homo sapien
cacccaagagttctgatagagacgtacaaggag

SEQ ID NO: 534403 - DNA, 33 bp, Homo sapien
tggttataattagtatcaattttcaaaagctca

SEQ ID NO: 534404 - DNA, 33 bp, Homo sapien
tggttataattagtatgaattttcaaaagctca

SEQ ID NO: 534405 - DNA, 33 bp, Homo sapien
cttaataaacagaaacacaatacagctaaagag

SEQ ID NO: 534406 - DNA, 33 bp, Homo sapien
cttaataaacagaaacgcaatacagctaaagag

SEQ ID NO: 534407 - DNA, 33 bp, Homo sapien
tttgaataggccttcactagtttaggaagtcag

SEQ ID NO: 534408 - DNA, 33 bp, Homo sapien
tttgaataggccttcattagtttaggaagtcag

SEQ ID NO: 534409 - DNA, 33 bp, Homo sapien
taataggtgacattaaacacctacagtatacca

SEQ ID NO: 534410 - DNA, 33 bp, Homo sapien
taataggtgacattaagcacctacagtatacca

SEQ ID NO: 534411 - DNA, 33 bp, Homo sapien
gtccagggtaagccacaaggcattgtcatctca

SEQ ID NO: 534412 - DNA, 33 bp, Homo sapien
gtccagggtaagccacgaggcattgtcatctca

SEQ ID NO: 534413 - DNA, 33 bp, Homo sapien
agttctctttgaagaccgataatgggcttaccg

SEQ ID NO: 534414 - DNA, 33 bp, Homo sapien
agttctctttgaagactgataatgggcttaccg

SEQ ID NO: 534415 - DNA, 33 bp, Homo sapien
gaagctctgctctaacccacaagaaatctgggg

SEQ ID NO: 534416 - DNA, 33 bp, Homo sapien
gaagctctgctctaactcacaagaaatctgggg

SEQ ID NO: 534417 - DNA, 33 bp, Homo sapien
cgtggctgaacgtggcaagagtcatgaataaca

SEQ ID NO: 534418 - DNA, 33 bp, Homo sapien
cgtggctgaacgtggcgagagtcatgaataaca

SEQ ID NO: 534419 - DNA, 33 bp, Homo sapien
taaggactcactgtgaaagtggtatcagtacta

SEQ ID NO: 534420 - DNA, 33 bp, Homo sapien
taaggactcactgtgagagtggtatcagtacta

SEQ ID NO: 534421 - DNA, 33 bp, Homo sapien
gggggtcctttccaatagagtgagcagttgtcc

SEQ ID NO: 534422 - DNA, 33 bp, Homo sapien
gggggtcctttccaatggagtgagcagttgtcc

SEQ ID NO: 534423 - DNA, 33 bp, Homo sapien
tgggattatttgaagcaaataccagacatcaca

SEQ ID NO: 534424 - DNA, 33 bp, Homo sapien
tgggattatttgaagccaataccagacatcaca

SEQ ID NO: 534425 - DNA, 33 bp, Homo sapien
tttgcaaaggtgttcacggactcaggtgtcctc

SEQ ID NO: 534426 - DNA, 33 bp, Homo sapien
tttgcaaaggtgttcatggactcaggtgtcctc

SEQ ID NO: 534427 - DNA, 33 bp, Homo sapien
ccaacaaataactaccaaagtgaactgtgtgac

SEQ ID NO: 534428 - DNA, 33 bp, Homo sapien
ccaacaaataactaccgaagtgaactgtgtgac

SEQ ID NO: 534429 - DNA, 33 bp, Homo sapien
ttactgatgctgtagaaaacataaatggagtta

SEQ ID NO: 534430 - DNA, 33 bp, Homo sapien
ttactgatgctgtagataacataaatggagtta

SEQ ID NO: 534431 - DNA, 33 bp, Homo sapien
ggcaggaaaaagcaagaaggatgtgttatcatc

SEQ ID NO: 534432 - DNA, 33 bp, Homo sapien
ggcaggaaaaagcaaggaggatgtgttatcatc

SEQ ID NO: 534433 - DNA, 33 bp, Homo sapien
atgcctcaggttcccacgctaaatcaaaattct

SEQ ID NO: 534434 - DNA, 33 bp, Homo sapien
atgcctcaggttcccatgctaaatcaaaattct

SEQ ID NO: 534435 - DNA, 33 bp, Homo sapien
agcttataaactgtaactctagacaatgtctat

SEQ ID NO: 534436 - DNA, 33 bp, Homo sapien
agcttataaactgtaattctagacaatgtctat

SEQ ID NO: 534437 - DNA, 33 bp, Homo sapien
gcatttaggcgctcacaaaggagtaaaggaact

SEQ ID NO: 534438 - DNA, 33 bp, Homo sapien
gcatttaggcgctcaccaaggagtaaaggaact

SEQ ID NO: 534439 - DNA, 33 bp, Homo sapien
ttctcaaaaaggagagcattattatgccattga

SEQ ID NO: 534440 - DNA, 33 bp, Homo sapien
ttctcaaaaaggagagtattattatgccattga

SEQ ID NO: 534441 - DNA, 33 bp, Homo sapien
aaaagtctatcgtatgcacaatctatactgtcc

SEQ ID NO: 534442 - DNA, 33 bp, Homo sapien
aaaagtctatcgtatgtacaatctatactgtcc

SEQ ID NO: 534443 - DNA, 33 bp, Homo sapien
ttctgtaagaaaggcaccaaagtcgtcacaccc

SEQ ID NO: 534444 - DNA, 33 bp, Homo sapien
ttctgtaagaaaggcatcaaagtcgtcacaccc

SEQ ID NO: 534445 - DNA, 33 bp, Homo sapien
agatgacaatatactacaagagttgagctattt

SEQ ID NO: 534446 - DNA, 33 bp, Homo sapien
agatgacaatatactagaagagttgagctattt

SEQ ID NO: 534447 - DNA, 33 bp, Homo sapien
ttctagaagtcaaaaccgtggccaagaaaatga

SEQ ID NO: 534448 - DNA, 33 bp, Homo sapien
ttctagaagtcaaaactgtggccaagaaaatga

SEQ ID NO: 534449 - DNA, 33 bp, Homo sapien
ctttgtatccattaaccaactttctcttatccc

SEQ ID NO: 534450 - DNA, 33 bp, Homo sapien
ctttgtatccattaacgaactttctcttatccc

SEQ ID NO: 534451 - DNA, 33 bp, Homo sapien
aatatggcgataagcaactcactggcattagag

SEQ ID NO: 534452 - DNA, 33 bp, Homo sapien
aatatggcgataagcagctcactggcattagag

SEQ ID NO: 534453 - DNA, 33 bp, Homo sapien
ataaaatcaggccagaagtttttcctctccacc

SEQ ID NO: 534454 - DNA, 33 bp, Homo sapien
ataaaatcaggccagatgtttttcctctccacc

SEQ ID NO: 534455 - DNA, 33 bp, Homo sapien
gtttcaaaatttattccagtcttttacgattga

SEQ ID NO: 534456 - DNA, 33 bp, Homo sapien
gtttcaaaatttattcgagtcttttacgattga

SEQ ID NO: 534457 - DNA, 33 bp, Homo sapien
ctattcagagagaacacattggtaagattttgg

SEQ ID NO: 534458 - DNA, 33 bp, Homo sapien
ctattcagagagaacatattggtaagattttgg

SEQ ID NO: 534459 - DNA, 33 bp, Homo sapien
agaaatgaaaatgaaaatcacaggctaggagag

SEQ ID NO: 534460 - DNA, 33 bp, Homo sapien
agaaatgaaaatgaaagtcacaggctaggagag

SEQ ID NO: 534461 - DNA, 33 bp, Homo sapien
taacaacaggatctgccctaattctaataggtc

SEQ ID NO: 534462 - DNA, 33 bp, Homo sapien
taacaacaggatctgcgctaattctaataggtc

SEQ ID NO: 534463 - DNA, 33 bp, Homo sapien
tctaagtaccactggaataagagaaatctaatg

SEQ ID NO: 534464 - DNA, 33 bp, Homo sapien
tctaagtaccactggagtaagagaaatctaatg

SEQ ID NO: 534465 - DNA, 33 bp, Homo sapien
gatgtcagataggctaaagtctggcttccctca

SEQ ID NO: 534466 - DNA, 33 bp, Homo sapien
gatgtcagataggctagagtctggcttccctca

SEQ ID NO: 534467 - DNA, 33 bp, Homo sapien
attctaattggattgaactctagaaaatgcacc

SEQ ID NO: 534468 - DNA, 33 bp, Homo sapien
attctaattggattgagctctagaaaatgcacc

SEQ ID NO: 534469 - DNA, 33 bp, Homo sapien
tgttaagcagtggaaaacaaagatgaatgcact

SEQ ID NO: 534470 - DNA, 33 bp, Homo sapien
tgttaagcagtggaaagcaaagatgaatgcact

SEQ ID NO: 534471 - DNA, 33 bp, Homo sapien
ataacttcctactgtaaatcacgtagagtttat

SEQ ID NO: 534472 - DNA, 33 bp, Homo sapien
ataacttcctactgtacatcacgtagagtttat

SEQ ID NO: 534473 - DNA, 33 bp, Homo sapien
ctcaattagtatcatccgaatgtcccaggtgaa

SEQ ID NO: 534474 - DNA, 33 bp, Homo sapien
ctcaattagtatcatctgaatgtcccaggtgaa

SEQ ID NO: 534475 - DNA, 33 bp, Homo sapien
gggatatccctacaccaaagaatagaactggac

SEQ ID NO: 534476 - DNA, 33 bp, Homo sapien
gggatatccctacaccgaagaatagaactggac

SEQ ID NO: 534477 - DNA, 33 bp, Homo sapien
gagacaaatcatttaacggtggctttattagct

SEQ ID NO: 534478 - DNA, 33 bp, Homo sapien
gagacaaatcatttaatggtggctttattagct

SEQ ID NO: 534479 - DNA, 33 bp, Homo sapien
actcatgatagggagacaagtcaaacacataga

SEQ ID NO: 534480 - DNA, 33 bp, Homo sapien
actcatgatagggagagaagtcaaacacataga

SEQ ID NO: 534481 - DNA, 33 bp, Homo sapien
aacgtcacagttttcacgagaaagaagtagccc

SEQ ID NO: 534482 - DNA, 33 bp, Homo sapien
aacgtcacagttttcatgagaaagaagtagccc

SEQ ID NO: 534483 - DNA, 33 bp, Homo sapien
aagtgaaaagtgctaaataagtggtctagatgt

SEQ ID NO: 534484 - DNA, 33 bp, Homo sapien
aagtgaaaagtgctaagtaagtggtctagatgt

SEQ ID NO: 534485 - DNA, 33 bp, Homo sapien
tactgtattgtataaaacctggctcagaaaggg

SEQ ID NO: 534486 - DNA, 33 bp, Homo sapien
tactgtattgtataaaccctggctcagaaaggg

SEQ ID NO: 534487 - DNA, 33 bp, Homo sapien
acattattgagtaaaacccacatatgtcactag

SEQ ID NO: 534488 - DNA, 33 bp, Homo sapien
acattattgagtaaaatccacatatgtcactag

SEQ ID NO: 534489 - DNA, 33 bp, Homo sapien
gaaatgttgttcatgtaaagtcagtatcttgtt

SEQ ID NO: 534490 - DNA, 33 bp, Homo sapien
gaaatgttgttcatgtgaagtcagtatcttgtt

SEQ ID NO: 534491 - DNA, 33 bp, Homo sapien
ttgtatctgtggattaaagctgggaccagaggt

SEQ ID NO: 534492 - DNA, 33 bp, Homo sapien
ttgtatctgtggattagagctgggaccagaggt

SEQ ID NO: 534493 - DNA, 33 bp, Homo sapien
atttagttcaagacaacgcacatttgctgtgtc

SEQ ID NO: 534494 - DNA, 33 bp, Homo sapien
atttagttcaagacaatgcacatttgctgtgtc

SEQ ID NO: 534495 - DNA, 33 bp, Homo sapien
tccatagctttcattcccttgaaattctctcac

SEQ ID NO: 534496 - DNA, 33 bp, Homo sapien
tccatagctttcattctcttgaaattctctcac

SEQ ID NO: 534497 - DNA, 33 bp, Homo sapien
cagatgcggagaggaaaggaagattttttccca

SEQ ID NO: 534498 - DNA, 33 bp, Homo sapien
cagatgcggagaggaagggaagattttttccca

SEQ ID NO: 534499 - DNA, 33 bp, Homo sapien
cagttcttgctcagtcgctgttagtgagtaaag

SEQ ID NO: 534500 - DNA, 33 bp, Homo sapien
cagttcttgctcagtctctgttagtgagtaaag

SEQ ID NO: 534501 - DNA, 33 bp, Homo sapien
atgggtttttgtgtaaccatacgctttcatttt

SEQ ID NO: 534502 - DNA, 33 bp, Homo sapien
atgggtttttgtgtaatcatacgctttcatttt

SEQ ID NO: 534503 - DNA, 33 bp, Homo sapien
ccatttggatcaattaactgaataactccactt

SEQ ID NO: 534504 - DNA, 33 bp, Homo sapien
ccatttggatcaattacctgaataactccactt

SEQ ID NO: 534505 - DNA, 33 bp, Homo sapien
ctcctttgactggtggacatatttatggggggc

SEQ ID NO: 534506 - DNA, 33 bp, Homo sapien
ctcctttgactggtgggcatatttatggggggc

SEQ ID NO: 534507 - DNA, 33 bp, Homo sapien
cctggcaaacaatagacactcatttggacattg

SEQ ID NO: 534508 - DNA, 33 bp, Homo sapien
cctggcaaacaatagatactcatttggacattg

SEQ ID NO: 534509 - DNA, 33 bp, Homo sapien
taaagtatttcataacagcaaaacaatattaaa

SEQ ID NO: 534510 - DNA, 33 bp, Homo sapien
taaagtatttcataacggcaaaacaatattaaa

SEQ ID NO: 534511 - DNA, 33 bp, Homo sapien
attcctttaagttgaaatactgattgttgcatg

SEQ ID NO: 534512 - DNA, 33 bp, Homo sapien
attcctttaagttgaagtactgattgttgcatg

SEQ ID NO: 534513 - DNA, 33 bp, Homo sapien
cccttcagccaaactggaatacattagactctt

SEQ ID NO: 534514 - DNA, 33 bp, Homo sapien
cccttcagccaaactgtaatacattagactctt

SEQ ID NO: 534515 - DNA, 33 bp, Homo sapien
aaagaagagtttgtcacgaagcatgaattatca

SEQ ID NO: 534516 - DNA, 33 bp, Homo sapien
aaagaagagtttgtcatgaagcatgaattatca

SEQ ID NO: 534517 - DNA, 33 bp, Homo sapien
gatgcttcacctattacctgagggttttgtttg

SEQ ID NO: 534518 - DNA, 33 bp, Homo sapien
gatgcttcacctattatctgagggttttgtttg

SEQ ID NO: 534519 - DNA, 33 bp, Homo sapien
agccatcttgataccaatgaatgttcaatatac

SEQ ID NO: 534520 - DNA, 33 bp, Homo sapien
agccatcttgataccagtgaatgttcaatatac

SEQ ID NO: 534521 - DNA, 33 bp, Homo sapien
taataatgtataaacaaaacaattattcacatc

SEQ ID NO: 534522 - DNA, 33 bp, Homo sapien
taataatgtataaacagaacaattattcacatc

SEQ ID NO: 534523 - DNA, 33 bp, Homo sapien
taattcaaagcccatactatacttcctgggttc

SEQ ID NO: 534524 - DNA, 33 bp, Homo sapien
taattcaaagcccatattatacttcctgggttc

SEQ ID NO: 534525 - DNA, 33 bp, Homo sapien
tctggatgagcagccaaacaggaaacattaaga

SEQ ID NO: 534526 - DNA, 33 bp, Homo sapien
tctggatgagcagccagacaggaaacattaaga

SEQ ID NO: 534527 - DNA, 33 bp, Homo sapien
gttcctggagtatgaacggagcctctaatcaga

SEQ ID NO: 534528 - DNA, 33 bp, Homo sapien
gttcctggagtatgaatggagcctctaatcaga

SEQ ID NO: 534529 - DNA, 33 bp, Homo sapien
aaggcctttgactcacaaaatgctacaaatcac

SEQ ID NO: 534530 - DNA, 33 bp, Homo sapien
aaggcctttgactcacgaaatgctacaaatcac

SEQ ID NO: 534531 - DNA, 33 bp, Homo sapien
acactaggccccaaatcaatcccaaaatggaag

SEQ ID NO: 534532 - DNA, 33 bp, Homo sapien
acactaggccccaaatgaatcccaaaatggaag

SEQ ID NO: 534533 - DNA, 33 bp, Homo sapien
gctatagtcacttcaccgtagctttttaggttc

SEQ ID NO: 534534 - DNA, 33 bp, Homo sapien
gctatagtcacttcactgtagctttttaggttc

SEQ ID NO: 534535 - DNA, 33 bp, Homo sapien
tctggttggcttttcaaaagtatatccaactac

SEQ ID NO: 534536 - DNA, 33 bp, Homo sapien
tctggttggcttttcacaagtatatccaactac

SEQ ID NO: 534537 - DNA, 33 bp, Homo sapien
cttatgcatttggataagagaacctctacttta

SEQ ID NO: 534538 - DNA, 33 bp, Homo sapien
cttatgcatttggataggagaacctctacttta

SEQ ID NO: 534539 - DNA, 33 bp, Homo sapien
agaaattgacctagaaaatgtttccaaattcta

SEQ ID NO: 534540 - DNA, 33 bp, Homo sapien
agaaattgacctagaagatgtttccaaattcta

SEQ ID NO: 534541 - DNA, 33 bp, Homo sapien
gtaggtaagctcttcaaggtgagaagaagaaag

SEQ ID NO: 534542 - DNA, 33 bp, Homo sapien
gtaggtaagctcttcagggtgagaagaagaaag

SEQ ID NO: 534543 - DNA, 33 bp, Homo sapien
gactgtgcaggggagagattggactaaggagaa

SEQ ID NO: 534544 - DNA, 33 bp, Homo sapien
gactgtgcaggggagatattggactaaggagaa

SEQ ID NO: 534545 - DNA, 33 bp, Homo sapien
gccagtcccaagagtacaaatatacgatcccac

SEQ ID NO: 534546 - DNA, 33 bp, Homo sapien
gccagtcccaagagtagaaatatacgatcccac

SEQ ID NO: 534547 - DNA, 33 bp, Homo sapien
tcaaaaggatttagaccgaagcataaggatgtt

SEQ ID NO: 534548 - DNA, 33 bp, Homo sapien
tcaaaaggatttagactgaagcataaggatgtt

SEQ ID NO: 534549 - DNA, 33 bp, Homo sapien
gaagcgtaagaagcagaagagtgaggtggcacc

SEQ ID NO: 534550 - DNA, 33 bp, Homo sapien
gaagcgtaagaagcagtagagtgaggtggcacc

SEQ ID NO: 534551 - DNA, 33 bp, Homo sapien
aatgggtgactctctaaggatgatccatcatgt

SEQ ID NO: 534552 - DNA, 33 bp, Homo sapien
aatgggtgactctctagggatgatccatcatgt

SEQ ID NO: 534553 - DNA, 33 bp, Homo sapien
gtgtgacggctacttgcaaaaagcacattctaa

SEQ ID NO: 534554 - DNA, 33 bp, Homo sapien
gtgtgacggctacttggaaaaagcacattctaa

SEQ ID NO: 534555 - DNA, 33 bp, Homo sapien
tccgggccacagtcaacggtttgagaagggagt

SEQ ID NO: 534556 - DNA, 33 bp, Homo sapien
tccgggccacagtcaatggtttgagaagggagt

SEQ ID NO: 534557 - DNA, 33 bp, Homo sapien
atcatgtactcctctcaacttcatcaccctcag

SEQ ID NO: 534558 - DNA, 33 bp, Homo sapien
atcatgtactcctctcgacttcatcaccctcag

SEQ ID NO: 534559 - DNA, 33 bp, Homo sapien
cagttttcctagttggaagaaagtccttcataa

SEQ ID NO: 534560 - DNA, 33 bp, Homo sapien
cagttttcctagttgggagaaagtccttcataa

SEQ ID NO: 534561 - DNA, 33 bp, Homo sapien
ccacacttccaatgtaagtctgcaaaagaaaga

SEQ ID NO: 534562 - DNA, 33 bp, Homo sapien
ccacacttccaatgtatgtctgcaaaagaaaga

SEQ ID NO: 534563 - DNA, 33 bp, Homo sapien
tatctgttaacccataccggtctttacccattt

SEQ ID NO: 534564 - DNA, 33 bp, Homo sapien
tatctgttaacccatatcggtctttacccattt

SEQ ID NO: 534565 - DNA, 33 bp, Homo sapien
agcctcagacttctccacttgttgcttaggcag

SEQ ID NO: 534566 - DNA, 33 bp, Homo sapien
agcctcagacttctccgcttgttgcttaggcag

SEQ ID NO: 534567 - DNA, 33 bp, Homo sapien
tcaagagaaactaaaacaagcatctggacagtg

SEQ ID NO: 534568 - DNA, 33 bp, Homo sapien
tcaagagaaactaaaataagcatctggacagtg

SEQ ID NO: 534569 - DNA, 33 bp, Homo sapien
tggagggtttgtggtgcaggaacacaggcgaac

SEQ ID NO: 534570 - DNA, 33 bp, Homo sapien
tggagggtttgtggtgtaggaacacaggcgaac

SEQ ID NO: 534571 - DNA, 33 bp, Homo sapien
atgatctggaagaaaaattagctgaggtctctt

SEQ ID NO: 534572 - DNA, 33 bp, Homo sapien
atgatctggaagaaaagttagctgaggtctctt

SEQ ID NO: 534573 - DNA, 33 bp, Homo sapien
ttaggctggcatcaaaccaaccttcctacttga

SEQ ID NO: 534574 - DNA, 33 bp, Homo sapien
ttaggctggcatcaaatcaaccttcctacttga

SEQ ID NO: 534575 - DNA, 33 bp, Homo sapien
aagttcctactgtaacggaggatacaaggatat

SEQ ID NO: 534576 - DNA, 33 bp, Homo sapien
aagttcctactgtaactgaggatacaaggatat

SEQ ID NO: 534577 - DNA, 33 bp, Homo sapien
gtcaagaaaacatgataaaaattgcttgttact

SEQ ID NO: 534578 - DNA, 33 bp, Homo sapien
gtcaagaaaacatgatgaaaattgcttgttact

SEQ ID NO: 534579 - DNA, 33 bp, Homo sapien
ttcaaaatgtgagctacgatgagcaagcattaa

SEQ ID NO: 534580 - DNA, 33 bp, Homo sapien
ttcaaaatgtgagctatgatgagcaagcattaa

SEQ ID NO: 534581 - DNA, 33 bp, Homo sapien
tgtccgctccccaccacagcagctgtagtttga

SEQ ID NO: 534582 - DNA, 33 bp, Homo sapien
tgtccgctccccaccatagcagctgtagtttga

SEQ ID NO: 534583 - DNA, 33 bp, Homo sapien
gagtaaaaaaataggaggtttgaggagagtaga

SEQ ID NO: 534584 - DNA, 33 bp, Homo sapien
gagtaaaaaaataggatgtttgaggagagtaga

SEQ ID NO: 534585 - DNA, 33 bp, Homo sapien
tttgtagattctgctaaatgggcagcaatacaa

SEQ ID NO: 534586 - DNA, 33 bp, Homo sapien
tttgtagattctgctacatgggcagcaatacaa

SEQ ID NO: 534587 - DNA, 33 bp, Homo sapien
tggagagagaatgagcaatgtttttcagggctg

SEQ ID NO: 534588 - DNA, 33 bp, Homo sapien
tggagagagaatgagcgatgtttttcagggctg

SEQ ID NO: 534589 - DNA, 33 bp, Homo sapien
agtctcatggaacaaacgtgttatctggcaagt

SEQ ID NO: 534590 - DNA, 33 bp, Homo sapien
agtctcatggaacaaatgtgttatctggcaagt

SEQ ID NO: 534591 - DNA, 33 bp, Homo sapien
ggcataaagcttctgtcaacaaattcataagag

SEQ ID NO: 534592 - DNA, 33 bp, Homo sapien
ggcataaagcttctgttaacaaattcataagag

SEQ ID NO: 534593 - DNA, 33 bp, Homo sapien
ctcagaaagcttactcaaaattatccaataatt

SEQ ID NO: 534594 - DNA, 33 bp, Homo sapien
ctcagaaagcttactcgaaattatccaataatt

SEQ ID NO: 534595 - DNA, 33 bp, Homo sapien
gactgcaggataataaagcttatacactgtttc

SEQ ID NO: 534596 - DNA, 33 bp, Homo sapien
gactgcaggataataaggcttatacactgtttc

SEQ ID NO: 534597 - DNA, 33 bp, Homo sapien
gtagatatttaatgaaactcagtggttgagacc

SEQ ID NO: 534598 - DNA, 33 bp, Homo sapien
gtagatatttaatgaagctcagtggttgagacc

SEQ ID NO: 534599 - DNA, 33 bp, Homo sapien
ataggctgttaagatacgtttgcattgtaaatt

SEQ ID NO: 534600 - DNA, 33 bp, Homo sapien
ataggctgttaagatatgtttgcattgtaaatt

SEQ ID NO: 534601 - DNA, 33 bp, Homo sapien
tatcctccacccacaacataagcatttaaattt

SEQ ID NO: 534602 - DNA, 33 bp, Homo sapien
tatcctccacccacaagataagcatttaaattt

SEQ ID NO: 534603 - DNA, 33 bp, Homo sapien
cttgaagactgataagaagtacctattagttgg

SEQ ID NO: 534604 - DNA, 33 bp, Homo sapien
cttgaagactgataagcagtacctattagttgg

SEQ ID NO: 534605 - DNA, 33 bp, Homo sapien
cagagaacaagcaaaactccacctaagcttaaa

SEQ ID NO: 534606 - DNA, 33 bp, Homo sapien
cagagaacaagcaaaattccacctaagcttaaa

SEQ ID NO: 534607 - DNA, 33 bp, Homo sapien
atgtaagtgttttggacaaatctgagttactgt

SEQ ID NO: 534608 - DNA, 33 bp, Homo sapien
atgtaagtgttttggagaaatctgagttactgt

SEQ ID NO: 534609 - DNA, 33 bp, Homo sapien
ctcctcagtgtacagacgaagcagtctcatagt

SEQ ID NO: 534610 - DNA, 33 bp, Homo sapien
ctcctcagtgtacagatgaagcagtctcatagt

SEQ ID NO: 534611 - DNA, 33 bp, Homo sapien
tgtgcttttacttgtagacaactggcagtgaag

SEQ ID NO: 534612 - DNA, 33 bp, Homo sapien
tgtgcttttacttgtatacaactggcagtgaag

SEQ ID NO: 534613 - DNA, 33 bp, Homo sapien
tacattacaaattctccatcctatcaaccagct

SEQ ID NO: 534614 - DNA, 33 bp, Homo sapien
tacattacaaattctctatcctatcaaccagct

SEQ ID NO: 534615 - DNA, 33 bp, Homo sapien
aattctggagtgtcatgaatgctttaactttcc

SEQ ID NO: 534616 - DNA, 33 bp, Homo sapien
aattctggagtgtcattaatgctttaactttcc

SEQ ID NO: 534617 - DNA, 33 bp, Homo sapien
aaaatgaaggctaagaaccataagaagaatctt

SEQ ID NO: 534618 - DNA, 33 bp, Homo sapien
aaaatgaaggctaagatccataagaagaatctt

SEQ ID NO: 534619 - DNA, 33 bp, Homo sapien
ctagaaaccactgagtcaatggaaatccaaaat

SEQ ID NO: 534620 - DNA, 33 bp, Homo sapien
ctagaaaccactgagttaatggaaatccaaaat

SEQ ID NO: 534621 - DNA, 33 bp, Homo sapien
taaattcaaagccacaataaagtgaaggtattt

SEQ ID NO: 534622 - DNA, 33 bp, Homo sapien
taaattcaaagccacagtaaagtgaaggtattt

SEQ ID NO: 534623 - DNA, 33 bp, Homo sapien
taatttgtgtaagttcaagacaagaaaatttgc

SEQ ID NO: 534624 - DNA, 33 bp, Homo sapien
taatttgtgtaagttcgagacaagaaaatttgc

SEQ ID NO: 534625 - DNA, 33 bp, Homo sapien
atggtccacaggaaccaaagatcagccccttaa

SEQ ID NO: 534626 - DNA, 33 bp, Homo sapien
atggtccacaggaaccgaagatcagccccttaa

SEQ ID NO: 534627 - DNA, 33 bp, Homo sapien
tttccttagaaatttaagttggctctgcacaaa

SEQ ID NO: 534628 - DNA, 33 bp, Homo sapien
tttccttagaaatttacgttggctctgcacaaa

SEQ ID NO: 534629 - DNA, 33 bp, Homo sapien
aatgctagtccatgccacaaaagagaaatggag

SEQ ID NO: 534630 - DNA, 33 bp, Homo sapien
aatgctagtccatgccgcaaaagagaaatggag

SEQ ID NO: 534631 - DNA, 33 bp, Homo sapien
taatactccccccaaaagcctggaaagcaaaat

SEQ ID NO: 534632 - DNA, 33 bp, Homo sapien
taatactccccccaaaggcctggaaagcaaaat

SEQ ID NO: 534633 - DNA, 33 bp, Homo sapien
ctgtaaattgaatctaacaagttcaaactctat

SEQ ID NO: 534634 - DNA, 33 bp, Homo sapien
ctgtaaattgaatctatcaagttcaaactctat

SEQ ID NO: 534635 - DNA, 33 bp, Homo sapien
ctccagtctgctgagacagtcttacctaaggta

SEQ ID NO: 534636 - DNA, 33 bp, Homo sapien
ctccagtctgctgagagagtcttacctaaggta

SEQ ID NO: 534637 - DNA, 33 bp, Homo sapien
taagttaattgcttacaagaataactggataac

SEQ ID NO: 534638 - DNA, 33 bp, Homo sapien
taagttaattgcttactagaataactggataac

SEQ ID NO: 534639 - DNA, 33 bp, Homo sapien
attccattttttctgacgaaagaacagcctgaa

SEQ ID NO: 534640 - DNA, 33 bp, Homo sapien
attccattttttctgatgaaagaacagcctgaa

SEQ ID NO: 534641 - DNA, 33 bp, Homo sapien
cacattgtaggcatagcagatttgtatgttgat

SEQ ID NO: 534642 - DNA, 33 bp, Homo sapien
cacattgtaggcatagtagatttgtatgttgat

SEQ ID NO: 534643 - DNA, 33 bp, Homo sapien
tggaaaattattggaacatacagtgtttgttag

SEQ ID NO: 534644 - DNA, 33 bp, Homo sapien
tggaaaattattggaatatacagtgtttgttag

SEQ ID NO: 534645 - DNA, 33 bp, Homo sapien
gaaaagggctgtttgacgagaactatgacatta

SEQ ID NO: 534646 - DNA, 33 bp, Homo sapien
gaaaagggctgtttgatgagaactatgacatta

SEQ ID NO: 534647 - DNA, 33 bp, Homo sapien
tttgtgaaaaacagaccgggttaaggatggctt

SEQ ID NO: 534648 - DNA, 33 bp, Homo sapien
tttgtgaaaaacagactgggttaaggatggctt

SEQ ID NO: 534649 - DNA, 33 bp, Homo sapien
gctcctttctagcagcacttatcttatccccag

SEQ ID NO: 534650 - DNA, 33 bp, Homo sapien
gctcctttctagcagctcttatcttatccccag

SEQ ID NO: 534651 - DNA, 33 bp, Homo sapien
agtgatgctcttcccacctttctataaactagg

SEQ ID NO: 534652 - DNA, 33 bp, Homo sapien
agtgatgctcttcccagctttctataaactagg

SEQ ID NO: 534653 - DNA, 33 bp, Homo sapien
ctgttctagttgcttgaaatacttcagtaaaca

SEQ ID NO: 534654 - DNA, 33 bp, Homo sapien
ctgttctagttgcttggaatacttcagtaaaca

SEQ ID NO: 534655 - DNA, 33 bp, Homo sapien
gtgagatctcagcaaaggcttgaaggaggaaag

SEQ ID NO: 534656 - DNA, 33 bp, Homo sapien
gtgagatctcagcaaatgcttgaaggaggaaag

SEQ ID NO: 534657 - DNA, 33 bp, Homo sapien
gagctattagagaaaccggtcctgtctaaaggg

SEQ ID NO: 534658 - DNA, 33 bp, Homo sapien
gagctattagagaaactggtcctgtctaaaggg

SEQ ID NO: 534659 - DNA, 33 bp, Homo sapien
ctaacactttatagtaacaaaattctgcctgta

SEQ ID NO: 534660 - DNA, 33 bp, Homo sapien
ctaacactttatagtaccaaaattctgcctgta

SEQ ID NO: 534661 - DNA, 33 bp, Homo sapien
gaatgaatgcctctgacgttattttttaaaagg

SEQ ID NO: 534662 - DNA, 33 bp, Homo sapien
gaatgaatgcctctgatgttattttttaaaagg

SEQ ID NO: 534663 - DNA, 33 bp, Homo sapien
gacaacagtaagcaaacgtaaaaatgcacagca

SEQ ID NO: 534664 - DNA, 33 bp, Homo sapien
gacaacagtaagcaaatgtaaaaatgcacagca

SEQ ID NO: 534665 - DNA, 33 bp, Homo sapien
cccccctacattttctcacttaagactcttcac

SEQ ID NO: 534666 - DNA, 33 bp, Homo sapien
cccccctacattttcttacttaagactcttcac

SEQ ID NO: 534667 - DNA, 33 bp, Homo sapien
ttcgtgctcattttggaattctgtaatcctagc

SEQ ID NO: 534668 - DNA, 33 bp, Homo sapien
ttcgtgctcattttggtattctgtaatcctagc

SEQ ID NO: 534669 - DNA, 33 bp, Homo sapien
gaggtagccactgaaccggggcttcacattcat

SEQ ID NO: 534670 - DNA, 33 bp, Homo sapien
gaggtagccactgaactggggcttcacattcat

SEQ ID NO: 534671 - DNA, 33 bp, Homo sapien
gtctggccagaataaaagactgagaagttacag

SEQ ID NO: 534672 - DNA, 33 bp, Homo sapien
gtctggccagaataaaggactgagaagttacag

SEQ ID NO: 534673 - DNA, 33 bp, Homo sapien
gaagagtgtgacctcaatctaaaggctggtggc

SEQ ID NO: 534674 - DNA, 33 bp, Homo sapien
gaagagtgtgacctcagtctaaaggctggtggc

SEQ ID NO: 534675 - DNA, 33 bp, Homo sapien
agatttagaaacaggactatcttctttctgggt

SEQ ID NO: 534676 - DNA, 33 bp, Homo sapien
agatttagaaacaggagtatcttctttctgggt

SEQ ID NO: 534677 - DNA, 33 bp, Homo sapien
cacatgaggcactagacagattcattataagca

SEQ ID NO: 534678 - DNA, 33 bp, Homo sapien
cacatgaggcactagatagattcattataagca

SEQ ID NO: 534679 - DNA, 33 bp, Homo sapien
tcattcgtgagatccactactcctttgcagcag

SEQ ID NO: 534680 - DNA, 33 bp, Homo sapien
tcattcgtgagatccattactcctttgcagcag

SEQ ID NO: 534681 - DNA, 33 bp, Homo sapien
tttttgcttttgctcaaaatgatgaaataatct

SEQ ID NO: 534682 - DNA, 33 bp, Homo sapien
tttttgcttttgctcagaatgatgaaataatct

SEQ ID NO: 534683 - DNA, 33 bp, Homo sapien
atgcctcagaactcagaaagaatgtaaatggga

SEQ ID NO: 534684 - DNA, 33 bp, Homo sapien
atgcctcagaactcaggaagaatgtaaatggga

SEQ ID NO: 534685 - DNA, 33 bp, Homo sapien
ctatgtctttgctatcacgaattgttaacacat

SEQ ID NO: 534686 - DNA, 33 bp, Homo sapien
ctatgtctttgctatcgcgaattgttaacacat

SEQ ID NO: 534687 - DNA, 33 bp, Homo sapien
ctttaggatgcttctgaacattattaattgaca

SEQ ID NO: 534688 - DNA, 33 bp, Homo sapien
ctttaggatgcttctgcacattattaattgaca

SEQ ID NO: 534689 - DNA, 33 bp, Homo sapien
tcccattaaaagtgaccgctattgtaaactgcc

SEQ ID NO: 534690 - DNA, 33 bp, Homo sapien
tcccattaaaagtgactgctattgtaaactgcc

SEQ ID NO: 534691 - DNA, 33 bp, Homo sapien
tgggcttcaggtgaaacgatgccatccacacat

SEQ ID NO: 534692 - DNA, 33 bp, Homo sapien
tgggcttcaggtgaaatgatgccatccacacat

SEQ ID NO: 534693 - DNA, 33 bp, Homo sapien
taattgctgtatactacgactgcttttctccat

SEQ ID NO: 534694 - DNA, 33 bp, Homo sapien
taattgctgtatactatgactgcttttctccat

SEQ ID NO: 534695 - DNA, 33 bp, Homo sapien
cacctgctctgctaacactttcctcacaaaatg

SEQ ID NO: 534696 - DNA, 33 bp, Homo sapien
cacctgctctgctaactctttcctcacaaaatg

SEQ ID NO: 534697 - DNA, 33 bp, Homo sapien
agactgtttctcgaaagaataataataataata

SEQ ID NO: 534698 - DNA, 33 bp, Homo sapien
agactgtttctcgaaataataataataataata

SEQ ID NO: 534699 - DNA, 33 bp, Homo sapien
gctccaagttggtttaagatttttctgctttaa

SEQ ID NO: 534700 - DNA, 33 bp, Homo sapien
gctccaagttggtttaggatttttctgctttaa

SEQ ID NO: 534701 - DNA, 33 bp, Homo sapien
ggacagagaagcgctaagtctttacgtatcttc

SEQ ID NO: 534702 - DNA, 33 bp, Homo sapien
ggacagagaagcgctaggtctttacgtatcttc

SEQ ID NO: 534703 - DNA, 33 bp, Homo sapien
tttgtcagcatcttgtaaaattagatggggagg

SEQ ID NO: 534704 - DNA, 33 bp, Homo sapien
tttgtcagcatcttgtgaaattagatggggagg

SEQ ID NO: 534705 - DNA, 33 bp, Homo sapien
gactttaaagctattccagggtttgtcagcatc

SEQ ID NO: 534706 - DNA, 33 bp, Homo sapien
gactttaaagctattctagggtttgtcagcatc

SEQ ID NO: 534707 - DNA, 33 bp, Homo sapien
gttcaaggcagaaaaaccagttcttctaaggac

SEQ ID NO: 534708 - DNA, 33 bp, Homo sapien
gttcaaggcagaaaaatcagttcttctaaggac

SEQ ID NO: 534709 - DNA, 33 bp, Homo sapien
cacaaccatgctcttcccaaagtaccactgcct

SEQ ID NO: 534710 - DNA, 33 bp, Homo sapien
cacaaccatgctcttcgcaaagtaccactgcct

SEQ ID NO: 534711 - DNA, 33 bp, Homo sapien
cccccatcccaagcataacaagaaagtcttcct

SEQ ID NO: 534712 - DNA, 33 bp, Homo sapien
cccccatcccaagcatgacaagaaagtcttcct

SEQ ID NO: 534713 - DNA, 33 bp, Homo sapien
gtggaatcaaattgagaagagagggccaataaa

SEQ ID NO: 534714 - DNA, 33 bp, Homo sapien
gtggaatcaaattgagcagagagggccaataaa

SEQ ID NO: 534715 - DNA, 33 bp, Homo sapien
agccaagaaagggtccaattgcagatgaggttt

SEQ ID NO: 534716 - DNA, 33 bp, Homo sapien
agccaagaaagggtccgattgcagatgaggttt

SEQ ID NO: 534717 - DNA, 33 bp, Homo sapien
aggctgtagtgcaccacgatttcacctgtaaat

SEQ ID NO: 534718 - DNA, 33 bp, Homo sapien
aggctgtagtgcaccatgatttcacctgtaaat

SEQ ID NO: 534719 - DNA, 33 bp, Homo sapien
ctaggagaggccataaatgatacagcccaaact

SEQ ID NO: 534720 - DNA, 33 bp, Homo sapien
ctaggagaggccataagtgatacagcccaaact

SEQ ID NO: 534721 - DNA, 33 bp, Homo sapien
catttggtggccattaacctttcaagttttacc

SEQ ID NO: 534722 - DNA, 33 bp, Homo sapien
catttggtggccattagcctttcaagttttacc

SEQ ID NO: 534723 - DNA, 33 bp, Homo sapien
gacaaacctgggctccagctatttacttgtgag

SEQ ID NO: 534724 - DNA, 33 bp, Homo sapien
gacaaacctgggctccggctatttacttgtgag

SEQ ID NO: 534725 - DNA, 33 bp, Homo sapien
gactgccatgagaccacataaatgatcactagc

SEQ ID NO: 534726 - DNA, 33 bp, Homo sapien
gactgccatgagaccatataaatgatcactagc

SEQ ID NO: 534727 - DNA, 33 bp, Homo sapien
taaacagttcctagaaggttctaagtgctatgt

SEQ ID NO: 534728 - DNA, 33 bp, Homo sapien
taaacagttcctagaatgttctaagtgctatgt

SEQ ID NO: 534729 - DNA, 33 bp, Homo sapien
tccaaaatctaaagaaaatgctacaagaaagcc

SEQ ID NO: 534730 - DNA, 33 bp, Homo sapien
tccaaaatctaaagaacatgctacaagaaagcc

SEQ ID NO: 534731 - DNA, 33 bp, Homo sapien
tttatccatagcctggcattgtcttaacatatg

SEQ ID NO: 534732 - DNA, 33 bp, Homo sapien
tttatccatagcctgggattgtcttaacatatg

SEQ ID NO: 534733 - DNA, 33 bp, Homo sapien
agccaaattcatattaaccatttccggaatcca

SEQ ID NO: 534734 - DNA, 33 bp, Homo sapien
agccaaattcatattagccatttccggaatcca

SEQ ID NO: 534735 - DNA, 33 bp, Homo sapien
tttgtttttttcccacagagttcatagagccat

SEQ ID NO: 534736 - DNA, 33 bp, Homo sapien
tttgtttttttcccacggagttcatagagccat

SEQ ID NO: 534737 - DNA, 33 bp, Homo sapien
actgtagaacagaaaaagtggtgtgtccaattt

SEQ ID NO: 534738 - DNA, 33 bp, Homo sapien
actgtagaacagaaaaggtggtgtgtccaattt

SEQ ID NO: 534739 - DNA, 33 bp, Homo sapien
agggaggaaggcccagaaccttgaaatgactga

SEQ ID NO: 534740 - DNA, 33 bp, Homo sapien
agggaggaaggcccaggaccttgaaatgactga

SEQ ID NO: 534741 - DNA, 33 bp, Homo sapien
aacaactaaatattaccggagaaaaacaggcaa

SEQ ID NO: 534742 - DNA, 33 bp, Homo sapien
aacaactaaatattactggagaaaaacaggcaa

SEQ ID NO: 534743 - DNA, 33 bp, Homo sapien
cctgcgtgagcataaggaagggcctagaaggga

SEQ ID NO: 534744 - DNA, 33 bp, Homo sapien
cctgcgtgagcataagtaagggcctagaaggga

SEQ ID NO: 534745 - DNA, 33 bp, Homo sapien
ggcatacagcaaagcacatagaacaagaagtgt

SEQ ID NO: 534746 - DNA, 33 bp, Homo sapien
ggcatacagcaaagcagatagaacaagaagtgt

SEQ ID NO: 534747 - DNA, 33 bp, Homo sapien
taatgatgtggaaagacatttgtgttatgctat

SEQ ID NO: 534748 - DNA, 33 bp, Homo sapien
taatgatgtggaaagatatttgtgttatgctat

SEQ ID NO: 534749 - DNA, 33 bp, Homo sapien
taaatttatgctaagaagaaatccaatttaaaa

SEQ ID NO: 534750 - DNA, 33 bp, Homo sapien
taaatttatgctaagatgaaatccaatttaaaa

SEQ ID NO: 534751 - DNA, 33 bp, Homo sapien
atgcttcggctatgctcaactcattctctaatc

SEQ ID NO: 534752 - DNA, 33 bp, Homo sapien
atgcttcggctatgcttaactcattctctaatc

SEQ ID NO: 534753 - DNA, 33 bp, Homo sapien
ttacatgggaattgaggccagtagatgtaaaat

SEQ ID NO: 534754 - DNA, 33 bp, Homo sapien
ttacatgggaattgagtccagtagatgtaaaat

SEQ ID NO: 534755 - DNA, 33 bp, Homo sapien
actgatgacaaatatgcaccaagatgactttaa

SEQ ID NO: 534756 - DNA, 33 bp, Homo sapien
actgatgacaaatatggaccaagatgactttaa

SEQ ID NO: 534757 - DNA, 33 bp, Homo sapien
gatttttaatctgcagacggtaggtagtatcaa

SEQ ID NO: 534758 - DNA, 33 bp, Homo sapien
gatttttaatctgcaggcggtaggtagtatcaa

SEQ ID NO: 534759 - DNA, 33 bp, Homo sapien
cattcatgtaatataacaaagactatggagtag

SEQ ID NO: 534760 - DNA, 33 bp, Homo sapien
cattcatgtaatataagaaagactatggagtag

SEQ ID NO: 534761 - DNA, 33 bp, Homo sapien
agagtctcaacacacaatagcatagcaaaggca

SEQ ID NO: 534762 - DNA, 33 bp, Homo sapien
agagtctcaacacacattagcatagcaaaggca

SEQ ID NO: 534763 - DNA, 33 bp, Homo sapien
taagactgctcccccaaaataagtagttcccag

SEQ ID NO: 534764 - DNA, 33 bp, Homo sapien
taagactgctcccccagaataagtagttcccag

SEQ ID NO: 534765 - DNA, 33 bp, Homo sapien
ataagttaagtggctaaggtccagaatttagca

SEQ ID NO: 534766 - DNA, 33 bp, Homo sapien
ataagttaagtggctagggtccagaatttagca

SEQ ID NO: 534767 - DNA, 33 bp, Homo sapien
atgaatcctgattgcaaaaaactgtcactctta

SEQ ID NO: 534768 - DNA, 33 bp, Homo sapien
atgaatcctgattgcataaaactgtcactctta

SEQ ID NO: 534769 - DNA, 33 bp, Homo sapien
atacacaaaatgcactaaacagttatttcatcc

SEQ ID NO: 534770 - DNA, 33 bp, Homo sapien
atacacaaaatgcactgaacagttatttcatcc

SEQ ID NO: 534771 - DNA, 33 bp, Homo sapien
tcaatttagtggaaaaaagaattgagtccactg

SEQ ID NO: 534772 - DNA, 33 bp, Homo sapien
tcaatttagtggaaaacagaattgagtccactg

SEQ ID NO: 534773 - DNA, 33 bp, Homo sapien
tgtggcttaagcccagaaatcggcagagtcctg

SEQ ID NO: 534774 - DNA, 33 bp, Homo sapien
tgtggcttaagcccaggaatcggcagagtcctg

SEQ ID NO: 534775 - DNA, 33 bp, Homo sapien
tgttgtcttgttaacactggaacgaatataaat

SEQ ID NO: 534776 - DNA, 33 bp, Homo sapien
tgttgtcttgttaacattggaacgaatataaat

SEQ ID NO: 534777 - DNA, 33 bp, Homo sapien
ttctgctttttgcgtcaacacaagacattaccc

SEQ ID NO: 534778 - DNA, 33 bp, Homo sapien
ttctgctttttgcgtcgacacaagacattaccc

SEQ ID NO: 534779 - DNA, 33 bp, Homo sapien
ggtgtttgacagtgaaataactcttatggtggt

SEQ ID NO: 534780 - DNA, 33 bp, Homo sapien
ggtgtttgacagtgaagtaactcttatggtggt

SEQ ID NO: 534781 - DNA, 33 bp, Homo sapien
gttcagctgaggagggccacatttgagaacagg

SEQ ID NO: 534782 - DNA, 33 bp, Homo sapien
gttcagctgaggagggtcacatttgagaacagg

SEQ ID NO: 534783 - DNA, 33 bp, Homo sapien
atgggaaggtaacatacacaaactctaggatag

SEQ ID NO: 534784 - DNA, 33 bp, Homo sapien
atgggaaggtaacatatacaaactctaggatag

SEQ ID NO: 534785 - DNA, 33 bp, Homo sapien
caaaaatccttaacacacggcagcaattcaact

SEQ ID NO: 534786 - DNA, 33 bp, Homo sapien
caaaaatccttaacacgcggcagcaattcaact

SEQ ID NO: 534787 - DNA, 33 bp, Homo sapien
attcctcttcctctacaaagatgtctaatcagc

SEQ ID NO: 534788 - DNA, 33 bp, Homo sapien
attcctcttcctctacgaagatgtctaatcagc

SEQ ID NO: 534789 - DNA, 33 bp, Homo sapien
aacccagaacttcagcaaagacataacttattt

SEQ ID NO: 534790 - DNA, 33 bp, Homo sapien
aacccagaacttcagcgaagacataacttattt

SEQ ID NO: 534791 - DNA, 33 bp, Homo sapien
ttgctcaaatacaaaaagaggagagaaagagcc

SEQ ID NO: 534792 - DNA, 33 bp, Homo sapien
ttgctcaaatacaaaaggaggagagaaagagcc

SEQ ID NO: 534793 - DNA, 33 bp, Homo sapien
tgaattcacatctcaacgacagtacaactaaac

SEQ ID NO: 534794 - DNA, 33 bp, Homo sapien
tgaattcacatctcaatgacagtacaactaaac

SEQ ID NO: 534795 - DNA, 33 bp, Homo sapien
gagtattacatggtaaaaaacgtatagagatac

SEQ ID NO: 534796 - DNA, 33 bp, Homo sapien
gagtattacatggtaagaaacgtatagagatac

SEQ ID NO: 534797 - DNA, 33 bp, Homo sapien
ttgtttgctgttacgtaaaactgaataaatctt

SEQ ID NO: 534798 - DNA, 33 bp, Homo sapien
ttgtttgctgttacgtgaaactgaataaatctt

SEQ ID NO: 534799 - DNA, 33 bp, Homo sapien
ctaataaacgcaatggccaaagtgtaatactat

SEQ ID NO: 534800 - DNA, 33 bp, Homo sapien
ctaataaacgcaatggtcaaagtgtaatactat

SEQ ID NO: 534801 - DNA, 33 bp, Homo sapien
aaaaagaaagtgaaccagaaagagctaagtggg

SEQ ID NO: 534802 - DNA, 33 bp, Homo sapien
aaaaagaaagtgaaccggaaagagctaagtggg

SEQ ID NO: 534803 - DNA, 33 bp, Homo sapien
ctgagggtgacttacaggaactgtcattggtga

SEQ ID NO: 534804 - DNA, 33 bp, Homo sapien
ctgagggtgacttacatgaactgtcattggtga

SEQ ID NO: 534805 - DNA, 33 bp, Homo sapien
tgtttcttaagcaaacaaaaacaattggcaagg

SEQ ID NO: 534806 - DNA, 33 bp, Homo sapien
tgtttcttaagcaaacgaaaacaattggcaagg

SEQ ID NO: 534807 - DNA, 33 bp, Homo sapien
tgtgactctattggcacaaccatcactcaaatg

SEQ ID NO: 534808 - DNA, 33 bp, Homo sapien
tgtgactctattggcataaccatcactcaaatg

SEQ ID NO: 534809 - DNA, 33 bp, Homo sapien
aaaaaagtaagtatgacgtaggcaacatagttc

SEQ ID NO: 534810 - DNA, 33 bp, Homo sapien
aaaaaagtaagtatgatgtaggcaacatagttc

SEQ ID NO: 534811 - DNA, 33 bp, Homo sapien
gaaaaaagttgtaaaagatgtatagtgctttct

SEQ ID NO: 534812 - DNA, 33 bp, Homo sapien
gaaaaaagttgtaaaatatgtatagtgctttct

SEQ ID NO: 534813 - DNA, 33 bp, Homo sapien
aatattatttttgatacgctaggagaaagacgt

SEQ ID NO: 534814 - DNA, 33 bp, Homo sapien
aatattatttttgatatgctaggagaaagacgt

SEQ ID NO: 534815 - DNA, 33 bp, Homo sapien
tcatcattccatcaaaaataaaaacatagttat

SEQ ID NO: 534816 - DNA, 33 bp, Homo sapien
tcatcattccatcaaacataaaaacatagttat

SEQ ID NO: 534817 - DNA, 33 bp, Homo sapien
ccttactttctgtttacccagagagagaacaag

SEQ ID NO: 534818 - DNA, 33 bp, Homo sapien
ccttactttctgtttatccagagagagaacaag

SEQ ID NO: 534819 - DNA, 33 bp, Homo sapien
acaagttattaggacaactcacttaaactatct

SEQ ID NO: 534820 - DNA, 33 bp, Homo sapien
acaagttattaggacatctcacttaaactatct

SEQ ID NO: 534821 - DNA, 33 bp, Homo sapien
tgataccaaatgtttacccttcatgattatatc

SEQ ID NO: 534822 - DNA, 33 bp, Homo sapien
tgataccaaatgtttatccttcatgattatatc

SEQ ID NO: 534823 - DNA, 33 bp, Homo sapien
tgattatagaaaaacccagaggctagtccacaa

SEQ ID NO: 534824 - DNA, 33 bp, Homo sapien
tgattatagaaaaacctagaggctagtccacaa

SEQ ID NO: 534825 - DNA, 33 bp, Homo sapien
cagtaatcaatgtgaacggtaaaggtccccaga

SEQ ID NO: 534826 - DNA, 33 bp, Homo sapien
cagtaatcaatgtgaatggtaaaggtccccaga

SEQ ID NO: 534827 - DNA, 33 bp, Homo sapien
atctattcttatgctacaactggacttcatttt

SEQ ID NO: 534828 - DNA, 33 bp, Homo sapien
atctattcttatgctataactggacttcatttt

SEQ ID NO: 534829 - DNA, 33 bp, Homo sapien
agaatcaccccgtccccgagtctttcaagtcct

SEQ ID NO: 534830 - DNA, 33 bp, Homo sapien
agaatcaccccgtccctgagtctttcaagtcct

SEQ ID NO: 534831 - DNA, 33 bp, Homo sapien
tatgcataggctcagcaacatagactcctactc

SEQ ID NO: 534832 - DNA, 33 bp, Homo sapien
tatgcataggctcagcgacatagactcctactc

SEQ ID NO: 534833 - DNA, 33 bp, Homo sapien
agctgctcttaaaagcgcatgtcttaaatgtct

SEQ ID NO: 534834 - DNA, 33 bp, Homo sapien
agctgctcttaaaagctcatgtcttaaatgtct

SEQ ID NO: 534835 - DNA, 33 bp, Homo sapien
tcaactaactaccgcacagataatataattcca

SEQ ID NO: 534836 - DNA, 33 bp, Homo sapien
tcaactaactaccgcatagataatataattcca

SEQ ID NO: 534837 - DNA, 33 bp, Homo sapien
aaaaaagataagcctaccaagaactattttgtt

SEQ ID NO: 534838 - DNA, 33 bp, Homo sapien
aaaaaagataagcctatcaagaactattttgtt

SEQ ID NO: 534839 - DNA, 33 bp, Homo sapien
gagaataaattagaagacagctttgtttgagct

SEQ ID NO: 534840 - DNA, 33 bp, Homo sapien
gagaataaattagaaggcagctttgtttgagct

SEQ ID NO: 534841 - DNA, 33 bp, Homo sapien
agaatgccatgagagaatcgaagtaaaactaga

SEQ ID NO: 534842 - DNA, 33 bp, Homo sapien
agaatgccatgagagagtcgaagtaaaactaga

SEQ ID NO: 534843 - DNA, 33 bp, Homo sapien
agagcctgagttccacaatatcaaaatccagta

SEQ ID NO: 534844 - DNA, 33 bp, Homo sapien
agagcctgagttccacgatatcaaaatccagta

SEQ ID NO: 534845 - DNA, 33 bp, Homo sapien
agccttagttccatcacctgtaatatgagggta

SEQ ID NO: 534846 - DNA, 33 bp, Homo sapien
agccttagttccatcatctgtaatatgagggta

SEQ ID NO: 534847 - DNA, 33 bp, Homo sapien
tccaattctaaacttgcaggatctattttgact

SEQ ID NO: 534848 - DNA, 33 bp, Homo sapien
tccaattctaaacttgtaggatctattttgact

SEQ ID NO: 534849 - DNA, 33 bp, Homo sapien
agtaagtggcacacacagtaaatattgcgggtg

SEQ ID NO: 534850 - DNA, 33 bp, Homo sapien
agtaagtggcacacacggtaaatattgcgggtg

SEQ ID NO: 534851 - DNA, 33 bp, Homo sapien
catagtaataatcaaactttatgatccatctac

SEQ ID NO: 534852 - DNA, 33 bp, Homo sapien
catagtaataatcaaattttatgatccatctac

SEQ ID NO: 534853 - DNA, 33 bp, Homo sapien
tgagaacagcatctgcaatttgggtctacctct

SEQ ID NO: 534854 - DNA, 33 bp, Homo sapien
tgagaacagcatctgcgatttgggtctacctct

SEQ ID NO: 534855 - DNA, 33 bp, Homo sapien
ttaagtgcagtaaccaaaagttggaagtataga

SEQ ID NO: 534856 - DNA, 33 bp, Homo sapien
ttaagtgcagtaaccagaagttggaagtataga

SEQ ID NO: 534857 - DNA, 33 bp, Homo sapien
tttgtagcttagtcaccccaaaactaagttaaa

SEQ ID NO: 534858 - DNA, 33 bp, Homo sapien
tttgtagcttagtcacgccaaaactaagttaaa

SEQ ID NO: 534859 - DNA, 33 bp, Homo sapien
gaagatcaagaagtacaacgttcgatgaaacac

SEQ ID NO: 534860 - DNA, 33 bp, Homo sapien
gaagatcaagaagtaccacgttcgatgaaacac

SEQ ID NO: 534861 - DNA, 33 bp, Homo sapien
tcctgtatcccaataaaattgactcagtatgtc

SEQ ID NO: 534862 - DNA, 33 bp, Homo sapien
tcctgtatcccaataacattgactcagtatgtc

SEQ ID NO: 534863 - DNA, 33 bp, Homo sapien
gggagtttgtttctaacgcagcttgatattact

SEQ ID NO: 534864 - DNA, 33 bp, Homo sapien
gggagtttgtttctaatgcagcttgatattact

SEQ ID NO: 534865 - DNA, 33 bp, Homo sapien
aactctcctttctaccaatttaccatccttgtg

SEQ ID NO: 534866 - DNA, 33 bp, Homo sapien
aactctcctttctaccgatttaccatccttgtg

SEQ ID NO: 534867 - DNA, 33 bp, Homo sapien
aagaaaggacatcttaaaaatgaattcctgaat

SEQ ID NO: 534868 - DNA, 33 bp, Homo sapien
aagaaaggacatcttacaaatgaattcctgaat

SEQ ID NO: 534869 - DNA, 33 bp, Homo sapien
cttttatagggctttaagtagagttgtccttca

SEQ ID NO: 534870 - DNA, 33 bp, Homo sapien
cttttatagggctttatgtagagttgtccttca

SEQ ID NO: 534871 - DNA, 33 bp, Homo sapien
gtctagactttatttacgattcatttttggcat

SEQ ID NO: 534872 - DNA, 33 bp, Homo sapien
gtctagactttatttatgattcatttttggcat

SEQ ID NO: 534873 - DNA, 33 bp, Homo sapien
taatatgcttttcataccacaggtgttgatttc

SEQ ID NO: 534874 - DNA, 33 bp, Homo sapien
taatatgcttttcatatcacaggtgttgatttc

SEQ ID NO: 534875 - DNA, 33 bp, Homo sapien
ctgaaagtaaagactcaaccaacaacgtttcat

SEQ ID NO: 534876 - DNA, 33 bp, Homo sapien
ctgaaagtaaagactccaccaacaacgtttcat

SEQ ID NO: 534877 - DNA, 33 bp, Homo sapien
agtaagaaatattttacgtaggcaagtatggaa

SEQ ID NO: 534878 - DNA, 33 bp, Homo sapien
agtaagaaatattttaggtaggcaagtatggaa

SEQ ID NO: 534879 - DNA, 33 bp, Homo sapien
caccaaaagaaggtaacgacagaatagcaatcc

SEQ ID NO: 534880 - DNA, 33 bp, Homo sapien
caccaaaagaaggtaatgacagaatagcaatcc

SEQ ID NO: 534881 - DNA, 33 bp, Homo sapien
ttgtgttccttgctgagctctctctgaaaagaa

SEQ ID NO: 534882 - DNA, 33 bp, Homo sapien
ttgtgttccttgctgatctctctctgaaaagaa

SEQ ID NO: 534883 - DNA, 33 bp, Homo sapien
tctttcaatgtactaaatgaacaatacatatta

SEQ ID NO: 534884 - DNA, 33 bp, Homo sapien
tctttcaatgtactaagtgaacaatacatatta

SEQ ID NO: 534885 - DNA, 33 bp, Homo sapien
gatatgaagtacagtacggtaggatagtcaagc

SEQ ID NO: 534886 - DNA, 33 bp, Homo sapien
gatatgaagtacagtatggtaggatagtcaagc

SEQ ID NO: 534887 - DNA, 33 bp, Homo sapien
aaagaaaagaatgagaatcccttttagatcaaa

SEQ ID NO: 534888 - DNA, 33 bp, Homo sapien
aaagaaaagaatgagactcccttttagatcaaa

SEQ ID NO: 534889 - DNA, 33 bp, Homo sapien
taattagcaggcatagaacaaagccaagtatca

SEQ ID NO: 534890 - DNA, 33 bp, Homo sapien
taattagcaggcataggacaaagccaagtatca

SEQ ID NO: 534891 - DNA, 33 bp, Homo sapien
agaggaaaaacaagacccaagttcagatggtta

SEQ ID NO: 534892 - DNA, 33 bp, Homo sapien
agaggaaaaacaagactcaagttcagatggtta

SEQ ID NO: 534893 - DNA, 33 bp, Homo sapien
tctcactcatatgtctcactgtcagctgaagac

SEQ ID NO: 534894 - DNA, 33 bp, Homo sapien
tctcactcatatgtctgactgtcagctgaagac

SEQ ID NO: 534895 - DNA, 33 bp, Homo sapien
gaggagggaatgaccaactgtaactcagggtga

SEQ ID NO: 534896 - DNA, 33 bp, Homo sapien
gaggagggaatgaccagctgtaactcagggtga

SEQ ID NO: 534897 - DNA, 33 bp, Homo sapien
tgaagttttgagcacaagtcaccaaaatagatg

SEQ ID NO: 534898 - DNA, 33 bp, Homo sapien
tgaagttttgagcacaggtcaccaaaatagatg

SEQ ID NO: 534899 - DNA, 33 bp, Homo sapien
cggaattaagcttgaactaattctcagttatta

SEQ ID NO: 534900 - DNA, 33 bp, Homo sapien
cggaattaagcttgaagtaattctcagttatta

SEQ ID NO: 534901 - DNA, 33 bp, Homo sapien
ttcaacgtcattccaaccactctcattatccat

SEQ ID NO: 534902 - DNA, 33 bp, Homo sapien
ttcaacgtcattccaagcactctcattatccat

SEQ ID NO: 534903 - DNA, 33 bp, Homo sapien
ctctctgtaaaagtgacatttggcagagaagcc

SEQ ID NO: 534904 - DNA, 33 bp, Homo sapien
ctctctgtaaaagtgatatttggcagagaagcc

SEQ ID NO: 534905 - DNA, 33 bp, Homo sapien
ggtaactgcagtacaactagaagtagactctaa

SEQ ID NO: 534906 - DNA, 33 bp, Homo sapien
ggtaactgcagtacaagtagaagtagactctaa

SEQ ID NO: 534907 - DNA, 33 bp, Homo sapien
tgttggaattaactgccgaattccaaaaatagt

SEQ ID NO: 534908 - DNA, 33 bp, Homo sapien
tgttggaattaactgctgaattccaaaaatagt

SEQ ID NO: 534909 - DNA, 33 bp, Homo sapien
ttcccacaatgtatcaactatttttgaaggata

SEQ ID NO: 534910 - DNA, 33 bp, Homo sapien
ttcccacaatgtatcatctatttttgaaggata

SEQ ID NO: 534911 - DNA, 33 bp, Homo sapien
atgccttaatctctccaataataatagtatcac

SEQ ID NO: 534912 - DNA, 33 bp, Homo sapien
atgccttaatctctccgataataatagtatcac

SEQ ID NO: 534913 - DNA, 33 bp, Homo sapien
taggatttaagtgtcaccttgccagtagaaagt

SEQ ID NO: 534914 - DNA, 33 bp, Homo sapien
taggatttaagtgtcatcttgccagtagaaagt

SEQ ID NO: 534915 - DNA, 33 bp, Homo sapien
tacttgggtatttagacaagaaaagagagaaca

SEQ ID NO: 534916 - DNA, 33 bp, Homo sapien
tacttgggtatttagagaagaaaagagagaaca

SEQ ID NO: 534917 - DNA, 33 bp, Homo sapien
tccagaaagcagggtacctcatgacttagtcaa

SEQ ID NO: 534918 - DNA, 33 bp, Homo sapien
tccagaaagcagggtatctcatgacttagtcaa

SEQ ID NO: 534919 - DNA, 33 bp, Homo sapien
attgccaggtattatcaaaaatgaataatcata

SEQ ID NO: 534920 - DNA, 33 bp, Homo sapien
attgccaggtattatcgaaaatgaataatcata

SEQ ID NO: 534921 - DNA, 33 bp, Homo sapien
aggcatgggagcctccacctagttttcacagga

SEQ ID NO: 534922 - DNA, 33 bp, Homo sapien
aggcatgggagcctccgcctagttttcacagga

SEQ ID NO: 534923 - DNA, 33 bp, Homo sapien
gaatcatggcatcagcagaagcaggaatgtctt

SEQ ID NO: 534924 - DNA, 33 bp, Homo sapien
gaatcatggcatcagcggaagcaggaatgtctt

SEQ ID NO: 534925 - DNA, 33 bp, Homo sapien
tagtaagtctgtttagaaatgatatggtttgga

SEQ ID NO: 534926 - DNA, 33 bp, Homo sapien
tagtaagtctgtttaggaatgatatggtttgga

SEQ ID NO: 534927 - DNA, 33 bp, Homo sapien
aggggtttcccgtcaacacagaatagtgcttgc

SEQ ID NO: 534928 - DNA, 33 bp, Homo sapien
aggggtttcccgtcaagacagaatagtgcttgc

SEQ ID NO: 534929 - DNA, 33 bp, Homo sapien
gtaatgcattatactccgagaaactgatttaac

SEQ ID NO: 534930 - DNA, 33 bp, Homo sapien
gtaatgcattatactctgagaaactgatttaac

SEQ ID NO: 534931 - DNA, 33 bp, Homo sapien
gaaatcccaatgttcgcccccataattctagtt

SEQ ID NO: 534932 - DNA, 33 bp, Homo sapien
gaaatcccaatgttcgtccccataattctagtt

SEQ ID NO: 534933 - DNA, 33 bp, Homo sapien
tggtcaataattttaaccacatcatgcaaaaca

SEQ ID NO: 534934 - DNA, 33 bp, Homo sapien
tggtcaataattttaatcacatcatgcaaaaca

SEQ ID NO: 534935 - DNA, 33 bp, Homo sapien
tcttttactcagctcacgcaaaccaacaaacat

SEQ ID NO: 534936 - DNA, 33 bp, Homo sapien
tcttttactcagctcatgcaaaccaacaaacat

SEQ ID NO: 534937 - DNA, 33 bp, Homo sapien
tacgtttatgacactcacttttcttttccaatg

SEQ ID NO: 534938 - DNA, 33 bp, Homo sapien
tacgtttatgacactcgcttttcttttccaatg

SEQ ID NO: 534939 - DNA, 33 bp, Homo sapien
gtattgctatagatacgcaacaacaaatcaaga

SEQ ID NO: 534940 - DNA, 33 bp, Homo sapien
gtattgctatagatactcaacaacaaatcaaga

SEQ ID NO: 534941 - DNA, 33 bp, Homo sapien
tttgattcagtatcataaggaagttcacatttg

SEQ ID NO: 534942 - DNA, 33 bp, Homo sapien
tttgattcagtatcatgaggaagttcacatttg

SEQ ID NO: 534943 - DNA, 33 bp, Homo sapien
agtttgctacattaagcaatttttcatagataa

SEQ ID NO: 534944 - DNA, 33 bp, Homo sapien
agtttgctacattaaggaatttttcatagataa

SEQ ID NO: 534945 - DNA, 33 bp, Homo sapien
acattctcattaccagaacattctccagtaatg

SEQ ID NO: 534946 - DNA, 33 bp, Homo sapien
acattctcattaccagcacattctccagtaatg

SEQ ID NO: 534947 - DNA, 33 bp, Homo sapien
ttgctagcaggctcaaatcaccagaacacaaaa

SEQ ID NO: 534948 - DNA, 33 bp, Homo sapien
ttgctagcaggctcaattcaccagaacacaaaa

SEQ ID NO: 534949 - DNA, 33 bp, Homo sapien
acatcctttgtattaaactgctgcacaggcctg

SEQ ID NO: 534950 - DNA, 33 bp, Homo sapien
acatcctttgtattaacctgctgcacaggcctg

SEQ ID NO: 534951 - DNA, 33 bp, Homo sapien
ataagacccacatttcaaagcaggtagtgtgcc

SEQ ID NO: 534952 - DNA, 33 bp, Homo sapien
ataagacccacatttcgaagcaggtagtgtgcc

SEQ ID NO: 534953 - DNA, 33 bp, Homo sapien
tacatttagctccatacaattttatcatgtgtg

SEQ ID NO: 534954 - DNA, 33 bp, Homo sapien
tacatttagctccatataattttatcatgtgtg

SEQ ID NO: 534955 - DNA, 33 bp, Homo sapien
gaagattgcaaagggacacttgtggaaatggag

SEQ ID NO: 534956 - DNA, 33 bp, Homo sapien
gaagattgcaaagggatacttgtggaaatggag

SEQ ID NO: 534957 - DNA, 33 bp, Homo sapien
gaaacacctggatgctaagagacttgtaccata

SEQ ID NO: 534958 - DNA, 33 bp, Homo sapien
gaaacacctggatgctgagagacttgtaccata

SEQ ID NO: 534959 - DNA, 33 bp, Homo sapien
tggctcctttgaacaactgagaggccccccaaa

SEQ ID NO: 534960 - DNA, 33 bp, Homo sapien
tggctcctttgaacaattgagaggccccccaaa

SEQ ID NO: 534961 - DNA, 33 bp, Homo sapien
ttttctctacttttagaagagttacttaggctg

SEQ ID NO: 534962 - DNA, 33 bp, Homo sapien
ttttctctacttttaggagagttacttaggctg

SEQ ID NO: 534963 - DNA, 33 bp, Homo sapien
tcagaagctaaaaaaactactgtctttcacatc

SEQ ID NO: 534964 - DNA, 33 bp, Homo sapien
tcagaagctaaaaaaattactgtctttcacatc

SEQ ID NO: 534965 - DNA, 33 bp, Homo sapien
aaagtacattttttcaccattgaaattctacga

SEQ ID NO: 534966 - DNA, 33 bp, Homo sapien
aaagtacattttttcatcattgaaattctacga

SEQ ID NO: 534967 - DNA, 33 bp, Homo sapien
tggttatttgcatggaagaaaagctttcagata

SEQ ID NO: 534968 - DNA, 33 bp, Homo sapien
tggttatttgcatggatgaaaagctttcagata

SEQ ID NO: 534969 - DNA, 33 bp, Homo sapien
gtcaaaccatatcactcaacttagaattaggtt

SEQ ID NO: 534970 - DNA, 33 bp, Homo sapien
gtcaaaccatatcacttaacttagaattaggtt

SEQ ID NO: 534971 - DNA, 33 bp, Homo sapien
cctgttgatgaacttacatccagagagatattt

SEQ ID NO: 534972 - DNA, 33 bp, Homo sapien
cctgttgatgaacttatatccagagagatattt

SEQ ID NO: 534973 - DNA, 33 bp, Homo sapien
tatcttcattatcaccaaataatctccttattt

SEQ ID NO: 534974 - DNA, 33 bp, Homo sapien
tatcttcattatcaccgaataatctccttattt

SEQ ID NO: 534975 - DNA, 33 bp, Homo sapien
tactctgaaatgaaacaaagtgaaaaaagcatt

SEQ ID NO: 534976 - DNA, 33 bp, Homo sapien
tactctgaaatgaaacgaagtgaaaaaagcatt

SEQ ID NO: 534977 - DNA, 33 bp, Homo sapien
cttctgtcaaagtaataaaaaaaatgatatttc

SEQ ID NO: 534978 - DNA, 33 bp, Homo sapien
cttctgtcaaagtaatcaaaaaaatgatatttc

SEQ ID NO: 534979 - DNA, 33 bp, Homo sapien
tactgagtaattaaaacatggattggcattaag

SEQ ID NO: 534980 - DNA, 33 bp, Homo sapien
tactgagtaattaaaatatggattggcattaag

SEQ ID NO: 534981 - DNA, 33 bp, Homo sapien
cagtagttagaaatccaaattgagcctaatcac

SEQ ID NO: 534982 - DNA, 33 bp, Homo sapien
cagtagttagaaatccgaattgagcctaatcac

SEQ ID NO: 534983 - DNA, 33 bp, Homo sapien
caaggattttgtcctgaatacttaacatattga

SEQ ID NO: 534984 - DNA, 33 bp, Homo sapien
caaggattttgtcctgtatacttaacatattga

SEQ ID NO: 534985 - DNA, 33 bp, Homo sapien
tcctaagtttgtaaaacgtatcagatatctgaa

SEQ ID NO: 534986 - DNA, 33 bp, Homo sapien
tcctaagtttgtaaaatgtatcagatatctgaa

SEQ ID NO: 534987 - DNA, 33 bp, Homo sapien
aacacgataataggaacaaatctacaaatatca

SEQ ID NO: 534988 - DNA, 33 bp, Homo sapien
aacacgataataggaagaaatctacaaatatca

SEQ ID NO: 534989 - DNA, 33 bp, Homo sapien
aagccctggaggacttaaaaaatgtgaagaagg

SEQ ID NO: 534990 - DNA, 33 bp, Homo sapien
aagccctggaggacttcaaaaatgtgaagaagg

SEQ ID NO: 534991 - DNA, 33 bp, Homo sapien
tttgacttgaccaatggagtgatgaattgaaaa

SEQ ID NO: 534992 - DNA, 33 bp, Homo sapien
tttgacttgaccaatgtagtgatgaattgaaaa

SEQ ID NO: 534993 - DNA, 33 bp, Homo sapien
ctcttgaaggatgaaaacagtcttcttacaact

SEQ ID NO: 534994 - DNA, 33 bp, Homo sapien
ctcttgaaggatgaaagcagtcttcttacaact

SEQ ID NO: 534995 - DNA, 33 bp, Homo sapien
atggtggaaagctagaaagatgatgtagaacat

SEQ ID NO: 534996 - DNA, 33 bp, Homo sapien
atggtggaaagctagacagatgatgtagaacat

SEQ ID NO: 534997 - DNA, 33 bp, Homo sapien
tcagacactgtagaataagacagcaggcagagt

SEQ ID NO: 534998 - DNA, 33 bp, Homo sapien
tcagacactgtagaatgagacagcaggcagagt

SEQ ID NO: 534999 - DNA, 33 bp, Homo sapien
aattaattgagcaaaacattatcagtggatgct

SEQ ID NO: 535000 - DNA, 33 bp, Homo sapien
aattaattgagcaaaagattatcagtggatgct

SEQ ID NO: 535001 - DNA, 33 bp, Homo sapien
atggtatattgtgtgaagttgaagtttgggata

SEQ ID NO: 535002 - DNA, 33 bp, Homo sapien
atggtatattgtgtgatgttgaagtttgggata

SEQ ID NO: 535003 - DNA, 33 bp, Homo sapien
gcccaattccatcataccaagttatttcctcca

SEQ ID NO: 535004 - DNA, 33 bp, Homo sapien
gcccaattccatcatatcaagttatttcctcca

SEQ ID NO: 535005 - DNA, 33 bp, Homo sapien
gtatgtgggaaaacaaataaggacaaataacta

SEQ ID NO: 535006 - DNA, 33 bp, Homo sapien
gtatgtgggaaaacaagtaaggacaaataacta

SEQ ID NO: 535007 - DNA, 33 bp, Homo sapien
aaaagagcaggagggaaatatgttaattgtagc

SEQ ID NO: 535008 - DNA, 33 bp, Homo sapien
aaaagagcaggagggagatatgttaattgtagc

SEQ ID NO: 535009 - DNA, 33 bp, Homo sapien
ggtcaaattgcacaagcctaaaaggaaaataat

SEQ ID NO: 535010 - DNA, 33 bp, Homo sapien
ggtcaaattgcacaaggctaaaaggaaaataat

SEQ ID NO: 535011 - DNA, 33 bp, Homo sapien
ggagtgatctagaagacaagtggggaaaagact

SEQ ID NO: 535012 - DNA, 33 bp, Homo sapien
ggagtgatctagaagagaagtggggaaaagact

SEQ ID NO: 535013 - DNA, 33 bp, Homo sapien
aaggtaaaagcattgacataaaagtggcatttt

SEQ ID NO: 535014 - DNA, 33 bp, Homo sapien
aaggtaaaagcattgatataaaagtggcatttt

SEQ ID NO: 535015 - DNA, 33 bp, Homo sapien
acaagttttatttgaactatgtagtactctgta

SEQ ID NO: 535016 - DNA, 33 bp, Homo sapien
acaagttttatttgaattatgtagtactctgta

SEQ ID NO: 535017 - DNA, 33 bp, Homo sapien
acagggtgaattctaaacttttggatgatgtaa

SEQ ID NO: 535018 - DNA, 33 bp, Homo sapien
acagggtgaattctaaccttttggatgatgtaa

SEQ ID NO: 535019 - DNA, 33 bp, Homo sapien
ttgttctcgtctctgacgttaattttgagtaat

SEQ ID NO: 535020 - DNA, 33 bp, Homo sapien
ttgttctcgtctctgatgttaattttgagtaat

SEQ ID NO: 535021 - DNA, 33 bp, Homo sapien
ttgagggagtgagtccaaacatttaacagttac

SEQ ID NO: 535022 - DNA, 33 bp, Homo sapien
ttgagggagtgagtccgaacatttaacagttac

SEQ ID NO: 535023 - DNA, 33 bp, Homo sapien
gttgttatgtacatgaccaggtgttaattattg

SEQ ID NO: 535024 - DNA, 33 bp, Homo sapien
gttgttatgtacatgatcaggtgttaattattg

SEQ ID NO: 535025 - DNA, 33 bp, Homo sapien
gcctgtgtattagctaaaagtgagaagtaaaag

SEQ ID NO: 535026 - DNA, 33 bp, Homo sapien
gcctgtgtattagctacaagtgagaagtaaaag

SEQ ID NO: 535027 - DNA, 33 bp, Homo sapien
agtaatagagacgtaacgacctacaagatgaaa

SEQ ID NO: 535028 - DNA, 33 bp, Homo sapien
agtaatagagacgtaatgacctacaagatgaaa

SEQ ID NO: 535029 - DNA, 33 bp, Homo sapien
cctagagtaactgataccacactatctgctttt

SEQ ID NO: 535030 - DNA, 33 bp, Homo sapien
cctagagtaactgatatcacactatctgctttt

SEQ ID NO: 535031 - DNA, 33 bp, Homo sapien
cttccttcatcacaacagaaaagaagatattag

SEQ ID NO: 535032 - DNA, 33 bp, Homo sapien
cttccttcatcacaacggaaaagaagatattag

SEQ ID NO: 535033 - DNA, 33 bp, Homo sapien
tcatgtaagtaatagcggaccattcaatattag

SEQ ID NO: 535034 - DNA, 33 bp, Homo sapien
tcatgtaagtaatagctgaccattcaatattag

SEQ ID NO: 535035 - DNA, 33 bp, Homo sapien
atctatgtggtatgcaaaacttttctaagccta

SEQ ID NO: 535036 - DNA, 33 bp, Homo sapien
atctatgtggtatgcacaacttttctaagccta

SEQ ID NO: 535037 - DNA, 33 bp, Homo sapien
aaataagggagtaaaacgactcagtggttgagg

SEQ ID NO: 535038 - DNA, 33 bp, Homo sapien
aaataagggagtaaaatgactcagtggttgagg

SEQ ID NO: 535039 - DNA, 33 bp, Homo sapien
ttgatcataagccttacaggtaacatgaactgt

SEQ ID NO: 535040 - DNA, 33 bp, Homo sapien
ttgatcataagccttataggtaacatgaactgt

SEQ ID NO: 535041 - DNA, 33 bp, Homo sapien
atggcagcggtggtgaccatccagtatggggcg

SEQ ID NO: 535042 - DNA, 33 bp, Homo sapien
atggcagcggtggtgatcatccagtatggggcg

SEQ ID NO: 535043 - DNA, 33 bp, Homo sapien
gaaaatcgggaagaaactgcttgttaaagatat

SEQ ID NO: 535044 - DNA, 33 bp, Homo sapien
gaaaatcgggaagaaagtgcttgttaaagatat

SEQ ID NO: 535045 - DNA, 33 bp, Homo sapien
tgaaacccaagggtcaggtcgcttgcccaaact

SEQ ID NO: 535046 - DNA, 33 bp, Homo sapien
tgaaacccaagggtcatgtcgcttgcccaaact

SEQ ID NO: 535047 - DNA, 33 bp, Homo sapien
caagtctcttggtttacagagtagctcctaata

SEQ ID NO: 535048 - DNA, 33 bp, Homo sapien
caagtctcttggtttatagagtagctcctaata

SEQ ID NO: 535049 - DNA, 33 bp, Homo sapien
taataattcactgataacctacagacaattccc

SEQ ID NO: 535050 - DNA, 33 bp, Homo sapien
taataattcactgataccctacagacaattccc

SEQ ID NO: 535051 - DNA, 33 bp, Homo sapien
tttatttaattcttcaatccaatggtccatttt

SEQ ID NO: 535052 - DNA, 33 bp, Homo sapien
tttatttaattcttcagtccaatggtccatttt

SEQ ID NO: 535053 - DNA, 33 bp, Homo sapien
ttactcaagtcctataaaaatgaggccaaataa

SEQ ID NO: 535054 - DNA, 33 bp, Homo sapien
ttactcaagtcctatagaaatgaggccaaataa

SEQ ID NO: 535055 - DNA, 33 bp, Homo sapien
tatgaaatgcttttacagagacagagaatttca

SEQ ID NO: 535056 - DNA, 33 bp, Homo sapien
tatgaaatgcttttacggagacagagaatttca

SEQ ID NO: 535057 - DNA, 33 bp, Homo sapien
actcatacacacaaaaatgattgcagtcattgt

SEQ ID NO: 535058 - DNA, 33 bp, Homo sapien
actcatacacacaaaactgattgcagtcattgt

SEQ ID NO: 535059 - DNA, 33 bp, Homo sapien
attgacagtagaccaacaatgactcaatgacaa

SEQ ID NO: 535060 - DNA, 33 bp, Homo sapien
attgacagtagaccaataatgactcaatgacaa

SEQ ID NO: 535061 - DNA, 33 bp, Homo sapien
cgcaggcaagttgtccggacgagtgtgtagctc

SEQ ID NO: 535062 - DNA, 33 bp, Homo sapien
cgcaggcaagttgtcctgacgagtgtgtagctc

SEQ ID NO: 535063 - DNA, 33 bp, Homo sapien
tctccaaagctgtaagactaattaatctatttt

SEQ ID NO: 535064 - DNA, 33 bp, Homo sapien
tctccaaagctgtaagtctaattaatctatttt

SEQ ID NO: 535065 - DNA, 33 bp, Homo sapien
aaaatgataggtcaaactttatctcaaacagtt

SEQ ID NO: 535066 - DNA, 33 bp, Homo sapien
aaaatgataggtcaaattttatctcaaacagtt

SEQ ID NO: 535067 - DNA, 33 bp, Homo sapien
atgacaacatatcaaaccataatggctaaaaga

SEQ ID NO: 535068 - DNA, 33 bp, Homo sapien
atgacaacatatcaaatcataatggctaaaaga

SEQ ID NO: 535069 - DNA, 33 bp, Homo sapien
acactttcactgtttaaaaaaacactgtcaaat

SEQ ID NO: 535070 - DNA, 33 bp, Homo sapien
acactttcactgtttataaaaacactgtcaaat

SEQ ID NO: 535071 - DNA, 33 bp, Homo sapien
taagtcagaatttactaaaaactgcatctcaat

SEQ ID NO: 535072 - DNA, 33 bp, Homo sapien
taagtcagaatttactgaaaactgcatctcaat

SEQ ID NO: 535073 - DNA, 33 bp, Homo sapien
ttgtataatgaactctcaaaatgcctaacatat

SEQ ID NO: 535074 - DNA, 33 bp, Homo sapien
ttgtataatgaactctgaaaatgcctaacatat

SEQ ID NO: 535075 - DNA, 33 bp, Homo sapien
cataatggcacgttgactattcaaactcttcta

SEQ ID NO: 535076 - DNA, 33 bp, Homo sapien
cataatggcacgttgattattcaaactcttcta

SEQ ID NO: 535077 - DNA, 33 bp, Homo sapien
tctggtaaaaattcacaatacatctcttgaaat

SEQ ID NO: 535078 - DNA, 33 bp, Homo sapien
tctggtaaaaattcacgatacatctcttgaaat

SEQ ID NO: 535079 - DNA, 33 bp, Homo sapien
ccatgactctttgtacagattttataccaatta

SEQ ID NO: 535080 - DNA, 33 bp, Homo sapien
ccatgactctttgtaccgattttataccaatta

SEQ ID NO: 535081 - DNA, 33 bp, Homo sapien
tatttatatttgctaaagtccatttaaaaattg

SEQ ID NO: 535082 - DNA, 33 bp, Homo sapien
tatttatatttgctaacgtccatttaaaaattg

SEQ ID NO: 535083 - DNA, 33 bp, Homo sapien
gaagtagtattttgggaaacttaataacaatga

SEQ ID NO: 535084 - DNA, 33 bp, Homo sapien
gaagtagtattttgggcaacttaataacaatga

SEQ ID NO: 535085 - DNA, 33 bp, Homo sapien
tagaatatatcaaatacctcaaagttctagaat

SEQ ID NO: 535086 - DNA, 33 bp, Homo sapien
tagaatatatcaaatagctcaaagttctagaat

SEQ ID NO: 535087 - DNA, 33 bp, Homo sapien
gtgaaatagcagaagaataagctaacaaacata

SEQ ID NO: 535088 - DNA, 33 bp, Homo sapien
gtgaaatagcagaagagtaagctaacaaacata

SEQ ID NO: 535089 - DNA, 33 bp, Homo sapien
ggaggcaatagaggagaacatcatgggactagc

SEQ ID NO: 535090 - DNA, 33 bp, Homo sapien
ggaggcaatagaggaggacatcatgggactagc

SEQ ID NO: 535091 - DNA, 33 bp, Homo sapien
tgggttctgatagctacgcccatcttgcacaag

SEQ ID NO: 535092 - DNA, 33 bp, Homo sapien
tgggttctgatagctatgcccatcttgcacaag

SEQ ID NO: 535093 - DNA, 33 bp, Homo sapien
aacatgaggtgtcaggaagatcactagtgccat

SEQ ID NO: 535094 - DNA, 33 bp, Homo sapien
aacatgaggtgtcagggagatcactagtgccat

SEQ ID NO: 535095 - DNA, 33 bp, Homo sapien
gtccatcagttttgccaaataaaatgcatattg

SEQ ID NO: 535096 - DNA, 33 bp, Homo sapien
gtccatcagttttgcccaataaaatgcatattg

SEQ ID NO: 535097 - DNA, 33 bp, Homo sapien
aaagtcataaatggaccgaggcattcaaaacag

SEQ ID NO: 535098 - DNA, 33 bp, Homo sapien
aaagtcataaatggactgaggcattcaaaacag

SEQ ID NO: 535099 - DNA, 33 bp, Homo sapien
ccctgggctgactagcaagtttctatttagtcc

SEQ ID NO: 535100 - DNA, 33 bp, Homo sapien
ccctgggctgactagcgagtttctatttagtcc

SEQ ID NO: 535101 - DNA, 33 bp, Homo sapien
tagtagatacttaaatcagaccaggtaatcatt

SEQ ID NO: 535102 - DNA, 33 bp, Homo sapien
tagtagatacttaaattagaccaggtaatcatt

SEQ ID NO: 535103 - DNA, 33 bp, Homo sapien
gggagaaaggtaaatgacagcaagaatcttcaa

SEQ ID NO: 535104 - DNA, 33 bp, Homo sapien
gggagaaaggtaaatgtcagcaagaatcttcaa

SEQ ID NO: 535105 - DNA, 33 bp, Homo sapien
tagattgccaaggaatgaatggatcctactact

SEQ ID NO: 535106 - DNA, 33 bp, Homo sapien
tagattgccaaggaattaatggatcctactact

SEQ ID NO: 535107 - DNA, 33 bp, Homo sapien
aaacactaccattcagcaagagggccatgtaac

SEQ ID NO: 535108 - DNA, 33 bp, Homo sapien
aaacactaccattcagtaagagggccatgtaac

SEQ ID NO: 535109 - DNA, 33 bp, Homo sapien
catgttagaattcctcagaagtggataagggcc

SEQ ID NO: 535110 - DNA, 33 bp, Homo sapien
catgttagaattcctcggaagtggataagggcc

SEQ ID NO: 535111 - DNA, 33 bp, Homo sapien
tttatttattacactactaaacctggtgactag

SEQ ID NO: 535112 - DNA, 33 bp, Homo sapien
tttatttattacactagtaaacctggtgactag

SEQ ID NO: 535113 - DNA, 33 bp, Homo sapien
cagacacataaatctgcagaaaacctgatgatc

SEQ ID NO: 535114 - DNA, 33 bp, Homo sapien
cagacacataaatctgtagaaaacctgatgatc

SEQ ID NO: 535115 - DNA, 33 bp, Homo sapien
agaagagtagtggtgagaaatgttggtgttaat

SEQ ID NO: 535116 - DNA, 33 bp, Homo sapien
agaagagtagtggtgataaatgttggtgttaat

SEQ ID NO: 535117 - DNA, 33 bp, Homo sapien
taccaaggccggatagacatcatggtaaaatat

SEQ ID NO: 535118 - DNA, 33 bp, Homo sapien
taccaaggccggataggcatcatggtaaaatat

SEQ ID NO: 535119 - DNA, 33 bp, Homo sapien
caaatcatatagctgaccggattctactatcta

SEQ ID NO: 535120 - DNA, 33 bp, Homo sapien
caaatcatatagctgatcggattctactatcta

SEQ ID NO: 535121 - DNA, 33 bp, Homo sapien
agggatgaacttgcgaagatcagaagattaata

SEQ ID NO: 535122 - DNA, 33 bp, Homo sapien
agggatgaacttgcgatgatcagaagattaata

SEQ ID NO: 535123 - DNA, 33 bp, Homo sapien
atctatgttcataaaaatctgctataattttgg

SEQ ID NO: 535124 - DNA, 33 bp, Homo sapien
atctatgttcataaaagtctgctataattttgg

SEQ ID NO: 535125 - DNA, 33 bp, Homo sapien
actcagttctacaggaagtacataaagcatggc

SEQ ID NO: 535126 - DNA, 33 bp, Homo sapien
actcagttctacaggatgtacataaagcatggc

SEQ ID NO: 535127 - DNA, 33 bp, Homo sapien
atcacttccaaattaactcagtgttgtaattat

SEQ ID NO: 535128 - DNA, 33 bp, Homo sapien
atcacttccaaattaattcagtgttgtaattat

SEQ ID NO: 535129 - DNA, 33 bp, Homo sapien
cgagtagccaaaacaacaatgaccaaacagaac

SEQ ID NO: 535130 - DNA, 33 bp, Homo sapien
cgagtagccaaaacaataatgaccaaacagaac

SEQ ID NO: 535131 - DNA, 33 bp, Homo sapien
ctattgcatacatataccagaatttgtaggatg

SEQ ID NO: 535132 - DNA, 33 bp, Homo sapien
ctattgcatacatatagcagaatttgtaggatg

SEQ ID NO: 535133 - DNA, 33 bp, Homo sapien
tctccatacttgttccgcagtcaggttttgcca

SEQ ID NO: 535134 - DNA, 33 bp, Homo sapien
tctccatacttgttcctcagtcaggttttgcca

SEQ ID NO: 535135 - DNA, 33 bp, Homo sapien
catttgtatgctagaactaaaggctcttatata

SEQ ID NO: 535136 - DNA, 33 bp, Homo sapien
catttgtatgctagaagtaaaggctcttatata

SEQ ID NO: 535137 - DNA, 33 bp, Homo sapien
acaaaaatgaatttaggaagttacatgacgcta

SEQ ID NO: 535138 - DNA, 33 bp, Homo sapien
acaaaaatgaatttagtaagttacatgacgcta

SEQ ID NO: 535139 - DNA, 33 bp, Homo sapien
tgtcattctgatttaactgtacatatgaatatg

SEQ ID NO: 535140 - DNA, 33 bp, Homo sapien
tgtcattctgatttaagtgtacatatgaatatg

SEQ ID NO: 535141 - DNA, 33 bp, Homo sapien
tcattatcaattaagcgctcactggctggatat

SEQ ID NO: 535142 - DNA, 33 bp, Homo sapien
tcattatcaattaagctctcactggctggatat

SEQ ID NO: 535143 - DNA, 33 bp, Homo sapien
gctctccactttgttccattagtctgtttgtct

SEQ ID NO: 535144 - DNA, 33 bp, Homo sapien
gctctccactttgttcgattagtctgtttgtct

SEQ ID NO: 535145 - DNA, 33 bp, Homo sapien
aataatctgatgactacaatttatcagacaact

SEQ ID NO: 535146 - DNA, 33 bp, Homo sapien
aataatctgatgactagaatttatcagacaact

SEQ ID NO: 535147 - DNA, 33 bp, Homo sapien
aggtgcaataactacacgggtaaaaataggcca

SEQ ID NO: 535148 - DNA, 33 bp, Homo sapien
aggtgcaataactacatgggtaaaaataggcca

SEQ ID NO: 535149 - DNA, 33 bp, Homo sapien
agttatcaggttatcaagccatcagtttctatg

SEQ ID NO: 535150 - DNA, 33 bp, Homo sapien
agttatcaggttatcaggccatcagtttctatg

SEQ ID NO: 535151 - DNA, 33 bp, Homo sapien
tagtgacatggagataaggaagtccaggcgaca

SEQ ID NO: 535152 - DNA, 33 bp, Homo sapien
tagtgacatggagatagggaagtccaggcgaca

SEQ ID NO: 535153 - DNA, 33 bp, Homo sapien
aagttggcctggtggaaaaccctctgaagattt

SEQ ID NO: 535154 - DNA, 33 bp, Homo sapien
aagttggcctggtggataaccctctgaagattt

SEQ ID NO: 535155 - DNA, 33 bp, Homo sapien; identical to SEQ ID NO: 535153

SEQ ID NO: 535156 - DNA, 33 bp, Homo sapien; identical to SEQ ID NO: 535154

SEQ ID NO: 535157 - DNA, 33 bp, Homo sapien
tgtgtagatttgtagacaaaagatgatgtctga

SEQ ID NO: 535158 - DNA, 33 bp, Homo sapien
tgtgtagatttgtagataaaagatgatgtctga

SEQ ID NO: 535159 - DNA, 33 bp, Homo sapien
tctggaaaacactagacaagctcaagtgtgaca

SEQ ID NO: 535160 - DNA, 33 bp, Homo sapien
tctggaaaacactagataagctcaagtgtgaca

SEQ ID NO: 535161 - DNA, 33 bp, Homo sapien
taccattgctgtactggaggcatataatgtttt

SEQ ID NO: 535162 - DNA, 33 bp, Homo sapien
taccattgctgtactgtaggcatataatgtttt

SEQ ID NO: 535163 - DNA, 33 bp, Homo sapien
tttgtatcttttcatgaacatcccaggaaaaaa

SEQ ID NO: 535164 - DNA, 33 bp, Homo sapien
tttgtatcttttcatgcacatcccaggaaaaaa

SEQ ID NO: 535165 - DNA, 33 bp, Homo sapien
aaatctgtacccccacccaaattagcatttgtt

SEQ ID NO: 535166 - DNA, 33 bp, Homo sapien
aaatctgtacccccactcaaattagcatttgtt

SEQ ID NO: 535167 - DNA, 33 bp, Homo sapien
acttttgaggtatccaatcaggtattttgcaga

SEQ ID NO: 535168 - DNA, 33 bp, Homo sapien
acttttgaggtatccagtcaggtattttgcaga

SEQ ID NO: 535169 - DNA, 33 bp, Homo sapien
tttcagtcctgtgttagcaaagtttacaagcag

SEQ ID NO: 535170 - DNA, 33 bp, Homo sapien
tttcagtcctgtgttatcaaagtttacaagcag

SEQ ID NO: 535171 - DNA, 33 bp, Homo sapien
attagaatgatgaaaacggtaatgatgataaca

SEQ ID NO: 535172 - DNA, 33 bp, Homo sapien
attagaatgatgaaaatggtaatgatgataaca

SEQ ID NO: 535173 - DNA, 33 bp, Homo sapien
ccaaatctagtcttcactgtccttcttgtgata

SEQ ID NO: 535174 - DNA, 33 bp, Homo sapien
ccaaatctagtcttcattgtccttcttgtgata

SEQ ID NO: 535175 - DNA, 33 bp, Homo sapien
aaggaagatcctttaacgtatcttttctcttct

SEQ ID NO: 535176 - DNA, 33 bp, Homo sapien
aaggaagatcctttaatgtatcttttctcttct

SEQ ID NO: 535177 - DNA, 33 bp, Homo sapien
tctcaccactcttaatcaacataatgctggaag

SEQ ID NO: 535178 - DNA, 33 bp, Homo sapien
tctcaccactcttaatgaacataatgctggaag

SEQ ID NO: 535179 - DNA, 33 bp, Homo sapien
ctagttccatacctttaaaagaaatcactctag

SEQ ID NO: 535180 - DNA, 33 bp, Homo sapien
ctagttccatacctttcaaagaaatcactctag

SEQ ID NO: 535181 - DNA, 33 bp, Homo sapien
agaagttacaggagaacattaaatgcagtaaaa

SEQ ID NO: 535182 - DNA, 33 bp, Homo sapien
agaagttacaggagaatattaaatgcagtaaaa

SEQ ID NO: 535183 - DNA, 33 bp, Homo sapien
caactgtctgacataaaacccatttgacccttg

SEQ ID NO: 535184 - DNA, 33 bp, Homo sapien
caactgtctgacataagacccatttgacccttg

SEQ ID NO: 535185 - DNA, 33 bp, Homo sapien
cctctcagcttgactaaacttcaggcgggtttc

SEQ ID NO: 535186 - DNA, 33 bp, Homo sapien
cctctcagcttgactagacttcaggcgggtttc

SEQ ID NO: 535187 - DNA, 33 bp, Homo sapien
tgagcaagaaataatcatctgtgtactaagtca

SEQ ID NO: 535188 - DNA, 33 bp, Homo sapien
tgagcaagaaataatcgtctgtgtactaagtca

SEQ ID NO: 535189 - DNA, 33 bp, Homo sapien
attgacagcatcaaaacggagggaacctggatc

SEQ ID NO: 535190 - DNA, 33 bp, Homo sapien
attgacagcatcaaaatggagggaacctggatc

SEQ ID NO: 535191 - DNA, 33 bp, Homo sapien
agtgaacttagaggacaggtcaacaggtgtagc

SEQ ID NO: 535192 - DNA, 33 bp, Homo sapien
agtgaacttagaggacgggtcaacaggtgtagc

SEQ ID NO: 535193 - DNA, 33 bp, Homo sapien
aagtaatgtgttgtcaaaatatttaattgcaat

SEQ ID NO: 535194 - DNA, 33 bp, Homo sapien
aagtaatgtgttgtcagaatatttaattgcaat

SEQ ID NO: 535195 - DNA, 33 bp, Homo sapien
tggtagatttcaactaacaatgtcctggtaaac

SEQ ID NO: 535196 - DNA, 33 bp, Homo sapien
tggtagatttcaactagcaatgtcctggtaaac

SEQ ID NO: 535197 - DNA, 33 bp, Homo sapien
gaaatctccatagaaacagggacatacaatacc

SEQ ID NO: 535198 - DNA, 33 bp, Homo sapien
gaaatctccatagaaagagggacatacaatacc

SEQ ID NO: 535199 - DNA, 33 bp, Homo sapien
ttaacttatgacagtaataaaatccataaatta

SEQ ID NO: 535200 - DNA, 33 bp, Homo sapien
ttaacttatgacagtattaaaatccataaatta

SEQ ID NO: 535201 - DNA, 33 bp, Homo sapien
ttgaagattttgaatgacactattagattcact

SEQ ID NO: 535202 - DNA, 33 bp, Homo sapien
ttgaagattttgaatggcactattagattcact

SEQ ID NO: 535203 - DNA, 33 bp, Homo sapien
gagcaattaaccagtcaaagcctaagaaagatg

SEQ ID NO: 535204 - DNA, 33 bp, Homo sapien
gagcaattaaccagtcgaagcctaagaaagatg

SEQ ID NO: 535205 - DNA, 33 bp, Homo sapien
gtttagttccttagtacgaaagtagcaataggt

SEQ ID NO: 535206 - DNA, 33 bp, Homo sapien
gtttagttccttagtatgaaagtagcaataggt

SEQ ID NO: 535207 - DNA, 33 bp, Homo sapien
aagatgtcagaataaaaagcatcgggataaaaa

SEQ ID NO: 535208 - DNA, 33 bp, Homo sapien
aagatgtcagaataaagagcatcgggataaaaa

SEQ ID NO: 535209 - DNA, 33 bp, Homo sapien
tttcagaacggttgtgacaaattacactcccac

SEQ ID NO: 535210 - DNA, 33 bp, Homo sapien
tttcagaacggttgtgtcaaattacactcccac

SEQ ID NO: 535211 - DNA, 33 bp, Homo sapien
tcaccttaagaacaaactgttatgcatctgttc

SEQ ID NO: 535212 - DNA, 33 bp, Homo sapien
tcaccttaagaacaaattgttatgcatctgttc

SEQ ID NO: 535213 - DNA, 33 bp, Homo sapien
tgggtaaatgctggaagaattatctggattatt

SEQ ID NO: 535214 - DNA, 33 bp, Homo sapien
tgggtaaatgctggaataattatctggattatt

SEQ ID NO: 535215 - DNA, 33 bp, Homo sapien
attgtctttaatgagccatactggacaatacta

SEQ ID NO: 535216 - DNA, 33 bp, Homo sapien
attgtctttaatgagctatactggacaatacta

SEQ ID NO: 535217 - DNA, 33 bp, Homo sapien
ggagctgagaaggaaaatggtgcatgaagttta

SEQ ID NO: 535218 - DNA, 33 bp, Homo sapien
ggagctgagaaggaaagtggtgcatgaagttta

SEQ ID NO: 535219 - DNA, 33 bp, Homo sapien
agaaaatagagaattgaatctttgacatgaaaa

SEQ ID NO: 535220 - DNA, 33 bp, Homo sapien
agaaaatagagaattgcatctttgacatgaaaa

SEQ ID NO: 535221 - DNA, 33 bp, Homo sapien
tttatcagattttcaaaattagtggactttatt

SEQ ID NO: 535222 - DNA, 33 bp, Homo sapien
tttatcagattttcaatattagtggactttatt

SEQ ID NO: 535223 - DNA, 33 bp, Homo sapien
atcatattaatactcacgtggaaatccatgttt

SEQ ID NO: 535224 - DNA, 33 bp, Homo sapien
atcatattaatactcatgtggaaatccatgttt

SEQ ID NO: 535225 - DNA, 33 bp, Homo sapien
ggtgcaggccactggaaaatgagtgcaatacct

SEQ ID NO: 535226 - DNA, 33 bp, Homo sapien
ggtgcaggccactggacaatgagtgcaatacct

SEQ ID NO: 535227 - DNA, 33 bp, Homo sapien
ttcatatggatttttaaaacagtcctcttctgt

SEQ ID NO: 535228 - DNA, 33 bp, Homo sapien
ttcatatggatttttataacagtcctcttctgt

SEQ ID NO: 535229 - DNA, 33 bp, Homo sapien
gttacgacgtgatatagatatttgaaagcattt

SEQ ID NO: 535230 - DNA, 33 bp, Homo sapien
gttacgacgtgatatatatatttgaaagcattt

SEQ ID NO: 535231 - DNA, 33 bp, Homo sapien
atattttagttttgaacgcacttttggatccat

SEQ ID NO: 535232 - DNA, 33 bp, Homo sapien
atattttagttttgaatgcacttttggatccat

SEQ ID NO: 535233 - DNA, 33 bp, Homo sapien
aatgtaccataatgagacacaaataatatcaat

SEQ ID NO: 535234 - DNA, 33 bp, Homo sapien
aatgtaccataatgagtcacaaataatatcaat

SEQ ID NO: 535235 - DNA, 33 bp, Homo sapien
tgacaaatgaacaccacaaaattgtaggacaat

SEQ ID NO: 535236 - DNA, 33 bp, Homo sapien
tgacaaatgaacaccagaaaattgtaggacaat

SEQ ID NO: 535237 - DNA, 33 bp, Homo sapien
ggggttcccagtttcaagtcaggactcacagat

SEQ ID NO: 535238 - DNA, 33 bp, Homo sapien
ggggttcccagtttcaggtcaggactcacagat

SEQ ID NO: 535239 - DNA, 33 bp, Homo sapien
cagcagtattgttggacggttaccaggaggaga

SEQ ID NO: 535240 - DNA, 33 bp, Homo sapien
cagcagtattgttggagggttaccaggaggaga

SEQ ID NO: 535241 - DNA, 33 bp, Homo sapien
cctgttgcgattttaactgagcattttatattt

SEQ ID NO: 535242 - DNA, 33 bp, Homo sapien
cctgttgcgattttaattgagcattttatattt

SEQ ID NO: 535243 - DNA, 33 bp, Homo sapien
atgtagagaaactgaaacctgcataaattgtta

SEQ ID NO: 535244 - DNA, 33 bp, Homo sapien
atgtagagaaactgaaccctgcataaattgtta

SEQ ID NO: 535245 - DNA, 33 bp, Homo sapien
tataaggcagagtcataaacttggaacttgctc

SEQ ID NO: 535246 - DNA, 33 bp, Homo sapien
tataaggcagagtcatgaacttggaacttgctc

SEQ ID NO: 535247 - DNA, 33 bp, Homo sapien
gagggacccggtggaaggtagctgaatgattgg

SEQ ID NO: 535248 - DNA, 33 bp, Homo sapien
gagggacccggtggaatgtagctgaatgattgg

SEQ ID NO: 535249 - DNA, 33 bp, Homo sapien
attttgaggataaggaactaatgatacctctga

SEQ ID NO: 535250 - DNA, 33 bp, Homo sapien
attttgaggataaggagctaatgatacctctga

SEQ ID NO: 535251 - DNA, 33 bp, Homo sapien
acttgatgtacaaaaccccaactctaaattata

SEQ ID NO: 535252 - DNA, 33 bp, Homo sapien
acttgatgtacaaaactccaactctaaattata

SEQ ID NO: 535253 - DNA, 33 bp, Homo sapien
tacaaaagcttagatacgaggagacttcaaaaa

SEQ ID NO: 535254 - DNA, 33 bp, Homo sapien
tacaaaagcttagatatgaggagacttcaaaaa

SEQ ID NO: 535255 - DNA, 33 bp, Homo sapien
attttctttcctcagacgttccttatacttatg

SEQ ID NO: 535256 - DNA, 33 bp, Homo sapien
attttctttcctcagatgttccttatacttatg

SEQ ID NO: 535257 - DNA, 33 bp, Homo sapien
gacacaaagtagaaaccgcagaattatgccagt

SEQ ID NO: 535258 - DNA, 33 bp, Homo sapien
gacacaaagtagaaactgcagaattatgccagt

SEQ ID NO: 535259 - DNA, 33 bp, Homo sapien
ttccgagtactttccactgaagcacagatacgt

SEQ ID NO: 535260 - DNA, 33 bp, Homo sapien
ttccgagtactttccattgaagcacagatacgt

SEQ ID NO: 535261 - DNA, 33 bp, Homo sapien
actagctccaatctgcacattgtgagaaatttt

SEQ ID NO: 535262 - DNA, 33 bp, Homo sapien
actagctccaatctgcgcattgtgagaaatttt

SEQ ID NO: 535263 - DNA, 33 bp, Homo sapien
caaaacttagaaacaaccaagatagatgtatgg

SEQ ID NO: 535264 - DNA, 33 bp, Homo sapien
caaaacttagaaacaagcaagatagatgtatgg

SEQ ID NO: 535265 - DNA, 33 bp, Homo sapien
tgttcttatagttttacgcaatttttcaacaag

SEQ ID NO: 535266 - DNA, 33 bp, Homo sapien
tgttcttatagttttatgcaatttttcaacaag

SEQ ID NO: 535267 - DNA, 33 bp, Homo sapien
gctttgtatgggacacagatgatgctgagcgct

SEQ ID NO: 535268 - DNA, 33 bp, Homo sapien
gctttgtatgggacacggatgatgctgagcgct

SEQ ID NO: 535269 - DNA, 33 bp, Homo sapien
aaataactggtgataacagcaaagtgatgtgag

SEQ ID NO: 535270 - DNA, 33 bp, Homo sapien
aaataactggtgataatagcaaagtgatgtgag

SEQ ID NO: 535271 - DNA, 33 bp, Homo sapien
tatggctttttttacccgatcccgcaggcagtc

SEQ ID NO: 535272 - DNA, 33 bp, Homo sapien
tatggctttttttacctgatcccgcaggcagtc

SEQ ID NO: 535273 - DNA, 33 bp, Homo sapien
ttaactctttgcctaaatcaatctagaagtgtt

SEQ ID NO: 535274 - DNA, 33 bp, Homo sapien
ttaactctttgcctaagtcaatctagaagtgtt

SEQ ID NO: 535275 - DNA, 33 bp, Homo sapien
ctttttcaaacaaaccaaagactttaatgcttc

SEQ ID NO: 535276 - DNA, 33 bp, Homo sapien
ctttttcaaacaaaccgaagactttaatgcttc

SEQ ID NO: 535277 - DNA, 33 bp, Homo sapien
agggcaaaagctgaaacagagagaagtccatga

SEQ ID NO: 535278 - DNA, 33 bp, Homo sapien
agggcaaaagctgaaatagagagaagtccatga

SEQ ID NO: 535279 - DNA, 33 bp, Homo sapien
aatcattcaaaaacagccaacttcaggttctgt

SEQ ID NO: 535280 - DNA, 33 bp, Homo sapien
aatcattcaaaaacagtcaacttcaggttctgt

SEQ ID NO: 535281 - DNA, 33 bp, Homo sapien
gcaagatctttagggacggatatatttcccatt

SEQ ID NO: 535282 - DNA, 33 bp, Homo sapien
gcaagatctttagggatggatatatttcccatt

SEQ ID NO: 535283 - DNA, 33 bp, Homo sapien
ctttagagcctgttagcagtagaagcaagtaat

SEQ ID NO: 535284 - DNA, 33 bp, Homo sapien
ctttagagcctgttaggagtagaagcaagtaat

SEQ ID NO: 535285 - DNA, 33 bp, Homo sapien
agtccaagagcaaaacaacagattccagaaaga

SEQ ID NO: 535286 - DNA, 33 bp, Homo sapien
agtccaagagcaaaacgacagattccagaaaga

SEQ ID NO: 535287 - DNA, 33 bp, Homo sapien
ggtggtggtttatgaaaaggtttgtctgggtgt

SEQ ID NO: 535288 - DNA, 33 bp, Homo sapien
ggtggtggtttatgaataggtttgtctgggtgt

SEQ ID NO: 535289 - DNA, 33 bp, Homo sapien
tgctgtgtcttcaagaagtttcagggaaaggat

SEQ ID NO: 535290 - DNA, 33 bp, Homo sapien
tgctgtgtcttcaagacgtttcagggaaaggat

SEQ ID NO: 535291 - DNA, 33 bp, Homo sapien
atcaactattgctctacattgctttcctaacac

SEQ ID NO: 535292 - DNA, 33 bp, Homo sapien
atcaactattgctctatattgctttcctaacac

SEQ ID NO: 535293 - DNA, 33 bp, Homo sapien
caaaatactagctgctaaatgtacaactggctg

SEQ ID NO: 535294 - DNA, 33 bp, Homo sapien
caaaatactagctgctgaatgtacaactggctg

SEQ ID NO: 535295 - DNA, 33 bp, Homo sapien
tatacatagactaaaaataggctggaaaaagat

SEQ ID NO: 535296 - DNA, 33 bp, Homo sapien
tatacatagactaaaattaggctggaaaaagat

SEQ ID NO: 535297 - DNA, 33 bp, Homo sapien
ttgtggattaaaatcgcaataacatttcacagt

SEQ ID NO: 535298 - DNA, 33 bp, Homo sapien
ttgtggattaaaatcggaataacatttcacagt

SEQ ID NO: 535299 - DNA, 33 bp, Homo sapien
gtctgtagtggttacaagtttcttgaagaagac

SEQ ID NO: 535300 - DNA, 33 bp, Homo sapien
gtctgtagtggttacacgtttcttgaagaagac

SEQ ID NO: 535301 - DNA, 33 bp, Homo sapien
tgggcataattcatagaaccccaaaacaactgc

SEQ ID NO: 535302 - DNA, 33 bp, Homo sapien
tgggcataattcatagtaccccaaaacaactgc

SEQ ID NO: 535303 - DNA, 33 bp, Homo sapien
attttctctgatggtaagtgtgagaaacacatt

SEQ ID NO: 535304 - DNA, 33 bp, Homo sapien
attttctctgatggtaggtgtgagaaacacatt

SEQ ID NO: 535305 - DNA, 33 bp, Homo sapien
ttgggctttagtccaaatgaccattgccttcat

SEQ ID NO: 535306 - DNA, 33 bp, Homo sapien
ttgggctttagtccaattgaccattgccttcat

SEQ ID NO: 535307 - DNA, 33 bp, Homo sapien
tagaggactaaggaaaaaggaagccaagagact

SEQ ID NO: 535308 - DNA, 33 bp, Homo sapien
tagaggactaaggaaagaggaagccaagagact

SEQ ID NO: 535309 - DNA, 33 bp, Homo sapien
gtcaagggtttgtgacggagacatatcctagat

SEQ ID NO: 535310 - DNA, 33 bp, Homo sapien
gtcaagggtttgtgactgagacatatcctagat

SEQ ID NO: 535311 - DNA, 33 bp, Homo sapien
tgcacatgattttaaacgtaaactagcagcaaa

SEQ ID NO: 535312 - DNA, 33 bp, Homo sapien
tgcacatgattttaaatgtaaactagcagcaaa

SEQ ID NO: 535313 - DNA, 33 bp, Homo sapien
atttattgagcacttacaaaataccaagaatct

SEQ ID NO: 535314 - DNA, 33 bp, Homo sapien
atttattgagcacttataaaataccaagaatct

SEQ ID NO: 535315 - DNA, 33 bp, Homo sapien
agagcatgcttattaactcttcttggataaaat

SEQ ID NO: 535316 - DNA, 33 bp, Homo sapien
agagcatgcttattaagtcttcttggataaaat

SEQ ID NO: 535317 - DNA, 33 bp, Homo sapien
tttacagctacaatcacctatatttgaaagaaa

SEQ ID NO: 535318 - DNA, 33 bp, Homo sapien
tttacagctacaatcatctatatttgaaagaaa

SEQ ID NO: 535319 - DNA, 33 bp, Homo sapien
atggagtctgtcagtaaatcttgttaatgtaac

SEQ ID NO: 535320 - DNA, 33 bp, Homo sapien
atggagtctgtcagtagatcttgttaatgtaac

SEQ ID NO: 535321 - DNA, 33 bp, Homo sapien
actcaatgtgtgaacactcttacgctggtttag

SEQ ID NO: 535322 - DNA, 33 bp, Homo sapien
actcaatgtgtgaacattcttacgctggtttag

SEQ ID NO: 535323 - DNA, 33 bp, Homo sapien
ttccctgtcacttatcggactcttcttttctgc

SEQ ID NO: 535324 - DNA, 33 bp, Homo sapien
ttccctgtcacttatctgactcttcttttctgc

SEQ ID NO: 535325 - DNA, 33 bp, Homo sapien; identical to SEQ ID NO: 535323

SEQ ID NO: 535326 - DNA, 33 bp, Homo sapien; identical to SEQ ID NO: 535324

SEQ ID NO: 535327 - DNA, 33 bp, Homo sapien
aattccttcagagtaaggccaagtcctatttgg

SEQ ID NO: 535328 - DNA, 33 bp, Homo sapien
aattccttcagagtaatgccaagtcctatttgg

SEQ ID NO: 535329 - DNA, 33 bp, Homo sapien
ggccaaatttaggctacctgccaattcaaccaa

SEQ ID NO: 535330 - DNA, 33 bp, Homo sapien
ggccaaatttaggctatctgccaattcaaccaa

SEQ ID NO: 535331 - DNA, 33 bp, Homo sapien
agtatgacaatctagagctaatgcttaacaggt

SEQ ID NO: 535332 - DNA, 33 bp, Homo sapien
agtatgacaatctagatctaatgcttaacaggt

SEQ ID NO: 535333 - DNA, 33 bp, Homo sapien
ttcatcctgataattacctcctaactcattttc

SEQ ID NO: 535334 - DNA, 33 bp, Homo sapien
ttcatcctgataattatctcctaactcattttc

SEQ ID NO: 535335 - DNA, 33 bp, Homo sapien
aagtccatgtgtagaactgtagcaaggttttgt

SEQ ID NO: 535336 - DNA, 33 bp, Homo sapien
aagtccatgtgtagaattgtagcaaggttttgt

SEQ ID NO: 535337 - DNA, 33 bp, Homo sapien
tttcagttcagactacacagtatttaataaata

SEQ ID NO: 535338 - DNA, 33 bp, Homo sapien
tttcagttcagactacgcagtatttaataaata

SEQ ID NO: 535339 - DNA, 33 bp, Homo sapien
cattctgatgtatgaaagccttcttttatgagg

SEQ ID NO: 535340 - DNA, 33 bp, Homo sapien
cattctgatgtatgaaggccttcttttatgagg

SEQ ID NO: 535341 - DNA, 33 bp, Homo sapien
ggctaatggaatatacaatggaaaaatgattgt

SEQ ID NO: 535342 - DNA, 33 bp, Homo sapien
ggctaatggaatatacgatggaaaaatgattgt

SEQ ID NO: 535343 - DNA, 33 bp, Homo sapien
gtaggggagatttctccacctttagctgcctat

SEQ ID NO: 535344 - DNA, 33 bp, Homo sapien
gtaggggagatttctctacctttagctgcctat

SEQ ID NO: 535345 - DNA, 33 bp, Homo sapien
tcaaagtaaaattagaccagtacagtttatatt

SEQ ID NO: 535346 - DNA, 33 bp, Homo sapien
tcaaagtaaaattagatcagtacagtttatatt

SEQ ID NO: 535347 - DNA, 33 bp, Homo sapien
ggagagaaggaactaaagaagtgcagagaaaaa

SEQ ID NO: 535348 - DNA, 33 bp, Homo sapien
ggagagaaggaactaacgaagtgcagagaaaaa

SEQ ID NO: 535349 - DNA, 33 bp, Homo sapien
agactagcctagcctcacaacctacatctttct

SEQ ID NO: 535350 - DNA, 33 bp, Homo sapien
agactagcctagcctcgcaacctacatctttct

SEQ ID NO: 535351 - DNA, 33 bp, Homo sapien
gtaatttaacaaagaactgccactaagaatcag

SEQ ID NO: 535352 - DNA, 33 bp, Homo sapien
gtaatttaacaaagaagtgccactaagaatcag

SEQ ID NO: 535353 - DNA, 33 bp, Homo sapien
tccctttagttgcatacggttagcttcagcact

SEQ ID NO: 535354 - DNA, 33 bp, Homo sapien
tccctttagttgcatatggttagcttcagcact

SEQ ID NO: 535355 - DNA, 33 bp, Homo sapien
tttaacaaaaccatgcagatcattaattacttc

SEQ ID NO: 535356 - DNA, 33 bp, Homo sapien
tttaacaaaaccatgcggatcattaattacttc

SEQ ID NO: 535357 - DNA, 33 bp, Homo sapien
gaatgatagtgaagaacaatgtgtgttgtaaga

SEQ ID NO: 535358 - DNA, 33 bp, Homo sapien
gaatgatagtgaagaataatgtgtgttgtaaga

SEQ ID NO: 535359 - DNA, 33 bp, Homo sapien
ggatttggggttttaacattggttctttgaatg

SEQ ID NO: 535360 - DNA, 33 bp, Homo sapien
ggatttggggttttaatattggttctttgaatg

SEQ ID NO: 535361 - DNA, 33 bp, Homo sapien
aggtgctttaagttgcaaagcaggtaatattct

SEQ ID NO: 535362 - DNA, 33 bp, Homo sapien
aggtgctttaagttgcgaagcaggtaatattct

SEQ ID NO: 535363 - DNA, 33 bp, Homo sapien
aataaagacattctgcccatcacaatgagtgcc

SEQ ID NO: 535364 - DNA, 33 bp, Homo sapien
aataaagacattctgcgcatcacaatgagtgcc

SEQ ID NO: 535365 - DNA, 33 bp, Homo sapien
tctaaggaaaaaaggacagctacatgaggacca

SEQ ID NO: 535366 - DNA, 33 bp, Homo sapien
tctaaggaaaaaaggagagctacatgaggacca

SEQ ID NO: 535367 - DNA, 33 bp, Homo sapien
taagctctagattttaaagttagcctaaacagt

SEQ ID NO: 535368 - DNA, 33 bp, Homo sapien
taagctctagattttacagttagcctaaacagt

SEQ ID NO: 535369 - DNA, 33 bp, Homo sapien
tgcaaaaaagaagatgaacatcctgacaagtat

SEQ ID NO: 535370 - DNA, 33 bp, Homo sapien
tgcaaaaaagaagatggacatcctgacaagtat

SEQ ID NO: 535371 - DNA, 33 bp, Homo sapien
taaagattatttgtgaggctttcttactggcca

SEQ ID NO: 535372 - DNA, 33 bp, Homo sapien
taaagattatttgtgatgctttcttactggcca

SEQ ID NO: 535373 - DNA, 33 bp, Homo sapien
agtgttcaaaaccgataagaataaatgggaaac

SEQ ID NO: 535374 - DNA, 33 bp, Homo sapien
agtgttcaaaaccgatgagaataaatgggaaac

SEQ ID NO: 535375 - DNA, 33 bp, Homo sapien
tttgaaacattcaacccgccaaaatatccaatg

SEQ ID NO: 535376 - DNA, 33 bp, Homo sapien
tttgaaacattcaacctgccaaaatatccaatg

SEQ ID NO: 535377 - DNA, 33 bp, Homo sapien
tatgtaattcaaataacgtgttagaaacatcat

SEQ ID NO: 535378 - DNA, 33 bp, Homo sapien
tatgtaattcaaataatgtgttagaaacatcat

SEQ ID NO: 535379 - DNA, 33 bp, Homo sapien
aactcaaatatagcaacctgattattattcagc

SEQ ID NO: 535380 - DNA, 33 bp, Homo sapien
aactcaaatatagcaatctgattattattcagc

SEQ ID NO: 535381 - DNA, 33 bp, Homo sapien
tcacaattagacatcaagcaacatgtgacaatt

SEQ ID NO: 535382 - DNA, 33 bp, Homo sapien
tcacaattagacatcaggcaacatgtgacaatt

SEQ ID NO: 535383 - DNA, 33 bp, Homo sapien
gtgagtaggtgtgttacctcttttatactattg

SEQ ID NO: 535384 - DNA, 33 bp, Homo sapien
gtgagtaggtgtgttatctcttttatactattg

SEQ ID NO: 535385 - DNA, 33 bp, Homo sapien
agggcatttaacggcaacccattatactttagt

SEQ ID NO: 535386 - DNA, 33 bp, Homo sapien
agggcatttaacggcaccccattatactttagt

SEQ ID NO: 535387 - DNA, 33 bp, Homo sapien
tgttccacaaaagataatatactaaaagctaaa

SEQ ID NO: 535388 - DNA, 33 bp, Homo sapien
tgttccacaaaagatagtatactaaaagctaaa

SEQ ID NO: 535389 - DNA, 33 bp, Homo sapien
tttaaattttgggacccaagataaagtagctgc

SEQ ID NO: 535390 - DNA, 33 bp, Homo sapien
tttaaattttgggaccgaagataaagtagctgc

SEQ ID NO: 535391 - DNA, 33 bp, Homo sapien
tatattctaaagagcactcttctttttttcact

SEQ ID NO: 535392 - DNA, 33 bp, Homo sapien
tatattctaaagagcattcttctttttttcact

SEQ ID NO: 535393 - DNA, 33 bp, Homo sapien
tatatttatggatgacaaaagggttataacagc

SEQ ID NO: 535394 - DNA, 33 bp, Homo sapien
tatatttatggatgacgaaagggttataacagc

SEQ ID NO: 535395 - DNA, 33 bp, Homo sapien
aaaaagttctgagtcaaagttgagaaaagtgcc

SEQ ID NO: 535396 - DNA, 33 bp, Homo sapien
aaaaagttctgagtcagagttgagaaaagtgcc

SEQ ID NO: 535397 - DNA, 33 bp, Homo sapien
ggctgattacagcccaatatcctacataagatc

SEQ ID NO: 535398 - DNA, 33 bp, Homo sapien
ggctgattacagcccagtatcctacataagatc

SEQ ID NO: 535399 - DNA, 33 bp, Homo sapien
tacagtaatcagagtacattgctgctgatccca

SEQ ID NO: 535400 - DNA, 33 bp, Homo sapien
tacagtaatcagagtatattgctgctgatccca

SEQ ID NO: 535401 - DNA, 33 bp, Homo sapien
tctgtcagtactgtaaaattgtcaggaaaaata

SEQ ID NO: 535402 - DNA, 33 bp, Homo sapien
tctgtcagtactgtaacattgtcaggaaaaata

SEQ ID NO: 535403 - DNA, 33 bp, Homo sapien
ctgttgtaaaaaataactgagctgatgagagtg

SEQ ID NO: 535404 - DNA, 33 bp, Homo sapien
ctgttgtaaaaaataattgagctgatgagagtg

SEQ ID NO: 535405 - DNA, 33 bp, Homo sapien
ccatgcctctgtaaagaacatggtctcattcct

SEQ ID NO: 535406 - DNA, 33 bp, Homo sapien
ccatgcctctgtaaaggacatggtctcattcct

SEQ ID NO: 535407 - DNA, 33 bp, Homo sapien
atttatcactactataaatttggatgctgggaa

SEQ ID NO: 535408 - DNA, 33 bp, Homo sapien
atttatcactactatacatttggatgctgggaa

SEQ ID NO: 535409 - DNA, 33 bp, Homo sapien
gtgagatagaaccaggccacaatccttatttca

SEQ ID NO: 535410 - DNA, 33 bp, Homo sapien
gtgagatagaaccaggtcacaatccttatttca

SEQ ID NO: 535411 - DNA, 33 bp, Homo sapien
ttgaatctggagatgtaaagttgatgaaataag

SEQ ID NO: 535412 - DNA, 33 bp, Homo sapien
ttgaatctggagatgtcaagttgatgaaataag

SEQ ID NO: 535413 - DNA, 33 bp, Homo sapien
ctagtaggcagaattaagattgctcattcagga

SEQ ID NO: 535414 - DNA, 33 bp, Homo sapien
ctagtaggcagaattaggattgctcattcagga

SEQ ID NO: 535415 - DNA, 33 bp, Homo sapien
caaggattttggaaatcacatcgtgttatttta

SEQ ID NO: 535416 - DNA, 33 bp, Homo sapien
caaggattttggaaattacatcgtgttatttta

SEQ ID NO: 535417 - DNA, 33 bp, Homo sapien
tctggttccatagcttcaagagtcatgcccata

SEQ ID NO: 535418 - DNA, 33 bp, Homo sapien
tctggttccatagcttgaagagtcatgcccata

SEQ ID NO: 535419 - DNA, 33 bp, Homo sapien
aaaatcttaactgctcaatgtggctaaagtcaa

SEQ ID NO: 535420 - DNA, 33 bp, Homo sapien
aaaatcttaactgctcgatgtggctaaagtcaa

SEQ ID NO: 535421 - DNA, 33 bp, Homo sapien
aatctgtagggtaccaacaagcataaaaacaca

SEQ ID NO: 535422 - DNA, 33 bp, Homo sapien
aatctgtagggtaccagcaagcataaaaacaca

SEQ ID NO: 535423 - DNA, 33 bp, Homo sapien
caaactccaaatggtactacagacagaaccacg

SEQ ID NO: 535424 - DNA, 33 bp, Homo sapien
caaactccaaatggtattacagacagaaccacg

SEQ ID NO: 535425 - DNA, 33 bp, Homo sapien
cccctgattgttgcaaactttggattaatttcc

SEQ ID NO: 535426 - DNA, 33 bp, Homo sapien
cccctgattgttgcaagctttggattaatttcc

SEQ ID NO: 535427 - DNA, 33 bp, Homo sapien
ttcatatcaactcatacatccatacggaaaaaa

SEQ ID NO: 535428 - DNA, 33 bp, Homo sapien
ttcatatcaactcatatatccatacggaaaaaa

SEQ ID NO: 535429 - DNA, 33 bp, Homo sapien
tgaaagtagtgataaagccaagtaacatatata

SEQ ID NO: 535430 - DNA, 33 bp, Homo sapien
tgaaagtagtgataaatccaagtaacatatata

SEQ ID NO: 535431 - DNA, 33 bp, Homo sapien
tagcttacttctatggaaaaaaagattgaagat

SEQ ID NO: 535432 - DNA, 33 bp, Homo sapien
tagcttacttctatggtaaaaaagattgaagat

SEQ ID NO: 535433 - DNA, 33 bp, Homo sapien
cttacagtctgttaaccactggaattcagatat

SEQ ID NO: 535434 - DNA, 33 bp, Homo sapien
cttacagtctgttaactactggaattcagatat

SEQ ID NO: 535435 - DNA, 33 bp, Homo sapien
ttgatccatactcataaaaattaaaaagtgaac

SEQ ID NO: 535436 - DNA, 33 bp, Homo sapien
ttgatccatactcatacaaattaaaaagtgaac

SEQ ID NO: 535437 - DNA, 33 bp, Homo sapien
caaagtagaatccatgcatatcattcactcaac

SEQ ID NO: 535438 - DNA, 33 bp, Homo sapien
caaagtagaatccatgtatatcattcactcaac

SEQ ID NO: 535439 - DNA, 33 bp, Homo sapien
tgtgcttgtgaataacaactgtactcaagtcag

SEQ ID NO: 535440 - DNA, 33 bp, Homo sapien
tgtgcttgtgaataaccactgtactcaagtcag

SEQ ID NO: 535441 - DNA, 33 bp, Homo sapien
cttgatcttaggatcacgtagcttcttactaaa

SEQ ID NO: 535442 - DNA, 33 bp, Homo sapien
cttgatcttaggatcaggtagcttcttactaaa

SEQ ID NO: 535443 - DNA, 33 bp, Homo sapien
cccagcacatctaacacagaaaatatgagtggg

SEQ ID NO: 535444 - DNA, 33 bp, Homo sapien
cccagcacatctaacagagaaaatatgagtggg

SEQ ID NO: 535445 - DNA, 33 bp, Homo sapien
tcttcagggaggaacactattctgcctgccata

SEQ ID NO: 535446 - DNA, 33 bp, Homo sapien
tcttcagggaggaacattattctgcctgccata

SEQ ID NO: 535447 - DNA, 33 bp, Homo sapien
gttggattgtcaaagaaatacgaaataagattg

SEQ ID NO: 535448 - DNA, 33 bp, Homo sapien
gttggattgtcaaagatatacgaaataagattg

SEQ ID NO: 535449 - DNA, 33 bp, Homo sapien
aaagtacttgttcttacaaaacacggttctttg

SEQ ID NO: 535450 - DNA, 33 bp, Homo sapien
aaagtacttgttcttataaaacacggttctttg

SEQ ID NO: 535451 - DNA, 33 bp, Homo sapien
ttgtacagcgataaaaaataaattacatcaaat

SEQ ID NO: 535452 - DNA, 33 bp, Homo sapien
ttgtacagcgataaaagataaattacatcaaat

SEQ ID NO: 535453 - DNA, 33 bp, Homo sapien
aatcaacacaggtctggatttaaaagaaaaaaa

SEQ ID NO: 535454 - DNA, 33 bp, Homo sapien
aatcaacacaggtctgtatttaaaagaaaaaaa

SEQ ID NO: 535455 - DNA, 33 bp, Homo sapien
aagtctaatggattgacatgcaattttgcttaa

SEQ ID NO: 535456 - DNA, 33 bp, Homo sapien
aagtctaatggattgatatgcaattttgcttaa

SEQ ID NO: 535457 - DNA, 33 bp, Homo sapien
caaattctgtgtttaacagagagtaaataatta

SEQ ID NO: 535458 - DNA, 33 bp, Homo sapien
caaattctgtgtttaatagagagtaaataatta

SEQ ID NO: 535459 - DNA, 33 bp, Homo sapien
ttatggctactttgacactgttagtaattttgc

SEQ ID NO: 535460 - DNA, 33 bp, Homo sapien
ttatggctactttgactctgttagtaattttgc

SEQ ID NO: 535461 - DNA, 33 bp, Homo sapien
tgattctatatctcaagtcacattaaaaaaata

SEQ ID NO: 535462 - DNA, 33 bp, Homo sapien
tgattctatatctcaattcacattaaaaaaata

SEQ ID NO: 535463 - DNA, 33 bp, Homo sapien
tacctggtgtctttcaactttgattaatcccac

SEQ ID NO: 535464 - DNA, 33 bp, Homo sapien
tacctggtgtctttcagctttgattaatcccac

SEQ ID NO: 535465 - DNA, 33 bp, Homo sapien
atgacagcagataaatgagtcttgttgagaaaa

SEQ ID NO: 535466 - DNA, 33 bp, Homo sapien
atgacagcagataaattagtcttgttgagaaaa

SEQ ID NO: 535467 - DNA, 33 bp, Homo sapien
atttgcaaaacggagggcaatcatttcatcatt

SEQ ID NO: 535468 - DNA, 33 bp, Homo sapien
atttgcaaaacggaggtcaatcatttcatcatt

SEQ ID NO: 535469 - DNA, 33 bp, Homo sapien
tttatacttttgcagagaggattgttttttaca

SEQ ID NO: 535470 - DNA, 33 bp, Homo sapien
tttatacttttgcagataggattgttttttaca

SEQ ID NO: 535471 - DNA, 33 bp, Homo sapien
tctagaattcttcgggcatgggatgcaaaatgg

SEQ ID NO: 535472 - DNA, 33 bp, Homo sapien
tctagaattcttcgggtatgggatgcaaaatgg

SEQ ID NO: 535473 - DNA, 33 bp, Homo sapien
attttacctaattttagattcacatgtagttat

SEQ ID NO: 535474 - DNA, 33 bp, Homo sapien
attttacctaattttatattcacatgtagttat

SEQ ID NO: 535475 - DNA, 33 bp, Homo sapien
aaggccaatgggggacactaaagcttttgctca

SEQ ID NO: 535476 - DNA, 33 bp, Homo sapien
aaggccaatgggggacgctaaagcttttgctca

SEQ ID NO: 535477 - DNA, 33 bp, Homo sapien
cccctctgggtgaccaatgagagaacacgaacc

SEQ ID NO: 535478 - DNA, 33 bp, Homo sapien
cccctctgggtgaccagtgagagaacacgaacc

SEQ ID NO: 535479 - DNA, 33 bp, Homo sapien
atacatacacaaggtaagcctaggcacccattt

SEQ ID NO: 535480 - DNA, 33 bp, Homo sapien
atacatacacaaggtaggcctaggcacccattt

SEQ ID NO: 535481 - DNA, 33 bp, Homo sapien
tgattatctccttccacaaagtcaaggagttgg

SEQ ID NO: 535482 - DNA, 33 bp, Homo sapien
tgattatctccttccagaaagtcaaggagttgg

SEQ ID NO: 535483 - DNA, 33 bp, Homo sapien
agtaaaatgcatcatcacgggtgaccaattgaa

SEQ ID NO: 535484 - DNA, 33 bp, Homo sapien
agtaaaatgcatcatcccgggtgaccaattgaa

SEQ ID NO: 535485 - DNA, 33 bp, Homo sapien
ctgagaaatacatctaaatttgctaggaatgca

SEQ ID NO: 535486 - DNA, 33 bp, Homo sapien
ctgagaaatacatctacatttgctaggaatgca

SEQ ID NO: 535487 - DNA, 33 bp, Homo sapien
tcaaagaacatatagtaaattcaggataaaaga

SEQ ID NO: 535488 - DNA, 33 bp, Homo sapien
tcaaagaacatatagtgaattcaggataaaaga

SEQ ID NO: 535489 - DNA, 33 bp, Homo sapien
caaagttattggaaaaaggaggaagcatatttc

SEQ ID NO: 535490 - DNA, 33 bp, Homo sapien
caaagttattggaaaagggaggaagcatatttc

SEQ ID NO: 535491 - DNA, 33 bp, Homo sapien
tctctccaacaccaagaaaagcacctttatgtg

SEQ ID NO: 535492 - DNA, 33 bp, Homo sapien
tctctccaacaccaagcaaagcacctttatgtg

SEQ ID NO: 535493 - DNA, 33 bp, Homo sapien
cacctttatgtgttcacgtttaactgttaacga

SEQ ID NO: 535494 - DNA, 33 bp, Homo sapien
cacctttatgtgttcatgtttaactgttaacga

SEQ ID NO: 535495 - DNA, 33 bp, Homo sapien
tgtgcaaatgtaagccaagtttttcataaccag

SEQ ID NO: 535496 - DNA, 33 bp, Homo sapien
tgtgcaaatgtaagccgagtttttcataaccag

SEQ ID NO: 535497 - DNA, 33 bp, Homo sapien
gtgtaaatcaagggaaagtagatgttctctatc

SEQ ID NO: 535498 - DNA, 33 bp, Homo sapien
gtgtaaatcaagggaaggtagatgttctctatc

SEQ ID NO: 535499 - DNA, 33 bp, Homo sapien
tttttctcaaacttagacaaaatggacttcaac

SEQ ID NO: 535500 - DNA, 33 bp, Homo sapien
tttttctcaaacttaggcaaaatggacttcaac

SEQ ID NO: 535501 - DNA, 33 bp, Homo sapien
caatcacatgcgagtcacaaccatgaaaccttg

SEQ ID NO: 535502 - DNA, 33 bp, Homo sapien
caatcacatgcgagtctcaaccatgaaaccttg

SEQ ID NO: 535503 - DNA, 33 bp, Homo sapien
ttctaattcaattcacagataccaatatttaca

SEQ ID NO: 535504 - DNA, 33 bp, Homo sapien
ttctaattcaattcaccgataccaatatttaca

SEQ ID NO: 535505 - DNA, 33 bp, Homo sapien
taatgtccaaactcatcaatcttcttagattgt

SEQ ID NO: 535506 - DNA, 33 bp, Homo sapien
taatgtccaaactcatgaatcttcttagattgt

SEQ ID NO: 535507 - DNA, 33 bp, Homo sapien
aacaattgtggctcaccaccggatgctggctaa

SEQ ID NO: 535508 - DNA, 33 bp, Homo sapien
aacaattgtggctcactaccggatgctggctaa

SEQ ID NO: 535509 - DNA, 33 bp, Homo sapien
caaacttctgactccaaaactagtgatacagac

SEQ ID NO: 535510 - DNA, 33 bp, Homo sapien
caaacttctgactccagaactagtgatacagac

SEQ ID NO: 535511 - DNA, 33 bp, Homo sapien
gtctattaaaatcccaatggatcaatgtttcat

SEQ ID NO: 535512 - DNA, 33 bp, Homo sapien
gtctattaaaatcccagtggatcaatgtttcat

SEQ ID NO: 535513 - DNA, 33 bp, Homo sapien
tgggctttactacttacgggggccagtgttcct

SEQ ID NO: 535514 - DNA, 33 bp, Homo sapien
tgggctttactacttatgggggccagtgttcct

SEQ ID NO: 535515 - DNA, 33 bp, Homo sapien
attatatcaagagaagaatatgtgacatgtgtc

SEQ ID NO: 535516 - DNA, 33 bp, Homo sapien
attatatcaagagaagcatatgtgacatgtgtc

SEQ ID NO: 535517 - DNA, 33 bp, Homo sapien
aaaagtctcgtatttccatatctatgctttgta

SEQ ID NO: 535518 - DNA, 33 bp, Homo sapien
aaaagtctcgtatttctatatctatgctttgta

SEQ ID NO: 535519 - DNA, 33 bp, Homo sapien
aaagtcttgtaacctacaaatattcagcctact

SEQ ID NO: 535520 - DNA, 33 bp, Homo sapien
aaagtcttgtaacctataaatattcagcctact

SEQ ID NO: 535521 - DNA, 33 bp, Homo sapien
tttttgctttactatcagaggatgtgagatggt

SEQ ID NO: 535522 - DNA, 33 bp, Homo sapien
tttttgctttactatcggaggatgtgagatggt

SEQ ID NO: 535523 - DNA, 33 bp, Homo sapien
cagctctccagggacagaatcttaagtactgac

SEQ ID NO: 535524 - DNA, 33 bp, Homo sapien
cagctctccagggacataatcttaagtactgac

SEQ ID NO: 535525 - DNA, 33 bp, Homo sapien
aggaagtatgtgtcagccaaatttgttcctctc

SEQ ID NO: 535526 - DNA, 33 bp, Homo sapien
aggaagtatgtgtcagtcaaatttgttcctctc

SEQ ID NO: 535527 - DNA, 33 bp, Homo sapien
atgtgggtgctctccactctggttttctaagac

SEQ ID NO: 535528 - DNA, 33 bp, Homo sapien
atgtgggtgctctccattctggttttctaagac

SEQ ID NO: 535529 - DNA, 33 bp, Homo sapien
gcttttcatttcaattaaacttatgagcaacct

SEQ ID NO: 535530 - DNA, 33 bp, Homo sapien
gcttttcatttcaatttaacttatgagcaacct

SEQ ID NO: 535531 - DNA, 33 bp, Homo sapien
tctatgaaccttctaccaaatcatgcattccat

SEQ ID NO: 535532 - DNA, 33 bp, Homo sapien
tctatgaaccttctactaaatcatgcattccat

SEQ ID NO: 535533 - DNA, 33 bp, Homo sapien
ctttagccaataggtaaatctcttgtaggcagt

SEQ ID NO: 535534 - DNA, 33 bp, Homo sapien
ctttagccaataggtagatctcttgtaggcagt

SEQ ID NO: 535535 - DNA, 33 bp, Homo sapien
tgggcacggcatgagaacataagacaattagat

SEQ ID NO: 535536 - DNA, 33 bp, Homo sapien
tgggcacggcatgagagcataagacaattagat

SEQ ID NO: 535537 - DNA, 33 bp, Homo sapien
gtagataacagtctcacaacctctacatttttt

SEQ ID NO: 535538 - DNA, 33 bp, Homo sapien
gtagataacagtctcagaacctctacatttttt

SEQ ID NO: 535539 - DNA, 33 bp, Homo sapien
agtaactacagaataaacaagtgaacaaaaaca

SEQ ID NO: 535540 - DNA, 33 bp, Homo sapien
agtaactacagaataaccaagtgaacaaaaaca

SEQ ID NO: 535541 - DNA, 33 bp, Homo sapien
caaacaccttttagagcaggctataactgagga

SEQ ID NO: 535542 - DNA, 33 bp, Homo sapien
caaacaccttttagagtaggctataactgagga

SEQ ID NO: 535543 - DNA, 33 bp, Homo sapien
cttgtcctagaaagagaaaattatgaagaatta

SEQ ID NO: 535544 - DNA, 33 bp, Homo sapien
cttgtcctagaaagagcaaattatgaagaatta

SEQ ID NO: 535545 - DNA, 33 bp, Homo sapien
atgtaaacacacacaacgatgtatttcttatac

SEQ ID NO: 535546 - DNA, 33 bp, Homo sapien
atgtaaacacacacaatgatgtatttcttatac

SEQ ID NO: 535547 - DNA, 33 bp, Homo sapien
tatgctcatattctacccttcgttatgataact

SEQ ID NO: 535548 - DNA, 33 bp, Homo sapien
tatgctcatattctactcttcgttatgataact

SEQ ID NO: 535549 - DNA, 33 bp, Homo sapien
cgtagcatttaacacacggcagtgtaacaatgc

SEQ ID NO: 535550 - DNA, 33 bp, Homo sapien
cgtagcatttaacacatggcagtgtaacaatgc

SEQ ID NO: 535551 - DNA, 33 bp, Homo sapien
aaaaagcatatgacaaattgcaagaaatgacag

SEQ ID NO: 535552 - DNA, 33 bp, Homo sapien
aaaaagcatatgacaatttgcaagaaatgacag

SEQ ID NO: 535553 - DNA, 33 bp, Homo sapien
tgctttcatctttgccacctggttttacaggac

SEQ ID NO: 535554 - DNA, 33 bp, Homo sapien
tgctttcatctttgccgcctggttttacaggac

SEQ ID NO: 535555 - DNA, 33 bp, Homo sapien
acacttaaatatcagacgtgcaggcgagctaac

SEQ ID NO: 535556 - DNA, 33 bp, Homo sapien
acacttaaatatcagatgtgcaggcgagctaac

SEQ ID NO: 535557 - DNA, 33 bp, Homo sapien
aggcctttttctctccagagtagtgatgccacg

SEQ ID NO: 535558 - DNA, 33 bp, Homo sapien
aggcctttttctctccggagtagtgatgccacg

SEQ ID NO: 535559 - DNA, 33 bp, Homo sapien
gaaacagcttaaattaagtttctgtccctgaaa

SEQ ID NO: 535560 - DNA, 33 bp, Homo sapien
gaaacagcttaaattaggtttctgtccctgaaa

SEQ ID NO: 535561 - DNA, 33 bp, Homo sapien
cctgaaagacattagcaaacaaaacaatggctt

SEQ ID NO: 535562 - DNA, 33 bp, Homo sapien
cctgaaagacattagcgaacaaaacaatggctt

SEQ ID NO: 535563 - DNA, 33 bp, Homo sapien
ggcagggcagataatgcagagctttgtagctga

SEQ ID NO: 535564 - DNA, 33 bp, Homo sapien
ggcagggcagataatgtagagctttgtagctga

SEQ ID NO: 535565 - DNA, 33 bp, Homo sapien
ctactgcactgctgcacgaaaattatttagaaa

SEQ ID NO: 535566 - DNA, 33 bp, Homo sapien
ctactgcactgctgcatgaaaattatttagaaa

SEQ ID NO: 535567 - DNA, 33 bp, Homo sapien
aataatgtatgtagtacagttgtcttcattttt

SEQ ID NO: 535568 - DNA, 33 bp, Homo sapien
aataatgtatgtagtatagttgtcttcattttt

SEQ ID NO: 535569 - DNA, 33 bp, Homo sapien
gggtcttgaaaaccaaccttacatctgattcac

SEQ ID NO: 535570 - DNA, 33 bp, Homo sapien
gggtcttgaaaaccaatcttacatctgattcac

SEQ ID NO: 535571 - DNA, 33 bp, Homo sapien
ctggtaagtaaggatgaagagactaggactgta

SEQ ID NO: 535572 - DNA, 33 bp, Homo sapien
ctggtaagtaaggatgcagagactaggactgta

SEQ ID NO: 535573 - DNA, 33 bp, Homo sapien
gtattagagaataaaaattgtactgagttgaag

SEQ ID NO: 535574 - DNA, 33 bp, Homo sapien
gtattagagaataaaagttgtactgagttgaag

SEQ ID NO: 535575 - DNA, 33 bp, Homo sapien
ttactaaggtgatacaagaaggaccactgtgat

SEQ ID NO: 535576 - DNA, 33 bp, Homo sapien
ttactaaggtgatacaggaaggaccactgtgat

SEQ ID NO: 535577 - DNA, 33 bp, Homo sapien
atgttctagacaagtgaagccaggttaaatcac

SEQ ID NO: 535578 - DNA, 33 bp, Homo sapien
atgttctagacaagtggagccaggttaaatcac

SEQ ID NO: 535579 - DNA, 33 bp, Homo sapien
tagtaaactgcaaaccaatttaagtagagttat

SEQ ID NO: 535580 - DNA, 33 bp, Homo sapien
tagtaaactgcaaaccgatttaagtagagttat

SEQ ID NO: 535581 - DNA, 33 bp, Homo sapien
gtatctcagctatccaaaaccttaaacccacag

SEQ ID NO: 535582 - DNA, 33 bp, Homo sapien
gtatctcagctatccagaaccttaaacccacag

SEQ ID NO: 535583 - DNA, 33 bp, Homo sapien
attgttataaggctgaaaatcgtttggttcata

SEQ ID NO: 535584 - DNA, 33 bp, Homo sapien
attgttataaggctgacaatcgtttggttcata

SEQ ID NO: 535585 - DNA, 33 bp, Homo sapien
aacttgttgatagttacagtcaaaatgttttga

SEQ ID NO: 535586 - DNA, 33 bp, Homo sapien
aacttgttgatagttagagtcaaaatgttttga

SEQ ID NO: 535587 - DNA, 33 bp, Homo sapien
tcctagcaaagggcttcaaagatgcttaatacg

SEQ ID NO: 535588 - DNA, 33 bp, Homo sapien
tcctagcaaagggcttgaaagatgcttaatacg

SEQ ID NO: 535589 - DNA, 33 bp, Homo sapien
tacttccagtctcctcaacttcttttatgtgag

SEQ ID NO: 535590 - DNA, 33 bp, Homo sapien
tacttccagtctcctcgacttcttttatgtgag

SEQ ID NO: 535591 - DNA, 33 bp, Homo sapien
gtattactcttccccaaggttagcaaacatcca

SEQ ID NO: 535592 - DNA, 33 bp, Homo sapien
gtattactcttccccagggttagcaaacatcca

SEQ ID NO: 535593 - DNA, 33 bp, Homo sapien
aaagcggttcagtaaacgtttggtgaattaaca

SEQ ID NO: 535594 - DNA, 33 bp, Homo sapien
aaagcggttcagtaaatgtttggtgaattaaca

SEQ ID NO: 535595 - DNA, 33 bp, Homo sapien
tctctcttcaaagtatcactggtaatcaggaac

SEQ ID NO: 535596 - DNA, 33 bp, Homo sapien
tctctcttcaaagtattactggtaatcaggaac

SEQ ID NO: 535597 - DNA, 33 bp, Homo sapien
gactgtgatgagggtacagggtgcaaggaagat

SEQ ID NO: 535598 - DNA, 33 bp, Homo sapien
gactgtgatgagggtatagggtgcaaggaagat

SEQ ID NO: 535599 - DNA, 33 bp, Homo sapien
gatagggagagatatacgggtaaagagaaggct

SEQ ID NO: 535600 - DNA, 33 bp, Homo sapien
gatagggagagatatatgggtaaagagaaggct

SEQ ID NO: 535601 - DNA, 33 bp, Homo sapien
ccaatatgaagatctacggtatagcccattgga

SEQ ID NO: 535602 - DNA, 33 bp, Homo sapien
ccaatatgaagatctatggtatagcccattgga

SEQ ID NO: 535603 - DNA, 33 bp, Homo sapien
attgctaaagggagtgcaccatataatggcatg

SEQ ID NO: 535604 - DNA, 33 bp, Homo sapien
attgctaaagggagtgtaccatataatggcatg

SEQ ID NO: 535605 - DNA, 33 bp, Homo sapien
aaaacatacgagtggccaagaaacaaatgaaag

SEQ ID NO: 535606 - DNA, 33 bp, Homo sapien
aaaacatacgagtggctaagaaacaaatgaaag

SEQ ID NO: 535607 - DNA, 33 bp, Homo sapien
atgactgaatgagaagcattcacaccagtcaga

SEQ ID NO: 535608 - DNA, 33 bp, Homo sapien
atgactgaatgagaagtattcacaccagtcaga

SEQ ID NO: 535609 - DNA, 33 bp, Homo sapien
agaaaatgaggacaacaataaatctttcatctt

SEQ ID NO: 535610 - DNA, 33 bp, Homo sapien
agaaaatgaggacaacgataaatctttcatctt

SEQ ID NO: 535611 - DNA, 33 bp, Homo sapien
ttaaatgtatctcgtccagtcttggttggtggt

SEQ ID NO: 535612 - DNA, 33 bp, Homo sapien
ttaaatgtatctcgtctagtcttggttggtggt

SEQ ID NO: 535613 - DNA, 33 bp, Homo sapien
gggggcatattatgaaacaaatccagacttaac

SEQ ID NO: 535614 - DNA, 33 bp, Homo sapien
gggggcatattatgaagcaaatccagacttaac

SEQ ID NO: 535615 - DNA, 33 bp, Homo sapien
atgcacaatcggaatagggaaaagcaaaattat

SEQ ID NO: 535616 - DNA, 33 bp, Homo sapien
atgcacaatcggaatatggaaaagcaaaattat

SEQ ID NO: 535617 - DNA, 33 bp, Homo sapien
tttctatgagcatttccataaagcagtaggaat

SEQ ID NO: 535618 - DNA, 33 bp, Homo sapien
tttctatgagcatttctataaagcagtaggaat

SEQ ID NO: 535619 - DNA, 33 bp, Homo sapien
ggaaaagtaacatcccaatgcctgtggacatct

SEQ ID NO: 535620 - DNA, 33 bp, Homo sapien
ggaaaagtaacatcccgatgcctgtggacatct

SEQ ID NO: 535621 - DNA, 33 bp, Homo sapien
cccactcagaaccaataagaagcaatcggaata

SEQ ID NO: 535622 - DNA, 33 bp, Homo sapien
cccactcagaaccaatgagaagcaatcggaata

SEQ ID NO: 535623 - DNA, 33 bp, Homo sapien
taacctgtgaatgaaacgttctcttccactctt

SEQ ID NO: 535624 - DNA, 33 bp, Homo sapien
taacctgtgaatgaaatgttctcttccactctt

SEQ ID NO: 535625 - DNA, 33 bp, Homo sapien
tacaatcaagatgttaaagataagcagctccat

SEQ ID NO: 535626 - DNA, 33 bp, Homo sapien
tacaatcaagatgttagagataagcagctccat

SEQ ID NO: 535627 - DNA, 33 bp, Homo sapien
tctttattcatagggccattgtgagctaatcta

SEQ ID NO: 535628 - DNA, 33 bp, Homo sapien
tctttattcatagggctattgtgagctaatcta

SEQ ID NO: 535629 - DNA, 33 bp, Homo sapien
gtcagacccctctttaaaatagcccacagacca

SEQ ID NO: 535630 - DNA, 33 bp, Homo sapien
gtcagacccctctttagaatagcccacagacca

SEQ ID NO: 535631 - DNA, 33 bp, Homo sapien
ctgaagttatatttacagaaacaatgcccacac

SEQ ID NO: 535632 - DNA, 33 bp, Homo sapien
ctgaagttatatttaccgaaacaatgcccacac

SEQ ID NO: 535633 - DNA, 33 bp, Homo sapien
ggaacaatgcctctagaacatctccaagttctt

SEQ ID NO: 535634 - DNA, 33 bp, Homo sapien
ggaacaatgcctctaggacatctccaagttctt

SEQ ID NO: 535635 - DNA, 33 bp, Homo sapien
acatatttcagaataaagctgtttggtcatagg

SEQ ID NO: 535636 - DNA, 33 bp, Homo sapien
acatatttcagaataaggctgtttggtcatagg

SEQ ID NO: 535637 - DNA, 33 bp, Homo sapien
atacaagattcttccagggtctgaaggaggaga

SEQ ID NO: 535638 - DNA, 33 bp, Homo sapien
atacaagattcttccatggtctgaaggaggaga

SEQ ID NO: 535639 - DNA, 33 bp, Homo sapien
gctcatcaggtctcgaagctttaaatgtcatct

SEQ ID NO: 535640 - DNA, 33 bp, Homo sapien
gctcatcaggtctcgaggctttaaatgtcatct

SEQ ID NO: 535641 - DNA, 33 bp, Homo sapien
tggagacataaatttgaaagtgttgggttatag

SEQ ID NO: 535642 - DNA, 33 bp, Homo sapien
tggagacataaatttggaagtgttgggttatag

SEQ ID NO: 535643 - DNA, 33 bp, Homo sapien
aggcttggaataaacaagtgccttatgcttccc

SEQ ID NO: 535644 - DNA, 33 bp, Homo sapien
aggcttggaataaacatgtgccttatgcttccc

SEQ ID NO: 535645 - DNA, 33 bp, Homo sapien
agaaagcagcagaaggacaaggaatgaacgtga

SEQ ID NO: 535646 - DNA, 33 bp, Homo sapien
agaaagcagcagaagggcaaggaatgaacgtga

SEQ ID NO: 535647 - DNA, 33 bp, Homo sapien
ctcagttccaacggcactctgctgggaaactaa

SEQ ID NO: 535648 - DNA, 33 bp, Homo sapien
ctcagttccaacggcattctgctgggaaactaa

SEQ ID NO: 535649 - DNA, 33 bp, Homo sapien
gatagagtaaaattaaatgagtagtgaagataa

SEQ ID NO: 535650 - DNA, 33 bp, Homo sapien
gatagagtaaaattaagtgagtagtgaagataa

SEQ ID NO: 535651 - DNA, 33 bp, Homo sapien
aagtaatttatgttcccaccaacagtgtgtaag

SEQ ID NO: 535652 - DNA, 33 bp, Homo sapien
aagtaatttatgttcctaccaacagtgtgtaag

SEQ ID NO: 535653 - DNA, 33 bp, Homo sapien
caggttttttacatgaatatgttgcatgacggt

SEQ ID NO: 535654 - DNA, 33 bp, Homo sapien
caggttttttacatgagtatgttgcatgacggt

SEQ ID NO: 535655 - DNA, 33 bp, Homo sapien
ttgagagctgtaatgacatagaattctgggtta

SEQ ID NO: 535656 - DNA, 33 bp, Homo sapien
ttgagagctgtaatgatatagaattctgggtta

SEQ ID NO: 535657 - DNA, 33 bp, Homo sapien
aaggattggggatcagaatagactgacaatcag

SEQ ID NO: 535658 - DNA, 33 bp, Homo sapien
aaggattggggatcagcatagactgacaatcag

SEQ ID NO: 535659 - DNA, 33 bp, Homo sapien
ttcagccttaccttttaaaaactcatgtattag

SEQ ID NO: 535660 - DNA, 33 bp, Homo sapien
ttcagccttaccttttcaaaactcatgtattag

SEQ ID NO: 535661 - DNA, 33 bp, Homo sapien
taaacaagcctggatgaacttcagccttacctt

SEQ ID NO: 535662 - DNA, 33 bp, Homo sapien
taaacaagcctggatggacttcagccttacctt

SEQ ID NO: 535663 - DNA, 33 bp, Homo sapien
aagtactggtaaacacacttggctgtaggtcta

SEQ ID NO: 535664 - DNA, 33 bp, Homo sapien
aagtactggtaaacactcttggctgtaggtcta

SEQ ID NO: 535665 - DNA, 33 bp, Homo sapien
atcttttcaccagccacagaggaattgattata

SEQ ID NO: 535666 - DNA, 33 bp, Homo sapien
atcttttcaccagccatagaggaattgattata

SEQ ID NO: 535667 - DNA, 33 bp, Homo sapien
gctccttctttgagacaatccactgttaaaaga

SEQ ID NO: 535668 - DNA, 33 bp, Homo sapien
gctccttctttgagacgatccactgttaaaaga

SEQ ID NO: 535669 - DNA, 33 bp, Homo sapien
tggcatctgactcataaataaaataattttttt

SEQ ID NO: 535670 - DNA, 33 bp, Homo sapien
tggcatctgactcatagataaaataattttttt

SEQ ID NO: 535671 - DNA, 33 bp, Homo sapien
tgggtcaagaaagcacgattcctatttgtaaag

SEQ ID NO: 535672 - DNA, 33 bp, Homo sapien
tgggtcaagaaagcactattcctatttgtaaag

SEQ ID NO: 535673 - DNA, 33 bp, Homo sapien
aacatatatggaatgaagaacatagcaagaaca

SEQ ID NO: 535674 - DNA, 33 bp, Homo sapien
aacatatatggaatgaggaacatagcaagaaca

SEQ ID NO: 535675 - DNA, 33 bp, Homo sapien
cagcttgtgaggtgaaatggactgtggtaggta

SEQ ID NO: 535676 - DNA, 33 bp, Homo sapien
cagcttgtgaggtgaattggactgtggtaggta

SEQ ID NO: 535677 - DNA, 33 bp, Homo sapien
aagaaatgacgaagatcagagctaaacaaaagg

SEQ ID NO: 535678 - DNA, 33 bp, Homo sapien
aagaaatgacgaagattagagctaaacaaaagg

SEQ ID NO: 535679 - DNA, 33 bp, Homo sapien
ttgccatcctcattcaatactttttgtgtgttt

SEQ ID NO: 535680 - DNA, 33 bp, Homo sapien
ttgccatcctcattcagtactttttgtgtgttt

SEQ ID NO: 535681 - DNA, 33 bp, Homo sapien
aaactgccatgataaacatgaatttaatctgtt

SEQ ID NO: 535682 - DNA, 33 bp, Homo sapien
aaactgccatgataaatatgaatttaatctgtt

SEQ ID NO: 535683 - DNA, 33 bp, Homo sapien
tttgacaaacttgaaactaccattacgcatctt

SEQ ID NO: 535684 - DNA, 33 bp, Homo sapien
tttgacaaacttgaaagtaccattacgcatctt

SEQ ID NO: 535685 - DNA, 33 bp, Homo sapien
tgtttaccctcttcaagtgcaactgctatcaaa

SEQ ID NO: 535686 - DNA, 33 bp, Homo sapien
tgtttaccctcttcaattgcaactgctatcaaa

SEQ ID NO: 535687 - DNA, 33 bp, Homo sapien
aagtagtgaaattacaaaattcttggctgactt

SEQ ID NO: 535688 - DNA, 33 bp, Homo sapien
aagtagtgaaattacagaattcttggctgactt

SEQ ID NO: 535689 - DNA, 33 bp, Homo sapien
aaaaatgaaagtaacacaaagaactgaggctgc

SEQ ID NO: 535690 - DNA, 33 bp, Homo sapien
aaaaatgaaagtaacagaaagaactgaggctgc

SEQ ID NO: 535691 - DNA, 33 bp, Homo sapien
gagcaaaataaataccggcccaattcccttttg

SEQ ID NO: 535692 - DNA, 33 bp, Homo sapien
gagcaaaataaatacctgcccaattcccttttg

SEQ ID NO: 535693 - DNA, 33 bp, Homo sapien
aaattaggattattcacaagaaagggtaaaaag

SEQ ID NO: 535694 - DNA, 33 bp, Homo sapien
aaattaggattattcagaagaaagggtaaaaag

SEQ ID NO: 535695 - DNA, 33 bp, Homo sapien
gtggaagtgtagcatgaagaagaatttggataa

SEQ ID NO: 535696 - DNA, 33 bp, Homo sapien
gtggaagtgtagcatggagaagaatttggataa

SEQ ID NO: 535697 - DNA, 33 bp, Homo sapien
gatcataagtaaagtagagtttgcaggggatgt

SEQ ID NO: 535698 - DNA, 33 bp, Homo sapien
gatcataagtaaagtatagtttgcaggggatgt

SEQ ID NO: 535699 - DNA, 33 bp, Homo sapien
gtatggctcccctcagcctaacaccgcaaacac

SEQ ID NO: 535700 - DNA, 33 bp, Homo sapien
gtatggctcccctcagtctaacaccgcaaacac

SEQ ID NO: 535701 - DNA, 33 bp, Homo sapien
atacacaatgtaattaacaaactccacctgtgt

SEQ ID NO: 535702 - DNA, 33 bp, Homo sapien
atacacaatgtaattagcaaactccacctgtgt

SEQ ID NO: 535703 - DNA, 33 bp, Homo sapien
gcactttggatacagaaggaaatggatgcaggc

SEQ ID NO: 535704 - DNA, 33 bp, Homo sapien
gcactttggatacagagggaaatggatgcaggc

SEQ ID NO: 535705 - DNA, 33 bp, Homo sapien
gactaaatggctcttaaaataaatgtaaactat

SEQ ID NO: 535706 - DNA, 33 bp, Homo sapien
gactaaatggctcttagaataaatgtaaactat

SEQ ID NO: 535707 - DNA, 33 bp, Homo sapien
agtagctaacaattgacaataagaataaataaa

SEQ ID NO: 535708 - DNA, 33 bp, Homo sapien
agtagctaacaattgagaataagaataaataaa

SEQ ID NO: 535709 - DNA, 33 bp, Homo sapien
tcaagaaatatatgaaagccaatgaagtaaaga

SEQ ID NO: 535710 - DNA, 33 bp, Homo sapien
tcaagaaatatatgaaggccaatgaagtaaaga

SEQ ID NO: 535711 - DNA, 33 bp, Homo sapien
aatatacaaaatgctaactcctttaggtcaaaa

SEQ ID NO: 535712 - DNA, 33 bp, Homo sapien
aatatacaaaatgctatctcctttaggtcaaaa

SEQ ID NO: 535713 - DNA, 33 bp, Homo sapien
aggatatgacctcttacggaaaaatatcatcta

SEQ ID NO: 535714 - DNA, 33 bp, Homo sapien
aggatatgacctcttatggaaaaatatcatcta

SEQ ID NO: 535715 - DNA, 33 bp, Homo sapien
tattttgatctctagtaaagaaattagatgata

SEQ ID NO: 535716 - DNA, 33 bp, Homo sapien
tattttgatctctagtgaagaaattagatgata

SEQ ID NO: 535717 - DNA, 33 bp, Homo sapien
aaaataagtaagtaagcctccttttctcttcct

SEQ ID NO: 535718 - DNA, 33 bp, Homo sapien
aaaataagtaagtaaggctccttttctcttcct

SEQ ID NO: 535719 - DNA, 33 bp, Homo sapien
gccagtgtccaggagacagttagcgtcttggcc

SEQ ID NO: 535720 - DNA, 33 bp, Homo sapien
gccagtgtccaggagatagttagcgtcttggcc

SEQ ID NO: 535721 - DNA, 33 bp, Homo sapien
tttggcattcattttcgcttagtctgttcaggc

SEQ ID NO: 535722 - DNA, 33 bp, Homo sapien
tttggcattcattttctcttagtctgttcaggc

SEQ ID NO: 535723 - DNA, 33 bp, Homo sapien
ttaaacaggcagtatgaaagccagcattatagc

SEQ ID NO: 535724 - DNA, 33 bp, Homo sapien
ttaaacaggcagtatggaagccagcattatagc

SEQ ID NO: 535725 - DNA, 33 bp, Homo sapien
aactctagtcaagagccgaagcaagaggtctgg

SEQ ID NO: 535726 - DNA, 33 bp, Homo sapien
aactctagtcaagagctgaagcaagaggtctgg

SEQ ID NO: 535727 - DNA, 33 bp, Homo sapien
taataccttttatctcaatatcatttcatgagt

SEQ ID NO: 535728 - DNA, 33 bp, Homo sapien
taataccttttatctcgatatcatttcatgagt

SEQ ID NO: 535729 - DNA, 33 bp, Homo sapien
atcatatcaatagctccagaagcactgtttgaa

SEQ ID NO: 535730 - DNA, 33 bp, Homo sapien
atcatatcaatagctctagaagcactgtttgaa

SEQ ID NO: 535731 - DNA, 33 bp, Homo sapien
tttaagtgtcagactcccaaaattccattgtgt

SEQ ID NO: 535732 - DNA, 33 bp, Homo sapien
tttaagtgtcagactctcaaaattccattgtgt

SEQ ID NO: 535733 - DNA, 33 bp, Homo sapien
tgttgaatacctcctacgtttcagacaaatatt

SEQ ID NO: 535734 - DNA, 33 bp, Homo sapien
tgttgaatacctcctatgtttcagacaaatatt

SEQ ID NO: 535735 - DNA, 33 bp, Homo sapien
cttatacatataatccagaaaataacttttagg

SEQ ID NO: 535736 - DNA, 33 bp, Homo sapien
cttatacatataatccggaaaataacttttagg

SEQ ID NO: 535737 - DNA, 33 bp, Homo sapien
tcaagccacttggaaaaggcagaaagaggtcaa

SEQ ID NO: 535738 - DNA, 33 bp, Homo sapien
tcaagccacttggaaagggcagaaagaggtcaa

SEQ ID NO: 535739 - DNA, 33 bp, Homo sapien
aactggtatctcctcaactgtatcaagttactt

SEQ ID NO: 535740 - DNA, 33 bp, Homo sapien
aactggtatctcctcagctgtatcaagttactt

SEQ ID NO: 535741 - DNA, 33 bp, Homo sapien
cagagatttgttgaaaatgaaagcgcacgccac

SEQ ID NO: 535742 - DNA, 33 bp, Homo sapien
cagagatttgttgaaagtgaaagcgcacgccac

SEQ ID NO: 535743 - DNA, 33 bp, Homo sapien
acaacactctggcttccaagtggtttgtgctgg

SEQ ID NO: 535744 - DNA, 33 bp, Homo sapien
acaacactctggcttctaagtggtttgtgctgg

SEQ ID NO: 535745 - DNA, 33 bp, Homo sapien
ctccactaataaccacaccataagccactaggg

SEQ ID NO: 535746 - DNA, 33 bp, Homo sapien
ctccactaataaccacgccataagccactaggg

SEQ ID NO: 535747 - DNA, 33 bp, Homo sapien
gactaaaatattcctacgtgtattcaatcagtt

SEQ ID NO: 535748 - DNA, 33 bp, Homo sapien
gactaaaatattcctatgtgtattcaatcagtt

SEQ ID NO: 535749 - DNA, 33 bp, Homo sapien
tgcctccaatattcacagggttcgctattgaaa

SEQ ID NO: 535750 - DNA, 33 bp, Homo sapien
tgcctccaatattcacggggttcgctattgaaa

SEQ ID NO: 535751 - DNA, 33 bp, Homo sapien
cgcattgtggctaccgcaggtgaaatttatctc

SEQ ID NO: 535752 - DNA, 33 bp, Homo sapien
cgcattgtggctaccgtaggtgaaatttatctc

SEQ ID NO: 535753 - DNA, 33 bp, Homo sapien
agtgtaatgtgagaacgggtgagaaaaaaaagg

SEQ ID NO: 535754 - DNA, 33 bp, Homo sapien
agtgtaatgtgagaactggtgagaaaaaaaagg

SEQ ID NO: 535755 - DNA, 33 bp, Homo sapien
atggggcaaagagagcagcagaacttcatactt

SEQ ID NO: 535756 - DNA, 33 bp, Homo sapien
atggggcaaagagagccgcagaacttcatactt

SEQ ID NO: 535757 - DNA, 33 bp, Homo sapien
actttttggtacatgacgttgatatgttagaaa

SEQ ID NO: 535758 - DNA, 33 bp, Homo sapien
actttttggtacatgatgttgatatgttagaaa

SEQ ID NO: 535759 - DNA, 33 bp, Homo sapien
catcttttctgaattacggttagaacgtgattc

SEQ ID NO: 535760 - DNA, 33 bp, Homo sapien
catcttttctgaattatggttagaacgtgattc

SEQ ID NO: 535761 - DNA, 33 bp, Homo sapien
tagttgagccaagaataaaaattaattccatag

SEQ ID NO: 535762 - DNA, 33 bp, Homo sapien
tagttgagccaagaatgaaaattaattccatag

SEQ ID NO: 535763 - DNA, 33 bp, Homo sapien
tttgtactatcaatacaacttaagaagcttcta

SEQ ID NO: 535764 - DNA, 33 bp, Homo sapien
tttgtactatcaatacgacttaagaagcttcta

SEQ ID NO: 535765 - DNA, 33 bp, Homo sapien
gaaacatagataagccaaaaggttaaatgaatg

SEQ ID NO: 535766 - DNA, 33 bp, Homo sapien
gaaacatagataagccgaaaggttaaatgaatg

SEQ ID NO: 535767 - DNA, 33 bp, Homo sapien
gggattttgaattcatcaggctggcaaagagga

SEQ ID NO: 535768 - DNA, 33 bp, Homo sapien
gggattttgaattcatgaggctggcaaagagga

SEQ ID NO: 535769 - DNA, 33 bp, Homo sapien
ctgatgtctattcttcaagagtttccataattg

SEQ ID NO: 535770 - DNA, 33 bp, Homo sapien
ctgatgtctattcttcgagagtttccataattg

SEQ ID NO: 535771 - DNA, 33 bp, Homo sapien
aacaacatcagagaagactcccattattgctgt

SEQ ID NO: 535772 - DNA, 33 bp, Homo sapien
aacaacatcagagaagtctcccattattgctgt

SEQ ID NO: 535773 - DNA, 33 bp, Homo sapien
cctgggaaatttggggaaactagagtgtctatt

SEQ ID NO: 535774 - DNA, 33 bp, Homo sapien
cctgggaaatttggggtaactagagtgtctatt

SEQ ID NO: 535775 - DNA, 33 bp, Homo sapien
actcaccaaggagggaaaaaaggattctgctgc

SEQ ID NO: 535776 - DNA, 33 bp, Homo sapien
actcaccaaggagggagaaaaggattctgctgc

SEQ ID NO: 535777 - DNA, 33 bp, Homo sapien
tgtccctgagtggcagcatagggagctgtaggg

SEQ ID NO: 535778 - DNA, 33 bp, Homo sapien
tgtccctgagtggcagtatagggagctgtaggg

SEQ ID NO: 535779 - DNA, 33 bp, Homo sapien
tttgcatttggaactgaaaaggccaatggaatc

SEQ ID NO: 535780 - DNA, 33 bp, Homo sapien
tttgcatttggaactggaaaggccaatggaatc

SEQ ID NO: 535781 - DNA, 33 bp, Homo sapien
ataaaaagcagtggtccatcataagcctctgag

SEQ ID NO: 535782 - DNA, 33 bp, Homo sapien
ataaaaagcagtggtctatcataagcctctgag

SEQ ID NO: 535783 - DNA, 33 bp, Homo sapien
tcctttttgtcttaaactctgtttgaatgctct

SEQ ID NO: 535784 - DNA, 33 bp, Homo sapien
tcctttttgtcttaaattctgtttgaatgctct

SEQ ID NO: 535785 - DNA, 33 bp, Homo sapien
aaatgctaaatcttcaggttgcaccttcatatc

SEQ ID NO: 535786 - DNA, 33 bp, Homo sapien
aaatgctaaatcttcatgttgcaccttcatatc

SEQ ID NO: 535787 - DNA, 33 bp, Homo sapien
agacgcagcctaagacaaaaactgcttcacagg

SEQ ID NO: 535788 - DNA, 33 bp, Homo sapien
agacgcagcctaagacgaaaactgcttcacagg

SEQ ID NO: 535789 - DNA, 33 bp, Homo sapien
tcatctattcttagaccggtttaatagttctgc

SEQ ID NO: 535790 - DNA, 33 bp, Homo sapien
tcatctattcttagactggtttaatagttctgc

SEQ ID NO: 535791 - DNA, 33 bp, Homo sapien
attgaagtcaatggaacgtccagtattctttat

SEQ ID NO: 535792 - DNA, 33 bp, Homo sapien
attgaagtcaatggaatgtccagtattctttat

SEQ ID NO: 535793 - DNA, 33 bp, Homo sapien
caacaggagctgtgggaacttggtgtgaatgaa

SEQ ID NO: 535794 - DNA, 33 bp, Homo sapien
caacaggagctgtggggacttggtgtgaatgaa

SEQ ID NO: 535795 - DNA, 33 bp, Homo sapien
gaccctagacattgcaaaggatgagatgctggg

SEQ ID NO: 535796 - DNA, 33 bp, Homo sapien
gaccctagacattgcagaggatgagatgctggg

SEQ ID NO: 535797 - DNA, 33 bp, Homo sapien
gattagataaaaaatacgtatacgcatatataa

SEQ ID NO: 535798 - DNA, 33 bp, Homo sapien
gattagataaaaaatatgtatacgcatatataa

SEQ ID NO: 535799 - DNA, 33 bp, Homo sapien
cttgacaatcaatagcagaagtaatgatttaga

SEQ ID NO: 535800 - DNA, 33 bp, Homo sapien
cttgacaatcaatagcggaagtaatgatttaga

SEQ ID NO: 535801 - DNA, 33 bp, Homo sapien
cccctataacagaagaaattaagagccaggtgt

SEQ ID NO: 535802 - DNA, 33 bp, Homo sapien
cccctataacagaagacattaagagccaggtgt

SEQ ID NO: 535803 - DNA, 33 bp, Homo sapien
gtattgatatctgaaaccgaaaaccacactcat

SEQ ID NO: 535804 - DNA, 33 bp, Homo sapien
gtattgatatctgaaatcgaaaaccacactcat

SEQ ID NO: 535805 - DNA, 33 bp, Homo sapien
gttcacacagtagacactcccagaagcatgaga

SEQ ID NO: 535806 - DNA, 33 bp, Homo sapien
gttcacacagtagacagtcccagaagcatgaga

SEQ ID NO: 535807 - DNA, 33 bp, Homo sapien
tgttttgaatgatggactagtaattatgcaaga

SEQ ID NO: 535808 - DNA, 33 bp, Homo sapien
tgttttgaatgatggattagtaattatgcaaga

SEQ ID NO: 535809 - DNA, 33 bp, Homo sapien
tgttgtgcctcaattacggttaagaatgagcat

SEQ ID NO: 535810 - DNA, 33 bp, Homo sapien
tgttgtgcctcaattatggttaagaatgagcat

SEQ ID NO: 535811 - DNA, 33 bp, Homo sapien
cctatttgtccttcaggattcagtttataaatc

SEQ ID NO: 535812 - DNA, 33 bp, Homo sapien
cctatttgtccttcagtattcagtttataaatc

SEQ ID NO: 535813 - DNA, 33 bp, Homo sapien
tgaagcaaaaataagacgtccagagtcaccttt

SEQ ID NO: 535814 - DNA, 33 bp, Homo sapien
tgaagcaaaaataagatgtccagagtcaccttt

SEQ ID NO: 535815 - DNA, 33 bp, Homo sapien
aagctatgttcctctacaacacagtgcaaagta

SEQ ID NO: 535816 - DNA, 33 bp, Homo sapien
aagctatgttcctctataacacagtgcaaagta

SEQ ID NO: 535817 - DNA, 33 bp, Homo sapien
acgtcatggaaaagaacgatcattttagctggc

SEQ ID NO: 535818 - DNA, 33 bp, Homo sapien
acgtcatggaaaagaaggatcattttagctggc

SEQ ID NO: 535819 - DNA, 33 bp, Homo sapien
tccaggttccctgtaacgaaaggctgaaaagca

SEQ ID NO: 535820 - DNA, 33 bp, Homo sapien
tccaggttccctgtaatgaaaggctgaaaagca

SEQ ID NO: 535821 - DNA, 33 bp, Homo sapien
ccttcatgataaaataggttaagaaccagagaa

SEQ ID NO: 535822 - DNA, 33 bp, Homo sapien
ccttcatgataaaatatgttaagaaccagagaa

SEQ ID NO: 535823 - DNA, 33 bp, Homo sapien
cattgacatcttagcaatacagtccacccttaa

SEQ ID NO: 535824 - DNA, 33 bp, Homo sapien
cattgacatcttagcagtacagtccacccttaa

SEQ ID NO: 535825 - DNA, 33 bp, Homo sapien
ttaccatcgagctttcccctagaagttgcaagc

SEQ ID NO: 535826 - DNA, 33 bp, Homo sapien
ttaccatcgagctttctcctagaagttgcaagc

SEQ ID NO: 535827 - DNA, 33 bp, Homo sapien
tcaaagacaccaagtcaaatgctataagaataa

SEQ ID NO: 535828 - DNA, 33 bp, Homo sapien
tcaaagacaccaagtcgaatgctataagaataa

SEQ ID NO: 535829 - DNA, 33 bp, Homo sapien
agaaaataagtgatgaaaaaagcacataatctc

SEQ ID NO: 535830 - DNA, 33 bp, Homo sapien
agaaaataagtgatgagaaaagcacataatctc

SEQ ID NO: 535831 - DNA, 33 bp, Homo sapien
tcagtgaatataccacgggaaaaacagcaatct

SEQ ID NO: 535832 - DNA, 33 bp, Homo sapien
tcagtgaatataccactggaaaaacagcaatct

SEQ ID NO: 535833 - DNA, 33 bp, Homo sapien
ccactgcacacattcacaaacaggcttttatgt

SEQ ID NO: 535834 - DNA, 33 bp, Homo sapien
ccactgcacacattcataaacaggcttttatgt

SEQ ID NO: 535835 - DNA, 33 bp, Homo sapien
gtcattatctacagaaagatgacactgatatgc

SEQ ID NO: 535836 - DNA, 33 bp, Homo sapien
gtcattatctacagaacgatgacactgatatgc

SEQ ID NO: 535837 - DNA, 33 bp, Homo sapien
gggccttgagtaagatcagcagtagcccggcag

SEQ ID NO: 535838 - DNA, 33 bp, Homo sapien
gggccttgagtaagatgagcagtagcccggcag

SEQ ID NO: 535839 - DNA, 33 bp, Homo sapien
ttcacgttggaagcaaagaaggagaatttcaat

SEQ ID NO: 535840 - DNA, 33 bp, Homo sapien
ttcacgttggaagcaaggaaggagaatttcaat

SEQ ID NO: 535841 - DNA, 33 bp, Homo sapien
cgcaattgcccatctgccaagtagataatatat

SEQ ID NO: 535842 - DNA, 33 bp, Homo sapien
cgcaattgcccatctgtcaagtagataatatat

SEQ ID NO: 535843 - DNA, 33 bp, Homo sapien
ttatatatgaagaatccactttagcaaataacc

SEQ ID NO: 535844 - DNA, 33 bp, Homo sapien
ttatatatgaagaatctactttagcaaataacc

SEQ ID NO: 535845 - DNA, 33 bp, Homo sapien
aagtcaattcacgtaggaaatagtcatggcaat

SEQ ID NO: 535846 - DNA, 33 bp, Homo sapien
aagtcaattcacgtagtaaatagtcatggcaat

SEQ ID NO: 535847 - DNA, 33 bp, Homo sapien
cccagaagccagggacaaattagaatacagtaa

SEQ ID NO: 535848 - DNA, 33 bp, Homo sapien
cccagaagccagggacgaattagaatacagtaa

SEQ ID NO: 535849 - DNA, 33 bp, Homo sapien
gagagaatggtcttgacagaagtgaaagaaaaa

SEQ ID NO: 535850 - DNA, 33 bp, Homo sapien
gagagaatggtcttgatagaagtgaaagaaaaa

SEQ ID NO: 535851 - DNA, 33 bp, Homo sapien
gctggtccaactattacgattctagagccaggc

SEQ ID NO: 535852 - DNA, 33 bp, Homo sapien
gctggtccaactattatgattctagagccaggc

SEQ ID NO: 535853 - DNA, 33 bp, Homo sapien
tatttctaatattgccaactgcacacattgaat

SEQ ID NO: 535854 - DNA, 33 bp, Homo sapien
tatttctaatattgccgactgcacacattgaat

SEQ ID NO: 535855 - DNA, 33 bp, Homo sapien
actatttacatggccaaataaaggtaagccctt

SEQ ID NO: 535856 - DNA, 33 bp, Homo sapien
actatttacatggccagataaaggtaagccctt

SEQ ID NO: 535857 - DNA, 33 bp, Homo sapien
tactttttcatagtaacctaacaattagtcaaa

SEQ ID NO: 535858 - DNA, 33 bp, Homo sapien
tactttttcatagtaatctaacaattagtcaaa

SEQ ID NO: 535859 - DNA, 33 bp, Homo sapien
gaaaaaataataattaacctgttttgcgtatga

SEQ ID NO: 535860 - DNA, 33 bp, Homo sapien
gaaaaaataataattaccctgttttgcgtatga

SEQ ID NO: 535861 - DNA, 33 bp, Homo sapien
gaggggaccgaatgtacggcctgtattatctgt

SEQ ID NO: 535862 - DNA, 33 bp, Homo sapien
gaggggaccgaatgtatggcctgtattatctgt

SEQ ID NO: 535863 - DNA, 33 bp, Homo sapien
agggttgtagaccacaatgactatgacagtcct

SEQ ID NO: 535864 - DNA, 33 bp, Homo sapien
agggttgtagaccacagtgactatgacagtcct

SEQ ID NO: 535865 - DNA, 33 bp, Homo sapien
gagtctatacagttcacatagtgacttcactgg

SEQ ID NO: 535866 - DNA, 33 bp, Homo sapien
gagtctatacagttcatatagtgacttcactgg

SEQ ID NO: 535867 - DNA, 33 bp, Homo sapien
tccaaaagaaatgtataagctcaaaggaatctt

SEQ ID NO: 535868 - DNA, 33 bp, Homo sapien
tccaaaagaaatgtattagctcaaaggaatctt

SEQ ID NO: 535869 - DNA, 33 bp, Homo sapien
tcacttagcttgcctaaatgatgtacaatgtaa

SEQ ID NO: 535870 - DNA, 33 bp, Homo sapien
tcacttagcttgcctacatgatgtacaatgtaa

SEQ ID NO: 535871 - DNA, 33 bp, Homo sapien
tgttaaattcacatcactctgaaaattgtatta

SEQ ID NO: 535872 - DNA, 33 bp, Homo sapien
tgttaaattcacatcagtctgaaaattgtatta

SEQ ID NO: 535873 - DNA, 33 bp, Homo sapien
gttatctgttgacataccttgactaatttagtg

SEQ ID NO: 535874 - DNA, 33 bp, Homo sapien
gttatctgttgacatatcttgactaatttagtg

SEQ ID NO: 535875 - DNA, 33 bp, Homo sapien
aattttcatttgaccaatctactgctagtcatg

SEQ ID NO: 535876 - DNA, 33 bp, Homo sapien
aattttcatttgaccagtctactgctagtcatg

SEQ ID NO: 535877 - DNA, 33 bp, Homo sapien
agtatttgggctttcacatattacagttataat

SEQ ID NO: 535878 - DNA, 33 bp, Homo sapien
agtatttgggctttcatatattacagttataat

SEQ ID NO: 535879 - DNA, 33 bp, Homo sapien
cccttgcctttctacacgctattttctctctct

SEQ ID NO: 535880 - DNA, 33 bp, Homo sapien
cccttgcctttctacatgctattttctctctct

SEQ ID NO: 535881 - DNA, 33 bp, Homo sapien
attacatagattcaaaaactgagcaatatatac

SEQ ID NO: 535882 - DNA, 33 bp, Homo sapien
attacatagattcaaacactgagcaatatatac

SEQ ID NO: 535883 - DNA, 33 bp, Homo sapien
gcctcactccctctcaatcctgtagtttgaagc

SEQ ID NO: 535884 - DNA, 33 bp, Homo sapien
gcctcactccctctcagtcctgtagtttgaagc

SEQ ID NO: 535885 - DNA, 33 bp, Homo sapien
taatattttttctacaagaatgttccaagtatt

SEQ ID NO: 535886 - DNA, 33 bp, Homo sapien
taatattttttctacaggaatgttccaagtatt

SEQ ID NO: 535887 - DNA, 33 bp, Homo sapien
gggggactggaactaacgaagaaatgttggttg

SEQ ID NO: 535888 - DNA, 33 bp, Homo sapien
gggggactggaactaatgaagaaatgttggttg

SEQ ID NO: 535889 - DNA, 33 bp, Homo sapien
caaaactcaggttgtaacatctggaatgggtga

SEQ ID NO: 535890 - DNA, 33 bp, Homo sapien
caaaactcaggttgtagcatctggaatgggtga

SEQ ID NO: 535891 - DNA, 33 bp, Homo sapien
tggctctgaccccacacggcactaaaacttgcc

SEQ ID NO: 535892 - DNA, 33 bp, Homo sapien
tggctctgaccccacatggcactaaaacttgcc

SEQ ID NO: 535893 - DNA, 33 bp, Homo sapien
cttgaagggagggatgcagtcctggcacaattc

SEQ ID NO: 535894 - DNA, 33 bp, Homo sapien
cttgaagggagggatgtagtcctggcacaattc

SEQ ID NO: 535895 - DNA, 33 bp, Homo sapien
gaaacaccaagtaaaaccaatcttacatattta

SEQ ID NO: 535896 - DNA, 33 bp, Homo sapien
gaaacaccaagtaaaatcaatcttacatattta

SEQ ID NO: 535897 - DNA, 33 bp, Homo sapien
tctgcctaggagctcaaccccattgctttcaat

SEQ ID NO: 535898 - DNA, 33 bp, Homo sapien
tctgcctaggagctcagccccattgctttcaat

SEQ ID NO: 535899 - DNA, 33 bp, Homo sapien
ccatgcaagatttcacagacttaattgcacaac

SEQ ID NO: 535900 - DNA, 33 bp, Homo sapien
ccatgcaagatttcacggacttaattgcacaac

SEQ ID NO: 535901 - DNA, 33 bp, Homo sapien
atgtgtctcatgataacgttctgaaaacttgac

SEQ ID NO: 535902 - DNA, 33 bp, Homo sapien
atgtgtctcatgataatgttctgaaaacttgac

SEQ ID NO: 535903 - DNA, 33 bp, Homo sapien
tcccatgtgtctttaccatggatgccttgaagt

SEQ ID NO: 535904 - DNA, 33 bp, Homo sapien
tcccatgtgtctttactatggatgccttgaagt

SEQ ID NO: 535905 - DNA, 33 bp, Homo sapien
tctgccaccacaactacggagcctaattttgga

SEQ ID NO: 535906 - DNA, 33 bp, Homo sapien
tctgccaccacaactatggagcctaattttgga

SEQ ID NO: 535907 - DNA, 33 bp, Homo sapien
tcctttacctttaagcactctaaaaaggcatat

SEQ ID NO: 535908 - DNA, 33 bp, Homo sapien
tcctttacctttaagcgctctaaaaaggcatat

SEQ ID NO: 535909 - DNA, 33 bp, Homo sapien
aggccaagcatgttcccgactagactgtttttc

SEQ ID NO: 535910 - DNA, 33 bp, Homo sapien
aggccaagcatgttcctgactagactgtttttc

SEQ ID NO: 535911 - DNA, 33 bp, Homo sapien
gaaggactctggaggaacctaaactaagtcttg

SEQ ID NO: 535912 - DNA, 33 bp, Homo sapien
gaaggactctggaggagcctaaactaagtcttg

SEQ ID NO: 535913 - DNA, 33 bp, Homo sapien
tctggaacctgaaaagaagagtatattagtccg

SEQ ID NO: 535914 - DNA, 33 bp, Homo sapien
tctggaacctgaaaaggagagtatattagtccg

SEQ ID NO: 535915 - DNA, 33 bp, Homo sapien
tagccagagcaattacacaagataaagaaaggg

SEQ ID NO: 535916 - DNA, 33 bp, Homo sapien
tagccagagcaattacgcaagataaagaaaggg

SEQ ID NO: 535917 - DNA, 33 bp, Homo sapien
tgggcaagaggattaactgaaacgggcaagtgg

SEQ ID NO: 535918 - DNA, 33 bp, Homo sapien
tgggcaagaggattaattgaaacgggcaagtgg

SEQ ID NO: 535919 - DNA, 33 bp, Homo sapien
acagtattaaggtttgcacctggatagaagttc

SEQ ID NO: 535920 - DNA, 33 bp, Homo sapien
acagtattaaggtttgtacctggatagaagttc

SEQ ID NO: 535921 - DNA, 33 bp, Homo sapien
acaatagatgtcattcaaattacctctgtccct

SEQ ID NO: 535922 - DNA, 33 bp, Homo sapien
acaatagatgtcattcgaattacctctgtccct

SEQ ID NO: 535923 - DNA, 33 bp, Homo sapien
ggatcctgaaagtttgaaaggaagtctccctct

SEQ ID NO: 535924 - DNA, 33 bp, Homo sapien
ggatcctgaaagtttgcaaggaagtctccctct

SEQ ID NO: 535925 - DNA, 33 bp, Homo sapien
tgattcctgtttaaaacgccttcaacagaggga

SEQ ID NO: 535926 - DNA, 33 bp, Homo sapien
tgattcctgtttaaaatgccttcaacagaggga

SEQ ID NO: 535927 - DNA, 33 bp, Homo sapien
cactgaggaaaaagagaagaaccttgctcagtt

SEQ ID NO: 535928 - DNA, 33 bp, Homo sapien
cactgaggaaaaagaggagaaccttgctcagtt

SEQ ID NO: 535929 - DNA, 33 bp, Homo sapien
ttactatgattcctgacaggtcttgatatctgt

SEQ ID NO: 535930 - DNA, 33 bp, Homo sapien
ttactatgattcctgataggtcttgatatctgt

SEQ ID NO: 535931 - DNA, 33 bp, Homo sapien
tggagaaatcataaacgcaaacagggcaagagg

SEQ ID NO: 535932 - DNA, 33 bp, Homo sapien
tggagaaatcataaactcaaacagggcaagagg

SEQ ID NO: 535933 - DNA, 33 bp, Homo sapien
ctggccacagactttaacacaaattctgtccat

SEQ ID NO: 535934 - DNA, 33 bp, Homo sapien
ctggccacagactttatcacaaattctgtccat

SEQ ID NO: 535935 - DNA, 33 bp, Homo sapien
tcagcaaaatgattcaatctgtatctatacact

SEQ ID NO: 535936 - DNA, 33 bp, Homo sapien
tcagcaaaatgattcagtctgtatctatacact

SEQ ID NO: 535937 - DNA, 33 bp, Homo sapien
caaaactatggcatgaataccagagtaaaccac

SEQ ID NO: 535938 - DNA, 33 bp, Homo sapien
caaaactatggcatgagtaccagagtaaaccac

SEQ ID NO: 535939 - DNA, 33 bp, Homo sapien
aggccatggtttttgccgagtttcactttcaat

SEQ ID NO: 535940 - DNA, 33 bp, Homo sapien
aggccatggtttttgctgagtttcactttcaat

SEQ ID NO: 535941 - DNA, 33 bp, Homo sapien
taaatatttcgttggaagatagcatttaatgac

SEQ ID NO: 535942 - DNA, 33 bp, Homo sapien
taaatatttcgttggaggatagcatttaatgac

SEQ ID NO: 535943 - DNA, 33 bp, Homo sapien
agcatcctgagaaagcaatattaagatctcaga

SEQ ID NO: 535944 - DNA, 33 bp, Homo sapien
agcatcctgagaaagcgatattaagatctcaga

SEQ ID NO: 535945 - DNA, 33 bp, Homo sapien
atgtttgtccatatggcaattatactagccaag

SEQ ID NO: 535946 - DNA, 33 bp, Homo sapien
atgtttgtccatatggtaattatactagccaag

SEQ ID NO: 535947 - DNA, 33 bp, Homo sapien
cttggtaattatatcacgaaggtagaaccctca

SEQ ID NO: 535948 - DNA, 33 bp, Homo sapien
cttggtaattatatcatgaaggtagaaccctca

SEQ ID NO: 535949 - DNA, 33 bp, Homo sapien
aacttattgatgctaacaatagctaaagcttat

SEQ ID NO: 535950 - DNA, 33 bp, Homo sapien
aacttattgatgctaataatagctaaagcttat

SEQ ID NO: 535951 - DNA, 33 bp, Homo sapien
taaaaagaggcccgtacagctttgaaaaacata

SEQ ID NO: 535952 - DNA, 33 bp, Homo sapien
taaaaagaggcccgtagagctttgaaaaacata

SEQ ID NO: 535953 - DNA, 33 bp, Homo sapien
agaaacaaaaatgccaatatccacagccataaa

SEQ ID NO: 535954 - DNA, 33 bp, Homo sapien
agaaacaaaaatgccagtatccacagccataaa

SEQ ID NO: 535955 - DNA, 33 bp, Homo sapien
tacaaagaggattactaaaatggtcttacttgg

SEQ ID NO: 535956 - DNA, 33 bp, Homo sapien
tacaaagaggattactgaaatggtcttacttgg

SEQ ID NO: 535957 - DNA, 33 bp, Homo sapien
tgctttcagctgctaacaatagaaaacccaaaa

SEQ ID NO: 535958 - DNA, 33 bp, Homo sapien
tgctttcagctgctaataatagaaaacccaaaa

SEQ ID NO: 535959 - DNA, 33 bp, Homo sapien
aaaaagagttaactgaacggactgaactaatag

SEQ ID NO: 535960 - DNA, 33 bp, Homo sapien
aaaaagagttaactgagcggactgaactaatag

SEQ ID NO: 535961 - DNA, 33 bp, Homo sapien
tcgtaacatgataacaaaccaatataacggtca

SEQ ID NO: 535962 - DNA, 33 bp, Homo sapien
tcgtaacatgataacagaccaatataacggtca

SEQ ID NO: 535963 - DNA, 33 bp, Homo sapien
tttgcaactgtgcataataagagcagaagaaga

SEQ ID NO: 535964 - DNA, 33 bp, Homo sapien
tttgcaactgtgcatactaagagcagaagaaga

SEQ ID NO: 535965 - DNA, 33 bp, Homo sapien
aatgctgaaaaaggcacagtgaaaaattcctag

SEQ ID NO: 535966 - DNA, 33 bp, Homo sapien
aatgctgaaaaaggcatagtgaaaaattcctag

SEQ ID NO: 535967 - DNA, 33 bp, Homo sapien
tatgtttcttcttgcaaatataagcaaacttgt

SEQ ID NO: 535968 - DNA, 33 bp, Homo sapien
tatgtttcttcttgcatatataagcaaacttgt

SEQ ID NO: 535969 - DNA, 33 bp, Homo sapien
gctttatgcacaccaaaatttccagggtcatct

SEQ ID NO: 535970 - DNA, 33 bp, Homo sapien
gctttatgcacaccaagatttccagggtcatct

SEQ ID NO: 535971 - DNA, 33 bp, Homo sapien
tgccaacaactggtgaataaaagtgaagagtat

SEQ ID NO: 535972 - DNA, 33 bp, Homo sapien
tgccaacaactggtgagtaaaagtgaagagtat

SEQ ID NO: 535973 - DNA, 33 bp, Homo sapien
atgaacaaggtccatccataaaatgtctcaaat

SEQ ID NO: 535974 - DNA, 33 bp, Homo sapien
atgaacaaggtccatctataaaatgtctcaaat

SEQ ID NO: 535975 - DNA, 33 bp, Homo sapien
ataaacgtgacagacaatcatgcaacaaaggca

SEQ ID NO: 535976 - DNA, 33 bp, Homo sapien
ataaacgtgacagacagtcatgcaacaaaggca

SEQ ID NO: 535977 - DNA, 33 bp, Homo sapien
gggtttagtgaacttaaatcatacatcctacct

SEQ ID NO: 535978 - DNA, 33 bp, Homo sapien
gggtttagtgaacttacatcatacatcctacct

SEQ ID NO: 535979 - DNA, 33 bp, Homo sapien
tagcctttgataacagcccagcatagaatacaa

SEQ ID NO: 535980 - DNA, 33 bp, Homo sapien
tagcctttgataacagtccagcatagaatacaa

SEQ ID NO: 535981 - DNA, 33 bp, Homo sapien
accacatatttctgcacgtccctttgtccattc

SEQ ID NO: 535982 - DNA, 33 bp, Homo sapien
accacatatttctgcatgtccctttgtccattc

SEQ ID NO: 535983 - DNA, 33 bp, Homo sapien
tttatgctttatagaaggtaatagttgggactg

SEQ ID NO: 535984 - DNA, 33 bp, Homo sapien
tttatgctttatagaatgtaatagttgggactg

SEQ ID NO: 535985 - DNA, 33 bp, Homo sapien
actcaattatgcttcaaggctcagggaattgct

SEQ ID NO: 535986 - DNA, 33 bp, Homo sapien
actcaattatgcttcagggctcagggaattgct

SEQ ID NO: 535987 - DNA, 33 bp, Homo sapien
gtgagactaggaaatccgagaaaagaatgagac

SEQ ID NO: 535988 - DNA, 33 bp, Homo sapien
gtgagactaggaaatctgagaaaagaatgagac

SEQ ID NO: 535989 - DNA, 33 bp, Homo sapien
aattacattgcacacaggggagaaaaatggata

SEQ ID NO: 535990 - DNA, 33 bp, Homo sapien
aattacattgcacacatgggagaaaaatggata

SEQ ID NO: 535991 - DNA, 33 bp, Homo sapien
caatcataaaagcccacgttactttgactcttc

SEQ ID NO: 535992 - DNA, 33 bp, Homo sapien
caatcataaaagcccatgttactttgactcttc

SEQ ID NO: 535993 - DNA, 33 bp, Homo sapien
atgttgttaacccatcaatttttactgagagca

SEQ ID NO: 535994 - DNA, 33 bp, Homo sapien
atgttgttaacccatcgatttttactgagagca

SEQ ID NO: 535995 - DNA, 33 bp, Homo sapien
aggcactcacggagcacacacactcaggaaaaa

SEQ ID NO: 535996 - DNA, 33 bp, Homo sapien
aggcactcacggagcatacacactcaggaaaaa

SEQ ID NO: 535997 - DNA, 33 bp, Homo sapien
tatagtcaattctgagaaatttgtgaaaatggg

SEQ ID NO: 535998 - DNA, 33 bp, Homo sapien
tatagtcaattctgagtaatttgtgaaaatggg

SEQ ID NO: 535999 - DNA, 33 bp, Homo sapien
ttatagtttggagtcactatttcatccactgtg

SEQ ID NO: 536000 - DNA, 33 bp, Homo sapien
ttatagtttggagtcattatttcatccactgtg

SEQ ID NO: 536001 - DNA, 33 bp, Homo sapien
gttccccttttcagtcaaaactaatatgagtca

SEQ ID NO: 536002 - DNA, 33 bp, Homo sapien
gttccccttttcagtcgaaactaatatgagtca

SEQ ID NO: 536003 - DNA, 33 bp, Homo sapien
aaattcctcaccaaaaaactcctcatgaaactt

SEQ ID NO: 536004 - DNA, 33 bp, Homo sapien
aaattcctcaccaaaagactcctcatgaaactt

SEQ ID NO: 536005 - DNA, 33 bp, Homo sapien
tgtgtgttcagaagacaccaagagaaccaagct

SEQ ID NO: 536006 - DNA, 33 bp, Homo sapien
tgtgtgttcagaagacgccaagagaaccaagct

SEQ ID NO: 536007 - DNA, 33 bp, Homo sapien
atgggaagcatgatgagaatataaagtgtattt

SEQ ID NO: 536008 - DNA, 33 bp, Homo sapien
atgggaagcatgatgataatataaagtgtattt

SEQ ID NO: 536009 - DNA, 33 bp, Homo sapien
ttagcatcgcaaatgcacatgagtaatcattgg

SEQ ID NO: 536010 - DNA, 33 bp, Homo sapien
ttagcatcgcaaatgctcatgagtaatcattgg

SEQ ID NO: 536011 - DNA, 33 bp, Homo sapien
agaccctgtctcaaaacggggatagggcatcaa

SEQ ID NO: 536012 - DNA, 33 bp, Homo sapien
agaccctgtctcaaaagggggatagggcatcaa

SEQ ID NO: 536013 - DNA, 33 bp, Homo sapien
acatccaaaaaaaccacatcaggtagcataagc

SEQ ID NO: 536014 - DNA, 33 bp, Homo sapien
acatccaaaaaaaccatatcaggtagcataagc

SEQ ID NO: 536015 - DNA, 33 bp, Homo sapien
agatgttgataggtaaactgaaatgtgtacatt

SEQ ID NO: 536016 - DNA, 33 bp, Homo sapien
agatgttgataggtaacctgaaatgtgtacatt

SEQ ID NO: 536017 - DNA, 33 bp, Homo sapien
agccagaagaaaccaaagactgaactctgtttg

SEQ ID NO: 536018 - DNA, 33 bp, Homo sapien
agccagaagaaaccaaggactgaactctgtttg

SEQ ID NO: 536019 - DNA, 33 bp, Homo sapien
actcaagaagcgatgacgtttttcttattcaca

SEQ ID NO: 536020 - DNA, 33 bp, Homo sapien
actcaagaagcgatgatgtttttcttattcaca

SEQ ID NO: 536021 - DNA, 33 bp, Homo sapien
gtcaagaaaggaagaccagcactgatcattcat

SEQ ID NO: 536022 - DNA, 33 bp, Homo sapien
gtcaagaaaggaagacgagcactgatcattcat

SEQ ID NO: 536023 - DNA, 33 bp, Homo sapien
gagtggttaaagggcacgggctatgcaataaaa

SEQ ID NO: 536024 - DNA, 33 bp, Homo sapien
gagtggttaaagggcatgggctatgcaataaaa

SEQ ID NO: 536025 - DNA, 33 bp, Homo sapien
agccctgtcaacattcaaaagcttttcagcctc

SEQ ID NO: 536026 - DNA, 33 bp, Homo sapien
agccctgtcaacattcgaaagcttttcagcctc

SEQ ID NO: 536027 - DNA, 33 bp, Homo sapien
tgactatctcgtggagcatttcctaaaaccagg

SEQ ID NO: 536028 - DNA, 33 bp, Homo sapien
tgactatctcgtggagtatttcctaaaaccagg

SEQ ID NO: 536029 - DNA, 33 bp, Homo sapien
agataaaaacaaattgccaaaaacttgaatttc

SEQ ID NO: 536030 - DNA, 33 bp, Homo sapien
agataaaaacaaattggcaaaaacttgaatttc

SEQ ID NO: 536031 - DNA, 33 bp, Homo sapien
tgtcacagtttttgaacagcctgcaattattta

SEQ ID NO: 536032 - DNA, 33 bp, Homo sapien
tgtcacagtttttgaatagcctgcaattattta

SEQ ID NO: 536033 - DNA, 33 bp, Homo sapien
tggttagtggctttacacaggaagtacatgatt

SEQ ID NO: 536034 - DNA, 33 bp, Homo sapien
tggttagtggctttacccaggaagtacatgatt

SEQ ID NO: 536035 - DNA, 33 bp, Homo sapien
agtagggatctatataaaatagtaaccaaaaaa

SEQ ID NO: 536036 - DNA, 33 bp, Homo sapien
agtagggatctatatagaatagtaaccaaaaaa

SEQ ID NO: 536037 - DNA, 33 bp, Homo sapien
agccaccttctccaaacaataccacaacttttt

SEQ ID NO: 536038 - DNA, 33 bp, Homo sapien
agccaccttctccaaataataccacaacttttt

SEQ ID NO: 536039 - DNA, 33 bp, Homo sapien
ggaaaagcacgtcaccaaatctatagcaaacat

SEQ ID NO: 536040 - DNA, 33 bp, Homo sapien
ggaaaagcacgtcaccgaatctatagcaaacat

SEQ ID NO: 536041 - DNA, 33 bp, Homo sapien
aacagggaagtaactgaaagaggtatagatcat

SEQ ID NO: 536042 - DNA, 33 bp, Homo sapien
aacagggaagtaactggaagaggtatagatcat

SEQ ID NO: 536043 - DNA, 33 bp, Homo sapien
cttataccacaactcaatgactatttatccagt

SEQ ID NO: 536044 - DNA, 33 bp, Homo sapien
cttataccacaactcagtgactatttatccagt

SEQ ID NO: 536045 - DNA, 33 bp, Homo sapien
atgaagacggcagcccaaagagagaagttagaa

SEQ ID NO: 536046 - DNA, 33 bp, Homo sapien
atgaagacggcagcccgaagagagaagttagaa

SEQ ID NO: 536047 - DNA, 33 bp, Homo sapien
tttttctgaaagtgtaggatatgtcttgttaaa

SEQ ID NO: 536048 - DNA, 33 bp, Homo sapien
tttttctgaaagtgtatgatatgtcttgttaaa

SEQ ID NO: 536049 - DNA, 33 bp, Homo sapien
tttgacgtgaatatctaaagtgttatgaaacca

SEQ ID NO: 536050 - DNA, 33 bp, Homo sapien
tttgacgtgaatatctgaagtgttatgaaacca

SEQ ID NO: 536051 - DNA, 33 bp, Homo sapien
tttgatttgatgtctacgtgcctgaattaccct

SEQ ID NO: 536052 - DNA, 33 bp, Homo sapien
tttgatttgatgtctatgtgcctgaattaccct

SEQ ID NO: 536053 - DNA, 33 bp, Homo sapien
ggcagaaaagaaaacacattgttgcatactttc

SEQ ID NO: 536054 - DNA, 33 bp, Homo sapien
ggcagaaaagaaaacatattgttgcatactttc

SEQ ID NO: 536055 - DNA, 33 bp, Homo sapien
tatacatatagacctcaagcaagccatagtcat

SEQ ID NO: 536056 - DNA, 33 bp, Homo sapien
tatacatatagacctcgagcaagccatagtcat

SEQ ID NO: 536057 - DNA, 33 bp, Homo sapien
tttttattgatcctcaaagtgattctggcacat

SEQ ID NO: 536058 - DNA, 33 bp, Homo sapien
tttttattgatcctcagagtgattctggcacat

SEQ ID NO: 536059 - DNA, 33 bp, Homo sapien
caggggatctaaaaccaattgcagaaaagatat

SEQ ID NO: 536060 - DNA, 33 bp, Homo sapien
caggggatctaaaaccgattgcagaaaagatat

SEQ ID NO: 536061 - DNA, 33 bp, Homo sapien
gtggttcagagagaaactctgcatatggcccct

SEQ ID NO: 536062 - DNA, 33 bp, Homo sapien
gtggttcagagagaaattctgcatatggcccct

SEQ ID NO: 536063 - DNA, 33 bp, Homo sapien
aattcaccagggaagcaaagcaaaaaagcaagc

SEQ ID NO: 536064 - DNA, 33 bp, Homo sapien
aattcaccagggaagccaagcaaaaaagcaagc

SEQ ID NO: 536065 - DNA, 33 bp, Homo sapien
atatgggaaaaggagaaacatgcaaaaccaagc

SEQ ID NO: 536066 - DNA, 33 bp, Homo sapien
atatgggaaaaggagacacatgcaaaaccaagc

SEQ ID NO: 536067 - DNA, 33 bp, Homo sapien
acagactattccacaaagcataattaccacata

SEQ ID NO: 536068 - DNA, 33 bp, Homo sapien
acagactattccacaacgcataattaccacata

SEQ ID NO: 536069 - DNA, 33 bp, Homo sapien
catattactctgcaaaataagtcaaaagaagtc

SEQ ID NO: 536070 - DNA, 33 bp, Homo sapien
catattactctgcaaagtaagtcaaaagaagtc

SEQ ID NO: 536071 - DNA, 33 bp, Homo sapien
aaaaaatcagacctggacagtagttaagtagta

SEQ ID NO: 536072 - DNA, 33 bp, Homo sapien
aaaaaatcagacctgggcagtagttaagtagta

SEQ ID NO: 536073 - DNA, 33 bp, Homo sapien
ctagttaatctggaaacgctgagtcagaggagt

SEQ ID NO: 536074 - DNA, 33 bp, Homo sapien
ctagttaatctggaaatgctgagtcagaggagt

SEQ ID NO: 536075 - DNA, 33 bp, Homo sapien
cacaaatatccatagccgacagagatgtgtttt

SEQ ID NO: 536076 - DNA, 33 bp, Homo sapien
cacaaatatccatagctgacagagatgtgtttt

SEQ ID NO: 536077 - DNA, 33 bp, Homo sapien
ggtttcagagcatcttaaaagtgtcacagatac

SEQ ID NO: 536078 - DNA, 33 bp, Homo sapien
ggtttcagagcatcttgaaagtgtcacagatac

SEQ ID NO: 536079 - DNA, 33 bp, Homo sapien
tctggacagctgaagccagtcatagatcatggc

SEQ ID NO: 536080 - DNA, 33 bp, Homo sapien
tctggacagctgaagcgagtcatagatcatggc

SEQ ID NO: 536081 - DNA, 33 bp, Homo sapien
aagatgctgatacttaaatggtactcgggcaat

SEQ ID NO: 536082 - DNA, 33 bp, Homo sapien
aagatgctgatacttagatggtactcgggcaat

SEQ ID NO: 536083 - DNA, 33 bp, Homo sapien
ttccctttctcgtttcccttaacaattccaaat

SEQ ID NO: 536084 - DNA, 33 bp, Homo sapien
ttccctttctcgtttctcttaacaattccaaat

SEQ ID NO: 536085 - DNA, 33 bp, Homo sapien
gtctttgttctttgaccattaccttccttgcct

SEQ ID NO: 536086 - DNA, 33 bp, Homo sapien
gtctttgttctttgactattaccttccttgcct

SEQ ID NO: 536087 - DNA, 33 bp, Homo sapien
gactaatacaccaacaaaagtacattttccttt

SEQ ID NO: 536088 - DNA, 33 bp, Homo sapien
gactaatacaccaacagaagtacattttccttt

SEQ ID NO: 536089 - DNA, 33 bp, Homo sapien
tgaacattgtatttcaaaatgattgtatatttc

SEQ ID NO: 536090 - DNA, 33 bp, Homo sapien
tgaacattgtatttcataatgattgtatatttc

SEQ ID NO: 536091 - DNA, 33 bp, Homo sapien
atattatatgaactcagtaagatcaaaggaata

SEQ ID NO: 536092 - DNA, 33 bp, Homo sapien
atattatatgaactcattaagatcaaaggaata

SEQ ID NO: 536093 - DNA, 33 bp, Homo sapien
ttacctttccagagatgactgctcatgtaagtc

SEQ ID NO: 536094 - DNA, 33 bp, Homo sapien
ttacctttccagagattactgctcatgtaagtc

SEQ ID NO: 536095 - DNA, 33 bp, Homo sapien
tctgaatcatacactaaggtggtaaagtataaa

SEQ ID NO: 536096 - DNA, 33 bp, Homo sapien
tctgaatcatacactatggtggtaaagtataaa

SEQ ID NO: 536097 - DNA, 33 bp, Homo sapien
tctgagcctgaaggaacgtagactgatagaggg

SEQ ID NO: 536098 - DNA, 33 bp, Homo sapien
tctgagcctgaaggaatgtagactgatagaggg

SEQ ID NO: 536099 - DNA, 33 bp, Homo sapien
atatatttaaccactacactgaactgtttaacc

SEQ ID NO: 536100 - DNA, 33 bp, Homo sapien
atatatttaaccactatactgaactgtttaacc

SEQ ID NO: 536101 - DNA, 33 bp, Homo sapien
accatctcgttagtccaattcttcatgaagtta

SEQ ID NO: 536102 - DNA, 33 bp, Homo sapien
accatctcgttagtccgattcttcatgaagtta

SEQ ID NO: 536103 - DNA, 33 bp, Homo sapien
agtggcagcagtgaaaagctaattcaaacaggt

SEQ ID NO: 536104 - DNA, 33 bp, Homo sapien
agtggcagcagtgaaacgctaattcaaacaggt

SEQ ID NO: 536105 - DNA, 33 bp, Homo sapien
gtctgctgcaaagtcacgataagtgatcatttg

SEQ ID NO: 536106 - DNA, 33 bp, Homo sapien
gtctgctgcaaagtcatgataagtgatcatttg

SEQ ID NO: 536107 - DNA, 33 bp, Homo sapien
agcatcttatttcttacggtgacatgttttgca

SEQ ID NO: 536108 - DNA, 33 bp, Homo sapien
agcatcttatttcttatggtgacatgttttgca

SEQ ID NO: 536109 - DNA, 33 bp, Homo sapien
cagattaataaggaaactgagctcgcacaatgt

SEQ ID NO: 536110 - DNA, 33 bp, Homo sapien
cagattaataaggaaattgagctcgcacaatgt

SEQ ID NO: 536111 - DNA, 33 bp, Homo sapien
ctaggttgaggggtcacctggtagaagataaat

SEQ ID NO: 536112 - DNA, 33 bp, Homo sapien
ctaggttgaggggtcagctggtagaagataaat

SEQ ID NO: 536113 - DNA, 33 bp, Homo sapien
tcacatttggaacccaaaggcttatcacatgta

SEQ ID NO: 536114 - DNA, 33 bp, Homo sapien
tcacatttggaacccagaggcttatcacatgta

SEQ ID NO: 536115 - DNA, 33 bp, Homo sapien
tactgcttatgttttccaccagctcctgaaaca

SEQ ID NO: 536116 - DNA, 33 bp, Homo sapien
tactgcttatgttttctaccagctcctgaaaca

SEQ ID NO: 536117 - DNA, 33 bp, Homo sapien
tgagcatgtacactccagaagcactactaatgg

SEQ ID NO: 536118 - DNA, 33 bp, Homo sapien
tgagcatgtacactccggaagcactactaatgg

SEQ ID NO: 536119 - DNA, 33 bp, Homo sapien
taaagttttacagctaacctagtctgtgaaaaa

SEQ ID NO: 536120 - DNA, 33 bp, Homo sapien
taaagttttacagctatcctagtctgtgaaaaa

SEQ ID NO: 536121 - DNA, 33 bp, Homo sapien
cagggtaggtatgacccggacagagaatcataa

SEQ ID NO: 536122 - DNA, 33 bp, Homo sapien
cagggtaggtatgacctggacagagaatcataa

SEQ ID NO: 536123 - DNA, 33 bp, Homo sapien
ccaacgcaccacactcaaacttagtcatagttc

SEQ ID NO: 536124 - DNA, 33 bp, Homo sapien
ccaacgcaccacactccaacttagtcatagttc

SEQ ID NO: 536125 - DNA, 33 bp, Homo sapien
ctagcacatccacaaacgtaacaacatagcata

SEQ ID NO: 536126 - DNA, 33 bp, Homo sapien
ctagcacatccacaaatgtaacaacatagcata

SEQ ID NO: 536127 - DNA, 33 bp, Homo sapien
gaaatattttagcttacagacacttgcattggt

SEQ ID NO: 536128 - DNA, 33 bp, Homo sapien
gaaatattttagcttatagacacttgcattggt

SEQ ID NO: 536129 - DNA, 33 bp, Homo sapien
tattagatgggttttcaaaaattgcataggttg

SEQ ID NO: 536130 - DNA, 33 bp, Homo sapien
tattagatgggttttcgaaaattgcataggttg

SEQ ID NO: 536131 - DNA, 33 bp, Homo sapien
caatctgcccaagcaccgtgccgagcattttat

SEQ ID NO: 536132 - DNA, 33 bp, Homo sapien
caatctgcccaagcactgtgccgagcattttat

SEQ ID NO: 536133 - DNA, 33 bp, Homo sapien
ttaactttttaaacctcaatttctccattttta

SEQ ID NO: 536134 - DNA, 33 bp, Homo sapien
ttaactttttaaacctgaatttctccattttta

SEQ ID NO: 536135 - DNA, 33 bp, Homo sapien
tgcagaatgttttgaactgtacaactcactcca

SEQ ID NO: 536136 - DNA, 33 bp, Homo sapien
tgcagaatgttttgaagtgtacaactcactcca

SEQ ID NO: 536137 - DNA, 33 bp, Homo sapien
agtggctctattaggaacaactgcaggtacaag

SEQ ID NO: 536138 - DNA, 33 bp, Homo sapien
agtggctctattaggaccaactgcaggtacaag

SEQ ID NO: 536139 - DNA, 33 bp, Homo sapien
ctataatctcagagaaaagagaaacttatgagg

SEQ ID NO: 536140 - DNA, 33 bp, Homo sapien
ctataatctcagagaagagagaaacttatgagg

SEQ ID NO: 536141 - DNA, 33 bp, Homo sapien
ctgagtctgagtcaaccggagtactagaatctc

SEQ ID NO: 536142 - DNA, 33 bp, Homo sapien
ctgagtctgagtcaactggagtactagaatctc

SEQ ID NO: 536143 - DNA, 33 bp, Homo sapien
acctggtgacttctgaaagccgctccagcttaa

SEQ ID NO: 536144 - DNA, 33 bp, Homo sapien
acctggtgacttctgagagccgctccagcttaa

SEQ ID NO: 536145 - DNA, 33 bp, Homo sapien
tggctgaagaagacagaaaacacttggtggcag

SEQ ID NO: 536146 - DNA, 33 bp, Homo sapien
tggctgaagaagacaggaaacacttggtggcag

SEQ ID NO: 536147 - DNA, 33 bp, Homo sapien
catgaggttaggcccacccagcgtcacaaagct

SEQ ID NO: 536148 - DNA, 33 bp, Homo sapien
catgaggttaggcccatccagcgtcacaaagct

SEQ ID NO: 536149 - DNA, 33 bp, Homo sapien
tttatttaactcactaaagccaaacttattgtt

SEQ ID NO: 536150 - DNA, 33 bp, Homo sapien
tttatttaactcactatagccaaacttattgtt

SEQ ID NO: 536151 - DNA, 33 bp, Homo sapien
gtatgcttcatgaggaatcagaaatgacagaca

SEQ ID NO: 536152 - DNA, 33 bp, Homo sapien
gtatgcttcatgaggagtcagaaatgacagaca

SEQ ID NO: 536153 - DNA, 33 bp, Homo sapien
ggtagagcacctggaacaatgtttcacttaatt

SEQ ID NO: 536154 - DNA, 33 bp, Homo sapien
ggtagagcacctggaataatgtttcacttaatt

SEQ ID NO: 536155 - DNA, 33 bp, Homo sapien
ccatgaacacttaggtaaaaagaatctcttctt

SEQ ID NO: 536156 - DNA, 33 bp, Homo sapien
ccatgaacacttaggtcaaaagaatctcttctt

SEQ ID NO: 536157 - DNA, 33 bp, Homo sapien
aagtcatattgcaaaaactatttcaagcctctg

SEQ ID NO: 536158 - DNA, 33 bp, Homo sapien
aagtcatattgcaaaatctatttcaagcctctg

SEQ ID NO: 536159 - DNA, 33 bp, Homo sapien
atgcctgcttatcaacaagttgtcagggtccat

SEQ ID NO: 536160 - DNA, 33 bp, Homo sapien
atgcctgcttatcaacgagttgtcagggtccat

SEQ ID NO: 536161 - DNA, 33 bp, Homo sapien
tcccatgcattatgaccgaaggaatcacaccat

SEQ ID NO: 536162 - DNA, 33 bp, Homo sapien
tcccatgcattatgactgaaggaatcacaccat

SEQ ID NO: 536163 - DNA, 33 bp, Homo sapien
ttcatccttttatgaacatgaagaaagctaacc

SEQ ID NO: 536164 - DNA, 33 bp, Homo sapien
ttcatccttttatgaagatgaagaaagctaacc

SEQ ID NO: 536165 - DNA, 33 bp, Homo sapien
tcctgtaccaagcttcaagcaaagaaggagcat

SEQ ID NO: 536166 - DNA, 33 bp, Homo sapien
tcctgtaccaagcttcgagcaaagaaggagcat

SEQ ID NO: 536167 - DNA, 33 bp, Homo sapien
gcctaatgagtaggtacggcatggaatcaagat

SEQ ID NO: 536168 - DNA, 33 bp, Homo sapien
gcctaatgagtaggtatggcatggaatcaagat

SEQ ID NO: 536169 - DNA, 33 bp, Homo sapien
agatctttcatatgctaaaatattgaacaacat

SEQ ID NO: 536170 - DNA, 33 bp, Homo sapien
agatctttcatatgctgaaatattgaacaacat

SEQ ID NO: 536171 - DNA, 33 bp, Homo sapien
tcagagcatactcatacccgctactacacaaaa

SEQ ID NO: 536172 - DNA, 33 bp, Homo sapien
tcagagcatactcatatccgctactacacaaaa

SEQ ID NO: 536173 - DNA, 33 bp, Homo sapien
aagtcaccatactctacaatactgggaactggc

SEQ ID NO: 536174 - DNA, 33 bp, Homo sapien
aagtcaccatactctataatactgggaactggc

SEQ ID NO: 536175 - DNA, 33 bp, Homo sapien
tcagtactagtaatgccaagtcacatattttca

SEQ ID NO: 536176 - DNA, 33 bp, Homo sapien
tcagtactagtaatgcgaagtcacatattttca

SEQ ID NO: 536177 - DNA, 33 bp, Homo sapien
aaaaagaactcaaaaaagaacagactcaatatt

SEQ ID NO: 536178 - DNA, 33 bp, Homo sapien
aaaaagaactcaaaaaggaacagactcaatatt

SEQ ID NO: 536179 - DNA, 33 bp, Homo sapien
acgtgtccttatagaacatagcaacagagtcta

SEQ ID NO: 536180 - DNA, 33 bp, Homo sapien
acgtgtccttatagaatatagcaacagagtcta

SEQ ID NO: 536181 - DNA, 33 bp, Homo sapien
atacatatatgggttacctaagccaagcctaca

SEQ ID NO: 536182 - DNA, 33 bp, Homo sapien
atacatatatgggttatctaagccaagcctaca

SEQ ID NO: 536183 - DNA, 33 bp, Homo sapien
caatgtccaagttctcactttttctgtatgcct

SEQ ID NO: 536184 - DNA, 33 bp, Homo sapien
caatgtccaagttctctctttttctgtatgcct

SEQ ID NO: 536185 - DNA, 33 bp, Homo sapien
gtgaatttgcagtgtacagttcatgatggtgag

SEQ ID NO: 536186 - DNA, 33 bp, Homo sapien
gtgaatttgcagtgtatagttcatgatggtgag

SEQ ID NO: 536187 - DNA, 33 bp, Homo sapien
caactctagaacttcaagtttttttagtagata

SEQ ID NO: 536188 - DNA, 33 bp, Homo sapien
caactctagaacttcaggtttttttagtagata

SEQ ID NO: 536189 - DNA, 33 bp, Homo sapien
acaaaattgagtcactcaccaaagtgtgaaggg

SEQ ID NO: 536190 - DNA, 33 bp, Homo sapien
acaaaattgagtcacttaccaaagtgtgaaggg

SEQ ID NO: 536191 - DNA, 33 bp, Homo sapien
cctaatctcaaacatacgaggccaggaaagatg

SEQ ID NO: 536192 - DNA, 33 bp, Homo sapien
cctaatctcaaacataggaggccaggaaagatg

SEQ ID NO: 536193 - DNA, 33 bp, Homo sapien
gatgtatacatgatcaatgagaacatccaattc

SEQ ID NO: 536194 - DNA, 33 bp, Homo sapien
gatgtatacatgatcagtgagaacatccaattc

SEQ ID NO: 536195 - DNA, 33 bp, Homo sapien
cttacagccaaggacacgggcaggagaaagtta

SEQ ID NO: 536196 - DNA, 33 bp, Homo sapien
cttacagccaaggacaggggcaggagaaagtta

SEQ ID NO: 536197 - DNA, 33 bp, Homo sapien
aaaaacctgtatggaactgtttaatataccaaa

SEQ ID NO: 536198 - DNA, 33 bp, Homo sapien
aaaaacctgtatggaattgtttaatataccaaa

SEQ ID NO: 536199 - DNA, 33 bp, Homo sapien
ctgcttaaccacctgcaaatctattcagcgtat

SEQ ID NO: 536200 - DNA, 33 bp, Homo sapien
ctgcttaaccacctgcgaatctattcagcgtat

SEQ ID NO: 536201 - DNA, 33 bp, Homo sapien
gaagatatttttctaacgacaagagtagctatt

SEQ ID NO: 536202 - DNA, 33 bp, Homo sapien
gaagatatttttctaatgacaagagtagctatt

SEQ ID NO: 536203 - DNA, 33 bp, Homo sapien
aacagtacttagtttcacccactcctatctact

SEQ ID NO: 536204 - DNA, 33 bp, Homo sapien
aacagtacttagtttcgcccactcctatctact

SEQ ID NO: 536205 - DNA, 33 bp, Homo sapien
tttttcagctttacaacggtgtgaaagcaacat

SEQ ID NO: 536206 - DNA, 33 bp, Homo sapien
tttttcagctttacaatggtgtgaaagcaacat

SEQ ID NO: 536207 - DNA, 33 bp, Homo sapien
ccactaaaccatcaacaagtatagatactccag

SEQ ID NO: 536208 - DNA, 33 bp, Homo sapien
ccactaaaccatcaaccagtatagatactccag

SEQ ID NO: 536209 - DNA, 33 bp, Homo sapien
tgacagttggatatgacctttcttaagtttttg

SEQ ID NO: 536210 - DNA, 33 bp, Homo sapien
tgacagttggatatgatctttcttaagtttttg

SEQ ID NO: 536211 - DNA, 33 bp, Homo sapien
acttgaaataatgtcacggaagaagcgtttagt

SEQ ID NO: 536212 - DNA, 33 bp, Homo sapien
acttgaaataatgtcatggaagaagcgtttagt

SEQ ID NO: 536213 - DNA, 33 bp, Homo sapien
gttacatgctacagaaagttcagaaagaatgaa

SEQ ID NO: 536214 - DNA, 33 bp, Homo sapien
gttacatgctacagaaggttcagaaagaatgaa

SEQ ID NO: 536215 - DNA, 33 bp, Homo sapien
tatatgtgaccagaagcaaactgactgattagg

SEQ ID NO: 536216 - DNA, 33 bp, Homo sapien
tatatgtgaccagaagtaaactgactgattagg

SEQ ID NO: 536217 - DNA, 33 bp, Homo sapien
ggttatattctgataaatggaatctattcaact

SEQ ID NO: 536218 - DNA, 33 bp, Homo sapien
ggttatattctgataagtggaatctattcaact

SEQ ID NO: 536219 - DNA, 33 bp, Homo sapien
cagataagcccaatacaacctttatttatgtgt

SEQ ID NO: 536220 - DNA, 33 bp, Homo sapien
cagataagcccaataccacctttatttatgtgt

SEQ ID NO: 536221 - DNA, 33 bp, Homo sapien
tggcaaaaatcaaacactaacgccgaaatagcc

SEQ ID NO: 536222 - DNA, 33 bp, Homo sapien
tggcaaaaatcaaacattaacgccgaaatagcc

SEQ ID NO: 536223 - DNA, 33 bp, Homo sapien
tatagttggtataataaccatggaataaataac

SEQ ID NO: 536224 - DNA, 33 bp, Homo sapien
tatagttggtataatacccatggaataaataac

SEQ ID NO: 536225 - DNA, 33 bp, Homo sapien
gcattccttttattaacgtagctcaaacaacta

SEQ ID NO: 536226 - DNA, 33 bp, Homo sapien
gcattccttttattaatgtagctcaaacaacta

SEQ ID NO: 536227 - DNA, 33 bp, Homo sapien
gagatactatgtgcacacctataaaaataactg

SEQ ID NO: 536228 - DNA, 33 bp, Homo sapien
gagatactatgtgcacccctataaaaataactg

SEQ ID NO: 536229 - DNA, 33 bp, Homo sapien
atcatttaatccttgaacataaccagtgtatcc

SEQ ID NO: 536230 - DNA, 33 bp, Homo sapien
atcatttaatccttgagcataaccagtgtatcc

SEQ ID NO: 536231 - DNA, 33 bp, Homo sapien
ggtcacagccaaaactcaaaagtaggaaatctg

SEQ ID NO: 536232 - DNA, 33 bp, Homo sapien
ggtcacagccaaaactgaaaagtaggaaatctg

SEQ ID NO: 536233 - DNA, 33 bp, Homo sapien
aaggtcataggatcaggaagggtaatttagttt

SEQ ID NO: 536234 - DNA, 33 bp, Homo sapien
aaggtcataggatcagtaagggtaatttagttt

SEQ ID NO: 536235 - DNA, 33 bp, Homo sapien
cataagtgaagaaaaaagtccttgttctggaaa

SEQ ID NO: 536236 - DNA, 33 bp, Homo sapien
cataagtgaagaaaaacgtccttgttctggaaa

SEQ ID NO: 536237 - DNA, 33 bp, Homo sapien
aacctatcctgttactcagcagctgaaattatc

SEQ ID NO: 536238 - DNA, 33 bp, Homo sapien
aacctatcctgttacttagcagctgaaattatc

SEQ ID NO: 536239 - DNA, 33 bp, Homo sapien
ccagaaacagttcttgaagataagtgagagcag

SEQ ID NO: 536240 - DNA, 33 bp, Homo sapien
ccagaaacagttcttgcagataagtgagagcag

SEQ ID NO: 536241 - DNA, 33 bp, Homo sapien
gcaggaagagaaaaccaaatgctgcatcttctc

SEQ ID NO: 536242 - DNA, 33 bp, Homo sapien
gcaggaagagaaaaccgaatgctgcatcttctc

SEQ ID NO: 536243 - DNA, 33 bp, Homo sapien
tgcttaagtgtcattacctgtgtgggactatat

SEQ ID NO: 536244 - DNA, 33 bp, Homo sapien
tgcttaagtgtcattatctgtgtgggactatat

SEQ ID NO: 536245 - DNA, 33 bp, Homo sapien
gtgagtactgttacataaacattaacctcccca

SEQ ID NO: 536246 - DNA, 33 bp, Homo sapien
gtgagtactgttacatgaacattaacctcccca

SEQ ID NO: 536247 - DNA, 33 bp, Homo sapien
ttacatgtagtgtaacaaacagtataaacatga

SEQ ID NO: 536248 - DNA, 33 bp, Homo sapien
ttacatgtagtgtaaccaacagtataaacatga

SEQ ID NO: 536249 - DNA, 33 bp, Homo sapien
catctctaaactgtcaaatgtttacattatgga

SEQ ID NO: 536250 - DNA, 33 bp, Homo sapien
catctctaaactgtcagatgtttacattatgga

SEQ ID NO: 536251 - DNA, 33 bp, Homo sapien
ccatccatctgcacaaatattttcattttgcaa

SEQ ID NO: 536252 - DNA, 33 bp, Homo sapien
ccatccatctgcacaactattttcattttgcaa

SEQ ID NO: 536253 - DNA, 33 bp, Homo sapien
gtatttctactccatagaatggaagctcttgta

SEQ ID NO: 536254 - DNA, 33 bp, Homo sapien
gtatttctactccatataatggaagctcttgta

SEQ ID NO: 536255 - DNA, 33 bp, Homo sapien
gttcagggactcccagaaataaccaggaccatt

SEQ ID NO: 536256 - DNA, 33 bp, Homo sapien
gttcagggactcccaggaataaccaggaccatt

SEQ ID NO: 536257 - DNA, 33 bp, Homo sapien
gcaacccatgctgtccacttctctgtgcatttc

SEQ ID NO: 536258 - DNA, 33 bp, Homo sapien
gcaacccatgctgtccgcttctctgtgcatttc

SEQ ID NO: 536259 - DNA, 33 bp, Homo sapien
tattgccacaattgcaccacttttactattgtc

SEQ ID NO: 536260 - DNA, 33 bp, Homo sapien
tattgccacaattgcatcacttttactattgtc

SEQ ID NO: 536261 - DNA, 33 bp, Homo sapien
tcaaaatcagtattaaccaacatttccaggtga

SEQ ID NO: 536262 - DNA, 33 bp, Homo sapien
tcaaaatcagtattaatcaacatttccaggtga

SEQ ID NO: 536263 - DNA, 33 bp, Homo sapien
agaatgacaggttttacgaccatatggtttaac

SEQ ID NO: 536264 - DNA, 33 bp, Homo sapien
agaatgacaggttttatgaccatatggtttaac

SEQ ID NO: 536265 - DNA, 33 bp, Homo sapien
ttctagggagaggaaaaggctagtgccaatacc

SEQ ID NO: 536266 - DNA, 33 bp, Homo sapien
ttctagggagaggaaacggctagtgccaatacc

SEQ ID NO: 536267 - DNA, 33 bp, Homo sapien
cacatggcaagctctgacaacacagtacttcag

SEQ ID NO: 536268 - DNA, 33 bp, Homo sapien
cacatggcaagctctggcaacacagtacttcag

SEQ ID NO: 536269 - DNA, 33 bp, Homo sapien
tctcatcaggttactgagactatgtgagctttt

SEQ ID NO: 536270 - DNA, 33 bp, Homo sapien
tctcatcaggttactgggactatgtgagctttt

SEQ ID NO: 536271 - DNA, 33 bp, Homo sapien
ttgtgctgcctttgtgcatatgatccactacac

SEQ ID NO: 536272 - DNA, 33 bp, Homo sapien
ttgtgctgcctttgtgtatatgatccactacac

SEQ ID NO: 536273 - DNA, 33 bp, Homo sapien
caaatctaaaatgtaacggatgtgagaaaatta

SEQ ID NO: 536274 - DNA, 33 bp, Homo sapien
caaatctaaaatgtaatggatgtgagaaaatta

SEQ ID NO: 536275 - DNA, 33 bp, Homo sapien
aaatttcttaggaagcagagtagaaagcttctg

SEQ ID NO: 536276 - DNA, 33 bp, Homo sapien
aaatttcttaggaagcggagtagaaagcttctg

SEQ ID NO: 536277 - DNA, 33 bp, Homo sapien
aaatgtattctgggaaactgatttgcaaaactg

SEQ ID NO: 536278 - DNA, 33 bp, Homo sapien
aaatgtattctgggaacctgatttgcaaaactg

SEQ ID NO: 536279 - DNA, 33 bp, Homo sapien
tatcagcaaagaaaaacagagacttcacaaaat

SEQ ID NO: 536280 - DNA, 33 bp, Homo sapien
tatcagcaaagaaaaagagagacttcacaaaat

SEQ ID NO: 536281 - DNA, 33 bp, Homo sapien
tattaatattttagatcagacttatgttaacca

SEQ ID NO: 536282 - DNA, 33 bp, Homo sapien
tattaatattttagatgagacttatgttaacca

SEQ ID NO: 536283 - DNA, 33 bp, Homo sapien
ttgaaataaacttcataaggctgagcacttttt

SEQ ID NO: 536284 - DNA, 33 bp, Homo sapien
ttgaaataaacttcatgaggctgagcacttttt

SEQ ID NO: 536285 - DNA, 33 bp, Homo sapien
ttaagagccatgctacacagttccgaggtagaa

SEQ ID NO: 536286 - DNA, 33 bp, Homo sapien
ttaagagccatgctacccagttccgaggtagaa

SEQ ID NO: 536287 - DNA, 33 bp, Homo sapien
acagtgctccagtgaacgcagtagataattcag

SEQ ID NO: 536288 - DNA, 33 bp, Homo sapien
acagtgctccagtgaatgcagtagataattcag

SEQ ID NO: 536289 - DNA, 33 bp, Homo sapien
cacttcattctttcccggagacttgacagactt

SEQ ID NO: 536290 - DNA, 33 bp, Homo sapien
cacttcattctttccctgagacttgacagactt

SEQ ID NO: 536291 - DNA, 33 bp, Homo sapien
ggtccaaatatattcccccaatttctcggttcc

SEQ ID NO: 536292 - DNA, 33 bp, Homo sapien
ggtccaaatatattcctccaatttctcggttcc

SEQ ID NO: 536293 - DNA, 33 bp, Homo sapien
gaatatttattaaaacacaggcaagctggagag

SEQ ID NO: 536294 - DNA, 33 bp, Homo sapien
gaatatttattaaaactcaggcaagctggagag

SEQ ID NO: 536295 - DNA, 33 bp, Homo sapien
tataacagaacatctacatgcctctgttgtatc

SEQ ID NO: 536296 - DNA, 33 bp, Homo sapien
tataacagaacatctatatgcctctgttgtatc

SEQ ID NO: 536297 - DNA, 33 bp, Homo sapien
acctccaatgttcagtcaatgatctgtgttcat

SEQ ID NO: 536298 - DNA, 33 bp, Homo sapien
acctccaatgttcagttaatgatctgtgttcat

SEQ ID NO: 536299 - DNA, 33 bp, Homo sapien
aaggcctaagatataaacctcaggaacctcaat

SEQ ID NO: 536300 - DNA, 33 bp, Homo sapien
aaggcctaagatataaccctcaggaacctcaat

SEQ ID NO: 536301 - DNA, 33 bp, Homo sapien
ttaaaacacagttatacctaagaatacatggcc

SEQ ID NO: 536302 - DNA, 33 bp, Homo sapien
ttaaaacacagttatagctaagaatacatggcc

SEQ ID NO: 536303 - DNA, 33 bp, Homo sapien
tgcagaattaccaaaaacattgctggttatttt

SEQ ID NO: 536304 - DNA, 33 bp, Homo sapien
tgcagaattaccaaaatcattgctggttatttt

SEQ ID NO: 536305 - DNA, 33 bp, Homo sapien
ctggaacacctacagcaagatgaaaggaatcac

SEQ ID NO: 536306 - DNA, 33 bp, Homo sapien
ctggaacacctacagcgagatgaaaggaatcac

SEQ ID NO: 536307 - DNA, 33 bp, Homo sapien
tatgaatatcaagggaatagccgaagtatctca

SEQ ID NO: 536308 - DNA, 33 bp, Homo sapien
tatgaatatcaagggagtagccgaagtatctca

SEQ ID NO: 536309 - DNA, 33 bp, Homo sapien
aaataggtctatttagaaaaacacaatgtaaaa

SEQ ID NO: 536310 - DNA, 33 bp, Homo sapien
aaataggtctatttaggaaaacacaatgtaaaa

SEQ ID NO: 536311 - DNA, 33 bp, Homo sapien
tggacaaagcttttaacgttaatagagtccaat

SEQ ID NO: 536312 - DNA, 33 bp, Homo sapien
tggacaaagcttttaatgttaatagagtccaat

SEQ ID NO: 536313 - DNA, 33 bp, Homo sapien
gccctgtgtaatttacaaagagatgactatttg

SEQ ID NO: 536314 - DNA, 33 bp, Homo sapien
gccctgtgtaatttaccaagagatgactatttg

SEQ ID NO: 536315 - DNA, 33 bp, Homo sapien
gtaagaaaacagagcaactcacggcaacagatc

SEQ ID NO: 536316 - DNA, 33 bp, Homo sapien
gtaagaaaacagagcagctcacggcaacagatc

SEQ ID NO: 536317 - DNA, 33 bp, Homo sapien
tggggagtgatgactaacgggtatgaggtttct

SEQ ID NO: 536318 - DNA, 33 bp, Homo sapien
tggggagtgatgactagcgggtatgaggtttct

SEQ ID NO: 536319 - DNA, 33 bp, Homo sapien
accttcaaatgacaaacggtaaagagatttcat

SEQ ID NO: 536320 - DNA, 33 bp, Homo sapien
accttcaaatgacaaatggtaaagagatttcat

SEQ ID NO: 536321 - DNA, 33 bp, Homo sapien
atggctcttgcagaggccaaagctgccagcagt

SEQ ID NO: 536322 - DNA, 33 bp, Homo sapien
atggctcttgcagaggtcaaagctgccagcagt

SEQ ID NO: 536323 - DNA, 33 bp, Homo sapien
aacattcaggtatgacactcttagtctctgtgt

SEQ ID NO: 536324 - DNA, 33 bp, Homo sapien
aacattcaggtatgacgctcttagtctctgtgt

SEQ ID NO: 536325 - DNA, 33 bp, Homo sapien
agacagagaagtttcagcctggggagaggtatt

SEQ ID NO: 536326 - DNA, 33 bp, Homo sapien
agacagagaagtttcatcctggggagaggtatt

SEQ ID NO: 536327 - DNA, 33 bp, Homo sapien
tgatgcttgttaccacactaatgaataatggtg

SEQ ID NO: 536328 - DNA, 33 bp, Homo sapien
tgatgcttgttaccacgctaatgaataatggtg

SEQ ID NO: 536329 - DNA, 33 bp, Homo sapien
gtgttgcagcttcacacgatgacactaatcggc

SEQ ID NO: 536330 - DNA, 33 bp, Homo sapien
gtgttgcagcttcacatgatgacactaatcggc

SEQ ID NO: 536331 - DNA, 33 bp, Homo sapien
ggtaatcactcacttcacttctggaagcaacag

SEQ ID NO: 536332 - DNA, 33 bp, Homo sapien
ggtaatcactcacttcgcttctggaagcaacag

SEQ ID NO: 536333 - DNA, 33 bp, Homo sapien
aggactgataagaggactaaagatcatataagt

SEQ ID NO: 536334 - DNA, 33 bp, Homo sapien
aggactgataagaggattaaagatcatataagt

SEQ ID NO: 536335 - DNA, 33 bp, Homo sapien
aacatctcataaatacacagaaatacagaaagt

SEQ ID NO: 536336 - DNA, 33 bp, Homo sapien
aacatctcataaatacgcagaaatacagaaagt

SEQ ID NO: 536337 - DNA, 33 bp, Homo sapien
cttctggttcccaatcactattcctagctgctt

SEQ ID NO: 536338 - DNA, 33 bp, Homo sapien
cttctggttcccaatcgctattcctagctgctt

SEQ ID NO: 536339 - DNA, 33 bp, Homo sapien
ccatgaaaaatgcttacagcaggttctggcata

SEQ ID NO: 536340 - DNA, 33 bp, Homo sapien
ccatgaaaaatgcttatagcaggttctggcata

SEQ ID NO: 536341 - DNA, 33 bp, Homo sapien
tcacaaaaggctattacataccatggcagagac

SEQ ID NO: 536342 - DNA, 33 bp, Homo sapien
tcacaaaaggctattatataccatggcagagac

SEQ ID NO: 536343 - DNA, 33 bp, Homo sapien
agaaagactttagaaaatacaaagtgagaaacc

SEQ ID NO: 536344 - DNA, 33 bp, Homo sapien
agaaagactttagaaagtacaaagtgagaaacc

SEQ ID NO: 536345 - DNA, 33 bp, Homo sapien
tgtaggatagtataaacgggtttctcactttgt

SEQ ID NO: 536346 - DNA, 33 bp, Homo sapien
tgtaggatagtataaatgggtttctcactttgt

SEQ ID NO: 536347 - DNA, 33 bp, Homo sapien
cagttggcaagtgacccgggtataaccagctat

SEQ ID NO: 536348 - DNA, 33 bp, Homo sapien
cagttggcaagtgacctgggtataaccagctat

SEQ ID NO: 536349 - DNA, 33 bp, Homo sapien
tctttgagtggagccacattgagtccttctggg

SEQ ID NO: 536350 - DNA, 33 bp, Homo sapien
tctttgagtggagccatattgagtccttctggg

SEQ ID NO: 536351 - DNA, 33 bp, Homo sapien
ccttgacatttaaatacatggttatcagcccct

SEQ ID NO: 536352 - DNA, 33 bp, Homo sapien
ccttgacatttaaatatatggttatcagcccct

SEQ ID NO: 536353 - DNA, 33 bp, Homo sapien
ccttttgttctactcaaccctctttagactctc

SEQ ID NO: 536354 - DNA, 33 bp, Homo sapien
ccttttgttctactcacccctctttagactctc

SEQ ID NO: 536355 - DNA, 33 bp, Homo sapien
agggcctgtggatcccaaaaagtggtaacatca

SEQ ID NO: 536356 - DNA, 33 bp, Homo sapien
agggcctgtggatcccgaaaagtggtaacatca

SEQ ID NO: 536357 - DNA, 33 bp, Homo sapien
tctctagtgttaagtaaaaacagaagttgtcaa

SEQ ID NO: 536358 - DNA, 33 bp, Homo sapien
tctctagtgttaagtagaaacagaagttgtcaa

SEQ ID NO: 536359 - DNA, 33 bp, Homo sapien
catattttgtgtgaaacgaatcaaactatttca

SEQ ID NO: 536360 - DNA, 33 bp, Homo sapien
catattttgtgtgaaatgaatcaaactatttca

SEQ ID NO: 536361 - DNA, 33 bp, Homo sapien
gtgcctctgggactaacgctgctaaaagctact

SEQ ID NO: 536362 - DNA, 33 bp, Homo sapien
gtgcctctgggactaatgctgctaaaagctact

SEQ ID NO: 536363 - DNA, 33 bp, Homo sapien
ggggtttgtgtatgacccaacatgtgtctctat

SEQ ID NO: 536364 - DNA, 33 bp, Homo sapien
ggggtttgtgtatgactcaacatgtgtctctat

SEQ ID NO: 536365 - DNA, 33 bp, Homo sapien
acaaaacctgctaactcaattcatgtgagttct

SEQ ID NO: 536366 - DNA, 33 bp, Homo sapien
acaaaacctgctaactgaattcatgtgagttct

SEQ ID NO: 536367 - DNA, 33 bp, Homo sapien
cagcacgagcttgaaaatacctccaaatctctt

SEQ ID NO: 536368 - DNA, 33 bp, Homo sapien
cagcacgagcttgaaattacctccaaatctctt

SEQ ID NO: 536369 - DNA, 33 bp, Homo sapien
gcaacatagagtgaaacaccaacactgtagtga

SEQ ID NO: 536370 - DNA, 33 bp, Homo sapien
gcaacatagagtgaaagaccaacactgtagtga

SEQ ID NO: 536371 - DNA, 33 bp, Homo sapien
gctactaaaatgtgcacctgcatatgtcacccc

SEQ ID NO: 536372 - DNA, 33 bp, Homo sapien
gctactaaaatgtgcatctgcatatgtcacccc

SEQ ID NO: 536373 - DNA, 33 bp, Homo sapien
gaatgatatctgagccaaaggaggatgacacat

SEQ ID NO: 536374 - DNA, 33 bp, Homo sapien
gaatgatatctgagccgaaggaggatgacacat

SEQ ID NO: 536375 - DNA, 33 bp, Homo sapien
ccccaggtaaaccccactgatggagcaggacag

SEQ ID NO: 536376 - DNA, 33 bp, Homo sapien
ccccaggtaaaccccattgatggagcaggacag

SEQ ID NO: 536377 - DNA, 33 bp, Homo sapien
cttctccttccttcaggctaaccttgtttgggt

SEQ ID NO: 536378 - DNA, 33 bp, Homo sapien
cttctccttccttcagtctaaccttgtttgggt

SEQ ID NO: 536379 - DNA, 33 bp, Homo sapien
gagaaagtggcccttcaactgtagttattggtt

SEQ ID NO: 536380 - DNA, 33 bp, Homo sapien
gagaaagtggcccttcgactgtagttattggtt

SEQ ID NO: 536381 - DNA, 33 bp, Homo sapien
agccactaagctaagcgctttatgtaattatct

SEQ ID NO: 536382 - DNA, 33 bp, Homo sapien
agccactaagctaagctctttatgtaattatct

SEQ ID NO: 536383 - DNA, 33 bp, Homo sapien
aagttaaggcataaaacacttgatgtgaagttt

SEQ ID NO: 536384 - DNA, 33 bp, Homo sapien
aagttaaggcataaaatacttgatgtgaagttt

SEQ ID NO: 536385 - DNA, 33 bp, Homo sapien
cccaccttccaagacaaccatcattccgtcttt

SEQ ID NO: 536386 - DNA, 33 bp, Homo sapien
cccaccttccaagacacccatcattccgtcttt

SEQ ID NO: 536387 - DNA, 33 bp, Homo sapien
cgcagacccaaagatacaggaagttgtatgtac

SEQ ID NO: 536388 - DNA, 33 bp, Homo sapien
cgcagacccaaagatataggaagttgtatgtac

SEQ ID NO: 536389 - DNA, 33 bp, Homo sapien
agcatgaaaacagggcaaactcaatggagcctt

SEQ ID NO: 536390 - DNA, 33 bp, Homo sapien
agcatgaaaacagggcgaactcaatggagcctt

SEQ ID NO: 536391 - DNA, 33 bp, Homo sapien
catgagaggacacaaaccatttacacaaaactt

SEQ ID NO: 536392 - DNA, 33 bp, Homo sapien
catgagaggacacaaatcatttacacaaaactt

SEQ ID NO: 536393 - DNA, 33 bp, Homo sapien
cccccctacttttagaagaaacatgattttaat

SEQ ID NO: 536394 - DNA, 33 bp, Homo sapien
cccccctacttttagaggaaacatgattttaat

SEQ ID NO: 536395 - DNA, 33 bp, Homo sapien
caaataggagcttgcacggttgttaatttggtt

SEQ ID NO: 536396 - DNA, 33 bp, Homo sapien
caaataggagcttgcatggttgttaatttggtt

SEQ ID NO: 536397 - DNA, 33 bp, Homo sapien
gattgattctggctaacggaataagatgttttc

SEQ ID NO: 536398 - DNA, 33 bp, Homo sapien
gattgattctggctaatggaataagatgttttc

SEQ ID NO: 536399 - DNA, 33 bp, Homo sapien
ctagccctttactggacgggtgctagagccgaa

SEQ ID NO: 536400 - DNA, 33 bp, Homo sapien
ctagccctttactggatgggtgctagagccgaa

SEQ ID NO: 536401 - DNA, 33 bp, Homo sapien
atggaaaattacagttcaaattacatccttaag

SEQ ID NO: 536402 - DNA, 33 bp, Homo sapien
atggaaaattacagttgaaattacatccttaag

SEQ ID NO: 536403 - DNA, 33 bp, Homo sapien
gacaaccctactctagcattgaaacagctgctt

SEQ ID NO: 536404 - DNA, 33 bp, Homo sapien
gacaaccctactctagtattgaaacagctgctt

SEQ ID NO: 536405 - DNA, 33 bp, Homo sapien
ctggaatggcttcttcccttggacagtcagcac

SEQ ID NO: 536406 - DNA, 33 bp, Homo sapien
ctggaatggcttcttctcttggacagtcagcac

SEQ ID NO: 536407 - DNA, 33 bp, Homo sapien
tggagatccactaagaaaagcactctactcata

SEQ ID NO: 536408 - DNA, 33 bp, Homo sapien
tggagatccactaagagaagcactctactcata

SEQ ID NO: 536409 - DNA, 33 bp, Homo sapien
tcgaggaaccgcagataactgtaactatggaag

SEQ ID NO: 536410 - DNA, 33 bp, Homo sapien
tcgaggaaccgcagatgactgtaactatggaag

SEQ ID NO: 536411 - DNA, 33 bp, Homo sapien
aatgccactgtctctccgaagcctcctgtaccc

SEQ ID NO: 536412 - DNA, 33 bp, Homo sapien
aatgccactgtctctctgaagcctcctgtaccc

SEQ ID NO: 536413 - DNA, 33 bp, Homo sapien
ctttgcttggtgccatgaatgtttactcagttg

SEQ ID NO: 536414 - DNA, 33 bp, Homo sapien
ctttgcttggtgccattaatgtttactcagttg

SEQ ID NO: 536415 - DNA, 33 bp, Homo sapien
ctcctacaaactggtcagaagaggatagttaac

SEQ ID NO: 536416 - DNA, 33 bp, Homo sapien
ctcctacaaactggtcggaagaggatagttaac

SEQ ID NO: 536417 - DNA, 33 bp, Homo sapien
attccttaagctgatcaagtgataaaagctgtg

SEQ ID NO: 536418 - DNA, 33 bp, Homo sapien
attccttaagctgatccagtgataaaagctgtg

SEQ ID NO: 536419 - DNA, 33 bp, Homo sapien
ggtatttatcccagacagtagctttgaatttgg

SEQ ID NO: 536420 - DNA, 33 bp, Homo sapien
ggtatttatcccagacggtagctttgaatttgg

SEQ ID NO: 536421 - DNA, 33 bp, Homo sapien
aaagcaatttccatataaagcaattccataagt

SEQ ID NO: 536422 - DNA, 33 bp, Homo sapien
aaagcaatttccatattaagcaattccataagt

SEQ ID NO: 536423 - DNA, 33 bp, Homo sapien
gtggcatctaaccgaacaatttccaaaaatgct

SEQ ID NO: 536424 - DNA, 33 bp, Homo sapien
gtggcatctaaccgaataatttccaaaaatgct

SEQ ID NO: 536425 - DNA, 33 bp, Homo sapien
tgaagagcaaactagaactacagaattctttgg

SEQ ID NO: 536426 - DNA, 33 bp, Homo sapien
tgaagagcaaactagagctacagaattctttgg

SEQ ID NO: 536427 - DNA, 33 bp, Homo sapien
aaagaaaaatacattcaagagagaacgtcagaa

SEQ ID NO: 536428 - DNA, 33 bp, Homo sapien
aaagaaaaatacattcgagagagaacgtcagaa

SEQ ID NO: 536429 - DNA, 33 bp, Homo sapien
gccagatatacctgtaagttaagacctttaagt

SEQ ID NO: 536430 - DNA, 33 bp, Homo sapien
gccagatatacctgtaggttaagacctttaagt

SEQ ID NO: 536431 - DNA, 33 bp, Homo sapien
tcaagagccaaggaaggcattccctgggataaa

SEQ ID NO: 536432 - DNA, 33 bp, Homo sapien
tcaagagccaaggaagtcattccctgggataaa

SEQ ID NO: 536433 - DNA, 33 bp, Homo sapien
accttcctgcagaaaaatgatagcccaaattca

SEQ ID NO: 536434 - DNA, 33 bp, Homo sapien
accttcctgcagaaaattgatagcccaaattca

SEQ ID NO: 536435 - DNA, 33 bp, Homo sapien
ttatcatttacagtcacacgtcgcttaatgact

SEQ ID NO: 536436 - DNA, 33 bp, Homo sapien
ttatcatttacagtcatacgtcgcttaatgact

SEQ ID NO: 536437 - DNA, 33 bp, Homo sapien
tgggcttgccagaaataactctattaatcactt

SEQ ID NO: 536438 - DNA, 33 bp, Homo sapien
tgggcttgccagaaatgactctattaatcactt

SEQ ID NO: 536439 - DNA, 33 bp, Homo sapien
aagaggcaaatagatgcagcaaattgtgtggag

SEQ ID NO: 536440 - DNA, 33 bp, Homo sapien
aagaggcaaatagatggagcaaattgtgtggag

SEQ ID NO: 536441 - DNA, 33 bp, Homo sapien
gtgcttcggattgaaactttacattgtttttaa

SEQ ID NO: 536442 - DNA, 33 bp, Homo sapien
gtgcttcggattgaaattttacattgtttttaa

SEQ ID NO: 536443 - DNA, 33 bp, Homo sapien
aggtaagtgaacacccaggccataatctataat

SEQ ID NO: 536444 - DNA, 33 bp, Homo sapien
aggtaagtgaacacccgggccataatctataat

SEQ ID NO: 536445 - DNA, 33 bp, Homo sapien
ctgcgtatcttggaaaatattcttactgccagg

SEQ ID NO: 536446 - DNA, 33 bp, Homo sapien
ctgcgtatcttggaaagtattcttactgccagg

SEQ ID NO: 536447 - DNA, 33 bp, Homo sapien
cataattcttttcaaaggttttagcagtaagaa

SEQ ID NO: 536448 - DNA, 33 bp, Homo sapien
cataattcttttcaaatgttttagcagtaagaa

SEQ ID NO: 536449 - DNA, 33 bp, Homo sapien
taaaagataaatacaaaaacattggagctaaac

SEQ ID NO: 536450 - DNA, 33 bp, Homo sapien
taaaagataaatacaagaacattggagctaaac

SEQ ID NO: 536451 - DNA, 33 bp, Homo sapien; identical to SEQ ID NO: 536449

SEQ ID NO: 536452 - DNA, 33 bp, Homo sapien; identical to SEQ ID NO: 536450

SEQ ID NO: 536453 - DNA, 33 bp, Homo sapien
catatgcctgatattaaatgccagtatcaggtt

SEQ ID NO: 536454 - DNA, 33 bp, Homo sapien
catatgcctgatattagatgccagtatcaggtt

SEQ ID NO: 536455 - DNA, 33 bp, Homo sapien
atagcctttgaacagactccttactctacaata

SEQ ID NO: 536456 - DNA, 33 bp, Homo sapien
atagcctttgaacagattccttactctacaata

SEQ ID NO: 536457 - DNA, 33 bp, Homo sapien
acaaattcaagggacagggtacgtgggaatgca

SEQ ID NO: 536458 - DNA, 33 bp, Homo sapien
acaaattcaagggacatggtacgtgggaatgca

SEQ ID NO: 536459 - DNA, 33 bp, Homo sapien
tcagaagcactggaagcctgtggagtcccaatc

SEQ ID NO: 536460 - DNA, 33 bp, Homo sapien
tcagaagcactggaagtctgtggagtcccaatc

SEQ ID NO: 536461 - DNA, 33 bp, Homo sapien
gaatctctgccatgtagaggatgctaagcacat

SEQ ID NO: 536462 - DNA, 33 bp, Homo sapien
gaatctctgccatgtataggatgctaagcacat

SEQ ID NO: 536463 - DNA, 33 bp, Homo sapien
ggaacaattgttcacactatctaggccttggag

SEQ ID NO: 536464 - DNA, 33 bp, Homo sapien
ggaacaattgttcacattatctaggccttggag

SEQ ID NO: 536465 - DNA, 33 bp, Homo sapien
gcagactgttgccctacgactgaggcacaagcg

SEQ ID NO: 536466 - DNA, 33 bp, Homo sapien
gcagactgttgccctatgactgaggcacaagcg

SEQ ID NO: 536467 - DNA, 33 bp, Homo sapien
acccctgcaattctaaacatgggagagttcctc

SEQ ID NO: 536468 - DNA, 33 bp, Homo sapien
acccctgcaattctaaccatgggagagttcctc

SEQ ID NO: 536469 - DNA, 33 bp, Homo sapien
cctttatatgctcaaacggaagtatagtgttta

SEQ ID NO: 536470 - DNA, 33 bp, Homo sapien
cctttatatgctcaaatggaagtatagtgttta

SEQ ID NO: 536471 - DNA, 33 bp, Homo sapien
ccacatgacatgttcaagttaactgctggggtt

SEQ ID NO: 536472 - DNA, 33 bp, Homo sapien
ccacatgacatgttcacgttaactgctggggtt

SEQ ID NO: 536473 - DNA, 33 bp, Homo sapien
aagtgctacttcaaaacttgtgttcatctttat

SEQ ID NO: 536474 - DNA, 33 bp, Homo sapien
aagtgctacttcaaaagttgtgttcatctttat

SEQ ID NO: 536475 - DNA, 33 bp, Homo sapien
ttctaacttcagattgaagctcctaatatctac

SEQ ID NO: 536476 - DNA, 33 bp, Homo sapien
ttctaacttcagattgtagctcctaatatctac

SEQ ID NO: 536477 - DNA, 33 bp, Homo sapien
catggtttgcatctgaacattctgtggataatt

SEQ ID NO: 536478 - DNA, 33 bp, Homo sapien
catggtttgcatctgagcattctgtggataatt

SEQ ID NO: 536479 - DNA, 33 bp, Homo sapien
cacaggatgaagcgtacgtagatgataggccac

SEQ ID NO: 536480 - DNA, 33 bp, Homo sapien
cacaggatgaagcgtaggtagatgataggccac

SEQ ID NO: 536481 - DNA, 33 bp, Homo sapien
gagacagaaagtataacgatggttgccaggaat

SEQ ID NO: 536482 - DNA, 33 bp, Homo sapien
gagacagaaagtataatgatggttgccaggaat

SEQ ID NO: 536483 - DNA, 33 bp, Homo sapien
ctttcctattccttacagcctagcaaatgaggc

SEQ ID NO: 536484 - DNA, 33 bp, Homo sapien
ctttcctattccttactgcctagcaaatgaggc

SEQ ID NO: 536485 - DNA, 33 bp, Homo sapien
aaaatatgtggcaaacactgggcaatgccccac

SEQ ID NO: 536486 - DNA, 33 bp, Homo sapien
aaaatatgtggcaaacgctgggcaatgccccac

SEQ ID NO: 536487 - DNA, 33 bp, Homo sapien
ctctgacctaagagacacagatatttggatttt

SEQ ID NO: 536488 - DNA, 33 bp, Homo sapien
ctctgacctaagagacccagatatttggatttt

SEQ ID NO: 536489 - DNA, 33 bp, Homo sapien
catctgttttatgtaaatgcagtttttgtaaac

SEQ ID NO: 536490 - DNA, 33 bp, Homo sapien
catctgttttatgtaagtgcagtttttgtaaac

SEQ ID NO: 536491 - DNA, 33 bp, Homo sapien
ccagatttaaggagtcaaaaagtagattccatt

SEQ ID NO: 536492 - DNA, 33 bp, Homo sapien
ccagatttaaggagtcgaaaagtagattccatt

SEQ ID NO: 536493 - DNA, 33 bp, Homo sapien
agaaagttcacaagagaaatgtgaaaggtcctg

SEQ ID NO: 536494 - DNA, 33 bp, Homo sapien
agaaagttcacaagagcaatgtgaaaggtcctg

SEQ ID NO: 536495 - DNA, 33 bp, Homo sapien
tgctcatgtagtttaacatccagaaaaacagct

SEQ ID NO: 536496 - DNA, 33 bp, Homo sapien
tgctcatgtagtttaatatccagaaaaacagct

SEQ ID NO: 536497 - DNA, 33 bp, Homo sapien
caggggatagacaagacgacatgtaccaactct

SEQ ID NO: 536498 - DNA, 33 bp, Homo sapien
caggggatagacaagatgacatgtaccaactct

SEQ ID NO: 536499 - DNA, 33 bp, Homo sapien
aaaatgctttatcagactcacctatggcatgcc

SEQ ID NO: 536500 - DNA, 33 bp, Homo sapien
aaaatgctttatcagagtcacctatggcatgcc

SEQ ID NO: 536501 - DNA, 33 bp, Homo sapien
catctgtgtatcacaggagaaaaaatgtcaaaa

SEQ ID NO: 536502 - DNA, 33 bp, Homo sapien
catctgtgtatcacagtagaaaaaatgtcaaaa

SEQ ID NO: 536503 - DNA, 33 bp, Homo sapien
ataaagataggctgctaaaagtggtagacagtt

SEQ ID NO: 536504 - DNA, 33 bp, Homo sapien
ataaagataggctgctgaaagtggtagacagtt

SEQ ID NO: 536505 - DNA, 33 bp, Homo sapien
ctatggtctgtaataacatatggtatagctgaa

SEQ ID NO: 536506 - DNA, 33 bp, Homo sapien
ctatggtctgtaataatatatggtatagctgaa

SEQ ID NO: 536507 - DNA, 33 bp, Homo sapien
gttgactaaagtgtcacagcttttagtgaggta

SEQ ID NO: 536508 - DNA, 33 bp, Homo sapien
gttgactaaagtgtcatagcttttagtgaggta

SEQ ID NO: 536509 - DNA, 33 bp, Homo sapien
tgctaaatgggattgacatataaaagtgagttc

SEQ ID NO: 536510 - DNA, 33 bp, Homo sapien
tgctaaatgggattgatatataaaagtgagttc

SEQ ID NO: 536511 - DNA, 33 bp, Homo sapien
ctaggagttacaatacagctactagtgaatctt

SEQ ID NO: 536512 - DNA, 33 bp, Homo sapien
ctaggagttacaatacggctactagtgaatctt

SEQ ID NO: 536513 - DNA, 33 bp, Homo sapien
ctagcttcctgagtagacaccaatgccacagta

SEQ ID NO: 536514 - DNA, 33 bp, Homo sapien
ctagcttcctgagtagtcaccaatgccacagta

SEQ ID NO: 536515 - DNA, 33 bp, Homo sapien
agccaagattcagcccaagagaagattgcaaag

SEQ ID NO: 536516 - DNA, 33 bp, Homo sapien
agccaagattcagcccgagagaagattgcaaag

SEQ ID NO: 536517 - DNA, 33 bp, Homo sapien
aaaaactgagctcaaagggcagaccaaacggtc

SEQ ID NO: 536518 - DNA, 33 bp, Homo sapien
aaaaactgagctcaaatggcagaccaaacggtc

SEQ ID NO: 536519 - DNA, 33 bp, Homo sapien
ccagtaactttctccaaatagtcttctgtaatc

SEQ ID NO: 536520 - DNA, 33 bp, Homo sapien
ccagtaactttctccagatagtcttctgtaatc

SEQ ID NO: 536521 - DNA, 33 bp, Homo sapien
tttcccatttctgactcagatgactttcttaaa

SEQ ID NO: 536522 - DNA, 33 bp, Homo sapien
tttcccatttctgacttagatgactttcttaaa

SEQ ID NO: 536523 - DNA, 33 bp, Homo sapien
gtgtgtatacttgaaccgagccatgaatcaatc

SEQ ID NO: 536524 - DNA, 33 bp, Homo sapien
gtgtgtatacttgaactgagccatgaatcaatc

SEQ ID NO: 536525 - DNA, 33 bp, Homo sapien
tgtctgtctctctcataagagtgtaagccactt

SEQ ID NO: 536526 - DNA, 33 bp, Homo sapien
tgtctgtctctctcattagagtgtaagccactt

SEQ ID NO: 536527 - DNA, 33 bp, Homo sapien
gtcacggtggtggtaaactactccaaatactgt

SEQ ID NO: 536528 - DNA, 33 bp, Homo sapien
gtcacggtggtggtaacctactccaaatactgt

SEQ ID NO: 536529 - DNA, 33 bp, Homo sapien
aaatttctcaaagttaaagaccatgaagggcat

SEQ ID NO: 536530 - DNA, 33 bp, Homo sapien
aaatttctcaaagttagagaccatgaagggcat

SEQ ID NO: 536531 - DNA, 33 bp, Homo sapien
agaacagacaggaatgaatactccaaatgtacc

SEQ ID NO: 536532 - DNA, 33 bp, Homo sapien
agaacagacaggaatgcatactccaaatgtacc

SEQ ID NO: 536533 - DNA, 33 bp, Homo sapien
acagattttaccagtaacgttttctcttgggat

SEQ ID NO: 536534 - DNA, 33 bp, Homo sapien
acagattttaccagtaccgttttctcttgggat

SEQ ID NO: 536535 - DNA, 33 bp, Homo sapien
taaacctcttgagaacagtatctgagtctctgt

SEQ ID NO: 536536 - DNA, 33 bp, Homo sapien
taaacctcttgagaacggtatctgagtctctgt

SEQ ID NO: 536537 - DNA, 33 bp, Homo sapien
gtcagcagtttgggctaaagggtactcattcaa

SEQ ID NO: 536538 - DNA, 33 bp, Homo sapien
gtcagcagtttgggcttaagggtactcattcaa

SEQ ID NO: 536539 - DNA, 33 bp, Homo sapien
atttggctagtaggagccccttggagctggctc

SEQ ID NO: 536540 - DNA, 33 bp, Homo sapien
atttggctagtaggagtcccttggagctggctc

SEQ ID NO: 536541 - DNA, 33 bp, Homo sapien
tcatggattcttattccatctgttactaccatt

SEQ ID NO: 536542 - DNA, 33 bp, Homo sapien
tcatggattcttattctatctgttactaccatt

SEQ ID NO: 536543 - DNA, 33 bp, Homo sapien
gtggttttttcctccacggttcatacatcaaaa

SEQ ID NO: 536544 - DNA, 33 bp, Homo sapien
gtggttttttcctccatggttcatacatcaaaa

SEQ ID NO: 536545 - DNA, 33 bp, Homo sapien
agtgatgtgtttgcacacttaaatggctactct

SEQ ID NO: 536546 - DNA, 33 bp, Homo sapien
agtgatgtgtttgcactcttaaatggctactct

SEQ ID NO: 536547 - DNA, 33 bp, Homo sapien
aacaattaaatgttcaactgtgtagtactcatg

SEQ ID NO: 536548 - DNA, 33 bp, Homo sapien
aacaattaaatgttcagctgtgtagtactcatg

SEQ ID NO: 536549 - DNA, 33 bp, Homo sapien
ttgaataggtcggatacgaacatagccatgaaa

SEQ ID NO: 536550 - DNA, 33 bp, Homo sapien
ttgaataggtcggatatgaacatagccatgaaa

SEQ ID NO: 536551 - DNA, 33 bp, Homo sapien
cttttatgagggttatcaatcataggaatgtag

SEQ ID NO: 536552 - DNA, 33 bp, Homo sapien
cttttatgagggttatgaatcataggaatgtag

SEQ ID NO: 536553 - DNA, 33 bp, Homo sapien
cagcaaaaaaggccaaggattagttcataagat

SEQ ID NO: 536554 - DNA, 33 bp, Homo sapien
cagcaaaaaaggccaatgattagttcataagat

SEQ ID NO: 536555 - DNA, 33 bp, Homo sapien
gtttgggtgtagaaccaatgggttttgtgtaga

SEQ ID NO: 536556 - DNA, 33 bp, Homo sapien
gtttgggtgtagaacctatgggttttgtgtaga

SEQ ID NO: 536557 - DNA, 33 bp, Homo sapien
acctggatagctttagaagcaatggcaaaagat

SEQ ID NO: 536558 - DNA, 33 bp, Homo sapien
acctggatagctttagcagcaatggcaaaagat

SEQ ID NO: 536559 - DNA, 33 bp, Homo sapien
tttagtaatatttccactcacttctcactcaaa

SEQ ID NO: 536560 - DNA, 33 bp, Homo sapien
tttagtaatatttccattcacttctcactcaaa

SEQ ID NO: 536561 - DNA, 33 bp, Homo sapien
atattttaggaaggacaataggtgagaaggcct

SEQ ID NO: 536562 - DNA, 33 bp, Homo sapien
atattttaggaaggacgataggtgagaaggcct

SEQ ID NO: 536563 - DNA, 33 bp, Homo sapien
caatttaaaatgcttacgagtttgatctataga

SEQ ID NO: 536564 - DNA, 33 bp, Homo sapien
caatttaaaatgcttatgagtttgatctataga

SEQ ID NO: 536565 - DNA, 33 bp, Homo sapien
actgcttggatgggcacaatttgaacatatgct

SEQ ID NO: 536566 - DNA, 33 bp, Homo sapien
actgcttggatgggcagaatttgaacatatgct

SEQ ID NO: 536567 - DNA, 33 bp, Homo sapien
tttcataagaacagctcagaatacatttagtta

SEQ ID NO: 536568 - DNA, 33 bp, Homo sapien
tttcataagaacagctgagaatacatttagtta

SEQ ID NO: 536569 - DNA, 33 bp, Homo sapien
tcaaattacctcccagacattgtacctgggagg

SEQ ID NO: 536570 - DNA, 33 bp, Homo sapien
tcaaattacctcccaggcattgtacctgggagg

SEQ ID NO: 536571 - DNA, 33 bp, Homo sapien
gccccaattaataaacagtagacatttagcata

SEQ ID NO: 536572 - DNA, 33 bp, Homo sapien
gccccaattaataaaccgtagacatttagcata

SEQ ID NO: 536573 - DNA, 33 bp, Homo sapien
cttgagttggaatggccctgctctaaaaggtaa

SEQ ID NO: 536574 - DNA, 33 bp, Homo sapien
cttgagttggaatggctctgctctaaaaggtaa

SEQ ID NO: 536575 - DNA, 33 bp, Homo sapien
ttagctgaagtggccaaagagttattagcaaga

SEQ ID NO: 536576 - DNA, 33 bp, Homo sapien
ttagctgaagtggccacagagttattagcaaga

SEQ ID NO: 536577 - DNA, 33 bp, Homo sapien
tctgaattcatactaccgccatgagtgtcataa

SEQ ID NO: 536578 - DNA, 33 bp, Homo sapien
tctgaattcatactactgccatgagtgtcataa

SEQ ID NO: 536579 - DNA, 33 bp, Homo sapien
atgcctgccatacatgaaaaactctaatgatcg

SEQ ID NO: 536580 - DNA, 33 bp, Homo sapien
atgcctgccatacatggaaaactctaatgatcg

SEQ ID NO: 536581 - DNA, 33 bp, Homo sapien
tgttattattattactcaagagttgcacttttc

SEQ ID NO: 536582 - DNA, 33 bp, Homo sapien
tgttattattattactgaagagttgcacttttc

SEQ ID NO: 536583 - DNA, 33 bp, Homo sapien
ctaagccaacagtcagcatctattgccaggtat

SEQ ID NO: 536584 - DNA, 33 bp, Homo sapien
ctaagccaacagtcagtatctattgccaggtat

SEQ ID NO: 536585 - DNA, 33 bp, Homo sapien
ataagtagccagtcaacataacttttaggatct

SEQ ID NO: 536586 - DNA, 33 bp, Homo sapien
ataagtagccagtcaatataacttttaggatct

SEQ ID NO: 536587 - DNA, 33 bp, Homo sapien
attgattatcttcccaactcaagcgtgtataac

SEQ ID NO: 536588 - DNA, 33 bp, Homo sapien
attgattatcttcccatctcaagcgtgtataac

SEQ ID NO: 536589 - DNA, 33 bp, Homo sapien
attggaagtttttgtacggctaggcactggaat

SEQ ID NO: 536590 - DNA, 33 bp, Homo sapien
attggaagtttttgtatggctaggcactggaat

SEQ ID NO: 536591 - DNA, 33 bp, Homo sapien
agctacagctaacacaataaccaatagggaact

SEQ ID NO: 536592 - DNA, 33 bp, Homo sapien
agctacagctaacacagtaaccaatagggaact

SEQ ID NO: 536593 - DNA, 33 bp, Homo sapien
tgatatcactgttgtaagctaagataacttcaa

SEQ ID NO: 536594 - DNA, 33 bp, Homo sapien
tgatatcactgttgtaggctaagataacttcaa

SEQ ID NO: 536595 - DNA, 33 bp, Homo sapien
ttcaaatgaggtgaaaagtagtgaggaatccag

SEQ ID NO: 536596 - DNA, 33 bp, Homo sapien
ttcaaatgaggtgaaaggtagtgaggaatccag

SEQ ID NO: 536597 - DNA, 33 bp, Homo sapien
gcttaagtgacttccacgttggtgagatatcat

SEQ ID NO: 536598 - DNA, 33 bp, Homo sapien
gcttaagtgacttccatgttggtgagatatcat

SEQ ID NO: 536599 - DNA, 33 bp, Homo sapien
cttacatatgcaatagaccatacaaactatctc

SEQ ID NO: 536600 - DNA, 33 bp, Homo sapien
cttacatatgcaataggccatacaaactatctc

SEQ ID NO: 536601 - DNA, 33 bp, Homo sapien
taccttcacatcaatacctcaatgctcatttta

SEQ ID NO: 536602 - DNA, 33 bp, Homo sapien
taccttcacatcaatatctcaatgctcatttta

SEQ ID NO: 536603 - DNA, 33 bp, Homo sapien
tctgctgcacagctcacatacagaacctctact

SEQ ID NO: 536604 - DNA, 33 bp, Homo sapien
tctgctgcacagctcagatacagaacctctact

SEQ ID NO: 536605 - DNA, 33 bp, Homo sapien
atagcataaaaattaaatgttgttggcagttcc

SEQ ID NO: 536606 - DNA, 33 bp, Homo sapien
atagcataaaaattaagtgttgttggcagttcc

SEQ ID NO: 536607 - DNA, 33 bp, Homo sapien
cttgccaaactttttacattttgatgtagacaa

SEQ ID NO: 536608 - DNA, 33 bp, Homo sapien
cttgccaaactttttatattttgatgtagacaa

SEQ ID NO: 536609 - DNA, 33 bp, Homo sapien
tttgcttcaaattttgaaagaaaaatcaagtca

SEQ ID NO: 536610 - DNA, 33 bp, Homo sapien
tttgcttcaaattttggaagaaaaatcaagtca

SEQ ID NO: 536611 - DNA, 33 bp, Homo sapien
tttttttgtaacttcacggatgaccacagagaa

SEQ ID NO: 536612 - DNA, 33 bp, Homo sapien
tttttttgtaacttcagggatgaccacagagaa

SEQ ID NO: 536613 - DNA, 33 bp, Homo sapien
gttgttatgggaagtcagacgaagggctcagag

SEQ ID NO: 536614 - DNA, 33 bp, Homo sapien
gttgttatgggaagtcggacgaagggctcagag

SEQ ID NO: 536615 - DNA, 33 bp, Homo sapien
cattcttctgtgtagacgaacttctaggagtgt

SEQ ID NO: 536616 - DNA, 33 bp, Homo sapien
cattcttctgtgtagatgaacttctaggagtgt

SEQ ID NO: 536617 - DNA, 33 bp, Homo sapien
actgtaactacttggaaagcaaccttcgcagcc

SEQ ID NO: 536618 - DNA, 33 bp, Homo sapien
actgtaactacttggagagcaaccttcgcagcc

SEQ ID NO: 536619 - DNA, 33 bp, Homo sapien
tagggcttcaccatagacattactggggatgca

SEQ ID NO: 536620 - DNA, 33 bp, Homo sapien
tagggcttcaccataggcattactggggatgca

SEQ ID NO: 536621 - DNA, 33 bp, Homo sapien
cccagattattagcaactcatgaaagagatcag

SEQ ID NO: 536622 - DNA, 33 bp, Homo sapien
cccagattattagcaattcatgaaagagatcag

SEQ ID NO: 536623 - DNA, 33 bp, Homo sapien
gtgaaagatgtgaccacagaaaagcagtgctga

SEQ ID NO: 536624 - DNA, 33 bp, Homo sapien
gtgaaagatgtgaccatagaaaagcagtgctga

SEQ ID NO: 536625 - DNA, 33 bp, Homo sapien
taactagaggttgcacagcagaggtttgatcca

SEQ ID NO: 536626 - DNA, 33 bp, Homo sapien
taactagaggttgcacggcagaggtttgatcca

SEQ ID NO: 536627 - DNA, 33 bp, Homo sapien
taccctagtcaccaaacagaaatcctgcacatt

SEQ ID NO: 536628 - DNA, 33 bp, Homo sapien
taccctagtcaccaaatagaaatcctgcacatt

SEQ ID NO: 536629 - DNA, 33 bp, Homo sapien
gttggttggttggtaaatgaattgactgaaagt

SEQ ID NO: 536630 - DNA, 33 bp, Homo sapien
gttggttggttggtaactgaattgactgaaagt

SEQ ID NO: 536631 - DNA, 33 bp, Homo sapien
cctgttttggataaagaattaagttcagagaag

SEQ ID NO: 536632 - DNA, 33 bp, Homo sapien
cctgttttggataaaggattaagttcagagaag

SEQ ID NO: 536633 - DNA, 33 bp, Homo sapien
taactcaaactaaacaacgaggggcaatcaaat

SEQ ID NO: 536634 - DNA, 33 bp, Homo sapien
taactcaaactaaacaccgaggggcaatcaaat

SEQ ID NO: 536635 - DNA, 33 bp, Homo sapien
gattaaaaatctttcaaaacagaccaaacacaa

SEQ ID NO: 536636 - DNA, 33 bp, Homo sapien
gattaaaaatctttcagaacagaccaaacacaa

SEQ ID NO: 536637 - DNA, 33 bp, Homo sapien
tattaatagacactcaacctaatgatcagtgtg

SEQ ID NO: 536638 - DNA, 33 bp, Homo sapien
tattaatagacactcagcctaatgatcagtgtg

SEQ ID NO: 536639 - DNA, 33 bp, Homo sapien
tgaagctggaaggataacttatttctggggaag

SEQ ID NO: 536640 - DNA, 33 bp, Homo sapien
tgaagctggaaggataccttatttctggggaag

SEQ ID NO: 536641 - DNA, 33 bp, Homo sapien
aaaggaaaacactcagaatgggttgggaacatc

SEQ ID NO: 536642 - DNA, 33 bp, Homo sapien
aaaggaaaacactcaggatgggttgggaacatc

SEQ ID NO: 536643 - DNA, 33 bp, Homo sapien
taaacacttaatgttacggtgatttttgctttc

SEQ ID NO: 536644 - DNA, 33 bp, Homo sapien
taaacacttaatgttatggtgatttttgctttc

SEQ ID NO: 536645 - DNA, 33 bp, Homo sapien
atgtaacaagatggcaaatactttttcaagcat

SEQ ID NO: 536646 - DNA, 33 bp, Homo sapien
atgtaacaagatggcacatactttttcaagcat

SEQ ID NO: 536647 - DNA, 33 bp, Homo sapien
agccaaacatttatagaaccaaaatgacttagt

SEQ ID NO: 536648 - DNA, 33 bp, Homo sapien
agccaaacatttataggaccaaaatgacttagt

SEQ ID NO: 536649 - DNA, 33 bp, Homo sapien
attggtgtttaacatgaatactgatggtctttt

SEQ ID NO: 536650 - DNA, 33 bp, Homo sapien
attggtgtttaacatggatactgatggtctttt

SEQ ID NO: 536651 - DNA, 33 bp, Homo sapien
atccctgatcattcaaagcattgcttcttcaca

SEQ ID NO: 536652 - DNA, 33 bp, Homo sapien
atccctgatcattcaaggcattgcttcttcaca

SEQ ID NO: 536653 - DNA, 33 bp, Homo sapien
tgatgataagaaatgccatagctagcttgttgg

SEQ ID NO: 536654 - DNA, 33 bp, Homo sapien
tgatgataagaaatgcgatagctagcttgttgg

SEQ ID NO: 536655 - DNA, 33 bp, Homo sapien
ttgctttcaaaaatcaataaggtccattccttg

SEQ ID NO: 536656 - DNA, 33 bp, Homo sapien
ttgctttcaaaaatcagtaaggtccattccttg

SEQ ID NO: 536657 - DNA, 33 bp, Homo sapien
tgagttggggatgtcacgctacaggagtgattt

SEQ ID NO: 536658 - DNA, 33 bp, Homo sapien
tgagttggggatgtcatgctacaggagtgattt

SEQ ID NO: 536659 - DNA, 33 bp, Homo sapien
agtggacagtctagccagaatacatatttcaca

SEQ ID NO: 536660 - DNA, 33 bp, Homo sapien
agtggacagtctagccggaatacatatttcaca

SEQ ID NO: 536661 - DNA, 33 bp, Homo sapien
aactgcttataccttggacacataaattaatat

SEQ ID NO: 536662 - DNA, 33 bp, Homo sapien
aactgcttataccttgtacacataaattaatat

SEQ ID NO: 536663 - DNA, 33 bp, Homo sapien
gagctgttaaaatgaaaaagcaaaatctgctca

SEQ ID NO: 536664 - DNA, 33 bp, Homo sapien
gagctgttaaaatgaacaagcaaaatctgctca

SEQ ID NO: 536665 - DNA, 33 bp, Homo sapien
ttgtgagaggacttgaagaagacaacataatag

SEQ ID NO: 536666 - DNA, 33 bp, Homo sapien
ttgtgagaggacttgaggaagacaacataatag

SEQ ID NO: 536667 - DNA, 33 bp, Homo sapien
tagatggtatctcactaagactcttcacctcct

SEQ ID NO: 536668 - DNA, 33 bp, Homo sapien
tagatggtatctcactgagactcttcacctcct

SEQ ID NO: 536669 - DNA, 33 bp, Homo sapien
ctactagaactacaagaagcagtactaatcctg

SEQ ID NO: 536670 - DNA, 33 bp, Homo sapien
ctactagaactacaaggagcagtactaatcctg

SEQ ID NO: 536671 - DNA, 33 bp, Homo sapien
ctctgtaattcatgtccaaatttaatccccagt

SEQ ID NO: 536672 - DNA, 33 bp, Homo sapien
ctctgtaattcatgtcgaaatttaatccccagt

SEQ ID NO: 536673 - DNA, 33 bp, Homo sapien
gatttaatcccctccacactacataaaaagacc

SEQ ID NO: 536674 - DNA, 33 bp, Homo sapien
gatttaatcccctccatactacataaaaagacc

SEQ ID NO: 536675 - DNA, 33 bp, Homo sapien
gcattacacttcttccgatgatgagctcaccaa

SEQ ID NO: 536676 - DNA, 33 bp, Homo sapien
gcattacacttcttcctatgatgagctcaccaa

SEQ ID NO: 536677 - DNA, 33 bp, Homo sapien
tcaggtttaaggaacaatgaaaggccttttcct

SEQ ID NO: 536678 - DNA, 33 bp, Homo sapien
tcaggtttaaggaacattgaaaggccttttcct

SEQ ID NO: 536679 - DNA, 33 bp, Homo sapien
tgctatattttagttacgtcatttctgagcttt

SEQ ID NO: 536680 - DNA, 33 bp, Homo sapien
tgctatattttagttatgtcatttctgagcttt

SEQ ID NO: 536681 - DNA, 33 bp, Homo sapien
ggagttggtattgatggaaaatgtttaaagcca

SEQ ID NO: 536682 - DNA, 33 bp, Homo sapien
ggagttggtattgatgtaaaatgtttaaagcca

SEQ ID NO: 536683 - DNA, 33 bp, Homo sapien
aagtccaagaactcaacaggctcagaattgtct

SEQ ID NO: 536684 - DNA, 33 bp, Homo sapien
aagtccaagaactcaagaggctcagaattgtct

SEQ ID NO: 536685 - DNA, 33 bp, Homo sapien
taggtttgtcttacttaaaaatgcacactctta

SEQ ID NO: 536686 - DNA, 33 bp, Homo sapien
taggtttgtcttacttgaaaatgcacactctta

SEQ ID NO: 536687 - DNA, 33 bp, Homo sapien
tgctattctagtttgccattctgccttccataa

SEQ ID NO: 536688 - DNA, 33 bp, Homo sapien
tgctattctagtttgctattctgccttccataa

SEQ ID NO: 536689 - DNA, 33 bp, Homo sapien
tatatagatgctgcaaaagacttgtgcgagtga

SEQ ID NO: 536690 - DNA, 33 bp, Homo sapien
tatatagatgctgcaacagacttgtgcgagtga

SEQ ID NO: 536691 - DNA, 33 bp, Homo sapien
tgacaggactttgataactagtcaagaagttat

SEQ ID NO: 536692 - DNA, 33 bp, Homo sapien
tgacaggactttgatagctagtcaagaagttat

SEQ ID NO: 536693 - DNA, 33 bp, Homo sapien
tatttctgcaataataaacttaagcagcatcat

SEQ ID NO: 536694 - DNA, 33 bp, Homo sapien
tatttctgcaataatacacttaagcagcatcat

SEQ ID NO: 536695 - DNA, 33 bp, Homo sapien
ggctacaagaattatacatgatgtcgcagatgt

SEQ ID NO: 536696 - DNA, 33 bp, Homo sapien
ggctacaagaattatatatgatgtcgcagatgt

SEQ ID NO: 536697 - DNA, 33 bp, Homo sapien
ttggctaccatcattccaaagtcaagttggaaa

SEQ ID NO: 536698 - DNA, 33 bp, Homo sapien
ttggctaccatcattctaaagtcaagttggaaa

SEQ ID NO: 536699 - DNA, 33 bp, Homo sapien
ccactgtatcattgcccccagattataaaattc

SEQ ID NO: 536700 - DNA, 33 bp, Homo sapien
ccactgtatcattgcctccagattataaaattc

SEQ ID NO: 536701 - DNA, 33 bp, Homo sapien
gtctccaaagcaataccatactgatgtaactgt

SEQ ID NO: 536702 - DNA, 33 bp, Homo sapien
gtctccaaagcaatactatactgatgtaactgt

SEQ ID NO: 536703 - DNA, 33 bp, Homo sapien
gcacacagtcaaataacaagaatactcatacat

SEQ ID NO: 536704 - DNA, 33 bp, Homo sapien
gcacacagtcaaataataagaatactcatacat

SEQ ID NO: 536705 - DNA, 33 bp, Homo sapien
tcaaatatgcctattaggttactgagatatgaa

SEQ ID NO: 536706 - DNA, 33 bp, Homo sapien
tcaaatatgcctattatgttactgagatatgaa

SEQ ID NO: 536707 - DNA, 33 bp, Homo sapien
acttcggtatttctgtcaagatttcaaactttt

SEQ ID NO: 536708 - DNA, 33 bp, Homo sapien
acttcggtatttctgtgaagatttcaaactttt

SEQ ID NO: 536709 - DNA, 33 bp, Homo sapien
gagacacaagaatactaaaatgtagccaattaa

SEQ ID NO: 536710 - DNA, 33 bp, Homo sapien
gagacacaagaatactgaaatgtagccaattaa

SEQ ID NO: 536711 - DNA, 33 bp, Homo sapien
tttttaggaagacatacaccccccacagggaga

SEQ ID NO: 536712 - DNA, 33 bp, Homo sapien
tttttaggaagacatataccccccacagggaga

SEQ ID NO: 536713 - DNA, 33 bp, Homo sapien
atattaaattgcttacggcagataccacaacac

SEQ ID NO: 536714 - DNA, 33 bp, Homo sapien
atattaaattgcttactgcagataccacaacac

SEQ ID NO: 536715 - DNA, 33 bp, Homo sapien
tgagaccagggctagaacatcaccagaaactgt

SEQ ID NO: 536716 - DNA, 33 bp, Homo sapien
tgagaccagggctagagcatcaccagaaactgt

SEQ ID NO: 536717 - DNA, 33 bp, Homo sapien
tctcaatgagcatttccacaacccgataccagc

SEQ ID NO: 536718 - DNA, 33 bp, Homo sapien
tctcaatgagcatttctacaacccgataccagc

SEQ ID NO: 536719 - DNA, 33 bp, Homo sapien
ttccccgtgccctatacgtccacctttcttact

SEQ ID NO: 536720 - DNA, 33 bp, Homo sapien
ttccccgtgccctatatgtccacctttcttact

SEQ ID NO: 536721 - DNA, 33 bp, Homo sapien
ctgaaatgctttcctaccacattgttcccatat

SEQ ID NO: 536722 - DNA, 33 bp, Homo sapien
ctgaaatgctttcctagcacattgttcccatat

SEQ ID NO: 536723 - DNA, 33 bp, Homo sapien
agctatgatctttagccatataaataaaaaaag

SEQ ID NO: 536724 - DNA, 33 bp, Homo sapien
agctatgatctttagcgatataaataaaaaaag

SEQ ID NO: 536725 - DNA, 33 bp, Homo sapien
tccctaacactggagaccattgatttagaacat

SEQ ID NO: 536726 - DNA, 33 bp, Homo sapien
tccctaacactggagatcattgatttagaacat

SEQ ID NO: 536727 - DNA, 33 bp, Homo sapien
taactgttaaatcctccgacattcttatatcct

SEQ ID NO: 536728 - DNA, 33 bp, Homo sapien
taactgttaaatcctctgacattcttatatcct

SEQ ID NO: 536729 - DNA, 33 bp, Homo sapien
ttcagatgaaagaatcaattgacggtgtcaaat

SEQ ID NO: 536730 - DNA, 33 bp, Homo sapien
ttcagatgaaagaatccattgacggtgtcaaat

SEQ ID NO: 536731 - DNA, 33 bp, Homo sapien
gactttccttgttacaaagctggtgtctgtgag

SEQ ID NO: 536732 - DNA, 33 bp, Homo sapien
gactttccttgttacagagctggtgtctgtgag

SEQ ID NO: 536733 - DNA, 33 bp, Homo sapien
acttgctctaggaagacattatggtagatgtag

SEQ ID NO: 536734 - DNA, 33 bp, Homo sapien
acttgctctaggaagatattatggtagatgtag

SEQ ID NO: 536735 - DNA, 33 bp, Homo sapien
acaagatatttagacacactcacagtaccagta

SEQ ID NO: 536736 - DNA, 33 bp, Homo sapien
acaagatatttagacatactcacagtaccagta

SEQ ID NO: 536737 - DNA, 33 bp, Homo sapien
tgaataatattccatacaaggaccttctcacaa

SEQ ID NO: 536738 - DNA, 33 bp, Homo sapien
tgaataatattccatagaaggaccttctcacaa

SEQ ID NO: 536739 - DNA, 33 bp, Homo sapien
tcttaatacattccataatgctaaacaactttc

SEQ ID NO: 536740 - DNA, 33 bp, Homo sapien
tcttaatacattccatgatgctaaacaactttc

SEQ ID NO: 536741 - DNA, 33 bp, Homo sapien
acataaaggaatcaaactctttcaaaatgttgt

SEQ ID NO: 536742 - DNA, 33 bp, Homo sapien
acataaaggaatcaaattctttcaaaatgttgt

SEQ ID NO: 536743 - DNA, 33 bp, Homo sapien
tatggtttgcattaagacactagtacctgctga

SEQ ID NO: 536744 - DNA, 33 bp, Homo sapien
tatggtttgcattaagtcactagtacctgctga

SEQ ID NO: 536745 - DNA, 33 bp, Homo sapien
gatttggactgtggcacctcttaagaaaaaaat

SEQ ID NO: 536746 - DNA, 33 bp, Homo sapien
gatttggactgtggcatctcttaagaaaaaaat

SEQ ID NO: 536747 - DNA, 33 bp, Homo sapien
acttgctataggatacacacacccaatttaata

SEQ ID NO: 536748 - DNA, 33 bp, Homo sapien
acttgctataggatacgcacacccaatttaata

SEQ ID NO: 536749 - DNA, 33 bp, Homo sapien
tttgtatcaatggttgcatttaaagaggtctta

SEQ ID NO: 536750 - DNA, 33 bp, Homo sapien
tttgtatcaatggttgtatttaaagaggtctta

SEQ ID NO: 536751 - DNA, 33 bp, Homo sapien
taatcaaaggtaattcaagttcacatttttgta

SEQ ID NO: 536752 - DNA, 33 bp, Homo sapien
taatcaaaggtaattcgagttcacatttttgta

SEQ ID NO: 536753 - DNA, 33 bp, Homo sapien
tctaaaatgcttttggcagatggaggatacaaa

SEQ ID NO: 536754 - DNA, 33 bp, Homo sapien
tctaaaatgcttttggtagatggaggatacaaa

SEQ ID NO: 536755 - DNA, 33 bp, Homo sapien
tatttaaaaatttataacgatacctggtaagaa

SEQ ID NO: 536756 - DNA, 33 bp, Homo sapien
tatttaaaaatttatagcgatacctggtaagaa

SEQ ID NO: 536757 - DNA, 33 bp, Homo sapien
tccatgattttcaaaaatatctgatacaattca

SEQ ID NO: 536758 - DNA, 33 bp, Homo sapien
tccatgattttcaaaattatctgatacaattca

SEQ ID NO: 536759 - DNA, 33 bp, Homo sapien
tttcagtggctagatacgccttgactgtgagct

SEQ ID NO: 536760 - DNA, 33 bp, Homo sapien
tttcagtggctagatatgccttgactgtgagct

SEQ ID NO: 536761 - DNA, 33 bp, Homo sapien
tttaaaaaattgctgtaaaataaggaagaaata

SEQ ID NO: 536762 - DNA, 33 bp, Homo sapien
tttaaaaaattgctgtgaaataaggaagaaata

SEQ ID NO: 536763 - DNA, 33 bp, Homo sapien
agcccatgcttacatacctggctctatctcacc

SEQ ID NO: 536764 - DNA, 33 bp, Homo sapien
agcccatgcttacatatctggctctatctcacc

SEQ ID NO: 536765 - DNA, 33 bp, Homo sapien
tatatgtgtaatagaccatcagtgaaatttttc

SEQ ID NO: 536766 - DNA, 33 bp, Homo sapien
tatatgtgtaatagactatcagtgaaatttttc

SEQ ID NO: 536767 - DNA, 33 bp, Homo sapien
gactggattgtatttgaaaagcctacctctagg

SEQ ID NO: 536768 - DNA, 33 bp, Homo sapien
gactggattgtatttggaaagcctacctctagg

SEQ ID NO: 536769 - DNA, 33 bp, Homo sapien
gtgttcttgtatcaggcaaagcctcctccccac

SEQ ID NO: 536770 - DNA, 33 bp, Homo sapien
gtgttcttgtatcaggtaaagcctcctccccac

SEQ ID NO: 536771 - DNA, 33 bp, Homo sapien
ttgagctttgaaaaaacatgaaattatgagatt

SEQ ID NO: 536772 - DNA, 33 bp, Homo sapien
ttgagctttgaaaaaatatgaaattatgagatt

SEQ ID NO: 536773 - DNA, 33 bp, Homo sapien
atagtcagacgccctaactgtaaagtcaccttt

SEQ ID NO: 536774 - DNA, 33 bp, Homo sapien
atagtcagacgccctagctgtaaagtcaccttt

SEQ ID NO: 536775 - DNA, 33 bp, Homo sapien
aatgagttatatacacacaatcttggctagtct

SEQ ID NO: 536776 - DNA, 33 bp, Homo sapien
aatgagttatatacacgcaatcttggctagtct

SEQ ID NO: 536777 - DNA, 33 bp, Homo sapien
tgtcagctgagaaggacgaaaggtttcaaatta

SEQ ID NO: 536778 - DNA, 33 bp, Homo sapien
tgtcagctgagaaggatgaaaggtttcaaatta

SEQ ID NO: 536779 - DNA, 33 bp, Homo sapien
accaggaaagagtggaacaataaagtgaccagg

SEQ ID NO: 536780 - DNA, 33 bp, Homo sapien
accaggaaagagtggaccaataaagtgaccagg

SEQ ID NO: 536781 - DNA, 33 bp, Homo sapien
tactgttgagtaccaaattcttatttaaaaagc

SEQ ID NO: 536782 - DNA, 33 bp, Homo sapien
tactgttgagtaccaagttcttatttaaaaagc

SEQ ID NO: 536783 - DNA, 33 bp, Homo sapien
tttaattttattgcacaaatatgctatggtgac

SEQ ID NO: 536784 - DNA, 33 bp, Homo sapien
tttaattttattgcactaatatgctatggtgac

SEQ ID NO: 536785 - DNA, 33 bp, Homo sapien
aagtcagcaaactgcaaaaggcaatttgtaagg

SEQ ID NO: 536786 - DNA, 33 bp, Homo sapien
aagtcagcaaactgcagaaggcaatttgtaagg

SEQ ID NO: 536787 - DNA, 33 bp, Homo sapien
cattctggcttttaaagtcatcactattcaagc

SEQ ID NO: 536788 - DNA, 33 bp, Homo sapien
cattctggcttttaaattcatcactattcaagc

SEQ ID NO: 536789 - DNA, 33 bp, Homo sapien
atcaagctccaagtaacgctgatcctgtccatc

SEQ ID NO: 536790 - DNA, 33 bp, Homo sapien
atcaagctccaagtaatgctgatcctgtccatc

SEQ ID NO: 536791 - DNA, 33 bp, Homo sapien
taaagttacatactcacgatcaaatttctccaa

SEQ ID NO: 536792 - DNA, 33 bp, Homo sapien
taaagttacatactcatgatcaaatttctccaa

SEQ ID NO: 536793 - DNA, 33 bp, Homo sapien
gccattagatgcagcaaaagacccgggccgtga

SEQ ID NO: 536794 - DNA, 33 bp, Homo sapien
gccattagatgcagcagaagacccgggccgtga

SEQ ID NO: 536795 - DNA, 33 bp, Homo sapien
gccaactgatcccaggaaaggtttttctccagc

SEQ ID NO: 536796 - DNA, 33 bp, Homo sapien
gccaactgatcccagggaaggtttttctccagc

SEQ ID NO: 536797 - DNA, 33 bp, Homo sapien
agaaattctaaatgtgaacctaaatctctgctt

SEQ ID NO: 536798 - DNA, 33 bp, Homo sapien
agaaattctaaatgtggacctaaatctctgctt

SEQ ID NO: 536799 - DNA, 33 bp, Homo sapien
actgatttgatattagcaatagttcatttaaat

SEQ ID NO: 536800 - DNA, 33 bp, Homo sapien
actgatttgatattaggaatagttcatttaaat

SEQ ID NO: 536801 - DNA, 33 bp, Homo sapien
tggggactatatgccaatagacctaaatgctgg

SEQ ID NO: 536802 - DNA, 33 bp, Homo sapien
tggggactatatgccagtagacctaaatgctgg

SEQ ID NO: 536803 - DNA, 33 bp, Homo sapien
atgttgttttccaatgaaagagagtctaaggta

SEQ ID NO: 536804 - DNA, 33 bp, Homo sapien
atgttgttttccaatggaagagagtctaaggta

SEQ ID NO: 536805 - DNA, 33 bp, Homo sapien
gaagtagctatcctgaaaaaggcattagttatc

SEQ ID NO: 536806 - DNA, 33 bp, Homo sapien
gaagtagctatcctgacaaaggcattagttatc

SEQ ID NO: 536807 - DNA, 33 bp, Homo sapien
tttctgagcctttctgaaccaatctatctccct

SEQ ID NO: 536808 - DNA, 33 bp, Homo sapien
tttctgagcctttctgcaccaatctatctccct

SEQ ID NO: 536809 - DNA, 33 bp, Homo sapien
aggtcagggatggaacaaggattggtggtccac

SEQ ID NO: 536810 - DNA, 33 bp, Homo sapien
aggtcagggatggaacgaggattggtggtccac

SEQ ID NO: 536811 - DNA, 33 bp, Homo sapien
cccatgaaactgcattcaacgtctgctagtcat

SEQ ID NO: 536812 - DNA, 33 bp, Homo sapien
cccatgaaactgcatttaacgtctgctagtcat

SEQ ID NO: 536813 - DNA, 33 bp, Homo sapien
aacaaaggacaatgacaggaggcatacaattga

SEQ ID NO: 536814 - DNA, 33 bp, Homo sapien
aacaaaggacaatgacgggaggcatacaattga

SEQ ID NO: 536815 - DNA, 33 bp, Homo sapien
cctgggtaagtcataccagtgctctatgcccca

SEQ ID NO: 536816 - DNA, 33 bp, Homo sapien
cctgggtaagtcatactagtgctctatgcccca

SEQ ID NO: 536817 - DNA, 33 bp, Homo sapien
gtaaacgagtacttctaaagtgttgagaggtaa

SEQ ID NO: 536818 - DNA, 33 bp, Homo sapien
gtaaacgagtacttctcaagtgttgagaggtaa

SEQ ID NO: 536819 - DNA, 33 bp, Homo sapien
attgactcattgtggccatcaagcattatctag

SEQ ID NO: 536820 - DNA, 33 bp, Homo sapien
attgactcattgtggcgatcaagcattatctag

SEQ ID NO: 536821 - DNA, 33 bp, Homo sapien
tcagggtaactctaccacaagtaataatggtac

SEQ ID NO: 536822 - DNA, 33 bp, Homo sapien
tcagggtaactctaccgcaagtaataatggtac

SEQ ID NO: 536823 - DNA, 33 bp, Homo sapien
caactgaagttgaccaaattgtgattaaataaa

SEQ ID NO: 536824 - DNA, 33 bp, Homo sapien
caactgaagttgaccatattgtgattaaataaa

SEQ ID NO: 536825 - DNA, 33 bp, Homo sapien
ggaaaacacacttcagaaaagcttatagtttga

SEQ ID NO: 536826 - DNA, 33 bp, Homo sapien
ggaaaacacacttcaggaaagcttatagtttga

SEQ ID NO: 536827 - DNA, 33 bp, Homo sapien
agctgcaaaacagggaagtgaaccaagagagaa

SEQ ID NO: 536828 - DNA, 33 bp, Homo sapien
agctgcaaaacagggaggtgaaccaagagagaa

SEQ ID NO: 536829 - DNA, 33 bp, Homo sapien
gggaggatggtttgagactagcaggtcgaggcc

SEQ ID NO: 536830 - DNA, 33 bp, Homo sapien
gggaggatggtttgagtctagcaggtcgaggcc

SEQ ID NO: 536831 - DNA, 33 bp, Homo sapien
aatacacatatgattcacaagggctcaatattt

SEQ ID NO: 536832 - DNA, 33 bp, Homo sapien
aatacacatatgattcgcaagggctcaatattt

SEQ ID NO: 536833 - DNA, 33 bp, Homo sapien
agcaggttaagtaggactaggctcagcaatgct

SEQ ID NO: 536834 - DNA, 33 bp, Homo sapien
agcaggttaagtaggagtaggctcagcaatgct

SEQ ID NO: 536835 - DNA, 33 bp, Homo sapien
atctgataaggggtgaatatccaaaatttcctt

SEQ ID NO: 536836 - DNA, 33 bp, Homo sapien
atctgataaggggtgactatccaaaatttcctt

SEQ ID NO: 536837 - DNA, 33 bp, Homo sapien
gtgtaagtttctcagcaattataatgcccaacc

SEQ ID NO: 536838 - DNA, 33 bp, Homo sapien
gtgtaagtttctcagcgattataatgcccaacc

SEQ ID NO: 536839 - DNA, 33 bp, Homo sapien
tgacaaagtcaacaaaagcaatggggaaaggac

SEQ ID NO: 536840 - DNA, 33 bp, Homo sapien
tgacaaagtcaacaaacgcaatggggaaaggac

SEQ ID NO: 536841 - DNA, 33 bp, Homo sapien
atacactgaggaaaagacagcctctttaacaaa

SEQ ID NO: 536842 - DNA, 33 bp, Homo sapien
atacactgaggaaaagtcagcctctttaacaaa

SEQ ID NO: 536843 - DNA, 33 bp, Homo sapien
tggaatgttatcagaaatgatgttttgttttct

SEQ ID NO: 536844 - DNA, 33 bp, Homo sapien
tggaatgttatcagaactgatgttttgttttct

SEQ ID NO: 536845 - DNA, 33 bp, Homo sapien
tgtgtgtgtatagtaacagccatttttgttgtt

SEQ ID NO: 536846 - DNA, 33 bp, Homo sapien
tgtgtgtgtatagtaatagccatttttgttgtt

SEQ ID NO: 536847 - DNA, 33 bp, Homo sapien
attattgtcatttgatcagatgtttcatctctt

SEQ ID NO: 536848 - DNA, 33 bp, Homo sapien
attattgtcatttgatgagatgtttcatctctt

SEQ ID NO: 536849 - DNA, 33 bp, Homo sapien
tgatgcaacctaccaaagagctaggaggtaaaa

SEQ ID NO: 536850 - DNA, 33 bp, Homo sapien
tgatgcaacctaccaaggagctaggaggtaaaa

SEQ ID NO: 536851 - DNA, 33 bp, Homo sapien
aaatgtaggcagtctaaagttgatgtgtaggtt

SEQ ID NO: 536852 - DNA, 33 bp, Homo sapien
aaatgtaggcagtctagagttgatgtgtaggtt

SEQ ID NO: 536853 - DNA, 33 bp, Homo sapien
atttacttacagaacactcctgttagtttacac

SEQ ID NO: 536854 - DNA, 33 bp, Homo sapien
atttacttacagaacattcctgttagtttacac

SEQ ID NO: 536855 - DNA, 33 bp, Homo sapien
tatggaaacaaaacaaccttagtttgaatccta

SEQ ID NO: 536856 - DNA, 33 bp, Homo sapien
tatggaaacaaaacaagcttagtttgaatccta

SEQ ID NO: 536857 - DNA, 33 bp, Homo sapien
gatgctgagaggactgcagcagttggaatatgg

SEQ ID NO: 536858 - DNA, 33 bp, Homo sapien
gatgctgagaggactgtagcagttggaatatgg

SEQ ID NO: 536859 - DNA, 33 bp, Homo sapien
gattcctcttaggaaaattctcagaggggctac

SEQ ID NO: 536860 - DNA, 33 bp, Homo sapien
gattcctcttaggaaacttctcagaggggctac

SEQ ID NO: 536861 - DNA, 33 bp, Homo sapien
cacaggaaccacggccactagcagcactttccc

SEQ ID NO: 536862 - DNA, 33 bp, Homo sapien
cacaggaaccacggcctctagcagcactttccc

SEQ ID NO: 536863 - DNA, 33 bp, Homo sapien
ttgtggacaccctgcaaatactcagatgccatg

SEQ ID NO: 536864 - DNA, 33 bp, Homo sapien
ttgtggacaccctgcagatactcagatgccatg

SEQ ID NO: 536865 - DNA, 33 bp, Homo sapien
ctagatgccctaattccctttcttgtattttgt

SEQ ID NO: 536866 - DNA, 33 bp, Homo sapien
ctagatgccctaattctctttcttgtattttgt

SEQ ID NO: 536867 - DNA, 33 bp, Homo sapien
taataggatatatacacgaggatttaatgaaag

SEQ ID NO: 536868 - DNA, 33 bp, Homo sapien
taataggatatatacaggaggatttaatgaaag

SEQ ID NO: 536869 - DNA, 33 bp, Homo sapien
catctaaactaaaatcaagccatgcctgccttt

SEQ ID NO: 536870 - DNA, 33 bp, Homo sapien
catctaaactaaaatcgagccatgcctgccttt

SEQ ID NO: 536871 - DNA, 33 bp, Homo sapien
tagatccacttaaaacagtcacttcagagttac

SEQ ID NO: 536872 - DNA, 33 bp, Homo sapien
tagatccacttaaaactgtcacttcagagttac

SEQ ID NO: 536873 - DNA, 33 bp, Homo sapien
aaacagtacagaagcacagaaaaaagaaagtga

SEQ ID NO: 536874 - DNA, 33 bp, Homo sapien
aaacagtacagaagcatagaaaaaagaaagtga

SEQ ID NO: 536875 - DNA, 33 bp, Homo sapien
attgtagtgacagcaaccacggaagcaaacaaa

SEQ ID NO: 536876 - DNA, 33 bp, Homo sapien
attgtagtgacagcaatcacggaagcaaacaaa

SEQ ID NO: 536877 - DNA, 33 bp, Homo sapien
actatttgaaatctcaataactgactattaaaa

SEQ ID NO: 536878 - DNA, 33 bp, Homo sapien
actatttgaaatctcagtaactgactattaaaa

SEQ ID NO: 536879 - DNA, 33 bp, Homo sapien
cactcaagttcgtatcacaaatctcagttggga

SEQ ID NO: 536880 - DNA, 33 bp, Homo sapien
cactcaagttcgtatcgcaaatctcagttggga

SEQ ID NO: 536881 - DNA, 33 bp, Homo sapien
cctcttagtattgcctcagctgtgttccacaca

SEQ ID NO: 536882 - DNA, 33 bp, Homo sapien
cctcttagtattgccttagctgtgttccacaca

SEQ ID NO: 536883 - DNA, 33 bp, Homo sapien
tgagacaacatgatgagtatggaagtacagatg

SEQ ID NO: 536884 - DNA, 33 bp, Homo sapien
tgagacaacatgatgattatggaagtacagatg

SEQ ID NO: 536885 - DNA, 33 bp, Homo sapien
atattccctaaaacaaaatgatacgtgagagcc

SEQ ID NO: 536886 - DNA, 33 bp, Homo sapien
atattccctaaaacaatatgatacgtgagagcc

SEQ ID NO: 536887 - DNA, 33 bp, Homo sapien
tcataatctcgattccaatttccatacttgagt

SEQ ID NO: 536888 - DNA, 33 bp, Homo sapien
tcataatctcgattcccatttccatacttgagt

SEQ ID NO: 536889 - DNA, 33 bp, Homo sapien
gatcaaatcctagctacatccttttctagctct

SEQ ID NO: 536890 - DNA, 33 bp, Homo sapien
gatcaaatcctagctatatccttttctagctct

SEQ ID NO: 536891 - DNA, 33 bp, Homo sapien
atttttatgtagtatacggacatcatgtagttt

SEQ ID NO: 536892 - DNA, 33 bp, Homo sapien
atttttatgtagtatatggacatcatgtagttt

SEQ ID NO: 536893 - DNA, 33 bp, Homo sapien
taacagatggaattcaacagcgcattaaaaaga

SEQ ID NO: 536894 - DNA, 33 bp, Homo sapien
taacagatggaattcagcagcgcattaaaaaga

SEQ ID NO: 536895 - DNA, 33 bp, Homo sapien
taatgctggtcttgtaaaatgaatttggaagta

SEQ ID NO: 536896 - DNA, 33 bp, Homo sapien
taatgctggtcttgtacaatgaatttggaagta

SEQ ID NO: 536897 - DNA, 33 bp, Homo sapien
agtggtaaaattcaataatgaagccaatagatt

SEQ ID NO: 536898 - DNA, 33 bp, Homo sapien
agtggtaaaattcaatgatgaagccaatagatt

SEQ ID NO: 536899 - DNA, 33 bp, Homo sapien
ccaactcatggagactcaggttctagacccatc

SEQ ID NO: 536900 - DNA, 33 bp, Homo sapien
ccaactcatggagacttaggttctagacccatc

SEQ ID NO: 536901 - DNA, 33 bp, Homo sapien
aatgacttttgccagaagtagggtgtatggatg

SEQ ID NO: 536902 - DNA, 33 bp, Homo sapien
aatgacttttgccagacgtagggtgtatggatg

SEQ ID NO: 536903 - DNA, 33 bp, Homo sapien
atttggctcctgactaagtttctgaccttatct

SEQ ID NO: 536904 - DNA, 33 bp, Homo sapien
atttggctcctgactatgtttctgaccttatct

SEQ ID NO: 536905 - DNA, 33 bp, Homo sapien
gtatttatgtatttccggaccatgtaatgtgtg

SEQ ID NO: 536906 - DNA, 33 bp, Homo sapien
gtatttatgtatttcctgaccatgtaatgtgtg

SEQ ID NO: 536907 - DNA, 33 bp, Homo sapien
ggcagtgaatgtgtaccgagctatccaatgtaa

SEQ ID NO: 536908 - DNA, 33 bp, Homo sapien
ggcagtgaatgtgtactgagctatccaatgtaa

SEQ ID NO: 536909 - DNA, 33 bp, Homo sapien
ccagttagaaaaatgacgcacagttgcagaaat

SEQ ID NO: 536910 - DNA, 33 bp, Homo sapien
ccagttagaaaaatgatgcacagttgcagaaat

SEQ ID NO: 536911 - DNA, 33 bp, Homo sapien
gggatttagattttgaccttcaagtatctccat

SEQ ID NO: 536912 - DNA, 33 bp, Homo sapien
gggatttagattttgagcttcaagtatctccat

SEQ ID NO: 536913 - DNA, 33 bp, Homo sapien
ttagtctttttcaccacagaaatctcttcttct

SEQ ID NO: 536914 - DNA, 33 bp, Homo sapien
ttagtctttttcaccatagaaatctcttcttct

SEQ ID NO: 536915 - DNA, 33 bp, Homo sapien
ctttcattcattttcactcttagaagatgctta

SEQ ID NO: 536916 - DNA, 33 bp, Homo sapien
ctttcattcattttcagtcttagaagatgctta

SEQ ID NO: 536917 - DNA, 33 bp, Homo sapien
caaaatgagaaagagaatatctaccttgcaagg

SEQ ID NO: 536918 - DNA, 33 bp, Homo sapien
caaaatgagaaagagagtatctaccttgcaagg

SEQ ID NO: 536919 - DNA, 33 bp, Homo sapien
tccagtccaactgctacatattgtcaacttttt

SEQ ID NO: 536920 - DNA, 33 bp, Homo sapien
tccagtccaactgctatatattgtcaacttttt

SEQ ID NO: 536921 - DNA, 33 bp, Homo sapien
acttttagtttaatcacctctttgtatttctgg

SEQ ID NO: 536922 - DNA, 33 bp, Homo sapien
acttttagtttaatcagctctttgtatttctgg

SEQ ID NO: 536923 - DNA, 33 bp, Homo sapien
tgctttaacaataacaatagccctatgagacta

SEQ ID NO: 536924 - DNA, 33 bp, Homo sapien
tgctttaacaataacagtagccctatgagacta

SEQ ID NO: 536925 - DNA, 33 bp, Homo sapien
gcaggatcagcagtctcaacaggacctgggact

SEQ ID NO: 536926 - DNA, 33 bp, Homo sapien
gcaggatcagcagtctgaacaggacctgggact

SEQ ID NO: 536927 - DNA, 33 bp, Homo sapien
ctatgaaaacataagcaagagagtctactaaat

SEQ ID NO: 536928 - DNA, 33 bp, Homo sapien
ctatgaaaacataagcgagagagtctactaaat

SEQ ID NO: 536929 - DNA, 33 bp, Homo sapien
agggaaattatgactcaatttagccttcatttg

SEQ ID NO: 536930 - DNA, 33 bp, Homo sapien
agggaaattatgactcgatttagccttcatttg

SEQ ID NO: 536931 - DNA, 33 bp, Homo sapien
ctgtaggaagcatcacaaatacagaattgatga

SEQ ID NO: 536932 - DNA, 33 bp, Homo sapien
ctgtaggaagcatcaccaatacagaattgatga

SEQ ID NO: 536933 - DNA, 33 bp, Homo sapien
aggctttgactgcataacctttgtagtttatat

SEQ ID NO: 536934 - DNA, 33 bp, Homo sapien
aggctttgactgcatatcctttgtagtttatat

SEQ ID NO: 536935 - DNA, 33 bp, Homo sapien
ttatattcaagtcacaaagagagtttaatagct

SEQ ID NO: 536936 - DNA, 33 bp, Homo sapien
ttatattcaagtcacagagagagtttaatagct

SEQ ID NO: 536937 - DNA, 33 bp, Homo sapien
agcagtcaaaggacacaagctgaacgcgtggta

SEQ ID NO: 536938 - DNA, 33 bp, Homo sapien
agcagtcaaaggacaccagctgaacgcgtggta

SEQ ID NO: 536939 - DNA, 33 bp, Homo sapien
tactgaaagaacacacaaagatgtcctaatcac

SEQ ID NO: 536940 - DNA, 33 bp, Homo sapien
tactgaaagaacacacgaagatgtcctaatcac

SEQ ID NO: 536941 - DNA, 33 bp, Homo sapien
aaatgatgcacaacgaaaaaaggaagaacaaga

SEQ ID NO: 536942 - DNA, 33 bp, Homo sapien
aaatgatgcacaacgagaaaaggaagaacaaga

SEQ ID NO: 536943 - DNA, 33 bp, Homo sapien
ctttgagagttgtaaaaaggagtaagaggccgg

SEQ ID NO: 536944 - DNA, 33 bp, Homo sapien
ctttgagagttgtaaagaggagtaagaggccgg

SEQ ID NO: 536945 - DNA, 33 bp, Homo sapien
acattaagctgaggcactctaacttctatctat

SEQ ID NO: 536946 - DNA, 33 bp, Homo sapien
acattaagctgaggcattctaacttctatctat

SEQ ID NO: 536947 - DNA, 33 bp, Homo sapien
cggttgtaagggggaaaatatgagtgcagatgt

SEQ ID NO: 536948 - DNA, 33 bp, Homo sapien
cggttgtaagggggaagatatgagtgcagatgt

SEQ ID NO: 536949 - DNA, 33 bp, Homo sapien
acggattcatgtctcccactcattgaaacaaaa

SEQ ID NO: 536950 - DNA, 33 bp, Homo sapien
acggattcatgtctcctactcattgaaacaaaa

SEQ ID NO: 536951 - DNA, 33 bp, Homo sapien
taagcactgaggaaaaaaagattcatgtgcaac

SEQ ID NO: 536952 - DNA, 33 bp, Homo sapien
taagcactgaggaaaacaagattcatgtgcaac

SEQ ID NO: 536953 - DNA, 33 bp, Homo sapien
tatcctatcgcaggaccatgttaactttcttcc

SEQ ID NO: 536954 - DNA, 33 bp, Homo sapien
tatcctatcgcaggactatgttaactttcttcc

SEQ ID NO: 536955 - DNA, 33 bp, Homo sapien
tgttgtccccaataagaagagcatatgggtcca

SEQ ID NO: 536956 - DNA, 33 bp, Homo sapien
tgttgtccccaataagcagagcatatgggtcca

SEQ ID NO: 536957 - DNA, 33 bp, Homo sapien
aatgtgccaagaagaagaccatctggaactcag

SEQ ID NO: 536958 - DNA, 33 bp, Homo sapien
aatgtgccaagaagaataccatctggaactcag

SEQ ID NO: 536959 - DNA, 33 bp, Homo sapien
actggacagcattcaaatgtccattcaaatgtt

SEQ ID NO: 536960 - DNA, 33 bp, Homo sapien
actggacagcattcaattgtccattcaaatgtt

SEQ ID NO: 536961 - DNA, 33 bp, Homo sapien
ctttccattgctagtacgccactggaacgatgc

SEQ ID NO: 536962 - DNA, 33 bp, Homo sapien
ctttccattgctagtatgccactggaacgatgc

SEQ ID NO: 536963 - DNA, 33 bp, Homo sapien
gatagcatgagctctcacaaccacatgttactg

SEQ ID NO: 536964 - DNA, 33 bp, Homo sapien
gatagcatgagctctcgcaaccacatgttactg

SEQ ID NO: 536965 - DNA, 33 bp, Homo sapien
atagatgtaatcaacactgaagagaaagcatat

SEQ ID NO: 536966 - DNA, 33 bp, Homo sapien
atagatgtaatcaacattgaagagaaagcatat

SEQ ID NO: 536967 - DNA, 33 bp, Homo sapien
tttaggacaatagagacgctggtaaattgtatt

SEQ ID NO: 536968 - DNA, 33 bp, Homo sapien
tttaggacaatagagatgctggtaaattgtatt

SEQ ID NO: 536969 - DNA, 33 bp, Homo sapien
gtccacaggtaaatagcaattatggctaccatt

SEQ ID NO: 536970 - DNA, 33 bp, Homo sapien
gtccacaggtaaatagtaattatggctaccatt

SEQ ID NO: 536971 - DNA, 33 bp, Homo sapien
tggattaatagattaaggagttatcaggggagg

SEQ ID NO: 536972 - DNA, 33 bp, Homo sapien
tggattaatagattaatgagttatcaggggagg

SEQ ID NO: 536973 - DNA, 33 bp, Homo sapien
aatgaatattacacatcatagacttttgtgtgt

SEQ ID NO: 536974 - DNA, 33 bp, Homo sapien
aatgaatattacacatgatagacttttgtgtgt

SEQ ID NO: 536975 - DNA, 33 bp, Homo sapien
tggcaccaccatttaaataactgggtgaccttg

SEQ ID NO: 536976 - DNA, 33 bp, Homo sapien
tggcaccaccatttaagtaactgggtgaccttg

SEQ ID NO: 536977 - DNA, 33 bp, Homo sapien
ggtaggtgaaatttgaaaggagtgctgggatgt

SEQ ID NO: 536978 - DNA, 33 bp, Homo sapien
ggtaggtgaaatttgagaggagtgctgggatgt

SEQ ID NO: 536979 - DNA, 33 bp, Homo sapien
atctgccgtcttcacaggggttctccttgtctc

SEQ ID NO: 536980 - DNA, 33 bp, Homo sapien
atctgccgtcttcacatgggttctccttgtctc

SEQ ID NO: 536981 - DNA, 33 bp, Homo sapien
ctgactggtgtaagacagtatcttctcatagtt

SEQ ID NO: 536982 - DNA, 33 bp, Homo sapien
ctgactggtgtaagacggtatcttctcatagtt

SEQ ID NO: 536983 - DNA, 33 bp, Homo sapien
ctaagggcatctcccaagtagagacacgtgccc

SEQ ID NO: 536984 - DNA, 33 bp, Homo sapien
ctaagggcatctcccaggtagagacacgtgccc

SEQ ID NO: 536985 - DNA, 33 bp, Homo sapien
taattaaccgcttggaaaatacagaattggctt

SEQ ID NO: 536986 - DNA, 33 bp, Homo sapien
taattaaccgcttggacaatacagaattggctt

SEQ ID NO: 536987 - DNA, 33 bp, Homo sapien
ttgttaatcgatacaacggttttgtcatttgag

SEQ ID NO: 536988 - DNA, 33 bp, Homo sapien
ttgttaatcgatacaatggttttgtcatttgag

SEQ ID NO: 536989 - DNA, 33 bp, Homo sapien
acaaagttgtgaaagaaccatgtagtgatgatg

SEQ ID NO: 536990 - DNA, 33 bp, Homo sapien
acaaagttgtgaaagagccatgtagtgatgatg

SEQ ID NO: 536991 - DNA, 33 bp, Homo sapien
attccactaatttacaatctgaattttagaata

SEQ ID NO: 536992 - DNA, 33 bp, Homo sapien
attccactaatttacagtctgaattttagaata

SEQ ID NO: 536993 - DNA, 33 bp, Homo sapien
catatgtagggtaatactagtttggtgatgtta

SEQ ID NO: 536994 - DNA, 33 bp, Homo sapien
catatgtagggtaatattagtttggtgatgtta

SEQ ID NO: 536995 - DNA, 33 bp, Homo sapien
tgatcagccaagcaaaaactttgtggggaaact

SEQ ID NO: 536996 - DNA, 33 bp, Homo sapien
tgatcagccaagcaaacactttgtggggaaact

SEQ ID NO: 536997 - DNA, 33 bp, Homo sapien
ataaagaaccacactacatcaatcatttaaata

SEQ ID NO: 536998 - DNA, 33 bp, Homo sapien
ataaagaaccacactatatcaatcatttaaata

SEQ ID NO: 536999 - DNA, 33 bp, Homo sapien
tcatgactaatcatagaacttaaccttttcaag

SEQ ID NO: 537000 - DNA, 33 bp, Homo sapien
tcatgactaatcataggacttaaccttttcaag

SEQ ID NO: 537001 - DNA, 33 bp, Homo sapien
aagaattttcttgctacgttgggactttcccat

SEQ ID NO: 537002 - DNA, 33 bp, Homo sapien
aagaattttcttgctatgttgggactttcccat

SEQ ID NO: 537003 - DNA, 33 bp, Homo sapien
tttagaaacatttggactagatagagaaaataa

SEQ ID NO: 537004 - DNA, 33 bp, Homo sapien
tttagaaacatttggattagatagagaaaataa

SEQ ID NO: 537005 - DNA, 33 bp, Homo sapien
ctcctttgaaccaaaacagcaatagttctacct

SEQ ID NO: 537006 - DNA, 33 bp, Homo sapien
ctcctttgaaccaaaatagcaatagttctacct

SEQ ID NO: 537007 - DNA, 33 bp, Homo sapien
ctcttacaaatcaaatcattactttcccatgag

SEQ ID NO: 537008 - DNA, 33 bp, Homo sapien
ctcttacaaatcaaatgattactttcccatgag

SEQ ID NO: 537009 - DNA, 33 bp, Homo sapien
tggttattcacatataacagtatgactgatgca

SEQ ID NO: 537010 - DNA, 33 bp, Homo sapien
tggttattcacatataccagtatgactgatgca

SEQ ID NO: 537011 - DNA, 33 bp, Homo sapien
ctattactctacagaaaacaatgttctctaaag

SEQ ID NO: 537012 - DNA, 33 bp, Homo sapien
ctattactctacagaacacaatgttctctaaag

SEQ ID NO: 537013 - DNA, 33 bp, Homo sapien
aagggtgagggagaagaaactgtttaggtcaga

SEQ ID NO: 537014 - DNA, 33 bp, Homo sapien
aagggtgagggagaaggaactgtttaggtcaga

SEQ ID NO: 537015 - DNA, 33 bp, Homo sapien
ggcccgtatacgtaaaatgttttaatactctct

SEQ ID NO: 537016 - DNA, 33 bp, Homo sapien
ggcccgtatacgtaaattgttttaatactctct

SEQ ID NO: 537017 - DNA, 33 bp, Homo sapien
atgaacaatacacaaacctcaaccagggtccct

SEQ ID NO: 537018 - DNA, 33 bp, Homo sapien
atgaacaatacacaaagctcaaccagggtccct

SEQ ID NO: 537019 - DNA, 33 bp, Homo sapien
gcaaagatgccctcaacttcctttctttttttt

SEQ ID NO: 537020 - DNA, 33 bp, Homo sapien
gcaaagatgccctcaagttcctttctttttttt

SEQ ID NO: 537021 - DNA, 33 bp, Homo sapien
ctgggatggcaggataccaacctgacaaggagg

SEQ ID NO: 537022 - DNA, 33 bp, Homo sapien
ctgggatggcaggatatcaacctgacaaggagg

SEQ ID NO: 537023 - DNA, 33 bp, Homo sapien
atataggacctgaagcaagaaacgctctatcct

SEQ ID NO: 537024 - DNA, 33 bp, Homo sapien
atataggacctgaagctagaaacgctctatcct

SEQ ID NO: 537025 - DNA, 33 bp, Homo sapien
tgatttgcatatagcccacagcgatcttttcca

SEQ ID NO: 537026 - DNA, 33 bp, Homo sapien
tgatttgcatatagcctacagcgatcttttcca

SEQ ID NO: 537027 - DNA, 33 bp, Homo sapien
ttctaatgaatctgcccaataacaatatataat

SEQ ID NO: 537028 - DNA, 33 bp, Homo sapien
ttctaatgaatctgcctaataacaatatataat

SEQ ID NO: 537029 - DNA, 33 bp, Homo sapien
tgtagcgtgatggtgccaagataaaatagtagc

SEQ ID NO: 537030 - DNA, 33 bp, Homo sapien
tgtagcgtgatggtgcgaagataaaatagtagc

SEQ ID NO: 537031 - DNA, 33 bp, Homo sapien
tgtctataaagtttagccatatgcattcgtaac

SEQ ID NO: 537032 - DNA, 33 bp, Homo sapien
tgtctataaagtttagtcatatgcattcgtaac

SEQ ID NO: 537033 - DNA, 33 bp, Homo sapien
tgagaaacgccccatgaactgagctgagactgg

SEQ ID NO: 537034 - DNA, 33 bp, Homo sapien
tgagaaacgccccatgcactgagctgagactgg

SEQ ID NO: 537035 - DNA, 33 bp, Homo sapien
tagttaaaaaatcacacggtgctgggttcacac

SEQ ID NO: 537036 - DNA, 33 bp, Homo sapien
tagttaaaaaatcacatggtgctgggttcacac

SEQ ID NO: 537037 - DNA, 33 bp, Homo sapien
caaagaatccatcaagacatttttattctctac

SEQ ID NO: 537038 - DNA, 33 bp, Homo sapien
caaagaatccatcaaggcatttttattctctac

SEQ ID NO: 537039 - DNA, 33 bp, Homo sapien
atcaggcatttgactacaggaattcaaaggaac

SEQ ID NO: 537040 - DNA, 33 bp, Homo sapien
atcaggcatttgactataggaattcaaaggaac

SEQ ID NO: 537041 - DNA, 33 bp, Homo sapien
ataaggcagagagtggaaagaatgggacaaaag

SEQ ID NO: 537042 - DNA, 33 bp, Homo sapien
ataaggcagagagtgggaagaatgggacaaaag

SEQ ID NO: 537043 - DNA, 33 bp, Homo sapien
gactggctgtatcactcaccttagcctcagacc

SEQ ID NO: 537044 - DNA, 33 bp, Homo sapien
gactggctgtatcactgaccttagcctcagacc

SEQ ID NO: 537045 - DNA, 33 bp, Homo sapien
cttccaacaatatacccatagcagccactgcct

SEQ ID NO: 537046 - DNA, 33 bp, Homo sapien
cttccaacaatatacctatagcagccactgcct

SEQ ID NO: 537047 - DNA, 33 bp, Homo sapien
aattttacttttctccaatctaatactgtagtt

SEQ ID NO: 537048 - DNA, 33 bp, Homo sapien
aattttacttttctccgatctaatactgtagtt

SEQ ID NO: 537049 - DNA, 33 bp, Homo sapien
tgtatattatagtcaactgaaattaattatgtt

SEQ ID NO: 537050 - DNA, 33 bp, Homo sapien
tgtatattatagtcaagtgaaattaattatgtt

SEQ ID NO: 537051 - DNA, 33 bp, Homo sapien
ctttccaaatgatggcaaaacctctggtgttac

SEQ ID NO: 537052 - DNA, 33 bp, Homo sapien
ctttccaaatgatggcgaaacctctggtgttac

SEQ ID NO: 537053 - DNA, 33 bp, Homo sapien
ctaccgtccctgtaacaccatttactgtgaagt

SEQ ID NO: 537054 - DNA, 33 bp, Homo sapien
ctaccgtccctgtaacgccatttactgtgaagt

SEQ ID NO: 537055 - DNA, 33 bp, Homo sapien
tcagtggttcctcaaacagccatgagagggaaa

SEQ ID NO: 537056 - DNA, 33 bp, Homo sapien
tcagtggttcctcaaatagccatgagagggaaa

SEQ ID NO: 537057 - DNA, 33 bp, Homo sapien
atttgcaataacacaaacacttaactctccaaa

SEQ ID NO: 537058 - DNA, 33 bp, Homo sapien
atttgcaataacacaagcacttaactctccaaa

SEQ ID NO: 537059 - DNA, 33 bp, Homo sapien
atgatgagtaccccaaatcgttggtattaatta

SEQ ID NO: 537060 - DNA, 33 bp, Homo sapien
atgatgagtaccccaagtcgttggtattaatta

SEQ ID NO: 537061 - DNA, 33 bp, Homo sapien
cagtagaacagagaagaaacagaaccaggagat

SEQ ID NO: 537062 - DNA, 33 bp, Homo sapien
cagtagaacagagaaggaacagaaccaggagat

SEQ ID NO: 537063 - DNA, 33 bp, Homo sapien
aggttctgaataataacggatttaagaagcaaa

SEQ ID NO: 537064 - DNA, 33 bp, Homo sapien
aggttctgaataataatggatttaagaagcaaa

SEQ ID NO: 537065 - DNA, 33 bp, Homo sapien
ttagaaacaataagaacccttttcagtagaatt

SEQ ID NO: 537066 - DNA, 33 bp, Homo sapien
ttagaaacaataagaatccttttcagtagaatt

SEQ ID NO: 537067 - DNA, 33 bp, Homo sapien
agcatgactttggtacaagaattagtgaggtag

SEQ ID NO: 537068 - DNA, 33 bp, Homo sapien
agcatgactttggtaccagaattagtgaggtag

SEQ ID NO: 537069 - DNA, 33 bp, Homo sapien
ttgaatacactttaaaagctagatacaggataa

SEQ ID NO: 537070 - DNA, 33 bp, Homo sapien
ttgaatacactttaaaggctagatacaggataa

SEQ ID NO: 537071 - DNA, 33 bp, Homo sapien
gcacacattaagtccacgcacaatattcctaac

SEQ ID NO: 537072 - DNA, 33 bp, Homo sapien
gcacacattaagtccatgcacaatattcctaac

SEQ ID NO: 537073 - DNA, 33 bp, Homo sapien
ccctcactgctatttacgttcccaatacttgga

SEQ ID NO: 537074 - DNA, 33 bp, Homo sapien
ccctcactgctatttatgttcccaatacttgga

SEQ ID NO: 537075 - DNA, 33 bp, Homo sapien
gattccattttctactaacagtgtagctgtcta

SEQ ID NO: 537076 - DNA, 33 bp, Homo sapien
gattccattttctactcacagtgtagctgtcta

SEQ ID NO: 537077 - DNA, 33 bp, Homo sapien
atgcctaatattacacgggtagccgttttgtga

SEQ ID NO: 537078 - DNA, 33 bp, Homo sapien
atgcctaatattacactggtagccgttttgtga

SEQ ID NO: 537079 - DNA, 33 bp, Homo sapien
gccagagctatgttcaatctcttagtttccatt

SEQ ID NO: 537080 - DNA, 33 bp, Homo sapien
gccagagctatgttcattctcttagtttccatt

SEQ ID NO: 537081 - DNA, 33 bp, Homo sapien
cattggaaatagacaacgaaaaggtgagggtaa

SEQ ID NO: 537082 - DNA, 33 bp, Homo sapien
cattggaaatagacaatgaaaaggtgagggtaa

SEQ ID NO: 537083 - DNA, 33 bp, Homo sapien
atacatattgttcctacaagtatccttagtgaa

SEQ ID NO: 537084 - DNA, 33 bp, Homo sapien
atacatattgttcctagaagtatccttagtgaa

SEQ ID NO: 537085 - DNA, 33 bp, Homo sapien
atttgtatttctttgacattttcctgtaaattc

SEQ ID NO: 537086 - DNA, 33 bp, Homo sapien
atttgtatttctttgatattttcctgtaaattc

SEQ ID NO: 537087 - DNA, 33 bp, Homo sapien
agaagagactaatgcacataggtcataaaaaaa

SEQ ID NO: 537088 - DNA, 33 bp, Homo sapien
agaagagactaatgcatataggtcataaaaaaa

SEQ ID NO: 537089 - DNA, 33 bp, Homo sapien
catctgcgacatcaaacgacaatgttccatgtg

SEQ ID NO: 537090 - DNA, 33 bp, Homo sapien
catctgcgacatcaaatgacaatgttccatgtg

SEQ ID NO: 537091 - DNA, 33 bp, Homo sapien
aaattttatgcagaaaggagctccactgttttt

SEQ ID NO: 537092 - DNA, 33 bp, Homo sapien
aaattttatgcagaaatgagctccactgttttt

SEQ ID NO: 537093 - DNA, 33 bp, Homo sapien
cccaactgtatactctaaacaaaaaacaaggac

SEQ ID NO: 537094 - DNA, 33 bp, Homo sapien
cccaactgtatactcttaacaaaaaacaaggac

SEQ ID NO: 537095 - DNA, 33 bp, Homo sapien
ctggtctgacgaatcacagtatagacaaaagag

SEQ ID NO: 537096 - DNA, 33 bp, Homo sapien
ctggtctgacgaatcatagtatagacaaaagag

SEQ ID NO: 537097 - DNA, 33 bp, Homo sapien
caattcttgctgtctcacgagcctcccatcttg

SEQ ID NO: 537098 - DNA, 33 bp, Homo sapien
caattcttgctgtctcgcgagcctcccatcttg

SEQ ID NO: 537099 - DNA, 33 bp, Homo sapien
gaagaggaaaccaggaaaggcataatatctgta

SEQ ID NO: 537100 - DNA, 33 bp, Homo sapien
gaagaggaaaccaggagaggcataatatctgta

SEQ ID NO: 537101 - DNA, 33 bp, Homo sapien
aaacaagaagatattgaactctttagcaaagtc

SEQ ID NO: 537102 - DNA, 33 bp, Homo sapien
aaacaagaagatattgtactctttagcaaagtc

SEQ ID NO: 537103 - DNA, 33 bp, Homo sapien
tcagtgattccaaaatgaggataaatcatacac

SEQ ID NO: 537104 - DNA, 33 bp, Homo sapien
tcagtgattccaaaattaggataaatcatacac

SEQ ID NO: 537105 - DNA, 33 bp, Homo sapien
ttgccaaattacccccaaaaaaactgagcattg

SEQ ID NO: 537106 - DNA, 33 bp, Homo sapien
ttgccaaattaccccccaaaaaactgagcattg

SEQ ID NO: 537107 - DNA, 33 bp, Homo sapien
tctcccttcccatttacccagctcttcttggaa

SEQ ID NO: 537108 - DNA, 33 bp, Homo sapien
tctcccttcccatttatccagctcttcttggaa

SEQ ID NO: 537109 - DNA, 33 bp, Homo sapien
agtagacctgctctacaagatacgttaaagagg

SEQ ID NO: 537110 - DNA, 33 bp, Homo sapien
agtagacctgctctacgagatacgttaaagagg

SEQ ID NO: 537111 - DNA, 33 bp, Homo sapien
gagagccaatggggcaagaataatggaggagag

SEQ ID NO: 537112 - DNA, 33 bp, Homo sapien
gagagccaatggggcacgaataatggaggagag

SEQ ID NO: 537113 - DNA, 33 bp, Homo sapien
gcatgggggaaggcagaattagaatcttgatag

SEQ ID NO: 537114 - DNA, 33 bp, Homo sapien
gcatgggggaaggcagtattagaatcttgatag

SEQ ID NO: 537115 - DNA, 33 bp, Homo sapien
attgaagggcagacaaatgaaaacctgaggcat

SEQ ID NO: 537116 - DNA, 33 bp, Homo sapien
attgaagggcagacaattgaaaacctgaggcat

SEQ ID NO: 537117 - DNA, 33 bp, Homo sapien
ttgctcttaacaacatcacagctctcagacaag

SEQ ID NO: 537118 - DNA, 33 bp, Homo sapien
ttgctcttaacaacattacagctctcagacaag

SEQ ID NO: 537119 - DNA, 33 bp, Homo sapien
tcccagagttcgcaaaccccaccgtgtcccagg

SEQ ID NO: 537120 - DNA, 33 bp, Homo sapien
tcccagagttcgcaaatcccaccgtgtcccagg

SEQ ID NO: 537121 - DNA, 33 bp, Homo sapien
ctgttctatatggggaccacctgcttttcctcc

SEQ ID NO: 537122 - DNA, 33 bp, Homo sapien
ctgttctatatggggagcacctgcttttcctcc

SEQ ID NO: 537123 - DNA, 33 bp, Homo sapien
tacagtgagaagccaacgaagaactttaagcag

SEQ ID NO: 537124 - DNA, 33 bp, Homo sapien
tacagtgagaagccaatgaagaactttaagcag

SEQ ID NO: 537125 - DNA, 33 bp, Homo sapien
caactgtgtggtaaaacgaagaggtttatgaat

SEQ ID NO: 537126 - DNA, 33 bp, Homo sapien
caactgtgtggtaaaatgaagaggtttatgaat

SEQ ID NO: 537127 - DNA, 33 bp, Homo sapien
gttgtatcggtcacaacaggttaggttatgctg

SEQ ID NO: 537128 - DNA, 33 bp, Homo sapien
gttgtatcggtcacaataggttaggttatgctg

SEQ ID NO: 537129 - DNA, 33 bp, Homo sapien
tatcataatgaaaagcaatgtcataatagtagt

SEQ ID NO: 537130 - DNA, 33 bp, Homo sapien
tatcataatgaaaagccatgtcataatagtagt

SEQ ID NO: 537131 - DNA, 33 bp, Homo sapien
ctcctcagcaccaggtaaagattaggaattgca

SEQ ID NO: 537132 - DNA, 33 bp, Homo sapien
ctcctcagcaccaggtgaagattaggaattgca

SEQ ID NO: 537133 - DNA, 33 bp, Homo sapien
tttttgacttcagtgacggtaccgtttgctaga

SEQ ID NO: 537134 - DNA, 33 bp, Homo sapien
tttttgacttcagtgatggtaccgtttgctaga

SEQ ID NO: 537135 - DNA, 33 bp, Homo sapien
aagatggctacacaagaaaagacaagtaactat

SEQ ID NO: 537136 - DNA, 33 bp, Homo sapien
aagatggctacacaaggaaagacaagtaactat

SEQ ID NO: 537137 - DNA, 33 bp, Homo sapien
tgtaaaatggttatgacgtttccttgctctgtg

SEQ ID NO: 537138 - DNA, 33 bp, Homo sapien
tgtaaaatggttatgatgtttccttgctctgtg

SEQ ID NO: 537139 - DNA, 33 bp, Homo sapien
ctgaagagattataccgcagatgtagtcacttc

SEQ ID NO: 537140 - DNA, 33 bp, Homo sapien
ctgaagagattatacctcagatgtagtcacttc

SEQ ID NO: 537141 - DNA, 33 bp, Homo sapien
ccacaaatatctcccagtgctttgccctttagg

SEQ ID NO: 537142 - DNA, 33 bp, Homo sapien
ccacaaatatctcccattgctttgccctttagg

SEQ ID NO: 537143 - DNA, 33 bp, Homo sapien
aacaggcccctataaacagatatttgcctggat

SEQ ID NO: 537144 - DNA, 33 bp, Homo sapien
aacaggcccctataaagagatatttgcctggat

SEQ ID NO: 537145 - DNA, 33 bp, Homo sapien
gattataggattgttacagtgacaatgcagaag

SEQ ID NO: 537146 - DNA, 33 bp, Homo sapien
gattataggattgttatagtgacaatgcagaag

SEQ ID NO: 537147 - DNA, 33 bp, Homo sapien
gttataacttaaaatgacagaagaaaggaggtt

SEQ ID NO: 537148 - DNA, 33 bp, Homo sapien
gttataacttaaaatggcagaagaaaggaggtt

SEQ ID NO: 537149 - DNA, 33 bp, Homo sapien
tagaggggagtattcagatttacagaggaaatc

SEQ ID NO: 537150 - DNA, 33 bp, Homo sapien
tagaggggagtattcatatttacagaggaaatc

SEQ ID NO: 537151 - DNA, 33 bp, Homo sapien
tagaccaattagtgcccagagcagaggtttttg

SEQ ID NO: 537152 - DNA, 33 bp, Homo sapien
tagaccaattagtgcctagagcagaggtttttg

SEQ ID NO: 537153 - DNA, 33 bp, Homo sapien
gtcttccaagtagtaaccccctgcctcttgatc

SEQ ID NO: 537154 - DNA, 33 bp, Homo sapien
gtcttccaagtagtaagcccctgcctcttgatc

SEQ ID NO: 537155 - DNA, 33 bp, Homo sapien
ccagcatcctcccaaactctgattaccaagatt

SEQ ID NO: 537156 - DNA, 33 bp, Homo sapien
ccagcatcctcccaaattctgattaccaagatt

SEQ ID NO: 537157 - DNA, 33 bp, Homo sapien
gttggaggtgagatcaaggaactgagaaagcag

SEQ ID NO: 537158 - DNA, 33 bp, Homo sapien
gttggaggtgagatcagggaactgagaaagcag

SEQ ID NO: 537159 - DNA, 33 bp, Homo sapien
ccaggttttttaatccaagtgactttatcagtt

SEQ ID NO: 537160 - DNA, 33 bp, Homo sapien
ccaggttttttaatccgagtgactttatcagtt

SEQ ID NO: 537161 - DNA, 33 bp, Homo sapien
cgaaattattaaaagactactgactagatcaat

SEQ ID NO: 537162 - DNA, 33 bp, Homo sapien
cgaaattattaaaagagtactgactagatcaat

SEQ ID NO: 537163 - DNA, 33 bp, Homo sapien
tagtggctttagaaagaagtttgatagttttca

SEQ ID NO: 537164 - DNA, 33 bp, Homo sapien
tagtggctttagaaagcagtttgatagttttca

SEQ ID NO: 537165 - DNA, 33 bp, Homo sapien
tgtaaataaaaggaacagactactggctgggca

SEQ ID NO: 537166 - DNA, 33 bp, Homo sapien
tgtaaataaaaggaacggactactggctgggca

SEQ ID NO: 537167 - DNA, 33 bp, Homo sapien
aaacataaagtgcacacctgaagtaagcaggct

SEQ ID NO: 537168 - DNA, 33 bp, Homo sapien
aaacataaagtgcacatctgaagtaagcaggct

SEQ ID NO: 537169 - DNA, 33 bp, Homo sapien
aaattctgatgtctagcagtcgttttctctagc

SEQ ID NO: 537170 - DNA, 33 bp, Homo sapien
aaattctgatgtctaggagtcgttttctctagc

SEQ ID NO: 537171 - DNA, 33 bp, Homo sapien
tctggctcctaataatgaaggggcaatagctga

SEQ ID NO: 537172 - DNA, 33 bp, Homo sapien
tctggctcctaataattaaggggcaatagctga

SEQ ID NO: 537173 - DNA, 33 bp, Homo sapien
ctcatctgtaaactcacgttgctctttacaaag

SEQ ID NO: 537174 - DNA, 33 bp, Homo sapien
ctcatctgtaaactcatgttgctctttacaaag

SEQ ID NO: 537175 - DNA, 33 bp, Homo sapien
acttgaactctgtactaagaaagtcgaaagaaa

SEQ ID NO: 537176 - DNA, 33 bp, Homo sapien
acttgaactctgtactgagaaagtcgaaagaaa

SEQ ID NO: 537177 - DNA, 33 bp, Homo sapien
cacagcataaaataacaatcatgggagaaatta

SEQ ID NO: 537178 - DNA, 33 bp, Homo sapien
cacagcataaaataaccatcatgggagaaatta

SEQ ID NO: 537179 - DNA, 33 bp, Homo sapien
ttcttctcagtggacacagttaggatatatgtg

SEQ ID NO: 537180 - DNA, 33 bp, Homo sapien
ttcttctcagtggacagagttaggatatatgtg

SEQ ID NO: 537181 - DNA, 33 bp, Homo sapien
atttgtatttataagaccaatcagttgtaaatc

SEQ ID NO: 537182 - DNA, 33 bp, Homo sapien
atttgtatttataagagcaatcagttgtaaatc

SEQ ID NO: 537183 - DNA, 33 bp, Homo sapien
aaaaaaatatgttgccagagttacacaaatctg

SEQ ID NO: 537184 - DNA, 33 bp, Homo sapien
aaaaaaatatgttgcctgagttacacaaatctg

SEQ ID NO: 537185 - DNA, 33 bp, Homo sapien
tatgaggacagataaactggactctggtgatgc

SEQ ID NO: 537186 - DNA, 33 bp, Homo sapien
tatgaggacagataaattggactctggtgatgc

SEQ ID NO: 537187 - DNA, 33 bp, Homo sapien
tatttaatagaagtaaacctaaacagtatgcca

SEQ ID NO: 537188 - DNA, 33 bp, Homo sapien
tatttaatagaagtaatcctaaacagtatgcca

SEQ ID NO: 537189 - DNA, 33 bp, Homo sapien
gggcctcgctgacaaggagtcttcctttctcca

SEQ ID NO: 537190 - DNA, 33 bp, Homo sapien
gggcctcgctgacaagtagtcttcctttctcca

SEQ ID NO: 537191 - DNA, 33 bp, Homo sapien
agagattaaagaattgacaaggcaaaaaagggg

SEQ ID NO: 537192 - DNA, 33 bp, Homo sapien
agagattaaagaattgtcaaggcaaaaaagggg

SEQ ID NO: 537193 - DNA, 33 bp, Homo sapien
tccatccaagcactagaaaacccaaactgaggt

SEQ ID NO: 537194 - DNA, 33 bp, Homo sapien
tccatccaagcactaggaaacccaaactgaggt

SEQ ID NO: 537195 - DNA, 33 bp, Homo sapien
tttaagtacatctagaatcatttggtggagtac

SEQ ID NO: 537196 - DNA, 33 bp, Homo sapien
tttaagtacatctagagtcatttggtggagtac

SEQ ID NO: 537197 - DNA, 33 bp, Homo sapien
catgtaaacactggagaatgtgctctgcatggg

SEQ ID NO: 537198 - DNA, 33 bp, Homo sapien
catgtaaacactggaggatgtgctctgcatggg

SEQ ID NO: 537199 - DNA, 33 bp, Homo sapien
tcaaaacttggtcaggcatgctcagtaggtcta

SEQ ID NO: 537200 - DNA, 33 bp, Homo sapien
tcaaaacttggtcaggtatgctcagtaggtcta

SEQ ID NO: 537201 - DNA, 33 bp, Homo sapien
gcatatccttttgtagaaattgacatgctgata

SEQ ID NO: 537202 - DNA, 33 bp, Homo sapien
gcatatccttttgtaggaattgacatgctgata

SEQ ID NO: 537203 - DNA, 33 bp, Homo sapien
caccccctgccaaagacgttcatattctaatcc

SEQ ID NO: 537204 - DNA, 33 bp, Homo sapien
caccccctgccaaagatgttcatattctaatcc

SEQ ID NO: 537205 - DNA, 33 bp, Homo sapien
ggctgctcttagaaaccacatgggaaccagggc

SEQ ID NO: 537206 - DNA, 33 bp, Homo sapien
ggctgctcttagaaacgacatgggaaccagggc

SEQ ID NO: 537207 - DNA, 33 bp, Homo sapien
ctactctgttgagaaaatggcaaccgttagaca

SEQ ID NO: 537208 - DNA, 33 bp, Homo sapien
ctactctgttgagaaagtggcaaccgttagaca

SEQ ID NO: 537209 - DNA, 33 bp, Homo sapien
tcagatctaccactcaacattacagaagctcaa

SEQ ID NO: 537210 - DNA, 33 bp, Homo sapien
tcagatctaccactcagcattacagaagctcaa

SEQ ID NO: 537211 - DNA, 33 bp, Homo sapien
cccaacagcagtgcaaactcccatgtatggagt

SEQ ID NO: 537212 - DNA, 33 bp, Homo sapien
cccaacagcagtgcaagctcccatgtatggagt

SEQ ID NO: 537213 - DNA, 33 bp, Homo sapien
agctgattctcatttgcagcattttttgaattt

SEQ ID NO: 537214 - DNA, 33 bp, Homo sapien
agctgattctcatttggagcattttttgaattt

SEQ ID NO: 537215 - DNA, 33 bp, Homo sapien
catagttttctatttacgaacatctttgtctcc

SEQ ID NO: 537216 - DNA, 33 bp, Homo sapien
catagttttctatttatgaacatctttgtctcc

SEQ ID NO: 537217 - DNA, 33 bp, Homo sapien
gtgattggaaagctcacagtaaggtttttagtt

SEQ ID NO: 537218 - DNA, 33 bp, Homo sapien
gtgattggaaagctcatagtaaggtttttagtt

SEQ ID NO: 537219 - DNA, 33 bp, Homo sapien
tgagctcttccagtagcatgaatagtgtccctc

SEQ ID NO: 537220 - DNA, 33 bp, Homo sapien
tgagctcttccagtaggatgaatagtgtccctc

SEQ ID NO: 537221 - DNA, 33 bp, Homo sapien
gtcctaatttttgcaaagacagggatattttga

SEQ ID NO: 537222 - DNA, 33 bp, Homo sapien
gtcctaatttttgcaaggacagggatattttga

SEQ ID NO: 537223 - DNA, 33 bp, Homo sapien
ccttattagtattagcactgttgtccagacttt

SEQ ID NO: 537224 - DNA, 33 bp, Homo sapien
ccttattagtattagcgctgttgtccagacttt

SEQ ID NO: 537225 - DNA, 33 bp, Homo sapien
tacatatgttctcttacgtatttatccagaaac

SEQ ID NO: 537226 - DNA, 33 bp, Homo sapien
tacatatgttctcttatgtatttatccagaaac

SEQ ID NO: 537227 - DNA, 33 bp, Homo sapien
aaagtcggtaataacaaatttccctgagctaaa

SEQ ID NO: 537228 - DNA, 33 bp, Homo sapien
aaagtcggtaataacagatttccctgagctaaa

SEQ ID NO: 537229 - DNA, 33 bp, Homo sapien
ggtccagctttatttcacactaggctgtgaggt

SEQ ID NO: 537230 - DNA, 33 bp, Homo sapien
ggtccagctttatttcgcactaggctgtgaggt

SEQ ID NO: 537231 - DNA, 33 bp, Homo sapien
agatagtgacagcagcaagtgctttttagatca

SEQ ID NO: 537232 - DNA, 33 bp, Homo sapien
agatagtgacagcagcgagtgctttttagatca

SEQ ID NO: 537233 - DNA, 33 bp, Homo sapien
ttccatagctcaacacaatgctctctttgccat

SEQ ID NO: 537234 - DNA, 33 bp, Homo sapien
ttccatagctcaacacgatgctctctttgccat

SEQ ID NO: 537235 - DNA, 33 bp, Homo sapien
aggtcacagagcttagcatgtagtgtggtaatc

SEQ ID NO: 537236 - DNA, 33 bp, Homo sapien
aggtcacagagcttaggatgtagtgtggtaatc

SEQ ID NO: 537237 - DNA, 33 bp, Homo sapien
gaagaggtatcaataaataacttcgatgatgat

SEQ ID NO: 537238 - DNA, 33 bp, Homo sapien
gaagaggtatcaataagtaacttcgatgatgat

SEQ ID NO: 537239 - DNA, 33 bp, Homo sapien
tccttctacagcagaaatatgctgtggcttttt

SEQ ID NO: 537240 - DNA, 33 bp, Homo sapien
tccttctacagcagaagtatgctgtggcttttt

SEQ ID NO: 537241 - DNA, 33 bp, Homo sapien
tacagaactgtaaggaaataaatttgtgttgtt

SEQ ID NO: 537242 - DNA, 33 bp, Homo sapien
tacagaactgtaaggacataaatttgtgttgtt

SEQ ID NO: 537243 - DNA, 33 bp, Homo sapien
tttgaatatggaagaaagtgcctaaagtgagta

SEQ ID NO: 537244 - DNA, 33 bp, Homo sapien
tttgaatatggaagaacgtgcctaaagtgagta

SEQ ID NO: 537245 - DNA, 33 bp, Homo sapien
atacattaagagcctgcagaacgctcagtggcc

SEQ ID NO: 537246 - DNA, 33 bp, Homo sapien
atacattaagagcctgtagaacgctcagtggcc

SEQ ID NO: 537247 - DNA, 33 bp, Homo sapien
tcatggttcttgtatcaaagtacaattgaacat

SEQ ID NO: 537248 - DNA, 33 bp, Homo sapien
tcatggttcttgtatcgaagtacaattgaacat

SEQ ID NO: 537249 - DNA, 33 bp, Homo sapien
agagggagggaatgaactgtggatcaaaggata

SEQ ID NO: 537250 - DNA, 33 bp, Homo sapien
agagggagggaatgaattgtggatcaaaggata

SEQ ID NO: 537251 - DNA, 33 bp, Homo sapien
ctgggctatctgctccaatgtgtctgtgacaca

SEQ ID NO: 537252 - DNA, 33 bp, Homo sapien
ctgggctatctgctccgatgtgtctgtgacaca

SEQ ID NO: 537253 - DNA, 33 bp, Homo sapien
ggtgttttgtagcagacaatttttcctcctcca

SEQ ID NO: 537254 - DNA, 33 bp, Homo sapien
ggtgttttgtagcagataatttttcctcctcca

SEQ ID NO: 537255 - DNA, 33 bp, Homo sapien
gaattgctcaattgggaaaaataattcaatcta

SEQ ID NO: 537256 - DNA, 33 bp, Homo sapien
gaattgctcaattgggcaaaataattcaatcta

SEQ ID NO: 537257 - DNA, 33 bp, Homo sapien
catgcttgaacacttgcagagggaaaatgcgga

SEQ ID NO: 537258 - DNA, 33 bp, Homo sapien
catgcttgaacacttgtagagggaaaatgcgga

SEQ ID NO: 537259 - DNA, 33 bp, Homo sapien
ctgcacagtttcacctaacccatgcttgaacac

SEQ ID NO: 537260 - DNA, 33 bp, Homo sapien
ctgcacagtttcacctgacccatgcttgaacac

SEQ ID NO: 537261 - DNA, 33 bp, Homo sapien
gtctggagaggcaaacagagtattagcacagga

SEQ ID NO: 537262 - DNA, 33 bp, Homo sapien
gtctggagaggcaaacggagtattagcacagga

SEQ ID NO: 537263 - DNA, 33 bp, Homo sapien
tataggaagaaaagaaaacactgtacatgaaag

SEQ ID NO: 537264 - DNA, 33 bp, Homo sapien
tataggaagaaaagaagacactgtacatgaaag

SEQ ID NO: 537265 - DNA, 33 bp, Homo sapien
gccacagccttgtgaaactcggaaaagatgctg

SEQ ID NO: 537266 - DNA, 33 bp, Homo sapien
gccacagccttgtgaatctcggaaaagatgctg

SEQ ID NO: 537267 - DNA, 33 bp, Homo sapien
tgcttatgcataagtgaaatgcttccagaatag

SEQ ID NO: 537268 - DNA, 33 bp, Homo sapien
tgcttatgcataagtgtaatgcttccagaatag

SEQ ID NO: 537269 - DNA, 33 bp, Homo sapien
ggaactctgtgttggaaatggtgaagccagaag

SEQ ID NO: 537270 - DNA, 33 bp, Homo sapien
ggaactctgtgttggagatggtgaagccagaag

SEQ ID NO: 537271 - DNA, 33 bp, Homo sapien
tttggagagaaccaaagtcagccaaaagagccc

SEQ ID NO: 537272 - DNA, 33 bp, Homo sapien
tttggagagaaccaaattcagccaaaagagccc

SEQ ID NO: 537273 - DNA, 33 bp, Homo sapien
gctgacccagaaggaacgtcccgattgccactc

SEQ ID NO: 537274 - DNA, 33 bp, Homo sapien
gctgacccagaaggaatgtcccgattgccactc

SEQ ID NO: 537275 - DNA, 33 bp, Homo sapien
aatataagcaatgtaaagataatgtgtatttgc

SEQ ID NO: 537276 - DNA, 33 bp, Homo sapien
aatataagcaatgtaatgataatgtgtatttgc

SEQ ID NO: 537277 - DNA, 33 bp, Homo sapien
gcactaaactcaagaaaacactaactgaaacag

SEQ ID NO: 537278 - DNA, 33 bp, Homo sapien
gcactaaactcaagaacacactaactgaaacag

SEQ ID NO: 537279 - DNA, 33 bp, Homo sapien
gttttggttgtttctgccacctcttggagtggc

SEQ ID NO: 537280 - DNA, 33 bp, Homo sapien
gttttggttgtttctgtcacctcttggagtggc

SEQ ID NO: 537281 - DNA, 33 bp, Homo sapien
ccagatgcgtcttcaacagggatatttttgtag

SEQ ID NO: 537282 - DNA, 33 bp, Homo sapien
ccagatgcgtcttcaatagggatatttttgtag

SEQ ID NO: 537283 - DNA, 33 bp, Homo sapien
aggcatctttatatccaccgccatagtccaccc

SEQ ID NO: 537284 - DNA, 33 bp, Homo sapien
aggcatctttatatccgccgccatagtccaccc

SEQ ID NO: 537285 - DNA, 33 bp, Homo sapien
agctcttccaggatcaaagtgtgcttgtctttc

SEQ ID NO: 537286 - DNA, 33 bp, Homo sapien
agctcttccaggatcatagtgtgcttgtctttc

SEQ ID NO: 537287 - DNA, 33 bp, Homo sapien
gttaaacttcaaccaacacaggtctgttatact

SEQ ID NO: 537288 - DNA, 33 bp, Homo sapien
gttaaacttcaaccaagacaggtctgttatact

SEQ ID NO: 537289 - DNA, 33 bp, Homo sapien
atatgtaaatagaaacagtgagggcaatgggat

SEQ ID NO: 537290 - DNA, 33 bp, Homo sapien
atatgtaaatagaaaccgtgagggcaatgggat

SEQ ID NO: 537291 - DNA, 33 bp, Homo sapien
tatgtaaacactctcacaaagatttttcagcat

SEQ ID NO: 537292 - DNA, 33 bp, Homo sapien
tatgtaaacactctcagaaagatttttcagcat

SEQ ID NO: 537293 - DNA, 33 bp, Homo sapien
acttaaatatgttggactcacctatgagcaatc

SEQ ID NO: 537294 - DNA, 33 bp, Homo sapien
acttaaatatgttggattcacctatgagcaatc

SEQ ID NO: 537295 - DNA, 33 bp, Homo sapien
cttgtttaagattctaccctaaatggttaaaca

SEQ ID NO: 537296 - DNA, 33 bp, Homo sapien
cttgtttaagattctatcctaaatggttaaaca

SEQ ID NO: 537297 - DNA, 33 bp, Homo sapien
ttttggagattttccagatccaggaatgttatt

SEQ ID NO: 537298 - DNA, 33 bp, Homo sapien
ttttggagattttccatatccaggaatgttatt

SEQ ID NO: 537299 - DNA, 33 bp, Homo sapien
tgatttggggtcagaacgtgtatctaaaaagag

SEQ ID NO: 537300 - DNA, 33 bp, Homo sapien
tgatttggggtcagaatgtgtatctaaaaagag

SEQ ID NO: 537301 - DNA, 33 bp, Homo sapien
ccctggtgggagaagacaggaatgaaaaagagt

SEQ ID NO: 537302 - DNA, 33 bp, Homo sapien
ccctggtgggagaagagaggaatgaaaaagagt

SEQ ID NO: 537303 - DNA, 33 bp, Homo sapien
cagtgtctcctgcaatcatatcaaccggcttcc

SEQ ID NO: 537304 - DNA, 33 bp, Homo sapien
cagtgtctcctgcaattatatcaaccggcttcc

SEQ ID NO: 537305 - DNA, 33 bp, Homo sapien
ctaaaaccttgttggcaaacatagatatctgcc

SEQ ID NO: 537306 - DNA, 33 bp, Homo sapien
ctaaaaccttgttggcgaacatagatatctgcc

SEQ ID NO: 537307 - DNA, 33 bp, Homo sapien
tcctttgtgggacttacgcgctccctgagcagg

SEQ ID NO: 537308 - DNA, 33 bp, Homo sapien
tcctttgtgggacttatgcgctccctgagcagg

SEQ ID NO: 537309 - DNA, 33 bp, Homo sapien
gaattgtgccatcccaaaaaagatctgttggag

SEQ ID NO: 537310 - DNA, 33 bp, Homo sapien
gaattgtgccatcccagaaaagatctgttggag

SEQ ID NO: 537311 - DNA, 33 bp, Homo sapien
ggttgatacggtggaaatgcgtagaatggggaa

SEQ ID NO: 537312 - DNA, 33 bp, Homo sapien
ggttgatacggtggaagtgcgtagaatggggaa

SEQ ID NO: 537313 - DNA, 33 bp, Homo sapien
gctggatgctatccagaaacacactggttatac

SEQ ID NO: 537314 - DNA, 33 bp, Homo sapien
gctggatgctatccaggaacacactggttatac

SEQ ID NO: 537315 - DNA, 33 bp, Homo sapien
gcatttccataatgcaagaggcctttctgagca

SEQ ID NO: 537316 - DNA, 33 bp, Homo sapien
gcatttccataatgcaggaggcctttctgagca

SEQ ID NO: 537317 - DNA, 33 bp, Homo sapien
agcttttgttgcttacaagagggaaaaagcttt

SEQ ID NO: 537318 - DNA, 33 bp, Homo sapien
agcttttgttgcttacgagagggaaaaagcttt

SEQ ID NO: 537319 - DNA, 33 bp, Homo sapien
gtgtaatttcttatcactgagtttcatgaagat

SEQ ID NO: 537320 - DNA, 33 bp, Homo sapien
gtgtaatttcttatcagtgagtttcatgaagat

SEQ ID NO: 537321 - DNA, 33 bp, Homo sapien
attgtatctcctcctcaaagtcttctcctttca

SEQ ID NO: 537322 - DNA, 33 bp, Homo sapien
attgtatctcctcctcgaagtcttctcctttca

SEQ ID NO: 537323 - DNA, 33 bp, Homo sapien
atttccaagtgtgcaactgataaataagtaaga

SEQ ID NO: 537324 - DNA, 33 bp, Homo sapien
atttccaagtgtgcaattgataaataagtaaga

SEQ ID NO: 537325 - DNA, 33 bp, Homo sapien
tcacctagtcaaagaacacaaggaagataagtg

SEQ ID NO: 537326 - DNA, 33 bp, Homo sapien
tcacctagtcaaagaatacaaggaagataagtg

SEQ ID NO: 537327 - DNA, 33 bp, Homo sapien
gtaagtagcctttgaaatacatgacagtagtat

SEQ ID NO: 537328 - DNA, 33 bp, Homo sapien
gtaagtagcctttgaactacatgacagtagtat

SEQ ID NO: 537329 - DNA, 33 bp, Homo sapien
ttacccctttaatttcccacataactaacttcc

SEQ ID NO: 537330 - DNA, 33 bp, Homo sapien
ttacccctttaatttcgcacataactaacttcc

SEQ ID NO: 537331 - DNA, 33 bp, Homo sapien
gagatcttctaatatacggagtttatattgtag

SEQ ID NO: 537332 - DNA, 33 bp, Homo sapien
gagatcttctaatatatggagtttatattgtag

SEQ ID NO: 537333 - DNA, 33 bp, Homo sapien
ccactctgagcagaaaaggctgtgcctctccac

SEQ ID NO: 537334 - DNA, 33 bp, Homo sapien
ccactctgagcagaaagggctgtgcctctccac

SEQ ID NO: 537335 - DNA, 33 bp, Homo sapien
ggcaagggatagaccaatggaagagaggtagaa

SEQ ID NO: 537336 - DNA, 33 bp, Homo sapien
ggcaagggatagaccagtggaagagaggtagaa

SEQ ID NO: 537337 - DNA, 33 bp, Homo sapien
atgccagatcagtttgaagtctgaaattttaat

SEQ ID NO: 537338 - DNA, 33 bp, Homo sapien
atgccagatcagtttgtagtctgaaattttaat

SEQ ID NO: 537339 - DNA, 33 bp, Homo sapien
actaaattgttgttcacgtaactttgcaaacca

SEQ ID NO: 537340 - DNA, 33 bp, Homo sapien
actaaattgttgttcatgtaactttgcaaacca

SEQ ID NO: 537341 - DNA, 33 bp, Homo sapien
ttatgttcagaaacaacgtcctctgctatatca

SEQ ID NO: 537342 - DNA, 33 bp, Homo sapien
ttatgttcagaaacaatgtcctctgctatatca

SEQ ID NO: 537343 - DNA, 33 bp, Homo sapien
cttctggcctgtactaagtgttaggaaatgtta

SEQ ID NO: 537344 - DNA, 33 bp, Homo sapien
cttctggcctgtactatgtgttaggaaatgtta

SEQ ID NO: 537345 - DNA, 33 bp, Homo sapien
catcaagagtcaaagaaacgtaggccgggcatg

SEQ ID NO: 537346 - DNA, 33 bp, Homo sapien
catcaagagtcaaagacacgtaggccgggcatg

SEQ ID NO: 537347 - DNA, 33 bp, Homo sapien
attatgcaaatgagcaatataacttatcaacta

SEQ ID NO: 537348 - DNA, 33 bp, Homo sapien
attatgcaaatgagcattataacttatcaacta

SEQ ID NO: 537349 - DNA, 33 bp, Homo sapien
tgtaacaagaatagggaaactttactcccattt

SEQ ID NO: 537350 - DNA, 33 bp, Homo sapien
tgtaacaagaatagggtaactttactcccattt

SEQ ID NO: 537351 - DNA, 33 bp, Homo sapien
gaaggcacccaagcacacatagcctgggagaga

SEQ ID NO: 537352 - DNA, 33 bp, Homo sapien
gaaggcacccaagcacgcatagcctgggagaga

SEQ ID NO: 537353 - DNA, 33 bp, Homo sapien
cgtacctttgcagccaagtttttcctgtatgtg

SEQ ID NO: 537354 - DNA, 33 bp, Homo sapien
cgtacctttgcagccaggtttttcctgtatgtg

SEQ ID NO: 537355 - DNA, 33 bp, Homo sapien
aaatgattaactgcacactaagagaatacattt

SEQ ID NO: 537356 - DNA, 33 bp, Homo sapien
aaatgattaactgcacgctaagagaatacattt

SEQ ID NO: 537357 - DNA, 33 bp, Homo sapien
tgctgagataaagacaacactggcttagaaaca

SEQ ID NO: 537358 - DNA, 33 bp, Homo sapien
tgctgagataaagacagcactggcttagaaaca

SEQ ID NO: 537359 - DNA, 33 bp, Homo sapien
gtggcttccatttcaaattcttgtcacacttca

SEQ ID NO: 537360 - DNA, 33 bp, Homo sapien
gtggcttccatttcaagttcttgtcacacttca

SEQ ID NO: 537361 - DNA, 33 bp, Homo sapien
ttcctagttaaaataacgaatgtccttgatcta

SEQ ID NO: 537362 - DNA, 33 bp, Homo sapien
ttcctagttaaaataatgaatgtccttgatcta

SEQ ID NO: 537363 - DNA, 33 bp, Homo sapien
tttggaagctctagagaaggatctgtttccttg

SEQ ID NO: 537364 - DNA, 33 bp, Homo sapien
tttggaagctctagaggaggatctgtttccttg

SEQ ID NO: 537365 - DNA, 33 bp, Homo sapien
gaaagagaagatgactaaagagatgagaagccc

SEQ ID NO: 537366 - DNA, 33 bp, Homo sapien
gaaagagaagatgactgaagagatgagaagccc

SEQ ID NO: 537367 - DNA, 33 bp, Homo sapien
tttctttacgaaactaaaacaaatctgtataat

SEQ ID NO: 537368 - DNA, 33 bp, Homo sapien
tttctttacgaaactacaacaaatctgtataat

SEQ ID NO: 537369 - DNA, 33 bp, Homo sapien
tgacatcctttgattccatgaacaagtctgtac

SEQ ID NO: 537370 - DNA, 33 bp, Homo sapien
tgacatcctttgattctatgaacaagtctgtac

SEQ ID NO: 537371 - DNA, 33 bp, Homo sapien
taagatgttgcaactggaatgaaccctctaaat

SEQ ID NO: 537372 - DNA, 33 bp, Homo sapien
taagatgttgcaactgtaatgaaccctctaaat

SEQ ID NO: 537373 - DNA, 33 bp, Homo sapien
cctgggccttaacatacaagccttagttccctc

SEQ ID NO: 537374 - DNA, 33 bp, Homo sapien
cctgggccttaacatataagccttagttccctc

SEQ ID NO: 537375 - DNA, 33 bp, Homo sapien
tacttgtttggtgaaacaggtccatctctcaca

SEQ ID NO: 537376 - DNA, 33 bp, Homo sapien
tacttgtttggtgaaataggtccatctctcaca

SEQ ID NO: 537377 - DNA, 33 bp, Homo sapien
ggacgcttcataaaccacctcatggcctgcctt

SEQ ID NO: 537378 - DNA, 33 bp, Homo sapien
ggacgcttcataaaccgcctcatggcctgcctt

SEQ ID NO: 537379 - DNA, 33 bp, Homo sapien
ggtatataggagtgaggctaatggttaaatgtg

SEQ ID NO: 537380 - DNA, 33 bp, Homo sapien
ggtatataggagtgagtctaatggttaaatgtg

SEQ ID NO: 537381 - DNA, 33 bp, Homo sapien
catttcacacaccttccaatccactctgctctt

SEQ ID NO: 537382 - DNA, 33 bp, Homo sapien
catttcacacaccttctaatccactctgctctt

SEQ ID NO: 537383 - DNA, 33 bp, Homo sapien
acacggcctagatcaaagtacttgcccaaatcc

SEQ ID NO: 537384 - DNA, 33 bp, Homo sapien
acacggcctagatcaaggtacttgcccaaatcc

SEQ ID NO: 537385 - DNA, 33 bp, Homo sapien
cagaaactccaaactacgtaatgcagttcctag

SEQ ID NO: 537386 - DNA, 33 bp, Homo sapien
cagaaactccaaactaggtaatgcagttcctag

SEQ ID NO: 537387 - DNA, 33 bp, Homo sapien
cctgctgttttctccacagttgttatcaccgcc

SEQ ID NO: 537388 - DNA, 33 bp, Homo sapien
cctgctgttttctccatagttgttatcaccgcc

SEQ ID NO: 537389 - DNA, 33 bp, Homo sapien
actgttatgttttagaaccttgcattttgcccc

SEQ ID NO: 537390 - DNA, 33 bp, Homo sapien
actgttatgttttagacccttgcattttgcccc

SEQ ID NO: 537391 - DNA, 33 bp, Homo sapien
ctagcatgtagcagaaccaagattagaacatag

SEQ ID NO: 537392 - DNA, 33 bp, Homo sapien
ctagcatgtagcagaagcaagattagaacatag

SEQ ID NO: 537393 - DNA, 33 bp, Homo sapien
atgatgttttgatgccacctcttgagtgtttta

SEQ ID NO: 537394 - DNA, 33 bp, Homo sapien
atgatgttttgatgccccctcttgagtgtttta

SEQ ID NO: 537395 - DNA, 33 bp, Homo sapien
attcacagaatatggactaaatgggtatggtat

SEQ ID NO: 537396 - DNA, 33 bp, Homo sapien
attcacagaatatggattaaatgggtatggtat

SEQ ID NO: 537397 - DNA, 33 bp, Homo sapien
atctttagaaaatgtacagaaatagcctcatgc

SEQ ID NO: 537398 - DNA, 33 bp, Homo sapien
atctttagaaaatgtatagaaatagcctcatgc

SEQ ID NO: 537399 - DNA, 33 bp, Homo sapien
agcactattatcaataacctttgaaaactatct

SEQ ID NO: 537400 - DNA, 33 bp, Homo sapien
agcactattatcaatatcctttgaaaactatct

SEQ ID NO: 537401 - DNA, 33 bp, Homo sapien
ggcagttgtgaaagcaataagcaactcaccacc

SEQ ID NO: 537402 - DNA, 33 bp, Homo sapien
ggcagttgtgaaagcagtaagcaactcaccacc

SEQ ID NO: 537403 - DNA, 33 bp, Homo sapien
cgtagctataagtaagaactgccctaattatta

SEQ ID NO: 537404 - DNA, 33 bp, Homo sapien
cgtagctataagtaagtactgccctaattatta

SEQ ID NO: 537405 - DNA, 33 bp, Homo sapien
cgggagtttaaaacgcaactgattctacaaact

SEQ ID NO: 537406 - DNA, 33 bp, Homo sapien
cgggagtttaaaacgccactgattctacaaact

SEQ ID NO: 537407 - DNA, 33 bp, Homo sapien
aaccatcatgaagtgaataaggatgacatgagt

SEQ ID NO: 537408 - DNA, 33 bp, Homo sapien
aaccatcatgaagtgagtaaggatgacatgagt

SEQ ID NO: 537409 - DNA, 33 bp, Homo sapien
aattactttcaaaatccaattactcaagttgcc

SEQ ID NO: 537410 - DNA, 33 bp, Homo sapien
aattactttcaaaatctaattactcaagttgcc

SEQ ID NO: 537411 - DNA, 33 bp, Homo sapien
gcatttacttgtctccacttaggccagaatagg

SEQ ID NO: 537412 - DNA, 33 bp, Homo sapien
gcatttacttgtctccgcttaggccagaatagg

SEQ ID NO: 537413 - DNA, 33 bp, Homo sapien
gaaagcttgatgagtgaagttttgatctaggag

SEQ ID NO: 537414 - DNA, 33 bp, Homo sapien
gaaagcttgatgagtgcagttttgatctaggag

SEQ ID NO: 537415 - DNA, 33 bp, Homo sapien
ggagatagagcaaaaaagaagtgacaacagata

SEQ ID NO: 537416 - DNA, 33 bp, Homo sapien
ggagatagagcaaaaatgaagtgacaacagata

SEQ ID NO: 537417 - DNA, 33 bp, Homo sapien
ctgaaagagacctaaccgatacgctgagaacat

SEQ ID NO: 537418 - DNA, 33 bp, Homo sapien
ctgaaagagacctaactgatacgctgagaacat

SEQ ID NO: 537419 - DNA, 33 bp, Homo sapien
gtgaactataggtgtgctagaatgtactcattt

SEQ ID NO: 537420 - DNA, 33 bp, Homo sapien
gtgaactataggtgtgttagaatgtactcattt

SEQ ID NO: 537421 - DNA, 33 bp, Homo sapien
tttgttcaaccactacagcaccgtaagatatgt

SEQ ID NO: 537422 - DNA, 33 bp, Homo sapien
tttgttcaaccactacggcaccgtaagatatgt

SEQ ID NO: 537423 - DNA, 33 bp, Homo sapien
ctccagctggccaaacccttgatttttgtcttc

SEQ ID NO: 537424 - DNA, 33 bp, Homo sapien
ctccagctggccaaactcttgatttttgtcttc

SEQ ID NO: 537425 - DNA, 33 bp, Homo sapien
tattctaatgaaagacacattttccaaggttta

SEQ ID NO: 537426 - DNA, 33 bp, Homo sapien
tattctaatgaaagacgcattttccaaggttta

SEQ ID NO: 537427 - DNA, 33 bp, Homo sapien
cttccaaaatggagcacgaatacaatattaaat

SEQ ID NO: 537428 - DNA, 33 bp, Homo sapien
cttccaaaatggagcaggaatacaatattaaat

SEQ ID NO: 537429 - DNA, 33 bp, Homo sapien
acctgctggtagataccgaggaatgaaagcaga

SEQ ID NO: 537430 - DNA, 33 bp, Homo sapien
acctgctggtagatactgaggaatgaaagcaga

SEQ ID NO: 537431 - DNA, 33 bp, Homo sapien
gcagccacaggaccatcaatgtagttgataagc

SEQ ID NO: 537432 - DNA, 33 bp, Homo sapien
gcagccacaggaccattaatgtagttgataagc

SEQ ID NO: 537433 - DNA, 33 bp, Homo sapien
gtgctcctgtgattataagcttctctgccaagt

SEQ ID NO: 537434 - DNA, 33 bp, Homo sapien
gtgctcctgtgattatgagcttctctgccaagt

SEQ ID NO: 537435 - DNA, 33 bp, Homo sapien
ttttggttagtccttcaaaaaggtattacctgc

SEQ ID NO: 537436 - DNA, 33 bp, Homo sapien
ttttggttagtccttcgaaaaggtattacctgc

SEQ ID NO: 537437 - DNA, 33 bp, Homo sapien
atccagcctatataacagagagagaccctgtat

SEQ ID NO: 537438 - DNA, 33 bp, Homo sapien
atccagcctatataacggagagagaccctgtat

SEQ ID NO: 537439 - DNA, 33 bp, Homo sapien
ttgacacctgtgcttacgtgggtataaacagga

SEQ ID NO: 537440 - DNA, 33 bp, Homo sapien
ttgacacctgtgcttatgtgggtataaacagga

SEQ ID NO: 537441 - DNA, 33 bp, Homo sapien
catataaacacatccaaaggtatatatacacac

SEQ ID NO: 537442 - DNA, 33 bp, Homo sapien
catataaacacatccacaggtatatatacacac

SEQ ID NO: 537443 - DNA, 33 bp, Homo sapien
gaaatgaaactcggaaaatgaggtgatttcaat

SEQ ID NO: 537444 - DNA, 33 bp, Homo sapien
gaaatgaaactcggaagatgaggtgatttcaat

SEQ ID NO: 537445 - DNA, 33 bp, Homo sapien
acacatttcatgtaggaccaaacaagagaaaca

SEQ ID NO: 537446 - DNA, 33 bp, Homo sapien
acacatttcatgtaggcccaaacaagagaaaca

SEQ ID NO: 537447 - DNA, 33 bp, Homo sapien
tagccatgagaagaaccgtgtcactggggtgga

SEQ ID NO: 537448 - DNA, 33 bp, Homo sapien
tagccatgagaagaactgtgtcactggggtgga

SEQ ID NO: 537449 - DNA, 33 bp, Homo sapien
ctgtgactggatggtacaggtttagggcagacc

SEQ ID NO: 537450 - DNA, 33 bp, Homo sapien
ctgtgactggatggtataggtttagggcagacc

SEQ ID NO: 537451 - DNA, 33 bp, Homo sapien
tattttccacactgtccagaggagagaagttat

SEQ ID NO: 537452 - DNA, 33 bp, Homo sapien
tattttccacactgtcgagaggagagaagttat

SEQ ID NO: 537453 - DNA, 33 bp, Homo sapien
attcacttctctcccccctttcatgattggttt

SEQ ID NO: 537454 - DNA, 33 bp, Homo sapien
attcacttctctcccctctttcatgattggttt

SEQ ID NO: 537455 - DNA, 33 bp, Homo sapien
caaatgcttattctcaactcaacattaacattt

SEQ ID NO: 537456 - DNA, 33 bp, Homo sapien
caaatgcttattctcagctcaacattaacattt

SEQ ID NO: 537457 - DNA, 33 bp, Homo sapien
tcaagtgcctactatacgtcaggtgttggcaga

SEQ ID NO: 537458 - DNA, 33 bp, Homo sapien
tcaagtgcctactatatgtcaggtgttggcaga

SEQ ID NO: 537459 - DNA, 33 bp, Homo sapien
accacgtatctcttataaggctgacaagaatat

SEQ ID NO: 537460 - DNA, 33 bp, Homo sapien
accacgtatctcttatgaggctgacaagaatat

SEQ ID NO: 537461 - DNA, 33 bp, Homo sapien
cttccttgaaaactataaacaagttgctgattc

SEQ ID NO: 537462 - DNA, 33 bp, Homo sapien
cttccttgaaaactatcaacaagttgctgattc

SEQ ID NO: 537463 - DNA, 33 bp, Homo sapien
ataattcgtattcaaactaagaccaatcttttg

SEQ ID NO: 537464 - DNA, 33 bp, Homo sapien
ataattcgtattcaaattaagaccaatcttttg

SEQ ID NO: 537465 - DNA, 33 bp, Homo sapien
atgccaggcacttacacatcttacatagaagca

SEQ ID NO: 537466 - DNA, 33 bp, Homo sapien
atgccaggcacttacatatcttacatagaagca

SEQ ID NO: 537467 - DNA, 33 bp, Homo sapien
ttacactggttaattcacttagcaatttttaaa

SEQ ID NO: 537468 - DNA, 33 bp, Homo sapien
ttacactggttaattctcttagcaatttttaaa

SEQ ID NO: 537469 - DNA, 33 bp, Homo sapien
gagctctaacgtcctgaagatataacaatgaac

SEQ ID NO: 537470 - DNA, 33 bp, Homo sapien
gagctctaacgtcctgcagatataacaatgaac

SEQ ID NO: 537471 - DNA, 33 bp, Homo sapien
ggttctttttggagaaatcagagggctgaggtc

SEQ ID NO: 537472 - DNA, 33 bp, Homo sapien
ggttctttttggagaattcagagggctgaggtc

SEQ ID NO: 537473 - DNA, 33 bp, Homo sapien
tccccattcagtgataagaaggagttcccctcc

SEQ ID NO: 537474 - DNA, 33 bp, Homo sapien
tccccattcagtgataggaaggagttcccctcc

SEQ ID NO: 537475 - DNA, 33 bp, Homo sapien
agaagcttaggcagaaagtaaatcggaagacag

SEQ ID NO: 537476 - DNA, 33 bp, Homo sapien
agaagcttaggcagaaggtaaatcggaagacag

SEQ ID NO: 537477 - DNA, 33 bp, Homo sapien
cgtttgaagattcctccagtcaaaattactccc

SEQ ID NO: 537478 - DNA, 33 bp, Homo sapien
cgtttgaagattcctctagtcaaaattactccc

SEQ ID NO: 537479 - DNA, 33 bp, Homo sapien
tttctccaggaagatacacagatggccagtaag

SEQ ID NO: 537480 - DNA, 33 bp, Homo sapien
tttctccaggaagatatacagatggccagtaag

SEQ ID NO: 537481 - DNA, 33 bp, Homo sapien
taaatatgaagcagaaatcagtgaagtagagaa

SEQ ID NO: 537482 - DNA, 33 bp, Homo sapien
taaatatgaagcagaagtcagtgaagtagagaa

SEQ ID NO: 537483 - DNA, 33 bp, Homo sapien
gagaagcaattagccaaattcaaaaaatggttc

SEQ ID NO: 537484 - DNA, 33 bp, Homo sapien
gagaagcaattagccacattcaaaaaatggttc

SEQ ID NO: 537485 - DNA, 33 bp, Homo sapien
atggagtatgccaaaacgttgaccattgttaaa

SEQ ID NO: 537486 - DNA, 33 bp, Homo sapien
atggagtatgccaaaaggttgaccattgttaaa

SEQ ID NO: 537487 - DNA, 33 bp, Homo sapien
atgccaggatagacaacctacagtttctgccac

SEQ ID NO: 537488 - DNA, 33 bp, Homo sapien
atgccaggatagacaatctacagtttctgccac

SEQ ID NO: 537489 - DNA, 33 bp, Homo sapien
ttggcataaagaagaacagcagaagatggcttc

SEQ ID NO: 537490 - DNA, 33 bp, Homo sapien
ttggcataaagaagaatagcagaagatggcttc

SEQ ID NO: 537491 - DNA, 33 bp, Homo sapien
tcgaactcaggccacacggatgaactggacagt

SEQ ID NO: 537492 - DNA, 33 bp, Homo sapien
tcgaactcaggccacatggatgaactggacagt

SEQ ID NO: 537493 - DNA, 33 bp, Homo sapien
tagcggtttcattttaacaagcatctccatgat

SEQ ID NO: 537494 - DNA, 33 bp, Homo sapien
tagcggtttcattttaccaagcatctccatgat

SEQ ID NO: 537495 - DNA, 33 bp, Homo sapien
tggcagccaggagccacgttaaatttaggcata

SEQ ID NO: 537496 - DNA, 33 bp, Homo sapien
tggcagccaggagccatgttaaatttaggcata

SEQ ID NO: 537497 - DNA, 33 bp, Homo sapien
tcaggcttgggttttacagcagtcactctggtc

SEQ ID NO: 537498 - DNA, 33 bp, Homo sapien
tcaggcttgggttttagagcagtcactctggtc

SEQ ID NO: 537499 - DNA, 33 bp, Homo sapien
tatgctaatgttagaccattttacatcatttca

SEQ ID NO: 537500 - DNA, 33 bp, Homo sapien
tatgctaatgttagacgattttacatcatttca

SEQ ID NO: 537501 - DNA, 33 bp, Homo sapien
ttgagcagggcacttaacctcattcattgagct

SEQ ID NO: 537502 - DNA, 33 bp, Homo sapien
ttgagcagggcacttagcctcattcattgagct

SEQ ID NO: 537503 - DNA, 33 bp, Homo sapien
tggacttgtctaaaaacagaacatatcagaaat

SEQ ID NO: 537504 - DNA, 33 bp, Homo sapien
tggacttgtctaaaaagagaacatatcagaaat

SEQ ID NO: 537505 - DNA, 33 bp, Homo sapien
agtgtcaagagttgtaccgaaggggcttgctcc

SEQ ID NO: 537506 - DNA, 33 bp, Homo sapien
agtgtcaagagttgtagcgaaggggcttgctcc

SEQ ID NO: 537507 - DNA, 33 bp, Homo sapien
ttttacttaaacaaccactacagggtcttcctg

SEQ ID NO: 537508 - DNA, 33 bp, Homo sapien
ttttacttaaacaaccgctacagggtcttcctg

SEQ ID NO: 537509 - DNA, 33 bp, Homo sapien
ctgaaaaagacctgtacgtttccatcaatgata

SEQ ID NO: 537510 - DNA, 33 bp, Homo sapien
ctgaaaaagacctgtatgtttccatcaatgata

SEQ ID NO: 537511 - DNA, 33 bp, Homo sapien
ctgttttgctgcaaaacaaacactgttgataag

SEQ ID NO: 537512 - DNA, 33 bp, Homo sapien
ctgttttgctgcaaaataaacactgttgataag

SEQ ID NO: 537513 - DNA, 33 bp, Homo sapien
accagtatgtgttggcaacttgttctctcttcc

SEQ ID NO: 537514 - DNA, 33 bp, Homo sapien
accagtatgtgttggcgacttgttctctcttcc

SEQ ID NO: 537515 - DNA, 33 bp, Homo sapien
agcctggcattgtaaggctcatctaaaaggaag

SEQ ID NO: 537516 - DNA, 33 bp, Homo sapien
agcctggcattgtaagtctcatctaaaaggaag

SEQ ID NO: 537517 - DNA, 33 bp, Homo sapien
agcttttctctgacctcaacctggccaacatga

SEQ ID NO: 537518 - DNA, 33 bp, Homo sapien
agcttttctctgaccttaacctggccaacatga

SEQ ID NO: 537519 - DNA, 33 bp, Homo sapien
aaaagacaatcatttacgcccattgagtaagaa

SEQ ID NO: 537520 - DNA, 33 bp, Homo sapien
aaaagacaatcatttatgcccattgagtaagaa

SEQ ID NO: 537521 - DNA, 33 bp, Homo sapien
aggccagctgtggttacagtcatggacagatgt

SEQ ID NO: 537522 - DNA, 33 bp, Homo sapien
aggccagctgtggttatagtcatggacagatgt

SEQ ID NO: 537523 - DNA, 33 bp, Homo sapien
aaagaactgtaatgtacagggagaggggcatat

SEQ ID NO: 537524 - DNA, 33 bp, Homo sapien
aaagaactgtaatgtatagggagaggggcatat

SEQ ID NO: 537525 - DNA, 33 bp, Homo sapien
ggtacagtggtgcacaaaaccagagatgtagtt

SEQ ID NO: 537526 - DNA, 33 bp, Homo sapien
ggtacagtggtgcacataaccagagatgtagtt

SEQ ID NO: 537527 - DNA, 33 bp, Homo sapien
ataaaatgaaataagacgtgaagagcttatatt

SEQ ID NO: 537528 - DNA, 33 bp, Homo sapien
ataaaatgaaataagatgtgaagagcttatatt

SEQ ID NO: 537529 - DNA, 33 bp, Homo sapien
cagagaatgcctgctaagtaaaagaggttacct

SEQ ID NO: 537530 - DNA, 33 bp, Homo sapien
cagagaatgcctgctaggtaaaagaggttacct

SEQ ID NO: 537531 - DNA, 33 bp, Homo sapien
tgtgtacgccattaaactagatctgattaccat

SEQ ID NO: 537532 - DNA, 33 bp, Homo sapien
tgtgtacgccattaaagtagatctgattaccat

SEQ ID NO: 537533 - DNA, 33 bp, Homo sapien
caggttaaaagatggaaagatgaatatgaattg

SEQ ID NO: 537534 - DNA, 33 bp, Homo sapien
caggttaaaagatggagagatgaatatgaattg

SEQ ID NO: 537535 - DNA, 33 bp, Homo sapien
aggtgagttctccaaacgcacatgaggatgctg

SEQ ID NO: 537536 - DNA, 33 bp, Homo sapien
aggtgagttctccaaatgcacatgaggatgctg

SEQ ID NO: 537537 - DNA, 33 bp, Homo sapien
tcattttgcagcaaaaaaattttagtgtctatc

SEQ ID NO: 537538 - DNA, 33 bp, Homo sapien
tcattttgcagcaaaacaattttagtgtctatc

SEQ ID NO: 537539 - DNA, 33 bp, Homo sapien
aaatgtgtccagaaagaattgacagttcccata

SEQ ID NO: 537540 - DNA, 33 bp, Homo sapien
aaatgtgtccagaaaggattgacagttcccata

SEQ ID NO: 537541 - DNA, 33 bp, Homo sapien
ttcattttacaccaaacgctatttcaaaggtgc

SEQ ID NO: 537542 - DNA, 33 bp, Homo sapien
ttcattttacaccaaatgctatttcaaaggtgc

SEQ ID NO: 537543 - DNA, 33 bp, Homo sapien
aagaagctaacctccaagagtaaggaggcacca

SEQ ID NO: 537544 - DNA, 33 bp, Homo sapien
aagaagctaacctccaggagtaaggaggcacca

SEQ ID NO: 537545 - DNA, 33 bp, Homo sapien
gccggaataagggcaagtctatcaacaggagaa

SEQ ID NO: 537546 - DNA, 33 bp, Homo sapien
gccggaataagggcaattctatcaacaggagaa

SEQ ID NO: 537547 - DNA, 33 bp, Homo sapien
ttgtgtcactacactccagtgtcatgcttgggc

SEQ ID NO: 537548 - DNA, 33 bp, Homo sapien
ttgtgtcactacactctagtgtcatgcttgggc

SEQ ID NO: 537549 - DNA, 33 bp, Homo sapien
ggggcttagggaaaaccatgaaggataccacaa

SEQ ID NO: 537550 - DNA, 33 bp, Homo sapien
ggggcttagggaaaactatgaaggataccacaa

SEQ ID NO: 537551 - DNA, 33 bp, Homo sapien
cctgtggatggctgtacagaaaaggagatctgc

SEQ ID NO: 537552 - DNA, 33 bp, Homo sapien
cctgtggatggctgtatagaaaaggagatctgc

SEQ ID NO: 537553 - DNA, 33 bp, Homo sapien
gttcctgtgtccgcctaacaggcttgccatgtg

SEQ ID NO: 537554 - DNA, 33 bp, Homo sapien
gttcctgtgtccgcctgacaggcttgccatgtg

SEQ ID NO: 537555 - DNA, 33 bp, Homo sapien
agagtaacaagatgaactatgtccaatgactgt

SEQ ID NO: 537556 - DNA, 33 bp, Homo sapien
agagtaacaagatgaattatgtccaatgactgt

SEQ ID NO: 537557 - DNA, 33 bp, Homo sapien
aattcccacaaggtaacgtgaagaggaccagct

SEQ ID NO: 537558 - DNA, 33 bp, Homo sapien
aattcccacaaggtaatgtgaagaggaccagct

SEQ ID NO: 537559 - DNA, 33 bp, Homo sapien
gaaaataatagctgaagaatgagtaatgtttaa

SEQ ID NO: 537560 - DNA, 33 bp, Homo sapien
gaaaataatagctgaataatgagtaatgtttaa

SEQ ID NO: 537561 - DNA, 33 bp, Homo sapien
tacagtttaccagttccattgggacttcagcat

SEQ ID NO: 537562 - DNA, 33 bp, Homo sapien
tacagtttaccagttctattgggacttcagcat

SEQ ID NO: 537563 - DNA, 33 bp, Homo sapien
aacacagagtacaccaggagacccaggttctaa

SEQ ID NO: 537564 - DNA, 33 bp, Homo sapien
aacacagagtacaccatgagacccaggttctaa

SEQ ID NO: 537565 - DNA, 33 bp, Homo sapien
cttcaagaagtactgtaaacaagtcttatttaa

SEQ ID NO: 537566 - DNA, 33 bp, Homo sapien
cttcaagaagtactgtgaacaagtcttatttaa

SEQ ID NO: 537567 - DNA, 33 bp, Homo sapien
ggttgattgtgagaaccggtgcttgcaagcaac

SEQ ID NO: 537568 - DNA, 33 bp, Homo sapien
ggttgattgtgagaacgggtgcttgcaagcaac

SEQ ID NO: 537569 - DNA, 33 bp, Homo sapien
atcatatctgaaattacaactgacgtattcaat

SEQ ID NO: 537570 - DNA, 33 bp, Homo sapien
atcatatctgaaattataactgacgtattcaat

SEQ ID NO: 537571 - DNA, 33 bp, Homo sapien
atacagcagaaagtggaagaaatcatgaatgat

SEQ ID NO: 537572 - DNA, 33 bp, Homo sapien
atacagcagaaagtggtagaaatcatgaatgat

SEQ ID NO: 537573 - DNA, 33 bp, Homo sapien
ccactattaaccagaaatattgctaggtgtccc

SEQ ID NO: 537574 - DNA, 33 bp, Homo sapien
ccactattaaccagaactattgctaggtgtccc

SEQ ID NO: 537575 - DNA, 33 bp, Homo sapien
aatgatggtaaggttacgtaggagaaagccctt

SEQ ID NO: 537576 - DNA, 33 bp, Homo sapien
aatgatggtaaggttatgtaggagaaagccctt

SEQ ID NO: 537577 - DNA, 33 bp, Homo sapien
caataattaactcttacgtgattcagctaaaac

SEQ ID NO: 537578 - DNA, 33 bp, Homo sapien
caataattaactcttatgtgattcagctaaaac

SEQ ID NO: 537579 - DNA, 33 bp, Homo sapien
aaatggagcatttaagaaagaatattggtacaa

SEQ ID NO: 537580 - DNA, 33 bp, Homo sapien
aaatggagcatttaaggaagaatattggtacaa

SEQ ID NO: 537581 - DNA, 33 bp, Homo sapien
ctgagcactattatctcagaatgtaaaggggta

SEQ ID NO: 537582 - DNA, 33 bp, Homo sapien
ctgagcactattatcttagaatgtaaaggggta

SEQ ID NO: 537583 - DNA, 33 bp, Homo sapien
gcccagaaataggccacacgtctatgatcacct

SEQ ID NO: 537584 - DNA, 33 bp, Homo sapien
gcccagaaataggccatacgtctatgatcacct

SEQ ID NO: 537585 - DNA, 33 bp, Homo sapien
tgcattttatgggccacggtaaaacaatttgaa

SEQ ID NO: 537586 - DNA, 33 bp, Homo sapien
tgcattttatgggccatggtaaaacaatttgaa

SEQ ID NO: 537587 - DNA, 33 bp, Homo sapien
agggtgtgagagcaataagattatggacaaatg

SEQ ID NO: 537588 - DNA, 33 bp, Homo sapien
agggtgtgagagcaatgagattatggacaaatg

SEQ ID NO: 537589 - DNA, 33 bp, Homo sapien
taatgaagacaataccaagtgctgtatgggtca

SEQ ID NO: 537590 - DNA, 33 bp, Homo sapien
taatgaagacaataccgagtgctgtatgggtca

SEQ ID NO: 537591 - DNA, 33 bp, Homo sapien
aagaagaagaggaagaacgataagtcaagctca

SEQ ID NO: 537592 - DNA, 33 bp, Homo sapien
aagaagaagaggaagagcgataagtcaagctca

SEQ ID NO: 537593 - DNA, 33 bp, Homo sapien
tctaacaagacaccaaagacagttggcacaatt

SEQ ID NO: 537594 - DNA, 33 bp, Homo sapien
tctaacaagacaccaaggacagttggcacaatt

SEQ ID NO: 537595 - DNA, 33 bp, Homo sapien
tcctgcagaacctctaagtagaatttgaagagg

SEQ ID NO: 537596 - DNA, 33 bp, Homo sapien
tcctgcagaacctctaggtagaatttgaagagg

SEQ ID NO: 537597 - DNA, 33 bp, Homo sapien
catgggaatgtcatcacaaaacatggcttcccc

SEQ ID NO: 537598 - DNA, 33 bp, Homo sapien
catgggaatgtcatcagaaaacatggcttcccc

SEQ ID NO: 537599 - DNA, 33 bp, Homo sapien
tggtgattgtctacacagaatcatctagaagag

SEQ ID NO: 537600 - DNA, 33 bp, Homo sapien
tggtgattgtctacacggaatcatctagaagag

SEQ ID NO: 537601 - DNA, 33 bp, Homo sapien
agccactatgcccaacaaagacagtataatatt

SEQ ID NO: 537602 - DNA, 33 bp, Homo sapien
agccactatgcccaaccaagacagtataatatt

SEQ ID NO: 537603 - DNA, 33 bp, Homo sapien
agcatatcatcttcacaatcaaggatgagacga

SEQ ID NO: 537604 - DNA, 33 bp, Homo sapien
agcatatcatcttcacgatcaaggatgagacga

SEQ ID NO: 537605 - DNA, 33 bp, Homo sapien
gataatctaagacaataacaaaatcagatagga

SEQ ID NO: 537606 - DNA, 33 bp, Homo sapien
gataatctaagacaatgacaaaatcagatagga

SEQ ID NO: 537607 - DNA, 33 bp, Homo sapien
tgtcttctaggaccgacagcaatgtagagacac

SEQ ID NO: 537608 - DNA, 33 bp, Homo sapien
tgtcttctaggaccgagagcaatgtagagacac

SEQ ID NO: 537609 - DNA, 33 bp, Homo sapien
aaattcaaaccacaccgaagtaatcaaaaaaag

SEQ ID NO: 537610 - DNA, 33 bp, Homo sapien
aaattcaaaccacacctaagtaatcaaaaaaag

SEQ ID NO: 537611 - DNA, 33 bp, Homo sapien
atatgcaagtcttacccgatggtagcttgttgc

SEQ ID NO: 537612 - DNA, 33 bp, Homo sapien
atatgcaagtcttacctgatggtagcttgttgc

SEQ ID NO: 537613 - DNA, 33 bp, Homo sapien
atatttttcaaagtccacaaaagctgattgggc

SEQ ID NO: 537614 - DNA, 33 bp, Homo sapien
atatttttcaaagtccgcaaaagctgattgggc

SEQ ID NO: 537615 - DNA, 33 bp, Homo sapien
atcaatgtttgataaactggacaaagggaaagg

SEQ ID NO: 537616 - DNA, 33 bp, Homo sapien
atcaatgtttgataaattggacaaagggaaagg

SEQ ID NO: 537617 - DNA, 33 bp, Homo sapien
acaagagaccaaatcccacaggacctcctagtg

SEQ ID NO: 537618 - DNA, 33 bp, Homo sapien
acaagagaccaaatccgacaggacctcctagtg

SEQ ID NO: 537619 - DNA, 33 bp, Homo sapien
aggaatgttctttacaagcgactttttgcacaa

SEQ ID NO: 537620 - DNA, 33 bp, Homo sapien
aggaatgttctttacaggcgactttttgcacaa

SEQ ID NO: 537621 - DNA, 33 bp, Homo sapien
ctgagctatgccttccagattcttttactaggc

SEQ ID NO: 537622 - DNA, 33 bp, Homo sapien
ctgagctatgccttccggattcttttactaggc

SEQ ID NO: 537623 - DNA, 33 bp, Homo sapien
atggagctgaaaggtacccaaattgaggagtct

SEQ ID NO: 537624 - DNA, 33 bp, Homo sapien
atggagctgaaaggtatccaaattgaggagtct

SEQ ID NO: 537625 - DNA, 33 bp, Homo sapien
tttgcttttctttctacgatggccggttccatc

SEQ ID NO: 537626 - DNA, 33 bp, Homo sapien
tttgcttttctttctatgatggccggttccatc

SEQ ID NO: 537627 - DNA, 33 bp, Homo sapien
ccatgagctaaaaataaccatgtcctatatgca

SEQ ID NO: 537628 - DNA, 33 bp, Homo sapien
ccatgagctaaaaatacccatgtcctatatgca

SEQ ID NO: 537629 - DNA, 33 bp, Homo sapien
acatagtctgaggtaactaaaatgttgggagag

SEQ ID NO: 537630 - DNA, 33 bp, Homo sapien
acatagtctgaggtaattaaaatgttgggagag

SEQ ID NO: 537631 - DNA, 33 bp, Homo sapien
agaaacctcaaatgcacgagatctaatttggag

SEQ ID NO: 537632 - DNA, 33 bp, Homo sapien
agaaacctcaaatgcatgagatctaatttggag

SEQ ID NO: 537633 - DNA, 33 bp, Homo sapien
gttaatccaactttacaatatcctgtgactttt

SEQ ID NO: 537634 - DNA, 33 bp, Homo sapien
gttaatccaactttacgatatcctgtgactttt

SEQ ID NO: 537635 - DNA, 33 bp, Homo sapien
ctatgtgctttcaaaacgtttgctcaagactat

SEQ ID NO: 537636 - DNA, 33 bp, Homo sapien
ctatgtgctttcaaaatgtttgctcaagactat

SEQ ID NO: 537637 - DNA, 33 bp, Homo sapien
agagttgtaggataaacgagtttggccaggtat

SEQ ID NO: 537638 - DNA, 33 bp, Homo sapien
agagttgtaggataaatgagtttggccaggtat

SEQ ID NO: 537639 - DNA, 33 bp, Homo sapien
gagaagggagctagaaagtgatggagagattat

SEQ ID NO: 537640 - DNA, 33 bp, Homo sapien
gagaagggagctagaatgtgatggagagattat

SEQ ID NO: 537641 - DNA, 33 bp, Homo sapien
ccttggagaatgtggaataggcagacatttttt

SEQ ID NO: 537642 - DNA, 33 bp, Homo sapien
ccttggagaatgtggactaggcagacatttttt

SEQ ID NO: 537643 - DNA, 33 bp, Homo sapien
ctatgagactgaccaacggctagtttctaacgg

SEQ ID NO: 537644 - DNA, 33 bp, Homo sapien
ctatgagactgaccaatggctagtttctaacgg

SEQ ID NO: 537645 - DNA, 33 bp, Homo sapien
cttaaataaagcatcaaaggtagagctggggct

SEQ ID NO: 537646 - DNA, 33 bp, Homo sapien
cttaaataaagcatcagaggtagagctggggct

SEQ ID NO: 537647 - DNA, 33 bp, Homo sapien
aaatcctcttagaaaaatatagtcacagttcac

SEQ ID NO: 537648 - DNA, 33 bp, Homo sapien
aaatcctcttagaaaagtatagtcacagttcac

SEQ ID NO: 537649 - DNA, 33 bp, Homo sapien
actggccctgaaccgaacacagcactagaactt

SEQ ID NO: 537650 - DNA, 33 bp, Homo sapien
actggccctgaaccgagcacagcactagaactt

SEQ ID NO: 537651 - DNA, 33 bp, Homo sapien
ttttgtcgcaaatccaataaaatgagtcctggt

SEQ ID NO: 537652 - DNA, 33 bp, Homo sapien
ttttgtcgcaaatccagtaaaatgagtcctggt

SEQ ID NO: 537653 - DNA, 33 bp, Homo sapien
gatcacaactaggttaaagagtagtacatataa

SEQ ID NO: 537654 - DNA, 33 bp, Homo sapien
gatcacaactaggttagagagtagtacatataa

SEQ ID NO: 537655 - DNA, 33 bp, Homo sapien
aatattggctccatgaaggtaaggaatgtctgt

SEQ ID NO: 537656 - DNA, 33 bp, Homo sapien
aatattggctccatgagggtaaggaatgtctgt

SEQ ID NO: 537657 - DNA, 33 bp, Homo sapien
ctgtagcagatcattaagggcttccaacaccat

SEQ ID NO: 537658 - DNA, 33 bp, Homo sapien
ctgtagcagatcattacgggcttccaacaccat

SEQ ID NO: 537659 - DNA, 33 bp, Homo sapien
caacttgaaatgaacacatagcatgacagagaa

SEQ ID NO: 537660 - DNA, 33 bp, Homo sapien
caacttgaaatgaacatatagcatgacagagaa

SEQ ID NO: 537661 - DNA, 33 bp, Homo sapien
caaaaagcatcctctgaaaagtgaaataacagc

SEQ ID NO: 537662 - DNA, 33 bp, Homo sapien
caaaaagcatcctctggaaagtgaaataacagc

SEQ ID NO: 537663 - DNA, 33 bp, Homo sapien
atttatcattctgttgcattgagatgtttgtat

SEQ ID NO: 537664 - DNA, 33 bp, Homo sapien
atttatcattctgttgtattgagatgtttgtat

SEQ ID NO: 537665 - DNA, 33 bp, Homo sapien
tatccaaattgtggataagaaggaagagttcta

SEQ ID NO: 537666 - DNA, 33 bp, Homo sapien
tatccaaattgtggatgagaaggaagagttcta

SEQ ID NO: 537667 - DNA, 33 bp, Homo sapien
agttaaaaactttgcaaaaagtagaggatattc

SEQ ID NO: 537668 - DNA, 33 bp, Homo sapien
agttaaaaactttgcacaaagtagaggatattc

SEQ ID NO: 537669 - DNA, 33 bp, Homo sapien
cagtgaagaagagatgaaataaccacaaccagt

SEQ ID NO: 537670 - DNA, 33 bp, Homo sapien
cagtgaagaagagatggaataaccacaaccagt

SEQ ID NO: 537671 - DNA, 33 bp, Homo sapien
ggtgtggctacataaaactgtacttaaaacaag

SEQ ID NO: 537672 - DNA, 33 bp, Homo sapien
ggtgtggctacataaagctgtacttaaaacaag

SEQ ID NO: 537673 - DNA, 33 bp, Homo sapien
ttctcctgattgtcaactacattctatttatga

SEQ ID NO: 537674 - DNA, 33 bp, Homo sapien
ttctcctgattgtcaagtacattctatttatga

SEQ ID NO: 537675 - DNA, 33 bp, Homo sapien
ttagttttttatgtagccaactttatcaggaat

SEQ ID NO: 537676 - DNA, 33 bp, Homo sapien
ttagttttttatgtagtcaactttatcaggaat

SEQ ID NO: 537677 - DNA, 33 bp, Homo sapien
caacctgtccctcaaactgtaaaatttcaggta

SEQ ID NO: 537678 - DNA, 33 bp, Homo sapien
caacctgtccctcaaagtgtaaaatttcaggta

SEQ ID NO: 537679 - DNA, 33 bp, Homo sapien
ctttctatttccaggacgtgacttgactctcct

SEQ ID NO: 537680 - DNA, 33 bp, Homo sapien
ctttctatttccaggatgtgacttgactctcct

SEQ ID NO: 537681 - DNA, 33 bp, Homo sapien
tccacaatgaacacaaatatgttgtcttctatc

SEQ ID NO: 537682 - DNA, 33 bp, Homo sapien
tccacaatgaacacaagtatgttgtcttctatc

SEQ ID NO: 537683 - DNA, 33 bp, Homo sapien
cttagaattagccagcagaactcagtttagatg

SEQ ID NO: 537684 - DNA, 33 bp, Homo sapien
cttagaattagccagccgaactcagtttagatg

SEQ ID NO: 537685 - DNA, 33 bp, Homo sapien
ccctttctctaaagctaaaactactgttactgc

SEQ ID NO: 537686 - DNA, 33 bp, Homo sapien
ccctttctctaaagctgaaactactgttactgc

SEQ ID NO: 537687 - DNA, 33 bp, Homo sapien
cgtttcagagcagctcaaataataacagtaagg

SEQ ID NO: 537688 - DNA, 33 bp, Homo sapien
cgtttcagagcagctccaataataacagtaagg

SEQ ID NO: 537689 - DNA, 33 bp, Homo sapien
actgaagggacttaaacgtggttaactgaagag

SEQ ID NO: 537690 - DNA, 33 bp, Homo sapien
actgaagggacttaaatgtggttaactgaagag

SEQ ID NO: 537691 - DNA, 33 bp, Homo sapien
taaaaggtttaggagccgaatacctagaagtta

SEQ ID NO: 537692 - DNA, 33 bp, Homo sapien
taaaaggtttaggagctgaatacctagaagtta

SEQ ID NO: 537693 - DNA, 33 bp, Homo sapien
aaccaaaaataggacacgaccaagcaggatcgt

SEQ ID NO: 537694 - DNA, 33 bp, Homo sapien
aaccaaaaataggacatgaccaagcaggatcgt

SEQ ID NO: 537695 - DNA, 33 bp, Homo sapien
ggggaaaggcagcaccaagcatccagggtaccc

SEQ ID NO: 537696 - DNA, 33 bp, Homo sapien
ggggaaaggcagcaccgagcatccagggtaccc

SEQ ID NO: 537697 - DNA, 33 bp, Homo sapien
aaggcttgagtcaaataaccctgattctcaggg

SEQ ID NO: 537698 - DNA, 33 bp, Homo sapien
aaggcttgagtcaaatcaccctgattctcaggg

SEQ ID NO: 537699 - DNA, 33 bp, Homo sapien
ttggaagtctttctctaactgtctagttggtat

SEQ ID NO: 537700 - DNA, 33 bp, Homo sapien
ttggaagtctttctctgactgtctagttggtat

SEQ ID NO: 537701 - DNA, 33 bp, Homo sapien
aaagggttaacatggccgacaactatttcatga

SEQ ID NO: 537702 - DNA, 33 bp, Homo sapien
aaagggttaacatggcggacaactatttcatga

SEQ ID NO: 537703 - DNA, 33 bp, Homo sapien
tgacatcagcaggaaactagtatcaggctaccc

SEQ ID NO: 537704 - DNA, 33 bp, Homo sapien
tgacatcagcaggaaattagtatcaggctaccc

SEQ ID NO: 537705 - DNA, 33 bp, Homo sapien
cgaagaggagcctttgaagggtgttttatggtc

SEQ ID NO: 537706 - DNA, 33 bp, Homo sapien
cgaagaggagcctttggagggtgttttatggtc

SEQ ID NO: 537707 - DNA, 33 bp, Homo sapien
ggtgattgcaagtaaacaacatgatatcaacca

SEQ ID NO: 537708 - DNA, 33 bp, Homo sapien
ggtgattgcaagtaaataacatgatatcaacca

SEQ ID NO: 537709 - DNA, 33 bp, Homo sapien
tctgatagtaattccacagttcaagtacagagc

SEQ ID NO: 537710 - DNA, 33 bp, Homo sapien
tctgatagtaattccagagttcaagtacagagc

SEQ ID NO: 537711 - DNA, 33 bp, Homo sapien
tttttttgtttttaaacagagatcctgagtcat

SEQ ID NO: 537712 - DNA, 33 bp, Homo sapien
tttttttgtttttaaatagagatcctgagtcat

SEQ ID NO: 537713 - DNA, 33 bp, Homo sapien
ttatcactcactcttacgtcctgagcacctatg

SEQ ID NO: 537714 - DNA, 33 bp, Homo sapien
ttatcactcactcttatgtcctgagcacctatg

SEQ ID NO: 537715 - DNA, 33 bp, Homo sapien
tatatgtgttgtataacgatcaaatcagggtag

SEQ ID NO: 537716 - DNA, 33 bp, Homo sapien
tatatgtgttgtataatgatcaaatcagggtag

SEQ ID NO: 537717 - DNA, 33 bp, Homo sapien
aatgaggatagccacaataacaagtaccatgtg

SEQ ID NO: 537718 - DNA, 33 bp, Homo sapien
aatgaggatagccacagtaacaagtaccatgtg

SEQ ID NO: 537719 - DNA, 33 bp, Homo sapien; identical to SEQ ID NO: 537717

SEQ ID NO: 537720 - DNA, 33 bp, Homo sapien; identical to SEQ ID NO: 537718

SEQ ID NO: 537721 - DNA, 33 bp, Homo sapien
ctctccacttgagttaccatcttgaaacatcaa

SEQ ID NO: 537722 - DNA, 33 bp, Homo sapien
ctctccacttgagttatcatcttgaaacatcaa

SEQ ID NO: 537723 - DNA, 33 bp, Homo sapien
ataaacttagagaacaacctcttggcaaatgga

SEQ ID NO: 537724 - DNA, 33 bp, Homo sapien
ataaacttagagaacagcctcttggcaaatgga

SEQ ID NO: 537725 - DNA, 33 bp, Homo sapien
agcccaaataattcctaaactccatcctttgat

SEQ ID NO: 537726 - DNA, 33 bp, Homo sapien
agcccaaataattcctcaactccatcctttgat

SEQ ID NO: 537727 - DNA, 33 bp, Homo sapien
cccagcctgtattctcaccattccacaccagga

SEQ ID NO: 537728 - DNA, 33 bp, Homo sapien
cccagcctgtattctcgccattccacaccagga

SEQ ID NO: 537729 - DNA, 33 bp, Homo sapien
tctttatagtaaataacgacagatcaacaagat

SEQ ID NO: 537730 - DNA, 33 bp, Homo sapien
tctttatagtaaataatgacagatcaacaagat

SEQ ID NO: 537731 - DNA, 33 bp, Homo sapien
gttagtgataacaccaagtattctcagtagatc

SEQ ID NO: 537732 - DNA, 33 bp, Homo sapien
gttagtgataacaccacgtattctcagtagatc

SEQ ID NO: 537733 - DNA, 33 bp, Homo sapien
tctttgtgcttcacaacaggaattcaaccaacc

SEQ ID NO: 537734 - DNA, 33 bp, Homo sapien
tctttgtgcttcacaataggaattcaaccaacc

SEQ ID NO: 537735 - DNA, 33 bp, Homo sapien
actccgtctcaacaaaaataaaaagtgttaata

SEQ ID NO: 537736 - DNA, 33 bp, Homo sapien
actccgtctcaacaaacataaaaagtgttaata

SEQ ID NO: 537737 - DNA, 33 bp, Homo sapien
gatcacaaagatttagacgtcattctacttgca

SEQ ID NO: 537738 - DNA, 33 bp, Homo sapien
gatcacaaagatttaggcgtcattctacttgca

SEQ ID NO: 537739 - DNA, 33 bp, Homo sapien
gctctctctcttactaacttatttccaagccgt

SEQ ID NO: 537740 - DNA, 33 bp, Homo sapien
gctctctctcttactagcttatttccaagccgt

SEQ ID NO: 537741 - DNA, 33 bp, Homo sapien
tacatggtaaaaattcaaacagtacaaactgtg

SEQ ID NO: 537742 - DNA, 33 bp, Homo sapien
tacatggtaaaaattccaacagtacaaactgtg

SEQ ID NO: 537743 - DNA, 33 bp, Homo sapien
caaactcagaaactggaagacaaatgtcctgtg

SEQ ID NO: 537744 - DNA, 33 bp, Homo sapien
caaactcagaaactgggagacaaatgtcctgtg

SEQ ID NO: 537745 - DNA, 33 bp, Homo sapien
ccatacagatcctgacagaagagaacattcatc

SEQ ID NO: 537746 - DNA, 33 bp, Homo sapien
ccatacagatcctgacggaagagaacattcatc

SEQ ID NO: 537747 - DNA, 33 bp, Homo sapien
ttcctcaagtcaagacaaaacttcatggcagtt

SEQ ID NO: 537748 - DNA, 33 bp, Homo sapien
ttcctcaagtcaagaccaaacttcatggcagtt

SEQ ID NO: 537749 - DNA, 33 bp, Homo sapien
tactacatcaagagaacacgccataggacaaaa

SEQ ID NO: 537750 - DNA, 33 bp, Homo sapien
tactacatcaagagaatacgccataggacaaaa

SEQ ID NO: 537751 - DNA, 33 bp, Homo sapien
cgtatatgactcgggacagttgcaagttctgag

SEQ ID NO: 537752 - DNA, 33 bp, Homo sapien
cgtatatgactcgggatagttgcaagttctgag

SEQ ID NO: 537753 - DNA, 33 bp, Homo sapien
tgcttacaaaagggaaacagctgcaatagtagc

SEQ ID NO: 537754 - DNA, 33 bp, Homo sapien
tgcttacaaaagggaaccagctgcaatagtagc

SEQ ID NO: 537755 - DNA, 33 bp, Homo sapien
aaagcaacaacagtaaaacaagacaaagatggt

SEQ ID NO: 537756 - DNA, 33 bp, Homo sapien
aaagcaacaacagtaagacaagacaaagatggt

SEQ ID NO: 537757 - DNA, 33 bp, Homo sapien
atttggaaaaatctcaacactccaagtctgcca

SEQ ID NO: 537758 - DNA, 33 bp, Homo sapien
atttggaaaaatctcagcactccaagtctgcca

SEQ ID NO: 537759 - DNA, 33 bp, Homo sapien
tcagaaagcaaccagacagcaaagagaagttca

SEQ ID NO: 537760 - DNA, 33 bp, Homo sapien
tcagaaagcaaccagagagcaaagagaagttca

SEQ ID NO: 537761 - DNA, 33 bp, Homo sapien
tgctacatagaaaaaaaatgcaggcaaagcagg

SEQ ID NO: 537762 - DNA, 33 bp, Homo sapien
tgctacatagaaaaaagatgcaggcaaagcagg

SEQ ID NO: 537763 - DNA, 33 bp, Homo sapien
accaccctaaatgcacaggagggtcgccaaggc

SEQ ID NO: 537764 - DNA, 33 bp, Homo sapien
accaccctaaatgcacgggagggtcgccaaggc

SEQ ID NO: 537765 - DNA, 33 bp, Homo sapien
ttttttggagctggtacaagaggagttagcctg

SEQ ID NO: 537766 - DNA, 33 bp, Homo sapien
ttttttggagctggtagaagaggagttagcctg

SEQ ID NO: 537767 - DNA, 33 bp, Homo sapien
atgttgtgagtgcatacaaccttaaatgttttg

SEQ ID NO: 537768 - DNA, 33 bp, Homo sapien
atgttgtgagtgcatataaccttaaatgttttg

SEQ ID NO: 537769 - DNA, 33 bp, Homo sapien
ttctagtgaatccaatcaaaggcttttacaaag

SEQ ID NO: 537770 - DNA, 33 bp, Homo sapien
ttctagtgaatccaattaaaggcttttacaaag

SEQ ID NO: 537771 - DNA, 33 bp, Homo sapien
caggtgtgttccataaagtccagttaatttttg

SEQ ID NO: 537772 - DNA, 33 bp, Homo sapien
caggtgtgttccataacgtccagttaatttttg

SEQ ID NO: 537773 - DNA, 33 bp, Homo sapien
tcatcacacagaacagaaaaaagactcaacggc

SEQ ID NO: 537774 - DNA, 33 bp, Homo sapien
tcatcacacagaacaggaaaaagactcaacggc

SEQ ID NO: 537775 - DNA, 33 bp, Homo sapien
aaaaggtctgaaaggccataaacccagtgttga

SEQ ID NO: 537776 - DNA, 33 bp, Homo sapien
aaaaggtctgaaaggctataaacccagtgttga

SEQ ID NO: 537777 - DNA, 33 bp, Homo sapien
aatgtttctgaggagacaaaagttacaaatatt

SEQ ID NO: 537778 - DNA, 33 bp, Homo sapien
aatgtttctgaggagagaaaagttacaaatatt

SEQ ID NO: 537779 - DNA, 33 bp, Homo sapien
aagccgacaggagtgcacatttgagtgtctact

SEQ ID NO: 537780 - DNA, 33 bp, Homo sapien
aagccgacaggagtgcgcatttgagtgtctact

SEQ ID NO: 537781 - DNA, 33 bp, Homo sapien
aatgtttgcaccttcaaagtaaccgatgagctt

SEQ ID NO: 537782 - DNA, 33 bp, Homo sapien
aatgtttgcaccttcagagtaaccgatgagctt

SEQ ID NO: 537783 - DNA, 33 bp, Homo sapien
tgtggtatttttgccaccatgttgtcaatccca

SEQ ID NO: 537784 - DNA, 33 bp, Homo sapien
tgtggtatttttgccatcatgttgtcaatccca

SEQ ID NO: 537785 - DNA, 33 bp, Homo sapien
gaaccatgggttaatacgcagaaaaatgtaaat

SEQ ID NO: 537786 - DNA, 33 bp, Homo sapien
gaaccatgggttaatatgcagaaaaatgtaaat

SEQ ID NO: 537787 - DNA, 33 bp, Homo sapien
gatgctgtttctgaaactactgatatgatcata

SEQ ID NO: 537788 - DNA, 33 bp, Homo sapien
gatgctgtttctgaaattactgatatgatcata

SEQ ID NO: 537789 - DNA, 33 bp, Homo sapien
agtcagttgaccatagcaattctgaagttcttg

SEQ ID NO: 537790 - DNA, 33 bp, Homo sapien
agtcagttgaccatagtaattctgaagttcttg

SEQ ID NO: 537791 - DNA, 33 bp, Homo sapien
atagaaagagcacaagaagaagccccatggaga

SEQ ID NO: 537792 - DNA, 33 bp, Homo sapien
atagaaagagcacaagtagaagccccatggaga

SEQ ID NO: 537793 - DNA, 33 bp, Homo sapien
cttctgctccacttgacgttggatgttagatgg

SEQ ID NO: 537794 - DNA, 33 bp, Homo sapien
cttctgctccacttgatgttggatgttagatgg

SEQ ID NO: 537795 - DNA, 33 bp, Homo sapien
ctttcagctgaattaccaacccaagagattaat

SEQ ID NO: 537796 - DNA, 33 bp, Homo sapien
ctttcagctgaattactaacccaagagattaat

SEQ ID NO: 537797 - DNA, 33 bp, Homo sapien
ttttcattgagcttcgcagtgtaaaccttgaat

SEQ ID NO: 537798 - DNA, 33 bp, Homo sapien
ttttcattgagcttcgtagtgtaaaccttgaat

SEQ ID NO: 537799 - DNA, 33 bp, Homo sapien
gtacagtgttaagagacgctgggaattcacata

SEQ ID NO: 537800 - DNA, 33 bp, Homo sapien
gtacagtgttaagagatgctgggaattcacata

SEQ ID NO: 537801 - DNA, 33 bp, Homo sapien
catagtcatggtaaaacgtgtgtcttctggacc

SEQ ID NO: 537802 - DNA, 33 bp, Homo sapien
catagtcatggtaaaatgtgtgtcttctggacc

SEQ ID NO: 537803 - DNA, 33 bp, Homo sapien
atggcaagtccactctaacataatttctctgag

SEQ ID NO: 537804 - DNA, 33 bp, Homo sapien
atggcaagtccactctgacataatttctctgag

SEQ ID NO: 537805 - DNA, 33 bp, Homo sapien
ggtcaactgtattttacaatttcattccatttt

SEQ ID NO: 537806 - DNA, 33 bp, Homo sapien
ggtcaactgtattttataatttcattccatttt

SEQ ID NO: 537807 - DNA, 33 bp, Homo sapien
ttaagtggtcttaggacactggataaaagagtt

SEQ ID NO: 537808 - DNA, 33 bp, Homo sapien
ttaagtggtcttaggatactggataaaagagtt

SEQ ID NO: 537809 - DNA, 33 bp, Homo sapien
taaatgttaaagaaaactgcatcatgtgcttaa

SEQ ID NO: 537810 - DNA, 33 bp, Homo sapien
taaatgttaaagaaaattgcatcatgtgcttaa

SEQ ID NO: 537811 - DNA, 33 bp, Homo sapien
ggggctcaagagtaaaatgttatctggaatgcc

SEQ ID NO: 537812 - DNA, 33 bp, Homo sapien
ggggctcaagagtaaagtgttatctggaatgcc

SEQ ID NO: 537813 - DNA, 33 bp, Homo sapien
gtggagctttgtcatgcagctctagcaacaaat

SEQ ID NO: 537814 - DNA, 33 bp, Homo sapien
gtggagctttgtcatgtagctctagcaacaaat

SEQ ID NO: 537815 - DNA, 33 bp, Homo sapien
atacacattattatcacggtgactgagtttttt

SEQ ID NO: 537816 - DNA, 33 bp, Homo sapien
atacacattattatcatggtgactgagtttttt

SEQ ID NO: 537817 - DNA, 33 bp, Homo sapien
aagattaattaataaactgctgcacttttaaag

SEQ ID NO: 537818 - DNA, 33 bp, Homo sapien
aagattaattaataaattgctgcacttttaaag

SEQ ID NO: 537819 - DNA, 33 bp, Homo sapien
tactttataaaactgagacatttgtgagccttg

SEQ ID NO: 537820 - DNA, 33 bp, Homo sapien
tactttataaaactgatacatttgtgagccttg

SEQ ID NO: 537821 - DNA, 33 bp, Homo sapien
aaagaaggaatgtcaacggtaggacttcagatg

SEQ ID NO: 537822 - DNA, 33 bp, Homo sapien
aaagaaggaatgtcaatggtaggacttcagatg

SEQ ID NO: 537823 - DNA, 33 bp, Homo sapien
ggtgatgctagagatcaagaaaggagcagagtc

SEQ ID NO: 537824 - DNA, 33 bp, Homo sapien
ggtgatgctagagatcgagaaaggagcagagtc

SEQ ID NO: 537825 - DNA, 33 bp, Homo sapien
aatgctgatcacactacgtttacctaatctgtt

SEQ ID NO: 537826 - DNA, 33 bp, Homo sapien
aatgctgatcacactatgtttacctaatctgtt

SEQ ID NO: 537827 - DNA, 33 bp, Homo sapien
gtcagggtcataagtcaacaacaaaaaggaaat

SEQ ID NO: 537828 - DNA, 33 bp, Homo sapien
gtcagggtcataagtcgacaacaaaaaggaaat

SEQ ID NO: 537829 - DNA, 33 bp, Homo sapien
acacaacttactaaacaccaaccacaccgtgct

SEQ ID NO: 537830 - DNA, 33 bp, Homo sapien
acacaacttactaaacgccaaccacaccgtgct

SEQ ID NO: 537831 - DNA, 33 bp, Homo sapien
tcttttctatccagatcagtgatgatgctgctt

SEQ ID NO: 537832 - DNA, 33 bp, Homo sapien
tcttttctatccagattagtgatgatgctgctt

SEQ ID NO: 537833 - DNA, 33 bp, Homo sapien
ttcaagccctgttccacctcttactttgtgaac

SEQ ID NO: 537834 - DNA, 33 bp, Homo sapien
ttcaagccctgttccatctcttactttgtgaac

SEQ ID NO: 537835 - DNA, 33 bp, Homo sapien
tcaagccaggaaggaaataaatggacatgatgg

SEQ ID NO: 537836 - DNA, 33 bp, Homo sapien
tcaagccaggaaggaagtaaatggacatgatgg

SEQ ID NO: 537837 - DNA, 33 bp, Homo sapien
tgttgtctctaaattccaagagtgtgcctcagt

SEQ ID NO: 537838 - DNA, 33 bp, Homo sapien
tgttgtctctaaattctaagagtgtgcctcagt

SEQ ID NO: 537839 - DNA, 33 bp, Homo sapien
cctcatgccctgtataactttcaaatgtcccac

SEQ ID NO: 537840 - DNA, 33 bp, Homo sapien
cctcatgccctgtatagctttcaaatgtcccac

SEQ ID NO: 537841 - DNA, 33 bp, Homo sapien
tgtagttatctgaatccagacgccaacttttct

SEQ ID NO: 537842 - DNA, 33 bp, Homo sapien
tgtagttatctgaatctagacgccaacttttct

SEQ ID NO: 537843 - DNA, 33 bp, Homo sapien
gtggttacttcttgataacaacctattactggc

SEQ ID NO: 537844 - DNA, 33 bp, Homo sapien
gtggttacttcttgatgacaacctattactggc

SEQ ID NO: 537845 - DNA, 33 bp, Homo sapien
acattgttatagtaggacaataaagaatacatt

SEQ ID NO: 537846 - DNA, 33 bp, Homo sapien
acattgttatagtagggcaataaagaatacatt

SEQ ID NO: 537847 - DNA, 33 bp, Homo sapien
gtgggttgaagccaggaaggctatctaaaagaa

SEQ ID NO: 537848 - DNA, 33 bp, Homo sapien
gtgggttgaagccagggaggctatctaaaagaa

SEQ ID NO: 537849 - DNA, 33 bp, Homo sapien
aggaatgtgtaggggaaagttgtctaaaatgct

SEQ ID NO: 537850 - DNA, 33 bp, Homo sapien
aggaatgtgtaggggagagttgtctaaaatgct

SEQ ID NO: 537851 - DNA, 33 bp, Homo sapien
ggcccaacagatttaactgatttcacttttccc

SEQ ID NO: 537852 - DNA, 33 bp, Homo sapien
ggcccaacagatttaattgatttcacttttccc

SEQ ID NO: 537853 - DNA, 33 bp, Homo sapien
gacctgcactctgacaacagtatcatttatttc

SEQ ID NO: 537854 - DNA, 33 bp, Homo sapien
gacctgcactctgacatcagtatcatttatttc

SEQ ID NO: 537855 - DNA, 33 bp, Homo sapien
aaagtgtgttttaatccctcttactcagaagcg

SEQ ID NO: 537856 - DNA, 33 bp, Homo sapien
aaagtgtgttttaatctctcttactcagaagcg

SEQ ID NO: 537857 - DNA, 33 bp, Homo sapien
atagatgtatgttaaaactggtcctgagacatt

SEQ ID NO: 537858 - DNA, 33 bp, Homo sapien
atagatgtatgttaaagctggtcctgagacatt

SEQ ID NO: 537859 - DNA, 33 bp, Homo sapien
gttgtccaaagtctcaaggatagcacagaagga

SEQ ID NO: 537860 - DNA, 33 bp, Homo sapien
gttgtccaaagtctcagggatagcacagaagga

SEQ ID NO: 537861 - DNA, 33 bp, Homo sapien
tgtgtgtctttggttaccatgggatgttaatag

SEQ ID NO: 537862 - DNA, 33 bp, Homo sapien
tgtgtgtctttggttatcatgggatgttaatag

SEQ ID NO: 537863 - DNA, 33 bp, Homo sapien
tcagtaaaatccttaacgctttgctcaagttct

SEQ ID NO: 537864 - DNA, 33 bp, Homo sapien
tcagtaaaatccttaatgctttgctcaagttct

SEQ ID NO: 537865 - DNA, 33 bp, Homo sapien
tttagaccatcaacgacagatgtgtagtcgggt

SEQ ID NO: 537866 - DNA, 33 bp, Homo sapien
tttagaccatcaacgagagatgtgtagtcgggt

SEQ ID NO: 537867 - DNA, 33 bp, Homo sapien
aagtaggggaacttgaagatgtttaatcagaaa

SEQ ID NO: 537868 - DNA, 33 bp, Homo sapien
aagtaggggaacttgaggatgtttaatcagaaa

SEQ ID NO: 537869 - DNA, 33 bp, Homo sapien
acttttgtattttctaaccccagcattatatgt

SEQ ID NO: 537870 - DNA, 33 bp, Homo sapien
acttttgtattttctacccccagcattatatgt

SEQ ID NO: 537871 - DNA, 33 bp, Homo sapien
atccgagaaggtaagaacagcagaaatggaccc

SEQ ID NO: 537872 - DNA, 33 bp, Homo sapien
atccgagaaggtaagatcagcagaaatggaccc

SEQ ID NO: 537873 - DNA, 33 bp, Homo sapien
gaattccataagattaaaaacaactgaaatact

SEQ ID NO: 537874 - DNA, 33 bp, Homo sapien
gaattccataagattagaaacaactgaaatact

SEQ ID NO: 537875 - DNA, 33 bp, Homo sapien
cacaagtgtcctataagagtattggtgtgtatt

SEQ ID NO: 537876 - DNA, 33 bp, Homo sapien
cacaagtgtcctataatagtattggtgtgtatt

SEQ ID NO: 537877 - DNA, 33 bp, Homo sapien
ggagcaatagatatgaagctaaacagaggaagc

SEQ ID NO: 537878 - DNA, 33 bp, Homo sapien
ggagcaatagatatgaggctaaacagaggaagc

SEQ ID NO: 537879 - DNA, 33 bp, Homo sapien
actctttccactataccatgtttgggtgaaatt

SEQ ID NO: 537880 - DNA, 33 bp, Homo sapien
actctttccactatactatgtttgggtgaaatt

SEQ ID NO: 537881 - DNA, 33 bp, Homo sapien
gaaaaatagaaaatgggaaaggatggaaatgga

SEQ ID NO: 537882 - DNA, 33 bp, Homo sapien
gaaaaatagaaaatggtaaaggatggaaatgga

SEQ ID NO: 537883 - DNA, 33 bp, Homo sapien
tagtatatatcccatccaatgttaaccctttca

SEQ ID NO: 537884 - DNA, 33 bp, Homo sapien
tagtatatatcccatctaatgttaaccctttca

SEQ ID NO: 537885 - DNA, 33 bp, Homo sapien
aattcatacttatttgcagagcacttagaaaat

SEQ ID NO: 537886 - DNA, 33 bp, Homo sapien
aattcatacttatttgtagagcacttagaaaat

SEQ ID NO: 537887 - DNA, 33 bp, Homo sapien
taacatttgttttcccaggactctttcctcagc

SEQ ID NO: 537888 - DNA, 33 bp, Homo sapien
taacatttgttttcccgggactctttcctcagc

SEQ ID NO: 537889 - DNA, 33 bp, Homo sapien
tgcaaccagaataaaaccagaataataaaatga

SEQ ID NO: 537890 - DNA, 33 bp, Homo sapien
tgcaaccagaataaaatcagaataataaaatga

SEQ ID NO: 537891 - DNA, 33 bp, Homo sapien
ttcaaacacttagagcactttatttgtatactt

SEQ ID NO: 537892 - DNA, 33 bp, Homo sapien
ttcaaacacttagagccctttatttgtatactt

SEQ ID NO: 537893 - DNA, 33 bp, Homo sapien
gatttaaacagattctcactggcaattggttga

SEQ ID NO: 537894 - DNA, 33 bp, Homo sapien
gatttaaacagattctgactggcaattggttga

SEQ ID NO: 537895 - DNA, 33 bp, Homo sapien
ttattatatgacgaggacatcatagttcctggg

SEQ ID NO: 537896 - DNA, 33 bp, Homo sapien
ttattatatgacgagggcatcatagttcctggg

SEQ ID NO: 537897 - DNA, 33 bp, Homo sapien
gctgcattctaaattgaagtcttttctacctaa

SEQ ID NO: 537898 - DNA, 33 bp, Homo sapien
gctgcattctaaattggagtcttttctacctaa

SEQ ID NO: 537899 - DNA, 33 bp, Homo sapien
aacagagacctgttccaatttgctgctgccaac

SEQ ID NO: 537900 - DNA, 33 bp, Homo sapien
aacagagacctgttccgatttgctgctgccaac

SEQ ID NO: 537901 - DNA, 33 bp, Homo sapien
aagacatacctgagaccggatactttataaaga

SEQ ID NO: 537902 - DNA, 33 bp, Homo sapien
aagacatacctgagactggatactttataaaga

SEQ ID NO: 537903 - DNA, 33 bp, Homo sapien
gctgagatgaaagcaactgtacacggagttctg

SEQ ID NO: 537904 - DNA, 33 bp, Homo sapien
gctgagatgaaagcaattgtacacggagttctg

SEQ ID NO: 537905 - DNA, 33 bp, Homo sapien
gtgaagagtgtgttaaatacatgaagagctgtg

SEQ ID NO: 537906 - DNA, 33 bp, Homo sapien
gtgaagagtgtgttaagtacatgaagagctgtg

SEQ ID NO: 537907 - DNA, 33 bp, Homo sapien
tagaaaggactctccacacaagttctccttcat

SEQ ID NO: 537908 - DNA, 33 bp, Homo sapien
tagaaaggactctccatacaagttctccttcat

SEQ ID NO: 537909 - DNA, 33 bp, Homo sapien
gtgtactgtttcaagcggctaaatgcgtggcaa

SEQ ID NO: 537910 - DNA, 33 bp, Homo sapien
gtgtactgtttcaagctgctaaatgcgtggcaa

SEQ ID NO: 537911 - DNA, 33 bp, Homo sapien
agggaaactatctgagaaggagaatgggaacgg

SEQ ID NO: 537912 - DNA, 33 bp, Homo sapien
agggaaactatctgaggaggagaatgggaacgg

SEQ ID NO: 537913 - DNA, 33 bp, Homo sapien
attgccagagtaggtacagtctaaacattcatg

SEQ ID NO: 537914 - DNA, 33 bp, Homo sapien
attgccagagtaggtagagtctaaacattcatg

SEQ ID NO: 537915 - DNA, 33 bp, Homo sapien
tttgaacagactcaaaggagatgagggagttag

SEQ ID NO: 537916 - DNA, 33 bp, Homo sapien
tttgaacagactcaaatgagatgagggagttag

SEQ ID NO: 537917 - DNA, 33 bp, Homo sapien
gggtgcctgggttataagtagcttcctaactct

SEQ ID NO: 537918 - DNA, 33 bp, Homo sapien
gggtgcctgggttataggtagcttcctaactct

SEQ ID NO: 537919 - DNA, 33 bp, Homo sapien
aggaaaaatttattaccagctggaatccaagga

SEQ ID NO: 537920 - DNA, 33 bp, Homo sapien
aggaaaaatttattactagctggaatccaagga

SEQ ID NO: 537921 - DNA, 33 bp, Homo sapien
tcaaagccagctgctacgtctgaagactacaca

SEQ ID NO: 537922 - DNA, 33 bp, Homo sapien
tcaaagccagctgctatgtctgaagactacaca

SEQ ID NO: 537923 - DNA, 33 bp, Homo sapien
aagcttgaagacaacaatgaaaaatatcaatga

SEQ ID NO: 537924 - DNA, 33 bp, Homo sapien
aagcttgaagacaacagtgaaaaatatcaatga

SEQ ID NO: 537925 - DNA, 33 bp, Homo sapien
cccaactaaaacaaaacagcaatctgatccatt

SEQ ID NO: 537926 - DNA, 33 bp, Homo sapien
cccaactaaaacaaaatagcaatctgatccatt

SEQ ID NO: 537927 - DNA, 33 bp, Homo sapien
cccttcaacggcttataaagtatagtaacatcc

SEQ ID NO: 537928 - DNA, 33 bp, Homo sapien
cccttcaacggcttatgaagtatagtaacatcc

SEQ ID NO: 537929 - DNA, 33 bp, Homo sapien
tacacattgagatggaaaagtcgtctaatgtga

SEQ ID NO: 537930 - DNA, 33 bp, Homo sapien
tacacattgagatggagaagtcgtctaatgtga

SEQ ID NO: 537931 - DNA, 33 bp, Homo sapien
gaggccatggttgctacgcagctggttcagaac

SEQ ID NO: 537932 - DNA, 33 bp, Homo sapien
gaggccatggttgctaggcagctggttcagaac

SEQ ID NO: 537933 - DNA, 33 bp, Homo sapien
ccctgggccaacagaaaagaggctaaaccatcc

SEQ ID NO: 537934 - DNA, 33 bp, Homo sapien
ccctgggccaacagaacagaggctaaaccatcc

SEQ ID NO: 537935 - DNA, 33 bp, Homo sapien
ataagataaagcaagcggaacattttttaatgt

SEQ ID NO: 537936 - DNA, 33 bp, Homo sapien
ataagataaagcaagctgaacattttttaatgt

SEQ ID NO: 537937 - DNA, 33 bp, Homo sapien
atgcgtcttagaaaccaggctaattaaagagtt

SEQ ID NO: 537938 - DNA, 33 bp, Homo sapien
atgcgtcttagaaacctggctaattaaagagtt

SEQ ID NO: 537939 - DNA, 33 bp, Homo sapien
ttcgttgcagaagcaaccatttgatcctccatt

SEQ ID NO: 537940 - DNA, 33 bp, Homo sapien
ttcgttgcagaagcaagcatttgatcctccatt

SEQ ID NO: 537941 - DNA, 33 bp, Homo sapien
aataccctgaaaagaaatgatgacttgttgctt

SEQ ID NO: 537942 - DNA, 33 bp, Homo sapien
aataccctgaaaagaagtgatgacttgttgctt

SEQ ID NO: 537943 - DNA, 33 bp, Homo sapien
ttaataaacagattgacggaaccaagaaaacag

SEQ ID NO: 537944 - DNA, 33 bp, Homo sapien
ttaataaacagattgatggaaccaagaaaacag

SEQ ID NO: 537945 - DNA, 33 bp, Homo sapien
gccactgtactagaaaaagccaggaaataggca

SEQ ID NO: 537946 - DNA, 33 bp, Homo sapien
gccactgtactagaaacagccaggaaataggca

SEQ ID NO: 537947 - DNA, 33 bp, Homo sapien
ttatcttcacctccaacagatggtttcttgagg

SEQ ID NO: 537948 - DNA, 33 bp, Homo sapien
ttatcttcacctccaatagatggtttcttgagg

SEQ ID NO: 537949 - DNA, 33 bp, Homo sapien
tataaaaggcagagaaacctgataagagcaccc

SEQ ID NO: 537950 - DNA, 33 bp, Homo sapien
tataaaaggcagagaagcctgataagagcaccc

SEQ ID NO: 537951 - DNA, 33 bp, Homo sapien
cttcttccaacagtgcagatgaggaggctttta

SEQ ID NO: 537952 - DNA, 33 bp, Homo sapien
cttcttccaacagtgcggatgaggaggctttta

SEQ ID NO: 537953 - DNA, 33 bp, Homo sapien
agcagaggcatgtttcaaagttcctcactactc

SEQ ID NO: 537954 - DNA, 33 bp, Homo sapien
agcagaggcatgtttcgaagttcctcactactc

SEQ ID NO: 537955 - DNA, 33 bp, Homo sapien
tgtaaggatgaactgaagtaatacgtgccatgg

SEQ ID NO: 537956 - DNA, 33 bp, Homo sapien
tgtaaggatgaactgaggtaatacgtgccatgg

SEQ ID NO: 537957 - DNA, 33 bp, Homo sapien
cagaaacttaatgcagaccatattagagaaaaa

SEQ ID NO: 537958 - DNA, 33 bp, Homo sapien
cagaaacttaatgcaggccatattagagaaaaa

SEQ ID NO: 537959 - DNA, 33 bp, Homo sapien
agagacattttaggcaataagaagtgcatatag

SEQ ID NO: 537960 - DNA, 33 bp, Homo sapien
agagacattttaggcagtaagaagtgcatatag

SEQ ID NO: 537961 - DNA, 33 bp, Homo sapien
gatccctagtcccttccctctgaactagacagg

SEQ ID NO: 537962 - DNA, 33 bp, Homo sapien
gatccctagtcccttcgctctgaactagacagg

SEQ ID NO: 537963 - DNA, 33 bp, Homo sapien
ccaaatcttagaacacagtgactgatcattgtc

SEQ ID NO: 537964 - DNA, 33 bp, Homo sapien
ccaaatcttagaacacggtgactgatcattgtc

SEQ ID NO: 537965 - DNA, 33 bp, Homo sapien
attttagccagtgagacccattttgaacttcta

SEQ ID NO: 537966 - DNA, 33 bp, Homo sapien
attttagccagtgagatccattttgaacttcta

SEQ ID NO: 537967 - DNA, 33 bp, Homo sapien
tccatcttcaagcaaaacctctgctcagtctcc

SEQ ID NO: 537968 - DNA, 33 bp, Homo sapien
tccatcttcaagcaaagcctctgctcagtctcc

SEQ ID NO: 537969 - DNA, 33 bp, Homo sapien
aatggacatagggaaaaatcaagtgggtccaaa

SEQ ID NO: 537970 - DNA, 33 bp, Homo sapien
aatggacatagggaaacatcaagtgggtccaaa

SEQ ID NO: 537971 - DNA, 33 bp, Homo sapien
aacagttacgcttgcaatcttcaatcttcggga

SEQ ID NO: 537972 - DNA, 33 bp, Homo sapien
aacagttacgcttgcagtcttcaatcttcggga

SEQ ID NO: 537973 - DNA, 33 bp, Homo sapien
ctaaacagtttacagacggcttgcaataatttt

SEQ ID NO: 537974 - DNA, 33 bp, Homo sapien
ctaaacagtttacagatggcttgcaataatttt

SEQ ID NO: 537975 - DNA, 33 bp, Homo sapien
ccccttaaaccattgacgaaagacttgttaact

SEQ ID NO: 537976 - DNA, 33 bp, Homo sapien
ccccttaaaccattgatgaaagacttgttaact

SEQ ID NO: 537977 - DNA, 33 bp, Homo sapien
gtggaaaagcctctgccgaatgcactgaggtaa

SEQ ID NO: 537978 - DNA, 33 bp, Homo sapien
gtggaaaagcctctgctgaatgcactgaggtaa

SEQ ID NO: 537979 - DNA, 33 bp, Homo sapien
atattaattgcaggtagggggatgaacagttga

SEQ ID NO: 537980 - DNA, 33 bp, Homo sapien
atattaattgcaggtatggggatgaacagttga

SEQ ID NO: 537981 - DNA, 33 bp, Homo sapien
taaaggttgaaaatcacgaagtgcaaggaattt

SEQ ID NO: 537982 - DNA, 33 bp, Homo sapien
taaaggttgaaaatcatgaagtgcaaggaattt

SEQ ID NO: 537983 - DNA, 33 bp, Homo sapien
taagagcctttgagaggatataaagtctttctt

SEQ ID NO: 537984 - DNA, 33 bp, Homo sapien
taagagcctttgagagtatataaagtctttctt

SEQ ID NO: 537985 - DNA, 33 bp, Homo sapien
caaactgagaaagcagcccaagccttcaacgaa

SEQ ID NO: 537986 - DNA, 33 bp, Homo sapien
caaactgagaaagcaggccaagccttcaacgaa

SEQ ID NO: 537987 - DNA, 33 bp, Homo sapien
cctgggacaaatcacaacaaatggatactcagg

SEQ ID NO: 537988 - DNA, 33 bp, Homo sapien
cctgggacaaatcacagcaaatggatactcagg

SEQ ID NO: 537989 - DNA, 33 bp, Homo sapien
tggacagaatggagaaatcaagatcatggcctg

SEQ ID NO: 537990 - DNA, 33 bp, Homo sapien
tggacagaatggagaagtcaagatcatggcctg

SEQ ID NO: 537991 - DNA, 33 bp, Homo sapien
gttctattccaaaagacctactatcacctgcaa

SEQ ID NO: 537992 - DNA, 33 bp, Homo sapien
gttctattccaaaagagctactatcacctgcaa

SEQ ID NO: 537993 - DNA, 33 bp, Homo sapien
tctagatatttgtacgcaaccaatagctctccc

SEQ ID NO: 537994 - DNA, 33 bp, Homo sapien
tctagatatttgtacggaaccaatagctctccc

SEQ ID NO: 537995 - DNA, 33 bp, Homo sapien
catactccatgacttacctggtgaaactatccc

SEQ ID NO: 537996 - DNA, 33 bp, Homo sapien
catactccatgacttatctggtgaaactatccc

SEQ ID NO: 537997 - DNA, 33 bp, Homo sapien
gtccaatcaaaaacaccgcctatcatgttagct

SEQ ID NO: 537998 - DNA, 33 bp, Homo sapien
gtccaatcaaaaacactgcctatcatgttagct

SEQ ID NO: 537999 - DNA, 33 bp, Homo sapien
ataaatgcaaacacttaaaacacttctgtgatc

SEQ ID NO: 538000 - DNA, 33 bp, Homo sapien
ataaatgcaaacactttaaacacttctgtgatc

SEQ ID NO: 538001 - DNA, 33 bp, Homo sapien
gaaccgtggcaaagcaatgctcccatcttgacc

SEQ ID NO: 538002 - DNA, 33 bp, Homo sapien
gaaccgtggcaaagcagtgctcccatcttgacc

SEQ ID NO: 538003 - DNA, 33 bp, Homo sapien
atctgatccagatagaaagaaatcaggtagggc

SEQ ID NO: 538004 - DNA, 33 bp, Homo sapien
atctgatccagatagagagaaatcaggtagggc

SEQ ID NO: 538005 - DNA, 33 bp, Homo sapien
ctgaattcctggactcacactatccacagcctc

SEQ ID NO: 538006 - DNA, 33 bp, Homo sapien
ctgaattcctggactcgcactatccacagcctc

SEQ ID NO: 538007 - DNA, 33 bp, Homo sapien
tctctttggcttgcccaacctaccggatctctt

SEQ ID NO: 538008 - DNA, 33 bp, Homo sapien
tctctttggcttgcccgacctaccggatctctt

SEQ ID NO: 538009 - DNA, 33 bp, Homo sapien
tgtggaatcttgccagcctctttttaaaaaatt

SEQ ID NO: 538010 - DNA, 33 bp, Homo sapien
tgtggaatcttgccaggctctttttaaaaaatt

SEQ ID NO: 538011 - DNA, 33 bp, Homo sapien
acttccaggctgcactaagctatgacggtgcca

SEQ ID NO: 538012 - DNA, 33 bp, Homo sapien
acttccaggctgcactgagctatgacggtgcca

SEQ ID NO: 538013 - DNA, 33 bp, Homo sapien
aatgtctgtttagcagaaaagctctggctctta

SEQ ID NO: 538014 - DNA, 33 bp, Homo sapien
aatgtctgtttagcaggaaagctctggctctta

SEQ ID NO: 538015 - DNA, 33 bp, Homo sapien
atagaattgactcaagaaaacgtacgtgagtcc

SEQ ID NO: 538016 - DNA, 33 bp, Homo sapien
atagaattgactcaaggaaacgtacgtgagtcc

SEQ ID NO: 538017 - DNA, 33 bp, Homo sapien
tgtcctaaattaggaacgtatctgcggtaccag

SEQ ID NO: 538018 - DNA, 33 bp, Homo sapien
tgtcctaaattaggaatgtatctgcggtaccag

SEQ ID NO: 538019 - DNA, 33 bp, Homo sapien
accctgccttaaccaagcagtgaaggttaacat

SEQ ID NO: 538020 - DNA, 33 bp, Homo sapien
accctgccttaaccaatcagtgaaggttaacat

SEQ ID NO: 538021 - DNA, 33 bp, Homo sapien
gtccaataaacttaaaagattgcctcgaagttc

SEQ ID NO: 538022 - DNA, 33 bp, Homo sapien
gtccaataaacttaaaggattgcctcgaagttc

SEQ ID NO: 538023 - DNA, 33 bp, Homo sapien
aatgtcatcctccttcactgataactcagctgc

SEQ ID NO: 538024 - DNA, 33 bp, Homo sapien
aatgtcatcctccttcgctgataactcagctgc

SEQ ID NO: 538025 - DNA, 33 bp, Homo sapien
aataccaccactcaataagcagttcaaaaaact

SEQ ID NO: 538026 - DNA, 33 bp, Homo sapien
aataccaccactcaatgagcagttcaaaaaact

SEQ ID NO: 538027 - DNA, 33 bp, Homo sapien
tcacagcaacttttcaatccatcctgttgacca

SEQ ID NO: 538028 - DNA, 33 bp, Homo sapien
tcacagcaacttttcagtccatcctgttgacca

SEQ ID NO: 538029 - DNA, 33 bp, Homo sapien
acagtcttagtttcaacaataatggagcacaga

SEQ ID NO: 538030 - DNA, 33 bp, Homo sapien
acagtcttagtttcaataataatggagcacaga

SEQ ID NO: 538031 - DNA, 33 bp, Homo sapien
tacattagcctcatcacaggcaaagtgtacttt

SEQ ID NO: 538032 - DNA, 33 bp, Homo sapien
tacattagcctcatcataggcaaagtgtacttt

SEQ ID NO: 538033 - DNA, 33 bp, Homo sapien
tttggatatatagtacaattgcagaagaacgaa

SEQ ID NO: 538034 - DNA, 33 bp, Homo sapien
tttggatatatagtactattgcagaagaacgaa

SEQ ID NO: 538035 - DNA, 33 bp, Homo sapien
caaagggtaagaaaagcctcccttctggaccat

SEQ ID NO: 538036 - DNA, 33 bp, Homo sapien
caaagggtaagaaaagtctcccttctggaccat

SEQ ID NO: 538037 - DNA, 33 bp, Homo sapien
tgttctgtatgatgcaataaaatgttggaaatc

SEQ ID NO: 538038 - DNA, 33 bp, Homo sapien
tgttctgtatgatgcagtaaaatgttggaaatc

SEQ ID NO: 538039 - DNA, 33 bp, Homo sapien
atagattcagtctgcccctagtgctgctgcatg

SEQ ID NO: 538040 - DNA, 33 bp, Homo sapien
atagattcagtctgccgctagtgctgctgcatg

SEQ ID NO: 538041 - DNA, 33 bp, Homo sapien
agaggagaccaagatacatttcctcagctgtta

SEQ ID NO: 538042 - DNA, 33 bp, Homo sapien
agaggagaccaagatatatttcctcagctgtta

SEQ ID NO: 538043 - DNA, 33 bp, Homo sapien
cacacaccaattctaaactgacaaaataatcca

SEQ ID NO: 538044 - DNA, 33 bp, Homo sapien
cacacaccaattctaagctgacaaaataatcca

SEQ ID NO: 538045 - DNA, 33 bp, Homo sapien
gaacacaaacttctcaagacaaatacaactggg

SEQ ID NO: 538046 - DNA, 33 bp, Homo sapien
gaacacaaacttctcaggacaaatacaactggg

SEQ ID NO: 538047 - DNA, 33 bp, Homo sapien
tgaagagtaatggtgaaatatattagaacaaag

SEQ ID NO: 538048 - DNA, 33 bp, Homo sapien
tgaagagtaatggtgagatatattagaacaaag

SEQ ID NO: 538049 - DNA, 33 bp, Homo sapien
aacttcctctttctacaaagttatcaggtttac

SEQ ID NO: 538050 - DNA, 33 bp, Homo sapien
aacttcctctttctaccaagttatcaggtttac

SEQ ID NO: 538051 - DNA, 33 bp, Homo sapien
gatgctctgtcagaagaaaaggcttgacttatt

SEQ ID NO: 538052 - DNA, 33 bp, Homo sapien
gatgctctgtcagaagcaaaggcttgacttatt

SEQ ID NO: 538053 - DNA, 33 bp, Homo sapien
tgactctgattaactcaatccaggtttgatcat

SEQ ID NO: 538054 - DNA, 33 bp, Homo sapien
tgactctgattaactccatccaggtttgatcat

SEQ ID NO: 538055 - DNA, 33 bp, Homo sapien
ctgttgttatgattatgaaccaaggatgatatg

SEQ ID NO: 538056 - DNA, 33 bp, Homo sapien
ctgttgttatgattattaaccaaggatgatatg

SEQ ID NO: 538057 - DNA, 33 bp, Homo sapien
atagtgttgagaaagccgaaaagaaagattgta

SEQ ID NO: 538058 - DNA, 33 bp, Homo sapien
atagtgttgagaaagctgaaaagaaagattgta

SEQ ID NO: 538059 - DNA, 33 bp, Homo sapien
tcacattcaaaccacaatggaactcaacctagt

SEQ ID NO: 538060 - DNA, 33 bp, Homo sapien
tcacattcaaaccacagtggaactcaacctagt

SEQ ID NO: 538061 - DNA, 33 bp, Homo sapien
tctataataaaaatgcagatcgaaaatctgtgt

SEQ ID NO: 538062 - DNA, 33 bp, Homo sapien
tctataataaaaatgctgatcgaaaatctgtgt

SEQ ID NO: 538063 - DNA, 33 bp, Homo sapien
gaaaacatatatgtacagagcccagacacagta

SEQ ID NO: 538064 - DNA, 33 bp, Homo sapien
gaaaacatatatgtacggagcccagacacagta

SEQ ID NO: 538065 - DNA, 33 bp, Homo sapien
ggacatttgtttataacacgagagctgaagaaa

SEQ ID NO: 538066 - DNA, 33 bp, Homo sapien
ggacatttgtttataatacgagagctgaagaaa

SEQ ID NO: 538067 - DNA, 33 bp, Homo sapien
tctctacccttatatcactttctttggtgtggc

SEQ ID NO: 538068 - DNA, 33 bp, Homo sapien
tctctacccttatatccctttctttggtgtggc

SEQ ID NO: 538069 - DNA, 33 bp, Homo sapien
taactcatctgttctccagttcattatcaaaat

SEQ ID NO: 538070 - DNA, 33 bp, Homo sapien
taactcatctgttctctagttcattatcaaaat

SEQ ID NO: 538071 - DNA, 33 bp, Homo sapien
gtccaaaatgagaagacgattggacacattacg

SEQ ID NO: 538072 - DNA, 33 bp, Homo sapien
gtccaaaatgagaagatgattggacacattacg

SEQ ID NO: 538073 - DNA, 33 bp, Homo sapien
gctacctatgtggcaaatctattaatttggttt

SEQ ID NO: 538074 - DNA, 33 bp, Homo sapien
gctacctatgtggcaagtctattaatttggttt

SEQ ID NO: 538075 - DNA, 33 bp, Homo sapien
ttgaggtaaatttgagcattctatgtattgcat

SEQ ID NO: 538076 - DNA, 33 bp, Homo sapien
ttgaggtaaatttgaggattctatgtattgcat

SEQ ID NO: 538077 - DNA, 33 bp, Homo sapien
taatttgggctttagaaccaaaatgttattagt

SEQ ID NO: 538078 - DNA, 33 bp, Homo sapien
taatttgggctttagatccaaaatgttattagt

SEQ ID NO: 538079 - DNA, 33 bp, Homo sapien
gccatagccactttcccgcactgtggtgagttc

SEQ ID NO: 538080 - DNA, 33 bp, Homo sapien
gccatagccactttcctgcactgtggtgagttc

SEQ ID NO: 538081 - DNA, 33 bp, Homo sapien; identical to SEQ ID NO: 538079

SEQ ID NO: 538082 - DNA, 33 bp, Homo sapien; identical to SEQ ID NO: 538080

SEQ ID NO: 538083 - DNA, 33 bp, Homo sapien
ttctcctccaaatgatcaaactcctctgggcac

SEQ ID NO: 538084 - DNA, 33 bp, Homo sapien
ttctcctccaaatgatgaaactcctctgggcac

SEQ ID NO: 538085 - DNA, 33 bp, Homo sapien
gatggaccacagatataataatagtcacataag

SEQ ID NO: 538086 - DNA, 33 bp, Homo sapien
gatggaccacagatatgataatagtcacataag

SEQ ID NO: 538087 - DNA, 33 bp, Homo sapien
tttacagaggccgacaataacaactgttaacat

SEQ ID NO: 538088 - DNA, 33 bp, Homo sapien
tttacagaggccgacattaacaactgttaacat

SEQ ID NO: 538089 - DNA, 33 bp, Homo sapien
aaatttggttgagacacaatatgctgttgcact

SEQ ID NO: 538090 - DNA, 33 bp, Homo sapien
aaatttggttgagacataatatgctgttgcact

SEQ ID NO: 538091 - DNA, 33 bp, Homo sapien
ggttgatggttacaaaagtacagctaggacaga

SEQ ID NO: 538092 - DNA, 33 bp, Homo sapien
ggttgatggttacaaaggtacagctaggacaga

SEQ ID NO: 538093 - DNA, 33 bp, Homo sapien
cctttgggtatacacaaagtaatgagattgctg

SEQ ID NO: 538094 - DNA, 33 bp, Homo sapien
cctttgggtatacacagagtaatgagattgctg

SEQ ID NO: 538095 - DNA, 33 bp, Homo sapien
agagaaggcaaatctacgggaaaaaaatagtaa

SEQ ID NO: 538096 - DNA, 33 bp, Homo sapien
agagaaggcaaatctaggggaaaaaaatagtaa

SEQ ID NO: 538097 - DNA, 33 bp, Homo sapien
attaaactgaaaagacagagcaaaataattcaa

SEQ ID NO: 538098 - DNA, 33 bp, Homo sapien
attaaactgaaaagacggagcaaaataattcaa

SEQ ID NO: 538099 - DNA, 33 bp, Homo sapien
cagagaggattacaaacaaggtgcttcatatta

SEQ ID NO: 538100 - DNA, 33 bp, Homo sapien
cagagaggattacaaagaaggtgcttcatatta

SEQ ID NO: 538101 - DNA, 33 bp, Homo sapien
agaaaaagaggccatactaaaaaatctagactt

SEQ ID NO: 538102 - DNA, 33 bp, Homo sapien
agaaaaagaggccatattaaaaaatctagactt

SEQ ID NO: 538103 - DNA, 33 bp, Homo sapien
aagctcatagcagtaaagaaagcaaaaagaagt

SEQ ID NO: 538104 - DNA, 33 bp, Homo sapien
aagctcatagcagtaaggaaagcaaaaagaagt

SEQ ID NO: 538105 - DNA, 33 bp, Homo sapien
caaagacaccactaaaaattttcttcaggcgaa

SEQ ID NO: 538106 - DNA, 33 bp, Homo sapien
caaagacaccactaaacattttcttcaggcgaa

SEQ ID NO: 538107 - DNA, 33 bp, Homo sapien
cgatttttgaagataaggcagggaataatcttc

SEQ ID NO: 538108 - DNA, 33 bp, Homo sapien
cgatttttgaagataatgcagggaataatcttc

SEQ ID NO: 538109 - DNA, 33 bp, Homo sapien
tgtcactttactgagaacaactaggttttactt

SEQ ID NO: 538110 - DNA, 33 bp, Homo sapien
tgtcactttactgagagcaactaggttttactt

SEQ ID NO: 538111 - DNA, 33 bp, Homo sapien
tgctctctttcttccacgcttcatctggtaccc

SEQ ID NO: 538112 - DNA, 33 bp, Homo sapien
tgctctctttcttccatgcttcatctggtaccc

SEQ ID NO: 538113 - DNA, 33 bp, Homo sapien
ggaaataatctcgtggaaaaacctaactgaaag

SEQ ID NO: 538114 - DNA, 33 bp, Homo sapien
ggaaataatctcgtgggaaaacctaactgaaag

SEQ ID NO: 538115 - DNA, 33 bp, Homo sapien
caaatacttacggaaaccaacgcatacttaaat

SEQ ID NO: 538116 - DNA, 33 bp, Homo sapien
caaatacttacggaaatcaacgcatacttaaat

SEQ ID NO: 538117 - DNA, 33 bp, Homo sapien
ctagagcattaaccaaacagttactatttgcca

SEQ ID NO: 538118 - DNA, 33 bp, Homo sapien
ctagagcattaaccaagcagttactatttgcca

SEQ ID NO: 538119 - DNA, 33 bp, Homo sapien
aatatgttagctttatcagccttattcatacct

SEQ ID NO: 538120 - DNA, 33 bp, Homo sapien
aatatgttagctttattagccttattcatacct

SEQ ID NO: 538121 - DNA, 33 bp, Homo sapien
taaaaacaaaacaaaagagcttgagaggcagca

SEQ ID NO: 538122 - DNA, 33 bp, Homo sapien
taaaaacaaaacaaaatagcttgagaggcagca

SEQ ID NO: 538123 - DNA, 33 bp, Homo sapien
cagttttagagagacactacagcaatgtgtggt

SEQ ID NO: 538124 - DNA, 33 bp, Homo sapien
cagttttagagagacattacagcaatgtgtggt

SEQ ID NO: 538125 - DNA, 33 bp, Homo sapien
cccttaacttctcaaacgataccgttgctcaga

SEQ ID NO: 538126 - DNA, 33 bp, Homo sapien
cccttaacttctcaaatgataccgttgctcaga

SEQ ID NO: 538127 - DNA, 33 bp, Homo sapien
gtacactgggataacactgaaaaaggaattctc

SEQ ID NO: 538128 - DNA, 33 bp, Homo sapien
gtacactgggataacattgaaaaaggaattctc

SEQ ID NO: 538129 - DNA, 33 bp, Homo sapien
caccttatctaactcaaacacttttaacctaag

SEQ ID NO: 538130 - DNA, 33 bp, Homo sapien
caccttatctaactcagacacttttaacctaag

SEQ ID NO: 538131 - DNA, 33 bp, Homo sapien
gcctgaactaaagagaaaagttatttgccccca

SEQ ID NO: 538132 - DNA, 33 bp, Homo sapien
gcctgaactaaagagagaagttatttgccccca

SEQ ID NO: 538133 - DNA, 33 bp, Homo sapien
ttagataagatgaaaacagttctattggcatta

SEQ ID NO: 538134 - DNA, 33 bp, Homo sapien
ttagataagatgaaaatagttctattggcatta

SEQ ID NO: 538135 - DNA, 33 bp, Homo sapien
ttttacaatttagtggaatgaacctacaaattc

SEQ ID NO: 538136 - DNA, 33 bp, Homo sapien
ttttacaatttagtgggatgaacctacaaattc

SEQ ID NO: 538137 - DNA, 33 bp, Homo sapien
tgaacatgaacctttacctactagcaccatcca

SEQ ID NO: 538138 - DNA, 33 bp, Homo sapien
tgaacatgaacctttagctactagcaccatcca

SEQ ID NO: 538139 - DNA, 33 bp, Homo sapien
gctttccagtatctaactcggatgttcctatgg

SEQ ID NO: 538140 - DNA, 33 bp, Homo sapien
gctttccagtatctaagtcggatgttcctatgg

SEQ ID NO: 538141 - DNA, 33 bp, Homo sapien
ctttcaggcctgaatacgatgatgtagattgat

SEQ ID NO: 538142 - DNA, 33 bp, Homo sapien
ctttcaggcctgaatatgatgatgtagattgat

SEQ ID NO: 538143 - DNA, 33 bp, Homo sapien
ttcttccttttttgccaaatttaacatacatac

SEQ ID NO: 538144 - DNA, 33 bp, Homo sapien
ttcttccttttttgccgaatttaacatacatac

SEQ ID NO: 538145 - DNA, 33 bp, Homo sapien
tattactggttcatgacctactttggtaaacaa

SEQ ID NO: 538146 - DNA, 33 bp, Homo sapien
tattactggttcatgatctactttggtaaacaa

SEQ ID NO: 538147 - DNA, 33 bp, Homo sapien
ctgaaagctatgaagaagcacaagtgaggataa

SEQ ID NO: 538148 - DNA, 33 bp, Homo sapien
ctgaaagctatgaagaggcacaagtgaggataa

SEQ ID NO: 538149 - DNA, 33 bp, Homo sapien
aacaacacccaataaccaaacaagcacctacaa

SEQ ID NO: 538150 - DNA, 33 bp, Homo sapien
aacaacacccaataactaaacaagcacctacaa

SEQ ID NO: 538151 - DNA, 33 bp, Homo sapien
gtaccactctggagacagatattaataatggag

SEQ ID NO: 538152 - DNA, 33 bp, Homo sapien
gtaccactctggagacggatattaataatggag

SEQ ID NO: 538153 - DNA, 33 bp, Homo sapien
gcttgcagtttaaaaaattttgctttagtgtac

SEQ ID NO: 538154 - DNA, 33 bp, Homo sapien
gcttgcagtttaaaaatttttgctttagtgtac

SEQ ID NO: 538155 - DNA, 33 bp, Homo sapien
actgttaactcataatgagccctatgtgtttct

SEQ ID NO: 538156 - DNA, 33 bp, Homo sapien
actgttaactcataattagccctatgtgtttct

SEQ ID NO: 538157 - DNA, 33 bp, Homo sapien
gcagaggatcacactacggatgtgcttggcaca

SEQ ID NO: 538158 - DNA, 33 bp, Homo sapien
gcagaggatcacactatggatgtgcttggcaca

SEQ ID NO: 538159 - DNA, 33 bp, Homo sapien
gatttaattacagtaccagaattgaaggacttt

SEQ ID NO: 538160 - DNA, 33 bp, Homo sapien
gatttaattacagtacgagaattgaaggacttt

SEQ ID NO: 538161 - DNA, 33 bp, Homo sapien
atcatcatagtcaccgccccagttagtgcaccc

SEQ ID NO: 538162 - DNA, 33 bp, Homo sapien
atcatcatagtcaccgtcccagttagtgcaccc

SEQ ID NO: 538163 - DNA, 33 bp, Homo sapien
atggtgacaggatgcacgacttctgaccttggc

SEQ ID NO: 538164 - DNA, 33 bp, Homo sapien
atggtgacaggatgcatgacttctgaccttggc

SEQ ID NO: 538165 - DNA, 33 bp, Homo sapien
tgcatgattagctccacgaaataaactaccaga

SEQ ID NO: 538166 - DNA, 33 bp, Homo sapien
tgcatgattagctccatgaaataaactaccaga

SEQ ID NO: 538167 - DNA, 33 bp, Homo sapien
ttctagttcactaaccaatgcattctcgatgtc

SEQ ID NO: 538168 - DNA, 33 bp, Homo sapien
ttctagttcactaacccatgcattctcgatgtc

SEQ ID NO: 538169 - DNA, 33 bp, Homo sapien
tgaaatgtagaaggaacgtttgggaatttctca

SEQ ID NO: 538170 - DNA, 33 bp, Homo sapien
tgaaatgtagaaggaatgtttgggaatttctca

SEQ ID NO: 538171 - DNA, 33 bp, Homo sapien
tggttggcttacaccaatcagaattcacaccct

SEQ ID NO: 538172 - DNA, 33 bp, Homo sapien
tggttggcttacaccagtcagaattcacaccct

SEQ ID NO: 538173 - DNA, 33 bp, Homo sapien
tgattgcttaaatacagtagacacaaatagcac

SEQ ID NO: 538174 - DNA, 33 bp, Homo sapien
tgattgcttaaatacattagacacaaatagcac

SEQ ID NO: 538175 - DNA, 33 bp, Homo sapien
gtgtgtccattaggcaaaatattgatggatatt

SEQ ID NO: 538176 - DNA, 33 bp, Homo sapien
gtgtgtccattaggcacaatattgatggatatt

SEQ ID NO: 538177 - DNA, 33 bp, Homo sapien
tagtgtctttatggagaagccaatcagtcttac

SEQ ID NO: 538178 - DNA, 33 bp, Homo sapien
tagtgtctttatggaggagccaatcagtcttac

SEQ ID NO: 538179 - DNA, 33 bp, Homo sapien
gagcttctgcaatgaacaacacataatgtttcc

SEQ ID NO: 538180 - DNA, 33 bp, Homo sapien
gagcttctgcaatgaataacacataatgtttcc

SEQ ID NO: 538181 - DNA, 33 bp, Homo sapien
gatgcctgaaatcggaagtgttgtttgaaacag

SEQ ID NO: 538182 - DNA, 33 bp, Homo sapien
gatgcctgaaatcggaggtgttgtttgaaacag

SEQ ID NO: 538183 - DNA, 33 bp, Homo sapien
gacagcagagtgctatcagagccatttccatgg

SEQ ID NO: 538184 - DNA, 33 bp, Homo sapien
gacagcagagtgctattagagccatttccatgg

SEQ ID NO: 538185 - DNA, 33 bp, Homo sapien
ctgatgccattttaacactcttcttgtatttat

SEQ ID NO: 538186 - DNA, 33 bp, Homo sapien
ctgatgccattttaacgctcttcttgtatttat

SEQ ID NO: 538187 - DNA, 33 bp, Homo sapien
taccaatgactgaaaacgtgggccacacacaca

SEQ ID NO: 538188 - DNA, 33 bp, Homo sapien
taccaatgactgaaaatgtgggccacacacaca

SEQ ID NO: 538189 - DNA, 33 bp, Homo sapien
aaattatacgtcacctcaatactctggggaaaa

SEQ ID NO: 538190 - DNA, 33 bp, Homo sapien
aaattatacgtcaccttaatactctggggaaaa

SEQ ID NO: 538191 - DNA, 33 bp, Homo sapien
tatgtgccatgccagggagatatgttccacacc

SEQ ID NO: 538192 - DNA, 33 bp, Homo sapien
tatgtgccatgccaggtagatatgttccacacc

SEQ ID NO: 538193 - DNA, 33 bp, Homo sapien
tccaggaaatgttaaacggaggaaataggtgtg

SEQ ID NO: 538194 - DNA, 33 bp, Homo sapien
tccaggaaatgttaaatggaggaaataggtgtg

SEQ ID NO: 538195 - DNA, 33 bp, Homo sapien
cagccactccattatcacaaagaagggtttaca

SEQ ID NO: 538196 - DNA, 33 bp, Homo sapien
cagccactccattatctcaaagaagggtttaca

SEQ ID NO: 538197 - DNA, 33 bp, Homo sapien
acactttttaatacaagggaatagcaaccaggt

SEQ ID NO: 538198 - DNA, 33 bp, Homo sapien
acactttttaatacaatggaatagcaaccaggt

SEQ ID NO: 538199 - DNA, 33 bp, Homo sapien
gtcctgtggggatagacagagatcttttgggta

SEQ ID NO: 538200 - DNA, 33 bp, Homo sapien
gtcctgtggggatagagagagatcttttgggta

SEQ ID NO: 538201 - DNA, 33 bp, Homo sapien
ggggactcctagagcaagtaatattcagaaacc

SEQ ID NO: 538202 - DNA, 33 bp, Homo sapien
ggggactcctagagcaggtaatattcagaaacc

SEQ ID NO: 538203 - DNA, 33 bp, Homo sapien
aacagatacacccaaaaattccttggtaaacta

SEQ ID NO: 538204 - DNA, 33 bp, Homo sapien
aacagatacacccaaacattccttggtaaacta

SEQ ID NO: 538205 - DNA, 33 bp, Homo sapien
gattattcagggaggacgggttattcaggaaga

SEQ ID NO: 538206 - DNA, 33 bp, Homo sapien
gattattcagggaggatgggttattcaggaaga

SEQ ID NO: 538207 - DNA, 33 bp, Homo sapien
agcatctgacatttgcaagggttttaaagcaca

SEQ ID NO: 538208 - DNA, 33 bp, Homo sapien
agcatctgacatttgcgagggttttaaagcaca

SEQ ID NO: 538209 - DNA, 33 bp, Homo sapien
agctcatagtcaacaacgccagagctgcaagca

SEQ ID NO: 538210 - DNA, 33 bp, Homo sapien
agctcatagtcaacaatgccagagctgcaagca

SEQ ID NO: 538211 - DNA, 33 bp, Homo sapien
gattaccagtgatcagcagaagatgatggctct

SEQ ID NO: 538212 - DNA, 33 bp, Homo sapien
gattaccagtgatcaggagaagatgatggctct

SEQ ID NO: 538213 - DNA, 33 bp, Homo sapien
agaggaaacaatgaaacggtccagtgatttctt

SEQ ID NO: 538214 - DNA, 33 bp, Homo sapien
agaggaaacaatgaaatggtccagtgatttctt

SEQ ID NO: 538215 - DNA, 33 bp, Homo sapien
atgagctatacagtctaagaattccaagatttg

SEQ ID NO: 538216 - DNA, 33 bp, Homo sapien
atgagctatacagtctgagaattccaagatttg

SEQ ID NO: 538217 - DNA, 33 bp, Homo sapien
ctgccaggtagtcagagaacattttttatgaat

SEQ ID NO: 538218 - DNA, 33 bp, Homo sapien
ctgccaggtagtcagataacattttttatgaat

SEQ ID NO: 538219 - DNA, 33 bp, Homo sapien
ggggaagtgggacacaacacaatctctttctga

SEQ ID NO: 538220 - DNA, 33 bp, Homo sapien
ggggaagtgggacacagcacaatctctttctga

SEQ ID NO: 538221 - DNA, 33 bp, Homo sapien
ccttttgctcttcaaacctcagagtagtatgtt

SEQ ID NO: 538222 - DNA, 33 bp, Homo sapien
ccttttgctcttcaaatctcagagtagtatgtt

SEQ ID NO: 538223 - DNA, 33 bp, Homo sapien
acagacctcttcctcaaatagcatcctcgccaa

SEQ ID NO: 538224 - DNA, 33 bp, Homo sapien
acagacctcttcctcagatagcatcctcgccaa

SEQ ID NO: 538225 - DNA, 33 bp, Homo sapien
tataaagtctgttacaagtttatcaaaaaatga

SEQ ID NO: 538226 - DNA, 33 bp, Homo sapien
tataaagtctgttacaggtttatcaaaaaatga

SEQ ID NO: 538227 - DNA, 33 bp, Homo sapien
ccagagtgagaatttccattcctgtttgcccac

SEQ ID NO: 538228 - DNA, 33 bp, Homo sapien
ccagagtgagaatttctattcctgtttgcccac

SEQ ID NO: 538229 - DNA, 33 bp, Homo sapien
aggggcagaaggaaaacaggcaaagaatgtgtg

SEQ ID NO: 538230 - DNA, 33 bp, Homo sapien
aggggcagaaggaaaagaggcaaagaatgtgtg

SEQ ID NO: 538231 - DNA, 33 bp, Homo sapien
aagatctgggttcaaaaataaagaatctgaagt

SEQ ID NO: 538232 - DNA, 33 bp, Homo sapien
aagatctgggttcaaagataaagaatctgaagt

SEQ ID NO: 538233 - DNA, 33 bp, Homo sapien
tgatagtttgaccttccatgttgttctagctaa

SEQ ID NO: 538234 - DNA, 33 bp, Homo sapien
tgatagtttgaccttctatgttgttctagctaa

SEQ ID NO: 538235 - DNA, 33 bp, Homo sapien
aaaggtaacactcttaaacccagcagaggcatc

SEQ ID NO: 538236 - DNA, 33 bp, Homo sapien
aaaggtaacactcttagacccagcagaggcatc

SEQ ID NO: 538237 - DNA, 33 bp, Homo sapien
tgtccctcaaggttaaataatagggcacaaaag

SEQ ID NO: 538238 - DNA, 33 bp, Homo sapien
tgtccctcaaggttaagtaatagggcacaaaag

SEQ ID NO: 538239 - DNA, 33 bp, Homo sapien
ctcttctcttcctccccatcttcttagagattt

SEQ ID NO: 538240 - DNA, 33 bp, Homo sapien
ctcttctcttcctccctatcttcttagagattt

SEQ ID NO: 538241 - DNA, 33 bp, Homo sapien
agaatcaagtacattaagtcccttatttatttg

SEQ ID NO: 538242 - DNA, 33 bp, Homo sapien
agaatcaagtacattaggtcccttatttatttg

SEQ ID NO: 538243 - DNA, 33 bp, Homo sapien
gggaagactttcaagacaacagtcaacagaaaa

SEQ ID NO: 538244 - DNA, 33 bp, Homo sapien
gggaagactttcaagataacagtcaacagaaaa

SEQ ID NO: 538245 - DNA, 33 bp, Homo sapien
gtgatatttgtgagcacactgtgaaggtgatgc

SEQ ID NO: 538246 - DNA, 33 bp, Homo sapien
gtgatatttgtgagcatactgtgaaggtgatgc

SEQ ID NO: 538247 - DNA, 33 bp, Homo sapien
cttttctgcataaaagccttcagtagatcttca

SEQ ID NO: 538248 - DNA, 33 bp, Homo sapien
cttttctgcataaaaggcttcagtagatcttca

SEQ ID NO: 538249 - DNA, 33 bp, Homo sapien
gttgcaaagttgattcccagtttctcagtgctt

SEQ ID NO: 538250 - DNA, 33 bp, Homo sapien
gttgcaaagttgattctcagtttctcagtgctt

SEQ ID NO: 538251 - DNA, 33 bp, Homo sapien
gagagcatttagttcaatctttaaaagcaaaga

SEQ ID NO: 538252 - DNA, 33 bp, Homo sapien
gagagcatttagttcattctttaaaagcaaaga

SEQ ID NO: 538253 - DNA, 33 bp, Homo sapien
ttcatcctcttttgaagggaacaatggagcatg

SEQ ID NO: 538254 - DNA, 33 bp, Homo sapien
ttcatcctcttttgaatggaacaatggagcatg

SEQ ID NO: 538255 - DNA, 33 bp, Homo sapien
tgcacaataaattatccgagaaagtttgaaaat

SEQ ID NO: 538256 - DNA, 33 bp, Homo sapien
tgcacaataaattatctgagaaagtttgaaaat

SEQ ID NO: 538257 - DNA, 33 bp, Homo sapien
tagttctaattttctccaattttgaatagaatt

SEQ ID NO: 538258 - DNA, 33 bp, Homo sapien
tagttctaattttctctaattttgaatagaatt

SEQ ID NO: 538259 - DNA, 33 bp, Homo sapien
agaggaaatctattcactctaagctggtgatat

SEQ ID NO: 538260 - DNA, 33 bp, Homo sapien
agaggaaatctattcagtctaagctggtgatat

SEQ ID NO: 538261 - DNA, 33 bp, Homo sapien
gagtctgcctgaagtacgatactcatctttaag

SEQ ID NO: 538262 - DNA, 33 bp, Homo sapien
gagtctgcctgaagtatgatactcatctttaag

SEQ ID NO: 538263 - DNA, 33 bp, Homo sapien
gaatcttgagattccagatcgaaaatactgtac

SEQ ID NO: 538264 - DNA, 33 bp, Homo sapien
gaatcttgagattccatatcgaaaatactgtac

SEQ ID NO: 538265 - DNA, 33 bp, Homo sapien
tggctcagttagttaacccgagggactgatggg

SEQ ID NO: 538266 - DNA, 33 bp, Homo sapien
tggctcagttagttaagccgagggactgatggg

SEQ ID NO: 538267 - DNA, 33 bp, Homo sapien
tttttgacaaattagacgaaacaggtattatga

SEQ ID NO: 538268 - DNA, 33 bp, Homo sapien
tttttgacaaattagatgaaacaggtattatga

SEQ ID NO: 538269 - DNA, 33 bp, Homo sapien
tgggaaggaaacctcacacagtattatatcatc

SEQ ID NO: 538270 - DNA, 33 bp, Homo sapien
tgggaaggaaacctcatacagtattatatcatc

SEQ ID NO: 538271 - DNA, 33 bp, Homo sapien
agctattggattcaaggagatattttcatagtg

SEQ ID NO: 538272 - DNA, 33 bp, Homo sapien
agctattggattcaagtagatattttcatagtg

SEQ ID NO: 538273 - DNA, 33 bp, Homo sapien
actctcacagtttttccattgtttgaacatatc

SEQ ID NO: 538274 - DNA, 33 bp, Homo sapien
actctcacagtttttctattgtttgaacatatc

SEQ ID NO: 538275 - DNA, 33 bp, Homo sapien
caccaagcttaggaaacaagaagaaaatttcat

SEQ ID NO: 538276 - DNA, 33 bp, Homo sapien
caccaagcttaggaaagaagaagaaaatttcat

SEQ ID NO: 538277 - DNA, 33 bp, Homo sapien
ttaatgctgtgagttaagtatacaagatgagta

SEQ ID NO: 538278 - DNA, 33 bp, Homo sapien
ttaatgctgtgagttacgtatacaagatgagta

SEQ ID NO: 538279 - DNA, 33 bp, Homo sapien
gactctgctacgatacacctatctgtgttagta

SEQ ID NO: 538280 - DNA, 33 bp, Homo sapien
gactctgctacgatacccctatctgtgttagta

SEQ ID NO: 538281 - DNA, 33 bp, Homo sapien
gaatccgtaagcatcaagtcctttattttgcat

SEQ ID NO: 538282 - DNA, 33 bp, Homo sapien
gaatccgtaagcatcaggtcctttattttgcat

SEQ ID NO: 538283 - DNA, 33 bp, Homo sapien
catggacatcaggaaaccatttaaagcctcctc

SEQ ID NO: 538284 - DNA, 33 bp, Homo sapien
catggacatcaggaaatcatttaaagcctcctc

SEQ ID NO: 538285 - DNA, 33 bp, Homo sapien
catctatatgtttttcaatctaacactgtatat

SEQ ID NO: 538286 - DNA, 33 bp, Homo sapien
catctatatgtttttctatctaacactgtatat

SEQ ID NO: 538287 - DNA, 33 bp, Homo sapien
ttacctatgagaggggaaaaaaagtggcatagc

SEQ ID NO: 538288 - DNA, 33 bp, Homo sapien
ttacctatgagaggggtaaaaaagtggcatagc

SEQ ID NO: 538289 - DNA, 33 bp, Homo sapien
gtcagttactaattacaatcttgagacagagtc

SEQ ID NO: 538290 - DNA, 33 bp, Homo sapien
gtcagttactaattaccatcttgagacagagtc

SEQ ID NO: 538291 - DNA, 33 bp, Homo sapien
atcatacaagatacaccaagcatgtcaggcaga

SEQ ID NO: 538292 - DNA, 33 bp, Homo sapien
atcatacaagatacactaagcatgtcaggcaga

SEQ ID NO: 538293 - DNA, 33 bp, Homo sapien
aatgggaaaccatggacggactggagtaggcaa

SEQ ID NO: 538294 - DNA, 33 bp, Homo sapien
aatgggaaaccatggatggactggagtaggcaa

SEQ ID NO: 538295 - DNA, 33 bp, Homo sapien
tgcaaacagacagttgcaacagggaatatgaca

SEQ ID NO: 538296 - DNA, 33 bp, Homo sapien
tgcaaacagacagttgtaacagggaatatgaca

SEQ ID NO: 538297 - DNA, 33 bp, Homo sapien
attcatttcattgacaactccaaaactactagg

SEQ ID NO: 538298 - DNA, 33 bp, Homo sapien
attcatttcattgacatctccaaaactactagg

SEQ ID NO: 538299 - DNA, 33 bp, Homo sapien
tagttatccagatcctcaaagtgaacatgaagc

SEQ ID NO: 538300 - DNA, 33 bp, Homo sapien
tagttatccagatccttaaagtgaacatgaagc

SEQ ID NO: 538301 - DNA, 33 bp, Homo sapien
ttgtttcagcagtcaaaggcagtgatttatagc

SEQ ID NO: 538302 - DNA, 33 bp, Homo sapien
ttgtttcagcagtcaagggcagtgatttatagc

SEQ ID NO: 538303 - DNA, 33 bp, Homo sapien
atttgaatattgtgttcaaatttttgattgatt

SEQ ID NO: 538304 - DNA, 33 bp, Homo sapien
atttgaatattgtgtttaaatttttgattgatt

SEQ ID NO: 538305 - DNA, 33 bp, Homo sapien
tgtctgtgttaacccacgttatatcccaaatag

SEQ ID NO: 538306 - DNA, 33 bp, Homo sapien
tgtctgtgttaacccatgttatatcccaaatag

SEQ ID NO: 538307 - DNA, 33 bp, Homo sapien
agatgggttctgtatgaaaaacggtcctggatg

SEQ ID NO: 538308 - DNA, 33 bp, Homo sapien
agatgggttctgtatggaaaacggtcctggatg

SEQ ID NO: 538309 - DNA, 33 bp, Homo sapien
ttgctttgtgttgtccacctgcagcatttttct

SEQ ID NO: 538310 - DNA, 33 bp, Homo sapien
ttgctttgtgttgtccgcctgcagcatttttct

SEQ ID NO: 538311 - DNA, 33 bp, Homo sapien
ggtttgggtagacaaacatggtaagcactctct

SEQ ID NO: 538312 - DNA, 33 bp, Homo sapien
ggtttgggtagacaaatatggtaagcactctct

SEQ ID NO: 538313 - DNA, 33 bp, Homo sapien
aagtgggtctttgcataagaaaagccatgaaat

SEQ ID NO: 538314 - DNA, 33 bp, Homo sapien
aagtgggtctttgcatgagaaaagccatgaaat

SEQ ID NO: 538315 - DNA, 33 bp, Homo sapien
tatctcaaaaaaagggacatttctataatttgg

SEQ ID NO: 538316 - DNA, 33 bp, Homo sapien
tatctcaaaaaaaggggcatttctataatttgg

SEQ ID NO: 538317 - DNA, 33 bp, Homo sapien
agacttccttatcctgaagacttttgttaaaca

SEQ ID NO: 538318 - DNA, 33 bp, Homo sapien
agacttccttatcctggagacttttgttaaaca

SEQ ID NO: 538319 - DNA, 33 bp, Homo sapien
attaaccctcaacaacagtaatggatataaacg

SEQ ID NO: 538320 - DNA, 33 bp, Homo sapien
attaaccctcaacaaccgtaatggatataaacg

SEQ ID NO: 538321 - DNA, 33 bp, Homo sapien
accagagaccctctcaatcccatatgagtcgga

SEQ ID NO: 538322 - DNA, 33 bp, Homo sapien
accagagaccctctcagtcccatatgagtcgga

SEQ ID NO: 538323 - DNA, 33 bp, Homo sapien
ttaatgtattagcatcaataaagatgatctttt

SEQ ID NO: 538324 - DNA, 33 bp, Homo sapien
ttaatgtattagcatcgataaagatgatctttt

SEQ ID NO: 538325 - DNA, 33 bp, Homo sapien
agcagaatattttcagaacgtagacacagacat

SEQ ID NO: 538326 - DNA, 33 bp, Homo sapien
agcagaatattttcaggacgtagacacagacat

SEQ ID NO: 538327 - DNA, 33 bp, Homo sapien
aacatactttagtcaactctcttcttctcagcc

SEQ ID NO: 538328 - DNA, 33 bp, Homo sapien
aacatactttagtcaagtctcttcttctcagcc

SEQ ID NO: 538329 - DNA, 33 bp, Homo sapien
acaatgttggtgtcaaattctgggcaattggag

SEQ ID NO: 538330 - DNA, 33 bp, Homo sapien
acaatgttggtgtcaatttctgggcaattggag

SEQ ID NO: 538331 - DNA, 33 bp, Homo sapien
atccccagtgtcagcacaaagaaagcatcttcc

SEQ ID NO: 538332 - DNA, 33 bp, Homo sapien
atccccagtgtcagcataaagaaagcatcttcc

SEQ ID NO: 538333 - DNA, 33 bp, Homo sapien
aatgacattggtttgacgtctttgatgaatcga

SEQ ID NO: 538334 - DNA, 33 bp, Homo sapien
aatgacattggtttgatgtctttgatgaatcga

SEQ ID NO: 538335 - DNA, 33 bp, Homo sapien
ttattttctaccacagaaagaattcccagtcca

SEQ ID NO: 538336 - DNA, 33 bp, Homo sapien
ttattttctaccacaggaagaattcccagtcca

SEQ ID NO: 538337 - DNA, 33 bp, Homo sapien
cattctacattcctcaatcctcttaactgcact

SEQ ID NO: 538338 - DNA, 33 bp, Homo sapien
cattctacattcctcagtcctcttaactgcact

SEQ ID NO: 538339 - DNA, 33 bp, Homo sapien
tggtttactttgttcaagttagtggtaggaaac

SEQ ID NO: 538340 - DNA, 33 bp, Homo sapien
tggtttactttgttcatgttagtggtaggaaac

SEQ ID NO: 538341 - DNA, 33 bp, Homo sapien
ttctgctctaccccataagaatgctggcccatt

SEQ ID NO: 538342 - DNA, 33 bp, Homo sapien
ttctgctctaccccatgagaatgctggcccatt

SEQ ID NO: 538343 - DNA, 33 bp, Homo sapien
atcctggaattatgaacgcaggtagaccactgt

SEQ ID NO: 538344 - DNA, 33 bp, Homo sapien
atcctggaattatgaatgcaggtagaccactgt

SEQ ID NO: 538345 - DNA, 33 bp, Homo sapien
gatgttctacaaaacaactgcttctaatcttca

SEQ ID NO: 538346 - DNA, 33 bp, Homo sapien
gatgttctacaaaacacctgcttctaatcttca

SEQ ID NO: 538347 - DNA, 33 bp, Homo sapien
gtgtgtcaaccttctccaccacaaagtaattct

SEQ ID NO: 538348 - DNA, 33 bp, Homo sapien
gtgtgtcaaccttctctaccacaaagtaattct

SEQ ID NO: 538349 - DNA, 33 bp, Homo sapien
ggtagtagtatatgaactgggcttaagagaggg

SEQ ID NO: 538350 - DNA, 33 bp, Homo sapien
ggtagtagtatatgaagtgggcttaagagaggg

SEQ ID NO: 538351 - DNA, 33 bp, Homo sapien
tctttcactcagctgaaaaataatatcatcaca

SEQ ID NO: 538352 - DNA, 33 bp, Homo sapien
tctttcactcagctgacaaataatatcatcaca

SEQ ID NO: 538353 - DNA, 33 bp, Homo sapien
tcagtgttcattgccacccttcccacgtcaggg

SEQ ID NO: 538354 - DNA, 33 bp, Homo sapien
tcagtgttcattgccatccttcccacgtcaggg

SEQ ID NO: 538355 - DNA, 33 bp, Homo sapien
ggtgagcccaatcgcaatatggtcgttcaacct

SEQ ID NO: 538356 - DNA, 33 bp, Homo sapien
ggtgagcccaatcgcagtatggtcgttcaacct

SEQ ID NO: 538357 - DNA, 33 bp, Homo sapien
ccagtggaggcaacaacaggagatgtggagggt

SEQ ID NO: 538358 - DNA, 33 bp, Homo sapien
ccagtggaggcaacaataggagatgtggagggt

SEQ ID NO: 538359 - DNA, 33 bp, Homo sapien
ctgaagagtgagagaaagttcaccaagttgaag

SEQ ID NO: 538360 - DNA, 33 bp, Homo sapien
ctgaagagtgagagaaggttcaccaagttgaag

SEQ ID NO: 538361 - DNA, 33 bp, Homo sapien
tgaaaacagagtaatacgctgtgtgaaaatgca

SEQ ID NO: 538362 - DNA, 33 bp, Homo sapien
tgaaaacagagtaatatgctgtgtgaaaatgca

SEQ ID NO: 538363 - DNA, 33 bp, Homo sapien
cctttctctggtttcaatataatctcctgtctt

SEQ ID NO: 538364 - DNA, 33 bp, Homo sapien
cctttctctggtttcagtataatctcctgtctt

SEQ ID NO: 538365 - DNA, 33 bp, Homo sapien
ggtcactttctagacacgagatttctcagatag

SEQ ID NO: 538366 - DNA, 33 bp, Homo sapien
ggtcactttctagacatgagatttctcagatag

SEQ ID NO: 538367 - DNA, 33 bp, Homo sapien
atgacagtgggttagcaattttaaagagagaga

SEQ ID NO: 538368 - DNA, 33 bp, Homo sapien
atgacagtgggttagcgattttaaagagagaga

SEQ ID NO: 538369 - DNA, 33 bp, Homo sapien
ttaagagagaaccagacgggtggctctaaggcc

SEQ ID NO: 538370 - DNA, 33 bp, Homo sapien
ttaagagagaaccagatgggtggctctaaggcc

SEQ ID NO: 538371 - DNA, 33 bp, Homo sapien
gtgatcctcaagtaccactcccagggatcgaac

SEQ ID NO: 538372 - DNA, 33 bp, Homo sapien
gtgatcctcaagtaccgctcccagggatcgaac

SEQ ID NO: 538373 - DNA, 33 bp, Homo sapien
aaggattgggagaaatgacgcattttattccat

SEQ ID NO: 538374 - DNA, 33 bp, Homo sapien
aaggattgggagaaattacgcattttattccat

SEQ ID NO: 538375 - DNA, 33 bp, Homo sapien
ctctcaactgctggacagagtacacaattattc

SEQ ID NO: 538376 - DNA, 33 bp, Homo sapien
ctctcaactgctggacggagtacacaattattc

SEQ ID NO: 538377 - DNA, 33 bp, Homo sapien
ctaggttcatggctgaaattcttttaacaaaag

SEQ ID NO: 538378 - DNA, 33 bp, Homo sapien
ctaggttcatggctgagattcttttaacaaaag

SEQ ID NO: 538379 - DNA, 33 bp, Homo sapien
aaaaatctcacaacataaaatctttttagacta

SEQ ID NO: 538380 - DNA, 33 bp, Homo sapien
aaaaatctcacaacatgaaatctttttagacta

SEQ ID NO: 538381 - DNA, 33 bp, Homo sapien
ctggtttgaggaagacacgtgcagacctccatt

SEQ ID NO: 538382 - DNA, 33 bp, Homo sapien
ctggtttgaggaagacgcgtgcagacctccatt

SEQ ID NO: 538383 - DNA, 33 bp, Homo sapien
tcatcagttcttttcacgtacctctcctcctcc

SEQ ID NO: 538384 - DNA, 33 bp, Homo sapien
tcatcagttcttttcatgtacctctcctcctcc

SEQ ID NO: 538385 - DNA, 33 bp, Homo sapien
gcctctcccgcattcacgtccttgctcatgcag

SEQ ID NO: 538386 - DNA, 33 bp, Homo sapien
gcctctcccgcattcatgtccttgctcatgcag

SEQ ID NO: 538387 - DNA, 33 bp, Homo sapien
atatccttgatttttacgagcaaacaagatgtg

SEQ ID NO: 538388 - DNA, 33 bp, Homo sapien
atatccttgatttttatgagcaaacaagatgtg

SEQ ID NO: 538389 - DNA, 33 bp, Homo sapien
tctgtttctgagagaggatgaccctacgctgct

SEQ ID NO: 538390 - DNA, 33 bp, Homo sapien
tctgtttctgagagagtatgaccctacgctgct

SEQ ID NO: 538391 - DNA, 33 bp, Homo sapien
ccgttaacgctgtgaaaagaccagtgaggggct

SEQ ID NO: 538392 - DNA, 33 bp, Homo sapien
ccgttaacgctgtgaacagaccagtgaggggct

SEQ ID NO: 538393 - DNA, 33 bp, Homo sapien
attgaaaatggctctaggaatgttagctataat

SEQ ID NO: 538394 - DNA, 33 bp, Homo sapien
attgaaaatggctctatgaatgttagctataat

SEQ ID NO: 538395 - DNA, 33 bp, Homo sapien
ggtttttgagtgtgacagatatgacgcaggtat

SEQ ID NO: 538396 - DNA, 33 bp, Homo sapien
ggtttttgagtgtgacggatatgacgcaggtat

SEQ ID NO: 538397 - DNA, 33 bp, Homo sapien
gtctaatttcttcaaaactatcttacttctcat

SEQ ID NO: 538398 - DNA, 33 bp, Homo sapien
gtctaatttcttcaaagctatcttacttctcat

SEQ ID NO: 538399 - DNA, 33 bp, Homo sapien
aggattcaaggaaaaaatatacagaccagcaaa

SEQ ID NO: 538400 - DNA, 33 bp, Homo sapien
aggattcaaggaaaaagtatacagaccagcaaa

SEQ ID NO: 538401 - DNA, 33 bp, Homo sapien
ctgctccaacttaccacctattagccacaaaag

SEQ ID NO: 538402 - DNA, 33 bp, Homo sapien
ctgctccaacttaccatctattagccacaaaag

SEQ ID NO: 538403 - DNA, 33 bp, Homo sapien
tcctcagtagaagccaagttttaagtattcaga

SEQ ID NO: 538404 - DNA, 33 bp, Homo sapien
tcctcagtagaagccacgttttaagtattcaga

SEQ ID NO: 538405 - DNA, 33 bp, Homo sapien
caatggagaccctttccattaaatcgtaataca

SEQ ID NO: 538406 - DNA, 33 bp, Homo sapien
caatggagaccctttctattaaatcgtaataca

SEQ ID NO: 538407 - DNA, 33 bp, Homo sapien
ggacttcaaatatcaaggtggaaacccaaccaa

SEQ ID NO: 538408 - DNA, 33 bp, Homo sapien
ggacttcaaatatcaatgtggaaacccaaccaa

SEQ ID NO: 538409 - DNA, 33 bp, Homo sapien
tactttggtttcctccagcaaatatcaaatcct

SEQ ID NO: 538410 - DNA, 33 bp, Homo sapien
tactttggtttcctccggcaaatatcaaatcct

SEQ ID NO: 538411 - DNA, 33 bp, Homo sapien
cacagcagaatttatgaagcgcctcattcagtg

SEQ ID NO: 538412 - DNA, 33 bp, Homo sapien
cacagcagaatttatggagcgcctcattcagtg

SEQ ID NO: 538413 - DNA, 33 bp, Homo sapien
gcatgcagatgcgggcactgtatttaagcatta

SEQ ID NO: 538414 - DNA, 33 bp, Homo sapien
gcatgcagatgcgggcgctgtatttaagcatta

SEQ ID NO: 538415 - DNA, 33 bp, Homo sapien
gtgagtatgtgctacaaccagcatttgaggagg

SEQ ID NO: 538416 - DNA, 33 bp, Homo sapien
gtgagtatgtgctacagccagcatttgaggagg

SEQ ID NO: 538417 - DNA, 33 bp, Homo sapien
gtgatttggggggtccaagatatttcctttcat

SEQ ID NO: 538418 - DNA, 33 bp, Homo sapien
gtgatttggggggtccgagatatttcctttcat

SEQ ID NO: 538419 - DNA, 33 bp, Homo sapien
taaacctgcttcatagaagagcacattaagctg

SEQ ID NO: 538420 - DNA, 33 bp, Homo sapien
taaacctgcttcataggagagcacattaagctg

SEQ ID NO: 538421 - DNA, 33 bp, Homo sapien
acaagtaggatagcatcaaacacatcttggggg

SEQ ID NO: 538422 - DNA, 33 bp, Homo sapien
acaagtaggatagcattaaacacatcttggggg

SEQ ID NO: 538423 - DNA, 33 bp, Homo sapien
gtatatgatcaagaaacgtaagctgactaggga

SEQ ID NO: 538424 - DNA, 33 bp, Homo sapien
gtatatgatcaagaaatgtaagctgactaggga

SEQ ID NO: 538425 - DNA, 33 bp, Homo sapien
actcatagcactatacaggcttctatttcctcc

SEQ ID NO: 538426 - DNA, 33 bp, Homo sapien
actcatagcactatactggcttctatttcctcc

SEQ ID NO: 538427 - DNA, 33 bp, Homo sapien
gagttgttggaatttgaatttgctgcatgtttt

SEQ ID NO: 538428 - DNA, 33 bp, Homo sapien
gagttgttggaatttgcatttgctgcatgtttt

SEQ ID NO: 538429 - DNA, 33 bp, Homo sapien
cagagaataaggagaacagtagtgagcaaacaa

SEQ ID NO: 538430 - DNA, 33 bp, Homo sapien
cagagaataaggagaagagtagtgagcaaacaa

SEQ ID NO: 538431 - DNA, 33 bp, Homo sapien
cctcccatgacttgctcaaccataaggatatgc

SEQ ID NO: 538432 - DNA, 33 bp, Homo sapien
cctcccatgacttgcttaaccataaggatatgc

SEQ ID NO: 538433 - DNA, 33 bp, Homo sapien
gggaggtcccaatgaaagatgaatataagtcaa

SEQ ID NO: 538434 - DNA, 33 bp, Homo sapien
gggaggtcccaatgaaggatgaatataagtcaa

SEQ ID NO: 538435 - DNA, 33 bp, Homo sapien
atgaaatactcatgaaagcaaagctaccttgac

SEQ ID NO: 538436 - DNA, 33 bp, Homo sapien
atgaaatactcatgaaggcaaagctaccttgac

SEQ ID NO: 538437 - DNA, 33 bp, Homo sapien
cttattcatccctacccctttccaggacaggtg

SEQ ID NO: 538438 - DNA, 33 bp, Homo sapien
cttattcatccctacctctttccaggacaggtg

SEQ ID NO: 538439 - DNA, 33 bp, Homo sapien
cccagtaccagaaacaatggtgttcagagccaa

SEQ ID NO: 538440 - DNA, 33 bp, Homo sapien
cccagtaccagaaacagtggtgttcagagccaa

SEQ ID NO: 538441 - DNA, 33 bp, Homo sapien
tatagttaaaccgatacgggttggcagatacca

SEQ ID NO: 538442 - DNA, 33 bp, Homo sapien
tatagttaaaccgatatgggttggcagatacca

SEQ ID NO: 538443 - DNA, 33 bp, Homo sapien
gaagaggttgtatcatcaccttctaaaaattag

SEQ ID NO: 538444 - DNA, 33 bp, Homo sapien
gaagaggttgtatcattaccttctaaaaattag

SEQ ID NO: 538445 - DNA, 33 bp, Homo sapien
caaactgatgtctcttaaaatgtgatcagcatc

SEQ ID NO: 538446 - DNA, 33 bp, Homo sapien
caaactgatgtctcttgaaatgtgatcagcatc

SEQ ID NO: 538447 - DNA, 33 bp, Homo sapien
aactttaaggaaggtaaaagattgttcacttga

SEQ ID NO: 538448 - DNA, 33 bp, Homo sapien
aactttaaggaaggtagaagattgttcacttga

SEQ ID NO: 538449 - DNA, 33 bp, Homo sapien
tcccctggtgccaaaaatgttggagactactgg

SEQ ID NO: 538450 - DNA, 33 bp, Homo sapien
tcccctggtgccaaaattgttggagactactgg

SEQ ID NO: 538451 - DNA, 33 bp, Homo sapien
cagcccctgtccaagaataaaaccggtgcatgt

SEQ ID NO: 538452 - DNA, 33 bp, Homo sapien
cagcccctgtccaagagtaaaaccggtgcatgt

SEQ ID NO: 538453 - DNA, 33 bp, Homo sapien
aatggatctgaggaaaaatagagttggttgaaa

SEQ ID NO: 538454 - DNA, 33 bp, Homo sapien
aatggatctgaggaaacatagagttggttgaaa

SEQ ID NO: 538455 - DNA, 33 bp, Homo sapien
ccacttgtgagtttaaagccccattctggttaa

SEQ ID NO: 538456 - DNA, 33 bp, Homo sapien
ccacttgtgagtttaaggccccattctggttaa

SEQ ID NO: 538457 - DNA, 33 bp, Homo sapien
tatcataatttgacacagtgataaaaacacaaa

SEQ ID NO: 538458 - DNA, 33 bp, Homo sapien
tatcataatttgacacggtgataaaaacacaaa

SEQ ID NO: 538459 - DNA, 33 bp, Homo sapien
tggacttccaccttcaaatccacttcctaggac

SEQ ID NO: 538460 - DNA, 33 bp, Homo sapien
tggacttccaccttcagatccacttcctaggac

SEQ ID NO: 538461 - DNA, 33 bp, Homo sapien
gtaaggccttgaattacgattatagcctgggaa

SEQ ID NO: 538462 - DNA, 33 bp, Homo sapien
gtaaggccttgaattatgattatagcctgggaa

SEQ ID NO: 538463 - DNA, 33 bp, Homo sapien
atatcaagcaattgtcaagattaaaaagtaata

SEQ ID NO: 538464 - DNA, 33 bp, Homo sapien
atatcaagcaattgtcgagattaaaaagtaata

SEQ ID NO: 538465 - DNA, 33 bp, Homo sapien
tacaaatggaatcacacaggatacagccttttc

SEQ ID NO: 538466 - DNA, 33 bp, Homo sapien
tacaaatggaatcacataggatacagccttttc

SEQ ID NO: 538467 - DNA, 33 bp, Homo sapien
aggtattagagattagcaatattgtctgctgtg

SEQ ID NO: 538468 - DNA, 33 bp, Homo sapien
aggtattagagattagtaatattgtctgctgtg

SEQ ID NO: 538469 - DNA, 33 bp, Homo sapien
aggattgtcaaaattaagaatgatttactgtgc

SEQ ID NO: 538470 - DNA, 33 bp, Homo sapien
aggattgtcaaaattaggaatgatttactgtgc

SEQ ID NO: 538471 - DNA, 33 bp, Homo sapien
tcaagaccagagagaacggtgctgtcactctta

SEQ ID NO: 538472 - DNA, 33 bp, Homo sapien
tcaagaccagagagaatggtgctgtcactctta

SEQ ID NO: 538473 - DNA, 33 bp, Homo sapien
ttcttaattgcaaccacgttaactgatacaaac

SEQ ID NO: 538474 - DNA, 33 bp, Homo sapien
ttcttaattgcaaccatgttaactgatacaaac

SEQ ID NO: 538475 - DNA, 33 bp, Homo sapien
cagccctttctcgatacacattgatcctccaaa

SEQ ID NO: 538476 - DNA, 33 bp, Homo sapien
cagccctttctcgatatacattgatcctccaaa

SEQ ID NO: 538477 - DNA, 33 bp, Homo sapien
tcatacactgtggaagaagcagacaaaaaatgt

SEQ ID NO: 538478 - DNA, 33 bp, Homo sapien
tcatacactgtggaaggagcagacaaaaaatgt

SEQ ID NO: 538479 - DNA, 33 bp, Homo sapien
ggatttgtttgccaaaagtgatatcctaaatac

SEQ ID NO: 538480 - DNA, 33 bp, Homo sapien
ggatttgtttgccaaaggtgatatcctaaatac

SEQ ID NO: 538481 - DNA, 33 bp, Homo sapien
ttatagttggtctaaacatggtatcttggtgga

SEQ ID NO: 538482 - DNA, 33 bp, Homo sapien
ttatagttggtctaaatatggtatcttggtgga

SEQ ID NO: 538483 - DNA, 33 bp, Homo sapien
tgcagcagtgttgtcaactcaatcatgcatcca

SEQ ID NO: 538484 - DNA, 33 bp, Homo sapien
tgcagcagtgttgtcatctcaatcatgcatcca

SEQ ID NO: 538485 - DNA, 33 bp, Homo sapien
aagactgcctttgagaaccctcaagcccaaatg

SEQ ID NO: 538486 - DNA, 33 bp, Homo sapien
aagactgcctttgagagccctcaagcccaaatg

SEQ ID NO: 538487 - DNA, 33 bp, Homo sapien
atacgtagtaatatcaactgcattatgtatata

SEQ ID NO: 538488 - DNA, 33 bp, Homo sapien
atacgtagtaatatcatctgcattatgtatata

SEQ ID NO: 538489 - DNA, 33 bp, Homo sapien
gatggtcttggacattaaaataggactgcttcc

SEQ ID NO: 538490 - DNA, 33 bp, Homo sapien
gatggtcttggacattgaaataggactgcttcc

SEQ ID NO: 538491 - DNA, 33 bp, Homo sapien
aaattcatctcagttaggtgtgcaaagcttttt

SEQ ID NO: 538492 - DNA, 33 bp, Homo sapien
aaattcatctcagttatgtgtgcaaagcttttt

SEQ ID NO: 538493 - DNA, 33 bp, Homo sapien
gctatcaccaatggaacaaaagtgcttcccgtt

SEQ ID NO: 538494 - DNA, 33 bp, Homo sapien
gctatcaccaatggaataaaagtgcttcccgtt

SEQ ID NO: 538495 - DNA, 33 bp, Homo sapien
gcgccagtcatacacccacttcacttagcaggt

SEQ ID NO: 538496 - DNA, 33 bp, Homo sapien
gcgccagtcatacaccgacttcacttagcaggt

SEQ ID NO: 538497 - DNA, 33 bp, Homo sapien
gctggacataagaggagagacatatacaggagt

SEQ ID NO: 538498 - DNA, 33 bp, Homo sapien
gctggacataagaggatagacatatacaggagt

SEQ ID NO: 538499 - DNA, 33 bp, Homo sapien
catacatgcagaagaactgtcttccagatatcc

SEQ ID NO: 538500 - DNA, 33 bp, Homo sapien
catacatgcagaagaattgtcttccagatatcc

SEQ ID NO: 538501 - DNA, 33 bp, Homo sapien
tagttagtcttttcaaatgacagcgaaaccctg

SEQ ID NO: 538502 - DNA, 33 bp, Homo sapien
tagttagtcttttcaagtgacagcgaaaccctg

SEQ ID NO: 538503 - DNA, 33 bp, Homo sapien
cttctccatgctgcagaatgtttattcaggtga

SEQ ID NO: 538504 - DNA, 33 bp, Homo sapien
cttctccatgctgcaggatgtttattcaggtga

SEQ ID NO: 538505 - DNA, 33 bp, Homo sapien
agctattaacctctcccaagaatgtcatcaatc

SEQ ID NO: 538506 - DNA, 33 bp, Homo sapien
agctattaacctctcctaagaatgtcatcaatc

SEQ ID NO: 538507 - DNA, 33 bp, Homo sapien
atgtttatatagtttacaagcctacacatcttc

SEQ ID NO: 538508 - DNA, 33 bp, Homo sapien
atgtttatatagtttagaagcctacacatcttc

SEQ ID NO: 538509 - DNA, 33 bp, Homo sapien
tacactacttcacgaaaaaattgcctcattcag

SEQ ID NO: 538510 - DNA, 33 bp, Homo sapien
tacactacttcacgaacaaattgcctcattcag

SEQ ID NO: 538511 - DNA, 33 bp, Homo sapien
catgagagctgaaggacaatgttaagaaagact

SEQ ID NO: 538512 - DNA, 33 bp, Homo sapien
catgagagctgaaggataatgttaagaaagact

SEQ ID NO: 538513 - DNA, 33 bp, Homo sapien
ccttgtccatagtagacattgctaatcgctcac

SEQ ID NO: 538514 - DNA, 33 bp, Homo sapien
ccttgtccatagtagatattgctaatcgctcac

SEQ ID NO: 538515 - DNA, 33 bp, Homo sapien
tccatacaagaggtgacggacatctggagaggt

SEQ ID NO: 538516 - DNA, 33 bp, Homo sapien
tccatacaagaggtgatggacatctggagaggt

SEQ ID NO: 538517 - DNA, 33 bp, Homo sapien
agagcctcctgattgcacctctgaaatctccta

SEQ ID NO: 538518 - DNA, 33 bp, Homo sapien
agagcctcctgattgcgcctctgaaatctccta

SEQ ID NO: 538519 - DNA, 33 bp, Homo sapien
gaggcacacagaagaaccaagctaacttctaat

SEQ ID NO: 538520 - DNA, 33 bp, Homo sapien
gaggcacacagaagaatcaagctaacttctaat

SEQ ID NO: 538521 - DNA, 33 bp, Homo sapien
cctgcttcattccgtacgtctcctgtgtcttct

SEQ ID NO: 538522 - DNA, 33 bp, Homo sapien
cctgcttcattccgtatgtctcctgtgtcttct

SEQ ID NO: 538523 - DNA, 33 bp, Homo sapien
tttacaaagcggtataagatgttacagtcaagg

SEQ ID NO: 538524 - DNA, 33 bp, Homo sapien
tttacaaagcggtataggatgttacagtcaagg

SEQ ID NO: 538525 - DNA, 33 bp, Homo sapien
atatttagtggtcaaagtgaattgcagaacaat

SEQ ID NO: 538526 - DNA, 33 bp, Homo sapien
atatttagtggtcaaattgaattgcagaacaat

SEQ ID NO: 538527 - DNA, 33 bp, Homo sapien
attaacatgtgttctaagactgttatgtgaatg

SEQ ID NO: 538528 - DNA, 33 bp, Homo sapien
attaacatgtgttctatgactgttatgtgaatg

SEQ ID NO: 538529 - DNA, 33 bp, Homo sapien
catctggaaaccaccacgcctgcagtgagaaat

SEQ ID NO: 538530 - DNA, 33 bp, Homo sapien
catctggaaaccaccatgcctgcagtgagaaat

SEQ ID NO: 538531 - DNA, 33 bp, Homo sapien
tcatactgacgtctccaactctaatcgatttcc

SEQ ID NO: 538532 - DNA, 33 bp, Homo sapien
tcatactgacgtctcccactctaatcgatttcc

SEQ ID NO: 538533 - DNA, 33 bp, Homo sapien
actttgtgggaaagtcactatgcaccacccacc

SEQ ID NO: 538534 - DNA, 33 bp, Homo sapien
actttgtgggaaagtcgctatgcaccacccacc

SEQ ID NO: 538535 - DNA, 33 bp, Homo sapien
ccaagagcaatatgtacgtacaggatgtcaatg

SEQ ID NO: 538536 - DNA, 33 bp, Homo sapien
ccaagagcaatatgtaggtacaggatgtcaatg

SEQ ID NO: 538537 - DNA, 33 bp, Homo sapien
tcaacaggacaggatcacagaatagaaccacga

SEQ ID NO: 538538 - DNA, 33 bp, Homo sapien
tcaacaggacaggatcgcagaatagaaccacga

SEQ ID NO: 538539 - DNA, 33 bp, Homo sapien
ttccagttaccataacaacttcttgtgatttca

SEQ ID NO: 538540 - DNA, 33 bp, Homo sapien
ttccagttaccataacgacttcttgtgatttca

SEQ ID NO: 538541 - DNA, 33 bp, Homo sapien
tgaataaggcccagcaacatcttcctagttcat

SEQ ID NO: 538542 - DNA, 33 bp, Homo sapien
tgaataaggcccagcagcatcttcctagttcat

SEQ ID NO: 538543 - DNA, 33 bp, Homo sapien
ggaataagaagttccactgaagattaaaaaaat

SEQ ID NO: 538544 - DNA, 33 bp, Homo sapien
ggaataagaagttccattgaagattaaaaaaat

SEQ ID NO: 538545 - DNA, 33 bp, Homo sapien
aaaccatgacttggaaacgtcttctgaggatcc

SEQ ID NO: 538546 - DNA, 33 bp, Homo sapien
aaaccatgacttggaagcgtcttctgaggatcc

SEQ ID NO: 538547 - DNA, 33 bp, Homo sapien
tgagctgttttgtgaccgcttcctaataaatgt

SEQ ID NO: 538548 - DNA, 33 bp, Homo sapien
tgagctgttttgtgactgcttcctaataaatgt

SEQ ID NO: 538549 - DNA, 33 bp, Homo sapien
ataatttgtatgtcacagcttgtacattcatat

SEQ ID NO: 538550 - DNA, 33 bp, Homo sapien
ataatttgtatgtcactgcttgtacattcatat

SEQ ID NO: 538551 - DNA, 33 bp, Homo sapien
tggctttttcctgcaagtatgttacctgtctgt

SEQ ID NO: 538552 - DNA, 33 bp, Homo sapien
tggctttttcctgcaattatgttacctgtctgt

SEQ ID NO: 538553 - DNA, 33 bp, Homo sapien
acctgtctgagatcacacagttgggaaggttgt

SEQ ID NO: 538554 - DNA, 33 bp, Homo sapien
acctgtctgagatcacccagttgggaaggttgt

SEQ ID NO: 538555 - DNA, 33 bp, Homo sapien
ttttttgtgtgcctggaatgtcgtaaatgtcta

SEQ ID NO: 538556 - DNA, 33 bp, Homo sapien
ttttttgtgtgcctggcatgtcgtaaatgtcta

SEQ ID NO: 538557 - DNA, 33 bp, Homo sapien
gaactggctctagcagcctgatactggtgtagc

SEQ ID NO: 538558 - DNA, 33 bp, Homo sapien
gaactggctctagcaggctgatactggtgtagc

SEQ ID NO: 538559 - DNA, 33 bp, Homo sapien
atgttattaagtgccccctacgtggaaggcact

SEQ ID NO: 538560 - DNA, 33 bp, Homo sapien
atgttattaagtgccctctacgtggaaggcact

SEQ ID NO: 538561 - DNA, 33 bp, Homo sapien
cttcccagttctctcacactgtgtagccaattt

SEQ ID NO: 538562 - DNA, 33 bp, Homo sapien
cttcccagttctctcatactgtgtagccaattt

SEQ ID NO: 538563 - DNA, 33 bp, Homo sapien
tggttgagattaactacatggaagcagacctaa

SEQ ID NO: 538564 - DNA, 33 bp, Homo sapien
tggttgagattaactatatggaagcagacctaa

SEQ ID NO: 538565 - DNA, 33 bp, Homo sapien
cgcaggttcagtcccaatgatccttaaggaggt

SEQ ID NO: 538566 - DNA, 33 bp, Homo sapien
cgcaggttcagtcccagtgatccttaaggaggt

SEQ ID NO: 538567 - DNA, 33 bp, Homo sapien
gaattagtatcattcaaaaaccacacaaaggcc

SEQ ID NO: 538568 - DNA, 33 bp, Homo sapien
gaattagtatcattcagaaaccacacaaaggcc

SEQ ID NO: 538569 - DNA, 33 bp, Homo sapien
cagtgcagaagacaacacccccgcaactgcaac

SEQ ID NO: 538570 - DNA, 33 bp, Homo sapien
cagtgcagaagacaacccccccgcaactgcaac

SEQ ID NO: 538571 - DNA, 33 bp, Homo sapien
tagctataaccagaaactgtgagagactgagca

SEQ ID NO: 538572 - DNA, 33 bp, Homo sapien
tagctataaccagaaattgtgagagactgagca

SEQ ID NO: 538573 - DNA, 33 bp, Homo sapien
aaggacagtgggtacacagacaagaagacctaa

SEQ ID NO: 538574 - DNA, 33 bp, Homo sapien
aaggacagtgggtacatagacaagaagacctaa

SEQ ID NO: 538575 - DNA, 33 bp, Homo sapien
ccctccacgtggaatacgcttcctttcatctgg

SEQ ID NO: 538576 - DNA, 33 bp, Homo sapien
ccctccacgtggaatatgcttcctttcatctgg

SEQ ID NO: 538577 - DNA, 33 bp, Homo sapien
atatgaaggcaataaaatgagtgttgttgagaa

SEQ ID NO: 538578 - DNA, 33 bp, Homo sapien
atatgaaggcaataaagtgagtgttgttgagaa

SEQ ID NO: 538579 - DNA, 33 bp, Homo sapien
catgcattggtgaaaaaagcattagataaaatc

SEQ ID NO: 538580 - DNA, 33 bp, Homo sapien
catgcattggtgaaaagagcattagataaaatc

SEQ ID NO: 538581 - DNA, 33 bp, Homo sapien
aaacaaaaagtccgtaagagggattacacaact

SEQ ID NO: 538582 - DNA, 33 bp, Homo sapien
aaacaaaaagtccgtacgagggattacacaact

SEQ ID NO: 538583 - DNA, 33 bp, Homo sapien
gtgtggaagattgatcacagagtagtccacacg

SEQ ID NO: 538584 - DNA, 33 bp, Homo sapien
gtgtggaagattgatcgcagagtagtccacacg

SEQ ID NO: 538585 - DNA, 33 bp, Homo sapien
ttatgtggtcattaaaattgaggtggaattacc

SEQ ID NO: 538586 - DNA, 33 bp, Homo sapien
ttatgtggtcattaaagttgaggtggaattacc

SEQ ID NO: 538587 - DNA, 33 bp, Homo sapien
agtgctacgaatcaaacgcataacaaaatgatt

SEQ ID NO: 538588 - DNA, 33 bp, Homo sapien
agtgctacgaatcaaatgcataacaaaatgatt

SEQ ID NO: 538589 - DNA, 33 bp, Homo sapien
agaaggactatagcaactcacaatcatattctc

SEQ ID NO: 538590 - DNA, 33 bp, Homo sapien
agaaggactatagcaagtcacaatcatattctc

SEQ ID NO: 538591 - DNA, 33 bp, Homo sapien
cctacactcagaaatcaagtaacctccttttgt

SEQ ID NO: 538592 - DNA, 33 bp, Homo sapien
cctacactcagaaatcgagtaacctccttttgt

SEQ ID NO: 538593 - DNA, 33 bp, Homo sapien
taatgctaatgggaagacactatggctgcatgt

SEQ ID NO: 538594 - DNA, 33 bp, Homo sapien
taatgctaatgggaaggcactatggctgcatgt

SEQ ID NO: 538595 - DNA, 33 bp, Homo sapien
tggctccttgcaattaaagatgccaagatagta

SEQ ID NO: 538596 - DNA, 33 bp, Homo sapien
tggctccttgcaattagagatgccaagatagta

SEQ ID NO: 538597 - DNA, 33 bp, Homo sapien
tctgtagcctagggtacgtcctgagattctgag

SEQ ID NO: 538598 - DNA, 33 bp, Homo sapien
tctgtagcctagggtatgtcctgagattctgag

SEQ ID NO: 538599 - DNA, 33 bp, Homo sapien
tggatgcatcctacaccgtggtacagaataaac

SEQ ID NO: 538600 - DNA, 33 bp, Homo sapien
tggatgcatcctacactgtggtacagaataaac

SEQ ID NO: 538601 - DNA, 33 bp, Homo sapien
tttggtgatctgttcaagaatgcaaatagattg

SEQ ID NO: 538602 - DNA, 33 bp, Homo sapien
tttggtgatctgttcaggaatgcaaatagattg

SEQ ID NO: 538603 - DNA, 33 bp, Homo sapien
ctacttgcaatgcacacgaatactcttttgcct

SEQ ID NO: 538604 - DNA, 33 bp, Homo sapien
ctacttgcaatgcacaggaatactcttttgcct

SEQ ID NO: 538605 - DNA, 33 bp, Homo sapien
tttaatacatttcacgaatgacctcaagtcttc

SEQ ID NO: 538606 - DNA, 33 bp, Homo sapien
tttaatacatttcacggatgacctcaagtcttc

SEQ ID NO: 538607 - DNA, 33 bp, Homo sapien
tttatagctgtattttaaaaaatcttggatcta

SEQ ID NO: 538608 - DNA, 33 bp, Homo sapien
tttatagctgtatttttaaaaatcttggatcta

SEQ ID NO: 538609 - DNA, 33 bp, Homo sapien
tttagcaaagggactacctacaaaggtatgcat

SEQ ID NO: 538610 - DNA, 33 bp, Homo sapien
tttagcaaagggactatctacaaaggtatgcat

SEQ ID NO: 538611 - DNA, 33 bp, Homo sapien
gcacgctggagttggcaaagtgtggaaagccat

SEQ ID NO: 538612 - DNA, 33 bp, Homo sapien
gcacgctggagttggcgaagtgtggaaagccat

SEQ ID NO: 538613 - DNA, 33 bp, Homo sapien
gacctggaccagttaaagcactattcagaccta

SEQ ID NO: 538614 - DNA, 33 bp, Homo sapien
gacctggaccagttaaggcactattcagaccta

SEQ ID NO: 538615 - DNA, 33 bp, Homo sapien
gtctatggtaagtccaagtctcaaaattctcat

SEQ ID NO: 538616 - DNA, 33 bp, Homo sapien
gtctatggtaagtccaggtctcaaaattctcat

SEQ ID NO: 538617 - DNA, 33 bp, Homo sapien
atggcacgagaccaaacattaagagaaccattg

SEQ ID NO: 538618 - DNA, 33 bp, Homo sapien
atggcacgagaccaaatattaagagaaccattg

SEQ ID NO: 538619 - DNA, 33 bp, Homo sapien
tgctttggataaccgacaagaagttaaaagaaa

SEQ ID NO: 538620 - DNA, 33 bp, Homo sapien
tgctttggataaccgataagaagttaaaagaaa

SEQ ID NO: 538621 - DNA, 33 bp, Homo sapien
agattggagactattacggcaagtgaagtaact

SEQ ID NO: 538622 - DNA, 33 bp, Homo sapien
agattggagactattatggcaagtgaagtaact

SEQ ID NO: 538623 - DNA, 33 bp, Homo sapien
aaacagtctttgctggcaaaatgaaaggagaag

SEQ ID NO: 538624 - DNA, 33 bp, Homo sapien
aaacagtctttgctggtaaaatgaaaggagaag

SEQ ID NO: 538625 - DNA, 33 bp, Homo sapien
gtattactgtagatcagaatctgaagacctatg

SEQ ID NO: 538626 - DNA, 33 bp, Homo sapien
gtattactgtagatcataatctgaagacctatg

SEQ ID NO: 538627 - DNA, 33 bp, Homo sapien
ttagagaccacaaatacgaatgttccatgcagt

SEQ ID NO: 538628 - DNA, 33 bp, Homo sapien
ttagagaccacaaatatgaatgttccatgcagt

SEQ ID NO: 538629 - DNA, 33 bp, Homo sapien
aggggcactctcagcagtaaacacaaagcatcc

SEQ ID NO: 538630 - DNA, 33 bp, Homo sapien
aggggcactctcagcattaaacacaaagcatcc

SEQ ID NO: 538631 - DNA, 33 bp, Homo sapien
aattcaaggagaggggaattagactttccatgc

SEQ ID NO: 538632 - DNA, 33 bp, Homo sapien
aattcaaggagagggggattagactttccatgc

SEQ ID NO: 538633 - DNA, 33 bp, Homo sapien
cagaataggagaatcaaccatttatgaagaagc

SEQ ID NO: 538634 - DNA, 33 bp, Homo sapien
cagaataggagaatcagccatttatgaagaagc

SEQ ID NO: 538635 - DNA, 33 bp, Homo sapien
tcatctgtggtagccactggagcttcttcataa

SEQ ID NO: 538636 - DNA, 33 bp, Homo sapien
tcatctgtggtagccattggagcttcttcataa

SEQ ID NO: 538637 - DNA, 33 bp, Homo sapien
ctaagtatgtttgatacgttcccattatgatat

SEQ ID NO: 538638 - DNA, 33 bp, Homo sapien
ctaagtatgtttgatatgttcccattatgatat

SEQ ID NO: 538639 - DNA, 33 bp, Homo sapien
aaacatggcatcaagaaagaaaaggaccctgtt

SEQ ID NO: 538640 - DNA, 33 bp, Homo sapien
aaacatggcatcaagatagaaaaggaccctgtt

SEQ ID NO: 538641 - DNA, 33 bp, Homo sapien
taatcaagtatctcagaaaaaaaaatagcctgg

SEQ ID NO: 538642 - DNA, 33 bp, Homo sapien
taatcaagtatctcaggaaaaaaaatagcctgg

SEQ ID NO: 538643 - DNA, 33 bp, Homo sapien
tctgtttaattatctacgggtgcactggtctct

SEQ ID NO: 538644 - DNA, 33 bp, Homo sapien
tctgtttaattatctatgggtgcactggtctct

SEQ ID NO: 538645 - DNA, 33 bp, Homo sapien
gctacttacattttcaaggacaaagatatttgc

SEQ ID NO: 538646 - DNA, 33 bp, Homo sapien
gctacttacattttcagggacaaagatatttgc

SEQ ID NO: 538647 - DNA, 33 bp, Homo sapien
ttgaatatggaatagaacatcaattgcttgctc

SEQ ID NO: 538648 - DNA, 33 bp, Homo sapien
ttgaatatggaatagagcatcaattgcttgctc

SEQ ID NO: 538649 - DNA, 33 bp, Homo sapien
tgctactctatccaaccccagcaaagtaaaaac

SEQ ID NO: 538650 - DNA, 33 bp, Homo sapien
tgctactctatccaacgccagcaaagtaaaaac

SEQ ID NO: 538651 - DNA, 33 bp, Homo sapien
tggaattgctgagttacgtgtgatgttcattca

SEQ ID NO: 538652 - DNA, 33 bp, Homo sapien
tggaattgctgagttatgtgtgatgttcattca

SEQ ID NO: 538653 - DNA, 33 bp, Homo sapien
agacaaggtagataacgctaaaaatgtgcctct

SEQ ID NO: 538654 - DNA, 33 bp, Homo sapien
agacaaggtagataactctaaaaatgtgcctct

SEQ ID NO: 538655 - DNA, 33 bp, Homo sapien
caagtttaggaaggaccagaagaaaatgtctta

SEQ ID NO: 538656 - DNA, 33 bp, Homo sapien
caagtttaggaaggacgagaagaaaatgtctta

SEQ ID NO: 538657 - DNA, 33 bp, Homo sapien
atctctgttttaatggaactctaccaccattac

SEQ ID NO: 538658 - DNA, 33 bp, Homo sapien
atctctgttttaatgggactctaccaccattac

SEQ ID NO: 538659 - DNA, 33 bp, Homo sapien
gcttaatgacatatcaatctcactcaggatcct

SEQ ID NO: 538660 - DNA, 33 bp, Homo sapien
gcttaatgacatatcagtctcactcaggatcct

SEQ ID NO: 538661 - DNA, 33 bp, Homo sapien
tggaggaagccaacttcaaactgagtagttttg

SEQ ID NO: 538662 - DNA, 33 bp, Homo sapien
tggaggaagccaacttgaaactgagtagttttg

SEQ ID NO: 538663 - DNA, 33 bp, Homo sapien
ctaagcttctctaacacggtaaccaacgacaat

SEQ ID NO: 538664 - DNA, 33 bp, Homo sapien
ctaagcttctctaacagggtaaccaacgacaat

SEQ ID NO: 538665 - DNA, 33 bp, Homo sapien
gttcttaaaataaaaaggaggaacgctacaatt

SEQ ID NO: 538666 - DNA, 33 bp, Homo sapien
gttcttaaaataaaaatgaggaacgctacaatt

SEQ ID NO: 538667 - DNA, 33 bp, Homo sapien
ccttaaatggttaggtaaaggtagcatatattt

SEQ ID NO: 538668 - DNA, 33 bp, Homo sapien
ccttaaatggttaggttaaggtagcatatattt

SEQ ID NO: 538669 - DNA, 33 bp, Homo sapien
tcacactggcacactgaatttggaaaacaagtt

SEQ ID NO: 538670 - DNA, 33 bp, Homo sapien
tcacactggcacactggatttggaaaacaagtt

SEQ ID NO: 538671 - DNA, 33 bp, Homo sapien
aaaaagataacacaaaagctgagacattaattt

SEQ ID NO: 538672 - DNA, 33 bp, Homo sapien
aaaaagataacacaaatgctgagacattaattt

SEQ ID NO: 538673 - DNA, 33 bp, Homo sapien
tgatgttgaatctaataagtcataacaatgttg

SEQ ID NO: 538674 - DNA, 33 bp, Homo sapien
tgatgttgaatctaatgagtcataacaatgttg

SEQ ID NO: 538675 - DNA, 33 bp, Homo sapien
aactgaaaatgagtcaagtaataacacatatat

SEQ ID NO: 538676 - DNA, 33 bp, Homo sapien
aactgaaaatgagtcaggtaataacacatatat

SEQ ID NO: 538677 - DNA, 33 bp, Homo sapien
aaaaaaggaggaatcaataatcctgggagtcgg

SEQ ID NO: 538678 - DNA, 33 bp, Homo sapien
aaaaaaggaggaatcattaatcctgggagtcgg

SEQ ID NO: 538679 - DNA, 33 bp, Homo sapien
gaagtttgtggaatagaaccatgaggaaattaa

SEQ ID NO: 538680 - DNA, 33 bp, Homo sapien
gaagtttgtggaataggaccatgaggaaattaa

SEQ ID NO: 538681 - DNA, 33 bp, Homo sapien
aggtgttaattttatcgcatttactaggcttag

SEQ ID NO: 538682 - DNA, 33 bp, Homo sapien
aggtgttaattttatctcatttactaggcttag

SEQ ID NO: 538683 - DNA, 33 bp, Homo sapien
taaaaacatttctggaagaatacacaaacaagc

SEQ ID NO: 538684 - DNA, 33 bp, Homo sapien
taaaaacatttctggaggaatacacaaacaagc

SEQ ID NO: 538685 - DNA, 33 bp, Homo sapien
ttttaaaggttcaaaaaaatacattatgcttaa

SEQ ID NO: 538686 - DNA, 33 bp, Homo sapien
ttttaaaggttcaaaacaatacattatgcttaa

SEQ ID NO: 538687 - DNA, 33 bp, Homo sapien
agtgctgtcaacatcgcaaagcagttaacaatc

SEQ ID NO: 538688 - DNA, 33 bp, Homo sapien
agtgctgtcaacatcggaaagcagttaacaatc

SEQ ID NO: 538689 - DNA, 33 bp, Homo sapien
gtaatttttttccgaacagctactaaagtggtt

SEQ ID NO: 538690 - DNA, 33 bp, Homo sapien
gtaatttttttccgaagagctactaaagtggtt

SEQ ID NO: 538691 - DNA, 33 bp, Homo sapien
cgagcttagaaatcaaactgcaggcacagaaaa

SEQ ID NO: 538692 - DNA, 33 bp, Homo sapien
cgagcttagaaatcaagctgcaggcacagaaaa

SEQ ID NO: 538693 - DNA, 33 bp, Homo sapien
tcatccatgtacaaccacctggcaaaatctaca

SEQ ID NO: 538694 - DNA, 33 bp, Homo sapien
tcatccatgtacaaccgcctggcaaaatctaca

SEQ ID NO: 538695 - DNA, 33 bp, Homo sapien
atcattacataccactaaaatccaccctaccaa

SEQ ID NO: 538696 - DNA, 33 bp, Homo sapien
atcattacataccactgaaatccaccctaccaa

SEQ ID NO: 538697 - DNA, 33 bp, Homo sapien
ccattcttgtacatcaaataagttgacagctga

SEQ ID NO: 538698 - DNA, 33 bp, Homo sapien
ccattcttgtacatcatataagttgacagctga

SEQ ID NO: 538699 - DNA, 33 bp, Homo sapien
actctccattccagagcctaacacgctctcagc

SEQ ID NO: 538700 - DNA, 33 bp, Homo sapien
actctccattccagagtctaacacgctctcagc

SEQ ID NO: 538701 - DNA, 33 bp, Homo sapien
catccattattttatcccagtcacttgggccca

SEQ ID NO: 538702 - DNA, 33 bp, Homo sapien
catccattattttatctcagtcacttgggccca

SEQ ID NO: 538703 - DNA, 33 bp, Homo sapien
gcactcaagaaatagaaatgtgttgaataactt

SEQ ID NO: 538704 - DNA, 33 bp, Homo sapien
gcactcaagaaatagatatgtgttgaataactt

SEQ ID NO: 538705 - DNA, 33 bp, Homo sapien
taatgaaagtaacgtgaacccttgatgtcatga

SEQ ID NO: 538706 - DNA, 33 bp, Homo sapien
taatgaaagtaacgtggacccttgatgtcatga

SEQ ID NO: 538707 - DNA, 33 bp, Homo sapien
cctattgtaaattctacaagttcatagttaacc

SEQ ID NO: 538708 - DNA, 33 bp, Homo sapien
cctattgtaaattctataagttcatagttaacc

SEQ ID NO: 538709 - DNA, 33 bp, Homo sapien
ataatgccactttacaggaagacaaaataagac

SEQ ID NO: 538710 - DNA, 33 bp, Homo sapien
ataatgccactttacatgaagacaaaataagac

SEQ ID NO: 538711 - DNA, 33 bp, Homo sapien
atacaccatgcgatgagtcaatgttccttcact

SEQ ID NO: 538712 - DNA, 33 bp, Homo sapien
atacaccatgcgatgattcaatgttccttcact

SEQ ID NO: 538713 - DNA, 33 bp, Homo sapien
gaacgtcagatagaaaccatactcatgtttcaa

SEQ ID NO: 538714 - DNA, 33 bp, Homo sapien
gaacgtcagatagaaatcatactcatgtttcaa

SEQ ID NO: 538715 - DNA, 33 bp, Homo sapien
ttgacaaagtttgcaaccataaagcccttgttc

SEQ ID NO: 538716 - DNA, 33 bp, Homo sapien
ttgacaaagtttgcaatcataaagcccttgttc

SEQ ID NO: 538717 - DNA, 33 bp, Homo sapien
acactttaattctaagaaagattctgagagtca

SEQ ID NO: 538718 - DNA, 33 bp, Homo sapien
acactttaattctaagtaagattctgagagtca

SEQ ID NO: 538719 - DNA, 33 bp, Homo sapien
aagagtgcttctctgaccaaattatctaatata

SEQ ID NO: 538720 - DNA, 33 bp, Homo sapien
aagagtgcttctctgatcaaattatctaatata

SEQ ID NO: 538721 - DNA, 33 bp, Homo sapien
gattatatggcaatgcgacactcctggaggaaa

SEQ ID NO: 538722 - DNA, 33 bp, Homo sapien
gattatatggcaatgctacactcctggaggaaa

SEQ ID NO: 538723 - DNA, 33 bp, Homo sapien
tttaaatcacccaaaactttacaaatgttataa

SEQ ID NO: 538724 - DNA, 33 bp, Homo sapien
tttaaatcacccaaaattttacaaatgttataa

SEQ ID NO: 538725 - DNA, 33 bp, Homo sapien
ttttgaatttcaaaccaattaggaacagcttga

SEQ ID NO: 538726 - DNA, 33 bp, Homo sapien
ttttgaatttcaaacccattaggaacagcttga

SEQ ID NO: 538727 - DNA, 33 bp, Homo sapien
atttctggctcatccaaactttttattcttttt

SEQ ID NO: 538728 - DNA, 33 bp, Homo sapien
atttctggctcatccagactttttattcttttt

SEQ ID NO: 538729 - DNA, 33 bp, Homo sapien
tctcagaagccaaacactgtagggtcatttctg

SEQ ID NO: 538730 - DNA, 33 bp, Homo sapien
tctcagaagccaaacattgtagggtcatttctg

SEQ ID NO: 538731 - DNA, 33 bp, Homo sapien
aatttacagataattaagagtatgtggcattct

SEQ ID NO: 538732 - DNA, 33 bp, Homo sapien
aatttacagataattaggagtatgtggcattct

SEQ ID NO: 538733 - DNA, 33 bp, Homo sapien
cttacatgaagttctaaacaaggcaaaaccaat

SEQ ID NO: 538734 - DNA, 33 bp, Homo sapien
cttacatgaagttctacacaaggcaaaaccaat

SEQ ID NO: 538735 - DNA, 33 bp, Homo sapien
tactactaaaattgttaaaaagtcatctgtgaa

SEQ ID NO: 538736 - DNA, 33 bp, Homo sapien
tactactaaaattgtttaaaagtcatctgtgaa

SEQ ID NO: 538737 - DNA, 33 bp, Homo sapien
caaggagctcaattacaaggtcaaaacctgact

SEQ ID NO: 538738 - DNA, 33 bp, Homo sapien
caaggagctcaattacgaggtcaaaacctgact

SEQ ID NO: 538739 - DNA, 33 bp, Homo sapien
tgtgagaacgaactaacacacctacattttacc

SEQ ID NO: 538740 - DNA, 33 bp, Homo sapien
tgtgagaacgaactaatacacctacattttacc

SEQ ID NO: 538741 - DNA, 33 bp, Homo sapien
tttaccactccagagacatatgcgtatctagca

SEQ ID NO: 538742 - DNA, 33 bp, Homo sapien
tttaccactccagagatatatgcgtatctagca

SEQ ID NO: 538743 - DNA, 33 bp, Homo sapien
atctaaacgtcaaacccgccaatattagtaact

SEQ ID NO: 538744 - DNA, 33 bp, Homo sapien
atctaaacgtcaaacctgccaatattagtaact

SEQ ID NO: 538745 - DNA, 33 bp, Homo sapien
gttatttcacatttataaaacgtcttaacatta

SEQ ID NO: 538746 - DNA, 33 bp, Homo sapien
gttatttcacatttatgaaacgtcttaacatta

SEQ ID NO: 538747 - DNA, 33 bp, Homo sapien
ggtctaaatagtagcaccttttttaaatgaaat

SEQ ID NO: 538748 - DNA, 33 bp, Homo sapien
ggtctaaatagtagcatcttttttaaatgaaat

SEQ ID NO: 538749 - DNA, 33 bp, Homo sapien
attgctaaagtttcaaaacagaagaatgaattt

SEQ ID NO: 538750 - DNA, 33 bp, Homo sapien
attgctaaagtttcaagacagaagaatgaattt

SEQ ID NO: 538751 - DNA, 33 bp, Homo sapien
ttcaggctgaacagccaaaaagtgctctcctac

SEQ ID NO: 538752 - DNA, 33 bp, Homo sapien
ttcaggctgaacagcccaaaagtgctctcctac

SEQ ID NO: 538753 - DNA, 33 bp, Homo sapien
agttaatcatggttaacattagacagatttgta

SEQ ID NO: 538754 - DNA, 33 bp, Homo sapien
agttaatcatggttaatattagacagatttgta

SEQ ID NO: 538755 - DNA, 33 bp, Homo sapien
atgaaaaccatgcctaatacttcttggagtctt

SEQ ID NO: 538756 - DNA, 33 bp, Homo sapien
atgaaaaccatgcctactacttcttggagtctt

SEQ ID NO: 538757 - DNA, 33 bp, Homo sapien
aacatcacagctccagaactattccatatttat

SEQ ID NO: 538758 - DNA, 33 bp, Homo sapien
aacatcacagctccaggactattccatatttat

SEQ ID NO: 538759 - DNA, 33 bp, Homo sapien
tctgattgagaaataacggtgtgataataaata

SEQ ID NO: 538760 - DNA, 33 bp, Homo sapien
tctgattgagaaataatggtgtgataataaata

SEQ ID NO: 538761 - DNA, 33 bp, Homo sapien
ggtcaggtacaattagaacaaaatcactccgtc

SEQ ID NO: 538762 - DNA, 33 bp, Homo sapien
ggtcaggtacaattaggacaaaatcactccgtc

SEQ ID NO: 538763 - DNA, 33 bp, Homo sapien
caatattgtaaatgtacgtagtgctttatactt

SEQ ID NO: 538764 - DNA, 33 bp, Homo sapien
caatattgtaaatgtatgtagtgctttatactt

SEQ ID NO: 538765 - DNA, 33 bp, Homo sapien
tcaagggctttgactaacttgggaggaaatgga

SEQ ID NO: 538766 - DNA, 33 bp, Homo sapien
tcaagggctttgactatcttgggaggaaatgga

SEQ ID NO: 538767 - DNA, 33 bp, Homo sapien
tcaggtcttactattaccatcttcaagaaaagt

SEQ ID NO: 538768 - DNA, 33 bp, Homo sapien
tcaggtcttactattatcatcttcaagaaaagt

SEQ ID NO: 538769 - DNA, 33 bp, Homo sapien
gaaagctgtaaaaagacaggctacaatgaagac

SEQ ID NO: 538770 - DNA, 33 bp, Homo sapien
gaaagctgtaaaaagagaggctacaatgaagac

SEQ ID NO: 538771 - DNA, 33 bp, Homo sapien
caagggttacaaagacaaacagcagaaatctac

SEQ ID NO: 538772 - DNA, 33 bp, Homo sapien
caagggttacaaagacgaacagcagaaatctac

SEQ ID NO: 538773 - DNA, 33 bp, Homo sapien
tcaggtaaatatatcaggtaccacttgcttcct

SEQ ID NO: 538774 - DNA, 33 bp, Homo sapien
tcaggtaaatatatcatgtaccacttgcttcct

SEQ ID NO: 538775 - DNA, 33 bp, Homo sapien
ccagtaaaagtttcaggagtaggccacaaagct

SEQ ID NO: 538776 - DNA, 33 bp, Homo sapien
ccagtaaaagtttcagtagtaggccacaaagct

SEQ ID NO: 538777 - DNA, 33 bp, Homo sapien
atctcaataaagagaacgcagcccaagagaaag

SEQ ID NO: 538778 - DNA, 33 bp, Homo sapien
atctcaataaagagaatgcagcccaagagaaag

SEQ ID NO: 538779 - DNA, 33 bp, Homo sapien
ctgtctagcactatgacaataatctcttctttc

SEQ ID NO: 538780 - DNA, 33 bp, Homo sapien
ctgtctagcactatgagaataatctcttctttc

SEQ ID NO: 538781 - DNA, 33 bp, Homo sapien
atatttgcttggcccaatgagttttgctgttaa

SEQ ID NO: 538782 - DNA, 33 bp, Homo sapien
atatttgcttggcccagtgagttttgctgttaa

SEQ ID NO: 538783 - DNA, 33 bp, Homo sapien
aagatacaggtaaaagcaaggtatggtggaagc

SEQ ID NO: 538784 - DNA, 33 bp, Homo sapien
aagatacaggtaaaaggaaggtatggtggaagc

SEQ ID NO: 538785 - DNA, 33 bp, Homo sapien
catgccatcagtgggaagtggtaaattctgtcc

SEQ ID NO: 538786 - DNA, 33 bp, Homo sapien
catgccatcagtgggaggtggtaaattctgtcc

SEQ ID NO: 538787 - DNA, 33 bp, Homo sapien
gtttcaaatctacaaacgttacttgtattcttt

SEQ ID NO: 538788 - DNA, 33 bp, Homo sapien
gtttcaaatctacaaatgttacttgtattcttt

SEQ ID NO: 538789 - DNA, 33 bp, Homo sapien
cttttcataggatgagcataagagtagccttga

SEQ ID NO: 538790 - DNA, 33 bp, Homo sapien
cttttcataggatgagtataagagtagccttga

SEQ ID NO: 538791 - DNA, 33 bp, Homo sapien
tgtgttgctactaatcacttcatagctccttac

SEQ ID NO: 538792 - DNA, 33 bp, Homo sapien
tgtgttgctactaatcgcttcatagctccttac

SEQ ID NO: 538793 - DNA, 33 bp, Homo sapien
tgatttgtcaactttacagaatatctactcttg

SEQ ID NO: 538794 - DNA, 33 bp, Homo sapien
tgatttgtcaactttatagaatatctactcttg

SEQ ID NO: 538795 - DNA, 33 bp, Homo sapien
ttacaatagcaggtaaacaagagtagatattct

SEQ ID NO: 538796 - DNA, 33 bp, Homo sapien
ttacaatagcaggtaatcaagagtagatattct

SEQ ID NO: 538797 - DNA, 33 bp, Homo sapien
caccactgtcatgaaacgtataaagtagcaagg

SEQ ID NO: 538798 - DNA, 33 bp, Homo sapien
caccactgtcatgaaatgtataaagtagcaagg

SEQ ID NO: 538799 - DNA, 33 bp, Homo sapien
agggaatatggcaattgaaaaccagatgcttag

SEQ ID NO: 538800 - DNA, 33 bp, Homo sapien
agggaatatggcaatttaaaaccagatgcttag

SEQ ID NO: 538801 - DNA, 33 bp, Homo sapien
ccactggatacaaaaaagttgaacaaaataatt

SEQ ID NO: 538802 - DNA, 33 bp, Homo sapien
ccactggatacaaaaatgttgaacaaaataatt

SEQ ID NO: 538803 - DNA, 33 bp, Homo sapien
aactatcatttttgcgcccagttgccattcctt

SEQ ID NO: 538804 - DNA, 33 bp, Homo sapien
aactatcatttttgcgtccagttgccattcctt

SEQ ID NO: 538805 - DNA, 33 bp, Homo sapien
atttactgagtgtagacactgtgctcttggagc

SEQ ID NO: 538806 - DNA, 33 bp, Homo sapien
atttactgagtgtagatactgtgctcttggagc

SEQ ID NO: 538807 - DNA, 33 bp, Homo sapien
ctactaacttcgccaaaaactaaggacacattg

SEQ ID NO: 538808 - DNA, 33 bp, Homo sapien
ctactaacttcgccaagaactaaggacacattg

SEQ ID NO: 538809 - DNA, 33 bp, Homo sapien
taagtttctgaaaagacggtgcttgaagatttt

SEQ ID NO: 538810 - DNA, 33 bp, Homo sapien
taagtttctgaaaagatggtgcttgaagatttt

SEQ ID NO: 538811 - DNA, 33 bp, Homo sapien
ctcaattccctgtagccgaagaaagcttggcta

SEQ ID NO: 538812 - DNA, 33 bp, Homo sapien
ctcaattccctgtagctgaagaaagcttggcta

SEQ ID NO: 538813 - DNA, 33 bp, Homo sapien
atagagtcaagactcaaatagtgatttattgca

SEQ ID NO: 538814 - DNA, 33 bp, Homo sapien
atagagtcaagactcacatagtgatttattgca

SEQ ID NO: 538815 - DNA, 33 bp, Homo sapien
tgtcggacaagttattaaactctctaagcataa

SEQ ID NO: 538816 - DNA, 33 bp, Homo sapien
tgtcggacaagttattgaactctctaagcataa

SEQ ID NO: 538817 - DNA, 33 bp, Homo sapien
taatcttgccaaagtacagatgtgatgtcgtat

SEQ ID NO: 538818 - DNA, 33 bp, Homo sapien
taatcttgccaaagtagagatgtgatgtcgtat

SEQ ID NO: 538819 - DNA, 33 bp, Homo sapien
taagtgaaggtcaaagcagcatgacaaacatgg

SEQ ID NO: 538820 - DNA, 33 bp, Homo sapien
taagtgaaggtcaaaggagcatgacaaacatgg

SEQ ID NO: 538821 - DNA, 33 bp, Homo sapien
gaaaggctaaatgaaactgcaaagcagggattc

SEQ ID NO: 538822 - DNA, 33 bp, Homo sapien
gaaaggctaaatgaaattgcaaagcagggattc

SEQ ID NO: 538823 - DNA, 33 bp, Homo sapien
atagttttccatgtaaatgacagcttcagtggt

SEQ ID NO: 538824 - DNA, 33 bp, Homo sapien
atagttttccatgtaattgacagcttcagtggt

SEQ ID NO: 538825 - DNA, 33 bp, Homo sapien
acttaggtcttatagaagatgacaaatccatta

SEQ ID NO: 538826 - DNA, 33 bp, Homo sapien
acttaggtcttatagaggatgacaaatccatta

SEQ ID NO: 538827 - DNA, 33 bp, Homo sapien
tcttggcagaaactgtaaaggctagaagagagt

SEQ ID NO: 538828 - DNA, 33 bp, Homo sapien
tcttggcagaaactgtgaaggctagaagagagt

SEQ ID NO: 538829 - DNA, 33 bp, Homo sapien
gctggacttgaacaccagccatctagctaacca

SEQ ID NO: 538830 - DNA, 33 bp, Homo sapien
gctggacttgaacaccggccatctagctaacca

SEQ ID NO: 538831 - DNA, 33 bp, Homo sapien
tgcctacatttccatacagctagcaaggactga

SEQ ID NO: 538832 - DNA, 33 bp, Homo sapien
tgcctacatttccatatagctagcaaggactga

SEQ ID NO: 538833 - DNA, 33 bp, Homo sapien
tgatttaatcctggaaacctatgaagtagttat

SEQ ID NO: 538834 - DNA, 33 bp, Homo sapien
tgatttaatcctggaagcctatgaagtagttat

SEQ ID NO: 538835 - DNA, 33 bp, Homo sapien
ccagcaatcataaataagctttagaggacacat

SEQ ID NO: 538836 - DNA, 33 bp, Homo sapien
ccagcaatcataaatatgctttagaggacacat

SEQ ID NO: 538837 - DNA, 33 bp, Homo sapien
ataatttggacaaagaaaatcagctttttatgg

SEQ ID NO: 538838 - DNA, 33 bp, Homo sapien
ataatttggacaaagacaatcagctttttatgg

SEQ ID NO: 538839 - DNA, 33 bp, Homo sapien
tgaggagctcattattaaaaaactcatcaaatc

SEQ ID NO: 538840 - DNA, 33 bp, Homo sapien
tgaggagctcattattcaaaaactcatcaaatc

SEQ ID NO: 538841 - DNA, 33 bp, Homo sapien
cagaattggaacagaacagcccaagttctgaat

SEQ ID NO: 538842 - DNA, 33 bp, Homo sapien
cagaattggaacagaatagcccaagttctgaat

SEQ ID NO: 538843 - DNA, 33 bp, Homo sapien
aacggaagaggttggacgagatgacctctaagg

SEQ ID NO: 538844 - DNA, 33 bp, Homo sapien
aacggaagaggttggatgagatgacctctaagg

SEQ ID NO: 538845 - DNA, 33 bp, Homo sapien
atatgctagcagtgtccataccttagaaagtgt

SEQ ID NO: 538846 - DNA, 33 bp, Homo sapien
atatgctagcagtgtctataccttagaaagtgt

SEQ ID NO: 538847 - DNA, 33 bp, Homo sapien
ttacacatggagtctaagtgtatgatagcttta

SEQ ID NO: 538848 - DNA, 33 bp, Homo sapien
ttacacatggagtctaggtgtatgatagcttta

SEQ ID NO: 538849 - DNA, 33 bp, Homo sapien
cctttatataagctcgcagatgttaaataaatt

SEQ ID NO: 538850 - DNA, 33 bp, Homo sapien
cctttatataagctcgtagatgttaaataaatt

SEQ ID NO: 538851 - DNA, 33 bp, Homo sapien
tgtttaaacgtcctcagagaaattgctttttga

SEQ ID NO: 538852 - DNA, 33 bp, Homo sapien
tgtttaaacgtcctcatagaaattgctttttga

SEQ ID NO: 538853 - DNA, 33 bp, Homo sapien
gtctcttagttgacacagctagtaagtaccgga

SEQ ID NO: 538854 - DNA, 33 bp, Homo sapien
gtctcttagttgacactgctagtaagtaccgga

SEQ ID NO: 538855 - DNA, 33 bp, Homo sapien
gcagacagtctgctcaccaaaagtgccaaaagg

SEQ ID NO: 538856 - DNA, 33 bp, Homo sapien
gcagacagtctgctcatcaaaagtgccaaaagg

SEQ ID NO: 538857 - DNA, 33 bp, Homo sapien
gagggcctggaaaacactagcacttcaaaagat

SEQ ID NO: 538858 - DNA, 33 bp, Homo sapien
gagggcctggaaaacattagcacttcaaaagat

SEQ ID NO: 538859 - DNA, 33 bp, Homo sapien
tacccacttaaagttacatagtgtacagcagga

SEQ ID NO: 538860 - DNA, 33 bp, Homo sapien
tacccacttaaagttatatagtgtacagcagga

SEQ ID NO: 538861 - DNA, 33 bp, Homo sapien
gcatctttatctcatccatctgcctttgcattt

SEQ ID NO: 538862 - DNA, 33 bp, Homo sapien
gcatctttatctcatctatctgcctttgcattt

SEQ ID NO: 538863 - DNA, 33 bp, Homo sapien
gaaggaagtgaagcacaaaggcaaaggatgctt

SEQ ID NO: 538864 - DNA, 33 bp, Homo sapien
gaaggaagtgaagcactaaggcaaaggatgctt

SEQ ID NO: 538865 - DNA, 33 bp, Homo sapien
gtaagtgagtaacagaaaagcactatttatcag

SEQ ID NO: 538866 - DNA, 33 bp, Homo sapien
gtaagtgagtaacagataagcactatttatcag

SEQ ID NO: 538867 - DNA, 33 bp, Homo sapien
ttcagaaaaatgttcaatcatgatgaaacaaga

SEQ ID NO: 538868 - DNA, 33 bp, Homo sapien
ttcagaaaaatgttcagtcatgatgaaacaaga

SEQ ID NO: 538869 - DNA, 33 bp, Homo sapien
atttctctcctcaaaaataagagcagttttgat

SEQ ID NO: 538870 - DNA, 33 bp, Homo sapien
atttctctcctcaaaagtaagagcagttttgat

SEQ ID NO: 538871 - DNA, 33 bp, Homo sapien
ttcaggaccctagtaccaaactaaaagcattgg

SEQ ID NO: 538872 - DNA, 33 bp, Homo sapien
ttcaggaccctagtacgaaactaaaagcattgg

SEQ ID NO: 538873 - DNA, 33 bp, Homo sapien
ttttccaggtcaaaaacagacatcatgaattgt

SEQ ID NO: 538874 - DNA, 33 bp, Homo sapien
ttttccaggtcaaaaatagacatcatgaattgt

SEQ ID NO: 538875 - DNA, 33 bp, Homo sapien
ctttgtcagcatttccaagacttttatcattaa

SEQ ID NO: 538876 - DNA, 33 bp, Homo sapien
ctttgtcagcatttccgagacttttatcattaa

SEQ ID NO: 538877 - DNA, 33 bp, Homo sapien
tgtgaacatcataacacgtacttccacaaacct

SEQ ID NO: 538878 - DNA, 33 bp, Homo sapien
tgtgaacatcataacatgtacttccacaaacct

SEQ ID NO: 538879 - DNA, 33 bp, Homo sapien
atgaactcctgcttacaacaacagtttggtacg

SEQ ID NO: 538880 - DNA, 33 bp, Homo sapien
atgaactcctgcttacgacaacagtttggtacg

SEQ ID NO: 538881 - DNA, 33 bp, Homo sapien
gcctctggtaccttcacggagaccctggattgg

SEQ ID NO: 538882 - DNA, 33 bp, Homo sapien
gcctctggtaccttcatggagaccctggattgg

SEQ ID NO: 538883 - DNA, 33 bp, Homo sapien
atcttatctccaaaaacgtcatcttatcagaga

SEQ ID NO: 538884 - DNA, 33 bp, Homo sapien
atcttatctccaaaaatgtcatcttatcagaga

SEQ ID NO: 538885 - DNA, 33 bp, Homo sapien
tgctctgacacaatgcaaacagtagtccatgcc

SEQ ID NO: 538886 - DNA, 33 bp, Homo sapien
tgctctgacacaatgccaacagtagtccatgcc

SEQ ID NO: 538887 - DNA, 33 bp, Homo sapien
ttcatataggttggtacgaaattctactttagt

SEQ ID NO: 538888 - DNA, 33 bp, Homo sapien
ttcatataggttggtatgaaattctactttagt

SEQ ID NO: 538889 - DNA, 33 bp, Homo sapien
gatccctgctgttccacgtacaaactttatgtc

SEQ ID NO: 538890 - DNA, 33 bp, Homo sapien
gatccctgctgttccatgtacaaactttatgtc

SEQ ID NO: 538891 - DNA, 33 bp, Homo sapien
gggaacttaggctaagaagggttatgacataaa

SEQ ID NO: 538892 - DNA, 33 bp, Homo sapien
gggaacttaggctaaggagggttatgacataaa

SEQ ID NO: 538893 - DNA, 33 bp, Homo sapien
attattcactattaaccgatggaaaacacacct

SEQ ID NO: 538894 - DNA, 33 bp, Homo sapien
attattcactattaactgatggaaaacacacct

SEQ ID NO: 538895 - DNA, 33 bp, Homo sapien
atcatgaaagcttttacaatttgagtggtaaac

SEQ ID NO: 538896 - DNA, 33 bp, Homo sapien
atcatgaaagcttttataatttgagtggtaaac

SEQ ID NO: 538897 - DNA, 33 bp, Homo sapien
tgctcccgatcctgccccagaacactttagcat

SEQ ID NO: 538898 - DNA, 33 bp, Homo sapien
tgctcccgatcctgcctcagaacactttagcat

SEQ ID NO: 538899 - DNA, 33 bp, Homo sapien
tcactctatgtgacttcaagatgaatagaggat

SEQ ID NO: 538900 - DNA, 33 bp, Homo sapien
tcactctatgtgacttgaagatgaatagaggat

SEQ ID NO: 538901 - DNA, 33 bp, Homo sapien
gaatgttgatgtggtaaataagatgagtagtag

SEQ ID NO: 538902 - DNA, 33 bp, Homo sapien
gaatgttgatgtggtagataagatgagtagtag

SEQ ID NO: 538903 - DNA, 33 bp, Homo sapien
tgagtagtagagttacagagacagaggtgggtc

SEQ ID NO: 538904 - DNA, 33 bp, Homo sapien
tgagtagtagagttacggagacagaggtgggtc

SEQ ID NO: 538905 - DNA, 33 bp, Homo sapien
gaaaggaagacctgacagctgactggctgtgac

SEQ ID NO: 538906 - DNA, 33 bp, Homo sapien
gaaaggaagacctgacggctgactggctgtgac

SEQ ID NO: 538907 - DNA, 33 bp, Homo sapien
gtgatatgaagtaaaaatggttactgtgatcac

SEQ ID NO: 538908 - DNA, 33 bp, Homo sapien
gtgatatgaagtaaaagtggttactgtgatcac

SEQ ID NO: 538909 - DNA, 33 bp, Homo sapien
gaaataaatagtgtggaaaccttgtagatatta

SEQ ID NO: 538910 - DNA, 33 bp, Homo sapien
gaaataaatagtgtggcaaccttgtagatatta

SEQ ID NO: 538911 - DNA, 33 bp, Homo sapien
tttttctcactttctgaactttgctcatatgga

SEQ ID NO: 538912 - DNA, 33 bp, Homo sapien
tttttctcactttctgcactttgctcatatgga

SEQ ID NO: 538913 - DNA, 33 bp, Homo sapien
cagtactccagaagaaacaaatctaaatcctct

SEQ ID NO: 538914 - DNA, 33 bp, Homo sapien
cagtactccagaagaagcaaatctaaatcctct

SEQ ID NO: 538915 - DNA, 33 bp, Homo sapien
atagaagtcacactaaacactatgtaggggaat

SEQ ID NO: 538916 - DNA, 33 bp, Homo sapien
atagaagtcacactaagcactatgtaggggaat

SEQ ID NO: 538917 - DNA, 33 bp, Homo sapien
agttagcaccaaatgcagaatttattatgcaac

SEQ ID NO: 538918 - DNA, 33 bp, Homo sapien
agttagcaccaaatgctgaatttattatgcaac

SEQ ID NO: 538919 - DNA, 33 bp, Homo sapien
cgttgtctggcaaatgaaaccttcctgactgta

SEQ ID NO: 538920 - DNA, 33 bp, Homo sapien
cgttgtctggcaaatggaaccttcctgactgta

SEQ ID NO: 538921 - DNA, 33 bp, Homo sapien
ctgctggccgttgatacaaaagtgaccgtgact

SEQ ID NO: 538922 - DNA, 33 bp, Homo sapien
ctgctggccgttgatagaaaagtgaccgtgact

SEQ ID NO: 538923 - DNA, 33 bp, Homo sapien
cttctgtctaaaggtaagaatagcagttgccat

SEQ ID NO: 538924 - DNA, 33 bp, Homo sapien
cttctgtctaaaggtaggaatagcagttgccat

SEQ ID NO: 538925 - DNA, 33 bp, Homo sapien
cactctaatgcacatgcacaataggcaaggcag

SEQ ID NO: 538926 - DNA, 33 bp, Homo sapien
cactctaatgcacatggacaataggcaaggcag

SEQ ID NO: 538927 - DNA, 33 bp, Homo sapien
tgcctttctttgcatactagttgttccttttgc

SEQ ID NO: 538928 - DNA, 33 bp, Homo sapien
tgcctttctttgcatattagttgttccttttgc

SEQ ID NO: 538929 - DNA, 33 bp, Homo sapien
tgaatcactaataaaacccaattcaattgttag

SEQ ID NO: 538930 - DNA, 33 bp, Homo sapien
tgaatcactaataaaatccaattcaattgttag

SEQ ID NO: 538931 - DNA, 33 bp, Homo sapien
aggaccagtgacatgaactggaatgataaagtc

SEQ ID NO: 538932 - DNA, 33 bp, Homo sapien
aggaccagtgacatgagctggaatgataaagtc

SEQ ID NO: 538933 - DNA, 33 bp, Homo sapien
aacaccttggttttagccctgttgtgttctttg

SEQ ID NO: 538934 - DNA, 33 bp, Homo sapien
aacaccttggttttagtcctgttgtgttctttg

SEQ ID NO: 538935 - DNA, 33 bp, Homo sapien
agagcatctgagaaacacagataacggaaaaaa

SEQ ID NO: 538936 - DNA, 33 bp, Homo sapien
agagcatctgagaaacgcagataacggaaaaaa

SEQ ID NO: 538937 - DNA, 33 bp, Homo sapien
aactcagatattaagcaaactctgtgtgctggg

SEQ ID NO: 538938 - DNA, 33 bp, Homo sapien
aactcagatattaagcgaactctgtgtgctggg

SEQ ID NO: 538939 - DNA, 33 bp, Homo sapien
tatttgttggatgaataaaagacgatgttagaa

SEQ ID NO: 538940 - DNA, 33 bp, Homo sapien
tatttgttggatgaatgaaagacgatgttagaa

SEQ ID NO: 538941 - DNA, 33 bp, Homo sapien
aatattacaacttatacgccctaccacactttg

SEQ ID NO: 538942 - DNA, 33 bp, Homo sapien
aatattacaacttatatgccctaccacactttg

SEQ ID NO: 538943 - DNA, 33 bp, Homo sapien
ctgtaatcagtttcaaccagtgaccaaatacat

SEQ ID NO: 538944 - DNA, 33 bp, Homo sapien
ctgtaatcagtttcaatcagtgaccaaatacat

SEQ ID NO: 538945 - DNA, 33 bp, Homo sapien
gattctgtctttcaaccctatacatccacagtt

SEQ ID NO: 538946 - DNA, 33 bp, Homo sapien
gattctgtctttcaacgctatacatccacagtt

SEQ ID NO: 538947 - DNA, 33 bp, Homo sapien
cttgtgtatcttatctcactttaaagtatttat

SEQ ID NO: 538948 - DNA, 33 bp, Homo sapien
cttgtgtatcttatctgactttaaagtatttat

SEQ ID NO: 538949 - DNA, 33 bp, Homo sapien
actattcctacctctaaaatgtaccaaagacca

SEQ ID NO: 538950 - DNA, 33 bp, Homo sapien
actattcctacctctataatgtaccaaagacca

SEQ ID NO: 538951 - DNA, 33 bp, Homo sapien
aatatagtaacttgtcactgactaccttatatc

SEQ ID NO: 538952 - DNA, 33 bp, Homo sapien
aatatagtaacttgtccctgactaccttatatc

SEQ ID NO: 538953 - DNA, 33 bp, Homo sapien
ataggagctacttcacccatttaactaaatatg

SEQ ID NO: 538954 - DNA, 33 bp, Homo sapien
ataggagctacttcactcatttaactaaatatg

SEQ ID NO: 538955 - DNA, 33 bp, Homo sapien
tacagagtcaggtctagagttgcctcagcctat

SEQ ID NO: 538956 - DNA, 33 bp, Homo sapien
tacagagtcaggtctatagttgcctcagcctat

SEQ ID NO: 538957 - DNA, 33 bp, Homo sapien
gatttgataaacaaacaaaagaggaatttctct

SEQ ID NO: 538958 - DNA, 33 bp, Homo sapien
gatttgataaacaaacgaaagaggaatttctct

SEQ ID NO: 538959 - DNA, 33 bp, Homo sapien
gcaacagtgattggagaatgattgagtggtctc

SEQ ID NO: 538960 - DNA, 33 bp, Homo sapien
gcaacagtgattggaggatgattgagtggtctc

SEQ ID NO: 538961 - DNA, 33 bp, Homo sapien
ctagacaattctacaacgagcatagtgagttcc

SEQ ID NO: 538962 - DNA, 33 bp, Homo sapien
ctagacaattctacaatgagcatagtgagttcc

SEQ ID NO: 538963 - DNA, 33 bp, Homo sapien
tgacaatatggctaataagcaaagtgaacatgg

SEQ ID NO: 538964 - DNA, 33 bp, Homo sapien
tgacaatatggctaatgagcaaagtgaacatgg

SEQ ID NO: 538965 - DNA, 33 bp, Homo sapien
catgttgatggaactacgatgagtaaggcctag

SEQ ID NO: 538966 - DNA, 33 bp, Homo sapien
catgttgatggaactatgatgagtaaggcctag

SEQ ID NO: 538967 - DNA, 33 bp, Homo sapien
agtggtttaaagctcaatattcttttcactcca

SEQ ID NO: 538968 - DNA, 33 bp, Homo sapien
agtggtttaaagctcagtattcttttcactcca

SEQ ID NO: 538969 - DNA, 33 bp, Homo sapien
ttcacagccaatcaaacctattgtaagcttcat

SEQ ID NO: 538970 - DNA, 33 bp, Homo sapien
ttcacagccaatcaaatctattgtaagcttcat

SEQ ID NO: 538971 - DNA, 33 bp, Homo sapien
acaaagtcctattttacatcaaagatggctcct

SEQ ID NO: 538972 - DNA, 33 bp, Homo sapien
acaaagtcctattttatatcaaagatggctcct

SEQ ID NO: 538973 - DNA, 33 bp, Homo sapien
cacccaactctttgcactcagtccaaaataaaa

SEQ ID NO: 538974 - DNA, 33 bp, Homo sapien
cacccaactctttgcattcagtccaaaataaaa

SEQ ID NO: 538975 - DNA, 33 bp, Homo sapien
aagactgttccctttaggcactaggatctacca

SEQ ID NO: 538976 - DNA, 33 bp, Homo sapien
aagactgttccctttatgcactaggatctacca

SEQ ID NO: 538977 - DNA, 33 bp, Homo sapien
gtgacttcctatatgcacttcctagagaaccac

SEQ ID NO: 538978 - DNA, 33 bp, Homo sapien
gtgacttcctatatgcgcttcctagagaaccac

SEQ ID NO: 538979 - DNA, 33 bp, Homo sapien
ttgaagaaaaatgacaactgcctatatcgccac

SEQ ID NO: 538980 - DNA, 33 bp, Homo sapien
ttgaagaaaaatgacacctgcctatatcgccac

SEQ ID NO: 538981 - DNA, 33 bp, Homo sapien
taaaaaacactagggactcccatctgtctaaaa

SEQ ID NO: 538982 - DNA, 33 bp, Homo sapien
taaaaaacactagggattcccatctgtctaaaa

SEQ ID NO: 538983 - DNA, 33 bp, Homo sapien
cacagtaagggtgataagtctgtgtgatgaaat

SEQ ID NO: 538984 - DNA, 33 bp, Homo sapien
cacagtaagggtgatacgtctgtgtgatgaaat

SEQ ID NO: 538985 - DNA, 33 bp, Homo sapien
attagtagatatgcaaaccataaatatacagta

SEQ ID NO: 538986 - DNA, 33 bp, Homo sapien
attagtagatatgcaagccataaatatacagta

SEQ ID NO: 538987 - DNA, 33 bp, Homo sapien
cataatgacataactaagcgaatagagacatta

SEQ ID NO: 538988 - DNA, 33 bp, Homo sapien
cataatgacataactaggcgaatagagacatta

SEQ ID NO: 538989 - DNA, 33 bp, Homo sapien
tcacctgtaattcagaaagagctattacaaaca

SEQ ID NO: 538990 - DNA, 33 bp, Homo sapien
tcacctgtaattcagagagagctattacaaaca

SEQ ID NO: 538991 - DNA, 33 bp, Homo sapien
tctaaaatttgtgtcacgaaggtcttttcttgt

SEQ ID NO: 538992 - DNA, 33 bp, Homo sapien
tctaaaatttgtgtcatgaaggtcttttcttgt

SEQ ID NO: 538993 - DNA, 33 bp, Homo sapien
gtatgggagtctaggaagaatttgaatgtcatc

SEQ ID NO: 538994 - DNA, 33 bp, Homo sapien
gtatgggagtctaggaggaatttgaatgtcatc

SEQ ID NO: 538995 - DNA, 33 bp, Homo sapien
gaaaatagcttgtttacggagctggtaaagaga

SEQ ID NO: 538996 - DNA, 33 bp, Homo sapien
gaaaatagcttgtttatggagctggtaaagaga

SEQ ID NO: 538997 - DNA, 33 bp, Homo sapien
ctgattgcttacagtacaggactttcttcaaaa

SEQ ID NO: 538998 - DNA, 33 bp, Homo sapien
ctgattgcttacagtataggactttcttcaaaa

SEQ ID NO: 538999 - DNA, 33 bp, Homo sapien
ttcaaggaggcaatagaactaaactccaagccc

SEQ ID NO: 539000 - DNA, 33 bp, Homo sapien
ttcaaggaggcaataggactaaactccaagccc

SEQ ID NO: 539001 - DNA, 33 bp, Homo sapien
ataggatattttcacacggcaacttaaaaactt

SEQ ID NO: 539002 - DNA, 33 bp, Homo sapien
ataggatattttcacatggcaacttaaaaactt

SEQ ID NO: 539003 - DNA, 33 bp, Homo sapien
gtataaaaggataccaatgaagagaattaggtt

SEQ ID NO: 539004 - DNA, 33 bp, Homo sapien
gtataaaaggataccagtgaagagaattaggtt

SEQ ID NO: 539005 - DNA, 33 bp, Homo sapien
gggatatgttgtaaaaatcatgaaattgttaag

SEQ ID NO: 539006 - DNA, 33 bp, Homo sapien
gggatatgttgtaaaagtcatgaaattgttaag

SEQ ID NO: 539007 - DNA, 33 bp, Homo sapien
aactgatgatgactatcaaactgctgaaagaag

SEQ ID NO: 539008 - DNA, 33 bp, Homo sapien
aactgatgatgactattaaactgctgaaagaag

SEQ ID NO: 539009 - DNA, 33 bp, Homo sapien
gtggcaaagggagagaatctataaaaaattcag

SEQ ID NO: 539010 - DNA, 33 bp, Homo sapien
gtggcaaagggagagagtctataaaaaattcag

SEQ ID NO: 539011 - DNA, 33 bp, Homo sapien
atagcctgtgcttaggaaaaaatgcacctgaat

SEQ ID NO: 539012 - DNA, 33 bp, Homo sapien
atagcctgtgcttaggtaaaaatgcacctgaat

SEQ ID NO: 539013 - DNA, 33 bp, Homo sapien
cagtcaggatagtgcacagtgaaaagtgaaaaa

SEQ ID NO: 539014 - DNA, 33 bp, Homo sapien
cagtcaggatagtgcatagtgaaaagtgaaaaa

SEQ ID NO: 539015 - DNA, 33 bp, Homo sapien
agcataaaacttacatcaggaaaggtgcctagg

SEQ ID NO: 539016 - DNA, 33 bp, Homo sapien
agcataaaacttacattaggaaaggtgcctagg

SEQ ID NO: 539017 - DNA, 33 bp, Homo sapien
tcagttcaccataataagccagtaacaaataac

SEQ ID NO: 539018 - DNA, 33 bp, Homo sapien
tcagttcaccataataggccagtaacaaataac

SEQ ID NO: 539019 - DNA, 33 bp, Homo sapien
tgtaaaatgtcaacaacaatgtcatcttcacag

SEQ ID NO: 539020 - DNA, 33 bp, Homo sapien
tgtaaaatgtcaacaataatgtcatcttcacag

SEQ ID NO: 539021 - DNA, 33 bp, Homo sapien
gaaaagtgtgttcttaaaaaacagtgctttatc

SEQ ID NO: 539022 - DNA, 33 bp, Homo sapien
gaaaagtgtgttcttagaaaacagtgctttatc

SEQ ID NO: 539023 - DNA, 33 bp, Homo sapien
tcaaatatgccaggaaaatggtgaaatcagtca

SEQ ID NO: 539024 - DNA, 33 bp, Homo sapien
tcaaatatgccaggaagatggtgaaatcagtca

SEQ ID NO: 539025 - DNA, 33 bp, Homo sapien
atcacagtcgcgtgaaagggaagaatgggccca

SEQ ID NO: 539026 - DNA, 33 bp, Homo sapien
atcacagtcgcgtgaaggggaagaatgggccca

SEQ ID NO: 539027 - DNA, 33 bp, Homo sapien
ttgtaatttccttctccatagttcagaagttcc

SEQ ID NO: 539028 - DNA, 33 bp, Homo sapien
ttgtaatttccttctcgatagttcagaagttcc

SEQ ID NO: 539029 - DNA, 33 bp, Homo sapien
acttcagaaaacgttacgtaaaagctgcccttt

SEQ ID NO: 539030 - DNA, 33 bp, Homo sapien
acttcagaaaacgttatgtaaaagctgcccttt

SEQ ID NO: 539031 - DNA, 33 bp, Homo sapien
gctctcccattgtgagaatccctgatttcaata

SEQ ID NO: 539032 - DNA, 33 bp, Homo sapien
gctctcccattgtgaggatccctgatttcaata

SEQ ID NO: 539033 - DNA, 33 bp, Homo sapien
tggcttacagagctaacggaagcttcttcaccg

SEQ ID NO: 539034 - DNA, 33 bp, Homo sapien
tggcttacagagctaatggaagcttcttcaccg

SEQ ID NO: 539035 - DNA, 33 bp, Homo sapien
tccattctcttttgcaacttttctctgtttctc

SEQ ID NO: 539036 - DNA, 33 bp, Homo sapien
tccattctcttttgcagcttttctctgtttctc

SEQ ID NO: 539037 - DNA, 33 bp, Homo sapien
tagtgacctaaatataagtctgacagaaacaat

SEQ ID NO: 539038 - DNA, 33 bp, Homo sapien
tagtgacctaaatatatgtctgacagaaacaat

SEQ ID NO: 539039 - DNA, 33 bp, Homo sapien
cctgtggagagaaaagcaattagagatgaagat

SEQ ID NO: 539040 - DNA, 33 bp, Homo sapien
cctgtggagagaaaagtaattagagatgaagat

SEQ ID NO: 539041 - DNA, 33 bp, Homo sapien
aaagtgccaactcagaaatggagtgactgtttg

SEQ ID NO: 539042 - DNA, 33 bp, Homo sapien
aaagtgccaactcagagatggagtgactgtttg

SEQ ID NO: 539043 - DNA, 33 bp, Homo sapien
cacttcctttgctttacgaccttgaggcattca

SEQ ID NO: 539044 - DNA, 33 bp, Homo sapien
cacttcctttgctttatgaccttgaggcattca

SEQ ID NO: 539045 - DNA, 33 bp, Homo sapien
catacccagggcgagtaaaccaggaaggtggag

SEQ ID NO: 539046 - DNA, 33 bp, Homo sapien
catacccagggcgagttaaccaggaaggtggag

SEQ ID NO: 539047 - DNA, 33 bp, Homo sapien
tcctgctcaggtataaatctggtagttgcatgt

SEQ ID NO: 539048 - DNA, 33 bp, Homo sapien
tcctgctcaggtataagtctggtagttgcatgt

SEQ ID NO: 539049 - DNA, 33 bp, Homo sapien
aaaaaaaggtctctctcaatatctcaagcagct

SEQ ID NO: 539050 - DNA, 33 bp, Homo sapien
aaaaaaaggtctctctgaatatctcaagcagct

SEQ ID NO: 539051 - DNA, 33 bp, Homo sapien
tgatgtaagcattccaacctctccttgacttgc

SEQ ID NO: 539052 - DNA, 33 bp, Homo sapien
tgatgtaagcattccagcctctccttgacttgc

SEQ ID NO: 539053 - DNA, 33 bp, Homo sapien
ctgttgggaacatacacagagatgtgagtggcg

SEQ ID NO: 539054 - DNA, 33 bp, Homo sapien
ctgttgggaacatacatagagatgtgagtggcg

SEQ ID NO: 539055 - DNA, 33 bp, Homo sapien
agtctttaagcaaaaaagcaccatttaaaatat

SEQ ID NO: 539056 - DNA, 33 bp, Homo sapien
agtctttaagcaaaaacgcaccatttaaaatat

SEQ ID NO: 539057 - DNA, 33 bp, Homo sapien
atatcttaggaacaacccttaaccaatgacaaa

SEQ ID NO: 539058 - DNA, 33 bp, Homo sapien
atatcttaggaacaactcttaaccaatgacaaa

SEQ ID NO: 539059 - DNA, 33 bp, Homo sapien
cacgaaaggcaaccacaactgatctgctttgaa

SEQ ID NO: 539060 - DNA, 33 bp, Homo sapien
cacgaaaggcaaccacgactgatctgctttgaa

SEQ ID NO: 539061 - DNA, 33 bp, Homo sapien
tcttgtacggaacacaatgaatgccaatagcac

SEQ ID NO: 539062 - DNA, 33 bp, Homo sapien
tcttgtacggaacacagtgaatgccaatagcac

SEQ ID NO: 539063 - DNA, 33 bp, Homo sapien
agccacagcacacactcaaaccatcattgttca

SEQ ID NO: 539064 - DNA, 33 bp, Homo sapien
agccacagcacacacttaaaccatcattgttca

SEQ ID NO: 539065 - DNA, 33 bp, Homo sapien
tgctggatcaagtggcaagacaatgtttagttt

SEQ ID NO: 539066 - DNA, 33 bp, Homo sapien
tgctggatcaagtggcgagacaatgtttagttt

SEQ ID NO: 539067 - DNA, 33 bp, Homo sapien
ggcatacacattttcacctcccagcctgtgcat

SEQ ID NO: 539068 - DNA, 33 bp, Homo sapien
ggcatacacattttcatctcccagcctgtgcat

SEQ ID NO: 539069 - DNA, 33 bp, Homo sapien
aaacctctgttcccacagcaactccagatccag

SEQ ID NO: 539070 - DNA, 33 bp, Homo sapien
aaacctctgttcccacggcaactccagatccag

SEQ ID NO: 539071 - DNA, 33 bp, Homo sapien
gtgacccaggcctggaccatcagaacgttccat

SEQ ID NO: 539072 - DNA, 33 bp, Homo sapien
gtgacccaggcctggatcatcagaacgttccat

SEQ ID NO: 539073 - DNA, 33 bp, Homo sapien
tgctagactggcaaaaacagcaactttcttcca

SEQ ID NO: 539074 - DNA, 33 bp, Homo sapien
tgctagactggcaaaagcagcaactttcttcca

SEQ ID NO: 539075 - DNA, 33 bp, Homo sapien
attcaggttccagtcacgtatgaatcttcttgg

SEQ ID NO: 539076 - DNA, 33 bp, Homo sapien
attcaggttccagtcatgtatgaatcttcttgg

SEQ ID NO: 539077 - DNA, 33 bp, Homo sapien
tgcagccaagtggccaacaagaatctacacagc

SEQ ID NO: 539078 - DNA, 33 bp, Homo sapien
tgcagccaagtggccaccaagaatctacacagc

SEQ ID NO: 539079 - DNA, 33 bp, Homo sapien
ggaaatgagcctaatccgaaataaaataagcaa

SEQ ID NO: 539080 - DNA, 33 bp, Homo sapien
ggaaatgagcctaatctgaaataaaataagcaa

SEQ ID NO: 539081 - DNA, 33 bp, Homo sapien
aatctgtcactctagccatgggaaataaaggct

SEQ ID NO: 539082 - DNA, 33 bp, Homo sapien
aatctgtcactctagctatgggaaataaaggct

SEQ ID NO: 539083 - DNA, 33 bp, Homo sapien
acgccatagtcatcagcagtcaatccccatttc

SEQ ID NO: 539084 - DNA, 33 bp, Homo sapien
acgccatagtcatcagtagtcaatccccatttc

SEQ ID NO: 539085 - DNA, 33 bp, Homo sapien
agcctaccatattccaagcattctgtgctagct

SEQ ID NO: 539086 - DNA, 33 bp, Homo sapien
agcctaccatattccaggcattctgtgctagct

SEQ ID NO: 539087 - DNA, 33 bp, Homo sapien
ccccttcttgctcccaactggattttcaccatc

SEQ ID NO: 539088 - DNA, 33 bp, Homo sapien
ccccttcttgctcccagctggattttcaccatc

SEQ ID NO: 539089 - DNA, 33 bp, Homo sapien
aataactggagccacagtatttttaaatggcct

SEQ ID NO: 539090 - DNA, 33 bp, Homo sapien
aataactggagccacattatttttaaatggcct

SEQ ID NO: 539091 - DNA, 33 bp, Homo sapien
actggaaaagacagaaacataaccagaggtctg

SEQ ID NO: 539092 - DNA, 33 bp, Homo sapien
actggaaaagacagaagcataaccagaggtctg

SEQ ID NO: 539093 - DNA, 33 bp, Homo sapien
gctcagttaaatattaagtattgatcggtttac

SEQ ID NO: 539094 - DNA, 33 bp, Homo sapien
gctcagttaaatattaggtattgatcggtttac

SEQ ID NO: 539095 - DNA, 33 bp, Homo sapien
aagagattaggacacacatcctggtagactaaa

SEQ ID NO: 539096 - DNA, 33 bp, Homo sapien
aagagattaggacacagatcctggtagactaaa

SEQ ID NO: 539097 - DNA, 33 bp, Homo sapien
gcatttgattttgaccaagggcaattgttaaca

SEQ ID NO: 539098 - DNA, 33 bp, Homo sapien
gcatttgattttgaccgagggcaattgttaaca

SEQ ID NO: 539099 - DNA, 33 bp, Homo sapien
tcatttatgtgcttgtcaacattttatccacgt

SEQ ID NO: 539100 - DNA, 33 bp, Homo sapien
tcatttatgtgcttgttaacattttatccacgt

SEQ ID NO: 539101 - DNA, 33 bp, Homo sapien
tttcaatggttggccaaactttggaagaaagaa

SEQ ID NO: 539102 - DNA, 33 bp, Homo sapien
tttcaatggttggccatactttggaagaaagaa

SEQ ID NO: 539103 - DNA, 33 bp, Homo sapien
tcttcaccttgccaaccgtaagtcatatcaaat

SEQ ID NO: 539104 - DNA, 33 bp, Homo sapien
tcttcaccttgccaactgtaagtcatatcaaat

SEQ ID NO: 539105 - DNA, 33 bp, Homo sapien
cttttgagatatgacacagaaaatcacattttt

SEQ ID NO: 539106 - DNA, 33 bp, Homo sapien
cttttgagatatgacatagaaaatcacattttt

SEQ ID NO: 539107 - DNA, 33 bp, Homo sapien
cattgggatgggagaaacagaccaaggagatcc

SEQ ID NO: 539108 - DNA, 33 bp, Homo sapien
cattgggatgggagaaccagaccaaggagatcc

SEQ ID NO: 539109 - DNA, 33 bp, Homo sapien
gtctggagactgaaaaagagactgcctctataa

SEQ ID NO: 539110 - DNA, 33 bp, Homo sapien
gtctggagactgaaaaggagactgcctctataa

SEQ ID NO: 539111 - DNA, 33 bp, Homo sapien
gagagccaatttgaaaacaccaaaagcctcgcc

SEQ ID NO: 539112 - DNA, 33 bp, Homo sapien
gagagccaatttgaaatcaccaaaagcctcgcc

SEQ ID NO: 539113 - DNA, 33 bp, Homo sapien
gaaaatggttcccaggaatcagaatttttaaca

SEQ ID NO: 539114 - DNA, 33 bp, Homo sapien
gaaaatggttcccagggatcagaatttttaaca

SEQ ID NO: 539115 - DNA, 33 bp, Homo sapien
ccaaggactcttgggaactaaacacaaatctca

SEQ ID NO: 539116 - DNA, 33 bp, Homo sapien
ccaaggactcttgggagctaaacacaaatctca

SEQ ID NO: 539117 - DNA, 33 bp, Homo sapien
gattagcatcttggcaatgacataaaccgggat

SEQ ID NO: 539118 - DNA, 33 bp, Homo sapien
gattagcatcttggcagtgacataaaccgggat

SEQ ID NO: 539119 - DNA, 33 bp, Homo sapien
gcaacagaaacagcctaaattacaccctgcaca

SEQ ID NO: 539120 - DNA, 33 bp, Homo sapien
gcaacagaaacagcctgaattacaccctgcaca

SEQ ID NO: 539121 - DNA, 33 bp, Homo sapien
ctgaacttgacaataaaatttgctaaatactga

SEQ ID NO: 539122 - DNA, 33 bp, Homo sapien
ctgaacttgacaataatatttgctaaatactga

SEQ ID NO: 539123 - DNA, 33 bp, Homo sapien
caagtagagtctcaaaatcagtgtcatggattt

SEQ ID NO: 539124 - DNA, 33 bp, Homo sapien
caagtagagtctcaaagtcagtgtcatggattt

SEQ ID NO: 539125 - DNA, 33 bp, Homo sapien
actcccaagtgtctaaatgtccacttgggagtt

SEQ ID NO: 539126 - DNA, 33 bp, Homo sapien
actcccaagtgtctaagtgtccacttgggagtt

SEQ ID NO: 539127 - DNA, 33 bp, Homo sapien
gaggtgacgcctatacgaattctaaagaatttg

SEQ ID NO: 539128 - DNA, 33 bp, Homo sapien
gaggtgacgcctatactaattctaaagaatttg

SEQ ID NO: 539129 - DNA, 33 bp, Homo sapien
gcgtcccaagaaagcaaacgcaagagctcagga

SEQ ID NO: 539130 - DNA, 33 bp, Homo sapien
gcgtcccaagaaagcagacgcaagagctcagga

SEQ ID NO: 539131 - DNA, 33 bp, Homo sapien
acaaaggagccagaagacttccaaatgtcaatg

SEQ ID NO: 539132 - DNA, 33 bp, Homo sapien
acaaaggagccagaagccttccaaatgtcaatg

SEQ ID NO: 539133 - DNA, 33 bp, Homo sapien
ccagtacttcgcaggtaaagaccaacatggatc

SEQ ID NO: 539134 - DNA, 33 bp, Homo sapien
ccagtacttcgcaggtgaagaccaacatggatc

SEQ ID NO: 539135 - DNA, 33 bp, Homo sapien
tcatttcctgggtaaagcacaagacttagtcag

SEQ ID NO: 539136 - DNA, 33 bp, Homo sapien
tcatttcctgggtaaatcacaagacttagtcag

SEQ ID NO: 539137 - DNA, 33 bp, Homo sapien
ctggccggattgctaacgaacagatcagtgcct

SEQ ID NO: 539138 - DNA, 33 bp, Homo sapien
ctggccggattgctaatgaacagatcagtgcct

SEQ ID NO: 539139 - DNA, 33 bp, Homo sapien
gatacaggttggaagcaaagtctaatgattgtg

SEQ ID NO: 539140 - DNA, 33 bp, Homo sapien
gatacaggttggaagcgaagtctaatgattgtg

SEQ ID NO: 539141 - DNA, 33 bp, Homo sapien
cacagaatggctactacgtcaaatcctacaagc

SEQ ID NO: 539142 - DNA, 33 bp, Homo sapien
cacagaatggctactatgtcaaatcctacaagc

SEQ ID NO: 539143 - DNA, 33 bp, Homo sapien
aaaggacaataaataacgaggagaaattcagtt

SEQ ID NO: 539144 - DNA, 33 bp, Homo sapien
aaaggacaataaataatgaggagaaattcagtt

SEQ ID NO: 539145 - DNA, 33 bp, Homo sapien
catggcattgttaataaaacagtagaaggttca

SEQ ID NO: 539146 - DNA, 33 bp, Homo sapien
catggcattgttaatacaacagtagaaggttca

SEQ ID NO: 539147 - DNA, 33 bp, Homo sapien
acttccttcgtactgaaaaagggctccacagct

SEQ ID NO: 539148 - DNA, 33 bp, Homo sapien
acttccttcgtactgataaagggctccacagct

SEQ ID NO: 539149 - DNA, 33 bp, Homo sapien
catccccttcaaagacggctcaagtggctgaac

SEQ ID NO: 539150 - DNA, 33 bp, Homo sapien
catccccttcaaagactgctcaagtggctgaac

SEQ ID NO: 539151 - DNA, 33 bp, Homo sapien
tgcatttcatacttgcaaactgagctatggata

SEQ ID NO: 539152 - DNA, 33 bp, Homo sapien
tgcatttcatacttgctaactgagctatggata

SEQ ID NO: 539153 - DNA, 33 bp, Homo sapien
ccaagctcaagtgtcaaatccacagaaaagctg

SEQ ID NO: 539154 - DNA, 33 bp, Homo sapien
ccaagctcaagtgtcatatccacagaaaagctg

SEQ ID NO: 539155 - DNA, 33 bp, Homo sapien
ctcactgagaaccttacgggaaaatgaccccta

SEQ ID NO: 539156 - DNA, 33 bp, Homo sapien
ctcactgagaaccttatgggaaaatgaccccta

SEQ ID NO: 539157 - DNA, 33 bp, Homo sapien
caatggaggctttcacacattagaaaaagaagt

SEQ ID NO: 539158 - DNA, 33 bp, Homo sapien
caatggaggctttcacgcattagaaaaagaagt

SEQ ID NO: 539159 - DNA, 33 bp, Homo sapien
ccaaactgccttcccccctctctagccaaagtc

SEQ ID NO: 539160 - DNA, 33 bp, Homo sapien
ccaaactgccttccccgctctctagccaaagtc

SEQ ID NO: 539161 - DNA, 33 bp, Homo sapien
gctcatgtttgcacaaaactggatggacgggaa

SEQ ID NO: 539162 - DNA, 33 bp, Homo sapien
gctcatgtttgcacaacactggatggacgggaa

SEQ ID NO: 539163 - DNA, 33 bp, Homo sapien
agaaggatatcataaccatcatcttggtcaaaa

SEQ ID NO: 539164 - DNA, 33 bp, Homo sapien
agaaggatatcataactatcatcttggtcaaaa

SEQ ID NO: 539165 - DNA, 33 bp, Homo sapien
gtccttcatcaagaaacgggtccctaaagtatt

SEQ ID NO: 539166 - DNA, 33 bp, Homo sapien
gtccttcatcaagaaatgggtccctaaagtatt

SEQ ID NO: 539167 - DNA, 33 bp, Homo sapien
aaatgaagtgctggtgaaggaacatttcacata

SEQ ID NO: 539168 - DNA, 33 bp, Homo sapien
aaatgaagtgctggtggaggaacatttcacata

SEQ ID NO: 539169 - DNA, 33 bp, Homo sapien
gaggatgcatctttccagcttaatgcaaacagc

SEQ ID NO: 539170 - DNA, 33 bp, Homo sapien
gaggatgcatctttccggcttaatgcaaacagc

SEQ ID NO: 539171 - DNA, 33 bp, Homo sapien
gctgagttaccatataccctgatgattcccctt

SEQ ID NO: 539172 - DNA, 33 bp, Homo sapien
gctgagttaccatatagcctgatgattcccctt

SEQ ID NO: 539173 - DNA, 33 bp, Homo sapien
accactctcccggagccctttgaaagtagaatc

SEQ ID NO: 539174 - DNA, 33 bp, Homo sapien
accactctcccggagcgctttgaaagtagaatc

SEQ ID NO: 539175 - DNA, 33 bp, Homo sapien
atctagaaaccatgaactgctgggaggctgcct

SEQ ID NO: 539176 - DNA, 33 bp, Homo sapien
atctagaaaccatgaagtgctgggaggctgcct

SEQ ID NO: 539177 - DNA, 33 bp, Homo sapien
gtgatgacacctggtacctgtgaaaatgaatga

SEQ ID NO: 539178 - DNA, 33 bp, Homo sapien
gtgatgacacctggtatctgtgaaaatgaatga

SEQ ID NO: 539179 - DNA, 33 bp, Homo sapien
aatgtggttctctcatcaggtccctgtagttct

SEQ ID NO: 539180 - DNA, 33 bp, Homo sapien
aatgtggttctctcattaggtccctgtagttct

SEQ ID NO: 539181 - DNA, 33 bp, Homo sapien
tttggccagaaatgagaaagacttctaacatga

SEQ ID NO: 539182 - DNA, 33 bp, Homo sapien
tttggccagaaatgaggaagacttctaacatga

SEQ ID NO: 539183 - DNA, 33 bp, Homo sapien
caacttatagaaatcacaaccactgaaagttat

SEQ ID NO: 539184 - DNA, 33 bp, Homo sapien
caacttatagaaatcagaaccactgaaagttat

SEQ ID NO: 539185 - DNA, 33 bp, Homo sapien
ttcaaatggtaatgtcacagtgttttgtatgca

SEQ ID NO: 539186 - DNA, 33 bp, Homo sapien
ttcaaatggtaatgtcgcagtgttttgtatgca

SEQ ID NO: 539187 - DNA, 33 bp, Homo sapien
atggagttatggagataaatgataagataaatg

SEQ ID NO: 539188 - DNA, 33 bp, Homo sapien
atggagttatggagattaatgataagataaatg

SEQ ID NO: 539189 - DNA, 33 bp, Homo sapien
catacatatatacacaaccatgcatgaaatgca

SEQ ID NO: 539190 - DNA, 33 bp, Homo sapien
catacatatatacacacccatgcatgaaatgca

SEQ ID NO: 539191 - DNA, 33 bp, Homo sapien
cagtcttttgaaatacaaaaatcagtttccctt

SEQ ID NO: 539192 - DNA, 33 bp, Homo sapien
cagtcttttgaaatacgaaaatcagtttccctt

SEQ ID NO: 539193 - DNA, 33 bp, Homo sapien
agtgcatctcatgtgcaaggtcgtttcataggt

SEQ ID NO: 539194 - DNA, 33 bp, Homo sapien
agtgcatctcatgtgccaggtcgtttcataggt

SEQ ID NO: 539195 - DNA, 33 bp, Homo sapien
agctcgttgtttaaaaaactctgtcacctctct

SEQ ID NO: 539196 - DNA, 33 bp, Homo sapien
agctcgttgtttaaaagactctgtcacctctct

SEQ ID NO: 539197 - DNA, 33 bp, Homo sapien
gcttggagtcatcttcaagtaatgagttattgc

SEQ ID NO: 539198 - DNA, 33 bp, Homo sapien
gcttggagtcatcttcgagtaatgagttattgc

SEQ ID NO: 539199 - DNA, 33 bp, Homo sapien
gtcatccagttagacaagttttgccgggggtaa

SEQ ID NO: 539200 - DNA, 33 bp, Homo sapien
gtcatccagttagacacgttttgccgggggtaa

SEQ ID NO: 539201 - DNA, 33 bp, Homo sapien
atctaggaaatgaagcccctagtccaacagtct

SEQ ID NO: 539202 - DNA, 33 bp, Homo sapien
atctaggaaatgaagctcctagtccaacagtct

SEQ ID NO: 539203 - DNA, 33 bp, Homo sapien
tcagtcatcaggaatgaatcagccatggccaga

SEQ ID NO: 539204 - DNA, 33 bp, Homo sapien
tcagtcatcaggaatgcatcagccatggccaga

SEQ ID NO: 539205 - DNA, 33 bp, Homo sapien
agaaaacataaaagatgaatgactgaacccatc

SEQ ID NO: 539206 - DNA, 33 bp, Homo sapien
agaaaacataaaagattaatgactgaacccatc

SEQ ID NO: 539207 - DNA, 33 bp, Homo sapien
tcactcctgcctggaaaagagctgaagtcatcc

SEQ ID NO: 539208 - DNA, 33 bp, Homo sapien
tcactcctgcctggaagagagctgaagtcatcc

SEQ ID NO: 539209 - DNA, 33 bp, Homo sapien
cctgatgctggagaaactgtggtttagcgggag

SEQ ID NO: 539210 - DNA, 33 bp, Homo sapien
cctgatgctggagaaagtgtggtttagcgggag

SEQ ID NO: 539211 - DNA, 33 bp, Homo sapien
acacaattcctggtgaaaaggagattatgtaaa

SEQ ID NO: 539212 - DNA, 33 bp, Homo sapien
acacaattcctggtgagaaggagattatgtaaa

SEQ ID NO: 539213 - DNA, 33 bp, Homo sapien
catgagaatccaagcccatcactagaatgcttc

SEQ ID NO: 539214 - DNA, 33 bp, Homo sapien
catgagaatccaagcctatcactagaatgcttc

SEQ ID NO: 539215 - DNA, 33 bp, Homo sapien
gattctcatgaccaacaatggtactcccgaaag

SEQ ID NO: 539216 - DNA, 33 bp, Homo sapien
gattctcatgaccaacgatggtactcccgaaag

SEQ ID NO: 539217 - DNA, 33 bp, Homo sapien
cctgagcaaatggtcaaatgcctgggattagac

SEQ ID NO: 539218 - DNA, 33 bp, Homo sapien
cctgagcaaatggtcagatgcctgggattagac

SEQ ID NO: 539219 - DNA, 33 bp, Homo sapien
ggaactgtatgaagaccctctgaagaactggct

SEQ ID NO: 539220 - DNA, 33 bp, Homo sapien
ggaactgtatgaagactctctgaagaactggct

SEQ ID NO: 539221 - DNA, 33 bp, Homo sapien
ataataatgttttccaataactgaattgagcat

SEQ ID NO: 539222 - DNA, 33 bp, Homo sapien
ataataatgttttccagtaactgaattgagcat

SEQ ID NO: 539223 - DNA, 33 bp, Homo sapien
ttctttctgttttcaggaaaaagatagagatta

SEQ ID NO: 539224 - DNA, 33 bp, Homo sapien
ttctttctgttttcagtaaaaagatagagatta

SEQ ID NO: 539225 - DNA, 33 bp, Homo sapien
gtgaattggcctcgtccagtcccttgaaggtct

SEQ ID NO: 539226 - DNA, 33 bp, Homo sapien
gtgaattggcctcgtctagtcccttgaaggtct

SEQ ID NO: 539227 - DNA, 33 bp, Homo sapien
ggaaatcaattataacccttctcagcttaacac

SEQ ID NO: 539228 - DNA, 33 bp, Homo sapien
ggaaatcaattataactcttctcagcttaacac

SEQ ID NO: 539229 - DNA, 33 bp, Homo sapien
gtgagggaaatcgctgcacttggcttatttctg

SEQ ID NO: 539230 - DNA, 33 bp, Homo sapien
gtgagggaaatcgctggacttggcttatttctg

SEQ ID NO: 539231 - DNA, 33 bp, Homo sapien
attcacacacgaaagacgtgagaagccaggacc

SEQ ID NO: 539232 - DNA, 33 bp, Homo sapien
attcacacacgaaagatgtgagaagccaggacc

SEQ ID NO: 539233 - DNA, 33 bp, Homo sapien
tattttgaaagcaaataatcatgactgggtgtg

SEQ ID NO: 539234 - DNA, 33 bp, Homo sapien
tattttgaaagcaaatcatcatgactgggtgtg

SEQ ID NO: 539235 - DNA, 33 bp, Homo sapien
ctgggcccaattttggcaacttgctcaatattc

SEQ ID NO: 539236 - DNA, 33 bp, Homo sapien
ctgggcccaattttgggaacttgctcaatattc

SEQ ID NO: 539237 - DNA, 33 bp, Homo sapien
ttgaatatcagcaacacacgctccttctgaaca

SEQ ID NO: 539238 - DNA, 33 bp, Homo sapien
ttgaatatcagcaacatacgctccttctgaaca

SEQ ID NO: 539239 - DNA, 33 bp, Homo sapien
tcatccaaccgttacaaagaacatggttttgcc

SEQ ID NO: 539240 - DNA, 33 bp, Homo sapien
tcatccaaccgttacacagaacatggttttgcc

SEQ ID NO: 539241 - DNA, 33 bp, Homo sapien
tattctgagatagttacagtgagtgtgtaccct

SEQ ID NO: 539242 - DNA, 33 bp, Homo sapien
tattctgagatagttatagtgagtgtgtaccct

SEQ ID NO: 539243 - DNA, 33 bp, Homo sapien
tgacattgctagactaccaccaaagacacagct

SEQ ID NO: 539244 - DNA, 33 bp, Homo sapien
tgacattgctagactatcaccaaagacacagct

SEQ ID NO: 539245 - DNA, 33 bp, Homo sapien
taagatcctgggtacaataagagtagccactgc

SEQ ID NO: 539246 - DNA, 33 bp, Homo sapien
taagatcctgggtacagtaagagtagccactgc

SEQ ID NO: 539247 - DNA, 33 bp, Homo sapien
cctcccatgccatagaaatgaacacagagagaa

SEQ ID NO: 539248 - DNA, 33 bp, Homo sapien
cctcccatgccatagagatgaacacagagagaa

SEQ ID NO: 539249 - DNA, 33 bp, Homo sapien
aagagtgtgccttaggaaagcgtggaggtgaat

SEQ ID NO: 539250 - DNA, 33 bp, Homo sapien
aagagtgtgccttagggaagcgtggaggtgaat

SEQ ID NO: 539251 - DNA, 33 bp, Homo sapien
ttcctcagctctgtccagcacagttataggagt

SEQ ID NO: 539252 - DNA, 33 bp, Homo sapien
ttcctcagctctgtccggcacagttataggagt

SEQ ID NO: 539253 - DNA, 33 bp, Homo sapien
tagcttccagccatggaaaagacttgtgcagaa

SEQ ID NO: 539254 - DNA, 33 bp, Homo sapien
tagcttccagccatgggaaagacttgtgcagaa

SEQ ID NO: 539255 - DNA, 33 bp, Homo sapien
ctgtcgttgtgtccatcacgctgcattgtaact

SEQ ID NO: 539256 - DNA, 33 bp, Homo sapien
ctgtcgttgtgtccattacgctgcattgtaact

SEQ ID NO: 539257 - DNA, 33 bp, Homo sapien
aatgcataacctcaggaagattgtgtgacattt

SEQ ID NO: 539258 - DNA, 33 bp, Homo sapien
aatgcataacctcaggcagattgtgtgacattt

SEQ ID NO: 539259 - DNA, 33 bp, Homo sapien
ctagccttggactctacgcattaacagttaaat

SEQ ID NO: 539260 - DNA, 33 bp, Homo sapien
ctagccttggactctatgcattaacagttaaat

SEQ ID NO: 539261 - DNA, 33 bp, Homo sapien
ttagtccataacacaaccatgtgccataaaata

SEQ ID NO: 539262 - DNA, 33 bp, Homo sapien
ttagtccataacacaatcatgtgccataaaata

SEQ ID NO: 539263 - DNA, 33 bp, Homo sapien
gacaagaaaagagcacagaactaacagcatcaa

SEQ ID NO: 539264 - DNA, 33 bp, Homo sapien
gacaagaaaagagcacggaactaacagcatcaa

SEQ ID NO: 539265 - DNA, 33 bp, Homo sapien
acattcttgttttaacggaggactggaggagtg

SEQ ID NO: 539266 - DNA, 33 bp, Homo sapien
acattcttgttttaactgaggactggaggagtg

SEQ ID NO: 539267 - DNA, 33 bp, Homo sapien
ccatcgcccaactccaataaaaaattatctgac

SEQ ID NO: 539268 - DNA, 33 bp, Homo sapien
ccatcgcccaactccagtaaaaaattatctgac

SEQ ID NO: 539269 - DNA, 33 bp, Homo sapien
ctactgcttctaggaactggctaacctaccaga

SEQ ID NO: 539270 - DNA, 33 bp, Homo sapien
ctactgcttctaggaattggctaacctaccaga

SEQ ID NO: 539271 - DNA, 33 bp, Homo sapien
gaaatctctaaggtaaatcaatcatgggggcag

SEQ ID NO: 539272 - DNA, 33 bp, Homo sapien
gaaatctctaaggtaagtcaatcatgggggcag

SEQ ID NO: 539273 - DNA, 33 bp, Homo sapien
cagaccaataaaatcacacatacacccaaatgt

SEQ ID NO: 539274 - DNA, 33 bp, Homo sapien
cagaccaataaaatcatacatacacccaaatgt

SEQ ID NO: 539275 - DNA, 33 bp, Homo sapien
tattcagaggggagaaattcacacgctggctag

SEQ ID NO: 539276 - DNA, 33 bp, Homo sapien
tattcagaggggagaagttcacacgctggctag

SEQ ID NO: 539277 - DNA, 33 bp, Homo sapien
tctaatttgaccttgcactccaaaaatgagcac

SEQ ID NO: 539278 - DNA, 33 bp, Homo sapien
tctaatttgaccttgcgctccaaaaatgagcac

SEQ ID NO: 539279 - DNA, 33 bp, Homo sapien
ctggaaggaagaggaacggaagccaggaaggca

SEQ ID NO: 539280 - DNA, 33 bp, Homo sapien
ctggaaggaagaggaatggaagccaggaaggca

SEQ ID NO: 539281 - DNA, 33 bp, Homo sapien
atgcttctggaaactacaaccagatgtgctctt

SEQ ID NO: 539282 - DNA, 33 bp, Homo sapien
atgcttctggaaactataaccagatgtgctctt

SEQ ID NO: 539283 - DNA, 33 bp, Homo sapien
gacctagtaaccttcaatatgagctctgggtgg

SEQ ID NO: 539284 - DNA, 33 bp, Homo sapien
gacctagtaaccttcagtatgagctctgggtgg

SEQ ID NO: 539285 - DNA, 33 bp, Homo sapien
ggaaagtactctccgacctaatttgtttcatag

SEQ ID NO: 539286 - DNA, 33 bp, Homo sapien
ggaaagtactctccgatctaatttgtttcatag

SEQ ID NO: 539287 - DNA, 33 bp, Homo sapien
gaactttgggtgcatacagagcttacttcagtg

SEQ ID NO: 539288 - DNA, 33 bp, Homo sapien
gaactttgggtgcatatagagcttacttcagtg

SEQ ID NO: 539289 - DNA, 33 bp, Homo sapien
ttctgttgaccatttaaaagaccataatattag

SEQ ID NO: 539290 - DNA, 33 bp, Homo sapien
ttctgttgaccatttagaagaccataatattag

SEQ ID NO: 539291 - DNA, 33 bp, Homo sapien
cagttgatttactgaaaaccatctcaaaaacca

SEQ ID NO: 539292 - DNA, 33 bp, Homo sapien
cagttgatttactgaataccatctcaaaaacca

SEQ ID NO: 539293 - DNA, 33 bp, Homo sapien
ctctcagttcatttcacgggttatctttcaaaa

SEQ ID NO: 539294 - DNA, 33 bp, Homo sapien
ctctcagttcatttcatgggttatctttcaaaa

SEQ ID NO: 539295 - DNA, 33 bp, Homo sapien
gctgataattacatcacaatatgtttcaagtat

SEQ ID NO: 539296 - DNA, 33 bp, Homo sapien
gctgataattacatcagaatatgtttcaagtat

SEQ ID NO: 539297 - DNA, 33 bp, Homo sapien
tgtaatccctgacttaacaaatgctgtttagga

SEQ ID NO: 539298 - DNA, 33 bp, Homo sapien
tgtaatccctgacttatcaaatgctgtttagga

SEQ ID NO: 539299 - DNA, 33 bp, Homo sapien
tactttattaagacaaccaaacagcaaaatggt

SEQ ID NO: 539300 - DNA, 33 bp, Homo sapien
tactttattaagacaatcaaacagcaaaatggt

SEQ ID NO: 539301 - DNA, 33 bp, Homo sapien
ttcttttgagtttgaactgctcgttggatattt

SEQ ID NO: 539302 - DNA, 33 bp, Homo sapien
ttcttttgagtttgaattgctcgttggatattt

SEQ ID NO: 539303 - DNA, 33 bp, Homo sapien
atgagaaattggttaacaggcacaatgtatgtc

SEQ ID NO: 539304 - DNA, 33 bp, Homo sapien
atgagaaattggttaataggcacaatgtatgtc

SEQ ID NO: 539305 - DNA, 33 bp, Homo sapien
ggaatttagaattccacacgcagcttttatttg

SEQ ID NO: 539306 - DNA, 33 bp, Homo sapien
ggaatttagaattccatacgcagcttttatttg

SEQ ID NO: 539307 - DNA, 33 bp, Homo sapien
tccactacctggaaaccgaattggaagacccat

SEQ ID NO: 539308 - DNA, 33 bp, Homo sapien
tccactacctggaaactgaattggaagacccat

SEQ ID NO: 539309 - DNA, 33 bp, Homo sapien
ttgtgggtgagtagagaaaagatggtgaaaaat

SEQ ID NO: 539310 - DNA, 33 bp, Homo sapien
ttgtgggtgagtagagcaaagatggtgaaaaat

SEQ ID NO: 539311 - DNA, 33 bp, Homo sapien
gcggacccaatgtaataagaagcatctgtatga

SEQ ID NO: 539312 - DNA, 33 bp, Homo sapien
gcggacccaatgtaatcagaagcatctgtatga

SEQ ID NO: 539313 - DNA, 33 bp, Homo sapien
ctagatactaatggcaagagtgtttaattagaa

SEQ ID NO: 539314 - DNA, 33 bp, Homo sapien
ctagatactaatggcaggagtgtttaattagaa

SEQ ID NO: 539315 - DNA, 33 bp, Homo sapien
gccttattcacctaaagagacttgatcttgagc

SEQ ID NO: 539316 - DNA, 33 bp, Homo sapien
gccttattcacctaaatagacttgatcttgagc

SEQ ID NO: 539317 - DNA, 33 bp, Homo sapien
ccactttggaaaattcaccataaattgctacac

SEQ ID NO: 539318 - DNA, 33 bp, Homo sapien
ccactttggaaaattcgccataaattgctacac

SEQ ID NO: 539319 - DNA, 33 bp, Homo sapien
aatcaagtgtaagaaaatcgtagaataatatat

SEQ ID NO: 539320 - DNA, 33 bp, Homo sapien
aatcaagtgtaagaaagtcgtagaataatatat

SEQ ID NO: 539321 - DNA, 33 bp, Homo sapien
tttgactattcatccaccttgctttgctctcta

SEQ ID NO: 539322 - DNA, 33 bp, Homo sapien
tttgactattcatccatcttgctttgctctcta

SEQ ID NO: 539323 - DNA, 33 bp, Homo sapien
acataaggtgaagtcacgccaaggatcctgaga

SEQ ID NO: 539324 - DNA, 33 bp, Homo sapien
acataaggtgaagtcatgccaaggatcctgaga

SEQ ID NO: 539325 - DNA, 33 bp, Homo sapien
cctaaaatagatagtggcaatgggaatgaaaac

SEQ ID NO: 539326 - DNA, 33 bp, Homo sapien
cctaaaatagatagtgtcaatgggaatgaaaac

SEQ ID NO: 539327 - DNA, 33 bp, Homo sapien
aggccaggtaaaatcacctttgtatagagctga

SEQ ID NO: 539328 - DNA, 33 bp, Homo sapien
aggccaggtaaaatcatctttgtatagagctga

SEQ ID NO: 539329 - DNA, 33 bp, Homo sapien
cagtgctactccaaatcacattcccaacactta

SEQ ID NO: 539330 - DNA, 33 bp, Homo sapien
cagtgctactccaaatgacattcccaacactta

SEQ ID NO: 539331 - DNA, 33 bp, Homo sapien
tatttgaagaatttgaaaactattcctatgacc

SEQ ID NO: 539332 - DNA, 33 bp, Homo sapien
tatttgaagaatttgagaactattcctatgacc

SEQ ID NO: 539333 - DNA, 33 bp, Homo sapien
ggaattacaggagtgaataactgtgcccagccc

SEQ ID NO: 539334 - DNA, 33 bp, Homo sapien
ggaattacaggagtgagtaactgtgcccagccc

SEQ ID NO: 539335 - DNA, 33 bp, Homo sapien
tgttcaaggttttcaacgccaactcaagaaaaa

SEQ ID NO: 539336 - DNA, 33 bp, Homo sapien
tgttcaaggttttcaatgccaactcaagaaaaa

SEQ ID NO: 539337 - DNA, 33 bp, Homo sapien
atcatgacctgaattccctgcaggccaagatag

SEQ ID NO: 539338 - DNA, 33 bp, Homo sapien
atcatgacctgaattctctgcaggccaagatag

SEQ ID NO: 539339 - DNA, 33 bp, Homo sapien
gtggctgcaatctcaacatattctgcaaggtcc

SEQ ID NO: 539340 - DNA, 33 bp, Homo sapien
gtggctgcaatctcaatatattctgcaaggtcc

SEQ ID NO: 539341 - DNA, 33 bp, Homo sapien
tgcagtgactttaacaacagagtcagaaccagc

SEQ ID NO: 539342 - DNA, 33 bp, Homo sapien
tgcagtgactttaacagcagagtcagaaccagc

SEQ ID NO: 539343 - DNA, 33 bp, Homo sapien
atataaggatgagtaaaagttattccttgccct

SEQ ID NO: 539344 - DNA, 33 bp, Homo sapien
atataaggatgagtaacagttattccttgccct

SEQ ID NO: 539345 - DNA, 33 bp, Homo sapien
ctgaatgaattgggtagagttcctccatgttaa

SEQ ID NO: 539346 - DNA, 33 bp, Homo sapien
ctgaatgaattgggtatagttcctccatgttaa

SEQ ID NO: 539347 - DNA, 33 bp, Homo sapien
cagcttattctgtttcaatgcagcagaataaag

SEQ ID NO: 539348 - DNA, 33 bp, Homo sapien
cagcttattctgtttcgatgcagcagaataaag

SEQ ID NO: 539349 - DNA, 33 bp, Homo sapien
attttcgttagtaccaaattgtccctaatggca

SEQ ID NO: 539350 - DNA, 33 bp, Homo sapien
attttcgttagtaccacattgtccctaatggca

SEQ ID NO: 539351 - DNA, 33 bp, Homo sapien
gctcaaatagagagaacagaaagatgtcgtgag

SEQ ID NO: 539352 - DNA, 33 bp, Homo sapien
gctcaaatagagagaatagaaagatgtcgtgag

SEQ ID NO: 539353 - DNA, 33 bp, Homo sapien
atcttgttagtcaggccgatctcacactccgga

SEQ ID NO: 539354 - DNA, 33 bp, Homo sapien
atcttgttagtcaggctgatctcacactccgga

SEQ ID NO: 539355 - DNA, 33 bp, Homo sapien
agcaactatttttccccggagtcaggtcagtgc

SEQ ID NO: 539356 - DNA, 33 bp, Homo sapien
agcaactatttttccctggagtcaggtcagtgc

SEQ ID NO: 539357 - DNA, 33 bp, Homo sapien
ctgggtcatcgtctgaagtggtgcatttggatg

SEQ ID NO: 539358 - DNA, 33 bp, Homo sapien
ctgggtcatcgtctgaggtggtgcatttggatg

SEQ ID NO: 539359 - DNA, 33 bp, Homo sapien
attggggccagtgtgaaaaaatgtaacctagta

SEQ ID NO: 539360 - DNA, 33 bp, Homo sapien
attggggccagtgtgagaaaatgtaacctagta

SEQ ID NO: 539361 - DNA, 33 bp, Homo sapien
ctgatgtttctgtccaatctgtggctgatcaac

SEQ ID NO: 539362 - DNA, 33 bp, Homo sapien
ctgatgtttctgtccagtctgtggctgatcaac

SEQ ID NO: 539363 - DNA, 33 bp, Homo sapien
gtattcttatgtcagaccacctctctttccaca

SEQ ID NO: 539364 - DNA, 33 bp, Homo sapien
gtattcttatgtcagatcacctctctttccaca

SEQ ID NO: 539365 - DNA, 33 bp, Homo sapien
tgagggagctggttgtaaaaatagtaatttcca

SEQ ID NO: 539366 - DNA, 33 bp, Homo sapien
tgagggagctggttgtcaaaatagtaatttcca

SEQ ID NO: 539367 - DNA, 33 bp, Homo sapien
aattgtatttggatagaattaagtgactttttc

SEQ ID NO: 539368 - DNA, 33 bp, Homo sapien
aattgtatttggatagtattaagtgactttttc

SEQ ID NO: 539369 - DNA, 33 bp, Homo sapien
gcttgcttcagacataaccctgagaaatggccc

SEQ ID NO: 539370 - DNA, 33 bp, Homo sapien
gcttgcttcagacatagccctgagaaatggccc

SEQ ID NO: 539371 - DNA, 33 bp, Homo sapien
atgaaaaacgtttgaacttaatcatagttgaag

SEQ ID NO: 539372 - DNA, 33 bp, Homo sapien
atgaaaaacgtttgaagttaatcatagttgaag

SEQ ID NO: 539373 - DNA, 33 bp, Homo sapien
acaaggatctcagaaaactaaaataagatgaga

SEQ ID NO: 539374 - DNA, 33 bp, Homo sapien
acaaggatctcagaaagctaaaataagatgaga

SEQ ID NO: 539375 - DNA, 33 bp, Homo sapien
ttcacatattttcccaaacttcatctattccta

SEQ ID NO: 539376 - DNA, 33 bp, Homo sapien
ttcacatattttcccacacttcatctattccta

SEQ ID NO: 539377 - DNA, 33 bp, Homo sapien
ctctgggctaggagcaccatacttccaaacaag

SEQ ID NO: 539378 - DNA, 33 bp, Homo sapien
ctctgggctaggagcagcatacttccaaacaag

SEQ ID NO: 539379 - DNA, 33 bp, Homo sapien
actctggagattccaacggtcttcgaagctgtg

SEQ ID NO: 539380 - DNA, 33 bp, Homo sapien
actctggagattccaagggtcttcgaagctgtg

SEQ ID NO: 539381 - DNA, 33 bp, Homo sapien
gcattatttagggacacatgctgaagcaagact

SEQ ID NO: 539382 - DNA, 33 bp, Homo sapien
gcattatttagggacatatgctgaagcaagact

SEQ ID NO: 539383 - DNA, 33 bp, Homo sapien
agggaataggtctctacgtagcctctgaaagaa

SEQ ID NO: 539384 - DNA, 33 bp, Homo sapien
agggaataggtctctatgtagcctctgaaagaa

SEQ ID NO: 539385 - DNA, 33 bp, Homo sapien
tgccttgttatccacacggagcaatcctaataa

SEQ ID NO: 539386 - DNA, 33 bp, Homo sapien
tgccttgttatccacatggagcaatcctaataa

SEQ ID NO: 539387 - DNA, 33 bp, Homo sapien
ataagtgaattagaacagtgtattagtttgcta

SEQ ID NO: 539388 - DNA, 33 bp, Homo sapien
ataagtgaattagaacggtgtattagtttgcta

SEQ ID NO: 539389 - DNA, 33 bp, Homo sapien
gcctctaggacatataaaatgcaatatttgact

SEQ ID NO: 539390 - DNA, 33 bp, Homo sapien
gcctctaggacatatacaatgcaatatttgact

SEQ ID NO: 539391 - DNA, 33 bp, Homo sapien
aattaacttctgctggaatttttatacattatt

SEQ ID NO: 539392 - DNA, 33 bp, Homo sapien
aattaacttctgctgggatttttatacattatt

SEQ ID NO: 539393 - DNA, 33 bp, Homo sapien
acaaaagtgtccactactaaatttctgggtctt

SEQ ID NO: 539394 - DNA, 33 bp, Homo sapien
acaaaagtgtccactattaaatttctgggtctt

SEQ ID NO: 539395 - DNA, 33 bp, Homo sapien
tttttcattgtcagaaatctttgtacttttgag

SEQ ID NO: 539396 - DNA, 33 bp, Homo sapien
tttttcattgtcagaagtctttgtacttttgag

SEQ ID NO: 539397 - DNA, 33 bp, Homo sapien
tttcttgttaggaaaccgtgacactacttcttt

SEQ ID NO: 539398 - DNA, 33 bp, Homo sapien
tttcttgttaggaaactgtgacactacttcttt

SEQ ID NO: 539399 - DNA, 33 bp, Homo sapien
ctccctatacaatgtgaaaatacaaaatatgtg

SEQ ID NO: 539400 - DNA, 33 bp, Homo sapien
ctccctatacaatgtggaaatacaaaatatgtg

SEQ ID NO: 539401 - DNA, 33 bp, Homo sapien
tgagttaaaataaaaacagtgactgccacaatg

SEQ ID NO: 539402 - DNA, 33 bp, Homo sapien
tgagttaaaataaaaatagtgactgccacaatg

SEQ ID NO: 539403 - DNA, 33 bp, Homo sapien
gcatagtctgagttaaatactgcatattcatgg

SEQ ID NO: 539404 - DNA, 33 bp, Homo sapien
gcatagtctgagttaagtactgcatattcatgg

SEQ ID NO: 539405 - DNA, 33 bp, Homo sapien
aggagctcgagaggtcaaaaagaagcgtgtaat

SEQ ID NO: 539406 - DNA, 33 bp, Homo sapien
aggagctcgagaggtccaaaagaagcgtgtaat

SEQ ID NO: 539407 - DNA, 33 bp, Homo sapien
ctccagtatagctctacaataaatgaaggtgac

SEQ ID NO: 539408 - DNA, 33 bp, Homo sapien
ctccagtatagctctataataaatgaaggtgac

SEQ ID NO: 539409 - DNA, 33 bp, Homo sapien
ttgagtatatgcctagaagtagaactgctgggt

SEQ ID NO: 539410 - DNA, 33 bp, Homo sapien
ttgagtatatgcctaggagtagaactgctgggt

SEQ ID NO: 539411 - DNA, 33 bp, Homo sapien
gatatttgaaagatagcagaaataggagaaatg

SEQ ID NO: 539412 - DNA, 33 bp, Homo sapien
gatatttgaaagataggagaaataggagaaatg

SEQ ID NO: 539413 - DNA, 33 bp, Homo sapien
ctttgtgttgaaaggcagagtatttcttctgtt

SEQ ID NO: 539414 - DNA, 33 bp, Homo sapien
ctttgtgttgaaaggccgagtatttcttctgtt

SEQ ID NO: 539415 - DNA, 33 bp, Homo sapien
agttgggtacttgtcaaaactgagcagtgccat

SEQ ID NO: 539416 - DNA, 33 bp, Homo sapien
agttgggtacttgtcagaactgagcagtgccat

SEQ ID NO: 539417 - DNA, 33 bp, Homo sapien
tttcctgcggtaaaaaacagaaagctaacttgt

SEQ ID NO: 539418 - DNA, 33 bp, Homo sapien
tttcctgcggtaaaaaccagaaagctaacttgt

SEQ ID NO: 539419 - DNA, 33 bp, Homo sapien
ttgtcatttactgtctcacttcaaagtgaagag

SEQ ID NO: 539420 - DNA, 33 bp, Homo sapien
ttgtcatttactgtcttacttcaaagtgaagag

SEQ ID NO: 539421 - DNA, 33 bp, Homo sapien
taaaaatttgaatcaacgtggaccgaatcgttt

SEQ ID NO: 539422 - DNA, 33 bp, Homo sapien
taaaaatttgaatcaatgtggaccgaatcgttt

SEQ ID NO: 539423 - DNA, 33 bp, Homo sapien
gaagatggcttaacaaatacctaatcatatata

SEQ ID NO: 539424 - DNA, 33 bp, Homo sapien
gaagatggcttaacaagtacctaatcatatata

SEQ ID NO: 539425 - DNA, 33 bp, Homo sapien
acccactattactgaaaaattcacatgcgcctg

SEQ ID NO: 539426 - DNA, 33 bp, Homo sapien
acccactattactgaacaattcacatgcgcctg

SEQ ID NO: 539427 - DNA, 33 bp, Homo sapien
accagttggatcatgacaaaaaagatacaacat

SEQ ID NO: 539428 - DNA, 33 bp, Homo sapien
accagttggatcatgagaaaaaagatacaacat

SEQ ID NO: 539429 - DNA, 33 bp, Homo sapien
agtgactgaatgaacactactctatcaattaaa

SEQ ID NO: 539430 - DNA, 33 bp, Homo sapien
agtgactgaatgaacattactctatcaattaaa

SEQ ID NO: 539431 - DNA, 33 bp, Homo sapien
gagaaattctaggtgacggtaggaaaagaaatg

SEQ ID NO: 539432 - DNA, 33 bp, Homo sapien
gagaaattctaggtgatggtaggaaaagaaatg

SEQ ID NO: 539433 - DNA, 33 bp, Homo sapien
tgggtcacctttctcaaccagttactaaggaag

SEQ ID NO: 539434 - DNA, 33 bp, Homo sapien
tgggtcacctttctcagccagttactaaggaag

SEQ ID NO: 539435 - DNA, 33 bp, Homo sapien
ggtaggctgaagcagacatggaaggtgagaaaa

SEQ ID NO: 539436 - DNA, 33 bp, Homo sapien
ggtaggctgaagcagatatggaaggtgagaaaa

SEQ ID NO: 539437 - DNA, 33 bp, Homo sapien
gtaggcaatattttgaaccatcagagaaaagtg

SEQ ID NO: 539438 - DNA, 33 bp, Homo sapien
gtaggcaatattttgagccatcagagaaaagtg

SEQ ID NO: 539439 - DNA, 33 bp, Homo sapien
tctacctgaagtcatccgagaacttgaagcatg

SEQ ID NO: 539440 - DNA, 33 bp, Homo sapien
tctacctgaagtcatctgagaacttgaagcatg

SEQ ID NO: 539441 - DNA, 33 bp, Homo sapien
tggaacacttgtgaaactggcagtccagagaaa

SEQ ID NO: 539442 - DNA, 33 bp, Homo sapien
tggaacacttgtgaaattggcagtccagagaaa

SEQ ID NO: 539443 - DNA, 33 bp, Homo sapien
gccatcacgatgtctacggattgtgaaaacctt

SEQ ID NO: 539444 - DNA, 33 bp, Homo sapien
gccatcacgatgtctatggattgtgaaaacctt

SEQ ID NO: 539445 - DNA, 33 bp, Homo sapien
taagcataacaaaaatcaccaggctaagtaagt

SEQ ID NO: 539446 - DNA, 33 bp, Homo sapien
taagcataacaaaaatgaccaggctaagtaagt

SEQ ID NO: 539447 - DNA, 33 bp, Homo sapien
tgagtatgtgcaaataccgaccacagagagaaa

SEQ ID NO: 539448 - DNA, 33 bp, Homo sapien
tgagtatgtgcaaatatcgaccacagagagaaa

SEQ ID NO: 539449 - DNA, 33 bp, Homo sapien
actaggaatgaactgccgaggactcatgaatcc

SEQ ID NO: 539450 - DNA, 33 bp, Homo sapien
actaggaatgaactgctgaggactcatgaatcc

SEQ ID NO: 539451 - DNA, 33 bp, Homo sapien
gacgcagatgtttacacgctcaaagtacaactg

SEQ ID NO: 539452 - DNA, 33 bp, Homo sapien
gacgcagatgtttacatgctcaaagtacaactg

SEQ ID NO: 539453 - DNA, 33 bp, Homo sapien
tcatgctagagtgtgcaacagagagctggactg

SEQ ID NO: 539454 - DNA, 33 bp, Homo sapien
tcatgctagagtgtgcgacagagagctggactg

SEQ ID NO: 539455 - DNA, 33 bp, Homo sapien
acacttaactgcaatacggaaactccagttttt

SEQ ID NO: 539456 - DNA, 33 bp, Homo sapien
acacttaactgcaatatggaaactccagttttt

SEQ ID NO: 539457 - DNA, 33 bp, Homo sapien
ccatatgtaaatgagaataggctttgtgtcttc

SEQ ID NO: 539458 - DNA, 33 bp, Homo sapien
ccatatgtaaatgagagtaggctttgtgtcttc

SEQ ID NO: 539459 - DNA, 33 bp, Homo sapien
atttagtgcaaatgcaagaatagacacatagat

SEQ ID NO: 539460 - DNA, 33 bp, Homo sapien
atttagtgcaaatgcaggaatagacacatagat

SEQ ID NO: 539461 - DNA, 33 bp, Homo sapien
tgcaaaaagctatgccaatgatgccacagagtt

SEQ ID NO: 539462 - DNA, 33 bp, Homo sapien
tgcaaaaagctatgcccatgatgccacagagtt

SEQ ID NO: 539463 - DNA, 33 bp, Homo sapien
aaacctatccagattaccaacagtgccatagaa

SEQ ID NO: 539464 - DNA, 33 bp, Homo sapien
aaacctatccagattatcaacagtgccatagaa

SEQ ID NO: 539465 - DNA, 33 bp, Homo sapien
gaactaagaatgaaaaattgtatctatagcata

SEQ ID NO: 539466 - DNA, 33 bp, Homo sapien
gaactaagaatgaaaatttgtatctatagcata

SEQ ID NO: 539467 - DNA, 33 bp, Homo sapien
gaaaaacctttccaaacactttcatatcacatc

SEQ ID NO: 539468 - DNA, 33 bp, Homo sapien
gaaaaacctttccaaatactttcatatcacatc

SEQ ID NO: 539469 - DNA, 33 bp, Homo sapien
attggggtctcactccaggactcttactctttc

SEQ ID NO: 539470 - DNA, 33 bp, Homo sapien
attggggtctcactcccggactcttactctttc

SEQ ID NO: 539471 - DNA, 33 bp, Homo sapien
gaatacttgcaatgtacctttgaagagtacttg

SEQ ID NO: 539472 - DNA, 33 bp, Homo sapien
gaatacttgcaatgtatctttgaagagtacttg

SEQ ID NO: 539473 - DNA, 33 bp, Homo sapien
ggaagaaactaccaaacgtatcacgcccaaagc

SEQ ID NO: 539474 - DNA, 33 bp, Homo sapien
ggaagaaactaccaaatgtatcacgcccaaagc

SEQ ID NO: 539475 - DNA, 33 bp, Homo sapien
ttgctcagctacatcaatatatttattttccac

SEQ ID NO: 539476 - DNA, 33 bp, Homo sapien
ttgctcagctacatcagtatatttattttccac

SEQ ID NO: 539477 - DNA, 33 bp, Homo sapien
gaggaccactggcctaaagcatctattttggat

SEQ ID NO: 539478 - DNA, 33 bp, Homo sapien
gaggaccactggcctacagcatctattttggat

SEQ ID NO: 539479 - DNA, 33 bp, Homo sapien
ccaaaaatgacaaagcaatcatatgtttctctc

SEQ ID NO: 539480 - DNA, 33 bp, Homo sapien
ccaaaaatgacaaagctatcatatgtttctctc

SEQ ID NO: 539481 - DNA, 33 bp, Homo sapien
gattcatgctaatgtcaaaaatcatggtctgga

SEQ ID NO: 539482 - DNA, 33 bp, Homo sapien
gattcatgctaatgtcgaaaatcatggtctgga

SEQ ID NO: 539483 - DNA, 33 bp, Homo sapien
aaaagcaaggtgacagaagagagcacataaaaa

SEQ ID NO: 539484 - DNA, 33 bp, Homo sapien
aaaagcaaggtgacaggagagagcacataaaaa

SEQ ID NO: 539485 - DNA, 33 bp, Homo sapien
ttttagtatgtaaagcacaataatttttgcagt

SEQ ID NO: 539486 - DNA, 33 bp, Homo sapien
ttttagtatgtaaagcgcaataatttttgcagt

SEQ ID NO: 539487 - DNA, 33 bp, Homo sapien
tcagattcatcagcaagtcttgatatttccaca

SEQ ID NO: 539488 - DNA, 33 bp, Homo sapien
tcagattcatcagcaattcttgatatttccaca

SEQ ID NO: 539489 - DNA, 33 bp, Homo sapien
ctgatacttagttccactgagccagggaacatc

SEQ ID NO: 539490 - DNA, 33 bp, Homo sapien
ctgatacttagttccattgagccagggaacatc

SEQ ID NO: 539491 - DNA, 33 bp, Homo sapien
ttctgtttcttcagtacacagcatgaacaaata

SEQ ID NO: 539492 - DNA, 33 bp, Homo sapien
ttctgtttcttcagtagacagcatgaacaaata

SEQ ID NO: 539493 - DNA, 33 bp, Homo sapien
aacatcttagtcaacaaatagttatgaattcta

SEQ ID NO: 539494 - DNA, 33 bp, Homo sapien
aacatcttagtcaacagatagttatgaattcta

SEQ ID NO: 539495 - DNA, 33 bp, Homo sapien
tcttcaactaacagaacatcctactgacttgtc

SEQ ID NO: 539496 - DNA, 33 bp, Homo sapien
tcttcaactaacagaatatcctactgacttgtc

SEQ ID NO: 539497 - DNA, 33 bp, Homo sapien
ttggtagtgcttctgtcacaataaatgttgtct

SEQ ID NO: 539498 - DNA, 33 bp, Homo sapien
ttggtagtgcttctgttacaataaatgttgtct

SEQ ID NO: 539499 - DNA, 33 bp, Homo sapien
tgataaaagccccttaccctggatgaactcaat

SEQ ID NO: 539500 - DNA, 33 bp, Homo sapien
tgataaaagccccttatcctggatgaactcaat

SEQ ID NO: 539501 - DNA, 33 bp, Homo sapien
tgctcctgtacgtagtcacggtcttgtgctcta

SEQ ID NO: 539502 - DNA, 33 bp, Homo sapien
tgctcctgtacgtagttacggtcttgtgctcta

SEQ ID NO: 539503 - DNA, 33 bp, Homo sapien
gagccatttttagtctaaagcaagaatgtcagt

SEQ ID NO: 539504 - DNA, 33 bp, Homo sapien
gagccatttttagtctgaagcaagaatgtcagt

SEQ ID NO: 539505 - DNA, 33 bp, Homo sapien
tccttgggttcaaagcccagcaagatactctgg

SEQ ID NO: 539506 - DNA, 33 bp, Homo sapien
tccttgggttcaaagcgcagcaagatactctgg

SEQ ID NO: 539507 - DNA, 33 bp, Homo sapien
cagtactaatttcagaagtgctgccttgctatt

SEQ ID NO: 539508 - DNA, 33 bp, Homo sapien
cagtactaatttcagacgtgctgccttgctatt

SEQ ID NO: 539509 - DNA, 33 bp, Homo sapien
tgcctgatagtgaataactggtgagatgaaggt

SEQ ID NO: 539510 - DNA, 33 bp, Homo sapien
tgcctgatagtgaatagctggtgagatgaaggt

SEQ ID NO: 539511 - DNA, 33 bp, Homo sapien
aatggtgaagtcaaagaatagtgcttcaaagca

SEQ ID NO: 539512 - DNA, 33 bp, Homo sapien
aatggtgaagtcaaaggatagtgcttcaaagca

SEQ ID NO: 539513 - DNA, 33 bp, Homo sapien
ctcattttgtgtgagacatccaaatattttttt

SEQ ID NO: 539514 - DNA, 33 bp, Homo sapien
ctcattttgtgtgagatatccaaatattttttt

SEQ ID NO: 539515 - DNA, 33 bp, Homo sapien
ttttccctgtttccctcaagtacaattagtcaa

SEQ ID NO: 539516 - DNA, 33 bp, Homo sapien
ttttccctgtttcccttaagtacaattagtcaa

SEQ ID NO: 539517 - DNA, 33 bp, Homo sapien
ggaacagttaatgatacagcttcagactcttgt

SEQ ID NO: 539518 - DNA, 33 bp, Homo sapien
ggaacagttaatgatagagcttcagactcttgt

SEQ ID NO: 539519 - DNA, 33 bp, Homo sapien
gagtgtctgtgaaatgaaagagacgattcattc

SEQ ID NO: 539520 - DNA, 33 bp, Homo sapien
gagtgtctgtgaaatggaagagacgattcattc

SEQ ID NO: 539521 - DNA, 33 bp, Homo sapien
ctttccaaatcttttcaaaatccagcttaaatt

SEQ ID NO: 539522 - DNA, 33 bp, Homo sapien
ctttccaaatcttttccaaatccagcttaaatt

SEQ ID NO: 539523 - DNA, 33 bp, Homo sapien
aataatttccactaaggacaggccagcgtgggc

SEQ ID NO: 539524 - DNA, 33 bp, Homo sapien
aataatttccactaagtacaggccagcgtgggc

SEQ ID NO: 539525 - DNA, 33 bp, Homo sapien
cgaatgaacgcgcagtcaaaagctgctctgaaa

SEQ ID NO: 539526 - DNA, 33 bp, Homo sapien
cgaatgaacgcgcagttaaaagctgctctgaaa

SEQ ID NO: 539527 - DNA, 33 bp, Homo sapien
ctctcttgagtgcaaacgacttttgagaaaatt

SEQ ID NO: 539528 - DNA, 33 bp, Homo sapien
ctctcttgagtgcaaatgacttttgagaaaatt

SEQ ID NO: 539529 - DNA, 33 bp, Homo sapien
acaatacagtatgagagaggagtaaatgttatg

SEQ ID NO: 539530 - DNA, 33 bp, Homo sapien
acaatacagtatgagataggagtaaatgttatg

SEQ ID NO: 539531 - DNA, 33 bp, Homo sapien
tctctttgtcctccacactcacaggaatgtcac

SEQ ID NO: 539532 - DNA, 33 bp, Homo sapien
tctctttgtcctccacgctcacaggaatgtcac

SEQ ID NO: 539533 - DNA, 33 bp, Homo sapien
aactcagcctccttaacatgtgatgcccttttc

SEQ ID NO: 539534 - DNA, 33 bp, Homo sapien
aactcagcctccttaatatgtgatgcccttttc

SEQ ID NO: 539535 - DNA, 33 bp, Homo sapien
ctgcttagaacagagaagtagaaaatgcttttt

SEQ ID NO: 539536 - DNA, 33 bp, Homo sapien
ctgcttagaacagagacgtagaaaatgcttttt

SEQ ID NO: 539537 - DNA, 33 bp, Homo sapien
taggtggcagagtcagaccattagtcaccattc

SEQ ID NO: 539538 - DNA, 33 bp, Homo sapien
taggtggcagagtcaggccattagtcaccattc

SEQ ID NO: 539539 - DNA, 33 bp, Homo sapien
aagaaggcagaggataaaggcacatttactgcc

SEQ ID NO: 539540 - DNA, 33 bp, Homo sapien
aagaaggcagaggatagaggcacatttactgcc

SEQ ID NO: 539541 - DNA, 33 bp, Homo sapien
ttcacttcctacctcactcagagaggctgggag

SEQ ID NO: 539542 - DNA, 33 bp, Homo sapien
ttcacttcctacctcattcagagaggctgggag

SEQ ID NO: 539543 - DNA, 33 bp, Homo sapien
gatgtccaaaattggaagtatagtgagtaactt

SEQ ID NO: 539544 - DNA, 33 bp, Homo sapien
gatgtccaaaattggaggtatagtgagtaactt

SEQ ID NO: 539545 - DNA, 33 bp, Homo sapien
tggtctcaggtgtgtaagaatccatttataagc

SEQ ID NO: 539546 - DNA, 33 bp, Homo sapien
tggtctcaggtgtgtaggaatccatttataagc

SEQ ID NO: 539547 - DNA, 33 bp, Homo sapien
ataaaaggaaatagcacggtcttattggagttt

SEQ ID NO: 539548 - DNA, 33 bp, Homo sapien
ataaaaggaaatagcatggtcttattggagttt

SEQ ID NO: 539549 - DNA, 33 bp, Homo sapien
agccccattcctctcacagaattgccactagaa

SEQ ID NO: 539550 - DNA, 33 bp, Homo sapien
agccccattcctctcatagaattgccactagaa

SEQ ID NO: 539551 - DNA, 33 bp, Homo sapien
ccccgtctcaactaaaaattggaaaaaattagc

SEQ ID NO: 539552 - DNA, 33 bp, Homo sapien
ccccgtctcaactaaagattggaaaaaattagc

SEQ ID NO: 539553 - DNA, 33 bp, Homo sapien; identical to SEQ ID NO: 539551

SEQ ID NO: 539554 - DNA, 33 bp, Homo sapien; identical to SEQ ID NO: 539552

SEQ ID NO: 539555 - DNA, 33 bp, Homo sapien
agagtccagttaggagacaacaatctaactgtt

SEQ ID NO: 539556 - DNA, 33 bp, Homo sapien
agagtccagttaggaggcaacaatctaactgtt

SEQ ID NO: 539557 - DNA, 33 bp, Homo sapien
aaccctcaatgtgacaatattttagaacaaggt

SEQ ID NO: 539558 - DNA, 33 bp, Homo sapien
aaccctcaatgtgacagtattttagaacaaggt

SEQ ID NO: 539559 - DNA, 33 bp, Homo sapien
caatattcaagtaagacagttatagaagaacat

SEQ ID NO: 539560 - DNA, 33 bp, Homo sapien
caatattcaagtaagagagttatagaagaacat

SEQ ID NO: 539561 - DNA, 33 bp, Homo sapien
ggaaatacctaattgaccgacacctattctggc

SEQ ID NO: 539562 - DNA, 33 bp, Homo sapien
ggaaatacctaattgatcgacacctattctggc

SEQ ID NO: 539563 - DNA, 33 bp, Homo sapien
gggtgtattgttcacacagaaaataactgcaca

SEQ ID NO: 539564 - DNA, 33 bp, Homo sapien
gggtgtattgttcacatagaaaataactgcaca

SEQ ID NO: 539565 - DNA, 33 bp, Homo sapien
aggtactgaacaataccctgtgaaagacactga

SEQ ID NO: 539566 - DNA, 33 bp, Homo sapien
aggtactgaacaatactctgtgaaagacactga

SEQ ID NO: 539567 - DNA, 33 bp, Homo sapien
ggccttgcatttaagaacagggtctctgagggt

SEQ ID NO: 539568 - DNA, 33 bp, Homo sapien
ggccttgcatttaagagcagggtctctgagggt

SEQ ID NO: 539569 - DNA, 33 bp, Homo sapien
tttatcaattagcaaggagtggtaggttacaaa

SEQ ID NO: 539570 - DNA, 33 bp, Homo sapien
tttatcaattagcaagtagtggtaggttacaaa

SEQ ID NO: 539571 - DNA, 33 bp, Homo sapien
ataacatgaattatgacccacctagtggagcaa

SEQ ID NO: 539572 - DNA, 33 bp, Homo sapien
ataacatgaattatgatccacctagtggagcaa

SEQ ID NO: 539573 - DNA, 33 bp, Homo sapien
cacaccaagcaagtgacgaagtttattgcaatg

SEQ ID NO: 539574 - DNA, 33 bp, Homo sapien
cacaccaagcaagtgatgaagtttattgcaatg

SEQ ID NO: 539575 - DNA, 33 bp, Homo sapien
gactgcaaaaggcttcccctgctaccaatatgt

SEQ ID NO: 539576 - DNA, 33 bp, Homo sapien
gactgcaaaaggcttctcctgctaccaatatgt

SEQ ID NO: 539577 - DNA, 33 bp, Homo sapien
actctacctgctctgcactaaagtttgccttgc

SEQ ID NO: 539578 - DNA, 33 bp, Homo sapien
actctacctgctctgcgctaaagtttgccttgc

SEQ ID NO: 539579 - DNA, 33 bp, Homo sapien
ttatattagggctcacgcttcatacattgaatg

SEQ ID NO: 539580 - DNA, 33 bp, Homo sapien
ttatattagggctcactcttcatacattgaatg

SEQ ID NO: 539581 - DNA, 33 bp, Homo sapien
atagttcccatttacccgctattctcacacatg

SEQ ID NO: 539582 - DNA, 33 bp, Homo sapien
atagttcccatttacctgctattctcacacatg

SEQ ID NO: 539583 - DNA, 33 bp, Homo sapien
cccttctcccaacagtcaaaaatgtccaacaac

SEQ ID NO: 539584 - DNA, 33 bp, Homo sapien
cccttctcccaacagtgaaaaatgtccaacaac

SEQ ID NO: 539585 - DNA, 33 bp, Homo sapien
gagatggagctcatggacaaataaagtcagaag

SEQ ID NO: 539586 - DNA, 33 bp, Homo sapien
gagatggagctcatgggcaaataaagtcagaag

SEQ ID NO: 539587 - DNA, 33 bp, Homo sapien
gatgtgaggagtcatgcataagtgatttattaa

SEQ ID NO: 539588 - DNA, 33 bp, Homo sapien
gatgtgaggagtcatgtataagtgatttattaa

SEQ ID NO: 539589 - DNA, 33 bp, Homo sapien
cctgaatgccagaccacagtctaaacattctcc

SEQ ID NO: 539590 - DNA, 33 bp, Homo sapien
cctgaatgccagaccagagtctaaacattctcc

SEQ ID NO: 539591 - DNA, 33 bp, Homo sapien
aaacctaattataaaggaaatgccatagggtga

SEQ ID NO: 539592 - DNA, 33 bp, Homo sapien
aaacctaattataaagtaaatgccatagggtga

SEQ ID NO: 539593 - DNA, 33 bp, Homo sapien
agtgcctagccttccactgcagacatctgattt

SEQ ID NO: 539594 - DNA, 33 bp, Homo sapien
agtgcctagccttccattgcagacatctgattt

SEQ ID NO: 539595 - DNA, 33 bp, Homo sapien
gaaatacacagtgggtcaacttaaataaagaga

SEQ ID NO: 539596 - DNA, 33 bp, Homo sapien
gaaatacacagtgggtgaacttaaataaagaga

SEQ ID NO: 539597 - DNA, 33 bp, Homo sapien
tttggacctagtatgggcatcagttacttgggg

SEQ ID NO: 539598 - DNA, 33 bp, Homo sapien
tttggacctagtatggtcatcagttacttgggg

SEQ ID NO: 539599 - DNA, 33 bp, Homo sapien
aatcattggattagtacgagaggtaaccaataa

SEQ ID NO: 539600 - DNA, 33 bp, Homo sapien
aatcattggattagtatgagaggtaaccaataa

SEQ ID NO: 539601 - DNA, 33 bp, Homo sapien
tccaaaaaagaagagacagaattgggcagaaaa

SEQ ID NO: 539602 - DNA, 33 bp, Homo sapien
tccaaaaaagaagagagagaattgggcagaaaa

SEQ ID NO: 539603 - DNA, 33 bp, Homo sapien
gtcctctggttcagcaactactttctcatgata

SEQ ID NO: 539604 - DNA, 33 bp, Homo sapien
gtcctctggttcagcatctactttctcatgata

SEQ ID NO: 539605 - DNA, 33 bp, Homo sapien
agtcagttatgtcagaagtctttcactgtcata

SEQ ID NO: 539606 - DNA, 33 bp, Homo sapien
agtcagttatgtcagatgtctttcactgtcata

SEQ ID NO: 539607 - DNA, 33 bp, Homo sapien
atggtcatctacaagcagagagagagacctgga

SEQ ID NO: 539608 - DNA, 33 bp, Homo sapien
atggtcatctacaagcggagagagagacctgga

SEQ ID NO: 539609 - DNA, 33 bp, Homo sapien
gaattgatatccgtcaatgaaaaatatatggta

SEQ ID NO: 539610 - DNA, 33 bp, Homo sapien
gaattgatatccgtcagtgaaaaatatatggta

SEQ ID NO: 539611 - DNA, 33 bp, Homo sapien
gtatgagagagatagaatcaatctgatacatac

SEQ ID NO: 539612 - DNA, 33 bp, Homo sapien
gtatgagagagatagagtcaatctgatacatac

SEQ ID NO: 539613 - DNA, 33 bp, Homo sapien
atttaccttcttgcacaaactggtgaatagtcc

SEQ ID NO: 539614 - DNA, 33 bp, Homo sapien
atttaccttcttgcacgaactggtgaatagtcc

SEQ ID NO: 539615 - DNA, 33 bp, Homo sapien
actggagaggtaagacgctagataaaagcgaac

SEQ ID NO: 539616 - DNA, 33 bp, Homo sapien
actggagaggtaagactctagataaaagcgaac

SEQ ID NO: 539617 - DNA, 33 bp, Homo sapien
ctctttttagggtaccaaagcaccattcaggcc

SEQ ID NO: 539618 - DNA, 33 bp, Homo sapien
ctctttttagggtaccgaagcaccattcaggcc

SEQ ID NO: 539619 - DNA, 33 bp, Homo sapien
tataattatgggaaagccaatatactgtctgaa

SEQ ID NO: 539620 - DNA, 33 bp, Homo sapien
tataattatgggaaagtcaatatactgtctgaa

SEQ ID NO: 539621 - DNA, 33 bp, Homo sapien
ccataacctgtgtttacatttaacctagtaaca

SEQ ID NO: 539622 - DNA, 33 bp, Homo sapien
ccataacctgtgtttatatttaacctagtaaca

SEQ ID NO: 539623 - DNA, 33 bp, Homo sapien
cagagacaatcacaataaaaaatttgatgcatc

SEQ ID NO: 539624 - DNA, 33 bp, Homo sapien
cagagacaatcacaatcaaaaatttgatgcatc

SEQ ID NO: 539625 - DNA, 33 bp, Homo sapien
gatacgcagcaatcaacagaacgatgtcttgtt

SEQ ID NO: 539626 - DNA, 33 bp, Homo sapien
gatacgcagcaatcaatagaacgatgtcttgtt

SEQ ID NO: 539627 - DNA, 33 bp, Homo sapien
tgtttcttaacaagacacatgagcaataaaaaa

SEQ ID NO: 539628 - DNA, 33 bp, Homo sapien
tgtttcttaacaagacgcatgagcaataaaaaa

SEQ ID NO: 539629 - DNA, 33 bp, Homo sapien
gctgagaacaaagctaaaacaggtatttgggtt

SEQ ID NO: 539630 - DNA, 33 bp, Homo sapien
gctgagaacaaagctagaacaggtatttgggtt

SEQ ID NO: 539631 - DNA, 33 bp, Homo sapien
gatattctcttgggtaccaacccttctgcattc

SEQ ID NO: 539632 - DNA, 33 bp, Homo sapien
gatattctcttgggtagcaacccttctgcattc

SEQ ID NO: 539633 - DNA, 33 bp, Homo sapien
tgttgacttcattctcaagccaactctttacca

SEQ ID NO: 539634 - DNA, 33 bp, Homo sapien
tgttgacttcattctccagccaactctttacca

SEQ ID NO: 539635 - DNA, 33 bp, Homo sapien
tatttgtctgttaaacaagggtgagcttattaa

SEQ ID NO: 539636 - DNA, 33 bp, Homo sapien
tatttgtctgttaaacgagggtgagcttattaa

SEQ ID NO: 539637 - DNA, 33 bp, Homo sapien
tgagagtaagtctcatcaggtgaaaacagactt

SEQ ID NO: 539638 - DNA, 33 bp, Homo sapien
tgagagtaagtctcatgaggtgaaaacagactt

SEQ ID NO: 539639 - DNA, 33 bp, Homo sapien
gaactcgcgttctcccacaaaattcatctgaaa

SEQ ID NO: 539640 - DNA, 33 bp, Homo sapien
gaactcgcgttctcccgcaaaattcatctgaaa

SEQ ID NO: 539641 - DNA, 33 bp, Homo sapien
ttgttgctgcttatataaaaggcagagtgaggt

SEQ ID NO: 539642 - DNA, 33 bp, Homo sapien
ttgttgctgcttatatgaaaggcagagtgaggt

SEQ ID NO: 539643 - DNA, 33 bp, Homo sapien
ccacctccctctcaaactcagaatataaaactt

SEQ ID NO: 539644 - DNA, 33 bp, Homo sapien
ccacctccctctcaaagtcagaatataaaactt

SEQ ID NO: 539645 - DNA, 33 bp, Homo sapien
acagccattagtgtcaaataagagttgcctttg

SEQ ID NO: 539646 - DNA, 33 bp, Homo sapien
acagccattagtgtcatataagagttgcctttg

SEQ ID NO: 539647 - DNA, 33 bp, Homo sapien
ttcaataatgatgaaacggaaacttctacttca

SEQ ID NO: 539648 - DNA, 33 bp, Homo sapien
ttcaataatgatgaaatggaaacttctacttca

SEQ ID NO: 539649 - DNA, 33 bp, Homo sapien
aaatgtgttattgccacgtaaatgctatgtccc

SEQ ID NO: 539650 - DNA, 33 bp, Homo sapien
aaatgtgttattgccatgtaaatgctatgtccc

SEQ ID NO: 539651 - DNA, 33 bp, Homo sapien
tacattttaaaggcagaaacaacaaaataagcc

SEQ ID NO: 539652 - DNA, 33 bp, Homo sapien
tacattttaaaggcaggaacaacaaaataagcc

SEQ ID NO: 539653 - DNA, 33 bp, Homo sapien
ttaaatgcaaatggacaatgaaaactaaatatc

SEQ ID NO: 539654 - DNA, 33 bp, Homo sapien
ttaaatgcaaatggacgatgaaaactaaatatc

SEQ ID NO: 539655 - DNA, 33 bp, Homo sapien
ttatattttgatgaaaagtaaccttcacttcca

SEQ ID NO: 539656 - DNA, 33 bp, Homo sapien
ttatattttgatgaaaggtaaccttcacttcca

SEQ ID NO: 539657 - DNA, 33 bp, Homo sapien
agcagcctctttccaaactgaattcccatctcc

SEQ ID NO: 539658 - DNA, 33 bp, Homo sapien
agcagcctctttccaacctgaattcccatctcc

SEQ ID NO: 539659 - DNA, 33 bp, Homo sapien
gagaaggcagaaaaggacaagaatgttgtgttg

SEQ ID NO: 539660 - DNA, 33 bp, Homo sapien
gagaaggcagaaaagggcaagaatgttgtgttg

SEQ ID NO: 539661 - DNA, 33 bp, Homo sapien
gctgtgctttggagtacaagaagtaatcgtatg

SEQ ID NO: 539662 - DNA, 33 bp, Homo sapien
gctgtgctttggagtagaagaagtaatcgtatg

SEQ ID NO: 539663 - DNA, 33 bp, Homo sapien
tttcattacacttccaaacagacataaagaaac

SEQ ID NO: 539664 - DNA, 33 bp, Homo sapien
tttcattacacttccagacagacataaagaaac

SEQ ID NO: 539665 - DNA, 33 bp, Homo sapien
agcagaaactgcagtccagagtctgaaattgag

SEQ ID NO: 539666 - DNA, 33 bp, Homo sapien
agcagaaactgcagtcgagagtctgaaattgag

SEQ ID NO: 539667 - DNA, 33 bp, Homo sapien
tgccagacctcaaggcacattggatttgtcaga

SEQ ID NO: 539668 - DNA, 33 bp, Homo sapien
tgccagacctcaaggctcattggatttgtcaga

SEQ ID NO: 539669 - DNA, 33 bp, Homo sapien
ccggcatatcgtgttacacaggagcttcgccag

SEQ ID NO: 539670 - DNA, 33 bp, Homo sapien
ccggcatatcgtgttatacaggagcttcgccag

SEQ ID NO: 539671 - DNA, 33 bp, Homo sapien
taggacttcacaaataccagaacttgaggagta

SEQ ID NO: 539672 - DNA, 33 bp, Homo sapien
taggacttcacaaatatcagaacttgaggagta

SEQ ID NO: 539673 - DNA, 33 bp, Homo sapien
ggccaaccctaacgtgaattgtgcagggttttc

SEQ ID NO: 539674 - DNA, 33 bp, Homo sapien
ggccaaccctaacgtgtattgtgcagggttttc

SEQ ID NO: 539675 - DNA, 33 bp, Homo sapien
aaagaaggtaatcaaccagtaagtggtagttac

SEQ ID NO: 539676 - DNA, 33 bp, Homo sapien
aaagaaggtaatcaactagtaagtggtagttac

SEQ ID NO: 539677 - DNA, 33 bp, Homo sapien
gtgatatcaattttcaatctttgaggaatattc

SEQ ID NO: 539678 - DNA, 33 bp, Homo sapien
gtgatatcaattttcagtctttgaggaatattc

SEQ ID NO: 539679 - DNA, 33 bp, Homo sapien
ttggataattggaggacgcacattccatttaaa

SEQ ID NO: 539680 - DNA, 33 bp, Homo sapien
ttggataattggaggaggcacattccatttaaa

SEQ ID NO: 539681 - DNA, 33 bp, Homo sapien
tttaaagccataatcccgagaacacattgagag

SEQ ID NO: 539682 - DNA, 33 bp, Homo sapien
tttaaagccataatcctgagaacacattgagag

SEQ ID NO: 539683 - DNA, 33 bp, Homo sapien
ttgggggtggttcccacgaatcaagcagcaacc

SEQ ID NO: 539684 - DNA, 33 bp, Homo sapien
ttgggggtggttcccatgaatcaagcagcaacc

SEQ ID NO: 539685 - DNA, 33 bp, Homo sapien
tatgaagcatgtgaaccgaccctgacccatcag

SEQ ID NO: 539686 - DNA, 33 bp, Homo sapien
tatgaagcatgtgaactgaccctgacccatcag

SEQ ID NO: 539687 - DNA, 33 bp, Homo sapien
atgtgaatttatctgacgcttagctgaaatgct

SEQ ID NO: 539688 - DNA, 33 bp, Homo sapien
atgtgaatttatctgatgcttagctgaaatgct

SEQ ID NO: 539689 - DNA, 33 bp, Homo sapien
ccattacacaaatgagccactaaaaagccaatg

SEQ ID NO: 539690 - DNA, 33 bp, Homo sapien
ccattacacaaatgaggcactaaaaagccaatg

SEQ ID NO: 539691 - DNA, 33 bp, Homo sapien
aatgaatcaggaccaacactttgtggttcaatt

SEQ ID NO: 539692 - DNA, 33 bp, Homo sapien
aatgaatcaggaccaatactttgtggttcaatt

SEQ ID NO: 539693 - DNA, 33 bp, Homo sapien
aaactgtgtcacgatacagggtggtcacgggga

SEQ ID NO: 539694 - DNA, 33 bp, Homo sapien
aaactgtgtcacgatatagggtggtcacgggga

SEQ ID NO: 539695 - DNA, 33 bp, Homo sapien
atgaaaagaaaaggaaatgtctccaatgagtgt

SEQ ID NO: 539696 - DNA, 33 bp, Homo sapien
atgaaaagaaaaggaagtgtctccaatgagtgt

SEQ ID NO: 539697 - DNA, 33 bp, Homo sapien
tgtaaactcacagggaagattaaggtaggcaca

SEQ ID NO: 539698 - DNA, 33 bp, Homo sapien
tgtaaactcacagggaggattaaggtaggcaca

SEQ ID NO: 539699 - DNA, 33 bp, Homo sapien
aacaatgaaagtcctgaaaatacactgtgatgg

SEQ ID NO: 539700 - DNA, 33 bp, Homo sapien
aacaatgaaagtcctggaaatacactgtgatgg

SEQ ID NO: 539701 - DNA, 33 bp, Homo sapien
gcgtgttgacacttacagaagaagtggtgctga

SEQ ID NO: 539702 - DNA, 33 bp, Homo sapien
gcgtgttgacacttacggaagaagtggtgctga

SEQ ID NO: 539703 - DNA, 33 bp, Homo sapien
tgttgtgaaaagagggacatttcctaaatccca

SEQ ID NO: 539704 - DNA, 33 bp, Homo sapien
tgttgtgaaaagaggggcatttcctaaatccca

SEQ ID NO: 539705 - DNA, 33 bp, Homo sapien
tctaaagaagttggccaaaagagggttgcagat

SEQ ID NO: 539706 - DNA, 33 bp, Homo sapien
tctaaagaagttggccgaaagagggttgcagat

SEQ ID NO: 539707 - DNA, 33 bp, Homo sapien
ttcgcaaatattccatcatcagcaaacagcttt

SEQ ID NO: 539708 - DNA, 33 bp, Homo sapien
ttcgcaaatattccattatcagcaaacagcttt

SEQ ID NO: 539709 - DNA, 33 bp, Homo sapien
tagaagccaggagagaagcacaggactgtctca

SEQ ID NO: 539710 - DNA, 33 bp, Homo sapien
tagaagccaggagagacgcacaggactgtctca

SEQ ID NO: 539711 - DNA, 33 bp, Homo sapien
cattgtcccagaaagcaattttgtcttttggaa

SEQ ID NO: 539712 - DNA, 33 bp, Homo sapien
cattgtcccagaaagcgattttgtcttttggaa

SEQ ID NO: 539713 - DNA, 33 bp, Homo sapien
aaatcccacatttgccaagaaatggagagaaga

SEQ ID NO: 539714 - DNA, 33 bp, Homo sapien
aaatcccacatttgccgagaaatggagagaaga

SEQ ID NO: 539715 - DNA, 33 bp, Homo sapien
tctcaaataaaccagaatcctcaatctgtgttg

SEQ ID NO: 539716 - DNA, 33 bp, Homo sapien
tctcaaataaaccagagtcctcaatctgtgttg

SEQ ID NO: 539717 - DNA, 33 bp, Homo sapien
aacctgttttcagtcaatccagtgtatcaaaga

SEQ ID NO: 539718 - DNA, 33 bp, Homo sapien
aacctgttttcagtcagtccagtgtatcaaaga

SEQ ID NO: 539719 - DNA, 33 bp, Homo sapien
tactacaatggtataaacgatgaggattattta

SEQ ID NO: 539720 - DNA, 33 bp, Homo sapien
tactacaatggtataagcgatgaggattattta

SEQ ID NO: 539721 - DNA, 33 bp, Homo sapien
ttacatatcagcttaacgatagacttgcccagg

SEQ ID NO: 539722 - DNA, 33 bp, Homo sapien
ttacatatcagcttaatgatagacttgcccagg

SEQ ID NO: 539723 - DNA, 33 bp, Homo sapien
taactccctgcacctcaagatgtggttgcattt

SEQ ID NO: 539724 - DNA, 33 bp, Homo sapien
taactccctgcacctcgagatgtggttgcattt

SEQ ID NO: 539725 - DNA, 33 bp, Homo sapien
cctggtggaggaaagacgcaggatgaagagaac

SEQ ID NO: 539726 - DNA, 33 bp, Homo sapien
cctggtggaggaaagatgcaggatgaagagaac

SEQ ID NO: 539727 - DNA, 33 bp, Homo sapien
cttccattggttcctgaagccatgtcctccaca

SEQ ID NO: 539728 - DNA, 33 bp, Homo sapien
cttccattggttcctgcagccatgtcctccaca

SEQ ID NO: 539729 - DNA, 33 bp, Homo sapien
tctggctaaaggtgcccgagaaaatacaggatg

SEQ ID NO: 539730 - DNA, 33 bp, Homo sapien
tctggctaaaggtgcctgagaaaatacaggatg

SEQ ID NO: 539731 - DNA, 33 bp, Homo sapien
atgtaggaccatacatcaaaatatctagcacag

SEQ ID NO: 539732 - DNA, 33 bp, Homo sapien
atgtaggaccatacatgaaaatatctagcacag

SEQ ID NO: 539733 - DNA, 33 bp, Homo sapien
tcatgtgtgcaaggaaaaaaccaatccaggcca

SEQ ID NO: 539734 - DNA, 33 bp, Homo sapien
tcatgtgtgcaaggaagaaaccaatccaggcca

SEQ ID NO: 539735 - DNA, 33 bp, Homo sapien
actacttgaccaggcactgaaactgaggtacag

SEQ ID NO: 539736 - DNA, 33 bp, Homo sapien
actacttgaccaggcattgaaactgaggtacag

SEQ ID NO: 539737 - DNA, 33 bp, Homo sapien
atcagacacagactaaccattttaatcttaatt

SEQ ID NO: 539738 - DNA, 33 bp, Homo sapien
atcagacacagactaatcattttaatcttaatt

SEQ ID NO: 539739 - DNA, 33 bp, Homo sapien
cttgctcctgctgaatgacagggtatttatcta

SEQ ID NO: 539740 - DNA, 33 bp, Homo sapien
cttgctcctgctgaattacagggtatttatcta

SEQ ID NO: 539741 - DNA, 33 bp, Homo sapien
gcaaaagacaaaaaaaagacttgaaggcattgt

SEQ ID NO: 539742 - DNA, 33 bp, Homo sapien
gcaaaagacaaaaaaacgacttgaaggcattgt

SEQ ID NO: 539743 - DNA, 33 bp, Homo sapien
gtcacgtaaattgtaaactgcacctatattgaa

SEQ ID NO: 539744 - DNA, 33 bp, Homo sapien
gtcacgtaaattgtaagctgcacctatattgaa

SEQ ID NO: 539745 - DNA, 33 bp, Homo sapien
tgcatcttgtaccacaacccaatctggaagcta

SEQ ID NO: 539746 - DNA, 33 bp, Homo sapien
tgcatcttgtaccacagcccaatctggaagcta

SEQ ID NO: 539747 - DNA, 33 bp, Homo sapien
tgaggccttcagatgacgcaacaatatgtctcc

SEQ ID NO: 539748 - DNA, 33 bp, Homo sapien
tgaggccttcagatgatgcaacaatatgtctcc

SEQ ID NO: 539749 - DNA, 33 bp, Homo sapien
cctctctgaaacaagccacttcatctcctcata

SEQ ID NO: 539750 - DNA, 33 bp, Homo sapien
cctctctgaaacaagctacttcatctcctcata

SEQ ID NO: 539751 - DNA, 33 bp, Homo sapien
cccttgttcactgtgcactaggcactcttacta

SEQ ID NO: 539752 - DNA, 33 bp, Homo sapien
cccttgttcactgtgcgctaggcactcttacta

SEQ ID NO: 539753 - DNA, 33 bp, Homo sapien
cctgggtctggttgaactagtgaagacagatgg

SEQ ID NO: 539754 - DNA, 33 bp, Homo sapien
cctgggtctggttgaattagtgaagacagatgg

SEQ ID NO: 539755 - DNA, 33 bp, Homo sapien
atctcatcatttttcactccagttcattttcct

SEQ ID NO: 539756 - DNA, 33 bp, Homo sapien
atctcatcatttttcagtccagttcattttcct

SEQ ID NO: 539757 - DNA, 33 bp, Homo sapien
cctggagaacttgtcaatcatttttgagtatct

SEQ ID NO: 539758 - DNA, 33 bp, Homo sapien
cctggagaacttgtcagtcatttttgagtatct

SEQ ID NO: 539759 - DNA, 33 bp, Homo sapien
tgtttgatggtttacacaaaaataatagacata

SEQ ID NO: 539760 - DNA, 33 bp, Homo sapien
tgtttgatggtttacataaaaataatagacata

SEQ ID NO: 539761 - DNA, 33 bp, Homo sapien
cccatatgtgcttctaaccactatataatgcca

SEQ ID NO: 539762 - DNA, 33 bp, Homo sapien
cccatatgtgcttctagccactatataatgcca

SEQ ID NO: 539763 - DNA, 33 bp, Homo sapien
atttaacgtccccagaagatgagatgatgtctt

SEQ ID NO: 539764 - DNA, 33 bp, Homo sapien
atttaacgtccccagaggatgagatgatgtctt

SEQ ID NO: 539765 - DNA, 33 bp, Homo sapien
cctagatctcagggggacacaatgtttgttttc

SEQ ID NO: 539766 - DNA, 33 bp, Homo sapien
cctagatctcagggggtcacaatgtttgttttc

SEQ ID NO: 539767 - DNA, 33 bp, Homo sapien
cctctctcaactcttaaaaagacactcctgggt

SEQ ID NO: 539768 - DNA, 33 bp, Homo sapien
cctctctcaactcttacaaagacactcctgggt

SEQ ID NO: 539769 - DNA, 33 bp, Homo sapien
ctgcctgagaataaaaccagcaaacaggaaaaa

SEQ ID NO: 539770 - DNA, 33 bp, Homo sapien
ctgcctgagaataaaatcagcaaacaggaaaaa

SEQ ID NO: 539771 - DNA, 33 bp, Homo sapien
cacacatgaaggtggaagcatggtgaagaggat

SEQ ID NO: 539772 - DNA, 33 bp, Homo sapien
cacacatgaaggtggacgcatggtgaagaggat

SEQ ID NO: 539773 - DNA, 33 bp, Homo sapien
gatcatctctatccgaactttgtaatctgcatc

SEQ ID NO: 539774 - DNA, 33 bp, Homo sapien
gatcatctctatccgagctttgtaatctgcatc

SEQ ID NO: 539775 - DNA, 33 bp, Homo sapien
cctgactggttaagatcatcaacggactcttct

SEQ ID NO: 539776 - DNA, 33 bp, Homo sapien
cctgactggttaagattatcaacggactcttct

SEQ ID NO: 539777 - DNA, 33 bp, Homo sapien
ttcaaagataagtaaacagaggccttgagtctt

SEQ ID NO: 539778 - DNA, 33 bp, Homo sapien
ttcaaagataagtaaagagaggccttgagtctt

SEQ ID NO: 539779 - DNA, 33 bp, Homo sapien
atcatctatggaagaacaagctaaattcattta

SEQ ID NO: 539780 - DNA, 33 bp, Homo sapien
atcatctatggaagaagaagctaaattcattta

SEQ ID NO: 539781 - DNA, 33 bp, Homo sapien
aaaatttgggtcttctcaatatctaaactctgt

SEQ ID NO: 539782 - DNA, 33 bp, Homo sapien
aaaatttgggtcttctgaatatctaaactctgt

SEQ ID NO: 539783 - DNA, 33 bp, Homo sapien
aaaaatttaagcagtacgagcatcctaaagcaa

SEQ ID NO: 539784 - DNA, 33 bp, Homo sapien
aaaaatttaagcagtatgagcatcctaaagcaa

SEQ ID NO: 539785 - DNA, 33 bp, Homo sapien
acaaactatacattaaacatattgctactgaca

SEQ ID NO: 539786 - DNA, 33 bp, Homo sapien
acaaactatacattaaccatattgctactgaca

SEQ ID NO: 539787 - DNA, 33 bp, Homo sapien
ggggtgaagaaatgctcactcgccaaaaaaggc

SEQ ID NO: 539788 - DNA, 33 bp, Homo sapien
ggggtgaagaaatgcttactcgccaaaaaaggc

SEQ ID NO: 539789 - DNA, 33 bp, Homo sapien
aaaggagctcttataacgtataaataggccagg

SEQ ID NO: 539790 - DNA, 33 bp, Homo sapien
aaaggagctcttataatgtataaataggccagg

SEQ ID NO: 539791 - DNA, 33 bp, Homo sapien
gaggagagagattgcaaaccaaacttgggtgag

SEQ ID NO: 539792 - DNA, 33 bp, Homo sapien
gaggagagagattgcacaccaaacttgggtgag

SEQ ID NO: 539793 - DNA, 33 bp, Homo sapien
cactgaccaagtcctagagaatattagtggcaa

SEQ ID NO: 539794 - DNA, 33 bp, Homo sapien
cactgaccaagtcctatagaatattagtggcaa

SEQ ID NO: 539795 - DNA, 33 bp, Homo sapien
cagggacacgtgtgaccgctgaaattaacatct

SEQ ID NO: 539796 - DNA, 33 bp, Homo sapien
cagggacacgtgtgactgctgaaattaacatct

SEQ ID NO: 539797 - DNA, 33 bp, Homo sapien
caacaagtggggcaataactgtacaaactacag

SEQ ID NO: 539798 - DNA, 33 bp, Homo sapien
caacaagtggggcaatgactgtacaaactacag

SEQ ID NO: 539799 - DNA, 33 bp, Homo sapien
aaaagttattccaactcagggatttgtgctggc

SEQ ID NO: 539800 - DNA, 33 bp, Homo sapien
aaaagttattccaacttagggatttgtgctggc

SEQ ID NO: 539801 - DNA, 33 bp, Homo sapien
actcaagaaagcctctaaatatttcacagctga

SEQ ID NO: 539802 - DNA, 33 bp, Homo sapien
actcaagaaagcctctgaatatttcacagctga

SEQ ID NO: 539803 - DNA, 33 bp, Homo sapien
ttcgcttctcctttaaagacaactgctaaaata

SEQ ID NO: 539804 - DNA, 33 bp, Homo sapien
ttcgcttctcctttaaggacaactgctaaaata

SEQ ID NO: 539805 - DNA, 33 bp, Homo sapien
cgaggagccttcaacaacctgtggatattcctg

SEQ ID NO: 539806 - DNA, 33 bp, Homo sapien
cgaggagccttcaacagcctgtggatattcctg

SEQ ID NO: 539807 - DNA, 33 bp, Homo sapien
aggcttcttccaggacaaactacattctttttg

SEQ ID NO: 539808 - DNA, 33 bp, Homo sapien
aggcttcttccaggacgaactacattctttttg

SEQ ID NO: 539809 - DNA, 33 bp, Homo sapien
aattataccaaatccagtattctgttgttttca

SEQ ID NO: 539810 - DNA, 33 bp, Homo sapien
aattataccaaatccattattctgttgttttca

SEQ ID NO: 539811 - DNA, 33 bp, Homo sapien
caaacaatgacaattacgataggtgctttgatg

SEQ ID NO: 539812 - DNA, 33 bp, Homo sapien
caaacaatgacaattatgataggtgctttgatg

SEQ ID NO: 539813 - DNA, 33 bp, Homo sapien
tccatttttaaaaacacaaataactgctcaatg

SEQ ID NO: 539814 - DNA, 33 bp, Homo sapien
tccatttttaaaaacataaataactgctcaatg

SEQ ID NO: 539815 - DNA, 33 bp, Homo sapien
caattggagaaaaataaacccttgatcaaaaat

SEQ ID NO: 539816 - DNA, 33 bp, Homo sapien
caattggagaaaaatatacccttgatcaaaaat

SEQ ID NO: 539817 - DNA, 33 bp, Homo sapien
ctatatagacttaggaccaaatatttagccatc

SEQ ID NO: 539818 - DNA, 33 bp, Homo sapien
ctatatagacttaggagcaaatatttagccatc

SEQ ID NO: 539819 - DNA, 33 bp, Homo sapien
ttaaaaaggaaacttcccattgattctgccata

SEQ ID NO: 539820 - DNA, 33 bp, Homo sapien
ttaaaaaggaaacttctcattgattctgccata

SEQ ID NO: 539821 - DNA, 33 bp, Homo sapien
taactgggcccactcaagtaacccaagataatt

SEQ ID NO: 539822 - DNA, 33 bp, Homo sapien
taactgggcccactcaggtaacccaagataatt

SEQ ID NO: 539823 - DNA, 33 bp, Homo sapien
acaaagcaactgctaccattctgaacacaaagc

SEQ ID NO: 539824 - DNA, 33 bp, Homo sapien
acaaagcaactgctactattctgaacacaaagc

SEQ ID NO: 539825 - DNA, 33 bp, Homo sapien
gtgaacctttctcacaataaattgcctctccag

SEQ ID NO: 539826 - DNA, 33 bp, Homo sapien
gtgaacctttctcacagtaaattgcctctccag

SEQ ID NO: 539827 - DNA, 33 bp, Homo sapien
ttactgaattgtatgaaagtaatgtaagtgaaa

SEQ ID NO: 539828 - DNA, 33 bp, Homo sapien
ttactgaattgtatgacagtaatgtaagtgaaa

SEQ ID NO: 539829 - DNA, 33 bp, Homo sapien
ggaaaaggacatttcaatcattcagataaaagt

SEQ ID NO: 539830 - DNA, 33 bp, Homo sapien
ggaaaaggacatttcagtcattcagataaaagt

SEQ ID NO: 539831 - DNA, 33 bp, Homo sapien
tttcccaatcctatgacgcctgactgcaaaata

SEQ ID NO: 539832 - DNA, 33 bp, Homo sapien
tttcccaatcctatgatgcctgactgcaaaata

SEQ ID NO: 539833 - DNA, 33 bp, Homo sapien
agccaggagcaagggggaagtggcacaagataa

SEQ ID NO: 539834 - DNA, 33 bp, Homo sapien
agccaggagcaaggggtaagtggcacaagataa

SEQ ID NO: 539835 - DNA, 33 bp, Homo sapien
ttcttcgttcttcgtaggtccatctgcctgcag

SEQ ID NO: 539836 - DNA, 33 bp, Homo sapien
ttcttcgttcttcgtatgtccatctgcctgcag

SEQ ID NO: 539837 - DNA, 33 bp, Homo sapien
caccagctagtgctcaatgaatatggtggttat

SEQ ID NO: 539838 - DNA, 33 bp, Homo sapien
caccagctagtgctcagtgaatatggtggttat

SEQ ID NO: 539839 - DNA, 33 bp, Homo sapien
ttttgcacacacattaataaacaatttccaagc

SEQ ID NO: 539840 - DNA, 33 bp, Homo sapien
ttttgcacacacattagtaaacaatttccaagc

SEQ ID NO: 539841 - DNA, 33 bp, Homo sapien
ggaaatacggcctcaacaagtgcagccagtgtt

SEQ ID NO: 539842 - DNA, 33 bp, Homo sapien
ggaaatacggcctcaataagtgcagccagtgtt

SEQ ID NO: 539843 - DNA, 33 bp, Homo sapien
tttcttttcttaaacacattgtgacgtattaaa

SEQ ID NO: 539844 - DNA, 33 bp, Homo sapien
tttcttttcttaaacatattgtgacgtattaaa

SEQ ID NO: 539845 - DNA, 33 bp, Homo sapien
atctctcctcaaccacgctacagccctggatta

SEQ ID NO: 539846 - DNA, 33 bp, Homo sapien
atctctcctcaaccactctacagccctggatta

SEQ ID NO: 539847 - DNA, 33 bp, Homo sapien
ggaggtaatgctggaaatacagaggtgtgagta

SEQ ID NO: 539848 - DNA, 33 bp, Homo sapien
ggaggtaatgctggaagtacagaggtgtgagta

SEQ ID NO: 539849 - DNA, 33 bp, Homo sapien
atattaatcctgactactactataccctggaca

SEQ ID NO: 539850 - DNA, 33 bp, Homo sapien
atattaatcctgactattactataccctggaca

SEQ ID NO: 539851 - DNA, 33 bp, Homo sapien
aacttgatgggtctaacctctcaccccaattcc

SEQ ID NO: 539852 - DNA, 33 bp, Homo sapien
aacttgatgggtctaatctctcaccccaattcc

SEQ ID NO: 539853 - DNA, 33 bp, Homo sapien
tgtttaaaatacacgaaaaatcttgtaacccta

SEQ ID NO: 539854 - DNA, 33 bp, Homo sapien
tgtttaaaatacacgacaaatcttgtaacccta

SEQ ID NO: 539855 - DNA, 33 bp, Homo sapien
ccattttacagttgaaaaaccaggacaatatga

SEQ ID NO: 539856 - DNA, 33 bp, Homo sapien
ccattttacagttgaagaaccaggacaatatga

SEQ ID NO: 539857 - DNA, 33 bp, Homo sapien
gaaggcccatatagcacagtgcttacaaatcat

SEQ ID NO: 539858 - DNA, 33 bp, Homo sapien
gaaggcccatatagcatagtgcttacaaatcat

SEQ ID NO: 539859 - DNA, 33 bp, Homo sapien
caaatttatctacctaaaatccttttctctctt

SEQ ID NO: 539860 - DNA, 33 bp, Homo sapien
caaatttatctacctagaatccttttctctctt

SEQ ID NO: 539861 - DNA, 33 bp, Homo sapien
acacctgcatcctatacagtgaagggtataggt

SEQ ID NO: 539862 - DNA, 33 bp, Homo sapien
acacctgcatcctatatagtgaagggtataggt

SEQ ID NO: 539863 - DNA, 33 bp, Homo sapien
tgtcagagaacctacccgcttttcagtgacatt

SEQ ID NO: 539864 - DNA, 33 bp, Homo sapien
tgtcagagaacctacctgcttttcagtgacatt

SEQ ID NO: 539865 - DNA, 33 bp, Homo sapien
caagagctactgataaatatggagcacttcata

SEQ ID NO: 539866 - DNA, 33 bp, Homo sapien
caagagctactgataagtatggagcacttcata

SEQ ID NO: 539867 - DNA, 33 bp, Homo sapien
ctgcttgctctgcaaaacccaaagaacatgttg

SEQ ID NO: 539868 - DNA, 33 bp, Homo sapien
ctgcttgctctgcaaagcccaaagaacatgttg

SEQ ID NO: 539869 - DNA, 33 bp, Homo sapien
cgactttgacattccacaacacgcctccctccc

SEQ ID NO: 539870 - DNA, 33 bp, Homo sapien
cgactttgacattccataacacgcctccctccc

SEQ ID NO: 539871 - DNA, 33 bp, Homo sapien
gggttattgaagcgacaatgatttagcttcctc

SEQ ID NO: 539872 - DNA, 33 bp, Homo sapien
gggttattgaagcgacgatgatttagcttcctc

SEQ ID NO: 539873 - DNA, 33 bp, Homo sapien
cctctccttttcgtacaaccctgacagcttggt

SEQ ID NO: 539874 - DNA, 33 bp, Homo sapien
cctctccttttcgtaccaccctgacagcttggt

SEQ ID NO: 539875 - DNA, 33 bp, Homo sapien
aaatgttcctcttcaacaccagagaaagaaaag

SEQ ID NO: 539876 - DNA, 33 bp, Homo sapien
aaatgttcctcttcaataccagagaaagaaaag

SEQ ID NO: 539877 - DNA, 33 bp, Homo sapien
aaggactcacaaaaacaaaggccgagcaaatag

SEQ ID NO: 539878 - DNA, 33 bp, Homo sapien
aaggactcacaaaaacgaaggccgagcaaatag

SEQ ID NO: 539879 - DNA, 33 bp, Homo sapien
aaagtgacaaactacaactggttcctcagaaaa

SEQ ID NO: 539880 - DNA, 33 bp, Homo sapien
aaagtgacaaactacagctggttcctcagaaaa

SEQ ID NO: 539881 - DNA, 33 bp, Homo sapien
tgggctgtaacccaaaatacaaatgaactatgc

SEQ ID NO: 539882 - DNA, 33 bp, Homo sapien
tgggctgtaacccaaagtacaaatgaactatgc

SEQ ID NO: 539883 - DNA, 33 bp, Homo sapien
acggactgtgaggaacaaagtaaaatccttttt

SEQ ID NO: 539884 - DNA, 33 bp, Homo sapien
acggactgtgaggaacgaagtaaaatccttttt

SEQ ID NO: 539885 - DNA, 33 bp, Homo sapien
aacaaaacctcttctcacagtttacataagcta

SEQ ID NO: 539886 - DNA, 33 bp, Homo sapien
aacaaaacctcttctctcagtttacataagcta

SEQ ID NO: 539887 - DNA, 33 bp, Homo sapien
gggatcaataccttgcagaggctagctgccagt

SEQ ID NO: 539888 - DNA, 33 bp, Homo sapien
gggatcaataccttgcggaggctagctgccagt

SEQ ID NO: 539889 - DNA, 33 bp, Homo sapien
caatgagtctccaccccaccaatggcaatgggg

SEQ ID NO: 539890 - DNA, 33 bp, Homo sapien
caatgagtctccacccgaccaatggcaatgggg

SEQ ID NO: 539891 - DNA, 33 bp, Homo sapien
tttttgtcaggaaataacagctttaagcatttt

SEQ ID NO: 539892 - DNA, 33 bp, Homo sapien
tttttgtcaggaaatagcagctttaagcatttt

SEQ ID NO: 539893 - DNA, 33 bp, Homo sapien
ctaccactggcaagaccgatgctaaccttactc

SEQ ID NO: 539894 - DNA, 33 bp, Homo sapien
ctaccactggcaagactgatgctaaccttactc

SEQ ID NO: 539895 - DNA, 33 bp, Homo sapien
taatcatggaaatatccatattggtcacttatg

SEQ ID NO: 539896 - DNA, 33 bp, Homo sapien
taatcatggaaatatctatattggtcacttatg

SEQ ID NO: 539897 - DNA, 33 bp, Homo sapien
ccgtggattaccactcaaggtgaatacagaatt

SEQ ID NO: 539898 - DNA, 33 bp, Homo sapien
ccgtggattaccactcgaggtgaatacagaatt

SEQ ID NO: 539899 - DNA, 33 bp, Homo sapien
tcccactactgtccaacgggaacgtaatcactt

SEQ ID NO: 539900 - DNA, 33 bp, Homo sapien
tcccactactgtccaatgggaacgtaatcactt

SEQ ID NO: 539901 - DNA, 33 bp, Homo sapien
gtccttaagaatctcacagaagtaagtaactcc

SEQ ID NO: 539902 - DNA, 33 bp, Homo sapien
gtccttaagaatctcatagaagtaagtaactcc

SEQ ID NO: 539903 - DNA, 33 bp, Homo sapien
ttttcttacatctgatcaaacagtggaggtacg

SEQ ID NO: 539904 - DNA, 33 bp, Homo sapien
ttttcttacatctgatgaaacagtggaggtacg

SEQ ID NO: 539905 - DNA, 33 bp, Homo sapien
ctttgccagaaatacgccctcatttatcatatg

SEQ ID NO: 539906 - DNA, 33 bp, Homo sapien
ctttgccagaaatacgtcctcatttatcatatg

SEQ ID NO: 539907 - DNA, 33 bp, Homo sapien
aaatgccatgtggtatcagcaaggtcaataatg

SEQ ID NO: 539908 - DNA, 33 bp, Homo sapien
aaatgccatgtggtattagcaaggtcaataatg

SEQ ID NO: 539909 - DNA, 33 bp, Homo sapien
ttttaaaaatcgcaaacttctgccattcttctt

SEQ ID NO: 539910 - DNA, 33 bp, Homo sapien
ttttaaaaatcgcaaatttctgccattcttctt

SEQ ID NO: 539911 - DNA, 33 bp, Homo sapien
cctgagaaccattcaaacacctaccagccctac

SEQ ID NO: 539912 - DNA, 33 bp, Homo sapien
cctgagaaccattcaaccacctaccagccctac

SEQ ID NO: 539913 - DNA, 33 bp, Homo sapien
ctactctgttaacaaactccttcctacttctct

SEQ ID NO: 539914 - DNA, 33 bp, Homo sapien
ctactctgttaacaaattccttcctacttctct

SEQ ID NO: 539915 - DNA, 33 bp, Homo sapien
aaatagcctttcctcaatgaagactcctctggc

SEQ ID NO: 539916 - DNA, 33 bp, Homo sapien
aaatagcctttcctcagtgaagactcctctggc

SEQ ID NO: 539917 - DNA, 33 bp, Homo sapien
tttaaaggttcccatacagaagtgttatgaatc

SEQ ID NO: 539918 - DNA, 33 bp, Homo sapien
tttaaaggttcccatagagaagtgttatgaatc

SEQ ID NO: 539919 - DNA, 33 bp, Homo sapien
tcaaattttactgaaacgagcctataaggaatt

SEQ ID NO: 539920 - DNA, 33 bp, Homo sapien
tcaaattttactgaaatgagcctataaggaatt

SEQ ID NO: 539921 - DNA, 33 bp, Homo sapien
tggcttggccctgatgaaacctacttgcacctc

SEQ ID NO: 539922 - DNA, 33 bp, Homo sapien
tggcttggccctgatggaacctacttgcacctc

SEQ ID NO: 539923 - DNA, 33 bp, Homo sapien
actagtgtttccctgcaacatcattttttattt

SEQ ID NO: 539924 - DNA, 33 bp, Homo sapien
actagtgtttccctgcgacatcattttttattt

SEQ ID NO: 539925 - DNA, 33 bp, Homo sapien
aattttgcctgccacaatcttaggtgttgtttc

SEQ ID NO: 539926 - DNA, 33 bp, Homo sapien
aattttgcctgccacagtcttaggtgttgtttc

SEQ ID NO: 539927 - DNA, 33 bp, Homo sapien
ctccattaacagcttaaagatgagtgaaactgc

SEQ ID NO: 539928 - DNA, 33 bp, Homo sapien
ctccattaacagcttatagatgagtgaaactgc

SEQ ID NO: 539929 - DNA, 33 bp, Homo sapien
gccccttctaggttgacgacgtctatatcatgc

SEQ ID NO: 539930 - DNA, 33 bp, Homo sapien
gccccttctaggttgatgacgtctatatcatgc

SEQ ID NO: 539931 - DNA, 33 bp, Homo sapien
aatcaaatttttgccaatcaaatacattcactt

SEQ ID NO: 539932 - DNA, 33 bp, Homo sapien
aatcaaatttttgccagtcaaatacattcactt

SEQ ID NO: 539933 - DNA, 33 bp, Homo sapien
ataattattatcaaaccgtaatgctattattca

SEQ ID NO: 539934 - DNA, 33 bp, Homo sapien
ataattattatcaaactgtaatgctattattca

SEQ ID NO: 539935 - DNA, 33 bp, Homo sapien
tattattcattgctgcaaccaaccagtatgtag

SEQ ID NO: 539936 - DNA, 33 bp, Homo sapien
tattattcattgctgcgaccaaccagtatgtag

SEQ ID NO: 539937 - DNA, 33 bp, Homo sapien
ttctctatacaacaaaatcaatttcagaaacaa

SEQ ID NO: 539938 - DNA, 33 bp, Homo sapien
ttctctatacaacaaactcaatttcagaaacaa

SEQ ID NO: 539939 - DNA, 33 bp, Homo sapien
ggtaagtcatggtgatcagtacttatcaactaa

SEQ ID NO: 539940 - DNA, 33 bp, Homo sapien
ggtaagtcatggtgatgagtacttatcaactaa

SEQ ID NO: 539941 - DNA, 33 bp, Homo sapien
acaagacactgtgcccaggactttcaccatgtc

SEQ ID NO: 539942 - DNA, 33 bp, Homo sapien
acaagacactgtgcccgggactttcaccatgtc

SEQ ID NO: 539943 - DNA, 33 bp, Homo sapien
atctctctacgccacagaaatctacagcccaaa

SEQ ID NO: 539944 - DNA, 33 bp, Homo sapien
atctctctacgccacataaatctacagcccaaa

SEQ ID NO: 539945 - DNA, 33 bp, Homo sapien
ggtgaacagaagacccaaatagaataatttaga

SEQ ID NO: 539946 - DNA, 33 bp, Homo sapien
ggtgaacagaagacccgaatagaataatttaga

SEQ ID NO: 539947 - DNA, 33 bp, Homo sapien
cctgaactaattgacacagaatatggtgtagct

SEQ ID NO: 539948 - DNA, 33 bp, Homo sapien
cctgaactaattgacagagaatatggtgtagct

SEQ ID NO: 539949 - DNA, 33 bp, Homo sapien
ggtgtgcttcatatgcagaactgagagtctcag

SEQ ID NO: 539950 - DNA, 33 bp, Homo sapien
ggtgtgcttcatatgcggaactgagagtctcag

SEQ ID NO: 539951 - DNA, 33 bp, Homo sapien
agagtgggtttgggcaagagttaaataatatct

SEQ ID NO: 539952 - DNA, 33 bp, Homo sapien
agagtgggtttgggcaggagttaaataatatct

SEQ ID NO: 539953 - DNA, 33 bp, Homo sapien
aaagttaataaggcacaattaaaggaatcaaaa

SEQ ID NO: 539954 - DNA, 33 bp, Homo sapien
aaagttaataaggcacgattaaaggaatcaaaa

SEQ ID NO: 539955 - DNA, 33 bp, Homo sapien
tcagcctaaaagctagaattgtctggctggaaa

SEQ ID NO: 539956 - DNA, 33 bp, Homo sapien
tcagcctaaaagctaggattgtctggctggaaa

SEQ ID NO: 539957 - DNA, 33 bp, Homo sapien
gattagcgacagcaagaatcagctaacatccgt

SEQ ID NO: 539958 - DNA, 33 bp, Homo sapien
gattagcgacagcaagtatcagctaacatccgt

SEQ ID NO: 539959 - DNA, 33 bp, Homo sapien
aggggaatttaattcacgaaatagattataaaa

SEQ ID NO: 539960 - DNA, 33 bp, Homo sapien
aggggaatttaattcaggaaatagattataaaa

SEQ ID NO: 539961 - DNA, 33 bp, Homo sapien
ctgctcttttcagaagacctccctagatggcta

SEQ ID NO: 539962 - DNA, 33 bp, Homo sapien
ctgctcttttcagaagccctccctagatggcta

SEQ ID NO: 539963 - DNA, 33 bp, Homo sapien
ggatgctgatgcttcaaagtgatatgggaaagt

SEQ ID NO: 539964 - DNA, 33 bp, Homo sapien
ggatgctgatgcttcagagtgatatgggaaagt

SEQ ID NO: 539965 - DNA, 33 bp, Homo sapien
attctcttcatcgtgcaagttgttgcctgaata

SEQ ID NO: 539966 - DNA, 33 bp, Homo sapien
attctcttcatcgtgcgagttgttgcctgaata

SEQ ID NO: 539967 - DNA, 33 bp, Homo sapien; identical to SEQ ID NO: 539965

SEQ ID NO: 539968 - DNA, 33 bp, Homo sapien; identical to SEQ ID NO: 539966

SEQ ID NO: 539969 - DNA, 33 bp, Homo sapien
caaagcaccacaaataaccactgcaatcttaaa

SEQ ID NO: 539970 - DNA, 33 bp, Homo sapien
caaagcaccacaaatacccactgcaatcttaaa

SEQ ID NO: 539971 - DNA, 33 bp, Homo sapien
cccttttccttagtggaagcgactttatcttat

SEQ ID NO: 539972 - DNA, 33 bp, Homo sapien
cccttttccttagtggcagcgactttatcttat

SEQ ID NO: 539973 - DNA, 33 bp, Homo sapien
cacatccgtgttcaaacatttcctccacttcat

SEQ ID NO: 539974 - DNA, 33 bp, Homo sapien
cacatccgtgttcaaatatttcctccacttcat

SEQ ID NO: 539975 - DNA, 33 bp, Homo sapien
cctaatagtaatagtcaacacttggtgagcact

SEQ ID NO: 539976 - DNA, 33 bp, Homo sapien
cctaatagtaatagtcgacacttggtgagcact

SEQ ID NO: 539977 - DNA, 33 bp, Homo sapien
atgtcagtatgatgaccctgtttcaatttcttt

SEQ ID NO: 539978 - DNA, 33 bp, Homo sapien
atgtcagtatgatgactctgtttcaatttcttt

SEQ ID NO: 539979 - DNA, 33 bp, Homo sapien
ggacatcagagacctgaataagccagatagata

SEQ ID NO: 539980 - DNA, 33 bp, Homo sapien
ggacatcagagacctgcataagccagatagata

SEQ ID NO: 539981 - DNA, 33 bp, Homo sapien
tataccagagaacaagaacacaatctacaatca

SEQ ID NO: 539982 - DNA, 33 bp, Homo sapien
tataccagagaacaaggacacaatctacaatca

SEQ ID NO: 539983 - DNA, 33 bp, Homo sapien
ctgaggtagaatgccaaaagcactgactcattt

SEQ ID NO: 539984 - DNA, 33 bp, Homo sapien
ctgaggtagaatgccacaagcactgactcattt

SEQ ID NO: 539985 - DNA, 33 bp, Homo sapien
ctcactgcgagtgccacgccagcatctgaatgt

SEQ ID NO: 539986 - DNA, 33 bp, Homo sapien
ctcactgcgagtgccaggccagcatctgaatgt

SEQ ID NO: 539987 - DNA, 33 bp, Homo sapien
ccttgcttattaaaaacgcaaattaccatcttg

SEQ ID NO: 539988 - DNA, 33 bp, Homo sapien
ccttgcttattaaaaatgcaaattaccatcttg

SEQ ID NO: 539989 - DNA, 33 bp, Homo sapien
atcttgatcttttggccaaatcctgcatcatta

SEQ ID NO: 539990 - DNA, 33 bp, Homo sapien
atcttgatcttttggctaaatcctgcatcatta

SEQ ID NO: 539991 - DNA, 33 bp, Homo sapien
attaggaattgtactaacattctcttaattcta

SEQ ID NO: 539992 - DNA, 33 bp, Homo sapien
attaggaattgtactagcattctcttaattcta

SEQ ID NO: 539993 - DNA, 33 bp, Homo sapien
ctgatttgcacttcaactgggtgatttggggaa

SEQ ID NO: 539994 - DNA, 33 bp, Homo sapien
ctgatttgcacttcaattgggtgatttggggaa

SEQ ID NO: 539995 - DNA, 33 bp, Homo sapien
ttttgtaaatgtcctgaaattattccacaaagc

SEQ ID NO: 539996 - DNA, 33 bp, Homo sapien
ttttgtaaatgtcctgcaattattccacaaagc

SEQ ID NO: 539997 - DNA, 33 bp, Homo sapien
tttttgaaacacctccaagttatccctccaggt

SEQ ID NO: 539998 - DNA, 33 bp, Homo sapien
tttttgaaacacctcctagttatccctccaggt

SEQ ID NO: 539999 - DNA, 33 bp, Homo sapien
catacagtgacgttcccgcagtcccacacagca

SEQ ID NO: 540000 - DNA, 33 bp, Homo sapien
catacagtgacgttcctgcagtcccacacagca

SEQ ID NO: 540001 - DNA, 33 bp, Homo sapien
tagttgagcaaaaggacgggcgaaattctgtct

SEQ ID NO: 540002 - DNA, 33 bp, Homo sapien
tagttgagcaaaaggatgggcgaaattctgtct

SEQ ID NO: 540003 - DNA, 33 bp, Homo sapien
cctgagcaaaaacagagagttgtggctttcttc

SEQ ID NO: 540004 - DNA, 33 bp, Homo sapien
cctgagcaaaaacagatagttgtggctttcttc

SEQ ID NO: 540005 - DNA, 33 bp, Homo sapien
agtcaccattattgcaatagctctctctcagct

SEQ ID NO: 540006 - DNA, 33 bp, Homo sapien
agtcaccattattgcagtagctctctctcagct

SEQ ID NO: 540007 - DNA, 33 bp, Homo sapien
ctctctcttgctccacaatggtaagatgtgctt

SEQ ID NO: 540008 - DNA, 33 bp, Homo sapien
ctctctcttgctccacgatggtaagatgtgctt

SEQ ID NO: 540009 - DNA, 33 bp, Homo sapien
ttgttggctgataatacctctttgtgtcatcag

SEQ ID NO: 540010 - DNA, 33 bp, Homo sapien
ttgttggctgataatatctctttgtgtcatcag

SEQ ID NO: 540011 - DNA, 33 bp, Homo sapien
ataagattcctggtacaacgtctggaacatact

SEQ ID NO: 540012 - DNA, 33 bp, Homo sapien
ataagattcctggtacgacgtctggaacatact

SEQ ID NO: 540013 - DNA, 33 bp, Homo sapien
gatcactagggagaaaagaatccgaaagttaca

SEQ ID NO: 540014 - DNA, 33 bp, Homo sapien
gatcactagggagaaacgaatccgaaagttaca

SEQ ID NO: 540015 - DNA, 33 bp, Homo sapien
taggccttgaggtagacggacttgagttctatt

SEQ ID NO: 540016 - DNA, 33 bp, Homo sapien
taggccttgaggtagatggacttgagttctatt

SEQ ID NO: 540017 - DNA, 33 bp, Homo sapien
cctgttcaatccctataaattctgtgcatcttg

SEQ ID NO: 540018 - DNA, 33 bp, Homo sapien
cctgttcaatccctatgaattctgtgcatcttg

SEQ ID NO: 540019 - DNA, 33 bp, Homo sapien
gacagaatagaattgcaaatttagaagtaaacc

SEQ ID NO: 540020 - DNA, 33 bp, Homo sapien
gacagaatagaattgcgaatttagaagtaaacc

SEQ ID NO: 540021 - DNA, 33 bp, Homo sapien
tttggtgccaacagaaagtgtaaatacatgctg

SEQ ID NO: 540022 - DNA, 33 bp, Homo sapien
tttggtgccaacagaacgtgtaaatacatgctg

SEQ ID NO: 540023 - DNA, 33 bp, Homo sapien
ggggaggggagtgaaaggttcctgtgtattttt

SEQ ID NO: 540024 - DNA, 33 bp, Homo sapien
ggggaggggagtgaaatgttcctgtgtattttt

SEQ ID NO: 540025 - DNA, 33 bp, Homo sapien
cccacatgagaatataacaccattttcagaaaa

SEQ ID NO: 540026 - DNA, 33 bp, Homo sapien
cccacatgagaatataccaccattttcagaaaa

SEQ ID NO: 540027 - DNA, 33 bp, Homo sapien
aaatcaggttcatttaaagttgctagaaggctg

SEQ ID NO: 540028 - DNA, 33 bp, Homo sapien
aaatcaggttcatttagagttgctagaaggctg

SEQ ID NO: 540029 - DNA, 33 bp, Homo sapien
ctgctaaggttgtgataataatcgataagtaat

SEQ ID NO: 540030 - DNA, 33 bp, Homo sapien
ctgctaaggttgtgatgataatcgataagtaat

SEQ ID NO: 540031 - DNA, 33 bp, Homo sapien
aagtctttcatctcacagaagtcaattagtata

SEQ ID NO: 540032 - DNA, 33 bp, Homo sapien
aagtctttcatctcactgaagtcaattagtata

SEQ ID NO: 540033 - DNA, 33 bp, Homo sapien
gagaaaggtgctaccccgggaatgtgacagaga

SEQ ID NO: 540034 - DNA, 33 bp, Homo sapien
gagaaaggtgctaccctgggaatgtgacagaga

SEQ ID NO: 540035 - DNA, 33 bp, Homo sapien
aaaattgagatgtgccaaaatcaacctgggaga

SEQ ID NO: 540036 - DNA, 33 bp, Homo sapien
aaaattgagatgtgccgaaatcaacctgggaga

SEQ ID NO: 540037 - DNA, 33 bp, Homo sapien
ataaacactaagcttcacttgattcagctctac

SEQ ID NO: 540038 - DNA, 33 bp, Homo sapien
ataaacactaagcttcccttgattcagctctac

SEQ ID NO: 540039 - DNA, 33 bp, Homo sapien
ttatgaagacagcaaaataataaaggggtggct

SEQ ID NO: 540040 - DNA, 33 bp, Homo sapien
ttatgaagacagcaaagtaataaaggggtggct

SEQ ID NO: 540041 - DNA, 33 bp, Homo sapien
caagacctgactcaaagaaaaacaaaaagtgaa

SEQ ID NO: 540042 - DNA, 33 bp, Homo sapien
caagacctgactcaaataaaaacaaaaagtgaa

SEQ ID NO: 540043 - DNA, 33 bp, Homo sapien
atatttatttttaaagccagttgtagctgcaga

SEQ ID NO: 540044 - DNA, 33 bp, Homo sapien
atatttatttttaaagtcagttgtagctgcaga

SEQ ID NO: 540045 - DNA, 33 bp, Homo sapien
gaattgcagtataataagaaaaatgaaaataaa

SEQ ID NO: 540046 - DNA, 33 bp, Homo sapien
gaattgcagtataataggaaaaatgaaaataaa

SEQ ID NO: 540047 - DNA, 33 bp, Homo sapien
cttgaccatctatccaaacagcgatcccgcctg

SEQ ID NO: 540048 - DNA, 33 bp, Homo sapien
cttgaccatctatccacacagcgatcccgcctg

SEQ ID NO: 540049 - DNA, 33 bp, Homo sapien
tggaaacatggaatcacaggctgtaagaactag

SEQ ID NO: 540050 - DNA, 33 bp, Homo sapien
tggaaacatggaatcataggctgtaagaactag

SEQ ID NO: 540051 - DNA, 33 bp, Homo sapien
tgtgcctgggatgagcaaaatttagaaacagag

SEQ ID NO: 540052 - DNA, 33 bp, Homo sapien
tgtgcctgggatgagcgaaatttagaaacagag

SEQ ID NO: 540053 - DNA, 33 bp, Homo sapien
tggacatcttgagagcccagtaaaatgatgagt

SEQ ID NO: 540054 - DNA, 33 bp, Homo sapien
tggacatcttgagagctcagtaaaatgatgagt

SEQ ID NO: 540055 - DNA, 33 bp, Homo sapien
atgctctaatcgaaacgcttttttaatccaaca

SEQ ID NO: 540056 - DNA, 33 bp, Homo sapien
atgctctaatcgaaactcttttttaatccaaca

SEQ ID NO: 540057 - DNA, 33 bp, Homo sapien
gcgctctcagcaggacagaaatgacgaataact

SEQ ID NO: 540058 - DNA, 33 bp, Homo sapien
gcgctctcagcaggacggaaatgacgaataact

SEQ ID NO: 540059 - DNA, 33 bp, Homo sapien
tacctcggtagtgaaaaaatttattgacacctg

SEQ ID NO: 540060 - DNA, 33 bp, Homo sapien
tacctcggtagtgaaagaatttattgacacctg

SEQ ID NO: 540061 - DNA, 33 bp, Homo sapien
atctagccaagttgacacataaggttaatcaca

SEQ ID NO: 540062 - DNA, 33 bp, Homo sapien
atctagccaagttgacgcataaggttaatcaca

SEQ ID NO: 540063 - DNA, 33 bp, Homo sapien
aaagaaaaaatgagaaagcaaagggacaaaata

SEQ ID NO: 540064 - DNA, 33 bp, Homo sapien
aaagaaaaaatgagaaggcaaagggacaaaata

SEQ ID NO: 540065 - DNA, 33 bp, Homo sapien
gaatgtcaactaataaatgtaaaagcaatgata

SEQ ID NO: 540066 - DNA, 33 bp, Homo sapien
gaatgtcaactaataagtgtaaaagcaatgata

SEQ ID NO: 540067 - DNA, 33 bp, Homo sapien
gtgaaaatcaaatgtacgtaactaagactctca

SEQ ID NO: 540068 - DNA, 33 bp, Homo sapien
gtgaaaatcaaatgtaggtaactaagactctca

SEQ ID NO: 540069 - DNA, 33 bp, Homo sapien
gaaggataacagaagaagactgacagttctgta

SEQ ID NO: 540070 - DNA, 33 bp, Homo sapien
gaaggataacagaagaggactgacagttctgta

SEQ ID NO: 540071 - DNA, 33 bp, Homo sapien
taattcactctcttaacatctgtaaaagaaaaa

SEQ ID NO: 540072 - DNA, 33 bp, Homo sapien
taattcactctcttaatatctgtaaaagaaaaa

SEQ ID NO: 540073 - DNA, 33 bp, Homo sapien
ttgtttaataaaacgaaaagatgtccaatttcg

SEQ ID NO: 540074 - DNA, 33 bp, Homo sapien
ttgtttaataaaacgagaagatgtccaatttcg

SEQ ID NO: 540075 - DNA, 33 bp, Homo sapien
atttacttctactcatgaacaaacatgtatttt

SEQ ID NO: 540076 - DNA, 33 bp, Homo sapien
atttacttctactcattaacaaacatgtatttt

SEQ ID NO: 540077 - DNA, 33 bp, Homo sapien
gatactttactgtataaggcacttgtattttat

SEQ ID NO: 540078 - DNA, 33 bp, Homo sapien
gatactttactgtatagggcacttgtattttat

SEQ ID NO: 540079 - DNA, 33 bp, Homo sapien
ctctaggggaggagacagacttgtaaagcaata

SEQ ID NO: 540080 - DNA, 33 bp, Homo sapien
ctctaggggaggagacggacttgtaaagcaata

SEQ ID NO: 540081 - DNA, 33 bp, Homo sapien
ttttacagcaggtaagcataacttcaagggata

SEQ ID NO: 540082 - DNA, 33 bp, Homo sapien
ttttacagcaggtaaggataacttcaagggata

SEQ ID NO: 540083 - DNA, 33 bp, Homo sapien
ctcttatgcctcatagaatatagttgaacatca

SEQ ID NO: 540084 - DNA, 33 bp, Homo sapien
ctcttatgcctcataggatatagttgaacatca

SEQ ID NO: 540085 - DNA, 33 bp, Homo sapien
cattgaaaaaagatgaactcagctagaatcctt

SEQ ID NO: 540086 - DNA, 33 bp, Homo sapien
cattgaaaaaagatgatctcagctagaatcctt

SEQ ID NO: 540087 - DNA, 33 bp, Homo sapien
tcctacagtggcaatacagtaactcagttctta

SEQ ID NO: 540088 - DNA, 33 bp, Homo sapien
tcctacagtggcaatatagtaactcagttctta

SEQ ID NO: 540089 - DNA, 33 bp, Homo sapien
tttatgactcagaaaacatctttcctcctccgc

SEQ ID NO: 540090 - DNA, 33 bp, Homo sapien
tttatgactcagaaaatatctttcctcctccgc

SEQ ID NO: 540091 - DNA, 33 bp, Homo sapien
agctcctgcctagagaagagcgatgtctaagag

SEQ ID NO: 540092 - DNA, 33 bp, Homo sapien
agctcctgcctagagatgagcgatgtctaagag

SEQ ID NO: 540093 - DNA, 33 bp, Homo sapien
tgtggagctgtctgtacgttgggaagtggcatg

SEQ ID NO: 540094 - DNA, 33 bp, Homo sapien
tgtggagctgtctgtaggttgggaagtggcatg

SEQ ID NO: 540095 - DNA, 33 bp, Homo sapien
ttattataggcagtccaaaaacagtgaaatcct

SEQ ID NO: 540096 - DNA, 33 bp, Homo sapien
ttattataggcagtccgaaaacagtgaaatcct

SEQ ID NO: 540097 - DNA, 33 bp, Homo sapien
tgttcctagacacaaaataagttaataatgttc

SEQ ID NO: 540098 - DNA, 33 bp, Homo sapien
tgttcctagacacaaagtaagttaataatgttc

SEQ ID NO: 540099 - DNA, 33 bp, Homo sapien
ctaataagtgttggtacggatgtagagaaattg

SEQ ID NO: 540100 - DNA, 33 bp, Homo sapien
ctaataagtgttggtatggatgtagagaaattg

SEQ ID NO: 540101 - DNA, 33 bp, Homo sapien
tgtttacctgtgtcaacaaaatagacctcatca

SEQ ID NO: 540102 - DNA, 33 bp, Homo sapien
tgtttacctgtgtcaataaaatagacctcatca

SEQ ID NO: 540103 - DNA, 33 bp, Homo sapien
taattagcaacatgacaaaaattagttgattta

SEQ ID NO: 540104 - DNA, 33 bp, Homo sapien
taattagcaacatgaccaaaattagttgattta

SEQ ID NO: 540105 - DNA, 33 bp, Homo sapien
gtgaatgctcatagaacagctaaaaactagcaa

SEQ ID NO: 540106 - DNA, 33 bp, Homo sapien
gtgaatgctcatagaatagctaaaaactagcaa

SEQ ID NO: 540107 - DNA, 33 bp, Homo sapien
agaaaagggtccaaaaacagatgaatctaccaa

SEQ ID NO: 540108 - DNA, 33 bp, Homo sapien
agaaaagggtccaaaagcagatgaatctaccaa

SEQ ID NO: 540109 - DNA, 33 bp, Homo sapien
aataagcttcttgaaaactcatggaacattcaa

SEQ ID NO: 540110 - DNA, 33 bp, Homo sapien
aataagcttcttgaaatctcatggaacattcaa

SEQ ID NO: 540111 - DNA, 33 bp, Homo sapien
ctattggctggtaatcaatatgtacctcatgca

SEQ ID NO: 540112 - DNA, 33 bp, Homo sapien
ctattggctggtaatcgatatgtacctcatgca

SEQ ID NO: 540113 - DNA, 33 bp, Homo sapien
gtagtttatgctaacaatgtcatctgtgaatgc

SEQ ID NO: 540114 - DNA, 33 bp, Homo sapien
gtagtttatgctaacagtgtcatctgtgaatgc

SEQ ID NO: 540115 - DNA, 33 bp, Homo sapien
acctggccattttttcacagcatgggactcctc

SEQ ID NO: 540116 - DNA, 33 bp, Homo sapien
acctggccattttttcgcagcatgggactcctc

SEQ ID NO: 540117 - DNA, 33 bp, Homo sapien
ctagatacagagtgaaactgcagaatatcaatg

SEQ ID NO: 540118 - DNA, 33 bp, Homo sapien
ctagatacagagtgaagctgcagaatatcaatg

SEQ ID NO: 540119 - DNA, 33 bp, Homo sapien
taactaaaacattccaatcaccgaataaagata

SEQ ID NO: 540120 - DNA, 33 bp, Homo sapien
taactaaaacattccagtcaccgaataaagata

SEQ ID NO: 540121 - DNA, 33 bp, Homo sapien
ggagcaaaatttcagaagcaaaataactaaaac

SEQ ID NO: 540122 - DNA, 33 bp, Homo sapien
ggagcaaaatttcagaggcaaaataactaaaac

SEQ ID NO: 540123 - DNA, 33 bp, Homo sapien
aactgttaaagggacaatgacgatgataatgtt

SEQ ID NO: 540124 - DNA, 33 bp, Homo sapien
aactgttaaagggacactgacgatgataatgtt

SEQ ID NO: 540125 - DNA, 33 bp, Homo sapien
cctatcatgggacttcaccctgtgatcatgtga

SEQ ID NO: 540126 - DNA, 33 bp, Homo sapien
cctatcatgggacttcgccctgtgatcatgtga

SEQ ID NO: 540127 - DNA, 33 bp, Homo sapien
ctaagaatagtcaagacgtatatgaagtatgtg

SEQ ID NO: 540128 - DNA, 33 bp, Homo sapien
ctaagaatagtcaagaggtatatgaagtatgtg

SEQ ID NO: 540129 - DNA, 33 bp, Homo sapien
aaagccatatttggagaagagtgaagttcctag

SEQ ID NO: 540130 - DNA, 33 bp, Homo sapien
aaagccatatttggaggagagtgaagttcctag

SEQ ID NO: 540131 - DNA, 33 bp, Homo sapien
ctgcgataaggtagcacgaaggggaactacaga

SEQ ID NO: 540132 - DNA, 33 bp, Homo sapien
ctgcgataaggtagcatgaaggggaactacaga

SEQ ID NO: 540133 - DNA, 33 bp, Homo sapien
ctgatcaattcttctggattcggctgaccattt

SEQ ID NO: 540134 - DNA, 33 bp, Homo sapien
ctgatcaattcttctgtattcggctgaccattt

SEQ ID NO: 540135 - DNA, 33 bp, Homo sapien
tcaggtttttcatttggaaagatctcagggctt

SEQ ID NO: 540136 - DNA, 33 bp, Homo sapien
tcaggtttttcatttgtaaagatctcagggctt

SEQ ID NO: 540137 - DNA, 33 bp, Homo sapien
tctatcctacaaaaaccgagagacagggatgct

SEQ ID NO: 540138 - DNA, 33 bp, Homo sapien
tctatcctacaaaaactgagagacagggatgct

SEQ ID NO: 540139 - DNA, 33 bp, Homo sapien
ctaatttagattggacagcatcaaggtcacaaa

SEQ ID NO: 540140 - DNA, 33 bp, Homo sapien
ctaatttagattggacggcatcaaggtcacaaa

SEQ ID NO: 540141 - DNA, 33 bp, Homo sapien
ttagcagaggaggtgcaactcataatagttttt

SEQ ID NO: 540142 - DNA, 33 bp, Homo sapien
ttagcagaggaggtgcgactcataatagttttt

SEQ ID NO: 540143 - DNA, 33 bp, Homo sapien
aaattataaaggaagactagaaatcacttacct

SEQ ID NO: 540144 - DNA, 33 bp, Homo sapien
aaattataaaggaagagtagaaatcacttacct

SEQ ID NO: 540145 - DNA, 33 bp, Homo sapien
ccaggaaccaagtctcagagacaggacagcctg

SEQ ID NO: 540146 - DNA, 33 bp, Homo sapien
ccaggaaccaagtctcggagacaggacagcctg

SEQ ID NO: 540147 - DNA, 33 bp, Homo sapien
aaaatgcacagctgtccaataagatgattcagg

SEQ ID NO: 540148 - DNA, 33 bp, Homo sapien
aaaatgcacagctgtctaataagatgattcagg

SEQ ID NO: 540149 - DNA, 33 bp, Homo sapien
tttgcctggcatatgcaaactagcaaagctcat

SEQ ID NO: 540150 - DNA, 33 bp, Homo sapien
tttgcctggcatatgcgaactagcaaagctcat

SEQ ID NO: 540151 - DNA, 33 bp, Homo sapien
tttcttctttgtaaaccatgtcatgtggaaaga

SEQ ID NO: 540152 - DNA, 33 bp, Homo sapien
tttcttctttgtaaactatgtcatgtggaaaga

SEQ ID NO: 540153 - DNA, 33 bp, Homo sapien
ttgcttctttttatacactttggaatgaatttg

SEQ ID NO: 540154 - DNA, 33 bp, Homo sapien
ttgcttctttttataccctttggaatgaatttg

SEQ ID NO: 540155 - DNA, 33 bp, Homo sapien
gggatatggatccacaacatattacatttattg

SEQ ID NO: 540156 - DNA, 33 bp, Homo sapien
gggatatggatccacaccatattacatttattg

SEQ ID NO: 540157 - DNA, 33 bp, Homo sapien
gtgtgaaagtgccttacggacaccctagtggtc

SEQ ID NO: 540158 - DNA, 33 bp, Homo sapien
gtgtgaaagtgccttagggacaccctagtggtc

SEQ ID NO: 540159 - DNA, 33 bp, Homo sapien
tttaattcatatagaaacttgagtcacacaact

SEQ ID NO: 540160 - DNA, 33 bp, Homo sapien
tttaattcatatagaagcttgagtcacacaact

SEQ ID NO: 540161 - DNA, 33 bp, Homo sapien
aggtcagtaatccttccctataacacacagcca

SEQ ID NO: 540162 - DNA, 33 bp, Homo sapien
aggtcagtaatccttctctataacacacagcca

SEQ ID NO: 540163 - DNA, 33 bp, Homo sapien
ggatttttcaccaaagaaatctgtgtttcatta

SEQ ID NO: 540164 - DNA, 33 bp, Homo sapien
ggatttttcaccaaaggaatctgtgtttcatta

SEQ ID NO: 540165 - DNA, 33 bp, Homo sapien
cccagccaaatcatcacagctgccagccagtta

SEQ ID NO: 540166 - DNA, 33 bp, Homo sapien
cccagccaaatcatcagagctgccagccagtta

SEQ ID NO: 540167 - DNA, 33 bp, Homo sapien
ctgcgtactctaacaacgtgagaactttatgtg

SEQ ID NO: 540168 - DNA, 33 bp, Homo sapien
ctgcgtactctaacaatgtgagaactttatgtg

SEQ ID NO: 540169 - DNA, 33 bp, Homo sapien
tcttcctgccttagaaagggtggatgtcacaga

SEQ ID NO: 540170 - DNA, 33 bp, Homo sapien
tcttcctgccttagaaggggtggatgtcacaga

SEQ ID NO: 540171 - DNA, 33 bp, Homo sapien
gtaattgttaataatacggcactttttctgagg

SEQ ID NO: 540172 - DNA, 33 bp, Homo sapien
gtaattgttaataatatggcactttttctgagg

SEQ ID NO: 540173 - DNA, 33 bp, Homo sapien
gacctcaggaggctatcaaccatctctgattat

SEQ ID NO: 540174 - DNA, 33 bp, Homo sapien
gacctcaggaggctattaaccatctctgattat

SEQ ID NO: 540175 - DNA, 33 bp, Homo sapien
tatgccaggacaatacgatccaaaagaaaacta

SEQ ID NO: 540176 - DNA, 33 bp, Homo sapien
tatgccaggacaatactatccaaaagaaaacta

SEQ ID NO: 540177 - DNA, 33 bp, Homo sapien
acattatctactgacaatgcaccaagaaagatg

SEQ ID NO: 540178 - DNA, 33 bp, Homo sapien
acattatctactgacagtgcaccaagaaagatg

SEQ ID NO: 540179 - DNA, 33 bp, Homo sapien
atttcggaatctgaaaaaaggcttttctacact

SEQ ID NO: 540180 - DNA, 33 bp, Homo sapien
atttcggaatctgaaagaaggcttttctacact

SEQ ID NO: 540181 - DNA, 33 bp, Homo sapien
tcaataagcatttttacgaccctatcaacacag

SEQ ID NO: 540182 - DNA, 33 bp, Homo sapien
tcaataagcatttttatgaccctatcaacacag

SEQ ID NO: 540183 - DNA, 33 bp, Homo sapien
tgacctttcagataacaaggctacaatggtcat

SEQ ID NO: 540184 - DNA, 33 bp, Homo sapien
tgacctttcagataacgaggctacaatggtcat

SEQ ID NO: 540185 - DNA, 33 bp, Homo sapien
atacacttgtgcaccacagaaattttggaaaat

SEQ ID NO: 540186 - DNA, 33 bp, Homo sapien
atacacttgtgcaccatagaaattttggaaaat

SEQ ID NO: 540187 - DNA, 33 bp, Homo sapien
acccagaatagcaataataatcactgcactcca

SEQ ID NO: 540188 - DNA, 33 bp, Homo sapien
acccagaatagcaatagtaatcactgcactcca

SEQ ID NO: 540189 - DNA, 33 bp, Homo sapien
tttgcctacagtctaaaagtagtgattctacgt

SEQ ID NO: 540190 - DNA, 33 bp, Homo sapien
tttgcctacagtctaacagtagtgattctacgt

SEQ ID NO: 540191 - DNA, 33 bp, Homo sapien
gagaagaagctatacaatctgataatcattaaa

SEQ ID NO: 540192 - DNA, 33 bp, Homo sapien
gagaagaagctatacagtctgataatcattaaa

SEQ ID NO: 540193 - DNA, 33 bp, Homo sapien
gtgcaggtggttcatagagtctatactgaagag

SEQ ID NO: 540194 - DNA, 33 bp, Homo sapien
gtgcaggtggttcatatagtctatactgaagag

SEQ ID NO: 540195 - DNA, 33 bp, Homo sapien
taaatggcaaaattgaaaacatttctccccact

SEQ ID NO: 540196 - DNA, 33 bp, Homo sapien
taaatggcaaaattgacaacatttctccccact

SEQ ID NO: 540197 - DNA, 33 bp, Homo sapien
ttacacctgcacagagaatggcaaggatgctcc

SEQ ID NO: 540198 - DNA, 33 bp, Homo sapien
ttacacctgcacagaggatggcaaggatgctcc

SEQ ID NO: 540199 - DNA, 33 bp, Homo sapien
tggtgtttagtgaacacatcattccatcatcca

SEQ ID NO: 540200 - DNA, 33 bp, Homo sapien
tggtgtttagtgaacagatcattccatcatcca

SEQ ID NO: 540201 - DNA, 33 bp, Homo sapien
ctggtttacatgtgacacttttttttttaattt

SEQ ID NO: 540202 - DNA, 33 bp, Homo sapien
ctggtttacatgtgacgcttttttttttaattt

SEQ ID NO: 540203 - DNA, 33 bp, Homo sapien
actaagaaatgtccaccatacaaatctggttga

SEQ ID NO: 540204 - DNA, 33 bp, Homo sapien
actaagaaatgtccactatacaaatctggttga

SEQ ID NO: 540205 - DNA, 33 bp, Homo sapien
cttcaagttggaaaaaacacagcatctgtgaaa

SEQ ID NO: 540206 - DNA, 33 bp, Homo sapien
cttcaagttggaaaaagcacagcatctgtgaaa

SEQ ID NO: 540207 - DNA, 33 bp, Homo sapien
gccacccatctgtcaccagcatacatgggcaca

SEQ ID NO: 540208 - DNA, 33 bp, Homo sapien
gccacccatctgtcactagcatacatgggcaca

SEQ ID NO: 540209 - DNA, 33 bp, Homo sapien
aacaactgataaatacaataacctagtaactgt

SEQ ID NO: 540210 - DNA, 33 bp, Homo sapien
aacaactgataaatacgataacctagtaactgt

SEQ ID NO: 540211 - DNA, 33 bp, Homo sapien
accattactcattctccatacatctgattttgc

SEQ ID NO: 540212 - DNA, 33 bp, Homo sapien
accattactcattctctatacatctgattttgc

SEQ ID NO: 540213 - DNA, 33 bp, Homo sapien
cttcatgttgggcaaaagctttgagttcacttg

SEQ ID NO: 540214 - DNA, 33 bp, Homo sapien
cttcatgttgggcaaatgctttgagttcacttg

SEQ ID NO: 540215 - DNA, 33 bp, Homo sapien
atatcagacacctgtacagttaatatctgacat

SEQ ID NO: 540216 - DNA, 33 bp, Homo sapien
atatcagacacctgtatagttaatatctgacat

SEQ ID NO: 540217 - DNA, 33 bp, Homo sapien
ggttaaagtgtctctaataatgcaaaatctaaa

SEQ ID NO: 540218 - DNA, 33 bp, Homo sapien
ggttaaagtgtctctattaatgcaaaatctaaa

SEQ ID NO: 540219 - DNA, 33 bp, Homo sapien
cagaaaaagaagagccgggaaataggcaattaa

SEQ ID NO: 540220 - DNA, 33 bp, Homo sapien
cagaaaaagaagagcctggaaataggcaattaa

SEQ ID NO: 540221 - DNA, 33 bp, Homo sapien
tggctatgcagtatgaataggaactcagggtta

SEQ ID NO: 540222 - DNA, 33 bp, Homo sapien
tggctatgcagtatgagtaggaactcagggtta

SEQ ID NO: 540223 - DNA, 33 bp, Homo sapien
tgtaaaaatgactaaacaaaatgcaacttttta

SEQ ID NO: 540224 - DNA, 33 bp, Homo sapien
tgtaaaaatgactaaagaaaatgcaacttttta

SEQ ID NO: 540225 - DNA, 33 bp, Homo sapien
gttagagctctagtcaatcattaacaccacaaa

SEQ ID NO: 540226 - DNA, 33 bp, Homo sapien
gttagagctctagtcagtcattaacaccacaaa

SEQ ID NO: 540227 - DNA, 33 bp, Homo sapien
cttacttgggcctcaaaaattttctctgatata

SEQ ID NO: 540228 - DNA, 33 bp, Homo sapien
cttacttgggcctcaagaattttctctgatata

SEQ ID NO: 540229 - DNA, 33 bp, Homo sapien
tcctgtgaattgatgacatttatctattttgaa

SEQ ID NO: 540230 - DNA, 33 bp, Homo sapien
tcctgtgaattgatgagatttatctattttgaa

SEQ ID NO: 540231 - DNA, 33 bp, Homo sapien
ctctagcaatcgactcgcaatttttggtaaaat

SEQ ID NO: 540232 - DNA, 33 bp, Homo sapien
ctctagcaatcgactctcaatttttggtaaaat

SEQ ID NO: 540233 - DNA, 33 bp, Homo sapien
gaaatatatttcctcacacttcagaagctagaa

SEQ ID NO: 540234 - DNA, 33 bp, Homo sapien
gaaatatatttcctcagacttcagaagctagaa

SEQ ID NO: 540235 - DNA, 33 bp, Homo sapien
gattcaattttaatgacgtccagcttcttttca

SEQ ID NO: 540236 - DNA, 33 bp, Homo sapien
gattcaattttaatgatgtccagcttcttttca

SEQ ID NO: 540237 - DNA, 33 bp, Homo sapien
tttatgatgcaaaagaagtgtcagtttgtggac

SEQ ID NO: 540238 - DNA, 33 bp, Homo sapien
tttatgatgcaaaagaggtgtcagtttgtggac

SEQ ID NO: 540239 - DNA, 33 bp, Homo sapien
tgccaagccacttacacggtcttgcagtagtca

SEQ ID NO: 540240 - DNA, 33 bp, Homo sapien
tgccaagccacttacatggtcttgcagtagtca

SEQ ID NO: 540241 - DNA, 33 bp, Homo sapien
gttatgtcactcctgacacaaacatggcacatc

SEQ ID NO: 540242 - DNA, 33 bp, Homo sapien
gttatgtcactcctgatacaaacatggcacatc

SEQ ID NO: 540243 - DNA, 33 bp, Homo sapien
tcaaccctggatatgacggctagcttcacctaa

SEQ ID NO: 540244 - DNA, 33 bp, Homo sapien
tcaaccctggatatgatggctagcttcacctaa

SEQ ID NO: 540245 - DNA, 33 bp, Homo sapien
gtcttatccttaatgacgtagaaagcatatcct

SEQ ID NO: 540246 - DNA, 33 bp, Homo sapien
gtcttatccttaatgatgtagaaagcatatcct

SEQ ID NO: 540247 - DNA, 33 bp, Homo sapien
aaaacagatctttgcacggacagagaggctagg

SEQ ID NO: 540248 - DNA, 33 bp, Homo sapien
aaaacagatctttgcatggacagagaggctagg

SEQ ID NO: 540249 - DNA, 33 bp, Homo sapien
ctcaaaagaagacatacgagtaccaaacaggta

SEQ ID NO: 540250 - DNA, 33 bp, Homo sapien
ctcaaaagaagacatatgagtaccaaacaggta

SEQ ID NO: 540251 - DNA, 33 bp, Homo sapien
cctaatccctctgtgcaataccacaaatgttat

SEQ ID NO: 540252 - DNA, 33 bp, Homo sapien
cctaatccctctgtgccataccacaaatgttat

SEQ ID NO: 540253 - DNA, 33 bp, Homo sapien
gaatttctgctataataaatttcctagagattc

SEQ ID NO: 540254 - DNA, 33 bp, Homo sapien
gaatttctgctataatgaatttcctagagattc

SEQ ID NO: 540255 - DNA, 33 bp, Homo sapien
tattaacctagtaattcaaggctgtacacctta

SEQ ID NO: 540256 - DNA, 33 bp, Homo sapien
tattaacctagtaattgaaggctgtacacctta

SEQ ID NO: 540257 - DNA, 33 bp, Homo sapien
atgaactgtggtatgacacatataatgaaatat

SEQ ID NO: 540258 - DNA, 33 bp, Homo sapien
atgaactgtggtatgatacatataatgaaatat

SEQ ID NO: 540259 - DNA, 33 bp, Homo sapien
tgtcttacaaaggttaagcctataagcatagca

SEQ ID NO: 540260 - DNA, 33 bp, Homo sapien
tgtcttacaaaggttaggcctataagcatagca

SEQ ID NO: 540261 - DNA, 33 bp, Homo sapien
aaacttgaactctctccctttgcttttatacgt

SEQ ID NO: 540262 - DNA, 33 bp, Homo sapien
aaacttgaactctctctctttgcttttatacgt

SEQ ID NO: 540263 - DNA, 33 bp, Homo sapien
gccagattttataccccacctttggaacagcac

SEQ ID NO: 540264 - DNA, 33 bp, Homo sapien
gccagattttataccctacctttggaacagcac

SEQ ID NO: 540265 - DNA, 33 bp, Homo sapien
caacatatcatcgatgccagtgccaatagtttc

SEQ ID NO: 540266 - DNA, 33 bp, Homo sapien
caacatatcatcgatgtcagtgccaatagtttc

SEQ ID NO: 540267 - DNA, 33 bp, Homo sapien
aggttttgccttagaaaacagagacccttgcaa

SEQ ID NO: 540268 - DNA, 33 bp, Homo sapien
aggttttgccttagaagacagagacccttgcaa

SEQ ID NO: 540269 - DNA, 33 bp, Homo sapien
gaaaacaagacaaagaagattccagaagtgttt

SEQ ID NO: 540270 - DNA, 33 bp, Homo sapien
gaaaacaagacaaagaggattccagaagtgttt

SEQ ID NO: 540271 - DNA, 33 bp, Homo sapien
attccaaaggtgcaaacatctttacaggcccaa

SEQ ID NO: 540272 - DNA, 33 bp, Homo sapien
attccaaaggtgcaaatatctttacaggcccaa

SEQ ID NO: 540273 - DNA, 33 bp, Homo sapien
tcaaacatacagagaactatttcaacaagtata

SEQ ID NO: 540274 - DNA, 33 bp, Homo sapien
tcaaacatacagagaattatttcaacaagtata

SEQ ID NO: 540275 - DNA, 33 bp, Homo sapien
gtttctgtgattaagaagtattagtgaaatcca

SEQ ID NO: 540276 - DNA, 33 bp, Homo sapien
gtttctgtgattaagaggtattagtgaaatcca

SEQ ID NO: 540277 - DNA, 33 bp, Homo sapien
ctctagattagagcagcaaataggtgagcctga

SEQ ID NO: 540278 - DNA, 33 bp, Homo sapien
ctctagattagagcaggaaataggtgagcctga

SEQ ID NO: 540279 - DNA, 33 bp, Homo sapien
tgatcaacctgcaaacaaaaataccttaggaat

SEQ ID NO: 540280 - DNA, 33 bp, Homo sapien
tgatcaacctgcaaacgaaaataccttaggaat

SEQ ID NO: 540281 - DNA, 33 bp, Homo sapien
tcatgggccatgtctcagaagccctcgtaagta

SEQ ID NO: 540282 - DNA, 33 bp, Homo sapien
tcatgggccatgtctcggaagccctcgtaagta

SEQ ID NO: 540283 - DNA, 33 bp, Homo sapien
aataggaactagggaggagcaatgatatggttt

SEQ ID NO: 540284 - DNA, 33 bp, Homo sapien
aataggaactagggagtagcaatgatatggttt

SEQ ID NO: 540285 - DNA, 33 bp, Homo sapien
gaggagggacccaataagaagtgactggatcat

SEQ ID NO: 540286 - DNA, 33 bp, Homo sapien
gaggagggacccaataggaagtgactggatcat

SEQ ID NO: 540287 - DNA, 33 bp, Homo sapien
ctcagttcttgaataccggctttttgaaacaag

SEQ ID NO: 540288 - DNA, 33 bp, Homo sapien
ctcagttcttgaatactggctttttgaaacaag

SEQ ID NO: 540289 - DNA, 33 bp, Homo sapien
gtcataatgaatagccacaggtgcatcataaat

SEQ ID NO: 540290 - DNA, 33 bp, Homo sapien
gtcataatgaatagccgcaggtgcatcataaat

SEQ ID NO: 540291 - DNA, 33 bp, Homo sapien
atattttctctaatccaagcaagtgttttctat

SEQ ID NO: 540292 - DNA, 33 bp, Homo sapien
atattttctctaatccgagcaagtgttttctat

SEQ ID NO: 540293 - DNA, 33 bp, Homo sapien
ttttatttaacgttaagcctctgggcctgaaat

SEQ ID NO: 540294 - DNA, 33 bp, Homo sapien
ttttatttaacgttaatcctctgggcctgaaat

SEQ ID NO: 540295 - DNA, 33 bp, Homo sapien
ttactaagaggccaaaagagatcaagtatatgg

SEQ ID NO: 540296 - DNA, 33 bp, Homo sapien
ttactaagaggccaaaggagatcaagtatatgg

SEQ ID NO: 540297 - DNA, 33 bp, Homo sapien
gatgttgtcccaaaacagtgtctcctgtcagca

SEQ ID NO: 540298 - DNA, 33 bp, Homo sapien
gatgttgtcccaaaacggtgtctcctgtcagca

SEQ ID NO: 540299 - DNA, 33 bp, Homo sapien
cttgatgtaggaagtgcagaattgcttttggag

SEQ ID NO: 540300 - DNA, 33 bp, Homo sapien
cttgatgtaggaagtggagaattgcttttggag

SEQ ID NO: 540301 - DNA, 33 bp, Homo sapien
tagcctcagtcaaacgaatcctattgggatgtt

SEQ ID NO: 540302 - DNA, 33 bp, Homo sapien
tagcctcagtcaaacggatcctattgggatgtt

SEQ ID NO: 540303 - DNA, 33 bp, Homo sapien
tggcaaataaaatataaaactgggtcaagatga

SEQ ID NO: 540304 - DNA, 33 bp, Homo sapien
tggcaaataaaatatacaactgggtcaagatga

SEQ ID NO: 540305 - DNA, 33 bp, Homo sapien
tataggatattatccccccagccgtggacttaa

SEQ ID NO: 540306 - DNA, 33 bp, Homo sapien
tataggatattatccctccagccgtggacttaa

SEQ ID NO: 540307 - DNA, 33 bp, Homo sapien
cctcatcaaaaagtagaatcaaactttacacag

SEQ ID NO: 540308 - DNA, 33 bp, Homo sapien
cctcatcaaaaagtaggatcaaactttacacag

SEQ ID NO: 540309 - DNA, 33 bp, Homo sapien
tacactggggtatccacgaaattcaccaccatg

SEQ ID NO: 540310 - DNA, 33 bp, Homo sapien
tacactggggtatccatgaaattcaccaccatg

SEQ ID NO: 540311 - DNA, 33 bp, Homo sapien
cctgctgcattatttaaatttcaggctatagtt

SEQ ID NO: 540312 - DNA, 33 bp, Homo sapien
cctgctgcattatttagatttcaggctatagtt

SEQ ID NO: 540313 - DNA, 33 bp, Homo sapien
tccaggatctttggtaacctgacattagagtca

SEQ ID NO: 540314 - DNA, 33 bp, Homo sapien
tccaggatctttggtagcctgacattagagtca

SEQ ID NO: 540315 - DNA, 33 bp, Homo sapien
tttctgagacagtgtacaggggcttgattggta

SEQ ID NO: 540316 - DNA, 33 bp, Homo sapien
tttctgagacagtgtagaggggcttgattggta

SEQ ID NO: 540317 - DNA, 33 bp, Homo sapien
ttggccctagaaatacaatgaaaaaattcccaa

SEQ ID NO: 540318 - DNA, 33 bp, Homo sapien
ttggccctagaaatacgatgaaaaaattcccaa

SEQ ID NO: 540319 - DNA, 33 bp, Homo sapien
tgataagtgtattttgaacagcaataataaaac

SEQ ID NO: 540320 - DNA, 33 bp, Homo sapien
tgataagtgtattttggacagcaataataaaac

SEQ ID NO: 540321 - DNA, 33 bp, Homo sapien
gacatttgatgctcacaagacatatagaaatat

SEQ ID NO: 540322 - DNA, 33 bp, Homo sapien
gacatttgatgctcacgagacatatagaaatat

SEQ ID NO: 540323 - DNA, 33 bp, Homo sapien
tacaatttctacaaacaataataatctgctgat

SEQ ID NO: 540324 - DNA, 33 bp, Homo sapien
tacaatttctacaaacgataataatctgctgat

SEQ ID NO: 540325 - DNA, 33 bp, Homo sapien
gtttggttgccttttccatccagaattgctttt

SEQ ID NO: 540326 - DNA, 33 bp, Homo sapien
gtttggttgccttttcgatccagaattgctttt

SEQ ID NO: 540327 - DNA, 33 bp, Homo sapien
aaataatgcaaagtaaaatgaggaattcaactg

SEQ ID NO: 540328 - DNA, 33 bp, Homo sapien
aaataatgcaaagtaagatgaggaattcaactg

SEQ ID NO: 540329 - DNA, 33 bp, Homo sapien
gcatgttgtccactgtgaaattcaagagggcgt

SEQ ID NO: 540330 - DNA, 33 bp, Homo sapien
gcatgttgtccactgttaaattcaagagggcgt

SEQ ID NO: 540331 - DNA, 33 bp, Homo sapien
atgctcatagaccaaacgcaaagaaaaaggcac

SEQ ID NO: 540332 - DNA, 33 bp, Homo sapien
atgctcatagaccaaaggcaaagaaaaaggcac

SEQ ID NO: 540333 - DNA, 33 bp, Homo sapien
caaaactcagtcaaagcagtttctttaacagga

SEQ ID NO: 540334 - DNA, 33 bp, Homo sapien
caaaactcagtcaaagtagtttctttaacagga

SEQ ID NO: 540335 - DNA, 33 bp, Homo sapien
agcctgacaacaaatacctctatggctacaatg

SEQ ID NO: 540336 - DNA, 33 bp, Homo sapien
agcctgacaacaaatatctctatggctacaatg

SEQ ID NO: 540337 - DNA, 33 bp, Homo sapien
aagaccaaggaaattgcagagaagctggaatcc

SEQ ID NO: 540338 - DNA, 33 bp, Homo sapien
aagaccaaggaaattggagagaagctggaatcc

SEQ ID NO: 540339 - DNA, 33 bp, Homo sapien
caaggaacagaaagttcaacccagaatggcatg

SEQ ID NO: 540340 - DNA, 33 bp, Homo sapien
caaggaacagaaagtttaacccagaatggcatg

SEQ ID NO: 540341 - DNA, 33 bp, Homo sapien
tacagaaaaagattcaaagtaaaaattgcttgg

SEQ ID NO: 540342 - DNA, 33 bp, Homo sapien
tacagaaaaagattcacagtaaaaattgcttgg

SEQ ID NO: 540343 - DNA, 33 bp, Homo sapien
gaatatattagaaagaaggaattgctatgggtt

SEQ ID NO: 540344 - DNA, 33 bp, Homo sapien
gaatatattagaaagagggaattgctatgggtt

SEQ ID NO: 540345 - DNA, 33 bp, Homo sapien
tcgatatttttactgcaaaacctaaagttcttt

SEQ ID NO: 540346 - DNA, 33 bp, Homo sapien
tcgatatttttactgcgaaacctaaagttcttt

SEQ ID NO: 540347 - DNA, 33 bp, Homo sapien
tccaattctaaaagaacttctactgcgggcaaa

SEQ ID NO: 540348 - DNA, 33 bp, Homo sapien
tccaattctaaaagaagttctactgcgggcaaa

SEQ ID NO: 540349 - DNA, 33 bp, Homo sapien
atgacactgagactcaagatatgaatgattcca

SEQ ID NO: 540350 - DNA, 33 bp, Homo sapien
atgacactgagactcaggatatgaatgattcca

SEQ ID NO: 540351 - DNA, 33 bp, Homo sapien
gtttctgctttagttcactttggataatagcct

SEQ ID NO: 540352 - DNA, 33 bp, Homo sapien
gtttctgctttagttcgctttggataatagcct

SEQ ID NO: 540353 - DNA, 33 bp, Homo sapien
cttgtattcattagtacccaggaaaacaaaatt

SEQ ID NO: 540354 - DNA, 33 bp, Homo sapien
cttgtattcattagtatccaggaaaacaaaatt

SEQ ID NO: 540355 - DNA, 33 bp, Homo sapien
atgtacgtattgctaaccctgatttcttttggt

SEQ ID NO: 540356 - DNA, 33 bp, Homo sapien
atgtacgtattgctaatcctgatttcttttggt

SEQ ID NO: 540357 - DNA, 33 bp, Homo sapien
gtggaaaaggatattcaatgcagatcataacca

SEQ ID NO: 540358 - DNA, 33 bp, Homo sapien
gtggaaaaggatattcgatgcagatcataacca

SEQ ID NO: 540359 - DNA, 33 bp, Homo sapien
atttgctgaagtactcccgtatcaaactagaac

SEQ ID NO: 540360 - DNA, 33 bp, Homo sapien
atttgctgaagtactctcgtatcaaactagaac

SEQ ID NO: 540361 - DNA, 33 bp, Homo sapien
gatcaaggacaatcaactgaaaatattttgaga

SEQ ID NO: 540362 - DNA, 33 bp, Homo sapien
gatcaaggacaatcaagtgaaaatattttgaga

SEQ ID NO: 540363 - DNA, 33 bp, Homo sapien
cttatctttccaaatccctccttattgggtgct

SEQ ID NO: 540364 - DNA, 33 bp, Homo sapien
cttatctttccaaatctctccttattgggtgct

SEQ ID NO: 540365 - DNA, 33 bp, Homo sapien
tgttggccagtgtagacgtcattgagacaataa

SEQ ID NO: 540366 - DNA, 33 bp, Homo sapien
tgttggccagtgtagatgtcattgagacaataa

SEQ ID NO: 540367 - DNA, 33 bp, Homo sapien
acttcatatattttgacggtctgttattaggag

SEQ ID NO: 540368 - DNA, 33 bp, Homo sapien
acttcatatattttgatggtctgttattaggag

SEQ ID NO: 540369 - DNA, 33 bp, Homo sapien
gtaaaaatggacaaaactgagagaagaagtaga

SEQ ID NO: 540370 - DNA, 33 bp, Homo sapien
gtaaaaatggacaaaattgagagaagaagtaga

SEQ ID NO: 540371 - DNA, 33 bp, Homo sapien
gtaataatggctggacaggaaaaacacagattc

SEQ ID NO: 540372 - DNA, 33 bp, Homo sapien
gtaataatggctggacgggaaaaacacagattc

SEQ ID NO: 540373 - DNA, 33 bp, Homo sapien
gacaaccgatctgaccaaaacttatgaggtggg

SEQ ID NO: 540374 - DNA, 33 bp, Homo sapien
gacaaccgatctgaccgaaacttatgaggtggg

SEQ ID NO: 540375 - DNA, 33 bp, Homo sapien
ggtaattgatgctcagcaaatttttgaaggaga

SEQ ID NO: 540376 - DNA, 33 bp, Homo sapien
ggtaattgatgctcagtaaatttttgaaggaga

SEQ ID NO: 540377 - DNA, 33 bp, Homo sapien
tcagctgagaccattccatgttaattatcacaa

SEQ ID NO: 540378 - DNA, 33 bp, Homo sapien
tcagctgagaccattctatgttaattatcacaa

SEQ ID NO: 540379 - DNA, 33 bp, Homo sapien
taaggcacttctataccgaggtctgcactcttt

SEQ ID NO: 540380 - DNA, 33 bp, Homo sapien
taaggcacttctatactgaggtctgcactcttt

SEQ ID NO: 540381 - DNA, 33 bp, Homo sapien
acaataagtaaatagaacatgaagcattatata

SEQ ID NO: 540382 - DNA, 33 bp, Homo sapien
acaataagtaaatagaccatgaagcattatata

SEQ ID NO: 540383 - DNA, 33 bp, Homo sapien
taaacagcaatagaaaagcaacaggaggccggg

SEQ ID NO: 540384 - DNA, 33 bp, Homo sapien
taaacagcaatagaaaggcaacaggaggccggg

SEQ ID NO: 540385 - DNA, 33 bp, Homo sapien
tcgagaaataaatcaaaaaacatacagccaact

SEQ ID NO: 540386 - DNA, 33 bp, Homo sapien
tcgagaaataaatcaacaaacatacagccaact

SEQ ID NO: 540387 - DNA, 33 bp, Homo sapien
acatccatgtgcacaacaataaaattggattca

SEQ ID NO: 540388 - DNA, 33 bp, Homo sapien
acatccatgtgcacaagaataaaattggattca

SEQ ID NO: 540389 - DNA, 33 bp, Homo sapien
aagctttctgagcctacggaaaaatagaagatc

SEQ ID NO: 540390 - DNA, 33 bp, Homo sapien
aagctttctgagcctatggaaaaatagaagatc

SEQ ID NO: 540391 - DNA, 33 bp, Homo sapien
atcagttgtaaccatgaaagatgcaatagcaac

SEQ ID NO: 540392 - DNA, 33 bp, Homo sapien
atcagttgtaaccatgtaagatgcaatagcaac

SEQ ID NO: 540393 - DNA, 33 bp, Homo sapien
aggctgaccaacaagagagagctggcttcttag

SEQ ID NO: 540394 - DNA, 33 bp, Homo sapien
aggctgaccaacaagatagagctggcttcttag

SEQ ID NO: 540395 - DNA, 33 bp, Homo sapien
ctcaatccatggcgccacataggttgctgggct

SEQ ID NO: 540396 - DNA, 33 bp, Homo sapien
ctcaatccatggcgcctcataggttgctgggct

SEQ ID NO: 540397 - DNA, 33 bp, Homo sapien
tcctgggagcaaaccaccttcaaccacacttct

SEQ ID NO: 540398 - DNA, 33 bp, Homo sapien
tcctgggagcaaaccatcttcaaccacacttct

SEQ ID NO: 540399 - DNA, 33 bp, Homo sapien
tcttcctagacacttgcaatcatttgatgtagt

SEQ ID NO: 540400 - DNA, 33 bp, Homo sapien
tcttcctagacacttggaatcatttgatgtagt

SEQ ID NO: 540401 - DNA, 33 bp, Homo sapien
tctgctaggaagaaaactttccaggttggaaat

SEQ ID NO: 540402 - DNA, 33 bp, Homo sapien
tctgctaggaagaaaagtttccaggttggaaat

SEQ ID NO: 540403 - DNA, 33 bp, Homo sapien
gacaataagaattatcacagaagactgcaaaaa

SEQ ID NO: 540404 - DNA, 33 bp, Homo sapien
gacaataagaattatctcagaagactgcaaaaa

SEQ ID NO: 540405 - DNA, 33 bp, Homo sapien
gttatctgagctaaaccaatccaatcagcctgg

SEQ ID NO: 540406 - DNA, 33 bp, Homo sapien
gttatctgagctaaactaatccaatcagcctgg

SEQ ID NO: 540407 - DNA, 33 bp, Homo sapien
aaggaaagcaaggctaacaatgttgatatttca

SEQ ID NO: 540408 - DNA, 33 bp, Homo sapien
aaggaaagcaaggctagcaatgttgatatttca

SEQ ID NO: 540409 - DNA, 33 bp, Homo sapien
tatagtaacaaaaacaatcataggtaatatttg

SEQ ID NO: 540410 - DNA, 33 bp, Homo sapien
tatagtaacaaaaacagtcataggtaatatttg

SEQ ID NO: 540411 - DNA, 33 bp, Homo sapien
aaagatcaaaagaggcaaagaagggaattacat

SEQ ID NO: 540412 - DNA, 33 bp, Homo sapien
aaagatcaaaagaggcgaagaagggaattacat

SEQ ID NO: 540413 - DNA, 33 bp, Homo sapien
tataaacccatttaaccaaaacatgacttaacc

SEQ ID NO: 540414 - DNA, 33 bp, Homo sapien
tataaacccatttaacgaaaacatgacttaacc

SEQ ID NO: 540415 - DNA, 33 bp, Homo sapien
catcgagggcttccaaaaattgactcttatact

SEQ ID NO: 540416 - DNA, 33 bp, Homo sapien
catcgagggcttccaataattgactcttatact

SEQ ID NO: 540417 - DNA, 33 bp, Homo sapien
atattagtggctaccagcaattagaaggaaaga

SEQ ID NO: 540418 - DNA, 33 bp, Homo sapien
atattagtggctaccatcaattagaaggaaaga

SEQ ID NO: 540419 - DNA, 33 bp, Homo sapien
tgtcttttatgttacgcactttaatactcaaaa

SEQ ID NO: 540420 - DNA, 33 bp, Homo sapien
tgtcttttatgttacgtactttaatactcaaaa

SEQ ID NO: 540421 - DNA, 33 bp, Homo sapien
ctcagtttgagccgtaacaaacacggaccagaa

SEQ ID NO: 540422 - DNA, 33 bp, Homo sapien
ctcagtttgagccgtaccaaacacggaccagaa

SEQ ID NO: 540423 - DNA, 33 bp, Homo sapien
agggcccagtcatgagcattcaggagcactatt

SEQ ID NO: 540424 - DNA, 33 bp, Homo sapien
agggcccagtcatgagtattcaggagcactatt

SEQ ID NO: 540425 - DNA, 33 bp, Homo sapien
tcttatgtggttcaaacggcccatatatatgta

SEQ ID NO: 540426 - DNA, 33 bp, Homo sapien
tcttatgtggttcaaatggcccatatatatgta

SEQ ID NO: 540427 - DNA, 33 bp, Homo sapien
agcaaccaggagattacagataaagttgtctgg

SEQ ID NO: 540428 - DNA, 33 bp, Homo sapien
agcaaccaggagattatagataaagttgtctgg

SEQ ID NO: 540429 - DNA, 33 bp, Homo sapien
ttaatggcatataacactcaaattttccttaga

SEQ ID NO: 540430 - DNA, 33 bp, Homo sapien
ttaatggcatataacattcaaattttccttaga

SEQ ID NO: 540431 - DNA, 33 bp, Homo sapien
tactttcatgttcagaactaaacatgacactga

SEQ ID NO: 540432 - DNA, 33 bp, Homo sapien
tactttcatgttcagagctaaacatgacactga

SEQ ID NO: 540433 - DNA, 33 bp, Homo sapien
aggatagccaatttcaagagcttcccttccttg

SEQ ID NO: 540434 - DNA, 33 bp, Homo sapien
aggatagccaatttcaggagcttcccttccttg

SEQ ID NO: 540435 - DNA, 33 bp, Homo sapien
gtagttgttgctgagagattatggatatggctc

SEQ ID NO: 540436 - DNA, 33 bp, Homo sapien
gtagttgttgctgagatattatggatatggctc

SEQ ID NO: 540437 - DNA, 33 bp, Homo sapien
tgcatataacctcaaaagcgcaggtaacaaaag

SEQ ID NO: 540438 - DNA, 33 bp, Homo sapien
tgcatataacctcaaaggcgcaggtaacaaaag

SEQ ID NO: 540439 - DNA, 33 bp, Homo sapien
ttaacaataggtacacaatcaagaaacattacg

SEQ ID NO: 540440 - DNA, 33 bp, Homo sapien
ttaacaataggtacacgatcaagaaacattacg

SEQ ID NO: 540441 - DNA, 33 bp, Homo sapien
acaaaactgaacagtcactttaagagtagaggc

SEQ ID NO: 540442 - DNA, 33 bp, Homo sapien
acaaaactgaacagtcgctttaagagtagaggc

SEQ ID NO: 540443 - DNA, 33 bp, Homo sapien
ttcaaggcccattaccgctagtgtacttgcaat

SEQ ID NO: 540444 - DNA, 33 bp, Homo sapien
ttcaaggcccattacctctagtgtacttgcaat

SEQ ID NO: 540445 - DNA, 33 bp, Homo sapien
agttgctcttctactccaattttcactctctcc

SEQ ID NO: 540446 - DNA, 33 bp, Homo sapien
agttgctcttctactcgaattttcactctctcc

SEQ ID NO: 540447 - DNA, 33 bp, Homo sapien
cttccttcctgcatataatagctggataactct

SEQ ID NO: 540448 - DNA, 33 bp, Homo sapien
cttccttcctgcatatgatagctggataactct

SEQ ID NO: 540449 - DNA, 33 bp, Homo sapien
atacaggcttgaattgaaaaagatccaattgtt

SEQ ID NO: 540450 - DNA, 33 bp, Homo sapien
atacaggcttgaattgcaaaagatccaattgtt

SEQ ID NO: 540451 - DNA, 33 bp, Homo sapien
attctttgtggagacacggaggtttccttcttc

SEQ ID NO: 540452 - DNA, 33 bp, Homo sapien
attctttgtggagacatggaggtttccttcttc

SEQ ID NO: 540453 - DNA, 33 bp, Homo sapien
caaatcatccaagttacgtttggatgatttgtg

SEQ ID NO: 540454 - DNA, 33 bp, Homo sapien
caaatcatccaagttaggtttggatgatttgtg

SEQ ID NO: 540455 - DNA, 33 bp, Homo sapien
tttttctttcctgaaccagatgtaaatgactaa

SEQ ID NO: 540456 - DNA, 33 bp, Homo sapien
tttttctttcctgaacgagatgtaaatgactaa

SEQ ID NO: 540457 - DNA, 33 bp, Homo sapien
acaaaattcctggacaaccatcacttttggtac

SEQ ID NO: 540458 - DNA, 33 bp, Homo sapien
acaaaattcctggacacccatcacttttggtac

SEQ ID NO: 540459 - DNA, 33 bp, Homo sapien
agtgtgtaataaataacgacaaaaggcttacga

SEQ ID NO: 540460 - DNA, 33 bp, Homo sapien
agtgtgtaataaataatgacaaaaggcttacga

SEQ ID NO: 540461 - DNA, 33 bp, Homo sapien
gtaagtttgcaaggaacagagtttgagaagtta

SEQ ID NO: 540462 - DNA, 33 bp, Homo sapien
gtaagtttgcaaggaagagagtttgagaagtta

SEQ ID NO: 540463 - DNA, 33 bp, Homo sapien
aaaaatggttgattaacccaagtaaaggcaaga

SEQ ID NO: 540464 - DNA, 33 bp, Homo sapien
aaaaatggttgattaatccaagtaaaggcaaga

SEQ ID NO: 540465 - DNA, 33 bp, Homo sapien
aataagtaaagcaaaaaagtgatggaactagaa

SEQ ID NO: 540466 - DNA, 33 bp, Homo sapien
aataagtaaagcaaaagagtgatggaactagaa

SEQ ID NO: 540467 - DNA, 33 bp, Homo sapien
agtgtgttgcttactagccttgtgatcttattt

SEQ ID NO: 540468 - DNA, 33 bp, Homo sapien
agtgtgttgcttactatccttgtgatcttattt

SEQ ID NO: 540469 - DNA, 33 bp, Homo sapien
atagaaaaaaatagcaccatgtagatatagacc

SEQ ID NO: 540470 - DNA, 33 bp, Homo sapien
atagaaaaaaatagcatcatgtagatatagacc

SEQ ID NO: 540471 - DNA, 33 bp, Homo sapien
ctccccagagagtcaaagagtaggtgagccttt

SEQ ID NO: 540472 - DNA, 33 bp, Homo sapien
ctccccagagagtcaaggagtaggtgagccttt

SEQ ID NO: 540473 - DNA, 33 bp, Homo sapien
tcagtggaaaccaaacaccaggagcacacccat

SEQ ID NO: 540474 - DNA, 33 bp, Homo sapien
tcagtggaaaccaaacgccaggagcacacccat

SEQ ID NO: 540475 - DNA, 33 bp, Homo sapien
gtttaaactactatccagagagatccaaaccac

SEQ ID NO: 540476 - DNA, 33 bp, Homo sapien
gtttaaactactatccggagagatccaaaccac

SEQ ID NO: 540477 - DNA, 33 bp, Homo sapien
gagaatagtggaagataactccatgccctagct

SEQ ID NO: 540478 - DNA, 33 bp, Homo sapien
gagaatagtggaagatgactccatgccctagct

SEQ ID NO: 540479 - DNA, 33 bp, Homo sapien
tgattcagatgcacacaaaagttttgaaagcac

SEQ ID NO: 540480 - DNA, 33 bp, Homo sapien
tgattcagatgcacacgaaagttttgaaagcac

SEQ ID NO: 540481 - DNA, 33 bp, Homo sapien
gatactgcacattaagaccgtgctttcaaaact

SEQ ID NO: 540482 - DNA, 33 bp, Homo sapien
gatactgcacattaaggccgtgctttcaaaact

SEQ ID NO: 540483 - DNA, 33 bp, Homo sapien
gaaaaaaatcatgtgcaaagtcagggaagacct

SEQ ID NO: 540484 - DNA, 33 bp, Homo sapien
gaaaaaaatcatgtgcgaagtcagggaagacct

SEQ ID NO: 540485 - DNA, 33 bp, Homo sapien
tgtgttttcgtataagccacagaaatcactttt

SEQ ID NO: 540486 - DNA, 33 bp, Homo sapien
tgtgttttcgtataagtcacagaaatcactttt

SEQ ID NO: 540487 - DNA, 33 bp, Homo sapien
ctttgtcatggatttaacacaagaagagttaat

SEQ ID NO: 540488 - DNA, 33 bp, Homo sapien
ctttgtcatggatttatcacaagaagagttaat

SEQ ID NO: 540489 - DNA, 33 bp, Homo sapien
aaattctttccattcaatagtctcagttattac

SEQ ID NO: 540490 - DNA, 33 bp, Homo sapien
aaattctttccattcagtagtctcagttattac

SEQ ID NO: 540491 - DNA, 33 bp, Homo sapien
ttctcctgtaaaataagtgatgtcactgaactg

SEQ ID NO: 540492 - DNA, 33 bp, Homo sapien
ttctcctgtaaaataattgatgtcactgaactg

SEQ ID NO: 540493 - DNA, 33 bp, Homo sapien
tgactagaagatctctaaacttccttctaattc

SEQ ID NO: 540494 - DNA, 33 bp, Homo sapien
tgactagaagatctctcaacttccttctaattc

SEQ ID NO: 540495 - DNA, 33 bp, Homo sapien
cacattcaggccttaactgtgccagctgttctc

SEQ ID NO: 540496 - DNA, 33 bp, Homo sapien
cacattcaggccttaattgtgccagctgttctc

SEQ ID NO: 540497 - DNA, 33 bp, Homo sapien
tttagtggagggcacaataaagaacattaggct

SEQ ID NO: 540498 - DNA, 33 bp, Homo sapien
tttagtggagggcacagtaaagaacattaggct

SEQ ID NO: 540499 - DNA, 33 bp, Homo sapien
taatatgaaatcagtaaactgtcactgtgtcaa

SEQ ID NO: 540500 - DNA, 33 bp, Homo sapien
taatatgaaatcagtagactgtcactgtgtcaa

SEQ ID NO: 540501 - DNA, 33 bp, Homo sapien
tggagtaagagccttacgatgaacccagcattt

SEQ ID NO: 540502 - DNA, 33 bp, Homo sapien
tggagtaagagccttatgatgaacccagcattt

SEQ ID NO: 540503 - DNA, 33 bp, Homo sapien
gctacccaggtaaaggaaggcaatctctgaagg

SEQ ID NO: 540504 - DNA, 33 bp, Homo sapien
gctacccaggtaaagggaggcaatctctgaagg

SEQ ID NO: 540505 - DNA, 33 bp, Homo sapien
gcctatgtcaaactcaaataggcctgattatac

SEQ ID NO: 540506 - DNA, 33 bp, Homo sapien
gcctatgtcaaactcagataggcctgattatac

SEQ ID NO: 540507 - DNA, 33 bp, Homo sapien
ttctgttgtgggaatacgaaaatcgagtgtgtt

SEQ ID NO: 540508 - DNA, 33 bp, Homo sapien
ttctgttgtgggaatatgaaaatcgagtgtgtt

SEQ ID NO: 540509 - DNA, 33 bp, Homo sapien
agatgctattcattacaagacatacctcattta

SEQ ID NO: 540510 - DNA, 33 bp, Homo sapien
agatgctattcattaccagacatacctcattta

SEQ ID NO: 540511 - DNA, 33 bp, Homo sapien
aaaaagtcagaatgaaatctagaaacaaggaag

SEQ ID NO: 540512 - DNA, 33 bp, Homo sapien
aaaaagtcagaatgaagtctagaaacaaggaag

SEQ ID NO: 540513 - DNA, 33 bp, Homo sapien
gtgtttgttccattgagccttgaaaacaaacaa

SEQ ID NO: 540514 - DNA, 33 bp, Homo sapien
gtgtttgttccattgatccttgaaaacaaacaa

SEQ ID NO: 540515 - DNA, 33 bp, Homo sapien
ctaggatatgattcaacttattcttcaggcata

SEQ ID NO: 540516 - DNA, 33 bp, Homo sapien
ctaggatatgattcaatttattcttcaggcata

SEQ ID NO: 540517 - DNA, 33 bp, Homo sapien
gcttcttgataaaatgaattaaaggctgaatct

SEQ ID NO: 540518 - DNA, 33 bp, Homo sapien
gcttcttgataaaatgcattaaaggctgaatct

SEQ ID NO: 540519 - DNA, 33 bp, Homo sapien
aacttgtgaggaacttaaaaactaagtggaagg

SEQ ID NO: 540520 - DNA, 33 bp, Homo sapien
aacttgtgaggaacttgaaaactaagtggaagg

SEQ ID NO: 540521 - DNA, 33 bp, Homo sapien
ataatcttcagggtaaatgagtgccaaataatc

SEQ ID NO: 540522 - DNA, 33 bp, Homo sapien
ataatcttcagggtaagtgagtgccaaataatc

SEQ ID NO: 540523 - DNA, 33 bp, Homo sapien
atcatctgttattttccagacatgaagttggaa

SEQ ID NO: 540524 - DNA, 33 bp, Homo sapien
atcatctgttattttctagacatgaagttggaa

SEQ ID NO: 540525 - DNA, 33 bp, Homo sapien
gcttcttcatgagcctaaatttttctacgtatg

SEQ ID NO: 540526 - DNA, 33 bp, Homo sapien
gcttcttcatgagcctgaatttttctacgtatg

SEQ ID NO: 540527 - DNA, 33 bp, Homo sapien
ctcccaccatcataaacaccgagctcaagcact

SEQ ID NO: 540528 - DNA, 33 bp, Homo sapien
ctcccaccatcataaataccgagctcaagcact

SEQ ID NO: 540529 - DNA, 33 bp, Homo sapien
catattctagagtataaagcagaaaaacaggac

SEQ ID NO: 540530 - DNA, 33 bp, Homo sapien
catattctagagtatagagcagaaaaacaggac

SEQ ID NO: 540531 - DNA, 33 bp, Homo sapien
cttgtttgtgtctccacgatttgactagttaga

SEQ ID NO: 540532 - DNA, 33 bp, Homo sapien
cttgtttgtgtctccatgatttgactagttaga

SEQ ID NO: 540533 - DNA, 33 bp, Homo sapien
cttaaggagtccggaactcaaagaaaagagaga

SEQ ID NO: 540534 - DNA, 33 bp, Homo sapien
cttaaggagtccggaattcaaagaaaagagaga

SEQ ID NO: 540535 - DNA, 33 bp, Homo sapien
gaaagggtataaagaacgtggacaagaatttgg

SEQ ID NO: 540536 - DNA, 33 bp, Homo sapien
gaaagggtataaagaatgtggacaagaatttgg

SEQ ID NO: 540537 - DNA, 33 bp, Homo sapien
atgtagacaacatatacagtgcaaaggtgcctg

SEQ ID NO: 540538 - DNA, 33 bp, Homo sapien
atgtagacaacatatagagtgcaaaggtgcctg

SEQ ID NO: 540539 - DNA, 33 bp, Homo sapien
aataataagtggaaaagattgtagtgcaaacat

SEQ ID NO: 540540 - DNA, 33 bp, Homo sapien
aataataagtggaaaatattgtagtgcaaacat

SEQ ID NO: 540541 - DNA, 33 bp, Homo sapien
ttttcatttagctgcaatccagagtcaaactgc

SEQ ID NO: 540542 - DNA, 33 bp, Homo sapien
ttttcatttagctgcagtccagagtcaaactgc

SEQ ID NO: 540543 - DNA, 33 bp, Homo sapien
atgcagttacaaatgacgccaaatatttaaact

SEQ ID NO: 540544 - DNA, 33 bp, Homo sapien
atgcagttacaaatgatgccaaatatttaaact

SEQ ID NO: 540545 - DNA, 33 bp, Homo sapien
taagctgatatcaccaagcattgttatttattt

SEQ ID NO: 540546 - DNA, 33 bp, Homo sapien
taagctgatatcaccaggcattgttatttattt

SEQ ID NO: 540547 - DNA, 33 bp, Homo sapien
acttctctctcatgcagtgacagagctctctag

SEQ ID NO: 540548 - DNA, 33 bp, Homo sapien
acttctctctcatgcattgacagagctctctag

SEQ ID NO: 540549 - DNA, 33 bp, Homo sapien
aagcatgcagcagttaacattttcacttttcta

SEQ ID NO: 540550 - DNA, 33 bp, Homo sapien
aagcatgcagcagttagcattttcacttttcta

SEQ ID NO: 540551 - DNA, 33 bp, Homo sapien
atactccctgctcttccaatctcttaacatcct

SEQ ID NO: 540552 - DNA, 33 bp, Homo sapien
atactccctgctcttctaatctcttaacatcct

SEQ ID NO: 540553 - DNA, 33 bp, Homo sapien
aaaagcaaagggccaaaacaatcaaaaaagacc

SEQ ID NO: 540554 - DNA, 33 bp, Homo sapien
aaaagcaaagggccaacacaatcaaaaaagacc

SEQ ID NO: 540555 - DNA, 33 bp, Homo sapien
taaaaagaaaaatggacggatgcaaaacatttg

SEQ ID NO: 540556 - DNA, 33 bp, Homo sapien
taaaaagaaaaatggatggatgcaaaacatttg

SEQ ID NO: 540557 - DNA, 33 bp, Homo sapien
tgttcatttatttagcaagcatttgttgtggag

SEQ ID NO: 540558 - DNA, 33 bp, Homo sapien
tgttcatttatttagcgagcatttgttgtggag

SEQ ID NO: 540559 - DNA, 33 bp, Homo sapien
ctcccaaaactgattcccaaaacagctctattt

SEQ ID NO: 540560 - DNA, 33 bp, Homo sapien
ctcccaaaactgattctcaaaacagctctattt

SEQ ID NO: 540561 - DNA, 33 bp, Homo sapien
atgacaacacaggcaacactgtctttgatggaa

SEQ ID NO: 540562 - DNA, 33 bp, Homo sapien
atgacaacacaggcaatactgtctttgatggaa

SEQ ID NO: 540563 - DNA, 33 bp, Homo sapien
cagatgaacggaaagacgaagcaaaggcacctc

SEQ ID NO: 540564 - DNA, 33 bp, Homo sapien
cagatgaacggaaagatgaagcaaaggcacctc

SEQ ID NO: 540565 - DNA, 33 bp, Homo sapien
ctcttaaatgaccttgaacctaaatccaatgga

SEQ ID NO: 540566 - DNA, 33 bp, Homo sapien
ctcttaaatgaccttggacctaaatccaatgga

SEQ ID NO: 540567 - DNA, 33 bp, Homo sapien
gtggtagtggtggtatcaatatggatgacatag

SEQ ID NO: 540568 - DNA, 33 bp, Homo sapien
gtggtagtggtggtatgaatatggatgacatag

SEQ ID NO: 540569 - DNA, 33 bp, Homo sapien
cttttcttcctcacaaccaatatgctataacat

SEQ ID NO: 540570 - DNA, 33 bp, Homo sapien
cttttcttcctcacaatcaatatgctataacat

SEQ ID NO: 540571 - DNA, 33 bp, Homo sapien
tacgatgatgaaaaaaaccttgacatatcatac

SEQ ID NO: 540572 - DNA, 33 bp, Homo sapien
tacgatgatgaaaaaagccttgacatatcatac

SEQ ID NO: 540573 - DNA, 33 bp, Homo sapien
tgtcccttgggctctcgccagttgactctcagt

SEQ ID NO: 540574 - DNA, 33 bp, Homo sapien
tgtcccttgggctctctccagttgactctcagt

SEQ ID NO: 540575 - DNA, 33 bp, Homo sapien
gagaagctggtgataacacactgacttgacaaa

SEQ ID NO: 540576 - DNA, 33 bp, Homo sapien
gagaagctggtgataatacactgacttgacaaa

SEQ ID NO: 540577 - DNA, 33 bp, Homo sapien
aaaacctttgtaatcaatctccaaaagctaata

SEQ ID NO: 540578 - DNA, 33 bp, Homo sapien
aaaacctttgtaatcagtctccaaaagctaata

SEQ ID NO: 540579 - DNA, 33 bp, Homo sapien
ggtaggtagcctgatacagggcaaggagattaa

SEQ ID NO: 540580 - DNA, 33 bp, Homo sapien
ggtaggtagcctgatatagggcaaggagattaa

SEQ ID NO: 540581 - DNA, 33 bp, Homo sapien
ggtgtgcttggtatcaatgagaagcaatacagt

SEQ ID NO: 540582 - DNA, 33 bp, Homo sapien
ggtgtgcttggtatcagtgagaagcaatacagt

SEQ ID NO: 540583 - DNA, 33 bp, Homo sapien
ttcttccacaagcgtacggtaagcttatttgtc

SEQ ID NO: 540584 - DNA, 33 bp, Homo sapien
ttcttccacaagcgtatggtaagcttatttgtc

SEQ ID NO: 540585 - DNA, 33 bp, Homo sapien
ctatttcatttaatcacgtgttatgctaaaaac

SEQ ID NO: 540586 - DNA, 33 bp, Homo sapien
ctatttcatttaatcatgtgttatgctaaaaac

SEQ ID NO: 540587 - DNA, 33 bp, Homo sapien
tgatttgcaggacactaaaagtatactgtttta

SEQ ID NO: 540588 - DNA, 33 bp, Homo sapien
tgatttgcaggacactgaaagtatactgtttta

SEQ ID NO: 540589 - DNA, 33 bp, Homo sapien
aagtgttcctttagcaatatttctgtcgtttca

SEQ ID NO: 540590 - DNA, 33 bp, Homo sapien
aagtgttcctttagcagtatttctgtcgtttca

SEQ ID NO: 540591 - DNA, 33 bp, Homo sapien
ggcaaaggaaaaccagaaatcagctgcagcact

SEQ ID NO: 540592 - DNA, 33 bp, Homo sapien
ggcaaaggaaaaccaggaatcagctgcagcact

SEQ ID NO: 540593 - DNA, 33 bp, Homo sapien
taatgaccacagtgaaatactttgaccttaaaa

SEQ ID NO: 540594 - DNA, 33 bp, Homo sapien
taatgaccacagtgaactactttgaccttaaaa

SEQ ID NO: 540595 - DNA, 33 bp, Homo sapien
tctatacaggccaaaactatgtgtcctaaatac

SEQ ID NO: 540596 - DNA, 33 bp, Homo sapien
tctatacaggccaaaattatgtgtcctaaatac

SEQ ID NO: 540597 - DNA, 33 bp, Homo sapien
tactaatcaagcccgaccctgcttaaattccaa

SEQ ID NO: 540598 - DNA, 33 bp, Homo sapien
tactaatcaagcccgatcctgcttaaattccaa

SEQ ID NO: 540599 - DNA, 33 bp, Homo sapien
ccttgatttaactataccttgcattcgtggtaa

SEQ ID NO: 540600 - DNA, 33 bp, Homo sapien
ccttgatttaactatatcttgcattcgtggtaa

SEQ ID NO: 540601 - DNA, 33 bp, Homo sapien
ccatttgcaacaggaaaacactggctttacatg

SEQ ID NO: 540602 - DNA, 33 bp, Homo sapien
ccatttgcaacaggaagacactggctttacatg

SEQ ID NO: 540603 - DNA, 33 bp, Homo sapien
aaatctagctgatcaactgacattctaatcaga

SEQ ID NO: 540604 - DNA, 33 bp, Homo sapien
aaatctagctgatcaagtgacattctaatcaga

SEQ ID NO: 540605 - DNA, 33 bp, Homo sapien
ctgcattattagcaaaaggagactgaatgagaa

SEQ ID NO: 540606 - DNA, 33 bp, Homo sapien
ctgcattattagcaaagggagactgaatgagaa

SEQ ID NO: 540607 - DNA, 33 bp, Homo sapien
tttctcacttgacaataagatctttatcatagg

SEQ ID NO: 540608 - DNA, 33 bp, Homo sapien
tttctcacttgacaatgagatctttatcatagg

SEQ ID NO: 540609 - DNA, 33 bp, Homo sapien
atgttcttgaacccaaagctgatcttcaggcaa

SEQ ID NO: 540610 - DNA, 33 bp, Homo sapien
atgttcttgaacccaaggctgatcttcaggcaa

SEQ ID NO: 540611 - DNA, 33 bp, Homo sapien
acaagaaaccttgttccatcttcagcatccacc

SEQ ID NO: 540612 - DNA, 33 bp, Homo sapien
acaagaaaccttgttctatcttcagcatccacc

SEQ ID NO: 540613 - DNA, 33 bp, Homo sapien
tatagctttcatgatccaatgacttcaaatcct

SEQ ID NO: 540614 - DNA, 33 bp, Homo sapien
tatagctttcatgatcgaatgacttcaaatcct

SEQ ID NO: 540615 - DNA, 33 bp, Homo sapien
acctccacgtgtccaaatatctggaagctctct

SEQ ID NO: 540616 - DNA, 33 bp, Homo sapien
acctccacgtgtccaactatctggaagctctct

SEQ ID NO: 540617 - DNA, 33 bp, Homo sapien
ggaagcactgctttaacagggactgtccacctg

SEQ ID NO: 540618 - DNA, 33 bp, Homo sapien
ggaagcactgctttaatagggactgtccacctg

SEQ ID NO: 540619 - DNA, 33 bp, Homo sapien
ctagttagaaagtggcgcaagtaaagggtccat

SEQ ID NO: 540620 - DNA, 33 bp, Homo sapien
ctagttagaaagtggctcaagtaaagggtccat

SEQ ID NO: 540621 - DNA, 33 bp, Homo sapien
ggaacatctcctaaaagacctgcctaagattgt

SEQ ID NO: 540622 - DNA, 33 bp, Homo sapien
ggaacatctcctaaaatacctgcctaagattgt

SEQ ID NO: 540623 - DNA, 33 bp, Homo sapien
cttaaatatttgctaccgaacgtcttgttaatt

SEQ ID NO: 540624 - DNA, 33 bp, Homo sapien
cttaaatatttgctactgaacgtcttgttaatt

SEQ ID NO: 540625 - DNA, 33 bp, Homo sapien
gcctatttagtatgcaatccagaaagaaaatat

SEQ ID NO: 540626 - DNA, 33 bp, Homo sapien
gcctatttagtatgcattccagaaagaaaatat

SEQ ID NO: 540627 - DNA, 33 bp, Homo sapien
tggtatcctttcttcacagtcagggaaatcaaa

SEQ ID NO: 540628 - DNA, 33 bp, Homo sapien
tggtatcctttcttcatagtcagggaaatcaaa

SEQ ID NO: 540629 - DNA, 33 bp, Homo sapien
tcaaataacaccagcaactattgagctaatctg

SEQ ID NO: 540630 - DNA, 33 bp, Homo sapien
tcaaataacaccagcagctattgagctaatctg

SEQ ID NO: 540631 - DNA, 33 bp, Homo sapien
ccatttacttatacctaacctactagctaactt

SEQ ID NO: 540632 - DNA, 33 bp, Homo sapien
ccatttacttatacctcacctactagctaactt

SEQ ID NO: 540633 - DNA, 33 bp, Homo sapien
tttgcctgatgaaagacagtcggtccacagagc

SEQ ID NO: 540634 - DNA, 33 bp, Homo sapien
tttgcctgatgaaagagagtcggtccacagagc

SEQ ID NO: 540635 - DNA, 33 bp, Homo sapien
catgtgtcataaaacccgaaaaaaggatcattt

SEQ ID NO: 540636 - DNA, 33 bp, Homo sapien
catgtgtcataaaacctgaaaaaaggatcattt

SEQ ID NO: 540637 - DNA, 33 bp, Homo sapien
taaggatatttagtgaacagcaaggtatgtggc

SEQ ID NO: 540638 - DNA, 33 bp, Homo sapien
taaggatatttagtgaccagcaaggtatgtggc

SEQ ID NO: 540639 - DNA, 33 bp, Homo sapien
aatcattttgggtgataataagtggtattaata

SEQ ID NO: 540640 - DNA, 33 bp, Homo sapien
aatcattttgggtgattataagtggtattaata

SEQ ID NO: 540641 - DNA, 33 bp, Homo sapien
cagtgggactcgcaatgacctaacatgctaagc

SEQ ID NO: 540642 - DNA, 33 bp, Homo sapien
cagtgggactcgcaattacctaacatgctaagc

SEQ ID NO: 540643 - DNA, 33 bp, Homo sapien
ttgtctctatgctaaactctggataattttatc

SEQ ID NO: 540644 - DNA, 33 bp, Homo sapien
ttgtctctatgctaaattctggataattttatc

SEQ ID NO: 540645 - DNA, 33 bp, Homo sapien
cagcatgggagtctctaacagtctacaggtaga

SEQ ID NO: 540646 - DNA, 33 bp, Homo sapien
cagcatgggagtctcttacagtctacaggtaga

SEQ ID NO: 540647 - DNA, 33 bp, Homo sapien
ggttgtccagttgaaactacaaaaagtctaatg

SEQ ID NO: 540648 - DNA, 33 bp, Homo sapien
ggttgtccagttgaaattacaaaaagtctaatg

SEQ ID NO: 540649 - DNA, 33 bp, Homo sapien
tgaatcagaagaatgccgcatagctgaaaagaa

SEQ ID NO: 540650 - DNA, 33 bp, Homo sapien
tgaatcagaagaatgctgcatagctgaaaagaa

SEQ ID NO: 540651 - DNA, 33 bp, Homo sapien
aaattcatcagataataaccaacctccccctta

SEQ ID NO: 540652 - DNA, 33 bp, Homo sapien
aaattcatcagataattaccaacctccccctta

SEQ ID NO: 540653 - DNA, 33 bp, Homo sapien
aagggctgctcaaaaaatgaacttgtctggtgt

SEQ ID NO: 540654 - DNA, 33 bp, Homo sapien
aagggctgctcaaaaagtgaacttgtctggtgt

SEQ ID NO: 540655 - DNA, 33 bp, Homo sapien
aatattggtttttacacggtattcttagaacta

SEQ ID NO: 540656 - DNA, 33 bp, Homo sapien
aatattggtttttacatggtattcttagaacta

SEQ ID NO: 540657 - DNA, 33 bp, Homo sapien
ctttataccttataacggaagcataattagaaa

SEQ ID NO: 540658 - DNA, 33 bp, Homo sapien
ctttataccttataactgaagcataattagaaa

SEQ ID NO: 540659 - DNA, 33 bp, Homo sapien
taagatttgataaagtaaattacagtggtgcat

SEQ ID NO: 540660 - DNA, 33 bp, Homo sapien
taagatttgataaagttaattacagtggtgcat

SEQ ID NO: 540661 - DNA, 33 bp, Homo sapien
acacacaggtattatacgggcaacgtaattttt

SEQ ID NO: 540662 - DNA, 33 bp, Homo sapien
acacacaggtattatatgggcaacgtaattttt

SEQ ID NO: 540663 - DNA, 33 bp, Homo sapien
agagttggtctatttacgtgttaggagctgaga

SEQ ID NO: 540664 - DNA, 33 bp, Homo sapien
agagttggtctatttatgtgttaggagctgaga

SEQ ID NO: 540665 - DNA, 33 bp, Homo sapien
ctgaatgaactgggccagcaggaaaagaccact

SEQ ID NO: 540666 - DNA, 33 bp, Homo sapien
ctgaatgaactgggccggcaggaaaagaccact

SEQ ID NO: 540667 - DNA, 33 bp, Homo sapien
agagtgttacaaaaaccatgacactgatcagaa

SEQ ID NO: 540668 - DNA, 33 bp, Homo sapien
agagtgttacaaaaactatgacactgatcagaa

SEQ ID NO: 540669 - DNA, 33 bp, Homo sapien
gaagccagcacttcacaggagcgataaggtatc

SEQ ID NO: 540670 - DNA, 33 bp, Homo sapien
gaagccagcacttcacgggagcgataaggtatc

SEQ ID NO: 540671 - DNA, 33 bp, Homo sapien
ccttgatgaagcagtacaaattaataaatcttg

SEQ ID NO: 540672 - DNA, 33 bp, Homo sapien
ccttgatgaagcagtagaaattaataaatcttg

SEQ ID NO: 540673 - DNA, 33 bp, Homo sapien
aatttcaaatgttgtaaaaattcccttcccatc

SEQ ID NO: 540674 - DNA, 33 bp, Homo sapien
aatttcaaatgttgtataaattcccttcccatc

SEQ ID NO: 540675 - DNA, 33 bp, Homo sapien
gctagtaagagctctacgaaaggcttccccaga

SEQ ID NO: 540676 - DNA, 33 bp, Homo sapien
gctagtaagagctctaggaaaggcttccccaga

SEQ ID NO: 540677 - DNA, 33 bp, Homo sapien
tgcacatgcaatccataagttagcatgaagcaa

SEQ ID NO: 540678 - DNA, 33 bp, Homo sapien
tgcacatgcaatccatgagttagcatgaagcaa

SEQ ID NO: 540679 - DNA, 33 bp, Homo sapien
tactacagggctattggaaccaaaacagcatgg

SEQ ID NO: 540680 - DNA, 33 bp, Homo sapien
tactacagggctattgtaaccaaaacagcatgg

SEQ ID NO: 540681 - DNA, 33 bp, Homo sapien
tttctcttggtactaactgtcaacatcacaaac

SEQ ID NO: 540682 - DNA, 33 bp, Homo sapien
tttctcttggtactaattgtcaacatcacaaac

SEQ ID NO: 540683 - DNA, 33 bp, Homo sapien
ccactatgttgctacaaattcatacttaaacat

SEQ ID NO: 540684 - DNA, 33 bp, Homo sapien
ccactatgttgctacagattcatacttaaacat

SEQ ID NO: 540685 - DNA, 33 bp, Homo sapien
gacttatgtggatattaaacacttaagatttgg

SEQ ID NO: 540686 - DNA, 33 bp, Homo sapien
gacttatgtggatatttaacacttaagatttgg

SEQ ID NO: 540687 - DNA, 33 bp, Homo sapien
ctcatgctttccttaactcacaatgaacgttct

SEQ ID NO: 540688 - DNA, 33 bp, Homo sapien
ctcatgctttccttaattcacaatgaacgttct

SEQ ID NO: 540689 - DNA, 33 bp, Homo sapien
aagaaccaggaacgagcagctaattttccaatt

SEQ ID NO: 540690 - DNA, 33 bp, Homo sapien
aagaaccaggaacgagtagctaattttccaatt

SEQ ID NO: 540691 - DNA, 33 bp, Homo sapien
ctagctacagtgagaaaatatttgcaaaccaca

SEQ ID NO: 540692 - DNA, 33 bp, Homo sapien
ctagctacagtgagaacatatttgcaaaccaca

SEQ ID NO: 540693 - DNA, 33 bp, Homo sapien
cctaactctgtccatccctacacaacagacttt

SEQ ID NO: 540694 - DNA, 33 bp, Homo sapien
cctaactctgtccatctctacacaacagacttt

SEQ ID NO: 540695 - DNA, 33 bp, Homo sapien
caagacagtgcaacataaattagcagaattaaa

SEQ ID NO: 540696 - DNA, 33 bp, Homo sapien
caagacagtgcaacatcaattagcagaattaaa

SEQ ID NO: 540697 - DNA, 33 bp, Homo sapien
tacagccgttgaaaacacctgttgctttttcct

SEQ ID NO: 540698 - DNA, 33 bp, Homo sapien
tacagccgttgaaaactcctgttgctttttcct

SEQ ID NO: 540699 - DNA, 33 bp, Homo sapien
gtaataacagtatatacgtaaagagtgtaggtt

SEQ ID NO: 540700 - DNA, 33 bp, Homo sapien
gtaataacagtatataggtaaagagtgtaggtt

SEQ ID NO: 540701 - DNA, 33 bp, Homo sapien
agcaaggtgtgtaaaaaaggacttctatagccc

SEQ ID NO: 540702 - DNA, 33 bp, Homo sapien
agcaaggtgtgtaaaagaggacttctatagccc

SEQ ID NO: 540703 - DNA, 33 bp, Homo sapien
tcattgaaagtcatgaaaggatatagtaaataa

SEQ ID NO: 540704 - DNA, 33 bp, Homo sapien
tcattgaaagtcatgagaggatatagtaaataa

SEQ ID NO: 540705 - DNA, 33 bp, Homo sapien
aatttctcagatgcctcagatttggttcatttc

SEQ ID NO: 540706 - DNA, 33 bp, Homo sapien
aatttctcagatgccttagatttggttcatttc

SEQ ID NO: 540707 - DNA, 33 bp, Homo sapien
tggctccctgagcacaaatttcacattcttgtc

SEQ ID NO: 540708 - DNA, 33 bp, Homo sapien
tggctccctgagcacacatttcacattcttgtc

SEQ ID NO: 540709 - DNA, 33 bp, Homo sapien
agagctgtttggcctacagggaagagtgcctca

SEQ ID NO: 540710 - DNA, 33 bp, Homo sapien
agagctgtttggcctatagggaagagtgcctca

SEQ ID NO: 540711 - DNA, 33 bp, Homo sapien
gatgcatggatgctcgccatggccagggcagtg

SEQ ID NO: 540712 - DNA, 33 bp, Homo sapien
gatgcatggatgctcggcatggccagggcagtg

SEQ ID NO: 540713 - DNA, 33 bp, Homo sapien
cagaggttgaagttaaagttctgccactgaaat

SEQ ID NO: 540714 - DNA, 33 bp, Homo sapien
cagaggttgaagttaaggttctgccactgaaat

SEQ ID NO: 540715 - DNA, 33 bp, Homo sapien
actgtgctgttcataactgccaaatttttttaa

SEQ ID NO: 540716 - DNA, 33 bp, Homo sapien
actgtgctgttcataattgccaaatttttttaa

SEQ ID NO: 540717 - DNA, 33 bp, Homo sapien
agttctagtgttctaaagcactataggatgact

SEQ ID NO: 540718 - DNA, 33 bp, Homo sapien
agttctagtgttctaacgcactataggatgact

SEQ ID NO: 540719 - DNA, 33 bp, Homo sapien
agaggagggaataagacatagccagaggtcagt

SEQ ID NO: 540720 - DNA, 33 bp, Homo sapien
agaggagggaataagagatagccagaggtcagt

SEQ ID NO: 540721 - DNA, 33 bp, Homo sapien
tcaaacaacttgcaaacgtgtcttgtctttttt

SEQ ID NO: 540722 - DNA, 33 bp, Homo sapien
tcaaacaacttgcaaatgtgtcttgtctttttt

SEQ ID NO: 540723 - DNA, 33 bp, Homo sapien
gcagaagtagaaatagaaacagcatgatctagt

SEQ ID NO: 540724 - DNA, 33 bp, Homo sapien
gcagaagtagaaatagcaacagcatgatctagt

SEQ ID NO: 540725 - DNA, 33 bp, Homo sapien
ttcaaaaagcaaaaacaatagaactttgcagta

SEQ ID NO: 540726 - DNA, 33 bp, Homo sapien
ttcaaaaagcaaaaaccatagaactttgcagta

SEQ ID NO: 540727 - DNA, 33 bp, Homo sapien
caacatcaaagctcaaataaagagacacctgac

SEQ ID NO: 540728 - DNA, 33 bp, Homo sapien
caacatcaaagctcaagtaaagagacacctgac

SEQ ID NO: 540729 - DNA, 33 bp, Homo sapien
tgcctagcataaataccaaatacttagaagttt

SEQ ID NO: 540730 - DNA, 33 bp, Homo sapien
tgcctagcataaatacgaaatacttagaagttt

SEQ ID NO: 540731 - DNA, 33 bp, Homo sapien
tgggtatttttgatccaatcttctacctgctca

SEQ ID NO: 540732 - DNA, 33 bp, Homo sapien
tgggtatttttgatccgatcttctacctgctca

SEQ ID NO: 540733 - DNA, 33 bp, Homo sapien
ggtaaaagtacagcaaatacagcaactaactac

SEQ ID NO: 540734 - DNA, 33 bp, Homo sapien
ggtaaaagtacagcaagtacagcaactaactac

SEQ ID NO: 540735 - DNA, 33 bp, Homo sapien
ttgctgtacttttaccacaacacgagtgcttag

SEQ ID NO: 540736 - DNA, 33 bp, Homo sapien
ttgctgtacttttaccgcaacacgagtgcttag

SEQ ID NO: 540737 - DNA, 33 bp, Homo sapien
ccactctactggtacccaattcactgcataagt

SEQ ID NO: 540738 - DNA, 33 bp, Homo sapien
ccactctactggtaccgaattcactgcataagt

SEQ ID NO: 540739 - DNA, 33 bp, Homo sapien
tcctaaggtggttgtccgagtgcccaaaggaca

SEQ ID NO: 540740 - DNA, 33 bp, Homo sapien
tcctaaggtggttgtctgagtgcccaaaggaca

SEQ ID NO: 540741 - DNA, 33 bp, Homo sapien
gaattcttaagtccaagcaactatgcttctgca

SEQ ID NO: 540742 - DNA, 33 bp, Homo sapien
gaattcttaagtccaatcaactatgcttctgca

SEQ ID NO: 540743 - DNA, 33 bp, Homo sapien
ccttagagatcttccaaacgttttctgtgtgca

SEQ ID NO: 540744 - DNA, 33 bp, Homo sapien
ccttagagatcttccagacgttttctgtgtgca

SEQ ID NO: 540745 - DNA, 33 bp, Homo sapien
agaatatccacactgaataggtaagaaaagcaa

SEQ ID NO: 540746 - DNA, 33 bp, Homo sapien
agaatatccacactgagtaggtaagaaaagcaa

SEQ ID NO: 540747 - DNA, 33 bp, Homo sapien
ccttagctatgatcgtaaaagacagccgtcccc

SEQ ID NO: 540748 - DNA, 33 bp, Homo sapien
ccttagctatgatcgtgaaagacagccgtcccc

SEQ ID NO: 540749 - DNA, 33 bp, Homo sapien
tatatagggaaaaaaaaccttcacttgctgtag

SEQ ID NO: 540750 - DNA, 33 bp, Homo sapien
tatatagggaaaaaaacccttcacttgctgtag

SEQ ID NO: 540751 - DNA, 33 bp, Homo sapien
tcccttgcttagtaacacagctaaaagcatagg

SEQ ID NO: 540752 - DNA, 33 bp, Homo sapien
tcccttgcttagtaacgcagctaaaagcatagg

SEQ ID NO: 540753 - DNA, 33 bp, Homo sapien
cagttcaacattagaaaagatcactagtgaggt

SEQ ID NO: 540754 - DNA, 33 bp, Homo sapien
cagttcaacattagaagagatcactagtgaggt

SEQ ID NO: 540755 - DNA, 33 bp, Homo sapien
tccaaagaggattagaaagccttatcgaaattt

SEQ ID NO: 540756 - DNA, 33 bp, Homo sapien
tccaaagaggattagacagccttatcgaaattt

SEQ ID NO: 540757 - DNA, 33 bp, Homo sapien
gaaccagcaagtaggggagaagatcacagaggg

SEQ ID NO: 540758 - DNA, 33 bp, Homo sapien
gaaccagcaagtagggtagaagatcacagaggg

SEQ ID NO: 540759 - DNA, 33 bp, Homo sapien
tattcttcttgatgtccaaatgatgtgtcatta

SEQ ID NO: 540760 - DNA, 33 bp, Homo sapien
tattcttcttgatgtcgaaatgatgtgtcatta

SEQ ID NO: 540761 - DNA, 33 bp, Homo sapien
tgcttacataacttaactaggagagttcaggca

SEQ ID NO: 540762 - DNA, 33 bp, Homo sapien
tgcttacataacttaattaggagagttcaggca

SEQ ID NO: 540763 - DNA, 33 bp, Homo sapien
atttcagagctgactaaccaatagaaaataaga

SEQ ID NO: 540764 - DNA, 33 bp, Homo sapien
atttcagagctgactatccaatagaaaataaga

SEQ ID NO: 540765 - DNA, 33 bp, Homo sapien
cttatcccaaagttcactctcctcttcctctat

SEQ ID NO: 540766 - DNA, 33 bp, Homo sapien
cttatcccaaagttcattctcctcttcctctat

SEQ ID NO: 540767 - DNA, 33 bp, Homo sapien
tttgctctcatcattaccctgaacgcacttgtg

SEQ ID NO: 540768 - DNA, 33 bp, Homo sapien
tttgctctcatcattatcctgaacgcacttgtg

SEQ ID NO: 540769 - DNA, 33 bp, Homo sapien
aacagtccctgctatcggaaacatttttctttc

SEQ ID NO: 540770 - DNA, 33 bp, Homo sapien
aacagtccctgctatctgaaacatttttctttc

SEQ ID NO: 540771 - DNA, 33 bp, Homo sapien
ctgcataaatttaacaatgcaatatagacacat

SEQ ID NO: 540772 - DNA, 33 bp, Homo sapien
ctgcataaatttaacagtgcaatatagacacat

SEQ ID NO: 540773 - DNA, 33 bp, Homo sapien
tttttatttgaaaagcaaggaagtgtgacaaca

SEQ ID NO: 540774 - DNA, 33 bp, Homo sapien
tttttatttgaaaagcgaggaagtgtgacaaca

SEQ ID NO: 540775 - DNA, 33 bp, Homo sapien
aaccactcaggaatacaatttagaaaaacgttc

SEQ ID NO: 540776 - DNA, 33 bp, Homo sapien
aaccactcaggaataccatttagaaaaacgttc

SEQ ID NO: 540777 - DNA, 33 bp, Homo sapien
gggatctaaaatatgaaccccatgatacacatg

SEQ ID NO: 540778 - DNA, 33 bp, Homo sapien
gggatctaaaatatgagccccatgatacacatg

SEQ ID NO: 540779 - DNA, 33 bp, Homo sapien
cactcatatgaatgaaataattcctctacaaac

SEQ ID NO: 540780 - DNA, 33 bp, Homo sapien
cactcatatgaatgaagtaattcctctacaaac

SEQ ID NO: 540781 - DNA, 33 bp, Homo sapien
tctacagccagaattacagaaagtgcctcatca

SEQ ID NO: 540782 - DNA, 33 bp, Homo sapien
tctacagccagaattatagaaagtgcctcatca

SEQ ID NO: 540783 - DNA, 33 bp, Homo sapien
cctaatgagacaaggacggtaatggggtttgcc

SEQ ID NO: 540784 - DNA, 33 bp, Homo sapien
cctaatgagacaaggatggtaatggggtttgcc

SEQ ID NO: 540785 - DNA, 33 bp, Homo sapien
ataaatttattgaagactattgaaaccacaatg

SEQ ID NO: 540786 - DNA, 33 bp, Homo sapien
ataaatttattgaagattattgaaaccacaatg

SEQ ID NO: 540787 - DNA, 33 bp, Homo sapien
gaactggccaaccaaacggtcatccaaaattag

SEQ ID NO: 540788 - DNA, 33 bp, Homo sapien
gaactggccaaccaaatggtcatccaaaattag

SEQ ID NO: 540789 - DNA, 33 bp, Homo sapien
actaacctggaactgactcaaattttagaattg

SEQ ID NO: 540790 - DNA, 33 bp, Homo sapien
actaacctggaactgattcaaattttagaattg

SEQ ID NO: 540791 - DNA, 33 bp, Homo sapien
acttaaacaagaaacactgaaggaggttttgca

SEQ ID NO: 540792 - DNA, 33 bp, Homo sapien
acttaaacaagaaacagtgaaggaggttttgca

SEQ ID NO: 540793 - DNA, 33 bp, Homo sapien
tggccccttgttttcacggtgttgtccactacc

SEQ ID NO: 540794 - DNA, 33 bp, Homo sapien
tggccccttgttttcagggtgttgtccactacc

SEQ ID NO: 540795 - DNA, 33 bp, Homo sapien
acggtgagcggggaggaaagtcgctttacaggt

SEQ ID NO: 540796 - DNA, 33 bp, Homo sapien
acggtgagcggggagggaagtcgctttacaggt

SEQ ID NO: 540797 - DNA, 33 bp, Homo sapien
catttgattaatgccccctggtaggccactgtc

SEQ ID NO: 540798 - DNA, 33 bp, Homo sapien
catttgattaatgcccgctggtaggccactgtc

SEQ ID NO: 540799 - DNA, 33 bp, Homo sapien
aaagcattatgcaagtcaatggcaattttcaaa

SEQ ID NO: 540800 - DNA, 33 bp, Homo sapien
aaagcattatgcaagtgaatggcaattttcaaa

SEQ ID NO: 540801 - DNA, 33 bp, Homo sapien
caggcttctctgataaggaacgtcttcataaag

SEQ ID NO: 540802 - DNA, 33 bp, Homo sapien
caggcttctctgataatgaacgtcttcataaag

SEQ ID NO: 540803 - DNA, 33 bp, Homo sapien
tagtctggagcctacacgtattgtgaatctggg

SEQ ID NO: 540804 - DNA, 33 bp, Homo sapien
tagtctggagcctacaggtattgtgaatctggg

SEQ ID NO: 540805 - DNA, 33 bp, Homo sapien
ctccttattcatcacagcatctagggttccaac

SEQ ID NO: 540806 - DNA, 33 bp, Homo sapien
ctccttattcatcacatcatctagggttccaac

SEQ ID NO: 540807 - DNA, 33 bp, Homo sapien
atgcgtgtgttcctggacaagattagccaaaaa

SEQ ID NO: 540808 - DNA, 33 bp, Homo sapien
atgcgtgtgttcctgggcaagattagccaaaaa

SEQ ID NO: 540809 - DNA, 33 bp, Homo sapien
acctgtgtcctcacaacctaagtttctagaatt

SEQ ID NO: 540810 - DNA, 33 bp, Homo sapien
acctgtgtcctcacaatctaagtttctagaatt

SEQ ID NO: 540811 - DNA, 33 bp, Homo sapien
cgagagcctgaactgaacagtagtagcaagaac

SEQ ID NO: 540812 - DNA, 33 bp, Homo sapien
cgagagcctgaactgagcagtagtagcaagaac

SEQ ID NO: 540813 - DNA, 33 bp, Homo sapien
gcatgtcctaaggtcaaagattaccactttcct

SEQ ID NO: 540814 - DNA, 33 bp, Homo sapien
gcatgtcctaaggtcagagattaccactttcct

SEQ ID NO: 540815 - DNA, 33 bp, Homo sapien
tccattagtgcatagagtcaattttggtcatgt

SEQ ID NO: 540816 - DNA, 33 bp, Homo sapien
tccattagtgcatagattcaattttggtcatgt

SEQ ID NO: 540817 - DNA, 33 bp, Homo sapien
tgattgacgaataaaagttaggagacattaaaa

SEQ ID NO: 540818 - DNA, 33 bp, Homo sapien
tgattgacgaataaaatttaggagacattaaaa

SEQ ID NO: 540819 - DNA, 33 bp, Homo sapien
ttgctgtcatccacaccgaacttcttgtgcttt

SEQ ID NO: 540820 - DNA, 33 bp, Homo sapien
ttgctgtcatccacactgaacttcttgtgcttt

SEQ ID NO: 540821 - DNA, 33 bp, Homo sapien
agtactaaattggaaccaaaatacttaaatttt

SEQ ID NO: 540822 - DNA, 33 bp, Homo sapien
agtactaaattggaacgaaaatacttaaatttt

SEQ ID NO: 540823 - DNA, 33 bp, Homo sapien
atactgttaaatgatgccacaaaatttttactt

SEQ ID NO: 540824 - DNA, 33 bp, Homo sapien
atactgttaaatgatgtcacaaaatttttactt

SEQ ID NO: 540825 - DNA, 33 bp, Homo sapien
gagatcattaaatggaagtttgaaagaggaagg

SEQ ID NO: 540826 - DNA, 33 bp, Homo sapien
gagatcattaaatggaggtttgaaagaggaagg

SEQ ID NO: 540827 - DNA, 33 bp, Homo sapien
tgcagaatgaacataaccactgaaaacaaattt

SEQ ID NO: 540828 - DNA, 33 bp, Homo sapien
tgcagaatgaacataagcactgaaaacaaattt

SEQ ID NO: 540829 - DNA, 33 bp, Homo sapien
gtcaacctaagttaataagtctcaaattctatt

SEQ ID NO: 540830 - DNA, 33 bp, Homo sapien
gtcaacctaagttaatgagtctcaaattctatt

SEQ ID NO: 540831 - DNA, 33 bp, Homo sapien
agaccctgtgttgtccaaacttgtgatatataa

SEQ ID NO: 540832 - DNA, 33 bp, Homo sapien
agaccctgtgttgtccgaacttgtgatatataa

SEQ ID NO: 540833 - DNA, 33 bp, Homo sapien
ttccatactgagaattcaatggtgtgcaagaag

SEQ ID NO: 540834 - DNA, 33 bp, Homo sapien
ttccatactgagaatttaatggtgtgcaagaag

SEQ ID NO: 540835 - DNA, 33 bp, Homo sapien
ccttgggtcttcatccacattgttgtcattgta

SEQ ID NO: 540836 - DNA, 33 bp, Homo sapien
ccttgggtcttcatccgcattgttgtcattgta

SEQ ID NO: 540837 - DNA, 33 bp, Homo sapien
taatacctttgtacacgccttgcttctacctgc

SEQ ID NO: 540838 - DNA, 33 bp, Homo sapien
taatacctttgtacactccttgcttctacctgc

SEQ ID NO: 540839 - DNA, 33 bp, Homo sapien
gtggcttgttacaccaaaaaggctaattgatac

SEQ ID NO: 540840 - DNA, 33 bp, Homo sapien
gtggcttgttacaccacaaaggctaattgatac

SEQ ID NO: 540841 - DNA, 33 bp, Homo sapien
tgattttgccgataaaatagaagcttcagagaa

SEQ ID NO: 540842 - DNA, 33 bp, Homo sapien
tgattttgccgataaattagaagcttcagagaa

SEQ ID NO: 540843 - DNA, 33 bp, Homo sapien
gcagagtggattagtaaaaaaagaagccataaa

SEQ ID NO: 540844 - DNA, 33 bp, Homo sapien
gcagagtggattagtagaaaaagaagccataaa

SEQ ID NO: 540845 - DNA, 33 bp, Homo sapien
catttcatctctagtaagtgtcatatcataatt

SEQ ID NO: 540846 - DNA, 33 bp, Homo sapien
catttcatctctagtaggtgtcatatcataatt

SEQ ID NO: 540847 - DNA, 33 bp, Homo sapien
caagtaatctacaaaccgcaaagttgcctatac

SEQ ID NO: 540848 - DNA, 33 bp, Homo sapien
caagtaatctacaaactgcaaagttgcctatac

SEQ ID NO: 540849 - DNA, 33 bp, Homo sapien
gtgaatattctagcaactatgacatagacagat

SEQ ID NO: 540850 - DNA, 33 bp, Homo sapien
gtgaatattctagcaattatgacatagacagat

SEQ ID NO: 540851 - DNA, 33 bp, Homo sapien
gcctccagaactctgaactgaacaaatctgttt

SEQ ID NO: 540852 - DNA, 33 bp, Homo sapien
gcctccagaactctgagctgaacaaatctgttt

SEQ ID NO: 540853 - DNA, 33 bp, Homo sapien
tttttctttgctgtcacgataaatttccaaagt

SEQ ID NO: 540854 - DNA, 33 bp, Homo sapien
tttttctttgctgtcatgataaatttccaaagt

SEQ ID NO: 540855 - DNA, 33 bp, Homo sapien
gaaaggcaaaggaggaatattagtaatggaggg

SEQ ID NO: 540856 - DNA, 33 bp, Homo sapien
gaaaggcaaaggaggagtattagtaatggaggg

SEQ ID NO: 540857 - DNA, 33 bp, Homo sapien
ttgagttcttataaacagtaaaatgtaggactg

SEQ ID NO: 540858 - DNA, 33 bp, Homo sapien
ttgagttcttataaacggtaaaatgtaggactg

SEQ ID NO: 540859 - DNA, 33 bp, Homo sapien
atattagtgaaatagacgttgataagttaatat

SEQ ID NO: 540860 - DNA, 33 bp, Homo sapien
atattagtgaaatagatgttgataagttaatat

SEQ ID NO: 540861 - DNA, 33 bp, Homo sapien
atgatagctgtctaaaatcaaatctctccatgc

SEQ ID NO: 540862 - DNA, 33 bp, Homo sapien
atgatagctgtctaaattcaaatctctccatgc

SEQ ID NO: 540863 - DNA, 33 bp, Homo sapien
gagattaaaggatagacataaggcaagggcagc

SEQ ID NO: 540864 - DNA, 33 bp, Homo sapien
gagattaaaggatagagataaggcaagggcagc

SEQ ID NO: 540865 - DNA, 33 bp, Homo sapien
ttacctgctctgaatcaaagcatacgtaaaatt

SEQ ID NO: 540866 - DNA, 33 bp, Homo sapien
ttacctgctctgaatcgaagcatacgtaaaatt

SEQ ID NO: 540867 - DNA, 33 bp, Homo sapien
gttttctttaatgatacgtaaatgacaggaagc

SEQ ID NO: 540868 - DNA, 33 bp, Homo sapien
gttttctttaatgatatgtaaatgacaggaagc

SEQ ID NO: 540869 - DNA, 33 bp, Homo sapien
tagtaaggaaaatgaacgatactgagcaacagt

SEQ ID NO: 540870 - DNA, 33 bp, Homo sapien
tagtaaggaaaatgaatgatactgagcaacagt

SEQ ID NO: 540871 - DNA, 33 bp, Homo sapien
tcaaaaatacagcccaggtttccatctagattt

SEQ ID NO: 540872 - DNA, 33 bp, Homo sapien
tcaaaaatacagcccatgtttccatctagattt

SEQ ID NO: 540873 - DNA, 33 bp, Homo sapien
tttagactgtgaaagacgaacagttaaggcctg

SEQ ID NO: 540874 - DNA, 33 bp, Homo sapien
tttagactgtgaaagatgaacagttaaggcctg

SEQ ID NO: 540875 - DNA, 33 bp, Homo sapien
aaggcaacaattagcaataagcctagacaagtg

SEQ ID NO: 540876 - DNA, 33 bp, Homo sapien
aaggcaacaattagcagtaagcctagacaagtg

SEQ ID NO: 540877 - DNA, 33 bp, Homo sapien
ggtctaaatacttggaacagagagaaacactca

SEQ ID NO: 540878 - DNA, 33 bp, Homo sapien
ggtctaaatacttggagcagagagaaacactca

SEQ ID NO: 540879 - DNA, 33 bp, Homo sapien
tgggcacatccatagaaagtggttgttgtagag

SEQ ID NO: 540880 - DNA, 33 bp, Homo sapien
tgggcacatccatagagagtggttgttgtagag

SEQ ID NO: 540881 - DNA, 33 bp, Homo sapien
aaaggatggtacaaaagttcatcacgctactca

SEQ ID NO: 540882 - DNA, 33 bp, Homo sapien
aaaggatggtacaaaatttcatcacgctactca

SEQ ID NO: 540883 - DNA, 33 bp, Homo sapien
ccatgactataagcaccatcaatatccgataat

SEQ ID NO: 540884 - DNA, 33 bp, Homo sapien
ccatgactataagcacgatcaatatccgataat

SEQ ID NO: 540885 - DNA, 33 bp, Homo sapien
tagcattccactgttacacaagagtgtttgttg

SEQ ID NO: 540886 - DNA, 33 bp, Homo sapien
tagcattccactgttagacaagagtgtttgttg

SEQ ID NO: 540887 - DNA, 33 bp, Homo sapien
cattcttcaaccctcaaagcacattttcacttg

SEQ ID NO: 540888 - DNA, 33 bp, Homo sapien
cattcttcaaccctcagagcacattttcacttg

SEQ ID NO: 540889 - DNA, 33 bp, Homo sapien
ccatgtagttcatatggaaattcttggacctga

SEQ ID NO: 540890 - DNA, 33 bp, Homo sapien
ccatgtagttcatatgtaaattcttggacctga

SEQ ID NO: 540891 - DNA, 33 bp, Homo sapien
catatattaaacacgaggcagatagacatatta

SEQ ID NO: 540892 - DNA, 33 bp, Homo sapien
catatattaaacacgatgcagatagacatatta

SEQ ID NO: 540893 - DNA, 33 bp, Homo sapien
agaccacacaagtaaaactcacacgcgagtaaa

SEQ ID NO: 540894 - DNA, 33 bp, Homo sapien
agaccacacaagtaaagctcacacgcgagtaaa

SEQ ID NO: 540895 - DNA, 33 bp, Homo sapien
gttagaactaaaaatgcaaatgagacccaaata

SEQ ID NO: 540896 - DNA, 33 bp, Homo sapien
gttagaactaaaaatgtaaatgagacccaaata

SEQ ID NO: 540897 - DNA, 33 bp, Homo sapien
tagagatctaacacacagcagtgaaatctgttc

SEQ ID NO: 540898 - DNA, 33 bp, Homo sapien
tagagatctaacacaccgcagtgaaatctgttc

SEQ ID NO: 540899 - DNA, 33 bp, Homo sapien
tgccaaacattgcttacgcacttttttaacatt

SEQ ID NO: 540900 - DNA, 33 bp, Homo sapien
tgccaaacattgcttatgcacttttttaacatt

SEQ ID NO: 540901 - DNA, 33 bp, Homo sapien
tatcatttggtagtcaaaaagctgcttgttggg

SEQ ID NO: 540902 - DNA, 33 bp, Homo sapien
tatcatttggtagtcacaaagctgcttgttggg

SEQ ID NO: 540903 - DNA, 33 bp, Homo sapien
cttgtttctcaacacaatactcctcaaataata

SEQ ID NO: 540904 - DNA, 33 bp, Homo sapien
cttgtttctcaacacagtactcctcaaataata

SEQ ID NO: 540905 - DNA, 33 bp, Homo sapien
ctagtaaatgtcataaacagaactcaaatctag

SEQ ID NO: 540906 - DNA, 33 bp, Homo sapien
ctagtaaatgtcataaccagaactcaaatctag

SEQ ID NO: 540907 - DNA, 33 bp, Homo sapien
aagactgacaaagtaacaagctaggataaaagg

SEQ ID NO: 540908 - DNA, 33 bp, Homo sapien
aagactgacaaagtaataagctaggataaaagg

SEQ ID NO: 540909 - DNA, 33 bp, Homo sapien
tatgggattcctctaacgggcagctttggctat

SEQ ID NO: 540910 - DNA, 33 bp, Homo sapien
tatgggattcctctaatgggcagctttggctat

SEQ ID NO: 540911 - DNA, 33 bp, Homo sapien
atctggtataaagacaataacaccttttgcttg

SEQ ID NO: 540912 - DNA, 33 bp, Homo sapien
atctggtataaagacagtaacaccttttgcttg

SEQ ID NO: 540913 - DNA, 33 bp, Homo sapien
aaacatcttccaacctcaagacatttgcactca

SEQ ID NO: 540914 - DNA, 33 bp, Homo sapien
aaacatcttccaacctgaagacatttgcactca

SEQ ID NO: 540915 - DNA, 33 bp, Homo sapien
agagacaaaaaagcaacttgagtttggaataat

SEQ ID NO: 540916 - DNA, 33 bp, Homo sapien
agagacaaaaaagcaatttgagtttggaataat

SEQ ID NO: 540917 - DNA, 33 bp, Homo sapien
tcaggtattagataaccgagattgttccaacca

SEQ ID NO: 540918 - DNA, 33 bp, Homo sapien
tcaggtattagataactgagattgttccaacca

SEQ ID NO: 540919 - DNA, 33 bp, Homo sapien
tttgctataaagacagaaaattgcataacatac

SEQ ID NO: 540920 - DNA, 33 bp, Homo sapien
tttgctataaagacagcaaattgcataacatac

SEQ ID NO: 540921 - DNA, 33 bp, Homo sapien
tttgtttacactgagaataaaatcgcctactca

SEQ ID NO: 540922 - DNA, 33 bp, Homo sapien
tttgtttacactgagagtaaaatcgcctactca

SEQ ID NO: 540923 - DNA, 33 bp, Homo sapien
atagtgccaaagtatcaattaacatgggtatag

SEQ ID NO: 540924 - DNA, 33 bp, Homo sapien
atagtgccaaagtatcgattaacatgggtatag

SEQ ID NO: 540925 - DNA, 33 bp, Homo sapien
acatatgatgaccctaaaactatacatttttcc

SEQ ID NO: 540926 - DNA, 33 bp, Homo sapien
acatatgatgaccctagaactatacatttttcc

SEQ ID NO: 540927 - DNA, 33 bp, Homo sapien
atcctcaatagcattcaatgttgtcagagttta

SEQ ID NO: 540928 - DNA, 33 bp, Homo sapien
atcctcaatagcattcgatgttgtcagagttta

SEQ ID NO: 540929 - DNA, 33 bp, Homo sapien
tagacaagaggcttcaccacagatttttcctgg

SEQ ID NO: 540930 - DNA, 33 bp, Homo sapien
tagacaagaggcttcatcacagatttttcctgg

SEQ ID NO: 540931 - DNA, 33 bp, Homo sapien
cagtggctttctacaacaagtgtacatttctca

SEQ ID NO: 540932 - DNA, 33 bp, Homo sapien
cagtggctttctacaataagtgtacatttctca

SEQ ID NO: 540933 - DNA, 33 bp, Homo sapien
gcattgtttcctaaaacgcatcgttgcaataga

SEQ ID NO: 540934 - DNA, 33 bp, Homo sapien
gcattgtttcctaaaatgcatcgttgcaataga

SEQ ID NO: 540935 - DNA, 33 bp, Homo sapien
caccctggcctctcaaatatttattactaaact

SEQ ID NO: 540936 - DNA, 33 bp, Homo sapien
caccctggcctctcaactatttattactaaact

SEQ ID NO: 540937 - DNA, 33 bp, Homo sapien
aatgtgaatctgaataactgggtttgttcacct

SEQ ID NO: 540938 - DNA, 33 bp, Homo sapien
aatgtgaatctgaatacctgggtttgttcacct

SEQ ID NO: 540939 - DNA, 33 bp, Homo sapien
ttggggagttcgaagaaaaaatgagagtgtatg

SEQ ID NO: 540940 - DNA, 33 bp, Homo sapien
ttggggagttcgaagagaaaatgagagtgtatg

SEQ ID NO: 540941 - DNA, 33 bp, Homo sapien
gcaagaaccaaaaagaagacactgtaaaatctc

SEQ ID NO: 540942 - DNA, 33 bp, Homo sapien
gcaagaaccaaaaagaggacactgtaaaatctc

SEQ ID NO: 540943 - DNA, 33 bp, Homo sapien
ccattcggctactgaaaaacatcttgattgctt

SEQ ID NO: 540944 - DNA, 33 bp, Homo sapien
ccattcggctactgaagaacatcttgattgctt

SEQ ID NO: 540945 - DNA, 33 bp, Homo sapien
attaaggtgatttccaatgatgagttgttgaag

SEQ ID NO: 540946 - DNA, 33 bp, Homo sapien
attaaggtgatttccagtgatgagttgttgaag

SEQ ID NO: 540947 - DNA, 33 bp, Homo sapien
taaaagtgactatgagaattagctatatggaca

SEQ ID NO: 540948 - DNA, 33 bp, Homo sapien
taaaagtgactatgaggattagctatatggaca

SEQ ID NO: 540949 - DNA, 33 bp, Homo sapien
aagatgataaagtcctcaaaatatggctctgcc

SEQ ID NO: 540950 - DNA, 33 bp, Homo sapien
aagatgataaagtccttaaaatatggctctgcc

SEQ ID NO: 540951 - DNA, 33 bp, Homo sapien
catgtttcatatcacaactttacaggatttttt

SEQ ID NO: 540952 - DNA, 33 bp, Homo sapien
catgtttcatatcacacctttacaggatttttt

SEQ ID NO: 540953 - DNA, 33 bp, Homo sapien
agaattctgtcatatcaaacacactgattgcta

SEQ ID NO: 540954 - DNA, 33 bp, Homo sapien
agaattctgtcatatcgaacacactgattgcta

SEQ ID NO: 540955 - DNA, 33 bp, Homo sapien
attactctgaaaagaactggtaatatcgagata

SEQ ID NO: 540956 - DNA, 33 bp, Homo sapien
attactctgaaaagaattggtaatatcgagata

SEQ ID NO: 540957 - DNA, 33 bp, Homo sapien
tgtcctgccaggaagaagtcaaccagaagagag

SEQ ID NO: 540958 - DNA, 33 bp, Homo sapien
tgtcctgccaggaagaggtcaaccagaagagag

SEQ ID NO: 540959 - DNA, 33 bp, Homo sapien
ttcaataacatctgacagcaagggtacagtaaa

SEQ ID NO: 540960 - DNA, 33 bp, Homo sapien
ttcaataacatctgacggcaagggtacagtaaa

SEQ ID NO: 540961 - DNA, 33 bp, Homo sapien
agaaccttgtaagaaccattttgtgttgcttgc

SEQ ID NO: 540962 - DNA, 33 bp, Homo sapien
agaaccttgtaagaactattttgtgttgcttgc

SEQ ID NO: 540963 - DNA, 33 bp, Homo sapien
tcttgctatcaaagcaactccatttagtctctt

SEQ ID NO: 540964 - DNA, 33 bp, Homo sapien
tcttgctatcaaagcagctccatttagtctctt

SEQ ID NO: 540965 - DNA, 33 bp, Homo sapien
ggagggacctgctttcaaacacccaccacctca

SEQ ID NO: 540966 - DNA, 33 bp, Homo sapien
ggagggacctgctttccaacacccaccacctca

SEQ ID NO: 540967 - DNA, 33 bp, Homo sapien
gttagcttttattgcaaaacatacctctcttaa

SEQ ID NO: 540968 - DNA, 33 bp, Homo sapien
gttagcttttattgcacaacatacctctcttaa

SEQ ID NO: 540969 - DNA, 33 bp, Homo sapien
gggtaaatccaaggtaactacagagctgtgtcc

SEQ ID NO: 540970 - DNA, 33 bp, Homo sapien
gggtaaatccaaggtatctacagagctgtgtcc

SEQ ID NO: 540971 - DNA, 33 bp, Homo sapien
catttataggttcccaaaattaagatatgtcaa

SEQ ID NO: 540972 - DNA, 33 bp, Homo sapien
catttataggttcccagaattaagatatgtcaa

SEQ ID NO: 540973 - DNA, 33 bp, Homo sapien
cagatattttatttggaagtcagaataaaagcc

SEQ ID NO: 540974 - DNA, 33 bp, Homo sapien
cagatattttatttggcagtcagaataaaagcc

SEQ ID NO: 540975 - DNA, 33 bp, Homo sapien
actgcattcttgagaactgtgcaataataataa

SEQ ID NO: 540976 - DNA, 33 bp, Homo sapien
actgcattcttgagaattgtgcaataataataa

SEQ ID NO: 540977 - DNA, 33 bp, Homo sapien
atttgtcaggagtaaacgtagcataatcagatt

SEQ ID NO: 540978 - DNA, 33 bp, Homo sapien
atttgtcaggagtaaatgtagcataatcagatt

SEQ ID NO: 540979 - DNA, 33 bp, Homo sapien
cagttatgagcaattacgattttgccaagaaac

SEQ ID NO: 540980 - DNA, 33 bp, Homo sapien
cagttatgagcaattatgattttgccaagaaac

SEQ ID NO: 540981 - DNA, 33 bp, Homo sapien
cttgtctgggtgcaaaacgtgcacatttgcatg

SEQ ID NO: 540982 - DNA, 33 bp, Homo sapien
cttgtctgggtgcaaagcgtgcacatttgcatg

SEQ ID NO: 540983 - DNA, 33 bp, Homo sapien
tttagttggtgctttccctgtacttactgaaat

SEQ ID NO: 540984 - DNA, 33 bp, Homo sapien
tttagttggtgctttctctgtacttactgaaat

SEQ ID NO: 540985 - DNA, 33 bp, Homo sapien
aaacatatgtctggaaacacgcaaggatgactt

SEQ ID NO: 540986 - DNA, 33 bp, Homo sapien
aaacatatgtctggaagcacgcaaggatgactt

SEQ ID NO: 540987 - DNA, 33 bp, Homo sapien
taataatattgggcatcagattccacaaaaaag

SEQ ID NO: 540988 - DNA, 33 bp, Homo sapien
taataatattgggcatgagattccacaaaaaag

SEQ ID NO: 540989 - DNA, 33 bp, Homo sapien
gtttggaataactttaagacccagagatgactc

SEQ ID NO: 540990 - DNA, 33 bp, Homo sapien
gtttggaataactttaggacccagagatgactc

SEQ ID NO: 540991 - DNA, 33 bp, Homo sapien
agaatagataaatgaacgttggtgtgttcaaac

SEQ ID NO: 540992 - DNA, 33 bp, Homo sapien
agaatagataaatgaatgttggtgtgttcaaac

SEQ ID NO: 540993 - DNA, 33 bp, Homo sapien
agtccccagttactcaaacatttatctaggtgt

SEQ ID NO: 540994 - DNA, 33 bp, Homo sapien
agtccccagttactcatacatttatctaggtgt

SEQ ID NO: 540995 - DNA, 33 bp, Homo sapien
tagttagtataccaccaatgagcctgtgtgtta

SEQ ID NO: 540996 - DNA, 33 bp, Homo sapien
tagttagtataccaccgatgagcctgtgtgtta

SEQ ID NO: 540997 - DNA, 33 bp, Homo sapien
aagccttccattatacaagcagagtgtcacaga

SEQ ID NO: 540998 - DNA, 33 bp, Homo sapien
aagccttccattataccagcagagtgtcacaga

SEQ ID NO: 540999 - DNA, 33 bp, Homo sapien
ttaaaataacagctacaaaaaaagtctccaaac

SEQ ID NO: 541000 - DNA, 33 bp, Homo sapien
ttaaaataacagctaccaaaaaagtctccaaac

SEQ ID NO: 541001 - DNA, 33 bp, Homo sapien
tttttttggcactataactacattgggcttatc

SEQ ID NO: 541002 - DNA, 33 bp, Homo sapien
tttttttggcactatatctacattgggcttatc

SEQ ID NO: 541003 - DNA, 33 bp, Homo sapien
ccagaggtcatgttcaatcacccaaagaacagt

SEQ ID NO: 541004 - DNA, 33 bp, Homo sapien
ccagaggtcatgttcagtcacccaaagaacagt

SEQ ID NO: 541005 - DNA, 33 bp, Homo sapien
gaatcataacaaggaacatggcagtggtataca

SEQ ID NO: 541006 - DNA, 33 bp, Homo sapien
gaatcataacaaggaatatggcagtggtataca

SEQ ID NO: 541007 - DNA, 33 bp, Homo sapien
caagttgtactctatacaaatcttttagcagtg

SEQ ID NO: 541008 - DNA, 33 bp, Homo sapien
caagttgtactctatataaatcttttagcagtg

SEQ ID NO: 541009 - DNA, 33 bp, Homo sapien
gaacactagcagaaaagaattttgtaggtcaga

SEQ ID NO: 541010 - DNA, 33 bp, Homo sapien
gaacactagcagaaaataattttgtaggtcaga

SEQ ID NO: 541011 - DNA, 33 bp, Homo sapien
ctcaaaacaaaatcaccctgatcagtaaacact

SEQ ID NO: 541012 - DNA, 33 bp, Homo sapien
ctcaaaacaaaatcactctgatcagtaaacact

SEQ ID NO: 541013 - DNA, 33 bp, Homo sapien
aatgaatatatagagcaagcaaagaaaggcctt

SEQ ID NO: 541014 - DNA, 33 bp, Homo sapien
aatgaatatatagagcgagcaaagaaaggcctt

SEQ ID NO: 541015 - DNA, 33 bp, Homo sapien
tggaaacataaatgcacaagtccaaagagtaac

SEQ ID NO: 541016 - DNA, 33 bp, Homo sapien
tggaaacataaatgcagaagtccaaagagtaac

SEQ ID NO: 541017 - DNA, 33 bp, Homo sapien
acctgtcagtgtaatacgatgacaatgatatct

SEQ ID NO: 541018 - DNA, 33 bp, Homo sapien
acctgtcagtgtaatatgatgacaatgatatct

SEQ ID NO: 541019 - DNA, 33 bp, Homo sapien
gaaacaaaagaaagtggcaccttgattgacttc

SEQ ID NO: 541020 - DNA, 33 bp, Homo sapien
gaaacaaaagaaagtgtcaccttgattgacttc

SEQ ID NO: 541021 - DNA, 33 bp, Homo sapien
gcaagactgtattaacaccaacagatgaaagaa

SEQ ID NO: 541022 - DNA, 33 bp, Homo sapien
gcaagactgtattaacgccaacagatgaaagaa

SEQ ID NO: 541023 - DNA, 33 bp, Homo sapien
ttgtagtctttgaacaaccttttctaggcagat

SEQ ID NO: 541024 - DNA, 33 bp, Homo sapien
ttgtagtctttgaacacccttttctaggcagat

SEQ ID NO: 541025 - DNA, 33 bp, Homo sapien
tatattcaaaatagaaatgagctgaattagaac

SEQ ID NO: 541026 - DNA, 33 bp, Homo sapien
tatattcaaaatagaagtgagctgaattagaac

SEQ ID NO: 541027 - DNA, 33 bp, Homo sapien
gactatagatactccacccctcaaaacatacag

SEQ ID NO: 541028 - DNA, 33 bp, Homo sapien
gactatagatactccatccctcaaaacatacag

SEQ ID NO: 541029 - DNA, 33 bp, Homo sapien
attagatctccgcaaccgtgatattctttactg

SEQ ID NO: 541030 - DNA, 33 bp, Homo sapien
attagatctccgcaactgtgatattctttactg

SEQ ID NO: 541031 - DNA, 33 bp, Homo sapien
gattactattataagccgaaacacagttcaaga

SEQ ID NO: 541032 - DNA, 33 bp, Homo sapien
gattactattataagctgaaacacagttcaaga

SEQ ID NO: 541033 - DNA, 33 bp, Homo sapien
ctatgaataagctttacgaatatgctattgttc

SEQ ID NO: 541034 - DNA, 33 bp, Homo sapien
ctatgaataagctttaggaatatgctattgttc

SEQ ID NO: 541035 - DNA, 33 bp, Homo sapien
attgtaatttcctgccaaagtttacacaggctt

SEQ ID NO: 541036 - DNA, 33 bp, Homo sapien
attgtaatttcctgccgaagtttacacaggctt

SEQ ID NO: 541037 - DNA, 33 bp, Homo sapien
atattgtgtctggacagtctacctgaggtcact

SEQ ID NO: 541038 - DNA, 33 bp, Homo sapien
atattgtgtctggacattctacctgaggtcact

SEQ ID NO: 541039 - DNA, 33 bp, Homo sapien
ctaaaaatctccagtcacagaaccacagctgat

SEQ ID NO: 541040 - DNA, 33 bp, Homo sapien
ctaaaaatctccagtcgcagaaccacagctgat

SEQ ID NO: 541041 - DNA, 33 bp, Homo sapien
gaccacgggctttgaggaaacattggcagtagc

SEQ ID NO: 541042 - DNA, 33 bp, Homo sapien
gaccacgggctttgagtaaacattggcagtagc

SEQ ID NO: 541043 - DNA, 33 bp, Homo sapien
atttcacccatttccactacaatagatcataca

SEQ ID NO: 541044 - DNA, 33 bp, Homo sapien
atttcacccatttccagtacaatagatcataca

SEQ ID NO: 541045 - DNA, 33 bp, Homo sapien
agaaaagaaagctctccacactctattttcaga

SEQ ID NO: 541046 - DNA, 33 bp, Homo sapien
agaaaagaaagctctctacactctattttcaga

SEQ ID NO: 541047 - DNA, 33 bp, Homo sapien
tatcctagtcattgaaactccgtatttctgata

SEQ ID NO: 541048 - DNA, 33 bp, Homo sapien
tatcctagtcattgaacctccgtatttctgata

SEQ ID NO: 541049 - DNA, 33 bp, Homo sapien
tctggattatttagaccgtatctgtgcttttta

SEQ ID NO: 541050 - DNA, 33 bp, Homo sapien
tctggattatttagactgtatctgtgcttttta

SEQ ID NO: 541051 - DNA, 33 bp, Homo sapien
taaatcaaggagcactaaccaaagaaaaggcaa

SEQ ID NO: 541052 - DNA, 33 bp, Homo sapien
taaatcaaggagcactcaccaaagaaaaggcaa

SEQ ID NO: 541053 - DNA, 33 bp, Homo sapien
ctcctcaattcaattggaccggggatctctagt

SEQ ID NO: 541054 - DNA, 33 bp, Homo sapien
ctcctcaattcaattgtaccggggatctctagt

SEQ ID NO: 541055 - DNA, 33 bp, Homo sapien
aaatctacataacaaaactgtcctaattagcct

SEQ ID NO: 541056 - DNA, 33 bp, Homo sapien
aaatctacataacaaacctgtcctaattagcct

SEQ ID NO: 541057 - DNA, 33 bp, Homo sapien
tcaagtctttcatgcccatcttttctcttccct

SEQ ID NO: 541058 - DNA, 33 bp, Homo sapien
tcaagtctttcatgcctatcttttctcttccct

SEQ ID NO: 541059 - DNA, 33 bp, Homo sapien
agcttttagaagtgacagactatacataaacag

SEQ ID NO: 541060 - DNA, 33 bp, Homo sapien
agcttttagaagtgacggactatacataaacag

SEQ ID NO: 541061 - DNA, 33 bp, Homo sapien
tgatgttgatgaagggacagaaacgggaacagg

SEQ ID NO: 541062 - DNA, 33 bp, Homo sapien
tgatgttgatgaagggtcagaaacgggaacagg

SEQ ID NO: 541063 - DNA, 33 bp, Homo sapien
catataaaactgaaggaaactttgatttactta

SEQ ID NO: 541064 - DNA, 33 bp, Homo sapien
catataaaactgaagggaactttgatttactta

SEQ ID NO: 541065 - DNA, 33 bp, Homo sapien
tataccgattgggttccgaaaagcaggaatgtt

SEQ ID NO: 541066 - DNA, 33 bp, Homo sapien
tataccgattgggttctgaaaagcaggaatgtt

SEQ ID NO: 541067 - DNA, 33 bp, Homo sapien
ccttttgggagagaaactgatctacaggtaggt

SEQ ID NO: 541068 - DNA, 33 bp, Homo sapien
ccttttgggagagaaattgatctacaggtaggt

SEQ ID NO: 541069 - DNA, 33 bp, Homo sapien
gattaagaagtagtcaaggatcggatgcagtgg

SEQ ID NO: 541070 - DNA, 33 bp, Homo sapien
gattaagaagtagtcagggatcggatgcagtgg

SEQ ID NO: 541071 - DNA, 33 bp, Homo sapien
ctccagctcaacaaaactgatataccaaagagg

SEQ ID NO: 541072 - DNA, 33 bp, Homo sapien
ctccagctcaacaaaattgatataccaaagagg

SEQ ID NO: 541073 - DNA, 33 bp, Homo sapien
gtctttagctatgcacaaacagtagttttgtgt

SEQ ID NO: 541074 - DNA, 33 bp, Homo sapien
gtctttagctatgcactaacagtagttttgtgt

SEQ ID NO: 541075 - DNA, 33 bp, Homo sapien
cccaacctctcctacaactgttaaattataggg

SEQ ID NO: 541076 - DNA, 33 bp, Homo sapien
cccaacctctcctacagctgttaaattataggg

SEQ ID NO: 541077 - DNA, 33 bp, Homo sapien
cattggtatgatggaaaaaaaggcactggatgg

SEQ ID NO: 541078 - DNA, 33 bp, Homo sapien
cattggtatgatggaagaaaaggcactggatgg

SEQ ID NO: 541079 - DNA, 33 bp, Homo sapien
tctttgatggtaaggcccagaaatctgacttgg

SEQ ID NO: 541080 - DNA, 33 bp, Homo sapien
tctttgatggtaaggctcagaaatctgacttgg

SEQ ID NO: 541081 - DNA, 33 bp, Homo sapien
tggtaaaaggacaagaaagaggttcagaaccca

SEQ ID NO: 541082 - DNA, 33 bp, Homo sapien
tggtaaaaggacaagagagaggttcagaaccca

SEQ ID NO: 541083 - DNA, 33 bp, Homo sapien
gccattaatgtcttaaagttcagattcaactaa

SEQ ID NO: 541084 - DNA, 33 bp, Homo sapien
gccattaatgtcttaaggttcagattcaactaa

SEQ ID NO: 541085 - DNA, 33 bp, Homo sapien
tttctcccttaaaagactcaggatagaagtact

SEQ ID NO: 541086 - DNA, 33 bp, Homo sapien
tttctcccttaaaagattcaggatagaagtact

SEQ ID NO: 541087 - DNA, 33 bp, Homo sapien
tagagagtcatagtagcaagaccaagttttcag

SEQ ID NO: 541088 - DNA, 33 bp, Homo sapien
tagagagtcatagtaggaagaccaagttttcag

SEQ ID NO: 541089 - DNA, 33 bp, Homo sapien
aagtatcctgatcagaacttaatgcctcaattc

SEQ ID NO: 541090 - DNA, 33 bp, Homo sapien
aagtatcctgatcagatcttaatgcctcaattc

SEQ ID NO: 541091 - DNA, 33 bp, Homo sapien
caaactgatacacaccaaagtccatgtacacaa

SEQ ID NO: 541092 - DNA, 33 bp, Homo sapien
caaactgatacacaccgaagtccatgtacacaa

SEQ ID NO: 541093 - DNA, 33 bp, Homo sapien
ttaaagcaagttttcccaagtggaaccatatat

SEQ ID NO: 541094 - DNA, 33 bp, Homo sapien
ttaaagcaagttttccgaagtggaaccatatat

SEQ ID NO: 541095 - DNA, 33 bp, Homo sapien
taactggacagaaccacgataatgctataagat

SEQ ID NO: 541096 - DNA, 33 bp, Homo sapien
taactggacagaaccatgataatgctataagat

SEQ ID NO: 541097 - DNA, 33 bp, Homo sapien
taattccagttttgaaataaaggttagagagct

SEQ ID NO: 541098 - DNA, 33 bp, Homo sapien
taattccagttttgaagtaaaggttagagagct

SEQ ID NO: 541099 - DNA, 33 bp, Homo sapien
tgttgtcataattgaaccttttcctcatgatca

SEQ ID NO: 541100 - DNA, 33 bp, Homo sapien
tgttgtcataattgaagcttttcctcatgatca

SEQ ID NO: 541101 - DNA, 33 bp, Homo sapien
atgtcaaagataccacaatgtcaagccaatatc

SEQ ID NO: 541102 - DNA, 33 bp, Homo sapien
atgtcaaagataccaccatgtcaagccaatatc

SEQ ID NO: 541103 - DNA, 33 bp, Homo sapien
gaaatgttagtgcttacgaactattacatgatt

SEQ ID NO: 541104 - DNA, 33 bp, Homo sapien
gaaatgttagtgcttatgaactattacatgatt

SEQ ID NO: 541105 - DNA, 33 bp, Homo sapien
atatgactgttctgccaagtttatatatatctt

SEQ ID NO: 541106 - DNA, 33 bp, Homo sapien
atatgactgttctgcccagtttatatatatctt

SEQ ID NO: 541107 - DNA, 33 bp, Homo sapien
actaaaacatattcacaactctcactaaatatt

SEQ ID NO: 541108 - DNA, 33 bp, Homo sapien
actaaaacatattcacgactctcactaaatatt

SEQ ID NO: 541109 - DNA, 33 bp, Homo sapien
tcaagttgttgaagacacagtgaaattcacaaa

SEQ ID NO: 541110 - DNA, 33 bp, Homo sapien
tcaagttgttgaagacgcagtgaaattcacaaa

SEQ ID NO: 541111 - DNA, 33 bp, Homo sapien
gccacatttaggctaaaccccagatgttggtat

SEQ ID NO: 541112 - DNA, 33 bp, Homo sapien
gccacatttaggctaagccccagatgttggtat

SEQ ID NO: 541113 - DNA, 33 bp, Homo sapien
ccattctcattggaaaccacatctttattgatt

SEQ ID NO: 541114 - DNA, 33 bp, Homo sapien
ccattctcattggaaagcacatctttattgatt

SEQ ID NO: 541115 - DNA, 33 bp, Homo sapien
tactggtggaaaaccacacagcttagggatagg

SEQ ID NO: 541116 - DNA, 33 bp, Homo sapien
tactggtggaaaaccatacagcttagggatagg

SEQ ID NO: 541117 - DNA, 33 bp, Homo sapien
gcactaaaggctcttaggcaacttgagtatcca

SEQ ID NO: 541118 - DNA, 33 bp, Homo sapien
gcactaaaggctcttatgcaacttgagtatcca

SEQ ID NO: 541119 - DNA, 33 bp, Homo sapien
acactgaggtcatgcaacttctttctattgaga

SEQ ID NO: 541120 - DNA, 33 bp, Homo sapien
acactgaggtcatgcatcttctttctattgaga

SEQ ID NO: 541121 - DNA, 33 bp, Homo sapien
aatccccagagcaggaagtaagaatgaaagata

SEQ ID NO: 541122 - DNA, 33 bp, Homo sapien
aatccccagagcaggaggtaagaatgaaagata

SEQ ID NO: 541123 - DNA, 33 bp, Homo sapien
taataattctgtgactcaaaaagaagttaggaa

SEQ ID NO: 541124 - DNA, 33 bp, Homo sapien
taataattctgtgactgaaaaagaagttaggaa

SEQ ID NO: 541125 - DNA, 33 bp, Homo sapien
gctggaatttgagccacgaatccttgaaactaa

SEQ ID NO: 541126 - DNA, 33 bp, Homo sapien
gctggaatttgagccaggaatccttgaaactaa

SEQ ID NO: 541127 - DNA, 33 bp, Homo sapien
tgctctggaaaaggtacgttactatcaatgaaa

SEQ ID NO: 541128 - DNA, 33 bp, Homo sapien
tgctctggaaaaggtatgttactatcaatgaaa

SEQ ID NO: 541129 - DNA, 33 bp, Homo sapien
gtacaaaacaaaaatacattagtgctgcctaaa

SEQ ID NO: 541130 - DNA, 33 bp, Homo sapien
gtacaaaacaaaaatagattagtgctgcctaaa

SEQ ID NO: 541131 - DNA, 33 bp, Homo sapien
ctttttcctgtttataaatctgtcctcttaaac

SEQ ID NO: 541132 - DNA, 33 bp, Homo sapien
ctttttcctgtttatacatctgtcctcttaaac

SEQ ID NO: 541133 - DNA, 33 bp, Homo sapien
ctcgcagaaatttataacaatactgaatgcaaa

SEQ ID NO: 541134 - DNA, 33 bp, Homo sapien
ctcgcagaaatttatagcaatactgaatgcaaa

SEQ ID NO: 541135 - DNA, 33 bp, Homo sapien
agagacagggatgttacgaagagacagtgagag

SEQ ID NO: 541136 - DNA, 33 bp, Homo sapien
agagacagggatgttatgaagagacagtgagag

SEQ ID NO: 541137 - DNA, 33 bp, Homo sapien
aacaaagtatggaatacatacaggaggaggccc

SEQ ID NO: 541138 - DNA, 33 bp, Homo sapien
aacaaagtatggaatatatacaggaggaggccc

SEQ ID NO: 541139 - DNA, 33 bp, Homo sapien
tggataaaaactgtgacgcctaatgagataaag

SEQ ID NO: 541140 - DNA, 33 bp, Homo sapien
tggataaaaactgtgatgcctaatgagataaag

SEQ ID NO: 541141 - DNA, 33 bp, Homo sapien
aggaaacaggcacatacattgagtttaaggcaa

SEQ ID NO: 541142 - DNA, 33 bp, Homo sapien
aggaaacaggcacatatattgagtttaaggcaa

SEQ ID NO: 541143 - DNA, 33 bp, Homo sapien
atagtcacagtgcctacgtttcagaaatatcac

SEQ ID NO: 541144 - DNA, 33 bp, Homo sapien
atagtcacagtgcctatgtttcagaaatatcac

SEQ ID NO: 541145 - DNA, 33 bp, Homo sapien
tccactttggtttaaacggtctctctgtattct

SEQ ID NO: 541146 - DNA, 33 bp, Homo sapien
tccactttggtttaaatggtctctctgtattct

SEQ ID NO: 541147 - DNA, 33 bp, Homo sapien
tgttaccgcaatgggagacccacagcatacccc

SEQ ID NO: 541148 - DNA, 33 bp, Homo sapien
tgttaccgcaatgggatacccacagcatacccc

SEQ ID NO: 541149 - DNA, 33 bp, Homo sapien
caggaagaagattcacacagcattggtttaatt

SEQ ID NO: 541150 - DNA, 33 bp, Homo sapien
caggaagaagattcacgcagcattggtttaatt

SEQ ID NO: 541151 - DNA, 33 bp, Homo sapien
cagactactaaaacaaatgatgaggataatagc

SEQ ID NO: 541152 - DNA, 33 bp, Homo sapien
cagactactaaaacaagtgatgaggataatagc

SEQ ID NO: 541153 - DNA, 33 bp, Homo sapien
ttgccattctcaaacaatgactcaatcttcact

SEQ ID NO: 541154 - DNA, 33 bp, Homo sapien
ttgccattctcaaacagtgactcaatcttcact

SEQ ID NO: 541155 - DNA, 33 bp, Homo sapien
tatctggcttgttacagaaaaagtttgtcaaac

SEQ ID NO: 541156 - DNA, 33 bp, Homo sapien
tatctggcttgttacataaaaagtttgtcaaac

SEQ ID NO: 541157 - DNA, 33 bp, Homo sapien
gtctgtgcagtacaataaactaaagcacggtag

SEQ ID NO: 541158 - DNA, 33 bp, Homo sapien
gtctgtgcagtacaatcaactaaagcacggtag

SEQ ID NO: 541159 - DNA, 33 bp, Homo sapien
ttattcacagtaaataccttcagtgactctacc

SEQ ID NO: 541160 - DNA, 33 bp, Homo sapien
ttattcacagtaaatagcttcagtgactctacc

SEQ ID NO: 541161 - DNA, 33 bp, Homo sapien
tcatgcagtctatgtacggaggttagattgagg

SEQ ID NO: 541162 - DNA, 33 bp, Homo sapien
tcatgcagtctatgtatggaggttagattgagg

SEQ ID NO: 541163 - DNA, 33 bp, Homo sapien
atcaagagacttatcaaccaagtggaataattt

SEQ ID NO: 541164 - DNA, 33 bp, Homo sapien
atcaagagacttatcatccaagtggaataattt

SEQ ID NO: 541165 - DNA, 33 bp, Homo sapien
ctattgcatatttaacgcaccttataaattata

SEQ ID NO: 541166 - DNA, 33 bp, Homo sapien
ctattgcatatttaactcaccttataaattata

SEQ ID NO: 541167 - DNA, 33 bp, Homo sapien
atatttccaggtatgacgctaacaatctgtgac

SEQ ID NO: 541168 - DNA, 33 bp, Homo sapien
atatttccaggtatgatgctaacaatctgtgac

SEQ ID NO: 541169 - DNA, 33 bp, Homo sapien
atgaatatggtatttacgtgtgggaagaatgtt

SEQ ID NO: 541170 - DNA, 33 bp, Homo sapien
atgaatatggtatttatgtgtgggaagaatgtt

SEQ ID NO: 541171 - DNA, 33 bp, Homo sapien
tcatttagtgaattaaagcagtctgtggttagc

SEQ ID NO: 541172 - DNA, 33 bp, Homo sapien
tcatttagtgaattaatgcagtctgtggttagc

SEQ ID NO: 541173 - DNA, 33 bp, Homo sapien
ttgctgtattcttcaacgttccccggaaataag

SEQ ID NO: 541174 - DNA, 33 bp, Homo sapien
ttgctgtattcttcaatgttccccggaaataag

SEQ ID NO: 541175 - DNA, 33 bp, Homo sapien
agaatgtattatgacaagtgagatagcatacta

SEQ ID NO: 541176 - DNA, 33 bp, Homo sapien
agaatgtattatgacaggtgagatagcatacta

SEQ ID NO: 541177 - DNA, 33 bp, Homo sapien
atttccagtttgtccaatcttaacataatatga

SEQ ID NO: 541178 - DNA, 33 bp, Homo sapien
atttccagtttgtccagtcttaacataatatga

SEQ ID NO: 541179 - DNA, 33 bp, Homo sapien
atctatgtccaattatcagagaagagcatctga

SEQ ID NO: 541180 - DNA, 33 bp, Homo sapien
atctatgtccaattatgagagaagagcatctga

SEQ ID NO: 541181 - DNA, 33 bp, Homo sapien
aaattcctaataaacccctgcattctcttctct

SEQ ID NO: 541182 - DNA, 33 bp, Homo sapien
aaattcctaataaacctctgcattctcttctct

SEQ ID NO: 541183 - DNA, 33 bp, Homo sapien
aacttacatctgtttgcaatatgttaaactggg

SEQ ID NO: 541184 - DNA, 33 bp, Homo sapien
aacttacatctgtttggaatatgttaaactggg

SEQ ID NO: 541185 - DNA, 33 bp, Homo sapien
caaaagcctttcttctcaaacttagaccagaat

SEQ ID NO: 541186 - DNA, 33 bp, Homo sapien
caaaagcctttcttctgaaacttagaccagaat

SEQ ID NO: 541187 - DNA, 33 bp, Homo sapien
taaattccaggacataaaccaagactttagttg

SEQ ID NO: 541188 - DNA, 33 bp, Homo sapien
taaattccaggacatataccaagactttagttg

SEQ ID NO: 541189 - DNA, 33 bp, Homo sapien
cttgtaggtagcaggaaaatttagaccaagatc

SEQ ID NO: 541190 - DNA, 33 bp, Homo sapien
cttgtaggtagcaggagaatttagaccaagatc

SEQ ID NO: 541191 - DNA, 33 bp, Homo sapien
ttattcttttgcagaacggcgcttcaaaataca

SEQ ID NO: 541192 - DNA, 33 bp, Homo sapien
ttattcttttgcagaatggcgcttcaaaataca

SEQ ID NO: 541193 - DNA, 33 bp, Homo sapien
tttttgggagacttgcaaacacaaggggtttga

SEQ ID NO: 541194 - DNA, 33 bp, Homo sapien
tttttgggagacttgcgaacacaaggggtttga

SEQ ID NO: 541195 - DNA, 33 bp, Homo sapien
tttgtaggcattcttgcagcccaatatagatac

SEQ ID NO: 541196 - DNA, 33 bp, Homo sapien
tttgtaggcattcttgtagcccaatatagatac

SEQ ID NO: 541197 - DNA, 33 bp, Homo sapien
gtttagtcttgagttacagggtatccaaggttt

SEQ ID NO: 541198 - DNA, 33 bp, Homo sapien
gtttagtcttgagttatagggtatccaaggttt

SEQ ID NO: 541199 - DNA, 33 bp, Homo sapien
gacaatctggaacaaaatgatttgaggaacgtg

SEQ ID NO: 541200 - DNA, 33 bp, Homo sapien
gacaatctggaacaaagtgatttgaggaacgtg

SEQ ID NO: 541201 - DNA, 33 bp, Homo sapien
cttagtgttgtaatcacacagaccttactacac

SEQ ID NO: 541202 - DNA, 33 bp, Homo sapien
cttagtgttgtaatcatacagaccttactacac

SEQ ID NO: 541203 - DNA, 33 bp, Homo sapien
aacagtagtctagaaacggcatagctgttgcca

SEQ ID NO: 541204 - DNA, 33 bp, Homo sapien
aacagtagtctagaaatggcatagctgttgcca

SEQ ID NO: 541205 - DNA, 33 bp, Homo sapien
aatctgtacttgcacaactgcataactgctgat

SEQ ID NO: 541206 - DNA, 33 bp, Homo sapien
aatctgtacttgcacagctgcataactgctgat

SEQ ID NO: 541207 - DNA, 33 bp, Homo sapien
agataatttgaggagacaatggaactattcttc

SEQ ID NO: 541208 - DNA, 33 bp, Homo sapien
agataatttgaggagataatggaactattcttc

SEQ ID NO: 541209 - DNA, 33 bp, Homo sapien
cagtaaatctcctagccctgtggatactagtca

SEQ ID NO: 541210 - DNA, 33 bp, Homo sapien
cagtaaatctcctagctctgtggatactagtca

SEQ ID NO: 541211 - DNA, 33 bp, Homo sapien
gcacatactcaagtgacattagtgaggaaaaaa

SEQ ID NO: 541212 - DNA, 33 bp, Homo sapien
gcacatactcaagtgatattagtgaggaaaaaa

SEQ ID NO: 541213 - DNA, 33 bp, Homo sapien
ctcactaatatccatgaaaacaacaagtttgtc

SEQ ID NO: 541214 - DNA, 33 bp, Homo sapien
ctcactaatatccatggaaacaacaagtttgtc

SEQ ID NO: 541215 - DNA, 33 bp, Homo sapien
ttgttgctaagttacaggaatgttcccaatcct

SEQ ID NO: 541216 - DNA, 33 bp, Homo sapien
ttgttgctaagttacatgaatgttcccaatcct

SEQ ID NO: 541217 - DNA, 33 bp, Homo sapien
tcaaagagggaaccagactaagctccttctaag

SEQ ID NO: 541218 - DNA, 33 bp, Homo sapien
tcaaagagggaaccagtctaagctccttctaag

SEQ ID NO: 541219 - DNA, 33 bp, Homo sapien
taattaagtatgggctaaactcgcaacactata

SEQ ID NO: 541220 - DNA, 33 bp, Homo sapien
taattaagtatgggctgaactcgcaacactata

SEQ ID NO: 541221 - DNA, 33 bp, Homo sapien
tgataactgactaatacggctacccagttccaa

SEQ ID NO: 541222 - DNA, 33 bp, Homo sapien
tgataactgactaatatggctacccagttccaa

SEQ ID NO: 541223 - DNA, 33 bp, Homo sapien
gcatacatgatattaaatagccattctttcttc

SEQ ID NO: 541224 - DNA, 33 bp, Homo sapien
gcatacatgatattaagtagccattctttcttc

SEQ ID NO: 541225 - DNA, 33 bp, Homo sapien
taacattgctcctccacaaaggcattgaccaca

SEQ ID NO: 541226 - DNA, 33 bp, Homo sapien
taacattgctcctccagaaaggcattgaccaca

SEQ ID NO: 541227 - DNA, 33 bp, Homo sapien
ttaatgaaaaatagaacagcactgaataaagct

SEQ ID NO: 541228 - DNA, 33 bp, Homo sapien
ttaatgaaaaatagaatagcactgaataaagct

SEQ ID NO: 541229 - DNA, 33 bp, Homo sapien
tacttgttaatgaaacactgccaaaacaggaga

SEQ ID NO: 541230 - DNA, 33 bp, Homo sapien
tacttgttaatgaaacgctgccaaaacaggaga

SEQ ID NO: 541231 - DNA, 33 bp, Homo sapien
cttttatggaacggtccaatgattccactttgg

SEQ ID NO: 541232 - DNA, 33 bp, Homo sapien
cttttatggaacggtctaatgattccactttgg

SEQ ID NO: 541233 - DNA, 33 bp, Homo sapien
cattcagagtcagttaataaaagtagggccagg

SEQ ID NO: 541234 - DNA, 33 bp, Homo sapien
cattcagagtcagttagtaaaagtagggccagg

SEQ ID NO: 541235 - DNA, 33 bp, Homo sapien
tagctatttggcgttgcatttaaaacagtttcc

SEQ ID NO: 541236 - DNA, 33 bp, Homo sapien
tagctatttggcgttgtatttaaaacagtttcc

SEQ ID NO: 541237 - DNA, 33 bp, Homo sapien
atgaattttgttataacggagctgatagagcat

SEQ ID NO: 541238 - DNA, 33 bp, Homo sapien
atgaattttgttataatggagctgatagagcat

SEQ ID NO: 541239 - DNA, 33 bp, Homo sapien
tgagcacttactatgaacttgccagagccacca

SEQ ID NO: 541240 - DNA, 33 bp, Homo sapien
tgagcacttactatgagcttgccagagccacca

SEQ ID NO: 541241 - DNA, 33 bp, Homo sapien
ctgctgaaaaatatgacgtgaaattagtggtat

SEQ ID NO: 541242 - DNA, 33 bp, Homo sapien
ctgctgaaaaatatgatgtgaaattagtggtat

SEQ ID NO: 541243 - DNA, 33 bp, Homo sapien
gatatggcagatacataaatggagacagaaatg

SEQ ID NO: 541244 - DNA, 33 bp, Homo sapien
gatatggcagatacatcaatggagacagaaatg

SEQ ID NO: 541245 - DNA, 33 bp, Homo sapien
tgtgtgtctggagacaggagaacggtttggtct

SEQ ID NO: 541246 - DNA, 33 bp, Homo sapien
tgtgtgtctggagacatgagaacggtttggtct

SEQ ID NO: 541247 - DNA, 33 bp, Homo sapien
gacaattgataccaaaaatcttaaaactatcca

SEQ ID NO: 541248 - DNA, 33 bp, Homo sapien
gacaattgataccaaatatcttaaaactatcca

SEQ ID NO: 541249 - DNA, 33 bp, Homo sapien
ataactgtggtaaatcaaatcattagccacaac

SEQ ID NO: 541250 - DNA, 33 bp, Homo sapien
ataactgtggtaaatcgaatcattagccacaac

SEQ ID NO: 541251 - DNA, 33 bp, Homo sapien
ctttgcttaacaccaagtatgcagaatgggaac

SEQ ID NO: 541252 - DNA, 33 bp, Homo sapien
ctttgcttaacaccaattatgcagaatgggaac

SEQ ID NO: 541253 - DNA, 33 bp, Homo sapien
aacacatgcaggtacaaggttttcagttaagtt

SEQ ID NO: 541254 - DNA, 33 bp, Homo sapien
aacacatgcaggtacacggttttcagttaagtt

SEQ ID NO: 541255 - DNA, 33 bp, Homo sapien
attcaattcagtgcataaaactattttaatatc

SEQ ID NO: 541256 - DNA, 33 bp, Homo sapien
attcaattcagtgcatcaaactattttaatatc

SEQ ID NO: 541257 - DNA, 33 bp, Homo sapien
agtggttttatgtagacagtccttgtggctaac

SEQ ID NO: 541258 - DNA, 33 bp, Homo sapien
agtggttttatgtagagagtccttgtggctaac

SEQ ID NO: 541259 - DNA, 33 bp, Homo sapien
ttttaaaccacaattaaatattccttgcatagt

SEQ ID NO: 541260 - DNA, 33 bp, Homo sapien
ttttaaaccacaattagatattccttgcatagt

SEQ ID NO: 541261 - DNA, 33 bp, Homo sapien
accttatgatctgaaactgtgttcttattttca

SEQ ID NO: 541262 - DNA, 33 bp, Homo sapien
accttatgatctgaaagtgtgttcttattttca

SEQ ID NO: 541263 - DNA, 33 bp, Homo sapien
cactgacatttttggacatacccacataagcag

SEQ ID NO: 541264 - DNA, 33 bp, Homo sapien
cactgacatttttggatatacccacataagcag

SEQ ID NO: 541265 - DNA, 33 bp, Homo sapien
ttgtcttcacccaataggaaagctgacttttta

SEQ ID NO: 541266 - DNA, 33 bp, Homo sapien
ttgtcttcacccaatatgaaagctgacttttta

SEQ ID NO: 541267 - DNA, 33 bp, Homo sapien
ggctatttgtttaaaacttgaatgttgtgcaaa

SEQ ID NO: 541268 - DNA, 33 bp, Homo sapien
ggctatttgtttaaaagttgaatgttgtgcaaa

SEQ ID NO: 541269 - DNA, 33 bp, Homo sapien
gtcactctgacaaaaaatagataagattgaaca

SEQ ID NO: 541270 - DNA, 33 bp, Homo sapien
gtcactctgacaaaaagtagataagattgaaca

SEQ ID NO: 541271 - DNA, 33 bp, Homo sapien
tagttattgactgctaagcagaaacaagcattc

SEQ ID NO: 541272 - DNA, 33 bp, Homo sapien
tagttattgactgctaggcagaaacaagcattc

SEQ ID NO: 541273 - DNA, 33 bp, Homo sapien
tcattgctttttctcactatgtgcatcagccaa

SEQ ID NO: 541274 - DNA, 33 bp, Homo sapien
tcattgctttttctcattatgtgcatcagccaa

SEQ ID NO: 541275 - DNA, 33 bp, Homo sapien
atagctaacagagaaacgctagccaaggatttt

SEQ ID NO: 541276 - DNA, 33 bp, Homo sapien
atagctaacagagaaatgctagccaaggatttt

SEQ ID NO: 541277 - DNA, 33 bp, Homo sapien
caatatgttcacacacaaagtcttgggttatct

SEQ ID NO: 541278 - DNA, 33 bp, Homo sapien
caatatgttcacacacgaagtcttgggttatct

SEQ ID NO: 541279 - DNA, 33 bp, Homo sapien
acacattcatttcatccactgagttgtttgttt

SEQ ID NO: 541280 - DNA, 33 bp, Homo sapien
acacattcatttcatctactgagttgtttgttt

SEQ ID NO: 541281 - DNA, 33 bp, Homo sapien
tattaataaccaacaaccaaagaaatgcagata

SEQ ID NO: 541282 - DNA, 33 bp, Homo sapien
tattaataaccaacaatcaaagaaatgcagata

SEQ ID NO: 541283 - DNA, 33 bp, Homo sapien
gacatccatttgaaaacagcctgtatcagagca

SEQ ID NO: 541284 - DNA, 33 bp, Homo sapien
gacatccatttgaaaagagcctgtatcagagca

SEQ ID NO: 541285 - DNA, 33 bp, Homo sapien
tgcaactccttagacacggtgtgtaggtataga

SEQ ID NO: 541286 - DNA, 33 bp, Homo sapien
tgcaactccttagacatggtgtgtaggtataga

SEQ ID NO: 541287 - DNA, 33 bp, Homo sapien
tcagtacagtttgtgacctcaaattctggatat

SEQ ID NO: 541288 - DNA, 33 bp, Homo sapien
tcagtacagtttgtgatctcaaattctggatat

SEQ ID NO: 541289 - DNA, 33 bp, Homo sapien
atcggatattattaaacccttgaatgcttcaaa

SEQ ID NO: 541290 - DNA, 33 bp, Homo sapien
atcggatattattaaagccttgaatgcttcaaa

SEQ ID NO: 541291 - DNA, 33 bp, Homo sapien
tactgctaaaagctagaatgtgaacttaggcag

SEQ ID NO: 541292 - DNA, 33 bp, Homo sapien
tactgctaaaagctaggatgtgaacttaggcag

SEQ ID NO: 541293 - DNA, 33 bp, Homo sapien
agtacactaacataccagcctaatttttgtatc

SEQ ID NO: 541294 - DNA, 33 bp, Homo sapien
agtacactaacatacctgcctaatttttgtatc

SEQ ID NO: 541295 - DNA, 33 bp, Homo sapien
gtttggctgtttgctacggaaattatagagagg

SEQ ID NO: 541296 - DNA, 33 bp, Homo sapien
gtttggctgtttgctagggaaattatagagagg

SEQ ID NO: 541297 - DNA, 33 bp, Homo sapien
ctcttcaggtgagacaaaaagaaaattgtggac

SEQ ID NO: 541298 - DNA, 33 bp, Homo sapien
ctcttcaggtgagacagaaagaaaattgtggac

SEQ ID NO: 541299 - DNA, 33 bp, Homo sapien
tatctgtctatcacaaacaggttctcagtctgt

SEQ ID NO: 541300 - DNA, 33 bp, Homo sapien
tatctgtctatcacaagcaggttctcagtctgt

SEQ ID NO: 541301 - DNA, 33 bp, Homo sapien
tgataggtacaactcacgtctagaagatatgca

SEQ ID NO: 541302 - DNA, 33 bp, Homo sapien
tgataggtacaactcatgtctagaagatatgca

SEQ ID NO: 541303 - DNA, 33 bp, Homo sapien
aagaatttacctgagaaagcaacagcaaaaaca

SEQ ID NO: 541304 - DNA, 33 bp, Homo sapien
aagaatttacctgagagagcaacagcaaaaaca

SEQ ID NO: 541305 - DNA, 33 bp, Homo sapien
aacaaggaggcacttaacactgtcttgggcaat

SEQ ID NO: 541306 - DNA, 33 bp, Homo sapien
aacaaggaggcacttagcactgtcttgggcaat

SEQ ID NO: 541307 - DNA, 33 bp, Homo sapien
cactgtaatggagagacctgaagtgagtttact

SEQ ID NO: 541308 - DNA, 33 bp, Homo sapien
cactgtaatggagagagctgaagtgagtttact

SEQ ID NO: 541309 - DNA, 33 bp, Homo sapien
ttatctacaaaaatgcaaacataaaaaatttag

SEQ ID NO: 541310 - DNA, 33 bp, Homo sapien
ttatctacaaaaatgcgaacataaaaaatttag

SEQ ID NO: 541311 - DNA, 33 bp, Homo sapien
atgtgacatattcaaccacataaaaaggaaaag

SEQ ID NO: 541312 - DNA, 33 bp, Homo sapien
atgtgacatattcaacgacataaaaaggaaaag

SEQ ID NO: 541313 - DNA, 33 bp, Homo sapien
atgcccaccagtgcaccatgtaagtttaccatt

SEQ ID NO: 541314 - DNA, 33 bp, Homo sapien
atgcccaccagtgcacgatgtaagtttaccatt

SEQ ID NO: 541315 - DNA, 33 bp, Homo sapien
tacacagatatcaagccctttataatctagaca

SEQ ID NO: 541316 - DNA, 33 bp, Homo sapien
tacacagatatcaagcgctttataatctagaca

SEQ ID NO: 541317 - DNA, 33 bp, Homo sapien
aaattgtgtgcagaaaagactcaaggaaagaca

SEQ ID NO: 541318 - DNA, 33 bp, Homo sapien
aaattgtgtgcagaaaggactcaaggaaagaca

SEQ ID NO: 541319 - DNA, 33 bp, Homo sapien
catcttcagaggcaaacggtggatcatgagaat

SEQ ID NO: 541320 - DNA, 33 bp, Homo sapien
catcttcagaggcaaatggtggatcatgagaat

SEQ ID NO: 541321 - DNA, 33 bp, Homo sapien
atatttaacttgctcacagatgtagtaaatggt

SEQ ID NO: 541322 - DNA, 33 bp, Homo sapien
atatttaacttgctcagagatgtagtaaatggt

SEQ ID NO: 541323 - DNA, 33 bp, Homo sapien
agcagtatggatatacagagatcaaattatgtc

SEQ ID NO: 541324 - DNA, 33 bp, Homo sapien
agcagtatggatatacggagatcaaattatgtc

SEQ ID NO: 541325 - DNA, 33 bp, Homo sapien
ttatggtgccttccaaattagtgtcattttcga

SEQ ID NO: 541326 - DNA, 33 bp, Homo sapien
ttatggtgccttccaatttagtgtcattttcga

SEQ ID NO: 541327 - DNA, 33 bp, Homo sapien
ggctggaacataaaataagactacacgagagac

SEQ ID NO: 541328 - DNA, 33 bp, Homo sapien
ggctggaacataaaatgagactacacgagagac

SEQ ID NO: 541329 - DNA, 33 bp, Homo sapien
tgggattgtgcaatccaatgttgtcaacctatt

SEQ ID NO: 541330 - DNA, 33 bp, Homo sapien
tgggattgtgcaatcctatgttgtcaacctatt

SEQ ID NO: 541331 - DNA, 33 bp, Homo sapien
cttttaatacaaacaacccatttccaattgcct

SEQ ID NO: 541332 - DNA, 33 bp, Homo sapien
cttttaatacaaacaagccatttccaattgcct

SEQ ID NO: 541333 - DNA, 33 bp, Homo sapien
gtaaaacaaagctatacagagctgacttctgaa

SEQ ID NO: 541334 - DNA, 33 bp, Homo sapien
gtaaaacaaagctatatagagctgacttctgaa

SEQ ID NO: 541335 - DNA, 33 bp, Homo sapien
agtcttgatcaaatacaaacaattttggcagca

SEQ ID NO: 541336 - DNA, 33 bp, Homo sapien
agtcttgatcaaatacgaacaattttggcagca

SEQ ID NO: 541337 - DNA, 33 bp, Homo sapien
cattaatgcaagatcacaacttaaaaccgtgtg

SEQ ID NO: 541338 - DNA, 33 bp, Homo sapien
cattaatgcaagatcataacttaaaaccgtgtg

SEQ ID NO: 541339 - DNA, 33 bp, Homo sapien
ggtttcatatttctgccgattaaaactctggtc

SEQ ID NO: 541340 - DNA, 33 bp, Homo sapien
ggtttcatatttctgctgattaaaactctggtc

SEQ ID NO: 541341 - DNA, 33 bp, Homo sapien
aggagctaatttgaaaccagtccggtgataaaa

SEQ ID NO: 541342 - DNA, 33 bp, Homo sapien
aggagctaatttgaaagcagtccggtgataaaa

SEQ ID NO: 541343 - DNA, 33 bp, Homo sapien
gttgggtaaacaagcactaaaaaagagatggtg

SEQ ID NO: 541344 - DNA, 33 bp, Homo sapien
gttgggtaaacaagcattaaaaaagagatggtg

SEQ ID NO: 541345 - DNA, 33 bp, Homo sapien
catatctgcaatcccaagtaaacaatgacattt

SEQ ID NO: 541346 - DNA, 33 bp, Homo sapien
catatctgcaatcccaggtaaacaatgacattt

SEQ ID NO: 541347 - DNA, 33 bp, Homo sapien
tccaaaccagttcttcaaaaatcaagtgtgtct

SEQ ID NO: 541348 - DNA, 33 bp, Homo sapien
tccaaaccagttcttcgaaaatcaagtgtgtct

SEQ ID NO: 541349 - DNA, 33 bp, Homo sapien
attaagtaactatccacgtgatctctgaagtcc

SEQ ID NO: 541350 - DNA, 33 bp, Homo sapien
attaagtaactatccatgtgatctctgaagtcc

SEQ ID NO: 541351 - DNA, 33 bp, Homo sapien
gtgataaaacaagaaactgctataggcctttag

SEQ ID NO: 541352 - DNA, 33 bp, Homo sapien
gtgataaaacaagaaattgctataggcctttag

SEQ ID NO: 541353 - DNA, 33 bp, Homo sapien
ttaaagtgctggagacaatgctgcctctgaagc

SEQ ID NO: 541354 - DNA, 33 bp, Homo sapien
ttaaagtgctggagaccatgctgcctctgaagc

SEQ ID NO: 541355 - DNA, 33 bp, Homo sapien
agctaaaatgcttaacaaagagattagaacata

SEQ ID NO: 541356 - DNA, 33 bp, Homo sapien
agctaaaatgcttaaccaagagattagaacata

SEQ ID NO: 541357 - DNA, 33 bp, Homo sapien
attgcaatttaccccaacattttattgtgaaac

SEQ ID NO: 541358 - DNA, 33 bp, Homo sapien
attgcaatttaccccagcattttattgtgaaac

SEQ ID NO: 541359 - DNA, 33 bp, Homo sapien
ataagcatcattgaagaaaagagatgtcatgca

SEQ ID NO: 541360 - DNA, 33 bp, Homo sapien
ataagcatcattgaaggaaagagatgtcatgca

SEQ ID NO: 541361 - DNA, 33 bp, Homo sapien
aaagaagtaagccctgcagctagggaagagtac

SEQ ID NO: 541362 - DNA, 33 bp, Homo sapien
aaagaagtaagccctggagctagggaagagtac

SEQ ID NO: 541363 - DNA, 33 bp, Homo sapien
ttattaggtctccttaagttaaaacgatgtttt

SEQ ID NO: 541364 - DNA, 33 bp, Homo sapien
ttattaggtctccttatgttaaaacgatgtttt

SEQ ID NO: 541365 - DNA, 33 bp, Homo sapien
agctctttgatatgtcactctcaagaaagagcc

SEQ ID NO: 541366 - DNA, 33 bp, Homo sapien
agctctttgatatgtcgctctcaagaaagagcc

SEQ ID NO: 541367 - DNA, 33 bp, Homo sapien
cattatttgatttgtcaaaagttagtcaaacat

SEQ ID NO: 541368 - DNA, 33 bp, Homo sapien
cattatttgatttgtccaaagttagtcaaacat

SEQ ID NO: 541369 - DNA, 33 bp, Homo sapien
tgcgattgtaaccaacactaaaacattttacaa

SEQ ID NO: 541370 - DNA, 33 bp, Homo sapien
tgcgattgtaaccaacgctaaaacattttacaa

SEQ ID NO: 541371 - DNA, 33 bp, Homo sapien
gttctgagatacaagccgatttaagttttatcc

SEQ ID NO: 541372 - DNA, 33 bp, Homo sapien
gttctgagatacaagctgatttaagttttatcc

SEQ ID NO: 541373 - DNA, 33 bp, Homo sapien
ctgtgctgcaaaagacccagctttcaaggttgc

SEQ ID NO: 541374 - DNA, 33 bp, Homo sapien
ctgtgctgcaaaagactcagctttcaaggttgc

SEQ ID NO: 541375 - DNA, 33 bp, Homo sapien
ctacttgtgagagagacccaaagtctaaacagc

SEQ ID NO: 541376 - DNA, 33 bp, Homo sapien
ctacttgtgagagagatccaaagtctaaacagc

SEQ ID NO: 541377 - DNA, 33 bp, Homo sapien
actcatttctaagacaatagtttaccactaaac

SEQ ID NO: 541378 - DNA, 33 bp, Homo sapien
actcatttctaagacagtagtttaccactaaac

SEQ ID NO: 541379 - DNA, 33 bp, Homo sapien
ctaaaagatattggaaggaatggctaagccctc

SEQ ID NO: 541380 - DNA, 33 bp, Homo sapien
ctaaaagatattggaatgaatggctaagccctc

SEQ ID NO: 541381 - DNA, 33 bp, Homo sapien
tatggagttactatatcaggcaagttggggcct

SEQ ID NO: 541382 - DNA, 33 bp, Homo sapien
tatggagttactatattaggcaagttggggcct

SEQ ID NO: 541383 - DNA, 33 bp, Homo sapien
ttctctgaattttgataagccactcccattgcc

SEQ ID NO: 541384 - DNA, 33 bp, Homo sapien
ttctctgaattttgatgagccactcccattgcc

SEQ ID NO: 541385 - DNA, 33 bp, Homo sapien
tcttgttaaatgccttcaaagaaacctctgttt

SEQ ID NO: 541386 - DNA, 33 bp, Homo sapien
tcttgttaaatgccttgaaagaaacctctgttt

SEQ ID NO: 541387 - DNA, 33 bp, Homo sapien
ttctggttcagttcaaacacttattaattaatg

SEQ ID NO: 541388 - DNA, 33 bp, Homo sapien
ttctggttcagttcaagcacttattaattaatg

SEQ ID NO: 541389 - DNA, 33 bp, Homo sapien
aaataactaaaagatacggtcgcaaatattgaa

SEQ ID NO: 541390 - DNA, 33 bp, Homo sapien
aaataactaaaagatatggtcgcaaatattgaa

SEQ ID NO: 541391 - DNA, 33 bp, Homo sapien
caatgagaggtgaaaaggtagcttaatattaag

SEQ ID NO: 541392 - DNA, 33 bp, Homo sapien
caatgagaggtgaaaatgtagcttaatattaag

SEQ ID NO: 541393 - DNA, 33 bp, Homo sapien
ttacctcctctacctccaaatgttggagttccc

SEQ ID NO: 541394 - DNA, 33 bp, Homo sapien
ttacctcctctacctctaaatgttggagttccc

SEQ ID NO: 541395 - DNA, 33 bp, Homo sapien
gtttacattgagaaaaatcgtcagttatatatt

SEQ ID NO: 541396 - DNA, 33 bp, Homo sapien
gtttacattgagaaaagtcgtcagttatatatt

SEQ ID NO: 541397 - DNA, 33 bp, Homo sapien
tatgtgcacctacccaatgatttgaaagagtta

SEQ ID NO: 541398 - DNA, 33 bp, Homo sapien
tatgtgcacctacccagtgatttgaaagagtta

SEQ ID NO: 541399 - DNA, 33 bp, Homo sapien
tggagttcaaaatgaaaattgcttttgcagcag

SEQ ID NO: 541400 - DNA, 33 bp, Homo sapien
tggagttcaaaatgaacattgcttttgcagcag

SEQ ID NO: 541401 - DNA, 33 bp, Homo sapien
atactgttgaccataaactctgtgcacatttgc

SEQ ID NO: 541402 - DNA, 33 bp, Homo sapien
atactgttgaccataatctctgtgcacatttgc

SEQ ID NO: 541403 - DNA, 33 bp, Homo sapien
agtatagtatgtgataagtgacttagcgattat

SEQ ID NO: 541404 - DNA, 33 bp, Homo sapien
agtatagtatgtgatacgtgacttagcgattat

SEQ ID NO: 541405 - DNA, 33 bp, Homo sapien
acgaacatataccatgaagtaggcattatgcca

SEQ ID NO: 541406 - DNA, 33 bp, Homo sapien
acgaacatataccatgcagtaggcattatgcca

SEQ ID NO: 541407 - DNA, 33 bp, Homo sapien
tagctgacaaaaattacgaatgaagacctaaga

SEQ ID NO: 541408 - DNA, 33 bp, Homo sapien
tagctgacaaaaattatgaatgaagacctaaga

SEQ ID NO: 541409 - DNA, 33 bp, Homo sapien
ctccagagagagtcaacgaagtatttttctata

SEQ ID NO: 541410 - DNA, 33 bp, Homo sapien
ctccagagagagtcaatgaagtatttttctata

SEQ ID NO: 541411 - DNA, 33 bp, Homo sapien
ttgcatttactgttacgataccattatagaaat

SEQ ID NO: 541412 - DNA, 33 bp, Homo sapien
ttgcatttactgttactataccattatagaaat

SEQ ID NO: 541413 - DNA, 33 bp, Homo sapien
ttttgcaaaggataaacctgaatgaaagacaca

SEQ ID NO: 541414 - DNA, 33 bp, Homo sapien
ttttgcaaaggataaatctgaatgaaagacaca

SEQ ID NO: 541415 - DNA, 33 bp, Homo sapien
tagtagccagtgatcaaataatgttttgtttga

SEQ ID NO: 541416 - DNA, 33 bp, Homo sapien
tagtagccagtgatcatataatgttttgtttga

SEQ ID NO: 541417 - DNA, 33 bp, Homo sapien
ctacctctcatgtctaagatactaccatcttta

SEQ ID NO: 541418 - DNA, 33 bp, Homo sapien
ctacctctcatgtctaggatactaccatcttta

SEQ ID NO: 541419 - DNA, 33 bp, Homo sapien
acagctcataatgacaccaattacttttgccat

SEQ ID NO: 541420 - DNA, 33 bp, Homo sapien
acagctcataatgacatcaattacttttgccat

SEQ ID NO: 541421 - DNA, 33 bp, Homo sapien
tgtttggttggctatcactgctcattagtgctt

SEQ ID NO: 541422 - DNA, 33 bp, Homo sapien
tgtttggttggctatcgctgctcattagtgctt

SEQ ID NO: 541423 - DNA, 33 bp, Homo sapien
agtattatgcacaaaacaaactgaattgaaaga

SEQ ID NO: 541424 - DNA, 33 bp, Homo sapien
agtattatgcacaaaagaaactgaattgaaaga

SEQ ID NO: 541425 - DNA, 33 bp, Homo sapien
ttgggcgaactaattcgctgatgtaatgacttt

SEQ ID NO: 541426 - DNA, 33 bp, Homo sapien
ttgggcgaactaattctctgatgtaatgacttt

SEQ ID NO: 541427 - DNA, 33 bp, Homo sapien
atcaaagttaaggacagtctcacaagaaaaatt

SEQ ID NO: 541428 - DNA, 33 bp, Homo sapien
atcaaagttaaggacattctcacaagaaaaatt

SEQ ID NO: 541429 - DNA, 33 bp, Homo sapien
taacttttgtaacaggacctaatattgtcagta

SEQ ID NO: 541430 - DNA, 33 bp, Homo sapien
taacttttgtaacaggtcctaatattgtcagta

SEQ ID NO: 541431 - DNA, 33 bp, Homo sapien
atggtactggcttgataaagaacacatattttt

SEQ ID NO: 541432 - DNA, 33 bp, Homo sapien
atggtactggcttgatgaagaacacatattttt

SEQ ID NO: 541433 - DNA, 33 bp, Homo sapien
tagtgaaataaattgcgctaattgccagaaaac

SEQ ID NO: 541434 - DNA, 33 bp, Homo sapien
tagtgaaataaattgctctaattgccagaaaac

SEQ ID NO: 541435 - DNA, 33 bp, Homo sapien
gtaggtagcaatgagacgtttcatagagaaaat

SEQ ID NO: 541436 - DNA, 33 bp, Homo sapien
gtaggtagcaatgagatgtttcatagagaaaat

SEQ ID NO: 541437 - DNA, 33 bp, Homo sapien
caaatatcatcaccttaaacactgttaattata

SEQ ID NO: 541438 - DNA, 33 bp, Homo sapien
caaatatcatcaccttgaacactgttaattata

SEQ ID NO: 541439 - DNA, 33 bp, Homo sapien
taaagacacataaactcaactcctggtgaataa

SEQ ID NO: 541440 - DNA, 33 bp, Homo sapien
taaagacacataaacttaactcctggtgaataa

SEQ ID NO: 541441 - DNA, 33 bp, Homo sapien
tactagccaaacagtgaaaaatatagttaaatc

SEQ ID NO: 541442 - DNA, 33 bp, Homo sapien
tactagccaaacagtggaaaatatagttaaatc

SEQ ID NO: 541443 - DNA, 33 bp, Homo sapien
ttatgtgattactaaacgtcttctagaatatct

SEQ ID NO: 541444 - DNA, 33 bp, Homo sapien
ttatgtgattactaaatgtcttctagaatatct

SEQ ID NO: 541445 - DNA, 33 bp, Homo sapien
gtccaaatgtttgtaccgaatgcttccataata

SEQ ID NO: 541446 - DNA, 33 bp, Homo sapien
gtccaaatgtttgtactgaatgcttccataata

SEQ ID NO: 541447 - DNA, 33 bp, Homo sapien
gtacatggctccaaaaaataaataaccgatatt

SEQ ID NO: 541448 - DNA, 33 bp, Homo sapien
gtacatggctccaaaagataaataaccgatatt

SEQ ID NO: 541449 - DNA, 33 bp, Homo sapien
acattctattattcaccgatccactaaacagat

SEQ ID NO: 541450 - DNA, 33 bp, Homo sapien
acattctattattcactgatccactaaacagat

SEQ ID NO: 541451 - DNA, 33 bp, Homo sapien
tttaaaatctacaaatcacgttttatggactac

SEQ ID NO: 541452 - DNA, 33 bp, Homo sapien
tttaaaatctacaaattacgttttatggactac

SEQ ID NO: 541453 - DNA, 33 bp, Homo sapien
actgatattctgatacacttcaagaaatttatg

SEQ ID NO: 541454 - DNA, 33 bp, Homo sapien
actgatattctgatacgcttcaagaaatttatg

SEQ ID NO: 541455 - DNA, 33 bp, Homo sapien
ttgtaagaaatagcaacgtcaggctccagccct

SEQ ID NO: 541456 - DNA, 33 bp, Homo sapien
ttgtaagaaatagcaatgtcaggctccagccct

SEQ ID NO: 541457 - DNA, 33 bp, Homo sapien
cttagcaacatgattaactcagtataatacata

SEQ ID NO: 541458 - DNA, 33 bp, Homo sapien
cttagcaacatgattatctcagtataatacata

SEQ ID NO: 541459 - DNA, 33 bp, Homo sapien
ctatatattaaatacaaatactcgtgttaggct

SEQ ID NO: 541460 - DNA, 33 bp, Homo sapien
ctatatattaaatacagatactcgtgttaggct

SEQ ID NO: 541461 - DNA, 33 bp, Homo sapien
aacaggctttcactgaaaaactgctgagatttg

SEQ ID NO: 541462 - DNA, 33 bp, Homo sapien
aacaggctttcactgagaaactgctgagatttg

SEQ ID NO: 541463 - DNA, 33 bp, Homo sapien
attagtctaaaaatggcagatgagaggactgga

SEQ ID NO: 541464 - DNA, 33 bp, Homo sapien
attagtctaaaaatggtagatgagaggactgga

SEQ ID NO: 541465 - DNA, 33 bp, Homo sapien
ttcatgccctaattgacgaagaccaatgattga

SEQ ID NO: 541466 - DNA, 33 bp, Homo sapien
ttcatgccctaattgatgaagaccaatgattga

SEQ ID NO: 541467 - DNA, 33 bp, Homo sapien
ccttttttatcattgaggtatgttttacagacc

SEQ ID NO: 541468 - DNA, 33 bp, Homo sapien
ccttttttatcattgatgtatgttttacagacc

SEQ ID NO: 541469 - DNA, 33 bp, Homo sapien
ttttgaaccattaatcaattgactcacaaatac

SEQ ID NO: 541470 - DNA, 33 bp, Homo sapien
ttttgaaccattaatctattgactcacaaatac

SEQ ID NO: 541471 - DNA, 33 bp, Homo sapien
aagaatgtagtagccaagtgatatagctgatat

SEQ ID NO: 541472 - DNA, 33 bp, Homo sapien
aagaatgtagtagccaggtgatatagctgatat

SEQ ID NO: 541473 - DNA, 33 bp, Homo sapien
tgaatatagcttggacagggaacaggttattta

SEQ ID NO: 541474 - DNA, 33 bp, Homo sapien
tgaatatagcttggacggggaacaggttattta

SEQ ID NO: 541475 - DNA, 33 bp, Homo sapien
tatatgagaagtcttcaatgttttaaagtcctt

SEQ ID NO: 541476 - DNA, 33 bp, Homo sapien
tatatgagaagtcttcgatgttttaaagtcctt

SEQ ID NO: 541477 - DNA, 33 bp, Homo sapien
tcctctcattttctcacctaagtctaagactaa

SEQ ID NO: 541478 - DNA, 33 bp, Homo sapien
tcctctcattttctcatctaagtctaagactaa

SEQ ID NO: 541479 - DNA, 33 bp, Homo sapien
ctccccattctgttgccatttaggttattattg

SEQ ID NO: 541480 - DNA, 33 bp, Homo sapien
ctccccattctgttgctatttaggttattattg

SEQ ID NO: 541481 - DNA, 33 bp, Homo sapien
cacgcattcctataaaaatgtcctgagctacca

SEQ ID NO: 541482 - DNA, 33 bp, Homo sapien
cacgcattcctataaagatgtcctgagctacca

SEQ ID NO: 541483 - DNA, 33 bp, Homo sapien
aggagagaatgattacaacaaaaaactgtaata

SEQ ID NO: 541484 - DNA, 33 bp, Homo sapien
aggagagaatgattacgacaaaaaactgtaata

SEQ ID NO: 541485 - DNA, 33 bp, Homo sapien
aatataaaacttctaaggatagcttgatagtat

SEQ ID NO: 541486 - DNA, 33 bp, Homo sapien
aatataaaacttctaatgatagcttgatagtat

SEQ ID NO: 541487 - DNA, 33 bp, Homo sapien
tttgtaaagaactggaaataaagatggtcagag

SEQ ID NO: 541488 - DNA, 33 bp, Homo sapien
tttgtaaagaactggagataaagatggtcagag

SEQ ID NO: 541489 - DNA, 33 bp, Homo sapien
ttctctacagagtatacggagaaatagattact

SEQ ID NO: 541490 - DNA, 33 bp, Homo sapien
ttctctacagagtatatggagaaatagattact

SEQ ID NO: 541491 - DNA, 33 bp, Homo sapien
gtcttctagagattgaaaggcatttttaattat

SEQ ID NO: 541492 - DNA, 33 bp, Homo sapien
gtcttctagagattgagaggcatttttaattat

SEQ ID NO: 541493 - DNA, 33 bp, Homo sapien
caccacaataagctgaatatcacaataaagcaa

SEQ ID NO: 541494 - DNA, 33 bp, Homo sapien
caccacaataagctgagtatcacaataaagcaa

SEQ ID NO: 541495 - DNA, 33 bp, Homo sapien
ttaagagaaatgctagaaggaagattacataac

SEQ ID NO: 541496 - DNA, 33 bp, Homo sapien
ttaagagaaatgctaggaggaagattacataac

SEQ ID NO: 541497 - DNA, 33 bp, Homo sapien
atacatctatattatgccaatcttttcagtgta

SEQ ID NO: 541498 - DNA, 33 bp, Homo sapien
atacatctatattatgtcaatcttttcagtgta

SEQ ID NO: 541499 - DNA, 33 bp, Homo sapien
catggactgtcatgagaactttaagtagactat

SEQ ID NO: 541500 - DNA, 33 bp, Homo sapien
catggactgtcatgagcactttaagtagactat

SEQ ID NO: 541501 - DNA, 33 bp, Homo sapien
tgggacagaccattccaactttggttagctcca

SEQ ID NO: 541502 - DNA, 33 bp, Homo sapien
tgggacagaccattccgactttggttagctcca

SEQ ID NO: 541503 - DNA, 33 bp, Homo sapien
aaactcaatcaggtaaaacagcatttcaatgtt

SEQ ID NO: 541504 - DNA, 33 bp, Homo sapien
aaactcaatcaggtaagacagcatttcaatgtt

SEQ ID NO: 541505 - DNA, 33 bp, Homo sapien
gtatgtcaaaatatcaataatagctttgtttca

SEQ ID NO: 541506 - DNA, 33 bp, Homo sapien
gtatgtcaaaatatcagtaatagctttgtttca

SEQ ID NO: 541507 - DNA, 33 bp, Homo sapien
agcaccaagtaagccacaaattccaggaaaagg

SEQ ID NO: 541508 - DNA, 33 bp, Homo sapien
agcaccaagtaagccataaattccaggaaaagg

SEQ ID NO: 541509 - DNA, 33 bp, Homo sapien
cattataaactgaaaaatccagtcaatagctgt

SEQ ID NO: 541510 - DNA, 33 bp, Homo sapien
cattataaactgaaaactccagtcaatagctgt

SEQ ID NO: 541511 - DNA, 33 bp, Homo sapien
aaggtggctctaatcaagcttccaagagtactt

SEQ ID NO: 541512 - DNA, 33 bp, Homo sapien
aaggtggctctaatcaggcttccaagagtactt

SEQ ID NO: 541513 - DNA, 33 bp, Homo sapien
gatttatgctcctgaaccatttctcttgatgaa

SEQ ID NO: 541514 - DNA, 33 bp, Homo sapien
gatttatgctcctgaatcatttctcttgatgaa

SEQ ID NO: 541515 - DNA, 33 bp, Homo sapien
aaagatgtagagggtaaacactatgtctttgat

SEQ ID NO: 541516 - DNA, 33 bp, Homo sapien
aaagatgtagagggtagacactatgtctttgat

SEQ ID NO: 541517 - DNA, 33 bp, Homo sapien
ttcccagcaacagttcagaaatggatcttcatg

SEQ ID NO: 541518 - DNA, 33 bp, Homo sapien
ttcccagcaacagttcggaaatggatcttcatg

SEQ ID NO: 541519 - DNA, 33 bp, Homo sapien
cactgtccatcagtaaatcataataatctgttg

SEQ ID NO: 541520 - DNA, 33 bp, Homo sapien
cactgtccatcagtaattcataataatctgttg

SEQ ID NO: 541521 - DNA, 33 bp, Homo sapien
ttgactttttggaaaagcttgtggtaaagtaag

SEQ ID NO: 541522 - DNA, 33 bp, Homo sapien
ttgactttttggaaaatcttgtggtaaagtaag

SEQ ID NO: 541523 - DNA, 33 bp, Homo sapien
attttgtaaaggatggaacaaaactattattgt

SEQ ID NO: 541524 - DNA, 33 bp, Homo sapien
attttgtaaaggatgggacaaaactattattgt

SEQ ID NO: 541525 - DNA, 33 bp, Homo sapien
tgactcatgtaggttacagttattattccaaat

SEQ ID NO: 541526 - DNA, 33 bp, Homo sapien
tgactcatgtaggttagagttattattccaaat

SEQ ID NO: 541527 - DNA, 33 bp, Homo sapien
gcactagtacttttcagtccctttgcagtttgg

SEQ ID NO: 541528 - DNA, 33 bp, Homo sapien
gcactagtacttttcattccctttgcagtttgg

SEQ ID NO: 541529 - DNA, 33 bp, Homo sapien
tgaaaacaagagcttacaatttagagcagtagc

SEQ ID NO: 541530 - DNA, 33 bp, Homo sapien
tgaaaacaagagcttagaatttagagcagtagc

SEQ ID NO: 541531 - DNA, 33 bp, Homo sapien
taaacctcacttaatacgttcatgttttcatta

SEQ ID NO: 541532 - DNA, 33 bp, Homo sapien
taaacctcacttaatatgttcatgttttcatta

SEQ ID NO: 541533 - DNA, 33 bp, Homo sapien
aaattcaaatgctctcagacggggtcattatgt

SEQ ID NO: 541534 - DNA, 33 bp, Homo sapien
aaattcaaatgctctcggacggggtcattatgt

SEQ ID NO: 541535 - DNA, 33 bp, Homo sapien
gctgtgactttataggacaaaatgtagaagcct

SEQ ID NO: 541536 - DNA, 33 bp, Homo sapien
gctgtgactttatagggcaaaatgtagaagcct

SEQ ID NO: 541537 - DNA, 33 bp, Homo sapien
atgtattttttgtcaactcagagctcccagtca

SEQ ID NO: 541538 - DNA, 33 bp, Homo sapien
atgtattttttgtcaagtcagagctcccagtca

SEQ ID NO: 541539 - DNA, 33 bp, Homo sapien
tattcacctcccagaactgtcattaaaagaaat

SEQ ID NO: 541540 - DNA, 33 bp, Homo sapien
tattcacctcccagaattgtcattaaaagaaat

SEQ ID NO: 541541 - DNA, 33 bp, Homo sapien
aaatagtgtgaagaaacgcaggttgaaaaataa

SEQ ID NO: 541542 - DNA, 33 bp, Homo sapien
aaatagtgtgaagaaatgcaggttgaaaaataa

SEQ ID NO: 541543 - DNA, 33 bp, Homo sapien
cagtttatatataagaaaacaagatcggagtaa

SEQ ID NO: 541544 - DNA, 33 bp, Homo sapien
cagtttatatataagagaacaagatcggagtaa

SEQ ID NO: 541545 - DNA, 33 bp, Homo sapien
aacaaattaagagctacgctttagagctttaaa

SEQ ID NO: 541546 - DNA, 33 bp, Homo sapien
aacaaattaagagctaggctttagagctttaaa

SEQ ID NO: 541547 - DNA, 33 bp, Homo sapien
aatatatatgcagcaacaacattaagtcagaaa

SEQ ID NO: 541548 - DNA, 33 bp, Homo sapien
aatatatatgcagcaataacattaagtcagaaa

SEQ ID NO: 541549 - DNA, 33 bp, Homo sapien
tgaagggacaaaaaaaacagtggaaatgattgt

SEQ ID NO: 541550 - DNA, 33 bp, Homo sapien
tgaagggacaaaaaaagcagtggaaatgattgt

SEQ ID NO: 541551 - DNA, 33 bp, Homo sapien
ttgttaccaaagagaactccattccgtgactca

SEQ ID NO: 541552 - DNA, 33 bp, Homo sapien
ttgttaccaaagagaagtccattccgtgactca

SEQ ID NO: 541553 - DNA, 33 bp, Homo sapien
accccttagccgataacattgctttaaatttat

SEQ ID NO: 541554 - DNA, 33 bp, Homo sapien
accccttagccgataatattgctttaaatttat

SEQ ID NO: 541555 - DNA, 33 bp, Homo sapien
gcttttctgagagtaagaaaagaggcattatag

SEQ ID NO: 541556 - DNA, 33 bp, Homo sapien
gcttttctgagagtaataaaagaggcattatag

SEQ ID NO: 541557 - DNA, 33 bp, Homo sapien
attatgaataattccaaagtctctccagggtgt

SEQ ID NO: 541558 - DNA, 33 bp, Homo sapien
attatgaataattccagagtctctccagggtgt

SEQ ID NO: 541559 - DNA, 33 bp, Homo sapien
gagacctgttcaagacccaactttctgcactat

SEQ ID NO: 541560 - DNA, 33 bp, Homo sapien
gagacctgttcaagactcaactttctgcactat

SEQ ID NO: 541561 - DNA, 33 bp, Homo sapien
atggcaagggccgtgaaagttagaaatttgtct

SEQ ID NO: 541562 - DNA, 33 bp, Homo sapien
atggcaagggccgtgacagttagaaatttgtct

SEQ ID NO: 541563 - DNA, 33 bp, Homo sapien
tatgaagactaagttcacagttttaaagggtaa

SEQ ID NO: 541564 - DNA, 33 bp, Homo sapien
tatgaagactaagttcgcagttttaaagggtaa

SEQ ID NO: 541565 - DNA, 33 bp, Homo sapien
tcacactggcaaacagcacttcaatacagggtt

SEQ ID NO: 541566 - DNA, 33 bp, Homo sapien
tcacactggcaaacagtacttcaatacagggtt

SEQ ID NO: 541567 - DNA, 33 bp, Homo sapien
agattatgagagacaacgtagatagtgtgctaa

SEQ ID NO: 541568 - DNA, 33 bp, Homo sapien
agattatgagagacaatgtagatagtgtgctaa

SEQ ID NO: 541569 - DNA, 33 bp, Homo sapien
aataataagtgatggggaaaggactccttattt

SEQ ID NO: 541570 - DNA, 33 bp, Homo sapien
aataataagtgatgggtaaaggactccttattt

SEQ ID NO: 541571 - DNA, 33 bp, Homo sapien
ggtctaagaatgaatacgtagaaggtgtttgga

SEQ ID NO: 541572 - DNA, 33 bp, Homo sapien
ggtctaagaatgaatatgtagaaggtgtttgga

SEQ ID NO: 541573 - DNA, 33 bp, Homo sapien
tagattccaaaccctcaacaggattctagttgc

SEQ ID NO: 541574 - DNA, 33 bp, Homo sapien
tagattccaaaccctcgacaggattctagttgc

SEQ ID NO: 541575 - DNA, 33 bp, Homo sapien
tcttcaccagctctccagatgaggcattctgac

SEQ ID NO: 541576 - DNA, 33 bp, Homo sapien
tcttcaccagctctccggatgaggcattctgac

SEQ ID NO: 541577 - DNA, 33 bp, Homo sapien
tgtgtcagcgcctaacacttttgcaagataagc

SEQ ID NO: 541578 - DNA, 33 bp, Homo sapien
tgtgtcagcgcctaacgcttttgcaagataagc

SEQ ID NO: 541579 - DNA, 33 bp, Homo sapien
atatatactcaaagaaaagcgaccattatacta

SEQ ID NO: 541580 - DNA, 33 bp, Homo sapien
atatatactcaaagaagagcgaccattatacta

SEQ ID NO: 541581 - DNA, 33 bp, Homo sapien
attcctaagcaaatagaagatagccagaggcat

SEQ ID NO: 541582 - DNA, 33 bp, Homo sapien
attcctaagcaaataggagatagccagaggcat

SEQ ID NO: 541583 - DNA, 33 bp, Homo sapien
atagagctcaggagtacggagcagagatctgtg

SEQ ID NO: 541584 - DNA, 33 bp, Homo sapien
atagagctcaggagtatggagcagagatctgtg

SEQ ID NO: 541585 - DNA, 33 bp, Homo sapien
aagtttattggatttaggaattttctttctttt

SEQ ID NO: 541586 - DNA, 33 bp, Homo sapien
aagtttattggatttatgaattttctttctttt

SEQ ID NO: 541587 - DNA, 33 bp, Homo sapien
ccaataaacttttctacgtagcaacagagaagc

SEQ ID NO: 541588 - DNA, 33 bp, Homo sapien
ccaataaacttttctatgtagcaacagagaagc

SEQ ID NO: 541589 - DNA, 33 bp, Homo sapien
agggagatcagggaagccttcaaagaaagaggg

SEQ ID NO: 541590 - DNA, 33 bp, Homo sapien
agggagatcagggaaggcttcaaagaaagaggg

SEQ ID NO: 541591 - DNA, 33 bp, Homo sapien
tcttcttggcctcataataatgcaaaacccatt

SEQ ID NO: 541592 - DNA, 33 bp, Homo sapien
tcttcttggcctcatattaatgcaaaacccatt

SEQ ID NO: 541593 - DNA, 33 bp, Homo sapien
cttcagttgacaaacacgtctcaaagagagaac

SEQ ID NO: 541594 - DNA, 33 bp, Homo sapien
cttcagttgacaaacatgtctcaaagagagaac

SEQ ID NO: 541595 - DNA, 33 bp, Homo sapien
ccaatagaccaagcaacattttcgtctacattt

SEQ ID NO: 541596 - DNA, 33 bp, Homo sapien
ccaatagaccaagcaatattttcgtctacattt

SEQ ID NO: 541597 - DNA, 33 bp, Homo sapien
cctattgatggcagaggatgaaatccaactcca

SEQ ID NO: 541598 - DNA, 33 bp, Homo sapien
cctattgatggcagagtatgaaatccaactcca

SEQ ID NO: 541599 - DNA, 33 bp, Homo sapien
gcataatctgtgttggaataaagggagtgacct

SEQ ID NO: 541600 - DNA, 33 bp, Homo sapien
gcataatctgtgttggcataaagggagtgacct

SEQ ID NO: 541601 - DNA, 33 bp, Homo sapien
cttactatgatttttaacttaaacacatttcaa

SEQ ID NO: 541602 - DNA, 33 bp, Homo sapien
cttactatgatttttaccttaaacacatttcaa

SEQ ID NO: 541603 - DNA, 33 bp, Homo sapien
caaatctgaaatggtacagggatagtcactgta

SEQ ID NO: 541604 - DNA, 33 bp, Homo sapien
caaatctgaaatggtatagggatagtcactgta

SEQ ID NO: 541605 - DNA, 33 bp, Homo sapien
tttgtatttagagtaacgagattgtttattaaa

SEQ ID NO: 541606 - DNA, 33 bp, Homo sapien
tttgtatttagagtaatgagattgtttattaaa

SEQ ID NO: 541607 - DNA, 33 bp, Homo sapien
agaatttccttaactcactcctgggacagagga

SEQ ID NO: 541608 - DNA, 33 bp, Homo sapien
agaatttccttaactcgctcctgggacagagga

SEQ ID NO: 541609 - DNA, 33 bp, Homo sapien
ctaaaacctcagtgctcacctcagagttactgt

SEQ ID NO: 541610 - DNA, 33 bp, Homo sapien
ctaaaacctcagtgcttacctcagagttactgt

SEQ ID NO: 541611 - DNA, 33 bp, Homo sapien
tgtttgtcatgctttacggttgatagagtccat

SEQ ID NO: 541612 - DNA, 33 bp, Homo sapien
tgtttgtcatgctttatggttgatagagtccat

SEQ ID NO: 541613 - DNA, 33 bp, Homo sapien
atttctaagtgggtcacccttctacagagatat

SEQ ID NO: 541614 - DNA, 33 bp, Homo sapien
atttctaagtgggtcatccttctacagagatat

SEQ ID NO: 541615 - DNA, 33 bp, Homo sapien
tgcacctgcctattgaaagaccataaagtttgg

SEQ ID NO: 541616 - DNA, 33 bp, Homo sapien
tgcacctgcctattgagagaccataaagtttgg

SEQ ID NO: 541617 - DNA, 33 bp, Homo sapien
caccgaacttattcaacataacaaatgattagc

SEQ ID NO: 541618 - DNA, 33 bp, Homo sapien
caccgaacttattcaagataacaaatgattagc

SEQ ID NO: 541619 - DNA, 33 bp, Homo sapien
atgagtactcaaaggacatttctactgaatgca

SEQ ID NO: 541620 - DNA, 33 bp, Homo sapien
atgagtactcaaaggatatttctactgaatgca

SEQ ID NO: 541621 - DNA, 33 bp, Homo sapien
tgtattaatgaaaacaaatactggctgtggttg

SEQ ID NO: 541622 - DNA, 33 bp, Homo sapien
tgtattaatgaaaacagatactggctgtggttg

SEQ ID NO: 541623 - DNA, 33 bp, Homo sapien
aattatgaggacttgtcaaaaaggcctaaggac

SEQ ID NO: 541624 - DNA, 33 bp, Homo sapien
aattatgaggacttgtgaaaaaggcctaaggac

SEQ ID NO: 541625 - DNA, 33 bp, Homo sapien
cttaatgtttattgaccctttgtgtatcttctt

SEQ ID NO: 541626 - DNA, 33 bp, Homo sapien
cttaatgtttattgactctttgtgtatcttctt

SEQ ID NO: 541627 - DNA, 33 bp, Homo sapien
aactgactccggtaaaaatgatgaacatagact

SEQ ID NO: 541628 - DNA, 33 bp, Homo sapien
aactgactccggtaaagatgatgaacatagact

SEQ ID NO: 541629 - DNA, 33 bp, Homo sapien
cctataaagttctataaataacagcatcatcct

SEQ ID NO: 541630 - DNA, 33 bp, Homo sapien
cctataaagttctatagataacagcatcatcct

SEQ ID NO: 541631 - DNA, 33 bp, Homo sapien
ggcccaaaaactgaccgcaaattcaatatgaga

SEQ ID NO: 541632 - DNA, 33 bp, Homo sapien
ggcccaaaaactgacctcaaattcaatatgaga

SEQ ID NO: 541633 - DNA, 33 bp, Homo sapien
atacttgattccagaaaaaggagaagaaaacac

SEQ ID NO: 541634 - DNA, 33 bp, Homo sapien
atacttgattccagaagaaggagaagaaaacac

SEQ ID NO: 541635 - DNA, 33 bp, Homo sapien
ataaaaatggtggtgaaacaaggaatacaatct

SEQ ID NO: 541636 - DNA, 33 bp, Homo sapien
ataaaaatggtggtgagacaaggaatacaatct

SEQ ID NO: 541637 - DNA, 33 bp, Homo sapien
cagcaactctcatccaactgtaatctcatccaa

SEQ ID NO: 541638 - DNA, 33 bp, Homo sapien
cagcaactctcatccacctgtaatctcatccaa

SEQ ID NO: 541639 - DNA, 33 bp, Homo sapien
aatgaaagcaatgctacattttgtctaatgctt

SEQ ID NO: 541640 - DNA, 33 bp, Homo sapien
aatgaaagcaatgctatattttgtctaatgctt

SEQ ID NO: 541641 - DNA, 33 bp, Homo sapien
attagcatcctacttaacacagtaatgatgtcc

SEQ ID NO: 541642 - DNA, 33 bp, Homo sapien
attagcatcctacttagcacagtaatgatgtcc

SEQ ID NO: 541643 - DNA, 33 bp, Homo sapien
ttgctgagtactattcaatggtatggatgtacc

SEQ ID NO: 541644 - DNA, 33 bp, Homo sapien
ttgctgagtactattcgatggtatggatgtacc

SEQ ID NO: 541645 - DNA, 33 bp, Homo sapien
attttgagggtgtatccgagaagaattttgttc

SEQ ID NO: 541646 - DNA, 33 bp, Homo sapien
attttgagggtgtatctgagaagaattttgttc

SEQ ID NO: 541647 - DNA, 33 bp, Homo sapien
tatatccacaaccttcgataagccttttcctag

SEQ ID NO: 541648 - DNA, 33 bp, Homo sapien
tatatccacaaccttctataagccttttcctag

SEQ ID NO: 541649 - DNA, 33 bp, Homo sapien
ggactgtgctctgtcacgcaaaacaaaggacaa

SEQ ID NO: 541650 - DNA, 33 bp, Homo sapien
ggactgtgctctgtcatgcaaaacaaaggacaa

SEQ ID NO: 541651 - DNA, 33 bp, Homo sapien
taactgttgagtttgaaaggcccatctgccttt

SEQ ID NO: 541652 - DNA, 33 bp, Homo sapien
taactgttgagtttgacaggcccatctgccttt

SEQ ID NO: 541653 - DNA, 33 bp, Homo sapien
tagaattaaatgagacaatagtgcacagtgcta

SEQ ID NO: 541654 - DNA, 33 bp, Homo sapien
tagaattaaatgagaccatagtgcacagtgcta

SEQ ID NO: 541655 - DNA, 33 bp, Homo sapien
gtatcaaaaagattgacgatgtctgctttgggg

SEQ ID NO: 541656 - DNA, 33 bp, Homo sapien
gtatcaaaaagattgatgatgtctgctttgggg

SEQ ID NO: 541657 - DNA, 33 bp, Homo sapien
tgtcaagtgacagagaaatacagtaatctttca

SEQ ID NO: 541658 - DNA, 33 bp, Homo sapien
tgtcaagtgacagagagatacagtaatctttca

SEQ ID NO: 541659 - DNA, 33 bp, Homo sapien
actcaagtcagtcccaatcaaatgccaccgtgg

SEQ ID NO: 541660 - DNA, 33 bp, Homo sapien
actcaagtcagtcccactcaaatgccaccgtgg

SEQ ID NO: 541661 - DNA, 33 bp, Homo sapien
gctccttgcagaaatgaaagaaaaaccacaaca

SEQ ID NO: 541662 - DNA, 33 bp, Homo sapien
gctccttgcagaaatgtaagaaaaaccacaaca

SEQ ID NO: 541663 - DNA, 33 bp, Homo sapien
gtaaagacaacaaggcaaaaatgtgtgaggagc

SEQ ID NO: 541664 - DNA, 33 bp, Homo sapien
gtaaagacaacaaggcgaaaatgtgtgaggagc

SEQ ID NO: 541665 - DNA, 33 bp, Homo sapien
tagcagatgcctcaaaagagctctgtgatgatt

SEQ ID NO: 541666 - DNA, 33 bp, Homo sapien
tagcagatgcctcaaaggagctctgtgatgatt

SEQ ID NO: 541667 - DNA, 33 bp, Homo sapien
tcttcaagcctacaaacgtgccaggaaaacttg

SEQ ID NO: 541668 - DNA, 33 bp, Homo sapien
tcttcaagcctacaaatgtgccaggaaaacttg

SEQ ID NO: 541669 - DNA, 33 bp, Homo sapien
cacttctgggtacatcactatcatctggccaat

SEQ ID NO: 541670 - DNA, 33 bp, Homo sapien
cacttctgggtacatctctatcatctggccaat

SEQ ID NO: 541671 - DNA, 33 bp, Homo sapien
ctggcttctgaacaacactttggctaaggaagg

SEQ ID NO: 541672 - DNA, 33 bp, Homo sapien
ctggcttctgaacaacgctttggctaaggaagg

SEQ ID NO: 541673 - DNA, 33 bp, Homo sapien
ctatactcttcaaaacagcatttggagtaagaa

SEQ ID NO: 541674 - DNA, 33 bp, Homo sapien
ctatactcttcaaaacggcatttggagtaagaa

SEQ ID NO: 541675 - DNA, 33 bp, Homo sapien
aacttgtcagccaaccaatgtaatcctttcaga

SEQ ID NO: 541676 - DNA, 33 bp, Homo sapien
aacttgtcagccaaccgatgtaatcctttcaga

SEQ ID NO: 541677 - DNA, 33 bp, Homo sapien
ccagttctgaacataactggaaggcagcctggt

SEQ ID NO: 541678 - DNA, 33 bp, Homo sapien
ccagttctgaacataattggaaggcagcctggt

SEQ ID NO: 541679 - DNA, 33 bp, Homo sapien
cagattatgatacagcagcaaccacaataaagc

SEQ ID NO: 541680 - DNA, 33 bp, Homo sapien
cagattatgatacagccgcaaccacaataaagc

SEQ ID NO: 541681 - DNA, 33 bp, Homo sapien
gcttaattgttgtgggaaaacttacagattggc

SEQ ID NO: 541682 - DNA, 33 bp, Homo sapien
gcttaattgttgtgggtaaacttacagattggc

SEQ ID NO: 541683 - DNA, 33 bp, Homo sapien
ttccctcacgaaaagcagagaaggaaggatcta

SEQ ID NO: 541684 - DNA, 33 bp, Homo sapien
ttccctcacgaaaagcggagaaggaaggatcta

SEQ ID NO: 541685 - DNA, 33 bp, Homo sapien
gatacaggactggcaaaaaacaacaaatggtca

SEQ ID NO: 541686 - DNA, 33 bp, Homo sapien
gatacaggactggcaagaaacaacaaatggtca

SEQ ID NO: 541687 - DNA, 33 bp, Homo sapien
tggcacccacctagcccagatcttcttggaagt

SEQ ID NO: 541688 - DNA, 33 bp, Homo sapien
tggcacccacctagcctagatcttcttggaagt

SEQ ID NO: 541689 - DNA, 33 bp, Homo sapien
actacatgatgctataagtcctggtgacagtct

SEQ ID NO: 541690 - DNA, 33 bp, Homo sapien
actacatgatgctatacgtcctggtgacagtct

SEQ ID NO: 541691 - DNA, 33 bp, Homo sapien
gttaaatatgaagagacctttgcttttctgatg

SEQ ID NO: 541692 - DNA, 33 bp, Homo sapien
gttaaatatgaagagatctttgcttttctgatg

SEQ ID NO: 541693 - DNA, 33 bp, Homo sapien
tctgcaaaagcctgagacaattcttatctctgg

SEQ ID NO: 541694 - DNA, 33 bp, Homo sapien
tctgcaaaagcctgagtcaattcttatctctgg

SEQ ID NO: 541695 - DNA, 33 bp, Homo sapien
cttgcttaagtaggacaaattatcagcttaacc

SEQ ID NO: 541696 - DNA, 33 bp, Homo sapien
cttgcttaagtaggacgaattatcagcttaacc

SEQ ID NO: 541697 - DNA, 33 bp, Homo sapien
agaacagttggtgtcaaagtttctctaaaggga

SEQ ID NO: 541698 - DNA, 33 bp, Homo sapien
agaacagttggtgtcagagtttctctaaaggga

SEQ ID NO: 541699 - DNA, 33 bp, Homo sapien
cctcttagtcccataaccttctggcacctgtct

SEQ ID NO: 541700 - DNA, 33 bp, Homo sapien
cctcttagtcccataatcttctggcacctgtct

SEQ ID NO: 541701 - DNA, 33 bp, Homo sapien
agattggaggcaaagacattagttaggactcta

SEQ ID NO: 541702 - DNA, 33 bp, Homo sapien
agattggaggcaaagagattagttaggactcta

SEQ ID NO: 541703 - DNA, 33 bp, Homo sapien
acatacacggtacacaatcatggaattacaaca

SEQ ID NO: 541704 - DNA, 33 bp, Homo sapien
acatacacggtacacagtcatggaattacaaca

SEQ ID NO: 541705 - DNA, 33 bp, Homo sapien
cacatattaatcatcacgtctaaccccccaaat

SEQ ID NO: 541706 - DNA, 33 bp, Homo sapien
cacatattaatcatcatgtctaaccccccaaat

SEQ ID NO: 541707 - DNA, 33 bp, Homo sapien
agaccacttgtttaagaagctcagaaatgaaaa

SEQ ID NO: 541708 - DNA, 33 bp, Homo sapien
agaccacttgtttaagcagctcagaaatgaaaa

SEQ ID NO: 541709 - DNA, 33 bp, Homo sapien
gaatccagaattatacggcttcttttcattttt

SEQ ID NO: 541710 - DNA, 33 bp, Homo sapien
gaatccagaattatactgcttcttttcattttt

SEQ ID NO: 541711 - DNA, 33 bp, Homo sapien
gtataattctggattcaatcttttttaggctaa

SEQ ID NO: 541712 - DNA, 33 bp, Homo sapien
gtataattctggattcgatcttttttaggctaa

SEQ ID NO: 541713 - DNA, 33 bp, Homo sapien
ggtgttgtaaacaccacgatctggtttatgaca

SEQ ID NO: 541714 - DNA, 33 bp, Homo sapien
ggtgttgtaaacaccatgatctggtttatgaca

SEQ ID NO: 541715 - DNA, 33 bp, Homo sapien
accctgtgtaatctcacaccattcaacttaata

SEQ ID NO: 541716 - DNA, 33 bp, Homo sapien
accctgtgtaatctcataccattcaacttaata

SEQ ID NO: 541717 - DNA, 33 bp, Homo sapien
gagatttagaaatataccgagttacatgtaatg

SEQ ID NO: 541718 - DNA, 33 bp, Homo sapien
gagatttagaaatatatcgagttacatgtaatg

SEQ ID NO: 541719 - DNA, 33 bp, Homo sapien
acccttaaagcagagacgacaagatcttaatta

SEQ ID NO: 541720 - DNA, 33 bp, Homo sapien
acccttaaagcagagatgacaagatcttaatta

SEQ ID NO: 541721 - DNA, 33 bp, Homo sapien
ccccttcctcactacccacatacatccagcaca

SEQ ID NO: 541722 - DNA, 33 bp, Homo sapien
ccccttcctcactaccgacatacatccagcaca

SEQ ID NO: 541723 - DNA, 33 bp, Homo sapien
tacactcaagccataccgaacactcaattctct

SEQ ID NO: 541724 - DNA, 33 bp, Homo sapien
tacactcaagccatactgaacactcaattctct

SEQ ID NO: 541725 - DNA, 33 bp, Homo sapien
gtgacttctaccaggacatatttttcttagtct

SEQ ID NO: 541726 - DNA, 33 bp, Homo sapien
gtgacttctaccaggatatatttttcttagtct

SEQ ID NO: 541727 - DNA, 33 bp, Homo sapien
gctcatctgtatttcaaaagaattaggtcatga

SEQ ID NO: 541728 - DNA, 33 bp, Homo sapien
gctcatctgtatttcagaagaattaggtcatga

SEQ ID NO: 541729 - DNA, 33 bp, Homo sapien
tgaatctggtaacttgaaccctgtaaggttaca

SEQ ID NO: 541730 - DNA, 33 bp, Homo sapien
tgaatctggtaacttggaccctgtaaggttaca

SEQ ID NO: 541731 - DNA, 33 bp, Homo sapien
agttaccagattcaggccaaattagcaattgct

SEQ ID NO: 541732 - DNA, 33 bp, Homo sapien
agttaccagattcaggtcaaattagcaattgct

SEQ ID NO: 541733 - DNA, 33 bp, Homo sapien
tttttctaagttgctacggactaatctgttagc

SEQ ID NO: 541734 - DNA, 33 bp, Homo sapien
tttttctaagttgctatggactaatctgttagc

SEQ ID NO: 541735 - DNA, 33 bp, Homo sapien
gttattaaatacatcaactgaattgtgcactga

SEQ ID NO: 541736 - DNA, 33 bp, Homo sapien
gttattaaatacatcagctgaattgtgcactga

SEQ ID NO: 541737 - DNA, 33 bp, Homo sapien
tagaaatagtaatgaagttatactgaacaagtt

SEQ ID NO: 541738 - DNA, 33 bp, Homo sapien
tagaaatagtaatgaatttatactgaacaagtt

SEQ ID NO: 541739 - DNA, 33 bp, Homo sapien
tgttttcagacattgccaacaatccctgcaaat

SEQ ID NO: 541740 - DNA, 33 bp, Homo sapien
tgttttcagacattgctaacaatccctgcaaat

SEQ ID NO: 541741 - DNA, 33 bp, Homo sapien
acacctatacaggctgacaaacttgaatttttg

SEQ ID NO: 541742 - DNA, 33 bp, Homo sapien
acacctatacaggctggcaaacttgaatttttg

SEQ ID NO: 541743 - DNA, 33 bp, Homo sapien
aaaaacggaatcatccaaatacatttgaaaatt

SEQ ID NO: 541744 - DNA, 33 bp, Homo sapien
aaaaacggaatcatcctaatacatttgaaaatt

SEQ ID NO: 541745 - DNA, 33 bp, Homo sapien
tgctccttagggccatcagccatatcatgctgt

SEQ ID NO: 541746 - DNA, 33 bp, Homo sapien
tgctccttagggccattagccatatcatgctgt

SEQ ID NO: 541747 - DNA, 33 bp, Homo sapien
aaaactattaaaattacaatcatcatctaactg

SEQ ID NO: 541748 - DNA, 33 bp, Homo sapien
aaaactattaaaattagaatcatcatctaactg

SEQ ID NO: 541749 - DNA, 33 bp, Homo sapien
aaatatagaagtaataaccatatctgtctaata

SEQ ID NO: 541750 - DNA, 33 bp, Homo sapien
aaatatagaagtaatatccatatctgtctaata

SEQ ID NO: 541751 - DNA, 33 bp, Homo sapien
ttaagaagtcatatcaaagttactaagcaaaac

SEQ ID NO: 541752 - DNA, 33 bp, Homo sapien
ttaagaagtcatatcatagttactaagcaaaac

SEQ ID NO: 541753 - DNA, 33 bp, Homo sapien
tcactatcctcgttctgaatacctaaactgttc

SEQ ID NO: 541754 - DNA, 33 bp, Homo sapien
tcactatcctcgttcttaatacctaaactgttc

SEQ ID NO: 541755 - DNA, 33 bp, Homo sapien
aagaattatctctaaactaacatccagaagtag

SEQ ID NO: 541756 - DNA, 33 bp, Homo sapien
aagaattatctctaaagtaacatccagaagtag

SEQ ID NO: 541757 - DNA, 33 bp, Homo sapien
aaaaatatgtatgtaaccaaaatccattgattg

SEQ ID NO: 541758 - DNA, 33 bp, Homo sapien
aaaaatatgtatgtaagcaaaatccattgattg

SEQ ID NO: 541759 - DNA, 33 bp, Homo sapien
ttttttagaagactgacattgcattaccacata

SEQ ID NO: 541760 - DNA, 33 bp, Homo sapien
ttttttagaagactgatattgcattaccacata

SEQ ID NO: 541761 - DNA, 33 bp, Homo sapien
gcaatacttcaaattacggtatcagctgaaata

SEQ ID NO: 541762 - DNA, 33 bp, Homo sapien
gcaatacttcaaattagggtatcagctgaaata

SEQ ID NO: 541763 - DNA, 33 bp, Homo sapien
gattctatgcctactacacattatttgtgttta

SEQ ID NO: 541764 - DNA, 33 bp, Homo sapien
gattctatgcctactatacattatttgtgttta

SEQ ID NO: 541765 - DNA, 33 bp, Homo sapien
gctttttaactccaaacgtaaattcatatattc

SEQ ID NO: 541766 - DNA, 33 bp, Homo sapien
gctttttaactccaaaggtaaattcatatattc

SEQ ID NO: 541767 - DNA, 33 bp, Homo sapien
ggggtgtagtagctcactagtttagtacacagt

SEQ ID NO: 541768 - DNA, 33 bp, Homo sapien
ggggtgtagtagctcagtagtttagtacacagt

SEQ ID NO: 541769 - DNA, 33 bp, Homo sapien
aatctgagtccattaacgatattcaattgtaaa

SEQ ID NO: 541770 - DNA, 33 bp, Homo sapien
aatctgagtccattaaggatattcaattgtaaa

SEQ ID NO: 541771 - DNA, 33 bp, Homo sapien
gtttttctattgcaagccttaagtatacattta

SEQ ID NO: 541772 - DNA, 33 bp, Homo sapien
gtttttctattgcaaggcttaagtatacattta

SEQ ID NO: 541773 - DNA, 33 bp, Homo sapien
catgttcacatctctgaagttctctcttgtgca

SEQ ID NO: 541774 - DNA, 33 bp, Homo sapien
catgttcacatctctggagttctctcttgtgca

SEQ ID NO: 541775 - DNA, 33 bp, Homo sapien
tacatctcgaaagctacgattaagtgaaatgta

SEQ ID NO: 541776 - DNA, 33 bp, Homo sapien
tacatctcgaaagctatgattaagtgaaatgta

SEQ ID NO: 541777 - DNA, 33 bp, Homo sapien
gcaacaacggccgtgaaaccctactgagttgat

SEQ ID NO: 541778 - DNA, 33 bp, Homo sapien
gcaacaacggccgtgacaccctactgagttgat

SEQ ID NO: 541779 - DNA, 33 bp, Homo sapien
aaacggttaatctctaatacataacagctccta

SEQ ID NO: 541780 - DNA, 33 bp, Homo sapien
aaacggttaatctctagtacataacagctccta

SEQ ID NO: 541781 - DNA, 33 bp, Homo sapien
aggaataaaagagacaacttaatgattatttaa

SEQ ID NO: 541782 - DNA, 33 bp, Homo sapien
aggaataaaagagacaccttaatgattatttaa

SEQ ID NO: 541783 - DNA, 33 bp, Homo sapien
actgagttaaggaagaaataagatcattctttc

SEQ ID NO: 541784 - DNA, 33 bp, Homo sapien
actgagttaaggaagagataagatcattctttc

SEQ ID NO: 541785 - DNA, 33 bp, Homo sapien
tattggaatcctcaataaagtgttaattcaaga

SEQ ID NO: 541786 - DNA, 33 bp, Homo sapien
tattggaatcctcaatgaagtgttaattcaaga

SEQ ID NO: 541787 - DNA, 33 bp, Homo sapien
aaccttcttaaaacaccctggacattcagtatg

SEQ ID NO: 541788 - DNA, 33 bp, Homo sapien
aaccttcttaaaacactctggacattcagtatg

SEQ ID NO: 541789 - DNA, 33 bp, Homo sapien
tttttaccaaacccagaacttatctatgtgtga

SEQ ID NO: 541790 - DNA, 33 bp, Homo sapien
tttttaccaaacccagtacttatctatgtgtga

SEQ ID NO: 541791 - DNA, 33 bp, Homo sapien
gatctctgtgtcaccactgattgttactcaact

SEQ ID NO: 541792 - DNA, 33 bp, Homo sapien
gatctctgtgtcaccattgattgttactcaact

SEQ ID NO: 541793 - DNA, 33 bp, Homo sapien
gactggtttattcatcaaagtcactagattttg

SEQ ID NO: 541794 - DNA, 33 bp, Homo sapien
gactggtttattcatcgaagtcactagattttg

SEQ ID NO: 541795 - DNA, 33 bp, Homo sapien
agctaagtacaataacaacaataggaagaaatc

SEQ ID NO: 541796 - DNA, 33 bp, Homo sapien
agctaagtacaataactacaataggaagaaatc

SEQ ID NO: 541797 - DNA, 33 bp, Homo sapien
ttccggtgctttttaccagccttggctgtctgg

SEQ ID NO: 541798 - DNA, 33 bp, Homo sapien
ttccggtgctttttactagccttggctgtctgg

SEQ ID NO: 541799 - DNA, 33 bp, Homo sapien
cggaattgtgagtctcaagaaaggtcagaaatg

SEQ ID NO: 541800 - DNA, 33 bp, Homo sapien
cggaattgtgagtctcgagaaaggtcagaaatg

SEQ ID NO: 541801 - DNA, 33 bp, Homo sapien
tgacaagcactaaatccaagcattacaataaac

SEQ ID NO: 541802 - DNA, 33 bp, Homo sapien
tgacaagcactaaatctaagcattacaataaac

SEQ ID NO: 541803 - DNA, 33 bp, Homo sapien
agtcttctggaggtgaaagctgagtgaatcctt

SEQ ID NO: 541804 - DNA, 33 bp, Homo sapien
agtcttctggaggtgagagctgagtgaatcctt

SEQ ID NO: 541805 - DNA, 33 bp, Homo sapien
atatctttagaaagtaaagtattttccagcttg

SEQ ID NO: 541806 - DNA, 33 bp, Homo sapien
atatctttagaaagtagagtattttccagcttg

SEQ ID NO: 541807 - DNA, 33 bp, Homo sapien
caccagagacaggctagattgcccatcctggga

SEQ ID NO: 541808 - DNA, 33 bp, Homo sapien
caccagagacaggctatattgcccatcctggga

SEQ ID NO: 541809 - DNA, 33 bp, Homo sapien
taaagttccaaacgaaagtagcagcagtagaaa

SEQ ID NO: 541810 - DNA, 33 bp, Homo sapien
taaagttccaaacgaaggtagcagcagtagaaa

SEQ ID NO: 541811 - DNA, 33 bp, Homo sapien
gaattataaatattacaacaagattacaccatt

SEQ ID NO: 541812 - DNA, 33 bp, Homo sapien
gaattataaatattaccacaagattacaccatt

SEQ ID NO: 541813 - DNA, 33 bp, Homo sapien
taagccaaatttacagaagaaaataaatacaac

SEQ ID NO: 541814 - DNA, 33 bp, Homo sapien
taagccaaatttacaggagaaaataaatacaac

SEQ ID NO: 541815 - DNA, 33 bp, Homo sapien
tttactttaggacaagaatttaccatacaacat

SEQ ID NO: 541816 - DNA, 33 bp, Homo sapien
tttactttaggacaagcatttaccatacaacat

SEQ ID NO: 541817 - DNA, 33 bp, Homo sapien
ctcaatgtagggttcacggaccagtagtatcag

SEQ ID NO: 541818 - DNA, 33 bp, Homo sapien
ctcaatgtagggttcatggaccagtagtatcag

SEQ ID NO: 541819 - DNA, 33 bp, Homo sapien
attaatcaccagtgcacatactttcagtgaaca

SEQ ID NO: 541820 - DNA, 33 bp, Homo sapien
attaatcaccagtgcatatactttcagtgaaca

SEQ ID NO: 541821 - DNA, 33 bp, Homo sapien
cttcgtgacttccataacaaatgcaattaatct

SEQ ID NO: 541822 - DNA, 33 bp, Homo sapien
cttcgtgacttccatagcaaatgcaattaatct

SEQ ID NO: 541823 - DNA, 33 bp, Homo sapien
ttttcattttgcttcaatcttggggatctagtc

SEQ ID NO: 541824 - DNA, 33 bp, Homo sapien
ttttcattttgcttcagtcttggggatctagtc

SEQ ID NO: 541825 - DNA, 33 bp, Homo sapien
aaggtacacacacgaaactctcctatttgaatt

SEQ ID NO: 541826 - DNA, 33 bp, Homo sapien
aaggtacacacacgaacctctcctatttgaatt

SEQ ID NO: 541827 - DNA, 33 bp, Homo sapien
ataactaaaatcacctcaatgtaaataaatcac

SEQ ID NO: 541828 - DNA, 33 bp, Homo sapien
ataactaaaatcacctgaatgtaaataaatcac

SEQ ID NO: 541829 - DNA, 33 bp, Homo sapien
tcaaatgcttgagagaaacttcagaaataacta

SEQ ID NO: 541830 - DNA, 33 bp, Homo sapien
tcaaatgcttgagagacacttcagaaataacta

SEQ ID NO: 541831 - DNA, 33 bp, Homo sapien
aaatcatgaggctgtaaaaagttctggggttgc

SEQ ID NO: 541832 - DNA, 33 bp, Homo sapien
aaatcatgaggctgtagaaagttctggggttgc

SEQ ID NO: 541833 - DNA, 33 bp, Homo sapien
caagacgaaaaaagaacggcccactgcacatct

SEQ ID NO: 541834 - DNA, 33 bp, Homo sapien
caagacgaaaaaagaatggcccactgcacatct

SEQ ID NO: 541835 - DNA, 33 bp, Homo sapien
ggctctatccattctacaatgcaaccctcttct

SEQ ID NO: 541836 - DNA, 33 bp, Homo sapien
ggctctatccattctataatgcaaccctcttct

SEQ ID NO: 541837 - DNA, 33 bp, Homo sapien
caccagacattctgcaaattgtgactatgccaa

SEQ ID NO: 541838 - DNA, 33 bp, Homo sapien
caccagacattctgcatattgtgactatgccaa

SEQ ID NO: 541839 - DNA, 33 bp, Homo sapien
tgcttcccattatctaaaaagaattgagcattg

SEQ ID NO: 541840 - DNA, 33 bp, Homo sapien
tgcttcccattatctacaaagaattgagcattg

SEQ ID NO: 541841 - DNA, 33 bp, Homo sapien
caaagacaatgactggaaagacagaagaattgt

SEQ ID NO: 541842 - DNA, 33 bp, Homo sapien
caaagacaatgactggcaagacagaagaattgt

SEQ ID NO: 541843 - DNA, 33 bp, Homo sapien
catcaggcactatctacggactgagaagagaag

SEQ ID NO: 541844 - DNA, 33 bp, Homo sapien
catcaggcactatctatggactgagaagagaag

SEQ ID NO: 541845 - DNA, 33 bp, Homo sapien
ataaagacatatgcaagactgagcaatttacaa

SEQ ID NO: 541846 - DNA, 33 bp, Homo sapien
ataaagacatatgcaatactgagcaatttacaa

SEQ ID NO: 541847 - DNA, 33 bp, Homo sapien
actatacaagaaactcactatgtgtagtctata

SEQ ID NO: 541848 - DNA, 33 bp, Homo sapien
actatacaagaaactctctatgtgtagtctata

SEQ ID NO: 541849 - DNA, 33 bp, Homo sapien
ggaaaagtatcatttcaaacatacagcatatat

SEQ ID NO: 541850 - DNA, 33 bp, Homo sapien
ggaaaagtatcatttcgaacatacagcatatat

SEQ ID NO: 541851 - DNA, 33 bp, Homo sapien
cagtggatattggtcacaatttattcattttat

SEQ ID NO: 541852 - DNA, 33 bp, Homo sapien
cagtggatattggtcataatttattcattttat

SEQ ID NO: 541853 - DNA, 33 bp, Homo sapien
ctaaacgaaatatgtaaaaagcacttataacca

SEQ ID NO: 541854 - DNA, 33 bp, Homo sapien
ctaaacgaaatatgtagaaagcacttataacca

SEQ ID NO: 541855 - DNA, 33 bp, Homo sapien
tgagggctcaaaggcaacttgacattaagaaac

SEQ ID NO: 541856 - DNA, 33 bp, Homo sapien
tgagggctcaaaggcagcttgacattaagaaac

SEQ ID NO: 541857 - DNA, 33 bp, Homo sapien
caaaaaggagtttcacaaattccttcacatttc

SEQ ID NO: 541858 - DNA, 33 bp, Homo sapien
caaaaaggagtttcaccaattccttcacatttc

SEQ ID NO: 541859 - DNA, 33 bp, Homo sapien
gacatttaagtgaagacaaacgttgagtataca

SEQ ID NO: 541860 - DNA, 33 bp, Homo sapien
gacatttaagtgaagataaacgttgagtataca

SEQ ID NO: 541861 - DNA, 33 bp, Homo sapien
taaatcagctataggacagagtgttttgatgcc

SEQ ID NO: 541862 - DNA, 33 bp, Homo sapien
taaatcagctataggatagagtgttttgatgcc

SEQ ID NO: 541863 - DNA, 33 bp, Homo sapien
tgatttctctatattgcaaatacaagccatgag

SEQ ID NO: 541864 - DNA, 33 bp, Homo sapien
tgatttctctatattggaaatacaagccatgag

SEQ ID NO: 541865 - DNA, 33 bp, Homo sapien
agagttgctaatgtagcactgagaattcctgtt

SEQ ID NO: 541866 - DNA, 33 bp, Homo sapien
agagttgctaatgtagtactgagaattcctgtt

SEQ ID NO: 541867 - DNA, 33 bp, Homo sapien
tctattcctagaagccaaaagaattataaattt

SEQ ID NO: 541868 - DNA, 33 bp, Homo sapien
tctattcctagaagccgaaagaattataaattt

SEQ ID NO: 541869 - DNA, 33 bp, Homo sapien
acctctaggccagcagaatcaatgttgtgggaa

SEQ ID NO: 541870 - DNA, 33 bp, Homo sapien
acctctaggccagcaggatcaatgttgtgggaa

SEQ ID NO: 541871 - DNA, 33 bp, Homo sapien
agaagacacatttgccagatcaatgactacaca

SEQ ID NO: 541872 - DNA, 33 bp, Homo sapien
agaagacacatttgccggatcaatgactacaca

SEQ ID NO: 541873 - DNA, 33 bp, Homo sapien
tctaaggaagattagacgagcttatagaggcat

SEQ ID NO: 541874 - DNA, 33 bp, Homo sapien
tctaaggaagattagatgagcttatagaggcat

SEQ ID NO: 541875 - DNA, 33 bp, Homo sapien
tcagtggattactaaaatagtcagtggattagt

SEQ ID NO: 541876 - DNA, 33 bp, Homo sapien
tcagtggattactaaagtagtcagtggattagt

SEQ ID NO: 541877 - DNA, 33 bp, Homo sapien
aaaattaactgtaggacgtttaattccagcaat

SEQ ID NO: 541878 - DNA, 33 bp, Homo sapien
aaaattaactgtaggatgtttaattccagcaat

SEQ ID NO: 541879 - DNA, 33 bp, Homo sapien
tttcccacaactttcacagatattttttcgaca

SEQ ID NO: 541880 - DNA, 33 bp, Homo sapien
tttcccacaactttcagagatattttttcgaca

SEQ ID NO: 541881 - DNA, 33 bp, Homo sapien
gtacaaagttaaacatcaagattagtgacacct

SEQ ID NO: 541882 - DNA, 33 bp, Homo sapien
gtacaaagttaaacatgaagattagtgacacct

SEQ ID NO: 541883 - DNA, 33 bp, Homo sapien
gacctaaattcctaagcatggcttcaaaggaac

SEQ ID NO: 541884 - DNA, 33 bp, Homo sapien
gacctaaattcctaagtatggcttcaaaggaac

SEQ ID NO: 541885 - DNA, 33 bp, Homo sapien
tggtacttatggggcaaatcttcatggttgatt

SEQ ID NO: 541886 - DNA, 33 bp, Homo sapien
tggtacttatggggcatatcttcatggttgatt

SEQ ID NO: 541887 - DNA, 33 bp, Homo sapien
gtcttttgaattaatcaagtcagacaaaagtga

SEQ ID NO: 541888 - DNA, 33 bp, Homo sapien
gtcttttgaattaatcgagtcagacaaaagtga

SEQ ID NO: 541889 - DNA, 33 bp, Homo sapien
gattctttaactggtacggcacactaaaaacaa

SEQ ID NO: 541890 - DNA, 33 bp, Homo sapien
gattctttaactggtatggcacactaaaaacaa

SEQ ID NO: 541891 - DNA, 33 bp, Homo sapien
tgaaaatgtggcaataatagaatagcaaaaaag

SEQ ID NO: 541892 - DNA, 33 bp, Homo sapien
tgaaaatgtggcaatagtagaatagcaaaaaag

SEQ ID NO: 541893 - DNA, 33 bp, Homo sapien
aagcctgcaaggcagccattagagactgtacct

SEQ ID NO: 541894 - DNA, 33 bp, Homo sapien
aagcctgcaaggcagctattagagactgtacct

SEQ ID NO: 541895 - DNA, 33 bp, Homo sapien
aaggctaacttatttgcattattggctaagggg

SEQ ID NO: 541896 - DNA, 33 bp, Homo sapien
aaggctaacttatttgtattattggctaagggg

SEQ ID NO: 541897 - DNA, 33 bp, Homo sapien
ctcttccctgctttaacctgcttccattcctca

SEQ ID NO: 541898 - DNA, 33 bp, Homo sapien
ctcttccctgctttaatctgcttccattcctca

SEQ ID NO: 541899 - DNA, 33 bp, Homo sapien
tgcacgtgtgtgtatacgccattaacaaagata

SEQ ID NO: 541900 - DNA, 33 bp, Homo sapien
tgcacgtgtgtgtatatgccattaacaaagata

SEQ ID NO: 541901 - DNA, 33 bp, Homo sapien
atcctgtcaaatcacacatattagaatccacat

SEQ ID NO: 541902 - DNA, 33 bp, Homo sapien
atcctgtcaaatcacatatattagaatccacat

SEQ ID NO: 541903 - DNA, 33 bp, Homo sapien
agaggaagctttgcaaatgaaaaaaaaatactc

SEQ ID NO: 541904 - DNA, 33 bp, Homo sapien
agaggaagctttgcaattgaaaaaaaaatactc

SEQ ID NO: 541905 - DNA, 33 bp, Homo sapien
agaaaaggacagagaacgaccaatgttatttta

SEQ ID NO: 541906 - DNA, 33 bp, Homo sapien
agaaaaggacagagaatgaccaatgttatttta

SEQ ID NO: 541907 - DNA, 33 bp, Homo sapien
gactattggcaaccaccagaagttaggagaaag

SEQ ID NO: 541908 - DNA, 33 bp, Homo sapien
gactattggcaaccacgagaagttaggagaaag

SEQ ID NO: 541909 - DNA, 33 bp, Homo sapien
gcgcccgttgaaaacacaggtttgtcctgaact

SEQ ID NO: 541910 - DNA, 33 bp, Homo sapien
gcgcccgttgaaaacataggtttgtcctgaact

SEQ ID NO: 541911 - DNA, 33 bp, Homo sapien
ctataaagatttagcaatatatgaagcattata

SEQ ID NO: 541912 - DNA, 33 bp, Homo sapien
ctataaagatttagcagtatatgaagcattata

SEQ ID NO: 541913 - DNA, 33 bp, Homo sapien
aggtagcaataaattacgaacaacgtgagtgca

SEQ ID NO: 541914 - DNA, 33 bp, Homo sapien
aggtagcaataaattatgaacaacgtgagtgca

SEQ ID NO: 541915 - DNA, 33 bp, Homo sapien
taaacaagtgcaattacgtgtaaaaacagttag

SEQ ID NO: 541916 - DNA, 33 bp, Homo sapien
taaacaagtgcaattatgtgtaaaaacagttag

SEQ ID NO: 541917 - DNA, 33 bp, Homo sapien
tacaatcctgccctaccgcctgatatttaatat

SEQ ID NO: 541918 - DNA, 33 bp, Homo sapien
tacaatcctgccctactgcctgatatttaatat

SEQ ID NO: 541919 - DNA, 33 bp, Homo sapien
agctttgcattttgccgaaggtatggatgatgc

SEQ ID NO: 541920 - DNA, 33 bp, Homo sapien
agctttgcattttgcctaaggtatggatgatgc

SEQ ID NO: 541921 - DNA, 33 bp, Homo sapien
gtaagtatttgcagataaaccgtctgtcaactt

SEQ ID NO: 541922 - DNA, 33 bp, Homo sapien
gtaagtatttgcagattaaccgtctgtcaactt

SEQ ID NO: 541923 - DNA, 33 bp, Homo sapien
aaaaatctgttcaggccattgtagctcagtctg

SEQ ID NO: 541924 - DNA, 33 bp, Homo sapien
aaaaatctgttcaggctattgtagctcagtctg

SEQ ID NO: 541925 - DNA, 33 bp, Homo sapien
acatttagggaattaaaatgtgaataatagtga

SEQ ID NO: 541926 - DNA, 33 bp, Homo sapien
acatttagggaattaatatgtgaataatagtga

SEQ ID NO: 541927 - DNA, 33 bp, Homo sapien
tgttaattggttggcactaagtgtggtttgagg

SEQ ID NO: 541928 - DNA, 33 bp, Homo sapien
tgttaattggttggcattaagtgtggtttgagg

SEQ ID NO: 541929 - DNA, 33 bp, Homo sapien
cagaatagtgcttgtcgcattatgttctgtatt

SEQ ID NO: 541930 - DNA, 33 bp, Homo sapien
cagaatagtgcttgtctcattatgttctgtatt

SEQ ID NO: 541931 - DNA, 33 bp, Homo sapien
gcccagggtttccatacaaatcgttttattttt

SEQ ID NO: 541932 - DNA, 33 bp, Homo sapien
gcccagggtttccatataaatcgttttattttt

SEQ ID NO: 541933 - DNA, 33 bp, Homo sapien
tttccaactgaagctaaattgtggctgcatatt

SEQ ID NO: 541934 - DNA, 33 bp, Homo sapien
tttccaactgaagctacattgtggctgcatatt

SEQ ID NO: 541935 - DNA, 33 bp, Homo sapien
gttttataagactaagaatataggtgggataac

SEQ ID NO: 541936 - DNA, 33 bp, Homo sapien
gttttataagactaagcatataggtgggataac

SEQ ID NO: 541937 - DNA, 33 bp, Homo sapien
agagatcttgaagtgaatatcaatacatttctg

SEQ ID NO: 541938 - DNA, 33 bp, Homo sapien
agagatcttgaagtgagtatcaatacatttctg

SEQ ID NO: 541939 - DNA, 33 bp, Homo sapien
gaggcaataagttggacgactggaccatgctaa

SEQ ID NO: 541940 - DNA, 33 bp, Homo sapien
gaggcaataagttggatgactggaccatgctaa

SEQ ID NO: 541941 - DNA, 33 bp, Homo sapien
agaggaaagtacataaacttgaaaattgagtga

SEQ ID NO: 541942 - DNA, 33 bp, Homo sapien
agaggaaagtacataaccttgaaaattgagtga

SEQ ID NO: 541943 - DNA, 33 bp, Homo sapien
taaaaatgggagaaataaggttagataggagta

SEQ ID NO: 541944 - DNA, 33 bp, Homo sapien
taaaaatgggagaaatgaggttagataggagta

SEQ ID NO: 541945 - DNA, 33 bp, Homo sapien
attgcttgtcctaaaccgcatcataatcctgat

SEQ ID NO: 541946 - DNA, 33 bp, Homo sapien
attgcttgtcctaaactgcatcataatcctgat

SEQ ID NO: 541947 - DNA, 33 bp, Homo sapien
ctgtccttctacattcaattcaacaatttgatc

SEQ ID NO: 541948 - DNA, 33 bp, Homo sapien
ctgtccttctacattcgattcaacaatttgatc

SEQ ID NO: 541949 - DNA, 33 bp, Homo sapien
cagatcacctcagctaatagagatttttaggtt

SEQ ID NO: 541950 - DNA, 33 bp, Homo sapien
cagatcacctcagctagtagagatttttaggtt

SEQ ID NO: 541951 - DNA, 33 bp, Homo sapien
tgattaattgattgaaacagtaaaggcaattgt

SEQ ID NO: 541952 - DNA, 33 bp, Homo sapien
tgattaattgattgaatcagtaaaggcaattgt

SEQ ID NO: 541953 - DNA, 33 bp, Homo sapien
gtaactgaaatatacaatgcaaaagaacctccc

SEQ ID NO: 541954 - DNA, 33 bp, Homo sapien
gtaactgaaatatacagtgcaaaagaacctccc

SEQ ID NO: 541955 - DNA, 33 bp, Homo sapien
acatttccacgtcagcacctttgtaccagttct

SEQ ID NO: 541956 - DNA, 33 bp, Homo sapien
acatttccacgtcagcgcctttgtaccagttct

SEQ ID NO: 541957 - DNA, 33 bp, Homo sapien
agtgataagggataccgctaaggatgctaggca

SEQ ID NO: 541958 - DNA, 33 bp, Homo sapien
agtgataagggatacctctaaggatgctaggca

SEQ ID NO: 541959 - DNA, 33 bp, Homo sapien
aaccaccatatgccaaactatgtatccagttgc

SEQ ID NO: 541960 - DNA, 33 bp, Homo sapien
aaccaccatatgccaagctatgtatccagttgc

SEQ ID NO: 541961 - DNA, 33 bp, Homo sapien
atttcaggttacaaaaaatagacatagagttgt

SEQ ID NO: 541962 - DNA, 33 bp, Homo sapien
atttcaggttacaaaagatagacatagagttgt

SEQ ID NO: 541963 - DNA, 33 bp, Homo sapien
tcataagtgcataggaaaatttgacactgctga

SEQ ID NO: 541964 - DNA, 33 bp, Homo sapien
tcataagtgcataggacaatttgacactgctga

SEQ ID NO: 541965 - DNA, 33 bp, Homo sapien
ttcccaagattatgcaactacttaaatggctga

SEQ ID NO: 541966 - DNA, 33 bp, Homo sapien
ttcccaagattatgcagctacttaaatggctga

SEQ ID NO: 541967 - DNA, 33 bp, Homo sapien
aggagaaattcctcaacatagaattggtaatat

SEQ ID NO: 541968 - DNA, 33 bp, Homo sapien
aggagaaattcctcaagatagaattggtaatat

SEQ ID NO: 541969 - DNA, 33 bp, Homo sapien
ggggtgttaggggaagcatattatcaggataaa

SEQ ID NO: 541970 - DNA, 33 bp, Homo sapien
ggggtgttaggggaaggatattatcaggataaa

SEQ ID NO: 541971 - DNA, 33 bp, Homo sapien
tgccgagacagatccaacctgagacacaggtac

SEQ ID NO: 541972 - DNA, 33 bp, Homo sapien
tgccgagacagatccatcctgagacacaggtac

SEQ ID NO: 541973 - DNA, 33 bp, Homo sapien
agagctaatagaggcacgttttctatagcaata

SEQ ID NO: 541974 - DNA, 33 bp, Homo sapien
agagctaatagaggcatgttttctatagcaata

SEQ ID NO: 541975 - DNA, 33 bp, Homo sapien
taaaatgtctacataaatacaaagatgccaaat

SEQ ID NO: 541976 - DNA, 33 bp, Homo sapien
taaaatgtctacataattacaaagatgccaaat

SEQ ID NO: 541977 - DNA, 33 bp, Homo sapien
acaatgttttaccttcaagcaaaagtgtcgaaa

SEQ ID NO: 541978 - DNA, 33 bp, Homo sapien
acaatgttttaccttccagcaaaagtgtcgaaa

SEQ ID NO: 541979 - DNA, 33 bp, Homo sapien
tgagctcaatttctaaatcaaaaccagtaaaga

SEQ ID NO: 541980 - DNA, 33 bp, Homo sapien
tgagctcaatttctaagtcaaaaccagtaaaga

SEQ ID NO: 541981 - DNA, 33 bp, Homo sapien
aaagattatgagtaggccaagtagatgacagga

SEQ ID NO: 541982 - DNA, 33 bp, Homo sapien
aaagattatgagtaggtcaagtagatgacagga

SEQ ID NO: 541983 - DNA, 33 bp, Homo sapien
ctctttcattggcagacaatttttgcttctacc

SEQ ID NO: 541984 - DNA, 33 bp, Homo sapien
ctctttcattggcagataatttttgcttctacc

SEQ ID NO: 541985 - DNA, 33 bp, Homo sapien
ctgcaaatatgagacccaaggcagagccagatg

SEQ ID NO: 541986 - DNA, 33 bp, Homo sapien
ctgcaaatatgagacctaaggcagagccagatg

SEQ ID NO: 541987 - DNA, 33 bp, Homo sapien
agtggaaattgagttaaccagtgataacattat

SEQ ID NO: 541988 - DNA, 33 bp, Homo sapien
agtggaaattgagttacccagtgataacattat

SEQ ID NO: 541989 - DNA, 33 bp, Homo sapien
aactcaactatcaaaaacattgctgttattatt

SEQ ID NO: 541990 - DNA, 33 bp, Homo sapien
aactcaactatcaaaagcattgctgttattatt

SEQ ID NO: 541991 - DNA, 33 bp, Homo sapien
cttgcatcagtttccagtagatgggagaaagga

SEQ ID NO: 541992 - DNA, 33 bp, Homo sapien
cttgcatcagtttccattagatgggagaaagga

SEQ ID NO: 541993 - DNA, 33 bp, Homo sapien
cattgtgtggattgtcagaaaactagaaagatg

SEQ ID NO: 541994 - DNA, 33 bp, Homo sapien
cattgtgtggattgtcggaaaactagaaagatg

SEQ ID NO: 541995 - DNA, 33 bp, Homo sapien
atgtggaataggagtcaaagttgtttaaggtgt

SEQ ID NO: 541996 - DNA, 33 bp, Homo sapien
atgtggaataggagtccaagttgtttaaggtgt

SEQ ID NO: 541997 - DNA, 33 bp, Homo sapien
aatacatttacttgccaatgtggtgcggtaaga

SEQ ID NO: 541998 - DNA, 33 bp, Homo sapien
aatacatttacttgcctatgtggtgcggtaaga

SEQ ID NO: 541999 - DNA, 33 bp, Homo sapien
ccagagagttttagaaagaagcagatccaagaa

SEQ ID NO: 542000 - DNA, 33 bp, Homo sapien
ccagagagttttagaacgaagcagatccaagaa

SEQ ID NO: 542001 - DNA, 33 bp, Homo sapien
cactcctgactacacaacaaagtgagaccttgt

SEQ ID NO: 542002 - DNA, 33 bp, Homo sapien
cactcctgactacacagcaaagtgagaccttgt

SEQ ID NO: 542003 - DNA, 33 bp, Homo sapien
ttgggctttcatccagaagatagcatttattag

SEQ ID NO: 542004 - DNA, 33 bp, Homo sapien
ttgggctttcatccagtagatagcatttattag

SEQ ID NO: 542005 - DNA, 33 bp, Homo sapien
aaggagatggtaagataataggacttccacatc

SEQ ID NO: 542006 - DNA, 33 bp, Homo sapien
aaggagatggtaagatgataggacttccacatc

SEQ ID NO: 542007 - DNA, 33 bp, Homo sapien
tttgaaaacatttaaaactagcatggtgaaact

SEQ ID NO: 542008 - DNA, 33 bp, Homo sapien
tttgaaaacatttaaatctagcatggtgaaact

SEQ ID NO: 542009 - DNA, 33 bp, Homo sapien
tttttgtaggctgctacgatacttaggcccaaa

SEQ ID NO: 542010 - DNA, 33 bp, Homo sapien
tttttgtaggctgctatgatacttaggcccaaa

SEQ ID NO: 542011 - DNA, 33 bp, Homo sapien
tctcttgctgccactacgtaagaagttcccctc

SEQ ID NO: 542012 - DNA, 33 bp, Homo sapien
tctcttgctgccactatgtaagaagttcccctc

SEQ ID NO: 542013 - DNA, 33 bp, Homo sapien
ggtcttactgtgagaaatgagaaaccattggag

SEQ ID NO: 542014 - DNA, 33 bp, Homo sapien
ggtcttactgtgagaagtgagaaaccattggag

SEQ ID NO: 542015 - DNA, 33 bp, Homo sapien
tgttgtagagaataatcagctttactcaacatc

SEQ ID NO: 542016 - DNA, 33 bp, Homo sapien
tgttgtagagaataatgagctttactcaacatc

SEQ ID NO: 542017 - DNA, 33 bp, Homo sapien
gcaaagatttcaattcaatgagaagacctaact

SEQ ID NO: 542018 - DNA, 33 bp, Homo sapien
gcaaagatttcaattcgatgagaagacctaact

SEQ ID NO: 542019 - DNA, 33 bp, Homo sapien
tgtcatactctgccacaagtgcttaggcaccaa

SEQ ID NO: 542020 - DNA, 33 bp, Homo sapien
tgtcatactctgccacgagtgcttaggcaccaa

SEQ ID NO: 542021 - DNA, 33 bp, Homo sapien
tgtgggaactcaaccaatgggtagactcctatt

SEQ ID NO: 542022 - DNA, 33 bp, Homo sapien
tgtgggaactcaaccagtgggtagactcctatt

SEQ ID NO: 542023 - DNA, 33 bp, Homo sapien
gactacaagcctttaaccccagagcagaccagc

SEQ ID NO: 542024 - DNA, 33 bp, Homo sapien
gactacaagcctttaatcccagagcagaccagc

SEQ ID NO: 542025 - DNA, 33 bp, Homo sapien
acagagggacttgcaaaattcaacagcttcttg

SEQ ID NO: 542026 - DNA, 33 bp, Homo sapien
acagagggacttgcaagattcaacagcttcttg

SEQ ID NO: 542027 - DNA, 33 bp, Homo sapien
ataaacttgatgtgaacgttctttgataccaat

SEQ ID NO: 542028 - DNA, 33 bp, Homo sapien
ataaacttgatgtgaatgttctttgataccaat

SEQ ID NO: 542029 - DNA, 33 bp, Homo sapien
aaaatcctaacacttaacaaagagagcagaact

SEQ ID NO: 542030 - DNA, 33 bp, Homo sapien
aaaatcctaacacttatcaaagagagcagaact

SEQ ID NO: 542031 - DNA, 33 bp, Homo sapien
gctgcctgccttttatcagattaagaaagctgt

SEQ ID NO: 542032 - DNA, 33 bp, Homo sapien
gctgcctgccttttatgagattaagaaagctgt

SEQ ID NO: 542033 - DNA, 33 bp, Homo sapien
atggaagattttgtccaacagaatacaatttaa

SEQ ID NO: 542034 - DNA, 33 bp, Homo sapien
atggaagattttgtccgacagaatacaatttaa

SEQ ID NO: 542035 - DNA, 33 bp, Homo sapien
aggaacttctattttccacactcaattctaagc

SEQ ID NO: 542036 - DNA, 33 bp, Homo sapien
aggaacttctattttctacactcaattctaagc

SEQ ID NO: 542037 - DNA, 33 bp, Homo sapien
ggagaaaaatagaaagacagacaaggaaatagc

SEQ ID NO: 542038 - DNA, 33 bp, Homo sapien
ggagaaaaatagaaagccagacaaggaaatagc

SEQ ID NO: 542039 - DNA, 33 bp, Homo sapien
ggggaaatcaccaggaatataaatgcaaattag

SEQ ID NO: 542040 - DNA, 33 bp, Homo sapien
ggggaaatcaccaggagtataaatgcaaattag

SEQ ID NO: 542041 - DNA, 33 bp, Homo sapien
cttttggcagccctaaaaaaggtgtccgcggct

SEQ ID NO: 542042 - DNA, 33 bp, Homo sapien
cttttggcagccctaagaaaggtgtccgcggct

SEQ ID NO: 542043 - DNA, 33 bp, Homo sapien
gctgtaccagctcaagaccctttgtttctttaa

SEQ ID NO: 542044 - DNA, 33 bp, Homo sapien
gctgtaccagctcaaggccctttgtttctttaa

SEQ ID NO: 542045 - DNA, 33 bp, Homo sapien
aattctttgcttgagaaatttatagttttgtgg

SEQ ID NO: 542046 - DNA, 33 bp, Homo sapien
aattctttgcttgagatatttatagttttgtgg

SEQ ID NO: 542047 - DNA, 33 bp, Homo sapien
cagtaattcttcgaaaatataatcagatcatgc

SEQ ID NO: 542048 - DNA, 33 bp, Homo sapien
cagtaattcttcgaaactataatcagatcatgc

SEQ ID NO: 542049 - DNA, 33 bp, Homo sapien
aaaagaatggaagaaaaagatatcagtccttcc

SEQ ID NO: 542050 - DNA, 33 bp, Homo sapien
aaaagaatggaagaaagagatatcagtccttcc

SEQ ID NO: 542051 - DNA, 33 bp, Homo sapien
cagactataaacatgaaagttgcttttttaaaa

SEQ ID NO: 542052 - DNA, 33 bp, Homo sapien
cagactataaacatgagagttgcttttttaaaa

SEQ ID NO: 542053 - DNA, 33 bp, Homo sapien
aatagactgattctcagctaaccttgtcactta

SEQ ID NO: 542054 - DNA, 33 bp, Homo sapien
aatagactgattctcatctaaccttgtcactta

SEQ ID NO: 542055 - DNA, 33 bp, Homo sapien
ttgactgataacaaagcaagagctacagcattt

SEQ ID NO: 542056 - DNA, 33 bp, Homo sapien
ttgactgataacaaaggaagagctacagcattt

SEQ ID NO: 542057 - DNA, 33 bp, Homo sapien
gctttcttcacatagaaagctgaaaagttaatg

SEQ ID NO: 542058 - DNA, 33 bp, Homo sapien
gctttcttcacatagagagctgaaaagttaatg

SEQ ID NO: 542059 - DNA, 33 bp, Homo sapien
ggtatttagaaacacacgctttatgatttcttt

SEQ ID NO: 542060 - DNA, 33 bp, Homo sapien
ggtatttagaaacacaggctttatgatttcttt

SEQ ID NO: 542061 - DNA, 33 bp, Homo sapien
tttaggttcttcagtacatatgagtagatatag

SEQ ID NO: 542062 - DNA, 33 bp, Homo sapien
tttaggttcttcagtatatatgagtagatatag

SEQ ID NO: 542063 - DNA, 33 bp, Homo sapien
tcaaaaatcatgcaagacattccaaattcaaat

SEQ ID NO: 542064 - DNA, 33 bp, Homo sapien
tcaaaaatcatgcaaggcattccaaattcaaat

SEQ ID NO: 542065 - DNA, 33 bp, Homo sapien
tgtccttcctcatagcaattcctaccttttcta

SEQ ID NO: 542066 - DNA, 33 bp, Homo sapien
tgtccttcctcatagcgattcctaccttttcta

SEQ ID NO: 542067 - DNA, 33 bp, Homo sapien
tctgacgtccagaaaccggctacctaactagat

SEQ ID NO: 542068 - DNA, 33 bp, Homo sapien
tctgacgtccagaaactggctacctaactagat

SEQ ID NO: 542069 - DNA, 33 bp, Homo sapien
ttttacaaagtgctgaactagatttccaatgtg

SEQ ID NO: 542070 - DNA, 33 bp, Homo sapien
ttttacaaagtgctgagctagatttccaatgtg

SEQ ID NO: 542071 - DNA, 33 bp, Homo sapien
agttttgcctgattccaaagtcccctagccctt

SEQ ID NO: 542072 - DNA, 33 bp, Homo sapien
agttttgcctgattccgaagtcccctagccctt

SEQ ID NO: 542073 - DNA, 33 bp, Homo sapien
ctggttgtaagagagacgtcaggaaattagatc

SEQ ID NO: 542074 - DNA, 33 bp, Homo sapien
ctggttgtaagagagatgtcaggaaattagatc

SEQ ID NO: 542075 - DNA, 33 bp, Homo sapien
caagagccgaacaatacagggccttaagacaca

SEQ ID NO: 542076 - DNA, 33 bp, Homo sapien
caagagccgaacaatatagggccttaagacaca

SEQ ID NO: 542077 - DNA, 33 bp, Homo sapien
catcaagagatgaaaacgaatgaagtcagccag

SEQ ID NO: 542078 - DNA, 33 bp, Homo sapien
catcaagagatgaaaatgaatgaagtcagccag

SEQ ID NO: 542079 - DNA, 33 bp, Homo sapien
tgctctatgctaatggcaggttttttttttatt

SEQ ID NO: 542080 - DNA, 33 bp, Homo sapien
tgctctatgctaatggtaggttttttttttatt

SEQ ID NO: 542081 - DNA, 33 bp, Homo sapien
tctcaaaaataattaccgagcagctaaagtaca

SEQ ID NO: 542082 - DNA, 33 bp, Homo sapien
tctcaaaaataattactgagcagctaaagtaca

SEQ ID NO: 542083 - DNA, 33 bp, Homo sapien
gtatggtcctcaaatacgccaaattggtatatt

SEQ ID NO: 542084 - DNA, 33 bp, Homo sapien
gtatggtcctcaaatatgccaaattggtatatt

SEQ ID NO: 542085 - DNA, 33 bp, Homo sapien
ctagattagtacacatcatcacctatattattt

SEQ ID NO: 542086 - DNA, 33 bp, Homo sapien
ctagattagtacacattatcacctatattattt

SEQ ID NO: 542087 - DNA, 33 bp, Homo sapien
gtggaagatgatgtggaagtttctcagagatcc

SEQ ID NO: 542088 - DNA, 33 bp, Homo sapien
gtggaagatgatgtggcagtttctcagagatcc

SEQ ID NO: 542089 - DNA, 33 bp, Homo sapien
acagtagaacagttagaaaccaaggtctccaga

SEQ ID NO: 542090 - DNA, 33 bp, Homo sapien
acagtagaacagttaggaaccaaggtctccaga

SEQ ID NO: 542091 - DNA, 33 bp, Homo sapien
ttggatccatttcaccacatagttatttgtcag

SEQ ID NO: 542092 - DNA, 33 bp, Homo sapien
ttggatccatttcaccgcatagttatttgtcag

SEQ ID NO: 542093 - DNA, 33 bp, Homo sapien
aagaattgctccatgaagtcaaaaacacttttc

SEQ ID NO: 542094 - DNA, 33 bp, Homo sapien
aagaattgctccatgacgtcaaaaacacttttc

SEQ ID NO: 542095 - DNA, 33 bp, Homo sapien
tgtgaactcttttttaagattggttcacagcat

SEQ ID NO: 542096 - DNA, 33 bp, Homo sapien
tgtgaactcttttttatgattggttcacagcat

SEQ ID NO: 542097 - DNA, 33 bp, Homo sapien
agtggtatctaaacataatgaagttcctctgga

SEQ ID NO: 542098 - DNA, 33 bp, Homo sapien
agtggtatctaaacatcatgaagttcctctgga

SEQ ID NO: 542099 - DNA, 33 bp, Homo sapien
actgagtggaatatagacaggttaattgcccta

SEQ ID NO: 542100 - DNA, 33 bp, Homo sapien
actgagtggaatatagtcaggttaattgcccta

SEQ ID NO: 542101 - DNA, 33 bp, Homo sapien
tttgtttttatggttacgggatgaagttttcta

SEQ ID NO: 542102 - DNA, 33 bp, Homo sapien
tttgtttttatggttatgggatgaagttttcta

SEQ ID NO: 542103 - DNA, 33 bp, Homo sapien
gccaccaagcaaggaaaaagaactggaagagct

SEQ ID NO: 542104 - DNA, 33 bp, Homo sapien
gccaccaagcaaggaacaagaactggaagagct

SEQ ID NO: 542105 - DNA, 33 bp, Homo sapien
ttcaggcagcagatgaagggaatacacaacaca

SEQ ID NO: 542106 - DNA, 33 bp, Homo sapien
ttcaggcagcagatgacgggaatacacaacaca

SEQ ID NO: 542107 - DNA, 33 bp, Homo sapien
tatctcccattaaatcaatttgtgccttgctct

SEQ ID NO: 542108 - DNA, 33 bp, Homo sapien
tatctcccattaaatcgatttgtgccttgctct

SEQ ID NO: 542109 - DNA, 33 bp, Homo sapien
taacacatttttagaaagtcttgaatccttggt

SEQ ID NO: 542110 - DNA, 33 bp, Homo sapien
taacacatttttagaaggtcttgaatccttggt

SEQ ID NO: 542111 - DNA, 33 bp, Homo sapien
aaaacattttggatttcaaatacatatatacac

SEQ ID NO: 542112 - DNA, 33 bp, Homo sapien
aaaacattttggatttgaaatacatatatacac

SEQ ID NO: 542113 - DNA, 33 bp, Homo sapien
tattgttacgtgattccagataatatttctatc

SEQ ID NO: 542114 - DNA, 33 bp, Homo sapien
tattgttacgtgattctagataatatttctatc

SEQ ID NO: 542115 - DNA, 33 bp, Homo sapien
gttataatgccttcttcggttgacaagttctaa

SEQ ID NO: 542116 - DNA, 33 bp, Homo sapien
gttataatgccttctttggttgacaagttctaa

SEQ ID NO: 542117 - DNA, 33 bp, Homo sapien
aaaactcctactgtaacagctttcttgggaatc

SEQ ID NO: 542118 - DNA, 33 bp, Homo sapien
aaaactcctactgtaatagctttcttgggaatc

SEQ ID NO: 542119 - DNA, 33 bp, Homo sapien
ggttaagactacagaaacttctaaacaaagtct

SEQ ID NO: 542120 - DNA, 33 bp, Homo sapien
ggttaagactacagaatcttctaaacaaagtct

SEQ ID NO: 542121 - DNA, 33 bp, Homo sapien
atgcccttaaattttaccagcagatggtcagac

SEQ ID NO: 542122 - DNA, 33 bp, Homo sapien
atgcccttaaattttatcagcagatggtcagac

SEQ ID NO: 542123 - DNA, 33 bp, Homo sapien
gtatggaaaatctgcaatacccatacaatgggg

SEQ ID NO: 542124 - DNA, 33 bp, Homo sapien
gtatggaaaatctgcagtacccatacaatgggg

SEQ ID NO: 542125 - DNA, 33 bp, Homo sapien
tgagaacttaacattaaaatcagaatacaaatg

SEQ ID NO: 542126 - DNA, 33 bp, Homo sapien
tgagaacttaacattagaatcagaatacaaatg

SEQ ID NO: 542127 - DNA, 33 bp, Homo sapien
tcagcttaagtgctcaagatagattcttctcac

SEQ ID NO: 542128 - DNA, 33 bp, Homo sapien
tcagcttaagtgctcaggatagattcttctcac

SEQ ID NO: 542129 - DNA, 33 bp, Homo sapien
aaatattgctgccttacccttcttctggaagct

SEQ ID NO: 542130 - DNA, 33 bp, Homo sapien
aaatattgctgccttatccttcttctggaagct

SEQ ID NO: 542131 - DNA, 33 bp, Homo sapien
gactttgttgcttccaataatttctctgttgaa

SEQ ID NO: 542132 - DNA, 33 bp, Homo sapien
gactttgttgcttccattaatttctctgttgaa

SEQ ID NO: 542133 - DNA, 33 bp, Homo sapien
ataacaacactcctagaaagatccgataaattt

SEQ ID NO: 542134 - DNA, 33 bp, Homo sapien
ataacaacactcctagcaagatccgataaattt

SEQ ID NO: 542135 - DNA, 33 bp, Homo sapien
tatttaagccttacaacgaggtataatgtttgc

SEQ ID NO: 542136 - DNA, 33 bp, Homo sapien
tatttaagccttacaaggaggtataatgtttgc

SEQ ID NO: 542137 - DNA, 33 bp, Homo sapien
tatcaatgttacataagataaatcctcatattc

SEQ ID NO: 542138 - DNA, 33 bp, Homo sapien
tatcaatgttacataatataaatcctcatattc

SEQ ID NO: 542139 - DNA, 33 bp, Homo sapien
ttctcaactgtgaaatcaggagttgatacctga

SEQ ID NO: 542140 - DNA, 33 bp, Homo sapien
ttctcaactgtgaaattaggagttgatacctga

SEQ ID NO: 542141 - DNA, 33 bp, Homo sapien
gaaacattatatgtaaagaaagctgcataagaa

SEQ ID NO: 542142 - DNA, 33 bp, Homo sapien
gaaacattatatgtaaggaaagctgcataagaa

SEQ ID NO: 542143 - DNA, 33 bp, Homo sapien
atttacatcagaaacaatgggcttgatagaaaa

SEQ ID NO: 542144 - DNA, 33 bp, Homo sapien
atttacatcagaaacagtgggcttgatagaaaa

SEQ ID NO: 542145 - DNA, 33 bp, Homo sapien
tggctcatctatgcagacgacttttggattttt

SEQ ID NO: 542146 - DNA, 33 bp, Homo sapien
tggctcatctatgcaggcgacttttggattttt

SEQ ID NO: 542147 - DNA, 33 bp, Homo sapien
atttttcctttctgtccctgtaactttaagtaa

SEQ ID NO: 542148 - DNA, 33 bp, Homo sapien
atttttcctttctgtctctgtaactttaagtaa

SEQ ID NO: 542149 - DNA, 33 bp, Homo sapien
tgcttcaactgttagaccacattaggatagcat

SEQ ID NO: 542150 - DNA, 33 bp, Homo sapien
tgcttcaactgttagatcacattaggatagcat

SEQ ID NO: 542151 - DNA, 33 bp, Homo sapien
gagttttcaacattcagtactgaggtgaggggt

SEQ ID NO: 542152 - DNA, 33 bp, Homo sapien
gagttttcaacattcattactgaggtgaggggt

SEQ ID NO: 542153 - DNA, 33 bp, Homo sapien
ctgtgccaagaatgtgaagggataaataaaagt

SEQ ID NO: 542154 - DNA, 33 bp, Homo sapien
ctgtgccaagaatgtgtagggataaataaaagt

SEQ ID NO: 542155 - DNA, 33 bp, Homo sapien
atagcctcttgtgaatcatccctaaaatgatgg

SEQ ID NO: 542156 - DNA, 33 bp, Homo sapien
atagcctcttgtgaattatccctaaaatgatgg

SEQ ID NO: 542157 - DNA, 33 bp, Homo sapien
attaaggacatggagaagagtgactcaatagta

SEQ ID NO: 542158 - DNA, 33 bp, Homo sapien
attaaggacatggagacgagtgactcaatagta

SEQ ID NO: 542159 - DNA, 33 bp, Homo sapien
aataaaatccagtgcaacttgctgtaattgttg

SEQ ID NO: 542160 - DNA, 33 bp, Homo sapien
aataaaatccagtgcagcttgctgtaattgttg

SEQ ID NO: 542161 - DNA, 33 bp, Homo sapien
cccacaacctttataaatgacatcagttttcct

SEQ ID NO: 542162 - DNA, 33 bp, Homo sapien
cccacaacctttataagtgacatcagttttcct

SEQ ID NO: 542163 - DNA, 33 bp, Homo sapien
tcacaccgcacctttcaaatatagaattcagag

SEQ ID NO: 542164 - DNA, 33 bp, Homo sapien
tcacaccgcacctttcgaatatagaattcagag

SEQ ID NO: 542165 - DNA, 33 bp, Homo sapien
ttcaagttgctacaaaataacagtgattgagac

SEQ ID NO: 542166 - DNA, 33 bp, Homo sapien
ttcaagttgctacaaagtaacagtgattgagac

SEQ ID NO: 542167 - DNA, 33 bp, Homo sapien
gtgattgagaccttacaattgcttatctgaggc

SEQ ID NO: 542168 - DNA, 33 bp, Homo sapien
gtgattgagaccttactattgcttatctgaggc

SEQ ID NO: 542169 - DNA, 33 bp, Homo sapien
tgcctgatgtataaatcaagatgcaggataaca

SEQ ID NO: 542170 - DNA, 33 bp, Homo sapien
tgcctgatgtataaattaagatgcaggataaca

SEQ ID NO: 542171 - DNA, 33 bp, Homo sapien
tacaaactccaccagaaaaagccagggcagcta

SEQ ID NO: 542172 - DNA, 33 bp, Homo sapien
tacaaactccaccagagaaagccagggcagcta

SEQ ID NO: 542173 - DNA, 33 bp, Homo sapien
taagaccaggaacactgaggagcattttaatca

SEQ ID NO: 542174 - DNA, 33 bp, Homo sapien
taagaccaggaacacttaggagcattttaatca

SEQ ID NO: 542175 - DNA, 33 bp, Homo sapien
acaacacacattttgaatattctgaaaacaaca

SEQ ID NO: 542176 - DNA, 33 bp, Homo sapien
acaacacacattttgagtattctgaaaacaaca

SEQ ID NO: 542177 - DNA, 33 bp, Homo sapien
tcattgtcatctttccccattcgcaaaggagtc

SEQ ID NO: 542178 - DNA, 33 bp, Homo sapien
tcattgtcatctttcctcattcgcaaaggagtc

SEQ ID NO: 542179 - DNA, 33 bp, Homo sapien
ttctgaattccacagaagaagcatttagaacaa

SEQ ID NO: 542180 - DNA, 33 bp, Homo sapien
ttctgaattccacagaggaagcatttagaacaa

SEQ ID NO: 542181 - DNA, 33 bp, Homo sapien
catgtgtacagtaactaacatagctacccctaa

SEQ ID NO: 542182 - DNA, 33 bp, Homo sapien
catgtgtacagtaactgacatagctacccctaa

SEQ ID NO: 542183 - DNA, 33 bp, Homo sapien
caaacatacacagacacagtgtctaagtacaca

SEQ ID NO: 542184 - DNA, 33 bp, Homo sapien
caaacatacacagacagagtgtctaagtacaca

SEQ ID NO: 542185 - DNA, 33 bp, Homo sapien
tggaaatttagtgttacgagctaaattgtgacc

SEQ ID NO: 542186 - DNA, 33 bp, Homo sapien
tggaaatttagtgttatgagctaaattgtgacc

SEQ ID NO: 542187 - DNA, 33 bp, Homo sapien
ttattgacaaaggagacgctgtgcagaaaacag

SEQ ID NO: 542188 - DNA, 33 bp, Homo sapien
ttattgacaaaggagatgctgtgcagaaaacag

SEQ ID NO: 542189 - DNA, 33 bp, Homo sapien
cagtgtttcctgtttaggtgggaataaagttat

SEQ ID NO: 542190 - DNA, 33 bp, Homo sapien
cagtgtttcctgtttatgtgggaataaagttat

SEQ ID NO: 542191 - DNA, 33 bp, Homo sapien
tcagaacattgatagaactcctaattaatttgc

SEQ ID NO: 542192 - DNA, 33 bp, Homo sapien
tcagaacattgatagacctcctaattaatttgc

SEQ ID NO: 542193 - DNA, 33 bp, Homo sapien
tagttaaacaagattgcagcaaagagtgaaagg

SEQ ID NO: 542194 - DNA, 33 bp, Homo sapien
tagttaaacaagattgtagcaaagagtgaaagg

SEQ ID NO: 542195 - DNA, 33 bp, Homo sapien
ttctccttggctatctcaaaatacagaaaaagt

SEQ ID NO: 542196 - DNA, 33 bp, Homo sapien
ttctccttggctatcttaaaatacagaaaaagt

SEQ ID NO: 542197 - DNA, 33 bp, Homo sapien
gagagcaaagattagaacaacgaatttagaaac

SEQ ID NO: 542198 - DNA, 33 bp, Homo sapien
gagagcaaagattagaccaacgaatttagaaac

SEQ ID NO: 542199 - DNA, 33 bp, Homo sapien
tctctctattctcccaatctcttaagtagtact

SEQ ID NO: 542200 - DNA, 33 bp, Homo sapien
tctctctattctcccagtctcttaagtagtact

SEQ ID NO: 542201 - DNA, 33 bp, Homo sapien
tcctggaattgcaaagcctgttctttttcagaa

SEQ ID NO: 542202 - DNA, 33 bp, Homo sapien
tcctggaattgcaaaggctgttctttttcagaa

SEQ ID NO: 542203 - DNA, 33 bp, Homo sapien
tatttttccaccgacagcttcagagccaagggc

SEQ ID NO: 542204 - DNA, 33 bp, Homo sapien
tatttttccaccgacatcttcagagccaagggc

SEQ ID NO: 542205 - DNA, 33 bp, Homo sapien
tctctgtggatatatacgttattctgagcttcc

SEQ ID NO: 542206 - DNA, 33 bp, Homo sapien
tctctgtggatatatatgttattctgagcttcc

SEQ ID NO: 542207 - DNA, 33 bp, Homo sapien
agttacatatttagagaaaaaaaagccatttct

SEQ ID NO: 542208 - DNA, 33 bp, Homo sapien
agttacatatttagaggaaaaaaagccatttct

SEQ ID NO: 542209 - DNA, 33 bp, Homo sapien
attctcaccagcatgggataagcgttctttttt

SEQ ID NO: 542210 - DNA, 33 bp, Homo sapien
attctcaccagcatggtataagcgttctttttt

SEQ ID NO: 542211 - DNA, 33 bp, Homo sapien
cctcaaagtaccaatacatacttgacattaagt

SEQ ID NO: 542212 - DNA, 33 bp, Homo sapien
cctcaaagtaccaatatatacttgacattaagt

SEQ ID NO: 542213 - DNA, 33 bp, Homo sapien
tgtgtagaatcgatgcaataatgaaaatgactc

SEQ ID NO: 542214 - DNA, 33 bp, Homo sapien
tgtgtagaatcgatgccataatgaaaatgactc

SEQ ID NO: 542215 - DNA, 33 bp, Homo sapien
tgccacaatgctgtggaaacggtggtgctgtca

SEQ ID NO: 542216 - DNA, 33 bp, Homo sapien
tgccacaatgctgtggtaacggtggtgctgtca

SEQ ID NO: 542217 - DNA, 33 bp, Homo sapien
ctggaatctcaagtaacagtcataatgatactc

SEQ ID NO: 542218 - DNA, 33 bp, Homo sapien
ctggaatctcaagtaatagtcataatgatactc

SEQ ID NO: 542219 - DNA, 33 bp, Homo sapien
tgaggcagctctaatgacaatgggattaggagt

SEQ ID NO: 542220 - DNA, 33 bp, Homo sapien
tgaggcagctctaatggcaatgggattaggagt

SEQ ID NO: 542221 - DNA, 33 bp, Homo sapien
aggcctaaggaatttccaagtcatagaagacag

SEQ ID NO: 542222 - DNA, 33 bp, Homo sapien
aggcctaaggaatttctaagtcatagaagacag

SEQ ID NO: 542223 - DNA, 33 bp, Homo sapien
gagtaggatgatataacacaagtcagagaagaa

SEQ ID NO: 542224 - DNA, 33 bp, Homo sapien
gagtaggatgatataatacaagtcagagaagaa

SEQ ID NO: 542225 - DNA, 33 bp, Homo sapien
actattttggtaaagaatcaggatggtagtggt

SEQ ID NO: 542226 - DNA, 33 bp, Homo sapien
actattttggtaaagactcaggatggtagtggt

SEQ ID NO: 542227 - DNA, 33 bp, Homo sapien
ttccagataagtctgacgcaggctaaagtttga

SEQ ID NO: 542228 - DNA, 33 bp, Homo sapien
ttccagataagtctgatgcaggctaaagtttga

SEQ ID NO: 542229 - DNA, 33 bp, Homo sapien
tgggagaagaggaggaacctatctattaagcaa

SEQ ID NO: 542230 - DNA, 33 bp, Homo sapien
tgggagaagaggaggatcctatctattaagcaa

SEQ ID NO: 542231 - DNA, 33 bp, Homo sapien
tgtctctttttatttaagttcacaatatacacg

SEQ ID NO: 542232 - DNA, 33 bp, Homo sapien
tgtctctttttatttaggttcacaatatacacg

SEQ ID NO: 542233 - DNA, 33 bp, Homo sapien
caaactgctttgcaggaacgacgataattccag

SEQ ID NO: 542234 - DNA, 33 bp, Homo sapien
caaactgctttgcaggtacgacgataattccag

SEQ ID NO: 542235 - DNA, 33 bp, Homo sapien
atgtacaatgtacagaagagtaaaaatgaagta

SEQ ID NO: 542236 - DNA, 33 bp, Homo sapien
atgtacaatgtacagacgagtaaaaatgaagta

SEQ ID NO: 542237 - DNA, 33 bp, Homo sapien
ggctatacagtatctacaatctgatcagagtca

SEQ ID NO: 542238 - DNA, 33 bp, Homo sapien
ggctatacagtatctataatctgatcagagtca

SEQ ID NO: 542239 - DNA, 33 bp, Homo sapien
tttcaaaggaatggccccccagtgagcagcaag

SEQ ID NO: 542240 - DNA, 33 bp, Homo sapien
tttcaaaggaatggcctcccagtgagcagcaag

SEQ ID NO: 542241 - DNA, 33 bp, Homo sapien
aattactttcattctcaagccaccgatcactac

SEQ ID NO: 542242 - DNA, 33 bp, Homo sapien
aattactttcattctctagccaccgatcactac

SEQ ID NO: 542243 - DNA, 33 bp, Homo sapien
agagttgggcgttggaacagaccctccaggtga

SEQ ID NO: 542244 - DNA, 33 bp, Homo sapien
agagttgggcgttggagcagaccctccaggtga

SEQ ID NO: 542245 - DNA, 33 bp, Homo sapien
tcatcaaaacttttcacggtgcccacattgcta

SEQ ID NO: 542246 - DNA, 33 bp, Homo sapien
tcatcaaaacttttcatggtgcccacattgcta

SEQ ID NO: 542247 - DNA, 33 bp, Homo sapien
tgttgatcctccgataggctcagcagaccaatg

SEQ ID NO: 542248 - DNA, 33 bp, Homo sapien
tgttgatcctccgatatgctcagcagaccaatg

SEQ ID NO: 542249 - DNA, 33 bp, Homo sapien
cacatatatattgaaccattttgggatgagacg

SEQ ID NO: 542250 - DNA, 33 bp, Homo sapien
cacatatatattgaacgattttgggatgagacg

SEQ ID NO: 542251 - DNA, 33 bp, Homo sapien
cagtatgtagatgagactccacagattgctaga

SEQ ID NO: 542252 - DNA, 33 bp, Homo sapien
cagtatgtagatgagattccacagattgctaga

SEQ ID NO: 542253 - DNA, 33 bp, Homo sapien
ttcttagctctttggaagtaattttaacaggta

SEQ ID NO: 542254 - DNA, 33 bp, Homo sapien
ttcttagctctttggatgtaattttaacaggta

SEQ ID NO: 542255 - DNA, 33 bp, Homo sapien
ttgtggctcaactataagctagaatgtacctgt

SEQ ID NO: 542256 - DNA, 33 bp, Homo sapien
ttgtggctcaactatatgctagaatgtacctgt

SEQ ID NO: 542257 - DNA, 33 bp, Homo sapien
gtaaagcataaacattaaacaattggggagtaa

SEQ ID NO: 542258 - DNA, 33 bp, Homo sapien
gtaaagcataaacattgaacaattggggagtaa

SEQ ID NO: 542259 - DNA, 33 bp, Homo sapien
aaacagtacttttaataaactgcaggaaagtcc

SEQ ID NO: 542260 - DNA, 33 bp, Homo sapien
aaacagtacttttaattaactgcaggaaagtcc

SEQ ID NO: 542261 - DNA, 33 bp, Homo sapien
gtagtctcatgcggtccaaggatgattgccctg

SEQ ID NO: 542262 - DNA, 33 bp, Homo sapien
gtagtctcatgcggtcgaaggatgattgccctg

SEQ ID NO: 542263 - DNA, 33 bp, Homo sapien
catcttttcttacacccactgttttcttgctga

SEQ ID NO: 542264 - DNA, 33 bp, Homo sapien
catcttttcttacacctactgttttcttgctga

SEQ ID NO: 542265 - DNA, 33 bp, Homo sapien
actattctatgaaacaccatttttaatgtccat

SEQ ID NO: 542266 - DNA, 33 bp, Homo sapien
actattctatgaaacatcatttttaatgtccat

SEQ ID NO: 542267 - DNA, 33 bp, Homo sapien
atagaatagtagcacaggaatagtttcataatg

SEQ ID NO: 542268 - DNA, 33 bp, Homo sapien
atagaatagtagcacatgaatagtttcataatg

SEQ ID NO: 542269 - DNA, 33 bp, Homo sapien
tggtaagtgaaaaaaaatagattataagctaca

SEQ ID NO: 542270 - DNA, 33 bp, Homo sapien
tggtaagtgaaaaaaattagattataagctaca

SEQ ID NO: 542271 - DNA, 33 bp, Homo sapien
gtgtttatcctctataaatgtaggtgtagctta

SEQ ID NO: 542272 - DNA, 33 bp, Homo sapien
gtgtttatcctctatacatgtaggtgtagctta

SEQ ID NO: 542273 - DNA, 33 bp, Homo sapien
gaggcataattaatgaaatagtgccaagattat

SEQ ID NO: 542274 - DNA, 33 bp, Homo sapien
gaggcataattaatgagatagtgccaagattat

SEQ ID NO: 542275 - DNA, 33 bp, Homo sapien
gcctcacttctgtcaacaaaatgcggcaagtaa

SEQ ID NO: 542276 - DNA, 33 bp, Homo sapien
gcctcacttctgtcaataaaatgcggcaagtaa

SEQ ID NO: 542277 - DNA, 33 bp, Homo sapien
aatactatgtgaagaaataatgtgaccccaatg

SEQ ID NO: 542278 - DNA, 33 bp, Homo sapien
aatactatgtgaagaagtaatgtgaccccaatg

SEQ ID NO: 542279 - DNA, 33 bp, Homo sapien
tacatctgttccacaaaaaacacatacctttgt

SEQ ID NO: 542280 - DNA, 33 bp, Homo sapien
tacatctgttccacaagaaacacatacctttgt

SEQ ID NO: 542281 - DNA, 33 bp, Homo sapien
acatacctttgttccaacttcaaagaaagcaca

SEQ ID NO: 542282 - DNA, 33 bp, Homo sapien
acatacctttgttccaccttcaaagaaagcaca

SEQ ID NO: 542283 - DNA, 33 bp, Homo sapien
agtacctttgtttccacgtttgcaaagccaaga

SEQ ID NO: 542284 - DNA, 33 bp, Homo sapien
agtacctttgtttccaggtttgcaaagccaaga

SEQ ID NO: 542285 - DNA, 33 bp, Homo sapien
gcttttttggggggtcaactgctctaaggtata

SEQ ID NO: 542286 - DNA, 33 bp, Homo sapien
gcttttttggggggtcgactgctctaaggtata

SEQ ID NO: 542287 - DNA, 33 bp, Homo sapien
cacacacacttcctgaagatgagtgctgcacac

SEQ ID NO: 542288 - DNA, 33 bp, Homo sapien
cacacacacttcctgaggatgagtgctgcacac

SEQ ID NO: 542289 - DNA, 33 bp, Homo sapien
atattgtatatccctaaagcttattcctggaga

SEQ ID NO: 542290 - DNA, 33 bp, Homo sapien
atattgtatatccctatagcttattcctggaga

SEQ ID NO: 542291 - DNA, 33 bp, Homo sapien
aggttgcagaaaaaaacgcttatatactgttgg

SEQ ID NO: 542292 - DNA, 33 bp, Homo sapien
aggttgcagaaaaaaatgcttatatactgttgg

SEQ ID NO: 542293 - DNA, 33 bp, Homo sapien
atagctcagacactaaatgaagatcacagagtg

SEQ ID NO: 542294 - DNA, 33 bp, Homo sapien
atagctcagacactaactgaagatcacagagtg

SEQ ID NO: 542295 - DNA, 33 bp, Homo sapien
ctttttgatatgctaacagcctttaatgaggac

SEQ ID NO: 542296 - DNA, 33 bp, Homo sapien
ctttttgatatgctaagagcctttaatgaggac

SEQ ID NO: 542297 - DNA, 33 bp, Homo sapien
tataaacaaagtttgcactcatgaagctacaca

SEQ ID NO: 542298 - DNA, 33 bp, Homo sapien
tataaacaaagtttgctctcatgaagctacaca

SEQ ID NO: 542299 - DNA, 33 bp, Homo sapien
ttcttgtggattacaacttaaaatcttgtcttt

SEQ ID NO: 542300 - DNA, 33 bp, Homo sapien
ttcttgtggattacaatttaaaatcttgtcttt

SEQ ID NO: 542301 - DNA, 33 bp, Homo sapien
taactttccctggagacgaactgcttggatgcc

SEQ ID NO: 542302 - DNA, 33 bp, Homo sapien
taactttccctggagatgaactgcttggatgcc

SEQ ID NO: 542303 - DNA, 33 bp, Homo sapien
cttcatctaaacttcaccttagagagttaaaat

SEQ ID NO: 542304 - DNA, 33 bp, Homo sapien
cttcatctaaacttcatcttagagagttaaaat

SEQ ID NO: 542305 - DNA, 33 bp, Homo sapien
tctgcactaggggaaggcaagaccagtcaggtg

SEQ ID NO: 542306 - DNA, 33 bp, Homo sapien
tctgcactaggggaagtcaagaccagtcaggtg

SEQ ID NO: 542307 - DNA, 33 bp, Homo sapien
ataaccataaggaaggaaataccattgttataa

SEQ ID NO: 542308 - DNA, 33 bp, Homo sapien
ataaccataaggaagggaataccattgttataa

SEQ ID NO: 542309 - DNA, 33 bp, Homo sapien
tagatgtaagattcacaaacctatttacatttt

SEQ ID NO: 542310 - DNA, 33 bp, Homo sapien
tagatgtaagattcaccaacctatttacatttt

SEQ ID NO: 542311 - DNA, 33 bp, Homo sapien
tttcgcttttcctggaactctgcatcttctata

SEQ ID NO: 542312 - DNA, 33 bp, Homo sapien
tttcgcttttcctggagctctgcatcttctata

SEQ ID NO: 542313 - DNA, 33 bp, Homo sapien
tgcaggtagagcaagaagtagtcaggtggaagg

SEQ ID NO: 542314 - DNA, 33 bp, Homo sapien
tgcaggtagagcaagatgtagtcaggtggaagg

SEQ ID NO: 542315 - DNA, 33 bp, Homo sapien
ctagaccccaaagaacaggaggtgaaatgcaac

SEQ ID NO: 542316 - DNA, 33 bp, Homo sapien
ctagaccccaaagaacgggaggtgaaatgcaac

SEQ ID NO: 542317 - DNA, 33 bp, Homo sapien
aaatgagaccaccttacccacactaccagtacc

SEQ ID NO: 542318 - DNA, 33 bp, Homo sapien
aaatgagaccaccttatccacactaccagtacc

SEQ ID NO: 542319 - DNA, 33 bp, Homo sapien
caagctaagccactgacgaactcacagatgctg

SEQ ID NO: 542320 - DNA, 33 bp, Homo sapien
caagctaagccactgatgaactcacagatgctg

SEQ ID NO: 542321 - DNA, 33 bp, Homo sapien
ggattggataatgctgaaaatgctttctctttt

SEQ ID NO: 542322 - DNA, 33 bp, Homo sapien
ggattggataatgctgcaaatgctttctctttt

SEQ ID NO: 542323 - DNA, 33 bp, Homo sapien
atctacaatctagttcaccagcttgcactgaat

SEQ ID NO: 542324 - DNA, 33 bp, Homo sapien
atctacaatctagttcgccagcttgcactgaat

SEQ ID NO: 542325 - DNA, 33 bp, Homo sapien
tgcatgtagggggataaggtgtgtatgtacttc

SEQ ID NO: 542326 - DNA, 33 bp, Homo sapien
tgcatgtagggggatacggtgtgtatgtacttc

SEQ ID NO: 542327 - DNA, 33 bp, Homo sapien
tcagattggacatgagaaagttggtaaggaagg

SEQ ID NO: 542328 - DNA, 33 bp, Homo sapien
tcagattggacatgaggaagttggtaaggaagg

SEQ ID NO: 542329 - DNA, 33 bp, Homo sapien
ttactgctgaattctacgaaacctataaagaag

SEQ ID NO: 542330 - DNA, 33 bp, Homo sapien
ttactgctgaattctatgaaacctataaagaag

SEQ ID NO: 542331 - DNA, 33 bp, Homo sapien
cttggaagagcaatgaatatttccatagtcatt

SEQ ID NO: 542332 - DNA, 33 bp, Homo sapien
cttggaagagcaatgattatttccatagtcatt

SEQ ID NO: 542333 - DNA, 33 bp, Homo sapien
tataggataaagacaaatgcagataggagaatt

SEQ ID NO: 542334 - DNA, 33 bp, Homo sapien
tataggataaagacaattgcagataggagaatt

SEQ ID NO: 542335 - DNA, 33 bp, Homo sapien
tctcctttctgaaaaacctaagccaggatacta

SEQ ID NO: 542336 - DNA, 33 bp, Homo sapien
tctcctttctgaaaaatctaagccaggatacta

SEQ ID NO: 542337 - DNA, 33 bp, Homo sapien
atataactgtcaaaataagcagtatagatggta

SEQ ID NO: 542338 - DNA, 33 bp, Homo sapien
atataactgtcaaaatgagcagtatagatggta

SEQ ID NO: 542339 - DNA, 33 bp, Homo sapien
cttcttgagcttagacacacaaaacagcacttc

SEQ ID NO: 542340 - DNA, 33 bp, Homo sapien
cttcttgagcttagactcacaaaacagcacttc

SEQ ID NO: 542341 - DNA, 33 bp, Homo sapien
atgtaaacaattttcaaagcacatttatgataa

SEQ ID NO: 542342 - DNA, 33 bp, Homo sapien
atgtaaacaattttcagagcacatttatgataa

SEQ ID NO: 542343 - DNA, 33 bp, Homo sapien
agataaggaaacttaagtcccaagagatttaag

SEQ ID NO: 542344 - DNA, 33 bp, Homo sapien
agataaggaaacttaattcccaagagatttaag

SEQ ID NO: 542345 - DNA, 33 bp, Homo sapien
atcttcaggatcagaaagattcctagttaggaa

SEQ ID NO: 542346 - DNA, 33 bp, Homo sapien
atcttcaggatcagaaggattcctagttaggaa

SEQ ID NO: 542347 - DNA, 33 bp, Homo sapien
atgccatggatgccaactgggcaaaagctgcca

SEQ ID NO: 542348 - DNA, 33 bp, Homo sapien
atgccatggatgccaattgggcaaaagctgcca

SEQ ID NO: 542349 - DNA, 33 bp, Homo sapien
tgagaacagagaggaaagtagcaccagaccatc

SEQ ID NO: 542350 - DNA, 33 bp, Homo sapien
tgagaacagagaggaaggtagcaccagaccatc

SEQ ID NO: 542351 - DNA, 33 bp, Homo sapien
gtaaagccaatcagatcaacaacaatgactacg

SEQ ID NO: 542352 - DNA, 33 bp, Homo sapien
gtaaagccaatcagatgaacaacaatgactacg

SEQ ID NO: 542353 - DNA, 33 bp, Homo sapien
atagcaatggggataactgtgctgacatatttg

SEQ ID NO: 542354 - DNA, 33 bp, Homo sapien
atagcaatggggataattgtgctgacatatttg

SEQ ID NO: 542355 - DNA, 33 bp, Homo sapien
ggctttcttcactttcacaactaaaattagatg

SEQ ID NO: 542356 - DNA, 33 bp, Homo sapien
ggctttcttcactttcccaactaaaattagatg

SEQ ID NO: 542357 - DNA, 33 bp, Homo sapien
taaagcagactttaaaatagtcaagttgatggc

SEQ ID NO: 542358 - DNA, 33 bp, Homo sapien
taaagcagactttaaagtagtcaagttgatggc

SEQ ID NO: 542359 - DNA, 33 bp, Homo sapien
tacaggaatctttggaccacactcaatgtctac

SEQ ID NO: 542360 - DNA, 33 bp, Homo sapien
tacaggaatctttggagcacactcaatgtctac

SEQ ID NO: 542361 - DNA, 33 bp, Homo sapien
actaagaacttattgaaatcctgcagttaatct

SEQ ID NO: 542362 - DNA, 33 bp, Homo sapien
actaagaacttattgagatcctgcagttaatct

SEQ ID NO: 542363 - DNA, 33 bp, Homo sapien
actcaccaaaagccagaaaaatttagtcatttt

SEQ ID NO: 542364 - DNA, 33 bp, Homo sapien
actcaccaaaagccaggaaaatttagtcatttt

SEQ ID NO: 542365 - DNA, 33 bp, Homo sapien
gaattttcccaaaccacctcacaaaagaaatct

SEQ ID NO: 542366 - DNA, 33 bp, Homo sapien
gaattttcccaaaccatctcacaaaagaaatct

SEQ ID NO: 542367 - DNA, 33 bp, Homo sapien
gcttccactcagagaaatcaccatactcagaaa

SEQ ID NO: 542368 - DNA, 33 bp, Homo sapien
gcttccactcagagaagtcaccatactcagaaa

SEQ ID NO: 542369 - DNA, 33 bp, Homo sapien
gtaggaataaatgcagaatcaagtaaaagtgag

SEQ ID NO: 542370 - DNA, 33 bp, Homo sapien
gtaggaataaatgcagcatcaagtaaaagtgag

SEQ ID NO: 542371 - DNA, 33 bp, Homo sapien
gaaattgtgtgatggcactcagctataaggtag

SEQ ID NO: 542372 - DNA, 33 bp, Homo sapien
gaaattgtgtgatggcgctcagctataaggtag

SEQ ID NO: 542373 - DNA, 33 bp, Homo sapien
aatgaagagtaactgtaaagtaaagacagttct

SEQ ID NO: 542374 - DNA, 33 bp, Homo sapien
aatgaagagtaactgtgaagtaaagacagttct

SEQ ID NO: 542375 - DNA, 33 bp, Homo sapien
gacttcaggaagaacaaattttctggggaagat

SEQ ID NO: 542376 - DNA, 33 bp, Homo sapien
gacttcaggaagaacagattttctggggaagat

SEQ ID NO: 542377 - DNA, 33 bp, Homo sapien
tattagaatgatgttacgaaggagaacaaagaa

SEQ ID NO: 542378 - DNA, 33 bp, Homo sapien
tattagaatgatgttatgaaggagaacaaagaa

SEQ ID NO: 542379 - DNA, 33 bp, Homo sapien
tccaaggccaagaaacaaattatagctaggact

SEQ ID NO: 542380 - DNA, 33 bp, Homo sapien
tccaaggccaagaaacgaattatagctaggact

SEQ ID NO: 542381 - DNA, 33 bp, Homo sapien
ccaactcctgtcgatacattttggctaagtcct

SEQ ID NO: 542382 - DNA, 33 bp, Homo sapien
ccaactcctgtcgatatattttggctaagtcct

SEQ ID NO: 542383 - DNA, 33 bp, Homo sapien
aaagatgtggtatgacgcaggtattcagtaaac

SEQ ID NO: 542384 - DNA, 33 bp, Homo sapien
aaagatgtggtatgactcaggtattcagtaaac

SEQ ID NO: 542385 - DNA, 33 bp, Homo sapien
tgaaggtgaccaatccagaacccaatgtctcct

SEQ ID NO: 542386 - DNA, 33 bp, Homo sapien
tgaaggtgaccaatccggaacccaatgtctcct

SEQ ID NO: 542387 - DNA, 33 bp, Homo sapien
ggtagtgcttctgggccaactcattttcaccct

SEQ ID NO: 542388 - DNA, 33 bp, Homo sapien
ggtagtgcttctgggctaactcattttcaccct

SEQ ID NO: 542389 - DNA, 33 bp, Homo sapien
agaggaaattttgactaaactatagatctctgt

SEQ ID NO: 542390 - DNA, 33 bp, Homo sapien
agaggaaattttgactgaactatagatctctgt

SEQ ID NO: 542391 - DNA, 33 bp, Homo sapien
attaaccttgaaacaaatgatgccagaggaaat

SEQ ID NO: 542392 - DNA, 33 bp, Homo sapien
attaaccttgaaacaagtgatgccagaggaaat

SEQ ID NO: 542393 - DNA, 33 bp, Homo sapien
ctgttctaatactatacgctttgttgttcctcc

SEQ ID NO: 542394 - DNA, 33 bp, Homo sapien
ctgttctaatactatatgctttgttgttcctcc

SEQ ID NO: 542395 - DNA, 33 bp, Homo sapien
caaccaacatgacatacagaaagtttgattata

SEQ ID NO: 542396 - DNA, 33 bp, Homo sapien
caaccaacatgacatatagaaagtttgattata

SEQ ID NO: 542397 - DNA, 33 bp, Homo sapien
cagatctaaaggtctgacaccaaattctaatta

SEQ ID NO: 542398 - DNA, 33 bp, Homo sapien
cagatctaaaggtctggcaccaaattctaatta

SEQ ID NO: 542399 - DNA, 33 bp, Homo sapien
ggaagaaggaaggaaaatgttaacagctgtttg

SEQ ID NO: 542400 - DNA, 33 bp, Homo sapien
ggaagaaggaaggaaagtgttaacagctgtttg

SEQ ID NO: 542401 - DNA, 33 bp, Homo sapien
tggccttcatcacttacgtctgtgtcaacttgt

SEQ ID NO: 542402 - DNA, 33 bp, Homo sapien
tggccttcatcacttatgtctgtgtcaacttgt

SEQ ID NO: 542403 - DNA, 33 bp, Homo sapien
aggctgtcttaacatccgacagctatcttattt

SEQ ID NO: 542404 - DNA, 33 bp, Homo sapien
aggctgtcttaacatctgacagctatcttattt

SEQ ID NO: 542405 - DNA, 33 bp, Homo sapien
attatgtgccaaccacaagtatcatcttttaca

SEQ ID NO: 542406 - DNA, 33 bp, Homo sapien
attatgtgccaaccacgagtatcatcttttaca

SEQ ID NO: 542407 - DNA, 33 bp, Homo sapien
attatcacccgagcacagaagcacttgtctcag

SEQ ID NO: 542408 - DNA, 33 bp, Homo sapien
attatcacccgagcacggaagcacttgtctcag

SEQ ID NO: 542409 - DNA, 33 bp, Homo sapien
gaaaacttaaaatatacgcagagttgatgaata

SEQ ID NO: 542410 - DNA, 33 bp, Homo sapien
gaaaacttaaaatatatgcagagttgatgaata

SEQ ID NO: 542411 - DNA, 33 bp, Homo sapien
gtttcttgagaaattacatgtggatgacttaca

SEQ ID NO: 542412 - DNA, 33 bp, Homo sapien
gtttcttgagaaattatatgtggatgacttaca

SEQ ID NO: 542413 - DNA, 33 bp, Homo sapien
gtaagtgcaactatgtaaatatgaaagaataaa

SEQ ID NO: 542414 - DNA, 33 bp, Homo sapien
gtaagtgcaactatgtgaatatgaaagaataaa

SEQ ID NO: 542415 - DNA, 33 bp, Homo sapien
ttggaacatttccccacattatttgcatcatct

SEQ ID NO: 542416 - DNA, 33 bp, Homo sapien
ttggaacatttccccagattatttgcatcatct

SEQ ID NO: 542417 - DNA, 33 bp, Homo sapien
tttttgtctcacaggcaatgtacagaagcaacc

SEQ ID NO: 542418 - DNA, 33 bp, Homo sapien
tttttgtctcacaggcgatgtacagaagcaacc

SEQ ID NO: 542419 - DNA, 33 bp, Homo sapien
tagagatgtagcctcacagttgaagcgacagag

SEQ ID NO: 542420 - DNA, 33 bp, Homo sapien
tagagatgtagcctcatagttgaagcgacagag

SEQ ID NO: 542421 - DNA, 33 bp, Homo sapien
tacagtttgattcaaaacagatgatccccaaat

SEQ ID NO: 542422 - DNA, 33 bp, Homo sapien
tacagtttgattcaaagcagatgatccccaaat

SEQ ID NO: 542423 - DNA, 33 bp, Homo sapien
ttcacagtgttcagcaatatttttgaaaatgaa

SEQ ID NO: 542424 - DNA, 33 bp, Homo sapien
ttcacagtgttcagcagtatttttgaaaatgaa

SEQ ID NO: 542425 - DNA, 33 bp, Homo sapien
taagtatttctaggaaactttcagggaacttaa

SEQ ID NO: 542426 - DNA, 33 bp, Homo sapien
taagtatttctaggaatctttcagggaacttaa

SEQ ID NO: 542427 - DNA, 33 bp, Homo sapien
tcttcttgaccatccaatgacgtgttttaagac

SEQ ID NO: 542428 - DNA, 33 bp, Homo sapien
tcttcttgaccatccagtgacgtgttttaagac

SEQ ID NO: 542429 - DNA, 33 bp, Homo sapien
cacatacaatgagagaacacaaaaaaatacagt

SEQ ID NO: 542430 - DNA, 33 bp, Homo sapien
cacatacaatgagagatcacaaaaaaatacagt

SEQ ID NO: 542431 - DNA, 33 bp, Homo sapien
tggtaaaaatgagacaccaataatctacattta

SEQ ID NO: 542432 - DNA, 33 bp, Homo sapien
tggtaaaaatgagacagcaataatctacattta

SEQ ID NO: 542433 - DNA, 33 bp, Homo sapien
ctgaatagctgtcacacagttctcttcgtatat

SEQ ID NO: 542434 - DNA, 33 bp, Homo sapien
ctgaatagctgtcacatagttctcttcgtatat

SEQ ID NO: 542435 - DNA, 33 bp, Homo sapien
ataataacaatgacaagaatttaccacattcat

SEQ ID NO: 542436 - DNA, 33 bp, Homo sapien
ataataacaatgacaataatttaccacattcat

SEQ ID NO: 542437 - DNA, 33 bp, Homo sapien
taaatgattggataaaaaacaagaacagaccaa

SEQ ID NO: 542438 - DNA, 33 bp, Homo sapien
taaatgattggataaacaacaagaacagaccaa

SEQ ID NO: 542439 - DNA, 33 bp, Homo sapien
ataaattctctcctcaaagtggtttctgaatga

SEQ ID NO: 542440 - DNA, 33 bp, Homo sapien
ataaattctctcctcagagtggtttctgaatga

SEQ ID NO: 542441 - DNA, 33 bp, Homo sapien
gaatcttaatattcaacggtaccagtgactcat

SEQ ID NO: 542442 - DNA, 33 bp, Homo sapien
gaatcttaatattcaatggtaccagtgactcat

SEQ ID NO: 542443 - DNA, 33 bp, Homo sapien
gagtaggttaaagcaccgtagaaataaggttat

SEQ ID NO: 542444 - DNA, 33 bp, Homo sapien
gagtaggttaaagcactgtagaaataaggttat

SEQ ID NO: 542445 - DNA, 33 bp, Homo sapien
atttagagttcctgaacaggatttttatctctc

SEQ ID NO: 542446 - DNA, 33 bp, Homo sapien
atttagagttcctgaataggatttttatctctc

SEQ ID NO: 542447 - DNA, 33 bp, Homo sapien
agctaagttttgtgcaatactttcatatgcttc

SEQ ID NO: 542448 - DNA, 33 bp, Homo sapien
agctaagttttgtgcagtactttcatatgcttc

SEQ ID NO: 542449 - DNA, 33 bp, Homo sapien
ctggatatcccaaacacaagtcacccacaggag

SEQ ID NO: 542450 - DNA, 33 bp, Homo sapien
ctggatatcccaaacagaagtcacccacaggag

SEQ ID NO: 542451 - DNA, 33 bp, Homo sapien
tgcagattatgttctacctaaccatgaaacaag

SEQ ID NO: 542452 - DNA, 33 bp, Homo sapien
tgcagattatgttctatctaaccatgaaacaag

SEQ ID NO: 542453 - DNA, 33 bp, Homo sapien
cttgaatcaaccatgcactaattctgttagaga

SEQ ID NO: 542454 - DNA, 33 bp, Homo sapien
cttgaatcaaccatgcgctaattctgttagaga

SEQ ID NO: 542455 - DNA, 33 bp, Homo sapien
caagactctaacctaacatacatcgttatgttt

SEQ ID NO: 542456 - DNA, 33 bp, Homo sapien
caagactctaacctaatatacatcgttatgttt

SEQ ID NO: 542457 - DNA, 33 bp, Homo sapien
atggattcactttgtggataataaatccagagg

SEQ ID NO: 542458 - DNA, 33 bp, Homo sapien
atggattcactttgtgtataataaatccagagg

SEQ ID NO: 542459 - DNA, 33 bp, Homo sapien
ggaggaaagagactgaaaatttgaaaaacaggt

SEQ ID NO: 542460 - DNA, 33 bp, Homo sapien
ggaggaaagagactgagaatttgaaaaacaggt

SEQ ID NO: 542461 - DNA, 33 bp, Homo sapien
gaatgttgagttctacagctcatctggggtgag

SEQ ID NO: 542462 - DNA, 33 bp, Homo sapien
gaatgttgagttctacggctcatctggggtgag

SEQ ID NO: 542463 - DNA, 33 bp, Homo sapien
tgaatctttgttactaaaagacaagtttcagaa

SEQ ID NO: 542464 - DNA, 33 bp, Homo sapien
tgaatctttgttactagaagacaagtttcagaa

SEQ ID NO: 542465 - DNA, 33 bp, Homo sapien
cccagtgtatgcgtacccagcttaattcagacc

SEQ ID NO: 542466 - DNA, 33 bp, Homo sapien
cccagtgtatgcgtactcagcttaattcagacc

SEQ ID NO: 542467 - DNA, 33 bp, Homo sapien
tgtgtgagtgggatgccatttacataacattta

SEQ ID NO: 542468 - DNA, 33 bp, Homo sapien
tgtgtgagtgggatgctatttacataacattta

SEQ ID NO: 542469 - DNA, 33 bp, Homo sapien
acagaacttacctttccctaactaccagtttat

SEQ ID NO: 542470 - DNA, 33 bp, Homo sapien
acagaacttacctttctctaactaccagtttat

SEQ ID NO: 542471 - DNA, 33 bp, Homo sapien
gggtatgatattaaaggatgaaatttgggctcc

SEQ ID NO: 542472 - DNA, 33 bp, Homo sapien
gggtatgatattaaagtatgaaatttgggctcc

SEQ ID NO: 542473 - DNA, 33 bp, Homo sapien
gttaaagccaaaaaacactgcttaggatcaagg

SEQ ID NO: 542474 - DNA, 33 bp, Homo sapien
gttaaagccaaaaaaccctgcttaggatcaagg

SEQ ID NO: 542475 - DNA, 33 bp, Homo sapien
agcgggaaccagctgcaatccctgacaccattg

SEQ ID NO: 542476 - DNA, 33 bp, Homo sapien
agcgggaaccagctgcgatccctgacaccattg

SEQ ID NO: 542477 - DNA, 33 bp, Homo sapien
aaataggcagtagttacgggaagaaagatttca

SEQ ID NO: 542478 - DNA, 33 bp, Homo sapien
aaataggcagtagttatgggaagaaagatttca

SEQ ID NO: 542479 - DNA, 33 bp, Homo sapien
aaggtgcatagataaaatgctggtttctgtgtg

SEQ ID NO: 542480 - DNA, 33 bp, Homo sapien
aaggtgcatagataaagtgctggtttctgtgtg

SEQ ID NO: 542481 - DNA, 33 bp, Homo sapien
gtgggagtatgggtcacggggcaatacgccagg

SEQ ID NO: 542482 - DNA, 33 bp, Homo sapien
gtgggagtatgggtcatggggcaatacgccagg

SEQ ID NO: 542483 - DNA, 33 bp, Homo sapien
ttatcacctcactttcgagataaagcaattgac

SEQ ID NO: 542484 - DNA, 33 bp, Homo sapien
ttatcacctcactttctagataaagcaattgac

SEQ ID NO: 542485 - DNA, 33 bp, Homo sapien
attcctgccatctgtgaagtggcttgggttaat

SEQ ID NO: 542486 - DNA, 33 bp, Homo sapien
attcctgccatctgtgcagtggcttgggttaat

SEQ ID NO: 542487 - DNA, 33 bp, Homo sapien
gcttgggttaataccccatacaacccagatgga

SEQ ID NO: 542488 - DNA, 33 bp, Homo sapien
gcttgggttaataccctatacaacccagatgga

SEQ ID NO: 542489 - DNA, 33 bp, Homo sapien
ttataaatatgaaagcaacaaaatactcaatct

SEQ ID NO: 542490 - DNA, 33 bp, Homo sapien
ttataaatatgaaagcgacaaaatactcaatct

SEQ ID NO: 542491 - DNA, 33 bp, Homo sapien
taaacatttctaccacagatggattgcttcata

SEQ ID NO: 542492 - DNA, 33 bp, Homo sapien
taaacatttctaccacggatggattgcttcata

SEQ ID NO: 542493 - DNA, 33 bp, Homo sapien
gcacagtagcattgaaaaagtacatacaaatgg

SEQ ID NO: 542494 - DNA, 33 bp, Homo sapien
gcacagtagcattgaacaagtacatacaaatgg

SEQ ID NO: 542495 - DNA, 33 bp, Homo sapien
caagtcccagccacacagtgctttttgcagtca

SEQ ID NO: 542496 - DNA, 33 bp, Homo sapien
caagtcccagccacacggtgctttttgcagtca

SEQ ID NO: 542497 - DNA, 33 bp, Homo sapien
ggaaactgatgaagggaatatgggaactcactg

SEQ ID NO: 542498 - DNA, 33 bp, Homo sapien
ggaaactgatgaaggggatatgggaactcactg

SEQ ID NO: 542499 - DNA, 33 bp, Homo sapien
ttaaagctatgtgttcactttctacagttcaag

SEQ ID NO: 542500 - DNA, 33 bp, Homo sapien
ttaaagctatgtgttcgctttctacagttcaag

SEQ ID NO: 542501 - DNA, 33 bp, Homo sapien
ctatggtaatgagaccaccaagagagtgtttag

SEQ ID NO: 542502 - DNA, 33 bp, Homo sapien
ctatggtaatgagacccccaagagagtgtttag

SEQ ID NO: 542503 - DNA, 33 bp, Homo sapien
aaactaaccatcacaaaaagcttgttaatctag

SEQ ID NO: 542504 - DNA, 33 bp, Homo sapien
aaactaaccatcacaagaagcttgttaatctag

SEQ ID NO: 542505 - DNA, 33 bp, Homo sapien
gaagactggtgaaaatcaaagattggtcaaatc

SEQ ID NO: 542506 - DNA, 33 bp, Homo sapien
gaagactggtgaaaattaaagattggtcaaatc

SEQ ID NO: 542507 - DNA, 33 bp, Homo sapien
tgaatctcaaaaatggaatgatgggcaaaagga

SEQ ID NO: 542508 - DNA, 33 bp, Homo sapien
tgaatctcaaaaatggtatgatgggcaaaagga

SEQ ID NO: 542509 - DNA, 33 bp, Homo sapien
gcatagataaaacccacatctttggaacagcag

SEQ ID NO: 542510 - DNA, 33 bp, Homo sapien
gcatagataaaacccagatctttggaacagcag

SEQ ID NO: 542511 - DNA, 33 bp, Homo sapien
gttttataatggacaacgcctagaatcctgtga

SEQ ID NO: 542512 - DNA, 33 bp, Homo sapien
gttttataatggacaatgcctagaatcctgtga

SEQ ID NO: 542513 - DNA, 33 bp, Homo sapien
gatggataaatgttcagaaattttgcgagtccc

SEQ ID NO: 542514 - DNA, 33 bp, Homo sapien
gatggataaatgttcataaattttgcgagtccc

SEQ ID NO: 542515 - DNA, 33 bp, Homo sapien
tatttaagattgtaaaattggttgcatatgttg

SEQ ID NO: 542516 - DNA, 33 bp, Homo sapien
tatttaagattgtaaacttggttgcatatgttg

SEQ ID NO: 542517 - DNA, 33 bp, Homo sapien
ctgtggaaaccaatgaacatggtaccttgggga

SEQ ID NO: 542518 - DNA, 33 bp, Homo sapien
ctgtggaaaccaatgagcatggtaccttgggga

SEQ ID NO: 542519 - DNA, 33 bp, Homo sapien
gttattaacattatgccctattttcctctctag

SEQ ID NO: 542520 - DNA, 33 bp, Homo sapien
gttattaacattatgctctattttcctctctag

SEQ ID NO: 542521 - DNA, 33 bp, Homo sapien
gaggaggtgggcaaaccgtgtcctttcccacat

SEQ ID NO: 542522 - DNA, 33 bp, Homo sapien
gaggaggtgggcaaactgtgtcctttcccacat

SEQ ID NO: 542523 - DNA, 33 bp, Homo sapien
tctctggatttttttacgaattctggcaaaacc

SEQ ID NO: 542524 - DNA, 33 bp, Homo sapien
tctctggatttttttatgaattctggcaaaacc

SEQ ID NO: 542525 - DNA, 33 bp, Homo sapien
acgaggaatatattaacattatcgcatgtcttc

SEQ ID NO: 542526 - DNA, 33 bp, Homo sapien
acgaggaatatattaagattatcgcatgtcttc

SEQ ID NO: 542527 - DNA, 33 bp, Homo sapien
agagtgttcgtggttacgactttctaggggtct

SEQ ID NO: 542528 - DNA, 33 bp, Homo sapien
agagtgttcgtggttatgactttctaggggtct

SEQ ID NO: 542529 - DNA, 33 bp, Homo sapien
ctttggcctacttcaactgggcttctagatcca

SEQ ID NO: 542530 - DNA, 33 bp, Homo sapien
ctttggcctacttcaattgggcttctagatcca

SEQ ID NO: 542531 - DNA, 33 bp, Homo sapien
taatgcatgatgttaacaggagaaactgcgggg

SEQ ID NO: 542532 - DNA, 33 bp, Homo sapien
taatgcatgatgttaataggagaaactgcgggg

SEQ ID NO: 542533 - DNA, 33 bp, Homo sapien
agatagtttttaaagaacttgccaaatatttac

SEQ ID NO: 542534 - DNA, 33 bp, Homo sapien
agatagtttttaaagaccttgccaaatatttac

SEQ ID NO: 542535 - DNA, 33 bp, Homo sapien
ccagctaacccaggaactgaaagctaaaagtga

SEQ ID NO: 542536 - DNA, 33 bp, Homo sapien
ccagctaacccaggaattgaaagctaaaagtga

SEQ ID NO: 542537 - DNA, 33 bp, Homo sapien
ctgtgcttgttgttcaatactttgcaggaatca

SEQ ID NO: 542538 - DNA, 33 bp, Homo sapien
ctgtgcttgttgttcagtactttgcaggaatca

SEQ ID NO: 542539 - DNA, 33 bp, Homo sapien
tccagccctcaaaataccgctacagttttttca

SEQ ID NO: 542540 - DNA, 33 bp, Homo sapien
tccagccctcaaaatatcgctacagttttttca

SEQ ID NO: 542541 - DNA, 33 bp, Homo sapien
cagtagctaggcacaactctcaacatggtacca

SEQ ID NO: 542542 - DNA, 33 bp, Homo sapien
cagtagctaggcacaattctcaacatggtacca

SEQ ID NO: 542543 - DNA, 33 bp, Homo sapien
atattggattcattaacaatttagtgatcttga

SEQ ID NO: 542544 - DNA, 33 bp, Homo sapien
atattggattcattaataatttagtgatcttga

SEQ ID NO: 542545 - DNA, 33 bp, Homo sapien
atgaggcaacgtgttacgatgatgggaagacat

SEQ ID NO: 542546 - DNA, 33 bp, Homo sapien
atgaggcaacgtgttatgatgatgggaagacat

SEQ ID NO: 542547 - DNA, 33 bp, Homo sapien
cttgaggagacaaacacggaagtggatggacaa

SEQ ID NO: 542548 - DNA, 33 bp, Homo sapien
cttgaggagacaaacatggaagtggatggacaa

SEQ ID NO: 542549 - DNA, 33 bp, Homo sapien
attatcttagaagcaagggaaaaataaaagatg

SEQ ID NO: 542550 - DNA, 33 bp, Homo sapien
attatcttagaagcaatggaaaaataaaagatg

SEQ ID NO: 542551 - DNA, 33 bp, Homo sapien
tacatcccaaaaggcacgagtgaaggaaaatgc

SEQ ID NO: 542552 - DNA, 33 bp, Homo sapien
tacatcccaaaaggcatgagtgaaggaaaatgc

SEQ ID NO: 542553 - DNA, 33 bp, Homo sapien
catttgaacagtaaaggagagcatgctatggat

SEQ ID NO: 542554 - DNA, 33 bp, Homo sapien
catttgaacagtaaagtagagcatgctatggat

SEQ ID NO: 542555 - DNA, 33 bp, Homo sapien
tccatctttattccaacgaacaacggtcatgtc

SEQ ID NO: 542556 - DNA, 33 bp, Homo sapien
tccatctttattccaatgaacaacggtcatgtc

SEQ ID NO: 542557 - DNA, 33 bp, Homo sapien
acatattcgaatgatcgcttacatgagaaaggt

SEQ ID NO: 542558 - DNA, 33 bp, Homo sapien
acatattcgaatgatctcttacatgagaaaggt

SEQ ID NO: 542559 - DNA, 33 bp, Homo sapien
tcaaaactctgttcgccgcaggtgctagctgca

SEQ ID NO: 542560 - DNA, 33 bp, Homo sapien
tcaaaactctgttcgctgcaggtgctagctgca

SEQ ID NO: 542561 - DNA, 33 bp, Homo sapien
atttcttgtcatacaacgtactgcatatcttta

SEQ ID NO: 542562 - DNA, 33 bp, Homo sapien
atttcttgtcatacaatgtactgcatatcttta

SEQ ID NO: 542563 - DNA, 33 bp, Homo sapien
aagggtagaaggaagagcatgatggtacatttt

SEQ ID NO: 542564 - DNA, 33 bp, Homo sapien
aagggtagaaggaagatcatgatggtacatttt

SEQ ID NO: 542565 - DNA, 33 bp, Homo sapien
ggctgtttaggatgtcaaaaccattcttagagc

SEQ ID NO: 542566 - DNA, 33 bp, Homo sapien
ggctgtttaggatgtcgaaaccattcttagagc

SEQ ID NO: 542567 - DNA, 33 bp, Homo sapien
atgtgaccagagctatgaacacacttgataccc

SEQ ID NO: 542568 - DNA, 33 bp, Homo sapien
atgtgaccagagctattaacacacttgataccc

SEQ ID NO: 542569 - DNA, 33 bp, Homo sapien
acctctattcacaaaccgattcctattaaatac

SEQ ID NO: 542570 - DNA, 33 bp, Homo sapien
acctctattcacaaactgattcctattaaatac

SEQ ID NO: 542571 - DNA, 33 bp, Homo sapien
gcaaaaggatagacataaccaaaaattattgtt

SEQ ID NO: 542572 - DNA, 33 bp, Homo sapien
gcaaaaggatagacatgaccaaaaattattgtt

SEQ ID NO: 542573 - DNA, 33 bp, Homo sapien
tgtactatgggaaaacaccacttcttgtctttc

SEQ ID NO: 542574 - DNA, 33 bp, Homo sapien
tgtactatgggaaaaccccacttcttgtctttc

SEQ ID NO: 542575 - DNA, 33 bp, Homo sapien
cagcacccagatcaagaaaaagaatatctctct

SEQ ID NO: 542576 - DNA, 33 bp, Homo sapien
cagcacccagatcaaggaaaagaatatctctct

SEQ ID NO: 542577 - DNA, 33 bp, Homo sapien
atcataaatatagaaaacacagagcattttttt

SEQ ID NO: 542578 - DNA, 33 bp, Homo sapien
atcataaatatagaaaccacagagcattttttt

SEQ ID NO: 542579 - DNA, 33 bp, Homo sapien
ttccatcctaaatactaaacacccagatgcacc

SEQ ID NO: 542580 - DNA, 33 bp, Homo sapien
ttccatcctaaatactgaacacccagatgcacc

SEQ ID NO: 542581 - DNA, 33 bp, Homo sapien
tatttaggatggaacactaaaggtaatcagcta

SEQ ID NO: 542582 - DNA, 33 bp, Homo sapien
tatttaggatggaacattaaaggtaatcagcta

SEQ ID NO: 542583 - DNA, 33 bp, Homo sapien
ctgtgataaaagattcactgtgacagagaacaa

SEQ ID NO: 542584 - DNA, 33 bp, Homo sapien
ctgtgataaaagattcgctgtgacagagaacaa

SEQ ID NO: 542585 - DNA, 33 bp, Homo sapien
tcaaaataaatggctaaaatgctggcaaataaa

SEQ ID NO: 542586 - DNA, 33 bp, Homo sapien
tcaaaataaatggctagaatgctggcaaataaa

SEQ ID NO: 542587 - DNA, 33 bp, Homo sapien
taagcaagacacttaactgaattgactccaagt

SEQ ID NO: 542588 - DNA, 33 bp, Homo sapien
taagcaagacacttaattgaattgactccaagt

SEQ ID NO: 542589 - DNA, 33 bp, Homo sapien
tagattgtaaacactacggacccttgcctcttg

SEQ ID NO: 542590 - DNA, 33 bp, Homo sapien
tagattgtaaacactatggacccttgcctcttg

SEQ ID NO: 542591 - DNA, 33 bp, Homo sapien
ggttctactatgtacacaaacacacacactcat

SEQ ID NO: 542592 - DNA, 33 bp, Homo sapien
ggttctactatgtacagaaacacacacactcat

SEQ ID NO: 542593 - DNA, 33 bp, Homo sapien
ctgtgtttcttaaagacgggtatgagcacagat

SEQ ID NO: 542594 - DNA, 33 bp, Homo sapien
ctgtgtttcttaaagatgggtatgagcacagat

SEQ ID NO: 542595 - DNA, 33 bp, Homo sapien
ttcatgtgaatattgacgtacatatttttttcc

SEQ ID NO: 542596 - DNA, 33 bp, Homo sapien
ttcatgtgaatattgaggtacatatttttttcc

SEQ ID NO: 542597 - DNA, 33 bp, Homo sapien
ctcgtcctccaatgcacggtcttatcatcccag

SEQ ID NO: 542598 - DNA, 33 bp, Homo sapien
ctcgtcctccaatgcatggtcttatcatcccag

SEQ ID NO: 542599 - DNA, 33 bp, Homo sapien
aggcataaatattgacagctcatatcaaaatag

SEQ ID NO: 542600 - DNA, 33 bp, Homo sapien
aggcataaatattgactgctcatatcaaaatag

SEQ ID NO: 542601 - DNA, 33 bp, Homo sapien
actgacacacttgccaatagtgtacaaaaatca

SEQ ID NO: 542602 - DNA, 33 bp, Homo sapien
actgacacacttgccagtagtgtacaaaaatca

SEQ ID NO: 542603 - DNA, 33 bp, Homo sapien
cattttcaatctgccaaatggagagtaagcatg

SEQ ID NO: 542604 - DNA, 33 bp, Homo sapien
cattttcaatctgccacatggagagtaagcatg

SEQ ID NO: 542605 - DNA, 33 bp, Homo sapien
tcacaatctgagttcacgtgaatgttttagaag

SEQ ID NO: 542606 - DNA, 33 bp, Homo sapien
tcacaatctgagttcatgtgaatgttttagaag

SEQ ID NO: 542607 - DNA, 33 bp, Homo sapien
ctgtgtactagtttgaggtttatggaagaaaaa

SEQ ID NO: 542608 - DNA, 33 bp, Homo sapien
ctgtgtactagtttgatgtttatggaagaaaaa

SEQ ID NO: 542609 - DNA, 33 bp, Homo sapien
atctgttcctgtatacaaaattttctagtaact

SEQ ID NO: 542610 - DNA, 33 bp, Homo sapien
atctgttcctgtatacgaaattttctagtaact

SEQ ID NO: 542611 - DNA, 33 bp, Homo sapien
tgaatttgttgggatcacatccagggaagaact

SEQ ID NO: 542612 - DNA, 33 bp, Homo sapien
tgaatttgttgggatctcatccagggaagaact

SEQ ID NO: 542613 - DNA, 33 bp, Homo sapien
attaagtgcttcaagaatatcatctatagcctg

SEQ ID NO: 542614 - DNA, 33 bp, Homo sapien
attaagtgcttcaagagtatcatctatagcctg

SEQ ID NO: 542615 - DNA, 33 bp, Homo sapien
ctgcagacttcctacactggaaacatcgcattt

SEQ ID NO: 542616 - DNA, 33 bp, Homo sapien
ctgcagacttcctacattggaaacatcgcattt

SEQ ID NO: 542617 - DNA, 33 bp, Homo sapien
gtgagaatctgagcaacgggtaggaaattttaa

SEQ ID NO: 542618 - DNA, 33 bp, Homo sapien
gtgagaatctgagcaatgggtaggaaattttaa

SEQ ID NO: 542619 - DNA, 33 bp, Homo sapien
tatttctgtctgatccaaaacaggtgttttcca

SEQ ID NO: 542620 - DNA, 33 bp, Homo sapien
tatttctgtctgatcctaaacaggtgttttcca

SEQ ID NO: 542621 - DNA, 33 bp, Homo sapien
aggtacctaagggctcaagggcaacagcctcac

SEQ ID NO: 542622 - DNA, 33 bp, Homo sapien
aggtacctaagggctcgagggcaacagcctcac

SEQ ID NO: 542623 - DNA, 33 bp, Homo sapien
tgctacaaatggttcacggactctaacgaatgt

SEQ ID NO: 542624 - DNA, 33 bp, Homo sapien
tgctacaaatggttcatggactctaacgaatgt

SEQ ID NO: 542625 - DNA, 33 bp, Homo sapien
tctacacatctgtgataagataacatgtaaggc

SEQ ID NO: 542626 - DNA, 33 bp, Homo sapien
tctacacatctgtgatgagataacatgtaaggc

SEQ ID NO: 542627 - DNA, 33 bp, Homo sapien
tgctacatatgaactacggtataacacgtctga

SEQ ID NO: 542628 - DNA, 33 bp, Homo sapien
tgctacatatgaactatggtataacacgtctga

SEQ ID NO: 542629 - DNA, 33 bp, Homo sapien
gactggtcaggcaaaccggaaatccatagggca

SEQ ID NO: 542630 - DNA, 33 bp, Homo sapien
gactggtcaggcaaactggaaatccatagggca

SEQ ID NO: 542631 - DNA, 33 bp, Homo sapien
accatggacctgccgtcacattccaagacctat

SEQ ID NO: 542632 - DNA, 33 bp, Homo sapien
accatggacctgccgttacattccaagacctat

SEQ ID NO: 542633 - DNA, 33 bp, Homo sapien
gacacctagctaagacacttcaacacctagcac

SEQ ID NO: 542634 - DNA, 33 bp, Homo sapien
gacacctagctaagacgcttcaacacctagcac

SEQ ID NO: 542635 - DNA, 33 bp, Homo sapien
gtctccacgcttttagcaccatctcaaaggtta

SEQ ID NO: 542636 - DNA, 33 bp, Homo sapien
gtctccacgcttttaggaccatctcaaaggtta

SEQ ID NO: 542637 - DNA, 33 bp, Homo sapien
gcatactggggatttaaaagtctctgaagtctg

SEQ ID NO: 542638 - DNA, 33 bp, Homo sapien
gcatactggggatttacaagtctctgaagtctg

SEQ ID NO: 542639 - DNA, 33 bp, Homo sapien
accatgcctttcagcaagaataaagtggttttt

SEQ ID NO: 542640 - DNA, 33 bp, Homo sapien
accatgcctttcagcaggaataaagtggttttt

SEQ ID NO: 542641 - DNA, 33 bp, Homo sapien
aaaggaaagacaatgccaaggatctgcttccag

SEQ ID NO: 542642 - DNA, 33 bp, Homo sapien
aaaggaaagacaatgcgaaggatctgcttccag

SEQ ID NO: 542643 - DNA, 33 bp, Homo sapien
aaaatctgtcctcacaagtaaacaacaagaaag

SEQ ID NO: 542644 - DNA, 33 bp, Homo sapien
aaaatctgtcctcacaggtaaacaacaagaaag

SEQ ID NO: 542645 - DNA, 33 bp, Homo sapien
ttgagggaaaggattcaaaagttcacttgaatc

SEQ ID NO: 542646 - DNA, 33 bp, Homo sapien
ttgagggaaaggattcgaaagttcacttgaatc

SEQ ID NO: 542647 - DNA, 33 bp, Homo sapien
gtgccagactacttgccgaaaataaaaattgtg

SEQ ID NO: 542648 - DNA, 33 bp, Homo sapien
gtgccagactacttgctgaaaataaaaattgtg

SEQ ID NO: 542649 - DNA, 33 bp, Homo sapien
ggaattgtcattttgcacacacatataaacaca

SEQ ID NO: 542650 - DNA, 33 bp, Homo sapien
ggaattgtcattttgcgcacacatataaacaca

SEQ ID NO: 542651 - DNA, 33 bp, Homo sapien
gaaggcagatgcaaaccccacctgtgccactgt

SEQ ID NO: 542652 - DNA, 33 bp, Homo sapien
gaaggcagatgcaaacgccacctgtgccactgt

SEQ ID NO: 542653 - DNA, 33 bp, Homo sapien
aatattgtattctcaacgcccggtggacaatgt

SEQ ID NO: 542654 - DNA, 33 bp, Homo sapien
aatattgtattctcaatgcccggtggacaatgt

SEQ ID NO: 542655 - DNA, 33 bp, Homo sapien
tgtaagataagcaaccactattatttatattac

SEQ ID NO: 542656 - DNA, 33 bp, Homo sapien
tgtaagataagcaaccgctattatttatattac

SEQ ID NO: 542657 - DNA, 33 bp, Homo sapien
ggaggaagagaatttcacattattggagggcct

SEQ ID NO: 542658 - DNA, 33 bp, Homo sapien
ggaggaagagaatttcgcattattggagggcct

SEQ ID NO: 542659 - DNA, 33 bp, Homo sapien
aatcaagcatgaagaacgtctactacatccatg

SEQ ID NO: 542660 - DNA, 33 bp, Homo sapien
aatcaagcatgaagaatgtctactacatccatg

SEQ ID NO: 542661 - DNA, 33 bp, Homo sapien
tttccccaaattgttaagcagtgaaaatatcat

SEQ ID NO: 542662 - DNA, 33 bp, Homo sapien
tttccccaaattgttatgcagtgaaaatatcat

SEQ ID NO: 542663 - DNA, 33 bp, Homo sapien
catgccctccaggagcccatgtttagtagagaa

SEQ ID NO: 542664 - DNA, 33 bp, Homo sapien
catgccctccaggagctcatgtttagtagagaa

SEQ ID NO: 542665 - DNA, 33 bp, Homo sapien
gctgtagcaggcattgaactcactggcctagtg

SEQ ID NO: 542666 - DNA, 33 bp, Homo sapien
gctgtagcaggcattggactcactggcctagtg

SEQ ID NO: 542667 - DNA, 33 bp, Homo sapien
agatcaaatggcacagaaatgcagtggagggac

SEQ ID NO: 542668 - DNA, 33 bp, Homo sapien
agatcaaatggcacaggaatgcagtggagggac

SEQ ID NO: 542669 - DNA, 33 bp, Homo sapien
aaaagtcatttaagagaccaggggatcccgggt

SEQ ID NO: 542670 - DNA, 33 bp, Homo sapien
aaaagtcatttaagagtccaggggatcccgggt

SEQ ID NO: 542671 - DNA, 33 bp, Homo sapien
atggtattagaaatcaatatctgggcactgagt

SEQ ID NO: 542672 - DNA, 33 bp, Homo sapien
atggtattagaaatcagtatctgggcactgagt

SEQ ID NO: 542673 - DNA, 33 bp, Homo sapien
gaattcctctggaagactaacttgagactcttt

SEQ ID NO: 542674 - DNA, 33 bp, Homo sapien
gaattcctctggaagattaacttgagactcttt

SEQ ID NO: 542675 - DNA, 33 bp, Homo sapien
cagagaacccttgtgaagtaatatacaagatga

SEQ ID NO: 542676 - DNA, 33 bp, Homo sapien
cagagaacccttgtgaggtaatatacaagatga

SEQ ID NO: 542677 - DNA, 33 bp, Homo sapien
cacaattacttttctcccaatgtgttataccaa

SEQ ID NO: 542678 - DNA, 33 bp, Homo sapien
cacaattacttttctctcaatgtgttataccaa

SEQ ID NO: 542679 - DNA, 33 bp, Homo sapien
cagcccatagttagaactgtggaatccatcaac

SEQ ID NO: 542680 - DNA, 33 bp, Homo sapien
cagcccatagttagaattgtggaatccatcaac

SEQ ID NO: 542681 - DNA, 33 bp, Homo sapien
atctccatactgtgccacattttatttttaaaa

SEQ ID NO: 542682 - DNA, 33 bp, Homo sapien
atctccatactgtgccgcattttatttttaaaa

SEQ ID NO: 542683 - DNA, 33 bp, Homo sapien
ccagtgtggctattgaaattaaaacgatcttaa

SEQ ID NO: 542684 - DNA, 33 bp, Homo sapien
ccagtgtggctattgacattaaaacgatcttaa

SEQ ID NO: 542685 - DNA, 33 bp, Homo sapien
ctgaagggtcgattcaagatcaaaatatgcatt

SEQ ID NO: 542686 - DNA, 33 bp, Homo sapien
ctgaagggtcgattcaggatcaaaatatgcatt

SEQ ID NO: 542687 - DNA, 33 bp, Homo sapien
ctaactaagcccttcaatatttgtccactctct

SEQ ID NO: 542688 - DNA, 33 bp, Homo sapien
ctaactaagcccttcagtatttgtccactctct

SEQ ID NO: 542689 - DNA, 33 bp, Homo sapien
ctatcagtcctatgaactgtagaacttgtggca

SEQ ID NO: 542690 - DNA, 33 bp, Homo sapien
ctatcagtcctatgaattgtagaacttgtggca

SEQ ID NO: 542691 - DNA, 33 bp, Homo sapien
gccccagtggatgaaaatgcttccaaaacttct

SEQ ID NO: 542692 - DNA, 33 bp, Homo sapien
gccccagtggatgaaattgcttccaaaacttct

SEQ ID NO: 542693 - DNA, 33 bp, Homo sapien
gtaggatggatgatcacaactgagaagggagac

SEQ ID NO: 542694 - DNA, 33 bp, Homo sapien
gtaggatggatgatcagaactgagaagggagac

SEQ ID NO: 542695 - DNA, 33 bp, Homo sapien
atacatgaatagaatacagtagaattaaacgac

SEQ ID NO: 542696 - DNA, 33 bp, Homo sapien
atacatgaatagaatagagtagaattaaacgac

SEQ ID NO: 542697 - DNA, 33 bp, Homo sapien
ttctaatttcccttaaaacttgagtcactggat

SEQ ID NO: 542698 - DNA, 33 bp, Homo sapien
ttctaatttcccttaacacttgagtcactggat

SEQ ID NO: 542699 - DNA, 33 bp, Homo sapien
aaaacagaggtccagccattttggttaacttat

SEQ ID NO: 542700 - DNA, 33 bp, Homo sapien
aaaacagaggtccagcgattttggttaacttat

SEQ ID NO: 542701 - DNA, 33 bp, Homo sapien
tattggggaataaagaaagaatgcctttgggaa

SEQ ID NO: 542702 - DNA, 33 bp, Homo sapien
tattggggaataaagagagaatgcctttgggaa

SEQ ID NO: 542703 - DNA, 33 bp, Homo sapien
aagatgactaagcctacaatggcaaggagcaga

SEQ ID NO: 542704 - DNA, 33 bp, Homo sapien
aagatgactaagcctagaatggcaaggagcaga

SEQ ID NO: 542705 - DNA, 33 bp, Homo sapien
gttgcgtgattgctgacaaacacagtgctgttt

SEQ ID NO: 542706 - DNA, 33 bp, Homo sapien
gttgcgtgattgctgataaacacagtgctgttt

SEQ ID NO: 542707 - DNA, 33 bp, Homo sapien
gaacttgcagtgtggccatttccgcttttcatt

SEQ ID NO: 542708 - DNA, 33 bp, Homo sapien
gaacttgcagtgtggctatttccgcttttcatt

SEQ ID NO: 542709 - DNA, 33 bp, Homo sapien
aggtcaagaatgtgagccaattccaaaggaatg

SEQ ID NO: 542710 - DNA, 33 bp, Homo sapien
aggtcaagaatgtgaggcaattccaaaggaatg

SEQ ID NO: 542711 - DNA, 33 bp, Homo sapien
gacaagaaaccagacacgggaagttctctgagg

SEQ ID NO: 542712 - DNA, 33 bp, Homo sapien
gacaagaaaccagacatgggaagttctctgagg

SEQ ID NO: 542713 - DNA, 33 bp, Homo sapien
tggtgcccttgtgccacggtgttgtcaatggca

SEQ ID NO: 542714 - DNA, 33 bp, Homo sapien
tggtgcccttgtgccatggtgttgtcaatggca

SEQ ID NO: 542715 - DNA, 33 bp, Homo sapien
ccagagagaagtgtcacgatcaacttgtaatgc

SEQ ID NO: 542716 - DNA, 33 bp, Homo sapien
ccagagagaagtgtcatgatcaacttgtaatgc

SEQ ID NO: 542717 - DNA, 33 bp, Homo sapien
agatttggcaataggacgtttctactgaagata

SEQ ID NO: 542718 - DNA, 33 bp, Homo sapien
agatttggcaataggaggtttctactgaagata

SEQ ID NO: 542719 - DNA, 33 bp, Homo sapien
cacacacactcacacactccattgctcctgctt

SEQ ID NO: 542720 - DNA, 33 bp, Homo sapien
cacacacactcacacagtccattgctcctgctt

SEQ ID NO: 542721 - DNA, 33 bp, Homo sapien
aattcagagggcaggtaaatcacatcactctta

SEQ ID NO: 542722 - DNA, 33 bp, Homo sapien
aattcagagggcaggtgaatcacatcactctta

SEQ ID NO: 542723 - DNA, 33 bp, Homo sapien
gtacctaaggagataaactaatttgactacagg

SEQ ID NO: 542724 - DNA, 33 bp, Homo sapien
gtacctaaggagataagctaatttgactacagg

SEQ ID NO: 542725 - DNA, 33 bp, Homo sapien
accagctcatctccaacatgtgctagatcatgt

SEQ ID NO: 542726 - DNA, 33 bp, Homo sapien
accagctcatctccaatatgtgctagatcatgt

SEQ ID NO: 542727 - DNA, 33 bp, Homo sapien
gaaacaaaagcatgaaacataatcagcatccag

SEQ ID NO: 542728 - DNA, 33 bp, Homo sapien
gaaacaaaagcatgaaccataatcagcatccag

SEQ ID NO: 542729 - DNA, 33 bp, Homo sapien
tggagagggaacttgaagattaagctactctca

SEQ ID NO: 542730 - DNA, 33 bp, Homo sapien
tggagagggaacttgatgattaagctactctca

SEQ ID NO: 542731 - DNA, 33 bp, Homo sapien
gttttgttaaaatgcacactgtttaggaagact

SEQ ID NO: 542732 - DNA, 33 bp, Homo sapien
gttttgttaaaatgcagactgtttaggaagact

SEQ ID NO: 542733 - DNA, 33 bp, Homo sapien
gcgctggagttggacccgatagcataacacggt

SEQ ID NO: 542734 - DNA, 33 bp, Homo sapien
gcgctggagttggaccggatagcataacacggt

SEQ ID NO: 542735 - DNA, 33 bp, Homo sapien
gaggacagtaagtacaaagtccccgaggaatcc

SEQ ID NO: 542736 - DNA, 33 bp, Homo sapien
gaggacagtaagtacagagtccccgaggaatcc

SEQ ID NO: 542737 - DNA, 33 bp, Homo sapien
ttaatactaccaacaccaagttctgtcgtctga

SEQ ID NO: 542738 - DNA, 33 bp, Homo sapien
ttaatactaccaacactaagttctgtcgtctga

SEQ ID NO: 542739 - DNA, 33 bp, Homo sapien
ggaagaacagtctacaaagagggaagtctgcag

SEQ ID NO: 542740 - DNA, 33 bp, Homo sapien
ggaagaacagtctacagagagggaagtctgcag

SEQ ID NO: 542741 - DNA, 33 bp, Homo sapien
ccaaagatctaccttacattgcacacttttggg

SEQ ID NO: 542742 - DNA, 33 bp, Homo sapien
ccaaagatctaccttatattgcacacttttggg

SEQ ID NO: 542743 - DNA, 33 bp, Homo sapien
aacctaacaaagcatcgatccacatatatccac

SEQ ID NO: 542744 - DNA, 33 bp, Homo sapien
aacctaacaaagcatctatccacatatatccac

SEQ ID NO: 542745 - DNA, 33 bp, Homo sapien
gggtttcaattaaatacgccattctttggttcc

SEQ ID NO: 542746 - DNA, 33 bp, Homo sapien
gggtttcaattaaatatgccattctttggttcc

SEQ ID NO: 542747 - DNA, 33 bp, Homo sapien
tgctgattagtaacgcagatttccctgaagatg

SEQ ID NO: 542748 - DNA, 33 bp, Homo sapien
tgctgattagtaacgcggatttccctgaagatg

SEQ ID NO: 542749 - DNA, 33 bp, Homo sapien
ctatttttggaagaacaatgcattttggtaatc

SEQ ID NO: 542750 - DNA, 33 bp, Homo sapien
ctatttttggaagaacgatgcattttggtaatc

SEQ ID NO: 542751 - DNA, 33 bp, Homo sapien
cttcttgttgttatgcaagattcaatagacatt

SEQ ID NO: 542752 - DNA, 33 bp, Homo sapien
cttcttgttgttatgcgagattcaatagacatt

SEQ ID NO: 542753 - DNA, 33 bp, Homo sapien
gcaaggctcagctccactccagaggcaggcatt

SEQ ID NO: 542754 - DNA, 33 bp, Homo sapien
gcaaggctcagctccagtccagaggcaggcatt

SEQ ID NO: 542755 - DNA, 33 bp, Homo sapien
gccaagatgtgtaagaagggagaagcaactcgt

SEQ ID NO: 542756 - DNA, 33 bp, Homo sapien
gccaagatgtgtaagaggggagaagcaactcgt

SEQ ID NO: 542757 - DNA, 33 bp, Homo sapien
actgacttttcagatcaaaggccctttccaaat

SEQ ID NO: 542758 - DNA, 33 bp, Homo sapien
actgacttttcagatcgaaggccctttccaaat

SEQ ID NO: 542759 - DNA, 33 bp, Homo sapien
cactttcagagaaaccaaaagtcacagcactac

SEQ ID NO: 542760 - DNA, 33 bp, Homo sapien
cactttcagagaaaccgaaagtcacagcactac

SEQ ID NO: 542761 - DNA, 33 bp, Homo sapien
gatgttaatagatttacgttgaggagactacgt

SEQ ID NO: 542762 - DNA, 33 bp, Homo sapien
gatgttaatagatttatgttgaggagactacgt

SEQ ID NO: 542763 - DNA, 33 bp, Homo sapien
ccttcctttcagtcccaaactttcttttatttt

SEQ ID NO: 542764 - DNA, 33 bp, Homo sapien
ccttcctttcagtcccgaactttcttttatttt

SEQ ID NO: 542765 - DNA, 33 bp, Homo sapien
cgcttctctgctcaaaactttcaaaccattgtt

SEQ ID NO: 542766 - DNA, 33 bp, Homo sapien
cgcttctctgctcaaatctttcaaaccattgtt

SEQ ID NO: 542767 - DNA, 33 bp, Homo sapien
catgaaaagctgacgaaaggaacttggcactgg

SEQ ID NO: 542768 - DNA, 33 bp, Homo sapien
catgaaaagctgacgataggaacttggcactgg

SEQ ID NO: 542769 - DNA, 33 bp, Homo sapien
gccccactttctaagaagaggctttagaagatg

SEQ ID NO: 542770 - DNA, 33 bp, Homo sapien
gccccactttctaagatgaggctttagaagatg

SEQ ID NO: 542771 - DNA, 33 bp, Homo sapien
ttcactctataatcaagtcttcatttcatagta

SEQ ID NO: 542772 - DNA, 33 bp, Homo sapien
ttcactctataatcaattcttcatttcatagta

SEQ ID NO: 542773 - DNA, 33 bp, Homo sapien
gcagagaatatggcaaaaactgaccaaatcaat

SEQ ID NO: 542774 - DNA, 33 bp, Homo sapien
gcagagaatatggcaagaactgaccaaatcaat

SEQ ID NO: 542775 - DNA, 33 bp, Homo sapien
tatgtagctcttgataagaactgggattttgga

SEQ ID NO: 542776 - DNA, 33 bp, Homo sapien
tatgtagctcttgataggaactgggattttgga

SEQ ID NO: 542777 - DNA, 33 bp, Homo sapien
aagcagttagaagagacgatggagtatatttct

SEQ ID NO: 542778 - DNA, 33 bp, Homo sapien
aagcagttagaagagatgatggagtatatttct

SEQ ID NO: 542779 - DNA, 33 bp, Homo sapien
ctctgggccagtgggacgttggaagttttcaga

SEQ ID NO: 542780 - DNA, 33 bp, Homo sapien
ctctgggccagtgggatgttggaagttttcaga

SEQ ID NO: 542781 - DNA, 33 bp, Homo sapien
gcataactaattgcccacttccctttatcagca

SEQ ID NO: 542782 - DNA, 33 bp, Homo sapien
gcataactaattgccctcttccctttatcagca

SEQ ID NO: 542783 - DNA, 33 bp, Homo sapien
atagagaggttgagaaaagagctgaaatgattg

SEQ ID NO: 542784 - DNA, 33 bp, Homo sapien
atagagaggttgagaagagagctgaaatgattg

SEQ ID NO: 542785 - DNA, 33 bp, Homo sapien
gctggctcttctggaaaaaccatccagggatat

SEQ ID NO: 542786 - DNA, 33 bp, Homo sapien
gctggctcttctggaacaaccatccagggatat

SEQ ID NO: 542787 - DNA, 33 bp, Homo sapien
acagttctatcaggtcaagcaaaagttgatgtt

SEQ ID NO: 542788 - DNA, 33 bp, Homo sapien
acagttctatcaggtcgagcaaaagttgatgtt

SEQ ID NO: 542789 - DNA, 33 bp, Homo sapien
cctctgctgcttgtaaaagagattaagggctaa

SEQ ID NO: 542790 - DNA, 33 bp, Homo sapien
cctctgctgcttgtaatagagattaagggctaa

SEQ ID NO: 542791 - DNA, 33 bp, Homo sapien
attagggaaagaagaaatgtctgtcagaacagt

SEQ ID NO: 542792 - DNA, 33 bp, Homo sapien
attagggaaagaagaagtgtctgtcagaacagt

SEQ ID NO: 542793 - DNA, 33 bp, Homo sapien
acctaataggaagtagaaagtgtttgagtcatg

SEQ ID NO: 542794 - DNA, 33 bp, Homo sapien
acctaataggaagtaggaagtgtttgagtcatg

SEQ ID NO: 542795 - DNA, 33 bp, Homo sapien
ctagtaagatgttacaactagttcaaaggaaaa

SEQ ID NO: 542796 - DNA, 33 bp, Homo sapien
ctagtaagatgttacagctagttcaaaggaaaa

SEQ ID NO: 542797 - DNA, 33 bp, Homo sapien
tcatctgccttacccactagaaactggatccaa

SEQ ID NO: 542798 - DNA, 33 bp, Homo sapien
tcatctgccttacccattagaaactggatccaa

SEQ ID NO: 542799 - DNA, 33 bp, Homo sapien
accatgttgcagttaccagctttgtggcttctg

SEQ ID NO: 542800 - DNA, 33 bp, Homo sapien
accatgttgcagttactagctttgtggcttctg

SEQ ID NO: 542801 - DNA, 33 bp, Homo sapien
gaataatgatcacaacgagttatttttaccatt

SEQ ID NO: 542802 - DNA, 33 bp, Homo sapien
gaataatgatcacaactagttatttttaccatt

SEQ ID NO: 542803 - DNA, 33 bp, Homo sapien
tatagataccacttggaaaaagaaaagctagca

SEQ ID NO: 542804 - DNA, 33 bp, Homo sapien
tatagataccacttgggaaaagaaaagctagca

SEQ ID NO: 542805 - DNA, 33 bp, Homo sapien
tgatgtcaattggtgcaaactgaaaggaaagag

SEQ ID NO: 542806 - DNA, 33 bp, Homo sapien
tgatgtcaattggtgcgaactgaaaggaaagag

SEQ ID NO: 542807 - DNA, 33 bp, Homo sapien
gtatccctattctgggaaggaaagcaacaatat

SEQ ID NO: 542808 - DNA, 33 bp, Homo sapien
gtatccctattctggggaggaaagcaacaatat

SEQ ID NO: 542809 - DNA, 33 bp, Homo sapien
gagatagaggtgagaaaaagacctaagacagag

SEQ ID NO: 542810 - DNA, 33 bp, Homo sapien
gagatagaggtgagaagaagacctaagacagag

SEQ ID NO: 542811 - DNA, 33 bp, Homo sapien
tcctttgtaaacctaacctagcatctaattagc

SEQ ID NO: 542812 - DNA, 33 bp, Homo sapien
tcctttgtaaacctaatctagcatctaattagc

SEQ ID NO: 542813 - DNA, 33 bp, Homo sapien
ttatctctaccacttcaacctgttttccaaact

SEQ ID NO: 542814 - DNA, 33 bp, Homo sapien
ttatctctaccacttcgacctgttttccaaact

SEQ ID NO: 542815 - DNA, 33 bp, Homo sapien
atggacccgagtgcaaattaacctagtttcttc

SEQ ID NO: 542816 - DNA, 33 bp, Homo sapien
atggacccgagtgcaagttaacctagtttcttc

SEQ ID NO: 542817 - DNA, 33 bp, Homo sapien
ctcttgaaataattgccatgtcgaattacaatc

SEQ ID NO: 542818 - DNA, 33 bp, Homo sapien
ctcttgaaataattgctatgtcgaattacaatc

SEQ ID NO: 542819 - DNA, 33 bp, Homo sapien
tgggctgtaaatagcacgaccatgtgtaaggat

SEQ ID NO: 542820 - DNA, 33 bp, Homo sapien
tgggctgtaaatagcatgaccatgtgtaaggat

SEQ ID NO: 542821 - DNA, 33 bp, Homo sapien
tggactgttacctgcagtagaagtaggtggagg

SEQ ID NO: 542822 - DNA, 33 bp, Homo sapien
tggactgttacctgcattagaagtaggtggagg

SEQ ID NO: 542823 - DNA, 33 bp, Homo sapien
tgatagttacactttcacaactgaaggcttatt

SEQ ID NO: 542824 - DNA, 33 bp, Homo sapien
tgatagttacactttcccaactgaaggcttatt

SEQ ID NO: 542825 - DNA, 33 bp, Homo sapien
aggaataagcttgtagacatagaactttgtaga

SEQ ID NO: 542826 - DNA, 33 bp, Homo sapien
aggaataagcttgtaggcatagaactttgtaga

SEQ ID NO: 542827 - DNA, 33 bp, Homo sapien
ttctattctttgctcaaccccgttctccttttt

SEQ ID NO: 542828 - DNA, 33 bp, Homo sapien
ttctattctttgctcatccccgttctccttttt

SEQ ID NO: 542829 - DNA, 33 bp, Homo sapien
gcaggaagccaataaccgcttgggaactttgtc

SEQ ID NO: 542830 - DNA, 33 bp, Homo sapien
gcaggaagccaataactgcttgggaactttgtc

SEQ ID NO: 542831 - DNA, 33 bp, Homo sapien
taaccctatgaaagagacattttgactcagatg

SEQ ID NO: 542832 - DNA, 33 bp, Homo sapien
taaccctatgaaagaggcattttgactcagatg

SEQ ID NO: 542833 - DNA, 33 bp, Homo sapien
tccacgatcagttcaacccccctttccctgttt

SEQ ID NO: 542834 - DNA, 33 bp, Homo sapien
tccacgatcagttcaatccccctttccctgttt

SEQ ID NO: 542835 - DNA, 33 bp, Homo sapien
tagcaggtagtcttcacgtactgggggcaaata

SEQ ID NO: 542836 - DNA, 33 bp, Homo sapien
tagcaggtagtcttcatgtactgggggcaaata

SEQ ID NO: 542837 - DNA, 33 bp, Homo sapien
ttgcttatacattttgaaatctatattgaatca

SEQ ID NO: 542838 - DNA, 33 bp, Homo sapien
ttgcttatacattttgtaatctatattgaatca

SEQ ID NO: 542839 - DNA, 33 bp, Homo sapien
cttttaacatggactacgcaagctgcagaccag

SEQ ID NO: 542840 - DNA, 33 bp, Homo sapien
cttttaacatggactatgcaagctgcagaccag

SEQ ID NO: 542841 - DNA, 33 bp, Homo sapien
aagaacagagaacagacgtacctgagcagaggt

SEQ ID NO: 542842 - DNA, 33 bp, Homo sapien
aagaacagagaacagatgtacctgagcagaggt

SEQ ID NO: 542843 - DNA, 33 bp, Homo sapien
atatgaaattcagcaccgagtaccccagaagct

SEQ ID NO: 542844 - DNA, 33 bp, Homo sapien
atatgaaattcagcactgagtaccccagaagct

SEQ ID NO: 542845 - DNA, 33 bp, Homo sapien
gttcaaggaagcatagcaaacttggagtacaat

SEQ ID NO: 542846 - DNA, 33 bp, Homo sapien
gttcaaggaagcatagtaaacttggagtacaat

SEQ ID NO: 542847 - DNA, 33 bp, Homo sapien
taggtgtcatgaagaaaaggtgctggagcttta

SEQ ID NO: 542848 - DNA, 33 bp, Homo sapien
taggtgtcatgaagaagaggtgctggagcttta

SEQ ID NO: 542849 - DNA, 33 bp, Homo sapien
ccctaaacttctgacccgcagccacaaggattt

SEQ ID NO: 542850 - DNA, 33 bp, Homo sapien
ccctaaacttctgacctgcagccacaaggattt

SEQ ID NO: 542851 - DNA, 33 bp, Homo sapien
gatcaggcaggacaaacagcaggtggacaccgg

SEQ ID NO: 542852 - DNA, 33 bp, Homo sapien
gatcaggcaggacaaagagcaggtggacaccgg

SEQ ID NO: 542853 - DNA, 33 bp, Homo sapien
tcatgtgagtccacaccgtaaaatgaaaaaccc

SEQ ID NO: 542854 - DNA, 33 bp, Homo sapien
tcatgtgagtccacactgtaaaatgaaaaaccc

SEQ ID NO: 542855 - DNA, 33 bp, Homo sapien
aaagggaatcaccaccaactctagaagtataat

SEQ ID NO: 542856 - DNA, 33 bp, Homo sapien
aaagggaatcaccaccgactctagaagtataat

SEQ ID NO: 542857 - DNA, 33 bp, Homo sapien
gcatgctcttgccatacaaaaatctacctgagg

SEQ ID NO: 542858 - DNA, 33 bp, Homo sapien
gcatgctcttgccatataaaaatctacctgagg

SEQ ID NO: 542859 - DNA, 33 bp, Homo sapien
gagggagggttggagccaatgagtggattattc

SEQ ID NO: 542860 - DNA, 33 bp, Homo sapien
gagggagggttggagcgaatgagtggattattc

SEQ ID NO: 542861 - DNA, 33 bp, Homo sapien
tcaagtacataattcactgaaaggctacgaagg

SEQ ID NO: 542862 - DNA, 33 bp, Homo sapien
tcaagtacataattcattgaaaggctacgaagg

SEQ ID NO: 542863 - DNA, 33 bp, Homo sapien
aaacaaaactcactaacaataacagcacacaca

SEQ ID NO: 542864 - DNA, 33 bp, Homo sapien
aaacaaaactcactaataataacagcacacaca

SEQ ID NO: 542865 - DNA, 33 bp, Homo sapien
gtaggaaccatctagcaccactctaaaaaaggg

SEQ ID NO: 542866 - DNA, 33 bp, Homo sapien
gtaggaaccatctagcgccactctaaaaaaggg

SEQ ID NO: 542867 - DNA, 33 bp, Homo sapien
gcttgattttaagtacagatagttttacctgat

SEQ ID NO: 542868 - DNA, 33 bp, Homo sapien
gcttgattttaagtacggatagttttacctgat

SEQ ID NO: 542869 - DNA, 33 bp, Homo sapien
tccaacaagtatattcacaccattgttttgtct

SEQ ID NO: 542870 - DNA, 33 bp, Homo sapien
tccaacaagtatattcgcaccattgttttgtct

SEQ ID NO: 542871 - DNA, 33 bp, Homo sapien
catgaggtagttaagacactaggaccttgaaag

SEQ ID NO: 542872 - DNA, 33 bp, Homo sapien
catgaggtagttaagatactaggaccttgaaag

SEQ ID NO: 542873 - DNA, 33 bp, Homo sapien
aaatacagttacttcacaaggaaaattttagaa

SEQ ID NO: 542874 - DNA, 33 bp, Homo sapien
aaatacagttacttcagaaggaaaattttagaa

SEQ ID NO: 542875 - DNA, 33 bp, Homo sapien
ttctcaaacacaggctaaagagaatagtgtaat

SEQ ID NO: 542876 - DNA, 33 bp, Homo sapien
ttctcaaacacaggctgaagagaatagtgtaat

SEQ ID NO: 542877 - DNA, 33 bp, Homo sapien
caggtcctctgaaaagcaggtgcccagacataa

SEQ ID NO: 542878 - DNA, 33 bp, Homo sapien
caggtcctctgaaaagtaggtgcccagacataa

SEQ ID NO: 542879 - DNA, 33 bp, Homo sapien
gacactatttattgacaatccacagtatgcgaa

SEQ ID NO: 542880 - DNA, 33 bp, Homo sapien
gacactatttattgacgatccacagtatgcgaa

SEQ ID NO: 542881 - DNA, 33 bp, Homo sapien
tatatttggtcttcaaccccatctcccgcatac

SEQ ID NO: 542882 - DNA, 33 bp, Homo sapien
tatatttggtcttcaatcccatctcccgcatac

SEQ ID NO: 542883 - DNA, 33 bp, Homo sapien
aaaacaaatccacagaagttaaaaggtttatct

SEQ ID NO: 542884 - DNA, 33 bp, Homo sapien
aaaacaaatccacagacgttaaaaggtttatct

SEQ ID NO: 542885 - DNA, 33 bp, Homo sapien
ttcttttgctctgctccaatatgctctgatttc

SEQ ID NO: 542886 - DNA, 33 bp, Homo sapien
ttcttttgctctgctctaatatgctctgatttc

SEQ ID NO: 542887 - DNA, 33 bp, Homo sapien
aaggccgtaggagctcaaggttgctgcctttac

SEQ ID NO: 542888 - DNA, 33 bp, Homo sapien
aaggccgtaggagctcgaggttgctgcctttac

SEQ ID NO: 542889 - DNA, 33 bp, Homo sapien
cacagcttaactgccaaagaaaagaacaaagtc

SEQ ID NO: 542890 - DNA, 33 bp, Homo sapien
cacagcttaactgccagagaaaagaacaaagtc

SEQ ID NO: 542891 - DNA, 33 bp, Homo sapien
aagaaggaaacaccacaacatttatggaattta

SEQ ID NO: 542892 - DNA, 33 bp, Homo sapien
aagaaggaaacaccacgacatttatggaattta

SEQ ID NO: 542893 - DNA, 33 bp, Homo sapien
agactcacccaaggaaatccacattcaggaagc

SEQ ID NO: 542894 - DNA, 33 bp, Homo sapien
agactcacccaaggaagtccacattcaggaagc

SEQ ID NO: 542895 - DNA, 33 bp, Homo sapien
taacaaattatgccccaaatcagtgacttacag

SEQ ID NO: 542896 - DNA, 33 bp, Homo sapien
taacaaattatgccccgaatcagtgacttacag

SEQ ID NO: 542897 - DNA, 33 bp, Homo sapien
ggaaattgtggacactcaactatgtgatgactt

SEQ ID NO: 542898 - DNA, 33 bp, Homo sapien
ggaaattgtggacactgaactatgtgatgactt

SEQ ID NO: 542899 - DNA, 33 bp, Homo sapien
agagaaaacagtatcaatagaagtctggagtgc

SEQ ID NO: 542900 - DNA, 33 bp, Homo sapien
agagaaaacagtatcagtagaagtctggagtgc

SEQ ID NO: 542901 - DNA, 33 bp, Homo sapien
tgtttaggagggctgacatgagtttatttttag

SEQ ID NO: 542902 - DNA, 33 bp, Homo sapien
tgtttaggagggctgatatgagtttatttttag

SEQ ID NO: 542903 - DNA, 33 bp, Homo sapien
agaaacactgcttagaataaaggaactgaagaa

SEQ ID NO: 542904 - DNA, 33 bp, Homo sapien
agaaacactgcttagactaaaggaactgaagaa

SEQ ID NO: 542905 - DNA, 33 bp, Homo sapien
ctatataggaccctgacatttgcagccagatgc

SEQ ID NO: 542906 - DNA, 33 bp, Homo sapien
ctatataggaccctgatatttgcagccagatgc

SEQ ID NO: 542907 - DNA, 33 bp, Homo sapien
ttcagtatagtaacacactgcacgggtttgtac

SEQ ID NO: 542908 - DNA, 33 bp, Homo sapien
ttcagtatagtaacacgctgcacgggtttgtac

SEQ ID NO: 542909 - DNA, 33 bp, Homo sapien
tagtaaaaagatgccccagcggaaaaacaaaca

SEQ ID NO: 542910 - DNA, 33 bp, Homo sapien
tagtaaaaagatgccctagcggaaaaacaaaca

SEQ ID NO: 542911 - DNA, 33 bp, Homo sapien
aggctttcatcaaaagccctatcaacaggcaca

SEQ ID NO: 542912 - DNA, 33 bp, Homo sapien
aggctttcatcaaaagtcctatcaacaggcaca

SEQ ID NO: 542913 - DNA, 33 bp, Homo sapien
atgagacaaaaaaggagtcaaacaaaataaata

SEQ ID NO: 542914 - DNA, 33 bp, Homo sapien
atgagacaaaaaaggattcaaacaaaataaata

SEQ ID NO: 542915 - DNA, 33 bp, Homo sapien
cttaaagagcagtggtaaaaaaggcccttagaa

SEQ ID NO: 542916 - DNA, 33 bp, Homo sapien
cttaaagagcagtggtgaaaaaggcccttagaa

SEQ ID NO: 542917 - DNA, 33 bp, Homo sapien
aagcccgcttttgatacgtttcttaaattgcct

SEQ ID NO: 542918 - DNA, 33 bp, Homo sapien
aagcccgcttttgatatgtttcttaaattgcct

SEQ ID NO: 542919 - DNA, 33 bp, Homo sapien
catacactgctattcacattgagaatgataatt

SEQ ID NO: 542920 - DNA, 33 bp, Homo sapien
catacactgctattcatattgagaatgataatt

SEQ ID NO: 542921 - DNA, 33 bp, Homo sapien
gagaaagatttggttcaatggaaagagatagta

SEQ ID NO: 542922 - DNA, 33 bp, Homo sapien
gagaaagatttggttcgatggaaagagatagta

SEQ ID NO: 542923 - DNA, 33 bp, Homo sapien
gtgtccttaaaaataccaggtcacattatatct

SEQ ID NO: 542924 - DNA, 33 bp, Homo sapien
gtgtccttaaaaatactaggtcacattatatct

SEQ ID NO: 542925 - DNA, 33 bp, Homo sapien
ggcatactcaagcctacggtgctcagtattgcc

SEQ ID NO: 542926 - DNA, 33 bp, Homo sapien
ggcatactcaagcctatggtgctcagtattgcc

SEQ ID NO: 542927 - DNA, 33 bp, Homo sapien
ggagagtgtacatgtaaatgataatggggagaa

SEQ ID NO: 542928 - DNA, 33 bp, Homo sapien
ggagagtgtacatgtagatgataatggggagaa

SEQ ID NO: 542929 - DNA, 33 bp, Homo sapien
gagccaggagaactgacagatgaagagcacaca

SEQ ID NO: 542930 - DNA, 33 bp, Homo sapien
gagccaggagaactgatagatgaagagcacaca

SEQ ID NO: 542931 - DNA, 33 bp, Homo sapien
tggcaccagctcttcacgccttcaccttataat

SEQ ID NO: 542932 - DNA, 33 bp, Homo sapien
tggcaccagctcttcatgccttcaccttataat

SEQ ID NO: 542933 - DNA, 33 bp, Homo sapien
ataccattgattctcagtcttgcacatggccca

SEQ ID NO: 542934 - DNA, 33 bp, Homo sapien
ataccattgattctcattcttgcacatggccca

SEQ ID NO: 542935 - DNA, 33 bp, Homo sapien
atgtcaatcttttttaaagacattctcattact

SEQ ID NO: 542936 - DNA, 33 bp, Homo sapien
atgtcaatcttttttagagacattctcattact

SEQ ID NO: 542937 - DNA, 33 bp, Homo sapien
tggtatgaaattggccggattcctttctaagtg

SEQ ID NO: 542938 - DNA, 33 bp, Homo sapien
tggtatgaaattggcctgattcctttctaagtg

SEQ ID NO: 542939 - DNA, 33 bp, Homo sapien
tcttttcttgacctagcatatcagtgacagttg

SEQ ID NO: 542940 - DNA, 33 bp, Homo sapien
tcttttcttgacctagtatatcagtgacagttg

SEQ ID NO: 542941 - DNA, 33 bp, Homo sapien
cataactcactgcttaaaaggagtatgaaggga

SEQ ID NO: 542942 - DNA, 33 bp, Homo sapien
cataactcactgcttataaggagtatgaaggga

SEQ ID NO: 542943 - DNA, 33 bp, Homo sapien
atggctttgaaaataaatggacacagatctctc

SEQ ID NO: 542944 - DNA, 33 bp, Homo sapien
atggctttgaaaataagtggacacagatctctc

SEQ ID NO: 542945 - DNA, 33 bp, Homo sapien
ttgccctccttgaaacaggtcacattcacagca

SEQ ID NO: 542946 - DNA, 33 bp, Homo sapien
ttgccctccttgaaaccggtcacattcacagca

SEQ ID NO: 542947 - DNA, 33 bp, Homo sapien
gtttgaagaacacacaatcgttgtcctccagaa

SEQ ID NO: 542948 - DNA, 33 bp, Homo sapien
gtttgaagaacacacattcgttgtcctccagaa

SEQ ID NO: 542949 - DNA, 33 bp, Homo sapien
ggagactaaaggaagaacttctgacttgtcccc

SEQ ID NO: 542950 - DNA, 33 bp, Homo sapien
ggagactaaaggaagaccttctgacttgtcccc

SEQ ID NO: 542951 - DNA, 33 bp, Homo sapien
ggctgtttgaaaggccaaatggtaatgatgaga

SEQ ID NO: 542952 - DNA, 33 bp, Homo sapien
ggctgtttgaaaggccgaatggtaatgatgaga

SEQ ID NO: 542953 - DNA, 33 bp, Homo sapien
tatgaggcaaagcacaatgcaagaccttgatcc

SEQ ID NO: 542954 - DNA, 33 bp, Homo sapien
tatgaggcaaagcacagtgcaagaccttgatcc

SEQ ID NO: 542955 - DNA, 33 bp, Homo sapien
tatcttccattctgaaacctggtgtcctgaagc

SEQ ID NO: 542956 - DNA, 33 bp, Homo sapien
tatcttccattctgaatcctggtgtcctgaagc

SEQ ID NO: 542957 - DNA, 33 bp, Homo sapien
ttagggttatggatgaaaagagaagcaggctca

SEQ ID NO: 542958 - DNA, 33 bp, Homo sapien
ttagggttatggatgacaagagaagcaggctca

SEQ ID NO: 542959 - DNA, 33 bp, Homo sapien
aaacagatagtccataaaacacatctatagcct

SEQ ID NO: 542960 - DNA, 33 bp, Homo sapien
aaacagatagtccatataacacatctatagcct

SEQ ID NO: 542961 - DNA, 33 bp, Homo sapien
ttatttaaactgaaagccctgttcctagaccat

SEQ ID NO: 542962 - DNA, 33 bp, Homo sapien
ttatttaaactgaaaggcctgttcctagaccat

SEQ ID NO: 542963 - DNA, 33 bp, Homo sapien
ccactggctgcaggcactgagatcctgttttag

SEQ ID NO: 542964 - DNA, 33 bp, Homo sapien
ccactggctgcaggcattgagatcctgttttag

SEQ ID NO: 542965 - DNA, 33 bp, Homo sapien
tttgatgtcacctccacactgagatgccagggc

SEQ ID NO: 542966 - DNA, 33 bp, Homo sapien
tttgatgtcacctccagactgagatgccagggc

SEQ ID NO: 542967 - DNA, 33 bp, Homo sapien
aactgctggtaacaataagaaattcagtgagcc

SEQ ID NO: 542968 - DNA, 33 bp, Homo sapien
aactgctggtaacaatcagaaattcagtgagcc

SEQ ID NO: 542969 - DNA, 33 bp, Homo sapien
aagaaatgctggttgaggaaaacattgacaaaa

SEQ ID NO: 542970 - DNA, 33 bp, Homo sapien
aagaaatgctggttgatgaaaacattgacaaaa

SEQ ID NO: 542971 - DNA, 33 bp, Homo sapien
aaagcagagagtgagcaagctctgaaaactcac

SEQ ID NO: 542972 - DNA, 33 bp, Homo sapien
aaagcagagagtgagcgagctctgaaaactcac

SEQ ID NO: 542973 - DNA, 33 bp, Homo sapien
aaccactgagaaaggaagcacagcatggccctg

SEQ ID NO: 542974 - DNA, 33 bp, Homo sapien
aaccactgagaaaggaggcacagcatggccctg

SEQ ID NO: 542975 - DNA, 33 bp, Homo sapien
gaggaacaggaatgagaatgcccactccgtgag

SEQ ID NO: 542976 - DNA, 33 bp, Homo sapien
gaggaacaggaatgaggatgcccactccgtgag

SEQ ID NO: 542977 - DNA, 33 bp, Homo sapien
tctgtatttgcgcaataaatgaacttggcagaa

SEQ ID NO: 542978 - DNA, 33 bp, Homo sapien
tctgtatttgcgcaatgaatgaacttggcagaa

SEQ ID NO: 542979 - DNA, 33 bp, Homo sapien
acagtgcatggcacaaataagtcctcctgttaa

SEQ ID NO: 542980 - DNA, 33 bp, Homo sapien
acagtgcatggcacaagtaagtcctcctgttaa

SEQ ID NO: 542981 - DNA, 33 bp, Homo sapien
ttacaattctaactcacatttctgtaagaactt

SEQ ID NO: 542982 - DNA, 33 bp, Homo sapien
ttacaattctaactcatatttctgtaagaactt

SEQ ID NO: 542983 - DNA, 33 bp, Homo sapien
gctcttggtgactcaactgactcttttctttag

SEQ ID NO: 542984 - DNA, 33 bp, Homo sapien
gctcttggtgactcaattgactcttttctttag

SEQ ID NO: 542985 - DNA, 33 bp, Homo sapien
aggggacagatcaggccaggcttgtgaatcatt

SEQ ID NO: 542986 - DNA, 33 bp, Homo sapien
aggggacagatcaggctaggcttgtgaatcatt

SEQ ID NO: 542987 - DNA, 33 bp, Homo sapien
tgattcttacacatgccaaactctgagaaccaa

SEQ ID NO: 542988 - DNA, 33 bp, Homo sapien
tgattcttacacatgctaaactctgagaaccaa

SEQ ID NO: 542989 - DNA, 33 bp, Homo sapien
ttgcatacagggttggacacctgataagtgctc

SEQ ID NO: 542990 - DNA, 33 bp, Homo sapien
ttgcatacagggttgggcacctgataagtgctc

SEQ ID NO: 542991 - DNA, 33 bp, Homo sapien
ggtattcatatcctgtaaagtcataattcaagc

SEQ ID NO: 542992 - DNA, 33 bp, Homo sapien
ggtattcatatcctgtgaagtcataattcaagc

SEQ ID NO: 542993 - DNA, 33 bp, Homo sapien
ccctttcacctggcaccgagaagttagacctag

SEQ ID NO: 542994 - DNA, 33 bp, Homo sapien
ccctttcacctggcactgagaagttagacctag

SEQ ID NO: 542995 - DNA, 33 bp, Homo sapien
ttttcttagtataaacagtaatgcacactcatt

SEQ ID NO: 542996 - DNA, 33 bp, Homo sapien
ttttcttagtataaacggtaatgcacactcatt

SEQ ID NO: 542997 - DNA, 33 bp, Homo sapien
attaagaatgttctcaacaggaaggctgctctc

SEQ ID NO: 542998 - DNA, 33 bp, Homo sapien
attaagaatgttctcagcaggaaggctgctctc

SEQ ID NO: 542999 - DNA, 33 bp, Homo sapien
tgctcactgcctcctccgaatagttccagtgac

SEQ ID NO: 543000 - DNA, 33 bp, Homo sapien
tgctcactgcctcctctgaatagttccagtgac

SEQ ID NO: 543001 - DNA, 33 bp, Homo sapien
aaactttgggcccttccccatttgtgagtcatg

SEQ ID NO: 543002 - DNA, 33 bp, Homo sapien
aaactttgggcccttctccatttgtgagtcatg

SEQ ID NO: 543003 - DNA, 33 bp, Homo sapien
gaatgtgaacggctgaacccaattttctcagca

SEQ ID NO: 543004 - DNA, 33 bp, Homo sapien
gaatgtgaacggctgaccccaattttctcagca

SEQ ID NO: 543005 - DNA, 33 bp, Homo sapien
ggggtcatccatacccccattgcttggcctttt

SEQ ID NO: 543006 - DNA, 33 bp, Homo sapien
ggggtcatccataccctcattgcttggcctttt

SEQ ID NO: 543007 - DNA, 33 bp, Homo sapien
cagtcctgaacccagcaaattgtactcatgagg

SEQ ID NO: 543008 - DNA, 33 bp, Homo sapien
cagtcctgaacccagcgaattgtactcatgagg

SEQ ID NO: 543009 - DNA, 33 bp, Homo sapien
tgaaggattactacaaacaacactgtgtagaga

SEQ ID NO: 543010 - DNA, 33 bp, Homo sapien
tgaaggattactacaagcaacactgtgtagaga

SEQ ID NO: 543011 - DNA, 33 bp, Homo sapien
aaatcaaaccatagcaataagacgagtaagtac

SEQ ID NO: 543012 - DNA, 33 bp, Homo sapien
aaatcaaaccatagcactaagacgagtaagtac

SEQ ID NO: 543013 - DNA, 33 bp, Homo sapien
atctccttcttgtacccgatattactgtaattc

SEQ ID NO: 543014 - DNA, 33 bp, Homo sapien
atctccttcttgtacctgatattactgtaattc

SEQ ID NO: 543015 - DNA, 33 bp, Homo sapien
gttattgggctttccacgtggagttcagaacca

SEQ ID NO: 543016 - DNA, 33 bp, Homo sapien
gttattgggctttccaggtggagttcagaacca

SEQ ID NO: 543017 - DNA, 33 bp, Homo sapien
agaaactccttgagaactatggagcagagtaac

SEQ ID NO: 543018 - DNA, 33 bp, Homo sapien
agaaactccttgagaagtatggagcagagtaac

SEQ ID NO: 543019 - DNA, 33 bp, Homo sapien
taatttttctggggtacataactgcaggggtgt

SEQ ID NO: 543020 - DNA, 33 bp, Homo sapien
taatttttctggggtatataactgcaggggtgt

SEQ ID NO: 543021 - DNA, 33 bp, Homo sapien
ggatttttgctcttggccagggaattaattgtg

SEQ ID NO: 543022 - DNA, 33 bp, Homo sapien
ggatttttgctcttggtcagggaattaattgtg

SEQ ID NO: 543023 - DNA, 33 bp, Homo sapien
tgtgtcagcctagaagcaccttatcactcaaag

SEQ ID NO: 543024 - DNA, 33 bp, Homo sapien
tgtgtcagcctagaagtaccttatcactcaaag

SEQ ID NO: 543025 - DNA, 33 bp, Homo sapien
aagaggaacaaatatcccaatctctcattcctc

SEQ ID NO: 543026 - DNA, 33 bp, Homo sapien
aagaggaacaaatatctcaatctctcattcctc

SEQ ID NO: 543027 - DNA, 33 bp, Homo sapien
ctcactccgcatggtacatagaagtactgactt

SEQ ID NO: 543028 - DNA, 33 bp, Homo sapien
ctcactccgcatggtagatagaagtactgactt

SEQ ID NO: 543029 - DNA, 33 bp, Homo sapien
agcttcctcttcacaccagagcttataaattcc

SEQ ID NO: 543030 - DNA, 33 bp, Homo sapien
agcttcctcttcacacgagagcttataaattcc

SEQ ID NO: 543031 - DNA, 33 bp, Homo sapien
gtgtctggcctagataagacaaccacagaatgg

SEQ ID NO: 543032 - DNA, 33 bp, Homo sapien
gtgtctggcctagatatgacaaccacagaatgg

SEQ ID NO: 543033 - DNA, 33 bp, Homo sapien
cactcctctcttgggacgccagataaagacata

SEQ ID NO: 543034 - DNA, 33 bp, Homo sapien
cactcctctcttgggatgccagataaagacata

SEQ ID NO: 543035 - DNA, 33 bp, Homo sapien
gagtaatcatctcctggatttctttctggacac

SEQ ID NO: 543036 - DNA, 33 bp, Homo sapien
gagtaatcatctcctgtatttctttctggacac

SEQ ID NO: 543037 - DNA, 33 bp, Homo sapien
ttagatgaatacagtacgtggcgaccatcttga

SEQ ID NO: 543038 - DNA, 33 bp, Homo sapien
ttagatgaatacagtatgtggcgaccatcttga

SEQ ID NO: 543039 - DNA, 33 bp, Homo sapien
ccatctctctatctcacaaagcctgaatgtctg

SEQ ID NO: 543040 - DNA, 33 bp, Homo sapien
ccatctctctatctcagaaagcctgaatgtctg

SEQ ID NO: 543041 - DNA, 33 bp, Homo sapien
tagagagatggtgctgaagctacctccaaatag

SEQ ID NO: 543042 - DNA, 33 bp, Homo sapien
tagagagatggtgctggagctacctccaaatag

SEQ ID NO: 543043 - DNA, 33 bp, Homo sapien
atgtgtacagatagcaaaagtgcaagaagagga

SEQ ID NO: 543044 - DNA, 33 bp, Homo sapien
atgtgtacagatagcataagtgcaagaagagga

SEQ ID NO: 543045 - DNA, 33 bp, Homo sapien
ctagcctgccagggaacatggccaatgactcag

SEQ ID NO: 543046 - DNA, 33 bp, Homo sapien
ctagcctgccagggaagatggccaatgactcag

SEQ ID NO: 543047 - DNA, 33 bp, Homo sapien
cttggcgagcagaccaagaatgtgttatagccc

SEQ ID NO: 543048 - DNA, 33 bp, Homo sapien
cttggcgagcagaccaggaatgtgttatagccc

SEQ ID NO: 543049 - DNA, 33 bp, Homo sapien
aagactggctccaacactggtaccagacttaag

SEQ ID NO: 543050 - DNA, 33 bp, Homo sapien
aagactggctccaacattggtaccagacttaag

SEQ ID NO: 543051 - DNA, 33 bp, Homo sapien
cttaaaaagagtcgcaatctttccctgcagaaa

SEQ ID NO: 543052 - DNA, 33 bp, Homo sapien
cttaaaaagagtcgcattctttccctgcagaaa

SEQ ID NO: 543053 - DNA, 33 bp, Homo sapien
ggtactacaacctggacggcaagggggtgtgcc

SEQ ID NO: 543054 - DNA, 33 bp, Homo sapien
ggtactacaacctggatggcaagggggtgtgcc

SEQ ID NO: 543055 - DNA, 33 bp, Homo sapien
ttacttaactgaagaacaaaccaacaatggtgg

SEQ ID NO: 543056 - DNA, 33 bp, Homo sapien
ttacttaactgaagaagaaaccaacaatggtgg

SEQ ID NO: 543057 - DNA, 33 bp, Homo sapien
gctggggaaactgagaaacggaaagaagacgat

SEQ ID NO: 543058 - DNA, 33 bp, Homo sapien
gctggggaaactgagagacggaaagaagacgat

SEQ ID NO: 543059 - DNA, 33 bp, Homo sapien
tttgtctctcgaaggtcaagactgttgaggctg

SEQ ID NO: 543060 - DNA, 33 bp, Homo sapien
tttgtctctcgaaggttaagactgttgaggctg

SEQ ID NO: 543061 - DNA, 33 bp, Homo sapien
tggaaatcagggaagacgagttgtattaatgaa

SEQ ID NO: 543062 - DNA, 33 bp, Homo sapien
tggaaatcagggaagatgagttgtattaatgaa

SEQ ID NO: 543063 - DNA, 33 bp, Homo sapien
gaagtttctcacagatgactttggaggtatcca

SEQ ID NO: 543064 - DNA, 33 bp, Homo sapien
gaagtttctcacagattactttggaggtatcca

SEQ ID NO: 543065 - DNA, 33 bp, Homo sapien
caacctttgtgttgtaccagcattttaaaacta

SEQ ID NO: 543066 - DNA, 33 bp, Homo sapien
caacctttgtgttgtatcagcattttaaaacta

SEQ ID NO: 543067 - DNA, 33 bp, Homo sapien
tgctattctgttaaccaaacctttcatctctgt

SEQ ID NO: 543068 - DNA, 33 bp, Homo sapien
tgctattctgttaaccgaacctttcatctctgt

SEQ ID NO: 543069 - DNA, 33 bp, Homo sapien
gttagagaagtggggaatagaaaatgcaatccc

SEQ ID NO: 543070 - DNA, 33 bp, Homo sapien
gttagagaagtggggagtagaaaatgcaatccc

SEQ ID NO: 543071 - DNA, 33 bp, Homo sapien
actacaaattactggacgtaaaattcacttcag

SEQ ID NO: 543072 - DNA, 33 bp, Homo sapien
actacaaattactggaggtaaaattcacttcag

SEQ ID NO: 543073 - DNA, 33 bp, Homo sapien
aattaactatgctaagcactacaatttccatta

SEQ ID NO: 543074 - DNA, 33 bp, Homo sapien
aattaactatgctaaggactacaatttccatta

SEQ ID NO: 543075 - DNA, 33 bp, Homo sapien
aaagtggactgtttgcaaataggacagaaatcc

SEQ ID NO: 543076 - DNA, 33 bp, Homo sapien
aaagtggactgtttgcgaataggacagaaatcc

SEQ ID NO: 543077 - DNA, 33 bp, Homo sapien
gtgtaatccatactgcagaacaacagtttttaa

SEQ ID NO: 543078 - DNA, 33 bp, Homo sapien
gtgtaatccatactgcggaacaacagtttttaa

SEQ ID NO: 543079 - DNA, 33 bp, Homo sapien
aaagtcaggaatgagaggaataaaaaacaccta

SEQ ID NO: 543080 - DNA, 33 bp, Homo sapien
aaagtcaggaatgagatgaataaaaaacaccta

SEQ ID NO: 543081 - DNA, 33 bp, Homo sapien
ttgatatttgaatggaaaaatgaactgtatgta

SEQ ID NO: 543082 - DNA, 33 bp, Homo sapien
ttgatatttgaatggacaaatgaactgtatgta

SEQ ID NO: 543083 - DNA, 33 bp, Homo sapien
agtgtttgtttcttcacactctcatcaactcta

SEQ ID NO: 543084 - DNA, 33 bp, Homo sapien
agtgtttgtttcttcatactctcatcaactcta

SEQ ID NO: 543085 - DNA, 33 bp, Homo sapien
cctggggaccgttagacgtccatgaatggattt

SEQ ID NO: 543086 - DNA, 33 bp, Homo sapien
cctggggaccgttagatgtccatgaatggattt

SEQ ID NO: 543087 - DNA, 33 bp, Homo sapien
tgcacactgccatgtgcaattaataaaagtgct

SEQ ID NO: 543088 - DNA, 33 bp, Homo sapien
tgcacactgccatgtggaattaataaaagtgct

SEQ ID NO: 543089 - DNA, 33 bp, Homo sapien
tgatcagtggttcctaactttggagatcattga

SEQ ID NO: 543090 - DNA, 33 bp, Homo sapien
tgatcagtggttcctacctttggagatcattga

SEQ ID NO: 543091 - DNA, 33 bp, Homo sapien
actccagctctgctaacgaagtacactacacag

SEQ ID NO: 543092 - DNA, 33 bp, Homo sapien
actccagctctgctaatgaagtacactacacag

SEQ ID NO: 543093 - DNA, 33 bp, Homo sapien
ttcactttcctgataaactaccgtaaggcccct

SEQ ID NO: 543094 - DNA, 33 bp, Homo sapien
ttcactttcctgataagctaccgtaaggcccct

SEQ ID NO: 543095 - DNA, 33 bp, Homo sapien
gcctttgccgaacttacgcagcgggagaggcaa

SEQ ID NO: 543096 - DNA, 33 bp, Homo sapien
gcctttgccgaacttatgcagcgggagaggcaa

SEQ ID NO: 543097 - DNA, 33 bp, Homo sapien
ttaatgggaaattttacattcttggactgggca

SEQ ID NO: 543098 - DNA, 33 bp, Homo sapien
ttaatgggaaattttagattcttggactgggca

SEQ ID NO: 543099 - DNA, 33 bp, Homo sapien
tgtgtagatagattgaccaaggggcatttgtgg

SEQ ID NO: 543100 - DNA, 33 bp, Homo sapien
tgtgtagatagattgatcaaggggcatttgtgg

SEQ ID NO: 543101 - DNA, 33 bp, Homo sapien
aagtggctttctgcagaccagttgtggccaggt

SEQ ID NO: 543102 - DNA, 33 bp, Homo sapien
aagtggctttctgcaggccagttgtggccaggt

SEQ ID NO: 543103 - DNA, 33 bp, Homo sapien
atttgactattataacagtgacttgtatcttgt

SEQ ID NO: 543104 - DNA, 33 bp, Homo sapien
atttgactattataacggtgacttgtatcttgt

SEQ ID NO: 543105 - DNA, 33 bp, Homo sapien
cctaaattcaacccaaagaaaccagtgcccagg

SEQ ID NO: 543106 - DNA, 33 bp, Homo sapien
cctaaattcaacccaacgaaaccagtgcccagg

SEQ ID NO: 543107 - DNA, 33 bp, Homo sapien
tacatgcaacagtaacgattgtatttccctctt

SEQ ID NO: 543108 - DNA, 33 bp, Homo sapien
tacatgcaacagtaactattgtatttccctctt

SEQ ID NO: 543109 - DNA, 33 bp, Homo sapien
cccctaagacaggagcaaggaacaataatggtc

SEQ ID NO: 543110 - DNA, 33 bp, Homo sapien
cccctaagacaggagcgaggaacaataatggtc

SEQ ID NO: 543111 - DNA, 33 bp, Homo sapien
aatatggaaggacgcacgagggtctgttggctg

SEQ ID NO: 543112 - DNA, 33 bp, Homo sapien
aatatggaaggacgcatgagggtctgttggctg

SEQ ID NO: 543113 - DNA, 33 bp, Homo sapien
agacttccgacatggcacggtatggaaaataaa

SEQ ID NO: 543114 - DNA, 33 bp, Homo sapien
agacttccgacatggcgcggtatggaaaataaa

SEQ ID NO: 543115 - DNA, 33 bp, Homo sapien
tggctactccaaaccaagcaatagcgaagagca

SEQ ID NO: 543116 - DNA, 33 bp, Homo sapien
tggctactccaaaccaggcaatagcgaagagca

SEQ ID NO: 543117 - DNA, 33 bp, Homo sapien
agaaaactagggagtcaagaatttcaagaaaaa

SEQ ID NO: 543118 - DNA, 33 bp, Homo sapien
agaaaactagggagtcgagaatttcaagaaaaa

SEQ ID NO: 543119 - DNA, 33 bp, Homo sapien
aagcatacagaagaaaaactaattgcacttaag

SEQ ID NO: 543120 - DNA, 33 bp, Homo sapien
aagcatacagaagaaacactaattgcacttaag

SEQ ID NO: 543121 - DNA, 33 bp, Homo sapien
ctggtgaaagaatgtcaccgcatcatgcctcca

SEQ ID NO: 543122 - DNA, 33 bp, Homo sapien
ctggtgaaagaatgtcgccgcatcatgcctcca

SEQ ID NO: 543123 - DNA, 33 bp, Homo sapien
ttgtgttgttgattcacggccgttgtaggcagg

SEQ ID NO: 543124 - DNA, 33 bp, Homo sapien
ttgtgttgttgattcagggccgttgtaggcagg

SEQ ID NO: 543125 - DNA, 33 bp, Homo sapien
ggtatgtccactggaactgggtgttcacgaggc

SEQ ID NO: 543126 - DNA, 33 bp, Homo sapien
ggtatgtccactggaattgggtgttcacgaggc

SEQ ID NO: 543127 - DNA, 33 bp, Homo sapien
actcagtcatagtcacactaatagggaacagga

SEQ ID NO: 543128 - DNA, 33 bp, Homo sapien
actcagtcatagtcacgctaatagggaacagga

SEQ ID NO: 543129 - DNA, 33 bp, Homo sapien
gaacacagttcccctacgcctaattttgtgttc

SEQ ID NO: 543130 - DNA, 33 bp, Homo sapien
gaacacagttcccctatgcctaattttgtgttc

SEQ ID NO: 543131 - DNA, 33 bp, Homo sapien
ataaggaggaacacaccgggatgtcaacagagt

SEQ ID NO: 543132 - DNA, 33 bp, Homo sapien
ataaggaggaacacactgggatgtcaacagagt

SEQ ID NO: 543133 - DNA, 33 bp, Homo sapien
gctttttctgatttccacagtagaatgttttat

SEQ ID NO: 543134 - DNA, 33 bp, Homo sapien
gctttttctgatttccgcagtagaatgttttat

SEQ ID NO: 543135 - DNA, 33 bp, Homo sapien
tactctgctcttttcacgggtctcactaaggct

SEQ ID NO: 543136 - DNA, 33 bp, Homo sapien
tactctgctcttttcatgggtctcactaaggct

SEQ ID NO: 543137 - DNA, 33 bp, Homo sapien
gctttgctaacctgtcactttctactctatgga

SEQ ID NO: 543138 - DNA, 33 bp, Homo sapien
gctttgctaacctgtcgctttctactctatgga

SEQ ID NO: 543139 - DNA, 33 bp, Homo sapien
tatgtaagtccacctccataaagttattctaaa

SEQ ID NO: 543140 - DNA, 33 bp, Homo sapien
tatgtaagtccacctctataaagttattctaaa

SEQ ID NO: 543141 - DNA, 33 bp, Homo sapien
ccactttctaaggacacggagaaattcagaaca

SEQ ID NO: 543142 - DNA, 33 bp, Homo sapien
ccactttctaaggacatggagaaattcagaaca

SEQ ID NO: 543143 - DNA, 33 bp, Homo sapien
tcggagtggaagaaaacggagctggtgtctcag

SEQ ID NO: 543144 - DNA, 33 bp, Homo sapien
tcggagtggaagaaaatggagctggtgtctcag

SEQ ID NO: 543145 - DNA, 33 bp, Homo sapien
caacatggatccagaacacccgtttgaaaccat

SEQ ID NO: 543146 - DNA, 33 bp, Homo sapien
caacatggatccagaatacccgtttgaaaccat

SEQ ID NO: 543147 - DNA, 33 bp, Homo sapien
taggccagcttcctgggaaggtcacataaattc

SEQ ID NO: 543148 - DNA, 33 bp, Homo sapien
taggccagcttcctggtaaggtcacataaattc

SEQ ID NO: 543149 - DNA, 33 bp, Homo sapien
tacaataacaaccctcccaaatcctaatggctt

SEQ ID NO: 543150 - DNA, 33 bp, Homo sapien
tacaataacaaccctctcaaatcctaatggctt

SEQ ID NO: 543151 - DNA, 33 bp, Homo sapien
atttacctgttctccactccctttggtgcagaa

SEQ ID NO: 543152 - DNA, 33 bp, Homo sapien
atttacctgttctccattccctttggtgcagaa

SEQ ID NO: 543153 - DNA, 33 bp, Homo sapien
tccaacctactttcacagggctgtagtgaggtg

SEQ ID NO: 543154 - DNA, 33 bp, Homo sapien
tccaacctactttcacggggctgtagtgaggtg

SEQ ID NO: 543155 - DNA, 33 bp, Homo sapien
cttaattactacttcccagggaaaaggagctct

SEQ ID NO: 543156 - DNA, 33 bp, Homo sapien
cttaattactacttcctagggaaaaggagctct

SEQ ID NO: 543157 - DNA, 33 bp, Homo sapien
aaaccagagacaaccaacagagcctcaagtggg

SEQ ID NO: 543158 - DNA, 33 bp, Homo sapien
aaaccagagacaaccagcagagcctcaagtggg

SEQ ID NO: 543159 - DNA, 33 bp, Homo sapien
aggcagtgagcaagtgaaaccatgagatgggat

SEQ ID NO: 543160 - DNA, 33 bp, Homo sapien
aggcagtgagcaagtggaaccatgagatgggat

SEQ ID NO: 543161 - DNA, 33 bp, Homo sapien
ggtttctggagacctcaacaccgcattctgctc

SEQ ID NO: 543162 - DNA, 33 bp, Homo sapien
ggtttctggagacctcgacaccgcattctgctc

SEQ ID NO: 543163 - DNA, 33 bp, Homo sapien
cgtctctctgggaaaccggacctggagcttttc

SEQ ID NO: 543164 - DNA, 33 bp, Homo sapien
cgtctctctgggaaactggacctggagcttttc

SEQ ID NO: 543165 - DNA, 33 bp, Homo sapien
tagggctgtggttaaccggcttattcataagga

SEQ ID NO: 543166 - DNA, 33 bp, Homo sapien
tagggctgtggttaactggcttattcataagga

SEQ ID NO: 543167 - DNA, 33 bp, Homo sapien
cataaggatgacaccactgagaattcagatgct

SEQ ID NO: 543168 - DNA, 33 bp, Homo sapien
cataaggatgacaccattgagaattcagatgct

SEQ ID NO: 543169 - DNA, 33 bp, Homo sapien
ctattggggatgttatcagcctcaaatagcagg

SEQ ID NO: 543170 - DNA, 33 bp, Homo sapien
ctattggggatgttatgagcctcaaatagcagg

SEQ ID NO: 543171 - DNA, 33 bp, Homo sapien
ctcattctcatcctgacgtcaattcttgagcaa

SEQ ID NO: 543172 - DNA, 33 bp, Homo sapien
ctcattctcatcctgatgtcaattcttgagcaa

SEQ ID NO: 543173 - DNA, 33 bp, Homo sapien
aaacctcttccacgtcactgttctttccaccca

SEQ ID NO: 543174 - DNA, 33 bp, Homo sapien
aaacctcttccacgtcgctgttctttccaccca

SEQ ID NO: 543175 - DNA, 33 bp, Homo sapien
cactcactcctcattcaccattttacacaaggg

SEQ ID NO: 543176 - DNA, 33 bp, Homo sapien
cactcactcctcattctccattttacacaaggg

SEQ ID NO: 543177 - DNA, 33 bp, Homo sapien
ggatgggtaggaaaagaaatgatgttgccactt

SEQ ID NO: 543178 - DNA, 33 bp, Homo sapien
ggatgggtaggaaaagcaatgatgttgccactt

SEQ ID NO: 543179 - DNA, 33 bp, Homo sapien
gaaattctctacaatgaaatgatttgtgttaat

SEQ ID NO: 543180 - DNA, 33 bp, Homo sapien
gaaattctctacaatgcaatgatttgtgttaat

SEQ ID NO: 543181 - DNA, 33 bp, Homo sapien
catcagtacagaccaaccagtcagtctaagaga

SEQ ID NO: 543182 - DNA, 33 bp, Homo sapien
catcagtacagaccaagcagtcagtctaagaga

SEQ ID NO: 543183 - DNA, 33 bp, Homo sapien
ttccctcttccaagaaagatctcttagactgac

SEQ ID NO: 543184 - DNA, 33 bp, Homo sapien
ttccctcttccaagaacgatctcttagactgac

SEQ ID NO: 543185 - DNA, 33 bp, Homo sapien
aggcattggctataagaaggttggtctctctta

SEQ ID NO: 543186 - DNA, 33 bp, Homo sapien
aggcattggctataagcaggttggtctctctta

SEQ ID NO: 543187 - DNA, 33 bp, Homo sapien
tttttgaggaaatgaccggctgttttccaaagt

SEQ ID NO: 543188 - DNA, 33 bp, Homo sapien
tttttgaggaaatgactggctgttttccaaagt

SEQ ID NO: 543189 - DNA, 33 bp, Homo sapien
tgcttaatatcattagccatcaggcaaatcaaa

SEQ ID NO: 543190 - DNA, 33 bp, Homo sapien
tgcttaatatcattagtcatcaggcaaatcaaa

SEQ ID NO: 543191 - DNA, 33 bp, Homo sapien
ctgcaaggtgctgcaccacaggagttcattctt

SEQ ID NO: 543192 - DNA, 33 bp, Homo sapien
ctgcaaggtgctgcacgacaggagttcattctt

SEQ ID NO: 543193 - DNA, 33 bp, Homo sapien
aattaaactttttacacgagccaatacttttag

SEQ ID NO: 543194 - DNA, 33 bp, Homo sapien
aattaaactttttacatgagccaatacttttag

SEQ ID NO: 543195 - DNA, 33 bp, Homo sapien
accagctccacaaaaacctgaagatgccaggga

SEQ ID NO: 543196 - DNA, 33 bp, Homo sapien
accagctccacaaaaagctgaagatgccaggga

SEQ ID NO: 543197 - DNA, 33 bp, Homo sapien
tttgcaagtacagtacaggttcgcggtaggggt

SEQ ID NO: 543198 - DNA, 33 bp, Homo sapien
tttgcaagtacagtacgggttcgcggtaggggt

SEQ ID NO: 543199 - DNA, 33 bp, Homo sapien
ggaggcagttcagtaacgtgcacctatctctcc

SEQ ID NO: 543200 - DNA, 33 bp, Homo sapien
ggaggcagttcagtaatgtgcacctatctctcc

SEQ ID NO: 543201 - DNA, 33 bp, Homo sapien
tgtaaaattccatagaagtgtaagtgacatgca

SEQ ID NO: 543202 - DNA, 33 bp, Homo sapien
tgtaaaattccatagacgtgtaagtgacatgca

SEQ ID NO: 543203 - DNA, 33 bp, Homo sapien
gtcctgtgttgtcagggattccttctgccctct

SEQ ID NO: 543204 - DNA, 33 bp, Homo sapien
gtcctgtgttgtcaggtattccttctgccctct

SEQ ID NO: 543205 - DNA, 33 bp, Homo sapien
taggcaaactagaaagaaccaccaatcactggt

SEQ ID NO: 543206 - DNA, 33 bp, Homo sapien
taggcaaactagaaagtaccaccaatcactggt

SEQ ID NO: 543207 - DNA, 33 bp, Homo sapien
accccaatgataagcccgaagaaagagtccttt

SEQ ID NO: 543208 - DNA, 33 bp, Homo sapien
accccaatgataagcctgaagaaagagtccttt

SEQ ID NO: 543209 - DNA, 33 bp, Homo sapien
ttcttgcagtcaatctaaagctaaaattcacaa

SEQ ID NO: 543210 - DNA, 33 bp, Homo sapien
ttcttgcagtcaatctgaagctaaaattcacaa

SEQ ID NO: 543211 - DNA, 33 bp, Homo sapien
gcaggcttcctggagacaatgccagctcgtgtt

SEQ ID NO: 543212 - DNA, 33 bp, Homo sapien
gcaggcttcctggagataatgccagctcgtgtt

SEQ ID NO: 543213 - DNA, 33 bp, Homo sapien
agtcacacgtttctccgactgtccttgctttca

SEQ ID NO: 543214 - DNA, 33 bp, Homo sapien
agtcacacgtttctcctactgtccttgctttca

SEQ ID NO: 543215 - DNA, 33 bp, Homo sapien
gtcaacaatctagggaaagctgtttaggttagt

SEQ ID NO: 543216 - DNA, 33 bp, Homo sapien
gtcaacaatctagggagagctgtttaggttagt

SEQ ID NO: 543217 - DNA, 33 bp, Homo sapien
ctgggtaaactaggcccgctcagaccaaaacag

SEQ ID NO: 543218 - DNA, 33 bp, Homo sapien
ctgggtaaactaggcctgctcagaccaaaacag

SEQ ID NO: 543219 - DNA, 33 bp, Homo sapien
taacctgctttttggacgtattaataagacatg

SEQ ID NO: 543220 - DNA, 33 bp, Homo sapien
taacctgctttttggatgtattaataagacatg

SEQ ID NO: 543221 - DNA, 33 bp, Homo sapien
gtcacctgtggtgctcaaacattccactgagca

SEQ ID NO: 543222 - DNA, 33 bp, Homo sapien
gtcacctgtggtgctcgaacattccactgagca

SEQ ID NO: 543223 - DNA, 33 bp, Homo sapien
cttgagtccacagttacattcacaaataaggca

SEQ ID NO: 543224 - DNA, 33 bp, Homo sapien
cttgagtccacagttatattcacaaataaggca

SEQ ID NO: 543225 - DNA, 33 bp, Homo sapien
ttcttgggtaatttgacggaagcagtgttttag

SEQ ID NO: 543226 - DNA, 33 bp, Homo sapien
ttcttgggtaatttgatggaagcagtgttttag

SEQ ID NO: 543227 - DNA, 33 bp, Homo sapien
ggtgctcttgcctggaagaaaggcggaacagag

SEQ ID NO: 543228 - DNA, 33 bp, Homo sapien
ggtgctcttgcctggatgaaaggcggaacagag

SEQ ID NO: 543229 - DNA, 33 bp, Homo sapien
acttctcaatagatccagcaaggtctgctttaa

SEQ ID NO: 543230 - DNA, 33 bp, Homo sapien
acttctcaatagatccggcaaggtctgctttaa

SEQ ID NO: 543231 - DNA, 33 bp, Homo sapien
caacttcaatgaacccagaaagtatggagagaa

SEQ ID NO: 543232 - DNA, 33 bp, Homo sapien
caacttcaatgaacccggaaagtatggagagaa

SEQ ID NO: 543233 - DNA, 33 bp, Homo sapien
atattgtaaagagaaaatgctgtaaatagtatg

SEQ ID NO: 543234 - DNA, 33 bp, Homo sapien
atattgtaaagagaaagtgctgtaaatagtatg

SEQ ID NO: 543235 - DNA, 33 bp, Homo sapien
aattctgtgagtcagagatttggactgggtata

SEQ ID NO: 543236 - DNA, 33 bp, Homo sapien
aattctgtgagtcagatatttggactgggtata

SEQ ID NO: 543237 - DNA, 33 bp, Homo sapien
agacaagaagacatgaagacgaagattcaggac

SEQ ID NO: 543238 - DNA, 33 bp, Homo sapien
agacaagaagacatgaggacgaagattcaggac

SEQ ID NO: 543239 - DNA, 33 bp, Homo sapien
gcactcaaaatagcaccagattgggcaattttg

SEQ ID NO: 543240 - DNA, 33 bp, Homo sapien
gcactcaaaatagcactagattgggcaattttg

SEQ ID NO: 543241 - DNA, 33 bp, Homo sapien
cagttccattccattgcaccctatgcctctcca

SEQ ID NO: 543242 - DNA, 33 bp, Homo sapien
cagttccattccattgtaccctatgcctctcca

SEQ ID NO: 543243 - DNA, 33 bp, Homo sapien
aaaagcacaactgaaccgttagcattgaacagc

SEQ ID NO: 543244 - DNA, 33 bp, Homo sapien
aaaagcacaactgaactgttagcattgaacagc

SEQ ID NO: 543245 - DNA, 33 bp, Homo sapien
tatcaaagtctcttcaagatagatagaaagtat

SEQ ID NO: 543246 - DNA, 33 bp, Homo sapien
tatcaaagtctcttcaggatagatagaaagtat

SEQ ID NO: 543247 - DNA, 33 bp, Homo sapien
caaaatttcctgagcacaagtgcaagagggggc

SEQ ID NO: 543248 - DNA, 33 bp, Homo sapien
caaaatttcctgagcagaagtgcaagagggggc

SEQ ID NO: 543249 - DNA, 33 bp, Homo sapien
ccagataatccaagacagaggagaagcatctcc

SEQ ID NO: 543250 - DNA, 33 bp, Homo sapien
ccagataatccaagacggaggagaagcatctcc

SEQ ID NO: 543251 - DNA, 33 bp, Homo sapien
cattgggaggcagcaaaatcagaacaaagacct

SEQ ID NO: 543252 - DNA, 33 bp, Homo sapien
cattgggaggcagcaagatcagaacaaagacct

SEQ ID NO: 543253 - DNA, 33 bp, Homo sapien
tagtctgttaccttccaataacatgcaaggatc

SEQ ID NO: 543254 - DNA, 33 bp, Homo sapien
tagtctgttaccttccgataacatgcaaggatc

SEQ ID NO: 543255 - DNA, 33 bp, Homo sapien
tgaatgcttgagaaccacaagacctctgtgtgg

SEQ ID NO: 543256 - DNA, 33 bp, Homo sapien
tgaatgcttgagaaccgcaagacctctgtgtgg

SEQ ID NO: 543257 - DNA, 33 bp, Homo sapien
cagcacttggaaggaaacaactctgctgacacc

SEQ ID NO: 543258 - DNA, 33 bp, Homo sapien
cagcacttggaaggaaccaactctgctgacacc

SEQ ID NO: 543259 - DNA, 33 bp, Homo sapien
tgcaagcatgaaccaaattacaaaccttgttaa

SEQ ID NO: 543260 - DNA, 33 bp, Homo sapien
tgcaagcatgaaccaagttacaaaccttgttaa

SEQ ID NO: 543261 - DNA, 33 bp, Homo sapien
aggaagaaaggccaaacatggtaaatgctttct

SEQ ID NO: 543262 - DNA, 33 bp, Homo sapien
aggaagaaaggccaaagatggtaaatgctttct

SEQ ID NO: 543263 - DNA, 33 bp, Homo sapien
acacatctgcttcataaatagtcatggaatctt

SEQ ID NO: 543264 - DNA, 33 bp, Homo sapien
acacatctgcttcatatatagtcatggaatctt

SEQ ID NO: 543265 - DNA, 33 bp, Homo sapien
tcatcagctttctcaaatgcaactttacagtta

SEQ ID NO: 543266 - DNA, 33 bp, Homo sapien
tcatcagctttctcaagtgcaactttacagtta

SEQ ID NO: 543267 - DNA, 33 bp, Homo sapien
tttagcatgcaattgacaaggaatgtataatta

SEQ ID NO: 543268 - DNA, 33 bp, Homo sapien
tttagcatgcaattgagaaggaatgtataatta

SEQ ID NO: 543269 - DNA, 33 bp, Homo sapien
tgccccagtttcctcaacaaaaacataggaact

SEQ ID NO: 543270 - DNA, 33 bp, Homo sapien
tgccccagtttcctcagcaaaaacataggaact

SEQ ID NO: 543271 - DNA, 33 bp, Homo sapien
ggaagttctggagaaacgctcagggctatgttt

SEQ ID NO: 543272 - DNA, 33 bp, Homo sapien
ggaagttctggagaaatgctcagggctatgttt

SEQ ID NO: 543273 - DNA, 33 bp, Homo sapien
aacatcttgcattcaaactccatctccactccc

SEQ ID NO: 543274 - DNA, 33 bp, Homo sapien
aacatcttgcattcaagctccatctccactccc

SEQ ID NO: 543275 - DNA, 33 bp, Homo sapien
gtctctcacagcatccagagataataaatttat

SEQ ID NO: 543276 - DNA, 33 bp, Homo sapien
gtctctcacagcatccggagataataaatttat

SEQ ID NO: 543277 - DNA, 33 bp, Homo sapien
ttcagactgagtcatcaacaggtataaggactg

SEQ ID NO: 543278 - DNA, 33 bp, Homo sapien
ttcagactgagtcatcgacaggtataaggactg

SEQ ID NO: 543279 - DNA, 33 bp, Homo sapien
tagtcaattttcagaaatccaaaaataattaaa

SEQ ID NO: 543280 - DNA, 33 bp, Homo sapien
tagtcaattttcagaagtccaaaaataattaaa

SEQ ID NO: 543281 - DNA, 33 bp, Homo sapien
gacttggaaagacaaaaggaacagaaatagtca

SEQ ID NO: 543282 - DNA, 33 bp, Homo sapien
gacttggaaagacaaagggaacagaaatagtca

SEQ ID NO: 543283 - DNA, 33 bp, Homo sapien
agtagagttagtcagagctcctgtatgcaatgc

SEQ ID NO: 543284 - DNA, 33 bp, Homo sapien
agtagagttagtcagatctcctgtatgcaatgc

SEQ ID NO: 543285 - DNA, 33 bp, Homo sapien
tgtttttagtaaggaccaaagaaagacccagat

SEQ ID NO: 543286 - DNA, 33 bp, Homo sapien
tgtttttagtaaggacgaaagaaagacccagat

SEQ ID NO: 543287 - DNA, 33 bp, Homo sapien
tcagccagtttcctacaggagcatagaagaaag

SEQ ID NO: 543288 - DNA, 33 bp, Homo sapien
tcagccagtttcctacgggagcatagaagaaag

SEQ ID NO: 543289 - DNA, 33 bp, Homo sapien
aaaggcaggttctcctaacattgcaggtgagaa

SEQ ID NO: 543290 - DNA, 33 bp, Homo sapien
aaaggcaggttctcctgacattgcaggtgagaa

SEQ ID NO: 543291 - DNA, 33 bp, Homo sapien
agcagaaggcctacaccgcatcactatttctgc

SEQ ID NO: 543292 - DNA, 33 bp, Homo sapien
agcagaaggcctacactgcatcactatttctgc

SEQ ID NO: 543293 - DNA, 33 bp, Homo sapien
ctctagccagggctccccactatgatttaggcc

SEQ ID NO: 543294 - DNA, 33 bp, Homo sapien
ctctagccagggctcctcactatgatttaggcc

SEQ ID NO: 543295 - DNA, 33 bp, Homo sapien
gggcacttggacctctaaagttgcttgttggcc

SEQ ID NO: 543296 - DNA, 33 bp, Homo sapien
gggcacttggacctctcaagttgcttgttggcc

SEQ ID NO: 543297 - DNA, 33 bp, Homo sapien
gttctttctttctttgcaataactcattgttgc

SEQ ID NO: 543298 - DNA, 33 bp, Homo sapien
gttctttctttctttgtaataactcattgttgc

SEQ ID NO: 543299 - DNA, 33 bp, Homo sapien
gcagccagtgtagggacgttagagcaagtagtc

SEQ ID NO: 543300 - DNA, 33 bp, Homo sapien
gcagccagtgtagggatgttagagcaagtagtc

SEQ ID NO: 543301 - DNA, 33 bp, Homo sapien
cctcccttaactgccacgttgaccctgggcact

SEQ ID NO: 543302 - DNA, 33 bp, Homo sapien
cctcccttaactgccatgttgaccctgggcact

SEQ ID NO: 543303 - DNA, 33 bp, Homo sapien
tggaattagtactcccaacctggttctccaggg

SEQ ID NO: 543304 - DNA, 33 bp, Homo sapien
tggaattagtactcccgacctggttctccaggg

SEQ ID NO: 543305 - DNA, 33 bp, Homo sapien
cagcattaacttcaaaatcaccctgaaagtcag

SEQ ID NO: 543306 - DNA, 33 bp, Homo sapien
cagcattaacttcaaagtcaccctgaaagtcag

SEQ ID NO: 543307 - DNA, 33 bp, Homo sapien
agatgtcaattgtgccaagattaagaaacgcta

SEQ ID NO: 543308 - DNA, 33 bp, Homo sapien
agatgtcaattgtgccgagattaagaaacgcta

SEQ ID NO: 543309 - DNA, 33 bp, Homo sapien
gtcacagtggccacccgaatgttgatcttgtag

SEQ ID NO: 543310 - DNA, 33 bp, Homo sapien
gtcacagtggccaccctaatgttgatcttgtag

SEQ ID NO: 543311 - DNA, 33 bp, Homo sapien
gatcctaactcctgagaccagagccaaggaggt

SEQ ID NO: 543312 - DNA, 33 bp, Homo sapien
gatcctaactcctgagcccagagccaaggaggt

SEQ ID NO: 543313 - DNA, 33 bp, Homo sapien
cacaaatcagtgagtacggatcaagagaatttc

SEQ ID NO: 543314 - DNA, 33 bp, Homo sapien
cacaaatcagtgagtagggatcaagagaatttc

SEQ ID NO: 543315 - DNA, 33 bp, Homo sapien
tgacctgaaaagtgaaccctctctaaggcgtca

SEQ ID NO: 543316 - DNA, 33 bp, Homo sapien
tgacctgaaaagtgaagcctctctaaggcgtca

SEQ ID NO: 543317 - DNA, 33 bp, Homo sapien
gagatggctgctatggcatccagttgcctagaa

SEQ ID NO: 543318 - DNA, 33 bp, Homo sapien
gagatggctgctatggtatccagttgcctagaa

SEQ ID NO: 543319 - DNA, 33 bp, Homo sapien
attcaaagaattcttccaacagagcaataaaaa

SEQ ID NO: 543320 - DNA, 33 bp, Homo sapien
attcaaagaattcttctaacagagcaataaaaa

SEQ ID NO: 543321 - DNA, 33 bp, Homo sapien
agaataaggcctagtacataagtagcggctatc

SEQ ID NO: 543322 - DNA, 33 bp, Homo sapien
agaataaggcctagtatataagtagcggctatc

SEQ ID NO: 543323 - DNA, 33 bp, Homo sapien
gctggtccaaacactacactttgggaaacccta

SEQ ID NO: 543324 - DNA, 33 bp, Homo sapien
gctggtccaaacactatactttgggaaacccta

SEQ ID NO: 543325 - DNA, 33 bp, Homo sapien
agtctaaagtgctcagaaggtaacattttctgg

SEQ ID NO: 543326 - DNA, 33 bp, Homo sapien
agtctaaagtgctcaggaggtaacattttctgg

SEQ ID NO: 543327 - DNA, 33 bp, Homo sapien
aatctgagagcagtagaataaagaactgacctt

SEQ ID NO: 543328 - DNA, 33 bp, Homo sapien
aatctgagagcagtagtataaagaactgacctt

SEQ ID NO: 543329 - DNA, 33 bp, Homo sapien
ggagacaaaatggttacaaggacctggagcctt

SEQ ID NO: 543330 - DNA, 33 bp, Homo sapien
ggagacaaaatggttagaaggacctggagcctt

SEQ ID NO: 543331 - DNA, 33 bp, Homo sapien
ttaggattaaagacacaagtgttattctgtcct

SEQ ID NO: 543332 - DNA, 33 bp, Homo sapien
ttaggattaaagacaccagtgttattctgtcct

SEQ ID NO: 543333 - DNA, 33 bp, Homo sapien
ttttcttttcgagtgaagtgggtaggaggaaaa

SEQ ID NO: 543334 - DNA, 33 bp, Homo sapien
ttttcttttcgagtgacgtgggtaggaggaaaa

SEQ ID NO: 543335 - DNA, 33 bp, Homo sapien
aataagacaattataaagcttcttcaagtttca

SEQ ID NO: 543336 - DNA, 33 bp, Homo sapien
aataagacaattataaggcttcttcaagtttca

SEQ ID NO: 543337 - DNA, 33 bp, Homo sapien
tggaacattcaatgaaaatagttgataaagcag

SEQ ID NO: 543338 - DNA, 33 bp, Homo sapien
tggaacattcaatgaacatagttgataaagcag

SEQ ID NO: 543339 - DNA, 33 bp, Homo sapien
taagacacattttctacgctcgaggagtttgat

SEQ ID NO: 543340 - DNA, 33 bp, Homo sapien
taagacacattttctatgctcgaggagtttgat

SEQ ID NO: 543341 - DNA, 33 bp, Homo sapien
tcaccacttttgaaagacttccaggaaagatga

SEQ ID NO: 543342 - DNA, 33 bp, Homo sapien
tcaccacttttgaaagccttccaggaaagatga

SEQ ID NO: 543343 - DNA, 33 bp, Homo sapien
gttttgagctgactgaaggaaatgcagattccc

SEQ ID NO: 543344 - DNA, 33 bp, Homo sapien
gttttgagctgactgagggaaatgcagattccc

SEQ ID NO: 543345 - DNA, 33 bp, Homo sapien
ttcgttttcaaatcaactcttggtttctttgaa

SEQ ID NO: 543346 - DNA, 33 bp, Homo sapien
ttcgttttcaaatcaattcttggtttctttgaa

SEQ ID NO: 543347 - DNA, 33 bp, Homo sapien
gaaaaattatcagggcaagaataatataatctg

SEQ ID NO: 543348 - DNA, 33 bp, Homo sapien
gaaaaattatcagggcgagaataatataatctg

SEQ ID NO: 543349 - DNA, 33 bp, Homo sapien
ggttgagatagcaccaaagaaacaacttcattt

SEQ ID NO: 543350 - DNA, 33 bp, Homo sapien
ggttgagatagcaccagagaaacaacttcattt

SEQ ID NO: 543351 - DNA, 33 bp, Homo sapien
tggaactggattcctccgaagttggacagttgc

SEQ ID NO: 543352 - DNA, 33 bp, Homo sapien
tggaactggattcctctgaagttggacagttgc

SEQ ID NO: 543353 - DNA, 33 bp, Homo sapien
atggtccgaagaagacacagctcagggactact

SEQ ID NO: 543354 - DNA, 33 bp, Homo sapien
atggtccgaagaagacgcagctcagggactact

SEQ ID NO: 543355 - DNA, 33 bp, Homo sapien
aaagtaattattgtcgaaatgtagatttgaaag

SEQ ID NO: 543356 - DNA, 33 bp, Homo sapien
aaagtaattattgtcgcaatgtagatttgaaag

SEQ ID NO: 543357 - DNA, 33 bp, Homo sapien
cagagcctgtttgctacgcatttttaagagtaa

SEQ ID NO: 543358 - DNA, 33 bp, Homo sapien
cagagcctgtttgctatgcatttttaagagtaa

SEQ ID NO: 543359 - DNA, 33 bp, Homo sapien
gtaataggaagagtcccgaccagcattggtttg

SEQ ID NO: 543360 - DNA, 33 bp, Homo sapien
gtaataggaagagtcctgaccagcattggtttg

SEQ ID NO: 543361 - DNA, 33 bp, Homo sapien
gcaatagaataacttgacaaagctcacacagca

SEQ ID NO: 543362 - DNA, 33 bp, Homo sapien
gcaatagaataacttgccaaagctcacacagca

SEQ ID NO: 543363 - DNA, 33 bp, Homo sapien
agtaaagaaaatattcacagcctctggagtagt

SEQ ID NO: 543364 - DNA, 33 bp, Homo sapien
agtaaagaaaatattcgcagcctctggagtagt

SEQ ID NO: 543365 - DNA, 33 bp, Homo sapien
cagtaggtggtagaacaaagactcctacattct

SEQ ID NO: 543366 - DNA, 33 bp, Homo sapien
cagtaggtggtagaacgaagactcctacattct

SEQ ID NO: 543367 - DNA, 33 bp, Homo sapien
ggagatgagagaagcccaaagtggacaagcagc

SEQ ID NO: 543368 - DNA, 33 bp, Homo sapien
ggagatgagagaagcctaaagtggacaagcagc

SEQ ID NO: 543369 - DNA, 33 bp, Homo sapien
agaagtagtgagataacatttggttactgattg

SEQ ID NO: 543370 - DNA, 33 bp, Homo sapien
agaagtagtgagataagatttggttactgattg

SEQ ID NO: 543371 - DNA, 33 bp, Homo sapien
ctagtagctcaagtcacattttttcgcatttcc

SEQ ID NO: 543372 - DNA, 33 bp, Homo sapien
ctagtagctcaagtcatattttttcgcatttcc

SEQ ID NO: 543373 - DNA, 33 bp, Homo sapien
tctgcccctcagtaagccttacaatctggaaat

SEQ ID NO: 543374 - DNA, 33 bp, Homo sapien
tctgcccctcagtaaggcttacaatctggaaat

SEQ ID NO: 543375 - DNA, 33 bp, Homo sapien
tctggatatatctgtacctgaacccagctctgt

SEQ ID NO: 543376 - DNA, 33 bp, Homo sapien
tctggatatatctgtatctgaacccagctctgt

SEQ ID NO: 543377 - DNA, 33 bp, Homo sapien
tgggttagcttaagaccaggaatgtgctgacag

SEQ ID NO: 543378 - DNA, 33 bp, Homo sapien
tgggttagcttaagactaggaatgtgctgacag

SEQ ID NO: 543379 - DNA, 33 bp, Homo sapien
caaatacttacttgaacgtgctctctctgtttc

SEQ ID NO: 543380 - DNA, 33 bp, Homo sapien
caaatacttacttgaatgtgctctctctgtttc

SEQ ID NO: 543381 - DNA, 33 bp, Homo sapien
gcaatggctgtagagaaataaatgcagtagacc

SEQ ID NO: 543382 - DNA, 33 bp, Homo sapien
gcaatggctgtagagagataaatgcagtagacc

SEQ ID NO: 543383 - DNA, 33 bp, Homo sapien
aaaatttggccataaacttgtcatgggtccatc

SEQ ID NO: 543384 - DNA, 33 bp, Homo sapien
aaaatttggccataaatttgtcatgggtccatc

SEQ ID NO: 543385 - DNA, 33 bp, Homo sapien
tagaactcaaaattccaagtctctgtcccaagc

SEQ ID NO: 543386 - DNA, 33 bp, Homo sapien
tagaactcaaaattccgagtctctgtcccaagc

SEQ ID NO: 543387 - DNA, 33 bp, Homo sapien
attgaaccttctgataccacattctaaccattt

SEQ ID NO: 543388 - DNA, 33 bp, Homo sapien
attgaaccttctgatatcacattctaaccattt

SEQ ID NO: 543389 - DNA, 33 bp, Homo sapien
catacctgggagccaacagatgtgcgaatggca

SEQ ID NO: 543390 - DNA, 33 bp, Homo sapien
catacctgggagccaatagatgtgcgaatggca

SEQ ID NO: 543391 - DNA, 33 bp, Homo sapien
tcatgctactggctacactaattggtttaggga

SEQ ID NO: 543392 - DNA, 33 bp, Homo sapien
tcatgctactggctacgctaattggtttaggga

SEQ ID NO: 543393 - DNA, 33 bp, Homo sapien
agcagaatgaaaaagaactagaacagtgtgaaa

SEQ ID NO: 543394 - DNA, 33 bp, Homo sapien
agcagaatgaaaaagagctagaacagtgtgaaa

SEQ ID NO: 543395 - DNA, 33 bp, Homo sapien
gtagctgttgtccacacaaaccattatgggcca

SEQ ID NO: 543396 - DNA, 33 bp, Homo sapien
gtagctgttgtccacagaaaccattatgggcca

SEQ ID NO: 543397 - DNA, 33 bp, Homo sapien
gaagcagtcacaaatcacaggggtatctatgaa

SEQ ID NO: 543398 - DNA, 33 bp, Homo sapien
gaagcagtcacaaatcgcaggggtatctatgaa

SEQ ID NO: 543399 - DNA, 33 bp, Homo sapien
ctaagttggacatgaactgtaagctaggctcta

SEQ ID NO: 543400 - DNA, 33 bp, Homo sapien
ctaagttggacatgaattgtaagctaggctcta

SEQ ID NO: 543401 - DNA, 33 bp, Homo sapien
attaattgttgtcatccaagagtcaatagcttg

SEQ ID NO: 543402 - DNA, 33 bp, Homo sapien
attaattgttgtcatctaagagtcaatagcttg

SEQ ID NO: 543403 - DNA, 33 bp, Homo sapien
tttgactggtacaacccgaaagtaggatgatag

SEQ ID NO: 543404 - DNA, 33 bp, Homo sapien
tttgactggtacaacctgaaagtaggatgatag

SEQ ID NO: 543405 - DNA, 33 bp, Homo sapien
ttaaaaagtacctatgacaaaagatatgaatag

SEQ ID NO: 543406 - DNA, 33 bp, Homo sapien
ttaaaaagtacctatggcaaaagatatgaatag

SEQ ID NO: 543407 - DNA, 33 bp, Homo sapien
ggcaagtcacaaacagaagaggagctggttagg

SEQ ID NO: 543408 - DNA, 33 bp, Homo sapien
ggcaagtcacaaacaggagaggagctggttagg

SEQ ID NO: 543409 - DNA, 33 bp, Homo sapien
tgctgcctcttcaaagccctcccaaaccagcat

SEQ ID NO: 543410 - DNA, 33 bp, Homo sapien
tgctgcctcttcaaagtcctcccaaaccagcat

SEQ ID NO: 543411 - DNA, 33 bp, Homo sapien
gcacactttctcaatacaatctccttcccccaa

SEQ ID NO: 543412 - DNA, 33 bp, Homo sapien
gcacactttctcaatagaatctccttcccccaa

SEQ ID NO: 543413 - DNA, 33 bp, Homo sapien
gtctcttacaaggaaactcatcccattcataag

SEQ ID NO: 543414 - DNA, 33 bp, Homo sapien
gtctcttacaaggaaattcatcccattcataag

SEQ ID NO: 543415 - DNA, 33 bp, Homo sapien
agcagaacttgaaggaaaagtgtcaacttatcc

SEQ ID NO: 543416 - DNA, 33 bp, Homo sapien
agcagaacttgaaggagaagtgtcaacttatcc

SEQ ID NO: 543417 - DNA, 33 bp, Homo sapien
ctcatgcaaccccacacaggcagacaacattat

SEQ ID NO: 543418 - DNA, 33 bp, Homo sapien
ctcatgcaaccccacagaggcagacaacattat

SEQ ID NO: 543419 - DNA, 33 bp, Homo sapien
gagatacttactaaaacgcttactctgttaaca

SEQ ID NO: 543420 - DNA, 33 bp, Homo sapien
gagatacttactaaaatgcttactctgttaaca

SEQ ID NO: 543421 - DNA, 33 bp, Homo sapien
tgacaaaacattgcaaaaatcatggtggaaacg

SEQ ID NO: 543422 - DNA, 33 bp, Homo sapien
tgacaaaacattgcaacaatcatggtggaaacg

SEQ ID NO: 543423 - DNA, 33 bp, Homo sapien
aacaggtggaatagcaggattacgtctgtgatc

SEQ ID NO: 543424 - DNA, 33 bp, Homo sapien
aacaggtggaatagcatgattacgtctgtgatc

SEQ ID NO: 543425 - DNA, 33 bp, Homo sapien
tatatcaggcaaactcaaattgagggacattct

SEQ ID NO: 543426 - DNA, 33 bp, Homo sapien
tatatcaggcaaactcgaattgagggacattct

SEQ ID NO: 543427 - DNA, 33 bp, Homo sapien
cacaagaacacacagtaaaacaactgtagtata

SEQ ID NO: 543428 - DNA, 33 bp, Homo sapien
cacaagaacacacagtgaaacaactgtagtata

SEQ ID NO: 543429 - DNA, 33 bp, Homo sapien
tcaacaaaagaatagcacctgtagcagttatgt

SEQ ID NO: 543430 - DNA, 33 bp, Homo sapien
tcaacaaaagaatagcgcctgtagcagttatgt

SEQ ID NO: 543431 - DNA, 33 bp, Homo sapien
cggaacatccatatgagagagtataatgtagct

SEQ ID NO: 543432 - DNA, 33 bp, Homo sapien
cggaacatccatatgatagagtataatgtagct

SEQ ID NO: 543433 - DNA, 33 bp, Homo sapien
caagatcggttattaactccatttccagaggac

SEQ ID NO: 543434 - DNA, 33 bp, Homo sapien
caagatcggttattaattccatttccagaggac

SEQ ID NO: 543435 - DNA, 33 bp, Homo sapien
tctgtttcacagagtgcataatctcagttgacc

SEQ ID NO: 543436 - DNA, 33 bp, Homo sapien
tctgtttcacagagtggataatctcagttgacc

SEQ ID NO: 543437 - DNA, 33 bp, Homo sapien
aaagttaggtagctcaaataaccttatcccaag

SEQ ID NO: 543438 - DNA, 33 bp, Homo sapien
aaagttaggtagctcagataaccttatcccaag

SEQ ID NO: 543439 - DNA, 33 bp, Homo sapien
gatttgccaagaaagcccttcacagattaaagc

SEQ ID NO: 543440 - DNA, 33 bp, Homo sapien
gatttgccaagaaagctcttcacagattaaagc

SEQ ID NO: 543441 - DNA, 33 bp, Homo sapien
aaatatttgattctccagatagccgaaatataa

SEQ ID NO: 543442 - DNA, 33 bp, Homo sapien
aaatatttgattctccggatagccgaaatataa

SEQ ID NO: 543443 - DNA, 33 bp, Homo sapien
atggcagcagcaattacgtgcatgaattcgtaa

SEQ ID NO: 543444 - DNA, 33 bp, Homo sapien
atggcagcagcaattatgtgcatgaattcgtaa

SEQ ID NO: 543445 - DNA, 33 bp, Homo sapien
actaaaaggtactgggccatttagctctgctcc

SEQ ID NO: 543446 - DNA, 33 bp, Homo sapien
actaaaaggtactgggtcatttagctctgctcc

SEQ ID NO: 543447 - DNA, 33 bp, Homo sapien
cttttctgctctaaaactttgcgttccagagct

SEQ ID NO: 543448 - DNA, 33 bp, Homo sapien
cttttctgctctaaaattttgcgttccagagct

SEQ ID NO: 543449 - DNA, 33 bp, Homo sapien
tttaaaagatgtaatacgtgtaaagtactccac

SEQ ID NO: 543450 - DNA, 33 bp, Homo sapien
tttaaaagatgtaatatgtgtaaagtactccac

SEQ ID NO: 543451 - DNA, 33 bp, Homo sapien
gatcagaaagaagtgacagagaaactgccctgc

SEQ ID NO: 543452 - DNA, 33 bp, Homo sapien
gatcagaaagaagtgatagagaaactgccctgc

SEQ ID NO: 543453 - DNA, 33 bp, Homo sapien
tagatgccattgcctcagaggaaccttccaagg

SEQ ID NO: 543454 - DNA, 33 bp, Homo sapien
tagatgccattgcctccgaggaaccttccaagg

SEQ ID NO: 543455 - DNA, 33 bp, Homo sapien
gaaagttgcctaaatgcagggttaggtgtgccc

SEQ ID NO: 543456 - DNA, 33 bp, Homo sapien
gaaagttgcctaaatggagggttaggtgtgccc

SEQ ID NO: 543457 - DNA, 33 bp, Homo sapien
atttaaaatcatctaccctctagcatctgaact

SEQ ID NO: 543458 - DNA, 33 bp, Homo sapien
atttaaaatcatctactctctagcatctgaact

SEQ ID NO: 543459 - DNA, 33 bp, Homo sapien
aaatactggtacaaaaaggtacataggtacata

SEQ ID NO: 543460 - DNA, 33 bp, Homo sapien
aaatactggtacaaaatggtacataggtacata

SEQ ID NO: 543461 - DNA, 33 bp, Homo sapien
atcagcacgtccagagcaaattgtgaagtccag

SEQ ID NO: 543462 - DNA, 33 bp, Homo sapien
atcagcacgtccagaggaaattgtgaagtccag

SEQ ID NO: 543463 - DNA, 33 bp, Homo sapien
tgctagttccttcatacgcctctgcttctcttc

SEQ ID NO: 543464 - DNA, 33 bp, Homo sapien
tgctagttccttcatatgcctctgcttctcttc

SEQ ID NO: 543465 - DNA, 33 bp, Homo sapien
aattccagctgtttccaaaataaatctccttta

SEQ ID NO: 543466 - DNA, 33 bp, Homo sapien
aattccagctgtttccgaaataaatctccttta

SEQ ID NO: 543467 - DNA, 33 bp, Homo sapien
cattcaataagagaaaaacgttgactctacagt

SEQ ID NO: 543468 - DNA, 33 bp, Homo sapien
cattcaataagagaaacacgttgactctacagt

SEQ ID NO: 543469 - DNA, 33 bp, Homo sapien
aaaactaataaataataaatctggtgccagaat

SEQ ID NO: 543470 - DNA, 33 bp, Homo sapien
aaaactaataaataattaatctggtgccagaat

SEQ ID NO: 543471 - DNA, 33 bp, Homo sapien
cccttccatctcatcagtaacctacatttttca

SEQ ID NO: 543472 - DNA, 33 bp, Homo sapien
cccttccatctcatcattaacctacatttttca

SEQ ID NO: 543473 - DNA, 33 bp, Homo sapien
acttacctcaatacgacggcagcaaagcccctt

SEQ ID NO: 543474 - DNA, 33 bp, Homo sapien
acttacctcaatacgatggcagcaaagcccctt

SEQ ID NO: 543475 - DNA, 33 bp, Homo sapien
taattttgcagcaatacgcattcctatacatga

SEQ ID NO: 543476 - DNA, 33 bp, Homo sapien
taattttgcagcaatatgcattcctatacatga

SEQ ID NO: 543477 - DNA, 33 bp, Homo sapien
taaatgttggggcctaagactctccaagaacgt

SEQ ID NO: 543478 - DNA, 33 bp, Homo sapien
taaatgttggggcctacgactctccaagaacgt

SEQ ID NO: 543479 - DNA, 33 bp, Homo sapien
tggaaatgcagtttgaagtattaggttgctgtt

SEQ ID NO: 543480 - DNA, 33 bp, Homo sapien
tggaaatgcagtttgaggtattaggttgctgtt

SEQ ID NO: 543481 - DNA, 33 bp, Homo sapien
caacagactgccataacgtggctccaggaagag

SEQ ID NO: 543482 - DNA, 33 bp, Homo sapien
caacagactgccataaggtggctccaggaagag

SEQ ID NO: 543483 - DNA, 33 bp, Homo sapien
caccaatcctcccttcaaaacaaagatgcatgc

SEQ ID NO: 543484 - DNA, 33 bp, Homo sapien
caccaatcctcccttcgaaacaaagatgcatgc

SEQ ID NO: 543485 - DNA, 33 bp, Homo sapien
gcatataattagagaaaggcaaatcttttacac

SEQ ID NO: 543486 - DNA, 33 bp, Homo sapien
gcatataattagagaatggcaaatcttttacac

SEQ ID NO: 543487 - DNA, 33 bp, Homo sapien
gcccatacaaattactcaaaaaagtcacaattt

SEQ ID NO: 543488 - DNA, 33 bp, Homo sapien
gcccatacaaattactgaaaaaagtcacaattt

SEQ ID NO: 543489 - DNA, 33 bp, Homo sapien
aagtcaacttaggtgccgatacaatgccactgc

SEQ ID NO: 543490 - DNA, 33 bp, Homo sapien
aagtcaacttaggtgctgatacaatgccactgc

SEQ ID NO: 543491 - DNA, 33 bp, Homo sapien
atggtaaaggaacaaagattggctctaaaatct

SEQ ID NO: 543492 - DNA, 33 bp, Homo sapien
atggtaaaggaacaaatattggctctaaaatct

SEQ ID NO: 543493 - DNA, 33 bp, Homo sapien
agatcaagcctgtctacacttatatggctagag

SEQ ID NO: 543494 - DNA, 33 bp, Homo sapien
agatcaagcctgtctatacttatatggctagag

SEQ ID NO: 543495 - DNA, 33 bp, Homo sapien
tacagcaaacttcagactatgcacagtacactt

SEQ ID NO: 543496 - DNA, 33 bp, Homo sapien
tacagcaaacttcagagtatgcacagtacactt

SEQ ID NO: 543497 - DNA, 33 bp, Homo sapien
gaacagagttcaaagaggtcaggatttgtccta

SEQ ID NO: 543498 - DNA, 33 bp, Homo sapien
gaacagagttcaaagatgtcaggatttgtccta

SEQ ID NO: 543499 - DNA, 33 bp, Homo sapien
ccaaacaactaggcataataacctaaccaagtt

SEQ ID NO: 543500 - DNA, 33 bp, Homo sapien
ccaaacaactaggcatcataacctaaccaagtt

SEQ ID NO: 543501 - DNA, 33 bp, Homo sapien
tgctgatcctgccctccaaggtcataccagagg

SEQ ID NO: 543502 - DNA, 33 bp, Homo sapien
tgctgatcctgccctctaaggtcataccagagg

SEQ ID NO: 543503 - DNA, 33 bp, Homo sapien
ttgcctccttgcttagcataaatcacttaacat

SEQ ID NO: 543504 - DNA, 33 bp, Homo sapien
ttgcctccttgcttagtataaatcacttaacat

SEQ ID NO: 543505 - DNA, 33 bp, Homo sapien
aaactcatacccacacaacgattctgctagcca

SEQ ID NO: 543506 - DNA, 33 bp, Homo sapien
aaactcatacccacacgacgattctgctagcca

SEQ ID NO: 543507 - DNA, 33 bp, Homo sapien
agaggccagaaatgccactaaatgtcctgcaat

SEQ ID NO: 543508 - DNA, 33 bp, Homo sapien
agaggccagaaatgccgctaaatgtcctgcaat

SEQ ID NO: 543509 - DNA, 33 bp, Homo sapien
tttaaaaatcacaaaaagcatttacattgctag

SEQ ID NO: 543510 - DNA, 33 bp, Homo sapien
tttaaaaatcacaaaaggcatttacattgctag

SEQ ID NO: 543511 - DNA, 33 bp, Homo sapien
agacccctctacaaccagagacacttgagttgg

SEQ ID NO: 543512 - DNA, 33 bp, Homo sapien
agacccctctacaaccggagacacttgagttgg

SEQ ID NO: 543513 - DNA, 33 bp, Homo sapien
accttcctagagtttaaggtacgagaagtctta

SEQ ID NO: 543514 - DNA, 33 bp, Homo sapien
accttcctagagtttagggtacgagaagtctta

SEQ ID NO: 543515 - DNA, 33 bp, Homo sapien
ctcttcttaacctgtgaatcctctccatgaaaa

SEQ ID NO: 543516 - DNA, 33 bp, Homo sapien
ctcttcttaacctgtggatcctctccatgaaaa

SEQ ID NO: 543517 - DNA, 33 bp, Homo sapien
agtcagatacttgtgcacacaatgacattttta

SEQ ID NO: 543518 - DNA, 33 bp, Homo sapien
agtcagatacttgtgcgcacaatgacattttta

SEQ ID NO: 543519 - DNA, 33 bp, Homo sapien
actggatttttcttgccacctcattactgtgcc

SEQ ID NO: 543520 - DNA, 33 bp, Homo sapien
actggatttttcttgctacctcattactgtgcc

SEQ ID NO: 543521 - DNA, 33 bp, Homo sapien
ctccaagcttaaatccaaacaccacagctgcac

SEQ ID NO: 543522 - DNA, 33 bp, Homo sapien
ctccaagcttaaatccgaacaccacagctgcac

SEQ ID NO: 543523 - DNA, 33 bp, Homo sapien
cccattctttacacaaccagaggaggaggttag

SEQ ID NO: 543524 - DNA, 33 bp, Homo sapien
cccattctttacacaatcagaggaggaggttag

SEQ ID NO: 543525 - DNA, 33 bp, Homo sapien
agtaccaaatagacaaatcaggctgtttaccag

SEQ ID NO: 543526 - DNA, 33 bp, Homo sapien
agtaccaaatagacaagtcaggctgtttaccag

SEQ ID NO: 543527 - DNA, 33 bp, Homo sapien
ctgttgagttctgaaaagcggatcatctctggc

SEQ ID NO: 543528 - DNA, 33 bp, Homo sapien
ctgttgagttctgaaaggcggatcatctctggc

SEQ ID NO: 543529 - DNA, 33 bp, Homo sapien
tcagttactagctgtgcaggttcttcgttgctt

SEQ ID NO: 543530 - DNA, 33 bp, Homo sapien
tcagttactagctgtggaggttcttcgttgctt

SEQ ID NO: 543531 - DNA, 33 bp, Homo sapien
atttctctccctctctaaaaaggctgatgtcac

SEQ ID NO: 543532 - DNA, 33 bp, Homo sapien
atttctctccctctctgaaaaggctgatgtcac

SEQ ID NO: 543533 - DNA, 33 bp, Homo sapien
acacactgtaaacaccagagcaatacttagtaa

SEQ ID NO: 543534 - DNA, 33 bp, Homo sapien
acacactgtaaacaccggagcaatacttagtaa

SEQ ID NO: 543535 - DNA, 33 bp, Homo sapien
tctgaatacagatgaacatatggcagatccaca

SEQ ID NO: 543536 - DNA, 33 bp, Homo sapien
tctgaatacagatgaatatatggcagatccaca

SEQ ID NO: 543537 - DNA, 33 bp, Homo sapien
aggaacatggacttatcagaagcaactagtagg

SEQ ID NO: 543538 - DNA, 33 bp, Homo sapien
aggaacatggacttatgagaagcaactagtagg

SEQ ID NO: 543539 - DNA, 33 bp, Homo sapien
agctccttctcaccccaatttcatcttcagatc

SEQ ID NO: 543540 - DNA, 33 bp, Homo sapien
agctccttctcacccccatttcatcttcagatc

SEQ ID NO: 543541 - DNA, 33 bp, Homo sapien
ctgaatattttttccagtctgatgatttgattt

SEQ ID NO: 543542 - DNA, 33 bp, Homo sapien
ctgaatattttttccattctgatgatttgattt

SEQ ID NO: 543543 - DNA, 33 bp, Homo sapien
gcttatttatttcatccctattccttcatccta

SEQ ID NO: 543544 - DNA, 33 bp, Homo sapien
gcttatttatttcatctctattccttcatccta

SEQ ID NO: 543545 - DNA, 33 bp, Homo sapien
tttgtgctctgagagacaataggtataacttta

SEQ ID NO: 543546 - DNA, 33 bp, Homo sapien
tttgtgctctgagagataataggtataacttta

SEQ ID NO: 543547 - DNA, 33 bp, Homo sapien
ctgcagtaaacatccacgcataggttttctgtg

SEQ ID NO: 543548 - DNA, 33 bp, Homo sapien
ctgcagtaaacatccatgcataggttttctgtg

SEQ ID NO: 543549 - DNA, 33 bp, Homo sapien
aggcaaaaacaaagtaaagacctatatgtgaag

SEQ ID NO: 543550 - DNA, 33 bp, Homo sapien
aggcaaaaacaaagtagagacctatatgtgaag

SEQ ID NO: 543551 - DNA, 33 bp, Homo sapien
gtttctttgtagggataaggaggagcaataaaa

SEQ ID NO: 543552 - DNA, 33 bp, Homo sapien
gtttctttgtagggatgaggaggagcaataaaa

SEQ ID NO: 543553 - DNA, 33 bp, Homo sapien
ttcaatagagctgcttaaaatgtattgtttggg

SEQ ID NO: 543554 - DNA, 33 bp, Homo sapien
ttcaatagagctgcttcaaatgtattgtttggg

SEQ ID NO: 543555 - DNA, 33 bp, Homo sapien
tttttttcttttatacacatcatcttcctagaa

SEQ ID NO: 543556 - DNA, 33 bp, Homo sapien
tttttttcttttatacgcatcatcttcctagaa

SEQ ID NO: 543557 - DNA, 33 bp, Homo sapien
taagcgatttcccaaacgctccatatagcccat

SEQ ID NO: 543558 - DNA, 33 bp, Homo sapien
taagcgatttcccaaatgctccatatagcccat

SEQ ID NO: 543559 - DNA, 33 bp, Homo sapien
tttacaaacacaaaaggaatgtggaagggtgat

SEQ ID NO: 543560 - DNA, 33 bp, Homo sapien
tttacaaacacaaaagtaatgtggaagggtgat

SEQ ID NO: 543561 - DNA, 33 bp, Homo sapien
tcacctaacagcagagcaaggagaagataagat

SEQ ID NO: 543562 - DNA, 33 bp, Homo sapien
tcacctaacagcagaggaaggagaagataagat

SEQ ID NO: 543563 - DNA, 33 bp, Homo sapien
cccagacaaagcagacaggttggcatccctttc

SEQ ID NO: 543564 - DNA, 33 bp, Homo sapien
cccagacaaagcagacgggttggcatccctttc

SEQ ID NO: 543565 - DNA, 33 bp, Homo sapien
acaagagtggtcttaaagatggaatactggagt

SEQ ID NO: 543566 - DNA, 33 bp, Homo sapien
acaagagtggtcttaatgatggaatactggagt

SEQ ID NO: 543567 - DNA, 33 bp, Homo sapien
attctcaggttccttccatatctagttggaaat

SEQ ID NO: 543568 - DNA, 33 bp, Homo sapien
attctcaggttccttcgatatctagttggaaat

SEQ ID NO: 543569 - DNA, 33 bp, Homo sapien
agatatcataatcaggaaaagcacaaagaagag

SEQ ID NO: 543570 - DNA, 33 bp, Homo sapien
agatatcataatcagggaaagcacaaagaagag

SEQ ID NO: 543571 - DNA, 33 bp, Homo sapien
atttctcacagttctgaaatctaggaagtccac

SEQ ID NO: 543572 - DNA, 33 bp, Homo sapien
atttctcacagttctggaatctaggaagtccac

SEQ ID NO: 543573 - DNA, 33 bp, Homo sapien
agggtggaagaggaaacgatgctgaagactgag

SEQ ID NO: 543574 - DNA, 33 bp, Homo sapien
agggtggaagaggaaatgatgctgaagactgag

SEQ ID NO: 543575 - DNA, 33 bp, Homo sapien
ctgctggctgctaatcccaccttctcctgactc

SEQ ID NO: 543576 - DNA, 33 bp, Homo sapien
ctgctggctgctaatctcaccttctcctgactc

SEQ ID NO: 543577 - DNA, 33 bp, Homo sapien
atctaaagcgcactaaagttcaacaaatgattt

SEQ ID NO: 543578 - DNA, 33 bp, Homo sapien
atctaaagcgcactaaggttcaacaaatgattt

SEQ ID NO: 543579 - DNA, 33 bp, Homo sapien
cgcattataaaaccaccacagtaggctactttt

SEQ ID NO: 543580 - DNA, 33 bp, Homo sapien
cgcattataaaaccactacagtaggctactttt

SEQ ID NO: 543581 - DNA, 33 bp, Homo sapien
agtttctgtgatataactcctcatttgcttcca

SEQ ID NO: 543582 - DNA, 33 bp, Homo sapien
agtttctgtgatataattcctcatttgcttcca

SEQ ID NO: 543583 - DNA, 33 bp, Homo sapien
cttgtagatacaacagaatatggcagaatgatc

SEQ ID NO: 543584 - DNA, 33 bp, Homo sapien
cttgtagatacaacagcatatggcagaatgatc

SEQ ID NO: 543585 - DNA, 33 bp, Homo sapien
accaaagaaggctcaaatcacgtcctctaacac

SEQ ID NO: 543586 - DNA, 33 bp, Homo sapien
accaaagaaggctcaagtcacgtcctctaacac

SEQ ID NO: 543587 - DNA, 33 bp, Homo sapien
tggattcatggaacaacagaaggaacacactga

SEQ ID NO: 543588 - DNA, 33 bp, Homo sapien
tggattcatggaacaatagaaggaacacactga

SEQ ID NO: 543589 - DNA, 33 bp, Homo sapien
gattcagcttgacagacacttagtggaggcctc

SEQ ID NO: 543590 - DNA, 33 bp, Homo sapien
gattcagcttgacagatacttagtggaggcctc

SEQ ID NO: 543591 - DNA, 33 bp, Homo sapien
acatctaagacccacaatgacttcagttcctat

SEQ ID NO: 543592 - DNA, 33 bp, Homo sapien
acatctaagacccacagtgacttcagttcctat

SEQ ID NO: 543593 - DNA, 33 bp, Homo sapien
aaatacattgacaatcccccccaaaggagaaag

SEQ ID NO: 543594 - DNA, 33 bp, Homo sapien
aaatacattgacaatctcccccaaaggagaaag

SEQ ID NO: 543595 - DNA, 33 bp, Homo sapien
tcaactcaaggaaaaacttcctaatagagctgc

SEQ ID NO: 543596 - DNA, 33 bp, Homo sapien
tcaactcaaggaaaaatttcctaatagagctgc

SEQ ID NO: 543597 - DNA, 33 bp, Homo sapien
ggtgcatgttacagacaggtaggttttttcctc

SEQ ID NO: 543598 - DNA, 33 bp, Homo sapien
ggtgcatgttacagacgggtaggttttttcctc

SEQ ID NO: 543599 - DNA, 33 bp, Homo sapien
ctcagtatcttctcaaaacctgtaacagggctt

SEQ ID NO: 543600 - DNA, 33 bp, Homo sapien
ctcagtatcttctcaacacctgtaacagggctt

SEQ ID NO: 543601 - DNA, 33 bp, Homo sapien
cagtgcctaatacacacgcagtggttattaaat

SEQ ID NO: 543602 - DNA, 33 bp, Homo sapien
cagtgcctaatacacatgcagtggttattaaat

SEQ ID NO: 543603 - DNA, 33 bp, Homo sapien
aaatgaaaacagataaaacagctggcagtggag

SEQ ID NO: 543604 - DNA, 33 bp, Homo sapien
aaatgaaaacagataacacagctggcagtggag

SEQ ID NO: 543605 - DNA, 33 bp, Homo sapien
tgtttcatctgcttatcagagacattgcagcag

SEQ ID NO: 543606 - DNA, 33 bp, Homo sapien
tgtttcatctgcttattagagacattgcagcag

SEQ ID NO: 543607 - DNA, 33 bp, Homo sapien
cctccagaaatttgacaagtaagttatttgttc

SEQ ID NO: 543608 - DNA, 33 bp, Homo sapien
cctccagaaatttgacgagtaagttatttgttc

SEQ ID NO: 543609 - DNA, 33 bp, Homo sapien
cctttgcataacagcaccttgaatttcctttgg

SEQ ID NO: 543610 - DNA, 33 bp, Homo sapien
cctttgcataacagcatcttgaatttcctttgg

SEQ ID NO: 543611 - DNA, 33 bp, Homo sapien
ttaaaaagagacagaaaatagaggcaagaaagc

SEQ ID NO: 543612 - DNA, 33 bp, Homo sapien
ttaaaaagagacagaagatagaggcaagaaagc

SEQ ID NO: 543613 - DNA, 33 bp, Homo sapien
gtagtttcccctctaaagtttggattaggtttc

SEQ ID NO: 543614 - DNA, 33 bp, Homo sapien
gtagtttcccctctaaggtttggattaggtttc

SEQ ID NO: 543615 - DNA, 33 bp, Homo sapien
agtttctctccaagaacaacagatgccttttta

SEQ ID NO: 543616 - DNA, 33 bp, Homo sapien
agtttctctccaagaagaacagatgccttttta

SEQ ID NO: 543617 - DNA, 33 bp, Homo sapien
ggttcaggtggcttctcaaatctctgtgttcaa

SEQ ID NO: 543618 - DNA, 33 bp, Homo sapien
ggttcaggtggcttcttaaatctctgtgttcaa

SEQ ID NO: 543619 - DNA, 33 bp, Homo sapien
aaaccatgcacgcaaaaagcttagcaaagggtc

SEQ ID NO: 543620 - DNA, 33 bp, Homo sapien
aaaccatgcacgcaaagagcttagcaaagggtc

SEQ ID NO: 543621 - DNA, 33 bp, Homo sapien
gggtcactgctcactaccattcaattttcacct

SEQ ID NO: 543622 - DNA, 33 bp, Homo sapien
gggtcactgctcactatcattcaattttcacct

SEQ ID NO: 543623 - DNA, 33 bp, Homo sapien
cttatggatattttataaaaagctgcatccgga

SEQ ID NO: 543624 - DNA, 33 bp, Homo sapien
cttatggatattttattaaaagctgcatccgga

SEQ ID NO: 543625 - DNA, 33 bp, Homo sapien
aatcttggattcaaaacttgatttttcttatac

SEQ ID NO: 543626 - DNA, 33 bp, Homo sapien
aatcttggattcaaaagttgatttttcttatac

SEQ ID NO: 543627 - DNA, 33 bp, Homo sapien
tcagcccaagtagttacatgaattcaagtaggc

SEQ ID NO: 543628 - DNA, 33 bp, Homo sapien
tcagcccaagtagttatatgaattcaagtaggc

SEQ ID NO: 543629 - DNA, 33 bp, Homo sapien
atgcctgttaaactgcaaaggaattaacacagt

SEQ ID NO: 543630 - DNA, 33 bp, Homo sapien
atgcctgttaaactgcgaaggaattaacacagt

SEQ ID NO: 543631 - DNA, 33 bp, Homo sapien
ccaaagagctttcactcagggaagcgcctgcac

SEQ ID NO: 543632 - DNA, 33 bp, Homo sapien
ccaaagagctttcactgagggaagcgcctgcac

SEQ ID NO: 543633 - DNA, 33 bp, Homo sapien
ttgatatccaaagctacgaaaaagaaaaggcaa

SEQ ID NO: 543634 - DNA, 33 bp, Homo sapien
ttgatatccaaagctatgaaaaagaaaaggcaa

SEQ ID NO: 543635 - DNA, 33 bp, Homo sapien
tttgatattctgaggaagggaaaatgtattcca

SEQ ID NO: 543636 - DNA, 33 bp, Homo sapien
tttgatattctgaggaggggaaaatgtattcca

SEQ ID NO: 543637 - DNA, 33 bp, Homo sapien
tgctaatatgtgatcaatagaagacaacagcat

SEQ ID NO: 543638 - DNA, 33 bp, Homo sapien
tgctaatatgtgatcagtagaagacaacagcat

SEQ ID NO: 543639 - DNA, 33 bp, Homo sapien
ctccttgtgagggaaactagatcatggtgctca

SEQ ID NO: 543640 - DNA, 33 bp, Homo sapien
ctccttgtgagggaaagtagatcatggtgctca

SEQ ID NO: 543641 - DNA, 33 bp, Homo sapien
ttaacctttatgtctcaatttcatcctctttaa

SEQ ID NO: 543642 - DNA, 33 bp, Homo sapien
ttaacctttatgtctcgatttcatcctctttaa

SEQ ID NO: 543643 - DNA, 33 bp, Homo sapien
tagcttcatgtttcctaaaggtagagaagtgga

SEQ ID NO: 543644 - DNA, 33 bp, Homo sapien
tagcttcatgtttcctgaaggtagagaagtgga

SEQ ID NO: 543645 - DNA, 33 bp, Homo sapien
caaggaggtggtggcaatctcaacagccagaaa

SEQ ID NO: 543646 - DNA, 33 bp, Homo sapien
caaggaggtggtggcagtctcaacagccagaaa

SEQ ID NO: 543647 - DNA, 33 bp, Homo sapien
ggctcaaagaagttaaatcagtcgtccaaagtg

SEQ ID NO: 543648 - DNA, 33 bp, Homo sapien
ggctcaaagaagttaagtcagtcgtccaaagtg

SEQ ID NO: 543649 - DNA, 33 bp, Homo sapien
tcttctagcagtgcctcacctgggaatcagctg

SEQ ID NO: 543650 - DNA, 33 bp, Homo sapien
tcttctagcagtgccttacctgggaatcagctg

SEQ ID NO: 543651 - DNA, 33 bp, Homo sapien
acaaagagaatgtgacaaggggaattggttagt

SEQ ID NO: 543652 - DNA, 33 bp, Homo sapien
acaaagagaatgtgacgaggggaattggttagt

SEQ ID NO: 543653 - DNA, 33 bp, Homo sapien
gaagggacacgattcccgagtcagtatgttcag

SEQ ID NO: 543654 - DNA, 33 bp, Homo sapien
gaagggacacgattccggagtcagtatgttcag

SEQ ID NO: 543655 - DNA, 33 bp, Homo sapien
ttaggcttttttctcacgtgtgccaaccatgag

SEQ ID NO: 543656 - DNA, 33 bp, Homo sapien
ttaggcttttttctcatgtgtgccaaccatgag

SEQ ID NO: 543657 - DNA, 33 bp, Homo sapien
gtgaaacccatcactgcatcggagctgctaccc

SEQ ID NO: 543658 - DNA, 33 bp, Homo sapien
gtgaaacccatcactgtatcggagctgctaccc

SEQ ID NO: 543659 - DNA, 33 bp, Homo sapien
ccaccttctttagccacgacgtgcttgtgacct

SEQ ID NO: 543660 - DNA, 33 bp, Homo sapien
ccaccttctttagccatgacgtgcttgtgacct

SEQ ID NO: 543661 - DNA, 33 bp, Homo sapien
ggagaggagtgactacaggaaaatgaagcataa

SEQ ID NO: 543662 - DNA, 33 bp, Homo sapien
ggagaggagtgactacgggaaaatgaagcataa

SEQ ID NO: 543663 - DNA, 33 bp, Homo sapien
tacatgaatagtatcaaagtatttcctggtgtt

SEQ ID NO: 543664 - DNA, 33 bp, Homo sapien
tacatgaatagtatcagagtatttcctggtgtt

SEQ ID NO: 543665 - DNA, 33 bp, Homo sapien
cctcccaccctgctaactgaaggcttgcctcgg

SEQ ID NO: 543666 - DNA, 33 bp, Homo sapien
cctcccaccctgctaattgaaggcttgcctcgg

SEQ ID NO: 543667 - DNA, 33 bp, Homo sapien
ccttaatgcccagttcaatagcttgacactaag

SEQ ID NO: 543668 - DNA, 33 bp, Homo sapien
ccttaatgcccagttcgatagcttgacactaag

SEQ ID NO: 543669 - DNA, 33 bp, Homo sapien
tttgttaaagagattaagaggagtgaacatgag

SEQ ID NO: 543670 - DNA, 33 bp, Homo sapien
tttgttaaagagattaggaggagtgaacatgag

SEQ ID NO: 543671 - DNA, 33 bp, Homo sapien
tgtttagtaggctctacggttgaggtttatgta

SEQ ID NO: 543672 - DNA, 33 bp, Homo sapien
tgtttagtaggctctatggttgaggtttatgta

SEQ ID NO: 543673 - DNA, 33 bp, Homo sapien
gcacccttgagccaaagggtaatgtactgcaca

SEQ ID NO: 543674 - DNA, 33 bp, Homo sapien
gcacccttgagccaaatggtaatgtactgcaca

SEQ ID NO: 543675 - DNA, 33 bp, Homo sapien
tcttcttcgtgttcaaagcctatgacattgcct

SEQ ID NO: 543676 - DNA, 33 bp, Homo sapien
tcttcttcgtgttcaaggcctatgacattgcct

SEQ ID NO: 543677 - DNA, 33 bp, Homo sapien
gtcagctgattcatgaccttaattccttctttg

SEQ ID NO: 543678 - DNA, 33 bp, Homo sapien
gtcagctgattcatgatcttaattccttctttg

SEQ ID NO: 543679 - DNA, 33 bp, Homo sapien
gcgattgttctcgtcacagattatgtgaatggc

SEQ ID NO: 543680 - DNA, 33 bp, Homo sapien
gcgattgttctcgtcatagattatgtgaatggc

SEQ ID NO: 543681 - DNA, 33 bp, Homo sapien
tgctgtcatcttaccaagaaatccatagtctcc

SEQ ID NO: 543682 - DNA, 33 bp, Homo sapien
tgctgtcatcttaccaggaaatccatagtctcc

SEQ ID NO: 543683 - DNA, 33 bp, Homo sapien
taggagagggatttcaacttgatgactcttgat

SEQ ID NO: 543684 - DNA, 33 bp, Homo sapien
taggagagggatttcagcttgatgactcttgat

SEQ ID NO: 543685 - DNA, 33 bp, Homo sapien
gggtttatgctctgcaacagtctgttgggttta

SEQ ID NO: 543686 - DNA, 33 bp, Homo sapien
gggtttatgctctgcagcagtctgttgggttta

SEQ ID NO: 543687 - DNA, 33 bp, Homo sapien
cttcaatgtttcctcactaactcttggattaac

SEQ ID NO: 543688 - DNA, 33 bp, Homo sapien
cttcaatgtttcctcagtaactcttggattaac

SEQ ID NO: 543689 - DNA, 33 bp, Homo sapien
gcaactcggcatgacaagggatgaaatagaagc

SEQ ID NO: 543690 - DNA, 33 bp, Homo sapien
gcaactcggcatgacaggggatgaaatagaagc

SEQ ID NO: 543691 - DNA, 33 bp, Homo sapien
acctgaagagttgtggacactattgggaagcac

SEQ ID NO: 543692 - DNA, 33 bp, Homo sapien
acctgaagagttgtgggcactattgggaagcac

SEQ ID NO: 543693 - DNA, 33 bp, Homo sapien
ttaaagtctcacatccaagttctttcctcgacg

SEQ ID NO: 543694 - DNA, 33 bp, Homo sapien
ttaaagtctcacatccgagttctttcctcgacg

SEQ ID NO: 543695 - DNA, 33 bp, Homo sapien
aatgaatgcagattcaatcaagtgaggagtgga

SEQ ID NO: 543696 - DNA, 33 bp, Homo sapien
aatgaatgcagattcagtcaagtgaggagtgga

SEQ ID NO: 543697 - DNA, 33 bp, Homo sapien
cttgacaacaaaagaacgaatctaccctgtcag

SEQ ID NO: 543698 - DNA, 33 bp, Homo sapien
cttgacaacaaaagaatgaatctaccctgtcag

SEQ ID NO: 543699 - DNA, 33 bp, Homo sapien
ttcagctccctgattccaccacgtgcgatttga

SEQ ID NO: 543700 - DNA, 33 bp, Homo sapien
ttcagctccctgattctaccacgtgcgatttga

SEQ ID NO: 543701 - DNA, 33 bp, Homo sapien
ctactgtctttccaacaatcaaaccaagatgta

SEQ ID NO: 543702 - DNA, 33 bp, Homo sapien
ctactgtctttccaaccatcaaaccaagatgta

SEQ ID NO: 543703 - DNA, 33 bp, Homo sapien
ctcttctatcttgtaccggacaggacccattcc

SEQ ID NO: 543704 - DNA, 33 bp, Homo sapien
ctcttctatcttgtactggacaggacccattcc

SEQ ID NO: 543705 - DNA, 33 bp, Homo sapien
agggcccaggtgaaagaactgatgactcttttg

SEQ ID NO: 543706 - DNA, 33 bp, Homo sapien
agggcccaggtgaaaggactgatgactcttttg

SEQ ID NO: 543707 - DNA, 33 bp, Homo sapien
gccatcttggactagtcacacagtttctctggg

SEQ ID NO: 543708 - DNA, 33 bp, Homo sapien
gccatcttggactagttacacagtttctctggg

SEQ ID NO: 543709 - DNA, 33 bp, Homo sapien
cagaaaaactaaaccaatgcagcccataatagc

SEQ ID NO: 543710 - DNA, 33 bp, Homo sapien
cagaaaaactaaaccagtgcagcccataatagc

SEQ ID NO: 543711 - DNA, 33 bp, Homo sapien
acaaaataagaaggacaaaagcattaggcatct

SEQ ID NO: 543712 - DNA, 33 bp, Homo sapien
acaaaataagaaggacgaaagcattaggcatct

SEQ ID NO: 543713 - DNA, 33 bp, Homo sapien
aatggccaaagaggccagaagattccatggatc

SEQ ID NO: 543714 - DNA, 33 bp, Homo sapien
aatggccaaagaggccggaagattccatggatc

SEQ ID NO: 543715 - DNA, 33 bp, Homo sapien
tcagttaaaatgccaaagactatcacattaagt

SEQ ID NO: 543716 - DNA, 33 bp, Homo sapien
tcagttaaaatgccaaggactatcacattaagt

SEQ ID NO: 543717 - DNA, 33 bp, Homo sapien
tatgctttatatgcagcacctatgccagggctg

SEQ ID NO: 543718 - DNA, 33 bp, Homo sapien
tatgctttatatgcaggacctatgccagggctg

SEQ ID NO: 543719 - DNA, 33 bp, Homo sapien
tccttataaaaaagagaaatctgcacccagtga

SEQ ID NO: 543720 - DNA, 33 bp, Homo sapien
tccttataaaaaagagcaatctgcacccagtga

SEQ ID NO: 543721 - DNA, 33 bp, Homo sapien
ttggccacagcagaagcagtagaggtgatgttg

SEQ ID NO: 543722 - DNA, 33 bp, Homo sapien
ttggccacagcagaaggagtagaggtgatgttg

SEQ ID NO: 543723 - DNA, 33 bp, Homo sapien
gtatcaaaactaagctaaacccaaatcgtctcc

SEQ ID NO: 543724 - DNA, 33 bp, Homo sapien
gtatcaaaactaagctgaacccaaatcgtctcc

SEQ ID NO: 543725 - DNA, 33 bp, Homo sapien
gaattaggcaagagaaaggcatcacagcttccg

SEQ ID NO: 543726 - DNA, 33 bp, Homo sapien
gaattaggcaagagaagggcatcacagcttccg

SEQ ID NO: 543727 - DNA, 33 bp, Homo sapien
ttctcttggctctcgagtacccatcctcaggcc

SEQ ID NO: 543728 - DNA, 33 bp, Homo sapien
ttctcttggctctcgattacccatcctcaggcc

SEQ ID NO: 543729 - DNA, 33 bp, Homo sapien
ttttatgacctgccttaaaaaccagacgtgatc

SEQ ID NO: 543730 - DNA, 33 bp, Homo sapien
ttttatgacctgccttgaaaaccagacgtgatc

SEQ ID NO: 543731 - DNA, 33 bp, Homo sapien
atgtgttttctgaccccgatttcagggagggca

SEQ ID NO: 543732 - DNA, 33 bp, Homo sapien
atgtgttttctgaccctgatttcagggagggca

SEQ ID NO: 543733 - DNA, 33 bp, Homo sapien
tgctggcatccactccagaaaggacatatgggt

SEQ ID NO: 543734 - DNA, 33 bp, Homo sapien
tgctggcatccactccggaaaggacatatgggt

SEQ ID NO: 543735 - DNA, 33 bp, Homo sapien
cagggagaactagacaatcatagttggatgttg

SEQ ID NO: 543736 - DNA, 33 bp, Homo sapien
cagggagaactagacagtcatagttggatgttg

SEQ ID NO: 543737 - DNA, 33 bp, Homo sapien
atcaatatccaggttcacatgaacaaaactgca

SEQ ID NO: 543738 - DNA, 33 bp, Homo sapien
atcaatatccaggttcgcatgaacaaaactgca

SEQ ID NO: 543739 - DNA, 33 bp, Homo sapien
ctagtggccaacttggaaaccgcagccactcat

SEQ ID NO: 543740 - DNA, 33 bp, Homo sapien
ctagtggccaacttgggaaccgcagccactcat

SEQ ID NO: 543741 - DNA, 33 bp, Homo sapien
agagaccaccaggagaaacggagctttagcgct

SEQ ID NO: 543742 - DNA, 33 bp, Homo sapien
agagaccaccaggagagacggagctttagcgct

SEQ ID NO: 543743 - DNA, 33 bp, Homo sapien
ggagtgtctgatgagaaagacaagctacggcct

SEQ ID NO: 543744 - DNA, 33 bp, Homo sapien
ggagtgtctgatgagagagacaagctacggcct

SEQ ID NO: 543745 - DNA, 33 bp, Homo sapien
tgcgtgacccagatccagatagaatgattggtt

SEQ ID NO: 543746 - DNA, 33 bp, Homo sapien
tgcgtgacccagatccggatagaatgattggtt

SEQ ID NO: 543747 - DNA, 33 bp, Homo sapien
ggcagaaagggtgacactgaggctttggcattg

SEQ ID NO: 543748 - DNA, 33 bp, Homo sapien
ggcagaaagggtgacagtgaggctttggcattg

SEQ ID NO: 543749 - DNA, 33 bp, Homo sapien
gccaggcaaaatggcacacactgaatagtggcc

SEQ ID NO: 543750 - DNA, 33 bp, Homo sapien
gccaggcaaaatggcatacactgaatagtggcc

SEQ ID NO: 543751 - DNA, 33 bp, Homo sapien
gattttttttttgttccatgtgatgcagaacat

SEQ ID NO: 543752 - DNA, 33 bp, Homo sapien
gattttttttttgttctatgtgatgcagaacat

SEQ ID NO: 543753 - DNA, 33 bp, Homo sapien
ccggggtagaatagccaccataggccacatgcc

SEQ ID NO: 543754 - DNA, 33 bp, Homo sapien
ccggggtagaatagccgccataggccacatgcc

SEQ ID NO: 543755 - DNA, 33 bp, Homo sapien
cagcctgggagtctgacggcaagattgcatgga

SEQ ID NO: 543756 - DNA, 33 bp, Homo sapien
cagcctgggagtctgatggcaagattgcatgga

SEQ ID NO: 543757 - DNA, 33 bp, Homo sapien
gaggccttggacacaccaggagcagaactcgag

SEQ ID NO: 543758 - DNA, 33 bp, Homo sapien
gaggccttggacacactaggagcagaactcgag

SEQ ID NO: 543759 - DNA, 33 bp, Homo sapien
atttcctgaaacacgcaaagttgtctgagatcc

SEQ ID NO: 543760 - DNA, 33 bp, Homo sapien
atttcctgaaacacgcgaagttgtctgagatcc

SEQ ID NO: 543761 - DNA, 33 bp, Homo sapien
ccttgttgaccaaaacactcctcttgcaccttc

SEQ ID NO: 543762 - DNA, 33 bp, Homo sapien
ccttgttgaccaaaacgctcctcttgcaccttc

SEQ ID NO: 543763 - DNA, 33 bp, Homo sapien
cttagttaccagaagacggatccagccaggtag

SEQ ID NO: 543764 - DNA, 33 bp, Homo sapien
cttagttaccagaagatggatccagccaggtag

SEQ ID NO: 543765 - DNA, 33 bp, Homo sapien
tgctcttggccacagactataggcttctcctcc

SEQ ID NO: 543766 - DNA, 33 bp, Homo sapien
tgctcttggccacagattataggcttctcctcc

SEQ ID NO: 543767 - DNA, 33 bp, Homo sapien
ggattaataccaggccacgagggactcagtgta

SEQ ID NO: 543768 - DNA, 33 bp, Homo sapien
ggattaataccaggccgcgagggactcagtgta

SEQ ID NO: 543769 - DNA, 33 bp, Homo sapien
atcattctcaaatgaactactgtgaccccagtg

SEQ ID NO: 543770 - DNA, 33 bp, Homo sapien
atcattctcaaatgaattactgtgaccccagtg

SEQ ID NO: 543771 - DNA, 33 bp, Homo sapien
tctaggctttgtgaaaatggtggcaaataaaga

SEQ ID NO: 543772 - DNA, 33 bp, Homo sapien
tctaggctttgtgaaactggtggcaaataaaga

SEQ ID NO: 543773 - DNA, 33 bp, Homo sapien
ttatcacaaaaccactcaaaagagtacttggct

SEQ ID NO: 543774 - DNA, 33 bp, Homo sapien
ttatcacaaaaccactgaaaagagtacttggct

SEQ ID NO: 543775 - DNA, 33 bp, Homo sapien
atcatagaagtcaagacggtaaagggtttcaag

SEQ ID NO: 543776 - DNA, 33 bp, Homo sapien
atcatagaagtcaagatggtaaagggtttcaag

SEQ ID NO: 543777 - DNA, 33 bp, Homo sapien
gatgatcttaaataccagactaaggagcttgca

SEQ ID NO: 543778 - DNA, 33 bp, Homo sapien
gatgatcttaaataccggactaaggagcttgca

SEQ ID NO: 543779 - DNA, 33 bp, Homo sapien
ggcaagtagattgagaacatatggtctgtgtga

SEQ ID NO: 543780 - DNA, 33 bp, Homo sapien
ggcaagtagattgagagcatatggtctgtgtga

SEQ ID NO: 543781 - DNA, 33 bp, Homo sapien
tgggagccaaatataactgtcccctctatacat

SEQ ID NO: 543782 - DNA, 33 bp, Homo sapien
tgggagccaaatataagtgtcccctctatacat

SEQ ID NO: 543783 - DNA, 33 bp, Homo sapien
ctttggctgccatgaaatcatagatagggaagg

SEQ ID NO: 543784 - DNA, 33 bp, Homo sapien
ctttggctgccatgaagtcatagatagggaagg

SEQ ID NO: 543785 - DNA, 33 bp, Homo sapien
ctaaagattagtgacacgctagtctaatgaggg

SEQ ID NO: 543786 - DNA, 33 bp, Homo sapien
ctaaagattagtgacatgctagtctaatgaggg

SEQ ID NO: 543787 - DNA, 33 bp, Homo sapien
tctctgaatggttctagcacatcctttgcattg

SEQ ID NO: 543788 - DNA, 33 bp, Homo sapien
tctctgaatggttctatcacatcctttgcattg

SEQ ID NO: 543789 - DNA, 33 bp, Homo sapien
tagcgaatgagttactaaggttttcaggatgag

SEQ ID NO: 543790 - DNA, 33 bp, Homo sapien
tagcgaatgagttactgaggttttcaggatgag

SEQ ID NO: 543791 - DNA, 33 bp, Homo sapien
ctttcagactcagttcaaacttccctgggaaat

SEQ ID NO: 543792 - DNA, 33 bp, Homo sapien
ctttcagactcagttcgaacttccctgggaaat

SEQ ID NO: 543793 - DNA, 33 bp, Homo sapien
ctgagagcttgttgagaaagagcctttatctct

SEQ ID NO: 543794 - DNA, 33 bp, Homo sapien
ctgagagcttgttgaggaagagcctttatctct

SEQ ID NO: 543795 - DNA, 33 bp, Homo sapien
ctcagtgactctggtaagattttagaaggtctt

SEQ ID NO: 543796 - DNA, 33 bp, Homo sapien
ctcagtgactctggtaggattttagaaggtctt

SEQ ID NO: 543797 - DNA, 33 bp, Homo sapien
cacaacttccttgccccctttgaagctaggcat

SEQ ID NO: 543798 - DNA, 33 bp, Homo sapien
cacaacttccttgcccgctttgaagctaggcat

SEQ ID NO: 543799 - DNA, 33 bp, Homo sapien
tgccaggcttccctctcagactttcgcaaccca

SEQ ID NO: 543800 - DNA, 33 bp, Homo sapien
tgccaggcttccctctgagactttcgcaaccca

SEQ ID NO: 543801 - DNA, 33 bp, Homo sapien
gcttcagaaatgggacaaccatcctgaaggagc

SEQ ID NO: 543802 - DNA, 33 bp, Homo sapien
gcttcagaaatgggacgaccatcctgaaggagc

SEQ ID NO: 543803 - DNA, 33 bp, Homo sapien
gggccatcctgggtcacgggggtaaatcaggag

SEQ ID NO: 543804 - DNA, 33 bp, Homo sapien
gggccatcctgggtcatgggggtaaatcaggag

SEQ ID NO: 543805 - DNA, 33 bp, Homo sapien
gcagtcctacgaccaactcaagaaaagaagctt

SEQ ID NO: 543806 - DNA, 33 bp, Homo sapien
gcagtcctacgaccaattcaagaaaagaagctt

SEQ ID NO: 543807 - DNA, 33 bp, Homo sapien
cttactttttgcactccgacttgtatgtagaaa

SEQ ID NO: 543808 - DNA, 33 bp, Homo sapien
cttactttttgcactctgacttgtatgtagaaa

SEQ ID NO: 543809 - DNA, 33 bp, Homo sapien
aagagggctgattcaaatggaagggccttctga

SEQ ID NO: 543810 - DNA, 33 bp, Homo sapien
aagagggctgattcaagtggaagggccttctga

SEQ ID NO: 543811 - DNA, 33 bp, Homo sapien
ttctcactgtcaggaagttcctcctggtatcta

SEQ ID NO: 543812 - DNA, 33 bp, Homo sapien
ttctcactgtcaggaatttcctcctggtatcta

SEQ ID NO: 543813 - DNA, 33 bp, Homo sapien
ggcttggaactgccagcaagaaatcgcgcttgg

SEQ ID NO: 543814 - DNA, 33 bp, Homo sapien
ggcttggaactgccaggaagaaatcgcgcttgg

SEQ ID NO: 543815 - DNA, 33 bp, Homo sapien
taaaatgtagatgccacatctatgggtgtagcc

SEQ ID NO: 543816 - DNA, 33 bp, Homo sapien
taaaatgtagatgccatatctatgggtgtagcc

SEQ ID NO: 543817 - DNA, 33 bp, Homo sapien
tggcttctgaattgagccctgaatgctgatagg

SEQ ID NO: 543818 - DNA, 33 bp, Homo sapien
tggcttctgaattgagtcctgaatgctgatagg

SEQ ID NO: 543819 - DNA, 33 bp, Homo sapien
gacccaaagatccacactggcaaacacttgccc

SEQ ID NO: 543820 - DNA, 33 bp, Homo sapien
gacccaaagatccacattggcaaacacttgccc

SEQ ID NO: 543821 - DNA, 33 bp, Homo sapien
cagtttcctggaagacaataagaccagccagtc

SEQ ID NO: 543822 - DNA, 33 bp, Homo sapien
cagtttcctggaagacgataagaccagccagtc

SEQ ID NO: 543823 - DNA, 33 bp, Homo sapien
tatggtcttggtctacaatatgtttttaatttt

SEQ ID NO: 543824 - DNA, 33 bp, Homo sapien
tatggtcttggtctacgatatgtttttaatttt

SEQ ID NO: 543825 - DNA, 33 bp, Homo sapien
cctaccaccagaggacaacccctccttaggaca

SEQ ID NO: 543826 - DNA, 33 bp, Homo sapien
cctaccaccagaggacgacccctccttaggaca

SEQ ID NO: 543827 - DNA, 33 bp, Homo sapien
aagtttaatcatctcaaaatacaaagtaacaaa

SEQ ID NO: 543828 - DNA, 33 bp, Homo sapien
aagtttaatcatctcagaatacaaagtaacaaa

SEQ ID NO: 543829 - DNA, 33 bp, Homo sapien
ggttcgcgttcccttaacctgttccaatggatt

SEQ ID NO: 543830 - DNA, 33 bp, Homo sapien
ggttcgcgttcccttaccctgttccaatggatt

SEQ ID NO: 543831 - DNA, 33 bp, Homo sapien
acagcccctgtcagaactatcgcttcgtgctgc

SEQ ID NO: 543832 - DNA, 33 bp, Homo sapien
acagcccctgtcagaattatcgcttcgtgctgc

SEQ ID NO: 543833 - DNA, 33 bp, Homo sapien
ttcctagaaatttctcacatacctcgtctatct

SEQ ID NO: 543834 - DNA, 33 bp, Homo sapien
ttcctagaaatttctcgcatacctcgtctatct

SEQ ID NO: 543835 - DNA, 33 bp, Homo sapien
gtatatgcgtgggcccgctcctggactctgaat

SEQ ID NO: 543836 - DNA, 33 bp, Homo sapien
gtatatgcgtgggccctctcctggactctgaat

SEQ ID NO: 543837 - DNA, 33 bp, Homo sapien
gggctgcatgagaatcaccagggtctgaaataa

SEQ ID NO: 543838 - DNA, 33 bp, Homo sapien
gggctgcatgagaatcgccagggtctgaaataa

SEQ ID NO: 543839 - DNA, 33 bp, Homo sapien
agagaggtagggatgaaattttgtatccaattc

SEQ ID NO: 543840 - DNA, 33 bp, Homo sapien
agagaggtagggatgagattttgtatccaattc

SEQ ID NO: 543841 - DNA, 33 bp, Homo sapien
atgtggtgctgacagacagcggcatggcatggc

SEQ ID NO: 543842 - DNA, 33 bp, Homo sapien
atgtggtgctgacagagagcggcatggcatggc

SEQ ID NO: 543843 - DNA, 33 bp, Homo sapien
taggaagggctggaaactgacacttcacttcag

SEQ ID NO: 543844 - DNA, 33 bp, Homo sapien
taggaagggctggaaattgacacttcacttcag

SEQ ID NO: 543845 - DNA, 33 bp, Homo sapien
tagggggtccagagggacattgtgatcctggca

SEQ ID NO: 543846 - DNA, 33 bp, Homo sapien
tagggggtccagaggggcattgtgatcctggca

SEQ ID NO: 543847 - DNA, 33 bp, Homo sapien
aggcattgtacccttcacctcttcccctggaca

SEQ ID NO: 543848 - DNA, 33 bp, Homo sapien
aggcattgtacccttctcctcttcccctggaca

SEQ ID NO: 543849 - DNA, 33 bp, Homo sapien
ttggagggcagtgcgcaatcccgacttctaacc

SEQ ID NO: 543850 - DNA, 33 bp, Homo sapien
ttggagggcagtgcgcgatcccgacttctaacc

SEQ ID NO: 543851 - DNA, 33 bp, Homo sapien
gatcctagaacttccaaaagggttgcaggcccc

SEQ ID NO: 543852 - DNA, 33 bp, Homo sapien
gatcctagaacttccacaagggttgcaggcccc

SEQ ID NO: 543853 - DNA, 33 bp, Homo sapien
agccatgaaacttcccacatgtagatttctttg

SEQ ID NO: 543854 - DNA, 33 bp, Homo sapien
agccatgaaacttcccccatgtagatttctttg

SEQ ID NO: 543855 - DNA, 33 bp, Homo sapien
tgatgtgattccttgcaacttggactgtgagct

SEQ ID NO: 543856 - DNA, 33 bp, Homo sapien
tgatgtgattccttgcgacttggactgtgagct

SEQ ID NO: 543857 - DNA, 33 bp, Homo sapien
catcaatgcctctgaaagtttaagcagtggggg

SEQ ID NO: 543858 - DNA, 33 bp, Homo sapien
catcaatgcctctgaaggtttaagcagtggggg

SEQ ID NO: 543859 - DNA, 33 bp, Homo sapien
atgagatccccctggaaagaaaggcagtattac

SEQ ID NO: 543860 - DNA, 33 bp, Homo sapien
atgagatccccctggagagaaaggcagtattac

SEQ ID NO: 543861 - DNA, 33 bp, Homo sapien
gcagactgacgtacccagagaccacaggagaga

SEQ ID NO: 543862 - DNA, 33 bp, Homo sapien
gcagactgacgtacccggagaccacaggagaga

SEQ ID NO: 543863 - DNA, 33 bp, Homo sapien
ggcaaaccatttctgacgtctttttgctttctc

SEQ ID NO: 543864 - DNA, 33 bp, Homo sapien
ggcaaaccatttctgatgtctttttgctttctc

SEQ ID NO: 543865 - DNA, 33 bp, Homo sapien
ttttcttctcttttcactctactgccccctctt

SEQ ID NO: 543866 - DNA, 33 bp, Homo sapien
ttttcttctcttttcattctactgccccctctt

SEQ ID NO: 543867 - DNA, 33 bp, Homo sapien
attactgcctcattgacgaatctaagatcttgc

SEQ ID NO: 543868 - DNA, 33 bp, Homo sapien
attactgcctcattgatgaatctaagatcttgc

SEQ ID NO: 543869 - DNA, 33 bp, Homo sapien
aaagtcctggttcccacgaggtggtcagtgttt

SEQ ID NO: 543870 - DNA, 33 bp, Homo sapien
aaagtcctggttcccatgaggtggtcagtgttt

SEQ ID NO: 543871 - DNA, 33 bp, Homo sapien
taaagctggagcaaagccacctctttcaggaag

SEQ ID NO: 543872 - DNA, 33 bp, Homo sapien
taaagctggagcaaagtcacctctttcaggaag

SEQ ID NO: 543873 - DNA, 33 bp, Homo sapien
tctcagtaacggagaacggcttctctgggaacc

SEQ ID NO: 543874 - DNA, 33 bp, Homo sapien
tctcagtaacggagaatggcttctctgggaacc

SEQ ID NO: 543875 - DNA, 33 bp, Homo sapien
ctgaaagagaacataaacatgaattgaagaagg

SEQ ID NO: 543876 - DNA, 33 bp, Homo sapien
ctgaaagagaacataagcatgaattgaagaagg

SEQ ID NO: 543877 - DNA, 33 bp, Homo sapien
gaagtatcctacttcccatcaaaggacctctct

SEQ ID NO: 543878 - DNA, 33 bp, Homo sapien
gaagtatcctacttcctatcaaaggacctctct

SEQ ID NO: 543879 - DNA, 33 bp, Homo sapien
ttatctcttacactcaacagtcaatccaccaga

SEQ ID NO: 543880 - DNA, 33 bp, Homo sapien
ttatctcttacactcagcagtcaatccaccaga

SEQ ID NO: 543881 - DNA, 33 bp, Homo sapien
ggtgttaagttctagacgtgggctgccgaaccc

SEQ ID NO: 543882 - DNA, 33 bp, Homo sapien
ggtgttaagttctagatgtgggctgccgaaccc

SEQ ID NO: 543883 - DNA, 33 bp, Homo sapien
aggatggtggccgcaacctcctacactctgtgt

SEQ ID NO: 543884 - DNA, 33 bp, Homo sapien
aggatggtggccgcaatctcctacactctgtgt

SEQ ID NO: 543885 - DNA, 33 bp, Homo sapien
aggcaggaggcaaaaagcttggctgtgtcatgc

SEQ ID NO: 543886 - DNA, 33 bp, Homo sapien
aggcaggaggcaaaaatcttggctgtgtcatgc

SEQ ID NO: 543887 - DNA, 33 bp, Homo sapien
aatgctacccatcaaccctgtccctggattaag

SEQ ID NO: 543888 - DNA, 33 bp, Homo sapien
aatgctacccatcaactctgtccctggattaag

SEQ ID NO: 543889 - DNA, 33 bp, Homo sapien
aagcaaacccagctccagctatgtccctgatgc

SEQ ID NO: 543890 - DNA, 33 bp, Homo sapien
aagcaaacccagctccggctatgtccctgatgc

SEQ ID NO: 543891 - DNA, 33 bp, Homo sapien
tgtcataattgaatggacactaagcagagaatg

SEQ ID NO: 543892 - DNA, 33 bp, Homo sapien
tgtcataattgaatgggcactaagcagagaatg

SEQ ID NO: 543893 - DNA, 33 bp, Homo sapien
tttcaaattttcagcaaaatgttttgagcctgc

SEQ ID NO: 543894 - DNA, 33 bp, Homo sapien
tttcaaattttcagcagaatgttttgagcctgc

SEQ ID NO: 543895 - DNA, 33 bp, Homo sapien
tcagcccaggcagcaacagaaaaaaaggggcct

SEQ ID NO: 543896 - DNA, 33 bp, Homo sapien
tcagcccaggcagcaatagaaaaaaaggggcct

SEQ ID NO: 543897 - DNA, 33 bp, Homo sapien
caactgtattatctcaacttcttttctcattaa

SEQ ID NO: 543898 - DNA, 33 bp, Homo sapien
caactgtattatctcatcttcttttctcattaa

SEQ ID NO: 543899 - DNA, 33 bp, Homo sapien
tgtagatatgctagacaaaaagatgattcatgt

SEQ ID NO: 543900 - DNA, 33 bp, Homo sapien
tgtagatatgctagacgaaaagatgattcatgt

SEQ ID NO: 543901 - DNA, 33 bp, Homo sapien
tacctgcgaaagaaaccaagactaagttgctct

SEQ ID NO: 543902 - DNA, 33 bp, Homo sapien
tacctgcgaaagaaacgaagactaagttgctct

SEQ ID NO: 543903 - DNA, 33 bp, Homo sapien
gctttggttggtgctcactttcaattctgaatt

SEQ ID NO: 543904 - DNA, 33 bp, Homo sapien
gctttggttggtgctcgctttcaattctgaatt

SEQ ID NO: 543905 - DNA, 33 bp, Homo sapien
agataaaaaaggaaggccagctatagcttttgt

SEQ ID NO: 543906 - DNA, 33 bp, Homo sapien
agataaaaaaggaaggtcagctatagcttttgt

SEQ ID NO: 543907 - DNA, 33 bp, Homo sapien
ctctctgtgccaccaacaaactctcgtgacctt

SEQ ID NO: 543908 - DNA, 33 bp, Homo sapien
ctctctgtgccaccaagaaactctcgtgacctt

SEQ ID NO: 543909 - DNA, 33 bp, Homo sapien
tttccaaacgtgcctacataaacccattaaaaa

SEQ ID NO: 543910 - DNA, 33 bp, Homo sapien
tttccaaacgtgcctagataaacccattaaaaa

SEQ ID NO: 543911 - DNA, 33 bp, Homo sapien
tcaggaccaaattctacactcacatggtctcat

SEQ ID NO: 543912 - DNA, 33 bp, Homo sapien
tcaggaccaaattctatactcacatggtctcat

SEQ ID NO: 543913 - DNA, 33 bp, Homo sapien
tctgttcaaaaggggaataatctaacccagttg

SEQ ID NO: 543914 - DNA, 33 bp, Homo sapien
tctgttcaaaaggggactaatctaacccagttg

SEQ ID NO: 543915 - DNA, 33 bp, Homo sapien
agtggcaaaagaaagacgatggctgaggagccc

SEQ ID NO: 543916 - DNA, 33 bp, Homo sapien
agtggcaaaagaaagatgatggctgaggagccc

SEQ ID NO: 543917 - DNA, 33 bp, Homo sapien
gcacctcctctactcaatatctgcaaaaccccg

SEQ ID NO: 543918 - DNA, 33 bp, Homo sapien
gcacctcctctactcactatctgcaaaaccccg

SEQ ID NO: 543919 - DNA, 33 bp, Homo sapien
tgcctggctcagaggcaatgtgcacttcttcct

SEQ ID NO: 543920 - DNA, 33 bp, Homo sapien
tgcctggctcagaggctatgtgcacttcttcct

SEQ ID NO: 543921 - DNA, 33 bp, Homo sapien
gtgggggaaaggagtaaggacttgtttatggga

SEQ ID NO: 543922 - DNA, 33 bp, Homo sapien
gtgggggaaaggagtagggacttgtttatggga

SEQ ID NO: 543923 - DNA, 33 bp, Homo sapien
cacagccaaacagaaacgaatggtttggctatg

SEQ ID NO: 543924 - DNA, 33 bp, Homo sapien
cacagccaaacagaaatgaatggtttggctatg

SEQ ID NO: 543925 - DNA, 33 bp, Homo sapien
gagtagtgaccaggcaatgcaaataattgtggt

SEQ ID NO: 543926 - DNA, 33 bp, Homo sapien
gagtagtgaccaggcagtgcaaataattgtggt

SEQ ID NO: 543927 - DNA, 33 bp, Homo sapien
tgcctgggccgtttcaagtactccacacatgtt

SEQ ID NO: 543928 - DNA, 33 bp, Homo sapien
tgcctgggccgtttcaggtactccacacatgtt

SEQ ID NO: 543929 - DNA, 33 bp, Homo sapien
aggctgaggaaaattgcaaaatatgtagagggg

SEQ ID NO: 543930 - DNA, 33 bp, Homo sapien
aggctgaggaaaattggaaaatatgtagagggg

SEQ ID NO: 543931 - DNA, 33 bp, Homo sapien
caattccaatgccttcaacataattcagcagct

SEQ ID NO: 543932 - DNA, 33 bp, Homo sapien
caattccaatgccttcgacataattcagcagct

SEQ ID NO: 543933 - DNA, 33 bp, Homo sapien
aaggcatcagcctggacgggatagaaaattctt

SEQ ID NO: 543934 - DNA, 33 bp, Homo sapien
aaggcatcagcctggatgggatagaaaattctt

SEQ ID NO: 543935 - DNA, 33 bp, Homo sapien
tgatcgctgttctgcaaggaaggggaaagcaca

SEQ ID NO: 543936 - DNA, 33 bp, Homo sapien
tgatcgctgttctgcagggaaggggaaagcaca

SEQ ID NO: 543937 - DNA, 33 bp, Homo sapien
tctgatttccaacctgcacgtcagagccccctc

SEQ ID NO: 543938 - DNA, 33 bp, Homo sapien
tctgatttccaacctgtacgtcagagccccctc

SEQ ID NO: 543939 - DNA, 33 bp, Homo sapien
gaacaggagagctgaacatactgatacattggt

SEQ ID NO: 543940 - DNA, 33 bp, Homo sapien
gaacaggagagctgaatatactgatacattggt

SEQ ID NO: 543941 - DNA, 33 bp, Homo sapien
gaagcacctggtcagcaagatgacatgggaggg

SEQ ID NO: 543942 - DNA, 33 bp, Homo sapien
gaagcacctggtcagcgagatgacatgggaggg

SEQ ID NO: 543943 - DNA, 33 bp, Homo sapien
atccctgtcattaagtaacacaagacggcatat

SEQ ID NO: 543944 - DNA, 33 bp, Homo sapien
atccctgtcattaagtgacacaagacggcatat

SEQ ID NO: 543945 - DNA, 33 bp, Homo sapien
ctctatgatgtttacacgagggcaaaatctcct

SEQ ID NO: 543946 - DNA, 33 bp, Homo sapien
ctctatgatgtttacatgagggcaaaatctcct

SEQ ID NO: 543947 - DNA, 33 bp, Homo sapien
gggatcttctcactcaagtaggtctctctggga

SEQ ID NO: 543948 - DNA, 33 bp, Homo sapien
gggatcttctcactcaggtaggtctctctggga

SEQ ID NO: 543949 - DNA, 33 bp, Homo sapien
aagcaatgctcatgagaaagccaggccccgtga

SEQ ID NO: 543950 - DNA, 33 bp, Homo sapien
aagcaatgctcatgaggaagccaggccccgtga

SEQ ID NO: 543951 - DNA, 33 bp, Homo sapien
agacaagggtttgcagccctgatgttgatctcc

SEQ ID NO: 543952 - DNA, 33 bp, Homo sapien
agacaagggtttgcagtcctgatgttgatctcc

SEQ ID NO: 543953 - DNA, 33 bp, Homo sapien
tttccagacagtaaaaaggcggcgcacttcttt

SEQ ID NO: 543954 - DNA, 33 bp, Homo sapien
tttccagacagtaaaacggcggcgcacttcttt

SEQ ID NO: 543955 - DNA, 33 bp, Homo sapien
ttggctatataaattcacagtcctctccggtct

SEQ ID NO: 543956 - DNA, 33 bp, Homo sapien
ttggctatataaattcccagtcctctccggtct

SEQ ID NO: 543957 - DNA, 33 bp, Homo sapien
acgtcaccctcctaagaaccaggcttcacaggt

SEQ ID NO: 543958 - DNA, 33 bp, Homo sapien
acgtcaccctcctaaggaccaggcttcacaggt

SEQ ID NO: 543959 - DNA, 33 bp, Homo sapien
cagggttaactggcagcaagaggaatagagggt

SEQ ID NO: 543960 - DNA, 33 bp, Homo sapien
cagggttaactggcaggaagaggaatagagggt

SEQ ID NO: 543961 - DNA, 33 bp, Homo sapien
tgaaaccaactgtcaccagctgaggtctcccag

SEQ ID NO: 543962 - DNA, 33 bp, Homo sapien
tgaaaccaactgtcactagctgaggtctcccag

SEQ ID NO: 543963 - DNA, 33 bp, Homo sapien
aagttgctataaaacagcatctccctgccttca

SEQ ID NO: 543964 - DNA, 33 bp, Homo sapien
aagttgctataaaacatcatctccctgccttca

SEQ ID NO: 543965 - DNA, 33 bp, Homo sapien
cacattagcccaaataagaattaggactcctct

SEQ ID NO: 543966 - DNA, 33 bp, Homo sapien
cacattagcccaaataggaattaggactcctct

SEQ ID NO: 543967 - DNA, 33 bp, Homo sapien
tatttaaaaagcagctcactcatttgatcttaa

SEQ ID NO: 543968 - DNA, 33 bp, Homo sapien
tatttaaaaagcagctgactcatttgatcttaa

SEQ ID NO: 543969 - DNA, 33 bp, Homo sapien
gtggtccactgccgatctaaactatttcttcta

SEQ ID NO: 543970 - DNA, 33 bp, Homo sapien
gtggtccactgccgatttaaactatttcttcta

SEQ ID NO: 543971 - DNA, 33 bp, Homo sapien
agaaatagaatttaagcctgagcacactggctc

SEQ ID NO: 543972 - DNA, 33 bp, Homo sapien
agaaatagaatttaaggctgagcacactggctc

SEQ ID NO: 543973 - DNA, 33 bp, Homo sapien
atggtttctttaccagaattagatttcatctca

SEQ ID NO: 543974 - DNA, 33 bp, Homo sapien
atggtttctttaccaggattagatttcatctca

SEQ ID NO: 543975 - DNA, 33 bp, Homo sapien
gttttaatccaaatcaagagagctgggcttctc

SEQ ID NO: 543976 - DNA, 33 bp, Homo sapien
gttttaatccaaatcaggagagctgggcttctc

SEQ ID NO: 543977 - DNA, 33 bp, Homo sapien
ggtgcggtcttctctagaaggtctaaatgtacc

SEQ ID NO: 543978 - DNA, 33 bp, Homo sapien
ggtgcggtcttctctataaggtctaaatgtacc

SEQ ID NO: 543979 - DNA, 33 bp, Homo sapien
ttgtgggtcataactaacattaaatttaaaaag

SEQ ID NO: 543980 - DNA, 33 bp, Homo sapien
ttgtgggtcataactagcattaaatttaaaaag

SEQ ID NO: 543981 - DNA, 33 bp, Homo sapien
atggcaaagaagggaaaatgaaggcgcagaaga

SEQ ID NO: 543982 - DNA, 33 bp, Homo sapien
atggcaaagaagggaagatgaaggcgcagaaga

SEQ ID NO: 543983 - DNA, 33 bp, Homo sapien
tagctgcagaatatgaatagtgtcccaagaaga

SEQ ID NO: 543984 - DNA, 33 bp, Homo sapien
tagctgcagaatatgagtagtgtcccaagaaga

SEQ ID NO: 543985 - DNA, 33 bp, Homo sapien
aagttcaggcctagtgaagcctaatttgagaaa

SEQ ID NO: 543986 - DNA, 33 bp, Homo sapien
aagttcaggcctagtggagcctaatttgagaaa

SEQ ID NO: 543987 - DNA, 33 bp, Homo sapien
tatcctacttccaatacgtgtcttgcatctttt

SEQ ID NO: 543988 - DNA, 33 bp, Homo sapien
tatcctacttccaatatgtgtcttgcatctttt

SEQ ID NO: 543989 - DNA, 33 bp, Homo sapien
tgagagggaatgtcaaataggcagttggatata

SEQ ID NO: 543990 - DNA, 33 bp, Homo sapien
tgagagggaatgtcaagtaggcagttggatata

SEQ ID NO: 543991 - DNA, 33 bp, Homo sapien
cccctgcagcggaaaacaatgagccgccgtagc

SEQ ID NO: 543992 - DNA, 33 bp, Homo sapien
cccctgcagcggaaaataatgagccgccgtagc

SEQ ID NO: 543993 - DNA, 33 bp, Homo sapien
gggatgtagttagagaatatactgaagaatcat

SEQ ID NO: 543994 - DNA, 33 bp, Homo sapien
gggatgtagttagagagtatactgaagaatcat

SEQ ID NO: 543995 - DNA, 33 bp, Homo sapien
tcaacaaaaactctacagtaaacctctcaataa

SEQ ID NO: 543996 - DNA, 33 bp, Homo sapien
tcaacaaaaactctaccgtaaacctctcaataa

SEQ ID NO: 543997 - DNA, 33 bp, Homo sapien
ccatgtatccaccccccactatccaggtcactc

SEQ ID NO: 543998 - DNA, 33 bp, Homo sapien
ccatgtatccacccccgactatccaggtcactc

SEQ ID NO: 543999 - DNA, 33 bp, Homo sapien
aatggatccaggtagaaattcaacagtttgaaa

SEQ ID NO: 544000 - DNA, 33 bp, Homo sapien
aatggatccaggtagatattcaacagtttgaaa

SEQ ID NO: 544001 - DNA, 33 bp, Homo sapien
aaaatgctgattgccacctagattaaatgagaa

SEQ ID NO: 544002 - DNA, 33 bp, Homo sapien
aaaatgctgattgccatctagattaaatgagaa

SEQ ID NO: 544003 - DNA, 33 bp, Homo sapien
gacaacagacataaaccaggatggttccagcca

SEQ ID NO: 544004 - DNA, 33 bp, Homo sapien
gacaacagacataaactaggatggttccagcca

SEQ ID NO: 544005 - DNA, 33 bp, Homo sapien
ctacctgacagtaatgaatactcaaatatggaa

SEQ ID NO: 544006 - DNA, 33 bp, Homo sapien
ctacctgacagtaatggatactcaaatatggaa

SEQ ID NO: 544007 - DNA, 33 bp, Homo sapien
actagctaaatgacacccaacttaaggctcatt

SEQ ID NO: 544008 - DNA, 33 bp, Homo sapien
actagctaaatgacactcaacttaaggctcatt

SEQ ID NO: 544009 - DNA, 33 bp, Homo sapien
caaagggtcttgcatacgttttctcatttgacc

SEQ ID NO: 544010 - DNA, 33 bp, Homo sapien
caaagggtcttgcatatgttttctcatttgacc

SEQ ID NO: 544011 - DNA, 33 bp, Homo sapien
agcagcgaaggggtaacggctctgctgcggctg

SEQ ID NO: 544012 - DNA, 33 bp, Homo sapien
agcagcgaaggggtaatggctctgctgcggctg

SEQ ID NO: 544013 - DNA, 33 bp, Homo sapien
gagggctcagtgccagacaaaataggctgctga

SEQ ID NO: 544014 - DNA, 33 bp, Homo sapien
gagggctcagtgccaggcaaaataggctgctga

SEQ ID NO: 544015 - DNA, 33 bp, Homo sapien
ccttgactcaaaagtcaaggtctagtgggaaaa

SEQ ID NO: 544016 - DNA, 33 bp, Homo sapien
ccttgactcaaaagtcgaggtctagtgggaaaa

SEQ ID NO: 544017 - DNA, 33 bp, Homo sapien
ctgtaccaggcctcaactcttattcttaacaac

SEQ ID NO: 544018 - DNA, 33 bp, Homo sapien
ctgtaccaggcctcaattcttattcttaacaac

SEQ ID NO: 544019 - DNA, 33 bp, Homo sapien
tattcaaaatttctctcaacttggcaaaacgaa

SEQ ID NO: 544020 - DNA, 33 bp, Homo sapien
tattcaaaatttctcttaacttggcaaaacgaa

SEQ ID NO: 544021 - DNA, 33 bp, Homo sapien
tgttcatgaccaccaaccacgttgacaggtagg

SEQ ID NO: 544022 - DNA, 33 bp, Homo sapien
tgttcatgaccaccaatcacgttgacaggtagg

SEQ ID NO: 544023 - DNA, 33 bp, Homo sapien
tcactagttgattagacattgatgtattgggtt

SEQ ID NO: 544024 - DNA, 33 bp, Homo sapien
tcactagttgattagatattgatgtattgggtt

SEQ ID NO: 544025 - DNA, 33 bp, Homo sapien
attaatagtctactaactagaaagaggaggaaa

SEQ ID NO: 544026 - DNA, 33 bp, Homo sapien
attaatagtctactaattagaaagaggaggaaa

SEQ ID NO: 544027 - DNA, 33 bp, Homo sapien
cagaggaaaggattaccgaccaacagggatcag

SEQ ID NO: 544028 - DNA, 33 bp, Homo sapien
cagaggaaaggattactgaccaacagggatcag

SEQ ID NO: 544029 - DNA, 33 bp, Homo sapien
aagacagaagtcaggaatccaaatgcttttatt

SEQ ID NO: 544030 - DNA, 33 bp, Homo sapien
aagacagaagtcaggagtccaaatgcttttatt

SEQ ID NO: 544031 - DNA, 33 bp, Homo sapien
gaggtcggccaagacacctataaggaggtcagc

SEQ ID NO: 544032 - DNA, 33 bp, Homo sapien
gaggtcggccaagacatctataaggaggtcagc

SEQ ID NO: 544033 - DNA, 33 bp, Homo sapien
ctaattcctagccttcaatgcagaccagtgagt

SEQ ID NO: 544034 - DNA, 33 bp, Homo sapien
ctaattcctagccttcgatgcagaccagtgagt

SEQ ID NO: 544035 - DNA, 33 bp, Homo sapien
gttattgtgagacttacaaaaaacagcttatac

SEQ ID NO: 544036 - DNA, 33 bp, Homo sapien
gttattgtgagacttataaaaaacagcttatac

SEQ ID NO: 544037 - DNA, 33 bp, Homo sapien
cttcaaatatgagagacagtctttcccagataa

SEQ ID NO: 544038 - DNA, 33 bp, Homo sapien
cttcaaatatgagagatagtctttcccagataa

SEQ ID NO: 544039 - DNA, 33 bp, Homo sapien
aacaaaacctctctgcaaattccttccctctag

SEQ ID NO: 544040 - DNA, 33 bp, Homo sapien
aacaaaacctctctgctaattccttccctctag

SEQ ID NO: 544041 - DNA, 33 bp, Homo sapien
cttcaggactgctacaaaaccctttagccttcc

SEQ ID NO: 544042 - DNA, 33 bp, Homo sapien
cttcaggactgctacacaaccctttagccttcc

SEQ ID NO: 544043 - DNA, 33 bp, Homo sapien
ttctcatacagccagacgatggggctcagtggg

SEQ ID NO: 544044 - DNA, 33 bp, Homo sapien
ttctcatacagccagatgatggggctcagtggg

SEQ ID NO: 544045 - DNA, 33 bp, Homo sapien
gcttgtgggatatgtcaaatgacaaccactgga

SEQ ID NO: 544046 - DNA, 33 bp, Homo sapien
gcttgtgggatatgtccaatgacaaccactgga

SEQ ID NO: 544047 - DNA, 33 bp, Homo sapien
caacaccatggatgaaactaagcgagaacaagc

SEQ ID NO: 544048 - DNA, 33 bp, Homo sapien
caacaccatggatgaagctaagcgagaacaagc

SEQ ID NO: 544049 - DNA, 33 bp, Homo sapien
gtgtgtgcatgtgaaaccagctgttgaaatagt

SEQ ID NO: 544050 - DNA, 33 bp, Homo sapien
gtgtgtgcatgtgaaatcagctgttgaaatagt

SEQ ID NO: 544051 - DNA, 33 bp, Homo sapien
cagaaatcagaaactacaagtcccaatcatttt

SEQ ID NO: 544052 - DNA, 33 bp, Homo sapien
cagaaatcagaaactagaagtcccaatcatttt

SEQ ID NO: 544053 - DNA, 33 bp, Homo sapien
agtgcacgttcctttaccaaaaagctaggacat

SEQ ID NO: 544054 - DNA, 33 bp, Homo sapien
agtgcacgttcctttatcaaaaagctaggacat

SEQ ID NO: 544055 - DNA, 33 bp, Homo sapien
aaatgtgtaagctaacagatattatggaatcac

SEQ ID NO: 544056 - DNA, 33 bp, Homo sapien
aaatgtgtaagctaacggatattatggaatcac

SEQ ID NO: 544057 - DNA, 33 bp, Homo sapien
gccactcaaactggctcaaactataaagcagct

SEQ ID NO: 544058 - DNA, 33 bp, Homo sapien
gccactcaaactggcttaaactataaagcagct

SEQ ID NO: 544059 - DNA, 33 bp, Homo sapien
tcataattctcaggataaatatgtttgaaatat

SEQ ID NO: 544060 - DNA, 33 bp, Homo sapien
tcataattctcaggatcaatatgtttgaaatat

SEQ ID NO: 544061 - DNA, 33 bp, Homo sapien
gataagaaacaagatacatgatggccaggtaca

SEQ ID NO: 544062 - DNA, 33 bp, Homo sapien
gataagaaacaagatatatgatggccaggtaca

SEQ ID NO: 544063 - DNA, 33 bp, Homo sapien
gaagaagagtgtcacaaataagtttaccatcag

SEQ ID NO: 544064 - DNA, 33 bp, Homo sapien
gaagaagagtgtcacatataagtttaccatcag

SEQ ID NO: 544065 - DNA, 33 bp, Homo sapien
ttggctgcagctcagacggataatgtaaaaatc

SEQ ID NO: 544066 - DNA, 33 bp, Homo sapien
ttggctgcagctcagatggataatgtaaaaatc

SEQ ID NO: 544067 - DNA, 33 bp, Homo sapien
atatccacggcctctaagaaattgacattgcta

SEQ ID NO: 544068 - DNA, 33 bp, Homo sapien
atatccacggcctctatgaaattgacattgcta

SEQ ID NO: 544069 - DNA, 33 bp, Homo sapien
ctcagtttgccatatagcccatttttccaaact

SEQ ID NO: 544070 - DNA, 33 bp, Homo sapien
ctcagtttgccatatatcccatttttccaaact

SEQ ID NO: 544071 - DNA, 33 bp, Homo sapien
tgggccttagtgacgacagagggaatataaagg

SEQ ID NO: 544072 - DNA, 33 bp, Homo sapien
tgggccttagtgacgagagagggaatataaagg

SEQ ID NO: 544073 - DNA, 33 bp, Homo sapien
cagcttcagggaggaaatggtattttaaccgta

SEQ ID NO: 544074 - DNA, 33 bp, Homo sapien
cagcttcagggaggaagtggtattttaaccgta

SEQ ID NO: 544075 - DNA, 33 bp, Homo sapien
agggcttaggtctacacatattgccaataggga

SEQ ID NO: 544076 - DNA, 33 bp, Homo sapien
agggcttaggtctacagatattgccaataggga

SEQ ID NO: 544077 - DNA, 33 bp, Homo sapien
acttgccattagtcacacagcttaaaagtgagc

SEQ ID NO: 544078 - DNA, 33 bp, Homo sapien
acttgccattagtcacgcagcttaaaagtgagc

SEQ ID NO: 544079 - DNA, 33 bp, Homo sapien
aggcttggtagtttcccaagtttgacagtcatc

SEQ ID NO: 544080 - DNA, 33 bp, Homo sapien
aggcttggtagtttcctaagtttgacagtcatc

SEQ ID NO: 544081 - DNA, 33 bp, Homo sapien
atggagagaaaaggaaaataattgagtcattcc

SEQ ID NO: 544082 - DNA, 33 bp, Homo sapien
atggagagaaaaggaagataattgagtcattcc

SEQ ID NO: 544083 - DNA, 33 bp, Homo sapien
tcctattgcaggtggaaggttatgctgtcttag

SEQ ID NO: 544084 - DNA, 33 bp, Homo sapien
tcctattgcaggtggagggttatgctgtcttag

SEQ ID NO: 544085 - DNA, 33 bp, Homo sapien
cagtgcctattcagataactggttattcctgaa

SEQ ID NO: 544086 - DNA, 33 bp, Homo sapien
cagtgcctattcagattactggttattcctgaa

SEQ ID NO: 544087 - DNA, 33 bp, Homo sapien
ctgtccctggaataccccgctacttattagaaa

SEQ ID NO: 544088 - DNA, 33 bp, Homo sapien
ctgtccctggaatacctcgctacttattagaaa

SEQ ID NO: 544089 - DNA, 33 bp, Homo sapien
tgtgtaaatattgagagggaagatactaaaatt

SEQ ID NO: 544090 - DNA, 33 bp, Homo sapien
tgtgtaaatattgagatggaagatactaaaatt

SEQ ID NO: 544091 - DNA, 33 bp, Homo sapien
tattgactccttcacaagattccaagagtctca

SEQ ID NO: 544092 - DNA, 33 bp, Homo sapien
tattgactccttcacaggattccaagagtctca

SEQ ID NO: 544093 - DNA, 33 bp, Homo sapien
ttcacaaccttcctacactggtattcttgctcc

SEQ ID NO: 544094 - DNA, 33 bp, Homo sapien
ttcacaaccttcctacgctggtattcttgctcc

SEQ ID NO: 544095 - DNA, 33 bp, Homo sapien
gggctgggactggaaccagtgtttctgatgcca

SEQ ID NO: 544096 - DNA, 33 bp, Homo sapien
gggctgggactggaacgagtgtttctgatgcca

SEQ ID NO: 544097 - DNA, 33 bp, Homo sapien
ggccaatataatatcgaagcctttacccccagc

SEQ ID NO: 544098 - DNA, 33 bp, Homo sapien
ggccaatataatatcgcagcctttacccccagc

SEQ ID NO: 544099 - DNA, 33 bp, Homo sapien
agctgctgcagactttcaaaacattaataagac

SEQ ID NO: 544100 - DNA, 33 bp, Homo sapien
agctgctgcagactttgaaaacattaataagac

SEQ ID NO: 544101 - DNA, 33 bp, Homo sapien
gcattgttaaatagaaaagtgttgaacagaagt

SEQ ID NO: 544102 - DNA, 33 bp, Homo sapien
gcattgttaaatagaagagtgttgaacagaagt

SEQ ID NO: 544103 - DNA, 33 bp, Homo sapien
aagtaaacagtatccacacattattggtcaaac

SEQ ID NO: 544104 - DNA, 33 bp, Homo sapien
aagtaaacagtatccatacattattggtcaaac

SEQ ID NO: 544105 - DNA, 33 bp, Homo sapien
ccaacaacttgtcaccacaatctgatctcccag

SEQ ID NO: 544106 - DNA, 33 bp, Homo sapien
ccaacaacttgtcaccgcaatctgatctcccag

SEQ ID NO: 544107 - DNA, 33 bp, Homo sapien
ccatttatttactttcaaggtatctcactcatt

SEQ ID NO: 544108 - DNA, 33 bp, Homo sapien
ccatttatttactttcgaggtatctcactcatt

SEQ ID NO: 544109 - DNA, 33 bp, Homo sapien
tctgttgggctccaaacagagaaactgagtggg

SEQ ID NO: 544110 - DNA, 33 bp, Homo sapien
tctgttgggctccaaatagagaaactgagtggg

SEQ ID NO: 544111 - DNA, 33 bp, Homo sapien
aaatacctatgtcagacacttcctgaatgcctc

SEQ ID NO: 544112 - DNA, 33 bp, Homo sapien
aaatacctatgtcagatacttcctgaatgcctc

SEQ ID NO: 544113 - DNA, 33 bp, Homo sapien
cctagttgtagtttcaaacacttggctgaactg

SEQ ID NO: 544114 - DNA, 33 bp, Homo sapien
cctagttgtagtttcatacacttggctgaactg

SEQ ID NO: 544115 - DNA, 33 bp, Homo sapien
tcagccattacctcaacgcagttcagccaagtg

SEQ ID NO: 544116 - DNA, 33 bp, Homo sapien
tcagccattacctcaatgcagttcagccaagtg

SEQ ID NO: 544117 - DNA, 33 bp, Homo sapien
tatttgtagttgaaaacgctaattggaagctct

SEQ ID NO: 544118 - DNA, 33 bp, Homo sapien
tatttgtagttgaaaatgctaattggaagctct

SEQ ID NO: 544119 - DNA, 33 bp, Homo sapien
cacaggttactgggtaaatttctgtgtctccct

SEQ ID NO: 544120 - DNA, 33 bp, Homo sapien
cacaggttactgggtagatttctgtgtctccct

SEQ ID NO: 544121 - DNA, 33 bp, Homo sapien
agtataacagtgaagaataaagctgctactctc

SEQ ID NO: 544122 - DNA, 33 bp, Homo sapien
agtataacagtgaagagtaaagctgctactctc

SEQ ID NO: 544123 - DNA, 33 bp, Homo sapien
cagagtctgagagaaaaaactactaggacagag

SEQ ID NO: 544124 - DNA, 33 bp, Homo sapien
cagagtctgagagaaataactactaggacagag

SEQ ID NO: 544125 - DNA, 33 bp, Homo sapien
gagagctccagaactgacagaattagggtagtt

SEQ ID NO: 544126 - DNA, 33 bp, Homo sapien
gagagctccagaactggcagaattagggtagtt

SEQ ID NO: 544127 - DNA, 33 bp, Homo sapien
tttaaccagaatatccccctctcaatcaagcag

SEQ ID NO: 544128 - DNA, 33 bp, Homo sapien
tttaaccagaatatcctcctctcaatcaagcag

SEQ ID NO: 544129 - DNA, 33 bp, Homo sapien
gctcacaggagaagcccgaaacagaactcagtc

SEQ ID NO: 544130 - DNA, 33 bp, Homo sapien
gctcacaggagaagcctgaaacagaactcagtc

SEQ ID NO: 544131 - DNA, 33 bp, Homo sapien
agcccaacaagaaggacgagaaggggactctta

SEQ ID NO: 544132 - DNA, 33 bp, Homo sapien
agcccaacaagaaggatgagaaggggactctta

SEQ ID NO: 544133 - DNA, 33 bp, Homo sapien
gcaggctgagacactgaatcaaaacggagaatc

SEQ ID NO: 544134 - DNA, 33 bp, Homo sapien
gcaggctgagacactgcatcaaaacggagaatc

SEQ ID NO: 544135 - DNA, 33 bp, Homo sapien
atgtggaatggaaccaactgatcctttccttcc

SEQ ID NO: 544136 - DNA, 33 bp, Homo sapien
atgtggaatggaaccagctgatcctttccttcc

SEQ ID NO: 544137 - DNA, 33 bp, Homo sapien
atgttgggctgccctactacaacagaccctaag

SEQ ID NO: 544138 - DNA, 33 bp, Homo sapien
atgttgggctgccctattacaacagaccctaag

SEQ ID NO: 544139 - DNA, 33 bp, Homo sapien
atcaaagcccagttcaagtcctgccatttatag

SEQ ID NO: 544140 - DNA, 33 bp, Homo sapien
atcaaagcccagttcacgtcctgccatttatag

SEQ ID NO: 544141 - DNA, 33 bp, Homo sapien
tgttcaatatgtagagaaagccataggattcag

SEQ ID NO: 544142 - DNA, 33 bp, Homo sapien
tgttcaatatgtagagcaagccataggattcag

SEQ ID NO: 544143 - DNA, 33 bp, Homo sapien
tggatatgaattatccagatgttacaatgactg

SEQ ID NO: 544144 - DNA, 33 bp, Homo sapien
tggatatgaattatccggatgttacaatgactg

SEQ ID NO: 544145 - DNA, 33 bp, Homo sapien
cctatcttctctattccacctcccgttgtctga

SEQ ID NO: 544146 - DNA, 33 bp, Homo sapien
cctatcttctctattctacctcccgttgtctga

SEQ ID NO: 544147 - DNA, 33 bp, Homo sapien
ttgttacacggcagtaagaactatatgaaaaag

SEQ ID NO: 544148 - DNA, 33 bp, Homo sapien
ttgttacacggcagtaggaactatatgaaaaag

SEQ ID NO: 544149 - DNA, 33 bp, Homo sapien
ggccttatctaacttgcaaacttctattaatct

SEQ ID NO: 544150 - DNA, 33 bp, Homo sapien
ggccttatctaacttgtaaacttctattaatct

SEQ ID NO: 544151 - DNA, 33 bp, Homo sapien
ccagatctcaacaagcaaaaatttaataactgg

SEQ ID NO: 544152 - DNA, 33 bp, Homo sapien
ccagatctcaacaagccaaaatttaataactgg

SEQ ID NO: 544153 - DNA, 33 bp, Homo sapien
tatctgctctacactcaatcttctttcctagga

SEQ ID NO: 544154 - DNA, 33 bp, Homo sapien
tatctgctctacactcgatcttctttcctagga

SEQ ID NO: 544155 - DNA, 33 bp, Homo sapien
gactccagaagaaatacgtagctcatgtgtccc

SEQ ID NO: 544156 - DNA, 33 bp, Homo sapien
gactccagaagaaatatgtagctcatgtgtccc

SEQ ID NO: 544157 - DNA, 33 bp, Homo sapien
gacactatgttccaggaattatgatttcctaca

SEQ ID NO: 544158 - DNA, 33 bp, Homo sapien
gacactatgttccagggattatgatttcctaca

SEQ ID NO: 544159 - DNA, 33 bp, Homo sapien
tcttaatacatataaaccactcagagcagagcc

SEQ ID NO: 544160 - DNA, 33 bp, Homo sapien
tcttaatacatataaatcactcagagcagagcc

SEQ ID NO: 544161 - DNA, 33 bp, Homo sapien
aagtgatgaaaagttcaagttcctttagtggca

SEQ ID NO: 544162 - DNA, 33 bp, Homo sapien
aagtgatgaaaagttcgagttcctttagtggca

SEQ ID NO: 544163 - DNA, 33 bp, Homo sapien
actttgctgcccttgccatcttttaggatgggc

SEQ ID NO: 544164 - DNA, 33 bp, Homo sapien
actttgctgcccttgctatcttttaggatgggc

SEQ ID NO: 544165 - DNA, 33 bp, Homo sapien
ggaacaaactgactgacggtctaagtgccaggc

SEQ ID NO: 544166 - DNA, 33 bp, Homo sapien
ggaacaaactgactgatggtctaagtgccaggc

SEQ ID NO: 544167 - DNA, 33 bp, Homo sapien
tttttgcggttttcccaaagacactgtatgttc

SEQ ID NO: 544168 - DNA, 33 bp, Homo sapien
tttttgcggttttcccgaagacactgtatgttc

SEQ ID NO: 544169 - DNA, 33 bp, Homo sapien
gttcagaggagaggtcagaaatggagatataaa

SEQ ID NO: 544170 - DNA, 33 bp, Homo sapien
gttcagaggagaggtcggaaatggagatataaa

SEQ ID NO: 544171 - DNA, 33 bp, Homo sapien
gtggagatgtcaagaaagcaattagtcatatga

SEQ ID NO: 544172 - DNA, 33 bp, Homo sapien
gtggagatgtcaagaaggcaattagtcatatga

SEQ ID NO: 544173 - DNA, 33 bp, Homo sapien
ccacttgaaagcccatgagacatctcaaacata

SEQ ID NO: 544174 - DNA, 33 bp, Homo sapien
ccacttgaaagcccattagacatctcaaacata

SEQ ID NO: 544175 - DNA, 33 bp, Homo sapien
ccaccagtgtccagaaagaaattaggagccatt

SEQ ID NO: 544176 - DNA, 33 bp, Homo sapien
ccaccagtgtccagaaggaaattaggagccatt

SEQ ID NO: 544177 - DNA, 33 bp, Homo sapien
ctacagttggccccccaatcagagtgcagggcc

SEQ ID NO: 544178 - DNA, 33 bp, Homo sapien
ctacagttggccccccgatcagagtgcagggcc

SEQ ID NO: 544179 - DNA, 33 bp, Homo sapien
tcatctctgcagaaaaagtataccacgagcagc

SEQ ID NO: 544180 - DNA, 33 bp, Homo sapien
tcatctctgcagaaaaggtataccacgagcagc

SEQ ID NO: 544181 - DNA, 33 bp, Homo sapien
cccccacttccaaacaaatggcaaattttaaat

SEQ ID NO: 544182 - DNA, 33 bp, Homo sapien
cccccacttccaaacagatggcaaattttaaat

SEQ ID NO: 544183 - DNA, 33 bp, Homo sapien
gatgctcactaaatgacggctatttcttggggt

SEQ ID NO: 544184 - DNA, 33 bp, Homo sapien
gatgctcactaaatgatggctatttcttggggt

SEQ ID NO: 544185 - DNA, 33 bp, Homo sapien
acctttaaactgtacccgcatgaggcccacaga

SEQ ID NO: 544186 - DNA, 33 bp, Homo sapien
acctttaaactgtacctgcatgaggcccacaga

SEQ ID NO: 544187 - DNA, 33 bp, Homo sapien
tatcaaatcttgcaacagccctctaaagcaggg

SEQ ID NO: 544188 - DNA, 33 bp, Homo sapien
tatcaaatcttgcaaccgccctctaaagcaggg

SEQ ID NO: 544189 - DNA, 33 bp, Homo sapien
agaacaaaggaaattacgtaggaaagaagagag

SEQ ID NO: 544190 - DNA, 33 bp, Homo sapien
agaacaaaggaaattatgtaggaaagaagagag

SEQ ID NO: 544191 - DNA, 33 bp, Homo sapien
aaggaagagaacagtaccttcaatgacaatgag

SEQ ID NO: 544192 - DNA, 33 bp, Homo sapien
aaggaagagaacagtatcttcaatgacaatgag

SEQ ID NO: 544193 - DNA, 33 bp, Homo sapien
cgaagtggtttctaagaccctgaaacaagaggt

SEQ ID NO: 544194 - DNA, 33 bp, Homo sapien
cgaagtggtttctaaggccctgaaacaagaggt

SEQ ID NO: 544195 - DNA, 33 bp, Homo sapien
ggcctcatgcacctcaactcagtggttttagtg

SEQ ID NO: 544196 - DNA, 33 bp, Homo sapien
ggcctcatgcacctcacctcagtggttttagtg

SEQ ID NO: 544197 - DNA, 33 bp, Homo sapien
gcagtaatatgaactcaaggaagatttcctagc

SEQ ID NO: 544198 - DNA, 33 bp, Homo sapien
gcagtaatatgaactcgaggaagatttcctagc

SEQ ID NO: 544199 - DNA, 33 bp, Homo sapien
caatagcatacaagacaaagaagttggaaagca

SEQ ID NO: 544200 - DNA, 33 bp, Homo sapien
caatagcatacaagacgaagaagttggaaagca

SEQ ID NO: 544201 - DNA, 33 bp, Homo sapien
tcaggacctctgaaaccgcttcagatttaaagc

SEQ ID NO: 544202 - DNA, 33 bp, Homo sapien
tcaggacctctgaaactgcttcagatttaaagc

SEQ ID NO: 544203 - DNA, 33 bp, Homo sapien
taagcagggataacaaatgggaactgtactttc

SEQ ID NO: 544204 - DNA, 33 bp, Homo sapien
taagcagggataacaagtgggaactgtactttc

SEQ ID NO: 544205 - DNA, 33 bp, Homo sapien
aggtgtgttgggcctacggttggtccgcactgc

SEQ ID NO: 544206 - DNA, 33 bp, Homo sapien
aggtgtgttgggcctatggttggtccgcactgc

SEQ ID NO: 544207 - DNA, 33 bp, Homo sapien
aacagacattcttaaaaaggataaacaactggc

SEQ ID NO: 544208 - DNA, 33 bp, Homo sapien
aacagacattcttaaagaggataaacaactggc

SEQ ID NO: 544209 - DNA, 33 bp, Homo sapien
accaaactcaaatagaaaggtgaagatgactga

SEQ ID NO: 544210 - DNA, 33 bp, Homo sapien
accaaactcaaatagagaggtgaagatgactga

SEQ ID NO: 544211 - DNA, 33 bp, Homo sapien
tcagggctggggagtacggaactccaactactc

SEQ ID NO: 544212 - DNA, 33 bp, Homo sapien
tcagggctggggagtatggaactccaactactc

SEQ ID NO: 544213 - DNA, 33 bp, Homo sapien
aggagatgacactggcactaggagaggaggatt

SEQ ID NO: 544214 - DNA, 33 bp, Homo sapien
aggagatgacactggcgctaggagaggaggatt

SEQ ID NO: 544215 - DNA, 33 bp, Homo sapien
aagtggcttaacagaacaatactcatcatcatc

SEQ ID NO: 544216 - DNA, 33 bp, Homo sapien
aagtggcttaacagaataatactcatcatcatc

SEQ ID NO: 544217 - DNA, 33 bp, Homo sapien
ccctggaatttatagacggaactgggattcttc

SEQ ID NO: 544218 - DNA, 33 bp, Homo sapien
ccctggaatttatagatggaactgggattcttc

SEQ ID NO: 544219 - DNA, 33 bp, Homo sapien
tgcccagaagaatgcccggaagaatagtaggta

SEQ ID NO: 544220 - DNA, 33 bp, Homo sapien
tgcccagaagaatgcctggaagaatagtaggta

SEQ ID NO: 544221 - DNA, 33 bp, Homo sapien
catagacatcactaaggaaatgggttcctccga

SEQ ID NO: 544222 - DNA, 33 bp, Homo sapien
catagacatcactaagtaaatgggttcctccga

SEQ ID NO: 544223 - DNA, 33 bp, Homo sapien
caatttgctttccccacaggaccctgttcaggg

SEQ ID NO: 544224 - DNA, 33 bp, Homo sapien
caatttgctttccccataggaccctgttcaggg

SEQ ID NO: 544225 - DNA, 33 bp, Homo sapien
ttcaacatcactctcacgtcaaactcatttgat

SEQ ID NO: 544226 - DNA, 33 bp, Homo sapien
ttcaacatcactctcaggtcaaactcatttgat

SEQ ID NO: 544227 - DNA, 33 bp, Homo sapien
agctcagagagatgaactgacttgttcaaagtt

SEQ ID NO: 544228 - DNA, 33 bp, Homo sapien
agctcagagagatgaagtgacttgttcaaagtt

SEQ ID NO: 544229 - DNA, 33 bp, Homo sapien
actccatcactgattaaagcctgtttccttgtc

SEQ ID NO: 544230 - DNA, 33 bp, Homo sapien
actccatcactgattagagcctgtttccttgtc

SEQ ID NO: 544231 - DNA, 33 bp, Homo sapien
gtctttcagaacagacagcaacacacagttggg

SEQ ID NO: 544232 - DNA, 33 bp, Homo sapien
gtctttcagaacagacggcaacacacagttggg

SEQ ID NO: 544233 - DNA, 33 bp, Homo sapien
ggagggcacattacccagagtaaaaataggctg

SEQ ID NO: 544234 - DNA, 33 bp, Homo sapien
ggagggcacattacccggagtaaaaataggctg

SEQ ID NO: 544235 - DNA, 33 bp, Homo sapien
ccccctgcaacctgacacgctatgggaaagaga

SEQ ID NO: 544236 - DNA, 33 bp, Homo sapien
ccccctgcaacctgacgcgctatgggaaagaga

SEQ ID NO: 544237 - DNA, 33 bp, Homo sapien
cagcccggtacctggcaaggaagtacaaccgca

SEQ ID NO: 544238 - DNA, 33 bp, Homo sapien
cagcccggtacctggcgaggaagtacaaccgca

SEQ ID NO: 544239 - DNA, 33 bp, Homo sapien
gttgtgtagagtgatacgacagagacattgtgc

SEQ ID NO: 544240 - DNA, 33 bp, Homo sapien
gttgtgtagagtgatatgacagagacattgtgc

SEQ ID NO: 544241 - DNA, 33 bp, Homo sapien
tgaagctggtctcggacctgacaccactcactg

SEQ ID NO: 544242 - DNA, 33 bp, Homo sapien
tgaagctggtctcggagctgacaccactcactg

SEQ ID NO: 544243 - DNA, 33 bp, Homo sapien
gtggctctaaggggcaaggtaaggcagtgagct

SEQ ID NO: 544244 - DNA, 33 bp, Homo sapien
gtggctctaaggggcacggtaaggcagtgagct

SEQ ID NO: 544245 - DNA, 33 bp, Homo sapien
gacatgttaacgtgaccgatgaagggggaggct

SEQ ID NO: 544246 - DNA, 33 bp, Homo sapien
gacatgttaacgtgactgatgaagggggaggct

SEQ ID NO: 544247 - DNA, 33 bp, Homo sapien
ctccccacaaacaccactctcttcacagggaag

SEQ ID NO: 544248 - DNA, 33 bp, Homo sapien
ctccccacaaacaccagtctcttcacagggaag

SEQ ID NO: 544249 - DNA, 33 bp, Homo sapien
tgaagtctaatacaaagtcttagtgctggtgaa

SEQ ID NO: 544250 - DNA, 33 bp, Homo sapien
tgaagtctaatacaaattcttagtgctggtgaa

SEQ ID NO: 544251 - DNA, 33 bp, Homo sapien
aatcctactgcaggagacctcacggagtctaca

SEQ ID NO: 544252 - DNA, 33 bp, Homo sapien
aatcctactgcaggaggcctcacggagtctaca

SEQ ID NO: 544253 - DNA, 33 bp, Homo sapien
tttcattttggtggaaaccgtaggtctcagtta

SEQ ID NO: 544254 - DNA, 33 bp, Homo sapien
tttcattttggtggaatccgtaggtctcagtta

SEQ ID NO: 544255 - DNA, 33 bp, Homo sapien
atacaagccaggaaataaaactgctactggcca

SEQ ID NO: 544256 - DNA, 33 bp, Homo sapien
atacaagccaggaaatgaaactgctactggcca

SEQ ID NO: 544257 - DNA, 33 bp, Homo sapien
gaccatacagctggggacaacggcagcagctac

SEQ ID NO: 544258 - DNA, 33 bp, Homo sapien
gaccatacagctgggggcaacggcagcagctac

SEQ ID NO: 544259 - DNA, 33 bp, Homo sapien
ggctgtggaacacgggacataaagggaaaggtc

SEQ ID NO: 544260 - DNA, 33 bp, Homo sapien
ggctgtggaacacgggccataaagggaaaggtc

SEQ ID NO: 544261 - DNA, 33 bp, Homo sapien
ggaacacccacagttcccggctatttgccaagc

SEQ ID NO: 544262 - DNA, 33 bp, Homo sapien
ggaacacccacagttcgcggctatttgccaagc

SEQ ID NO: 544263 - DNA, 33 bp, Homo sapien
gccagcagaatctaaaatggtccagggtcccca

SEQ ID NO: 544264 - DNA, 33 bp, Homo sapien
gccagcagaatctaaagtggtccagggtcccca

SEQ ID NO: 544265 - DNA, 33 bp, Homo sapien
gagaggccggatgttcaaaaatacaatggcctt

SEQ ID NO: 544266 - DNA, 33 bp, Homo sapien
gagaggccggatgttcgaaaatacaatggcctt

SEQ ID NO: 544267 - DNA, 33 bp, Homo sapien
aaccagttagtgtcggcaggtgtattaacctgt

SEQ ID NO: 544268 - DNA, 33 bp, Homo sapien
aaccagttagtgtcggtaggtgtattaacctgt

SEQ ID NO: 544269 - DNA, 33 bp, Homo sapien
ctgtgttttcactctcaaaacaaggagggatgg

SEQ ID NO: 544270 - DNA, 33 bp, Homo sapien
ctgtgttttcactctcgaaacaaggagggatgg

SEQ ID NO: 544271 - DNA, 33 bp, Homo sapien
atgggctaatacaaaacataaactgttactaca

SEQ ID NO: 544272 - DNA, 33 bp, Homo sapien
atgggctaatacaaaagataaactgttactaca

SEQ ID NO: 544273 - DNA, 33 bp, Homo sapien
gtggtcatttttcttacgccagctgctctcctc

SEQ ID NO: 544274 - DNA, 33 bp, Homo sapien
gtggtcatttttcttatgccagctgctctcctc

SEQ ID NO: 544275 - DNA, 33 bp, Homo sapien
aaaggattcgaatcataagacaggaagatgggc

SEQ ID NO: 544276 - DNA, 33 bp, Homo sapien
aaaggattcgaatcatgagacaggaagatgggc

SEQ ID NO: 544277 - DNA, 33 bp, Homo sapien
tcaagaagtaatcaaacatgagctgagcaccag

SEQ ID NO: 544278 - DNA, 33 bp, Homo sapien
tcaagaagtaatcaaatatgagctgagcaccag

SEQ ID NO: 544279 - DNA, 33 bp, Homo sapien
aaggcaataaattctcaaaactcattacttcct

SEQ ID NO: 544280 - DNA, 33 bp, Homo sapien
aaggcaataaattctcgaaactcattacttcct

SEQ ID NO: 544281 - DNA, 33 bp, Homo sapien
gtgctttgcaaataaaacaaggttaagcaaggc

SEQ ID NO: 544282 - DNA, 33 bp, Homo sapien
gtgctttgcaaataaagcaaggttaagcaaggc

SEQ ID NO: 544283 - DNA, 33 bp, Homo sapien
tcactccagcaaggaaatcccagcaagggacat

SEQ ID NO: 544284 - DNA, 33 bp, Homo sapien
tcactccagcaaggaactcccagcaagggacat

SEQ ID NO: 544285 - DNA, 33 bp, Homo sapien
gaagtgacagatggggaaagtgatacaggtgct

SEQ ID NO: 544286 - DNA, 33 bp, Homo sapien
gaagtgacagatggggtaagtgatacaggtgct

SEQ ID NO: 544287 - DNA, 33 bp, Homo sapien
tcagctgtgctctaggaaaagatctatgtcttc

SEQ ID NO: 544288 - DNA, 33 bp, Homo sapien
tcagctgtgctctagggaaagatctatgtcttc

SEQ ID NO: 544289 - DNA, 33 bp, Homo sapien
tggccaatgatccaataacctccggcatggaca

SEQ ID NO: 544290 - DNA, 33 bp, Homo sapien
tggccaatgatccaatgacctccggcatggaca

SEQ ID NO: 544291 - DNA, 33 bp, Homo sapien
cacaaaaacctgttgacaaatattgatagcagc

SEQ ID NO: 544292 - DNA, 33 bp, Homo sapien
cacaaaaacctgttgataaatattgatagcagc

SEQ ID NO: 544293 - DNA, 33 bp, Homo sapien
tcagggaaggtaacaaacatgataaatgttagg

SEQ ID NO: 544294 - DNA, 33 bp, Homo sapien
tcagggaaggtaacaaccatgataaatgttagg

SEQ ID NO: 544295 - DNA, 33 bp, Homo sapien
tctttcagtgttcagacgccattcagcctcctc

SEQ ID NO: 544296 - DNA, 33 bp, Homo sapien
tctttcagtgttcagatgccattcagcctcctc

SEQ ID NO: 544297 - DNA, 33 bp, Homo sapien
actaacagacattagcagctaataaggcatcat

SEQ ID NO: 544298 - DNA, 33 bp, Homo sapien
actaacagacattagcggctaataaggcatcat

SEQ ID NO: 544299 - DNA, 33 bp, Homo sapien
cttactggctctgaaacgatactttcttaacct

SEQ ID NO: 544300 - DNA, 33 bp, Homo sapien
cttactggctctgaaatgatactttcttaacct

SEQ ID NO: 544301 - DNA, 33 bp, Homo sapien
actggaatggaaaatgaaagtatttagtaacaa

SEQ ID NO: 544302 - DNA, 33 bp, Homo sapien
actggaatggaaaatggaagtatttagtaacaa

SEQ ID NO: 544303 - DNA, 33 bp, Homo sapien
atttcttgtagttgcacgaactctgtgatgttt

SEQ ID NO: 544304 - DNA, 33 bp, Homo sapien
atttcttgtagttgcatgaactctgtgatgttt

SEQ ID NO: 544305 - DNA, 33 bp, Homo sapien
ctggccccaaagttagaacatatgcaggcaagt

SEQ ID NO: 544306 - DNA, 33 bp, Homo sapien
ctggccccaaagttaggacatatgcaggcaagt

SEQ ID NO: 544307 - DNA, 33 bp, Homo sapien
tgtgactctccttcaacatagtgtcccagtttc

SEQ ID NO: 544308 - DNA, 33 bp, Homo sapien
tgtgactctccttcaatatagtgtcccagtttc

SEQ ID NO: 544309 - DNA, 33 bp, Homo sapien
tggtttggggcattgtcaaaaggagcacttacc

SEQ ID NO: 544310 - DNA, 33 bp, Homo sapien
tggtttggggcattgttaaaaggagcacttacc

SEQ ID NO: 544311 - DNA, 33 bp, Homo sapien
agctaagagataaggaaaacagatgcagaggta

SEQ ID NO: 544312 - DNA, 33 bp, Homo sapien
agctaagagataaggagaacagatgcagaggta

SEQ ID NO: 544313 - DNA, 33 bp, Homo sapien
ctgagataggcagggaaaaagtaggagaattca

SEQ ID NO: 544314 - DNA, 33 bp, Homo sapien
ctgagataggcagggataaagtaggagaattca

SEQ ID NO: 544315 - DNA, 33 bp, Homo sapien
ctttatgggcagaatcgccctaatccatatctc

SEQ ID NO: 544316 - DNA, 33 bp, Homo sapien
ctttatgggcagaatctccctaatccatatctc

SEQ ID NO: 544317 - DNA, 33 bp, Homo sapien
gaaaactgaacattggcagttaacgagcaagga

SEQ ID NO: 544318 - DNA, 33 bp, Homo sapien
gaaaactgaacattggtagttaacgagcaagga

SEQ ID NO: 544319 - DNA, 33 bp, Homo sapien
gcttctaagaaattcacattgaagacagagatc

SEQ ID NO: 544320 - DNA, 33 bp, Homo sapien
gcttctaagaaattcagattgaagacagagatc

SEQ ID NO: 544321 - DNA, 33 bp, Homo sapien
acactgtgggcaacacccccagaataaggctgt

SEQ ID NO: 544322 - DNA, 33 bp, Homo sapien
acactgtgggcaacactcccagaataaggctgt

SEQ ID NO: 544323 - DNA, 33 bp, Homo sapien
ctgtcagggtgtcacccgaataaagcttgcatg

SEQ ID NO: 544324 - DNA, 33 bp, Homo sapien
ctgtcagggtgtcacctgaataaagcttgcatg

SEQ ID NO: 544325 - DNA, 33 bp, Homo sapien
atcttcaaacacagtcgcattctgaagtcccgg

SEQ ID NO: 544326 - DNA, 33 bp, Homo sapien
atcttcaaacacagtctcattctgaagtcccgg

SEQ ID NO: 544327 - DNA, 33 bp, Homo sapien
ttgaagttctgtagtccagtttaaatgagataa

SEQ ID NO: 544328 - DNA, 33 bp, Homo sapien
ttgaagttctgtagtctagtttaaatgagataa

SEQ ID NO: 544329 - DNA, 33 bp, Homo sapien
tattttttagatgaaaatggcatttaaatcagc

SEQ ID NO: 544330 - DNA, 33 bp, Homo sapien
tattttttagatgaaattggcatttaaatcagc

SEQ ID NO: 544331 - DNA, 33 bp, Homo sapien
tgcagaattcagcatgcaatttccagccaattc

SEQ ID NO: 544332 - DNA, 33 bp, Homo sapien
tgcagaattcagcatgtaatttccagccaattc

SEQ ID NO: 544333 - DNA, 33 bp, Homo sapien
tctatcatttctcccccattctcctattgatgg

SEQ ID NO: 544334 - DNA, 33 bp, Homo sapien
tctatcatttctcccctattctcctattgatgg

SEQ ID NO: 544335 - DNA, 33 bp, Homo sapien
cttgagttaaactagccattcccaagtaaatgt

SEQ ID NO: 544336 - DNA, 33 bp, Homo sapien
cttgagttaaactagctattcccaagtaaatgt

SEQ ID NO: 544337 - DNA, 33 bp, Homo sapien
gtctttgtcggggaaccgtccttttctatttct

SEQ ID NO: 544338 - DNA, 33 bp, Homo sapien
gtctttgtcggggaactgtccttttctatttct

SEQ ID NO: 544339 - DNA, 33 bp, Homo sapien
tcagggaagagacatacccttcacaccattgtt

SEQ ID NO: 544340 - DNA, 33 bp, Homo sapien
tcagggaagagacatatccttcacaccattgtt

SEQ ID NO: 544341 - DNA, 33 bp, Homo sapien
gcactgatttctagacagagaacctactggctc

SEQ ID NO: 544342 - DNA, 33 bp, Homo sapien
gcactgatttctagacggagaacctactggctc

SEQ ID NO: 544343 - DNA, 33 bp, Homo sapien
tatgtctaggcatataacttgtaggattttaag

SEQ ID NO: 544344 - DNA, 33 bp, Homo sapien
tatgtctaggcatataccttgtaggattttaag

SEQ ID NO: 544345 - DNA, 33 bp, Homo sapien
tctgaaatacggaggaaaccctgatttatattt

SEQ ID NO: 544346 - DNA, 33 bp, Homo sapien
tctgaaatacggaggagaccctgatttatattt

SEQ ID NO: 544347 - DNA, 33 bp, Homo sapien
tgtagcagatttaaaaacttgccacaaactctt

SEQ ID NO: 544348 - DNA, 33 bp, Homo sapien
tgtagcagatttaaaagcttgccacaaactctt

SEQ ID NO: 544349 - DNA, 33 bp, Homo sapien
tgaaatgaagcttcccaagagtaagtgtttcac

SEQ ID NO: 544350 - DNA, 33 bp, Homo sapien
tgaaatgaagcttcccgagagtaagtgtttcac

SEQ ID NO: 544351 - DNA, 33 bp, Homo sapien
ataaacctccctcagaacattcactgtgaagcg

SEQ ID NO: 544352 - DNA, 33 bp, Homo sapien
ataaacctccctcagaccattcactgtgaagcg

SEQ ID NO: 544353 - DNA, 33 bp, Homo sapien
catgtttgtttgtcaccgcaagttcctgagatg

SEQ ID NO: 544354 - DNA, 33 bp, Homo sapien
catgtttgtttgtcactgcaagttcctgagatg

SEQ ID NO: 544355 - DNA, 33 bp, Homo sapien
gaagtaggaagagtccccaaaagttgtttgctt

SEQ ID NO: 544356 - DNA, 33 bp, Homo sapien
gaagtaggaagagtccgcaaaagttgtttgctt

SEQ ID NO: 544357 - DNA, 33 bp, Homo sapien
ttagcacaacgagagccgcctgattggctcatg

SEQ ID NO: 544358 - DNA, 33 bp, Homo sapien
ttagcacaacgagagctgcctgattggctcatg

SEQ ID NO: 544359 - DNA, 33 bp, Homo sapien
taccatattgacagtaagtatccactaggtagg

SEQ ID NO: 544360 - DNA, 33 bp, Homo sapien
taccatattgacagtaggtatccactaggtagg

SEQ ID NO: 544361 - DNA, 33 bp, Homo sapien
attcagcaaagcacaacggctggagaatcccac

SEQ ID NO: 544362 - DNA, 33 bp, Homo sapien
attcagcaaagcacaatggctggagaatcccac

SEQ ID NO: 544363 - DNA, 33 bp, Homo sapien
ccacatgttttggccacagcatttgcagtcgca

SEQ ID NO: 544364 - DNA, 33 bp, Homo sapien
ccacatgttttggccatagcatttgcagtcgca

SEQ ID NO: 544365 - DNA, 33 bp, Homo sapien
ccaaagaccctgctaaatatgtcacgttaaatc

SEQ ID NO: 544366 - DNA, 33 bp, Homo sapien
ccaaagaccctgctaagtatgtcacgttaaatc

SEQ ID NO: 544367 - DNA, 33 bp, Homo sapien
attgatctatatttccactttcatgctagtacc

SEQ ID NO: 544368 - DNA, 33 bp, Homo sapien
attgatctatatttccgctttcatgctagtacc

SEQ ID NO: 544369 - DNA, 33 bp, Homo sapien
caattacctcagagtgaagagaaattggatcca

SEQ ID NO: 544370 - DNA, 33 bp, Homo sapien
caattacctcagagtggagagaaattggatcca

SEQ ID NO: 544371 - DNA, 33 bp, Homo sapien
catcatctattttccaggaggttgtaaattact

SEQ ID NO: 544372 - DNA, 33 bp, Homo sapien
catcatctattttccatgaggttgtaaattact

SEQ ID NO: 544373 - DNA, 33 bp, Homo sapien
gtcccagcaactacagactgaatcaagtatgag

SEQ ID NO: 544374 - DNA, 33 bp, Homo sapien
gtcccagcaactacaggctgaatcaagtatgag

SEQ ID NO: 544375 - DNA, 33 bp, Homo sapien
accagtggtgtccttacgaaatttaattagctc

SEQ ID NO: 544376 - DNA, 33 bp, Homo sapien
accagtggtgtccttatgaaatttaattagctc

SEQ ID NO: 544377 - DNA, 33 bp, Homo sapien
caaagaaccctagcccaactctaaacatggtgc

SEQ ID NO: 544378 - DNA, 33 bp, Homo sapien
caaagaaccctagcccgactctaaacatggtgc

SEQ ID NO: 544379 - DNA, 33 bp, Homo sapien
agattccaatcagtagccaataaagcattgaca

SEQ ID NO: 544380 - DNA, 33 bp, Homo sapien
agattccaatcagtaggcaataaagcattgaca

SEQ ID NO: 544381 - DNA, 33 bp, Homo sapien
ttcccccttaagaaaactctctctacctaatga

SEQ ID NO: 544382 - DNA, 33 bp, Homo sapien
ttcccccttaagaaaattctctctacctaatga

SEQ ID NO: 544383 - DNA, 33 bp, Homo sapien
gtaggtacacgatgtgcatttgacccgctactg

SEQ ID NO: 544384 - DNA, 33 bp, Homo sapien
gtaggtacacgatgtggatttgacccgctactg

SEQ ID NO: 544385 - DNA, 33 bp, Homo sapien
aacaataaaagaaatacaagggccagaacttgc

SEQ ID NO: 544386 - DNA, 33 bp, Homo sapien
aacaataaaagaaatataagggccagaacttgc

SEQ ID NO: 544387 - DNA, 33 bp, Homo sapien
ctgaaatccagctgaaactgtttcttgacaatt

SEQ ID NO: 544388 - DNA, 33 bp, Homo sapien
ctgaaatccagctgaacctgtttcttgacaatt

SEQ ID NO: 544389 - DNA, 33 bp, Homo sapien
caggcaatctgagccacaggtgaccatggaaga

SEQ ID NO: 544390 - DNA, 33 bp, Homo sapien
caggcaatctgagccagaggtgaccatggaaga

SEQ ID NO: 544391 - DNA, 33 bp, Homo sapien
cagcttccctcccaaaatggctgtgaagattaa

SEQ ID NO: 544392 - DNA, 33 bp, Homo sapien
cagcttccctcccaaagtggctgtgaagattaa

SEQ ID NO: 544393 - DNA, 33 bp, Homo sapien
cagtttcatttaatccaatataacatggcttaa

SEQ ID NO: 544394 - DNA, 33 bp, Homo sapien
cagtttcatttaatcctatataacatggcttaa

SEQ ID NO: 544395 - DNA, 33 bp, Homo sapien
cccaaattcttttttgcatgagatccaagaacc

SEQ ID NO: 544396 - DNA, 33 bp, Homo sapien
cccaaattcttttttgtatgagatccaagaacc

SEQ ID NO: 544397 - DNA, 33 bp, Homo sapien
gctcagagatggaaacacatagtggccaggtgc

SEQ ID NO: 544398 - DNA, 33 bp, Homo sapien
gctcagagatggaaacgcatagtggccaggtgc

SEQ ID NO: 544399 - DNA, 33 bp, Homo sapien
gaacatcttcctttccacagattaagaaccaga

SEQ ID NO: 544400 - DNA, 33 bp, Homo sapien
gaacatcttcctttccgcagattaagaaccaga

SEQ ID NO: 544401 - DNA, 33 bp, Homo sapien
ctgccttcagcaagaaacctatcagattggttt

SEQ ID NO: 544402 - DNA, 33 bp, Homo sapien
ctgccttcagcaagaatcctatcagattggttt

SEQ ID NO: 544403 - DNA, 33 bp, Homo sapien
ggttgtttggtaatgcacataggacactgtggg

SEQ ID NO: 544404 - DNA, 33 bp, Homo sapien
ggttgtttggtaatgcgcataggacactgtggg

SEQ ID NO: 544405 - DNA, 33 bp, Homo sapien
ttgctagacctatgtgaaatgttttcctattaa

SEQ ID NO: 544406 - DNA, 33 bp, Homo sapien
ttgctagacctatgtggaatgttttcctattaa

SEQ ID NO: 544407 - DNA, 33 bp, Homo sapien
tccctttcaagaggaacgcataaataggtccca

SEQ ID NO: 544408 - DNA, 33 bp, Homo sapien
tccctttcaagaggaatgcataaataggtccca

SEQ ID NO: 544409 - DNA, 33 bp, Homo sapien
aatgcttaagatgaaactcattgggtggccaca

SEQ ID NO: 544410 - DNA, 33 bp, Homo sapien
aatgcttaagatgaaattcattgggtggccaca

SEQ ID NO: 544411 - DNA, 33 bp, Homo sapien
acgaaaagaaagaccaataacttatctctagtg

SEQ ID NO: 544412 - DNA, 33 bp, Homo sapien
acgaaaagaaagaccagtaacttatctctagtg

SEQ ID NO: 544413 - DNA, 33 bp, Homo sapien
ggagtcctggctctgtcaatttttgtatgtcct

SEQ ID NO: 544414 - DNA, 33 bp, Homo sapien
ggagtcctggctctgttaatttttgtatgtcct

SEQ ID NO: 544415 - DNA, 33 bp, Homo sapien
gctccctgtttccttcccatcaacttccagata

SEQ ID NO: 544416 - DNA, 33 bp, Homo sapien
gctccctgtttccttctcatcaacttccagata

SEQ ID NO: 544417 - DNA, 33 bp, Homo sapien
caaggtttgtgagggaacatagcccagagattt

SEQ ID NO: 544418 - DNA, 33 bp, Homo sapien
caaggtttgtgagggagcatagcccagagattt

SEQ ID NO: 544419 - DNA, 33 bp, Homo sapien
gagtattacccacaaaatatagacaaacgcaat

SEQ ID NO: 544420 - DNA, 33 bp, Homo sapien
gagtattacccacaaagtatagacaaacgcaat

SEQ ID NO: 544421 - DNA, 33 bp, Homo sapien
ggccaaaagtccaagacgaagcttttggtagat

SEQ ID NO: 544422 - DNA, 33 bp, Homo sapien
ggccaaaagtccaagatgaagcttttggtagat

SEQ ID NO: 544423 - DNA, 33 bp, Homo sapien
cttaccaattagcatcagatagcatcagcttat

SEQ ID NO: 544424 - DNA, 33 bp, Homo sapien
cttaccaattagcatcggatagcatcagcttat

SEQ ID NO: 544425 - DNA, 33 bp, Homo sapien
tttgtctatagtttgcaaaaagagtctgtagac

SEQ ID NO: 544426 - DNA, 33 bp, Homo sapien
tttgtctatagtttgctaaaagagtctgtagac

SEQ ID NO: 544427 - DNA, 33 bp, Homo sapien
tatttggatataagcaatgaactaggatatttg

SEQ ID NO: 544428 - DNA, 33 bp, Homo sapien
tatttggatataagcagtgaactaggatatttg

SEQ ID NO: 544429 - DNA, 33 bp, Homo sapien
cttacgggctgtagtacagttcctgcagatctc

SEQ ID NO: 544430 - DNA, 33 bp, Homo sapien
cttacgggctgtagtatagttcctgcagatctc

SEQ ID NO: 544431 - DNA, 33 bp, Homo sapien
ggggaatgtaaccaccacctgtgaatttgggtt

SEQ ID NO: 544432 - DNA, 33 bp, Homo sapien
ggggaatgtaaccaccgcctgtgaatttgggtt

SEQ ID NO: 544433 - DNA, 33 bp, Homo sapien
aaaattccaggacttacacattcaaaggagtgg

SEQ ID NO: 544434 - DNA, 33 bp, Homo sapien
aaaattccaggacttatacattcaaaggagtgg

SEQ ID NO: 544435 - DNA, 33 bp, Homo sapien
tattctgtgtgttccaatgaagctttatctctg

SEQ ID NO: 544436 - DNA, 33 bp, Homo sapien
tattctgtgtgttccagtgaagctttatctctg

SEQ ID NO: 544437 - DNA, 33 bp, Homo sapien
cagactggcattttccagaacagtctgtaagtc

SEQ ID NO: 544438 - DNA, 33 bp, Homo sapien
cagactggcattttcccgaacagtctgtaagtc

SEQ ID NO: 544439 - DNA, 33 bp, Homo sapien
aagctttcctaaaacacgatgagatttttttgt

SEQ ID NO: 544440 - DNA, 33 bp, Homo sapien
aagctttcctaaaacatgatgagatttttttgt

SEQ ID NO: 544441 - DNA, 33 bp, Homo sapien
acccagtatagtaatccccctatacacaatctt

SEQ ID NO: 544442 - DNA, 33 bp, Homo sapien
acccagtatagtaatctccctatacacaatctt

SEQ ID NO: 544443 - DNA, 33 bp, Homo sapien
ttatacttggagaataggacattaattaaatga

SEQ ID NO: 544444 - DNA, 33 bp, Homo sapien
ttatacttggagaatatgacattaattaaatga

SEQ ID NO: 544445 - DNA, 33 bp, Homo sapien
atatcttagtatgcctcaggaaagaactgtgta

SEQ ID NO: 544446 - DNA, 33 bp, Homo sapien
atatcttagtatgccttaggaaagaactgtgta

SEQ ID NO: 544447 - DNA, 33 bp, Homo sapien
agtaagaaaatgagccactcggagataaaggga

SEQ ID NO: 544448 - DNA, 33 bp, Homo sapien
agtaagaaaatgagccgctcggagataaaggga

SEQ ID NO: 544449 - DNA, 33 bp, Homo sapien
aagaggaaaaccatacccttcttgctgaactat

SEQ ID NO: 544450 - DNA, 33 bp, Homo sapien
aagaggaaaaccatactcttcttgctgaactat

SEQ ID NO: 544451 - DNA, 33 bp, Homo sapien
gtgatgtgtcagagtcaagtggccatcagtttc

SEQ ID NO: 544452 - DNA, 33 bp, Homo sapien
gtgatgtgtcagagtccagtggccatcagtttc

SEQ ID NO: 544453 - DNA, 33 bp, Homo sapien
atgagaagtggatcacacaaggttctgcataac

SEQ ID NO: 544454 - DNA, 33 bp, Homo sapien
atgagaagtggatcacgcaaggttctgcataac

SEQ ID NO: 544455 - DNA, 33 bp, Homo sapien
ggtcaaagtacagacaaaaataaaatgtccctg

SEQ ID NO: 544456 - DNA, 33 bp, Homo sapien
ggtcaaagtacagacagaaataaaatgtccctg

SEQ ID NO: 544457 - DNA, 33 bp, Homo sapien
atagctgatgagtcagaagtcagcttatgaagg

SEQ ID NO: 544458 - DNA, 33 bp, Homo sapien
atagctgatgagtcagcagtcagcttatgaagg

SEQ ID NO: 544459 - DNA, 33 bp, Homo sapien
gtggaagctaagagaacgtgacatgaacaaagg

SEQ ID NO: 544460 - DNA, 33 bp, Homo sapien
gtggaagctaagagaatgtgacatgaacaaagg

SEQ ID NO: 544461 - DNA, 33 bp, Homo sapien
gaggtagatgttgagacagcaaggcattatctt

SEQ ID NO: 544462 - DNA, 33 bp, Homo sapien
gaggtagatgttgagagagcaaggcattatctt

SEQ ID NO: 544463 - DNA, 33 bp, Homo sapien
tataagtttcaggagactctcagattttaatac

SEQ ID NO: 544464 - DNA, 33 bp, Homo sapien
tataagtttcaggagagtctcagattttaatac

SEQ ID NO: 544465 - DNA, 33 bp, Homo sapien
tgctgttagtcaagtcgcggagcctcaatttct

SEQ ID NO: 544466 - DNA, 33 bp, Homo sapien
tgctgttagtcaagtctcggagcctcaatttct

SEQ ID NO: 544467 - DNA, 33 bp, Homo sapien
agttcacagtgctttccaggaggaattggcaaa

SEQ ID NO: 544468 - DNA, 33 bp, Homo sapien
agttcacagtgctttctaggaggaattggcaaa

SEQ ID NO: 544469 - DNA, 33 bp, Homo sapien
aaaaatcttcccctgagaattcataacacaaac

SEQ ID NO: 544470 - DNA, 33 bp, Homo sapien
aaaaatcttcccctgataattcataacacaaac

SEQ ID NO: 544471 - DNA, 33 bp, Homo sapien
gcccaaagccctaccacctctataggtattaaa

SEQ ID NO: 544472 - DNA, 33 bp, Homo sapien
gcccaaagccctaccatctctataggtattaaa

SEQ ID NO: 544473 - DNA, 33 bp, Homo sapien
tgttgttataagctccccttaatagctatcagc

SEQ ID NO: 544474 - DNA, 33 bp, Homo sapien
tgttgttataagctcctcttaatagctatcagc

SEQ ID NO: 544475 - DNA, 33 bp, Homo sapien
gactgagattcagctaaaatgtgactcagaccc

SEQ ID NO: 544476 - DNA, 33 bp, Homo sapien
gactgagattcagctacaatgtgactcagaccc

SEQ ID NO: 544477 - DNA, 33 bp, Homo sapien
catgttagatgcattgcagtgaaattccaaaat

SEQ ID NO: 544478 - DNA, 33 bp, Homo sapien
catgttagatgcattgtagtgaaattccaaaat

SEQ ID NO: 544479 - DNA, 33 bp, Homo sapien
cagtggtttagccaccaggaactcagagtcctc

SEQ ID NO: 544480 - DNA, 33 bp, Homo sapien
cagtggtttagccaccgggaactcagagtcctc

SEQ ID NO: 544481 - DNA, 33 bp, Homo sapien
aagaattgcccattccaaataaaaagggcaaca

SEQ ID NO: 544482 - DNA, 33 bp, Homo sapien
aagaattgcccattccgaataaaaagggcaaca

SEQ ID NO: 544483 - DNA, 33 bp, Homo sapien
tgtttttaaaactaggaatgcctcagttccaac

SEQ ID NO: 544484 - DNA, 33 bp, Homo sapien
tgtttttaaaactagggatgcctcagttccaac

SEQ ID NO: 544485 - DNA, 33 bp, Homo sapien
tcttttaatcctcagaagaatcaaggcaagcct

SEQ ID NO: 544486 - DNA, 33 bp, Homo sapien
tcttttaatcctcagatgaatcaaggcaagcct

SEQ ID NO: 544487 - DNA, 33 bp, Homo sapien
tttggtagttataacaaagttccaaataaaatt

SEQ ID NO: 544488 - DNA, 33 bp, Homo sapien
tttggtagttataacagagttccaaataaaatt

SEQ ID NO: 544489 - DNA, 33 bp, Homo sapien
gtctacttcgccttgcactttcttctgtggctc

SEQ ID NO: 544490 - DNA, 33 bp, Homo sapien
gtctacttcgccttgctctttcttctgtggctc

SEQ ID NO: 544491 - DNA, 33 bp, Homo sapien
agggttctgcagtcaccaaagttgagaggtaga

SEQ ID NO: 544492 - DNA, 33 bp, Homo sapien
agggttctgcagtcactaaagttgagaggtaga

SEQ ID NO: 544493 - DNA, 33 bp, Homo sapien
ctcctattccttgggaacacctctaaaaataaa

SEQ ID NO: 544494 - DNA, 33 bp, Homo sapien
ctcctattccttgggatcacctctaaaaataaa

SEQ ID NO: 544495 - DNA, 33 bp, Homo sapien
aaagccctttgagcaacaagccaaagcccaatg

SEQ ID NO: 544496 - DNA, 33 bp, Homo sapien
aaagccctttgagcaagaagccaaagcccaatg

SEQ ID NO: 544497 - DNA, 33 bp, Homo sapien
tctcctgagaagatcactcctcatgaacatcac

SEQ ID NO: 544498 - DNA, 33 bp, Homo sapien
tctcctgagaagatcattcctcatgaacatcac

SEQ ID NO: 544499 - DNA, 33 bp, Homo sapien
tgtatatcaattttatcacagtctaagtatgca

SEQ ID NO: 544500 - DNA, 33 bp, Homo sapien
tgtatatcaattttatgacagtctaagtatgca

SEQ ID NO: 544501 - DNA, 33 bp, Homo sapien
aataaaagtgctccaaaaatcctggaaaattcc

SEQ ID NO: 544502 - DNA, 33 bp, Homo sapien
aataaaagtgctccaagaatcctggaaaattcc

SEQ ID NO: 544503 - DNA, 33 bp, Homo sapien
tccttgtttaaaattcaaacgtcattggaaaca

SEQ ID NO: 544504 - DNA, 33 bp, Homo sapien
tccttgtttaaaattcgaacgtcattggaaaca

SEQ ID NO: 544505 - DNA, 33 bp, Homo sapien
ggaatggtgaccttcactcatttttactctctc

SEQ ID NO: 544506 - DNA, 33 bp, Homo sapien
ggaatggtgaccttcattcatttttactctctc

SEQ ID NO: 544507 - DNA, 33 bp, Homo sapien
tcagcgctgattaggaacccatcagagttaaca

SEQ ID NO: 544508 - DNA, 33 bp, Homo sapien
tcagcgctgattaggaccccatcagagttaaca

SEQ ID NO: 544509 - DNA, 33 bp, Homo sapien
gcagtgagagcacagccattttcctggaactgc

SEQ ID NO: 544510 - DNA, 33 bp, Homo sapien
gcagtgagagcacagcgattttcctggaactgc

SEQ ID NO: 544511 - DNA, 33 bp, Homo sapien
cattgggtttggtctcactttgggcttcatagg

SEQ ID NO: 544512 - DNA, 33 bp, Homo sapien
cattgggtttggtctcgctttgggcttcatagg

SEQ ID NO: 544513 - DNA, 33 bp, Homo sapien
gaggtggttgagatcacaggttcttgaaccagt

SEQ ID NO: 544514 - DNA, 33 bp, Homo sapien
gaggtggttgagatcataggttcttgaaccagt

SEQ ID NO: 544515 - DNA, 33 bp, Homo sapien
ttgagcataagatacaacgatttcccatgtacc

SEQ ID NO: 544516 - DNA, 33 bp, Homo sapien
ttgagcataagatacagcgatttcccatgtacc

SEQ ID NO: 544517 - DNA, 33 bp, Homo sapien
ctcatctcttggcatcaacaggtctctgtagag

SEQ ID NO: 544518 - DNA, 33 bp, Homo sapien
ctcatctcttggcatcgacaggtctctgtagag

SEQ ID NO: 544519 - DNA, 33 bp, Homo sapien
gaagctacagttcaagacccttggcttcctcct

SEQ ID NO: 544520 - DNA, 33 bp, Homo sapien
gaagctacagttcaaggcccttggcttcctcct

SEQ ID NO: 544521 - DNA, 33 bp, Homo sapien
tgcctccccattcatcagaaaaagtccacaata

SEQ ID NO: 544522 - DNA, 33 bp, Homo sapien
tgcctccccattcatcggaaaaagtccacaata

SEQ ID NO: 544523 - DNA, 33 bp, Homo sapien
tgctattgacaatttacggttgtcttcggaaaa

SEQ ID NO: 544524 - DNA, 33 bp, Homo sapien
tgctattgacaatttatggttgtcttcggaaaa

SEQ ID NO: 544525 - DNA, 33 bp, Homo sapien
tttaactgccaagcaacgctgacacagggagcc

SEQ ID NO: 544526 - DNA, 33 bp, Homo sapien
tttaactgccaagcaatgctgacacagggagcc

SEQ ID NO: 544527 - DNA, 33 bp, Homo sapien
agaagaggaaaatgtcacgtgaagacaagcaga

SEQ ID NO: 544528 - DNA, 33 bp, Homo sapien
agaagaggaaaatgtcgcgtgaagacaagcaga

SEQ ID NO: 544529 - DNA, 33 bp, Homo sapien
atttccagagccaacacggaagctcagtgtcag

SEQ ID NO: 544530 - DNA, 33 bp, Homo sapien
atttccagagccaacatggaagctcagtgtcag

SEQ ID NO: 544531 - DNA, 33 bp, Homo sapien
gaccttcctagcaaacacttccctgggaaactg

SEQ ID NO: 544532 - DNA, 33 bp, Homo sapien
gaccttcctagcaaactcttccctgggaaactg

SEQ ID NO: 544533 - DNA, 33 bp, Homo sapien
atactgaaggcagaacacacaccgaaaagaaaa

SEQ ID NO: 544534 - DNA, 33 bp, Homo sapien
atactgaaggcagaacgcacaccgaaaagaaaa

SEQ ID NO: 544535 - DNA, 33 bp, Homo sapien
acacagcagagcaaaaccttgcaccatctgaaa

SEQ ID NO: 544536 - DNA, 33 bp, Homo sapien
acacagcagagcaaaatcttgcaccatctgaaa

SEQ ID NO: 544537 - DNA, 33 bp, Homo sapien
caatagctatcaaaaacggtcacatatctaaaa

SEQ ID NO: 544538 - DNA, 33 bp, Homo sapien
caatagctatcaaaaatggtcacatatctaaaa

SEQ ID NO: 544539 - DNA, 33 bp, Homo sapien
tacagcttcattatgacgtttactggggaggga

SEQ ID NO: 544540 - DNA, 33 bp, Homo sapien
tacagcttcattatgatgtttactggggaggga

SEQ ID NO: 544541 - DNA, 33 bp, Homo sapien
aaagaaacaaacttccaccaggcagagttgatt

SEQ ID NO: 544542 - DNA, 33 bp, Homo sapien
aaagaaacaaacttccgccaggcagagttgatt

SEQ ID NO: 544543 - DNA, 33 bp, Homo sapien
agaagcctcaatactgcagtgatttggcaatct

SEQ ID NO: 544544 - DNA, 33 bp, Homo sapien
agaagcctcaatactgtagtgatttggcaatct

SEQ ID NO: 544545 - DNA, 33 bp, Homo sapien
tcatagccctcctggacggtcacagaacagctt

SEQ ID NO: 544546 - DNA, 33 bp, Homo sapien
tcatagccctcctggatggtcacagaacagctt

SEQ ID NO: 544547 - DNA, 33 bp, Homo sapien
gcagagaaccctagtgcatcacagtgagccttt

SEQ ID NO: 544548 - DNA, 33 bp, Homo sapien
gcagagaaccctagtgtatcacagtgagccttt

SEQ ID NO: 544549 - DNA, 33 bp, Homo sapien
taaagcacttttgagaacatttatctcacctag

SEQ ID NO: 544550 - DNA, 33 bp, Homo sapien
taaagcacttttgagaccatttatctcacctag

SEQ ID NO: 544551 - DNA, 33 bp, Homo sapien
tcattgtcggtagagacggcaataatgctggcc

SEQ ID NO: 544552 - DNA, 33 bp, Homo sapien
tcattgtcggtagagatggcaataatgctggcc

SEQ ID NO: 544553 - DNA, 33 bp, Homo sapien
cagatggagaaacaaccatagagtctaaaggga

SEQ ID NO: 544554 - DNA, 33 bp, Homo sapien
cagatggagaaacaacgatagagtctaaaggga

SEQ ID NO: 544555 - DNA, 33 bp, Homo sapien
ttactacttttctgagaagttagcttagggtgc

SEQ ID NO: 544556 - DNA, 33 bp, Homo sapien
ttactacttttctgaggagttagcttagggtgc

SEQ ID NO: 544557 - DNA, 33 bp, Homo sapien
tcagttacaccatctacaaagggaatgcactga

SEQ ID NO: 544558 - DNA, 33 bp, Homo sapien
tcagttacaccatctataaagggaatgcactga

SEQ ID NO: 544559 - DNA, 33 bp, Homo sapien
aatttgcagcctgtgaagaaccaaaaaacagtt

SEQ ID NO: 544560 - DNA, 33 bp, Homo sapien
aatttgcagcctgtgacgaaccaaaaaacagtt

SEQ ID NO: 544561 - DNA, 33 bp, Homo sapien
acttgagcccaaaatacgttaatgaaaatgcca

SEQ ID NO: 544562 - DNA, 33 bp, Homo sapien
acttgagcccaaaatatgttaatgaaaatgcca

SEQ ID NO: 544563 - DNA, 33 bp, Homo sapien
cctatgattgaccaaaactcggtgagtggcaca

SEQ ID NO: 544564 - DNA, 33 bp, Homo sapien
cctatgattgaccaaatctcggtgagtggcaca

SEQ ID NO: 544565 - DNA, 33 bp, Homo sapien
gctgacagtagaagtacagtgaaacttttcacc

SEQ ID NO: 544566 - DNA, 33 bp, Homo sapien
gctgacagtagaagtatagtgaaacttttcacc

SEQ ID NO: 544567 - DNA, 33 bp, Homo sapien
aagaaaccaccacttgcagagttttgatgttgc

SEQ ID NO: 544568 - DNA, 33 bp, Homo sapien
aagaaaccaccacttgtagagttttgatgttgc

SEQ ID NO: 544569 - DNA, 33 bp, Homo sapien
ttgattactctgactacagttgtacaattgacc

SEQ ID NO: 544570 - DNA, 33 bp, Homo sapien
ttgattactctgactatagttgtacaattgacc

SEQ ID NO: 544571 - DNA, 33 bp, Homo sapien
gaaagaaaagccaaaactgcgaaccgttgagtg

SEQ ID NO: 544572 - DNA, 33 bp, Homo sapien
gaaagaaaagccaaaattgcgaaccgttgagtg

SEQ ID NO: 544573 - DNA, 33 bp, Homo sapien
gtcattcagtctccaaatatttactaagcttct

SEQ ID NO: 544574 - DNA, 33 bp, Homo sapien
gtcattcagtctccaagtatttactaagcttct

SEQ ID NO: 544575 - DNA, 33 bp, Homo sapien
catactgttaagcaaggagattgtatttattac

SEQ ID NO: 544576 - DNA, 33 bp, Homo sapien
catactgttaagcaagtagattgtatttattac

SEQ ID NO: 544577 - DNA, 33 bp, Homo sapien
taggacctccaagtgacgagaggctttaagctt

SEQ ID NO: 544578 - DNA, 33 bp, Homo sapien
taggacctccaagtgatgagaggctttaagctt

SEQ ID NO: 544579 - DNA, 33 bp, Homo sapien
ttgagattaaccccggacaacaacatagcccag

SEQ ID NO: 544580 - DNA, 33 bp, Homo sapien
ttgagattaaccccgggcaacaacatagcccag

SEQ ID NO: 544581 - DNA, 33 bp, Homo sapien
agcaaagattcagtgaaccagagcatcagaagc

SEQ ID NO: 544582 - DNA, 33 bp, Homo sapien
agcaaagattcagtgacccagagcatcagaagc

SEQ ID NO: 544583 - DNA, 33 bp, Homo sapien
attgtgtctacactaacgttgtgtccaaaattc

SEQ ID NO: 544584 - DNA, 33 bp, Homo sapien
attgtgtctacactaatgttgtgtccaaaattc

SEQ ID NO: 544585 - DNA, 33 bp, Homo sapien
ataacatttaaccatacagctgcattgacatac

SEQ ID NO: 544586 - DNA, 33 bp, Homo sapien
ataacatttaaccatatagctgcattgacatac

SEQ ID NO: 544587 - DNA, 33 bp, Homo sapien
ctgtcagctgagggcccaggggatttctcatca

SEQ ID NO: 544588 - DNA, 33 bp, Homo sapien
ctgtcagctgagggcctaggggatttctcatca

SEQ ID NO: 544589 - DNA, 33 bp, Homo sapien
cacctagaaaagtgtaagactcacaaatttgct

SEQ ID NO: 544590 - DNA, 33 bp, Homo sapien
cacctagaaaagtgtaggactcacaaatttgct

SEQ ID NO: 544591 - DNA, 33 bp, Homo sapien
tttttctacttgcttacctttatgttccaaatt

SEQ ID NO: 544592 - DNA, 33 bp, Homo sapien
tttttctacttgcttagctttatgttccaaatt

SEQ ID NO: 544593 - DNA, 33 bp, Homo sapien
tagttgaaaccgtcacaaaggcattgtatagaa

SEQ ID NO: 544594 - DNA, 33 bp, Homo sapien
tagttgaaaccgtcacgaaggcattgtatagaa

SEQ ID NO: 544595 - DNA, 33 bp, Homo sapien
tcatggtggagtatggcatcctgtacaaacaaa

SEQ ID NO: 544596 - DNA, 33 bp, Homo sapien
tcatggtggagtatggtatcctgtacaaacaaa

SEQ ID NO: 544597 - DNA, 33 bp, Homo sapien
acctttggcagatggaatagtatttgaatacac

SEQ ID NO: 544598 - DNA, 33 bp, Homo sapien
acctttggcagatggagtagtatttgaatacac

SEQ ID NO: 544599 - DNA, 33 bp, Homo sapien
agtctgtcattctgcaagccatgcatacggctg

SEQ ID NO: 544600 - DNA, 33 bp, Homo sapien
agtctgtcattctgcaggccatgcatacggctg

SEQ ID NO: 544601 - DNA, 33 bp, Homo sapien
agacatagtaacatctcaagtattttccagctc

SEQ ID NO: 544602 - DNA, 33 bp, Homo sapien
agacatagtaacatctgaagtattttccagctc

SEQ ID NO: 544603 - DNA, 33 bp, Homo sapien
cctacaacctcaataaccctatgaaagcccatt

SEQ ID NO: 544604 - DNA, 33 bp, Homo sapien
cctacaacctcaataatcctatgaaagcccatt

SEQ ID NO: 544605 - DNA, 33 bp, Homo sapien
ttttcacctcttattccgaaactcaaaatggga

SEQ ID NO: 544606 - DNA, 33 bp, Homo sapien
ttttcacctcttattctgaaactcaaaatggga

SEQ ID NO: 544607 - DNA, 33 bp, Homo sapien
ggagtggtttgatgcagaatccaatgtgccaaa

SEQ ID NO: 544608 - DNA, 33 bp, Homo sapien
ggagtggtttgatgcataatccaatgtgccaaa

SEQ ID NO: 544609 - DNA, 33 bp, Homo sapien
ggtaaaatttttcagacccatcatcggtgggtc

SEQ ID NO: 544610 - DNA, 33 bp, Homo sapien
ggtaaaatttttcagatccatcatcggtgggtc

SEQ ID NO: 544611 - DNA, 33 bp, Homo sapien
gtatagattatggtgacacgtcataactcattg

SEQ ID NO: 544612 - DNA, 33 bp, Homo sapien
gtatagattatggtgatacgtcataactcattg

SEQ ID NO: 544613 - DNA, 33 bp, Homo sapien
aatgtgggctcttatagtagactgctcaggttc

SEQ ID NO: 544614 - DNA, 33 bp, Homo sapien
aatgtgggctcttatattagactgctcaggttc

SEQ ID NO: 544615 - DNA, 33 bp, Homo sapien
aatttagttgacgtaaagaagttgaaaacactg

SEQ ID NO: 544616 - DNA, 33 bp, Homo sapien
aatttagttgacgtaaggaagttgaaaacactg

SEQ ID NO: 544617 - DNA, 33 bp, Homo sapien
acacataactaaaggcaagggctaatgggatgt

SEQ ID NO: 544618 - DNA, 33 bp, Homo sapien
acacataactaaaggcgagggctaatgggatgt

SEQ ID NO: 544619 - DNA, 33 bp, Homo sapien
ctgcaaagacaaacaaccagggagcaagcaaaa

SEQ ID NO: 544620 - DNA, 33 bp, Homo sapien
ctgcaaagacaaacaatcagggagcaagcaaaa

SEQ ID NO: 544621 - DNA, 33 bp, Homo sapien
cattcagatcgcaccaactgatatttaagtctc

SEQ ID NO: 544622 - DNA, 33 bp, Homo sapien
cattcagatcgcaccagctgatatttaagtctc

SEQ ID NO: 544623 - DNA, 33 bp, Homo sapien
acttatttgcatgtctcactgtttagtagtgtt

SEQ ID NO: 544624 - DNA, 33 bp, Homo sapien
acttatttgcatgtcttactgtttagtagtgtt

SEQ ID NO: 544625 - DNA, 33 bp, Homo sapien
aaaaaacaagaataaagttcatgagagcgagtg

SEQ ID NO: 544626 - DNA, 33 bp, Homo sapien
aaaaaacaagaataaatttcatgagagcgagtg

SEQ ID NO: 544627 - DNA, 33 bp, Homo sapien
gctattcttgcttgaccgaataactgaaccaca

SEQ ID NO: 544628 - DNA, 33 bp, Homo sapien
gctattcttgcttgactgaataactgaaccaca

SEQ ID NO: 544629 - DNA, 33 bp, Homo sapien
catccagctagatgaaaccaggtgattgagttc

SEQ ID NO: 544630 - DNA, 33 bp, Homo sapien
catccagctagatgaagccaggtgattgagttc

SEQ ID NO: 544631 - DNA, 33 bp, Homo sapien
ttctaatatctcccaccggtattctactcttct

SEQ ID NO: 544632 - DNA, 33 bp, Homo sapien
ttctaatatctcccactggtattctactcttct

SEQ ID NO: 544633 - DNA, 33 bp, Homo sapien
tgtaaacagcacaaaagtcagaaacattatagc

SEQ ID NO: 544634 - DNA, 33 bp, Homo sapien
tgtaaacagcacaaaattcagaaacattatagc

SEQ ID NO: 544635 - DNA, 33 bp, Homo sapien
acagatgttttgtaagacacttgcagttaattt

SEQ ID NO: 544636 - DNA, 33 bp, Homo sapien
acagatgttttgtaaggcacttgcagttaattt

SEQ ID NO: 544637 - DNA, 33 bp, Homo sapien
tgacattacagagcaacagtcttgagaaaccct

SEQ ID NO: 544638 - DNA, 33 bp, Homo sapien
tgacattacagagcaatagtcttgagaaaccct

SEQ ID NO: 544639 - DNA, 33 bp, Homo sapien
cctgaccagcatataaatcattgttcacatttt

SEQ ID NO: 544640 - DNA, 33 bp, Homo sapien
cctgaccagcatataagtcattgttcacatttt

SEQ ID NO: 544641 - DNA, 33 bp, Homo sapien
gcttccagtgaccctcaaagttgttactgtatt

SEQ ID NO: 544642 - DNA, 33 bp, Homo sapien
gcttccagtgaccctcgaagttgttactgtatt

SEQ ID NO: 544643 - DNA, 33 bp, Homo sapien
tcctatcaagacacatgaatatcctttgtagta

SEQ ID NO: 544644 - DNA, 33 bp, Homo sapien
tcctatcaagacacattaatatcctttgtagta

SEQ ID NO: 544645 - DNA, 33 bp, Homo sapien
tgagacgatcattcagattgaggtagcagcagg

SEQ ID NO: 544646 - DNA, 33 bp, Homo sapien
tgagacgatcattcaggttgaggtagcagcagg

SEQ ID NO: 544647 - DNA, 33 bp, Homo sapien
atagagactttacagaaaatgattgactcccaa

SEQ ID NO: 544648 - DNA, 33 bp, Homo sapien
atagagactttacagataatgattgactcccaa

SEQ ID NO: 544649 - DNA, 33 bp, Homo sapien
aattcagctggtctgacggtgaacactcaagat

SEQ ID NO: 544650 - DNA, 33 bp, Homo sapien
aattcagctggtctgatggtgaacactcaagat

SEQ ID NO: 544651 - DNA, 33 bp, Homo sapien
atggttgtgcccctgaatacagcaatggacctt

SEQ ID NO: 544652 - DNA, 33 bp, Homo sapien
atggttgtgcccctgagtacagcaatggacctt

SEQ ID NO: 544653 - DNA, 33 bp, Homo sapien
tttagaaattgcccaccatattattgtccactg

SEQ ID NO: 544654 - DNA, 33 bp, Homo sapien
tttagaaattgcccactatattattgtccactg

SEQ ID NO: 544655 - DNA, 33 bp, Homo sapien
ctcttcatgataaaaaaaattactctgagaaaa

SEQ ID NO: 544656 - DNA, 33 bp, Homo sapien
ctcttcatgataaaaataattactctgagaaaa

SEQ ID NO: 544657 - DNA, 33 bp, Homo sapien
gctaattttaacagaacgagtcccagcttatcc

SEQ ID NO: 544658 - DNA, 33 bp, Homo sapien
gctaattttaacagaaggagtcccagcttatcc

SEQ ID NO: 544659 - DNA, 33 bp, Homo sapien
gtcaggtgtggtttcaataatccaatcagtaca

SEQ ID NO: 544660 - DNA, 33 bp, Homo sapien
gtcaggtgtggtttcagtaatccaatcagtaca

SEQ ID NO: 544661 - DNA, 33 bp, Homo sapien
aggtctcatggaggtaaccagatattttccatt

SEQ ID NO: 544662 - DNA, 33 bp, Homo sapien
aggtctcatggaggtagccagatattttccatt

SEQ ID NO: 544663 - DNA, 33 bp, Homo sapien
atgcttcctccaacgccgagaaaaacttcctgg

SEQ ID NO: 544664 - DNA, 33 bp, Homo sapien
atgcttcctccaacgctgagaaaaacttcctgg

SEQ ID NO: 544665 - DNA, 33 bp, Homo sapien
gttgttgtcaggaggacgggaactgcagttttc

SEQ ID NO: 544666 - DNA, 33 bp, Homo sapien
gttgttgtcaggaggatgggaactgcagttttc

SEQ ID NO: 544667 - DNA, 33 bp, Homo sapien
aagatgcgcaattaaaaattaaaaacaataaag

SEQ ID NO: 544668 - DNA, 33 bp, Homo sapien
aagatgcgcaattaaacattaaaaacaataaag

SEQ ID NO: 544669 - DNA, 33 bp, Homo sapien
ctcagcatagttaaaacatcatgtcctgagctg

SEQ ID NO: 544670 - DNA, 33 bp, Homo sapien
ctcagcatagttaaaatatcatgtcctgagctg

SEQ ID NO: 544671 - DNA, 33 bp, Homo sapien
cttcaagtcctggcaaacattttctctccaagt

SEQ ID NO: 544672 - DNA, 33 bp, Homo sapien
cttcaagtcctggcaagcattttctctccaagt

SEQ ID NO: 544673 - DNA, 33 bp, Homo sapien
tcaatggattttgcaacagcccaaagctgtcag

SEQ ID NO: 544674 - DNA, 33 bp, Homo sapien
tcaatggattttgcaatagcccaaagctgtcag

SEQ ID NO: 544675 - DNA, 33 bp, Homo sapien
ccaaactatacagccagaacgtagcagatatta

SEQ ID NO: 544676 - DNA, 33 bp, Homo sapien
ccaaactatacagccataacgtagcagatatta

SEQ ID NO: 544677 - DNA, 33 bp, Homo sapien
tgcaataaactgaaaccattagtgctatttgca

SEQ ID NO: 544678 - DNA, 33 bp, Homo sapien
tgcaataaactgaaacgattagtgctatttgca

SEQ ID NO: 544679 - DNA, 33 bp, Homo sapien
agaccgtgtaaccaagaccactgattcagaagt

SEQ ID NO: 544680 - DNA, 33 bp, Homo sapien
agaccgtgtaaccaaggccactgattcagaagt

SEQ ID NO: 544681 - DNA, 33 bp, Homo sapien
tttgagtatttcttcagagcaccatgaaaacaa

SEQ ID NO: 544682 - DNA, 33 bp, Homo sapien
tttgagtatttcttcatagcaccatgaaaacaa

SEQ ID NO: 544683 - DNA, 33 bp, Homo sapien
gagccagaagctgtagcaggtatgacttgcctg

SEQ ID NO: 544684 - DNA, 33 bp, Homo sapien
gagccagaagctgtaggaggtatgacttgcctg

SEQ ID NO: 544685 - DNA, 33 bp, Homo sapien
gagaaatggactcacaatcaaaaaggatggttt

SEQ ID NO: 544686 - DNA, 33 bp, Homo sapien
gagaaatggactcacagtcaaaaaggatggttt

SEQ ID NO: 544687 - DNA, 33 bp, Homo sapien
gataaagaaggggggaaaaagacatcacattga

SEQ ID NO: 544688 - DNA, 33 bp, Homo sapien
gataaagaaggggggagaaagacatcacattga

SEQ ID NO: 544689 - DNA, 33 bp, Homo sapien
caaattaatttgaaacccgtttgatggggactt

SEQ ID NO: 544690 - DNA, 33 bp, Homo sapien
caaattaatttgaaactcgtttgatggggactt

SEQ ID NO: 544691 - DNA, 33 bp, Homo sapien
tttagatcagagcccactcttcctctcttgtgt

SEQ ID NO: 544692 - DNA, 33 bp, Homo sapien
tttagatcagagcccattcttcctctcttgtgt

SEQ ID NO: 544693 - DNA, 33 bp, Homo sapien
ctccttcttcaataaacagcagttgacatggaa

SEQ ID NO: 544694 - DNA, 33 bp, Homo sapien
ctccttcttcaataaatagcagttgacatggaa

SEQ ID NO: 544695 - DNA, 33 bp, Homo sapien
gtaacaagggacctgacagatttgggatggtgg

SEQ ID NO: 544696 - DNA, 33 bp, Homo sapien
gtaacaagggacctgatagatttgggatggtgg

SEQ ID NO: 544697 - DNA, 33 bp, Homo sapien
cgttctttccagaaaaacttagtgcaaagagaa

SEQ ID NO: 544698 - DNA, 33 bp, Homo sapien
cgttctttccagaaaaccttagtgcaaagagaa

SEQ ID NO: 544699 - DNA, 33 bp, Homo sapien
cagtgttgtgtacaaagggtgtcaagcagcatg

SEQ ID NO: 544700 - DNA, 33 bp, Homo sapien
cagtgttgtgtacaaatggtgtcaagcagcatg

SEQ ID NO: 544701 - DNA, 33 bp, Homo sapien
acatccatgtgcaacccgaataacatctgttaa

SEQ ID NO: 544702 - DNA, 33 bp, Homo sapien
acatccatgtgcaacctgaataacatctgttaa

SEQ ID NO: 544703 - DNA, 33 bp, Homo sapien
acttccagagagaaaacaatgatgaaaatcagc

SEQ ID NO: 544704 - DNA, 33 bp, Homo sapien
acttccagagagaaaataatgatgaaaatcagc

SEQ ID NO: 544705 - DNA, 33 bp, Homo sapien
accacattgctttcacagaacccaattctataa

SEQ ID NO: 544706 - DNA, 33 bp, Homo sapien
accacattgctttcacggaacccaattctataa

SEQ ID NO: 544707 - DNA, 33 bp, Homo sapien
ttgatgggattttgtaagaatagatactagctg

SEQ ID NO: 544708 - DNA, 33 bp, Homo sapien
ttgatgggattttgtacgaatagatactagctg

SEQ ID NO: 544709 - DNA, 33 bp, Homo sapien
ctcttcattgtaataaatgtacccactttgctt

SEQ ID NO: 544710 - DNA, 33 bp, Homo sapien
ctcttcattgtaataattgtacccactttgctt

SEQ ID NO: 544711 - DNA, 33 bp, Homo sapien
cttttcttgtatagacaaagcgatattcttgct

SEQ ID NO: 544712 - DNA, 33 bp, Homo sapien
cttttcttgtatagaccaagcgatattcttgct

SEQ ID NO: 544713 - DNA, 33 bp, Homo sapien
ctttggaacgacattcaattttacagtttttcc

SEQ ID NO: 544714 - DNA, 33 bp, Homo sapien
ctttggaacgacattccattttacagtttttcc

SEQ ID NO: 544715 - DNA, 33 bp, Homo sapien
tcttcctagaacaaacactcagggacagaggag

SEQ ID NO: 544716 - DNA, 33 bp, Homo sapien
tcttcctagaacaaacgctcagggacagaggag

SEQ ID NO: 544717 - DNA, 33 bp, Homo sapien
agatgcagttgtatgacgcaaactttcaatcca

SEQ ID NO: 544718 - DNA, 33 bp, Homo sapien
agatgcagttgtatgatgcaaactttcaatcca

SEQ ID NO: 544719 - DNA, 33 bp, Homo sapien
tgcctgaggtgattcgcatggtctcaaggccct

SEQ ID NO: 544720 - DNA, 33 bp, Homo sapien
tgcctgaggtgattcgtatggtctcaaggccct

SEQ ID NO: 544721 - DNA, 33 bp, Homo sapien
attgagactgttcccacgcatacttacctgtcg

SEQ ID NO: 544722 - DNA, 33 bp, Homo sapien
attgagactgttcccatgcatacttacctgtcg

SEQ ID NO: 544723 - DNA, 33 bp, Homo sapien
tctaacatttgtgataaaccctgaaagtcatcc

SEQ ID NO: 544724 - DNA, 33 bp, Homo sapien
tctaacatttgtgatagaccctgaaagtcatcc

SEQ ID NO: 544725 - DNA, 33 bp, Homo sapien
gcagatcattaattgacgtttgcagctgccaag

SEQ ID NO: 544726 - DNA, 33 bp, Homo sapien
gcagatcattaattgatgtttgcagctgccaag

SEQ ID NO: 544727 - DNA, 33 bp, Homo sapien
tgaagaaatagctatgcaagtcagacttacacc

SEQ ID NO: 544728 - DNA, 33 bp, Homo sapien
tgaagaaatagctatggaagtcagacttacacc

SEQ ID NO: 544729 - DNA, 33 bp, Homo sapien
gcctaaaataaatcagaaatcagtcagtactca

SEQ ID NO: 544730 - DNA, 33 bp, Homo sapien
gcctaaaataaatcaggaatcagtcagtactca

SEQ ID NO: 544731 - DNA, 33 bp, Homo sapien
gtctaagggttatatccagatgctcacttgttt

SEQ ID NO: 544732 - DNA, 33 bp, Homo sapien
gtctaagggttatatcgagatgctcacttgttt

SEQ ID NO: 544733 - DNA, 33 bp, Homo sapien
tctaagtaagcaaggcaacattgctgactatca

SEQ ID NO: 544734 - DNA, 33 bp, Homo sapien
tctaagtaagcaaggcgacattgctgactatca

SEQ ID NO: 544735 - DNA, 33 bp, Homo sapien
agtgaggtggttcagcagccaacaggctaacac

SEQ ID NO: 544736 - DNA, 33 bp, Homo sapien
agtgaggtggttcagcggccaacaggctaacac

SEQ ID NO: 544737 - DNA, 33 bp, Homo sapien
gatatcagcaagttgaaaatactttgtgatttg

SEQ ID NO: 544738 - DNA, 33 bp, Homo sapien
gatatcagcaagttgagaatactttgtgatttg

SEQ ID NO: 544739 - DNA, 33 bp, Homo sapien
caattatcagggaaccagaagtaaagatggtag

SEQ ID NO: 544740 - DNA, 33 bp, Homo sapien
caattatcagggaaccggaagtaaagatggtag

SEQ ID NO: 544741 - DNA, 33 bp, Homo sapien
gtttccagcccagggaaagccagttagagcatg

SEQ ID NO: 544742 - DNA, 33 bp, Homo sapien
gtttccagcccagggagagccagttagagcatg

SEQ ID NO: 544743 - DNA, 33 bp, Homo sapien
tgctcaatgccaatgaatcaatcctatttaaga

SEQ ID NO: 544744 - DNA, 33 bp, Homo sapien
tgctcaatgccaatgagtcaatcctatttaaga

SEQ ID NO: 544745 - DNA, 33 bp, Homo sapien
tctacttcttcatctacgtaattcctcttagct

SEQ ID NO: 544746 - DNA, 33 bp, Homo sapien
tctacttcttcatctatgtaattcctcttagct

SEQ ID NO: 544747 - DNA, 33 bp, Homo sapien
cactcatgacctaataagaggaaccacttaatt

SEQ ID NO: 544748 - DNA, 33 bp, Homo sapien
cactcatgacctaataggaggaaccacttaatt

SEQ ID NO: 544749 - DNA, 33 bp, Homo sapien
tgtcctcgatgatttaacttcatattttaaata

SEQ ID NO: 544750 - DNA, 33 bp, Homo sapien
tgtcctcgatgatttaccttcatattttaaata

SEQ ID NO: 544751 - DNA, 33 bp, Homo sapien
agtgactgggaacccgcagtagattagccacaa

SEQ ID NO: 544752 - DNA, 33 bp, Homo sapien
agtgactgggaacccgtagtagattagccacaa

SEQ ID NO: 544753 - DNA, 33 bp, Homo sapien
agagaatagggttttacactgtcatgtgggtcc

SEQ ID NO: 544754 - DNA, 33 bp, Homo sapien
agagaatagggttttatactgtcatgtgggtcc

SEQ ID NO: 544755 - DNA, 33 bp, Homo sapien
gcagtgaacaaaaactcaaatctctgtattatg

SEQ ID NO: 544756 - DNA, 33 bp, Homo sapien
gcagtgaacaaaaacttaaatctctgtattatg

SEQ ID NO: 544757 - DNA, 33 bp, Homo sapien
aattgtgcacttagtcccctgaaaatatccttg

SEQ ID NO: 544758 - DNA, 33 bp, Homo sapien
aattgtgcacttagtctcctgaaaatatccttg

SEQ ID NO: 544759 - DNA, 33 bp, Homo sapien
atcccattcaaacataactacttcaaactgtat

SEQ ID NO: 544760 - DNA, 33 bp, Homo sapien
atcccattcaaacatatctacttcaaactgtat

SEQ ID NO: 544761 - DNA, 33 bp, Homo sapien
gggcaacaacagttgacatatcgcctaagtgaa

SEQ ID NO: 544762 - DNA, 33 bp, Homo sapien
gggcaacaacagttgagatatcgcctaagtgaa

SEQ ID NO: 544763 - DNA, 33 bp, Homo sapien
tcaaggttaaaattacaagagggggctgaattc

SEQ ID NO: 544764 - DNA, 33 bp, Homo sapien
tcaaggttaaaattacgagagggggctgaattc

SEQ ID NO: 544765 - DNA, 33 bp, Homo sapien
tgacctatctagccgtaaagtgggtcatgcaca

SEQ ID NO: 544766 - DNA, 33 bp, Homo sapien
tgacctatctagccgtgaagtgggtcatgcaca

SEQ ID NO: 544767 - DNA, 33 bp, Homo sapien
taatgtgatagaccataaagaattcaggatcag

SEQ ID NO: 544768 - DNA, 33 bp, Homo sapien
taatgtgatagaccatcaagaattcaggatcag

SEQ ID NO: 544769 - DNA, 33 bp, Homo sapien
atcgtcatttagcagacgaagaactgagactca

SEQ ID NO: 544770 - DNA, 33 bp, Homo sapien
atcgtcatttagcagatgaagaactgagactca

SEQ ID NO: 544771 - DNA, 33 bp, Homo sapien
acacactttctcctaaacgctcagatttatatc

SEQ ID NO: 544772 - DNA, 33 bp, Homo sapien
acacactttctcctaaccgctcagatttatatc

SEQ ID NO: 544773 - DNA, 33 bp, Homo sapien
tcaagggtaaggattgccaaatcagtgcctgaa

SEQ ID NO: 544774 - DNA, 33 bp, Homo sapien
tcaagggtaaggattgtcaaatcagtgcctgaa

SEQ ID NO: 544775 - DNA, 33 bp, Homo sapien
aaagcactcaagaaacgaataaggggccaggcg

SEQ ID NO: 544776 - DNA, 33 bp, Homo sapien
aaagcactcaagaaactaataaggggccaggcg

SEQ ID NO: 544777 - DNA, 33 bp, Homo sapien
gtatgcagcaacgaatcactgcccccttgagct

SEQ ID NO: 544778 - DNA, 33 bp, Homo sapien
gtatgcagcaacgaatgactgcccccttgagct

SEQ ID NO: 544779 - DNA, 33 bp, Homo sapien
ccatagctcatcatttaaaaaaaattactttcc

SEQ ID NO: 544780 - DNA, 33 bp, Homo sapien
ccatagctcatcattttaaaaaaattactttcc

SEQ ID NO: 544781 - DNA, 33 bp, Homo sapien
agccgctggtgaactaaattatggaatataaat

SEQ ID NO: 544782 - DNA, 33 bp, Homo sapien
agccgctggtgaactagattatggaatataaat

SEQ ID NO: 544783 - DNA, 33 bp, Homo sapien
atttgcagcagatagaaatacagtcatgaatcc

SEQ ID NO: 544784 - DNA, 33 bp, Homo sapien
atttgcagcagatagagatacagtcatgaatcc

SEQ ID NO: 544785 - DNA, 33 bp, Homo sapien
tggagtctttgtaggacgaagacatgaggattc

SEQ ID NO: 544786 - DNA, 33 bp, Homo sapien
tggagtctttgtaggatgaagacatgaggattc

SEQ ID NO: 544787 - DNA, 33 bp, Homo sapien
gaaagaatgtatagaacggaacagagaaaacat

SEQ ID NO: 544788 - DNA, 33 bp, Homo sapien
gaaagaatgtatagaatggaacagagaaaacat

SEQ ID NO: 544789 - DNA, 33 bp, Homo sapien
tttaccaatttccaagcccatcattccttctta

SEQ ID NO: 544790 - DNA, 33 bp, Homo sapien
tttaccaatttccaagtccatcattccttctta

SEQ ID NO: 544791 - DNA, 33 bp, Homo sapien
tagaccaagaaatgctaagatctcattgtaaaa

SEQ ID NO: 544792 - DNA, 33 bp, Homo sapien
tagaccaagaaatgctgagatctcattgtaaaa

SEQ ID NO: 544793 - DNA, 33 bp, Homo sapien
ttttaccttgattaccactgcaaagatcatatc

SEQ ID NO: 544794 - DNA, 33 bp, Homo sapien
ttttaccttgattaccgctgcaaagatcatatc

SEQ ID NO: 544795 - DNA, 33 bp, Homo sapien
ctgcattccaaaggaacacagaagacatcctat

SEQ ID NO: 544796 - DNA, 33 bp, Homo sapien
ctgcattccaaaggaagacagaagacatcctat

SEQ ID NO: 544797 - DNA, 33 bp, Homo sapien
ttattatgactaaagcaactacaaatattctta

SEQ ID NO: 544798 - DNA, 33 bp, Homo sapien
ttattatgactaaagctactacaaatattctta

SEQ ID NO: 544799 - DNA, 33 bp, Homo sapien
atttccaaatagcaaactcccccaaataaaaaa

SEQ ID NO: 544800 - DNA, 33 bp, Homo sapien
atttccaaatagcaaattcccccaaataaaaaa

SEQ ID NO: 544801 - DNA, 33 bp, Homo sapien
atttattttttgctgactaggagtgagactggg

SEQ ID NO: 544802 - DNA, 33 bp, Homo sapien
atttattttttgctgattaggagtgagactggg

SEQ ID NO: 544803 - DNA, 33 bp, Homo sapien
agtagagagtatccaaagatttttccagctctt

SEQ ID NO: 544804 - DNA, 33 bp, Homo sapien
agtagagagtatccaaggatttttccagctctt

SEQ ID NO: 544805 - DNA, 33 bp, Homo sapien
tgagaaatcttccttgcaaggtgtcaggtccag

SEQ ID NO: 544806 - DNA, 33 bp, Homo sapien
tgagaaatcttccttgtaaggtgtcaggtccag

SEQ ID NO: 544807 - DNA, 33 bp, Homo sapien
gaaagagattgctggacggatgcagccaatggt

SEQ ID NO: 544808 - DNA, 33 bp, Homo sapien
gaaagagattgctggagggatgcagccaatggt

SEQ ID NO: 544809 - DNA, 33 bp, Homo sapien
tgctgcagaggtaaccacagaaatgttctgaag

SEQ ID NO: 544810 - DNA, 33 bp, Homo sapien
tgctgcagaggtaaccgcagaaatgttctgaag

SEQ ID NO: 544811 - DNA, 33 bp, Homo sapien
ctgcagtaggataacactattctgcttttggtc

SEQ ID NO: 544812 - DNA, 33 bp, Homo sapien
ctgcagtaggataacattattctgcttttggtc

SEQ ID NO: 544813 - DNA, 33 bp, Homo sapien
aaggtaaattgagtagaaggtttcactgggtga

SEQ ID NO: 544814 - DNA, 33 bp, Homo sapien
aaggtaaattgagtaggaggtttcactgggtga

SEQ ID NO: 544815 - DNA, 33 bp, Homo sapien
aatactaaataaaaaggatgctcaagatcaatg

SEQ ID NO: 544816 - DNA, 33 bp, Homo sapien
aatactaaataaaaagtatgctcaagatcaatg

SEQ ID NO: 544817 - DNA, 33 bp, Homo sapien
gtatgaagtattgaacaaaacagattcagactt

SEQ ID NO: 544818 - DNA, 33 bp, Homo sapien
gtatgaagtattgaacgaaacagattcagactt

SEQ ID NO: 544819 - DNA, 33 bp, Homo sapien
agtgatgataaaaatacgagaattgctagtgga

SEQ ID NO: 544820 - DNA, 33 bp, Homo sapien
agtgatgataaaaatatgagaattgctagtgga

SEQ ID NO: 544821 - DNA, 33 bp, Homo sapien
gaaccaacacaatgaacctctccaaatagtttc

SEQ ID NO: 544822 - DNA, 33 bp, Homo sapien
gaaccaacacaatgaagctctccaaatagtttc

SEQ ID NO: 544823 - DNA, 33 bp, Homo sapien
tgtgtgactgttcttacggccacatgctttaca

SEQ ID NO: 544824 - DNA, 33 bp, Homo sapien
tgtgtgactgttcttatggccacatgctttaca

SEQ ID NO: 544825 - DNA, 33 bp, Homo sapien
cagatggcctcaagtaactcagggtcaaagcat

SEQ ID NO: 544826 - DNA, 33 bp, Homo sapien
cagatggcctcaagtagctcagggtcaaagcat

SEQ ID NO: 544827 - DNA, 33 bp, Homo sapien
gctctatagaaataccaagatacccagatggcc

SEQ ID NO: 544828 - DNA, 33 bp, Homo sapien
gctctatagaaataccgagatacccagatggcc

SEQ ID NO: 544829 - DNA, 33 bp, Homo sapien
tgagcttcttagcctacacctatattctctgtc

SEQ ID NO: 544830 - DNA, 33 bp, Homo sapien
tgagcttcttagcctagacctatattctctgtc

SEQ ID NO: 544831 - DNA, 33 bp, Homo sapien
ggagtgctcttctcccacatcaaatccccttgt

SEQ ID NO: 544832 - DNA, 33 bp, Homo sapien
ggagtgctcttctcccgcatcaaatccccttgt

SEQ ID NO: 544833 - DNA, 33 bp, Homo sapien
gtcaaggtttcagtgaatagagatcgtgtcact

SEQ ID NO: 544834 - DNA, 33 bp, Homo sapien
gtcaaggtttcagtgagtagagatcgtgtcact

SEQ ID NO: 544835 - DNA, 33 bp, Homo sapien
gtcagaattttgtctcaaaaaggactgtggttg

SEQ ID NO: 544836 - DNA, 33 bp, Homo sapien
gtcagaattttgtctctaaaaggactgtggttg

SEQ ID NO: 544837 - DNA, 33 bp, Homo sapien
gaataatcctgtagaacggtatcataccaaatc

SEQ ID NO: 544838 - DNA, 33 bp, Homo sapien
gaataatcctgtagaatggtatcataccaaatc
